United States Patent Application Publication US 2018/0126003 A1 - sequence listing, part 66

SEQ ID NO: 118763 - DNA, 4011 bp, Artificial Sequence
  derived and/or modified sequence
atgaccctggacagacccggcgagggcgccaccatgctgaagaccttcaccgtgctgctgttctgcatcagaatgagcctgggcatgaccagcatcgtgatggacccccagcccgagctgtggatcgagagcaactacccccaggccccctgggagaacatcaccctgtggtgcagaagccccagcagaatcagcagcaagttcctgctgctgaaggacaagacccagatgacctggatcagacccagccacaagaccttccaggtgagcttcctgatcggcgccctgaccgagagcaacgccggcctgtacagatgctgctactggaaggagaccggctggagcaagcccagcaaggtgctggagctggaggcccccggccagctgcccaagcccatcttctggatccaggccgagacccccgccctgcccggctgcaacgtgaacatcctgtgccacggctggctgcaggacctggtgttcatgctgttcaaggagggctacgccgagcccgtggactaccaggtgcccaccggcaccatggccatcttcagcatcgacaacctgacccccgaggacgagggcgtgtacatctgcagaacccacatccagatgctgcccaccctgtggagcgagcccagcaaccccctgaagctggtggtggccggcctgtaccccaagcccaccctgaccgcccaccccggccccatcatggcccccggcgagagcctgaacctgagatgccagggccccatctacggcatgaccttcgccctgatgagagtggaggacctggagaagagcttctaccacaagaagaccatcaagaacgaggccaacttcttcttccagagcctgaagatccaggacaccggccactacctgtgcttctactacgacgccagctacagaggcagcctgctgagcgacgtgctgaagatctgggtgaccgacaccttccccaagacctggctgctggccagacccagcgccgtggtgcagatgggccagaacgtgagcctgagatgcagaggccccgtggacggcgtgggcctggccctgtacaagaagggcgaggacaagcccctgcagttcctggacgccaccagcatcgacgacaacaccagcttcttcctgaacaacgtgacctacagcgacaccggcatctacagctgccactacctgctgacctggaagaccagcatcagaatgcccagccacaacaccgtggagctgatggtggtggacaagccccccaagcccagcctgagcgcctggcccagcaccgtgttcaagctgggcaaggccatcaccctgcagtgcagagtgagccaccccgtgctggagttcagcctggagtgggaggagagagagaccttccagaagttcagcgtgaacggcgacttcatcatcagcaacgtggacggcaagggcaccggcacctacagctgcagctacagagtggagacccaccccaacatctggagccacagaagcgagcccctgaagctgatgggccccgccggctacctgacctggaactacgtgctgaacgaggccatcagactgagcctgatcatgcagctggtggccctgctgctggtggtgctgtggatcagatggaagtgcagaagactgagaatcagagaggcctggctgctgggcaccgcccagggcgtgaccatgctgttcatcgtgaccgccctgctgtgctgcggcctgtgcaacggcgtgctgatcgaggagaccgagatcgtgatgcccacccccaagcccgagctgtgggccgagaccaacttccccctggccccctggaagaacctgaccctgtggtgcagaagccccagcggcagcaccaaggagttcgtgctgctgaaggacggcaccggctggatcgccaccagacccgccagcgagcaggtgagagccgccttccccctgggcgccctgacccagagccacaccggcagctaccactgccacagctgggaggagatggccgtgagcgagcccagcgaggccctggagctggtgggcaccgacatcctgcccaagcccgtgatcagcgccagccccaccatcagaggccaggagctgcagctgagatgcaagggctggctggccggcatgggcttcgccctgtacaaggagggcgagcaggagcccgtgcagcagctgggcgccgtgggcagagaggccttcttcaccatccagagaatggaggacaaggacgagggcaactacagctgcagaacccacaccgagaagagacccttcaagtggagcgagcccagcgagcccctggagctggtgatcaaggagatgtaccccaagcccttcttcaagacctgggccagccccgtggtgacccccggcgccagagtgaccttcaactgcagcaccccccaccagcacatgagcttcatcctgtacaaggacggcagcgagatcgccagcagcgacagaagctgggccagccccggcgccagcgccgcccacttcctgatcatcagcgtgggcatcggcgacggcggcaactacagctgcagatactacgacttcagcatctggagcgagcccagcgaccccgtggagctggtggtgaccgagttctaccccaagcccaccctgctggcccagcccggccccgtggtgttccccggcaagagcgtgatcctgagatgccagggcaccttccagggcatgagattcgccctgctgcaggagggcgcccacgtgcccctgcagttcagaagcgtgagcggcaacagcgccgacttcctgctgcacaccgtgggcgccgaggacagcggcaactacagctgcatctactacgagaccaccatgagcaacagaggcagctacctgagcatgcccctgatgatctgggtgaccgacaccttccccaagccctggctgttcgccgagcccagcagcgtggtgcccatgggccagaacgtgaccctgtggtgcagaggccccgtgcacggcgtgggctacatcctgcacaaggagggcgaggccaccagcatgcagctgtggggcagcaccagcaacgacggcgccttccccatcaccaacatcagcggcaccagcatgggcagatacagctgctgctaccaccccgactggaccagcagcatcaagatccagcccagcaacaccctggagctgctggtgaccggcctgctgcccaagcccagcctgctggcccagcccggccccatggtggcccccggcgagaacatgaccctgcagtgccagggcgagctgcccgacagcaccttcgtgctgctgaaggagggcgcccaggagcccctggagcagcagagacccagcggctacagagccgacttctggatgcccgccgtgagaggcgaggacagcggcatctacagctgcgtgtactacctggacagcacccccttcgccgccagcaaccacagcgacagcctggagatctgggtgaccgacaagccccccaagcccagcctgagcgcctggcccagcaccatgttcaagctgggcaaggacatcaccctgcagtgcagaggccccctgcccggcgtggagttcgtgctggagcacgacggcgaggaggccccccagcagttcagcgaggacggcgacttcgtgatcaacaacgtggagggcaagggcatcggcaactacagctgcagctacagactgcaggcctaccccgacatctggagcgagcccagcgaccccctggagctggtgggcgccgccggccccgtggcccaggagtgcaccgtgggcaacatcgtgagaagcagcctgatcgtggtggtggtggtggccctgggcgtggtgctggccatcgagtggaagaagtggcccagactgagaaccagaggcagcgagaccgacggcagagaccagaccatcgccctggaggagtgcaaccaggagggcgagcccggcacccccgccaacagccccagcagcaccagccagagaatcagcgtggagctgcccgtgcccatctag

SEQ ID NO: 118764 - protein, 756 aa, Artificial Sequence
  derived and/or modified sequence
MSWSPSLTTQTCGAWEMKERLGTGGFGNVIRWHNQETGEQIAIKQCRQELSPRNRERWCLEIQIMRRLTHPNVVAARDVPEGMQNLAPNDLPLLAMEYCQGGDLRKYLNQFENCCGLREGAILTLLSDIASALRYLHENRIIHRDLKPENIVLQQGEQRLIHKIIDLGYAKELDQGSLCTSFVGTLQYLAPELLEQQKYTVTVDYWSFGTLAFECITGFRPFLPNWQPVQWHSKVRQKSEVDIVVSEDLNGTVKFSSSLPYPNNLNSVLAERLEKWLQLMLMWHPRQRGTDPTYGPNGCFKALDDILNLKLVHILNMVTGTIHTYPVTEDESLQSLKARIQQDTGIPEEDQELLQEAGLALIPDKPATQCISDGKLNEGHTLDMDLVFLFDNSKITYETQISPRPQPESVSCILQEPKRNLAFFQLRKVWGQVWHSIQTLKEDCNRLQQGQRAAMMNLLRNNSCLSKMKNSMASMSQQLKAKLDFFKTSIQIDLEKYSEQTEFGITSDKLLLAWREMEQAVELCGRENEVKLLVERMMALQTDIVDLQRSPMGRKQGGTLDDLEEQARELYRRLREKPRDQRTEGDSQEMVRLLLQAIQSFEKKVRVIYTQLSKTVVCKQKALELLPKVEEVVSLMNEDEKTVVRLQEKRQKELWNLLKIACSKVRGPVSGSPDSMNASRLSQPGQLMSQPSTASNSLPEPAKKSEELVAEAHNLCTLLENAIQDTVREQDQSFTALDWSWLQTEEEEHSCLEQAS

SEQ ID NO: 118765 - DNA, 2271 bp, Artificial Sequence
  derived and/or modified sequence
atgagttggagcccttcattaactacccagacatgcggcgcctgggaaatgaaggagcggttgggcacaggtggcttcggcaatgtaattcggtggcacaaccaggaaactggggaacaaatcgctataaaacagtgcagacaggaactctccccacggaatagggagcgatggtgcttagagatacaaataatgcgccgactcactcatccaaacgtggtggccgctcgcgacgtgcctgaagggatgcagaacttggcccctaatgacctccctctgctggcgatggagtactgccaggggggcgatcttcggaagtatctcaatcagttcgagaactgctgtggccttagagaaggagccatcctgacgctcctatcagacattgcatctgctctcagatacctgcatgagaatcggattattcacagggacctgaaacccgagaacatcgtgctgcaacaaggagagcaacggttgatccataaaatcatcgatctgggctacgcaaaagaactcgaccaaggcagcctctgtacaagctttgttggaaccttgcagtatttagcccccgagctactcgaacagcagaagtacacggtgaccgtcgactactggagtttcggcaccctagcctttgaatgcatcactggcttccgtcccttcctcccaaattggcagcctgtgcagtggcactcaaaggtcaggcagaaatctgaggtggacatcgtcgtttctgaagatctgaatggtaccgttaaattttctagctccctcccatatccaaataacctcaattccgttctggctgaacggctggagaaatggttgcagctgatgctgatgtggcatccacggcagcgcggaaccgatcctacatacggccctaatggatgttttaaggctttagacgacatcctaaacctcaaattggtacacattctaaacatggttacaggcaccattcacacttaccccgttacagaggacgaaagccttcagtctctcaaggccagaatccagcaggacacaggtatacctgaggaagatcaggaactgttacaggaggccggcctcgccctcatacccgataaaccggcaactcaatgtataagcgatggtaaactaaatgaaggtcatacattggatatggatctggtgtttctgttcgataacagcaagattacatacgagacacaaatctcccccaggccgcaaccagaaagcgtatcctgcatcctccaggagcctaagagaaatctggcattttttcaactgcgcaaggtctgggggcaggtttggcacagcatccagactttgaaggaagattgtaaccgactgcagcaagggcaaagagctgcaatgatgaatctgcttcgcaacaatagctgcctttccaaaatgaagaatagcatggcctccatgtctcagcagcttaaggcgaaacttgatttttttaaaacatctatccagattgatttggagaaatactcggagcagacggagttcggtataaccagtgacaaactgctgctggcgtggcgcgaaatggaacaggccgttgaactgtgcgggcgggaaaatgaagttaagctgctcgtcgaacgtatgatggccttacagacagacattgtcgacctgcagcgctcacccatggggaggaaacagggcggaaccctcgacgacttagaagagcaggctcgcgagttatatcgacggctgcgggagaaaccgagagaccagaggaccgaaggtgactcacaagaaatggtgcgtctactgctccaggctattcagtccttcgagaaaaaagtccgcgtgatctacacgcagctgagcaagaccgtcgtctgtaagcaaaaggcgcttgaattactgcctaaagtcgaggaagtggtttctctgatgaacgaagacgagaaaaccgttgttcgactgcaggaaaagcgtcagaaggaactttggaacctgctgaagatcgcttgttccaaagtgagagggccagtctcaggatctcctgactccatgaatgcgagccgccttagccagccagggcagctgatgagtcagccatccaccgccagcaattcccttcctgaacctgcaaagaagagtgaggagctggtggcagaggcacacaacctctgtactctgctcgagaacgcaatccaagacacagtacgggagcaagaccagagcttcaccgcgctggactggagctggctccagaccgaggaggaggagcactcttgtctcgagcaggccagttag

SEQ ID NO: 118766 - DNA, 3086 bp, Artificial Sequence
  derived and/or modified sequence
gtgacgtcagagcaggaagtgtttgaggaagtcgcgccgcgctgcccgcgttaagattcccgcattttaatgttttcaggggggtgtcatagccccgggtttggccgccccagccccgccttccccgccccggggagcccgccccctgccccgcgtccctgccgacagagttagcacgacatcagtatgagctggtcaccttccctgacaacgcagacatgtggggcctgggaaatgaaagagcgccttgggacagggggatttggaaatgtcatccgatggcacaatcaggaaacaggtgagcagattgccatcaagcagtgccggcaggagctcagcccccggaaccgagagcggtggtgcctggagatccagatcatgagaaggctgacccaccccaatgtggtggctgcccgagatgtccctgaggggatgcagaacttggcgcccaatgacctgcccctgctggccatggagtactgccaaggaggagatctccggaagtacctgaaccagtttgagaactgctgtggtctgcgggaaggtgccatcctcaccttgctgagtgacattgcctctgcgcttagataccttcatgaaaacagaatcatccatcgggatctaaagccagaaaacatcgtcctgcagcaaggagaacagaggttaatacacaaaattattgacctaggatatgccaaggagctggatcagggcagtctttgcacatcattcgtggggaccctgcagtacctggccccagagctactggagcagcagaagtacacagtgaccgtcgactactggagcttcggcaccctggcctttgagtgcatcacgggcttccggcccttcctccccaactggcagcccgtgcagtggcattcaaaagtgcggcagaagagtgaggtggacattgttgttagcgaagacttgaatggaacggtgaagttttcaagctctttaccctaccccaataatcttaacagtgtcctggctgagcgactggagaagtggctgcaactgatgctgatgtggcacccccgacagaggggcacggatcccacgtatgggcccaatggctgcttcaaggccctggatgacatcttaaacttaaagctggttcatatcttgaacatggtcacgggcaccatccacacctaccctgtgacagaggatgagagtctgcagagcttgaaggccagaatccaacaggacacgggcatcccagaggaggaccaggagctgctgcaggaagcgggcctggcgttgatccccgataagcctgccactcagtgtatttcagacggcaagttaaatgagggccacacattggacatggatcttgtttttctctttgacaacagtaaaatcacctatgagactcagatctccccacggccccaacctgaaagtgtcagctgtatccttcaagagcccaagaggaatctcgccttcttccagctgaggaaggtgtggggccaggtctggcacagcatccagaccctgaaggaagattgcaaccggctgcagcagggacagcgagccgccatgatgaatctcctccgaaacaacagctgcctctccaaaatgaagaattccatggcttccatgtctcagcagctcaaggccaagttggatttcttcaaaaccagcatccagattgacctggagaagtacagcgagcaaaccgagtttgggatcacatcagataaactgctgctggcctggagggaaatggagcaggctgtggagctctgtgggcgggagaacgaagtgaaactcctggtagaacggatgatggctctgcagaccgacattgtggacttacagaggagccccatgggccggaagcaggggggaacgctggacgacctagaggagcaagcaagggagctgtacaggagactaagggaaaaacctcgagaccagcgaactgagggtgacagtcaggaaatggtacggctgctgcttcaggcaattcagagcttcgagaagaaagtgcgagtgatctatacgcagctcagtaaaactgtggtttgcaagcagaaggcgctggaactgttgcccaaggtggaagaggtggtgagcttaatgaatgaggatgagaagactgttgtccggctgcaggagaagcggcagaaggagctctggaatctcctgaagattgcttgtagcaaggtccgtggtcctgtcagtggaagcccggatagcatgaatgcctctcgacttagccagcctgggcagctgatgtctcagccctccacggcctccaacagcttacctgagccagccaagaagagtgaagaactggtggctgaagcacataacctctgcaccctgctagaaaatgccatacaggacactgtgagggaacaagaccagagtttcacggccctagactggagctggttacagacggaagaagaagagcacagctgcctggagcaggcctcatgatgtggggggactcgaccccctgacatggggcagcccatagcaggccttgtgcagtggggggactcgaccccctgacatggggctgcctggagcaggccgcgtgacgtggggctgcctggccgcggctctcacatggtggttcctgctgcactgatggcccaggggtctctggtatccagatggagctctcgcttcctcagcagctgtgactttcacccaggacccaggacgcagccctccgtgggcactgccggcgccttgtctgcacactggaggtcctccattacagaggcccagcgcacatcgctggccccacaaacgttcaggggtacagccatggcagctccttcctctgccgtgagaaaagtgcttggagtacggtttgccacacacgtgactggacagtgtccaattcaaatctttcagggcagagtccgagcagcgcttggtgacagcctgtcctctcctgctctccaaaggccctgctccctgtcctctctcactttacagcttgtgtttcttctggattcagcttctcctaaacagacagtttaattatagttgcggcctggccccatcctcacttcctctttttatttcactgctgctaaaattgtgtttttacctac

SEQ ID NO: 118767 - DNA, 2271 bp, Artificial Sequence
  derived and/or modified sequence
atgtcctggagccccagcctgaccacccagacctgtggggcctgggagatgaaggagcggctgggcactggaggctttggaaatgtcatccgctggcacaaccaggagactggagagcagatcgccatcaagcagtgccggcaggagctgagccccaggaaccgggagcgctggtgcctggagatccagatcatgaggcggctgacccaccccaacgtggtggccgccagagatgtgcctgagggcatgcagaacctggccccaaatgacctgcccctgctggccatggagtactgccagggcggggacctgaggaagtacctgaaccagtttgagaactgctgcggcctgcgggagggcgccatcctgaccctgctgagtgacatcgccagcgccctgcgctacctgcacgagaaccgcatcatccaccgggacctgaagccagaaaatattgtgctgcagcagggcgagcagaggctcatccacaagatcatcgacctgggctacgccaaggagctggaccagggcagcctgtgcaccagctttgtgggcaccctgcagtacctggcccctgagctgctggagcagcagaagtacacagtgacagtggactactggagctttggcaccctggcctttgagtgcatcaccggcttccggcccttcctgcccaactggcagcctgtgcagtggcacagcaaggtgcggcagaagtctgaggtggacatcgtggtgtctgaggacctgaatggcaccgtgaagttcagcagcagcctgccctaccccaacaacctgaacagcgtgctggccgagcggctggagaagtggctgcagctgatgctgatgtggcacccccggcagaggggcacagaccccacctacggccccaacggctgcttcaaggccctggatgacatcctgaacctgaagctggtgcacatcctgaacatggtgacaggcaccatccacacctaccctgtgacagaagatgagagcctgcagagcctgaaggcccgcatccagcaggacaccggcatccctgaggaggaccaggagctgctgcaggaggccggcctggccctgatcccagacaagccagccacccagtgcatcagtgatggcaagctgaatgaaggccacaccctggacatggacctggtgttcctgtttgacaacagcaagatcacctatgagacccagatcagcccccggccccagcctgagagcgtgtcctgcatcctgcaggagcccaagaggaacctggccttcttccagctgaggaaggtgtggggccaggtgtggcacagcatccagaccctgaaggaggactgcaaccggctgcagcagggccagagagctgccatgatgaacctgctgaggaacaacagctgcctgagcaagatgaagaacagcatggcctccatgagccagcagctgaaggccaagctggacttcttcaagaccagcatccagattgacctggagaagtacagcgagcagacagaatttggcatcaccagtgacaagctgctgctggcctggagggagatggagcaggccgtggagctgtgtggcagagaaaatgaggtgaagctgctggtggagaggatgatggccctgcagacagacatcgtggacctgcagaggagccccatgggcaggaagcagggcggcaccctggatgacctggaggagcaggcccgggagctgtaccgccgcctgcgggagaagccccgggaccagaggacagaaggagacagccaggagatggtgcggctgctgctgcaggccatccagagctttgagaagaaggtgcgggtcatctacacccagctgagcaagacagtggtgtgcaagcagaaggccctggagctgctgcccaaggtggaggaggtggtgtccctgatgaatgaagatgagaagacagtggtgcggctgcaggagaagaggcagaaggagctgtggaacctgctgaagatcgcctgcagcaaggtgcggggccctgtgtctggcagcccagacagcatgaatgccagccggctgagccagcccggccagctgatgagccagcccagcacagccagcaacagcctgcctgagcccgccaagaagtctgaggagctggtggccgaggcccacaacctgtgcaccctgctggagaatgccatccaggacacagtgcgggagcaggaccagagcttcaccgccctggactggagctggctgcagacagaggaggaggagcacagctgcctggagcaggccagctag

SEQ ID NO: 118768 - DNA, 2271 bp, Artificial Sequence
  derived and/or modified sequence
atgagctggagccccagcctgaccacccagacctgcggcgcctgggaaatgaaggagaggctcggtacaggtggatttggcaatgtgatccggtggcacaatcaggaaacaggtgaacagattgctatcaaacagtgccgtcaagagctgagcccacgcaaccgagaaaggtggtgtctggagattcagattatgaggagactgactcaccccaacgtggtggccgccagagacgtgcctgaagggatgcagaacctggcccctaacgatcttcccttacttgcgatggaatactgtcagggaggagacctgcgcaagtaccttaaccagttcgagaattgctgtggtttaagggagggcgcaatcttgactctcctgtctgacatagcttcagcattacggtacttacacgagaatcggataatacatcgcgacctgaaacccgagaatatcgtcctccagcaaggagaacagcgcctgattcacaaaattattgacctcggatacgcaaaggaactggatcaaggtagcttatgtacttctttcgtgggcacactgcagtaccttgcccctgaactgctggagcagcagaagtatactgtgactgtggattattggagttttggcacgctagccttcgaatgtattacagggttcagaccttttctccccaattggcagcccgtgcaatggcattccaaagttcgccagaaatccgaggttgacattgtagtttcggaggatctgaacggtacagtgaagttctctagtagtctgccgtatccgaataaccttaactccgtgcttgctgaaagattagaaaagtggctccagctgatgttaatgtggcaccccagacaacgcggaacagaccccacctatgggccaaacgggtgttttaaggctttggatgatattctcaacctgaagctagtgcacatcctgaatatggtgacaggtaccatacatacataccctgtaacagaggatgaatcgttgcagtctctaaaagcacggattcagcaagacacgggcatccctgaagaggatcaagagctgctccaggaagcaggcctcgcactgatccctgacaagcccgccacccagtgtatctctgatggtaaattgaacgaaggtcacacattggacatggacctcgtcttcctcttcgataattcgaagatcacctacgaaactcaaataagccctcgccctcagcccgaaagtgtgtcatgcatcctgcaggaacctaaaagaaacctcgcgtttttccagttacggaaggtatgggggcaggtgtggcactccatccagacgctcaaagaggattgcaatcggcttcagcaaggccagagggctgctatgatgaatctcctcagaaataacagctgtctgtctaagatgaagaattccatggcctctatgtcacaacaactaaaagcgaaactagacttttttaaaaccagcatccagattgacttggagaaatactccgagcagaccgagttcgggattactagcgacaaactgctgctcgcctggagggaaatggaacaggccgtggagctttgcggaagggagaacgaagtgaaactgttggttgaacgaatgatggccctgcaaacagacatcgtggacttgcagaggtcacccatgggccggaaacagggcggcacattagatgatctggaagagcaggctagggagctttaccgacgcctccgggagaaacctagagatcagcgaactgagggagattctcaagagatggttaggctgctgttgcaggctattcagtctttcgagaagaaagtgagagtcatctacacccagcttagcaaaaccgtggtttgtaaacagaaggccttagaactgctccctaaggtcgaagaggtcgtgagtctcatgaacgaagacgaaaagacggtcgttcgcctgcaggagaagagacaaaaggagctctggaatcttcttaaaattgcatgctcgaaagtgagaggcccggtctcaggtagtccggattctatgaatgcaagccgactgtctcagccgggccagctcatgtctcagcctagcaccgcgtcaaacagcctgccagagccggccaagaaatcagaggaactcgtggcagaggcacataatctgtgcacactgctcgagaatgccattcaggacacagtgcgggaacaggaccaatccttcacggccctcgactggagttggctgcaaactgaggaggaggagcattcctgccttgaacaagcatcttag

SEQ ID NO: 118769 - DNA, 2271 bp, Artificial Sequence
  derived and/or modified sequence
atgagctggtcccccagtttgaccacccaaacttgcggagcgtgggaaatgaaggaacggctcggtacgggcggattcggtaacgtgatacgttggcacaatcaggagaccggcgagcagattgctattaagcagtgtagacaggaacttagtcctcgaaaccgcgaaaggtggtgcctggagattcagattatgcgcaggctaactcacccaaatgtagtggccgctcgggatgtccccgaaggaatgcagaatctggccccaaacgatttacccctattggcaatggaatattgccagggaggcgaccttagaaaatacctgaatcagttcgaaaactgctgcggattgagagagggggctatcctgactttactctcagatattgctagtgctctgaggtatctccatgaaaatagaatcatccacagggacctgaagccagagaacattgtactgcagcagggcgaacaaaggctcatccacaagatcatcgacctggggtacgcaaaagaacttgaccagggatctctgtgcacaagcttcgtgggcaccctgcaatacctagccccagaactgttagagcagcaaaagtacactgttactgttgactattggtctttcggcaccttggcatttgaatgcattacgggatttcgtccattcttgccaaactggcaaccagtgcaatggcattcaaaggttcgccaaaagagtgaggtggacatcgtggtgtccgaggacctgaacggaaccgtcaaatttagtagctcattgccctaccccaacaacctgaacagcgtcttggccgaacgcctggagaagtggttgcaactgatgctgatgtggcatcccagacaacgtggaactgaccccacgtacggccctaacggctgtttcaaggctctcgacgacattttgaatcttaaattggtgcatatcttgaatatggtgacagggaccatccatacttatcctgtcaccgaggacgaaagcctgcagtctctcaaggcccgaatacagcaggacaccgggataccagaagaagaccaggagctgttgcaggaggccggtctggctctgataccagataagcccgctacacagtgtattagtgatggaaaactgaacgaggggcacaccctggatatggaccttgtgtttctttttgataattcaaaaattacctatgagacccagatttcaccacgcccacaacctgagtcagttagctgtatactgcaggagcccaaacggaacctggctttctttcaactgcgaaaggtatggggacaggtatggcactccatccagaccttgaaagaagactgcaatcgactccaacagggccagcgagccgcaatgatgaacctgttgcgtaacaactcctgcctgagcaagatgaaaaactcgatggcctctatgtcccagcagctgaaagcaaaactggactttttcaagactagcatccagatcgacctggagaaatactccgaacaaaccgagttcggtataacatctgataaattgctattagcttggagagaaatggagcaagccgtggagctgtgcggcagggaaaacgaggtgaagcttctagtggagcggatgatggcgcttcagactgatatcgtggatctccagaggtcacccatgggaagaaagcagggaggcacacttgacgatttggaggagcaggctcgagaactgtatcggagattgagggagaagccaagggaccaacgcaccgagggcgactcacaagaaatggtgaggctactgctccaggctattcagagtttcgagaagaaggtgagggtcatctatactcagttgtcaaagacggtggtgtgtaagcagaaagccttggagctactgcccaaagtcgaggaggtggtgagccttatgaatgaggatgaaaaaacagtggtacgtctacaggaaaaacgccaaaaggaactgtggaacctgcttaagatcgcctgtagcaaagtccgcggaccggtttctggctcgccggattctatgaatgcttcccgcctcagtcagcccggtcagttaatgagtcagccgtcaaccgcatccaacagtttgccggaaccagctaagaagtcagaggaactcgtggcggaggcacataatctgtgtaccctgctggagaatgccatacaggacaccgtcagggagcaggatcagagcttcaccgctctagactggagctggttgcaaactgaggaagaggagcactcttgccttgagcaggcaagttag

SEQ ID NO: 118770 - DNA, 2271 bp, Artificial Sequence
  derived and/or modified sequence
atgagctggagccccagcctgaccacccagacctgcggcgcctgggagatgaaggagagactgggcaccggcggcttcggcaacgtgatcagatggcacaaccaggagaccggcgagcagatcgccatcaagcagtgcagacaggagctgagccccagaaacagagagagatggtgcctggagatccagatcatgagaagactgacccaccccaacgtggtggccgccagagacgtgcccgagggcatgcagaacctggcccccaacgacctgcccctgctggccatggagtactgccagggcggcgacctgagaaagtacctgaaccagttcgagaactgctgcggcctgagagagggcgccatcctgaccctgctgagcgacatcgccagcgccctgagatacctgcacgagaacagaatcatccacagagacctgaagcccgagaacatcgtgctgcagcagggcgagcagagactgatccacaagatcatcgacctgggctacgccaaggagctggaccagggcagcctgtgcaccagcttcgtgggcaccctgcagtacctggcccccgagctgctggagcagcagaagtacaccgtgaccgtggactactggagcttcggcaccctggccttcgagtgcatcaccggcttcagacccttcctgcccaactggcagcccgtgcagtggcacagcaaggtgagacagaagagcgaggtggacatcgtggtgagcgaggacctgaacggcaccgtgaagttcagcagcagcctgccctaccccaacaacctgaacagcgtgctggccgagagactggagaagtggctgcagctgatgctgatgtggcaccccagacagagaggcaccgaccccacctacggccccaacggctgcttcaaggccctggacgacatcctgaacctgaagctggtgcacatcctgaacatggtgaccggcaccatccacacctaccccgtgaccgaggacgagagcctgcagagcctgaaggccagaatccagcaggacaccggcatccccgaggaggaccaggagctgctgcaggaggccggcctggccctgatccccgacaagcccgccacccagtgcatcagcgacggcaagctgaacgagggccacaccctggacatggacctggtgttcctgttcgacaacagcaagatcacctacgagacccagatcagccccagaccccagcccgagagcgtgagctgcatcctgcaggagcccaagagaaacctggccttcttccagctgagaaaggtgtggggccaggtgtggcacagcatccagaccctgaaggaggactgcaacagactgcagcagggccagagagccgccatgatgaacctgctgagaaacaacagctgcctgagcaagatgaagaacagcatggccagcatgagccagcagctgaaggccaagctggacttcttcaagaccagcatccagatcgacctggagaagtacagcgagcagaccgagttcggcatcaccagcgacaagctgctgctggcctggagagagatggagcaggccgtggagctgtgcggcagagagaacgaggtgaagctgctggtggagagaatgatggccctgcagaccgacatcgtggacctgcagagaagccccatgggcagaaagcagggcggcaccctggacgacctggaggagcaggccagagagctgtacagaagactgagagagaagcccagagaccagagaaccgagggcgacagccaggagatggtgagactgctgctgcaggccatccagagcttcgagaagaaggtgagagtgatctacacccagctgagcaagaccgtggtgtgcaagcagaaggccctggagctgctgcccaaggtggaggaggtggtgagcctgatgaacgaggacgagaagaccgtggtgagactgcaggagaagagacagaaggagctgtggaacctgctgaagatcgcctgcagcaaggtgagaggccccgtgagcggcagccccgacagcatgaacgccagcagactgagccagcccggccagctgatgagccagcccagcaccgccagcaacagcctgcccgagcccgccaagaagagcgaggagctggtggccgaggcccacaacctgtgcaccctgctggagaacgccatccaggacaccgtgagagagcaggaccagagcttcaccgccctggactggagctggctgcagaccgaggaggaggagcacagctgcctggagcaggccagctag

SEQ ID NO: 118771 - protein, 578 aa, Artificial Sequence
  derived and/or modified sequence
MLPCLVVLLAALLSLRLGSDAHGTELPSPPSVWFEAEFFHHILHWTPIPNQSESTCYEVALLRYGIESWNSISNCSQTLSYDLTAVTLDLYHSNGYRARVRAVDGSRHSNWTVTNTRFSVDEVTLTVGSVNLEIHNGFILGKIQLPRPKMAPANDTYESIFSHFREYEIAIRKVPGNFTFTHKKVKHENFSLLTSGEVGEFCVQVKPSVASRSNKGMWSKEECISLTRQYFTVTNVIIFFAFVLLLSGALAYCLALQLYVRRRKKLPSVLLFKKPSPFIFISQRPSPETQDTIHPLDEEAFLKVSPELKNLDLHGSTDSGFGSTKPSLQTEEPQFLLPDPHPQADRTLGNREPPVLGDSCSSGSSNSTDSGICLQEPSLSPSTGPTWEQQVGSNSRGQDDSGIDLVQNSEGRAGDTQGGSALGHHSPPEPEVPGEEDPAAVAFQGYLRQTRCAEEKATKTGCLEEESPLTDGLGPKFGRCLVDEAGLHPPALAKGYLKQDPLEMTLASSGAPTGQWNQPTEEWSLLALSSCSDLGISDWSFAHDLAPLGCVAAPGGLLGSFNSDLVTLPLISSLQSSE

SEQ ID NO: 118772 - protein, 499 aa, Artificial Sequence
  derived and/or modified sequence
MSRTELPSPPSVWFEAEFFHHILHWTPIPNQSESTCYEVALLRYGIESWNSISNCSQTLSYDLTAVTLDLYHSNGYRARVRAVDGSRHSNWTVTNTRFSVDEVTLTVGSVNLEIHNGFILGKIQLPRPKMAPANDTYESIFSHFREYEIAIRKVPGNFTFTHKKVKHENFSLLTSGEVGEFCVQVKPSVASRSNKGMWSKEECISLTRQYFTVTNVIIFFAFVLLLSGALAYCLALQLYVRRRKKLPSVLLFKKPSPFIFISQRPSPETQDTIHPLDEEAFLKVSPELKNLDLHGSTDSGFGSTKPSLQTEEPQFLLPDPHPQADRTLGNREPPVLGDSCSSGSSNSTDSGICLQEPSLSPSTGPTWEQQVGSNSRGQDDSGIDLVQNSEGRAGDTQGGSALGHHSPPEPEVPGEEDPAAVAFQGYLRQTRCAEEKATKTGCLEEESPLTDGLGPKFGRCLVDEAGLHPPALAKGYLKQDPLEMTLASSGPNGTVEPAH

SEQ ID NO: 118773 - protein, 558 aa, Artificial Sequence
  derived and/or modified sequence
MSRTELPSPPSVWFEAEFFHHILHWTPIPNQSESTCYEVALLRYGIESWNSISNCSQTLSYDLTAVTLDLYHSNGYRARVRAVDGSRHSNWTVTNTRFSVDEVTLTVGSVNLEIHNGFILGKIQLPRPKMAPANDTYESIFSHFREYEIAIRKVPGNFTFTHKKVKHENFSLLTSGEVGEFCVQVKPSVASRSNKGMWSKEECISLTRQYFTVTNVIIFFAFVLLLSGALAYCLALQLYVRRRKKLPSVLLFKKPSPFIFISQRPSPETQDTIHPLDEEAFLKVSPELKNLDLHGSTDSGFGSTKPSLQTEEPQFLLPDPHPQADRTLGNREPPVLGDSCSSGSSNSTDSGICLQEPSLSPSTGPTWEQQVGSNSRGQDDSGIDLVQNSEGRAGDTQGGSALGHHSPPEPEVPGEEDPAAVAFQGYLRQTRCAEEKATKTGCLEEESPLTDGLGPKFGRCLVDEAGLHPPALAKGYLKQDPLEMTLASSGAPTGQWNQPTEEWSLLALSSCSDLGISDWSFAHDLAPLGCVAAPGGLLGSFNSDLVTLPLISSLQSSE

SEQ ID NO: 118774 - protein, 429 aa, Artificial Sequence
  derived and/or modified sequence
MAPANDTYESIFSHFREYEIAIRKVPGNFTFTHKKVKHENFSLLTSGEVGEFCVQVKPSVASRSNKGMWSKEECISLTRQYFTVTNVIIFFAFVLLLSGALAYCLALQLYVRRRKKLPSVLLFKKPSPFIFISQRPSPETQDTIHPLDEEAFLKVSPELKNLDLHGSTDSGFGSTKPSLQTEEPQFLLPDPHPQADRTLGNREPPVLGDSCSSGSSNSTDSGICLQEPSLSPSTGPTWEQQVGSNSRGQDDSGIDLVQNSEGRAGDTQGGSALGHHSPPEPEVPGEEDPAAVAFQGYLRQTRCAEEKATKTGCLEEESPLTDGLGPKFGRCLVDEAGLHPPALAKGYLKQDPLEMTLASSGAPTGQWNQPTEEWSLLALSSCSDLGISDWSFAHDLAPLGCVAAPGGLLGSFNSDLVTLPLISSLQSSE

SEQ ID NO: 118775 - DNA, 1737 bp, Artificial Sequence
  derived and/or modified sequence
atgctgccctgcctggtggtgctgctggccgccctgctgagcctgagactgggcagcgacgcccacggcaccgagctgcccagcccccccagcgtgtggttcgaggccgagttcttccaccacatcctgcactggacccccatccccaaccagagcgagagcacctgctacgaggtggccctgctgagatacggcatcgagagctggaacagcatcagcaactgcagccagaccctgagctacgacctgaccgccgtgaccctggacctgtaccacagcaacggctacagagccagagtgagagccgtggacggcagcagacacagcaactggaccgtgaccaacaccagattcagcgtggacgaggtgaccctgaccgtgggcagcgtgaacctggagatccacaacggcttcatcctgggcaagatccagctgcccagacccaagatggcccccgccaacgacacctacgagagcatcttcagccacttcagagagtacgagatcgccatcagaaaggtgcccggcaacttcaccttcacccacaagaaggtgaagcacgagaacttcagcctgctgaccagcggcgaggtgggcgagttctgcgtgcaggtgaagcccagcgtggccagcagaagcaacaagggcatgtggagcaaggaggagtgcatcagcctgaccagacagtacttcaccgtgaccaacgtgatcatcttcttcgccttcgtgctgctgctgagcggcgccctggcctactgcctggccctgcagctgtacgtgagaagaagaaagaagctgcccagcgtgctgctgttcaagaagcccagccccttcatcttcatcagccagagacccagccccgagacccaggacaccatccaccccctggacgaggaggccttcctgaaggtgagccccgagctgaagaacctggacctgcacggcagcaccgacagcggcttcggcagcaccaagcccagcctgcagaccgaggagccccagttcctgctgcccgacccccacccccaggccgacagaaccctgggcaacagagagccccccgtgctgggcgacagctgcagcagcggcagcagcaacagcaccgacagcggcatctgcctgcaggagcccagcctgagccccagcaccggccccacctgggagcagcaggtgggcagcaacagcagaggccaggacgacagcggcatcgacctggtgcagaacagcgagggcagagccggcgacacccagggcggcagcgccctgggccaccacagcccccccgagcccgaggtgcccggcgaggaggaccccgccgccgtggccttccagggctacctgagacagaccagatgcgccgaggagaaggccaccaagaccggctgcctggaggaggagagccccctgaccgacggcctgggccccaagttcggcagatgcctggtggacgaggccggcctgcacccccccgccctggccaagggctacctgaagcaggaccccctggagatgaccctggccagcagcggcgcccccaccggccagtggaaccagcccaccgaggagtggagcctgctggccctgagcagctgcagcgacctgggcatcagcgactggagcttcgcccacgacctggcccccctgggctgcgtggccgcccccggcggcctgctgggcagcttcaacagcgacctggtgaccctgcccctgatcagcagcctgcagagcagcgagtag

SEQ ID NO: 118776 - DNA, 1737 bp, Artificial Sequence
  derived and/or modified sequence
atgcttccctgtctggtcgtattgctggccgcccttttgagccttcgtctggggagtgatgcccatggcactgagctgccctccccaccatctgtgtggtttgaggcagaatttttccaccatattctccactggacccctatcccaaaccagtccgagtctacctgctatgaagtggccctactgagatacggtattgagtcttggaatagcatatctaattgttctcagactctgtcttatgatctaacggctgttacacttgatctataccactccaatgggtaccgggcaagggtccgagccgtagacggatcgcgacattcaaattggaccgtcaccaatactcgattcagcgtcgacgaagtaactctgaccgtcggctcagtaaaccttgagatccacaatgggtttattctcgggaaaatacaactaccacggccaaaaatggcaccggcaaatgatacctacgagagtattttttcccatttcagggagtacgagatcgcaattcgcaaggttccaggaaattttacgtttacccataagaaggtgaagcacgagaatttttcactactgacttccggagaggtaggagagttctgtgttcaagtaaaacccagtgtggcaagtcgctccaataaggggatgtggagcaaggaggaatgtatttctctgacccgtcagtactttacggtgacaaacgttataatcttcttcgcgttcgttctattactgtctggagctcttgcatactgccttgccctacaactgtatgttcggaggcgaaaaaaactgccaagcgtgctgctgttcaaaaaacccagcccttttatcttcattagccagcgaccatcccccgaaactcaggatactattcaccctttagatgaagaagctttcttgaaggtaagtcccgaactaaagaacttggatctccatggctcgaccgattcaggcttcgggagtaccaagccttctctccagactgaggaaccgcaatttttattacctgatccccatccccaggcggacaggactctggggaaccgcgagcccccagtactgggcgactcttgttcatcgggttctagtaatagtactgacagcggcatatgtctgcaggagcctagtctaagtcccagcaccggtcccacttgggagcaacaggtgggcagcaattcacgcggtcaagacgattcgggcatcgacttggttcagaatagtgaaggcagggctggtgatacacagggaggctctgccctgggtcatcactccccaccagagccagaggttcccggggaagaggacccagctgccgtcgcctttcaaggctacctgcgacagacaagatgcgctgaagagaaggcaacaaagaccggatgtctcgaagaagagagcccactgaccgacggccttggcccgaaattcggtcgatgccttgtggacgaggccggactgcacccacccgcccttgctaagggctacttaaagcaagatcctctagaaatgaccctcgcatcatccggcgcacccacggggcagtggaatcagcctaccgaagaatggtccctcttggcactgtcatcctgctcggacctgggcatatcagattggtcttttgctcacgaccttgcacctttaggctgtgtcgccgcacctggcggccttctgggcagtttcaatagcgacctcgtgacattacctttgataagctctctgcagagctcagagtag

SEQ ID NO: 118777 - DNA, 1737 bp, Artificial Sequence
  derived and/or modified sequence
atgctgccctgcctggtggtgctgctggccgccctgctgagcctgcggctgggcagtgatgcccacggcacagagctgcccagccccccatctgtgtggtttgaggccgagttcttccaccacatcctgcactggacccccatccccaaccagagcgagagcacctgctatgaggtggccctgctgcgctatggcatcgagagctggaacagcatcagcaactgcagccagaccctgtcctatgacctgacagctgtgaccctggacctgtaccacagcaatggctaccgggcccgggtgcgggctgtggatggcagccgccacagcaactggacagtgaccaacacccgcttctctgtggatgaggtgaccctgactgtgggctctgtgaacctggagatccacaacggcttcatcctgggcaagatccagctgccccggcccaagatggccccagccaatgacacctatgagagcatcttcagccacttccgggagtatgaaattgccatcaggaaggtgcccggcaacttcaccttcacccacaagaaggtgaagcatgagaacttcagcctgctgaccagcggggaggtgggggagttctgtgtgcaggtgaagcccagcgtggccagccgcagcaacaagggcatgtggagcaaggaggagtgcatcagcctgacccggcagtacttcaccgtgaccaacgtcatcatcttctttgcctttgtgctgctgctgagcggggccctggcctactgcctggccctgcagctgtatgtgagaagaaggaagaagctgcccagcgtgctgctcttcaagaagcccagccccttcatcttcatcagccagaggcccagccctgagacccaggacaccatccaccccctggatgaggaggccttcctgaaggtgtccccagagctgaagaacctggacctgcacggcagcacagattctggcttcggcagcaccaagcccagcctgcagacagaggagccccagttcctgctgcctgacccccacccccaggccgacaggaccctgggcaaccgggagccccctgtgctgggggacagctgcagcagcggcagcagcaacagcacagacagcggcatctgcctgcaggagcccagcctgagccccagcacaggccccacctgggagcagcaggtgggcagcaacagccggggccaggatgattctggaattgacctggtgcagaacagcgagggccgggccggggacacccagggcggcagcgccctgggccaccacagccccccagagcctgaggtgcctggagaggaggaccctgctgctgtggccttccagggctacctgcggcagacccgctgtgccgaggagaaggccaccaagacaggctgcctggaggaggagagccccctgacagatggcctgggccccaagtttggccgctgcctggtggatgaagctggcctgcaccccccagccctggccaagggctacctgaagcaggaccccctggagatgaccctggccagcagcggggcccccaccggccagtggaaccagcccacagaggagtggagcctgctggccctgagcagctgcagcgacctgggcatcagtgactggagctttgcccatgacctggcccccctgggctgtgtggccgcccctgggggcctgctgggcagcttcaacagcgacctggtgaccctgcccctcatcagcagcctgcagagcagcgagtag

SEQ ID NO: 118778 - DNA, 1737 bp, Artificial Sequence
  derived and/or modified sequence
atgctgccctgcctggtggtgctgctggccgccctgctgagcctgaggttgggaagcgatgcacatggcactgagcttccgagcccgcctagcgtttggtttgaagctgagttcttccaccacatcttgcattggacacccatccccaatcagtctgaatcaacatgttacgaagttgcactgctgcgctatggaattgagagttggaattccatctccaactgttcccaaacactatcctacgacctgacagctgtcaccctcgatctttatcactccaacggatatcgcgcccgcgtgcgggccgtcgacgggagtcggcatagtaactggacagtgacaaatacccgattttcagtggatgaggtgacactgaccgttgggtctgtgaacctcgagatacataacggcttcatcttgggcaaaatacaattacccagacctaaaatggcccctgctaacgacacatacgaaagtatattttcccacttcagggagtatgaaattgctatccggaaggttcctggcaattttacgtttacacacaagaaggtgaaacatgagaacttcagcctgctgacctctggtgaggtaggggagttttgcgtccaggtcaaaccgtcagtagcttcgaggagtaacaaaggcatgtggagcaaggaagaatgtatttcgcttaccagacagtactttactgtaacaaacgtgattattttctttgcatttgttttgctattaagcggggctttggcgtattgcctggctttgcaactgtacgtgagaagaagaaaaaagcttccatctgtgctgctgttcaaaaagcccagtccatttattttcatatcccaacgacctagtcctgagactcaggatactattcatcccctcgacgaagaggcgtttcttaaggtctccccggagctcaagaacctggatctccatggatctaccgattcgggctttgggtccacgaagccctcactccagacagaagagccccagttcctgcttccggaccctcaccctcaggccgatcgcaccctggggaaccgggagcctccagttttgggggattcttgctctagcgggagtagcaacagcactgactcggggatttgccttcaggagccatccctcagtccttctacaggcccaacctgggaacagcaagtcggctctaatagtcgtgggcaggacgattccgggatcgacctggttcagaattctgagggtagagccggcgatacccagggcggaagtgccctgggtcaccatagcccacctgagcccgaggtccccggggaggaagatccagctgctgttgcatttcaggggtacctgcggcaaactagatgcgcagaggagaaggctacaaagactggctgcctggaggaggagagtccactgaccgatggacttgggcccaagttcgggaggtgcctggtagatgaagccggcttgcacccacccgctcttgccaagggatacctgaaacaggatcccctggagatgaccctcgcgagttccggcgcacccactgggcagtggaaccaacctactgaggagtggtcattacttgcactgtcatcctgcagcgacctgggaatttcggactggtcctttgcccacgacctggcacccctgggctgtgtcgccgcgccagggggcttgctcgggagtttcaattctgatctagttacattaccactgattagctccttacagtctagtgaatag

SEQ ID NO: 118779 - DNA, 1737 bp, Artificial Sequence
  derived and/or modified sequence
atgttgccttgcctcgttgtcctgctcgctgctctgctatcattgcgtctcggatcagacgctcacgggacagaactgcctagtccgccttccgtgtggttcgaggccgaattcttccaccatattctgcactggacgccgattcctaatcagagcgaaagtacctgctatgaagtagcacttctgcgctatggcattgaaagctggaactcaatctcaaattgttctcaaactctgtcctatgatctcaccgccgtcacccttgatctgtaccacagcaatgggtaccgagctcgcgtgcgcgcagtagacggctctcgccactccaactggaccgtgaccaataccagattttcagtggatgaagtgaccctgactgtgggctcggtcaacctcgagatccataacggcttcattctaggcaagattcagttacctcgcccaaagatggcacccgcaaatgacacctacgaaagcatcttctcccattttagggagtatgagattgcgatccgaaaggtacctggaaactttaccttcacacacaagaaggttaagcacgaaaatttctcattgttaacctcgggtgaagtgggcgagttctgtgtccaggtgaagccctccgttgcttcgcgaagcaacaagggtatgtggagcaaggaggagtgtatcagcttgactcgacagtactttacggtaaccaacgtcattattttttttgcctttgttctgctgctcagcggggctctcgcctactgtctggcactacaattgtatgtgaggcggcgtaaaaaactgccaagcgtgcttctatttaagaagccaagtccctttattttcatctctcagaggccttctccagaaacccaagacacgatccatcccttggacgaggaggccttcttgaaggttagccccgagctgaaaaacttggatttgcatggatcgacagacagtggtttcggctcaactaaaccctcccttcagaccgaggagccccagttcctgctccccgatccccatcctcaggctgatagaacgctcggcaacagggaaccaccggtgctgggcgactcatgctcttctggtagctctaactccactgactccgggatttgcttacaggagccaagcctttcgccctcaacgggtcctacttgggaacagcaggttggcagcaactcacgaggtcaggacgatagtggtatcgacctcgtccagaactccgagggcagagctggggatacgcagggaggttcggcattgggccatcactcccccccagaaccagaagttcctggggaggaggaccccgcagccgtagctttccagggatatcttcgccagacacgatgtgcagaggagaaggctacgaaaaccggctgcctggaggaggagtccccactgactgacggcctcggaccaaaattcggacgatgtctggtcgatgaagcaggacttcatccccctgctctagcaaagggctatttgaaacaagatcctctggagatgaccttagcaagttctggcgctccaacgggacagtggaaccaacccacagaggaatggagccttttggctttaagcagttgcagcgatttgggaatttctgattggagttttgcgcacgatcttgcccctctgggatgtgttgcagcgcctggaggcctgttggggagttttaacagcgaccttgtaactctgccattgatttcctctctccagtcctcagagtag

SEQ ID NO: 118780 - DNA, 1500 bp, Artificial Sequence
  derived and/or modified sequence
atgtcccggactgagctgcccagtccccctagcgtttggtttgaggcagaatttttccaccacatcttgcattggaccccgattcccaaccagtccgaatcaacgtgctatgaggtggctctcttgaggtatggcattgaatcctggaattcaatctccaactgcagtcagacactttcatacgatcttactgcagtaacgctggacctctatcattcaaacggctaccgcgccagagtgagagccgtagacgggtcccggcacagcaactggaccgtgaccaacacccggtttagcgtcgatgaggtcactctcacagtcggctcggtgaacttggaaattcacaacggttttatcctgggcaagatccaactgccccgacccaagatggcgccagctaatgatacctatgaatctattttcagtcactttcgtgagtacgagatcgctatccgaaaagtccccggcaattttaccttcacgcataagaaggtgaaacacgaaaatttttccctgctgactagcggcgaggtgggagagttctgtgtccaggttaagccatcagtggcttcacgttcaaacaagggtatgtggagtaaggaagagtgcatctcactgacacggcagtacttcacggtgaccaacgtgattatattctttgcctttgttctcctgctatccggagcactagcctactgtttagctcttcaactctacgttaggcgccgcaagaaactgccaagtgttttactgttcaaaaaaccttcgccattcatctttatctctcagcgtccctctcccgagacccaagacactattcacccccttgacgaggaggcctttctgaaggtgagtcccgagctgaaaaatctggacttgcatggatcgactgacagtgggttcgggtctactaaacccagtctccagactgaggaacctcaatttctactgccagacccccatcctcaggccgaccggacactggggaacagagagccccctgttctaggcgactcgtgtagcagcggcagcagtaacagcaccgatagtgggatctgcctccaggagccctctcttagcccaagcactggacctacttgggaacagcaagtgggcagcaacagtcgggggcaggacgatagtgggattgacctcgtccagaacagcgaaggccgggccggcgacacgcaagggggaagcgcacttggccatcactcacccccagaacccgaggtccccggagaggaggacccagctgccgttgccttccaaggttacttgaggcaaactcgatgcgccgaggagaaagcgactaaaaccggatgcctcgaggaggaaagtcctctgacagacggtctcgggccgaaatttggtaggtgtctcgtggacgaagccggtctgcaccctccagcgctagcgaaaggctaccttaaacaggaccccctggagatgactttggcatcatccggccccaatggcaccgtagagcccgcccactag

SEQ ID NO: 118781 - DNA, 1677 bp, Artificial Sequence
  derived and/or modified sequence
atgagtcgcactgaactcccctcaccaccctccgtttggttcgaggcagagtttttccatcacattcttcactggactcctattccaaatcaatccgaaagcacgtgttatgaggtggctctgctgagatacgggatagagagttggaactccatcagcaattgctcccagaccctgtcttatgatctcacagccgtgactctcgacctgtaccactccaacggatacagagcccgagtccgggcagttgacggctctagacacagcaattggactgtgaccaacaccaggttttcagtggacgaagtgaccctcacggttggatcagttaatttggaaattcacaatggttttattctcggcaagatccagcttcctagaccaaaaatggctccagccaacgacacctatgagagtatcttttcacattttcgggagtatgaaatagcaatcaggaaagtcccaggaaatttcacatttacgcataaaaaagttaagcacgagaatttctcccttctcaccagcggggaagtcggcgagttctgcgtgcaagtaaagccaagtgttgcgagtaggtccaacaaggggatgtggtccaaagaagagtgtatctctttaaccagacagtattttacagtcacgaacgtgatcatcttcttcgcctttgtgctgctccttagcggcgccctcgcctactgcctggccctccagctttacgtcagaagaaggaaaaagctgcccagcgtgctcctgttcaaaaagccttccccattcattttcatctcccagagaccctctccggagactcaagataccatccatcctctggacgaggaggccttcctcaaggtgtctcccgaactaaaaaacctggacctgcatggaagcactgacagtggtttcggcagcactaaacctagtctgcagactgaggaaccccagttcctgttgcccgaccctcatcctcaggcagatagaacccttgggaacagagagccaccagtgctgggagactcctgctccagcggaagttccaactcaacggattctggcatctgtctgcaggagccttccctgtccccgagcactggtccaacctgggagcagcaggtcggaagtaactcaaggggacaggatgacagtggcattgatttggtgcagaatagcgagggacgagccggcgatacacagggaggttccgcgttaggccaccattccccgcctgaacccgaagtgcctggagaagaggaccccgcggcagtggccttccaaggctacctaaggcaaactcggtgcgccgaggaaaaggctacaaagactggatgcttagaagaggagtccccactgacggacggacttgggccaaaatttggccggtgtttagtggacgaagccggacttcacccgcctgcactcgccaaaggttatctgaagcaggatcctctggaaatgacattagccagcagtggggcacccaccggtcaatggaaccagccaaccgaggagtggagtctcttggcattgagcagctgctccgatcttgggatctccgactggtcctttgcacacgacctggctccacttggttgtgttgctgctcctggaggcctgctaggttccttcaattctgacctcgtgacactcccacttatcagttccctacagtcgtctgagtag

SEQ ID NO: 118782 - DNA, 1290 bp, Artificial Sequence
  derived and/or modified sequence
atggcgcccgccaatgatacatatgagtcgattttctcccattttcgggagtatgaaatcgcaattcgaaaagttcccgggaactttacatttacacacaagaaggtgaagcatgagaatttctccctactcactagcggggaagtgggcgagttttgcgttcaggtgaaacccagcgtggccagccggtctaacaagggaatgtggtccaaagaggaatgcatatcactgacgcggcagtactttaccgtcactaatgtgattatctttttcgctttcgtgctgctgctgtcaggggctttggcatactgcttggctctgcagctgtacgttcggaggagaaaaaaattaccttctgtgctgttgttcaagaaacccagcccgtttatatttatttcccagcggccaagccccgaaactcaggatacgattcaccccctggacgaggaggcctttttgaaagtgtctccggagctgaaaaacctcgatctgcacgggtcaactgactccggctttggcagtactaagcccagtctccagaccgaggaacctcagttcttactgcccgacccccatccacaggcagaccgcacgctggggaacagagagccgcccgtcctgggcgattcatgtagctcaggttctagcaatagtacagacagcggaatctgtctacaagagccgagcctttccccatccaccggcccaacttgggagcagcaagtgggctccaattcaaggggccaggatgattctgggattgacctcgtccagaattctgagggacgcgccggcgacacccaaggcggtagcgctttaggccaccatagcccacctgagcccgaggtaccaggcgaagaggaccctgctgcggtagccttccaaggctacctgcgacaaacacgctgcgcggaggagaaggctactaaaaccgggtgtttggaggaagagtccccactgaccgacggtctaggccccaagtttggtagatgtctggtcgatgaagccgggcttcatccccctgctctggctaaaggttacctgaaacaagaccccttagagatgacactggcctcctcaggggcaccaactggacagtggaaccagcctactgaggaatggtccctcctggcgctgagctcttgttctgatctgggaatttctgactggtcctttgcccacgatctagcgcctctggggtgtgtcgccgctcctggtggccttctcgggtcgttcaactccgacctggtgactctgccgctcatttcctcattgcagagctctgaatag

SEQ ID NO: 118783 - DNA, 3695 bp, Artificial Sequence
  derived and/or modified sequence
gacgtcagccctgcggggcgctggcggagcgggcggcggagctgtcagtcccagcccaagggtagctggaggcgcgcaggccggctccgctccggccccggacgatgcggcgcgcccaggatgctgccgtgcctcgtagtgctgctggcggcgctcctcagcctccgtcttggctcagacgctcatgggacagagctgcccagccctccgtctgtgtggtttgaagcagaatttttccaccacatcctccactggacacccatcccaaatcagtctgaaagtacctgctatgaagtggcgctcctgaggtatggaatagagtcctggaactccatctccaactgtagccagaccctgtcctatgaccttaccgcagtgaccttggacctgtaccacagcaatggctaccgggccagagtgcgggctgtggacggcagccggcactccaactggaccgtcaccaacacccgcttctctgtggatgaagtgactctgacagttggcagtgtgaacctagagatccacaatggcttcatcctcgggaagattcagctacccaggcccaagatggcccccgcaaatgacacatatgaaagcatcttcagtcacttccgagagtatgagattgccattcgcaaggtgccgggaaacttcacgttcacacacaagaaagtaaaacatgaaaacttcagcctcctaacctctggagaagtgggagagttctgtgtccaggtgaaaccatctgtcgcttcccgaagtaacaaggggatgtggtctaaagaggagtgcatctccctcaccaggcagtatttcaccgtgaccaacgtcatcatcttctttgcctttgtcctgctgctctccggagccctcgcctactgcctggccctccagctgtatgtgcggcgccgaaagaagctacccagtgtcctgctcttcaagaagcccagccccttcatcttcatcagccagcgtccctccccagagacccaagacaccatccacccgcttgatgaggaggcctttttgaaggtgtccccagagctgaagaacttggacctgcacggcagcacagacagtggctttggcagcaccaagccatccctgcagactgaagagccccagttcctcctccctgaccctcacccccaggctgacagaacgctgggaaacagggagccccctgtgctgggggacagctgcagtagtggcagcagcaatagcacagacagcgggatctgcctgcaggagcccagcctgagccccagcacagggcccacctgggagcaacaggtggggagcaacagcaggggccaggatgacagtggcattgacttagttcaaaactctgagggccgggctggggacacacagggtggctcggccttgggccaccacagtcccccggagcctgaggtgcctggggaagaagacccagctgctgtggcattccagggttacctgaggcagaccagatgtgctgaagagaaggcaaccaagacaggctgcctggaggaagaatcgcccttgacagatggccttggccccaaattcgggagatgcctggttgatgaggcaggcttgcatccaccagccctggccaagggctatttgaaacaggatcctctagaaatgactctggcttcctcaggggccccaacgggacagtggaaccagcccactgaggaatggtcactcctggccttgagcagctgcagtgacctgggaatatctgactggagctttgcccatgaccttgcccctctaggctgtgtggcagccccaggtggtctcctgggcagctttaactcagacctggtcaccctgcccctcatctctagcctgcagtcaagtgagtgactcgggctgagaggctgcttttgattttagccatgcctgctcctctgcctggaccaggaggagggcccctggggcagaagttaggcacgaggcagtctgggcacttttctgcaagtccactggggctggccccagccaggccctgcagggctggtcagggtgtctggggcaggaggaggccaactcactgaactagtgcagggtatgtgggtggcactgacctgttctgttgactggggccctgcagactctggcagagctgagaagggcagggaccttctccctcctaggaactctttcctgtatcataaaggattatttgctcaggggaaccatggggctttctggagttgtggtgaggccaccaggctgaagtcagctcagacccagacctccctgcttaggccactcgagcatcagagcttccagcaggaggaagggctgtaggaatggaagcttcagggccttgctgctggggtcatttttaggggaaaaaggaggatatgatggtcacatggggaacctcccctcatcgggcctctggggcaggaagcttgtcactggaagatcttaaggtatatattttctggacactcaaacacatcataatggattcactgaggggagacaaagggagccgagaccctggatggggcttccagctcagaacccatccctctggtgggtacctctggcacccatctgcaaatatctccctctctccaacaaatggagtagcatccccctggggcacttgctgaggccaagccactcacatcctcactttgctgccccaccatcttgctgacaacttccagagaagccatggttttttgtattggtcataactcagccctttgggcggcctctgggcttgggcaccagctcatgccagccccagagggtcagggttggaggcctgtgcttgtgtttgctgctaatgtccagctacagacccagaggataagccactgggcactgggctggggtccctgccttgttggtgttcagctgtgtgattttggactagccacttgtcagagggcctcaatctcccatctgtgaaataaggactccacctttaggggaccctccatgtttgctgggtattagccaagctggtcctgggagaatgcagatactgtccgtggactaccaagctggcttgtttcttatgccagaggctaacagatccaatgggagtccatggtgtcatgccaagacagtatcagacacagccccagaagggggcattatgggccctgcctccccataggccatttggactctgccttcaaacaaaggcagttcagtccacaggcatggaagctgtgaggggacaggcctgtgcgtgccatccagagtcatctcagccctgcctttctctggagcattctgaaaacagatattctggcccagggaatccagccatgacccccacccctctgccaaagtactcttaggtgccagtctggtaactgaactccctctggaggcaggcttgagggaggattcctcagggttcccttgaaagctttatttatttattttgttcatttatttattggagaggcagcattgcacagtgaaagaattctggatatctcaggagccccgaaattctagctctgactttgctgtttccagtggtatgaccttggagaagtcacttatcctcttggagcctcagtttcctcatctgcagaataatgactgacttgtctaattcgtagggatgtgaggttctgctgaggaaatgggtatgaatgtgccttgaacacaaagctctgtcaataagtgatacatgttttttattccaataaattgtcaagaccaca

SEQ ID NO: 118784 - DNA, 2239 bp, Artificial Sequence
  derived and/or modified sequence
agcccaagggtagctggaggcgcgcaggccggctccgctccggccccggacgatgcggcgcgcccaggatgctgccgtgcctcgtagtgctgctggcggcgctcctcagcctccgtcttggctcagacgctcatggtaaggctccgggacgcggcccttccctgccctgccctctccgcgcccgctccattaaagttctccatccagtggagagccctggctggctggccctctggcagagcggtgcccgggtgctcccttactctggcaaacctggatctcaggctcacctgttgtggaagtggaagaggctgaaattgacaggaactgacggattgggaaggatagagaagtatgcgcaaggccaaacccccaacccgcaaacctcatcatccacccacttctagatgagccggacagagctgcccagccctccgtctgtgtggtttgaagcagaatttttccaccacatcctccactggacacccatcccaaatcagtctgaaagtacctgctatgaagtggcgctcctgaggtatggaatagagtcctggaactccatctccaactgtagccagaccctgtcctatgaccttaccgcagtgaccttggacctgtaccacagcaatggctaccgggccagagtgcgggctgtggacggcagccggcactccaactggaccgtcaccaacacccgcttctctgtggatgaagtgactctgacagttggcagtgtgaacctagagatccacaatggcttcatcctcgggaagattcagctacccaggcccaagatggcccccgcaaatgacacatatgaaagcatcttcagtcacttccgagagtatgagattgccattcgcaaggtgccgggaaacttcacgttcacacacaagaaagtaaaacatgaaaacttcagcctcctaacctctggagaagtgggagagttctgtgtccaggtgaaaccatctgtcgcttcccgaagtaacaaggggatgtggtctaaagaggagtgcatctccctcaccaggcagtatttcaccgtgaccaacgtcatcatcttctttgcctttgtcctgctgctctccggagccctcgcctactgcctggccctccagctgtatgtgcggcgccgaaagaagctacccagtgtcctgctcttcaagaagcccagccccttcatcttcatcagccagcgtccctccccagagacccaagacaccatccacccgcttgatgaggaggcctttttgaaggtgtccccagagctgaagaacttggacctgcacggcagcacagacagtggctttggcagcaccaagccatccctgcagactgaagagccccagttcctcctccctgaccctcacccccaggctgacagaacgctgggaaacagggagccccctgtgctgggggacagctgcagtagtggcagcagcaatagcacagacagcgggatctgcctgcaggagcccagcctgagccccagcacagggcccacctgggagcaacaggtggggagcaacagcaggggccaggatgacagtggcattgacttagttcaaaactctgagggccgggctggggacacacagggtggctcggccttgggccaccacagtcccccggagcctgaggtgcctggggaagaagacccagctgctgtggcattccagggttacctgaggcagaccagatgtgctgaagagaaggcaaccaagacaggctgcctggaggaagaatcgcccttgacagatggccttggccccaaattcgggagatgcctggttgatgaggcaggcttgcatccaccagccctggccaagggctatttgaaacaggatcctctagaaatgactctggcttcctcagggcccaacgggacagtggaaccagcccactgaggaatggtcactcctggccttgagcagctgcagtgacctgggaatatctgactggagctttgcccatgaccttgcccctctaggctgtgtggcagccccaggtggtctcctgggcagctttaactcagacctggtcaccctgcccctcatctctagcctgcagtcaagtgagtgactcgggctgagaggctgcttttgattttagccatgcctgctcctctgcctggaccaggaggagggcccctggggcagaagttaggcacgaggcagtctgggcacttttctgcaagtccactggggctggccccagccaggccctgcagggctggtca

SEQ ID NO: 118785 - DNA, 2275 bp, Artificial Sequence
  derived and/or modified sequence
agtcccagcccaagggtagctggaggcgcgcaggccggctccgctccggccccggacgatgcggcgcgcccaggatgctgccgtgcctcgtagtgctgctggcggcgctcctcagcctccgtcttggctcagacgctcatgtggagagccctggctggctggccctctggcagagcggtgcccgggtgctcccttactctggcaaacctggatctcaggctcacctgttgtggaagtggaagaggctgaaattgacaggaactgacggattgggaaggatagagaagtatgcgcaaggccaaacccccaacccgcaaacctcatcatccacccacttctagatgagccggacagagctgcccagccctccgtctgtgtggtttgaagcagaatttttccaccacatcctccactggacacccatcccaaatcagtctgaaagtacctgctatgaagtggcgctcctgaggtatggaatagagtcctggaactccatctccaactgtagccagaccctgtcctatgaccttaccgcagtgaccttggacctgtaccacagcaatggctaccgggccagagtgcgggctgtggacggcagccggcactccaactggaccgtcaccaacacccgcttctctgtggatgaagtgactctgacagttggcagtgtgaacctagagatccacaatggcttcatcctcgggaagattcagctacccaggcccaagatggcccccgcaaatgacacatatgaaagcatcttcagtcacttccgagagtatgagattgccattcgcaaggtgccgggaaacttcacgttcacacacaagaaagtaaaacatgaaaacttcagcctcctaacctctggagaagtgggagagttctgtgtccaggtgaaaccatctgtcgcttcccgaagtaacaaggggatgtggtctaaagaggagtgcatctccctcaccaggcagtatttcaccgtgaccaacgtcatcatcttctttgcctttgtcctgctgctctccggagccctcgcctactgcctggccctccagctgtatgtgcggcgccgaaagaagctacccagtgtcctgctcttcaagaagcccagccccttcatcttcatcagccagcgtccctccccagagacccaagacaccatccacccgcttgatgaggaggcctttttgaaggtgtccccagagctgaagaacttggacctgcacggcagcacagacagtggctttggcagcaccaagccatccctgcagactgaagagccccagttcctcctccctgaccctcacccccaggctgacagaacgctgggaaacagggagccccctgtgctgggggacagctgcagtagtggcagcagcaatagcacagacagcgggatctgcctgcaggagcccagcctgagccccagcacagggcccacctgggagcaacaggtggggagcaacagcaggggccaggatgacagtggcattgacttagttcaaaactctgagggccgggctggggacacacagggtggctcggccttgggccaccacagtcccccggagcctgaggtgcctggggaagaagacccagctgctgtggcattccagggttacctgaggcagaccagatgtgctgaagagaaggcaaccaagacaggctgcctggaggaagaatcgcccttgacagatggccttggccccaaattcgggagatgcctggttgatgaggcaggcttgcatccaccagccctggccaagggctatttgaaacaggatcctctagaaatgactctggcttcctcaggggccccaacgggacagtggaaccagcccactgaggaatggtcactcctggccttgagcagctgcagtgacctgggaatatctgactggagctttgcccatgaccttgcccctctaggctgtgtggcagccccaggtggtctcctgggcagctttaactcagacctggtcaccctgcccctcatctctagcctgcagtcaagtgagtgactcgggctgagaggctgcttttgattttagccatgcctgctcctctgcctggaccaggaggagggcccctggggcagaagttaggcacgaggcagtctgggcacttttctgcaagtccactggggctggccccagccaggccctgcagggctggtcagggtgtctggggcaggaggaggccaactcactgaactagtgcagggtatgtgggtggcactgacctgttctgttgactggggccctgcagactctggcag

SEQ ID NO: 118786 - DNA, 1779 bp, Artificial Sequence
  derived and/or modified sequence
agtcccagcccaagggtagctggaggcgcgcaggccggctccgctccggccccggacgatgcggcgcgcccaggatgctgccgtgcctcgtagtgctgctggcggcgctcctcagcctccgtcttggctcagacgctcatgggacagagctgcccagccctccgtctgtgtggtttgaagcagaatttttccaccacatcctccactggacacccatcccaaatcagtctgaaagtacctgctatgaagtggcgctcctgagtgactctgacagttggcagtgtgaacctagagatccacaatggcttcatcctcgggaagattcagctacccaggcccaagatggcccccgcaaatgacacatatgaaagcatcttcagtcacttccgagagtatgagattgccattcgcaaggtgccgggaaacttcacgttcacacacaagaaagtaaaacatgaaaacttcagcctcctaacctctggagaagtgggagagttctgtgtccaggtgaaaccatctgtcgcttcccgaagtaacaaggggatgtggtctaaagaggagtgcatctccctcaccaggcagtatttcaccgtgaccaacgtcatcatcttctttgcctttgtcctgctgctctccggagccctcgcctactgcctggccctccagctgtatgtgcggcgccgaaagaagctacccagtgtcctgctcttcaagaagcccagccccttcatcttcatcagccagcgtccctccccagagacccaagacaccatccacccgcttgatgaggaggcctttttgaaggtgtccccagagctgaagaacttggacctgcacggcagcacagacagtggctttggcagcaccaagccatccctgcagactgaagagccccagttcctcctccctgaccctcacccccaggctgacagaacgctgggaaacagggagccccctgtgctgggggacagctgcagtagtggcagcagcaatagcacagacagcgggatctgcctgcaggagcccagcctgagccccagcacagggcccacctgggagcaacaggtggggagcaacagcaggggccaggatgacagtggcattgacttagttcaaaactctgagggccgggctggggacacacagggtggctcggccttgggccaccacagtcccccggagcctgaggtgcctggggaagaagacccagctgctgtggcattccagggttacctgaggcagaccagatgtgctgaagagaaggcaaccaagacaggctgcctggaggaagaatcgcccttgacagatggccttggccccaaattcgggagatgcctggttgatgaggcaggcttgcatccaccagccctggccaagggctatttgaaacaggatcctctagaaatgactctggcttcctcaggggccccaacgggacagtggaaccagcccactgaggaatggtcactcctggccttgagcagctgcagtgacctgggaatatctgactggagctttgcccatgaccttgcccctctaggctgtgtggcagccccaggtggtctcctgggcagctttaactcagacctggtcaccctgcccctcatctctagcctgcagtcaagtgagtgactcgggctgagaggctgcttttgattttagccatgcctgctcctctgcctggaccaggaggagggcccctggggcagaagttaggcacgaggcagtctgggcacttttctgcaagtccactggggctggccccagccaggccctgca

SEQ ID NO: 118787 - DNA, 1500 bp, Artificial Sequence
  derived and/or modified sequence
atgagcaggacagagctgcccagccccccatctgtgtggtttgaggccgagttcttccaccacatcctgcactggacccccatccccaaccagagcgagagcacctgctatgaggtggccctgctgcgctatggcatcgagagctggaacagcatcagcaactgcagccagaccctgtcctatgacctgacagctgtgaccctggacctgtaccacagcaatggctaccgggcccgggtgcgggctgtggatggcagccgccacagcaactggacagtgaccaacacccgcttctctgtggatgaggtgaccctgactgtgggctctgtgaacctggagatccacaacggcttcatcctgggcaagatccagctgccccggcccaagatggccccagccaatgacacctatgagagcatcttcagccacttccgggagtatgaaattgccatcaggaaggtgcccggcaacttcaccttcacccacaagaaggtgaagcatgagaacttcagcctgctgaccagcggggaggtgggggagttctgtgtgcaggtgaagcccagcgtggccagccgcagcaacaagggcatgtggagcaaggaggagtgcatcagcctgacccggcagtacttcaccgtgaccaacgtcatcatcttctttgcctttgtgctgctgctgagcggggccctggcctactgcctggccctgcagctgtatgtgagaagaaggaagaagctgcccagcgtgctgctcttcaagaagcccagccccttcatcttcatcagccagaggcccagccctgagacccaggacaccatccaccccctggatgaggaggccttcctgaaggtgtccccagagctgaagaacctggacctgcacggcagcacagattctggcttcggcagcaccaagcccagcctgcagacagaggagccccagttcctgctgcctgacccccacccccaggccgacaggaccctgggcaaccgggagccccctgtgctgggggacagctgcagcagcggcagcagcaacagcacagacagcggcatctgcctgcaggagcccagcctgagccccagcacaggccccacctgggagcagcaggtgggcagcaacagccggggccaggatgattctggaattgacctggtgcagaacagcgagggccgggccggggacacccagggcggcagcgccctgggccaccacagccccccagagcctgaggtgcctggagaggaggaccctgctgctgtggccttccagggctacctgcggcagacccgctgtgccgaggagaaggccaccaagacaggctgcctggaggaggagagccccctgacagatggcctgggccccaagtttggccgctgcctggtggatgaagctggcctgcaccccccagccctggccaagggctacctgaagcaggaccccctggagatgaccctggccagcagcggccccaacggcaccgtggagcccgcccactag

SEQ ID NO: 118788 - DNA, 1677 bp, Artificial Sequence
  derived and/or modified sequence
atgagcaggacagagctgcccagccccccatctgtgtggtttgaggccgagttcttccaccacatcctgcactggacccccatccccaaccagagcgagagcacctgctatgaggtggccctgctgcgctatggcatcgagagctggaacagcatcagcaactgcagccagaccctgtcctatgacctgacagctgtgaccctggacctgtaccacagcaatggctaccgggcccgggtgcgggctgtggatggcagccgccacagcaactggacagtgaccaacacccgcttctctgtggatgaggtgaccctgactgtgggctctgtgaacctggagatccacaacggcttcatcctgggcaagatccagctgccccggcccaagatggccccagccaatgacacctatgagagcatcttcagccacttccgggagtatgaaattgccatcaggaaggtgcccggcaacttcaccttcacccacaagaaggtgaagcatgagaacttcagcctgctgaccagcggggaggtgggggagttctgtgtgcaggtgaagcccagcgtggccagccgcagcaacaagggcatgtggagcaaggaggagtgcatcagcctgacccggcagtacttcaccgtgaccaacgtcatcatcttctttgcctttgtgctgctgctgagcggggccctggcctactgcctggccctgcagctgtatgtgagaagaaggaagaagctgcccagcgtgctgctcttcaagaagcccagccccttcatcttcatcagccagaggcccagccctgagacccaggacaccatccaccccctggatgaggaggccttcctgaaggtgtccccagagctgaagaacctggacctgcacggcagcacagattctggcttcggcagcaccaagcccagcctgcagacagaggagccccagttcctgctgcctgacccccacccccaggccgacaggaccctgggcaaccgggagccccctgtgctgggggacagctgcagcagcggcagcagcaacagcacagacagcggcatctgcctgcaggagcccagcctgagccccagcacaggccccacctgggagcagcaggtgggcagcaacagccggggccaggatgattctggaattgacctggtgcagaacagcgagggccgggccggggacacccagggcggcagcgccctgggccaccacagccccccagagcctgaggtgcctggagaggaggaccctgctgctgtggccttccagggctacctgcggcagacccgctgtgccgaggagaaggccaccaagacaggctgcctggaggaggagagccccctgacagatggcctgggccccaagtttggccgctgcctggtggatgaagctggcctgcaccccccagccctggccaagggctacctgaagcaggaccccctggagatgaccctggccagcagcggggcccccaccggccagtggaaccagcccacagaggagtggagcctgctggccctgagcagctgcagcgacctgggcatcagtgactggagctttgcccatgacctggcccccctgggctgtgtggccgcccctgggggcctgctgggcagcttcaacagcgacctggtgaccctgcccctcatcagcagcctgcagagcagcgagtag

SEQ ID NO: 118789 - DNA, 1290 bp, Artificial Sequence
  derived and/or modified sequence
atggccccagccaatgacacctatgagagcatcttcagccacttccgggagtatgagatcgccatcaggaaggtgcccggcaacttcaccttcacccacaagaaggtgaagcatgagaacttcagcctgctgaccagcggggaggtgggggagttctgtgtgcaggtgaagcccagcgtggccagccgcagcaacaagggcatgtggagcaaggaggagtgcatcagcctgacccggcagtacttcaccgtgaccaacgtcatcatcttctttgcctttgtgctgctgctgagcggggccctggcctactgcctggccctgcagctgtatgtgagaagaaggaagaagctgcccagcgtgctgctcttcaagaagcccagccccttcatcttcatcagccagaggcccagccctgagacccaggacaccatccaccccctggatgaggaggccttcctgaaggtgtccccagagctgaagaacctggacctgcacggcagcacagacagcggcttcggcagcaccaagcccagcctgcagacagaggagccccagttcctgctgcctgacccccacccccaggccgacaggaccctgggcaaccgggagccccctgtgctgggggacagctgcagcagcggcagcagcaacagcacagattctggcatctgcctgcaggagcccagcctgagccccagcacaggccccacctgggagcagcaggtgggcagcaacagccggggccaggatgacagcggcatcgacctggtgcagaacagcgagggccgggccggggacacccagggcggcagcgccctgggccaccacagccccccagagcctgaggtgcctggagaagaagatcctgctgctgtggccttccagggctacctgcggcagacccgctgtgccgaggagaaggccaccaagacaggctgcctggaggaggagagccccctgacagatggcctgggccccaagtttggccgctgcctggtggatgaggccggcctgcaccccccagccctggccaagggctacctgaagcaggaccccctggagatgaccctggccagcagcggggcccccaccggccagtggaaccagcccacagaggagtggagcctgctggccctgagcagctgcagcgacctgggcatcagtgactggagctttgcccatgacctggcccccctgggctgtgtggccgcccctgggggcctgctgggcagcttcaacagcgacctggtgaccctgcccctcatcagcagcctgcagagcagcgagtag

SEQ ID NO: 118790 - DNA, 1500 bp, Artificial Sequence
  derived and/or modified sequence
atgagccggaccgagctgcccagcccccccagcgtgtggttcgaggctgaattttttcatcacatcctgcattggacccccattcccaaccagtctgagagtacatgctacgaagttgccctgctacgctatggcattgagtcttggaattccattagcaattgttcccagaccctctcttacgacttgacagctgtgactctggacctgtaccattccaacggctatagagctagggtccgcgccgttgacgggtccagacactctaactggaccgtcacaaatactaggtttagcgtggatgaggtcacactcaccgtgggttccgtgaacctggaaatccataacggttttatcctgggtaaaatacagctgcctcgacccaagatggcgccagctaatgacacatacgagtccatatttagccacttccgagaatatgaaattgccattcgcaaggtgcctgggaattttacatttactcacaaaaaggttaagcacgagaacttttcactgctgacaagcggtgaggtgggggagttttgtgtgcaggtaaagccgtctgtggcctcacgctccaataaaggcatgtggagcaaggaagaatgtatctctctcacccgtcagtacttcacagtcaccaacgtgataatttttttcgccttcgttctgcttctctctggcgctctcgcatattgtttggcactgcagttgtacgtcaggcgaaggaaaaaattgccaagtgtgttgctcttcaaaaaaccttctcccttcattttcatcagccaacggccatcacccgagacccaggatacaatccaccctctcgatgaggaagcttttttgaaagtcagccctgaactgaaaaaccttgatttacatggttctactgacagcggcttcggaagcacaaagccatcgctacagactgaggaaccccagtttttactgcccgatcctcacccacaggcagataggactctcggtaatagagagcccccagtgttaggagattcatgtagctccgggagttctaatagtacagattctgggatttgtctgcaggaaccatccctgagcccgtccactggaccaacatgggaacaacaagtcggcagcaactcccgcgggcaagatgattccggcatagacttggttcagaactcagagggacgcgctggtgatactcagggcggctctgcacttgggcatcattcccctcccgaacccgaagttcccggagaggaagaccctgctgcagtagcctttcagggatacctcaggcaaaccaggtgcgcagaagagaaggcaaccaagaccggatgtctggaagaagagtctccccttacggacggcctgggccccaagtttggccgctgcctcgtggacgaggcaggccttcacccaccagccctggccaaaggttaccttaagcaagatccgttggaaatgacactcgcgtcctccgggcccaacgggaccgtcgagcctgcgcattag

SEQ ID NO: 118791 - DNA, 1677 bp, Artificial Sequence
  derived and/or modified sequence
atgagccggaccgagctgcccagcccccccagcgtgtggttcgaggccgagtttttccaccatatcttgcactggacgcctatcccaaatcaatccgagagcacttgctatgaggtagctctccttaggtatgggatcgaaagttggaattctataagtaactgtagtcagacactctcctacgacctgaccgccgtaacattggatctgtaccattctaatggctatcgggcccgagtgcgggccgtcgacgggagtcggcactcaaactggacagtgaccaatacacggttttccgtggacgaggtgactcttacagtcggctctgtgaatctcgagattcacaatggttttatcctgggaaaaatacagctccccaggcctaagatggccccggcaaacgacacctatgaatccatcttctcccatttccgagagtatgagatcgcaattcgtaaagtacctggtaacttcacttttacgcataaaaaagtcaagcacgaaaatttctcactgctgacatccggagaagtaggcgagttctgcgtgcaggtgaaaccaagcgtagcttcccgatccaacaagggcatgtggagcaaagaggaatgtatttctctgacccgccagtatttcacggtaactaacgtcatcatcttctttgcctttgtgctcctgctttccggagccttggcctactgcctggcactgcaattgtatgtgcgacgtcgaaagaaactcccttcagtcctcctgttcaagaaaccctctccgtttatttttatcagccagcgcccatcccccgagactcaggacacaattcatccacttgatgaggaggcttttttgaaggtgagccccgagttgaaaaatctcgatctgcacggatcaaccgatagcggttttggttctaccaaaccatcactgcagactgaggagccacagtttctcttgcctgaccctcatccacaggcggatcggactctgggcaacagggagccccccgttctcggcgactcttgttcctctggatcgtcgaatagcaccgacagcggaatctgcttgcaagagccttcactctccccttccacaggtcctacatgggaacaacaggtcggctctaactctaggggccaggatgactccggaattgatctggtgcagaacagtgagggaagagccggggatacacaggggggatcggctttgggtcaccactccccaccggaacccgaagtcccaggggaggaggaccctgctgctgttgcgttccagggctatttgagacagacgagatgtgccgaagagaaagccaccaaaactggatgcctggaagaggagagcccgctgactgacggcctgggccccaaatttgggagatgcctcgtggatgaagctgggctccatccacccgcattggctaaaggatacctcaagcaggatcctcttgaaatgactttggctagctcgggagctccgacggggcagtggaatcagcccacggaggagtggtccctgctggccctcagttcttgctccgacctgggcatcagcgattggagttttgcccatgatctagccccactcggttgcgttgccgcgccaggcggactgctaggctcctttaattccgacctcgtaactttgcctctcatctcttccctgcagagcagtgagtag

SEQ ID NO: 118792 - DNA, 1290 bp, Artificial Sequence
  derived and/or modified sequence
atggcccccgccaacgacacctacgagagcatcttcagccacttccgcgagtatgaaatcgccattagaaaagtccctggaaacttcaccttcacgcacaagaaggtgaaacatgaaaacttcagtctgttaacgagcggcgaagttggggaattttgtgtacaggtgaaaccgagtgtcgcttctagaagcaacaaggggatgtggagcaaggaggagtgcatctctttgactcgccagtatttcactgtgacaaacgtgatcatctttttcgccttcgtgctgctcctgtccggagcgctggcctattgcctggcactgcagctgtacgttcgccgccgcaagaagcttcccagcgtccttctgttcaaaaagccctcgccgttcatctttatttcccagcgtccttccccagaaacccaggacacaatccaccccctggacgaggaggccttcctaaaagtctcccctgagctcaaaaatctggacttgcacggttccaccgattccggcttcgggtccactaaaccgagccttcagaccgaggagccacagttcctgttgccagatccgcacccccaggctgatagaaccctggggaaccgagaaccccctgtccttggagatagctgctcaagtggttcaagcaattcaaccgattccggaatatgcctccaggagcctagtctgtcccctagcacaggacctacgtgggaacagcaggtgggcagcaactccagaggacaggatgacagcgggattgatctcgtccaaaattccgagggccgggccggagacacgcagggcggaagcgctttgggccatcattctccaccagaacctgaggtgcccggcgaagaagaccctgccgcagttgcatttcagggctacttgcgtcagacccgatgcgccgaggagaaagcgaccaaaaccggctgtttggaagaggagagccctcttacagatggcttaggacccaagtttggccgatgcctcgtggatgaagccggcctgcatcctcccgctctcgccaagggctacttaaaacaggatcccctagaaatgacactagcaagcagcggtgctcctactggccagtggaaccagcccaccgaggagtggtccttgctcgctctatcaagttgtagcgacctggggatcagcgattggagctttgcccatgatctggctcctcttggttgcgttgcggccccagggggtctcctcggcagctttaactcagacttggtcacacttcctctaataagttcattacagagtagcgaatag

SEQ ID NO: 118793 - DNA, 1500 bp, Artificial Sequence
  derived and/or modified sequence
atgtcccggacagagttgccgtcacccccatccgtctggttcgaggcagaatttttccatcatatcttgcactggactccaattcccaatcagagtgagagcacctgttacgaagttgccctcctccgatacgggatagagagctggaatagtatcagtaattgtagccagaccttaagctatgatctaacagccgtgaccctcgacttataccattccaatggataccgcgctcgtgtgcgggctgtggatgggagccgccactccaactggactgttactaacacaaggttctctgtcgatgaagtgacactaacggtcgggtctgtgaatctggagatccacaacggttttatactggggaagattcagctccccagacccaaaatggctccagccaatgacacctatgagtcaattttcagccactttcgcgaatatgaaattgccattcgaaaggtccctggtaactttacattcacgcataagaaagtaaagcacgagaatttttccctgttaacctcaggagaagtcggtgaattttgcgtgcaggtgaagccatcagtggcatctcgtagcaataaaggcatgtggagcaaagaagagtgcatctcactgacgcgtcagtactttaccgttactaatgtgattatctttttcgccttcgtgctgctgctctcaggggcattggcatattgtttggcgctgcaactgtatgtgagacggagaaaaaagctcccttctgtgctgctctttaagaaaccatccccttttatatttatctcacagcgaccttctcccgagacgcaggacacaattcaccccctggacgaggaagctttcctgaaagtcagccctgagttaaagaaccttgacctccacggctctacagactccggctttggctccacaaagcctagcctgcaaacagaggaacctcagtttctcctgccagatcctcaccctcaggcagacagaactctgggtaacagagagccgcctgttctgggggactcttgcagctcaggatcttcaaacagcactgatagcgggatatgtctccaagagccgagtctgagcccctccaccggccctacatgggagcagcaggttggtagtaatagtcgaggtcaggacgacagtggcattgatctggttcagaatagcgaaggcagagcgggtgatacccagggcggtagcgctctcggccaccatagcccccctgagcccgaggttcctggcgaagaagaccccgctgccgtcgcttttcagggctatctgcgccagacaaggtgcgccgaggagaaagcaactaagactggctgtctcgaggaggagtcaccactcacagatggacttgggcctaaattcggaaggtgtctggtagacgaggcaggcctccatccaccagccctggccaaaggatatctgaagcaggatcccttagaaatgacactggcctccagcgggcctaatggaaccgtcgagcccgcacactag

SEQ ID NO: 118794 - DNA, 1677 bp, Artificial Sequence
  derived and/or modified sequence
atgtcgcgcactgagcttccatcccctccgtcggtgtggttcgaggctgagttttttcatcatatcctccactggacaccgatccctaaccaatcggaatctacctgctatgaggtggctctgctaaggtacggcattgagtcatggaatagcatttctaactgttctcagaccctgtcctatgatctgaccgcagttacacttgatctgtaccactccaatggatacagagcacgcgtgcgcgcagttgacggctcacggcatagcaactggacagtgaccaacacccggtttagcgtggacgaagtcaccctgacagtagggagtgtaaacctggagattcacaatggcttcatactgggcaaaatccaactgccaagacccaagatggctcccgcaaacgacacatacgagagcattttttcacattttcgcgagtatgaaatagccataagaaaagtacctggaaacttcacatttacccacaagaaggtgaagcacgagaactttagcctgctgacctccggcgaggttggcgagttttgtgtccaagtcaagcccagcgtggccagtagatccaacaagggaatgtggagcaaggaagaatgtatttccctcacaagacagtattttacagtaaccaatgtaatcatattctttgccttcgtcctgctattatccggagcactggcatactgccttgcgttgcaactgtacgtccgaagacgcaagaagttgccgagtgtgctcctgttcaagaaaccttcgccgtttattttcatcagccagaggcctagccctgaaacccaggatacaattcaccccctcgatgaagaagcatttctaaaggtcagccccgagctaaaaaatctggacctgcacggctctacggacagtggatttgggtccaccaagccaagtctgcagacggaagagccccagttccttctgcccgacccccacccccaggctgatagaacccttggaaatagagagccacccgttctgggtgactcctgcagctctgggagctctaattctaccgacagtggcatctgcctgcaggagccgtctctttctcccagtacaggtccgacctgggagcagcaagtcggcagcaacagtcggggtcaggacgactctggcatcgatctggtgcagaactccgaaggcagagcgggtgacacgcaggggggaagcgctctcggacaccattctcctccagagccggaggtacccggagaggaggatccagccgctgtggcattccagggctaccttcggcagactcgctgcgctgaggagaaagccactaaaaccggctgcctggaagaggagagccctctgactgatggccttggacctaagtttggtcgctgtctcgttgacgaagctggcctccatcctcctgcgttggccaagggttatttgaaacaagatcccttggaaatgaccctggcatccagcggcgcacccaccggacagtggaatcagcctactgaggagtggagtttgctcgccctgtcatcctgttctgatctagggatttccgattggtcctttgcacatgatttagcaccactgggatgcgtggcggctcctggaggattgttgggaagctttaactctgatttagtcacattaccgcttatcagctccttgcagagcagcgagtag

SEQ ID NO: 118795 - DNA, 1290 bp, Artificial Sequence
  derived and/or modified sequence
atggccccagccaatgacacctatgagtcaattttttcccatttccgagaatacgagattgccatcagaaaggtacctgggaattttacattcactcacaaaaaggtgaagcatgaaaacttttccctgctgacttctggcgaggtgggagaattttgcgtgcaggttaagccttctgtggcttcccgcagtaacaaagggatgtggtcgaaggaagaatgcattagtctgacccgccaatatttcaccgttactaacgtgattattttctttgcctttgtgctccttctgtccggcgcactggcttattgcctagctttgcagctgtatgttcggagacgaaaaaagcttccttcggttctcctgttcaagaagcccagtccttttatctttatctctcaaaggccctccccagagacccaggatactattcaccctctagacgaagaggcatttctcaaggtttctccagagttgaagaatcttgatctgcacggcagcacggactctggattcggatctaccaagccgtcacttcaaactgaagagcctcagttccttttacccgatccacacccccaggcagatcggactctgggcaacagagaaccacctgtgcttggagatagttgctcttccggaagcagcaattccacggacagtggcatatgcttgcaggagccatcccttagcccctctacagggccaacttgggagcaacaagttggctcaaactctcggggacaagacgattcagggatagatttggtccagaatagcgagggacgcgcaggggatactcagggcggatccgcgttgggccaccactccccgccagaacccgaagtccctggcgaggaagaccctgccgctgtagctttccagggatacctgaggcaaacgcgctgtgccgaagagaaggccactaaaaccggctgtctcgaggaagagagtcccttaaccgacggcttgggtccgaagttcgggaggtgcctggtcgatgaagctggcctccatcctcccgctctggccaagggttacttaaagcaggatccactcgaaatgacccttgcgtcgagtggggctcccacaggccagtggaatcagcccactgaggagtggtccttgctggccctgtcttcatgttccgatttgggcatcagcgactggtcttttgctcatgacctggccccattgggatgcgtcgccgctcctggaggcctgcttggcagttttaattcagatctggtgactctgccactgatctcatccctgcagtcttccgagtag

SEQ ID NO: 118796 - DNA, 1500 bp, Artificial Sequence
  derived and/or modified sequence
atgagcagaaccgagctgcccagcccccccagcgtgtggttcgaggccgagttcttccaccacatcctgcactggacccccatccccaaccagagcgagagcacctgctacgaggtggccctgctgagatacggcatcgagagctggaacagcatcagcaactgcagccagaccctgagctacgacctgaccgccgtgaccctggacctgtaccacagcaacggctacagagccagagtgagagccgtggacggcagcagacacagcaactggaccgtgaccaacaccagattcagcgtggacgaggtgaccctgaccgtgggcagcgtgaacctggagatccacaacggcttcatcctgggcaagatccagctgcccagacccaagatggcccccgccaacgacacctacgagagcatcttcagccacttcagagagtacgagatcgccatcagaaaggtgcccggcaacttcaccttcacccacaagaaggtgaagcacgagaacttcagcctgctgaccagcggcgaggtgggcgagttctgcgtgcaggtgaagcccagcgtggccagcagaagcaacaagggcatgtggagcaaggaggagtgcatcagcctgaccagacagtacttcaccgtgaccaacgtgatcatcttcttcgccttcgtgctgctgctgagcggcgccctggcctactgcctggccctgcagctgtacgtgagaagaagaaagaagctgcccagcgtgctgctgttcaagaagcccagccccttcatcttcatcagccagagacccagccccgagacccaggacaccatccaccccctggacgaggaggccttcctgaaggtgagccccgagctgaagaacctggacctgcacggcagcaccgacagcggcttcggcagcaccaagcccagcctgcagaccgaggagccccagttcctgctgcccgacccccacccccaggccgacagaaccctgggcaacagagagccccccgtgctgggcgacagctgcagcagcggcagcagcaacagcaccgacagcggcatctgcctgcaggagcccagcctgagccccagcaccggccccacctgggagcagcaggtgggcagcaacagcagaggccaggacgacagcggcatcgacctggtgcagaacagcgagggcagagccggcgacacccagggcggcagcgccctgggccaccacagcccccccgagcccgaggtgcccggcgaggaggaccccgccgccgtggccttccagggctacctgagacagaccagatgcgccgaggagaaggccaccaagaccggctgcctggaggaggagagccccctgaccgacggcctgggccccaagttcggcagatgcctggtggacgaggccggcctgcacccccccgccctggccaagggctacctgaagcaggaccccctggagatgaccctggccagcagcggccccaacggcaccgtggagcccgcccactag

SEQ ID NO: 118797 - DNA, 1677 bp, Artificial Sequence
  derived and/or modified sequence
atgagcagaaccgagctgcccagcccccccagcgtgtggttcgaggccgagttcttccaccacatcctgcactggacccccatccccaaccagagcgagagcacctgctacgaggtggccctgctgagatacggcatcgagagctggaacagcatcagcaactgcagccagaccctgagctacgacctgaccgccgtgaccctggacctgtaccacagcaacggctacagagccagagtgagagccgtggacggcagcagacacagcaactggaccgtgaccaacaccagattcagcgtggacgaggtgaccctgaccgtgggcagcgtgaacctggagatccacaacggcttcatcctgggcaagatccagctgcccagacccaagatggcccccgccaacgacacctacgagagcatcttcagccacttcagagagtacgagatcgccatcagaaaggtgcccggcaacttcaccttcacccacaagaaggtgaagcacgagaacttcagcctgctgaccagcggcgaggtgggcgagttctgcgtgcaggtgaagcccagcgtggccagcagaagcaacaagggcatgtggagcaaggaggagtgcatcagcctgaccagacagtacttcaccgtgaccaacgtgatcatcttcttcgccttcgtgctgctgctgagcggcgccctggcctactgcctggccctgcagctgtacgtgagaagaagaaagaagctgcccagcgtgctgctgttcaagaagcccagccccttcatcttcatcagccagagacccagccccgagacccaggacaccatccaccccctggacgaggaggccttcctgaaggtgagccccgagctgaagaacctggacctgcacggcagcaccgacagcggcttcggcagcaccaagcccagcctgcagaccgaggagccccagttcctgctgcccgacccccacccccaggccgacagaaccctgggcaacagagagccccccgtgctgggcgacagctgcagcagcggcagcagcaacagcaccgacagcggcatctgcctgcaggagcccagcctgagccccagcaccggccccacctgggagcagcaggtgggcagcaacagcagaggccaggacgacagcggcatcgacctggtgcagaacagcgagggcagagccggcgacacccagggcggcagcgccctgggccaccacagcccccccgagcccgaggtgcccggcgaggaggaccccgccgccgtggccttccagggctacctgagacagaccagatgcgccgaggagaaggccaccaagaccggctgcctggaggaggagagccccctgaccgacggcctgggccccaagttcggcagatgcctggtggacgaggccggcctgcacccccccgccctggccaagggctacctgaagcaggaccccctggagatgaccctggccagcagcggcgcccccaccggccagtggaaccagcccaccgaggagtggagcctgctggccctgagcagctgcagcgacctgggcatcagcgactggagcttcgcccacgacctggcccccctgggctgcgtggccgcccccggcggcctgctgggcagcttcaacagcgacctggtgaccctgcccctgatcagcagcctgcagagcagcgagtag

SEQ ID NO: 118798 - DNA, 1290 bp, Artificial Sequence
  derived and/or modified sequence
atggcccccgccaacgacacctacgagagcatcttcagccacttcagagagtacgagatcgccatcagaaaggtgcccggcaacttcaccttcacccacaagaaggtgaagcacgagaacttcagcctgctgaccagcggcgaggtgggcgagttctgcgtgcaggtgaagcccagcgtggccagcagaagcaacaagggcatgtggagcaaggaggagtgcatcagcctgaccagacagtacttcaccgtgaccaacgtgatcatcttcttcgccttcgtgctgctgctgagcggcgccctggcctactgcctggccctgcagctgtacgtgagaagaagaaagaagctgcccagcgtgctgctgttcaagaagcccagccccttcatcttcatcagccagagacccagccccgagacccaggacaccatccaccccctggacgaggaggccttcctgaaggtgagccccgagctgaagaacctggacctgcacggcagcaccgacagcggcttcggcagcaccaagcccagcctgcagaccgaggagccccagttcctgctgcccgacccccacccccaggccgacagaaccctgggcaacagagagccccccgtgctgggcgacagctgcagcagcggcagcagcaacagcaccgacagcggcatctgcctgcaggagcccagcctgagccccagcaccggccccacctgggagcagcaggtgggcagcaacagcagaggccaggacgacagcggcatcgacctggtgcagaacagcgagggcagagccggcgacacccagggcggcagcgccctgggccaccacagcccccccgagcccgaggtgcccggcgaggaggaccccgccgccgtggccttccagggctacctgagacagaccagatgcgccgaggagaaggccaccaagaccggctgcctggaggaggagagccccctgaccgacggcctgggccccaagttcggcagatgcctggtggacgaggccggcctgcacccccccgccctggccaagggctacctgaagcaggaccccctggagatgaccctggccagcagcggcgcccccaccggccagtggaaccagcccaccgaggagtggagcctgctggccctgagcagctgcagcgacctgggcatcagcgactggagcttcgcccacgacctggcccccctgggctgcgtggccgcccccggcggcctgctgggcagcttcaacagcgacctggtgaccctgcccctgatcagcagcctgcagagcagcgagtag

SEQ ID NO: 118799 - protein, 279 aa, Artificial Sequence
  derived and/or modified sequence
MEWPARLCGLWALLLCAGGGGGGGGAAPTETQPPVTNLSVSVENLCTVIWTWNPPEGASSNCSLWYFSHFGDKQDKKIAPETRRSIEVPLNERICLQVGSQCSTNESEKPSILVEKCISPPEGDPESAVTELQCIWHNLSYMKCSWLPGRNTSPDTNYTLYYWHRSLEKIHQCENIFREGQYFGCSFDLTKVKDSSFEQHSVQIMVKDNAGKIKPSFNIVPLTSRVKPDPPHIKNLSFHNDDLYVQWENPQNFISRCLFYEVEVNNSQTETHNVFYVRF

SEQ ID NO: 118800 - protein, 427 aa, Artificial Sequence
  derived and/or modified sequence
MEWPARLCGLWALLLCAGGGGGGGGAAPTETQPPVTNLSVSVENLCTVIWTWNPPEGASSNCSLWYFSHFGDKQDKKIAPETRRSIEVPLNERICLQVGSQCSTNESEKPSILVEKCISPPEGDPESAVTELQCIWHNLSYMKCSWLPGRNTSPDTNYTLYYWHRSLEKIHQCENIFREGQYFGCSFDLTKVKDSSFEQHSVQIMVKDNAGKIKPSFNIVPLTSRVKPDPPHIKNLSFHNDDLYVQWENPQNFISRCLFYEVEVNNSQTETHNVFYVQEAKCENPEFERNVENTSCFMVPGVLPDTLNTVRIRVKTNKLCYEDDKLWSNWSQEMSIGKKRNSTLYITMLLIVPVIVAGAIIVLLLYLKRLKIIIFPPIPDPGKIFKEMFGDQNDDTLHWKKYDIYEKQTKEETDSVVLIENLKKASQ

SEQ ID NO: 118801 - DNA, 840 bp, Artificial Sequence
  derived and/or modified sequence
atggagtggcccgctcggctgtgtggactgtgggcgctactgctctgcgctgggggtggagggggcggcggcggagcggcgcccaccgaaacgcagcccccagttacaaacctcagtgtgtcagtagagaatctctgcacagtaatttggacgtggaatcctcctgaaggagctagttcaaactgttctctttggtacttctctcattttggagataagcaggataaaaagatagcccctgaaactcgccggagtattgaagtgccactgaacgagcgtatttgtctccaggttggatcccagtgcagcaccaatgaaagcgaaaaacccagcatccttgtagagaagtgtatttcgccgcctgagggagatccagagagcgcggtgacggaacttcagtgcatatggcacaacctttcatacatgaaatgctcttggctccctggacgaaacacctcacctgataccaattacacgctgtattattggcatagaagtctcgaaaagatccatcagtgcgaaaacatcttcagggagggacagtacttcggctgtagctttgacttgaccaaagtcaaggactcatcattcgaacagcattcagtgcagattatggttaaagataatgctggtaaaatcaagccgtcttttaacattgtccctctcacctcccgggtaaaacctgaccctccccacattaaaaacctgagcttccataacgacgacctatacgtgcagtgggagaatccccagaactttataagcagatgtctgttctatgaagtcgaagtgaacaattcccaaacggagacacataatgttttctacgtaagattttag

SEQ ID NO: 118802 - DNA, 1284 bp, Artificial Sequence
  derived and/or modified sequence
atggagtggcctgcaagattatgcggtctgtgggctcttctgctgtgtgccggaggcggtggcgggggcgggggagccgcccctacagagactcaaccaccagtgaccaacttgtctgtttccgtggagaatttatgcacggtgatttggacctggaacccccccgagggggctagctccaactgcagtctgtggtacttttcacacttcggggacaagcaggataaaaagatcgcccccgagacccgtcgcagtatcgaggtgcctctaaatgaacgcatatgtcttcaagtcggctctcagtgttccaccaacgaaagtgagaagccatcaatcttggtcgagaagtgtatctcaccacctgagggtgatcccgaaagcgccgtgacagagctgcagtgcatctggcataatcttagttacatgaagtgctcttggttgcccggccggaatacttctcctgacacaaactacaccttatattactggcatagatccctggagaaaattcaccagtgcgaaaatatctttcgcgaaggacaatattttggatgctccttcgacctgaccaaagtgaaggactcatcgtttgagcagcactcagtgcagataatggtgaaggataatgccgggaagattaaaccctcgtttaatattgtgcccctgacaagtcgggtgaaacccgatccaccacatataaaaaacctgtcattccacaacgacgatctctatgtccagtgggaaaatcctcaaaactttatcagtcggtgcctgttctacgaggtggaggttaacaacagtcagaccgagacgcataatgtgttctatgtgcaagaggctaagtgtgagaatccagaatttgagcggaatgtcgagaataccagctgtttcatggtgccaggagtgctccctgacacactgaatacagtgcggattagggtgaagacaaacaagctttgttatgaagatgacaaactttggtcaaattggagccaagaaatgtcaatcggcaagaaacgaaactccacgctttatatcacaatgcttcttattgttcctgttattgtcgccggcgccatcatcgttctgcttctctatctgaagcgattgaaaatcatcattttcccccccattcctgatcccgggaaaatctttaaggagatgtttggggaccagaacgatgacacactgcactggaagaagtacgacatctatgagaaacaaacaaaagaagaaaccgatagcgtagtgctaatcgagaatcttaaaaaggcaagtcagtag

SEQ ID NO: 118803 - DNA, 1096 bp, Artificial Sequence
  derived and/or modified sequence
ggctccagcccggccgggctccgaggcgagaggctgcatggagtggccggcgcggctctgcgggctgtgggcgctgctgctctgcgccggcggcgggggcgggggcgggggcgccgcgcctacggaaactcagccacctgtgacaaatttgagtgtctctgttgaaaacctctgcacagtaatatggacatggaatccacccgagggagccagctcaaattgtagtctatggtattttagtcattttggcgacaaacaagataagaaaatagctccggaaactcgtcgttcaatagaagtacccctgaatgagaggatttgtctgcaagtggggtcccagtgtagcaccaatgagagtgagaagcctagcattttggttgaaaaatgcatctcacccccagaaggtgatcctgagtctgctgtgactgagcttcaatgcatttggcacaacctgagctacatgaagtgttcttggctccctggaaggaataccagtcccgacactaactatactctctactattggcacagaagcctggaaaaaattcatcaatgtgaaaacatctttagagaaggccaatactttggttgttcctttgatctgaccaaagtgaaggattccagttttgaacaacacagtgtccaaataatggtcaaggataatgcaggaaaaattaaaccatccttcaatatagtgcctttaacttcccgtgtgaaacctgatcctccacatattaaaaacctctccttccacaatgatgacctatatgtgcaatgggagaatccacagaattttattagcagatgcctattttatgaagtagaagtcaataacagccaaactgagacacataatgttttctacgtaaggttttaaaattattgtttttatttggctatttttcttttacttgaatttcttacattgaaatatcaatgaaacatagctcttacatttgtcaccttatgatgatgatggtaatgaaacttcttgtctaaaataaggcatggtggaagatttgaagatttatggtatgatagtatcagctgcaagtttcaagccatttattcatctgtaagcttcttagaaaggcct

SEQ ID NO: 118804 - DNA, 4036 bp, Artificial Sequence
  derived and/or modified sequence
agagggagcgaaggaggcggggactgccaaggctccagcccggccgggctccgaggcgagaggctgcatggagtggccggcgcggctctgcgggctgtgggcgctgctgctctgcgccggcggcgggggcgggggcgggggcgccgcgcctacggaaactcagccacctgtgacaaatttgagtgtctctgttgaaaacctctgcacagtaatatggacatggaatccacccgagggagccagctcaaattgtagtctatggtattttagtcattttggcgacaaacaagataagaaaatagctccggaaactcgtcgttcaatagaagtacccctgaatgagaggatttgtctgcaagtggggtcccagtgtagcaccaatgagagtgagaagcctagcattttggttgaaaaatgcatctcacccccagaaggtgatcctgagtctgctgtgactgagcttcaatgcatttggcacaacctgagctacatgaagtgttcttggctccctggaaggaataccagtcccgacactaactatactctctactattggcacagaagcctggaaaaaattcatcaatgtgaaaacatctttagagaaggccaatactttggttgttcctttgatctgaccaaagtgaaggattccagttttgaacaacacagtgtccaaataatggtcaaggataatgcaggaaaaattaaaccatccttcaatatagtgcctttaacttcccgtgtgaaacctgatcctccacatattaaaaacctctccttccacaatgatgacctatatgtgcaatgggagaatccacagaattttattagcagatgcctattttatgaagtagaagtcaataacagccaaactgagacacataatgttttctacgtccaagaggctaaatgtgagaatccagaatttgagagaaatgtggagaatacatcttgtttcatggtccctggtgttcttcctgatactttgaacacagtcagaataagagtcaaaacaaataagttatgctatgaggatgacaaactctggagtaattggagccaagaaatgagtataggtaagaagcgcaattccacactctacataaccatgttactcattgttccagtcatcgtcgcaggtgcaatcatagtactcctgctttacctaaaaaggctcaagattattatattccctccaattcctgatcctggcaagatttttaaagaaatgtttggagaccagaatgatgatactctgcactggaagaagtacgacatctatgagaagcaaaccaaggaggaaaccgactctgtagtgctgatagaaaacctgaagaaagcctctcagtgatggagataatttatttttaccttcactgtgaccttgagaagattcttcccattctccatttgttatctgggaacttattaaatggaaactgaaactactgcaccatttaaaaacaggcagctcataagagccacaggtctttatgttgagtcgcgcaccgaaaaactaaaaataatgggcgctttggagaagagtgtggagtcattctcattgaattataaaagccagcaggcttcaaactaggggacaaagcaaaaagtgatgatagtggtggagttaatcttatcaagagttgtgacaacttcctgagggatctatacttgctttgtgttctttgtgtcaacatgaacaaattttatttgtaggggaactcatttggggtgcaaatgctaatgtcaaacttgagtcacaaagaacatgtagaaaacaaaatggataaaatctgatatgtattgtttgggatcctattgaaccatgtttgtggctattaaaactcttttaacagtctgggctgggtccggtggctcacgcctgtaatcccagcaatttgggagtccgaggcgggcggatcactcgaggtcaggagttccagaccagcctgaccaaaatggtgaaacctcctctctactaaaactacaaaaattaactgggtgtggtggcgcgtgcctgtaatcccagctactcgggaagctgaggcaggtgaattgtttgaacctgggaggtggaggttgcagtgagcagagatcacaccactgcactctagcctgggtgacagagcaagactctgtctaaaaaacaaaacaaaacaaaacaaaacaaaaaaacctcttaatattctggagtcatcattcccttcgacagcattttcctctgctttgaaagccccagaaatcagtgttggccatgatgacaactacagaaaaaccagaggcagcttctttgccaagacctttcaaagccattttaggctgttaggggcagtggaggtagaatgactccttgggtattagagtttcaaccatgaagtctctaacaatgtattttcttcacctctgctactcaagtagcatttactgtgtctttggtttgtgctaggcccccgggtgtgaagcacagaccccttccaggggtttacagtctatttgagactcctcagttcttgccacttttttttttaatctccaccagtcatttttcagaccttttaactcctcaattccaacactgatttccccttttgcattctccctccttcccttccttgtagccttttgactttcattggaaattaggatgtaaatctgctcaggagacctggaggagcagaggataattagcatctcaggttaagtgtgagtaatctgagaaacaatgactaattcttgcatattttgtaacttccatgtgagggttttcagcattgatatttgtgcattttctaaacagagatgaggtggtatcttcacgtagaacattggtattcgcttgagaaaaaaagaatagttgaacctatttctctttctttacaagatgggtccaggattcctcttttctctgccataaatgattaattaaatagcttttgtgtcttacattggtagccagccagccaaggctctgtttatgcttttggggggcatatattgggttccattctcacctatccacacaacatatccgtatatatcccctctactcttacttcccccaaatttaaagaagtatgggaaatgagaggcatttcccccaccccatttctctcctcacacacagactcatattactggtaggaacttgagaactttatttccaagttgttcaaacatttaccaatcatattaatacaatgatgctatttgcaattcctgctcctaggggaggggagataagaaaccctcactctctacaggtttgggtacaagtggcaacctgcttccatggccgtgtagaagcatggtgccctggcttctctgaggaagctggggttcatgacaatggcagatgtaaagttattcttgaagtcagattgaggctgggagacagccgtagtagatgttctactttgttctgctgttctctagaaagaatatttggttttcctgtataggaatgagattaattcctttccaggtattttataattctgggaagcaaaacccatgcctccccctagccatttttactgttatcctatttagatggccatgaagaggatgctgtgaaattcccaacaaacattgatgctgacagtcatgcagtctgggagtggggaagtgatcttttgttcccatcctcttcttttagcagtaaaatagctgagggaaaagggagggaaaaggaagttatgggaatacctgtggtggttgtgatccctaggtcttgggagctcttggaggtgtctgtatcagtggatttcccatcccctgtgggaaattagtaggctcatttactgttttaggtctagcctatgtggattttttcctaacatacctaagcaaacccagtgtcaggatggtaattcttattctttcgttcagttaagtttttcccttcatctgggcactgaagggatatgtgaaacaatgttaacatttttggtagtcttcaaccagggattgtttctgtttaacttcttataggaaagcttgagtaaaataaatattgtctttttgtatgtcacccaaa

SEQ ID NO: 118805 - DNA, 840 bp, Artificial Sequence
  derived and/or modified sequence
atggagtggccagcccggctgtgtggcctgtgggccctgctgctgtgtgccggcggcggcggcggcggcggcggggccgcccccacagagacccagccccctgtgaccaacctgtctgtgtctgtggagaacctgtgcaccgtcatctggacctggaaccccccagagggcgccagcagcaactgcagcctgtggtacttcagccactttggagacaagcaggacaagaagatcgcccctgagaccaggaggagcattgaggtgcccctgaatgaaagaatctgcctgcaggtgggcagccagtgcagcaccaatgaaagtgagaagcccagcatcctggtggagaagtgcatcagccccccagagggggaccctgagagcgctgtgacagagctgcagtgcatctggcacaacctgagctacatgaagtgctcctggctgcccggcaggaacaccagcccagacaccaactacaccctgtactactggcacaggagcctggagaagatccaccagtgtgagaacatcttccgggagggccagtacttcggctgcagctttgacctgaccaaggtgaaggacagcagctttgagcagcacagcgtgcagatcatggtgaaggacaatgctgggaagatcaagcccagcttcaacatcgtgcccctgaccagccgggtgaagccagaccccccccacatcaagaacctgtccttccacaatgatgacctgtatgtgcagtgggagaacccccagaacttcatcagccgctgcctcttctatgaggtggaggtgaacaacagccagacagagacccacaacgtgttctacgtgcgcttctag

SEQ ID NO: 118806 - DNA, 1284 bp, Artificial Sequence
  derived and/or modified sequence
atggagtggccagcccggctgtgtggcctgtgggccctgctgctgtgtgccggcggcggcggcggcggcggcggggccgcccccacagagacccagccccctgtgaccaacctgtctgtgtctgtggagaacctgtgcaccgtcatctggacctggaaccccccagagggcgccagcagcaactgcagcctgtggtacttcagccactttggagacaagcaggacaagaagatcgcccctgagaccaggaggagcattgaggtgcccctgaatgaaagaatctgcctgcaggtgggcagccagtgcagcaccaatgaaagtgagaagcccagcatcctggtggagaagtgcatcagccccccagagggggaccctgagagcgctgtgacagagctgcagtgcatctggcacaacctgagctacatgaagtgctcctggctgcccggcaggaacaccagcccagacaccaactacaccctgtactactggcacaggagcctggagaagatccaccagtgtgagaacatcttccgggagggccagtacttcggctgcagctttgacctgaccaaggtgaaggacagcagctttgagcagcacagcgtgcagatcatggtgaaggacaatgctgggaagatcaagcccagcttcaacatcgtgcccctgaccagccgggtgaagccagaccccccccacatcaagaacctgtccttccacaatgatgacctgtatgtgcagtgggagaacccccagaacttcatcagccgctgcctcttctatgaggtggaggtgaacaacagccagacagagacccacaacgtgttctacgtgcaggaggccaagtgtgaaaatcctgagtttgaaagaaatgtggagaacaccagctgcttcatggtgcctggggtgctgcctgacaccctgaacacagtgcgcatccgggtgaagaccaacaagctgtgctatgaagatgacaagctgtggagcaactggagccaggagatgagcatcggcaagaagaggaacagcaccctgtacatcaccatgctgctgattgtgcctgtgattgtggccggggccatcatcgtgctgctgctgtacctgaagaggctgaagatcatcatcttcccccccatcccagaccccgggaagatcttcaaggagatgtttggagaccagaatgatgacaccctgcactggaagaagtatgacatctatgagaagcagaccaaggaggagacagattctgtggtgctgattgagaacctgaagaaggccagccagtag

SEQ ID NO: 118807 - DNA, 840 bp, Artificial Sequence
  derived and/or modified sequence
atggagtggcccgcccggctgtgcggcctgtgggccctgctgctgtgtgcgggaggcgggggcggtggaggcggggccgccccaacggaaacccagccaccggtcactaacctgtctgtgagcgtggaaaacctctgcactgtcatatggacctggaacccacctgagggggcgagctccaactgctcactttggtacttttctcactttggcgataaacaagataaaaaaatcgcccccgagacacggaggtctattgaggtgccactgaatgaaaggatatgcctgcaagttggcagccagtgctcaactaatgagtctgagaagccctcaatactggtcgaaaagtgtattagccctcctgagggagatcccgaatctgcagttacagagctgcagtgcatctggcacaacctctcctacatgaaatgcagttggctgccaggccggaacacatcgcccgacaccaactacacactatactattggcatcgatcactggagaaaatccaccaatgcgaaaatatttttcgcgagggccaatactttggttgctccttcgacttgacaaaagtcaaggactcctcatttgaacaacactccgtgcagattatggttaaggataacgccggcaaaatcaaaccctctttcaatatagtgccactgactagcagagttaagccggatccaccgcatattaagaatctatcctttcacaacgacgatctgtatgtccagtgggaaaacccacagaactttatctcaaggtgtctcttctatgaagtagaggtaaacaatagtcagacagaaacacataatgtattctacgtgcggttttag

SEQ ID NO: 118808 - DNA, 1284 bp, Artificial Sequence
  derived and/or modified sequence
atggagtggcccgcccggctgtgcggcctgtgggccctgctgctgtgtgctggcggcggcgggggcggaggcggcgccgcccccaccgaaacgcagcctcccgttaccaatcttagcgttagcgtcgaaaatctgtgtaccgtgatctggacctggaacccgccagaaggtgcctccagcaattgcagtctctggtacttctcccacttcggggataagcaggacaagaaaatcgccccagagacacgcagaagtatcgaagtcccgctgaatgagagaatctgcctgcaggtgggatctcaatgcagcactaacgagtctgaaaaacctagcattttggtcgaaaaatgcatctcacccccggagggagatccagagagcgctgttactgagctacaatgtatctggcataatctgagttacatgaagtgttcgtggctcccagggcggaatacatctcccgatactaattacactctctattactggcacaggagcctggaaaagatccaccagtgcgagaacatttttcgtgagggccaatattttggctgtagtttcgacctgacaaaggttaaagatagctcattcgaacagcacagcgtccagataatggttaaagacaatgctggaaagattaagccttcgtttaacatcgtgccgctcactagcagggtaaaacccgatcctcctcatataaagaatctttccttccacaacgatgatttgtatgttcaatgggaaaatccgcagaactttatatccaggtgtcttttctacgaagttgaagtgaacaacagtcaaacggagacgcataatgtgttctacgtccaggaagctaaatgcgagaatcctgaattcgaaaggaatgtcgaaaacaccagctgcttcatggtgccaggcgtgctgcctgacaccctgaatacagtgaggattcgagttaagaccaacaagttatgctatgaggatgacaagttgtggtctaattggtcacaggaaatgtctattggaaagaagcgtaatagtacgttatatataactatgctactgattgtcccggtcatcgtcgccggcgccatcattgtgttgttgttgtacctgaagagactcaaaatcataatcttcccccccatccccgatccaggaaagattttcaaggagatgttcggagatcagaatgacgacactttacactggaagaagtatgatatctacgagaaacaaacaaaggaggagaccgacagcgtcgttctgatcgaaaacctgaagaaggccagccagtag

SEQ ID NO: 118809 - DNA, 840 bp, Artificial Sequence
  derived and/or modified sequence
atggaatggccagcacggctatgcgggctgtgggccctgctcctctgcgccggaggaggcggaggtggtgggggagcagctccgaccgagacccagcccccagtcacaaatctgtctgtaagcgtcgagaatttgtgcactgttatctggacttggaacccccctgaaggcgcttcatccaactgctctctctggtacttcagtcattttggggacaagcaggacaaaaaaattgcccctgagactagaagatctattgaggtcccattgaacgagaggatttgtctgcaggttgggtctcagtgcagtaccaacgagagcgaaaagccttcaatcctggtcgaaaagtgcatcagccccccagaaggtgatcctgaaagcgccgtcaccgagctccagtgtatctggcacaatttaagctacatgaagtgctcatggttgcccggacgaaatacgagccccgatactaattacaccctttactattggcatagatccctagaaaagattcaccagtgtgaaaatatctttagagagggtcagtattttggctgtagtttcgatttaaccaaggtaaaggactcctcctttgagcaacacagtgtccaaatcatggtgaaggacaatgcaggaaaaattaaaccctccttcaatatcgtccctctgaccagccgcgtcaagcctgaccctcctcacattaagaacctctccttccacaatgatgatctatacgtacagtgggagaatcctcaaaacttcatcagccgctgcctcttttatgaggtggaggtcaacaattcccaaaccgagacccacaatgtgttctatgtccgattctag

SEQ ID NO: 118810 - DNA, 1284 bp, Artificial Sequence
  derived and/or modified sequence
atggaatggcccgcaaggctctgcggcctctgggctttactgctctgcgccggtggcggaggaggcggagggggtgctgcccctaccgagactcagcctcctgttacaaatctgagcgtgtctgtcgagaatctgtgcacggttatatggacatggaatcctcctgagggggcttcctccaattgctcattgtggtacttctcacattttggcgataaacaggacaagaagattgcgcctgaaacacggaggagcatcgaagtgcccctgaatgaaaggatctgtctccaagtaggcagccagtgctccaccaacgagagtgagaaaccttccatcttggtagagaaatgtatcagtcccccagagggtgatcctgagagcgcggtgacggaactccagtgcatttggcacaatctgagctatatgaaatgctcatggctacccggacgcaacacctctccagataccaactacactttgtattactggcaccgctctctcgaaaagattcaccaatgtgaaaacatcttccgagaagggcagtactttggctgctccttcgacctcacgaaagtgaaggatagctcctttgaacaacactccgtccagattatggtcaaggataatgctggaaaaattaagccttccttcaatatcgtccccttaacgtcacgggtgaagccagatcctccacatattaaaaatttgtcctttcacaacgacgacctgtatgtccagtgggagaatccccagaattttatttcccggtgcctgttttatgaggtggaggtgaacaattctcaaacagaaactcataacgtgttttatgtgcaggaggccaaatgcgaaaatcctgagttcgaaaggaacgttgagaacacttcatgcttcatggtgccgggagtactgcccgatacactgaataccgtaaggattagagtgaagaccaataagctgtgttatgaggacgataaactatggtctaactggtcccaagagatgtcaataggaaagaagaggaactcaaccctatacatcacaatgcttctgattgttcccgtgattgtggctggggctatcatcgtgttgctgctgtacctcaagaggctgaagataattatcttccctcccattccggaccccggtaagatttttaaagagatgtttggcgaccagaacgatgatacactgcactggaagaaatacgatatctacgaaaagcagaccaaagaggaaactgatagtgtcgttttgatagagaatctgaagaaggccagtcaatag

SEQ ID NO: 118811 - DNA, 840 bp, Artificial Sequence
  derived and/or modified sequence
atggagtggcccgccagactgtgcggcctgtgggccctgctgctgtgcgccggcggcggcggcggcggcggcggcgccgcccccaccgagacccagccccccgtgaccaacctgagcgtgagcgtggagaacctgtgcaccgtgatctggacctggaacccccccgagggcgccagcagcaactgcagcctgtggtacttcagccacttcggcgacaagcaggacaagaagatcgcccccgagaccagaagaagcatcgaggtgcccctgaacgagagaatctgcctgcaggtgggcagccagtgcagcaccaacgagagcgagaagcccagcatcctggtggagaagtgcatcagcccccccgagggcgaccccgagagcgccgtgaccgagctgcagtgcatctggcacaacctgagctacatgaagtgcagctggctgcccggcagaaacaccagccccgacaccaactacaccctgtactactggcacagaagcctggagaagatccaccagtgcgagaacatcttcagagagggccagtacttcggctgcagcttcgacctgaccaaggtgaaggacagcagcttcgagcagcacagcgtgcagatcatggtgaaggacaacgccggcaagatcaagcccagcttcaacatcgtgcccctgaccagcagagtgaagcccgaccccccccacatcaagaacctgagcttccacaacgacgacctgtacgtgcagtgggagaacccccagaacttcatcagcagatgcctgttctacgaggtggaggtgaacaacagccagaccgagacccacaacgtgttctacgtgagattctag

SEQ ID NO: 118812 - DNA, 1284 bp, Artificial Sequence
  derived and/or modified sequence
atggagtggcccgccagactgtgcggcctgtgggccctgctgctgtgcgccggcggcggcggcggcggcggcggcgccgcccccaccgagacccagccccccgtgaccaacctgagcgtgagcgtggagaacctgtgcaccgtgatctggacctggaacccccccgagggcgccagcagcaactgcagcctgtggtacttcagccacttcggcgacaagcaggacaagaagatcgcccccgagaccagaagaagcatcgaggtgcccctgaacgagagaatctgcctgcaggtgggcagccagtgcagcaccaacgagagcgagaagcccagcatcctggtggagaagtgcatcagcccccccgagggcgaccccgagagcgccgtgaccgagctgcagtgcatctggcacaacctgagctacatgaagtgcagctggctgcccggcagaaacaccagccccgacaccaactacaccctgtactactggcacagaagcctggagaagatccaccagtgcgagaacatcttcagagagggccagtacttcggctgcagcttcgacctgaccaaggtgaaggacagcagcttcgagcagcacagcgtgcagatcatggtgaaggacaacgccggcaagatcaagcccagcttcaacatcgtgcccctgaccagcagagtgaagcccgaccccccccacatcaagaacctgagcttccacaacgacgacctgtacgtgcagtgggagaacccccagaacttcatcagcagatgcctgttctacgaggtggaggtgaacaacagccagaccgagacccacaacgtgttctacgtgcaggaggccaagtgcgagaaccccgagttcgagagaaacgtggagaacaccagctgcttcatggtgcccggcgtgctgcccgacaccctgaacaccgtgagaatcagagtgaagaccaacaagctgtgctacgaggacgacaagctgtggagcaactggagccaggagatgagcatcggcaagaagagaaacagcaccctgtacatcaccatgctgctgatcgtgcccgtgatcgtggccggcgccatcatcgtgctgctgctgtacctgaagagactgaagatcatcatcttcccccccatccccgaccccggcaagatcttcaaggagatgttcggcgaccagaacgacgacaccctgcactggaagaagtacgacatctacgagaagcagaccaaggaggagaccgacagcgtggtgctgatcgagaacctgaagaaggccagccagtag

SEQ ID NO: 118813 - protein, 193 aa, Artificial Sequence
  derived and/or modified sequence
MAAEPVEDNCINFVAMKFIDNTLYFIAEDDENLESDYFGKLESKLSVIRNLNDQVLFIDQGNRPLFEDMTDSDCRDNAPRTIFIISMYKDSQPRGMAVTISVKCEKISTLSCENKIISFKEMNPPDNIKDTKSDIIFFQRSVPGHDNKMQFESSSYEGYFLACEKERDLFKLILKKEDELGDRSIMFTVQNED

SEQ ID NO: 118814 - DNA, 582 bp, Artificial Sequence
  derived and/or modified sequence
atggccgccgagcccgtggaggacaactgcatcaacttcgtggccatgaagttcatcgacaacaccctgtacttcatcgccgaggacgacgagaacctggagagcgactacttcggcaagctggagagcaagctgagcgtgatcagaaacctgaacgaccaggtgctgttcatcgaccagggcaacagacccctgttcgaggacatgaccgacagcgactgcagagacaacgcccccagaaccatcttcatcatcagcatgtacaaggacagccagcccagaggcatggccgtgaccatcagcgtgaagtgcgagaagatcagcaccctgagctgcgagaacaagatcatcagcttcaaggagatgaacccccccgacaacatcaaggacaccaagagcgacatcatcttcttccagagaagcgtgcccggccacgacaacaagatgcagttcgagagcagcagctacgagggctacttcctggcctgcgagaaggagagagacctgttcaagctgatcctgaagaaggaggacgagctgggcgacagaagcatcatgttcaccgtgcagaacgaggactag

SEQ ID NO: 118815 - DNA, 582 bp, Artificial Sequence
  derived and/or modified sequence
atggctgcagaacccgtagaggataactgcataaacttcgtagctatgaagttcattgacaatactctctattttatcgctgaagacgatgaaaatctcgagtccgattattttggaaaactagagagtaagctgtccgtgatccgcaatctaaacgaccaggtcttgttcatagaccagggcaaccggccactgtttgaggatatgaccgacagcgattgtagagacaatgctcctcggaccatttttataatctcaatgtataaagactcacaaccccggggaatggcagtgaccattagtgtcaagtgcgagaagatcagcaccttgagctgtgaaaacaagatcatttcttttaaggagatgaatccacccgataatatcaaggataccaaatctgacatcatttttttccagcgatctgtacctgggcacgacaataagatgcagttcgaaagttcatcatatgagggttacttcctagcatgcgaaaaagaaagggacttgttcaagctgattctaaagaaagaggatgagctgggtgacagaagcatcatgtttactgtgcagaatgaggactag

SEQ ID NO: 118816 - DNA, 582 bp, Artificial Sequence
  derived and/or modified sequence
atggctgccgagcctgtcgaagacaattgcataaatttcgtagccatgaaatttatcgataacacgctatatttcatcgcggaggatgacgaaaatctggagtcagactacttcggtaaactcgagtcaaagctcagcgtgatccggaatctgaatgatcaagtgctgttcatcgatcaaggaaatcggccactgttcgaggacatgacggactcagattgtcgcgacaatgccccacgaactatctttattatctccatgtataaggactctcagccaaggggcatggcagtgactatatccgtcaagtgtgaaaagatctccacattatcttgcgagaacaaaataatcagcttcaaagagatgaatccccctgataatatcaaggacaccaagagtgatatcatatttttccagaggtcggtgcctggacatgacaataagatgcagttcgagtctagtagctatgaaggatatttcctcgcgtgcgagaaggagcgggatctttttaagctaatcctgaaaaaggaagatgagctgggtgatcggagtattatgtttaccgtccagaatgaagattag

SEQ ID NO: 118817 - DNA, 582 bp, Artificial Sequence
  derived and/or modified sequence
atggctgctgagcctgtggaggacaactgcatcaactttgtggccatgaagttcatcgacaacaccctgtacttcatcgccgaggatgatgagaacctggagagtgactactttgggaagctggagagcaagctgagcgtcatccggaacctgaatgaccaggtgctcttcatcgaccagggcaaccggcccctgtttgaggacatgacagacagcgactgccgggacaatgcccccaggaccatcttcatcatctccatgtacaaggacagccagccccggggcatggctgtgaccatctctgtgaagtgtgagaagatcagcaccctgagctgtgagaacaagatcatctccttcaaggagatgaaccccccagacaacatcaaggacaccaagagtgacatcatcttcttccagaggtctgtgcccggccatgacaacaagatgcagtttgagagcagcagctatgagggctacttcctggcctgtgagaaggagcgggacctcttcaagctgatcctgaagaaggaggatgagctgggggacaggagcatcatgttcaccgtgcagaatgaagattag

SEQ ID NO: 118818 - DNA, 1147 bp, Artificial Sequence
  derived and/or modified sequence
attctctccccagcttgctgagccctttgctcccctggcgactgcctggacagtcagcaaggaattgtctcccagtgcattttgccctcctggctgccaactctggctgctaaagcggctgccacctgctgcagtctacacagcttcgggaagaggaaaggaacctcagaccttccagatcgcttcctctcgcaacaaactatttgtcgcaggaataaagatggctgctgaaccagtagaagacaattgcatcaactttgtggcaatgaaatttattgacaatacgctttactttatagctgaagatgatgaaaacctggaatcagattactttggcaagcttgaatctaaattatcagtcataagaaatttgaatgaccaagttctcttcattgaccaaggaaatcggcctctatttgaagatatgactgattctgactgtagagataatgcaccccggaccatatttattataagtatgtataaagatagccagcctagaggtatggctgtaactatctctgtgaagtgtgagaaaatttcaactctctcctgtgagaacaaaattatttcctttaaggaaatgaatcctcctgataacatcaaggatacaaaaagtgacatcatattctttcagagaagtgtcccaggacatgataataagatgcaatttgaatcttcatcatacgaaggatactttctagcttgtgaaaaagagagagacctttttaaactcattttgaaaaaagaggatgaattgggggatagatctataatgttcactgttcaaaacgaagactagctattaaaatttcatgccgggcgcagtggctcacgcctgtaatcccagccctttgggaggctgaggcgggcagatcaccagaggtcaggtgttcaagaccagcctgaccaacatggtgaaacctcatctctactaaaaatacaaaaaattagctgagtgtagtgacgcatgccctcaatcccagctactcaagaggctgaggcaggagaatcacttgcactccggaggtagaggttgtggtgagccgagattgcaccattgcgctctagcctgggcaacaacagcaaaactccatctcaaaaaataaaataaataaataaacaaataaaaaattcataatgtgaa

SEQ ID NO: 118819 - DNA, 795 bp, Artificial Sequence
  derived and/or modified sequence
gctcccctggcgactgcctggacagtcagcaaggaattgtctcccagtgcattttgccctcctggctgccaactctggctgctaaagcggctgccacctgctgcagtctacacagcttcgggaagaggaaaggaacctcagaccttccagatcgcttcctctcgcaacaaactatttgtcgcagatggctctttgctttcattaggaataaagatggctgctgaaccagtagaagacaattgcatcaactttgtggcaatgaaatttattgacaatacgctttactttatagctgaagatgatgaaaacctggaatcagattactttggcaagcttgaatctaaattatcagtcataagaaatttgaatgaccaagttctcttcattgaccaaggaaatcggcctctatttgaagatatgactgattctgactgtagagataatgcaccccggaccatatttattataagtatgtataaagatagccagcctagaggtatggctgtaactatctctgtgaagtgtgagaaaatttcaactctctcctgtgagaacaaaattatttcctttaaggaaatgaatcctcctgataacatcaaggatacaaaaagtgacatcatattctttcagagaagtgtcccaggacatgataataagatgcaatttgaatcttcatcatacgaaggatactttctagcttgtgaaaaagagagagacctttttaaactcattttgaaaaaagaggatgaattgggggatagatctataatgttcactgttcaaaacgaagactag

SEQ ID NO: 118820 - DNA, 582 bp, Artificial Sequence
  derived and/or modified sequence
atggccgccgagcccgtggaggacaactgcatcaacttcgtggccatgaaatttatcgataacaccctatatttcatcgcagaagacgacgagaacctggaatccgactacttcggaaagctcgaatccaagctctccgtgattcgaaatctgaacgatcaagtgctgttcattgatcagggcaatcgaccactgtttgaggacatgaccgactctgattgcagggataacgccccacgaaccatattcattatctcgatgtataaagattcacagccacgaggcatggccgtaaccatatcggtcaaatgcgaaaagatatctacattatcctgcgaaaataaaattatcagcttcaaggaaatgaatccccccgataatattaaagatacgaaatctgacatcatcttcttccagcggtcggtccctgggcatgataacaaaatgcaattcgagagttcgtcttacgaaggctacttcctcgcctgtgaaaaagaacgagatcttttcaagctgattttaaagaaggaagatgaactaggcgatcgcagtatcatgttcactgtgcagaatgaggattag

SEQ ID NO: 118821 - DNA, 582 bp, Artificial Sequence
  derived and/or modified sequence
atggccgccgagcccgtggaggacaactgcatcaacttcgtggccatgaagtttatcgataataccctatacttcatcgcagaggatgacgagaacctcgagtctgactactttggaaaattagagagcaagctcagcgtgatccggaatctgaacgaccaggttctgttcatagatcagggaaaccggcccttattcgaagacatgactgactccgactgtcgggacaatgcaccgcgcacaatattcataatttcaatgtacaaggattctcagcccaggggcatggctgtgactatctctgtcaagtgcgagaaaatttccacactgtcctgtgagaataagattatctcatttaaggaaatgaaccctccagataatatcaaagatactaaatcagacatcatattctttcagcgttccgttccaggacacgacaacaagatgcagttcgagtcatcaagctatgagggctattttctggcttgcgagaaagagagagatttgtttaagctaatcctaaaaaaagaagacgagctaggggatcgatctattatgttcacagtacagaatgaagattag

SEQ ID NO: 118822 - DNA, 582 bp, Artificial Sequence
  derived and/or modified sequence
atggcagccgagcctgtggaagacaattgcatcaattttgtagccatgaagttcattgacaacacgttatatttcatcgccgaagacgatgagaacctcgagtctgactatttcggcaaattggagtccaaactttcagttataaggaacctgaatgaccaagttctgtttatcgaccaggggaatagacccttgtttgaagacatgacggattctgactgcagggacaatgccccaaggactattttcattatctcgatgtacaaggattcccaaccccgagggatggccgtgacgatttctgttaaatgtgagaagattagtactctctcatgtgaaaacaaaattattagttttaaagaaatgaacccccctgacaatatcaaggatacaaaatctgacattattttctttcagagatccgtgccgggacacgataacaagatgcagtttgaatcaagcagctacgagggctacttcctggcctgcgagaaagagcgtgacctctttaagctgattctgaaaaaggaggatgaattgggcgatagatccataatgtttaccgtgcagaatgaagactag

SEQ ID NO: 118823 - DNA, 582 bp, Artificial Sequence
  derived and/or modified sequence
atggcagccgaaccggtagaagacaattgcattaattttgtggcaatgaagttcattgacaacacactatattttattgcagaagatgacgagaatctggagtccgactatttcggtaaactggaaagcaaactatcagtcatccggaacttgaatgatcaggtcctgtttatagaccagggcaatcgacctttgttcgaggacatgaccgacagcgattgtagagacaacgcaccacgcaccatcttcataatctcgatgtataaagactcccagccccgaggtatggccgtcacaatctctgtcaagtgtgaaaagatatctacattgagttgcgagaataagatcattagcttcaaagagatgaatcctcctgataatataaaagataccaaatccgacatcattttttttcagaggtccgtgcctggccacgataacaagatgcaatttgaatcctcctcttacgaggggtacttcctcgcttgcgagaaggagcgtgacttattcaaactgattcttaaaaaggaagacgaactgggggacaggtcaatcatgtttacagtccagaacgaggactag

SEQ ID NO: 118824 - DNA, 582 bp, Artificial Sequence
  derived and/or modified sequence
atggcggcagaacccgtggaagacaactgcatcaactttgtggcaatgaagtttattgataacacactctatttcatagctgaagacgacgagaacctggagagcgactacttcggcaagcttgaatctaaactgtctgtgattaggaacctgaatgaccaagtgcttttcatagatcaaggaaataggcccttattcgaggatatgactgattcagactgccgcgataatgctccacgaaccatcttcatcataagcatgtataaagactctcagccccgaggtatggctgtgactatctctgttaagtgtgaaaaaatctcgaccctgagttgtgaaaacaaaatcatctcgttcaaggaaatgaaccctccagataacatcaaggataccaagtctgacatcatcttctttcagcggtctgtccccggccacgacaacaaaatgcagtttgaatcttcatcttatgagggatattttctcgcttgtgaaaaggagcgagacctctttaaattaattctgaaaaaagaagacgaacttggggaccgatctattatgttcacagtacagaatgaagactag

SEQ ID NO: 118825 - DNA, 582 bp, Artificial Sequence
  derived and/or modified sequence
atggctgccgaaccagtcgaagacaattgtattaattttgtggctatgaaattcatcgacaatactctttacttcatcgccgaggatgacgagaatctcgaatctgattactttgggaaattagaatctaaattgagtgtgatcagaaatctcaatgatcaagtgttattcatcgatcaggggaacagaccacttttcgaagacatgaccgatagtgattgtcgggataacgccccacggacaattttcatcatctccatgtacaaagattcacaaccgaggggaatggcggtaacaataagtgtgaagtgtgaaaagatctccacattaagttgtgagaacaagattatctcttttaaggagatgaatcccccagacaacattaaagacacaaaaagcgacatcattttcttccagcgctctgtacctggtcacgacaataagatgcaattcgagtcatcatcctacgagggttatttcttagcttgtgagaaagaacgcgatttatttaagctgattttgaaaaaagaggatgaactgggcgacagatccattatgttcacggttcaaaatgaggattag

SEQ ID NO: 118826 - DNA, 582 bp, Artificial Sequence
  derived and/or modified sequence
atggcggcagaacccgtggaagacaactgcatcaactttgtggcaatgaagtttattgataacacactctatttcatagctgaagacgacgagaacctggagagcgactacttcggcaagcttgaatctaaactgtctgtgattaggaacctgaatgaccaagtgcttttcatagatcaaggaaataggcccttattcgaggatatgactgattcagactgccgcgataatgctccacgaaccatcttcatcataagcatgtataaagactctcagccccgaggtatggctgtgactatctcagtcaaatgtgagaagatttcgaccctcagctgtgaaaataagataatcagtttcaaggaaatgaatccgcctgacaatattaaagacaccaagagtgatatcatctttttccagcgaagcgtaccaggccacgacaataaaatgcaattcgagagctctagttatgagggatactttctcgcctgtgaaaaagaacgggatttatttaaactcattcttaaaaaagaagacgaactcggggatcggtctatcatgtttaccgtgcagaacgaggactag

SEQ ID NO: 118827 - DNA, 582 bp, Artificial Sequence
  derived and/or modified sequence
atggcagccgagcccgtagaagacaactgtattaattttgtagccatgaaatttattgataacactttgtattttattgccgaagatgacgagaatttggaaagtgactacttcggaaagttagaaagcaagctgagtgtgatccgcaatctcaacgaccaggtcttattcatcgaccagggcaatcgtccattattcgaagatatgaccgactcggactgtagggacaacgcacctcgaactattttcataatctcaatgtacaaagattcccagccccgagggatggctgtaactatcagtgtgaagtgtgaaaagatttctaccctgtcttgtgagaataaaattattagctttaaagagatgaatccacccgacaatattaaagatactaaaagcgacataattttctttcagcgaagcgtgcccggccacgataataaaatgcagttcgaaagcagcagctacgaaggatactttcttgcctgcgaaaaagaacgtgatctgttcaagttgattctaaagaaggaggacgagctgggcgaccgatccatcatgttcacggtgcaaaatgaggactag

SEQ ID NO: 118828 - DNA, 579 bp, Artificial Sequence
  derived and/or modified sequence
atggcggctgagcctgtggaagataactgcatcaatttcgtggccatgaaattcatcgacaataccctctatttcatcgccgaggacgacgagaacttggagtccgattactttggaaaactggagagtaaacttagtgtcattcggaatctgaacgatcaggtcctgttcattgatcaggggaaccgcccgttatttgaggacatgacagattccgactgccgggataatgccccaaggacgatttttataatctcaatgtacaaggatagccaacccagagggatggccgtcacaatttccgtgaagtgtgagaagatatccactctcagctgtgagaataaaattatctccttcaaggaaatgaatccaccagacaatatcaaagacacaaagtctgatattatattctttcagagatcagtgcccggccatgataacaagatgcagtttgaaagtagctcctacgagggatatttcctagcatgtgaaaaagagcgggatttgttcaagttgatcttgaagaaggaggatgagctaggagaccgaagcataatgtttacagtccagaatgaagac

SEQ ID NO: 118829 - DNA, 579 bp, Artificial Sequence
  derived and/or modified sequence
atggccgcggagccagtggaggataattgcattaattttgttgctatgaagttcatcgataataccctgtactttattgccgaggacgacgagaacctggaaagcgactactttggtaagcttgagtccaaactgtccgtgatccggaatttgaacgaccaggtgttgtttattgatcagggtaaccgcccgctgtttgaggatatgacagactcagactgtcgtgataatgcaccacgaaccatcttcataatctccatgtacaaagacagccagccacgaggtatggcggtgacaatcagcgtgaagtgcgagaagataagtaccttatcctgcgagaataagataatcagtttcaaagaaatgaatccacccgataacatcaaggacaccaagtcggacattatcttttttcagcgctcagtgccgggacacgacaacaagatgcagtttgagtcatctagttatgagggatacttccttgcgtgtgaaaaggaacgtgatttattcaagctgatactgaagaaggaggatgagctgggtgatcggagcattatgtttaccgtgcagaacgaggac

SEQ ID NO: 118830 - DNA, 579 bp, Artificial Sequence
  derived and/or modified sequence
atggccgccgagcctgttgaagataactgtatcaactttgtcgcaatgaagttcatcgataataccctctacttcatcgccgaggacgacgaaaatcttgagagcgactacttcgggaagctggaatcaaagttgagtgtcatccgcaatctcaacgatcaggtgctgttcatcgatcaagggaatcgccccttgtttgaagatatgaccgattcggactgcagagacaacgctccacggaccatcttcattatctccatgtacaaggattcgcagccgagaggaatggctgtgactatcagcgtcaagtgcgagaagataagcacgctgtcgtgcgaaaacaagatcatttcgttcaaggagatgaacccaccagataacatcaaagacactaagtctgacattatcttctttcagcggagcgtgccgggacatgataacaagatgcagtttgagtccagctcttacgaaggctacttcttggcatgcgagaaggagcgcgacctgtttaagctgattctgaagaaggaggacgaactcggggatcggtccatcatgttcaccgtgcagaatgaagat

SEQ ID NO: 118831 - DNA, 579 bp, Artificial Sequence
  derived and/or modified sequence
atggctgcagaacctgttgaggataattgtatcaattttgtcgcgatgaagtttattgataatactctgtactttattgctgaagatgacgaaaaccttgaatccgactactttggaaagttggaatccaaactttcagtgattaggaacctcaacgatcaagtgcttttcatagatcaaggtaaccgcccgctgtttgaggacatgaccgactcggattgccgggacaacgccccgcgaaccattttcatcatatctatgtacaaggactcacagcctcgcggaatggcagtgaccatctccgtgaagtgcgagaaaatctcaaccctgtcttgtgaaaacaagataatctcattcaaggagatgaatccacctgataacataaaagatactaaatcagacattatcttttttcaaagaagcgtgccagggcatgacaacaaaatgcaattcgaatcctcctcctatgagggctacttcctggcatgtgagaaagagagagatctctttaaacttatactgaagaaggaagatgaattgggtgatcgctccatcatgttcactgttcagaacgaggat

SEQ ID NO: 118832 - DNA, 579 bp, Artificial Sequence
  derived and/or modified sequence
atggcggccgagccggtggaagataattgcataaacttcgttgccatgaaattcatcgataacaccctgtacttcattgccgaagacgacgagaatctcgagtctgactacttcgggaagctggagtctaagctttctgtgattcgtaatctgaatgatcaggtgctgtttatcgaccaggggaataggcccctctttgaagatatgaccgattctgactgtagggacaatgcaccccgaaccatattcataatttctatgtacaaagattcacagccacggggtatggccgtgaccattagtgttaagtgcgaaaaaatttctacactttcttgcgagaacaaaatcatttctttcaaggaaatgaatcctcccgacaacattaaagacaccaaaagtgacattattttcttccagcgatccgtccctggtcatgataataagatgcaattcgaaagtagttcctacgagggctacttcctggcatgtgaaaaggagagggatctgttcaagctcatcctcaagaaagaagacgaactcggtgatcggtccattatgttcacagtgcagaatgaagat

SEQ ID NO: 118833 - DNA, 579 bp, Artificial Sequence
  derived and/or modified sequence
atggccgcagaacccgtcgaagataactgtattaattttgtggctatgaaatttattgataatacactgtactttatcgctgaggatgacgagaaccttgagtccgactattttggcaaactagagagtaagctcagcgtgatccgcaatctgaatgaccaggttttatttattgaccaggggaacaggccgttgttcgaagacatgaccgactcagattgtcgcgacaacgctcctagaacaatctttattatctcaatgtacaaagatagccagccacgaggcatggccgttacaatttccgtgaaatgcgagaagattagcacattaagctgtgaaaacaaaatcatctcattcaaggagatgaatcctcctgacaacattaaagatactaagagtgacattatcttcttccagcggtcggtgccagggcacgataataagatgcagttcgagtcctccagctatgagggttattttctggcctgcgaaaaggagagagacctattcaagctgattctcaaaaaagaggatgagcttggagacaggagtatcatgttcacagtccaaaatgaagat

SEQ ID NO: 118834 - DNA, 579 bp, Artificial Sequence
  derived and/or modified sequence
atggccgcagaaccggtcgaagacaactgcatcaacttcgtggcgatgaagttcattgataatacgctttacttcatcgctgaagacgatgaaaacctggagtcggactacttcggtaaactggaatcgaaactttcggtgatcagaaatctgaatgaccaggttctcttcatcgaccaaggaaatcgcccgctgtttgaggacatgaccgatagtgattgccgagacaatgcgccgagaaccatctttatcatcagcatgtacaaggactcccagccacggggcatggcagtgactatcagcgtgaagtgcgagaagatctccaccctctcgtgtgaaaacaagattatctcattcaaggaaatgaatccaccagacaacatcaaagacaccaagtccgacatcatcttcttccaaagatcggtcccaggtcacgacaacaaaatgcaattcgaatcgtcgagctacgaaggatatttcctcgcttgcgaaaaagagcgcgatctttttaagctcatcctgaaaaaggaggatgaattgggcgaccgctcgattatgtttaccgtgcagaatgaggac

SEQ ID NO: 118835 - DNA, 579 bp, Artificial Sequence
  derived and/or modified sequence
atggcagccgagccggttgaggataactgtatcaatttcgtcgcaatgaagttcattgataacactctttactttattgcggaggacgatgaaaacctggagtcagattactttggcaaactggaatcgaaactcagcgttattaggaatcttaatgatcaagtgttgtttattgatcagggtaacagaccgctgtttgaggatatgaccgactcggactgcagagacaatgcacccagaactatctttatcattagcatgtacaaagattcgcagcctcgtggaatggcagtgacgatttcagtgaaatgtgaaaagataagcaccctgagctgtgagaacaagattatctcgtttaaggaaatgaatcctccagataacattaaggacactaagtccgatatcattttcttccagcgatcggtgcctggccacgacaataagatgcaatttgaatcgtcatcatatgaaggatacttcctcgcatgtgaaaaggaaagagatcttttcaaacttattcttaagaaagaggatgaactgggagatagatcaatcatgtttactgtccagaacgaggac

SEQ ID NO: 118836 - DNA, 579 bp, Artificial Sequence
  derived and/or modified sequence
atggctgcggagccggtcgaagacaactgtatcaatttcgtggctatgaagttcatcgacaacactctgtattttatcgccgaagatgatgaaaacctggaaagcgactattttggtaagttggaaagcaagctgagcgtcattcgcaacctgaatgatcaagtactctttatcgaccagggcaaccggccgctgttcgaggatatgactgattctgattgtcgtgataatgcccctcgcacaatcttcattatctccatgtataaggatagccagccacgaggcatggccgtcaccatttctgttaaatgtgagaaaataagcaccttgagctgcgaaaataaaattatcagcttcaaagaaatgaaccctccggataacattaaagacacgaaatccgacatcatcttcttccagcgcagcgtgcccggtcacgataacaagatgcagtttgagtccagtagttacgaaggctatttcctggcctgcgagaaggagcgcgacctgttcaaactcatcctgaaaaaagaagacgagctgggcgatagatctatcatgtttaccgtgcaaaatgaggat

SEQ ID NO: 118837 - DNA, 579 bp, Artificial Sequence
  derived and/or modified sequence
atggcagcggaacctgtggaggacaactgtataaactttgtggccatgaagttcattgacaataccctttacttcattgcagaggatgacgaaaaccttgaaagcgattacttcggcaagctcgagtcgaagttgtctgtgattaggaatctcaacgatcaggtccttttcattgaccaaggcaacagacctctgtttgaggatatgaccgatagcgattgccgagacaatgcaccccgaactatctttatcatttcgatgtataaggattctcaaccgcgcggaatggcagtgactatttcagtgaagtgcgaaaagatatcaaccttgagctgtgaaaacaagattatcagtttcaaggagatgaatcccccggataacattaaggacaccaaaagcgacattatcttttttcagcggagcgtccctggtcatgataacaagatgcaatttgagtctagctcgtacgagggatactttcttgcttgtgaaaaggaacgggacctgtttaaacttattctgaagaaagaggatgaactcggcgatagatccattatgtttactgtccagaatgaagat

SEQ ID NO: 118838 - DNA, 579 bp, Artificial Sequence
  derived and/or modified sequence
atggcagccgagccagtggaggacaactgcatcaacttcgtggcgatgaaattcatcgataacactctgtactttatcgcggaagatgacgaaaatctggaatcagactacttcggaaaacttgagagcaagctgtcagttatcagaaacttgaatgatcaagtcctcttcatcgaccagggaaatagaccgctgttcgaagatatgactgactcggattgccgcgacaacgccccccgcaccatctttatcatcagcatgtataaggactcccagccgcgcggaatggccgtgactatttccgtgaaatgcgaaaagatctcgaccctctcctgtgagaacaaaattatctccttcaaggagatgaaccctccagacaatattaaggacacgaagtctgatattatcttcttccagcggagcgtgccgggccacgataataagatgcaattcgaatcgagctcgtacgaagggtactttctggcttgcgagaaggaacgggacctgttcaagctcatcctgaaaaaggaggatgaactcggtgacaggtcaatcatgtttaccgtccagaacgaggac

SEQ ID NO: 118839 - DNA, 579 bp, Artificial Sequence
  derived and/or modified sequence
atggctgccgagcccgtcgaagacaattgcatcaacttcgtggcaatgaaatttatcgataataccctctatttcattgccgaggacgacgaaaatctcgagtctgattattttgggaaattggaaagcaagctgagcgttatccgaaatttgaacgatcaggtgctgttcatcgaccaaggaaaccgcccgttgtttgaggacatgaccgactccgattgccgagacaatgcaccgaggacaattttcatcatttcgatgtacaaggactctcagccccgtggtatggctgtgacaatctccgtgaagtgtgagaaaatatcgaccctgtcttgcgaaaataaaatcatatcatttaaagaaatgaaccccccggataatattaaggacacgaagtcagacataattttcttccagcgttcagtgccgggtcacgacaataaaatgcagttcgaatcgtccagctatgaaggctacttcttggcgtgtgagaaagagagggacctgtttaagctgatcctcaagaaagaggacgaactaggcgacagaagtatcatgtttacagtgcagaacgaagac

SEQ ID NO: 118840 - DNA, 579 bp, Artificial Sequence
  derived and/or modified sequence
atggccgccgagccagttgaggacaactgcatcaatttcgtggccatgaaattcatagacaatacactgtatttcatcgccgaagacgacgagaatctggaaagcgattatttcggaaagttggagagtaagctgagcgtgatacgcaatttgaatgaccaggttttgtttatagaccaagggaataggccactgtttgaagatatgaccgatagcgactgccgcgataatgcccctcggaccatctttatcatttcaatgtacaaggactcacaaccccgcggcatggcagttaccatctcagttaagtgcgaaaagatctctacactgtcatgcgagaataaaatcatttccttcaaggagatgaatcctcccgacaacatcaaagataccaagtccgatattatcttcttccaacgctctgtaccgggacacgacaataaaatgcagtttgagagttctagctatgaggggtatttcctcgcctgtgaaaaagaaagagaccttttcaagctgattcttaaaaaagaggacgagttgggtgatcgctccataatgtttacagtgcagaacgaggat

SEQ ID NO: 118841 - DNA, 579 bp, Artificial Sequence
  derived and/or modified sequence
atggccgctgagcctgtggaagataactgtatcaattttgtcgctatgaagtttatcgataacacactgtattttatcgcagaagatgacgagaacctagaatcagattactttggaaagttagagagtaagttgtcagttataaggaacctcaacgaccaggtcctctttatcgaccaaggtaaccgacctctgtttgaagatatgactgatagcgactgtagggataacgctccccggacaatctttatcattagcatgtacaaagactcccaacccagaggcatggcagtgactatcagcgtgaagtgcgagaaaatctccacactgagctgtgagaacaagattatcagctttaaggaaatgaacccaccggacaatatcaaggatactaaaagtgacataatcttctttcaaagatctgtccccggacacgacaacaagatgcagtttgagtccagttcgtatgagggctattttcttgcttgcgagaaagagagagaccttttcaaactgatacttaagaaagaagatgagttgggggatcgatccatcatgttcaccgtccagaacgaagat

SEQ ID NO: 118842 - DNA, 579 bp, Artificial Sequence
  derived and/or modified sequence
atggctgcagaaccagttgaagataattgtattaattttgtagctatgaaatttattgataatacactttattttattgctgaagatgacgaaaatcttgaaagtgattattttggaaaattagaaagtaagctcagtgttattcgtaaccttaatgatcaagtactctttattgaccaaggaaatagacctttatttgaagatatgacagattcagattgtagagataatgcaccaaggactatatttattattagtatgtataaagactcacaaccaagaggtatggctgtaacaatatctgttaaatgtgaaaagattagtacactttcatgtgaaaataaaattatatcttttaaggaaatgaatccaccagataatataaaagatacaaaaagtgatattatattctttcaacgttcagtaccaggtcatgacaataaaatgcaatttgaaagtagttcttatgaaggatattttttagcatgcgaaaaagaaagagacctttttaaattaattttaaaaaaagaagatgaactaggagatagaagtattatgtttacagttcaaaatgaagat

SEQ ID NO: 118843 - DNA, 579 bp, Artificial Sequence
  derived and/or modified sequence
atggcagctgaaccggtggaggacaattgtattaactttgtggccatgaagttcatcgacaatacgctgtacttcattgctgaggatgatgaaaacctcgaatccgactatttcggaaaactcgagagcaaactctctgtgatccgcaaccttaacgatcaagtgctgtttatcgaccaaggtaatcggccgctgtttgaggatatgaccgactcggattgccgggacaacgcgccgcgtactatcttcatcatttccatgtacaaggacagccaacctcgggggatggcggtcactatttccgtgaagtgcgagaaaatctcgactctgtcatgcgagaacaagatcatctccttcaaagaaatgaacccgccagacaacattaaggacactaagagcgacatcatctttttccaaaggtccgtgccaggacacgacaacaaaatgcaattcgaaagctcgtcgtacgaaggatacttcctcgcgtgcgaaaaggaaagagatttgttcaaactgatcctgaagaaggaggacgaactgggagatcggagcatcatgttcaccgtccaaaacgaagat

SEQ ID NO: 118844 - DNA, 579 bp, Artificial Sequence
  derived and/or modified sequence
atggccgccgaaccagttgaagacaattgtatcaactttgtggctatgaaatttatcgataatacactctacttcatcgctgaggacgatgagaacctagaatctgattacttcggtaagttggagagcaagctgagcgtaattcggaatctgaatgatcaagtacttttcattgatcagggaaaccgcccattattcgaggatatgacagattcagactgtagagataacgctccgcgaaccatctttataatttcaatgtataaggatagccagccccggggcatggcagtgactatttctgtgaagtgtgagaaaatctctaccctgtcgtgcgaaaataagataattagctttaaggagatgaaccccccggacaacattaaagatacgaagagcgacatcatcttcttccagcgatcggtccctggacatgacaataaaatgcaattcgagagctcaagctacgaaggctatttcctagcttgcgagaaagaacgtgacctgtttaagcttatccttaagaaggaggacgagttgggcgatcggtccattatgtttaccgtgcagaacgaagac

SEQ ID NO: 118845 - DNA, 579 bp, Artificial Sequence
  derived and/or modified sequence
atggctgcagaacctgtcgaagacaattgcattaatttcgtcgctatgaagtttatcgataatacactttattttatcgccgaagacgacgaaaacctggagtctgattacttcggcaagctggagagtaagttgagtgttataagaaacctgaacgaccaggtcctcttcatcgaccagggaaatcggcccctgtttgaggatatgaccgacagcgactgccgcgacaacgcccctcggactatctttatcataagtatgtacaaggactctcagcctcgaggaatggctgtgactatttcagtgaaatgcgagaagattagcactctgtcttgtgagaacaaaatcatttcattcaaagagatgaaccctcctgataacatcaaagatactaagagtgacataatcttctttcagcggtccgtgcctggccacgacaacaaaatgcagttcgaaagttcttcctacgagggttactttctggcgtgtgaaaaagaacgcgacctgtttaagctgatactcaaaaaggaagacgagttgggtgacagatccattatgttcacagtgcagaatgaagat

SEQ ID NO: 118846 - DNA, 579 bp, Artificial Sequence
  derived and/or modified sequence
atggctgccgagcccgtggaagataattgcataaattttgtggccatgaaattcattgataatacgctctatttcattgccgaggatgatgaaaatcttgaatcagattatttcggaaaattggagtcaaaactcagtgtgattagaaacctgaatgatcaggttctatttatcgatcaggggaatagacccctattcgaagatatgactgatagtgattgccgagacaacgctccacggactatctttataatttctatgtataaagattcacagcccagggggatggcagtgacaattagtgtgaagtgtgagaaaatatccacacttagttgtgagaataaaataatctcttttaaagaaatgaaccccccagataacatcaaagatactaaatccgatatcatttttttccaaagaagtgtaccaggacatgataataaaatgcagtttgaatccagttcatacgaagggtatttcctcgcctgtgagaaagaaagagatctcttcaaactgatcctcaagaaagaagatgaactaggagacaggagtatcatgttcactgttcaaaatgaagac

SEQ ID NO: 118847 - DNA, 579 bp, Artificial Sequence
  derived and/or modified sequence
atggcggcggaaccggtggaagataattgtatcaatttcgtcgctatgaagttcatcgacaacactctttacttcatcgccgaggacgatgagaatctcgaatctgactacttcggaaaactcgagtcgaaactgtcagtcatccgtaacctgaacgaccaggtgttgtttatcgaccaggggaaccggccactgttcgaagatatgaccgacagcgactgccgggataacgcccctcgcacgatcttcatcatctcgatgtataaagactcccaaccacgcggcatggcggtgaccatttcagtcaaatgcgaaaagatcagcacgctgtcctgcgagaacaagatcatctctttcaaggaaatgaacccgccggacaacattaaggatacgaaatccgacataatctttttccagagatccgtgcccggccacgacaacaagatgcaatttgaatcctcgtcctacgaggggtactttctcgcgtgcgagaaggaaagagatcttttcaagctgatccttaagaaggaagatgagctgggtgaccggagcatcatgttcactgtgcaaaatgaggat

SEQ ID NO: 118848 - DNA, 579 bp, Artificial Sequence
  derived and/or modified sequence
atggctgccgaacctgttgaagataattgtattaactttgtcgccatgaagtttattgacaacacgctttactttattgcggaagatgacgaaaacttggagtcggactattttggtaaactggaatctaagctgtcggtcattagaaaccttaatgatcaagtgctgtttatcgaccagggcaatcggccactcttcgaagatatgaccgactcagactgtagagacaacgcacctcggacgattttcatcattagcatgtacaaggattcccaacctcgtggaatggccgtcaccatctcggtaaagtgtgagaagatcagtactttgtcatgcgagaataagatcatttcgttcaaggagatgaacccacccgataacattaaagatactaagtccgatatcattttcttccaacgctcagtgcccggacatgacaacaagatgcaatttgaaagctcctcgtacgaaggttactttctcgcgtgcgaaaaggagcgagatcttttcaagctcattttgaaaaaagaagatgaacttggagataggtcgataatgttcaccgtgcagaacgaggat

SEQ ID NO: 118849 - DNA, 579 bp, Artificial Sequence
  derived and/or modified sequence
atggcagccgagccagttgaggataactgtataaacttcgtggcgatgaaattcatagataataccctgtactttattgcagaagatgacgaaaatctcgaaagcgactactttggaaagctggaatccaagctgtcagtcattcgaaacctcaatgatcaggttctgtttattgaccaaggtaataggcctttgttcgaggacatgaccgattcggattgccgcgataatgcaccaaggactatattcatcatttccatgtataaagattctcaaccacgcggaatggccgtgaccatttccgtgaagtgtgagaaaatcagcactctgtcctgtgagaacaagatcatttcctttaaagagatgaatccgccagacaacatcaaagacacgaagtcggacattatcttcttccaaagatccgttcccgggcatgataacaaaatgcagttcgaaagctcatcatacgaaggttactttcttgcatgcgaaaaggaaagagatctgtttaagctgattttgaagaaggaggacgagctcggagataggtcaatcatgtttactgtccagaacgaggat

SEQ ID NO: 118850 - DNA, 579 bp, Artificial Sequence
  derived and/or modified sequence
atggctgccgagcccgtggaggataactgtatcaatttcgtagccatgaagttcatcgacaatacactgtacttcattgctgaggatgacgagaacctggaaagcgactatttcgggaagcttgaatctaagctgtcagtgatccgcaacctgaacgatcaggttctttttattgatcaaggaaatagaccactttttgaagacatgaccgattcggactgtcgcgataatgctccacggactatcttcatcattagcatgtacaaggactctcaacccaggggcatggccgtcactatctcggtgaagtgcgagaagatctccaccctgagttgcgagaacaaaatcatctctttcaaagagatgaacccacccgataatatcaaagacacaaaaagtgatataatcttcttccagcgctccgtgcccggacacgacaataagatgcagtttgagtcttccagctacgagggatattttttggcatgtgaaaaggaacgggatctgtttaagctgattctaaaaaaggaggacgaactgggcgaccgtagcattatgttcactgtccagaacgaggat

SEQ ID NO: 118851 - DNA, 579 bp, Artificial Sequence
  derived and/or modified sequence
atggccgcagagccggtggaggacaactgtatcaactttgtggccatgaaattcatcgacaacaccctgtactttattgctgaggacgacgagaatctcgaatccgattacttcggcaagctggagtccaagctgtccgtaatccgcaacttgaatgaccaagtgctcttcattgatcagggaaataggccactgttcgaagatatgactgactcggattgccgagacaatgctccgagaaccatctttatcatatcgatgtacaaagacagccagccaagaggaatggcggtaaccatctcggtgaagtgcgagaaaatctctactcttagctgcgagaataagatcatctcgttcaaagaaatgaaccctccggacaacattaaggataccaagtccgatatcatctttttccagcgctcggtgcctggtcatgataacaagatgcaatttgaatcatctagttatgaaggatacttcctggcatgcgaaaaagaacgcgacctgttcaagctcatcctgaagaaggaagatgagttgggcgatcggtcgattatgttcactgtgcagaacgaagat

SEQ ID NO: 118852 - DNA, 579 bp, Artificial Sequence
  derived and/or modified sequence
atggccgctgaacccgtggaagataattgcatcaattttgtggcgatgaagttcattgataacactctctacttcatcgcagaggatgatgaaaacttggaatcggactactttggtaaactggaaagcaaactgtcagtgattcgcaatctgaacgatcaggtccttttcatcgaccagggaaatcgtccgctgttcgaagatatgaccgactccgattgccgagacaacgccccgcgcaccattttcattatcagcatgtataaagactcccagcctagagggatggcagtaactatctcagtaaaatgcgaaaagatatcgactctcagctgtgagaataagattatctcatttaaggagatgaacccccctgacaacatcaaggacaccaagtctgacatcattttcttccaacggtccgtcccaggccacgacaacaagatgcagtttgagtcgagctcatacgagggatacttcctggcctgtgagaaggaaagggacttgtttaagttgatcctgaaaaaggaggacgaacttggtgacagatcgatcatgttcacggtccaaaacgaggac

SEQ ID NO: 118853 - DNA, 579 bp, Artificial Sequence
  derived and/or modified sequence
atggcggccgaaccggttgaagacaactgtataaattttgttgccatgaaatttattgataataccctgtactttattgcggaggacgacgagaacctggagtcggattacttcgggaagctagaatctaagttgagtgtcatccgaaacctgaatgaccaagtcctttttatcgatcaaggaaatcgacctctgttcgaggacatgaccgactcagattgcagggacaatgcaccacgaaccatttttataatcagtatgtataaggactcccagccgcggggtatggcagtcaccattagcgtaaagtgtgaaaaaatcagtaccctatcgtgtgagaataagatcatctcctttaaggaaatgaaccctcccgacaatatcaaagacactaagtcggacatcatttttttccaaagatcggtaccaggtcatgataacaagatgcaattcgaatcttcctcatatgaaggttacttcctcgcatgcgaaaaggaacgggatttgttcaagctaatcttgaaaaaagaggatgagcttggtgatcgtagcatcatgtttacggtacagaacgaggac

SEQ ID NO: 118854 - DNA, 579 bp, Artificial Sequence
  derived and/or modified sequence
atggccgccgagccagtggaagacaactgcataaactttgtggctatgaaatttattgacaataccctgtatttcattgctgaagacgatgagaacctagaatccgactattttggtaaactggagtccaagctatccgtgattcgaaaccttaatgatcaagtcttgttcatcgaccaggggaatcggccgctcttcgaagacatgaccgacagcgactgtcgggataacgccccacggactatattcattatttcaatgtacaaggacagccagccaagagggatggccgtgacaatcagcgtgaagtgtgagaagatttcaacacttagctgcgagaacaaaataatcagtttcaaggagatgaatccccctgataatattaaggacacaaaatcagacatcatattttttcagcggtccgtgcctgggcatgataacaagatgcagttcgaatccagctcctacgagggttatttcctggcctgtgaaaaggaaagggacttattcaagctgattctcaagaaggaagacgagctgggtgataggtcgatcatgtttacggtgcagaacgaagac

SEQ ID NO: 118855 - DNA, 579 bp, Artificial Sequence
  derived and/or modified sequence
atggcagcagaaccagtagaagacaattgtattaatttcgtagctatgaagtttattgataataccctctactttatcgcggaggacgatgaaaatttagaaagcgactattttggaaagcttgaatcaaagctttcagtaattcgcaatctcaatgatcaagtattgttcatcgatcaaggaaatagaccgctctttgaagacatgacagattccgattgtcgcgataatgcaccgcgaacgatttttatcattagcatgtataaagattcccagccacgcggaatggcggttaccatttctgttaaatgcgaaaaaattagcacactctcttgcgagaataaaattattagttttaaagagatgaatccgccagacaatatcaaagatacaaaatctgatattattttttttcagcggtcggtaccgggacatgataacaagatgcaatttgaatcgtcgtcttacgaaggctacttcttagcctgtgaaaaagaaagagatctgtttaagttgattctgaagaaagaagatgagttgggagatcgtagcattatgtttacagtacaaaatgaggat

SEQ ID NO: 118856 - DNA, 579 bp, Artificial Sequence
  derived and/or modified sequence
atggcagctgagcccgtagaggataattgcatcaatttcgtggctatgaagtttatagataacactctttactttatcgctgaagatgatgaaaacctggaatccgattacttcgggaaactcgaatcaaaactgtcggtgatccggaaccttaatgatcaggtgttgttcatagatcagggaaaccgaccactcttcgaagatatgacagattcagattgccgggataacgctcctagaactatcttcataatcagtatgtacaaagacagtcagcctagggggatggcagtgacaatcagtgtgaaatgcgagaagatctctactctttcctgtgaaaataaaataatctcctttaaagaaatgaatccaccagataacataaaagatactaaatcagatatcatattctttcagcgatccgtccctgggcacgataataaaatgcagttcgaatcttcatcctatgagggatacttcctcgcctgcgaaaaggaacgcgacctctttaaactaatactcaagaaggaagatgaactcggagatcggtccatcatgtttactgtgcagaatgaagac

SEQ ID NO: 118857 - DNA, 579 bp, Artificial Sequence
  derived and/or modified sequence
atggcagccgaacctgtggaggataattgtataaacttcgtggctatgaagtttatcgataataccctttactttattgcagaggacgatgaaaaccttgaatccgattactttggcaagctggagtcaaaactttcagtcattagaaacctgaatgatcaggtcctgtttatcgatcaagggaaccgcccgctctttgaggatatgactgattccgattgcagggataatgccccacggactattttcattatctccatgtacaaggactcacaaccacgaggaatggcagtgacgatctcagtcaaatgtgagaaaatctcgactctttcctgcgagaacaagatcatttcgttcaaggaaatgaaccctcccgataacataaaggataccaaatccgatatcatcttcttccaacgaagcgtccctggtcatgataacaagatgcaattcgagagctcatcctacgaagggtactttctcgcatgtgagaaggaacgcgatcttttcaaacttattctcaagaaggaagatgaattgggggatagatcaattatgtttaccgtgcaaaatgaagat

SEQ ID NO: 118858 - DNA, 579 bp, Artificial Sequence
  derived and/or modified sequence
atggccgctgagcctgtggaagacaattgtattaacttcgtggctatgaagttcatcgataacactctttacttcatcgcagaggatgacgaaaacctggaatccgattacttcgggaagttggaatctaaactctcggtgattcgaaatcttaatgaccaggtgttgttcatcgaccagggaaataggcccctgtttgaagacatgaccgatagtgactgcagagacaatgccccccgcactatcttcattataagcatgtacaaggacagccaacctagaggtatggccgtaactatcagtgttaagtgtgaaaagatatccactctcagttgtgagaataagattataagcttcaaggaaatgaacccgcctgataacatcaaagacaccaaaagtgacatcatctttttccagagatccgttccaggacacgataacaagatgcagttcgagtcgtcctcctatgagggttactttcttgcctgtgaaaaggagagagacttgttcaagctcatcctgaagaaggaggatgaacttggagaccgcagtattatgttcactgtacagaacgaggac

SEQ ID NO: 118859 - DNA, 579 bp, Artificial Sequence
  derived and/or modified sequence
atggccgctgaaccagtcgaggacaattgcattaactttgtggccatgaaattcatagataataccctctacttcatcgctgaagatgacgagaacctggagtcggattacttcggaaagctggagtcaaagttgtcggtcatccgcaacttgaatgatcaggtgctcttcatcgaccagggaaatcggccgttgttcgaggacatgacggacagcgactgccgcgacaatgccccgaggactatctttatcatctcaatgtacaaagatagccaacctcgcgggatggctgtgactatttcggtgaagtgcgaaaagattagcactctctcgtgtgaaaacaaaatcatcagcttcaaagagatgaacccacccgataacatcaaggacactaagtccgacatcatcttttttcaacggagcgtcccgggtcacgacaacaagatgcagttcgagtcctcatcctatgaaggatacttcctggcatgcgaaaaggaacgggatctgttcaagctgatactgaaaaaggaggacgaacttggcgatagatccatcatgtttacggtgcagaacgaagat

SEQ ID NO: 118860 - DNA, 579 bp, Artificial Sequence
  derived and/or modified sequence
atggctgcagaacccgttgaagataattgtattaactttgtcgccatgaagttcattgataataccctctacttcatcgcggaagatgatgaaaatcttgaatctgactattttggaaagcttgagagcaaactgtctgtgattagaaacctcaacgatcaagtgctgtttatagaccagggcaatcggcctctattcgaggacatgacagacagcgattgccgtgataacgctccacgcactatattcatcatcagcatgtacaaggattcacagcctcgtggcatggcagtcaccattagcgtgaagtgcgaaaagatttcaacattgtcctgtgagaataagatcatctccttcaaggagatgaaccctcccgataatataaaggacaccaagtcagatatcatcttttttcagagatctgtacccggacatgataataagatgcagttcgaatcgagctcttatgagggttattttttggcgtgtgagaaagaaagagatctgttcaagcttatcttaaaaaaggaggatgagctcggggaccggagtataatgtttacagtgcagaatgaagat

SEQ ID NO: 118861 - DNA, 579 bp, Artificial Sequence
  derived and/or modified sequence
atggccgcggaaccggtcgaagacaattgtattaattttgtcgcgatgaaattcatcgataacactctgtacttcattgcagaggatgacgagaatctcgagagcgactacttcggtaaacttgagtccaagttatcagtcatccgcaacctgaacgatcaggttctgttcatcgatcagggtaatcggcccctcttcgaagacatgactgacagcgactgcagggacaacgcgccgaggacaatttttatcataagtatgtacaaggactcacaacctcggggcatggcagtcacgatctcagtaaagtgcgagaagatttccacactctcttgcgagaataagatcattagcttcaaggagatgaatcctcctgacaatattaaagatacaaaatctgacatcatcttcttccagcgatccgttccagggcacgacaataagatgcagttcgagagtagttcatacgaaggctattttttggcctgtgagaaagaacgggacctattcaagctgatattgaaaaaggaggatgagttgggagatagatctattatgttcacggtgcagaatgaagac

SEQ ID NO: 118862 - DNA, 579 bp, Artificial Sequence
  derived and/or modified sequence
atggcagcggagcccgtcgaagacaactgtataaacttcgttgctatgaaattcatcgacaacaccctctatttcattgctgaggacgacgagaacctggaaagtgactacttcgggaaactggagagtaagttatccgtcatcaggaacctcaacgatcaggtgctatttatcgatcagggaaaccggccgctgtttgaggacatgaccgatagtgattgtagggacaatgcaccccgaacaatcttcattatctctatgtataaggattcgcagcctcgcgggatggccgtgacaatcagcgtgaagtgtgagaagatatcaaccctttcgtgtgagaataagattataagcttcaaagagatgaatcctccagataatataaaggatacaaaatctgatatcattttctttcagcgatccgttcccggacatgacaacaaaatgcagtttgaaagttcctcttacgagggatatttcctagcctgtgagaaggagagagacttgttcaagctgatcctgaagaaggaagacgagcttggggaccggagcatcatgtttactgtccagaatgaggat

SEQ ID NO: 118863 - DNA, 579 bp, Artificial Sequence
  derived and/or modified sequence
atggcagcggaacccgtcgaggacaattgcatcaacttcgtggctatgaagttcatcgataacaccctgtacttcatcgccgaggacgacgaaaacctggaatcagactacttcggaaagctcgagagcaaactgtctgtgatcaggaatctgaatgaccaagtgctcttcattgaccagggtaatcgcccgctcttcgaagatatgaccgacagcgactgccgcgacaacgcccctagaaccatcttcattatctcgatgtacaaagatagccagcctcggggcatggcggtgaccatctcggtgaagtgtgagaaaatctctacccttagctgcgagaataagatcatctccttcaaggaaatgaacccaccagacaatatcaaggacactaaaagtgacatcattttcttccagcggagcgtccctggccacgacaacaaaatgcaattcgaatcgtcgagctacgagggctactttctggcctgtgaaaaggaacgagatctgttcaagttgattctcaagaaggaagatgagctgggcgaccgcagcatcatgttcacggtccaaaacgaggat

SEQ ID NO: 118864 - DNA, 579 bp, Artificial Sequence
  derived and/or modified sequence
atggcagcagagcccgttgaagacaactgtattaacttcgtggctatgaaatttatagataatacactgtacttcattgccgaggatgatgagaacctggagtctgactacttcggaaaactcgaatccaaattgtcagttatacgtaacctcaatgatcaggttctcttcattgatcagggtaaccgcccattgttcgaggatatgaccgactctgattgtcgtgataatgccccccgcaccatctttattatctccatgtacaaggacagtcagccacgtggtatggctgtaacaataagcgtcaaatgcgagaagatctcaacactgtcttgcgagaataagatcatttcttttaaggagatgaatcctcccgataacattaaagacaccaagtcagatattatcttttttcagaggtctgtgcctggccacgacaacaagatgcaatttgaatccagttcatacgaaggttactttctggcctgtgaaaaagagcgcgaccttttcaaattgatcctcaaaaaggaggacgagttgggtgatagaagcattatgtttaccgtgcagaacgaggat

SEQ ID NO: 118865 - DNA, 579 bp, Artificial Sequence
  derived and/or modified sequence
atggcagctgaacccgtcgaggataactgcatcaacttcgtggcgatgaagtttatcgataacaccctgtacttcatcgccgaagatgatgagaatcttgaatcagactacttcggaaagctggaatccaagctgtcggtgattaggaacttgaacgatcaagtgctctttatcgaccaggggaatcgaccgctgttcgaggatatgactgactccgactgccgcgacaatgctccgaggacgatcttcataatctcgatgtacaaggacagccagccgagaggaatggccgtcactatctctgtgaagtgcgaaaagatctcaactctgtcgtgcgagaataagatcatctcgtttaaggaaatgaacccaccagataacattaaggacaccaaaagcgacatcattttcttccagcggtcggtccccggccacgacaacaaaatgcaatttgagtctagttcatacgaaggatatttcttggcatgtgagaaggaacgcgacctgttcaaattgatccttaagaaagaggacgaattgggtgaccggtctattatgttcaccgtgcagaacgaagat

SEQ ID NO: 118866 - DNA, 579 bp, Artificial Sequence
  derived and/or modified sequence
atggcagcagaaccggtggaggataattgcattaactttgtcgccatgaagtttatcgacaacacgctgtactttatcgctgaggatgatgaaaacctcgaatccgattacttcggaaaattggaatcaaagttgtcggtcattaggaacctgaatgaccaggtgctgttcatcgaccagggcaatcgccccctctttgaggacatgacggacagcgattgcagggacaatgctccgcgcactattttcatcatttcgatgtacaaggattcgcagccacggggaatggccgtgacgatctcagtcaagtgcgagaaaatctccaccctgtcatgtgaaaacaaaatcatctcgtttaaagagatgaatcctccagacaacatcaaggacaccaagtccgacatcatcttcttccagcggagcgtgcctggtcatgacaacaagatgcaattcgaatcatctagctacgagggatacttcctggcttgtgagaaggaaagggatctctttaagctgatcctgaagaaggaggacgaactcggagatcggtcgatcatgttcactgtccagaatgaggac

SEQ ID NO: 118867 - DNA, 579 bp, Artificial Sequence
  derived and/or modified sequence
atggctgctgaaccagttgaggacaattgcattaacttcgtggccatgaagtttatagataacaccctttactttatagcagaggatgacgaaaacctggaatcggattactttggcaagttggagtcgaaactctcagtcattcgcaatcttaatgatcaggtcctcttcatcgatcagggaaaccgtccccttttcgaagatatgaccgacagcgactgtagagacaatgcaccgcgaactatctttatcatttccatgtacaaggattcgcaaccgagaggaatggccgtgaccatcagcgtcaagtgtgaaaagatatctactctgagctgcgaaaacaagatcatctcattcaaagagatgaaccctcctgacaatatcaaggacactaaaagcgacattatctttttccaacggtccgtgcctgggcacgataacaaaatgcaatttgaatcatcctcatatgaaggctacttccttgcatgtgagaaggagagagatctctttaaacttattctgaagaaggaggacgaattgggtgatcgttccatcatgtttactgtgcagaacgaagat

SEQ ID NO: 118868 - DNA, 579 bp, Artificial Sequence
  derived and/or modified sequence
atggcagctgagcctgtggaagataactgcatcaatttcgtcgccatgaagttcatagataatacactgtacttcattgccgaagatgatgagaacctcgaatccgactatttcggaaaattggagtctaagctgtctgtaatacggaacttgaatgatcaggtcttgttcattgatcaaggtaaccggcccctttttgaggacatgacagattcagactgtcgcgacaacgcccctcgaaccatattcatcattagcatgtataaggacagccagccacgcggaatggcagtgacaattagtgtcaaatgtgagaagataagtacccttagctgcgagaacaagatcatctcttttaaggaaatgaacccccctgacaacattaaggacacgaagtccgacataatcttctttcagcgttcagtacccggtcatgacaataagatgcagtttgagtcatcttcgtatgagggctacttcctggcctgtgagaaagagagggacctgtttaagctgatcctgaagaaggaagacgagcttggtgatcgttccattatgttcaccgttcagaacgaggat

SEQ ID NO: 118869 - DNA, 579 bp, Artificial Sequence
  derived and/or modified sequence
atggcagccgaacctgtcgaagataattgcattaactttgttgcaatgaaattcatagacaacaccttgtacttcattgcagaagatgatgagaatcttgaatccgattactttggtaaactggagtcgaaactttcggtgatcagaaacctgaacgatcaggtgttgttcatagaccaaggcaaccgtccactgtttgaagatatgaccgatagcgattgtcgtgataacgcgcctcgcaccatcttcatcataagcatgtacaaggatagccagcctcggggtatggcagtcacgatttcggtgaagtgtgaaaagatcagcacgcttagctgcgaaaacaagattatcagctttaaggaaatgaatcccccagacaatatcaaagacactaaatctgacatcatcttttttcaaagatccgttccaggacatgataacaagatgcaatttgaaagctcctcctatgaaggatactttctcgcctgtgagaaagagcgcgacctctttaagctgattctcaagaaagaagatgaactgggagatcgaagcataatgtttaccgtgcaaaacgaagat

SEQ ID NO: 118870 - DNA, 579 bp, Artificial Sequence
  derived and/or modified sequence
atggctgcagagcctgttgaggataattgtatcaacttcgtcgctatgaaattcatcgataacaccctgtactttatagctgaggatgatgaaaacctggaatccgattatttcggcaaattggagtccaaattgagtgtgatcaggaaccttaatgatcaggtactattcatcgaccagggcaaccggcctctcttcgaagacatgactgattccgattgtagagacaacgctccgcggactatctttataatatctatgtacaaagatagtcagccacgagggatggccgtaactatcagcgtcaagtgcgaaaaaatctctactctcagctgtgagaacaagatcatctcttttaaggaaatgaacccaccagataacatcaaagatacgaagtcagatattatattttttcaacggagtgtgcctggacatgataataagatgcaatttgagtcttcttcctatgaaggctatttcctcgcatgcgagaaggaaagggatctgtttaaactcatcctgaagaaagaagacgaactcggagacaggtcaattatgttcactgttcagaacgaggat

SEQ ID NO: 118871 - DNA, 579 bp, Artificial Sequence
  derived and/or modified sequence
atggcggcggaaccggtagaagataattgtataaattttgttgcgatgaaatttatagataatacgttatattttatagcggaagatgatgaaaatctagaatcggattattttggtaaattagaatcgaaactatcggttatacgaaatctaaatgatcaagtattatttatagatcaaggtaatcgtccgctatttgaagatatgacggattcggattgtcgagataatgcgccgcgaacgatatttataatatcgatgtataaagattcgcaaccgcgaggtatggcggttacgatatcggtaaaatgtgaaaaaatatcgacgctatcgtgtgaaaataaaataatatcgtttaaagaaatgaatccgccggataatataaaagatacgaaatcggatataatattttttcaacgttcggtaccgggtcatgataataaaatgcaatttgaatcgtcgtcgtatgaaggttattttttagcgtgtgaaaaagaacgtgatctatttaaactaatactaaaaaaagaagatgaattaggtgatcgttcgataatgtttacggtacaaaatgaagat

SEQ ID NO: 118872 - DNA, 579 bp, Artificial Sequence
  derived and/or modified sequence
atggctgccgaacccgttgaagataattgcatcaactttgttgcgatgaagttcattgataatacattatatttcatcgccgaagacgatgaaaacctcgagtccgactattttggtaagttggaaagtaagctcagcgtgatccgcaatctgaacgaccaagtgctttttatcgatcagggcaacaggcctttatttgaggatatgacagattccgactgccgggataacgcccctaggactatttttattatcagcatgtacaaggacagccagccaaggggtatggccgtcaccatctctgtgaagtgtgagaagatctctacgctgtcttgtgagaacaaaattatttcatttaaggaaatgaacccgcctgataacataaaggacactaaatcagacatcatatttttccagaggtctgtgcccggccacgacaacaaaatgcagttcgagtctagttcttacgaagggtacttcctggcctgtgagaaagagcgcgatctattcaaactgattctaaagaaagaagatgagctgggcgaccgcagtattatgttcaccgtgcagaacgaggac

SEQ ID NO: 118873 - DNA, 579 bp, Artificial Sequence
  derived and/or modified sequence
atggccgccgaaccagtcgaagacaactgcattaactttgtggcaatgaagttcatcgacaacacactctattttattgccgaggacgatgagaacctggaatcagactacttcggtaaactcgaaagcaagttgagcgtcatcagaaacctcaatgatcaggtactattcatcgaccagggtaacaggccactattcgaggacatgacagattcagactgccgagacaacgccccccgaaccatttttattatttcgatgtataaagactctcaaccccgcggtatggccgtcacaatttcagtgaaatgcgagaagatttcaacgttgagctgcgagaacaaaatcatcagttttaaggaaatgaatccgcccgataatattaaggatacaaagtctgacataattttctttcaacgctctgtccctggccacgataataaaatgcaatttgaatcctcaagctatgaaggctattttctcgcctgcgaaaaggaacgcgacctgttcaagctcatacttaaaaaagaggatgagctcggtgaccgtagcattatgtttaccgtgcagaacgaggac

SEQ ID NO: 118874 - DNA, 579 bp, Artificial Sequence
  derived and/or modified sequence
atggccgctgagccagttgaggataactgcattaattttgtggcaatgaagtttattgacaataccctttactttattgctgaagatgatgagaacttagaatctgactatttcggcaaattggagagtaaactttccgtgattcgcaacctcaatgaccaggttctgttcatagaccaggggaatcgccccctgttcgaagacatgaccgactctgattgcagggataatgctccacgcaccatatttatcatttctatgtacaaggattcccaaccccgtggtatggccgttacaatcagcgtaaagtgcgaaaagatctccacattaagctgtgaaaataagatcatttcttttaaagaaatgaacccccctgacaatattaaggatacaaagtctgatataattttttttcagcgctcagttccaggccacgataacaaaatgcaatttgagtccagcagctatgagggttacttcctggcttgtgaaaaagaacgggatctatttaagctgatcctaaagaaggaggacgagcttggggacaggtccattatgtttactgtacagaacgaggat

SEQ ID NO: 118875 - DNA, 579 bp, Artificial Sequence
  derived and/or modified sequence
atggcagcagagcccgttgaggataactgcataaactttgtggcaatgaagttcattgacaacaccctgtacttcattgcagaggatgatgaaaacctggaaagcgattacttcggcaagctcgagtcaaaactttcggtgatcagaaatcttaatgatcaagtccttttcattgatcaaggcaatcgccctctttttgaagatatgacggactccgactgtagagacaatgcaccccggactatcttcattatctcgatgtacaaggatagccagccgcggggaatggcagtgaccatctccgtgaaatgtgagaaaatctccactctctcttgcgaaaacaagattatcagttttaaggagatgaaccctcctgacaacattaaggataccaaatccgatatcatcttttttcagcggagcgttccggggcatgacaacaagatgcaattcgaatcctcgagctacgaaggctacttcctggcctgcgaaaaagagagggatttgtttaaacttattctgaaaaaagaagatgaactgggtgatcgatcgataatgtttaccgtgcagaacgaagat

SEQ ID NO: 118876 - DNA, 579 bp, Artificial Sequence
  derived and/or modified sequence
atggctgcagaacctgtcgaagacaactgtatcaattttgtggccatgaaatttattgataacaccctatactttatcgctgaggacgatgagaacctcgaatcagactattttggaaagctggagagcaagctcagcgtgatccgcaatctgaacgaccaggtgttatttatcgatcagggaaacaggccgctcttcgaggatatgaccgacagtgactgccgcgacaacgctcctaggacaatttttataatttccatgtacaaagacagccagccccgcggcatggccgtgaccatttctgtgaagtgtgagaaaattagcacactctcttgtgaaaataaaatcattagctttaaagaaatgaatccgcccgacaatattaaggacactaagagcgacatcattttttttcagcggtcagtcccgggccatgacaacaagatgcagttcgaatcctcaagctacgaggggtatttcctcgcatgcgagaaagaaagggacctctttaagcttatccttaaaaaggaggacgaactgggtgatagaagcatcatgtttacagttcagaatgaagac

SEQ ID NO: 118877 - DNA, 579 bp, Artificial Sequence
  derived and/or modified sequence
atggccgccgaacctgtcgaagataattgtataaacttcgtggctatgaaatttatcgacaacacactgtatttcatagcggaggacgacgagaatttggagtcagattacttcggaaagctcgagagtaagctctcagtcatacgaaatctgaacgaccaggttcttttcattgatcaaggcaacagaccactgtttgaggacatgaccgattccgactgtagggataacgctcctagaaccattttcattatatccatgtacaaagactcacaaccccggggcatggcagtgaccatctcagtgaagtgcgagaagatcagcaccctgagctgtgagaacaaaattatcagcttcaaggaaatgaaccctccggacaacatcaaggacacaaaaagcgatatcatattctttcagaggtctgtgccaggacatgataacaaaatgcaattcgaaagctcttcctatgagggatatttcctcgcttgtgagaaagagcgcgatttgttcaagcttatcctcaaaaaggaggacgaactgggtgatcggagtataatgtttacagtacagaatgaagac

SEQ ID NO: 118878 - DNA, 579 bp, Artificial Sequence
  derived and/or modified sequence
atggccgcagaacccgttgaagataactgtattaacttcgtggccatgaagtttatagataatactctctactttatcgcggaagatgacgagaacttggaatcggactactttgggaagctggagtcgaaactttccgtgatcaggaacctgaacgatcaagtgcttttcatcgatcaaggaaatagacctttgtttgaagatatgaccgacagcgactgtcgggataatgcaccccgcaccatcttcataatctccatgtacaaagactcccagcctagaggtatggcagtgaccatatctgtgaagtgcgagaagatttcgaccctctcgtgtgaaaacaaaatcatctcatttaaggagatgaatccacctgacaatatcaaagacacgaagtcggacataatcttcttccagcgttcggtcccgggacatgacaacaaaatgcaatttgagtcgagcagctatgagggctacttccttgcatgcgaaaaggaacgggatctgtttaagttgattcttaagaaggaggatgagctgggcgatcgttccattatgtttactgttcagaacgaagat

SEQ ID NO: 118879 - DNA, 579 bp, Artificial Sequence
  derived and/or modified sequence
atggctgccgagcccgtggaggataattgcatcaatttcgtggctatgaaattcatcgataataccctttacttcattgctgaggacgatgagaacctcgaatcagattatttcggaaaactcgagtccaaactcagtgtgataagaaacctgaacgatcaagtcctgtttattgaccagggaaataggcccctttttgaagacatgacagatagcgattgtcgggataacgcaccccgaacaattttcattattagtatgtataaagattcccagcctaggggcatggccgtcaccattagcgtgaaatgtgagaaaatttccacactgtcatgcgagaataaaatcatctcattcaaagaaatgaaccccccagacaacataaaggatactaaatcagacatcatattttttcagaggagcgttcctgggcatgacaataaaatgcagtttgaatctagttcgtacgagggatatttcctggcctgtgagaaggaaagggacctgtttaaacttattttgaagaaggaagatgagttaggcgacagatccatcatgttcacagtgcagaatgaggac

SEQ ID NO: 118880 - DNA, 579 bp, Artificial Sequence
  derived and/or modified sequence
atggccgcagaaccagttgaagataactgcataaacttcgtggctatgaaattcatcgataacactttatatttcatcgccgaggatgatgaaaatctagagtccgattattttggaaaacttgaatcaaagttgtcagtcatccgaaaccttaacgatcaagtcctttttatcgatcaaggaaacaggccattgttcgaagatatgacagattccgattgtcgtgataacgcaccccgtacaatttttataatctccatgtacaaggatagtcagccacgaggcatggcggttacaatttccgttaaatgcgaaaaaatcagtaccctgagttgtgagaataaaatcatttcctttaaagaaatgaatccacctgacaatattaaagatacaaaatccgatatcatcttttttcaaaggtcagttcctggacacgacaacaagatgcagtttgaatcgtcttcatacgaaggttatttcctggcatgcgagaaggagagggacttgtttaagttaattctgaaaaaagaggacgaacttggtgaccgttctatcatgttcacagttcagaatgaagac

SEQ ID NO: 118881 - DNA, 579 bp, Artificial Sequence
  derived and/or modified sequence
atggcagctgagcctgtggaagataactgtataaactttgtagcaatgaaattcattgacaacactctttactttattgcggaagatgatgaaaacctggagagcgattactttgggaagctggaatcgaagctgagcgtgatccggaaccttaatgaccaagttctctttatcgatcaaggtaatagaccgctttttgaggacatgaccgactctgattgtcgggacaacgcgcctagaaccatcttcataatctccatgtacaaggatagccagccccggggcatggcagtgactatttcggtcaagtgtgaaaagatttcgacgctgtcctgcgagaataagatcattagctttaaggaaatgaatccaccagataacattaaagacactaagagcgatatcattttctttcaacgttccgtgcctggtcatgataacaagatgcagtttgaaagctcctcgtacgaaggttacttccttgcgtgcgagaaggagagagatttgtttaagctgatcttgaaaaaggaagatgagctcggggatcgctctatcatgtttaccgtgcagaatgaagat

SEQ ID NO: 118882 - DNA, 579 bp, Artificial Sequence
  derived and/or modified sequence
atggccgccgaacctgtcgaggacaactgcattaattttgtcgcaatgaagtttatagataatacgctgtatttcattgctgaagacgatgaaaacctcgaaagcgactacttcggaaagctcgagtcaaaactctcagtgatcagaaatctcaacgaccaggtactgtttattgatcagggtaaccgacccctgttcgaggacatgacggattctgattgtcgggataacgccccccgaaccatctttatcattagcatgtataaagacagccagccaagagggatggcggtaacaataagtgtgaaatgcgagaaaatctcaaccttatcttgtgaaaataagatcatcagctttaaggaaatgaatccccctgacaacatcaaggataccaagtctgacataatcttttttcaacgaagcgtacccggtcatgataataaaatgcagtttgagtcaagctcctatgaaggttacttcctggcctgtgaaaaggagcgagacctgtttaagctcattctgaagaaggaggatgagctgggagaccgctctatcatgtttactgttcagaatgaagac

SEQ ID NO: 118883 - DNA, 579 bp, Artificial Sequence
  derived and/or modified sequence
atggcagctgaacctgtggaagataactgtatcaactttgttgcaatgaagtttatagataatactctttactttatcgcagaggacgatgaaaacctggaaagcgactacttcggaaagctggaaagcaagctgagcgtgatacgaaaccttaatgatcaagtgcttttcatagatcaggggaaccggcctctttttgaggatatgactgactccgactgccgagacaacgcaccaagaaccatcttcataatctcaatgtacaaggatagtcagccgagggggatggcagtgaccatcagcgtgaaatgcgaaaagatttccactctgtcctgtgagaacaagataatctccttcaaagaaatgaatccacccgacaatatcaaggacactaaatcagacattatcttcttccagaggtcggtgcctggtcatgacaataagatgcaatttgaatcctcgtcgtatgagggctactttcttgcctgtgaaaaagaacgggacctgttcaagttgattctgaagaaggaggacgaacttggcgatcggtcaattatgtttaccgtccaaaatgaggat

SEQ ID NO: 118884 - DNA, 579 bp, Artificial Sequence
  derived and/or modified sequence
atggccgcagaacctgtggaagataactgtattaacttcgttgcaatgaagttcattgataacactctctacttcatcgcggaagatgacgagaaccttgaatcagattacttcgggaagctggaatcaaagctgagcgtgattagaaacctcaacgatcaagtcctcttcatcgatcagggtaaccggcctctgtttgaggacatgacggattcggactgtagagacaatgccccaaggaccatcttcataatctccatgtacaaggattcccaaccaagaggcatggccgtcaccatttccgtcaagtgtgaaaagatatcgacgctgtcatgcgagaacaagatcataagtttcaaagagatgaatccacccgataacataaaggataccaagtccgacattatcttttttcagagatccgtgccaggtcatgacaataagatgcaatttgagagctcgtcgtacgaaggatacttcctggcatgtgaaaaggaaagggatctgtttaagctgattctcaaaaaagaagatgaattgggggatcgctccatcatgtttacggtgcaaaacgaagat

SEQ ID NO: 118885 - DNA, 579 bp, Artificial Sequence
  derived and/or modified sequence
atggctgcagagccggtggaggacaactgcattaacttcgtcgccatgaagtttatcgacaacactctgtacttcatcgcggaggatgacgaaaatctcgaatctgattactttggaaagctggagtcgaaactctcagttattcggaacctcaatgaccaggttctgtttatcgaccaaggcaataggccgctgttcgaggacatgaccgatagcgattgtagagataacgctccgcgcactattttcatcatctcgatgtacaaggactcgcagccgcgggggatggcggtgactatctccgtgaagtgcgagaagatcagcactctgagctgcgaaaacaagatcatcagcttcaaggagatgaaccctcccgataacatcaaggataccaagtcggacatcattttcttccagcggtcagtgcctggacacgacaataagatgcagttcgaatcctcgagctacgaaggctacttcctggcatgtgaaaaggagagagacttgttcaagctgatcctgaagaaggaggacgaactcggagatcggtcaatcatgttcaccgtgcagaatgaggac

SEQ ID NO: 118886 - DNA, 579 bp, Artificial Sequence
  derived and/or modified sequence
atggccgctgagcctgtcgaagacaactgcattaactttgtggcgatgaaatttatcgacaacaccctgtacttcatagcagaagacgacgagaatctagaatccgactatttcggcaagttggagagcaaattgagcgtcatccgtaacctgaacgaccaggtcctgtttatcgatcagggcaatcgcccgctgtttgaagatatgactgactctgattgtcgagataacgccccacgtacaatctttataatttctatgtataaggattcccagccccgtggcatggctgttacgatctcagtgaaatgtgaaaagatttccacgctgagctgcgagaataaaatcatcagttttaaagagatgaatcccccagataacatcaaggataccaagagtgacattattttcttccagcggtctgtaccaggccatgacaacaagatgcagttcgaatcctcaagttatgaagggtattttctcgcctgcgaaaaagagagagacctgttcaaactgatcctcaaaaaagaggatgagctgggggaccggtcaataatgttcacggtccagaacgaagat

SEQ ID NO: 118887 - DNA, 579 bp, Artificial Sequence
  derived and/or modified sequence
atggcagccgaaccggtggaagataactgtatcaatttcgtcgcaatgaagtttattgacaacaccttgtactttatagcggaggatgacgaaaatcttgagtccgactacttcgggaagctcgaaagcaaattgtctgtgatcaggaacttgaacgatcaggtgctgttcatcgaccagggtaaccgcccgctctttgaggacatgaccgattcagactgccgagacaatgccccccggaccatcttcattatctcaatgtacaaagattcgcagcctagaggcatggcggtaaccatttcggtcaagtgcgaaaagattagcactctgagttgcgagaacaagatcatctcgttcaaggaaatgaacccaccggataacatcaaggacacgaagtcagacatcatcttcttccaacgctccgttcctggacacgataacaagatgcagtttgaatcttcctcgtacgaaggatatttcctggcttgcgagaaggagcgcgacctgttcaaactgatactcaaaaaagaggacgaactcggagatcgttccatcatgtttactgtgcaaaatgaggat

SEQ ID NO: 118888 - DNA, 579 bp, Artificial Sequence
  derived and/or modified sequence
atggcagccgagccagttgaagataactgtatcaacttcgtggccatgaagtttattgataatactctgtacttcattgcggaggatgatgaaaacctcgaaagcgactatttcggcaagctggaatccaagctgtcggtgatccggaacctgaatgaccaggtcctgttcatcgaccagggaaaccggccactgttcgaggacatgaccgatagcgactgtagagacaacgctccgcggaccatctttatcatcagcatgtacaaagatagccagccgcggggtatggccgtcaccatcagcgtgaagtgcgaaaagatatccactctgtcgtgcgaaaacaaaatcatctcgttcaaggagatgaaccctccggacaacatcaaggacaccaaaagcgacatcatcttctttcaaaggtcggtgccgggacacgacaataagatgcagttcgaatcgtcatcatacgaaggttactttttggcgtgcgaaaaggagcgtgatctgttcaagctgatcctcaaaaaagaagatgaattgggagacagatcgatcatgttcaccgtgcagaatgaagat

SEQ ID NO: 118889 - DNA, 579 bp, Artificial Sequence
  derived and/or modified sequence
atggccgccgaacctgtggaagacaactgtatcaattttgtggccatgaagttcattgacaacacactgtatttcatagcagaggacgacgagaatctagaatctgattacttcgggaaattggaatccaaactgtcagtgattcgcaacctcaacgaccaagtgttgtttatcgatcaggggaatcggccgcttttcgaagacatgactgactcagactgccgggataacgccccaaggacaatttttatcatctctatgtacaaggactctcagccacgggggatggccgtcacaatatctgtgaagtgcgagaaaattagcacactaagttgcgaaaacaaaattatcagcttcaaggaaatgaatccccctgacaatattaaggatacaaaatcagatatcatattctttcagaggtccgttccagggcacgacaacaagatgcaattcgaatcttcatcctatgagggctacttcctcgcctgtgagaaggagagagacttgttcaagctgattctgaaaaaagaggatgaactgggcgacagatcaataatgtttaccgttcagaatgaggac

SEQ ID NO: 118890 - DNA, 579 bp, Artificial Sequence
  derived and/or modified sequence
atggccgccgaacctgtagaagacaattgtattaatttcgtggccatgaaattcatcgataatacactgtatttcatcgcggaggatgacgagaatctggaatccgactacttcggaaagctcgaaagcaagctttctgtgattagaaacttgaatgaccaagtgctcttcattgaccagggtaatcggcctctctttgaagacatgacagactccgattgtcgggataatgcaccaaggacaattttcatcatctccatgtacaaagacagccagcctcgcgggatggctgtgaccatctccgtcaagtgcgagaaaatctccactctttcttgtgagaacaagatcatctccttcaaagagatgaatccccctgacaatattaaggacaccaagagtgatatcatatttttccagcgcagtgtgccggggcatgataacaaaatgcagttcgagtcgagctcttacgagggatatttcctcgcatgtgaaaaagaacgtgatctgtttaaactgatcctaaagaaagaggacgaactcggggacagaagtataatgtttaccgtacaaaatgaagat

SEQ ID NO: 118891 - DNA, 579 bp, Artificial Sequence
  derived and/or modified sequence
atggccgcagagcccgttgaggataactgcatcaattttgtagccatgaagttcattgataatacgctctactttatcgctgaggatgatgagaatctcgagtccgactacttcggtaagctggagagcaaattgtcagtgatccgcaatctgaatgaccaggtgctgttcatcgaccagggaaataggccgttgttcgaggacatgactgatagcgactgcagagacaacgccccgagaaccatctttataattagcatgtacaaggattcacaaccgagaggtatggctgttacgatcagcgtgaagtgcgagaagataagtacgctgagctgcgagaataagattatcagctttaaggaaatgaacccccctgacaacataaaagacacaaagtccgacatcatcttcttccagagatccgttcccggccatgataacaagatgcagttcgaatccagctcttatgagggttattttctcgcttgcgagaaggagagggacctgttcaagctgatcttgaagaaagaagatgagctgggagataggagcatcatgttcacggttcagaatgaagat

SEQ ID NO: 118892 - DNA, 579 bp, Artificial Sequence
  derived and/or modified sequence
atggccgccgaacccgttgaagacaactgtattaattttgtcgccatgaagtttatagataacaccttgtacttcatagccgaagacgacgaaaaccttgaatctgactacttcggtaaactggagtccaagctgtcagtgatcaggaaccttaacgatcaggttctctttatagatcaggggaacagacctttatttgaagatatgaccgattctgactgcagggacaacgcccccaggaccatatttatcatatcaatgtacaaggactctcagccaagagggatggcagtcactatttctgtaaagtgcgagaagataagtaccctcagttgcgagaacaaaatcattagcttcaaggagatgaatccaccagataacatcaaggacacgaagtcagacataattttctttcagcggtctgtgcccggccacgacaacaagatgcagtttgaaagcagtagctacgaggggtacttcctcgcatgcgaaaaggagagggatttgttcaagctcattctgaaaaaggaggacgagctcggagacagaagtataatgttcactgtccagaatgaagat

SEQ ID NO: 118893 - DNA, 579 bp, Artificial Sequence
  derived and/or modified sequence
atggctgccgagcctgtcgaagataactgcatcaactttgtagccatgaaattcatcgataataccctttattttatcgctgaggacgacgaaaatctagagagcgactactttggcaaactcgaatcaaaactatcagtgattcgaaacctgaatgatcaagtgctcttcatcgatcaaggaaaccgacccctgttcgaagatatgacagattctgattgccgagataacgcccccaggactatattcattatcagcatgtacaaagactctcagccccggggaatggccgtcacaatctcggtgaagtgcgagaaaatctcaaccctgtcgtgcgagaacaagatcatctcattcaaggagatgaatcccccagataatattaaagacactaagagtgacattattttttttcagaggtctgtgccaggccacgacaacaagatgcagttcgagtcatcatcttatgaaggttactttctcgcctgtgaaaaggagcgggatctgtttaagctgatcctgaaaaaggaggatgaactgggggacagaagcataatgtttacggtgcaaaatgaagat

SEQ ID NO: 118894 - DNA, 579 bp, Artificial Sequence
  derived and/or modified sequence
atggcggccgagccagtcgaagataattgcatcaactttgtggcgatgaagttcatcgacaacactctttactttatcgccgaggatgacgagaacctggaatccgactacttcgggaaactggagagcaagctgtcggtcatcagaaatttgaacgaccaggtgctctttatcgaccagggaaaccgcccgctgtttgaggacatgaccgactcagactgccgggacaatgccccacgcactattttcatcatcagcatgtacaaagatagccagccacgcggaatggctgtgaccatcagcgtgaagtgcgaaaagatttccactctgtcatgtgagaacaagattatctcgttcaaagaaatgaatccgccagacaacattaaagataccaaatcagacataatcttctttcaacgctcggtccctggccacgataacaagatgcaattcgagtcatcctcgtatgaaggatacttccttgcatgcgaaaaagagcgggatctcttcaagctcatcttgaagaaggaggacgagctgggtgaccgcagcattatgttcacggtgcagaacgaggat

SEQ ID NO: 118895 - DNA, 579 bp, Artificial Sequence
  derived and/or modified sequence
atggcagctgaacctgtggaagataattgtatcaatttcgtggcgatgaagtttatagacaacaccttgtactttatcgccgaggacgatgaaaacctggaatcagattactttggtaaacttgaatcgaagctgagcgtgattagaaacctgaacgatcaagtcctcttcatcgatcagggcaacagacctctttttgaagatatgacggattcagactgtcgggataatgcacctaggacgatctttatcatatcgatgtataaagacagccaaccaagagggatggcagtgactatttccgtgaaatgtgagaagatttcaacgctgtcctgtgagaataagattatcagctttaaggagatgaacccacctgacaacattaaggataccaaatcggatatcattttctttcagcggagcgtgcctgggcatgacaataagatgcagtttgaatcgtcatcatacgaggggtacttccttgcatgcgaaaaggagcgagatctgtttaagttgatactcaaaaaggaggacgaacttggcgatcgctccattatgttcactgttcagaacgaggat

SEQ ID NO: 118896 - DNA, 579 bp, Artificial Sequence
  derived and/or modified sequence
atggcagcagagcccgtggaggacaactgcattaatttcgtcgcgatgaagttcatagacaataccctatacttcatcgccgaggacgatgaaaacctcgagtccgattattttgggaagcttgagagtaagttgtctgtcatccggaatctcaacgaccaggttttattcattgatcagggcaatcgccccttgttcgaggacatgacagattccgactgccgtgataatgcccctcgaacaatatttatcatttctatgtacaaagattcacagccaaggggcatggccgtgaccatctctgttaaatgtgagaagatctcaacactgtcctgcgagaacaaaatcatcagtttcaaggagatgaacccaccagacaacatcaaggacacaaagagcgatattatttttttccagagatcagtgcctggccacgacaacaaaatgcagttcgagtctagctcgtacgaagggtacttcctggcctgcgaaaaggagcgagacctcttcaagctgatccttaagaaggaggacgagctcggagataggtctattatgttcacagtgcagaatgaagac

SEQ ID NO: 118897 - DNA, 579 bp, Artificial Sequence
  derived and/or modified sequence
atggccgccgagccggtcgaagataattgcatcaattttgtggcaatgaagtttatcgacaacaccctctactttatcgcggaggacgacgaaaaccttgagagcgactacttcggcaaactggaatcaaagctgagcgtaatcaggaacctgaatgaccaggtgctgttcattgaccaagggaatcggccgctgttcgaggatatgaccgattcagactgccgggacaatgccccgcggactatcttcatcatcagtatgtacaaggactcgcagccacgcggtatggcagtgaccatttccgtgaaatgcgagaaaatctccacgctgtcgtgtgaaaacaagatcatcagcttcaaggagatgaacccgccagacaacatcaaagatactaaatctgacataatcttcttccaacgctcggtgccgggccacgacaataagatgcagttcgagagctcctcgtatgaaggctacttcctggcttgtgagaaggagcgtgacctcttcaaactgatcctgaagaaggaagatgagctcggagatagatccattatgtttactgtgcagaacgaggac

SEQ ID NO: 118898 - DNA, 579 bp, Artificial Sequence
  derived and/or modified sequence
atggcagcagaaccagttgaagataactgcatcaatttcgtggccatgaagtttatcgacaatacgttgtactttatcgctgaggacgacgagaatctggaaagcgattattttggaaagctagagagcaagctgtccgtcatccggaaccttaatgatcaggtgctgttcatcgatcagggcaaccggccactctttgaggacatgactgatagcgattgtagagataacgctcctcgaactatcttcatcatttctatgtataaagactcacagccaaggggaatggctgtgaccatcagcgtgaagtgcgagaagatttccaccctgtcttgcgagaacaaaattatcagcttcaaggaaatgaaccccccagacaatattaaggacaccaagtcagatatcatcttcttccagaggagcgtcccaggacacgacaataaaatgcagtttgagagcagtagttacgaaggatatttcttggcctgcgaaaaggaaagggatctgtttaaactgatactcaagaaagaagatgagctgggcgataggagtatcatgttcaccgtacagaacgaggac

SEQ ID NO: 118899 - DNA, 579 bp, Artificial Sequence
  derived and/or modified sequence
atggccgcagagcctgttgaggacaactgtattaatttcgtggcaatgaaatttatcgataacaccctgtactttatcgctgaggatgatgagaacttggagagcgactatttcggcaagctggagtccaagttgagcgttattaggaacctgaatgatcaggtcctgtttatcgatcaggggaacaggccactgtttgaggatatgaccgattccgattgtagagacaacgccccccggacaatctttattatctcaatgtacaaagatagtcagcccaggggtatggctgtcactatctcagtaaaatgtgagaagattagtaccctgtcctgcgaaaacaagatcatatcctttaaggagatgaacccaccagataacatcaaggacactaagagcgacataattttctttcaaagatctgttcccggtcacgataataagatgcaattcgaaagtagctcttacgaggggtatttcttggcctgcgagaaggaaagggatctgtttaaactgatactgaagaaagaggatgagcttggcgacagatctatcatgttcactgtgcagaacgaggac

SEQ ID NO: 118900 - DNA, 579 bp, Artificial Sequence
  derived and/or modified sequence
atggcagcggaaccagtggaggataattgtatcaactttgtcgccatgaagtttatagataacactctgtacttcattgcagaggatgatgagaacctggagtcggactattttggaaagttggagagcaagctctcggtaatacggaatctcaacgatcaggtgttgttcatagaccaaggtaaccgcccactgtttgaggacatgaccgattccgactgtagagataacgcaccccgtactatcttcatcatcagcatgtacaaagactcgcagcctagaggaatggccgtgaccatttcagtgaagtgcgaaaagattagtacgctgtcgtgtgagaacaagattatctcatttaaggaaatgaatccccctgacaatatcaaagataccaagtctgacatcatcttctttcagagatcggtgcccggtcatgacaacaaaatgcaattcgaatcgtcctcctacgaaggctactttctggcatgcgaaaaagaacgggatctgtttaagctcatattgaaaaaggaagatgaacttggggaccgatcaattatgttcaccgtgcaaaatgaggac

SEQ ID NO: 118901 - DNA, 579 bp, Artificial Sequence
  derived and/or modified sequence
atggccgctgagcctgtggaagataactgtatcaactttgtggccatgaaattcattgataacacgctttactttatagcagaggacgatgagaatcttgaatcagattacttcggcaaactcgagtcgaaactttcagtcataagaaacctgaacgatcaagtgctgttcatcgaccagggtaacagacctctctttgaggacatgactgattcggactgccgcgataatgctccacgtacgatctttatcatttctatgtacaaggatagccaacccagaggtatggcggtcactattagcgtcaagtgtgagaaaatctcaaccctgtcctgtgagaataagatcatttcctttaaggagatgaatccgcccgataacattaaagatactaagtcagatatcattttctttcagcggagcgtcccagggcatgacaataagatgcaattcgaatcgagtagctacgaagggtatttccttgcatgtgaaaaggaacgagatctctttaaacttattctgaaaaaggaagatgaactgggagatcgttcgattatgttcactgtgcagaacgaggat

SEQ ID NO: 118902 - DNA, 579 bp, Artificial Sequence
  derived and/or modified sequence
atggccgcagagccggtcgaagacaattgcatcaactttgtcgcaatgaagttcattgataataccttatacttcatcgccgaggatgatgagaatctggagagcgattattttggtaaactcgagagcaaactatctgtcatccgcaacctaaacgaccaggtgctgtttattgaccagggcaatagacctttgtttgaggacatgacggattcagattgcagagataacgctccaagaacgatctttatcatctctatgtataaggatagtcagccccgcggtatggctgtaaccattagtgtgaagtgcgaaaaaatttcgacattatcttgcgagaataagatcatctcctttaaggagatgaacccacccgacaatattaaagatacaaaatctgacatcatcttttttcaaaggtctgtgccgggacacgataacaagatgcagtttgagtcttcctcttatgaaggttactttctggcatgtgaaaaggagcgggatctgttcaaactcatcctgaagaaggaggatgaattgggagatagatcaatcatgttcacagttcagaacgaggac

SEQ ID NO: 118903 - DNA, 579 bp, Artificial Sequence
  derived and/or modified sequence
atggccgctgagccagttgaagataactgcatcaacttcgtggcaatgaaatttatcgacaacaccctgtacttcatcgctgaggacgatgaaaatctggagagcgattactttgggaagttagaatccaaactctcagtcattagaaatttgaacgaccaagttctgttcatcgatcagggaaaccgccccctctttgaagatatgacagattcagattgccgtgataacgcccccagaactatcttcatcatatcaatgtataaggactcccagcctcgcggcatggccgttacaatatcagtgaagtgcgaaaaaataagcactctctcctgtgaaaataaaattatatcatttaaagagatgaacccaccggataatatcaaggatacaaagtcagacatcatctttttccagaggtccgttccaggacacgacaacaaaatgcagtttgagtccagctcctatgaggggtacttcctggcatgcgaaaaggagcgcgacttatttaagctgattctcaagaaagaagatgaactgggtgatcgcagcatcatgtttaccgtccaaaacgaagac

SEQ ID NO: 118904 - DNA, 579 bp, Artificial Sequence
  derived and/or modified sequence
atggctgcggagccagtggaagacaattgcattaacttcgtcgctatgaagttcatagataacactttatacttcatcgctgaagatgatgaaaatctcgaatcggattacttcggtaaattggagtccaaattatctgttatccgcaacttgaatgatcaagtactgtttattgatcaagggaaccgaccacttttcgaggatatgacggacagtgattgccgtgataatgccccacgaacaattttcatcatttcaatgtacaaagattcacagccaagaggcatggcagtcacaatttcagtcaaatgtgaaaaaatatcaacgttatcgtgtgagaacaagattatttcgttcaaagagatgaatccaccagataatattaaagatacaaaaagtgatattatctttttccaaagatccgtacctggacacgacaacaaaatgcagtttgaatcatcatcctatgaggggtacttccttgcttgcgaaaaggaaagagatctgttcaagctcatactcaagaaggaagacgagcttggagatcgttcaatcatgtttacagtccaaaatgaagat

SEQ ID NO: 118905 - DNA, 579 bp, Artificial Sequence
  derived and/or modified sequence
atggccgctgagcctgtagaagacaactgcatcaacttcgtggctatgaagttcattgacaatacactgtacttcatcgccgaggacgacgaaaatctagagagcgattatttcgggaaattggaaagtaagctctcagtcatcaggaatctgaacgaccaggttctcttcatcgatcagggtaatagaccactatttgaagatatgacagactcggattgtagggataacgcgccacgcacaatattcatcattagcatgtacaaagattcacagccaagaggcatggctgtaactattagcgtgaagtgtgaaaagatctccacattgtcctgtgaaaacaaaatcatctcctttaaggagatgaacccccccgataatataaaagacacaaagagcgatatcattttttttcagcggagtgtccccgggcacgacaacaagatgcagtttgagtcgtcttcttacgaagggtattttcttgcttgtgaaaaggagagggacctattcaagttgatccttaagaaggaggacgagttaggcgaccgctcaataatgtttacagtccaaaatgaggat

SEQ ID NO: 118906 - DNA, 579 bp, Artificial Sequence
  derived and/or modified sequence
atggccgccgagccggtggaggacaactgcatcaacttcgtggctatgaaattcatcgataacaccctgtacttcatcgcagaagatgacgagaacctggaatccgactacttcggcaagctggaatcaaagctgtccgtgatccgcaatttgaatgaccaggtgctgtttatcgaccaaggtaatcgccctctctttgaggatatgaccgattcggactgcagagacaatgcccctcgcaccattttcatcatttccatgtacaaggactcgcagccgagaggcatggccgtgaccatctccgtgaagtgcgaaaagatctcgaccctgtcttgtgaaaacaagattatctctttcaaagaaatgaatcccccggataacatcaaggatactaaatcggacatcattttcttccagcgctcagtgccaggccatgacaacaaaatgcagttcgagagcagctcctacgagggatacttcctggcttgcgagaaggaacgcgatctgttcaaactgatcctcaagaaagaggatgaactgggagatcggtccattatgttcacggtccagaacgaagat

SEQ ID NO: 118907 - DNA, 579 bp, Artificial Sequence
  derived and/or modified sequence
atggccgccgagccagtggaggataactgcattaacttcgtggccatgaaatttattgacaataccctgtactttattgcagaggatgatgagaacctggagagcgattattttggaaagctagaatccaagctgtcagtgatccgaaacctcaacgaccaggtgctgttcatcgaccaagggaaccggccgttgtttgaggacatgacagatagtgactgtagggacaatgcacccaggactattttcattattagcatgtataaagattctcagcctcggggcatggccgtgacaatctccgtcaagtgtgagaagatttctaccctgagttgtgagaacaaaataatcagttttaaggagatgaaccctccagacaacattaaagacaccaaatctgatatcatctttttccaacgctctgtcccaggtcacgataataaaatgcagtttgagtcatcaagctacgaaggatactttctggcttgtgagaaggaacgggatctgtttaaactcatcctaaagaaagaggatgaactaggtgatcgcagcattatgtttacagttcaaaacgaggat

SEQ ID NO: 118908 - DNA, 579 bp, Artificial Sequence
  derived and/or modified sequence
atggctgcagagcctgtggaggataattgcattaatttcgttgcaatgaaattcattgacaataccctgtacttcatcgcagaagacgatgaaaacttggaatcggattactttggaaagttagagtcaaaattgtccgtgatccgaaacctgaacgatcaggtcttatttattgatcaagggaaccggcctctgttcgaggacatgaccgacagcgactgtcgcgacaacgctccgaggacaatctttataatctcaatgtataaggacagtcagccgcggggaatggcagtcaccatttccgtgaaatgcgagaagatttcgactctatcatgcgagaacaagataataagcttcaaggagatgaatcccccagataatataaaggacactaaatctgacatcattttttttcagaggtccgttccgggacacgacaacaaaatgcaatttgaatcaagctcctatgaaggctacttcctggcatgcgagaaggagagagatctgttcaagttgattctcaagaaggaagacgagttgggagatcgttccataatgttcaccgtgcagaacgaagat

SEQ ID NO: 118909 - DNA, 579 bp, Artificial Sequence
  derived and/or modified sequence
atggccgccgagccagtggaagataactgcattaactttgtagcaatgaagtttattgacaacacgctgtacttcattgcggaggacgatgaaaacctggaaagcgattactttggcaagttggagtccaagctgtcagtgatcaggaatctcaacgatcaagtacttttcatcgaccaaggaaacagaccactgttcgaggatatgaccgattccgactgtcgggacaacgcccctaggacaatcttcataatttccatgtataaggactctcagccccgggggatggccgtcaccatctctgtgaagtgtgagaaaatttccacgctctcttgtgaaaataaaataatctcgttcaaggagatgaacccacccgacaacatcaaagacactaagagcgatattattttttttcaacgaagcgtgccaggccacgataataaaatgcagtttgaatcaagctcctatgaagggtactttttagcttgtgaaaaagaacgggacctgttcaagctcatcttgaagaaggaggacgaactgggggatagaagtattatgtttactgtgcagaatgaggac

SEQ ID NO: 118910 - DNA, 579 bp, Artificial Sequence
  derived and/or modified sequence
atggccgccgagccagtggaggacaactgcattaacttcgtggcgatgaaattcatcgacaacactctttacttcatcgccgaggacgatgaaaatctggaaagcgactacttcggcaaacttgaaagcaagctgtccgtcattcggaatctgaatgaccaggtgctgttcatagatcaaggaaatagaccgttgttcgaagatatgaccgactcggattgccgcgataacgctcctcgtaccatctttatcatctctatgtacaaggactcccagccccgaggcatggctgtgactatctcggtcaagtgcgaaaagatcagcaccctctcatgcgaaaacaagattatcagctttaaggagatgaatccgccagataacatcaaagacactaaatctgatatcattttcttccaacgctcggtgccgggacacgacaataagatgcagttcgagtcctcgtcatacgagggttatttcctggcttgtgaaaaggagcgggacttgtttaaactgatcctcaagaaagaggatgaattgggagacaggtcgatcatgtttaccgtgcagaacgaggac

SEQ ID NO: 118911 - DNA, 579 bp, Artificial Sequence
  derived and/or modified sequence
atggcagcagaacctgttgaagataactgtataaacttcgttgcaatgaagtttatcgacaataccctctactttatagcggaagatgacgaaaatctcgaaagcgattactttggtaagctggagtctaaactgagcgtcatcagaaatttgaatgatcaagtgcttttcatagaccaaggtaatcggccccttttcgaggacatgacggattcggattgtcgagataacgcccctcgaaccattttcatcatttcgatgtacaaggattcccagcctaggggtatggctgtcactatcagcgtgaaatgcgagaagatttccaccttgtcgtgcgaaaacaagatcatatcgttcaaggagatgaacccaccagacaacattaaggacaccaagtcggacattatcttttttcagagaagcgtcccaggtcatgataacaaaatgcagttcgaatcatcgtcatacgagggatatttcctcgcctgtgagaaggaaagagatctgttcaaacttatactgaagaaggaagatgaacttggagatcgatccatcatgtttactgtccaaaacgaagat

SEQ ID NO: 118912 - DNA, 579 bp, Artificial Sequence
  derived and/or modified sequence
atggcggctgaacccgttgaggacaactgcatcaactttgtcgctatgaagttcatcgataacactctgtacttcatagcagaggacgatgagaatttggagtcggattacttcggcaaactagaatcgaagctatccgttatccgaaacctcaacgatcaggtgctgttcatcgaccagggcaacaggccactgttcgaggatatgacagacagcgactgccgcgacaacgcaccgcgtaccatcttcatcatctccatgtacaaggactctcagcctcgcggtatggcagttactatcagcgtgaagtgtgaaaaaatctctacgctttcttgcgagaacaagattatatccttcaaagagatgaacccgcccgacaacatcaaggatacaaagtccgatattatcttcttccagcgctcggtgcccggccatgataacaagatgcagttcgaatccagcagctatgagggctactttcttgcatgcgagaaggagcgagacctgttcaagctcatccttaagaaggaggatgagctcggtgaccgctcgatcatgttcaccgtccagaacgaagat

SEQ ID NO: 118913 - DNA, 579 bp, Artificial Sequence
  derived and/or modified sequence
atggcggccgagccggtggaggacaattgcatcaatttcgtggctatgaagttcatcgacaatactctgtactttatcgccgaagatgatgaaaacctggagtcagactatttcggaaagctggagagcaagttgagtgtgatccgcaatctcaacgaccaagtgctgtttatcgaccagggaaaccgcccgctgttcgaggacatgaccgattcagattgtagagataatgccccgcggacgatctttatcatttcaatgtacaaagactcgcaaccaagaggaatggctgtcaccatcagcgtgaagtgtgagaagatctccaccctgtcctgtgaaaacaagatcatttcattcaaggagatgaacccgccagacaacattaaagacactaagtccgacatcattttcttccagcgcagcgtgccggggcacgataacaagatgcagttcgaatcttcgtcctacgagggatacttcctcgcgtgcgagaaggagagggatcttttcaagctcatactgaagaaggaagatgaactcggcgaccggtcgattatgtttaccgtgcaaaatgaggac

SEQ ID NO: 118914 - RNA, 582 nt, Artificial Sequence
  derived and/or modified sequence
auggcggcagaacccguggaagacaacugcaucaacuuuguggcaaugaaguuuauugauaacacacucuauuucauagcugaagacgacgagaaccuggagagcgacuacuucggcaagcuugaaucuaaacugucugugauuaggaaccugaaugaccaagugcuuuucauagaucaaggaaauaggcccuuauucgaggauaugacugauucagacugccgcgauaaugcuccacgaaccaucuucaucauaagcauguauaaagacucucagccccgagguauggcugugacuaucucuguuaagugugaaaaaaucucgacccugaguugugaaaacaaaaucaucucguucaaggaaaugaacccuccagauaacaucaaggauaccaagucugacaucaucuucuuucagcggucuguccccggccacgacaacaaaaugcaguuugaaucuucaucuuaugagggauauuuucucgcuugugaaaaggagcgagaccucuuuaaauuaauucugaaaaaagaagacgaacuuggggaccgaucuauuauguucacaguacagaaugaagacuag

SEQ ID NO: 118915 - RNA, 582 nt, Artificial Sequence
  derived and/or modified sequence
auggcugccgaaccagucgaagacaauuguauuaauuuuguggcuaugaaauucaucgacaauacucuuuacuucaucgccgaggaugacgagaaucucgaaucugauuacuuugggaaauuagaaucuaaauugagugugaucagaaaucucaaugaucaaguguuauucaucgaucaggggaacagaccacuuuucgaagacaugaccgauagugauugucgggauaacgccccacggacaauuuucaucaucuccauguacaaagauucacaaccgaggggaauggcgguaacaauaagugugaagugugaaaagaucuccacauuaaguugugagaacaagauuaucucuuuuaaggagaugaaucccccagacaacauuaaagacacaaaaagcgacaucauuuucuuccagcgcucuguaccuggucacgacaauaagaugcaauucgagucaucauccuacgaggguuauuucuuagcuugugagaaagaacgcgauuuauuuaagcugauuuugaaaaaagaggaugaacugggcgacagauccauuauguucacgguucaaaaugaggauuag

SEQ ID NO: 118916 - RNA, 582 nt, Artificial Sequence
  derived and/or modified sequence
auggcggcagaacccguggaagacaacugcaucaacuuuguggcaaugaaguuuauugauaacacacucuauuucauagcugaagacgacgagaaccuggagagcgacuacuucggcaagcuugaaucuaaacugucugugauuaggaaccugaaugaccaagugcuuuucauagaucaaggaaauaggcccuuauucgaggauaugacugauucagacugccgcgauaaugcuccacgaaccaucuucaucauaagcauguauaaagacucucagccccgagguauggcugugacuaucucagucaaaugugagaagauuucgacccucagcugugaaaauaagauaaucaguuucaaggaaaugaauccgccugacaauauuaaagacaccaagagugauaucaucuuuuuccagcgaagcguaccaggccacgacaauaaaaugcaauucgagagcucuaguuaugagggauacuuucucgccugugaaaaagaacgggauuuauuuaaacucauucuuaaaaaagaagacgaacucggggaucggucuaucauguuuaccgugcagaacgaggacuag

SEQ ID NO: 118917 - RNA, 582 nt, Artificial Sequence
  derived and/or modified sequence
auggcagccgagcccguagaagacaacuguauuaauuuuguagccaugaaauuuauugauaacacuuuguauuuuauugccgaagaugacgagaauuuggaaagugacuacuucggaaaguuagaaagcaagcugagugugauccgcaaucucaacgaccaggucuuauucaucgaccagggcaaucguccauuauucgaagauaugaccgacucggacuguagggacaacgcaccucgaacuauuuucauaaucucaauguacaaagauucccagccccgagggauggcuguaacuaucagugugaagugugaaaagauuucuacccugucuugugagaauaaaauuauuagcuuuaaagagaugaauccacccgacaauauuaaagauacuaaaagcgacauaauuuucuuucagcgaagcgugcccggccacgauaauaaaaugcaguucgaaagcagcagcuacgaaggauacuuucuugccugcgaaaaagaacgugaucuguucaaguugauucuaaagaaggaggacgagcugggcgaccgauccaucauguucacggugcaaaaugaggacuag

SEQ ID NO: 118918 - protein, 797 aa, Artificial Sequence
  derived and/or modified sequence
MYLETRRAIFVFWIFLQVQGTKDISINIYHSETKDIDNPPRNETTESTEKMYKMSTMRRIFDLAKHRTKRSAFFPTGVKVCPQESMKQILDSLQAYYRLRVCQEAVWEAYRIFLDRIPDTGEYQDWVSICQQETFCLFDIGKNFSNSQEHLDLLQQRIKQRSFPDRKDEISAEKTLGEPGETIVISTDVANVSLGPFPLTPDDTLLNEILDNTLNDTKMPTTERETEFAVLEEQRVELSVSLVNQKFKAELADSQSPYYQELAGKSQLQMQKIFKKLPGFKKIHVLGFRPKKEKDGSSSTEMQLTAIFKRHSAEAKSPASDLLSFDSNKIESEEVYHGTMEEDKQPEIYLTATDLKRLISKALEEEQSLDVGTIQFTDEIAGSLPAFGPDTQSELPTSFAVITEDATLSPELPPVEPQLETVDGAEHGLPDTSWSPPAMASTSLSEAPPFFMASSIFSLTDQGTTDTMATDQTMLVPGLTIPTSDYSAISQLALGISHPPASSDDSRSSAGGEDMVRHLDEMDLSDTPAPSEVPELSEYVSVPDHFLEDTTPVSALQYITTSSMTIAPKGRELVVFFSLRVANMAFSNDLFNKSSLEYRALEQQFTQLLVPYLRSNLTGFKQLEILNFRNGSVIVNSKMKFAKSVPYNLTKAVHGVLEDFRSAAAQQLHLEIDSYSLNIEPADQADPCKFLACGEFAQCVKNERTEEAECRCKPGYDSQGSLDGLEPGLCGPGTKECEVLQGKGAPCRLPDHSENQAYKTSVKKFQNQQNNKVISKRNSELLTVEYEEFNHQDWEGN

SEQ ID NO: 118919 - protein, 158 aa, Artificial Sequence
  derived and/or modified sequence
ERPNGTSAQPAQVKPEFYRQAELKPCPWTGSNQRRCITFCPTPDQADPCKFLACGEFAQCVKNERTEEAECRCKPGYDSQGSLDGLEPGLCGPGTKECEVLQGKGAPCRLPDHSENQAYKTSVKKFQNQQNNKVISKRNSELLTVEYEEFNHQDWEGN

SEQ ID NO: 118920 - DNA, 2394 bp, Artificial Sequence
  derived and/or modified sequence
atgtacctggagactcggcgcgctatatttgtgttttggatttttctccaggttcaggggactaaggatataagcatcaatatctatcacagtgagacaaaggatattgacaaccctcctcgaaacgaaaccaccgaaagcactgagaaaatgtataagatgtccaccatgcgacgcatttttgatctcgcaaaacaccgtacaaaacggtctgccttcttcccaacaggagttaaggtctgcccacaggagagcatgaaacagatcttggactctctgcaggcctactataggctgcgagtctgtcaggaggcggtgtgggaggcttaccggatttttctcgacaggatccccgacaccggtgagtaccaggattgggtatctatttgccaacaagagacgttctgcctgttcgacattgggaagaacttttcaaactctcaagagcatttagacttactccagcagcgcataaaacagcgctcttttcccgaccggaaagatgaaatctcagctgaaaaaactcttggggagccgggggaaactatcgtgatcagcacagatgtggctaacgtgtctctgggcccgttccccctaacccccgatgacacactgctgaacgagattcttgataatactctgaatgatacaaaaatgcccacaactgaaagagaaacggagttcgcggtcctagaggaacagcgtgttgaactctcagtaagtctggtcaaccagaagttcaaggccgaactggccgattctcagtcaccatactaccaggaactagccggcaaatcgcaactgcaaatgcagaagatcttcaaaaaattgcctggctttaaaaaaatacacgttctcgggtttcgtcccaaaaaagaaaaagatggctccagcagcaccgagatgcagctgaccgctatttttaagaggcactcggctgaggccaagtctccagcatctgacctgcttagctttgactccaataaaatagagagtgaggaggtttaccacggaactatggaagaagataagcagcccgagatatatctgaccgcaactgacctaaaacgcctgatcagcaaggccctggaagaagaacagagtctggatgtagggaccatccagttcaccgatgagatcgccggcagtctcccagcgttcggccccgatacccagtctgagctccccacctcttttgcagttataactgaagatgcaacattgagtccggaactgccccccgtggaaccccagttagagaccgtcgatggcgcagaacatggactgccagatacctcctggtctcccccagctatggccagtacttccctgtctgaggcaccaccattcttcatggccagcagcatttttagtctcaccgaccaggggacgactgacacaatggccacggaccagaccatgctggtgcccggtttgacgatacctaccagtgactattctgctattagccaactcgcactcggcatatcccacccccccgcgtctagcgatgacagccgcagctcggccggtggagaggatatggtgcgccacctcgacgagatggacctgtcagacacacctgccccatccgaggtgcccgaattaagtgagtatgtcagtgtgcctgatcacttcctcgaggacactacacccgtcagcgccctgcagtatataactacctcctctatgaccatcgcacctaagggtcgagaactggttgtgtttttttcacttagggttgccaacatggccttctctaacgatctgtttaataagtcaagcctggagtacagagcccttgagcagcagtttacacagcttctggtgccctatttgagatccaacctgaccgggtttaaacagttggagatccttaatttcaggaatggttccgtaatagttaattccaaaatgaagtttgccaagagcgtgccatacaatttgactaaggcagttcatggtgtcctggaggattttagatctgccgccgcccagcagttacatctggaaatcgacagctatagtctgaacatagaaccagcggatcaagccgacccctgtaagttcctcgcctgtggcgagtttgcccaatgcgtaaagaacgagcggacggaggaggcagagtgccggtgcaaaccagggtacgactcccagggcagtcttgatgggctggagcccggcctatgtggacctggcacaaaagagtgtgaggttttgcaaggaaagggtgcaccttgtaggcttcctgaccactctgaaaatcaagcctataaaacgagcgtaaagaagtttcaaaaccagcaaaacaacaaagtgatctcaaagcgcaatagcgagctgctcactgtcgagtacgaagagtttaaccaccaggattgggagggaaactag

SEQ ID NO: 118921 - DNA, 3558 bp, Artificial Sequence
  derived and/or modified sequence
agattattccagaaacagacactgctacatgttcttcataaattaacaccctcataaaggtaaaccaagaaggttatcctcaatcatctggtatcaatatataattatttttcacatttctgttactttttaatgagatttgaggttgttctgtgattgttatcagaattaccaatgcacaaaagccagaatgtatttggaaactagaagagctatttttgttttttggatttttctccaagttcaaggaaccaaagatatctccattaacatataccattctgaaactaaagacatagacaatcccccaagaaatgaaacaactgaaagtactgaaaaaatgtacaaaatgtcaactatgagacgaatattcgatttggcaaagcatcgaacaaaaagatccgcatttttcccaacgggggttaaagtctgtccacaggaatccatgaaacagattttagacagtcttcaagcttattatagattgagagtgtgtcaggaagcagtatgggaagcatatcggatctttctggatcgcatccctgacacaggggaatatcaggactgggtcagcatctgccagcaggagaccttctgcctctttgacattggaaaaaacttcagcaattcccaggagcacctggatcttctccagcagagaataaaacagagaagtttccctgacagaaaagatgaaatatctgcagagaagacattgggagagcctggtgaaaccattgtcatttcaacagatgttgccaacgtctcacttgggcctttccctctcactcctgatgacaccctcctcaatgaaattctcgataatacactcaacgacaccaagatgcctacaacagaaagagaaacagaattcgctgtgttggaggagcagagggtggagctcagcgtctctctggtaaaccagaagttcaaggcagagctcgctgactcccagtccccatattaccaggagctagcaggaaagtcccaacttcagatgcaaaagatatttaagaaacttccaggattcaaaaaaatccatgtgttaggatttagaccaaagaaagaaaaagatggctcaagctccacagagatgcaacttacggccatctttaagagacacagtgcagaagcaaaaagccctgcaagtgacctcctgtcttttgattccaacaaaattgaaagtgaggaagtctatcatggaaccatggaggaggacaagcaaccagaaatctatctcacagctacagacctcaaaaggctgatcagcaaagcactagaggaagaacaatctttggatgtggggacaattcagttcactgatgaaattgctggatcactgccagcctttggtcctgacacccaatcagagctgcccacatcttttgctgttataacagaggatgctactttgagtccagaacttcctcctgttgaaccccagcttgagacagtggacggagcagagcatggtctacctgacacttcttggtctccacctgctatggcctctacctccctgtcagaagctccacctttctttatggcatcaagcatcttctctctgactgatcaaggcaccacagatacaatggccactgaccagacaatgctagtaccagggctcaccatccccaccagtgattattctgcaatcagccaactggctctgggaatttcacatccacctgcatcttcagatgacagccgatcaagtgcaggtggcgaagatatggtcagacacctagatgaaatggatctgtctgacactcctgccccatctgaggtaccagagctcagcgaatatgtttctgtcccagatcatttcttggaggataccactcctgtctcagctttacagtatatcaccactagttctatgaccattgcccccaagggccgagagctggtagtgttcttcagtctgcgtgttgctaacatggccttctccaacgacctgttcaacaagagctctctggagtaccgagctctggagcaacaattcacacagctgctggttccatatctacgatccaatcttacaggatttaagcaacttgaaatacttaacttcagaaacgggagtgtgattgtgaatagcaaaatgaagtttgctaagtcagtgccgtataacctcaccaaggctgtgcacggggtcttggaggattttcgttctgctgcagcccaacaactccatctggaaatagacagctactctctcaacattgaaccagctgatcaagcagatccctgcaagttcctggcctgcggcgaatttgcccaatgtgtaaagaacgaacggactgaggaagcggagtgtcgctgcaaaccaggatatgacagccaggggagcctggacggtctggaaccaggcctctgtggccctggcacaaaggaatgcgaggtcctccagggaaagggagctccatgcaggttgccagatcactctgaaaatcaagcatacaaaactagtgttaaaaagttccaaaatcaacaaaataacaaggtaatcagtaaaagaaattctgaattactgaccgtagaatatgaagaatttaaccatcaagattgggaaggaaattaaaaactgaaaatgtacaattatcatttaggctatctcaagagagatgatttgccttctcaaggaaaatggagacaggcatattcatgggtcatcaaaatccagacatacagtcaacactgagaatcagcacacaccatatttcaaatatagaagagtcatgtacttggcaaccagtaaattctgaagaaaaagacacttacttattattaaaaccccaaatgcaatcagcgaaacatatttttactattcttggatgatagtcaaaatgatcataagccaggtttgcttccaccttccctgaaaattttactcacagatcatttgcaacaagcatagcttacttattgtttagggactgaacaatttattgggaagcaaactctttatatgctagaaagtacatttaaaagatgactacttacgcagggagatgcaggtctctctaaacgcatgaatgtatgtagtgtgtaggcactgtagtgagtgtatatatgctccacactacgtctgataaacacaaacctcagtattcagttattaggcacactagttttatacgcaactactgcttacatagtagactgttttgttgccaataatctttgaattgttctttaaaagaaactgaggttcagatacacataccatggaaaaatcttacttttcttgttactacacaaagctattttaaagaagatgctatgttgggagaagggcgaagttgtactatatgacataatcaattcctgtcttccaccacagatgaacaatgtcttcctataataacttcagaatatttcctcacaccaactttagtgtgtgtatacctagactggcatcaatgtaatccaattcagtccattttttatgtgctgcttaatgaaaatgaatctgtctctatctctttcaaatgttctaatatcagatatatttgctacaaaccttaatttcaataaagtaaaagtgatatactc

SEQ ID NO: 118922 - DNA, 5795 bp, Artificial Sequence
  derived and/or modified sequence
agattattccagaaacagacactgctacatgttcttcataaattaacaccctcataaaggtaaaccaagaaggttatcctcaatcatctggtatcaatatataattatttttcacatttctgttactttttaatgagatttgaggttgttctgtgattgttatcagaattaccaatgcacaaaagccagaatgtatttggaaactagaagagctatttttgttttttggatttttctccaagttcaaggaaccaaagtgtgtcaggaagcagtatgggaagcatatcggatctttctggatcgcatccctgacacaggggaatatcaggactgggtcagcatctgccagcaggagaccttctgcctctttgacattggaaaaaacttcagcaattcccaggagcacctggatcttctccagcagagaataaaacagagaagtttccctgacagaaaagatgaaatatctgcagagaagacattgggagagcctggtgaaaccattgtcatttcaacagaaaagaataaaggtaaaaccaaaccattcaatatcttacagtttggaaacaaccatcatgaacatttactgcctattttctgccttctttcttctattatatacacatattactgagaccatatttacttagagtttgtatcattttttccacttaacctgatgtaaaggatattttatagttcactaaaatttcttcaaagttatcattttaatgacttgcaacattctgttgcatccatatggatgtcatcaacttaaccattgcatcattgtatctgacattacaaatagtgttttaattaagatatttaaacataaatctttgtcaaatcactaatttctcaaaatagattactaagtcaaacactatggattttaaggcttttaataaattttgccaaattttttttccagaaattttgttacaatttaaatatcccactggcagaaaagacaagaacctgtctcattgcagcacttatcaatattgaatattactatttattctagagtttgccaaaaggcagaggaaaatcatttctcctgtgtttattagatgtttgaaatttctctttcatgtatatttctattgcagtcttcccattttcacataaaagaatacttttaaatatacacaataaaactattctctgggcaatgtgttccccagttcatttgatttttggtaatgtgaataatgttttaagaaattaatttttcatgacttaaaatgtagaaattgagaaaatagatatttgtaaataaatgatattactttcccatttcttcctttactgacattcagagaaagccggctgtgcctatatttcaattttctcctaagttcagctaatttatcatttctggactgacttgtagctaataataggacaagcctagttgaattttaattataaaatgacagtaaaatgcatttttaacaataaaaagaagagctacatagttaattcccccatataaacagctcaaatttgacctgtgacacctaatatcaagtcttattcaaaaaggtattatttagaggaggagcatataaacatgtaaaaagacgttttgtactgacttcattttaatatgggaaaacaaaattaataagagaattgaaatttgtatttctactttaaacttgaaggtaatgtactttagctgatagaaacttttgtaataacaagattagatttagtaagttagagtaagttaatatgacccctttcttataaattatttttcatttttttaaataaaaactttgagggatcagtggacaattcatatattataatataatatgatatatcatcaccatatatttaagttctagcaacaaatgttttagaattatttccccagtacttctggacacctccagttgaagtatacacacagaacagttaagattagattttgattgggaaatgttactaggtgcctaggtgtgaaggaagagtgagaaatctccaaaagaggctgaatgtgctcgaagacaaacccaggctacctaataattgtttttaggtgtaagtatgtgaataatttatcttttcaaggcaataaaatggaaggatagccaaataaaaatttgttcttctagggtaccagctaagtacttttttattgtaacaaaaattgtagcataaaccgattattcatagaattacaaagtttgaaggtgccttacattggtaatagtctgatgaagtccagagcacagaacacctccatcccaattgctcacagcaggattcttcaatgagggcagaaggggaagatgccagggaccacatcctttgaggttctgatatgccacagggtatgtactttattagccaaaaaactgccttgcctagatgattctgatacccactctcacgcccccactaggaagcacaattccacacccagggcaattacttcacagagcctcacagtgacaagtaaccacttgtgaccgcagattcccaggtaccacatactcttcagggagtaaggaaagattgaatcatttttcagtatatcttgttttctaaaacacaagaataaactaaggcattctatgtttttgcctaattaaggttgaaatggaaagttgtttctggctaaatataaaccaattaactataacactattttctctgagcatttttttaaataataatttattacaaaatagaaatgcatttgtattataataacgcttttttctttgcttgaatagaacccagacttgcactctatgaagatctttaaaaatatcaaaacatttgccacatatttgaaatggtttatggtgatctgttctaaaagaagtgaaattcatagcatcttaaatgttctttcatctcttggattttctgattaaaatcttattcctcaatgattgcttaagcaatctacattttaaagacttgggcagtattctaagaaaaccctcagaagagcaaattcaagatgttgccaacgtctcacttgggcctttccctctcactcctgatgacaccctcctcaatgaaattctcgataatacactcaacgacaccaagatgcctacaacagaaagagaaacagaattcgctgtgttggaggagcagagggtggagctcagcgtctctctggtaaaccagaagttcaaggcagagctcgctgactcccagtccccatattaccaggagctagcaggaaagtcccaacttcagatgcaaaagatatttaagaaacttccaggattcaaaaaaatccatgtgttaggatttagaccaaagaaagaaaaagatggctcaagctccacagagatgcaacttacggccatctttaagagacacagtgcagaagcaaaaagccctgcaagtgacctcctgtcttttgattccaacaaaattgaaagtgaggaagtctatcatggaaccatggaggaggacaagcaaccagaaatctatctcacagctacagacctcaaaaggctgatcagcaaagcactagaggaagaacaatctttggatgtggggacaattcagttcactgatgaaattgctggatcactgccagcctttggtcctgacacccaatcagagctgcccacatcttttgctgttataacagaggatgctactttgagtccagaacttcctcctgttgaaccccagcttgagacagtggacggagcagagcatggtctacctgacacttcttggtctccacctgctatggcctctacctccctgtcagaagctccacctttctttatggcatcaagcatcttctctctgactgatcaaggcaccacagatacaatggccactgaccagacaatgctagtaccagggctcaccatccccaccagtgattattctgcaatcagccaactggctctgggaatttcacatccacctgcatcttcagatgacagccgatcaagtgcaggtggcgaagatatggtcagacacctagatgaaatggatctgtctgacactcctgccccatctgaggtaccagagctcagcgaatatgtttctgtcccagatcatttcttggaggataccactcctgtctcagctttacagtatatcaccactagttctatgaccattgcccccaagggccgagagctggtagtgttcttcagtctgcgtgttgctaacatggccttctccaacgacctgttcaacaagagctctctggagtaccgagctctggagcaacaattcacacagctgctggttccatatctacgatccaatcttacaggatttaagcaacttgaaatacttaacttcagaaacgggagtgtgattgtgaatagcaaaatgaagtttgctaagtcagtgccgtataacctcaccaaggctgtgcacggggtcttggaggattttcgttctgctgcagcccaacaactccatctggaaatagacagctactctctcaacattgaaccagctgatcaagcagatccctgcaagttcctggcctgcggcgaatttgcccaatgtgtaaagaacgaacggactgaggaagcggagtgtcgctgcaaaccaggatatgacagccaggggagcctggacggtctggaaccaggcctctgtggccctggcacaaaggaatgcgaggtcctccagggaaagggagctccatgcaggttgccagatcactctgaaaatcaagcatacaaaactagtgttaaaaagttccaaaatcaacaaaataacaaggtaatcagtaaaagaaattctgaattactgaccgtagaatatgaagaatttaaccatcaagattgggaaggaaattaaaaactgaaaatgtacaattatcatttaggctatctcaagagagatgatttgccttctcaaggaaaatggagacaggcatattcatgggtcatcaaaatccagacatacagtcaacactgagaatcagcacacaccatatttcaaatatagaagagtcatgtacttggcaaccagtaaattctgaagaaaaagacacttacttattattaaaaccccaaatgcaatcagcgaaacatatttttactattcttggatgatagtcaaaatgatcataagccaggtttgcttccaccttccctgaaaattttactcacagatcatttgcaacaagcatagcttacttattgtttagggactgaacaatttattgggaagcaaactctttatatgctagaaagtacatttaaaagatgactacttacgcagggagatgcaggtctctctaaacgcatgaatgtatgtagtgtgtaggcactgtagtgagtgtatatatgctccacactacgtctgataaacacaaacctcagtattcagttattaggcacactagttttatacgcaactactgcttacatagtagactgttttgttgccaataatctttgaattgttctttaaaagaaactgaggttcagatacacataccatggaaaaatcttacttttcttgttactacacaaagctattttaaagaagatgctatgttgggagaagggcgaagttgtactatatgacataatcaattcctgtcttccaccacagatgaacaatgtcttcctataataacttcagaatatttcctcacaccaactttagtgtgtgtatacctagactggcatcaatgtaatccaattcagtccattttttatgtgctgcttaatgaaaatgaatctgtctctatctctttcaaatgttctaatatcagatatatttgctacaaaccttaatttcaataaagtaaaagtgatatactc

SEQ ID NO: 118923 - DNA, 2394 bp, Artificial Sequence
  derived and/or modified sequence
atgtacctggagacccggcgggccatctttgtgttctggatcttcctgcaggtgcagggcaccaaggacatcagcatcaacatctaccacagcgagaccaaggacatcgacaaccccccaagaaatgagaccacagagagcacagagaagatgtacaagatgagcaccatgaggcgcatctttgacctggccaagcacaggaccaagaggtctgccttcttccccaccggggtgaaggtgtgcccccaggagagcatgaagcagatcctggacagcctgcaggcctactaccgcctgcgggtgtgccaggaggccgtgtgggaggcctaccgcatcttcctggaccgcatcccagacaccggggagtaccaggactgggtgtccatctgccagcaggagaccttctgcctgtttgacatcggcaagaacttcagcaacagccaggagcacctggacctgctgcagcagaggatcaagcagaggagcttcccagacaggaaggatgagatctctgctgagaagaccctgggggagcctggagagaccatcgtcatcagcacagatgtggccaacgtgtccctgggccccttccccctgaccccagatgacaccctgctgaatgagatcctggacaacaccctgaatgacaccaagatgcccaccacagagcgggagacagaatttgctgtgctggaggagcagagggtggagctgtctgtgtccctggtgaaccagaagttcaaggccgagctggccgacagccagagcccctactaccaggagctggccggcaagagccagctgcagatgcagaagatcttcaagaagctgcccggcttcaagaagatccacgtgctgggcttccggcccaagaaggagaaggatggcagcagcagcacagagatgcagctgacagccatcttcaagaggcacagcgctgaggccaagagccctgccagtgacctgctgagctttgacagcaacaagattgagagcgaggaggtgtaccacggcaccatggaggaggacaagcagcctgagatctacctgacagccacagacctgaagaggctcatcagcaaggccctggaggaggagcagagcctggatgtgggcaccatccagttcacagatgaaattgctggcagcctgcctgcctttggaccagacacccagagcgagctgcccaccagctttgctgtgatcacagaagatgccaccctgagccctgagctgccccctgtggagccccagctggagaccgtggatggagctgagcacggcctgcctgacacctcctggagccccccagccatggccagcaccagcctgtctgaggccccacccttcttcatggccagcagcatcttcagcctgacagaccagggcaccacagacaccatggccacagaccagaccatgctggtgcccggcctgaccatccccaccagtgactacagcgccatcagccagctggccctgggcatcagccaccccccagccagcagtgatgacagccgcagcagcgctggaggagaggacatggtgcgccacctggatgagatggacctgagtgacaccccagcccccagcgaggtgcctgagctgtctgaatatgtgtctgtgcctgaccacttcctggaggacaccacccctgtgtctgccctgcagtacatcaccaccagctccatgaccatcgcccccaagggccgggagctggtggtgttcttcagcctgcgggtggccaacatggccttcagcaatgacctcttcaacaagagcagcctggagtaccgggccctggagcagcagttcacccagctgctggtgccctacctgcggagcaacctgaccggcttcaagcagctggagatcctgaacttcagaaatggcagcgtcatcgtgaacagcaagatgaagtttgccaagtctgtgccctacaacctgaccaaggctgtgcacggcgtgctggaggacttccgctctgctgctgcccagcagctgcacctggagattgacagctacagcctgaacatcgagcctgctgaccaggccgacccctgcaagttcctggcctgtggggagtttgcccagtgtgtgaagaatgaaagaacagaggaggctgaatgtcgctgcaagccaggctatgacagccagggcagcctggatggcctggagcccggcctgtgtggccctggcaccaaggaatgtgaggtgctgcagggcaaaggagccccctgccgcctgcctgaccacagcgagaaccaggcctacaagacctctgtgaagaagttccagaaccagcagaacaacaaggtgatcagcaagagaaattctgagctgctgactgtggagtatgaggagttcaaccaccaggactgggagggcaactag

SEQ ID NO: 118924 - DNA, 2394 bp, Artificial Sequence
  derived and/or modified sequence
atgtacctggagacccggcgggccatcttcgtgttctggatcttcctgcaggtacaaggcaccaaggacatcagtatcaatatctaccattccgagacgaaagacattgacaacccccctaggaacgagaccacggagagcacggagaaaatgtacaaaatgtcgaccatgaggcgtatctttgatctcgcaaagcatagaactaaacgctctgccttcttcccgacgggtgtgaaggtttgtcctcaggagagcatgaagcaaattctcgatagcctccaggcttattatcgactgcgcgtctgccaggaagccgtatgggaggcataccggatttttctcgacagaataccagacacaggagagtaccaggactgggtctcgatttgtcaacaggaaaccttctgtctctttgacataggcaagaatttctcgaatagccaggaacaccttgacctactgcaacagagaatcaaacagcgatcttttcctgataggaaagatgaaatatccgctgagaagactctcggagaacctggagaaaccatcgtcatcagcacggacgtcgctaatgtctcactggggccttttccgttaacgcctgacgacacactgctcaacgaaatcctggacaacactctaaacgatacaaaaatgcctacgacggaaagagaaacagaatttgccgttctcgaggagcagcgggttgaactcagcgtgagccttgtgaaccagaaattcaaggcagagcttgctgactcacagtcaccatattatcaggaactggccggtaagagtcagctacagatgcagaagatcttcaaaaaattaccagggttcaagaaaatccacgtactgggcttccgccccaagaaggagaaagatggctccagcagtaccgaaatgcagctaacagctatcttcaagcgtcattctgcggaggccaaatcacccgcatcagatctgcttagctttgattccaacaagatagagagtgaagaggtctaccatggcaccatggaggaggataaacagccagaaatctacctgacagcgacagatctcaaacgactcatatcaaaagcattggaagaggaacagagcctcgatgttgggactattcagtttacagatgaaattgctggaagccttccagcatttggtccagacacgcagagcgagctgcccacatctttcgctgtcatcaccgaggatgcgactcttagccccgagttgccccctgtcgagcctcagctagaaacagtcgatggggctgagcacggattacccgatacttcatggtcccctccggccatggcctccacttctttgtcagaggctcctcctttctttatggcttcttctatcttttccctgaccgatcaaggcactactgatactatggcaaccgaccagaccatgctagttcctggtcttactatcccaactagcgattacagcgctatctcacagttagcgttaggaatttcacatccacctgcttcctctgacgattctcgcagttccgcaggaggcgaggacatggtaaggcacctggacgaaatggacctgagcgacactcctgctccatctgaggtgcccgagctcagtgagtacgtgtcggtgcctgaccactttctggaggacactacaccagtctctgctctccagtatattactacttcctccatgactatagcaccaaaaggcagggagctcgtcgtgtttttcagcctgcgggtggctaacatggctttctctaacgatctctttaacaaatcttctctggaatatagagcgctggagcagcaattcacccagctccttgttccatacttgcgatcaaacctgaccggttttaagcagctggagatcctgaacttccgaaacggctccgttatcgttaactctaaaatgaagtttgccaagagcgtaccctataacctgaccaaggctgtgcatggtgtcctggaggactttcggtcagcagccgcgcaacagctgcatctcgagatcgatagttactcgttgaacattgaacctgccgatcaggccgatccttgcaagttcctcgcctgcggagagttcgcacaatgcgtgaaaaatgagaggacagaggaggcagaatgcaggtgcaagccaggttacgattcgcagggctcactggatggcctggagccaggcctttgtgggcctggaacaaaagagtgcgaagtgctgcagggtaaaggtgccccatgcagacttcccgaccattccgagaatcaggcatataaaacctctgtgaaaaaattccaaaatcagcagaataataaagtgatctctaaacggaattcagaactcttaactgtggagtacgaagaattcaaccaccaggactgggaggggaactag

SEQ ID NO: 118925 - DNA, 2394 bp, Artificial Sequence
  derived and/or modified sequence
atgtaccttgagacacgcagggctatcttcgttttctggattttccttcaagtgcaagggaccaaggacatctctataaatatatatcacagcgagacgaaggatatcgataacccgcctcgcaatgaaactactgagtcaacagagaaaatgtacaaaatgtccactatgaggaggatatttgacctggctaagcaccgcactaagcgcagtgcattctttcccaccggggtgaaggtttgcccgcaggaaagcatgaagcagatcctggattccctgcaagcatattacagacttcgggtgtgtcaggaggctgtatgggaagcttaccgcatcttcctggacaggattcccgatacgggcgaatatcaggactgggtaagcatctgccagcaggaaacattctgcctgttcgacatcgggaaaaactttagcaacagccaggagcacctcgacttgttgcagcaacggattaagcagcggtcctttccggacagaaaagatgagattagtgccgagaagaccctgggggaaccaggagaaacaatcgtaatctccacagatgtcgccaatgtgagtctggggccatttccgttgactcctgacgataccctgctgaatgagattctggataacaccttgaacgacactaagatgccaactaccgagcgtgaaaccgagtttgcggttctggaggagcagcgtgttgagctgtccgtatcgttagtgaaccagaagttcaaggccgaattggccgattctcagagcccatactatcaggaactggccggaaagtcccagctccagatgcagaagatctttaagaagttgcccggttttaaaaaaatccacgtgctgggcttccgcccaaagaaggagaaggatggttcctctagtaccgaaatgcaactgaccgccatatttaagagacacagcgccgaggccaaatcccccgcttctgacctgctcagtttcgactcaaataagatagagtcagaggaagtgtaccacggaactatggaggaggataagcagcccgagatatatttgacagccaccgacctgaaaaggcttatctccaaagctcttgaggaggagcagagcctggacgtcgggactatccaatttacggatgagatcgccggtagcttgcccgcttttggacctgacacccagtcagagctgcccacatccttcgccgtgatcacagaggacgctacattgtcccccgagctcccaccagtcgagccacagctggaaactgtcgatggtgctgagcacgggctacccgatacgagttggtcaccgccagccatggcctccacatctctgtcagaagccccaccctttttcatggctagctctatcttctctcttaccgaccagggaaccaccgacacgatggccaccgaccaaaccatgctggtacctggtctaactatcccaacttccgattatagcgctatctcacagcttgctctgggaatttcccacccaccagcttcaagcgacgactcccgcagttccgccggaggggaagacatggtgcggcacctcgacgagatggatctctctgacaccccagccccatccgaagtgcccgagctctctgaatatgtctccgtgccggaccattttctggaggacacgactcccgtgagtgctttgcagtacatcactacctctagcatgacaatcgctcccaagggtagagagctggtggtcttcttttctctcagggtagcaaacatggcattttctaatgatctgtttaacaagtcttcactggagtacagagcattagaacagcagttcacccagctgctggttccctacctcaggtccaacctcaccggctttaaacagctcgagatcttgaatttcagaaatggatccgtgatagtcaacagcaaaatgaagtttgccaagagcgttccgtacaatctgaccaaagccgtgcatggggtactggaggatttccgtagcgccgcagcccagcagttacacctggagatagattcatatagtctcaacatcgaacctgcggaccaggccgacccctgcaagttcctagcttgcggagagtttgcacagtgtgtgaaaaatgagagaaccgaggaggccgagtgcaggtgcaagcctgggtacgacagccagggctccctcgacggcctagagcctggtctgtgcggcccaggcacaaaagaatgtgaggttctccagggaaagggtgccccttgccggctgcccgaccattccgaaaatcaggcatataaaaccagtgtcaaaaagtttcagaaccagcagaacaacaaggtcattagtaaacgaaactccgagctattaacagttgagtacgaggagttcaatcatcaggactgggaggggaattag

SEQ ID NO: 118926 - DNA, 2394 bp, Artificial Sequence
  derived and/or modified sequence
atgtacctggagaccagaagagccatcttcgtgttctggatcttcctgcaggtgcagggcaccaaggacatcagcatcaacatctaccacagcgagaccaaggacatcgacaacccccccagaaacgagaccaccgagagcaccgagaagatgtacaagatgagcaccatgagaagaatcttcgacctggccaagcacagaaccaagagaagcgccttcttccccaccggcgtgaaggtgtgcccccaggagagcatgaagcagatcctggacagcctgcaggcctactacagactgagagtgtgccaggaggccgtgtgggaggcctacagaatcttcctggacagaatccccgacaccggcgagtaccaggactgggtgagcatctgccagcaggagaccttctgcctgttcgacatcggcaagaacttcagcaacagccaggagcacctggacctgctgcagcagagaatcaagcagagaagcttccccgacagaaaggacgagatcagcgccgagaagaccctgggcgagcccggcgagaccatcgtgatcagcaccgacgtggccaacgtgagcctgggccccttccccctgacccccgacgacaccctgctgaacgagatcctggacaacaccctgaacgacaccaagatgcccaccaccgagagagagaccgagttcgccgtgctggaggagcagagagtggagctgagcgtgagcctggtgaaccagaagttcaaggccgagctggccgacagccagagcccctactaccaggagctggccggcaagagccagctgcagatgcagaagatcttcaagaagctgcccggcttcaagaagatccacgtgctgggcttcagacccaagaaggagaaggacggcagcagcagcaccgagatgcagctgaccgccatcttcaagagacacagcgccgaggccaagagccccgccagcgacctgctgagcttcgacagcaacaagatcgagagcgaggaggtgtaccacggcaccatggaggaggacaagcagcccgagatctacctgaccgccaccgacctgaagagactgatcagcaaggccctggaggaggagcagagcctggacgtgggcaccatccagttcaccgacgagatcgccggcagcctgcccgccttcggccccgacacccagagcgagctgcccaccagcttcgccgtgatcaccgaggacgccaccctgagccccgagctgccccccgtggagccccagctggagaccgtggacggcgccgagcacggcctgcccgacaccagctggagcccccccgccatggccagcaccagcctgagcgaggccccccccttcttcatggccagcagcatcttcagcctgaccgaccagggcaccaccgacaccatggccaccgaccagaccatgctggtgcccggcctgaccatccccaccagcgactacagcgccatcagccagctggccctgggcatcagccacccccccgccagcagcgacgacagcagaagcagcgccggcggcgaggacatggtgagacacctggacgagatggacctgagcgacacccccgcccccagcgaggtgcccgagctgagcgagtacgtgagcgtgcccgaccacttcctggaggacaccacccccgtgagcgccctgcagtacatcaccaccagcagcatgaccatcgcccccaagggcagagagctggtggtgttcttcagcctgagagtggccaacatggccttcagcaacgacctgttcaacaagagcagcctggagtacagagccctggagcagcagttcacccagctgctggtgccctacctgagaagcaacctgaccggcttcaagcagctggagatcctgaacttcagaaacggcagcgtgatcgtgaacagcaagatgaagttcgccaagagcgtgccctacaacctgaccaaggccgtgcacggcgtgctggaggacttcagaagcgccgccgcccagcagctgcacctggagatcgacagctacagcctgaacatcgagcccgccgaccaggccgacccctgcaagttcctggcctgcggcgagttcgcccagtgcgtgaagaacgagagaaccgaggaggccgagtgcagatgcaagcccggctacgacagccagggcagcctggacggcctggagcccggcctgtgcggccccggcaccaaggagtgcgaggtgctgcagggcaagggcgccccctgcagactgcccgaccacagcgagaaccaggcctacaagaccagcgtgaagaagttccagaaccagcagaacaacaaggtgatcagcaagagaaacagcgagctgctgaccgtggagtacgaggagttcaaccaccaggactgggagggcaactag

SEQ ID NO: 118927 - protein, 280 aa, Artificial Sequence
  derived and/or modified sequence
MLGQQQQQLYSSAALLTGERSRLLTCYVQDYLECVESLPHDMQRNVSVLRELDNKYQETLKEIDDVYEKYKKEDDLNQKKRLQQLLQRALINSQELGDEKIQIVTQMLELVENRARQMELHSQCFQDPAESERASDKAKMDSSQPERSSRRPRRQRTSESRDLCHMANGIEDCDDQPPKEKKSKSAKKKKRSKAKQEREASPVEFAIDPNEPTYCLCNQVSYGEMIGCDNEQCPIEWFHFSCVSLTYKPKGKWYCPKCRGDNEKTMDKSTEKTKKDRRSR

SEQ ID NO: 118928 - DNA, 843 bp, Artificial Sequence
  derived and/or modified sequence
atgctgggtcagcagcagcagcagttatattctagcgccgccctgctaacaggggaacgatcaagactgctcacttgctatgtgcaggactacctggaatgtgtggaaagtctgcctcacgacatgcagcgaaacgtgtcggttctccgcgaacttgacaacaaatatcaggagacattaaaagagatagacgacgtgtacgaaaaatacaagaaggaggatgatctgaaccagaagaagcggctgcagcagctccttcaaagggcactgattaactcccaggaactgggggatgaaaaaatacagattgtgacacagatgctggagcttgttgaaaatagagcgcggcagatggaactgcacagccagtgctttcaagatcctgcagaatccgagagggcgagcgataaagcaaagatggactcgtctcagcccgagcgctcaagcaggagaccgcggagacagcggacgagcgagagtagagacctgtgtcatatggcgaacgggatcgaggattgcgacgatcagcccccaaaggaaaagaagtcaaagagtgccaagaaaaaaaagcgctcaaaggcaaagcaggagcgcgaagcctcgccggttgagtttgccatcgatccgaacgagccaacctattgcctgtgtaaccaggtctcatacggggagatgattggctgcgataatgagcaatgtcctatagaatggttccatttttcttgcgtgtccctgacttacaaaccgaagggaaaatggtactgccctaagtgcagaggagacaacgaaaagaccatggataaaagcaccgaaaaaacaaaaaaagaccgtcgctcgcgttag

SEQ ID NO: 118929 - DNA, 1189 bp, Artificial Sequence
  derived and/or modified sequence
cgcccctgggctggtgctgcgggggcggggagtgagggctgctctggggggagtggagatcggggagcgcggccgtgccctctcgagcggctgcggggtccccgcggcgccgggctgctgagctgagggcccgcggcggccgcggccggtgcatgtgcggctgctggatgcggaggcggcggcgacggcgcggatcggcaggatgttagggcagcagcagcagcaactgtactcgtcggccgcgctcctgaccggggagcggagccggctgctcacctgctacgtgcaggactaccttgagtgcgtggagtcgctgccccacgacatgcagaggaacgtgtctgtgctgcgagagctggacaacaaatatcaagaaacgttaaaggaaattgatgatgtctacgaaaaatataagaaagaagatgatttaaaccagaagaaacgtctacagcagcttctccagagagcactaattaatagtcaagaattgggagatgaaaaaatacagattgttacacaaatgctcgaattggtggaaaatcgggcaagacaaatggagttacactcacagtgtttccaagatcctgctgaaagtgaacgagcctcagataaagcaaagatggattccagccaaccagaaagatcttcaagaagaccccgcaggcagcggaccagtgaaagccgtgatttatgtcacatggcaaatgggattgaagactgtgatgatcagccacctaaagaaaagaaatccaagtcagcaaagaaaaagaaacgctccaaggccaagcaggaaagggaagcttcacctgttgagtttgcaatagatcctaatgaacctacatactgcttatgcaaccaagtgtcttatggggagatgataggatgtgacaatgaacagtgtccaattgaatggtttcacttttcatgtgtttcacttacctataaaccaaaggggaaatggtattgcccaaagtgcaggggagataatgagaaaacaatggacaaaagtactgaaaagacaaaaaaggatagaagatcgaggtagtaaaggccatccacattttaaagggttatttgtcttttatataattcgtttgctttcagaaaatgttttagggtaaatgcataagactatgcaataatttttaatcattagtattaatggtgtattaaaagttgttgtactttg

SEQ ID NO: 118930 - DNA, 843 bp, Artificial Sequence
  derived and/or modified sequence
atgctgggccagcagcagcagcagctgtacagcagcgctgccctgctgactggagagaggagccggctgctgacctgctacgtgcaggactacctggagtgtgtggagagcctgccccatgacatgcagagaaatgtgtctgtgctgcgggagctggacaacaagtaccaggagaccctgaaggagattgatgatgtgtatgagaagtacaagaaggaggatgacctgaaccagaagaagaggctgcagcagctgctgcagagggccctgatcaacagccaggagctgggagatgagaagatccagatcgtgacccagatgctggagctggtggagaacagagcccggcagatggagctgcacagccagtgcttccaggaccctgctgagagcgagcgggccagtgacaaggccaagatggacagcagccagcctgagaggagcagccggcggccccggcggcagaggaccagcgagagccgggacctgtgccacatggccaacggcatcgaggactgtgatgaccagccccccaaggagaagaagagcaagagcgccaagaagaagaagaggagcaaggccaagcaggagcgggaggccagccctgtggagtttgccatcgaccccaatgagcccacctactgcctgtgcaaccaggtgtcctatggagagatgattggctgtgacaatgagcagtgccccatcgagtggttccacttcagctgtgtgtccctgacctacaagcccaagggcaagtggtactgccccaagtgccgcggggacaatgagaagaccatggacaagagcacagagaagaccaagaaggacagaagaagcaggtag

SEQ ID NO: 118931 - DNA, 843 bp, Artificial Sequence
  derived and/or modified sequence
atgctgggccagcagcagcagcagctgtacagcagcgccgccctgctgactggggagcgcagcagacttcttacctgttacgtgcaggactacctcgagtgcgtcgagagtctcccccatgatatgcagcggaatgtctctgtcctacgagaactagacaataagtatcaagagacattaaaagagattgacgacgtgtacgagaaatacaagaaggaggacgacctcaatcaaaagaagcggttgcagcagcttctgcaaagagctttgatcaactcgcaagaactgggagacgaaaagattcagatcgttacccagatgttagagctggtggagaacagggcccggcagatggaactgcatagtcagtgctttcaagaccctgccgaatctgagcgcgcatcagataaagctaaaatggattcgagccagccagaacgaagctccaggcgccctaggagacagcggacttctgagagccgcgacctgtgtcatatggctaatggcatcgaagactgcgatgaccagccccctaaagaaaagaagtccaagtccgcaaagaaaaagaaaagatcaaaggccaagcaagaacgcgaggcgtcacctgttgagttcgctatcgaccccaacgagccaacctactgtctttgcaaccaggtaagttacggggaaatgatcggatgtgacaatgaacagtgtcccatcgaatggttccactttagctgcgtaagcctgacgtataagccaaaagggaagtggtattgtcctaaatgcaggggcgacaatgagaaaaccatggacaaaagtactgagaaaaccaagaaggatcggcgatccagatag

SEQ ID NO: 118932 - DNA, 843 bp, Artificial Sequence
  derived and/or modified sequence
atgctcggtcagcagcaacaacagctctactcttccgccgctctgttaaccggggaaagatccaggctgctgacatgttatgtgcaggactatctggaatgcgttgaaagtctgcctcacgatatgcagcggaacgtaagcgtgctaagggaactcgacaacaagtaccaggagaccctgaaagagatcgatgacgtttacgagaagtataaaaaggaggatgaccttaaccaaaaaaagcggctgcagcaattactgcagcgggcactgataaactcccaagaacttggtgacgagaaaattcaaattgtgacccaaatgttagagctcgttgagaatagagccaggcagatggaactccattctcagtgtttccaggatcctgccgaatctgaacgggcatcagacaaggccaaaatggactcatctcagcccgagaggtcttccagacgacctcgtcgacaaaggacctccgaatcaagagacttgtgtcatatggccaatgggatcgaagattgcgacgaccagcctcctaaggaaaagaagtccaaatcggcaaagaagaagaaacgaagcaaagccaagcaagaacgggaagcctcacctgtcgagttcgccatcgaccccaatgagccaacttactgtctgtgtaatcaggtctcttacggagagatgattggatgtgataatgagcagtgtcccatagagtggtttcacttttcatgtgtgtccctaacttacaaaccgaaaggaaagtggtattgtcccaagtgtcggggtgataacgagaagacgatggacaagagcaccgagaaaacaaagaaagacagacgctctcggtag

SEQ ID NO: 118933 - DNA, 843 bp, Artificial Sequence
  derived and/or modified sequence
atgctgggccagcagcagcagcagctgtacagcagcgccgccctgctgaccggcgagagaagcagactgctgacctgctacgtgcaggactacctggagtgcgtggagagcctgccccacgacatgcagagaaacgtgagcgtgctgagagagctggacaacaagtaccaggagaccctgaaggagatcgacgacgtgtacgagaagtacaagaaggaggacgacctgaaccagaagaagagactgcagcagctgctgcagagagccctgatcaacagccaggagctgggcgacgagaagatccagatcgtgacccagatgctggagctggtggagaacagagccagacagatggagctgcacagccagtgcttccaggaccccgccgagagcgagagagccagcgacaaggccaagatggacagcagccagcccgagagaagcagcagaagacccagaagacagagaaccagcgagagcagagacctgtgccacatggccaacggcatcgaggactgcgacgaccagccccccaaggagaagaagagcaagagcgccaagaagaagaagagaagcaaggccaagcaggagagagaggccagccccgtggagttcgccatcgaccccaacgagcccacctactgcctgtgcaaccaggtgagctacggcgagatgatcggctgcgacaacgagcagtgccccatcgagtggttccacttcagctgcgtgagcctgacctacaagcccaagggcaagtggtactgccccaagtgcagaggcgacaacgagaagaccatggacaagagcaccgagaagaccaagaaggacagaagaagcagatag

SEQ ID NO: 118934 - protein, 98 aa, Artificial Sequence
  derived and/or modified sequence
MNQTAILICCLIFLTLSGIQGVPLSRTVRCTCISISNQPVNPRSLEKLEIIPASQFCPRVEIIATMKKKGEKRCLNPESKAIKNLLKAVSKERSKRSP

SEQ ID NO: 118935 - DNA, 297 bp, Artificial Sequence
  derived and/or modified sequence
atgaaccagaccgccatcctgatctgctgcctgatcttcctgaccctgagcggcatccagggcgtgcccctgagcagaaccgtgagatgcacctgcatcagcatcagcaaccagcccgtgaaccccagaagcctggagaagctggagatcatccccgccagccagttctgccccagagtggagatcatcgccaccatgaagaagaagggcgagaagagatgcctgaaccccgagagcaaggccatcaagaacctgctgaaggccgtgagcaaggagagaagcaagagaagcccctag

SEQ ID NO: 118936 - DNA, 1173 bp, Artificial Sequence
  derived and/or modified sequence
gagacattcctcaattgcttagacatattctgagcctacagcagaggaacctccagtctcagcaccatgaatcaaactgccattctgatttgctgccttatctttctgactctaagtggcattcaaggagtacctctctctagaactgtacgctgtacctgcatcagcattagtaatcaacctgttaatccaaggtctttagaaaaacttgaaattattcctgcaagccaattttgtccacgtgttgagatcattgctacaatgaaaaagaagggtgagaagagatgtctgaatccagaatcgaaggccatcaagaatttactgaaagcagttagcaaggaaaggtctaaaagatctccttaaaaccagaggggagcaaaatcgatgcagtgcttccaaggatggaccacacagaggctgcctctcccatcacttccctacatggagtatatgtcaagccataattgttcttagtttgcagttacactaaaaggtgaccaatgatggtcaccaaatcagctgctactactcctgtaggaaggttaatgttcatcatcctaagctattcagtaataactctaccctggcactataatgtaagctctactgaggtgctatgttcttagtggatgttctgaccctgcttcaaatatttccctcacctttcccatcttccaagggtactaaggaatctttctgctttggggtttatcagaattctcagaatctcaaataactaaaaggtatgcaatcaaatctgctttttaaagaatgctctttacttcatggacttccactgccatcctcccaaggggcccaaattctttcagtggctacctacatacaattccaaacacatacaggaaggtagaaatatctgaaaatgtatgtgtaagtattcttatttaatgaaagactgtacaaagtagaagtcttagatgtatatatttcctatattgttttcagtgtacatggaataacatgtaattaagtactatgtatcaatgagtaacaggaaaattttaaaaatacagatagatatatgctctgcatgttacataagataaatgtgctgaatggttttcaaaataaaaatgaggtactctcctggaaatattaagaaagactatctaaatgttgaaagatcaaaaggttaataaagtaattataact

SEQ ID NO: 118937 - DNA, 297 bp, Artificial Sequence
  derived and/or modified sequence
atgaatcaaacagccattctaatctgttgcctgatctttctgactctatcgggcatccagggcgtgcctctgtcaagaaccgtgagatgtacctgcatctctatttccaaccagcccgtcaacccacggagtctggagaaactggagattatcccggcctctcagttctgtccacgggttgagatcattgccactatgaaaaaaaagggggaaaaaagatgtctgaatcctgaatctaaagccataaagaacctgctaaaagccgtgagcaaggagaggtcaaaacgttctccatag

SEQ ID NO: 118938 - DNA, 297 bp, Artificial Sequence
  derived and/or modified sequence
atgaaccagacagccatcctgatctgctgcctgatcttcctgaccctgagcggcatccagggcgtgcccctgagcaggacagtgcgctgcacctgcatcagcatcagcaaccagcctgtgaaccccaggagcctggagaagctggagatcatcccagccagccagttctgcccccgggtggagatcatcgccaccatgaagaagaagggggagaagcgctgcctgaaccctgagagcaaggccatcaagaacctgctgaaggctgtgtccaaggagaggagcaagaggagcccctag

SEQ ID NO: 118939 - DNA, 297 bp, Artificial Sequence
  derived and/or modified sequence
atgaaccagaccgccatcctgatctgctgcctgatcttcctgaccctgtctggaattcaaggagtcccactcagcaggaccgttcgatgtacatgtatctcaataagtaaccagccagtgaaccccagatccctggagaagcttgagatcattcccgcatcccaattttgccctcgcgtggaaatcattgccacgatgaaaaagaaaggcgagaaaagatgcctgaacccagaatcaaaggccatcaaaaacctgctcaaggccgtctccaaggagagatccaagcggtcaccctag

SEQ ID NO: 118940 - DNA, 297 bp, Artificial Sequence
  derived and/or modified sequence
atgaatcagaccgcaatcctgatctgctgcctcatcttcctgactttaagcggcattcagggagttccactgtctcgcaccgtgcgctgtacatgcatcagcatctccaatcagccagtcaaccctagaagtcttgagaaattagaaatcatccccgcttcccaattctgccccagggtcgaaatcattgcaactatgaagaaaaagggcgagaagagatgcctcaaccccgagtctaaggctatcaaaaaccttttaaaggcggtaagcaaggagcggagtaagcggtccccctag

SEQ ID NO: 118941 - protein, 954 aa, Artificial Sequence
  derived and/or modified sequence
MTAREHSPRHGARARAMQRASTIDVAADMLGLSLAGNIQDPDEPILEFSLACSELHTPSLDRKPNSFVAVSVTTPPQAFWTKHAQTEIIEGTNNPIFLSSIAFFQDSLINQMTQVKLSVYDVKDRSQGTMYLLGSGTFIVKDLLQDRHHRLHLTLRSAESDRVGNITVIGWQMEEKSDQRPPVTRSVDTVNGRMVLPVDESLTEALGIRSKYASLRKDTLLKSVFGGAICRMYRFPTTDGNHLRILEQMAESVLSLHVPRQFVKLLLEEDAARVCELEELGELSPCWESLRRQIVTQYQTIILTYQENLTDLHQYRGPSFKASSLKADKKLEFVPTNLHIQRMRVQDDGGSDQNYDIVTIGAPAAHCQGFKSGGLRKKLHKFEETKKHFEECCTSSGCQSIIYIPQDVVRAKEIIAQINTLKTQVSYYAERLSRAAKDRSATGLERTLAILADKTRQLVTVCDCKLLANSIHGLNAARPDYIASKASPTSTEEEQVMLRNDQDTLMARWTGRNSRSSLQVDWHEEEWEKVWLNVDKSLECIIQRVDKLLQKERLHGEGCEDVFPCAGSCTSKKDCSPPPEESSPGEWSEALYPLLTTLTDCVAMMSDKAKKAMVFLLMQDSAPTIATYLSLQYRRDVVFCQTLTALICGFIIKLRNCLHDDGFLRQLYTIGLLAQFESLLSTYGEELAMLEDMSLGIMDLRNVTFKVTQATSSASADMLPVITGNRDGFNVRVPLPGPLFDALPREIQSGMLLRVQPVLFNVGINEQQTLAERFGDTSLQEVINVESLVRLNSYFEQFKEVLPEDCLPRSRSQTCLPELLRFLGQNVHARKNKNVDILWQAAEICRRLNGVRFTSCKSAKDRTAMSVTLEQCLILQHEHGMAPQVFTQALECMRSIGTREVVTQKNLSGLVPIRDLRLDPSLLCSIPLLALSPNLLIVWLFLSIAYLVTKLRCK

SEQ ID NO: 118942 - DNA, 2865 bp, Artificial Sequence
  derived and/or modified sequence
atgacagctagggagcactcccctcgccatggagcgagagcccgagccatgcagagagcctctaccatcgacgtggccgcagatatgctggggctctctctcgcgggaaatattcaagatcccgacgaacctatactggagttcagcctggcttgtagtgagctgcatacgcctagtctggatcgtaagcctaacagtttcgttgcagtgtcggtgacaaccccacctcaggccttttggaccaaacatgcgcaaacggaaattattgagggcaccaataatcccattttcttgtcttccatagcctttttccaggactctctaatcaaccagatgacgcaagtgaagctctcagtctatgacgtgaaggaccgatctcagggcaccatgtatcttctaggctctggcactttcattgtgaaggacctcttgcaggaccgccatcatagattacacctaaccctgaggtcagctgaatctgacagagtgggcaatataactgtcatcgggtggcagatggaagagaaatcagaccaacggccccccgtgactcggtccgtagatactgtcaacggacgcatggttctgccagtggacgaaagtttgactgaggctctcggcattaggtccaaatacgcctcccttcgaaaagataccctgctgaagtccgtgttcggaggtgcaatttgtcgcatgtataggttcccgacaaccgacggcaaccatttaaggattctggagcagatggccgagtcagtactgtcccttcacgtgcctaggcaattcgtgaaactgctgcttgaggaagatgcagcacgagtgtgcgagctggaagagctgggggagctttccccctgttgggaatccctgagaagacaaattgtgacacagtaccagacgatcattttaacatatcaggaaaacctgactgacttacatcagtaccgagggccctccttcaaagcttcctccctaaaggctgacaagaagcttgagtttgtccccacaaacctccacattcagcggatgcgcgtgcaggacgacggtggaagtgaccagaactacgatatcgtcacaatcggggcaccagctgctcattgtcaaggctttaagagcggcggactgaggaaaaagttgcataagtttgaggagacaaaaaagcatttcgaagaatgctgcacttcctctggctgtcagagcatcatctacatcccacaagatgtggtgagagcaaaggagatcatagcccagataaacaccctgaagacacaggtgtcctactatgctgagaggctgtctcgtgcagccaaggatcgatcggccactgggctggaaagaaccttggctatccttgccgacaaaacccgacaattggttaccgtttgtgattgcaagctattagccaactccattcacgggttaaacgccgcacggcctgattacatagccagcaaggcctcgcccacaagcaccgaagaagagcaggtgatgttgcgtaacgatcaggacacactcatggcaagatggactgggcgcaatagcaggtctagcctgcaggtggactggcatgaggaggagtgggaaaaagtgtggctgaatgtcgacaagtctcttgagtgtatcatccaacgcgtggataagctcctgcagaaagagaggctgcacggagagggttgtgaagatgtgtttccgtgcgccggtagttgcaccagtaaaaaagattgcagcccacctcctgaagagtcaagccccggcgagtggtccgaggctctgtacccactcctgactaccttaacggactgtgtcgctatgatgagtgacaaagcaaaaaaagccatggtgttcctactcatgcaggatagcgctcccacaattgctacttatctaagccttcagtaccgccgagacgtggttttctgccagacattgaccgctttgatatgcgggtttatcatcaaactcagaaactgccttcacgacgatggtttcttgagacagctgtatacgatcggacttttggcccagttcgagtccctactatcaacttatggcgaggagctggctatgctggaggatatgtccctgggcattatggacctgcgaaacgtgactttcaaggtgactcaggctacttccagtgcttctgccgacatgttgcccgtgattacaggtaaccgggacgggttcaatgttcgcgtgcccctaccaggccctctcttcgacgccttgccaagggaaattcagagcggtatgctgctgcgggtgcagccagtgctgttcaatgttgggatcaacgagcagcagacactggcggagagattcggggacacttccctccaggaagtaatcaatgtcgaaagcctagtgagactgaactcctatttcgaacagttcaaagaggtgttaccggaagactgtcttcctcgttcacggagtcagacctgccttcctgagctcttgcgctttctagggcagaacgttcatgcacggaagaacaagaatgtagatatcctctggcaggccgcagagatttgtcgcagacttaatggtgtcaggtttacatcgtgtaagtccgccaaggaccgcactgcgatgtcggtcaccctcgagcagtgcctgattttgcagcatgagcacggtatggctccccaggtgtttacacaggccctggagtgtatgcgctccattggtacccgagaggtggttactcaaaagaacctgagcggactggttcctatcagggacctccggcttgacccaagcctgctgtgcagcattcccctcctagccctgtcaccaaacctgctgatcgtctggttgtttttgagcattgcctacctggtcacaaaacttaggtgcaagtag

SEQ ID NO: 118943 - DNA, 3231 bp, Artificial Sequence
  derived and/or modified sequence
gaggaccagcacctgaggccgggcccgcagcccgcgacttcacagccaggcggcggcgctgctgctgctgcggggctctggcgcgcagcccggcgggacagcggggcggctggcgccgggggccggggagcgccagatgatggatttggacatgcttctatgaagaaatgccacatggtccgagagcaaacatgtccaggctactgccactttagtggactagggctcggtgccagcacttcccgggtaatcaggcgtggtctgaccgaggatcaagaagcacatcatcaccaatgacatcatgacagcaagagagcacagccctcgccatggtgccagggcccgtgcaatgcagcgggcttccaccatcgacgtggcggccgacatgctgggcctctctctggcaggaaatatacaagacccagatgagcccattttagaatttagcttagcttgcagtgagctgcatactccatcgctagatcgaaagccaaatagttttgttgcggtgagtgtcaccacccctcctcaggcattctggacgaagcatgcacagacggagatcattgagggaaccaacaatcctatatttctaagcagtattgccttctttcaagactctcttatcaatcagatgacacaagtcaaactctccgtgtatgatgtcaaagatagatctcagggaacaatgtatttactgggctctggaacgttcattgtcaaagatctgctccaggacaggcatcataggttgcatttaacactaaggtctgcagagagtgaccgtgtaggtaacatcaccgtgattggctggcagatggaggagaagtcagaccaacggccccctgtgacccggtctgtggacactgtcaatgggaggatggttcttcctgtcgatgagagcttgacggaggcgttaggaatccgatccaaatacgcttcattgcgaaaggacactttgctgaaatcggtgttcggtggtgccatctgccgcatgtaccggtttccaaccactgatggtaaccatttgcggatcctggagcagatggcagagagcgtgctctccctgcacgtgccccggcagttcgtgaagctcctactagaggaagatgcagccagagtgtgtgagctggaggagctgggagagctgtccccttgctgggagagcctccggcgccaaattgtcacccagtaccagaccatcatcctcacataccaggagaacctgaccgacctccatcagtacagagggccctcgtttaaagcaagcagtttgaaagcagataaaaagttagaatttgttcccacaaacttgcacatacaaaggatgagagttcaagacgatggaggatcagatcagaactacgacatcgtcaccattggggcgccagcagcacactgccaaggttttaagtcaggaggtctccgcaaaaagctgcacaaatttgaagagaccaagaaacattttgaggagtgttgtacatcatctggctgccagtccataatctacataccccaggatgttgtcagagccaaggagatcatcgcccagatcaacaccctgaaaacccaagtgagttactacgcagagcggctgtcaagggcagccaaggacaggtctgccactggccttgagaggacactcgccatcttggcagacaagacacggcagctggtcacggtctgcgactgcaagctcctggccaactccatccatgggctgaacgctgcacggcctgactacattgcctccaaggcctctcccacttcgactgaggaggagcaggtgatgcttagaaatgaccaggacaccctcatggcccggtggacagggagaaacagccgatcttccctgcaggtggactggcacgaggaggagtgggagaaagtgtggctgaacgtggacaagagcctagagtgcatcattcagcgtgtggacaagctgctgcagaaggagcggctgcatggcgagggctgtgaggatgtcttcccctgtgcaggcagctgcaccagcaagaaagattgcagtccccctcctgaagagtccagcccaggtgaatggagtgaggccctttacccgctgctgaccactctcaccgactgcgtggccatgatgagtgacaaggccaagaaggccatggtattcctgctcatgcaggacagcgcgcccaccatagccacctacctgagcctgcagtaccgccgtgacgtggtcttctgccagacgctgaccgccctcatctgcggcttcatcattaagctgaggaactgcctgcatgacgacggcttcctgcgccagctctacaccatcgggctgctggcccagttcgagagcctgctgagcacctacggggaggagctggcaatgctggaggacatgagccttgggatcatggacttgaggaacgtgaccttcaaagtcactcaggccacttccagcgcctccgcagacatgctgcccgtcatcacaggaaatcgcgacgggtttaacgtgcgggtccctctgccgggcccgctgtttgacgccttgccccgggagatccagagtggcatgctgctgcgagtgcagcccgtcctcttcaacgtgggcatcaatgagcagcagacactggccgagaggtttggcgatacgtctttacaagaagtcatcaacgtggagagtttggtgcggttaaattcctactttgagcagtttaaggaagttttgcctgaggattgcctgcctcggtctcgcagtcagacgtgcctgccagagctgctgcggtttctgggtcagaacgtgcatgcccggaagaataagaacgtcgacattctctggcaagctgctgagatctgccgccgccttaatggggtccggttcaccagctgcaagagcgctaaggaccgtacagccatgtcggtgacactggagcagtgcctgatcctgcaacacgagcatggcatggccccgcaggtcttcacccaggccctggagtgcatgcgcagcattggaacacgggaggtagtcacccagaagaacttgagcggcctggtgcccatccgagacttaaggctagaccccagcctcctctgttccatccctttattagctctgagccccaatttactgattgtgtggctctttctgagcatagcatacctggtgaccaaattgcgttgcaaatgaatatcattatgaaaaattaataagtcacaagaaaaacaaaagtgccagaacatgtccagccaccg

SEQ ID NO: 118944 - DNA, 2865 bp, Artificial Sequence
  derived and/or modified sequence
atgacagcccgggagcacagccccaggcatggagcccgggcccgggccatgcagagggccagcaccattgatgtggccgctgacatgctgggcctgagcctggccggcaacatccaggaccctgatgagcccatcctggagttcagcctggcctgcagcgagctgcacacccccagcctggacaggaagcccaacagctttgtggccgtgtctgtgaccaccccaccccaggccttctggaccaagcacgcccagacagagatcatcgagggcaccaacaaccccatcttcctgagcagcatcgccttcttccaggacagcctcatcaaccagatgacccaggtgaagctgtctgtgtatgatgtgaaggacaggagccagggcaccatgtacctgctgggcagcggcaccttcatcgtgaaggacctgctgcaggacagacaccaccggctgcacctgaccctgcggtctgctgagagtgacagagtgggcaacatcaccgtgattggctggcagatggaggagaagagtgaccagaggcctcctgtgaccaggtctgtggacacagtgaatggaaggatggtgctgcctgtggatgagagcctgacagaggccctgggcatccgcagcaaatatgccagcctgaggaaggacaccctgctgaagtctgtgtttggaggagccatctgcaggatgtaccgcttccccaccacagatggcaaccacctgcgcatcctggagcagatggccgagagcgtgctgagcctgcacgtgccccggcagtttgtgaagctgctgctggaggaggatgctgcccgggtgtgtgagctggaggagctgggggagctgagcccctgctgggagagcctgcggcggcagatcgtgacccagtaccagaccatcatcctgacctaccaggagaacctgacagacctgcaccagtaccggggccccagcttcaaggccagcagcctgaaggctgacaagaagctggagtttgtgcccaccaacctgcacatccagaggatgagggtgcaggatgatggcggcagtgaccagaactatgacatcgtgaccatcggggccccagctgcccactgccagggcttcaagagcggcggcctgaggaagaagctgcacaagtttgaggagaccaagaagcactttgaggagtgctgcaccagcagcggctgccagagcatcatctacatcccccaggatgtggtgcgggccaaggagatcatcgcccagatcaacaccctgaagacccaggtgtcctactatgcagagcggctgagcagagctgccaaggacagaagtgccaccggcctggagaggaccctggccatcctggccgacaagacccggcagctggtgacagtgtgtgactgcaagctgctggccaacagcatccacggcctgaatgctgcccggccagactacatcgccagcaaggccagccccaccagcacagaggaggagcaggtgatgctgagaaatgaccaggacaccctgatggcccgctggacaggcaggaacagccgcagcagcctgcaggtggactggcatgaggaggagtgggagaaggtgtggctgaatgtggacaagagcctggagtgcatcatccagagggtggacaagctgctgcagaaggagcggctgcatggagagggctgtgaagatgtgttcccctgtgccggcagctgcaccagcaagaaggactgcagccccccacctgaggagagcagccctggagagtggagcgaggccctgtaccccctgctgaccaccctgacagactgtgtggccatgatgtctgacaaggccaagaaggccatggtgttcctgctgatgcaggacagcgcccccaccatcgccacctacctgagcctgcagtacagaagagatgtggtgttctgccagaccctgacagccctgatctgtggcttcatcatcaagctgaggaactgcctgcatgatgatggcttcctgcggcagctgtacaccatcggcctgctggcccagtttgagagcctgctgagcacctatggagaggagctggccatgctggaggacatgagcctgggcatcatggacctgagaaatgtgaccttcaaggtgacccaggccaccagcagcgccagcgctgacatgctgcccgtcatcactggaaacagagatggcttcaacgtgcgggtgcccctgcccggccccctgtttgatgccctgccccgggagatccagagcggcatgctgctgcgggtgcagcctgtgctcttcaacgtgggcatcaatgagcagcagaccctggccgagagatttggagacaccagcctgcaggaggtgatcaacgtggagagcctggtgcggctgaacagctactttgagcagttcaaggaggtgctgcctgaggactgcctgcccaggagccgcagccagacctgcctgcctgagctgctgcgcttcctgggccagaatgtgcacgccaggaagaacaagaatgtggacatcctgtggcaggccgctgagatctgccggcggctgaatggagtgcgcttcaccagctgcaagagcgccaaggacagaacagccatgtctgtgaccctggagcagtgcctgatcctgcagcatgaacatggcatggccccccaggtgttcacccaggccctggagtgcatgaggagcatcggcacccgggaggtggtgacccagaagaacctgagcggcctggtgcccatccgggacctgcggctggaccccagcctgctgtgcagcatccccctgctggccctgagccccaacctgctgattgtgtggctgttcctgagcatcgcctacctggtgaccaagctgcgctgcaagtag

SEQ ID NO: 118945 - DNA, 2865 bp, Artificial Sequence
  derived and/or modified sequence
atgaccgcccgggagcacagcccccggcacggcgcccgggcccgggctatgcagcgtgccagcacaattgacgtcgccgccgacatgctcgggttgagcctggccgggaacatccaagacccagacgaaccaatcctagaatttagccttgcctgttccgagctccacactccctcccttgatcgaaaacccaactcttttgttgcagtatcagttacgactccgccccaggctttttggacgaagcacgcacagactgaaattattgagggcacaaacaaccctatcttcctaagctctattgccttcttccaagattcgctcattaatcaaatgacacaggtcaaacttagcgtgtatgacgtgaaagacaggtcccaaggcacaatgtacctgctcggtagtggcacattcatcgtgaaggatttgctgcaagacagacatcatcggctacacctgacattgagaagcgccgagtcggacagggtggggaatatcaccgtgatcggctggcagatggaagaaaaatccgaccagcgcccaccagtcaccaggtctgtggacactgttaacggcagaatggtactgcctgtggatgaaagtctgactgaagcactgggcatccggtctaagtatgctagcctgcgcaaagataccctccttaagtcagtctttggtggcgcaatatgccgcatgtaccgcttccctaccaccgacggaaatcatttaagaattctcgaacagatggctgaatccgttctgtcactgcatgttcctcgacagtttgtgaagttgctgctggaggaggacgctgctagggtatgcgagctggaggaattaggggagctgtccccatgttgggaatccttacgtagacaaatagtaactcagtatcaaactataatcctgacataccaggaaaacctgacggatctccaccagtacaggggacctagctttaaggcctcgtccctgaaggccgataaaaaacttgagttcgtaccgactaacctacacatccagaggatgcgcgtgcaagatgacggggggtctgatcagaactatgatatcgtgaccataggcgcccctgcagcccactgtcagggtttcaagagcggaggactcaggaagaagctgcacaaatttgaggaaacaaaaaagcactttgaagagtgctgcacatcctccgggtgccagagtatcatatacataccccaggatgtggtgcgagccaaagagatcattgcccagatcaacacacttaagactcaggtgagctattacgcagagcgcctgtcacgagccgctaaagaccgatccgcaactggtctggagaggacgctggctatcttggctgacaagacgcgccagctcgtgaccgtgtgtgactgtaaattgctggctaacagtatccatggcttaaacgctgcaagacccgactatattgcttccaaagcttcaccgacaagcactgaggaggaacaggtcatgctaagaaacgatcaggacacactaatggccaggtggactggcaggaacagccgctcatcactccaagtcgattggcacgaagaggagtgggagaaggtctggctgaatgtggataagagtcttgaatgtattatccagagagtggataagcttctgcagaaggagcgcctccacggagaaggttgcgaggacgtgttcccatgcgcgggaagctgcacatctaagaaagactgcagtcctccacccgaggagtcctctcccggagagtggtccgaggcactgtatcctctgctgacaactctgaccgattgtgtagccatgatgagcgacaaagctaagaaagctatggtattcctgctcatgcaggactcggctcccaccatcgctacctacttatcccttcagtatcgacgggacgtcgtattttgccaaaccctgacagctctcatatgtggctttatcataaagctgcgcaactgcttacatgacgacgggtttctcagacagctctacaccatcggtctgctggcacaatttgagtctctcctctctacctatggcgaggaactcgcgatgctcgaagacatgtccctaggcattatggacctacgtaatgtgacctttaaggtgactcaggccactagctctgccagcgcggacatgctccccgtgataacaggaaatagagacggatttaacgtgcgagtaccccttcccggtccactctttgacgctttacctcgagagatacagtccggtatgttactccgggtgcagcctgtcctgtttaatgttgggattaacgagcagcaaaccctggccgaaaggtttggcgacacaagtcttcaggaagttattaacgttgagagtctcgtgcgcctcaatagctacttcgagcaatttaaagaggtgctccccgaggattgtttgccacgctccaggtcacagacctgcttgcccgagctgttgagattcttgggccaaaacgtccacgcgcggaaaaacaagaatgtggacattctgtggcaggcagccgagatttgccgccgtctcaatggggttaggttcacaagttgtaagtcagcaaaggaccgcactgcgatgtctgtgaccctcgaacaatgtcttattttgcagcatgagcacgggatggccccccaggtttttactcaggctttggagtgcatgcgatcaatcggtaccagggaggtggttacgcagaagaatttgtcaggactggtgcctattcgtgacctgcgactggatcctagcctgctctgtagcatccctctcctagccctcagccctaacttgctgatcgtctggctcttcctgtccatagcttacttggtcactaaactgcgctgtaagtag

SEQ ID NO: 118946 - DNA, 2865 bp, Artificial Sequence
  derived and/or modified sequence
atgacagcgagggagcacagcccaagacatggggcaagagctcgcgcaatgcagcgcgcaagcacaattgatgtcgctgccgatatgcttggcctcagtctggccggtaacatccaagatcccgatgagcccattctggagttttccttggcctgctctgaacttcataccccctctttagacagaaagcccaactccttcgtcgcggtgtctgtaaccactcccccacaggccttctggacaaaacacgcccagacagagattattgaaggcaccaacaaccccatttttctgtcttccatcgcctttttccaggatagcttgataaaccagatgacccaggtgaaattaagtgtgtacgacgtgaaggaccggtctcagggcaccatgtacctgttgggcagtggaacctttatcgttaaagacttgctgcaggaccggcatcacaggctgcacttgacgctgcggtcagcggagtctgacagagtgggtaatatcacagtgatcggatggcagatggaagaaaagtccgaccagcgccctccagtcacccggagcgttgacaccgtgaatgggcgaatggtgttgcctgtcgatgagagtctcaccgaggctctaggcatcagaagcaaatatgcaagtcttaggaaagatactctgctaaagtccgtgtttgggggagcgatctgtaggatgtaccggttcccaaccactgatgggaaccatttaaggattctcgagcaaatggccgaaagcgtgttaagtctgcatgtcccccgacagttcgtgaaactgcttctggaagaggatgctgcaagggtgtgcgaattagaagaattgggggagttgagcccgtgctgggagagtctacgtaggcagatcgtcacacagtaccagacaataatcctcacctatcaagaaaacttaaccgatcttcaccaatacagagggccaagttttaaggccagcagcctaaaggccgacaaaaaattggagttcgtgcccaccaatcttcacatccagcggatgcgcgtacaggacgatggagggtctgaccagaattacgatattgttacaatcggggctcccgcagctcactgccaagggttcaagagcgggggtctgcgaaagaaactgcacaaattcgaggaaaccaagaaacacttcgaggagtgttgtaccagcagcggctgtcagagcatcatctatatccctcaggatgtcgtgcgcgctaaagagatcatcgcacagatcaatactctgaagactcaagtaagctactacgctgagcgcttgtctagggcggcaaaggatagatctgccacggggctagaacgtaccctggccatcctggccgataagaccaggcaattagttaccgtgtgcgattgtaagttgctggccaatagtattcacggcttaaatgctgcaagacctgactacattgccagtaaggcctcccctacatccacagaggaggaacaggtcatgctgcggaatgaccaggataccttaatggccagatggactgggaggaattcccgttctagtcttcaagttgattggcatgaggaagagtgggaaaaggtgtggctcaacgttgacaagtccctagaatgcattatccagcgggtcgataaacttctgcagaaagagaggctccacggggaaggatgtgaagatgtgtttccatgcgccggaagctgtaccagcaagaaggactgtagcccacccccagaggagtcaagtcctggtgaatggtcggaggctctgtatccattactgacaaccctgaccgactgcgtcgcaatgatgagtgacaaagctaagaaggccatggtgttccttctgatgcaagactccgcgccaacgattgccacctatctgagcctccagtacagaagggatgtcgtcttttgccagactttgactgcactgatttgtggtttcatcataaaattgcgaaattgtttgcatgatgatggcttcctgagacagctgtacaccattggcctgttggcgcagtttgaatccctcctgagcacgtatggagaagaactcgcaatgctcgaggatatgtcactaggcatcatggacctgaggaacgtgacattcaaagtgactcaagctacctcatccgcttctgctgatatgttgccagtgattacgggtaacagggatggtttcaatgtacgagtacctcttcctggtcccttgtttgacgctcttcccagagagattcagtctggaatgctcctcagagttcagcccgtgctgttcaatgtgggcatcaatgagcagcagaccctggctgagcggtttggtgatacctcactgcaagaggtcatcaatgtcgaaagcttagtgcggctgaacagctattttgagcagttcaaggaagtgctcccagaggactgtttgcctaggtctagaagccaaacatgcctgcctgaactgctgcgcttcctaggacaaaacgtgcacgcaagaaaaaacaaaaacgtagacatcctgtggcaggccgcagaaatctgccggaggctgaatggagttcggttcacctcctgcaaatctgcaaaggacaggacagcaatgtctgtcactctcgaacagtgcctgattctgcaacacgagcacggtatggccccacaggtgttcactcaagcactggagtgcatgcggtccatcggaaccagagaagtggtcacccaaaagaatctgtctggcttggtcccaattcgagacttgagactcgacccatccctgctgtgctcgatccctctgctggctctgtccccgaacctcttaatagtatggctctttctgagtatcgcctatttggtcaccaagctgagatgcaagtag

SEQ ID NO: 118947 - DNA, 2865 bp, Artificial Sequence
  derived and/or modified sequence
atgaccgccagagagcacagccccagacacggcgccagagccagagccatgcagagagccagcaccatcgacgtggccgccgacatgctgggcctgagcctggccggcaacatccaggaccccgacgagcccatcctggagttcagcctggcctgcagcgagctgcacacccccagcctggacagaaagcccaacagcttcgtggccgtgagcgtgaccacccccccccaggccttctggaccaagcacgcccagaccgagatcatcgagggcaccaacaaccccatcttcctgagcagcatcgccttcttccaggacagcctgatcaaccagatgacccaggtgaagctgagcgtgtacgacgtgaaggacagaagccagggcaccatgtacctgctgggcagcggcaccttcatcgtgaaggacctgctgcaggacagacaccacagactgcacctgaccctgagaagcgccgagagcgacagagtgggcaacatcaccgtgatcggctggcagatggaggagaagagcgaccagagaccccccgtgaccagaagcgtggacaccgtgaacggcagaatggtgctgcccgtggacgagagcctgaccgaggccctgggcatcagaagcaagtacgccagcctgagaaaggacaccctgctgaagagcgtgttcggcggcgccatctgcagaatgtacagattccccaccaccgacggcaaccacctgagaatcctggagcagatggccgagagcgtgctgagcctgcacgtgcccagacagttcgtgaagctgctgctggaggaggacgccgccagagtgtgcgagctggaggagctgggcgagctgagcccctgctgggagagcctgagaagacagatcgtgacccagtaccagaccatcatcctgacctaccaggagaacctgaccgacctgcaccagtacagaggccccagcttcaaggccagcagcctgaaggccgacaagaagctggagttcgtgcccaccaacctgcacatccagagaatgagagtgcaggacgacggcggcagcgaccagaactacgacatcgtgaccatcggcgcccccgccgcccactgccagggcttcaagagcggcggcctgagaaagaagctgcacaagttcgaggagaccaagaagcacttcgaggagtgctgcaccagcagcggctgccagagcatcatctacatcccccaggacgtggtgagagccaaggagatcatcgcccagatcaacaccctgaagacccaggtgagctactacgccgagagactgagcagagccgccaaggacagaagcgccaccggcctggagagaaccctggccatcctggccgacaagaccagacagctggtgaccgtgtgcgactgcaagctgctggccaacagcatccacggcctgaacgccgccagacccgactacatcgccagcaaggccagccccaccagcaccgaggaggagcaggtgatgctgagaaacgaccaggacaccctgatggccagatggaccggcagaaacagcagaagcagcctgcaggtggactggcacgaggaggagtgggagaaggtgtggctgaacgtggacaagagcctggagtgcatcatccagagagtggacaagctgctgcagaaggagagactgcacggcgagggctgcgaggacgtgttcccctgcgccggcagctgcaccagcaagaaggactgcagccccccccccgaggagagcagccccggcgagtggagcgaggccctgtaccccctgctgaccaccctgaccgactgcgtggccatgatgagcgacaaggccaagaaggccatggtgttcctgctgatgcaggacagcgcccccaccatcgccacctacctgagcctgcagtacagaagagacgtggtgttctgccagaccctgaccgccctgatctgcggcttcatcatcaagctgagaaactgcctgcacgacgacggcttcctgagacagctgtacaccatcggcctgctggcccagttcgagagcctgctgagcacctacggcgaggagctggccatgctggaggacatgagcctgggcatcatggacctgagaaacgtgaccttcaaggtgacccaggccaccagcagcgccagcgccgacatgctgcccgtgatcaccggcaacagagacggcttcaacgtgagagtgcccctgcccggccccctgttcgacgccctgcccagagagatccagagcggcatgctgctgagagtgcagcccgtgctgttcaacgtgggcatcaacgagcagcagaccctggccgagagattcggcgacaccagcctgcaggaggtgatcaacgtggagagcctggtgagactgaacagctacttcgagcagttcaaggaggtgctgcccgaggactgcctgcccagaagcagaagccagacctgcctgcccgagctgctgagattcctgggccagaacgtgcacgccagaaagaacaagaacgtggacatcctgtggcaggccgccgagatctgcagaagactgaacggcgtgagattcaccagctgcaagagcgccaaggacagaaccgccatgagcgtgaccctggagcagtgcctgatcctgcagcacgagcacggcatggccccccaggtgttcacccaggccctggagtgcatgagaagcatcggcaccagagaggtggtgacccagaagaacctgagcggcctggtgcccatcagagacctgagactggaccccagcctgctgtgcagcatccccctgctggccctgagccccaacctgctgatcgtgtggctgttcctgagcatcgcctacctggtgaccaagctgagatgcaagtag

SEQ ID NO: 118948 - protein, 1258 aa, Artificial Sequence
  derived and/or modified sequence
MASACGAPGPGGALGSQAPSWYHRDLSRAAAEELLARAGRDGSFLVRDSESVAGAFALCVLYQKHVHTYRILPDGEDFLAVQTSQGVPVRRFQTLGELIGLYAQPNQGLVCALLLPVEGEREPDPPDDRDASDGEDEKPPLPPRSGSTSISAPTGPSSPLPAPETPTAPAAESAPNGLSTVSHDYLKGSYGLDLEAVRGGASHLPHLTRTLATSCRRLHSEVDKVLSGLEILSKVFDQQSSPMVTRLLQQQNLPQTGEQELESLVLKLSVLKDFLSGIQKKALKALQDMSSTAPPAPQPSTRKAKTIPVQAFEVKLDVTLGDLTKIGKSQKFTLSVDVEGGRLVLLRRQRDSQEDWTTFTHDRIRQLIKSQRVQNKLGVVFEKEKDRTQRKDFIFVSARKREAFCQLLQLMKNKHSKQDEPDMISVFIGTWNMGSVPPPKNVTSWFTSKGLGKTLDEVTVTIPHDIYVFGTQENSVGDREWLDLLRGGLKELTDLDYRPIAMQSLWNIKVAVLVKPEHENRISHVSTSSVKTGIANTLGNKGAVGVSFMFNGTSFGFVNCHLTSGNEKTARRNQNYLDILRLLSLGDRQLNAFDISLRFTHLFWFGDLNYRLDMDIQEILNYISRKEFEPLLRVDQLNLEREKHKVFLRFSEEEISFPPTYRYERGSRDTYAWHKQKPTGVRTNVPSWCDRILWKSYPETHIICNSYGCTDDIVTSDHSPVFGTFEVGVTSQFISKKGLSKTSDQAYIEFESIEAIVKTASRTKFFIEFYSTCLEEYKKSFENDAQSSDNINFLKVQWSSRQLPTLKPILADIEYLQDQHLLLTVKSMDGYESYGECVVALKSMIGSTAQQFLTFLSHRGEETGNIRGSMKVRVPTERLGTRERLYEWISIDKDEAGAKSKAPSVSRGSQEPRSGSRKPAFTEASCPLSRLFEEPEKPPPTGRPPAPPRAAPREEPLTPRLKPEGAPEPEGVAAPPPKNSFNNPAYYVLEGVPHQLLPPEPPSPARAPVPSATKNKVAITVPAPQLGHHRHPRVGEGSSSDEESGGTLPPPDFPPPPLPDSAIFLPPSLDPLPGPVVRGRGGAEARGPPPPKAHPRPPLPPGPSPASTFLGEVASGDDRSCSVLQMAKTLSEVDYAPAGPARSALLPGPLELQPPRGLPSDYGRPLSFPPPRIRESIQEDLAEEAPCLQGGRASGLGEAGMSAWLRAIGLERYEEGLVHNGWDDLEFLSDITEEDLEEAGVQDPAHKRLLLDTLQLSK

SEQ ID NO: 118949 - protein, 22 aa, Artificial Sequence
  derived and/or modified sequence
MASACGAPGPGGALGSQAPSWY

SEQ ID NO: 118950 - protein, 18 aa, Artificial Sequence
  derived and/or modified sequence
MASACGAPGPGGALGSQA

SEQ ID NO: 118951 - DNA, 3777 bp, Artificial Sequence
  derived and/or modified sequence
atggcatccgcatgcggcgccccaggccccggcggtgcattaggcagccaagccccttcttggtaccaccgtgatctgtcccgagctgcagccgaagagctgctcgcccgagcgggtagggacggctccttcttagtacgagattctgagtcggtggccggggccttcgccctttgtgttctctaccaaaagcatgtacatacttatagaatcctgccagatggggaggattttctggccgtgcagacaagtcagggcgttcctgtccgccgattccagactctgggtgagctcatcggactttatgcccagccaaatcagggtctggtttgcgccctgttgctcccagtggagggggagcgcgagcctgaccctccagacgatcgggacgccagtgatggcgaggatgagaagccacctctgccccctaggagcggctccaccagcatctcagctcctaccggaccctcttctcctctgcctgcgccagaaacaccaactgcacccgccgcagaatcagcacctaatggcctgtccaccgtaagccatgactatctgaaaggcagctacggcctcgacttggaagcagttagagggggcgcttcccacttgccccacctaactagaaccctggctaccagctgtcgtaggctacattcagaagtggacaaggttttgtccgggctcgaaatactgtctaaggtgttcgaccagcaatcgagccccatggtcactagactattacagcagcagaacttgccccagaccggcgaacaggaacttgagagccttgtgttaaaactttctgtcttgaaagattttctgagtggtattcagaagaaggcactaaaggctcttcaagacatgtccagcaccgcccctcccgcccctcagccatctaccagaaaggcaaagacgataccagtccaagcgtttgaagttaagttagatgttaccttaggcgatctcaccaagataggtaagtcgcaaaaatttacactctccgttgatgtcgaagggggacggcttgtgttactgcggcgccagcgagactcccaggaagattggacaacctttacgcacgatcgcattcgccagctcattaaatcccaacgtgtgcaaaataagttaggggtggtctttgagaaggagaaagaccgaactcaacgcaaggattttatttttgtgagcgcacgaaagagagaagccttctgtcagctgctccagctgatgaagaacaaacattccaaacaagatgagcccgatatgattagcgtctttatcggcacttggaacatgggctccgttccgccaccgaaaaacgtcacaagttggtttacaagcaagggactaggaaaaactttagatgaggtgacagttaccatccctcatgatatttatgtcttcgggacccaagagaacagtgtgggggatcgagagtggttggatctgctccgaggcgggctgaaagagctgaccgacctggattacagacccatcgccatgcagagcctgtggaatatcaaagtggccgtgctggtcaagccagaacacgagaatcgcattagtcacgtctcgacatcgtcagtaaagactgggatcgctaatactctgggtaataaaggcgccgttggagtcagtttcatgttcaacgggacctccttcggctttgtcaactgtcatttaaccagcgggaatgagaagacagcccggcggaatcagaactatctcgatatactcagactactatccctcggagataggcagctgaatgctttcgatatctccctccgtttcactcatctgttttggtttggggatcttaactaccgacttgacatggacatacaggagattctgaattatatcagcagaaaggagtttgagcctctgttgcgcgttgaccaactgaacctcgagcgggagaaacataaagtattcctgcggttttccgaggaagaaattagttttccccctacttatcgctacgaacggggatccagggacacatacgcctggcacaaacaaaaacccacaggggtgcgtacaaatgtcccctcctggtgtgaccgcatcctctggaaatcctatccggaaacccatatcatttgtaattcctacgggtgcactgacgacatcgtgacatcagatcactcccctgttttcggaacgttcgaagttggagtaacaagtcagtttatctcaaaaaaagggctgagtaaaacaagcgaccaagcctatattgagtttgagagcatcgaagctattgtcaaaaccgcttccagaaccaagttttttatcgaattctatagcacctgtttagaggagtataagaaaagttttgagaatgacgcccaaagctctgacaacatcaacttcctcaaggtccagtggagcagcaggcagctgcccacgctgaaaccaattctggctgacattgagtaccttcaggaccagcatctgcttctgaccgttaagtctatggatggttacgagtcttatggggagtgtgtggtcgctcttaaaagcatgatcgggagcacagcacagcagtttctcacgtttctgagccataggggagaagaaaccgggaatattagaggctccatgaaagtccgagttcctactgaaagactggggactcgcgagcgattatacgaatggatatctatagacaaggacgaggccggcgccaagtctaaagcaccatcagtgagcagaggttctcaggagcctcggtcaggaagtcgaaagccagcttttacagaagcttcctgtccactgtcccgactttttgaagagcccgaaaagcctccccctactggacggcccccggctccacctagggccgcccccagagaggagcccctgactcccagactcaaacctgaaggtgctccagagcccgaaggcgtagctgcccctccgcccaagaacagcttcaacaatcctgcttattacgtgctggaaggagtgcctcaccagctgctgcccccagaacccccgtcgcccgccagagcccctgtcccctccgctactaagaacaaggtcgccattactgtgccagccccccagctgggccatcatagacatccaagagtgggggaaggctcatcttctgacgaagaatctggcggtacccttcctcccccagacttccctcctcctccgctgcctgattccgccattttcctgcctccgtccctagacccattgccaggccctgtggtcagggggaggggtggcgctgaagctcgaggccccccaccccctaaggctcacccccgcccacctcttccccctggccccagtcccgcatccaccttcctcggcgaagttgcgtccggtgacgacagatcatgtagcgtcctacaaatggccaaaaccctgtccgaggtcgactatgcccccgccggccctgctcggagcgcgctgctccccggacccttagagttgcagcccccgcggggcctgccttcagactatggcagaccactgagcttcccaccacctagaattagagagtccatccaggaggatctggcagaagaagccccttgcctgcaaggggggagggcctcggggttgggagaagcaggcatgtctgcttggctcagggctatcgggctagaaaggtacgaggaaggactagtgcacaatggttgggatgatctcgaatttctgagcgacatcactgaggaggatctagaggaagccggcgttcaagatcctgcacacaagcgactccttctcgatacattgcaattgtcgaaatag

SEQ ID NO: 118952 - DNA, 3051 bp, Artificial Sequence
  derived and/or modified sequence
atggttaccagactgcttcagcagcagaacctccctcagactggggagcaagaattggagtcattggtgcttaaattatctgttcttaaagactttcttagcggcattcagaaaaaggccttgaaggccctgcaggacatgtcatccactgctcctcctgctcctcaaccgtccactagaaaagcgaaaaccatccccgtccaggcattcgaggtcaagctggacgttactctcggagatctgactaaaatcggtaagagtcagaagtttaccctgagtgttgatgtggagggagggcgtctggtgcttcttcgacggcagcgtgattctcaggaggattggaccacgttcacccacgatcgcatccgacagctgattaaaagtcaacgggtgcagaataaactaggagtggtcttcgagaaggagaaggacaggacccagaggaaagacttcatctttgtcagcgcgaggaaaagggaggccttttgtcagctgctacagctgatgaaaaataagcactcaaagcaggacgaacctgacatgatttccgtcttcatcggtacttggaacatgggctctgtgccccccccaaagaacgtgacatcctggttcacatcaaaaggtctgggaaaaaccctcgacgaagtgaccgtaaccatccctcacgacatatatgttttcggtacacaggagaatagcgttggggaccgggaatggctggacctgctcagagggggcctgaaagagctgaccgatctggactatagacctatcgcgatgcagtctctatggaacatcaaggtagctgtgctggttaagcctgaacatgaaaatagaatctcccacgtctctactagctccgtcaaaactggtatcgccaataccctcgggaacaagggggctgtcggagtgtcctttatgttcaatggaacatcgtttggctttgtcaactgccatttaacttctggtaacgaaaagactgcgagaagaaaccagaactatctggacattctgaggctgttgagtctgggtgataggcagcttaatgcttttgatattagtctgaggttcacacatctgttttggttcggcgacttaaactatcggttggatatggatatccaggagatcctcaactatatttcaagaaaggaatttgaacccttactgagagtggatcagctcaacctggaacgcgagaagcataaagtgttccttcggttcagtgaggaagaaatctcattcccaccaacataccgatacgaacgtggctccagagatacttacgcttggcataaacaaaaaccaaccggagtgcgaacaaatgttccttcttggtgcgacaggatcttgtggaaatcttatcctgagacccacatcatttgtaactcctacggctgtaccgatgatatcgttacgagcgatcactccccagttttcgggacattcgaggtgggcgttacctctcagtttattagtaagaagggcctaagtaagacgtccgaccaggcctacatcgagtttgagagcatcgaggcaatcgtaaagaccgccagtcggactaaattcttcattgaattctattccacttgccttgaagaatataaaaagtcattcgagaacgatgcccagtcttcagacaatattaacttcctgaaggtgcagtggtctagtcggcagcttcccactcttaaacctattctcgccgatatcgagtacctgcaggatcagcacctgctgcttacagttaagtccatggacggctacgagtcttatggcgagtgtgtggtggccttgaaatccatgatcgggtcgaccgctcagcagttcttgacctttttaagccatagaggagaggagacaggcaacatcagggggtctatgaaagtgagagtgccaacagaaagactgggaacaagagagaggctttatgagtggatcagcatcgacaaggacgaggcgggagctaagtccaaagctcctagcgtgtctcgcggaagccaagaacccagaagcggtagtcgcaagccagctttcacagaggccagctgtccgctctcaagactgttcgaggagccggaaaagcctcctccaaccggccggcctccagcccccccccgcgcggcgcctagggaagagcctcttactcccaggctgaagcctgaaggcgcacccgaaccagaaggcgttgccgccccgccaccaaaaaactcctttaataatccagcctactacgtgctcgaaggagtcccacatcagttgcttcctcctgaaccaccctctccagctagagccccagtcccgtccgccaccaagaataaggtggcaatcaccgttcccgctccccagctgggccatcaccgccatcctcgcgtcggtgaggggagctcttctgacgaggagagcggaggaaccctgccaccccccgactttccccccccccccctccccgacagtgcaatcttcctacctccctctctggacccactccctgggccagtggtcaggggtagggggggcgcagaagccagaggcccaccaccacccaaggcacaccctaggcctcctttgcctcctggtccatcccccgcctcaacatttttgggagaagttgcctcaggagacgaccgcagttgtagcgtccttcaaatggctaaaacattgagtgaagttgactacgctccggccggacccgcgaggagcgcactgttgccaggccctcttgagctacagcctcctcgagggcttccctctgattatggacggcctctctcattccctccccctaggattcgggaatctatccaagaggacctggcggaggaagccccctgtttgcaaggtggacgggcgtcaggactgggtgaggctggaatgtccgcttggctccgcgccatcgggctcgagagatatgaggagggcctggtgcataatggatgggacgacctcgagttcctgagtgacattaccgaggaagatctggaggaagcaggcgtccaggacccggctcacaagagactgctactggacacgcttcagctgtcgaagtag

SEQ ID NO: 118953 - DNA, 3051 bp, Artificial Sequence
  derived and/or modified sequence
atggttactcggctcctccagcagcagaacctgccacaaacaggcgagcaagagctagagtccctggtcctaaagttgagcgtcttgaaggacttcctgtcaggcattcaaaaaaaggccttaaaggccttgcaggatatgagcagcacggcacctccggccccacaaccgagtacaagaaaggctaagaccattccagtgcaggcatttgaggtgaaattggatgtgactctgggtgaccttaccaagatcggcaaaagccaaaaatttacactctcagttgacgtcgagggcggcaggcttgtgctgctgaggcggcagagggacagccaggaggattggaccacatttacccatgacagaattagacaacttataaagagtcaacgggttcagaacaaactgggcgtggtatttgaaaaggagaaggataggactcagagaaaagatttcatcttcgtctctgcacggaagcgtgaagctttttgtcaactgttgcagctgatgaagaataaacacagtaagcaagacgaacctgatatgatcagcgtgttcatcggcacgtggaatatgggctccgtcccaccccccaagaatgtcacatcttggtttacttctaagggattgggtaagacattggacgaggtcaccgttactatcccacatgatatttacgtgttcggtacacaagaaaactccgtgggagaccgagaatggctagatctgctgcgtggtggacttaaggagttgacggacttggattatagaccgatcgctatgcagtctctgtggaacataaaagtcgctgtcctggtgaagcctgagcatgagaaccgaatctctcatgtcagtactagttcagtcaaaaccggcattgcaaacacattagggaacaaaggagctgttggtgtgagcttcatgtttaacgggaccagcttcggattcgtgaattgccacctgacctcagggaatgaaaagacagccagaaggaatcagaactatctggacatcttgaggttactgagtctgggggatcggcagctcaatgccttcgatattagcctccggttcacacacctgttttggtttggcgacctgaactacaggttggacatggacatccaagagatcctgaattacatctcaagaaaggagttcgagcctctgctgagggtcgatcagttaaacctagaaagggaaaagcacaaggtttttctaagattctccgaggaggaaatctcctttcccccaacatatcgctacgagcgcgggtcgagagacacttatgcttggcacaagcagaaacctactggggtcagaactaacgtgccttcgtggtgcgacaggatcctgtggaaatcttatcctgagactcacattatttgcaatagctacggatgtactgacgatatcgtgacaagtgatcattccccagtattcggcacttttgaagtgggagtgacctctcaatttatctctaagaagggattgagtaagacctcagatcaggcgtatattgagttcgagtcaattgaagctatcgtgaaaactgcaagtagaacaaagttttttatcgaattctacagtacctgcttagaagaatacaaaaaatcctttgaaaacgacgcccagtccagtgacaatatcaactttctgaaggttcagtggtcatcccgtcagcttcctacactgaagcctattctggctgatatcgaatatttacaggatcaacacctgctcctcacggtcaagagtatggacgggtatgagtcatatggagagtgcgttgtcgccttgaagagcatgatcggctctacggcccagcagttcctgacgttcttgagccaccgcggtgaggaaacaggaaatattaggggctcgatgaaagtgagagtacccacagagcggctcgggactcgggagcggttgtacgaatggatttctatagacaaagatgaggccggtgcaaagtcaaaggctccatccgtttcaagaggctcccaggaacccagatcagggtctcgcaaacctgcatttactgaagccagctgtccactttcacgattgtttgaggaaccagagaaacccccccccactggtcgccctcccgcccctccaagagccgcaccaagggaagagcccctgaccccgagattgaaaccagagggcgcacctgaacccgagggcgtagctgccccacctccaaaaaactccttcaacaatccagcctactatgtcctcgagggcgtgccccatcaactcttaccccccgaacctcctagtcccgcacgcgcacctgtgccaagtgccaccaagaacaaggttgccataacagtacccgcaccccaactggggcatcaccgacatccacgagtgggcgagggaagttcatccgacgaagaatcaggggggaccctgccccctcccgactttccgccgcctcctttgcctgacagcgccatcttcctccctccttccctggatccgctaccagggcccgtcgtccgcggcaggggaggggcggaagccaggggcccacccccaccaaaagcccatccaaggccaccccttccacctggccctagtccggcaagcacttttcttggcgaagtagcgtcaggcgatgaccgatcctgttctgtgctgcagatggccaagacactcagtgaggtagactatgcccctgccggaccagcacggtccgccctgctccctggcccattagagttgcagcctcccagagggctcccatccgactacgggcgtcctctgtccttcccacccccgaggatacgtgagtccatacaggaggacctcgccgaagaggccccgtgcctgcaggggggccgggcatccggtctgggggaagcgggaatgtccgcctggcttcgcgctataggcctcgagcgctatgaggagggacttgtccacaacggatgggatgacttagaattcctcagcgacatcaccgaggaagacctggaggaggccggtgtccaggacccagcacacaaacggttactgctggacactctccagctttctaaatag

SEQ ID NO: 118954 - DNA, 4733 bp, Artificial Sequence
  derived and/or modified sequence
tgaggccggcgctgcaggcagcggcggctgcgcggtgaacgaggcggcctgcgcggcggagtgctgagtcccgatccccggctctgtccggcccacggatcctcaagcccgggccccgggcccggccccagcctcagccctgagcgtctcggggcggatggcgcggggcggcgggggcgggcggtgctgagccctgcgcgggccatggcctcggcctgcggggcgccgggcccggggggcgccctgggcagccaggccccctcctggtaccaccgcgacctgagccgggcggccgcggaggagctgctggcccgggcgggccgcgatggcagcttcctggtccgagacagcgagagcgtggcgggggccttcgcgctctgcgtcctgtatcagaagcatgtgcacacgtatcgcattctgcctgatggagaagatttcttggctgtgcagacctcgcagggtgtgcctgtgcgccgcttccagaccctgggtgagctcatcggcctgtacgcccagcccaaccagggccttgtgtgcgccctgcttcttcctgtagagggtgagcgagagccggacccaccggatgaccgggatgcctcagatggggaggatgagaagcccccgctgcccccgcgctctggctccaccagcatttctgcccccactgggcccagcagtcccctgccagctcctgagactcccacagctccagctgctgagagtgctcccaatgggctgagcaccgtctcgcacgactacctgaaaggcagctatgggctggacctggaagctgtgaggggtggagccagccacctgccccacctcacccgtaccctcgctacctcatgccggaggctgcacagtgaggtggacaaggtcctgtcaggcctggagatcctgtccaaggtgtttgaccagcagagctcgcccatggtgacccgccttttgcagcagcagaacctgccacagacaggggagcaggaactagagagcctggtgctgaagctgtcagtgctaaaggacttcctgtcaggcatccagaagaaggccctgaaggccctacaggacatgagctccacagcacccccagctccgcagccatccacacgtaaggccaagaccatccccgtgcaggcctttgaggtgaagctagatgtgaccctgggtgacctgaccaagattgggaagtcacagaagttcacgctgagcgtggatgtggagggtgggcggctggtgctgctgcggagacagcgggactcccaggaggactggaccaccttcacgcacgaccgcatccgccagctcattaagtcccagcgtgtccagaacaagctgggtgttgtgtttgagaaggagaaggaccggactcagcgcaaggacttcatctttgtcagtgcccggaagcgggaggccttctgccagctgttgcagctcatgaagaacaagcactccaagcaggacgagcccgacatgatctcagtcttcataggcacctggaacatgggaagtgtaccacctccaaaaaacgtgacatcctggttcacatcgaagggtctggggaagaccctggacgaggtcacagtgaccataccccatgacatctatgtctttgggacccaggagaactcagtgggcgaccgcgagtggctggacctactgcgcgggggcctcaaggagcttacggatctggattaccgcccgattgccatgcaatcactgtggaatatcaaggtggcagtgctggtcaagccagagcacgagaaccgtatcagccatgtcagtacgtccagtgtgaagactggcatcgccaacaccctggggaacaagggggctgtgggcgtctccttcatgtttaatggcacctcatttggctttgtgaattgtcacctcacctcgggaaatgagaagacggctcggaggaaccaaaactacttggacatcctgcggctgctctcgctgggcgaccggcagctcaatgcctttgacatctctctgcgtttcacacacctcttctggtttggggacctcaactaccgcctggacatggatatccaggagatcctgaactacatcagcaggaaagagtttgagcccctcctcagggtggaccagctcaacctggagcgggagaagcacaaggtcttccttcgattcagtgaggaggagatctccttcccacccacctaccgctatgagcggggttcccgggacacatatgcctggcacaagcagaagccaactggggtccggaccaatgtgccctcatggtgtgaccggattctgtggaaatcctaccctgaaactcacatcatctgcaattcttatggttgcactgatgacatcgtcaccagcgaccattcccccgtgtttgggacatttgaggttggagttacctcccagttcatctccaagaaagggctctcaaagacttcagaccaggcctacattgagtttgagagcatcgaggccattgtgaagacagccagccgcaccaagttcttcatcgagttctactctacctgcctggaggaatacaagaagagctttgagaatgatgcccagagcagtgacaacatcaacttcctcaaagtgcagtggtcttcacgccagctgcccacgctcaaaccaattctggctgatatcgagtacctgcaggaccagcacctcctgctcacagtcaagtccatggatggctatgaatcctatggggagtgtgtggttgcactcaaatccatgatcggcagcacggcccaacagttcctgaccttcctatcccaccgtggcgaggagacaggcaatatcagaggctccatgaaggtgcgggtgcccacggagcgcctgggcacccgtgagcggctctacgagtggatcagcattgataaggatgaggcaggagcaaagagcaaagccccctctgtgtcccgagggagccaggagcccaggtcagggagccgcaagccagccttcacagaggcctcctgcccgctctccaggttatttgaagaaccagagaaaccgccaccaacggggaggcccccagccccaccccgagcagctccccgggaggagcccttgacccccaggttgaagccagagggagctcctgaaccagaaggggtggcggcccccccacccaagaacagcttcaataaccctgcctactacgtccttgaaggggtcccgcaccagctgctgcccccggagccaccctcgcctgccagggcccctgtcccatctgccaccaagaacaaagtggccattacagtgcctgctccacagcttgggcaccaccggcaccctcgtgtgggagaggggagttcttcagatgaggagtctggaggcacactgccccctccagactttccacctccaccactgccggactcagccatcttcctgccccccagcctggatcctttaccagggccagtggtccggggccgtggtggggctgaggcccgtggcccaccacctcccaaggcccatccaaggcctccactgcccccaggcccctcaccagccagcactttcctgggggaagtggccagtggggatgaccggtcctgctcggtgctgcagatggccaagacgctgagcgaggtggactatgcccctgctgggcctgcacgctcagcgctcctcccaggccccctggagctgcagcccccccggggactgccctcggactatggccggcccctcagcttccctccaccccgcatccgggagagcatccaggaagacctggcagaggaggctccgtgcctgcagggcgggcgggccagcgggctgggcgaggcaggcatgagtgcctggctgcgggccatcggcttggagcgctatgaggagggcctggtgcataatggctgggacgacctggagtttctcagtgacatcaccgaggaggacttggaggaggctggggtgcaggacccggctcacaagcgcctccttctggacaccctgcagctcagcaagtgatagcggaggcaccacgaagctgtgaactcagagcccctccctgctaccaaggcccagctatggccccagggttgaaaagttatgagggtcagggcagtatctctctgcctatttattggggtgcctatttattggggatctgcattccccgctgcccaatcatttgcaatgccctaattagggcatcctgcccctcgccttttaggctcaggacggaaggtcagttgccatggttaccgaggaccctggttactctggtgctgtcctgttttactggaccccgcctcccagccccaggggtgcctgtgggggtccatttgggtacgtctgggcccccactttcaccagtttctgcggccttccaccgggcctgaaccacagcggaggagctccgctaagacctccccacccccgctgggggtgggggcgggtgtccgtccggaaatgaaggaatagcccgaggaccgggctggggtttatttaaactgttctgtgtgggtctggggagggagagcaccttaatattattggggttggttggggtggggcaggatctcagccataaagtgccagtttgcttagttctcactgtctcctggtctgtgctgccctgctctggggatgcacggcggcagggtgggggagggaggttcctcgcaggtctcagcccgggacagggtcttgcaagcagcctcctgggcagtcgtaagggttgcggcgtgatgtcttcaataaattaagttttatttgga

SEQ ID NO: 118955 - DNA, 4656 bp, Artificial Sequence
  derived and/or modified sequence
tttagacagctgtggaggccacaaaagagctccctgttgcttctcaggccctgccctgtggtgggtgtggagtctgtgtaggtctggtggggagacgggggtgttctggtcattcctgcccaataggcaacaccaggagggtggaagtggaccggccacatcattaaccctgtgcagcctgggcaggtggttttagggaaaccaagctgagggggttggggtgctgagcttgctggcaggaggaaggggtgctttgggtcttagaccccagcctgggggtgacagattctggccctgccttggcatcaggtatcagaagcatgtgcacacgtatcgcattctgcctgatggagaagatttcttggctgtgcagacctcgcagggtgtgcctgtgcgccgcttccagaccctgggtgagctcatcggcctgtacgcccagcccaaccagggccttgtgtgcgccctgcttcttcctgtagagggtgagcgagagccggacccaccggatgaccgggatgcctcagatggggaggatgagaagcccccgctgcccccgcgctctggctccaccagcatttctgcccccactgggcccagcagtcccctgccagctcctgagactcccacagctccagctgctgagagtgctcccaatgggctgagcaccgtctcgcacgactacctgaaaggcagctatgggctggacctggaagctgtgaggggtggagccagccacctgccccacctcacccgtaccctcgctacctcatgccggaggctgcacagtgaggtggacaaggtcctgtcaggcctggagatcctgtccaaggtgtttgaccagcagagctcgcccatggtgacccgccttttgcagcagcagaacctgccacagacaggggagcaggaactagagagcctggtgctgaagctgtcagtgctaaaggacttcctgtcaggcatccagaagaaggccctgaaggccctacaggacatgagctccacagcacccccagctccgcagccatccacacgtaaggccaagaccatccccgtgcaggcctttgaggtgaagctagatgtgaccctgggtgacctgaccaagattgggaagtcacagaagttcacgctgagcgtggatgtggagggtgggcggctggtgctgctgcggagacagcgggactcccaggaggactggaccaccttcacgcacgaccgcatccgccagctcattaagtcccagcgtgtccagaacaagctgggtgttgtgtttgagaaggagaaggaccggactcagcgcaaggacttcatctttgtcagtgcccggaagcgggaggccttctgccagctgttgcagctcatgaagaacaagcactccaagcaggacgagcccgacatgatctcagtcttcataggcacctggaacatgggaagtgtaccacctccaaaaaacgtgacatcctggttcacatcgaagggtctggggaagaccctggacgaggtcacagtgaccataccccatgacatctatgtctttgggacccaggagaactcagtgggcgaccgcgagtggctggacctactgcgcgggggcctcaaggagcttacggatctggattaccgcccgattgccatgcaatcactgtggaatatcaaggtggcagtgctggtcaagccagagcacgagaaccgtatcagccatgtcagtacgtccagtgtgaagactggcatcgccaacaccctggggaacaagggggctgtgggcgtctccttcatgtttaatggcacctcatttggctttgtgaattgtcacctcacctcgggaaatgagaagacggctcggaggaaccaaaactacttggacatcctgcggctgctctcgctgggcgaccggcagctcaatgcctttgacatctctctgcgtttcacacacctcttctggtttggggacctcaactaccgcctggacatggatatccaggagatcctgaactacatcagcaggaaagagtttgagcccctcctcagggtggaccagctcaacctggagcgggagaagcacaaggtcttccttcgattcagtgaggaggagatctccttcccacccacctaccgctatgagcggggttcccgggacacatatgcctggcacaagcagaagccaactggggtccggaccaatgtgccctcatggtgtgaccggattctgtggaaatcctaccctgaaactcacatcatctgcaattcttatggttgcactgatgacatcgtcaccagcgaccattcccccgtgtttgggacatttgaggttggagttacctcccagttcatctccaagaaagggctctcaaagacttcagaccaggcctacattgagtttgagagcatcgaggccattgtgaagacagccagccgcaccaagttcttcatcgagttctactctacctgcctggaggaatacaagaagagctttgagaatgatgcccagagcagtgacaacatcaacttcctcaaagtgcagtggtcttcacgccagctgcccacgctcaaaccaattctggctgatatcgagtacctgcaggaccagcacctcctgctcacagtcaagtccatggatggctatgaatcctatggggagtgtgtggttgcactcaaatccatgatcggcagcacggcccaacagttcctgaccttcctatcccaccgtggcgaggagacaggcaatatcagaggctccatgaaggtgcgggtgcccacggagcgcctgggcacccgtgagcggctctacgagtggatcagcattgataaggatgaggcaggagcaaagagcaaagccccctctgtgtcccgagggagccaggagcccaggtcagggagccgcaagccagccttcacagaggcctcctgcccgctctccaggttatttgaagaaccagagaaaccgccaccaacggggaggcccccagccccaccccgagcagctccccgggaggagcccttgacccccaggttgaagccagagggagctcctgaaccagaaggggtggcggcccccccacccaagaacagcttcaataaccctgcctactacgtccttgaaggggtcccgcaccagctgctgcccccggagccaccctcgcctgccagggcccctgtcccatctgccaccaagaacaaagtggccattacagtgcctgctccacagcttgggcaccaccggcaccctcgtgtgggagaggggagttcttcagatgaggagtctggaggcacactgccccctccagactttccacctccaccactgccggactcagccatcttcctgccccccagcctggatcctttaccagggccagtggtccggggccgtggtggggctgaggcccgtggcccaccacctcccaaggcccatccaaggcctccactgcccccaggcccctcaccagccagcactttcctgggggaagtggccagtggggatgaccggtcctgctcggtgctgcagatggccaagacgctgagcgaggtggactatgcccctgctgggcctgcacgctcagcgctcctcccaggccccctggagctgcagcccccccggggactgccctcggactatggccggcccctcagcttccctccaccccgcatccgggagagcatccaggaagacctggcagaggaggctccgtgcctgcagggcgggcgggccagcgggctgggcgaggcaggcatgagtgcctggctgcgggccatcggcttggagcgctatgaggagggcctggtgcataatggctgggacgacctggagtttctcagtgacatcaccgaggaggacttggaggaggctggggtgcaggacccggctcacaagcgcctccttctggacaccctgcagctcagcaagtgatagcggaggcaccacgaagctgtgaactcagagcccctccctgctaccaaggcccagctatggccccagggttgaaaagttatgagggtcagggcagtatctctctgcctatttattggggtgcctatttattggggatctgcattccccgctgcccaatcatttgcaatgccctaattagggcatcctgcccctcgccttttaggctcaggacggaaggtcagttgccatggttaccgaggaccctggttactctggtgctgtcctgttttactggaccccgcctcccagccccaggggtgcctgtgggggtccatttgggtacgtctgggcccccactttcaccagtttctgcggccttccaccgggcctgaaccacagcggaggagctccgctaagacctccccacccccgctgggggtgggggcgggtgtccgtccggaaatgaaggaatagcccgaggaccgggctggggtttatttaaactgttctgtgtgggtctggggagggagagcaccttaatattattggggttggttggggtggggcaggatctcagccataaagtgccagtttgcttagttctcactgtctcctggtctgtgctgccctgctctggggatgcacggcggcagggtgggggagggaggttcctcgcaggtctcagcccgggacagggtcttgcaagcagcctcctgggcagtcgtaagggttgcggcgtgatgtcttcaataaattaagttttatttgga

SEQ ID NO: 118956 - DNA, 3777 bp, Artificial Sequence
  derived and/or modified sequence
atggccagcgcctgtggggcccctggccctgggggcgccctgggcagccaggcccccagctggtaccaccgggacctgagcagagctgctgctgaggagctgctggcccgggccggcagagatggcagcttcctggtgcgggacagcgagagcgtggccggggcctttgccctgtgtgtgctgtaccagaagcacgtgcacacctaccgcatcctgcctgatggagaggacttcctggccgtgcagaccagccagggcgtgcctgtgcggcgcttccagaccctgggggagctgattggcctgtatgcccagcccaaccagggcctggtgtgtgccctgctgctgcctgtggagggggagcgggagccagaccccccagatgacagagatgccagtgatggagaagatgagaagccacccctgccccccaggagcggcagcaccagcatcagcgcccccaccggccccagcagccccctgcctgcccctgagacccccacagccccagctgctgagagcgcccccaacggcctgagcacagtgtcccatgactacctgaagggcagctatggcctggacctggaggccgtgcggggcggggccagccacctgccccacctgaccaggaccctggccaccagctgccggcggctgcacagcgaggtggacaaggtgctgagcggcctggagatcctgagcaaggtgtttgaccagcagagcagccccatggtgacccggctgctgcagcagcagaacctgccccagacaggagagcaggagctggagagcctggtgctgaagctgtctgtgctgaaggacttcctgagcggcatccagaagaaggccctgaaggccctgcaggacatgagcagcacagcccccccagccccccagcccagcaccaggaaggccaagaccatccctgtgcaggcctttgaggtgaagctggatgtgaccctgggggacctgaccaagattggcaagagccagaagttcaccctgtctgtggatgtggagggcggccgcctggtgctgctgcggcggcagagggacagccaggaggactggaccaccttcacccatgaccgcatccggcagctgatcaagagccagagggtgcagaacaagctgggcgtggtgtttgagaaggagaaggacaggacccagaggaaggacttcatctttgtgtctgccaggaagcgggaggccttctgccagctgctgcagctgatgaagaacaagcacagcaagcaggatgagccagacatgatctctgtgttcatcggcacctggaacatgggctctgtgcccccacccaagaatgtgacctcctggttcaccagcaagggcctgggcaagaccctggatgaggtgacagtgaccatcccccatgacatctacgtgtttggcacccaggagaacagcgtgggggaccgggagtggctggacctgctgcggggcggcctgaaggagctgacagacctggactaccggcccatcgccatgcagagcctgtggaacatcaaggtggccgtgctggtgaagccagagcatgaaaatcgcatcagccacgtgtccaccagctctgtgaagacaggcatcgccaacaccctgggcaacaagggagctgtgggcgtgtccttcatgtttaatggcaccagctttggatttgtgaactgccacctgaccagcggaaatgagaagacagcccggaggaaccagaactacctggacatcctgcggctgctgagcctgggggaccggcagctgaatgcctttgacatcagcctgcgcttcacccacctgttctggtttggagacctgaactaccgcctggacatggacatccaggagatcctgaactacatcagcaggaaggagtttgagcccctgctgcgggtggaccagctgaacctggagcgggagaagcacaaggtgttcctgcgcttcagcgaggaggagatctccttcccccccacctaccgctatgagcggggcagccgggacacctacgcctggcacaagcagaagcccactggagtgaggaccaacgtgcccagctggtgtgaccgcatcctgtggaagagctacccagagacccacatcatctgcaacagctatggctgcacagatgacatcgtgaccagtgaccacagccctgtgtttggcacctttgaggtgggcgtgaccagccagttcatcagcaagaagggcctgagcaagaccagtgaccaggcctacatcgagtttgagagcattgaggccatcgtgaagacagccagcaggaccaagttcttcatcgagttctacagcacctgcctggaggagtacaagaagagctttgaaaatgatgcccagagcagtgacaacatcaacttcctgaaggtgcagtggagcagccggcagctgcccaccctgaagcccatcctggccgacatcgagtacctgcaggaccagcacctgctgctgactgtgaagtccatggatggctatgagagctatggagaatgtgtggtggccctgaagtccatgattggcagcacagcccagcagttcctgaccttcctgagccacagaggagaggagactggaaacatccggggctccatgaaggtgcgggtgcccacagagcggctgggcacccgggagcggctgtatgagtggatcagcattgacaaggatgaggccggggccaagagcaaggcccccagcgtgtcccggggcagccaggagcccaggagcggcagcaggaagccagccttcacagaggccagctgccccctgagccggctgtttgaggagcctgagaagcccccacccaccggccggcccccagccccaccccgggccgccccccgggaggagcccctgaccccccggctgaagccagagggcgcccctgagcctgagggcgtggccgcccccccacccaagaacagcttcaacaacccagcctactacgtgctggagggcgtgccccaccagctgctgcccccagagccccccagccctgcccgggcccctgtgcccagcgccaccaagaacaaggtggccatcaccgtgcctgccccccagctgggccaccaccgccacccccgggtgggggagggcagcagcagtgatgaggagagcggcggcaccctgcccccaccagacttccccccaccacccctgcctgattctgccatcttcctgccccccagcctggaccccctgcccggccctgtggtgcggggccggggcggcgctgaggcccggggccccccaccacccaaggcccaccccaggcctcccctgcccccaggccccagccctgccagcaccttcctgggggaggtggccagcggagatgacaggagctgcagcgtgctgcagatggccaagaccctgtctgaggtggactatgccccagctggccctgcccggagcgccctgctgcccggccccctggagctgcagcccccccggggcctgcccagcgactatggccggcccctgtccttccccccaccccgcatccgggagagcatccaggaggacctggccgaggaggccccctgcctgcagggcggccgggccagcggcctgggggaggccggcatgtctgcctggctgcgggccatcggcctggagagatatgaggagggcctggtgcacaacggctgggatgacctggagttcctgagtgacatcacagaggaggacctggaggaggccggcgtgcaggaccctgcccacaagaggctgctgctggacaccctgcagctgagcaagtag

SEQ ID NO: 118957 - DNA, 3051 bp, Artificial Sequence
  derived and/or modified sequence
atggtgacccggctgctgcagcagcagaacctgccccagacaggagagcaggagctggagagcctggtgctgaagctgtctgtgctgaaggacttcctgagcggcatccagaagaaggccctgaaggccctgcaggacatgagcagcacagcccccccagccccccagcccagcaccaggaaggccaagaccatccctgtgcaggcctttgaggtgaagctggatgtgaccctgggggacctgaccaagattggcaagagccagaagttcaccctgtctgtggatgtggagggcggccgcctggtgctgctgcggcggcagagggacagccaggaggactggaccaccttcacccatgaccgcatccggcagctgatcaagagccagagggtgcagaacaagctgggcgtggtgtttgagaaggagaaggacaggacccagaggaaggacttcatctttgtgtctgccaggaagcgggaggccttctgccagctgctgcagctgatgaagaacaagcacagcaagcaggatgagccagacatgatctctgtgttcatcggcacctggaacatgggctctgtgcccccacccaagaatgtgacctcctggttcaccagcaagggcctgggcaagaccctggatgaggtgacagtgaccatcccccatgacatctacgtgtttggcacccaggagaacagcgtgggggaccgggagtggctggacctgctgcggggcggcctgaaggagctgacagacctggactaccggcccatcgccatgcagagcctgtggaacatcaaggtggccgtgctggtgaagccagagcatgaaaatcgcatcagccacgtgtccaccagctctgtgaagacaggcatcgccaacaccctgggcaacaagggagctgtgggcgtgtccttcatgtttaatggcaccagctttggatttgtgaactgccacctgaccagcggaaatgagaagacagcccggaggaaccagaactacctggacatcctgcggctgctgagcctgggggaccggcagctgaatgcctttgacatcagcctgcgcttcacccacctgttctggtttggagacctgaactaccgcctggacatggacatccaggagatcctgaactacatcagcaggaaggagtttgagcccctgctgcgggtggaccagctgaacctggagcgggagaagcacaaggtgttcctgcgcttcagcgaggaggagatctccttcccccccacctaccgctatgagcggggcagccgggacacctacgcctggcacaagcagaagcccactggagtgaggaccaacgtgcccagctggtgtgaccgcatcctgtggaagagctacccagagacccacatcatctgcaacagctatggctgcacagatgacatcgtgaccagtgaccacagccctgtgtttggcacctttgaggtgggcgtgaccagccagttcatcagcaagaagggcctgagcaagaccagtgaccaggcctacatcgagtttgagagcattgaggccatcgtgaagacagccagcaggaccaagttcttcatcgagttctacagcacctgcctggaggagtacaagaagagctttgaaaatgatgcccagagcagtgacaacatcaacttcctgaaggtgcagtggagcagccggcagctgcccaccctgaagcccatcctggccgacatcgagtacctgcaggaccagcacctgctgctgactgtgaagtccatggatggctatgagagctatggagaatgtgtggtggccctgaagtccatgattggcagcacagcccagcagttcctgaccttcctgagccacagaggagaggagactggaaacatccggggctccatgaaggtgcgggtgcccacagagcggctgggcacccgggagcggctgtatgagtggatcagcattgacaaggatgaggccggggccaagagcaaggcccccagcgtgtcccggggcagccaggagcccaggagcggcagcaggaagccagccttcacagaggccagctgccccctgagccggctgtttgaggagcctgagaagcccccacccaccggccggcccccagccccaccccgggccgccccccgggaggagcccctgaccccccggctgaagccagagggcgcccctgagcctgagggcgtggccgcccccccacccaagaacagcttcaacaacccagcctactacgtgctggagggcgtgccccaccagctgctgcccccagagccccccagccctgcccgggcccctgtgcccagcgccaccaagaacaaggtggccatcaccgtgcctgccccccagctgggccaccaccgccacccccgggtgggggagggcagcagcagtgatgaggagagcggcggcaccctgcccccaccagacttccccccaccacccctgcctgattctgccatcttcctgccccccagcctggaccccctgcccggccctgtggtgcggggccggggcggcgctgaggcccggggccccccaccacccaaggcccaccccaggcctcccctgcccccaggccccagccctgccagcaccttcctgggggaggtggccagcggagatgacaggagctgcagcgtgctgcagatggccaagaccctgtctgaggtggactatgccccagctggccctgcccggagcgccctgctgcccggccccctggagctgcagcccccccggggcctgcccagcgactatggccggcccctgtccttccccccaccccgcatccgggagagcatccaggaggacctggccgaggaggccccctgcctgcagggcggccgggccagcggcctgggggaggccggcatgtctgcctggctgcgggccatcggcctggagagatatgaggagggcctggtgcacaacggctgggatgacctggagttcctgagtgacatcacagaggaggacctggaggaggccggcgtgcaggaccctgcccacaagaggctgctgctggacaccctgcagctgagcaagtag

SEQ ID NO: 118958 - DNA, 3777 bp, Artificial Sequence
  derived and/or modified sequence
atggccagcgcctgcggcgcccccggccccggcggcgccctgggctctcaggccccatcatggtatcatcgagatctgagcagagcagctgccgaagagttgctcgccagggcagggagagacggttcgttcttggtgcgggattcagagtccgtcgccggggccttcgcactgtgcgtgctctatcagaaacacgtgcacacgtaccggatccttcccgacggggaagatttcctcgccgtccagacatcgcaaggagtcccagtgcggcggttccagaccttgggggagttgatcggtctgtacgctcaacctaatcagggtttagtgtgtgccctgcttcttcccgtagagggggaacgagagcccgatcctcctgacgaccgggatgcgtctgacggagaggacgagaagccccctcttccacctcggtctggaagcacctcaatatctgctcctaccgggccctcctcccccctgcccgcgccagagacacccactgcccctgctgcggagtcagcccccaacggactgtccactgtgtctcacgactacctgaaagggtcttatggcttagatctggaagcagtgagaggaggagcctctcacctcccccatctaacaagaacactcgccacgagttgtagaaggctccactccgaagttgataaagtgctgagcgggctggaaattctctcaaaagttttcgatcagcaatcgagccccatggttacaagactgctgcagcaacagaatctgccccagaccggtgaacaggagttagagagcttggtcctaaagctgtcagtgctgaaagactttttaagtgggattcagaaaaaagctctaaaagctttgcaggatatgagctccaccgcacccccggccccacagcctagtactcggaaggccaagactattcccgttcaggctttcgaggtgaagctagatgtcaccttaggcgacctgactaagatcggaaagtcccagaaattcaccctctccgtagacgtagaggggggccgcctggtactccttcggcggcagcgggatagtcaggaggactggacgacattcactcacgaccgcattcgacagcttattaagagtcagagagtgcagaataaactgggagtggtcttcgaaaaggaaaaagaccgcacacagcgcaaggacttcatcttcgtctctgccagaaaaagagaggcattctgtcagctgcttcagctaatgaagaacaagcactccaaacaggacgaaccagatatgattagcgtcttcatcggcacgtggaacatgggatccgtgccaccacccaagaacgtgactagctggtttacttcaaaagggcttggcaaaacattggacgaggtcactgtgaccatcccccacgacatctacgttttcgggacacaggagaacagtgttggtgatcgagaatggctggacctgctaaggggaggactaaaagagcttaccgatctggactacaggcccatcgctatgcagtccctatggaatatcaaagttgctgtgctggtgaaacctgagcacgaaaaccgtattagccacgtgtcgactagttcagtcaagacaggtatcgcgaacaccttggggaataaaggagccgtaggcgtctcctttatgttcaacggtacatcttttggatttgtcaactgtcacctgacatctggaaacgagaaaaccgcccgaagaaaccagaattaccttgacatcctgcggctgctgtcactcggtgacagacagctgaacgccttcgatatcagcttgaggtttacacatttgttctggtttggggacctgaattataggctcgacatggacatccaggagatcctcaactacatttccaggaaggaattcgagccgttacttcgggttgatcagctcaacttagaaagggagaagcataaagtttttctgcgcttctctgaggaggagatctcgttcccgcctacatacagatatgaaaggggatcccgagacacttatgcctggcataagcagaagccgactggtgtcagaactaacgtcccttcctggtgcgatagaattctgtggaagagctaccccgagacccatatcatttgtaacagttatgggtgcacagatgacatcgttacatctgaccacagccccgtgttcggcacattcgaggtgggagtcacctcgcagtttatttcgaaaaaaggcttgtctaaaaccagcgaccaggcttatatcgagtttgaaagtatcgaggcaattgtgaaaacagcttctagaacgaagttttttattgaattttactcgacatgcctggaagaatataagaagtcattcgagaacgatgctcagtcatcagataatatcaatttcctcaaggtgcagtggtcctccaggcagctgccaacccttaaaccgatcctcgcagacattgagtacctccaggaccagcacctcctgttaacagtaaagtcaatggatgggtacgagagttacggggaatgcgtggttgctcttaagtctatgattgggagcacagcccagcaattccttactttcctcagccatcgcggggaagagactggcaacatccggggatccatgaaagtacgagttccgactgaacgtctcgggacccgagaacgcttgtatgaatggatctcaatcgacaaggacgaagccggggctaaatcgaaagcacctagcgtgtcccgcggcagccaagaaccccgctctgggtcaagaaagccagctttcacggaggcttcctgccccttgtccaggcttttcgaggagcctgagaagcctccaccgactggacggcccccagctcctcctcgcgcagcaccacgcgaagagccccttacgccacggctcaagcctgaaggtgcaccagagccagaaggcgtagccgccccaccccctaagaactcctttaacaacccagcctattatgtcctggaaggcgtcccacaccaacttctgccaccagagccccccagcccagcccgcgcccctgtaccctctgccacgaaaaacaaagtcgccatcaccgtcccagccccacaactgggacaccaccggcatccaagagtcggcgaaggatcgtctagtgatgaagagtcgggcgggactctccctccaccggacttcccacccccgcctctgcccgacagcgctatcttccttccaccatcattagatccgctgccaggcccagtggtgagaggacgaggcggggccgaggcacggggtcccccaccccccaaggcccacccccggcctccactgcctcctggtccatcccccgcatccacgttcttaggtgaggtggcgtccggagacgatcgatcctgtagtgttctgcagatggctaaaacactgtccgaggtggattatgctccagctggcccagctcggtctgcccttctccctggaccactggagctccaacctcctaggggactgccctcagactacggccgcccactcagtttccctcctcctagaataagagaaagcattcaggaggacctcgccgaggaggcgccctgcctgcagggtgggcgtgcctcgggactgggggaagcaggaatgtcagcttggctgcgtgctataggcctcgagagatatgaagaaggactcgttcacaatggctgggacgatctggagttcctttcagatatcacagaggaagatcttgaagaggccggagtgcaggatccagcacacaagaggctgctgttggacactctccagttatctaagtag

SEQ ID NO: 118959 - DNA, 3051 bp, Artificial Sequence
  derived and/or modified sequence
atggtgacccggctgctgcagcagcagaacctgccccagaccggcgagcaggagctagagagcctggttctgaagctgagtgtcctcaaggatttcttgagcggcattcaaaaaaaggccctgaaagctttgcaagatatgtcctccacggcacctccggcgcctcagccttccaccagaaaagctaagacgattccagttcaggcatttgaagttaagcttgacgtgacacttggtgatctgactaaaatcggcaaatcccagaaatttaccctgtctgtggacgtggagggcggcagattagtgcttttgcggcggcagcgagacagccaggaggactggaccaccttcacccacgaccgcatcagacagcttattaaatctcagcgagtgcagaataaactgggcgtagtcttcgagaaggagaaggatagaactcagagaaaggatttcatattcgtctctgcacgaaagagggaggccttctgtcaactgttgcaacttatgaagaacaagcattcaaaacaggacgagcctgacatgatctcagtcttcatagggacctggaatatggggtccgtgccacctcctaagaatgttacttcatggtttacatccaaagggcttggcaaaacattggatgaagtgaccgtgacaatcccacacgacatatacgtctttggtactcaggaaaactctgtaggcgaccgcgagtggctggatcttctcagaggtggactgaaagagcttacagatctcgactaccgtccaatcgcaatgcagtccctgtggaatataaaagtggcggtcttagtaaagcccgagcatgaaaatcggatttctcacgtctctaccagtagcgtcaagacaggtatcgccaataccctcggcaataagggagcagtcggagtcagcttcatgttcaatgggacaagctttggcttcgtgaattgccatctcacttccggcaacgaaaagactgcccgacgaaaccagaattatctggatatcttacggctcctttctcttggcgacaggcagttgaatgcctttgatatctctctgagatttacacacctcttttggttcggggacttgaactacaggctggacatggatattcaagaaatcctgaattatataagtaggaaggaattcgagccgttattgagagtcgaccagttaaatctagaacgcgagaagcacaaagtgttccttcgcttttcagaggaggaaatttccttcccccctacctaccgctacgagagaggtagtagagatacatatgcatggcataagcaaaagcccacaggggtgcgaacaaacgttcccagctggtgtgacagaattttatggaaatcctatccggagacccacataatctgcaacagttatggatgcaccgatgacattgttactagtgaccactcccccgtctttggtacttttgaggttggggtgacctctcaattcatctcaaaaaagggcttatctaagacttctgaccaggcatatatcgaattcgaatctattgaagccattgtgaaaacagccagtaggactaagttctttatcgagttctattctacatgcctggaggaatacaagaagtccttcgaaaacgacgcacagtcctcagataacatcaattttcttaaggtgcaatggagctcgcggcagctgccgacccttaagccaattcttgccgatattgaatatctacaagaccagcacctgctgcttacagtcaaaagcatggatggatacgagtcttatggagagtgtgtggtcgctctgaagtccatgatcggctccactgctcaacagtttctgacgtttctgagccatcggggagaggagacaggaaacatcaggggaagcatgaaagtaagagtgcccaccgagcgcttgggtactcgggagcggctgtacgagtggatctctatcgacaaagatgaagctggtgcaaagagcaaggcaccatctgtgagccgcggttctcaggaaccccggtctggaagcaggaaacctgcttttactgaagcctcttgcccactgtcccgactctttgaagaacctgagaagccacctccaaccggaaggcctcccgccccaccacgcgccgcaccaagagaggaacctttaactccgcgtctgaaaccagagggcgcccctgaacccgagggtgtagccgcccctcctcctaaaaatagttttaataacccagcttactacgtcctggagggagtgcctcaccagttactgccaccggagccccctagtcctgccagagcgcccgtgcccagcgcaacgaagaataaggttgcaattacagtccccgctccccagctgggccatcatcgccacccacgagtgggggaagggagttccagcgatgaggaaagtggtggaaccctcccacctcctgattttccacctccacccctcccagacagtgccatttttctccctcctagtttggaccctttgccaggacctgttgttagaggccgcgggggagccgaagcccggggcccacccccaccaaaggctcaccctaggcccccactacctccaggaccaagtcctgcctcaacttttctgggcgaagtcgcatccggcgacgataggagttgttcagtccttcagatggccaagaccctgtcagaagtcgattatgctcctgcgggcccagcgcgaagtgctctgttgcctgggcctctggagctgcagcctcctcggggactcccctccgattacgggcgacctctgtctttcccccccccacgcatcagggagtccatccaggaggatctggctgaagaggcaccctgtcttcagggcggccgggcgtccggcttgggcgaagctggaatgagcgcctggttgagggccatcgggctagaaagatatgaggaggggctggttcataacggatgggacgatctcgagtttttatccgatatcaccgaggaggacctcgaagaggccggcgttcaggatcccgcacataaaaggttactcctagacacccttcagctcagcaaatag

SEQ ID NO: 118960 - DNA, 3051 bp, Artificial Sequence
  derived and/or modified sequence
atggtgacccggctgctgcagcagcagaacctgccccagaccggcgagcaggagctagagtccctggtgttgaaactgtcagttctgaaagattttctgagcggaattcagaagaaagcattgaaggccctgcaggacatgagtagtacagcgccgccggccccccagcctagcactcgcaaagcgaaaacaatcccggtccaggcatttgaggtcaagctggacgttaccttaggggatttgaccaagatcggcaagtcccagaagttcactctgagtgtcgatgtcgaagggggacgcctcgtgctgttgaggcgtcaaagggacagccaggaggactggacaaccttcacccatgatcgcatcaggcagctcatcaagagtcagcgtgtgcagaacaagcttggagtcgttttcgagaaagagaaggaccggacgcagcgtaaggactttattttcgttagtgcccggaaaagggaggctttttgccaacttcttcagctgatgaagaacaaacactctaaacaggatgagccagacatgatatcagtttttatagggacgtggaatatgggatccgtccctcccccaaagaacgtcacctcttggttcacttcaaagggcttgggcaagaccctggatgaagtcacggtgacgattcctcacgatatttatgtgttcggcacgcaggaaaacagtgtaggcgaccgcgaatggctggacttactgagaggtgggctgaaggagctgacggacctggactataggcccatagccatgcagagcctttggaatattaaggttgccgtgctcgttaagcccgagcatgagaaccggatatctcatgtttcgacctcttcagtgaaaaccggcatcgccaacactttagggaacaaaggggctgtcggagtgtcctttatgttcaacggtacaagttttggtttcgtgaattgtcacctcactagcgggaacgagaagactgctcggcggaatcaaaattatctggacatactgaggcttcttagcctcggagatcgacagctcaacgcgttcgacatttccctgaggtttacccatctgttctggtttggagacttgaattacagattggacatggacatccaagaaattctcaactacatctcacggaaggaattcgagcctctcctacgcgtggaccagctcaatctggagagggaaaagcacaaagtgtttcttaggttttcagaggaggagatatcatttccccccacataccgatacgaaagaggaagtagagatacttatgcatggcataaacagaaacccacaggagtgaggaccaacgttccctcttggtgcgaccgcatcctgtggaagagttatcccgagactcatatcatttgcaactcatatggctgtacagacgacatcgtgacaagcgaccactcacctgtgtttggtacatttgaggtcggggtcacctcacagtttatcagcaaaaaggggctctccaaaacatctgaccaggcatacattgagttcgaatccatcgaggccattgtgaagaccgcctccagaacgaagtttttcatcgaattctactctacatgtctcgaggaatacaagaaaagcttcgagaacgatgcacagtcttcagacaacatcaatttcttgaaagttcagtggtcctctaggcagctaccaactttgaaacccatcctggccgacattgagtacctgcaagatcaacatctgttgctcacagtgaagagcatggatggctacgagagctatggtgagtgcgtagtggctctgaaaagtatgattggatccacggctcaacagtttctcacgtttctgtctcatcgcggcgaggagactgggaacattaggggatcgatgaaggtcagagtccctactgagagactcggaaccagggagagactgtatgagtggatatcaatcgacaaagacgaggctggtgcgaaatccaaggcgccctcagtgtccaggggatctcaggaaccaaggtccgggagcaggaaaccggcctttacagaggcttcctgccctctgtcacggctgtttgaggaacctgagaagccaccgccaaccgggcgccccccagccccacctcgagctgccccccgggaagagcccttaacacccagactcaaacccgaaggagctccggagcctgagggtgtggctgcacctccccccaagaatagcttcaacaacccggcctattatgtcctagaaggtgtgccacaccagcttctgccccctgaacctcctagtccagcacgtgctcctgtgcctagtgctacgaaaaataaggtagccattacagtcccagcccctcagctaggccaccaccgtcatccaagggtgggggaaggcagctcatcagatgaggagagcggaggaaccctgcctccccctgactttccaccccccccgttaccagatagtgctatcttcttgccacctagtcttgacccactacccggcccggttgtgcggggtcgagggggagctgaagctagaggccctccaccgcccaaagctcatccacgaccacctctgccaccaggaccctcaccagcatcgacttttttgggggaggtcgcttccggcgatgaccgcagctgttctgtgctccagatggcaaagacgctgtccgaggtagattacgcccccgctggacccgcacgatccgcactgttaccgggcccacttgaactgcagcccccaaggggcctcccaagcgactatggacgtcctctttccttcccccccccaaggatccgcgagtccattcaggaggatttggccgaagaagcaccatgcctccagggcggccgcgcttccgggctgggggaagcgggaatgagtgcatggcttcgcgccattggcctcgaacgctatgaagagggcctcgtccacaatggatgggacgacctagagttcctgagcgatattactgaagaggatctggaagaggctggcgtacaagaccctgcccacaaacgtctgttattggacaccctgcagctctccaaatag

SEQ ID NO: 118961 - DNA, 3777 bp, Artificial Sequence
  derived and/or modified sequence
atggctagcgcctgtggggcacccggaccgggaggtgcgttaggatctcaggccccatcatggtaccaccgggacttgagtcgggctgccgcagaagaactgcttgctagggcgggtcgagatggatcctttctcgtgcgcgactctgagagtgtggctggagcatttgccttgtgcgtgttataccaaaagcacgtgcacacttaccgcatcctgcccgatggtgaggatttcctggcggtgcaaacctctcaaggggtcccagtccggaggtttcagacactcggcgaactcattggactttatgctcagcccaatcaaggcttggtgtgtgcactgctgctgcccgtggaaggtgagagagagccggatccccctgacgatagggatgccagcgatggcgaagatgagaagccccctttgcctccaagatccggatccacgtctatttctgcacccaccggccctagctccccactgcctgcacccgagacacccaccgcccctgccgctgagtctgccccaaacgggctgagtactgtctcccatgattatcttaaaggttcttacggactagacctggaagctgtcaggggaggcgcatctcatctgccccacctgaccaggacgcttgcaacttcttgcagacgcctgcatagcgaagtcgacaaggtgctatccggattggaaatcttgtcgaaagtgttcgaccagcagtccagcccaatggtgacacggctgctacagcagcagaacctgccacagacaggagaacaggaactggagagcctggtactcaagctgtcggtcctgaaggacttcctctccggaatccagaaaaaggccctaaaagccctccaggacatgtcctcaacagcccctcccgctccacagcccagcacaagaaaggccaagacgatcccagtgcaagctttcgaggttaaacttgacgtgactctgggggaccttaccaaaatcggcaaaagtcagaagtttacactgtcagttgacgtggaagggggtcggttagtcttactgagacggcagagagattctcaagaggattggactactttcacacatgaccgaataaggcagcttataaagtcccagagagtgcagaataaattaggcgtggtgtttgaaaaagagaaggataggacccagcggaaggatttcatcttcgtctccgctcggaaacgtgaagcgttctgtcaactcttacagttgatgaaaaataagcacagcaaacaggatgaacctgatatgataagtgtattcattggaacatggaacatgggatcagtgcccccacctaaaaacgtgacatcatggtttacgtcaaaaggcttaggaaaaacgctcgacgaagtcaccgtaaccattcctcatgatatttacgtatttgggacacaagaaaatagcgttggtgatcgcgagtggctcgatcttctccgcggaggtttgaaggagttgacagacctagattacaggcccattgcaatgcaaagcctgtggaacatcaaagtggctgtcctggtgaaacccgagcacgaaaaccgtatttctcacgtctcaacctcctctgtgaagacaggaatcgccaataccctaggcaataagggtgcggtcggcgtttcatttatgtttaacggcacctccttcggctttgtgaattgtcacctgacgagcggaaatgagaagactgctcgcaggaatcagaattatctggacatcctgcgactactaagcctgggtgataggcagttaaatgcttttgatatctccctccgatttacgcatcttttctggttcggagatcttaactataggttggatatggatattcaggaaattctgaattacataagccggaaggaattcgagccgctgctcagagtcgaccagctgaacctcgaacgtgagaaacacaaggtttttctgaggttttcagaggaggagatttcattcccacctacgtatcggtatgagagaggatcgcgggatacctacgcttggcacaaacaaaaacctactggtgtccgcacgaacgtaccttcatggtgtgaccgcattctctggaaaagttaccctgagactcacattatatgtaatagttacggatgtactgatgatatagtgacctctgaccactccccggtatttgggacattcgaggtaggtgttactagccagttcatttccaaaaagggcttgtctaagacttctgaccaggcttacattgaattcgaaagcatcgaagcaattgtgaaaaccgcgtcacgcacaaagttcttcatcgaattttactcaacttgtttagaggagtataagaaatccttcgagaatgacgcacagtcttcagataacatcaactttcttaaagtgcaatggtcttctaggcaacttcccacactaaaacctatcctcgctgatatcgaatacctccaggatcagcacctgctacttaccgttaaatctatggatgggtatgaaagctatggcgaatgtgtcgtggcattgaagtcgatgatcggaagtacagctcaacagtttctgaccttcctgagtcatcgcggagaagagactggcaacatacggggatctatgaaggttagggtgcctacagaacggctgggaactcgcgaaagattatatgaatggatcagcatcgataaagatgaggccggtgccaagtcaaaggccccttcagtgagccgaggctcacaggagccccgttccgggtccaggaaacccgcatttacagaagcctcatgccccctcagccgtctattcgaggaacccgagaagcctccacctaccgggagaccgccagccccacctcgcgctgccccaagggaagaaccactgaccccaagattaaagccagagggagccccagagcccgagggcgttgctgcgccaccccctaagaattcctttaacaaccctgcttattacgtgcttgagggcgtaccccaccagctgctccctcccgaacctccatccccagcgcgagctcctgtcccttctgccacaaagaataaggtggcaatcaccgtgccagctccccaactgggacatcacaggcatccacgggtgggagaagggagctcctccgatgaggaaagcgggggtaccctacctccccctgacttcccaccgcctcccttgccagatagcgctatctttctgccgccttcccttgaccctctgcctggccctgtcgtgagggggagggggggagctgaggctagaggtcccccacccccaaaggctcatcccaggcctccactgcccccagggccaagccctgctagcacctttctgggagaggtggcaagtggcgatgatagaagctgcagcgtgttacagatggcgaagacactgtccgaagttgactacgcccctgcaggaccggctaggagtgctctcctgccaggacctctggagttgcaaccacccaggggactgcccagcgactacgggagacccctgtcttttccacctccccgtataagggaaagtattcaggaagatctcgctgaggaagccccttgtctgcagggcggacgggcttccgggctcggcgaagccggtatgtctgcatggctccgggctattggtctcgagagatacgaagaaggacttgtccacaacggctgggatgatctagagttcctgtccgacattactgaagaggatctggaagaagccggagtacaggaccctgctcataagcggctcctcctggacacactgcagctatcgaaatag

SEQ ID NO: 118962 - DNA, 3051 bp, Artificial Sequence
  derived and/or modified sequence
atggtgacaagactactccagcagcagaatctcccgcagacaggcgagcaagaattggagtccctggtgctgaagttgtccgtcttgaaggactttctcagcggtattcagaagaaggctctgaaggcccttcaggacatgtcgtccacagcccctccagcccctcagccctccactcggaaggcgaaaaccatacccgtgcaagccttcgaggtgaagctggatgtgacactgggggacctcacaaaaattggaaaaagccaaaagttcaccctgtccgtggacgtagagggcggtcggcttgtactgctgcgccgtcagcgggattcccaagaggattggaccactttcacccacgacagaatccggcagttgatcaaatcacagcgggtgcagaacaaactgggcgtcgtgtttgagaaagagaaagaccgcacccagcgcaaggactttatttttgtgtctgcaagaaagcgagaggccttttgtcagttgctgcaactgatgaagaataaacactctaagcaggatgagcccgatatgataagcgtgttcatcggaacatggaacatgggcagcgtccctcctcctaaaaacgttacttcttggttcacctcaaaggggctgggaaagacactcgatgaagtcactgttactattcctcacgacatttacgtgttcggcactcaggagaattctgtgggagacagagaatggttggacttgctcagaggaggcctgaaagaacttacggacctggattataggcctatcgccatgcagtccctttggaacatcaaggtggcggtccttgtgaagccagaacatgagaacagaatatcacatgtatcgacctccagtgttaaaacagggatcgcaaatactttgggcaataaaggcgctgtcggagtctcctttatgttcaacggtacttcgttcgggtttgtcaattgccacctgactagcggcaacgagaaaaccgcacgcagaaatcagaactatcttgacatcttgcgattactttctctaggagataggcagttgaacgccttcgacattagcctccgattcacccatctgttttggttcggagatctgaattatcgcctagacatggatattcaggagatcctaaattacatcagtcgaaaggagttcgagcccctcctgagagtggaccaattgaatcttgagcgcgagaagcacaaagttttcttaagattctctgaggaggaaatcagtttccctcctacctatagatatgagaggggcagccgagatacatacgcttggcacaagcagaaacccacaggcgtgcggacgaatgttccaagctggtgcgatcggatcctctggaagtcctatcccgaaacccacattatttgtaattcctacggctgcaccgacgacattgtcaccagcgatcactcaccagtgtttggaactttcgaggttggcgtgacctcgcagtttatcagcaagaagggcctttcgaagacctcggaccaagcctacatagaattcgaaagtatcgaggccattgtgaagacagcctctagaaccaaattttttatcgagttttatagtacttgtctcgaagaatataaaaaatctttcgaaaacgacgcccagtcctcagacaatataaacttcttgaaggtgcagtggagttcacggcagctcccaacactcaagcccattctagccgatattgagtatctgcaggatcagcatcttctgcttactgtcaagagcatggatgggtatgagtcctatggtgagtgcgtggtcgcactgaaaagcatgattggcagtacggctcaacagtttcttacctttctctcccaccggggtgaggaaacaggtaacataagaggcagcatgaaggtcagggttccaacagaacggcttggcacccgcgagcgactctacgaatggatttccattgacaaagacgaggcgggagctaaatcaaaggcgcctagtgtgtctagagggagtcaggaaccccgttccgggtctaggaagcctgcttttacagaggcttcttgtccgctatcaaggttgtttgaggagccagagaagccaccccctacgggaagaccacccgctcccccacgcgcagccccacgggaggaacctctcactccacgactgaagcctgagggagccccagaaccggagggagttgccgctccccctcccaagaacagttttaataatcccgcatactatgtgctagaaggagttccacaccagcttctccctcccgaacccccaagtcccgcaagggcccctgttcccagcgccacaaagaacaaggttgccataacggtccccgcaccccagttggggcaccatcgccaccccagagtcggggagggctcttcgtctgacgaggagtcaggcggaactctccctccacctgattttccccctcctcccttgcccgactcagccattttcctgccaccatctttagacccactccccggtcccgtcgttaggggcagggggggtgcagaggccaggggcccaccccctcctaaagcacatccccgacccccactccccccaggtccaagtcccgcatccactttcttaggagaagtagcttcaggggatgaccgctcctgcagcgtactacagatggcgaaaactctgtccgaggtggattatgcacctgccggaccagcccgatcagccctgctccccggacctctcgagctccaacctccacgcggacttcctagcgattatggacggccactctcctttcctccacctaggatcagggagagcatccaggaggatctcgcagaagaagctccttgcctgcagggagggagagcctccggtttaggcgaagcaggtatgtctgcatggctgcgggcaatcgggctcgagagatatgaagaaggactcgtccataacggatgggatgacctcgaattcctttctgatataacagaagaagacttggaggaggctggtgtccaggatccagcccataagaggctcctgctcgataccctccagcttagcaaatag

SEQ ID NO: 118963 - DNA, 3051 bp, Artificial Sequence
  derived and/or modified sequence
atggtgacaaggctgctgcagcagcagaaccttccacagactggagagcaagaactggagtccttggtactgaagttaagcgtgctgaaggatttcctttcgggaatccagaaaaaagctctcaaggccttgcaggatatgtcatccacagcccctcctgcacctcaacctagcacacggaaagctaagaccataccagtacaggctttcgaagtgaagttggatgttaccctgggcgaccttaccaagatcgggaaatcccagaagttcactctgtcggtcgatgtggaaggcggacgtctggtgctcctacgacggcaaagagatagccaggaggactggaccacatttacgcacgataggattaggcaactgatcaagtcacagagagttcagaataaattgggggttgtttttgagaaagagaaggatcgtacacagagaaaggattttatcttcgtgtccgcacggaaaagggaagccttttgccagctcttgcaactcatgaaaaataaacacagcaagcaggatgaaccagatatgatcagcgtgttcatagggacgtggaatatgggtagcgtgcctccaccaaagaatgtgacaagttggtttactagcaaagggctgggtaagactctggacgaagttaccgtgacgatcccccacgacatctacgtgtttggaactcaggaaaacagtgtgggggaccgagagtggctcgatctcctcagaggagggttgaaagagctcaccgatctcgattaccggccaatcgcgatgcaatctctgtggaatatcaaggtagcagtgctggtgaaacctgagcacgaaaaccggattagccatgtgtccacctcatccgtgaagacaggaattgcaaatacgctgggcaacaagggcgcagttggcgtcagtttcatgttcaatgggacaagctttggctttgttaactgtcatttaacatcaggaaacgagaagactgctcggagaaatcagaattacctggatattctccggctgttatccttaggcgataggcagctcaatgcttttgatatatccctacgatttacgcacctcttttggtttggcgatctcaattatcgcttggatatggatatccaggaaattctgaactatatctcccggaaagaatttgagccgctactgcgagtggatcagctgaatctggagcgggaaaaacacaaagttttcttgagattttccgaagaagaaatatcatttccccctacctaccgctacgagcgaggcagccgggatacatacgcatggcataaacagaaacctaccggagtccggactaacgtgccgtcgtggtgcgaccgaatcctatggaagagttatccagaaacgcatataatatgcaactcctacggctgtacagatgatatagtgacaagcgaccactctccggttttcggcacgttcgaggtgggagtgacaagtcagtttatcagtaaaaagggcctttcaaaaacatctgaccaggcatatattgagtttgaatctatagaggcaattgtgaagactgcttctcgaacgaagtttttcatagagttttattctacctgcctcgaggaatacaaaaagagcttcgaaaatgacgcccagtcttccgataatattaacttcttgaaagtccagtggagctccagacagctgccgaccttaaaacctattctggctgatatcgaatatctccaagatcagcaccttttactcaccgtaaaatcgatggacggatacgaaagttacggagagtgcgtagtggcgttgaagagcatgatcggatctacagcacagcagtttctaaccttcctctcacatcggggagaggaaaccggaaacatccggggttccatgaaggtgcgcgtacctacagagaggctgggaacccgtgagcgcctctacgagtggatctcaatcgataaggatgaagctggagctaaatccaaagcgccttccgtcagcagaggatcacaggagcctagaagtggatcgcgaaagcccgcatttacagaagccagctgtcccttgtctcggctcttcgaagaaccagagaaaccccctcccaccggtagacctccagctccgcctagggcagcccctagggaagaaccactgacacctcgcctgaagccagagggagcgccagagccagagggggtggctgctcctcccccaaaaaattcctttaataatccagcctactacgtcctggagggtgtgccccatcagctgctccctcccgagccaccctcccccgctcgggctccagtgccgtcagctacgaagaataaagtcgccatcacagtacctgccccacaactgggccaccatagacatccccgagtgggggaaggctctagcagcgacgaagaatcaggcggaacactgcccccacccgatttcccacctccgccactgcccgactcggccatctttctgcctcccagtctggaccccttacccggtccggtggtcagaggcagagggggagcagaggccagaggccctcccccacctaaagcacacccgagaccacccctgcccccaggcccaagtcccgcatcgacctttttgggggaggtcgcttctggcgatgatcgttcctgctccgtgctgcagatggccaagacactctccgaggtagactatgccccagccggtcctgcacggtcggccttactgcccggtccactggagctgcaacctcctcgaggcttgccctccgattacggcaggccattatcgttccctcctccgaggatcagggagtccattcaggaggacctggcggaggaagctccttgtctgcaggggggtcgagccagcggtctgggagaggccggaatgtccgcttggctccgtgcaataggactcgagaggtacgaggagggcttagtgcacaacggctgggacgatctggaatttctgagcgatataacagaggaggacctggaagaagcaggggtacaagatccagcccacaagaggttgctacttgacacgctccagctgtctaagtag

SEQ ID NO: 118964 - DNA, 3777 bp, Artificial Sequence
  derived and/or modified sequence
atggccagcgcctgcggcgcccccggccccggcggcgccctgggcagccaggcccccagctggtaccacagagacctgagcagagccgccgccgaggagctgctggccagagccggcagagacggcagcttcctggtgagagacagcgagagcgtggccggcgccttcgccctgtgcgtgctgtaccagaagcacgtgcacacctacagaatcctgcccgacggcgaggacttcctggccgtgcagaccagccagggcgtgcccgtgagaagattccagaccctgggcgagctgatcggcctgtacgcccagcccaaccagggcctggtgtgcgccctgctgctgcccgtggagggcgagagagagcccgacccccccgacgacagagacgccagcgacggcgaggacgagaagccccccctgccccccagaagcggcagcaccagcatcagcgcccccaccggccccagcagccccctgcccgcccccgagacccccaccgcccccgccgccgagagcgcccccaacggcctgagcaccgtgagccacgactacctgaagggcagctacggcctggacctggaggccgtgagaggcggcgccagccacctgccccacctgaccagaaccctggccaccagctgcagaagactgcacagcgaggtggacaaggtgctgagcggcctggagatcctgagcaaggtgttcgaccagcagagcagccccatggtgaccagactgctgcagcagcagaacctgccccagaccggcgagcaggagctggagagcctggtgctgaagctgagcgtgctgaaggacttcctgagcggcatccagaagaaggccctgaaggccctgcaggacatgagcagcaccgccccccccgccccccagcccagcaccagaaaggccaagaccatccccgtgcaggccttcgaggtgaagctggacgtgaccctgggcgacctgaccaagatcggcaagagccagaagttcaccctgagcgtggacgtggagggcggcagactggtgctgctgagaagacagagagacagccaggaggactggaccaccttcacccacgacagaatcagacagctgatcaagagccagagagtgcagaacaagctgggcgtggtgttcgagaaggagaaggacagaacccagagaaaggacttcatcttcgtgagcgccagaaagagagaggccttctgccagctgctgcagctgatgaagaacaagcacagcaagcaggacgagcccgacatgatcagcgtgttcatcggcacctggaacatgggcagcgtgcccccccccaagaacgtgaccagctggttcaccagcaagggcctgggcaagaccctggacgaggtgaccgtgaccatcccccacgacatctacgtgttcggcacccaggagaacagcgtgggcgacagagagtggctggacctgctgagaggcggcctgaaggagctgaccgacctggactacagacccatcgccatgcagagcctgtggaacatcaaggtggccgtgctggtgaagcccgagcacgagaacagaatcagccacgtgagcaccagcagcgtgaagaccggcatcgccaacaccctgggcaacaagggcgccgtgggcgtgagcttcatgttcaacggcaccagcttcggcttcgtgaactgccacctgaccagcggcaacgagaagaccgccagaagaaaccagaactacctggacatcctgagactgctgagcctgggcgacagacagctgaacgccttcgacatcagcctgagattcacccacctgttctggttcggcgacctgaactacagactggacatggacatccaggagatcctgaactacatcagcagaaaggagttcgagcccctgctgagagtggaccagctgaacctggagagagagaagcacaaggtgttcctgagattcagcgaggaggagatcagcttcccccccacctacagatacgagagaggcagcagagacacctacgcctggcacaagcagaagcccaccggcgtgagaaccaacgtgcccagctggtgcgacagaatcctgtggaagagctaccccgagacccacatcatctgcaacagctacggctgcaccgacgacatcgtgaccagcgaccacagccccgtgttcggcaccttcgaggtgggcgtgaccagccagttcatcagcaagaagggcctgagcaagaccagcgaccaggcctacatcgagttcgagagcatcgaggccatcgtgaagaccgccagcagaaccaagttcttcatcgagttctacagcacctgcctggaggagtacaagaagagcttcgagaacgacgcccagagcagcgacaacatcaacttcctgaaggtgcagtggagcagcagacagctgcccaccctgaagcccatcctggccgacatcgagtacctgcaggaccagcacctgctgctgaccgtgaagagcatggacggctacgagagctacggcgagtgcgtggtggccctgaagagcatgatcggcagcaccgcccagcagttcctgaccttcctgagccacagaggcgaggagaccggcaacatcagaggcagcatgaaggtgagagtgcccaccgagagactgggcaccagagagagactgtacgagtggatcagcatcgacaaggacgaggccggcgccaagagcaaggcccccagcgtgagcagaggcagccaggagcccagaagcggcagcagaaagcccgccttcaccgaggccagctgccccctgagcagactgttcgaggagcccgagaagcccccccccaccggcagaccccccgccccccccagagccgcccccagagaggagcccctgacccccagactgaagcccgagggcgcccccgagcccgagggcgtggccgcccccccccccaagaacagcttcaacaaccccgcctactacgtgctggagggcgtgccccaccagctgctgccccccgagccccccagccccgccagagcccccgtgcccagcgccaccaagaacaaggtggccatcaccgtgcccgccccccagctgggccaccacagacaccccagagtgggcgagggcagcagcagcgacgaggagagcggcggcaccctgcccccccccgacttcccccccccccccctgcccgacagcgccatcttcctgccccccagcctggaccccctgcccggccccgtggtgagaggcagaggcggcgccgaggccagaggcccccccccccccaaggcccaccccagaccccccctgccccccggccccagccccgccagcaccttcctgggcgaggtggccagcggcgacgacagaagctgcagcgtgctgcagatggccaagaccctgagcgaggtggactacgcccccgccggccccgccagaagcgccctgctgcccggccccctggagctgcagccccccagaggcctgcccagcgactacggcagacccctgagcttccccccccccagaatcagagagagcatccaggaggacctggccgaggaggccccctgcctgcagggcggcagagccagcggcctgggcgaggccggcatgagcgcctggctgagagccatcggcctggagagatacgaggagggcctggtgcacaacggctgggacgacctggagttcctgagcgacatcaccgaggaggacctggaggaggccggcgtgcaggaccccgcccacaagagactgctgctggacaccctgcagctgagcaagtag

SEQ ID NO: 118965 - DNA, 3051 bp, Artificial Sequence
  derived and/or modified sequence
atggtgaccagactgctgcagcagcagaacctgccccagaccggcgagcaggagctggagagcctggtgctgaagctgagcgtgctgaaggacttcctgagcggcatccagaagaaggccctgaaggccctgcaggacatgagcagcaccgccccccccgccccccagcccagcaccagaaaggccaagaccatccccgtgcaggccttcgaggtgaagctggacgtgaccctgggcgacctgaccaagatcggcaagagccagaagttcaccctgagcgtggacgtggagggcggcagactggtgctgctgagaagacagagagacagccaggaggactggaccaccttcacccacgacagaatcagacagctgatcaagagccagagagtgcagaacaagctgggcgtggtgttcgagaaggagaaggacagaacccagagaaaggacttcatcttcgtgagcgccagaaagagagaggccttctgccagctgctgcagctgatgaagaacaagcacagcaagcaggacgagcccgacatgatcagcgtgttcatcggcacctggaacatgggcagcgtgcccccccccaagaacgtgaccagctggttcaccagcaagggcctgggcaagaccctggacgaggtgaccgtgaccatcccccacgacatctacgtgttcggcacccaggagaacagcgtgggcgacagagagtggctggacctgctgagaggcggcctgaaggagctgaccgacctggactacagacccatcgccatgcagagcctgtggaacatcaaggtggccgtgctggtgaagcccgagcacgagaacagaatcagccacgtgagcaccagcagcgtgaagaccggcatcgccaacaccctgggcaacaagggcgccgtgggcgtgagcttcatgttcaacggcaccagcttcggcttcgtgaactgccacctgaccagcggcaacgagaagaccgccagaagaaaccagaactacctggacatcctgagactgctgagcctgggcgacagacagctgaacgccttcgacatcagcctgagattcacccacctgttctggttcggcgacctgaactacagactggacatggacatccaggagatcctgaactacatcagcagaaaggagttcgagcccctgctgagagtggaccagctgaacctggagagagagaagcacaaggtgttcctgagattcagcgaggaggagatcagcttcccccccacctacagatacgagagaggcagcagagacacctacgcctggcacaagcagaagcccaccggcgtgagaaccaacgtgcccagctggtgcgacagaatcctgtggaagagctaccccgagacccacatcatctgcaacagctacggctgcaccgacgacatcgtgaccagcgaccacagccccgtgttcggcaccttcgaggtgggcgtgaccagccagttcatcagcaagaagggcctgagcaagaccagcgaccaggcctacatcgagttcgagagcatcgaggccatcgtgaagaccgccagcagaaccaagttcttcatcgagttctacagcacctgcctggaggagtacaagaagagcttcgagaacgacgcccagagcagcgacaacatcaacttcctgaaggtgcagtggagcagcagacagctgcccaccctgaagcccatcctggccgacatcgagtacctgcaggaccagcacctgctgctgaccgtgaagagcatggacggctacgagagctacggcgagtgcgtggtggccctgaagagcatgatcggcagcaccgcccagcagttcctgaccttcctgagccacagaggcgaggagaccggcaacatcagaggcagcatgaaggtgagagtgcccaccgagagactgggcaccagagagagactgtacgagtggatcagcatcgacaaggacgaggccggcgccaagagcaaggcccccagcgtgagcagaggcagccaggagcccagaagcggcagcagaaagcccgccttcaccgaggccagctgccccctgagcagactgttcgaggagcccgagaagcccccccccaccggcagaccccccgccccccccagagccgcccccagagaggagcccctgacccccagactgaagcccgagggcgcccccgagcccgagggcgtggccgcccccccccccaagaacagcttcaacaaccccgcctactacgtgctggagggcgtgccccaccagctgctgccccccgagccccccagccccgccagagcccccgtgcccagcgccaccaagaacaaggtggccatcaccgtgcccgccccccagctgggccaccacagacaccccagagtgggcgagggcagcagcagcgacgaggagagcggcggcaccctgcccccccccgacttcccccccccccccctgcccgacagcgccatcttcctgccccccagcctggaccccctgcccggccccgtggtgagaggcagaggcggcgccgaggccagaggcccccccccccccaaggcccaccccagaccccccctgccccccggccccagccccgccagcaccttcctgggcgaggtggccagcggcgacgacagaagctgcagcgtgctgcagatggccaagaccctgagcgaggtggactacgcccccgccggccccgccagaagcgccctgctgcccggccccctggagctgcagccccccagaggcctgcccagcgactacggcagacccctgagcttccccccccccagaatcagagagagcatccaggaggacctggccgaggaggccccctgcctgcagggcggcagagccagcggcctgggcgaggccggcatgagcgcctggctgagagccatcggcctggagagatacgaggagggcctggtgcacaacggctgggacgacctggagttcctgagcgacatcaccgaggaggacctggaggaggccggcgtgcaggaccccgcccacaagagactgctgctggacaccctgcagctgagcaagtag

SEQ ID NO: 118966 - protein, 445 aa, Artificial Sequence
  derived and/or modified sequence
MAEYDLTTRIAHFLDRHLVFPLLEFLSVKEIYNEKELLQGKLDLLSDTNMVDFAMDVYKNLYSDDIPHALREKRTTVVAQLKQLQAETEPIVKMFEDPETTRQMQSTRDGRMLFDYLADKHGFRQEYLDTLYRYAKFQYECGNYSGAAEYLYFFRVLVPATDRNALSSLWGKLASEILMQNWDAAMEDLTRLKETIDNNSVSSPLQSLQQRTWLIHWSLFVFFNHPKGRDNIIDLFLYQPQYLNAIQTMCPHILRYLTTAVITNKDVRKRRQVLKDLVKVIQQESYTYKDPITEFVECLYVNFDFDGAQKKLRECESVLVNDFFLVACLEDFIENARLFIFETFCRIHQCISINMLADKLNMTPEEAERWIVNLIRNARLDAKIDSKLGHVVMGNNAVSPYQQVIEKTKSLSFRSQMLAMNIEKKLNQNSRSEAPNWATQDSGFY

SEQ ID NO: 118967 - DNA, 1338 bp, Artificial Sequence
  derived and/or modified sequence
atggccgagtacgacctgaccaccagaatcgcccacttcctggacagacacctggtgttccccctgctggagttcctgagcgtgaaggagatctacaacgagaaggagctgctgcagggcaagctggacctgctgagcgacaccaacatggtggacttcgccatggacgtgtacaagaacctgtacagcgacgacatcccccacgccctgagagagaagagaaccaccgtggtggcccagctgaagcagctgcaggccgagaccgagcccatcgtgaagatgttcgaggaccccgagaccaccagacagatgcagagcaccagagacggcagaatgctgttcgactacctggccgacaagcacggcttcagacaggagtacctggacaccctgtacagatacgccaagttccagtacgagtgcggcaactacagcggcgccgccgagtacctgtacttcttcagagtgctggtgcccgccaccgacagaaacgccctgagcagcctgtggggcaagctggccagcgagatcctgatgcagaactgggacgccgccatggaggacctgaccagactgaaggagaccatcgacaacaacagcgtgagcagccccctgcagagcctgcagcagagaacctggctgatccactggagcctgttcgtgttcttcaaccaccccaagggcagagacaacatcatcgacctgttcctgtaccagccccagtacctgaacgccatccagaccatgtgcccccacatcctgagatacctgaccaccgccgtgatcaccaacaaggacgtgagaaagagaagacaggtgctgaaggacctggtgaaggtgatccagcaggagagctacacctacaaggaccccatcaccgagttcgtggagtgcctgtacgtgaacttcgacttcgacggcgcccagaagaagctgagagagtgcgagagcgtgctggtgaacgacttcttcctggtggcctgcctggaggacttcatcgagaacgccagactgttcatcttcgagaccttctgcagaatccaccagtgcatcagcatcaacatgctggccgacaagctgaacatgacccccgaggaggccgagagatggatcgtgaacctgatcagaaacgccagactggacgccaagatcgacagcaagctgggccacgtggtgatgggcaacaacgccgtgagcccctaccagcaggtgatcgagaagaccaagagcctgagcttcagaagccagatgctggccatgaacatcgagaagaagctgaaccagaacagcagaagcgaggcccccaactgggccacccaggacagcggcttctactag

SEQ ID NO: 118968 - DNA, 1338 bp, Artificial Sequence
  derived and/or modified sequence
atggctgaatatgatcttacaacacgcatcgcccacttcttggatcgccatttagtcttcccgttgttggaattcctgtctgtgaaagaaatctacaatgaaaaggagttgctacagggcaagctggatctgctgtccgacacaaatatggtggacttcgcaatggatgtctacaaaaatctgtactcagacgacattccacacgctctccgcgaaaagcggactaccgtggtggctcaactcaagcagctgcaggctgaaacagaacccattgtaaagatgttcgaggacccagaaactacccgccagatgcaatccacacgcgatggacgaatgctctttgactaccttgcagacaagcatggttttagacaggagtacctggacaccctttacaggtatgccaagttccagtacgagtgtgggaactactccggggctgcagaatacttgtatttctttcgcgtgctcgtgccggcaactgatcgcaatgcgctttcgtcactctggggcaagcttgcctcggaaatacttatgcagaactgggatgcagccatggaagaccttactcgcctgaaagaaacaatcgacaataatagcgtttccagccccctccaaagcctgcaacagagaacctggttgatacactggagcctgtttgtgttcttcaatcaccctaagggcagagataatattatcgacttattcctgtaccagccccaatatctgaacgccatccagactatgtgcccacatatcttgcgctaccttacgaccgctgttattacgaacaaagacgtcaggaaaaggcggcaagttttgaaagacctcgttaaggtgatccaacaggaatcttacacatataaggatcccatcacagagtttgtggagtgtctctacgtgaatttcgactttgacggcgcccaaaagaagctccgggagtgcgagtctgtcctcgtcaatgacttcttcctggtggcgtgccttgaagatttcatcgaaaatgcccggttgtttatctttgagacattttgccgcatccaccagtgcattagtatcaatatgctggccgacaagttaaacatgactcccgaagaggcggagcgatggatagtaaacctgatccggaacgcacgtttagatgccaagatcgactctaaactcgggcacgtggtgatgggcaataacgcagtgtcaccatatcaacaggtcatagaaaagaccaaatccctgtcttttcgcagccagatgctagcaatgaatattgagaagaaactcaaccagaactctcggtctgaagcacctaattgggccacccaggatagcggcttttattag

SEQ ID NO: 118969 - DNA, 1338 bp, Artificial Sequence
  derived and/or modified sequence
atggccgagtatgacctgaccacccgcatcgcccacttcctggacagacacctggtgttccccctgctggagttcctgtctgtgaaggagatctacaatgagaaggagctgctgcagggcaagctggacctgctgagtgacaccaacatggtggactttgccatggatgtgtacaagaacctgtacagtgatgacatcccccacgccctgcgggagaagaggaccaccgtggtggcccagctgaagcagctgcaggccgagacagagcccatcgtgaagatgtttgaggaccctgagaccacccggcagatgcagagcaccagagatggccgcatgctgtttgactacctggccgacaagcacggcttccggcaggagtacctggacaccctgtaccgctatgccaagttccagtatgaatgtggcaactacagcggggctgctgagtacctgtacttcttccgggtgctggtgcctgccacagacagaaatgccctgagcagcctgtggggcaagctggccagcgagatcctgatgcagaactgggatgctgccatggaggacctgacccggctgaaggagaccatcgacaacaacagcgtgagcagccccctgcagagcctgcagcagaggacctggctgatccactggagcctgtttgtgttcttcaaccaccccaagggccgggacaacatcatcgacctcttcctgtaccagccccagtacctgaatgccatccagaccatgtgcccccacatcctgcgctacctgaccacagctgtgatcaccaacaaggatgtgaggaagaggcggcaggtgctgaaggacctggtgaaggtgatccagcaggagagctacacctacaaggaccccatcacagaatttgtggagtgcctgtatgtgaactttgattttgatggagcccagaagaagctgcgggagtgtgagagcgtgctggtgaatgacttcttcctggtggcctgcctggaggacttcattgaaaatgcccggctcttcatctttgagaccttctgccgcatccaccagtgcatcagcatcaacatgctggccgacaagctgaacatgaccccagaggaggccgagcgctggatcgtgaacctgatcagaaatgcccggctggatgccaagattgacagcaagctgggccacgtggtgatgggcaacaatgctgtgagcccctaccagcaggtgattgagaagaccaagagcctgtccttccgcagccagatgctggccatgaacatcgagaagaagctgaaccagaacagccgctctgaggcccccaactgggccacccaggacagcggcttctactag

SEQ ID NO: 118970 - DNA, 1338 bp, Artificial Sequence
  derived and/or modified sequence
atggccgagtacgacctgaccacccggatcgcccacttcctggaccgccacctagtgtttccgttgctggagtttcttagcgtgaaggaaatttataatgaaaaagagctcctccaggggaagctggatctgctgtctgatacgaatatggtggactttgctatggatgtctacaaaaacctgtattctgacgacattccacacgcactcagggagaagagaactactgtagtggcacagcttaagcagctgcaggccgaaacggagcccatcgttaaaatgtttgaggaccccgagaccactagacagatgcagtccacgagagatggccgtatgttgtttgactatctggctgacaaacacggtttcagacaggagtacctagacaccctctaccgctacgcgaagtttcaatatgagtgcggtaactactccggtgcagccgagtacttgtatttttttagggtcctggtacctgccactgatcgtaacgccctttccagcctgtgggggaaactggcaagcgaaatcctgatgcagaattgggatgcagcaatggaggacctgacgagactgaaggaaacaattgacaataacagcgtctccagcccgttgcagtccctacagcagcgcacctggcttatccactggtccctcttcgttttttttaaccaccccaagggtcgtgacaacattattgacctcttcttataccagccccagtatctcaacgcgatccagaccatgtgccctcatatcctgaggtatctgacaaccgcggtcatcacaaataaagacgtgcgtaagagaaggcaggttctgaaagatctggtgaaggtaatccagcaggagtcctacacctataaagacccaatcacagagttcgtcgagtgcctttacgtgaatttcgactttgacggggcacaaaagaagctcagggaatgcgagagtgtactagttaacgatttctttctggttgcctgcctcgaggatttcatcgagaacgccagactttttatattcgagactttctgcaggatccatcagtgtatctccatcaacatgttggcggataagttgaatatgactccagaggaggcagagcgatggatcgtgaatctgattcggaatgctagactcgatgcaaaaattgattcgaaactggggcatgttgtaatggggaacaatgctgtcagcccgtaccagcaggtgattgaaaaaacaaagtctctgtccttcaggtctcagatgctggccatgaatatagaaaagaagctgaatcaaaattcaagaagcgaggctcccaattgggctactcaagattccggcttctactag

SEQ ID NO: 118971 - DNA, 1338 bp, Artificial Sequence
  derived and/or modified sequence
atggcagagtatgatctgacgactcgtatcgcccacttcctggaccgacacctcgttttccccctcctggagtttctgtcagtcaaggagatctataatgaaaaggagctgctgcagggcaaactcgacctgctctcggacacaaacatggtggacttcgctatggatgtgtataagaacttatattcagatgacatccctcacgccctccgggaaaagaggacaaccgtcgtagcccagttgaagcaactgcaggccgagactgagcctatcgtaaaaatgtttgaggatcctgaaaccacaaggcagatgcaatctacgcgtgatgggaggatgttgttcgactacctggccgacaagcatggcttccgccaagaatacctggatactctgtataggtacgctaagttccagtacgaatgtggaaactattccggagcggctgaatacctctattttttcagggtgctggtgcccgctaccgacaggaatgctttaagttctctatggggcaaactggctagcgagatccttatgcaaaactgggatgcagctatggaggatctaacacggcttaaggaaaccatcgataacaacagcgtgtctagcccactacagtccttacagcagcggacatggctgatccactggagtctttttgtcttcttcaaccaccccaagggacgagacaacatcatcgatcttttcctctaccaaccccaatatctaaatgctatccagaccatgtgtccccatattcttcgatacttaacgacagctgttattacaaataaggatgtcaggaaacgcaggcaagtgctgaaagacttggtcaaggtgatacagcaggagagctacacctataaagaccccataaccgagttcgtcgagtgcctgtacgtaaatttcgattttgatggagcacaaaagaagctgcgggaatgtgaaagcgtcctggtgaacgactttttccttgtcgcgtgcctcgaagacttcattgagaacgcccgactttttatattcgagacgttttgtaggattcaccaatgtatttctattaatatgctggccgacaagctcaacatgaccccagaggaggccgaaaggtggattgttaatctcatcagaaatgctagactggacgctaagatcgattctaaactgggccacgtcgtgatgggcaataacgccgtgtcaccttatcagcaggtgattgagaaaactaagtccctgtcatttaggtctcagatgcttgccatgaatatcgagaagaaactgaatcagaattctcggagcgaggcgccaaattgggcaacccaggactctggcttttactag

SEQ ID NO: 118972 - DNA, 1543 bp, Artificial Sequence
  derived and/or modified sequence
tgttcgtttgtcggcgctaccaataaagttttagtgagcacagactcccttttctttggcaagatggcggagtacgacttgactactcgcatcgcgcactttttggatcggcatctagtctttccgcttcttgaatttctctctgtaaaggagatatataatgaaaaggaattattacaaggtaaattggaccttcttagtgataccaacatggtagactttgctatggatgtatacaaaaacctttattctgatgatattcctcatgctttgagagagaaaagaaccacagtggttgcacaactgaaacagcttcaggcagaaacagaaccaattgtgaagatgtttgaagatccagaaactacaaggcaaatgcagtcaaccagggatggtaggatgctctttgactacctggcggacaagcatggttttaggcaggaatatttagatacactctacagatatgcaaaattccagtacgaatgtgggaattactcaggagcagcagaatatctttatttttttagagtgctggttccagcaacagatagaaatgctttaagttcactctggggaaagctggcctctgaaatcttaatgcagaattgggatgcagccatggaagaccttacacggttaaaagagaccatagataataattctgtgagttctccacttcagtctcttcagcagagaacatggctcattcactggtctctgtttgttttcttcaatcaccccaaaggtcgcgataatattattgacctcttcctttatcagccacaatatcttaatgcaattcagacaatgtgtccacacattcttcgctatttgactacagcagtcataacaaacaaggatgttcgaaaacgtcggcaggttctaaaagatctagttaaagttattcaacaggagtcttacacatataaagacccaattacagaatttgttgaatgtttatatgttaactttgactttgatggggctcagaaaaagctgagggaatgtgaatcagtgcttgtgaatgacttcttcttggtggcttgtcttgaggatttcattgaaaatgcccgtctcttcatatttgagactttctgtcgcatccaccagtgtatcagcattaacatgttggcagataaattgaacatgactccagaagaagctgaaaggtggattgtaaatttgattagaaatgcaagactggatgccaagattgattctaaattaggtcatgtggttatgggtaacaatgcagtctcaccctatcagcaagtgattgaaaagaccaaaagcctttcctttagaagccagatgttggccatgaatattgagaagaaacttaatcagaatagcaggtcagaggctcctaactgggcaactcaagattctggcttctactgaagaaccataaagaaaagatgaaaaaaaaaactatcaaagaaagatgaaataataaaactattatataaagggtgacttacattttggaaacaacatattacgtataaattttgaagaattggaataaaattgattcatttta

SEQ ID NO: 118973 - protein, 712 aa, Artificial Sequence
  derived and/or modified sequence
MAGGPGPGEPAAPGAQHFLYEVPPWVMCRFYKVMDALEPADWCQFAALIVRDQTELRLCERSGQRTASVLWPWINRNARVADLVHILTHLQLLRARDIITAWHPPAPLPSPGTTAPRPSSIPAPAEAEAWSPRKLPSSASTFLSPAFPGSQTHSGPELGLVPSPASLWPPPPSPAPSSTKPGPESSVSLLQGARPFPFCWPLCEISRGTHNFSEELKIGEGGFGCVYRAVMRNTVYAVKRLKENADLEWTAVKQSFLTEVEQLSRFRHPNIVDFAGYCAQNGFYCLVYGFLPNGSLEDRLHCQTQACPPLSWPQRLDILLGTARAIQFLHQDSPSLIHGDIKSSNVLLDERLTPKLGDFGLARFSRFAGSSPSQSSMVARTQTVRGTLAYLPEEYIKTGRLAVDTDTFSFGVVVLETLAGQRAVKTHGARTKYLKDLVEEEAEEAGVALRSTQSTLQAGLAADAWAAPIAMQIYKKHLDPRPGPCPPELGLGLGQLACCCLHRRAKRRPPMTQVYERLEKLQAVVAGVPGHSEAASCIPPSPQENSYVSSTGRAHSGAAPWQPLAAPSGASAQAAEQLQRGPNQPVESDESLGGLSAALRSWHLTPSCPLDPAPLREAGCPQGDTAGESSWGSGPGSRPTAVEGLALGSSASSSSEPPQIIINPARQKMVQKLALYEDGALDSLQLLSSSSLPGLGLEQDRQGPEESDEFQS

SEQ ID NO: 118974 - DNA, 2139 bp, Artificial Sequence
  derived and/or modified sequence
atggccggcggccccggccccggcgagcccgccgcccccggcgcccagcacttcctgtacgaggtgcccccctgggtgatgtgcagattctacaaggtgatggacgccctggagcccgccgactggtgccagttcgccgccctgatcgtgagagaccagaccgagctgagactgtgcgagagaagcggccagagaaccgccagcgtgctgtggccctggatcaacagaaacgccagagtggccgacctggtgcacatcctgacccacctgcagctgctgagagccagagacatcatcaccgcctggcacccccccgcccccctgcccagccccggcaccaccgcccccagacccagcagcatccccgcccccgccgaggccgaggcctggagccccagaaagctgcccagcagcgccagcaccttcctgagccccgccttccccggcagccagacccacagcggccccgagctgggcctggtgcccagccccgccagcctgtggccccccccccccagccccgcccccagcagcaccaagcccggccccgagagcagcgtgagcctgctgcagggcgccagacccttccccttctgctggcccctgtgcgagatcagcagaggcacccacaacttcagcgaggagctgaagatcggcgagggcggcttcggctgcgtgtacagagccgtgatgagaaacaccgtgtacgccgtgaagagactgaaggagaacgccgacctggagtggaccgccgtgaagcagagcttcctgaccgaggtggagcagctgagcagattcagacaccccaacatcgtggacttcgccggctactgcgcccagaacggcttctactgcctggtgtacggcttcctgcccaacggcagcctggaggacagactgcactgccagacccaggcctgcccccccctgagctggccccagagactggacatcctgctgggcaccgccagagccatccagttcctgcaccaggacagccccagcctgatccacggcgacatcaagagcagcaacgtgctgctggacgagagactgacccccaagctgggcgacttcggcctggccagattcagcagattcgccggcagcagccccagccagagcagcatggtggccagaacccagaccgtgagaggcaccctggcctacctgcccgaggagtacatcaagaccggcagactggccgtggacaccgacaccttcagcttcggcgtggtggtgctggagaccctggccggccagagagccgtgaagacccacggcgccagaaccaagtacctgaaggacctggtggaggaggaggccgaggaggccggcgtggccctgagaagcacccagagcaccctgcaggccggcctggccgccgacgcctgggccgcccccatcgccatgcagatctacaagaagcacctggaccccagacccggcccctgcccccccgagctgggcctgggcctgggccagctggcctgctgctgcctgcacagaagagccaagagaagaccccccatgacccaggtgtacgagagactggagaagctgcaggccgtggtggccggcgtgcccggccacagcgaggccgccagctgcatcccccccagcccccaggagaacagctacgtgagcagcaccggcagagcccacagcggcgccgccccctggcagcccctggccgcccccagcggcgccagcgcccaggccgccgagcagctgcagagaggccccaaccagcccgtggagagcgacgagagcctgggcggcctgagcgccgccctgagaagctggcacctgacccccagctgccccctggaccccgcccccctgagagaggccggctgcccccagggcgacaccgccggcgagagcagctggggcagcggccccggcagcagacccaccgccgtggagggcctggccctgggcagcagcgccagcagcagcagcgagcccccccagatcatcatcaaccccgccagacagaagatggtgcagaagctggccctgtacgaggacggcgccctggacagcctgcagctgctgagcagcagcagcctgcccggcctgggcctggagcaggacagacagggccccgaggagagcgacgagttccagagctag

SEQ ID NO: 118975 - DNA, 2139 bp, Artificial Sequence
  derived and/or modified sequence
atggcaggaggacctggcccgggggaaccagccgctccaggagctcagcactttctgtatgaggtgcccccctgggtgatgtgtagattctacaaagtcatggacgctctggagcctgctgattggtgtcagtttgccgccctgattgtaagagaccaaaccgagcttcgactatgtgagaggagcggccagaggactgccagcgtgctgtggccctggatcaacaggaacgctagagttgccgacttggtacacatcctgacacaccttcagttactgcgcgcgagagacattataacggcttggcatcccccggcacctctcccgtcccctggaacaacagccccccgccccagcagcatcccagctccagccgaagccgaggcctggtctccacgaaaacttccgtcgtcggcatcaacattcctgagccctgccttccctggcagccagacgcactccggcccagaactgggcctggttccatcacccgctagcctgtggcctcctcctcctagtcctgccccatcttccacgaaacctggacccgagtctagcgtgtccttacttcaaggggcccggcctttcccattttgttggcccctttgcgagatatcgagaggaacgcacaacttctctgaggagctaaaaatcggtgaggggggctttggctgcgtttacagagcagtgatgagaaatacagtatacgccgtgaaacggttgaaggagaacgccgatctggagtggacagctgtgaaacagtcctttcttacagaagtcgagcagctgtcaaggtttagacacccgaacatcgtagactttgccggatattgcgcccagaatgggttctactgtctggtgtacgggttccttcctaatgggtctctcgaagataggcttcactgtcaaacacaggcttgtccccctttgagctggccgcaacgcctcgatatcctgcttggaactgcccgtgctatccagtttctgcaccaagattctccttctctgatccatggggacatcaaaagttccaacgtcctgctggatgaaaggctgacaccaaagctgggcgattttggattagcccgttttagcagattcgccggatcatcgccatcccagagttctatggtcgcccgcacccaaacagttcgaggaacccttgcctatctgccagaggagtacatcaaaaccggacgcttggcggtggacacagatacttttagctttggcgttgtagtccttgagactctagccggccagagagctgtgaagactcatggagctcgaactaaatacctgaaagatctagtagaagaagaggccgaggaagctggagtagccttgaggtctacccaatctaccctgcaagctggattggctgcggacgcttgggctgctcctatagcaatgcagatctacaaaaaacatcttgacccacgaccgggcccatgcccgccggagcttgggttggggctcggacagttagcctgctgttgcctgcatcggagagcaaaacggcggcctcccatgactcaggtctatgaacgtctagagaaactgcaggcagtcgtcgccggagtgcctggccattctgaggccgcaagttgtatccccccttctccacaggagaattcttacgttagcagcaccggacgcgcccacagcggtgctgcaccgtggcaaccactggcggctcctagcggcgcatcggcccaagctgctgagcaattacagagaggcccaaaccagcccgtagagtcggatgaaagcctggggggcctgtctgctgcactaagaagctggcacctgacaccctcatgtcctttggacccagctcccctgcgggaggccggctgccctcagggggacaccgctggagaaagctcctgggggtctggtcccggctctcggcctactgctgtggaggggctggccctgggtagttcggcctcatcaagtagtgagcctccccaaattattatcaaccccgctaggcagaagatggtgcagaaactggcgctctatgaggacggcgccttagactccctccagctcctctcctcctcctcactgccaggcctggggctagagcaggataggcagggccccgaggagtcagacgaattccagtcttag

SEQ ID NO: 118976 - DNA, 2139 bp, Artificial Sequence
  derived and/or modified sequence
atggccggcggccctggccctggagagcctgctgcccctggggcccagcacttcctgtatgaggtgcccccctgggtgatgtgccgcttctacaaggtgatggatgccctggagcctgctgactggtgccagtttgctgccctgattgtgcgggaccagacagagctgcggctgtgtgagaggagcggccagaggacagcctctgtgctgtggccctggatcaacagaaatgcccgggtggccgacctggtgcacatcctgacccacctgcagctgctgcgggcccgggacatcatcacagcctggcaccccccagcccccctgcccagccctggcaccacagccccccggcccagcagcatcccagccccagctgaggccgaggcctggagccccaggaagctgcccagcagcgccagcaccttcctgagccctgccttccctggcagccagacccacagcggccctgagctgggcctggtgcccagccctgccagcctgtggcccccaccacccagccctgcccccagcagcaccaagccaggccctgagagctctgtgtccctgctgcagggcgcccggcccttccccttctgctggcccctgtgtgagatcagccggggcacccacaacttcagcgaggagctgaagatcggggagggcggcttcggctgtgtgtacagagctgtgatgaggaacacagtgtatgctgtgaagaggctgaaggaaaatgctgacctggagtggacagctgtgaagcagagcttcctgacagaggtggagcagctgagccgcttccgccaccccaacatcgtggactttgctggctactgtgcccagaatggcttctactgcctggtgtatggcttcctgcccaacggcagcctggaggaccggctgcactgccagacccaggcctgcccccccctgtcctggccccagaggctggacatcctgctgggcacagcccgggccatccagttcctgcaccaggacagccccagcctcatccacggggacatcaagagcagcaatgtgctgctggatgagcggctgacccccaagctgggggactttggcctggcccgcttcagcagatttgctggcagcagccccagccagagctccatggtggcccggacccagacagtgcggggcaccctggcctacctgcctgaggagtacatcaagacaggccgcctggccgtggacacagacaccttctcctttggagtggtggtgctggagaccctggccggccagagagctgtgaagacccatggagcccggaccaagtacctgaaggacctggtggaggaggaggccgaggaggccggcgtggccctgcggagcacccagagcaccctgcaggccggcctggccgcagatgcctgggccgcccccatcgccatgcagatctacaagaagcacctggacccccggcccggcccctgccccccagagctgggcctgggcctgggccagctggcctgctgctgcctgcacagaagagccaagagaagaccacccatgacccaggtgtatgagcggctggagaagctgcaggccgtggtggccggcgtgcccggccacagcgaggccgccagctgcatcccccccagcccccaggagaacagctatgtgagcagcacaggccgggcccacagcggggccgccccctggcagcccctggccgcccccagcggggccagcgcccaggccgctgagcagctgcagaggggccccaaccagcctgtggagagtgatgagagcctgggcggcctgtctgctgccctgcgctcctggcacctgacccccagctgccccctggaccctgcccccctgcgggaggccggctgcccccagggcgacacagctggggagagctcctggggcagcggccctggcagccggcccacagctgtggagggcctggccctgggcagcagcgccagcagcagcagcgagcccccccagatcatcatcaacccagcccggcagaagatggtgcagaagctggccctgtatgaagatggagccctggacagcctgcagctgctgagcagcagcagcctgcccggcctgggcctggagcaggaccggcagggccctgaggagagtgatgagttccagagctag

SEQ ID NO: 118977 - DNA, 3666 bp, Artificial Sequence
  derived and/or modified sequence
gcgcaagatggcggcgggcccgggcaccgccccttccgccccgccgggcgtcgcacgaggccggctcgaaggggaagtgagtcagtgtccgcggacccggccggcccaggcccgcgcccgccgcggccctgagaggccccggcaggtcccggcccggcggcggcagccatggccggggggccgggcccgggggagcccgcagcccccggcgcccagcacttcttgtacgaggtgccgccctgggtcatgtgccgcttctacaaagtgatggacgccctggagcccgccgactggtgccagttcgccgccctgatcgtgcgcgaccagaccgagctgcggctgtgcgagcgctccgggcagcgcacggccagcgtcctgtggccctggatcaaccgcaacgcccgtgtggccgacctcgtgcacatcctcacgcacctgcagctgctccgtgcgcgggacatcatcacagcctggcaccctcccgccccgcttccgtccccaggcaccactgccccgaggcccagcagcatccctgcacccgccgaggccgaggcctggagcccccggaagttgccatcctcagcctccaccttcctctccccagcttttccaggctcccagacccattcagggcctgagctcggcctggtcccaagccctgcttccctgtggcctccaccgccatctccagccccttcttctaccaagccaggcccagagagctcagtgtccctcctgcagggagcccgcccctttccgttttgctggcccctctgtgagatttcccggggcacccacaacttctcggaggagctcaagatcggggagggtggctttgggtgcgtgtaccgggcggtgatgaggaacacggtgtatgctgtgaagaggctgaaggagaacgctgacctggagtggactgcagtgaagcagagcttcctgaccgaggtggagcagctgtccaggtttcgtcacccaaacattgtggactttgctggctactgtgctcagaacggcttctactgcctggtgtacggcttcctgcccaacggctccctggaggaccgtctccactgccagacccaggcctgcccacctctctcctggcctcagcgactggacatccttctgggtacagcccgggcaattcagtttctacatcaggacagccccagcctcatccatggagacatcaagagttccaacgtccttctggatgagaggctgacacccaagctgggagactttggcctggcccggttcagccgctttgccgggtccagccccagccagagcagcatggtggcccggacacagacagtgcggggcaccctggcctacctgcccgaggagtacatcaagacgggaaggctggctgtggacacggacaccttcagctttggggtggtagtgctagagaccttggctggtcagagggctgtgaagacgcacggtgccaggaccaagtatctgaaagacctggtggaagaggaggctgaggaggctggagtggctttgagaagcacccagagcacactgcaagcaggtctggctgcagatgcctgggctgctcccatcgccatgcagatctacaagaagcacctggaccccaggcccgggccctgcccacctgagctgggcctgggcctgggccagctggcctgctgctgcctgcaccgccgggccaaaaggaggcctcctatgacccaggtgtacgagaggctagagaagctgcaggcagtggtggcgggggtgcccgggcattcggaggccgccagctgcatccccccttccccgcaggagaactcctacgtgtccagcactggcagagcccacagtggggctgctccatggcagcccctggcagcgccatcaggagccagtgcccaggcagcagagcagctgcagagaggccccaaccagcccgtggagagtgacgagagcctaggcggcctctctgctgccctgcgctcctggcacttgactccaagctgccctctggacccagcacccctcagggaggccggctgtcctcagggggacacggcaggagaatcgagctgggggagtggcccaggatcccggcccacagccgtggaaggactggcccttggcagctctgcatcatcgtcgtcagagccaccgcagattatcatcaaccctgcccgacagaagatggtccagaagctggccctgtacgaggatggggccctggacagcctgcagctgctgtcgtccagctccctcccaggcttgggcctggaacaggacaggcaggggcccgaagaaagtgatgaatttcagagctgatgtgttcacctgggcagatcccccaaatccggaagtcaaagttctcatggtcagaagttctcatggtgcacgagtcctcagcactctgccggcagtgggggtgggggcccatgcccgcgggggagagaaggaggtggccctgctgttctaggctctgtgggcataggcaggcagagtggaaccctgcctccatgccagcatctgggggcaaggaaggctggcatcatccagtgaggaggctggcgcatgttgggaggctgctggctgcacagacccgtgaggggaggagaggggctgctgtgcaggggtgtggagtagggagctggctcccctgagagccatgcagggcgtctgcagcccaggcctctggcagcagctctttgcccatctctttggacagtggccaccctgcacaatggggccgacgaggcctagggccctcctacctgcttacaatttggaaaagtgtggccgggtgcggtggctcacgcctgtaatcccagcactttgggaggccaaggcaggaggatcgctggagcccagtaggtcaagaccagccagggcaacatgatgagaccctgtctctgccaaaaaattttttaaactattagcctggcgtggtagcgcacgcctgtggtcccagctgctggggaggctgaagtaggaggatcatttatgcttgggaggtcgaggctgcagtgagtcatgattgtatgactgcactccagcctgggtgacagagcaagaccctgtttcaaaaagaaaaaccctgggaaaagtgaagtatggctgtaagtctcatggttcagtcctagcaagaagcgagaattctgagatcctccagaaagtcgagcagcacccacctccaacctcgggccagtgtcttcaggctttactggggacctgcgagctggcctaatgtggtggcctgcaagccaggccatccctgggcgccacagacgagctccgagccaggtcaggcttcggaggccacaagctcagcctcaggcccaggcactgattgtggcagaggggccactacccaaggtctagctaggcccaagacctagttacccagacagtgagaagcccctggaaggcagaaaagttgggagcatggcagacagggaagggaaacattttcagggaaaagacatgtatcacatgtcttcagaagcaagtcaggtttcatgtaaccgagtgtcctcttgcgtgtccaaaagtagcccagggctgtagcacaggcttcacagtgattttgtgttcagccgtgagtcacactacatgcccccgtgaagctgggcattggtgacgtccaggttgtccttgagtaataaaaacgtatgttgcaatctcggg

SEQ ID NO: 118978 - DNA, 2139 bp, Artificial Sequence
  derived and/or modified sequence
atggccggcggccccggccccggcgagcccgccgcccccggcgcccagcacttcttatacgaggtccctccctgggttatgtgcaggttttacaaggtaatggacgccctcgagccagcagattggtgccagttcgcagcgctgatcgtccgagaccagacagagctacgcttatgtgagcgctccgggcagcgaacagcctccgtgctctggccctggatcaatcgcaacgccagggtcgctgaccttgtccacattctgactcacctgcagctgcttcgggcaagagatataattacggcttggcatccgcctgcacctttaccctcccccggcaccactgccccgcggcctagtagtattccagcacccgcagaagcagaggcttggagtcccaggaaattaccctcatccgcgagtacttttctttcccccgcctttccaggatcccaaacccattcaggccccgagctgggtttagtcccctcacccgcgtcactgtggcctcctccaccgagtccagccccttccagtacaaaaccaggtccagagtcctccgtttccttgttacagggagctaggcccttcccattctgttggccactctgcgagatctctaggggcacccataacttttccgaagagttgaaaattggagagggagggttcggttgtgtgtacagggccgtcatgcgcaatacggtgtatgcagtgaaaaggttgaaagaaaatgccgaccttgaatggacagccgttaaacagagctttttaacagaagtggagcaactaagccgctttcggcatcccaacattgtcgactttgctggctactgcgcacagaatggcttctattgtctggtatacgggttcctacctaatggatccctagaagatcggctccactgccagacacaggcctgtccacccctgagttggccccaacgcttggatatcttgctaggaaccgcaagggccatccagtttctgcaccaggacagtccttctctgatccatggcgacattaagagctctaatgttctcctggacgagcgactgaccccaaagctaggagatttcggcctcgccagatttagccgctttgccggctcctctccgtcgcagagcagcatggtggcccgcacccaaaccgtcaggggaacactggcctatctgccagaagaatatatcaagacaggcaggctcgcagtcgacacagacacatttagctttggcgtggtcgtcctggagaccctcgccgggcagcgcgccgttaaaactcacggcgcccgcacaaaatatctcaaagatctagtggaagaggaggctgaggaggccggagttgccctgcgttccacccagagcactctacaggctggcctagccgctgatgcatgggccgccccaattgcaatgcagatttacaaaaagcatctggatcccaggcccggaccctgtccacccgagctgggactgggacttgggcagctggcgtgttgttgtttacaccgtcgggccaaacgaagaccgcccatgacacaggtctacgagcggctggaaaaactgcaggccgtcgttgccggcgtgcctggacattccgaagccgcaagttgcattcctccgtctccacaagaaaattcatacgtaagctctactggcagggcacactctggcgcagctccctggcagcctttagctgcaccgtcgggggctagcgctcaagcagcggagcagttacagaggggacccaaccagccggtggagtctgatgagtcactgggcggcctcagtgccgccctcagatcttggcatctaactccctcttgccccttggatcccgccccgctgcgggaggctggctgcccacagggtgacacggccggggagtcctcctggggcagcggtcccgggtcccgccccaccgctgtcgaggggcttgctttgggctcctctgctagctcaagctccgagcccccccagataattattaacccagcaaggcagaaaatggtgcagaagctggctctgtatgaggacggtgccctggattctctccaactgctgtctagttcaagccttccaggactcgggttagaacaggatagacagggtcccgaagagagcgacgagtttcagtcatag

SEQ ID NO: 118979 - DNA, 2139 bp, Artificial Sequence
  derived and/or modified sequence
atggccggaggaccagggccaggcgaacccgcagccccaggggctcagcatttcttgtacgaggtcccaccttgggtaatgtgcagattttacaaggtaatggacgcattggaaccagctgactggtgccagttcgccgctctgatagtccgggatcagacggagctgcgactttgtgaaagatcaggacagaggacagcatctgttctctggccgtggataaaccgcaatgctcgggttgccgatctggtgcatatcttaactcacttacagttgctccgtgctcgcgacatcataaccgcctggcatcccccagcaccacttccaagtcctgggaccactgccccaagacctagctcgattcccgctcctgctgaagctgaagcctggagccccaggaagttgccatcttccgcaagtaccttcctgtctccagccttccctggtagccagacccattctggccctgagttaggactagttccaagccctgcatcgctatggccacctccaccgtccccagctcctagtagtactaaacccggtcctgaatctagcgtgtccctgttgcagggggctcgcccatttccattctgctggcccctatgcgagatatccagaggcacccacaatttttcagaggaacttaaaattggagagggcggtttcggctgcgtgtaccgcgctgtgatgcggaacacggtgtatgctgtgaagaggctgaaggagaacgcagaccttgaatggacggcggtcaagcagtcatttctgacagaagtcgagcaactgtccagatttcgacaccccaacattgtagactttgctggatattgtgcacaaaacggcttctactgccttgtgtacgggttcctgcctaacggcagcctagaggaccgcttgcactgtcagacgcaggcctgtcccccacttagctggccccagcgactggacatcctgctagggacagctcgcgctattcagttcctgcatcaggattcgcctagcttaatccatggagatatcaagtccagcaacgtcctgttggacgaacgcttaacacccaagctaggtgattttggcttggccagatttagcaggttcgccggaagttcaccatcgcagtcctctatggtggcaagaacccaaaccgtgagaggaactctcgcatacctcccagaagagtacatcaagaccgggcgactggccgtggatacagataccttttcttttggtgtcgtcgtgctggagaccctcgcgggacagcgcgctgtgaagacccacggtgccagaaccaagtacctaaaagacctagtggaagaagaagctgaggaggctggagtggccctgagaagcactcaatccacactgcaggcaggcttagccgctgacgcctgggctgccccaatagccatgcagatctacaagaaacacctcgaccccagacccggtccctgtccgccagaactgggactaggcctgggacagctcgcatgctgctgcttgcacagacgcgcaaagcggagaccgcctatgacccaagtgtacgaacgtctggagaagctccaggccgtggttgccggtgttcccggtcactcagaagcggcttcctgcatccccccaagccctcaggagaactcatacgtgagcagcacaggcagagctcattcaggggctgctccatggcagcctctagcggcaccttccggggctagtgctcaggctgctgaacaactgcagcgcggtcccaatcaaccagtggaaagtgacgaatcactgggaggactgtcggctgcactgcgcagttggcacctgacccctagctgtcccttggacccagcaccactgagagaagccggatgcccgcaaggggataccgcaggcgagtcctcatggggctccggccctgggtcccggccaaccgcagtagaggggttagccctgggatcctctgcgtcctccagctcagagccccctcagatcatcattaatcccgcacgccagaaaatggtgcaaaaactggcactgtacgaggacggcgctctagactccctgcaattgctgagctcaagcagcctacccggattgggcctggagcaagatcggcaggggcctgaggaaagtgacgaatttcagagctag

SEQ ID NO: 118980 - protein, 625 aa, Artificial Sequence
  derived and/or modified sequence
MACYIYQLPSWVLDDLCRNMDALSEWDWMEFASYVITDLTQLRKIKSMERVQGVSITRELLWWWGMRQATVQQLVDLLCRLELYRAAQIILNWKPAPEIRCPIPAFPDSVKPEKPLAASVRKAEDEQEEGQPVRMATFPGPGSSPARAHQPAFLQPPEEDAPHSLRSDLPTSSDSKDFSTSIPKQEKLLSLAGDSLFWSEADVVQATDDFNQNRKISQGTFADVYRGHRHGKPFVFKKLRETACSSPGSIERFFQAELQICLRCCHPNVLPVLGFCAARQFHSFIYPYMANGSLQDRLQGQGGSDPLPWPQRVSICSGLLCAVEYLHGLEIIHSNVKSSNVLLDQNLTPKLAHPMAHLCPVNKRSKYTMMKTHLLRTSAAYLPEDFIRVGQLTKRVDIFSCGIVLAEVLTGIPAMDNNRSPVYLKDLLLSDIPSSTASLCSRKTGVENVMAKEICQKYLEKGAGRLPEDCAEALATAACLCLRRRNTSLQEVCGSVAAVEERLRGRETLLPWSGLSEGTGSSSNTPEETDDVDNSSLDASSSMSVAPWAGAATPLLPTENGEGRLRVIVGREADSSSEACVGLEPPQDVTETSWQIEINEAKRKLMENILLYKEEKVDSIELFGP

SEQ ID NO: 118981 - DNA, 1878 bp, Artificial Sequence
  derived and/or modified sequence
atggcatgctacatctatcagctgccttcgtgggtgctggacgacctctgcagaaacatggatgccctgagcgagtgggattggatggagttcgcgtcctacgtgatcacagacctgactcaactaaggaaaattaagtctatggaacgcgtgcaaggggtctcaataacccgcgagttactctggtggtggggcatgaggcaggcaaccgtgcagcagttagtagatttgctgtgccggcttgaactctatcgcgccgctcagattatcctgaactggaaacctgcccccgaaattcggtgtccaattcctgcatttcccgactcggtgaagcctgagaaaccgcttgctgcttccgtccgcaaggcagaggacgagcaagaagagggccagcctgtgagaatggctacttttcccggacctggctcaagtcccgccagagctcaccagccagcttttttgcagcctcccgaggaagacgcaccgcattctctacgttcggacctgccgaccagttcagactcaaaagatttcagcaccagtattcccaagcaagagaaactcctttctcttgcaggggatagcttattttggagtgaggctgatgtcgttcaggccaccgatgatttcaaccaaaatcgaaaaatctcccaaggcacttttgctgatgtatatcgggggcacagacatgggaagcccttcgtgtttaagaagctacgggagacagcctgttccagtccaggttccatcgaacggtttttccaagcagaattgcagatctgcctgcggtgttgtcatccaaatgtcttacctgtgttgggcttctgtgctgcccggcagttccactcgtttatctatccctacatggctaacgggagtctgcaggatagacttcagggtcaggggggaagcgatcccctgccctggccccagagggtctccatctgtagcggactcctgtgcgccgttgaatacctgcacggtctcgagatcatccacagcaacgtgaaatcatcaaacgtgctgctggaccaaaatctgacccccaagctggcacacccgatggcccacttatgcccagttaacaagcgcagcaagtatacgatgatgaaaacccatcttctccgaacatctgctgcatacctgcccgaggacttcattagagtaggtcaacttaccaagcgtgtggatattttctcctgcggtattgtcctggctgaggttctgactgggattcccgccatggacaataacagaagtcctgtctacctgaaggatctgctgctgtctgacatcccctcttcaaccgcaagtctttgttcaaggaaaaccggcgtggagaacgtgatggctaaagaaatctgtcagaagtacctcgaaaaaggagccggccgcctacccgaagattgtgctgaggctctggcaacagctgcttgtctctgtctgaggcgacgaaatacgtctctacaagaggtctgtgggtctgttgctgccgtggaggagaggcttaggggtagagaaaccctgctcccatggagcgggctgtccgagggcacgggcagttcctctaacacgccagaagagactgacgacgttgataacagctcgcttgatgccagcagcagcatgtcggtcgccccatgggcaggggcagctacaccattattaccgaccgagaacggtgaagggcgtttaagagtgatcgtcggtcgggaggccgacagcagtagtgaagcatgtgttggcctcgagccacctcaggacgttacagagacctcttggcagatcgagatcaacgaagcgaaaaggaaactgatggaaaatatactattgtacaaggaggaaaaggttgactcaatcgagctgttcggtccatag

SEQ ID NO: 118982 - DNA, 3483 bp, Artificial Sequence
  derived and/or modified sequence
ttccccgccggtccgcccctggctagagaagccgcagcccgcagtgtccgacccagtcgtcccgcgccggagccggccccgtagcgtgccatggcctgctacatctaccagctgccctcctgggtgctggacgacctgtgccgcaacatggacgcgctcagcgagtgggactggatggagttcgcctcctacgtgatcacagacctgacccagctgcggaagatcaagtccatggagcgggtgcagggtgtgagcatcacgcgggagctgctgtggtggtggggcatgcggcaggccaccgtccagcaacttgtggacctcctgtgccgcctggagctctaccgggctgcccagatcatcctgaactggaaaccggctcctgaaatcaggtgtcccattccagccttccctgactctgtgaagccagaaaagcctttggcagcttctgtaagaaaggctgaggatgaacaggaagaggggcagcctgtgaggatggccacctttccaggcccagggtcctctccagccagagcccaccagccggcctttctccagcctcctgaagaagatgcccctcattccttgagaagcgacctccccacttcgtctgattcaaaggacttcagcacctccattcctaagcaggaaaaacttttgagcttggctggagacagccttttctggagtgaggcagacgtggtccaggcaaccgatgacttcaatcaaaaccgcaaaatcagccaggggacctttgctgacgtctacagagggcacaggcacgggaagccattcgtcttcaagaagctcagagagacagcctgttcaagtccaggatcaatcgaaagattcttccaggcagagttgcagatttgtcttagatgctgccaccccaatgtcttacctgtgctgggcttctgtgctgcaagacagtttcacagcttcatctacccctacatggcaaatggttccctacaggacagactgcagggtcagggtggctcggaccccctcccctggccccagcgtgtcagcatctgctcagggctgctctgtgccgtcgagtacctgcatggtctggagatcatccacagcaacgtcaagagctctaatgtcttgctggaccaaaatctcacccccaaacttgctcacccaatggctcatctgtgtcctgtcaacaaaaggtcaaaatacaccatgatgaagactcacctgctccggacgtcagccgcgtatctgccagaggatttcatccgggtggggcagctgacaaagcgagtggacatcttcagctgtggaatagtgttggccgaggtcctcacgggcatccctgcaatggataacaaccgaagcccggtttacctgaaggacttactcctcagtgatattccaagcagcaccgcctcgctctgctccaggaagacgggcgtggagaacgtgatggcaaaggagatctgccagaagtacctggagaagggcgcagggaggcttccggaggactgcgccgaggccctggccacggctgcctgcctgtgcctgcggaggcgtaacaccagcctgcaggaggtgtgtggctctgtggctgctgtggaagagcggctccgaggtcgggagacgttgctcccttggagtgggctttctgagggtacaggctcttcttccaacaccccagaggaaacagacgacgttgacaattccagccttgatgcctcctcctccatgagtgtggcaccctgggcaggggctgccaccccacttctccccacagagaatggggaaggaaggctgcgggtcatcgtgggaagggaggctgactcctcctctgaggcctgtgttggcctggagcctccccaggatgttacagaaacttcgtggcaaattgagatcaatgaggccaaaaggaaactgatggagaatattctgctctacaaagaggaaaaagtggacagcattgagctctttggcccctgatgaccggaacacagctgaggacccttgtcctcagttggaaagatgagcatcagatcaagaaaaaggtctgaggcagaatccaagatctgccaggaaacacacaacaaaacatctgctgtcctgggtgggagggaaacttcatttcactggaatgagttgggagagaaaggccctcagcttttagagacacaaaaatccatgaagtctcttcctttctgggctttgttagtcagagcaggggatcagaggagactgaagcagaaaccctgcacacgggcccaggatgtggctgattttgtggttccggggagtatgtgatgataatcacccccagcagattccattacctcagcagctcttgttcccccgccactggcagttctgcaatgccatagcattttccagagctaagatctctgggttgtatttgctgacagcctgcaagcttgcatgctctgaaagattttttttagtttttaatttttttgtagagatggggtctcgctttgttggcgcaatcctcccacctcagactcccaaagtgctggaattacagttgggagccactgtgcctggcctggaagactttcaacttgtgtctcagtgcagttcttgactcacctctctgggcctcaggttctacaaatgccagacacctagcgaagagctctgcaggctttccactgcctgtattggaaatcttgcaattcacataattattcagtcactgcctggtacctttatcttcccatcccactaatgttagtgttttttaatggagcttttattctgagaatatgtgtttgtctgtttgtttgttttttgagacagagtctcactttgtcacccaggctggagtgcagtggcacgatctcagctcactgcaagctctgcctctcaggttcaagtgattctcctgcctcagcctcctgagtagatgggactgtaggcacctgccactatgcctggctaatttttgtgtttttagtagagacagggtttcaccatattggccaggctggtctcgaactactgacctcgtgatctgcccgccttggcctatcaaagtgttgggattacaggcttgagccaccgcacccggccgagaatatgtgttgttatttatgactggattatgaagaatcaggagaatgcatttcatgtctgattctgctgctaattaagtcaatcatttaatttttgggacctcagtttctttgtaagtaaaataacacctgcttgttcttcatccctgggctgttgggaggaacagatgagacagtggctatagaagcacttggaaaatgcacttgtcctgttttgtaaaataaaaaggtattaaatgtgtatttctgccatgtacctaatgattattcagtgcgtatatatctgaaaagtcatgttgcaaatctttctgtgaaacagatgctattttaaattcactgggagaaatatcctatttaaagtaatctatagtaatttctttttatataataaaaatatatttgtaaagtc

SEQ ID NO: 118983 - DNA, 1878 bp, Artificial Sequence
  derived and/or modified sequence
atggcctgctacatctaccagctgcccagctgggtgctggatgacctgtgcaggaacatggatgccctgtctgagtgggactggatggagtttgccagctatgtgatcacagacctgacccagctgaggaagatcaagtccatggagcgggtgcagggcgtgtccatcacccgggagctgctgtggtggtggggcatgaggcaggccaccgtgcagcagctggtggacctgctgtgccgcctggagctgtaccgggccgcccagatcatcctgaactggaagccagcccctgagatccgctgccccatcccagccttcccagattctgtgaagccagagaagcccctggccgcctctgtgaggaaggccgaggatgagcaggaggagggccagcctgtgaggatggccaccttccctggccctggcagcagccctgcccgggcccaccagcctgccttcctgcagcccccagaagaagatgccccccacagcctgcggagtgacctgcccaccagcagtgacagcaaggacttcagcaccagcatccccaagcaggagaagctgctgagcctggccggggacagcctcttctggagcgaggctgatgtggtgcaggccacagatgacttcaaccagaacaggaagatcagccagggcacctttgctgatgtgtaccggggccaccgccacggcaagccctttgtgttcaagaagctgcgggagacagcctgcagcagccctggcagcattgagcgcttcttccaggccgagctgcagatctgcctgcgctgctgccaccccaacgtgctgcctgtgctgggcttctgtgccgcccggcagttccacagcttcatctacccctacatggccaacggcagcctgcaggaccggctgcagggccagggcggcagtgaccccctgccctggccccagagggtgtccatctgcagcggcctgctgtgtgctgtggagtacctgcacggcctggagatcatccacagcaatgtgaagagcagcaatgtgctgctggaccagaacctgacccccaagctggcccaccccatggcccacctgtgccctgtgaacaagaggagcaagtacaccatgatgaagacccacctgctgcggaccagcgctgcctacctgcctgaggacttcatccgggtgggccagctgaccaagagggtggacatcttcagctgtggcatcgtgctggccgaggtgctgaccggcatcccagccatggacaacaacagaagccctgtgtacctgaaggacctgctgctgagtgacatccccagcagcacagccagcctgtgcagcaggaagacaggagtggagaatgtgatggccaaggagatctgccagaagtacctggagaagggagctggccgcctgcctgaggactgtgccgaggccctggccacagctgcctgcctgtgcctgcggcggaggaacaccagcctgcaggaggtgtgtggctctgtggccgctgtggaggagcggctgcggggccgggagaccctgctgccctggagcggcctgtctgagggcaccggcagcagcagcaacaccccagaggagacagatgatgtggacaacagcagcctggatgccagcagctccatgtctgtggccccctgggccggggccgccacccccctgctgcccacagaaaatggagagggccgcctgcgggtcatcgtgggccgggaggccgacagcagcagcgaggcctgtgtgggcctggagcccccccaggatgtgacagagacctcctggcagatcgagatcaatgaggccaagaggaagctgatggagaacatcctgctgtacaaggaggagaaggtggacagcattgagctgtttggcccctag

SEQ ID NO: 118984 - DNA, 1878 bp, Artificial Sequence
  derived and/or modified sequence
atggcctgctacatctaccagctgcccagctgggtgctggacgacctgtgcaggaatatggacgcactaagcgaatgggactggatggaatttgcttcttatgttataaccgacttgacacaattgcgaaaaattaagtcaatggagcgagtccagggagtgtccatcactagagagctgctgtggtggtggggcatgcggcaagcaacagtgcagcagctggtcgatctcctgtgccgcctcgagctgtaccgagccgctcagattatcctgaattggaagcccgcacccgaaatacggtgtcctatccctgcctttccagactcagtgaagcctgaaaagcctttggccgctagcgtaagaaaagcggaggacgagcaggaagaggggcaaccagtcagaatggccactttcccaggtccagggagcagcccagccagagcccatcaaccggccttcctgcagcctcctgaggaggatgcccctcattccctgaggtccgacttgccaacttcgtcagattctaaagatttttccactagcatacccaagcaagaaaagctccttagccttgccggagacagccttttttggtcggaggccgacgtagtgcaggccactgacgactttaatcagaatcggaagatcagtcaggggaccttcgcagacgtgtaccgtggtcataggcatggcaagccattcgtcttcaagaagctgcgagaaaccgcctgtagctcccccggttccatcgagaggttcttccaggcggaactgcagatttgcttaaggtgttgccatccaaacgtcctgcctgtgcttgggttttgcgcagcccgacaattccactcttttatctatccatacatggccaatggttcactgcaagaccgactgcaggggcagggcggctctgatcctctcccatggcctcagcgagtgagtatctgtagcggcctgctgtgtgctgtggagtacttgcatggcctggaaattatccacagtaacgtgaaatcttcgaacgtgctactcgatcagaacctgacacccaaattagcccatcccatggcacacctgtgccccgtgaataagcgttctaagtacaccatgatgaagacccatttgttgaggacttccgctgcttatttgcccgaggatttcatacgcgttgggcaacttaccaaacgtgtagatatttttagctgcgggatcgttcttgccgaagtgcttacagggatacccgccatggataataataggtctccggtctacctgaaagacctactgctgtcagacattccgagttctaccgcctccctgtgctctcgtaagaccggagtggagaatgtcatggccaaggagatttgccagaagtacttggagaagggtgccggacgccttccggaggattgcgccgaggcacttgccactgctgcatgcttgtgtctgcggcgacgcaacacttctcttcaggaagtgtgcggcagcgttgccgccgtggaggagcgactgaggggcagggagacccttctgccatggagcggcttaagcgaaggaacggggtccagtagtaatactcccgaggagaccgatgacgttgacaacagctcattggatgctagtagctccatgtccgtggccccctgggcaggagctgctacgccactgttacctactgagaatggtgagggacggctgagggttatcgtgggtcgtgaggcagattcaagcagcgaagcctgcgtcggtctggaacctccgcaggacgtgactgaaacatcctggcagatcgagataaacgaggccaaacggaaattaatggagaatatactgttatacaaggaggagaaagtggactctattgaactgttcggcccctag

SEQ ID NO: 118985 - DNA, 1878 bp, Artificial Sequence
  derived and/or modified sequence
atggcttgttacatctatcagttgccttcttgggtactagacgatttgtgtcgcaacatggatgccctgtccgaatgggactggatggagtttgcgtcctacgtaatcaccgacctcacacagctcaggaagattaagtcgatggagagggtgcagggcgtgtccattacacgtgagttgctatggtggtggggaatgcggcaggcgacagtgcaacagctggtcgatttactatgtaggctggagttataccgggctgcccagatcattcttaactggaagcccgctccggagatccggtgccctatccctgcattccccgactcggtcaaacctgagaaacccctggcggcatcagtccgcaaggctgaagacgagcaggaagaaggtcagcctgtcaggatggccacattccccggacccggatcttcacccgcacgcgctcatcagcccgctttcctgcagcctcctgaagaggacgccccacactcactaaggtcagatcttccaacgtcatcggattccaaggatttctccaccagcatcccaaaacaggagaagctgttgtccttagctggcgactccttgttctggtcagaagcggatgtggtccaagccactgatgactttaaccagaaccggaagatttctcagggcacctttgccgatgtctacagaggccatagacacggcaaaccgttcgtcttcaagaagctgagggagaccgcctgctctagcccgggttccatcgagcggttcttccaggcagagttacaaatttgcctccgctgttgccatccaaatgtcctccctgtgctgggcttttgtgccgcaagacaatttcacagcttcatttacccctacatggcaaacgggtcactgcaagatcgcctgcaagggcagggtggctcagaccccctgccttggccccaacgcgtgagcatttgttcagggctgctgtgtgccgtcgagtacttgcatgggctggagatcattcacagcaacgtaaagtctagcaatgtgctgctggaccagaatctaacaccaaaactggcccaccctatggcccacctttgcccagtcaacaagaggtcaaagtataccatgatgaagacccatcttctgcggacaagcgcggcatatctgcccgaagactttattcgcgtgggtcagctgacaaaaagggtcgatatcttcagctgtggcatagtgctagccgaggtgttgaccggaattcccgcaatggataacaaccggagtcccgtttacctgaaagaccttctgctgagcgatatacccagttctacagcatcattatgtagtcgcaagacaggtgtggagaacgtgatggctaaggaaatctgccagaagtatcttgagaagggcgctggccgtctgcccgaggactgcgccgaagcacttgctactgcggcttgcctgtgcctaagaaggagaaatactagtttgcaggaagtgtgcggtagcgttgccgcagtcgaggaacggttaaggggcagggagactctcctaccatggagcggactctccgagggcacgggttcatctagtaacacacctgaagagaccgatgatgtagacaattcctccctggacgcctcgtcaagtatgagcgttgcgccttgggctggcgctgctacccccctgctgcccacagagaacggagaagggagactgagagtgatcgtaggaagggaagcggattccagtagcgaagcctgcgttggcttggaaccaccgcaagacgtgacagaaacttcatggcagatcgaaattaatgaagccaaaaggaagttaatggaaaatattcttttgtacaaagaagaaaaagttgattctatagagctcttcggcccatag

SEQ ID NO: 118986 - DNA, 1878 bp, Artificial Sequence
  derived and/or modified sequence
atggcctgctacatctaccagctgcccagctgggtgctggacgacctgtgcagaaacatggacgccctgagcgagtgggactggatggagttcgccagctacgtgatcaccgacctgacccagctgagaaagatcaagagcatggagagagtgcagggcgtgagcatcaccagagagctgctgtggtggtggggcatgagacaggccaccgtgcagcagctggtggacctgctgtgcagactggagctgtacagagccgcccagatcatcctgaactggaagcccgcccccgagatcagatgccccatccccgccttccccgacagcgtgaagcccgagaagcccctggccgccagcgtgagaaaggccgaggacgagcaggaggagggccagcccgtgagaatggccaccttccccggccccggcagcagccccgccagagcccaccagcccgccttcctgcagccccccgaggaggacgccccccacagcctgagaagcgacctgcccaccagcagcgacagcaaggacttcagcaccagcatccccaagcaggagaagctgctgagcctggccggcgacagcctgttctggagcgaggccgacgtggtgcaggccaccgacgacttcaaccagaacagaaagatcagccagggcaccttcgccgacgtgtacagaggccacagacacggcaagcccttcgtgttcaagaagctgagagagaccgcctgcagcagccccggcagcatcgagagattcttccaggccgagctgcagatctgcctgagatgctgccaccccaacgtgctgcccgtgctgggcttctgcgccgccagacagttccacagcttcatctacccctacatggccaacggcagcctgcaggacagactgcagggccagggcggcagcgaccccctgccctggccccagagagtgagcatctgcagcggcctgctgtgcgccgtggagtacctgcacggcctggagatcatccacagcaacgtgaagagcagcaacgtgctgctggaccagaacctgacccccaagctggcccaccccatggcccacctgtgccccgtgaacaagagaagcaagtacaccatgatgaagacccacctgctgagaaccagcgccgcctacctgcccgaggacttcatcagagtgggccagctgaccaagagagtggacatcttcagctgcggcatcgtgctggccgaggtgctgaccggcatccccgccatggacaacaacagaagccccgtgtacctgaaggacctgctgctgagcgacatccccagcagcaccgccagcctgtgcagcagaaagaccggcgtggagaacgtgatggccaaggagatctgccagaagtacctggagaagggcgccggcagactgcccgaggactgcgccgaggccctggccaccgccgcctgcctgtgcctgagaagaagaaacaccagcctgcaggaggtgtgcggcagcgtggccgccgtggaggagagactgagaggcagagagaccctgctgccctggagcggcctgagcgagggcaccggcagcagcagcaacacccccgaggagaccgacgacgtggacaacagcagcctggacgccagcagcagcatgagcgtggccccctgggccggcgccgccacccccctgctgcccaccgagaacggcgagggcagactgagagtgatcgtgggcagagaggccgacagcagcagcgaggcctgcgtgggcctggagcccccccaggacgtgaccgagaccagctggcagatcgagatcaacgaggccaagagaaagctgatggagaacatcctgctgtacaaggaggagaaggtggacagcatcgagctgttcggcccctag

SEQ ID NO: 118987 - protein, 210 aa, Artificial Sequence
  derived and/or modified sequence
MYKGRTVLQKVVGHPSCTFLYGPPDPAVRATDPQQVAFPSPAELPDQKQLRYTEELLRHVAPGLHLELRGPQLWARRMGKCKVYWEVGGPPGSASPSTPACLLPRNCDTPIFDFRVFFQELVEFRARQRRGSPRYTIYLGFGQDLSAGRPKEKSLVLVKLEPWLCRVHLEGTQREGVSSLDSSSLSLCLSSANSLYDDIECFLMELEQPA

SEQ ID NO: 118988 - protein, 503 aa, Artificial Sequence
  derived and/or modified sequence
MALAPERAAPRVLFGEWLLGEISSGCYEGLQWLDEARTCFRVPWKHFARKDLSEADARIFKAWAVARGRWPPSSRGGGPPPEAETAERAGWKTNFRCALRSTRRFVMLRDNSGDPADPHKVYALSRELCWREGPGTDQTEAEAPAAVPPPQGGPPGPFLAHTHAGLQAPGPLPAPAGDKGDLLLQAVQQSCLADHLLTASWGADPVPTKAPGEGQEGLPLTGACAGGPGLPAGELYGWAVETTPSPGPQPAALTTGEAAAPESPHQAEPYLSPSPSACTAVQEPSPGALDVTIMYKGRTVLQKVVGHPSCTFLYGPPDPAVRATDPQQVAFPSPAELPDQKQLRYTEELLRHVAPGLHLELRGPQLWARRMGKCKVYWEVGGPPGSASPSTPACLLPRNCDTPIFDFRVFFQELVEFRARQRRGSPRYTIYLGFGQDLSAGRPKEKSLVLVKLEPWLCRVHLEGTQREGVSSLDSSSLSLCLSSANSLYDDIECFLMELEQPA

SEQ ID NO: 118989 - DNA, 1972 bp, Artificial Sequence
  derived and/or modified sequence
gaaactcccgcctggccaccataaaagcgccggccctccgcttccccgcgagacgaaacttcccgtcccggcggctctggcacccagggtccggcctgcgccttcccgccaggcctggacactggttcaacacctgtgacttcatgtgtgcgcgccggccacacctgcagtcacacctgtagccccctctgccaagagatccataccgaggcagcgtcggtggctacaagccctcagtccacacctgtggacacctgtgacacctggccacacgacctgtggccgcggcctggcgtctgctgcgacaggagcccttacctcccctgttataacacctgaccgccacctaactgcccctgcagaaggagcaatggccttggctcctgagagggcagccccacgcgtgctgttcggagagtggctccttggagagatcagcagcggctgctatgaggggctgcagtggctggacgaggcccgcacctgtttccgcgtgccctggaagcacttcgcgcgcaaggacctgagcgaggccgacgcgcgcatcttcaaggcctgggctgtggcccgcggcaggtggccgcctagcagcaggggaggtggcccgccccccgaggctgagactgcggagcgcgccggctggaaaaccaacttccgctgcgcactgcgcagcacgcgtcgcttcgtgatgctgcgggataactcgggggacccggccgacccgcacaaggtgtacgcgctcagccgggagctgtgctggcgagaaggcccaggcacggaccagactgaggcagaggcccccgcagctgtcccaccaccacagggtgggcccccagggccattcctggcacacacacatgctggactccaagccccaggccccctccctgccccagctggtgacaagggggacctcctgctccaggcagtgcaacagagctgcctggcagaccatctgctgacagcgtcatggggggcagatccagtcccaaccaaggctcctggagagggacaagaagggcttcccctgactggggcctgtgctggaggcccagggctccctgctggggagctgtacgggtgggcagtagagacgacccccagccccgggccccagcccgcggcactaacgacaggcgaggccgcggccccagagtccccgcaccaggcagagccgtacctgtcaccctccccaagcgcctgcaccgcggtgcaagagcccagcccaggggcgctggacgtgaccatcatgtacaagggccgcacggtgctgcagaaggtggtgggacacccgagctgcacgttcctatacggccccccagacccagctgtccgggccacagacccccagcaggtagcattccccagccctgccgagctcccggaccagaagcagctgcgctacacggaggaactgctgcggcacgtggcccctgggttgcacctggagcttcgggggccacagctgtgggcccggcgcatgggcaagtgcaaggtgtactgggaggtgggcggacccccaggctccgccagcccctccaccccagcctgcctgctgcctcggaactgtgacacccccatcttcgacttcagagtcttcttccaagagctggtggaattccgggcacggcagcgccgtggctccccacgctataccatctacctgggcttcgggcaggacctgtcagctgggaggcccaaggagaagagcctggtcctggtgaagctggaaccctggctgtgccgagtgcacctagagggcacgcagcgtgagggtgtgtcttccctggatagcagcagcctcagcctctgcctgtccagcgccaacagcctctatgacgacatcgagtgcttccttatggagctggagcagcccgcctagaacccagtctaatgagaactccagaaagctggagcagcccacctagagctggccgcggccgcccagtctaataaaaagaactccagaaca

SEQ ID NO: 118990 - DNA, 1512 bp, Artificial Sequence
  derived and/or modified sequence
atggccctggcccccgagagagccgcccccagagtgctgttcggcgagtggctgctgggcgagatcagcagcggctgctacgagggcctgcagtggctggacgaggccagaacctgcttcagagtgccctggaagcacttcgccagaaaggacctgagcgaggccgacgccagaatcttcaaggcctgggccgtggccagaggcagatggccccccagcagcagaggcggcggccccccccccgaggccgagaccgccgagagagccggctggaagaccaacttcagatgcgccctgagaagcaccagaagattcgtgatgctgagagacaacagcggcgaccccgccgacccccacaaggtgtacgccctgagcagagagctgtgctggagagagggccccggcaccgaccagaccgaggccgaggcccccgccgccgtgccccccccccagggcggcccccccggccccttcctggcccacacccacgccggcctgcaggcccccggccccctgcccgcccccgccggcgacaagggcgacctgctgctgcaggccgtgcagcagagctgcctggccgaccacctgctgaccgccagctggggcgccgaccccgtgcccaccaaggcccccggcgagggccaggagggcctgcccctgaccggcgcctgcgccggcggccccggcctgcccgccggcgagctgtacggctgggccgtggagaccacccccagccccggcccccagcccgccgccctgaccaccggcgaggccgccgcccccgagagcccccaccaggccgagccctacctgagccccagccccagcgcctgcaccgccgtgcaggagcccagccccggcgccctggacgtgaccatcatgtacaagggcagaaccgtgctgcagaaggtggtgggccaccccagctgcaccttcctgtacggcccccccgaccccgccgtgagagccaccgacccccagcaggtggccttccccagccccgccgagctgcccgaccagaagcagctgagatacaccgaggagctgctgagacacgtggcccccggcctgcacctggagctgagaggcccccagctgtgggccagaagaatgggcaagtgcaaggtgtactgggaggtgggcggcccccccggcagcgccagccccagcacccccgcctgcctgctgcccagaaactgcgacacccccatcttcgacttcagagtgttcttccaggagctggtggagttcagagccagacagagaagaggcagccccagatacaccatctacctgggcttcggccaggacctgagcgccggcagacccaaggagaagagcctggtgctggtgaagctggagccctggctgtgcagagtgcacctggagggcacccagagagagggcgtgagcagcctggacagcagcagcctgagcctgtgcctgagcagcgccaacagcctgtacgacgacatcgagtgcttcctgatggagctggagcagcccgcctag

SEQ ID NO: 118991 - DNA, 1512 bp, Artificial Sequence
  derived and/or modified sequence
atggccttggcccctgagcgcgccgcccctagggtcctgttcggggaatggcttttaggagagatcagttcgggctgttatgagggcctgcagtggctggacgaggcccgcacctgctttagggtgccatggaagcacttcgccaggaaggatctcagcgaagccgacgcaaggatcttcaaggcctgggcagtcgccagggggaggtggcccccatcctcgcgaggcggaggcccgcctcccgaggccgaaaccgccgagcgggcaggatggaagacaaattttcgttgcgccctcaggtctactcggagattcgtaatgctcagagacaatagcggcgatcctgccgatccgcacaaggtatatgccctcagtagggagctgtgttggagagaaggccccggcacagaccaaaccgaagctgaagctcccgccgcagtaccacctccacaaggcggcccccccgggccgtttcttgcacatacccatgcgggtttacaggccccagggccgctacccgcccctgctggtgataagggggaccttcttcttcaggcggttcagcaatcttgcttggctgaccacctcctgacagcctcttggggtgcagacccagtgccaactaaggcgccaggcgaggggcaggaaggcctaccattgacaggcgcgtgcgccggaggccctggcctcccggccggggagctctacgggtgggcagtggaaaccacgcctagccccggtcctcagcccgcggctctaacgactggcgaggctgctgcccccgagtcgccacaccaggctgaaccttatctgtcaccctcaccatctgcatgcactgcagtgcaggaacccagccctggtgccctggacgttaccatcatgtacaaaggacgcactgtgctccagaaggttgtgggacaccctagttgtaccttcctgtatgggcctccagaccccgctgtgcgtgcgacggatccgcagcaagtcgccttcccatcacctgccgaactgccagatcagaagcagctgcgctatactgaggagctattacgacatgttgctccgggacttcacctggagctgcgcgggcctcaactgtgggctcggcggatgggaaagtgcaaagtctactgggaagtcggcggcccgccagggtcagcctccccctctacccctgcatgcctgttaccgcgcaactgtgacaccccaatctttgacttccgcgtgttttttcaagagctggtagagttccgggcacgacagagaaggggtagccctcggtacacaatttacctgggatttggccaagatttatcggctgggcgcccaaaggagaaatctctggtgctcgtgaaactggagccttggttgtgtagggtacacctggaggggactcagagagaaggcgtgtcctccctggactctagtagcttgtcactatgtctctcttccgcaaattcgctgtatgacgatatcgagtgcttcttaatggagctagagcagcccgcatag

SEQ ID NO: 118992 - DNA, 1968 bp, Artificial Sequence
  derived and/or modified sequence
gaaactcccgcctggccaccataaaagcgccggccctccgcttccccgcgagacgaaacttcccgtcccggcggctctggcacccagggtccggcctgcgccttcccgccaggcctggacactggttcaacacctgtgacttcatgtgtgcgcgccggccacacctgcagtcacacctgtagccccctctgccaagagatccataccgaggcagcgtcggtggctacaagccctcagtccacacctgtggacacctgtgacacctggccacacgacctgtggccgcggcctggcgtctgctgcgacaggagcccttacctcccctgttataacacctgaccgccacctaactgcccctgcagaaggagcaatggccttggctcctgagagggcagccccacgcgtgctgttcggagagtggctccttggagagatcagcagcggctgctatgaggggctgcagtggctggacgaggcccgcacctgtttccgcgtgccctggaagcacttcgcgcgcaaggacctgagcgaggccgacgcgcgcatcttcaaggcctgggctgtggcccgcggcaggtggccgcctagcagcaggggaggtggcccgccccccgaggctgagactgcggagcgcgccggctggaaaaccaacttccgctgcgcactgcgcagcacgcgtcgcttcgtgatgctgcgggataactcgggggacccggccgacccgcacaaggtgtacgcgctcagccgggagctgtgctggcgagaaggcccaggcacggaccagactgaggcagaggcccccgcagctgtcccaccaccacagggtgggcccccagggccattcctggcacacacacatgctggactccaagccccaggccccctccctgccccagctggtgacaagggggacctcctgctccaggcagtgcaacagagctgcctggcagaccatctgctgacagcgtcatggggggcagatccagtcccaaccaaggctcctggagagggacaagaagggcttcccctgactggggcctgtgctggaggcccagggctccctgctggggagctgtacgggtgggcagtagagacgacccccagccccgggccccagcccgcggcactaacgacaggcgaggccgcggccccagagtccccgcaccaggcagagccgtacctgtcaccctccccaagcgcctgcaccgcggtgcaagagcccagcccaggggcgctggacgtgaccatcatgtacaagggccgcacggtgctgcagaaggtggtgggacacccgagctgcacgttcctatacggccccccagacccagctgtccgggccacagacccccagcaggtagcattccccagccctgccgagctcccggaccagaagcagctgcgctacacggaggaactgctgcggcacgtggcccctgggttgcacctggagcttcgggggccacagctgtgggcccggcgcatgggcaagtgcaaggtgtactgggaggtgggcggacccccaggctccgccagcccctccaccccagcctgcctgctgcctcggaactgtgacacccccatcttcgacttcagagtcttcttccaagagctggtggaattccgggcacggcagcgccgtggctccccacgctataccatctacctgggcttcgggcaggacctgtcagctgggaggcccaaggagaagagcctggtcctggtgaagctggaaccctggctgtgccgagtgcacctagagggcacgcagcgtgagggtgtgtcttccctggatagcagcagcctcagcctctgcctgtccagcgccaacagcctctatgacgacatcgagtgcttccttatggagctggagcagcccgcctagaacccagtctaatgagaactccagaaagctggagcagcccacctagagctggccgcggccgcccagtctaataaaaagaactccag

SEQ ID NO: 118993 - DNA, 1512 bp, Artificial Sequence
  derived and/or modified sequence
atggccctggcccctgagcgggccgccccccgggtgctgtttggagagtggctgctgggggagatcagcagcggctgctatgagggcctgcagtggctggatgaggcccggacctgcttccgggtgccctggaagcactttgccaggaaggacctgtctgaggctgatgcccgcatcttcaaggcctgggccgtggcccggggccgctggccacccagcagccggggcggcggccccccacctgaggccgagacagctgagagagctggctggaagaccaacttccgctgtgccctgcggagcaccaggagatttgtgatgctgcgggacaacagcggggaccctgctgacccccacaaggtgtatgccctgagccgggagctgtgctggagggagggccctggaacagaccagacagaagctgaggccccagctgctgtgcccccaccccagggcggccccccaggccccttcctggcccacacccacgccggcctgcaggcccctggccccctgcctgccccagctggggacaagggggacctgctgctgcaggccgtgcagcagagctgcctggccgaccacctgctgacagcctcctggggcgctgaccctgtgcccaccaaggcccctggagagggccaggagggcctgcccctgactggagcctgtgccggcggccctggcctgcctgctggggagctgtatggctgggccgtggagaccacccccagccctggcccccagcctgctgccctgaccactggagaggccgccgcccctgagagcccccaccaggccgagccctacctgagccccagccccagcgcctgcacagctgtgcaggagcccagccctggggccctggatgtgaccatcatgtacaagggccgcacagtgctgcagaaggtggtgggccaccccagctgcaccttcctgtatggccccccagaccctgctgtgcgggccacagacccccagcaggtggccttccccagccctgctgagctgcctgaccagaagcagctgcgctacacagaggagctgctgcggcacgtggcccctggcctgcacctggagctgcggggcccccagctgtgggcccggaggatgggcaagtgcaaggtgtactgggaggtgggcggccccccaggcagcgccagccccagcaccccagcctgcctgctgcccaggaactgtgacacccccatctttgacttccgggtcttcttccaggagctggtggagttccgggcccggcagaggcggggcagcccccgctacaccatctacctgggcttcggccaggacctgtctgctggccggcccaaggagaagagcctggtgctggtgaagctggagccctggctgtgccgggtgcacctggagggcacccagcgggagggcgtgagcagcctggacagcagcagcctgagcctgtgcctgagcagcgccaacagcctgtatgatgacatcgagtgcttcctgatggagctggagcagcctgcctag

SEQ ID NO: 118994 - DNA, 1512 bp, Artificial Sequence
  derived and/or modified sequence
atggccctggcccccgagcgggccgccccccgggtgctgttcggcgaatggcttttgggcgaaataagcagcggatgctacgagggcctgcagtggctcgatgaagcccggacctgttttcgcgtgccgtggaagcatttcgccagaaaagacttaagtgaagccgacgccaggatcttcaaggcctgggctgttgcacgtgggcgctggccaccctctagccgcggtggcggacccccccctgaagctgagaccgctgagcgtgctggatggaagactaatttcaggtgtgctcttagatcgacacgtcgctttgtgatgctccgcgacaactccggagaccctgctgacccgcataaggtgtatgccctctcacgcgagctctgttggcgagaggggcccgggaccgaccaaacagaagcagaagctccggctgcagtcccaccaccccagggaggtccccccgggcccttcctcgcccatacgcacgcaggcctccaagcccctgggcctctccccgcccctgcaggtgacaagggcgatctgctgctccaggcagtgcagcagagctgccttgctgaccacctgctgaccgcctcttggggggctgaccctgttcccacgaaagcaccaggcgaggggcaggagggactgcccctaaccggcgcgtgtgctgggggccctggactcccagcaggagaactgtatggctgggcagtggagactacaccttctcccgggcctcagccagctgccctgacaaccggcgaagccgcagcacctgagtcacctcatcaggctgagccctatctcagtcctagccctagcgcctgtacagccgtccaagaaccttctcctggggcgctggatgtaactataatgtacaaggggagaactgtgctgcagaaggtggttggccaccccagctgcactttcctatacggcccacccgaccctgcagtgagagccactgacccccagcaagtggcttttccctccccggctgaactgccagaccagaagcaactgagatatactgaggaattgctgaggcatgtcgccccaggactccacttggagctgcgagggcctcaactctgggcccgtcggatggggaaatgcaaagtgtattgggaggtggggggtcctcccggatcagccagcccaagcacccccgcctgtctcctgcctcgcaattgtgatactccaattttcgatttccgggtcttcttccaggaacttgtggaatttcgggcccggcaaaggcgggggtcaccccggtacactatctatctcggcttcgggcaggacttaagcgcaggtagacccaaggagaaaagcctcgtcctggtaaagctcgagccctggctgtgtcgagtacacttagagggcacgcaaagagagggagttagttcactcgatagtagttccctttccctctgcctgtcttccgctaatagtttgtacgacgacatcgaatgcttcctcatggagttggaacagccagcatag

SEQ ID NO: 118995 - DNA, 1512 bp, Artificial Sequence
  derived and/or modified sequence
atggcccttgcccctgaaagagctgccccacgggtcttattcggagaatggctactgggagagatcagtagcggatgttacgagggcctgcagtggctcgacgaagcaaggacctgttttcgggtgccttggaagcactttgccagaaaggacctgtctgaagctgacgcaaggatatttaaagcatgggccgtagctcggggtcgatggcccccttctagtcgaggaggcggaccccctcctgaagctgagactgctgagagggctggctggaaaaccaatttccggtgtgctctacgcagtacccggcgattcgttatgttgagagataacagtggggaccctgctgaccctcacaaggtatacgcgcttagcagggaattgtgctggagagaaggacctggaacagaccagacggaagccgaggccccagctgccgtgcccccaccacaaggcggacctcccggtccattcctggcccacacgcatgctggcctccaggcccctgggccactccccgctcctgccggtgataagggcgacctcctgctgcaggctgtccaacagtcttgcctggccgatcatctcctgaccgcctcttggggcgctgatccagtcccgaccaaggctcctggcgagggccaggaggggctccccttaacgggagcctgtgcgggtgggccagggctgcctgccggtgagctttacggttgggcggtcgagactacgccgtctcctggtcctcagcctgcagccctcaccaccggagaagcggcagctcccgagtcgcctcatcaggccgagccttacttatcaccgagcccctcagcctgtactgcggtccaggagccatcccctggagccctagacgtgacaatcatgtataaaggcaggaccgtattgcagaaagtggtgggccatccctcttgcaccttcttgtacggccctccggaccccgctgtaagggcaactgacccccagcaagtggcttttccttcacccgctgagttgcccgatcagaaacagctgcgctacacagaagagctactccggcacgtcgctcctggcctccacctggaattaagaggacctcaactctgggccaggaggatgggaaagtgcaaggtctactgggaggtggggggtccgccaggctcggcgtctccctccacccccgcttgccttttgcctagaaattgcgatacccccatctttgactttcgcgtgttctttcaggaattggtggaattcagagcccgtcagcgccgtgggtccccacgctatactatttatctgggatttgggcaggacctgtctgccggaaggcctaaggagaaatccctagtcttggtcaaactggaaccgtggctgtgccgtgttcatttggaaggaacccagagagagggggtgtcctcgctggactctagttctctgtctctctgcctgtcaagtgcaaactcactgtacgacgatatcgaatgctttttaatggagctcgagcagcccgcatag

SEQ ID NO: 118996 - protein, 893 aa, Artificial Sequence
  derived and/or modified sequence
MEPPLPVGAQPLATVEGMEMKGPLREPCALTLAQRNGQYELIIQLHEKEQHVQDIIPINSHFRCVQEAEETLLIDIASNSGCKIRVQGDWIRERRFEIPDEEHCLKFLSAVLAAQKAQSQLLVPEQKDSSSWYQKLDTKDKPSVFSGLLGFEDNFSSMNLDKKINSQNQPTGIHREPPPPPFSVNKMLPREKEASNKEQPKVTNTMRKLFVPNTQSGQREGLIKHILAKREKEYVNIQTFRFFVGTWNVNGQSPDSGLEPWLNCDPNPPDIYCIGFQELDLSTEAFFYFESVKEQEWSMAVERGLHSKAKYKKVQLVRLVGMMLLIFARKDQCRYIRDIATETVGTGIMGKMGNKGGVAVRFVFHNTTFCIVNSHLAAHVEDFERRNQDYKDICARMSFVVPNQTLPQLNIMKHEVVIWLGDLNYRLCMPDANEVKSLINKKDLQRLLKFDQLNIQRTQKKAFVDFNEGEIKFIPTYKYDSKTDRWDSSGKCRVPAWCDRILWRGTNVNQLNYRSHMELKTSDHKPVSALFHIGVKVVDERRYRKVFEDSVRIMDRMENDFLPSLELSRREFVFENVKFRQLQKEKFQISNNGQVPCHFSFIPKLNDSQYCKPWLRAEPFEGYLEPNETVDISLDVYVSKDSVTILNSGEDKIEDILVLHLDRGKDYFLTISGNYLPSCFGTSLEALCRMKRPIREVPVTKLIDLEKSLLQMVPLDEGASERPLQVPKEIWLLVDHLFKYACHQEDLFQTPGMQEELQQIIDCLDTSIPETIPGSNHSVAEALLIFLEALPEPVICYELYQRCLDSAYDPRICRQVISQLPRCHRNVFRYLMAFLRELLKFSEYNSVNANMIATLFTSLLLRPPPNLMARQTPSDRQRAIQFLLGFLLGSEED

SEQ ID NO: 118997 - DNA, 2682 bp, Artificial Sequence
  derived and/or modified sequence
atggagccaccactgcccgtgggtgcacagcccctggccaccgtggagggcatggaaatgaagggtccacttagggaaccttgtgctttaactctggctcagcggaacggccagtacgagctgataattcaattgcatgaaaaagagcagcacgtgcaggacattatccccatcaatagccactttcgatgcgtgcaggaagccgaagagaccttactcatcgatatcgcctcaaactctggctgtaagatccgtgtccaaggcgactggatcagggaacgtcggtttgagattcccgatgaggagcactgtcttaaattcctgtccgctgtgttagcagctcagaaagctcaatcccagctgctcgtcccagaacaaaaggattcctcctcatggtaccagaaactggacacaaaagataaaccttccgtgttcagcggactgttggggttcgaggataatttcagctccatgaatcttgacaagaaaattaattcacagaaccagccaacgggcatccaccgggagcctccccccccccctttttctgtaaacaagatgctgcctagagagaaagaagcatccaacaaagaacagcctaaggtaactaacaccatgcgcaaactctttgtgccaaacacacaaagcggtcagagggagggtctgattaagcacatactcgccaagcgcgaaaaggagtacgtgaacatccagaccttccggttcttcgtgggaacgtggaacgtgaatggtcaaagcccagattcgggccttgagccctggttgaactgcgatcctaatcccccagatatctactgcataggatttcaggaactggacctcagcaccgaggccttcttttactttgagtctgtgaaggagcaggaatggagcatggcagttgagcgtgggctccactcaaaagcgaaatataagaaggtacagttggtgcgcctggtaggcatgatgcttctgattttcgcccgcaaggaccagtgtaggtatattagggatatagccaccgagacagtcggaaccggcatcatggggaagatgggtaacaaaggcggcgtggctgtcagatttgtattccacaacacaacattttgcatagtgaacagtcacttggccgcccacgttgaagactttgagcgtcgaaaccaggactacaaagacatctgcgcgaggatgagcttcgtcgtgcctaaccaaactctcccgcagctgaacataatgaagcatgaggtggtgatctggctgggagacttgaattaccgcctatgcatgcccgatgcaaatgaggtgaaatcactgatcaacaaaaaggatctgcaaaggcttctcaaattcgatcagttgaatattcaacgaactcagaagaaggccttcgtagacttcaatgaaggcgaaattaagttcatacccacgtataagtacgacagcaaaaccgatcggtgggatagtagtggcaagtgccgggttccagcttggtgcgatagaatcctgtggcgcgggaccaatgtaaaccagctcaattatcgatcccacatggaactgaagacctctgatcacaaacccgtttctgctttgtttcacatcggggtgaaagtggtcgacgaacgacgctaccgcaaggtgtttgaggacagcgtgagaattatggatcggatggaaaacgactttctgccaagccttgagttatccaggcgtgagttcgtgtttgaaaatgttaaatttagacagttacagaaagaaaaatttcagatctctaacaacggacaggtaccctgccacttctcctttattcctaagctgaatgactctcagtattgcaaaccatggttgcgagctgagccatttgaaggctatctagagccgaacgaaacggtggacatcagtttggacgtttatgtgtcaaaggattccgttaccatcctcaactcaggggaagacaagatagaggatattctggtgctgcatttagaccgcggaaaagactattttctgaccattagcggcaattatctaccaagctgcttcggaacgagtctcgaggccctgtgcaggatgaagaggccaatccgggaagtgcctgtgacgaagctgatcgatctggagaaatccttacttcagatggtacctttggacgagggtgccagcgaaaggcctttacaggtccccaaggagatttggttattggttgatcacctgttcaaatatgcttgtcatcaggaggacttatttcaaacccctggcatgcaggaggaactccagcagattattgactgcctggacaccagtatcccagaaacgatacccggaagtaaccactccgtagcagaggctcttctgatctttctggaagcactcccagagccagtcatatgctacgaactgtaccagagatgtctggacagtgcttacgacccgagaatctgtcgtcaggttataagtcagctgccaagatgtcataggaatgtatttaggtacctgatggcatttttacgcgagttactgaagttctccgaatacaatagcgtcaatgcaaatatgattgctacactgttcacgtctctgctgctcagacctcctccgaacctgatggccaggcagacacctagcgaccggcagcgcgctatccagtttctcctgggctttctgttggggagcgaggaggattag

SEQ ID NO: 118998 - DNA, 2682 bp, Artificial Sequence
  derived and/or modified sequence
atggagccccccctgcctgtgggcgcccagcccctggccaccgtggagggcatggagatgaagggccccctgcgggagccctgtgccctgaccctggcccagagaaatggccagtatgagctgatcatccagctgcacgagaaggagcagcacgtgcaggacatcatccccatcaacagccacttccgctgtgtgcaggaggccgaggagaccctgctgattgacatcgccagcaacagcggctgcaagatccgggtgcagggcgactggatccgggagaggagatttgagatcccagatgaggagcactgcctgaagttcctgtctgctgtgctggccgcccagaaggcccagagccagctgctggtgcctgagcagaaggacagcagctcctggtaccagaagctggacaccaaggacaagcccagcgtcttcagcggcctgctgggctttgaggacaacttcagctccatgaacctggacaagaagatcaacagccagaaccagcccaccggcatccaccgggagcccccacctccacccttctctgtgaacaagatgctgccccgggagaaggaggccagcaacaaggagcagcccaaggtgaccaacaccatgaggaagctgtttgtgcccaacacccagagcggccagcgggagggcctcatcaagcacatcctggccaagcgggagaaggagtatgtgaacatccagaccttccgcttctttgtgggcacctggaatgtgaatggccagagcccagacagcggcctggagccctggctgaactgtgaccccaaccccccagacatctactgcatcggcttccaggagctggacctgagcacagaggccttcttctactttgaatctgtgaaggagcaggagtggagcatggctgtggagcggggcctgcacagcaaggccaagtacaagaaggtgcagctggtgcggctggtgggcatgatgctgctgatctttgccaggaaggaccagtgccgctacatccgggacatcgccacagaaacagtgggcaccggcatcatgggcaagatgggcaacaagggcggcgtggccgtgcgctttgtgttccacaacaccaccttctgcatcgtgaacagccacctggccgcccacgtggaggactttgaaagaagaaaccaggactacaaggacatctgtgccaggatgagctttgtggtgcccaaccagaccctgccccagctgaacatcatgaagcatgaggtggtgatctggctgggggacctgaactaccgcctgtgcatgccagatgccaatgaggtgaagagcctcatcaacaagaaggacctgcagaggctgctgaagtttgaccagctgaacatccagaggacccagaagaaggcctttgtggacttcaatgaaggagagatcaagttcatccccacctacaagtatgacagcaagacagaccgctgggacagcagtggaaaatgtcgggtgcctgcctggtgtgaccgcatcctgtggaggggcaccaacgtgaaccagctgaactaccgcagccacatggagctgaagaccagtgaccacaagcctgtgtctgccctcttccacatcggcgtgaaggtggtggatgaaagacgctacaggaaggtgtttgaggacagcgtgcgcatcatggacaggatggagaatgacttcctgcccagcctggagctgagcagaagagaatttgtgtttgaaaatgtgaagttccggcagctgcagaaggagaagttccagatcagcaacaacggccaggtgccctgccacttctccttcatccccaagctgaatgacagccagtactgcaagccctggctgcgggcagagccctttgagggctacctggagcccaatgaaacagtggacatcagcctggatgtgtatgtgtccaaggacagcgtgaccatcctgaacagcggggaggacaagattgaggacatcctggtgctgcacctggaccggggcaaggactacttcctgaccatcagcggcaactacctgcccagctgcttcggcaccagcctggaggccctgtgcaggatgaagaggcccatccgggaggtgcctgtgaccaagctgattgacctggagaagagcctgctgcagatggtgcccctggatgagggcgccagcgagcggcccctgcaggtgcccaaggagatctggctgctggtggaccacctgttcaagtatgcctgccaccaggaggacctcttccagaccccaggcatgcaggaggagctgcagcagatcatcgactgcctggacaccagcatccctgagaccatccctggcagcaaccacagcgtggccgaggccctgctgatcttcctggaggccctgcctgagcctgtgatctgctatgagctgtaccagcgctgcctggacagcgcctatgacccccgcatctgccggcaggtgatcagccagctgccccgctgccacagaaatgtgttccgctacctgatggccttcctgcgggagctgctgaagttcagcgagtacaacagcgtgaatgccaacatgattgccaccctcttcaccagcctgctgctgcggcccccacccaacctgatggcccggcagacccccagcgaccggcagagggccatccagttcctgctgggcttcctgctgggcagcgaggaggactag

SEQ ID NO: 118999 - DNA, 2682 bp, Artificial Sequence
  derived and/or modified sequence
atggagccccccctgcccgtgggcgcccagcccctggccaccgtggaaggcatggaaatgaaagggccacttcgtgagccatgcgccttaacattagcacaaaggaatggccaatatgagctgattatacagctgcacgaaaaggagcaacacgtacaggacattattccaattaattctcactttcgatgcgttcaggaagctgaggaaacactgttgatcgatatcgccagtaactcaggatgtaaaattcgggttcagggggactggatccgtgagaggcgcttcgagattccagatgaagagcactgcctgaagtttttaagtgcagtgttggcagctcagaaagcacagagccagcttctagtacctgaacaaaaagatagcagcagttggtaccaaaaattggacactaaagacaagccttcagtattttcgggtctcctaggcttcgaggacaacttcagcagcatgaatcttgataaaaagattaacagtcagaatcagccgaccggcatccatcgggagccccctcctccccctttctcagttaacaaaatgcttccacgtgaaaaagaggcatctaataaggagcagcctaaggttacaaacactatgcgcaaactcttcgtgccgaatacacagagcgggcaacgggagggtctgattaagcacatcctcgctaaaagagagaaggagtacgtcaacatccagacattcaggttctttgtgggcacatggaatgtgaacgggcaatcgcccgattcaggcttagaaccctggctgaattgtgatccaaatccccctgatatatactgcatcggtttccaggaactggatctgtctacggaggcctttttctatttcgaaagtgtgaaggagcaggagtggtcgatggccgtcgaaagaggcctgcactcaaaggctaagtacaaaaaagtccaactggtccgccttgtgggaatgatgttgctgattttcgcccgcaaggatcagtgcaggtatattagggatattgctactgagactgtaggaactggcatcatggggaaaatgggcaacaaaggcggagttgcggttcgtttcgtgtttcacaacactacattttgcatagtgaacagccatttggcagcgcatgtcgaagacttcgagcgaaggaaccaagactacaaggatatttgtgctcggatgagtttcgtggtgcccaaccagactttgccccaacttaacatcatgaaacatgaggtggttatatggctgggcgatctgaactaccggctatgcatgcccgacgccaacgaagtcaagagcctgattaataagaaggacctgcaacgcctcttgaagtttgatcagttgaatatccagaggacacagaaaaaagcgtttgtggacttcaacgagggtgagatcaaatttatacctacgtataagtacgactcaaaaactgatagatgggactcatctgggaagtgtcgtgtccctgcctggtgcgaccggatcctctggcggggaacaaacgtgaaccagcttaactatcgttctcacatggagttaaaaaccagtgaccacaaacctgtctctgccctcttccacattggtgtgaaagtggtggacgagaggcgttatcgaaaggtctttgaagactccgtgcgtattatggacagaatggaaaacgactttctcccatccctggaattgagcaggcgtgagttcgtcttcgagaatgtgaagtttcgtcagctccagaaggagaaattccagatttctaataacggacaggtgccttgccacttcagctttatacctaagctcaacgattctcagtattgtaaaccctggttgagggctgagccatttgaagggtatctggagcctaatgaaaccgtggacatcagtctggacgtgtacgtaagtaaggactccgtcactattctgaattccggcgaggacaagatagaggacattttggtgcttcatttggatcgcgggaaagactattttctgaccatttccgggaactatttgcccagttgcttcgggacctctcttgaggcattgtgtcgtatgaaaagacctatccgcgaagttcccgttaccaaactaattgatctggagaaaagcctgctacagatggtgcccttggacgagggagcctcagagagacctctccaggtccccaaggaaatatggctgctggtggatcacttgtttaaatatgcctgccaccaggaagaccttttccagacacctgggatgcaggaagaactgcagcagattattgattgtttggatacttccattcctgagacaatccctggttccaatcattctgtcgcggaagccctcttgatcttccttgaagccctgcctgagcccgtgatctgctacgaactgtaccagagatgtctcgattcagcttacgatcccaggatttgtcgccaagtgatctcccagctcccccgctgccatcggaatgtgttcagatatctgatggctttcttaagagagctgttgaaatttagcgaatacaactccgtcaatgctaatatgatcgctaccctgtttacctccctgttgttacggccacctcccaacctcatggcgcggcagacgccgagtgatcgacagcgtgcaatccagttcctgctgggttttctgctaggctcagaggaagactag

SEQ ID NO: 119000 - DNA, 5138 bp, Artificial Sequence
  derived and/or modified sequence
tctcagctcccagctccccgctcccggctcccggcgcccggcgcccggcgcggagctgttcctcaaacgacacgcagccgaggtgggtgggtgtggggacgcgggagccagtgtcgtcggatcggcccgcagtccgctgtcctgctgagcccggaggccgcctggatggagccgccgctcccggtcggagcccagccgcttgccactgtcgagggtatggagatgaagggtcctctccgggagccctgcgccctgaccctagcccagaggaacgggcaatatgagttaataatccagttgcatgagaaggaacagcatgttcaagatatcattcctataaatagccacttcagatgtgttcaagaagcagaagaaactcttttgattgacatagcttctaacagtggctgcaaaattcgggttcagggggactggatcagagagcgccgctttgaaatccctgatgaggaacactgtttgaagttcctctcagctgtccttgctgctcagaaagctcagtcacagcttcttgttccagagcaaaaggactcatctagctggtaccagaaattagacactaaggacaaaccttctgttttttcagggcttcttggatttgaagacaatttttcttctatgaatttggacaagaaaataaattcacaaaatcagcctactgggattcatcgggaacccccacctccacccttttcagtgaataaaatgcttccacgtgaaaaagaagcttctaacaaggagcagcccaaagtgaccaacaccatgcggaagctctttgtaccaaatacccaatctgggcagcgggagggtctcatcaaacatatcctggcaaagcgagagaaagaatatgtcaacattcagactttcagattttttgttggaacttggaatgtgaatggccagtctccagatagcgggttagaaccttggctgaactgtgatcccaatcctcctgatatctactgcattggattccaagaactggacttgagcacagaagccttcttctactttgaatctgtgaaggaacaagaatggtccatggctgtagagagaggtttgcattccaaagccaagtataagaaagttcaactggtgcgccttgttgggatgatgcttcttatatttgccagaaaggatcagtgtcgatacattcgtgatattgctacagaaacagttggaactggaatcatggggaaaatgggaaacaaaggtggggtagctgtgagatttgtatttcacaacaccaccttttgcattgtcaattcccatctggctgcacacgtggaggactttgagagaaggaatcaagattataaggacatttgtgcgagaatgagttttgtggtcccaaatcagaccctcccgcagttgaacatcatgaaacatgaggttgtcatttggttgggagatttgaattatagactttgcatgcctgatgccaatgaggtgaaaagtcttattaataagaaagaccttcagagactcttgaaattcgaccagctaaatattcagcgcacacagaaaaaagcttttgttgacttcaatgaaggggaaatcaagttcatccccacttataagtatgactctaaaacagaccggtgggattccagtgggaaatgccgggttccagcctggtgtgaccgaattctttggagaggaacaaatgttaatcagcttaattatcggagtcacatggaactgaaaaccagcgaccacaagcctgttagcgccctcttccatattggggtgaaggttgtggatgaacgaaggtaccggaaagtctttgaagatagtgtacgcatcatggacagaatggaaaatgacttccttccttccttagaactcagcaggagggagtttgtgtttgaaaatgtgaagtttcggcaactacaaaaggagaagttccagatcagcaacaatggacaggttccctgccatttttctttcatccctaaacttaatgacagccagtactgcaagccatggcttcgggctgaaccttttgagggctacttggagccaaatgagacagtggacatttctcttgatgtgtatgtcagcaaagactctgtaaccatcctgaactcgggagaagataagattgaagatattctcgtccttcacctggatcgaggcaaagattacttcttgactatcagtggaaattacctcccaagttgttttggcacatccttagaggctctgtgccgtatgaaaagaccaatccgagaagttcctgttaccaaactcatagacttggagaaatcccttctgcaaatggttcctttggatgaaggtgccagtgagagaccccttcaggttcccaaggagatctggcttctagtagatcacctattcaaatacgcctgtcaccaggaggacctgttccagacccctggaatgcaggaagagctccagcagatcattgattgtctggataccagcattcctgagacaatccctggcagcaaccactctgtggctgaagcactgctcattttcttggaagccctgccagagccagtcatctgttacgagctgtatcagcgatgtcttgactctgcttatgatccccggatctgccgacaggtgatctcccagcttccgagatgccatagaaatgttttccgttacttgatggcattccttcgagaactcttaaaattctctgaatacaatagcgtcaatgccaacatgatcgctactctcttcactagtcttctcctgaggcctccacccaaccttatggcaagacagactccaagtgaccgccagcgtgctattcagttccttctgggctttctgcttgggagcgaagaagactaaggcttttactgttctctgatattctagaagcagacgatctcgggctccaagtatttcagaatgatttaaaaagtcatgccacaggaagggtctattgcagaatttcaagttctgtttatagtaaaaaggaagagcgtttcctaatccctcctttaccatatcctacacagaaaaatacttttagacttatattgccaagccaaagttaccatattttggtgtttttgtgttttctctttataaggcaaaaagatctgtatttacactccttcacctagggatgtgtttgttgccctcctacccaattgtcatgattgtccttagtaccctaggcctagattctgagatcttcccattctaggcctacaagcactacttgctgtagctgagacttgtctagagtcctttgttttgcacttttgacccaccccttcctggatcactcctttgcactccactcccctcgttctgtcactttgaacgaagtctgagtgaggctagtgactccttgggtgtcctcaacagtgaattcactgtctgcgtgcagttattacatgcatttgtgcatttctactacaatggcatctttatgtctctgtaacattggccttttcatggctccacactgggtggaaccatattctcttagatcacatttagtagcataactgtagggactattagagatggcatctcatcgatgagagagaatcacaatcagaatggaagcactttgagtatctgaagagtgagagcattcatgtttgacaggtcctgcttcccactatccttttcctgttattattcaaattttacacaaggactaatcctgggtgtctctgagacccatctcctgcctagacatccacctccagagcaacactggccccacagtaaaagaggaagtcttgtacctcaggcaggcccatctagagctattgctccttcccacagcaaaggtattgtggatgacccttagaatccattctctggtcttctgaaataccaagggcagatgtcacctccttcctcagcaggactgactctgggctctacaaccagctccttcacataaagggtttagagactccccttggctcccagtcaccatatccagtgttgtgtaaagagactggccaacaggaccaaccaagcaccttacctctcccatacaagatgaccctctgagcttttcatttattcaagctctgtggtacagcctttttttaaaataaattaatctatattggttgacaaacaagccaccaaccactgactgcaaaactgcctgatgcagttgggttcctcctggttttcttttgttacaaccacccttgcctgtttacattaattgcaaggagcataacgtacaggctgtatgtacaatcctgggcattgactctgtgacatttctagcatatccaaggcaccaccagtgatttctcctgtttcttggtgggggtgggggggaaggtacgtattctgcaatatggctaaaccctttcctgattgagagttaaagcaataggagtcaagttactggtgccacagatctggaggtatgataggtcaggggctaggtgttgaacttagttaatggaagactgagagcagaacaggtttgtcatctccgcaaggccagaaagtgatcacaaaaagaggcagatgatagacactggggtagggtcataccacagggaaatacctttcctgggcttgttttctagcatatcactgacctgggatctttgggtgatcaagggtgtggttagtggaggctctgtgctgcacgtatgcagtatcctatctctttctacatcagatcaaaacactaagttggtgtactgcctcgaccttttttcagctcatcctggaacatatacagagttgagagttttagacaatctctaggtagaggagacaagatgtagacccagacagaagaaatctgcttccctaccatggctattccagcaccccaacctgtaattgccaagtcctctaaggtactaatttgtagctgctctgaagtaaggatttcggattcagctggtagggaaagactctgcacctgctgtcttagggaagaaatggttcaaatccatgtggtgacattgcattagtctccctttcactgttttcttattctgtaattgtttgttatatttcccaaaaacgtcttgatcactaagcaaagctgctagtgggattctatatttcgtgtcatcttttttattataatttattgcaaatttttttctgaataaatatatgttgtgtgaaaaagcaaa

SEQ ID NO: 119001 - DNA, 2682 bp, Artificial Sequence
  derived and/or modified sequence
atggaaccaccactgcccgtgggtgcccaacctctcgctactgtggaaggtatggagatgaagggaccattaagggaaccgtgcgccctgacgcttgcgcagcgtaatggtcagtatgaactgatcattcaacttcacgagaaggagcagcacgtccaggacattatacctatcaactctcatttccggtgtgtgcaggaggcagaggagacactattaatcgacatcgcaagtaattcaggatgcaagatccgtgttcagggggattggattcgcgaaagacgcttcgaaatccctgacgaagagcactgcctcaaattcttatccgccgtcctcgctgcacagaaggcacagtctcagctgcttgttcctgaacagaaggacagcagtagttggtatcagaaactcgatactaaagacaagccaagcgtcttttctgggctactaggatttgaggacaactttagcagcatgaatttagataagaagattaattctcagaaccagcccaccggaattcatagagagccaccccctccacccttttccgtaaataaaatgctgcccagagaaaaggaagcctccaataaagagcaaccaaaggttaccaacaccatgaggaagctctttgtccctaacactcagtcggggcagcgcgaaggactgattaagcacattctggcaaaaagagaaaaagagtacgtgaacatccagacctttcggttctttgtgggaacctggaatgttaacggacaatcacccgattcaggtctggagccatggctgaactgcgacccaaatcctcccgacatctactgcatcggctttcaggagctggacctgtccactgaagcttttttttatttcgaaagtgtgaaggaacaggagtggtccatggcggtcgagaggggtctgcacagcaaagccaagtacaaaaaagtacagctggtgcggctggttgggatgatgctgctcatcttcgcacgcaaagaccaatgtagatacattagggatatcgccactgagacagtgggtactggcatcatggggaagatgggtaacaagggcggtgtcgcagtccggttcgtcttccataatacgaccttttgtattgtcaactctcatctagcggctcatgtggaggactttgagcggagaaatcaggactacaaggacatctgtgctaggatgtctttcgtggtcccaaatcaaacactgccacagctgaacatcatgaagcacgaagtggtgatctggttgggcgacctgaattatcgactctgtatgccggatgcgaatgaggtcaaatcactcatcaacaagaaagatctgcagaggctattaaagtttgaccagctcaatattcagagaacacagaaaaaggcttttgtggatttcaatgaaggggaaatcaaatttattcccacttacaaatacgacagcaaaactgatcggtgggactcttcgggcaagtgtagagtgccagcatggtgtgataggatcctgtggcgcggaacaaatgtgaatcagctgaactataggtctcacatggagctgaaaacaagcgatcacaagccagtgtcagcattgtttcacatcggggtcaaggtcgttgatgagagaagataccgcaaggtgtttgaggattctgtgcggataatggacagaatggaaaacgatttcctgcctagcctagaattgagccgaagggaattcgtgtttgaaaacgtgaagttccgtcagttacaaaaggagaaatttcaaatttcaaacaatggacaggtgccctgccactttagctttattcctaagttaaatgattctcagtattgtaaaccttggctgcgggctgagccttttgagggctatctggaaccaaatgagacagtggacatcagtcttgatgtctatgtgtcaaaggactccgtgacaattcttaactccggtgaagataagatagaggatatactcgttctccatctcgataggggtaaggactacttccttactatatccggaaattacctgccatcgtgttttggtaccagtctggaagccctttgtcgtatgaagcgcccaataagagaggtgcccgtcactaaactgattgacctggaaaaaagtctcctgcaaatggttccgttggacgagggggcatccgagaggcccttacaggtgcctaaggaaatctggcttctagtcgaccacctgtttaagtatgcctgtcaccaagaagatctgtttcaaactccgggaatgcaggaggaactgcagcaaattatcgactgccttgacacctctatccccgaaaccatcccgggtagcaaccactctgtagctgaagcgctcctgatcttcctggaggccctccctgaaccggttatctgttacgagctgtaccaaagatgtttggactctgcttacgacccgcgaatttgtcgccaggtgatcagtcaactgcctaggtgtcatcgtaacgtctttcgctatctgatggcattcttgagagagctgctgaagtttagtgagtacaactcagtgaacgcaaacatgattgcaacactgtttacgtctctgctactgagaccccctcccaatctgatggcgaggcagacaccaagtgatcgtcagcgggctatacagttcctactgggttttcttctaggttcggaggaagactag

SEQ ID NO: 119002 - DNA, 2682 bp, Artificial Sequence
  derived and/or modified sequence
atggagccccccctgcccgtgggcgcccagcccctggccaccgtggagggcatggagatgaagggccccctgagagagccctgcgccctgaccctggcccagagaaacggccagtacgagctgatcatccagctgcacgagaaggagcagcacgtgcaggacatcatccccatcaacagccacttcagatgcgtgcaggaggccgaggagaccctgctgatcgacatcgccagcaacagcggctgcaagatcagagtgcagggcgactggatcagagagagaagattcgagatccccgacgaggagcactgcctgaagttcctgagcgccgtgctggccgcccagaaggcccagagccagctgctggtgcccgagcagaaggacagcagcagctggtaccagaagctggacaccaaggacaagcccagcgtgttcagcggcctgctgggcttcgaggacaacttcagcagcatgaacctggacaagaagatcaacagccagaaccagcccaccggcatccacagagagcccccccccccccccttcagcgtgaacaagatgctgcccagagagaaggaggccagcaacaaggagcagcccaaggtgaccaacaccatgagaaagctgttcgtgcccaacacccagagcggccagagagagggcctgatcaagcacatcctggccaagagagagaaggagtacgtgaacatccagaccttcagattcttcgtgggcacctggaacgtgaacggccagagccccgacagcggcctggagccctggctgaactgcgaccccaacccccccgacatctactgcatcggcttccaggagctggacctgagcaccgaggccttcttctacttcgagagcgtgaaggagcaggagtggagcatggccgtggagagaggcctgcacagcaaggccaagtacaagaaggtgcagctggtgagactggtgggcatgatgctgctgatcttcgccagaaaggaccagtgcagatacatcagagacatcgccaccgagaccgtgggcaccggcatcatgggcaagatgggcaacaagggcggcgtggccgtgagattcgtgttccacaacaccaccttctgcatcgtgaacagccacctggccgcccacgtggaggacttcgagagaagaaaccaggactacaaggacatctgcgccagaatgagcttcgtggtgcccaaccagaccctgccccagctgaacatcatgaagcacgaggtggtgatctggctgggcgacctgaactacagactgtgcatgcccgacgccaacgaggtgaagagcctgatcaacaagaaggacctgcagagactgctgaagttcgaccagctgaacatccagagaacccagaagaaggccttcgtggacttcaacgagggcgagatcaagttcatccccacctacaagtacgacagcaagaccgacagatgggacagcagcggcaagtgcagagtgcccgcctggtgcgacagaatcctgtggagaggcaccaacgtgaaccagctgaactacagaagccacatggagctgaagaccagcgaccacaagcccgtgagcgccctgttccacatcggcgtgaaggtggtggacgagagaagatacagaaaggtgttcgaggacagcgtgagaatcatggacagaatggagaacgacttcctgcccagcctggagctgagcagaagagagttcgtgttcgagaacgtgaagttcagacagctgcagaaggagaagttccagatcagcaacaacggccaggtgccctgccacttcagcttcatccccaagctgaacgacagccagtactgcaagccctggctgagagccgagcccttcgagggctacctggagcccaacgagaccgtggacatcagcctggacgtgtacgtgagcaaggacagcgtgaccatcctgaacagcggcgaggacaagatcgaggacatcctggtgctgcacctggacagaggcaaggactacttcctgaccatcagcggcaactacctgcccagctgcttcggcaccagcctggaggccctgtgcagaatgaagagacccatcagagaggtgcccgtgaccaagctgatcgacctggagaagagcctgctgcagatggtgcccctggacgagggcgccagcgagagacccctgcaggtgcccaaggagatctggctgctggtggaccacctgttcaagtacgcctgccaccaggaggacctgttccagacccccggcatgcaggaggagctgcagcagatcatcgactgcctggacaccagcatccccgagaccatccccggcagcaaccacagcgtggccgaggccctgctgatcttcctggaggccctgcccgagcccgtgatctgctacgagctgtaccagagatgcctggacagcgcctacgaccccagaatctgcagacaggtgatcagccagctgcccagatgccacagaaacgtgttcagatacctgatggccttcctgagagagctgctgaagttcagcgagtacaacagcgtgaacgccaacatgatcgccaccctgttcaccagcctgctgctgagacccccccccaacctgatggccagacagacccccagcgacagacagagagccatccagttcctgctgggcttcctgctgggcagcgaggaggactag

SEQ ID NO: 119003 - protein, 968 aa, Artificial Sequence
  derived and/or modified sequence
MDSTLTASEIRQRFIDFFKRNEHTYVHSSATIPLDDPTLLFANAGMNQFKPIFLNTIDPSHPMAKLSRAANTQKCIRAGGKHNDLDDVGKDVYHHTFFEMLGSWSFGDYFKELACKMALELLTQEFGIPIERLYVTYFGGDEAAGLEADLECKQIWQNLGLDDTKILPGNMKDNFWEMGDTGPCGPCSEIHYDRIGGRDAAHLVNQDDPNVLEIWNLVFIQYNREADGILKPLPKKSIDTGMGLERLVSVLQNKMSNYDTDLFVPYFEAIQKGTGARPYTGKVGAEDADGIDMAYRVLADHARTITVALADGGRPDNTGRGYVLRRILRRAVRYAHEKLNASRGFFATLVDVVVQSLGDAFPELKKDPDMVKDIINEEEVQFLKTLSRGRRILDRKIQSLGDSKTIPGDTAWLLYDTYGFPVDLTGLIAEEKGLVVDMDGFEEERKLAQLKSQGKGAGGEDLIMLDIYAIEELRARGLEVTDDSPKYNYHLDSSGSYVFENTVATVMALRREKMFVEEVSTGQECGVVLDKTCFYAEQGGQIYDEGYLVKVDDSSEDKTEFTVKNAQVRGGYVLHIGTIYGDLKVGDQVWLFIDEPRRRPIMSNHTATHILNFALRSVLGEADQKGSLVAPDRLRFDFTAKGAMSTQQIKKAEEIANEMIEAAKAVYTQDCPLAAAKAIQGLRAVFDETYPDPVRVVSIGVPVSELLDDPSGPAGSLTSVEFCGGTHLRNSSHAGAFVIVTEEAIAKGIRRIVAVTGAEAQKALRKAESLKKCLSVMEAKVKAQTAPNKDVQREIADLGEALATAVIPQWQKDELRETLKSLKKVMDDLDRASKADVQKRVLEKTKQFIDSNPNQPLVILEMESGASAKALNEALKLFKMHSPQTSAMLFTVDNEAGKITCLCQVPQNAANRGLKASEWVQQVSGLMDGKGGGKDVSAQATGKNVGCLQEALQLATSFAQLRLGDVKN

SEQ ID NO: 119004 - DNA, 2907 bp, Artificial Sequence
  derived and/or modified sequence
atggactcaactcttaccgcctctgagataaggcagaggttcatcgatttctttaaacgcaacgagcatacctatgtgcactccagcgccaccattcctttggatgacccgacgcttttgttcgccaacgccggcatgaatcagttcaagccgatcttcctgaacacaattgatccaagccacccaatggcaaagcttagccgggccgctaacacccagaaatgcatacgagcaggggggaagcataatgacctagacgacgtgggaaaagatgtgtaccatcacacgtttttcgaaatgttaggttcttggagtttcggcgattattttaaagagctggcttgcaaaatggctcttgagctgctgactcaggagtttgggatccctatagagcgcctgtacgtgacttatttcggaggagatgaagccgccggactggaggccgacctcgaatgcaaacagatctggcagaatctgggactggacgacactaaaatcctgcctggcaacatgaaggataacttttgggagatgggagatactggcccttgcggaccatgcagtgaaatccactatgacaggattgggggccgcgacgctgctcacctggtcaatcaagacgatcccaacgtgctagaaatctggaaccttgtgtttattcagtataaccgagaagccgatgggattctgaagccccttccaaaaaagagtatcgacaccggcatgggcctggagcggctggtttctgtgctgcagaacaaaatgtctaactacgacaccgacctgtttgtgccctattttgaggctatacagaagggtaccggggcccgcccatacactggcaaagtgggcgcagaggatgccgacgggatcgatatggcctaccgagttctggccgaccatgctaggactattactgtggcattggctgatgggggacgccccgacaatactggacgggggtatgttttaagaagaatcctgcggagagccgtgcgctacgcacacgaaaagttaaacgcttcccgtggcttttttgctacgctggtggacgtggtggtgcagagcctgggcgatgcgttccccgagctgaaaaaagaccctgacatggttaaagacattattaatgaggaagaagtgcagttcttgaagaccctgagcagaggacggcgcattctggacagaaagatccaatcgctgggggacagtaaaaccattccgggagatacagcctggctgttatatgacacatatgggttcccagtcgacttaacaggccttattgctgaggagaagggcctggtggtggacatggacggatttgaggaagagagaaagctcgcacaattgaaatcgcagggtaagggggccggcggagaggaccttatcatgttggacatttatgccatagaggaattgagagcaagaggtctggaggtaaccgatgatagccctaaatacaactaccacctggactcctcagggagttacgtctttgaaaataccgtcgcaaccgtaatggccctcagacgcgaaaagatgttcgtggaagaggtgtccacaggtcaggagtgcggggtcgtgctggacaaaacatgtttttacgccgagcagggcggacagatttacgatgagggttacctagtgaaagtggacgacagttcagaggataagacagagtttacggttaaaaacgcgcaggttcggggagggtacgttctacatattggcactatctacggagacctgaaagtcggcgaccaggtttggctttttatcgatgaacccaggcggcggccaataatgtcaaaccacactgcaacccatatactgaactttgccttgagaagcgtcctcggagaagccgaccagaagggttcacttgttgcgcctgatcgcttgagattcgacttcaccgctaagggagccatgtcgactcagcagatcaaaaaagccgaggaaatcgcgaatgaaatgatcgaagccgcaaaagccgtttatacacaggattgtccactcgctgccgcaaaggcaatccagggcctgagggccgtgtttgacgagacctatcccgatcccgtgcgcgtcgtttctattggagttccagtctccgagctcttggatgatccaagcggaccggctgggagcctgacttccgtcgagttttgtggaggaacccacttaagaaattccagccatgcgggcgccttcgttatcgtcaccgaggaagcaattgccaaaggaattagaaggattgtggccgttactggagcagaagcacaaaaggcactgcgcaaagcagaaagcctcaaaaaatgcctgagcgtcatggaggcaaaagtgaaggcgcaaactgcacccaacaaagatgtgcagagggagatcgcagatctgggcgaagccctcgccacggcagtgatcccccagtggcaaaaggatgagctcagagaaaccctgaagtcgctgaaaaaagttatggatgacttggacagagctagcaaggcggacgttcagaagcgtgtgctggaaaagaccaaacaattcatagactcaaatccaaaccagccgttggtcattcttgagatggagtctggggcgagtgccaaggcacttaacgaggccctgaagctgttcaagatgcactcccctcagacgtcggctatgctctttacagtggacaacgaagcagggaagatcacctgtctctgccaggtaccgcaaaatgcagccaatcggggccttaaggctagtgagtgggtacagcaagtttcaggcttgatggacggcaaggggggaggtaaagacgtcagtgcccaggccacaggaaaaaacgtcggttgtttacaggaggccctgcaactagcaacctccttcgcccaactccgactcggtgacgtgaagaactag

SEQ ID NO: 119005 - DNA, 2907 bp, Artificial Sequence
  derived and/or modified sequence
atggacagcaccctgacagccagcgagatccggcagcgcttcatcgacttcttcaagagaaatgagcacacctacgtgcacagcagcgccaccatccccctggatgaccccaccctgctgtttgccaatgccggcatgaaccagttcaagcccatcttcctgaacaccatcgaccccagccaccccatggccaagctgagcagagctgccaacacccagaagtgcatccgggccggcggcaagcacaatgacctggatgatgtgggcaaggatgtgtaccaccacaccttctttgagatgctgggctcctggagctttggagactacttcaaggagctggcctgcaagatggccctggagctgctgacccaggagtttggcatccccatcgagcggctgtatgtgacctactttggaggagatgaagctgctggcctggaggccgacctggagtgcaagcagatctggcagaacctgggcctggatgacaccaagatcctgcccggcaacatgaaggacaacttctgggagatgggagacaccggcccctgtggcccctgcagcgagatccactatgacagaattggaggaagagatgctgcccacctggtgaaccaggatgaccccaacgtgctggagatctggaacctggtgttcatccagtacaaccgggaggctgatggcatcctgaagcccctgcccaagaagagcattgacaccggcatgggcctggagcggctggtgtctgtgctgcagaacaagatgagcaactatgacacagacctgtttgtgccctactttgaggccatccagaagggcaccggggcccggccctacaccgggaaggtgggcgcagaagatgctgatggcatcgacatggcctacagagtgctggccgaccacgcccggaccatcaccgtggccctggctgatggcggccgcccagacaacacaggccggggctacgtgctgcggcgcatcctgcggcgggctgtgcgctatgcccacgagaagctgaatgccagccggggcttctttgccaccctggtggatgtggtggtgcagagcctgggagatgccttccctgagctgaagaaggaccctgacatggtgaaggacatcatcaatgaggaggaggtgcagttcctgaagaccctgagccggggccgccgcatcctggacaggaagatccagagcctgggggacagcaagaccatccctggggacacagcctggctgctgtatgacacctacggcttccctgtggacctgaccggcctgattgctgaggagaagggcctggtggtggacatggatggctttgaggaggagaggaagctggcccagctgaagagccagggcaaaggagctggaggagaggacctgatcatgctggacatctatgccatcgaggagctgcgggcccggggcctggaggtgacagatgacagccccaagtacaactaccacctggacagcagcggcagctatgtgtttgagaacacagtggccaccgtgatggccctgcggcgggagaagatgtttgtggaggaggtgtccacaggccaggagtgtggggtggtgctggacaagacctgcttctacgccgagcagggcggccagatctatgatgagggctacctggtgaaggtggatgacagcagcgaggacaagacagagttcaccgtgaagaatgcccaggtgcggggcggctacgtgctgcacatcggcaccatctacggggacctgaaggtgggggaccaggtgtggctgttcattgatgagccccggcggcggcccatcatgagcaaccacacagccacccacatcctgaactttgccctgcggtctgtgctgggggaggccgaccagaagggcagcctggtggccccagaccggctgcgctttgacttcaccgccaagggggccatgagcacccagcagatcaagaaggccgaggagatcgccaatgagatgattgaggccgccaaggctgtgtacacccaggactgccccctggccgccgccaaggccatccagggcctgcgggctgtgtttgatgagacctacccagaccctgtgcgggtggtgtccattggagtgcctgtgtctgagctgctggatgaccccagcggccctgctggcagcctgacctctgtggagttctgtggcggcacccacctgaggaacagcagccacgccggggcctttgtgattgtgacagaggaggccatcgccaagggcatccgccgcatcgtggccgtgactggagctgaggcccagaaggccctgaggaaggccgagagcctgaagaagtgcctgtctgtgatggaggccaaggtgaaggcccagacagcccccaacaaggatgtgcagcgggagattgctgacctgggggaggccctggccacagctgtgatcccccagtggcagaaggatgagctgcgggagaccctgaagagcctgaagaaggtgatggatgacctggaccgggccagcaaggcagatgtgcagaagagggtgctggagaagaccaagcagttcatcgacagcaaccccaaccagcccctggtgatcctggagatggagagcggggccagcgccaaggccctgaatgaggccctgaagctgttcaagatgcacagcccccagaccagcgccatgctgttcaccgtggacaatgaggccggcaagatcacctgcctgtgccaggtgccccagaatgctgccaacagaggcctgaaggccagcgagtgggtgcagcaggtgtctggcctgatggatggcaagggcggcggcaaggatgtgtctgcccaggccaccgggaagaatgtgggctgcctgcaggaggccctgcagctggccaccagctttgcccagctgcggctgggagatgtgaagaactag

SEQ ID NO: 119006 - DNA, 3344 bp, Artificial Sequence
  derived and/or modified sequence
ggtacagctgcgcgtctgcgggaataggtgcagcgggcccttggcgggggactctgagggaggagctggggacggcgaccctaggagagttctttggggtgactttcaagatggactctactctaacagcaagtgaaatccggcagcgatttatagatttcttcaagaggaacgagcatacgtatgttcactcgtctgccaccatcccattggatgaccccactttgctctttgccaatgcaggcatgaaccagtttaaacccattttcctgaacacaattgacccatctcaccccatggcaaagctgagcagagctgccaatacccagaagtgcatccgggctgggggcaaacataatgacctggacgatgtgggcaaggatgtctatcatcacaccttcttcgagatgctgggctcttggtcttttggagattactttaaggaattggcatgtaagatggctctggaactcctcacccaagagtttggcattcccattgaaagactttatgttacttactttggcggggatgaagcagctggcttagaagcagatctggaatgcaaacagatctggcaaaatttggggctggatgacaccaaaatcctcccaggcaacatgaaggataacttctgggagatgggtgacacgggcccctgtggtccttgcagtgagatccactacgaccggattggtggtcgggacgccgcacatcttgtcaaccaggacgaccctaatgtgctggagatctggaaccttgtgttcatccagtataacagggaagctgatggcattctgaaacctcttcccaagaaaagcattgacacagggatgggcctggaacgactggtatctgtgctgcagaataagatgtccaactatgacactgacctttttgtcccttactttgaagccattcagaagggcacaggtgcccgaccatacactgggaaagttggtgctgaggatgccgatgggattgacatggcctaccgggtgctggctgaccacgctcggaccatcactgtggcactggctgatggtggccggcctgacaacacagggcgtggatatgtgttgagacggattctccgccgagctgtccgatacgcccatgaaaagctcaatgccagcaggggcttctttgctacgttagtggatgttgtcgtccagtccctgggagatgcatttcctgagctgaagaaggacccagacatggtgaaggacatcattaatgaagaagaggtgcagtttctcaagactctcagcagagggcgtcgcatcctggacaggaaaattcagagcctgggagacagcaagaccattcccggagacactgcttggctcctctatgacacctatgggtttccagtggatctgactggactgattgctgaagagaagggcctggtggtagacatggatggctttgaagaggagaggaaactggcccagctgaaatcacagggcaagggagctggtggggaagacctcattatgctggacatttacgctatcgaagagctccgggcacggggtctggaggtcacagatgattccccaaagtacaattaccatttggactccagtggtagctatgtatttgagaacacagtggctacggtgatggctctgcgcagggagaagatgttcgtggaagaggtgtccacaggccaggagtgtggagtggtgctggacaagacctgtttctatgctgagcaaggaggccagatctatgacgaaggctacctggtgaaggtggatgacagcagtgaagataaaacagagtttacagtgaagaatgctcaggtccgaggagggtatgtgctacacattggaaccatctacggtgacctgaaagtgggggatcaggtctggctgtttattgatgagccccgacgaagacccatcatgagcaaccacacagctacgcacattctgaacttcgccctgcgctcagtgcttggggaagctgaccagaaaggctcattggttgctcctgaccgcctcagatttgactttactgccaagggagccatgtccacccaacagatcaagaaggctgaagagattgctaatgagatgattgaggcagccaaggccgtctatacccaggattgccccctggcagcagcgaaagccatccagggcctacgggctgtgtttgatgagacctatcctgaccctgtgcgagtcgtctccattggggtcccggtgtccgagttgctggatgacccctctgggcctgctggctccctgacttctgttgagttctgtgggggaacgcacctgcggaactcgagtcatgcaggagcttttgtgatcgtgacggaagaagccattgccaagggtatccggaggattgtggctgtcacaggtgccgaggcccagaaggccctcaggaaagcagagagcttgaagaaatgtctctctgtcatggaagccaaagtgaaggctcagactgctccaaacaaggatgtgcagagggagatcgctgaccttggagaggccctggccactgcagtcatcccccagtggcagaaggatgaattgcgggagactctcaaatccctaaagaaggtcatggatgacttggaccgagccagcaaagccgatgtccagaaacgagtgttagagaagacgaagcagttcatcgacagcaaccccaaccagcctcttgtcatcctggagatggagagcggcgcctcagccaaggccctgaatgaagccttgaagctcttcaagatgcactcccctcagacttctgccatgctcttcacggtggacaatgaggctggcaagatcacgtgcctgtgtcaagttccccagaatgcagccaatcggggcttaaaagccagcgagtgggtgcagcaggtgtcaggcttgatggacggtaaaggtggtggcaaggatgtgtctgcacaggccacaggcaagaacgttggctgcctgcaggaggcgctgcagctggccacttccttcgcccagctgcgcctcggggatgtaaagaactgagtggggaaggaggaggctcccactggatccatccgtccagccaagagctcttcatctgctacaagaacatttgaatcttgggacctttaaagagcccctcctaacccagcagtaactggaacacacttgggagcagtcctatgtctcagtgccccttaaatttctgccctgagccctccacgtcagtgccatcggtctagaaccactaaccccgcattgctgttgatcgtcacgctcgcatctatagataacggctctccagacctgagctttccgcgtcagcaagtaggaatcgtttttgctgcagagaataaaaggaccacgtgc

SEQ ID NO: 119007 - DNA, 2907 bp, Artificial Sequence
  derived and/or modified sequence
atggacagcaccctgaccgccagcgagatccggcagcggttcatcgatttctttaaacggaacgagcacacatacgttcatagcagcgcaaccatacccctggacgacccaacgctattgttcgccaatgctggcatgaaccagttcaaaccaattttcctgaataccatagacccaagtcatccaatggccaaactgtcccgtgcagcaaatactcaaaagtgcattcgcgccggcgggaaacacaacgacctcgacgatgtgggcaaagatgtctatcatcacacattttttgaaatgctgggaagttggtcctttggggactattttaaggaactcgcatgtaaaatggctctggaactcctcacacaagagttcgggataccaattgagaggctttatgtgacttactttggaggagatgaagccgccggtcttgaggccgacctcgagtgtaagcagatctggcagaacctgggcctcgatgacactaaaattctgccgggcaacatgaaggacaacttttgggagatgggcgacactggaccctgtggcccatgctctgagattcactacgaccgaattggggggagggacgccgctcatctggtgaaccaggatgatcccaacgtgctggagatttggaatctggtgtttattcaatataatcgtgaagctgatggcattcttaagcctctgcctaaaaaatccatcgacacaggaatgggcctcgagcgcctggtgtcagtactgcaaaataagatgtccaactacgacactgacctttttgtgccatattttgaggctattcagaaaggcactggcgctcgaccttacacaggtaaggtgggggccgaagacgctgacggaatcgatatggcctaccgcgtcctggcggaccacgcccggactataactgtggcccttgccgacggtggaagacccgataatacagggaggggatacgtgctgcgcagaatattgcgtcgagccgtgcggtacgcccatgaaaaactgaatgcctcccgcggattcttcgcaacactagtcgacgtggttgtgcagagcttgggggacgccttcccagagctgaagaaggatcccgacatggttaaagacatcattaacgaggaggaggtgcagttccttaaaaccttgtcacggggtcggcgcatactcgatagaaagattcagtctttaggggactctaaaaccattcctggtgacaccgcctggctgctttacgacacctacggattccccgttgacttgactggcctgatcgctgaagaaaaaggtctagtcgtcgatatggatgggttcgaagaggagcgtaagctcgcccaactgaaaagccaaggaaaaggggccgggggagaggacctcatcatgctcgacatttacgctatcgaggaactaagagcaagaggcctggaggtgactgatgactcaccaaaatacaactatcaccttgactcaagcgggtcctatgtattcgagaatacagtggccaccgtgatggctttgagacgggagaagatgttcgtggaggaggtgtcgaccggccaggagtgcggggtcgttctcgataagacctgtttttacgctgagcagggcggccaaatctacgatgaagggtaccttgtgaaagtcgatgacagcagcgaggacaagactgaatttaccgtcaaaaacgctcaggtccgtggaggttacgttttgcacatcggcacaatttacggcgacctgaaagtcggagaccaggtgtggctgtttatcgatgagcccagacgaaggcctattatgtctaatcacaccgctacccatattctgaacttcgctctacgctccgtgctgggagaggccgatcaaaagggctccttagtggctccggaccggctgcgctttgatttcacagctaaaggagcgatgagcactcagcagatcaaaaaggccgaagaaatcgcaaatgagatgatagaagcagccaaggccgtgtacacacaggattgtccattggcggccgctaaggcaattcagggactcagggccgtgttcgatgagacctaccccgatcccgtgagggttgtatctattggagtgcctgtatctgagttacttgacgacccaagcgggccagcagggagcctcaccagtgtcgagttctgtgggggtacacacctgcggaactcttcacatgccggcgcattcgtcatagtaaccgaggaagcgatagctaaggggattcgacggatcgtcgcggtgaccggagcagaggcccagaaggctttgcgcaaggcagaatctttgaaaaagtgtctgagtgtgatggaagctaaagtgaaagcccagactgcccccaataaagacgtccagcgcgaaattgccgacctgggagaggcgctagccaccgccgttatcccacagtggcaaaaagatgagctgcgggaaacactgaagtcgctcaaaaaggtgatggacgatctcgatagggcaagtaaagcagatgttcagaagcgggtgctcgagaaaacgaagcagttcatcgactctaacccaaatcagcccctcgttatcctcgagatggaaagcggggcttcagcaaaggcactgaacgaggcccttaaactgttcaagatgcatagtcctcagaccagtgccatgttgttcaccgtagacaatgaggccggtaaaattacctgcctgtgtcaggtgccacaaaacgcggccaacagaggtttaaaggcttccgaatgggtgcagcaggtgagcggcctgatggacgggaaggggggggggaaggatgtgtctgcacaagctacgggaaagaacgtaggctgtcttcaggaagcgctgcagctcgccacctccttcgcgcaactcaggctaggcgacgttaaaaattag

SEQ ID NO: 119008 - DNA, 2907 bp, Artificial Sequence
  derived and/or modified sequence
atggacagcacacttaccgcgtcagagatacgccaacgctttatagacttctttaagaggaacgaacatacttatgttcactcctcagccactattcctctggacgatcctaccctgctgtttgccaatgccggaatgaatcagttcaagcccatttttctcaataccatcgacccgtcccatcccatggccaaattatcacgagccgcaaacacccagaagtgcataagggccggtggaaaacacaatgacctagacgatgtaggaaaagacgtataccaccatactttctttgagatgcttgggtcttggtcctttggggactattttaaggagctcgcatgcaaaatggccctggagctgcttacacaagagttcggtattcccattgagagattgtacgtcacttattttggcggagacgaggccgcaggtctggaggcagacctggagtgcaaacagatttggcagaatctcgggctggacgatacaaaaattcttcctggcaacatgaaagataacttttgggaaatgggcgacacaggaccctgtggcccttgcagcgaaatccattacgatagaatcgggggtagggacgctgctcacttagtgaatcaggatgatccgaacgttcttgaaatatggaatttagtcttcattcaatacaatagggaagctgatggcatcctaaagccactgccaaagaagtcaatcgatacgggaatgggactggagcggctcgtgagtgtgttgcagaacaaaatgtccaactacgatactgatctttttgtaccttacttcgaggccattcagaagggtactggggctcggccttatacaggtaaggtgggagccgaggacgctgatgggattgacatggcctaccgagtgctggcggatcatgctaggaccattaccgtggctttagcagacggtggcagacctgataacactggacgagggtatgtcttgcggaggattctgcgaagagcagtgcggtacgcacacgagaaactcaatgcctcacgaggcttcttcgccacattggtcgacgtggttgtgcaatcactaggtgacgccttccccgaactgaaaaaagacccggacatggtgaaggatatcattaatgaggaggaggtccagttcctgaagaccctcagccgcggacggaggatcctggataggaaaattcagtcactcggtgactctaagactatcccaggcgatacagcctggcttttgtatgacacttacgggtttccagtagacttgactggcttaatcgctgaggagaagggcctggttgtggatatggatggatttgaagaagaaagaaaactggcccagctcaagtctcagggcaagggtgccggaggcgaggatctgatcatgctggatatctacgcaatagaggaactgcgggcaagggggctggaggtgactgacgatagcccgaagtacaattaccatctggactccagcggatcctacgtgttcgagaataccgtcgccactgtcatggccttgaggagggagaaaatgtttgtcgaagaggtctccacaggccaggaatgcggtgtcgttttggataagacctgtttctatgctgaacagggagggcagatatacgacgaaggatatctggttaaggtggatgattcaagtgaggataagaccgaatttacagtgaagaatgcccaggtacgaggaggttatgtgctgcatataggcactatctacggagaccttaaagtcggtgaccaggtgtggctgtttatagacgagccacgccgacgccctatcatgtctaaccacaccgccacgcatattctaaatttcgcactgcggtctgtgcttggcgaagcagatcagaaggggtctctcgtcgcgcctgacagactgaggttcgattttaccgcaaaaggcgcaatgagtacgcagcagattaaaaaagcagaggagattgcaaacgaaatgattgaggcagccaaggctgtctacacccaggattgtcctcttgcagctgccaaagcaattcaagggctgagagccgtgtttgacgagacctaccctgatcctgttcgggttgtcagcataggtgttccagtgtccgagctgctcgacgacccctccggacccgcaggaagtctgacaagcgtggaattttgcggtggtactcaccttaggaattcttcccacgcaggcgcattcgtgattgtgaccgaggaagctattgcaaaaggaatcaggcgcatcgtggccgttactggggcagaggctcagaaggcccttcggaaagcggaatcgctaaagaaatgtctttccgtgatggaagctaaggtgaaggcacagactgcgccaaataaggacgtgcagcgggagattgcagatctgggagaggcccttgctaccgccgtgattccacagtggcagaaggacgaactgcgggaaaccctgaaatcacttaaaaaagtgatggacgatctggaccgcgcaagtaaagctgacgtgcagaaaagggtcctggagaagacaaaacagttcatagattccaatccaaaccagccactggtgatactcgagatggagagcggcgcatccgctaaggccctcaatgaagcgttaaagctcttcaaaatgcattccccgcagacaagcgccatgctatttaccgtagacaacgaggcaggcaaaataacctgtttgtgccaagttcctcagaatgccgctaaccggggattaaaagcgtccgagtgggtgcagcaggtttctggcctcatggatggcaaaggtggaggaaaggacgtgagtgcgcaggccaccgggaagaatgttggctgcctgcaggaggccctacagttagcgacctccttcgcacaactcagactaggagacgttaagaattag

SEQ ID NO: 119009 - DNA, 2907 bp, Artificial Sequence
  derived and/or modified sequence
atggacagcaccctgaccgccagcgagatcagacagagattcatcgacttcttcaagagaaacgagcacacctacgtgcacagcagcgccaccatccccctggacgaccccaccctgctgttcgccaacgccggcatgaaccagttcaagcccatcttcctgaacaccatcgaccccagccaccccatggccaagctgagcagagccgccaacacccagaagtgcatcagagccggcggcaagcacaacgacctggacgacgtgggcaaggacgtgtaccaccacaccttcttcgagatgctgggcagctggagcttcggcgactacttcaaggagctggcctgcaagatggccctggagctgctgacccaggagttcggcatccccatcgagagactgtacgtgacctacttcggcggcgacgaggccgccggcctggaggccgacctggagtgcaagcagatctggcagaacctgggcctggacgacaccaagatcctgcccggcaacatgaaggacaacttctgggagatgggcgacaccggcccctgcggcccctgcagcgagatccactacgacagaatcggcggcagagacgccgcccacctggtgaaccaggacgaccccaacgtgctggagatctggaacctggtgttcatccagtacaacagagaggccgacggcatcctgaagcccctgcccaagaagagcatcgacaccggcatgggcctggagagactggtgagcgtgctgcagaacaagatgagcaactacgacaccgacctgttcgtgccctacttcgaggccatccagaagggcaccggcgccagaccctacaccggcaaggtgggcgccgaggacgccgacggcatcgacatggcctacagagtgctggccgaccacgccagaaccatcaccgtggccctggccgacggcggcagacccgacaacaccggcagaggctacgtgctgagaagaatcctgagaagagccgtgagatacgcccacgagaagctgaacgccagcagaggcttcttcgccaccctggtggacgtggtggtgcagagcctgggcgacgccttccccgagctgaagaaggaccccgacatggtgaaggacatcatcaacgaggaggaggtgcagttcctgaagaccctgagcagaggcagaagaatcctggacagaaagatccagagcctgggcgacagcaagaccatccccggcgacaccgcctggctgctgtacgacacctacggcttccccgtggacctgaccggcctgatcgccgaggagaagggcctggtggtggacatggacggcttcgaggaggagagaaagctggcccagctgaagagccagggcaagggcgccggcggcgaggacctgatcatgctggacatctacgccatcgaggagctgagagccagaggcctggaggtgaccgacgacagccccaagtacaactaccacctggacagcagcggcagctacgtgttcgagaacaccgtggccaccgtgatggccctgagaagagagaagatgttcgtggaggaggtgagcaccggccaggagtgcggcgtggtgctggacaagacctgcttctacgccgagcagggcggccagatctacgacgagggctacctggtgaaggtggacgacagcagcgaggacaagaccgagttcaccgtgaagaacgcccaggtgagaggcggctacgtgctgcacatcggcaccatctacggcgacctgaaggtgggcgaccaggtgtggctgttcatcgacgagcccagaagaagacccatcatgagcaaccacaccgccacccacatcctgaacttcgccctgagaagcgtgctgggcgaggccgaccagaagggcagcctggtggcccccgacagactgagattcgacttcaccgccaagggcgccatgagcacccagcagatcaagaaggccgaggagatcgccaacgagatgatcgaggccgccaaggccgtgtacacccaggactgccccctggccgccgccaaggccatccagggcctgagagccgtgttcgacgagacctaccccgaccccgtgagagtggtgagcatcggcgtgcccgtgagcgagctgctggacgaccccagcggccccgccggcagcctgaccagcgtggagttctgcggcggcacccacctgagaaacagcagccacgccggcgccttcgtgatcgtgaccgaggaggccatcgccaagggcatcagaagaatcgtggccgtgaccggcgccgaggcccagaaggccctgagaaaggccgagagcctgaagaagtgcctgagcgtgatggaggccaaggtgaaggcccagaccgcccccaacaaggacgtgcagagagagatcgccgacctgggcgaggccctggccaccgccgtgatcccccagtggcagaaggacgagctgagagagaccctgaagagcctgaagaaggtgatggacgacctggacagagccagcaaggccgacgtgcagaagagagtgctggagaagaccaagcagttcatcgacagcaaccccaaccagcccctggtgatcctggagatggagagcggcgccagcgccaaggccctgaacgaggccctgaagctgttcaagatgcacagcccccagaccagcgccatgctgttcaccgtggacaacgaggccggcaagatcacctgcctgtgccaggtgccccagaacgccgccaacagaggcctgaaggccagcgagtgggtgcagcaggtgagcggcctgatggacggcaagggcggcggcaaggacgtgagcgcccaggccaccggcaagaacgtgggctgcctgcaggaggccctgcagctggccaccagcttcgcccagctgagactgggcgacgtgaagaactag

SEQ ID NO: 119010 - protein, 2436 aa, Artificial Sequence
  derived and/or modified sequence
MGFLHQLQLLLWKNVTLKRRSPWVLAFEIFIPLVLFFILLGLRQKKPTISVKEVAFYTAAPLTSAGILPVMQSLCPDGQRDEFGFLQYANSTVTQLLERLDRVVEEGNLFDPARPSLGSELEALRQHLEALSAGPGTSGSHLDRSTVSSFSLDSVARNPQELWRFLTQNLSLPNSTAQALLAARVDPPEVYHLLFGPSSALDSQSGLHKGQEPWSRLGGNPLFRMEELLLAPALLEQLTCTPGSGELGRILTVPESQKGALQGYRDAVCSGQAAARARRFSGLSAELRNQLDVAKVSQQLGLDAPNGSDSSPQAPPPRRLQALLGDLLDAQKVLQDVDVLSALALLLPQGACTGRTPGPPASGAGGAANGTGAGAVMGPNATAEEGAPSAAALATPDTLQGQCSAFVQLWAGLQPILCGNNRTIEPEALRRGNMSSLGFTSKEQRNLGLLVHLMTSNPKILYAPAGSEVDRVILKANETFAFVGNVTHYAQVWLNISAEIRSFLEQGRLQQHLRWLQQYVAELRLHPEALNLSLDELPPALRQDNFSLPSGMALLQQLDTIDNAACGWIQFMSKVSVDIFKGFHDEESIVNYTLNQAYQDNVTVFASVIFQTRKDGSLPPHVHYKIRQNSSFTEKTNEIRRAYWRPGPNTGGRFYFLYGFVWIQDMMERAIIDTFVGHDVVEPGSYVQMFPYPCYTRDDFLFVIEHMMPLCMVISWVYSVAMTIQHIVAEKEHRLKEVMKTMGLNNAVHWVAWFITGFVQLSISVTALTAILKYGQVLMHSHVVIIWLFLAVYAVATIMFCFLVSVLYSKAKLASACGGIIYFLSYVPYMYVAIREEVAHDKITAFEKCIASLMSTTAFGLGSKYFALYEVAGVGIQWHTFSQSPVEGDDFNLLLAVTMLMVDAVVYGILTWYIEAVHPGMYGLPRPWYFPLQKSYWLGSGRTEAWEWSWPWARTPRLSVMEEDQACAMESRRFEETRGMEEEPTHLPLVVCVDKLTKVYKDDKKLALNKLSLNLYENQVVSFLGHNGAGKTTTMSILTGLFPPTSGSATIYGHDIRTEMDEIRKNLGMCPQHNVLFDRLTVEEHLWFYSRLKSMAQEEIRREMDKMIEDLELSNKRHSLVQTLSGGMKRKLSVAIAFVGGSRAIILDEPTAGVDPYARRAIWDLILKYKPGRTILLSTHHMDEADLLGDRIAIISHGKLKCCGSPLFLKGTYGDGYRLTLVKRPAEPGGPQEPGLASSPPGRAPLSSCSELQVSQFIRKHVASCLLVSDTSTELSYILPSEAAKKGAFERLFQHLERSLDALHLSSFGLMDTTLEEVFLKVSEEDQSLENSEADVKESRKDVLPGAEGPASGEGHAGNLARCSELTQSQASLQSASSVGSARGDEGAGYTDVYGDYRPLFDNPQDPDNVSLQEVEAEALSRVGQGSRKLDGGWLKVRQFHGLLVKRFHCARRNSKALFSQILLPAFFVCVAMTVALSVPEIGDLPPLVLSPSQYHNYTQPRGNFIPYANEERREYRLRLSPDASPQQLVSTFRLPSGVGATCVLKSPANGSLGPTLNLSSGESRLLAARFFDSMCLESFTQGLPLSNFVPPPPSPAPSDSPASPDEDLQAWNVSLPPTAGPEMWTSAPSLPRLVREPVRCTCSAQGTGFSCPSSVGGHPPQMRVVTGDILTDITGHNVSEYLLFTSDRFRLHRYGAITFGNVLKSIPASFGTRAPPMVRKIAVRRAAQVFYNNKGYHSMPTYLNSLNNAILRANLPKSKGNPAAYGITVTNHPMNKTSASLSLDYLLQGTDVVIAIFIIVAMSFVPASFVVFLVAEKSTKAKHLQFVSGCNPIIYWLANYVWDMLNYLVPATCCVIILFVFDLPAYTSPTNFPAVLSLFLLYGWSITPIMYPASFWFEVPSSAYVFLIVINLFIGITATVATFLLQLFEHDKDLKVVNSYLKSCFLIFPNYNLGHGLMEMAYNEYINEYYAKIGQFDKMKSPFEWDIVTRGLVAMAVEGVVGFLLTIMCQYNFLRRPQRMPVSTKPVEDDVDVASERQRVLRGDADNDMVKIENLTKVYKSRKIGRILAVDRLCLGVRPGECFGLLGVNGAGKTSTFKMLTGDESTTGGEAFVNGHSVLKELLQVQQSLGYCPQCDALFDELTAREHLQLYTRLRGISWKDEARVVKWALEKLELTKYADKPAGTYSGGNKRKLSTAIALIGYPAFIFLDEPTTGMDPKARRFLWNLILDLIKTGRSVVLTSHSMEECEALCTRLAIMVNGRLRCLGSIQHLKNRFGDGYMITVRTKSSQSVKDVVRFFNRNFPEAMLKERHHTKVQYQLKSEHISLAQVFSKMEQVSGVLGIEDYSVSQTTLDNVFVNFAKKQSDNLEQQETEPPSALQSPLGCLLSLLRPRSAPTELRALVADEPEDLDTEDEGLISFEEERAQLSFNTDTLC

SEQ ID NO: 119011 - protein, 2436 aa, Artificial Sequence
  derived and/or modified sequence
MGFLHQLQLLLWKNVTLKRRSPWVLAFEIFIPLVLFFILLGLRQKKPTISVKEVSFYTAAPLTSAGILPVMQSLCPDGQRDEFGFLQYANSTVTQLLERLDRVVEEGNLFDPARPSLGSELEALRQHLEALSAGPGTSGSHLDRSTVSSFSLDSVARNPQELWRFLTQNLSLPNSTAQALLAARVDPPEVYHLLFGPSSALDSQSGLHKGQEPWSRLGGNPLFRMEELLLAPALLEQLTCTPGSGELGRILTVPESQKGALQGYRDAVCSGQAAARARRFSGLSAELRNQLDVAKVSQQLGLDAPNGSDSSPQAPPPRRLQALLGDLLDAQKVLQDVDVLSALALLLPQGACTGRTPGPPASGAGGAANGTGAGAVMGPNATAEEGAPSAAALATPDTLQGQCSAFVQLWAGLQPILCGNNRTIEPEALRRGNMSSLGFTSKEQRNLGLLVHLMTSNPKILYAPAGSEVDRVILKANETFAFVGNVTHYAQVWLNISAEIRSFLEQGRLQQHLRWLQQYVAELRLHPEALNLSLDELPPALRQDNFSLPSGMALLQQLDTIDNAACGWIQFMSKVSVDIFKGFHDEESIVNYTLNQAYQDNVTVFASVIFQTRKDGSLPPHVHYKIRQNSSFTEKTNEIRRAYWRPGPNTGGRFYFLYGFVWIQDMMERAIIDTFVGHDVVEPGSYVQMFPYPCYTRDDFLFVIEHMMPLCMVISWVYSVAMTIQHIVAEKEHRLKEVMKTMGLNNAVHWVAWFITGFVQLSISVTALTAILKYGQVLMHSHVVIIWLFLAVYAVATIMFCFLVSVLYSKAKLASACGGIIYFLSYVPYMYVAIREEVAHDKITAFEKCIASLMSTTAFGLGSKYFALYEVAGVGIQWHTFSQSPVEGDDFNLLLAVTMLMVDAVVYGILTWYIEAVHPGMYGLPRPWYFPLQKSYWLGSGRTEAWEWSWPWARTPRLSVMEEDQACAMESRRFEETRGMEEEPTHLPLVVCVDKLTKVYKDDKKLALNKLSLNLYENQVVSFLGHNGAGKTTTMSILTGLFPPTSGSATIYGHDIRTEMDEIRKNLGMCPQHNVLFDRLTVEEHLWFYSRLKSMAQEEIRREMDKMIEDLELSNKRHSLVQTLSGGMKRKLSVAIAFVGGSRAIILDEPTAGVDPYARRAIWDLILKYKPGRTILLSTHHMDEADLLGDRIAIISHGKLKCCGSPLFLKGTYGDGYRLTLVKRPAEPGGPQEPGLASSPPGRAPLSSCSELQVSQFIRKHVASCLLVSDTSTELSYILPSEAAKKGAFERLFQHLERSLDALHLSSFGLMDTTLEEVFLKVSEEDQSLENSEADVKESRKDVLPGAEGPASGEGHAGNLARCSELTQSQASLQSASSVGSARGDEGAGYTDVYGDYRPLFDNPQDPDNVSLQEVEAEALSRVGQGSRKLDGGWLKVRQFHGLLVKRFHCARRNSKALFSQILLPAFFVCVAMTVALSVPEIGDLPPLVLSPSQYHNYTQPRGNFIPYANEERREYRLRLSPDASPQQLVSTFRLPSGVGATCVLKSPANGSLGPTLNLSSGESRLLAARFFDSMCLESFTQGLPLSNFVPPPPSPAPSDSPASPDEDLQAWNVSLPPTAGPEMWTSAPSLPRLVREPVRCTCSAQGTGFSCPSSVGGHPPQMRVVTGDILTDITGHNVSEYLLFTSDRFRLHRYGAITFGNVLKSIPASFGTRAPPMVRKIAVRRAAQVFYNNKGYHSMPTYLNSLNNAILRANLPKSKGNPAAYGITVTNHPMNKTSASLSLDYLLQGTDVVIAIFIIVAMSFVPASFVVFLVAEKSTKAKHLQFVSGCNPIIYWLANYVWDMLNYLVPATCCVIILFVFDLPAYTSPTNFPAVLSLFLLYGWSITPIMYPASFWFEVPSSAYVFLIVINLFIGITATVATFLLQLFEHDKDLKVVNSYLKSCFLIFPNYNLGHGLMEMAYNEYINEYYAKIGQFDKMKSPFEWDIVTRGLVAMAVEGVVGFLLTIMCQYNFLRRPQRMPVSTKPVEDDVDVASERQRVLRGDADNDMVKIENLTKVYKSRKIGRILAVDRLCLGVRPGECFGLLGVNGAGKTSTFKMLTGDESTTGGEAFVNGHSVLKELLQVQQSLGYCPQCDALFDELTAREHLQLYTRLRGISWKDEARVVKWALEKLELTKYADKPAGTYSGGNKRKLSTAIALIGYPAFIFLDEPTTGMDPKARRFLWNLILDLIKTGRSVVLTSHSMEECEALCTRLAIMVNGRLRCLGSIQHLKNRFGDGYMITVRTKSSQSVKDVVRFFNRNFPEAMLKERHHTKVQYQLKSEHISLAQVFSKMEQVSGVLGIEDYSVSQTTLDNVFVNFAKKQSDNLEQQETEPPSALQSPLGCLLSLLRPRSAPTELRALVADEPEDLDTEDEGLISFEEERAQLSFNTDTLC

SEQ ID NO: 119012 - protein, 196 aa, Artificial Sequence
  derived and/or modified sequence
MLTGDESTTGGEAFVNGHSVLKELLQVQQSLGYCPQCDALFDELTAREHLQLYTRLRGISWKDEARVVKWALEKLELTKYADKPAGTYSGGNKRKLSTAIALIGYPAFIFLDEPTTGMDPKARRFLWNLILDLIKTGRSVVLTSHSMEECEALCTRLAIMERSPAVPGQHPAPEEPVWRWLHDHGADQEQPECEGR

SEQ ID NO: 119013 - DNA, 7311 bp, Artificial Sequence
  derived and/or modified sequence
atgggtttcctgcaccagcttcaactcctcctgtggaaaaatgtgacactgaaacgacgctccccttgggttctagcttttgagatcttcatcccattggtgcttttttttattctgttaggcctgcggcagaaaaagcccacgatctcagtgaaggaagtcgcattttacactgccgctcctctcacatctgccgggatcctgccagtcatgcaaagtctgtgtcccgacggacagcgagacgagttcggatttctgcagtatgccaatagcacagtgactcagttgcttgaaaggctggaccgggttgtggaagaggggaacctatttgatcctgcccggcccagtctagggtccgagttagaagctctccgccagcacctagaggccttgtctgccggtcctggtacgtcaggcagccacctggatcggagcaccgtgtcttctttttccttggactccgtcgcacgtaacccgcaggagctgtggcggtttctgacccagaacctgagtctccctaactcaacggcgcaggcgctgttagcagcccgtgtagacccacccgaagtgtatcacctgcttttcgggcctagcagtgccctggattcacaatccggtctccacaagggccaagagccctggagccgactcgggggaaaccctctcttcagaatggaggaactgttgttagctcccgctctgttggagcaactcacttgtactcccggaagtggtgaactaggccgtattttgacagtgcctgaatcacagaaaggcgcactgcagggatacagagatgccgtttgtagcggtcaggcagccgcacgcgcccgaagatttagcggactgagcgcagaactgcgcaaccagctggacgttgctaaagtgagtcagcagttaggactggatgcgccgaacggatctgactccagccctcaggcgcctccgcccaggcggctccaagcgctcctgggggatctgcttgacgcgcagaaggtactgcaggatgttgacgtgctgtctgccctggcgctgctcctgccacagggagcttgtaccggacgaacacctggacccccagctagtggcgctgggggcgctgccaacggaaccggagcaggagctgtgatgggccccaacgcaactgccgaggaaggagctccatcagccgctgcactagccacaccagatactctgcagggccagtgttctgccttcgtgcaactgtgggccgggctgcaacctatcctgtgcggcaataaccgtaccatcgagcccgaggctcttcggcgcggcaacatgagcagcttgggttttacgagcaaggagcaaaggaacctgggacttctggtccacctcatgacatctaacccaaaaatcttatacgcgccagccggtagcgaagtggatcgagtcatcctgaaagccaacgaaactttcgcctttgtgggcaatgtgactcattacgcgcaggtatggcttaacatttccgccgagattagatcctttttggagcaagggcgattgcagcagcacctaagatggctgcagcagtacgtggccgaactcaggctgcatcctgaggcactgaacttgagtctggatgaactgccccctgcgttgaggcaagacaatttcagtctgcccagcggtatggcccttctccagcaactcgacactattgataacgctgcctgcggctggattcagtttatgagcaaggtttccgtggatatcttcaaaggattccatgacgaagagagtatcgtgaactacacccttaatcaggcttatcaggacaatgttaccgtgtttgcctccgtcatcttccagacacgtaaagatggctcacttcctcctcacgtgcactacaaaatcagacaaaatagcagttttactgaaaagactaacgaaatccggagggcttattggaggcctggccccaatacaggggggagattctattttctttatggatttgtttggatccaagatatgatggaaagggccattattgacacctttgtggggcatgacgtggtggaacctggtagctatgttcagatgtttccatatccatgttacactagagacgattttttatttgtaattgagcatatgatgccactctgtatggtcattagttgggtatacagcgtcgcaatgaccattcagcatattgtcgccgagaaggagcaccgcttgaaagaggtaatgaagaccatgggcttaaataacgctgtacactgggttgcttggttcattaccggatttgtgcagctctccatcagtgttactgctctgactgctatattgaagtatggccaggtactcatgcattctcacgtggtcattatctggctgtttctagctgtatacgcggtagccacaatcatgttctgctttttggtgagcgtcctatacagcaaggccaaactcgcctcagcctgtggcggtataatctactttcttagctacgttccctatatgtatgtggcaatccgcgaggaggtcgcccacgacaaaatcacagcctttgagaaatgcattgctagtctgatgtctacaacagcattcggcctgggaagcaagtattttgccctgtacgaggtcgcaggcgtaggaatccagtggcatacattttcacaaagtccagtggagggggatgactttaacttattgctggcagtgactatgctgatggtcgatgccgttgtttacggaatcctgacgtggtatattgaagccgttcaccctggtatgtatggccttcctagaccctggtattttcctctccagaagtcatactggcttggcagcgggcgcaccgaagcctgggagtggagctggccatgggcccgtaccccacgattgagcgttatggaggaggatcaggcatgtgccatggagagccggcggttcgaggaaaccaggggaatggaggaagagccgacccacctacccctggtggtgtgtgtggacaagctgactaaggtgtataaggacgacaaaaaacttgcacttaacaaactctcattgaatctgtacgaaaaccaagtggtcagctttctggggcacaatggggccggaaaaaccacaaccatgtcgatacttactggtctctttccccccacttccggatcagccaccatctatggccacgacattaggactgaaatggatgagattcgcaagaatcttggaatgtgcccccagcataatgtcctgtttgacaggctaaccgtggaggagcatctctggttctacagccgcttgaagtcaatggcccaggaagaaatacgtagagagatggacaaaatgattgaggacctcgaattatccaacaagcggcactcactggttcagacactgagtggcggcatgaaaaggaagttatccgttgcaatcgctttcgtcggaggctcccgggccataattctggatgaacccaccgcaggggtcgatccatacgcccgccgggcaatctgggacctcatcctgaaatacaagcctggccgcactatcctcttgtccacgcatcacatggacgaagcagacctgcttggggaccgtattgcgattatttcccacggcaaactaaaatgctgcggaagtcccttattcctcaaagggacctatggcgatggatataggctgacactcgttaagcgtccagcagagcctggagggccacaagaacctggactagcgagtagtccccctggtcgagcccccttgtctagctgctccgaactgcaagtctcccaatttatccgtaagcatgtggcatcgtgcctgcttgtgagcgatacgtccaccgagctctcttatatcctgccgtctgaagctgccaagaaaggcgcttttgaacggttgttccaacacttagaaaggtcactggacgccttacatctctcctctttcggcctgatggacaccacccttgaggaagttttcctcaaggtgagcgaggaggaccagagcctggaaaactcagaagccgatgtaaaagagtccaggaaggacgtattgcctggcgctgaagggcctgcctcaggagagggccatgcgggtaacctggcccggtgttcagagctgacacagtctcaggcatccctgcagtcagcctccagcgttggatccgccagaggtgacgaaggcgctgggtacaccgacgtgtacggagattaccgaccgcttttcgataatccgcaggaccctgacaatgtgtcccttcaggaagtcgaggctgaagccctcagtagggtcgggcaggggtcacgcaagttagatggggggtggctgaaggtgcgccagttccacggtctgttagtgaaaaggtttcactgcgccagacggaacagcaaagccttgttttcccagatcctactgcccgcatttttcgtctgcgtagcgatgactgtcgcattgtctgtgccagaaataggtgacctacccccactggtcctgtctccatctcagtaccacaactacactcaaccaagggggaactttatcccttacgctaacgaagaacgaagagagtacaggctgcgcttatcaccagatgcctcaccacagcagctggtgagtacattcaggctgccaagcggggttggggccacatgtgtcctcaaaagccctgccaatgggtcacttgggccaactctgaacctgtctagcggcgagtcaagactcctcgcagctagattcttcgactctatgtgtctggagtcttttactcagggactcccactctctaacttcgtcccaccgcctccttcacccgctccctctgactctcctgctagcccggacgaagacctgcaagcatggaacgtttccctaccccccactgcgggcccagagatgtggacctccgctcctagtttgcccagactggtccgagagcctgtgcgctgtacatgcagcgcacaagggactggattcagttgtccctcttcagtaggcggacatcctccacaaatgcgggtcgtgacaggcgacatactgacagacattaccggtcacaacgtgtctgagtatttattgtttacctctgacagatttcgcttacaccgatacggtgcaattactttcggtaacgtgctgaaatccatacctgcctcctttggtactagggccccacctatggtgcggaagatcgcagttagaagagccgcacaggtattttacaataataagggctatcatagtatgccaacgtatcttaacagcctgaataacgcgattcttcgcgccaatctcccaaagtctaaaggaaaccctgctgcatatggaatcacggtgactaatcaccccatgaataaaacttccgccagtctttcgttggattacttactgcaaggcacagacgttgtgatcgccatctttattatcgtagctatgtcttttgtccccgcttccttcgtggtttttcttgtggccgaaaagtccactaaagcaaagcatctccagtttgtcagcggctgcaaccctattatatactggttggccaactacgtctgggatatgttaaactacctagttcccgccacttgttgcgtcattattttgtttgtgttcgacctgcctgcctacacctcgcccaccaattttcccgctgtcctgagcctgttcctcctgtacggatggtcaatcactcccataatgtaccctgccagtttctggtttgaagttccctcctccgcctatgtttttcttatcgttattaacctgttcatcggaataacagctacagtggctacgtttctgcttcagttgtttgaacacgataaggacctgaaggtggtcaactcatatctgaagagctgctttctgatttttccgaattataatcttggacacggcctgatggagatggcctacaatgagtatatcaatgagtattatgcaaagataggccagtttgataagatgaagtcccccttcgaatgggacatcgtgactaggggccttgtagccatggcagtggagggcgtggtcggttttcttttgaccatcatgtgtcaatacaacttcttaaggcgcccccagcgcatgcccgtttccacaaagcctgttgaagacgacgtggacgtggcatcggaacgtcagagagtgcttcgtggagatgccgacaacgacatggtcaaaatcgagaacctgaccaaggtgtataagtcccggaaaattggtagaatcttggccgtggatagactctgcctgggagtccggcccggggaatgttttggtctgctgggggtgaatggcgccggaaaaacatcgacttttaaaatgctaacaggtgatgagagtaccaccgggggcgaagcattcgttaacggccactcagtgcttaaggaactcctacaggtccaacaaagtctcgggtattgtccacagtgcgatgccctcttcgatgagctaaccgctcgagagcacctgcaactgtacacacgactccgcggtatctcttggaaggatgaagcccgcgttgtgaaatgggccctagaaaaactagagctcactaaatatgccgataagcctgcaggcacgtacagcggcggcaacaagaggaagctgagcactgcaattgctctgatcggctatcctgcttttatcttcctcgacgaacccactaccgggatggatcccaaagctaggcgcttcctgtggaacctgattttggacctgataaagacaggcaggtccgtggtactgaccagtcactctatggaggaatgcgaagccctctgtactaggctggccatcatggtaaatgggagattgcgttgcctggggtccatccaacatctgaagaaccgcttcggcgatggatatatgatcactgttcggaccaagagctcccaaagcgtgaaagacgtggtgcgtttttttaatagaaactttcccgaggccatgctgaaggagagacatcacactaaggtacaatatcagctgaagtcggagcacatcagcttagcccaagtgttttctaaaatggagcaggtgagcggtgtcttagggatcgaggattattccgtgtcacagactaccctggacaatgtctttgtgaattttgccaagaagcagtcagataacctcgagcagcaggagactgagcctccatctgctctgcagtcacctctgggatgcttgctctctctcctccgaccacggagcgcaccgacagaactgcgcgcacttgtggctgatgaacccgaggatcttgacacagaagatgagggattaatctccttcgaggaggaaagggcgcaattaagcttcaacacggacaccctctgttag

SEQ ID NO: 119014 - DNA, 7311 bp, Artificial Sequence
  derived and/or modified sequence
atggggttcctgcaccagcttcagcttctgctgtggaagaatgtgacactgaagagaagatccccatgggttctcgccttcgaaatctttattccattggtattatttttcatactgttggggttgcgccagaaaaaaccaacgatctcagtaaaggaggtctccttctacacggctgcccctctgacctctgctgggatcctcccagtcatgcagtctctatgcccagatggccagcgcgatgaattcggatttctccagtacgcaaattcaaccgtgacacagctcttggagcgcttggaccgggtggtagaggagggcaacctgttcgaccctgccagaccatcactgggctccgagctcgaggcgttgagacagcacctggaggctctgtcagctggtcctgggactagtggttcacatctcgacaggtcaaccgtgagctccttttcacttgatagcgtggcccgtaatccccaagaactatggaggttcctaacacagaacctgtctctgccgaattccacggctcaggccctgctggccgctcgcgtagaccctcccgaggtgtatcatctgctgttcgggcctagctctgcgctggattcccagtctggcctgcacaaggggcaggagccttggtccaggctgggtggcaaccccctgttccgcatggaggagctgctcttggcccccgcccttctggagcagctgacctgcaccccaggttccggggaactggggcgcatattgacagtcccagagtcacagaagggtgctctacaaggatacagagacgctgtgtgctccgggcaggcagcagccagggcccgccgattttctgggttgtcagcagagctgagaaaccagcttgatgtggctaaggtgtcccagcaactgggtctggatgccccaaatggcagtgattcatctccacaggcacctcctcctaggaggttacaagccttgctcggtgacctcctggatgcccagaaggtgctacaggacgtggatgtgctttccgctcttgccttgctcctgccccagggggcctgcactggaagaacccctggcccacccgcaagcggggcgggcggcgctgctaacgggacaggggccggcgctgtcatgggcccaaacgctacagccgaagaaggcgccccatccgctgcagctctggcaacgcccgatactctgcaaggacaatgcagcgcctttgtgcaactgtgggccggccttcagcccatcctgtgcggtaacaataggactattgagcccgaggcgctgagacggggcaatatgtccagtctgggcttcacttccaaggaacagcggaacttggggctgctggtacatctgatgactagtaaccccaaaatcctctacgctccggcaggctcagaagtcgatagggtgatccttaaagccaatgaaaccttcgctttcgtgggcaacgtgactcactatgcccaggtttggttgaatatcagcgctgaaatccggtccttcctcgaacaaggccgccttcaacagcacctgagatggctgcagcaatatgtggccgaactgcgcctgcatcctgaagctctcaatctgtcgcttgacgagctgccaccggcccttcgacaggataacttcagcctgccatccggcatggcactcctgcagcagctcgacaccattgataatgctgcttgtggttggatccagtttatgtctaaggtgtccgtggatatcttcaaaggattccacgatgaggaaagcatagttaactatacactcaaccaggcctatcaggataatgtgacagttttcgcctctgttatctttcagacgcgcaaggacgggagtctaccgccacatgttcattataaaatcagacagaactcatcattcaccgaaaagaccaatgagataaggagggcatattggcgccccggaccaaataccggcggacggttctacttcctttacgggttcgtgtggatccaggatatgatggagagggcaatcatcgacactttcgttggccatgacgtggtggaaccaggctcttatgtccaaatgtttccttacccctgttatacaagagacgacttcctcttcgtcatcgagcacatgatgccactgtgtatggtcatcagctgggtctatagcgttgcaatgacaattcaacacatagtggccgagaaggaacatcgcctgaaagaggtgatgaagaccatgggtctaaataatgccgtgcattgggtcgcttggtttattaccggatttgtgcagctgagcatatcagtgaccgcactgaccgccattttgaaatacggtcaagtacttatgcattcccacgtcgtaattatatggttatttctggccgtatacgcagttgcaaccatcatgttctgcttcctggtatccgtgttatacagcaaggcgaaattggcctctgcatgtggaggcatcatctatttcctgtcatatgtgccatatatgtacgtcgcaatccgcgaggaggtggcccatgacaagatcaccgcctttgagaaatgtatcgcttccctcatgtccacaactgcgttcggcttgggtagtaagtattttgctctgtatgaggtggccggagtggggatccagtggcacacattttcccagtctccagtcgaaggagatgatttcaatctgctgcttgcagtgacaatgctgatggtagatgccgtggtatacggaatactcacttggtacattgaagctgtgcatccaggtatgtacggtctgccgaggccctggtacttcccattgcaaaaaagctactggctcggctctgggcgaactgaggcttgggagtggagctggccttgggccagaacacctcgactgagcgtgatggaagaggatcaggcctgtgcaatggaaagtagacgcttcgaagagacaaggggcatggaagaggagccgacacacttacctctcgtggtgtgtgtggacaaattgacgaaagtgtacaaagacgacaaaaagctggctctgaacaaactgtctctcaatctgtatgagaaccaggtagtctcctttctgggccataacggcgctgggaagacaacaactatgtccatcctcaccggcctgttccctcccactagtggcagtgcaactatctatggccatgacatacgaaccgaaatggacgaaatccggaagaacttaggtatgtgcccacagcataatgtgctctttgataggctaaccgtggaggaacatctgtggttttattccagactgaagagcatggcccaggaggagattcgcagagagatggataaaatgatagaagacctggagctatcgaacaagcgccatagcttagtccagacgctttcaggcggtatgaagagaaaactgagcgtggctatcgccttcgtgggtggttcaagggcaatcatcttagacgaacccaccgccggggtggatccctatgcaaggcgggccatctgggatctgatcctgaaatataagccaggaagaacgattttgttgtccacccaccacatggatgaagcggatctgctgggcgatagaattgcaattatcagtcacggaaaacttaaatgttgtggttcccccttattcctcaagggtacatatggtgacggttatcgattgacgttggtgaaacgtcctgctgaacctggcggcccacaggagcctggtctggcgagtagccccccaggccgagctcccctaagttcctgtagcgagttacaggtgtcacaattcatccgcaagcatgtggcatcatgccttctggtgtccgatacatcaacagaactgtcttacatcctgccatctgaagctgccaagaaaggggcgtttgagaggctgtttcagcatctagagaggagcctcgacgcccttcatctgtcatctttcggccttatggacaccactttggaggaggtgttccttaaggtctccgaagaagaccagtcactagagaacagtgaggcagacgttaaggagtcaaggaaagacgtgctccccggagcagaaggaccagcctctggcgagggccacgccggtaacttggccaggtgttcagagcttactcagagtcaagcttctctccagtcagcttcgtctgtcgggagtgctcggggtgacgagggggcaggttatactgacgtgtacggagactatagacctttattcgacaacccgcaggacccggacaatgtaagcctccaggaggtggaggcagaagctctaagtcgggtgggccagggtagccgaaagctggacggagggtggttgaaagttcgccagtttcacggactgctcgtgaaaaggttccattgcgcgcgccggaattctaaagcgttatttagccagatattgttaccagcattctttgtttgtgtggccatgactgttgctctttccgtccccgagattggagatttacctccactcgtgttgtctccatcccagtatcataactatacccagcctcgcgggaattttataccatacgccaacgaagaaagacgggagtatagattgagactgtcaccagacgctagtccccaacagctggtgtccacgttccggctgccttcaggcgttggggctacatgtgtcctaaagtctcccgcgaatggatccctgggccctacactgaacctgtcctcaggcgagagtcgcctactcgccgccagattctttgactctatgtgtctcgaatccttcacccaaggtctaccactgtcgaatttcgtccctcctccgccctcccctgcaccttctgacagccctgcttctccagacgaagacctgcaggcctggaatgtttcgttacctcccactgccgggccggaaatgtggaccagtgctcccagtctgcccagacttgtaagagagcccgtgcggtgtacatgttctgcacagggcacaggtttctcttgtccaagctctgtcggcggccaccctcctcaaatgcgagtagtcactggagatattctcaccgacatcaccggacataatgtctccgagtatctgctcttcacatctgatcgttttcgattacacagatatggtgccatcacgtttggcaacgtcctgaaaagcatcccagccagtttcgggacacgcgcaccgcccatggtacggaaaatcgccgtgcgacgagcagcacaggtgttctacaataacaagggctaccactctatgcctacataccttaattctctcaacaatgctattctcagggccaatttacctaagagcaaaggtaatcccgctgcctacggaatcacagtgacgaaccatccaatgaacaaaacttccgctagcctttctttggactacctgcttcaaggcacagacgtggtcattgccattttcattatcgtcgcaatgtctttcgttccagcaagtttcgtcgttttcctggtcgccgagaagagtaccaaggccaaacatttacaattcgtttcaggctgcaatccgatcatctactggcttgcaaactatgtgtgggacatgcttaactacctggtgcctgctacatgctgcgtgataattctttttgttttcgacctgcctgcctatacgtccccaacaaattttcctgctgttttgtcactgtttctgctgtacggctggagcattacaccaattatgtatcccgcttctttttggttcgaggtgccatcttccgcgtacgtgtttctgatcgtgatcaatctgtttattgggatcaccgccaccgtcgcaacttttctcctgcagttatttgaacacgacaaagacctcaaagttgttaacagctacttgaaaagctgttttcttatcttcccgaactacaacttaggccacggacttatggagatggcctataatgaatatataaacgaatattacgccaagattggccagttcgacaagatgaagtccccgttcgagtgggatatcgtcactcggggcctggtggcaatggccgtggagggggttgtcgggttcctactcaccataatgtgccaatataactttctgcggagaccacaaaggatgcccgtaagtaccaagcctgtggaggatgacgtcgatgtggccagcgagaggcaaagggtgctccggggagacgctgataatgacatggttaaaatcgaaaatctgaccaaagtctataagtcaagaaagataggccggatccttgcagtcgatagactgtgcctcggcgtgagacccggtgaatgcttcgggctgttaggagtcaatggcgccgggaaaaccagtacctttaaaatgctgaccggcgatgagagcaccactggtggggaagccttcgtgaatgggcattccgttctgaaggagcttttacaggtgcaacagtctctcggctactgccctcagtgcgacgctctgtttgatgaactaaccgccagagaacatctgcagctctatactcgccttaggggaatctcttggaaggacgaagccagggtagtgaaatgggccctagagaaactcgagctgacgaagtacgcggataagcccgctggtacatattcgggcggcaacaagcgaaagcttagtacagccatcgcgttaatcgggtaccctgcgtttattttcctggacgaacccacaacaggaatggatccgaaggctaggaggttcctctggaaccttattctggacctaattaaaaccggtagaagcgtggttcttacttcccactccatggaggagtgcgaggccttgtgtactaggctggcaatcatggtgaatggtaggctccgctgcctggggtccatccagcacctgaagaaccgctttggtgatggatacatgatcaccgtccggaccaaatctagccagtccgttaaggatgtggtgcgctttttcaataggaacttccccgaggcgatgttgaaggaaagacatcacaccaaggtgcaataccagttgaaatctgagcatatttcactggcacaggtcttcagtaaaatggaacaggtttcaggcgtcctaggcattgaagattacagcgtaagtcaaactacactggataacgtgtttgtcaattttgctaagaagcagagtgataatctggaacaacaagaaacagagccacccagcgccctgcaaagtcccttgggctgcctattgtctctgctgcgccccagatccgcacctacagagcttagggctctggtggcggacgagcccgaagatctcgacacggaggacgaagggttgataagcttcgaggaggagagggcgcagctgagttttaatactgataccttatgctag

SEQ ID NO: 119015 - DNA, 7311 bp, Artificial Sequence
  derived and/or modified sequence
atgggcttcctgcaccagctgcagctgctgctgtggaagaatgtgaccctgaagagaagaagcccctgggtgctggcctttgagatcttcatccccctggtgctcttcttcatcctgctgggcctgcggcagaagaagcccaccatctctgtgaaggaggtggccttctacacagctgcccccctgaccagcgctggcatcctgcctgtgatgcagagcctgtgcccagatggccagagagatgaatttggcttcctgcagtatgccaacagcacagtgacccagctgctggagcggctggacagagtggtggaggagggcaacctgtttgatcctgcccggcccagcctgggcagcgagctggaggccctgcggcagcacctggaggccctgtctgctggccctggcaccagcggcagccacctggacaggagcacagtgtcctccttcagcctggacagcgtggccaggaacccccaggagctgtggaggttcctgacccagaacctgagcctgcccaacagcacagcccaggccctgctggccgcccgggtggaccccccagaggtgtaccacctgctgtttggccccagcagcgccctggacagccagagcggcctgcacaagggccaggagccctggagccggctgggcggcaaccccctcttcaggatggaggagctgctgctggccccagccctgctggagcagctgacctgcaccccaggcagcggggagctgggccgcatcctgactgtgcctgagagccagaagggggccctgcagggctacagagatgctgtgtgcagcggccaggccgccgcccgggcccggcgcttcagcggcctgtctgctgagctgaggaaccagctggatgtggccaaggtgtcccagcagctgggcctggatgcccccaacggcagtgacagcagcccccaggcccccccaccccggcggctgcaggccctgctgggggacctgctggatgcccagaaggtgctgcaggatgtggatgtgctgagcgccctggccctgctgctgccccagggcgcctgcaccggccgcaccccaggccccccagccagcggggccggcggggccgccaatggaactggagctggagctgtgatgggccccaatgccacagctgaggagggcgcccccagcgctgctgccctggccaccccagacaccctgcagggccagtgcagcgcctttgtgcagctgtgggccggcctgcagcccatcctgtgtggcaacaacagaaccatcgagcctgaggccctgcggcggggcaacatgagcagcctgggcttcaccagcaaggagcagaggaacctgggcctgctggtgcacctgatgaccagcaaccccaagatcctgtatgccccagctggcagcgaggtggacagagtcatcctgaaggccaatgagacctttgcctttgtgggcaatgtgacccactacgcccaggtgtggctgaacatctctgctgagatccgctccttcctggagcagggccgcctgcagcagcacctgcgctggctgcagcagtatgtggccgagctgcggctgcaccctgaggccctgaacctgagcctggatgagctgcccccagccctgcggcaggacaacttcagcctgcccagcggcatggccctgctgcagcagctggacaccatcgacaatgctgcctgtggctggatccagttcatgagcaaggtgtctgtggacatcttcaagggcttccatgatgaggagagcatcgtgaactacaccctgaaccaggcctaccaggacaacgtgacagtgtttgccagcgtcatcttccagaccaggaaggatggcagcctgccccctcatgtgcactacaagatccggcagaacagcagcttcacagagaagaccaatgagatccggcgggcctactggaggcctggccccaacacaggaggccgcttctacttcctgtatggctttgtgtggatccaggacatgatggagcgggccatcatcgacacctttgtgggccatgatgtggtggagcccggcagctatgtgcagatgttcccctacccctgctacaccagagatgacttcctgtttgtgattgagcacatgatgcccctgtgcatggtgatctcctgggtgtacagcgtggccatgaccatccagcacatcgtggccgagaaggagcaccggctgaaggaggtgatgaagaccatgggcctgaacaatgctgtgcactgggtggcctggttcatcaccggctttgtgcagctgagcatctctgtgacagccctgacagccatcctgaagtatggccaggtgctgatgcacagccacgtggtgatcatctggctgttcctggccgtgtatgctgtggccaccatcatgttctgcttcctggtgtctgtgctgtacagcaaggccaagctggccagcgcctgtggcggcatcatctacttcctgtcctatgtgccctacatgtatgtggccatccgggaggaggtggcccatgacaagatcacagcctttgagaagtgcatcgccagcctgatgagcaccacagccttcggcctgggcagcaagtactttgccctgtatgaggtggccggcgtgggcatccagtggcacaccttcagccagagccctgtggagggagatgacttcaacctgctgctggccgtgaccatgctgatggtggatgctgtggtgtatggcatcctgacctggtacatcgaggccgtgcaccctggcatgtatggcctgccccggccctggtacttccccctgcagaagagctactggctgggcagcggccgcacagaggcctgggagtggagctggccctgggcccggaccccccggctgtctgtgatggaggaggaccaggcctgtgccatggagagccgccgctttgaggagacccggggcatggaggaggagcccacccacctgcccctggtggtgtgtgtggacaagctgaccaaggtgtacaaggatgacaagaagctggccctgaacaagctgagcctgaacctgtatgagaaccaggtggtgtccttcctgggccacaatggagctgggaagaccaccaccatgagcatcctgaccggcctcttcccccccaccagcggcagcgccaccatctacggccatgacatcagaacagagatggatgagatcaggaagaacctgggcatgtgcccccagcacaacgtgctgtttgaccggctgactgtggaggagcacctgtggttctacagccggctgaagtccatggcccaggaggagatcagaagagagatggacaagatgattgaggacctggagctgagcaacaagaggcacagcctggtgcagaccctgagcggcggcatgaagaggaagctgtctgtggccatcgcctttgtgggcggcagccgggccatcatcctggatgagcccacagctggggtggacccctatgcccggcgggccatctgggacctgatcctgaagtacaagccaggccgcaccatcctgctgagcacccaccacatggatgaagctgacctgctgggggaccgcatcgccatcatcagccacggcaagctgaagtgctgcggcagccccctcttcctgaagggcacctatggagatggctaccgcctgaccctggtgaagaggcctgctgagcccggcggcccccaggagcccggcctggccagcagccccccaggccgggcccccctgagcagctgcagcgagctgcaggtgtcccagttcatcaggaagcacgtggccagctgcctgctggtgtctgacaccagcacagagctgagctacatcctgcccagcgaggccgccaagaagggggcctttgagcggctcttccagcacctggagaggagcctggatgccctgcacctgagcagctttggcctgatggacaccaccctggaggaggtgttcctgaaggtgtctgaggaggaccagagcctggagaacagcgaggctgatgtgaaggagagcaggaaggatgtgctgcctggagctgagggccctgccagcggggagggccatgctggcaacctggcccgctgcagcgagctgacccagagccaggccagcctgcagagcgccagctctgtgggcagcgcccggggagatgaaggagctggctacacagatgtgtatggagactaccggcccctgtttgacaacccccaggaccctgacaacgtgtccctgcaggaggtggaggccgaggccctgagccgggtgggccagggcagcaggaagctggatggcggctggctgaaggtgcggcagttccacggcctgctggtgaagcgcttccactgtgcccggaggaacagcaaggccctcttcagccagatcctgctgcctgccttctttgtgtgtgtggccatgacagtggccctgtctgtgcctgagatcggggacctgccccccctggtgctgagccccagccagtaccacaactacacccagccccggggcaacttcatcccctatgccaatgaggagcggcgggagtaccgcctgcggctgagcccagatgccagcccccagcagctggtgtccaccttccggctgcccagcggcgtgggcgccacctgtgtgctgaagagccctgccaacggcagcctgggccccaccctgaacctgagcagtggagagagccggctgctggccgcccgcttctttgacagcatgtgcctggagagcttcacccagggcctgcccctgagcaactttgtgcccccaccacccagccctgcccccagcgacagccctgccagcccagatgaggacctgcaggcctggaatgtgtccctgcccccaacagctggccctgagatgtggaccagcgcccccagcctgccccggctggtgcgggagcctgtgcgctgcacctgcagcgcccagggcaccggcttcagctgccccagctctgtgggcggccaccccccccagatgagggtggtgactggagacatcctgacagacatcaccggccacaacgtgtctgagtacctgctcttcaccagtgaccgcttccggctgcacagatatggagccatcacctttggaaatgtgctgaagagcatcccagccagctttggcacccgggccccacccatggtgaggaagattgctgtgagaagagctgcccaggtgttctacaacaacaagggctaccacagcatgcccacctacctgaacagcctgaacaatgccatcctgcgggccaacctgcccaagagcaagggcaacccagctgcctacggcatcaccgtgaccaaccaccccatgaacaagaccagcgccagcctgagcctggactacctgctgcagggcacagatgtggtgattgccatcttcatcatcgtggccatgagctttgtgcctgccagctttgtggtgttcctggtggccgagaagagcaccaaggccaagcacctgcagtttgtgtctggctgcaaccccatcatctactggctggccaactacgtgtgggacatgctgaactacctggtgcctgccacctgctgcgtcatcatcctgtttgtgtttgacctgcctgcctacaccagccccaccaacttccctgctgtgctgagcctcttcctgctgtatggctggagcatcacccccatcatgtacccagccagcttctggtttgaggtgcccagcagcgcctacgtgttcctgattgtcatcaacctcttcatcggcatcacagccaccgtggccaccttcctgctgcagctgtttgaacatgacaaggacctgaaggtggtgaacagctacctgaagagctgcttcctgatcttccccaactacaacctgggccacggcctgatggagatggcctacaatgagtacatcaatgagtactatgccaagattggccagtttgacaagatgaagagcccctttgagtgggacatcgtgacccggggcctggtggccatggctgtggagggcgtggtgggcttcctgctgaccatcatgtgccagtacaacttcctgcggcggccccagaggatgcctgtgtccaccaagcctgtggaggatgatgtggatgtggccagcgagcggcagagggtgctgcggggagatgctgacaatgacatggtgaagattgagaacctgaccaaggtgtacaagagcaggaagattggccgcatcctggccgtggaccggctgtgcctgggcgtgcggcctggagagtgcttcggcctgctgggcgtgaatggagctgggaagaccagcaccttcaagatgctgactggagatgagagcaccaccggcggggaggcctttgtgaatggccacagcgtgctgaaggagctgctgcaggtgcagcagagcctgggctactgcccccagtgtgatgccctgtttgatgagctgacagcccgggagcacctgcagctgtacacccggctgcggggcatctcctggaaggatgaggcccgggtggtgaagtgggccctggagaagctggagctgaccaagtatgctgacaagccagctggcacctacagcggcggcaacaagaggaagctgagcacagccatcgccctgattggctacccagccttcatcttcctggatgagcccaccaccggcatggaccccaaggcccggcgcttcctgtggaacctgatcctggacctgatcaagacaggccgctctgtggtgctgaccagccacagcatggaggagtgtgaggccctgtgcacccggctggccatcatggtgaatggccgcctgcgctgcctgggcagcatccagcacctgaagaacagatttggagatggctacatgatcaccgtgaggaccaagagcagccagagcgtgaaggatgtggtgcgcttcttcaacagaaacttccctgaggccatgctgaaggagcggcaccacaccaaggtgcagtaccagctgaagtctgagcacatcagcctggcccaggtgttcagcaagatggagcaggtgtctggagtgctgggcatcgaggactacagcgtgtcccagaccaccctggacaacgtgtttgtgaactttgccaagaagcagagcgacaacctggagcagcaggagacagagccccccagcgccctgcagagccccctgggctgcctgctgagcctgctgcggcccaggtctgcccccacagagctgcgggccctggtggctgatgagcctgaggacctggacacagaagatgagggcctcatcagctttgaggaggagcgggcccagctgtccttcaacacagacaccctgtgctag

SEQ ID NO: 119016 - DNA, 7311 bp, Artificial Sequence
  derived and/or modified sequence
atgggcttcctgcaccagctgcagctgctgctgtggaagaatgtgaccctgaagagaagaagcccctgggtgctggcctttgagatcttcatccccctggtgctcttcttcatcctgctgggcctgcggcagaagaagcccaccatctctgtgaaggaggtgtccttctacacagctgcccccctgaccagcgctggcatcctgcctgtgatgcagagcctgtgcccagatggccagagagatgaatttggcttcctgcagtatgccaacagcacagtgacccagctgctggagcggctggacagagtggtggaggagggcaacctgtttgatcctgcccggcccagcctgggcagcgagctggaggccctgcggcagcacctggaggccctgtctgctggccctggcaccagcggcagccacctggacaggagcacagtgtcctccttcagcctggacagcgtggccaggaacccccaggagctgtggaggttcctgacccagaacctgagcctgcccaacagcacagcccaggccctgctggccgcccgggtggaccccccagaggtgtaccacctgctgtttggccccagcagcgccctggacagccagagcggcctgcacaagggccaggagccctggagccggctgggcggcaaccccctcttcaggatggaggagctgctgctggccccagccctgctggagcagctgacctgcaccccaggcagcggggagctgggccgcatcctgactgtgcctgagagccagaagggggccctgcagggctacagagatgctgtgtgcagcggccaggccgccgcccgggcccggcgcttcagcggcctgtctgctgagctgaggaaccagctggatgtggccaaggtgtcccagcagctgggcctggatgcccccaacggcagtgacagcagcccccaggcccccccaccccggcggctgcaggccctgctgggggacctgctggatgcccagaaggtgctgcaggatgtggatgtgctgagcgccctggccctgctgctgccccagggcgcctgcaccggccgcaccccaggccccccagccagcggggccggcggggccgccaatggaactggagctggagctgtgatgggccccaatgccacagctgaggagggcgcccccagcgctgctgccctggccaccccagacaccctgcagggccagtgcagcgcctttgtgcagctgtgggccggcctgcagcccatcctgtgtggcaacaacagaaccatcgagcctgaggccctgcggcggggcaacatgagcagcctgggcttcaccagcaaggagcagaggaacctgggcctgctggtgcacctgatgaccagcaaccccaagatcctgtatgccccagctggcagcgaggtggacagagtcatcctgaaggccaatgagacctttgcctttgtgggcaatgtgacccactacgcccaggtgtggctgaacatctctgctgagatccgctccttcctggagcagggccgcctgcagcagcacctgcgctggctgcagcagtatgtggccgagctgcggctgcaccctgaggccctgaacctgagcctggatgagctgcccccagccctgcggcaggacaacttcagcctgcccagcggcatggccctgctgcagcagctggacaccatcgacaatgctgcctgtggctggatccagttcatgagcaaggtgtctgtggacatcttcaagggcttccatgatgaggagagcatcgtgaactacaccctgaaccaggcctaccaggacaacgtgacagtgtttgccagcgtcatcttccagaccaggaaggatggcagcctgccccctcatgtgcactacaagatccggcagaacagcagcttcacagagaagaccaatgagatccggcgggcctactggaggcctggccccaacacaggaggccgcttctacttcctgtatggctttgtgtggatccaggacatgatggagcgggccatcatcgacacctttgtgggccatgatgtggtggagcccggcagctatgtgcagatgttcccctacccctgctacaccagagatgacttcctgtttgtgattgagcacatgatgcccctgtgcatggtgatctcctgggtgtacagcgtggccatgaccatccagcacatcgtggccgagaaggagcaccggctgaaggaggtgatgaagaccatgggcctgaacaatgctgtgcactgggtggcctggttcatcaccggctttgtgcagctgagcatctctgtgacagccctgacagccatcctgaagtatggccaggtgctgatgcacagccacgtggtgatcatctggctgttcctggccgtgtatgctgtggccaccatcatgttctgcttcctggtgtctgtgctgtacagcaaggccaagctggccagcgcctgtggcggcatcatctacttcctgtcctatgtgccctacatgtatgtggccatccgggaggaggtggcccatgacaagatcacagcctttgagaagtgcatcgccagcctgatgagcaccacagccttcggcctgggcagcaagtactttgccctgtatgaggtggccggcgtgggcatccagtggcacaccttcagccagagccctgtggagggagatgacttcaacctgctgctggccgtgaccatgctgatggtggatgctgtggtgtatggcatcctgacctggtacatcgaggccgtgcaccctggcatgtatggcctgccccggccctggtacttccccctgcagaagagctactggctgggcagcggccgcacagaggcctgggagtggagctggccctgggcccggaccccccggctgtctgtgatggaggaggaccaggcctgtgccatggagagccgccgctttgaggagacccggggcatggaggaggagcccacccacctgcccctggtggtgtgtgtggacaagctgaccaaggtgtacaaggatgacaagaagctggccctgaacaagctgagcctgaacctgtatgagaaccaggtggtgtccttcctgggccacaatggagctgggaagaccaccaccatgagcatcctgaccggcctcttcccccccaccagcggcagcgccaccatctacggccatgacatcagaacagagatggatgagatcaggaagaacctgggcatgtgcccccagcacaacgtgctgtttgaccggctgactgtggaggagcacctgtggttctacagccggctgaagtccatggcccaggaggagatcagaagagagatggacaagatgattgaggacctggagctgagcaacaagaggcacagcctggtgcagaccctgagcggcggcatgaagaggaagctgtctgtggccatcgcctttgtgggcggcagccgggccatcatcctggatgagcccacagctggggtggacccctatgcccggcgggccatctgggacctgatcctgaagtacaagccaggccgcaccatcctgctgagcacccaccacatggatgaagctgacctgctgggggaccgcatcgccatcatcagccacggcaagctgaagtgctgcggcagccccctcttcctgaagggcacctatggagatggctaccgcctgaccctggtgaagaggcctgctgagcccggcggcccccaggagcccggcctggccagcagccccccaggccgggcccccctgagcagctgcagcgagctgcaggtgtcccagttcatcaggaagcacgtggccagctgcctgctggtgtctgacaccagcacagagctgagctacatcctgcccagcgaggccgccaagaagggggcctttgagcggctcttccagcacctggagaggagcctggatgccctgcacctgagcagctttggcctgatggacaccaccctggaggaggtgttcctgaaggtgtctgaggaggaccagagcctggagaacagcgaggctgatgtgaaggagagcaggaaggatgtgctgcctggagctgagggccctgccagcggggagggccatgctggcaacctggcccgctgcagcgagctgacccagagccaggccagcctgcagagcgccagctctgtgggcagcgcccggggagatgaaggagctggctacacagatgtgtatggagactaccggcccctgtttgacaacccccaggaccctgacaacgtgtccctgcaggaggtggaggccgaggccctgagccgggtgggccagggcagcaggaagctggatggcggctggctgaaggtgcggcagttccacggcctgctggtgaagcgcttccactgtgcccggaggaacagcaaggccctcttcagccagatcctgctgcctgccttctttgtgtgtgtggccatgacagtggccctgtctgtgcctgagatcggggacctgccccccctggtgctgagccccagccagtaccacaactacacccagccccggggcaacttcatcccctatgccaatgaggagcggcgggagtaccgcctgcggctgagcccagatgccagcccccagcagctggtgtccaccttccggctgcccagcggcgtgggcgccacctgtgtgctgaagagccctgccaacggcagcctgggccccaccctgaacctgagcagtggagagagccggctgctggccgcccgcttctttgacagcatgtgcctggagagcttcacccagggcctgcccctgagcaactttgtgcccccaccacccagccctgcccccagcgacagccctgccagcccagatgaggacctgcaggcctggaatgtgtccctgcccccaacagctggccctgagatgtggaccagcgcccccagcctgccccggctggtgcgggagcctgtgcgctgcacctgcagcgcccagggcaccggcttcagctgccccagctctgtgggcggccaccccccccagatgagggtggtgactggagacatcctgacagacatcaccggccacaacgtgtctgagtacctgctcttcaccagtgaccgcttccggctgcacagatatggagccatcacctttggaaatgtgctgaagagcatcccagccagctttggcacccgggccccacccatggtgaggaagattgctgtgagaagagctgcccaggtgttctacaacaacaagggctaccacagcatgcccacctacctgaacagcctgaacaatgccatcctgcgggccaacctgcccaagagcaagggcaacccagctgcctacggcatcaccgtgaccaaccaccccatgaacaagaccagcgccagcctgagcctggactacctgctgcagggcacagatgtggtgattgccatcttcatcatcgtggccatgagctttgtgcctgccagctttgtggtgttcctggtggccgagaagagcaccaaggccaagcacctgcagtttgtgtctggctgcaaccccatcatctactggctggccaactacgtgtgggacatgctgaactacctggtgcctgccacctgctgcgtcatcatcctgtttgtgtttgacctgcctgcctacaccagccccaccaacttccctgctgtgctgagcctcttcctgctgtatggctggagcatcacccccatcatgtacccagccagcttctggtttgaggtgcccagcagcgcctacgtgttcctgattgtcatcaacctcttcatcggcatcacagccaccgtggccaccttcctgctgcagctgtttgaacatgacaaggacctgaaggtggtgaacagctacctgaagagctgcttcctgatcttccccaactacaacctgggccacggcctgatggagatggcctacaatgagtacatcaatgagtactatgccaagattggccagtttgacaagatgaagagcccctttgagtgggacatcgtgacccggggcctggtggccatggctgtggagggcgtggtgggcttcctgctgaccatcatgtgccagtacaacttcctgcggcggccccagaggatgcctgtgtccaccaagcctgtggaggatgatgtggatgtggccagcgagcggcagagggtgctgcggggagatgctgacaatgacatggtgaagattgagaacctgaccaaggtgtacaagagcaggaagattggccgcatcctggccgtggaccggctgtgcctgggcgtgcggcctggagagtgcttcggcctgctgggcgtgaatggagctgggaagaccagcaccttcaagatgctgactggagatgagagcaccaccggcggggaggcctttgtgaatggccacagcgtgctgaaggagctgctgcaggtgcagcagagcctgggctactgcccccagtgtgatgccctgtttgatgagctgacagcccgggagcacctgcagctgtacacccggctgcggggcatctcctggaaggatgaggcccgggtggtgaagtgggccctggagaagctggagctgaccaagtatgctgacaagccagctggcacctacagcggcggcaacaagaggaagctgagcacagccatcgccctgattggctacccagccttcatcttcctggatgagcccaccaccggcatggaccccaaggcccggcgcttcctgtggaacctgatcctggacctgatcaagacaggccgctctgtggtgctgaccagccacagcatggaggagtgtgaggccctgtgcacccggctggccatcatggtgaatggccgcctgcgctgcctgggcagcatccagcacctgaagaacagatttggagatggctacatgatcaccgtgaggaccaagagcagccagagcgtgaaggatgtggtgcgcttcttcaacagaaacttccctgaggccatgctgaaggagcggcaccacaccaaggtgcagtaccagctgaagtctgagcacatcagcctggcccaggtgttcagcaagatggagcaggtgtctggagtgctgggcatcgaggactacagcgtgtcccagaccaccctggacaacgtgtttgtgaactttgccaagaagcagagcgacaacctggagcagcaggagacagagccccccagcgccctgcagagccccctgggctgcctgctgagcctgctgcggcccaggtctgcccccacagagctgcgggccctggtggctgatgagcctgaggacctggacacagaagatgagggcctcatcagctttgaggaggagcgggcccagctgtccttcaacacagacaccctgtgctag

SEQ ID NO: 119017 - DNA, 7311 bp, Artificial Sequence
  derived and/or modified sequence
atgggcttcctgcaccagctgcagctgctgctgtggaagaacgtgactttgaaacggaggtcaccttgggtgctggcctttgagatttttattcccttggtgctgtttttcatcctgctgggcctgaggcagaagaaacccaccattagcgtaaaggaagtcgccttctatacagcagcccccctgacctccgcagggatacttccggtaatgcaaagtctgtgcccggacggccagcgggatgagtttgggttcctgcagtacgccaacagcacagttacccagttgctggagaggctcgatagagttgtggaggaagggaacctatttgatcccgcaaggccttccctgggctccgagttggaagctctgagacagcacctcgaagccctatccgccggtcccggcacgtcaggaagtcatttggacaggtctaccgtgtcctccttttccctggatagcgtagctaggaacccccaggagctgtggagattcttgacccagaatctcagccttccaaactcgacggcccaggccctgctggccgccagagtggatcccccagaggtataccacctgcttttcgggcctagctctgcactagatagccagtctggactgcataagggccaagagccttggtcacggcttgggggcaaccctctgtttcgtatggaagaactgctgctcgcccccgccttacttgaacagttaacgtgtacacccggctccggagagcttggcaggatactcaccgtccccgaatcccagaagggcgcgctgcagggatatcgggatgccgtgtgttctgggcaggctgctgcacgcgcccggaggtttagcggccttagcgcagagctccggaatcagctggatgtggctaaagtctctcaacaactggggctggatgcccctaatggctccgactctagccctcaggccccgcctccaagacgtttgcaggccctacttggcgacctcttggatgcgcagaaggttttgcaggatgtagatgttctgagcgcattggctctgctgctgcctcagggagcatgtactggacggacacctggtccccctgcctctggggccggtggcgccgccaacggcactggcgctggcgccgtcatgggccctaacgcgactgcggaagagggggccccgtctgctgccgcactggctaccccagacacccttcagggccagtgctcagcgttcgtgcaattgtgggcagggctacagccaatcctctgtggaaataataggaccatagagcccgaagctcttagaagggggaacatgagcagtctgggctttactagcaaagagcagaggaatctaggattgctcgtgcacctgatgaccagcaacccgaagatactgtatgcacccgccggctccgaggttgaccgggtcatactgaaggcaaatgaaacatttgcctttgtggggaacgtgacgcattacgctcaggtttggttaaatatttctgcagagattcgctctttcttggaacagggccgtttgcagcagcatcttagatggcttcagcagtacgtcgccgagctgcgtctgcatcctgaagcactaaatctcagcttagacgaattgccccctgctctgcgccaggacaatttttccctcccctccggaatggcactgttacagcagctggacactatagataatgcggcgtgtgggtggatacagtttatgagtaaggtttctgttgatatattcaagggctttcacgatgaggagtctattgtcaactatacattgaaccaggcctatcaagacaacgtcacggttttcgcttccgtcatcttccagactcgcaaagatgggtcgttgcccccacacgtgcattacaaaatccgtcagaactcatccttcacggaaaagactaacgaaataaggagggcctactggaggcctggtcccaacactggaggacggttctactttctgtatgggtttgtgtggattcaggacatgatggaaagggctatcattgatacatttgtaggtcacgacgtggtagagccaggatcctatgtccagatgtttccctatccctgctacacgcgtgatgattttcttttcgtaatcgagcatatgatgccgctgtgcatggtcatatcttgggtgtacagcgtggcgatgaccattcagcatattgtcgctgagaaggaacaccgactaaaagaagtgatgaaaactatggggttaaacaacgctgtgcattgggtggcgtggtttatcaccgggtttgtacagctcagtattagtgttaccgccctgaccgccatcctcaagtatggacaggtgctgatgcattcccacgtcgtaataatttggctgttccttgccgtgtatgcagtagctactattatgttctgctttctagtctctgttctctactctaaggccaaactagccagcgcatgtggaggcattatttactttctctcatatgttccatacatgtacgtagccatcagggaggaggtggcccatgacaagattactgcctttgagaaatgcatcgctagtctgatgtcaacgactgccttcgggctgggctctaaatacttcgctctatacgaggtggctggtgtgggcatccagtggcacaccttctcccagtcacccgtagaaggcgacgactttaatttgttgctggcagtgacaatgttgatggtcgatgctgtggtttatgggattctaacctggtatatcgaggccgtccaccctggcatgtacgggctgcctcgcccatggtacttcccgcttcagaaaagctactggttaggatctgggagaaccgaagcctgggaatggtcttggccttgggcaaggacgcccaggctgagcgtaatggaggaggaccaagcgtgtgcaatggagagcaggaggttcgaagagactcgaggtatggaggaagagccaacgcatcttcccctcgtggtttgtgtcgataaactgactaaagtttacaaggatgacaaaaagctggctctcaacaagctctccttgaacctttatgagaatcaagtggtaagtttcttaggccacaacggcgccggtaagactactacaatgtcaatcctaacaggtctctttcctcccacatcaggttccgccacaatatatgggcatgatatccggacggaaatggatgagatcaggaagaatctggggatgtgccctcagcacaatgttctgtttgatcgcctaacagtggaagaacatttgtggttctactcccggttgaagtctatggcccaggaggagatccgccgcgagatggacaagatgatcgaagatctggagctgtctaataagcgccacagcctggtgcagacactgagtgggggcatgaaaagaaaattatcggtggccatcgcttttgtcggaggcagccgcgctatcatactcgatgaacccaccgcgggcgtcgacccttacgccaggcgcgcaatctgggacttaatactcaagtataagcctgggagaaccattctgttatcaactcatcatatggatgaggccgacctgctcggcgaccggatcgccatcatttcccatggcaaactaaagtgttgtgggtctccactgtttctaaagggtacatatggggatggctacagactgaccttggtcaagcgacccgccgaacccggagggccacaggagccaggcctggcatccagtccgccaggtcgagctccactttccagttgttccgagctgcaagtctctcagttcattcggaaacatgtggcaagctgtctgctcgtttccgataccagcaccgagctcagctacatcctgccaagcgaggccgcaaaaaaaggagcatttgaaaggctgttccagcatttggaacgctccttggacgccttacacctgtccagctttggtctgatggataccacactggaggaggttttccttaaggtctccgaagaggatcaatccctggagaattcagaggccgacgtgaaagaatctcgcaaagacgtgttgcccggtgccgagggccccgcttccggagaagggcatgctggaaatttagctcggtgctccgagctgactcagagtcaagccagcctgcagagcgcgagttcggtgggatcagctagaggcgatgagggcgcagggtacactgacgtgtatggggactatagaccactgtttgacaatcctcaagacccagacaatgtatcactgcaggaagtggaggcagaggcattatcacgggttggacaggggagcaggaaattggacggtggatggctaaaggtcagacaatttcatggcctcctggttaagaggtttcattgcgctcgcaggaattcaaaggccctgttttcccaaatcctgctaccagccttctttgtgtgtgtggccatgacagtagcactttccgtccctgaaattggggacctgcctcctctggtgctcagcccgtctcaatatcacaattatactcaacctcgtggcaattttataccctacgccaatgaggaacgacgggaatataggttgaggttaagccccgatgcttctccccagcagctggtgtcgacattcagactgccatccggagtaggggccacctgcgttctgaaaagccctgcgaatggttccctggggccaaccttgaacttgtcctctggagagtcaagacttctcgcggctcgcttttttgattccatgtgcttagaaagctttacacagggcctgcctttgagtaactttgtgcctccccctcctagtccagcacctagcgactcacccgcatccccagatgaagatctccaggcctggaacgtcagccttcctcctaccgcagggcccgaaatgtggacctccgcccctagcctgcccagattagtgcgcgagcctgttaggtgcacatgctccgctcagggcactggctttagctgccctagcagcgtcgggggccatccgccccagatgcgggtcgtgactggggatatcctgaccgacatcaccggacataacgtgagcgagtatttgcttttcacttctgatcgcttcagacttcaccggtatggagccatcaccttcggcaacgtgctaaagtctattccagcaagctttggcacgcgcgccccccccatggttcggaagattgccgtgaggagagcagcacaagtcttctataataataagggataccatagcatgcctacctacctaaattctctgaataatgctatcctcagagccaacctacctaagagcaaggggaaccctgccgcttatggaataacagtgacaaaccatcctatgaataaaacatccgcttctctgtcgctggactacctgctccagggaactgatgtcgttatcgctatctttataatagtggcaatgtcctttgtcccagcaagcttcgtggtattcctggtggcggaaaaaagtaccaaggccaagcatctgcagttcgtgagcggatgtaatccaattatctactggttagctaactacgtttgggacatgctgaactacttggtgcccgctacatgctgtgtgatcatcttatttgtgttcgacctacctgcgtatacatcacccacgaacttcccggccgtcctgtctctctttctcctgtacggatggagcatcacacccattatgtatcctgccagtttctggtttgaggtaccctctagcgcgtatgtgtttctgatcgtaattaatttatttattggaataacagccactgtcgcgacattcttactgcagctgttcgagcatgacaaagacctcaaggtggtgaacagttatctcaagagctgtttccttatttttccaaactacaacctgggccacggattgatggagatggcatataatgaatatattaacgaatactatgcaaagatcgggcaattcgacaaaatgaaaagtccttttgagtgggatatagtgacccgcggcctcgtggcgatggccgtggagggcgttgttggattcttattgactattatgtgtcagtacaattttctccggcgccctcagcggatgcccgtctcgactaaaccagtagaggatgatgtggatgtagcttctgaaagacaaagagtgctgagaggcgacgccgacaatgacatggtgaaaatagagaaccttactaaagtttacaagtcaagaaagattggtcggatcctggcggtggaccgcctttgcctgggtgtacgccctggtgaatgtttcggtctgttgggagttaatggtgccggcaagacatctacgttcaagatgctgacaggggacgagtctactactggcggggaggcatttgtaaacggccactctgttttaaaggagctgttgcaagtgcagcagtctttggggtactgcccccagtgcgatgccctttttgacgagctaacagctagagagcatctgcagctatacactcggctgagggggatctcatggaaggatgaggcccgagtggtgaaatgggccttggagaagctggaactgacaaagtacgctgacaagccagccggcacctacagcggtgggaataagagaaaattgagtactgcaattgcactgattggttacccggcatttatcttcctcgacgaaccaacaacaggaatggacccgaaagctcgacgtttcctctggaatctgatactggacttaatcaagaccggacggagcgtagtgctcacctcgcattctatggaggagtgtgaagctctatgcacccgcctggccatcatggttaatggtagactgcgctgtttgggaagcatacagcatctgaaaaacaggttcggagatgggtacatgattaccgtccgaaccaaatcctcccagagtgttaaagacgtggttaggtttttcaacagaaattttcctgaggcaatgctaaaagagaggcatcacacaaaagtgcaataccagctaaagagcgagcacatttcgctggcacaagtcttctctaagatggaacaggtatccggcgtgctgggtatcgaagactattcggtgagccagaccaccctagataacgtctttgtgaacttcgctaaaaaacagtcagacaacttggaacagcaggagaccgagcccccatccgccctgcagtcccctctaggctgtttactgtcactcctgcggccaaggagcgctcctacagagctccgggcacttgttgccgacgaacccgaggatctggacacagaagatgagggcctcatatcgttcgaagaagagcgagcccagctttcattcaacacagacacactgtgttag

SEQ ID NO: 119018 - DNA, 7311 bp, Artificial Sequence
  derived and/or modified sequence
atgggcttcctgcaccagctgcagctgctgctgtggaagaacgtgacactcaagaggcggagtccttgggtccttgcctttgagatttttatcccgctggtactgttttttatcctgctggggctacgccagaagaagcccacaataagcgttaaggaagtaagtttctacaccgccgctccgctgacctctgcagggatactgcccgtgatgcagagcctgtgcccagacggccagcgagatgaatttgggttcctacagtatgccaactctacagtcactcaactgctggaaagactcgaccgcgttgtggaagaggggaacttatttgacccagctcggccttccctggggtcggagctggaggcactacgtcagcatcttgaagctctgagcgcgggaccagggacatctggcagtcatctagaccggagtactgttagctcctttagtctagatagtgtcgcgcgaaacccacaagagctgtggagattcttaacacagaacctgtcccttcccaattcaaccgcccaggctttgctcgccgcaagggttgatccacccgaagtttaccacctgctcttcgggcccagctccgctctcgactcgcagtccggacttcataagggtcaggagccatggtcgagattagggggcaaccctctattccggatggaggaactcctattagcccctgccctccttgagcaacttacttgcacaccaggctctggcgagctgggacggatacttacagtacctgagtcccagaagggggccctacaaggatacagagacgcagtttgcagcggtcaggcagcagcccgtgctaggcgattctctggcttaagcgccgagctaaggaatcaactcgacgttgcaaaggtcagtcagcaacttggtcttgatgccccaaacgggagtgactcttccccccaggcccctcctccccgacgactgcaagccttactgggggacctgctggatgcccaaaaagttctccaggacgtggacgtcctgtccgctcttgctctgctgctcccgcagggggcatgtaccgggcggacccctggcccacccgccagcggagccggtggggccgccaatggcacgggagccggtgcggtcatgggccccaacgccaccgccgaagaaggagccccttccgccgccgctctggcgacaccagatactctacagggacagtgttctgcttttgtccagttatgggcgggtctgcagcccatcctgtgtggcaacaaccgcactattgagcctgaagccttgagacgtggcaacatgtccagcctcggatttacctctaaggagcagcgtaatctcggactcctcgtccatcttatgacctctaacccaaaaattttgtacgcacctgccggctcagaagttgaccgcgtgatcctgaaggccaatgagaccttcgctttcgtagggaacgtcacacattatgcccaagtttggctgaacattagcgctgagattagatcctttttggaacagggaagacttcagcagcatctacgctggctgcagcagtatgttgctgagctccgcctgcatccggaggccctcaacctttctctggatgagctgccacctgccttgcgacaggacaactttagtctgccttcagggatggccttgctacaacagctcgacactatcgataatgccgcttgcggttggattcaattcatgagtaaggtgagcgtagacatcttcaagggatttcacgacgaggagtcaattgtgaattacacgctaaatcaggcctaccaggataacgtcaccgtcttcgcttccgttattttccagactagaaaggacggatcattacccccgcatgttcattacaagataaggcaaaactcttccttcaccgagaagactaatgagatccgcagggcctattggcgtcctggcccaaacactggaggtcgcttctactttctatacgggtttgtgtggatacaggacatgatggaaagagccatcatcgatacatttgtgggacacgacgtcgtcgagcccgggtcatacgtgcagatgtttccctatccatgttacactcgggatgatttcctgtttgtcatcgaacacatgatgcctctttgtatggtgatttcctgggtgtatagtgtcgcgatgacaatccagcatatcgtggccgaaaaagagcaccgcctgaaagaggtcatgaagactatgggactgaataatgcggtgcactgggtggcttggtttattaccggcttcgtccagttgagcatttctgtcacagctcttaccgcaatcctgaaatacgggcaagttctgatgcatagccatgttgtgataatctggctgttcttggctgtgtatgccgtggcgactatcatgttctgcttcctggtctccgtgctctatagcaaggccaaattggcctccgcctgcggaggtatcatttactttctctcttatgtaccttacatgtatgtggcaattcgagaggaggttgcccatgataagatcacagctttcgagaagtgcattgcaagtctcatgtctactaccgcttttggcttgggaagtaagtacttcgcactttacgaggtggctggcgtggggattcagtggcatactttctctcagagtcctgtcgaaggcgacgacttcaatctattgctggccgtgactatgctgatggtggatgctgtcgtgtacggtatacttacatggtacatcgaagccgtccatccgggtatgtacgggctgccccgtccatggtatttccccctgcagaaatcttattggctgggcagtgggcgtaccgaggcttgggaatggtcatggccatgggctcgcaccccccgcctgtcggtgatggaggaagaccaagcttgcgcgatggaatcaaggcggtttgaagagacacgtggcatggaggaggagcctactcaccttcccctcgtggtgtgcgtagacaagctgacaaaagtctataaagacgataaaaaactggcccttaataaactgtctcttaatctctatgagaaccaggtagtctcatttctgggccacaatggcgctggcaagaccaccaccatgagcatcttgaccggtctcttccctcccacatctggatccgccaccatttatggtcacgacattcgcaccgagatggacgaaattcgcaagaacttgggaatgtgtcctcagcacaacgtcctttttgaccgattgaccgtggaggagcacctgtggttctactcccggctgaagagcatggctcaagaggagatacgcagggagatggataaaatgattgaggatctcgaattatcaaacaaaaggcactcattggtgcaaacactgtcaggaggaatgaagaggaagctgtccgtggcgatagcgttcgtcggagggagcagggctattatcctggacgaaccaacagctggggtggacccctatgcccgacgcgctatctgggatctgattctgaagtacaagcccggcagaacaatattgctatcaacccaccacatggatgaggccgacctccttggcgatagaattgccatcatttctcatggaaagttgaagtgctgtggttctcctctatttctgaaaggcacatacggggatggatatcggctgacactcgtaaaacgtccagccgaacctgggggaccccaagaacccggtttagccagcagtccccccggtcgtgcacctctcagctcatgtagcgaattgcaagtttcccagttcattcggaagcacgtcgccagctgtcttcttgtatctgatacatctactgagttgtcatacatactcccatccgaggccgccaaaaagggtgctttcgagaggctttttcagcacctcgaacgaagtctcgacgctttacatctctcatccttcggtctcatggatacaactttggaagaagtctttcttaaagtctccgaagaagaccagtctctggaaaactcggaggcagatgttaaggagtcacggaaggacgtcctgcctggcgcagaaggaccggcatctggcgaggggcacgctggcaatctggcgcgttgctctgagctgacgcagagccaggcgtctttacagtccgcttcctctgtcggctctgctaggggtgatgagggggctggatatactgacgtgtatggagattaccggccattgttcgacaacccacaggaccccgacaacgtgtcactccaagaggttgaggccgaggcactctcccgggtcggccaaggaagtagaaagctggatggggggtggctgaaagtgcggcagtttcatggattactggtgaagagattccattgtgcccggcgcaactctaaagcacttttctcccagatccttcttcccgcattctttgtgtgcgtggcaatgaccgtggccctcagtgtgccagagattggtgatctgccacccctggtcctcagtccaagccagtatcataactacacccagccccgtgggaattttattccctacgcaaacgaggaacgccgggaatatcgtctgagattgagccctgacgcctcgccgcagcagctggtcagcacctttcgactgcccagcggggtcggcgcaacgtgcgtgctcaaatcccctgcgaatggctccttgggaccgaccttgaatctgtcatccggcgagagcaggctgctcgctgcgcgcttctttgatagtatgtgtctcgaatcatttacacaaggcctcccactcagcaattttgtgccgcctcccccctcccccgcaccaagtgacagccctgcttcacctgacgaggacctgcaggcatggaatgtgtctttaccacctaccgccggcccagaaatgtggacttccgccccttccctgcctcgattagtgcgtgaacctgtgcgctgtacttgcagcgcccagggcaccggatttagctgcccatcttccgtcggtggtcaccctccacagatgagagtagtgacaggcgatattttaacagatatcaccggacacaatgtctctgaatatctgctcttcacctctgacagattccgcctgcaccgatacggtgctattacatttggtaatgtcctgaagagcatacctgcctcattcggcacccgtgcacctcctatggttagaaagatcgcggtcaggagggccgcacaggttttctataacaataaaggttaccactcgatgccaacctatttaaacagcttgaataacgcaatactcagggctaatcttcctaagtctaagggcaatccggcagcatatggcattaccgttaccaaccaccctatgaacaaaacctctgcttccctcagtctcgactatctactacaggggactgacgttgttattgctattttcataatcgttgctatgtcttttgtaccggccagcttcgtcgtgttcctcgtggccgaaaagtccaccaaggccaagcacctacagttcgtatccgggtgcaatccaattatttattggctggcaaactacgtgtgggacatgttgaactacctggttcctgccacatgttgtgtcatcatacttttcgtcttcgatcttccagcttatacttctccgactaattttccggctgttctatcacttttcctcctttacggatggagcatcacacccatcatgtatcccgcctctttctggttcgaggtgcccagttccgcctatgtgtttctgattgtgattaatctcttcatcgggataacagcgacagttgctacttttttgttacagctgttcgagcatgacaaagacctgaaagtggttaattcttatctcaagtcatgctttctaattttccctaactacaacctgggtcatggcctaatggagatggcatacaacgaatacataaacgagtattatgcgaaaataggacaattcgataaaatgaagtcccccttcgaatgggacatcgtcactcgaggccttgtcgccatggcggtggagggcgtggtgggcttcctgctaaccatcatgtgccagtacaattttcttcgcaggccacagcgaatgcctgttagcacgaaacccgttgaagacgatgtggacgtggcatcggagcgtcagagggtgctgcgcggtgacgcagacaacgacatggtcaagattgagaatcttactaaagtctataagagtaggaaaatagggcggattctggcagtagacagactgtgcctcggagttaggcctggggaatgtttcggcttactcggggtgaacggggctggaaagacgagcacgttcaaaatgctgactggggatgagtcgacaacgggaggtgaggctttcgtgaatggacacagcgtactcaaagagctgcttcaggttcagcagtccctgggatactgtccacagtgtgacgccctattcgatgaactcacagctcgggagcacctgcaactatacacacgcctgcgtggaatctcttggaaggatgaggccagagtcgttaagtgggcactagaaaagctggaactgacaaaatatgcagacaagcctgcaggtacgtattctggaggcaataagcggaagctgtcaactgccattgcactcattgggtatcccgccttcatcttccttgacgagccaacgaccggcatggatcctaaggcccgcaggtttctttggaacttgatcctcgacctgattaaaacaggccggtccgttgttttgaccagtcatagcatggaggagtgcgaggcactgtgtacaagactagctatcatggttaacggcaggttacgctgtttaggcagtattcagcacctgaagaaccggtttggtgacggctacatgatcaccgttcggactaagtcgtcccagtctgtcaaggatgtcgtgcgtttctttaaccgaaacttcccagaagcaatgctcaaagaacgtcatcacactaaggtgcagtaccagctcaagtccgagcatatatccctcgctcaagttttctccaagatggagcaggtgagtggcgtgcttggcatcgaggattactccgtttcccagacaacacttgataatgtattcgttaattttgcaaagaagcaatcagataatctcgagcaacaggagaccgagcccccttccgctcttcaatcacctttgggatgcctcctcagtctattgcggccgcgttccgccccaactgagctgcgagcccttgttgcagatgagccagaggatctcgatacggaggatgaggggcttatcagcttcgaagaggaacgggctcagcttagttttaatactgatactttgtgttag

SEQ ID NO: 119019 - DNA, 7311 bp, Artificial Sequence
  derived and/or modified sequence
atgggttttctccaccagctgcaacttctactttggaaaaacgtgacacttaaacgaaggagcccctgggtgctggcctttgagatctttatacctttagtgctgttttttattctgctgggtctgaggcaaaagaaacccaccatttctgtgaaagaagtggctttctatactgctgccccactaacgtccgccggtatcctgccagtgatgcagtctctgtgtcccgacggccagcgcgacgagtttggattcctccagtacgcaaacagtacggtgactcagctgctcgaacgccttgatcgcgtcgtcgaagaaggcaatctattcgaccctgcacgtcccagcctgggctccgagctggaggcccttcggcagcatttagaagcgttgtccgcaggtccgggtacctccggaagtcatctcgatcgtagtactgtgtctagcttctctttggattccgtggctagaaatcctcaggaattgtggcgtttcctcacgcagaatctctcattgccaaacagcactgcacaagcattgctggccgctcgggtcgaccctcctgaagtataccacctgctttttggaccttcgtcggctctcgactcgcaaagtgggttgcacaagggccaggagccttggagccggctcggtggcaaccccttattcagaatggaggagctcctcctggctccagccctgctggaacaactcacatgcacccccggatcaggtgaactgggcagaatccttacagtacctgagagtcagaaaggggcactccagggatatcgcgacgccgtgtgctccggtcaagctgccgctcgcgcaagaaggttcagcggtctatccgcggaactgcgtaaccagctagatgtggcaaaagtgtctcagcaactcggcctagacgcacctaacgggtctgactctagccctcaagcccctccacccagaaggctgcaggcactgcttggtgacttgctcgacgcacagaaagtgctgcaggacgtagatgtgctctctgctctggcactccttctgcctcagggtgcttgcactggacggactcccggaccacccgctagcggcgcagggggtgcagcaaatgggactggagccggagccgtcatgggccctaacgccactgccgaagaaggtgctccttctgcggcagccctagccacccctgataccctccagggccagtgctcggccttcgttcagctgtgggcgggtctccaacccatactgtgcggcaacaatcgcaccatcgagccagaggcgctgcgcaggggaaacatgagctcactgggctttaccagcaaagagcaacgcaacctcggactccttgtgcacctgatgacatctaatcccaaaatcctgtacgcacctgctgggagtgaagtagaccgtgtgatcctcaaggcgaatgaaacgtttgcattcgtgggcaatgtaacccactatgcacaagtgtggctgaacatctctgctgagatcagatcctttctcgaacaggggagactccaacagcacctgcgatggctgcagcaatacgtggctgagctgcgcctgcatcctgaggccttaaatctgagtctggatgagctgccgccagcactccgccaggataacttttcacttccctctgggatggctcttctccaacaactggatactatcgataacgcagcttgcggctggatacaattcatgtccaaggtgagcgtcgacatttttaagggatttcatgacgaggagagcatcgtgaactataccctaaaccaggcctaccaggataacgtcaccgttttcgctagtgtaatttttcagacaagaaaagacgggtcacttccacctcacgtgcactataaaatacgccaaaattctagctttaccgaaaaaacaaacgagatcaggagggcgtattggaggcctggacccaatactggcggacgattttatttcctctacggcttcgtttggattcaggacatgatggagagggccattatcgataccttcgtcggccacgacgtggtggagcctggctcctacgttcaaatgttcccatatccctgctatacaagagatgactttctcttcgtgatcgagcatatgatgcctctttgcatggttatttcctgggtttactccgtggctatgactatccaacacatcgtggcagagaaagagcaccgcctgaaggaggtcatgaagactatgggcctgaataacgctgtacattgggtcgcctggttcattactgggttcgtgcagcttagcatctctgtgacagccctcactgccatccttaaatacggccaagtgttgatgcatagccacgtggtgatcatttggttattccttgcggtctacgcagtggcaacgatcatgttttgtttcctggtcagtgtgttgtatagcaaggctaaactggctagcgcttgcggaggtattatctatttcctgtcgtatgtgccttacatgtatgttgcgatccgagaggaggtggcccatgataagataaccgccttcgaaaagtgcattgctagtctaatgtctaccacagctttcggccttggctcaaagtactttgctctgtacgaagttgccggtgtgggaattcagtggcatacgttttctcagtctccagtggaaggcgatgatttcaacctgttactggccgtgacgatgctaatggtggatgcagtagtatacggtatactgacttggtacatagaagctgtccaccccggaatgtatggcctacctagaccttggtactttcccctgcagaagagttactggctgggatctggtcggaccgaggcctgggaatggtcatggccttgggcccgtaccccacggctttctgtgatggaggaggatcaggcttgtgctatggagagccgcaggttcgaggagaccaggggcatggaggaggagcccacacatctaccactggtcgtatgtgtggataaactaaccaaggtttacaaggacgataagaaactggcattgaataaactatcactaaatctttacgaaaatcaagttgtatctttcctgggccacaatggcgcagggaagacgaccaccatgagtatcctgactggactcttccctcctacctctggcagcgccactatttatgggcacgatatccgaacagaaatggacgagattagaaaaaacctcggcatgtgcccgcaacataacgtgctgttcgacaggctgacagtagaagagcatctatggttttacagtcggcttaagagtatggcgcaggaggaaatccgaagggaaatggacaagatgatagaagacctggagttgtccaacaaaaggcattccctagtgcagaccctatcaggtgggatgaaacgaaaattgtccgtagctattgcattcgtggggggatctcgagcaatcatcctggatgagccgaccgccggtgtggatccttatgcgagaagggcgatctgggacctgatcctgaaatacaagcctggaagaacaatccttctcagtacacaccatatggatgaggcggacttgctgggtgaccggatagccatcatctcccacggaaaattgaagtgctgtgggagtccactatttcttaaaggaacttatggagatggatacaggctgacattggtgaaacgacctgctgagcccggtgggcctcaggagccgggtctcgcaagttcaccaccaggcagagctcccctgagcagctgctctgagctgcaggtgagccagtttatacggaagcacgtggccagctgtttactagttagcgatacctcaacggagctgtcatatatccttccctccgaggccgcaaagaagggggcatttgaacgcttattccagcatctggagagaagtcttgatgcgttgcatctgtcctctttcggactgatggataccactcttgaggaggttttccttaaggtgagcgaggaggatcagtccctcgagaattccgaggccgatgttaaggaaagcaggaaagatgttctacccggagccgaaggtccagcctctggcgaggggcatgctggtaatttggcaaggtgcagcgaactgacccagtcacaggcatccctccaatccgcctcctccgtcgggagcgcgaggggagacgagggagctggttatacagacgtctatggcgactaccgtcccctattcgataaccctcaagaccccgataatgtgtcactgcaagaggttgaagcagaggcactttcaagagtgggccaaggaagcaggaagctcgacgggggatggctgaaggtccgccaatttcatggactgctggtgaaaaggttccactgtgccaggcgaaactctaaagcactgttctcacaaatcttgctacctgccttttttgtatgcgtcgctatgacagtcgcgttaagcgtccctgagataggtgatctcccgccattggtgctttctcccagtcaataccataattatactcaacccagaggtaattttatcccttacgcaaacgaggagagaagggagtacaggttgcggttgtctcccgatgcatcaccgcagcaactggtctccaccttcagactacctagtggggtgggagctacgtgcgtgctcaaatctccagcgaatggatcactcgggccaactttgaatttgagttcaggcgaaagccggcttttggccgctcgctttttcgactcaatgtgtctggaatcatttacgcagggcctgcctctatctaactttgtcccaccaccgccatcacccgctccttctgactctcctgcgtcccccgacgaagacttacaagcttggaatgtgtccctacctcctaccgctggaccggagatgtggacctctgctccaagtctgccacgcttggtaagagaaccggtgagatgcacctgttctgcccaaggaacgggattcagctgcccatcctcagttgggggacaccccccacaaatgagggttgttactggagatatcttgactgacataacgggccacaacgtgtcggaatacctcctatttacctccgaccgattcagactgcaccgctatggtgcaatcactttcggcaatgttctgaaatcaatccccgcttcctttggcacccgtgctccgcctatggtacgtaagatcgcggtacggcgtgctgcgcaggttttctataataacaagggataccactccatgcctacctacctcaatagtctgaacaatgccatcctacgcgcaaacctgcccaaaagcaagggcaaccccgctgcttacggaatcacagtcaccaaccaccccatgaacaaaacatccgctagcctcagtttagactacctcctgcaaggaaccgatgtagttatcgcaatctttatcatcgtagcaatgtcattcgtacctgcgagcttcgtcgtgttccttgtggctgaaaagtctacaaaagccaaacatttacaatttgtgtccgggtgcaatcccattatttactggctcgctaactacgtctgggacatgctgaattacctagtccctgcaacctgctgcgtgataatcctgttcgtgtttgacttacccgcttacacctcccctactaatttccccgcagtgttgtcactgtttttgctgtacgggtggagtattacaccaatcatgtaccccgcatccttttggtttgaggtgcccagctccgcctatgtgttcctgattgtgattaacctctttatagggattactgccactgtcgccacctttttgctgcagctcttcgagcacgacaaggatttaaaagtagttaatagttacctgaagtcctgttttctgatatttcccaactacaacctgggccatggactaatggaaatggcttacaatgagtacatcaatgagtactacgccaaaatagggcagttcgacaagatgaagtccccgttcgagtgggacattgtgacccgcggtttggttgctatggctgtcgaaggcgtcgtcggtttcttgctcaccattatgtgtcagtacaacttcctcagacgtccacagcggatgcctgtcagcacaaagcccgtggaagacgacgttgacgttgctagtgaacgacagcgggtgttgagaggggatgcagataacgacatggtgaagattgagaatcttacgaaggtatacaagagtagaaagattggccgtatcctggcagtggatcgcctgtgcttaggagtgagacccggtgaatgctttggcttgctgggggtgaacggtgcgggtaagacttcaacttttaaaatgctcacaggagacgagagcacaacgggaggtgaagccttcgtcaatggacacagcgttctcaaggaattgctgcaggtgcagcagagtttgggatattgcccacagtgtgacgccctcttcgacgaactcactgcacgcgagcatctccagctttatactaggctgcgaggcattagttggaaggacgaggctagagtggttaaatgggccttggaaaagctggagctcaccaaatacgctgataagcccgcaggcacttacagcggcggaaacaagaggaagctgagcaccgccattgctctgatcggttaccccgcttttattttcttggacgagcctacaaccgggatggaccctaaagccagacgctttttatggaacctgatccttgatttgataaagacggggagaagtgtggtgctaacctcacattctatggaagagtgtgaggccctttgcactcgtctggccataatggtcaatggacgcctgaggtgcctcgggtccatccagcatttgaaaaatcggtttggcgatggctatatgatcacggtgcgtacaaaatcgagccagtcagtgaaggacgtggtgaggttcttcaacagaaacttccccgaggccatgcttaaagaacgacaccatacgaaggtgcagtaccagctgaaaagtgaacatattagcctggcccaagttttcagcaagatggagcaggtgagcggagtgctcggaatcgaagattatagcgtgtcacagaccacgctggacaacgtgttcgtgaattttgctaaaaagcagagcgacaacttggagcagcaggaaacagaaccgccaagcgctctacagtctcctctgggttgtttacttagccttctgcgcccacggagcgcccctaccgagttgagggctttagttgcagacgagccggaggatttagacacggaagacgagggactgatctcctttgaagaagaacgtgctcagctgtctttcaacacagacaccttatgctac

SEQ ID NO: 119020 - DNA, 7310 bp, Artificial Sequence
  derived and/or modified sequence
atgggattcttacatcaattgcagctccttttgtggaaaaacgttaccctgaagcgcagatcaccatgggtattagcctttgaaatatttattccattggtgctgttcttcatcctgctgggactccgacagaagaagcccacaatttctgtcaaagaggtcagtttctacacggcagccccactgacgtctgctggcattcttcctgtcatgcagagtctgtgtccagacgggcagcgggacgaatttggctttcttcaatacgccaactccaccgtgacacagctgctggaaaggcttgacagggtagtcgaggagggcaatctcttcgacccagccagaccatcactgggatctgaactggaagccctgagacaacacctcgaagccctgtccgctggcccaggaacctctgggtcccatctagatagaagcacggtgagctcttttagtctcgatagtgtggctaggaatcctcaggagttatggagattcttgacccaaaacctctcgctgccaaattcgacagctcaggcgctccttgccgctcgagtggaccctccagaggtgtaccatctgttattcggccctagctcagccctggatagccaaagtggcttgcacaaagggcaagagccctggtcccgactcggcggaaaccccttgttcaggatggaggaactcctcctggccccagcgctgttagagcagctaacatgcacccccggttctggagagctaggaagaatcctgactgtgcccgagagccagaaaggggcactgcaaggctatcgagacgcagtatgctcagggcaggctgctgcgagagcacgacgcttctccggcttatccgctgagctgaggaatcaacttgacgtagctaaggtttcgcaacaactggggctggatgccccaaacggctcggattcttcaccgcaggcacctccaccccgtagactccaggccctgttgggcgatctgctggatgcacaaaaggtcttacaggacgtggacgttctctccgccttagcccttcttctgcctcagggcgcatgcactgggaggacacctgggccaccagcctcaggcgctgggggagcagccaatgggaccggtgcaggcgcagtgatgggtcccaacgccactgcggaagagggagcaccaagtgccgctgccttagctacccccgacactctgcagggccagtgctccgccttcgtccaactatgggcaggattgcaacccatactgtgcggcaacaatcgaaccatagagccagaagcattgcggagaggtaatatgagtagccttggattcacttctaaagagcagaggaaccttggactactggtacacctaatgacctctaatcccaaaatcctgtacgctccggctggaagcgaagtcgatagagtcatcttgaaagccaacgaaacgtttgccttcgtcggaaatgtgacgcactacgcccaagtttggctcaacatttctgctgagattcgctcctttttggagcaggggagacttcaacagcatctgaggtggctccagcagtacgttgccgaactccgactgcatcctgaggccctcaatctcagcctggacgagctgccacccgcactgagacaagacaacttttctctgccctctggaatggcgttactgcagcagctcgatacgatcgacaatgcggcttgtggatggatacagttcatgagtaaggtcagcgtggacatatttaaggggttccatgacgaagagagcatcgtgaactataccctgaaccaggcttaccaggataacgtgactgtgttcgcttctgttatttttcagactcggaaagacggaagtctgccgcctcacgtgcactacaagatcagacagaattcctctttcacagagaagactaacgaaatcaggcgcgcatattggaggcccggtcctaacactggcggacgcttctactttctttacggatttgtatggattcaggatatgatggagcgcgctattatcgacaccttcgttgggcatgacgtggtggaaccgggaagttatgtgcagatgtttccttacccttgttacacccgggatgactttttgtttgtgatcgagcatatgatgcccttatgtatggtgataagttgggtttattcagtggcgatgactatccagcatattgtcgcagaaaaagagcacaggcttaaagaggttatgaaaacaatgggtctaaacaatgccgttcattgggtcgcttggttcattactggattcgtacagttatctatatctgtcacagccctcaccgctattcttaagtacggtcaggtgttaatgcattctcacgtggttattatctggctgtttctggctgtatacgcagtcgccacgataatgttttgtttcctagtctctgtcctgtattctaaggctaaactagcctctgcctgtggaggcatcatatattttctaagctatgtgccctacatgtatgtggcaatcagagaggaagtggcccatgacaagatcaccgccttcgagaaatgtatcgcctcactcatgagtaccacagcctttggtcttggctccaagtatttcgctctgtatgaagtcgccggagtcggtatccagtggcacaccttcagccagtcacccgtggagggtgacgatttcaatctgctcctcgccgttaccatgctcatggtggatgcggtggtatatggtatcctaacttggtatatcgaagcagtccatccaggtatgtatggcctgccccgtccgtggtatttcccccttcagaagagctactggctcggatccggacgcacagaggcctgggaatggtcatggccttgggctcgcaccccacggctttctgtgatggaagaggaccaggcctgcgctatggagagtcgccgattcgaggaaacccgtgggatggaggaagagcctactcacctaccgttggtcgtgtgtgtagacaaactgaccaaagtttacaaagacgataaaaaacttgccctaaataaattaagtcttaacctgtatgaaaaccaggtggtgtccttcctgggccataacggtgctgggaaaactacgactatgagtatcctgaccggcctatttccccctacgtctggtagtgccacaatctatggacatgacattcgcaccgagatggatgagatcagaaagaaccttggaatgtgtcctcagcacaacgtgctgtttgatcgcctgaccgtggaggaacacctctggttttacagcagactgaagtcaatggctcaggaggaaattcgcagagagatggacaaaatgattgaagacctggaactatcaaataagcgccacagcctggtgcagacactctctggaggaatgaaacggaaactatcagtcgctatagcttttgtggggggttcacgcgctatcatcctagacgaaccaacagctggtgtagatccttacgcacgcagggcaatttgggaccttatcttgaagtataagccaggtcggacaatactgctcagtactcatcatatggacgaggcagacctcctcggtgatcggatagccatcattagccacggcaaactcaagtgttgtggatctcctctgtttctgaagggcacatacggtgacggctatcgccttacactggtaaagagacccgcagagcctgggggaccgcaagagccagggcttgcaagctctccgccaggacgggcacccttatcctcttgttccgagctccaagtgtcccagtttatacgtaagcacgttgcatcctgcctgttggtgtccgacacgtctaccgaactcagctatattttacctagcgaggcagcgaagaagggtgctttcgagcgcctgttccagcacttggagcgctcgctggacgccttgcacttatcaagtttcgggctaatggataccaccctcgaggaagtgttccttaaggtctccgaggaggaccaatccctcgaaaacagcgaggctgacgtcaaagaatcacggaaggacgtgcttcccggagccgaaggtccagccagtggtgaaggtcacgcgggaaacctcgcacggtgtagtgagctaacccagtctcaggcgtcattgcaaagtgctagtagcgtgggaagtgcgcgtggcgatgagggggcagggtatacagacgtctatggcgactatcggccactgttcgacaatccacaggatcccgacaacgtatcgctgcaggaggttgaggcggaggctctctcccgcgttggccagggttccagaaaattagacggagggtggctaaaggttaggcaattccatgggctcctagtgaagaggttccattgcgctcgcagaaactcaaaagccctgttttctcagatcctgctacctgcgttctttgtgtgcgtggctatgacagtggcacttagtgtgccagagattggtgacttgccccctctcgtactctccccttctcagtatcacaattacactcagccacgaggcaacttcataccttatgccaacgaggagcgtcgcgaatataggttgaggttgtcacccgatgctagcccccagcagttggtctctactttccggttgccttctggggtgggagcgacgtgcgttctgaaaagtcctgcaaacggcagcctagggcctaccctgaatctgagctctggagaatccaggcttctggccgcaagattttttgatagcatgtgtcttgagtcattcactcaagggttgcctctgtctaatttcgtcccccctcccccatctcccgcaccatcagacagccccgcttctcctgatgaggatctgcaagcttggaatgtgtctttgcccccaacagctggcccagagatgtggacttctgcccctagcctgcccagattggtgcgtgaacccgttagatgtacatgctctgcacagggcacagggtttagttgcccctcctcagtgggcggacacccgcctcagatgcgggttgtgaccggggacatactcacagatattaccggacataacgtgagcgaatatctcctttttacttccgataggttccgtttacatcgttacggggcaattactttcggcaacgtccttaagtctatcccagccagtttcgggacgcgcgcacctcctatggtgcgcaagatcgccgttaggagagccgcacaagtgttctacaacaataaaggctatcacagcatgcccacctatctgaatagtctaaacaacgccatcctgagggcaaatctgcctaagagcaagggtaaccccgcagcttatggtatcaccgtgacaaaccaccccatgaacaaaacatctgcaagtctcagcctcgactatctgctgcagggcaccgacgtcgtcatcgcaatttttattattgtcgccatgagctttgtgcccgcatctttcgtcgtttttctggtggccgagaaaagtaccaaagcaaaacaccttcagttcgtctctggctgtaacccgattatctattggctcgcaaattatgtgtgggacatgttgaattatctggtgcctgccacctgctgtgtgatcattctgttcgtctttgacctccctgcgtacaccagtcctaccaattttcccgcagtgctatcgctcttcctcctgtatggctggtctattacccccatcatgtacccagcttctttctggttcgaagttccaagctcagcatatgtttttttaattgttatcaacctgtttatcggtattactgccacggtcgctacatttctgctgcagctgttcgaacatgacaaagacctcaaagtggtgaattcctatctgaagagttgtttcttgatcttcccaaactataacctgggccatggccttatggaaatggcctacaacgaatatattaatgagtattacgcaaaaattggccaattcgacaagatgaagtcccccttcgaatgggatatcgtgacacggggactagtggccatggctgtggaaggggtagtagggttcctgctcactataatgtgtcaatataatttcttgcgacgaccccagcgaatgcctgtatccacgaagcctgtcgaggatgatgtagatgtggcctccgagcgccaacgtgtgctgaggggagacgcagataatgacatggtgaaaatcgaaaacctgacaaaggtgtataagagcaggaaaatcggacgaatcctcgcggtggatagactgtgtttaggcgtgcgacccggagagtgttttggactgctcggggtgaatggcgctggtaagacctctacatttaagatgttaactggtgatgagtcgacgacaggaggagaggccttcgtgaatggacatagcgtgctgaaggaactgctgcaggtgcagcagtccttaggctattgtccacaatgtgacgcattgtttgacgagcttacagcacgggagcatctgcagctgtatactcgcctgcgcggaatttcctggaaggacgaggcccgtgtggtgaagtgggccttggagaaacttgagctgaccaagtacgccgataagcctgccggaacatacagcgggggaaataagcgtaaactgagtacggccatcgccctcattgggtatcctgcttttatcttcctggatgagcccactacaggcatggacccaaaagccagaagattcttatggaacctgattctggacttgatcaaaaccggcagaagcgtggtcctgacttcacatagcatggaggagtgcgaagctctttgtaccaggctggcaattatggtgaatggtcggcttcgatgcttaggctcaatccagcacctgaagaatcggttcggcgatggctatatgattactgtgcggaccaaaagcagccagtcggttaaggatgtagtgcggttctttaacagaaattttcccgaggcgatgctgaaagaaaggcaccataccaaggtacagtaccagttaaagtcggaacatatatcactggcccaggtcttctctaagatggagcaggtatccggcgtgctgggaattgaagactacagtgtgtcccagactaccttggacaacgtgtttgtgaattttgcgaaaaaacagagcgacaatcttgaacagcaagagaccgagccacccagtgctctccagtccccacttgggtgcctgctgtctttactacgacccagaagcgcacctaccgagttgagagccctggtcgccgacgaacccgaagacctggacactgaggacgaggggctaatcagcttcgaggaggagcgggctcaactcagctttaacacggacaccctgtgcta

SEQ ID NO: 119021 - DNA, 8154 bp, Artificial Sequence
  derived and/or modified sequence
ggggcggagccagcgcggatcgggtcccggacgcccgagcgccccgcccccgcgcgggcgatgcccagcggcgcggcgggctgcggggcccggcggggcgcgcagaggagcgggccgcggcgctgaggcggcggagcgtggccccgccatgggcttcctgcaccagctgcagctgctgctctggaagaacgtgacgctcaaacgccggagcccgtgggtcctggccttcgagatcttcatccccctggtgctgttctttatcctgctggggctgcgacagaagaagcccaccatctccgtgaaggaagtcgccttctacacagcggcgcccctgacgtctgccggcatcctgcctgtcatgcaatcgctgtgcccggacggccagcgagacgagttcggcttcctgcagtacgccaactccacggtcacgcagctgcttgagcgcctggaccgcgtggtggaggaaggcaacctgtttgacccagcgcggcccagcctgggctcagagctcgaggccctacgccagcatctggaggccctcagtgcgggcccgggcacctcggggagccacctggacagatccacagtgtcttccttctctctggactcggtggccagaaacccgcaggagctctggcgtttcctgacgcaaaacttgtcgctgcccaatagcacggcccaagcactcttggccgcccgtgtggacccgcccgaggtctaccacctgctctttggtccctcatctgccctggattcacagtctggcctccacaagggtcaggagccctggagccgcctagggggcaatcccctgttccggatggaggagctgctgctggctcctgccctcctggagcagctcacctgcacgccgggctcgggggagctgggccggatcctcactgtgcctgagagtcagaagggagccctgcagggctaccgggatgctgtctgcagtgggcaggctgctgcgcgtgccaggcgcttctctgggctgtctgctgagctccggaaccagctggacgtggccaaggtctcccagcagctgggcctggatgcccccaacggctcggactcctcgccacaggcgccacccccacggaggctgcaggcgcttctgggggacctgctggatgcccagaaggttctgcaggatgtggatgtcctgtcggccctggccctgctactgccccagggtgcctgcactggccggacccccggacccccagccagtggtgcgggtggggcggccaatggcactggggcaggggcagtcatgggccccaacgccaccgctgaggagggcgcaccctctgctgcagcactggccaccccggacacgctgcagggccagtgctcagccttcgtacagctctgggccggcctgcagcccatcttgtgtggcaacaaccgcaccattgaacccgaggcgctgcggcggggcaacatgagctccctgggcttcacgagcaaggagcagcggaacctgggcctcctcgtgcacctcatgaccagcaaccccaaaatcctgtacgcgcctgcgggctctgaggtcgaccgcgtcatcctcaaggccaacgagacttttgcttttgtgggcaacgtgactcactatgcccaggtctggctcaacatctcggcggagatccgcagcttcctggagcagggcaggctgcagcaacacctgcgctggctgcagcagtatgtagcagagctgcggctgcaccccgaggcactgaacctgtcactggatgagctgccgccggccctgagacaggacaacttctcgctgcccagtggcatggccctcctgcagcagctggataccattgacaacgcggcctgcggctggatccagttcatgtccaaggtgagcgtggacatcttcaagggcttccacgacgaggagagcattgtcaactacaccctcaaccaggcctaccaggacaacgtcactgtttttgccagtgtgatcttccagacccggaaggacggctcgctcccgcctcacgtgcactacaagatccgccagaactccagcttcaccgagaaaaccaacgagatccgccgcgcctactggcggcctgggcccaatactggcggccgcttctacttcctctacggcttcgtctggatccaggacatgatggagcgcgccatcatcgacacttttgtggggcacgatgtggtggagccaggcagctacgtgcagatgttcccctacccctgctacacacgcgatgacttcctgtttgtcattgagcacatgatgccgctgtgcatggtgatctcctgggtctactccgtggccatgaccatccagcacatcgtggcggagaaggagcaccggctcaaggaggtgatgaagaccatgggcctgaacaacgcggtgcactgggtggcctggttcatcaccggctttgtgcagctgtccatctccgtgacagcactcaccgccatcctgaagtacggccaggtgcttatgcacagccacgtggtcatcatctggctcttcctggcagtctacgcggtggccaccatcatgttctgcttcctggtgtctgtgctgtactccaaggccaagctggcctcggcctgcggtggcatcatctacttcctgagctacgtgccctacatgtacgtggcgatccgagaggaggtggcgcatgataagatcacggccttcgagaagtgcatcgcgtccctcatgtccacgacggcctttggtctgggctctaagtacttcgcgctgtatgaggtggccggcgtgggcatccagtggcacaccttcagccagtccccggtggagggggacgacttcaacttgctcctggctgtcaccatgctgatggtggacgccgtggtctatggcatcctcacgtggtacattgaggctgtgcacccaggcatgtacgggctgccccggccctggtacttcccactgcagaagtcctactggctgggcagtgggcggacagaagcctgggagtggagctggccgtgggcacgcaccccccgcctcagtgtcatggaggaggaccaggcctgtgccatggagagccggcgctttgaggagacccgtggcatggaggaggagcccacccacctgcctctggttgtctgcgtggacaaactcaccaaggtctacaaggacgacaagaagctggccctgaacaagctgagcctgaacctctacgagaaccaggtggtctccttcttgggccacaacggggcgggcaagaccaccaccatgtccatcctgaccggcctgttccctccaacgtcgggttccgccaccatctacgggcacgacatccgcacggagatggatgagatccgcaagaacctgggcatgtgcccgcagcacaatgtgctctttgaccggctcacggtggaggaacacctctggttctactcacggctcaagagcatggctcaggaggagatccgcagagagatggacaagatgatcgaggacctggagctctccaacaaacggcactcactggtgcagacattgtcgggtggcatgaagcgcaagctgtccgtggccatcgccttcgtgggcggctctcgcgccatcatcctggacgagcccacggcgggcgtggacccctacgcgcgccgcgccatctgggacctcatcctgaagtacaagccaggccgcaccatccttctgtccacccaccacatggatgaggctgacctgcttggggaccgcattgccatcatctcccatgggaagctcaagtgctgcggctccccgctcttcctcaagggcacctatggcgacgggtaccgcctcacgctggtcaagcggcccgccgagccggggggcccccaagagccagggctggcatccagccccccaggtcgggccccgctgagcagctgctccgagctccaggtgtcccagttcatccgcaagcatgtggcctcctgcctgctggtctcagacacaagcacggagctctcctacatcctgcccagcgaggccgccaagaagggggctttcgagcgcctcttccagcacctggagcgcagcctggatgcactgcacctcagcagcttcgggctgatggacacgaccctggaggaagtgttcctcaaggtgtcggaggaggatcagtcgctggagaacagtgaggccgatgtgaaggagtccaggaaggatgtgctccctggggcggagggcccggcgtctggggagggtcacgctggcaatctggcccggtgctcggagctgacccagtcgcaggcatcgctgcagtcggcgtcatctgtgggctctgcccgtggcgacgagggagctggctacaccgacgtctatggcgactaccgccccctctttgataacccacaggacccagacaatgtcagcctgcaagaggtggaggcagaggccctgtcgagggtcggccagggcagccgcaagctggacggcgggtggctgaaggtgcgccagttccacgggctgctggtcaaacgcttccactgcgcccgccgcaactccaaggcactcttctcccagatcttgctgccagccttcttcgtctgcgtggccatgaccgtggccctgtccgtcccggagattggtgatctgcccccgctggtcctgtcaccttcccagtaccacaactacacccagccccgtggcaatttcatcccctacgccaacgaggagcgccgcgagtaccggctgcggctatcgcccgacgccagcccccagcagctcgtgagcacgttccggctgccgtcgggggtgggtgccacctgcgtgctcaagtctcccgccaacggctcgctggggcccacgttgaacctgagcagcggggagtcgcgcctgctggcggctcggttcttcgacagcatgtgtctggagtccttcacacaggggctgccactgtccaatttcgtgccacccccaccctcgcccgccccatctgactcgccagcgtccccggatgaggacctgcaggcctggaacgtctccctgccgcccaccgctgggccagaaatgtggacgtcggcaccctccctgccgcgcctggtacgggagcccgtccgctgcacctgctctgcgcagggcaccggcttctcctgccccagcagtgtgggcgggcacccgccccagatgcgggtggtcacaggcgacatcctgaccgacatcaccggccacaatgtctctgagtacctgctcttcacctccgaccgcttccgactgcaccggtatggggccatcacctttggaaacgtcctgaagtccatcccagcctcatttggcaccagggccccacccatggtgcggaagatcgcggtgcgcagggctgcccaggttttctacaacaacaagggctatcacagcatgcccacctacctcaacagcctcaacaacgccatcctgcgtgccaacctgcccaagagcaagggcaacccggcggcttacggcatcaccgtcaccaaccaccccatgaataagaccagcgccagcctctccctggattacctgctgcagggcacggatgtcgtcatcgccatcttcatcatcgtggccatgtccttcgtgccggccagcttcgttgtcttcctcgtggccgagaagtccaccaaggccaagcacctgcagtttgtcagcggctgcaaccccatcatctactggctggcgaactacgtgtgggacatgctcaactacctggtccccgctacctgctgtgtcatcatcctgtttgtgttcgacctgccggcctacacgtcgcccaccaacttccctgccgtcctctccctcttcctgctctatgggtggtccatcacgcccatcatgtacccggcctccttctggttcgaggtccccagctccgcctacgtgttcctcattgtcatcaatctcttcatcggcatcaccgccaccgtggccaccttcctgctacagctcttcgagcacgacaaggacctgaaggttgtcaacagttacctgaaaagctgcttcctcattttccccaactacaacctgggccacgggctcatggagatggcctacaacgagtacatcaacgagtactacgccaagattggccagtttgacaagatgaagtccccgttcgagtgggacattgtcacccgcggactggtggccatggcggttgagggcgtcgtgggcttcctcctgaccatcatgtgccagtacaacttcctgcggcggccacagcgcatgcctgtgtctaccaagcctgtggaggatgatgtggacgtggccagtgagcggcagcgagtgctccggggagacgccgacaatgacatggtcaagattgagaacctgaccaaggtctacaagtcccggaagattggccgtatcctggccgttgaccgcctgtgcctgggtgtgcgtcctggcgagtgcttcgggctcctgggcgtcaacggtgcgggcaagaccagcaccttcaagatgctgaccggcgacgagagcacgacggggggcgaggccttcgtcaatggacacagcgtgctgaaggagctgctccaggtgcagcagagcctcggctactgcccgcagtgtgacgcgctgttcgacgagctcacggcccgggagcacctgcagctgtacacgcggctgcgtgggatctcctggaaggacgaggcccgggtggtgaagtgggctctggagaagctggagctgaccaagtacgcagacaagccggctggcacctacagcggcggcaacaagcggaagctctccacggccatcgccctcattgggtacccagccttcatcttcctggacgagcccaccacaggcatggaccccaaggcccggcgcttcctctggaacctcatccttgacctcatcaagacagggcgttcagtggtgctgacatcacacagcatggaggagtgcgaggcgctgtgcacgcggctggccatcatggtgaacggtcgcctgcggtgcctgggcagcatccagcacctgaagaaccggtttggagatggctacatgatcacggtgcggaccaagagcagccagagtgtgaaggacgtggtgcggttcttcaaccgcaacttcccggaagccatgctcaaggagcggcaccacacaaaggtgcagtaccagctcaagtcggagcacatctcgctggcccaggtgttcagcaagatggagcaggtgtctggcgtgctgggcatcgaggactactcggtcagccagaccacactggacaatgtgttcgtgaactttgccaagaagcagagtgacaacctggagcagcaggagacggagccgccatccgcactgcagtcccctctcggctgcttgctcagcctgctccggccccggtctgcccccacggagctccgggcacttgtggcagacgagcccgaggacctggacacggaggacgagggcctcatcagcttcgaggaggagcgggcccagctgtccttcaacacggacacgctctgctgaccacccagagctgggccagggaggacacgctccactgaccacccagagctgggccagggactcaacaatggggacagaagtcccccagtgcctgccagggcctggagtggaggttcaggaccaaggggcttctggtcctccagcccctgtactcggccatgccctgtggtcactgcggttgccgcccctaattgtgccaaaggctgacccggcccgggctgcgtacacccttgccctgctttgccttaaagcctcggggtctgcccggcccctcgcccctgcctggcactgctcaccgcccaaggcgacgccggctggaccaggcactgctggcctttctcctgcccggcctcggaaccagcttttctctcttacgatgaaggctgatgccgagagcgggctgtgggcggagctgggtcagtcccgtatttattttgctttgagaagaggctcctctggccctgctctcctgcagggaggtggctgtcctgcgggaagccatcagcttgggccagctggcaggtggcaggaatggagaagctgaccctgctggccaggcaaggggccagaccccccccaacccccagctgccatcgctctcccacccagcttggccccctgcccgcccacctccctgggagccgggcctgtacatagcgcacagatgtttgttttaaataaataaacaaaatgtc

SEQ ID NO: 119022 - DNA, 8056 bp, Artificial Sequence
  derived and/or modified sequence
cgcgcagaggagcgggccgcggcgctgaggcggcggagcgtggccccgccatgggcttcctgcaccagctgcagctgctgctctggaagaacgtgacgctcaaacgccggagcccgtgggtcctggccttcgagatcttcatccccctggtgctgttctttatcctgctggggctgcgacagaagaagcccaccatctccgtgaaggaagtctccttctacacagcggcgcccctgacgtctgccggcatcctgcctgtcatgcaatcgctgtgcccggacggccagcgagacgagttcggcttcctgcagtacgccaactccacggtcacgcagctgcttgagcgcctggaccgcgtggtggaggaaggcaacctgtttgacccagcgcggcccagcctgggctcagagctcgaggccctacgccagcatctggaggccctcagtgcgggcccgggcacctcggggagccacctggacagatccacagtgtcttccttctctctggactcggtggccagaaacccgcaggagctctggcgtttcctgacgcaaaacttgtcgctgcccaatagcacggcccaagcactcttggccgcccgtgtggacccgcccgaggtctaccacctgctctttggtccctcatctgccctggattcacagtctggcctccacaagggtcaggagccctggagccgcctagggggcaatcccctgttccggatggaggagctgctgctggctcctgccctcctggagcagctcacctgcacgccgggctcgggggagctgggccggatcctcactgtgcctgagagtcagaagggagccctgcagggctaccgggatgctgtctgcagtgggcaggctgctgcgcgtgccaggcgcttctctgggctgtctgctgagctccggaaccagctggacgtggccaaggtctcccagcagctgggcctggatgcccccaacggctcggactcctcgccacaggcgccacccccacggaggctgcaggcgcttctgggggacctgctggatgcccagaaggttctgcaggatgtggatgtcctgtcggccctggccctgctactgccccagggtgcctgcactggccggacccccggacccccagccagtggtgcgggtggggcggccaatggcactggggcaggggcagtcatgggccccaacgccaccgctgaggagggcgcaccctctgctgcagcactggccaccccggacacgctgcagggccagtgctcagccttcgtacagctctgggccggcctgcagcccatcttgtgtggcaacaaccgcaccattgaacccgaggcgctgcggcggggcaacatgagctccctgggcttcacgagcaaggagcagcggaacctgggcctcctcgtgcacctcatgaccagcaaccccaaaatcctgtacgcgcctgcgggctctgaggtcgaccgcgtcatcctcaaggccaacgagacttttgcttttgtgggcaacgtgactcactatgcccaggtctggctcaacatctcggcggagatccgcagcttcctggagcagggcaggctgcagcaacacctgcgctggctgcagcagtatgtagcagagctgcggctgcaccccgaggcactgaacctgtcactggatgagctgccgccggccctgagacaggacaacttctcgctgcccagtggcatggccctcctgcagcagctggataccattgacaacgcggcctgcggctggatccagttcatgtccaaggtgagcgtggacatcttcaagggcttccacgacgaggagagcattgtcaactacaccctcaaccaggcctaccaggacaacgtcactgtttttgccagtgtgatcttccagacccggaaggacggctcgctcccgcctcacgtgcactacaagatccgccagaactccagcttcaccgagaaaaccaacgagatccgccgcgcctactggcggcctgggcccaatactggcggccgcttctacttcctctacggcttcgtctggatccaggacatgatggagcgcgccatcatcgacacttttgtggggcacgatgtggtggagccaggcagctacgtgcagatgttcccctacccctgctacacacgcgatgacttcctgtttgtcattgagcacatgatgccgctgtgcatggtgatctcctgggtctactccgtggccatgaccatccagcacatcgtggcggagaaggagcaccggctcaaggaggtgatgaagaccatgggcctgaacaacgcggtgcactgggtggcctggttcatcaccggctttgtgcagctgtccatctccgtgacagcactcaccgccatcctgaagtacggccaggtgcttatgcacagccacgtggtcatcatctggctcttcctggcagtctacgcggtggccaccatcatgttctgcttcctggtgtctgtgctgtactccaaggccaagctggcctcggcctgcggtggcatcatctacttcctgagctacgtgccctacatgtacgtggcgatccgagaggaggtggcgcatgataagatcacggccttcgagaagtgcatcgcgtccctcatgtccacgacggcctttggtctgggctctaagtacttcgcgctgtatgaggtggccggcgtgggcatccagtggcacaccttcagccagtccccggtggagggggacgacttcaacttgctcctggctgtcaccatgctgatggtggacgccgtggtctatggcatcctcacgtggtacattgaggctgtgcacccaggcatgtacgggctgccccggccctggtacttcccactgcagaagtcctactggctgggcagtgggcggacagaagcctgggagtggagctggccgtgggcacgcaccccccgcctcagtgtcatggaggaggaccaggcctgtgccatggagagccggcgctttgaggagacccgtggcatggaggaggagcccacccacctgcctctggttgtctgcgtggacaaactcaccaaggtctacaaggacgacaagaagctggccctgaacaagctgagcctgaacctctacgagaaccaggtggtctccttcttgggccacaacggggcgggcaagaccaccaccatgtccatcctgaccggcctgttccctccaacgtcgggttccgccaccatctacgggcacgacatccgcacggagatggatgagatccgcaagaacctgggcatgtgcccgcagcacaatgtgctctttgaccggctcacggtggaggaacacctctggttctactcacggctcaagagcatggctcaggaggagatccgcagagagatggacaagatgatcgaggacctggagctctccaacaaacggcactcactggtgcagacattgtcgggtggcatgaagcgcaagctgtccgtggccatcgccttcgtgggcggctctcgcgccatcatcctggacgagcccacggcgggcgtggacccctacgcgcgccgcgccatctgggacctcatcctgaagtacaagccaggccgcaccatccttctgtccacccaccacatggatgaggctgacctgcttggggaccgcattgccatcatctcccatgggaagctcaagtgctgcggctccccgctcttcctcaagggcacctatggcgacgggtaccgcctcacgctggtcaagcggcccgccgagccggggggcccccaagagccagggctggcatccagccccccaggtcgggccccgctgagcagctgctccgagctccaggtgtcccagttcatccgcaagcatgtggcctcctgcctgctggtctcagacacaagcacggagctctcctacatcctgcccagcgaggccgccaagaagggggctttcgagcgcctcttccagcacctggagcgcagcctggatgcactgcacctcagcagcttcgggctgatggacacgaccctggaggaagtgttcctcaaggtgtcggaggaggatcagtcgctggagaacagtgaggccgatgtgaaggagtccaggaaggatgtgctccctggggcggagggcccggcgtctggggagggtcacgctggcaatctggcccggtgctcggagctgacccagtcgcaggcatcgctgcagtcggcgtcatctgtgggctctgcccgtggcgacgagggagctggctacaccgacgtctatggcgactaccgccccctctttgataacccacaggacccagacaatgtcagcctgcaagaggtggaggcagaggccctgtcgagggtcggccagggcagccgcaagctggacggcgggtggctgaaggtgcgccagttccacgggctgctggtcaaacgcttccactgcgcccgccgcaactccaaggcactcttctcccagatcttgctgccagccttcttcgtctgcgtggccatgaccgtggccctgtccgtcccggagattggtgatctgcccccgctggtcctgtcaccttcccagtaccacaactacacccagccccgtggcaatttcatcccctacgccaacgaggagcgccgcgagtaccggctgcggctatcgcccgacgccagcccccagcagctcgtgagcacgttccggctgccgtcgggggtgggtgccacctgcgtgctcaagtctcccgccaacggctcgctggggcccacgttgaacctgagcagcggggagtcgcgcctgctggcggctcggttcttcgacagcatgtgtctggagtccttcacacaggggctgccactgtccaatttcgtgccacccccaccctcgcccgccccatctgactcgccagcgtccccggatgaggacctgcaggcctggaacgtctccctgccgcccaccgctgggccagaaatgtggacgtcggcaccctccctgccgcgcctggtacgggagcccgtccgctgcacctgctctgcgcagggcaccggcttctcctgccccagcagtgtgggcgggcacccgccccagatgcgggtggtcacaggcgacatcctgaccgacatcaccggccacaatgtctctgagtacctgctcttcacctccgaccgcttccgactgcaccggtatggggccatcacctttggaaacgtcctgaagtccatcccagcctcatttggcaccagggccccacccatggtgcggaagatcgcggtgcgcagggctgcccaggttttctacaacaacaagggctatcacagcatgcccacctacctcaacagcctcaacaacgccatcctgcgtgccaacctgcccaagagcaagggcaacccggcggcttacggcatcaccgtcaccaaccaccccatgaataagaccagcgccagcctctccctggattacctgctgcagggcacggatgtcgtcatcgccatcttcatcatcgtggccatgtccttcgtgccggccagcttcgttgtcttcctcgtggccgagaagtccaccaaggccaagcacctgcagtttgtcagcggctgcaaccccatcatctactggctggcgaactacgtgtgggacatgctcaactacctggtccccgctacctgctgtgtcatcatcctgtttgtgttcgacctgccggcctacacgtcgcccaccaacttccctgccgtcctctccctcttcctgctctatgggtggtccatcacgcccatcatgtacccggcctccttctggttcgaggtccccagctccgcctacgtgttcctcattgtcatcaatctcttcatcggcatcaccgccaccgtggccaccttcctgctacagctcttcgagcacgacaaggacctgaaggttgtcaacagttacctgaaaagctgcttcctcattttccccaactacaacctgggccacgggctcatggagatggcctacaacgagtacatcaacgagtactacgccaagattggccagtttgacaagatgaagtccccgttcgagtgggacattgtcacccgcggactggtggccatggcggttgagggcgtcgtgggcttcctcctgaccatcatgtgccagtacaacttcctgcggcggccacagcgcatgcctgtgtctaccaagcctgtggaggatgatgtggacgtggccagtgagcggcagcgagtgctccggggagacgccgacaatgacatggtcaagattgagaacctgaccaaggtctacaagtcccggaagattggccgtatcctggccgttgaccgcctgtgcctgggtgtgcgtcctggcgagtgcttcgggctcctgggcgtcaacggtgcgggcaagaccagcaccttcaagatgctgaccggcgacgagagcacgacggggggcgaggccttcgtcaatggacacagcgtgctgaaggagctgctccaggtgcagcagagcctcggctactgcccgcagtgtgacgcgctgttcgacgagctcacggcccgggagcacctgcagctgtacacgcggctgcgtgggatctcctggaaggacgaggcccgggtggtgaagtgggctctggagaagctggagctgaccaagtacgcagacaagccggctggcacctacagcggcggcaacaagcggaagctctccacggccatcgccctcattgggtacccagccttcatcttcctggacgagcccaccacaggcatggaccccaaggcccggcgcttcctctggaacctcatccttgacctcatcaagacagggcgttcagtggtgctgacatcacacagcatggaggagtgcgaggcgctgtgcacgcggctggccatcatggtgaacggtcgcctgcggtgcctgggcagcatccagcacctgaagaaccggtttggagatggctacatgatcacggtgcggaccaagagcagccagagtgtgaaggacgtggtgcggttcttcaaccgcaacttcccggaagccatgctcaaggagcggcaccacacaaaggtgcagtaccagctcaagtcggagcacatctcgctggcccaggtgttcagcaagatggagcaggtgtctggcgtgctgggcatcgaggactactcggtcagccagaccacactggacaatgtgttcgtgaactttgccaagaagcagagtgacaacctggagcagcaggagacggagccgccatccgcactgcagtcccctctcggctgcttgctcagcctgctccggccccggtctgcccccacggagctccgggcacttgtggcagacgagcccgaggacctggacacggaggacgagggcctcatcagcttcgaggaggagcgggcccagctgtccttcaacacggacacgctctgctgaccacccagagctgggccagggaggacacgctccactgaccacccagagctgggccagggactcaacaatggggacagaagtcccccagtgcctgccagggcctggagtggaggttcaggaccaaggggcttctggtcctccagcccctgtactcggccatgccctgtggtcactgcggttgccgcccctaattgtgccaaaggctgacccggcccgggctgcgtacacccttgccctgctttgccttaaagcctcggggtctgcccggcccctcgcccctgcctggcactgctcaccgcccaaggcgacgccggctggaccaggcactgctggcctttctcctgcccggcctcggaaccagcttttctctcttacgatgaaggctgatgccgagagcgggctgtgggcggagctgggtcagtcccgtatttattttgctttgagaagaggctcctctggccctgctctcctgcagggaggtggctgtcctgcgggaagccatcagcttgggccagctggcaggtggcaggaatggagaagctgaccctgctggccaggcaaggggccagaccccccccaacccccagctgccatcgctctcccacccagcttggccccctgcccgcccacctccctgggagccgggcctgtacatagcgcacagatgtttgttttaaataaataaacaaaatgtc

SEQ ID NO: 119023 - DNA, 7311 bp, Artificial Sequence
  derived and/or modified sequence
atgggcttcctgcaccagctgcagctgctgctgtggaagaacgtgaccctgaagagaagaagcccctgggtgctggccttcgagatcttcatccccctggtgctgttcttcatcctgctgggcctgagacagaagaagcccaccatcagcgtgaaggaggtggccttctacaccgccgcccccctgaccagcgccggcatcctgcccgtgatgcagagcctgtgccccgacggccagagagacgagttcggcttcctgcagtacgccaacagcaccgtgacccagctgctggagagactggacagagtggtggaggagggcaacctgttcgaccccgccagacccagcctgggcagcgagctggaggccctgagacagcacctggaggccctgagcgccggccccggcaccagcggcagccacctggacagaagcaccgtgagcagcttcagcctggacagcgtggccagaaacccccaggagctgtggagattcctgacccagaacctgagcctgcccaacagcaccgcccaggccctgctggccgccagagtggacccccccgaggtgtaccacctgctgttcggccccagcagcgccctggacagccagagcggcctgcacaagggccaggagccctggagcagactgggcggcaaccccctgttcagaatggaggagctgctgctggcccccgccctgctggagcagctgacctgcacccccggcagcggcgagctgggcagaatcctgaccgtgcccgagagccagaagggcgccctgcagggctacagagacgccgtgtgcagcggccaggccgccgccagagccagaagattcagcggcctgagcgccgagctgagaaaccagctggacgtggccaaggtgagccagcagctgggcctggacgcccccaacggcagcgacagcagcccccaggcccccccccccagaagactgcaggccctgctgggcgacctgctggacgcccagaaggtgctgcaggacgtggacgtgctgagcgccctggccctgctgctgccccagggcgcctgcaccggcagaacccccggcccccccgccagcggcgccggcggcgccgccaacggcaccggcgccggcgccgtgatgggccccaacgccaccgccgaggagggcgcccccagcgccgccgccctggccacccccgacaccctgcagggccagtgcagcgccttcgtgcagctgtgggccggcctgcagcccatcctgtgcggcaacaacagaaccatcgagcccgaggccctgagaagaggcaacatgagcagcctgggcttcaccagcaaggagcagagaaacctgggcctgctggtgcacctgatgaccagcaaccccaagatcctgtacgcccccgccggcagcgaggtggacagagtgatcctgaaggccaacgagaccttcgccttcgtgggcaacgtgacccactacgcccaggtgtggctgaacatcagcgccgagatcagaagcttcctggagcagggcagactgcagcagcacctgagatggctgcagcagtacgtggccgagctgagactgcaccccgaggccctgaacctgagcctggacgagctgccccccgccctgagacaggacaacttcagcctgcccagcggcatggccctgctgcagcagctggacaccatcgacaacgccgcctgcggctggatccagttcatgagcaaggtgagcgtggacatcttcaagggcttccacgacgaggagagcatcgtgaactacaccctgaaccaggcctaccaggacaacgtgaccgtgttcgccagcgtgatcttccagaccagaaaggacggcagcctgcccccccacgtgcactacaagatcagacagaacagcagcttcaccgagaagaccaacgagatcagaagagcctactggagacccggccccaacaccggcggcagattctacttcctgtacggcttcgtgtggatccaggacatgatggagagagccatcatcgacaccttcgtgggccacgacgtggtggagcccggcagctacgtgcagatgttcccctacccctgctacaccagagacgacttcctgttcgtgatcgagcacatgatgcccctgtgcatggtgatcagctgggtgtacagcgtggccatgaccatccagcacatcgtggccgagaaggagcacagactgaaggaggtgatgaagaccatgggcctgaacaacgccgtgcactgggtggcctggttcatcaccggcttcgtgcagctgagcatcagcgtgaccgccctgaccgccatcctgaagtacggccaggtgctgatgcacagccacgtggtgatcatctggctgttcctggccgtgtacgccgtggccaccatcatgttctgcttcctggtgagcgtgctgtacagcaaggccaagctggccagcgcctgcggcggcatcatctacttcctgagctacgtgccctacatgtacgtggccatcagagaggaggtggcccacgacaagatcaccgccttcgagaagtgcatcgccagcctgatgagcaccaccgccttcggcctgggcagcaagtacttcgccctgtacgaggtggccggcgtgggcatccagtggcacaccttcagccagagccccgtggagggcgacgacttcaacctgctgctggccgtgaccatgctgatggtggacgccgtggtgtacggcatcctgacctggtacatcgaggccgtgcaccccggcatgtacggcctgcccagaccctggtacttccccctgcagaagagctactggctgggcagcggcagaaccgaggcctgggagtggagctggccctgggccagaacccccagactgagcgtgatggaggaggaccaggcctgcgccatggagagcagaagattcgaggagaccagaggcatggaggaggagcccacccacctgcccctggtggtgtgcgtggacaagctgaccaaggtgtacaaggacgacaagaagctggccctgaacaagctgagcctgaacctgtacgagaaccaggtggtgagcttcctgggccacaacggcgccggcaagaccaccaccatgagcatcctgaccggcctgttcccccccaccagcggcagcgccaccatctacggccacgacatcagaaccgagatggacgagatcagaaagaacctgggcatgtgcccccagcacaacgtgctgttcgacagactgaccgtggaggagcacctgtggttctacagcagactgaagagcatggcccaggaggagatcagaagagagatggacaagatgatcgaggacctggagctgagcaacaagagacacagcctggtgcagaccctgagcggcggcatgaagagaaagctgagcgtggccatcgccttcgtgggcggcagcagagccatcatcctggacgagcccaccgccggcgtggacccctacgccagaagagccatctgggacctgatcctgaagtacaagcccggcagaaccatcctgctgagcacccaccacatggacgaggccgacctgctgggcgacagaatcgccatcatcagccacggcaagctgaagtgctgcggcagccccctgttcctgaagggcacctacggcgacggctacagactgaccctggtgaagagacccgccgagcccggcggcccccaggagcccggcctggccagcagcccccccggcagagcccccctgagcagctgcagcgagctgcaggtgagccagttcatcagaaagcacgtggccagctgcctgctggtgagcgacaccagcaccgagctgagctacatcctgcccagcgaggccgccaagaagggcgccttcgagagactgttccagcacctggagagaagcctggacgccctgcacctgagcagcttcggcctgatggacaccaccctggaggaggtgttcctgaaggtgagcgaggaggaccagagcctggagaacagcgaggccgacgtgaaggagagcagaaaggacgtgctgcccggcgccgagggccccgccagcggcgagggccacgccggcaacctggccagatgcagcgagctgacccagagccaggccagcctgcagagcgccagcagcgtgggcagcgccagaggcgacgagggcgccggctacaccgacgtgtacggcgactacagacccctgttcgacaacccccaggaccccgacaacgtgagcctgcaggaggtggaggccgaggccctgagcagagtgggccagggcagcagaaagctggacggcggctggctgaaggtgagacagttccacggcctgctggtgaagagattccactgcgccagaagaaacagcaaggccctgttcagccagatcctgctgcccgccttcttcgtgtgcgtggccatgaccgtggccctgagcgtgcccgagatcggcgacctgccccccctggtgctgagccccagccagtaccacaactacacccagcccagaggcaacttcatcccctacgccaacgaggagagaagagagtacagactgagactgagccccgacgccagcccccagcagctggtgagcaccttcagactgcccagcggcgtgggcgccacctgcgtgctgaagagccccgccaacggcagcctgggccccaccctgaacctgagcagcggcgagagcagactgctggccgccagattcttcgacagcatgtgcctggagagcttcacccagggcctgcccctgagcaacttcgtgccccccccccccagccccgcccccagcgacagccccgccagccccgacgaggacctgcaggcctggaacgtgagcctgccccccaccgccggccccgagatgtggaccagcgcccccagcctgcccagactggtgagagagcccgtgagatgcacctgcagcgcccagggcaccggcttcagctgccccagcagcgtgggcggccaccccccccagatgagagtggtgaccggcgacatcctgaccgacatcaccggccacaacgtgagcgagtacctgctgttcaccagcgacagattcagactgcacagatacggcgccatcaccttcggcaacgtgctgaagagcatccccgccagcttcggcaccagagccccccccatggtgagaaagatcgccgtgagaagagccgcccaggtgttctacaacaacaagggctaccacagcatgcccacctacctgaacagcctgaacaacgccatcctgagagccaacctgcccaagagcaagggcaaccccgccgcctacggcatcaccgtgaccaaccaccccatgaacaagaccagcgccagcctgagcctggactacctgctgcagggcaccgacgtggtgatcgccatcttcatcatcgtggccatgagcttcgtgcccgccagcttcgtggtgttcctggtggccgagaagagcaccaaggccaagcacctgcagttcgtgagcggctgcaaccccatcatctactggctggccaactacgtgtgggacatgctgaactacctggtgcccgccacctgctgcgtgatcatcctgttcgtgttcgacctgcccgcctacaccagccccaccaacttccccgccgtgctgagcctgttcctgctgtacggctggagcatcacccccatcatgtaccccgccagcttctggttcgaggtgcccagcagcgcctacgtgttcctgatcgtgatcaacctgttcatcggcatcaccgccaccgtggccaccttcctgctgcagctgttcgagcacgacaaggacctgaaggtggtgaacagctacctgaagagctgcttcctgatcttccccaactacaacctgggccacggcctgatggagatggcctacaacgagtacatcaacgagtactacgccaagatcggccagttcgacaagatgaagagccccttcgagtgggacatcgtgaccagaggcctggtggccatggccgtggagggcgtggtgggcttcctgctgaccatcatgtgccagtacaacttcctgagaagaccccagagaatgcccgtgagcaccaagcccgtggaggacgacgtggacgtggccagcgagagacagagagtgctgagaggcgacgccgacaacgacatggtgaagatcgagaacctgaccaaggtgtacaagagcagaaagatcggcagaatcctggccgtggacagactgtgcctgggcgtgagacccggcgagtgcttcggcctgctgggcgtgaacggcgccggcaagaccagcaccttcaagatgctgaccggcgacgagagcaccaccggcggcgaggccttcgtgaacggccacagcgtgctgaaggagctgctgcaggtgcagcagagcctgggctactgcccccagtgcgacgccctgttcgacgagctgaccgccagagagcacctgcagctgtacaccagactgagaggcatcagctggaaggacgaggccagagtggtgaagtgggccctggagaagctggagctgaccaagtacgccgacaagcccgccggcacctacagcggcggcaacaagagaaagctgagcaccgccatcgccctgatcggctaccccgccttcatcttcctggacgagcccaccaccggcatggaccccaaggccagaagattcctgtggaacctgatcctggacctgatcaagaccggcagaagcgtggtgctgaccagccacagcatggaggagtgcgaggccctgtgcaccagactggccatcatggtgaacggcagactgagatgcctgggcagcatccagcacctgaagaacagattcggcgacggctacatgatcaccgtgagaaccaagagcagccagagcgtgaaggacgtggtgagattcttcaacagaaacttccccgaggccatgctgaaggagagacaccacaccaaggtgcagtaccagctgaagagcgagcacatcagcctggcccaggtgttcagcaagatggagcaggtgagcggcgtgctgggcatcgaggactacagcgtgagccagaccaccctggacaacgtgttcgtgaacttcgccaagaagcagagcgacaacctggagcagcaggagaccgagccccccagcgccctgcagagccccctgggctgcctgctgagcctgctgagacccagaagcgcccccaccgagctgagagccctggtggccgacgagcccgaggacctggacaccgaggacgagggcctgatcagcttcgaggaggagagagcccagctgagcttcaacaccgacaccctgtgctag

SEQ ID NO: 119024 - DNA, 7311 bp, Artificial Sequence
  derived and/or modified sequence
atgggcttcctgcaccagctgcagctgctgctgtggaagaacgtgaccctgaagagaagaagcccctgggtgctggccttcgagatcttcatccccctggtgctgttcttcatcctgctgggcctgagacagaagaagcccaccatcagcgtgaaggaggtgagcttctacaccgccgcccccctgaccagcgccggcatcctgcccgtgatgcagagcctgtgccccgacggccagagagacgagttcggcttcctgcagtacgccaacagcaccgtgacccagctgctggagagactggacagagtggtggaggagggcaacctgttcgaccccgccagacccagcctgggcagcgagctggaggccctgagacagcacctggaggccctgagcgccggccccggcaccagcggcagccacctggacagaagcaccgtgagcagcttcagcctggacagcgtggccagaaacccccaggagctgtggagattcctgacccagaacctgagcctgcccaacagcaccgcccaggccctgctggccgccagagtggacccccccgaggtgtaccacctgctgttcggccccagcagcgccctggacagccagagcggcctgcacaagggccaggagccctggagcagactgggcggcaaccccctgttcagaatggaggagctgctgctggcccccgccctgctggagcagctgacctgcacccccggcagcggcgagctgggcagaatcctgaccgtgcccgagagccagaagggcgccctgcagggctacagagacgccgtgtgcagcggccaggccgccgccagagccagaagattcagcggcctgagcgccgagctgagaaaccagctggacgtggccaaggtgagccagcagctgggcctggacgcccccaacggcagcgacagcagcccccaggcccccccccccagaagactgcaggccctgctgggcgacctgctggacgcccagaaggtgctgcaggacgtggacgtgctgagcgccctggccctgctgctgccccagggcgcctgcaccggcagaacccccggcccccccgccagcggcgccggcggcgccgccaacggcaccggcgccggcgccgtgatgggccccaacgccaccgccgaggagggcgcccccagcgccgccgccctggccacccccgacaccctgcagggccagtgcagcgccttcgtgcagctgtgggccggcctgcagcccatcctgtgcggcaacaacagaaccatcgagcccgaggccctgagaagaggcaacatgagcagcctgggcttcaccagcaaggagcagagaaacctgggcctgctggtgcacctgatgaccagcaaccccaagatcctgtacgcccccgccggcagcgaggtggacagagtgatcctgaaggccaacgagaccttcgccttcgtgggcaacgtgacccactacgcccaggtgtggctgaacatcagcgccgagatcagaagcttcctggagcagggcagactgcagcagcacctgagatggctgcagcagtacgtggccgagctgagactgcaccccgaggccctgaacctgagcctggacgagctgccccccgccctgagacaggacaacttcagcctgcccagcggcatggccctgctgcagcagctggacaccatcgacaacgccgcctgcggctggatccagttcatgagcaaggtgagcgtggacatcttcaagggcttccacgacgaggagagcatcgtgaactacaccctgaaccaggcctaccaggacaacgtgaccgtgttcgccagcgtgatcttccagaccagaaaggacggcagcctgcccccccacgtgcactacaagatcagacagaacagcagcttcaccgagaagaccaacgagatcagaagagcctactggagacccggccccaacaccggcggcagattctacttcctgtacggcttcgtgtggatccaggacatgatggagagagccatcatcgacaccttcgtgggccacgacgtggtggagcccggcagctacgtgcagatgttcccctacccctgctacaccagagacgacttcctgttcgtgatcgagcacatgatgcccctgtgcatggtgatcagctgggtgtacagcgtggccatgaccatccagcacatcgtggccgagaaggagcacagactgaaggaggtgatgaagaccatgggcctgaacaacgccgtgcactgggtggcctggttcatcaccggcttcgtgcagctgagcatcagcgtgaccgccctgaccgccatcctgaagtacggccaggtgctgatgcacagccacgtggtgatcatctggctgttcctggccgtgtacgccgtggccaccatcatgttctgcttcctggtgagcgtgctgtacagcaaggccaagctggccagcgcctgcggcggcatcatctacttcctgagctacgtgccctacatgtacgtggccatcagagaggaggtggcccacgacaagatcaccgccttcgagaagtgcatcgccagcctgatgagcaccaccgccttcggcctgggcagcaagtacttcgccctgtacgaggtggccggcgtgggcatccagtggcacaccttcagccagagccccgtggagggcgacgacttcaacctgctgctggccgtgaccatgctgatggtggacgccgtggtgtacggcatcctgacctggtacatcgaggccgtgcaccccggcatgtacggcctgcccagaccctggtacttccccctgcagaagagctactggctgggcagcggcagaaccgaggcctgggagtggagctggccctgggccagaacccccagactgagcgtgatggaggaggaccaggcctgcgccatggagagcagaagattcgaggagaccagaggcatggaggaggagcccacccacctgcccctggtggtgtgcgtggacaagctgaccaaggtgtacaaggacgacaagaagctggccctgaacaagctgagcctgaacctgtacgagaaccaggtggtgagcttcctgggccacaacggcgccggcaagaccaccaccatgagcatcctgaccggcctgttcccccccaccagcggcagcgccaccatctacggccacgacatcagaaccgagatggacgagatcagaaagaacctgggcatgtgcccccagcacaacgtgctgttcgacagactgaccgtggaggagcacctgtggttctacagcagactgaagagcatggcccaggaggagatcagaagagagatggacaagatgatcgaggacctggagctgagcaacaagagacacagcctggtgcagaccctgagcggcggcatgaagagaaagctgagcgtggccatcgccttcgtgggcggcagcagagccatcatcctggacgagcccaccgccggcgtggacccctacgccagaagagccatctgggacctgatcctgaagtacaagcccggcagaaccatcctgctgagcacccaccacatggacgaggccgacctgctgggcgacagaatcgccatcatcagccacggcaagctgaagtgctgcggcagccccctgttcctgaagggcacctacggcgacggctacagactgaccctggtgaagagacccgccgagcccggcggcccccaggagcccggcctggccagcagcccccccggcagagcccccctgagcagctgcagcgagctgcaggtgagccagttcatcagaaagcacgtggccagctgcctgctggtgagcgacaccagcaccgagctgagctacatcctgcccagcgaggccgccaagaagggcgccttcgagagactgttccagcacctggagagaagcctggacgccctgcacctgagcagcttcggcctgatggacaccaccctggaggaggtgttcctgaaggtgagcgaggaggaccagagcctggagaacagcgaggccgacgtgaaggagagcagaaaggacgtgctgcccggcgccgagggccccgccagcggcgagggccacgccggcaacctggccagatgcagcgagctgacccagagccaggccagcctgcagagcgccagcagcgtgggcagcgccagaggcgacgagggcgccggctacaccgacgtgtacggcgactacagacccctgttcgacaacccccaggaccccgacaacgtgagcctgcaggaggtggaggccgaggccctgagcagagtgggccagggcagcagaaagctggacggcggctggctgaaggtgagacagttccacggcctgctggtgaagagattccactgcgccagaagaaacagcaaggccctgttcagccagatcctgctgcccgccttcttcgtgtgcgtggccatgaccgtggccctgagcgtgcccgagatcggcgacctgccccccctggtgctgagccccagccagtaccacaactacacccagcccagaggcaacttcatcccctacgccaacgaggagagaagagagtacagactgagactgagccccgacgccagcccccagcagctggtgagcaccttcagactgcccagcggcgtgggcgccacctgcgtgctgaagagccccgccaacggcagcctgggccccaccctgaacctgagcagcggcgagagcagactgctggccgccagattcttcgacagcatgtgcctggagagcttcacccagggcctgcccctgagcaacttcgtgccccccccccccagccccgcccccagcgacagccccgccagccccgacgaggacctgcaggcctggaacgtgagcctgccccccaccgccggccccgagatgtggaccagcgcccccagcctgcccagactggtgagagagcccgtgagatgcacctgcagcgcccagggcaccggcttcagctgccccagcagcgtgggcggccaccccccccagatgagagtggtgaccggcgacatcctgaccgacatcaccggccacaacgtgagcgagtacctgctgttcaccagcgacagattcagactgcacagatacggcgccatcaccttcggcaacgtgctgaagagcatccccgccagcttcggcaccagagccccccccatggtgagaaagatcgccgtgagaagagccgcccaggtgttctacaacaacaagggctaccacagcatgcccacctacctgaacagcctgaacaacgccatcctgagagccaacctgcccaagagcaagggcaaccccgccgcctacggcatcaccgtgaccaaccaccccatgaacaagaccagcgccagcctgagcctggactacctgctgcagggcaccgacgtggtgatcgccatcttcatcatcgtggccatgagcttcgtgcccgccagcttcgtggtgttcctggtggccgagaagagcaccaaggccaagcacctgcagttcgtgagcggctgcaaccccatcatctactggctggccaactacgtgtgggacatgctgaactacctggtgcccgccacctgctgcgtgatcatcctgttcgtgttcgacctgcccgcctacaccagccccaccaacttccccgccgtgctgagcctgttcctgctgtacggctggagcatcacccccatcatgtaccccgccagcttctggttcgaggtgcccagcagcgcctacgtgttcctgatcgtgatcaacctgttcatcggcatcaccgccaccgtggccaccttcctgctgcagctgttcgagcacgacaaggacctgaaggtggtgaacagctacctgaagagctgcttcctgatcttccccaactacaacctgggccacggcctgatggagatggcctacaacgagtacatcaacgagtactacgccaagatcggccagttcgacaagatgaagagccccttcgagtgggacatcgtgaccagaggcctggtggccatggccgtggagggcgtggtgggcttcctgctgaccatcatgtgccagtacaacttcctgagaagaccccagagaatgcccgtgagcaccaagcccgtggaggacgacgtggacgtggccagcgagagacagagagtgctgagaggcgacgccgacaacgacatggtgaagatcgagaacctgaccaaggtgtacaagagcagaaagatcggcagaatcctggccgtggacagactgtgcctgggcgtgagacccggcgagtgcttcggcctgctgggcgtgaacggcgccggcaagaccagcaccttcaagatgctgaccggcgacgagagcaccaccggcggcgaggccttcgtgaacggccacagcgtgctgaaggagctgctgcaggtgcagcagagcctgggctactgcccccagtgcgacgccctgttcgacgagctgaccgccagagagcacctgcagctgtacaccagactgagaggcatcagctggaaggacgaggccagagtggtgaagtgggccctggagaagctggagctgaccaagtacgccgacaagcccgccggcacctacagcggcggcaacaagagaaagctgagcaccgccatcgccctgatcggctaccccgccttcatcttcctggacgagcccaccaccggcatggaccccaaggccagaagattcctgtggaacctgatcctggacctgatcaagaccggcagaagcgtggtgctgaccagccacagcatggaggagtgcgaggccctgtgcaccagactggccatcatggtgaacggcagactgagatgcctgggcagcatccagcacctgaagaacagattcggcgacggctacatgatcaccgtgagaaccaagagcagccagagcgtgaaggacgtggtgagattcttcaacagaaacttccccgaggccatgctgaaggagagacaccacaccaaggtgcagtaccagctgaagagcgagcacatcagcctggcccaggtgttcagcaagatggagcaggtgagcggcgtgctgggcatcgaggactacagcgtgagccagaccaccctggacaacgtgttcgtgaacttcgccaagaagcagagcgacaacctggagcagcaggagaccgagccccccagcgccctgcagagccccctgggctgcctgctgagcctgctgagacccagaagcgcccccaccgagctgagagccctggtggccgacgagcccgaggacctggacaccgaggacgagggcctgatcagcttcgaggaggagagagcccagctgagcttcaacaccgacaccctgtgctag

SEQ ID NO: 119025 - protein, 424 aa, Artificial Sequence
  derived and/or modified sequence
MQRLQVVLGHLRGPADSGWMPQAAPCLSGAPQASAADVVVVHGRRTAICRAGRGGFKDTTPDELLSAVMTAVLKDVNLRPEQLGDICVGNVLQPGAGAIMARIAQFLSDIPETVPLSTVNRQCSSGLQAVASIAGGIRNGSYDIGMACGVESMSLADRGNPGNITSRLMEKEKARDCLIPMGITSENVAERFGISREKQDTFALASQQKAARAQSKGCFQAEIVPVTTTVHDDKGTKRSITVTQDEGIRPSTTMEGLAKLKPAFKKDGSTTAGNSSQVSDGAAAILLARRSKAEELGLPILGVLRSYAVVGVPPDIMGIGPAYAIPVALQKAGLTVSDVDIFEINEAFASQAAYCVEKLRLPPEKVNPLGGAVALGHPLGCTGARQVITLLNELKRRGKRAYGVVSMCIGTGMGAAAVFEYPGN

SEQ ID NO: 119026 - protein, 356 aa, Artificial Sequence [sequence omitted]

SEQ ID NO: 119027 - protein, 153 aa, Artificial Sequence
  derived and/or modified sequence
MQRLQVVLGHLRGPADSGWMPQAAPCLSGAPQASAADVVVVHGRRTAICRAGRGGFKDTTPDELLSAVMTAVLKDVNLRPEQLGDICVGNVLQPGAGAIMARIAQFLSDIPETVPLSTVNRQCSSGLQAVASIAGWSPCPWLTEGTLEILLRA

SEQ ID NO: 119028 - DNA, 1275 bp, Artificial Sequence
  derived and/or modified sequence
atgcagcggctgcaggtcgtgttgggacacctgcgcggccccgcggacagcgggtggatgccacaagcagctccctgtctgagcggtgcccctcaggcatcagccgccgacgtggtcgtggtgcatggaagaagaacagccatctgccgcgctggccgaggagggttcaaagacactacacccgatgagttactgtctgccgttatgactgccgtcctaaaagatgtgaatcttaggccagagcagttgggagacatctgtgtcggcaacgtactccaacccggagcgggggctatcatggcccgcattgcccagttccttagcgatatacccgagaccgtacccctcagcacagtcaaccgacagtgctctagcggtctgcaggccgtcgcttccattgcaggtgggattcgcaatggctcctacgacatagggatggcttgcggagtggagtctatgagtctcgctgacaggggaaatccgggcaacataacgtctcgtctcatggaaaaggagaaagcccgcgattgtctgattcctatgggaattacctctgagaacgttgccgaaagatttggcatttctcgcgaaaagcaggacacatttgccctggcgagccaacagaaggcagcccgcgcccagtccaagggatgtttccaggccgaaatagtccccgtgacgacaactgtgcacgacgataagggaacgaagagatctattactgtgacacaggacgaagggattcggcccagtacaacaatggaagggttggctaagctaaaaccagctttcaagaaagacggaagtaccaccgcggggaacagtagccaagtgtccgacggagccgccgctatcctacttgcgaggagaagcaaagctgaggaacttgggctgcccatattgggtgtgcttaggtcctatgcggtggtgggagttccacccgacattatgggcattggaccagcttatgccatcccggtcgccctacagaaggctggtctgaccgtgagcgatgtcgatatttttgaaatcaatgaagcctttgcctcacaagcagcctattgtgtcgaaaaacttcgtttacccccggagaaggtcaaccccctggggggagccgtcgccctgggacaccccctggggtgcacaggggcccgccaggtcattactctgctgaatgagctgaaacgcaggggcaaaagagcctacggagtggtgtcaatgtgtatcgggacaggtatgggcgctgctgcggttttcgaatacccaggcaactag

SEQ ID NO: 119029 - DNA, 1071 bp, Artificial Sequence
  derived and/or modified sequence
atgacagctgtcctgaaagatgtgaatcttcggcctgaacagcttggagacatatgtgtggggaatgttttacagcccggggctggggcaattatggctcggatagcccagttcctatccgatatccctgagacagttccattatctacagtgaatcgacaatgctccagtggcctgcaggcagttgccagtatcgctggtgggattagaaacggttcatatgacattggcatggcctgcggcgttgagtcaatgtcactggccgatagagggaaccccggcaacataacatctcgccttatggagaaagagaaggcaagagactgtcttatccccatgggtatcacttccgagaacgtggccgagcgtttcggtatttctagagaaaagcaggatacctttgctttggcgtcccaacagaaggcagcaagagcacaatcgaagggttgcttccaggccgaaatcgtccctgttactaccactgtgcatgacgataaaggaaccaagcggagtatcacggtgacgcaggatgagggcatcagaccatcgaccaccatggagggtctagcgaaactgaagccagcgtttaaaaaagacgggagcacaacagccggcaactctagccaagtgagcgacggtgcggccgccatcctgttggcccgtcgcagcaaagcagaggaactaggcctgccgatcctgggggtgcttcgcagctacgcagtcgtaggagtacctcctgatattatgggcataggtccagcttatgcaatacctgtcgccctgcaaaaggccggtctgacagtgagcgacgtggatatatttgaaattaatgaggcgttcgccagtcaggcggcttactgtgtggagaagttacgactgcccccagaaaaggtcaaccctctcggtggcgcagtggccctgggccatcctctggggtgtacaggggctaggcaggtcataaccctgttaaacgaattaaagcgtagggggaagagagcatatggcgtcgtatctatgtgtataggtactgggatgggggcggccgccgtcttcgaataccctggcaattag

SEQ ID NO: 119030 - DNA, 1275 bp, Artificial Sequence
  derived and/or modified sequence
atgcagaggctgcaggtggtgctgggccacctgcggggccctgctgacagcggctggatgccccaggccgccccctgcctgagcggggccccccaggccagcgctgctgatgtggtggtggtgcacggccgcaggacagccatctgcagagctggccggggcggcttcaaggacaccaccccagatgagctgctgtctgctgtgatgacagctgtgctgaaggatgtgaacctgcggcctgagcagctgggggacatctgtgtgggcaatgtgctgcagcccggggccggggccatcatggccagaattgcccagttcctgagtgacatccctgagaccgtgcccctgagcacagtgaaccggcagtgcagcagcggcctgcaggccgtggccagcattgctgggggcatcagaaatggcagctatgacatcggcatggcctgtggggtggagagcatgagcctggccgaccggggcaaccctggcaacatcaccagccggctgatggagaaggagaaggcccgggactgcctgatccccatgggcatcaccagtgaaaatgtggccgagcgcttcggcatcagccgggagaagcaggacacctttgccctggccagccagcagaaggccgcccgggcccagagcaagggctgcttccaggccgagatcgtgcctgtgaccaccaccgtgcatgatgacaagggcaccaagaggagcatcaccgtgacccaggatgagggcatccggcccagcaccaccatggagggcctggccaagctgaagccagccttcaagaaggatggcagcaccacagctggcaacagcagccaggtgtctgatggagctgctgccatcctgctggcccggcgcagcaaggccgaggagctgggcctgcccatcctgggcgtgctgcggagctatgctgtggtgggcgtgcccccagacatcatgggcatcggccctgcctatgccatccctgtggccctgcagaaggccggcctgactgtgtctgatgtggacatctttgagatcaatgaggcctttgccagccaggccgcctactgtgtggagaagctgcggctgcccccagagaaggtgaaccccctgggcggcgctgtggccctgggccaccccctgggctgcaccggggcccggcaggtgatcaccctgctgaatgagctgaagaggcggggcaagagggcctacggcgtggtgtccatgtgcattggaacaggcatgggcgctgctgctgtgtttgagtacccaggcaactag

SEQ ID NO: 119031 - DNA, 1071 bp, Artificial Sequence
  derived and/or modified sequence
atgacagctgtgctgaaggatgtgaacctgcggcctgagcagctgggggacatctgtgtgggcaatgtgctgcagcccggggccggggccatcatggccagaattgcccagttcctgagtgacatccctgagaccgtgcccctgagcacagtgaaccggcagtgcagcagcggcctgcaggccgtggccagcattgctgggggcatcagaaatggcagctatgacatcggcatggcctgtggggtggagagcatgagcctggccgaccggggcaaccctggcaacatcaccagccggctgatggagaaggagaaggcccgggactgcctgatccccatgggcatcaccagtgaaaatgtggccgagcgcttcggcatcagccgggagaagcaggacacctttgccctggccagccagcagaaggccgcccgggcccagagcaagggctgcttccaggccgagatcgtgcctgtgaccaccaccgtgcatgatgacaagggcaccaagaggagcatcaccgtgacccaggatgagggcatccggcccagcaccaccatggagggcctggccaagctgaagccagccttcaagaaggatggcagcaccacagctggcaacagcagccaggtgtctgatggagctgctgccatcctgctggcccggcgcagcaaggccgaggagctgggcctgcccatcctgggcgtgctgcggagctatgctgtggtgggcgtgcccccagacatcatgggcatcggccctgcctatgccatccctgtggccctgcagaaggccggcctgactgtgtctgatgtggacatctttgagatcaatgaggcctttgccagccaggccgcctactgtgtggagaagctgcggctgcccccagagaaggtgaaccccctgggcggcgctgtggccctgggccaccccctgggctgcaccggggcccggcaggtgatcaccctgctgaatgagctgaagaggcggggcaagagggcctacggcgtggtgtccatgtgcattggaacaggcatgggcgctgctgctgtgtttgagtacccaggcaactag

SEQ ID NO: 119032 - DNA, 1275 bp, Artificial Sequence
  derived and/or modified sequence
atgcagcggctgcaggtggtgctgggccacctgcggggccccgccgactccgggtggatgccgcaggcggcgccgtgtctgagtggcgctccacaagccagcgcagctgacgtggtggtggtacatggccgccggacggccatatgcagagccgggagagggggatttaaggatacgacgcctgatgagctcctctctgccgtgatgacagccgtgctgaaggacgtaaatctccggcctgagcaactaggcgacatctgcgtcggcaacgtacttcagccaggagcaggagccattatggccagaatcgcccagtttttgagtgatattccggagacagttcccctgtctacagtaaatcggcagtgcagctcaggtctgcaagcggtagcctccatcgccggaggcatccgtaatggctcttacgatatagggatggcatgcggggttgagtccatgtcgctcgcagacagagggaacccaggaaacattaccagtcggttgatggagaaagaaaaagctcgtgactgcctcatcccgatgggaatcacaagcgaaaatgtggccgagcgattcggaatctcccgagaaaagcaggacacttttgccctggctagccagcaaaaagcggcccgggctcagtccaaggggtgctttcaagctgaaatcgtgcccgtaacgactactgtgcacgacgacaaaggcaccaagcgatcaatcactgtgacacaggacgagggtattaggccctctactacaatggaagggttggctaaactgaaacctgcgtttaagaaagacggaagtactaccgcaggcaactccagccaggtctccgacggggccgcagctatcctcctcgctaggcgctcaaaggccgaagagctggggctgcccatattaggggttctgcgttcctatgcggtggttggcgttccccccgacattatggggatcgggcctgcttacgcgatcccagttgctcttcagaaggcgggcctgacagtcagtgatgtggatatcttcgagattaacgaagccttcgcctcacaggcagcgtattgcgtggaaaaattgcgactgccaccggagaaggtgaaccctctgggaggagctgtcgccttgggtcatccattgggctgtacaggagccaggcaggtgattacacttctcaacgaacttaaaagacggggcaaacgggcctacggagtggtgtctatgtgtattggcaccggcatgggtgccgctgctgtgttcgagtacccaggtaactag

SEQ ID NO: 119033 - DNA, 1071 bp, Artificial Sequence
  derived and/or modified sequence
atgaccgccgtgctgaaggacgtgaacctgcggcccgagcagctgggcgacatatgtgtgggcaacgtgctgcagcccggcgccggtgctattatggcgagaatagctcagtttctaagtgacatccctgaaacggtccctttgtcaactgttaacaggcagtgctcaagcggattgcaggcggtggctagcatcgccggcggaattcgaaatgggtcttatgacatcggcatggcgtgcggagtagagtccatgtccttagctgatcgaggaaacccggggaacattacctcccggctgatggagaaagaaaaggcacgggattgtttgatacccatgggaattaccagtgagaatgtcgccgaaagatttggcatcagtagggagaagcaggacaccttcgcactggcatcacagcagaaagccgcaagggcccagtcaaaaggttgctttcaggcagagattgtgcccgtgaccacaaccgtgcacgatgacaagggcaccaagaggtcaattacggtgacccaggacgaaggaattagaccctccactacaatggagggcctcgcgaaattgaagcccgctttcaagaaggacgggtcgaccactgctgggaattccagccaggtgtcagacggagctgcagctattttactagctagaaggtccaaagcggaagaattggggttaccgatcctgggtgtgcttagatcctacgcggtggtgggggtgccaccagatatcatggggatagggcctgcatacgctatccccgttgctttgcaaaaagcaggattaactgtttcagacgttgacatctttgaaatcaatgaggcattcgcctcccaggctgcctactgtgttgagaaattgcgcctgcctcccgaaaaggtaaatccccttgggggagctgtggccctgggacatcctctcgggtgcacgggcgctagacaagtaataacactgcttaatgaactgaagagaaggggtaagcgagcctatggagtggtcagtatgtgtattggcactggaatgggcgccgcagcagtttttgaatatcccggtaactag

SEQ ID NO: 119034 - DNA, 1275 bp, Artificial Sequence
  derived and/or modified sequence
atgcagagactgcaggtcgtgttgggccacctgcggggacccgcagatagcggttggatgcctcaggccgctccctgtttgagtggggcaccacaggcatcagccgcagatgtagtcgttgtgcatggaagacgcacagccatatgtagggccggacgaggcggattcaaggacaccactcctgacgaactgctgtcagccgtgatgaccgcggtgttgaaggatgtgaacctgcgaccagagcagctaggcgatatatgcgttggaaatgtccttcagccgggtgctggcgctataatggccaggattgctcagtttctgtccgatatacccgaaaccgtgccattgtccacagtgaatcgccagtgcagttctgggctgcaggccgttgcgtcaatcgcgggtggcatccggaatggcagttacgacatagggatggcctgtggcgtagagtcaatgtccctagcggatcgtggcaaccctggcaacattactagtcgtctgatggaaaaggaaaaggccagggattgcctgatccccatgggcattacaagcgaaaatgtcgccgagagatttggtatctcacgcgagaaacaagatacctttgctctcgcctcgcagcagaaagctgcaagagcccagagcaagggttgtttccaggctgaaatagttcccgtgactacaactgtacacgatgataaagggacaaagaggtcaatcaccgtcacacaggacgagggaattaggccctcgacgactatggaaggcctggccaagctaaagccggcatttaaaaaagacggcagtaccactgccggtaattccagccaagtgtcagatggtgccgctgcaattttactcgctcggagatctaaagcagaagagctgggactccctatcctgggtgtgttgagatcttacgccgttgtgggcgttcctcccgacatcatgggaatcgggccagcttacgctattccagtcgctctgcagaaggctggtctgaccgtctcagacgttgacatatttgagatcaatgaggcttttgcctcccaggccgcatactgcgtggagaaattgcggttgcctccagaaaaggtaaaccccctcggtggagctgtcgccctagggcaccccttgggttgcactggggctagacaggtaataaccttgcttaatgaactaaaacgcaggggcaaaagagcatatggggtggtaagcatgtgcattggcacaggcatgggtgctgccgcagtattcgagtaccctggaaattag

SEQ ID NO: 119035 - DNA, 1071 bp, Artificial Sequence
  derived and/or modified sequence
atgaccgccgtcctgaaggacgtaaacctgcggcctgagcagcttggggacatttgtgtgggcaacgtcctgcagcctggcgctggggctatcatggctcgtatcgcccagttcctgtccgatatccctgaaacagtgccgctgagtaccgtgaacagacaatgctcatctggcctccaggcagtagcatcaatcgccggaggtattagaaatgggagctatgatatcgggatggcctgtggtgtcgaaagcatgagcttggccgacaggggtaatcccggtaatattacaagccggttgatggagaaggagaaggcccgtgattgtctgatccctatggggatcacgtccgagaatgtcgcggagcgattcggcatcagtcgagaaaaacaggatacattcgcccttgcaagccaacaaaaagctgcgagggcacagagcaagggatgcttccaggccgaaatagtgccagtgactactaccgtgcacgacgataagggtaccaagagatccatcacagtgacacaggatgaggggatacgaccatccacgacaatggaaggtctggccaaactaaagcccgcatttaaaaaagatggctctaccaccgcgggtaattccagtcaggtgtctgacggcgctgctgcaatccttctggctcgcagaagcaaagcggaggaactagggctcccaatcttaggagtgctgaggagttacgccgttgtgggagtgccacccgacataatgggaataggtccagcctacgccatcccggttgctctgcagaaggccggattgaccgtcagcgacgtggacattttcgaaataaacgaagcctttgccagtcaagcagcatactgtgtggagaagctgcggctgcctcccgagaaggtgaacccactcggtggcgctgtcgccctaggtcacccactcggctgtaccggggctcggcaagtcattaccctgctgaatgagctgaaacgcagggggaaacgtgcctatggggtggtttccatgtgtattgggacgggcatgggcgcagccgctgtgtttgagtatccgggaaattag

SEQ ID NO: 119036 - DNA, 1785 bp, Artificial Sequence
  derived and/or modified sequence
aggctggaggtggacgggacttttggagggtcgctcgcgtctgttcgcagagctgtgggcggagttgaggccttggaggctgagatgtggttctgcgcgtgtgcggacggctgtctgttaactccgcggtcagttcccggactggtggctggtctgcagggttgacctgcgcaatgcagaggctgcaggtagtgctgggccacctgaggggtccggccgattccggctggatgccgcaggccgcgccttgcctgagcggtgccccgcaggcctcggccgcggacgtggtggtggtgcacgggcggcgcacggccatctgccgggcgggccgcggcggcttcaaggacaccacccccgacgagcttctctcggcagtcatgaccgcggttctcaaggacgtgaatctgaggccggaacagctgggggacatctgtgtcggaaatgtgctgcagcctggggccggggcaatcatggcccgaatcgcccagtttctgagtgacatcccggagactgtgcctttgtccactgtcaatagacagtgttcgtcggggctacaggcagtggccagcatagcaggtggcatcagaaatgggtcttatgacattggcatggcctgtggggtggagtccatgtccctggctgacagagggaaccctggaaatattacttcgcgcttgatggagaaggagaaggccagagattgcctgattcctatggggataacctctgagaatgtggctgagcggtttggcatttcacgggagaagcaggatacctttgccctggcttcccagcagaaggcagcaagagcccagagcaagggctgtttccaagctgagattgtgcctgtgaccaccacggtccatgatgacaagggcaccaagaggagcatcactgtgacccaggatgagggtatccgccccagcaccaccatggagggcctggccaaactgaagcctgccttcaagaaagatggttctaccacagctggaaactctagccaggtgagtgatggggcagctgccatcctgctggcccggaggtccaaggcagaagagttgggccttcccatccttggggtcctgaggtcttatgcagtggttggggtcccacctgacatcatgggcattggacctgcctatgccatcccagtagctttgcaaaaagcagggctgacagtgagtgacgtggacatcttcgagatcaatgaggcctttgcaagccaggctgcctactgtgtggagaagctacgactcccccctgagaaggtgaaccccctggggggtgcagtggccttagggcacccactgggctgcactggggcacgacaggtcatcacgctgctcaatgagctgaagcgccgtgggaagagggcatacggagtggtgtccatgtgcatcgggactggaatgggagccgctgccgtctttgaataccctgggaactgagtgaggtcccaggctggaggcgctacgcagacagtcctgctgctctagcagcaaggcagtaacaccacaaaagcaaaaccacatgggaaaactcagcactggtggtggtggcagtggacagatcaaggcacttcaactcatttggaaaatgtgaacactgatgacatggtataggagtgggtggggtgttgagccacccatcagaccctctttagctgtgcaagataaaagcagcctgggtcacccaggccacaaggccatggttaattcttaaggcaaggcaaatccatggatgagaagtgcaatgggcatagtaaaagtgcatgaatttatctta

SEQ ID NO: 119037 - DNA, 1454 bp, Artificial Sequence
  derived and/or modified sequence
agttcccggactggtggctggtctgcagggttgacctgcgcaatgcagaggctgcaggtagtgctgggccacctgagcggtgccccgcaggcctcggccgcggacgtggtggtggtgcacgggcggcgcacggccatctgccgggcgggccgcggcggcttcaaggacaccacccccgacgagcttctctcggcagtcatgaccgcggttctcaaggacgtgaatctgaggccggaacagctgggggacatctgtgtcggaaatgtgctgcagcctggggccggggcaatcatggcccgaatcgcccagtttctgagtgacatcccggagactgtgcctttgtccactgtcaatagacagtgttcgtcggggctacaggcagtggccagcatagcaggtggcatcagaaatgggtcttatgacattggcatggcctgtggggtggagtccatgtccctggctgacagagggaaccctggaaatattacttcgcgcttgatggagaaggagaaggccagagattgcctgattcctatggggataacctctgagaatgtggctgagcggtttggcatttcacgggagaagcaggatacctttgccctggcttcccagcagaaggcagcaagagcccagagcaagggctgtttccaagctgagattgtgcctgtgaccaccacggtccatgatgacaagggcaccaagaggagcatcactgtgacccaggatgagggtatccgccccagcaccaccatggagggcctggccaaactgaagcctgccttcaagaaagatggttctaccacagctggaaactctagccaggtgagtgatggggcagctgccatcctgctggcccggaggtccaaggcagaagagttgggccttcccatccttggggtcctgaggtcttatgcagtggttggggtcccacctgacatcatgggcattggacctgcctatgccatcccagtagctttgcaaaaagcagggctgacagtgagtgacgtggacatcttcgagatcaatgaggcctttgcaagccaggctgcctactgtgtggagaagctacgactcccccctgagaaggtgaaccccctggggggtgcagtggccttagggcacccactgggctgcactggggcacgacaggtcatcacgctgctcaatgagctgaagcgccgtgggaagagggcatacggagtggtgtccatgtgcatcgggactggaatgggagccgctgccgtctttgaataccctgggaactgagtgaggtcccaggctggaggcgctacgcagacagtcctgctgctctagcagcaaggcagtaacaccacaaaagcaaaaccacatgggaaaactcagcactggtggtggtggcagtggacagatcaaggcacttcaactcatttggaaaatgtgaacactgatgacatggtataggagtgggtggg

SEQ ID NO: 119038 - DNA, 1275 bp, Artificial Sequence
  derived and/or modified sequence
atgcagagactgcaggtggtgctgggccacctgagaggccccgccgacagcggctggatgccccaggccgccccctgcctgagcggcgccccccaggccagcgccgccgacgtggtggtggtgcacggcagaagaaccgccatctgcagagccggcagaggcggcttcaaggacaccacccccgacgagctgctgagcgccgtgatgaccgccgtgctgaaggacgtgaacctgagacccgagcagctgggcgacatctgcgtgggcaacgtgctgcagcccggcgccggcgccatcatggccagaatcgcccagttcctgagcgacatccccgagaccgtgcccctgagcaccgtgaacagacagtgcagcagcggcctgcaggccgtggccagcatcgccggcggcatcagaaacggcagctacgacatcggcatggcctgcggcgtggagagcatgagcctggccgacagaggcaaccccggcaacatcaccagcagactgatggagaaggagaaggccagagactgcctgatccccatgggcatcaccagcgagaacgtggccgagagattcggcatcagcagagagaagcaggacaccttcgccctggccagccagcagaaggccgccagagcccagagcaagggctgcttccaggccgagatcgtgcccgtgaccaccaccgtgcacgacgacaagggcaccaagagaagcatcaccgtgacccaggacgagggcatcagacccagcaccaccatggagggcctggccaagctgaagcccgccttcaagaaggacggcagcaccaccgccggcaacagcagccaggtgagcgacggcgccgccgccatcctgctggccagaagaagcaaggccgaggagctgggcctgcccatcctgggcgtgctgagaagctacgccgtggtgggcgtgccccccgacatcatgggcatcggccccgcctacgccatccccgtggccctgcagaaggccggcctgaccgtgagcgacgtggacatcttcgagatcaacgaggccttcgccagccaggccgcctactgcgtggagaagctgagactgccccccgagaaggtgaaccccctgggcggcgccgtggccctgggccaccccctgggctgcaccggcgccagacaggtgatcaccctgctgaacgagctgaagagaagaggcaagagagcctacggcgtggtgagcatgtgcatcggcaccggcatgggcgccgccgccgtgttcgagtaccccggcaactag

SEQ ID NO: 119039 - DNA, 1071 bp, Artificial Sequence
  derived and/or modified sequence
atgaccgccgtgctgaaggacgtgaacctgagacccgagcagctgggcgacatctgcgtgggcaacgtgctgcagcccggcgccggcgccatcatggccagaatcgcccagttcctgagcgacatccccgagaccgtgcccctgagcaccgtgaacagacagtgcagcagcggcctgcaggccgtggccagcatcgccggcggcatcagaaacggcagctacgacatcggcatggcctgcggcgtggagagcatgagcctggccgacagaggcaaccccggcaacatcaccagcagactgatggagaaggagaaggccagagactgcctgatccccatgggcatcaccagcgagaacgtggccgagagattcggcatcagcagagagaagcaggacaccttcgccctggccagccagcagaaggccgccagagcccagagcaagggctgcttccaggccgagatcgtgcccgtgaccaccaccgtgcacgacgacaagggcaccaagagaagcatcaccgtgacccaggacgagggcatcagacccagcaccaccatggagggcctggccaagctgaagcccgccttcaagaaggacggcagcaccaccgccggcaacagcagccaggtgagcgacggcgccgccgccatcctgctggccagaagaagcaaggccgaggagctgggcctgcccatcctgggcgtgctgagaagctacgccgtggtgggcgtgccccccgacatcatgggcatcggccccgcctacgccatccccgtggccctgcagaaggccggcctgaccgtgagcgacgtggacatcttcgagatcaacgaggccttcgccagccaggccgcctactgcgtggagaagctgagactgccccccgagaaggtgaaccccctgggcggcgccgtggccctgggccaccccctgggctgcaccggcgccagacaggtgatcaccctgctgaacgagctgaagagaagaggcaagagagcctacggcgtggtgagcatgtgcatcggcaccggcatgggcgccgccgccgtgttcgagtaccccggcaactag

SEQ ID NO: 119040 - protein, 430 aa, Artificial Sequence [sequence omitted]

SEQ ID NO: 119041 - DNA, 1293 bp, Artificial Sequence
  derived and/or modified sequence
atggccgccagactgctgagaggcagcctgagagtgctgggcggccacagagcccccagacagctgcccgccgccagatgcagccacagcggcggcgaggagagactggagacccccagcgccaagaagctgaccgacatcggcatcagaagaatcttcagccccgagcacgacatcttcagaaagagcgtgagaaagttcttccaggaggaggtgatcccccaccacagcgagtgggagaaggccggcgaggtgagcagagaggtgtgggagaaggccggcaagcagggcctgctgggcgtgaacatcgccgagcacctgggcggcatcggcggcgacctgtacagcgccgccatcgtgtgggaggagcaggcctacagcaactgcagcggccccggcttcagcatccacagcggcatcgtgatgagctacatcaccaaccacggcagcgaggagcagatcaagcacttcatcccccagatgaccgccggcaagtgcatcggcgccatcgccatgaccgagcccggcgccggcagcgacctgcagggcatcaagaccaacgccaagaaggacggcagcgactggatcctgaacggcagcaaggtgttcatcagcaacggcagcctgagcgacgtggtgatcgtggtggccgtgaccaaccacgaggcccccagccccgcccacggcatcagcctgttcctggtggagaacggcatgaagggcttcatcaagggcagaaagctgcacaagatgggcctgaaggcccaggacaccgccgagctgttcttcgaggacatcagactgcccgccagcgccctgctgggcgaggagaacaagggcttctactacatcatgaaggagctgccccaggagagactgctgatcgccgacgtggccatcagcgccagcgagttcatgttcgaggagaccagaaactacgtgaagcagagaaaggccttcggcaagaccgtggcccacctgcagaccgtgcagcacaagctggccgagctgaagacccacatctgcgtgaccagagccttcgtggacaactgcctgcagctgcacgaggccaagagactggacagcgccaccgcctgcatggccaagtactgggccagcgagctgcagaacagcgtggcctacgactgcgtgcagctgcacggcggctggggctacatgtgggagtaccccatcgccaaggcctacgtggacgccagagtgcagcccatctacggcggcaccaacgagatcatgaaggagctgatcgccagagagatcgtgttcgacaagtag

SEQ ID NO: 119042 - DNA, 1293 bp, Artificial Sequence
  derived and/or modified sequence
atggcagcgaggttgctccgcggctccctgcgagtgctcgggggccaccgcgcccctcggcagctaccagccgcacggtgctctcattcaggcggcgaggagaggcttgaaacgccttctgccaaaaagttaaccgacatcgggataagaaggatcttcagtccagaacacgacatcttccgtaagtccgtccgaaagttcttccaagaggaggtgattcctcaccactccgagtgggaaaaagcaggcgaggtctctcgggaagtttgggagaaggccggcaagcagggactcctcggggtcaatattgcagaacatctcggcggaattggcggtgatttgtactcagctgccatcgtttgggaagagcaggcttatagcaactgtagcggacccgggttcagtatacattccggaatagtaatgagctacatcaccaaccacggcagtgaggagcagattaagcatttcatacctcagatgacggctggaaaatgtatcggcgctatagccatgaccgagcctggtgctggtagcgacctgcagggaatcaaaacaaatgccaagaaggatggaagcgattggatactgaatggaagtaaggtgttcatctctaatggttccctgtccgatgtggtgatcgtcgttgccgtgaccaaccatgaggcgcctagtccagctcatggcatcagtctattccttgttgagaatggcatgaaaggcttcattaaggggagaaagcttcataagatgggactcaaggcacaggacacagctgagctctttttcgaagacattaggcttcctgctagcgccttgttgggtgaagaaaacaaaggtttttattacatcatgaaggagcttccacaagaacgcctgttgatagctgacgtcgccattagcgcctcagaattcatgttcgaggaaactcggaattatgttaagcagcgtaaagctttcgggaagactgtggcacacttgcaaactgtacaacacaaactggccgagctgaagacacatatttgcgtcactcgggcctttgtggataattgcctacagctgcacgaagccaagagactggatagcgcaacagcctgtatggccaagtactgggccagcgagttgcagaactctgtagcctacgactgtgtgcagctgcacgggggctgggggtatatgtgggaatatcccattgccaaagcctatgttgacgcgcgtgtgcaaccaatttatggtggaacaaacgaaatcatgaaagagcttattgcaagggagatagtgtttgacaagtag

SEQ ID NO: 119043 - DNA, 1293 bp, Artificial Sequence
  derived and/or modified sequence
atggccgcccggctgctgcggggcagcctgcgggtgctgggcggccaccgggccccccggcagctgcctgctgcccgctgcagccacagcggcggggaggagcggctggagacccccagcgccaagaagctgacagacatcggcatccgccgcatcttcagccctgagcatgacatcttcaggaagtctgtgaggaagttcttccaggaggaggtgatcccccaccacagcgagtgggagaaggccggggaggtgtcccgggaggtgtgggagaaggccggcaagcagggcctgctgggcgtgaacattgctgagcacctgggcggcatcggcggggacctgtacagcgctgccatcgtgtgggaggagcaggcctacagcaactgcagcggccctggcttcagcatccacagcggcatcgtgatgagctacatcaccaaccacggcagcgaggagcagatcaagcacttcatcccccagatgacagctggaaaatgtattggagccatcgccatgacagagcctggagctggcagtgacctgcagggcatcaagaccaatgccaagaaggatggcagtgactggatcctgaatggcagcaaggtgttcatcagcaatggcagcctgagtgatgtggtgattgtggtggccgtgaccaaccacgaggcccccagccctgcccacggcatcagcctcttcctggtggagaatggcatgaagggcttcatcaagggcaggaagctgcacaagatgggcctgaaggcccaggacacagctgagctgttctttgaggacatccggctgcctgccagcgccctgctgggggaggagaacaagggcttctactacatcatgaaggagctgccccaggagcggctgctgattgctgatgtggccatcagcgccagcgagttcatgtttgaggagaccagaaattatgtgaagcagaggaaggccttcggcaagacagtggcccacctgcagacagtgcagcacaagctggccgagctgaagacccacatctgtgtgacccgggcctttgtggacaactgcctgcagctgcacgaggccaagaggctggacagcgccacagcctgcatggccaagtactgggccagcgagctgcagaacagcgtggcctatgactgtgtgcagctgcatggaggctggggctacatgtgggagtaccccatcgccaaggcctacgtggatgcccgggtgcagcccatctatggaggcaccaatgagatcatgaaggagctgattgcccgggagatcgtgtttgacaagtag

SEQ ID NO: 119044 - DNA, 1293 bp, Artificial Sequence
  derived and/or modified sequence
atggccgcccggctgctgcggggcagcctgcgggtgctgggcggccatcgagccccccggcagttgcccgcagctcggtgctctcactcaggcggtgaagaaaggctggagacaccgtctgcgaaaaagttaaccgacattggtatcagacgtattttctcacccgagcacgatatttttcggaaatctgttaggaagttttttcaggaggaagtcataccccaccacagcgaatgggagaaggctggagaagtgagtcgagaggtatgggagaaggccggcaagcagggcttacttggtgtgaatatcgccgagcatttaggcggaatcggtggcgacttatatagcgcagccatcgtttgggaggagcaagcatactcaaactgctcgggtccaggctttagtatccactcagggatcgtcatgtcatatattacaaatcacggatctgaggagcagattaaacattttataccccagatgacagcagggaagtgtattggagccatagccatgaccgagccaggggccggctctgacctccagggaatcaaaacaaatgccaagaaggatggctcagactggatccttaatggtagcaaggtctttatatccaacggttcattatccgatgtagtgatcgtagtcgcagtcacaaaccacgaggccccctcacctgcccatggcatcagcctgttcctcgtggagaacgggatgaagggcttcattaagggacgtaagctgcacaaaatgggcctcaaagcccaggatactgctgagctcttcttcgaagacattaggttacctgcctccgcactgctgggggaagagaacaaaggtttctattacatcatgaaggaactaccacaagagcgcttgctgattgccgacgtggcgatctccgccagcgagtttatgtttgaggaaacaaggaattacgtaaagcagagaaaagccttcgggaaaactgttgcccacctgcagacggtgcagcacaaactcgccgagctgaaaacgcacatttgtgtgaccagagccttcgtggacaattgcctgcagctgcatgaggccaaacgcttggacagcgccactgcttgcatggcgaagtactgggctagcgaactgcaaaactcagtcgcgtacgactgcgtgcagctgcatggggggtgggggtacatgtgggaataccctattgctaaagcttatgttgatgccagagttcaaccaatatatggtggaacaaacgaaattatgaaggagttaattgcaagggaaatcgtatttgacaaatag

SEQ ID NO: 119045 - DNA, 1293 bp, Artificial Sequence
  derived and/or modified sequence
atggccgctagattactgaggggcagcctcagggtgctgggcggacatagagctcccaggcaactacctgctgcaaggtgtagccacagcggcggagaagaacgactcgaaaccccctccgccaaaaaactgacagatattggaatcaggaggatctttagcccagaacatgacatctttaggaaaagcgtgcgcaaattttttcaagaagaggtgatccctcaccactccgaatgggagaaagccggtgaagtgtcaagagaggtgtgggaaaaggctggcaaacagggcctgctgggggtgaatatcgccgaacaccttgggggtatcggtggcgacctgtacagcgccgctatcgtgtgggaggagcaggcttactctaactgctctgggcctgggttttccattcattcaggcatagtaatgagctacattaccaatcacggctccgaagaacagatcaagcatttcattccccaaatgaccgctggcaaatgcatcggggctatagccatgaccgaacccggagcgggttccgatctccagggtattaaaacaaacgctaaaaaggatgggagtgattggattctgaatggctctaaggtgtttatcagtaacggcagcctgtctgacgtggtgatcgtcgtcgcagtgacaaaccatgaagctccctctcccgcacatggcattagcctattcctggtcgagaacggtatgaaaggcttcataaagggcaggaagttgcacaagatggggctgaaagctcaggacacagctgagctcttcttcgaggacatccgcctccccgcatcagcacttttgggggaagagaataaggggttttattacataatgaaggagcttccacaagaacgacttttaattgccgatgtcgcaatcagtgcctctgagttcatgttcgaggagacacgcaattacgtgaagcagcgcaaggcatttgggaaaacagtggctcacctgcaaacagtgcaacacaagctggcagaactgaagacccacatctgtgtaactcgcgcattcgtcgacaattgtttgcagctccacgaggcaaagagacttgacagcgccaccgcctgcatggccaaatattgggcctctgaattgcagaattcagtagcttacgactgcgtgcagctccatgggggatggggatatatgtgggaatatcccatcgctaaggcctacgtggatgcgagagtccagcccatctacggcggaaccaacgagatcatgaaggagcttatagctagagagattgtgttcgataaatag

SEQ ID NO: 119046 - DNA, 2543 bp, Artificial Sequence
  derived and/or modified sequence
agcagtttcgctgtaaaatcctattgctgacagccaagacgggcgtattccctcgcgaccagcctgtggcgtggttggggctccggaagggcgcgcgcgagcgcttttttgggaggacaccacaggtggacgcctcagctgatcgtcctccctcccggggaccctgccccgagtcgccgagtagccgcagagtcgcctccgtcgccccgccgcccctgtgtttcggacatggccgcacgccttctccgagggtccctacgcgtcctgggcggccaccgtgcgccgcgccagctgcccgccgcgcgatgttctcattccggaggggaagaacgtctagaaactccttctgctaaaaaattaacagatataggaattcgaagaatcttttctccagagcatgacattttccggaaaagtgtaaggaagtttttccaagaagaagtgattcctcatcactcagaatgggagaaagctggagaagtaagtagggaggtttgggaaaaagctggaaaacaaggactgcttggtgtcaatattgcagagcatcttggtggaattggaggggatctgtactccgcagctattgtctgggaggagcaagcttattcaaattgttcaggcccaggttttagtattcattcaggtattgtcatgtcctatattacaaaccatggctcagaagaacagattaagcactttattccccagatgactgcaggcaaatgtattggtgcaatagcaatgacagagcctggagctggaagtgacttacagggaataaaaacaaatgctaaaaaggatggaagtgactggattctcaatggaagcaaggtgttcatcagtaatgggtcattaagtgatgttgtgattgtagttgcggtcacaaatcatgaagctccctcccctgcccatggtattagcctttttctggtggaaaatggaatgaaaggatttatcaagggacgaaagctacataaaatgggattaaaagcccaggataccgcagaactattctttgaagatatacggttgccagctagtgccctacttggagaagagaataaaggcttctattacatcatgaaagagcttccacaggaaaggctgttaattgctgatgtggcaatttcagctagtgaattcatgtttgaagaaaccaggaactatgttaaacaaagaaaagcttttggcaaaacagttgctcacctacagacagtgcaacataaattagcagaattaaaaacacatatatgtgtaacccgagcatttgtggacaactgtctccagctgcatgaagcgaaacgtttggactccgccactgcttgcatggcgaaatattgggcatctgagttacaaaatagtgtagcttacgactgtgtacagctccatggaggttggggatacatgtgggagtacccaattgcaaaagcttatgtggatgccagagttcagccaatctatggtggtacaaatgaaataatgaaggagctgattgcaagagagattgtctttgacaagtagacatctgcccacatcctggagtcctattacagctaatctcgttttaaatctgctcaagataaaatgtaacttggaaagcgaggaaacactaaacatgtttttacctgctctctctatagagaaggaaataaaatataaatataagattaacacagtggaaggacaaatctttgaagccaaaattctagttttccaatataaggtttaacttacagttttttatgtagccaaaggtaaacggttttctgaatcttgcctaggtgtttcatttatctctaaaattctaaaaagcataaatcattcaaatcttcaaaccaaggcagaaataattttatgtcgctatagtataaaaacattaataagatagcacattgacttttaaagggaaaagtaaatataacttagcatgtaaactcatttcggctaccatttgctccaaattccctagaacagtggtttttaccactgtactccaaccccgtttttaagcaatggaactctttcttcaaacaaaagcttatgcagaacatctctgtgaaacgctgctgagtgagaactgctttcattgaagctggaagccatcataccttactgccttgaaacccctaggactcagctaagtatttgcctaaccctgaccagggaatgccttggttctgtcaattgctgacatctgagaacacagaataatccatcatttttaatttcaagatattggtacattttataggtatcaaagcaatggcttttcttttgcaacagttaatgtatttattaacttaataattactttatgtcttctataaaccaggctgttaatacaatgatgacaaacaaaactggcaagatcactaaaaaataagtgaataaacaaataagtagtaaaataaggtaagaagtaaatatgtaaaagagataatttcaagcataagtgcaatgtaaataataaagtaagcatttaaaattcaaaagtgaggaaatgacatttgatttaagacttaaaagtaattacaaaaaataaa

SEQ ID NO: 119047 - protein, 432 aa, Artificial Sequence
  derived and/or modified sequence
MEGLAVRLLRGSRLLRRNFLTCLSSWKIPPHVSKSSQSEALLNITNNGIHFAPLQTFTDEEMMIKSSVKKFAQEQIAPLVSTMDENSKMEKSVIQGLFQQGLMGIEVDPEYGGTGASFLSTVLVIEELAKVDASVAVFCEIQNTLINTLIRKHGTEEQKATYLPQLTTEKVGSFCLSEAGAGSDSFALKTRADKEGDYYVLNGSKMWISSAEHAGLFLVMANVDPTIGYKGITSFLVDRDTPGLHIGKPENKLGLRASSTCPLTFENVKVPEANILGQIGHGYKYAIGSLNEGRIGIAAQMLGLAQGCFDYTIPYIKERIQFGKRLFDFQGLQHQVAHVATQLEAARLLTYNAARLLEAGKPFIKEASMAKYYASEIAGQTTSKCIEWMGGVGYTKDYPVEKYFRDAKIGTIYEGASNIQLNTIAKHIDAEY

SEQ ID NO: 119048 - protein, 330 aa, Artificial Sequence
  derived and/or modified sequence
MGIEVDPEYGGTGASFLSTVLVIEELAKVDASVAVFCEIQNTLINTLIRKHGTEEQKATYLPQLTTEKVGSFCLSEAGAGSDSFALKTRADKEGDYYVLNGSKMWISSAEHAGLFLVMANVDPTIGYKGITSFLVDRDTPGLHIGKPENKLGLRASSTCPLTFENVKVPEANILGQIGHGYKYAIGSLNEGRIGIAAQMLGLAQGCFDYTIPYIKERIQFGKRLFDFQGLQHQVAHVATQLEAARLLTYNAARLLEAGKPFIKEASMAKYYASEIAGQTTSKCIEWMGGVGYTKDYPVEKYFRDAKIGTIYEGASNIQLNTIAKHIDAEY

SEQ ID NO: 119049 - DNA, 1299 bp, Artificial Sequence
  derived and/or modified sequence
atggaggggcttgctgtgcgtcttctgaggggtagtcgtctgctccggcggaacttcctgacatgcctgagttcctggaagatccctccacacgtatccaagagctcacagtctgaggccttgctcaatatcacaaataatgggatccatttcgccccactccaaaccttcaccgatgaggaaatgatgataaagtcctcggtgaaaaagttcgctcaggagcaaattgctccactggtgtctactatggacgaaaattcaaagatggagaaatcggttatacaggggcttttccaacaggggttgatgggaatcgaagtggacccggaatacggggggaccggagcgtcctttcttagcaccgtgcttgtgatagaggagctcgctaaagtggatgccagtgttgccgtcttctgcgaaatccagaatactttgattaatacccttatcagaaaacatggaaccgaagagcagaaggctacttacctgccccaacttaccaccgagaaagtgggaagtttctgtctgtctgaagcaggcgctggatctgacagcttcgcactgaaaacacgggcggataaagagggcgattattacgtattgaacggatcaaagatgtggatttcctccgctgagcacgccggtctcttcttggtgatggctaacgtggaccccaccattggatacaaaggcatcacctcattcctggttgaccgggacacaccgggactccacatcggtaaacctgagaacaagttgggtctgagagcctcaagcacgtgccctctcacttttgagaatgtcaaagtgccggaagccaatattctcggtcaaataggccatggttacaaatacgctattggttcccttaatgaaggtcggatcgggatcgcagctcaaatgctgggactggcccaaggttgcttcgactatacaatcccttacatcaaggagaggattcagtttggcaaacggctctttgacttccaaggtctccaacatcaggtcgcacacgtggcgactcagttagaggccgcacgcctccttacgtacaacgccgccagactactcgaggcgggcaaacccttcataaaggaggcctcaatggctaagtattacgcttccgaaatcgcaggacagacgactagtaaatgtattgagtggatgggtggcgtgggttacactaaggactaccccgtggaaaagtactttcgcgacgctaaaattgggaccatctatgagggagcctccaatatacagctcaataccatcgctaaacacatcgacgctgaatactag

SEQ ID NO: 119050 - DNA, 993 bp, Artificial Sequence
  derived and/or modified sequence
atgggcattgaagtggaccctgaatacggaggaactggcgccagtttcctctctaccgtgctcgtgatcgaagagctggccaaggttgacgccagtgtggctgtattctgtgaaattcagaataccctcatcaataccctgatcagaaagcacggtaccgaggaacagaaagcaacgtacttgccacaacttaccaccgaaaaggtgggatcattctgtctatccgaagcgggggccgggtcggattccttcgcactcaagacccgtgcggataaggagggcgactactacgtactgaacgggtctaagatgtggatttctagcgctgagcacgcaggcctgtttttggtgatggccaatgtggaccctactattgggtataaagggatcacctcattcctggtcgacagagacaccccagggctgcacattggcaagcccgagaataagctgggccttcgcgcctcttcgacttgccccctcacttttgagaatgtcaaagtgccagaagcaaatatcttaggacagattggacacggctacaagtacgccattggctctttgaatgaagggaggattggcattgcagcgcaaatgctaggcctagcccagggatgttttgattacaccattccttatatcaaagaacgaatccagtttggcaagaggctgtttgatttccaaggactccagcatcaagttgctcatgtggctacacagttggaagcagcacggctgttaacctacaacgccgccaggctccttgaggcaggaaagcctttcattaaggaggcctccatggcaaaatattatgcctctgagatcgccgggcagacaaccagcaaatgcattgagtggatgggaggagtcgggtataccaaggattaccccgtggagaagtatttcagggatgctaaaatcggtaccatctatgagggcgcctccaatatccagttgaatactattgctaaacacatagatgccgagtactag

SEQ ID NO: 119051 - DNA, 1299 bp, Artificial Sequence
  derived and/or modified sequence
atggagggcctggccgtgcggctgctgcggggcagccggctgctgcggaggaacttcctgacctgcctgagctcctggaagatcccccctcatgtgtccaagagcagccagagcgaggccctgctgaacatcaccaacaacggcatccactttgcccccctgcagaccttcacagatgaggagatgatgatcaagagctctgtgaagaagtttgcccaggagcagatcgcccccctggtgtccaccatggatgagaacagcaagatggagaagagcgtcatccagggcctcttccagcagggcctgatgggcatcgaggtggaccctgaatatggaggcaccggggccagcttcctgagcacagtgctggtgattgaggagctggccaaggtggatgcctctgtggccgtgttctgtgagatccagaacaccctcatcaacaccctcatcaggaagcatggaacagaggagcagaaggccacctacctgccccagctgaccacagagaaggtgggcagcttctgcctgtctgaggccggggccggcagtgacagctttgccctgaagaccagggctgacaaggagggggactactacgtgctgaatggcagcaagatgtggatcagcagcgctgagcacgccggcctcttcctggtgatggccaacgtggaccccaccatcggctacaagggcatcaccagcttcctggtggaccgggacaccccaggcctgcacatcggcaagccagagaacaagctgggcctgcgggccagcagcacctgccccctgacctttgaaaatgtgaaggtgcctgaggccaacatcctgggccagattggacatggctacaagtatgccatcggcagcctgaatgaaggaagaattggaattgctgcccagatgctgggcctggcccagggctgctttgactacaccatcccctacatcaaggagcgcatccagtttgggaagaggctgtttgacttccagggcctgcagcaccaggtggcccacgtggccacccagctggaggccgcccggctgctgacctacaatgctgcccggctgctggaggccggcaagcccttcatcaaggaggcctccatggccaagtactatgccagcgagattgctggccagaccaccagcaagtgcatcgagtggatgggcggcgtgggctacaccaaggactaccctgtggagaagtacttcagagatgccaagattggcaccatctatgaaggagccagcaacatccagctgaacaccatcgccaagcacattgatgctgagtactag

SEQ ID NO: 119052 - DNA, 993 bp, Artificial Sequence
  derived and/or modified sequence
atgggcatcgaggtggaccctgaatatggaggcaccggggccagcttcctgagcacagtgctggtgattgaggagctggccaaggtggatgcctctgtggccgtgttctgtgagatccagaacaccctcatcaacaccctcatcaggaagcatggaacagaggagcagaaggccacctacctgccccagctgaccacagagaaggtgggcagcttctgcctgtctgaggccggggccggcagtgacagctttgccctgaagaccagggctgacaaggagggggactactacgtgctgaatggcagcaagatgtggatcagcagcgctgagcacgccggcctcttcctggtgatggccaacgtggaccccaccatcggctacaagggcatcaccagcttcctggtggaccgggacaccccaggcctgcacatcggcaagccagagaacaagctgggcctgcgggccagcagcacctgccccctgacctttgaaaatgtgaaggtgcctgaggccaacatcctgggccagattggacatggctacaagtatgccatcggcagcctgaatgaaggaagaattggaattgctgcccagatgctgggcctggcccagggctgctttgactacaccatcccctacatcaaggagcgcatccagtttgggaagaggctgtttgacttccagggcctgcagcaccaggtggcccacgtggccacccagctggaggccgcccggctgctgacctacaatgctgcccggctgctggaggccggcaagcccttcatcaaggaggcctccatggccaagtactatgccagcgagattgctggccagaccaccagcaagtgcatcgagtggatgggcggcgtgggctacaccaaggactaccctgtggagaagtacttcagagatgccaagattggcaccatctatgaaggagccagcaacatccagctgaacaccatcgccaagcacattgatgctgagtactag

SEQ ID NO: 119053 - DNA, 1299 bp, Artificial Sequence
  derived and/or modified sequence
atggagggcctggccgtgcggctgctgcggggcagccggctgctgcgccggaattttctcacctgcctaagttcttggaaaattccacctcacgtcagtaaaagttcgcagtccgaggcactcctcaacattaccaataacggcattcattttgcacccctgcaaacatttaccgacgaggaaatgatgataaaatcttcagtgaagaaattcgcccaggaacagattgcccctctagtctccacaatggatgagaacagtaagatggaaaagtcggtcatccaggggttatttcagcaaggactgatggggattgaggtggacccggaatatggaggcacaggcgcgtcctttctgagcaccgtgctggttatcgaagagcttgccaaagtggacgctagcgtggccgtgttctgcgaaattcagaatacgctgataaatacactgatacgcaagcatgggacagaagagcagaaagctacttaccttccacagctgaccaccgagaaggtcgggtctttttgcctgtccgaggcgggagccggaagtgacagctttgccctgaaaacaagggccgacaaagagggcgactattacgtgcttaatggctctaagatgtggatttctagtgctgagcatgcaggcctcttcctggtgatggccaacgtggatcctaccatcgggtataaagggataaccagcttcctggtcgatcgggatacacccggactgcatatcgggaagcccgagaataaactgggcctgcgcgcatcctccacttgcccactgacttttgagaacgtgaaggtgccagaagccaatattctcggacaaatcggccacggatataaatatgccattggttcactgaacgaggggcgcattggcattgcggcacaaatgctgggtctggcccagggatgctttgattacacaattccctacatcaaggaacgaattcagtttggaaaaagacttttcgacttccagggcttgcagcaccaggtggcccacgtcgccacgcagcttgaagccgctagacttcttacctacaacgcggcccggttgctggaagctggtaagccgttcatcaaggaagccagcatggcaaagtactacgcttccgagattgccgggcaaaccacatctaaatgcatcgaatggatgggcggcgtggggtatactaaggactaccctgtggagaagtattttcgggatgccaaaattgggaccatctacgagggtgccagcaatattcagcttaacacgattgctaagcatatagacgcggaatactag

SEQ ID NO: 119054 - DNA, 993 bp, Artificial Sequence
  derived and/or modified sequence
atgggcatcgaggtggaccccgagtacggcggcaccggcgccagctttttgagcaccgtgcttgtcatagaggaattggccaaagtcgacgcttcagtggccgtgttctgtgagatccagaataccctgataaatactttgatcaggaaacatggaaccgaggaacagaaggctacatacctgccccaattaactacagaaaaggtcggttctttctgtctgtccgaggctggtgccggctcagattctttcgctctcaagacacgcgcagataaagagggagactactacgtcctgaatgggtcaaaaatgtggatctcaagcgccgagcacgccggccttttcctcgtgatggccaacgtcgacccaacaataggctataagggtatcacctcctttttggtggaccgcgatacccccggccttcacatcggcaaaccagagaataagctcggacttcgcgcctccagcacttgtccactgacatttgagaatgtcaaagtgcctgaagccaacattttgggccaaatcggccacggatacaagtacgccataggaagcctgaatgaaggcaggatcggaatcgccgctcagatgcttggcctggctcagggctgtttcgattataccatcccctacattaaggagagaatccagtttggtaaacgacttttcgactttcagggactgcaacatcaagtagcgcatgtggctactcagttggaggcagcacgcctactgacatacaatgccgcccgccttctagaggctgggaagccttttattaaggaggcatctatggcaaagtattatgcttccgagatcgcgggccagaccacctctaaatgcattgaatggatggggggggtaggttacacaaaagactatccagttgaaaaatactttagagatgccaaaatcggaacaatctacgagggcgcaagcaacatccagctaaacacaatcgctaagcacatcgacgcggaatactag

SEQ ID NO: 119055 - DNA, 1299 bp, Artificial Sequence
  derived and/or modified sequence
atggaagggctcgccgttagattgctgagaggaagccggctgctgcgtagaaacttcttgacttgcctgtcgtcctggaagattccgcctcacgtgagtaaaagtagtcagtccgaggctctgctaaatataaccaacaacggtatacacttcgcccctctccagacctttacggacgaggagatgatgattaaatccagcgtgaaaaagttcgcccaggagcaaatcgcccctctcgtcagtacgatggatgaaaactcgaaaatggaaaaatccgtgatacaggggttatttcagcaagggctgatgggcatcgaagtcgatccagagtatggcggtaccggagcttcgttccttagtactgtcctcgtgatagaggaactcgcaaaagtcgatgcaagcgtagccgtcttctgtgagattcaaaatactctgataaacaccctgatacggaaacacggcacagaggaacagaaggctacatatctgccccagttgacgacagagaaagtaggctcgttttgtctttccgaagcaggggctggtagtgacagtttcgccctgaagactagagcagataaagaaggcgattattatgtgctgaatgggtcaaagatgtggatttcctctgcggaacatgccggactgtttctggtcatggcgaatgtggatccaacgattggctataagggaatcacctcattcctggtcgacagggacactcccggtctgcacatcggtaagccggagaataagctgggcctgcgggcaagtagcacttgccccctgacttttgagaacgtcaaggttcccgaggccaacatcctgggacagattgggcatggctataaatatgccattggtagtttgaatgagggacggatcggcatcgctgctcagatgcttggactcgcccagggttgcttcgattacaccatcccctatattaaagagaggatccagttcggcaaacgactgttcgacttccaaggactgcaacatcaagtcgcgcacgttgccacccagttagaggccgctaggctcctgacttataacgctgcccgtctgctcgaggccggtaaacccttcataaaggaggcgagtatggcgaaatattacgctagcgagattgccggtcaaacgacttctaagtgtatagagtggatgggcggtgtaggctacacgaaggactaccccgtcgagaagtatttccgtgacgctaagataggaaccatctacgagggtgccagtaatatccagcttaacaccatcgccaaacacatagatgccgaatattag

SEQ ID NO: 119056 - DNA, 993 bp, Artificial Sequence
  derived and/or modified sequence
atgggcattgaggtggatcctgaatatggtgggaccggtgcttcattcctgagcactgtgctcgtaatcgaagaactcgcaaaggttgatgcatccgtcgccgtcttctgtgagatccagaatacactcatcaataccctgatcaggaaacacggaactgaggagcagaaggccacttaccttccccagctgacaacagagaaggtggggagtttctgtctgtccgaagccggagccggatccgactccttcgctctgaagactcgggcagataaggaaggggattactacgtcttaaatgggtctaaaatgtggatctcgtctgcagagcacgccggtctgttcctagtgatggcaaacgtcgaccccacaatcggctacaaagggatcacctccttcttagtagatcgggatacccccggactgcacatcggaaaaccagaaaacaagctgggactccgtgcaagctccacctgccctctcacatttgagaatgtaaaggtgccagaggcaaatatactgggacaaattgggcacggctataaatacgcaattggcagcctaaatgagggacgaattggtatagcagcccaaatgttgggattggcccaaggatgctttgattacactatcccgtacatcaaggaacggattcagtttggtaagcgccttttcgactttcaaggacttcaacatcaggttgctcacgtcgccacgcagctggaagccgctcgcctcctgacctataacgccgcacgactgttggaggcgggtaagccttttatcaaggaagcctcgatggctaaatactatgcttcagagatagcgggacagacgacgagcaagtgcattgaatggatgggaggggtgggctatacaaaggattacccagttgagaagtacttccgggatgcgaaaatcggcaccatttacgagggcgcaagtaacatccagctcaacaccattgccaaacacatcgatgctgagtactag

SEQ ID NO: 119057 - DNA, 1299 bp, Artificial Sequence
  derived and/or modified sequence
atggagggcctggccgtgagactgctgagaggcagcagactgctgagaagaaacttcctgacctgcctgagcagctggaagatccccccccacgtgagcaagagcagccagagcgaggccctgctgaacatcaccaacaacggcatccacttcgcccccctgcagaccttcaccgacgaggagatgatgatcaagagcagcgtgaagaagttcgcccaggagcagatcgcccccctggtgagcaccatggacgagaacagcaagatggagaagagcgtgatccagggcctgttccagcagggcctgatgggcatcgaggtggaccccgagtacggcggcaccggcgccagcttcctgagcaccgtgctggtgatcgaggagctggccaaggtggacgccagcgtggccgtgttctgcgagatccagaacaccctgatcaacaccctgatcagaaagcacggcaccgaggagcagaaggccacctacctgccccagctgaccaccgagaaggtgggcagcttctgcctgagcgaggccggcgccggcagcgacagcttcgccctgaagaccagagccgacaaggagggcgactactacgtgctgaacggcagcaagatgtggatcagcagcgccgagcacgccggcctgttcctggtgatggccaacgtggaccccaccatcggctacaagggcatcaccagcttcctggtggacagagacacccccggcctgcacatcggcaagcccgagaacaagctgggcctgagagccagcagcacctgccccctgaccttcgagaacgtgaaggtgcccgaggccaacatcctgggccagatcggccacggctacaagtacgccatcggcagcctgaacgagggcagaatcggcatcgccgcccagatgctgggcctggcccagggctgcttcgactacaccatcccctacatcaaggagagaatccagttcggcaagagactgttcgacttccagggcctgcagcaccaggtggcccacgtggccacccagctggaggccgccagactgctgacctacaacgccgccagactgctggaggccggcaagcccttcatcaaggaggccagcatggccaagtactacgccagcgagatcgccggccagaccaccagcaagtgcatcgagtggatgggcggcgtgggctacaccaaggactaccccgtggagaagtacttcagagacgccaagatcggcaccatctacgagggcgccagcaacatccagctgaacaccatcgccaagcacatcgacgccgagtactag

SEQ ID NO: 119058 - DNA, 993 bp, Artificial Sequence
  derived and/or modified sequence
atgggcatcgaggtggaccccgagtacggcggcaccggcgccagcttcctgagcaccgtgctggtgatcgaggagctggccaaggtggacgccagcgtggccgtgttctgcgagatccagaacaccctgatcaacaccctgatcagaaagcacggcaccgaggagcagaaggccacctacctgccccagctgaccaccgagaaggtgggcagcttctgcctgagcgaggccggcgccggcagcgacagcttcgccctgaagaccagagccgacaaggagggcgactactacgtgctgaacggcagcaagatgtggatcagcagcgccgagcacgccggcctgttcctggtgatggccaacgtggaccccaccatcggctacaagggcatcaccagcttcctggtggacagagacacccccggcctgcacatcggcaagcccgagaacaagctgggcctgagagccagcagcacctgccccctgaccttcgagaacgtgaaggtgcccgaggccaacatcctgggccagatcggccacggctacaagtacgccatcggcagcctgaacgagggcagaatcggcatcgccgcccagatgctgggcctggcccagggctgcttcgactacaccatcccctacatcaaggagagaatccagttcggcaagagactgttcgacttccagggcctgcagcaccaggtggcccacgtggccacccagctggaggccgccagactgctgacctacaacgccgccagactgctggaggccggcaagcccttcatcaaggaggccagcatggccaagtactacgccagcgagatcgccggccagaccaccagcaagtgcatcgagtggatgggcggcgtgggctacaccaaggactaccccgtggagaagtacttcagagacgccaagatcggcaccatctacgagggcgccagcaacatccagctgaacaccatcgccaagcacatcgacgccgagtactag

SEQ ID NO: 119059 - DNA, 5859 bp, Artificial Sequence
  derived and/or modified sequence
ggcctgcggcgaggatggagggcctggcagtgcggttgctgcgcggcagcaggctgctaagaagaaatttcctgacttgtttgtcttcttggaagattcctcctcatgtctcaaaatcttcccagtcagaagctctactcaatataacaaataatggaatacactttgctcccctgcaaacatttacagatgaggaaatgatgataaagagttcagttaaaaaatttgctcaggaacaaattgcacctttggtttcaaccatggatgaaaattcgaaaatggagaaatcagtaatacaaggattatttcaacaagggttgatgggtattgaagttgacccagaatatggaggcacaggagcttcatttttatccactgtgctcgtgatagaggaattagccaaagttgatgcatctgtggctgtcttttgtgagatccagaacacattaattaacacactgattagaaaacatggaacagaagaacaaaaggccacctatttgcctcagctcactacagaaaaagtaggaagtttctgcctttcagaggctggagcaggtagtgactcatttgctttgaagaccagagctgataaagagggagattattatgtcctcaatggatcaaagatgtggatcagcagtgctgagcacgcagggctctttctggtgatggcaaatgtagaccctaccattggatataagggaattacctccttcttagtagatcgtgatactccgggccttcatatagggaaacctgaaaacaaattggggctcagagcttcttccacctgcccgttaacattcgaaaatgtcaaggttccagaagccaatatcttgggacaaattggacatggctataagtatgccatagggagtctcaatgaaggtagaataggaattgctgcacagatgctgggactggcgcaaggatgttttgactacactattccatatattaaagaaaggatacaatttggcaaaagactatttgattttcagggcctccaacaccaagtggctcacgtggccacccagctggaagctgcaagattactaacatacaatgctgctaggcttttagaagctggaaagccattcataaaagaagcgtcaatggccaaatactatgcatcagagattgcaggacaaacaacgagtaaatgtatcgagtggatggggggagtaggctacaccaaagattaccctgtggagaaatacttccgagatgcaaagattggtacgatatatgaaggagcttccaacatccagttgaacaccattgcaaagcatatcgatgcagaatactgacgtctataggagtgggacccctccctggtgtcactgctgtaaaattttaaacggttgtgtcttgttgggagtaagtgccttgcgtgggaataaacttccacagcattcgaatattttaatgaagcccttagtcagggtcctggtgttggcctttttggttttctcttttcaggctgtttaacttaggcacaggagatccacttttaaacttgggaaataagcacctgtatttttttccaaaactgtttttaaagctgtatacgcatacatatatatatttttactctgtcttactctgtcacccaggctagagtgcagtggcgcgatctcagctcactgcagccttgacctcctgggttccagtgattctcatgcctcatcctcccaagtagctggaactacaggtgtgcaccaccatgcctggttcatttttgtgtttttagtagagatggggttttaccatattgcccaggctggtcttctggcttctggatatcgcccaccttggcctcccaaagtgctgggattacagggatgagccaccgtgcctggctgggtatttatattatcattctagtttcagagtatacagaagtttcatcccatcatttggaaaaataaaggcatctgaagtacaatattacttatagaaatagtttatattcctattaaatcttaatcttgtggcatcagggaaatatttgttacatagtaggcaatttttatccagtactttatagattcaactctaagttgcaagcgaagtcaaaactgatgaaaatttatttagaaaaatctaaaaattctggttttaaatatgagaatcagtggaaaataagggtataattttgtaggtcatatgattgaagaaaatattattttaacaatgtaaagcaatatgatttgttactataattaacctgtataaaagatacattttatggtggtttcagtaggtcattttaaaaaccaatgtgcattagttttcaagtataaggtttaagtaatttggtttaataatcagaaaatattcaatacagtgttggatattctgtcatgcactatttttcagttgacaatttctgtattttaattgaatactgtttcttcagtcatggttattgcactttatcctgaataataattcagaaattgggttttggttcagtgattctcaagaaaaagatctcttgcccattaagaagtgtatcaaaatctcataaggaatgagggagagaagggggctgtagagtttgaaaaagcatattcaatattaaaatagttttatatttgggaaggcaaaaatgaatctattgttttgcaatataggttataaacaggcaaaatgcaataaaatatatatctggttgtattagtctgttttcacgctgctgataaagacatacctgagaccaggaagaaaaagaggtttaattggacttacagttccacatgactggggaggcctcagaatcatggtgggaggcaaaaagcacttcttacatggcggcagcaagagaaaatgagaaagaagcaaaagtggaaacccctaataaacctatcagatcttgtgagacttactatcacgagaatagcacaggaaagactggcccccatgattcaattacctcccccgggtccctcccacaacacatgggaattctgagagataccatttaagttgagatttcagtggggacacagccaaaccatatcattctacccctggcacctccaaatctcatgtcctcacatttcaaaaccaatcatgccttcccaacagtcccccaaagtcttaactcatttcagcattaacccaaaagtccgcagtccaaagtttcatctgagacaaggcaagtcccttccacttatgaacctgtaaaatcaaaagtaaactagttacttcctagatacaatgggggtacaggtattgggtaaatacagccattccaaatgggagaaattggccaacacaaaagggtaacagggcccatgcaagtccaaaattcagcagggcagtcaaattttaaacctccaaaatgatcacctttgactccacgtctcacaatcatctctctcaagttcgaagttccacaaatctctaaggcaagggaaagatgctgccagtctctttgctaaaacacagcaagagtcacctttactccagttcccaaaaagtttttcatctccatctgagaccacctcagcctgaattttattgtcaatattgctatcagcattttgggcaaagccattcagcaagtatctaggaagttccaaactttcccacattttcctgtcttcttctgagcccttcaaactgttccaacctctgcctgttacccagttccaaacttgctttcatatttttggctatcttttcagcaatgccccactctactgttagcagtttactgtattagtctgttttcacactgctgataaagacattcctcaagattgtgaagaaaaagaggtttaattggacttacagttccacatggccggggaggcctcagaatcatggcgggaggtgaaaagcacttcgtacatggtggtggcaagagaaaatgaagaagaagcaaaagtggaaacccctgataaacccatcagatctcatgagacttactatcatgagaatagcacaggaaagactggcccccctgattcgatgacctccccctgggtccctcccacaacatgtgggaattccagaagataaattcaagttgcaatttcagtggggacatagccaaaccatatcactggtgatgccacttcttcagtattagggattctcagtcagaagagaccccctgtgtggcctgagtcccctcaggaggaaggtggacaacagagaaatgagagttttgatattttctgaaagaggaacatgtgttagagatgaagaatcttccaaggctcatgcagttgcttagaataatcattactgttatatgagaaacattttagtaatttaataaaaggataatgtttatttaaaaaacctgacttttccagagtaattttgttttgcacattcatgtttattgaagtggactaatttctataatgcaaatcagagttaaatattaaaaattgtgtaaatacaattgacataggaattacattaaaatattaggaagaaacaaggacaaatttagaccttgaatccgaagagataaagcttacttgactttcaaatggagagatgatgaaaacccactcattcactctttcagaacaaaaagacagtcatctgataagagtatgacatggatgaaatgccctacaggggccttggacatctttaatttctgcgattatgtgaaagaggtggactttacagataatggagcagaagccaacattagtaaaaggaatcccaacttcttcccatagaattagaaacatgtgaaagtacaataaacttcttgttcaaattaccagcatcagagagcttcccatttgcatctagaccttgaatttatatttattgatcaagttctaatttgtatgtatattttgtgcatattcaccaataacagttaaaattaattatgtgttatagttaatatatgcacctaccttcttccgttagtgcatcagtaaatgtgttattttgtcatttttccaaagagagtgttgtaggttttccctgtagttcttcctttatagcttttcttctgataaccatgacttcaggagctttaaaactatctatcttgcatttgtgtctggcggagaactagccatcagcctcctgaagcctgccatcattgttaatttgaggactgggctgtcttggggctcagaagataaagaactatttgagcagatgtgtgtgggtggcactggattccacccaactgccaagttagtattgttagagatttcattttacaacacaaaaataagcctgtgtcaaagattttaaaatcatggaaagttaaaatctagaaagaccttagagaaccagccaaccaactctctcattttaaaagtgaaggattcatagcacagattacttgcctaagatcatccaggaacgaagacaagaatccaaatgtacttggggacaagaattagtccccaaattcagtgttcttcctagtattaaacattgcccctttcgacaaattttggatttcattcttgttatatttcagtactcttgctgatttattttaggtttaactggtaaagaatgaacatttcagaagtgttaggattagtcagtgtcatcgcttatgtatatgaatcacttgccaaagacactggctctcctcagctgtaaccagcatgtcaaatgtgaagattattgtgtgggatcctttggtttcattgttatgatgtattttataaatgtactagttatatccttgtttatgtatttttgctgatctttcataaagcagaatggtatgtatcggattgttttaatgttatatattggattgtattcgatgttacaaaaccaatattctatggagaatgaaaaaaataaaggactaaattaactggagatttttggtactcttataaa

SEQ ID NO: 119060 - DNA, 1599 bp, Artificial Sequence
  derived and/or modified sequence
aggggctggctagagacccagaggcgcagagcggagaggcctgcggcgaggatggagggcctggcagtgcggttgctgcgcggcagcagctaagaagaaatttcctgacttgtttgtcttcttggaagattcctcctcatgtctcaaaatcttcccagtcagaagctctactcaatataacaaataatggaatacactttgctcccctgcaaacatttacagatgaggaaatgatgataaagagttcagttgatgggtattgaagttgacccagaatatggaggcacaggagcttcatttttatccactgtgctcgtgatagaggaattagccaaagttgatgcatctgtggctgtcttttgtgagatccagaacacattaattaacacactgattagaaaacatggaacagaagaacaaaaggccacctatttgcctcagctcactacagaaaaagtaggaagtttctgcctttcagaggctggagcaggtagtgactcatttgctttgaagaccagagctgataaagagggagattattatgtcctcaatggatcaaagatgtggatcagcagtgctgagcacgcagggctctttctggtgatggcaaatgtagaccctaccattggatataagggaattacctccttcttagtagatcgtgatactccgggccttcatatagggaaacctgaaaacaaattggggctcagagcttcttccacctgcccgttaacattcgaaaatgtcaaggttccagaagccaatatcttgggacaaattggacatggctataagtatgccatagggagtctcaatgaaggtagaataggaattgctgcacagatgctgggactggcgcaaggatgttttgactacactattccatatattaaagaaaggatacaatttggcaaaagactatttgattttcagggcctccaacaccaagtggctcacgtggccacccagctggaagctgcaagattactaacatacaatgctgctaggcttttagaagctggaaagccattcataaaagaagcgtcaatggccaaatactatgcatcagagattgcaggacaaacaacgagtaaatgtatcgagtggatggggggagtaggctacaccaaagattaccctgtggagaaatacttccgagatgcaaagattggtacgatatatgaaggagcttccaacatccagttgaacaccattgcaaagcatatcgatgcagaatactgacgtctataggagtgggacccctccctggtgtcactgctgtaaaattttaaacggttgtgtcttgttgggagtaagtgccttgcgtgggaataaacttccacagcattcgaatattttaatgaagcccttagtcagggtcctggtgttggcctttttggttttctcttttcaggctgtttaacttaggcacaggagatccacttttaaacttgggaaataagcacctgtatttttttccaaaactgtttttaaagctgtatacgcatacatatatatatttttactctgtcttactctgtcacccaggctagagtgcagtggcgcgatctcagctcactgcagccttgacctcct

SEQ ID NO: 119061 - protein, 160 aa, Artificial Sequence
  derived and/or modified sequence
MAGKRSGWSRAALLQLLLGVNLVVMPPTRARSLRFVTLLYRHGDRSPVKTYPKDPYQEEEWPQGFGQLTKEGMLQHWELGQALRQRYHGFLNTSYHRQEVYVRSTDFDRTLMSAEANLAGLFPPNGMQRFNPNISWQPIPVHTVPITEDRVRVASPSLGW

SEQ ID NO: 119062 - protein, 423 aa, Artificial Sequence
  derived and/or modified sequence
MAGKRSGWSRAALLQLLLGVNLVVMPPTRARSLRFVTLLYRHGDRSPVKTYPKDPYQEEEWPQGFGQLTKEGMLQHWELGQALRQRYHGFLNTSYHRQEVYVRSTDFDRTLMSAEANLAGLFPPNGMQRFNPNISWQPIPVHTVPITEDRLLKFPLGPCPRYEQLQNETRQTPEYQNESSRNAQFLDMVANETGLTDLTLETVWNVYDTLFCEQTHGLRLPPWASPQTMQRLSRLKDFSFRFLFGIYQQAEKARLQGGVLLAQIRKNLTLMATTSQLPKLLVYSAHDTTLVALQMALDVYNGEQAPYASCHIFELYQEDSGNFSVEMYFRNESDKAPWPLSLPGCPHRCPLQDFLRLTEPVVPKDWQQECQLASGPADTEVIVALAVCGSILFLLIVLLLTVLFRMQAQPPGYRHVADGEDHA

SEQ ID NO: 119063 - protein, 413 aa, Artificial Sequence
  derived and/or modified sequence
MAGKRSGWSRAALLQLLLGVNLVVMPPTRARSLRFVTLLYRHGDRSPVKTYPKDPYQEEEWPQGFGQLTKEGMLQRYHGFLNTSYHRQEVYVRSTDFDRTLMSAEANLAGLFPPNGMQRFNPNISWQPIPVHTVPITEDRLLKFPLGPCPRYEQLQNETRQTPEYQNESSRNAQFLDMVANETGLTDLTLETVWNVYDTLFCEQTHGLRLPPWASPQTMQRLSRLKDFSFRFLFGIYQQAEKARLQGGVLLAQIRKNLTLMATTSQLPKLLVYSAHDTTLVALQMALDVYNGEQAPYASCHIFELYQEDSGNFSVEMYFRNESDKAPWPLSLPGCPHRCPLQDFLRLTEPVVPKDWQQECQLASGPADTEVIVALAVCGSILFLLIVLLLTVLFRMQAQPPGYRHVADGEDHA

SEQ ID NO: 119064 - DNA, 1272 bp, Artificial Sequence
  derived and/or modified sequence
atggccggaaaacgatcagggtggtcaagggccgctctgctgcagctgctgttgggagtcaatctcgttgtaatgcctcctacccgagctaggagcctgagatttgtaactctgctttatcgccacggggaccggtctccagtcaaaacgtatccgaaagacccataccaggaggaagagtggccacagggcttcggacagctgactaaagaagggatgctgcagcattgggaattgggacaggcgctgcggcagcgctaccatgggtttcttaacacgtcttatcatcgccaggaagtgtacgtgcgcagcaccgatttcgacagaacattaatgtctgcggaagcgaatttagccgggttgttcccccccaatgggatgcagagatttaacccaaatatctcctggcagccgataccagtgcatactgtccctattaccgaagacagactcctgaaattcccactcggtccttgcccacgttacgaacagctccagaacgagacacgccagacccctgagtaccagaatgaaagctctaggaatgcccagttcttagatatggttgccaacgagaccgggttgacggacttaacactggaaaccgtgtggaatgtttacgacacccttttttgtgagcagacccatgggctgcgtttgccgccctgggcgagcccgcagaccatgcaacggctatcccgcctgaaagacttcagttttcgcttcctgttcggcatctatcaacaggcagaaaaagcacgcctacaggggggtgttctgctggctcagattcgtaagaatctgacactcatggccacaacctcacagctccccaagctgctcgtctatagtgctcacgatacaacactcgtcgctctgcagatggcactcgacgtgtacaatggggaacaggcaccttacgccagctgtcacattttcgaactgtaccaggaagactctggtaatttttctgtggagatgtatttccgaaatgaaagcgacaaggcaccttggcccctgtctctgcccggatgtccacaccgttgccctctacaggatttcctgcgactcacggaacccgtcgtccccaaagattggcagcaggagtgccagctggccagcggaccggccgacacggaagtcatagtcgccctggcagtgtgcggaagtattttgttcctgctgattgtgttgttactgaccgtgctattccgaatgcaggcccagcctcctggttacagacatgtggctgacggcgaggaccacgcatag

SEQ ID NO: 119065 - DNA, 1242 bp, Artificial Sequence
  derived and/or modified sequence
atggcaggcaaaagaagcggttggagcagagccgccctgcttcagcttcttctcggcgtgaacctcgtagtgatgcctcctactcgcgctagatcgctgagatttgtgaccctattgtacagacatggagaccgaagccctgtgaaaacctaccccaaagacccctaccaagaggaggagtggccacagggtttcggccaactgaccaaggagggcatgctgcagcggtaccacggctttctaaataccagttaccatcggcaggaagtgtatgtccgctccactgatttcgatcgcactcttatgagcgcggaggccaacctcgctgggctcttccccccaaatggcatgcagagattcaatcccaatatttcctggcagccaattcctgtccatacagtccctattaccgaagatcggctgctgaagtttccactggggccttgccctcggtacgagcagcttcagaacgaaactcgccaaacgccagagtatcagaatgagtcaagccggaacgcccagttcctggacatggtagctaatgaaaccggactgactgatttaacactggaaacggtttggaacgtgtacgacaccctgttttgcgaacagacacacggcctgagactccccccatgggcatcccctcaaaccatgcagaggctctcacgtttgaaggactttagctttagattcttgtttggcatctaccagcaggccgagaaggcaaggcttcagggcggagtcctgctcgcgcagatcaggaagaacctaactcttatggctaccacgtcccagttacctaagctcttggtatacagcgcgcacgacactactttggtggcacttcaaatggccctggacgtgtacaatggcgaacaagccccttacgcgagctgccacatttttgagttgtatcaggaagacagcggcaatttctccgtggagatgtattttcgaaacgaatcagataaagcgccttggcctctcagcctgccaggatgccctcacagatgccccctacaggattttcttcggttgaccgagcctgtggtccctaaagattggcagcaggaatgtcaactcgcctcgggaccggctgacaccgaggtgattgtggccctggctgtgtgtgggtccatcctctttttactgattgtgctcctgctgactgttttatttcgcatgcaagcccaaccgcctggctatcggcacgtggctgacggcgaggaccacgcttag

SEQ ID NO: 119066 - DNA, 1272 bp, Artificial Sequence
  derived and/or modified sequence
atggccggcaagaggagcggctggagcagagctgccctgctgcagctgctgctgggcgtgaacctggtggtgatgccacccacccgggcccggagcctgcgctttgtgaccctgctgtaccgccacggggacaggagccctgtgaagacctaccccaaggacccctaccaggaggaggagtggccccagggcttcggccagctgaccaaggagggcatgctgcagcactgggagctgggccaggccctgcggcagcgctaccacggcttcctgaacaccagctaccaccggcaggaggtgtatgtgcgcagcacagactttgacaggaccctgatgtctgctgaggccaacctggccggcctcttccccccaaatggcatgcagcgcttcaaccccaacatctcctggcagcccatccctgtgcacacagtgcccatcacagaggaccggctgctgaagttccccctgggcccctgccccaggtatgagcagctgcagaatgagacccggcagaccccagagtaccagaatgaaagcagcagaaatgcccagttcctggacatggtggccaatgaaacaggcctgacagacctgaccctggagaccgtgtggaatgtgtatgacaccctcttctgtgagcagacccacggcctgcggctgcccccctgggccagcccccagaccatgcagaggctgagccggctgaaggacttctccttccgcttcctgtttggcatctaccagcaggccgagaaggcccggctgcagggcggcgtgctgctggcccagatcaggaagaacctgaccctgatggccaccaccagccagctgcccaagctgctggtgtacagcgcccatgacaccaccctggtggccctgcagatggccctggatgtgtacaatggagagcaggccccctatgccagctgccacatctttgagctgtaccaggaggacagcggcaacttctctgtggagatgtacttcagaaatgaaagtgacaaggccccctggcccctgagcctgcccggctgcccccaccgctgccccctgcaggacttcctgcggctgacagagcctgtggtgcccaaggactggcagcaggagtgccagctggccagcggccctgctgacacagaggtgattgtggccctggccgtgtgtggcagcatcctcttcctgctgattgtgctgctgctgactgtgctcttcaggatgcaggcccagcccccaggctacagacatgtggctgatggagaggaccacgcctag

SEQ ID NO: 119067 - DNA, 1242 bp, Artificial Sequence
  derived and/or modified sequence
atggccggcaagaggagcggctggagcagagctgccctgctgcagctgctgctgggcgtgaacctggtggtgatgccacccacccgggcccggagcctgcgctttgtgaccctgctgtaccgccacggggacaggagccctgtgaagacctaccccaaggacccctaccaggaggaggagtggccccagggcttcggccagctgaccaaggagggcatgctgcagcgctaccacggcttcctgaacaccagctaccaccggcaggaggtgtatgtgcgcagcacagactttgacaggaccctgatgtctgctgaggccaacctggccggcctcttccccccaaatggcatgcagcgcttcaaccccaacatctcctggcagcccatccctgtgcacacagtgcccatcacagaggaccggctgctgaagttccccctgggcccctgccccaggtatgagcagctgcagaatgagacccggcagaccccagagtaccagaatgaaagcagcagaaatgcccagttcctggacatggtggccaatgaaacaggcctgacagacctgaccctggagaccgtgtggaatgtgtatgacaccctcttctgtgagcagacccacggcctgcggctgcccccctgggccagcccccagaccatgcagaggctgagccggctgaaggacttctccttccgcttcctgtttggcatctaccagcaggccgagaaggcccggctgcagggcggcgtgctgctggcccagatcaggaagaacctgaccctgatggccaccaccagccagctgcccaagctgctggtgtacagcgcccatgacaccaccctggtggccctgcagatggccctggatgtgtacaatggagagcaggccccctatgccagctgccacatctttgagctgtaccaggaggacagcggcaacttctctgtggagatgtacttcagaaatgaaagtgacaaggccccctggcccctgagcctgcccggctgcccccaccgctgccccctgcaggacttcctgcggctgacagagcctgtggtgcccaaggactggcagcaggagtgccagctggccagcggccctgctgacacagaggtgattgtggccctggccgtgtgtggcagcatcctcttcctgctgattgtgctgctgctgactgtgctcttcaggatgcaggcccagcccccaggctacagacatgtggctgatggagaggaccacgcctag

SEQ ID NO: 119068 - DNA, 1272 bp, Artificial Sequence
  derived and/or modified sequence
atggccggcaagcggagcggctggagccgggccgccctgctgcagctcctgctcggagtgaaccttgtcgtaatgccgcccaccagagcaagatctctgaggttcgtcacactgttgtataggcacggggacaggtctcctgtgaaaacctaccccaaggatccttaccaggaggaggaatggccccaagggtttggccaactcaccaaggaaggaatgctccagcattgggagcttggacaggcactgcgccagcgttaccatggctttctaaacacgtcatatcacagacaagaagtgtatgttagaagcacggactttgacaggactctgatgtcagcagaggctaatctcgccggccttttccccccaaatggtatgcaaagattcaaccctaatatttcatggcagcctattccagtgcacacagtgcccatcacagaggacagactgttaaaattcccactgggaccctgtccccggtacgaacagctacagaatgagacccgacagacccctgagtaccagaatgaatccagtcgaaatgcccagttcttagatatggtggctaacgaaactgggcttactgacttgacactggagaccgtgtggaatgtgtacgatacgctgttctgtgagcaaacgcatggattgaggctgcctccatgggcctctccccaaacaatgcagaggctgtccaggttgaaggatttctccttccggtttctcttcggtatataccagcaggctgagaaggcacggctgcaaggtggggtattgctggcacagatcagaaagaatttaacattaatggccacgacgtcacaactccccaaactgctggtttactccgcccatgacaccactctagtggcgctgcaaatggccctggatgtgtacaacggagagcaggctccatacgccagctgtcatatattcgagttgtatcaagaggactcaggcaacttttccgtggagatgtacttccgcaatgaaagtgacaaagcgccatggcctctctccctgcccggatgcccccatcgatgtcctctgcaggacttcctcagactgacagaacctgtggtgcctaaggactggcaacaggagtgccagctggcaagcggcccagccgatacggaagtgattgtggccttagccgtatgcggatctatactctttctgcttatcgttctcttgctgactgtgctcttcaggatgcaggcgcaacctccaggttatagacatgtggccgatggcgaggaccacgcgtag

SEQ ID NO: 119069 - DNA, 1242 bp, Artificial Sequence
  derived and/or modified sequence
atggccggcaagcggagcggctggagccgggccgccctgctgcagctcttgctcggagtcaatctggtcgtgatgcccccgactagagctaggtccctgcggttcgtgaccctgctgtatcgtcacggtgacagatcccctgtgaaaacgtaccctaaggacccttaccaggaagaggaatggcctcagggatttggccagctgacaaaagagggaatgttgcagagatatcacggctttcttaatacatcttatcatcgccaagaagtttatgtgcgctctaccgactttgacagaaccctcatgtcagccgaagccaacctggccggactcttcccaccgaatggaatgcaacggtttaatccaaacatttcctggcaacctataccagtccacaccgttcccattaccgaagacagactgcttaaattcccattgggcccttgcccccggtacgaacagctgcagaacgaaactaggcaaacccctgaatatcagaacgagagtagtcgaaatgcccaattcctggacatggtcgccaatgagacgggcctgaccgacttaaccctggaaacagtgtggaacgtctatgacacacttttctgtgaacagactcatggactgaggctgccaccttgggctagcccacagacaatgcagaggctgagtcgcctgaaggacttttctttcaggtttctgttcgggatttaccagcaagcggagaaggcaaggctgcagggtggagtcttactggcccagatccggaaaaacttgaccttaatggctacgaccagccagctgccgaagttattggtctattcggctcacgacacgaccctcgttgccctccagatggcgctcgacgtttacaacggagaacaggccccctatgcatcctgtcatatattcgaactgtatcaggaggattcaggtaacttctccgtggagatgtacttccggaatgaatctgacaaggcaccctggccactgtctttgcccggttgcccacaccggtgcccccttcaggattttttgcggctgaccgagcctgtagttcccaaggattggcaacaggagtgtcagcttgcctccggacctgcagacaccgaggttatcgttgccttagccgtctgtggatccatcttgttcctgctgattgtcctccttttgactgttctttttcgaatgcaagcgcagccaccgggctaccggcatgtggcagacggagaggatcacgcctag

SEQ ID NO: 119070 - DNA, 1272 bp, Artificial Sequence
  derived and/or modified sequence
atggccggaaagagaagcgggtggtcccgggcagctctgttgcagctactactaggcgttaacttggtagtcatgccacctacaagggccagatctttaagatttgtgactctgttgtatcgacacggcgaccgaagccccgtgaaaacctatcctaaagacccttaccaggaagaagagtggccccagggattcggacaactcacgaaagaaggtatgctgcaacattgggagctggggcaggccctcaggcagcgctaccacggctttctcaatacctcatatcatcgccaagaagtctatgtgcgcagcaccgacttcgatcgcactctcatgagcgccgaggctaatctcgcaggcttgttcccacccaacggcatgcagcgatttaacccaaatatcagttggcaaccaattccagttcatacagtgcctatcaccgaggaccgcctcctgaagttcccactgggcccttgtcccaggtacgagcagctccaaaacgagacccggcagacccccgaataccagaacgagtcatctcgcaacgctcagtttctggatatggtggcaaacgagaccggcctcacagacctgaccttagaaaccgtttggaacgtgtacgataccttgttttgcgagcagacccacggactgcgcctacccccatgggccagtccgcagaccatgcaaaggctatcccgattaaaggacttctcttttcggtttctgtttgggatctatcagcaggccgagaaagctcgactgcagggcggagtcttgttggcccagatcaggaaaaatctcacgctgatggctacaaccagccaactgcccaagctactcgtgtatagcgcccatgatactaccctcgtggctcttcagatggctctggacgtttacaacggggaacaggccccttacgcttcttgccacattttcgaactctatcaggaggattccggaaacttttctgtcgaaatgtactttagaaacgagtccgataaggcgccatggcccctttccttgccaggctgtccccataggtgcccactccaggactttctgcgcctcactgagcctgtcgtgccaaaggattggcagcaggagtgtcaactggcatctggcccagcggataccgaggttatagttgctctcgctgtgtgcgggagtatcttatttctgcttattgttctcctcttgacggtgttgtttcgaatgcaggcacaaccccctggatacagacatgtggcagacggagaagaccatgcctag

SEQ ID NO: 119071 - DNA, 1242 bp, Artificial Sequence
  derived and/or modified sequence
atggctggaaaaagatccggatggtcacgcgcagctctactgcagctcctccttggcgtgaatctcgtcgtcatgccacctactcgggctcggtctctccgcttcgtgacgctgctgtatcgacatggtgatcgttcccctgtgaagacctatccgaaagatccataccaggaagaagagtggccacagggattcggtcagctcacaaaggaaggcatgctgcagaggtatcacggattcctgaacacatcctatcaccgtcaagaagtgtacgtgagatctacagattttgatcgcacactaatgtctgccgaagcaaacctcgcgggattattcccaccaaacggaatgcagaggtttaaccctaacatcagctggcagcccatcccagtgcacacagtccccattaccgaagatcgcttactgaaattcccacttggaccgtgtccaaggtacgagcagctgcagaacgagaccaggcagacccccgaatatcagaacgagagctctagaaacgctcaattcttggatatggttgcaaacgaaaccggacttaccgatctgacgctggagacagtgtggaatgtttatgatacccttttctgcgaacaaactcatggcttgcggcttcccccatgggccagcccacagacaatgcagcgattgtcccgcttaaaagacttttcatttcggttcctcttcggcatttaccagcaggccgagaaagcgagactgcaggggggagtgctgctagcccagattaggaaaaatttgactctcatggcgactacctctcagctgcccaagctcctggtgtattcagctcacgataccactctcgtggcgcttcagatggccttagacgtgtacaatggtgagcaggccccatatgcatcttgccacatctttgaactgtatcaagaggactcagggaacttctcggtcgagatgtattttagaaatgagagcgataaggctccctggccattaagtctgccgggttgccctcaccggtgtccattgcaagatttcttacggcttaccgagcctgtggtgcctaaggactggcagcaggagtgccagttggcttctggcccagctgacactgaagtgattgtggcattggctgtctgtggtagtatattgtttctgctgattgttctcctgcttacggtcctgttcaggatgcaggctcagccacctgggtatcggcatgtggccgacggcgaagaccacgcctag

SEQ ID NO: 119072 - DNA, 2203 bp, Artificial Sequence
  derived and/or modified sequence
aagtaagatggcggcgaacgcacttccggcgtgtgtccttacgggtgcgtccgggcggctgcttgcaggtgccacccagcgggttccagcttgtttgctgcatagattacaacggtgatggcgggcaagcggtccggctggagccgggcggctctcctccagctccttctcggcgtgaacctggtggtgatgccgcccacccgggcccggagtctgcgcttcgttaccttgctgtaccgccatggagaccgttcaccagtgaagacatatcccaaggacccctatcaggaagaagaatggccccaggggtttggtcagttaaccaaggaggggatgctacagcactgggaactgggccaggccctgcggcagcgctatcacggcttcctaaacacctcttatcaccggcaagaggtttatgtgcgaagcacagactttgaccggactctcatgagtgctgaggccaacctggctggactcttccctcccaacgggatgcagcgcttcaacccgaacatctcgtggcagcctattcctgtgcacactgtgcccatcactgaggacaggctgctgaagttcccgttgggcccatgtccccgttatgagcagctgcagaacgagacccggcagacaccagagtatcagaatgagagttctcggaatgcacaatttctggacatggtggccaacgagacagggcttacagacctgacactggagaccgtctggaatgtctatgacacactcttctgtgagcaaacgcacgggctgcgcctgccgccctgggcctcaccccaaaccatgcagcgtctcagccggctaaaggacttcagcttccgcttcctcttcggaatctaccagcaggcggagaaggcccggcttcaggggggagtcctgctggctcagataaggaagaacctgaccctaatggcgaccacctcccagctccccaagctgctggtttactctgcgcacgacactaccctggttgccctgcaaatggcactggatgtctacaatggtgaacaagccccctacgcctcctgccacatatttgaactgtaccaggaagattctgggaatttctcagtggagatgtactttcggaacgagagtgacaaggccccctggccgctcagcctgcctggctgccctcaccgctgcccactgcaggacttccttcgcctcacagagcccgtcgtgcccaaggattggcagcaggagtgccagctggcaagcggtcctgcagacacagaggtgattgtggccttggctgtatgtggctccatcctcttcctcctcatagtgctgctcctcaccgtcctcttccggatgcaggcccagcctcctggctaccgccacgtcgcagatggggaggaccacgcctgacaaccactcagcccccttccctccacctcctaggggaggtgggctgggccctcgctcctgactgttgctgctccccagcccatggacaggagatcctgggttgggcctccctctgatgaccccagccagatgagcgagtggggctcagcgtggcccatggtgcctgtcactcagcattcccatgcctgatgtttaccaagtgctgtgttggacactggctttctccaaacaggatttgcctcctccacgctccctacacacctgagatgtaaactggcagtcagtgttcactcaggacctaggattagaaaatggcagagttggtgctggatccaccttgcacttctatcaagccctgttctttttcctccagcctgaagtcttcggcaaatagctcagagggacacggtcttgcctctcagtgcttattttagtgggaaaaacagctaataccaggggtacaaacattggctcccaaggaactggatcacccaacagccagccagccacatttccctgtgtctggctagagccaccattagactcagacagaatgcttcaggaatcgttgtcaccccttcaactggagcaggacggaaggttgtctgtacttgggagggagtagggagtggtgggaagggagttgcttgtcacacgaatcaggaaactgctctccctcagctgggctggggtctccagggacctgagctacatgcaggttgtgagctggaaaagaaagttctagactgtggcccagaatagggctggggcagctcccagagaatgaatagtgctgtttcctattggactgata

SEQ ID NO: 119073 - DNA, 1457 bp, Artificial Sequence
  derived and/or modified sequence
gtttgctgcatagattacaacggtgatggcgggcaagcggtccggctggagccgggcggctctcctccagctccttctcggcgtgaacctggtggtgatgccgcccacccgggcccggagtctgcgcttcgttaccttgctgtaccgccatggagaccgttcaccagtgaagacatatcccaaggacccctatcaggaagaagaatggccccaggggtttggtcagttaaccaaggaggggatgctacagcactgggaactgggccaggccctgcggcagcgctatcacggcttcctaaacacctcttatcaccggcaagaggtttatgtgcgaagcacagactttgaccggactctcatgagtgctgaggccaacctggctggactcttccctcccaacgggatgcagcgcttcaacccgaacatctcgtggcagcctattcctgtgcacactgtgcccatcactgaggacagggactgagaccctgatccatttttcatagcaatttctggacatggtggccaacgagacagggcttacagacctgacactggagaccgtctggaatgtctatgacacactcttctgtgagcaaacgcacgggctgcgcctgccgccctgggcctcaccccaaaccatgcagcgtctcagccggctaaaggacttcagcttccgcttcctcttcggaatctaccagcaggcggagaaggcccggcttcaggggggagtcctgctggctcagataaggaagaacctgaccctaatggcgaccacctcccagctccccaagctgctggtttactctgcgcacgacactaccctggttgccctgcaaatggcactggatgtctacaatggtgaacaagccccctacgcctcctgccacatatttgaactgtaccaggaagattctgggaatttctcagtggagatgtactttcggaacgagagtgacaaggccccctggccgctcagcctgcctggctgccctcaccgctgcccactgcaggacttccttcgcctcacagagcccgtcgtgcccaaggattggcagcaggagtgccagctggcaagcggtcctgcagacacagaggtgattgtggccttggctgtatgtggctccatcctcttcctcctcatagtgctgctcctcaccgtcctcttccggatgcaggcccagcctcctggctaccgccacgtcgcagatggggaggaccacgcctgacaaccactcagcccccttccctccacctcctaggggaggtgggctgggccctcgctcctgactgttgctgctccccagcccatggacaggagatcctgggttgggcctccctctgatgaccccagccagatgagcgagtggggctcagcgtggcccatggtgcctgtcactcagcattcccatgcctgatgtttaccaagtgctgtgttggacactggctttctccaaaca

SEQ ID NO: 119074 - DNA, 1340 bp, Artificial Sequence
  derived and/or modified sequence
atagattacaacggtgatggcgggcaagcggtccggctggagccgggcggctctcctccagctccttctcggcgtgaacctggtggtgatgccgcccacccgggcccggagtctgcgcttcgttaccttgctgtaccgccatggagaccgttcaccagtgaagacatatcccaaggacccctatcaggaagaagaatggccccaggggtttggtcagttaaccaaggaggggatgctacagcgctatcacggcttcctaaacacctcttatcaccggcaagaggtttatgtgcgaagcacagactttgaccggactctcatgagtgctgaggccaacctggctggactcttccctcccaacgggatgcagcgcttcaacccgaacatctcgtggcagcctattcctgtgcacactgtgcccatcactgaggacaggctgctgaagttcccgttgggcccatgtccccgttatgagcagctgcagaacgagacccggcagacaccagagtatcagaatgagagttctcggaatgcacaatttctggacatggtggccaacgagacagggcttacagacctgacactggagaccgtctggaatgtctatgacacactcttctgtgagcaaacgcacgggctgcgcctgccgccctgggcctcaccccaaaccatgcagcgtctcagccggctaaaggacttcagcttccgcttcctcttcggaatctaccagcaggcggagaaggcccggcttcaggggggagtcctgctggctcagataaggaagaacctgaccctaatggcgaccacctcccagctccccaagctgctggtttactctgcgcacgacactaccctggttgccctgcaaatggcactggatgtctacaatggtgaacaagccccctacgcctcctgccacatatttgaactgtaccaggaagattctgggaatttctcagtggagatgtactttcggaacgagagtgacaaggccccctggccgctcagcctgcctggctgccctcaccgctgcccactgcaggacttccttcgcctcacagagcccgtcgtgcccaaggattggcagcaggagtgccagctggcaagcggtcctgcagacacagaggtgattgtggccttggctgtatgtggctccatcctcttcctcctcatagtgctgctcctcaccgtcctcttccggatgcaggcccagcctcctggctaccgccacgtcgcagatggggaggaccacgcctgacaaccactcagcccccttccctccacctcctaggggaggtgggctgggccctcgctcctgactgttgctgctccccagccca

SEQ ID NO: 119075 - DNA, 1272 bp, Artificial Sequence
  derived and/or modified sequence
atggccggcaagagaagcggctggagcagagccgccctgctgcagctgctgctgggcgtgaacctggtggtgatgccccccaccagagccagaagcctgagattcgtgaccctgctgtacagacacggcgacagaagccccgtgaagacctaccccaaggacccctaccaggaggaggagtggccccagggcttcggccagctgaccaaggagggcatgctgcagcactgggagctgggccaggccctgagacagagataccacggcttcctgaacaccagctaccacagacaggaggtgtacgtgagaagcaccgacttcgacagaaccctgatgagcgccgaggccaacctggccggcctgttcccccccaacggcatgcagagattcaaccccaacatcagctggcagcccatccccgtgcacaccgtgcccatcaccgaggacagactgctgaagttccccctgggcccctgccccagatacgagcagctgcagaacgagaccagacagacccccgagtaccagaacgagagcagcagaaacgcccagttcctggacatggtggccaacgagaccggcctgaccgacctgaccctggagaccgtgtggaacgtgtacgacaccctgttctgcgagcagacccacggcctgagactgcccccctgggccagcccccagaccatgcagagactgagcagactgaaggacttcagcttcagattcctgttcggcatctaccagcaggccgagaaggccagactgcagggcggcgtgctgctggcccagatcagaaagaacctgaccctgatggccaccaccagccagctgcccaagctgctggtgtacagcgcccacgacaccaccctggtggccctgcagatggccctggacgtgtacaacggcgagcaggccccctacgccagctgccacatcttcgagctgtaccaggaggacagcggcaacttcagcgtggagatgtacttcagaaacgagagcgacaaggccccctggcccctgagcctgcccggctgcccccacagatgccccctgcaggacttcctgagactgaccgagcccgtggtgcccaaggactggcagcaggagtgccagctggccagcggccccgccgacaccgaggtgatcgtggccctggccgtgtgcggcagcatcctgttcctgctgatcgtgctgctgctgaccgtgctgttcagaatgcaggcccagccccccggctacagacacgtggccgacggcgaggaccacgcctag

SEQ ID NO: 119076 - DNA, 1242 bp, Artificial Sequence
  derived and/or modified sequence
atggccggcaagagaagcggctggagcagagccgccctgctgcagctgctgctgggcgtgaacctggtggtgatgccccccaccagagccagaagcctgagattcgtgaccctgctgtacagacacggcgacagaagccccgtgaagacctaccccaaggacccctaccaggaggaggagtggccccagggcttcggccagctgaccaaggagggcatgctgcagagataccacggcttcctgaacaccagctaccacagacaggaggtgtacgtgagaagcaccgacttcgacagaaccctgatgagcgccgaggccaacctggccggcctgttcccccccaacggcatgcagagattcaaccccaacatcagctggcagcccatccccgtgcacaccgtgcccatcaccgaggacagactgctgaagttccccctgggcccctgccccagatacgagcagctgcagaacgagaccagacagacccccgagtaccagaacgagagcagcagaaacgcccagttcctggacatggtggccaacgagaccggcctgaccgacctgaccctggagaccgtgtggaacgtgtacgacaccctgttctgcgagcagacccacggcctgagactgcccccctgggccagcccccagaccatgcagagactgagcagactgaaggacttcagcttcagattcctgttcggcatctaccagcaggccgagaaggccagactgcagggcggcgtgctgctggcccagatcagaaagaacctgaccctgatggccaccaccagccagctgcccaagctgctggtgtacagcgcccacgacaccaccctggtggccctgcagatggccctggacgtgtacaacggcgagcaggccccctacgccagctgccacatcttcgagctgtaccaggaggacagcggcaacttcagcgtggagatgtacttcagaaacgagagcgacaaggccccctggcccctgagcctgcccggctgcccccacagatgccccctgcaggacttcctgagactgaccgagcccgtggtgcccaaggactggcagcaggagtgccagctggccagcggccccgccgacaccgaggtgatcgtggccctggccgtgtgcggcagcatcctgttcctgctgatcgtgctgctgctgaccgtgctgttcagaatgcaggcccagccccccggctacagacacgtggccgacggcgaggaccacgcctag

SEQ ID NO: 119077 - protein, 81 aa, Artificial Sequence
  derived and/or modified sequence
MNRFLLLMSLYLLGSARGTSSQPNELSGSIDHQTSVQQLPGGKLQFMVQGCENMCPSMNLFSHGTRMQIICCRNQSFCNKI

SEQ ID NO: 119078 - protein, 265 aa, Artificial Sequence
  derived and/or modified sequence
MNRFLLLMSLYLLGSARGTSSQPNELSGSIDHQTSVQQLPGEFFSLENPSDAEALYETSSGLNTLSEHGSSEHGSSKHTVAEHTSGEHAESEHASGEPAATEHAEGEHTVGEQPSGEQPSGEHLSGEQPLSELESGEQPSDEQPSGEHGSGEQPSGEQASGEQPSGEHASGEQASGAPISSTSTGTILNCYTCAYMNDQGKCLRGEGTCITQNSQQCMLKKIFEGGKLQFMVQGCENMCPSMNLFSHGTRMQIICCRNQSFCNKI

SEQ ID NO: 119079 - DNA, 798 bp, Artificial Sequence
  derived and/or modified sequence
atgaatcgttttctgctgctcatgagcctatacttgttaggaagtgcccgcgggactagctcccagcctaatgaactgagcggcagtatagatcaccagacgtctgtacagcagctgccgggagaattcttttctctcgaaaacccctcagatgcagaagcgctttacgaaaccagcagcgggttaaatacgctgtcagagcatggcagttctgagcacggaagtagcaaacacaccgtggcggaacacacttccggcgaacacgctgagtctgagcacgcatccggcgagccggcggctacagaacatgccgagggcgaacacaccgtcggggaacaaccatcaggcgagcagccctccggggagcatctgtctggagagcaacccctgtccgagttggagtctggagagcaaccatctgacgagcagccttcgggcgagcacggctccggtgaacaaccttccggggaacaggcctctggggagcaacccagtggcgagcacgcctctggagaacaggcctcaggggcccccatcagctccacatccacagggaccatattgaattgctatacctgtgcctacatgaatgaccaaggtaagtgcttgagaggtgagggcacctgtatcacccagaactcacagcagtgcatgcttaagaaaattttcgagggggggaagctgcagtttatggtacagggctgcgaaaacatgtgtccaagcatgaacttgttttcacatggcaccaggatgcagattatttgttgtcggaaccagtccttctgtaacaagatttag

SEQ ID NO: 119080 - DNA, 798 bp, Artificial Sequence
  derived and/or modified sequence
atgaaccgcttcctgctgctgatgagcctgtacctgctgggcagcgcccggggcaccagcagccagcccaatgagctgagcggcagcattgaccaccagacctctgtgcagcagctgcccggggagttcttcagcctggagaaccccagtgatgctgaggccctgtatgagaccagcagcggcctgaacaccctgtctgagcacggcagcagcgagcacggcagcagcaagcacacagtggccgagcacaccagcggggagcacgccgagagcgagcacgccagcggggagcctgctgccacagaacatgctgagggggagcacacagtgggggagcagcccagcggggagcagcccagcggggagcacctgtctggagagcagcccctgtctgagctggagagcggggagcagcccagtgatgagcagcccagcggggagcacggcagcggggagcagcccagcggggagcaggccagcggggagcagcccagcggggagcacgccagcggggagcaggccagcggggcccccatcagcagcaccagcacaggcaccatcctgaactgctacacctgtgcctacatgaatgaccagggcaagtgcctgcggggggagggcacctgcatcacccagaacagccagcagtgcatgctgaagaagatctttgaaggaggcaagctgcagttcatggtgcagggctgtgagaacatgtgccccagcatgaacctcttcagccacggcaccaggatgcagatcatctgctgcaggaaccagagcttctgcaacaagatctag

SEQ ID NO: 119081 - DNA, 798 bp, Artificial Sequence
  derived and/or modified sequence
atgaaccggttcctgctgctgatgagcctgtacctgctgggcagcgcccggggaacctccagccaaccaaatgagctttctggctccattgaccaccaaaccagcgttcagcagctgcctggcgagtttttttcattggaaaaccccagcgacgccgaggccctgtatgagacgtctagtggactcaatactctgtctgagcatggttcctcggagcacggatcatcaaaacacaccgtggctgagcacacttcaggagaacacgccgaatcagagcacgcttccggggagccagctgccacagagcacgctgagggagaacataccgtgggcgaacagcccagtggagagcagccttccggagagcacctgtccggcgaacagcccctctccgagttggaaagtggggaacaaccgtccgatgagcaaccaagcggcgaacatggatccggcgagcagcccagcggggaacaagcttccggagaacagccgtcaggagagcatgccagtggagagcaggctagcggcgcccccatctcatctacatcaacaggcactatcctgaattgctacacttgcgcgtatatgaatgaccagggaaaatgtctcagaggagagggcacgtgtatcacccagaactcccagcagtgtatgctcaagaagattttcgaaggcgggaagctacagtttatggtgcagggatgtgagaacatgtgtccatctatgaatcttttttcacacggcacacggatgcagattatttgctgtcgaaatcaatccttttgtaataagatttag

SEQ ID NO: 119082 - DNA, 798 bp, Artificial Sequence
  derived and/or modified sequence
atgaatcggttcctattgctcatgtccctctaccttctcggtagcgcacgtggtaccagcagtcaacctaatgagttgtctggtagtattgaccaccaaacgtccgtccaacagcttcccggtgaattctttagtctcgaaaatccctcagacgcggaggccctctatgagacatccagcggcctaaatacactgtcagaacacggcagtagcgaacacggatcttcgaagcacacagttgctgagcatacatcgggagaacatgctgaaagcgagcacgctagcggagagcccgctgccactgagcacgcagaaggcgaacataccgtgggcgagcagcccagcggtgagcagccctccggtgagcacctatctggtgagcagccactgtccgaattagaatcgggagaacagcccagcgatgaacaaccttccggcgagcatggtagcggcgaacagcctagcggagaacaagcttcaggcgagcagccatctggtgagcatgcttcaggcgaacaggcatctggagccccaatatcctccacctctaccggcaccattctgaactgttatacctgcgcctacatgaatgaccaggggaagtgcctgcggggagaagggacgtgcatcacccagaattctcagcaatgtatgttaaagaagatctttgaggggggaaaactgcagtttatggtgcaaggctgcgagaacatgtgcccctccatgaatttgttctcccatgggacacggatgcagatcatttgctgcaggaatcagtcgttctgtaacaagatttag

SEQ ID NO: 119083 - DNA, 2212 bp, Artificial Sequence
  derived and/or modified sequence
atcttttaaactttattacaaaaaatatgtgctttttggtaatactttttttttttttttaaagatagggcagatagccccaacacactaccctgcacacagaaaataatcattggtcttcactagtgaaataagcagtgggttgctaagggccaacttgcctgaacaggctacacaagaacctcagagcccaacccattgtgaagaaacatgggttacttctgaggttctagaattcccagaagctctgcttcagcactggaagcttttgctcgcagtttgcttcatagctctgtgaagaagctgtggcccacactggggtcccctcttttcctaaatccagatgaacaggtttctcttgctaatgagtctttatctgcttggatctgccagaggaacatcaagtcagcctaatgagctttctggctccatagatcatcaaacttcagttcagcaacttccaggtgagttcttttcacttgaaaacccttctgatgctgaggctttatatgagacttcttcaggcctgaacactttaagtgagcatggttccagtgagcatggttcaagcaagcacactgtggccgagcacacttctggagaacatgctgagagtgagcatgcttcaggtgagcccgctgcgactgaacatgctgaaggtgagcatactgtaggtgagcagccttcaggagaacagccttcaggtgaacacctctccggagaacagcctttgagtgagcttgagtcaggtgaacagccttcagatgaacagccttcaggtgaacatggctccggtgaacagccttctggtgagcaggcctcgggtgaacagccttcaggtgagcacgcttcaggggaacaggcttcaggtgcaccaatttcaagcacatctacaggcacaatattaaattgctacacatgtgcttatatgaatgatcaaggaaaatgtcttcgtggagagggaacctgcatcactcagaattcccagcagtgcatgttaaagaagatctttgaaggtggaaaactccaattcatggttcaagggtgtgagaacatgtgcccatctatgaacctcttctcccatggaacgaggatgcaaattatatgctgtcgaaatcaatctttctgcaataagatctagaagcctgggcccttgcttgttttgactcaggcagtaaaaagcctccatcactctatttggctcattttatatttagttccttccccagtcaacaactgaccacatctgcctctgcctgagcattaggatgctcaaacatcctatctttcttcttctattcatgcttttatccattcttctctgtcctgtcttccctgctccaactctttctctcaatattcctgatttttttttcaataaatttcacatggttaaagcacacaggctcaagacagacctttttttcccccattaatctagttgcagggtcaacatgagcttccttccacaccgacactaaactgggtgcattgtttaagcattccatatttatgaaagtaaaggagtctccaagggcagagacaacaaagaggaatgcaaagtaggtattaatcttttacagggtgtaaacgtgcaggtacttctgacacccccccttttccatccctacacactcttccatttattatggcatacaaaaactcaactcttctttggctcttgagagtttctagtcttcagtagtccactactaacataatgataatagtataatgattccttatttgctatatattgcagcagttcataatgcttaaatcatttttttcacacacaatgttactgaatcatctatacaggataggagggcaaatggaaatactaaacggtccctcatataagtgttatgttcttcaagatgttttcacatacacggtctcatctgatcctcaggaaagatcccagagtggtagacaggaaagatggcatcatccttttttgcaaataaggaaatgtgacacagagatgttttctttattcatactccatgttgttccaaatttaccaaggttacagagctacagagagctataggcagattccacaaccaaatctgcaagatctaaatctgagctgtttccaccacaatgaaagtagccagaatggttctaagaactcttagaacagtacaacaagaagtcaattttactgtatataaaatttaaaatttcaacatatatacacatcatg

SEQ ID NO: 119084 - DNA, 798 bp, Artificial Sequence
  derived and/or modified sequence
atgaacagattcctgctgctgatgagcctgtacctgctgggcagcgccagaggcaccagcagccagcccaacgagctgagcggcagcatcgaccaccagaccagcgtgcagcagctgcccggcgagttcttcagcctggagaaccccagcgacgccgaggccctgtacgagaccagcagcggcctgaacaccctgagcgagcacggcagcagcgagcacggcagcagcaagcacaccgtggccgagcacaccagcggcgagcacgccgagagcgagcacgccagcggcgagcccgccgccaccgagcacgccgagggcgagcacaccgtgggcgagcagcccagcggcgagcagcccagcggcgagcacctgagcggcgagcagcccctgagcgagctggagagcggcgagcagcccagcgacgagcagcccagcggcgagcacggcagcggcgagcagcccagcggcgagcaggccagcggcgagcagcccagcggcgagcacgccagcggcgagcaggccagcggcgcccccatcagcagcaccagcaccggcaccatcctgaactgctacacctgcgcctacatgaacgaccagggcaagtgcctgagaggcgagggcacctgcatcacccagaacagccagcagtgcatgctgaagaagatcttcgagggcggcaagctgcagttcatggtgcagggctgcgagaacatgtgccccagcatgaacctgttcagccacggcaccagaatgcagatcatctgctgcagaaaccagagcttctgcaacaagatctag

SEQ ID NO: 119085 - protein, 375 aa, Artificial Sequence
  derived and/or modified sequence
MEEEIAALVIDNGSGMCKAGFAGDDAPRAVFPSIVGRPRHQGVMVGMGQKDSYVGDEAQSKRGILTLKYPIEHGIVTNWDDMEKIWHHTFYNELRVAPEEHPVLLTEAPLNPKANREKMTQIMFETFNTPAMYVAIQAVLSLYASGRTTGIVMDSGDGVTHTVPIYEGYALPHAILRLDLAGRDLTDYLMKILTERGYSFTTTAEREIVRDIKEKLCYVALDFEQEMATAASSSSLEKSYELPDGQVITIGNERFRCPEALFQPSFLGMESCGIHETTFNSIMKCDVDIRKDLYANTVLSGGTTMYPGIADRMQKEITALAPSTMKIKIIAPPERKYSVWIGGSILASLSTFQQMWISKQEYDESGPSIVHRKCF

SEQ ID NO: 119086 - protein, 294 aa, Artificial Sequence
  derived and/or modified sequence
MEKIWHHTFYNELRVAPEEHPVLLTEAPLNPKANREKMTQIMFETFNTPAMYVAIQAVLSLYASGRTTGIVMDSGDGVTHTVPIYEGYALPHAILRLDLAGRDLTDYLMKILTERGYSFTTTAEREIVRDIKEKLCYVALDFEQEMATAASSSSLEKSYELPDGQVITIGNERFRCPEALFQPSFLGMESCGIHETTFNSIMKCDVDIRKDLYANTVLSGGTTMYPGIADRMQKEITALAPSTMKIKIIAPPERKYSVWIGGSILASLSTFQQMWISKQEYDESGPSIVHRKCF

SEQ ID NO: 119087 - protein, 333 aa, Artificial Sequence
  derived and/or modified sequence
MEEEIAALVIDNGSGMCKAGFAGDDAPRAVFPSIVGRPRHQGVMVGMGQKDSYVGDEAQSKRGILTLKYPIEHGIVTNWDDMEKIWHHTFYNELRVAPEEHPVLLTEAPLNPKANREKMTQIMFETYALPHAILRLDLAGRDLTDYLMKILTERGYSFTTTAEREIVRDIKEKLCYVALDFEQEMATAASSSSLEKSYELPDGQVITIGNERFRCPEALFQPSFLGMESCGIHETTFNSIMKCDVDIRKDLYANTVLSGGTTMYPGIADRMQKEITALAPSTMKIKIIAPPERKYSVWIGGSILASLSTFQQMWISKQEYDESGPSIVHRKCF

SEQ ID NO: 119088 - DNA, 2002 bp, Artificial Sequence
  derived and/or modified sequence
tctcgcactctgttcttccgccgctccgccgtcgcgtttctctgccggtgagcgccccgccccggggcctgagctggacgtcgcaggcctgcgccccccgaccccggctggccccgcttccagctgccgaggcctcgtcgcgccttccccgggaacaaaaggcggggtcgcaatggaagaagagatcgccgcgctggtcattgacaatggctccggcatgtgcaaagctggttttgctggggacgacgctccccgagccgtgtttccttccatcgtcgggcgccccagacaccagggcgtcatggtgggcatgggccagaaggactcctacgtgggcgacgaggcccagagcaagcgtggcatcctgaccctgaagtaccccattgagcatggcatcgtcaccaactgggacgacatggagaagatctggcaccacaccttctacaacgagctgcgcgtggccccggaggagcacccagtgctgctgaccgaggcccccctgaaccccaaggccaacagagagaagatgactcagattatgtttgagaccttcaacaccccggccatgtacgtggccatccaggccgtgctgtccctctacgcctctgggcgcaccactggcattgtcatggactctggagacggggtcacccacacggtgcccatctacgagggctacgccctcccccacgccatcctgcgtctggacctggctggccgggacctgaccgactacctcatgaagatcctcactgagcgaggctacagcttcaccaccacggccgagcgggaaatcgtgcgcgacatcaaggagaagctgtgctacgtcgccctggacttcgagcaggagatggccaccgccgcatcctcctcttctctggagaagagctacgagctgcccgatggccaggtcatcaccattggcaatgagcggttccggtgtccggaggcgctgttccagccttccttcctgggtatggaatcttgcggcatccacgagaccaccttcaactccatcatgaagtgtgacgtggacatccgcaaagacctgtacgccaacacggtgctgtcgggcggcaccaccatgtacccgggcattgccgacaggatgcagaaggagatcaccgccctggcgcccagcaccatgaagatcaagatcatcgcacccccagagcgcaagtactcggtgtggatcggtggctccatcctggcctcactgtccaccttccagcagatgtggattagcaagcaggagtacgacgagtcgggcccctccatcgtccaccgcaaatgcttctaaacggactcagcagatgcgtagcatttgctgcatgggttaattgagaatagaaatttgcccctggcaaatgcacacacctcatgctagcctcacgaaactggaataagccttcgaaaagaaattgtccttgaagcttgtatctgatatcagcactggattgtagaacttgttgctgattttgaccttgtattgaagttaactgttccccttggtatttgtttaataccctgtacatatctttgagttcaacctttagtacgtgtggcttggtcacttcgtggctaaggtaagaacgtgcttgtggaagacaagtctgtggcttggtgagtctgtgtggccagcagcctctgatctgtgcagggtattaacgtgtcagggctgagtgttctgggatttctctagaggctggcaagaaccagttgttttgtcttgcgggtctgtcagggttggaaagtccaagccgtaggacccagtttcctttcttagctgatgtctttggccagaacaccgtgggctgttacttgctttgagttggaagcggtttgcatttacgcctgtaaatgtattcattcttaatttatgtaaggttttttttgtacgcaattctcgattctttgaagagatgacaacaaattttggttttctactgttatgtgagaacattaggccccagcaacacgtcattgtgtaaggaaaaataaa

SEQ ID NO: 119089 - DNA, 1128 bp, Artificial Sequence
  derived and/or modified sequence
atggaggaggagatcgccgccctggtgatcgacaacggcagcggcatgtgcaaggccggcttcgccggcgacgacgcccccagagccgtgttccccagcatcgtgggcagacccagacaccagggcgtgatggtgggcatgggccagaaggacagctacgtgggcgacgaggcccagagcaagagaggcatcctgaccctgaagtaccccatcgagcacggcatcgtgaccaactgggacgacatggagaagatctggcaccacaccttctacaacgagctgagagtggcccccgaggagcaccccgtgctgctgaccgaggcccccctgaaccccaaggccaacagagagaagatgacccagatcatgttcgagaccttcaacacccccgccatgtacgtggccatccaggccgtgctgagcctgtacgccagcggcagaaccaccggcatcgtgatggacagcggcgacggcgtgacccacaccgtgcccatctacgagggctacgccctgccccacgccatcctgagactggacctggccggcagagacctgaccgactacctgatgaagatcctgaccgagagaggctacagcttcaccaccaccgccgagagagagatcgtgagagacatcaaggagaagctgtgctacgtggccctggacttcgagcaggagatggccaccgccgccagcagcagcagcctggagaagagctacgagctgcccgacggccaggtgatcaccatcggcaacgagagattcagatgccccgaggccctgttccagcccagcttcctgggcatggagagctgcggcatccacgagaccaccttcaacagcatcatgaagtgcgacgtggacatcagaaaggacctgtacgccaacaccgtgctgagcggcggcaccaccatgtaccccggcatcgccgacagaatgcagaaggagatcaccgccctggcccccagcaccatgaagatcaagatcatcgccccccccgagagaaagtacagcgtgtggatcggcggcagcatcctggccagcctgagcaccttccagcagatgtggatcagcaagcaggagtacgacgagagcggccccagcatcgtgcacagaaagtgcttctag

SEQ ID NO: 119090 - DNA, 885 bp, Artificial Sequence
  derived and/or modified sequence
atggagaagatctggcaccacaccttctacaacgagctgagagtggcccccgaggagcaccccgtgctgctgaccgaggcccccctgaaccccaaggccaacagagagaagatgacccagatcatgttcgagaccttcaacacccccgccatgtacgtggccatccaggccgtgctgagcctgtacgccagcggcagaaccaccggcatcgtgatggacagcggcgacggcgtgacccacaccgtgcccatctacgagggctacgccctgccccacgccatcctgagactggacctggccggcagagacctgaccgactacctgatgaagatcctgaccgagagaggctacagcttcaccaccaccgccgagagagagatcgtgagagacatcaaggagaagctgtgctacgtggccctggacttcgagcaggagatggccaccgccgccagcagcagcagcctggagaagagctacgagctgcccgacggccaggtgatcaccatcggcaacgagagattcagatgccccgaggccctgttccagcccagcttcctgggcatggagagctgcggcatccacgagaccaccttcaacagcatcatgaagtgcgacgtggacatcagaaaggacctgtacgccaacaccgtgctgagcggcggcaccaccatgtaccccggcatcgccgacagaatgcagaaggagatcaccgccctggcccccagcaccatgaagatcaagatcatcgccccccccgagagaaagtacagcgtgtggatcggcggcagcatcctggccagcctgagcaccttccagcagatgtggatcagcaagcaggagtacgacgagagcggccccagcatcgtgcacagaaagtgcttctag

SEQ ID NO: 119091 - DNA, 1002 bp, Artificial Sequence
  derived and/or modified sequence
atggaggaggagatcgccgccctggtgatcgacaacggcagcggcatgtgcaaggccggcttcgccggcgacgacgcccccagagccgtgttccccagcatcgtgggcagacccagacaccagggcgtgatggtgggcatgggccagaaggacagctacgtgggcgacgaggcccagagcaagagaggcatcctgaccctgaagtaccccatcgagcacggcatcgtgaccaactgggacgacatggagaagatctggcaccacaccttctacaacgagctgagagtggcccccgaggagcaccccgtgctgctgaccgaggcccccctgaaccccaaggccaacagagagaagatgacccagatcatgttcgagacctacgccctgccccacgccatcctgagactggacctggccggcagagacctgaccgactacctgatgaagatcctgaccgagagaggctacagcttcaccaccaccgccgagagagagatcgtgagagacatcaaggagaagctgtgctacgtggccctggacttcgagcaggagatggccaccgccgccagcagcagcagcctggagaagagctacgagctgcccgacggccaggtgatcaccatcggcaacgagagattcagatgccccgaggccctgttccagcccagcttcctgggcatggagagctgcggcatccacgagaccaccttcaacagcatcatgaagtgcgacgtggacatcagaaaggacctgtacgccaacaccgtgctgagcggcggcaccaccatgtaccccggcatcgccgacagaatgcagaaggagatcaccgccctggcccccagcaccatgaagatcaagatcatcgccccccccgagagaaagtacagcgtgtggatcggcggcagcatcctggccagcctgagcaccttccagcagatgtggatcagcaagcaggagtacgacgagagcggccccagcatcgtgcacagaaagtgcttctag

SEQ ID NO: 119092 - DNA, 1087 bp, Artificial Sequence
  derived and/or modified sequence
accgccgagaccgcgtccgccccgcgagcacagagcctcgcctttgccgatccgccgcccgtccacacccgccgccagcatcgtcaccaactgggacgacatggagaaaatctggcaccacaccttctacaatgagctgcgtgtggctcccgaggagcaccccgtgctgctgaccgaggcccccctgaaccccaaggccaaccgcgagaagatgacccagatcatgtttgagaccttcaacaccccagccatgtacgttgctatccaggctgtgctatccctgtacgcctctggccgtaccactggcatcgtgatggactccggtgacggggtcacccacactgtgcccatctacgaggggtatgccctcccccatgccatcctgcgtctggacctggctggccgggacctgactgactacctcatgaagatcctcaccgagcgcggctacagcttcaccaccacggccgagcgggaaatcgtgcgtgacattaaggagaagctgtgctacgtcgccctggacttcgagcaagagatggccacggctgcttccagctcctccctggagaagagctacgagctgcctgacggccaggtcatcaccattggcaatgagcggttccgctgccctgaggcactcttccagccttccttcctgggcatggagtcctgtggcatccacgaaactaccttcaactccatcatgaagtgtgacgtggacatccgcaaagacctgtacgccaacacagtgctgtctggcggcaccaccatgtaccctggcattgccgacaggatgcagaaggagatcactgccctggcacccagcacaatgaagatcaagatcattgctcctcctgagcgcaagtactccgtgtggatcggcggctccatcctggcctcgctgtccaccttccagcagatgtggatcagcaagcaggagtatgacgagtccggcccctccatcgtccaccgcaaatgcttctaggcggactatgacttagttgcgttacaccctttcttgacaaaacctaacttgcgcagaaaacaagatgagattggcatggctttatttgttttttttgttttg

SEQ ID NO: 119093 - DNA, 1919 bp, Artificial Sequence
  derived and/or modified sequence
gtctcagtcgccgctgccagctctcgcactctgttcttccgccgctccgccgtcgcgtttctctgccggtcgcaatggaagaagagatcgccgcgctggtcattgacaatggctccggcatgtgcaaagctggttttgctggggacgacgctccccgagccgtgtttccttccatcgtcgggcgccccagacaccagggcgtcatggtgggcatgggccagaaggactcctacgtgggcgacgaggcccagagcaagcgtggcatcctgaccctgaagtaccccattgagcatggcatcgtcaccaactgggacgacatggagaagatctggcaccacaccttctacaacgagctgcgcgtggccccggaggagcacccagtgctgctgaccgaggcccccctgaaccccaaggccaacagagagaagatgactcagattatgtttgagaccttcaacaccccggccatgtacgtggccatccaggccgtgctgtccctctacgcctctgggcgcaccactggcattgtcatggactctggagacggggtcacccacacggtgcccatctacgagggctacgccctcccccacgccatcctgcgtctggacctggctggccgggacctgaccgactacctcatgaagatcctcactgagcgaggctacagcttcaccaccacggccgagcgggaaatcgtgcgcgacatcaaggagaagctgtgctacgtcgccctggacttcgagcaggagatggccaccgccgcatcctcctcttctctggagaagagctacgagctgcccgatggccaggtcatcaccattggcaatgagcggttccggtgtccggaggcgctgttccagccttccttcctgggtatggaatcttgcggcatccacgagaccaccttcaactccatcatgaagtgtgacgtggacatccgcaaagacctgtacgccaacacggtgctgtcgggcggcaccaccatgtacccgggcattgccgacaggatgcagaaggagatcaccgccctggcgcccagcaccatgaagatcaagatcatcgcacccccagagcgcaagtactcggtgtggatcggtggctccatcctggcctcactgtccaccttccagcagatgtggattagcaagcaggagtacgacgagtcgggcccctccatcgtccaccgcaaatgcttctaaacggactcagcagatgcgtagcatttgctgcatgggttaattgagaatagaaatttgcccctggcaaatgcacacacctcatgctagcctcacgaaactggaataagccttcgaaaagaaattgtccttgaagcttgtatctgatatcagcactggattgtagaacttgttgctgattttgaccttgtattgaagttaactgttccccttggtatttgtttaataccctgtacatatctttgagttcaacctttagtacgtgtggcttggtcacttcgtggctaaggtaagaacgtgcttgtggaagacaagtctgtggcttggtgagtctgtgtggccagcagcctctgatctgtgcagggtattaacgtgtcagggctgagtgttctgggatttctctagaggctggcaagaaccagttgttttgtcttgcgggtctgtcagggttggaaagtccaagccgtaggacccagtttcctttcttagctgatgtctttggccagaacaccgtgggctgttacttgctttgagttggaagcggtttgcatttacgcctgtaaatgtattcattcttaatttatgtaaggttttttttgtacgcaattctcgattctttgaagagatgacaacaaattttggttttctactgttatgtgagaacattaggccccagcaacacgtcattgtgtaaggaaaaataaaagtgctgccgtaacc

SEQ ID NO: 119094 - DNA, 1793 bp, Artificial Sequence
  derived and/or modified sequence
gtctcagtcgccgctgccagctctcgcactctgttcttccgccgctccgccgtcgcgtttctctgccggtcgcaatggaagaagagatcgccgcgctggtcattgacaatggctccggcatgtgcaaagctggttttgctggggacgacgctccccgagccgtgtttccttccatcgtcgggcgccccagacaccagggcgtcatggtgggcatgggccagaaggactcctacgtgggcgacgaggcccagagcaagcgtggcatcctgaccctgaagtaccccattgagcatggcatcgtcaccaactgggacgacatggagaagatctggcaccacaccttctacaacgagctgcgcgtggccccggaggagcacccagtgctgctgaccgaggcccccctgaaccccaaggccaacagagagaagatgactcagattatgtttgagacctacgccctcccccacgccatcctgcgtctggacctggctggccgggacctgaccgactacctcatgaagatcctcactgagcgaggctacagcttcaccaccacggccgagcgggaaatcgtgcgcgacatcaaggagaagctgtgctacgtcgccctggacttcgagcaggagatggccaccgccgcatcctcctcttctctggagaagagctacgagctgcccgatggccaggtcatcaccattggcaatgagcggttccggtgtccggaggcgctgttccagccttccttcctgggtatggaatcttgcggcatccacgagaccaccttcaactccatcatgaagtgtgacgtggacatccgcaaagacctgtacgccaacacggtgctgtcgggcggcaccaccatgtacccgggcattgccgacaggatgcagaaggagatcaccgccctggcgcccagcaccatgaagatcaagatcatcgcacccccagagcgcaagtactcggtgtggatcggtggctccatcctggcctcactgtccaccttccagcagatgtggattagcaagcaggagtacgacgagtcgggcccctccatcgtccaccgcaaatgcttctaaacggactcagcagatgcgtagcatttgctgcatgggttaattgagaatagaaatttgcccctggcaaatgcacacacctcatgctagcctcacgaaactggaataagccttcgaaaagaaattgtccttgaagcttgtatctgatatcagcactggattgtagaacttgttgctgattttgaccttgtattgaagttaactgttccccttggtatttgtttaataccctgtacatatctttgagttcaacctttagtacgtgtggcttggtcacttcgtggctaaggtaagaacgtgcttgtggaagacaagtctgtggcttggtgagtctgtgtggccagcagcctctgatctgtgcagggtattaacgtgtcagggctgagtgttctgggatttctctagaggctggcaagaaccagttgttttgtcttgcgggtctgtcagggttggaaagtccaagccgtaggacccagtttcctttcttagctgatgtctttggccagaacaccgtgggctgttacttgctttgagttggaagcggtttgcatttacgcctgtaaatgtattcattcttaatttatgtaaggttttttttgtacgcaattctcgattctttgaagagatgacaacaaattttggttttctactgttatgtgagaacattaggccccagcaacacgtcattgtgtaaggaaaaataaaagtgctgccgtaacc

SEQ ID NO: 119095 - DNA, 1128 bp, Artificial Sequence
  derived and/or modified sequence
atggaggaagaaattgccgctttggttatcgacaatggctctgggatgtgcaaggccggattcgccggagacgacgctcctcgtgccgtgttcccctcaatcgttggcagaccccggcaccagggggtaatggtcggaatgggccagaaggatagctacgtgggcgacgaggcacagtcaaagaggggcatattgaccctgaagtacccaattgagcacgggattgtgactaattgggacgacatggagaagatctggcatcacacattttacaacgagttgcgggtagccccagaagagcaccctgtgctgctcacagaagctcctttgaatcctaaggcaaacagagagaagatgacccagataatgtttgagacatttaatactccggcgatgtatgtggcaattcaggctgtgctgagcctttatgcaagcgggcggactaccggcatagtcatggactcaggtgatggtgtgactcacactgttccaatttacgaagggtacgcgctcccccacgcaatcctgaggctcgacctggcaggtagagacctgactgactatttgatgaaaatccttacggagagagggtactcgttcaccactaccgccgagagggaaatcgtgcgtgatattaaagagaagctatgctacgtggccctcgattttgaacaggagatggctacagcagcctcttctagctcacttgaaaagagttacgagctgcctgatgggcaagttatcaccattggcaacgaaaggtttagatgtcccgaggccctgttccagccttccttcctgggtatggaatcctgtgggattcacgagacaaccttcaattccattatgaagtgcgacgtggatataaggaaggatctgtatgcgaatacagttctgagcgggggaaccactatgtaccccgggatcgccgatcgaatgcagaaggaaattaccgccttggccccttccacaatgaaaattaagattatcgcccccccggagaggaaatattccgtttggattggcggctcaatcttggcttccttgtccaccttccaacagatgtggatcagcaagcaggagtatgacgagtccggtccaagcatcgttcatcgaaagtgcttctag

SEQ ID NO: 119096 - DNA, 885 bp, Artificial Sequence
  derived and/or modified sequence
atggaaaaaatctggcatcatacattctacaatgagcttcgggtggcccccgaggaacacccagtcttgctcacagaagccccactgaatcctaaggctaaccgcgaaaagatgactcagattatgtttgaaaccttcaatacccccgctatgtatgtagccatccaggctgtactctctttgtatgcgagcggaaggaccactggaattgttatggacagtggtgatggagtgactcataccgtccccatatatgagggttacgctctgccgcatgccatcctgcgtcttgatctggcgggtcgagacttaacagactacctgatgaaaatattaacggagaggggctattctttcacgaccacagcagagcgcgaaattgtgagggacataaaagagaaactgtgctacgtagcactggatttcgaacaggagatggccacagcggcctcctcaagttcactcgaaaaatcctatgaattgccggatggacaggtgattacaatcggaaacgagcgctttcggtgtccagaggccctattccagccttcgttccttggaatggagagttgtggaattcatgaaaccacctttaactctatcatgaaatgcgatgtggatattaggaaagatctgtatgccaacaccgttctgagtggcggtactacgatgtaccccggcatcgctgacaggatgcagaaggagattacagctctggccccgtctaccatgaagatcaaaatcatagcacccccagagaggaaatactcagtgtggataggtggatccatcttggcgtccctgtcaacctttcagcagatgtggatcagcaagcaggaatatgacgagtccggcccctctatcgtgcatcggaagtgtttctag

SEQ ID NO: 119097 - DNA, 1128 bp, Artificial Sequence
  derived and/or modified sequence
atggaagaagagattgccgccctggtgatcgacaatgggtctggaatgtgtaaagcgggttttgccggcgacgatgccccgagagcagtctttccatcaatcgtaggccggccaagacaccagggcgtaatggtcggcatgggacaaaaggacagttatgtcggagatgaggcccagtccaagcgaggcattctcactctgaagtatcctatcgagcatggaattgtgacaaactgggacgacatggaaaagatatggcaccacaccttctacaacgaactgcgggtggctccggaagaacacccagtgcttcttacagaggcaccattgaacccaaaagctaatcgagagaagatgacgcaaattatgtttgaaacatttaacacccctgcaatgtacgtggctatccaggcggttctgtcactgtatgcatccggccgaactacagggatcgtcatggattctggggacggcgttacacataccgtgcccatttacgaaggatatgcactcccccacgcaattcttcggctggatttggctggccgcgacctgacagattatctaatgaagatactgacagagcggggttatagcttcactactactgcagaaagggaaattgtccgggacattaaggagaaactgtgttacgttgcactggatttcgaacaggagatggccaccgctgcaagctcatcaagcttagagaagagttatgaactgcctgacggacaagttatcactatcgggaacgaaaggttccgatgtcctgaagccctctttcagccttcttttctgggaatggagagctgtggcatccacgaaaccacattcaattcaattatgaagtgtgacgtagatatacggaaggacctatacgccaacacagttttgagtggcggaaccactatgtacccaggaatagcagacagaatgcagaaggaaataaccgccctggccccatctactatgaaaattaagattattgctccacctgagcgcaagtacagcgtgtggatcggcggctctattttggccagcctctctactttccagcagatgtggatctccaagcaggaatacgatgagagtgggccaagcattgtccacaggaaatgtttctag

SEQ ID NO: 119098 - DNA, 1002 bp, Artificial Sequence
  derived and/or modified sequence
atggaagaggaaatcgcggctctggtcatcgacaacggcagcggaatgtgtaaggccggcttcgccggggatgatgccccccgggcagtttttccttcgattgtgggtcggccccggcaccagggggtcatggtgggcatgggccagaaggattcatatgtcggagacgaggcccagagtaagcggggaatactgacactcaagtatcctatagaacatggcatcgtcactaattgggacgatatggaaaaaatctggcaccacaccttctacaacgaactgcgcgttgccccggaagaacaccccgtcctcttgacagaggcccctttgaaccccaaagcgaacagggaaaaaatgactcagatcatgttcgagacatatgcgcttccacatgctattctgcggttggacctggccgggagagacttgaccgattatctgatgaagatcctcaccgagcgcgggtatagcttcacaaccacagccgaacgagagatcgtgagagacattaaagaaaaactgtgctacgtcgctctcgatttcgaacaggaaatggcaaccgctgcctcttcctcctctctggagaaatcctacgaactacctgacggacaggttattaccatagggaatgaacgtttcagatgcccggaggcgctgtttcagcccagttttttgggaatggagtcctgtgggattcatgaaactacattcaattctattatgaaatgcgatgtggacatccgtaaggacctgtatgccaacacagtgctgtctggaggcaccactatgtacccaggaatagctgacaggatgcagaaggagattacggccctcgccccgagtacaatgaagatcaagatcattgctcctccagaaaggaagtattcagtatggatcggggggtcgattcttgcctctttatcaacattccaacagatgtggattagtaaacaagaatatgacgagtctgggccaagtattgtacaccgcaagtgcttttag

SEQ ID NO: 119099 - DNA, 1128 bp, Artificial Sequence
  derived and/or modified sequence
atggaggaggagattgctgccctggtgattgacaatggcagcggcatgtgcaaggccggctttgctggagatgatgcccccagggctgtgttccccagcatcgtgggccggcccaggcaccagggcgtgatggtgggcatgggccagaaggacagctatgtgggagatgaggcccagagcaagaggggcatcctgaccctgaagtaccccattgaacatggaattgtgaccaactgggatgacatggagaagatctggcaccacaccttctacaatgagctgcgggtggcccctgaggagcaccctgtgctgctgacagaggcccccctgaaccccaaggccaaccgggagaagatgacccagatcatgtttgagaccttcaacaccccagccatgtatgtggccatccaggccgtgctgagcctgtatgccagcggccgcaccactggaattgtgatggattctggagatggagtgacccacacagtgcccatctatgagggctacgccctgccccacgccatcctgcggctggacctggccggccgggacctgacagactacctgatgaagatcctgacagagcggggctacagcttcaccaccacagctgagcgggagatcgtgcgggacatcaaggagaagctgtgctacgtggccctggactttgagcaggagatggccacagctgccagcagcagcagcctggagaagagctatgagctgcctgatggccaggtgatcaccatcggaaatgaacgcttccgctgcccagaggccctcttccagcccagcttcctgggcatggagagctgtggcatccacgagaccaccttcaacagcatcatgaagtgtgatgtggacatcaggaaggacctgtatgccaacacagtgctgagcggcggcaccaccatgtacccaggcattgctgacaggatgcagaaggagatcacagccctggcccccagcaccatgaagatcaagatcatcgcccctcctgagaggaagtacagcgtgtggattggaggcagcatcctggccagcctgagcaccttccagcagatgtggatcagcaagcaggagtatgatgaaagtggccccagcatcgtgcacaggaagtgcttctag

SEQ ID NO: 119100 - DNA, 885 bp, Artificial Sequence
  derived and/or modified sequence
atggagaagatctggcaccacaccttctacaatgagctgcgggtggcccctgaggagcaccctgtgctgctgacagaggcccccctgaaccccaaggccaaccgggagaagatgacccagatcatgtttgagaccttcaacaccccagccatgtatgtggccatccaggccgtgctgagcctgtatgccagcggccgcaccaccggcatcgtgatggacagcggagatggagtgacccacacagtgcccatctatgagggctacgccctgccccacgccatcctgcggctggacctggccggccgggacctgacagactacctgatgaagatcctgacagagcggggctacagcttcaccaccacagctgagcgggagatcgtgcgggacatcaaggagaagctgtgctacgtggccctggactttgagcaggagatggccacagctgccagcagcagcagcctggagaagagctatgagctgcctgatggccaggtgatcaccatcggaaatgaacgcttccgctgcccagaggccctcttccagcccagcttcctgggcatggagagctgtggcatccacgagaccaccttcaacagcatcatgaagtgtgatgtggacatcaggaaggacctgtatgccaacacagtgctgagcggcggcaccaccatgtacccaggcattgctgacaggatgcagaaggagatcacagccctggcccccagcaccatgaagatcaagatcatcgcccctcctgagaggaagtacagcgtgtggattggaggcagcatcctggccagcctgagcaccttccagcagatgtggatcagcaagcaggagtatgatgagagcggccccagcatcgtgcacaggaagtgcttctag

SEQ ID NO: 119101 - DNA, 1002 bp, Artificial Sequence
  derived and/or modified sequence
atggaggaggagattgctgccctggtgattgacaatggcagcggcatgtgcaaggccggctttgctggagatgatgcccccagggctgtgttccccagcatcgtgggccggcccaggcaccagggcgtgatggtgggcatgggccagaaggacagctatgtgggagatgaggcccagagcaagaggggcatcctgaccctgaagtaccccattgaacatggaattgtgaccaactgggatgacatggagaagatctggcaccacaccttctacaatgagctgcgggtggcccctgaggagcaccctgtgctgctgacagaggcccccctgaaccccaaggccaaccgggagaagatgacccagatcatgtttgagacctacgccctgccccacgccatcctgcggctggacctggccggccgggacctgacagactacctgatgaagatcctgacagagcggggctacagcttcaccaccacagctgagcgggagatcgtgcgggacatcaaggagaagctgtgctacgtggccctggactttgagcaggagatggccacagctgccagcagcagcagcctggagaagagctatgagctgcctgatggccaggtgatcaccatcggaaatgaacgcttccgctgcccagaggccctcttccagcccagcttcctgggcatggagagctgtggcatccacgagaccaccttcaacagcatcatgaagtgtgatgtggacatcaggaaggacctgtatgccaacacagtgctgagcggcggcaccaccatgtacccaggcattgctgacaggatgcagaaggagatcacagccctggcccccagcaccatgaagatcaagatcatcgcccctcctgagaggaagtacagcgtgtggattggaggcagcatcctggccagcctgagcaccttccagcagatgtggatcagcaagcaggagtatgatgaaagtggccccagcatcgtgcacaggaagtgcttctag

SEQ ID NO: 119102 - DNA, 1128 bp, Artificial Sequence
  derived and/or modified sequence
atggaggaggagatcgccgccctggtgatcgacaacggcagcggcatgtgtaaggcgggttttgctggagacgatgctccacgagcagtcttccctagcatcgtcggtagacctcgccaccagggcgtgatggtgggcatgggccagaaggattcatacgtaggagatgaagctcagagcaagcggggcatactgacacttaaatatcccattgaacacggcattgtcaccaactgggacgatatggagaaaatctggcatcacacattttataatgaactccgggttgcccctgaggagcatcccgtcctgctgactgaggcgcccctcaacccgaaggcgaatagagagaagatgacacaaattatgtttgagacattcaatacccccgcaatgtatgtggcgatccaggccgttctatctctttatgcaagcgggcgcactaccggcatagttatggatagcggggatggagtcactcacacagtacccatatacgagggttacgctctgccacatgctatcctacgcctggaccttgcaggtagggatctgacagattaccttatgaagattctgacagaacggggatatagcttcacaaccactgccgaaagagagatcgtgcgcgacattaaggaaaagctatgctatgtggctctggattttgagcaggaaatggctaccgccgcgagttcatctagcttggagaaatcctatgagctgccggacgggcaggtgataacaattggaaacgagcgattccggtgccccgaggctcttttccagcctagcttcctgggtatggaatcttgtggaatccacgaaacaactttcaattcaatcatgaaatgtgatgtggacattaggaaggatttatatgcaaatactgtgctgtccggggggacaacaatgtaccccggcattgctgatcgcatgcagaaagagatcacggctttggctccctccacaatgaagatcaaaataattgctccacccgagcgcaaatatagtgtgtggatagggggcagtatcctggccagcttatccacttttcagcagatgtggatctcaaaacaggaatatgatgagagtggcccaagcatcgtgcatcgtaagtgcttctag

SEQ ID NO: 119103 - DNA, 885 bp, Artificial Sequence
  derived and/or modified sequence
atggagaagatctggcaccacaccttctacaacgagctgcgggtggcccccgaggaacaccccgtcttgcttacagaggcccctctcaatccaaaggccaatcgcgagaaaatgacgcagatcatgttcgagacttttaacactcctgctatgtatgttgcaatccaggcggtcctgtccctgtatgctagcggccgaacaaccggcatcgtcatggatagtggagacggcgtgacacacacagtgcccatttatgagggctatgccctcccgcacgccatcctccgtttggatctcgctggtagggatctgaccgactatcttatgaagattctgaccgaacgtggatatagttttacgactaccgctgagcgtgagattgtgcgggacatcaaggagaagctttgttatgtggcactcgacttcgagcaggaaatggctacggctgctagctcaagctctctcgagaagagctatgaattgcccgatggacaggtgattaccataggcaatgagaggtttaggtgccccgaggccctgttccagccttcgttccttgggatggagtcctgcggaatccacgaaaccacgtttaattccatcatgaagtgcgacgtcgacattaggaaggacctctacgccaacaccgtcctgagcgggggcactacaatgtaccctgggatagctgataggatgcagaaggagattacggcactggctccgtccactatgaagatcaaaattatagctcctccagaaaggaaatactctgtctggatcggcggttccattctagcttccctcagtaccttccaacaaatgtggatctccaaacaggagtatgacgagtctgggccatcgattgtccaccgcaaatgcttttag

SEQ ID NO: 119104 - DNA, 1128 bp, Artificial Sequence
  derived and/or modified sequence
atggaggaggagatcgccgccctggtgatcgacaacggcagcggcatgtgcaaagccgggttcgcaggagacgacgctccacgggccgtattcccaagcattgtcggcaggcctcgacatcagggcgtgatggttggaatgggacagaaagattcctacgttggagatgaggcgcagagcaaaagaggtattcttactttaaagtatcccatcgaacacggcatcgtgactaactgggacgatatggaaaagatatggcaccacactttttacaatgagttgagggttgccccagaggaacaccccgtgctgctgacagaggcccccctaaaccctaaggccaatagagagaagatgacgcagatcatgtttgagacattcaacactccagccatgtacgtggctatacaggcagtgctgagcttgtacgctagtgggaggactacaggaatcgttatggatagcggggatggcgtcacacacaccgtgcctatctacgaaggctacgcactgccccatgccatcctgagacttgatttagctgggcgtgatcttacagattatcttatgaaaattttgacagaaaggggatacagtttcacaactaccgcagaacgcgaaatcgtgcgggacataaaggaaaagctttgttatgtcgcattagactttgagcaggaaatggcgactgccgccagcagtagctctctggaaaaatcgtacgaactacctgacggccaagttataactattgggaacgagagatttcgctgtccggaggctctctttcagccatcatttttggggatggagtcttgtggaatccacgagaccactttcaatagtattatgaagtgtgacgtagacatccgaaaagatctgtacgctaatacagtcttgtcagggggaaccacgatgtaccccggaatagccgatagaatgcaaaaggagatcacagccctcgcaccaagtacaatgaaaatcaagattattgcacccccagaacggaagtacagtgtgtggatcggaggttccattcttgctagcctctctacgtttcagcagatgtggattagtaaacaggagtacgacgaatctggtccaagtatcgtgcacaggaagtgtttctag

SEQ ID NO: 119105 - DNA, 1002 bp, Artificial Sequence
  derived and/or modified sequence
atggaggaggagatcgccgccctggtgatcgacaacggcagcggcatgtgtaaggcaggtttcgcaggagatgatgcaccgcgcgcagtgttcccttcaatcgttggccgcccacgtcatcagggtgtgatggtagggatgggacagaaagattcctacgtaggggacgaagctcagagcaagcgtggcatcctgactttaaagtatccaatcgaacacgggattgtaactaactgggatgatatggagaagatctggcatcacaccttttataacgaactgagggtggcccctgaagaacacccggttctcctgaccgaagctcctctgaatcccaaagctaaccgcgaaaagatgacgcaaatcatgttcgagacttatgcactcccacacgcgatcttgagactagatctggctggtcgtgatcttactgactatctcatgaagatcctgacagaaagaggttattccttcacaaccaccgccgagcgggagatcgtgagggacattaaggagaaactatgctacgtggctctcgactttgaacaggagatggccactgcagcaagctcctcaagcctggagaagagctacgaattgcctgacggacaggttattacgatcggtaacgaaaggttccgctgtcccgaggctctgttccagccttcctttctcggtatggaaagttgcgggatacatgagactactttcaattcaatcatgaagtgtgacgtggacatccgcaaggatctgtacgcaaacacggtactcagcggtggaaccactatgtatccagggattgccgatcggatgcagaaagaaattacggcgctggccccatcgactatgaagattaaaataattgcaccaccagaacgtaaatacagtgtttggattggagggtccatactcgcatccttaagtactttccagcagatgtggatctccaaacaggaatatgatgagtctggaccttctatcgtccataggaagtgtttttag

SEQ ID NO: 119106 - DNA, 1128 bp, Artificial Sequence
  derived and/or modified sequence
atggaagaagaaatcgcagcacttgtgattgataacggatccggtatgtgcaaagccggtttcgccggagacgatgcaccccgagccgtatttcccagcattgtgggacgaccaaggcatcagggagtgatggtgggaatggggcagaaggattcctatgtgggggacgaggcccaatcaaaaagaggtattctgaccctgaaataccctatcgagcatggaattgtgacaaactgggatgacatggaaaagatctggcaccatacgttctataatgaactgcgagtggcccctgaggagcatcccgtgctcctgactgaagccccactgaaccctaaggctaaccgtgaaaagatgactcaaattatgttcgaaacctttaataccccggcaatgtatgtggccattcaggctgtcctcagtctctatgcaagtgggagaacaacaggcattgtgatggacagtggggacggcgtgacacatacggtgcctatctacgagggctacgccttgcctcacgccatccttcggctggacctcgcaggcagggacttaacagattacctgatgaaaatcctgaccgagcgaggatactccttcactacaaccgctgagcgggagatagtgagagacattaaggagaagctttgctacgtggccctcgactttgaacaagagatggctaccgctgcgagcagttcaagtcttgagaagtcctacgagttgcccgatggtcaagtgatcacgataggcaacgagaggtttagatgcccagaggccctgttccagccttccttcctcggaatggagtcctgcggtatccacgagacaacgtttaacagcatcatgaaatgcgacgtggacatcaggaaggatctgtacgcaaacaccgtgttatctgggggaaccacaatgtaccccggaatcgccgacagaatgcaaaaagagattacagcactggctcccagtaccatgaagataaagataatcgcacctccggagcggaagtacagtgtatggattggaggctccatcctcgcttccctctcaacttttcaacagatgtggattagcaagcaggaatacgatgagtctggtccatcgatcgtgcacagaaagtgcttttag

SEQ ID NO: 119107 - DNA, 885 bp, Artificial Sequence
  derived and/or modified sequence
atggagaaaatttggcaccacacgttctataacgaattgcgggtcgcacctgaggagcaccccgtactgctgaccgaagccccacttaaccctaaggccaacagggagaaaatgactcagatcatgttcgagaccttcaacacgcctgcgatgtacgtcgctatccaggctgttctgtctctgtacgccagcgggagaactacaggcattgtgatggactctggcgacggggttacccacacagtgccgatctatgaaggctatgcactgccacatgcaattttacggctggatttggcaggacgcgatctgactgattacctgatgaagatcttaactgagcgcggatactccttcaccaccacggctgagagggagatagttcgagacattaaggaaaagctgtgttacgttgcactggacttcgagcaggaaatggctactgccgcaagtagcagcagcctggaaaaatcttatgagctccccgacggccaggtcatcaccatcggaaacgaacggttccgatgcccggaagccctctttcaaccgagtttcctgggaatggaatcctgcggaatccatgaaaccacctttaatagtataatgaagtgcgatgttgatattcgcaaggatctgtatgcgaatacggtcttaagtgggggaactacaatgtaccctggtattgccgatcggatgcagaaagagattacagcattggccccttcaaccatgaagatcaaaatcattgcacccccagaaagaaaatactctgtgtggatcgggggatccatacttgcatctcttagcaccttccagcaaatgtggatatctaaacaagaatatgatgaatccggaccctcaatagtgcacagaaagtgtttctag

SEQ ID NO: 119108 - DNA, 1128 bp, Artificial Sequence
  derived and/or modified sequence
atggaggaggagattgcagcactcgtcatagacaatggatccggcatgtgtaaggccggattcgccggagacgacgcaccaagggctgtttttccaagcattgtgggcagaccacggcaccagggtgtcatggtgggcatgggccagaaagactcctatgtgggcgacgaagctcagtccaagcgcggtatcctgaccctgaaataccccatcgaacacggtattgtcaccaattgggatgacatggagaaaatttggcaccataccttctacaatgagctaagagtggcccctgaagagcaccccgtgctgctgaccgaagcgccattgaatcctaaggccaatcgggaaaaaatgacacagattatgttcgagacgtttaacactcccgcaatgtacgttgctatccaagccgtgctctccctctacgcctctggacgtacaacaggcattgtaatggactcaggagatggtgtcacccatacggtaccaatctatgaaggctatgctctaccacatgccattctcaggttggacttggccggtagggatctgactgactatctcatgaaaattctgaccgagcgcggttacagctttacaactaccgccgagagggagatcgtgcgcgacataaaggaaaaactatgctacgtggccctcgatttcgagcaggaaatggctacagccgctagcagcagctcactggagaagtcctatgagcttccagacgggcaggtgattaccatagggaatgagcgcttccgatgcccagaggctttgttccagccttctttcctggggatggagtcttgtggaattcacgagacaaccttcaattctatcatgaaatgtgacgtggatattcggaaagacctttacgctaacaccgtgctgagcggtggaactaccatgtatcctgggatagccgatcgtatgcagaaagaaataacggctctggcaccgagcacaatgaagatcaaaatcatcgccccacctgagaggaaatacagcgtgtggattggcggatctatattggccagcctgtccacatttcagcagatgtggatcagtaaacaagaatatgacgagtcagggccatcaatcgtacacaggaagtgtttttag

SEQ ID NO: 119109 - DNA, 1002 bp, Artificial Sequence
  derived and/or modified sequence
atggaggaggagatagccgctttggtcatcgataacggcagtgggatgtgcaaggcaggattcgccggagacgatgcgccaagggctgtctttccatcaatagtaggtcgcccacgacatcagggcgtgatggtcggcatgggccagaaggattcgtacgtgggcgacgaggcccagtcgaagagagggattctaacactgaagtaccccatagagcacggtatcgttaccaattgggacgacatggagaaaatctggcatcacaccttctacaatgaactaagagtagccccagaggagcacccagtactcctgacagaggctcctttgaatcctaaagccaatcgcgaaaagatgacccagattatgttcgagacttacgccctcccccacgctattctgagactggacctggccggtcgcgatctgaccgattatttaatgaaaatcttgacagaaagaggttattctttcaccactaccgcagagcgagaaatcgtgagagatattaaggagaaattgtgctacgtggcgctcgactttgaacaggagatggccaccgctgcgtcctcgagttcgctagagaagtcgtacgaactgcccgacggtcaagttataactatcggcaacgagcgcttcaggtgcccagaggcactgttccaaccttcctttctgggcatggagtcctgcggcattcacgaaaccacctttaattcaataatgaagtgtgatgttgatatcagaaaagacctatacgccaatactgttttatcaggcggaactacaatgtaccctgggatagcagaccgcatgcagaaggagatcacagcactggctccctctacgatgaagatcaagattattgccccaccagagaggaagtacagcgtgtggataggaggatccatactcgcatccctgtcgacatttcagcagatgtggatatctaagcaggagtatgacgagagtggcccttccatcgttcaccgcaaatgcttctag

SEQ ID NO: 119110 - DNA, 1994 bp, Artificial Sequence
  derived and/or modified sequence
ggggccgcgcgcgccgccgggccgcgcgggcgcgccgcttccgcttaaataacggcgggggaggccgcggtcggtctcagtcgccgctgccagctctcgcactctgttcttccgccgctccgccgtcgcgtttctctgccggtcgcaatggaagaagagatcgccgcgctggtcattgacaatggctccggcatgtgcaaagctggttttgctggggacgacgctccccgagccgtgtttccttccatcgtcgggcgccccagacaccagggcgtcatggtgggcatgggccagaaggactcctacgtgggcgacgaggcccagagcaagcgtggcatcctgaccctgaagtaccccattgagcatggcatcgtcaccaactgggacgacatggagaagatctggcaccacaccttctacaacgagctgcgcgtggccccggaggagcacccagtgctgctgaccgaggcccccctgaaccccaaggccaacagagagaagatgactcagattatgtttgagaccttcaacaccccggccatgtacgtggccatccaggccgtgctgtccctctacgcctctgggcgcaccactggcattgtcatggactctggagacggggtcacccacacggtgcccatctacgagggctacgccctcccccacgccatcctgcgtctggacctggctggccgggacctgaccgactacctcatgaagatcctcactgagcgaggctacagcttcaccaccacggccgagcgggaaatcgtgcgcgacatcaaggagaagctgtgctacgtcgccctggacttcgagcaggagatggccaccgccgcatcctcctcttctctggagaagagctacgagctgcccgatggccaggtcatcaccattggcaatgagcggttccggtgtccggaggcgctgttccagccttccttcctgggtatggaatcttgcggcatccacgagaccaccttcaactccatcatgaagtgtgacgtggacatccgcaaagacctgtacgccaacacggtgctgtcgggcggcaccaccatgtacccgggcattgccgacaggatgcagaaggagatcaccgccctggcgcccagcaccatgaagatcaagatcatcgcacccccagagcgcaagtactcggtgtggatcggtggctccatcctggcctcactgtccaccttccagcagatgtggattagcaagcaggagtacgacgagtcgggcccctccatcgtccaccgcaaatgcttctaaacggactcagcagatgcgtagcatttgctgcatgggttaattgagaatagaaatttgcccctggcaaatgcacacacctcatgctagcctcacgaaactggaataagccttcgaaaagaaattgtccttgaagcttgtatctgatatcagcactggattgtagaacttgttgctgattttgaccttgtattgaagttaactgttccccttggtatttgtttaataccctgtacatatctttgagttcaacctttagtacgtgtggcttggtcacttcgtggctaaggtaagaacgtgcttgtggaagacaagtctgtggcttggtgagtctgtgtggccagcagcctctgatctgtgcagggtattaacgtgtcagggctgagtgttctgggatttctctagaggctggcaagaaccagttgttttgtcttgcgggtctgtcagggttggaaagtccaagccgtaggacccagtttcctttcttagctgatgtctttggccagaacaccgtgggctgttacttgctttgagttggaagcggtttgcatttacgcctgtaaatgtattcattcttaatttatgtaaggttttttttgtacgcaattctcgattctttgaagagatgacaacaaattttggttttctactgttatgtgagaacattaggccccagcaacacgtcattgtgtaaggaaaaataaaagtgctgccgtaaccaa

SEQ ID NO: 119111 - DNA, 1128 bp, Artificial Sequence
  derived and/or modified sequence
atggaggaagaaattgccgcgctcgttattgataatggctccggtatgtgtaaggcagggttcgcgggggatgacgcacctcgggctgtattcccatccattgtgggccgtccccggcatcagggagttatggtcgggatgggacaaaaagacagctatgtgggggacgaagcccagagcaagagaggcatcttgacgctcaagtacccgatcgaacacggcatcgtcaccaattgggacgacatggagaaaatatggcaccacactttctacaacgaattacgcgttgctcctgaggaacatcctgtgcttcttaccgaggcgccccttaatccgaaggctaaccgagagaagatgacacagatcatgttcgagacatttaatacaccagcaatgtatgtggccatacaggcggtgctttccctttatgcttccggtcgcacaactggaattgtgatggattctggcgatggggtcacccacactgtgcccatttacgaagggtacgctctaccacacgctatcctcagactggacctggccggccgggacctgactgattacctaatgaagatactgaccgaacgaggctatagcttcactacgactgctgagcgggagatcgtgagagatatcaaagagaagctttgttacgtagctctggacttcgagcaggagatggccactgcagcctcatccagttcactggagaagtcttacgagctacccgatggacaggtgataaccatcgggaacgagagattccgctgtcctgaagctctgtttcagcccagtttcctgggcatggaatcctgtggcatccacgaaacaacgtttaactctattatgaagtgtgatgtggatatcagaaaggatctgtacgccaatacagtgctgagtggaggcacaacaatgtatcctgggattgcggatcgaatgcagaaagagataacggcactggcaccatccacgatgaagatcaaaattatcgcccctcctgagaggaaatactctgtgtggatcgggggatcaattttagcttccctaagcacgttccagcagatgtggatcagcaaacaggagtacgacgagagcggtcctagtatcgtgcatcggaagtgtttctag

SEQ ID NO: 119112 - DNA, 1128 bp, Artificial Sequence
  derived and/or modified sequence
atggaagaggaaatcgcagccttagtcatagataacgggtctggaatgtgcaaggcaggctttgctggagatgatgccccacgggccgtgttccctagcattgtgggtaggccacggcatcaaggggtgatggtgggcatgggtcagaaggattcttacgtgggtgacgaagcccagtcaaagcgtggaattctcacgctcaagtacccgatcgaacatggaatcgtcacgaactgggacgatatggaaaaaatttggcaccacaccttctacaatgagctgcgcgtcgcacccgaagagcatcccgtgctgctcacggaggctcccttgaatcccaaggcaaatcgagaaaagatgactcagatcatgttcgagacctttaacactcctgcaatgtatgtagccatccaggcggttctgtctttgtatgccagcggaaggaccacggggatcgttatggactccggggacggcgtgactcataccgtgccaatctacgagggatatgccctgccgcacgcgattctacgccttgatctggccggcagggatttaactgactatctcatgaaaatcctgacggaaagagggtacagttttacgacaactgcagaacgagagattgttagagacataaaggagaagctgtgctatgtggccctagactttgagcaggaaatggccaccgccgcaagctcaagttctcttgaaaagtcttatgagttgcctgacggacaggtgatcacaatcggaaacgagcgattccgatgccctgaggccctatttcagccgtcttttttaggaatggagtcttgcggcattcacgagaccaccttcaacagtattatgaaatgtgacgtggacattcggaaggacttgtacgccaacacagtcctctcgggaggaactacaatgtacccgggcatcgctgataggatgcagaaggagatcacagccttagctccaagcacaatgaagatcaagataattgccccccctgagcggaaatactccgtgtggattggagggtcaatcctggcatcattaagcacgtttcaacagatgtggatcagcaagcaggagtatgacgagtccggcccctctattgtgcatcgcaaatgcttttag

SEQ ID NO: 119113 - DNA, 1128 bp, Artificial Sequence
  derived and/or modified sequence
atggaggaggagatcgccgccctggtgatcgacaacggcagcggcatgtgcaaggccggattcgccggagacgacgccccccgggcggtgtttccgagcatcgtgggacggccacggcaccagggggtgatggttggcatgggtcagaaggactcttacgtcggtgacgaggctcagtctaagcgggggatcctaactttaaagtaccccattgagcatggaatcgtcactaattgggacgacatggaaaaaatatggcaccacacattttacaatgagctgcgggtagcacctgaggagcatcccgtgctgcttactgaagccccacttaatcccaaggcgaacagggagaagatgactcagatcatgttcgagaccttcaatactcccgcaatgtatgtggccattcaggcggtcctcagcctgtacgccagtggaagaactacaggaattgttatggacagcggagacggcgttactcacaccgtccctatctatgagggatacgcactcccccacgcaatcttgagactagacttggcgggcagggacctgactgattatcttatgaaaatcctgactgagaggggctattccttcaccacaactgctgaacgcgaaattgtgcgggatattaaggagaaactctgctatgtggccctggattttgaacaagagatggcgaccgccgcatcaagctcttcgctcgagaaaagctacgagctccctgatggacaggtcatcactattggcaatgagcgctttagatgtccagaggccctctttcaacctagttttttgggaatggaaagctgcggaatccacgaaaccaccttcaattctatcatgaagtgtgacgttgatattcgcaaggacctttatgccaacaccgtgctgagtggcggtaccactatgtaccctgggattgccgatagaatgcaaaaagaaattacggctctggccccctcaaccatgaagataaaaataatcgcgccacctgaacgcaagtatagcgtgtggattggtggtagcatcctggcaagtttgagcacgttccagcagatgtggatctccaaacaagagtatgacgagagtggtccttccatcgttcaccggaagtgcttctag

SEQ ID NO: 119114 - DNA, 1128 bp, Artificial Sequence
  derived and/or modified sequence
atggaggaggagatcgccgccctggtgatcgacaacggcagcggcatgtgtaaagctgggttcgcgggggacgacgcccccagggcagtgttcccgtcaatcgtgggccgccctcgtcaccagggagttatggtgggtatggggcagaaggactcctatgttggggatgaagcccagagcaagcgcgggatcctcaccttgaagtatccgatcgagcacggcattgtgacaaactgggacgacatggaaaagatctggcatcacaccttttacaacgaactaagggttgcaccagaagaacaccccgtgctgctcacagaggccccactgaatccgaaggccaacagggaaaagatgacgcagattatgtttgagacatttaatactccagctatgtatgttgctatccaggcagtcctgtcactgtatgctagcggccgtacaaccggcattgtgatggattctggcgatggcgtgactcataccgtccctatttacgaagggtatgccctgccccacgcaatccttagattagacctcgctggacgggacctgaccgattatctaatgaagatcctaactgagcgcggttattcctttactaccaccgccgaaagagaaattgtccgggacattaaggaaaagctgtgctatgtggcgttagacttcgagcaagagatggctactgccgcctcatcaagctccctcgaaaagtcctacgaactgcctgacgggcaggtgatcaccattggaaacgagcgttttagatgccctgaggctctgttccaaccctcatttctggggatggaaagttgtgggatccacgagacaacattcaactccatcatgaagtgtgacgtggacataaggaaggacctgtacgccaatactgttctgtctgggggcaccacgatgtaccctggcatcgctgatcgcatgcagaaggaaatcacagccctcgcaccatccacgatgaaaatcaagatcatcgcccctcccgaacgtaaatactccgtctggataggcggctcaatcctcgcatcccttagcacatttcaacaaatgtggatatctaagcaggagtacgacgaaagtggcccttctattgtacatagaaagtgtttttag

SEQ ID NO: 119115 - DNA, 1128 bp, Artificial Sequence
  derived and/or modified sequence
atggaggaggagatcgctgcactagtaatcgataacgggtcaggcatgtgtaaagcaggcttcgctggggacgatgcccctagggccgtttttccaagcatcgtggggaggccgcgacatcagggggttatggtcggaatgggccagaaggactcctatgttggggatgaggctcagagcaagaggggcattctgacgcttaagtaccctattgagcacggtatcgtaactaattgggacgacatggagaaaatttggcaccatacgttttacaacgagctccgcgttgctccagaggagcaccccgtattactgacagaggcccctctcaacccaaaggcaaaccgcgaaaagatgactcagataatgttcgaaacatttaatactccagctatgtacgtggccatacaggcagtgttgagcctgtacgcaagcggacgcacaactgggatcgtgatggactcgggcgacggggtcacacacactgtcccaatctatgaaggctatgccctaccccatgcaatattgcggctggatctcgccggtagagacctcaccgactaccttatgaagattctcaccgagcgaggctacagctttacaactaccgccgagagggagattgtccgggacattaaggagaagctctgctatgtggccctcgattttgaacaggaaatggccaccgcagccagcagtagcagtctggaaaaatcatacgagctcccggatgggcaggtcattacaattggtaacgaaaggttccggtgccccgaggccctgttccaaccatcctttctgggcatggagagttgcggcattcacgaaacgactttcaactctattatgaaatgcgatgtcgacatcaggaaagacctatacgcgaataccgtgctcagcgggggaaccacaatgtacccgggaattgctgacaggatgcaaaaggaaatcactgcactggccccatcaaccatgaagatcaagattatcgccccacctgagaggaaatactctgtctggattggcggtagcatcctagcatcgctgtctaccttccaacagatgtggatcagcaagcaggaatacgacgaatcagggccaagtatagtccacaggaaatgtttttag

SEQ ID NO: 119116 - DNA, 1128 bp, Artificial Sequence
  derived and/or modified sequence
atggaggaggaaatagcagcactggtaattgacaatgggtccgggatgtgcaaggctggattcgcgggagatgatgcgcctagggccgtgtttccttcgatcgttgggaggccacgccaccagggtgtcatggttggcatgggccagaaggattcttatgtcggagacgaggctcagtcaaaaagagggatactaaccttaaagtacccgatcgagcacggcattgtgacaaattgggacgacatggaaaagatttggcatcatacattctacaacgagctgagagtggcgcctgaagaacacccagtgctcctgactgaagctcccctgaaccctaaggctaaccgtgaaaaaatgacccagatcatgtttgaaactttcaatactcctgctatgtacgttgccatccaggcagtgctgtcattgtacgcctcagggcgaacaactggtattgtgatggacagcggcgacggtgtaacacataccgtgcctatatatgaaggttatgccttgccccatgcgattttgcggctggacctggctggacgggatttgacagattacttgatgaaaatccttacagaacggggatatagcttcacgactacggcagagcgcgagatcgtgagagacatcaaagagaaactctgctatgttgctctggattttgaacaggagatggccacagccgcttcctcttcatctttggagaaatcctacgaattacccgacgggcaggtcataactattgggaacgaaagattcagatgccccgaggctttgttccaaccgagctttctggggatggagtcctgcggcatacacgaaactacttttaatagcatcatgaagtgcgacgtcgatatcaggaaggatctatatgcaaatacagtgttgagcggaggcaccacaatgtaccccggaatcgcagatcgtatgcagaaggaaattactgcccttgccccttcaacaatgaagattaaaatcatagcaccaccagagcggaagtattctgtttggatcggtggcagtatactggcgagcctgtctactttccagcaaatgtggatttccaagcaggaatatgacgaaagtgggccaagcatagttcaccgtaagtgtttctag

SEQ ID NO: 119117 - protein, 376 aa, Artificial Sequence
  derived and/or modified sequence
MCEEETTALVCDNGSGLCKAGFAGDDAPRAVFPSIVGRPRHQGVMVGMGQKDSYVGDEAQSKRGILTLKYPIEHGIITNWDDMEKIWHHSFYNELRVAPEEHPTLLTEAPLNPKANREKMTQIMFETFNVPAMYVAIQAVLSLYASGRTTGIVLDSGDGVTHNVPIYEGYALPHAIMRLDLAGRDLTDYLMKILTERGYSFVTTAEREIVRDIKEKLCYVALDFENEMATAASSSSLEKSYELPDGQVITIGNERFRCPETLFQPSFIGMESAGIHETTYNSIMKCDIDIRKDLYANNVLSGGTTMYPGIADRMQKEITALAPSTMKIKIIAPPERKYSVWIGGSILASLSTFQQMWISKPEYDEAGPSIVHRKCF

SEQ ID NO: 119118 - DNA, 1131 bp, Artificial Sequence
  derived and/or modified sequence
atgtgcgaggaggagaccaccgccctggtgtgcgacaacggcagcggcctgtgcaaggccggcttcgccggcgacgacgcccccagagccgtgttccccagcatcgtgggcagacccagacaccagggcgtgatggtgggcatgggccagaaggacagctacgtgggcgacgaggcccagagcaagagaggcatcctgaccctgaagtaccccatcgagcacggcatcatcaccaactgggacgacatggagaagatctggcaccacagcttctacaacgagctgagagtggcccccgaggagcaccccaccctgctgaccgaggcccccctgaaccccaaggccaacagagagaagatgacccagatcatgttcgagaccttcaacgtgcccgccatgtacgtggccatccaggccgtgctgagcctgtacgccagcggcagaaccaccggcatcgtgctggacagcggcgacggcgtgacccacaacgtgcccatctacgagggctacgccctgccccacgccatcatgagactggacctggccggcagagacctgaccgactacctgatgaagatcctgaccgagagaggctacagcttcgtgaccaccgccgagagagagatcgtgagagacatcaaggagaagctgtgctacgtggccctggacttcgagaacgagatggccaccgccgccagcagcagcagcctggagaagagctacgagctgcccgacggccaggtgatcaccatcggcaacgagagattcagatgccccgagaccctgttccagcccagcttcatcggcatggagagcgccggcatccacgagaccacctacaacagcatcatgaagtgcgacatcgacatcagaaaggacctgtacgccaacaacgtgctgagcggcggcaccaccatgtaccccggcatcgccgacagaatgcagaaggagatcaccgccctggcccccagcaccatgaagatcaagatcatcgccccccccgagagaaagtacagcgtgtggatcggcggcagcatcctggccagcctgagcaccttccagcagatgtggatcagcaagcccgagtacgacgaggccggccccagcatcgtgcacagaaagtgcttctag

SEQ ID NO: 119119 - DNA, 1530 bp, Artificial Sequence
  derived and/or modified sequence
tatattgctctggtattcatgccaaagacacaccagccctcagtcactgggagaagaacctctcataccctcggtgctccagtccccagctcactcagccacacacaccatgtgtgaagaggagaccaccgcgctcgtgtgtgacaatggctctggcctgtgcaaggcaggcttcgcaggagatgatgccccccgggctgtcttcccctccattgtgggccgccctcgccaccagggtgtgatggtgggaatgggccagaaagacagctatgtgggggatgaggctcagagcaagcgagggatcctaactctcaaataccccattgaacacggcatcatcaccaactgggatgacatggagaagatctggcaccactccttctacaatgagctgcgtgtagcacctgaagagcaccccaccctgctcacagaggctcccctaaatcccaaggccaacagggaaaagatgacccagatcatgtttgaaaccttcaatgtccctgccatgtacgtcgccattcaagctgtgctctccctctatgcctctggccgcacgacaggcatcgtcctggattcaggtgatggcgtcacccacaatgtccccatctatgaaggctatgccctgccccatgccatcatgcgcctggacttggctggccgtgacctcacggactacctcatgaagatcctcacagagagaggctattcctttgtgaccacagctgagagagaaattgtgcgagacatcaaggagaagctgtgctatgtggccctggattttgagaatgagatggccacagcagcttcctcttcctccctggagaagagctatgagctgccagatgggcaggttatcaccattggcaatgagcgcttccgctgccctgagaccctcttccagccttcctttattggcatggagtccgctggaattcatgagacaacctacaattccatcatgaagtgtgacattgacatccgtaaggacttatatgccaacaatgtcctctctgggggcaccaccatgtaccctggcattgctgacaggatgcagaaggagatcacagccctggcccccagcaccatgaagatcaagattattgctcccccagagcggaagtactcagtctggatcgggggctctatcctggcctctctctccaccttccagcagatgtggatcagcaagcctgagtatgatgaggcagggccctccattgtccacaggaagtgcttctaaagtcagaacaggttctccaaggatcccctcgagactactctgttaccagtcatgaaacattaaaacctacaagccttacttctctgtgtggggctcttttttcctgggctatgtctcatacacagtgctaaggacttttcacacattacttttaatccatgcaatagtgctgtaaggtaggtgctatcattatacccatattacagatgaggaaattgaggctcagagaagtcaaggacttgcgaagatcacacagattccagattaaaattcaagtatctgactgcaaa

SEQ ID NO: 119120 - DNA, 2064 bp, Artificial Sequence
  derived and/or modified sequence
acaccagccctcagtcactgggagaagaacctctcataccctcggggaataaaagcttcattcctgagtcagtgagagcttcaatgaagcccagatgtcattcgtgctgaaagaaccagaacaactctctgctccctgccaagcatgaagcggttgtgaccccaggaaaccacagtgactttgactctggttcagctgacatgctcgagtctagccacaaattaccagaaagcagctgaggaaagtttagaatttctcctggcagagatggtccacgagtctggctccagggtgaaccccttcttcccagagcagcacggggccctttggaggctcgactccgccagccctcccactgccttccccctgccttccccaccctcacttcggttgagttttgccttcaaaatagcagactccaagccacctgaagggctgcagaacagcgttgttgacagcttcaagtcgccttgtggcttctctgagctgctgctgtgctttggaaacaaaattccaggctctccctctttctgtgtgtgggaaacaccggagagagtttggggagggagacaaaagggcccattgaaaacccagacaggcttgaactgtgctccagtccccagctcactcagccacacacaccatgtgtgaagaggagaccaccgcgctcgtgtgtgacaatggctctggcctgtgcaaggcaggcttcgcaggagatgatgccccccgggctgtcttcccctccattgtgggccgccctcgccaccagggtgtgatggtgggaatgggccagaaagacagctatgtgggggatgaggctcagagcaagcgagggatcctaactctcaaataccccattgaacacggcatcatcaccaactgggatgacatggagaagatctggcaccactccttctacaatgagctgcgtgtagcacctgaagagcaccccaccctgctcacagaggctcccctaaatcccaaggccaacagggaaaagatgacccagatcatgtttgaaaccttcaatgtccctgccatgtacgtcgccattcaagctgtgctctccctctatgcctctggccgcacgacaggcatcgtcctggattcaggtgatggcgtcacccacaatgtccccatctatgaaggctatgccctgccccatgccatcatgcgcctggacttggctggccgtgacctcacggactacctcatgaagatcctcacagagagaggctattcctttgtgaccacagctgagagagaaattgtgcgagacatcaaggagaagctgtgctatgtggccctggattttgagaatgagatggccacagcagcttcctcttcctccctggagaagagctatgagctgccagatgggcaggttatcaccattggcaatgagcgcttccgctgccctgagaccctcttccagccttcctttattggcatggagtccgctggaattcatgagacaacctacaattccatcatgaagtgtgacattgacatccgtaaggacttatatgccaacaatgtcctctctgggggcaccaccatgtaccctggcattgctgacaggatgcagaaggagatcacagccctggcccccagcaccatgaagatcaagattattgctcccccagagcggaagtactcagtctggatcgggggctctatcctggcctctctctccaccttccagcagatgtggatcagcaagcctgagtatgatgaggcagggccctccattgtccacaggaagtgcttctaaagtcagaacaggttctccaaggatcccctcgagactactctgttaccagtcatgaaacattaaaacctacaagccttacttctctgtgtggggctcttttttcctgggctatgtctcatacacagtgctaaggacttttcacacattacttttaatccatgcaatagtgctgtaaggtaggtgctatcattatacccatattacagatgaggaaattgaggctcagagaagtcaaggacttgcgaagatcacacagattccagattaaaattcaagtatctgactgcaaa

SEQ ID NO: 119121 - DNA, 1131 bp, Artificial Sequence
  derived and/or modified sequence
atgtgtgaggaggaaacgacagcgctcgtttgtgataacgggagcggactttgcaaagcaggcttcgcaggtgacgatgcgccgcgtgcagtgttcccgagcatcgtggggcgtccaaggcatcagggcgttatggtgggcatgggtcagaaagactcctatgtaggggacgaggcccaatcaaagaggggcatcctgaccctcaaatacccaatcgagcacggcataattactaactgggatgacatggaaaaaatctggcaccactcgttctataatgaacttcgcgttgccccagaagagcatccaaccctgttaacagaagcgcccctgaaccccaaagctaacagagagaagatgacacagattatgttcgaaacctttaacgttcctgccatgtatgtggctatacaggctgttttgtcgctgtatgctagtgggaggaccactggcattgttctcgattccggcgacggagtcacccataacgtccctatatatgaggggtacgccctgccacatgctatcatgcgcctggatttggctggcagagacctgactgactacctaatgaagatcctgactgagcgtgggtactcctttgtcaccactgcagagcgggagattgtcagggatattaaggagaagctctgctacgtagctttggatttcgaaaacgaaatggccacagccgcctcgtcatcctcattggaaaaatcatatgagctgccggatggacaggtgataacaatcggcaacgaaagattccgttgccccgagactttgttccagccttcattcatcggaatggagtcagcgggtatccatgaaactacttacaactctattatgaaatgcgacatcgacattcggaaggatttgtatgcaaacaatgtgctcagcgggggcacaaccatgtaccctggaatagcggacaggatgcagaaggagattacagccctggcgccctccacaatgaagatcaagataatcgcccctcccgaaagaaaatattcagtgtggatcggtggtagtattctggcatccctttctacctttcaacagatgtggatctccaaacctgaatacgatgaggcaggcccttccatcgtacatcgcaagtgtttttag

SEQ ID NO: 119122 - DNA, 1131 bp, Artificial Sequence
  derived and/or modified sequence
atgtgtgaagaggagaccaccgccttggtgtgtgacaacgggtcaggactctgtaaagcagggttcgctggggatgatgctccacgcgctgtgtttcccagcattgtcggccgaccacggcatcagggcgttatggtgggcatggggcagaaggatagctatgtcggggacgaggcgcagagcaaaagaggcatccttaccctcaagtacccaatagaacatggtatcatcacaaactgggatgatatggaaaagatttggcaccactctttctataacgaactccgggtggcgccagaagagcaccctaccctcttaactgaggctcctctgaaccccaaggctaaccgcgaaaaaatgacacagatcatgtttgaaacttttaatgtgcccgcgatgtacgtggctatccaggccgtgctgagtctgtacgcctcaggccgcacaaccgggatcgtccttgatagcggggacggtgtcacccataatgtgcctatctacgaaggctatgcacttccgcacgccataatgcggctggacctggccggacgggacttgaccgattatctcatgaagatcttgacggaacgaggctactccttcgtcaccactgcggagcgcgagatcgtccgtgacataaaagaaaagctctgttacgtagcactcgacttcgagaatgagatggcaaccgctgcatcatcctcatcactcgaaaaatcatatgaacttccagatggacaggtgatcaccattgggaacgaacgcttcaggtgccccgaaactctattccagcccagctttatcggtatggaaagcgctggcattcatgagactacctacaattcgatcatgaaatgtgatattgatattaggaaagacctctacgctaataatgtgctttcgggggggacaacaatgtatcctggaatcgcagatcgaatgcaaaaagaaattacagctctagccccaagcactatgaaaattaagatcatcgctcctcccgagcggaaatatagcgtatggatcggcggctcaatcctggcctccctgtctacgttccagcagatgtggatttcaaagcctgaatatgacgaggctgggccctccatcgtccaccgtaaatgtttctag

SEQ ID NO: 119123 - DNA, 1131 bp, Artificial Sequence
  derived and/or modified sequence
atgtgtgaggaggagaccacagccctggtgtgtgacaatggaagtggcctgtgcaaggccggctttgctggagatgatgcccccagggctgtgttccccagcatcgtgggccggcccaggcaccagggcgtgatggtgggcatgggccagaaggacagctatgtgggagatgaggcccagagcaagaggggcatcctgaccctgaagtaccccatcgagcacggcatcatcaccaactgggatgacatggagaagatctggcaccacagcttctacaatgagctgcgggtggcccctgaggagcaccccaccctgctgacagaggcccccctgaaccccaaggccaaccgggagaagatgacccagatcatgtttgagaccttcaacgtgcctgccatgtatgtggccatccaggccgtgctgagcctgtatgccagcggccgcaccaccggcatcgtgctggacagcggagatggagtgacccacaacgtgcccatctatgagggctacgccctgccccacgccatcatgaggctggacctggccggccgggacctgacagactacctgatgaagatcctgacagagcggggctacagctttgtgaccacagctgagcgggagatcgtgcgggacatcaaggagaagctgtgctacgtggccctggactttgaaaatgagatggccacagctgccagcagcagcagcctggagaagagctatgagctgcctgatggccaggtgatcaccatcggaaatgaacgcttccgctgcccagagaccctcttccagcccagcttcatcggcatggagagcgctggcatccacgagaccacctacaacagcatcatgaagtgtgacatcgacatcaggaaggacctgtatgccaacaacgtgctgagcggcggcaccaccatgtacccaggcattgctgacaggatgcagaaggagatcacagccctggcccccagcaccatgaagatcaagatcatcgcccctcctgagaggaagtacagcgtgtggattggaggcagcatcctggccagcctgagcaccttccagcagatgtggatcagcaagccagaatatgatgaggccggccccagcatcgtgcacaggaagtgcttctag

SEQ ID NO: 119124 - DNA, 1131 bp, Artificial Sequence
  derived and/or modified sequence
atgtgcgaggaggagaccaccgccctggtgtgcgacaacggcagcgggctgtgcaaggccggattcgctggggatgacgcccctcgcgcagttttcccatcaatagtcgggcggccgaggcatcagggggtcatggtgggcatggggcaaaaagactcttacgtgggcgatgaagcccagagcaaacgaggtatactcactttgaagtacccaatcgaacacggtatcataaccaattgggatgatatggagaaaatctggcaccattctttttataatgaacttcgcgtggctcccgaagaacaccccacattactgactgaggctcctctaaatccaaaagcaaacagagagaagatgactcagatcatgtttgagacattcaacgtgcccgcaatgtatgttgctatccaagccgttctgtctttgtacgcatctggacggacaaccgggatcgtcctcgacagcggcgacggtgttacacacaacgtaccaatctacgagggctacgctcttccgcatgccattatgcgacttgatttggctggcagagatctgaccgactatctgatgaagatcctgacagagcgaggctatagcttcgtgactacagcagagcgggaaatcgtgcgggatatcaaagagaagctgtgttacgtggccttggattttgagaacgagatggccactgctgccagctccagttccctcgagaaatcatacgaattgcccgacggacaggttattaccattggcaacgaacggttccgctgccccgaaaccctgtttcaaccgagttttattggtatggagagcgccggaatacacgagacaacttataacagcattatgaagtgtgacatcgatattcgcaaggacctctatgcgaataatgttctgtctgggggaacaacgatgtatccaggaattgccgaccgcatgcaaaaagagattacggctctggcgccaagtaccatgaagataaagattattgccccccccgagcggaaatattctgtctggatcggggggtctatcctggcctccttgagcactttccagcagatgtggatttctaagcccgaatatgatgaagcgggacccagcattgtgcaccggaaatgcttctag

SEQ ID NO: 119125 - DNA, 1131 bp, Artificial Sequence
  derived and/or modified sequence
atgtgcgaggaggagaccaccgccctggtgtgcgacaacggcagcggactctgcaaggctggcttcgcgggtgacgacgccccacgcgccgtctttccttcaatagtcggtagaccgaggcaccagggcgtgatggtgggaatgggccagaaagattcatatgtgggcgacgaagctcagtctaaacgcgggatcctcacgcttaaatatccgatagaacatggcatcataaccaactgggatgacatggaaaaaatatggcaccattccttttataatgagctgagggtcgcccccgaagagcatcccaccctacttacagaagccccactaaacccaaaagcgaatagggaaaaaatgacacagatcatgttcgagacgttcaacgttccagccatgtacgtggcaattcaagctgtccttagtctttacgcttcagggcggacgacgggtatcgtactagactcaggcgacggagtaacacataacgtgcccatctacgaagggtacgccttgccgcacgcgataatgcgcttggatcttgctggccgcgatctgaccgactacctgatgaagatcctaaccgagcggggctatagtttcgtgacgacagccgaacgtgagattgtcagggatatcaaagaaaagctatgttacgtggccctcgacttcgaaaacgaaatggcaacagctgccagtagctcctcgttggagaaatcttatgaactccccgacggtcaggtcatcacaatcggcaacgaacggttccgatgccccgaaaccctctttcagccttctttcatcggtatggagtcggctggcattcacgaaaccacatacaattcaataatgaaatgcgatatcgacattaggaaagacctgtatgcgaataatgttctgtccggcggtactacaatgtacccaggaatcgctgatcgaatgcagaaagaaattacagccctggctccttctaccatgaaaattaagattatcgccccacccgaacggaagtattcagtctggatcggcggttctattttggcttcattgtctaccttccagcagatgtggatctctaaacctgaatacgacgaggccggtccttccattgtgcatcggaagtgcttttag

SEQ ID NO: 119126 - DNA, 1131 bp, Artificial Sequence
  derived and/or modified sequence
atgtgtgaggaggaaacaactgcgctcgtttgtgataacggctcgggcctgtgtaaagcagggttcgccggagacgacgcgcctcgcgcagtgttccccagcattgtgggcagaccaagacaccagggagtcatggtgggcatggggcagaaagactcctacgtcggggatgaagcacagtccaaaagagggattctcactctgaagtatcccatcgagcacggcataataacaaattgggatgacatggagaagatttggcatcattccttttataatgagctgagggtggcgcctgaagagcatccgacattactgacagaggcgcctctgaaccctaaggctaaccgcgagaaaatgacccaaattatgtttgaaactttcaacgttcccgcaatgtatgttgctatccaggctgtgctgagcctctatgcctctgggaggaccacgggcatcgtgcttgactcaggcgatggagttacacacaacgtgcccatttacgaaggatatgccttgccccacgcaattatgcgactggaccttgccggtcgcgatctaactgactatctgatgaagatcctcaccgagcgcggatacagttttgtcaccacagcagagcgtgaaatcgtgcgtgacatcaaggaaaagctttgttacgtggcccttgatttcgagaacgaaatggccaccgctgcaagcagcagcagtctggaaaaatcctatgagctccccgatggtcaggtgattactatcggcaatgaacggttccgctgtcccgaaacactcttccagccatcctttattgggatggagtccgctggcattcacgagacaacatataacagcatcatgaagtgcgatatagacattcggaaggatttgtacgccaacaacgtcctgagcgggggaacgacgatgtacccaggcattgctgataggatgcaaaaagaaattacagcactggctcccagcactatgaagattaagatcatcgcaccacccgagcggaaatactctgtttggattggtggaagcatactggcatctctgtctacttttcaacagatgtggatctctaagccagaatatgacgaggctggaccatccattgttcaccgaaagtgcttctag

SEQ ID NO: 119127 - DNA, 1131 bp, Artificial Sequence
  derived and/or modified sequence
atgtgcgaggaagagaccaccgctctggtgtgcgacaacggtagtggtctgtgcaaagctggcttcgccggtgatgatgcccctcgggctgtcttcccctctatcgtgggtcgacctcgccaccagggcgtcatggtgggaatggggcagaaggactcgtacgtaggggatgaggcccagtctaaacgaggcattctaactctcaagtatccaattgaacacggcatcattacaaattgggacgacatggagaaaatttggcaccactccttttacaatgaactccgagtcgctccggaggagcaccccaccctgctaactgaggcccctttaaacccgaaggccaatagagagaaaatgacccagataatgttcgagacatttaacgttcctgcgatgtacgtggctattcaggcagttctgtcactctatgccagcggtcgtactacaggcatagtccttgactctggtgatggcgtgacccataatgtgcctatctatgaggggtatgcgttgcctcatgctatcatgaggttggacctcgctggcagagatctcacagattacctaatgaaaatcctgactgagcggggatatagcttcgtcaccacggccgaacgcgagatcgtccgggatattaaagaaaagctctgctacgttgcactcgactttgaaaacgaaatggccacagccgctagtagctctagtctggagaaatcttacgagctgcctgacgggcaggtaataactatcggaaacgagcggttccgctgcccagagacgttattccagccttctttcattggcatggagagtgccggaatacatgaaaccacctataactctatcatgaaatgcgacatcgacataaggaaagacctatacgctaacaatgtccttagcgggggaaccaccatgtaccccggaattgcagatagaatgcaaaaggaaattaccgctcttgctcctagcaccatgaaaattaagataatagcccctcccgaacgtaagtattccgtctggataggcggatccatccttgccagccttagcactttccagcagatgtggatcagtaagcccgagtacgacgaagcagggccatccatcgttcatcgtaagtgcttttag

SEQ ID NO: 119128 - protein, 726 aa, Artificial Sequence
  derived and/or modified sequence
MSEETVPEAASPPPPQGQPYFDRFSEDDPEYMRLRNRAADLRQDFNLMEQKKRVTMILQSPSFREELEGLIQEQMKKGNNSSNIWALRQIADFMASTSHAVFPTSSMNVSMMTPINDLHTADSLNLAKGERLMRCKISSVYRLLDLYGWAQLSDTYVTLRVSKEQDHFLISPKGVSCSEVTASSLIKVNILGEVVEKGSSCFPVDTTGFCLHSAIYAARPDVRCIIHLHTPATAAVSAMKWGLLPVSHNALLVGDMAYYDFNGEMEQEADRINLQKCLGPTCKILVLRNHGVVALGDTVEEAFYKIFHLQAACEIQVSALSSAGGVENLILLEQEKHRPHEVGSVQWAGSTFGPMQKSRLGEHEFEALMRMLDNLGYRTGYTYRHPFVQEKTKHKSEVEIPATVTAFVFEEDGAPVPALRQHAQKQQKEKTRWLNTPNTYLRVNVADEVQRSMGSPRPKTTWMKADEVEKSSSGMPIRIENPNQFVPLYTDPQEVLEMRNKIREQNRQDVKSAGPQSQLLASVIAEKSRSPSTESQLMSKGDEDTKDDSEETVPNPFSQLTDQELEEYKKEVERKKLELDGEKETAPEEPGSPAKSAPASPVQSPAKEAETKSPLVSPSKSLEEGTKKTETSKAATTEPETTQPEGVVVNGREEEQTAEEILSKGLSQMTTSADTDVDTSKDKTESVTSGPMSPEGSPSKSPSKKKKKFRTPSFLKKSKKKEKVES

SEQ ID NO: 119129 - protein, 98 aa, Artificial Sequence
  derived and/or modified sequence
MSEETVPEAASPPPPQGQPYFDRFSEDDPEYMRLRNRAADLRQDFNLMEQKKRVTMILQSPSFREELEGLIQEQMKKEYKKEVERKKLELDAPGWFSS

SEQ ID NO: 119130 - protein, 587 aa, Artificial Sequence
  derived and/or modified sequence
MSEETVPEAASPPPPQGQPYFDRFSEDDPEYMRLRNRAADLRQDFNLMEQKKRVTMILQSPSFREELEGLIQEQMKKGNNSSNIWALRQIADFMASTSHAVFPTSSMNVSMMTPINDLHTADSLNLAKGERLMRCKISSVYRLLDLYGWAQLSDTYVTLRVSKEQDHFLISPKGVSCSEVTASSLIKVNILGEVVEKGSSCFPVDTTGFCLHSAIYAARPDVRCIIHLHTPATAAVSAMKWGLLPVSHNALLVGDMAYYDFNGEMEQEADRINLQKCLGPTCKILVLRNHGVVALGDTVEEAFYKIFHLQAACEIQVSALSSAGGVENLILLEQEKHRPHEVGSVQWAGSTFGPMQKSRLGEHEFEALMRMLDNLGYRTGYTYRHPFVQEKTKHKSEVEIPATVTAFVFEEDGAPVPALRQHAQKQQKEKTRWLNTPNTYLRVNVADEVQRSMGSPRPKTTWMKADEVEKSSSGMPIRIENPNQFVPLYTDPQEVLEMRNKIREQNRQDVKSAGPQSQLLASVIAEKSRSPSTESQLMSKGDEDTKDDSEETVPNPFSQLTDQELEEYKKEVERKKLELDAPGWFSS

SEQ ID NO: 119131 - protein, 226 aa, Artificial Sequence
  derived and/or modified sequence
MSEETVPEAASPPPPQGQPYFDRFSEDDPEYMRLRNRAADLRQDFNLMEQKKRVTMILQSPSFREELEGLIQEQMKKGNNSSNIWALRQIADFMASTSHAVFPTSSMNVSMMTPINDLHTADSLNLAKGERLMRCKISSVYRLLDLYGWAQLSDTYVTLRVSKEQDHFLISPKGVSCSEVTASSLIKVNILGEVVEKGSSCFPVDTTGFCLHSAIYAARPDVRCII

SEQ ID NO: 119132 - protein, 143 aa, Artificial Sequence
  derived and/or modified sequence
MSEETVPEAASPPPPQGQPYFDRFSEDDPEYMRLRNRAADLRQDFNLMEQKKRVTMILQSPSFREELEGLIQEQMKKGNNSSNIWALRQIADFMASTSHAVFPTSSMNVSMMTPINDLHTADSLNLAKGERLMRCKISSVYRL

SEQ ID NO: 119133 - protein, 281 aa, Artificial Sequence
  derived and/or modified sequence
MSEETVPEAASPPPPQGQPYFDRFSEDDPEYMRLRNRAADLRQDFNLMEQKKRVTMILQSPSFREELEGLIQEQMKKGNNSSNIWALRQIADFMASTSHAVFPTSSMNVSMMTPINDLHTADSLNLAKGERLMRCKISSVYRLLDLYGWAQLSDTYVTLRVSKEQDHFLISPKGVSCSEVTASSLVSEVLEMRNKIREQNRQDVKSAGPQSQLLASVIAEKSRSPSTESQLMSKGDEDTKDDSEETVPNPFSQLTDQELEEYKKEVERKKLELDAPGWFSS

SEQ ID NO: 119134 - DNA, 2181 bp, Artificial Sequence
  derived and/or modified sequence
atgtcggaggagacagtgcctgaggccgcctcacctccgccacctcaggggcagccttactttgaccgctttagtgaagacgatcccgaatacatgcggcttcgcaaccgcgcagctgacttgcgccaggatttcaatctgatggagcaaaaaaagcgagtgacgatgatcctgcagtctccaagtttcagggaggaactggagggtctgattcaagaacaaatgaagaaggggaataattcctccaatatttgggctctcagacagattgctgactttatggcttcaacgtctcacgcagtcttcccaaccagttcaatgaacgtatccatgatgacccctatcaatgaccttcacaccgccgactctctcaatttagctaaaggggagcgcctcatgagatgcaaaatcagctctgtctatagattgctggatctgtacggatgggcccagttgtccgacacttacgtcacacttagagtcagcaaagagcaagatcatttcctgatttccccgaagggagtctcctgctctgaggtcactgctagcagtcttatcaaggttaacatcctcggagaagtggttgaaaagggttctagttgtttcccggtggacactaccggcttttgtctgcacagcgctatatacgctgcaaggccggatgttcgctgcatcatccatctgcacacacccgccacagctgccgtaagcgccatgaagtggggactcctgccagtctcacacaatgcgcttcttgttggcgacatggcttattacgactttaatggagagatggagcaggaggcagaccggataaatcttcagaaatgcctcggaccaacgtgtaagatccttgtccttcgaaaccatggcgttgtggctctgggagacactgtcgaggaagccttttataagatctttcatctgcaggccgcatgcgagattcaggtgtctgctctaagctccgccggcggagtcgagaacctgattttgctcgaacaggaaaagcaccggccacacgaggtcggcagtgtgcagtgggcaggtagcacctttggacccatgcaaaaatcacggctaggcgagcatgagtttgaggctctgatgaggatgctggataacctgggataccgcacgggatacacctacaggcacccttttgtgcaggaaaagacaaaacataagtcagaagtcgagatccccgcaactgtaacagcattcgtgtttgaagaggatggtgcgcccgtcccagcactgcgccagcacgcgcagaagcagcagaaggagaaaacgaggtggttgaatacgccaaacacctatttgagggtgaacgtcgcagacgaagtccagaggagcatggggtctccccggcctaagacaacatggatgaaagcagacgaagtggagaagagtagtagtggaatgcctatccgaattgaaaacccgaatcagttcgtgccgctctatacggacccccaggaagttttggagatgaggaataagatcagggagcagaacaggcaggacgttaaatctgccggcccacagagtcagctgctcgccagcgttatcgctgaaaaaagtcgttccccgtcaacggagtcacagctcatgagcaagggtgatgaggacaccaaggacgactcagaagagactgtcccaaacccattttcacagctgaccgatcaagaactggaagagtacaaaaaggaggtggagagaaagaaacttgaacttgatggggagaaagagaccgcccccgaggagccgggaagcccagccaagagcgcacctgcaagccccgtgcagtctcccgctaaagaagccgaaaccaaatcccccctggtgtccccatctaaaagtcttgaagaaggtactaaaaaaacagagacatcgaaagccgctacaacagaacccgaaacaactcagcccgaaggagttgtggtgaatgggcgtgaggaagaacagacagcagaggagatcctgtccaaagggctatctcagatgacaacgtctgctgatacagatgtcgatacatcaaaggataaaactgagagtgtcacttccgggccgatgtcccccgagggtagccccagcaagagtccgagtaagaagaagaagaaattccgcactccttcttttctcaaaaagagtaagaagaaggaaaaagtggaatcatag

SEQ ID NO: 119135 - DNA, 2181 bp, Artificial Sequence
  derived and/or modified sequence
atgtctgaggagaccgtacccgaagcagcatccccgccaccccctcagggccagccctattttgacagattttctgaagatgacccagagtacatgagactccggaatagggccgcagatctccggcaggactttaatctgatggagcaaaagaaacgcgtaaccatgatcctccagagcccaagcttccgcgaggaactggaaggtttgattcaggagcagatgaagaaggggaataatagctccaacatctgggccctgaggcagatcgctgactttatggcctcaacatcgcatgcagtttttcccactagctcgatgaatgtgagtatgatgacgcctattaacgacttgcacacggccgacagcctgaacctggccaagggcgagcgcctgatgagatgcaagattagtagtgtgtaccgcctcctggatctctacggctgggcccagcttagcgatacttatgtgacactgcgcgtgtcaaaggagcaggatcacttcctgatctcaccaaaaggcgtctcctgttccgaggtgaccgcctcatcactcatcaaggtgaatatcctgggggaagtggtagaaaagggttcatcttgctttcctgtggacaccaccggcttctgtctgcattctgctatctacgctgcacggccagacgtgcgctgtataatccacctacataccccagcaacagccgccgtctctgctatgaaatgggggcttcttccggtcagccataacgctttactggtgggggacatggcttattacgactttaacggggaaatggaacaggaagccgatagaatcaatctgcaaaagtgcctgggcccaacctgcaagattttggtgctaaggaatcacggggtggtagcgctaggggatactgttgaagaagccttttataagatcttccatctgcaagccgcgtgcgagattcaggtgtcagccctctccagcgctggtggcgtggagaacctgatactcctcgaacaggagaagcatcggccccacgaagtgggttccgtccagtgggctggatccacttttggtccaatgcaaaaaagtagattaggtgagcacgagtttgaggccctgatgcggatgctggacaatctgggctatcgaacaggctacacataccggcaccctttcgttcaggaaaaaacaaaacataagagtgaagttgagattcccgcaacagtgaccgcatttgtgttcgaggaagatggggcgcctgtgcccgcattgaggcagcacgcacaaaagcagcagaaggagaaaacgcgttggcttaatacccctaatacatatttgcgggtgaacgtggctgatgaggttcaacgttccatgggcagcccacggcccaaaacaacctggatgaaagcagatgaggtggagaagtctagtagtggaatgcccatcaggatcgaaaatcctaaccaatttgtgccactttacaccgatccccaagaggtgctggaaatgcgcaacaaaataagagaacaaaaccggcaggacgtgaagtctgccggtccgcagagccagctgctggcctctgtgattgccgaaaagtcaagaagcccctcgacagagagtcagctgatgtccaaaggcgacgaggatactaaagatgacagcgaagaaaccgtgcctaaccccttctctcagcttaccgaccaggaactcgaggaatacaaaaaagaagttgagcggaagaaactggagttggacggcgagaaggagaccgcccctgaggaaccaggcagccccgccaagtccgctccggcctccccagtccagtcacccgccaaggaagcagagacaaagtcaccccttgtgtccccatccaaatccctggaagaaggaactaaaaaaacagaaacgtccaaagctgctactaccgagcctgaaactacgcaacccgaaggggtcgtagttaacggaagagaagaagagcagacagcagaggaaatcctgtccaagggtctctcccagatgacaaccagcgctgacactgatgttgatacatccaaggataagacagagtccgttacctcgggcccgatgtcccctgaaggaagtccatctaaaagtccaagcaaaaaaaagaagaagtttcgtactccgtccttcctgaaaaagagcaaaaaaaaagaaaaagttgagagctag

SEQ ID NO: 119136 - DNA, 2181 bp, Artificial Sequence
  derived and/or modified sequence
atgtcagaagaaaccgtccccgaggccgcctcaccaccacctccacaggggcagccatactttgatcgtttctcagaggacgatcccgagtatatgaggctgcgcaatagagctgcggatctccgacaggacttcaacttgatggagcagaagaaacgagtcaccatgatactgcagtcaccctcttttagagaggaactagaaggtttaattcaggagcagatgaagaagggaaacaactctagtaacatttgggcactacggcagattgcagatttcatggcaagcaccagccacgctgtttttccaacctctagcatgaatgtgagcatgatgactccaatcaatgatctgcacactgcagactcccttaacctcgccaaaggagagcggctcatgagatgtaagatatctagcgtatacaggcttctcgacctctacggctgggcgcaattatctgatacctatgtaacactgcgtgtatctaaggagcaggaccactttctcatctcccctaaaggagtttcctgcagtgaagttactgcaagcagtctgataaaggtcaatattttaggagaggtggtagagaagggaagcagctgctttcctgtcgacacgactggcttctgcctccacagcgctatctatgcagcccgcccggacgtaaggtgcattatccacctgcatacccccgccacagcggctgtgtcggcgatgaagtgggggcttctgcctgtgagccacaatgccctgcttgtgggcgatatggcatattatgacttcaatggcgaaatggaacaggaagccgatcggattaacctgcagaaatgtctaggacccacttgtaaaatcctcgtcctccggaaccatggagtagtagccctcggggacaccgtggaagaagccttttacaaaatcttccacctgcaggccgcttgtgaaattcaagtttctgccctgtcctccgctggaggagtcgagaatctgattctgctggagcaagagaagcacaggccccatgaagtgggaagtgtacaatgggctggtagtacgttcggccccatgcagaagagcagattgggggaacacgaattcgaggctcttatgaggatgctggacaatctcggctatcgaacgggatatacctataggcacccatttgtgcaggagaagaccaaacacaaatctgaggtcgaaattcccgcgactgtcacagccttcgtgtttgaggaagacggtgccccagtaccagccttgcgtcagcatgcccaaaaacaacagaaagagaaaacccgatggctgaatacacccaacacttaccttagggtgaatgttgccgatgaggtgcagcgctcaatgggatcaccgcgccctaagacaacttggatgaaggccgacgaagtagaaaaaagcagttcaggcatgccaattcgaatcgaaaaccctaatcagttcgttcctttatacactgatccccaggaagtgcttgagatgaggaacaagatcagagaacaaaatagacaagacgtgaagtctgcaggccctcagtcacaactgcttgcctccgtaatcgctgagaagagtcgaagcccatctacagagtcacaactcatgagcaagggcgatgaagatactaaagatgacagcgaagaaaccgtccctaaccccttctcacagctgaccgaccaggagctggaagagtataagaaagaggtggagcgcaagaaactggaactggatggtgagaaggagaccgcccctgaggagcctggatccccagcgaagagcgcaccagcctcccctgtgcagtccccagccaaagaggctgagaccaagtcccccctggtgtcaccatccaaatccctcgaagagggtacaaaaaagacagaaacttctaaagcagctaccacagagccagaaaccacccagcctgaaggcgtagttgtgaacggtagagaagaggagcagaccgctgaagagattctgtctaagggcctcagtcagatgaccacctccgctgacacagatgttgacacaagtaaggataaaacagaatccgtgacttccggtccaatgtccccagaaggttcaccgtctaaaagcccttcgaagaaaaaaaagaagtttcgcacgcccagtttcctcaaaaaaagcaaaaagaaggaaaaggtggagagctag

SEQ ID NO: 119137 - DNA, 54 bp, Artificial Sequence
  derived and/or modified sequence
atgtcagaggaaactgttcctgaagcggccagcccacccccaccccagggttag

SEQ ID NO: 119138 - DNA, 5856 bp, Artificial Sequence
  derived and/or modified sequence
gggaaatggctttaattctgacggcagggctgtgagggactagcgggaacccgagccttttgtcaaggaactgcggcgtcggtggccagtcatccccgccgccgcggagccgctgcactgctgggggatctcccagcagctctgacgagcgcgggctgcagcatgggcagaaaacgctgccctgcagattagctgggtggattttttaagcgcaccccaccccccaaacccataaaataacaaaaccaacccgcagtggccgaccggagatagctaagatgccgcgcaggagtttccacctggatgtttgaggttgtgtagatgtggccggcacccttgagagtggagctagggggtgcagactgagcagtgaacagaaggagccttggacagggctgggccagcctcccgagttccaggagcgaattgcaaacccaccgggaaaatgagcgaagagacggtccccgaggctgcctcgccgccgcccccgcaggggcagccttactttgaccgcttctcagaggacgaccccgagtacatgcgccttcgcaaccgggcggcggacctgcggcaggacttcaacctgatggagcagaagaagcgcgtcaccatgatcctgcagagtccctctttcagggaggagctggaaggcctcatccaggagcagatgaagaaggggaacaactcctccaacatctgggccctgcgacagatcgcggacttcatggccagcacctcccacgcagtcttcccgacatcttccatgaatgtctccatgatgacgcctatcaatgacctccacacagctgactccctgaacctggccaaaggggagcggctcatgcggtgcaagatcagcagtgtctaccgactcctggacctctatggctgggcccagctgagtgacacctatgtcacgttgagagtcagcaaggagcaggaccacttcctgatcagccctaagggagtttcttgcagtgaagtcacagcgtccagcctgatcaaggtgaacattctgggagaggtggtggagaagggcagcagctgcttcccagtggacaccacaggcttctgtctgcactcggccatctatgcagcgaggcccgacgtgcgctgcatcatccacctgcacacaccggccacagcagcggtgtcggccatgaagtggggcctcctgcctgtctcccacaatgccctgctggtgggggacatggcctattatgacttcaatggggaaatggagcaggaagccgatcggatcaacctgcagaagtgccttggacccacctgcaagatcctggtgctaagaaaccatggagtggttgctctgggtgacacggtagaggaggcattttacaagatcttccacctgcaggctgcatgtgagatacaggtgtcggctctgtccagtgccgggggagtggagaacctcatcctcctggagcaggagaagcaccggccccatgaggtgggctccgtgcagtgggccgggagcacctttgggcctatgcagaagagtcggctgggggagcatgagtttgaggccctcatgaggatgctggacaacctgggctacagaacaggttacacgtatcgccacccctttgttcaagagaaaaccaaacacaaaagtgaggtggagattccagccacggtcacagccttcgtgtttgaggaggacggtgccccggtgcccgccctgcgacagcatgcccagaagcagcagaaggagaagacccgctggctcaatacgcccaacacctacctgcgggtcaatgtggccgatgaggtccagaggagcatgggcagcccccgacccaagaccacgtggatgaaggctgacgaggtggagaaatccagcagtggcatgccgattcgcatcgaaaacccaaaccaatttgtgcctctctatactgacccccaggaagtactggagatgaggaacaagattcgagaacaaaaccgacaagatgtgaagtcagcggggcctcagtcccagctcctggcgagcgtcattgccgagaagagccgaagcccgtctacagagagccagctgatgtccaagggagacgaggataccaaagacgattcagaggagacggtgcccaaccccttcagccaactcactgaccaggagttggaggagtacaagaaagaggtggagaggaagaaactagaacttgatggagagaaagaaactgccccagaagagcctggctcacctgcaaagtctgcacctgcttctccagtgcagagcccagcgaaggaggcagagacaaagagccctttagtctctccttccaagtctttagaggaaggtactaagaagacagaaacaagcaaagccgccaccacagagcccgaaacaacccagccggaaggggtggtggtcaacgggagggaggaggagcagacggcagaggaaatcctcagcaaaggcctgagccagatgaccaccagtgctgacacggatgttgatacctctaaggacaaaaccgagtcggtcaccagcggccccatgtccccagagggctcaccttccaagtctccctcaaagaagaaaaagaaattccgaaccccctccttcctgaaaaagagcaaaaagaaggagaaagtggagtcctgattcatgacacccttgggctccctcctgcctcctctctctcctccccttcccttctcccatctctgtccctgcaagcacagggctaaggagggatagagtaggaccctggaccacattcggaaggggaacttagagatcacccgaccaacccttcgttttacagttgcccaagagaaatcaggtgacttgcccaaggtcacacagctagttagcggcagagcctgcactcgaattcaggtctcctgacttccagtccagtgctccttctactacacaacactgcctagttgtgggctgcctttgtttggatgctgtccaccaatctgagcctagggcaagaaggccagaaatgggccgtgagctctcacaggctcagactaaatcagaggtcaaggcttcccctgagtaaggtccatttcttcccaggaatccaatctcctgtggatggagctatctctacatttaaaaatctcttctcttttccactttgggtccctgccctgctgctcaaagtgactagccaaattgacccctccaacagaaagtaatctttgttcccaagggctgatggcttagcttgtactaccccaaacattaaccctgagctttcttcatggaacctcttgaatgatggatggaagagctataagaggtggtaggcataggggcaagccatgtaagctgaggattggggatggtttcatcaacataagaggccaggaacttgacccctttgaattgtgcatctcaggcacttcaaaactaaaaccaaatttagcataggaaaaagttgtttaatgctcagggcagaaatttggggaagttgaaatcctctgttggctttgggttgtataaggaggatcaaaacaacagaggaaatgctgactttctagctttgcatgacacctggagcaatgcactgtacctgcctcactcctgtccagtggtcaggtttcccctgaccttccctcacccccagaaacacttgcttacagaccgaaactggcatcttactcttggcaccttgacttgcaccctctgaggttccaactcagtcattctttgtccagcagaggagaatcagaaatgagcccttcaggattaatcctcttgcaccagctctcagagaaatgctgggtatccctgtccttgtccctatctgtccatcctggggcctggtaatggccacagttattgttttaaatgccaacactgtcttctcatgttcttccgtggggcattgattaatgagcatttgttggctcctaaaaattagacaatccattctcttgaaagcaccgtgtcttgaaagaatatttttccttttgatctgactatcgtgaaaatatttttgaaagttcttaatcatagttttccacttttgagcacttgctatctatagacactgtgcaggcttcacatacattacattctttaaccctcacagtaatcctttgaggggggtaagatcattcccattttgtgggtgaggaaattgaccccctaaaatgataattgacttgtcccagctgacttggctagaaagatctggatcctggatttgaatccaggtcagtctgagtccagagcccttgctcttaacagctatggtgaacagacaactttaatccccaggggtggtggttttcatccaggatttgtctctatgactgttctccattgcataatgttagcacgtgaagcaaaggtagggaacaccctgtgctcatcctcatcactgcacgtgaagttcctggtcaatgtggactgtggtgatgctactgtgtgcctctgacaaaggagaggcaagagccttctggttggggcgggaaataccatccatagttggctatttcttgagaaggaaggaaactgacctaggaccaaggtaaacctgacactgtgtctctctagtgcagattcctaactgctaccccaggctccatctctgttctacttcctgattgggtcaaattttaggagggacaacccactcatgcctcagaaaaatctgtcatatgggaaatgcctttaaaagccaatcccttgatgccttcttttaaaaagtagatttcacacttattcatttatccttacatggtatttgttaaggatccactgagcaccaggcattatgctgacgttgaaagagagccatcattatgactagaataataagtggcaaacgatgttgtgagaatggtgaacacgacctctgatgcagccttttgtgtgcgagttgttctacttcgggggtgatgttgattgcctctgcattcaacacactctattcccttgacaatgaggcctcacttaggcctcattgggtggagtcttgctgcagcattattctgggaatttatgccatgggcccactttctattgatagatgaacctgtcagttggttcattcctcatgcattccaaaaacatgcattgagcttgggtcaagggccaggcatgaggataggcatagttcctgccctcaagaagttcatgagcataggaggtgtatagacaaattgcaaaacaggcaagggtaccaaggtggcataagaaagcatcaattaactatcttggggaccagagaaaccctgagagaagcaatggctgctaaggttttaaaacaaagagtaaatttccagtagaatgaaaggattggcagggcatgccacaatgagggaagaatgtgcaaaggtgtggacgcatgaaatgccatgatgggttccgctgagcaacgtggcattgccagagcatgatgtggaagctcaggggttgaggggtcccttcataggtaggcagggctgaatcctaaggaaactggtaggaagtgtggaggagctagacttgtcatggaaggggtttggagccactggagcctttaaatcaggatagagtcatgatcagaattgcattttaggaaaatccctttggtggctgaatggagactgtggactggatgggcgtgggatggtggcatgggagctatgaggcctttttgaaatgtcaatactaaaacatagttgatggcctgctttacacgatgtttcctctacagcagatagtgagtttccaacacaaaatttatttccataaaagtctttggataaagcaccttaagagggattttcaacaaggagaggggagcattcaaagagctaatgtttccagttttattttgtcttggtgtagaattgctgggagaggtgtccagccatcctgccatttct

SEQ ID NO: 119139 - DNA, 3745 bp, Artificial Sequence
  derived and/or modified sequence
catttcctcccagcctcgtgcgggaaatggctttaattctgacggcagggctgtgagggactagcgggaacccgagccttttgtcaaggaactgcggcgtcggtggccagtcatccccgccgccgcggagccgctgcactgctgggggatctcccagcagctctgacgagcgcgggctgcagcatgggcagaaaacgctgccctgcagattagctgggtggattttttaagcgcaccccaccccccaaacccataaaataacaaaaccaacccgcagtggccgaccggagatagctaagatgccgcgcaggagtttccacctggatgtttgaggttgtgtagatgtggccggcacccttgagagtggagctagggggtgcagactgagcagtgaacagaaggagccttggacagggctgggccagcctcccgagttccaggagcgaattgcaaacccaccgggaaaatgagcgaagagacggtccccgaggctgcctcgccgccgcccccgcaggggcagccttactttgaccgcttctcagaggacgaccccgagtacatgcgccttcgcaaccgggcggcggacctgcggcaggacttcaacctgatggagcagaagaagcgcgtcaccatgatcctgcagagtccctctttcagggaggagctggaaggcctcatccaggagcagatgaagaaggggaacaactcctccaacatctgggccctgcgacagatcgcggacttcatggccagcacctcccacgcagtcttcccgacatcttccatgaatgtctccatgatgacgcctatcaatgacctccacacagctgactccctgaacctggccaaaggggagcggctcatgcggtgcaagatcagcagtgtctaccgactcctggacctctatggctgggcccagctgagtgacacctatgtcacgttgagagtcagcaaggagcaggaccacttcctgatcagccctaagggagtttcttgcagtgaagtcacagcgtccagcctgatcaaggtgaacattctgggagaggtggtggagaagggcagcagctgcttcccagtggacaccacaggcttctgtctgcactcggccatctatgcagcgaggcccgacgtgcgctgcatcatccacctgcacacaccggccacagcagcggtgtcggccatgaagtggggcctcctgcctgtctcccacaatgccctgctggtgggggacatggcctattatgacttcaatggggaaatggagcaggaagccgatcggatcaacctgcagaagtgccttggacccacctgcaagatcctggtgctaagaaaccatggagtggttgctctgggtgacacggtagaggaggcattttacaagatcttccacctgcaggctgcatgtgagatacaggtgtcggctctgtccagtgccgggggagtggagaacctcatcctcctggagcaggagaagcaccggccccatgaggtgggctccgtgcagtgggccgggagcacctttgggcctatgcagaagagtcggctgggggagcatgagtttgaggccctcatgaggatgctggacaacctgggctacagaacaggttacacgtatcgccacccctttgttcaagagaaaaccaaacacaaaagtgaggtggagattccagccacggtcacagccttcgtgtttgaggaggacggtgccccggtgcccgccctgcgacagcatgcccagaagcagcagaaggagaagacccgctggctcaatacgcccaacacctacctgcgggtcaatgtggccgatgaggtccagaggagcatgggcagcccccgacccaagaccacgtggatgaaggctgacgaggtggagaaatccagcagtggcatgccgattcgcatcgaaaacccaaaccaatttgtgcctctctatactgacccccaggaagtactggagatgaggaacaagattcgagaacaaaaccgacaagatgtgaagtcagcggggcctcagtcccagctcctggcgagcgtcattgccgagaagagccgaagcccgtctacagagagccagctgatgtccaagggagacgaggataccaaagacgattcagaggagacggtgcccaaccccttcagccaactcactgaccaggagttggaggagtacaagaaagaggtggagaggaagaaactagaacttgatggagagaaagaaactgccccagaagagcctggctcacctgcaaagtctgcacctgcttctccagtgcagagcccagcgaaggaggcagagacaaagagccctttagtctctccttccaagtctttagaggaaggtactaagaagacagaaacaagcaaagccgccaccacagagcccgaaacaacccagccggaaggggtggtggtcaacgggagggaggaggagcagacggcagaggaaatcctcagcaaaggcctgagccagatgaccaccagtgctgacacggatgttgatacctctaaggacaaaaccgagtcggtcaccagcggccccatgtccccagagggctcaccttccaagtctccctcaaagaagaaaaagaaattccgaaccccctccttcctgaaaaagagcaaaaagaaggagaaagtggagtcctgattcatgacacccttgggctccctcctgcctcctctctctcctccccttcccttctcccatctctgtccctgcaagcacagggctaaggagggatagagtaggaccctggaccacattcggaaggggaacttagagatcacccgaccaacccttcgttttacagttgcccaagagaaatcagattacctgagactgggtcatttataatgaacacagatttatttctctcacatctggaagctgggaagtccaagatcaaggcaccagcatttggtgaagccttctttctgtgtcatcccatggcagaagacagaagggcaagagaggaaaccggtccaagcaggatgccttcctttttctgacaggcagcccccagcagtaccatcacaaaccttggtctcttcttgtcaccagcaaagggatgaaggataagtgatgaggagactgaagcacagaggtgaagcagcttgcccaacgtcacactgctgcttagtgatagaggcagtgctagaccccggggctcctgaatgttactgttggaggctcttaacccactgggatcaagaaggtgtcaagagctagactctccctccaggagaatgaacacagacacaaaaccttgcatatatgcttccgggtaaagaacctgcctgcattttggtaccactacgtgctggcctgtcctgggcatgttatatcatgagaaggcagggaaggctgaatcattaaggacatgaatcagattgattctcgtggctttaaaaacaaacactacaggaccagcatgacccgccagcctgttatccacagaggcttgtggtctccattgaaaagaagcaaagacagcacgtcccaactcaaaagattgtgtcatcctaaaggtgaaaggaagagatgatccaagcaaatttaggaccaatagcagactcttcacactgcctggggatagagggaccaccctgggctcctcttactcctggatttacttggatgaccagactcaggacttcatttaaatagaatttggtttcataatggaatcttcagcttgaaatataaatttgtttctgtctccctctgccatctcagcctttcttg

SEQ ID NO: 119140 - DNA, 3741 bp, Artificial Sequence
  derived and/or modified sequence
aaaggtttctggtgatgatgtagcatccgaggctcttaggaaatcggggctgcaagcactggcccctgcttggggatggtgggaccctcgcccggagcgtaacgcctgacagtttccacctggatgtttgaggttgtgtagatgtggccggcacccttgagagtggagctagggggtgcagactgagcagtgaacagaaggagccttggacagggctgggccagcctcccgagttccaggagcgaattgcaaacccaccgggaaaatgagcgaagagacggtccccgaggctgcctcgccgccgcccccgcaggggcagccttactttgaccgcttctcagaggacgaccccgagtacatgcgccttcgcaaccgggcggcggacctgcggcaggacttcaacctgatggagcagaagaagcgcgtcaccatgatcctgcagagtccctctttcagggaggagctggaaggcctcatccaggagcagatgaagaaggggaacaactcctccaacatctgggccctgcgacagatcgcggacttcatggccagcacctcccacgcagtcttcccgacatcttccatgaatgtctccatgatgacgcctatcaatgacctccacacagctgactccctgaacctggccaaaggggagcggctcatgcggtgcaagatcagcagtgtctaccgactcctggacctctatggctgggcccagctgagtgacacctatgtcacgttgagagtcagcaaggagcaggaccacttcctgatcagccctaagggagtttcttgcagtgaagtcacagcgtccagcctgatcaaggtgaacattctgggagaggtggtggagaagggcagcagctgcttcccagtggacaccacaggcttctgtctgcactcggccatctatgcagcgaggcccgacgtgcgctgcatcatccacctgcacacaccggccacagcagcggtgtcggccatgaagtggggcctcctgcctgtctcccacaatgccctgctggtgggggacatggcctattatgacttcaatggggaaatggagcaggaagccgatcggatcaacctgcagaagtgccttggacccacctgcaagatcctggtgctaagaaaccatggagtggttgctctgggtgacacggtagaggaggcattttacaagatcttccacctgcaggctgcatgtgagatacaggtgtcggctctgtccagtgccgggggagtggagaacctcatcctcctggagcaggagaagcaccggccccatgaggtgggctccgtgcagtgggccgggagcacctttgggcctatgcagaagagtcggctgggggagcatgagtttgaggccctcatgaggatgctggacaacctgggctacagaacaggttacacgtatcgccacccctttgttcaagagaaaaccaaacacaaaagtgaggtggagattccagccacggtcacagccttcgtgtttgaggaggacggtgccccggtgcccgccctgcgacagcatgcccagaagcagcagaaggagaagacccgctggctcaatacgcccaacacctacctgcgggtcaatgtggccgatgaggtccagaggagcatgggcagcccccgacccaagaccacgtggatgaaggctgacgaggtggagaaatccagcagtggcatgccgattcgcatcgaaaacccaaaccaatttgtgcctctctatactgacccccaggaagtactggagatgaggaacaagattcgagaacaaaaccgacaagatgtgaagtcagcggggcctcagtcccagctcctggcgagcgtcattgccgagaagagccgaagcccgtctacagagagccagctgatgtccaagggagacgaggataccaaagacgattcagaggagacggtgcccaaccccttcagccaactcactgaccaggagttggaggagtacaagaaagaggtggagaggaagaaactagaacttgatggagagaaagaaactgccccagaagagcctggctcacctgcaaagtctgcacctgcttctccagtgcagagcccagcgaaggaggcagagacaaagagccctttagtctctccttccaagtctttagaggaaggtactaagaagacagaaacaagcaaagccgccaccacagagcccgaaacaacccagccggaaggggtggtggtcaacgggagggaggaggagcagacggcagaggaaatcctcagcaaaggcctgagccagatgaccaccagtgctgacacggatgttgatacctctaaggacaaaaccgagtcggtcaccagcggccccatgtccccagagggctcaccttccaagtctccctcaaagaagaaaaagaaattccgaaccccctccttcctgaaaaagagcaaaaagaaggagaaagtggagtcctgattcatgacacccttgggctccctcctgcctcctctctctcctccccttcccttctcccatctctgtccctgcaagcacagggctaaggagggatagagtaggaccctggaccacattcggaaggggaacttagagatcacccgaccaacccttcgttttacagttgcccaagagaaatcaggtgacttgcccaaggtcacacagctagttagcggcagagcctgcactcgaattcaggtctcctgacttccagtccagtgctccttctactacacaacactgcctagttgtgggctgcctttgtttggatgctgtccaccaatctgagcctagggcaagaaggccagaaatgggccgtgagctctcacaggctcagactaaatcagaggtcaaggcttcccctgagtaaggtccatttcttcccaggaatccaatctcctgtggatggagctatctctacatttaaaaatctcttctcttttccactttgggtccctgccctgctgctcaaagtgactagccaaattgacccctccaacagaaagtaatctttgttcccaagggctgatggcttagcttgtactaccccaaacattaaccctgagctttcttcatggaacctcttgaatgatggatggaagagctataagaggtggtaggcataggggcaagccatgtaagctgaggattggggatggtttcatcaacataagaggccaggaacttgacccctttgaattgtgcatctcaggcacttcaaaactaaaaccaaatttagcataggaaaaagttgtttaatgctcagggcagaaatttggggaagttgaaatcctctgttggctttgggttgtataaggaggatcaaaacaacagaggaaatgctgactttctagctttgcatgacacctggagcaatgcactgtacctgcctcactcctgtccagtggtcaggtttcccctgaccttccctcacccccagaaacacttgcttacagaccgaaactggcatcttactcttggcaccttgacttgcaccctctgaggttccaactcagtcattctttgtccagcagaggagaatcagaaatgagcccttcaggattaatcctcttgcaccagctctcagagaaatgctgggtatccctgtccttgtccctatctgtccatcctggggcctggtaatggccacagttattgttttaaatgccaacactgtcttctcatgttcttccgtggggcattgattaatgagcatttgttggctcctaaaaattagacaatccattctcttgaaa

SEQ ID NO: 119141 - DNA, 2181 bp, Artificial Sequence
  derived and/or modified sequence
atgtctgaggagaccgtgcctgaggccgccagccccccaccaccccagggccagccctactttgaccgcttctctgaagatgatcctgagtacatgaggctgaggaacagagctgctgacctgcggcaggacttcaacctgatggagcagaagaagagggtgaccatgatcctgcagagccccagcttccgggaggagctggagggcctcatccaggagcagatgaagaagggcaacaacagcagcaacatctgggccctgcggcagattgctgacttcatggccagcaccagccatgctgtgttccccaccagctccatgaatgtgtccatgatgacccccatcaatgacctgcacacagctgacagcctgaacctggccaagggggagcggctgatgcgctgcaagatcagctctgtgtaccgcctgctggacctgtatggctgggcccagctgagtgacacctacgtgaccctgcgggtgtccaaggagcaggaccacttcctgatcagccccaagggcgtgtcctgcagcgaggtgacagccagcagcctcatcaaggtgaacatcctgggggaggtggtggagaagggcagcagctgcttccctgtggacaccaccggcttctgcctgcacagcgccatctatgctgcccggccagatgtgcgctgcatcatccacctgcacaccccagccacagctgctgtgtctgccatgaagtggggcctgctgcctgtgagccacaatgccctgctggtgggggacatggcctactatgacttcaacggggagatggagcaggaggccgaccgcatcaacctgcagaagtgcctgggccccacctgcaagatcctggtgctgaggaaccacggcgtggtggccctgggggacacagtggaggaggccttctacaagatcttccacctgcaggccgcctgtgagatccaggtgtctgccctgagcagcgctggaggagtggagaacctgatcctgctggagcaggagaagcaccggccccatgaggtgggctctgtgcagtgggccggcagcaccttcggccccatgcagaagagccggctgggggagcatgaatttgaggccctgatgaggatgctggacaacctgggctacagaacaggctacacctaccgccacccctttgtgcaggagaagaccaagcacaagtctgaggtggagatcccagccaccgtgacagcctttgtgtttgaagaagatggagcccctgtgcctgccctgcggcagcacgcccagaagcagcagaaggagaagacccgctggctgaacacccccaacacctacctgcgggtgaatgtggctgatgaggtgcagaggtccatgggcagcccccggcccaagaccacctggatgaaggcagatgaggtggagaagagcagcagcggcatgcccatcagaattgagaaccccaaccagtttgtgcccctgtacacagacccccaggaggtgctggagatgaggaacaagatccgggagcagaaccggcaggatgtgaagtctgctggcccccagagccagctgctggcctctgtgattgctgagaagagccgcagccccagcacagagagccagctgatgagcaaaggagatgaggacaccaaggatgattctgaggagaccgtgcccaaccccttcagccagctgacagaccaggagctggaggagtacaagaaggaggtggagaggaagaagctggagctggatggagagaaggagacagcccctgaggagcccggcagccctgccaagagcgccccagccagccctgtgcagagccctgccaaggaggccgagaccaagagccccctggtgagccccagcaagagcctggaggagggcaccaagaagacagagaccagcaaggccgccaccacagagcctgagaccacccagcctgagggcgtggtggtgaatggccgggaggaggagcagacagctgaggagatcctgagcaagggcctgagccagatgaccaccagcgctgacacagatgtggacaccagcaaggacaagacagagagcgtgaccagcggccccatgagccctgagggcagccccagcaagagccccagcaagaagaagaagaagttccgcacccccagcttcctgaagaagagcaagaagaaggagaaggtggagagctag

SEQ ID NO: 119142 - DNA, 54 bp, Artificial Sequence
  derived and/or modified sequence
atgtctgaggagaccgtgcctgaggccgccagccccccaccaccccagggctag

SEQ ID NO: 119143 - DNA, 2181 bp, Artificial Sequence
  derived and/or modified sequence
atgagcgaggagaccgtgcccgaggccgccagccccccccccccccaggggcagccctatttcgaccggttctcagaggacgatccagaatacatgcgcttacgcaaccgcgccgctgacctcagacaggatttcaacctgatggaacagaagaagagggtgactatgatcctgcagtctccaagctttcgcgaggagcttgaggggctcatccaggagcaaatgaagaagggaaataacagttctaatatttgggcccttagacagatcgcagatttcatggcgtctacatcccatgcagtgtttccaaccagttccatgaacgtctctatgatgactccaattaacgacctccacactgccgattcactcaacttggcaaagggcgagcggctgatgagatgtaaaattagctcagtgtaccggctcctggacctgtatggatgggcacagttgtccgatacctacgtcacactcagggtgagcaaggaacaggatcactttcttattagtccaaaaggagtgtcttgcagcgaagttactgcctctagtctgattaaagttaacattctgggcgaagtggtggagaaggggtcctcttgttttcccgtcgacacaaccggattttgcttgcattcagccatttatgcagcaaggcctgatgtgagatgcattatacatctccatacccccgccacagccgcggtcagtgcgatgaagtgggggctgctgcctgtgagtcataacgctctcctcgtcggcgacatggcctactacgatttcaatggcgaaatggagcaggaggcggaccgtatcaatctgcaaaagtgccttgggcctacatgtaagatcctggtccttcgaaatcatggagttgtcgccctgggtgacactgtggaggaagcattctataaaatatttcatctgcaagccgcatgcgagatccaggtgtccgcgctttctagtgccgggggtgttgaaaatttgatactgctggagcaggaaaaacaccgcccgcacgaagtggggtctgtgcagtgggccggcagcacctttggtccaatgcagaaatccaggctgggcgaacatgaatttgaagccctgatgagaatgctagacaatctagggtatcgaaccggatatacataccgccatccttttgtacaggaaaaaacgaaacataagtcagaagtggagatcccggcaacagtgactgccttcgtcttcgaagaggacggggcccctgtcccggccttgcgccagcacgcccagaagcaacagaaagagaaaactcgatggctgaacacacccaacacgtacttgcgggtcaacgtcgccgatgaggtgcaaagatcaatgggatcgcccaggcccaagactacttggatgaaagccgacgaggtggagaaaagctcgagcgggatgcctataagaatcgaaaatcctaaccagttcgtccctctctataccgacccccaggaagttctcgaaatgagaaacaagatccgcgagcagaatagacaagacgtgaagagcgcagggccacaaagtcagctcctggcaagcgtgattgccgagaagtccaggtcccccagcacagagtcacagctcatgtcgaaaggagacgaagacacaaaggacgatagtgaagaaactgtgccgaacccattctcacaacttacagatcaggagcttgaagagtataagaaggaagtggagaggaagaaactagaactcgacggagaaaaagaaactgcgccggaggagccagggagccctgccaaaagcgctccagcctcacctgtccagtcaccagccaaagaagccgagaccaagtcacctcttgtgtccccctctaagtcattggaggaggggacaaagaagacagagacctccaaggcagctacaactgaaccagaaacaactcagcctgagggagtggtggtgaacggtagagaagaagagcaaaccgcagaagagatcctctcaaaggggttatctcagatgactacctctgccgataccgacgttgacaccagtaaagataaaactgagtctgtgactagcgggccgatgagcccagaaggtagcccgagtaaatctccctcaaaaaaaaagaagaaattccggacccctagttttctcaaaaagtctaagaagaaagaaaaagttgaaagctag

SEQ ID NO: 119144 - DNA, 2181 bp, Artificial Sequence
  derived and/or modified sequence
atgagcgaggagaccgtgcccgaggccgccagccccccccccccccaaggccaaccatatttcgaccgcttttctgaggatgatccagagtacatgaggctccgaaaccgtgctgccgatttgcggcaggacttcaaccttatggaacagaagaaaagagtgacgatgattttacagtctccgtcttttcgtgaggagctcgaaggactgattcaggagcagatgaaaaaaggtaataattcaagcaacatctgggcactccgccagattgcagacttcatggcttcaaccagtcatgcagtgttccctaccagttcgatgaacgtgagcatgatgacccctatcaacgacctgcatactgccgacagcctcaacttggctaaaggagaacggttaatgaggtgcaaaattagttctgtctatcgtctcctcgacctgtatggctgggcccagctgtctgacacttatgttacactccgcgtgtctaaggagcaggaccactttctcattagtcccaagggcgtgtcttgctctgaggtgactgctagctccctgatcaaagtgaatattctgggcgaagtcgtggagaagggttcctcctgcttcccagtggacaccaccggcttttgtctccattctgctatctatgccgcccgccctgacgtgagatgtatcatccatctgcacaccccggccacagctgccgtatccgccatgaagtggggtttactccctgtgagtcacaacgctcttctggtcggggacatggcttactatgactttaatggagaaatggaacaggaagctgacagaattaacttgcagaagtgcttgggccccacatgtaaaattttggttctccggaatcacggtgtggtcgctctcggcgacactgtggaagaggcgttttataagatatttcatctgcaggcagcctgcgaaatccaggtgtctgctctgtcttccgctggtggggtggagaatctcattctgttggagcaggagaagcatcgcccacacgaagttgggtcggttcaatgggctggttccacctttggccctatgcaaaaaagccggctgggcgagcacgaattcgaggctctaatgcgaatgcttgataacttaggatacaggaccggatacacataccgacatccatttgtacaggagaaaactaaacacaagagtgaagtggaaatccccgcgacggtgacagcattcgtgtttgaagaagatggggccccagtgccagctctccgtcagcacgctcagaagcaacagaaagaaaagacacgttggctgaacacaccgaacacttatctgcgcgttaatgtggcggatgaggtccagcgtagcatggggtcaccaagaccaaagacaacctggatgaaggcagatgaggtggaaaagtcgagcagtgggatgccaataaggattgaaaatcccaatcagtttgtgccactgtacacggacccgcaggaggtgctcgagatgaggaataaaatccgtgaacagaatcgtcaggatgtgaaatctgctggaccccagtctcaactgctcgcctcagtaattgccgaaaaaagtcgtagcccaagcacagagagtcagctgatgagtaagggtgatgaggataccaaggatgacagtgaggagacagtacctaatccgtttagccagctgacagatcaagagttggaggaatataagaaagaggtcgagaggaagaaactcgagctggatggcgaaaaggaaacggcccctgaggaaccgggtagtcccgctaagagtgctcctgcaagtccagtccagtctccagctaaagaagccgagaccaagtcacccctggtctctcccagcaaaagtttggaagagggtacgaaaaagacagagacctccaaagcagccacaacagaacccgaaacaacgcagcctgaaggggttgtggtgaacgggagggaggaagaacagaccgccgaggagatactctccaagggcctttcccaaatgaccaccagcgccgacactgacgtagatacatcaaaagacaagactgagagcgttaccagcggaccaatgtctcccgaaggatccccgagcaagtctcctagcaagaagaagaagaaatttaggaccccgtccttcctcaagaagtccaaaaaaaaagaaaaagtggaatcatag

SEQ ID NO: 119145 - DNA, 2181 bp, Artificial Sequence
  derived and/or modified sequence
atgagcgaggagaccgtgcccgaggccgccagccccccccccccccaggggcagccatatttcgacaggttctcagaagatgacccagagtacatgcggctgagaaatcgagctgcagacctgagacaggacttcaacttgatggagcagaagaagagagtgacaatgatactgcaaagtccctcattccgagaggagttggaaggcttaatccaggaacaaatgaagaagggcaacaattcttcgaatatttgggccctgcggcagattgccgacttcatggcctccacatcccacgctgtgttcccaacctccagtatgaacgtctccatgatgacgccgattaacgacctccacacggccgactcattgaacttggccaaaggcgagcggctgatgcgatgcaagattagttcagtctaccggctgctggacctgtacggctgggctcagctctcagatacctacgtgaccctcagggtgagtaaggaacaggaccacttcttgatttcaccaaagggcgtgtcttgcagcgaggtgactgcaagcagcctcataaaggttaacatcctaggggaggtagtggagaaggggtccagctgctttcctgttgataccacaggattctgtctgcacagcgccatctacgctgcccgaccagacgtccgctgcatcatccacctgcatacccccgccactgccgctgtgtctgcgatgaagtggggtctgttacctgtctctcacaatgccctgctggtcggcgacatggcctattacgattttaacggagagatggaacaagaagccgaccgtattaacttgcaaaagtgtttggggcccacgtgtaaaatccttgtcttgcgaaatcatggtgtcgtggcgttaggagacacagtggaagaggccttctacaaaatctttcatcttcaggcggcatgtgagatccaggtcagtgctctgagcagcgcaggcggagtggagaatctcattcttctggaacaggaaaaacatcggccacacgaggttggtagcgtgcagtgggctggttccacctttggcccaatgcagaaatctagactaggcgaacacgaatttgaggcgctgatgcgtatgcttgataacctgggctacaggaccggttacacttaccggcatccatttgtgcaggagaaaaccaagcacaaatctgaggtggagatacccgccaccgtgacagcgttcgttttcgaggaggacggcgcccccgtcccagccttgcggcagcatgcccagaagcagcagaaagagaagacaagatggttaaacacacctaatacatacctgcgggtgaacgtcgctgatgaggttcaacgctcgatgggctcccccagacctaagaccacttggatgaaggcagatgaggtcgagaagagcagttcaggaatgccaatcagaatcgaaaatcccaaccaattcgtcccactgtacacggatccccaggaggtgctggaaatgcggaacaagatcagggaacagaacaggcaagacgttaaatcagccggacctcaatcccagctgttggcaagcgtcatcgccgagaagagcaggtcaccctccactgagagtcaactgatgagcaaaggcgatgaggacaccaaggatgatagcgaggagaccgtgccaaatcccttttcccagctcacagaccaagagctggaggaatacaagaaagaagtggagagaaaaaagctggaactggacggcgagaaagagactgcacctgaagagccaggtagccctgctaagagtgcccccgcttctcccgtccagagcccggctaaggaggccgagaccaagtccccccttgtaagccctagtaagagtctggaagaaggcaccaaaaaaacagaaaccagcaaggcggcaacaactgagccagagactacacagccggagggtgtggttgtgaacgggcgggaagaggagcaaactgccgaagagattctctctaaggggctttcacagatgaccacgtcggcagatacggatgtggacacttcaaaagacaaaacagaaagcgtgacttccggcccaatgagcccagagggctcaccctccaagagtcccagtaagaagaagaaaaagttccgcactccttcctttttaaagaagtccaagaaaaaggagaaggtcgagagttag

SEQ ID NO: 119146 - DNA, 54 bp, Artificial Sequence
  derived and/or modified sequence
atgagcgaggagaccgtgcccgaggccgccagccccccccccccccagggatag

SEQ ID NO: 119147 - DNA, 2181 bp, Artificial Sequence
  derived and/or modified sequence
atgtctgaggaaacagtccctgaggccgcatcgcctccacctccccagggccagccttatttcgatcgctttagcgaggacgatcctgaatacatgcgactacgtaatcgagcagcagatttacgacaagatttcaacctcatggagcagaaaaagcgggtgactatgatcctgcagtctccctcttttcgggaggagcttgaggggttgattcaagagcagatgaaaaagggcaacaactcttcaaacatctgggccctgaggcagatcgccgatttcatggcatcaacttctcatgctgtctttcccaccagctcaatgaatgtgtcgatgatgacaccaatcaatgatcttcacacagctgactctcttaacctagccaagggcgagcgcctgatgcgctgtaagatatcctctgtatacaggctcctggatctatatggctgggcccagttatcagacacttatgttacgctccgcgtgagcaaggaacaggaccacttcctgattagccccaagggagtgtcctgtagcgaagtgactgcctcctccctgattaaagtgaacatccttggtgaggttgtggagaaagggagttcctgttttccagtcgacaccaccgggttttgtctccacagtgccatttacgcagccaggcctgatgtgcgctgtattattcacctgcacacaccagccactgcagccgtgtctgcgatgaaatggggattgctgccggtctctcataatgccctgctggtaggagacatggcttactatgactttaacggagagatggagcaggaggccgacaggatcaatctgcagaaatgtctcggccctacctgcaagatcctggttctgcggaaccacggagtggtggccctgggtgacaccgtggaagaggcgttttacaaaatctttcatttgcaggccgcttgcgaaatccaagtctctgccctgagcagcgctggcggtgttgagaacttgattctgctcgagcaagaaaaacatcgacctcatgaagtgggatccgtccaatgggcgggtagcacattcggcccaatgcaaaagtctcgcctgggtgagcatgagtttgaggctttaatgcggatgctggataatttgggatacagaaccgggtatacctatagacaccccttcgtgcaggagaaaacaaaacacaagagcgaggtagagattccggctactgtgactgccttcgtgtttgaggaagatggtgcacctgtacccgcacttcgccagcacgcccagaagcaacagaaggaaaagacccgctggcttaatactcccaatacctatttaagagtgaatgtcgctgatgaagtgcagaggtcaatggggtcgccacggccaaagaccacctggatgaaggcggatgaggtggaaaagtcatcatccggaatgcctattcgcattgaaaacccaaatcagttcgttccactgtacactgatcctcaggaggtgctggagatgaggaataaaataagggaacagaaccgacaggatgtcaagagtgcaggaccacagagccagctgttagcttctgttattgctgagaagtcgcgctcccctagcacagagtcccagcttatgtccaaaggcgatgaggacacaaaggacgattccgaagaaaccgttcccaatcccttctctcagctgactgaccaggaattggaggagtacaagaaggaggtggaacggaaaaagttggaacttgacggagaaaaggagactgccccagaagaacctggatccccggctaagtctgcccctgcctcacccgtacagtccccggctaaggaggcagaaaccaagtccccactggtctccccttcaaagtcacttgaggagggaaccaagaagactgaaacctcaaaggcggcaactacagaaccagaaaccactcagccagaaggcgtagtggtgaacggaagagaggaggagcaaactgctgaggaaatcctgagcaaaggcttgtcacagatgacaaccagcgccgacacggacgtcgacacctctaaagacaagacagagagtgtcacctcaggccctatgtctcctgaggggagcccctccaagagtccctctaagaaaaaaaagaagttccgaactccttccttcctgaagaaatctaagaagaaagaaaaagtcgaatcctag

SEQ ID NO: 119148 - DNA, 2181 bp, Artificial Sequence
  derived and/or modified sequence
atgtcggaagaaacggttccggaagcagcctctcctcccccaccccagggacagccatatttcgatcgtttctcagaggatgatcctgaatacatgcgacttaggaatagagcggctgatcttcgacaagactttaatctcatggaacagaagaaacgcgtcaccatgatcctgcagtctccctcctttagagaagaattggaaggacttattcaagaacaaatgaagaagggtaacaatagttctaacatatgggccttgaggcagatcgctgactttatggcctctacttcccatgccgtctttcctacttcttctatgaacgtatctatgatgacccccattaacgatctccacaccgccgacagcttgaacctggccaagggagaacgcctgatgaggtgcaaaatcagcagcgtctatcgcctcctggacctctatggttgggcccagttatcagatacctacgtgacactaagagtttctaaggaacaggaccactttctgatatcaccgaaaggtgtatcatgctctgaggtcactgccagttccctgataaaggtgaacatcttaggagaagtggtggagaaaggatcttcttgctttcctgtcgacaccaccggtttttgcctgcattccgccatctacgcagctcggccagatgtgcgctgtatcatacacctccacacacccgctaccgcagcagtctcagctatgaaatggggcctcttgcctgtctcccacaatgccttactagtgggcgatatggcttattatgactttaatggcgagatggagcaggaggctgacaggataaacttgcagaagtgcctgggaccaacttgcaaaatactggtgctgagaaatcacggggtcgtagctctcggcgataccgtggaagaggcgttctataagatcttccaccttcaggcagcatgcgaaatccaggtgtctgccctgtccagcgctggcggagttgagaaccttattctgctggagcaggaaaaacacagaccacacgaggtcggcagcgtgcagtgggccggaagtacgttcggccctatgcagaaaagtagactcggtgagcacgagttcgaggctctcatgaggatgctggataacctgggatatcgcaccggatatacctaccgccaccccttcgttcaggaaaaaactaaacacaaaagcgaggtggagataccagcaacagtcacagcatttgtgtttgaggaagatggggctcctgtgcctgcactgcgccagcacgcacagaagcaacaaaaggagaaaacccgttggctgaatacccctaacacatacctccgggtgaacgtggcagatgaggtccagcgctcaatggggtcacctcggcctaaaactacgtggatgaaggcggacgaagtggagaaatctagcagcggaatgccaatcaggattgagaatcctaaccagtttgtgcccctgtacactgacccccaggaagtgctcgagatgcgtaacaagattagagagcaaaatcggcaggacgtcaaatctgccggtccccagtcccagttgcttgcttctgtcatcgcagaaaagtcccgtagcccttctaccgaatcccagctcatgagtaagggtgacgaggacaccaaagacgactcagaagagacggtccctaatcctttcagtcaacttacggatcaagagctggaggagtacaaaaaggaagtggagcggaagaagctggaactcgatggagagaaagagacagcccctgaagagcctggctcacctgccaaatccgcccctgctagccccgtacaaagtcccgctaaggaagccgaaaccaagtcaccactagtcagcccctcaaaatccctggaggaagggaccaagaaaacagaaacaagcaaagccgcaacaacagaaccagagactacacagccagagggggtggttgtgaatgggagggaggaggaacaaaccgctgaggaaatactgtcaaaaggtctttcacagatgaccacgagtgctgacactgacgtcgacacttcaaaggacaaaactgaaagcgtaacgagtggcccaatgagtcccgaaggatccccaagcaaatctcctagtaaaaagaagaagaagtttcgtacaccaagctttctgaaaaaaagtaagaagaaggaaaaggtggagagctag

SEQ ID NO: 119149 - DNA, 2181 bp, Artificial Sequence
  derived and/or modified sequence
atgagcgaggagaccgtccccgaagccgcttccccaccacctcctcagggacagccgtatttcgaccggttctcagaggatgaccccgagtatatgaggttgcgcaaccgtgcagccgatttgcggcaggacttcaatctgatggagcagaaaaaacgggtgacaatgatccttcagagcccatcattcagggaagaattagaaggacttattcaggagcaaatgaagaagggaaataacagcagtaacatctgggcacttcggcaaatcgctgatttcatggcaagtacatctcacgcagtcttccccacttcatcaatgaatgtatccatgatgacaccaatcaatgatcttcatacggccgattcactcaatctcgccaagggagagcgcctcatgaggtgtaagatctcctctgtctacaggttactggatttgtacggctgggcccagctctctgacacgtatgtcacgctccgagtgtctaaagagcaagaccactttctgatttcccctaagggtgtgtcttgctcggaggtgacagcctcaagtctgatcaaagtgaacatactgggtgaggtggttgaaaaaggtagttcatgtttcccggttgatacaacaggtttctgcttacattccgctatctatgctgctcgtcccgatgttcgctgtataatacacttgcacactcctgccacagctgcagtatcagcaatgaaatggggcctactccctgtctctcataacgctctcctagttggggatatggcttactacgactttaatggagagatggaacaggaagccgacaggataaatctccagaagtgtctgggaccaacatgcaagatcctggtcctgaggaatcacggcgtggtggcccttggcgacaccgtggaagaggcattctacaagattttccatctgcaagccgcatgtgagatccaagtgtccgccctttcgtcagcgggaggggttgaaaatcttatccttctggaacaggagaaacatcgaccccatgaagttgggtccgtgcagtgggccggatcaacattcggccctatgcagaagagcaggctgggggaacatgaatttgaagccctgatgcgcatgctcgataacctcggttatcggacagggtacacttataggcacccttttgtacaggaaaaaaccaaacacaaatcagaggtggagatccccgctactgtgacagcttttgttttcgaggaggacggagccccagtgcccgctctgcgccaacacgcgcaaaaacagcagaaggagaaaactcgatggctcaacacaccaaatacataccttagagttaacgttgcagatgaagtgcagagaagtatgggctctcccaggcctaaaacaacctggatgaaagcagatgaggtggagaaatctagctccggaatgcctattaggattgagaatcccaatcagtttgtgcctttatatacagatccccaagaagtgctggagatgcgaaacaagattagagaacagaaccgccaagatgtgaagtcagccggaccgcagagccaactcctggcctcagttatcgccgagaaatcaagatctccttcaactgaatcacagttgatgtcaaaaggggatgaagacacaaaagatgatagtgaggaaactgtcccaaacccattctcccagttgactgatcaggagttggaggagtacaagaaggaggtcgagaggaaaaaattggaactggatggggagaaggaaacagctccagaagagccaggatcgcccgctaagtccgcgcctgccagtcccgtccagtccccagctaaggaagccgagacgaagtcacctctagtgtctccatccaaatccctggaggaggggacaaaaaagaccgagacaagcaaggccgctaccacggagcctgaaaccacacagccagaaggcgttgtagttaatggccgagaggaagaacagacagcggaagaaattctgtccaaaggactgagtcagatgaccacctcagccgatacagatgtggacacatctaaggacaagacagaatccgtcactagcggacctatgtctccggaggggagtccatccaaatccccctctaagaaaaaaaagaagttcaggacccccagctttctcaaaaagtcaaagaaaaaggagaaggtggaaagttag

SEQ ID NO: 119150 - DNA, 54 bp, Artificial Sequence
  derived and/or modified sequence
atgtccgaagagacggtacctgaagccgcatccccccctcctccacaggggtag

SEQ ID NO: 119151 - DNA, 2181 bp, Artificial Sequence
  derived and/or modified sequence
atgagcgaggagaccgtgcccgaggccgccagccccccccccccccagggccagccctacttcgacagattcagcgaggacgaccccgagtacatgagactgagaaacagagccgccgacctgagacaggacttcaacctgatggagcagaagaagagagtgaccatgatcctgcagagccccagcttcagagaggagctggagggcctgatccaggagcagatgaagaagggcaacaacagcagcaacatctgggccctgagacagatcgccgacttcatggccagcaccagccacgccgtgttccccaccagcagcatgaacgtgagcatgatgacccccatcaacgacctgcacaccgccgacagcctgaacctggccaagggcgagagactgatgagatgcaagatcagcagcgtgtacagactgctggacctgtacggctgggcccagctgagcgacacctacgtgaccctgagagtgagcaaggagcaggaccacttcctgatcagccccaagggcgtgagctgcagcgaggtgaccgccagcagcctgatcaaggtgaacatcctgggcgaggtggtggagaagggcagcagctgcttccccgtggacaccaccggcttctgcctgcacagcgccatctacgccgccagacccgacgtgagatgcatcatccacctgcacacccccgccaccgccgccgtgagcgccatgaagtggggcctgctgcccgtgagccacaacgccctgctggtgggcgacatggcctactacgacttcaacggcgagatggagcaggaggccgacagaatcaacctgcagaagtgcctgggccccacctgcaagatcctggtgctgagaaaccacggcgtggtggccctgggcgacaccgtggaggaggccttctacaagatcttccacctgcaggccgcctgcgagatccaggtgagcgccctgagcagcgccggcggcgtggagaacctgatcctgctggagcaggagaagcacagaccccacgaggtgggcagcgtgcagtgggccggcagcaccttcggccccatgcagaagagcagactgggcgagcacgagttcgaggccctgatgagaatgctggacaacctgggctacagaaccggctacacctacagacaccccttcgtgcaggagaagaccaagcacaagagcgaggtggagatccccgccaccgtgaccgccttcgtgttcgaggaggacggcgcccccgtgcccgccctgagacagcacgcccagaagcagcagaaggagaagaccagatggctgaacacccccaacacctacctgagagtgaacgtggccgacgaggtgcagagaagcatgggcagccccagacccaagaccacctggatgaaggccgacgaggtggagaagagcagcagcggcatgcccatcagaatcgagaaccccaaccagttcgtgcccctgtacaccgacccccaggaggtgctggagatgagaaacaagatcagagagcagaacagacaggacgtgaagagcgccggcccccagagccagctgctggccagcgtgatcgccgagaagagcagaagccccagcaccgagagccagctgatgagcaagggcgacgaggacaccaaggacgacagcgaggagaccgtgcccaaccccttcagccagctgaccgaccaggagctggaggagtacaagaaggaggtggagagaaagaagctggagctggacggcgagaaggagaccgcccccgaggagcccggcagccccgccaagagcgcccccgccagccccgtgcagagccccgccaaggaggccgagaccaagagccccctggtgagccccagcaagagcctggaggagggcaccaagaagaccgagaccagcaaggccgccaccaccgagcccgagaccacccagcccgagggcgtggtggtgaacggcagagaggaggagcagaccgccgaggagatcctgagcaagggcctgagccagatgaccaccagcgccgacaccgacgtggacaccagcaaggacaagaccgagagcgtgaccagcggccccatgagccccgagggcagccccagcaagagccccagcaagaagaagaagaagttcagaacccccagcttcctgaagaagagcaagaagaaggagaaggtggagagctag

SEQ ID NO: 119152 - DNA, 54 bp, Artificial Sequence
  derived and/or modified sequence
atgagcgaggagaccgtgcccgaggccgccagccccccccccccccagggctag

SEQ ID NO: 119153 - protein, 155 aa, Artificial Sequence
  derived and/or modified sequence
MAESSDKLYRVEYAKSGRASCKKCSESIPKDSLRMAIMVQSPMFDGKVPHWYHFSCFWKVGHSIRHPDVEVDGFSELRWDDQQKVKKTAEAGGVTGVYILGQHGHSAPTLKLPGGPRLREQSKPPPACPLPHVQIKRMVPMLFQQHLLDSASSVA

SEQ ID NO: 119154 - protein, 108 aa, Artificial Sequence
  derived and/or modified sequence
MAESSDKLYRVEYAKSGRASCKKCSESIPKDSLRMAIMVQSPMFDGKVPHWYHFSCFWKVGHSIRHPDVEVDGFSELRWDDQQKVKKTAEAGGVTEPPIPCGIEVMGR

SEQ ID NO: 119155 - protein, 1014 aa, Artificial Sequence
  derived and/or modified sequence
MAESSDKLYRVEYAKSGRASCKKCSESIPKDSLRMAIMVQSPMFDGKVPHWYHFSCFWKVGHSIRHPDVEVDGFSELRWDDQQKVKKTAEAGGVTGKGQDGIGSKAEKTLGDFAAEYAKSNRSTCKGCMEKIEKGQVRLSKKMVDPEKPQLGMIDRWYHPGCFVKNREELGFRPEYSASQLKGFSLLATEDKEALKKQLPGVKSEGKRKGDEVDGVDEVAKKKSKKEKDKDSKLEKALKAQNDLIWNIKDELKKVCSTNDLKELLIFNKQQVPSGESAILDRVADGMVFGALLPCEECSGQLVFKSDAYYCTGDVTAWTKCMVKTQTPNRKEWVTPKEFREISYLKKLKVKKQDRIFPPETSASVAATPPPSTASAPAAVNSSASADKPLSNMKILTLGKLSRNKDEVKAMIEKLGGKLTGTANKASLCISTKKEVEKMNKKMEEVKEANIRVVSEDFLQDVSASTKSLQELFLAHILSPWGAEVKAEPVEVVAPRGKSGAALSKKSKGQVKEEGINKSEKRMKLTLKGGAAVDPDSGLEHSAHVLEKGGKVFSATLGLVDIVKGTNSYYKLQLLEDDKENRYWIFRSWGRVGTVIGSNKLEQMPSKEDAIEHFMKLYEEKTGNAWHSKNFTKYPKKFYPLEIDYGQDEEAVKKLTVNPGTKSKLPKPVQDLIKMIFDVESMKKAMVEYEIDLQKMPLGKLSKRQIQAAYSILSEVQQAVSQGSSDSQILDLSNRFYTLIPHDFGMKKPPLLNNADSVQAKVEMLDNLLDIEVAYSLLRGGSDDSSKDPIDVNYEKLKTDIKVVDRDSEEAEIIRKYVKNTHATTHNAYDLEVIDIFKIEREGECQRYKPFKQLHNRRLLWHGSRTTNFAGILSQGLRIAPPEAPVTGYMFGKGIYFADMVSKSANYCHTSQGDPIGLILLGEVALGNMYELKHASHISKLPKGKHSVKGLGKTTPDPSANISLDGVDVPLGTGISSGVNDTSLLYNEYIVYDIAQVNLKYLLKLKFNFKTSLW

SEQ ID NO: 119156 - protein, 250 aa, Artificial Sequence
  derived and/or modified sequence
MAESSDKLYRVEYAKSGRASCKKCSESIPKDSLRMAIMVQSPMFDGKVPHWYHFSCFWKVGHSIRHPDVEVDGFSELRWDDQQKVKKTAEAGGVTGKGQDGIGSKAEKTLGDFAAEYAKSNRSTCKGCMEKIEKGQVRLSKKMVDPEKPQLGMIDRWYHPGCFVKNREELGFRPEYSASQLKGFSLLATEDKEALKKQLPGVKSEGKRKGDEVDGVDEVAKKKSKKEKDKKKKKKKKKERKKKKKKRKKK

SEQ ID NO: 119157 - DNA, 468 bp, Artificial Sequence
  derived and/or modified sequence
atggctgagagctccgacaaattatatcgggtggagtacgctaagtcgggccgggcttcctgcaagaaatgctctgaatcgattccaaaggattctttgagaatggccattatggtgcagagccctatgttcgacggcaaggtccctcattggtatcacttttcgtgcttttggaaagtaggccatagcattagacaccctgacgtggaagtcgatggattcagtgagcttcggtgggatgatcagcagaaggttaagaagacagccgaagctgggggcgtgactggagtctatatcctcgggcagcatgggcattctgcccctactctgaaactgcccgggggccccaggctccgggagcagtccaagcctcctccggcgtgtcctttgcctcatgtgcaaatcaagaggatggtacctatgctgttccagcaacacctgcttgattccgccagcagtgttgcatag

SEQ ID NO: 119158 - DNA, 327 bp, Artificial Sequence
  derived and/or modified sequence
atggcagagtctagcgacaaactgtatagagtagaatacgccaagtccggaagagcatcctgtaagaagtgtagtgaatctatcccaaaggatagtcttcgtatggcgatcatggtacagagcccaatgttcgacgggaaggtcccgcactggtaccatttctcgtgtttctggaaggtggggcatagtattcgacacccagacgtggaggtcgacggtttctccgagttacgttgggatgaccaacagaaggtcaagaaaacggccgaagccggtggagttaccgagcctcctatcccatgcggtattgaagtcatgggacgctag

SEQ ID NO: 119159 - DNA, 327 bp, Artificial Sequence
  derived and/or modified sequence
atggccgagtcctcagacaaattgtatagagttgagtacgccaagtcgggtcgcgcgagttgcaaaaaatgcagtgagtcgattccaaaagacagtctgcggatggccatcatggtgcagtcccctatgtttgatggcaaagttccacactggtaccatttcagctgcttttggaaggtcggtcattccatacggcatcctgacgtcgaagttgacgggttctctgaactgagatgggatgatcagcagaaagttaagaaaacggctgaggccggcggtgtgactgaaccaccaatcccgtgcggcatcgaagttatgggcaggtag

SEQ ID NO: 119160 - DNA, 3045 bp, Artificial Sequence
  derived and/or modified sequence
atggccgaatcctctgataagctgtaccgcgttgagtatgccaagagcgggagagcatcttgtaagaaatgttctgaatctatcccaaaggattcccttcggatggccattatggtacagtccccaatgttcgatggcaaagtcccacactggtatcactttagctgcttctggaaggtgggacattctatccggcacccggacgtagaagtagacggcttctccgagcttagatgggatgatcagcagaaggtgaaaaagacagccgaggctggtggggtaactggaaagggtcaggacggaatcggcagtaaggcagaaaaaaccctgggggactttgcggctgagtatgctaagtctaatcgcagcacctgcaaaggctgcatggagaagatcgaaaaagggcaagttcgtctttcaaagaaaatggtggaccccgaaaaacctcagttgggaatgatcgacagatggtatcaccccggctgttttgttaaaaaccgcgaagaattgggcttccggcccgaatatagcgcctcgcaactgaagggcttttccttgctcgcaaccgaagataaagaagccttaaaaaaacagcttcccggtgtaaagtccgaagggaagcgcaaaggtgatgaggtggatggagtcgacgaagtagctaagaagaagagcaaaaaggagaaagataaggattcaaaactcgaaaaggcactcaaggcccagaatgacctcatctggaacatcaaggatgaactgaaaaaagtgtgcagtaccaatgacctgaaagagctcttgatatttaacaagcaacaggtccctagcggagaaagcgccatcctggatcgcgtcgccgacggcatggttttcggtgctctgttgccatgtgaagagtgtagtggccaattagtattcaaatcagacgcatattactgcactggtgatgtcacagcgtggacgaaatgcatggtgaagacacagacaccgaaccgaaaagaatgggtgacccccaaagagtttcgcgagatctcatacctgaaaaaactgaaggttaagaaacaggatcgcatttttccacctgaaacttcagcttcagttgccgccacacccccccccagtactgcctcagctcctgccgcagtcaacagttccgcttcagcggataagccactatcgaacatgaagatcctgacactgggtaagctctcgagaaacaaggacgaagtcaaggccatgatagagaaattgggagggaagctcaccgggactgcaaataaagcatctctttgcatctcaactaaaaaagaggtggaaaagatgaataaaaaaatggaggaagtaaaagaagcaaatatcagagtggtatcagaggacttcctgcaagacgttagtgccagcacaaagtcattgcaggagttgtttctcgcccacattctctcaccctggggcgctgaggtgaaggccgaaccagttgaggtggtggcaccaagaggcaagagcggcgccgcactttctaaaaagagcaagggccaggtgaaggaggaggggatcaacaagtccgagaagcgcatgaagctaactctcaaggggggcgccgctgtggatcccgattctgggctggagcactccgcacacgttcttgagaagggcggaaaggttttctccgctacactcggcctggttgatattgtgaaggggaccaacagttactacaagctgcagctcctggaggatgataaggaaaatcgatactggattttccggtcctggggacgggttggtactgtgatcggttcaaataagcttgaacaaatgccgagtaaggaggacgccattgaacacttcatgaaactgtatgaagagaagactgggaacgcttggcactccaagaattttacaaagtaccctaagaagttctacccgttagaaattgattacggccaggacgaggaggccgtaaaaaagctcacagtaaatcctggcaccaagtctaaattacccaagcccgtgcaggatctgattaagatgatcttcgatgtagagagcatgaagaaagcaatggtggagtatgagattgacctgcagaaaatgccattgggtaagctgtcaaagcgccagattcaggccgcttactctatcctctcagaggtccaacaggcggtaagccagggctcatccgacagccagatcctagatctgagtaaccgcttctatactctaatcccccatgatttcggcatgaaaaagcccccgctcctcaacaacgccgattcagtgcaagccaaggtagagatgctggacaatctccttgatatcgaagttgcctactccctgcttcggggcggatccgacgatagcagcaaagaccctatcgacgtgaactatgaaaagctaaagactgacataaaagtcgtggaccgggattcagaggaagcagagatcattcggaagtatgtgaagaatacacacgccacaactcacaatgcctacgatctcgaagtcatagacatcttcaagatcgaaagagaaggagagtgtcagcgttataagccattcaagcagttacacaacaggcgccttctgtggcatggcagtcgcacaactaattttgcaggaattctgtcccagggtctgaggatcgcaccccccgaggcccccgttacaggatacatgtttgggaaggggatctacttcgctgacatggtttctaaaagtgccaattactgccatacgtcccagggcgatccgataggcttgatactgttaggtgaggtggctttgggcaacatgtatgaattgaagcacgccagtcatatcagtaagctgcctaaggggaagcatagtgttaaagggctgggaaagaccacgcctgacccgtccgccaacatatctctcgatggggtcgatgtaccgctaggaacaggaataagttccggtgtgaacgatacaagtctcctatataacgagtacattgtctatgatatcgcacaggtgaacctgaagtatcttttgaaattgaaattcaatttcaaaacatctctgtggtag

SEQ ID NO: 119161 - DNA, 753 bp, Artificial Sequence
  derived and/or modified sequence
atggctgagagctctgacaagctctaccgagtggagtatgctaaaagcgggcgcgcctcctgcaagaagtgctctgagtcgatacctaaggattctttgcgcatggcaattatggtgcagtccccgatgttcgatgggaaagtgccccattggtaccattttagttgtttctggaaagtgggtcatagcattcgccatcccgacgtggaagtggacggattctccgaattgcgttgggatgaccagcagaaagttaagaagactgcggaggccggcggcgtgaccggcaagggccaagatggcatcgggtccaaggcagagaaaactctgggcgatttcgctgcagagtatgctaaaagtaacaggtctacatgcaagggctgtatggagaagatcgaaaagggccaggtgaggctgtctaagaagatggtagaccccgagaagccgcagttgggaatgatcgacagatggtatcacccggggtgctttgtaaagaatcgcgaagagctgggatttcggcccgagtacagtgcgtctcagctgaaggggttctctctgttggccacagaagataaggaggctctgaaaaagcagctgcctggcgtaaagagcgagggcaagaggaagggggacgaagtagacggggtagacgaagttgctaaaaagaagtcgaaaaaggaaaaagacaagaagaagaagaagaaaaagaagaaggaacgtaagaagaaaaagaaaaagcggaaaaagaagtag

SEQ ID NO: 119162 - DNA, 468 bp, Artificial Sequence
  derived and/or modified sequence
atggccgagagcagtgacaagctgtacagagtggagtatgccaagagcggccgggccagctgcaagaagtgcagcgagagcatccccaaggacagcctgaggatggccatcatggtgcagagccccatgtttgatggcaaggtgccccactggtaccacttcagctgcttctggaaggtgggccacagcatccgccacccagatgtggaggtggatggcttcagcgagctgcgctgggatgaccagcagaaggtgaagaagacagctgaggccggcggcgtgactggagtgtacatcctgggccagcacggccacagcgcccccaccctgaagctgcccggcggcccccggctgcgggagcagagcaagcccccaccagcctgccccctgccccacgtgcagatcaagaggatggtgcccatgctgttccagcagcacctgctggacagcgccagctctgtggcctag

SEQ ID NO: 119163 - DNA, 327 bp, Artificial Sequence
  derived and/or modified sequence
atggccgagagcagtgacaagctgtacagagtggagtatgccaagagcggccgggccagctgcaagaagtgcagcgagagcatccccaaggacagcctgaggatggccatcatggtgcagagccccatgtttgatggcaaggtgccccactggtaccacttcagctgcttctggaaggtgggccacagcatccgccacccagatgtggaggtggatggcttcagcgagctgcgctgggatgaccagcagaaggtgaagaagacagctgaggccggcggcgtgacagagccccccatcccctgtggcatcgaggtgatgggccgctag

SEQ ID NO: 119164 - DNA, 3045 bp, Artificial Sequence
  derived and/or modified sequence
atggccgagagcagtgacaagctgtacagagtggagtatgccaagagcggccgggccagctgcaagaagtgcagcgagagcatccccaaggacagcctgaggatggccatcatggtgcagagccccatgtttgatggcaaggtgccccactggtaccacttcagctgcttctggaaggtgggccacagcatccgccacccagatgtggaggtggatggcttcagcgagctgcgctgggatgaccagcagaaggtgaagaagacagctgaggccggcggcgtgacaggcaagggccaggacggcatcggcagcaaggccgagaagaccctgggggactttgctgctgaatatgccaagagcaacagaagcacctgcaagggctgcatggagaagattgagaagggccaggtgcggctgagcaagaagatggtggaccctgagaagccccagctgggcatgattgaccgctggtaccaccctggctgctttgtgaagaaccgggaggagctgggcttccggcctgagtacagcgccagccagctgaagggcttcagcctgctggccacagaggacaaggaggccctgaagaagcagctgcccggggtgaagtctgagggcaagaggaaaggagatgaggtggatggagtggatgaggtggccaagaagaagagcaagaaggagaaggacaaggacagcaagctggagaaggccctgaaggcccagaatgacctgatctggaacatcaaggatgagctgaagaaggtgtgcagcaccaatgacctgaaggagctgctgatcttcaacaagcagcaggtgcccagcggggagagcgccatcctggacagagtggctgatggcatggtgtttggagccctgctgccctgtgaagaatgttctggccagctggtgttcaagagtgatgcctactactgcacaggagatgtgacagcctggaccaagtgcatggtgaagacccagacccccaacaggaaggagtgggtgacccccaaggagttccgggagatctcctacctgaagaagctgaaggtgaagaagcaggaccgcatcttccccccagagaccagcgcctctgtggccgccaccccaccacccagcacagccagcgccccagctgctgtgaacagcagcgccagcgctgacaagcccctgagcaacatgaagatcctgaccctgggcaagctgagcaggaacaaggatgaggtgaaggccatgattgagaagctgggcggcaagctgaccggcacagccaacaaggccagcctgtgcatcagcaccaagaaggaggtggagaagatgaacaagaagatggaggaggtgaaggaggccaacatccgggtggtgtctgaggacttcctgcaggatgtgtctgccagcaccaagagcctgcaggagctgttcctggcccacatcctgagcccctggggcgctgaggtgaaggccgagcctgtggaggtggtggccccccggggcaagtctggagctgccctgagcaagaagagcaagggccaggtgaaggaggagggcatcaacaagtctgagaagaggatgaagctgaccctgaagggcggcgctgctgtggaccctgattctggcctggagcacagcgcccacgtgctggagaagggcggcaaggtgttcagcgccaccctgggcctggtggacatcgtgaagggcaccaacagctactacaagctgcagctgctggaggatgacaaggagaaccgctactggatcttccgctcctggggccgggtgggcaccgtcatcggcagcaacaagctggagcagatgcccagcaaggaggatgccatcgagcacttcatgaagctgtatgaggagaagacaggaaatgcctggcacagcaagaacttcaccaagtaccccaagaagttctaccccctggagattgattatggccaggatgaggaggccgtgaagaagctgactgtgaaccctggcaccaagagcaagctgcccaagcctgtgcaggacctgatcaagatgatctttgatgtggagagcatgaagaaggccatggtggagtatgaaattgacctgcagaagatgcccctgggcaagctgagcaagaggcagatccaggccgcctacagcatcctgtctgaggtgcagcaggccgtgtcccagggcagcagtgacagccagatcctggacctgagcaaccgcttctacaccctcatcccccatgactttggcatgaagaagccacccctgctgaacaatgctgacagcgtgcaggccaaggtggagatgctggacaacctgctggacatcgaggtggcctacagcctgctgcggggcggcagtgatgacagcagcaaggaccccattgatgtgaactatgagaagctgaagacagacatcaaggtggtggaccgggacagcgaggaggccgagatcatcagaaaatatgtgaagaacacccacgccaccacccacaatgcctatgacctggaggtgattgacatcttcaagattgagcgggagggggagtgccagcgctacaagcccttcaagcagctgcacaacagaaggctgctgtggcacggcagcaggaccaccaactttgctggcatcctgagccagggcctgagaattgcccctcctgaggcccctgtgacaggctacatgtttgggaagggcatctactttgctgacatggtgtccaagagcgccaactactgccacaccagccagggcgaccccatcggcctcatcctgctgggggaggtggccctgggcaacatgtatgagctgaagcacgccagccacatcagcaagctgcccaagggcaagcacagcgtgaagggcctgggcaagaccaccccagaccccagcgccaacatcagcctggatggagtggatgtgcccctgggcaccggcatcagcagtggagtgaatgacaccagcctgctgtacaatgagtacatcgtgtatgacatcgcccaggtgaacctgaagtacctgctgaagctgaagttcaacttcaagaccagcctgtggtag

SEQ ID NO: 119165 - DNA, 753 bp, Artificial Sequence
  derived and/or modified sequence
atggccgagagcagtgacaagctgtacagagtggagtatgccaagagcggccgggccagctgcaagaagtgcagcgagagcatccccaaggacagcctgaggatggccatcatggtgcagagccccatgtttgatggcaaggtgccccactggtaccacttcagctgcttctggaaggtgggccacagcatccgccacccagatgtggaggtggatggcttcagcgagctgcgctgggatgaccagcagaaggtgaagaagacagctgaggccggcggcgtgacaggcaagggccaggacggcatcggcagcaaggccgagaagaccctgggggactttgctgctgaatatgccaagagcaacagaagcacctgcaagggctgcatggagaagattgagaagggccaggtgcggctgagcaagaagatggtggaccctgagaagccccagctgggcatgattgaccgctggtaccaccctggctgctttgtgaagaaccgggaggagctgggcttccggcctgagtacagcgccagccagctgaagggcttcagcctgctggccacagaggacaaggaggccctgaagaagcagctgcccggggtgaagtctgagggcaagaggaaaggagatgaggtggatggagtggatgaggtggccaagaagaagagcaagaaggagaaggacaagaagaagaagaagaagaagaagaaggagaggaagaagaagaagaagaagaggaagaagaagtag

SEQ ID NO: 119166 - DNA, 468 bp, Artificial Sequence
  derived and/or modified sequence
atggccgagagcagcgacaagctgtaccgggtggagtacgccaagagtggccgcgccagttgtaaaaaatgcagcgaaagcatccctaaagattcactccgcatggctatcatggtccaaagtcctatgttcgacggcaaagtgccacactggtatcacttttcctgcttttggaaggtgggccattctattaggcatcctgatgtcgaagtagatggattttccgagctccgctgggacgatcagcagaaagtgaaaaagacagctgaagccgggggagtgaccggggtctacatactgggccagcacggtcattcggcccctactctgaaactgcccggaggtcctagactcagagaacagtcaaagcccccgcccgcttgccctctgcctcacgtccagattaaacgcatggtacctatgctgttccagcagcaccttcttgacagcgcctcttctgtggcctag

SEQ ID NO: 119167 - DNA, 327 bp, Artificial Sequence
  derived and/or modified sequence
atggccgagagcagcgacaagctgtaccgggtggagtacgccaagagcggccgcgcctcttgcaagaagtgttccgagtccataccaaaggactccctcagaatggctattatggtccagagccccatgttcgatgggaaagtcccccactggtaccatttcagctgcttctggaaggttggccacagcatcagacacccggacgtcgaagttgacggcttctccgaacttagatgggatgatcagcaaaaggttaagaagactgccgaagcaggcggcgtgaccgaacctccaattccatgtggaatagaggttatgggtcgatag

SEQ ID NO: 119168 - DNA, 327 bp, Artificial Sequence
  derived and/or modified sequence
atggccgagagcagcgacaagctgtaccgggtggagtacgccaagtcggggagagccagttgtaaaaaatgcagtgagagtataccgaaagattccttgcggatggcgattatggtgcagtcaccgatgttcgacggcaaggttccacattggtatcacttcagctgtttctggaaggtgggacattcaatccgacatccagatgttgaggtggatggtttttccgaactgagatgggacgatcagcagaaagtcaaaaagacagcggaggcaggcggagttacagagccccccattccctgtggcattgaggtgatgggtagatag

SEQ ID NO: 119169 - DNA, 3045 bp, Artificial Sequence
  derived and/or modified sequence
atggccgagagcagcgacaagctgtaccgggtggagtacgccaagtcaggccgagcctcctgcaaaaagtgctcagaatctatacctaaggactctctgcggatggccattatggtgcagagtccaatgttcgacgggaaggtgccacattggtatcatttctcttgcttttggaaagtgggacattccatccgccatcccgacgtagaggtagatggtttctcggagctaagatgggacgatcaacagaaggtgaagaaaacggccgaagctggtggcgttactgggaaagggcaggatgggataggatccaaggcagagaaaacactgggggacttcgccgcagagtacgcaaagtctaatagaagcacttgcaagggatgcatggagaaaattgagaagggtcaggtgcggctctctaaaaagatggtggacccagagaagccacagctgggcatgatcgacagatggtatcaccccggctgcttcgtcaagaacagagaggaactcggctttcgtccagagtattccgctagtcagctgaagggctttagtctgctggccacagaagacaaggaagctctgaagaagcagctccccggggttaagtccgagggaaaacgcaagggtgatgaggtagacggagtggatgaagtagccaagaagaaaagcaagaaggaaaaagataaggattcaaagctggagaaggctcttaaggcccagaacgatctcatttggaacataaaagatgaactgaagaaggtgtgtagcaccaatgacctcaaggaattgttaatattcaacaaacaacaggtaccaagtggagagtctgcgatcctggacagggtggccgacgggatggtcttcggagctctcttgccatgtgaggagtgtagtggacagctcgtttttaagagtgacgcatattattgcacaggcgacgtgacggcatggaccaaatgcatggtgaagacccaaactccaaacaggaaggagtgggtaactcccaaggaattccgggagatttcctacctgaaaaagctgaaagtaaagaaacaggacagaatcttcccgcctgagacttctgcctccgttgcagctacccctccaccaagcaccgcttctgccccagcagctgtcaactcttccgccagcgcagataaacctctcagcaacatgaagattctcaccctcggcaaattatctcgaaataaagatgaggtgaaagctatgattgagaagctgggaggcaagctcacggggaccgccaacaaagcttcactgtgtatatccacaaagaaagaggtagagaagatgaacaagaagatggaggaggtgaaagaggctaacattcgcgtggtctccgaagacttcctgcaagatgtgtctgcttcgactaagagtctgcaggagctgttcctggcacatatcttatccccgtggggcgctgaggtcaaagctgaacccgtagaggtagtggcacctcggggcaaatcaggtgccgccctgagcaagaaatcaaaaggccaggttaaagaggagggcattaataagtctgagaaacgcatgaagctgacgttaaaaggcggggctgccgtggatccagactcaggcctagaacactcagcccatgtgcttgaaaaaggcggcaaggtgttcagcgccacactgggccttgtcgacattgtcaagggcacaaatagttactacaagttgcagctactcgaggacgacaaggaaaaccgttactggatctttcggagttggggcagggttggaacagtgataggctcgaacaagctggaacagatgccctctaaggaagacgccattgagcatttcatgaagctgtacgaggaaaagacaggaaacgcgtggcacagtaagaatttcaccaagtacccaaagaaattctatcccctggaaattgactacggacaagacgaagaggctgtgaaaaagctgacggttaaccccggaacgaagtctaaacttcctaaaccagtacaggatctgattaaaatgatattcgatgtagagtctatgaagaaagccatggtggaatatgagatcgacctccaaaagatgccactggggaaactctccaaacggcagatccaggctgcatattctatcctctcagaggtccagcaagccgtgtcacaaggctcatccgactcgcagattctggatttgagcaatcggttttacactcttattccacacgacttcggaatgaagaagccgcctcttttaaacaacgctgattcggtacaggcaaaagttgagatgctcgataacctgctggacattgaagtagcctatagtctgctgcgaggtggatccgacgacagcagtaaagatccgattgatgtcaactacgagaaacttaaaaccgacataaaagtggtcgacagggattccgaggaagctgagataatcaggaagtatgtaaaaaatactcatgctaccacacacaacgcatacgacctggaagtgatcgatatctttaagatcgagcgggaaggagaatgccagcggtacaagcccttcaaacaactgcacaatcgccgactgctctggcatggcagtcgcaccactaatttcgccggcatcctgagtcagggcttacgcattgcccccccagaggcacccgttaccggttatatgttcggtaagggcatttactttgccgacatggtgagcaagtcggctaattattgccacacttcacaaggggatcccataggcttaatcctcctgggtgaagtagccttgggaaatatgtatgagcttaagcatgcgtcccatatatccaagctgcctaagggcaaacattctgtgaaaggtttagggaaaacgacccccgacccctcagccaatatttccctggatggggtggatgtgccattaggcaccgggatttccagcggcgtgaacgatacaagcttgctatacaacgagtacatcgtgtacgacattgcgcaggtcaatctgaagtatctcctaaaattgaagttcaactttaaaactagcctatggtag

SEQ ID NO: 119170 - DNA, 753 bp, Artificial Sequence
  derived and/or modified sequence
atggccgagagcagcgacaagctgtaccgggtggagtacgccaagtcggggagggctagctgcaaaaagtgttccgagtcaatccccaaagactcactccggatggccatcatggtgcagtctcctatgttcgatgggaaagtgcctcactggtatcatttctcctgcttttggaaggtcggccactcaataaggcatcccgacgtggaggtggacggctttagcgaattgcgctgggacgaccagcagaaagtcaaaaaaaccgcagaggccggaggggttaccggcaaaggtcaggacggaattggatccaaagcggaaaagacgctcggcgattttgccgccgaatacgcaaaatctaatagaagtacatgcaaggggtgcatggagaaaattgaaaaaggccaggtacggctctctaagaagatggtggaccccgaaaagccacagttaggcatgattgatcgttggtatcatcccggctgtttcgtcaagaacagagaagagctcggcttccggccagagtacagcgcgtcccaacttaagggcttttcactcttagccacagaggacaaggaggctcttaaaaaacagctgcctggtgtgaagtcagagggaaaacgcaaaggggacgaagtggatggtgttgacgaagtagccaagaagaagtccaaaaaggagaaggataagaagaaaaaaaagaaaaagaaaaaggaaagaaagaagaagaagaaaaagagaaagaaaaagtag

SEQ ID NO: 119171 - DNA, 570 bp, Artificial Sequence
  derived and/or modified sequence
gtttctaggtcgtggcgtcgggcttccggagctttggcggcagctaggggaggatggcggagtcttcggataagctctatcgagtcgagtacgccaagagcgggcgcgcctcttgcaagaaatgcagcgagagcatccccaaggactcgctccggatggccatcatggtgcagtcgcccatgtttgatggaaaagtcccacactggtaccacttctcctgcttctggaaggtgggccactccatccggcaccctgacgttgaggtggatgggttctctgagcttcggtgggatgaccagcagaaagtcaagaagacagcggaagctggaggagtgacaggtgtgtacatactggggcagcatgggcattcagcccccaccctgaagctcccaggagggcctcgtctcagagagcaaagcaaacctcccccagcttgccctctcccacatgtgcagatcaagcgtatggtgcccatgttatttcagcaacacctcctggactcagcatcatctgttgcatgatatttggtattttgtttttccaggtgcttggaatgtagcctttaaagtt

SEQ ID NO: 119172 - DNA, 477 bp, Artificial Sequence
  derived and/or modified sequence
gaacggcggtggccggtgcggcgtgttcggtggcggctctggccgctcaggcgcctgcggctgggtgagcgcacgcgaggcggcgaggcggcagcgtgtttctaggtcgtggcgtcgggcttccggagctttggcggcagctaggggaggatggcggagtcttcggataagctctatcgagtcgagtacgccaagagcgggcgcgcctcttgcaagaaatgcagcgagagcatccccaaggactcgctccggatggccatcatggtgcagtcgcccatgtttgatggaaaagtcccacactggtaccacttctcctgcttctggaaggtgggccactccatccggcaccctgacgttgaggtggatgggttctctgagcttcggtgggatgaccagcagaaagtcaagaagacagcggaagctggaggagtgacagaacctccaataccatgtggaatagaagtgatgggaagatag

SEQ ID NO: 119173 - DNA, 553 bp, Artificial Sequence
  derived and/or modified sequence
ggcggtggccggtgcggcgtgttcggtggcggctctggccgctcaggcgcctgcggctgggtgagcgcacgcgaggcggcgaggcggcagcgtgtttctaggtcgtggcgtcgggcttccggagctttggcggcagctaggggaggatggcggagtcttcggataagctctatcgagtcgagtacgccaagagcgggcgcgcctcttgcaagaaatgcagcgagagcatccccaaggactcgctccggatggccatcatggtgcagtcgcccatgtttgatggaaaagtcccacactggtaccacttctcctgcttctggaaggtgggccactccatccggcaccctgacgttgaggtggatgggttctctgagcttcggtgggatgaccagcagaaagtcaagaagacagcggaagctggaggagtgacagaacctccaataccatgtggaatagaagtgatgggaagatagcttcgtcttattcctaatcttaggcaaaggccaggatggaattggtagcaaggcagagaagactctgggtgactttgcag

SEQ ID NO: 119174 - DNA, 3958 bp, Artificial Sequence
  derived and/or modified sequence
cggtggccggtgcggcgtgttcggtggcggctctggccgctcaggcgcctgcggctgggtgagcgcacgcgaggcggcgaggcggcagcgtgtttctaggtcgtggcgtcgggcttccggagctttggcggcagctaggggaggatggcggagtcttcggataagctctatcgagtcgagtacgccaagagcgggcgcgcctcttgcaagaaatgcagcgagagcatccccaaggactcgctccggatggccatcatggtgcagtcgcccatgtttgatggaaaagtcccacactggtaccacttctcctgcttctggaaggtgggccactccatccggcaccctgacgttgaggtggatgggttctctgagcttcggtgggatgaccagcagaaagtcaagaagacagcggaagctggaggagtgacaggcaaaggccaggatggaattggtagcaaggcagagaagactctgggtgactttgcagcagagtatgccaagtccaacagaagtacgtgcaaggggtgtatggagaagatagaaaagggccaggtgcgcctgtccaagaagatggtggacccggagaagccacagctaggcatgattgaccgctggtaccatccaggctgctttgtcaagaacagggaggagctgggtttccggcccgagtacagtgcgagtcagctcaagggcttcagcctccttgctacagaggataaagaagccctgaagaagcagctcccaggagtcaagagtgaaggaaagagaaaaggcgatgaggtggatggagtggatgaagtggcgaagaagaaatctaaaaaagaaaaagacaaggatagtaagcttgaaaaagccctaaaggctcagaacgacctgatctggaacatcaaggacgagctaaagaaagtgtgttcaactaatgacctgaaggagctactcatcttcaacaagcagcaagtgccttctggggagtcggcgatcttggaccgagtagctgatggcatggtgttcggtgccctccttccctgcgaggaatgctcgggtcagctggtcttcaagagcgatgcctattactgcactggggacgtcactgcctggaccaagtgtatggtcaagacacagacacccaaccggaaggagtgggtaaccccaaaggaattccgagaaatctcttacctcaagaaattgaaggttaaaaaacaggaccgtatattccccccagaaaccagcgcctccgtggcggccacgcctccgccctccacagcctcggctcctgctgctgtgaactcctctgcttcagcagataagccattatccaacatgaagatcctgactctcgggaagctgtcccggaacaaggatgaagtgaaggccatgattgagaaactcggggggaagttgacggggacggccaacaaggcttccctgtgcatcagcaccaaaaaggaggtggaaaagatgaataagaagatggaggaagtaaaggaagccaacatccgagttgtgtctgaggacttcctccaggacgtctccgcctccaccaagagccttcaggagttgttcttagcgcacatcttgtccccttggggggcagaggtgaaggcagagcctgttgaagttgtggccccaagagggaagtcaggggctgcgctctccaaaaaaagcaagggccaggtcaaggaggaaggtatcaacaaatctgaaaagagaatgaaattaactcttaaaggaggagcagctgtggatcctgattctggactggaacactctgcgcatgtcctggagaaaggtgggaaggtcttcagtgccacccttggcctggtggacatcgttaaaggaaccaactcctactacaagctgcagcttctggaggacgacaaggaaaacaggtattggatattcaggtcctggggccgtgtgggtacggtgatcggtagcaacaaactggaacagatgccgtccaaggaggatgccattgagcacttcatgaaattatatgaagaaaaaaccgggaacgcttggcactccaaaaatttcacgaagtatcccaaaaagttctaccccctggagattgactatggccaggatgaagaggcagtgaagaagctgacagtaaatcctggcaccaagtccaagctccccaagccagttcaggacctcatcaagatgatctttgatgtggaaagtatgaagaaagccatggtggagtatgagatcgaccttcagaagatgcccttggggaagctgagcaaaaggcagatccaggccgcatactccatcctcagtgaggtccagcaggcggtgtctcagggcagcagcgactctcagatcctggatctctcaaatcgcttttacaccctgatcccccacgactttgggatgaagaagcctccgctcctgaacaatgcagacagtgtgcaggccaaggtggaaatgcttgacaacctgctggacatcgaggtggcctacagtctgctcaggggagggtctgatgatagcagcaaggatcccatcgatgtcaactatgagaagctcaaaactgacattaaggtggttgacagagattctgaagaagccgagatcatcaggaagtatgttaagaacactcatgcaaccacacacaatgcgtatgacttggaagtcatcgatatctttaagatagagcgtgaaggcgaatgccagcgttacaagccctttaagcagcttcataaccgaagattgctgtggcacgggtccaggaccaccaactttgctgggatcctgtcccagggtcttcggatagccccgcctgaagcgcccgtgacaggctacatgtttggtaaagggatctatttcgctgacatggtctccaagagtgccaactactgccatacgtctcagggagacccaataggcttaatcctgttgggagaagttgcccttggaaacatgtatgaactgaagcacgcttcacatatcagcaagttacccaagggcaagcacagtgtcaaaggtttgggcaaaactacccctgatccttcagctaacattagtctggatggtgtagacgttcctcttgggaccgggatttcatctggtgtgaatgacacctctctactatataacgagtacattgtctatgatattgctcaggtaaatctgaagtatctgctgaaactgaaattcaattttaagacctccctgtggtaattgggagaggtagccgagtcacacccggtggctctggtatgaattcacccgaagcgcttctgcaccaactcacctggccgctaagttgctgatgggtagtacctgtactaaaccacctcagaaaggattttacagaaacgtgttaaaggttttctctaacttctcaagtcccttgttttgtgttgtgtctgtggggaggggttgttttggggttgtttttgttttttcttgccaggtagataaaactgacatagagaaaaggctggagagagattctgttgcatagactagtcctatggaaaaaaccaagcttcgttagaatgtctgccttactggtttccccagggaaggaaaaatacacttccacccttttttctaagtgttcgtctttagttttgattttggaaagatgttaagcatttatttttagttaaaaataaaaactaatttcatactatttagattttcttttttatcttgcacttattgtcccctttttagttttttttgtttgcctcttgtggtgaggggtgtgggaagaccaaaggaaggaacgctaacaatttctcatacttagaaacaaaaagagctttccttctccaggaatactgaacatgggagctcttgaaatatgtagtattaaaagttgcatttgaaattcttgactttcttatgggcacttttgtcttccaaattaaaactctaccacaaatatacttacccaagggctaatagtaatactcgattaaaaatgcagatgccttctcta

SEQ ID NO: 119175 - DNA, 750 bp, Artificial Sequence
  derived and/or modified sequence
atggcggagtcttcggataagctctatcgagtcgagtacgccaagagcgggcgcgcctcttgcaagaaatgcagcgagagcatccccaaggactcgctccggatggccatcatggtgcagtcgcccatgtttgatggaaaagtcccacactggtaccacttctcctgcttctggaaggtgggccactccatccggcaccctgacgttgaggtggatgggttctctgagcttcggtgggatgaccagcagaaagtcaagaagacagcggaagctggaggagtgacaggcaaaggccaggatggaattggtagcaaggcagagaagactctgggtgactttgcagcagagtatgccaagtccaacagaagtacgtgcaaggggtgtatggagaagatagaaaagggccaggtgcgcctgtccaagaagatggtggacccggagaagccacagctaggcatgattgaccgctggtaccatccaggctgctttgtcaagaacagggaggagctgggtttccggcccgagtacagtgcgagtcagctcaagggcttcagcctccttgctacagaggataaagaagccctgaagaagcagctcccaggagtcaagagtgaaggaaagagaaaaggcgatgaggtggatggagtggatgaagtggcgaagaagaaatctaaaaaagaaaaagacaagaaaaaaaaaaaaaaaaaaaaaaaggaaagaaaaaaaaagaagaaaaaaagaaaaaaaaag

SEQ ID NO: 119176 - DNA, 468 bp, Artificial Sequence
  derived and/or modified sequence
atggcagagtccagcgataaactgtatagggtggaatatgctaaaagtgggagagcctcatgtaaaaaatgttctgagtccattccaaaggattctctgagaatggctataatggtgcaatcccctatgtttgatggcaaggtgccacattggtatcattttagctgcttctggaaggttggacacagcatccgacaccccgacgtggaggttgacggcttctcagaactgagatgggacgaccaacagaaagtgaaaaagactgctgaggctggaggagtgactggggtgtacattctgggccagcacggccactctgcccctacattaaagctgcccggtgggccaagattgcgggagcagtctaaacctccgcctgcatgtcctctcccccacgtccaaattaaaagaatggtaccaatgcttttccaacaacacttgctggactctgcaagcagcgtggcgtag

SEQ ID NO: 119177 - DNA, 327 bp, Artificial Sequence
  derived and/or modified sequence
atggccgagtcgtctgacaaactgtacagggtggaatacgctaagagcggcagagcttcctgcaagaagtgtagcgagtcaattccaaaggattctctcagaatggcgatcatggtgcagagcccaatgttcgacgggaaagtgccacactggtatcacttttcgtgcttctggaaagttgggcacagcatccggcaccctgacgtcgaggtggacggtttctcggaactcagatgggatgatcagcagaaagtgaaaaaaaccgctgaggccggaggcgtaaccgagcctcctatcccctgcggtattgaagtgatgggacgctag

SEQ ID NO: 119178 - DNA, 327 bp, Artificial Sequence
  derived and/or modified sequence
atggctgagtcatccgacaagctttatagggtggagtacgcaaagtcggggcgtgcaagctgtaagaagtgctccgagtcaatcccaaaggatagcttgcgcatggcgattatggtccagtctcctatgtttgatggaaaagttccccattggtaccacttctcctgcttctggaaagtcggacactccatccgccaccccgatgtcgaagtcgacggcttcagcgagcttaggtgggatgatcagcagaaagtgaagaaaacagcagaagccggaggagttactgagcccccaatcccctgcggaattgaagtgatggggcgatag

SEQ ID NO: 119179 - DNA, 3045 bp, Artificial Sequence
  derived and/or modified sequence
atggcggagagctctgataagctgtacagagtcgagtacgccaaatccgggagagcctcctgtaaaaagtgtagtgaatctatacctaaggacagcttgagaatggccattatggtgcaatccccaatgttcgatggtaaggtgccccactggtaccatttctcttgcttttggaaggtcggacattcaatcaggcatcccgatgtggaggtcgatggcttttcggagctgcgctgggacgatcagcagaaagtgaaaaagacagccgaggccggaggagttactggtaaggggcaggacggaatcggaagcaaagccgaaaagacgctgggagattttgccgcagaatatgcgaagagcaaccgttccacttgcaaagggtgcatggagaaaatagaaaaaggccaagtccggttgagcaaaaagatggtggacccagagaagccgcagctgggcatgatagatcggtggtaccacccaggatgcttcgtgaagaatagagaggaactcggattccgccctgagtatagtgcatcacagcttaagggattcagtttactggccacggaggataaggaggccctgaagaaacagttacccggtgtcaagtcagagggtaaaaggaagggcgatgaggtggatggcgttgacgaagtggcaaaaaagaagagtaagaaggaaaaggacaaagatagcaagctggaaaaggctctgaaggcacagaatgacctgatctggaacattaaggacgagcttaagaaagtgtgcagcacgaatgacctcaaggaactccttatcttcaataagcaacaggttccctcgggcgagtctgcgattctcgacagagtagccgacggaatggtgttcggggctctcctcccctgcgaagagtgctcagggcagttggtgtttaaaagcgacgcgtattattgtactggtgatgtgacagcctggacaaaatgtatggtcaagactcagacaccaaataggaaggagtgggtcactccgaaagagttcagggagatctcatacttgaaaaaactgaaggtcaaaaaacaagacaggattttcccgcctgagacctctgcctccgtggccgctactcctccaccgtccaccgcctccgctccggctgctgtcaacagttccgcatcagcagacaaaccccttagcaatatgaagatacttacattgggcaaactcagtcgcaataaagacgaggtgaaggctatgatcgaaaaactcggcggaaaactcactggtaccgcaaataaggcttccctgtgcatctccaccaagaaggaggtggaaaaaatgaacaaaaaaatggaagaggtgaaagaagcaaacatacgcgtggtcagcgaagacttcctgcaggacgtttcagcctcaactaaaagcctgcaggagctgttcctggctcacattctgagcccttggggggcagaggtaaaagccgaacccgtcgaggtggtggcgcctcgaggcaagtctggcgctgctctctccaagaagtcgaaggggcaggttaaggaggaagggatcaataagtccgagaagcgcatgaagctgaccctgaaagggggagccgcagtggatccagacagcggcctggaacattccgcccatgtcttggagaaaggcggaaaggtgtttagtgccaccctgggtttagtggatattgtgaaaggcactaattcatactacaagctgcagttgctggaggacgacaaggagaaccggtactggattttcaggtcttggggcagggtagggactgtgataggttccaacaaactggaacagatgcccagtaaagaagacgccatagaacactttatgaagctctacgaggaaaaaactgggaacgcctggcatagtaaaaactttactaaatacccaaagaagttctatccgctcgagattgactatggccaggatgaggaagccgtcaagaagcttactgttaacccgggaactaagtccaaactgcctaaacccgtccaagacctgatcaaaatgatatttgacgtggagtcaatgaaaaaagcgatggtagagtatgagatcgatctgcaaaagatgccactggggaaattaagtaagaggcaaattcaggcggcttattcgatcctgtccgaggtgcagcaggccgtaagccagggcagctctgattcacagattctcgacctgtctaacagattctatactctcattccacacgattttggaatgaagaagcctcccctcctaaataacgcagattccgttcaggccaaagttgagatgcttgacaacctcctcgatattgaagttgcctactctctgctgcggggagggagcgacgatagttcaaaggaccctatcgatgtcaactatgaaaagctgaaaaccgacattaaggttgtggatagagacagcgaagaggcggagattatcagaaaatatgtgaagaacacacacgcaacaacacataacgcatacgacctggaggtgattgacatatttaagattgaacgcgaaggcgagtgtcagcggtacaaacccttcaaacaattgcataataggagactgctttggcacggaagtcgcacaaccaacttcgcaggaatactgtcccaaggactgcggatcgcccctccagaggcccctgtgacaggttatatgttcgggaaaggcatctacttcgcagatatggtgagtaaatccgcgaactactgtcacacatcccaaggcgaccctatcggcctcatccttctgggtgaggtcgcgctgggtaatatgtatgagctcaaacacgccagtcatatcagtaagctgccaaaaggtaagcatagcgtaaaaggacttggaaagaccacccccgacccctcggccaacattagcttagatggcgttgatgtccctctgggcactggtatctcctctggtgtgaacgatacctccctgctctacaacgaatatattgtctacgacatcgcccaagtgaacctcaaatacctcctgaaacttaagtttaactttaagacatctttatggtag

SEQ ID NO: 119180 - DNA, 753 bp, Artificial Sequence
  derived and/or modified sequence
atggcagaatcaagcgacaagttgtatcgagtcgaatatgctaaatctggcagagcaagctgcaaaaagtgttccgagtcaatacccaaagattccctgcgcatggctatcatggtccagtcgccgatgttcgatggcaaagtgccccattggtatcacttctcttgcttttggaaagttggacactccatcaggcaccccgacgtggaggtggatggcttttcagagctgcgctgggacgaccagcagaaggtgaaaaagacagccgaggccggaggcgtgactggcaaaggccaagacggcattggcagcaaggctgagaaaaccctaggagatttcgcggcagaatacgccaaaagcaataggagcacctgcaagggctgcatggagaagattgagaagggccaggtgagattatctaaaaagatggtcgatcccgaaaaaccccaactcggtatgattgatcgttggtaccaccctgggtgttttgtgaaaaatcgagaggaactcggcttcaggccagaatactcagcttctcagcttaagggctttagtttgttggctacagaggataaggaagctctgaaaaagcagctccccggagtcaaaagtgagggcaaaaggaagggggacgaagtggacggggttgacgaagtcgccaagaaaaaatccaagaaggagaaagataagaagaaaaagaaaaagaagaaaaaggaaagaaaaaaaaagaaaaaaaaacgcaagaaaaagtag

SEQ ID NO: 119181 - DNA, 468 bp, Artificial Sequence
  derived and/or modified sequence
atggccgagagcagcgacaagctgtacagagtggagtacgccaagagcggcagagccagctgcaagaagtgcagcgagagcatccccaaggacagcctgagaatggccatcatggtgcagagccccatgttcgacggcaaggtgccccactggtaccacttcagctgcttctggaaggtgggccacagcatcagacaccccgacgtggaggtggacggcttcagcgagctgagatgggacgaccagcagaaggtgaagaagaccgccgaggccggcggcgtgaccggcgtgtacatcctgggccagcacggccacagcgcccccaccctgaagctgcccggcggccccagactgagagagcagagcaagcccccccccgcctgccccctgccccacgtgcagatcaagagaatggtgcccatgctgttccagcagcacctgctggacagcgccagcagcgtggcctag

SEQ ID NO: 119182 - DNA, 327 bp, Artificial Sequence
  derived and/or modified sequence
atggccgagagcagcgacaagctgtacagagtggagtacgccaagagcggcagagccagctgcaagaagtgcagcgagagcatccccaaggacagcctgagaatggccatcatggtgcagagccccatgttcgacggcaaggtgccccactggtaccacttcagctgcttctggaaggtgggccacagcatcagacaccccgacgtggaggtggacggcttcagcgagctgagatgggacgaccagcagaaggtgaagaagaccgccgaggccggcggcgtgaccgagccccccatcccctgcggcatcgaggtgatgggcagatag

SEQ ID NO: 119183 - DNA, 3045 bp, Artificial Sequence
  derived and/or modified sequence
atggccgagagcagcgacaagctgtacagagtggagtacgccaagagcggcagagccagctgcaagaagtgcagcgagagcatccccaaggacagcctgagaatggccatcatggtgcagagccccatgttcgacggcaaggtgccccactggtaccacttcagctgcttctggaaggtgggccacagcatcagacaccccgacgtggaggtggacggcttcagcgagctgagatgggacgaccagcagaaggtgaagaagaccgccgaggccggcggcgtgaccggcaagggccaggacggcatcggcagcaaggccgagaagaccctgggcgacttcgccgccgagtacgccaagagcaacagaagcacctgcaagggctgcatggagaagatcgagaagggccaggtgagactgagcaagaagatggtggaccccgagaagccccagctgggcatgatcgacagatggtaccaccccggctgcttcgtgaagaacagagaggagctgggcttcagacccgagtacagcgccagccagctgaagggcttcagcctgctggccaccgaggacaaggaggccctgaagaagcagctgcccggcgtgaagagcgagggcaagagaaagggcgacgaggtggacggcgtggacgaggtggccaagaagaagagcaagaaggagaaggacaaggacagcaagctggagaaggccctgaaggcccagaacgacctgatctggaacatcaaggacgagctgaagaaggtgtgcagcaccaacgacctgaaggagctgctgatcttcaacaagcagcaggtgcccagcggcgagagcgccatcctggacagagtggccgacggcatggtgttcggcgccctgctgccctgcgaggagtgcagcggccagctggtgttcaagagcgacgcctactactgcaccggcgacgtgaccgcctggaccaagtgcatggtgaagacccagacccccaacagaaaggagtgggtgacccccaaggagttcagagagatcagctacctgaagaagctgaaggtgaagaagcaggacagaatcttcccccccgagaccagcgccagcgtggccgccacccccccccccagcaccgccagcgcccccgccgccgtgaacagcagcgccagcgccgacaagcccctgagcaacatgaagatcctgaccctgggcaagctgagcagaaacaaggacgaggtgaaggccatgatcgagaagctgggcggcaagctgaccggcaccgccaacaaggccagcctgtgcatcagcaccaagaaggaggtggagaagatgaacaagaagatggaggaggtgaaggaggccaacatcagagtggtgagcgaggacttcctgcaggacgtgagcgccagcaccaagagcctgcaggagctgttcctggcccacatcctgagcccctggggcgccgaggtgaaggccgagcccgtggaggtggtggcccccagaggcaagagcggcgccgccctgagcaagaagagcaagggccaggtgaaggaggagggcatcaacaagagcgagaagagaatgaagctgaccctgaagggcggcgccgccgtggaccccgacagcggcctggagcacagcgcccacgtgctggagaagggcggcaaggtgttcagcgccaccctgggcctggtggacatcgtgaagggcaccaacagctactacaagctgcagctgctggaggacgacaaggagaacagatactggatcttcagaagctggggcagagtgggcaccgtgatcggcagcaacaagctggagcagatgcccagcaaggaggacgccatcgagcacttcatgaagctgtacgaggagaagaccggcaacgcctggcacagcaagaacttcaccaagtaccccaagaagttctaccccctggagatcgactacggccaggacgaggaggccgtgaagaagctgaccgtgaaccccggcaccaagagcaagctgcccaagcccgtgcaggacctgatcaagatgatcttcgacgtggagagcatgaagaaggccatggtggagtacgagatcgacctgcagaagatgcccctgggcaagctgagcaagagacagatccaggccgcctacagcatcctgagcgaggtgcagcaggccgtgagccagggcagcagcgacagccagatcctggacctgagcaacagattctacaccctgatcccccacgacttcggcatgaagaagccccccctgctgaacaacgccgacagcgtgcaggccaaggtggagatgctggacaacctgctggacatcgaggtggcctacagcctgctgagaggcggcagcgacgacagcagcaaggaccccatcgacgtgaactacgagaagctgaagaccgacatcaaggtggtggacagagacagcgaggaggccgagatcatcagaaagtacgtgaagaacacccacgccaccacccacaacgcctacgacctggaggtgatcgacatcttcaagatcgagagagagggcgagtgccagagatacaagcccttcaagcagctgcacaacagaagactgctgtggcacggcagcagaaccaccaacttcgccggcatcctgagccagggcctgagaatcgccccccccgaggcccccgtgaccggctacatgttcggcaagggcatctacttcgccgacatggtgagcaagagcgccaactactgccacaccagccagggcgaccccatcggcctgatcctgctgggcgaggtggccctgggcaacatgtacgagctgaagcacgccagccacatcagcaagctgcccaagggcaagcacagcgtgaagggcctgggcaagaccacccccgaccccagcgccaacatcagcctggacggcgtggacgtgcccctgggcaccggcatcagcagcggcgtgaacgacaccagcctgctgtacaacgagtacatcgtgtacgacatcgcccaggtgaacctgaagtacctgctgaagctgaagttcaacttcaagaccagcctgtggtag

SEQ ID NO: 119184 - DNA, 753 bp, Artificial Sequence
  derived and/or modified sequence
atggccgagagcagcgacaagctgtacagagtggagtacgccaagagcggcagagccagctgcaagaagtgcagcgagagcatccccaaggacagcctgagaatggccatcatggtgcagagccccatgttcgacggcaaggtgccccactggtaccacttcagctgcttctggaaggtgggccacagcatcagacaccccgacgtggaggtggacggcttcagcgagctgagatgggacgaccagcagaaggtgaagaagaccgccgaggccggcggcgtgaccggcaagggccaggacggcatcggcagcaaggccgagaagaccctgggcgacttcgccgccgagtacgccaagagcaacagaagcacctgcaagggctgcatggagaagatcgagaagggccaggtgagactgagcaagaagatggtggaccccgagaagccccagctgggcatgatcgacagatggtaccaccccggctgcttcgtgaagaacagagaggagctgggcttcagacccgagtacagcgccagccagctgaagggcttcagcctgctggccaccgaggacaaggaggccctgaagaagcagctgcccggcgtgaagagcgagggcaagagaaagggcgacgaggtggacggcgtggacgaggtggccaagaagaagagcaagaaggagaaggacaagaagaagaagaagaagaagaagaaggagagaaagaagaagaagaagaagagaaagaagaagtag

SEQ ID NO: 119185 - protein, 689 aa, Artificial Sequence
  derived and/or modified sequence
MADLEAVLADVSYLMAMEKSKATPAARASKKILLPEPSIRSVMQKYLEDRGEVTFEKIFSQKLGYLLFRDFCLNHLEEARPLVEFYEEIKKYEKLETEEERVARSREIFDSYIMKELLACSHPFSKSATEHVQGHLGKKQVPPDLFQPYIEEICQNLRGDVFQKFIESDKFTRFCQWKNVELNIHLTMNDFSVHRIIGRGGFGEVYGCRKADTGKMYAMKCLDKKRIKMKQGETLALNERIMLSLVSTGDCPFIVCMSYAFHTPDKLSFILDLMNGGDLHYHLSQHGVFSEADMRFYAAEIILGLEHMHNRFVVYRDLKPANILLDEHGHVRISDLGLACDFSKKKPHASVGTHGYMAPEVLQKGVAYDSSADWFSLGCMLFKLLRGHSPFRQHKTKDKHEIDRMTLTMAVELPDSFSPELRSLLEGLLQRDVNRRLGCLGRGAQEVKESPFFRSLDWQMVFLQKYPPPLIPPRGEVNAADAFDIGSFDEEDTKGIKLLDSDQELYRNFPLTISERWQQEVAETVFDTINAETDRLEARKKAKNKQLGHEEDYALGKDCIMHGYMSKMGNPFLTQWQRRYFYLFPNRLEWRGEGEAPQSLLTMEEIQSVEETQIKERKCLLLKIRGGKQFILQCDSDPELVQWKKELRDAYREAQQLVQRVPKMKNKPRSPVVELSKVPLVQRGSANGL

SEQ ID NO: 119186 - DNA, 3478 bp, Artificial Sequence
  derived and/or modified sequence
cgggcgcgcgggcggcggcggcggcggcgccccgactgcagtcccggcgggagcggagcgcgagccggggccgggcccgagccggcgccatggggcggcgccgcctgtgagcggcggcgagcggagccgcgggcgccgagcagggccaggcgggaggcgtcggcgcccgaggccgagcgagccgcggccgggccgggccgagcgccgagcgagcaggagcggcggcggcggcggcggcggcgggaggaggcagcgccgccgccaagatggcggacctggaggcggtgctggccgacgtgagctacctgatggccatggagaagagcaaggccacgccggccgcgcgcgccagcaagaagatcctgctgcccgagcccagcatccgcagtgtcatgcagaagtacctggaggaccggggcgaggtgacctttgagaagatcttttcccagaagctggggtacctgctcttccgagacttctgcctgaaccacctggaggaggccaggcccttggtggaattctatgaggagatcaagaagtacgagaagctggagacggaggaggagcgtgtggcccgcagccgggagatcttcgactcatacatcatgaaggagctgctggcctgctcgcatcccttctcgaagagtgccactgagcatgtccaaggccacctggggaagaagcaggtgcctccggatctcttccagccatacatcgaagagatttgtcaaaacctccgaggggacgtgttccagaaattcattgagagcgataagttcacacggttttgccagtggaagaatgtggagctcaacatccacctgaccatgaatgacttcagcgtgcatcgcatcattgggcgcgggggctttggcgaggtctatgggtgccggaaggctgacacaggcaagatgtacgccatgaagtgcctggacaaaaagcgcatcaagatgaagcagggggagaccctggccctgaacgagcgcatcatgctctcgctcgtcagcactggggactgcccattcattgtctgcatgtcatacgcgttccacacgccagacaagctcagcttcatcctggacctcatgaacggtggggacctgcactaccacctctcccagcacggggtcttctcagaggctgacatgcgcttctatgcggccgagatcatcctgggcctggagcacatgcacaaccgcttcgtggtctaccgggacctgaagccagccaacatccttctggacgagcatggccacgtgcggatctcggacctgggcctggcctgtgacttctccaagaagaagccccatgccagcgtgggcacccacgggtacatggctccggaggtcctgcagaagggcgtggcctacgacagcagtgccgactggttctctctggggtgcatgctcttcaagttgctgcgggggcacagccccttccggcagcacaagaccaaagacaagcatgagatcgaccgcatgacgctgacgatggccgtggagctgcccgactccttctcccctgaactacgctccctgctggaggggttgctgcagagggatgtcaaccggagattgggctgcctgggccgaggggctcaggaggtgaaagagagcccctttttccgctccctggactggcagatggtcttcttgcagaagtaccctcccccgctgatccccccacgaggggaggtgaacgcggccgacgccttcgacattggctccttcgatgaggaggacacaaaaggaatcaagttactggacagtgatcaggagctctaccgcaacttccccctcaccatctcggagcggtggcagcaggaggtggcagagactgtcttcgacaccatcaacgctgagacagaccggctggaggctcgcaagaaagccaagaacaagcagctgggccatgaggaagactacgccctgggcaaggactgcatcatgcatggctacatgtccaagatgggcaaccccttcctgacccagtggcagcggcggtacttctacctgttccccaaccgcctcgagtggcggggcgagggcgaggccccgcagagcctgctgaccatggaggagatccagtcggtggaggagacgcagatcaaggagcgcaagtgcctgctcctcaagatccgcggtgggaaacagttcattttgcagtgcgatagcgaccctgagctggtgcagtggaagaaggagctgcgcgacgcctaccgcgaggcccagcagctggtgcagcgggtgcccaagatgaagaacaagccgcgctcgcccgtggtggagctgagcaaggtgccgctggtccagcgcggcagtgccaacggcctctgacccgcccacccgccttttataaacctctaatttattttgtcgaatttttattatttgttttcccgccaagcggaaaaggttttattttgtaattattgtgatttcccgtggccccagcctggcccagctcccccgggaggggcccgcttgcctcggctcctgctgcaccaacccagccgctgcccggcgccctctgtcctgacttcaggggctgcccgctcccagtgtcttcctgtgggggaagagcacagccctcccgccccttccccgagggatgatgccacaccaagctgtgccaccctgggctctgtgggctgcactctgtgcccatgggcactgctgggtggcccatcccccctcaccaggggcaggcacagcacagggatccgacttgaattttcccactgcaccccctcctgctgcagaggggcaggccctgcactgtcctgctccacagtgttggcgagaggaggggcccgttgtctccctggccctcaaggcctcccacagtgactcgggctcctgtgcccttattcaggaaaagcctctgtgtcactggctgcctccactcccacttccctgacactgcggggcttggctgagagagtggcattggcagcaggtgctgctaccctccctgctgtcccctcttgccccaacccccagcacccgggctcagggaccacagcaaggcacctgcaggttgggccatactggcctcgcctggcctgaggtctcgctgatgctgggctgggtgcgaccccatctgcccaggacggggccggccaggtgggcgggcagcacagcaaggaggctggctggggcctatcagtgtgccccccatcctggcccatcagtgtacccccgcccaggctggccagccccacagcccacgtcctgtcagtgccgccgcctcgcccaccgcatgccccctcgtgccagtcgcgctgcctgtgtggtgtcgcgccttctcccccccggggctgggttggcgcaccctcccctcccgtctactcattccccggggcgtttctttgccgatttttgaatgtgattttaaagagtgaaaaatgagactatgcgtttttataaaaaatggtgcctgattaaaaaaaaaaaaaaaaaaaaaaaaaaaaaaaaaa

SEQ ID NO: 119187 - DNA, 2070 bp, Artificial Sequence
  derived and/or modified sequence
atggcagatctggaggccgtattggcggacgtttcttatctgatggctatggagaagtccaaggctacgccagcagcgcgcgccagcaaaaaaatacttctgcccgagcccagcattcggtccgtgatgcaaaaatacctcgaagatagaggtgaggttacctttgagaagatcttctcccaaaagctgggttatctgttgtttagagacttctgcctcaaccacttagaagaggctcgccctctggtcgaattctacgaggagatcaaaaagtacgagaagttagaaactgaggaggagcgggtggcaagatctagggagatattcgacagctatataatgaaagaacttctcgcctgttcacatcccttctctaagtcagccacagaacatgtgcaagggcacctggggaaaaagcaagtgccccccgacctcttccagccgtatatcgaagagatctgccaaaacctccgcggcgacgtttttcagaagttcatcgaatctgataagttcaccaggttctgccagtggaagaacgtagagctaaacattcacctgacgatgaatgacttcagcgtccataggattatcggcagagggggctttggtgaagtgtatggctgccggaaagccgatacgggtaaaatgtacgccatgaagtgccttgataagaagagaattaaaatgaagcagggggaaaccctggctctgaacgagagaatcatgctaagcctggtaagcacaggcgattgtccctttatcgtgtgcatgagctatgctttccacacacctgataagctgtcatttatactcgatctgatgaacggaggtgacctacactaccacctgtcccagcacggcgtttttagtgaggcagatatgcgcttttacgctgctgagatcatcttgggcctggagcatatgcataataggtttgtggtgtaccgcgatctcaagccagctaacattctgctggacgaacatgggcacgttaggatttccgacctcggattggcctgcgatttctcaaaaaagaagccacacgctagtgtcggcacgcatggctacatggctccagaagtcctgcagaagggagtcgcttatgactcttcagctgattggttttcccttggctgcatgctgttcaaattgcttcggggacatagcccctttagacagcacaagactaaggataaacacgaaatcgaccgcatgacactgaccatggccgtggaattaccggatagtttctccccggagctccggagcttgctggagggattgctgcagcgtgatgttaacagaaggctagggtgtctgggacgaggcgctcaagaagtgaaggagagcccatttttcagatctctcgactggcagatggtatttttgcagaaatacccacctcccctgataccacctcgtggggaggtaaacgcggcagacgcctttgacataggcagtttcgacgaagaggataccaaaggtataaaactgctagattcggatcaagagctgtaccggaatttccctctgactatttctgagaggtggcaacaggaggtggctgagaccgtgttcgacacaataaacgcagagactgacaggctggaggcgcgcaaaaaagccaagaacaaacaactgggccatgaagaagactatgcactcggcaaagactgcattatgcacggttatatgtccaaaatggggaatccttttcttacgcagtggcagcggcgttacttttatctatttcctaaccgactcgagtggcggggcgagggagaagctccccaaagtctgttaacaatggaagagattcagtccgtggaagaaacacagatcaaggaacggaaatgtttactgcttaagatacggggcgggaaacagttcatattgcagtgtgattctgacccagagctggttcagtggaagaaggaactgcgcgacgcttaccgggaagcccagcagctggttcagcgagtgcctaaaatgaagaataaacctagatcacccgttgtggagctctctaaagtgccactcgttcagagaggaagcgccaacgggctgtag

SEQ ID NO: 119188 - DNA, 3466 bp, Artificial Sequence
  derived and/or modified sequence
ggaggcggcggcggctccggggcgcgggcgcgcgggcggcggcggcggcggcgccccgactgcagtcccggcgggagcggagcgcgagccggggccgggcccgagccggcgccatggggcggcgccgcctgtgagcggcggcgagcggagccgcgggcgccgagcagggccaggcgggaggcgtcggcgcccgaggccgagcgagccgcggccgggccgggccgagcgccgagcgagcaggagcggcggcggcggcggcggcggcgggaggaggcagcgccgccgccaagatggcggacctggaggcggtgctggccgacgtgagctacctgatggccatggagaagagcaaggccacgccggccgcgcgcgccagcaagaagatcctgctgcccgagcccagcatccgcagtgtcatgcagaagtacctggaggaccggggcgaggtgacctttgagaagatcttttcccagaagctggggtacctgctcttccgagacttctgcctgaaccacctggaggaggccaggcccttggtggaattctatgaggagatcaagaagtacgagaagctggagacggaggaggagcgtgtggcccgcagccgggagatcttcgactcatacatcatgaaggagctgctggcctgctcgcatcccttctcgaagagtgccactgagcatgtccaaggccacctggggaagaagcaggtgcctccggatctcttccagccatacatcgaagagatttgtcaaaacctccgaggggacgtgttccagaaattcattgagagcgataagttcacacggttttgccagtggaagaatgtggagctcaacatccacctgaccatgaatgacttcagcgtgcatcgcatcattgggcgcgggggctttggcgaggtctatgggtgccggaaggctgacacaggcaagatgtacgccatgaagtgcctggacaaaaagcgcatcaagatgaagcagggggagaccctggccctgaacgagcgcatcatgctctcgctcgtcagcactggggactgcccattcattgtctgcatgtcatacgcgttccacacgccagacaagctcagcttcatcctggacctcatgaacggtggggacctgcactaccacctctcccagcacggggtcttctcagaggctgacatgcgcttctatgcggccgagatcatcctgggcctggagcacatgcacaaccgcttcgtggtctaccgggacctgaagccagccaacatccttctggacgagcatggccacgtgcggatctcggacctgggcctggcctgtgacttctccaagaagaagccccatgccagcgtgggcacccacgggtacatggctccggaggtcctgcagaagggcgtggcctacgacagcagtgccgactggttctctctggggtgcatgctcttcaagttgctgcgggggcacagccccttccggcagcacaagaccaaagacaagcatgagatcgaccgcatgacgctgacgatggccgtggagctgcccgactccttctcccctgaactacgctccctgctggaggggttgctgcagagggatgtcaaccggagattgggctgcctgggccgaggggctcaggaggtgaaagagagcccctttttccgctccctggactggcagatggtcttcttgcagaagtaccctcccccgctgatccccccacgaggggaggtgaacgcggccgacgccttcgacattggctccttcgatgaggaggacacaaaaggaatcaagttactggacagtgatcaggagctctaccgcaacttccccctcaccatctcggagcggtggcagcaggaggtggcagagactgtcttcgacaccatcaacgctgagacagaccggctggaggctcgcaagaaagccaagaacaagcagctgggccatgaggaagactacgccctgggcaaggactgcatcatgcatggctacatgtccaagatgggcaaccccttcctgacccagtggcagcggcggtacttctacctgttccccaaccgcctcgagtggcggggcgagggcgaggccccgcagagcctgctgaccatggaggagatccagtcggtggaggagacgcagatcaaggagcgcaagtgcctgctcctcaagatccgcggtgggaaacagttcattttgcagtgcgatagcgaccctgagctggtgcagtggaagaaggagctgcgcgacgcctaccgcgaggcccagcagctggtgcagcgggtgcccaagatgaagaacaagccgcgctcgcccgtggtggagctgagcaaggtgccgctggtccagcgcggcagtgccaacggcctctgacccgcccacccgccttttataaacctctaatttattttgtcgaatttttattatttgttttcccgccaagcggaaaaggttttattttgtaattattgtgatttcccgtggccccagcctggcccagctcccccgggaggggcccgcttgcctcggctcctgctgcaccaacccagccgctgcccggcgccctctgtcctgacttcaggggctgcccgctcccagtgtcttcctgtgggggaagagcacagccctcccgccccttccccgagggatgatgccacaccaagctgtgccaccctgggctctgtgggctgcactctgtgcccatgggcactgctgggtggcccatcccccctcaccaggggcaggcacagcacagggatccgacttgaattttcccactgcaccccctcctgctgcagaggggcaggccctgcactgtcctgctccacagtgttggcgagaggaggggcccgttgtctccctggccctcaaggcctcccacagtgactcgggctcctgtgcccttattcaggaaaagcctctgtgtcactggctgcctccactcccacttccctgacactgcggggcttggctgagagagtggcattggcagcaggtgctgctaccctccctgctgtcccctcttgccccaacccccagcacccgggctcagggaccacagcaaggcacctgcaggttgggccatactggcctcgcctggcctgaggtctcgctgatgctgggctgggtgcgaccccatctgcccaggacggggccggccaggtgggcgggcagcacagcaaggaggctggctggggcctatcagtgtgccccccatcctggcccatcagtgtacccccgcccaggctggccagccccacagcccacgtcctgtcagtgccgccgcctcgcccaccgcatgccccctcgtgccagtcgcgctgcctgtgtggtgtcgcgccttctcccccccggggctgggttggcgcaccctcccctcccgtctactcattccccggggcgtttctttgccgatttttgaatgtgattttaaagagtgaaaaatgagactatgcgtttttataaaaaatggtgcctga

SEQ ID NO: 119189 - DNA, 2070 bp, Artificial Sequence
  derived and/or modified sequence
atggctgacctggaggccgtgctggctgatgtgtcctacctgatggccatggagaagagcaaggccaccccagctgcccgggccagcaagaagatcctgctgcctgagcccagcatccgctctgtgatgcagaagtacctggaggacagaggagaggtgacctttgagaagatcttcagccagaagctgggctacctgctcttccgggacttctgcctgaaccacctggaggaggcccggcccctggtggagttctatgaggagatcaagaagtatgagaagctggagacagaggaggagcgggtggcccggagccgggagatctttgacagctacatcatgaaggagctgctggcctgcagccaccccttcagcaagagcgccacagaacatgtgcagggccacctgggcaagaagcaggtgcccccagacctcttccagccctacatcgaggagatctgccagaacctgcggggagatgtgttccagaagttcatcgagagtgacaagttcacccgcttctgccagtggaagaatgtggagctgaacatccacctgaccatgaatgacttctctgtgcaccgcatcatcggccggggcggctttggagaggtgtatggctgcaggaaggctgacaccgggaagatgtatgccatgaagtgcctggacaagaagaggatcaagatgaagcagggcgagaccctggccctgaatgaaagaatcatgctgagcctggtgtccactggagactgccccttcatcgtgtgcatgtcctatgccttccacaccccagacaagctgtccttcatcctggacctgatgaatggaggagacctgcactaccacctgagccagcacggcgtcttcagcgaggccgacatgaggttctacgccgctgagatcatcctgggcctggagcacatgcacaacagatttgtggtgtacagagacctgaagccagccaacatcctgctggatgagcacggccacgtgcgcatcagtgacctgggcctggcctgtgacttcagcaagaagaagccccacgcctctgtgggcacccacggctacatggcccctgaggtgctgcagaagggcgtggcctatgacagcagcgctgactggttcagcctgggctgcatgctgttcaagctgctgcggggccacagccccttccggcagcacaagaccaaggacaagcatgaaattgacaggatgaccctgaccatggctgtggagctgcctgacagcttcagccctgagctgcggagcctgctggagggcctgctgcagagagatgtgaacagaaggctgggctgcctgggccgcggggcccaggaggtgaaggagagccccttcttccgcagcctggactggcagatggtgttcctgcagaagtaccccccacccctcatccccccaagaggagaggtgaatgctgctgatgcctttgatattggcagctttgatgaggaggacaccaagggcatcaagctgctggacagcgaccaggagctgtacagaaacttccccctgaccatcagcgagcgctggcagcaggaggtggccgagaccgtgtttgacaccatcaatgctgagacagaccggctggaggccaggaagaaggccaagaacaagcagctgggccatgaagaagattatgccctgggcaaggactgcatcatgcacggctacatgagcaagatgggcaaccccttcctgacccagtggcagaggcgctacttctacctgttccccaaccggctggagtggagaggagagggggaggccccccagagcctgctgaccatggaggagatccagagcgtggaggagacccagatcaaggagaggaagtgcctgctgctgaagatccggggcggcaagcagttcatcctgcagtgtgacagcgaccctgagctggtgcagtggaagaaggagctgagagatgcctaccgggaggcccagcagctggtgcagagggtgcccaagatgaagaacaagcccaggagccctgtggtggagctgagcaaggtgcccctggtgcagaggggcagcgccaacggcctgtag

SEQ ID NO: 119190 - DNA, 2070 bp, Artificial Sequence
  derived and/or modified sequence
atggccgacctggaggccgtgctggccgacgtgagctacctgatggccatggagaaatcaaaggctacaccggcagctagagctagcaaaaaaatcctgttgcccgagcctagtattcggtctgtgatgcagaagtacctcgaggacaggggcgaggtcactttcgagaagatattttcccagaaattgggttatctgttgtttagggatttttgcctcaaccacctggaagaggctaggcctctggtggagttctatgaggagattaagaaatatgaaaagctggagactgaggaagagcgggtggctcgaagtcgcgagatttttgactcctacattatgaaagagttattagcttgcagccatccgttcagtaagtccgccaccgagcacgtgcaggggcatctgggtaaaaagcaagtgcctcctgacctgttccagccctacatcgaggagatatgtcagaacctgaggggagatgtgttccagaagtttatcgaatctgacaaatttacacgcttttgtcagtggaagaacgtggagctgaacatccatcttacaatgaatgatttcagcgttcaccgcattattggccggggaggatttggagaggtctatgggtgtaggaaggccgatactggcaagatgtacgccatgaagtgtctggacaaaaagcgtataaagatgaagcagggtgagaccctagcattgaatgagcgcatcatgctaagtctcgtctcaactggggattgtccattcatcgtgtgtatgtcatatgcgttccatacgcctgataagttaagcttcatccttgatctaatgaacgggggagaccttcactatcatttatctcaacatggtgtcttttccgaagccgatatgcgcttttacgccgccgaaataattctggggcttgagcacatgcacaacaggtttgtcgtctatcgggatctgaaacccgccaatatattgctggacgaacatggacacgtccgcataagcgatctggggctcgcctgcgatttcagcaagaaaaagccccatgcaagcgtgggaactcatggctacatggccccagaagtactgcaaaaaggtgtggcctacgactcctctgccgactggttctccctggggtgcatgctattcaaattgctgagaggacactctccatttaggcagcataaaacgaaggataaacacgagatagatagaatgaccctaacaatggccgtagagttgcccgacagcttcagccctgaacttaggtcactgctcgagggactgctccagagggacgtgaataggagactaggttgcctgggtcggggggctcaggaggtgaaagaaagtccgtttttccgctcacttgattggcagatggttttcctgcagaagtatccgcctcccctgatccccccacgtggcgaagtgaatgccgcagatgcattcgacatcgggagctttgacgaagaggacactaaaggaataaaactcctcgattccgaccaagaactataccggaatttccccctgacaatttccgagcggtggcaacaggaggtagccgagacagtgtttgacacgatcaatgctgagacagacagacttgaggcccggaaaaaggctaagaacaaacagttgggacacgaggaagattacgcactgggtaaagattgcataatgcatggatatatgtctaagatgggcaacccttttcttactcagtggcaacgcaggtacttttaccttttcccaaatagattagagtggcggggcgaaggagaagcccctcagagcctgctgacgatggaagagattcaatccgtggaggaaacgcaaattaaagagagaaaatgcctgctgctcaagatcaggggcgggaaacagtttatcctccagtgcgattctgatcctgagctggtgcagtggaaaaaggaacttagagatgcctatcgggaggcgcagcagctggtgcagcgcgtcccgaagatgaaaaacaagcctagaagcccagttgtggaactctcgaaggtgcctctcgtgcagcggggcagcgctaacggcctctag

SEQ ID NO: 119191 - DNA, 2070 bp, Artificial Sequence
  derived and/or modified sequence
atggcggatcttgaggctgtactggcggacgtcagctatcttatggctatggagaaaagcaaggcgacacctgccgctagagccagcaaaaaaattcttctgcctgaacccagcataagaagcgtaatgcagaagtacttggaggacagaggagaggtgacttttgagaagatcttctctcagaagttgggctacctgctctttagagatttttgtctgaatcacctggaagaagcacgcccactggtcgagttttatgaggagatcaagaagtacgaaaaactggagacagaagaagagagggtggcgaggagcagggagatctttgactcttacattatgaaggagctgctggcatgctcacatcccttctcgaaatcagccacagaacacgtgcaaggacatcttggcaaaaagcaggtccctccagatctgtttcagccttacatagaagagatctgtcagaacttgcgcggagacgtgttccaaaaatttatagaaagcgacaaattcacacggttctgccagtggaaaaatgttgagctaaacattcaccttacaatgaacgatttctccgtgcaccgtattattggcagaggcggttttggagaggtatatggctgtcggaaagccgatacaggcaagatgtacgccatgaaatgcctcgacaaaaaaagaatcaaaatgaaacagggcgaaaccctcgcactgaatgagcgcatcatgctgtcgttggtctcaacaggtgattgtcccttcatagtctgcatgtcctatgccttccatacacccgataagctgtcatttatcctagatctgatgaatgggggagatctccattatcacctatctcagcacggtgtgttttcagaagcagacatgaggttctatgcggctgaaatcattctggggctggaacacatgcacaaccggtttgtcgtgtatagagacctcaagcctgctaacatcctcttggatgagcacggtcatgtgcgtatctctgacctggggctggcgtgtgacttctcaaaaaaaaagccacacgcgtctgttggcacacatggatacatggccccagaggtcctgcagaaaggcgtggcctacgactcaagcgctgattggttttctttaggctgcatgctattcaagttgctgaggggccattcccccttccggcagcacaaaactaaagacaagcatgagatagaccgaatgacccttacaatggccgtagagctgcccgacagcttttcccccgagctgcgctccttgctggagggcctcttgcagcgcgacgtcaacagaaggctgggatgcctgggacgcggtgcgcaggaggtgaaagaaagccccttttttcgaagcctggactggcagatggtgttcttgcagaagtacccaccgccattgataccccctagaggagaggtaaacgcagccgatgcctttgatattggatcctttgacgaggaggacacaaagggcataaagttgctcgattctgaccaggagctgtaccggaattttcctctgactatcagcgaacggtggcaacaggaggtggccgaaaccgttttcgatactattaatgctgagactgaccgactcgaagcaaggaagaaggctaaaaacaagcagctgggtcatgaggaggactacgcactaggcaaagattgtatcatgcatgggtacatgtcaaagatggggaatcccttcctcactcagtggcagagacgatatttctacctatttcctaaccgccttgagtggcgcggtgagggcgaggccccacagagcctgctcactatggaagagatccaatccgtggaggagacacagattaaggaacgcaagtgcttgctcctgaagatccgcggaggtaaacaatttatcttacagtgtgattcagaccccgaacttgtccagtggaaaaaggagcttagggatgcctatcgtgaagcacagcaactggtccagcgggtgcctaagatgaaaaacaagccgcgttcccccgtcgtggagctgagtaaggtccctcttgtccagcggggttcagcaaacggcctatag

SEQ ID NO: 119192 - DNA, 2070 bp, Artificial Sequence
  derived and/or modified sequence
atggccgacctggaggccgtgctggccgacgtgagctacctgatggccatggagaagagcaaggccacccccgccgccagagccagcaagaagatcctgctgcccgagcccagcatcagaagcgtgatgcagaagtacctggaggacagaggcgaggtgaccttcgagaagatcttcagccagaagctgggctacctgctgttcagagacttctgcctgaaccacctggaggaggccagacccctggtggagttctacgaggagatcaagaagtacgagaagctggagaccgaggaggagagagtggccagaagcagagagatcttcgacagctacatcatgaaggagctgctggcctgcagccaccccttcagcaagagcgccaccgagcacgtgcagggccacctgggcaagaagcaggtgccccccgacctgttccagccctacatcgaggagatctgccagaacctgagaggcgacgtgttccagaagttcatcgagagcgacaagttcaccagattctgccagtggaagaacgtggagctgaacatccacctgaccatgaacgacttcagcgtgcacagaatcatcggcagaggcggcttcggcgaggtgtacggctgcagaaaggccgacaccggcaagatgtacgccatgaagtgcctggacaagaagagaatcaagatgaagcagggcgagaccctggccctgaacgagagaatcatgctgagcctggtgagcaccggcgactgccccttcatcgtgtgcatgagctacgccttccacacccccgacaagctgagcttcatcctggacctgatgaacggcggcgacctgcactaccacctgagccagcacggcgtgttcagcgaggccgacatgagattctacgccgccgagatcatcctgggcctggagcacatgcacaacagattcgtggtgtacagagacctgaagcccgccaacatcctgctggacgagcacggccacgtgagaatcagcgacctgggcctggcctgcgacttcagcaagaagaagccccacgccagcgtgggcacccacggctacatggcccccgaggtgctgcagaagggcgtggcctacgacagcagcgccgactggttcagcctgggctgcatgctgttcaagctgctgagaggccacagccccttcagacagcacaagaccaaggacaagcacgagatcgacagaatgaccctgaccatggccgtggagctgcccgacagcttcagccccgagctgagaagcctgctggagggcctgctgcagagagacgtgaacagaagactgggctgcctgggcagaggcgcccaggaggtgaaggagagccccttcttcagaagcctggactggcagatggtgttcctgcagaagtaccccccccccctgatcccccccagaggcgaggtgaacgccgccgacgccttcgacatcggcagcttcgacgaggaggacaccaagggcatcaagctgctggacagcgaccaggagctgtacagaaacttccccctgaccatcagcgagagatggcagcaggaggtggccgagaccgtgttcgacaccatcaacgccgagaccgacagactggaggccagaaagaaggccaagaacaagcagctgggccacgaggaggactacgccctgggcaaggactgcatcatgcacggctacatgagcaagatgggcaaccccttcctgacccagtggcagagaagatacttctacctgttccccaacagactggagtggagaggcgagggcgaggccccccagagcctgctgaccatggaggagatccagagcgtggaggagacccagatcaaggagagaaagtgcctgctgctgaagatcagaggcggcaagcagttcatcctgcagtgcgacagcgaccccgagctggtgcagtggaagaaggagctgagagacgcctacagagaggcccagcagctggtgcagagagtgcccaagatgaagaacaagcccagaagccccgtggtggagctgagcaaggtgcccctggtgcagagaggcagcgccaacggcctgtag

SEQ ID NO: 119193 - protein, 848 aa, Artificial Sequence
  derived and/or modified sequence
MNSSSANITYASRKRRKPVQKTVKPIPAEGIKSNPSKRHRDRLNTELDRLASLLPFPQDVINKLDKLSVLRLSVSYLRAKSFFDVALKSSPTERNGGQDNCRAANFREGLNLQEGEFLLQALNGFVLVVTTDALVFYASSTIQDYLGFQQSDVIHQSVYELIHTEDRAEFQRQLHWALNPSQCTESGQGIEEATGLPQTVVCYNPDQIPPENSPLMERCFICRLRCLLDNSSGFLAMNFQGKLKYLHGQKKKGKDGSILPPQLALFAIATPLQPPSILEIRTKNFIFRTKHKLDFTPIGCDAKGRIVLGYTEAELCTRGSGYQFIHAADMLYCAESHIRMIKTGESGMIVFRLLTKNNRWTWVQSNARLLYKNGRPDYIIVTQRPLTDEEGTEHLRKRNTKLPFMFTTGEAVLYEATNPFPAIMDPLPLRTKNGTSGKDSATTSTLSKDSLNPSSLLAAMMQQDESIYLYPASSTSSTAPFENNFFNESMNECRNWQDNTAPMGNDTILKHEQIDQPQDVNSFAGGHPGLFQDSKNSDLYSIMKNLGIDFEDIRHMQNEKFFRNDFSGEVDFRDIDLTDEILTYVQDSLSKSPFIPSDYQQQQSLALNSSCMVQEHLHLEQQQQHHQKQVVVEPQQQLCQKMKHMQVNGMFENWNSNQFVPFNCPQQDPQQYNVFTDLHGISQEFPYKSEMDSMPYTQNFISCNQPVLPQHSKCTELDYPMGSFEPSPYPTTSSLEDFVTCLQLPENQKHGLNPQSAIITPQTCYAGAVSMYQCQPEPQHTHVGQMQYNPVLPGQQAFLNKFQNGVLNETYPAELNNINNTQTTTHLQPLHHPSEARPFPDLTSSGFL

SEQ ID NO: 119194 - DNA, 6247 bp, Artificial Sequence
  derived and/or modified sequence
agtggctggggagtcccgtcgacgctctgttccgagagcgtgccccggaccgccagctcagaacaggggcagccgtgtagccgaacggaagctgggagcagccgggactggtggcccgcgcccgagctccgcaggcgggaagcaccctggatttaggaagtcccgggagcagcgcggcggcacctccctcacccaaggggccgcggcgacggtcacggggcgcggcgccaccgtgagcgacccaggccaggattctaaatagacggcccaggctcctcctccgcccgggccgcctcacctgcgggcattgccgcgccgcctccgccggtgtagacggcacctgcgccgccttgctcgcgggtctccgcccctcgcccaccctcactgcgccaggcccaggcagctcacctgtactggcgcgggctgcggaagcctgcgtgagccgaggcgttgaggcgcggcgcccacgccactgtcccgagaggacgcaggtggagcgggcgcggcttcgcggaacccggcgccggccgccgcagtggtcccagcctacaccgggttccggggacccggccgccagtgcccggggagtagccgccgccgtcggctgggcaccatgaacagcagcagcgccaacatcacctacgccagtcgcaagcggcggaagccggtgcagaaaacagtaaagccaatcccagctgaaggaatcaagtcaaatccttccaagcggcatagagaccgacttaatacagagttggaccgtttggctagcctgctgcctttcccacaagatgttattaataagttggacaaactttcagttcttaggctcagcgtcagttacctgagagccaagagcttctttgatgttgcattaaaatcctcccctactgaaagaaacggaggccaggataactgtagagcagcaaatttcagagaaggcctgaacttacaagaaggagaattcttattacaggctctgaatggctttgtattagttgtcactacagatgctttggtcttttatgcttcttctactatacaagattatctagggtttcagcagtctgatgtcatacatcagagtgtatatgaacttatccataccgaagaccgagctgaatttcagcgtcagctacactgggcattaaatccttctcagtgtacagagtctggacaaggaattgaagaagccactggtctcccccagacagtagtctgttataacccagaccagattcctccagaaaactctcctttaatggagaggtgcttcatatgtcgtctaaggtgtctgctggataattcatctggttttctggcaatgaatttccaagggaagttaaagtatcttcatggacagaaaaagaaagggaaagatggatcaatacttccacctcagttggctttgtttgcgatagctactccacttcagccaccatccatacttgaaatccggaccaaaaattttatctttagaaccaaacacaaactagacttcacacctattggttgtgatgccaaaggaagaattgttttaggatatactgaagcagagctgtgcacgagaggctcaggttatcagtttattcatgcagctgatatgctttattgtgccgagtcccatatccgaatgattaagactggagaaagtggcatgatagttttccggcttcttacaaaaaacaaccgatggacttgggtccagtctaatgcacgcctgctttataaaaatggaagaccagattatatcattgtaactcagagaccactaacagatgaggaaggaacagagcatttacgaaaacgaaatacgaagttgccttttatgtttaccactggagaagctgtgttgtatgaggcaaccaacccttttcctgccataatggatcccttaccactaaggactaaaaatggcactagtggaaaagactctgctaccacatccactctaagcaaggactctctcaatcctagttccctcctggctgccatgatgcaacaagatgagtctatttatctctatcctgcttcaagtacttcaagtactgcaccttttgaaaacaactttttcaacgaatctatgaatgaatgcagaaattggcaagataatactgcaccgatgggaaatgatactatcctgaaacatgagcaaattgaccagcctcaggatgtgaactcatttgctggaggtcacccagggctctttcaagatagtaaaaacagtgacttgtacagcataatgaaaaacctaggcattgattttgaagacatcagacacatgcagaatgaaaaatttttcagaaatgatttttctggtgaggttgacttcagagacattgacttaacggatgaaatcctgacgtatgtccaagattctttaagtaagtctcccttcataccttcagattatcaacagcaacagtccttggctctgaactcaagctgtatggtacaggaacacctacatctagaacagcaacagcaacatcaccaaaagcaagtagtagtggagccacagcaacagctgtgtcagaagatgaagcacatgcaagttaatggcatgtttgaaaattggaactctaaccaattcgtgcctttcaattgtccacagcaagacccacaacaatataatgtctttacagacttacatgggatcagtcaagagttcccctacaaatctgaaatggattctatgccttatacacagaactttatttcctgtaatcagcctgtattaccacaacattccaaatgtacagagctggactaccctatggggagttttgaaccatccccataccccactacttctagtttagaagattttgtcacttgtttacaacttcctgaaaaccaaaagcatggattaaatccacagtcagccataataactcctcagacatgttatgctggggccgtgtcgatgtatcagtgccagccagaacctcagcacacccacgtgggtcagatgcagtacaatccagtactgccaggccaacaggcatttttaaacaagtttcagaatggagttttaaatgaaacatatccagctgaattaaataacataaataacactcagactaccacacatcttcagccacttcatcatccgtcagaagccagaccttttcctgatttgacatccagtggattcctgtaattccaagcccaattttgaccctggtttttggattaaattagtttgtgaaggattatggaaaaataaaactgtcactgttggacgtcagcaagttcacatggaggcattgatgcatgctattcacaattattccaaaccaaattttaatttttgcttttagaaaagggagtttaaaaatggtatcaaaattacatatactacagtcaagatagaaagggtgctgccacggagtggtgaggtaccgtctacatttcacattattctgggcaccacaaaatatacaaaactttatcagggaaactaagattcttttaaattagaaaatattctctatttgaattatttctgtcacagtaaaaataaaatactttgagttttgagctactggattcttattagttccccaaatacaaagttagagaactaaactagtttttcctatcatgttaacctctgcttttatctcagatgttaaaataaatggtttggtgctttttataaaaagataatctcagtgctttcctccttcactgtttcatctaagtgcctcacatttttttctacctataacactctaggatgtatattttatataaagtattctttttcttttttaaattaatatctttctgcacacaaatattatttgtgtttcctaaatccaaccattttcattaattcaggcatattttaactccactgcttacctactttcttcaggtaaagggcaaataatgatcgaaaaaataattatttattacataatttagttgtttctagactataaatgttgctatgtgccttatgttgaaaaaatttaaaagtaaaatgtctttccaaattatttcttaattattataaaaatattaagacaatagcacttaaattcctcaacagtgttttcagaagaaataaatataccactctttacctttattgatatctccatgatgatagttgaatgttgcaatgtgaaaaatctgctgttaactgcaaccttgtttattaaattgcaagaagctttatttctagctttttaattaagcaaagcacccatttcaatgtgtataaattgtctttaaaaactgttttagacctataatccttgataatatattgtgttgactttataaatttcgcttcttagaacagtggaaactatgtgtttttctcatatttgaggagtgttaagattgcagatagcaaggtttggtgcaaagtattgtaatgagtgaattgaatggtgcattgtatagatataatgaacaaaattatttgtaagatatttgcagtttttcattttaaaaagtccataccttatatatgcacttaatttgttggggctttacatactttatcaatgtgtctttctaagaaatcaagtaatgaatccaactgcttaaagttggtattaataaaaagacaaccacatagttcgtttaccttcaaactttaggtttttttaatgatatactgatcttcattaccaataggcaaattaatcaccctaccaactttactgtcctaacatggtttaaaagaaaaaatgacaccatcttttattcttttttttttttttttttgagagagagtcttactctgccgcccaaactggagtgcagtggcacaatcttggctcactgcaacctctacctcctgggttcaagtgattctcttgcctcagcctcccgagttgctgggattacaggcatgtgccaccatgcccagctaatttttgtatttttagtagaaacgggtttcaccatgttggccagactggtctcaaactcctgacctcaggtgagcctcccaccttggcctcccaaagtgctgggattacaggcgtgagccactgcattcagctcttcttttctttagatatgagagctgaagagcttagacacattttgcatgtattatttgaaaatctgatggaatcccaaactgagatgtattaaaatacaatttttggccgggtgcagtggctcacgcctgtaatcccagcacttggggagggcgaggagggtggatcacgaggtcaagagatggagaccatcctgaccaacatggtgaaaccctgtctctactaaaaatacagaaattagctgggcatggtggcgtgagcctgtagtcctagctactcaggaggctgaggcaggagaatagcctgaacctgggaatcggaggttgcagagccaagatcgccccactgcactccagcctggcaatagaccgagactccgtctccaaaaaaaaaaaaaatacaatttttatttcttttactttttttagtaagttaatgtatataaaaatggcttcggacaaaatatctctgagttctgtgtattttcagtcaaaactttaaacctgtagaatcaatttaagtgttggaaaaaatttgtctgaaacatttcataatttgtttccagcatgaggtatctaaggatttagaccagaggtctagattaatactctatttttacatttaaaccttttattataagtcttacataaaccatttttgttactctcttccacatgttactggataaattgtttagtggaaaataggctttttaatcatgaatatgatgacaatcagttatacagttataaaattaaaagtttgaaaagcaatattgtatatttttatctatataaaataactaaaatgtatctaagaataataaaatcacgttaaaccaaatacacgtttgtctgtattgttaagtgccaaacaaaggatacttagtgcactgctacattgtgggatttatttctagatgatgtgcacatctaaggatatggatgtgtctaatttagtcttttcctgtaccaggtttttcttacaatacctgaagacttaccagtattctagtgtattatgaagctttcaacattactatgcacaaactagtgtttttcgatgttactaaattttaggtaaatgctttcatggcttttttcttcaaaatgttactgcttacatatatcatgcatagatttttgcttaaagtatgatttataatatcctcattatcaaagttgtatacaataatatataataaaataacaaatatgaataat

SEQ ID NO: 119195 - DNA, 2547 bp, Artificial Sequence
  derived and/or modified sequence
atgaactcttcatctgctaacatcacgtacgccagcaggaaaagacgtaagcccgtgcagaagaccgttaagccaatccctgctgagggcattaagagcaatccaagtaaacggcaccgcgataggctgaacacagagctcgataggctggctagccttttaccattccctcaggacgtgattaataaactcgataagcttagcgtattgcgattgagtgtgagctacttaagagctaaatcatttttcgacgtcgctctcaaatcctcccctacagagcgcaacggcgggcaggacaattgtcgggctgcaaacttccgcgaaggcttaaacttgcaagagggcgaattcctcctccaggctctgaacggttttgttctggtagtcacaactgacgccctggtgttttacgccagttccactatccaagactatttgggattccaacagtctgacgtgattcaccaaagtgtgtacgagctgatacatacggaggatcgggcagagttccagagacagctgcactgggccctgaaccctagccagtgtaccgaatctggtcaaggaattgaagaagctacaggcctccctcagacggtggtatgttacaatccagaccagataccccccgaaaattcccccctaatggagagatgttttatttgccgcctcaggtgcctgctggataatagttccggcttccttgccatgaattttcaggggaagctcaagtatctccacggtcagaaaaagaagggcaaggacggatccattcttccaccacaacttgccctgttcgcgatcgccacaccactccagcctcccagcatccttgagattagaactaaaaactttatctttaggacaaaacacaaacttgatttcacgcccatcggatgcgatgctaaggggagaatcgtgctcggctacaccgaagcggagttgtgtactcgcgggtctggatatcagttcatacatgctgctgatatgttgtactgcgcggagagccacatcagaatgattaaaaccggcgagtccggcatgattgtttttagactcctgaccaagaacaatagatggacatgggtacagagcaatgcccgcctactctataaaaatggtcgccctgactatatcatcgtcacccagcgccctctgactgacgaggaggggactgaacacctgagaaagaggaacaccaagctgccctttatgtttaccaccggggaagctgttctgtacgaggccacgaaccccttccctgccatcatggaccccctgcccctgcggacgaaaaatggtacctctggaaaggactctgccactacctccacattgagcaaggattcgctcaacccctcatcattgctagcggccatgatgcagcaggacgagtctatatatctttaccctgcctcctcaaccagtagtacagctcctttcgagaacaacttcttcaatgaatctatgaacgagtgcaggaactggcaggataacacagccccaatgggcaacgataccattctgaaacacgaacagatcgatcagcctcaagacgtgaattccttcgccggcggacatccagggttgttccaggacagtaagaatagcgatctctactcaatcatgaagaacctcggtatagattttgaagatattaggcacatgcaaaacgagaaattctttcggaacgacttcagcggtgaagtagacttcagggatattgacttgactgacgagatcttgacctacgtgcaggattctttgagcaaatctccctttatcccgtctgactatcaacagcaacagagcctagccctgaacagctcatgtatggttcaggaacatctccatttggagcagcagcagcagcatcaccaaaaacaggtggtggttgaacctcagcaacagctgtgtcagaagatgaagcacatgcaggtgaatgggatgtttgaaaactggaacagtaatcagttcgttccctttaactgccctcagcaggatcctcagcagtacaatgtgtttaccgaccttcacgggatctctcaggaatttccttacaagagtgagatggatagtatgccctatacccagaatttcatatcctgtaatcagcccgttctgcctcagcactcaaaatgcacagagctggattaccctatgggatccttcgaaccttccccatatcctaccacctccagtctcgaggatttcgtgacgtgcctgcagctacctgagaatcagaagcacggcctgaaccctcagtccgccatcataaccccgcaaacgtgctacgccggcgctgtctctatgtaccagtgccagcctgagccacagcacacacatgtgggacagatgcagtataaccccgtgctccctggccaacaggcttttctgaacaagtttcagaatggagttttaaacgagacataccctgccgagctgaataatattaacaacacgcaaacgaccacacacctacagcccctgcaccatccgtctgaagccaggccatttcccgatctgacaagcagtggcttcctctag

SEQ ID NO: 119196 - DNA, 2547 bp, Artificial Sequence
  derived and/or modified sequence
atgaattcctcatcagccaacataacctacgcaagcaggaaaaggcggaagcccgttcagaagacggtgaagcctatacctgctgagggtatcaagagcaaccccagtaaaagacatagggaccggttgaatacagagctggatcgtctcgcctctctgctgccatttccacaggatgtcattaacaagttggacaagctgagtgtcctacggctctcggtgagctacttgcgcgccaaatcattctttgacgtggcgctgaagagcagccctaccgagcgtaacggtggacaggacaactgcagagccgcgaacttccgcgaaggtcttaacctgcaagaaggggagttcttactccaggcactgaatggatttgtcctggtggtgactaccgacgctctggtcttctatgcttccagtactatacaggactacctcgggtttcagcagtcagacgtgatacaccagtcagtgtatgagctcattcacaccgaggatagggccgaatttcagcgacagcttcattgggcactcaacccttcacaatgtacagaaagcggccaggggatagaggaagctaccggcctcccgcaaactgtagtgtgctataaccccgatcagattccccctgaaaactcaccactgatggagcgatgctttatttgcaggctgcgatgcctcctcgacaattctagtggatttcttgctatgaactttcagggtaagctgaaatatctccacggccagaaaaagaagggaaaggacggctccatactgcctccgcagctggctctattcgctatcgctacccctttacaacccccatccattttagaaattcgcactaagaactttattttcaggacaaagcataaactggactttactccaattggctgtgacgccaaagggcgaattgtgttgggatataccgaggctgagctctgtacgcggggtagtggttatcagttcattcacgcggctgacatgctgtattgcgctgagtcccatattagaatgatcaaaaccggtgagtccggaatgatcgtctttcggcttctcacaaagaataaccgttggacctgggtgcagagcaacgcgagactgctgtataagaatggacgccccgactacattattgtgacccagaggccactgacagacgaagaggggactgagcacctgcggaagaggaacacaaaactccctttcatgttcacgactggcgaggccgtcctctatgaggcaaccaatccattccctgcaatcatggacccacttccactgagaaccaagaatgggacctctgggaaggactctgccactacaagtaccctgagtaaggattccctgaacccaagcagcctccttgcagccatgatgcagcaggacgaatcaatttatctgtatcccgcaagttcaacttccagcacggccccgtttgagaataactttttcaacgagtcgatgaatgaatgcagaaattggcaggataacactgccccaatgggtaacgataccatcctgaagcatgaacagattgaccagccccaagatgtaaattcctttgctggcggtcaccctggtctctttcaggatagcaagaattcggacctatattccattatgaaaaacttaggaatcgacttcgaggacatacggcacatgcaaaatgagaaattttttcggaatgatttcagcggcgaggtggacttccgtgatattgacctgacagatgaaatcctcacctacgtccaggatagtctcagcaagtctcccttcatacccagcgattatcagcagcaacagtctctggccctaaattccagctgtatggttcaagagcatctgcatcttgagcagcaacaacagcaccaccagaagcaagtcgttgtggagccccaacaacagctatgccagaagatgaaacacatgcaggtgaatggaatgttcgaaaactggaacagcaaccaattcgtgccattcaactgccctcagcaagatccacagcagtacaacgtgtttaccgatctgcacggcatcagccaggagttcccgtataagagcgagatggatagcatgccgtatacgcagaacttcattagttgtaaccagcctgtgctgcctcagcattcgaagtgcaccgaactggactatcccatgggatctttcgagcccagcccttacccaacgacaagtagtctagaggacttcgtgacctgcctgcagctcccagaaaatcagaagcatgggttgaatccacaatcagctatcatcacaccccaaacttgctacgcaggtgctgtatcaatgtatcagtgccagccagagccacaacacacccacgtgggacagatgcagtacaaccccgtgctgccgggccagcaggccttcttaaataagttccaaaacggcgtgctgaacgagacatatcccgccgaattaaacaatattaataacacccagaccacaacacaccttcagcctttgcaccatccttctgaggcaaggcccttcccagatctcacttcctccgggtttctgtag

SEQ ID NO: 119197 - DNA, 2547 bp, Artificial Sequence
  derived and/or modified sequence
atgaacagcagcagcgccaacatcacctacgccagcaggaagaggaggaagcctgtgcagaagacagtgaagcccatcccagctgagggcatcaagagcaaccccagcaagaggcaccgggaccggctgaacacagagctggaccggctggccagcctgctgcccttcccccaggatgtgatcaacaagctggacaagctgtctgtgctgcggctgtctgtgtcctacctgcgggccaagagcttctttgatgtggccctgaagagcagccccacagaaagaaatggaggccaggacaactgcagagctgccaacttccgggagggcctgaacctgcaggagggggagttcctgctgcaggccctgaatggatttgtgctggtggtgaccacagatgccctggtgttctacgccagcagcaccatccaggactacctgggcttccagcagagtgatgtgatccaccagagcgtgtatgagctgatccacacagaagatagagctgagttccagaggcagctgcactgggccctgaaccccagccagtgcacagagagcggccagggcatcgaggaggccaccggcctgccccagacagtggtgtgctacaacccagaccagatccccccagagaacagccccctgatggagcgctgcttcatctgccgcctgcgctgcctgctggacaacagcagcggcttcctggccatgaacttccagggcaagctgaagtacctgcacggccagaagaagaagggcaaggatggcagcatcctgcccccccagctggccctgtttgccatcgccacccccctgcagccccccagcatcctggagatccgcaccaagaacttcatcttccgcaccaagcacaagctggacttcacccccatcggctgtgatgccaagggccgcatcgtgctgggctacacagaagctgagctgtgcacccggggcagcggctaccagttcatccatgctgctgacatgctgtactgtgccgagagccacatccgcatgatcaagacaggagagagcggcatgattgtgttccggctgctgaccaagaacaaccgctggacctgggtgcagagcaatgcccggctgctgtacaagaatggccgcccagactacatcatcgtgacccagaggcccctgacagatgaggagggcacagagcacctgaggaagaggaacaccaagctgcccttcatgttcaccaccggggaggccgtgctgtatgaggccaccaaccccttccctgccatcatggaccccctgcccctgcggaccaagaatggcaccagcggcaaggacagcgccaccaccagcaccctgagcaaggacagcctgaaccccagcagcctgctggccgccatgatgcagcaggatgagagcatctacctgtacccagccagcagcaccagcagcacagccccctttgagaacaacttcttcaatgaatccatgaatgaatgtagaaactggcaggacaacacagcccccatgggaaatgacaccatcctgaagcatgagcagattgaccagccccaggatgtgaacagctttgctgggggccaccctggcctcttccaggacagcaagaacagcgacctgtacagcatcatgaagaacctgggcatcgactttgaggacatccgccacatgcagaatgagaagttcttcagaaatgacttctctggagaggtggacttccgggacatcgacctgacagatgagatcctgacctacgtgcaggacagcctgagcaagagccccttcatccccagcgactaccagcagcagcagagcctggccctgaacagcagctgcatggtgcaggagcacctgcacctggagcagcagcagcagcaccaccagaagcaggtggtggtggagccccagcagcagctgtgccagaagatgaagcacatgcaggtgaatggcatgtttgagaactggaacagcaaccagtttgtgcccttcaactgcccccagcaggacccccagcagtacaacgtgttcacagacctgcacggcatcagccaggagttcccctacaagtctgagatggacagcatgccctacacccagaacttcatcagctgcaaccagcctgtgctgccccagcacagcaaatgtacagagctggactaccccatgggcagctttgagcccagcccctaccccaccaccagcagcctggaggactttgtgacctgcctgcagctgcctgagaaccagaagcacggcctgaacccccagagcgccatcatcaccccccagacctgctacgccggggctgtgtccatgtaccagtgccagcctgagccccagcacacccacgtgggccagatgcagtacaaccctgtgctgcccggccagcaggccttcctgaacaagttccagaatggagtgctgaatgagacctacccagctgagctgaacaacatcaacaacacccagaccaccacccacctgcagcccctgcaccaccccagcgaggcccggcccttcccagacctgaccagcagcggcttcctgtag

SEQ ID NO: 119198 - DNA, 2547 bp, Artificial Sequence
  derived and/or modified sequence
atgaacagcagcagcgccaacatcacctacgccagccggaagcggaggaagccagtacagaaaaccgtcaagccaatcccggcggaagggatcaaaagcaatcctagcaagagacatagggatcggctcaatacagaactcgaccggctggcatctctgctgccgttcccgcaggacgtgatcaacaaactggacaagctgagtgtgcttcggctgagcgtctcgtacctgcgtgcaaaaagttttttcgatgtcgcacttaagtcgagccccacagagcggaacggggggcaggataattgtcgtgccgctaacttcagagagggcctgaacttacaggaaggagagttcctgctgcaggcattaaacggatttgttctcgtggttacaacagatgccctggtgttttacgctagctcaacaattcaagattatctgggctttcagcaaagtgatgttattcatcagagcgtttacgaactaattcacacagaagatcgagccgagttccaaagacagctgcactgggctcttaatccctcacagtgcacagaatcagggcagggaatagaagaggccaccggactaccccagaccgttgtgtgctacaacccagaccagatccctcctgaaaattcgcctctcatggaaagatgcttcatctgtagattgagatgcctcctggataattcctcagggtttctggcaatgaacttccagggcaaacttaagtatctacatggccaaaagaagaaaggaaaagatggcagtatcctcccaccacagctcgcgctgtttgctatcgcaacgcctttgcagcctccttccatcctggaaatccgcacaaaaaatttcatcttccggactaaacacaaactggactttactccaataggatgtgacgccaaaggccggatcgtactggggtatacagaggctgagctatgcactcgcggatcaggctaccaattcattcacgctgcggacatgctttattgtgcagagtctcatataaggatgataaaaactggcgaaagtgggatgatagtcttccgtttgctcactaagaacaatagatggacttgggtccagagcaatgcacgcctgctgtataagaatggtcgacccgactatatcatcgtcactcagagacccctaaccgacgaggagggcacagagcatcttaggaaacgtaacacaaagcttcccttcatgttcactacaggcgaggcagtattgtatgaggccaccaacccattcccagctattatggatccccttcctctgcggactaaaaacggcacaagcggaaaggactctgctactactagtactctgagcaaagacagcctcaacccaagttccctgctcgctgcaatgatgcagcaggacgagtccatttatctgtatcctgcctcatctactagcagcacggcacccttcgagaacaatttcttcaatgagtccatgaatgagtgtcgcaactggcaggacaataccgcaccaatgggcaacgatacaatactaaaacacgaacagattgaccaaccacaagacgtcaactcgtttgcgggaggacatccaggcttgttccaagacagtaagaacagtgatctgtatagcattatgaagaacttgggaattgattttgaagatatccggcatatgcagaacgaaaagtttttcagaaatgacttcagtggcgaagtggactttagagatattgacctgacagatgagatcttgacctatgttcaggacagcctgagtaaatccccattcatcccatcggattatcagcaacagcagtcgctggcccttaactccagctgcatggtgcaggagcatctccatctggagcagcagcagcagcaccaccagaagcaggttgtcgtggaaccgcagcagcaattgtgtcagaagatgaagcacatgcaggtgaacggcatgtttgaaaattggaattcaaaccaatttgtgccatttaactgtcctcagcaagatccccagcagtataatgtgttcacagaccttcacggtatttctcaagaatttccctacaagagtgaaatggattcgatgccctatactcagaactttatctcatgtaatcagcccgtgctgccccaacactcaaaatgtacagaactcgattatcctatgggctcctttgagccaagtccctatcccaccacatcatccctcgaagacttcgttacttgtcttcagctgccagagaaccagaagcatggactgaaccctcaaagcgccattatcaccccccagacttgttacgccggagcagtcagcatgtaccaatgccagccagagccccagcacacacacgtgggccaaatgcaatacaatcccgttttgccaggtcagcaagctttcctgaacaagtttcagaacggcgtgctgaacgagacatatcctgcagagcttaacaacataaacaacactcagaccaccacgcaccttcaacctctacatcatcccagtgaagccaggcccttcccggacttaacgtcttcaggctttctgtag

SEQ ID NO: 119199 - DNA, 2547 bp, Artificial Sequence
  derived and/or modified sequence
atgaacagcagcagcgccaacatcacctacgccagccggaagcggaggaaaccagtgcaaaaaaccgtgaagcctatacctgcggaagggattaagtccaacccctctaaacgacacagagataggctgaacacagaactagatcggttggcaagtctgttgcccttccctcaggatgtcatcaataaactcgataagctgagcgttctacgcctgtctgtgtcttacctaagagctaagagttttttcgacgtggccctgaaaagcagtcctacagaaagaaacggcggtcaagataattgccgcgccgctaatttccgcgaagggctaaacctgcaggagggcgagtttttattacaggcactgaacggcttcgtgctggtggtgacgactgatgcactggttttttacgctagtagcaccatccaggattatttaggatttcagcagtctgacgtgattcaccaatctgtctatgaactcattcataccgaggatagggcagaatttcaacgccagctgcactgggccctcaatccatcgcagtgcacagagagcggtcagggcattgaagaagcgacgggacttcctcagaccgtggtatgctacaatcctgaccagataccccctgagaacagcccattgatggaaaggtgtttcatctgtagactgaggtgtctactggacaactcctctggtttcttagctatgaacttccaaggtaagctgaaatatcttcacggtcagaagaagaaaggcaaagatgggagcatactccctccccagctagcactctttgccattgccaccccactgcaaccaccctccatcctggagatccgcaccaagaatttcatcttccggactaaacacaaactggatttcacccctataggctgcgacgcaaaaggtcgaatcgtcttgggatatactgaggctgagttgtgtactcgcggatccggctaccagtttattcatgccgcggacatgctgtattgtgctgaaagtcatatcaggatgataaaaactggggaatctggcatgatagtgttcaggctgctaacaaaaaacaataggtggacatgggttcagagtaatgcacgactgctgtataaaaatgggagacccgactatatcatcgtcactcagaggcctctgacagacgaggaaggcacagaacatctgcgtaagaggaacactaaactcccattcatgttcaccacgggagaggccgtgttatacgaggccacaaatccctttcctgcaatcatggaccctttgcctctgcggaccaaaaacgggacttcaggaaaggattctgccactacaagcacactgtctaaggattcactgaatcctagtagcctgcttgccgccatgatgcaacaggatgaatccatatatctttacccagcgtcatcaacttctagtacagcacctttcgaaaataatttcttcaatgagtccatgaatgaatgccggaactggcaggacaacaccgcgcccatgggcaacgacacaatcctgaaacacgaacagattgaccagcctcaggacgtgaactcgttcgctggggggcatcccggactgttccaggactctaagaatagcgatttgtattcaattatgaaaaaccttggcatcgacttcgaggatatcaggcacatgcagaatgagaaatttttccgcaacgacttctccggcgaggtggattttcgggacatcgatctgactgacgagatattgacttacgtccaagatagcctgtctaagtcccccttcataccgagcgattaccagcagcagcaaagcctggccctgaattctagctgcatggtgcaggaacacctgcaccttgagcaacagcagcagcaccatcagaagcaggttgtcgtagaaccgcagcagcagctgtgtcagaaaatgaagcatatgcaggtgaatggtatgtttgaaaattggaactccaaccaatttgtgcctttcaattgtccccagcaagatcctcagcagtacaacgtttttactgacctccatggcataagccaagaatttccatataagagcgagatggatagtatgccttatacacagaattttatttcctgcaaccagcctgtgctgccccagcactccaaatgcactgagttggactaccctatgggatctttcgaaccttctccgtaccccacgaccagcagccttgaagattttgttacttgcctccagttgccggaaaaccagaaacatggcctgaaccctcaatccgcaattataaccccccaaacatgctatgcaggagccgttagcatgtaccaatgccaaccagaacctcagcatacccacgtggggcaaatgcagtataatccagtcttgccaggacagcaagcgttcctaaataaatttcaaaatggagtgctaaacgagacctaccctgccgaactgaacaacatcaacaatacccagactactacacacctgcaacccctacaccatcccagtgaggcccgccccttcccggatctaacaagttccgggttcctctag

SEQ ID NO: 119200 - DNA, 2547 bp, Artificial Sequence
  derived and/or modified sequence
atgaatagcagttctgcgaacatcacctatgctagtagaaaacgccgtaaacctgtgcagaaaaccgtgaagcccataccagccgagggcattaagtctaatccctcgaagcggcaccgtgatcggttgaacactgaactagacaggctggcgtcactcctccccttcccccaggacgtgatcaataagttagataaattatccgtgctgcgcctttcagtatcttacctgcgtgccaaatccttctttgacgtcgccctgaagagctctcccaccgagagaaacggagggcaggataattgtcgggcagccaactttagggaaggcctgaacctccaggagggggagtttctgcttcaggctttgaacggatttgtgttggtcgttaccacagatgctctggtattttatgcctccagtaccatccaggactacctcgggtttcaacagagtgatgtgattcatcaatccgtttatgaactcatacacactgaggaccgtgccgagttccagcgacagctgcactgggcgctgaatccatcacagtgtacagagagtgggcaaggaattgaagaggcgactggacttccccaaacagtcgtatgctataatcctgaccaaattccccctgaaaacagcccgctgatggagagatgtttcatttgccgactccggtgtctgctggataacagttcaggctttctcgcaatgaactttcaaggaaaattaaagtacctacacggacagaaaaagaaggggaaggatggctcaatactgcccccacagctcgctttattcgccatagcaactcccctgcagccaccctccattctagagattaggaccaaaaactttatctttagaacgaagcacaaactcgactttacccccatcgggtgcgacgctaagggacggattgtgcttggctacaccgaggctgagctgtgcaccagaggctccggatatcagtttatccacgcagctgacatgctgtattgtgccgaatcccacatccggatgatcaaaacaggcgagagcggaatgatagtttttagactgctgactaagaataacaggtggacctgggtgcagtctaacgcccgtctgctgtataaaaatggcaggcccgactacataattgtcacgcagcgcccattgaccgacgaggagggtacagaacatctgagaaaaagaaataccaaactccctttcatgttcactaccggggaggccgtcctttatgaggctacgaaccctttccctgcaattatggacccattgcctctgaggactaagaacggaactagcggcaaggattctgccacaacaagcactctgtctaaggacagcttgaaccctagcagcctcctggcagcgatgatgcaacaagatgaatctatttatctatacccagcttcatcaacctcctctaccgcgccatttgagaacaatttcttcaatgaatcaatgaatgaatgcagaaactggcaggataatactgcccctatgggaaatgacaccatcttgaaacacgagcagattgaccagccacaggacgtcaactcctttgccggtgggcatccgggactcttccaagattcaaagaactccgatctgtactcgatcatgaaaaatttgggcatcgactttgaggacatcaggcatatgcagaatgagaagttcttcaggaacgacttctcaggggaagttgacttccgggacattgacctgaccgacgagatactcacatacgttcaagactcactgagcaagagtccgtttataccttcagactaccaacagcagcagtctctggctctcaactcttcttgtatggttcaggaacatctgcacttggagcagcaacagcagcatcatcagaaacaggttgtcgtggaaccccaacaacagttgtgtcagaagatgaaacacatgcaggtgaacggcatgttcgagaattggaacagcaatcagtttgtgccattcaactgtccacagcaggatccacagcagtacaacgtttttacggaccttcacggaattagccaggagtttccctataaatccgagatggactctatgccctacacacagaacttcatcagttgtaatcaaccagtgctgccccagcactcaaaatgcaccgagctggattatcccatgggcagcttcgagcccagcccttatcctaccacatcaagcttggaagacttcgtgacatgcctgcagctgccagaaaaccagaagcacggcttgaacccacagtccgccatcatcaccccccagacctgctacgccggagcggtgtcaatgtaccagtgccaaccggagccccagcatacgcacgtggggcagatgcagtacaacccggtgctccccggtcaacaagctttcctcaataagtttcagaatggggtattgaacgagacctacccagccgagttgaacaatatcaataacactcagacaaccactcacctgcagcccttacatcaccctagtgaggctcgccctttccccgatttaacttctagcgggtttctctag

SEQ ID NO: 119201 - DNA, 2547 bp, Artificial Sequence
  derived and/or modified sequence
atgaatagttcctccgccaatattacatatgcctctcggaaacggaggaagccggttcagaaaaccgtcaaacccatccctgctgaaggcattaaaagcaacccatccaaacggcatagagatcggttgaacaccgagttagatagactggcctctctgctcccttttccccaggatgtgattaataaacttgacaagctgtcagtgcttaggctgtctgtctcttacctcagagccaagagtttcttcgatgtcgcgctaaagtcctcccctacagaacgcaacggagggcaggacaactgcagagccgctaactttcgtgagggattaaatctgcaggagggtgaattcttactgcaggctttgaacgggttcgtattggtagtgactacagacgctctggtgttctacgcttcttccaccattcaggattatcttggctttcaacagtcagatgtgatccatcagtccgtatatgagttgatccacactgaggatagggcggaattccaaaggcaattgcattgggcgcttaatccttcccagtgcacggaatccggccagggtattgaagaggcaaccgggttaccccaaacggtcgtgtgctataaccccgatcagattccacccgagaacagtcctctgatggaacgatgtttcatttgtcggctcagatgtcttctggacaactcaagcgggttcctggcaatgaacttccagggaaaactgaaatatctgcacggacagaagaaaaagggcaaagatggtagcatactgccaccacagctggcgctcttcgccatagctactccattgcaacctcccagcatcttagagattcgcacaaagaatttcatctttaggacgaaacataagctagacttcacacccattggctgtgatgcaaaaggaagaatcgttctggggtacaccgaggctgagctgtgtaccaggggcagcggatatcagtttatccacgctgccgacatgttgtattgcgccgaatctcatatccggatgatcaaaactggtgagagtggcatgattgtcttccgcctgctcacaaaaaataacagatggacctgggtacagtccaacgcacggctactttacaaaaacgggaggcccgattatattattgtgacccaaaggcctcttactgatgaggaaggtactgagcatctcaggaagaggaatacaaagctgcccttcatgttcaccaccggagaggcagttctgtatgaggccactaaccccttccccgcaatcatggatcctctgcctctgaggacaaagaacggcacatccggtaaggacagcgcgaccaccagcactctgagtaaagactccctcaacccgagttcactgctcgccgctatgatgcagcaggatgaatccatctatctgtaccctgcatcatctacaagttctaccgcaccgtttgagaacaacttttttaatgagagcatgaacgagtgtaggaactggcaagataataccgcacctatggggaacgataccattctgaagcacgagcaaatcgaccagccgcaggatgtgaattcattcgccggaggtcacccagggctgtttcaggatagcaagaactccgacctatacagtataatgaaaaacttgggaatcgacttcgaagacatacgtcacatgcagaacgagaagttcttcagaaacgacttttctggcgaagtggatttccgggacattgacctgaccgacgagatcctgacctacgtgcaagacagtctgagcaagtcacccttcattccttctgactatcagcagcaacagtctctggctctgaactcgagttgtatggtacaggaacacctccatttggaacagcagcagcagcaccaccaaaagcaggtggtcgtggagccccagcagcaactgtgtcagaagatgaaacacatgcaagtgaatggcatgttcgaaaactggaacagtaatcaattcgtgcccttcaactgtccacagcaggatccccagcaatataacgtctttaccgacttgcatggcatatcccaggaatttccttacaagagtgagatggacagtatgccatacactcagaattttataagttgcaatcagccagtgctaccccagcactccaaatgcacggaactggactaccctatgggctcattcgaacctagcccttaccccacaacatcttccctggaagatttcgtgacgtgcctgcagctccctgaaaatcagaagcatggcctgaacccccagtccgcaatcatcacccctcagacttgttacgctggggctgtgtctatgtatcagtgtcagcctgagccccagcacactcacgtggggcagatgcagtacaacccagttctacccggtcagcaagcgttcctgaacaagttccagaacggagtgttaaacgagacctatcctgcggaactgaataatataaataacactcagaccacaacacacctgcagcccctccatcaccccagtgaagctcgcccttttcctgacctgactagctcaggatttctctag

SEQ ID NO: 119202 - DNA, 6276 bp, Artificial Sequence
  derived and/or modified sequence
attcagccggtgcgcgcggcggcgggaggcagtggctggggagtcccgtcgacgctctgttccgagagcgtgccccggaccgccagctcagaacaggggcagccgtgtagccgaacggaagctgggagcagccgggactggtggcccgcgcccgagctccgcaggcgggaagcaccctggatttaggaagtcccgggagcagcgcggcggcacctccctcacccaaggggccgcggcgacggtcacggggcgcggcgccaccgtgagcgacccaggccaggattctaaatagacggcccaggctcctcctccgcccgggccgcctcacctgcgggcattgccgcgccgcctccgccggtgtagacggcacctgcgccgccttgctcgcgggtctccgcccctcgcccaccctcactgcgccaggcccaggcagctcacctgtactggcgcgggctgcggaagcctgcgtgagccgaggcgttgaggcgcggcgcccacgccactgtcccgagaggacgcaggtggagcgggcgcggcttcgcggaacccggcgccggccgccgcagtggtcccagcctacaccgggttccggggacccggccgccagtgcccggggagtagccgccgccgtcggctgggcaccatgaacagcagcagcgccaacatcacctacgccagtcgcaagcggcggaagccggtgcagaaaacagtaaagccaatcccagctgaaggaatcaagtcaaatccttccaagcggcatagagaccgacttaatacagagttggaccgtttggctagcctgctgcctttcccacaagatgttattaataagttggacaaactttcagttcttaggctcagcgtcagttacctgagagccaagagcttctttgatgttgcattaaaatcctcccctactgaaagaaacggaggccaggataactgtagagcagcaaatttcagagaaggcctgaacttacaagaaggagaattcttattacaggctctgaatggctttgtattagttgtcactacagatgctttggtcttttatgcttcttctactatacaagattatctagggtttcagcagtctgatgtcatacatcagagtgtatatgaacttatccataccgaagaccgagctgaatttcagcgtcagctacactgggcattaaatccttctcagtgtacagagtctggacaaggaattgaagaagccactggtctcccccagacagtagtctgttataacccagaccagattcctccagaaaactctcctttaatggagaggtgcttcatatgtcgtctaaggtgtctgctggataattcatctggttttctggcaatgaatttccaagggaagttaaagtatcttcatggacagaaaaagaaagggaaagatggatcaatacttccacctcagttggctttgtttgcgatagctactccacttcagccaccatccatacttgaaatccggaccaaaaattttatctttagaaccaaacacaaactagacttcacacctattggttgtgatgccaaaggaagaattgttttaggatatactgaagcagagctgtgcacgagaggctcaggttatcagtttattcatgcagctgatatgctttattgtgccgagtcccatatccgaatgattaagactggagaaagtggcatgatagttttccggcttcttacaaaaaacaaccgatggacttgggtccagtctaatgcacgcctgctttataaaaatggaagaccagattatatcattgtaactcagagaccactaacagatgaggaaggaacagagcatttacgaaaacgaaatacgaagttgccttttatgtttaccactggagaagctgtgttgtatgaggcaaccaacccttttcctgccataatggatcccttaccactaaggactaaaaatggcactagtggaaaagactctgctaccacatccactctaagcaaggactctctcaatcctagttccctcctggctgccatgatgcaacaagatgagtctatttatctctatcctgcttcaagtacttcaagtactgcaccttttgaaaacaactttttcaacgaatctatgaatgaatgcagaaattggcaagataatactgcaccgatgggaaatgatactatcctgaaacatgagcaaattgaccagcctcaggatgtgaactcatttgctggaggtcacccagggctctttcaagatagtaaaaacagtgacttgtacagcataatgaaaaacctaggcattgattttgaagacatcagacacatgcagaatgaaaaatttttcagaaatgatttttctggtgaggttgacttcagagacattgacttaacggatgaaatcctgacgtatgtccaagattctttaagtaagtctcccttcataccttcagattatcaacagcaacagtccttggctctgaactcaagctgtatggtacaggaacacctacatctagaacagcaacagcaacatcaccaaaagcaagtagtagtggagccacagcaacagctgtgtcagaagatgaagcacatgcaagttaatggcatgtttgaaaattggaactctaaccaattcgtgcctttcaattgtccacagcaagacccacaacaatataatgtctttacagacttacatgggatcagtcaagagttcccctacaaatctgaaatggattctatgccttatacacagaactttatttcctgtaatcagcctgtattaccacaacattccaaatgtacagagctggactaccctatggggagttttgaaccatccccataccccactacttctagtttagaagattttgtcacttgtttacaacttcctgaaaaccaaaagcatggattaaatccacagtcagccataataactcctcagacatgttatgctggggccgtgtcgatgtatcagtgccagccagaacctcagcacacccacgtgggtcagatgcagtacaatccagtactgccaggccaacaggcatttttaaacaagtttcagaatggagttttaaatgaaacatatccagctgaattaaataacataaataacactcagactaccacacatcttcagccacttcatcatccgtcagaagccagaccttttcctgatttgacatccagtggattcctgtaattccaagcccaattttgaccctggtttttggattaaattagtttgtgaaggattatggaaaaataaaactgtcactgttggacgtcagcaagttcacatggaggcattgatgcatgctattcacaattattccaaaccaaattttaatttttgcttttagaaaagggagtttaaaaatggtatcaaaattacatatactacagtcaagatagaaagggtgctgccacggagtggtgaggtaccgtctacatttcacattattctgggcaccacaaaatatacaaaactttatcagggaaactaagattcttttaaattagaaaatattctctatttgaattatttctgtcacagtaaaaataaaatactttgagttttgagctactggattcttattagttccccaaatacaaagttagagaactaaactagtttttcctatcatgttaacctctgcttttatctcagatgttaaaataaatggtttggtgctttttataaaaagataatctcagtgctttcctccttcactgtttcatctaagtgcctcacatttttttctacctataacactctaggatgtatattttatataaagtattctttttcttttttaaattaatatctttctgcacacaaatattatttgtgtttcctaaatccaaccattttcattaattcaggcatattttaactccactgcttacctactttcttcaggtaaagggcaaataatgatcgaaaaaataattatttattacataatttagttgtttctagactataaatgttgctatgtgccttatgttgaaaaaatttaaaagtaaaatgtctttccaaattatttcttaattattataaaaatattaagacaatagcacttaaattcctcaacagtgttttcagaagaaataaatataccactctttacctttattgatatctccatgatgatagttgaatgttgcaatgtgaaaaatctgctgttaactgcaaccttgtttattaaattgcaagaagctttatttctagctttttaattaagcaaagcacccatttcaatgtgtataaattgtctttaaaaactgttttagacctataatccttgataatatattgtgttgactttataaatttcgcttcttagaacagtggaaactatgtgtttttctcatatttgaggagtgttaagattgcagatagcaaggtttggtgcaaagtattgtaatgagtgaattgaatggtgcattgtatagatataatgaacaaaattatttgtaagatatttgcagtttttcattttaaaaagtccataccttatatatgcacttaatttgttggggctttacatactttatcaatgtgtctttctaagaaatcaagtaatgaatccaactgcttaaagttggtattaataaaaagacaaccacatagttcgtttaccttcaaactttaggtttttttaatgatatactgatcttcattaccaataggcaaattaatcaccctaccaactttactgtcctaacatggtttaaaagaaaaaatgacaccatcttttattcttttttttttttttttttgagagagagtcttactctgccgcccaaactggagtgcagtggcacaatcttggctcactgcaacctctacctcctgggttcaagtgattctcttgcctcagcctcccgagttgctgggattacaggcatgtgccaccatgcccagctaatttttgtatttttagtagaaacgggtttcaccatgttggccagactggtctcaaactcctgacctcaggtgagcctcccaccttggcctcccaaagtgctgggattacaggcgtgagccactgcattcagctcttcttttctttagatatgagagctgaagagcttagacacattttgcatgtattatttgaaaatctgatggaatcccaaactgagatgtattaaaatacaatttttggccgggtgcagtggctcacgcctgtaatcccagcacttggggagggcgaggagggtggatcacgaggtcaagagatggagaccatcctgaccaacatggtgaaaccctgtctctactaaaaatacagaaattagctgggcatggtggcgtgagcctgtagtcctagctactcaggaggctgaggcaggagaatagcctgaacctgggaatcggaggttgcagagccaagatcgccccactgcactccagcctggcaatagaccgagactccgtctccaaaaaaaaaaaaaatacaatttttatttcttttactttttttagtaagttaatgtatataaaaatggcttcggacaaaatatctctgagttctgtgtattttcagtcaaaactttaaacctgtagaatcaatttaagtgttggaaaaaatttgtctgaaacatttcataatttgtttccagcatgaggtatctaaggatttagaccagaggtctagattaatactctatttttacatttaaaccttttattataagtcttacataaaccatttttgttactctcttccacatgttactggataaattgtttagtggaaaataggctttttaatcatgaatatgatgacaatcagttatacagttataaaattaaaagtttgaaaagcaatattgtatatttttatctatataaaataactaaaatgtatctaagaataataaaatcacgttaaaccaaatacacgtttgtctgtattgttaagtgccaaacaaaggatacttagtgcactgctacattgtgggatttatttctagatgatgtgcacatctaaggatatggatgtgtctaatttagtcttttcctgtaccaggtttttcttacaatacctgaagacttaccagtattctagtgtattatgaagctttcaacattactatgcacaaactagtgtttttcgatgttactaaattttaggtaaatgctttcatggcttttttcttcaaaatgttactgcttacatatatcatgcatagatttttgcttaaagtatgatttataatatcctcattatcaaagttgtatacaataatatataataaaataacaaatatgaataa

SEQ ID NO: 119203 - DNA, 4820 bp, Artificial Sequence
  derived and/or modified sequence
ccgagagcgtgccccggaccgccagctcagaacaggggcagccgtgtagccgaacggaagctgggagcagccgggactggtggcccgcgcccgagctccgcaggcgggaagcaccctggatttaggaagtcccgggagcagcgcggcggcacctccctcacccaaggggccgcggcgacggtcacggggcgcggcgccaccgtgagcgacccaggccaggattctaaatagacggcccaggctcctcctccgcccgggccgcctcacctgcgggcattgccgcgccgcctccgccggtgtagacggcacctgcgccgccttgctcgcgggtctccgcccctcgcccaccctcactgcgccaggcccaggcagctcacctgtactggcgcgggctgcggaagcctgcgtgagccgaggcgttgaggcgcggcgcccacgccactgtcccgagaggacgcaggtggagcgggcgcggcttcgcggaacccggcgccggccgccgcagtggtcccagcctacaccgggttccggggacccggccgccagtgcccggggagtagccgccgccgtcggctgggcaccatgaacagcagcagcgccaacatcacctacgccagtcgcaagcggcggaagccggtgcagaaaacagtaaagccaatcccagctgaaggaatcaagtcaaatccttccaagcggcatagagaccgacttaatacagagttggaccgtttggctagcctgctgcctttcccacaagatgttattaataagttggacaaactttcagttcttaggctcagcgtcagttacctgagagccaagagcttctttgatgttgcattaaaatcctcccctactgaaagaaacggaggccaggataactgtagagcagcaaatttcagagaaggcctgaacttacaagaaggagaattcttattacaggctctgaatggctttgtattagttgtcactacagatgctttggtcttttatgcttcttctactatacaagattatctagggtttcagcagtctgatgtcatacatcagagtgtatatgaacttatccataccgaagaccgagctgaatttcagcgtcagctacactgggcattaaatccttctcagtgtacagagtctggacaaggaattgaagaagccactggtctcccccagacagtagtctgttataacccagaccagattcctccagaaaactctcctttaatggagaggtgcttcatatgtcgtctaaggtgtctgctggataattcatctggttttctggcaatgaatttccaagggaagttaaagtatcttcatggacagaaaaagaaagggaaagatggatcaatacttccacctcagttggctttgtttgcgatagctactccacttcagccaccatccatacttgaaatccggaccaaaaattttatctttagaaccaaacacaaactagacttcacacctattggttgtgatgccaaaggaagaattgttttaggatatactgaagcagagctgtgcacgagaggctcaggttatcagtttattcatgcagctgatatgctttattgtgccgagtcccatatccgaatgattaagactggagaaagtggcatgatagttttccggcttcttacaaaaaacaaccgatggacttgggtccagtctaatgcacgcctgctttataaaaatggaagaccagattatatcattgtaactcagagaccactaacagatgaggaaggaacagagcatttacgaaaacgaaatacgaagttgccttttatgtttaccactggagaagctgtgttgtatgaggcaaccaacccttttcctgccataatggatcccttaccactaaggactaaaaatggcactagtggaaaagactctgctaccacatccactctaagcaaggactctctcaatcctagttccctcctggctgccatgatgcaacaagatgagtctatttatctctatcctgcttcaagtacttcaagtactgcaccttttgaaaacaactttttcaacgaatctatgaatgaatgcagaaattggcaagataatactgcaccgatgggaaatgatactatcctgaaacatgagcaaattgaccagcctcaggatgtgaactcatttgctggaggtcacccagggctctttcaagatagtaaaaacagtgacttgtacagcataatgaaaaacctaggcattgattttgaagacatcagacacatgcagaatgaaaaatttttcagaaatgatttttctggtgaggttgacttcagagacattgacttaacggatgaaatcctgacgtatgtccaagattctttaagtaagtctcccttcataccttcagattatcaacagcaacagtccttggctctgaactcaagctgtatggtacaggaacacctacatctagaacagcaacagcaacatcaccaaaagcaagtagtagtggagccacagcaacagctgtgtcagaagatgaagcacatgcaagttaatggcatgtttgaaaattggaactctaaccaattcgtgcctttcaattgtccacagcaagacccacaacaatataatgtctttacagacttacatgggatcagtcaagagttcccctacaaatctgaaatggattctatgccttatacacagaactttatttcctgtaatcagcctgtattaccacaacattccaaatgtacagagctggactaccctatggggagttttgaaccatccccataccccactacttctagtttagaagattttgtcacttgtttacaacttcctgaaaaccaaaagcatggattaaatccacagtcagccataataactcctcagacatgttatgctggggccgtgtcgatgtatcagtgccagccagaacctcagcacacccacgtgggtcagatgcagtacaatccagtactgccaggccaacaggcatttttaaacaagtttcagaatggagttttaaatgaaacatatccagctgaattaaataacataaataacactcagactaccacacatcttcagccacttcatcatccgtcagaagccagaccttttcctgatttgacatccagtggattcctgtaattccaagcccaattttgaccctggtttttggattaaattagtttgtgaaggattatggaaaaataaaactgtcactgttggacgtcagcaagttcacatggaggcattgatgcatgctattcacaattattccaaaccaaattttaatttttgcttttagaaaagggagtttaaaaatggtatcaaaattacatatactacagtcaagatagaaagggtgctgccacggagtggtgaggtaccgtctacatttcacattattctgggcaccacaaaatatacaaaactttatcagggaaactaagattcttttaaattagaaaatattctctatttgaattatttctgtcacagtaaaaataaaatactttgagttttgagctactggattcttattagttccccaaatacaaagttagagaactaaactagtttttcctatcatgttaacctctgcttttatctcagatgttaaaataaatggtttggtgctttttataaaaagataatctcagtgctttcctccttcactgtttcatctaagtgcctcacatttttttctacctataacactctaggatgtatattttatataaagtattctttttcttttttaaattaatatctttctgcacacaaatattatttgtgtttcctaaatccaaccattttcattaattcaggcatattttaactccactgcttacctactttcttcaggtaaagggcaaataatgatcgaaaaaataattatttattacataatttagttgtttctagactataaatgttgcagagccaagatcgccccactgcactccagcctggcaatagaccgagactccgtctccaaaaaaaaaaaaaatacaatttttatttcttttactttttttagtaagttaatgtatataaaaatggcttcggacaaaatatctctgagttctgtgtattttcagtcaaaactttaaacctgtagaatcaatttaagtgttggaaaaaatttgtctgaaacatttcataatttgtttccagcatgaggtatctaaggatttagaccagaggtctagattaatactctatttttacatttaaaccttttattataagtcttacataaaccatttttgttactctcttccacatgttactggataaattgtttagtggaaaataggctttttaatcatgaatatgatgacaatcagttatacagttataaaattaaaagtttgaaaagcaatattgtatatttttatctatataaaataactaaaatgtatctaagaataataaaatcacgttaaaccaaatacacgtttgtctgtattgttaagtgccaaacaaaggatacttagtgcactgctacattgtgggatttatttctagatgatgtgcacatctaaggatatggatgtgtctaatttagtcttttcctgtaccaggtttttcttacaatacctgaagacttaccagtattctagtgtattatgaagctttcaacattactatgcacaaactagtgtttttcgatgttactaaattttaggtaaatgctttcatggcttttttcttcaaaatgttactgcttacatatatcatgcatagatttttgcttaaagtatgatttataatatcctcattatcaaagttgtatacaataatatataataaaataacaaatatgaataata

SEQ ID NO: 119204 - DNA, 2547 bp, Artificial Sequence
  derived and/or modified sequence
atgaacagcagcagcgccaacatcacctacgccagcagaaagagaagaaagcccgtgcagaagaccgtgaagcccatccccgccgagggcatcaagagcaaccccagcaagagacacagagacagactgaacaccgagctggacagactggccagcctgctgcccttcccccaggacgtgatcaacaagctggacaagctgagcgtgctgagactgagcgtgagctacctgagagccaagagcttcttcgacgtggccctgaagagcagccccaccgagagaaacggcggccaggacaactgcagagccgccaacttcagagagggcctgaacctgcaggagggcgagttcctgctgcaggccctgaacggcttcgtgctggtggtgaccaccgacgccctggtgttctacgccagcagcaccatccaggactacctgggcttccagcagagcgacgtgatccaccagagcgtgtacgagctgatccacaccgaggacagagccgagttccagagacagctgcactgggccctgaaccccagccagtgcaccgagagcggccagggcatcgaggaggccaccggcctgccccagaccgtggtgtgctacaaccccgaccagatcccccccgagaacagccccctgatggagagatgcttcatctgcagactgagatgcctgctggacaacagcagcggcttcctggccatgaacttccagggcaagctgaagtacctgcacggccagaagaagaagggcaaggacggcagcatcctgcccccccagctggccctgttcgccatcgccacccccctgcagccccccagcatcctggagatcagaaccaagaacttcatcttcagaaccaagcacaagctggacttcacccccatcggctgcgacgccaagggcagaatcgtgctgggctacaccgaggccgagctgtgcaccagaggcagcggctaccagttcatccacgccgccgacatgctgtactgcgccgagagccacatcagaatgatcaagaccggcgagagcggcatgatcgtgttcagactgctgaccaagaacaacagatggacctgggtgcagagcaacgccagactgctgtacaagaacggcagacccgactacatcatcgtgacccagagacccctgaccgacgaggagggcaccgagcacctgagaaagagaaacaccaagctgcccttcatgttcaccaccggcgaggccgtgctgtacgaggccaccaaccccttccccgccatcatggaccccctgcccctgagaaccaagaacggcaccagcggcaaggacagcgccaccaccagcaccctgagcaaggacagcctgaaccccagcagcctgctggccgccatgatgcagcaggacgagagcatctacctgtaccccgccagcagcaccagcagcaccgcccccttcgagaacaacttcttcaacgagagcatgaacgagtgcagaaactggcaggacaacaccgcccccatgggcaacgacaccatcctgaagcacgagcagatcgaccagccccaggacgtgaacagcttcgccggcggccaccccggcctgttccaggacagcaagaacagcgacctgtacagcatcatgaagaacctgggcatcgacttcgaggacatcagacacatgcagaacgagaagttcttcagaaacgacttcagcggcgaggtggacttcagagacatcgacctgaccgacgagatcctgacctacgtgcaggacagcctgagcaagagccccttcatccccagcgactaccagcagcagcagagcctggccctgaacagcagctgcatggtgcaggagcacctgcacctggagcagcagcagcagcaccaccagaagcaggtggtggtggagccccagcagcagctgtgccagaagatgaagcacatgcaggtgaacggcatgttcgagaactggaacagcaaccagttcgtgcccttcaactgcccccagcaggacccccagcagtacaacgtgttcaccgacctgcacggcatcagccaggagttcccctacaagagcgagatggacagcatgccctacacccagaacttcatcagctgcaaccagcccgtgctgccccagcacagcaagtgcaccgagctggactaccccatgggcagcttcgagcccagcccctaccccaccaccagcagcctggaggacttcgtgacctgcctgcagctgcccgagaaccagaagcacggcctgaacccccagagcgccatcatcaccccccagacctgctacgccggcgccgtgagcatgtaccagtgccagcccgagccccagcacacccacgtgggccagatgcagtacaaccccgtgctgcccggccagcaggccttcctgaacaagttccagaacggcgtgctgaacgagacctaccccgccgagctgaacaacatcaacaacacccagaccaccacccacctgcagcccctgcaccaccccagcgaggccagacccttccccgacctgaccagcagcggcttcctgtag

SEQ ID NO: 119205 - protein, 367 aa, Artificial Sequence
  derived and/or modified sequence
MKSLVLLLCLAQLWGCHSAPHGPGLIYRQPNCDDPETEEAALVAIDYINQNLPWGYKHTLNQIDEVKVWPQQPSGELFEIEIDTLETTCHVLDPTPVARCSVRQLKEHAVEGDCDFQLLKLDGKFSVVYAKCDSSPDSAEDVRKVCQDCPLLAPLNDTRVVHAAKAALAAFNAQNNGSNFQLEEISRAQLVPLPPSTYVEFTVSGTDCVAKEATEAAKCNLLAEKQYGFCKATLSEKLGGAEVAVTCMVFQTQPVSSQPQPEGANEAVPTPVVDPDAPPSPPLGAPGLPPAGSPPDSHVLLAAPPGHQLHRAHYDLRHTFMGVVSLGSPSGEVSHPRKTRTVVQPSVGAAAGPVVPPCPGRIRHFKV

SEQ ID NO: 119206 - protein, 433 aa, Artificial Sequence
  derived and/or modified sequence
MFAGCFFFLLNQSRNHPVSLCNSSGRLQQINKAHHPPWVYLSQQSTWVGPEASNHLHACQGLSGAAMKSLVLLLCLAQLWGCHSAPHGPGLIYRQPNCDDPETEEAALVAIDYINQNLPWGYKHTLNQIDEVKVWPQQPSGELFEIEIDTLETTCHVLDPTPVARCSVRQLKEHAVEGDCDFQLLKLDGKFSVVYAKCDSSPDSAEDVRKVCQDCPLLAPLNDTRVVHAAKAALAAFNAQNNGSNFQLEEISRAQLVPLPPSTYVEFTVSGTDCVAKEATEAAKCNLLAEKQYGFCKATLSEKLGGAEVAVTCMVFQTQPVSSQPQPEGANEAVPTPVVDPDAPPSPPLGAPGLPPAGSPPDSHVLLAAPPGHQLHRAHYDLRHTFMGVVSLGSPSGEVSHPRKTRTVVQPSVGAAAGPVVPPCPGRIRHFKV

SEQ ID NO: 119207 - DNA, 1104 bp, Artificial Sequence
  derived and/or modified sequence
atgaagtccctggtgctcctgctctgcttggcccaactgtgggggtgtcactccgccccccacggcccaggactcatttatagacaacccaattgtgacgacccagagacggaagaagctgcgctggtggccatagactacatcaaccagaacttaccttggggttataagcatactttgaaccaaattgatgaagtgaaggtctggcctcagcaaccctcaggggaactattcgaaatcgaaatagacaccctcgaaacaacctgtcacgtcctcgatcccacccccgtcgcgagatgttcagttcgtcagctgaaggagcacgccgtcgaaggcgattgtgacttccagctcctgaagcttgacgggaaattcagcgtcgtttatgccaaatgcgacagctctcccgactcagctgaggacgtgcggaaggtatgtcaagattgtcccctgttggccccgctcaacgacacaagggtcgtgcatgctgccaaggcagcccttgctgcattcaacgcccagaataatggatccaacttccagctggaagagattagtcgagctcagctcgtccccctcccgccgtccacctacgtggaattcaccgtgtcaggcactgactgtgtggctaaggaggcaacggaagccgcaaagtgcaacctgctcgccgaaaagcaatacgggttttgtaaggcaactctgtctgaaaagctcggcggggctgaagtggcggtcacctgcatggtatttcagactcaaccagtgtcatctcagccgcaacccgaaggtgccaacgaagccgtgccaaccccagtagttgatcctgacgctccacctagccctcccctgggcgcgcctgggctccccccagcgggcagtccgcctgattcacacgtcctgcttgccgcccccccaggccaccagctgcacagggcccattatgacctgagacacactttcatgggcgtcgtctctctgggaagcccttccggggaagtctcgcatccacgaaaaaccagaaccgtggtgcaacctagcgtgggggctgctgctggacccgtggtgccaccttgcccagggcgcattcggcattttaaggtctag

SEQ ID NO: 119208 - DNA, 1302 bp, Artificial Sequence
  derived and/or modified sequence
atgtttgctgggtgctttttttttctgcttaatcagtctcgtaatcaccctgtgtccctttgtaacagttccggaagactccaacagattaataaagcacatcacccaccgtgggtgtatctgagccagcagtcaacttgggttggccccgaagcgtccaatcacctccacgcttgccaagggctcagtggcgctgctatgaagtcgcttgtgctgcttttgtgcctagcacagctctggggatgtcactccgctccccacggaccagggcttatatacaggcagcccaactgcgatgaccctgagacggaggaagccgcactggtggccattgattatattaaccagaatctcccatggggatataaacacacgcttaaccagatcgatgaagttaaagtgtggcctcagcaacctagcggagaactgttcgagatcgagatagacacccttgagactacatgccacgttcttgacccaactcctgtggccaggtgcagtgtgaggcagctgaaggagcacgccgtcgaaggagattgcgattttcagctgctgaagctggatgggaaattcagcgtggtatatgctaagtgcgattcctctcctgatagtgcagaggatgtgagaaaagtgtgccaggattgccctctgctggcacccctcaatgacacgagagtagtgcatgctgccaaagcagcgttagcagctttcaatgctcaaaacaatggaagtaatttccaactggaagagatctctcgtgctcagctagtgcccctgcccccatctacatatgtggagtttaccgtgtctggtactgattgtgttgcaaaggaagcgacagaagccgctaaatgcaatttgctggcagagaaacagtacggattttgtaaggctactctcagcgaaaagctggggggggcagaggtggccgtgacgtgtatggttttccagacgcagccagtgagtagccaaccacaaccagagggagcaaacgaagccgtccccactcccgtcgtcgatccggacgctcccccttctccacccctgggagcgcccggtttgccacccgcagggagccctcctgattcccatgttctcttagccgcccccccaggccatcaactgcatagagcccactacgacctgcgtcacacgttcatgggcgttgtgtcattggggtctccatctggagaggtgagtcaccctaggaaaaccagaacagtagtccagccaagtgttggggcggcggccggacccgtggtgcctccgtgtcctggccgcatcaggcatttcaaggtttag

SEQ ID NO: 119209 - DNA, 1104 bp, Artificial Sequence
  derived and/or modified sequence
atgaagagcctggtgctgctgctgtgcctggcccagctgtggggctgccacagcgcccctcatggccctggcctcatctaccggcagcccaactgtgatgatcctgagacagaggaggccgccctggtggccatcgactacatcaaccagaacctgccctggggctacaagcacaccctgaaccagattgatgaggtgaaggtgtggccccagcagcccagcggggagctgtttgaaattgaaattgacaccctggagaccacctgccacgtgctggaccccacccctgtggcccgctgcagcgtgcggcagctgaaggagcacgctgtggagggggactgtgacttccagctgctgaagctggatggcaagttctctgtggtgtatgccaagtgtgacagcagcccagacagcgcagaagatgtgaggaaggtgtgccaggactgccccctgctggcccccctgaatgacaccagggtggtgcatgctgccaaggccgccctggccgccttcaatgcccagaacaacggcagcaacttccagctggaggagatcagccgggcccagctggtgcccctgccccccagcacctacgtggagttcaccgtgtctggaacagactgtgtggccaaggaggccacagaggccgccaagtgcaacctgctggccgagaagcagtatggcttctgcaaggccaccctgtctgagaagctgggcggcgctgaggtggccgtgacctgcatggtgttccagacccagcctgtgagcagccagccccagcctgagggcgccaatgaagctgtgcccacccctgtggtggaccctgatgccccacccagcccccccctgggcgcccctggcctgcccccagctggcagccccccagacagccacgtgctgctggccgcccctcctggccaccagctgcaccgggcccactatgacctgcggcacaccttcatgggcgtggtgtccctgggcagccccagcggggaggtgagccaccccaggaagaccaggacagtggtgcagcccagcgtgggcgctgctgctggccctgtggtgcccccctgccccggccgcatccgccacttcaaggtgtag

SEQ ID NO: 119210 - DNA, 1302 bp, Artificial Sequence
  derived and/or modified sequence
atgtttgctggctgcttcttcttcctgctgaaccagagcaggaaccaccctgtgtccctgtgcaacagcagcggccgcctgcagcagatcaacaaggcccaccaccccccctgggtgtacctgagccagcagagcacctgggtgggccctgaggccagcaaccacctgcacgcctgccagggcctgtctggagctgccatgaagagcctggtgctgctgctgtgcctggcccagctgtggggctgccacagcgcccctcatggccctggcctcatctaccggcagcccaactgtgatgatcctgagacagaggaggccgccctggtggccatcgactacatcaaccagaacctgccctggggctacaagcacaccctgaaccagattgatgaggtgaaggtgtggccccagcagcccagcggggagctgtttgaaattgaaattgacaccctggagaccacctgccacgtgctggaccccacccctgtggcccgctgcagcgtgcggcagctgaaggagcacgctgtggagggggactgtgacttccagctgctgaagctggatggcaagttctctgtggtgtatgccaagtgtgacagcagcccagacagcgcagaagatgtgaggaaggtgtgccaggactgccccctgctggcccccctgaatgacaccagggtggtgcatgctgccaaggccgccctggccgccttcaatgcccagaacaacggcagcaacttccagctggaggagatcagccgggcccagctggtgcccctgccccccagcacctacgtggagttcaccgtgtctggaacagactgtgtggccaaggaggccacagaggccgccaagtgcaacctgctggccgagaagcagtatggcttctgcaaggccaccctgtctgagaagctgggcggcgctgaggtggccgtgacctgcatggtgttccagacccagcctgtgagcagccagccccagcctgagggcgccaatgaagctgtgcccacccctgtggtggaccctgatgccccacccagcccccccctgggcgcccctggcctgcccccagctggcagccccccagacagccacgtgctgctggccgcccctcctggccaccagctgcaccgggcccactatgacctgcggcacaccttcatgggcgtggtgtccctgggcagccccagcggggaggtgagccaccccaggaagaccaggacagtggtgcagcccagcgtgggcgctgctgctggccctgtggtgcccccctgccccggccgcatccgccacttcaaggtgtag

SEQ ID NO: 119211 - DNA, 1711 bp, Artificial Sequence
  derived and/or modified sequence
tgtttgcttttccagggctgatgtttgcagggtgtttttttttttcttttgaaccaaagcagaaatcatcctgtatccttatgcaattcttccggcaggctccaacagataaataaagcccaccaccctccatgggtctacctttcccagcagagcacctgggttggtcccgaagcctccaaccacctgcacgcctgccagggcctctctggggcagccatgaagtccctcgtcctgctcctttgtcttgctcagctctggggctgccactcagccccacatggcccagggctgatttatagacaaccgaactgcgatgatccagaaactgaggaagcagctctggtggctatagactacatcaatcaaaaccttccttggggatacaaacacaccttgaaccagattgatgaagtaaaggtgtggcctcagcagccctccggagagctgtttgagattgaaatagacaccctggaaaccacctgccatgtgctggaccccacccctgtggcaagatgcagcgtgaggcagctgaaggagcatgctgtcgaaggagactgtgatttccagctgttgaaactagatggcaagttttccgtggtatacgcaaaatgtgattccagtccagactcagccgaggacgtgcgcaaggtgtgccaagactgccccctgctggccccgctgaacgacaccagggtggtgcacgccgcgaaagctgccctggccgccttcaacgctcagaacaacggctccaattttcagctggaggaaatttcccgggctcagcttgtgcccctcccaccttctacctatgtggagtttacagtgtctggcactgactgtgttgctaaagaggccacagaggcagccaagtgtaacctgctggcagaaaagcaatatggcttttgtaaggcaacactcagtgagaagcttggtggggcagaggttgcagtgacctgcatggtgttccaaacacagcccgtgagctcacagccccaaccagaaggtgccaatgaagcagtccccacacccgtggtggacccagatgcacctccgtcccctccacttggcgcacctggactccctccagctggctcacccccagactcccatgtgttactggcagctcctccaggacaccagttgcaccgggcgcactacgacctgcgccacaccttcatgggtgtggtctcattggggtcaccctcaggagaagtgtcgcacccccggaaaacacgcacagtggtgcagcctagtgttggtgctgctgctgggccagtggttcctccatgtccggggaggatcagacacttcaaggtctaggctagacatggcagagatgaggaggtttggcacagaaaacatagccaccattttgtccaagcctgggcatgggtggggggccttgtctgctggccacgcaagtgtcacatgcgatctacattaatatcaagtcttgactccctacttcccgtcattcctcacaggacagaagcagagtgggtggtggttatgtttgacagaaggcattaggttgacaacttgtcatgattttgacggtaagccaccatgattgtgttctctgcctctggttgaccttacaaaaaccattggaactgtgactttgaaaggtgctcttgctaagcttatatgtgcctgttaatgaaagtgcctgaaagaccttccttaataaagaaggttctaagctgaa

SEQ ID NO: 119212 - DNA, 1583 bp, Artificial Sequence
  derived and/or modified sequence
tgtttgcttttccagggctgatgtttgcagggtgttttttttttcttttgaaccaaagcagaaatcatcctgtatccttatgcaattcttccggcaggctccaacagataaataaagcccaccaccctccatgggtctacctttcccagcagagcacctgggttggtcccgaagcctccaaccacctgcacgcctgccagggcctctctggggcagccatgaagtccctcgtcctgctcctttgtcttgctcagctctggggctgccactcagccccacatggcccagggctgatttatagacaaccgaactgcgatgatccagaaactgaggaagcagctctggtggctatagactacatcaatcaaaaccttccttggggatacaaacacaccttgaaccagattgatgaagtaaaggtgtggcctcagcagccctccggagagctgtttgagattgaaatagacaccctggaaaccacctgccatgtgctggaccccacccctgtggcaagatgcagcgtgaggcagctgaaggagcatgctgtcgaaggagactgtgatttccagctgttgaaactagatggcaagttttccgtggtatacgcaaaatgtgattccagtccagactcagccgaggacgtgcgcaaggtgtgccaagactgccccctgctggccccgctgaacgacaccagggtggtgcacgccgcgaaagctgccctggccgccttcaacgctcagaacaacggctccaattttcagctggaggaaatttcccgggctcagcttgtgcccctcccaccttctacctatgtggagtttacagtgtctggcactgactgtgttgctaaagaggccacagaggcagccaagtgtaacctgctggcagaaaagcaatatggcttttgtaaggcaacactcagtgagaagcttggtggggcagaggttgcagtgacctgcatggtgttccaaacacagcccgtgagctcacagccccaaccagaaggtgccaatgaagcagtccccacacccgtggtggacccagatgcacctccgtcccctccacttggcgcacctggactccctccagctggctcacccccagactcccatgtgttactggcagctcctccaggacaccagttgcaccgggcgcactacgacctgcgccacaccttcatgggtgtggtctcattggggtcaccctcaggagaagtgtcgcacccccggaaaacacgcacagtggtgcagcctagtgttggtgctgctgctgggccagtggttcctccatgtccggggaggatcagacacttcaaggtctaggctagacatggcagagatgaggaggtttggcacagaaaacatagccaccattttgtccaagcctgggcatgggtggggggccttgtctgctggccacgcaagtgtcacatgcgatctacattaatatcaagtcttgactccctacttcccgtcattcctcacaggacagaagcagagtgggtggtggttatgtttgacagaaggcattaggttgacaacttgtcatgattttgacggtaagccaccatgattgtgttctct

SEQ ID NO: 119213 - DNA, 1104 bp, Artificial Sequence
  derived and/or modified sequence
atgaagagcctggtgctgctgctgtgcctggcccagctgtggggctgtcactcagccccacacggcccgggtctgatctatagacaacctaactgtgatgacccggagacagaagaggccgcactggtagccatcgactacataaatcagaatctgccttggggttataagcatactcttaaccagatcgacgaagtaaaagtatggccacagcaaccaagtggcgagctttttgagattgaaatcgatacactcgagacaacctgccacgttttagatcccactccggtggcaaggtgtagcgtgcggcagctgaaggagcacgccgtagagggggactgtgatttccaactactgaaattggatgggaaattcagcgtcgtctatgcgaaatgtgacagcagcccagattccgctgaggatgtaagaaaggtgtgtcaagactgcccgctgctagctcctctaaatgataccagggtcgtgcatgctgcaaaggctgccctggcagcctttaacgcgcagaataacggttcaaactttcagctagaagaaatttctcgtgcacaactcgtccctctgcctccgtctacgtacgtggaatttacggtctcaggcacagactgtgtggcaaaggaggcaaccgaggccgccaaatgcaacttgctcgctgagaaacagtacggcttttgtaaggcaacactctctgaaaaacttggaggagcagaagtcgctgtaacttgcatggtatttcagactcagcccgtgagcagccagccccagccagagggcgctaatgaggcagtgccaacacccgtcgtcgatcctgatgcacccccttctccgcccctgggcgctcccggcttgccccctgccggctcgcccccggattctcacgtcctcctagcagcccctccgggtcaccagctccatagggcccactatgatcttcgccacacctttatgggcgtcgtgagtcttggctccccgtcaggcgaagtgtcccatcctagaaagacccggacagtggttcaacctagcgtgggggcggccgcgggaccagtcgtccctccttgtccgggcaggatacgccacttcaaggtgtag

SEQ ID NO: 119214 - DNA, 1302 bp, Artificial Sequence
  derived and/or modified sequence
atgttcgccggctgcttcttcttcctgctgaaccagagccggaaccacccagtgagcctgtgcaatagctccggtcgcttgcaacagattaataaggcccaccaccccccgtgggtgtacctttcccagcaaagcacttgggttggccctgaggccagtaatcacctgcatgcctgccagggccttagcggagcagcaatgaaaagtttggttctgctcttgtgcctggcgcagctgtggggttgtcactctgctccccacggtccggggctcatttacaggcagccaaactgcgacgaccccgaaacagaagaagcagccctcgtggccattgattacatcaaccagaacctcccttgggggtacaagcatactcttaaccaaatcgatgaagtgaaagtctggcctcagcagccctctggtgaactttttgagatcgaaatcgatactctcgaaacaacctgtcacgtcctggaccccactcctgtcgcgagatgttccgtgcgccagcttaaagaacatgccgtcgagggcgattgtgacttccagctgctaaaactcgacgggaagtttagcgtcgtctacgctaaatgtgactcctccccagactcagctgaggacgtaagaaaggtgtgtcaggactgccctctcctcgcccctctgaacgatactagagtcgttcacgccgccaaagcagcactcgctgccttcaacgcgcaaaacaatgggagcaacttccagctggaggagatctcaagggcccagttagtaccgcttccacccagcacttatgtggaatttacagtctccggtacagactgtgtggctaaggaagcaaccgaggccgccaagtgtaacctgttagcagagaaacagtatggattttgtaaggccaccctctctgaaaaactaggaggcgccgaggtcgctgtgacctgcatggtgttccagacacaacccgtcagcagtcagcctcagccagagggcgccaacgaagccgtgcctaccccggtcgtggaccccgacgcacccccctccccacctcttggagcacctgggctgcccccggcagggagccccccagatagtcacgtgctgctggccgccccccccgggcaccagctgcacagggcccattacgatttgcgccacacattcatgggagtggtgagcctggggagtccaagtggtgaagtctctcacccaagaaaaactaggacagtcgtgcaaccatccgtgggggccgctgctggccctgttgtcccaccatgccccggcaggatccggcatttcaaggtgtag

SEQ ID NO: 119215 - DNA, 1104 bp, Artificial Sequence
  derived and/or modified sequence
atgaagtccttggttcttctgctttgtctcgcccaactctggggatgccacagcgccccacatggacccggtttaatatacagacaacccaattgcgatgacccagagaccgaggaagccgctctggtggccatcgactacattaatcagaatctgccctggggctacaaacatacactgaaccagatagatgaagtcaaagtatggcctcaacaaccttctggcgagctgttcgagattgaaatagacaccctggagaccacatgtcacgttttagatccgacccccgtcgcacgctgtagcgttaggcagctgaaagagcacgccgtagagggtgattgcgacttccagctactaaaactggacgggaagttctccgtggtttatgccaaatgtgattcaagccccgattcagccgaagatgtcagaaaggtttgtcaagattgtcctctgctagcaccgctgaatgatacccgggtagtgcacgctgccaaggccgcattagcagccttcaatgcccagaacaatggatccaactttcagttagaggaaatttcccgggctcaactggtgcctctacctccctctacttatgttgagttcactgtgagcggtacggactgtgtggccaaggaagccaccgaagcagctaagtgcaatcttttggccgagaaacagtacggattttgtaaagccacacttagtgaaaaactcgggggagccgaggtagccgtaacgtgtatggtcttccagacacagcccgtgagttcccagccacaaccagaaggtgccaacgaagccgtgccaactcctgtagtggaccccgatgctccaccttcgccccctttgggtgcgcctggcctccctcctgcgggaagtccccctgattcacatgtcctcctggctgccccacctggccaccaactgcaccgagcgcattatgatttgagacacacgtttatgggagtcgtaagtttaggaagcccaagcggcgaggtatcgcatccaagaaagactaggacagtagtgcaacccagtgtgggcgctgcggctggtccagtggtgccaccgtgccctggacgcattcggcacttcaaagtgtag

SEQ ID NO: 119216 - DNA, 1302 bp, Artificial Sequence
  derived and/or modified sequence
atgttcgccggatgcttctttttcctgctgaatcagagtcggaatcaccctgtttctctttgcaatagctcagggcgactgcaacagattaataaggctcaccatccgccatgggtctatctgtctcagcagtccacttgggttggtccggaagctagtaatcatttacatgcatgccaggggctgtccggcgcagccatgaagtctttggttctccttctgtgtcttgcccaactctggggctgccacagcgcacctcatgggcctggcttaatatacaggcagcctaactgcgatgatcccgaaacagaagaggccgcactggtggcaattgattatataaatcagaatcttccttgggggtacaaacacactctgaatcagattgatgaggtgaaggtttggccccagcagccaagcggtgagctgttcgagatcgagattgacactctagaaactacctgccacgttcttgatccgactccggtagcgaggtgttctgtgcgccagctgaaggaacatgcagtcgagggcgactgtgatttccagttgctcaagctggatggcaagttcagtgtagtgtatgcaaaatgcgattcctcacccgactccgccgaagatgtgcgtaaagtgtgccaagattgtcccctcttggctcctcttaacgacaccagggtggtccacgccgctaaagctgctttagccgcattcaatgcccagaacaatggttctaatttccagctcgaagaaatttcccgggctcaactggtgcccctgcctccatcaacctatgtcgagttcactgtgtcaggtacggactgcgtggcgaaggaagccactgaggccgctaagtgcaatcttctcgccgaaaagcagtacggcttttgtaaagccactttatccgaaaagcttggcggagcagaggtggccgtcacttgcatggtgttccaaactcagcccgttagttcccagccacagccagaaggcgcaaatgaggctgtgccgacaccagtcgtggatcctgacgctccccctagtcctcctttgggagccccaggattgccgccagcgggatctcctccggactcgcacgtactcctggccgctccacctggccatcaactgcacagagcccactacgacttacggcatacttttatgggcgttgtgtcactgggctccccgagcggcgaggtgtcccacccaaggaagacacgaactgtcgtgcagccatcagtcggggcagcagcaggaccagtggtccccccttgtccgggacggattaggcacttcaaggtatag

SEQ ID NO: 119217 - DNA, 1104 bp, Artificial Sequence
  derived and/or modified sequence
atgaagagcctggtgctgctgctgtgcctggcccagctgtggggctgccacagcgccccccacggccccggcctgatctacagacagcccaactgcgacgaccccgagaccgaggaggccgccctggtggccatcgactacatcaaccagaacctgccctggggctacaagcacaccctgaaccagatcgacgaggtgaaggtgtggccccagcagcccagcggcgagctgttcgagatcgagatcgacaccctggagaccacctgccacgtgctggaccccacccccgtggccagatgcagcgtgagacagctgaaggagcacgccgtggagggcgactgcgacttccagctgctgaagctggacggcaagttcagcgtggtgtacgccaagtgcgacagcagccccgacagcgccgaggacgtgagaaaggtgtgccaggactgccccctgctggcccccctgaacgacaccagagtggtgcacgccgccaaggccgccctggccgccttcaacgcccagaacaacggcagcaacttccagctggaggagatcagcagagcccagctggtgcccctgccccccagcacctacgtggagttcaccgtgagcggcaccgactgcgtggccaaggaggccaccgaggccgccaagtgcaacctgctggccgagaagcagtacggcttctgcaaggccaccctgagcgagaagctgggcggcgccgaggtggccgtgacctgcatggtgttccagacccagcccgtgagcagccagccccagcccgagggcgccaacgaggccgtgcccacccccgtggtggaccccgacgccccccccagcccccccctgggcgcccccggcctgccccccgccggcagcccccccgacagccacgtgctgctggccgccccccccggccaccagctgcacagagcccactacgacctgagacacaccttcatgggcgtggtgagcctgggcagccccagcggcgaggtgagccaccccagaaagaccagaaccgtggtgcagcccagcgtgggcgccgccgccggccccgtggtgcccccctgccccggcagaatcagacacttcaaggtgtag

SEQ ID NO: 119218 - DNA, 1302 bp, Artificial Sequence
  derived and/or modified sequence
atgttcgccggctgcttcttcttcctgctgaaccagagcagaaaccaccccgtgagcctgtgcaacagcagcggcagactgcagcagatcaacaaggcccaccaccccccctgggtgtacctgagccagcagagcacctgggtgggccccgaggccagcaaccacctgcacgcctgccagggcctgagcggcgccgccatgaagagcctggtgctgctgctgtgcctggcccagctgtggggctgccacagcgccccccacggccccggcctgatctacagacagcccaactgcgacgaccccgagaccgaggaggccgccctggtggccatcgactacatcaaccagaacctgccctggggctacaagcacaccctgaaccagatcgacgaggtgaaggtgtggccccagcagcccagcggcgagctgttcgagatcgagatcgacaccctggagaccacctgccacgtgctggaccccacccccgtggccagatgcagcgtgagacagctgaaggagcacgccgtggagggcgactgcgacttccagctgctgaagctggacggcaagttcagcgtggtgtacgccaagtgcgacagcagccccgacagcgccgaggacgtgagaaaggtgtgccaggactgccccctgctggcccccctgaacgacaccagagtggtgcacgccgccaaggccgccctggccgccttcaacgcccagaacaacggcagcaacttccagctggaggagatcagcagagcccagctggtgcccctgccccccagcacctacgtggagttcaccgtgagcggcaccgactgcgtggccaaggaggccaccgaggccgccaagtgcaacctgctggccgagaagcagtacggcttctgcaaggccaccctgagcgagaagctgggcggcgccgaggtggccgtgacctgcatggtgttccagacccagcccgtgagcagccagccccagcccgagggcgccaacgaggccgtgcccacccccgtggtggaccccgacgccccccccagcccccccctgggcgcccccggcctgccccccgccggcagcccccccgacagccacgtgctgctggccgccccccccggccaccagctgcacagagcccactacgacctgagacacaccttcatgggcgtggtgagcctgggcagccccagcggcgaggtgagccaccccagaaagaccagaaccgtggtgcagcccagcgtgggcgccgccgccggccccgtggtgcccccctgccccggcagaatcagacacttcaaggtgtag

SEQ ID NO: 119219 - protein, 93 aa, Artificial Sequence
  derived and/or modified sequence
MEFDLNGNGDIDIMSLKRMLEKLGVPKTHLELKKLIGEVSSGSGETFSYPDFLRMMLGKRSAILKMILMYEEKAREKEKPTGPPAKKAISELP

SEQ ID NO: 119220 - protein, 147 aa, Artificial Sequence
  derived and/or modified sequence
MSQTRDLQGGKAFGLLKAQQEERLDEINKQFLDDPKYSSDEDLPSKLEGFKEKYMEFDLNGNGDIDIMSLKRMLEKLGVPKTHLELKKLIGEVSSGSGETFSYPDFLRMMLGKRSAILKMILMYEEKAREKEKPTGPPAKKAISELP

SEQ ID NO: 119221 - DNA, 444 bp, Artificial Sequence
  derived and/or modified sequence
atgtcacaaactagagacctccaggggggcaaggcatttgggctgctgaaagctcagcaggaagaacgactggacgaaataaacaagcagtttctggacgacccgaagtattcttcggatgaggacctcccttccaaactggagggtttcaaagaaaaatacatggagtttgacctgaatggaaacggtgacatcgatatcatgagcctgaaacgcatgcttgagaagctgggggtgcccaagacgcatctggaacttaaaaaactgatcggtgaagtgtcgagcggatcaggcgagaccttctcttatcccgattttctgaggatgatgcttggcaagagatcggctatcctgaaaatgattctgatgtatgaggagaaggctcgcgaaaaggagaaacctaccggaccccccgcaaagaaagcaatcagtgagttaccctag

SEQ ID NO: 119222 - DNA, 444 bp, Artificial Sequence
  derived and/or modified sequence
atgtctcagaccagagatctccagggcggcaaggccttcgggctgctgaaggctcagcaggaggagagactagacgaaatcaataaacagttcttggacgacccaaaatattcctccgacgaggaccttccaagcaagttggaagggtttaaggagaaatacatggaatttgatttaaatggcaatggggacatcgacatcatgagcctcaagaggatgctggagaagctcggcgttcccaaaactcacttagaactcaagaagctgatcggggaagtgtcatcagggtcaggggagacgttctcctatcctgactttcttcggatgatgctgggaaaaaggagtgccattttaaagatgatcctgatgtacgaggagaaggcccgagagaaggagaaaccgaccggaccacctgccaagaaggctatatctgagctaccttag

SEQ ID NO: 119223 - DNA, 444 bp, Artificial Sequence
  derived and/or modified sequence
atgagccagacccgtgacctgcaggggggtaaggcattcgggctcttgaaagctcagcaggaagagagactggacgaaattaacaaacagttcctcgacgatccaaagtattcttctgacgaagatttaccaagtaagctggagggatttaaggaaaagtatatggagttcgatttgaatggaaacggggacattgatataatgtctctcaaacgaatgctcgaaaagcttggcgtgcctaagacacacctggagttaaaaaagctgattggagaggtgagctctgggagcggagagacattttcatatcccgactttcttaggatgatgctggggaaaaggagtgccattctgaagatgatcctcatgtacgaagagaaggcaagagaaaaggagaagccaaccgggccgcctgcgaagaaagcaatctctgaactgccctag

SEQ ID NO: 119224 - DNA, 444 bp, Artificial Sequence
  derived and/or modified sequence
atgtctcaaacgcgagacttacagggaggcaaggcattcggcctcctgaaagctcaacaggaagagagactggacgaaatcaataagcagtttttggatgaccccaaatacagctctgacgaagacctcccctctaaactagaagggtttaaagagaagtatatggaattcgatctgaacgggaatggcgacatagatataatgtccctcaaacggatgctggaaaaattgggagtacctaagacacatctggagctgaagaagctgatcggagaagtgtcctcggggagcggcgagacattttcataccccgacttcctacgcatgatgctcggcaagcgaagcgccatcctcaagatgatcctgatgtacgaggagaaggctagagaaaaggagaaaccaaccggacccccagcgaagaaggctatttccgagctgccatag

SEQ ID NO: 119225 - DNA, 444 bp, Artificial Sequence
  derived and/or modified sequence
atgtcacagactagagacctgcagggaggcaaggctttcggtctcctcaaggctcagcaagaggaaagactagacgaaataaacaaacaattcctggatgatcccaagtattcctcggatgaagacctgcccagtaagttagagggcttcaaagagaaatacatggagtttgatcttaacggtaacggcgacatcgacatcatgagtttgaagcgcatgttggaaaaacttggagtacccaagactcacctggaattgaagaagctgatcggggaagtttctagcgggtctggcgagacattttcttatccggactttctgcgcatgatgctgggtaaacgctccgcaatcctaaagatgatcctgatgtatgaagaaaaagcacgcgaaaaggagaagccgaccgggcctcctgcaaaaaaggccatatcggagttaccgtag

SEQ ID NO: 119226 - DNA, 444 bp, Artificial Sequence
  derived and/or modified sequence
atgtcacagactcgtgatctgcagggcggcaaagctttcggcctgcttaaggcccagcaggaggagcgacttgacgaaattaataaacagtttttggacgatcctaaatactcttcagatgaggatttgccttctaagctggagggcttcaaagagaagtacatggaattcgacctaaacggcaacggggatattgacataatgagcctgaagagaatgcttgaaaagctgggagtccctaagactcatctcgaattaaagaaattaattggcgaggtgtcttctggttctggtgagacattttcttaccccgactttctgcggatgatgctcggaaagcgttccgccattctgaagatgatcctgatgtatgaagaaaaagcccgggaaaaagaaaaaccaactggacctccagccaaaaaagctatctctgagctgccttag

SEQ ID NO: 119227 - DNA, 444 bp, Artificial Sequence
  derived and/or modified sequence
atgagccagacccgggacctgcagggcggcaaggccttcggcctgctgaaggcccagcaggaggagcggctggatgagatcaacaagcagttcctggatgaccccaagtacagcagtgatgaggacctgcccagcaagctggagggcttcaaggagaagtacatggagtttgacctgaatggaaatggagacatcgacatcatgagcctgaagaggatgctggagaagctgggcgtgcccaagacccacctggagctgaagaagctgattggagaggtgagcagcggcagcggggagaccttctcctacccagacttcctgaggatgatgctgggcaagaggtctgccatcctgaagatgatcctgatgtatgaggagaaggcccgggagaaggagaagcccactggacctccagccaagaaggccatcagcgagctgccctag

SEQ ID NO: 119228 - DNA, 524 bp, Artificial Sequence
  derived and/or modified sequence
ctccttccacgttgtctcctccacctagcagttggttggcaaccccttcctcagtcccctgctgaaaaccctccagtcagcgcttatcccttctgctctctcccctcacccagagaaatacatggagtttgaccttaatggaaatggcgatattgatatcatgtccctgaaacgaatgctggagaaacttggagtccccaagactcacctagagctaaagaaattaattggagaggtgtccagtggctccggggagacgttcagctaccctgactttctcaggatgatgctgggcaagagatctgccatcctaaaaatgatcctgatgtatgaggaaaaagcgagagaaaaggaaaagccaacaggccccccagccaagaaagctatctctgagttgccctgatttgaagggaaaagggatgatgggattgaaggggcttctaatgacccagatatggaaacagaagacaaaattgtaagccagagtcaacaaattaaataaattaccccctcctccagatcaa

SEQ ID NO: 119229 - DNA, 711 bp, Artificial Sequence
  derived and/or modified sequence
ctgggaggcagaggaggaaggaatgaggggaaaggggaagtttgggaggaaggcttctgagaagactggtgggagagaaggagagcctgcagacagaggcctccagcttggtctgtctccccacctctaccagcatctgctgagctatgagccaaaccagggatttacagggaggaaaagctttcggactgctgaaggcccagcaggaagagaggctggatgagatcaacaagcaattcctagacgatcccaaatatagcagtgatgaggatctgccctccaaactggaaggcttcaaagagaaatacatggagtttgaccttaatggaaatggcgatattgatatcatgtccctgaaacgaatgctggagaaacttggagtccccaagactcacctagagctaaagaaattaattggagaggtgtccagtggctccggggagacgttcagctaccctgactttctcaggatgatgctgggcaagagatctgccatcctaaaaatgatcctgatgtatgaggaaaaagcgagagaaaaggaaaagccaacaggccccccagccaagaaagctatctctgagttgccctgatttgaagggaaaagggatgatgggattgaaggggcttctaatgacccagatatggaaacagaagacaaaattgtaagccagagtcaacaaattaaataaattaccccctcctccagatcaa

SEQ ID NO: 119230 - DNA, 524 bp, Artificial Sequence
  derived and/or modified sequence
ctccttccacgttgtctcctccacctagcagttggttggcaaccccttcctcagtccccggctgaaaaccctcgagtcagcgcttatcccttctgctctctcccctcacccagagaaatacatggagtttgaccttaatggaaatggcgatattgatatcatgtccctgaaacgaatgctggagaaacttggagtccccaagactcacctagagctaaagaaattaattggagaggtgtccagtggctccggggagacgttcagctaccctgactttctcaggatgatgctgggcaagagatctgccatcctaaaaatgatcctgatgtatgaggaaaaagcgagagaaaaggaaaagccaacaggccccccagccaagaaagctatctctgagttgccctgatttgaagggaaaagggatgatgggattgaaggggcttctaatgacccagatatggaaacagaagacaaaattgtaagccagagtcaacaaattaaataaattaccccctcctccagatcaa

SEQ ID NO: 119231 - DNA, 524 bp, Artificial Sequence
  derived and/or modified sequence
ctccttccacgttgtctcctccacctagcagttggttggcaaccccttcctcagtccccggctgaaaaccctccagtcagcgcttatcccttctgctctctcccctcacccagagaaatacatggagtttgaccttaatggaaatggcgatattgatatcatgtccctgaaacgaatgctggagaaacttggagtccccaagactcacctagagctaaagaaattaattggagaggtgtccagtggctccggggagacgttcagctaccctgactttctcaggatgatgctgggcaagagatctgccatcctaaaaatgatcctgatgtatgaggaaaaagcgagagaaaaggaaaagccaacaggccccccagccaagaaagctatctctgagttgccctgatttgaagggaaaagggatgatgggattgaaggggcttctaatgacccagatatggaaacagaagacaaaattgtaagccagagtcaacaaattaaataaattaccccctcctccagatcaa

SEQ ID NO: 119232 - DNA, 657 bp, Artificial Sequence
  derived and/or modified sequence
ggaaggcttctgagaagactggtgggagagaaggagagcctgcagacagaggcctccagcttggtctgtctccccacctctaccagcatctgctgagctatgagccaaaccagggatttacagggaggaaaagctttcggactgctgaaggcccagcaggaagagaggctggatgagatcaacaagcaattcctagacgatcccaaatatagcagtgatgaggatctgccctccaaactggaaggcttcaaagagaaatacatggagtttgaccttaatggaaatggcgatattgatatcatgtccctgaaacgaatgctggagaaacttggagtccccaagactcacctagagctaaagaaattaattggagaggtgtccagtggctccggggagacgttcagctaccctgactttctcaggatgatgctgggcaagagatctgccatcctaaaaatgatcctgatgtatgaggaaaaagcgagagaaaaggaaaagccaacaggccccccagccaagaaagctatctctgagttgccctgatttgaagggaaaagggatgatgggattgaaggggcttctaatgacccagatatggaaacagaagacaaaattgtaagccagagtcaacaaattaaataaattaccccctcctcc

SEQ ID NO: 119233 - DNA, 444 bp, Artificial Sequence
  derived and/or modified sequence
atgagccagacccgggacctgcagggcggcaaggccttcggcctgctcaaagctcagcaagaggagcgattggatgaaatcaacaagcagtttctcgatgaccccaagtatagcagcgatgaagaccttcccagtaaattggaggggtttaaagagaaatacatggagttcgaccttaatggcaatggggatatagatatcatgagcctcaaacgaatgctggaaaagcttggggtgcctaaaacccatctggagctgaaaaagttaatcggcgaggtctcttctggctcaggagagacttttagctaccctgatttcctgagaatgatgctcggaaaacgctccgctattcttaagatgatccttatgtacgaggagaaagcaagggaaaaggagaagcctactgggccgcccgccaaaaaggcaatcagcgaactcccttag

SEQ ID NO: 119234 - DNA, 444 bp, Artificial Sequence
  derived and/or modified sequence
atgagccagacccgggacctgcagggcggcaaggccttcggcctgttaaaagcacagcaggaggaaagactggacgaaatcaataagcaattcctggacgatccaaagtattcctctgatgaggatttgccctctaagctagaaggctttaaggagaagtatatggaatttgaccttaatgggaacggtgatattgatattatgagtcttaaacgcatgctggagaagctgggagtgccgaagacccatctggagctgaagaagctgatcggagaagtctcttctggcagtggggagacgttctcttatccagactttcttcgcatgatgttgggaaagcggagtgccattttaaagatgatcttgatgtacgaagaaaaggctcgggaaaaagagaaaccaaccggcccccccgcaaagaaggccattagcgaactcccatag

SEQ ID NO: 119235 - DNA, 444 bp, Artificial Sequence
  derived and/or modified sequence
atgagccagacccgggacctgcagggcggcaaggccttcggcctgctcaaagctcagcaggaagagagactggatgagatcaacaaacagtttctagatgaccctaaatatagttccgacgaggacctgccctccaagctggaaggcttcaaggaaaagtacatggagttcgaccttaatggaaatggtgatatcgatataatgtcattgaaaaggatgctggaaaagctcggggtgccaaagacccacctggagctgaagaagctcattggcgaggtgagcagcggttctggggagacatttagttatccggactttctgcgaatgatgctgggcaaacggagtgctattctgaaaatgattctgatgtatgaggaaaaggcgagggaaaaggaaaagcctacggggccacctgctaaaaaggcaattagcgagctgccatag

SEQ ID NO: 119236 - DNA, 444 bp, Artificial Sequence
  derived and/or modified sequence
atgagccagacccgggacctgcagggcggcaaggccttcggcctgctgaaggcacaacaggaggagcgcctcgacgagataaataagcagttccttgatgaccccaagtactctagtgatgaggatctgccatccaagttggaggggtttaaggagaagtatatggaattcgaccttaacggtaatggggatattgatatcatgtcattgaaacggatgcttgagaagctgggcgtaccaaagacccaccttgagctaaagaagttgattggagaggtttccagtgggagcggagaaactttctcttatcctgatttcctgagaatgatgttaggaaaaaggagtgctatcctcaagatgatcttaatgtacgaagagaaggcgcgagaaaaggagaaaccgaccgggcccccagcaaaaaaagcaataagtgaactgccttag

SEQ ID NO: 119237 - DNA, 444 bp, Artificial Sequence
  derived and/or modified sequence
atgagccagacccgggacctgcagggcggcaaggccttcggcctgctcaaggcacagcaggaggagaggctcgatgagataaataagcaattccttgacgacccaaagtattcctctgacgaggaccttcccagtaagctggaaggcttcaaggagaagtacatggaattcgacttgaacggcaacggcgatattgatattatgagtcttaaaagaatgctagagaagctaggagtgcccaagacacacctcgaacttaaaaagctcatcggagaggttagttccgggagcggtgagaccttttcgtaccccgattttctgaggatgatgttgggcaaacggagtgccattctgaaaatgattctgatgtatgaggaaaaagctagggagaaggagaaaccaactggacccccggccaagaaggccataagtgagctcccatag

SEQ ID NO: 119238 - DNA, 444 bp, Artificial Sequence
  derived and/or modified sequence
atgagccagacccgggacctgcagggcggcaaggccttcggcctgttgaaggctcagcaggaagaaaggcttgacgagatcaacaagcagttcctggacgatccgaaatattcctccgacgaagacctgcctagcaaacttgagggattcaaggagaagtacatggaatttgatctcaatggaaatggagatatagatattatgtcactgaagcgaatgctagaaaaactaggagtgcccaaaactcacctagagctgaaaaagttaattggagaagtatcctccggaagcggtgaaaccttttcatatcccgactttctgagaatgatgttgggcaaacgaagtgcgatcctgaaaatgattctgatgtatgaggaaaaagctagagaaaaggaaaagcctaccggccctcccgccaagaaggccattagtgaactgccatag

SEQ ID NO: 119239 - DNA, 444 bp, Artificial Sequence
  derived and/or modified sequence
atgagccaaacacgcgaccttcagggaggcaaggccttcggcctgctgaaggctcagcaggaggagcgcctcgacgagatcaataagcagttccttgatgacccaaagtattccagcgatgaggatcttcccagcaagctggagggatttaaggagaagtatatggagttcgatctaaatggcaacggagatattgacatcatgtcccttaaacgcatgctggagaagctgggtgtgcctaaaacccacctggaactcaagaaactgatcggcgaggtttcctcggggagcggtgaaaccttctcctaccctgatttcctgcgcatgatgcttggcaagcgtagtgcgatcctcaaaatgatccttatgtacgaggaaaaggccagagagaaagaaaagcccaccggaccacctgccaagaaagctatcagcgagttaccatag

SEQ ID NO: 119240 - DNA, 444 bp, Artificial Sequence
  derived and/or modified sequence
atgtcacagactcgagacctgcaagggggaaaagcattcggactgctaaaagcccagcaagaagaacgtctggacgaaatcaacaagcagttcctggatgaccccaaatacagcagtgacgaggacttaccatccaagctggagggcttcaaggaaaaatacatggagttcgatctgaacggtaacggcgatattgacatcatgtccctcaagcgcatgttggagaagctgggggtgccgaagacacaccttgagcttaaaaaactgattggcgaggtgtctagcggttcaggggagactttctcctatccagattttcttcgaatgatgctggggaaacggagcgctattctcaaaatgattctgatgtacgaagaaaaggcacgcgaaaaggagaagccaaccggcccacccgcaaagaaagcaatctccgaactgccatag

SEQ ID NO: 119241 - DNA, 444 bp, Artificial Sequence
  derived and/or modified sequence
atgtcccaaactagggatttgcagggcggaaaggcttttggcttactgaaagcccaacaggaggaacgtctggatgaaataaataagcagtttctcgatgatcctaaatatagcagtgacgaagacctgccctccaagcttgaaggttttaaggaaaagtacatggaattcgacctgaatggcaatggcgatattgacattatgtcactcaaaagaatgctggaaaagctgggtgtgcctaaaacacacttggaactgaaaaagctgataggagaagtgtcgtctgggtcaggcgaaactttctcataccccgattttctacgcatgatgcttggaaaacgatctgccattttgaagatgattctaatgtacgaggagaaagcaagggagaaggaaaaacccactgggccaccggctaaaaaggccatctccgagctgccttag

SEQ ID NO: 119242 - DNA, 444 bp, Artificial Sequence
  derived and/or modified sequence
atgtctcagacgcgcgacttacagggaggcaaagcttttgggctgctgaaggcccaacaagaagagaggttggacgagatcaataagcagttcctggatgaccctaaatacagtagtgacgaggatttgccctcgaaactcgagggcttcaaggaaaagtacatggaatttgacctcaacggaaacggagacattgatattatgagcctcaagcgtatgttggagaagctgggcgtgcccaagacacatctagagctgaagaagctgattggcgaagtgagctccgggagcggcgagacgttctcataccctgactttctgcgtatgatgctcggaaagaggagcgcaattctgaagatgatcctaatgtatgaggaaaaagccagggagaaggagaagcccacgggacctccagctaaaaaagctatctcagagctgccctag

SEQ ID NO: 119243 - DNA, 444 bp, Artificial Sequence
  derived and/or modified sequence
atgtcacaaactagggacttacaggggggtaaggcctttgggcttctgaaggcgcaacaagaagagcgactggacgaaatcaataagcaattcctcgacgacccaaaatactcctcagacgaggacctcccttctaagcttgaggggtttaaggagaagtatatggagtttgacctcaacggcaacggtgacattgacatcatgagtctcaagagaatgttagaaaagttgggcgtcccaaaaacccatctagagcttaaaaagctgataggtgaagtctcaagcggctctggtgagacattctcctaccctgatttcctacgcatgatgctaggaaagcggagtgccatcttgaagatgatcctcatgtacgaagaaaaggcccgagagaaagaaaaacctacaggtccacccgcaaaaaaagcaatatctgagcttccctag

SEQ ID NO: 119244 - DNA, 444 bp, Artificial Sequence
  derived and/or modified sequence
atgtcccagaccagagacctccagggcggaaaggcgttcgggctgctcaaggctcagcaggaagagcggctggacgagattaataagcagttcctggacgatccaaagtacagtagtgacgaggatctaccttccaagctcgaggggtttaaggagaaatacatggagttcgacttgaatggaaatggagatatcgacattatgagcctgaagcgaatgttggaaaagctcggagtgcctaaaactcaccttgagttgaaaaagctaatcggggaagtatcgagcggaagcggggagaccttcagctatcctgatttcctccgtatgatgctcggtaagagatccgctattctcaaaatgatcctgatgtacgaggaaaaggccagagaaaaagagaagcccacaggccctcccgcaaagaaagcaatttcggagctgccttag

SEQ ID NO: 119245 - DNA, 444 bp, Artificial Sequence
  derived and/or modified sequence
atgagccagaccagagacctgcagggcggcaaggccttcggcctgctgaaggcccagcaggaggagagactggacgagatcaacaagcagttcctggacgaccccaagtacagcagcgacgaggacctgcccagcaagctggagggcttcaaggagaagtacatggagttcgacctgaacggcaacggcgacatcgacatcatgagcctgaagagaatgctggagaagctgggcgtgcccaagacccacctggagctgaagaagctgatcggcgaggtgagcagcggcagcggcgagaccttcagctaccccgacttcctgagaatgatgctgggcaagagaagcgccatcctgaagatgatcctgatgtacgaggagaaggccagagagaaggagaagcccaccggcccccccgccaagaaggccatcagcgagctgccctag

SEQ ID NO: 119246 - protein, 1723 aa, Artificial Sequence
  derived and/or modified sequence
MEKRSSGRRSGRRRGSQKSTDSPGADAELPESAARDDAVFDDEVAPNAASDNASAEKKVKSPRAALDGGVASAASPESKPSPGTKGQLRGESDRSKQPPPASSPTKRKGRSRALEAVPAPPASGPRAPAKESPPKRVPDPSPVTKGTAAESGEEAARAIPRELPVKSSSLLPEIKPEHKRGPLPNHFNGRAEGGRSRELGRAAGAPGASDADGLKPRNHFGVGRSTVTTKVTLPAKPKHVELNLKTPKNLDSLGNEHNPFSQPVHKGNTATKISLFENKRTNSSPRHTDIRGQRNTPASSKTFVGRAKLNLAKKAKEMEQPEKKVMPNSPQNGVLVKETAIETKVTVSEEEILPATRGMNGDSSENQALGPQPNQDDKADVQTDAGCLSEPVASALIPVKDHKLLEKEDSEAADSKSLVLENVTDTAQDIPTTVDTKDLPPTAMPKPQHTFSDSQSPAESSPGPSLSLSAPAPGDVPKDTCVQSPISSFPCTDLKVSENHKGCVLPVSRQNNEKMPLLELGGETTPPLSTERSPEAVGSECPSRVLVQVRSFVLPVESTQDVSSQVIPESSEVREVQLPTCHSNEPEVVSVASCAPPQEEVLGNEHSHCTAELAAKSGPQVIPPASEKTLPIQAQSQGSRTPLMAESSPTNSPSSGNHLATPQRPDQTVTNGQDSPASLLNISAGSDDSVFDSSSDMEKFTEIIKQMDSAVCMPMKRKKARMPNSPAPHFAMPPIHEDHLEKVFDPKVFTFGLGKKKESQPEMSPALHLMQNLDTKSKLRPKRASAEQSVLFKSLHTNTNGNSEPLVMPEINDKENRDVTNGGIKRSRLEKSALFSSLLSSLPQDKIFSPSVTSVNTMTTAFSTSQNGSLSQSSVSQPTTEGAPPCGLNKEQSNLLPDNSLKVFNFNSSSTSHSSLKSPSHMEKYPQKEKTKEDLDSRSNLHLPETKFSELSKLKNDDMEKANHIESVIKSNLPNCANSDTDFMGLFKSSRYDPSISFSGMSLSDTMTLRGSVQNKLNPRPGKVVIYSEPDVSEKCIEVFSDIQDCSSWSLSPVILIKVVRGCWILYEQPNFEGHSIPLEEGELELSGLWGIEDILERHEEAESDKPVVIGSIRHVVQDYRVSHIDLFTEPEGLGILSSYFDDTEEMQGFGVMQKTCSMKVHWGTWLIYEEPGFQGVPFILEPGEYPDLSFWDTEEAYIGSMRPLKMGGRKVEFPTDPKVVVYEKPFFEGKCVELETGMCSFVMEGGETEEATGDDHLPFTSVGSMKVLRGIWVAYEKPGFTGHQYLLEEGEYRDWKAWGGYNGELQSLRPILGDFSNAHMIMYSEKNFGSKGSSIDVLGIVANLKETGYGVKTQSINVLSGVWVAYENPDFTGEQYILDKGFYTSFEDWGGKNCKISSVQPICLDSFTGPRRRNQIHLFSEPQFQGHSQSFEETTSQIDDSFSTKSCRVSGGSWVVYDGENFTGNQYVLEEGHYPCLSAMGCPPGATFKSLRFIDVEFSEPTIILFEREDFKGKKIELNAETVNLRSLGFNTQIRSVQVIGGIWVTYEYGSYRGRQFLLSPAEVPNWYEFSGCRQIGSLRPFVQKRIYFRLRNKATGLFMSTNGNLEDLKLLRIQVMEDVGADDQIWIYQEGCIKCRIAEDCCLTIVGSLVTSGSKLGLALDQNADSQFWSLKSDGRIYSKLKPNLVLDIKGGTQYDQNHIILNTVSKEKFTQVWEAMVLYT

SEQ ID NO: 119247 - DNA, 951 bp, Artificial Sequence
  derived and/or modified sequence
atgcagaaacccaagaccgtggcatgggagaacctcggccccgagatgtcagcgcttggtacggcgttcagccgggagggcgggagaaaggtggagtttcctactgatcccaaggtggtggtctatgagaagccttttttcgagggaaaatgcgttgaactcgagacggggatgtgcagcttcgtgatggaagggggagagaccgaagaagcaacaggcgatgatcacctgcctttcacatccgtcggttctatgaaagtgctgaggggaatttgggtggcctacgagaaaccagggttcaccggccatcagtacctgctcgaagagggcgaatatcgagactggaaggcgtggggcgggtataacggagagttacagagcctgaggcccatcctgggcgatttcagcaatgcacatatgattatgtactccgagaaaaacttcgggtccaagggaagcagtattgacgtcctgggaatcgtagctaatctgaaagaaacaggttatggggtgaaaacccaaagcattaacgtactgagcggggtgtgggtggcctatgagaaccccgactttacaggggaacagtacatcctcgataagggcttttatacaagtttcgaagactggggaggcaaaaattgcaagatttctagcgtccaaccaatttgcttggactcgttcaccgggccccgacgtcgtaatcagattcacctgttctctgagcctcagtttcagggccacagtcagagctttgaggagactaccagtcaaattgatgacagcttctccacgaagtcctgcagagtaagcggcggcagctgggtggtgtatgacggagagaattttactggcaatcagtacgtgttagaggaagggcactatccatgtctcagtgcgatggggtgtcccccaggggccaccttcaagagcctgcggtttattgatgtgtag

SEQ ID NO: 119248 - DNA, 951 bp, Artificial Sequence
  derived and/or modified sequence
atgcagaagcccaagacagtggcctgggagaacctgggccctgagatgtctgccctgggcacagccttcagccgggagggcggcaggaaggtggagttccccacagaccccaaggtggtggtgtatgagaagcccttctttgagggcaaatgtgtggagctggagaccggcatgtgcagctttgtgatggagggcggggagacagaggaggccactggagatgaccacctgcccttcacctctgtgggctccatgaaggtgctgcggggcatctgggtggcctatgagaagccaggcttcaccggccaccagtacctgctggaggagggggagtacagagactggaaggcctggggcggctacaacggggagctgcagagcctgcggcccatcctgggggacttcagcaatgcccacatgatcatgtacagcgagaagaactttggcagcaagggcagcagcattgatgtgctgggcatcgtggccaacctgaaggagaccggctatggagtgaagacccagagcatcaacgtgctgagcggcgtgtgggtggcctatgaaaatccagacttcaccggggagcagtacatcctggacaagggcttctacaccagctttgaggactggggcggcaagaactgcaagatcagctctgtgcagcccatctgcctggacagcttcaccggccccaggagaagaaaccagatccacctgttcagcgagccccagttccagggccacagccagagctttgaggagaccaccagccagattgatgacagcttcagcaccaagagctgccgggtgtctgggggctcctgggtggtgtatgatggagagaacttcaccggcaaccagtatgtgctggaggagggccactacccctgcctgagcgccatgggctgccccccaggggccaccttcaagagcctgcgcttcattgatgtgtag

SEQ ID NO: 119249 - DNA, 951 bp, Artificial Sequence
  derived and/or modified sequence
atgcagaagcccaagaccgtggcctgggagaacctgggccccgagatgtctgccctgggcaccgctttttcgcgcgaaggcggccggaaggtggaatttcctacagatcctaaggtggtggtgtacgagaagcctttcttcgagggaaagtgtgttgaacttgagacaggcatgtgctcctttgtgatggagggaggtgaaacggaagaggccacaggagacgaccacctgccttttacatcggtgggctccatgaaggtcctgcggggtatttgggtggcctatgagaagcctggcttcaccggacatcagtacctgctggaggagggcgagtatcgagattggaaagcttggggcggctataatggtgaactccagtcattacggccaatactaggcgacttctcaaatgcccacatgatcatgtatagtgaaaaaaattttggctccaaaggaagcagcattgacgtcttgggcatcgtagctaacctaaaggagacaggctacggcgtgaagacccaatccatcaatgtgttatccggcgtgtgggtggcttatgaaaaccccgactttactggagagcagtatatccttgacaagggcttttatacttctttcgaggactggggcggaaagaactgcaaaatctcatcggtacagccaatatgtctggactctttcactggtccaagaaggagaaaccagatacacttgttttccgaaccccagtttcaggggcacagccagagctttgaagagaccactagtcagatcgatgactccttctcgacaaagtcctgtagagtatcaggagggtcttgggtcgtttacgatggggagaatttcacaggaaatcagtatgttctggaagagggacactacccgtgtctttcagccatggggtgtccccccggagcaacattcaagtcacttagattcattgacgtctag

SEQ ID NO: 119250 - DNA, 951 bp, Artificial Sequence
  derived and/or modified sequence
atgcagaaacctaaaaccgtcgcctgggagaatttgggaccggaaatgagtgctcttggaaccgcattcagcagagagggtggcagaaaggtagagtttccaactgatcccaaggtggttgtgtacgagaaacctttttttgaaggcaaatgtgtcgagctcgagaccggaatgtgttcttttgtcatggaaggcggtgaaactgaggaggctaccggcgatgaccatctcccattcacttctgttggttcaatgaaagtgctgaggggaatctgggtggcctatgaaaaaccaggcttcaccggacatcagtatctgctcgaggaaggtgagtaccgcgattggaaggcttggggcggttataacggggagttgcagtctctgagacctatcctgggggatttcagcaacgcccacatgatcatgtactcagagaagaacttcggaagcaagggttcctccatcgacgtactcggaatcgtggctaatctgaaggaaacgggatacggcgttaaaacacagtccattaacgtgctaagcggcgtgtgggtggcttacgagaatcccgattttactggcgagcagtatatcctcgataagggattttacacatccttcgaggattggggcggtaaaaactgcaaaatatcctctgtgcagcccatttgtctagacagctttactggcccacgccgtcgcaatcagatccatttattttctgaacctcaatttcagggccactcacaaagttttgaggagaccacaagccaaatcgacgacagcttttctacaaagtcgtgtcgggtcagcggaggaagctgggtggtttacgacggagaaaactttaccggcaatcaatacgttttggaggaggggcactatccttgtctttcagccatgggatgccccccaggggcaacattcaaatctttgcgcttcattgacgtctag

SEQ ID NO: 119251 - DNA, 1032 bp, Artificial Sequence
  derived and/or modified sequence
gagagttaaaccgaagggaatggtagagacggcaaccccgggcctgtgcccagctgaaggatgaactgagggcaggatcgttaaatgcagaagccgaagacagtggcctgggagaatctgggtccagagatgtcagctcttggaactgctttttcaagagaaggtggccgtaaagttgaattccctacagatccaaaggtagttgtttatgaaaagcctttctttgaaggaaaatgtgtggaactagaaacaggaatgtgtagttttgtcatggagggaggtgaaacagaagaggcgactggagacgatcatttgccgtttacgtcagtggggtctatgaaagttctaagaggcatttgggttgcatatgagaaacctggatttaccggtcatcagtatttgctagaagaaggagaatacagggactggaaagcctggggaggttacaatggagagcttcagtctttacgacctatattaggtgatttttcaaatgctcacatgataatgtacagtgaaaaaaactttggatccaaaggttccagtattgatgtattgggaattgttgctaatttaaaggagactggatatggagtgaagacacagtctattaatgtactgagtggagtatgggtagcctatgaaaatcctgacttcacaggagaacagtatatactggataaaggattttataccagttttgaggactggggaggcaaaaattgtaagatctcttctgttcaacctatatgtttggattctttcactggcccaaggagacgaaatcagattcacttgttttcagaaccacagtttcaaggtcacagtcaaagttttgaagaaacaacaagtcaaattgatgattcattttctaccaagtcttgcagagtttcaggaggcagctgggttgtatatgatggagaaaatttcactggtaatcaatacgtgttggaagaaggccattatccttgtctgtctgcaatgggatgcccgcctggagcaactttcaagtctcttcgttttatagatgtt

SEQ ID NO: 119252 - DNA, 951 bp, Artificial Sequence
  derived and/or modified sequence
atgcagaagcccaagaccgtggcctgggagaacctgggccccgagatgagcgccctgggcaccgccttcagcagagagggcggcagaaaggtggagttccccaccgaccccaaggtggtggtgtacgagaagcccttcttcgagggcaagtgcgtggagctggagaccggcatgtgcagcttcgtgatggagggcggcgagaccgaggaggccaccggcgacgaccacctgcccttcaccagcgtgggcagcatgaaggtgctgagaggcatctgggtggcctacgagaagcccggcttcaccggccaccagtacctgctggaggagggcgagtacagagactggaaggcctggggcggctacaacggcgagctgcagagcctgagacccatcctgggcgacttcagcaacgcccacatgatcatgtacagcgagaagaacttcggcagcaagggcagcagcatcgacgtgctgggcatcgtggccaacctgaaggagaccggctacggcgtgaagacccagagcatcaacgtgctgagcggcgtgtgggtggcctacgagaaccccgacttcaccggcgagcagtacatcctggacaagggcttctacaccagcttcgaggactggggcggcaagaactgcaagatcagcagcgtgcagcccatctgcctggacagcttcaccggccccagaagaagaaaccagatccacctgttcagcgagccccagttccagggccacagccagagcttcgaggagaccaccagccagatcgacgacagcttcagcaccaagagctgcagagtgagcggcggcagctgggtggtgtacgacggcgagaacttcaccggcaaccagtacgtgctggaggagggccactacccctgcctgagcgccatgggctgcccccccggcgccaccttcaagagcctgagattcatcgacgtgtag

SEQ ID NO: 119253 - protein, 583 aa, Artificial Sequence
  derived and/or modified sequence
MESKGASSCRLLFCLLISATVFRPGLGWYTVNSAYGDTIIIPCRLDVPQNLMFGKWKYEKPDGSPVFIAFRSSTKKSVQYDDVPEYKDRLNLSENYTLSISNARISDEKRFVCMLVTEDNVFEAPTIVKVFKQPSKPEIVSKALFLETEQLKKLGDCISEDSYPDGNITWYRNGKVLHPLEGAVVIIFKKEMDPVTQLYTMTSTLEYKTTKADIQMPFTCSVTYYGPSGQKTIHSEQAVFDIYYPTEQVTIQVLPPKNAIKEGDNITLKCLGNGNPPPEEFLFYLPGQPEGIRSSNTYTLTDVRRNATGDYKCSLIDKKSMIASTAITVHYLDLSLNPSGEVTRQIGDALPVSCTISASRNATVVWMKDNIRLRSSPSFSSLHYQDAGNYVCETALQEVEGLKKRESLTLIVEGKPQIKMTKKTDPSGLSKTIICHVEGFPKPAIQWTITGSGSVINQTEESPYINGRYYSKIIISPEENVTLTCTAENQLERTVNSLNVSAISIPEHDEADEISDENREKVNDQAKLIVGIVVGLLLAALVAGVVYWLYMKKSKTASKHVNKDLGNMEENKKLEENNHKTEA

SEQ ID NO: 119254 - protein, 305 aa, Artificial Sequence
  derived and/or modified sequence
MDPVTQLYTMTSTLEYKTTKADIQMPFTCSVTYYGPSGQKTIHSEQAVFDIYYLDLSLNPSGEVTRQIGDALPVSCTISASRNATVVWMKDNIRLRSSPSFSSLHYQDAGNYVCETALQEVEGLKKRESLTLIVEGKPQIKMTKKTDPSGLSKTIICHVEGFPKPAIQWTITGSGSVINQTEESPYINGRYYSKIIISPEENVTLTCTAENQLERTVNSLNVSAISIPEHDEADEISDENREKVNDQAKLIVGIVVGLLLAALVAGVVYWLYMKKSKTASKHVNKDLGNMEENKKLEENNHKTEA

SEQ ID NO: 119255 - protein, 344 aa, Artificial Sequence
  derived and/or modified sequence
  misc_feature (1)..(1): Xaa can be any naturally occurring amino acid
XLGDCISEDSYPDGNITWYRNGKVLHPLEGAVVIIFKKEMDPVTQLYTMTSTLEYKTTKADIQMPFTCSVTYYGPSGQKTIHSEQAVFDIYYLDLSLNPSGEVTRQIGDALPVSCTISASRNATVVWMKDNIRLRSSPSFSSLHYQDAGNYVCETALQEVEGLKKRESLTLIVEGKPQIKMTKKTDPSGLSKTIICHVEGFPKPAIQWTITGSGSVINQTEESPYINGRYYSKIIISPEENVTLTCTAENQLERTVNSLNVSAISIPEHDEADEISDENREKVNDQAKLIVGIVVGLLLAALVAGVVYWLYMKKSKTASKHVNKDLGNMEENKKLEENNHKTEA

SEQ ID NO: 119256 - DNA, 1752 bp, Artificial Sequence
  derived and/or modified sequence
atggaatctaagggcgcctcctcctgtaggctgctgttttgcctcttgataagtgccactgtattccgccctggtttggggtggtacactgtgaactcggcctacggtgacactattatcatcccctgtcgacttgacgtgcctcaaaatctgatgttcggtaaatggaaatacgagaagccagacgggtcccccgtctttatcgctttccggagctcaacaaaaaagagtgttcagtatgacgacgtgcctgagtataaagatagactcaatctgagcgagaattacacgctctcaatttccaatgccaggatctccgacgagaaaagattcgtctgtatgctcgttactgaagacaacgtttttgaggcaccaaccatcgtgaaggtcttcaaacagccttcaaaaccagaaatcgtgtcgaaagctttgtttctggaaacagagcagctgaagaagctgggggactgcatttcagaagactcgtatcctgatggcaatataacgtggtaccgcaatgggaaagtgcttcatccactggagggagcagtcgtgatcatcttcaaaaaggagatggatcctgttactcagttgtacacaatgacgtccacgctcgagtacaaaaccaccaaagccgacattcagatgccattcacctgtagtgttacttactacggtcccagcggtcaaaaaactatccacagcgagcaagcagtgttcgacatctactaccccaccgaacaagtgaccattcaggtactcccgcccaagaacgccatcaaagaaggcgataacattactttaaagtgcttgggcaatggcaatcctcctcctgaggagttcctgttctacctaccaggtcagcccgaaggcattcgttcttctaacacctacactctgacagatgtgcgcagaaatgcaactggagactataaatgctccctgatcgataagaaaagtatgatagctagcacagcgatcaccgttcactacctggatttgagcctcaacccttctggagaggtcacccgccaaattggggatgccctgccagtttcgtgtacaatctccgcgtccaggaatgccacagtagtttggatgaaagacaatatacggctgagatcgtccccttcattttcctccctgcactaccaagacgctgggaactacgtgtgtgagacagccctgcaggaggtcgagggtctcaaaaagcgtgagtcactgaccctgatcgtagaaggcaagccgcagatcaagatgaccaagaaaacagacccctcgggcctcagtaaaacaattatctgtcatgttgaaggttttcctaagccagccatccagtggacgatcaccggctccgggtctgtgataaaccaaacagaggaaagtccatatattaatgggagatattactctaagataatcattagcccagaggagaatgtgaccttgacatgcaccgccgaaaaccagctagaacggacggtgaattcacttaacgtatcagctatctcaattcctgaacacgacgaggctgacgagatctcggacgagaatagagaaaaagtgaacgatcaggctaaactcatcgtcgggattgtcgttggtttgcttctggccgccctcgtggcgggcgtggtatattggctctacatgaagaaatccaaaactgcctctaaacatgtaaacaaagacctgggtaacatggaagagaacaaaaagctggaggagaataatcataagacagaggcatag

SEQ ID NO: 119257 - DNA, 918 bp, Artificial Sequence
  derived and/or modified sequence
atggatccggtgacccagctctataccatgacctccacactggaatacaaaaccactaaggctgatattcaaatgccattcacatgctcggtaacatactacgggccatcgggtcagaaaaccatacatagtgagcaggcagtgttcgacatctattacctggaccttagcttaaacccctcaggggaagtaacaaggcaaatcggagatgcactgcccgtctcttgtacaatctcagcgtccagaaatgccactgtcgtgtggatgaaagacaacatccgactccgatcaagtcccagcttctcttcactgcactaccaggacgccgggaattatgtgtgcgagacagccttgcaagaggttgagggtctgaagaagcgcgaatcactgacactcatagtggagggaaaaccccagatcaaaatgactaaaaagaccgacccatcagggctcagcaagaccataatctgccatgtggagggcttccccaagcccgccatccagtggaccataactggttcggggtcagtgattaaccagacggaggagtctccctacatcaatggccgctactattctaagatcatcatcagtccagaggagaatgtgaccctgacatgtacggcagagaaccaacttgaacggaccgtcaatagcctcaacgtgagcgccatcagcatccccgagcacgacgaggccgacgaaatttctgacgagaatagagagaaggttaacgaccaagcaaagctgattgtcgggatcgtcgttggccttctgctggccgcactagtggcaggcgtggtgtattggttgtatatgaagaaatccaagactgcgtccaagcatgtgaacaaggacctgggaaatatggaggaaaacaagaagttggaggagaataatcataagacagaggcttag

SEQ ID NO: 119258 - DNA, 1035 bp, Artificial Sequence
  derived and/or modified sequence
tgacttggagattgtatcagtgaggattcttatccggacggaaatatcacctggtacaggaatgggaaagtcctccatcctctcgagggtgcagtcgtgattatatttaagaaagaaatggaccccgtgacgcagctctacactatgacatccactctcgagtataagacgacgaaagctgacatccaaatgccctttacatgcagcgttacctattatggaccgagcggacagaaaaccattcattctgaacaggccgtcttcgatatttattatctagacctgagcctaaacccaagcggagaggtcactcggcagattggcgatgcgctaccggttagctgcaccatctccgcttcaaggaatgccacggtggtgtggatgaaggacaatatccggcttaggagtagtcctagtttcagttcccttcactatcaggacgcaggcaactatgtctgtgagactgctctgcaagaggtggaaggtctgaagaagagagagtctctaaccctgatcgtcgaaggcaagccccagatcaagatgacaaagaaaaccgatccctctggcctatcgaagactatcatatgccacgttgagggtttcccaaagcccgccatacaatggacaatcacagggtcggggtctgttatcaaccagacagaagaatctccgtatatcaacggccgctactactccaaaattataattagccccgaggaaaacgtgactctgacatgcacagcggagaatcagctcgaaaggacagttaatagtctgaatgtgagtgcgatcagcataccagagcatgatgaagccgacgaaatttcagacgaaaatcgcgagaaagtgaacgaccaggcaaaactgatcgtgggaatagtcgttgggctgctactggccgctctcgtcgccggcgtggtgtattggctgtacatgaagaagagcaagacagctagcaagcatgtcaataaggacttgggtaacatggaagagaataagaaactagaagaaaataatcacaagaccgaagcatag

SEQ ID NO: 119259 - DNA, 1752 bp, Artificial Sequence
  derived and/or modified sequence
atggagagcaagggggccagcagctgccgcctgctcttctgcctgctgatcagcgccaccgtcttccggcccggcctgggctggtacacagtgaacagcgcctatggagacaccatcatcatcccctgccgcctggatgtgccccagaacctgatgtttgggaagtggaagtatgagaagccagatggcagccctgtgttcatcgccttccgcagcagcaccaagaagtctgtgcagtatgatgatgtgcctgagtacaaggaccggctgaacctgtctgagaactacaccctgagcatcagcaatgcccgcatcagtgatgagaagagatttgtgtgcatgctggtgacagaggacaacgtgtttgaggcccccaccatcgtgaaggtgttcaagcagcccagcaagccagaaattgtgtccaaggccctcttcctggagacagagcagctgaagaagctgggggactgcatcagcgaggacagctacccagatggcaacatcacctggtacagaaatggcaaggtgctgcaccccctggagggcgctgtggtgatcatcttcaagaaggagatggaccctgtgacccagctgtacaccatgaccagcaccctggagtacaagaccaccaaggctgacatccagatgcccttcacctgcagcgtgacctactacggccccagcggccagaagaccatccacagcgagcaggccgtgtttgacatctactaccccacagagcaggtgaccatccaggtgctgccccccaagaatgccatcaaggagggggacaacatcaccctgaagtgcctgggcaatggaaaccccccacctgaggagttcctgttctacctgcccggccagcctgagggcatccgcagcagcaacacctacaccctgacagatgtgagaagaaatgccaccggggactacaagtgcagcctgattgacaagaagtccatgattgccagcacagccatcaccgtgcactacctggacctgagcctgaaccccagcggggaggtgacccggcagattggagatgccctgcctgtgtcctgcaccatcagcgccagcagaaatgccaccgtggtgtggatgaaggacaacatccggctgcggagcagccccagcttcagcagcctgcactaccaggatgctggcaactacgtgtgtgaaacagccctgcaggaggtggagggcctgaagaagcgggagagcctgaccctgattgtggagggcaagccccagatcaagatgaccaagaagacagaccccagcggcctgagcaagaccatcatctgccacgtggagggcttccccaagccagccatccagtggaccatcaccggcagcggcagcgtcatcaaccagacagaggagagcccctacatcaatggccgctactacagcaagatcatcatcagcccagaagaaaatgtgaccctgacctgcacagctgagaaccagctggagaggacagtgaacagcctgaatgtgtctgccatcagcatccctgagcatgatgaagcagatgagatcagtgatgaaaatcgggagaaggtgaatgaccaggccaagctgattgtgggcatcgtggtgggcctgctgctggccgccctggtggccggcgtggtgtactggctgtacatgaagaagagcaagacagccagcaagcacgtgaacaaggacctgggcaacatggaggagaacaagaagctggaggagaacaaccacaagacagaggcctag

SEQ ID NO: 119260 - DNA, 918 bp, Artificial Sequence
  derived and/or modified sequence
atggaccctgtgacccagctgtacaccatgaccagcaccctggagtacaagaccaccaaggctgacatccagatgcccttcacctgcagcgtgacctactacggccccagcggccagaagaccatccacagcgagcaggccgtgtttgacatctactacctggacctgagcctgaaccccagcggggaggtgacccggcagattggagatgccctgcctgtgtcctgcaccatcagcgccagcagaaatgccaccgtggtgtggatgaaggacaacatccggctgcggagcagccccagcttcagcagcctgcactaccaggatgctggcaactacgtgtgtgaaacagccctgcaggaggtggagggcctgaagaagcgggagagcctgaccctgattgtggagggcaagccccagatcaagatgaccaagaagacagaccccagcggcctgagcaagaccatcatctgccacgtggagggcttccccaagccagccatccagtggaccatcaccggcagcggcagcgtcatcaaccagacagaggagagcccctacatcaatggccgctactacagcaagatcatcatcagcccagaagaaaatgtgaccctgacctgcacagctgagaaccagctggagaggacagtgaacagcctgaatgtgtctgccatcagcatccctgagcatgatgaagcagatgagatcagtgatgaaaatcgggagaaggtgaatgaccaggccaagctgattgtgggcatcgtggtgggcctgctgctggccgccctggtggccggcgtggtgtactggctgtacatgaagaagagcaagacagccagcaagcacgtgaacaaggacctgggcaacatggaggagaacaagaagctggaggagaacaaccacaagacagaggcctag

SEQ ID NO: 119261 - DNA, 1035 bp, Artificial Sequence
  derived and/or modified sequence
tgactgggggactgcatcagcgaggacagctacccagatggcaacatcacctggtacagaaatggcaaggtgctgcaccccctggagggcgctgtggtgatcatcttcaagaaggagatggaccctgtgacccagctgtacaccatgaccagcaccctggagtacaagaccaccaaggctgacatccagatgcccttcacctgcagcgtgacctactacggccccagcggccagaagaccatccacagcgagcaggccgtgtttgacatctactacctggacctgagcctgaaccccagcggggaggtgacccggcagattggagatgccctgcctgtgtcctgcaccatcagcgccagcagaaatgccaccgtggtgtggatgaaggacaacatccggctgcggagcagccccagcttcagcagcctgcactaccaggatgctggcaactacgtgtgtgaaacagccctgcaggaggtggagggcctgaagaagcgggagagcctgaccctcatcgtggagggcaagccccagatcaagatgaccaagaagacagaccccagcggcctgagcaagaccatcatctgccacgtggagggcttccccaagccagccatccagtggaccatcactggaagtggcagcgtcatcaaccagacagaggagagcccctacatcaatggccgctactacagcaagatcatcatcagccctgaggagaatgtgaccctgacctgcacagctgagaaccagctggagaggacagtgaacagcctgaatgtgtctgccatcagcatccctgagcatgatgaagcagatgagatcagtgatgagaaccgggagaaggtgaatgaccaggccaagctgattgtgggcatcgtggtgggcctgctgctggccgccctggtggccggcgtggtgtactggctgtacatgaagaagagcaagacagccagcaagcacgtgaacaaggacctgggcaacatggaggagaacaagaagctggaggagaacaaccacaagacagaggcctag

SEQ ID NO: 119262 - DNA, 1752 bp, Artificial Sequence
  derived and/or modified sequence
atggagagcaagggcgccagcagctgccggctgctgttctgcctgttgatttctgctactgtgttcaggccgggactcgggtggtatactgtcaactctgcctatggggatacaataatcatcccatgtaggctggacgtaccacaaaatttgatgtttggcaagtggaaatacgagaaacccgacggttcacctgtcttcatcgcgttcaggagctctaccaaaaaaagcgtgcaatacgacgatgtccccgagtataaagataggctgaacctgtcagaaaattatactctctctatcagcaacgctagaatctctgacgagaagaggtttgtatgtatgcttgtcacagaagataacgtcttcgaggctcccaccatcgttaaggtgttcaaacagcccagcaagccagaaatcgtatcgaaggccttgttcctggagacggagcagctcaaaaagctgggggactgcatttcagaggatagctatcccgacggtaacattacctggtatcgtaacggcaaggtgctgcatcccttggaaggagccgtcgtaatcatctttaaaaaagaaatggacccagtgacacaactttatacgatgacctccactctcgaatacaaaacaactaaggcagacatacagatgccattcacttgctcagtcacgtactacgggccgtcgggtcagaaaaccatccattccgagcaggctgttttcgatatatactaccctactgaacaggtcactatccaagttttgcctcccaaaaatgctatcaaggagggagacaacattaccttgaagtgtctgggaaacggaaacccaccacccgaggagttcctcttctatctacccggtcagccggaaggtataagaagtagtaatacgtatacgcttacagatgttcggcgcaacgcaacgggggactacaagtgctcccttattgacaagaagtccatgatagctagcactgccataaccgttcactatctggacctttctttaaacccttcgggggaggtcacaaggcagatcggagatgcattgcctgtttcttgcaccattagcgcttcccgcaatgccactgtggtgtggatgaaagataatatcaggttaagatcttctccaagtttttcctccctgcattaccaggatgccggaaattacgtgtgcgagactgcactgcaagaagtggagggcctgaagaagcgggaaagcctgaccctgatagtcgaggggaagcctcagatcaagatgacaaagaagacagatccctctggcctctccaagactataatctgtcacgtggagggctttcccaaacctgctatccagtggacaatcaccggatcgggatctgtaattaaccagaccgaggagtccccctacatcaacggcaggtactacagtaaaataattatctcgccggaggaaaatgtcacgctgacttgtaccgctgaaaaccagcttgagaggaccgtgaactcgctgaatgtgtcagcaatttccattcccgagcatgacgaagctgatgagatctcagatgagaatcgcgaaaaagtaaacgatcaggcaaagctgattgttggaatcgtggtggggctgctgcttgctgccctggtggctggtgttgtttactggctgtatatgaagaaaagcaagaccgcatcgaagcacgtgaataaagacctgggcaatatggaggaaaataagaaacttgaagaaaacaaccacaaaaccgaagcttag

SEQ ID NO: 119263 - DNA, 918 bp, Artificial Sequence
  derived and/or modified sequence
atggaccccgtgacccagctgtacaccatgaccagcaccctggagtacaagaccactaaagcagatattcagatgccatttacttgttcagtgacctactatggtccctccggtcaaaaaacaatccactccgaacaagctgtatttgacatctattaccttgacctttctctgaaccccagcggcgaagtaactcgccagatcggcgatgccctgcctgtgagttgcactatctctgcttctcgcaatgccactgtggtgtggatgaaggacaacatccggcttcggtcatcaccaagcttttctagcctccactaccaggatgcgggaaattacgtttgtgaaaccgctcttcaagaggtggagggtctcaagaaacgcgagagcctaacattgatcgtagaggggaagccacaaatcaaaatgacgaagaaaactgaccccagtgggctaagcaaaactataatctgccacgtcgagggttttcccaaaccagctattcagtggactatcacgggatcaggatctgtgattaatcaaacggaggagtccccatatattaacggacggtactactctaaaattataatcagccccgaagaaaatgtcaccttaacttgtaccgcggagaatcagctcgagaggaccgtcaatagtctgaatgtgagcgccattagcattccggaacacgatgaggctgacgagatttctgacgagaacagggagaaagtcaacgaccaggccaagctcatcgtgggcatcgtggtcggtttgctactggccgccctggttgccggagtcgtgtattggctttacatgaagaaaagtaagaccgcatctaagcacgttaataaggaccttggcaatatggaagagaacaagaaactggaagagaataaccacaagactgaggcctag

SEQ ID NO: 119264 - DNA, 1035 bp, Artificial Sequence
  derived and/or modified sequence
tgactgggcgactgcatcagcgaggacagctaccccgacggcaacataacatggtatcgtaacggaaaggttctgcatccactagaaggcgcagtggtgattatctttaagaaagagatggacccagtgacccaattgtatacaatgacctccaccctggagtataaaactaccaaagctgatatccagatgccttttacctgctctgtgacatattatggaccctctgggcaaaagacgatccattcagagcaggcggtgttcgacatttactatctggatctgtctcttaaccctagcggtgaggtcacaaggcagattggcgatgccttgccggtgagctgcaccatatccgctagccggaatgcaaccgtcgtgtggatgaaagataacattagactgaggagctctcctagcttctcgagcctgcactaccaggacgctgggaactatgtgtgcgagactgctcttcaagaggtagagggactcaaaaagcgggagtcactgacactgatcgtggagggcaaacctcagattaagatgaccaaaaagaccgacccatctggcctctctaagaccattatttgccatgtagaagggttccccaagccagcgatacagtggactatcactggcagtgggtctgtcattaaccaaacagaagagtctccttacatcaatggtaggtattattccaagatcattattagccccgaggagaacgtcaccctgacttgtacggcagaaaaccaactcgaacgaacagtaaatagcctaaacgtgagtgcaatttccatccccgaacatgatgaggctgacgaaatctcggacgagaaccgcgaaaaagtgaatgatcaagccaaactcatcgtggggattgtcgtgggattgctcctagcagccttggtcgccggggtggtatattggctgtatatgaagaaatcgaaaacggcgtccaaacacgtcaataaagacctgggaaatatggaagaaaacaaaaaactggaggagaataaccataaaacagaagcgtag

SEQ ID NO: 119265 - DNA, 1752 bp, Artificial Sequence
  derived and/or modified sequence
atggagagcaaaggtgcctcaagctgcaggttgctgttttgtctgctaatctctgcaactgtgtttcggccaggcctggggtggtacactgtgaattccgcttacggcgatacgattatcatcccatgtagactcgatgtccctcagaacttaatgtttgggaagtggaaatacgagaaacctgatgggtcacccgtgttcatcgcgttcagatcttcaaccaagaaatcagtgcagtatgatgacgtcccagagtacaaggatcggcttaacctctctgaaaattacacgctgtcgatcagtaatgcgaggattagcgatgaaaaaaggtttgtttgcatgctggtcactgaggacaatgtctttgaggcccctaccatcgttaaggtgtttaagcagcctagcaagccagaaatcgtatctaaagcactgtttttggagacagaacaacttaaaaagttgggcgattgtatatcagaagatagttacccagacgggaatattacctggtacagaaatggcaaggtcttgcacccgctagagggcgcagtggtgataatattcaagaaagagatggaccccgtcacccagctatacaccatgacgtcaacgctggagtacaagacaaccaaggcagatatccagatgccgtttacctgctctgtcacgtactatggcccatccggacagaagactatccatagtgagcaggccgtgttcgacatctactaccctactgagcaggtgactatccaggtgcttccgcctaaaaacgcaattaaagagggcgataacattacattaaaatgcctgggaaacggaaacccaccccctgaagaatttctgttctatctgcccggtcagccagaggggattcggagcagcaatacctatacacttactgatgtcagacgaaatgctaccggagactacaaatgttccctcatcgacaaaaagtcaatgattgcttctaccgcgataactgtgcattatctcgacctgtcactcaatccatctggtgaggtcactcggcaaattggagacgccctcccagtgagctgcacaataagtgcatcccgcaatgccactgttgtgtggatgaaggacaacatcaggttgcgctcttcgccatccttctcttctctccactaccaggacgccggaaattatgtgtgcgaaactgctctacaagaagttgaaggcttaaaaaagcgagagtctcttacactcatcgtggagggcaaaccccaaatcaagatgacgaaaaagaccgacccgagcggactctcaaagactataatctgtcacgtggagggctttccgaagccagccattcagtggactattaccggctcaggtagcgtcattaaccaaacggaagagtctccatatattaatggcaggtactatagcaaaatcatcatcagtccagaggaaaacgtgacactgacctgtacggccgagaaccagctggaacgaacggtgaatagcctgaacgtgtctgccatctccatccccgagcacgatgaagccgacgagattagtgacgagaatagagagaaggttaacgaccaggcaaagcttatcgtgggcatcgtggtggggcttttgcttgcagctctcgtggctggtgtggtatactggctgtatatgaagaagtccaagacagcttccaagcacgttaacaaggatctaggcaacatggaggagaataaaaaactcgaggaaaacaaccacaagacggaggcatag

SEQ ID NO: 119266 - DNA, 918 bp, Artificial Sequence
  derived and/or modified sequence
atggacccggtaactcagctctataccatgacatctactcttgaatacaagactactaaagcagatatccaaatgccgtttacctgtagcgtgacatactatggtccctctggacagaagacaatccatagcgagcaggctgtttttgacatctattatttagacctatcgcttaaccctagtggcgaggttaccagacagattggggacgccctgccagtcagttgcacaatctccgcttcacggaatgccactgtggtgtggatgaaggacaacattcgtctcagatccagcccatccttttctagtttgcattatcaggacgcaggtaactacgtgtgtgagaccgcgctccaagaggtcgaggggctcaaaaaacgagaatcactgaccctcatcgttgagggcaagccacagatcaagatgacaaaaaagactgacccatccggcctgtctaagaccatcatttgtcacgtggagggcttcccgaagccagccattcaatggaccattacaggcagcggctctgtaatcaaccagacagaggagtccccttacatcaatggccgttattactcaaaaataattattagccctgaggagaatgtcacactgacatgcaccgctgaaaatcagcttgagaggaccgtgaattccctgaacgtgtctgccatttccatcccagagcacgacgaggcagatgagatttccgatgaaaacagagaaaaggtcaacgaccaggcaaaactgatcgtagggatcgtcgtcggattgctgctggccgctctggttgcaggagttgtgtactggctgtacatgaagaagtccaagacagccagtaaacacgtgaataaggatctggggaacatggaagaaaacaagaagttagaagagaacaatcacaagactgaggcatag

SEQ ID NO: 119267 - DNA, 1035 bp, Artificial Sequence
  derived and/or modified sequence
tgattaggggactgtatttcagaagatagctatccagacggtaacatcacctggtaccgaaacggaaaagtgctccacccgctcgaaggagctgttgtcatcatattcaagaaagaaatggaccctgtgacacagctttatactatgacaagcaccctggagtacaagacaaccaaggccgatattcagatgccttttacatgtagtgtgacctattacggccctagtgggcagaaaacaatacacagcgaacaagccgtgtttgacatctactatttggatcttagcctcaacccgtccggggaggtaacccgccaaattggagatgccctacctgtgtcctgcaccatttccgcctcccggaacgccaccgtggtgtggatgaaagataatataagattgagaagctctccgagcttcagtagcctgcattatcaggacgctgggaactatgtgtgcgaaacagccctccaggaggtggaggggttgaagaagagagagtccttgactctaatagtggagggaaaacctcaaattaaaatgacaaagaaaaccgacccgagcgggctgtccaagacaatcatctgccacgtggaagggtttcctaagccggcaatccagtggactataaccggaagcgggtcagtaatcaaccagaccgaggagagcccttatattaatggacgctactacagtaaaatcatcatttcgccagaggaaaacgttacattaacctgtactgcagagaaccagttggaacgcacagtaaattcgttgaacgtgagcgccatctccataccggaacacgacgaagccgacgagatctcagacgagaaccgcgagaaagtcaatgatcaggccaaacttattgtgggtatcgtcgtgggcctcctcctggctgctctggttgccggagtggtatactggctctatatgaagaagtccaaaacggcctccaaacacgtgaacaaggatttggggaacatggaggaaaataaaaaactggaggagaataaccataagacagaagcgtag

SEQ ID NO: 119268 - DNA, 4701 bp, Artificial Sequence
  derived and/or modified sequence
agagcagcccggagaccgctgccgccgctgccgctgctaccaccgctgccacctgaggagacccgccgcccccccgtcgccgcctcctgcgagtccttcttagcacctggcgtttcatgcacattgccactgccattattattatcattccaatacaaggaaaataaaagaagataccagcgaaaagaaccgcttacacctttccgaattactcaagtgtctcctggaaacagagggtcgttgtccccggaggagcagccgaagggcccgtgggctggtgttgaccgggagggaggaggagttgggggcattgcgtggtggaaagttgcgtgcggcagagaaccgaaggtgcagcgccacagcccaggggacggtgtgtctgggagaagacgctgcccctgcgtcgggacccgccagcgcgcgggcaccgcggggcccgggacgacgccccctcctgcggcgtggactccgtcagtggcccaccaagaaggaggaggaatatggaatccaagggggccagttcctgccgtctgctcttctgcctcttgatctccgccaccgtcttcaggccaggccttggatggtatactgtaaattcagcatatggagataccattatcataccttgccgacttgacgtacctcagaatctcatgtttggcaaatggaaatatgaaaagcccgatggctccccagtatttattgccttcagatcctctacaaagaaaagtgtgcagtacgacgatgtaccagaatacaaagacagattgaacctctcagaaaactacactttgtctatcagtaatgcaaggatcagtgatgaaaagagatttgtgtgcatgctagtaactgaggacaacgtgtttgaggcacctacaatagtcaaggtgttcaagcaaccatctaaacctgaaattgtaagcaaagcactgtttctcgaaacagagcagctaaaaaagttgggtgactgcatttcagaagacagttatccagatggcaatatcacatggtacaggaatggaaaagtgctacatccccttgaaggagcggtggtcataatttttaaaaaggaaatggacccagtgactcagctctataccatgacttccaccctggagtacaagacaaccaaggctgacatacaaatgccattcacctgctcggtgacatattatggaccatctggccagaaaacaattcattctgaacaggcagtatttgatatttactatcctacagagcaggtgacaatacaagtgctgccaccaaaaaatgccatcaaagaaggggataacatcactcttaaatgcttagggaatggcaaccctcccccagaggaatttttgttttacttaccaggacagcccgaaggaataagaagctcaaatacttacacactgacggatgtgaggcgcaatgcaacaggagactacaagtgttccctgatagacaaaaaaagcatgattgcttcaacagctatcacagttcactatttggatttgtccttaaacccaagtggagaagtgactagacagattggtgatgccctacccgtgtcatgcacaatatctgctagcaggaatgcaactgtggtatggatgaaagataacatcaggcttcgatctagcccgtcattttctagtcttcattatcaggatgctggaaactatgtctgcgaaactgctctgcaggaggttgaaggactaaagaaaagagagtcattgactctcattgtagaaggcaaacctcaaataaaaatgacaaagaaaactgatcccagtggactatctaaaacaataatctgccatgtggaaggttttccaaagccagccattcaatggacaattactggcagtggaagcgtcataaaccaaacagaggaatctccttatattaatggcaggtattatagtaaaattatcatttcccctgaagagaatgttacattaacttgcacagcagaaaaccaactggagagaacagtaaactccttgaatgtctctgctataagtattccagaacacgatgaggcagacgagataagtgatgaaaacagagaaaaggtgaatgaccaggcaaaactaattgtgggaatcgttgttggtctcctccttgctgcccttgttgctggtgtcgtctactggctgtacatgaagaagtcaaagactgcatcaaaacatgtaaacaaggacctcggtaatatggaagaaaacaaaaagttagaagaaaacaatcacaaaactgaagcctaagagagaaactgtcctagttgtccagagataaaaatcatatagaccaattgaagcatgaacgtggattgtatttaagacataaacaaagacattgacagcaattcatggttcaagtattaagcagttcattctaccaagctgtcacaggttttcagagaattatctcaagtaaaacaaatgaaatttaattacaaacaataagaacaagttttggcagccatgataataggtcatatgttgtgtttggttcaattttttttccgtaaatgtctgcactgaggatttctttttggtttgccttttatgtaaattttttacgtagctatttttatacactgtaagctttgttctgggagttgctgttaatctgatgtataatgtaatgtttttatttcaattgtttatatggataatctgagcaggtacatttctgattctgattgctatcagcaatgccccaaactttctcataagcacctaaaacccaaaggtggcagcttgtgaagattggggacactcatattgccctaattaaaaactgtgatttttatcacaagggaggggaggccgagagtcagactgatagacaccataggagccgactctttgatatgccaccagcgaactctcagaaataaatcacagatgcatatagacacacatacataatggtactcccaaactgacaattttacctattctgaaaaagacataaaacagaatttggtagcacttacctctacagacacctgctaataaattattttctgtcaaaagaaaaaacacaagcatgtgtgagagacagtttggaaaaatcatggtcaacattcccattttcatagatcacaatgtaaatcactataattacaaattggtgttaaatcctttgggttatccactgccttaaaattatacctatttcatgtttaaaaagatatcaatcagaattggagtttttaacagtggtcattatcaaagctgtgttattttccacagaatatagaatatatatttttttcgtgtgtgtttttgttaactaccctacagatattgaatgcaccttgagataatttagtgtttttaactgatacataatttatcaagcagtacatgaaagtgtaataataaaatgtctatgtatctttagttacattcaaatttgtaactttataaacatgttttatgcttgaggaaatttttaaggtggtagtataaatggaaactttttgaagtagaccagatatgggctacttgtgactagacttttaaactttgctctttcaagcagaagcctggtttctgggagaacactgcacagcgatttctttcccaggatttacacaactttaaagggaagataaatgaacatcagatttctaggtatagaactatgttattgaaaggaaaaggaaaactggtgtttgtttcttagactcatgaaataaaaaattatgaaggcaatgaaaaataaattgaaaattaaagtcagatgagaataggaataatactttgccacttctgcattatttagaaacatacgttattgtacatttgtaaaccatttactgtctgggcaatagtgactccgtttaataaaagcttccgtagtgcattggtatggattaaatgcataaaatattcttagactcgatgctgtataaaatattatgggaaaaaaagaaaatacgttattttgcctctaaacttttattgaagttttatttggcaggaaaaaaaattgaatcttggtcaacatttaaaccaaagtaaaaggggaaaaaccaaagttatttgttttgcatggctaagccattctgttatctctgtaaatactgtgatttcttttttattttctctttagaattttgttaaagaaattctaaaatttttaaacacctgctctccacaataaatcacaaacactaaaataaaattacttccatataaatattattttctcttttggtgtgggagatcaaaggtttaaagtctaacttctaagatatatttgcagaaagaagcaacatgacaatagagagagttatgctacaattatttcttggtttccacttgcaatggttaattaagtccaaaaacagctgtcagaacctcgagagcagaacatgagaaactcagagctctggaccgaaagcagaaagtttgccgggaaaaaaaaagacaacattattaccatcgattcagtgcctggataaagaggaaagcttacttgtttaatggcagccacatgcacgaagatgctaagaagaaaaagaattccaaatcctcaacttttgaggtttcggctctccaatttaactctttggcaacaggaaacaggttttgcaagttcaaggttcactccctatatgtgattataggaattgtttgtggaaatggattaacatacccgtctatgcctaaaagataataaaactgaaatatgtcttca

SEQ ID NO: 119269 - DNA, 2496 bp, Artificial Sequence
  derived and/or modified sequence
gttgggtgactgcatttcagaagacagttatccagatggcaatatcacatggtacaggaatggaaaagtgctacatccccttgaaggagcggtggtcataatttttaaaaaggaaatggacccagtgactcagctctataccatgacttccaccctggagtacaagacaaccaaggctgacatacaaatgccattcacctgctcggtgacatattatggaccatctggccagaaaacaattcattctgaacaggcagtatttgatatttactatttggatttgtccttaaacccaagtggagaagtgactagacagattggtgatgccctacccgtgtcatgcacaatatctgctagcaggaatgcaactgtggtatggatgaaagataacatcaggcttcgatctagcccgtcattttctagtcttcattatcaggatgctggaaactatgtctgcgaaactgctctgcaggaggttgaaggactaaagaaaagagagtcattgactctcattgtagaaggcaaacctcaaataaaaatgacaaagaaaactgatcccagtggactatctaaaacaataatctgccatgtggaaggttttccaaagccagccattcaatggacaattactggcagtggaagcgtcataaaccaaacagaggaatctccttatattaatggcaggtattatagtaaaattatcatttcccctgaagagaatgttacattaacttgcacagcagaaaaccaactggagagaacagtaaactccttgaatgtctctgctataagtattccagaacacgatgaggcagacgagataagtgatgaaaacagagaaaaggtgaatgaccaggcaaaactaattgtgggaatcgttgttggtctcctccttgctgcccttgttgctggtgtcgtctactggctgtacatgaagaagtcaaagactgcatcaaaacatgtaaacaaggacctcggtaatatggaagaaaacaaaaagttagaagaaaacaatcacaaaactgaagcctaagagagaaactgtcctagttgtccagagataaaaatcatatagaccaattgaagcatgaacgtggattgtatttaagacataaacaaagacattgacagcaattcatggttcaagtattaagcagttcattctaccaagctgtcacaggttttcagagaattatctcaagtaaaacaaatgaaatttaattacaaacaataagaacaagttttggcagccatgataataggtcatatgttgtgtttggttcaattttttttccgtaaatgtctgcactgaggatttctttttggtttgccttttatgtaaattttttacgtagctatttttatacactgtaagctttgttctgggagttgctgttaatctgatgtataatgtaatgtttttatttcaattgtttatatggataatctgagcaggtacatttctgattctgattgctatcagcaatgccccaaactttctcataagcacctaaaacccaaaggtggcagcttgtgaagattggggacactcatattgccctaattaaaaactgtgatttttatcacaagggaggggaggccgagagtcagactgatagacaccataggagccgactctttgatatgccaccagcgaactctcagaaataaatcacagatgcatatagacacacatacataatggtactcccaaactgacaattttacctattctgaaaaagacataaaacagaatttggtagcacttacctctacagacacctgctaataaattattttctgtcaaaagaaaaaacacaagcatgtgtgagagacagtttggaaaaatcatggtcaacattcccattttcatagatcacaatgtaaatcactataattacaaattggtgttaaatcctttgggttatccactgccttaaaattatacctatttcatgtttaaaaagatatcaatcagaattggagtttttaacagtggtcattatcaaagctgtgttattttccacagaatatagaatatatatttttttcgtgtgtgtttttgttaactaccctacagatattgaatgcaccttgagataatttagtgtttttaactgatacataatttatcaagcagtacatgaaagtgtaataataaaatgtctatgtatctttagttacattcaaatttgtaactttataaacatgttttatgcttgaggaaatttttaaggtggtagtataaatggaaactttttgaagtagaccagatatgggctacttgtgactagacttttaaactttgctctttcaagcagaagcctggtttctgggagaacactgcacagcgatttctttcccaggatttacacaactttaaagggaagataaatgaacatcagatttctaggtatagaactatgttattgaaaggaaaaggaaaactggtgtttgtttcttagactcatgaaataaaaaattatgaaggcaatg

SEQ ID NO: 119270 - DNA, 1752 bp, Artificial Sequence
  derived and/or modified sequence
atggagagcaagggcgccagcagctgcagactgctgttctgcctgctgatcagcgccaccgtgttcagacccggcctgggctggtacaccgtgaacagcgcctacggcgacaccatcatcatcccctgcagactggacgtgccccagaacctgatgttcggcaagtggaagtacgagaagcccgacggcagccccgtgttcatcgccttcagaagcagcaccaagaagagcgtgcagtacgacgacgtgcccgagtacaaggacagactgaacctgagcgagaactacaccctgagcatcagcaacgccagaatcagcgacgagaagagattcgtgtgcatgctggtgaccgaggacaacgtgttcgaggcccccaccatcgtgaaggtgttcaagcagcccagcaagcccgagatcgtgagcaaggccctgttcctggagaccgagcagctgaagaagctgggcgactgcatcagcgaggacagctaccccgacggcaacatcacctggtacagaaacggcaaggtgctgcaccccctggagggcgccgtggtgatcatcttcaagaaggagatggaccccgtgacccagctgtacaccatgaccagcaccctggagtacaagaccaccaaggccgacatccagatgcccttcacctgcagcgtgacctactacggccccagcggccagaagaccatccacagcgagcaggccgtgttcgacatctactaccccaccgagcaggtgaccatccaggtgctgccccccaagaacgccatcaaggagggcgacaacatcaccctgaagtgcctgggcaacggcaaccccccccccgaggagttcctgttctacctgcccggccagcccgagggcatcagaagcagcaacacctacaccctgaccgacgtgagaagaaacgccaccggcgactacaagtgcagcctgatcgacaagaagagcatgatcgccagcaccgccatcaccgtgcactacctggacctgagcctgaaccccagcggcgaggtgaccagacagatcggcgacgccctgcccgtgagctgcaccatcagcgccagcagaaacgccaccgtggtgtggatgaaggacaacatcagactgagaagcagccccagcttcagcagcctgcactaccaggacgccggcaactacgtgtgcgagaccgccctgcaggaggtggagggcctgaagaagagagagagcctgaccctgatcgtggagggcaagccccagatcaagatgaccaagaagaccgaccccagcggcctgagcaagaccatcatctgccacgtggagggcttccccaagcccgccatccagtggaccatcaccggcagcggcagcgtgatcaaccagaccgaggagagcccctacatcaacggcagatactacagcaagatcatcatcagccccgaggagaacgtgaccctgacctgcaccgccgagaaccagctggagagaaccgtgaacagcctgaacgtgagcgccatcagcatccccgagcacgacgaggccgacgagatcagcgacgagaacagagagaaggtgaacgaccaggccaagctgatcgtgggcatcgtggtgggcctgctgctggccgccctggtggccggcgtggtgtactggctgtacatgaagaagagcaagaccgccagcaagcacgtgaacaaggacctgggcaacatggaggagaacaagaagctggaggagaacaaccacaagaccgaggcctag

SEQ ID NO: 119271 - DNA, 918 bp, Artificial Sequence
  derived and/or modified sequence
atggaccccgtgacccagctgtacaccatgaccagcaccctggagtacaagaccaccaaggccgacatccagatgcccttcacctgcagcgtgacctactacggccccagcggccagaagaccatccacagcgagcaggccgtgttcgacatctactacctggacctgagcctgaaccccagcggcgaggtgaccagacagatcggcgacgccctgcccgtgagctgcaccatcagcgccagcagaaacgccaccgtggtgtggatgaaggacaacatcagactgagaagcagccccagcttcagcagcctgcactaccaggacgccggcaactacgtgtgcgagaccgccctgcaggaggtggagggcctgaagaagagagagagcctgaccctgatcgtggagggcaagccccagatcaagatgaccaagaagaccgaccccagcggcctgagcaagaccatcatctgccacgtggagggcttccccaagcccgccatccagtggaccatcaccggcagcggcagcgtgatcaaccagaccgaggagagcccctacatcaacggcagatactacagcaagatcatcatcagccccgaggagaacgtgaccctgacctgcaccgccgagaaccagctggagagaaccgtgaacagcctgaacgtgagcgccatcagcatccccgagcacgacgaggccgacgagatcagcgacgagaacagagagaaggtgaacgaccaggccaagctgatcgtgggcatcgtggtgggcctgctgctggccgccctggtggccggcgtggtgtactggctgtacatgaagaagagcaagaccgccagcaagcacgtgaacaaggacctgggcaacatggaggagaacaagaagctggaggagaacaaccacaagaccgaggcctag

SEQ ID NO: 119272 - DNA, 1035 bp, Artificial Sequence
  derived and/or modified sequence
tgactgggcgactgcatcagcgaggacagctaccccgacggcaacatcacctggtacagaaacggcaaggtgctgcaccccctggagggcgccgtggtgatcatcttcaagaaggagatggaccccgtgacccagctgtacaccatgaccagcaccctggagtacaagaccaccaaggccgacatccagatgcccttcacctgcagcgtgacctactacggccccagcggccagaagaccatccacagcgagcaggccgtgttcgacatctactacctggacctgagcctgaaccccagcggcgaggtgaccagacagatcggcgacgccctgcccgtgagctgcaccatcagcgccagcagaaacgccaccgtggtgtggatgaaggacaacatcagactgagaagcagccccagcttcagcagcctgcactaccaggacgccggcaactacgtgtgcgagaccgccctgcaggaggtggagggcctgaagaagagagagagcctgaccctgatcgtggagggcaagccccagatcaagatgaccaagaagaccgaccccagcggcctgagcaagaccatcatctgccacgtggagggcttccccaagcccgccatccagtggaccatcaccggcagcggcagcgtgatcaaccagaccgaggagagcccctacatcaacggcagatactacagcaagatcatcatcagccccgaggagaacgtgaccctgacctgcaccgccgagaaccagctggagagaaccgtgaacagcctgaacgtgagcgccatcagcatccccgagcacgacgaggccgacgagatcagcgacgagaacagagagaaggtgaacgaccaggccaagctgatcgtgggcatcgtggtgggcctgctgctggccgccctggtggccggcgtggtgtactggctgtacatgaagaagagcaagaccgccagcaagcacgtgaacaaggacctgggcaacatggaggagaacaagaagctggaggagaacaaccacaagaccgaggcctag

SEQ ID NO: 119273 - protein, 122 aa, Artificial Sequence
  derived and/or modified sequence
SHIMLNNGTKTDMLGLGTWKSPPGQVAEAVKVAINTVYRHIDCSHVHQNKDQEQLKEQVVRREWLFIISKPWGICHRKCLVRGSCRKVLSGLELDYLDLHLIHWPTGCHPGKEFSFLDESGN

SEQ ID NO: 119274 - protein, 316 aa, Artificial Sequence
  derived and/or modified sequence
MASRLLLNNGAKMPILGLGTWKSPPGQVTEAVKVAIDVGYRHIDCAHVYQNENEVGVAIQEKLREQVVKREELFIVSKLWCTYHEKGLVKGACQKTLSDLKLDYLDLYLIHWPTGFKPGKEFFPLDESGNVVPSDTNILDTWAAMEELVDEGLVKAIGISNFNHLQVEMILNKPGLKYKPAVNQIECHPYLTQEKLIQYCQSKGIVVTAYSPLGSPDRPWAKPEDPSLLEDPRIKAIAAKHNKTTAQVLIRFPMQRNLVVIPKSVTPERIAENFKVFDFELSSQDMTTLLSYNRNWRVCALLSCTSHKDYPFHEEF

SEQ ID NO: 119275 - DNA, 369 bp, Artificial Sequence
  derived and/or modified sequence
agccacatcatgctgaacaacggcaccaagaccgacatgctgggcctgggcacctggaagagcccccccggccaggtggccgaggccgtgaaggtggccatcaacaccgtgtacagacacatcgactgcagccacgtgcaccagaacaaggaccaggagcagctgaaggagcaggtggtgagaagagagtggctgttcatcatcagcaagccctggggcatctgccacagaaagtgcctggtgagaggcagctgcagaaaggtgctgagcggcctggagctggactacctggacctgcacctgatccactggcccaccggctgccaccccggcaaggagttcagcttcctggacgagagcggcaactag

SEQ ID NO: 119276 - DNA, 369 bp, Artificial Sequence
  derived and/or modified sequence
tctcacatcatgttgaataacgggaccaaaacagatatgctcggcttgggaacttggaagtccccccccggccaggtggctgaagcagtaaaggtcgcaataaatactgtgtataggcatattgattgttcacacgttcatcagaataaagatcaggagcagctcaaggagcaggtcgttagacgtgaatggctattcatcatatcaaagccttggggtatttgccatcgaaaatgtctcgtgagaggctcctgtcgcaaggtactgtctggactggagctcgattatctcgacctccacctaattcactggccaaccggatgtcacccaggcaaagagttttcatttctggatgagagcgggaattag

SEQ ID NO: 119277 - DNA, 369 bp, Artificial Sequence
  derived and/or modified sequence
agccacatcatgctgaacaacggcaccaagacagacatgctgggcctgggcacctggaagagccccccaggccaggtggccgaggccgtgaaggtggccatcaacacagtgtaccgccacatcgactgcagccacgtgcaccagaacaaggaccaggagcagctgaaggagcaggtggtgagaagagagtggctgttcatcatcagcaagccctggggcatctgccacaggaagtgcctggtgcggggcagctgcaggaaggtgctgagcggcctggagctggactacctggacctgcacctgatccactggcccaccggctgccaccctgggaaggagttctccttcctggatgagagcggcaactag

SEQ ID NO: 119278 - DNA, 369 bp, Artificial Sequence
  derived and/or modified sequence
agccacatcatgctgaacaacggcaccaagaccgacatgctgggcctggggacatggaagtccccccccgggcaggtggccgaggccgtcaaagtggctataaacaccgtctacaggcacatagactgctctcatgtccaccagaataaggaccaggaacagcttaaggagcaggtcgtacgcagagaatggctgtttattatcagcaaaccctggggtatttgccaccggaagtgtttggtaaggggctcttgccgtaaagtcctgagtggtttggagctggattatcttgatctgcatttgatacattggcccactggttgccaccccggtaaagaattctccttcttggacgagtccggcaactag

SEQ ID NO: 119279 - DNA, 369 bp, Artificial Sequence
  derived and/or modified sequence
tcccacatcatgctgaataatggaacaaagacggatatgttgggtctgggaacctggaaaagccctcccggacaagtagctgaagcagtaaaggtggctataaatacagtttataggcacatagattgtagtcacgttcaccagaataaggatcaggagcaactcaaggaacaggtcgtgcgcagggagtggttgtttatcatctccaagccctggggcatatgccatcgaaaatgcctcgtcaggggcagttgtaggaaggtgctgtccgggttggaattagactatctcgatctgcacctgatacattggccaaccggctgtcacccagggaaagagtttagttttctcgacgagagtgggaattag

SEQ ID NO: 119280 - DNA, 366 bp, Artificial Sequence
  derived and/or modified sequence
agccacatcatgctcaacaatggcaccaagacggacatgctagggctaggcacctggaagtcccctccaggccaggtggccgaggctgtgaaggtagcaatcaacactgtataccgccacatcgactgcagccacgtgcaccagaacaaggaccaggagcagctcaaggagcaggtggtgaggcgtgagtggctcttcatcatcagcaagccatggggcatatgccacaggaagtgcctggtgagaggatcctgccgaaaggtgctcagtggcctggagctggactacctggacctccaccttattcactggccaacaggctgtcatcctgggaaggaattttcctttttagatgaatcaggcaac

SEQ ID NO: 119281 - DNA, 951 bp, Artificial Sequence
  derived and/or modified sequence
atggccagtaggctgctcctgaacaacggagcaaagatgccaattctgggcctgggaacttggaaaagtcctccaggtcaggtgacggaggccgtgaaggttgccatcgacgtcggatatcgccatattgattgcgctcacgtgtaccaaaacgagaatgaagtaggagtcgccatacaggaaaagttgagggagcaggtcgttaagagggaagaactctttatcgtttctaagctgtggtgtacataccacgaaaaaggactagtgaaaggtgcttgtcagaaaactttaagtgacctgaaattggactacctggacctgtacctcatccactggcccactggattcaagcccggaaaagagttctttccacttgatgaatccggcaatgtcgtaccttccgacacgaatatcctcgacacgtgggctgctatggaggagcttgtcgacgaggggctcgtcaaagccattggtataagtaattttaaccatcttcaggtcgaaatgatactcaataagcccggactgaaatacaaacctgccgtcaaccaaatcgagtgtcatccttacctgactcaagaaaagctcattcagtactgccagtctaaaggcatcgtggttaccgcctattcgcctttgggttctccagaccgtccttgggctaagcctgaagacccatctcttctggaagaccctcgaattaaagccatcgcagctaaacataataagacaactgcgcaggtgcttattcgttttcccatgcagagaaacctcgtggttataccaaaatcagtcactcccgaaaggatcgccgagaacttcaaggtcttcgacttcgagctaagctcccaggacatgacaacgctcctgagctataaccggaattggagagtctgcgccctgctctcttgtacctcacacaaagactacccttttcacgaagagttctag

SEQ ID NO: 119282 - DNA, 951 bp, Artificial Sequence
  derived and/or modified sequence
atggccagccggctgctgctgaacaatggagccaagatgcccatcctgggcctgggcacctggaagagccccccaggccaggtgacagaagctgtgaaggtggccattgatgtgggctaccgccacatcgactgtgcccacgtgtaccagaatgaaaatgaggtgggcgtggccatccaggagaagctgcgggagcaggtggtgaagcgggaggagctgttcatcgtgtccaagctgtggtgcacctaccacgagaagggcctggtgaagggggcctgccagaagaccctgagtgacctgaagctggactacctggacctgtacctgatccactggcccaccggcttcaagccaggcaaggagttcttccccctggatgagagcggaaatgtggtgcccagcgacaccaacatcctggacacctgggccgccatggaggagctggtggatgagggcctggtgaaggccatcggcatcagcaacttcaaccacctgcaggtggagatgatcctgaacaagccaggcctgaagtacaagccagctgtgaaccagatcgagtgccacccctacctgacccaggagaagctgatccagtactgccagagcaaaggaattgtggtgacagcctacagccccctgggcagcccagaccggccctgggccaagccagaggaccccagcctgctggaggacccccgcatcaaggccatcgccgccaagcacaacaagaccacagcccaggtgctgatccgcttccccatgcagaggaacctggtggtgatccccaagtctgtgaccccagagagaattgctgagaacttcaaggtgtttgattttgagctgagcagccaggacatgaccaccctgctgagctacaacagaaactggagggtgtgtgccctgctgagctgcaccagccacaaggactaccccttccacgaggagttctag

SEQ ID NO: 119283 - DNA, 1384 bp, Artificial Sequence
  derived and/or modified sequence
gacctcacgggctatttaaaggtacgcgccgcggccaaggccgcaccgtactgggcgggggtctggggagcgcagcagccatggcaagccgtctcctgctcaacaacggcgccaagatgcccatcctggggttgggtacctggaagtcccctccagggcaggtgactgaggccgtgaaggtggccattgacgtcgggtaccgccacatcgactgtgcccatgtgtaccagaatgagaatgaggtgggggtggccattcaggagaagctcagggagcaggtggtgaagcgtgaggagctcttcatcgtcagcaagctgtggtgcacgtaccatgagaagggcctggtgaaaggagcctgccagaagacactcagcgacctgaagctggactacctggacctctaccttattcactggccgactggctttaagcctgggaaggaatttttcccattggatgagtcgggcaatgtggttcccagtgacaccaacattctggacacgtgggcggccatggaagagctggtggatgaagggctggtgaaagctattggcatctccaacttcaaccatctccaggtggagatgatcttaaacaaacctggcttgaagtataagcctgcagttaaccagattgagtgccacccatatctcactcaggagaagttaatccagtactgccagtccaaaggcatcgtggtgaccgcctacagccccctcggctctcctgacaggccctgggccaagcccgaggacccttctctcctggaggatcccaggatcaaggcgatcgcagccaagcacaataaaactacagcccaggtcctgatccggttccccatgcagaggaacttggtggtgatccccaagtctgtgacaccagaacgcattgctgagaactttaaggtctttgactttgaactgagcagccaggatatgaccaccttactcagctacaacaggaactggagggtctgtgccttgttgagctgtacctcccacaaggattaccccttccatgaagagttttgaagctgtggttgcctgctcgtccccaagtgacctatacctgtgtttcttgcctcatttttttccttgcaaatgtagtatggcctgtgtcactcagcagtgggacagcaacctgtagagtggccagcgagggcgtgtctagcttgatgttggatctcaagagccctgtcagtagagtagaagtctcttccagtttgctttgcccttctttctaccctgctggggaaagtacaacctgaatacccttttctgaccaaagagaagcaaaatctaccaggtcaaaatagtgccactaacggttgagttttgactgcttggaactggaatcctttcagcaagacttctctttgcctcaa

SEQ ID NO: 119284 - DNA, 951 bp, Artificial Sequence
  derived and/or modified sequence
atggccagccggctgctgctgaacaacggcgccaagatgcccatccttggattaggaacttggaagtccccgcctgggcaggtgacggaagccgtcaaggtggctatcgatgtcggataccggcacatcgactgcgcccatgtgtaccaaaatgaaaacgaggtcggggttgcgatccaggaaaaactgcgggaacaggtagttaagagagaagaactgtttattgtatccaaactttggtgcacgtaccacgagaaaggccttgtgaaaggggcctgccagaagacattatcagatctcaaacttgattatttggatctgtaccttatccactggccaaccggctttaagccaggcaaggagttttttcctctggatgaatccggaaacgttgttccttctgacaccaacatactggatacctgggcagccatggaagagttggtcgacgagggcctagtgaaggctattggaatctccaattttaaccatctacaagtggagatgattctgaacaaaccaggcttgaaatacaagcccgctgtcaatcagattgagtgtcacccgtacctcacccaggagaagctcatacagtattgtcagagcaaaggcatagtggtgactgcctattccccattaggatccccagatcgaccttgggccaagcccgaggacccatcactgctggaagatccacgcatcaaggctattgccgccaaacataacaagaccaccgcccaggtgctgatcagatttcccatgcagcggaacctggtggttatccccaagtccgtgacccctgaaagaatcgcagaaaatttcaaagtttttgacttcgagctgtccagccaggacatgaccactcttctgagctacaaccggaactggagggtctgtgctctactctcatgcacctctcataaggactacccttttcacgaggagttctag

SEQ ID NO: 119285 - DNA, 951 bp, Artificial Sequence
  derived and/or modified sequence
atggcgtcacgactgctcctgaacaacggcgcaaaaatgcccatcctggggctggggacgtggaagagcccccctggacaggtaacagaggctgtgaaagttgcgatagatgttggataccggcatatcgactgcgcccacgtttaccagaatgaaaacgaggtgggcgttgcaatccaagagaaactgcgggaacaggtggttaagagggaagaactgttcattgttagtaagctgtggtgtacttatcatgaaaaaggtttggtgaagggcgcttgccagaaaacactttcagacctgaaactggactatctggacttgtaccttatacactggcccaccggatttaaaccaggcaaagaattctttccactcgacgaatcaggaaatgtggttccctctgataccaatattctggatacgtgggctgccatggaagagctagtggatgaaggccttgtcaaggccatcggcatctctaatttcaatcacctgcaggttgagatgatcctgaataaacccggtttgaagtacaaacccgctgtgaaccagatcgagtgccacccctacctgactcaagagaaactgatccagtactgtcagagcaaaggtatagtggtcactgcatatagcccccttgggagtcccgacaggccctgggctaagcccgaggatcctagtctgcttgaagaccctaggataaaagctatcgctgcaaagcacaacaagacaaccgcacaggtactgatccggtttcccatgcagagaaacttagtggtcatccctaaaagcgtgactcccgaaagaatagctgagaactttaaggtgttcgacttcgagctgtcctcccaggacatgaccacactcctgagctacaacagaaattggcgcgtttgcgctctgctgtcttgtactagccacaaggattacccattccacgaggagttttag

SEQ ID NO: 119286 - DNA, 951 bp, Artificial Sequence
  derived and/or modified sequence
atggccagcagactgctgctgaacaacggcgccaagatgcccatcctgggcctgggcacctggaagagcccccccggccaggtgaccgaggccgtgaaggtggccatcgacgtgggctacagacacatcgactgcgcccacgtgtaccagaacgagaacgaggtgggcgtggccatccaggagaagctgagagagcaggtggtgaagagagaggagctgttcatcgtgagcaagctgtggtgcacctaccacgagaagggcctggtgaagggcgcctgccagaagaccctgagcgacctgaagctggactacctggacctgtacctgatccactggcccaccggcttcaagcccggcaaggagttcttccccctggacgagagcggcaacgtggtgcccagcgacaccaacatcctggacacctgggccgccatggaggagctggtggacgagggcctggtgaaggccatcggcatcagcaacttcaaccacctgcaggtggagatgatcctgaacaagcccggcctgaagtacaagcccgccgtgaaccagatcgagtgccacccctacctgacccaggagaagctgatccagtactgccagagcaagggcatcgtggtgaccgcctacagccccctgggcagccccgacagaccctgggccaagcccgaggaccccagcctgctggaggaccccagaatcaaggccatcgccgccaagcacaacaagaccaccgcccaggtgctgatcagattccccatgcagagaaacctggtggtgatccccaagagcgtgacccccgagagaatcgccgagaacttcaaggtgttcgacttcgagctgagcagccaggacatgaccaccctgctgagctacaacagaaactggagagtgtgcgccctgctgagctgcaccagccacaaggactaccccttccacgaggagttctag

SEQ ID NO: 119287 - protein, 161 aa, Artificial Sequence
  derived and/or modified sequence
MDQETVGNVVLLAIVTLISVVQNGFFAHKVEHESRTQNGRSFQRTGTLAFERVYTANQNCVDAYPTFLAVLWSAGLLCSQVPAAFAGLMYLFVRQKYFVGYLGERTQSTPGYIFGKRIILFLFLMSVAGIFNYYLIFFFGSDFENYIKTISTTISPLLLIP

SEQ ID NO: 119288 - DNA, 486 bp, Artificial Sequence
  derived and/or modified sequence
atggaccaggagaccgtgggtaacgtcgtgctcctggccatagtcaccctcatttcagtggtgcagaacggcttctttgctcataaggtcgaacacgagtcaagaacccaaaacgggcgctctttccagaggacgggtactctcgcattcgagagagtttatacggccaaccagaattgtgtcgatgcctacccaactttcttagccgtactgtggtcagccggtctgttatgctcacaggtccccgccgcctttgctggactgatgtacctgttcgtgcggcaaaaatacttcgtgggatatctgggagagagaacgcagtctactccggggtatatcttcggcaagaggatcatcctattccttttccttatgtccgttgctggcatcttcaattattacctgatattcttcttcggcagcgatttcgagaactacataaagactatctctaccacaattagtccacttctgctcatcccatag

SEQ ID NO: 119289 - DNA, 486 bp, Artificial Sequence
  derived and/or modified sequence
atggaccaggagaccgtgggcaatgtggtgctgctggccatcgtgaccctcatctctgtggtgcagaatggcttctttgcccacaaggtggagcacgagagcaggacccagaatggccgctccttccagaggacaggcaccctggcctttgagcgggtgtacacagccaaccagaactgtgtggatgcctaccccaccttcctggccgtgctgtggagcgctggcctgctgtgcagccaggtgcctgctgcctttgctggcctgatgtacctgtttgtgcggcagaagtactttgtgggctacctgggggagaggacccagagcaccccaggctacatctttgggaagaggatcatcctcttcctgttcctgatgtctgtggccggcatcttcaactactacctgatcttcttctttggaagtgactttgagaactacatcaagaccatcagcaccaccatcagccccctgctgctgatcccctag

SEQ ID NO: 119290 - DNA, 486 bp, Artificial Sequence
  derived and/or modified sequence
atggaccaggagaccgtgggcaacgtggtgctgctggccatcgtgaccttgatctctgtggttcagaatgggttttttgcgcacaaagtagagcacgagtctcggacccagaacggtcgctcattccaacggaccggtactctggcctttgaaagggtttacacagccaatcaaaattgtgtggatgcctaccccaccttccttgccgtgctgtggtcagccggattgttgtgtagccaagtcccagccgcctttgcaggattgatgtaccttttcgtcaggcaaaagtatttcgtcggatacctcggggaacgcacccaaagcacacctggttacattttcggaaagaggatcattctttttctgttcctcatgagtgttgccggcatatttaattattatctgatcttcttctttggttctgactttgagaattacataaaaacgatatcaacgaccatttcaccgttactgctcatcccctag

SEQ ID NO: 119291 - DNA, 486 bp, Artificial Sequence
  derived and/or modified sequence
atggaccaggaaactgttggtaatgtagttttgctggccattgtcacacttatcagtgtggttcaaaatggattttttgcccacaaagtggaacacgagtcaaggacccagaacggacgatcctttcagcggactggtactcttgcatttgagagagtgtatacagcgaaccaaaattgcgtggatgcctaccctacatttttggctgtgctctggagtgctggtcttctgtgttcccaagtaccagctgcattcgccggactgatgtacctcttcgtgcgccagaaatactttgtggggtatttgggggagcgcacacagagcactcctggctacatcttcggaaagagaatcatattatttctgttcctgatgtctgtggctggcatatttaactactacctgatctttttcttcggctctgattttgagaactatattaagaccatcagtactactatctcgcccctgctcctgataccttag

SEQ ID NO: 119292 - DNA, 486 bp, Artificial Sequence
  derived and/or modified sequence
atggaccaggagaccgtgggcaacgtggtgctgctggccatcgtgaccctgatcagcgtggtgcagaacggcttcttcgcccacaaggtggagcacgagagcagaacccagaacggcagaagcttccagagaaccggcaccctggccttcgagagagtgtacaccgccaaccagaactgcgtggacgcctaccccaccttcctggccgtgctgtggagcgccggcctgctgtgcagccaggtgcccgccgccttcgccggcctgatgtacctgttcgtgagacagaagtacttcgtgggctacctgggcgagagaacccagagcacccccggctacatcttcggcaagagaatcatcctgttcctgttcctgatgagcgtggccggcatcttcaactactacctgatcttcttcttcggcagcgacttcgagaactacatcaagaccatcagcaccaccatcagccccctgctgctgatcccctag

SEQ ID NO: 119293 - protein, 528 aa, Artificial Sequence
  derived and/or modified sequence
MQGPWVLLLLGLRLQLSLGVIPAEEENPAFWNRQAAEALDAAKKLQPIQKVAKNLILFLGDGLGVPTVTATRILKGQKNGKLGPETPLAMDRFPYLALSKTYNVDRQVPDSAATATAYLCGVKANFQTIGLSAAARFNQCNTTRGNEVISVMNRAKQAGKSVGVVTTTRVQHASPAGTYAHTVNRNWYSDADMPASARQEGCQDIATQLISNMDIDVILGGGRKYMFPMGTPDPEYPADASQNGIRLDGKNLVQEWLAKHQGAWYVWNRTELMQASLDQSVTHLMGLFEPGDTKYEIHRDPTLDPSLMEMTEAALRLLSRNPRGFYLFVEGGRIDHGHHEGVAYQALTEAVMFDDAIERAGQLTSEEDTLTLVTADHSHVFSFGGYTLRGSSIFGLAPSKAQDSKAYTSILYGNGPGYVFNSGVRPDVNESESGSPDYQQQAAVPLSSETHGGEDVAVFARGPQAHLVHGVQEQSFVAHVMAFAACLEPYTACDLAPPACTTDAAHPVAASLPLLAGTLLLLGASAAP

SEQ ID NO: 119294 - DNA, 1587 bp, Artificial Sequence
  derived and/or modified sequence
atgcaaggcccttgggtactcctccttcttggactgcgattgcagctgtcactcggtgttatccccgcagaggaagaaaatcccgcattctggaacagacaggccgcagaggccttggatgcagctaaaaagctgcagccaattcagaaggtggcaaaaaacctgatcctcttcctcggtgatgggctgggcgtgccgaccgttaccgcaacaaggatcttaaagggccagaagaatggtaaactcggcccagaaactcctctggccatggatcgctttccttatctggcactgagcaagacgtataatgtggaccgacaggtgcctgattctgccgccacggcaacggcttatttgtgcggagtgaaagctaacttccagacaatcgggctctctgcagccgcgaggttcaaccaatgcaatacaacccgcggcaacgaggtcattagcgtgatgaaccgggccaagcaagccgggaaatcagtgggagtggttaccacaacccgcgtccaacatgctagtccagcaggaacatatgcccacaccgtcaatcggaactggtactccgacgctgatatgccggcatcagcaaggcaggaagggtgtcaagacatagctacgcagcttatcagcaatatggacattgacgtgatcctgggcgggggacggaagtacatgttccccatgggcacccccgaccctgagtacccagccgacgcctctcaaaatgggattagacttgatggcaagaatctagttcaggagtggctagctaaacatcagggtgcctggtacgtatggaataggacagaactgatgcaggcgagcctggatcagagtgttactcatctcatgggactgtttgaacctggagataccaaatatgaaattcaccgcgaccccaccctcgacccttccctcatggagatgacagaggccgccctccgcctcctcagccgcaatcctcggggattttacctttttgttgagggcggacgcatagatcatggacaccacgaaggggtggcttatcaagcactgaccgaggccgtgatgtttgacgatgccattgagcgtgccggacagctgacgagtgaagaagacacactgaccttggtgactgctgaccattcccacgtgttcagctttggaggctacacccttaggggaagctcaatttttgggctggctccgagcaaggcacaggatagcaaagcctatacatcaatcctgtacggtaatgggcccgggtacgtgtttaatagcggggtcaggcctgacgttaacgaatccgagagcggcagccccgactatcagcagcaagctgcagtgcctctttcttccgagacccatggaggagaggatgtggcggtgttcgcccgtggcccccaggcccacctagtgcacggggttcaggagcagtcattcgtggcccatgtgatggccttcgctgcctgtttagagccgtacacagcgtgtgatctggcgcctccagcgtgtacaacagatgctgcccatcccgttgctgcatctctccctcttttggctggaaccctgcttttgctgggcgcctccgccgcaccgtag

SEQ ID NO: 119295 - DNA, 1587 bp, Artificial Sequence
  derived and/or modified sequence
atgcagggcccctgggtgctgctgctgctgggcctgcggctgcagctgagcctgggcgtcatcccagctgaggaggagaacccagccttctggaaccggcaggccgctgaggccctggatgctgccaagaagctgcagcccatccagaaggtggccaagaacctgatcctcttcctgggagatggcctgggcgtgcccaccgtgacagccacccgcatcctgaagggccagaagaatggcaagctgggccctgagacccccctggccatggaccgcttcccctacctggccctgagcaagacctacaacgtggaccggcaggtgcctgattctgctgccacagccacagcctacctgtgtggggtgaaggccaacttccagaccatcggcctgtctgctgctgcccgcttcaaccagtgcaacaccaccagaggaaatgaggtgatctctgtgatgaacagagccaagcaggccggcaagtctgtgggcgtggtgaccaccaccagggtgcagcacgccagccctgctggcacctacgcccacacagtgaacagaaactggtacagtgatgctgacatgcctgccagcgcccggcaggagggctgccaggacatcgccacccagctgatcagcaacatggacattgatgtgatcctgggcggcggcaggaagtacatgttccccatgggcaccccagaccctgagtacccagcagatgccagccagaatggcatccggctggatggcaagaacctggtgcaggagtggctggccaagcaccagggcgcctggtacgtgtggaacagaacagagctgatgcaggccagcctggaccagagcgtgacccacctgatgggcctgtttgagcccggggacaccaagtatgagatccaccgggaccccaccctggaccccagcctgatggagatgacagaagctgccctgcggctgctgagcaggaacccccggggcttctacctgtttgtggagggcggcagaattgaccacggccaccatgaaggagtggcctaccaggccctgacagaggccgtgatgtttgatgatgccatcgagcgggccggccagctgaccagcgaggaggacaccctgaccctggtgacagctgaccacagccacgtgttctcctttggaggctacaccctgcggggcagcagcatcttcggcctggcccccagcaaggcccaggacagcaaggcctacaccagcatcctgtatggaaatggacctggctacgtgttcaacagcggcgtgcggccagatgtgaatgaaagtgaaagtggcagcccagactaccagcagcaggccgctgtgcccctgagcagcgagacccatggaggagaagatgtggccgtgtttgcccggggcccccaggcccacctggtgcatggagtgcaggagcagagctttgtggcccacgtgatggcctttgctgcctgcctggagccctacacagcctgtgacctggcccccccagcctgcaccacagatgctgcccaccctgtggccgccagcctgcccctgctggccggcaccctgctgctgctgggcgccagcgctgccccctag

SEQ ID NO: 119296 - DNA, 2550 bp, Artificial Sequence
  derived and/or modified sequence
gatttaaacccaggcagcctgcgctgcagccggttcctggtgtccccacttcgcctccctcctgctgcccccaagacatgcaggggccctgggtgctgctgctgctgggcctgaggctacagctctccctgggcgtcatcccagctgaggaggagaacccggccttctggaaccgccaggcagctgaggccctggatgctgccaagaagctgcagcccatccagaaggtcgccaagaacctcatcctcttcctgggcgatgggttgggggtgcccacggtgacagccaccaggatcctaaaggggcagaagaatggcaaactggggcctgagacgcccctggccatggaccgcttcccatacctggctctgtccaagacatacaatgtggacagacaggtgccagacagcgcagccacagccacggcctacctgtgcggggtcaaggccaacttccagaccatcggcttgagtgcagccgcccgctttaaccagtgcaacacgacacgcggcaatgaggtcatctccgtgatgaaccgggccaagcaagcaggaaagtcagtaggagtggtgaccaccacacgggtgcagcacgcctcgccagccggcacctacgcacacacagtgaaccgcaactggtactcagatgctgacatgcctgcctcagcccgccaggaggggtgccaggacatcgccactcagctcatctccaacatggacattgacgtgatccttggcggaggccgcaagtacatgtttcccatggggaccccagaccctgagtacccagctgatgccagccagaatggaatcaggctggacgggaagaacctggtgcaggaatggctggcaaagcaccagggtgcctggtatgtgtggaaccgcactgagctcatgcaggcgtccctggaccagtctgtgacccatctcatgggcctctttgagcccggagacacgaaatatgagatccaccgagaccccacactggacccctccctgatggagatgacagaggctgccctgcgcctgctgagcaggaacccccgcggcttctacctctttgtggagggcggccgcatcgaccatggtcatcatgagggtgtggcttaccaggcactcactgaggcggtcatgttcgacgacgccattgagagggcgggccagctcaccagcgaggaggacacgctgaccctcgtcaccgctgaccactcccatgtcttctcctttggtggctacaccttgcgagggagctccatcttcgggttggcccccagcaaggctcaggacagcaaagcctacacgtccatcctgtacggcaatggcccgggctacgtgttcaactcaggcgtgcgaccagacgtgaatgagagcgagagcgggagccccgattaccagcagcaggcggcggtgcccctgtcgtccgagacccacggaggcgaagacgtggcggtgtttgcgcgcggcccgcaggcgcacctggtgcatggtgtgcaggagcagagcttcgtagcgcatgtcatggccttcgctgcctgtctggagccctacacggcctgcgacctggcgcctcccgcctgcaccaccgacgccgcgcacccagttgccgcgtcgctgccactgctggccgggaccctgctgctgctgggggcgtccgctgctccctgagtgccccactccggagttatcctgctccccacctccgggcgtcctgccctgttccccgtcctgagccgccacttccagcgaacacacacaggtgtcctgccgttggaccttcacctcctagagataaaccagcctcagctggcgcagcggggcccttcttccctccgcatccccttcagggagcaggagcccagggcgccctgggagctgagcctgggacttccaggacctcccctcaggttgttctctgattcttcctcccaaccccagagactgcagatttgtgccatgcggctgcctgcaccccagacaataaagggaccaaaaccacccaacccccaccctgcctctatcctaaggaagaccaagcaggcctggacccagagacgtcccccatcgtgggacacgacacacccagaccgcgtgccccaccgtcttagcttcaatcctggcagcacctggtagacccaaggacttgggtggatcaggacacctgaagaagagaagcttccggcaaccctgcaacccacccaaggaggctactggatcggggattcccaggggggctttgacacagtcctctgctgtctccccactaggatcattccacacccctgcacctgaccaagggaccaatgaggcagaggcttgccccaagtcacagccactcagatgcttcctgccccccagtgcccattccaggtcaccagatccaaggagcgcttgaggagctctgggtacagggcagcaacccagagcccatgggccctcccgggacatctggatgctgggcatagatttctcaacaaggaagactcccctgcctcctcaaggtctccattctcctaggagacaaagcaataataaaaggtgttagacaatgtaa

SEQ ID NO: 119297 - DNA, 1587 bp, Artificial Sequence
  derived and/or modified sequence
atgcagggcccctgggtgctgctgctgctgggcctgcggctgcagctttccctgggcgtcattccggccgaggaagagaatccagcattttggaatagacaggctgctgaagcactggatgcagccaaaaaattgcagccaattcagaaggtggcaaagaacctgattctgttcctgggcgacggtctgggggttcccacagtcacagcaacaagaatccttaagggacaaaagaatgggaaactggggcccgagacaccactagcaatggaccgcttcccttacctggccctgagcaagacttataatgtggataggcaggttccagattcagctgcaacagccactgcatacctctgtggtgttaaggctaattttcagaccatcgggctgagcgcagccgcacgtttcaatcagtgtaataccacacgtggcaacgaagtcatctccgtaatgaacagagcgaagcaagcaggtaagtcagtcggcgtggttaccacaacgagggtccagcatgccagtcctgccggcacctatgcccacactgtgaaccgcaactggtacagcgacgctgacatgcccgccagcgcccgccaagaaggatgccaggacattgcaactcagctaatcagcaacatggacatcgatgtcatcctgggaggcggccggaagtatatgttccccatgggtacccctgacccagagtatcctgccgacgcctcccagaatggcatcagacttgatggcaagaatctggtccaggaatggctagccaaacaccaaggcgcttggtacgtgtggaacagaaccgaactgatgcaagcatcgcttgatcagtccgtcacccacctgatgggtttgtttgagcctggagacaccaagtatgagattcatcgagatcccacgcttgatccatctcttatggagatgacagaggctgcactcagattgttgtctcgtaatcctcgcggcttctacctgttcgtcgaaggcgggagaattgatcacggtcaccacgagggcgtggcataccaggccttaactgaggccgtgatgtttgacgatgcaatcgaacgggctgggcagctcacgtccgaggaggacacactgactctggtcacggccgaccatagccatgttttctcttttgggggttacactctgaggggatcttcaatcttcggtctggctccctctaaagcccaggacagtaaagcctatacatccatcctttacgggaacgggcccggctatgtgtttaattcaggcgttagacccgacgtgaatgagtccgagagcggttcaccagactatcaacagcaggctgctgtcccactgtctagcgagacgcacgggggtgaagacgttgcagtcttcgcccggggaccgcaggcccacctcgtccacggagttcaggaacaaagttttgtggcacacgtgatggcctttgcggcctgcctggagccatacactgcttgtgaccttgctcctcccgcatgtaccactgacgcagctcaccccgtggctgcatctttgcctcttttggcaggcaccttactgctgctgggcgcctccgccgctccctag

SEQ ID NO: 119298 - DNA, 1587 bp, Artificial Sequence
  derived and/or modified sequence
atgcagggtccatgggttctgctgttgctaggccttaggctccaactgagcttgggcgtcataccagctgaggaggaaaacccagcattctggaaccgccaagccgcagaagccctggacgccgctaagaaactccaaccgatccagaaggttgccaagaatctgatactatttctcggcgacggattgggagtacctaccgttaccgcgaccagaatcctgaagggccagaaaaatggaaaactaggccctgaaactccacttgcgatggatcgcttcccttacctggctctctctaagacttacaatgtagacaggcaagtgccagacagcgccgcaacggctaccgcatacctgtgtggcgtgaaggccaatttccagacgatcggccttagcgctgctgcgaggttcaatcagtgcaatacgacaaggggaaacgaagtgatctccgttatgaaccgagctaagcaggctggcaaaagcgttggcgttgtcactactaccagagtccaacacgcatcaccagccggaacctacgctcacaccgtcaaccgaaactggtacagcgatgccgacatgccagcttccgctaggcaagaaggatgtcaagatatagctactcagctgatcagcaatatggacatagacgtcatattggggggaggacgcaaatacatgtttcccatgggaacaccagacccggaataccccgcagacgcgtcgcagaatggaattcgattagacgggaaaaatctagtgcaagagtggttggccaaacaccagggcgcttggtacgtgtggaatcgcactgagctgatgcaggcctccctggatcaatcagttacacatctgatgggtctctttgaacccggagatactaaatatgagatccaccgcgaccctacacttgacccatccctgatggagatgaccgaggccgctctgagacttctgtccaggaatcctcgtggattctatctgttcgtagaaggcggaagaatcgaccacgggcatcacgaaggcgtggcatatcaggctctcaccgaagccgtaatgttcgatgatgcaatcgaaagagccggtcagttaacaagtgaggaggacacgctcaccctggtaaccgcagaccactcgcatgtcttctcctttggtggatatacattaagaggatcaagcattttcggtctagccccatccaaggctcaggacagcaaagcttacacaagcatactgtacggtaatggccctggctacgtgttcaatagcggcgtgaggcccgacgtaaatgaatccgagtccggatcaccagactatcagcagcaggctgccgtacccctttctagtgagacccatggaggtgaggacgttgctgttttcgcacgcggtccccaggcacacctcgtccacggcgtgcaggagcagtcctttgtcgcccacgtgatggcgtttgccgcttgcctagagccctacacagcttgtgatctggcaccccctgcatgcaccacagacgcggcacaccccgtggccgcttccttacctttactggcaggaacactcctgctgctgggcgcaagtgcagccccttag

SEQ ID NO: 119299 - DNA, 1587 bp, Artificial Sequence
  derived and/or modified sequence
atgcagggcccctgggtgctgctgctgctgggcctgagactgcagctgagcctgggcgtgatccccgccgaggaggagaaccccgccttctggaacagacaggccgccgaggccctggacgccgccaagaagctgcagcccatccagaaggtggccaagaacctgatcctgttcctgggcgacggcctgggcgtgcccaccgtgaccgccaccagaatcctgaagggccagaagaacggcaagctgggccccgagacccccctggccatggacagattcccctacctggccctgagcaagacctacaacgtggacagacaggtgcccgacagcgccgccaccgccaccgcctacctgtgcggcgtgaaggccaacttccagaccatcggcctgagcgccgccgccagattcaaccagtgcaacaccaccagaggcaacgaggtgatcagcgtgatgaacagagccaagcaggccggcaagagcgtgggcgtggtgaccaccaccagagtgcagcacgccagccccgccggcacctacgcccacaccgtgaacagaaactggtacagcgacgccgacatgcccgccagcgccagacaggagggctgccaggacatcgccacccagctgatcagcaacatggacatcgacgtgatcctgggcggcggcagaaagtacatgttccccatgggcacccccgaccccgagtaccccgccgacgccagccagaacggcatcagactggacggcaagaacctggtgcaggagtggctggccaagcaccagggcgcctggtacgtgtggaacagaaccgagctgatgcaggccagcctggaccagagcgtgacccacctgatgggcctgttcgagcccggcgacaccaagtacgagatccacagagaccccaccctggaccccagcctgatggagatgaccgaggccgccctgagactgctgagcagaaaccccagaggcttctacctgttcgtggagggcggcagaatcgaccacggccaccacgagggcgtggcctaccaggccctgaccgaggccgtgatgttcgacgacgccatcgagagagccggccagctgaccagcgaggaggacaccctgaccctggtgaccgccgaccacagccacgtgttcagcttcggcggctacaccctgagaggcagcagcatcttcggcctggcccccagcaaggcccaggacagcaaggcctacaccagcatcctgtacggcaacggccccggctacgtgttcaacagcggcgtgagacccgacgtgaacgagagcgagagcggcagccccgactaccagcagcaggccgccgtgcccctgagcagcgagacccacggcggcgaggacgtggccgtgttcgccagaggcccccaggcccacctggtgcacggcgtgcaggagcagagcttcgtggcccacgtgatggccttcgccgcctgcctggagccctacaccgcctgcgacctggccccccccgcctgcaccaccgacgccgcccaccccgtggccgccagcctgcccctgctggccggcaccctgctgctgctgggcgccagcgccgccccctag

SEQ ID NO: 119300 - protein, 535 aa, Artificial Sequence
  derived and/or modified sequence
MLGPCMLLLLLLLGLRLQLSLGIIPVEEENPDFWNREAAEALGAAKKLQPAQTAAKNLIIFLGDGMGVSTVTAARILKGQKKDKLGPEIPLAMDRFPYVALSKTYNVDKHVPDSGATATAYLCGVKGNFQTIGLSAAARFNQCNTTRGNEVISVMNRAKKAGKSVGVVTTTRVQHASPAGTYAHTVNRNWYSDADVPASARQEGCQDIATQLISNMDIDVILGGGRKYMFRMGTPDPEYPDDYSQGGTRLDGKNLVQEWLAKRQGARYVWNRTELMQASLDPSVTHLMGLFEPGDMKYEIHRDSTLDPSLMEMTEAALRLLSRNPRGFFLFVEGGRIDHGHHESRAYRALTETIMFDDAIERAGQLTSEEDTLSLVTADHSHVFSFGGYPLRGSSIFGLAPGKARDRKAYTVLLYGNGPGYVLKDGARPDVTESESGSPEYRQQSAVPLDEETHAGEDVAVFARGPQAHLVHGVQEQTFIAHVMAFAACLEPYTACDLAPPAGTTDAAHPGRSVVPALLPLLAGTLLLLETATAP

SEQ ID NO: 119301 - DNA, 1608 bp, Artificial Sequence
  derived and/or modified sequence
atgctgggtccttgtatgctcttgttacttctgctgctaggcctgaggctgcagctgtcccttggtataatacctgtcgaggaggaaaaccccgacttctggaacagagaggccgccgaggctctcggggcggccaagaagttgcagccggctcagaccgccgccaaaaatctgatcatcttcttgggcgatggcatgggagtgtcaaccgtcaccgccgcgaggatcctcaagggccagaaaaaagataaattagggccagagatccccctggcaatggacagattcccttatgtggccttgtccaagacgtataatgtggataaacacgttccagactcaggagctaccgctaccgcctacttatgtggagtgaagggaaactttcagactatcgggctcagcgcagctgcccgtttcaaccagtgtaataccacaagagggaacgaggttattagcgttatgaaccgcgcaaaaaaagccgggaagagtgttggtgtggtcactaccactcgagtgcagcacgcgtctcccgcaggaacctatgcacacaccgtaaaccgaaattggtacagcgacgcggatgtaccggcctccgctaggcaagaaggatgtcaggacatcgctactcaactgatctctaatatggacatagatgtaatactggggggcggtcgaaaatatatgtttcggatgggcaccccagatcccgaatacccagacgattatagtcagggcggcacaaggcttgacggaaaaaatctggtccaggagtggctggccaagcgccagggagctaggtacgtgtggaacagaactgaactaatgcaggctagcctggaccccagtgttacacacctaatggggctgttcgagcccggagacatgaagtatgaaatacaccgcgacagcacactggacccgtctctgatggagatgacagaagctgcgcttagactcctctcacgaaatccgcgtggattttttctgtttgtggaggggggaagaatagaccatgggcatcacgagtcccgagcttaccgcgcccttaccgagactatcatgttcgatgatgccatcgaacgggcagggcaacttacttctgaagaggacactttatcattagtcacagctgaccactcccatgtgttctcattcggcggctatccacttaggggctcctctatcttcggtctcgcacctgggaaagccagggacagaaaggcatacaccgtcctgttatacgggaatggccctggctacgtgctgaaagatggggcccggcccgacgtgacagaaagcgagagtgggtcccctgaataccgacaacagagcgcagtgccactggacgaagagacccacgctggtgaggacgtggcagtattcgctagaggcccccaagcgcacctggtacacggcgtgcaggagcagacctttattgcccacgtgatggccttcgccgcctgcctcgagccatatacagcttgcgatcttgcccctccagccgggacaactgatgcggcccaccccggtcggagcgtcgtgcctgctctcttaccgttactcgctggaacattacttcttttggaaacggctaccgccccctag

SEQ ID NO: 119302 - DNA, 1608 bp, Artificial Sequence
  derived and/or modified sequence
atgctgggcccctgcatgctgctgctgctgctgctgctgggcctgcggctgcagctgagcctgggcatcatccctgtggaggaggagaacccagacttctggaaccgggaggccgctgaggccctgggcgccgccaagaagctgcagcctgcccagacagctgccaagaacctgatcatcttcctgggagatggcatgggcgtgtccacagtgacagctgcccgcatcctgaagggccagaagaaggacaagctgggccctgagatccccctggccatggaccgcttcccctacgtggccctgagcaagacctacaacgtggacaagcacgtgcctgacagcggggccacagccacagcctacctgtgtggggtgaagggcaacttccagaccatcggcctgtctgctgctgcccgcttcaaccagtgcaacaccaccagaggaaatgaagtcatctctgtgatgaacagagccaagaaggccggcaagtctgtgggcgtggtgaccaccaccagggtgcagcacgccagccctgctggcacctacgcccacacagtgaacagaaactggtacagtgatgctgatgtgcctgccagcgcccggcaggagggctgccaggacatcgccacccagctgatcagcaacatggacattgatgtgatcctgggcggcggcaggaagtacatgttcaggatgggcaccccagaccctgagtacccagatgactacagccagggcggcacccggctggatggcaagaacctggtgcaggagtggctggccaagaggcagggcgcccgctacgtgtggaacagaacagagctgatgcaggccagcctggaccccagcgtgacccacctgatgggcctgtttgagcccggggacatgaagtatgagatccaccgggacagcaccctggaccccagcctgatggagatgacagaggccgccctgcggctgctgagcaggaacccccggggcttcttcctgtttgtggagggcggcagaattgaccacggccaccacgagagccgggcctaccgggccctgacagagaccatcatgtttgatgatgccatcgagagagctggccagctgaccagcgaggaggacaccctgagcctggtgacagctgaccacagccacgtgttctcctttggaggctaccccctgcggggcagcagcatcttcggcctggcccctgggaaggcccgggacaggaaggcctacacagtgctgctgtatggaaatggacctggctacgtgctgaaggatggagcccggccagatgtgacagagagcgagagcggcagccctgagtaccggcagcagagcgctgtgcccctggatgaggagacccatgctggagaagatgtggccgtgtttgcccggggcccccaggcccacctggtgcacggcgtgcaggagcagaccttcatcgcccacgtgatggcctttgctgcctgcctggagccctacacagcctgtgacctggcccccccagctggcaccacagatgctgcccaccctggccgctctgtggtgcctgccctgctgcccctgctggccggcaccctgctgctgctggagacagccacagccccctag

SEQ ID NO: 119303 - DNA, 2971 bp, Artificial Sequence
  derived and/or modified sequence
aataccgcacccttccctgggggacacctggtcccaacctgagctgcctttctcaggaccccagccccagcccggcccagcccagccacaccctgccactcccttcagccagtgtggcttcaggtcaagaggctgggcagggtcaaggtggcaacgaggggagaagccgggacacagttctccctgatttaaacccgggcagcctggagtgcagctcatactccatgcccagaattcctgcctcgccactgtcctgctgccctccagacatgctggggccctgcatgctgctgctgctgctgctgctgggcctgaggctacagctctccctgggcatcatcccagttgaggaggagaacccggacttctggaaccgcgaggcagccgaggccctgggtgccgccaagaagctgcagcctgcacagacagccgccaagaacctcatcatcttcctgggcgatgggatgggggtgtctacggtgacagctgccaggatcctaaaagggcagaagaaggacaaactggggcctgagatacccctggccatggaccgcttcccatatgtggctctgtccaagacatacaatgtagacaaacatgtgccagacagtggagccacagccacggcctacctgtgcggggtcaagggcaacttccagaccattggcttgagtgcagccgcccgctttaaccagtgcaacacgacacgcggcaacgaggtcatctccgtgatgaatcgggccaagaaagcagggaagtcagtgggagtggtaaccaccacacgagtgcagcacgcctcgccagccggcacctacgcccacacggtgaaccgcaactggtactcggacgccgacgtgcctgcctccgcccgccaggaggggtgccaggacatcgctacgcagctcatctccaacatggacattgacgtgatcctaggtggaggccgaaagtacatgtttcgcatgggaaccccagaccctgagtacccagatgactacagccaaggtgggaccaggctggacgggaagaatctggtgcaggaatggctggcgaagcgccagggtgcccggtatgtgtggaaccgcactgagctcatgcaggcttccctggacccgtctgtgacccatctcatgggtctctttgagcctggagacatgaaatacgagatccaccgagactccacactggacccctccctgatggagatgacagaggctgccctgcgcctgctgagcaggaacccccgcggcttcttcctcttcgtggagggtggtcgcatcgaccatggtcatcatgaaagcagggcttaccgggcactgactgagacgatcatgttcgacgacgccattgagagggcgggccagctcaccagcgaggaggacacgctgagcctcgtcactgccgaccactcccacgtcttctccttcggaggctaccccctgcgagggagctccatcttcgggctggcccctggcaaggcccgggacaggaaggcctacacggtcctcctatacggaaacggtccaggctatgtgctcaaggacggcgcccggccggatgttaccgagagcgagagcgggagccccgagtatcggcagcagtcagcagtgcccctggacgaagagacccacgcaggcgaggacgtggcggtgttcgcgcgcggcccgcaggcgcacctggttcacggcgtgcaggagcagaccttcatagcgcacgtcatggccttcgccgcctgcctggagccctacaccgcctgcgacctggcgccccccgccggcaccaccgacgccgcgcacccggggcggtccgtggtccccgcgttgcttcctctgctggccgggaccctgctgctgctggagacggccactgctccctgagtgtcccgtccctggggctcctgcttccccatcccggagttctcctgctccccacctcctgtcgtcctgcctggcctccagcccgagtcgtcatccccggagtccctatacagaggtcctgccatggaaccttcccctccccgtgcgctctggggactgagcccatgacaccaaacctgccccttggctgctctcggactccctaccccaaccccagggactgcaggttgtgccctgtggctgcctgcaccccaggaaaggagggggctcaggccatccagccaccacctacagcccagtgggtaccaggcaggctcccttcctggggaaaagaagcacccagaccccgcgccccgctgatctttgcttcagtccttgaatcacctgtgggacttgaggactcgggatcttcaggacgcctggagaagggtggtttcctgccaccctgctggccaaggaggctcctggggtggggatcaccagggggattttgacacagccttcggctgccccccactaagctaattccacacccctgtacccccccagggggccctctgcctcatggcaaaggcttgccccaaatctcaacttctcagacgttccatacccccacatgccaatttcagcacccaactgagatccgaggagctcctgggaagccctgggtgcaggacactggtcgagagccaaaggtccctccccagacatctggacactgggcatagatttctcaagaaggaagactcccctgcctccccagggcctctgctctcctgggagacaaagcaataataaaaggaagtgtttgtaatcccagcactttgggaggccgaggtgggcggatcacgaggtcaggagatggagaccatcctggctaacacggtgaaaccccttatctatgcgcctgtagtcccagctacccaggaggctgaagcaggataatcgcttgaacccgggcggcggagattgcagtgagccgaggtcatgccactgcactgcagcctgggcgacagagcgagattctgcctcaaaaataaacaaataaattttaaaaataaataaataataaaaggaagtgttagacaatgtaa

SEQ ID NO: 119304 - DNA, 1608 bp, Artificial Sequence
  derived and/or modified sequence
atgctgggcccctgcatgctgctgctgctgctgctgctgggcctgcggctccaactctccctggggattattccggtggaagaggaaaaccctgacttctggaatagagaagccgcagaagccttgggcgccgctaagaaactgcagccagcgcagaccgcggctaagaatctcatcatttttcttggagacggaatgggagtatccactgtcactgcagcacgaatcctgaagggacagaagaaagataaactcgggccagagattcctctggcaatggatcgcttcccttatgttgccctttcaaaaacatataatgtggataaacatgtccccgactctggcgcaaccgccacagcatacctatgtggtgttaaaggcaattttcaaacaattgggctgtccgccgctgcgagatttaaccagtgtaataccacccgtggaaacgaggtcatttctgttatgaatcgtgcgaagaaggccggcaaatcggtgggtgtggtgactaccactcgggtgcagcatgcatcgcccgcggggacatatgctcacacagttaaccgcaactggtatagcgatgcagacgtgcctgcgtcagccaggcaggagggctgtcaggacatcgccactcagctgattagcaacatggatatcgacgtgatcctgggtggtggccggaaatatatgtttcggatgggtacacccgatcccgagtatcctgacgattacagccaaggcggaacccgactggatggaaagaatctagtccaggagtggctggcaaagaggcagggcgccagatacgtgtggaatcggaccgaactgatgcaggcctccctggaccctagcgtcacacatcttatgggcctctttgaaccaggcgacatgaagtacgaaatccatagagacagcacattggaccccagcctaatggagatgactgaggccgctctgcgccttctgtcacgaaatcctcgagggttttttctgttcgtggaggggggacgcatcgatcatggccaccacgagtcccgtgcctacagagcgctgacggaaaccatcatgttcgatgacgctattgaaagggctggacagctcacatccgaggaagataccttgagcctggtaaccgcggatcactcccatgtcttcagcttcggaggatatcccttgcgtggctcaagcatcttcgggctggcacctggaaaggctagagatcggaaagcctacaccgtgctgctatacggaaatggtccaggctacgtgctgaaagatggagcccgacctgacgtgacagagagcgaatcagggagtcccgagtacaggcaacaatccgcagtgccattagatgaagagacacacgcaggcgaggatgtggctgtcttcgcccgggggccacaggcccacctggttcatggcgtccaggagcagaccttcatcgctcacgtgatggcctttgccgcgtgcctcgaaccgtacaccgcttgcgacctggctccgcccgcaggaacaactgatgctgctcaccctgggcgatcagtggtcccagcattgctgcctcttctggccggtaccttactcttactggaaacagccaccgcaccatag

SEQ ID NO: 119305 - DNA, 1608 bp, Artificial Sequence
  derived and/or modified sequence
atgctaggcccatgcatgctgctgctgctgctccttctcggcctcaggttacaactaagcctgggtattatacctgtagaagaggagaatcctgacttctggaatcgggaggcggcagaggcattgggcgctgccaagaaattgcagcccgctcaaacagctgccaaaaatctgatcatcttcttaggcgacggcatgggagtctccaccgtcacagcagccagaatcctcaaagggcagaaaaaagataagctgggtcctgaaattcccctggccatggacaggtttccctacgtggctctgtccaagacgtataacgtggataaacacgtgcccgattccggagccaccgccactgcttatctctgtggcgtcaaggggaatttccaaacaattggcctgagtgcagcagcacggtttaaccagtgtaataccactcgaggaaacgaggtaatctccgtcatgaaccgcgctaagaaagctggcaagtcagtgggtgtcgtcaccaccacgagagtgcagcatgcctctcctgctggcacctatgcacacaccgtgaatagaaattggtattccgacgccgatgttcccgcttccgcccgacaagaaggttgtcaggatattgccacacagctgatttctaacatggacatcgatgtcattctggggggaggtaggaagtatatgtttagaatgggcacaccagatccagaataccccgatgactattcacagggcggtaccaggctggacggaaagaacttggtgcaagagtggctcgccaaacgacagggagcaaggtacgtttggaacagaactgaactcatgcaagccagcttggatccatccgtcacacacttaatgggtctatttgagccaggtgacatgaagtacgagatccacagagattccactctcgatcctagtttgatggaaatgactgaagccgctcttcggctgctgagcaggaaccccaggggcttcttcctcttcgtagaaggcggtcggatcgatcatggccatcatgagagccgcgcttaccgggcactcacagagacaataatgttcgacgacgccattgaacgcgctggccagcttacgagcgaggaagataccttaagcctcgtgactgcggaccactcccatgttttcagctttggaggctatcctcttcgcggaagcagtatattcggacttgcgcctgggaaagccagagataggaaggcgtacactgtcctattatacggaaatggacccggatacgtgcttaaagatggcgctcggcctgatgtgacggaaagtgaatcagggagtccagagtacaggcaacagtcggccgtccccctggatgaagagactcacgccggtgaggacgtggcagtatttgccaggggaccacaggcccatttggtgcatggtgtgcaagaacagacttttatcgctcacgtgatggccttcgctgcatgtcttgaaccctacacagcctgcgacctagccccaccggcaggaaccacagacgccgcacacccagggaggtctgtggtgccggcactcctgcccttgctcgctggcactctactcctcttggaaacagcaactgctccatag

SEQ ID NO: 119306 - DNA, 1608 bp, Artificial Sequence
  derived and/or modified sequence
atgctgggcccctgcatgctgctgctgctgctgctgctgggcctgagactgcagctgagcctgggcatcatccccgtggaggaggagaaccccgacttctggaacagagaggccgccgaggccctgggcgccgccaagaagctgcagcccgcccagaccgccgccaagaacctgatcatcttcctgggcgacggcatgggcgtgagcaccgtgaccgccgccagaatcctgaagggccagaagaaggacaagctgggccccgagatccccctggccatggacagattcccctacgtggccctgagcaagacctacaacgtggacaagcacgtgcccgacagcggcgccaccgccaccgcctacctgtgcggcgtgaagggcaacttccagaccatcggcctgagcgccgccgccagattcaaccagtgcaacaccaccagaggcaacgaggtgatcagcgtgatgaacagagccaagaaggccggcaagagcgtgggcgtggtgaccaccaccagagtgcagcacgccagccccgccggcacctacgcccacaccgtgaacagaaactggtacagcgacgccgacgtgcccgccagcgccagacaggagggctgccaggacatcgccacccagctgatcagcaacatggacatcgacgtgatcctgggcggcggcagaaagtacatgttcagaatgggcacccccgaccccgagtaccccgacgactacagccagggcggcaccagactggacggcaagaacctggtgcaggagtggctggccaagagacagggcgccagatacgtgtggaacagaaccgagctgatgcaggccagcctggaccccagcgtgacccacctgatgggcctgttcgagcccggcgacatgaagtacgagatccacagagacagcaccctggaccccagcctgatggagatgaccgaggccgccctgagactgctgagcagaaaccccagaggcttcttcctgttcgtggagggcggcagaatcgaccacggccaccacgagagcagagcctacagagccctgaccgagaccatcatgttcgacgacgccatcgagagagccggccagctgaccagcgaggaggacaccctgagcctggtgaccgccgaccacagccacgtgttcagcttcggcggctaccccctgagaggcagcagcatcttcggcctggcccccggcaaggccagagacagaaaggcctacaccgtgctgctgtacggcaacggccccggctacgtgctgaaggacggcgccagacccgacgtgaccgagagcgagagcggcagccccgagtacagacagcagagcgccgtgcccctggacgaggagacccacgccggcgaggacgtggccgtgttcgccagaggcccccaggcccacctggtgcacggcgtgcaggagcagaccttcatcgcccacgtgatggccttcgccgcctgcctggagccctacaccgcctgcgacctggccccccccgccggcaccaccgacgccgcccaccccggcagaagcgtggtgcccgccctgctgcccctgctggccggcaccctgctgctgctggagaccgccaccgccccctag

SEQ ID NO: 119307 - protein, 352 aa, Artificial Sequence
  derived and/or modified sequence
MRSLGALLLLLSACLAVSAGPVPTPPDNIQVQENFNISRIYGKWYNLAIGSTCPWLKKIMDRMTVSTLVLGEGATEAEISMTSTRWRKGVCEETSGAYEKTDTDGKFLYHKSKWNITMESYVVHTNYDEYAIFLTKKFSRHHGPTITAKLYGRAPQLRETLLQDFRVVAQGVGIPEDSIFTMADRGECVPGEQEPEPILIPRVRRAVLPQEEEGSGGGQLVTEVTKKEDSCQLGYSAGPCMGMTSRYFYNGTSMACETFQYGGCMGNGNNFVTEKECLQTCRTVAACNLPIVRGPCRAFIQLWAFDAVKGKCVLFPYGGCQGNGNKFYSEKECREYCGVPGDGDEELLRFSN

SEQ ID NO: 119308 - protein, 270 aa, Artificial Sequence
  derived and/or modified sequence
MDRMTVSTLVLGEGATEAEISMTSTRWRKGVCEETSGAYEKTDTDGKFLYHKSKWNITMESYVVHTNYDEYAIFLTKKFSRHHGPTITAKLYGRAPQLRETLLQDFRVVAQGVGIPEDSIFTMADRGECVPGEQEPEPILIPRVRRAVLPQEEEGSGGGQLVTEVTKKEDSCQLGYSAGPCMGMTSRYFYNGTSMACETFQYGGCMGNGNNFVTEKECLQTCRTVGECGSPPLCALHPQDPVPPVNHLRIEKVANRGHSSGRTPGGFLKS

SEQ ID NO: 119309 - DNA, 1059 bp, Artificial Sequence
  derived and/or modified sequence
atgcggtctctgggtgcactgttgttactgctgtcggcctgtctggcagtgtcggccggcccagtccccacaccacctgataacatacaggttcaggagaattttaatatatcacggatatatggcaaatggtacaatttagcaataggcagcacatgtccatggcttaaaaagataatggatagaatgacggtgagtaccctcgtgctgggggagggtgctactgaggccgaaattagcatgacaagcacacggtggcgaaaaggagtgtgcgaggagaccagcggagcgtacgagaagacagacactgatggcaaatttctttatcataagtctaagtggaatattaccatggaatcctacgtcgttcacactaattacgacgagtatgcaatattccttacaaaaaagttcagccgccaccacggccctaccattaccgctaaattgtacgggcgggcaccacaattgagggaaactttgcttcaagattttcgagtcgttgcacagggagtgggaattccagaagactctatctttaccatggccgacagaggcgaatgcgtgccgggcgaacaggagccagaacctatcttaattccacgcgtgagacgggcggtcctgcctcaggaggaggaaggaagcggtggcggccagctcgtgacagaggtaaccaaaaaggaggatagttgtcagctcgggtattcagctggcccttgtatgggaatgacttcacgctatttttataacgggacctccatggcgtgcgagacgtttcagtacggagggtgcatgggtaacgggaacaattttgttaccgaaaaagagtgcctccaaacatgtcgcacggtagccgcgtgcaatctgcccatagtgagaggcccctgccgggcttttattcaattgtgggccttcgacgcggtaaagggtaaatgcgttctctttccttatgggggttgtcagggaaatgggaataaattctactccgaaaaggagtgtagagagtactgtggagtgccaggtgacggagatgaggaactgctgcgtttcagcaattag

SEQ ID NO: 119310 - DNA, 813 bp, Artificial Sequence
  derived and/or modified sequence
atggaccgaatgactgtgagtactttagtgcttggagagggcgccactgaagcggagatttccatgactagtaccaggtggcgaaaaggagtttgtgaagaaacgtccggggcctacgagaaaacagatacagacgggaagtttttgtatcacaaatctaagtggaacatcactatggagagctatgtagtacacactaactacgatgaatatgcgatttttttaacaaaaaaattctccagacatcacggccctaccattactgcaaagctgtacggtcgagccccacagttaagagagaccctattgcaagactttcgggtagtggctcagggggtcgggattccagaggattctatattcacgatggctgaccggggtgagtgtgtccctggcgagcaagaacccgaaccgatactgattccacgcgtcagacgcgctgtcctgccccaggaagaggaaggtagcggcggaggccagctggtgaccgaagtcacgaagaaggaagacagctgccagctggggtatagcgccggcccatgcatggggatgacgagcaggtacttctataacggcacgagcatggcctgtgagaccttccagtacgggggatgcatgggtaatggcaacaactttgtgaccgagaaagaatgtttgcaaacgtgtcggactgtgggagagtgcggctctccccctctgtgtgcgctgcatccccaggatccagtccccccagtcaatcacttgcgcattgagaaggtagccaatcgagggcactctagcgggcgcacaccgggaggtttcctgaagtcctag

SEQ ID NO: 119311 - DNA, 1059 bp, Artificial Sequence
  derived and/or modified sequence
atgaggagcctgggcgccctgctgctgctgctgagcgcctgcctggccgtgtctgctggccctgtgcccaccccaccagacaacatccaggtgcaggagaacttcaacatcagccgcatctacggcaagtggtacaacctggccatcggcagcacctgcccctggctgaagaagatcatggacaggatgacagtgtccaccctggtgctgggggagggcgccacagaagctgagatctccatgaccagcacccgctggaggaagggcgtgtgtgaggagaccagcggggcctatgagaagacagacacagatggcaagttcctgtaccacaagagcaagtggaacatcaccatggagagctatgtggtgcacaccaactatgatgaatatgccatcttcctgaccaagaagttcagccgccaccacggccccaccatcacagccaagctgtatggccgggccccccagctgcgggagaccctgctgcaggacttccgggtggtggcccagggcgtgggcatccctgaggacagcatcttcaccatggctgacagaggagaatgtgtgcctggagagcaggagcctgagcccatcctgatcccccgggtgcggcgggctgtgctgccccaggaggaggagggcagcggcggcggccagctggtgacagaggtgaccaagaaggaggacagctgccagctgggctacagcgctggcccctgcatgggcatgaccagccgctacttctacaacggcacctccatggcctgtgagaccttccagtatggaggctgcatgggaaatggaaacaactttgtgacagagaaggagtgcctgcagacctgcaggacagtggccgcctgcaacctgcccatcgtgcggggcccctgccgggccttcatccagctgtgggcctttgatgctgtgaagggcaaatgtgtgctcttcccctatggaggctgccagggcaatggaaacaagttctacagcgagaaggagtgccgggagtactgcggcgtgcctggagatggagatgaggagctgctgcgcttcagcaactag

SEQ ID NO: 119312 - DNA, 813 bp, Artificial Sequence
  derived and/or modified sequence
atggacaggatgacagtgtccaccctggtgctgggggagggcgccacagaggccgagatctccatgaccagcacccgctggaggaaaggagtgtgtgaggagaccagcggggcctatgagaagacagacacagatggcaagttcctgtaccacaagagcaagtggaacatcaccatggagagctatgtggtgcacaccaactatgatgaatatgccatcttcctgaccaagaagttcagccgccaccacggccccaccatcacagccaagctgtatggccgggccccccagctgcgggagaccctgctgcaggacttccgggtggtggcccagggcgtgggcatcccagaagattccatcttcaccatggctgacagaggagaatgtgtgcctggagagcaggagcctgagcccatcctgatcccccgggtgagaagagctgtgctgccccaggaggaggagggcagcggcggcggccagctggtgacagaggtgaccaagaaggaggacagctgccagctgggctacagcgctggcccctgcatgggcatgaccagccgctacttctacaacggcacctccatggcctgtgagaccttccagtatggaggctgcatgggaaatggaaacaactttgtgacagagaaggaatgtctgcagacctgcaggacagtgggagaatgtggcagcccccccctgtgtgccctgcacccccaggaccctgtgccccctgtgaaccacctgcgcatcgagaaggtggccaacagaggccacagcagcggccgcacccctgggggcttcctgaagagctag

SEQ ID NO: 119313 - DNA, 1434 bp, Artificial Sequence
  derived and/or modified sequence
attgtgcttggccaatgcctcttctgaagcagccatcccggcctcttggtactgctgaccccagccaggctacagggatcgattggagctgtccttggggctgtaattggccccagctgagcagggcaaacactgaggtcaactacaagccacaggccccttccccagcctcagttcacagctgccctgttgcagggaggcggtggcccttctgttgctagaccgagcctgtgggatataccaaggcagaggagcccatagccatgaggagcctcggggccctgctcttgctgctgagcgcctgcctggcggtgagcgctggccctgtgccaacgccgcccgacaacatccaagtgcaggaaaacttcaatatctctcggatctatgggaagtggtacaacctggccatcggttccacctgcccctggctgaagaagatcatggacaggatgacagtgagcacgctggtgctgggagagggcgctacagaggcggagatcagcatgaccagcactcgttggcggaaaggtgtctgtgaggagacgtctggagcttatgagaaaacagatactgatgggaagtttctctatcacaaatccaaatggaacataaccatggagtcctatgtggtccacaccaactatgatgagtatgccattttcctgaccaagaaattcagccgccatcatggacccaccattactgccaagctctacgggcgggcgccgcagctgagggaaactctcctgcaggacttcagagtggttgcccagggtgtgggcatccctgaggactccatcttcaccatggctgaccgaggtgaatgtgtccctggggagcaggaaccagagcccatcttaatcccgagagtccggagggctgtgctaccccaagaagaggaaggatcagggggtgggcaactggtaactgaagtcaccaagaaagaagattcctgccagctgggctactcggccggtccctgcatgggaatgaccagcaggtatttctataatggtacatccatggcctgtgagactttccagtacggcggctgcatgggcaacggtaacaacttcgtcacagaaaaggagtgtctgcagacctgccgaactgtggcggcctgcaatctccccatagtccggggcccctgccgagccttcatccagctctgggcatttgatgctgtcaaggggaagtgcgtcctcttcccctacgggggctgccagggcaacgggaacaagttctactcagagaaggagtgcagagagtactgcggtgtccctggtgatggtgatgaggagctgctgcgcttctccaactgacaactggccggtctgcaagtcagaggatggccagtgtctgtcccggggtcctgtggcaggcagcgccaagcaacctgggtccaaataaaaactaaattgtaaactcctgaaa

SEQ ID NO: 119314 - DNA, 1356 bp, Artificial Sequence
  derived and/or modified sequence
atgtggggcttatgggaagaggtgaagcaggacagagattagggttgggagacattcagaggcttgggcacaaggagagacctggactggggcaggacactctcctatctatgggaagtggtacaacctggccatcggttccacctgcccctggctgaagaagatcatggacaggatgacagtgagcacgctggtgctgggagagggcgctacagaggcggagatcagcatgaccagcactcgttggcggaaaggtgtctgtgaggagacgtctggagcttatgagaaaacagatactgatgggaagtttctctatcacaaatccaaatggaacataaccatggagtcctatgtggtccacaccaactatgatgagtatgccattttcctgaccaagaaattcagccgccatcatggacccaccattactgccaagctctacgggcgggcgccgcagctgagggaaactctcctgcaggacttcagagtggttgcccagggtgtgggcatccctgaggactccatcttcaccatggctgaccgaggtgaatgtgtccctggggagcaggaaccagagcccatcttaatcccgagagtccggagggctgtgctaccccaagaagaggaaggatcagggggtgggcaactggtaactgaagtcaccaagaaagaagattcctgccagctgggctactcggccggtccctgcatgggaatgaccagcaggtatttctataatggtacatccatggcctgtgagactttccagtacggcggctgcatgggcaacggtaacaacttcgtcacagaaaaggagtgtctgcagacctgccgaactgtgggtgagtgcgggtccccacccctgtgcgctctgcaccctcaagaccctgtccctccagtaaaccacctgcgaattgaaaaggtagctaacagagggcattccagtggtagaactccaggcggtttcctgaaatcttaggaattccacctttggatgtggaggacctcgggcaaatcattttcttcctgtgggccccagtttccccatctgtcaacgagggatgaggtgttctagatgagcagggccctctggctcagcagtctcatgtatgtctgatcagcagtcacaagggtttctcaagttccatgcctctctccactccacagcggcctgcaatctccccatagtccggggcccctgccgagccttcatccagctctgggcatttgatgctgtcaaggggaagtgcgtcctcttcccctacgggggctgccagggcaacgggaacaagttctactcagagaaggagtgcagagagtactgcggtgtccctggtgatggtaggcagccctgca

SEQ ID NO: 119315 - DNA, 1059 bp, Artificial Sequence
  derived and/or modified sequence
atgcggagcctgggcgccctgctgctgctgctgagcgcctgcctggccgtatcagccggtcccgtgccaacacctcccgacaatattcaagtgcaagaaaatttcaacatttctcgcatttatgggaagtggtataacctggctataggttctacttgcccttggctgaagaaaatcatggatagaatgacagtgtctacactcgtgctcggcgaaggagctacggaagccgagatctctatgacaagtacccgctggaggaagggcgtttgcgaggagacgtcaggcgcttacgagaaaacagacaccgacggcaagtttttataccataagagcaagtggaacatcacaatggagagctatgtggtccacacaaattatgacgaatacgcaatctttctcaccaaaaagttctcccgacatcatgggcccaccatcaccgctaaactctacggacgtgctcctcaactgcgagagacccttcttcaggatttccgagtagtggctcagggggtggggattcctgaggactctattttcacaatggccgatcgtggggaatgcgtgccaggggaacaagagcctgagccaattctaatccctagggtccggcgggccgtccttcctcaggaggaggaggggtccggtggtgggcagctagtgaccgaggtaaccaaaaaggaggactcatgtcagttaggatattcggctgggccctgcatgggaatgacctctcgctacttttataacggaacctccatggcgtgtgagacctttcaatacggaggatgtatgggtaacgggaataacttcgtaacagaaaaagagtgcctacagacgtgtcgcacagtcgccgcgtgcaatcttccaatagtgcgcggaccctgtagggcttttatacagctgtgggcgtttgacgcagttaagggtaaatgtgtactctttccttatggcggctgccaaggtaacggtaataagttttattcagagaaggaatgcagggagtattgtggcgtgccaggggacggtgacgaagagctcctgcggttctctaactag

SEQ ID NO: 119316 - DNA, 813 bp, Artificial Sequence
  derived and/or modified sequence
atggaccggatgaccgtgagcaccctggtgctgggcgagggcgccacagaggcagagatctccatgaccagcactagatggagaaagggcgtttgtgaagagacttcaggagcatacgaaaaaaccgacaccgacggaaagtttctgtatcataagtccaaatggaacattaccatggaatcctatgtcgtgcataccaattatgatgaatatgctatttttttgacaaagaaattctcgaggcaccatggacccacaattactgccaaactctatgggcgggcccctcaattaagagagaccctgttgcaagacttcagagtggtggcacagggagtaggaattccagaggacagcattttcaccatggcagacagaggagaatgtgttccgggggaacaggagcccgaacccatcctaattcccagggtaaggcgggctgtacttccccaggaggaggagggctctgggggtgggcagctggtgacagaggttaccaagaaggaggattcttgccagcttggttactctgccggcccatgtatgggcatgacaagcaggtatttttataacggaacgagtatggcgtgcgaaaccttccaatacggtggttgcatggggaacggcaataactttgtcacagaaaaggagtgtctgcaaacctgccgcactgttggcgagtgtggctcaccccccctatgtgcactgcaccctcaggacccagtgccccctgtgaatcacttacggatcgagaaagtggcaaaccgggggcattctagtgggcggacaccgggcggcttcctcaagagttag

SEQ ID NO: 119317 - DNA, 1059 bp, Artificial Sequence
  derived and/or modified sequence
atgcgtagccttggggcactacttctcttactctcagcctgtctggccgtaagcgccggacctgtgccgactcccccagataatattcaagtccaggagaacttcaatattagccggatttatggtaagtggtataacctagctattggaagcacctgtccttggctgaaaaaaatcatggatcgtatgaccgtgtctactttggtattgggggagggagccacagaggccgaaattagtatgacatctactcgctggagaaagggggtttgcgaagagaccagtggcgcttatgagaaaaccgataccgatgggaagttcctataccacaaaagcaagtggaacataactatggaatcttatgtggtacacaccaactacgacgaatacgcgatcttcctgactaagaagttttctaggcaccacgggccaacaattaccgccaaactctacggtcgcgcaccccaactgcgtgagaccctcctccaggatttcagggtggtggctcagggcgtgggcattcctgaagattctatttttaccatggctgatcgcggagagtgcgtaccaggagagcaagaacctgaacctattctcatcccgcgagtacggagagcggtactgccacaggaagaagaaggcagcggcggagggcagctggtgactgaggtgacgaagaaagaggatagctgtcagctgggctactcggccggtccctgcatgggtatgacgtcccgatacttctacaatggaaccagtatggcctgcgagaccttccagtacgggggatgtatgggcaacggcaataattttgtgacggagaaagagtgcttacagacatgtcgtaccgtggccgcatgcaatctaccaattgtgagaggcccatgtagagcctttattcagctttgggccttcgacgctgtcaaagggaaatgtgttctgttcccctacggcggatgccaaggcaacggcaacaagttctactcagagaaggaatgccgggaatattgtggggtcccaggtgatggtgatgaggagctactgaggtttagcaattag

SEQ ID NO: 119318 - DNA, 813 bp, Artificial Sequence
  derived and/or modified sequence
atggatcgtatgaccgttagcacgctcgttttaggcgaaggcgctacagaagccgagataagtatgacatctacacggtggaggaaaggcgtgtgcgaggagactagtggggcatacgaaaagacagataccgatgggaagtttctgtaccacaaatctaaatggaacatcactatggagagctacgtagtgcacacgaactacgacgagtatgccatctttctgacaaaaaaattcagtcgccaccacggcccaacaatcacagcaaaactgtacggtcgggcaccccagttaagagaaactcttctgcaggattttcgggtcgtggctcagggggtgggaataccggaagattctatctttacgatggccgatcggggagagtgcgtcccaggagaacaggagccggaacctatcctaataccccgtgtccgtcgggcagtgttgcctcaggaggaggagggaagcgggggtggtcagctggtaactgaggtgacaaagaaggaggactcgtgccagctcgggtattccgctggaccttgcatggggatgaccagccggtatttttacaatggtacttcaatggcttgcgagacatttcagtatggaggatgcatggggaatgggaataactttgtgacagagaaagaatgccttcagacctgcagaaccgttggggagtgtggatcaccgcctctgtgcgccctccacccacaggacccagtcccacctgttaatcacctcagaattgaaaaagttgccaaccgtggtcactcatcaggcagaaccccaggaggatttttaaagtcttag

SEQ ID NO: 119319 - DNA, 1059 bp, Artificial Sequence
  derived and/or modified sequence
atgagaagcctgggcgccctgctgctgctgctgagcgcctgcctggccgtgagcgccggccccgtgcccaccccccccgacaacatccaggtgcaggagaacttcaacatcagcagaatctacggcaagtggtacaacctggccatcggcagcacctgcccctggctgaagaagatcatggacagaatgaccgtgagcaccctggtgctgggcgagggcgccaccgaggccgagatcagcatgaccagcaccagatggagaaagggcgtgtgcgaggagaccagcggcgcctacgagaagaccgacaccgacggcaagttcctgtaccacaagagcaagtggaacatcaccatggagagctacgtggtgcacaccaactacgacgagtacgccatcttcctgaccaagaagttcagcagacaccacggccccaccatcaccgccaagctgtacggcagagccccccagctgagagagaccctgctgcaggacttcagagtggtggcccagggcgtgggcatccccgaggacagcatcttcaccatggccgacagaggcgagtgcgtgcccggcgagcaggagcccgagcccatcctgatccccagagtgagaagagccgtgctgccccaggaggaggagggcagcggcggcggccagctggtgaccgaggtgaccaagaaggaggacagctgccagctgggctacagcgccggcccctgcatgggcatgaccagcagatacttctacaacggcaccagcatggcctgcgagaccttccagtacggcggctgcatgggcaacggcaacaacttcgtgaccgagaaggagtgcctgcagacctgcagaaccgtggccgcctgcaacctgcccatcgtgagaggcccctgcagagccttcatccagctgtgggccttcgacgccgtgaagggcaagtgcgtgctgttcccctacggcggctgccagggcaacggcaacaagttctacagcgagaaggagtgcagagagtactgcggcgtgcccggcgacggcgacgaggagctgctgagattcagcaactag

SEQ ID NO: 119320 - DNA, 813 bp, Artificial Sequence
  derived and/or modified sequence
atggacagaatgaccgtgagcaccctggtgctgggcgagggcgccaccgaggccgagatcagcatgaccagcaccagatggagaaagggcgtgtgcgaggagaccagcggcgcctacgagaagaccgacaccgacggcaagttcctgtaccacaagagcaagtggaacatcaccatggagagctacgtggtgcacaccaactacgacgagtacgccatcttcctgaccaagaagttcagcagacaccacggccccaccatcaccgccaagctgtacggcagagccccccagctgagagagaccctgctgcaggacttcagagtggtggcccagggcgtgggcatccccgaggacagcatcttcaccatggccgacagaggcgagtgcgtgcccggcgagcaggagcccgagcccatcctgatccccagagtgagaagagccgtgctgccccaggaggaggagggcagcggcggcggccagctggtgaccgaggtgaccaagaaggaggacagctgccagctgggctacagcgccggcccctgcatgggcatgaccagcagatacttctacaacggcaccagcatggcctgcgagaccttccagtacggcggctgcatgggcaacggcaacaacttcgtgaccgagaaggagtgcctgcagacctgcagaaccgtgggcgagtgcggcagcccccccctgtgcgccctgcacccccaggaccccgtgccccccgtgaaccacctgagaatcgagaaggtggccaacagaggccacagcagcggcagaacccccggcggcttcctgaagagctag

SEQ ID NO: 119321 - protein, 265 aa, Artificial Sequence
  derived and/or modified sequence
MFVSKRRFILKTCGTTLLLKALVPLLKLARDYSGFDSIQSFFYSRKNFMKPSHQGYPHRNFQEEIEFLNAIFPNGAAYCMGRMNSDCWYLYTLDFPESRVISQPDQTLEILMSELDPAVMDQFYMKDGVTAKDVTRESGIRDLIPGSVIDATMFNPCGYSMNGMKSDGTYWTIHITPEPEFSYVSFETNLSQTSYDDLIRKVVEVFKPGKFVTTLFVNQSSKCRTVLASPQKIEGFKRLDCQSAMFNDYNFVFTSFAKKQQQQQS

SEQ ID NO: 119322 - protein, 186 aa, Artificial Sequence
  derived and/or modified sequence
MGRMNSDCWYLYTLDFPESRVISQPDQTLEILMSELDPAVMDQFYMKDGVTAKDVTRESGIRDLIPGSVIDATMFNPCGYSMNGMKSDGTYWTIHITPEPEFSYVSFETNLSQTSYDDLIRKVVEVFKPGKFVTTLFVNQSSKCRTVLASPQKIEGFKRLDCQSAMFNDYNFVFTSFAKKQQQQQS

SEQ ID NO: 119323 - protein, 334 aa, Artificial Sequence
  derived and/or modified sequence
MEAAHFFEGTEKLLEVWFSRQQPDANQGSGDLRTIPRSEWDILLKDVQCSIISVTKTDKQEAYVLSESSMFVSKRRFILKTCGTTLLLKALVPLLKLARDYSGFDSIQSFFYSRKNFMKPSHQGYPHRNFQEEIEFLNAIFPNGAAYCMGRMNSDCWYLYTLDFPESRVISQPDQTLEILMSELDPAVMDQFYMKDGVTAKDVTRESGIRDLIPGSVIDATMFNPCGYSMNGMKSDGTYWTIHITPEPEFSYVSFETNLSQTSYDDLIRKVVEVFKPGKFVTTLFVNQSSKCRTVLASPQKIEGFKRLDCQSAMFNDYNFVFTSFAKKQQQQQS

SEQ ID NO: 119324 - DNA, 1005 bp, Artificial Sequence
  derived and/or modified sequence
atggaagctgcccatttttttgagggcacggagaaattgctcgaggtttggttttcccggcagcaaccagatgcaaatcagggcagcggtgatctgcgtacaatcccccgaagcgagtgggacattttgctcaaggacgtccagtgcagtatcataagcgttacaaaaacagacaaacaggaagcctatgtgctttctgagagctccatgtttgtaagtaaacggcggttcatcctaaaaacttgtggaacgacgctgttgttgaaggctctagtgcccctcctgaagcttgctcgggattattccgggttcgattctattcaatcctttttctactcaagaaagaattttatgaagccaagccaccaaggctatccccacagaaactttcaggaagagatcgagttcctgaacgccatctttccgaacggggcagcttactgcatgggccggatgaatagcgactgctggtacctgtacaccctggattttcccgagtcccgtgtaatttctcagcccgaccagaccctggagattttaatgagtgagttagaccccgccgtcatggatcaattttacatgaaagatggcgtcactgccaaagatgtgacccgggaaagtggcattagggatctgattccaggaagtgtgatcgacgctacaatgttcaacccctgtggttacagcatgaatggaatgaagagtgatggcacctattggaccatacatattacacccgaaccagagttttcttatgtgtcgttcgagactaacttgtcccagacttcctacgacgacctcatcaggaaggtggtcgaggtgtttaagccgggaaagttcgtgacaacactgtttgttaatcagagttccaagtgccggacagttttggcttcgccccagaagatcgaagggtttaaacggcttgattgccagtctgctatgttcaatgactacaattttgtcttcacatcattcgccaagaagcagcagcagcaacagtcctag

SEQ ID NO: 119325 - DNA, 3040 bp, Artificial Sequence
  derived and/or modified sequence
gggccccaggtgggggtcgggggcgcctgcgcgggttgcctccggcagatctgagtgggacatacttttgaaggatgtgcaatgttcaatcataagtgtgacaaaaactgacaagcaggaagcttatgtactcagtgagagtagcatgtttgtctccaagagacgtttcattttgaagacatgtggtaccaccctcttgctgaaagcactggttcccctgttgaagcttgctagggattacagtgggtttgactcaattcaaagcttcttttattctcgtaagaatttcatgaagccttctcaccaagggtacccacaccggaatttccaggaagaaatagagtttcttaatgcaattttcccaaatggagcagcatattgtatgggacgtatgaattctgactgttggtacttatatactctggatttcccagagagtcgggtaatcagtcagccagatcaaaccttggaaattctgatgagtgagcttgacccagcagttatggaccagttctacatgaaagatggtgttactgcaaaggatgtcactcgtgagagtggaattcgtgacctgataccaggttctgtcattgatgccacaatgttcaatccttgtgggtattcgatgaatggaatgaaatcggatggaacttattggactattcacatcactccagaaccagaattttcttatgttagctttgaaacaaacttaagtcagacctcctatgatgacctgatcaggaaagttgtagaagtcttcaagccaggaaaatttgtgaccaccttgtttgttaatcagagttctaaatgtcgcacagtgcttgcttcgccccagaagattgaaggttttaagcgtcttgattgccagagtgctatgttcaatgattacaattttgtttttaccagttttgctaagaagcagcaacaacagcagagttgattaagaaaaatgaagaaaaaacgcaaaaagagaacacatgtagaaggtggtggatgctttctagatgtcgatgctgggggcagtgctttccataaccaccactgtgtagttgcagaaagccctagatgtaatgatagtgtaatcattttgaattgtatgcattattatatcaaggagttagatatcttgcatgaatgctctcttctgtgtttaggtattctctgccactcttgctgtgaaattgaagtgcatgtagaaaaaaccttttactatatgaaactttacaacacttgtgaaagcaactcaatttggtttatgcacagtgtaatatttctccaagtatcatccaaaattccccacagacaaggctttcgtcctcattaggtgttggcctcagcctaaccctctaggactgttctattaaattgctgccagaattttacatccagttacctccactttctagaacatattctttactaatgttattgaaaccaatttctacttcatactgatgtttttggaaacagcaattaaagtttttcttccatgagttgagtccttaagaaaatgattccagttactcattttgcatatttgctattttaacattattggaccctgcatttatagtcctttgatttcttccctctccctggtgtctcccccaagaccccaaataaagcaatacactgttaacactgtgggtttatatactaattctataccccagatggggaatgggggagatggtccctgggcttaatattctttaaagggcatgggaatttagcctctcttttattgtaatgtgctcttttggaaaatagttggttagcagggaagacccagagttgtagattgagattagggtgtactggctgaactgtggaaaacatacaattctgtgttcctcagtaaatgagattagcgtctaatgagtagcacccctttactaacttagtagtagtataaaatcatttttatttagttaattaccagagagatttagcataattttgttctggattcagtaaatcaagtcagcttggatcattcaccttaacttttcctttagcagccatttccactagtttccattaagtagtgttctataaactttgatccaaagcagaatcaatgtcttttccatctcgtgacttaaagttctgtgactgtgatgcatgtgagtgttccgacttcatctgttcctcttaactacggtgtttcccttaccatggcattcataggatgaaatgaatgactgcccagaatgagaatttgtccagattattcagataaacatcataaagcagaatacattataaataagtagaatatgaataaatagaataataaaattccaaaatactcaatgggaaatgactagtaatataggctttcaagagttggtaccttttagctatatttgcagattctctgggattttaaggaactgagaaaacagcaaagttgactaaattttatatttcttgtcctctaaatattttgataatttctggattgatgcagtgatgtttttgttccttccgtatttataaatgaaacacctttttttagtgtttctaaacctaaaatctacttggtttgaaatcaagtggttggaacactgtttgacttttatttgaagcatgttgttgattgaaaatttcattgaggaagttttcaatcagtgtgatcagtttgattctgtaatgagcacagcacctaatattttgaggagctctgttttgaggaccaatgcttaaggtggactttgttcgtaaacaatatcccaatagatttgttgacttgaggtctggtttggttttgtttttgttttgttttgttttgttttgtttccaatagaattaagaattctaatgttgaaaaactgcacaaatttttatgggacaaagcctagaaaagagaaatgtagtttgaatcataatctaaatcatcgtatgatagaagagggaaagttttggtgccataatttctcctttcactggtgttggacttaaatcagttgaaatgtatttctgtaccacaatttacgcttcaataaaagtttaattgtctagtgacattcagaaa

SEQ ID NO: 119326 - DNA, 3438 bp, Artificial Sequence
  derived and/or modified sequence
tcacgcagcgctctcgcttacacagtatggccggcgacattagctagcgctcgctctactctctctaacgggaaagcagcggaatacaagagactgaactgtatctgcctctatttccaaaagactcacgttcaactttcgctcacacaaagccgggaaaattttattagtcctttttttaaaaaaagttaatataaaattatagcaaaaaaaaaaaggaacctgaactttagtaacacagctggaacaatccgcagcggcggcggcagcggcgggagaagaggtttaatttagttgattttctgtggttgttggttgttcgctagtctcacggtgatggaagctgcacattttttcgaagggaccgagaagctgctggaggtttggttctcccggcagcagcccgacgcaaaccaaggatctggggatcttcgcactatcccaagatctgagtgggacatacttttgaaggatgtgcaatgttcaatcataagtgtgacaaaaactgacaagcaggaagcttatgtactcagtgagagtagcatgtttgtctccaagagacgtttcattttgaagacatgtggtaccaccctcttgctgaaagcactggttcccctgttgaagcttgctagggattacagtgggtttgactcaattcaaagcttcttttattctcgtaagaatttcatgaagccttctcaccaagggtacccacaccggaatttccaggaagaaatagagtttcttaatgcaattttcccaaatggagcagcatattgtatgggacgtatgaattctgactgttggtacttatatactctggatttcccagagagtcgggtaatcagtcagccagatcaaaccttggaaattctgatgagtgagcttgacccagcagttatggaccagttctacatgaaagatggtgttactgcaaaggatgtcactcgtgagagtggaattcgtgacctgataccaggttctgtcattgatgccacaatgttcaatccttgtgggtattcgatgaatggaatgaaatcggatggaacttattggactattcacatcactccagaaccagaattttcttatgttagctttgaaacaaacttaagtcagacctcctatgatgacctgatcaggaaagttgtagaagtcttcaagccaggaaaatttgtgaccaccttgtttgttaatcagagttctaaatgtcgcacagtgcttgcttcgccccagaagattgaaggttttaagcgtcttgattgccagagtgctatgttcaatgattacaattttgtttttaccagttttgctaagaagcagcaacaacagcagagttgattaagaaaaatgaagaaaaaacgcaaaaagagaacacatgtagaaggtggtggatgctttctagatgtcgatgctgggggcagtgctttccataaccaccactgtgtagttgcagaaagccctagatgtaatgatagtgtaatcattttgaattgtatgcattattatatcaaggagttagatatcttgcatgaatgctctcttctgtgtttaggtattctctgccactcttgctgtgaaattgaagtgcatgtagaaaaaaccttttactatatgaaactttacaacacttgtgaaagcaactcaatttggtttatgcacagtgtaatatttctccaagtatcatccaaaattccccacagacaaggctttcgtcctcattaggtgttggcctcagcctaaccctctaggactgttctattaaattgctgccagaattttacatccagttacctccactttctagaacatattctttactaatgttattgaaaccaatttctacttcatactgatgtttttggaaacagcaattaaagtttttcttccatgagttgagtccttaagaaaatgattccagttactcattttgcatatttgctattttaacattattggaccctgcatttatagtcctttgatttcttccctctccctggtgtctcccccaagaccccaaataaagcaatacactgttaacactgtgggtttatatactaattctataccccagatggggaatgggggagatggtccctgggcttaatattctttaaagggcatgggaatttagcctctcttttattgtaatgtgctcttttggaaaatagttggttagcagggaagacccagagttgtagattgagattagggtgtactggctgaactgtggaaaacatacaattctgtgttcctcagtaaatgagattagcgtctaatgagtagcacccctttactaacttagtagtagtataaaatcatttttatttagttaattaccagagagatttagcataattttgttctggattcagtaaatcaagtcagcttggatcattcaccttaacttttcctttagcagccatttccactagtttccattaagtagtgttctataaactttgatccaaagcagaatcaatgtcttttccatctcgtgacttaaagttctgtgactgtgatgcatgtgagtgttccgacttcatctgttcctcttaactacggtgtttcccttaccatggcattcataggatgaaatgaatgactgcccagaatgagaatttgtccagattattcagataaacatcataaagcagaatacattataaataagtagaatatgaataaatagaataataaaattccaaaatactcaatgggaaatgactagtaatataggctttcaagagttggtaccttttagctatatttgcagattctctgggattttaaggaactgagaaaacagcaaagttgactaaattttatatttcttgtcctctaaatattttgataatttctggattgatgcagtgatgtttttgttccttccgtatttataaatgaaacacctttttttagtgtttctaaacctaaaatctacttggtttgaaatcaagtggttggaacactgtttgacttttatttgaagcatgttgttgattgaaaatttcattgaggaagttttcaatcagtgtgatcagtttgattctgtaatgagcacagcacctaatattttgaggagctctgttttgaggaccaatgcttaaggtggactttgttcgtaaacaatatcccaatagatttgttgacttgaggtctggtttggttttgtttttgttttgttttgttttgttttgtttccaatagaattaagaattctaatgttgaaaaactgcacaaatttttatgggacaaagcctagaaaagagaaatgtagtttgaatcataatctaaatcatcgtatgatagaagagggaaagttttggtgccataatttctcctttcactggtgttggacttaaatcagttgaaatgtatttctgtaccacaatttacgcttcaataaaagtttaattgtctagtgacattcagaaa

SEQ ID NO: 119327 - DNA, 1005 bp, Artificial Sequence
  derived and/or modified sequence
atggaggccgcccacttctttgagggcacagagaagctgctggaggtgtggttcagccggcagcagccagatgccaaccagggcagcggggacctgcggaccatccccaggtctgagtgggacatcctgctgaaggatgtgcagtgcagcatcatctctgtgaccaagacagacaagcaggaggcctacgtgctgtctgagagctccatgtttgtgtccaagaggcgcttcatcctgaagacctgtggcaccaccctgctgctgaaggccctggtgcccctgctgaagctggcccgggactacagcggctttgacagcatccagagcttcttctacagcaggaagaacttcatgaagcccagccaccagggctacccccacaggaacttccaggaggagattgagttcctgaatgccatcttccccaatggagctgcctactgcatgggccgcatgaacagcgactgctggtacctgtacaccctggacttccctgagagcagggtcatcagccagcctgaccagaccctggagatcctgatgtctgagctggaccctgctgtgatggaccagttctacatgaaggatggagtgacagccaaggatgtgacccgggagagcggcatccgggacctgatccctggctctgtgattgatgccaccatgttcaacccctgtggctacagcatgaatggcatgaagagtgatggcacctactggaccatccacatcaccccagagcctgagttctcctatgtgtcctttgagaccaacctgagccagaccagctatgatgacctgatcaggaaggtggtggaggtgttcaagccaggcaagtttgtgaccaccctgtttgtgaaccagagcagcaaatgtagaacagtgctggccagcccccagaagattgagggcttcaagaggctggactgccagagcgccatgtttaatgactacaactttgtgttcaccagctttgccaagaagcagcagcagcagcagagctag

SEQ ID NO: 119328 - DNA, 1005 bp, Artificial Sequence
  derived and/or modified sequence
atggaggccgcccacttcttcgagggcaccgagaagctgctggaggtctggttcagcagacagcagcccgacgctaatcagggaagtggcgacttgcggacaattcctaggtctgaatgggacatcttgctgaaagacgtccagtgttcaattatcagtgtgacaaagacagacaagcaggaagcgtacgtcctctcggaatcaagcatgtttgtaagcaagcgtcgattcattctgaagacatgcgggacaacccttttgttgaaagctttggttcccctgttaaagctggcacgtgactatagtggcttcgatagcatccagagctttttctactcacgaaaaaatttcatgaaaccctcccatcagggctaccctcataggaatttccaagaggagattgagtttctgaatgccatctttcccaatggtgccgcttactgcatggggcgaatgaactctgattgttggtatctgtataccctcgactttcccgaatcacgcgtaataagccagccagatcagaccttggagattttgatgtctgagcttgacccggctgtgatggatcaattctacatgaaggatggggtgacagcaaaggatgtcacgcgcgagtcaggtatccgtgacctgatacccggttctgtgatcgacgccaccatgttcaatccatgcggctactccatgaacgggatgaagtctgacggaacatactggacgattcacattaccccagaaccagagttctcttatgtgagcttcgaaactaatctaagtcagactagctatgatgatcttatccgaaaagtggttgaagtgtttaaaccgggtaagttcgtgactacgctcttcgttaatcaatcctcaaaatgcaggacagtgctggccagccctcaaaagatcgaaggctttaagcgcttagactgccagagcgcgatgttcaacgattacaattttgtgtttacttcctttgcaaagaaacagcagcagcagcagagctag

SEQ ID NO: 119329 - DNA, 1005 bp, Artificial Sequence
  derived and/or modified sequence
atggaggctgcccactttttcgaaggtacagagaaactgctggaggtttggttctcacgtcagcaacctgacgctaatcaaggatcaggggacctccgaacaatcccccgttccgaatgggatatcctattaaaggacgttcagtgctccataatttctgtgaccaaaaccgataagcaggaggcatacgtcctctctgagtctagcatgtttgtctcgaaacggaggttcattttaaagacgtgcggcacaactcttttgttaaaagcactggtgccattgctcaagctggctcgtgattattcagggtttgatagtatccagtcattcttctactctcggaagaattttatgaaaccctctcatcagggataccctcaccgtaactttcaagaggaaatcgaattcctgaacgctattttccctaacggcgctgcctactgtatgggcagaatgaattccgactgctggtacctctacaccctggactttccagaatctcgcgtgatctctcagccggatcaaacactggaaattctgatgagcgaactggaccctgcagtgatggaccaattttacatgaaggatggggtaaccgcaaaggatgtgacacgagagtctggcatacgggacttgatccctggttcagttatcgatgcaacgatgttcaacccgtgcggctactccatgaatgggatgaaatctgatgggacatattggacaatccacatcacccccgaacccgaattttcctatgtcagctttgagaccaacctgagccagactagttatgatgatctgatccggaaagtagtggaggttttcaaacccggaaagtttgtgaccaccctgtttgtgaatcagagttccaagtgcagaaccgttctggcctcccctcagaagatcgagggctttaagcggctggattgccagagcgccatgttcaacgactataactttgtcttcacatcttttgcaaagaagcagcagcagcaacagtcttag

SEQ ID NO: 119330 - DNA, 1005 bp, Artificial Sequence
  derived and/or modified sequence
atggaggccgcccacttcttcgagggcaccgagaagctgctggaggtgtggttcagcagacagcagcccgacgccaaccagggcagcggcgacctgagaaccatccccagaagcgagtgggacatcctgctgaaggacgtgcagtgcagcatcatcagcgtgaccaagaccgacaagcaggaggcctacgtgctgagcgagagcagcatgttcgtgagcaagagaagattcatcctgaagacctgcggcaccaccctgctgctgaaggccctggtgcccctgctgaagctggccagagactacagcggcttcgacagcatccagagcttcttctacagcagaaagaacttcatgaagcccagccaccagggctacccccacagaaacttccaggaggagatcgagttcctgaacgccatcttccccaacggcgccgcctactgcatgggcagaatgaacagcgactgctggtacctgtacaccctggacttccccgagagcagagtgatcagccagcccgaccagaccctggagatcctgatgagcgagctggaccccgccgtgatggaccagttctacatgaaggacggcgtgaccgccaaggacgtgaccagagagagcggcatcagagacctgatccccggcagcgtgatcgacgccaccatgttcaacccctgcggctacagcatgaacggcatgaagagcgacggcacctactggaccatccacatcacccccgagcccgagttcagctacgtgagcttcgagaccaacctgagccagaccagctacgacgacctgatcagaaaggtggtggaggtgttcaagcccggcaagttcgtgaccaccctgttcgtgaaccagagcagcaagtgcagaaccgtgctggccagcccccagaagatcgagggcttcaagagactggactgccagagcgccatgttcaacgactacaacttcgtgttcaccagcttcgccaagaagcagcagcagcagcagagctag

SEQ ID NO: 119331 - protein, 695 aa, Artificial Sequence
  derived and/or modified sequence
MADIKTGIFAKNVQKRLNRAQEKVLQKLGKADETKDEQFEEYVQNFKRQEAEGTRLQRELRGYLAAIKGMQEASMKLTESLHEVYEPDWYGREDVKMVGEKCDVLWEDFHQKLVDGSLLTLDTYLGQFPDIKNRIAKRSRKLVDYDSARHHLEALQSSKRKDESRISKAEEEFQKAQKVFEEFNVDLQEELPSLWSRRVGFYVNTFKNVSSLEAKFHKEIAVLCHKLYEVMTKLGDQHADKAFTIQGAPSDSGPLRIAKTPSPPEEPSPLPSPTASPNHTLAPASPAPARPRSPSQTRKGPPVPPLPKVTPTKELQQENIISFFEDNFVPEISVTTPSQNEVPEVKKEETLLDLDFDPFKPEVTPAGSAGVTHSPMSQTLPWDLWTTSTDLVQPASGGSFNGFTQPQDTSLFTMQTDQSMICNLAESEQAPPTEPKAEEPLAAVTPAVGLDLGMDTRAEEPVEEAVIIPGADADAAVGTLVSAAEGAPGEEAEAEKATVPAGEGVSLEEAKIGTETTEGAESAQPEAEELEATVPQEKVIPSVVIEPASNHEEEGENEITIGAEPKETTEDAAPPGPTSETPELATEQKPIQDPQPTPSAPAMGAADQLASAREASQELPPGFLYKVETLHDFEAANSDELTLQRGDVVLVVPSDSEADQDAGWLVGVKESDWLQYRDLATYKGLFPENFTRRLD

SEQ ID NO: 119332 - DNA, 2088 bp, Artificial Sequence
  derived and/or modified sequence
atggccgacataaagactggcatctttgccaagaatgtgcaaaagcgactgaatagagcccaggagaaagtgctacagaaactggggaaagctgacgaaacaaaggacgagcagttcgaggaatacgtgcaaaacttcaagcggcaggaagctgaaggaacacgactccaacgcgaactgcgaggatatctcgcagccatcaagggcatgcaagaggccagcatgaagcttaccgagtctctgcacgaggtttatgaaccggattggtatggccgtgaggacgtgaaaatggtgggagaaaagtgcgatgtcctttgggaggactttcatcaaaaactagtagatggctctttactcacattagacacctacctagggcagtttccggatatcaaaaaccggatcgctaagcggtcacgtaagttggtggattatgactccgctcgacaccacctggaggcactgcagagctcaaaaaggaaggacgagagccgaatctcaaaagcagaggaggagttccagaaggctcagaaagtgtttgaggagtttaacgtcgatctgcaggaggagctcccaagtttatggtcacggcgcgtggggttctatgttaatacctttaaaaacgtgagttccctcgaagctaagttccataaagagatagcggtgctgtgtcacaagctttatgaggtcatgacaaaactaggagaccagcacgctgacaaagctttcacgatccagggtgcccccagtgacagcggtcctttgaggattgcaaaaactccttccccacccgaggagccatctcccctgccgagccccaccgctagccccaaccataccctggcacctgctagccctgcccccgcccggcctagaagtccctcgcagacccggaaaggccctcccgttccccctttgcccaaggtgactccaaccaaggaactgcagcaggagaatattatctcattttttgaggataacttcgtgccggagataagcgtgactacaccctctcagaatgaagtgccagaagtgaaaaaggaggagactttgttggacctcgacttcgatcctttcaaaccagaggtaaccccagcaggaagcgccggggtaactcactcgcccatgtcccagaccttaccatgggatctgtggactacatcaacagatctggtacagccagcatccgggggcagctttaacggttttacgcagccccaggacacaagcctgtttacaatgcagacagaccagagcatgatttgtaatctagcggagtcggaacaggcaccccctaccgagccaaaagccgaagagcctctggctgctgtgacgcccgcggttgggctggacctgggtatggacactagagccgaggaacccgttgaggaggccgtgattatccctggtgcagatgctgatgcagcggttggcactttggtctccgctgccgagggtgcaccgggcgaagaagctgaggccgagaaggccacggttcccgccggtgagggcgtttccttagaggaggcgaaaataggaaccgagacaacagagggggcagagtctgcccagccagaggccgaagagctggaagcgaccgtgccccaagagaaggtcatcccatctgttgtgatagagcctgcctcaaatcacgaggaggagggagagaacgagataaccatcggtgccgagcctaaggaaactacggaggatgccgcacctcccggacccaccagtgaaacgcccgaactcgcaactgaacagaagccaatccaggacccacagcccacacccagtgctccagccatgggggccgcagaccagctggcgtcagcccgggaagcctcccaggaactgcctcccgggttcctctacaaggtggagacccttcacgacttcgaagccgccaactccgacgagttgacgcttcagagaggagacgtagtcctggtcgtccccagcgactctgaggcagaccaggatgcgggatggctcgttggcgttaaagaaagtgactggctccagtaccgagatctcgcgacctacaaaggtctttttccagagaacttcactcggcggctcgactag

SEQ ID NO: 119333 - DNA, 2088 bp, Artificial Sequence
  derived and/or modified sequence
atggctgacatcaagacaggcatctttgccaagaatgtgcagaagaggctgaacagagcccaggagaaggtgctgcagaagctgggcaaggcagatgagaccaaggatgagcagtttgaggagtatgtgcagaacttcaagaggcaggaggccgagggcacccggctgcagcgggagctgcggggctacctggccgccatcaagggcatgcaggaggcctccatgaagctgacagagagcctgcacgaggtgtatgagccagactggtacggcagagaagatgtgaagatggtgggggagaagtgtgatgtgctgtgggaggacttccaccagaagctggtggatggcagcctgctgaccctggacacctacctgggccagttcccagacatcaagaacagaattgccaagaggagcaggaagctggtggactatgattctgcccggcaccacctggaggccctgcagagcagcaagaggaaggatgagagccgcatcagcaaggccgaggaggagttccagaaggcccagaaggtgtttgaggagttcaacgtggacctgcaggaggagctgcccagcctgtggagcagaagagtgggcttctacgtgaacaccttcaagaatgtgagcagcctggaggccaagttccacaaggagattgctgtgctgtgccacaagctgtatgaggtgatgaccaagctgggggaccagcacgccgacaaggccttcaccatccagggcgcccccagcgacagcggccccctgagaattgccaagacccccagccccccagaggagcccagccccctgcccagccccacagccagccccaaccacaccctggccccagccagccctgccccagcccggcccaggagccccagccagaccaggaaaggacctcctgtgccccccctgcccaaggtgacccccaccaaggagctgcagcaggagaacatcatctccttctttgaggacaactttgtgcctgagatctctgtgaccacccccagccagaatgaggtgcctgaggtgaagaaggaggagaccctgctggacctggactttgaccccttcaagccagaggtgaccccagctggcagcgctggggtgacccacagccccatgagccagaccctgccctgggacctgtggaccaccagcacagacctggtgcagcctgccagcggcggcagcttcaacggcttcacccagccccaggacaccagcctcttcaccatgcagacagaccagagcatgatctgcaacctggccgagagcgagcaggccccacccacagagcccaaggccgaggagcccctggccgctgtgaccccagctgtgggcctggacctgggcatggacaccagggctgaggagcctgtggaggaggccgtcatcatccctggagcagatgctgatgctgctgtgggcaccctggtgtctgctgctgagggcgcccctggagaggaggccgaggccgagaaggccaccgtgcctgctggggagggcgtgtccctggaggaggccaagattggaacagagaccacagaaggagctgagagcgcccagcctgaggccgaggagctggaggccaccgtgccccaggagaaggtgatccccagcgtggtgattgaaccagccagcaaccacgaggaggagggggagaatgagatcaccatcggggctgagcccaaggagaccacagaagatgctgcccctcctggccccaccagcgagaccccagagctggccacagagcagaagcccatccaggacccccagcccaccccatctgccccagccatgggcgctgctgaccagctggccagcgcccgggaggccagccaggagctgcccccaggcttcctgtacaaggtggagaccctgcatgactttgaagctgccaacagtgatgagctgaccctgcagagaggagatgtggtgctggtggtgcccagcgacagcgaggccgaccaggatgctggctggctggtgggcgtgaaggagagtgactggctgcagtacagagacctggccacctacaagggcctcttccctgagaacttcacccggcggctggactag

SEQ ID NO: 119334 - DNA, 2088 bp, Artificial Sequence
  derived and/or modified sequence
atggccgacatcaagaccggcatcttcgccaagaacgtgcagaagcgtctcaaccgtgcccaggaaaaggtgctgcaaaagctgggaaaagcagacgagaccaaggatgaacagttcgaagaatatgtacagaactttaagcgccaggaggccgaaggcacccggctgcaacgcgagctgcgcgggtacctggctgcgatcaagggaatgcaggaggctagtatgaaactcactgaaagtctgcacgaggtgtacgagccagattggtacgggcgtgaggatgtgaaaatggtaggagaaaagtgtgatgttttgtgggaggacttccaccagaaactggtggacggatctttgctaactctcgacacctatctcggccagttcccagatatcaagaataggattgcaaaacgttccaggaaactggtagactacgactcagccagacaccatctggaggccttgcagtcttccaaaagaaaggacgagtctaggattagcaaggccgaggaggaattccagaaagcacagaaggtgtttgaagaattcaacgtcgacctgcaggaagaattgccctcgctctggtcaagaagagttggtttctatgtcaatacgtttaaaaatgtgtcctcacttgaggccaaattccataaagagattgctgtgctttgccataagctctatgaagtgatgacaaagttgggagaccaacacgccgataaagcctttaccattcagggggccccatccgactccggcccgctccgcattgccaaaaccccttccccacctgaagagccttcaccactccccagcccaactgcctcacctaaccatacgctcgcgcctgcatctccggctcctgctcgccctcgctcgccctcacagacaaggaaagggccccctgtgccaccacttcctaaggttacccctacgaaggaactgcaacaggagaacatcatcagtttttttgaggataatttcgtgcccgagatcagcgtgaccaccccaagccaaaatgaggtacctgaggtgaagaaagaggagaccctgctggacctggatttcgacccattcaagcctgaagttacaccagctgggtcagcgggagtcactcatagccctatgtcccaaacacttccttgggatttgtggacaaccagtactgatttggtacaacctgctagtgggggttcattcaacggttttacccagccgcaggatacttccctgttcacaatgcagaccgaccagtcaatgatctgtaatttggccgaatcggagcaggccccccctacggagccaaaagccgaagagccgttagccgctgtgacaccagcagtgggattggacctcggaatggatacaagggcagaggagccagtcgaggaagctgtaatcatacctggagcagatgctgacgctgctgtaggaacattggtgagcgcagcagagggggcccccggggaagaagccgaagcggagaaagcaactgtgccagccggggaaggcgtctctttggaggaggccaagattggcaccgagaccaccgaaggagctgagtctgcccaacccgaggctgaggagctggaggctaccgtgcctcaggagaaggtgatcccttcagtggtgatcgaaccagcatccaaccatgaagaagaaggcgagaatgaaatcaccattggcgctgagccaaaggagaccacggaggacgccgcccccccaggacctactagcgagacgcctgaactggccactgaacagaagcccatccaagaccctcaaccaacgcccagtgcgcctgctatgggtgctgctgatcaactagcctcagcccgcgaggccagtcaggaactgccaccagggttcctgtacaaagtggagactcttcatgacttcgaggcggcaaatagcgatgaactcacactccaacggggcgacgtagttctggtcgtcccctcagactctgaagccgaccaggatgcaggatggctagtgggcgtcaaagaatcagattggttgcagtacagggaccttgccacgtacaaggggttgtttcccgaaaactttaccagacgccttgactag

SEQ ID NO: 119335 - DNA, 3418 bp, Artificial Sequence
  derived and/or modified sequence
cagtcccgacgcatcccgcccccgctctgtcgctttaagctggtcccgccgccgcgccccgccctcacccctccgcgctccgcggctccccgccgcttctcccgctcctcccttgctcggccctctcctcctcctcccgctcctcctcccgctcctccgcgccgccgccagccccgctgcgcgctctgctcttcgcagctccccggacccgcagccatggccgacatcaagacgggcatcttcgccaagaacgtccagaagcgactcaaccgcgcgcaggaaaaggtcctccaaaagctggggaaagctgatgagacaaaagacgaacagttcgaagaatatgtccagaacttcaaacggcaagaagcagagggtaccagacttcagcgagaactccgaggatatttagcagcaatcaaaggcatgcaggaggcctccatgaagctcacagagtcgctgcatgaagtctatgagcctgactggtatgggcgggaagatgtgaaaatggttggtgagaaatgtgatgtgctgtgggaagacttccatcaaaaactcgtggatgggtccttgctaacactggatacctacctggggcaatttcctgacataaagaatcgcatcgccaagcgcagcaggaagctagtggactatgacagtgcccgccaccatctggaagctctgcagagctccaagaggaaggatgagagtcgaatctctaaggcagaagaagaatttcagaaagcacagaaagtgtttgaagagtttaacgttgacttacaagaagagttaccatcattatggtcaagacgagttggattttatgttaatactttcaaaaacgtctccagccttgaagccaagtttcataaggaaattgcggtgctttgccacaaactgtatgaagtgatgacaaaactgggtgaccagcacgccgacaaggccttcaccatccaaggagcgcccagtgattcgggtcctctccgcattgcaaagacaccatcaccgcctgaggagccttcacccctcccgagcccgacagcaagtccaaatcatacattagcacctgcgtctcccgcaccagcacggcctcggtcaccttcacagacaaggaaagggcctcctgtcccacctctacctaaagtcaccccgacaaaggaactgcagcaggagaacatcatcagtttctttgaggacaactttgttccagaaatcagtgtgacaacaccttcccagaatgaagtccctgaggtgaagaaagaggagactttgctggatctggactttgatcctttcaagcccgaggtgacacctgcaggttctgctggagtgacccactcacccatgtctcagacattgccctgggacctatggacgacaagcactgatttggtacagccggcttctggtggttcatttaatggattcacacagccccaggatacttcattattcacaatgcagacagaccagagtatgatctgcaacttggctgaatctgaacaggctccacccacagagccaaaagcagaggagcctctggctgctgtcacacctgccgttggtctggaccttggaatggacactcgggctgaggagccagtggaggaggcagtgatcatacctggagctgatgctgatgcagctgttggaaccttggtgtcagcagctgagggggccccaggagaggaagcagaggcggagaaggccactgtccctgccggggaaggagtaagtttagaggaggccaaaattggaactgaaaccactgagggtgcagagagtgcccaacctgaagcagaggagctcgaagcaacagtgcctcaggagaaggtcattccttcggtggtcatagagcctgcctccaaccatgaagaggaaggagaaaacgaaataactataggtgcagagcccaaggagaccaccgaggacgcggctcctccgggccccaccagcgagacaccggagctggctacggagcagaagcctatccaggaccctcagcccacgccttctgcaccagccatgggggctgctgaccagctagcatctgcaagggaggcctctcaggaattgcctcctggctttctctacaaggtggaaacactgcatgattttgaggcagcaaattctgatgaacttaccttacaaaggggtgatgtggtgctggtggtcccctcagattcagaagctgatcaggatgcaggctggctggtgggagtgaaggaatcagactggcttcagtacagagaccttgccacctacaaaggcctctttccagagaacttcacccgacgcttagattagggcaacaagtactgcaagaaggagctcagttacggggtttttaaaccttcatgaaaacctgaagagttcacttttgttattatgctcttaatgatttacagactgatgccagacaaaccttgggaagatgtatcaatggagcatgtgtgcaaaaaaatgtaagaggaaaaaaagtaaattaaggaaaaaatcctcactcattcccatgttgtcaataacaggtttgtttgtgctttgtccaagctgtggagactcttgtacttgatcccctcccaccaattctaaagtagctttctccagatcagactttaatttctctgcatcaggtgtatcgtattgagtggctgccctgcagaagatgtgatgaattatcctgtagtacaagattatcttattcccctgcccaggtgtgagcacgtgctctcgctccctttcaggtttactatgtttaaaactaaactgctgcaaaagttctcaatgttcttttccaacacatctatatatatatggacacacagtcacgcaagctagttcccatgactcctggatctatgtgtatgcagaaggctacatatacatagttgcttctttcctttccattgtagctctttgcctctcaattgtcattgatacatgcattgctcttattctgtctggcattacaattgcagttttgcctaatggcaaaaccagccatcccattggcaaaagagtcaacagtatctgtgtttgtactgtgcagttttcaggatgagatgacagatagcacgactacactgaggcaccctcagagaaggcagggcctgatttatctagctgtccagccgctgtggctggaggtaggctagttgggatgggcagctaagcagtcttctcttctgcctttatgagattgggtagaaagatggggcatattcatctacccccaaaagaacactataaaaacagctcctctatatttccacctctttctatttatgcaactcatcttcacagattgttctaaagtaaaatagatggtgtatgctgtatccacaaatcatctgtaacaattatgttttcagtgctgtgtcattccaaataaacctttggtaatcttcaacgattaccctaa

SEQ ID NO: 119336 - DNA, 2088 bp, Artificial Sequence
  derived and/or modified sequence
atggctgacattaaaacaggtatctttgcaaaaaatgtacagaagcggctgaatagagcacaggaaaaggttcttcagaagctaggaaaggccgacgaaactaaggacgagcaattcgaggagtatgtgcaaaacttcaagcggcaggaggccgagggaacccgactgcagagggagctgcgaggttacctggccgctattaaggggatgcaggaggctagtatgaagctgaccgaaagcctccacgaggtgtatgaacctgactggtacggacgggaagacgtcaaaatggtgggtgaaaaatgcgacgttttgtgggaggactttcatcagaaactggtagatggaagtttgctcacactagatacttacctgggccagttccccgacatcaaaaatcgcatcgcaaagaggtcgcgcaaactggttgactatgattcagccaggcaccacttggaggcccttcagagcagcaagcgcaaagatgagtcccgcatcagtaaagctgaagaggagtttcagaaggctcaaaaagtgtttgaagaattcaatgttgacctccaagaggaattgccgtctttatggagccgacgggttgggttttacgtcaacacttttaaaaacgtgagctctttggaagctaagtttcataaggagattgctgtgttgtgccataagctgtacgaagtgatgaccaagttgggagaccagcatgcggacaaggcctttaccatccaaggtgcaccaagcgactctggcccacttcgcatcgccaaaacgccttctccacccgaggagccaagtcccctgcctagccctactgcgtcccccaatcatactttggctcctgctagcccggctcctgcaaggccgagatccccgtcacaaacacgaaagggccctcctgttcctcctctccccaaagtgacacccacaaaggaactccaacaggaaaacatcatctccttctttgaagacaattttgtgccagagatttccgtgaccaccccatcccagaacgaggtgcccgaggtaaagaaggaggaaaccctgcttgacttggactttgatccctttaagcctgaagtaacccctgctggcagcgccggagttacgcattcaccaatgtctcagacacttccctgggatttgtggaccacatctacagaccttgtgcagccagccagcggcggatccttcaatggatttacacagcctcaggacacaagcctctttaccatgcagaccgatcagtcaatgatttgcaaccttgccgaaagtgaacaagcccctcctactgaaccaaaagctgaggaacctctggccgctgtgactcccgctgtggggctcgatctaggcatggacacacgtgccgaggagccagtcgaggaggccgtcatcattcccggagccgatgccgacgcggctgtgggaacactggtaagtgctgctgagggggcaccaggggaggaagcggaagcggagaaagctacagtgcccgctggagaaggtgtgtccttagaggaggccaagatcggcacagagacaacggagggtgctgaaagcgctcaacccgaggcagaggaattggaagctaccgtccctcaggagaaggtaattccgtcagtggttatagaacccgcaagtaaccacgaagaagagggtgagaatgagatcacaattggagctgagccaaaggagaccacagaggacgcagccccaccgggacctaccagcgagactccagaactcgctaccgagcaaaaacctattcaggatcctcaaccaaccccaagcgcccctgccatgggagctgctgaccagttggcctcggcaagagaagcttctcaagaacttcctcccggatttctgtacaaggtggagactctgcacgactttgaggccgctaattccgacgagctcactctccagaggggagatgtcgtgctggttgtaccgagtgactcagaggcagaccaggatgcagggtggcttgtgggcgtgaaagagagtgattggctacagtacagagatctcgcaacctataagggcctctttcccgagaatttcacccgcaggttggattag

SEQ ID NO: 119337 - DNA, 2088 bp, Artificial Sequence
  derived and/or modified sequence
atggccgacatcaagaccggcatcttcgccaagaacgtgcagaagagactgaacagagcccaggagaaggtgctgcagaagctgggcaaggccgacgagaccaaggacgagcagttcgaggagtacgtgcagaacttcaagagacaggaggccgagggcaccagactgcagagagagctgagaggctacctggccgccatcaagggcatgcaggaggccagcatgaagctgaccgagagcctgcacgaggtgtacgagcccgactggtacggcagagaggacgtgaagatggtgggcgagaagtgcgacgtgctgtgggaggacttccaccagaagctggtggacggcagcctgctgaccctggacacctacctgggccagttccccgacatcaagaacagaatcgccaagagaagcagaaagctggtggactacgacagcgccagacaccacctggaggccctgcagagcagcaagagaaaggacgagagcagaatcagcaaggccgaggaggagttccagaaggcccagaaggtgttcgaggagttcaacgtggacctgcaggaggagctgcccagcctgtggagcagaagagtgggcttctacgtgaacaccttcaagaacgtgagcagcctggaggccaagttccacaaggagatcgccgtgctgtgccacaagctgtacgaggtgatgaccaagctgggcgaccagcacgccgacaaggccttcaccatccagggcgcccccagcgacagcggccccctgagaatcgccaagacccccagcccccccgaggagcccagccccctgcccagccccaccgccagccccaaccacaccctggcccccgccagccccgcccccgccagacccagaagccccagccagaccagaaagggcccccccgtgccccccctgcccaaggtgacccccaccaaggagctgcagcaggagaacatcatcagcttcttcgaggacaacttcgtgcccgagatcagcgtgaccacccccagccagaacgaggtgcccgaggtgaagaaggaggagaccctgctggacctggacttcgaccccttcaagcccgaggtgacccccgccggcagcgccggcgtgacccacagccccatgagccagaccctgccctgggacctgtggaccaccagcaccgacctggtgcagcccgccagcggcggcagcttcaacggcttcacccagccccaggacaccagcctgttcaccatgcagaccgaccagagcatgatctgcaacctggccgagagcgagcaggccccccccaccgagcccaaggccgaggagcccctggccgccgtgacccccgccgtgggcctggacctgggcatggacaccagagccgaggagcccgtggaggaggccgtgatcatccccggcgccgacgccgacgccgccgtgggcaccctggtgagcgccgccgagggcgcccccggcgaggaggccgaggccgagaaggccaccgtgcccgccggcgagggcgtgagcctggaggaggccaagatcggcaccgagaccaccgagggcgccgagagcgcccagcccgaggccgaggagctggaggccaccgtgccccaggagaaggtgatccccagcgtggtgatcgagcccgccagcaaccacgaggaggagggcgagaacgagatcaccatcggcgccgagcccaaggagaccaccgaggacgccgccccccccggccccaccagcgagacccccgagctggccaccgagcagaagcccatccaggacccccagcccacccccagcgcccccgccatgggcgccgccgaccagctggccagcgccagagaggccagccaggagctgccccccggcttcctgtacaaggtggagaccctgcacgacttcgaggccgccaacagcgacgagctgaccctgcagagaggcgacgtggtgctggtggtgcccagcgacagcgaggccgaccaggacgccggctggctggtgggcgtgaaggagagcgactggctgcagtacagagacctggccacctacaagggcctgttccccgagaacttcaccagaagactggactag

SEQ ID NO: 119338 - protein, 298 aa, Artificial Sequence
  derived and/or modified sequence
MTEQAISFAKDFLAGGIAAAISKTAVAPIERVKLLLQVQHASKQIAADKQYKGIVDCIVRIPKEQGVLSFWRGNLANVIRYFPTQALNFAFKDKYKQIFLGGVDKHTQFWRYFAGNLASGGAAGATSLCFVYPLDFARTRLAADVGKSGTEREFRGLGDCLVKITKSDGIRGLYQGFSVSVQGIIIYRAAYFGVYDTAKGMLPDPKNTHIVVSWMIAQTVTAVAGVVSYPFDTVRRRMMMQSGRKGADIMYTGTVDCWRKIFRDEGGKAFFKGAWSNVLRGMGGAFVLVLYDELKKVI

SEQ ID NO: 119339 - protein, 158 aa, Artificial Sequence
  derived and/or modified sequence
MTEQAISFAKDFLAGGIAAAISKTAVAPIERVKLLLQVQHASKQIAADKQYKGIVDCIVRIPKEQGVLSFWRGNLANVIRYFPTQALNFAFKDKYKQIFLGGVDKHTQFWRYFAGNLASGGAAGATSLCFVYPLDFARTRLAADVGKSGTEREFRGLG

SEQ ID NO: 119340 - DNA, 897 bp, Artificial Sequence
  derived and/or modified sequence
atgacagagcaagcaatctcatttgccaaggattttcttgccgggggcattgctgccgccatctcaaagaccgccgtcgcaccaattgagagagttaagttattactgcaggtgcagcacgcttcaaagcaaatcgctgctgataagcagtacaagggcatcgtggactgcatcgtgaggatacctaaagagcaaggggttttgtccttctggagaggcaatctggctaatgtcattaggtacttcccaacccaggccctaaatttcgcctttaaagacaaatacaagcagatctttctgggaggagttgataagcacacacagttttggcgatattttgccggtaacctggcatccggcggcgccgctggagccacctctttgtgttttgtgtatccacttgatttcgcacggacaaggttggcagccgatgtgggcaagtccggcaccgaacgtgaattccgagggcttggtgattgcttggttaaaatcaccaaatccgatgggattaggggcctttaccagggcttctctgtgtccgtgcaaggtattatcatctatcgcgctgcctacttcggcgtttacgacacagctaagggaatgctgcccgaccccaagaatacacacattgtggttagttggatgattgcgcagactgtgactgcagtcgctggtgttgtatcttaccccttcgatactgtgcgccgaagaatgatgatgcaatccggccgtaaaggcgctgatattatgtataccggcacggtggattgctggagaaaaatttttcgcgacgagggcggtaaggcattttttaaaggggcctggtccaatgtgctccgagggatgggcggcgcattcgttctcgttttatacgatgaactgaagaaggtgatttag

SEQ ID NO: 119341 - DNA, 477 bp, Artificial Sequence
  derived and/or modified sequence
atgactgagcaggccatatcttttgctaaagacttcctggccgggggcatcgccgcagccatcagtaaaaccgcagtcgctccaatcgaacgagtcaagttactccttcaggtacaacatgcttccaaacagattgcagccgacaagcagtacaaaggaatcgtggactgtattgttagaatccctaaagaacagggtgtcttgtccttttggcgcggcaatctggcaaacgtcatcaggtattttccaacacaagctcttaactttgccttcaaggacaagtacaagcagattttcctgggaggcgtggacaaacatacacagttctggcgctatttcgctggaaacctggcctcagggggtgccgctggcgcgacgtcgttgtgcttcgtgtatcctcttgacttcgccaggacccgtctggctgccgacgttgggaaaagcggcaccgaacgtgaatttcggggcttggggtag

SEQ ID NO: 119342 - DNA, 897 bp, Artificial Sequence
  derived and/or modified sequence
atgacagagcaggccatcagctttgccaaggacttcctggccggcggcattgctgctgccatcagcaagacagctgtggcccccatcgagcgggtgaagctgctgctgcaggtgcagcacgccagcaagcagattgctgctgacaagcagtacaagggcatcgtggactgcatcgtgcgcatccccaaggagcagggcgtgctgtccttctggaggggcaacctggccaacgtcatccgctacttccccacccaggccctgaactttgccttcaaggacaagtacaagcagatcttcctgggcggcgtggacaagcacacccagttctggagatactttgctggcaacctggccagcggcggcgctgctggggccaccagcctgtgctttgtgtaccccctggactttgcccggacccggctggccgcagatgtgggcaagagcggcacagagcgggagttccggggcctgggggactgcctggtgaagatcaccaagagtgatggcatccggggcctgtaccagggcttctctgtgtctgtgcagggcatcatcatctacagagctgcctactttggagtgtatgacacagccaagggcatgctgcctgaccccaagaacacccacatcgtggtgtcctggatgattgcccagacagtgacagctgtggccggcgtggtgtcctacccctttgacacagtgagaagaaggatgatgatgcagagcggcaggaaaggagctgacatcatgtacacaggcaccgtggactgctggaggaagatcttcagagatgagggcggcaaggccttcttcaagggggcctggagcaatgtgctgcggggcatgggcggggcctttgtgctggtgctgtatgatgagctgaagaaggtgatctag

SEQ ID NO: 119343 - DNA, 477 bp, Artificial Sequence
  derived and/or modified sequence
atgacagagcaggccatcagctttgccaaggacttcctggccggcggcattgctgctgccatcagcaagacagctgtggcccccatcgagcgggtgaagctgctgctgcaggtgcagcacgccagcaagcagattgctgctgacaagcagtacaagggcatcgtggactgcatcgtgcgcatccccaaggagcagggcgtgctgtccttctggaggggcaacctggccaacgtcatccgctacttccccacccaggccctgaactttgccttcaaggacaagtacaagcagatcttcctgggcggcgtggacaagcacacccagttctggagatactttgctggcaacctggccagcggcggcgctgctggggccaccagcctgtgctttgtgtaccccctggactttgcccggacccggctggccgcagatgtgggcaagagcggcacagagcgggagttccggggcctgggctag

SEQ ID NO: 119344 - DNA, 897 bp, Artificial Sequence
  derived and/or modified sequence
atgaccgagcaggccatcagcttcgccaaggacttcctggccggcggcatagcggcggccatttctaagacagcagtggccccaattgagagggtgaaactgttattgcaagtccaacacgcctcaaaacagatcgcggccgacaaacagtacaaaggaattgttgactgtatagtgcggattcccaaagaacagggggtgctgagcttctggcggggcaatttggctaacgtaatccggtatttcccaacacaggcactgaattttgctttcaaggataaatataagcaaatttttttagggggggtggataagcatacccagttctggcggtatttcgccgggaatttagctagtggaggcgccgctggcgccaccagcctctgcttcgtttatcctctggacttcgcaaggacccgattggctgccgacgtcgggaagagtggcaccgaacgggagttccgtggtttaggtgattgcctggtgaaaatcaccaagtcagatgggattcgtggactctaccagggctttagtgtttccgttcagggaatcataatatatagggctgcatattttggcgtgtacgacactgctaagggtatgctgccagatccaaagaacacgcacatcgtcgtcagttggatgatcgcacagactgtgacggcggtggcaggcgtcgtgtcataccccttcgacaccgtgaggcgacgcatgatgatgcaatccggccgcaaaggcgcggatatcatgtacaccggcaccgtggattgctggcggaagatttttagagatgagggcggtaaggcattttttaaaggcgcctggagtaacgtgctgagagggatgggtggtgccttcgtcctggtactctatgacgaactaaaaaaggtgatttag

SEQ ID NO: 119345 - DNA, 477 bp, Artificial Sequence
  derived and/or modified sequence
atgaccgagcaggccatcagcttcgccaaggacttcctggccggcggaattgctgctgccatctccaagactgccgtggcacctattgagcgggtaaaacttctgctgcaggtgcagcatgcctctaagcagattgccgctgacaaacagtataaggggatagtcgactgtatagtgaggattccaaaggaacagggggtgctgtccttttggaggggcaacttagccaatgtcatcagatatttccctacccaggctcttaatttcgcatttaaggacaagtataagcagatatttctaggcggagtagacaagcatacccagttctggcgctatttcgctggaaatctggctagcggaggagccgcaggtgcgactagcctatgctttgtgtacccactggattttgccaggactcggctggccgctgatgtggggaagtctggaaccgagagggaattcagggggctaggttag

SEQ ID NO: 119346 - DNA, 897 bp, Artificial Sequence
  derived and/or modified sequence
atgaccgaacaggctatcagctttgccaaagactttctcgcgggaggaatagccgcagctatcagcaagaccgccgtggcacctatcgagcgcgttaagctcctcttacaggttcagcacgcatccaagcaaattgccgctgataagcaatacaaaggcatcgtggactgcatcgttcgaatccctaaggaacaaggcgtactgtctttttggcgcggtaacctggctaacgtcatcagatattttcctacccaggcccttaacttcgcattcaaagacaagtacaaacagatctttctggggggtgtagataagcatactcagttttggaggtactttgctgggaacttggcctctggaggggctgccggagcaacttccctgtgtttcgtttatcctctggatttcgctcggacccgtttggctgccgacgttggtaaaagtggaactgagcgcgagttcaggggactaggggactgtctggttaaaataacaaagtctgatggaatccgcggtctgtaccagggtttttccgtaagcgttcaaggaataatcatctacagagcagcatattttggggtgtatgataccgccaaggggatgttgcccgatccaaagaatactcatattgttgtcagttggatgatcgcacagacggttaccgctgtggcaggcgtagtctcgtacccctttgacaccgtgagaagacgaatgatgatgcagtcaggacggaagggcgctgacatcatgtacaccgggaccgtggattgctggagaaaaatctttcgagacgaaggtgggaaggcgtttttcaaaggcgcatggagtaatgtcctgagggggatgggaggtgctttcgttctggtactgtatgatgagctgaaaaaggtgatttag

SEQ ID NO: 119347 - DNA, 477 bp, Artificial Sequence
  derived and/or modified sequence
atgaccgagcaggctatcagcttcgccaaagactttctggcgggagggatcgccgcagctatatcgaaaacagcagtcgcacctatcgagcgggttaaactgctcctgcaagtgcaacacgcaagcaagcagatcgctgccgacaaacagtacaaaggcatcgttgactgtattgtccggattccaaaagaacagggcgtgttaagcttctggcgcggtaacctggctaacgttatacgctactttcctacacaagctctgaacttcgctttcaaagacaagtacaagcagatttttctgggtggtgttgacaaacatacgcaattctggcgttatttcgctggcaatctggcgtctggtggggctgctggcgcaacaagcttgtgcttcgtctaccccctggattttgcgcgaactagactcgcggctgacgtggggaagagtggtactgagcgcgaattccgaggattgggatag

SEQ ID NO: 119348 - DNA, 2062 bp, Artificial Sequence
  derived and/or modified sequence
gcagcgggactgagccgcgcccacgtggaagccgccgcaggcttcgcgcggggccccccgggtgcacgcgggcaggggccggggtctcccgacgcacgaccccggagagtgttgaaagggtcggagctgcccggaggtcaagggtcaagggtcgggggtcggggcaccacatgtcgcacatcccggcggggtcgccgcggcctccgggagaaagcggacgacgcactcggagcgaactgggcatcagggtgggcttctgactccgcagctgccctcccgcccgctcgggtactggcagcggcctgaccttcacaaggtcaaggctgccgcggaacccccagcggcccctacggcgcatgggcggggcctggctcccggcatacctaggggtgcggggcgggacgtctccggggagcgcagccaatgggcgcggttcgctggagtgcggggcgggacgcagcgggattcccggcagccctcagaggcgaggcacgcaggctggtgtggggcggggcctggcggcgcagccaatgagcgcggcgcgaggaggcgcgggggcggagagtgggcgtggcgtcggcgtcttagcggctgcgcggtggctgctccgtcctttcggtccaggcggcggcagggctgagccagcgacgccctccattcactctccgcgcccgttctccggctgtcctcccgttccgctgcccgccctgccaccatgacggaacaggccatctccttcgccaaagacttcttggccggaggcatcgccgccgccatctccaagacggccgtggctccgatcgagcgggtcaagctgctgctgcaggtccagcacgccagcaagcagatcgccgccgacaagcagtacaagggcatcgtggactgcattgtccgcatccccaaggagcagggcgtgctgtccttctggaggggcaaccttgccaacgtcattcgctacttccccactcaagccctcaacttcgccttcaaggataagtacaagcagatcttcctggggggcgtggacaagcacacgcagttctggaggtactttgcgggcaacctggcctccggcggtgcggccggcgcgacctccctctgcttcgtgtacccgctggatttcgccagaacccgcctggcagcggacgtgggaaagtcaggcacagagcgcgagttccgaggcctgggagactgcctggtgaagatcaccaagtccgacggcatccggggcctgtaccagggcttcagtgtctccgtgcagggcatcatcatctaccgggcggcctacttcggcgtgtacgatacggccaagggcatgctccccgaccccaagaacacgcacatcgtggtgagctggatgatcgcgcagaccgtgacggccgtggccggcgtggtgtcctaccccttcgacacggtgcggcggcgcatgatgatgcagtccgggcgcaaaggagctgacatcatgtacacgggcaccgtcgactgttggaggaagatcttcagagatgaggggggcaaggccttcttcaagggtgcgtggtccaacgtcctgcggggcatggggggcgccttcgtgctggtcctgtacgacgagctcaagaaggtgatctaagggccgcggcctcctccacacacacacacacaccaggggaaccaagagaaccacgtagaatcctcaaccgtgcggaccatcaaccttcgagaaattccagttgtctttttcccagccgcatcctgcctgtagatggccggggaaggctctagaaaaggggcgcattgcgatccaaccatcggcagccgattccgtgtcttgatcacggggtgggagggaaccgtggcgtccctgcgtggggcccatgggtgagacactccagtactgagacctagagtccagatgcttgtaggagccaagtcgtgttctaagtatttatttaaaacaaaagaatcacgttttcccatttgtacttcagcgctagcccctgttttgcacagccgagtactggcgagtatgttctatgttgggcctcctgctgcaaaacaataaacagaggacgcagaggtc

SEQ ID NO: 119349 - DNA, 712 bp, Artificial Sequence
  derived and/or modified sequence
cacggatcggcagcgggactgagccgcgcccacgtggaagccgccgcaggcttcgcgcggggccccccgggtgcacgcgggcaggggccggggtctcccgacgcacgaccccggagagtgttgaaagggtcggagctgcccggaggcggcggcagggctgagccagcgacgccctccattcactctccgcgcccgttctccggctgtcctcccgttccgctgcccgccctgccaccatgacggaacaggccatctccttcgccaaagacttcttggccggaggcatcgccgccgccatctccaagacggccgtggctccgatcgagcgggtcaagctgctgctgcaggtccagcacgccagcaagcagatcgccgccgacaagcagtacaagggcatcgtggactgcattgtccgcatccccaaggagcagggcgtgctgtccttctggaggggcaaccttgccaacgtcattcgctacttccccactcaagccctcaacttcgccttcaaggataagtacaagcagatcttcctggggggcgtggacaagcacacgcagttctggaggtactttgcgggcaacctggcctccggcggtgcggccggcgcgacctccctctgcttcgtgtacccgctggatttcgccagaacccgcctggcagcggacgtgggaaagtcaggcacagagcgcgagttccgaggcctgggaga

SEQ ID NO: 119350 - DNA, 897 bp, Artificial Sequence
  derived and/or modified sequence
atgaccgagcaggccatcagcttcgccaaggacttcctggccggcggcatcgccgccgccatcagcaagaccgccgtggcccccatcgagagagtgaagctgctgctgcaggtgcagcacgccagcaagcagatcgccgccgacaagcagtacaagggcatcgtggactgcatcgtgagaatccccaaggagcagggcgtgctgagcttctggagaggcaacctggccaacgtgatcagatacttccccacccaggccctgaacttcgccttcaaggacaagtacaagcagatcttcctgggcggcgtggacaagcacacccagttctggagatacttcgccggcaacctggccagcggcggcgccgccggcgccaccagcctgtgcttcgtgtaccccctggacttcgccagaaccagactggccgccgacgtgggcaagagcggcaccgagagagagttcagaggcctgggcgactgcctggtgaagatcaccaagagcgacggcatcagaggcctgtaccagggcttcagcgtgagcgtgcagggcatcatcatctacagagccgcctacttcggcgtgtacgacaccgccaagggcatgctgcccgaccccaagaacacccacatcgtggtgagctggatgatcgcccagaccgtgaccgccgtggccggcgtggtgagctaccccttcgacaccgtgagaagaagaatgatgatgcagagcggcagaaagggcgccgacatcatgtacaccggcaccgtggactgctggagaaagatcttcagagacgagggcggcaaggccttcttcaagggcgcctggagcaacgtgctgagaggcatgggcggcgccttcgtgctggtgctgtacgacgagctgaagaaggtgatctag

SEQ ID NO: 119351 - DNA, 477 bp, Artificial Sequence
  derived and/or modified sequence
atgaccgagcaggccatcagcttcgccaaggacttcctggccggcggcatcgccgccgccatcagcaagaccgccgtggcccccatcgagagagtgaagctgctgctgcaggtgcagcacgccagcaagcagatcgccgccgacaagcagtacaagggcatcgtggactgcatcgtgagaatccccaaggagcagggcgtgctgagcttctggagaggcaacctggccaacgtgatcagatacttccccacccaggccctgaacttcgccttcaaggacaagtacaagcagatcttcctgggcggcgtggacaagcacacccagttctggagatacttcgccggcaacctggccagcggcggcgccgccggcgccaccagcctgtgcttcgtgtaccccctggacttcgccagaaccagactggccgccgacgtgggcaagagcggcaccgagagagagttcagaggcctgggctag

SEQ ID NO: 119352 - protein, 575 aa, Artificial Sequence
  derived and/or modified sequence
MQSPWKILTVAPLFLLLSLQSSASPANDDQSRPSLSNGHTCVGCVLVVSVIEQLAQVHNSTVQASMERLCSYLPEKLFLKTTCYLVIDKFGSDIIKLLSADMNADVVCHTLEFCKQNTGQPLCHLYPLPKETWKFTLQKARQIVKKSPILKYSRSGSDICSLPVLAKICQKIKLAMEQSVPFKDVDSDKYSVFPTLRGYHWRGRDCNDSDESVYPGRRPNNWDVHQDSNCNGIWGVDPKDGVPYEKKFCEGSQPRGIILLGDSAGAHFHISPEWITASQMSLNSFINLPTALTNELDWPQLSGATGFLDSTVGIKEKSIYLRLWKRNHCNHRDYQNISRNGASSRNLKKFIESLSRNKVLDYPAIVIYAMIGNDVCSGKSDPVPAMTTPEKLYSNVMQTLKHLNSHLPNGSHVILYGLPDGTFLWDNLHNRYHPLGQLNKDMTYAQLYSFLNCLQVSPCHGWMSSNKTLRTLTSERAEQLSNTLKKIAASEKFTNFNLFYMDFAFHEIIQEWQKRGGQPWQLIEPVDGFHPNEVALLLLADHFWKKVQLQWPQILGKENPFNPQIKQVFGDQGGH

SEQ ID NO: 119353 - protein, 297 aa, Artificial Sequence [sequence omitted]

SEQ ID NO: 119354 - DNA, 1728 bp, Artificial Sequence
  derived and/or modified sequence
atgcagtccccgtggaagattttgactgtcgctcccttattccttctgttgagtcttcaatcctccgcatccccagctaatgacgatcagagcaggccctcactttctaacgggcacacctgcgtgggatgtgtgctggtggtatcggttatcgagcagctggcccaggtacataacagcacggtgcaggccagcatggagcgattatgctcctatttacctgagaagctctttctaaaaactacatgttacctggtgattgacaaattcgggtctgacattataaaacttctgagcgctgacatgaacgccgatgttgtctgccatacccttgaattttgcaagcagaacaccggtcaacccctctgtcatctgtaccccctgccgaaggagacctggaaattcaccctccaaaaagcccgacaaatcgtgaagaaaagcccaatactgaaatactctagatctggcagcgatatctgctccctgccagtgctggccaagatatgtcagaagatcaaactggccatggagcagagcgtgccttttaaagatgtcgacagcgataaatatagcgtgttccccaccctgcggggatatcactggcgcggcagggattgcaacgatagtgacgagtctgtttaccccgggaggaggccgaataactgggatgtgcaccaggacagtaattgcaacgggatctggggtgtggatccaaaggatggagtcccttacgaaaaaaagttctgcgaaggtagccagcctcggggcattatcctacttggggactctgcgggcgctcacttccacatcagccctgagtggattacggcgagccagatgagtctgaattcatttataaatctacctacagctctgacgaacgaactcgattggcctcagctaagcggagcaaccggttttctcgattccacagtgggcattaaggaaaaatccatctatctgcgcctctggaagcggaatcattgtaaccatagagactaccagaacatttcaaggaatggcgcatcgagtcgaaatctaaagaaatttattgagtcactcagcaggaataaggtgttagactacccagcaatagtgatctatgccatgataggaaacgacgtgtgtagtggcaaatcagacccagtgcccgcaatgactacacccgagaaactgtactcgaatgtgatgcaaactctgaaacatctgaattcacatctccccaatggaagccacgtcattctttatggactccctgatgggacattcttgtgggataacttacataacaggtatcaccccttgggccagttgaataaggacatgacatacgctcagctgtattcttttttgaattgcctccaggtatctccttgccatgggtggatgagctccaataagaccttacggaccttaacctccgaaagggcagagcagctgtctaatacacttaaaaagattgcagcttctgaaaagttcactaattttaatctattctatatggacttcgcctttcatgaaatcatacaagagtggcaaaagaggggtgggcaaccatggcagctgatcgaacccgtcgatggcttccatcccaacgaggttgctctactgttactcgccgaccatttctggaagaaagtgcagctgcagtggccacagatactcggcaaggagaatccgtttaaccctcagataaaacaagtgtttggggatcagggggggcattag

SEQ ID NO: 119355 - DNA, 1728 bp, Artificial Sequence
  derived and/or modified sequence
atgcagagcccctggaagatcctgactgtggcccccctcttcctgctgctgagcctgcagagcagcgccagccctgccaatgatgaccagagccggcccagcctgagcaatggccacacctgtgtgggctgtgtgctggtggtgtctgtgattgagcagctggcccaggtgcacaacagcacagtgcaggcctccatggagcggctgtgcagctacctgcctgagaagctgttcctgaagaccacctgctacctggtgattgacaagtttggaagtgacatcatcaagctgctgtctgctgacatgaatgctgatgtggtgtgccacaccctggagttctgcaagcagaacacaggccagcccctgtgccacctgtaccccctgcccaaggagacctggaagttcaccctgcagaaggcccggcagatcgtgaagaagagccccatcctgaagtacagccgcagcggcagtgacatctgcagcctgcctgtgctggccaagatctgccagaagatcaagctggccatggagcagagcgtgcccttcaaggatgtggacagcgacaagtacagcgtcttccccaccctgcggggctaccactggaggggccgggactgcaatgacagtgatgagagcgtgtacccaggaagaagacccaacaactgggatgtgcaccaggacagcaactgcaatggcatctggggcgtggaccccaaggatggagtgccctatgagaagaagttctgtgagggcagccagccccggggcatcatcctgctgggggacagcgctggggcccacttccacatcagccctgagtggatcacagccagccagatgagcctgaacagcttcatcaacctgcccacagccctgaccaatgagctggactggccccagctgagcggggccaccggcttcctggacagcacagtgggcatcaaggagaagagcatctacctgcggctgtggaagaggaaccactgcaaccaccgggactaccagaacatcagcagaaatggagccagcagcaggaacctgaagaagttcatcgagagcctgagcaggaacaaggtgctggactacccagccatcgtcatctatgccatgattggaaatgatgtgtgcagcggcaagagtgaccctgtgcctgccatgaccaccccagagaagctgtacagcaatgtgatgcagaccctgaagcacctgaacagccacctgcccaacggcagccacgtgatcctgtatggcctgcctgatggcaccttcctgtgggacaacctgcacaaccgctaccaccccctgggccagctgaacaaggacatgacctacgcccagctgtacagcttcctgaactgcctgcaggtgagcccctgccacggctggatgagcagcaacaagaccctgcggaccctgaccagcgagagagctgagcagctgagcaacaccctgaagaagattgctgccagcgagaagttcaccaacttcaacctcttctacatggactttgccttccacgagatcatccaggagtggcagaagaggggcggccagccctggcagctgattgagcctgtggatggcttccaccccaatgaggtggccctgctgctgctggccgaccacttctggaagaaggtgcagctgcagtggccccagatcctgggcaaggagaaccccttcaacccccagatcaagcaggtgtttggagaccagggcggccactag

SEQ ID NO: 119356 - DNA, 1728 bp, Artificial Sequence
  derived and/or modified sequence
atgcagagcccctggaagatcctgaccgtggcccccctgttcctgctgcttagcctgcagagctcagcgtccccagccaatgacgatcagagccgcccatccctgtccaatggccacacctgtgtgggttgtgtgctcgtggtgtccgtgattgagcagttagcccaggttcataattccaccgtccaagccagcatggaacgactgtgctcgtatctgcccgaaaagctgtttctcaaaacaacgtgctacttagtcattgacaagtttggttctgatatcataaagctcctctctgccgacatgaatgctgacgtcgtttgtcacacattggagttctgcaaacagaacaccggccagcctctctgccacttgtatccacttccaaaagagacctggaagttcactcttcagaaggcccgccaaattgtcaagaagagccccattctgaaatactcccgaagcggtagcgatatatgctcccttcctgtgctagcaaaaatctgccagaagattaaactggccatggagcagtctgtgccatttaaagacgtcgatagcgacaagtactcagtgttcccaacactgcgcggttaccactggcgagggagagattgtaatgacagcgacgaatcagtgtatcctggaagacgaccaaacaattgggacgtccaccaggattccaattgcaatggaatttggggcgttgaccccaaagacggggtgccctatgaaaagaagttctgtgaggggagccagcctcgtggcattatcttgcttggagatagcgcaggcgcacacttccatatctcccctgagtggataacagcatcacagatgagccttaattctttcatcaaccttcctaccgccttaactaatgagctggactggcctcagttatcaggggccaccggctttttggattcaaccgtggggatcaaggagaagagtatatacttaagactgtggaaacgtaaccactgcaatcatcgcgattaccaaaatatctcacgtaacggtgcttcttcccgcaacctaaagaagttcattgagtcactttcgcgcaataaagtcctggattatccggctatcgtgatttacgccatgataggaaacgatgtgtgttctggcaaaagcgacccagtgccagccatgactacgccagaaaagctttactcgaacgtcatgcagacgctcaagcaccttaactcccatctgcccaatggcagccatgtgatcttgtacggtctgccagacggaacgttcctatgggataatttacacaaccgttaccatcctctgggacagcttaataaggatatgacttacgcacaactgtacagcttcctgaattgtctacaggtaagtccctgtcacggttggatgtcgagcaataagacactgcgcaccttgacttcggaaagggcagaacagctatcaaacacactgaagaagatcgcagctagcgagaaatttactaattttaatctcttctatatggactttgcatttcacgaaatcatacaggagtggcaaaagagaggtggtcagccgtggcagctcatcgagcccgtggatggattccatccaaatgaagtggcacttctgttgctcgccgaccacttctggaagaaggtacagctgcagtggcctcagattttaggcaaggagaatccctttaaccctcaaatcaaacaggtgttcggagaccagggtggtcattag

SEQ ID NO: 119357 - DNA, 1728 bp, Artificial Sequence
  derived and/or modified sequence
atgcagtctccttggaaaatactcacggtcgcaccactgttccttctgctgagcctccagagctctgcgtcccctgccaacgacgaccagtctcgcccttccctgtctaacggacatacctgcgtaggttgtgtactagttgtgtcggttatcgagcagctcgctcaggtgcataactccaccgtacaggcgtctatggaaagactctgtagctatctgcccgagaaattgtttctgaaaacaacgtgctaccttgtgatagataaatttggatccgatatcatcaagctcctcagcgcagacatgaacgcggatgtagtgtgtcatactctggagttctgcaaacagaacacggggcagcctttatgtcacctttatccattgccaaaagaaacctggaaatttaccctccagaaagcaaggcagatcgtgaaaaagtctcctattctaaagtatagccggagtggttcagatatctgtagtcttccagttctggccaaaatatgccagaagattaagttggcaatggagcaaagtgttccattcaaagacgtcgattccgacaaatattcagtattccccacacttaggggctaccactggagaggcagagattgtaacgacagtgacgaaagcgtgtaccccggacgcagacctaacaactgggacgtccaccaagattccaattgtaatggtatttggggcgtggacccgaaggacggcgtgccctacgagaagaaattttgcgaaggctcccagccacggggtatcatcctcctgggagattctgctggcgctcactttcacatatcacctgagtggatcacagcctcccagatgtctctgaacagtttcattaacctgccaacggctctgactaacgaattagactggccccagctaagcggggcaacaggattcctcgactctaccgtcggtataaaggaaaaatccatatacctcaggttgtggaaaagaaaccattgtaaccatcgcgactaccagaacatctcccgtaacggggcttctagtaggaacctgaagaagttcattgagagccttagtcggaataaagttttggattaccctgcaatagtaatctacgccatgatcggcaacgacgtgtgttcaggaaaatccgatcccgtgccggctatgaccacaccagagaaactgtacagcaacgtcatgcagactctcaagcatttaaattcacacttgcctaatggttcacatgttatcctgtatggtctgccagacggaacgttcttgtgggacaatctacataaccgttaccaccctctagggcagcttaacaaagatatgacatacgcgcaactgtatagctttctaaactgcctgcaggtgtcgccatgtcacggttggatgtcctccaataaaactctgcgaactctcacctcagagcgggctgaacagttaagtaatacactgaaaaaaattgccgcatcggagaagtttaccaacttcaacctgttttacatggactttgcattccatgagatcatccaggagtggcagaagagaggagggcagccttggcaactcattgagcccgtggatgggttccatcctaacgaagtagctttgctgctgttggctgatcatttctggaagaaagtacaactccagtggccccagatcctgggcaaggagaatccctttaacccacagataaaacaggtcttcggagaccaggggggtcactag

SEQ ID NO: 119358 - DNA, 1728 bp, Artificial Sequence
  derived and/or modified sequence
atgcagagcccctggaagatcctgaccgtggcccccctgttcctgctgctgagcctgcagagcagcgccagccccgccaacgacgaccagagcagacccagcctgagcaacggccacacctgcgtgggctgcgtgctggtggtgagcgtgatcgagcagctggcccaggtgcacaacagcaccgtgcaggccagcatggagagactgtgcagctacctgcccgagaagctgttcctgaagaccacctgctacctggtgatcgacaagttcggcagcgacatcatcaagctgctgagcgccgacatgaacgccgacgtggtgtgccacaccctggagttctgcaagcagaacaccggccagcccctgtgccacctgtaccccctgcccaaggagacctggaagttcaccctgcagaaggccagacagatcgtgaagaagagccccatcctgaagtacagcagaagcggcagcgacatctgcagcctgcccgtgctggccaagatctgccagaagatcaagctggccatggagcagagcgtgcccttcaaggacgtggacagcgacaagtacagcgtgttccccaccctgagaggctaccactggagaggcagagactgcaacgacagcgacgagagcgtgtaccccggcagaagacccaacaactgggacgtgcaccaggacagcaactgcaacggcatctggggcgtggaccccaaggacggcgtgccctacgagaagaagttctgcgagggcagccagcccagaggcatcatcctgctgggcgacagcgccggcgcccacttccacatcagccccgagtggatcaccgccagccagatgagcctgaacagcttcatcaacctgcccaccgccctgaccaacgagctggactggccccagctgagcggcgccaccggcttcctggacagcaccgtgggcatcaaggagaagagcatctacctgagactgtggaagagaaaccactgcaaccacagagactaccagaacatcagcagaaacggcgccagcagcagaaacctgaagaagttcatcgagagcctgagcagaaacaaggtgctggactaccccgccatcgtgatctacgccatgatcggcaacgacgtgtgcagcggcaagagcgaccccgtgcccgccatgaccacccccgagaagctgtacagcaacgtgatgcagaccctgaagcacctgaacagccacctgcccaacggcagccacgtgatcctgtacggcctgcccgacggcaccttcctgtgggacaacctgcacaacagataccaccccctgggccagctgaacaaggacatgacctacgcccagctgtacagcttcctgaactgcctgcaggtgagcccctgccacggctggatgagcagcaacaagaccctgagaaccctgaccagcgagagagccgagcagctgagcaacaccctgaagaagatcgccgccagcgagaagttcaccaacttcaacctgttctacatggacttcgccttccacgagatcatccaggagtggcagaagagaggcggccagccctggcagctgatcgagcccgtggacggcttccaccccaacgaggtggccctgctgctgctggccgaccacttctggaagaaggtgcagctgcagtggccccagatcctgggcaaggagaaccccttcaacccccagatcaagcaggtgttcggcgaccagggcggccactag

SEQ ID NO: 119359 - DNA, 2379 bp, Artificial Sequence
  derived and/or modified sequence
acagatcagttccggcaagcctcgaggctcacggggtttatgcacactaacttcactgagccagggagcacggaagttgtgccactgtgcaacttgggttttctttatcctgcagtctttacctcagcagaaccgcacaccacagactccctccagctctttgtgtgtggctctctcagggtccaacaagagcaagctgtgggtctgtgagtgtttatgtgtgcttttattcacttcacacttattgaaaagtgtgtatgtgagagggtggggtgtgtgtgtcaaagagagtgaggaagagaaggagagagagatcaattgattctgcagcctcagctccagcatccctcagttgggagcttccaaagccgggtgatcacttggggtgcatagctcggagatgcagtccccctggaaaatccttacggtggcgcctctattcttgctcctgtctcttcagtcctcggcctctccagccaacgatgaccagtccaggcccagcctctcgaatgggcacacctgtgtagggtgtgtgctggtggtgtctgtaatagaacagcttgctcaagttcacaactcgacggtccaggcctcgatggagagactgtgcagctacctgcctgaaaaactgttcttgaaaaccacctgctatttagtcattgacaagtttggatcagacatcataaaactgcttagcgcagatatgaatgctgatgtggtatgtcacactctggagttttgtaaacagaacactggccaaccattgtgtcatctctaccctcttcccaaggagacatggaaatttacactacagaaggcaagacaaattgtcaagaagtccccgattctgaaatattctagaagtggttctgacatttgttcactcccggttttggccaagatctgccagaaaattaaattagctatggaacagtctgtgccattcaaagatgtggattcagacaaatacagcgttttcccaacactgcggggctatcactggcgggggagagactgtaatgacagcgacgagtcagtgtacccaggtagaaggccgaacaactgggatgtccatcaggattcaaactgtaatggcatttggggtgtcgatccaaaagatggagttccatatgagaagaaattctgtgaaggttcacagcccaggggaatcattttgctgggagactcagctggggctcattttcacatctctcctgaatggatcacagcgtcgcagatgtctttgaactctttcatcaatctaccaacagcccttaccaacgagcttgactggccccaactctctggtgctacaggatttctggactccactgttggaattaaagaaaaatctatttaccttcgcttatggaaaagaaaccactgtaatcacagggactaccagaatatttcaagaaatggtgcatcttcccgaaacctgaagaaatttatagaaagcttgtctagaaacaaggtgttggactatcccgccatcgttatatatgccatgattggaaatgatgtctgcagtgggaagagtgacccagtcccagccatgaccactcctgagaaactctactccaacgtcatgcagactctgaagcatctaaattcccacctgcccaatggcagccatgttattttgtatggcttaccagatggaacctttctctgggataatttgcacaacagatatcatcctctcggccagctaaataaagacatgacctatgcgcagttgtactccttcctgaactgcctccaggtcagcccctgccacggctggatgtcttccaacaagacgttgcggactctcacttcagagagagcagagcaactctccaacacactgaaaaaaattgcagccagtgagaaatttacaaacttcaatcttttctacatggattttgccttccatgaaatcatacaggagtggcagaagagaggcggacagccctggcagctcatcgagcccgtggatggattccaccccaacgaggtggctttgctgttgttggcggatcatttctggaaaaaggtgcagctccagtggccccaaatcctgggaaaggagaatccgttcaacccccagattaaacaggtgtttggagaccaaggcgggcactgagcctctcaggagcatgcacccctggggagcacagggaggcagaggcttgggtaaactcattccacaaccctatgggggctgccacgtcacaggcccaaaggactcttcttcagcagcatctttgcaaatgtctttctctcaatgaagagcatatctggacgactgtgcaatgctgtgtgctcccgggatcagtaacccttccgctgttcctgaaataacctttcataaagtgctttgggtgccattccaaa

SEQ ID NO: 119360 - protein, 326 aa, Artificial Sequence
  derived and/or modified sequence
MTGLCGYSAPDMRGLRLIMIPVELLLCYLLLHPVDATSYGKQTNVLMHFPLSLESQTPSSDPLSCQFLHPKSLPGFSHMAPLPKFLVSLALRNALEEAGCQADVWALQLQLYRQGGVNATQVLIQHLRGLQKGRSTERNVSVEALASALQLLAREQQSTGRVGRSLPTEDCENEKEQAVHNVVQLLPGVGTFYNLGTALYYATQNCLGKARERGRDGAIDLGYDLLMTMAGMSGGPMGLAISAALKPALRSGVQQLIQYYQDQKDANISQPETTKEGLRAISDVSDLEETTTLASFISEVVSSAPYWGWAIIKSYDLDPGAGSLEI

SEQ ID NO: 119361 - protein, 308 aa, Artificial Sequence [sequence omitted]

SEQ ID NO: 119362 - DNA, 927 bp, Artificial Sequence
  derived and/or modified sequence
atgatccccgtggagctgctgctgtgctacctgctgctgcaccccgtggacgcaacttcatatgggaagcaaacaaacgttctgatgcactttccactgtccctggagtcacagactccgagtagtgaccccctgagttgccagttcctccaccccaagtctctccccgggttttcccatatggcacctctaccaaagtttctggtatctttggccttacggaatgccctggaagaggccggatgccaggctgatgtgtgggccttgcagctccagttatacaggcagggcggcgtgaatgctacacaagtgctgatccagcacctgaggggacttcagaaaggtagatctacagagcgcaacgtaagtgtggaggcccttgcctccgctctgcagctactcgctcgcgagcagcagtccaccgggagagtgggccgcagtctgcccactgaggactgcgaaaacgagaaggaacaagccgttcacaatgtggtgcagctgcttccgggagtgggaaccttctataatctgggcacagctctttattacgctacgcaaaactgcctgggcaaggctcgggagcgggggagagacggggcaatcgatctgggctacgacctgctcatgacaatggctggaatgtcgggcggacccatgggactggctatctccgccgccttaaagccagccttgaggtctggcgtgcagcaactgatccagtactatcaagatcaaaaggacgcaaacataagccagccagagactacgaaggaaggactccgagctattagcgacgtgtccgacctggaagaaactaccacactggcatctttcatttctgaagtggtctcatctgcgccttactggggatgggcaattattaaaagctacgatcttgatcctggggccggatccctcgaaatttag

SEQ ID NO: 119363 - DNA, 1715 bp, Artificial Sequence
  derived and/or modified sequence
cctttcctcatgggacacagaactaggcagaacaggatcaggaagcgatcaaacctaccaaggcagtctcacttctcaatgactggactgtgtgggtactctgctccagacatgcgtggcctcagactcatcatgataccagttgagctgctactttgctacctcctgctgcaccctgtggatgccacttcatatggaaagcagacaaatgtcttgatgcactttcccttgtccttggaatcccagacaccctcctcagaccccttgtcctgccaatttctgcacccaaagtcactgcctggtttcagccacatggcccctctacccaagttcttggtaagcctggctctaaggaatgccctggaggaagctggttgtcaggctgatgtttgggctctacagctacagctctaccgccagggtggtgtgaatgctacacaggtcctcatccagcatcttcgagggctccagaaaggcagaagcacagagaggaacgtgtcagtggaagccctggcctctgctctgcagctgttagccagggagcagcaaagcacaggaagggtcgggcgctccctcccgacagaggactgtgagaatgagaaggagcaagctgtgcacaatgtagtccagctgctgccaggagtgggaaccttctacaacctgggcacagctttgtattatgctactcaaaactgcctgggcaaggccagggaacgaggccgagatggggccatagatctgggatatgaccttctgatgaccatggctgggatgtcaggggggcctatgggtctagcgatcagtgctgcacttaaacctgcattaaggtctggggttcagcagttgatccagtattaccaagatcagaaagacgcaaacatctctcagccggagaccaccaaggagggtttgagggccatctcagatgtgagtgacttggaagaaacaactactctggcttctttcatatcagaagtagtaagttcagctccctactgggggtgggccataatcaagagctatgacttagatcctggggctgggagtcttgagatataaaagaatgtggtaaccacagaattaataactgtactaccctgacaagctatatacatgtcttcaaaattttaatctgatttatccaggaggaaggctgtacagtaaaacgtaagaacgtaaatgtttgggtgttgaagtcacagggtttggtttcgaatctaggctccacttgttagagcctcggtgatcactgaatagtaacttctttcttgaactaagatcagttttgaagtttctaaaggagatagaatgattttaacctcaatgagttgccctgtaaatttaaaatgatacaatgaatctaaaatgcttatcacagtactttcaataaatagctattagccaggtgcggtggctcacgcctgtaatcccagcactgtgagaggctgaggcgggatgatcacctgaggtcaggagttcaagatcagcctgggcaacatggcgaaaccccgtctctacaataaatacaaaaaattatcctggcggagttatgcacgcttgtagtcccaactacctgggaggctgaggcgggagaatcacctgagcctgggaggtcgaggctgcagcgagccgagatcgcgccgctgcattccagcctgggtgacagagcgagaccatgtctcaaaaaataaaaataaaaaaaaattgttttcatt

SEQ ID NO: 119364 - DNA, 981 bp, Artificial Sequence
  derived and/or modified sequence
atgactggcttatgcgggtactctgcacctgacatgcgcggactgcgtctcattatgatcccagtggagctcctgctttgctatctcctgctgcaccccgtcgacgctacaagttacggtaagcagaccaatgtactaatgcattttcctttgtccctggagtctcagaccccatcttctgatcccctatcctgtcagttcctccacccaaaatcactcccgggattcagccatatggctccactacctaaatttcttgtgtctctagctctgagaaatgctctggaggaggccggttgtcaagcagacgtgtgggccctgcagctgcagctgtaccggcaagggggagtgaacgcaacacaagtgctcatccagcacctgagaggcctgcagaagggacgcagcacggaacgtaatgtgagtgtagaggccctggctagcgctctccagttgcttgccagggagcagcaaagtaccggccgagtaggtcgctcattgcccactgaggattgcgaaaatgaaaaagagcaagccgtgcataatgtggtgcagctgctaccaggagtcgggacgttttacaacttaggaacagcattgtactacgctacgcaaaactgcttgggtaaagctagggagcggggaagagacggcgctatcgacttgggctatgatctcctgatgactatggccggaatgtccgggggacctatgggcttggccatctctgcggctctgaagcccgctctgcggtctggggtgcagcagcttattcagtactatcaagatcagaaggatgctaacatctctcagcccgagactacgaaggaggggctccgtgccatttctgatgtgagtgacctggaggagacaaccacactggccagcttcatctctgaggtcgtgtcctccgctccctactggggctgggctatcatcaaaagctatgatctggacccgggtgccggtagccttgaaatctag

SEQ ID NO: 119365 - DNA, 927 bp, Artificial Sequence
  derived and/or modified sequence
atgattccagtggaattactgctgtgttatttgctgctccaccccgtagacgcaacctcgtacgggaaacaaactaacgttctcatgcactttcctctctccctggaaagccagaccccgtcctcggacccactgagctgtcaatttttacatccaaaaagcctgcccggttttagtcacatggcccctctccccaagtttctcgtctctttggctctccgcaacgcgctagaagaggcgggatgccaggctgatgtgtgggcgttgcaactacaactctatagacagggcggagtgaatgctactcaggtactgattcagcatctcagaggcctgcagaaggggagatctacggagcgcaatgtctcggttgaggcactggcttctgccttgcagttgttggctagagaacaacaaagtactggaagagtgggcagaagtttaccgaccgaggactgcgaaaacgagaaggaacaggccgtgcacaacgtagtacaactcctgcccggagttggcactttctacaaccttgggaccgcactctactacgccacacagaattgcttgggaaaagccagggagaggggccgagacggagctattgacctcggatatgatctgcttatgaccatggccggaatgtccgggggtccgatgggactcgctatttcagcagcactcaagcccgcactaagatctggcgtgcaacagcttatccagtattatcaggaccagaaggatgcgaatataagccaacccgagaccacaaaagagggcctcagggctataagtgatgtaagcgacctggaagaaactaccaccctcgcaagctttatcagcgaggtggtgtcatctgcaccatactggggttgggctatcatcaaatcttatgacctggaccccggtgctggcagtctcgagatatag

SEQ ID NO: 119366 - DNA, 981 bp, Artificial Sequence
  derived and/or modified sequence
atgaccggattgtgtgggtactcagcaccggatatgcggggcttgaggctgatcatgatccccgttgaactgctgctgtgctaccttctcttacaccctgtggacgcaacaagctatggcaaacagaccaatgtattgatgcacttccctcttagcctggagagtcagacaccctcatccgatccacttagttgtcagtttttacatcccaagtctctccctggattttcgcatatggcccctttgcctaagtttctggtttctcttgccctccgaaacgcacttgaagaggccggctgtcaggcagatgtttgggctctccaacttcagctctatcgccaggggggagttaacgccactcaggtacttatccaacatctgcgcggactacagaaaggtaggtcaaccgaacgcaacgtttctgtggaggccctcgcttcggccctgcagctcctggctcgcgagcagcagtctacgggaagggtgggcagatcactaccaacagaggattgtgaaaatgaaaaagaacaagcagttcataatgtcgttcagcttctcccaggggtcggcacattctacaacctcgggaccgctttgtactacgctacacaaaattgcctggggaaggctcgggaacggggcagggatggcgcaatcgaccttggctatgacctgctgatgaccatggctggtatgagcgggggccctatgggactcgcgattagtgcagctttaaagccggctctacgtagcggggtccagcagttaatccaatactaccaggatcagaaggacgccaatatttcccaaccggaaactaccaaagaggggctacgagctatcagcgatgttagtgatctcgaggagaccacaaccctggcatcctttatctccgaagtcgtctcaagtgcaccctactggggctgggcaatcattaagagttacgatttagatcccggcgcagggtcactcgagatctag

SEQ ID NO: 119367 - DNA, 927 bp, Artificial Sequence
  derived and/or modified sequence
atgatcccagtcgaactgctgctttgctacctcctcctgcatccggtagatgccacatcttacggaaagcagaccaatgtgctgatgcacttccccctctcactggagtctcagacccctagttccgatccactctcctgccaattcttacaccccaagtctctgccagggttcagccacatggcgcctctacccaaattccttgtgtcactagcactgcggaacgcgttggaggaggcaggctgtcaggccgatgtctgggctttgcaattacagctttatcgccaaggcggagtgaacgccacccaagtactgatccaacatctcagaggactgcaaaagggtcgctcaacagaaagaaacgtttccgtcgaggctttggcctcggctctgcagcttctggcacgtgagcagcagtcaacaggccgggttggaaggtcgctgccgaccgaggactgtgagaatgagaaagagcaggccgtacacaatgtcgtgcagctattgccaggggtgggcactttttacaatctgggtaccgccttgtattacgccacacagaattgtttgggtaaggcacgggagcgtggacgggacggtgcaattgatctcggctacgacttactgatgactatggccggtatgagcggaggtcccatgggcttagctatatccgcagcattaaagccagctctgcggtcaggggtgcaacagctaattcagtactaccaggaccagaaagacgccaacatcagtcagcctgaaaccaccaaggaagggctcagagccatcagcgacgtctcggatctggaagaaacaaccaccctagcctcatttataagtgaagtcgtgtcctccgccccctactggggttgggccatcattaaatcctacgacctggacccaggggccggctcactggagatttag

SEQ ID NO: 119368 - DNA, 981 bp, Artificial Sequence
  derived and/or modified sequence
atgaccggcctttgtggttacagcgcccccgatatgcgcggcctacgtttgatcatgattcctgtggaattactgctctgttacctgctgctgcacccagtggacgcaacctcgtatggcaaacagaccaacgttctgatgcacttccccctctccctcgaatcacagactccctcatccgatcccttatcctgccagttcttgcacccaaaaagtttgcccggcttctcccacatggcccccttacccaagttcttagtgagtcttgccctgcgtaatgctttagaagaggccggttgccaggcagatgtttgggctctccaacttcagctctatcgccaggggggagttaacgccactcaggtacttatccaacatctgcgcggactacagaaaggtaggtcaaccgaacgcaacgtttctgtggaggccctcgcttcggccctgcagctcctggctcgcgagcagcagtctacgggaagggtgggcagatcactaccaacagaggattgtgaaaatgaaaaagaacaagcagttcataatgtcgttcagcttctcccaggggtcggcacattctacaacctcgggaccgctttgtactacgccacccaaaactgtctcggaaaagcaagggaacgagggcgggatggcgccatcgatctgggatacgatctcttaatgacaatggcaggcatgtccggaggtccaatgggactggctatttctgctgcactgaaacctgcgcttaggagcggagtacaacaactcatccagtactaccaagaccaaaaggacgcgaatattagtcaaccagagacaactaaggagggtctgcgcgccatttccgacgtaagcgatctagaagagacaaccactcttgcttcattcatcagcgaggtggttagtagtgcaccttactggggctgggccattatcaagagttacgatttagatccaggagccggctctttggaaatctag

SEQ ID NO: 119369 - DNA, 927 bp, Artificial Sequence
  derived and/or modified sequence
atgatccccgttgaactgctcctttgctatcttttgctgcatcctgtggatgccaccagctacggaaaacagacaaatgtacttatgcattttcccctttctctggagagtcagactccctcctccgatcccctaagttgccaattcctccatcccaagtcattaccaggcttctctcacatggccccacttccaaaatttcttgtgtctttggccctacgaaatgctctagaggaggcgggttgccaggcagacgtttgggccctgcagttgcaactataccgtcagggcggtgtgaacgcgacccaggtgttaattcaacacttaaggggcctccagaaaggacgaagtacagagcgcaatgtttcagtagaagcgctggcttcagcactgcaattgctcgcccgagaacagcaaagcacagggagagtgggaagatcccttcctacagaggattgtgagaatgagaaagaacaggcagtgcataacgtggttcagttattgccgggcgtcggtaccttctacaatctagggactgccctgtattatgccacccagaactgcctggggaaagctagagaacgcggaagagacggtgcaattgacttaggctatgacctgctgatgacgatggccggtatgagcgggggcccaatgggcttggccattagcgccgcccttaagcctgcattacggtcaggcgtccagcagcttattcagtactatcaggaccagaaggacgcaaacattagccaacctgaaaccaccaaagaagggctcagagccattagcgacgtgtcagatcttgaagagaccacaaccttagctagctttatctctgaggtcgtgtcgagcgcaccatattggggatgggccatcataaagagttacgatctcgaccccggcgcaggttcactcgagatttag

SEQ ID NO: 119370 - DNA, 1682 bp, Artificial Sequence
  derived and/or modified sequence
cctttcctcatgggacacagaactaggcagaacaggatcaggaagcgatcaaacctaccaaggcagtctcacttctcaatgactggactgtgtgggtactctgctccagacatgcgtggcctcagactcatcatgataccagttgagctgctactttgctacctcctgctgcaccctgtggatgccacttcatatggaaagcagacaaatgtcttgatgcactttcccttgtccttggaatcccagacaccctcctcagaccccttgtcctgccaatttctgcacccaaagtcactgcctggtttcagccacatggcccctctacccaagttcttggtaagcctggctctaaggaatgccctggaggaagctggttgtcaggctgatgtttgggctctacagctacagctctaccgccagggtggtgtgaatgctacacaggtcctcatccagcatcttcgagggctccagaaaggcagaagcacagagaggaacgtgtcagtggaagccctggcctctgctctgcagctgttagccagggagcagcaaagcacaggaagggtcgggcgctccctcccgacagaggactgtgagaatgagaaggagcaagctgtgcacaatgtagtccagctgctgccaggagtgggaaccttctacaacctgggcacagctttgtattatgctactcaaaactgcctgggcaaggccagggaacgaggccgagatggggccatagatctgggatatgaccttctgatgaccatggctgggatgtcaggggggcctatgggtctagcgatcagtgctgcacttaaacctgcattaaggtctggggttcagcagttgatccagtattaccaagatcagaaagacgcaaacatctctcagccggagaccaccaaggagggtttgagggccatctcagatgtgagtgacttggaagaaacaactactctggcttctttcatatcagaagtagtaagttcagctccctactgggggtgggccataatcaagagctatgacttagatcctggggctgggagtcttgagatataaaagaatgtggtaaccacagaattaataactgtactaccctgacaagctatatacatgtcttcaaaattttaatctgatttatccaggaggaaggctgtacagtaaaacgtaagaacgtaaatgtttgggtgttgaagtcacagggtttggtttcgaatctaggctccacttgttagagcctcggtgatcactgaatagtaacttctttcttgaactaagatcagttttgaagtttctaaaggagatagaatgattttaacctcaatgagttgccctgtaaatttaaaatgatacaatgaatctaaaatgcttatcacagtactttcaataaatagctattagccaggtgcggtggctcacgcctgtaatcccagcactgtgagaggctgaggcgggatgatcacctgaggtcaggagttcaagatcagcctgggcaacatggcgaaaccccgtctctacaataaatacaaaaaattatcctggcggagttatgcacgcttgtagtcccaactacctgggaggctgaggcgggagaatcacctgagcctgggaggtcgaggctgcagcgagccgagatcgcgccgctgcattccagcctgggtgacagagcgagaccatgtctc

SEQ ID NO: 119371 - DNA, 981 bp, Artificial Sequence
  derived and/or modified sequence
atgaccggcctgtgcggctacagcgcccccgacatgagaggcctgagactgatcatgatccccgtggagctgctgctgtgctacctgctgctgcaccccgtggacgccaccagctacggcaagcagaccaacgtgctgatgcacttccccctgagcctggagagccagacccccagcagcgaccccctgagctgccagttcctgcaccccaagagcctgcccggcttcagccacatggcccccctgcccaagttcctggtgagcctggccctgagaaacgccctggaggaggccggctgccaggccgacgtgtgggccctgcagctgcagctgtacagacagggcggcgtgaacgccacccaggtgctgatccagcacctgagaggcctgcagaagggcagaagcaccgagagaaacgtgagcgtggaggccctggccagcgccctgcagctgctggccagagagcagcagagcaccggcagagtgggcagaagcctgcccaccgaggactgcgagaacgagaaggagcaggccgtgcacaacgtggtgcagctgctgcccggcgtgggcaccttctacaacctgggcaccgccctgtactacgccacccagaactgcctgggcaaggccagagagagaggcagagacggcgccatcgacctgggctacgacctgctgatgaccatggccggcatgagcggcggccccatgggcctggccatcagcgccgccctgaagcccgccctgagaagcggcgtgcagcagctgatccagtactaccaggaccagaaggacgccaacatcagccagcccgagaccaccaaggagggcctgagagccatcagcgacgtgagcgacctggaggagaccaccaccctggccagcttcatcagcgaggtggtgagcagcgccccctactggggctgggccatcatcaagagctacgacctggaccccggcgccggcagcctggagatctag

SEQ ID NO: 119372 - DNA, 927 bp, Artificial Sequence
  derived and/or modified sequence
atgatccccgtggagctgctgctgtgctacctgctgctgcaccccgtggacgccaccagctacggcaagcagaccaacgtgctgatgcacttccccctgagcctggagagccagacccccagcagcgaccccctgagctgccagttcctgcaccccaagagcctgcccggcttcagccacatggcccccctgcccaagttcctggtgagcctggccctgagaaacgccctggaggaggccggctgccaggccgacgtgtgggccctgcagctgcagctgtacagacagggcggcgtgaacgccacccaggtgctgatccagcacctgagaggcctgcagaagggcagaagcaccgagagaaacgtgagcgtggaggccctggccagcgccctgcagctgctggccagagagcagcagagcaccggcagagtgggcagaagcctgcccaccgaggactgcgagaacgagaaggagcaggccgtgcacaacgtggtgcagctgctgcccggcgtgggcaccttctacaacctgggcaccgccctgtactacgccacccagaactgcctgggcaaggccagagagagaggcagagacggcgccatcgacctgggctacgacctgctgatgaccatggccggcatgagcggcggccccatgggcctggccatcagcgccgccctgaagcccgccctgagaagcggcgtgcagcagctgatccagtactaccaggaccagaaggacgccaacatcagccagcccgagaccaccaaggagggcctgagagccatcagcgacgtgagcgacctggaggagaccaccaccctggccagcttcatcagcgaggtggtgagcagcgccccctactggggctgggccatcatcaagagctacgacctggaccccggcgccggcagcctggagatctag

SEQ ID NO: 119373 - DNA, 981 bp, Artificial Sequence
  derived and/or modified sequence
atgaccggcctgtgcggctactctgctccagacatgcgcggcttgagacttattatgatccccgtcgagctcctgctgtgctatctcctgttgcatcccgttgacgctacttcatatggaaaacagactaacgtactaatgcattttccactgagcctggaatcccagacacctagttctgatccattgagctgccagttcctgcaccccaaatcactgccgggttttagtcatatggctcctctccccaagtttctggtaagcctagccctgcgaaatgcactcgaagaggcaggttgccaagccgatgtgtgggccctgcaactgcagctatacagacagggaggggtgaacgctactcaagtcctgatccagcacctgcgcggcctgcagaaaggccgcagtaccgaacgaaacgtgtccgtggaggcattggcaagcgctcttcagctgctcgccagggaacagcagtccactgggagggtaggaaggtccttgccgacagaagactgcgagaatgagaaggagcaggccgttcataacgttgtccagttattgcccggagtgggtacattctacaacctcggaactgctctttattatgctacacagaattgtttggggaaagcccgggaacgaggccgcgacggagcaatcgacttaggatacgacctgctgatgactatggccgggatgagcggggggcccatggggctcgctataagcgcggctctcaagcccgcccttaggagtggagtgcaacaactaatacaatactatcaagatcagaaggacgctaatatctcgcagccagaaaccacaaaagaggggctgagagccatcagcgatgtgtcggacctggaggagacgacaaccctcgcttcctttatttctgaggtggtgtctagtgctccatactggggatgggccattataaagtcatacgatcttgaccccggcgcaggtagcctggagatctag

SEQ ID NO: 119374 - DNA, 927 bp, Artificial Sequence
  derived and/or modified sequence
atgattcctgtagaattattactgtgctacctgttgttgcaccccgtagacgccactagttatggcaagcagaccaacgtattgatgcattttcccctttctcttgagtctcaaaccccttcttctgatcccttatcgtgccagttcctgcaccccaagtccctccctggcttctctcacatggctcctcttccaaagtttctggttagccttgctctccggaatgcgctggaggaagccggctgtcaggctgacgtctgggctttgcaactccagctttataggcagggcggagttaacgccacacaggtcctcatccaacacctcagaggcttgcaaaaaggcaggtcaaccgagaggaacgtgtctgtggaggctctggcctcagctttgcagctgctggcgagggagcagcagtctacaggcagagtgggcagatctctgcccacagaagactgcgagaatgaaaaggagcaggctgtacacaatgttgtccaactcttgcccggagtcggaacgttctacaacctgggtacggctttgtattatgccacacagaactgccttgggaaagcccgagaaaggggtcgcgacggcgctatcgaccttggctacgatttgctaatgacaatggccggcatgagtggtggtcccatgggtctcgcgatttcagcagcacttaaacccgcactccggagcggcgtgcagcagctgatccagtattaccaggaccagaaagatgctaatatctcacagccagagaccactaaggaaggactgcgagccataagcgacgttagcgacctcgaggaaactactacgctggccagttttatctccgaagtagtctcctcggccccttattggggttgggccatcatcaagagctacgacctggaccctggtgccgggtctctggaaatatag

SEQ ID NO: 119375 - DNA, 981 bp, Artificial Sequence
  derived and/or modified sequence
atgacaggcctgtgtggctacagcgccccagacatgaggggcctgcggctcatcatgatccctgtggagctgctgctgtgctacctgctgctgcaccctgtggatgccaccagctatggcaagcagaccaacgtgctgatgcacttccccctgagcctggagagccagacccccagcagtgaccccctgagctgccagttcctgcaccccaagagcctgcccggcttcagccacatggcccccctgcccaagttcctggtgtccctggccctgagaaatgccctggaggaggccggctgccaggctgatgtgtgggccctgcagctgcagctgtaccggcagggcggcgtgaatgccacccaggtgctgatccagcacctgcggggcctgcagaagggccgcagcacagaaagaaatgtgtctgtggaggccctggccagcgccctgcagctgctggcccgggagcagcagagcacaggccgggtgggccgcagcctgcccacagaggactgtgaaaatgagaaggagcaggccgtgcacaacgtggtgcagctgctgcccggggtgggcaccttctacaacctgggcacagccctgtactatgccacccagaactgcctgggcaaggcccgggagcggggcagagatggagccatcgacctgggctatgacctgctgatgaccatggccggcatgtctgggggccccatgggcctggccatctctgctgccctgaagccagccctgcggtctggagtgcagcagctgatccagtactaccaggaccagaaggatgccaacatcagccagcctgagaccaccaaggagggcctgcgggccatcagtgatgtgtctgacctggaggagaccaccaccctggccagcttcatcagcgaggtggtgtcctctgccccctactggggctgggccatcatcaagagctatgacctggaccctggagctggcagcctggagatctag

SEQ ID NO: 119376 - DNA, 927 bp, Artificial Sequence
  derived and/or modified sequence
atgatccctgtggagctgctgctgtgctacctgctgctgcaccctgtggatgccaccagctatggcaagcagaccaacgtgctgatgcacttccccctgagcctggagagccagacccccagcagtgaccccctgagctgccagttcctgcaccccaagagcctgcccggcttcagccacatggcccccctgcccaagttcctggtgtccctggccctgagaaatgccctggaggaggccggctgccaggctgatgtgtgggccctgcagctgcagctgtaccggcagggcggcgtgaatgccacccaggtgctgatccagcacctgcggggcctgcagaagggccgcagcacagaaagaaatgtgtctgtggaggccctggccagcgccctgcagctgctggcccgggagcagcagagcacaggccgggtgggccgcagcctgcccacagaggactgtgaaaatgagaaggagcaggccgtgcacaacgtggtgcagctgctgcccggggtgggcaccttctacaacctgggcacagccctgtactatgccacccagaactgcctgggcaaggcccgggagcggggcagagatggagccatcgacctgggctatgacctgctgatgaccatggccggcatgtctgggggccccatgggcctggccatctctgctgccctgaagccagccctgcggtctggagtgcagcagctgatccagtactaccaggaccagaaggatgccaacatcagccagcctgagaccaccaaggagggcctgcgggccatcagtgatgtgtctgacctggaggagaccaccaccctggccagcttcatcagcgaggtggtgtcctctgccccctactggggctgggccatcatcaagagctatgacctggaccctggagctggcagcctggagatctag

SEQ ID NO: 119377 - DNA, 981 bp, Artificial Sequence
  derived and/or modified sequence
atgaccggcctgtgcggctacagcgcccccgacatgcggggcctgagattgattatgattcccgtagaactgttgttatgttacttgctcctgcacccggtcgacgccacctcatacggaaagcagacaaacgtgttgatgcactttcccctctcactggagagccaaactccttctagtgacccactctcatgtcagtttctgcatcctaagtcactgcctggcttctctcacatggctcccctgcccaaattcctggttagtctcgcgctgcgaaatgcactggaagaagcggggtgccaagccgacgtttgggctctgcagctgcaattatatcgccaaggtggggttaacgctactcaggtcctcatccagcatttgcggggacttcagaagggtcgcagcactgaaagaaatgtctccgtcgaggcgttggcctccgccctccagttgctggccagggagcagcagtccaccggacgcgtgggcagaagtttgccaactgaagattgcgaaaatgaaaaggagcaggctgtccataacgtagtgcagctgcttcctggtgtggggaccttttataacctcggcacggcgctgtattacgctacccagaattgtttgggaaaggcccgcgaaagggggcgggacggagccatagacctaggatatgacttgcttatgacaatggcaggtatgtcaggggggcccatgggcctggcaatatccgccgccctgaagccagcactgaggagcggcgtgcaacagcttattcagtactatcaggatcagaaggacgccaacattagtcagcccgaaaccaccaaggagggactacgggccatttccgacgtgtccgatcttgaagaaactaccactctggcctccttcatcagtgaagttgtctctagtgccccctattggggctgggctattattaaaagctacgacctggaccccggcgccgggagcttggagatatag

SEQ ID NO: 119378 - RNA, 981 nt, Artificial Sequence
  derived and/or modified sequence
augaccggauuguguggguacucagcaccggauaugcggggcuugaggcugaucaugauccccguugaacugcugcugugcuaccuucucuuacacccuguggacgcaacaagcuauggcaaacagaccaauguauugaugcacuucccucuuagccuggagagucagacacccucauccgauccacuuaguugucaguuuuuacaucccaagucucucccuggauuuucgcauauggccccuuugccuaaguuucugguuucucuugcccuccgaaacgcacuugaagaggccggcugucaggcagauguuugggcucuccaacuucagcucuaucgccaggggggaguuaacgccacucagguacuuauccaacaucugcgcggacuacagaaagguaggucaaccgaacgcaacguuucuguggaggcccucgcuucggcccugcagcuccuggcucgcgagcagcagucuacgggaagggugggcagaucacuaccaacagaggauugugaaaaugaaaaagaacaagcaguucauaaugucguucagcuucucccaggggucggcacauucuacaaccucgggaccgcuuuguacuacgcuacacaaaauugccuggggaaggcucgggaacggggcagggauggcgcaaucgaccuuggcuaugaccugcugaugaccauggcugguaugagcgggggcccuaugggacucgcgauuagugcagcuuuaaagccggcucuacguagcgggguccagcaguuaauccaauacuaccaggaucagaaggacgccaauauuucccaaccggaaacuaccaaagaggggcuacgagcuaucagcgauguuagugaucucgaggagaccacaacccuggcauccuuuaucuccgaagucgucucaagugcacccuacuggggcugggcaaucauuaagaguuacgauuuagaucccggcgcagggucacucgagaucuag

SEQ ID NO: 119379 - RNA, 927 nt, Artificial Sequence
  derived and/or modified sequence
augaucccagucgaacugcugcuuugcuaccuccuccugcauccgguagaugccacaucuuacggaaagcagaccaaugugcugaugcacuucccccucucacuggagucucagaccccuaguuccgauccacucuccugccaauucuuacaccccaagucucugccaggguucagccacauggcgccucuacccaaauuccuugugucacuagcacugcggaacgcguuggaggaggcaggcugucaggccgaugucugggcuuugcaauuacagcuuuaucgccaaggcggagugaacgccacccaaguacugauccaacaucucagaggacugcaaaagggucgcucaacagaaagaaacguuuccgucgaggcuuuggccucggcucugcagcuucuggcacgugagcagcagucaacaggccggguuggaaggucgcugccgaccgaggacugugagaaugagaaagagcaggccguacacaaugucgugcagcuauugccaggggugggcacuuuuuacaaucuggguaccgccuuguauuacgccacacagaauuguuuggguaaggcacgggagcguggacgggacggugcaauugaucucggcuacgacuuacugaugacuauggccgguaugagcggaggucccaugggcuuagcuauauccgcagcauuaaagccagcucugcggucaggggugcaacagcuaauucaguacuaccaggaccagaaagacgccaacaucagucagccugaaaccaccaaggaagggcucagagccaucagcgacgucucggaucuggaagaaacaaccacccuagccucauuuauaagugaagucguguccuccgcccccuacugggguugggccaucauuaaauccuacgaccuggacccaggggccggcucacuggagauuuag

SEQ ID NO: 119380 - RNA, 981 nt, Artificial Sequence
  derived and/or modified sequence
augaccggccuuugugguuacagcgcccccgauaugcgcggccuacguuugaucaugauuccuguggaauuacugcucuguuaccugcugcugcacccaguggacgcaaccucguauggcaaacagaccaacguucugaugcacuucccccucucccucgaaucacagacucccucauccgaucccuuauccugccaguucuugcacccaaaaaguuugcccggcuucucccacauggcccccuuacccaaguucuuagugagucuugcccugcguaaugcuuuagaagaggccgguugccaggcagauguuugggcucuccaacuucagcucuaucgccaggggggaguuaacgccacucagguacuuauccaacaucugcgcggacuacagaaagguaggucaaccgaacgcaacguuucuguggaggcccucgcuucggcccugcagcuccuggcucgcgagcagcagucuacgggaagggugggcagaucacuaccaacagaggauugugaaaaugaaaaagaacaagcaguucauaaugucguucagcuucucccaggggucggcacauucuacaaccucgggaccgcuuuguacuacgccacccaaaacugucucggaaaagcaagggaacgagggcgggauggcgccaucgaucugggauacgaucucuuaaugacaauggcaggcauguccggagguccaaugggacuggcuauuucugcugcacugaaaccugcgcuuaggagcggaguacaacaacucauccaguacuaccaagaccaaaaggacgcgaauauuagucaaccagagacaacuaaggagggucugcgcgccauuuccgacguaagcgaucuagaagagacaaccacucuugcuucauucaucagcgaggugguuaguagugcaccuuacuggggcugggccauuaucaagaguuacgauuuagauccaggagccggcucuuuggaaaucuag

SEQ ID NO: 119381 - RNA, 927 nt, Artificial Sequence
  derived and/or modified sequence
augauccccguugaacugcuccuuugcuaucuuuugcugcauccuguggaugccaccagcuacggaaaacagacaaauguacuuaugcauuuuccccuuucucuggagagucagacucccuccuccgauccccuaaguugccaauuccuccaucccaagucauuaccaggcuucucucacauggccccacuuccaaaauuucuugugucuuuggcccuacgaaaugcucuagaggaggcggguugccaggcagacguuugggcccugcaguugcaacuauaccgucagggcggugugaacgcgacccagguguuaauucaacacuuaaggggccuccagaaaggacgaaguacagagcgcaauguuucaguagaagcgcuggcuucagcacugcaauugcucgcccgagaacagcaaagcacagggagagugggaagaucccuuccuacagaggauugugagaaugagaaagaacaggcagugcauaacgugguucaguuauugccgggcgucgguaccuucuacaaucuagggacugcccuguauuaugccacccagaacugccuggggaaagcuagagaacgcggaagagacggugcaauugacuuaggcuaugaccugcugaugacgauggccgguaugagcgggggcccaaugggcuuggccauuagcgccgcccuuaagccugcauuacggucaggcguccagcagcuuauucaguacuaucaggaccagaaggacgcaaacauuagccaaccugaaaccaccaaagaagggcucagagccauuagcgacgugucagaucuugaagagaccacaaccuuagcuagcuuuaucucugaggucgugucgagcgcaccauauuggggaugggccaucauaaagaguuacgaucucgaccccggcgcagguucacucgagauuuag

SEQ ID NO: 119382 - protein, 13 aa, Artificial Sequence
  derived and/or modified sequence
IVLGQEQDSYGGK

SEQ ID NO: 119383 - protein, 223 aa, Artificial Sequence
  derived and/or modified sequence
MNKPLLWISVLTSLLEAFAHTDLSGKVFVFPRESVTDHVNLITPLEKPLQNFTLCFRAYSDLSRAYSLFSYNTQGRDNELLVYKERVGEYSLYIGRHKVTSKVIEKFPAPVHICVSWESSSGIAEFWINGTPLVKKGLRQGYFVEAQPKIVLGQEQDSYGGKFDRSQSFVGEIGDLYMWDSVLPPENILSAYQGTPLPANILDWQALNYEIRGYVIIKPLVWV

SEQ ID NO: 119384 - DNA, 672 bp, Artificial Sequence
  derived and/or modified sequence
atgaacaagcccctgctgtggatcagcgtgctgaccagcctgctggaggccttcgcccacaccgacctgagcggcaaggtgttcgtgttccccagagagagcgtgaccgaccacgtgaacctgatcacccccctggagaagcccctgcagaacttcaccctgtgcttcagagcctacagcgacctgagcagagcctacagcctgttcagctacaacacccagggcagagacaacgagctgctggtgtacaaggagagagtgggcgagtacagcctgtacatcggcagacacaaggtgaccagcaaggtgatcgagaagttccccgcccccgtgcacatctgcgtgagctgggagagcagcagcggcatcgccgagttctggatcaacggcacccccctggtgaagaagggcctgagacagggctacttcgtggaggcccagcccaagatcgtgctgggccaggagcaggacagctacggcggcaagttcgacagaagccagagcttcgtgggcgagatcggcgacctgtacatgtgggacagcgtgctgccccccgagaacatcctgagcgcctaccagggcacccccctgcccgccaacatcctggactggcaggccctgaactacgagatcagaggctacgtgatcatcaagcccctggtgtgggtgtag

SEQ ID NO: 119385 - DNA, 926 bp, Artificial Sequence
  derived and/or modified sequence
agggcatgaatatcagacgctagggggacagccactgtgttgtctgctaccctcatcctggtcactgcttctgctataacagccctaggccaggaatatgaacaagccgctgctttggatctctgtcctcaccagcctcctggaagcctttgctcacacagacctcagtgggaaggtgtttgtatttcctagagaatctgttactgatcatgtaaacttgatcacaccgctggagaagcctctacagaactttaccttgtgttttcgagcctatagtgatctctctcgtgcctacagcctcttctcctacaatacccaaggcagggataatgagctactagtttataaagaaagagttggagagtatagtctatacattggaagacacaaagttacatccaaagttatcgaaaagttcccggctccagtgcacatctgtgtgagctgggagtcctcatcaggtattgctgaattttggatcaatgggacacctttggtgaaaaagggtctgcgacagggttactttgtagaagctcagcccaagattgtcctggggcaggaacaggattcctatgggggcaagtttgataggagccagtcctttgtgggagagattggggatttgtacatgtgggactctgtgctgcccccagaaaatatcctgtctgcctatcagggtacccctctccctgccaatatcctggactggcaggctctgaactatgaaatcagaggatatgtcatcatcaaacccttggtgtgggtctgaggtcttgactcaacgagagcacttgaaaatgaaatgactgtctaagagatctggtcaaagcaactggatactagatcttacatctgcagctctttcttctttgaatttcctatctgtatgtctgcctaattaaaaaaatatatattgtattatgcta

SEQ ID NO: 119386 - DNA, 818 bp, Artificial Sequence
  derived and/or modified sequence
gggaaataagagagaaaagaagagtaagaagaaatataagagccaccatgaataagcctctcttgtggatctcggtcttgacgtcccttttggaggcattcgcccacacggacttgtcgggaaaggtattcgtgtttccccgggaaagcgtcactgatcatgtcaatctcatcacgcctctggagaaaccactgcagaactttacactctgctttcgagcctattcggatctgtcaagagcctactcgctcttctcctataacacacagggacgggacaacgagcttcttgtgtacaaggaaagggtaggagagtactcactctacatcggtcgccataaagtgacctccaaagtaatcgaaaagttcccggctcccgtccacatttgtgtatcatgggagtcctcgtcagggatcgcggagttctggattaatgggacaccccttgtgaagaagggactgagacaggggtatttcgtagaagcgcagccgaaaatcgtgttgggtcaggaacaagacagctacggagggaagtttgacaggagccaatcgtttgtgggagagatcggtgatctttacatgtgggactcggtcctgccacccgaaaacatcttgagcgcataccaggggaccccgttgcccgcgaatattctcgattggcaggcgctcaactatgagattcgcggctatgtcattatcaaaccgctggtgtgggtgtgataataggctgccttctgcggggcttgccttctggccatgcccttcttctctcccttgcacctgtacctcttggtctttgaataaagcctgagtaggaag

SEQ ID NO: 119387 - DNA, 672 bp, Artificial Sequence
  derived and/or modified sequence
atgaataagcccctgctgtggatcagcgtgctgacaagccttctcgaagcgttcgctcacaccgacctctcaggtaaggtgtttgtttttccccgtgagtctgtgaccgatcatgttaaccttatcaccccactggaaaagccgcttcaaaatttcactctttgtttcagagcgtattctgaccttagtcgcgcatacagcctgttcagctacaacacacagggacgagataacgaacttctggtctacaaagagcgtgtcggtgagtactctctttacattgggcggcacaaagtaacttcaaaggtgatcgagaagttccccgccccagtccatatctgcgtgtcgtgggagagcagtagcgggatcgcagaattttggattaacggtactccccttgttaagaaaggactgcgccagggttactttgttgaggcccagccaaaaatcgtgctggggcaggaacaagactcttatggcggaaaattcgatcgatcacagtcattcgtgggtgagatcggggacctctatatgtgggatagtgttctcccccccgagaatattttgtccgcgtaccaaggtactccgctccccgctaacatactggattggcaggccctaaactacgagattagaggatatgtgattattaagccccttgtctgggtttag

SEQ ID NO: 119388 - DNA, 672 bp, Artificial Sequence
  derived and/or modified sequence
atgaacaagcccctgctgtggatctctgtgctgaccagcctgctggaggcctttgcccacacagacctgagcggcaaggtgtttgtgttcccccgggagagcgtgacagaccacgtgaacctgatcacccccctggagaagcccctgcagaacttcaccctgtgcttccgggcctacagcgacctgagccgggcctacagcctcttctcctacaacacccagggccgggacaatgagctgctggtgtacaaggagcgggtgggggagtacagcctgtacatcggccgccacaaggtgaccagcaaggtgattgagaagtttcctgcccctgtgcacatctgtgtgtcctgggagagcagcagcggcattgctgagttctggatcaatggcacccccctggtgaagaagggcctgcggcagggctactttgtggaggcccagcccaagatcgtgctgggccaggagcaggacagctatggaggcaagtttgacaggagccagagctttgtgggggagattggagacctgtacatgtgggacagcgtgctgcccccagagaacatcctgagcgcctaccagggcacccccctgcctgccaacatcctggactggcaggccctgaactatgagatccggggctacgtgatcatcaagcccctggtgtgggtgtag

SEQ ID NO: 119389 - DNA, 672 bp, Artificial Sequence
  derived and/or modified sequence
atgaacaagcccctgctgtggatcagcgtgctgaccagcctgctggaggcgttcgcccacaccgatctgtccggtaaagtgttcgtctttccaagggaatccgtgacagatcacgtgaatctcataactcccctggaaaagccacttcagaatttcactctgtgctttcgggcctattctgatctctctcgggcttacagcctgttttcttacaacactcagggccgcgacaacgaattactggtgtacaaagaacgagtcggcgaatattccttgtatatcggacgtcataaagtgacttctaaggtgatcgaaaagttccccgcccccgtccacatctgcgtgtcttgggaatcatcctctgggattgctgagttttggataaatggtactcctctcgtgaaaaaggggctgcggcagggctattttgtggaagcccaacccaagatcgttctgggacaggagcaggacagttacgggggaaagtttgatagaagccagtcatttgtcggagagattggagacctgtacatgtgggactcagtcctcccgcctgagaatattctgagcgcgtaccagggcacgcccctccccgcaaacattctcgattggcaggcccttaactatgagatacgggggtatgtcatcattaagcccctcgtctgggtctag

SEQ ID NO: 119390 - DNA, 672 bp, Artificial Sequence
  derived and/or modified sequence
atgaacaaacccctgctgtggatctcagtgctgactagcttgttggaggcttttgctcatacggatctgagtggcaaagtcttcgtcttcccgcgtgagtcggtcactgaccacgttaaccttataacccccctggaaaagcctctccagaactttacgctgtgcttccgggcttactctgacctcagccgagcgtattccctcttttcttataatacacagggacgggataacgagctgttggtgtacaaagagcgcgtcggagagtactccttatatatcggacggcacaaggtcacatcaaaggtgatagaaaagttccctgctcccgttcacatctgcgtgtcttgggaatcatcatcaggcattgctgagttttggattaatggcacccccctggtaaagaaaggcctccgacaaggctactttgtcgaggctcagccgaaaatcgtgctcgggcaggagcaggattcttacggaggcaaattcgatcgtagccagagttttgtgggagagattggagatctgtatatgtgggactctgtgttgccccctgaaaacatcctatccgcgtatcaggggacccccctcccagccaacatcctcgattggcaagcactcaactacgagatcagagggtatgttattattaagcctctggtatgggtgtag

SEQ ID NO: 119391 - DNA, 669 bp, Artificial Sequence
  derived and/or modified sequence
atgaacaagccactcttgtggatctcggtccttacttcgctccttgaggcattcgcacataccgatctctccggaaaggtctttgtgttcccacgagagtccgtgactgaccatgtcaatctgattacgcccctggagaaacccttgcaaaacttcaccctctgtttccgcgcctactcagatctgtcgcgggcctacagcctctttagctacaatactcagggtagagacaatgaactgcttgtgtacaaggaacgcgtgggagaatacagcctttacatcgggcgtcacaaggtaacctcaaaggtcatcgaaaagtttcctgcgccagtgcacatttgcgtttcatgggaaagttcctctgggattgccgagttttggataaatggaactcctcttgtgaagaaggggctgaggcagggctacttcgttgaagcacaacctaagatagtattgggacaggagcaagattcgtacggtggaaagtttgataggtcccaatcgtttgtcggtgaaattggcgatttgtatatgtgggactcagtgctcccgcctgagaacattttgtccgcataccaaggaactccgctgcccgcaaatatccttgactggcaggcccttaactacgaaattagaggctacgtgatcattaaacccctggtgtgggtg

SEQ ID NO: 119392 - DNA, 669 bp, Artificial Sequence
  derived and/or modified sequence
atgaataaaccactgctctggatttcagtgctcactagtctgctagaagcatttgctcatactgacctttcagggaaggtttttgtgttccctagggaaagtgttaccgaccacgtcaacctgattaccccgctcgagaagccgctgcagaacttcaccctgtgttttcgggcatactccgatttatccagagcctattcgctgttctcctataatactcaggggcgagacaatgagctgctcgtgtataaagaaagagtaggggagtactccctatacattggccggcataaagtgacatctaaggttatcgagaagtttcccgcacccgttcacatctgtgtatcatgggaatcgtcgtcaggaatagcagagttctggattaacggaaccccactagtcaaaaagggtttgaggcagggatacttcgtcgaagcccaaccaaagatagtgcttggacaggagcaagactcttatggaggaaagtttgatcggtcacagagcttcgtgggggagattggcgatttgtatatgtgggatagcgtattaccgccggaaaatattttgagcgcttatcagggaactcccctccccgctaacatcctggattggcaagcactcaattacgaaataagagggtacgttatcataaagccattggtctgggtc

SEQ ID NO: 119393 - DNA, 669 bp, Artificial Sequence
  derived and/or modified sequence
atgaacaaacccctgctctggatctccgtcctgacctccctgctggaagcattcgcccacaccgacctgtcgggcaaggtgttcgtgttccccagggaatcagtcaccgaccacgtcaacctcatcactccactggaaaagccgctgcaaaactttacgctttgctttcgggcatactcggatttgtcccgggcatattcactgttttcgtacaacactcagggaagagataatgaactcctggtctacaaggagcgggtcggagagtactcgctttacatcggacgacacaaggtgacgagcaaggtgatcgaaaagttcccggctccggtgcacatctgcgtgtcgtgggagtcgtcatcaggtatcgccgagttctggatcaatgggaccccactggtgaagaaggggctgcggcaaggctacttcgtcgaggcccagccaaagatcgtgctgggccaggaacaggattcgtacggaggaaagttcgaccggtcccaatccttcgtgggtgagatcggggacttgtacatgtgggactcggtgctgccgcctgaaaacattctctccgcttaccagggcaccccgctgccagcgaatatccttgattggcaggcactgaattacgagattcgaggctacgtgatcatcaaaccgctggtgtgggtc

SEQ ID NO: 119394 - DNA, 669 bp, Artificial Sequence
  derived and/or modified sequence
atgaacaaaccactactctggatcagcgtattaactagtttactggaagctttcgcccatacggacctttcaggcaaggtgtttgtattcccccgcgagagtgtcaccgaccatgttaatttgataactccgttagagaagccgctgcagaatttcacactgtgctttagagcctactctgacctcagccgggcttactctcttttttcatataatactcaaggtcgggataacgaattgctggtatacaaagaacgagtaggggagtattccttgtacataggtcgacataaagtgacatccaaggtgattgaaaagttccctgcgccagtgcacatctgtgtaagttgggagagcagctccggcatagctgagttttggatcaacggcacacccttggtgaagaaaggcctgagacaggggtatttcgtggaggcccagccaaagattgtcctgggtcaagagcaggactcatacggcggtaaattcgataggtcccaatcttttgtcggggaaattggagacctgtacatgtgggattctgtcttgccccccgaaaatatcctctccgcatatcagggcacaccccttcctgctaacattctggattggcaggcgttgaactatgagatacggggatatgtgataatcaaacctctggtgtgggtt

SEQ ID NO: 119395 - DNA, 669 bp, Artificial Sequence
  derived and/or modified sequence
atgaataagcctttgctctggattagcgtccttacctcactgctggaagcattcgcacatactgacctgtccggaaaggtgttcgtgtttccgcgggagtccgtcaccgaccatgtgaacctgatcacgccgttggaaaagccgcttcagaactttaccctgtgcttccgcgcgtactcggacctcagcagagcctactccctctttagctacaatactcaggggcgggataatgagcttctggtgtacaaggagcgcgtgggagagtactccctgtacattggacgccacaaggtcacttccaaggtgattgaaaagttccccgcaccggtgcatatctgcgtgtcgtgggagagcagctccggaatcgctgagttttggattaacgggaccccgctggtgaagaaaggactgcggcaaggatacttcgtggaagcccagccgaagatcgttctgggccaggaacaagattcgtacgggggcaagtttgaccgcagccagtctttcgtgggagaaatcggtgacctctacatgtgggacagcgtgttgccaccggagaacatcttgtccgcttatcagggcaccccgctgccggccaatatccttgattggcaggcgttgaactacgaaattagaggttacgtgatcatcaagcctctggtgtgggtc

SEQ ID NO: 119396 - DNA, 669 bp, Artificial Sequence
  derived and/or modified sequence
atgaacaagccgctcttgtggatctccgtcttgacctcgctgctggaggccttcgctcacacggacctctctggaaaggtgtttgtctttccgcgcgaatcggtgacggatcatgtgaatcttattactccgctcgagaagccccttcaaaactttaccctctgcttcagggcatacagcgatctgagtcgcgcgtactcgctcttctcgtacaatactcagggtagagacaatgaactgctggtctacaaagaacgggtgggagaatatagcctgtacattggacgccacaaggtgacctccaaggtgatcgagaagttcccagccccggtacatatatgtgtctcttgggaatcctcatcgggcatcgctgaattctggatcaacggaaccccgcttgtcaaaaagggcctccggcagggttacttcgtggaggcccagcccaaaatcgtgctcggacaagagcaagactcatacgggggcaaatttgatcgatcgcagtcgttcgtgggggaaattggagacttgtacatgtgggactccgtcctccccccggaaaacatactttcagcataccagggcactccactgcctgccaacatcctggattggcaggcgctgaattatgaaatcagaggttacgtgatcatcaaaccactggtgtgggtc

SEQ ID NO: 119397 - DNA, 669 bp, Artificial Sequence
  derived and/or modified sequence
atgaacaaaccgttattatggatcagtgttcttacatcactgttagaagcgtttgcccacactgatctttcggggaaagtgttcgtatttcctcgtgagtccgttacggaccatgtcaacctgattacccctcttgaaaaacctcttcagaatttcactttatgttttcgagcgtacagcgacctgtctagagcgtattccttgttctcttacaatacccaaggtcgcgataacgagctattagtttacaaagaacgcgtaggcgaatactcactttacattggacgacacaaagtcacgagcaaggtgatagaaaagttccctgctccagtgcatatatgcgtttcatgggaatcatctagtggcatagccgaattctggattaatggaacgccgttggtgaaaaaaggacttcgccaaggatattttgttgaagctcaacctaagattgtccttggccaggagcaagatagctatggcggcaaatttgatcgttctcaaagctttgtcggcgaaattggcgatctatatatgtgggactcagtgttgccgccggaaaatatcctctccgcttatcaaggcacccctctgccggctaatatcctagattggcaagctcttaattacgaaattcggggatatgtcattataaaaccgctggtgtgggtc

SEQ ID NO: 119398 - DNA, 669 bp, Artificial Sequence
  derived and/or modified sequence
atgaacaaaccactcctgtggatttctgtgctcacttccttgttggaggcattcgcccacactgacctgtctggtaaggtatttgtcttccctagggagtccgttacagatcacgtgaaccttatcacccctttggaaaagccactgcagaacttcaccctctgctttcgcgcctacagcgatctgtctcgcgcttacagcctgttttcctataatacacagggtcgcgacaacgagttgctggtatacaaggagcgcgtgggagagtattcactgtacattggaagacacaaagtcacttctaaagtaatagagaagtttcccgcccccgtgcacatctgcgtcagctgggagtcttcaagcggcatcgcagagttctggatcaatggaactcctttggtcaaaaagggccttcgccagggctactttgtcgaggcccagcctaagattgtgttgggacaagagcaggactcttacggtggtaagtttgacagaagtcaatcttttgttggtgagatcggagacttgtatatgtgggattcagtcctgccccctgagaatattctgagcgcctaccaaggaactcctttgcccgctaacatccttgactggcaggccctcaactacgagatccgcggctatgttataattaagcctttggtctgggtg

SEQ ID NO: 119399 - DNA, 669 bp, Artificial Sequence
  derived and/or modified sequence
atgaataaaccgctcttgtggatctcagtgctgaccagcctgcttgaagctttcgctcatacagacctgagcgggaaagtctttgtcttcccccgtgaatcagtgaccgaccacgtgaatttaattacacctcttgaaaaaccacttcagaattttacgctttgtttccgagcatacagcgacctttctcgtgcatactccctcttttcttacaatactcagggtcgtgataacgaactattggtttataaggaacgagtaggtgagtattcactttacataggaagacataaggtcacctcgaaagttatcgagaagtttccagcccctgttcatatctgcgtcagctgggagtctagctctggcattgcggaattttggattaatggtaccccgcttgtgaagaaaggcttgcgccagggttacttcgttgaggcgcaacccaaaatcgtgctgggtcaggaacaggactcttacggcggtaaattcgatcggtctcaatccttcgtcggcgagattggcgacctttacatgtgggactcggttctgcctccagagaacattctctcagcgtaccagggcacccctcttcctgcaaacatcttagactggcaagccttgaactatgagatcaggggctacgttattattaagccacttgtatgggtc

SEQ ID NO: 119400 - DNA, 669 bp, Artificial Sequence
  derived and/or modified sequence
atgaacaaaccgctcttgtggatttcggtgctaacgtccctgcttgaggcgtttgctcacacagatctgtcaggcaaagtgtttgtctttccacgagaaagtgtgactgaccatgtgaatttaataacacctctggaaaaacctctacagaacttcacactttgtttccgcgcgtatagcgacttatcacgtgcctatagtctcttttcttataacacacaaggaagggataacgagctcctcgtgtataaagagagggtcggcgagtacagcctgtacatcggcaggcataaggttacgtccaaggttattgaaaagtttccagcacctgtccacatctgcgtcagctgggagtcaagttccggcatcgccgaattctggatcaatggcacccccctcgtgaaaaaaggcctgaggcagggttatttcgtagaagctcagccaaaaattgtgctggggcaggaacaggacagttacggagggaaatttgaccgaagccagagcttcgtcggagaaatcggcgatctctacatgtgggacagtgtgctgcctcctgagaatatcctctcagcatatcaaggcacacctcttcccgctaatatccttgactggcaggctctcaactacgagataagaggatacgttatcattaaaccgctggtctgggtt

SEQ ID NO: 119401 - DNA, 669 bp, Artificial Sequence
  derived and/or modified sequence
atgaataaacccctgctttggatcagcgtgcttacctccctgctggaagcatttgcacacaccgatctgtcaggaaaggtgttcgtgtttccgcgcgagagcgtcacggatcacgtgaacctcatcactcctctcgaaaagcctttgcaaaacttcacgctttgcttccgggcctacagcgacctgtcccgagcatactcgctgttctcatataacacccaggggcgcgataacgagctgcttgtctacaaggaaagggtgggggaatacagtctgtacatagggcggcataaagtcacctccaaggtgatcgagaagttccccgcgccagtgcatatttgcgtgtcttgggaatcatcaagtggaatcgctgaattttggatcaatggaaccccgctggtcaagaagggactgcggcagggttatttcgtggaagcccagccgaaaattgtcctgggacaagaacaggattcttacggaggcaagttcgaccgtagccagtcctttgtgggagaaattggcgacctttacatgtgggactcggtgttgccaccggagaatatcctgtcagcctaccagggaactccgcttccggctaacatccttgactggcaagcgttgaattacgagatcagagggtacgtgattatcaaaccactggtttgggtc

SEQ ID NO: 119402 - DNA, 669 bp, Artificial Sequence
  derived and/or modified sequence
atgaacaaaccattgctttggatctcggtgctgacatctctgcttgaagcattcgctcatactgatctgagcgggaaggtattcgtcttcccgagggagtctgtgacggatcacgtgaacctcataacccctctcgaaaagccgcttcagaactttacactgtgcttcagggcttactccgatctctcaagggcctacagcctgttcagctacaatacacagggtcgggataacgaactgcttgtgtataaggagcgagtgggcgaatattcactgtatattgggaggcacaaggttaccagcaaggtcatcgaaaagttcccagccccagtccacatatgtgtgtcttgggagagctcttctggtattgcagaattttggatcaatggaacacccctcgtcaaaaaagggctgcggcaaggttacttcgtggaagcacaacccaagattgtgctgggccaagagcaggactcatacggaggcaagtttgaccggagccagtcttttgtgggagagatcggcgacctttacatgtgggatagtgtcttgccacctgagaatattctctctgcatatcaaggcacccccctgcccgccaatatcctggactggcaagcactgaactacgagatcaggggatatgtaatcatcaagccccttgtgtgggtg

SEQ ID NO: 119403 - DNA, 669 bp, Artificial Sequence
  derived and/or modified sequence
atgaataagccactgctctggatatcggtcctgacttcattgctcgaggcctttgcacataccgacctgtccgggaaagtctttgtctttcccagggaatcagtgactgatcacgtcaatctgattacccctctggagaagcccctgcaaaacttcacgctttgctttagagcatactccgatctgtcccgggcctattcacttttttcgtacaatactcaaggtagagataacgagctcctcgtgtacaaggaacgggtgggtgaatactcgctttacattggtcgccataaggtgaccagcaaggtgattgaaaagttccccgcacctgtccatatttgtgtcagctgggagtcgtcgtccgggatcgcagaattttggattaacggaaccccgctggtgaagaaaggactgcgccagggatacttcgtggaagcacaacccaaaatagtgcttgggcaagaacaagactcctatggcggtaagttcgacagatcacagtcatttgtgggcgagatcggggacctgtacatgtgggattccgtccttccgcccgaaaacatcctctcggcatatcagggcaccccgctgccggcaaacattctggattggcaggccctcaattacgagattcgtggttacgtgatcatcaaacctctggtctgggtc

SEQ ID NO: 119404 - DNA, 669 bp, Artificial Sequence
  derived and/or modified sequence
atgaacaagcctctgctctggatctcggtgctgaccagccttctggaggcctttgctcataccgatctgtcaggaaaagttttcgtgtttcccagggaatccgttacagaccacgtgaacctcattacccccttagaaaagcccctccagaactttaccttgtgcttcagagcttactcagacctatctagagcctactctctcttcagctacaacacccagggcagagacaatgaacttctcgtatataaagaaagagtcggcgagtactccctctacattggcaggcacaaggttacatccaaggtgatagagaaatttccagccccagtccacatctgcgtgtcatgggagtcaagtagtggcattgcagaattctggatcaatggaacccccctcgttaagaagggacttcgtcaaggttacttcgtcgaggcccagcccaaaatcgtcttagggcaggagcaggattcgtacggaggaaaatttgacagatctcaaagctttgtcggggagattggcgatttgtatatgtgggattctgtgcttccccctgaaaacatcttgtccgcatatcaagggacccctttgccagccaacatcctggactggcaagctctgaactatgaaatcaggggatatgtgattattaaaccactggtgtgggtg

SEQ ID NO: 119405 - DNA, 669 bp, Artificial Sequence
  derived and/or modified sequence
atgaacaaacctctactgtggatttccgttctgacaagtttactggaggcctttgctcatactgacctgtcaggcaaggttttcgtgttcccacgggaatctgttacggatcacgtgaacctcatcactccacttgagaagcccttgcagaactttaccctttgctttagagcctactctgacctcagccgtgcatattccctgttttcctacaatacacagggcagagacaatgagcttctcgtttacaaagagcgcgttggagagtactccctgtatattgggcggcataaggtcacctcgaaggtgattgaaaaatttccagcacccgtgcacatatgtgtgtcttgggaatcatctagcggcatagccgagttttggataaacgggacaccactcgtgaagaaggggttgagacagggctactttgtggaagcccagcccaagatcgtcttgggtcaagaacaggactcatacgggggaaaattcgacagatcacagtcttttgttggggagattggagatttatatatgtgggattccgtgctgcctcctgaaaacatcctgagtgcctaccagggcacccctctccctgccaacatattggattggcaggctctcaattacgaaattagggggtatgtcatcataaaacccctggtttgggtt

SEQ ID NO: 119406 - DNA, 669 bp, Artificial Sequence
  derived and/or modified sequence
atgaataagcccctcctttggatctccgtgttgacaagtctcctagaagcctttgcccatactgacctctcaggaaaggtgtttgtattcccacgcgaatctgtgacagatcacgtgaatctcatcacacccctcgaaaaaccactgcagaacttcacactctgctttcgggcctattcagatctctcacgcgcttactcgctcttttcgtataacacacaggggcgggacaatgaactgctcgtgtataaagaaagggtaggggaatacagtctatatatagggcggcacaaagttacttctaaagttatcgaaaagttccctgcacccgtgcatatctgcgtgtcttgggaatcctccagtggaatagccgaattttggattaatggaactccgctcgtaaagaaaggactccggcagggatattttgtcgaggctcagcctaaaatcgttctgggacaggaacaggattcttatgggggaaagttcgacaggtctcagtccttcgtgggagaaatcggagatctatatatgtgggattctgtgctcccacctgaaaatattctcagtgcctaccaggggacacccctccctgctaacatacttgattggcaggctctgaattatgaaatacgggggtatgtgatcataaaacccctggtttgggtt

SEQ ID NO: 119407 - DNA, 669 bp, Artificial Sequence
  derived and/or modified sequence
atgaacaaacctctgctttggatttctgttctgacatctttgttggaggctttcgctcatactgatttgtctggtaaagtttttgttttcccaagggaaagcgttactgatcatgttaatttaattactcctttagagaagccactacaaaattttacattgtgtttccgagcttactcggatttgtccagagcttacagtttgttcagctacaacactcaaggacgagataatgagcttcttgtatataaggaaagggttggtgagtattcattatacattggtaggcataaagttacatcaaaggtgatagagaaattccctgctcccgtgcatatctgtgtttcttgggaatcgtcttcgggtatcgctgagttctggattaatggaactcctttagtcaaaaaagggttaaggcaaggctattttgtggaggcacagccaaagatagttctaggtcaagagcaagattcgtacggcgggaaattcgatcgctcacagtcattcgtgggggaaataggggatctttacatgtgggattcagtactccctcccgaaaacatactcagcgcttatcagggaactcccttgcctgcaaacattttggattggcaggctctcaactacgagattaggggttatgtaatcataaagccattggtttgggtg

SEQ ID NO: 119408 - DNA, 669 bp, Artificial Sequence
  derived and/or modified sequence
atgaataagcccctcctatggatatctgtcctaacttccctcctcgaagcttttgctcacactgatctgtccgggaaagtgttcgtttttccccgcgaatccgtgacagatcatgtaaatttgataactccactggaaaaaccactccagaacttcacactctgctttagggcttacagtgatctcagtagggcgtattccctcttctcttataacacacaggggagagacaacgagctgcttgtgtataaagaacgtgttggagaatattctctgtatatcgggaggcataaagtgacatcaaaggtgatcgaaaaatttcccgctcccgtgcatatatgtgtatcttgggagagtagttcagggatagcagaattttggattaacggaacaccactggtgaagaaaggactcaggcaggggtacttcgtggaagctcagccaaaaatcgtcctggggcaggaacaggattcttatggagggaaatttgatcgctcacagtcgtttgtcggagaaataggagatctgtacatgtgggactccgtgcttcctcccgaaaacatcctttctgcttatcaaggaactcccctacccgctaacattctggattggcaggctctcaactacgaaataagaggatacgttattattaaacccctggtatgggtt

SEQ ID NO: 119409 - DNA, 669 bp, Artificial Sequence
  derived and/or modified sequence
atgaacaagcctctcttatggatctctgtgctgacgagccttctggaagcattcgcccacactgatctgtcaggcaaggtattcgttttcccccgagagtctgttactgatcacgtcaatctgataacacctctagaaaaaccgctgcagaattttacattgtgtttccgggcatacagcgatctctcacgggcctactccctgttcagctataatacccagggcagggacaatgagctactcgtgtataaggagcgtgtgggcgagtattcactctacatcggcaggcataaggtaacgagcaaggttattgagaagttccccgcacctgtgcatatctgtgtgagctgggaatccagctccggcattgcagagttctggattaatgggactcccctggtgaaaaaaggtctgcggcaggggtatttcgtggaagcacagcccaagattgtgctcggacaagagcaggattcctatggtggcaaatttgaccggtcccagagcttcgtgggagaaatcggcgacctgtatatgtgggatagtgtcctgccaccagagaacatcctgtccgcctaccagggaacccctttgcccgctaacatattggattggcaagctttgaactacgagatcagggggtatgtcattatcaaaccattggtgtgggta

SEQ ID NO: 119410 - DNA, 669 bp, Artificial Sequence
  derived and/or modified sequence
atgaacaagcctttactgtggatcagtgtgctcacttctctgctcgaggcatttgcgcacaccgacctttcggggaaagtgtttgttttccctcgggaatcagtcacggatcacgtgaacctcattacccccttagagaaacctctccagaatttcaccctgtgctttcgggcttactcggacctgtccagggcctacagcctgttctcttataacacccagggcagggacaacgaactcctggtgtataaggagagagtcggagaatattctctgtacattgggaggcataaggtaacatctaaggtgattgagaaattccccgctcctgtccatatctgtgtttcctgggaaagcagcagtggtatcgcagaattctggatcaacggcacccctctggtcaagaaggggcttagacagggttatttcgtggaggctcaacccaaaatcgtcctcggccaggagcaggatagctatggtggtaaatttgacaggagtcagtcctttgtaggggaaattggtgacctgtacatgtgggactcagtactcccacctgaaaacatcttgagcgcttatcaaggaactcctctgccagccaacattctggactggcaggctctaaactatgagatccggggatacgtgatcatcaagccattagtgtgggtc

SEQ ID NO: 119411 - DNA, 669 bp, Artificial Sequence
  derived and/or modified sequence
atgaataagcctctgctttggatttctgtgcttaccagcctcctggaagcctttgcacacacggatctctccgggaaagtttttgtctttccacgggagtcagttactgatcatgtcaacctgatcaccccactcgagaagccattgcaaaacttcactttgtgttttagggcctattccgatttgtccagagcatactcgctcttctcatacaatactcagggacgagataacgaacttctcgtgtacaaagaacgggttggcgagtacagcctgtacatcggtaggcacaaggtcacctctaaggtcattgaaaagtttcctgccccggtgcatatttgcgtgtcttgggaaagtagttccggtattgcagagttttggataaatgggactcccctcgtgaagaaaggccttaggcaaggatacttcgtcgaagctcagcctaagatcgtccttggtcaagaacaggactcgtacggagggaagttcgacagatcgcaatccttcgtcggtgagattggtgatctgtacatgtgggatagcgtgttgcctcctgaaaacatcctgagcgcgtaccaaggaacccctctgcccgcaaacatattggattggcaggcgcttaactacgagatccgaggctatgtgatcatcaaaccgctggtgtgggtg

SEQ ID NO: 119412 - DNA, 669 bp, Artificial Sequence
  derived and/or modified sequence
atgaacaagcctctcctctggattagcgtgctgactagtctgctagaggcctttgctcataccgacttaagcggtaaggtgttcgtatttccacgggagtccgttacagaccatgtgaacttaatcaccccgctcgaaaaaccactccagaattttaccctgtgtttcagagcatactcagatctgagtagggcttactctttgttctcttataatacgcagggtagggataatgaactgctggtgtataaggagcgggtgggggagtactctctgtacatcggcaggcataaggtcacctccaaagtcatcgagaagtttcctgcacccgttcacatttgtgtttcatgggagagctcctcaggaatcgcggaattttggataaatgggacgccactggttaagaagggcttgcggcagggttactttgtggaggctcaacccaaaatcgtcctgggccaggagcaggactcttacggcggaaagttcgatcggagtcagtcgtttgttggagagatcggagatctatatatgtgggatagtgtcttgcccccggagaacatcctatcagcgtaccaagggacgcccctcccggcgaacatcctggattggcaggctctgaactacgaaatccgaggctacgtgatcatcaagcccctcgtatgggtg

SEQ ID NO: 119413 - DNA, 669 bp, Artificial Sequence
  derived and/or modified sequence
atgaataaaccactcctgtggatctccgtgctgacctccttgctggaagcatttgctcacaccgacctcagcgggaaagtgtttgtgtttccccgcgagtccgtgactgaccatgttaacctcataactcctctcgaaaaacctcttcaaaacttcacgctttgttttagagcatactcggacctctcacgcgcatattctcttttctcctacaatacccagggtagagataacgaactgcttgtctacaaggagagggtgggagagtacagcctctacatcggccgccataaagtcactagcaaggtgatagaaaagttccctgcaccagtgcacatttgcgtgtcgtgggagagcagcagcggaatcgcggagttttggatcaacgggacgcctcttgtcaagaagggtctgagacagggatactttgtcgaagcacagccaaaaatcgttctgggacaggagcaagactcctatgggggaaagttcgacaggtcgcaatcgtttgtgggggagattggggatctttacatgtgggattccgtattgccccctgaaaacattctgtccgcataccagggaacccctctgccggcgaacatactggattggcaagcactgaactatgagattcgcggttacgtgattatcaagcctcttgtgtgggtg

SEQ ID NO: 119414 - DNA, 669 bp, Artificial Sequence
  derived and/or modified sequence
atgaacaaaccattactgtggatcagtgtgttgacaagcttgctggaggcattcgcacatacagatttgtcgggtaaggtgtttgttttcccaagagagagcgtgaccgatcatgtgaatctgatcacgcccctagagaagccattacaaaactttaccctctgtttccgagcgtattctgacctgtcgagagcctatagtttgttctcatacaacactcagggtagggataacgagctgctcgtatataaggagagggtcggagaatatagcctgtacataggccgccataaggtcacttccaaggtcatcgagaagttcccagcccccgtgcacatttgcgttagctgggagtcctcgtcgggaatagccgagttctggatcaatggcaccccccttgtgaagaagggactgcgacagggctattttgtggaagcccagcccaaaatcgtgctgggccaggaacaggatagttacggcggaaagtttgatcgcagccaaagttttgttggtgagatcggcgatctctatatgtgggactcggtacttccaccggagaatattttgtccgcttaccagggaactcccctgcctgcaaatatactggactggcaggcactgaactacgagatccgaggttacgtcattatcaagcccctcgtgtgggtg

SEQ ID NO: 119415 - DNA, 669 bp, Artificial Sequence
  derived and/or modified sequence
atgaacaagcctctcctctggatctccgtgctgacgagccttctcgaggctttcgctcacaccgatctatccggaaaggtcttcgtcttcccgcgtgagagtgttactgaccacgtgaatctcatcacgccgctcgaaaaacccctacagaactttaccttgtgttttcgggcctactcggacctctcccgtgcgtatagcctattcagttacaacacgcagggccgcgacaacgagttactggtttataaggagcgtgtcggcgagtactctctctacattggccgtcacaaggtgacctccaaggttattgagaagttcccagcccctgttcacatctgtgtctcctgggagagttcgagcggtatcgctgagttttggatcaacggtacacccttggtcaagaagggacttcgtcagggttattttgtagaggcccagcccaagatagtactaggacaggagcaggactcttatggcggtaagttcgatcgttcccaatccttcgttggtgagatcggcgacctctacatgtgggatagtgtgctccctccggaaaacattctgtccgcatatcagggcacacccctccctgccaacattctagactggcaggcgctgaactatgaaattcgtggctatgtgatcattaagcctctcgtatgggtg

SEQ ID NO: 119416 - DNA, 669 bp, Artificial Sequence
  derived and/or modified sequence
atgaacaaacctctgctgtggatcagcgtgcttactagcctgctggaggccttcgcgcataccgacttgagcggaaaggtatttgtctttccgcgagagtcagtgaccgaccacgtcaatctcatcactccgctcgaaaagccactgcagaatttcaccctgtgctttagggcctactccgatttgagccgggcctactccctgttctcatataacacgcaaggacgcgacaatgagttgcttgtgtacaaagagagagtgggtgaatacagcctctacatcggcagacacaaggtgacttcgaaagtgatagagaaattccccgctccagtgcatatttgtgtgtcctgggagagctcctccggaatcgcggagttctggatcaacggaactccactcgtcaagaagggactcagacagggctatttcgtggaagcccagccgaagatcgtgcttggccaggaacaggactcatacggcgggaagttcgatcgctcgcagtcgttcgtaggtgaaattggagatctgtacatgtgggactctgtcctgcccccagagaatatcctgtccgcctaccaggggactcctctcccggccaacatcctcgactggcaggcattgaattatgaaatcagagggtacgtcattatcaaaccactcgtgtgggtc

SEQ ID NO: 119417 - DNA, 669 bp, Artificial Sequence
  derived and/or modified sequence
atgaataagcccttgctctggatcagtgtattgacaagcctccttgaagccttcgctcataccgacctgtccggtaaagtatttgtcttcccccgagagtccgttaccgatcacgtgaacctcataaccccactggaaaaacccctgcaaaacttcacactctgctttcgcgcctactctgacctgtcccgcgcctattctttgttttcatataatacacagggccgagacaacgagctcctggtttacaaagaaagggtaggagaatattccctgtacatagggcggcacaaagtcacttccaaggttattgagaaattccccgcgccagtccacatctgcgtgagctgggagtcaagttctggaattgcagagttttggattaatggtactccgttggtcaagaagggtctgagacagggttacttcgtggaggctcaacctaagatagtgctcggacaagagcaggactcatatggcggcaagttcgacaggtcccagtcatttgtcggagaaataggagatctctacatgtgggatagcgtactcccccctgagaacattctgagtgcataccagggcaccccactgcccgcgaacatactggactggcaggctctcaattatgagatcagggggtatgtgatcattaagcctctggtgtgggtc

SEQ ID NO: 119418 - DNA, 669 bp, Artificial Sequence
  derived and/or modified sequence
atgaacaagccactgctctggatttccgtgctcacgtctctgttggaggcgttcgcccatactgacttgtctggcaaggtgttcgtcttcccacgagagagcgtcaccgatcacgtgaacctcattacacccctcgaaaaacccctgcagaattttacactctgctttcgagcgtacagtgacttgagcagagcatatagtctgttttcatataacacacagggtcgcgacaacgagctattggtttataaagaacgagtgggcgaatatagcctttacatcgggcgccacaaagttacaagtaaggtcatcgaaaagttcccggctccagtacatatttgtgtctcttgggagagttcctctggaatcgcagagttctggatcaatggtacaccactcgtgaaaaagggactgaggcagggatactttgtcgaggcccaacctaagatcgtgttgggccaggagcaagactcgtacggcgggaagtttgacagaagtcagagttttgtgggcgaaattggcgacctgtatatgtgggacagtgtgttgccccctgagaatatcttatccgcctaccaaggtactccactccctgctaacatcttagattggcaagcacttaactacgaaatcaggggatatgtgatcattaaacctttggtctgggtt

SEQ ID NO: 119419 - DNA, 669 bp, Artificial Sequence
  derived and/or modified sequence
atgaacaagcctctcctgtggatctctgtgctcaccagcctgctggaagccttcgcgcataccgaccttagtggaaaagtgtttgtcttccccagggaatccgtaactgatcacgtcaacttaataacccctctggagaagcctctccagaacttcacactctgtttcagagcctattctgatttgagcagggcatattctctattctcctataacactcaggggcgagataacgagttgctcgtgtataaagagagagtcggagaatacagcctctacatcggacgccacaaggttactagcaaggtgatcgaaaagttccccgcccctgtacatatctgcgtgtcttgggagtcttctagcggaattgcagaattctggatcaatgggacgcctttagtgaagaaggggctcagacagggctacttcgtggaggcccagcccaaaatcgtgttaggacaagagcaggactcatatggcggtaagttcgaccgaagccagtccttcgttggcgaaatcggcgacctctacatgtgggactctgtgttgccgccagagaacattctctcagcataccaggggacacctctgcccgctaacatcctcgattggcaagccctcaactatgagattaggggatatgtaattattaagcctctggtttgggtt

SEQ ID NO: 119420 - DNA, 669 bp, Artificial Sequence
  derived and/or modified sequence
atgaataagcccctgttgtggatttcagttctgacatcgttactcgaggccttcgctcataccgacctttctggaaaggtgttcgtttttccaagagagtccgtcactgatcacgtgaaccttatcacacctctggagaaacctttgcaaaatttcaccttgtgttttcgcgcgtactccgatctatctagagcgtattctctattctcttataacacacagggtagagacaatgaactgcttgtgtataaagagcgtgttggcgagtactctctttacatcggcagacacaaggtgacttcaaaagtcatcgaaaagtttcccgcaccggtccacatttgcgtctcgtgggagagcagctctggtatcgctgagttttggatcaacggaacccctctggtcaagaaaggtctaagacaaggttattttgtggaggctcaacctaagatagtgctgggacaggaacaggattcttatggcgggaagtttgaccggtcccagtctttcgtgggagagatcggagatttgtacatgtgggactcagttttgccacctgagaacatcctgagtgcatatcaaggcacaccactgcccgcaaatatcctggactggcaggccttgaattatgaaataaggggctatgtgattatcaaacctctggtctgggta

SEQ ID NO: 119421 - DNA, 669 bp, Artificial Sequence
  derived and/or modified sequence
atgaataagcccctcctgtggatcagcgtcttgacgtccctcctggaagcgttcgcccataccgacttgtcaggaaaagtgttcgtgtttccgcgggaatcagtgactgatcacgtgaacctcatcaccccgctggagaagccactgcaaaatttcactctttgtttcagggcctattcggacctgtcgcgggcgtacagcctcttttcgtacaacacccaaggacgcgataacgaactcctggtctacaaggagagagtcggagaatactccctttacattggccgccataaggtcaccagtaaggtgatcgaaaagtttccagcacctgtccacatctgcgtgagctgggaatcttcgtcagggatcgctgaattctggatcaacggaactcctctggtgaaaaagggattgagacaaggatacttcgttgaggcccagccaaagatcgtgctcggtcaggaacaggatagctacggcggcaaattcgaccgctcccagtccttcgtcggagagattggtgacctgtacatgtgggattcggtgctgcctccggagaatatcctgtccgcataccaggggactccgctgccggctaacatcctggactggcaggccctcaactacgagatccggggctacgtgatcattaaacccctggtgtgggtg

SEQ ID NO: 119422 - DNA, 669 bp, Artificial Sequence
  derived and/or modified sequence
atgaacaagcccctcttgtggatctcagttcttacctccctgcttgaggccttcgcccacacggacctctcgggaaaggtctttgtctttccaagggagtcggtgactgatcatgtgaatctgatcaccccgctggaaaaacctctgcagaactttactctgtgttttcgcgcatactcagatctgtcccgggcctactcgctgttctcctacaacacgcagggacgcgacaacgaactgttggtctacaaggagagggtgggagaatacagtctgtacatcggccggcataaggtcacctcaaaagtgattgaaaagttccccgctcctgtgcacatttgcgtgtcatgggagagctcatcaggcatcgctgaattctggatcaatggtaccccgttggtgaagaaaggtctgaggcaaggatatttcgtggaagcccagccaaaaatcgtgctcggacaagaacaggactcctacggcgggaaattcgacagatcccagtctttcgtgggcgaaatcggagatctgtacatgtgggactccgtgttgcccccggagaacatcctgtcagcgtaccagggaactccactcccggccaatatccttgattggcaggccctgaactacgaaatcagagggtacgtgattatcaagcccctggtgtgggtc

SEQ ID NO: 119423 - DNA, 669 bp, Artificial Sequence
  derived and/or modified sequence
atgaataaaccactcctgtggatttcagtactgacatcattactcgaggcttttgcacataccgatttgagtggcaaagtctttgtcttcccgcgcgagtccgttactgatcacgtgaatctgatcacacctcttgagaagcctctccaaaactttacactgtgctttcgggcttattccgacctgagtagggcgtattcactgttctcttataatacccagggtcgggacaatgagctactcgtgtacaaagagcgggttggggagtattcgctgtatataggaagacacaaagtgactagtaaggtgatcgagaaatttccagccccagtgcacatctgtgtaagttgggagagctcatccggcatcgcagaattttggatcaatggaacaccgctcgtcaagaagggcctccggcaggggtacttcgtggaggcgcagcccaagatcgtgctgggtcaggaacaggattcctatgggggcaaattcgatcggtcccaaagctttgtgggggaaatcggggatctatatatgtgggattccgttctaccccctgaaaatatcctgtcagcgtaccagggtaccccgctccctgctaacatactggattggcaggcgctgaactatgagattagggggtacgtgattattaaaccactggtgtgggtg

SEQ ID NO: 119424 - DNA, 669 bp, Artificial Sequence
  derived and/or modified sequence
atgaataaacccctgctgtggatctctgtgctgactagcctgctggaggcattcgctcacaccgaccttagtggtaaagtattcgtcttccccagggaaagcgtgacggatcacgtcaatctcatcactcctctggagaaacctttgcaaaacttcaccctttgtttcagggcttattccgacttgagccgcgcatacagcctcttttcctacaacacccagggacgcgacaacgagctcctggtttacaaggagagggtgggcgaatatagcctgtacattggccgccataaagtgacgagtaaggttatcgagaaattccccgcgcccgttcacatttgcgtgtcttgggagtctagctcaggcatcgccgagttttggatcaatggtacccctttggtgaaaaagggtttgagacaaggttacttcgtcgaagcacagccaaagatcgtcctcggccaggagcaagattcttatggaggtaagttcgaccgctctcagagcttcgttggagagataggtgacctgtacatgtgggactcagtgctcccccccgagaacattctgtctgcgtatcagggtaccccattgccagccaatatccttgactggcaggctctgaactacgaaattagaggatacgtaattattaagccactcgtctgggtg

SEQ ID NO: 119425 - DNA, 669 bp, Artificial Sequence
  derived and/or modified sequence
atgaacaaaccattgctgtggatatccgtgttgaccagcctgctggaggcgtttgcccacaccgatttgtcgggcaaggtgttcgtgttcccgagggaatcggtcactgatcacgtgaatcttatcactcctctcgaaaaaccgctccagaatttcaccctgtgtttccgggcctactcggacctgtcgcgcgcatactcactcttctcgtataacacgcagggcagagacaatgagcttcttgtctacaaggaacgcgtgggtgaatattccctctacatcggcagacataaggtgacctcaaaagtgatcgaaaagttcccggcaccagtgcacatttgcgtcagctgggaatcctcgtcagggatcgcggagttttggatcaacggaacccctcttgtgaagaaggggctgagacaaggctacttcgtggaagcccaaccgaagatcgttctcggacaagagcaggactcgtacggaggaaagttcgatcggagccagtcctttgtcggagagatcggagatctgtacatgtgggactccgtgctccccccagagaacattctgtccgcctatcaggggacgcctcttcctgctaacatcctggactggcaagcgctcaactacgagatccggggttacgtgatcataaagccactggtgtgggtg

SEQ ID NO: 119426 - DNA, 669 bp, Artificial Sequence
  derived and/or modified sequence
atgaacaagccgctcctttggatctctgtgctcacctccctcctcgaagcgttcgcgcacaccgatttgtcgggaaaggtgtttgttttcccacgcgaaagcgtgactgaccacgtgaatcttatcacgccgctcgagaagccgctgcagaactttaccctctgttttcgcgcctattccgatctttcccgggcctactcactgttctcgtacaatacccaaggccgtgataacgagctgctggtctataaggagcgggtcggggagtacagtctttacatcggacgccacaaagtgacgtccaaagtgatcgaaaagttccctgctcccgtccatatctgtgtgtcatgggagagctcctccggaatcgcagagttttggatcaacggcactccgctggtgaaaaagggcctgaggcaaggatacttcgtcgaagcccagcctaagatcgtcctggggcaggagcaggactcatatggcggcaagtttgacagatcacaatcattcgttggcgaaattggagatctctacatgtgggacagcgtgcttccgccggagaacatcttgtccgcataccaggggactcccctgcctgcaaatatcctggattggcaagcactgaactacgaaatccggggatacgtgatcattaaacccctggtctgggtg

SEQ ID NO: 119427 - DNA, 669 bp, Artificial Sequence
  derived and/or modified sequence
atgaacaaaccgctcttgtggatctcggtcctgactagccttcttgaggccttcgcgcacactgacctgtctgggaaggttttcgtgttcccgcgcgaatctgtgacggatcacgtgaacctgattacccccctcgagaagcctctccaaaactttaccctttgcttcagagcctacagcgacctgtcccgggcctactccctcttctcgtataacactcagggaagagataacgaactcctggtctacaaggaacgggtcggagaatattcgctctacatcggacggcataaggtaacctcgaaggtaatcgagaagttcccagcaccggtccatatctgtgtgagctgggaatcgagctccggaatcgctgaattttggatcaatggaaccccgctggtcaagaaaggattgcgtcaaggttacttcgtggaggcgcagcctaagattgtgttggggcaggaacaggactcctacggagggaaattcgacaggtcgcagtcgtttgtgggcgagattggcgatctctacatgtgggatagtgtgctgccgcccgagaatatcctctctgcgtaccagggcacgccactgccagccaatatcctggactggcaagcactcaactatgaaattcgcggttacgtgatcatcaaaccacttgtgtgggtg

SEQ ID NO: 119428 - DNA, 669 bp, Artificial Sequence
  derived and/or modified sequence
atgaacaaacctctcctgtggattagcgtgttgacgtctctgctggaggccttcgcacatacagacctcagtgggaaagtattcgtgttccctcgggagagcgtgaccgaccacgtaaatctgataacgccacttgagaagccactgcagaacttcaccctgtgctttcgcgcatactctgacctctcaagagcatattcattgttctcctataacactcagggcagagacaacgagctcctggtgtataaagagcgagtgggagaatacagcctttacatcggcaggcacaaggttacctccaaggtcatcgagaagtttccggccccggtgcacatctgtgtttcctgggaatcgagcagtggaatagcggagttctggataaacggaaccccacttgtgaagaaaggcttgcgtcaaggctatttcgttgaagctcagcctaagattgtcttagggcaggaacaggatagctacggcggcaagtttgacaggagtcaatcctttgtaggtgagatcggtgacctgtatatgtgggactcagtgctcccaccagagaatatcctgagtgcatatcaggggacacctcttcccgccaacattctggattggcaggcgcttaattacgagatacggggatatgtgataatcaagcccttagtctgggtc

SEQ ID NO: 119429 - DNA, 669 bp, Artificial Sequence
  derived and/or modified sequence
atgaacaaaccactcctgtggatttccgttctcacatccctgctagaggctttcgcgcatactgacttgagcggaaaagtgtttgtattcccgcgcgagtccgtcaccgaccatgtcaaccttatcacgccgctggagaagccactgcaaaatttcacactttgttttcgagcatactccgacctcagtcgggcttacagtttgttctcttataatacccaaggacgagacaacgagctgcttgtatacaaggaacgagtgggagaatattccttatacatcggtcgccacaaagtgacgtctaaagtgattgagaaatttcctgcaccagttcatatttgtgtatcgtgggagtcttccagtggtatcgcagagttctggattaacgggactcctctggtgaaaaagggcctgaggcagggatatttcgtggaggctcagccgaaaatcgtactgggacaggaacaggattcatacggaggtaagtttgacaggagccaatcattcgtgggcgaaattggcgacttgtacatgtgggacagcgtgctacctccggaaaatatccttagcgcttaccaggggactcctctgccagctaacatattggactggcaagcgctgaattacgaaatcaggggctatgtcatcatcaagccactagtctgggtg

SEQ ID NO: 119430 - DNA, 669 bp, Artificial Sequence
  derived and/or modified sequence
atgaataagccccttctgtggatcagtgtgctcacctctttgctggaggctttcgctcacaccgatctctccggaaaggtcttcgtcttcccgagagaaagcgtcaccgaccacgtaaatttgatcacccctctcgagaaaccactacagaattttaccctatgcttcagggcctatagcgatctatccagggcctactccctgttcagctacaatactcaaggaagggacaacgagctgctggtgtataaagagcgtgtcggcgagtatagtctgtatatcgggaggcataaagtgacatctaaagtgattgagaaattcccggcaccggtccatatttgcgttagctgggaatcttcctctggaatcgcggagttttggatcaacggcactccgctggtgaagaagggtctgcgtcaaggttacttcgtcgaggcgcagcctaagattgtgctggggcaggaacaggacagttatggcgggaagtttgatcgctcacaaagcttcgtcggcgagatcggcgatctctacatgtgggacagcgtcctgcctcccgagaacatcctgtccgcataccaggggacacccctgcccgctaatattctagactggcaggccctgaattatgaaatccgtggttatgtgattattaaaccacttgtgtgggtt

SEQ ID NO: 119431 - DNA, 669 bp, Artificial Sequence
  derived and/or modified sequence
atgaacaaacccctgctttggatttcggtcctgacctcactgctcgaagccttcgcacacactgatcttagcggaaaggtgtttgtgttcccaagagaaagcgtgactgaccacgtgaacctgatcactccactcgagaagccactgcaaaactttactctgtgtttccgcgcttattcggatctttcccgcgcatactcgctgttttcgtacaacacccaaggacgtgataacgaacttctcgtctacaaggaacgggtgggagagtactcgctgtacattggcagacataaagtcacgtccaaggtgatcgaaaagttcccggcgccagtccatatatgcgtgtcgtgggagtcatcatccggaatcgcagagttctggatcaatggtactccacttgttaagaaggggctccggcaaggatactttgtggaagcacaaccgaagattgtccttggacaggaacaggactcgtacgggggcaaatttgataggtcccagtcctttgtgggcgaaatcggggatctttacatgtgggacagcgtgttgcctccggagaacatcctgtcggcgtaccaaggcacgcctctgcctgccaacattctcgattggcaggcattgaactacgaaatccgaggctatgttatcataaaaccacttgtctgggtg

SEQ ID NO: 119432 - DNA, 669 bp, Artificial Sequence
  derived and/or modified sequence
atgaacaaaccgcttctctggatttcagttcttacatccctcttggaggcatttgcacatactgatttgtcgggaaaagtcttcgtctttccaagagaatctgttaccgaccatgtaaaccttatcacccctcttgagaagccgctgcaaaactttactctgtgtttccgagcttactcggatctgtcacgcgcctacagccttttctcatacaacactcaaggacgcgacaacgagcttttggtgtataaggagcgtgttggggagtattcgttatatattggtcgccataaagttacttcaaaggttattgaaaaatttccagcccctgttcatatatgtgtctcttgggaatcgtcctcaggaatagcagagttttggatcaatggaacaccattggtaaaaaagggtcttagacagggatactttgtagaagcgcagccgaaaattgtcctgggacaggaacaagactcgtacggcggtaagttcgataggtcccaatcattcgtgggagaaattggagatctctatatgtgggacagtgtgctaccgccagaaaatatcttgagcgcttaccaaggaactccattgcctgccaatattcttgattggcaagcactaaactatgagatacggggttacgttataataaagccattggtgtgggtt

SEQ ID NO: 119433 - DNA, 669 bp, Artificial Sequence
  derived and/or modified sequence
atgaataaacccctgttatggatctctgtcttaacttccctgctggaggctttcgctcataccgatctgagcggcaaagtattcgtatttccacgggagagcgtgacagaccacgtgaacctgataacacctctggagaagcccctgcagaactttactctctgctttagggcttattccgacctgtcccgcgcttactcacttttttcttacaatacacagggcagagataatgaactgctggtgtacaaggaaagagtgggggaatattcactatatattggcaggcacaaagtgacatccaaagtaatagagaagttccccgcaccagttcatatctgtgtgtcctgggagagtagctccggaattgcagaattttggattaatggaacacctctagtgaagaaggggttaaggcaaggctacttcgtcgaggcgcagcccaagatcgtattgggacaggaacaagatagttatgggggaaagttcgaccgctcccagtcattcgtgggagagatcggagatctgtacatgtgggattccgtgctgcctccagagaatatcctgagtgcataccagggaactccgctccccgccaacattctggactggcaggctcttaattatgaaatacgggggtatgttattatcaagcccttggtctgggtg

SEQ ID NO: 119434 - DNA, 669 bp, Artificial Sequence
  derived and/or modified sequence
atgaataagccccttttatggatttccgttctgaccagcctcctcgaggccttcgcacacactgacctttccggaaaggtctttgtgttccctcgcgaaagtgtgaccgaccacgtgaatctgatcaccccattggaaaagccccttcaaaatttcactctgtgcttcagagcctacagcgatcttagccgagcatacagcttattctcatataacactcaagggagggacaacgagctcctagtttacaaggagcgggtcggggaatactcactctatatcggcagacataaagtgacctcaaaggtgatcgaaaagttccctgcgcccgtgcacatttgtgtttcgtgggaatcgtccagcgggatagctgagttctggattaacggcaccccgttagtgaagaagggattgcgtcagggctattttgtggaagcgcaaccaaagatcgtgctaggacaagaacaggatagctacgggggtaaatttgacaggagccagagctttgtgggcgaaattggtgatctctatatgtgggattccgtccttcctccagaaaacatcttatccgcctaccaaggcacgccactgcccgcaaatatacttgattggcaggccctgaactatgaaatccgggggtatgtgattatcaagccgctggtgtgggtc

SEQ ID NO: 119435 - DNA, 669 bp, Artificial Sequence
  derived and/or modified sequence
atgaataaaccgctgctgtggatctccgtgctgactagcctcctggaggccttcgctcacactgacctctccggaaaggtgttcgtttttcctagagagtcggtcactgaccatgtgaatcttatcaccccattggaaaagccgctgcagaacttcactctgtgcttccgcgcgtatagcgacctgtcaagagcgtactcgctgttttcgtacaacacccaaggccgcgacaatgaactgttggtgtacaaagagcgcgtcggagaatattcattgtacattggtcggcacaaggtgaccagcaaggtgatcgaaaagttcccagcccccgtgcacatctgcgtgtcgtgggaatcctcatccggtatagctgaattctggatcaacgggaccccactcgtgaagaaggggctccgccagggatactttgtggaggcgcaacctaagatcgtgctgggtcaagaacaggactcctacggcggaaagttcgatcgctctcaatcgttcgtgggagaaataggagatctgtacatgtgggatagcgtcctcccaccggagaacattcttagcgcctaccaggggacgccactgccggcgaatatcctggattggcaggccctcaactacgagattaggggatacgtcatcattaagcccttggtgtgggtc

SEQ ID NO: 119436 - DNA, 669 bp, Artificial Sequence
  derived and/or modified sequence
atgaacaaaccgctcttgtggatctccgtgctcacgtctctgttggaagcttttgctcacaccgatctgagcgggaaagtctttgtcttccctagagaatccgtcacggaccatgtaaatctaatcactccgctcgagaaaccattacagaatttcaccctttgtttccgggcttatagcgacctgagccgcgcgtacagtctgtttagctataatactcagggacgcgataacgagcttctggtctataaggaacgggtgggggagtattctctgtacattggaagacacaaagttactagcaaggttatcgagaagtttccagctcctgttcatatctgtgtgagttgggagtcctcttccgggattgcagaattctggataaatggcactcctcttgtgaaaaagggattgagacagggctacttcgtagaagctcaaccgaaaatcgtgctgggtcaagagcaggactcctatggaggaaaattcgaccgctcccagtccttcgtcggcgagattggagacctatatatgtgggactccgttcttccccctgaaaacatcctgtctgcatatcaggggacgccactgccagccaacatccttgattggcaagcactgaactatgagataaggggatacgtgatcataaaaccgttggtgtgggtg

SEQ ID NO: 119437 - DNA, 669 bp, Artificial Sequence
  derived and/or modified sequence
atgaataagccactgctgtggatcagcgtactgacctccctgcttgaagccttcgctcacaccgacctgtcaggaaaggtgttcgtgtttccgcgagagagcgtgacggatcatgtcaatctgatcacccctctggaaaagcccctgcagaacttcactctctgcttccgggcctactcggacctgtcccgagcttattcactgttctcgtacaacacccagggcagagataacgaactcctcgtgtacaaggagcgcgtgggtgagtatagcctttacattgggcggcacaaggtcacttcgaaagtcatcgagaagtttcccgctccagtgcacatctgcgtctcgtgggagtcgtcctccggaatcgccgaattctggatcaacggtaccccgctggtgaagaagggactcaggcagggatatttcgtggaagcgcaaccgaagatcgtgctgggtcaggaacaagactcgtacgggggaaagtttgaccgctcacagtcgttcgtgggcgagatcggagatctgtacatgtgggattccgttctgccgcctgagaacatcctgagcgcctaccaggggaccccactcccggcgaacatcctggattggcaggctcttaactacgagatccgcggatacgtgatcattaagccactcgtgtgggtc

SEQ ID NO: 119438 - DNA, 669 bp, Artificial Sequence
  derived and/or modified sequence
atgaataaacccttgctgtggatcagtgtcctgacttctttgttagaggcctttgcgcacaccgatttgtctggcaaagttttcgtttttcctcgcgagtccgttacggatcatgtgaaccttatcaccccattggaaaaaccattgcagaacttcaccttgtgctttagagcatactcggatctgtcacgcgcgtacagcctctttagctacaatacccagggacgcgataacgagttgcttgtatacaaggaacgggtgggtgagtatagcttgtacattggccggcacaaggttacctctaaggtgatcgagaagtttccagctcccgtgcacatctgtgtcagctgggaaagctcatctggaatcgcagagttttggatcaacggcacaccactcgtcaaaaagggcctacggcagggctattttgtcgaggcccagccaaagatagtgctgggacaggagcaagattcttatggcggtaaatttgacagaagccagagctttgtgggcgagatcggtgatttgtacatgtgggactcagtcctgcctccagaaaacatcttatcggcataccagggcactcctcttccagccaacattctggactggcaggccctcaattacgagatcaggggctacgtgatcataaaacctctggtgtgggtc

SEQ ID NO: 119439 - DNA, 669 bp, Artificial Sequence
  derived and/or modified sequence
atgaataagccgctgctctggatctcggtgctgacgtcgctcctggaggcctttgcccatactgacctgtctggcaaagtgttcgtgttcccgcgcgagtccgtgaccgaccacgttaatctgatcaccccgctcgaaaaaccactgcagaatttcactctctgttttcgcgcctattcggacctgtcgcgggcatacagcctgttctcctacaacactcaggggcgggacaacgaactgcttgtgtacaaggaacgcgtgggtgaatacagcctctacatcggtcgccataaggttacttccaaggtgattgagaaattccctgcgcccgtccacatctgcgtgtcctgggagtcatcctcaggaatcgccgagttctggattaacggcaccccgctggtcaagaaaggactgcggcagggatactttgtggaggcgcagcctaagatcgtgctgggccaggagcaggattcctacgggggcaagtttgaccgcagccagtcctttgtgggagagatcggagacttgtacatgtgggattccgtcctccctccggagaacatcctctcagcgtaccaaggaacgccgctgccggccaatatcctggactggcaggccctcaactacgagatcagggggtacgtcatcatcaagccgttggtgtgggtg

SEQ ID NO: 119440 - DNA, 669 bp, Artificial Sequence
  derived and/or modified sequence
atgaacaaaccgctgctctggatttcggtgcttacctccctcctggaggcatttgcacatactgacctgtcgggcaaggtattcgtctttcctcgggagtcggtgactgaccacgttaatctgatcacccccttggaaaaacccctccagaatttcacgctgtgttttcgcgcttactccgacctgagccgggcctatagtctcttcagctacaatacccagggacgggacaacgaactcctcgtgtacaaagaaagagtgggagaatactccctgtacatcggtcgccacaaggttacttccaaggtcatagagaagttcccagcgcctgtgcacatatgcgtctcgtgggagagctcctcaggaatcgctgagttttggatcaacggtaccccgttggtcaaaaaggggcttagacaaggctatttcgtcgaagcccaaccgaagattgtgctggggcaggagcaagactcgtacggtggaaaattcgatcggagccagtcgttcgtgggggagatcggagatctctacatgtgggactccgtgctccctcctgagaatatcctgtcagcgtaccagggcaccccactgcctgccaacatcctggattggcaagctctcaactacgaaatccgtggatacgtcatcattaagccattggtttgggtg

SEQ ID NO: 119441 - DNA, 669 bp, Artificial Sequence
  derived and/or modified sequence
atgaataaacctctgctttggattagcgtgttaacaagtctgctcgaggccttcgcacataccgacctgtcaggaaaggtgtttgtgttcccgcgggaatcagtgactgaccacgtaaacctgattactccgttagaaaagcccttgcagaatttcacattgtgttttcgcgcgtactcagacctttctagagcctatagtctgttctcctataacactcagggtcgggacaacgagcttctcgtatataaagaaagggtgggtgagtattcgctctacataggtcgacacaaagtgactagtaaggtgatcgagaaattcccagcaccagtgcatatctgtgtgagttgggaaagcagcagtggcattgcagagttctggatcaacggcacccccctggtcaaaaagggactcagacaggggtacttcgtggaggctcagcccaaaatcgtgctgggacaggagcaggattcttatggcgggaaattcgatagaagtcaatcctttgttggggaaattggagatctttacatgtgggacagcgttttgccccccgaaaacatcctctcggcctatcaagggacgccgttaccagcaaatatcctggactggcaggccttgaattacgagattcgtgggtacgttattataaaaccgctcgtctgggtc

SEQ ID NO: 119442 - DNA, 669 bp, Artificial Sequence
  derived and/or modified sequence
atgaataaaccattgttgtggatatcagttttaacttctttacttgaagcatttgctcatactgatttatctggaaaggtttttgtttttccacgtgaatcagtaactgaccatgttaatttaattactccacttgaaaaaccattacaaaattttactttatgttttagagcatattctgatttaagtagagcctattcattatttagttataatacacaaggaagagataatgaacttcttgtatataaagaaagagttggagaatattcattatatattgggaggcataaagtaacaagtaaagttatagagaaatttccagcaccagttcatatttgtgtttcatgggaatcatcatcaggtattgcagaattttggattaatggaacacctttagtaaaaaaaggtttgcgtcaaggatattttgttgaagctcaaccaaaaattgttcttggacaagaacaagatagttatggtggtaaatttgatagatcacaatcatttgttggagaaattggagatctttatatgtgggattccgtacttccaccagaaaatatcctttctgcttatcaaggaactcctttgccagctaatattcttgattggcaagctttaaactatgaaatacgtggatatgttattattaaaccattagtttgggtt

SEQ ID NO: 119443 - DNA, 669 bp, Artificial Sequence
  derived and/or modified sequence
atgaacaagcccctcctttggatttccgtcctgaccagtctgcttgaggcatttgcacacaccgacctttccgggaaggtctttgtgtttccccgggagtccgtgactgatcacgtgaacctgatcactccgctggagaagccccttcagaatttcacgctgtgcttccgcgcctacagcgacctctcaagagcatacagcttgttcagctacaatacccaaggacgagacaatgaacttcttgtctacaaggagagggtcggagaatactcgctgtatattggacgccataaagtcacttcaaaggttatcgaaaagtttccagctccagtacatatatgtgtctcatgggagtcgtcgtcgggtattgccgaattttggataaacggaacccctttggttaagaaaggactgaggcagggatacttcgtggaagcacaacccaaaattgtgctgggtcaggaacaagattcctacgggggaaaattcgatagatcgcaatcgttcgttggcgagataggcgacctttacatgtgggacagtgttctgccacctgaaaacatcctctccgcataccaggggacccccctcccagcaaacattcttgattggcaagctctcaattatgaaatccgtggctacgtgatcattaagccactggtgtgggtg

SEQ ID NO: 119444 - DNA, 669 bp, Artificial Sequence
  derived and/or modified sequence
atgaacaagcctttgctctggatcagcgtactgacttcattgctcgaagctttcgcgcacacggatctgagtggaaaggtctttgtgtttcctagagaatccgtgacagaccatgtgaatctcatcacgccgctggagaagcctttgcagaactttaccctctgcttcagagcttacagcgatctcagccgagcctacagcctcttctcttacaacacccagggacgagataacgaacttctagtctataaggagagggtgggggagtactctttatacatcgggcgccacaaggttacatccaaagtgattgagaagttcccagccccggtacatatttgtgtatcttgggagagttcttccggaattgctgaattctggattaacggcacccctctggtgaagaaagggttgcggcaggggtacttcgtcgaggcacaacctaaaatcgtgctaggtcaggaacaggattcatatggagggaagttcgacagaagtcagagctttgtcggagagatcggcgacctatatatgtgggactccgtcctccctcctgagaacattctgagtgcgtatcagggaacccccctaccggccaacattctggactggcaggctctgaactatgagatacggggatacgtcataattaagccgcttgtgtgggtc

SEQ ID NO: 119445 - DNA, 669 bp, Artificial Sequence
  derived and/or modified sequence
atgaataaaccgctactatggatatcggtattaacgtcgttattagaagcgtttgcgcatacggatttatcgggtaaagtatttgtatttccgcgtgaatcggttacggatcatgtaaatttaataacgccgttagaaaaaccgttacaaaattttacgttatgttttcgtgcgtattcggatttatcgcgtgcgtattcgttattttcgtataatacgcaaggtcgagataatgaattattagtatataaagaacgagtaggtgaatattcgctatatataggtcgacataaagttacgtcgaaagtaatagaaaaatttccggcgccggtacatatatgtgtttcgtgggaatcgtcgtcgggtatagcggaattttggataaatggtacgccgttagtaaaaaaaggtttacgtcaaggttattttgtagaagcgcaaccgaaaatagttctaggtcaagaacaagattcgtatggtggtaaatttgatcgatcgcaatcgtttgtaggtgaaataggtgatctatatatgtgggattcggtactaccgccggaaaatatattatcggcgtatcaaggtacgccgttaccggcgaatatattagattggcaagcgctaaattatgaaatacgtggttatgtaataataaaaccgctagtatgggta

SEQ ID NO: 119446 - DNA, 669 bp, Artificial Sequence
  derived and/or modified sequence
atgaacaagccgctgctttggatctctgtgttgactagcttgctggaggcgttcgcccatacggatctgtcaggcaaggtgttcgtgttcccccgcgaatcagtgactgaccacgtgaatctgatcaccccactggaaaagcctctgcaaaacttcactctttgttttcgcgcctactcggatctgtcaagagcttactccctgttttcctacaacacccagggacgcgacaacgaactgctcgtgtacaaggaaagagttggggaatactcactgtacattggtcgccacaaggtcacttcaaaagtgatcgaaaagtttccggccccggtgcacatctgcgtcagctgggagtcatcatccggtatcgcagaattctggatcaacggaacccccctcgtcaagaaggggctgcggcagggatacttcgttgaagcccagccaaaaatcgtgctgggacaggagcaagattcgtacggcggcaagttcgacagaagccagtcctttgtcggagagattggagacttgtacatgtgggactcggtgctgccaccggagaatatccttagcgcataccaaggtaccccgctgccggccaacatcctggactggcaggccctgaactacgagatccgcggttacgtgatcattaaaccgcttgtgtgggtt

SEQ ID NO: 119447 - DNA, 669 bp, Artificial Sequence
  derived and/or modified sequence
atgaacaagcccctcctttggatcagcgtactgacatccctgctggaggccttcgcccacaccgacttatcaggaaaggttttcgtttttcctcgggagtctgtgacggatcacgtgaacctgatcacccctcttgagaagccgctgcagaactttaccctgtgtttccgcgcctattccgacctcagtcgcgcatacagcctgttttcctacaacacccaggggagggataatgaacttctggtgtataaggaacgcgtcggggagtactctctgtatatcggccgccataaggtcacatcaaaggtcatcgagaagttccctgctcccgtgcacatctgcgtttcgtgggagtctagctcaggaatcgccgaattttggataaacggcacccccctagtgaaaaagggactaagacaagggtactttgtcgaggctcagccaaaaatagtgcttggacaggagcaggatagctatggaggcaaattcgatcgatcccagagctttgtgggagaaatcggcgacctgtacatgtgggactccgttttgccgccagagaacattctgagcgcctaccaggggacccccctccccgccaatatcctggattggcaagcacttaactacgagataagaggatacgttattatcaagcctttggtctgggtg

SEQ ID NO: 119448 - DNA, 669 bp, Artificial Sequence
  derived and/or modified sequence
atgaacaagccactcctctggatttcagtgctgacctctcttttggaggcattcgctcatacagacctgtccggtaaggtctttgtcttcccgcgggaaagcgtgaccgaccacgttaatctgattactccccttgaaaaacccttgcaaaatttcaccctctgcttccgtgcgtattctgatctcagcagggcatactctctgttctcatataatactcagggccgcgataacgaactcctggtttataaagagcgggtaggcgaatatagtctttatatagggaggcataaagtcacgtcgaaagtaatcgagaaatttcccgcacctgtgcacatctgcgtttcttgggagagtagttctgggatcgcggagttttggataaacggcacacccttggttaagaaaggcctgaggcaggggtattttgtggaagctcagcccaagatcgttctcggccaggagcaggatagctatggagggaagttcgatcgatcccagtcttttgttggggagatcggtgacctatatatgtgggactcagtgcttccacccgaaaatattctgagcgcataccagggaacacctttgcctgccaatatcctggactggcaggcgcttaactacgagatccgtggatacgttattatcaagccccttgtctgggta

SEQ ID NO: 119449 - DNA, 669 bp, Artificial Sequence
  derived and/or modified sequence
atgaataagcccctgctgtggatcagcgtgctgacttccttgctcgaggcgttcgcccacaccgacctctctggcaaagtgttcgtgttcccgcgtgaatcagtgaccgatcacgtgaacctcatcaccccgctggaaaagcctctgcagaacttcacgctttgcttcagggcatactctgatctgtcgcgcgcatacagcctgttcagctataacacccagggcagggacaacgagctgctcgtgtacaaggagcgagtgggagaatactcgctgtacatcggccgccataaagtcacttcgaaggtgatcgaaaagttccctgccccggtgcatatctgcgtgtcctgggaatcatcctcagggatcgcggaattctggatcaatggtaccccgctcgtgaaaaagggcctccggcagggttactttgtggaagcgcagccgaagatcgtcctgggccaggaacaagatagctacggtggaaaattcgaccggagtcaatccttcgtgggcgagatcggagatctttacatgtgggattccgttctccctccggaaaacatcttgtcagcttaccagggcacccccctgccagcaaatatcctcgactggcaagcccttaactacgagatccggggatacgtcatcatcaagccgctggtgtgggtt

SEQ ID NO: 119450 - DNA, 669 bp, Artificial Sequence
  derived and/or modified sequence
atgaataagcccttgctttggatctccgtgctgacgtcacttcttgaggcgttcgcacataccgacctctccggaaaggtctttgtgtttccgcgggaatcagtcaccgaccatgtcaacctgatcacgccgctggagaagccactccaaaacttcaccctgtgctttcgcgcatactctgatctgtcacgggcgtactcacttttttcgtacaacactcagggacgtgataatgaactgctggtgtacaaagaacgggtaggagaatattcgctgtacattggcagacacaaggtgaccagcaaagtgatagaaaagtttcccgctcctgtgcacatttgtgtgagctgggagtccagcagcggtatcgcagaattctggattaacggcacccctctcgtcaagaagggcctgcgccaaggttactttgtcgaggcacaaccaaaaatcgtgcttgggcaagagcaggatagctacggaggaaagtttgacagatcccagtcattcgtgggcgaaattggtgatctttacatgtgggattcggtcctgccccccgaaaacattctgtcagcataccagggtacgcccctgccagccaatatcctcgattggcaagcacttaactatgagattcggggatacgtgatcattaagccccttgtgtgggtg

SEQ ID NO: 119451 - DNA, 669 bp, Artificial Sequence
  derived and/or modified sequence
atgaacaaaccgctgttgtggatctccgtgttgacttctctgcttgaagcctttgctcacacagatctttctgggaaagtgtttgttttccctagagagtccgttacagaccacgtgaatttgataactcccctcgagaagcctctgcagaatttcacactttgttttcgggcttactccgacttgtcaagagcatatagcctgttctcttataacactcagggccgcgacaacgaactgctggtctataaagagcgggttggtgagtacagtctttatatcggaagacataaagtcacgagtaaagtgattgagaagttccccgcaccagtgcatatttgcgtgagctgggagtcatccagcggaatcgccgaattttggattaacggtacccccctggtcaaaaaaggtttgaggcaggggtatttcgtcgaagctcagcccaagatcgttctgggccaggaacaggattcatacggaggcaagtttgataggtctcagagctttgtcggggagatcggagacctttatatgtgggactccgttctgccaccagagaacatcctttctgcctatcaggggacaccgctgcctgcgaatattctggactggcaggctctcaactacgaaatcagaggttatgtgattattaaacccttggtttgggtg

SEQ ID NO: 119452 - DNA, 669 bp, Artificial Sequence
  derived and/or modified sequence
atgaacaagccactgctatggatctctgtattgacttccctgctggaggccttcgcacacacagacctgtctggaaaggtgttcgtgttcccgagggagtccgtcaccgaccacgtcaatttgatcactcctttggagaaacccctgcagaactttaccctttgttttagggcgtatagtgacctgagtagagcatacagcctgttttcctacaacacccagggacgggacaacgagctactagtgtacaaggagcgggtgggggaatactcactttatatcggacgccacaaagtgacatctaaggtcatcgaaaagtttcccgcccccgttcatatttgtgtgtcttgggagagttcttcaggaattgcagaattttggatcaatgggacacccctagtgaaaaaaggcctccgacaaggttatttcgtcgaagcccagcccaaaatcgttttgggacaggaacaggactcttacggggggaaatttgatcgttcgcagagttttgtgggggaaattggggacctatatatgtgggattcggttttaccccccgagaatattctgtcagcctatcagggcacccctctgcccgcaaatattctcgactggcaggctttgaactatgagatacgcggatacgtgatcatcaagccgctggtgtgggtt

SEQ ID NO: 119453 - DNA, 669 bp, Artificial Sequence
  derived and/or modified sequence
atgaataaacctctgctttggatatctgttctaacctcgcttcttgaagcttttgcccataccgatcttagcgggaaggtgttcgtgttcccacgggaatccgttaccgaccacgtaaatctgattacaccactagaaaaaccacttcagaacttcacactatgttttagagcttacagtgacctgagcagagcttacagtctcttctcttacaacacccagggcagggacaatgagctgcttgtatacaaggaacgagtaggtgagtactctctctatatcggtcgccataaagtgaccagtaaggtcattgaaaaattccctgcgcccgtgcacatatgtgtcagttgggagtcgtcaagtggtattgcagaattttggatcaatggcacgcctttagtgaagaagggcctgagacagggatactttgtcgaggcccagccaaaaatagtcctaggtcaagagcaggactcttacggaggcaagttcgatagatcccagtcttttgttggcgagattggcgacctttacatgtgggatagcgtgctcccgcctgagaatattctgtcagcttaccaaggcacgccactgccagccaatattttggactggcaggccttaaactacgaaattcggggctacgtcattatcaaaccactggtttgggtg

SEQ ID NO: 119454 - DNA, 669 bp, Artificial Sequence
  derived and/or modified sequence
atgaataagccacttctttggatatcggtgcttacctccctccttgaagcatttgcacatacggatctgagtggaaaggtgtttgtgtttccacgagagtccgttactgatcacgtgaatctcatcactcccctcgaaaagccgcttcagaactttaccctgtgctttcgcgcatactccgatctgtcgcgggcatactcccttttctcgtataacactcagggccgggataacgaacttctggtgtacaaggagcgtgttggagagtactcgctgtacataggaaggcacaaggtcacttcgaaagtgattgaaaagtttccagcacctgtgcacatctgtgtgtcctgggaaagcagctcaggcattgccgaattctggatcaacggcacccctcttgtgaaaaagggtctgcgacagggatacttcgtggaagcccaacctaagattgtgttgggccaagaacaagactcgtacgggggtaaattcgatcggtcccagtcctttgtgggagagatcggtgatctgtacatgtgggattcggtgttgccaccagagaacattcttagcgcatatcaaggcactccgctcccagccaacatactggattggcaggcactgaattacgaaattcgggggtacgtcatcatcaagcctctcgtctgggtt

SEQ ID NO: 119455 - DNA, 669 bp, Artificial Sequence
  derived and/or modified sequence
atgaacaagccactcctgtggatctcggtcttgaccagcttgcttgaggcctttgcgcatactgacctttccggtaaggtgtttgtgtttcctagagagagcgtgaccgatcatgtcaatttgataaccccacttgagaaacctcttcagaatttcaccctgtgcttcagggcatactccgacttgagcagagcgtattcgctgttttcgtacaatacccaaggtcgcgacaatgaacttctcgtctataaggaacgtgtgggagaatactccctgtacatcggtagacataaggttacctccaaggtcattgaaaagtttcccgctccggtgcatatatgcgtcagctgggaatcctcgtctggaattgccgagttctggataaacggaacccctctggtcaagaagggactgcggcaaggatactttgttgaagcgcaacctaagatcgtgctcgggcaagaacaggattcatacggtggaaagttcgataggtcgcagagcttcgtgggagagattggggatctttacatgtgggatagcgtgctcccaccagaaaacattctgtcggcataccaggggactcctctccccgccaacattctggattggcaggcgctcaactatgaaattagagggtacgtgattatcaaacccctggtgtgggtg

SEQ ID NO: 119456 - DNA, 669 bp, Artificial Sequence
  derived and/or modified sequence
atgaataaaccgttgctctggatctccgtgctgacttctctgctggaagcattcgctcataccgacttgtccggcaaggtttttgtcttcccgcgggaaagcgtaactgaccacgtaaatctcattacaccactcgaaaagccactccagaatttcacgttgtgtttcagggcctattccgatcttagcagagcctatagtctgttctcttacaatacacaggggagagataacgaactgctggtttataaagagagagtgggcgaatattccctttacatagggcggcataaggttacttccaaggtaatagagaagttcccagcgccggtgcacatttgtgtgagctgggagagctctagtgggattgcagagttctggatcaacggaactcctctggtgaaaaaaggccttagacaggggtacttcgtggaagctcagccaaagatcgtgttggggcaggagcaggactcctatggggggaagtttgaccgctcacagtcatttgtcggtgagataggtgatttgtatatgtgggattccgttcttcctcctgaaaatattctgtccgcttatcaggggacgccattgcctgccaacatcctggactggcaggctctgaactacgaaatacgaggatacgtcattattaaaccgctggtgtgggtg

SEQ ID NO: 119457 - DNA, 669 bp, Artificial Sequence
  derived and/or modified sequence
atgaacaagcccctgttgtggatatctgtgctcacctctctgcttgaggcttttgcccatacagatctgagtggcaaagtatttgtcttccctagggagtcagtcacagaccacgtgaacctcatcacaccgctagagaagcccctgcagaacttcaccctgtgctttcgagcctattctgacctatcacgagcttactccctcttcagttacaacacccagggtagggataacgagctgctggtatataaggaaagagtcggcgaatacagtctttatattggtcgccataaggtgactagtaaagtgatcgagaagtttcctgctccggtgcatatctgtgtgagctgggagtccagctccgggatcgccgaattctggattaatggcacccccttggttaaaaaaggtttgaggcaggggtacttcgtcgaggctcagcctaaaattgttctcggacaggagcaagattcctatggcgggaagttcgataggagtcaatcttttgtgggcgaaattggggatctttacatgtgggattcggtgctcccgccggaaaacattttgtcagcgtaccagggcacacctcttcctgccaacattctggactggcaggccctaaactatgagattagaggctacgttatcatcaagccgttggtgtgggtc

SEQ ID NO: 119458 - DNA, 669 bp, Artificial Sequence
  derived and/or modified sequence
atgaacaagccacttctttggattagcgtcctcacttcgcttctcgaagccttcgctcatactgaccttagtggaaaagtctttgtctttcctcgcgagtcggtcaccgatcacgtcaatctgattacccctctggaaaagccactgcagaactttactctttgcttcagagcgtactcggacctgtcgagggcttactcactcttctcatacaatacccaaggacgtgataatgaacttctggtctacaaggaaagagtgggagaatacagcctttacattggacggcacaaagtgacttccaaggtgattgaaaagttccctgcaccagtccacatttgtgtgtcctgggaatcctcttcagggatagcagaattttggatcaatggaaccccgcttgtgaagaaaggccttagacagggatactttgttgaggcccaacctaagatcgtgctgggacaagagcaggattcgtacggagggaagttcgatcgaagccagtctttcgtcggagaaattggagacttgtacatgtgggacagcgtcctccctcccgaaaacattctctccgcctatcaaggtacgccccttcccgcgaacatccttgactggcaagcactgaattacgagatccggggttacgtcatcattaaaccccttgtgtgggtg

SEQ ID NO: 119459 - DNA, 669 bp, Artificial Sequence
  derived and/or modified sequence
atgaacaagcccctgctctggatttcagtcctgacgtcccttctggaggcttttgcacacactgatctctccggaaaggtctttgttttccctcgggagagcgtgaccgaccacgtgaatctgatcaccccccttgaaaagccactccagaatttcactttgtgtttcagagcatactctgatctgtcgagagcatactcgcttttttcctacaatacccaagggagagataatgaactgcttgtttacaaggagcgggtgggtgaatacagcctctacatcggacggcataaagtgaccagcaaggtcattgaaaagtttcctgcacccgtgcacatttgcgtgtcgtgggagagctcctcgggaattgctgagttttggatcaacggtacccctctcgtcaagaagggactgaggcaaggatactttgtggaagcacaacctaagattgtgctgggacaggaacaagactcgtacggagggaagttcgatcggtcgcagtcgttcgtcggtgaaattggtgacctctatatgtgggattcggtgctgccacctgagaacattctcagcgcataccaagggaccccattgcccgcaaacattctcgattggcaagccctgaattacgaaattcgtggatacgtcatcattaagccgcttgtctgggtg

SEQ ID NO: 119460 - DNA, 669 bp, Artificial Sequence
  derived and/or modified sequence
atgaacaagccactgctctggatctccgttctcacgtctctgcttgaagcatttgcacataccgatctttctggcaaggtgtttgtgtttccccgggagagcgtgactgatcacgtgaacctcatcaccccacttgagaagcctttgcaaaactttacgctttgtttccgagcctactcagacttgagccgggcttattcgcttttcagctacaacactcaaggcagagacaacgaattgctcgtgtacaaggagcgagtcggagaatactcgctgtacattgggagacataaggtcacctcaaaagtaattgaaaagtttcccgcacctgtgcatatctgcgtctcctgggaaagctcgtcaggaattgcggaattttggattaacggtactccattggtcaagaaaggacttcgacaagggtatttcgtcgaagcccaacctaagatagtccttggtcaggagcaggactcctacggtggaaagtttgataggagccagtcgttcgtgggagagattggcgatctttacatgtgggattcagtgctgcctcccgaaaacatacttagcgcctatcaaggaaccccattgccagctaacattctggattggcaggcacttaactacgaaattaggggttacgtgatcattaagccactggtgtgggtc

SEQ ID NO: 119461 - DNA, 669 bp, Artificial Sequence
  derived and/or modified sequence
atgaataagccgctcctttggatctcggtcctgacctcactgctcgaggcatttgcccatactgatctctcaggaaaagtgttcgtgttccctcgcgaatccgtaactgatcacgtgaatctgataacgccactggaaaagccgctgcagaatttcactctgtgctttcgggcttactcagacctgtcccgcgcttattcactcttctcatacaacacccaaggacgcgacaacgagctcctggtgtacaaggaacgggtcggcgaatactcgttgtacattggtcgacacaaagtgactagcaaggtgatcgagaagttcccggcgcctgtgcatatatgtgtgagctgggagtccagctcggggatcgccgaattttggatcaacgggacccccctggtgaagaagggactcaggcagggctacttcgtcgaggcacagcctaagattgtgctgggacaggaacaagactcctacggcggaaaattcgacaggtcccaaagtttcgtgggagagatcggcgatctgtacatgtgggacagcgttcttccgccggagaacatcctgtcggcgtatcaaggaaccccattgccggccaatatactcgactggcaggcgctcaactacgaaatccggggctacgtcatcatcaagccacttgtctgggtc

SEQ ID NO: 119462 - DNA, 669 bp, Artificial Sequence
  derived and/or modified sequence
atgaacaaaccactgttgtggatttctgtcctcactagcctcctggaagcctttgcccacaccgacttatctgggaaagtgttcgtttttccgcgggagagtgtgaccgatcatgtgaatctcatcacccctttggagaagccattacaaaactttactctctgctttcgcgcttactccgacttgtcacgggcatacagtctattcagttacaacacccagggcagagacaatgagcttctcgtatataaggaaagggttggggaatactccttgtatatcgggcgccacaaggttacgagtaaggtgatcgaaaaattccctgctcccgtccacatatgcgtgtcctgggagtccagttctggaattgcggagttctggataaacggcacccctctcgttaagaaggggctccgacaggggtactttgttgaggctcagcctaagatcgtgttgggacaagagcaggactcctacgggggaaaatttgatcgatcacagagcttcgtgggagagataggggatctgtacatgtgggactccgtccttccgcccgagaacatccttagcgcatatcaaggtacccccctccctgccaacatcctcgattggcaggcactcaactacgagattcggggctacgtgattatcaagcccctggtctgggtg

SEQ ID NO: 119463 - DNA, 669 bp, Artificial Sequence
  derived and/or modified sequence
atgaacaaacctctgctttggataagcgttcttactagccttctggaagcgtttgcccataccgatctctctggaaaggtgttcgtgtttcccagagaaagcgtcactgatcatgtcaacctcattactccgcttgagaagcctttgcaaaacttcaccctttgttttcgcgcttactcagatctttcgcgtgcctattcccttttctcatacaacacgcaagggcgagataacgaactgctggtgtacaaagaacgagtcggagaatactccctttacattggtcgacataaagtgactagcaaggtgatcgaaaagtttcctgcacctgtccacatctgcgtcagctgggagtccagctcgggaattgctgagttttggatcaacggaacccccttggtcaagaaaggtttgagacaaggatacttcgttgaggcgcaacctaagattgtgctgggccaagagcaggattcatacggcggcaagttcgacagatcgcaatcctttgtgggagaaattggcgacctctacatgtgggactccgtgcttcctccggagaatatactttcagcataccaggggacccccctgcccgcaaatatcctggattggcaggccctgaattacgagatcaggggatacgtgatcattaaaccactcgtttgggtg

SEQ ID NO: 119464 - DNA, 669 bp, Artificial Sequence
  derived and/or modified sequence
atgaacaagcctctgctgtggatttccgttcttacgtcactgctggaagcatttgcgcacaccgatctgtccggaaaggtgtttgtgtttcctcgggagtcggtgaccgatcacgtgaatctcatcactccactggaaaagccactccagaactttactctttgtttcagggcctactcggacctttcccgcgcgtactccttgtttagctacaacacccaagggagagataacgaacttctggtctacaaagaacgggtgggcgaatactcgctttacattggtaggcataaagtgacttcaaaagtcattgaaaagtttccagcaccggtgcatatatgtgtctcatgggagagctcatccggaatcgcagaattttggattaacggtacccctcttgtgaagaagggactgagacagggatatttcgtcgaggctcaacctaagattgtgcttggacaggagcaagattcctacgggggaaagttcgatcggtcccaatcgtttgttggcgaaattggtgatctctacatgtgggattcagtgcttcccccagagaatatactttcagcataccagggcaccccactccctgcgaacatccttgattggcaggcactcaattacgagataagaggatacgtgataatcaaacccctggtgtgggtg

SEQ ID NO: 119465 - DNA, 669 bp, Artificial Sequence
  derived and/or modified sequence
atgaacaagcccctgttgtggatctcagttcttacaagcttgcttgaggcgttcgctcacacagatctgagtggaaaagtgttcgtgtttcctagagaatcggtgacagaccatgttaatctgatcactccactggaaaagcccctgcagaatttcacgctgtgttttcgcgcatattccgacttgagccgggcctattctctcttctcctacaatacccaaggaagggataatgaactgctagtctataaagagcgcgtgggtgaatatagcttgtacatcggacggcacaaagtgaccagtaaagtgatcgaaaagttcccagcgccagtgcacatttgcgtgagttgggaaagcagcagtggcattgctgaattctggataaacggcaccccactcgtcaaaaaggggctgcggcagggttacttcgtcgaagctcagcccaagatcgtgctcgggcaggaacaggacagttacggaggcaaattcgatcgcagccaaagcttcgtcggcgaaatcggggatttgtatatgtgggattctgtactaccccctgagaacattttatcagcctatcagggtacacctctgcctgcgaatattttggactggcaggcgctcaactatgagatcagagggtacgtcatcatcaaacctcttgtctgggtg

SEQ ID NO: 119466 - DNA, 669 bp, Artificial Sequence
  derived and/or modified sequence
atgaataaaccactgctgtggatttcagtgcttacctcgctgttggaagcgtttgcccataccgatctgtccgggaaggtgtttgtattcccgcgcgagagcgtgactgatcatgtgaatcttatcaccccactcgaaaagcctctgcaaaactttaccctctgcttccgcgcatatagtgatctgagccgagcctactcgctgttttcgtacaacacccaaggacgggataatgaattgttggtgtacaaagaacgcgtgggagaatactccttgtatattggtagacacaaggtcacttcaaaggtgatagaaaagttccccgcgcctgtgcacatttgtgtttcctgggagtcctcgagcggaatcgcggaattttggatcaacggaaccccgctggtcaaaaagggtcttagacaaggatacttcgtggaagcccagccgaaaatcgttctgggacaagaacaggatagctatggcggaaagtttgatcgctcccaatctttcgtgggtgaaatcggtgatctttacatgtgggatagcgtcctccctccggagaatatactctccgcataccagggtacgccccttccagcaaacattctggactggcaagctctcaactacgagattaggggctacgtcataatcaagcccctggtctgggtc

SEQ ID NO: 119467 - DNA, 669 bp, Artificial Sequence
  derived and/or modified sequence
atgaacaaaccattgctctggattagcgtgctgacatctctgttagaggccttcgcacatactgacctgtccggaaaagttttcgtttttccccgcgaaagcgtcaccgatcatgtaaacttgattactcctttggagaagcctctccagaattttactctgtgtttccgagcatatagtgacctgagccgcgcgtacagcctcttcagttataacacccagggtcgtgacaatgagctactggtatataaggagcgggttggagagtatagcctttacattggtcggcataaggtaacgtctaaggtgatcgagaaattccccgcgcccgtgcatatatgtgtctcttgggagagttcaagcggtattgccgaattttggattaatggtacccccctggtgaaaaaggggttgcgccagggttactttgtcgaggcgcagccgaagattgtcctgggccaggaacaggattcgtacgggggaaaatttgaccgctctcagtcattcgtgggagagatcggcgatctgtacatgtgggattccgttctgccgccagagaacatactatctgcctaccaaggaacccctcttcctgctaatatcctcgattggcaggcactaaactacgagattcgcggatacgttatcattaaacccctagtttgggtc

SEQ ID NO: 119468 - DNA, 669 bp, Artificial Sequence
  derived and/or modified sequence
atgaacaagccactgctttggatctcagttttgacttctctgctcgaggcctttgcgcacaccgacctctcgggcaaggtgttcgtgttcccccgagagtcggtgactgaccatgtgaatcttatcaccccactcgaaaaacctttgcagaactttacgctgtgttttagagcttatagcgatctctcccgggcgtactcgcttttctcgtataacactcaagggagagacaatgagctgctcgtctacaaggagcgggtgggagagtacagcctgtatatcggacgccataaggtgaccagcaaggttatcgagaaattccctgcgccggtgcacatctgcgtgtcgtgggagtcctcatcagggatcgcagaattctggatcaacggtaccccgctcgtgaagaagggactgaggcagggttactttgtggaagctcaaccgaagatcgtgctgggccaagaacaggatagctacgggggcaagtttgaccgtagccagtcattcgtgggcgaaattggagatctgtacatgtgggactccgtgctcccaccagagaacatcctcagcgcataccaaggcaccccgctgccagccaacatcctggactggcaggccctgaactacgagatccggggatacgtcatcattaagccgctcgtgtgggtc

SEQ ID NO: 119469 - DNA, 669 bp, Artificial Sequence
  derived and/or modified sequence
atgaacaagcccctgctgtggatctccgttctcaccagcttgctcgaggcgttcgcccatactgacctgtccgggaaagtgtttgtgttcccacgcgaatctgtgaccgaccacgttaatttgatcactcccctcgaaaaacctcttcaaaattttacgctgtgttttagggcatacagtgacctttcccgagcgtattcactgttctcctataatacgcagggccgggacaacgagctgctggtgtataaagagcgagtcggtgagtattcactgtatatcgggcgccataaggttacgtccaaagttatcgagaaattcccggccccggtacacatttgtgtgtcttgggagagcagctccgggattgctgaattctggattaatggtacacctctggttaaaaaggggctacggcaggggtatttcgttgaggcccagccaaagattgttcttgggcaagaacaagacagttatggaggaaaattcgaccggtcacaatcattcgttggggaaatcggggatttgtacatgtgggactccgtgctaccccccgaaaacatcctctctgcataccagggcacgccacttcctgcaaacattcttgactggcaggcgttgaactacgagatccggggttacgtcatcataaagcctttagtatgggta

SEQ ID NO: 119470 - DNA, 669 bp, Artificial Sequence
  derived and/or modified sequence
atgaacaaaccgctcttgtggatttctgtgctgactagcctcctggaggcgttcgcccatactgacctcagcgggaaagtgtttgtctttccacgggagtcggttaccgaccacgtgaacctcattacacctttggagaagcccctgcagaacttcacactatgtttccgggcttattctgacttgtcccgagcctactccctgttttcttacaacacccagggcagggacaacgaactcctggtctacaaagaacgcgtgggcgaatattcgttatatatcgggagacacaaggtcacctccaaagttatagagaagttcccagcacctgtccacatctgtgtttcttgggagagtagtagcgggatcgcagagttctggataaatggcaccccactcgttaaaaaagggctaagacagggctatttcgttgaggcacagcccaaaattgttctgggtcaagagcaagactcctatggcggaaaattcgaccggtcccagagctttgtgggtgagatcggagatctatacatgtgggatagcgtcctccctccggagaacatcctcagcgcatatcagggtacccccctgccagccaacatacttgattggcaggctctgaattatgagatcagggggtacgtcattattaagcccctggtttgggtt

SEQ ID NO: 119471 - DNA, 669 bp, Artificial Sequence
  derived and/or modified sequence
atgaacaagccgctcctgtggatctccgtactgactagcctacttgaggcttttgctcatactgacctctctggtaaggtctttgtctttcctagggaaagcgtcaccgatcacgtcaacctaataactcctctggagaaacccttacagaactttaccttgtgtttccgagcttatagcgatcttagccgggcttatagtctgttcagctataatacccagggtcgcgataacgagctgcttgtctataaggagagagtgggagagtatagcttatacatcggacgacacaaagtgacaagcaaggtcattgagaaattccccgccccggttcacatctgtgtgagctgggagagtagttccgggatcgcagagttttggataaacggtaccccacttgtgaaaaaaggcttgcggcagggttactttgtggaagcacagcccaaaatagtgttaggccaggagcaggattcatacgggggcaaattcgatcggagccaaagctttgtgggcgagataggcgatctgtatatgtgggactccgttctcccaccggaaaacatcctttccgcttaccagggtacacctctgccggccaatatcctagattggcaggctctgaattacgagatcagaggatacgtgatcatcaagcccctagtgtgggtg

SEQ ID NO: 119472 - DNA, 669 bp, Artificial Sequence
  derived and/or modified sequence
atgaataaacccctactgtggatatccgtgcttactagcctgctagaggctttcgcccataccgacctgtcaggcaaagttttcgtctttcccagggaatccgtcactgatcatgtgaacttgatcacacccctcgaaaaacccttgcagaacttcaccctctgctttcgggcatactcagatctgtctcgggcctatagcttgtttagttacaacacccaaggcagggacaacgagctgctagtgtacaaagagagggtcggcgagtactctctgtatatcggcagacataaggtcacctccaaagttatcgagaagttccctgctccagtgcacatatgtgtgtcttgggaaagctcctcaggaatagcagagttctggataaatggaaccccactggtcaagaagggtctgagacaggggtatttcgtggaagcacagcccaaaatagtcttgggccaggaacaggactcatacggaggcaagtttgaccgcagtcaaagcttcgttggggagataggtgacctgtacatgtgggacagcgtgttgcctcccgagaacatcctaagcgcctatcagggcaccccactgccagctaatatcctggattggcaagccctcaattatgaaattaggggctatgtcataatcaagcccctggtgtgggtc

SEQ ID NO: 119473 - DNA, 669 bp, Artificial Sequence
  derived and/or modified sequence
atgaacaaacctttgctttggatttccgtgctgacttcgcttctggaggcattcgcccacaccgacctctcaggcaaggtgtttgtgttcccacgggaaagcgtgaccgatcatgtaaacctcattaccccactggaaaagcctctgcagaactttacgctgtgttttagagcttactcggatttgtcccgggcatactctctgtttagctacaatactcagggcagagataacgaactgcttgtgtacaaggaacgtgtgggtgagtactccttgtacatcggtcgacacaaggtcacctcaaaagtcattgaaaagtttcctgccccagtccatatatgtgtgagctgggaaagcagcagtggcattgcggaattttggatcaatggaactccccttgtgaaaaagggcctgcgccaaggctactttgtggaagcccaacctaagatcgtgctcggtcaagaacaagattcctacggtgggaaattcgatcgatcacagtcgttcgtgggtgagatcggtgatctgtatatgtgggacagcgtgcttccaccggagaacattctttccgcgtatcaaggcacgcctcttccagctaacattctggattggcaggcgttgaattatgagatccgtggatacgtcatcattaagcccctcgtctgggtg

SEQ ID NO: 119474 - DNA, 669 bp, Artificial Sequence
  derived and/or modified sequence
atgaacaaacccctgctctggatttccgtgctgacgagcctactggaggcatttgcccataccgatctgagcggcaaagtctttgtttttccgagagagtctgtaaccgaccacgttaacctgatcactcccctggagaagcctctccaaaactttaccttgtgctttcgcgcctatagcgatttgagccgtgcctactctctgttcagctacaacacccagggacgtgacaacgagctgctggtgtataaagagcgcgtgggagaatacagcctctatatcggcaggcacaaggtgaccagtaaagtcattgagaagtttccggcccccgtgcatatttgcgtcagctgggagagctccagcggaatcgcggagttctggatcaacggtacgccgctggtaaagaaaggccttcgtcagggttattttgtggaagcccagccaaaaatcgtcttgggtcaggagcaggatagctatggcggcaaattcgatcgaagccagagctttgtgggcgagattggcgatttgtacatgtgggacagtgttcttccacctgaaaatatccttagcgcctaccagggcacgcctctcccggccaacatcttagactggcaggccctgaactatgagatcagggggtatgtcattatcaagccgcttgtgtgggtt

SEQ ID NO: 119475 - DNA, 669 bp, Artificial Sequence
  derived and/or modified sequence
atgaacaagccactcctttggatctccgtgctgacctcacttttggaggcatttgcgcataccgatctttcaggaaaagtttttgtttttccacgcgagtcggtgactgatcatgtgaatttgatcacccccctggagaaaccactgcaaaactttaccctgtgttttcgggcatactcagacctttcccgcgcatactcactgttctcctacaacacccagggaagggacaatgaactgttggtgtacaaagaaagagtgggtgaatacagcctctacattggcagacataaggtgacttccaaggtcatagagaaatttccagcccccgtccacatctgtgtctcgtgggagtcatcgtccggaatcgcagaattttggataaatggcacccctctcgtcaaaaagggattgaggcagggatacttcgtcgaagctcaaccgaagatcgtgcttggacaagagcaggactcctacggtggcaagtttgatagatcgcaatcatttgtgggagagattggcgatctgtatatgtgggattccgtgctgccaccagaaaacatcctttcggcatatcaaggtacgcctctgccagccaatattctcgattggcaagcattgaactacgaaattcgaggttacgtgatcattaagccgctggtgtgggtg

SEQ ID NO: 119476 - DNA, 669 bp, Artificial Sequence
  derived and/or modified sequence
atgaacaaaccgctcctgtggatttcggtgctgacttcactcctggaagcgttcgcccacaccgatctgtccggaaaagtgttcgtgttccctagagagtccgtcacggaccacgttaatctgatcactcctctggaaaagcccctgcagaactttactctgtgttttagggcttattcggacctttcaagagcttacagccttttctcgtacaacacccagggccgcgacaacgaactgctcgtctacaaagagagagtcggagagtacagcctttacatcggacggcacaaggtcacctcgaaggtgatcgagaagtttccagctccggtgcacatctgcgtgtcatgggaatcaagctccggcatcgctgagttctggattaatggaaccccgctggttaagaagggactccggcagggctacttcgtggaagctcagcctaagattgtcctcggtcaagaacaagactcctatggagggaaattcgatagatcccagtcgtttgtgggagaaatcggggacctctacatgtgggacagcgtgttgccaccagagaacatcttgtccgcttaccagggcacccctctgccagctaatatccttgattggcaggcactgaattacgagatccgcgggtacgtgatcatcaagccgctcgtctgggtc

SEQ ID NO: 119477 - RNA, 818 nt, Artificial Sequence
  derived and/or modified sequence
gggaaauaagagagaaaagaagaguaagaagaaauauaagagccaccaugaauaagccucucuuguggaucucggucuugacgucccuuuuggaggcauucgcccacacggacuugucgggaaagguauucguguuuccccgggaaagcgucacugaucaugucaaucucaucacgccucuggagaaaccacugcagaacuuuacacucugcuuucgagccuauucggaucugucaagagccuacucgcucuucuccuauaacacacagggacgggacaacgagcuucuuguguacaaggaaaggguaggagaguacucacucuacaucggucgccauaaagugaccuccaaaguaaucgaaaaguucccggcucccguccacauuuguguaucaugggaguccucgucagggaucgcggaguucuggauuaaugggacaccccuugugaagaagggacugagacagggguauuucguagaagcgcagccgaaaaucguguugggucaggaacaagacagcuacggagggaaguuugacaggagccaaucguuugugggagagaucggugaucuuuacaugugggacucgguccugccacccgaaaacaucuugagcgcauaccaggggaccccguugcccgcgaauauucucgauuggcaggcgcucaacuaugagauucgcggcuaugucauuaucaaaccgcuggugugggugugauaauaggcugccuucugcggggcuugccuucuggccaugcccuucuucucucccuugcaccuguaccucuuggucuuugaauaaagccugaguaggaag

SEQ ID NO: 119478 - protein, 732 aa, Artificial Sequence
  derived and/or modified sequence
MERQVLLSEPEEAAALYRGLSRQPALSAACLGPEVTTQYGGQYRTVHTEWTQRDLERMENIRFCRQYLVFHDGDSVVFAGPAGNSVETRGELLSRESPSGTMKAVLRKAGGTGPGEEKQFLEVWEKNRKLKSFNLSALEKHGPVYEDDCFGCLSWSHSETHLLYVAEKKRPKAESFFQTKALDVSASDDEIARLKKPDQAIKGDQFVFYEDWGENMVSKSIPVLCVLDVESGNISVLEGVPENVSPGQAFWAPGDAGVVFVGWWHEPFRLGIRFCTNRRSALYYVDLIGGKCELLSDDSLAVSSPRLSPDQCRIVYLQYPSLIPHHQCSQLCLYDWYTKVTSVVVDVVPRQLGENFSGIYCSLLPLGCWSADSQRVVFDSAQRSRQDLFAVDTQVGTVTSLTAGGSGGSWKLLTIDQDLMVAQFSTPSLPPTLKVGFLPSAGKEQSVLWVSLEEAEPIPDIHWGIRVLQPPPEQENVQYAGLDFEAILLQPGSPPDKTQVPMVVMPHGGPHSSFVTAWMLFPAMLCKMGFAVLLVNYRGSTGFGQDSILSLPGNVGHQDVKDVQFAVEQVLQEEHFDASHVALMGGSHGGFISCHLIGQYPETYRACVARNPVINIASMLGSTDIPDWCVVEAGFPFSSDCLPDLSVWAEMLDKSPIRYIPQVKTPLLLMLGQEDRRVPFKQGMEYYRALKTRNVPVRLLLYPKSTHALSEVEVESDSFMNAVLWLRTHLGS

SEQ ID NO: 119479 - DNA, 2199 bp, Artificial Sequence
  derived and/or modified sequence
atggagaggcaagtactgctcagcgaaccggaggaggcagccgccctgtataggggcttgtcacgacagccagcactttccgccgcatgtttaggtcctgaagtcaccacgcagtacgggggccagtatcggacggtccacaccgagtggacacaacgagatctggaaaggatggaaaatatcagattctgccgacagtatttagtgttccacgatggggactcagtagtgtttgccggacctgccgggaactcggtggaaacccgtggcgagttgctgagcagagagagcccttcaggcacaatgaaagctgtcctgaggaaggctggtggtaccggacctggggaggagaagcagtttctcgaagtgtgggagaagaatagaaagttgaagagcttcaatttatctgctctcgagaaacacggcccagtttatgaggacgattgttttggatgcctgagctggagtcactccgagacgcacctgctctacgtggccgagaaaaagcgcccgaaggcggaatcgttcttccagactaaagcgctcgacgtgagtgctagtgacgacgagatcgcccggctgaaaaaaccagaccaagctatcaaaggagaccagtttgttttttatgaggattggggcgagaacatggtctctaaatcaatacctgtgttatgcgtcctggatgtggagtccggcaacatatcagtactcgagggcgttcctgagaacgtctcccctgggcaggccttttgggcaccgggtgacgcgggagtagtgtttgtgggatggtggcatgaaccatttcgtcttgggatccggttctgcacaaacagaaggtcagccctctactatgttgacctcattgggggcaagtgcgaacttctgagtgatgacagcctggctgtgtcctctccacggctctcccccgatcagtgtcggatcgtctacctgcaatatccaagcctcataccacaccaccagtgctcacagctgtgtctatacgactggtacactaaggtgacctccgtcgttgttgacgtggtgccacggcaactcggcgagaatttcagcgggatttattgcagcctgctgccgctggggtgttggtctgcagatagccagcgggttgtttttgattcagcccaacgaagccgccaggacctattcgctgttgatacacaggttggtacagttacttccttaactgcaggagggagcgggggtagttggaagctgctgaccatcgatcaggacctcatggtcgcgcaatttagcaccccctctctgcctcctacgttaaaggtgggcttcctcccttctgcaggcaaggaacagtccgttttatgggtgtctctcgaagaggccgagcccatccctgacattcactggggcatcagggtgctccagccaccacctgagcaggaaaacgtgcaatatgccggcttggattttgaagctatcctcttacagcccggatctcctcctgataaaacccaggtgcccatggtggttatgccacacggaggcccccactcttcttttgtaaccgcgtggatgctgtttcctgcgatgttgtgcaagatgggattcgccgtattgctggtgaactacagaggtagcactggttttggtcaggactcgatcctgtctctcccaggtaatgtgggccatcaggatgttaaagatgtccagtttgctgtagagcaggtgctgcaggaagagcactttgatgcctctcacgtggctctgatgggcggaagccacggaggcttcataagttgtcacctcattggtcagtatccagagacctaccgtgcatgcgttgcgaggaaccctgtgatcaacatcgcatccatgctcggctctaccgacatcccagactggtgcgtcgttgaggctgggttcccgttttcgtccgattgcttgcctgacttgtctgtatgggccgaaatgctggacaagtcacctatcaggtatatcccccaggttaaaactcccctgctgttgatgctgggtcaggaggatcgcagggtgccttttaagcaaggcatggagtattatcgggcacttaaaacgcgtaacgttcctgtgaggcttctgctgtatccaaagtcaacccacgctctttcagaagttgaagtcgaatcggattcctttatgaatgccgtgttatggctgcgaactcacttggggtcgtag

SEQ ID NO: 119480 - DNA, 2199 bp, Artificial Sequence
  derived and/or modified sequence
atggagcggcaggtgctgctgtctgagcctgaggaggccgccgccctgtaccggggcctgagccggcagcctgccctgtctgctgcctgcctgggccctgaggtgaccacccagtatggaggccagtacagaacagtgcacacagagtggacccagagggacctggagaggatggagaacatccgcttctgccggcagtacctggtgttccatgatggagacagcgtggtgtttgctggccctgctggcaacagcgtggagaccagaggagagctgctgagccgggagagccccagcggcaccatgaaggctgtgctgaggaaggccggcggcaccggccctggagaggagaagcagttcctggaggtgtgggagaagaacaggaagctgaagagcttcaacctgagcgccctggagaagcacggccctgtgtatgaagatgactgcttcggctgcctgtcctggagccacagcgagacccacctgctgtatgtggccgagaagaagaggcccaaggccgagagcttcttccagaccaaggccctggatgtgtctgccagtgatgatgaaattgcccggctgaagaagccagaccaggccatcaagggggaccagtttgtgttctatgaggactggggcgagaacatggtgtccaagagcatccctgtgctgtgtgtgctggatgtggagagcggcaacatctctgtgctggagggcgtgcctgaaaatgtgtccccaggccaggccttctgggcccctggagatgctggggtggtgtttgtgggctggtggcatgagcccttccggctgggcatccgcttctgcaccaacagaagaagtgccctgtactacgtggacctgattggaggaaaatgtgagctgctgagtgatgacagcctggccgtgagcagcccccggctgagcccagaccagtgccgcatcgtgtacctgcagtaccccagcctcatcccccaccaccagtgcagccagctgtgcctgtatgactggtacaccaaggtgacctctgtggtggtggatgtggtgccccggcagctgggggagaacttcagcggcatctactgcagcctgctgcccctgggctgctggagcgctgacagccagagggtggtgtttgacagcgcccagaggagccggcaggacctgtttgctgtggacacccaggtgggcaccgtgaccagcctgacagctgggggcagcggcggctcctggaagctgctgaccatcgaccaggacctgatggtggcccagttcagcacccccagcctgccccccaccctgaaggtgggcttcctgcccagcgctgggaaggagcagagcgtgctgtgggtgtccctggaggaggccgagcccatcccagacatccactggggcatccgggtgctgcagcccccacctgagcaggagaatgtgcagtatgccggcctggactttgaggccatcctgctgcagcccggcagccccccagacaagacccaggtgcccatggtggtgatgcctcatggaggcccccacagcagctttgtgacagcctggatgctgtttcctgccatgctgtgcaagatgggctttgctgtgctgctggtgaactaccggggcagcactggatttggccaggacagcatcctgagcctgcctggaaatgtgggccaccaggatgtgaaggatgtgcagtttgctgtggagcaggtgctgcaggaggagcactttgatgccagccacgtggccctgatgggcggcagccacggcggcttcatcagctgccacctgattggccagtacccagagacctaccgggcctgtgtggccaggaaccctgtgatcaacatcgcctccatgctgggcagcacagacatcccagactggtgtgtggtggaggccggcttccccttcagcagtgactgcctgcctgacctgtctgtgtgggccgagatgctggacaagagccccatccgctacatcccccaggtgaagacccccctgctgctgatgctgggccaggaggaccggcgggtgcccttcaagcagggcatggagtactaccgggccctgaagaccagaaatgtgcctgtgcggctgctgctgtaccccaagagcacccacgccctgtctgaggtggaggtggagagtgacagcttcatgaatgctgtgctgtggctgcggacccacctgggcagctag

SEQ ID NO: 119481 - DNA, 3220 bp, Artificial Sequence
  derived and/or modified sequence
ctcaaccccttctctcgtaggcccttctaccctccccgaagccgggctcccgggttccgcttccacagggccgccccctctcctccgagatccaacgcctcgcccctcggtaagaggcccaggactcagcccacggccccgccccccacttggctagtccgcccctggcgagacccctgctctcacccacccaggacttctcgctcccaggccgggtcctctcaccgtcaaggcccgccccctgccaacggtcctcacccattagccgaaggccccgcccctcacagattgccgcagggcaggggcggagacagcccgggccgtcccaggctccgcccccggaagcctcacttccgggcgcgagcacgccccgcctcgccccggcggcagagaggagactatggaacgtcaggtgctgctgagcgagcccgaggaggcggcggctctgtatcggggccttagccgccagcccgcgctgagcgccgcctgcctgggcccggaggtcaccacgcagtacggcggccaataccggacggtgcacactgagtggacccagagggacctggaacgcatggagaacattcgattctgccgccaatacctggtgttccatgacggggactcagtggtgtttgcaggacctgcaggcaacagtgtggagacccggggggaactgctgagcagagagtctccttcaggcaccatgaaagctgtgctgcgcaaggctggaggcacgggccctggggaagagaagcagttcctggaggtctgggagaagaaccggaagctcaagagcttcaacctgtcagcgctggagaaacatgggcctgtttatgaggatgactgctttggctgcctgtcctggtcgcactcggagacacacttgttgtatgtggcagagaagaagcgccccaaggccgagtccttctttcagaccaaagccttggacgtcagtgccagcgatgatgagatagccaggctgaagaagccagaccaagccatcaagggggatcagtttgtgttttatgaagactggggagaaaacatggtttccaaaagcatccctgtgctctgcgtgctggatgtcgagagtggcaacatctctgtgcttgagggggtccctgagaatgtgtcccctggacaggcattttgggcccctggagatgctggtgtggtgtttgtgggctggtggcatgagcccttccggttgggcatccgcttttgcaccaatcgcaggtcagccctgtattatgtggacctcatcggggggaagtgtgagctcctctcggatgactccctggctgtctcttctccccggctgagcccagaccaatgtcgcattgtctacctgcagtacccatctctgatcccccatcaccaatgcagccagctgtgcctgtatgactggtataccaaggttacctcagtggtggtagatgttgtgcctcggcagctgggagagaacttctctgggatctactgcagccttctgcctttgggatgctggtcagctgacagccagagagtggtctttgactcggctcagcgcagccggcaggacctgtttgctgtggacacccaagtgggcactgtgacctccctcacagctggagggtcaggtgggagctggaagttgctcacaattgaccaggacctcatggtggcacagttttccacacccagcctacctccaaccctgaaagttgggttcctgccttctgcagggaaggagcagtcagtgttgtgggtgtccctggaggaggccgagcccattcccgacatccactggggcatccgggtgctacagccacccccagagcaagagaatgtgcagtatgctggccttgactttgaagcaatcctgctgcagcctggcagccctccagataagacccaagtgcccatggtggtcatgccccacggggggccccattcatcctttgtcactgcctggatgctgttcccagccatgctttgcaagatgggctttgcggtactactagtgaactatcgtggctccacgggctttggccaggacagcatcctctccctcccaggcaatgtgggccaccaggatgtgaaggatgtccagtttgcagtggaacaggtgctccaggaggaacactttgatgcaagccatgtggcccttatgggtggttcccatggtggcttcatttcctgccacttgattggtcagtacccagagacctacagggcctgcgtggcccggaaccccgtgatcaacatcgcctccatgttgggctccactgacatccctgactggtgcgtggtggaggctggctttcctttcagcagtgactgcctgccagacctcagcgtgtgggctgagatgctggacaaatcgcccatcagatacatccctcaggtgaagacaccactgttactgatgttgggccaggaggaccggcgtgtgcccttcaagcagggcatggagtattaccgtgccctcaagacccggaatgtgcctgttcggctcctgctctatcccaaaagcacccacgcattatcagaggtggaggtggagtcagacagcttcatgaatgctgtgctctggctacgcacacacttgggcagctgaagccctgccattctgcatgagctgatcagcctgtgccacacttcgctcttgaggagctcaacggtctggcagggcagcaggaggctttctgggctctggactccacggatgcgtgggcagaggaatgtgggctatgtagtcataataaattaggacacagagcctggttcctgctggtactttgtaccaaaccatccccaaccccacctcccactctggggtgcagagaccctaggttctgggtgtggcagccacaagggcttcatctgcctccagtgtgagaagggagggaacagtgagaggcttagcctctgcctgtcctggcaaccaggactctgtaccagcctagcttccctgctgcagccccttccattagcaactactctgtaccacccttcccaagagtatgtctggaggactagtgtgaggccctgtctttccacggcacccatgggcaaaagtagtcccagggacattgccttggttggggaagcccctaggctggacagatcacctagcccagggtgtgctgggctcaagccacccgagccctagcaaggagtcactgacacatttcctggaagcaaaggctaagaagcatctgtacaggcataaagagga

SEQ ID NO: 119482 - DNA, 2199 bp, Artificial Sequence
  derived and/or modified sequence
atggagcggcaggtgctgctgagcgagcccgaggaggccgccgccttgtaccgcggcctgtcaaggcagccagctctgagcgccgcctgcctcggccccgaggtgaccacccaatacggaggacagtataggacggttcataccgaatggacacagcgtgatttggagcggatggagaacataaggttttgtcgccagtatctggtgttccacgatggagacagcgtcgtgtttgccggccctgcagggaactccgtagaaacgagaggtgagctgctctctagggagtccccatcaggtacaatgaaagctgtgctgaggaaagctgggggaacaggccccggcgaggaaaaacaatttttggaggtgtgggaaaaaaatagaaagttgaaatcatttaacctgagcgctcttgagaaacacgggcctgtctacgaggacgattgctttggatgcctgtcctggagccactccgaaacgcatctgctttatgtcgcggagaaaaaaagaccaaaggctgagtccttctttcaaaccaaggctctggatgtcagcgcatccgatgatgagattgcacggcttaaaaagcccgatcaggcaatcaaaggagatcaattcgtgttctacgaggactggggtgaaaacatggtctctaaatcaatacctgtcttgtgtgtcctcgatgtggagagcggcaacattagtgtgctggagggtgtgccggagaacgtgagcccaggccaggctttttgggctcctggcgacgccggcgtggtctttgtcggatggtggcacgagccctttaggcttgggatccgattctgcaccaacagacgatccgcactgtactacgtcgacctgattggcggcaagtgcgaattgctttccgacgattccctcgcagtgtcgagcccaaggctaagcccggatcaatgcaggatcgtgtacctgcaatacccatccttgattcctcatcaccagtgcagtcaactgtgtttgtacgactggtacactaaagtaacctccgttgtggttgacgtggttccacggcagctgggggaaaatttcagtggtatttattgctctctccttcccctgggctgttggtctgctgactcacagcgagtggtgttcgattcggctcaacgttcgaggcaagacctcttcgctgtcgatacccaagtcggaactgtcaccagtctgacagccggcggcagtggcggatcttggaagctgctcactattgaccaggacctcatggttgcccagttttccaccccaagcctacctccaacgctgaaggtgggcttcctgccatccgcaggaaaggaacagtctgttctgtgggtctctctggaggaggccgaaccgatacctgatatacattggggtatccgcgttttacagcctccaccggagcaagagaacgtacagtatgcaggtctcgattttgaggcgatactgttgcagccaggatcaccaccagacaagacccaggtacccatggtcgttatgcctcatggagggccacactccagctttgtcacagcctggatgcttttccccgctatgctgtgtaagatggggttcgcagttctgctcgtaaactatcgtgggtccaccggctttggtcaggatagcatcctctccctccccggaaacgtgggccaccaggatgtcaaggacgtgcagtttgctgttgagcaggtactgcaggaagaacatttcgatgccagtcacgtggcattgatgggcggctcacatggtggcttcattagttgccatttgatcggacagtacccggaaacataccgtgcatgcgtcgccaggaatcctgtcattaacattgcgagcatgctggggagcactgatatcccagactggtgcgtggtagaggctggattcccctttagctcagattgtctcccagacctctccgtgtgggccgagatgctggacaagagcccaatccgatacattccccaggttaagaccccattgctgctgatgctcgggcaggaggaccgtagggtcccctttaagcaggggatggagtactatcgcgctctgaagacccggaacgtcccagtaagacttctgctctatccaaagagcacacacgcactgtcagaggtggaagtggagtccgatagctttatgaatgccgtcctgtggctgagaacccatctgggctcctag

SEQ ID NO: 119483 - DNA, 2199 bp, Artificial Sequence
  derived and/or modified sequence
atggagcgccaggtgctcttatccgagcccgaggaggctgctgctctgtaccgcggtctctctaggcagccagctctgtcagccgcttgcctgggacccgaagtaaccacacaatacggcggacagtaccgtaccgtccatactgagtggacacagagagatttggaacgtatggagaacataaggttttgtcgacagtatttggtgttccatgacggagacagtgtggtattcgccggtcccgcaggcaattccgtcgaaacgcggggtgaacttctgagcagagagtcccctagcggaaccatgaaggctgtgctgagaaaagctggtgggacagggcctggtgaagagaagcagtttctggaagtttgggagaagaatcgcaaactcaaaagtttcaatctgtctgcgctggaaaaacatggacccgtctacgaggatgactgctttgggtgtcttagttggagccacagcgagactcatctgttgtatgtagccgagaaaaaacgcccaaaagccgagtcgtttttccagaccaaagcgttggatgttagtgcaagcgacgacgaaattgctcgccttaaaaaacctgaccaggcaattaagggcgaccagttcgtcttctacgaagattggggcgagaacatggtttctaaatctatccctgtgttgtgcgtcctcgacgtggagagcggcaacatttccgtgttggaaggtgtcccagaaaacgttagtcctggccaagccttttgggcacctggtgacgccggagtggtgtttgtcggctggtggcatgagccctttagacttggtataaggttctgtacaaatcggcgtagtgccctatactacgtggaccttatagggggtaaatgcgaactactgtctgacgactccctggcagtatccagccctcggctctctcctgaccaatgtagaatcgtttatctccagtacccttctctgatcccccaccatcagtgctctcagctctgtctctatgattggtacactaaggtgacctccgtcgtggtggacgtggtgcccaggcagcttggggaaaatttttccggaatttactgtagcctcctgccactaggatgctggtccgccgattcacaaagggtcgtattcgattccgcgcagagatctcgccaggatctgttcgccgtggatacacaagtcggaaccgtgacctctctgaccgctggcggtagtggtggaagctggaagctgctgacaatcgaccaagatctgatggtcgcccagttttccacccctagccttcctccaactctcaaggttggctttttgccttccgctggcaaggaacagagcgtgttatgggtttctttggaggaagctgagccaattcctgatattcactggggaatccgcgtgctgcagccccctccggagcaggagaacgtgcagtatgcaggccttgacttcgaagccattttgcttcaacctggctctcctccggataaaacacaggtgcctatggtggtgatgccccacggcggtccgcactcgagctttgtcaccgcatggatgctgttcccggcaatgctgtgtaagatgggcttcgcggtgctgctcgtcaactatcggggttctaccggcttcggccaggactccatactgagtcttcccggtaatgtcggccaccaggacgttaaagatgtacaatttgcggtggaacaggtgctgcaggaggagcactttgatgcgtcacacgtcgccctgatggggggatcccacggagggttcatatcctgtcatcttattggtcaatatcctgagacctatagggcctgtgtggcaaggaacccagtgatcaatatcgcctccatgctaggctctactgacatccctgactggtgcgtggtggaggccggattccctttttcttctgattgcttacctgatctgtcagtatgggccgaaatgctcgacaaatcaccaattcgatacattcctcaagtgaagacaccgctcttactgatgctgggacaggaggatagaagagtaccattcaaacagggaatggagtattatcgggctctgaaaacccggaatgtcccagtgaggctcctgctgtaccctaagtccacccacgccctgtcagaggtggaggtcgaatccgattcattcatgaacgccgtgctgtggctacgaacacacctcggttcgtag

SEQ ID NO: 119484 - DNA, 2199 bp, Artificial Sequence
  derived and/or modified sequence
atggagagacaggtgctgctgagcgagcccgaggaggccgccgccctgtacagaggcctgagcagacagcccgccctgagcgccgcctgcctgggccccgaggtgaccacccagtacggcggccagtacagaaccgtgcacaccgagtggacccagagagacctggagagaatggagaacatcagattctgcagacagtacctggtgttccacgacggcgacagcgtggtgttcgccggccccgccggcaacagcgtggagaccagaggcgagctgctgagcagagagagccccagcggcaccatgaaggccgtgctgagaaaggccggcggcaccggccccggcgaggagaagcagttcctggaggtgtgggagaagaacagaaagctgaagagcttcaacctgagcgccctggagaagcacggccccgtgtacgaggacgactgcttcggctgcctgagctggagccacagcgagacccacctgctgtacgtggccgagaagaagagacccaaggccgagagcttcttccagaccaaggccctggacgtgagcgccagcgacgacgagatcgccagactgaagaagcccgaccaggccatcaagggcgaccagttcgtgttctacgaggactggggcgagaacatggtgagcaagagcatccccgtgctgtgcgtgctggacgtggagagcggcaacatcagcgtgctggagggcgtgcccgagaacgtgagccccggccaggccttctgggcccccggcgacgccggcgtggtgttcgtgggctggtggcacgagcccttcagactgggcatcagattctgcaccaacagaagaagcgccctgtactacgtggacctgatcggcggcaagtgcgagctgctgagcgacgacagcctggccgtgagcagccccagactgagccccgaccagtgcagaatcgtgtacctgcagtaccccagcctgatcccccaccaccagtgcagccagctgtgcctgtacgactggtacaccaaggtgaccagcgtggtggtggacgtggtgcccagacagctgggcgagaacttcagcggcatctactgcagcctgctgcccctgggctgctggagcgccgacagccagagagtggtgttcgacagcgcccagagaagcagacaggacctgttcgccgtggacacccaggtgggcaccgtgaccagcctgaccgccggcggcagcggcggcagctggaagctgctgaccatcgaccaggacctgatggtggcccagttcagcacccccagcctgccccccaccctgaaggtgggcttcctgcccagcgccggcaaggagcagagcgtgctgtgggtgagcctggaggaggccgagcccatccccgacatccactggggcatcagagtgctgcagcccccccccgagcaggagaacgtgcagtacgccggcctggacttcgaggccatcctgctgcagcccggcagcccccccgacaagacccaggtgcccatggtggtgatgccccacggcggcccccacagcagcttcgtgaccgcctggatgctgttccccgccatgctgtgcaagatgggcttcgccgtgctgctggtgaactacagaggcagcaccggcttcggccaggacagcatcctgagcctgcccggcaacgtgggccaccaggacgtgaaggacgtgcagttcgccgtggagcaggtgctgcaggaggagcacttcgacgccagccacgtggccctgatgggcggcagccacggcggcttcatcagctgccacctgatcggccagtaccccgagacctacagagcctgcgtggccagaaaccccgtgatcaacatcgccagcatgctgggcagcaccgacatccccgactggtgcgtggtggaggccggcttccccttcagcagcgactgcctgcccgacctgagcgtgtgggccgagatgctggacaagagccccatcagatacatcccccaggtgaagacccccctgctgctgatgctgggccaggaggacagaagagtgcccttcaagcagggcatggagtactacagagccctgaagaccagaaacgtgcccgtgagactgctgctgtaccccaagagcacccacgccctgagcgaggtggaggtggagagcgacagcttcatgaacgccgtgctgtggctgagaacccacctgggcagctag

SEQ ID NO: 119485 - protein, 763 aa, Artificial Sequence
  derived and/or modified sequence
MAATGTAAAAATGRLLLLLLVGLTAPALALAGYIEALAANAGTGFAVAEPQIAMFCGKLNMHVNIQTGKWEPDPTGTKSCFETKEEVLQYCQEMYPELQITNVMEANQRVSIDNWCRRDKKQCKSRFVTPFKCLVGEFVSDVLLVPEKCQFFHKERMEVCENHQHWHTVVKEACLTQGMTLYSYGMLLPCGVDQFHGTEYVCCPQTKIIGSVSKEEEEEDEEEEEEEDEEEDYDVYKSEFPTEADLEDFTEAAVDEDDEDEEEGEEVVEDRDYYYDTFKGDDYNEENPTEPGSDGTMSDKEITHDVKAVCSQEAMTGPCRAVMPRWYFDLSKGKCVRFIYGGCGGNRNNFESEDYCMAVCKAMIPPTPLPTNDVDVYFETSADDNEHARFQKAKEQLEIRHRNRMDRVKKEWEEAELQAKNLPKAERQTLIQHFQAMVKALEKEAASEKQQLVETHLARVEAMLNDRRRMALENYLAALQSDPPRPHRILQALRRYVRAENKDRLHTIRHYQHVLAVDPEKAAQMKSQVMTHLHVIEERRNQSLSLLYKVPYVAQEIQEEIDELLQEQRADMDQFTASISETPVDVRVSSEESEEIPPFHPFHPFPALPENEDTQPELYHPMKKGSGVGEQDGGLIGAEEKVINSKNKVDENMVIDETLDVKEMIFNAERVGGLEEERESVGPLREDFSLSSSALIGLLVIAVAIATVIVISLVMLRKRQYGTISHGIVEVDPMLTPEERHLNKMQNHGYENPTYKYLEQMQI

SEQ ID NO: 119486 - DNA, 2292 bp, Artificial Sequence
  derived and/or modified sequence
atggccgccacagggacagcagctgccgcagcaaccggaagactcctcctgctattgctcgtaggactaaccgcacccgccctagcacttgcggggtacattgaggccctggcagctaacgcaggcacaggatttgctgtcgccgagccccagatcgcaatgttctgcgggaagttaaacatgcacgttaatattcagaccgggaaatgggaacccgatcctaccggcactaagagctgtttcgagaccaaggaagaagtcctgcaatactgtcaggagatgtaccctgagctgcagatcacgaacgttatggaggccaaccagagagtgtccattgacaattggtgtaggcgggataagaagcagtgtaaatcccggtttgttactcctttcaagtgtcttgtgggggaattcgtgtccgacgttttgctcgtgccggaaaaatgccagttctttcacaaggagcggatggaggtgtgcgagaatcaccagcattggcatactgtggtgaaggaggcgtgtctgacccaggggatgacattatattcctacgggatgctgctcccatgtggagtagaccagttccatggaacagaatacgtatgctgtccccagaccaaaataatcgggtcagtttccaaggaagaagaagaggaggatgaagaggaagaggaagaggaagatgaagaagaagactacgacgtgtataagtcggagttccctaccgaggccgacttagaggactttacggaggctgcggtcgacgaggatgatgaggacgaggaggaaggcgaggaagtagttgaggatcgagactattattatgataccttcaaaggagacgactacaatgaagagaaccccactgaacccggatcagatgggaccatgtccgacaaagagatcacgcatgacgtcaaagcggtctgcagtcaggaggccatgacaggaccttgtcgagcagtgatgcccagatggtactttgatctttcaaagggcaagtgtgtcagatttatctatggtggttgtgggggcaaccgcaacaacttcgagtctgaggactactgtatggctgtttgtaaggctatgatccctcctacaccactgccgacgaacgacgtcgacgtgtatttcgagactagcgctgatgacaatgagcatgcgagattccaaaaggcaaaagagcagctcgaaatcaggcacagaaacagaatggatcgggttaagaaagaatgggaggaagctgaactacaggccaagaaccttcccaaggccgaacgacagaccctcatccagcactttcaggcaatggtgaaggccctggagaaggaggccgctagtgagaaacagcaattggtggaaacacacctggccagagtcgaagcaatgctgaatgaccggaggcgcatggcactggagaactatctcgcagcgcttcagagcgatccaccccggccacaccgcatcctgcaagccctgcggaggtacgtcagggccgagaacaaggacagactgcatactattcggcattaccagcacgtactcgcagtagacccagaaaaagctgcccagatgaaatcacaggtgatgacacaccttcacgtaatagaggagcgtagaaaccagagccttagccttctgtacaaggttccgtatgttgcgcaggaaattcaagaggaaatcgacgagctgctccaggaacaaagagcagatatggatcaatttacggcgtctatctccgaaaccccagtcgatgtgagggtgtcttcggaggagagcgaggaaatccccccattccacccatttcatccttttccggccctgccagagaatgaagatacccagcccgaactctaccaccctatgaagaagggttcgggcgtgggggaacaggacggcggtcttatcggagctgaggagaaggtcatcaacagtaaaaacaaggtcgatgagaacatggttattgacgaaactctggatgtcaaagagatgatctttaatgctgaacgggtggggggcctggaggaggaacgtgagagtgttgggccacttagggaagatttcagtctcagctcttcggcacttatcggactcctcgttatagccgttgccatcgccacagtgatagtgatctctctggtcatgctgcgaaaaaggcaatacggaacaatttctcacggaattgtggaggtcgatccgatgctgactcccgaggagagacatttgaacaaaatgcagaatcatggttacgagaatccaacctataaatacctcgagcaaatgcaaatatag

SEQ ID NO: 119487 - DNA, 2292 bp, Artificial Sequence
  derived and/or modified sequence
atggccgccaccggcacagctgctgctgctgccaccggccgcctgctgctgctgctgctggtgggcctgacagccccagccctggccctggccggctacatcgaggccctggccgccaatgccggcactggatttgctgtggccgagccccagatcgccatgttctgtgggaagctgaacatgcacgtgaacatccagacaggcaagtgggagccagaccccaccggcaccaagagctgctttgagaccaaggaggaggtgctgcagtactgccaggagatgtacccagagctgcagatcaccaacgtgatggaggccaaccagagggtgtccattgacaactggtgcagaagagacaagaagcagtgcaagagcagatttgtgacccccttcaagtgcctggtgggggagtttgtgtctgatgtgctgctggtgcctgagaagtgccagttcttccacaaggagaggatggaggtgtgtgagaaccaccagcactggcacacagtggtgaaggaggcctgcctgacccagggcatgaccctgtacagctatggcatgctgctgccctgtggggtggaccagttccacggcacagaatatgtgtgctgcccccagaccaagatcatcggctctgtgtccaaggaggaggaggaggaggatgaggaggaggaggaggaggaggatgaggaggaggactatgatgtgtacaagtctgagttccccacagaggccgacctggaggacttcacagaggccgctgtggatgaagatgatgaagatgaggaggagggggaggaggtggtggaggaccgggactactactatgacaccttcaagggagatgactacaatgaggagaaccccacagagcccggcagtgatggcaccatgtctgacaaggagatcacccatgatgtgaaggctgtgtgcagccaggaggccatgacaggcccctgcagagctgtgatgccccgctggtactttgacctgagcaagggcaaatgtgtgcgcttcatctacggcggctgcggcggcaacagaaacaactttgaaagtgaggactactgcatggctgtgtgcaaggccatgatcccccccacccccctgcccaccaatgatgtggatgtgtactttgagaccagcgcagatgacaatgaacatgcccgcttccagaaggccaaggagcagctggagatccgccacaggaacaggatggacagagtgaagaaggagtgggaggaggccgagctgcaggccaagaacctgcccaaggccgagcggcagaccctcatccagcacttccaggccatggtgaaggccctggagaaggaggccgccagcgagaagcagcagctggtggagacccacctggcccgggtggaggccatgctgaatgacagaagaaggatggccctggagaactacctggccgccctgcagagcgaccccccccggccccaccgcatcctgcaggccctgcggcgctacgtgcgggcagagaacaaggaccggctgcacaccatccgccactaccagcacgtgctggccgtggaccctgagaaggccgcccagatgaagagccaggtgatgacccacctgcacgtgattgaggagaggaggaaccagagcctgagcctgctgtacaaggtgccctacgtggcccaggagatccaggaggagattgatgagctgctgcaggagcagagagctgacatggaccagttcaccgccagcatcagcgagacccctgtggatgtgcgggtgagcagcgaggagagcgaggagatcccccccttccaccccttccaccccttccctgccctgcctgaaaatgaagacacccagcctgagctgtaccaccccatgaagaagggcagcggcgtgggggagcaggacggcggcctcatcggggctgaggagaaggtgatcaacagcaagaacaaggtggatgagaacatggtgattgatgagaccctggatgtgaaggagatgatcttcaatgctgagcgggtgggcggcctggaggaggagcgggagagcgtgggccccctgcgggaggacttcagcctgagcagcagcgccctgattggcctgctggtgattgctgtggccatcgccaccgtgattgtcatcagcctggtgatgctgaggaagaggcagtatggcaccatcagccacggcatcgtggaggtggaccccatgctgaccccagaggagcggcacctgaacaagatgcagaaccacggctatgagaaccccacctacaagtacctggagcagatgcagatctag

SEQ ID NO: 119488 - DNA, 2292 bp, Artificial Sequence
  derived and/or modified sequence
atggccgccaccggcaccgccgccgccgccgccaccggccggctgctcttgctactgttagttggtctgacagcacctgctcttgcactcgctggttatatcgaggcccttgccgctaacgcaggaacaggattcgctgtggcagaaccccagattgccatgttctgcggaaagctcaatatgcatgtcaatattcagacaggcaaatgggaacctgacccaaccggcaccaagtcttgcttcgagactaaggaggaagtcctccaatactgtcaagagatgtacccagagctgcagattaccaatgtcatggaggctaatcagcgggtgtctatcgataactggtgccggagagacaaaaaacagtgcaaaagtcgtttcgtaaccccattcaagtgcctagtgggtgagttcgtgagtgacgtgcttttggtacccgagaaatgccagtttttccacaaggagcgaatggaggtgtgtgagaaccaccagcactggcataccgtggtgaaggaggcctgcctgacacaaggcatgacgctttactcatacggcatgttgctgccatgtggagtggatcaatttcatgggactgaatacgtgtgttgcccgcaaaccaaaattataggctccgtgtccaaggaggaggaagaggaggacgaagaggaggaggaagaggaggacgaggaagaggactacgatgtgtacaagtcagagttccctactgaagcagatctggaggactttactgaggcagccgttgacgaggatgatgaagacgaggaagagggcgaggaggtcgtcgaagaccgcgattattattacgatacctttaaaggcgatgactataacgaggagaacccaaccgaacccgggtctgacgggaccatgagcgataaggagataactcatgacgtgaaggccgtctgttcacaagaggcaatgacgggcccatgtcgagcggtgatgcctagatggtacttcgacttgtcaaaaggaaaatgtgtgcggttcatatacggtggctgcggcgggaatcggaataactttgagtccgaggactattgcatggccgtgtgtaaagccatgattcccccaacccctttacctaccaacgacgtcgacgtctacttcgagacctcagctgatgacaatgaacacgccaggtttcagaaggccaaggagcagctggaaattcggcaccggaataggatggaccgcgtcaagaaggaatgggaggaagccgagttgcaggctaagaatctgccaaaagctgagcgacaaactctaatccaacatttccaggcgatggtaaaggcgcttgagaaagaagccgcctcagagaaacagcagcttgtcgagacacacctggcaagggtcgaggccatgttaaatgataggcggagaatggctttagagaactacctggccgctttgcagagcgaccctccaagaccacaccggatcctgcaggccctccgccgctatgtgagagccgaaaacaaggataggctgcatacaataagacattaccaacacgtgctggcggtggatcccgagaaggccgcccagatgaagtctcaggtgatgacacacctgcacgtgatcgaagagcggcgcaatcagtcgctcagtcttctatataaagtgccatatgtggcacaggagattcaggaggagattgacgaactgctgcaggagcaacgcgcagatatggaccagttcacggccagcatcagcgaaaccccagtggacgtgcgggtgtcctcagaagaatcagaagaaatcccacccttccacccttttcaccccttcccagccctgccagagaacgaggatacccaaccagagctttatcacccgatgaaaaaaggctcaggtgtcggagagcaggacggcggtttgatcggggcagaggaaaaggtcataaactccaaaaacaaggttgacgagaacatggttatcgatgagacactggatgtgaaggagatgatcttcaatgcggagcgagtgggaggcctggaagaggagagggaatcagtcggaccgctgcgggaggactttagcctgagcagctctgctcttatcggccttctagtaattgcagtggcaattgctaccgtcattgtgatttcgctcgtaatgttgcgcaagcgccagtacggtacaattagccacgggatagtggaggtggacccaatgctcacacctgaggagcggcatctcaacaagatgcagaatcatggctacgagaaccctacctataagtacttggaacaaatgcaaatttag

SEQ ID NO: 119489 - DNA, 3720 bp, Artificial Sequence
  derived and/or modified sequence
gtcgcggtgtgctaagcgaggagtccgagtgtgtgagcttgagagccgcgcgctagagcgacccggcgagggatggcggccaccgggaccgcggccgccgcagccacgggcaggctcctgcttctgctgctggtggggctcacggcgcctgccttggcgctggccggctacatcgaggctcttgcagccaatgccggaacaggatttgctgttgctgagcctcaaatcgcaatgttttgtgggaagttaaatatgcatgtgaacattcagactgggaaatgggaacctgatccaacaggcaccaagagctgctttgaaacaaaagaagaagttcttcagtactgtcaggagatgtatccagagctacagatcacaaatgtgatggaggcaaaccagcgggttagtattgacaactggtgccggagggacaaaaagcaatgcaagagtcgctttgttacacctttcaagtgtctcgtgggtgaatttgtaagtgatgtcctgctagttccagaaaagtgccagtttttccacaaagagcggatggaggtgtgtgagaatcaccagcactggcacacggtagtcaaagaggcatgtctgactcagggaatgaccttatatagctacggcatgctgctcccatgtggggtagaccagttccatggcactgaatatgtgtgctgccctcagacaaagattattggatctgtgtcaaaagaagaggaagaggaagatgaagaggaagaggaagaggaagatgaagaggaagactatgatgtttataaaagtgaatttcctactgaagcagatctggaagacttcacagaagcagctgtggatgaggatgatgaggatgaggaagaaggggaggaagtggtggaggaccgagattactactatgacaccttcaaaggagatgactacaatgaggagaatcctactgaacccggcagcgacggcaccatgtcagacaaggaaattactcatgatgtcaaagctgtctgctcccaggaggcgatgacggggccctgccgggccgtgatgcctcgttggtacttcgacctctccaagggaaagtgcgtgcgctttatatatggtggctgcggcggcaacaggaacaattttgagtctgaggattattgtatggctgtgtgtaaagcgatgattcctccaactcctctgccaaccaatgatgttgatgtgtatttcgagacctctgcagatgataatgagcatgctcgcttccagaaggctaaggagcagctggagattcggcaccgcaaccgaatggacagggtaaagaaggaatgggaagaggcagagcttcaagctaagaacctccccaaagcagagaggcagactctgattcagcacttccaagccatggttaaagctttagagaaggaagcagccagtgagaagcagcagctggtggagacccacctggcccgagtggaagctatgctgaatgaccgccgtcggatggctctggagaactacctggctgccttgcagtctgacccgccacggcctcatcgcattctccaggccttacggcgttatgtccgtgctgagaacaaagatcgcttacataccatccgtcattaccagcatgtgttggctgttgacccagaaaaggcggcccagatgaaatcccaggtgatgacacatctccacgtgattgaagaaaggaggaaccaaagcctctctctgctctacaaagtaccttatgtagcccaagaaattcaagaggaaattgatgagctccttcaggagcagcgtgcagatatggaccagttcactgcctcaatctcagagacccctgtggacgtccgggtgagctctgaggagagtgaggagatcccaccgttccaccccttccaccccttcccagccctacctgagaacgaagacactcagccggagttgtaccacccaatgaaaaaaggatctggagtgggagagcaggatgggggactgatcggtgccgaagagaaagtgattaacagtaagaataaagtggatgaaaacatggtcattgacgagactctggatgttaaggaaatgattttcaatgccgagagagttggaggcctcgaggaagagcgggaatccgtgggcccactgcgggaggacttcagtctgagtagcagtgctctcattggcctgctggtcatcgcagtggccattgccacggtcatcgtcatcagcctggtgatgctgaggaagaggcagtatggcaccatcagccacgggatcgtggaggttgatccaatgctcaccccagaagagcgtcacctgaacaagatgcagaaccatggctatgagaaccccacctacaaatacctggagcagatgcagatttaggtggcagggagcgcggcagccctggcggagggatgcaggtgggccggaagatcccacgattccgatcgactgccaagcagcagccgctgccaggggctgcgtctgacatcctgacctcctggactgtaggactatataaagtactactgtagaactgcaatttccattcttttaaatgggtgaaaaatggtaatataacaatatatgatatataaaccttaaatgaaaaaaatgatctattgcagatatttgatgtagttttcttttttaaattaatcagaaaccccacttccattgtattgtctgacacatgctctcaatatataataaatgggaaatgtcgattttcaataatagacttatatgcaggctgtcgttccggttatgttgtgtaagtcaactcttcagcctcattcactgtcctggcttttatttaaagaaaaaaaaggcagtattccctttttaaatgagctttcaggaagttgctgagaaatggggtggaatagggaactgtaatggccactgaagcacgtgagagaccctcgcaaaatgatgtgaaaggaccagtttcttgaagtccagtgtttccacggctggatacctgtgtgtctccataaaagtcctgtcaccaaggacgttaaaggcattttattccagcgtcttctagagagcttagtgtatacagatgagggtgtccgctgctgctttccttcggaatccagtgcttccacagagattagcctgtagcttatatttgacattcttcactgtctgttgtttacctaccgtagctttttaccgttcacttccccttccaactatgtccagatgtgcaggctcctcctctctggactttctccaaaggcactgaccctcggcctctactttgtcccctcacctccaccccctcctgtcaccggccttgtgacattcactcagagaagaccacaccaaggaggcggccgctggcccaggagagaacacggggaggtttgtttgtgtgaaaggaaagtagtccaggctgtccctgaaactgagtctgtggacactgtggaaagctttgaacaattgtgttttcgtcacaggagtctttgtaatgcttgtacagttgatgtcgatgctcactgcttctgctttttctttctttttattttaaatctgaaggttctggtaacctgtggtgtatttttattttcctgtgactgtttttgttttgtttttttcctttttcctcccctttgaccctattcatgtctctacccactatgcacagattaaacttcacctacaaactccttaatatgatctgtggagaatgtacacagtttaaacacatcaataaatactttaacttcc

SEQ ID NO: 119490 - DNA, 2292 bp, Artificial Sequence
  derived and/or modified sequence
atggccgctaccggaactgccgctgccgcagccactggaagattactgctgctacttttagtcggtttgacggcacctgcactcgctctggccggatacattgaagctctggccgctaatgcaggaaccggatttgctgtcgcagagccccagattgcgatgttctgtggtaaacttaacatgcacgttaacatacagactggtaagtgggagcccgatccaaccggcacaaaatcctgcttcgagaccaaagaggaagtcctgcagtactgtcaggaaatgtatcccgagcttcagataacaaacgtgatggaggcaaatcagcgcgtcagcattgacaattggtgccgcagggataagaaacagtgtaagagccggttcgtgacaccatttaagtgtctggtcggcgaatttgtgtctgatgtgctgctcgtgcccgagaaatgccagttttttcataaggaaagaatggaggtttgtgagaaccatcagcactggcacaccgtcgtgaaggaggcatgcctgacccagggcatgacactttactcctacgggatgctgctcccctgcggagtggatcagttccacgggacagagtacgtttgttgtccccagacaaaaatcatcggatccgtatcaaaagaggaagaggaagaggatgaggaggaagaggaggaggaggacgaagaggaggactatgacgtttacaagagtgagttccccaccgaagccgacctggaggattttacagaagcggctgtcgacgaagatgacgaagatgaggaggagggagaggaagtggtggaggatagagattactactacgacacttttaagggtgatgactacaacgaggagaaccctacagaacccggatcggacggaaccatgtcagataaggagataacacatgatgtgaaggcagtgtgttcgcaggaagccatgaccggaccctgtagagcagtcatgccgagatggtactttgatttgagtaaagggaaatgcgtgagattcatctacgggggttgcgggggtaaccggaataactttgagtctgaggattattgcatggccgtctgtaaagccatgatccctcccactcctcttcccactaatgacgtcgacgtctacttcgagacttccgccgatgacaatgagcatgcgagatttcagaaggccaaggaacaactggagatccggcaccggaaccggatggacagagtaaagaaagagtgggaggaagccgagctgcaggctaaaaatcttcccaaagccgagaggcagactctaatccaacacttccaggccatggtcaaggccctggaaaaggaggctgccagcgagaagcaacaattagtagagacccatctggcacgcgttgaggccatgctcaatgaccgtcggaggatggctctcgaaaactatcttgctgctcttcagagtgacccccctcggccacatagaattctccaagctctccggagatatgtgcgcgctgagaataaggaccgcttacatacaattcgccactaccaacacgtcctagcagtggacccggaaaaggccgcacagatgaagtcccaggtcatgactcacctgcacgtgatcgaagaaaggaggaaccaaagcctgagtttgttgtacaaagtgccctatgtggcacaggaaatccaggaagaaatcgacgagctactccaggaacagagagccgatatggaccagtttaccgccagcatctccgaaacccctgtggacgtgcgagtaagcagtgaggagtccgaggaaattccaccctttcatccatttcacccttttcccgctcttcccgagaacgaagatactcagcccgaactgtatcaccctatgaaaaaaggctcaggggtgggggagcaggacggcggattaattggggctgaggagaaagtgatcaacagcaagaataaagtcgatgaaaatatggtgattgatgagacattggatgtcaaggaaatgatttttaatgccgagagagtgggaggattggaggaagagagagagagcgtgggccctcttcgcgaggatttctcattatcctcctccgctttgatcggcctcctggtgatcgcggtggctattgcaacggtaattgtgatctctctggtgatgctgcggaagcgacagtatggaaccatttctcacggtattgtagaggtggaccctatgctcaccccagaagagcggcacctgaacaagatgcaaaatcacggctacgaaaatcctacgtataagtatcttgagcaaatgcaaatatag

SEQ ID NO: 119491 - DNA, 2292 bp, Artificial Sequence
  derived and/or modified sequence
atggccgccaccggcaccgccgccgccgccgccaccggcagactgctgctgctgctgctggtgggcctgaccgcccccgccctggccctggccggctacatcgaggccctggccgccaacgccggcaccggcttcgccgtggccgagccccagatcgccatgttctgcggcaagctgaacatgcacgtgaacatccagaccggcaagtgggagcccgaccccaccggcaccaagagctgcttcgagaccaaggaggaggtgctgcagtactgccaggagatgtaccccgagctgcagatcaccaacgtgatggaggccaaccagagagtgagcatcgacaactggtgcagaagagacaagaagcagtgcaagagcagattcgtgacccccttcaagtgcctggtgggcgagttcgtgagcgacgtgctgctggtgcccgagaagtgccagttcttccacaaggagagaatggaggtgtgcgagaaccaccagcactggcacaccgtggtgaaggaggcctgcctgacccagggcatgaccctgtacagctacggcatgctgctgccctgcggcgtggaccagttccacggcaccgagtacgtgtgctgcccccagaccaagatcatcggcagcgtgagcaaggaggaggaggaggaggacgaggaggaggaggaggaggaggacgaggaggaggactacgacgtgtacaagagcgagttccccaccgaggccgacctggaggacttcaccgaggccgccgtggacgaggacgacgaggacgaggaggagggcgaggaggtggtggaggacagagactactactacgacaccttcaagggcgacgactacaacgaggagaaccccaccgagcccggcagcgacggcaccatgagcgacaaggagatcacccacgacgtgaaggccgtgtgcagccaggaggccatgaccggcccctgcagagccgtgatgcccagatggtacttcgacctgagcaagggcaagtgcgtgagattcatctacggcggctgcggcggcaacagaaacaacttcgagagcgaggactactgcatggccgtgtgcaaggccatgatcccccccacccccctgcccaccaacgacgtggacgtgtacttcgagaccagcgccgacgacaacgagcacgccagattccagaaggccaaggagcagctggagatcagacacagaaacagaatggacagagtgaagaaggagtgggaggaggccgagctgcaggccaagaacctgcccaaggccgagagacagaccctgatccagcacttccaggccatggtgaaggccctggagaaggaggccgccagcgagaagcagcagctggtggagacccacctggccagagtggaggccatgctgaacgacagaagaagaatggccctggagaactacctggccgccctgcagagcgacccccccagaccccacagaatcctgcaggccctgagaagatacgtgagagccgagaacaaggacagactgcacaccatcagacactaccagcacgtgctggccgtggaccccgagaaggccgcccagatgaagagccaggtgatgacccacctgcacgtgatcgaggagagaagaaaccagagcctgagcctgctgtacaaggtgccctacgtggcccaggagatccaggaggagatcgacgagctgctgcaggagcagagagccgacatggaccagttcaccgccagcatcagcgagacccccgtggacgtgagagtgagcagcgaggagagcgaggagatcccccccttccaccccttccaccccttccccgccctgcccgagaacgaggacacccagcccgagctgtaccaccccatgaagaagggcagcggcgtgggcgagcaggacggcggcctgatcggcgccgaggagaaggtgatcaacagcaagaacaaggtggacgagaacatggtgatcgacgagaccctggacgtgaaggagatgatcttcaacgccgagagagtgggcggcctggaggaggagagagagagcgtgggccccctgagagaggacttcagcctgagcagcagcgccctgatcggcctgctggtgatcgccgtggccatcgccaccgtgatcgtgatcagcctggtgatgctgagaaagagacagtacggcaccatcagccacggcatcgtggaggtggaccccatgctgacccccgaggagagacacctgaacaagatgcagaaccacggctacgagaaccccacctacaagtacctggagcagatgcagatctag

SEQ ID NO: 119492 - protein, 76 aa, Artificial Sequence
  derived and/or modified sequence
QAEESNLQSLVSQYFQTVADYGKDLVEKAKGSELQTQAKAYFEKTQEELTPFFKKAGTDLLNFLSSFIDPKKQPAT

SEQ ID NO: 119493 - protein, 100 aa, Artificial Sequence
  derived and/or modified sequence
MKLLAATVLLLTICSLEGALVRRQAKEPCVESLVSQYFQTVTDYGKDLMEKVKSPELQAEAKSYFEKSKEQLTPLIKKAGTELVNFLSYFVELGTQPATQ

SEQ ID NO: 119494 - DNA, 303 bp, Artificial Sequence
  derived and/or modified sequence
atgaagttgctggcagccactgtcctgctgttgactatttgctccttagagggagcactcgtgcggagacaggccaaggagccatgcgtggagtcactggtctctcagtactttcagacagttaccgattatggcaaggacttgatggaaaaggttaaaagtcccgagctgcaagccgaggcaaagtcctactttgagaagagcaaggaacagctaacaccattgatcaagaaggctggcactgagttggtgaattttctcagctactttgttgagctggggacacagcctgcaactcagtag

SEQ ID NO: 119495 - DNA, 303 bp, Artificial Sequence
  derived and/or modified sequence
atgaagctgctggccgccaccgtgctgctgctgaccatctgcagcctggagggcgccctggtgcggcggcaggccaaggagccctgtgtggagagcctggtgtcccagtacttccagacagtgacagattatggcaaggacctgatggagaaggtgaagagccctgagctgcaggccgaggccaagagctactttgagaagagcaaggagcagctgacccccctcatcaagaaggccggcacagagctggtgaacttcctgagctactttgtggagctgggcacccagcctgccacccagtag

SEQ ID NO: 119496 - DNA, 303 bp, Artificial Sequence
  derived and/or modified sequence
atgaagctgctggccgccaccgtgctgctgctgaccatctgcagcttggagggtgctctggtgcggcgacaggccaaagaaccctgcgtggagagcctggtttcccagtactttcaaacggtgaccgactacgggaaggatctgatggaaaaggttaagagtccagagctccaggccgaagcaaaatcatacttcgagaaatccaaggagcagttgacacccttgattaaaaaggcagggacagagctcgtgaatttcttgtcatactttgtggagctaggcacacagccagccacgcaatag

SEQ ID NO: 119497 - DNA, 303 bp, Artificial Sequence
  derived and/or modified sequence
atgaagctcctcgctgcaacagtactgctgcttactatctgttccttggagggcgctctggtcaggcgccaggccaaagagccatgcgtggaatccctagttagtcagtattttcagaccgtgaccgactacggcaaggatttaatggaaaaagttaagtccccagagcttcaggccgaagccaagtcctatttcgaaaaaagtaaggaacagcttacacccctcataaagaaagcaggcacggagctggtcaattttctgtcttactttgtcgagctggggacacagccagctacccagtag

SEQ ID NO: 119498 - DNA, 474 bp, Artificial Sequence
  derived and/or modified sequence
aggcacagacaccaaggacagagacgctggctaggccgccctccccactgttaccaacatgaagctgctcgcagcaactgtgctactcctcaccatctgcagccttgaaggagctttggttcggagacaggcaaaggagccatgtgtggagagcctggtttctcagtacttccagaccgtgactgactatggcaaggacctgatggagaaggtcaagagcccagagcttcaggccgaggccaagtcttactttgaaaagtcaaaggagcagctgacacccctgatcaagaaggctggaacggaactggttaacttcttgagctatttcgtggaacttggaacacagcctgccacccagtgaagtgtccagaccattgtcttccaaccccagctggcctctagaacacccactggccagtcctagagctcctgtccctacccactctttgctacaataaatgctgaatgaatcca

SEQ ID NO: 119499 - DNA, 303 bp, Artificial Sequence
  derived and/or modified sequence
atgaagctgctggccgccaccgtgctgctgctgaccatctgcagcctggagggcgccctggtgagaagacaggccaaggagccctgcgtggagagcctggtgagccagtacttccagaccgtgaccgactacggcaaggacctgatggagaaggtgaagagccccgagctgcaggccgaggccaagagctacttcgagaagagcaaggagcagctgacccccctgatcaagaaggccggcaccgagctggtgaacttcctgagctacttcgtggagctgggcacccagcccgccacccagtag

SEQ ID NO: 119500 - protein, 55 aa, Artificial Sequence
  derived and/or modified sequence
EVSNPFDGLEELGKTLEDYTREFINRITQSELPAKMWDWFSETFRKVKEKLKTDS

SEQ ID NO: 119501 - protein, 83 aa, Artificial Sequence
  derived and/or modified sequence
MRLFLSLPVLVVVLSIVLEGPAPAQGTPDVSSALDKLKEFGNTLEDKARELISRIKQSELSAKMREWFSETFQKVKEKLKIDS

SEQ ID NO: 119502 - DNA, 168 bp, Artificial Sequence
  derived and/or modified sequence
gaggtgagcaaccccttcgacggcctggaggagctgggcaagaccctggaggactacaccagagagttcatcaacagaatcacccagagcgagctgcccgccaagatgtgggactggttcagcgagaccttcagaaaggtgaaggagaagctgaagaccgacagctag

SEQ ID NO: 119503 - DNA, 168 bp, Artificial Sequence
  derived and/or modified sequence
gaagtgtccaacccctttgacggactggaggagcttggtaagactctcgaagattatactcgagagttcattaaccgaatcacccagagtgaactgcccgccaaaatgtgggattggttttcagagacttttcgtaaggtgaaggagaagctgaagactgactcctag

SEQ ID NO: 119504 - DNA, 168 bp, Artificial Sequence
  derived and/or modified sequence
gaggtgagcaacccctttgatggcctggaggagctgggcaagaccctggaggactacacccgggagttcatcaaccgcatcacccagagcgagctgcctgccaagatgtgggactggttcagcgagaccttcaggaaggtgaaggagaagctgaagacagacagctag

SEQ ID NO: 119505 - DNA, 168 bp, Artificial Sequence
  derived and/or modified sequence
gaggtgagcaaccccttcgacggcctggaggagctgggcaagaccctcgaagactataccagagagtttatcaaccgcatcacccaatccgagctgccagccaagatgtgggactggttttcagagacttttaggaaggtaaaggagaagcttaagactgactcttag

SEQ ID NO: 119506 - DNA, 168 bp, Artificial Sequence
  derived and/or modified sequence
gaggtgtctaatcccttcgacggactcgaagaactgggaaaaacattggaggactacactcgtgagttcattaatcggatcacacagtcggagttgccggcaaagatgtgggactggttcagcgaaacttttcggaaggtaaaggaaaagctcaagaccgactcctag

SEQ ID NO: 119507 - DNA, 754 bp, Artificial Sequence
  derived and/or modified sequence
caaccaagccctccagcaaggattcaggttgttgagtgcttgggagggacacccgcctccactctgcaagaactcataaagggagatgaggggatcgtgggagggagggaggagggtgccactgatcccctgaacccctgcctccgcctccagggtgcccctccggcctcgccatgaggctcttcctgtcgctcccggtcctggtggtggttctgtcgatcgtcttggaaggcccagccccagcctagggggctccagaagtctccaacccctttgatggcctggaggagttaggaaagaccctggaggactacactcgggaattcatcaaccgcatcacacagagtgaacttcctgccaagatgtgggattggttttcagagacatttcggaaagtgaaggagaaactcaagactgactcatgaggacctgaagggtgacatcccaggaggggcctctgaaatttccaacaccccagcgcctgtactgaggacgccctccatgtgtgtccaatgtggtcacacgcccaggtgtgaccaataaaaatcctatggaaaattctctctggccaggcatggtggctgacgcctgtaatcccagcactttgggaggctgaggcgggcggatcacaaggtcaggagattgagcccatcctggctaacacggtgaaaccccgtctctactaaaaatacaaaaaaaatagccaagcgtggtggcaggcgcctgtagtcccagctattcgggaggctgaggc

SEQ ID NO: 119508 - DNA, 252 bp, Artificial Sequence
  derived and/or modified sequence
atgcggttgttccttagtttaccagtgcttgttgttgtgctgtctatcgtgctggaaggcccagcccccgcccaagggacaccagatgtgtcatctgctctggataagttaaaggagtttggcaataccttggaggataaagccagagaactcatcagcagaatcaaacagtctgagctcagtgctaagatgagagaatggttctcggaaacgtttcaaaaagtgaaggagaaactgaagatcgacagctag

SEQ ID NO: 119509 - DNA, 252 bp, Artificial Sequence
  derived and/or modified sequence
atgaggctcttcctgagcctgcctgtgctggtggtggtgctgagcatcgtgctggagggccctgccccagcccagggcaccccagatgtgagcagcgccctggacaagctgaaggagtttggaaacaccctggaggacaaggcccgggagctgatcagccgcatcaagcagagcgagctgagcgccaagatgagggagtggttcagcgagaccttccagaaggtgaaggagaagctgaagattgacagctag

SEQ ID NO: 119510 - DNA, 252 bp, Artificial Sequence
  derived and/or modified sequence
atgcggctgttcctgagcctgcccgtgctggtggtggtgctgagcatcgtcctcgaggggcctgcgcccgctcagggtacgcccgacgtgagcagcgccctggataaactaaaagaatttggcaacacactcgaagacaaagcccgtgagttaatctcaaggatcaagcaatcagagttgtctgccaagatgcgtgagtggttcagcgagactttccagaaggtaaaagaaaagctgaaaatcgacagctag

SEQ ID NO: 119511 - DNA, 252 bp, Artificial Sequence
  derived and/or modified sequence
atgcgattgtttctcagtctgccagtcctcgtagtggtccttagcatcgtcttagagggccctgccccagcccaaggcacacccgatgtatcatcggcgctggacaaattaaaagagttcggaaatactttggaggataaagcgagggaactgatcagccgcattaagcaatcggagctgtccgctaagatgcgggaatggttttcagaaaccttccagaaggtgaaggagaagctgaagattgatagttag

SEQ ID NO: 119512 - DNA, 461 bp, Artificial Sequence
  derived and/or modified sequence
ctccccagcctgataaaggtcctgcgggcaggacaggacctcccaaccaagccctccagcaaggattcagagtgcccctccggcctcgccatgaggctcttcctgtcgctcccggtcctggtggtggttctgtcgatcgtcttggaaggcccagccccagcccaggggaccccagacgtctccagtgccttggataagctgaaggagtttggaaacacactggaggacaaggctcgggaactcatcagccgcatcaaacagagtgaactttctgccaagatgcgggagtggttttcagagacatttcagaaagtgaaggagaaactcaagattgactcatgaggacctgaagggtgacatcccaggaggggcctctgaaatttcccacaccccagcgcctgtgctgaggactccctccatgtggccccaggtgccaccaataaaaatcctacagaaaattc

SEQ ID NO: 119513 - DNA, 252 bp, Artificial Sequence
  derived and/or modified sequence
atgagactgttcctgagcctgcccgtgctggtggtggtgctgagcatcgtgctggagggccccgcccccgcccagggcacccccgacgtgagcagcgccctggacaagctgaaggagttcggcaacaccctggaggacaaggccagagagctgatcagcagaatcaagcagagcgagctgagcgccaagatgagagagtggttcagcgagaccttccagaaggtgaaggagaagctgaagatcgacagctag

SEQ ID NO: 119514 - protein, 127 aa, Artificial Sequence
  derived and/or modified sequence
MSLLRNRLQALPALCLCVLVLACIGACQPEAQEGTLSPPPKLKMSRWSLVRGRMKELLETVVNRTRDGWQWFWSPSTFRGFMQTYYDDHLRDLGPLTKAWFLESKDSLLKKTHSLCPRLVCGDKDQG

SEQ ID NO: 119515 - DNA, 384 bp, Artificial Sequence
  derived and/or modified sequence
atgagcctgctgagaaacagactgcaggccctgcccgccctgtgcctgtgcgtgctggtgctggcctgcatcggcgcctgccagcccgaggcccaggagggcaccctgagccccccccccaagctgaagatgagcagatggagcctggtgagaggcagaatgaaggagctgctggagaccgtggtgaacagaaccagagacggctggcagtggttctggagccccagcaccttcagaggcttcatgcagacctactacgacgaccacctgagagacctgggccccctgaccaaggcctggttcctggagagcaaggacagcctgctgaagaagacccacagcctgtgccccagactggtgtgcggcgacaaggaccagggctag

SEQ ID NO: 119516 - DNA, 384 bp, Artificial Sequence
  derived and/or modified sequence
atgtctctcctcaggaacaggcttcaggcgctgccagccctctgcctttgtgtgctggtactcgcatgcatcggcgcgtgccagcctgaggcccaggaagggactctgtctcccccccccaaactgaaaatgtccagatggagcttagttcgcggacgaatgaaagagctcctcgaaacagtggtgaatcggacaagggatgggtggcagtggttttggagccccagcaccttcaggggattcatgcagacgtactatgacgatcatctcagggatctagggcctctgaccaaggcttggtttttggagagcaaggactccctgctgaagaagacacactccctctgtccacggctggtttgtggggacaaagatcagggatag

SEQ ID NO: 119517 - DNA, 384 bp, Artificial Sequence
  derived and/or modified sequence
atgagcctgctgaggaaccggctgcaggccctgcctgccctgtgcctgtgtgtgctggtgctggcctgcatcggggcctgccagcctgaggcccaggagggcaccctgagccccccacccaagctgaagatgagccgctggagcctggtgcggggccgcatgaaggagctgctggagaccgtggtgaacagaacaagagatggctggcagtggttctggagccccagcaccttccggggcttcatgcagacctactatgatgaccacctgcgggacctgggccccctgaccaaggcctggttcctggagagcaaggacagcctgctgaagaagacccacagcctgtgcccccggctggtgtgtggggacaaggaccagggctag

SEQ ID NO: 119518 - DNA, 384 bp, Artificial Sequence
  derived and/or modified sequence
atgagcctgctgcggaaccggctgcaggccctgcccgccctgtgcctgtgtgtgcttgtgttggcttgcattggggcttgtcagcctgaagcccaggaaggaactttgtctcccccccccaagctgaagatgagtaggtggtctctggtaaggggcaggatgaaagagctgttagaaactgtggttaacaggacccgggacggttggcagtggttctggtcaccgtcgacgtttcgagggttcatgcagacttattacgatgaccaccttagggacctcggacccctaacaaaggcatggttcctggagtctaaggatagcctgctcaagaaaacccactctttgtgccctcgactggtatgcggggacaaagaccaggggtag

SEQ ID NO: 119519 - DNA, 615 bp, Artificial Sequence
  derived and/or modified sequence
gagttgagcacagagggacagaggcacggaacccccagaaatgtccctcctcagaaacaggctccaggccctgcctgccctgtgcctctgcgtgctggtcctggcctgcattggggcatgccagccagaggcccaggaaggaaccctgagccccccaccaaagctaaagatgagtcgctggagcctggtgaggggcaggatgaaggagctgctggagacagtggtgaacaggaccagagacgggtggcaatggttctggagcccgagcaccttccggggcttcatgcagacctactatgacgaccacctgagggacctgggtccgctcaccaaggcctggttcctcgaatccaaagacagcctcttgaagaagacccacagcctgtgccccaggcttgtctgtggggacaaggaccagggttaaaatgttcataaaagccaggtgtggttgtggcgggtgcctgtagtcccagctactcaggaggctgaggtaggatgatggcttgagcccaggagttcgagaccagcctgggcaacacagcgagatctcttgggggtaaaacaaaaagaaaaaaaaaagttcatacttctccaataaataaagtctcacctgtg

SEQ ID NO: 119520 - DNA, 384 bp, Artificial Sequence
  derived and/or modified sequence
atgtcgcttctgaggaatcgactgcaggcactgcctgctctatgcctgtgcgtccttgtgctcgcttgtatcggcgcttgccaaccggaagcccaggaggggaccctgtccccccctcctaagcttaagatgtccaggtggagcctggtgcgcggtcgcatgaaggaactgctggagaccgtggtgaaccgcacgcgggatggatggcaatggttctggtctccctcgacctttcgcggattcatgcagacctattatgatgatcatcttagagacctgggtccccttacaaaggcatggtttcttgagtccaaagacagtctccttaaaaagacccactcactgtgtcccaggttggtctgcggcgataaggaccagggatag

SEQ ID NO: 119521 - DNA, 384 bp, Artificial Sequence
  derived and/or modified sequence
atgagtctccttcgtaaccgcctccaggccctgccagcactgtgtctttgtgtgctggttttagcgtgcataggcgcctgtcagcctgaggcccaagaaggtactctcagccctccgccaaagctcaagatgagccgctggtcactggtgcggggtcgcatgaaagaacttctggagaccgtggtgaacagaactcgcgacggctggcaatggttctggtcgccatccactttccgcggcttcatgcagacttactacgatgaccatctgagagaccttggccctttgaccaaggcatggttcttagaatctaaggactcgctgttgaaaaaaacacattcgctgtgcccaagacttgtgtgcggggacaaagatcaggggtag

SEQ ID NO: 119522 - DNA, 384 bp, Artificial Sequence
  derived and/or modified sequence
atgagcttactgaggaataggttgcaggccctccccgccctttgtttgtgtgttttggtgctagcctgtatcggcgcctgtcagcctgaggcccaggaaggcaccctgagtcctcccccaaaactgaaaatgagccgatggtccctcgttcgcggacgcatgaaggaactcctggagactgtggtgaataggacccgggatgggtggcagtggttttggagcccgagtaccttcagaggtttcatgcagacgtattatgatgatcacctgcgggacttaggacccctgaccaaagcgtggtttctggaatcaaaggatagtctcctgaagaaaactcactctttgtgcccccgacttgtatgtggggataaagatcagggatag

SEQ ID NO: 119523 - DNA, 384 bp, Artificial Sequence
  derived and/or modified sequence
atgagtctactacgtaaccgcctgcaggccctccctgccctgtgcctgtgcgttctcgttcttgcatgcattggcgcatgtcagccagaagcccaggagggcacgctttccccaccaccaaaactgaagatgtcacgttggtcccttgtgcgcggtagaatgaaagagctgctcgaaacagtggtgaatcgcactagagacggctggcagtggttttggagtccctctacctttcggggattcatgcagacgtactatgatgatcacctccgcgacctgggccctctgaccaaagcttggtttcttgaatccaaggatagcctcctgaaaaagacacattcattatgcccaagactggtgtgtggtgacaaagatcaggggtag

SEQ ID NO: 119524 - DNA, 384 bp, Artificial Sequence
  derived and/or modified sequence
atgagcctgctgcggaaccggctgcaggccctgcccgccctgtgcctgtgcgtgctggtgctggcctgcatcggggcatgtcaacctgaggcccaggagggaacactctcccctcctcccaaactgaagatgtcaagatggtcgctggtgcgtggaagaatgaaggaactgctcgagacggtggtcaatagaaccagagacggttggcagtggttttggtctccgtccacttttcgcggttttatgcaaacatattacgacgaccacctccgcgacctggggcccctcacaaaggcatggtttctagaaagtaaagactctttgttgaagaagacccatagtctgtgtcctagactggtttgcggggataaagaccaggggtag

SEQ ID NO: 119525 - DNA, 384 bp, Artificial Sequence
  derived and/or modified sequence
atgagcctgctgcggaaccggctgcaggccctgcccgccctgtgcctgtgcgtcctagtgttggcctgcatcggtgcttgccaacccgaagcacaggagggaacgctgagtccccccccgaagctcaaaatgtctaggtggtcgctggtccgggggcgcatgaaggagttactggagaccgtcgtcaatcgcacccgggatggttggcagtggttctggtcaccatcaactttccgtggatttatgcagacctattatgatgaccatctacgggatttaggtccccttaccaaagcttggtttcttgaaagcaaagacagcttgctgaagaagacccattcactctgccccagactggtgtgtggcgataaggaccaaggatag

SEQ ID NO: 119526 - DNA, 384 bp, Artificial Sequence
  derived and/or modified sequence
atgagcctgctgcggaaccggctgcaggccctgcccgccctgtgcctctgtgtgttggtcttagcgtgtatcggggcatgccagccggaagcgcaggaagggaccctgtcacctcctcccaaactcaagatgtcaaggtggagcctcgtccggggccgcatgaaggaattgctggaaaccgtggtgaacagaacaagagacggttggcagtggttttggagccctagcacttttaggggatttatgcagacctattatgacgaccaccttcgcgacctgggacctctgaccaaggcctggttcttggagtccaaggacagccttctgaaaaagacccactcactttgcccccgcctggtgtgtggtgacaaggatcagggctag

SEQ ID NO: 119527 - DNA, 384 bp, Artificial Sequence
  derived and/or modified sequence
atgagtctgctgagaaacaggttgcaagccctcccagctctgtgtttgtgtgtgctggtcctggcctgcatcggagcatgccaaccggaagctcaggagggaaccttgtccccccctcctaaactgaaaatgagtcggtggtccttggtccggggacgaatgaaggaactgctggagacagtggtaaatcgcacgcgcgacgggtggcaatggttttggtctccctctaccttccggggatttatgcagacgtactatgacgaccacttaagggaccttggaccccttaccaaggcttggtttctagaatctaaagactcgctcctaaaaaaaactcactctctgtgtcctcggctggtctgcggcgataaggaccagggatag

SEQ ID NO: 119528 - DNA, 384 bp, Artificial Sequence
  derived and/or modified sequence
atgagcctcctgagaaaccgcctccaagcccttccggcattgtgtctttgtgtgttggtgctcgcctgtattggagcgtgccagccagaggcccaagaaggaactctgagcccgcctccaaagcttaaaatgagcaggtggtcactcgtgcgcggaaggatgaaggagttgctggagacagttgtaaacaggaccagagacggttggcagtggttctggtcaccatctacgttcaggggatttatgcaaacatattacgacgatcacttgagagacctggggcctttgaccaaggcctggttcctcgagtcaaaagatagccttctcaagaaaactcattctctttgtcctcgtctggtctgcggagataaagatcagggatag

SEQ ID NO: 119529 - DNA, 384 bp, Artificial Sequence
  derived and/or modified sequence
atgtcgctgctccgaaacaggctgcaggcacttcctgccctatgcctgtgcgttctcgtcctggcgtgtatcggcgcttgccagcctgaggcacaagaggggactcttagtccgccaccgaagctcaaaatgtctagatggtctctggtgcggggtcgaatgaaagagctcctcgaaaccgtggtgaaccgcactagagatggctggcagtggttctggagcccctccacgtttcgtggattcatgcagacatattatgacgaccacctcagagatcttggacccctgaccaaggcctggtttctggagtctaaagactcactgctcaagaaaacccacagcctctgccctcggctggtgtgcggcgataaggaccagggctag

SEQ ID NO: 119530 - DNA, 1829 bp, Artificial Sequence
  derived and/or modified sequence
gagttgagcacagagggacagaggcacggaacccccagaaatgtccctcctcagaaacaggctccaggccctgcctgccctgtgcctctgcgtgctggtcctggcctgcattggggcatgccagccagaggcccaggaaggaaccctgagccccccaccaaagctaaagatgagtcgctggagcctggtgaggggcaggatgaaggagctgctggagacagtggtgaacaggaccagagacgggtggcaatggttctggagcccgagcaccttccggggcttcatgcagacctactatgacgaccacctgagggacctgggtccgctcaccaaggcctggttcctcgaatccaaagacagcctcttgaagaagacccacagcctgtgccccaggcttgtctgtggggacaaggaccagggttaaaatgttcataaaagccaggtgtggttgtggcgggtgcctgtagtcccagctactcaggaggctgaggtaggatgatggcttgagcccaggagttcgagaccagcctgggcaacacagcgagatctcttgggggtaaaacaaaaagaaaaaaaaaagttcatacttctccaataaataaagtctcacctgtgtccctgtctggatccttccccagtgtggccagaaaaaaacccaccccactgcctcccaggaatcaatgagtagaagaggtgacacctgatggggaaggaagagtagggaggtcgggaagggtatcaaggaataacaccctattgtgggcttgcggagaatgggggacttcaaggcgtgtcagtttcaggagggtgagggcaggagcgtgggtggagtcagcaggtccccatgatggccctcactgagagcttcgcccttgtctcctacaagctctgactccattcccagtgggcacccagcacctccaacccctccacagcccccaacccagcctctgtcggaggcgaattctcagagtgagggttccctgtcacttgagagaaggttccctgtgacgtgaccttgggggacgtcattgccctttctgtccccacccaccccctccgcagttctgttggccaggactttggcctagacaaaggatgggggttgtggctgtggagcggaagtgggtctcaaccactataaatcctctctgtgcccgtccggagctggtgaggacagcctgccagagtctggtctctggacactatgggcacacgactcctcccagctctgtttcttgtcctcctggtattgggatttgaggtccaggggacccaacagccccagcaagatgagatgcctagcccgaccttcctcacccaggtgaaggaatctctctccagttactgggagtcagcaaagacagccgcccagaacctgtacgagaagacatacctgcccgctgtagatgagaaactcagggacttgtacagcaaaagcacagcagccatgagcacttacacaggcatttttactgaccaagttctttctgtgctgaagggagaggagtaacagccagaccccccatcagtggacaaggggagagtcccctactcccctgatcccccaggttcagactgagctcccccttcccagtagctcttgcatcctcctcccaactctagcctgaattcttttcaataaaaaatacaattcaagttgcttctcatggatggcactgcttttctgaggactcaagggccaagatggaggggctgactcagtccagccaacatttaatgagcacctactttatgtatggagctctaacccatgggtccatgggaataaagcagtgaatagtaacaataaataatcgtaacagcaa

SEQ ID NO: 119531 - DNA, 1761 bp, Artificial Sequence
  derived and/or modified sequence
gagttgagcacagagggacagaggcacggaacccccagaaatgtccctcctcagaaacaggctccaggccctgcctgccctgtgcctctgcgtgctggtcctggcctgcattggggcatgccagccagaggcccaggaaggaaccctgagccccccaccaaagctaaagatgagtcgctggagcctggtgaggggcaggatgaaggagctgctggagacagtggtgaacaggaccagagacgggtggcaatggttctggagcccgagcaccttccggggcttcatgcagacctactatgacgaccacctgagggacctgggtccgctcaccaaggcctggttcctcgaatccaaagacagcctcttgaagaagacccacagcctgtgccccaggcttgtctgtggggacaaggaccagggttaaaatgttcataaaagccaggtgtggttgtggcgggtgcctgtagtcccagctactcaggaggctgaggtaaaacaaaaagaaaaaaaaaagttcatacttctccaataaataaagtctcacctgtgtccctgtctggatccttccccagtgtggccagaaaaaaacccaccccactgcctcccaggaatcaatgagtagaagaggtgacacctgatggggaaggaagagtagggaggtcgggaagggtatcaaggaataacaccctattgtgggcttgcggagaatgggggacttcaaggcgtgtcagtttcaggagggtgagggcaggagcgtgggtggagtcagcaggtccccatgatggccctcactgagagcttcgcccttgtctcctacaagctctgactccattcccagtgggcacccagcacctccaacccctccacagcccccaacccagcctctgtcggaggcgaattctcagagtgagggttccctgtcacttgagagaaggttccctgtgacgtgaccttgggggacgtcattgccctttctgtccccacccaccccctccgcagttctgttggccaggactttggcctagacaaaggatgggggttgtggctgtggagcggaagtgggtctcaaccactataaatcctctctgtgcccgtccggagctggtgaggacagcctgccagagtctggtctctggacactatgggcacacgactcctcccagctctgtttcttgtcctcctggtattgggatttgaggtccaggggacccaacagccccagcaagatgagatgcctagcccgaccttcctcacccaggtgaaggaatctctctccagttactgggagtcagcaaagacagccgcccagaacctgtacgagaagacatacctgcccgctgtagatgagaaactcagggacttgtacagcaaaagcacagcagccatgagcacttacacaggcatttttactgaccaagttctttctgtgctgaagggagaggagtaacagccagaccccccatcagtggacaaggggagagtcccctactcccctgatcccccaggttcagactgagctcccccttcccagtagctcttgcatcctcctcccaactctagcctgaattcttttcaataaaaaatacaattcaagttgcttctcatggatggcactgcttttctgaggactcaagggccaagatggaggggctgactcagtccagccaacatttaatgagcacctactttatgtatggagctctaacccatgggtccatgggaataaagcagtgaatagtaacaataaataatcgtaacagc

SEQ ID NO: 119532 - DNA, 613 bp, Artificial Sequence
  derived and/or modified sequence
gagttgagcacagagggacagaggcacggaacccccagaaatgtccctcctcagaaacaggctccaggccctgcctgccctgtgcctctgcgtgctggtcctggcctgcattggggcatgccagccagaggcccaggaaggaaccctgagccccccaccaaagctaaagatgagtcgctggagcctggtgaggggcaggatgaaggagctgctggagacagtggtgaacaggaccagagacgggtggcaatggttctggagcccgagcaccttccggggcttcatgcagacctactatgacgaccacctgagggacctgggtccgctcaccaaggcctggttcctcgaatccaaagacagcctcttgaagaagacccacagcctgtgccccaggcttgtctgtggggacaaggaccagggttaaaatgttcataaaagccaggtgtggttgtggcgggtgcctgtagtcccagctactcaggaggctgaggtaggatgatggcttgagcccaggagttcgagaccagcctgggcaacacagcgagatctcttgggggtaaaacaaaaagaaaaaaaaaagttcatacttctccaataaataaagtctcacctg

SEQ ID NO: 119533 - protein, 189 aa, Artificial Sequence
  derived and/or modified sequence
MVMLLLLLSALAGLFGAAEGQAFHLGKCPNPPVQENFDVNKYLGRWYEIEKIPTTFENGRCIQANYSLMENGKIKVLNQELRADGTVNQIEGEATPVNLTEPAKLEVKFSWFMPSAPYWILATDYENYALVYSCTCIIQLFHVDFAWILARNPNLPPETVDSLKNILTSNNIDVKKMTVTDQVNCPKLS

SEQ ID NO: 119534 - protein, 149 aa, Artificial Sequence
  derived and/or modified sequence
MVMLLLLLSALAGLFGAAEGQAFHLGKCPNPPVQENFDVNKYLGRWYEIEKIPTTFENGRCIQANYSLMENGKIKVLNQELRADGTVNQIEGEATPVNLTEPAKLEVKFSWFMPSAPYWILATDYENYALVYSCTCIIQLFHVDFAWIL

SEQ ID NO: 119535 - DNA, 570 bp, Artificial Sequence
  derived and/or modified sequence
atggtgatgctactgctgctgcttagcgccctcgcagggctgtttggggctgcagaaggccaggcctttcacttagggaagtgcccgaatcctccggtacaggaaaactttgatgtaaataagtatctggggaggtggtacgagatcgaaaaaattccaaccacctttgaaaatggaaggtgcatccaggccaattatagtttaatggaaaatggaaagataaaggttctgaatcaagagctccgggccgacgggactgtgaaccagatcgaaggcgaggccacacctgtgaatctgacagaaccagctaagctggaagtgaaattttcatggttcatgccctcggcaccatactggattcttgctaccgattatgaaaattacgctctggtctactcctgtacgtgcattattcaactgtttcacgttgatttcgcctggattctggccaggaacccgaatctgccaccagaaaccgttgacagtctgaaaaatatcctcacatctaacaatattgacgtcaagaaaatgaccgtaacagaccaggtgaactgccccaagcttagctag

SEQ ID NO: 119536 - DNA, 450 bp, Artificial Sequence
  derived and/or modified sequence
atggtgatgttactcctgctattaagtgccttggccggcttgttcggggccgctgaaggccaggctttccacctcgggaagtgcccaaatccgcctgtgcaggaaaatttcgatgtgaataagtatctcggcagatggtatgagatcgagaaaattccgacgacattcgaaaacgggcggtgcattcaggctaattactccctcatggagaacggcaagatcaaagtcctgaatcaggagctgcgcgctgacggaacagtcaatcaaatcgaaggagaggcaaccccggtcaacctgaccgagcctgccaagctggaagtgaaattctcttggttcatgccatctgccccgtactggatccttgccacggattatgagaattacgctttggtctattcctgcacctgcattatccagctcttccacgtggactttgcctggatcttgtag

SEQ ID NO: 119537 - DNA, 570 bp, Artificial Sequence
  derived and/or modified sequence
atggtgatgctgctgctgctgctgagcgccctggccggcctgtttggagctgctgagggccaggccttccacctgggcaaatgtcccaacccccctgtgcaggagaactttgatgtgaacaagtacctgggccgctggtatgaaattgagaagatccccaccacctttgaaaatggccgctgcatccaggccaactacagcctgatggagaatggcaagatcaaggtgctgaaccaggagctgcgggcagatggcaccgtgaaccagatcgagggggaggccacccctgtgaacctgacagagcccgccaagctggaggtgaagttctcctggttcatgcccagcgccccctactggatcctggccacagattatgagaactatgccctggtgtacagctgcacctgcatcatccagctgttccacgtggactttgcctggatcctggccaggaaccccaacctgcccccagagaccgtggacagcctgaagaacatcctgaccagcaacaacattgatgtgaagaagatgacagtgacagaccaggtgaactgccccaagctgtcctag

SEQ ID NO: 119538 - DNA, 450 bp, Artificial Sequence
  derived and/or modified sequence
atggtgatgctgctgctgctgctgagcgccctggccggcctgtttggagctgctgagggccaggccttccacctgggcaaatgtcccaacccccctgtgcaggagaactttgatgtgaacaagtacctgggccgctggtatgaaattgagaagatccccaccacctttgaaaatggccgctgcatccaggccaactacagcctgatggagaatggcaagatcaaggtgctgaaccaggagctgcgggcagatggcaccgtgaaccagatcgagggggaggccacccctgtgaacctgacagagcccgccaagctggaggtgaagttctcctggttcatgcccagcgccccctactggatcctggccacagattatgagaactatgccctggtgtacagctgcacctgcatcatccagctgttccacgtggactttgcctggatcctgtag

SEQ ID NO: 119539 - DNA, 570 bp, Artificial Sequence
  derived and/or modified sequence
atggtgatgctgctgctgctgctgagcgccctggccggcctgttcggagccgccgaaggacaggcatttcatctgggaaaatgcccaaatcctccagtccaagaaaactttgatgtcaacaagtatctgggcaggtggtatgagatagaaaagattccaacaacatttgaaaatggccggtgtatccaggcaaattattcattgatggaaaatggcaaaattaaagtgttaaatcaagaacttagggctgatggtaccgtgaaccaaatagaaggcgaggccactcccgtcaacttaactgaacccgccaagctcgaggtcaaattttcctggttcatgccgtctgcaccctattggattctcgccaccgattatgaaaactacgccctcgtgtattcatgtacatgcataattcaactgttccacgtggactttgcctggatcttggctaggaaccccaatctgccaccagagacagtggattctttaaaaaacattctgacatccaataacatcgatgtgaaaaagatgactgttacagaccaggtgaactgccctaaactcagctag

SEQ ID NO: 119540 - DNA, 450 bp, Artificial Sequence
  derived and/or modified sequence
atggtgatgctgctgctgctgctgagcgccctggccggcctgttcggagcggctgagggccaggcattccacctcggtaaatgccccaatccgcccgtgcaagaaaattttgatgtcaataaatacctcggtcggtggtatgagattgagaagattcccaccacctttgaaaatgggagatgtatccaggccaactatagtcttatggagaacggcaaaatcaaggtcttaaaccaggagttgagagccgacggcaccgttaatcagatcgaaggagaggcgacaccagtgaacctcacagagcctgccaaactcgaggtgaagttcagttggtttatgcctagcgcgccgtactggatcctggcaaccgattacgaaaactacgcactagtatactcctgtacgtgtatcatccaactgtttcacgtggattttgcatggattctgtag

SEQ ID NO: 119541 - DNA, 570 bp, Artificial Sequence
  derived and/or modified sequence
atggtgatgttactacttttgctgagtgctttagccggtttgtttggtgcagcggaaggacaggctttccatctcgggaaatgccctaatccacccgtccaagagaacttcgatgttaataagtaccttggcaggtggtatgagatcgagaaaatcccaacaacatttgaaaatggtcggtgtatccaggccaattattctctcatggagaatggcaagatcaaggtgctgaatcaggaactgcgcgctgacggtacagtgaaccaaattgagggggaggccacaccagtgaatctcactgaacctgccaaactggaggtgaaattctcatggttcatgccctccgccccatactggattctggcgactgactacgaaaattatgccctggtctactcctgcacgtgtatcattcagctgttccacgtcgatttcgcttggattctcgccaggaacccaaacctgcctcctgaaacggtcgatagccttaagaacatattgacatccaacaacatagacgttaagaaaatgacggtcacagatcaggttaactgccctaagctttcctag

SEQ ID NO: 119542 - DNA, 450 bp, Artificial Sequence
  derived and/or modified sequence
atggtaatgcttctgcttctgctatccgccctggccggtctttttggagctgcagaagggcaggcctttcacctgggtaagtgtcctaatccacctgttcaggagaatttcgatgttaacaaatatctgggacggtggtacgagatcgaaaagattccaaccacttttgaaaatgggagatgtattcaagctaactatagcctgatggagaatggaaaaatcaaagtgctaaaccaggagttgagggctgatggtaccgtcaatcagatagagggtgaggctactcccgttaatctgaccgaacccgctaaactggaagttaagttcagctggttcatgccctcagctccttattggattctcgctacagactatgaaaactacgccctggtgtactcctgcacctgcattatccagctgttccacgtggatttcgcctggattctgtag

SEQ ID NO: 119543 - DNA, 1130 bp, Artificial Sequence
  derived and/or modified sequence
tctctctcgcacacatacccacacacacacacacacacacacacgcgcgcgcgaaaacaatatctcatttcttcttcagggagcagctgtgaaggaaatcgggggaggaggatggacacaacatcccatctttgtgtttcgatacagactaagcttttaggccaaccctcctgactggatgggggcggcgggcgtggcatgcatgaaaagtaaacatcagagacctgaagaagcttataaaatagcttgggagaggccagtcaccaagacaggcatctcaaatcggctgattctgcatctggaaactgccttcatcttgaaagaaaagctccaggtcccttctccagccacccagccccaagatggtgatgctgctgctgctgctttccgcactggctggcctcttcggtgcggcagagggacaagcatttcatcttgggaagtgccccaatcctccggtgcaggagaattttgacgtgaataagtatctcggaagatggtacgaaattgagaagatcccaacaacctttgagaatggacgctgcatccaggccaactactcactaatggaaaacggaaagatcaaagtgttaaaccaggagttgagagctgatggaactgtgaatcaaatcgaaggtgaagccaccccagttaacctcacagagcctgccaagctggaagttaagttttcctggtttatgccatcggcaccgtactggatcctggccaccgactatgagaactatgccctcgtgtattcctgtacctgcatcatccaactttttcacgtggattttgcttggatcttggcaagaaaccctaatctccctccagaaacagtggactctctaaaaaatatcctgacttctaataacattgatgtcaagaaaatgacggtcacagaccaggtgaactgccccaagctctcgtaaccaggttctacagggaggctgcacccactccatgttacttctgcttcgctttcccctaccccccccccataaagacaaaccaatcaaccacgacaaaggaagttgacctgaacatgtaaccatgccctaccctgttaccttgctagctgcaaaataaacttgttgctgacctgctgtgctcgcagtagattccaagtt

SEQ ID NO: 119544 - DNA, 681 bp, Artificial Sequence
  derived and/or modified sequence
aagacaggcatctcaaatcggctgattctgcatctggaaactgccttcatcttgaaagaaaagtttaccaggaagtaacccgggcaaattcacctcgttggtatgaagagagtgtcagcagaggtcgcctccagaggaggtgctgtggagactgagcgcatagcacccttaaaatcctgggaccagggcttctccacggctccaggtcccttctccagccacccagccccaagatggtgatgctgctgctgctgctttccgcactggctggcctcttcggtgcggcagagggacaagcatttcatcttgggaagtgccccaatcctccggtgcaggagaattttgacgtgaataagtatctcggaagatggtacgaaattgagaagatcccaacaacctttgagaatggacgctgcatccaggccaactactcactaatggaaaacggaaagatcaaagtgttaaaccaggagttgagagctgatggaactgtgaatcaaatcgaaggtgaagccaccccagttaacctcacagagcctgccaagctggaagttaagttttcctggtttatgccatcggcaccgtactggatcctggccaccgactatgagaactatgccctcgtgtattcctgtacctgcatcatccaactttttcacgtggattttgcttggatcttgg

SEQ ID NO: 119545 - DNA, 570 bp, Artificial Sequence
  derived and/or modified sequence
atggtgatgctgctgctgctgctgagcgccctggccggcctgttcggcgccgccgagggccaggccttccacctgggcaagtgccccaacccccccgtgcaggagaacttcgacgtgaacaagtacctgggcagatggtacgagatcgagaagatccccaccaccttcgagaacggcagatgcatccaggccaactacagcctgatggagaacggcaagatcaaggtgctgaaccaggagctgagagccgacggcaccgtgaaccagatcgagggcgaggccacccccgtgaacctgaccgagcccgccaagctggaggtgaagttcagctggttcatgcccagcgccccctactggatcctggccaccgactacgagaactacgccctggtgtacagctgcacctgcatcatccagctgttccacgtggacttcgcctggatcctggccagaaaccccaacctgccccccgagaccgtggacagcctgaagaacatcctgaccagcaacaacatcgacgtgaagaagatgaccgtgaccgaccaggtgaactgccccaagctgagctag

SEQ ID NO: 119546 - DNA, 450 bp, Artificial Sequence
  derived and/or modified sequence
atggtgatgctgctgctgctgctgagcgccctggccggcctgttcggcgccgccgagggccaggccttccacctgggcaagtgccccaacccccccgtgcaggagaacttcgacgtgaacaagtacctgggcagatggtacgagatcgagaagatccccaccaccttcgagaacggcagatgcatccaggccaactacagcctgatggagaacggcaagatcaaggtgctgaaccaggagctgagagccgacggcaccgtgaaccagatcgagggcgaggccacccccgtgaacctgaccgagcccgccaagctggaggtgaagttcagctggttcatgcccagcgccccctactggatcctggccaccgactacgagaactacgccctggtgtacagctgcacctgcatcatccagctgttccacgtggacttcgcctggatcctgtag

SEQ ID NO: 119547 - protein, 261 aa, Artificial Sequence
  derived and/or modified sequence
MWVPVVFLTLSVTWIGAAPLILSRIVGGWECEKHSQPWQVLVASRGRAVCGGVLVHPQWVLTAAHCIRNKSVILLGRHSLFHPEDTGQVFQVSHSFPHPLYDMSLLKNRFLRPGDDSSHDLMLLRLSEPAELTDAVKVMDLPTQEPALGTTCYASGWGSIEPEEFLTPKKLQCVDLHVISNDVCAQVHPQKVTKFMLCAGRWTGGKSTCSGDSGGPLVCNGVLQGITSWGSEPCALPERPSLYTKVVHYRKWIKDTIVANP

SEQ ID NO: 119548 - protein, 220 aa, Artificial Sequence
  derived and/or modified sequence
MWVPVVFLTLSVTWIGAAPLILSRIVGGWECEKHSQPWQVLVASRGRAVCGGVLVHPQWVLTAAHCIRNKSVILLGRHSLFHPEDTGQVFQVSHSFPHPLYDMSLLKNRFLRPGDDSSIEPEEFLTPKKLQCVDLHVISNDVCAQVHPQKVTKFMLCAGRWTGGKSTCSGDSGGPLVCNGVLQGITSWGSEPCALPERPSLYTKVVHYRKWIKDTIVANP

SEQ ID NO: 119549 - DNA, 786 bp, Artificial Sequence
  derived and/or modified sequence
atgtgggtccccgtcgtgttccttacactgtcagtgacttggataggtgccgcccccctgatactatcaagaattgtcggaggctgggagtgtgagaaacattcacagccctggcaggtgctggtagcatcaagaggtagagctgtttgtggcggagtgcttgtgcacccccagtgggtacttaccgcagctcactgcattagaaacaaaagtgtgatactgctggggaggcatagcctcttccaccccgaagacactggacaggtgtttcaagtgtcccattcgttcccccatcccttatatgatatgagcctgctgaagaatcgctttctgcgacctggagacgatagctcacacgatctgatgctactccgcctctcagagcccgccgagctaacagatgccgtgaaagtcatggacctacctacccaagagcctgccctaggcacaacctgctatgcctccggctggggcagtatcgagccggaggagtttctgacccctaagaagttacagtgtgttgaccttcacgtgatcagtaacgacgtgtgtgctcaggtacatcctcagaaggtgaccaaattcatgctgtgtgccgggcgctggaccggcggcaagtccacatgcagtggggacagcggcggccccctcgtgtgcaatggagttctgcagggtatcacgagttggggctctgaaccttgtgccctgcctgaacgcccatcactctacacaaaagtggtgcattaccggaaatggatcaaggataccatcgtggcgaacccctag

SEQ ID NO: 119550 - DNA, 663 bp, Artificial Sequence
  derived and/or modified sequence
atgtgggtccccgtggtatttctgaccctctccgtgacatggattggcgcagctcccttgatcctatctcgcatcgtgggtgggtgggaatgcgagaaacactctcaaccatggcaggttctggtggcctctcggggacgggcagtctgcgggggcgtgctcgtgcatccacaatgggtgttgaccgctgcccattgtatcagaaacaaatccgtgattctgctgggaaggcatagcttgttccatccagaggatacgggacaggtgttccaggtgtcccatagctttcctcatccattgtacgacatgtcccttttgaagaacaggttccttcggccaggtgacgatagctctattgaaccagaggaatttttgactccaaaaaaattgcagtgcgtggatttgcatgtcatcagtaatgatgtgtgtgcgcaggtgcacccacagaaagtgaccaagtttatgctgtgtgccggacgctggaccggaggaaaaagtacttgctcgggggattctggcggcccattagtctgcaatggcgtcctccagggcatcacatcttggggctctgaaccctgtgccctgccggagagaccgtctttatacacaaaggtggtacattacaggaagtggattaaggacactattgttgccaacccctag

SEQ ID NO: 119551 - DNA, 1464 bp, Artificial Sequence
  derived and/or modified sequence
agccccaagcttaccacctgcacccggagagctgtgtcaccatgtgggtcccggttgtcttcctcaccctgtccgtgacgtggattggtgctgcacccctcatcctgtctcggattgtgggaggctgggagtgcgagaagcattcccaaccctggcaggtgcttgtggcctctcgtggcagggcagtctgcggcggtgttctggtgcacccccagtgggtcctcacagctgcccactgcatcaggaacaaaagcgtgatcttgctgggtcggcacagcctgtttcatcctgaagacacaggccaggtatttcaggtcagccacagcttcccacacccgctctacgatatgagcctcctgaagaatcgattcctcaggccaggtgatgactccagccacgacctcatgctgctccgcctgtcagagcctgccgagctcacggatgctgtgaaggtcatggacctgcccacccaggagccagcactggggaccacctgctacgcctcaggctggggcagcattgaaccagaggagttcttgaccccaaagaaacttcagtgtgtggacctccatgttatttccaatgacgtgtgtgcgcaagttcaccctcagaaggtgaccaagttcatgctgtgtgctggacgctggacagggggcaaaagcacctgctcgggtgattctgggggcccacttgtctgtaatggtgtgcttcaaggtatcacgtcatggggcagtgaaccatgtgccctgcccgaaaggccttccctgtacaccaaggtggtgcattaccggaagtggatcaaggacaccatcgtggccaacccctgagcacccctatcaaccccctattgtagtaaacttggaaccttggaaatgaccaggccaagactcaagcctccccagttctactgacctttgtccttaggtgtgaggtccagggttgctaggaaaagaaatcagcagacacaggtgtagaccagagtgtttcttaaatggtgtaattttgtcctctctgtgtcctggggaatactggccatgcctggagacatatcactcaatttctctgaggacacagataggatggggtgtctgtgttatttgtggggtacagagatgaaagaggggtgggatccacactgagagagtggagagtgacatgtgctggacactgtccatgaagcactgagcagaagctggaggcacaacgcaccagacactcacagcaaggatggagctgaaaacataacccactctgtcctggaggcactgggaagcctagagaaggctgtgagccaaggagggagggtcttcctttggcatgggatggggatgaagtaaggagagggactggaccccctggaagctgattcactatggggggaggtgtattgaagtcctccagacaaccctcagatttgatgatttcctagtagaactcacagaaataaagagctgttatactgtg

SEQ ID NO: 119552 - DNA, 834 bp, Artificial Sequence
  derived and/or modified sequence
cacccggagagctgtgtcaccatgtgggtcccggttgtcttcctcaccctgtccgtgacgtggattggtgctgcacccctcatcctgtctcggattgtgggaggctgggagtgcgagaagcattcccaaccctggcaggtgcttgtggcctctcgtggcagggcagtctgcggcggtgttctggtgcacccccagtgggtcctcacagctgcccactgcatcaggaacaaaagcgtgatcttgctgggtcggcacagcctgtttcatcctgaagacacaggccaggtatttcaggtcagccacagcttcccacacccgctctacgatatgagcctcctgaagaatcgattcctcaggccaggtgatgactccagcattgaaccagaggagttcttgaccccaaagaaacttcagtgtgtggacctccatgttatttccaatgacgtgtgtgcgcaagttcaccctcagaaggtgaccaagttcatgctgtgtgctggacgctggacagggggcaaaagcacctgctcgggtgattctgggggcccacttgtctgtaatggtgtgcttcaaggtatcacgtcatggggcagtgaaccatgtgccctgcccgaaaggccttccctgtacaccaaggtggtgcattaccggaagtggatcaaggacaccatcgtggccaacccctgagcacccctatcaaccccctattgtagtaaacttggaaccttggaaatgaccaggccaagactcaagcctccccagttctactgacctttgtccttaggtgtgaggtccagggttgctaggaaaagaaatcagcagacacaggtgtagacc

SEQ ID NO: 119553 - DNA, 786 bp, Artificial Sequence
  derived and/or modified sequence
atgtgggtgcctgtggtgttcctgaccctgtctgtgacctggattggagctgcccccctcatcctgagcagaattgtgggcggctgggagtgtgagaagcacagccagccctggcaggtgctggtggccagccggggccgggctgtgtgtggcggcgtgctggtgcacccccagtgggtgctgacagctgcccactgcatccggaacaagagcgtcatcctgctgggccgccacagcctcttccaccctgaggacaccggccaggtgttccaggtgagccacagcttcccccaccccctgtatgacatgagcctgctgaagaaccgcttcctgcggcctggagatgacagcagccatgacctgatgctgctgcggctgtctgagcctgctgagctgacagatgctgtgaaggtgatggacctgcccacccaggagcccgccctgggcaccacctgctacgccagcggctggggcagcattgagcctgaggagttcctgacccccaagaagctgcagtgtgtggacctgcacgtgatcagcaatgatgtgtgtgcccaggtgcacccccagaaggtgaccaagttcatgctgtgtgccggccgctggacaggaggcaagagcacctgcagcggggacagcggcggccccctggtgtgcaatggagtgctgcagggcatcacctcctggggcagcgagccctgtgccctgcctgagcggcccagcctgtacaccaaggtggtgcactacaggaagtggatcaaggacaccatcgtggccaacccctag

SEQ ID NO: 119554 - DNA, 663 bp, Artificial Sequence
  derived and/or modified sequence
atgtgggtgcctgtggtgttcctgaccctgtctgtgacctggattggagctgcccccctcatcctgagcagaattgtgggcggctgggagtgtgagaagcacagccagccctggcaggtgctggtggccagccggggccgggctgtgtgtggcggcgtgctggtgcacccccagtgggtgctgacagctgcccactgcatccggaacaagagcgtcatcctgctgggccgccacagcctcttccaccctgaggacaccggccaggtgttccaggtgagccacagcttcccccaccccctgtatgacatgagcctgctgaagaaccgcttcctgcggcctggagatgacagcagcattgagcctgaggagttcctgacccccaagaagctgcagtgtgtggacctgcacgtgatcagcaatgatgtgtgtgcccaggtgcacccccagaaggtgaccaagttcatgctgtgtgccggccgctggacaggaggcaagagcacctgcagcggggacagcggcggccccctggtgtgcaatggagtgctgcagggcatcacctcctggggcagcgagccctgtgccctgcctgagcggcccagcctgtacaccaaggtggtgcactacaggaagtggatcaaggacaccatcgtggccaacccctag

SEQ ID NO: 119555 - DNA, 786 bp, Artificial Sequence
  derived and/or modified sequence
atgtgggtgcccgtggtgttcctgaccctgagcgtgacctggatcggagccgctcccctgattctttccagaatcgtcgggggttgggagtgtgagaagcattcccagccctggcaggtcctcgttgctagcagggggcgcgccgtctgtgggggagtgctggtgcatccgcagtgggtactgacagccgcacactgcatccggaacaaaagtgtaatcttgttgggccgacacagtttgttccacccagaagacaccggacaagtcttccaggttagccatagttttccacacccactttacgatatgagtttgctaaagaatagattcctgcgtccaggcgatgatagctctcatgatcttatgctcctcaggctgtccgagcctgctgagcttactgacgccgtcaaagttatggacctgcctacacaggagccggctctgggaacgacatgctacgcctcgggatggggctcgattgagccagaggaatttctaacccccaaaaaattacagtgcgttgacctgcacgtaatttccaatgacgtgtgcgcacaggtccatccacagaaagttactaagttcatgttgtgcgcaggtcgatggaccggtggcaaatctacttgtagcggggattccggggggcccctggtctgtaacggcgtcctgcagggaatcacgagctggggttccgagccctgtgcccttccagaacgcccttctctgtacactaaagtagtgcattacaggaagtggatcaaggataccattgtcgcaaatccatag

SEQ ID NO: 119556 - DNA, 663 bp, Artificial Sequence
  derived and/or modified sequence
atgtgggtgcccgtggtgttcctgaccctgagcgtgacctggatcggagcagctccactgatcctgagccgtatcgtgggtggctgggagtgtgaaaaacattctcagccatggcaggtactcgtagcttctagaggccgggctgtatgcgggggagtgctcgtgcacccacagtgggtgctgacagccgctcactgcataaggaacaagagcgtgattttattggggcgccattccctttttcatccagaggacaccggacaagtgtttcaggtaagccactccttccctcatcctctttacgacatgtcactccttaagaaccggttccttagaccaggcgacgattccagtatagagcctgaggagtttctgactcctaagaaactccagtgtgtagatttacatgtgatctccaacgatgtgtgtgcccaggtgcatccccaaaaagttacaaaatttatgctatgcgcgggaagatggacaggcgggaaaagcacctgtagtggagactccggtggccccctggtgtgcaacggagttctgcagggcattacctcctggggttcagaaccatgcgcgctgcccgaacgcccctccctctacactaaagttgtgcattacaggaagtggataaaggatacaatcgtggcaaacccttag

SEQ ID NO: 119557 - DNA, 786 bp, Artificial Sequence
  derived and/or modified sequence
atgtgggtgccagtggtctttttgaccttgtcggtcacgtggattggcgctgctccgctcatccttagccggatagtcggcggatgggaatgcgaaaaacactcccagccctggcaggttttagtggctagcaggggcagagcagtgtgcggcggtgtgctggtacacccgcagtgggtcctgaccgctgcccactgtattcggaacaagagcgtgatcctcctgggtcgccactcactatttcaccccgaggacacgggccaggtcttccaggtcagccatagttttccacacccgctttatgacatgagccttttaaagaatcgcttcctccgaccaggggatgacagcagtcacgacctcatgctgttgcgcttgagcgagccggctgaactcaccgacgccgtgaaagtcatggacctccctacacaggagccagccctcggcacaacttgctatgctagcgggtggggatcaatagagcctgaagaattcttgactcctaagaagcttcaatgcgtggacctgcacgtgatcagtaacgatgtctgtgcccaggtgcaccctcaaaaagtgaccaaatttatgctctgtgcgggtcgttggaccgggggaaagtccacctgctcaggcgattctggcggtcctttagtatgtaatggagtcctccagggcatcacctcatgggggtctgagccatgcgccctcccagagaggccttctctttacaccaaagtggttcactataggaaatggataaaggacaccatagtggctaacccttag

SEQ ID NO: 119558 - DNA, 663 bp, Artificial Sequence
  derived and/or modified sequence
atgtgggtgccagttgtgtttctgacgctcagcgtgacctggatcggcgctgccccactcatcctgtctcgcatcgtgggagggtgggaatgtgaaaaacacagtcagccatggcaagtactggttgcttcccggggacgtgctgtgtgtggcggagttcttgtccacccacagtgggtcctaacagctgcacactgcattagaaacaagagcgtgattctgctggggagacattccctgtttcatcctgaagatactggtcaggtcttccaggtcagccactccttccctcaccccttatacgatatgagccttctgaagaaccggttcctgcggcctggtgacgatagcagcatcgagccagaggaattcctgacgcctaagaaactgcagtgtgttgatctgcacgtgatcagcaacgatgtctgcgcccaggtccatccccagaaggtcaccaaattcatgctgtgcgctggtagatggaccgggggtaaatcaacatgctctggagatagtggagggccattagtttgcaatggtgtcctgcagggtatcacatcttggggttcggagccttgtgctctacccgaaaggccaagtttgtacacaaaagtcgtacattatcggaagtggataaaagacactatagtcgccaatccttag

SEQ ID NO: 119559 - DNA, 786 bp, Artificial Sequence
  derived and/or modified sequence
atgtgggtgcccgtggtgttcctgaccctgagcgtgacctggatcggcgccgcccccctgatcctgagcagaatcgtgggcggctgggagtgcgagaagcacagccagccctggcaggtgctggtggccagcagaggcagagccgtgtgcggcggcgtgctggtgcacccccagtgggtgctgaccgccgcccactgcatcagaaacaagagcgtgatcctgctgggcagacacagcctgttccaccccgaggacaccggccaggtgttccaggtgagccacagcttcccccaccccctgtacgacatgagcctgctgaagaacagattcctgagacccggcgacgacagcagccacgacctgatgctgctgagactgagcgagcccgccgagctgaccgacgccgtgaaggtgatggacctgcccacccaggagcccgccctgggcaccacctgctacgccagcggctggggcagcatcgagcccgaggagttcctgacccccaagaagctgcagtgcgtggacctgcacgtgatcagcaacgacgtgtgcgcccaggtgcacccccagaaggtgaccaagttcatgctgtgcgccggcagatggaccggcggcaagagcacctgcagcggcgacagcggcggccccctggtgtgcaacggcgtgctgcagggcatcaccagctggggcagcgagccctgcgccctgcccgagagacccagcctgtacaccaaggtggtgcactacagaaagtggatcaaggacaccatcgtggccaacccctag

SEQ ID NO: 119560 - DNA, 663 bp, Artificial Sequence
  derived and/or modified sequence
atgtgggtgcccgtggtgttcctgaccctgagcgtgacctggatcggcgccgcccccctgatcctgagcagaatcgtgggcggctgggagtgcgagaagcacagccagccctggcaggtgctggtggccagcagaggcagagccgtgtgcggcggcgtgctggtgcacccccagtgggtgctgaccgccgcccactgcatcagaaacaagagcgtgatcctgctgggcagacacagcctgttccaccccgaggacaccggccaggtgttccaggtgagccacagcttcccccaccccctgtacgacatgagcctgctgaagaacagattcctgagacccggcgacgacagcagcatcgagcccgaggagttcctgacccccaagaagctgcagtgcgtggacctgcacgtgatcagcaacgacgtgtgcgcccaggtgcacccccagaaggtgaccaagttcatgctgtgcgccggcagatggaccggcggcaagagcacctgcagcggcgacagcggcggccccctggtgtgcaacggcgtgctgcagggcatcaccagctggggcagcgagccctgcgccctgcccgagagacccagcctgtacaccaaggtggtgcactacagaaagtggatcaaggacaccatcgtggccaacccctag

SEQ ID NO: 119561 - protein, 1616 aa, Artificial Sequence
  derived and/or modified sequence
MEGAEPRARPERLAEAETRAADGGRLVEVQLSGGAPWGFTLKGGREHGEPLVITKIEEGSKAAAVDKLLAGDEIVGINDIGLSGFRQEAICLVKGSHKTLKLVVKRRSELGWRPHSWHATKFSDSHPELAASPFTSTSGCPSWSGRHHASSSSHDLSSSWEQTNLQRTLDHFSSLGSVDSLDHPSSRLSVAKSNSSIDHLGSHSKRDSAYGSFSTSSSTPDHTLSKADTSSAENILYTVGLWEAPRQGGRQAQAAGDPQGSEEKLSCFPPRVPGDSGKGPRPEYNAEPKLAAPGRSNFGPVWYVPDKKKAPSSPPPPPPPLRSDSFAATKSHEKAQGPVFSEAAAAQHFTALAQAQPRGDRRPELTDRPWRSAHPGSLGKGSGGPGCPQEAHADGSWPPSKDGASSRLQASLSSSDVRFPQSPHSGRHPPLYSDHSPLCADSLGQEPGAASFQNDSPPQVRGLSSCDQKLGSGWQGPRPCVQGDLQAAQLWAGCWPSDTALGALESLPPPTVGQSPRHHLPQPEGPPDARETGRCYPLDKGAEGCSAGAQEPPRASRAEKASQRLAASITWADGESSRICPQETPLLHSLTQEGKRRPESSPEDSATRPPPFDAHVGKPTRRSDRFATTLRNEIQMHRAKLQKSRSTVALTAAGEAEDGTGRWRAGLGGGTQEGPLAGTYKDHLKEAQARVLRATSFKRRDLDPNPGDLYPESLEHRMGDPDTVPHFWEAGLAQPPSSTSGGPHPPRIGGRRRFTAEQKLKSYSEPEKMNEVGLTRGYSPHQHPRTSEDTVGTFADRWKFFEETSKPVPQRPAQKQALHGIPRDKPERPRTAGRTCEGTEPWSRTTSLGDSLNAHSAAEKAGTSDLPRRLGTFAEYQASWKEQRKPLEARSSGRCHSADDILDVSLDPQERPQHVHGRSRSSPSTDHYKQEASVELRRQAGDPGEPREELPSAVRAEEGQSTPRQADAQCREGSPGSQQHPPSQKAPNPPTFSELSHCRGAPELPREGRGRAGTLPRDYRYSEESTPADLGPRAQSPGSPLHARGQDSWPVSSALLSKRPAPQRPPPPKREPRRYRATDGAPADAPVGVLGRPFPTPSPASLDVYVARLSLSHSPSVFSSAQPQDTPKATVCERGSQHVSGDASRPLPEALLPPKQQHLRLQTATMETSRSPSPQFAPQKLTDKPPLLIQDEDSTRIERVMDNNTTVKMVPIKIVHSESQPEKESRQSLACPAEPPALPHGLEKDQIKTLSTSEQFYSRFCLYTRQGAEPEAPHRAQPAEPQPLGTQVPPEKDRCTSPPGLSYMKAKEKTVEDLKSEELAREIVGKDKSLADILDPSVKIKTTMDLMEGIFPKDEHLLEEAQQRRKLLPKIPSPRSTEERKEEPSVPAAVSLATNSTYYSTSAPKAELLIKMKDLQEQQEHEEDSGSDLDHDLSVKKQELIESISRKLQVLREARESLLEDVQANTVLGAEVEAIVKGVCKPSEFDKFRMFIGDLDKVVNLLLSLSGRLARVENALNNLDDGASPGDRQSLLEKQRVLIQQHEDAKELKENLDRRERIVFDILANYLSEESLADYEHFVKMKSALIIEQRELEDKIHLGEEQLKCLLDSLQPERGK

SEQ ID NO: 119562 - protein, 451 aa, Artificial Sequence
  derived and/or modified sequence
METSRSPSPQFAPQKLTDKPPLLIQDEDSTRIERVMDNNTTVKMVPIKIVHSESQPEKESRQSLACPAEPPALPHGLEKDQIKTLSTSEQFYSRFCLYTRQGAEPEAPHRAQPAEPQPLGTQVPPEKDRCTSPPGLSYMKAKEKTVEDLKSEELAREIVGKDKSLADILDPSVKIKTTMDLMEGIFPKDEHLLEEAQQRRKLLPKIPSPRSTEERKEEPSVPAAVSLATNSTYYSTSAPKAELLIKMKDLQEQQEHEEDSGSDLDHDLSVKKQELIESISRKLQVLREARESLLEDVQANTVLGAEVEAIVKGVCKPSEFDKFRMFIGDLDKVVNLLLSLSGRLARVENALNNLDDGASPGDRQSLLEKQRVLIQQHEDAKELKENLDRRERIVFDILANYLSEESLADYEHFVKMKSALIIEQRELEDKIHLGEEQLKCLLDSLQPERGK

SEQ ID NO: 119563 - protein, 375 aa, Artificial Sequence
  derived and/or modified sequence
METSRSPSPQFAPQKLTDKPPLLIQDEDSTRIERVMDNNTTVKMVPIKIVHSESQPEKESRQSLACPAEPPALPHGLEKDQIKTLSTSEQFYSRFCLYTRQGAEPEAPHRAQPAEPQPLGTQVPPEKDRCTSPPGLSYMKAKEKTVEDLKSEELAREIVGKDKSLADILDPSVKIKTTMDLMEGIFPKDEHLLEEAQQRRKLLPKIPSPRSTEERKEEPSVPAAVSLATNSTYYSTSAPKAELLIKMKDLQEQQEHEEDSGSDLDHDLSVKKQELIESISRKLQVLREARESLLEDVQANTVLGAEVEAIVKGVCKPSEFDKFRMFIGDLDKVVNLLLSLSGRLARVENALNNLDDGASPGDRQSLLEKQRVLIQ

SEQ ID NO: 119564 - protein, 400 aa, Artificial Sequence
  derived and/or modified sequence
METSRSPSPQFAPQKLTDKPPLLIQDEDSTRIERVMDNNTTVKMVPIKIVHSESQPEKESRQSLACPAEPPALPHGLEKDQIKTLSTSEQFYSRFCLYTRQGAEPEAPHRAQPAEPQPLGTQVPPEKDRCTSPPGLSYMKAKEKTVEDLKSEELAREIVGKDKSLADILDPSVKIKTTMDLMEGIFPKDEHLLEEAQQRRKLLPKIPSPRSTEERKEEPSVPAAVSLATNSTYYSTSAPKAELLIKMKDLQEQQEHEEDSGSDLDHDLSVKKQELIESISRKLQVLREARESLLEDVQANTVLGAEVEAIVKGVCKPSEFDKFRMFIGDLDKVVNLLLSLSGRLARVENALNNLDDGASPGDRQSLLEKQRVLIQQMCVDFMLDTYHSPINRSSCLTVTK

SEQ ID NO: 119565 - DNA, 4851 bp, Artificial Sequence
  derived and/or modified sequence
atggagggggcggaacctagggcacggcctgagagactcgctgaagccgaaaccagggccgcagacggcggccgtctggtggaagtgcagctgagcggaggcgcaccctggggctttacactgaaaggaggtagagagcacggtgaaccgctcgtgataacaaagatcgaggagggaagcaaggcagcagcggtggacaaacttttagcgggggatgaaatcgtgggaatcaatgacatcggtctatcaggttttagacaggaagctatatgtttggtcaaaggaagccataagactctgaagttagtagtgaagagaaggtcagaacttgggtggcggccccactcttggcatgctaccaagtttagcgattcccaccctgagcttgctgcctctcctttcacatcaacctccggctgcccctcctggtctggacgacatcacgcatcgtcatcatcccatgacctcagcagctcttgggaacaaactaacctgcaacgcactttggaccacttttcctctttgggatccgtcgacagcttggaccatccttccagcaggctgagcgtcgcaaaatccaatagctccatagatcatctgggttcacactccaaacgtgattccgcatacggaagtttttctaccagctcaagcacacccgaccacaccctgtcaaaggccgacacaagttccgccgagaatatcttatacactgtggggttatgggaggcaccacggcaagggggcagacaagctcaggctgcaggcgacccacaggggtcagaagaaaagctttcctgcttcccacctcgggtaccgggtgactcgggaaagggcccacgtccagagtacaacgctgagcctaaacttgctgcaccgggacgcagcaacttcggccccgtctggtacgtgcccgataagaaaaaagctccttccagtccaccccccccgcctcccccgctgagatctgacagcttcgccgctaccaagtcccacgaaaaggcccaaggcccggtgttcagcgaagctgcagctgctcagcattttactgcactagcccaagcgcagccacgaggagaccgacgtccagaactcacagataggccttggcgcagtgcgcatcctgggagcctagggaaagggtcaggaggccctggatgcccacaggaggcgcatgctgacggatcgtggcctcccagcaaagacggtgcttcctcgcggctgcaggcttcattgtccagctctgacgtgagattccctcaatctccacacagcgggaggcatccccccctgtattctgatcactcaccactgtgtgcggactctctggggcaggaacccggcgcagcttccttccaaaacgatagtccccctcaggtaagagggctgagctcctgcgatcagaaactggggtctggatggcaggggccgcggccatgtgtccagggggatctgcaggccgcacagctgtgggcaggttgttggccctccgacacagcgttaggtgccctggaaagtctgccccctcctacggtcggccagtctcctaggcatcacctccctcaaccggaagggccccccgacgctcgcgagacgggccgatgctatcccctggacaaaggtgcagagggctgtagcgctggagcccaggagccacccagagcgagcagggctgagaaagcctctcagcgactggccgcgagtattacttgggccgatggtgaaagtagccgaatctgcccgcaggagacgcccttactgcattccctcacccaagagggcaagagacgccccgaatcatctccagaagattccgcaacacgtccccccccttttgatgcccacgtgggaaaaccaacgcgacggagcgatagattcgcaaccaccctccgaaacgaaattcagatgcatcgtgcaaagctacagaagtctcgttctactgttgctttaacggccgctggtgaggccgaagacggcacagggcgctggcgcgccgggctgggaggaggtacccaagaagggccccttgccggcacatataaggatcacctcaaggaagcccaagcacgcgtacttcgggccaccagcttcaagcgtcgagacctggatcctaaccctggagatctgtatcctgagagcctggaacacaggatgggtgaccccgatactgtgcctcatttttgggaagcaggtcttgcgcaaccacccagcagtactagtggtggtccacacccccccaggattggggggaggcgccgctttacagccgaacagaaactcaaatcctacagcgaaccagaaaagatgaacgaggttggtctgacccgtggctattctcctcatcaacaccccagaacaagtgaagatacggtcgggactttcgctgaccgctggaaatttttcgaagagacttcaaagccggtccctcaacggccagcccagaagcaggccctgcatggcattccacgagacaagcctgagaggcccaggaccgctggccgcacgtgtgagggaacggaaccttggagccggaccacttctcttggtgatagcctcaatgcccactcagcggctgagaaggctgggacaagcgatttgccacgccggctgggtacatttgctgagtatcaggcctcgtggaaggaacaacgaaaacccctggaggccaggtcttctggacggtgtcactcagcagatgatattctggatgtcagcttggacccacaggagcggcctcagcacgtacacggccgatcaagaagtagtcctagtacagaccactataagcaagaagcaagcgtggaactgcgtagacaggctggagaccccggggagccaagagaagagcttcccagtgcggtgagagccgaggaagggcagtccaccccacggcaggccgacgctcaatgccgcgaggggtctcctgggtcccagcagcatcctccaagccaaaaagcccctaaccctccaaccttctcagagctgtctcactgcaggggggctcccgagctgccgcgggaggggcgcgggagggcggggaccctgcctagggactacagatattctgaggaaagcactcctgccgacctgggccccagagcacagagcccggggagccctctgcatgcgcgcgggcaggactcctggccagtctcaagtgcactcttatctaagagaccggcccctcagcggccgcctcccccaaagcgggagccacggagatacagagccacagatggcgcccctgctgacgcccctgtgggagtgctagggcgtcctttccctaccccctcacctgccagtctcgacgtttacgtagctcgtctgtcgctaagccacagccctagcgtcttttccagtgctcagccgcaagacactcccaaggctactgtatgtgagcgcggcagtcagcacgttagcggtgacgccagccggcccttgcctgaggctctgcttcctcctaagcagcagcatctgaggctgcagaccgctaccatggaaaccagccggtcccccagccctcagttcgctcctcagaaactcactgataagccaccattactgattcaagacgaggatagtactcggatagaacgtgtgatggataacaacaccactgttaagatggtccccattaagattgtccacagtgaatctcaaccagaaaaagaatccagacaaagcttagcatgccccgcagaacccccagcactgccacacgggctggaaaaggaccagataaaaacgctaagtacctcagaacagttctactcgaggttttgtctgtacacccgccagggcgctgaacctgaggcgccccacagagctcaacccgcggaaccccaacctttgggcactcaggtccccccagagaaagaccgttgcacatccccccccggactgagttacatgaaggccaaagagaagactgttgaggacttaaagtccgaggagcttgccagagagattgtcggtaaagacaaatcactcgcagacattttggacccaagcgtcaagattaaaacaacgatggacctcatggaaggaatcttccctaaagacgagcatttgctggaggaagcccaacagagacggaagctgctgccaaagatcccttctcccaggagtacagaggaacggaaggaagagccaagtgtgccggctgcggtaagcctcgccaccaattcaacttactactccacttctgcgcctaaagcagaacttctcattaaaatgaaagatttgcaggaacagcaggagcatgaggaggatagcgggagcgatttggatcacgatcttagcgtgaagaaacaggagctaatagagtccatttcgcgaaagctgcaggtcctgagagaggcccgggagtccctcctagaggatgtgcaagccaataccgtgcttggggcagaggtggaagcgattgttaaaggcgtttgcaagccctccgagttcgataagtttcggatgtttatcggcgacctcgataaggtcgtgaacctgctgctgagcctcagtggtaggctcgcacgggtggagaacgctcttaacaacctggatgacggggcatcccctggcgacaggcaatcactccttgaaaagcaacgagtgctgatccagcagcacgaggacgctaaggaactgaaagaaaatctggacagaagggagagaatcgttttcgacattctggccaattacctgtcagaggaatctcttgccgactatgaacacttcgttaaaatgaagtctgccctgatcattgaacaaagagaactagaggacaaaattcacttaggggaagaacagctgaagtgcttactggatagtctccagcctgagagaggcaagtag

SEQ ID NO: 119566 - DNA, 4851 bp, Artificial Sequence
  derived and/or modified sequence
atggagggcgctgagccccgggcccggcctgagcggctggccgaggccgagaccagggctgctgatggcggccgcctggtggaggtgcagctgagcggcggggccccctggggcttcaccctgaagggcggccgggagcacggggagcccctggtgatcaccaagattgaggagggcagcaaggctgctgctgtggacaagctgctggccggagatgagatcgtgggcatcaatgacatcggcctgagcggcttccggcaggaggccatctgcctggtgaagggcagccacaagaccctgaagctggtggtgaagagaagaagtgagctgggctggaggccccacagctggcacgccaccaagttcagtgacagccaccctgagctggccgccagccccttcaccagcaccagcggctgccccagctggagcggccgccaccacgccagcagcagcagccatgacctgagcagctcctgggagcagaccaacctgcagaggaccctggaccacttcagcagcctgggctctgtggacagcctggaccaccccagcagccggctgtctgtggccaagagcaacagcagcattgaccacctgggcagccacagcaagagggacagcgcctacggcagcttcagcaccagcagcagcaccccagaccacaccctgagcaaggctgacaccagcagcgctgagaacatcctgtacacagtgggcctgtgggaggccccccggcagggcggccggcaggcccaggccgccggggacccccagggcagcgaggagaagctgagctgcttccccccccgggtgcctggggacagcggcaagggccccaggcctgagtacaatgctgagcccaagctggccgcccctggccgcagcaactttggacctgtgtggtacgtgcctgacaagaagaaggcccccagcagccccccacctcctcctccacccctgcggagtgacagctttgctgccaccaagagccatgagaaggcccagggccctgtgttttctgaggccgctgctgcccagcacttcaccgccctggcccaggcccagcccaggggggacagaagacctgagctgacagaccggccctggaggtctgcccaccctggcagcctgggcaagggcagcggcggccctggctgcccccaggaggcccatgctgatggctcctggccacccagcaaggatggagccagcagccggctgcaggccagcctgagcagcagtgatgtgcgcttcccccagagcccccacagcggccgccacccccccctgtacagcgaccacagccccctgtgtgccgacagcctgggccaggagcctggagctgccagcttccagaatgacagccccccccaggtgcggggcctgagcagctgtgaccagaagctgggcagcggctggcagggcccccggccctgtgtgcagggcgacctgcaggccgcccagctgtgggccggctgctggcccagcgacacagccctgggcgccctggagagcctgcccccacccaccgtgggccagagccccaggcaccacctgccccagcctgagggccccccagatgcccgggagaccggccgctgctaccccctggacaagggagctgagggctgcagcgctggggcccaggagcccccccgggccagcagagctgagaaggccagccagaggctggccgccagcatcacctgggcagatggagagagcagccgcatctgcccccaggagacccccctgctgcacagcctgacccaggagggcaagaggaggcctgagagcagcccagaagattctgccacccggcccccaccatttgatgcccacgtgggcaagcccaccaggagaagtgacagatttgccaccaccctgagaaatgagatccagatgcaccgggccaagctgcagaagagccgcagcacagtggccctgacagctgctggggaggctgaagatggcaccggccgctggagggctggcctgggcggcggcacccaggagggccccctggccggcacctacaaggaccacctgaaggaggcccaggcccgggtgctgcgggccaccagcttcaagagaagagacctggaccccaaccctggggacctgtacccagagagcctggagcacaggatgggagaccctgacacagtgccccacttctgggaggccggcctggcccagccccccagcagcaccagcggcggcccccaccccccacgcatcggcggcagaagacgcttcaccgctgagcagaagctgaagagctacagcgagcctgagaagatgaatgaggtgggcctgacccggggctacagcccccaccagcaccccaggaccagcgaggacacagtgggcacctttgctgaccgctggaagttctttgaggagaccagcaagcctgtgccccagaggcctgcccagaagcaggccctgcacggcatcccccgggacaagccagagcggcccaggacagctggccgcacctgtgagggcacagagccctggagcaggaccaccagcctgggggacagcctgaatgcccacagcgctgctgagaaggccggcaccagtgacctgccccggcggctgggcacctttgctgagtaccaggcctcctggaaggagcagaggaagcccctggaggcccggagcagcggccgctgccacagcgcagatgacatcctggatgtgtccctggacccccaggagcggccccagcacgtgcacggccgcagccgcagcagccccagcacagaccactacaagcaggaggcctctgtggagctgcggcggcaggccggggaccctggagagccccgggaggagctgcccagcgctgtgcgggcagaggagggccagagcaccccccggcaggctgatgcccagtgccgggagggcagccctggcagccagcagcacccccccagccagaaggcccccaacccccccaccttcagcgagctgagccactgccgcggggcccctgagctgccccgggagggccggggccgggccggcaccctgccccgggactaccgctacagcgaggagagcaccccagctgacctgggcccccgggcccagagccctggcagccccctgcacgcccggggccaggacagctggcctgtgtcctctgccctgctgagcaagaggcctgccccccagaggcctcctccacccaagcgggagccccggcgctaccgggccacagatggagccccagcagatgcccctgtgggcgtgctgggccggcccttccccacccccagccctgccagcctggatgtgtatgtggcccggctgagcctgagccacagccccagcgtcttcagcagcgcccagccccaggacacccccaaggccaccgtgtgtgagcggggcagccagcacgtgtctggagatgccagccggcccctgcctgaggccctgctgccccccaagcagcagcacctgcggctgcagacagccaccatggagaccagccgcagccccagcccccagtttgccccccagaagctgacagacaagccacccctgctgatccaggatgaggacagcaccagaattgagcgggtgatggacaacaacaccaccgtgaagatggtgcccatcaagatcgtgcacagcgagagccagcctgagaaggagagccggcagagcctggcctgcccagctgagcccccagccctgccccacggcctggagaaggaccagatcaagaccctgagcaccagcgagcagttctacagccgcttctgcctgtacacccggcagggcgctgagcctgaggccccccaccgggcccagcctgctgagccccagcccctgggcacccaggtgcccccagagaaggaccgctgcaccagccccccaggcctgagctacatgaaggccaaggagaagacagtggaggacctgaagtctgaggagctggcccgggagatcgtgggcaaggacaagagcctggccgacatcctggaccccagcgtgaagatcaagaccaccatggacctgatggagggcatcttccccaaggatgagcacctgctggaggaggcccagcagaggaggaagctgctgcccaagatccccagccccaggagcacagaggagaggaaggaggagcccagcgtgcctgctgctgtgtccctggccaccaacagcacctactacagcaccagcgcccccaaggccgagctgctgatcaagatgaaggacctgcaggagcagcaggagcatgaagaagattctggcagtgacctggaccatgacctgtctgtgaagaagcaggagctgattgagagcatcagcaggaagctgcaggtgctgcgggaggcccgggagagcctgctggaggatgtgcaggccaacacagtgctgggcgctgaggtggaggccatcgtgaagggcgtgtgcaagcccagcgagtttgacaagttcaggatgttcatcggggacctggacaaggtggtgaacctgctgctgagcctgagcggccgcctggcccgggtggagaatgccctgaacaacctggatgatggagccagccctggggaccggcagagcctgctggagaagcagagggtgctgatccagcagcatgaagatgccaaggagctgaaggagaacctggaccggcgggagcgcatcgtgtttgacatcctggccaactacctgtctgaggagagcctggccgactatgagcactttgtgaagatgaagagcgccctgatcatcgagcagcgggagctggaggacaagatccacctgggggaggagcagctgaagtgcctgctggacagcctgcagcctgagcggggcaagtag

SEQ ID NO: 119567 - DNA, 4851 bp, Artificial Sequence
  derived and/or modified sequence
atggagggcgccgagccccgggcccggcccgagcggctggccgaggctgagacgcgcgccgctgacgggggccggctggtggaggtgcagttgtctggaggtgctccctggggttttactctgaaaggcggacgggagcacggagaaccgctggtaatcaccaagatcgaggaagggagcaaggcggccgcggtcgataagttattggcaggcgacgagatcgtggggataaacgatataggcctgagcggtttccgtcaagaggctatttgcctggtgaaaggaagccacaaaaccctgaaactggtagtcaaacggcggtctgagctcggttggagaccacattcctggcacgccaccaaattttcagactctcatcctgaattggcggccagtccattcaccagcacatccggatgcccatcttggtctgggaggcatcatgcgagcagctcttcgcacgatctgtcatctagctgggaacagacaaatttacagaggacacttgaccacttctccagcctcggaagcgtggacagtctggaccacccctccagcagactgtcggtagccaaaagcaactccagcatcgaccacctgggaagccatagcaaacgggatagtgcgtatggaagcttttcaacctcatcaagcacccctgaccacacattgtctaaggcagacacctcgagcgccgaaaatatcttatacactgtcgggctgtgggaggcaccacgacagggggggcgccaggctcaggcggcgggggacccacaggggtccgaagagaagctcagctgctttccacccagagtgcccggggactccggtaaaggaccacgccctgagtataacgcggagcctaagcttgcggctccaggtcgctccaacttcgggcccgtttggtatgtacccgacaagaaaaaggccccaagcagccctccaccccctcccccgccacttagatcagattcatttgccgccactaagagtcatgagaaggcccaggggccggtgtttagtgaggccgctgccgctcagcatttcactgcgttggcccaggctcaaccaagaggggaccgccggcccgaactcaccgaccggccctggcggagcgcccacccaggaagcttgggtaagggctctggggggccaggctgcccccaggaggctcacgccgatggtagctggcctccgtctaaggacggtgcgagcagccgacttcaagcgtcgctcagtagcagcgatgtgcgcttcccacaaagcccacactctggccgtcatcctcctttgtacagtgatcacagcccgctgtgcgcggactccctcggacaagaacctggtgctgcgagcttccagaatgactcccctccccaggtccggggactaagctcatgtgaccaaaaattggggagtggttggcagggcccaagaccttgcgtccagggtgatttgcaggcggcccagctctgggctgggtgttggccatctgataccgcactgggagcactggaaagcctgccccctcctacagtcggacagtccccccgccaccacctgcctcagcctgaaggaccgcccgacgctcgcgagactggtagatgctatcccctggataagggcgctgaagggtgtagcgctggcgcccaggagccccctcgtgccagtcgagccgagaaagcatctcagcgacttgccgcctccattacctgggccgacggcgagtcatcacgcatttgcccacaggagacccccttactccatagcctgacccaggaaggaaaacggcgccccgagtctagtcccgaagattccgccacacgtcctcctcccttcgatgctcacgtcggaaagcccacgcgccgcagtgaccggtttgctacgactcttagaaatgaaattcaaatgcaccgcgccaagctgcagaagtctagatctacagtcgccctgacagccgcgggtgaggcagaagacggaactgggcgctggagggccgggctgggtgggggcacacaggagggccctcttgccggaacctacaaagatcatctaaaagaagctcaagctcgggtacttcgagcaacgagctttaagcgccgtgatcttgaccccaatcctggtgacctttacccggagagtttggaacacaggatgggcgaccctgataccgtgccacatttctgggaagcagggcttgcacagccaccatcatcaacaagcggcggccctcacccaccacgcatcggaggacgacggcggtttacagccgaacagaagctaaaaagctactccgaacccgaaaagatgaacgaggtcggcctgactcgtgggtacagtccccaccaacaccctaggacgagtgaagatacagttgggacattcgcagaccggtggaaattcttcgaggaaacctccaagcccgtgccacaacgcccagctcaaaagcaggccctgcatggtattcctcgcgataagcctgagagaccccggactgcgggaaggacctgcgaggggacagaaccgtggagcagaactaccagtttgggcgattcattaaatgcacactccgcagccgagaaggccgggacctctgatcttcctagaagactgggaacattcgcagaatatcaggcctcctggaaagagcagagaaagccactcgaggctcgctcaagcggcagatgccattcggctgacgacatcttggatgtgtcccttgatccacaagagagaccccagcacgtgcacggcaggagccggtcatcccctagtacggatcactacaagcaggaggcaagtgttgagctacgacgccaggctggagaccccggcgagccccgcgaggaactgcctagtgctgtaagggcagaggagggccagtcgacccccaggcaagctgacgcccagtgtcgtgaggggtctcctggatcccaacagcacccaccttcacagaaggcccctaatccgcctaccttttctgagctgagccattgcaggggagcacctgagctgcctcgcgagggacgagggcgagctggcaccctgccacgcgattatcggtactccgaggaatcaaccccagcggatctcggacctagggcccagtctcctggttctcccctgcatgcccggggccaagattcatggcctgtgtcaagtgcattgttgagcaaacgtccggctccacagagaccccctcccccaaagcgagaacccagacggtaccgagccactgacggggcaccagcggatgctcccgtgggtgtgctggggcgccccttcccaacaccatcccctgcttctctggacgtttacgtagccagactgtcactgtcgcactctccctctgttttcagtagcgcacagccacaagacacaccgaaggcgaccgtatgcgaacgcggctcccaacacgtttctggtgatgcctcccgacctttacctgaagccctgctcccccctaaacaacagcatcttaggcttcaaaccgccactatggagacctcacggtcccctagcccacagttcgccccacagaagctcacagataagccgcccctcctcatccaggacgaggattctactcggattgagcgcgtgatggacaataataccacagtgaaaatggtgccaatcaaaatcgtccattcagaaagtcagccagaaaaagaaagtcggcaatccctggcgtgccctgccgagcccccagctctccctcacggtctagaaaaggaccaaatcaagacactctcaacctccgaacagttttattctcggttctgtctgtatacaagacaaggagctgagccggaggccccccacagagcccagcccgctgagcctcagccacttggtacacaggtgcctcccgagaaagaccgctgtacatcccctcctggcttaagctacatgaaagctaaggagaaaactgtggaagacctcaagagtgaggaattggctagagagatcgtgggaaaggacaaaagcctggccgacatcttagacccttctgtgaaaatcaaaaccaccatggacctgatggagggaatctttccaaaggacgagcacctgctggaggaggcgcagcagcgtcgaaagcttctgcctaaaataccttctccccggagcacggaggaacggaaggaagagcccagcgttcccgccgccgtatcattagcaacgaacagcacttattactccacaagtgccccaaaggcggagcttctgattaagatgaaagacctgcaggagcagcaggagcatgaagaggattctggtagcgatctggatcacgatctgtctgtgaagaagcaggagctgatcgagagcatctctcgcaagttgcaggtactgagagaggctagggagagtctactggaagacgtgcaagcaaacaccgttttgggtgccgaggtggaggcaattgtcaagggcgtctgcaaaccttctgagttcgacaaattcaggatgtttatcggtgatctggacaaagtggtaaatctgcttctgtccctcagtggaagattggcacgtgttgagaatgcactgaataacctggacgatggcgcaagtccaggagaccggcaatctctgctcgagaagcaacgcgtgctcatccagcaacacgaagatgcaaaggagctcaaggagaatctggatcgtcgcgagagaatagtgttcgatatattagcaaattacctgtccgaggaatcactagcagactatgagcatttcgtcaaaatgaagagtgcgctgataatcgaacagcgggagctcgaggataagatccacctgggcgaggagcagctcaagtgtctccttgactccttacagcctgagcgtggcaagtag

SEQ ID NO: 119568 - DNA, 4850 bp, Artificial Sequence
  derived and/or modified sequence
atggaaggggctgagcctagagccagacccgaacgtctcgccgaggccgagacacgagccgctgacgggggacgactggtggaagtacaactcagcggaggcgctccttggggctttaccctaaagggtggcagggagcacggtgagcctcttgtaatcacgaagatagaggaagggtccaaggctgctgctgtggacaagttgttagctggagatgagattgtgggtattaacgacatcgggttgtctggttttaggcaagaagccatatgtcttgtcaaaggaagccacaagaccctaaagctcgtagtgaaacgcagatcagagctaggctggcgcccacactcttggcacgcgaccaaattctctgacagccatcccgagctcgccgcttccccatttacaagcacatccggctgtccttcatggagtgggaggcatcacgcctcttcttcatcacacgacctgtcctcttcctgggagcagacgaatctccagcgcaccctcgaccatttttctagtctcggctctgtcgacagcttggatcacccttccagtcggctgtcggtggccaaaagcaattcgtctatcgaccatctcggcagccacagtaaaagggactcagcctatggtagttttagtactagcagttctactcccgaccataccctgagcaaggcagacactagctctgccgaaaacattctgtacaccgtcgggctatgggaggccccaagacaaggcggtaggcaagcacaggccgctggagatccccaggggtctgaagagaagctgagttgtttccctcccagggtcccaggcgactccggaaagggacccaggccggagtataatgccgagccaaaattggccgctccagggaggtctaactttggcccagtgtggtatgtgccagataagaaaaaagctccttcctccccacctcctcccccaccgccactgcgaagcgatagctttgccgctactaagtcacatgagaaagcccaaggtcctgtatttagcgaggctgcagcagcacagcactttactgcccttgctcaggcccagccgcgaggtgatagacgccctgagctgacggatcggccttggcggtccgcccaccctgggagtctgggtaaaggcagcgggggtcccggatgcccccaagaggcacatgccgatggctcttggccccctagcaaggatggagcctctagtcgactgcaagcttctttatccagttccgatgtaaggttcccccagtctccacattccgggaggcaccctcctttatatagtgaccatagccctttgtgtgctgattctctggggcaagagcctggagctgcgtcatttcagaacgattctccaccacaagtgcggggactaagctcgtgtgaccagaaacttggatctggctggcagggtccccgaccatgtgtgcagggcgacctgcaagccgctcaattgtgggcaggatgttggccaagtgacacagcgcttggggctctggagtccctcccgcctcccacggtggggcaatctccgaggcatcatcttcctcagccagaaggaccgcctgatgccagagaaactggacgatgctacccactggataaaggcgcagaagggtgcagcgccggtgcgcaggaacctccaagagcatctcgcgctgagaaggcctctcaaagactggctgccagcatcacatgggcagacggggagtcaagtaggatatgcccgcaagagacaccacttttgcattcgctcacccaggagggtaaacggaggcctgagagttcccctgaagacagtgctacccgtccccctccattcgacgctcacgtgggcaagcctacacggaggtctgatcgttttgcaactactctgagaaacgaaatccagatgcatcgggctaagctgcagaaaagccgcagcaccgtagctctgactgcggctggcgaggccgaagatggcacaggcaggtggagggcaggcttgggagggggtactcaggaaggacccctggcaggcacttacaaggaccacttaaaagaagcccaggctcgcgtccttagggctacttcattcaagagaagagaccttgacccgaacccaggcgatctgtatcccgaaagcttggagcatcgaatgggggatcccgatactgtgccccatttttgggaggcgggactcgctcagcccccatcgagtactagcggtgggccacaccccccacggatcggagggaggagacggtttacagccgagcagaagctaaaatcttacagcgagccagagaagatgaatgaagtgggtttgacccgtggatactctccccaccaacatccacgcacaagtgaggacacggttggtacctttgcggaccgatggaagttttttgaggagacatccaagccagtacctcagcgacccgctcagaaacaggccttacacgggatacccagggataagccggaacgtccaagaaccgcaggcaggacctgcgagggaacagaaccctggtctcgcactacttctctgggagatagcctcaacgctcactccgcagctgaaaaggcagggacatcagacctcccgaggcgcctgggcacattcgccgagtatcaggcaagctggaaggagcagcgcaagccattggaggctaggtcaagcggccgatgtcactcagccgacgatatactggatgtcagcttggaccctcaagaaaggcctcagcatgtgcacggaaggtctagatcatccccaagtactgaccattacaagcaggaagcctcagtggagctgcgcaggcaggctggggaccccggagaaccgagagaagaattgccatctgccgtgagggctgaggaagggcagagcactcccaggcaagccgacgcccaatgtagagagggatcgcctggcagccagcagcatcccccttcacagaaagctcctaacccccctacattttctgaactgtctcactgtaggggcgctcctgagctcccacgcgagggacgaggtcgcgcaggcaccctcccaagagattatcgttatagcgaggagagtacacctgctgatttaggtcctagggcccagagccctggatctccactgcacgcgagaggacaagattcttggcctgtttcaagcgccttgctatcaaagcgacctgcacctcagcgcccaccgcctccgaagcgggaacctcggagatacagggctacggatggcgctcccgcagatgcgccagtgggtgtacttggacgacctttcccaactccttcgccagcttctcttgatgtctatgtggctaggctgtcactgtcccactcaccttccgtgtttagctccgctcaaccccaggacacacctaaggccactgtctgtgagaggggatctcagcacgtttccggcgatgcatcacggcctcttcctgaagccctcttacctccaaaacagcagcacctgaggttacagaccgccacaatggagactagtcggtcaccatccccacagtttgccccacagaagctgacggataaaccccctttactgatacaagacgaggactccacgcgaatagaaagagtgatggacaacaatacaacagtcaagatggttccgattaagatcgtgcattccgagtctcagccagaaaaggagtcccgccagtcattagcatgccccgctgagcctcctgcgctgccacatggcctggagaaggaccagatcaaaacactgtccacctcagagcagttctattctagattctgcctgtacacgcggcaaggtgctgagcctgaagctcctcatcgcgctcagccggctgagccccaacccctgggcacacaagtcccaccagagaaggatcgctgcacctctccacctgggctctcatacatgaaagccaaggaaaaaaccgttgaggatttaaagagcgaggaactggccagagaaattgtgggcaaggacaaatctctggcggatatcctcgatccctccgtgaagattaaaacgacaatggatttgatggaggggatttttcccaaggacgaacacctcctcgaggaagctcagcagaggcgaaaactgttgcccaaaattccctctccacgaagtacagaggaacgcaaggaagagccaagcgtcccggcagccgtgagcttggcaacaaactccacatattactctacttccgccccaaaggcggagctgctaattaagatgaaggacctacaggagcagcaagagcatgaggaggacagcggcagtgatcttgatcatgacctgagcgtgaagaaacaagaactgattgagagcatttccagaaagcttcaggttcttcgggaggcccgagaatcccttctggaggacgtgcaagccaatacagtcttaggcgctgaggtcgaggccattgtgaaaggagtctgtaaaccgagtgagttcgataagttcagaatgttcattggcgacctcgataaagtggtgaaccttcttctaagtttatccgggaggctggcccgagttgagaacgccttgaacaatctagatgacggagccagtcccggagatcgtcagagtctgttggagaagcagcgggtcctgatccaacagcacgaggacgctaaggaactgaaggaaaatcttgatcgtcgagagcggattgtgtttgatattctggcaaactaccttagcgaagaatccctcgctgactatgagcattttgtgaaaatgaagtctgccctgattattgaacagcgcgaacttgaagataaaatacacctgggcgaagaacagcttaagtgcctgctggactcccttcagccagaaaggggaaagta

SEQ ID NO: 119569 - DNA, 7447 bp, Artificial Sequence
  derived and/or modified sequence
tctgcggcgctcggagcctcccttgcgatcccacggccgggactgcccggagtgcatgggcgcgggccagggacgctgagcggtcgcgccatggagggcgccgagccccgcgcgcggcccgagcgcctggccgaggccgagacgcgggcggcggacggcgggcgcctggtggaggtgcagctgagcggcggcgccccgtggggcttcaccctgaagggcggccgcgagcacggcgagccgctggtcatcaccaagattgaagagggcagtaaagccgcggcggtcgacaagttactggctggagatgagatcgtcggcatcaatgacattggtctctcagggtttagacaggaagcgatttgcctggtgaaggggtcccataagaccctgaagctggtcgtcaaaaggaggagcgagctgggctggaggcctcactcctggcatgccaccaagttctctgacagccaccccgagctagcggcctccccattcacctccaccagcggctgtccttcctggtccggccgacaccacgcgagttcttcctcccacgacctgtccagttcctgggagcagacgaacctacagcgcaccttagatcacttcagctccttggggagcgttgacagcctggaccacccctccagtcgcctctcggtggccaagtccaacagcagcatcgaccacctgggcagccacagcaagcgcgactcggcctacggctccttctccaccagctctagcactcctgaccacaccttgtccaaagccgacacgtcctccgcagagaacatcctctacactgtgggcctctgggaggctcccaggcagggtggccggcaggcccaggccgcaggcgaccctcagggctcggaggagaagctcagttgtttcccgcccagggtccccggtgacagcggcaaaggccccaggccagagtacaatgccgagcccaagctggctgcccctgggaggtccaattttgggccagtctggtatgttcccgataagaagaaagcaccatcatccccacctcctccccctccccctctccgcagtgacagctttgctgccaccaagagccacgagaaggcccagggccctgtgttctcagaggcggctgcggcacagcactttacggccctggcccaggctcagcctcgtggtgaccggagaccagagctcaccgatcggccttggaggtcagcacacccggggagcctcgggaagggatcgggaggcccgggctgcccacaggaggcccacgcagacggcagctggccgccctccaaggatggagcttccagtaggctgcaggcctctctgtccagctcagatgtgcgcttccctcagtctcctcatagcggccgacaccctcccctatacagcgaccacagccccctctgtgctgacagccttgggcaggagccaggggctgccagcttccagaacgacagccctcctcaggtgagggggctcagcagctgtgaccagaagctggggagcggctggcagggtccccggccctgtgtgcagggagacctgcaagcagcacagctctgggcgggatgctggccttctgacacagcccttggagccctcgagagtcttcccccacccacggtgggccagagcccacgccatcacctacctcagcctgagggtcctccggatgcccgcgagacaggacggtgttacccgctggacaaaggggccgagggctgctccgcgggagcccaggagcctcccagggccagccgtgcagaaaaagccagccagaggctggcagccagcatcacgtgggcagatggggagagcagcaggatctgcccgcaggagacgcccctgttgcactccctgacccaggaggggaagcgccggcctgagagcagtccagaggacagcgccaccagaccgccaccgttcgacgcccacgtgggcaagcccacccgaagaagcgaccgctttgccaccaccctgcggaatgagatccagatgcatagagccaagctgcagaagagccggagcacagtggctctgactgcagcaggggaggcggaggatggcaccggccgctggagggccgggttgggaggtggcacccaggaaggacccctcgctggcacctataaagaccacctgaaagaggcccaagcccgggtcctgagggccacgtccttcaagcgccgcgacttggaccccaacccaggagacctatacccggagtcactggaacaccggatgggggatccagacactgtcccccacttctgggaggcaggcctggcccagccaccctcatctacaagtggcgggccccacccgccccgcatcggaggccggagacggttcacagctgagcagaaattgaagtcctactcggaacctgagaagatgaacgaggtgggcctcacgaggggctacagtcctcaccagcaccccaggacatctgaggatactgtgggcacgtttgctgacaggtggaagttttttgaggaaacgagcaaacctgttccccagaggcctgcccagaagcaagctcttcacggaatcccgagagacaagccagagaggccgcggacagcgggccgcacatgtgagggcacggagccctggtcgcgcaccacctcccttggggacagcctcaacgctcacagcgcagcggagaaggcagggacttcagacctgccgcggaggctcggcacctttgcagagtatcaggcctcttggaaggaacagaggaaacctctggaggccaggagctctgggcgctgccactcagcggatgacatcctggatgtgagcctggacccacaggagaggccgcagcacgttcatgggaggtcccggtcttcaccgtccacagaccactacaagcaggaagcttctgtcgaactgcgaaggcaggcaggggaccccggcgagcccagagaagagcttccctccgcagtccgggccgaggagggacagtccacgccgagacaagcagatgcccagtgtcgggaaggcagcccaggatcacagcagcacccaccgagtcagaaggcaccgaacccacccacattctctgaactatctcactgccggggagccccagagctgccccgggagggccggggccgagcgggaaccctacctcgagattatagatactcggaggagagcaccccagcagacttgggaccccgagcccagagccctggctcacccctgcatgctcgaggacaagactcgtggccagtgagctcagccctgctctccaagaggccagccccacagaggccaccgccacccaagcgcgagcccaggagatacagggccacagacggcgcacctgctgacgcccccgtgggcgtcctcggcaggcccttcccaacgccatcccctgcgtccctggatgtgtatgtggcccgcctgtccctctcccacagcccctctgtgttcagcagtgcccagccccaggacaccccgaaggccactgtctgtgagcgtggaagccagcatgtgagcggggacgcatcacgtcctctgccagaagcactgctccctcccaagcagcagcacctgcgcctgcagacggccaccatggagacctcgcgctccccctcgccccagttcgccccccagaaactgacggacaaacctcccctgctcatccaggatgaggattcaaccagaattgagcgggtgatggacaacaacaccacggtgaagatggtgcccatcaagatcgtgcactcggagagccagccagagaaggagagccgccagagcctggcatgccccgccgagccacctgccctgccccacgggctggagaaagaccagatcaagacgctgagcacatctgagcagttctactcgcgcttctgtctgtacacgcggcagggtgctgagcccgaggccccacatagggcccagccggctgagccccagcccctgggcacccaggtgccccccgagaaagaccgctgcacctcccctccagggctcagctacatgaaggccaaagagaagactgtggaagacctgaagtcggaggagctggccagggagatcgtggggaaggataagtccctggccgacatcctggatcccagtgtgaagatcaaaaccactatggacttgatggaaggcatcttccccaaagacgagcacctcctggaagaagcccagcaacggaggaagctgctccccaaaatcccctctcctagaagcacagaggagaggaaagaggagcccagcgtgcctgcggccgtgtccctggccaccaattctacctactacagcacgtcggcccccaaggcggagctgctgatcaagatgaaggacctgcaggagcagcaggagcacgaagaggattcgggaagcgacttggaccacgacctgtcggtgaagaagcaggagctcatcgagagcatcagccgcaagctgcaggtgctccgggaggcccgcgagagcctgctggaggacgtgcaggccaacaccgtgctgggggccgaggtggaggccatcgtgaaaggcgtctgcaagcccagcgagtttgacaagttccggatgttcattggagacctggacaaagtggtgaacctcctgctgtcgctgtcaggccgcctggcccgggtggagaatgccctcaataatttggacgacggcgcttctcccggtgatcggcaatcactgcttgagaagcagagagtcctgatccagcagcacgaggacgccaaggagctcaaggagaacctggaccgccgcgagcgcatcgtctttgacattttggccaactatctgagcgaggagagcctcgcggactatgagcacttcgtgaagatgaagtcggccctcatcatcgagcagcgggagctggaagataaaatccaccttggtgaagagcagctgaagtgcttattggacagccttcagcccgaaaggggcaaataagagaccagtccccggtggaggaggggcacggggcctccgagctccagctccgttcccaaggatactcgtgaagaccccatctgtgttcatggcctggaaagagacttctcccatagcaaagaggctgttataaaagcaataacttttgtgtttgtgtgggatgatttatttaattttttagtttcccctttgattgctgagagccattttcctttacacataactacacctgacaccaggctctgctggatgtgagtttccactgcatgggctgtgggctgggcctgtggtgcctgccgagtggtcactgtcagtgggaaacccgttgttcctcccgtcttcagatgctgagccaactgcttggacagcagccagcgcgtcatgacgtgcatgagagggggaccctggtgctcatcttctcttgtcattcatccaggcatgggctgccaggttttgtccctgctcgttcaacagtgtgagcatttgtctctgttatctaatgatgttctctgacccagcagaaatcatcatcatgatgatgataatttattaactttttggaagggtgaatagtttcctaatggttaaaaaccaactgtgaaaggaaccacctgtgtggttgggttcactcattctcagattaaattgccacttaaagaaataacgtgcatgctttaaaaaacacagtcacgcaccaagcaggcaaatagctttagtccttctcacctcacatcacagttgttctgcaaagtaaaattttttggttaagagcgtgtccagtagtaatgtgcttgttagctgtttctcaagaccaacagaagattttttcagttactttccccccatgtattttgtatgcatatgattgtccgtgataattggctacttttccattgtttcctccttaaatcgtttagcatggcatgagggccacattccatggacgggaagaccccttcctcttcagaggtcccgtggactacacagctcctgagcttgatctttttctgccatgaagtttaaagattctatgcccatttccttgattgaaatggcaggattctaaagagagcctggtttgttaaaagaaaacactgtcatgctgtcagttcccaattgacaagtcacagactgggagaaaatatttgcaaatcgtgtatctgacaaaaggtttgtgtccaggatgtacaaagaactctcaaaccggatagtaagaaaacaaacagcccaagtgaaaagcaggcaaaagacttgaatagacacttcaccaaagagcatacacgcgtggcaaacaagcacacgaaaagacgttcagccgccgatggcttggttataatttataacttacttatttttatctaataattgtagattcagtgtatttcttcaaaaaatgtttaattaaatgcatgttaatggtgagtgaatcccttgggtgacttcgtgtttaggtcgtattagggcatttgttggatcaacggatcattttaaccctgacttccccttattcccataaaagaagttttccagtggaatggagatttcattttgtcagcagcagtgaccacagccttaccaaagcagacgcgtgcgcgtgcacagatgcacacacacagatgtcttaaaagactagaatccacacttcctgagccagaggggccgtgttgacggtaatgcattctctatagagccaagtccaaactggcaagctcaatgatgcaggcaataaaccgcctttttggcagcctaccaatgccaaaaggataaatgtctttccaaaagtgtgtattcctgttaaattaagctcttgctaacttgaaaaatccctgttctgccagcgaagcttcctcctcctctccagctggtagtcacttgcgtgaatgctggtcagtctgaaaaggtgaagctggctgtgcacttacccccatctttctccctcggggagacgacccaaggaatttcagagtattttgtttggcagagcttttacctgttattctttgccctcaaatacagtattgtggtcattttgatgatatgtgtgtaaaatgtgaataatccaattggtgtctgtactcagccttttgatgtctttttaggactttctcttctacacagcaatacgtcgtgctcgagtatccttgtagcaaagcacatagagccagctgtcctgtcagttcccctgtttgcctctgaaacgtctggttagtggggacccaaagattctagtgagtcaacatccataactctgtatctagttgtattattcatagaaaatcaatctggtgctaatggttggccctggtgttgttgggtggcagctgctccttcgccctcttgtagtgtggctgtggagggctctgcctatggggggtggcctgtggcttgtatccttcagtccaccacagcaaatgtgtgtagatttcatgctcgacacttaccactcacctatcaacagatcatcctgcttgactgtaacaaaataaatagtgtctcttcaagtgaa

SEQ ID NO: 119570 - DNA, 3597 bp, Artificial Sequence
  derived and/or modified sequence
aaatgcaagcggagccttgagccgtggaggtgaaggttgacggagcctgcgtgagcttgcccatcaacaagacagcaggcacagacaggccagctgttgtgagcttggctttaggactccattcagtaggcaggaggagagctgcagcagaggcgggctgtgggtccctgaagcacatcgctgccttcacagctgggcgaactcccatccagcacgacaagcagatgcccagtgtcgggaaggcagcccaggatcacagcagcacccaccgagtcagaaggcaccgaacccacccacattctctgaactatctcactgccggggagccccagagctgccccgggagggccggggccgagcgggaaccctacctcgagattatagatactcggaggagagcaccccagcagacttgggaccccgagcccagagccctggctcacccctgcatgctcgaggacaagactcgtggccagtgagctcagccctgctctccaagaggccagccccacagaggccaccgccacccaagcgcgagcccaggagatacagggccacagacggcgcacctgctgacgcccccgtgggcgtcctcggcaggcccttcccaacgccatcccctgcgtccctggatgtgtatgtggcccgcctgtccctctcccacagcccctctgtgttcagcagtgcccagccccaggacaccccgaaggccactgtctgtgagcgtggaagccagcatgtgagcggggacgcatcacgtcctctgccagaagcactgctccctcccaagcagcagcacctgcgcctgcagacggccaccatggagacctcgcgctccccctcgccccagttcgccccccagaaactgacggacaaacctcccctgctcatccaggatgaggattcaaccagaattgagcgggtgatggacaacaacaccacggtgaagatggtgcccatcaagatcgtgcactcggagagccagccagagaaggagagccgccagagcctggcatgccccgccgagccacctgccctgccccacgggctggagaaagaccagatcaagacgctgagcacatctgagcagttctactcgcgcttctgtctgtacacgcggcagggtgctgagcccgaggccccacatagggcccagccggctgagccccagcccctgggcacccaggtgccccccgagaaagaccgctgcacctcccctccagggctcagctacatgaaggccaaagagaagactgtggaagacctgaagtcggaggagctggccagggagatcgtggggaaggataagtccctggccgacatcctggatcccagtgtgaagatcaaaaccactatggacttgatggaaggcatcttccccaaagacgagcacctcctggaagaagcccagcaacggaggaagctgctccccaaaatcccctctcctagaagcacagaggagaggaaagaggagcccagcgtgcctgcggccgtgtccctggccaccaattctacctactacagcacgtcggcccccaaggcggagctgctgatcaagatgaaggacctgcaggagcagcaggagcacgaagaggattcgggaagcgacttggaccacgacctgtcggtgaagaagcaggagctcatcgagagcatcagccgcaagctgcaggtgctccgggaggcccgcgagagcctgctggaggacgtgcaggccaacaccgtgctgggggccgaggtggaggccatcgtgaaaggcgtctgcaagcccagcgagtttgacaagttccggatgttcattggagacctggacaaagtggtgaacctcctgctgtcgctgtcaggccgcctggcccgggtggagaatgccctcaataatttggacgacggcgcttctcccggtgatcggcaatcactgcttgagaagcagagagtcctgatccagcagcacgaggacgccaaggagctcaaggagaacctggaccgccgcgagcgcatcgtctttgacattttggccaactatctgagcgaggagagcctcgcggactatgagcacttcgtgaagatgaagtcggccctcatcatcgagcagcgggagctggaagataaaatccaccttggtgaagagcagctgaagtgcttattggacagccttcagcccgaaaggggcaaataagagaccagtccccggtggaggaggggcacggggcctccgagctccagctccgttcccaaggatactcgtgaagaccccatctgtgttcatggcctggaaagagacttctcccatagcaaagaggctgttataaaagcaataacttttgtgtttgtgtgggatgatttatttaattttttagtttcccctttgattgctgagagccattttcctttacacataactacacctgacaccaggctctgctggatgtgagtttccactgcatgggctgtgggctgggcctgtggtgcctgccgagtggtcactgtcagtgggaaacccgttgttcctcccgtcttcagatgctgagccaactgcttggacagcagccagcgcgtcatgacgtgcatgagagggggaccctggtgctcatcttctcttgtcattcatccaggcatgggctgccaggttttgtccctgctcgttcaacagtgtgagcatttgtctctgttatctaatgatgttctctgacccagcagaaatcatcatcatgatgatgataatttattaactttttggaagggtgaatagtttcctaatggttaaaaaccaactgtgaaaggaaccacctgtgtggttgggttcactcattctcagattaaattgccacttaaagaaataacgtgcatgctttaaaaaacacagtcacgcaccaagcaggcaaatagctttagtccttctcacctcacatcacagttgttctgcaaagtaaaattttttggttaagagcgtgtccagtagtaatgtgcttgttagctgtttctcaagaccaacagaagattttttcagttactttccccccatgtattttgtatgcatatgattgtccgtgataattggctacttttccattgtttcctccttaaatcgtttagcatggcatgagggccacattccatggacgggaagaccccttcctcttcagaggtcccgtggactacacagctcctgagcttgatctttttctgccatgaagtttaaagattctatgcccatttccttgattgaaatggcaggattctaaagagagcctggtttgttaaaagaaaacactgtcatgctgtcagttcccaattgacaagtcacagactgggagaaaatatttgcaaatcgtgtatctgacaaaaggtttgtgtccaggatgtacaaagaactctcaaaccggatagtaagaaaacaaacagcccaagtgaaaagcaggcaaaagacttgaatagacacttcaccaaagagcatacacgcgtggcaaacaagcacacgaaaagacgttcagccgccgatggcttggttataatttataacttacttatttttatctaataattgtagattcagtgtatttcttcaaaaaatgtttaattaaatgcatgttaatggtg

SEQ ID NO: 119571 - DNA, 2276 bp, Artificial Sequence
  derived and/or modified sequence
gtttgtagttcccagtggctcttttgttctgctatcttgaagggcaggttgcttgtcagctcacaatgctgtgggtaaggtctggtgaggtcggcgaatgtgttctcattgtttattcttctgcctgaagatgagaaataatgcaaatcagggtgcagattccggctcgagctccacaggcgtgcacgtatgtgtaagggcatgctcgccggtgctgcatgtcctcgtggatgcatgcaatttttacagctttgggattcacggttagctgaaagcacattggaactggaaggcggtgctcttaacaccgtgttctaggctggaagccgtagagccatcatctgctctgatgggactgcagcccttggtatgtgggacccttgctccatgtgagttctgcagatgggttccccgagggagctggctggaggacgccagcatcgcatgaagacctgcctgcctcgtttgccttttgtttttcagtagcagtaagaaacaggcattctcactacacaggcattgaatgcggacattgagaaaaaatgacaagcagatgcccagtgtcgggaaggcagcccaggatcacagcagcacccaccgagtcagaaggcaccgaacccacccacattctctgaactatctcactgccggggagccccagagctgccccgggagggccggggccgagcgggaaccctacctcgagattatagatactcggaggagagcaccccagcagacttgggaccccgagcccagagccctggctcacccctgcatgctcgaggacaagactcgtggccagtgagctcagccctgctctccaagaggccagccccacagaggccaccgccacccaagcgcgagcccaggagatacagggccacagacggcgcacctgctgacgcccccgtgggcgtcctcggcaggcccttcccaacgccatcccctgcgtccctggatgtgtatgtggcccgcctgtccctctcccacagcccctctgtgttcagcagtgcccagccccaggacaccccgaaggccactgtctgtgagcgtggaagccagcatgtgagcggggacgcatcacgtcctctgccagaagcactgctccctcccaagcagcagcacctgcgcctgcagacggccaccatggagacctcgcgctccccctcgccccagttcgccccccagaaactgacggacaaacctcccctgctcatccaggatgaggattcaaccagaattgagcgggtgatggacaacaacaccacggtgaagatggtgcccatcaagatcgtgcactcggagagccagccagagaaggagagccgccagagcctggcatgccccgccgagccacctgccctgccccacgggctggagaaagaccagatcaagacgctgagcacatctgagcagttctactcgcgcttctgtctgtacacgcggcagggtgctgagcccgaggccccacatagggcccagccggctgagccccagcccctgggcacccaggtgccccccgagaaagaccgctgcacctcccctccagggctcagctacatgaaggccaaagagaagactgtggaagacctgaagtcggaggagctggccagggagatcgtggggaaggataagtccctggccgacatcctggatcccagtgtgaagatcaaaaccactatggacttgatggaaggcatcttccccaaagacgagcacctcctggaagaagcccagcaacggaggaagctgctccccaaaatcccctctcctagaagcacagaggagaggaaagaggagcccagcgtgcctgcggccgtgtccctggccaccaattctacctactacagcacgtcggcccccaaggcggagctgctgatcaagatgaaggacctgcaggagcagcaggagcacgaagaggattcgggaagcgacttggaccacgacctgtcggtgaagaagcaggagctcatcgagagcatcagccgcaagctgcaggtgctccgggaggcccgcgagagcctgctggaggacgtgcaggccaacaccgtgctgggggccgaggtggaggccatcgtgaaaggcgtctgcaagcccagcgagtttgacaagttccggatgttcattggagacctggacaaagtggtgaacctcctgctgtcgctgtcaggccgcctggcccgggtggagaatgccctcaataatttggacgacggcgcttctcccggtgatcggcaatcactgcttgagaagcagagagtcctgatccagca

SEQ ID NO: 119572 - DNA, 2365 bp, Artificial Sequence
  derived and/or modified sequence
gtttgtagttcccagtggctcttttgttctgctatcttgaagggcaggttgcttgtcagctcacaatgctgtgggtaaggtctggtgaggtcggcgaatgtgttctcattgtttattcttctgcctgaagatgagaaataatgcaaatcagggtgcagattccggctcgagctccacaggcgtgcacgtatgtgtaagggcatgctcgccggtgctgcatgtcctcgtggatgcatgcaatttttacagctttgggattcacggttagctgaaagcacattggaactggaaggcggtgctcttaacaccgtgttctaggctggaagccgtagagccatcatctgctctgatgggactgcagcccttggtatgtgggacccttgctccatgtgagttctgcagatgggttccccgagggagctggctggaggacgccagcatcgcatgaagacctgcctgcctcgtttgccttttgtttttcagtagcagtaagaaacaggcattctcactacacaggcattgaatgcggacattgagaaaaaatgacaagcagatgcccagtgtcgggaaggcagcccaggatcacagcagcacccaccgagtcagaaggcaccgaacccacccacattctctgaactatctcactgccggggagccccagagctgccccgggagggccggggccgagcgggaaccctacctcgagattatagatactcggaggagagcaccccagcagacttgggaccccgagcccagagccctggctcacccctgcatgctcgaggacaagactcgtggccagtgagctcagccctgctctccaagaggccagccccacagaggccaccgccacccaagcgcgagcccaggagatacagggccacagacggcgcacctgctgacgcccccgtgggcgtcctcggcaggcccttcccaacgccatcccctgcgtccctggatgtgtatgtggcccgcctgtccctctcccacagcccctctgtgttcagcagtgcccagccccaggacaccccgaaggccactgtctgtgagcgtggaagccagcatgtgagcggggacgcatcacgtcctctgccagaagcactgctccctcccaagcagcagcacctgcgcctgcagacggccaccatggagacctcgcgctccccctcgccccagttcgccccccagaaactgacggacaaacctcccctgctcatccaggatgaggattcaaccagaattgagcgggtgatggacaacaacaccacggtgaagatggtgcccatcaagatcgtgcactcggagagccagccagagaaggagagccgccagagcctggcatgccccgccgagccacctgccctgccccacgggctggagaaagaccagatcaagacgctgagcacatctgagcagttctactcgcgcttctgtctgtacacgcggcagggtgctgagcccgaggccccacatagggcccagccggctgagccccagcccctgggcacccaggtgccccccgagaaagaccgctgcacctcccctccagggctcagctacatgaaggccaaagagaagactgtggaagacctgaagtcggaggagctggccagggagatcgtggggaaggataagtccctggccgacatcctggatcccagtgtgaagatcaaaaccactatggacttgatggaaggcatcttccccaaagacgagcacctcctggaagaagcccagcaacggaggaagctgctccccaaaatcccctctcctagaagcacagaggagaggaaagaggagcccagcgtgcctgcggccgtgtccctggccaccaattctacctactacagcacgtcggcccccaaggcggagctgctgatcaagatgaaggacctgcaggagcagcaggagcacgaagaggattcgggaagcgacttggaccacgacctgtcggtgaagaagcaggagctcatcgagagcatcagccgcaagctgcaggtgctccgggaggcccgcgagagcctgctggaggacgtgcaggccaacaccgtgctgggggccgaggtggaggccatcgtgaaaggcgtctgcaagcccagcgagtttgacaagttccggatgttcattggagacctggacaaagtggtgaacctcctgctgtcgctgtcaggccgcctggcccgggtggagaatgccctcaataatttggacgacggcgcttctcccggtgatcggcaatcactgcttgagaagcagagagtcctgatccagcaaatgtgtgtagatttcatgctcgacacttaccactcacctatcaacagatcatcctgcttgactgtaacaaaataaatagtgtctcttc

SEQ ID NO: 119573 - DNA, 4851 bp, Artificial Sequence
  derived and/or modified sequence
atggagggcgccgagcccagagccagacccgagagactggccgaggccgagaccagagccgccgacggcggcagactggtggaggtgcagctgagcggcggcgccccctggggcttcaccctgaagggcggcagagagcacggcgagcccctggtgatcaccaagatcgaggagggcagcaaggccgccgccgtggacaagctgctggccggcgacgagatcgtgggcatcaacgacatcggcctgagcggcttcagacaggaggccatctgcctggtgaagggcagccacaagaccctgaagctggtggtgaagagaagaagcgagctgggctggagaccccacagctggcacgccaccaagttcagcgacagccaccccgagctggccgccagccccttcaccagcaccagcggctgccccagctggagcggcagacaccacgccagcagcagcagccacgacctgagcagcagctgggagcagaccaacctgcagagaaccctggaccacttcagcagcctgggcagcgtggacagcctggaccaccccagcagcagactgagcgtggccaagagcaacagcagcatcgaccacctgggcagccacagcaagagagacagcgcctacggcagcttcagcaccagcagcagcacccccgaccacaccctgagcaaggccgacaccagcagcgccgagaacatcctgtacaccgtgggcctgtgggaggcccccagacagggcggcagacaggcccaggccgccggcgacccccagggcagcgaggagaagctgagctgcttcccccccagagtgcccggcgacagcggcaagggccccagacccgagtacaacgccgagcccaagctggccgcccccggcagaagcaacttcggccccgtgtggtacgtgcccgacaagaagaaggcccccagcagccccccccccccccccccccccctgagaagcgacagcttcgccgccaccaagagccacgagaaggcccagggccccgtgttcagcgaggccgccgccgcccagcacttcaccgccctggcccaggcccagcccagaggcgacagaagacccgagctgaccgacagaccctggagaagcgcccaccccggcagcctgggcaagggcagcggcggccccggctgcccccaggaggcccacgccgacggcagctggccccccagcaaggacggcgccagcagcagactgcaggccagcctgagcagcagcgacgtgagattcccccagagcccccacagcggcagacacccccccctgtacagcgaccacagccccctgtgcgccgacagcctgggccaggagcccggcgccgccagcttccagaacgacagccccccccaggtgagaggcctgagcagctgcgaccagaagctgggcagcggctggcagggccccagaccctgcgtgcagggcgacctgcaggccgcccagctgtgggccggctgctggcccagcgacaccgccctgggcgccctggagagcctgcccccccccaccgtgggccagagccccagacaccacctgccccagcccgagggcccccccgacgccagagagaccggcagatgctaccccctggacaagggcgccgagggctgcagcgccggcgcccaggagccccccagagccagcagagccgagaaggccagccagagactggccgccagcatcacctgggccgacggcgagagcagcagaatctgcccccaggagacccccctgctgcacagcctgacccaggagggcaagagaagacccgagagcagccccgaggacagcgccaccagacccccccccttcgacgcccacgtgggcaagcccaccagaagaagcgacagattcgccaccaccctgagaaacgagatccagatgcacagagccaagctgcagaagagcagaagcaccgtggccctgaccgccgccggcgaggccgaggacggcaccggcagatggagagccggcctgggcggcggcacccaggagggccccctggccggcacctacaaggaccacctgaaggaggcccaggccagagtgctgagagccaccagcttcaagagaagagacctggaccccaaccccggcgacctgtaccccgagagcctggagcacagaatgggcgaccccgacaccgtgccccacttctgggaggccggcctggcccagccccccagcagcaccagcggcggcccccacccccccagaatcggcggcagaagaagattcaccgccgagcagaagctgaagagctacagcgagcccgagaagatgaacgaggtgggcctgaccagaggctacagcccccaccagcaccccagaaccagcgaggacaccgtgggcaccttcgccgacagatggaagttcttcgaggagaccagcaagcccgtgccccagagacccgcccagaagcaggccctgcacggcatccccagagacaagcccgagagacccagaaccgccggcagaacctgcgagggcaccgagccctggagcagaaccaccagcctgggcgacagcctgaacgcccacagcgccgccgagaaggccggcaccagcgacctgcccagaagactgggcaccttcgccgagtaccaggccagctggaaggagcagagaaagcccctggaggccagaagcagcggcagatgccacagcgccgacgacatcctggacgtgagcctggacccccaggagagaccccagcacgtgcacggcagaagcagaagcagccccagcaccgaccactacaagcaggaggccagcgtggagctgagaagacaggccggcgaccccggcgagcccagagaggagctgcccagcgccgtgagagccgaggagggccagagcacccccagacaggccgacgcccagtgcagagagggcagccccggcagccagcagcacccccccagccagaaggcccccaacccccccaccttcagcgagctgagccactgcagaggcgcccccgagctgcccagagagggcagaggcagagccggcaccctgcccagagactacagatacagcgaggagagcacccccgccgacctgggccccagagcccagagccccggcagccccctgcacgccagaggccaggacagctggcccgtgagcagcgccctgctgagcaagagacccgccccccagagaccccccccccccaagagagagcccagaagatacagagccaccgacggcgcccccgccgacgcccccgtgggcgtgctgggcagacccttccccacccccagccccgccagcctggacgtgtacgtggccagactgagcctgagccacagccccagcgtgttcagcagcgcccagccccaggacacccccaaggccaccgtgtgcgagagaggcagccagcacgtgagcggcgacgccagcagacccctgcccgaggccctgctgccccccaagcagcagcacctgagactgcagaccgccaccatggagaccagcagaagccccagcccccagttcgccccccagaagctgaccgacaagccccccctgctgatccaggacgaggacagcaccagaatcgagagagtgatggacaacaacaccaccgtgaagatggtgcccatcaagatcgtgcacagcgagagccagcccgagaaggagagcagacagagcctggcctgccccgccgagccccccgccctgccccacggcctggagaaggaccagatcaagaccctgagcaccagcgagcagttctacagcagattctgcctgtacaccagacagggcgccgagcccgaggccccccacagagcccagcccgccgagccccagcccctgggcacccaggtgccccccgagaaggacagatgcaccagcccccccggcctgagctacatgaaggccaaggagaagaccgtggaggacctgaagagcgaggagctggccagagagatcgtgggcaaggacaagagcctggccgacatcctggaccccagcgtgaagatcaagaccaccatggacctgatggagggcatcttccccaaggacgagcacctgctggaggaggcccagcagagaagaaagctgctgcccaagatccccagccccagaagcaccgaggagagaaaggaggagcccagcgtgcccgccgccgtgagcctggccaccaacagcacctactacagcaccagcgcccccaaggccgagctgctgatcaagatgaaggacctgcaggagcagcaggagcacgaggaggacagcggcagcgacctggaccacgacctgagcgtgaagaagcaggagctgatcgagagcatcagcagaaagctgcaggtgctgagagaggccagagagagcctgctggaggacgtgcaggccaacaccgtgctgggcgccgaggtggaggccatcgtgaagggcgtgtgcaagcccagcgagttcgacaagttcagaatgttcatcggcgacctggacaaggtggtgaacctgctgctgagcctgagcggcagactggccagagtggagaacgccctgaacaacctggacgacggcgccagccccggcgacagacagagcctgctggagaagcagagagtgctgatccagcagcacgaggacgccaaggagctgaaggagaacctggacagaagagagagaatcgtgttcgacatcctggccaactacctgagcgaggagagcctggccgactacgagcacttcgtgaagatgaagagcgccctgatcatcgagcagagagagctggaggacaagatccacctgggcgaggagcagctgaagtgcctgctggacagcctgcagcccgagagaggcaagtag

SEQ ID NO: 119574 - DNA, 972 bp, Artificial Sequence
  derived and/or modified sequence
atgtctgatcggccgaccgccaggcgctggggcaagtgtggtcccttgtgtacccgtgaaaatattatggtcgcatttaagggcgtttggacccaggctttctggaaggccgttacggccgagttcctggctatgcttatcttcgttctgttgagcctgggatctaccattaattggggggggaccgagaagcctctcccagtcgacatggtcttaatcagcctgtgctttgggctgagtatcgccaccatggttcaatgcttcgggcacattagtggcggccatatcaatcctgccgttacagtcgctatggtgtgcacacggaaaataagtatagccaagtccgtgttctatatcgctgcgcagtgtctgggggctattatcggggccgggattctgtatctcgttactccccccagtgtggttgggggactgggtgtgactatggtacacggcaacctgaccgccggccacggcctcttggttgagctgataatcacattccaactcgtgtttactatttttgccagctgtgactccaaaaggacggacgtgaccgggtcaattgccttggcaatcggcttttctgtggctattggccacctgtttgccataaactataccggggcctccatgaacccggctcgcagtttcggccctgctgtaattatgggaaactgggagaatcactggatctactgggttggcccgatcattggagcagtgctggctggaggcctgtacgagtacgtgttttgtcctgatgtggagtttaagaggagattcaaagaagcattcagcaaagccgcccagcagaccaaaggaagctacatggaggtcgaagacaatagaagtcaagtagagacagatgatctcatacttaagcctggcgtcgttcacgtgatcgacgtggaccgcggagaggagaagaaagggaaggatcagtccggagaggtcttaagttccgtgtag

SEQ ID NO: 119575 - DNA, 912 bp, Artificial Sequence
  derived and/or modified sequence
atgtccgaccgccctactgccaggcggtggggcaagtgtggtcctctgtgcactagggaaaatatcatggtagcattcaaaggagtatggacccaggcattttggaaagctgtcacggccgaattcttggcaatgctaatcttcgtcctgcttagcctgggatcaactataaactggggcgggaccgagaagcctttaccagtggacatggtcctcatctctctgtgctttgggctctctatagcaaccatggtttgtaccagaaagatttccattgccaagtcagtattctatattgccgcccaatgcctcggtgctatcattggagctggaattctctacctcgtcactcccccctccgtggtgggcgggctcggcgtgaccatggtgcacggaaatctaaccgctggacatggactgctggtcgagcttatcattactttccagctcgtgtttactatattcgcttcatgtgactcgaaaagaactgacgtcaccggatccattgcattggcaattggcttctccgttgccatcgggcacctttttgccatcaactatacgggagcttccatgaatccagccaggtcatttgggcctgcggtgattatgggcaactgggaaaaccattggatttactgggtgggacctatcattggagcagtcctagccgggggtctttacgaatatgtgttctgtcctgatgttgagtttaagcgacggtttaaagaagcctttagcaaagccgcacaacaaaccaagggatcatacatggaggtggaggacaatcggtctcaggtggagacagatgatcttattctgaagcccggggtcgtgcacgtgattgacgtcgatcgcggggaagaaaaaaagggtaaagaccagtccggcgaagtgctgagcagcgtctag

SEQ ID NO: 119576 - DNA, 972 bp, Artificial Sequence
  derived and/or modified sequence
atgtctgaccggcccacagcccggcgctggggcaaatgtggccccctgtgcacccgggagaacatcatggtggccttcaagggcgtgtggacccaggccttctggaaggctgtgacagctgagttcctggccatgctgatctttgtgctgctgagcctgggcagcaccatcaactggggcggcacagagaagcccctgcctgtggacatggtgctgatcagcctgtgcttcggcctgagcatcgccaccatggtgcagtgcttcggccacatcagcggcggccacatcaacccagctgtgacagtggccatggtgtgcaccaggaagatcagcatcgccaagtctgtgttctacatcgccgcccagtgcctgggcgccatcatcggggccggcatcctgtacctggtgaccccacccagcgtggtgggcggcctgggcgtgaccatggtgcacggcaacctgacagctggccacggcctgctggtggagctgatcatcaccttccagctggtgttcaccatctttgccagctgtgacagcaagaggacagatgtgacaggcagcatcgccctggccatcggcttctctgtggccatcggccacctgtttgccatcaactacaccggggcctccatgaacccagcccggagctttggacctgctgtgatcatgggcaactgggagaaccactggatctactgggtgggccccatcattggagctgtgctggccggcggcctgtatgaatatgtgttctgcccagatgtggagttcaagaggcgcttcaaggaggccttcagcaaggccgcccagcagaccaagggcagctacatggaggtggaggacaacagaagccaggtggagacagatgacctgatcctgaagccaggagtggtgcacgtgattgatgtggacagaggagaggagaagaagggcaaggaccagagcggggaggtgctgagctctgtgtag

SEQ ID NO: 119577 - DNA, 912 bp, Artificial Sequence
  derived and/or modified sequence
atgtctgaccggcccacagcccggcgctggggcaaatgtggccccctgtgcacccgggagaacatcatggtggccttcaagggcgtgtggacccaggccttctggaaggctgtgacagctgagttcctggccatgctgatctttgtgctgctgagcctgggcagcaccatcaactggggcggcacagagaagcccctgcctgtggacatggtgctgatcagcctgtgcttcggcctgagcatcgccaccatggtgtgcaccaggaagatcagcatcgccaagtctgtgttctacatcgccgcccagtgcctgggcgccatcatcggggccggcatcctgtacctggtgaccccacccagcgtggtgggcggcctgggcgtgaccatggtgcacggcaacctgacagctggccacggcctgctggtggagctgatcatcaccttccagctggtgttcaccatctttgccagctgtgacagcaagaggacagatgtgacaggcagcatcgccctggccatcggcttctctgtggccatcggccacctgtttgccatcaactacaccggggcctccatgaacccagcccggagctttggacctgctgtgatcatgggcaactgggagaaccactggatctactgggtgggccccatcattggagctgtgctggccggcggcctgtatgaatatgtgttctgcccagatgtggagttcaagaggcgcttcaaggaggccttcagcaaggccgcccagcagaccaagggcagctacatggaggtggaggacaacagaagccaggtggagacagatgacctgatcctgaagccaggagtggtgcacgtgattgatgtggacagaggagaggagaagaagggcaaggaccagagcggggaggtgctgagctctgtgtag

SEQ ID NO: 119578 - DNA, 972 bp, Artificial Sequence
  derived and/or modified sequence
atgagcgaccggcccaccgcccggcggtggggcaagtgcggccccctgtgtactcgggagaacatcatggtggcctttaaaggagtgtggacacaggccttctggaaagccgtgacagcagagttccttgcaatgcttatctttgttctgctttcactggggtccacgatcaattggggaggtaccgagaagcccctgcctgtggatatggtattgattagtctgtgtttcggcctttcaatcgctacaatggttcagtgtttcggtcacatcagcggcggccacataaatcccgccgtgacagtagcaatggtctgtacacgaaagatctccattgccaagtctgttttctatattgctgcccagtgtctcggggcaattattggcgccggcattctctacctcgtcaccccgccttctgtggtgggtggcttaggagtgacgatggtgcatggaaatctaaccgcgggccatggacttttggtcgagctcatcatcaccttccagctcgtatttactatattcgctagttgcgatagcaagaggaccgatgttactggttcgattgcactggcaatcggattttcagtggccataggccacctgtttgccattaattatacgggggctagcatgaaccccgcgcggagcttcggccccgccgtcataatggggaattgggaaaaccattggatttattgggttgggcctattattggggccgtgttggccgggggtctgtatgaatacgtgttctgtcctgacgtcgagttcaagaggcgttttaaagaggcgttctctaaagccgcccagcagaccaagggctcctatatggaggtggaagacaatcgttctcaagtcgagactgacgacctcattcttaagcccggcgtggttcatgtgatcgacgtggaccggggcgaagaaaagaaggggaaggatcagagcggagaagttctgagctcggtatag

SEQ ID NO: 119579 - DNA, 912 bp, Artificial Sequence
  derived and/or modified sequence
atgagcgaccggcccaccgcccggcggtggggcaagtgcggccccctgtgtactcgggaaaacattatggtggcattcaaaggtgtatggacccaggccttctggaaagccgtgaccgcggaatttctggccatgctgattttcgttctgttgtccctaggatccacaataaattggggcggaactgaaaagccacttcccgtggatatggttttgatctcactgtgtttcggacttagtatagccactatggtgtgtacccgcaagattagcatcgctaaaagtgttttctacatcgccgctcagtgtttaggcgccattataggcgcaggtatcctttatttggtgaccccaccctcagtggtgggaggactcggcgtgactatggttcacggaaatttgaccgcaggacacggtctgctggtggagctgatcatcacttttcaattggtgttcacaatttttgcaagttgtgactctaagcggaccgatgtcactggatccattgctctggccatcgggtttagcgtggcaatcggccacctctttgccattaattacaccggggcaagtatgaaccccgcaaggagcttcggccccgccgttatcatggggaactgggagaatcactggatttattgggtgggcccgatcatcggcgccgtgctcgccggtgggttgtacgagtatgtcttctgtcctgatgtggagttcaagcgccgattcaaggaggctttcagtaaagcagcccagcaaaccaaaggatcctacatggaagtcgaggacaaccggtctcaagtggagacagacgacctcatactgaaaccaggcgtggtccatgtgattgacgtcgaccggggggaggaaaaaaagggtaaagaccagagtggggaggtgctcagcagtgtttag

SEQ ID NO: 119580 - DNA, 972 bp, Artificial Sequence
  derived and/or modified sequence
atgtccgatcgcccaaccgcacgcaggtggggcaagtgtggtccactctgcacacgggaaaacattatggtagccttcaagggagtgtggactcaagccttctggaaggccgtgactgctgaatttttggccatgctgattttcgtattactgtcattgggaagtacaataaattggggcggaactgagaagcccctgccagtggacatggttctgatctccctgtgcttcgggctctctatagccacaatggtgcagtgcttcggacacatttccggaggacatatcaaccctgcagtgactgtcgcaatggtgtgcaccaggaagattagtattgccaaatccgtcttctatatcgctgctcaatgcctgggtgccataataggtgctggtatattatacttggtcacacctccaagtgtcgttgggggactgggtgttaccatggttcatggaaacctaaccgctggacacggattactcgtagagctgatcatcacattccagctcgttttcacgatctttgcatcatgtgattcaaaaaggaccgacgtgacaggctcaatcgccctggccatcggattcagcgttgccatcgggcatctgttcgcgatcaactacacgggcgcatccatgaacccggctcgaagctttggtccagcagtgattatggggaattgggagaaccattggatctactgggtgggcccaatcattggagccgtcctggcaggcggactgtatgagtacgtcttttgcccggatgtggaattcaagcgtcggtttaaggaggctttttcaaaggccgcacagcagactaaaggcagctatatggaggtcgaagacaatcggagccaagttgagaccgacgatctcattctaaaacctggcgtcgttcatgtgatagatgtcgatagaggagaagagaaaaagggtaaggaccagtccggggaagttctgtcttcagtgtag

SEQ ID NO: 119581 - DNA, 912 bp, Artificial Sequence
  derived and/or modified sequence
atgagcgaccgcccaacggcccgaagatgggggaaatgcgggccactttgtacaagagagaacatcatggtcgcttttaagggcgtgtggacccaagcattctggaaagccgtgactgccgaattcctagctatgctaatttttgtgctactcagcctgggctccacaattaattggggcggaaccgagaagccactgcccgtggatatggtgctgatatccttatgcttcggacttagcattgctacgatggtttgcacccgcaaaatatcaatagccaaatcggttttctacatcgccgcacagtgcttaggggcaattatcggagccggaattctgtatctcgttactcctccaagtgtggtggggggactgggggttacaatggtccacggaaaccttacagcaggccacggattgctcgtcgagctcatcattacctttcagctcgtgttcacaatttttgccagttgcgactcaaagaggacagatgtgaccggctcaattgccctggctataggattttccgtcgccattggccatctgttcgccatcaattatacaggggcttctatgaacccagccaggtcattcggcccagccgtaatcatgggcaactgggaaaaccactggatctattgggtcggcccaattataggcgcagtgctagcaggcggtctctatgaatatgtgttttgccctgacgtagagtttaaaagacgctttaaggaggctttctccaaggcagcccaacagactaaagggtcctatatggaggttgaggacaacaggtcccaggtagagacggacgatctgattctcaaaccgggagttgtgcacgtcattgacgtagatcgaggcgaagaaaagaaggggaaggaccagtcaggtgaggtcttgtcatccgtttag

SEQ ID NO: 119582 - DNA, 972 bp, Artificial Sequence
  derived and/or modified sequence
atgagcgacagacccaccgccagaagatggggcaagtgcggccccctgtgcaccagagagaacatcatggtggccttcaagggcgtgtggacccaggccttctggaaggccgtgaccgccgagttcctggccatgctgatcttcgtgctgctgagcctgggcagcaccatcaactggggcggcaccgagaagcccctgcccgtggacatggtgctgatcagcctgtgcttcggcctgagcatcgccaccatggtgcagtgcttcggccacatcagcggcggccacatcaaccccgccgtgaccgtggccatggtgtgcaccagaaagatcagcatcgccaagagcgtgttctacatcgccgcccagtgcctgggcgccatcatcggcgccggcatcctgtacctggtgaccccccccagcgtggtgggcggcctgggcgtgaccatggtgcacggcaacctgaccgccggccacggcctgctggtggagctgatcatcaccttccagctggtgttcaccatcttcgccagctgcgacagcaagagaaccgacgtgaccggcagcatcgccctggccatcggcttcagcgtggccatcggccacctgttcgccatcaactacaccggcgccagcatgaaccccgccagaagcttcggccccgccgtgatcatgggcaactgggagaaccactggatctactgggtgggccccatcatcggcgccgtgctggccggcggcctgtacgagtacgtgttctgccccgacgtggagttcaagagaagattcaaggaggccttcagcaaggccgcccagcagaccaagggcagctacatggaggtggaggacaacagaagccaggtggagaccgacgacctgatcctgaagcccggcgtggtgcacgtgatcgacgtggacagaggcgaggagaagaagggcaaggaccagagcggcgaggtgctgagcagcgtgtag

SEQ ID NO: 119583 - DNA, 912 bp, Artificial Sequence
  derived and/or modified sequence
atgagcgacagacccaccgccagaagatggggcaagtgcggccccctgtgcaccagagagaacatcatggtggccttcaagggcgtgtggacccaggccttctggaaggccgtgaccgccgagttcctggccatgctgatcttcgtgctgctgagcctgggcagcaccatcaactggggcggcaccgagaagcccctgcccgtggacatggtgctgatcagcctgtgcttcggcctgagcatcgccaccatggtgtgcaccagaaagatcagcatcgccaagagcgtgttctacatcgccgcccagtgcctgggcgccatcatcggcgccggcatcctgtacctggtgaccccccccagcgtggtgggcggcctgggcgtgaccatggtgcacggcaacctgaccgccggccacggcctgctggtggagctgatcatcaccttccagctggtgttcaccatcttcgccagctgcgacagcaagagaaccgacgtgaccggcagcatcgccctggccatcggcttcagcgtggccatcggccacctgttcgccatcaactacaccggcgccagcatgaaccccgccagaagcttcggccccgccgtgatcatgggcaactgggagaaccactggatctactgggtgggccccatcatcggcgccgtgctggccggcggcctgtacgagtacgtgttctgccccgacgtggagttcaagagaagattcaaggaggccttcagcaaggccgcccagcagaccaagggcagctacatggaggtggaggacaacagaagccaggtggagaccgacgacctgatcctgaagcccggcgtggtgcacgtgatcgacgtggacagaggcgaggagaagaagggcaaggaccagagcggcgaggtgctgagcagcgtgtag

SEQ ID NO: 119584 - protein, 265 aa, Artificial Sequence
  derived and/or modified sequence
MKKEVCSVAFLKAVFAEFLATLIFVFFGLGSALKWPSALPTILQIALAFGLAIGTLAQALGPVSGGHINPAITLALLVGNQISLLRAFFYVAAQLVGAIAGAGILYGVAPLNARGNLAVNALNNNTTQGQAMVVELILTFQLALCIFASTDSRRTSPVGSPALSIGLSVTLGHLVGIYFTGCSMNPARSFGPAVVMNRFSPAHWVFWVGPIVGAVLAAILYFYLLFPNSLSLSERVAIIKGTYEPDEDWEEQREERKKTMELTTR

SEQ ID NO: 119585 - DNA, 941 bp, Artificial Sequence
  derived and/or modified sequence
gggaaataagagagaaaagaagagtaagaagaaatataagagccaccatgaagaaagaggtctgctccgtggcgtttttgaaggcagtgtttgccgagtttctggcgacattgattttcgtgttcttcggcctgggatcggctttgaaatggccctcggcgctgcccacgatccttcaaatcgcgcttgcgtttgggctcgcgatcgggacactcgcgcaggcacttggccctgtgtcgggtgggcatatcaacccagcgatcactttggcccttttggtcggaaatcagatcagcctgcttcgggcattcttttacgtcgcagcccagctcgtcggtgcgattgcgggagcggggatcttgtatggtgtggcaccgttgaacgcaagagggaacctggccgtgaatgccctcaataacaatacaacgcaaggtcaggccatggtagtagagttgatcctcactttccagcttgcactctgcatttttgcgagcacggatagcaggcgcacgagccccgtcggatcgcctgcgttgtcaattggactctcagtcactctggggcacctggtgggaatctacttcacggggtgttccatgaatccggccagatcgttcggaccggcggtagtgatgaaccgcttttcccctgcccactgggtattctgggtgggtcccattgtgggggctgtccttgctgccatcttgtatttctacctgctctttccgaactcactctcgttgtcggagcgcgtagccattatcaagggaacgtatgaacccgacgaggactgggaagagcagagggaagagcggaagaaaaccatggaactcacaacccggtgataagctgccttctgcggggcttgccttctggccatgcccttcttctctcccttgcacctgtacctcttggtctttgaataaagcctgagtaggaag

SEQ ID NO: 119586 - DNA, 798 bp, Artificial Sequence
  derived and/or modified sequence
atgaagaaggaggtgtgcagcgtggccttcctgaaggccgtgttcgccgagttcctggccaccctgatcttcgtgttcttcggcctgggcagcgccctgaagtggcccagcgccctgcccaccatcctgcagatcgccctggccttcggcctggccatcggcaccctggcccaggccctgggccccgtgagcggcggccacatcaaccccgccatcaccctggccctgctggtgggcaaccagatcagcctgctgagagccttcttctacgtggccgcccagctggtgggcgccatcgccggcgccggcatcctgtacggcgtggcccccctgaacgccagaggcaacctggccgtgaacgccctgaacaacaacaccacccagggccaggccatggtggtggagctgatcctgaccttccagctggccctgtgcatcttcgccagcaccgacagcagaagaaccagccccgtgggcagccccgccctgagcatcggcctgagcgtgaccctgggccacctggtgggcatctacttcaccggctgcagcatgaaccccgccagaagcttcggccccgccgtggtgatgaacagattcagccccgcccactgggtgttctgggtgggccccatcgtgggcgccgtgctggccgccatcctgtacttctacctgctgttccccaacagcctgagcctgagcgagagagtggccatcatcaagggcacctacgagcccgacgaggactgggaggagcagagagaggagagaaagaagaccatggagctgaccaccagatag

SEQ ID NO: 119587 - DNA, 1420 bp, Artificial Sequence
  derived and/or modified sequence
ccaggccgccagcctcggagtgggcgcgggacagtgcgcggcgccccgcagccaggcccccgcccccgccgcatccacctcctccgccgcctgcgacccaacgggcgccccccgccgcggcagctgccgccgggcccccgcggccaccatgaagaaggaggtgtgctccgtggccttcctcaaggccgtgttcgcagagttcttggccaccctcatcttcgtcttctttggcctgggctcggccctcaagtggccgtcggcgctgcctaccatcctgcagatcgcgctggcgtttggcctggccataggcacgctggcccaggccctgggacccgtgagcggcggccacatcaaccccgccatcaccctggccctcttggtgggcaaccagatctcgctgctccgggctttcttctacgtggcggcccagctggtgggcgccattgccggggctggcatcctctacggtgtggcaccgctcaatgcccggggcaatctggccgtcaacgcgctcaacaacaacacaacgcagggccaggccatggtggtggagctgattctgaccttccagctggcactctgcatcttcgcctccactgactcccgccgcaccagccctgtgggctccccagccctgtccattggcctgtctgtcaccctgggccaccttgtcggaatctacttcactggctgctccatgaacccagcccgctcttttggccctgcggtggtcatgaatcggttcagccccgctcactgggttttctgggtagggcccatcgtgggggcggtcctggctgccatcctttacttctacctgctcttccccaactccctgagcctgagtgagcgtgtggccatcatcaaaggcacgtatgagcctgacgaggactgggaggagcagcgggaagagcggaagaagaccatggagctgaccacccgctgaccagtgtcaggcaggggccagcccctcagcccctgagccaagggggaaaagaagaaaaagtacctaacacaagcttcctttttgcacaaccggtcctcttggctgaggaggaggagctggtcaccctggctgcacagttagagaggggagaaggaacccatgatgggactcctggggtaggggccaggggctggggtctgctggggacaggtctctctgggacagacctcagagattgtgaatgcagtgccaagctcacaggctgcaagggccaggccagaaaagggcgggcctgcagcctgcaccccccaccttccccaacccttcctcaagagctgaagggatcccagcccctaggtgggcagaggcagaccctccccagagctccttaggaagaagacagactggttcattgaatgccgccttatttatttctggtgaggatgcatgcgtggggctgctggtgtttagagt

SEQ ID NO: 119588 - DNA, 798 bp, Artificial Sequence
  derived and/or modified sequence
atgaaaaaggaagtctgcagtgtggcctttttaaaagctgtatttgccgaatttcttgccactctgattttcgtgtttttcggattaggctcagctctcaagtggccctctgccttgcctacaatcctccagattgcgctcgccttcggcctggccatcggcacattagctcaggcgttagggcctgtctctggagggcacatcaaccccgcaatcacacttgcactcctcgtgggcaaccaaatctctctgctacgggccttcttttatgtcgcagcccagctggtgggagctattgccggagcgggaattctgtacggtgtcgccccgttgaatgcccgcgggaaccttgctgttaatgccctgaataacaacacaactcagggacaggctatggtagtcgagctgattctaacatttcagctcgccctgtgtatattcgcctccaccgattccagaagaacatcgcccgtgggttcaccagctttatcaatcggactcagcgtgactctgggacacctggttggcatttactttacaggttgcagtatgaaccccgcacgttccttcggtcccgcagttgtgatgaataggttctctccagcccattgggtgttttgggttggaccaattgtgggtgcagtgctggctgctatcctctacttttatctgctgttccctaacagtctcagtctgtcagaacgggtggctataattaaaggcacttatgagcccgacgaggactgggaggagcaacgcgaggaacggaagaaaaccatggaactcaccacccgctag

SEQ ID NO: 119589 - DNA, 798 bp, Artificial Sequence
  derived and/or modified sequence
atgaagaaggaggtgtgcagcgtggccttcctgaaggctgtgtttgctgagttcctggccaccctcatctttgtgttcttcggcctgggcagcgccctgaagtggcccagcgccctgcccaccatcctgcagatcgccctggccttcggcctggccatcggcaccctggcccaggccctgggccctgtgtctgggggccacatcaacccagccatcaccctggccctgctggtgggcaaccagatcagcctgctgcgggccttcttctacgtggccgcccagctggtgggcgccatcgccggggccggcatcctgtatggagtggcccccctgaatgcccggggcaacctggccgtgaatgccctgaacaacaacaccacccagggccaggccatggtggtggagctgatcctgaccttccagctggccctgtgcatctttgccagcacagacagcaggaggaccagccctgtgggcagccctgccctgagcatcggcctgtctgtgaccctgggccacctggtgggcatctacttcaccggctgcagcatgaacccagcccggagctttggacctgctgtggtgatgaaccgcttctccccagcccactgggtgttctgggtgggccccatcgtgggcgctgtgctggccgccatcctgtacttctacctgctcttccccaacagcctgagcctgtctgagcgggtggccatcatcaagggcacctatgagccagatgaggactgggaggagcagcgggaggagaggaagaagaccatggagctgaccaccaggtag

SEQ ID NO: 119590 - DNA, 798 bp, Artificial Sequence
  derived and/or modified sequence
atgaagaaggaggtgtgcagcgtggccttcctgaaggccgtgttcgccgagtttttagccacactgatcttcgtcttttttggcttgggcagcgccctgaagtggcccagtgccctgccaacgattttacagatcgcattagctttcgggttggcgatagggaccctcgcacaggctctgggtcctgtcagtggtggccatattaatcccgctattactttggcgttgttagtgggaaaccagatttctttgttaagggccttcttctatgtcgcagctcagcttgttggtgcaattgccggagctggaatcctatatggagtggcgcccctcaatgccagaggcaacctggctgttaatgcactcaataataatacgacccagggacaggctatggtggtggaactgatcctcactttccaactggctctgtgcatctttgctagcactgattctcgtcgaacttctcctgttggctcacctgccctgagcataggcctgagcgtgaccctcggacatctcgtggggatttacttcacgggatgctctatgaacccagcaaggagctttgggccagccgtcgttatgaacagattcagccctgcccactgggtgttttgggttgggcccatcgtcggggcagtgcttgccgccattttatatttctatctcctcttccccaattcactcagcttgagcgaacgggttgcaattatcaaaggtacttacgaaccagacgaggactgggaagagcaacgggaagagagaaagaagaccatggaattgaccacacggtag

SEQ ID NO: 119591 - DNA, 798 bp, Artificial Sequence
  derived and/or modified sequence
atgaaaaaggaggtctgctcggtggccttcctcaaagccgtgtttgctgaatttcttgccaccctcatcttcgtcttcttcggcttagggtcggcgctgaagtggccctctgctctgcctacgattctccagatcgccctcgcctttgggctggccatcggaacactagcacaggcactggggccagtcagtggagggcacatcaaccctgccattacactagcgctgctggttgggaatcagatctcactgctgcgcgcatttttctatgttgccgctcagcttgtaggagccatcgccggtgctggaattctgtacggggtggccccactgaacgcacgcggaaacctggccgtgaacgctctgaataacaacaccacacagggccaggcgatggtggtcgaacttatcctgactttccagctggctctatgtatcttcgcaagcacagacagtagaagaacgtctcctgttggctctcctgcattgtcaataggccttagtgtgacactcggtcaccttgtggggatttacttcaccggatgtagcatgaatccagcccgtagctttggacctgctgtggttatgaaccgattttctcccgcacactgggtgttctgggttggcccaattgtgggcgctgttttagcagccattctgtacttttacctcctgttccccaacagcttatcactgagcgagcgggtggctattataaaggggacctatgaacccgacgaagattgggaggagcagagagaggaacgcaaaaagactatggaattaacaacccggtag

SEQ ID NO: 119592 - DNA, 798 bp, Artificial Sequence
  derived and/or modified sequence
atgaaaaaagaagtatgcagcgtggcttttctaaaggcagttttcgctgaatttctcgccacactcatttttgtcttcttcggactcgggtctgcactgaaatggcctagcgccctccccaccatcttgcagatagccctcgccttcggattggccatagggacccttgcccaggccttaggccccgtctcaggcggccatatcaatcccgctatcacgctggcacttcttgtcgggaaccagatatccctcttacgtgcctttttttacgttgccgctcagctggtaggtgccatcgccggcgccggaatactgtacggcgttgcaccgctgaatgctagagggaatcttgcagttaacgccttaaataataataccactcagggacaggctatggtggtcgagttaatactgaccttccagcttgccctgtgtattttcgccagcaccgattctaggcgcacatccccagtggggtccccagctctgtctataggactatctgtaacgctcggtcacctcgtcgggatctacttcacaggttgcagcatgaacccagccagatcattcggaccagcagtagtgatgaatcgattttccccagctcactgggtgttttgggtgggcccaattgtgggagctgttttagccgccatcctctatttctaccttctttttccaaactccttaagtctgtctgagcgagtggccatcatcaaaggaacatatgagccagacgaggattgggaggagcagagggaggaacgcaagaaaacaatggagctgacgaccaggtag

SEQ ID NO: 119593 - DNA, 798 bp, Artificial Sequence
  derived and/or modified sequence
atgaaaaaagaagtatgcagcgtggcttttctaaaggcagttttcgctgaatttctcgccacactcatttttgtcttcttcggactcgggtctgcactgaaatggcctagcgccctccccaccatcttgcagatagccctcgccttcggattggccatagggacccttgcccaggccttaggccccgtctcaggcggccatatcaatcccgctatcacgctggcacttcttgtcgggaaccagatatccctcttacgtgcctttttttacgttgccgctcagctggtaggtgccatcgccggcgcagggatcctgtacggcgtagctcctctgaatgctcgagggaaccttgccgtaaacgctcttaacaataacaccactcagggacaggccatggtagtcgaactcattcttactttccaactcgcactgtgcattttcgccagcactgacagccgcagaacctcccccgtcgggtcccccgccctctctatcggattatcagttaccctgggtcaccttgtcggtatctactttaccgggtgttcaatgaatcccgcacggtcattcggcccggccgtcgtgatgaatagattttctccggcacattgggtgttttgggtaggacctatcgtgggtgcggttttggcagccatcctgtacttttacctgctgtttcctaactcattgtctctgtcagaaagggtggctattataaaggggacatacgaacctgacgaagactgggaagaacaacgggaagagaggaaaaaaactatggaactgactaccagatag

SEQ ID NO: 119594 - DNA, 795 bp, Artificial Sequence
  derived and/or modified sequence
atgaagaaggaggtgtgctctgtcgcttttctaaaggcggtgttcgcagaattcttggcgacgctgatctttgtgttttttggcctggggagtgctctgaagtggccctctgctttgcccaccatcctccaaatcgcccttgccttcggattggcaatcgggacccttgcccaagccctgggacccgtgagcggagggcacattaacccagctataaccctcgctctgctggtcggcaatcagatctctttgctgcgagccttcttttacgtggcagcccagctggtgggagccatcgcgggggctggaatactgtatggtgtcgctcccctgaatgcgcgaggcaatctggcagtgaacgccttgaacaataacactactcaggggcaggcaatggtcgttgaactgattctgacatttcaactggccctgtgcattttcgcatctaccgacagccgccgtacaagtcccgttggttcccccgctctgtctattggcctctctgtgacgctgggccaccttgtcggcatatacttcaccggctgctcaatgaatccagctcgaagttttggacctgccgtggtcatgaatcggttcagcccggcgcactgggtcttttgggtcggtcccatcgtcggtgcggttctggcagccatcctgtatttctatctcctgtttcccaattcgttatctctgagtgaaagggtggccatcataaaggggacgtacgagccagatgaggactgggaggagcaacgggaggagagaaaaaagacaatggagctaaccacacgc

SEQ ID NO: 119595 - DNA, 795 bp, Artificial Sequence
  derived and/or modified sequence
atgaaaaaagaggtctgctccgttgcttttctgaaagcagtgttcgcagagttcctggcgacactgatctttgtgtttttcgggctgggctctgcccttaagtggccaagcgcgttaccgaccatcctacagattgcgctggccttcgggctggctattggcaccctggcccaggctctagggccagttagtgggggccatataaatcccgccattaccctagcactcctggtgggtaatcagatcagtctgctgagggctttcttttacgtggccgcccagctggtgggagctattgccggtgcagggattttatacggggtcgcgccacttaacgcaaggggaaacctggcagtgaacgcgttaaataacaatactacacagggacaggcaatggtggtcgaactcatactcacgttccagttggccctctgcatttttgccagcaccgacagccggcggacatcccccgtcggttcgcccgctctaagcattggtctgtctgtgactctcggacacctggtgggaatctatttcactggatgctccatgaatcccgcgcgctcttttggcccggcggtcgtaatgaatagattttcacctgcgcactgggtattttgggtgggtcctatcgtaggggcagttttagctgctatcctctacttctacctcctgttccctaactccttgtcactgtcagaaagggtcgccatcattaaaggcacctacgaacccgatgaagactgggaggagcagagagaagagcgcaaaaaaactatggagttgactacccgc

SEQ ID NO: 119596 - DNA, 795 bp, Artificial Sequence
  derived and/or modified sequence
atgaagaaggaggtgtgttctgtcgccttcctcaaagcagtcttcgctgaatttctggctaccttgatttttgtgttcttcggactcggcagtgctcttaaatggccatcagcactgcccaccattttgcagatcgcactggcttttgggctggcaataggaacgctcgcccaagcattggggcccgtgagcgggggccatattaatcctgctataaccctggcactgctggtggggaaccagatcagcttacttcgagcttttttctacgtggctgctcagctggtaggcgccatcgctggagccggcattctgtacggagtcgcgccattgaacgcacgcggcaacctggccgtgaacgccctgaataacaacaccacacagggtcaggctatggtggtggagcttattttaacttttcagctggctctctgcatcttcgccagtaccgatagcaggcggacgtcgcccgtgggcagtcccgctctctctatcggactgtccgtcacgctcggacacctggtcggcatctacttcaccggatgctctatgaatcctgcaaggtcttttggaccagccgttgtaatgaaccggttctcaccagcgcactgggttttttgggtaggccccatcgtgggcgcagtgcttgccgctatcctctatttctatcttctgtttcccaacagtcttagcctctcagagagagtcgccattatcaaggggacttatgaaccagatgaagattgggaagagcagcgagaggaacgtaagaaaactatggagctcacaactagg

SEQ ID NO: 119597 - DNA, 795 bp, Artificial Sequence
  derived and/or modified sequence
atgaaaaaggaggtgtgcagcgtcgccttcctcaaggcggtgttcgccgagttcctggctaccctgatctttgtctttttcggactgggctcagcgctcaaatggccatccgctctcccaactatcctgcaaattgcactggctttcggactggcaatcgggaccctggcacaggcactgggaccagtgtccgggggacatatcaacccggccatcaccctcgcactgctggtcggcaatcagatcagccttctgcgcgccttcttctacgtggctgcccagctggtcggagccattgccggagccgggatcctttacggagtcgctccccttaacgcgagaggaaacctggcagtcaacgcgctgaataacaacacgacccagggacaggccatggtggtggaactgattctgacgttccaactggctctgtgcatcttcgcctcgaccgactcccgccggacctccccagtcggttcgccggcgctgtcgattggattgtcagtgaccctgggacatctggtgggaatctactttactggttgctccatgaacccagccaggtcgtttggaccggccgtggtgatgaaccgattctcacctgcccactgggtgttctgggtggggccgatcgtgggcgcggtcctggcggctatcttgtacttctacctcctctttccgaatagcctgtcgctctccgaacgcgtcgctatcataaagggcacttacgagcccgatgaggactgggaggaacagcgcgaagaaagaaaaaagactatggagctgacgacccgc

SEQ ID NO: 119598 - DNA, 795 bp, Artificial Sequence
  derived and/or modified sequence
atgaaaaaagaggtatgttccgttgctttcctcaaggcagtgtttgcagaatttctcgctactctgatttttgtgttttttggactgggatcagcgttgaagtggccatcagcactgcctaccattcttcaaatagcgcttgcatttggactggcaattggtacgcttgcacaagctctgggtcctgtgtccggtggacacattaatcctgccattactctggcactccttgtgggcaatcagattagtttgctgagagcgttcttttacgtggctgcacagctggtgggtgcaatcgcaggagcgggaatcttgtacggcgtggcgccactgaacgcacggggtaacttggccgtcaatgcgctgaacaacaataccactcaagggcaagccatggtggtggaacttattctgaccttccaactggcgctctgcatcttcgcgtctaccgattcacggcgaaccagcccagtcggatcgcctgcactctccattggcctttcagtgactctcgggcatctcgtcggaatatacttcaccggctgtagcatgaaccccgcacgttcgtttgggccagcggtcgtcatgaaccgcttttcacccgcccattgggtattctgggtgggtcctatagtgggtgccgtcctggccgcaatactgtacttttatcttctctttccgaactcccttagtctgtccgagagggtggcgatcatcaaggggacttacgaacctgacgaagattgggaagagcagagagaagaacgcaaaaagacgatggagctcactacgaga

SEQ ID NO: 119599 - DNA, 795 bp, Artificial Sequence
  derived and/or modified sequence
atgaaaaaagaagtatgttcggtagcgtttttaaaagcggtatttgcggaatttttagcgacgttaatatttgttttttttggtttaggttcggcgttaaaatggccgtcggcgttaccgacgatactacaaatagcgctagcgtttggtctagcgataggtacgttagcgcaagcgttaggtccggtatcgggtggtcatataaatccggcgataacgttagcgttattagtaggtaatcaaatatcgctattacgtgcgtttttttatgtagcggcgcaattagttggtgcgatagcgggtgcgggtatactatatggtgtagcgccgttaaatgcgcgaggtaatctagcggttaatgcgttaaataataatacgacgcaaggtcaagcgatggtagtagaactaatattaacgtttcaactagcgctatgtatatttgcgtcgacggattcgcgtcgtacgtcgccggttggttcgccggcgctatcgataggtttatcggtaacgctaggtcatctagttggtatatattttacgggttgttcgatgaatccggcgcgatcgtttggtccggcggtagtaatgaatcgtttttcgccggcgcattgggttttttgggtaggtccgatagtaggtgcggttctagcggcgatactatatttttatctattatttccgaattcgctatcgttatcggaacgtgtagcgataataaaaggtacgtatgaaccggatgaagattgggaagaacaacgtgaagaacgaaaaaaaacgatggaattaacgacgcgt

SEQ ID NO: 119600 - DNA, 795 bp, Artificial Sequence
  derived and/or modified sequence
atgaaaaaagaggtgtgctctgtcgcgtttctgaaggcagtgttcgcagagtttctggcaactctgatcttcgtgttcttcggtctgggctctgcgctgaagtggcccagtgctcttccaaccatattgcagattgccctggcttttggcctggccattggcacactggcccaagccctcggaccagtgtccggggggcacatcaatcccgccataacattggcccttctggttggaaaccaaattagcctattgagagccttcttttacgttgccgctcagctggtgggcgctatagcaggggccgggattctctacggggttgctcctttgaacgcccgcggaaacctggcggtaaatgcattgaataacaacacaacacagggacaggccatggtcgtcgaactgatcctgacgttccagttagctctttgtatctttgcaagcactgatagccgacggacctcacccgttggtagtcccgcgctgtcgattggcctgtctgttaccctggggcacttggtcggaatctactttacggggtgctccatgaacccggcccgcagttttggccccgccgtggtcatgaatcgatttagccccgcccactgggtgttctgggtggggccgatcgttggcgccgtgctggctgcaattctttacttctatttgctgttcccgaactctctgagcctctccgagagggttgccatcatcaaagggacctacgagcccgatgaggattgggaggaacagagagaagaacgcaaaaagacaatggagcttactactcgc

SEQ ID NO: 119601 - DNA, 795 bp, Artificial Sequence
  derived and/or modified sequence
atgaaaaaggaggtgtgctcagtcgccttcctgaaggcggtgttcgcagaatttttggcgacactgatcttcgtcttcttcggcctgggctccgccctgaagtggccgagtgccctgccgacaattctgcagattgccttggccttcggcctcgccattggcacgctcgcccaggctctaggaccagtgtcgggaggacacataaacccggccatcactcttgcgctcctagtgggaaaccagatttccctattgcgggctttcttttacgtggcagcccagctcgtcggcgcaatcgcaggcgcaggcattctgtacggagtagctcccttgaatgcccggggaaacttggccgtgaatgcccttaataacaataccacccagggccaggcgatggttgttgagctgatcctaactttccaactggcactatgtatttttgcctcgacagattctcgtcgcaccagcccggtgggttcgcccgcgttaagcatcggattatccgtgaccctggggcatcttgtgggaatctacttcactggttgtagcatgaacccggcaagatctttcggtccggccgttgtgatgaatcggttttcgcctgcacattgggtgttctgggtcggacctatcgtcggcgcggtcctcgcagctatactatatttttacctcttgttcccgaatagcttgtcgctctccgaacgcgtcgccataatcaaaggcacgtatgagccggatgaagattgggaggaacagcgcgaagagcggaagaagacgatggagctgacaacccga

SEQ ID NO: 119602 - DNA, 795 bp, Artificial Sequence
  derived and/or modified sequence
atgaaaaaagaggtgtgctcggtggcctttctgaaggccgtgttcgcagagttcctagcgaccttgatctttgtgttttttggcctggggtctgcactgaaatggcccagtgcattacctactatactgcagatcgctctagctttcgggctcgccatcggaactctggcccaagccctgggaccggtgtctgggggccatattaaccccgccatcactctggctctactggtcgggaaccagatcagcctgctgagggctttcttctacgtcgcggcacaacttgtgggcgctattgccggggcaggcattctgtatggggtcgcccccctgaacgcgcgcggaaatctggctgtcaatgcattgaataacaatactacgcagggacaggccatggtggtggagctgattctgacatttcagctagcactgtgcatttttgcatcaaccgacagcaggcggaccagccctgtcggtagccccgcccttagtataggcctgtcagttacacttgggcatctcgtggggatctatttcactggttgctccatgaaccccgcccggtcattcgggcccgccgttgtgatgaacaggttttctccggcccattgggtgttttgggtaggtccgattgttggagctgtgttggccgcaatcctgtacttctatctcttgtttcccaatagtttgtcactctccgagcgagtcgccataatcaaaggcacctacgagcctgacgaggactgggaggagcagcgagaggagcggaaaaagacaatggagctgacaacacgt

SEQ ID NO: 119603 - DNA, 795 bp, Artificial Sequence
  derived and/or modified sequence
atgaagaaagaagtctgctctgtggcattcctgaaggccgtattcgccgagttcttggccactctgatcttcgtgttttttgggctgggttcggctctgaagtggccgtccgcgttgccaacgatcctccagatcgcactggctttcggacttgctatcggaacgctggcacaagcactcgggccagtttccggcggacatatcaacccggcaataactttggcactcctcgtgggtaaccagatctcgttgttgcgcgcattcttctacgtggcggcgcaattggtgggagcaatcgccggagctggaatcctctatggcgttgccccactgaatgcaagaggtaacctcgctgtcaatgccctgaacaataacaccactcagggccaggcaatggttgtggagcttatcctcacctttcagcttgccctgtgcatcttcgcgtcgaccgactcaagacgcacctctccggtgggatcgccggcgcttagcattggactgagtgtgaccttgggacacctggtgggcatttacttcaccgggtgttcaatgaaccccgcccggtccttcggtccagcagtggtcatgaacaggttttcccccgcacactgggtgttctgggtgggaccaatcgtcggggccgtattggctgccatcctttacttttacctgctgttcccaaattcgctgagcttgtcagaacgggtcgccattatcaaaggaacgtacgaacctgacgaggattgggaagaacaacgcgaggaacggaaaaagactatggagctgaccactcgc

SEQ ID NO: 119604 - DNA, 795 bp, Artificial Sequence
  derived and/or modified sequence
atgaaaaaggaagtgtgttcagtcgctttcctgaaagcggtgtttgccgaatttctggcaactcttatctttgtattctttggactcggttccgcgctcaagtggccttccgcacttccaaccattcttcaaattgcactggcatttggccttgccattggtacccttgcacaagctctggggccagtgtcgggaggacacattaaccctgcaatcacgctggccctgcttgtgggaaatcagataagcctcctgagagcattcttctacgtggccgcccaactcgtgggagcaattgcaggagccggcattctttacggagtcgcaccactgaacgcacgaggcaacctggcggtgaatgcattgaataacaatactacccagggtcaagcaatggtcgtcgaattgattcttacctttcagcttgcactgtgcatttttgcgtcgaccgattcacggcgcacttcaccagtgggctcgcccgccctgtctattgggctttcggtgactctgggacacctcgtgggcatttacttcacgggatgttcaatgaaccctgcacgttcatttggccccgctgtggtcatgaacagattttccccggcacactgggtgttttgggtcggcccgattgtgggggcagtgctggccgcaatcctgtacttctacctgctgttcccgaattcactgtccctgagcgagcgggtcgcaatcataaaaggcacttacgaaccggacgaggattgggaagaacagagagaagagaggaaaaagaccatggagctgacgaccaga

SEQ ID NO: 119605 - DNA, 795 bp, Artificial Sequence
  derived and/or modified sequence
atgaaaaaagaggtttgctctgtggcgtttcttaaagcagtcttcgctgagttcttggcgacactcattttcgtattcttcgggctggggagcgccctgaagtggccttccgcattgccaactatcctgcagattgcattagcgtttggactcgctattggaacacttgctcaggccctgggacccgtatctggcggacacatcaaccccgccatcacattggccctgctggtggggaaccagatcagtctgctcagggcgtttttttacgtagcagcacaattggtcggagcgattgccggagcgggcatcctttatggggtggccccactcaatgccaggggtaacttagcggtgaacgccctcaacaataacacaacccaaggccaggctatggtggtggagctgatactgaccttccagcttgccctctgcatcttcgcgtcaacagactctaggcggacctcccctgttgggagtccagccctgagtatcggactgagcgtgaccctgggccatctagttgggatctatttcacaggatgttcaatgaatcccgcaagatccttcggccctgccgtggtaatgaaccgcttttctccggcccactgggtcttctgggtaggtcctatcgtgggagccgtgttggccgcaatcctctacttttacctactttttcccaactctctcagtctcagcgagcgagtcgccataatcaaaggcacatatgaacccgatgaagactgggaggagcagagggaggaaagaaagaaaaccatggagttgactacaaga

SEQ ID NO: 119606 - DNA, 795 bp, Artificial Sequence
  derived and/or modified sequence
atgaaaaaagaagtatgtagtgtagcattcttgaaggccgttttcgccgagttcctggcgactttaatctttgttttttttggacttggctctgctttgaagtggccaagcgcactgcctacaattctccaaattgccttagcattcggcctcgcgatcgggaccttggctcaggcccttggccctgttagcggtgggcacatcaaccccgccataactctggcactgcttgtgggaaatcagattagtctcctccgggctttcttttacgtcgccgcgcaactcgtcggggctatcgctggagcaggtatcctgtacggcgtggctcccctgaacgcccgcggcaatttggccgtgaacgctcttaataacaatacaactcagggacaggccatggtggtagagctgatcctgacgttccagctggccctatgcatttttgcctctacagactctcgtaggacctcaccagtgggctcgcccgcactcagcatcggcctttctgtcacactgggccacctcgtgggcatttatttcacgggatgctctatgaaccctgctcggagctttgggccggcagttgtgatgaaccgattctccccagcccactgggtcttctgggtcggacctatagttggagctgttctggcagctatcttatacttttaccttttattccctaattctctctcactttccgagagagtggccatcattaagggtacttacgaacccgatgaggactgggaagagcaacgtgaggaacggaagaaaacaatggaattaaccacaaga

SEQ ID NO: 119607 - DNA, 795 bp, Artificial Sequence
  derived and/or modified sequence
atgaagaaggaagtgtgttctgtggcatttctgaaggcagtttttgcagaatttctggcaactctgattttcgttttctttggactgggctcagcactcaagtggcccagcgcccttcctaccatccttcaaatcgctctcgcctttggacttgcgatcggaactcttgcgcaggcgctcggccctgtgtcaggtggacatatcaatcctgcaattaccttggcactgcttgtggggaaccagatttcgctgcttcgtgccttcttttacgtggcggcacagcttgtgggagcaatagcaggggcagggattttgtacggtgtggcccccctcaatgcccgtggtaacctggctgttaacgcactcaataacaatactacccagggccaggcgatggtggtggaacttatcctcacgttccaacttgccctctgcatatttgcatcgactgattccaggcgcacctcaccagtgggttcgcctgccctgtcaattggtctgtcggtcactctcgggcacctcgtgggaatctactttaccggttgtagcatgaatcccgctcgttcttttggtcccgccgtcgtgatgaaccgcttctcacctgcacattgggtcttttgggtcggacctattgtgggggctgtccttgcagcaattctttacttctacctgctgttccctaattccctctcgctttccgaaagagtcgcaatcattaaaggcacttatgaaccagacgaggattgggaggaacaacgggaggaaaggaaaaagacgatggagctcaccaccaga

SEQ ID NO: 119608 - DNA, 795 bp, Artificial Sequence
  derived and/or modified sequence
atgaagaaggaagtgtgtagcgtcgcgtttctcaaggctgtgttcgccgaatttcttgcgactctgatattcgtgttttttggtctgggatctgccttgaagtggccttcagcactgccgacgattctccaaatcgcgcttgcctttggccttgcaatcggaacccttgctcaggctcttggcccagtgagtggagggcatatcaaccctgctatcacccttgcactgttggttggcaatcagatatcgcttctgcgcgccttcttttacgtcgcagcacaactcgtgggagcaattgcaggagcaggtatcctgtacggagtggcacctctgaatgcaagaggcaatcttgcagtgaacgccctgaacaacaacactacccagggtcaagccatggtcgtggaactcattttgacgttccaactggctttgtgcatttttgcgagcaccgactcgcgacgtactagccctgtcggcagtccagcactgtcaattggcctgtctgtgactcttggacacctcgtggggatttactttactggttgttcaatgaatcccgcacggagcttcggtcccgcagtcgtcatgaaccgcttttccccagcgcattgggtattctgggtgggaccaatagtgggtgccgtgttggctgccattttgtacttctatcttctctttcccaactcactctcgctctcggaacgggtcgcaatcattaaagggacctacgaacctgatgaagattgggaggaacaacgagaggagaggaagaaaacgatggagctgaccactaga

SEQ ID NO: 119609 - DNA, 795 bp, Artificial Sequence
  derived and/or modified sequence
atgaagaaggaggtctgttcggtggcatttctcaaggccgtgtttgctgagtttctggctacgctgattttcgtgttttttggacttgggtccgcgctgaagtggccaagcgcactgccgactattcttcaaatcgcgctggcttttggactggcaatcggtactctcgcccaagctctcggcccagtgtcgggtggccacatcaatccagcaataaccttggcacttctcgtcggaaaccagataagccttttgagagcgtttttctacgtcgcggcacagctggtcggagccattgcgggtgccggtattctgtacggtgtcgctccacttaacgctcgcggtaaccttgcggtgaacgctttgaataacaataccacccagggtcaagcaatggtggtggaactgattctgaccttccagctcgccttgtgcattttcgcatccactgatagcagaaggacttcgcccgtcgggtcccctgcactttcaatcggattgtcagtgactcttggtcatctggtgggaatctactttaccggatgttctatgaatcctgcacggtcgtttgggccagccgtggtgatgaatcgcttttcgcctgcacattgggtgttctgggtcggccccattgtgggcgcagtcctggcagctatcctgtacttctatcttctttttcctaacagtctttccttgagtgaaagggttgcaatcataaaagggacttatgaacctgatgaggactgggaggaacaacgcgaagaacgaaagaaaactatggagttgactactcgt

SEQ ID NO: 119610 - DNA, 795 bp, Artificial Sequence
  derived and/or modified sequence
atgaagaaagaagtgtgctcagtggcctttcttaaagccgtgttcgcagaattcctggccaccctgattttcgtgtttttcggccttggaagcgcactcaagtggccatccgcactgcctactattcttcaaatagcgctcgcatttggactggcaatcggaactctcgcacaggcacttgggcccgtgtcgggcgggcacattaatcctgcaatcactcttgccctccttgtcgggaaccagatctcattgcttagagcgtttttctacgtcgcagcccaacttgtgggagcgatcgccggagcaggaattctgtatggggtcgcacctcttaatgcacgcggtaatctggcagtcaatgcgctgaacaacaataccacccagggacaagccatggtggtggaacttattctgacgtttcagcttgcactctgtattttcgcttcgaccgattcccgccgtacctcccctgtgggttcgcctgctctttcgattgggctcagtgtgaccttggggcatcttgtcggaatatacttcaccggttgctccatgaatcctgcccgttcgtttggcccagcggtggtgatgaaccggtttagccctgcacattgggtcttttgggttggaccaattgtcggcgcagtgctggcagcaatcctgtacttttacttgctgttccctaactcccttagcttgtcagaacgggtggcaatcattaaagggacctacgaacctgatgaggattgggaggaacaacgcgaagaaagaaagaaaaccatggaacttaccaccagg

SEQ ID NO: 119611 - DNA, 795 bp, Artificial Sequence
  derived and/or modified sequence
atgaagaaggaagtgtgtagcgtggcctttctgaaagcagttttcgccgagttccttgcgacactcatctttgtattttttggactgggtagtgcactgaaatggccgagtgccctgcccacaatcctgcagattgccttagccttcggattagccataggtacgctggcccaagccctgggcccagtctccggagggcatatcaaccctgctattaccctggcactcctcgtcggtaaccagatatctctgctcagggccttcttttacgtggcggcacagctcgtaggggcaattgccggtgctggcatactgtacggcgtcgccccactgaacgcccgcggtaacctcgccgtcaacgctcttaacaacaatactacacaagggcaggcgatggtggtggaacttattctcactttccagctggcgctctgcatctttgcctcaaccgactccagacggacttcccccgttggttcccccgcactgagcatcgggttgagtgtgacactgggacatctggtgggcatttatttcactggatgtagcatgaatccagctaggtcattcggtcccgccgtggtgatgaacaggttcagtcctgcacactgggtgttttgggtgggcccgattgtgggagcagtgctggcagccatcctgtacttctatttgctgttccctaatagtttgtcgctgagcgaacgagtcgccatcattaagggaacatatgagcccgatgaagattgggaagagcaacgggaggagaggaaaaagaccatggaactgaccacacga

SEQ ID NO: 119612 - DNA, 795 bp, Artificial Sequence
  derived and/or modified sequence
atgaagaaagaggtgtgttcagtggctttcctgaaagccgtcttcgccgaattccttgcgacactgatcttcgtgttctttggattgggctctgcgctgaagtggccttccgctttgccaacaatcctacaaatcgcattggcgtttggactggcaatcggtaccctcgcacaggcactggggcctgttagcggcgggcacataaaccctgcaataacacttgctctactagttgggaatcagatcagtttgctccgggctttcttctatgtcgccgcccagctggtcggcgcaatcgctggggccggaattttatatggggtggcccccctgaacgccaggggtaacctggcagtaaacgctctgaacaataataccactcagggacaagccatggtggtggaacttatcttaacctttcagttggctttatgcatcttcgctagcacagactctcggaggacatcccctgtcggttccccggccctgagcatcggcttgtctgtgacacttgggcatcttgtagggatctattttacaggttgtagcatgaacccagcacggtcttttggaccggccgtggtcatgaaccgcttttcccctgctcactgggttttttgggtgggccccatcgtgggagccgtgctggccgcaattctgtacttttatctgttatttccaaatagtctgtctctctctgagcgggtggccataattaagggtacttatgaacccgacgaggattgggaagagcaacgtgaagagaggaaaaaaacaatggagttgactacgagg

SEQ ID NO: 119613 - DNA, 795 bp, Artificial Sequence
  derived and/or modified sequence
atgaagaaagaggtgtgttcggtggcgtttcttaaggctgtgttcgcagagttccttgcgaccctgatcttcgtgtttttcgggcttgggagcgcactcaaatggccttccgcactgccaaccatcctgcagattgccttggcatttggattggcaattggaactctggctcaagcgctgggtccggtgtcaggcggacatatcaaccctgcgatcactttggcacttctggtgggcaatcaaatttccctgcttcgcgcatttttctacgtggcagcccagctcgtgggagctatagcaggtgccggaatcctctacggtgtggcacccttgaacgcaagaggtaatctggccgtcaacgcactcaataacaacaccactcagggacaggcaatggtcgtggaattgatccttacgtttcaactggcactgtgcatttttgccagcaccgattccaggcggacctccccggtggggtcaccggccctgtctattggactgtccgtgaccctgggccatcttgtgggcatctacttcaccggctgttcgatgaatcccgcacgctcattcggccccgcagtcgtgatgaacagatttagcccagcacactgggtgttttgggtggggcctattgtcggagcagttctcgcggccatcctttacttctaccttctttttcccaattcgctttccctctcagaacgggtggccataatcaagggaacctatgaacctgatgaagattgggaagagcagagggaggagcggaaaaagactatggagctcaccacccgc

SEQ ID NO: 119614 - DNA, 795 bp, Artificial Sequence
  derived and/or modified sequence
atgaaaaaggaagtgtgctccgtggcgtttcttaaggccgtgttcgccgagtttctggcaaccctcatttttgtgttttttggcctcggctccgcacttaagtggccatcggctcttcctaccattctgcagattgcccttgcattcgggttggccattggcaccctggcgcaagctctcggtcctgtcagcgggggtcacattaacccagccattactctggctctgctggttggtaaccaaatcagcctcctgagggcttttttctacgtggcagcacaactggtgggagcaattgcaggagctgggattctttacggtgtcgcccctctgaatgcccggggcaaccttgcagtgaacgccctgaacaacaacacgactcagggacaggcaatggtggtcgagctgatcctcacttttcaacttgcattgtgcatttttgcatcgactgatagcagaagaaccagcccggtcggttcacccgcgctttcaattggactctcagtcactctggggcacctcgttggaatctacttcaccggttgctcaatgaatccagccaggtcttttggacccgcggtggtgatgaaccgattttctcctgcacattgggtgttttgggttggccctatcgtgggagcagtgctggccgcaattctgtacttttatctgctttttccaaactcactgtcgctcagcgaaagagtggcgatcatcaaggggacgtacgagcctgatgaggattgggaagaacaaagagaagaacgaaagaaaaccatggagttgacgactaga

SEQ ID NO: 119615 - DNA, 795 bp, Artificial Sequence
  derived and/or modified sequence
atgaagaaggaggtgtgttcggtggctttcctgaaggcggtgttcgccgagtttcttgcaactctgatattcgtgttttttggcctcggttcagccctcaaatggccttccgcactgcctaccattcttcagatagcacttgcctttggattggctatcggtactctggcacaagcactgggaccagtcagcggtggacacatcaatccagccattaccctggcactcctggtgggaaaccaaatttcccttctgagagccttcttctacgtggcagcgcagctggtgggagctattgcgggggctggtattctgtacggtgtggcccctcttaatgctagggggaatcttgcagtgaacgcactgaacaacaacactactcagggacaagcaatggtggtcgaactgattttgacctttcagcttgccctgtgtatctttgcatcgactgattcgcgtcgtacttcgccagtgggaagccctgccctgagcattggactgtcagtcactctgggtcatctcgtcggtatttacttcactggttgctcgatgaatcctgcccgctcatttggaccagcggtggtgatgaaccggttttcaccagcccattgggtgttttgggtcggtcctattgtcggggccgtgctcgcggcaattctctacttctacctcctgttcccaaactccctgagcctgtcggaaagagtggcgattatcaagggaacctacgagcctgatgaagattgggaagaacagcgcgaggagaggaagaaaaccatggaattgaccactaga

SEQ ID NO: 119616 - DNA, 795 bp, Artificial Sequence
  derived and/or modified sequence
atgaagaaagaggtttgctctgtggcctttctgaaggccgtgtttgccgagtttctcgctaccctgatctttgtgttctttggcctgggctctgccctgaaatggcccagcgccctccccacaatccttcaaatcgccctcgcctttggcctggccatcggaactctggcccaggctttgggccctgtgagtggtggccatattaacccagctattaccctggctctcctggtaggcaatcagatctctctcctgcgggctttcttctacgttgcagcccagctggtgggcgctatcgctggcgctggcattctttatggggtggcccctcttaatgccagggggaaccttgcagtgaacgccctcaacaacaataccacccagggacaggccatggtggtggagctgatcctgaccttccaacttgccctctgcatttttgcttccactgactctcggaggaccagtccagtgggttctcctgctctgtccattggcctgtctgtcactctgggccacctcgtcggcatttatttcaccggttgttccatgaaccccgcccgcagcttcggacccgcagtagtgatgaacagattttctccagcacactgggtgttctgggttggacctatcgtgggtgctgttctggcagcaatcctctatttttatctgctgttccctaactctctgagcctgtcagaaagagtcgctatcataaaggggacttacgagcctgatgaagactgggaagaacagagggaagaaagaaagaaaacaatggaactgacgacgcgg

SEQ ID NO: 119617 - DNA, 795 bp, Artificial Sequence
  derived and/or modified sequence
atgaaaaaggaggtgtgtagtgtggcctttttgaaagccgtatttgccgagttcctggcaaccctgatttttgtgttctttgggctgggaagtgcgctgaagtggccatcagccctgcccacaatcctccagatcgctttggcattcggcttggccatcggaaccctggcacaggccttgggcccagtctccggaggccatattaatcctgcgataaccctggccctgctggtgggcaaccaaatctcccttctgcgagccttcttctacgtcgccgcacagctggtgggcgctatcgcgggagctggtatcttgtacggcgtggcaccgctgaacgccaggggcaatctcgcagttaatgcacttaataataacaccactcaaggccaagcaatggttgtagagctcatcctgacgttccagctggcactgtgcatcttcgccagcacggactccaggaggacttctcccgtcggctcacctgccctgtcaatcggtctgagcgttactctgggacacttggttgggatttacttcacaggctgtagtatgaatcctgcgagaagctttgggccggcagttgttatgaatagattcagtcccgctcactgggtgttctgggtaggacccattgtcggagctgtgctggccgccattttgtacttttatctcctttttcctaattccctgtctctgtctgaacgcgtagcaattattaagggaacatatgagccggatgaggattgggaggagcagagggaagagcggaagaaaaccatggagctgaccacacgg

SEQ ID NO: 119618 - DNA, 795 bp, Artificial Sequence
  derived and/or modified sequence
atgaaaaaggaggtatgctcagtggcatttctcaaggccgtgttcgcagaattcttggctaccctgatctttgtgttctttggactggggtctgcattgaagtggccaagtgctttacctaccatccttcagatcgctctggcctttgggctggcaattggtaccctcgcccaagcacttggtccagtctctggaggccatataaatcccgctatcactctcgctttgttagtggggaaccaaatctcactgctgagggcatttttctacgttgcagcccaacttgtgggcgcaatcgccggagccggtatcctgtatggagtggctcctcttaatgcaagagggaacctcgctgtgaatgcccttaacaacaacactactcaaggacaggctatggtggtggagttgattctgaccttccagctggctctttgtatctttgcgtcgaccgactcgaggcgaacatctccagtcggaagccccgcactgtctatcggcctttccgtcaccctgggccatctggtggggatctactttaccgggtgctcgatgaaccctgcacgcagctttggacctgctgtagtgatgaacagattttctccagctcactgggtcttctgggtgggaccaattgtcggggcagtgctggccgcaatattgtatttctatctccttttccctaactctctgtcattgagtgaacgagtggctatcattaaaggcacctacgagccagacgaagattgggaagaacagagagaggagaggaagaaaacaatggaacttaccactcga

SEQ ID NO: 119619 - DNA, 795 bp, Artificial Sequence
  derived and/or modified sequence
atgaaaaaggaagtttgttccgtggccttcctgaaagcagtctttgccgaattccttgccacattgatattcgtgttcttcggtctgggctccgcccttaagtggccaagcgccctgcccaccatccttcaaatcgcgcttgctttcggtctggcgatcggaacattagcccaagccttaggtcctgtgtccggcggacatataaatccagcaattacactggcccttcttgtggggaatcagatctcactcctacgggcctttttctacgtggctgcccagctggtgggggcgattgccggagcaggcattctgtacggagtcgcccccctgaacgccagggggaacttagcagtgaacgccctcaataacaacaccacacagggacaggcaatggtggtggagcttatcctcacttttcaactcgcactttgcatctttgctagtaccgactcaaggagaacatcccccgttggatctcccgcattgagcattggtctgagtgtgactttggggcaccttgtgggcatttactttaccggctgtagcatgaacccggcgcgatcttttggccccgctgtagtgatgaaccgcttctcaccagcgcactgggtgttctgggtcggcccgatcgtaggggcagtacttgccgcaatcctgtatttctacctgctgtttcccaactccctctccctgagcgagagggtcgcaatcatcaagggtacatatgaacctgacgaggactgggaagaacagcgcgaggagcgaaagaaaacaatggagcttaccacccgt

SEQ ID NO: 119620 - DNA, 795 bp, Artificial Sequence
  derived and/or modified sequence
atgaagaaggaagtgtgttcggtggcatttttgaaggctgttttcgctgaatttttggctactctaatcttcgtgtttttcggactggggagcgcgcttaaatggccatcggcactgcccaccatcctacagattgccctagcttttggacttgccatcggaacgctagcacaggcactgggacccgtgagcggcggccatatcaatcctgccatcaccttagcgctcctggtcgggaaccaaataagcctattgcgcgccttcttttacgtggccgcccagctggtgggggcgatcgccggggctggcatcttgtatggggtcgctcctctgaacgcacgcggtaacctggccgtaaatgcactgaacaacaacactacacaggggcaggccatggtggtggagctaattcttacatttcagctggcactgtgcatcttcgcatctaccgattcccgacgtacttctccagtcggatcacctgctctgtcaattgggttgtccgtgaccttgggacacttagtaggcatctactttacaggctgtagcatgaatcctgcgcgctcattcgggccagctgtcgtgatgaatagattttcccctgcccactgggtgttctgggtcggtcccatagtcggtgcggttttggctgctattctctatttctacctgcttttccccaatagcctgtctctgtcggagcgggttgcaatcattaaaggaacttacgagccagatgaggattgggaagagcagcgagaggagcgtaaaaaaactatggaacttaccacacgg

SEQ ID NO: 119621 - DNA, 795 bp, Artificial Sequence
  derived and/or modified sequence
atgaagaaagaggtgtgctccgtcgcgttcctgaaagccgtgttcgccgagttcctcgcaactctgatcttcgtgttcttcggactgggatccgcccttaagtggcctagcgctcttcctacgatcttgcaaatcgcccttgctttcgggctggcgattgggaccctcgcccaggccctgggtcccgtcagcggaggacacattaacccggccatcactctcgcactgctcgtcggtaatcagatttcgctcctcagagccttcttttatgtggccgcacagctcgtgggagctatcgcaggtgccggtatcctgtatggcgtcgcaccacttaacgcgaggggcaaccttgcggtgaatgctctgaacaacaatacgacgcagggacaggcaatggtggttgagcttatcctgacctttcaactcgccctgtgtatctttgcttcaaccgattcgcgcagaacttcgccggttggctccccagcgctcagcatcgggctctcggtcactctgggtcacctcgtcggcatctatttcaccggatgctccatgaaccccgctcggagcttcggtccggccgtcgtgatgaatcggttttcgcctgcgcattgggttttctgggtgggtcctattgtgggggcagtgctggccgctatcctgtacttctacctgctctttcctaacagcctgtcgctgtcagaacgagtggctatcatcaaaggcacttacgagccggacgaggattgggaggaacagcgtgaagaacgcaagaaaaccatggaacttactacccgc

SEQ ID NO: 119622 - DNA, 795 bp, Artificial Sequence
  derived and/or modified sequence
atgaaaaaagaagtgtgttcggtcgcatttctgaaggccgtgtttgctgagttcctggccacactcatctttgtcttttttgggctagggtcagctctcaagtggccatctgccctgccaactatcctccagatagcactcgcattcggcttggcaattggtacactggcgcaagctctcgggccagtgagtggcggacacatcaatccagccatcactctggcgctgttggttggcaatcagatcagcttactgcgcgcttttttctacgtggccgcccagctggtcggagccatcgccggggctggaatcctgtacggtgtcgcccctctgaacgcccgcggcaatttagccgttaacgcccttaacaacaataccacgcaggggcaagcaatggtcgtggaactcatactgacattccagctggctttgtgcattttcgcaagtaccgatagccgacgcaccagcccggtcggctcacccgcattgagcattggcctgagcgtgacacttgggcatctggtcggaatctacttcaccgggtgcagcatgaatcccgcgcggagctttggcccagctgtggtgatgaacaggttcagtcccgcacactgggttttctgggtgggtccgatcgttggagcggtcctggctgctatcctttatttctatcttctgtttccaaactcattgtctttatctgaacgggtggccatcattaaggggacctacgagcccgatgaagattgggaggaacagcgagaagaaagaaagaaaactatggagttgactacgcga

SEQ ID NO: 119623 - DNA, 795 bp, Artificial Sequence
  derived and/or modified sequence
atgaagaaggaagtgtgttccgtggcatttctgaaggccgtgtttgcggaatttcttgcgacccttatcttcgtgttttttggactcggttctgcactgaagtggcctagcgctctgcctactattctgcagattgcacttgcctttggactggcaattggaacgctggcgcaagccctgggtcctgtgtctggcggccacatcaaccctgcaattaccctggcacttctggtgggcaatcaaattagccttttgagagcattcttttacgtggccgcccaactcgtgggggcaatagcaggtgcaggtattctctacggggtcgcacccctgaacgcacggggcaatctggcggtgaacgctctcaacaataacactactcaaggtcaggcaatggtcgttgagcttattctcacctttcagctggccctttgtattttcgcatcgaccgactcaaggaggacttcgcccgtgggttcgccagcactctctattgggttgtcggtgaccttgggacatctcgtgggcatttactttaccggttgctccatgaacccagccaggtccttcggacctgccgtggtgatgaataggttttcgcctgcccattgggtgttttgggtcggacctatcgtcggcgcggtgctcgcagcgattctgtacttctacctcctctttccaaattcactttcgctttccgaacgggttgcgatcattaagggaacgtacgaaccggacgaggattgggaagaacagcgcgaagagcgaaaaaagactatggaattgaccactagg

SEQ ID NO: 119624 - DNA, 795 bp, Artificial Sequence
  derived and/or modified sequence
atgaagaaggaggtctgttcagtggccttccttaaggccgtgtttgcggagttcctggcaactctcatttttgtgttctttggtcttggatccgctctgaagtggccatccgcccttccaactattctgcagattgccctggcttttggccttgcaattggtaccctcgcccaagcactgggacctgtgtccggcggtcacattaaccccgctattaccctggctctcctggtgggtaaccagatatcgctgctgagagctttcttctacgtggcagcacagctggttggagcgattgcaggagcaggcattctttatggagtggcacccttgaatgcacgcggtaacctcgcagtgaacgcactcaacaacaataccactcaaggtcaggcaatggtggtggaactcatcctcacctttcagctggccctttgcatattcgcatcgaccgattccagacgaacttcgcctgtgggatcgccagcgctgtccataggactctcggtgactcttggccacctggttggcatttacttcactggttgctcgatgaaccccgcacggagctttgggcctgctgttgtgatgaatcgattttcgcccgcccattgggtgttctgggtcgggccaattgtcggagccgtgcttgcagccattctgtacttttacctgctgtttccaaactcgctgtccctctcagagagagtggcaatcatcaagggaacctacgaaccagacgaggactgggaagaacaaagagaagaaaggaagaaaaccatggaactcaccacccgc

SEQ ID NO: 119625 - DNA, 795 bp, Artificial Sequence
  derived and/or modified sequence
atgaagaaggaggtgtgctccgtggcgtttctcaaggccgtattcgctgaattcctcgcgaccctgatcttcgtgttcttcgggctgggcagcgcgctgaaatggccgtcagctctgccaaccatcctccagatcgcgctggcttttggcctggccatcggaacgctcgcccaagcgctcggacctgtctctggaggacatatcaacccagcgatcaccctcgcccttctggtcggcaatcagattagcctcctcagagctttcttttacgttgccgcccagctggtgggtgccatcgctggagcgggaatcttgtacggagtggctccattgaacgcccgcggaaacctggcagtaaatgccctgaacaataacacgactcagggacaggctatggtggtggaacttatcctgacttttcagctcgcattgtgcatcttcgcctcaactgattcccggcgcacttcgccagtgggaagcccggcgctgtccatcggactgtctgtgactctggggcatctggtgggcatctactttaccgggtgctcaatgaacccagcccggtccttcggtccagcggtcgtgatgaatcggttcagccctgctcactgggtgttttgggtcggcccgattgtgggagccgtgctggcggccatcctgtatttctacctcctgtttccgaactcgctgtccctctcggaaagagtcgcaatcattaaagggacctacgagccagacgaggactgggaggaacaacgcgaggaacgcaagaaaacgatggaactgactactaga

SEQ ID NO: 119626 - DNA, 795 bp, Artificial Sequence
  derived and/or modified sequence
atgaaaaaggaagtctgttcagtggctttcctgaaggcggtgtttgcagagtttctggccactctcattttcgtgttcttcggcctgggctcggccctgaagtggccatcggcccttccaaccatcctccagattgccctcgcttttggattggcgatcgggacgctcgctcaagcactcggaccggtttcgggcgggcatatcaatccggccatcaccctggccctgctggtcggtaaccagatctccctgctcagagcgttcttctatgtggccgctcagctggtgggagctatagcgggagctggcatcctgtacggtgtcgcccctctcaatgcacgcggaaatctggcggtgaacgccctgaacaacaatactacccaaggacaggcaatggtggtggaacttatcttgacctttcaactggccctgtgcatcttcgcctccactgacagccgacggaccagcccggtgggatcgcccgcgctgtccatcgggcttagcgtgactctgggacaccttgtcggaatttacttcaccggctgctctatgaaccccgcccgctcattcggaccagcagtcgtgatgaacaggttttcccctgcccactgggtgttctgggttggcccgatcgtcggtgccgtgctcgcggcaatcctgtacttctacctgttgttccctaactcactcagcttgtcggagcgggtggcgatcatcaagggaacgtacgaaccggatgaggactgggaggaacagcgcgaggaacggaaaaagactatggaactcactaccaga

SEQ ID NO: 119627 - DNA, 795 bp, Artificial Sequence
  derived and/or modified sequence
atgaagaaggaggtctgctccgttgccttcctgaaggcagtctttgcagaatttctggccaccttgatatttgtattttttggactgggctccgctctcaaatggccgtctgcactccccacaattctgcaaatcgctctcgccttcggcctcgccattggtacactggcgcaggcacttggtcctgtgtctggcggtcacatcaacccggcaatcactctggccctgctcgtgggaaatcagatctcccttttgcgcgcatttttctatgttgctgcccagctggtcggcgctatcgccggcgccggaatcctctacggtgtggctccactgaatgctaggggcaacctggctgtgaacgcgcttaacaacaacacgacacaaggccaggctatggtcgtggagttgatcctgacgtttcagcttgcactgtgtatcttcgcctctacggacagtaggaggaccagtcccgtgggcagtcccgccctgagcatcggcctgtccgtgacgctcggtcaccttgtgggtatatacttcactggttgctccatgaacccagcccgcagctttggtcctgcagttgtcatgaatagattctctcctgcccactgggtgttttgggttggccccattgtcggcgctgtcctggctgccatcctgtacttttacctgctgttccccaattccctcagtctgtctgagagagtagccattatcaaaggcacatacgaaccagacgaagattgggaggagcagcgcgaggaaagaaagaagacaatggagctgaccactaga

SEQ ID NO: 119628 - DNA, 795 bp, Artificial Sequence
  derived and/or modified sequence
atgaaaaaggaagtatgtagcgtggcctttctcaaggctgtgttcgcggagtttcttgccacactgatcttcgtgttctttggcctggggtctgctctcaagtggccgagtgcgctgccaactattctacagatcgcactcgcattcggtcttgccatcggcaccttagcccaggcactcgggccagtgtcgggtgggcacattaaccctgccattacgctggcgttactggtggggaatcagattagtctgctgagagctttcttttacgtggccgctcagctcgtcggggcgatcgccggagctggcatactgtacggcgtcgccccacttaacgcacgcggaaatttggcggtgaacgctctaaataataatacgacacaggggcaagctatggtagttgagctgatcctcacgttccagctcgctctttgtatattcgcgagcacggactccaggaggacatctccggtcggaagtcccgctctaagtattggactgagcgtcacactggggcatctagttggtatctacttcaccggttgtagtatgaatcccgcacgcagtttcggtcctgccgtggtcatgaataggttttctcccgcacattgggtattttgggtgggaccgatcgtgggggctgtgctggccgctatcctttatttctacctgctgtttcccaacagtctctctctttcagagagggtagccatcatcaagggtacttacgagcctgatgaagattgggaggagcagagggaggaaagaaagaaaactatggaactgactacacga

SEQ ID NO: 119629 - DNA, 795 bp, Artificial Sequence
  derived and/or modified sequence
atgaaaaaagaggtttgttctgttgccttcctgaaggcggtttttgcggaattcctggcaacattgattttcgtcttcttcggattgggatcagctttgaagtggccaagcgccctcccaacaattctccagatagcacttgcttttggactcgcaattggtactctagcgcaggctctcggaccagtgagtggcggccacatcaatccggcaataacgctcgcacttctggtgggaaaccagatatcactcctccgagcatttttttacgttgcagctcagctcgtgggggctattgcaggagcaggtatcttgtacggcgtggcccctctaaacgcaagaggaaatctcgctgtaaacgccttgaataataatacaacacagggacaggccatggttgtcgaattgatcctcactttccaattggctttatgtattttcgcgagtacggactcgcgtcggacgtctccagtcggaagtccagcactctcaatcggactgagcgtgaccctaggtcaccttgtgggtatttacttcacaggatgttccatgaacccagcccgtagttttggaccagcagtagttatgaatcgtttttcaccagctcactgggtgttctgggtgggtccaattgttggagcagtattagcggctattctctatttttatctacttttcccgaactctttatcattgtctgaacgtgtggctattattaagggaacgtacgagccagatgaagactgggaagaacaaagagaggagcgtaagaaaacgatggaactcactacaaga

SEQ ID NO: 119630 - DNA, 795 bp, Artificial Sequence
  derived and/or modified sequence
atgaagaaggaagtgtgctctgtcgccttcctgaaggcagtattcgccgagttcctagccaccctaatctttgtttttttcgggctgggctctgctctgaagtggccctctgcgttacctacaattcttcaaattgcgctggccttcgggctggcaattggaacgctggcacaggctctcggaccagtaagtggcggccacataaaccccgcaattaccctggccctacttgtcggtaaccagattagcctactgagggcgttcttctacgtggccgctcaactggtcggagccatagccggcgcggggatattatatggcgtcgctcctctgaacgcccgagggaacctggccgtcaacgcactgaataataataccacccagggacaggccatggtagtcgagctcatcctgacattccagcttgctctctgcatctttgccagcactgattctaggcgaaccagccctgttggctcgccggccctctccatcgggctttccgtcactctggggcacctcgtgggcatttacttcaccgggtgcagcatgaatcctgcaaggtcctttgggcctgccgtagttatgaatcgattctcccccgcccactgggtgttctgggtgggtcccatagtgggcgcggtacttgcagcaattttatatttttacctattgtttcctaacagcctgtctttatccgagcgagtggctatcataaagggaacttacgaaccagacgaagactgggaggagcagcgagaggaaaggaagaaaacaatggagcttaccaccaga

SEQ ID NO: 119631 - DNA, 795 bp, Artificial Sequence
  derived and/or modified sequence
atgaagaaggaggtgtgctcagtggcatttctgaaagcggtctttgcggaattcttggcgaccctgatttttgtgtttttcggtctgggttctgccctcaaatggcccagtgcgctccccacgattcttcaaatcgccttggcgtttggacttgcgataggtactctggcccaagctcttggaccagtctcagggggtcacatcaacccagccatcacactggcccttcttgtgggtaaccagatttccttgctgcgcgcattcttttatgtcgccgcccagctggtcggagctatcgctggcgctggtattctgtacggggttgccccactgaacgcccgcgggaatctcgcggtgaatgctctcaataacaatactacccagggacaggctatggttgtcgagctgatccttacctttcaattggccctgtgcatttttgcgagcacggattctaggagaacgtcccctgtgggtagtcccgcactgtctataggcctcagcgtgaccctgggacatctggtggggatatactttacaggatgttccatgaaccccgccaggagcttcgggcccgcagtggtgatgaaccgcttttctccagcacactgggtcttttgggtgggacccattgtaggcgctgttctggctgcaatcctctacttttatctcttgtttccgaattctctctctctcagcgagcgcgttgcaattatcaagggcacttatgagcccgacgaagactgggaagagcagcgggaggagcggaagaagaccatggaactgactacccgc

SEQ ID NO: 119632 - DNA, 795 bp, Artificial Sequence
  derived and/or modified sequence
atgaaaaaggaggtgtgcagcgtggcgttcttgaaggcggtgttcgcagagttcttggcgactctcatcttcgtctttttcggcctcggatcggccctgaagtggccgtccgctctgccgacgatcctccaaattgccctggcgtttggactggccatcggcactctcgctcaggccctgggaccggtgtcaggaggacacatcaaccctgcgatcactctggccctgctcgtgggcaaccaaattagccttcttcgcgcctttttctacgtggctgcacaattggtcggagcaatcgccggtgctggcatcctctacggagtggcccctcttaatgcacgcggtaatttggctgtgaacgcgctgaacaataacaccacccaggggcaggcaatggtggtggaactgatccttacctttcagctggctctgtgtatcttcgcatcgaccgattcgagacggacctcacccgtgggttcaccggcactctcgatcggtctgtcggtgactcttggacatctggtggggatctatttcaccggatgctccatgaatccggcccggagctttggaccagcggtcgtgatgaatagattttcgccagctcactgggtgttctgggtgggacctatcgtgggagcagtgctggctgcaattttgtacttctacctcctgttccctaacagcctgtcgctctcggaacgcgttgcgatcatcaagggtacctacgagccagacgaggactgggaagagcaacgggaggagagaaagaaaacgatggaactcactaccaga

SEQ ID NO: 119633 - DNA, 795 bp, Artificial Sequence
  derived and/or modified sequence
atgaagaaagaggtctgctcagtggcattccttaaggcggtgtttgcagaatttctcgcgaccctcatctttgtgtttttcggtcttggaagcgctctgaaatggccttccgcgctcccgactattcttcagatcgctttggcatttggattggctatcgggacgttggcccaggcgcttggccctgtcagcgggggacacattaatcccgcaattactctggcactgctcgttggtaaccaaatatcactgctccgtgcctttttctacgtggcggcccagctcgtcggggcaattgcaggcgccggaatattgtacggtgttgcaccactgaacgcaaggggaaacctggctgtgaacgcactcaataacaacactacccaaggacaagccatggtggtggaacttattcttacttttcaactcgccctgtgtatcttcgcgtccactgatagtcggcgcacctctccagtgggatcgcccgctctttcgatcggcctttcggtcaccctgggccacctcgttggaatttactttaccggatgcagcatgaatcctgcgaggtccttcggacctgctgtggtgatgaacaggttttccccagcacattgggtgttctgggtgggtcctattgtgggtgcggtgctggcagcgatcctgtacttctatctcctctttccaaattccctttctctgtcggaacgggtggcgatcattaaaggcacgtacgagccagacgaggattgggaagagcagagagaagagagaaagaaaaccatggaactgaccactagg

SEQ ID NO: 119634 - DNA, 795 bp, Artificial Sequence
  derived and/or modified sequence
atgaagaaggaagtttgctccgtcgcgtttctgaaggctgtgttcgcagaattcctcgcaaccctcatctttgtctttttcggcctgggatctgcgctgaagtggccttccgctctacccaccatccttcagatcgccctcgcttttggtctggcaatcgggactctcgctcaggccctgggacctgtatccggtgggcatattaaccctgcgatcacgctcgcactactcgtcggcaaccagatcagcctactgcgcgccttcttctacgttgcggcccagttggtgggtgccatcgcgggtgctggtattttgtatggggtagctccgctcaacgccaggggaaaccttgctgtcaatgccctaaacaacaacaccacccaaggccaagccatggttgtcgagctgattctcaccttccagctggccctttgcatctttgcttcaacggacagtcgtagaaccagcccggtcggctcgcctgctctcagtatcggcctgtctgtcaccctcggtcatttggttggcatttatttcaccggctgcagcatgaatcccgctcgatccttcggcccagcagtggtgatgaacagattcagcccggctcactgggtcttctgggttggtcccattgtcggagcggtgctggccgccatcctgtacttctatctgctttttcccaactcgctgagtttaagtgagcgcgttgccatcatcaagggaacttacgagccggacgaggactgggaggagcagcgtgaagagcgtaagaagaccatggagcttaccaccagg

SEQ ID NO: 119635 - DNA, 795 bp, Artificial Sequence
  derived and/or modified sequence
atgaagaaggaagtctgtagcgtggcgtttttgaaagctgtgttcgctgagtttctggccaccctgatcttcgtgttcttcggcctggggagcgccctcaagtggccctccgccctgccgacgatcctgcaaattgcgcttgcctttggattggccatcggaactctcgcacaggcgctgggacctgtatcaggaggccacattaacccggcgattaccctcgctctgttggtgggaaaccagatcagcctgctcagggctttcttttacgtggcggcccaactggtgggggctatcgcgggggcaggcatcctctatggggtcgcaccgctcaatgctcgcggtaacctcgctgtgaacgccctgaacaataacacgactcagggacaggctatggtcgttgaactgatcctcacgtttcaacttgcgctgtgcatattcgcctcgaccgattcgcggcgcaccagcccggttggttccccagcgctcagcatcggcctctcagtaactctggggcacctggtcggaatctacttcaccggttgctccatgaatcctgcccgatcgttcggacctgccgtcgtgatgaatcgtttctcccccgcccattgggtgttttgggtcggaccgattgtcggtgccgtgctggccgccatcctttacttctacctcctgttccctaactccctttcgctgtcagaacgagtggcaatcatcaagggcacttacgagccagacgaagattgggaggagcagcgcgaagaacgcaagaaaactatggaacttaccactcgg

SEQ ID NO: 119636 - DNA, 795 bp, Artificial Sequence
  derived and/or modified sequence
atgaagaaggaggtttgttcagtggccttcttgaaggccgtctttgcggaattcctggcaactctcatctttgtgttcttcggcctggggtcggccctgaagtggccgagcgcgcttcctaccattctgcaaatcgcgctggcgtttggactcgccatcggtactcttgcacaggcactcggaccagtgtcaggtggccacatcaacccggccatcacccttgctctgctcgtcgggaaccagattagcttgctgcgggcctttttctacgtcgcagcgcaactggtcggagccatcgcaggagcaggcattctgtacggagtcgcccccctgaatgctagaggcaacctggcagttaacgctctcaacaacaacaccactcaaggccaggctatggtggtcgaactgattttgacgttccagctggccctgtgcattttcgcgtccacggactcgcgcagaacttccccggtggggtcccctgccctctccattgggctgtctgtcaccctcggacaccttgtgggcatctacttcactggttgctctatgaatccggcgcgcagctttgggcccgcggtggtgatgaaccggttttcaccggcccattgggtgttttgggtcggaccaatcgtgggcgctgtgctggcggccatcctctacttctatctcctctttccaaattcactgagcctctccgagcgagtggccatcatcaagggcacctacgagccagacgaagattgggaagagcagagagaggagcgcaagaaaactatggagctgactacccgg

SEQ ID NO: 119637 - DNA, 795 bp, Artificial Sequence
  derived and/or modified sequence
atgaagaaggaggtatgttcagtcgcgtttttgaaagcagtgttcgctgagtttctggccactcttatttttgttttcttcggcctgggttccgctctgaagtggccctcggctctgcccactatcttgcagatagctctggcctttggattggccatcggtactctggcacaggccttgggacccgtaagtgggggacacatcaaccctgcaattaccctggccctgctggtggggaaccagatcagcctgctaagggcatttttctatgtcgccgcacaactggttggcgccattgcgggagcaggcatattgtatggtgttgcacccctgaatgcccgggggaacctagcagtaaatgcgctgaacaacaacacaacacagggccaggcgatggttgttgaactaatcctgacttttcagcttgcattatgcatatttgcctcaaccgattctcggaggacaagtcccgttggctccccagcactgtccatcgggctctccgtgaccttgggccatctagttggaatctattttaccggatgtagcatgaatccagccaggtctttcggccctgcagttgtcatgaatagattcagtccggcccattgggtgttttgggtagggcctatcgtgggcgccgtcttggctgccattctctatttctatttactgttccctaacagtttgagcctttctgagcgagtggctataatcaagggcacctatgagcccgacgaagactgggaggaacagcgcgaagagcgtaaaaaaaccatggaactaaccacaaga

SEQ ID NO: 119638 - DNA, 795 bp, Artificial Sequence
  derived and/or modified sequence
atgaagaaagaagtctgttcggttgcctttcttaaagcggtgttcgcagagttcctggcaaccctgatcttcgttttttttgggctgggtagcgcactgaaatggccatccgcactcccgactattcttcagattgctttagcattcggattggcgattggtaccttggcgcaggctttgggccccgtgagcgggggccatattaacccggccatcactctggcactgctggtcggtaaccaaattagcctgctccgcgccttcttctacgtggcggcccaactagtgggagctattgccggtgcaggcattctgtacggtgtcgcgcctctcaatgctaggggaaatctggccgttaacgcgctgaataacaatacgacccaggggcaagcaatggttgttgagctgatccttacgtttcagttggcgctgtgtatttttgccagcacggacagccgccgcacgagcccggtcgggagcccggctctgtccatcggtctcagcgttaccctgggccaccttgttggaatttattttactggttgtagcatgaatcctgcgcgcagcttcggcccagccgtcgtgatgaaccgtttttctccggcacattgggttttctgggtagggccaattgtgggagccgtgctggctgcaatcctgtacttctacctgctcttccctaacagcttgagtctgagtgagcgcgtggccattattaaggggacctacgagcctgacgaagactgggaagagcaacgcgaagagcgaaaaaagacgatggagttgaccacccga

SEQ ID NO: 119639 - DNA, 795 bp, Artificial Sequence
  derived and/or modified sequence
atgaaaaaagaggtatgttccgtagcatttctgaaagcggttttcgccgaatttttagcaaccttaatttttgttttttttgggcttggttctgcattaaaatggcctagcgcgcttccaacgatccttcaaattgcactggcctttggactagcgattggcacacttgcacaggcccttgggccagtttcagggggtcatattaatccggcaattactttggcattgcttgttggaaaccaaatcagcctgctcagagcatttttctatgtcgcagcgcagttggtaggcgcgatcgccggggccggaatcttgtatggggtcgctcctctgaacgcccgcggcaatttggcagttaacgcgttaaataacaatacaacacagggtcaggcgatggtcgttgaactcatcctgacattccagctggctctgtgcatttttgcttccacagattctaggcgtactagcccggtaggctcaccggcactttctattggcttgtcagtaacgcttggtcatctcgttggcatatatttcacaggatgctctatgaaccctgcgaggagcttcggaccggctgtagtgatgaatcggttttcacccgcgcattgggttttctgggttggtcctattgtgggagcagtcttggccgcgatattgtatttctatcttctttttccaaattccttatctctgtctgaacgggttgcgattattaaaggtacgtatgagcctgatgaggattgggaggaacaaagagaagaacgaaagaaaacaatggagctgacaacgcgg

SEQ ID NO: 119640 - DNA, 795 bp, Artificial Sequence
  derived and/or modified sequence
atgaaaaaggaggtttgttctgtggccttcctgaaggcagtgttcgctgagtttctggcaaccctgattttcgtattttttgggctcggctccgcgttgaaatggccatcggcactccctacaatccttcagatcgcgttagccttcggtttggcaatcggcaccttggcacaggctttgggccccgtgagcggaggccatattaaccccgccatcacgctggccctactggtggggaaccagattagcctcctgcgagcctttttttatgtggctgctcaactcgtgggcgctatcgccggagctgggattctctatggggtggcccccttgaatgcccgcgggaacttggcagttaatgccctaaataacaacaccactcagggccaggccatggtggtggaactcattcttacctttcagctcgcattatgtattttcgccagcacagacagtagaagaacatctcccgtgggaagcccggctctgtccatcgggctgtctgtgactctggggcacctcgtaggtatatacttcacgggttgttccatgaaccctgcccggtccttcggtcccgccgtggttatgaacaggttctctccggcccactgggtattttgggtcggccccatcgtcggagctgttctcgctgccatcctgtatttttacctgttgtttcccaattccctctccctctcagagagagtggccattattaagggtacttatgaacccgatgaggattgggaagagcagcgggaagaaaggaaaaagaccatggaacttaccaccagg

SEQ ID NO: 119641 - DNA, 795 bp, Artificial Sequence
  derived and/or modified sequence
atgaagaaagaggtgtgcagtgtcgctttcctaaaggctgtgtttgcagagtttctggccactctgatatttgtgttcttcggtctcggcagtgctctgaagtggccgtccgcactgcccaccatcctccaaatcgcactggcatttggtttagcaataggcaccctggctcaggcactcggacctgtgtccggggggcacatcaaccctgcgattaccctggcattgcttgttggaaatcaaatcagtctgctgcgcgccttcttttatgttgcagcgcagctggtaggtgctattgctggcgctggaattctctatggtgttgctcctctaaacgccaggggtaaccttgctgtaaatgcgctgaacaacaacactacacaggggcaggctatggtggtggagctcattcttacattccagttggccctgtgcattttcgcctccactgactcccggcgtacgagcccggtcggatcacccgctctgagcattggcctctcagtgacactgggtcacctcgtgggaatctacttcacaggctgcagtatgaaccctgccagatccttcggccctgccgtggttatgaacagattctctccagcacactgggtattttgggtgggacccatcgtaggagccgttctggcggctatactgtacttttacttactgtttcccaactcgctgtccctgtctgagagggtagcgatcattaagggaacatatgagcccgatgaggattgggaagaacagcgtgaagaacgcaagaaaacaatggaactgactacccgc

SEQ ID NO: 119642 - DNA, 795 bp, Artificial Sequence
  derived and/or modified sequence
atgaagaaggaagtgtgttctgtggcttttctgaaggccgtgtttgcagagttccttgcgactcttatctttgtgttttttgggctcggaagcgctcttaagtggccgtccgccttgcctaccatactccagattgcccttgcatttggtttggcaatcgggacccttgcacaagcactgggccctgtgtccggaggacacattaacccagcaattaccttggctctgctcgtcggaaaccagataagcctccttcgggctttcttttacgtcgccgcccaactcgtgggtgcaattgcaggagcggggatactgtacggtgtggcgccccttaatgcccgaggtaatcttgcagtgaacgccttgaataacaataccacccaaggccaggcaatggtggtggaactgatcctgacttttcaactggccctttgcatcttcgcatccacggattcgagacgcacttccccagtgggctcgcctgcgctgtcgattggcctgtctgtcaccttgggacaccttgtgggaatttacttcaccgggtgttctatgaacccagcacgctcctttggaccagcggtggtcatgaatagattttcaccagcccattgggtgttctgggtgggccccatcgttggagccgttctggcagcaatcctgtacttttatctgctgtttcctaactcgctgtccctttccgaaagagtcgccatcatcaaagggacctacgagccggatgaggactgggaagaacagagggaggaaagaaagaaaactatggagctgactaccagg

SEQ ID NO: 119643 - DNA, 795 bp, Artificial Sequence
  derived and/or modified sequence
atgaagaaggaggtctgctcggtcgcatttcttaaagcagtgttcgccgagttcctcgcaaccctcatctttgtgttttttggcctgggctccgcactgaagtggccctccgcactccctaccatacttcagattgcgttggcttttggattggcaattggaactctcgcacaggcacttggacccgtgagcggaggccatatcaacccggcaatcaccctggcccttcttgtggggaaccagatttcgcttcttagagcgttcttctacgtcgcagcacagctggtgggagcaatagcaggtgcgggtatcctctacggcgtggcaccccttaatgcaagaggtaacctcgctgttaatgcactcaacaacaataccacgcagggacaagcaatggtggtcgagcttatccttacctttcagctcgcgctgtgcatttttgcctcgaccgactcacgcagaaccagccctgtgggctcgccggccctctccatcgggctctctgttactttgggccatctggtcggcatttactttactggatgctcaatgaacccagcgcgctcgtttggcccagcagtggtcatgaacagattttcccccgcccattgggtgttttgggtcggtcctattgtgggagccgtgctggccgcaatactttacttttaccttttgtttccaaactcactgtccctgtccgaacgggtggcgatcattaagggaacgtacgaacccgatgaagattgggaggaacaaagggaggaacgaaagaaaacgatggaactcactacgagg

SEQ ID NO: 119644 - DNA, 795 bp, Artificial Sequence
  derived and/or modified sequence
atgaagaaagaggtctgttccgttgcttttctgaaggctgtcttcgctgagtttctggcaacgctcatcttcgtctttttcggcctgggtagtgctctgaagtggccctccgcacttcccacaatccttcaaatcgccttggcgttcgggctcgccatcggcacacttgcccaggctctcgggcccgtgagtggggggcacataaaccccgccatcaccctcgcactgctcgtggggaatcagataagcctgttgcgggccttcttctatgtggccgcgcagttagtcggtgccatcgctggcgccgggattttgtatggcgttgctccactgaacgcacgcggtaacctggcagtgaacgcactgaacaacaataccacccaagggcaggccatggtcgtcgagctgatcctaacattccagttagcattatgcatttttgcatctaccgatagtcgtaggactagccccgtcggatctccggcactgtcaatcggcctgagtgtgacacttggtcacctggtggggatttactttactgggtgttctatgaacccagccaggtccttcggccccgccgtcgtgatgaatagatttagcccagcccattgggtgttctgggtaggccctattgtgggtgctgtcttagccgctatcctatatttctacctgctatttccaaactcactttctctgtcggaaagggtagcaatcatcaaggggacttacgaacccgatgaggactgggaggaacagcgcgaagaacgcaagaaaacaatggagctgaccacacgt

SEQ ID NO: 119645 - DNA, 795 bp, Artificial Sequence
  derived and/or modified sequence
atgaaaaaggaggtctgtagcgtcgctttcctcaaggctgttttcgcagaattcttggccactctgatcttcgtgttcttcggcctgggaagcgccctcaagtggccttcagccctgccaaccatcttgcagattgcgctcgcgtttggacttgctatcgggaccctggctcaagcactgggcccggtaagcggagggcatatcaacccggcgatcactttggcgctccttgtgggaaatcagatttctttgcttcgcgccttcttttacgtggctgcccagcttgtgggtgcaatcgcgggcgcgggcatactttacggagtcgcacccctgaacgcaagaggtaacctggcggtgaacgccctgaataacaacaccacccaagggcaggcaatggtcgtcgagctcatcctgacgttccaactcgccctgtgcatcttcgcatccaccgacagcagacgtactagtccggtcggctcaccggccctgtcgattggactgtcggtgactctcggacacctggtgggaatctactttactggatgctcaatgaacccggcccggtccttcggacccgccgtggtgatgaatcgcttctctcctgcgcactgggtgttttgggtcgggcccatcgttggcgccgttctggctgccatcctctacttctatctgctgttcccaaattcgctcagcctttcggaaagagtcgcgatcataaagggtacctacgagccagacgaggattgggaggaacagagggaagaacggaagaaaactatggaactcactacccga

SEQ ID NO: 119646 - DNA, 795 bp, Artificial Sequence
  derived and/or modified sequence
atgaaaaaggaagtgtgttcagtcgctttccttaaggccgtgtttgccgagtttctcgcgactttgatcttcgtgtttttcggactggggtcagcactcaaatggccatccgcccttcctaccatcctgcaaatcgcactcgcctttgggctcgcaataggcactctggctcaagcacttggaccggtgtcaggggggcacataaatccagctatcacacttgctctgttagtgggcaaccaaatctctttgcttcgcgcgttcttttatgtggcagcccagttggtgggagcaatagccggagccggtatactgtatggcgtcgcacccctgaacgccagaggaaacctggcagtgaacgctcttaacaataatacgacgcaaggacaggcgatggtggtcgaattgattctgaccttccagctggctctgtgtatattcgccagcaccgactctagaaggacttcccccgtcggctctcctgccttgtccatcgggctgtctgtcactttaggtcatcttgtgggaatttactttacgggatgcagtatgaatccagctcgtagctttgggcctgccgtggttatgaaccggtttagccctgcccactgggtgttttgggtgggtccaatagttggagcagttttggctgctatcctgtatttctatctgctgtttccaaatagcctgagtctgagtgaacgagtggccataatcaaaggtacatatgaaccagacgaggactgggaggagcagcgggaggaacggaaaaaaactatggagctcacaactaga

SEQ ID NO: 119647 - DNA, 795 bp, Artificial Sequence
  derived and/or modified sequence
atgaaaaaggaagtgtgttccgtcgccttcttgaaggccgtgttcgctgaattcctggccactctcatctttgttttctttggactggggtcggcgctcaaatggccgtcggccctgcctactatcctgcagatcgccctggcgttcggcttggctatcgggaccctcgcgcaggctctgggacccgtctcgggtggccacattaacccggccattaccttggccctgcttgtgggcaaccagatctcactcctgcgggccttcttctacgtcgccgcacagctggtgggcgcaatcgcgggagccggaattctctacggagtggcgccgctcaatgcgcggggtaatctggccgtgaacgcactcaacaacaataccactcagggccaagccatggtggtcgaactcatcctcacttttcaactggccctgtgtatctttgcatccactgactcacgccgtacctcgccagtgggatcacctgcactgtcgatcggtctgagcgtgactctgggacacctggtcggaatctacttcactggatgttcaatgaaccccgcaaggagcttcgggccggcagtcgtgatgaaccggttttcaccggctcactgggtgttctgggtgggaccgatcgtcggagcagtcctggccgcaatcctgtacttctatctcttgttcccgaactccttgtcgctgagcgagagagtcgcaatcataaagggaacttacgagcctgacgaggactgggaggaacagagagaggaacggaaaaagaccatggaactgaccacccgg

SEQ ID NO: 119648 - DNA, 795 bp, Artificial Sequence
  derived and/or modified sequence
atgaagaaggaagtgtgctccgtcgcgttcctgaaggcagtattcgccgagttcctggcgactctgattttcgttttcttcggcctggggtccgcccttaaatggccttccgctttgccgactattctccagatagcactcgccttcgggctggccatcggcaccctggctcaggcgctgggcccagtctccggcgggcatatcaatccagcaatcaccctggcgctcctggtgggtaatcaaatcagcttgctgagagccttcttctacgtggccgcccagctggtgggagcaatcgcaggagccggaatcctgtatggagtcgcaccgcttaacgcccggggaaacttggccgtgaatgccctgaataacaacaccacgcagggccaagcgatggttgtggaactgatcctgaccttccagcttgccctgtgtattttcgcctcgactgactcgcgccgcaccagcccggtcggatcccctgcactgtcgatcggactctcggtgaccctgggccacctcgtgggaatctacttcaccggctgttcgatgaaccctgcgcggagctttggacctgcggtggtgatgaataggttcagcccggctcactgggtgttctgggtcggtccaattgtgggagcagtgttggctgccatcctctacttctacttgctgttccctaacagcctgtccctctcggagcgtgtggcaatcattaagggcacctacgagccggatgaagattgggaagaacagagagaggaacggaagaaaactatggaattgaccactaga

SEQ ID NO: 119649 - DNA, 795 bp, Artificial Sequence
  derived and/or modified sequence
atgaaaaaggaggtgtgttcggtcgcgttcctgaaggcggtctttgcggaattcctcgccactctcatcttcgtgttttttggactcggatcggccttgaagtggccgagcgcgctccctactatcctgcaaatcgccctggccttcggccttgcgatcggtaccctcgcgcaggctttggggccagtctccggaggacacatcaatcctgccatcacgctcgcactcctggtgggaaatcagatcagcctgcttagagcctttttctacgtggccgcgcaactcgtgggcgcgatcgcgggcgctggaatcctttacggcgtcgccccactcaacgcacgcggaaatttggccgtgaatgccctgaataacaatactactcaaggtcaggctatggtggtggaacttatcctgaccttccaattggcgctttgtattttcgcctcgactgattcacgcaggacctccccagtgggaagcccggctctgtcgatcggtctgtcggtcactctgggccatctggtgggaatttacttcactggatgcagcatgaaccctgcaagatcgttcggccctgccgtggtgatgaaccggttctcgcctgcacactgggtgttctgggtcgggccgatcgtcggagcagtattggccgcgatcctgtacttctacctgctgttccccaacagcctgagcctgtcagagcgcgtcgctatcatcaagggtacgtacgaaccagacgaggactgggaggaacagcgtgaggaacggaaaaagacgatggaactcacgacccgc

SEQ ID NO: 119650 - DNA, 795 bp, Artificial Sequence
  derived and/or modified sequence
atgaaaaaggaggtttgctctgtagcattcctcaaggcagttttcgcagaattcctcgcgacactgatctttgtgtttttcgggctaggatctgctctaaagtggcctagcgccctgcccacaatactgcagatagccctcgcatttggattagctatcggtacacttgcccaagcgctgggaccagtgagtgggggccacatcaaccccgccatcacactggctctgctagtagggaatcaaatttccctgctgcgagcatttttttatgttgcggcccagctggtcggtgccattgctggcgctggcattctctatggcgtggccccattgaacgcaaggggcaatctggcggtgaatgccttaaacaacaacaccacccagggtcaggcgatggtcgttgaattaatcctgaccttccaattggcactgtgcatctttgcctccaccgactcccgtcggacctctccagttggaagccctgctctgagcattggcctgtccgtcactttggggcatttagtggggatttatttcactggctgctccatgaatccggctcgctcctttggcccagccgtggtgatgaacaggtttagccctgcgcattgggtattctgggtcggccctattgtaggggctgtccttgctgccattctatacttctatctgttgtttccaaactctctgtccctgtcagagcgggtagccataatcaagggcacctacgaaccagacgaagattgggaggaacagcgagaagagcgaaagaagaccatggaattaacaaccaga

SEQ ID NO: 119651 - DNA, 795 bp, Artificial Sequence
  derived and/or modified sequence
atgaaaaaagaagtgtgtagtgtggcgttccttaaagcggtgttcgctgagttcctggctacacttatcttcgttttctttggcttggggagcgcactgaagtggccaagcgccctcccaactattctgcagattgccttggcattcgggctggctatcgggacgctggcccaagccctggggcccgtgagtggtggacacattaaccccgcgatcacccttgcccttctggtgggcaatcagatttctctgctgcgcgcctttttctacgtggcagctcagcttgttggcgccattgccggagctggcatcctgtacggtgttgcccctcttaacgcccggggaaatctggcggtgaacgcattaaacaataataccacccaaggacaagctatggtggtcgaattaattcttacattccagcttgcactttgtatattcgcttcaactgattctaggaggacctcacccgtgggctccccagccctgtcgattgggctctccgtaacacttggacatctggtggggatctactttactggatgtagtatgaatccggctcgcagcttcggccccgccgtcgtgatgaatagatttagcccagctcactgggtgttctgggtgggcccgatcgtcggcgctgtcctggccgccattctgtatttctatttgctcttccccaattcactctcattgagtgagagggtggccattatcaaaggaacatatgagcctgatgaagactgggaggagcagcgagaagaaaggaagaaaacaatggaactaacgacacgg

SEQ ID NO: 119652 - DNA, 795 bp, Artificial Sequence
  derived and/or modified sequence
atgaaaaaagaagtgtgtagcgtggcattcctgaaggcagtgttcgcagagtttcttgccacccttatcttcgtgttctttggattgggctcagcacttaagtggccaagcgcactgcccacgatccttcaaattgcgttggcattcgggctggctattggtactctggcccaagcactcggacccgtctcgggtggtcacataaaccccgcaattaccctcgcactgctggtcggaaatcagatctcgcttctgcgtgctttcttttacgtggctgcccagctggtgggtgcgatagcgggcgcgggcatcctttacggtgtggccccacttaatgcacgcggcaatcttgcagtgaatgcccttaacaataacaccacccagggacaggcaatggtcgtggaactgattctgacgttccaactcgcgctttgtatctttgcctccacggattcgcggcggacttcgcccgtcgggtcgccagcactttcgattggtctgtccgtgacccttgggcatctggtgggaatttacttcactggatgttccatgaatcctgcacgctcttttggacctgcagtggtcatgaaccggttttccccagcacattgggtgttttgggtgggaccgattgtcggagccgtccttgcagcaatactttacttttacctgctgttccctaatagcctttcactttcggaacgcgtggcaattatcaagggaacgtacgaacctgatgaagattgggaggaacaaagagaagagcgcaaaaagaccatggagctgaccacccgc

SEQ ID NO: 119653 - DNA, 795 bp, Artificial Sequence
  derived and/or modified sequence
atgaagaaggaagtgtgctcagtggcctttctaaaagctgtgttcgccgagttcctcgccacgcttatcttcgtatttttcggcttgggcagtgccctgaaatggcctagcgcgctgcctacaatactgcagattgcacttgcctttggactcgcgatcggaaccctcgctcaagctctcggtcctgtgtctggaggtcatatcaaccctgccataactcttgccctgctggtcgggaatcagatctcactcctgcgggccttcttttacgtggccgcgcagcttgtgggcgctatcgctggcgcagggattctgtacggcgttgcgcctctgaatgcccggggcaatctggcagtgaacgccctgaacaataacaccacgcaggggcaagccatggtggtcgagttgattctgacgttccagctggcgctgtgcatcttcgcttcgactgatagccggagaacatctcccgttggatcccccgccctatccattgggcttagcgttacgttgggtcacctggtgggaatttacttcacagggtgtagcatgaatccggctagatcattcggcccagctgtggttatgaacagatttagtccggcccactgggtgttttgggtgggcccaatagtgggggctgtgctggctgcaattctctacttctatctcttattccctaactctctgtccctgtctgagagagtggccatcatcaaggggacctacgaaccagacgaggactgggaagagcaacgggaggagagaaaaaaaactatggaactcactacgaga

SEQ ID NO: 119654 - DNA, 795 bp, Artificial Sequence
  derived and/or modified sequence
atgaaaaaagaggtttgcagtgttgcttttctgaaggccgtgtttgcggagtttctggctaccctgatcttcgtgtttttcggactagggtctgctctgaagtggccatccgccctccctaccatcctgcagattgcactcgcgttcggtctagcaattgggacgctggcacaggccctcggaccagtatccgggggacacataaaccctgcgatcaccctggccctcttggtaggcaaccagatcagtctgcttagggcgttcttctacgttgctgcacaattggtgggggcaatcgctggggctggtatcctatacggcgtcgccccgctcaacgctaggggcaatttagcagttaatgccctgaacaataacaccactcagggccaggctatggtagtggaacttattctgacctttcagctggccctttgcattttcgccagcactgactctcgacgcacgtctcccgtaggttccccagcactgagtattggcttgagcgtcaccctgggccacctcgtgggcatatacttcacaggatgttccatgaatcccgcacgatcatttggaccggccgtcgttatgaaccggttcagtcccgcacactgggtgttttgggtcggtcctatcgttggcgctgtgctggcagcaatcctgtatttttacctgctatttcccaattctctgtcactgtcagaacgagtggccatcattaagggcacgtacgaaccagacgaggactgggaagaacaacgcgaagagaggaagaaaacgatggaattgactacacgg

SEQ ID NO: 119655 - DNA, 795 bp, Artificial Sequence
  derived and/or modified sequence
atgaagaaagaagtgtgcagcgtggcgttcctcaaggccgtgtttgcggaattcctcgccactcttatctttgtgttcttcggtcttggttcagctctgaagtggccgtccgcactcccaacgattttgcaaatcgcgctcgcttttgggctggccatcggcactttggcccaggcgctgggaccggtatctggtggacatatcaacccagcaatcaccctggccctgctcgtgggaaatcagatctcgctgctcagggcctttttctatgttgctgcccagctcgttggtgccatcgccggcgcgggaatattgtacggagtcgcgccgctgaacgcccgggggaacctggccgtcaacgcactgaataacaataccacccagggacaagcgatggtcgtggagctcatcctgacttttcagctcgcactctgtattttcgccagtaccgactcgcgacgcacttcccccgtgggatcgcctgccctgtcaatagggctgtcggtgactctgggacacctggttggaatctacttcaccggttgcagcatgaatcctgcacggtcgttcgggccagccgtggtgatgaaccggttctccccagcgcactgggtgttttgggtggggccgatcgtgggagccgtgctggctgccattctgtatttctacctcctgttcccgaacagcctcagcctgtcggaacgcgtcgctatcatcaagggaacctatgaaccggatgaggactgggaggaacaaagagaagaaagaaaaaagaccatggagctcaccactcgc

SEQ ID NO: 119656 - DNA, 795 bp, Artificial Sequence
  derived and/or modified sequence
atgaagaaagaggtgtgcagcgtggccttcctcaaggccgtattcgctgagtttcttgcaaccctgatctttgttttcttcggactcggttccgcccttaaatggccatcagccctgccaacaatccttcaaatcgcattagcctttggactcgccattggcactttggcacaggctctgggacccgtgagcgggggacatatcaatcctgctataaccctcgctctactagtgggtaatcagatttcccttctgcgtgcatttttttacgtggccgcccagctagtgggagcaattgccggggccgggattctttacggagttgcacctttaaacgcacgcggaaacttagccgtgaatgctctgaacaataacacgacacaaggtcaggccatggttgtggaactcatcttgacctttcagctagcgttatgcatcttcgccagcacagatagccgtagaacaagccctgtgggaagccccgcactatccataggactgagcgtgactctgggccacctagtcggcatatacttcacgggttgttccatgaatcctgctcggtccttcggccctgctgtggttatgaacagattctcccctgcgcattgggtcttttgggtcgggccaatcgtgggagccgtcctggcagctatcctgtacttttatctcttgttccctaactctttatcattaagcgagcgtgtcgcaataatcaaaggtacctatgagccagacgaagattgggaggaacagcgtgaggagaggaagaaaaccatggagctcactaccaga

SEQ ID NO: 119657 - DNA, 795 bp, Artificial Sequence
  derived and/or modified sequence
atgaagaaggaagtgtgctcggtggcctttcttaaggcagtgtttgcagagttccttgccaccctgatctttgtcttttttggtttggggagcgcactgaaatggccaagcgcgctcccaaccatccttcagatcgcgctggcatttggtcttgcaataggaactctcgcacaggcccttggccctgtgtccggtggtcacattaaccctgcaatcacccttgcgctgcttgtcggaaaccaaatttcgcttcttcgcgcatttttctatgtggccgcacaactcgtgggtgcaattgcgggagccggaattctttacggagtggcaccactgaatgcacgcggtaatctggccgtgaatgcactcaacaacaacacgacccaagggcaagccatggtggtcgaactgattctgacctttcagttggccctctgtattttcgcttcgactgattcgaggcgaacttccccagtggggagccctgcactgtcgattggactgtccgtgacgctgggtcacctggtcggaatatactttaccggatgttcaatgaacccagctcgtagctttggtcctgcagtggtgatgaaccggttttcgcctgctcactgggtattttgggtgggtcctatcgtgggcgcagttctggcagcaatactgtacttttacctcctgtttcctaactcgctgagcctctcagaacgtgtggccatcattaaggggacctatgagccagacgaggattgggaagagcaacgagaagaaaggaagaaaactatggaactgaccacgaga

SEQ ID NO: 119658 - DNA, 795 bp, Artificial Sequence
  derived and/or modified sequence
atgaaaaaagaggtgtgtagcgttgcctttctaaaggcagtgtttgccgaattcctggcaaccctgatattcgtgttcttcggcttaggaagcgctctaaaatggccatctgcactgcctaccattctccagattgctcttgcctttggcctagcaattggcactctggcccaagccctgggcccagtatcaggcggccatatcaacccagctatcacccttgccctgctggtggggaatcagataagcctgctgagggctttcttctacgtagccgcacagcttgtgggcgcaattgccggcgccggaatcctctacggcgtggcacctttaaacgccaggggcaaccttgccgtgaatgcactcaacaacaacactacacagggccaggccatggttgtggaactcatcctgactttccagctggccctgtgcatttttgcctcaaccgattctagacgcacttctcctgttgggtctcccgctctatctattggcctgtccgttaccctgggacatttagtgggaatctatttcactggctgctcaatgaacccagcacgctcctttggcccagcagtagtgatgaatcgcttcagccctgcccactgggtcttctgggtcggccctatcgtgggcgctgtactagctgctattctctacttctacctgttgtttcctaattccctgtccctgtccgagagagtggcaataataaagggcacctacgagcctgacgaagactgggaggaacagagggaggaacgcaaaaagaccatggagctcactacaaga

SEQ ID NO: 119659 - DNA, 795 bp, Artificial Sequence
  derived and/or modified sequence
atgaagaaagaggtttgtagtgttgcctttctgaaagccgtgttcgctgagttcctagcgactctgatcttcgtgtttttcggactcggatctgctctgaagtggccttcggccctgcccaccatcctgcagatcgccctggcattcggactggccataggcacattggcccaagcattaggtccagtctccggggggcatatcaatcccgctattacactggctctcctggtgggtaaccagatttcattgcttagagcatttttctacgtcgctgcgcagcttgtgggtgctattgctggggctgggattctatatggggtggcgccattgaatgctcgcggaaacttagcagtcaacgctctcaacaataacactacgcaggggcaggccatggttgtggagctcattcttacctttcagctggccctttgtatctttgcttcaacagattcaagacggacctccccagttggatcgcccgctttatcgataggactgtcagtgaccctgggacatctggtggggatctacttcacaggatgctccatgaatccggctaggtctttcggacctgcagtggtgatgaaccgattctccccagcacactgggttttctgggtaggtcctatcgtgggcgcagtgctggccgctattttgtacttctatcttctgttccctaattctctgtctctgagtgagagagttgcaattattaaaggcacatacgaacctgatgaggattgggaagagcagcgggaggagagaaagaaaacgatggagttgaccaccaga

SEQ ID NO: 119660 - DNA, 795 bp, Artificial Sequence
  derived and/or modified sequence
atgaagaaggaagtgtgcagcgtggctttcctcaaagccgtcttcgcagagttcttggccaccttgatcttcgttttcttcggactgggctccgctctgaaatggccgtccgcactgcccaccattctgcagattgcacttgcttttggactagctatagggaccctggctcaggccctagggcccgtgagcggtggacatattaatccagctattacactagcactcctcgtgggcaaccagatcagtttgttgagagcgttcttttatgttgccgcacagctggtgggcgcgattgccggcgccggaattctttacggcgtagctcccctgaatgcccggggcaatcttgccgttaatgcattgaataacaacaccacacaaggacaggccatggtcgttgagctgatcttgaccttccagcttgcgttgtgcatcttcgcgtctacagattctagaagaacatctccagtcggtagtccagcattgtccatcggactctctgtgacactcgggcacctggtcggaatctacttcactggatgtagtatgaacccagctcggagctttgggccagccgtagtgatgaaccgtttcagtccagcgcattgggtgttctgggttggacctattgtcggtgcagtgctcgccgcaattctgtatttttaccttctgtttcccaatagcctgtcattgtctgagcgggtagccattatcaagggaacatatgagcccgacgaggactgggaagagcagagggaagagcgcaaaaagacgatggagctgactacaaga

SEQ ID NO: 119661 - DNA, 795 bp, Artificial Sequence
  derived and/or modified sequence
atgaagaaggaagtgtgctctgttgcctttctgaaagccgtgttcgccgaatttctcgctaccctgatcttcgtgtttttcggactgggttctgcattgaaatggcctagtgcactcccaaccatcctgcagatcgccctggccttcggactcgctattggaaccctggctcaagctttgggacctgtttctggaggtcacattaacccagccatcactttggcactcttggtcggcaaccaaatatccctcctgagagcttttttctacgtggctgctcagctcgttggcgcaatcgctggtgccggcatactgtacggtgttgctccattgaatgctagaggtaacctcgcagtcaacgccttgaacaacaacaccacccagggacaggcaatggtagtggaattgattcttaccttccagcttgccctgtgcatctttgccagcaccgactctaggagaactagccctgtgggcagtccagccctgtctatcggtctgtctgtcaccctcggccatctggtgggcatttactttactggttgttccatgaatcctgcccgcagctttggtccagctgtcgtgatgaacaggttttcacctgctcattgggtcttctgggtgggcccaatcgttggtgcagttttggctgcaatactctatttttacctgctgttcccaaactccctgagtctctcagagcgtgtggcaattatcaagggaacctacgagccagacgaggactgggaggaacaaagggaggagcgcaaaaagactatggagctcaccactcgc

SEQ ID NO: 119662 - DNA, 795 bp, Artificial Sequence
  derived and/or modified sequence
atgaagaaggaggtctgcagcgtagcgtttctgaaagccgtgtttgccgaattccttgctacacttatattcgtattctttggactgggcagcgcgcttaagtggccctccgctcttccaaccatactgcagatagcactggcatttggtttagcgatcggtacactagcccaggcccttggtcccgtttctggcggccatattaacccagcaattacgctggctcttttagtgggcaatcagatatcccttcttagggctttcttctacgtagcggcacagctagtgggtgctatagccggcgcagggatcttatatggcgtggctcctcttaatgcacgcggaaacctggctgtgaatgctttgaataacaataccactcaagggcaagccatggtggtcgaactgatactgacctttcagctggccctctgcattttcgcgagcacagattcaaggagaacatcccctgttggctcccctgccctctctatcggtttatctgttacactcgggcacctggtcgggatttatttcactggctgctccatgaatcctgcacgcagcttcggtcctgccgtcgtgatgaataggttctctcccgcccactgggtgttctgggtcgggcccatcgtcggggccgttctcgctgccatcttatacttttatctgctgttccctaattcattgtctctgtcagagcgggtggccatcatcaagggcacctacgagcccgacgaagattgggaggagcagcgggaggaaaggaagaagacaatggaactcacaaccaga

SEQ ID NO: 119663 - DNA, 795 bp, Artificial Sequence
  derived and/or modified sequence
atgaaaaaagaggtctgctccgtggcgtttctaaaggctgtcttcgcagaatttttggccacacttattttcgtgttctttggactagggtctgctttaaagtggcccagtgcccttccaacaatacttcagatagctctggcttttggattagctatcgggacactggcccaagcattaggacctgtgtccggggggcatataaaccccgcgatcacacttgccctactcgtcgggaatcagatctcactcctgcgggcttttttctatgtagccgcgcaactcgtgggggctatcgccggggccgggatattatatggggtggcacccctgaatgctagagggaacctcgccgtcaatgctctcaacaacaacactactcagggacaggcaatggtagtagaacttatcctaactttccaattagcactatgtattttcgcctccactgattccagacgcacatcccccgtcgggagtccagcactgagtatagggctttctgtgacacttggacacctggtagggatttactttactgggtgttctatgaaccctgcacggagtttcgggccagccgtagtcatgaacaggttctctcctgcccattgggtcttttgggtcggacctatcgtaggagcagtacttgcagcaatcctctatttctatctcctatttcctaattctctctccctaagtgaaagagttgctattatcaaaggaacatacgaacccgatgaagattgggaggaacagcgggaagagagaaaaaaaacgatggaactgactacgcgg

SEQ ID NO: 119664 - DNA, 795 bp, Artificial Sequence
  derived and/or modified sequence
atgaaaaaggaagtttgttcagttgcctttttaaaagctgtatttgcagaatttctagctacattaatttttgttttttttggattaggatcagcacttaaatggccttctgctttaccaacaattcttcaaatagctcttgcttttggattagcaattggaactcttgcacaagctcttggaccagtttctggaggacatataaacccagctattacattagctcttcttgtaggaaatcaaattagtttacttagagcttttttttatgttgcagcacaattagttggagcaatagctggagcagggattttatatggagttgcaccacttaatgctagaggaaatttagcagtaaatgcattaaataataatactacccaaggtcaagcaatggtagttgaacttattcttacatttcaattagctttatgtatatttgcaagtacagattcacgtagaaccagtcctgtaggaagtccagctttatctattggattatcagttacattggggcatttagttggaatttattttactggttgttctatgaatccagcacgatcattcggaccagctgttgttatgaatagattttcacctgctcattgggttttctgggtgggaccaattgttggagctgttttagcagccattttatatttttatcttttatttccaaattcattatcattatcagaaagagttgctataattaaaggtacttatgaaccagatgaagactgggaagaacaaagagaagaaagaaaaaagactatggaacttactactagg

SEQ ID NO: 119665 - DNA, 795 bp, Artificial Sequence
  derived and/or modified sequence
atgaagaaagaggtgtgttctgttgcatttttaaaggcggtatttgcagagtttctggctaccctaattttcgtctttttcggcctgggtagcgccttgaagtggccttccgcactccctacgatcttgcagatcgcgctagcgtttgggctcgctattgggactttggcccaggcgttgggccctgtctccggtggtcatattaatcctgcaataacactggccctgctagtaggtaaccagatttccttgttgagagcattcttctacgttgcagcccaactggtgggggcaatcgcaggcgccggtattctgtacggggtggcgcctttgaatgccagaggaaatttagcggtcaacgcgctcaacaacaataccactcagggtcaagcgatggtggttgagctgatcttgactttccagcttgctctctgcatattcgcaagcaccgacagtcgtaggacaagtcccgtggggtcgccggccttgagtatcggtcttagtgtcacgctcggccatctcgtcggcatctatttcacaggatgtagcatgaatccagcacgatcgtttggtccagctgtcgtcatgaacagattttcccctgctcattgggttttctgggtgggtccaatcgttggcgcagttctggcggcaatactttatttctaccttttatttccgaattctctttcattatctgaacgagtggccattattaagggcacatatgaaccagatgaagactgggaagaacagcgcgaggaacgtaagaagaccatggaactgactacccgc

SEQ ID NO: 119666 - DNA, 795 bp, Artificial Sequence
  derived and/or modified sequence
atgaaaaaagaagtatgcagtgtcgctttcctcaaagccgtgtttgctgaattcttagcgactctcatatttgttttctttggacttgggtccgctctaaaatggccatcagccttacctacaatcctgcagatagctctggcatttgggctcgccatcggaactctggcacaggccctgggaccagtgagtgggggacacataaaccctgctataacacttgctcttctagtagggaatcagatatctctcctaagggcttttttctacgtggcagcccagctcgtcggggcgatcgccggagccggaatcctttatggagtggctccattgaacgctcgagggaatctagcagtgaacgcactgaacaacaatactactcaggggcaggccatggtggtggaactaatacttacattccagcttgccctgtgtatctttgcgtcaactgactcgaggagaactagtccagtcgggtcccccgctctttctatcgggctctctgtgactttgggacatctagtgggaatctattttactgggtgttccatgaatccagccaggtcttttggaccagcagttgtcatgaatcggttctctcccgctcactgggttttttgggtgggacctattgtgggagctgttttggccgccatcctctacttttatctcctattccccaacagtctatctctgagtgagagagtagctatcatcaaagggacatatgagcctgatgaggactgggaagagcagcgcgaggaacgaaaaaaaacaatggaactcacaacaaga

SEQ ID NO: 119667 - DNA, 795 bp, Artificial Sequence
  derived and/or modified sequence
atgaaaaaagaagtttgttccgttgcattcttaaaagcagtgttcgcagagttccttgcgacactcatttttgtgttcttcggcctaggttctgctttaaagtggccctcagcccttccgaccatacttcaaatagcattggcatttggtcttgcaattggtactctcgctcaagcactcggacccgtgtccggagggcatattaaccccgcaatcacgttggctttgttggttggtaaccaaatctccttgctcagggcattcttctacgtggctgcccagttagttggagctattgctggagcaggtattctctatggagtggcacctctaaatgcacgcggaaaccttgccgtaaacgcactgaacaacaacactacacaaggacaggcaatggtagtagaacttatactgactttccagctagccttgtgtattttcgcctctaccgactcacgtcgtactagcccggtgggttctccggcattgtctattggtttgtcagttactctaggacatcttgttggcatttatttcacaggatgtagtatgaaccccgctaggtctttcggaccagccgttgttatgaacaggttttcccctgcccattgggttttctgggtgggtcctatcgttggagccgttctagcggctatactgtatttctatctcctattccctaacagcctttcccttagtgaacgagttgctatcatcaaaggcacatatgaacctgatgaagattgggaggagcagcgtgaggaaagaaaaaagacgatggaattaaccacacgt

SEQ ID NO: 119668 - DNA, 795 bp, Artificial Sequence
  derived and/or modified sequence
atgaaaaaggaggtgtgcagtgtggccttcctcaaggccgtgttcgcagaattcctagcgaccctgatctttgtgttctttggactaggatccgccctcaagtggcctagtgcactgcccaccattctgcagatcgctctggcgttcgggctcgcgattggcactctggcgcaagcccttggaccggtctctggaggacatatcaatcctgcaatcactttggccctcctagtagggaatcagatcagcctcttacgggctttcttctatgtggccgcgcagctggtaggcgccatcgccggggctggtatcctttatggtgtggcgcccctaaacgcgcggggaaacctagcggtaaacgccctgaataataacacaacgcaaggacaggcaatggtagtagagctcatcttaaccttccagttggccctatgcatattcgcctctacagacagccgcagaacctcacctgtaggcagccccgcgctcagtattggcctaagtgtgaccctgggtcacctggttggcatctattttaccggttgctcaatgaaccctgcccgatcattcggtcctgctgtggtaatgaatcgtttttcaccagcccactgggttttctgggtgggcccgattgtgggtgccgtcctagccgcgattctatatttttatctgctgtttccaaactctttaagtctctcagaaagggtcgcgattataaaaggaacatacgaaccagacgaggactgggaggagcagagggaagaacgcaagaaaacaatggaactgacgaccaga

SEQ ID NO: 119669 - DNA, 795 bp, Artificial Sequence
  derived and/or modified sequence
atgaagaaagaggtgtgttcggtggctttccttaaagccgtgttcgcagagtttctcgccactctcatcttcgtgttcttcggactcggatccgcgctcaaatggccaagcgcccttccaactatcctccagatcgccctcgcgttcgggctggccatcggaaccctggcacaagcgctggggccagtgtctggcggacacatcaatccagccatcaccttggcgctgctggtgggaaaccagatcagcctgttgcgggctttcttctacgtcgctgctcaactcgtgggagctattgcaggagctggaatcctctacggagtcgctccgctgaacgcccgcggaaacctggcggtgaacgcactgaataacaacaccacccaaggtcaggctatggtggtcgagttgatccttacctttcagctggcgctctgcatctttgcctccactgattcgagaagaacctcccctgttggctctccggcgctcagcatcggcctttcagtcactctcggacatttggtcggaatctactttaccgggtgttccatgaatccggccaggtcctttggcccggccgtagtgatgaatcggttcagcccagcccactgggtcttctgggtcgggccgatcgtgggagctgtgctggcagcaatcctctacttttacctgctcttcccaaattcgctctccctgtcagaacgggtggccatcatcaaagggacttacgaaccggacgaagactgggaggaacagcgcgaggaacgcaagaaaaccatggaactgaccacccgc

SEQ ID NO: 119670 - DNA, 795 bp, Artificial Sequence
  derived and/or modified sequence
atgaaaaaggaggtctgctcggtggcgtttctgaaagccgtatttgctgagttcttagcaaccttgatatttgtattctttggtttgggcagtgccctgaagtggccgtccgcgctacctacaatcctacaaatcgctctggcctttggccttgctatcggaacactcgcccaggcgttgggccctgtgagcggcggccatatcaatcctgccatcaccttggccttgctagtgggaaatcagattagcttattacgggcctttttttatgtcgccgctcagttggtgggagccattgccggcgcaggaattctgtatggcgttgcccccctcaatgcaaggggaaacctggctgtaaatgcccttaataataacactacccagggtcaggccatggtggtcgagttgatcctcaccttccagctggcactctgcattttcgcctctacagattcacggcggacctcacctgttggctctcccgctttgtcaatcggtttgtctgtgacactgggccacctcgtggggatctacttcacaggatgcagcatgaacccagctaggtctttcggaccagcagtagtgatgaaccggttctcacctgcacattgggttttctgggtgggacccatcgttggggcagtgttagccgccatcctgtacttctatctcctcttccccaatagtctctccctgtccgagcgcgtggcaattataaaaggcacctacgaacctgacgaagattgggaggagcagcgcgaggagaggaaaaagaccatggagctaaccacgaga

SEQ ID NO: 119671 - DNA, 795 bp, Artificial Sequence
  derived and/or modified sequence
atgaagaaggaagtgtgttccgtggcgttcctcaaagcggtgtttgccgagtttctcgcaactctcatctttgtgtttttcggtctgggctcagcgctgaagtggccatcggccctgccgaccattctgcagatcgccctcgccttcggtttggccatcggaacccttgctcaggccctgggcccagtttcgggagggcacattaatcctgcgatcaccctggctctgctggtgggaaaccaaatcagcctgctccgggctttcttttacgtcgcggcccagctggtgggagctatcgccggggcggggatattgtacggcgtggcccctctgaacgcacggggtaacctggccgtgaatgctctcaataacaacaccacccagggacaagccatggtggtggaactgatcctcacctttcaactggccctgtgcattttcgcgtcaaccgactcacggcggacttcacctgtggggtccccggcgctgtcgatcggactcagcgtcacgctgggacacctggtgggaatatacttcactggatgctccatgaacccagcacggtcgtttggccccgctgtggtgatgaacagattctcgccggctcactgggtgttctgggtcggaccgatcgtcggggcagttttggcagccattttgtacttctacctcctgttcccgaattccctgtcgctgtccgaacgcgtggcaatcatcaagggcacttacgaaccggacgaggactgggaagaacagcgcgaagagaggaagaaaaccatggagttgaccactcgg

SEQ ID NO: 119672 - DNA, 795 bp, Artificial Sequence
  derived and/or modified sequence
atgaagaaggaagtgtgctcggtggccttccttaaggcggtgttcgcagaatttctggcgaccctcatcttcgtattcttcggactgggttccgcgctgaaatggcccagcgccctcccgactatcctccagattgccctggcattcgggctggcgatcggcaccctggctcaggccctgggaccagtgagcggaggccacatcaacccggcaatcaccttggccctgcttgtcggcaaccaaatttcacttctgcgggcgtttttctacgtcgcggctcagctcgttggagccatcgctggcgcgggcatcctctacggagtcgctccacttaacgcccgcggcaatctggccgtgaacgccctgaataacaacactactcagggacaggccatggttgtcgagctgattctgaccttccagttggccctttgcatcttcgccagcaccgacagccgccggacgagccctgtcggatcaccggccctgtccattggactgtccgtgacgctcggccacctcgtgggaatttactttactggctgctcgatgaacccagcccggtccttcggtccagcagtggtgatgaatcggttctcaccagcccactgggtgttctgggtgggccccatcgtcggagccgtgctcgcagcaattctgtacttctacctgctcttcccgaactccctctcgctgagcgagcgggtggcaatcatcaagggaacctacgaaccagacgaggattgggaggagcaaagagaagaaagaaaaaagaccatggaactgaccacccgc

SEQ ID NO: 119673 - DNA, 795 bp, Artificial Sequence
  derived and/or modified sequence
atgaagaaggaagtgtgctccgtcgcattcctcaaggcggtgttcgccgaattcttggccactctgatatttgtgttctttggactgggcagcgccctcaagtggccatccgctctcccaactatcctgcagatcgcgcttgctttcggactggcgatcggaaccctggcccaggcattgggcccggtgtctgggggccacatcaacccagcaatcaccctggccctcctcgtggggaaccagatcagcctgctgcgcgcctttttctacgtggccgcgcaactcgtgggagccattgccggagcaggaatcctgtacggggtggccccactgaacgccaggggaaatctggccgtgaatgccttgaacaataacaccacccagggccaggccatggtcgtggaactgatcctgactttccaactggcgctgtgcatcttcgcttcgactgattcgagacggaccagcccggtcggatcgccagctctgtcgatcggactctcagtcaccctcggacatctggtgggaatttacttcaccggatgtagcatgaaccctgcacgcagcttcgggccagctgtggtgatgaacagattttcaccggcacattgggtgttttgggtcggtccgatcgtgggcgccgtccttgcggctattctttacttctacctgctgttcccaaattcactgtcgctctcagagcgcgtggcgatcatcaaggggacctacgagccggacgaggattgggaggagcaacgcgaggagcgcaagaaaactatggaactgaccactagg

SEQ ID NO: 119674 - DNA, 795 bp, Artificial Sequence
  derived and/or modified sequence
atgaagaaagaagtatgctcagtggccttcctgaaagccgtgttcgctgagttcctggccacactgatcttcgtgtttttcggtctgggctcggcgctgaagtggcccagtgcattacctacgatcctgcagattgctctggcgttcgggctggccattgggaccctcgcgcaagccctggggcctgtgagcggaggacacatcaaccctgcaattactctggccctcttggtgggtaaccaaatcagtctcttgcgagcattcttttatgtagcggctcaactggtgggagccatcgctggggccggcatactttacggagtcgccccgttgaatgcacggggcaaccttgccgtcaacgctctcaataataacacaacgcagggacaggctatggtggtggaacttattctcacctttcagctcgcactgtgcatctttgcttcaacggattcacggcgtacctcccccgtggggtcgcctgctctgagtatcggcctgagcgtcaccctggggcacttggttggaatctacttcaccggttgctctatgaaccctgctcggtcctttggccccgccgtcgtgatgaataggttcagccccgctcactgggttttttgggtaggaccgatcgttggcgccgtacttgcagctattttgtacttctacctcttgttccccaacagtctgagcctgtctgagcgcgtggccataataaaggggacctacgagccggatgaggactgggaggagcagagagaagagcgaaagaaaacaatggagttgacgactcgt

SEQ ID NO: 119675 - DNA, 795 bp, Artificial Sequence
  derived and/or modified sequence
atgaagaaggaagtctgctctgtggctttcctgaaagcagtcttcgccgaattcctggccaccctcatcttcgttttttttggactgggttcagccctcaagtggcctagcgcccttccgacgatcctacagattgctctagccttcgggctggccatcggcaccctcgctcaggcactgggcccagtctctggagggcatatcaacccagctatcaccctggcgctgctcgtgggcaaccagatatccttactgagagcattcttctatgtagccgcccaacttgtcggggccatagcaggcgccggaattctgtatggcgttgcccctctgaatgcacgggggaacctcgccgttaatgcgctgaacaacaataccactcagggtcaagctatggtggtcgagctgattctaacctttcagctggcgctctgtatttttgcatccaccgattcaagacggactagtcccgtgggctctcctgccttgagcatcggtctctccgtgactttgggccatctagttggcatttatttcaccgggtgttctatgaacccagctcggagtttcggaccggcggttgtcatgaacaggtttagtccagcacactgggtcttctgggtcggcccgatcgtgggtgccgtcttggcagcaatactgtacttttatttacttttcccgaactcattgtctctttccgagcgagtcgccatcatcaaagggacatatgagcccgacgaggattgggaggagcagagagaagagagaaagaaaacaatggagctgacaacacgc

SEQ ID NO: 119676 - DNA, 795 bp, Artificial Sequence
  derived and/or modified sequence
atgaagaaagaagtctgctcggtggcctttctgaaggccgtgttcgccgagttcctcgcaacgctgatcttcgtgttctttggcctcgggagcgcattgaagtggccttcggccctgccaaccatcctccaaatcgcattggcatttggactggccattggaacgcttgcacaggctctcggaccggtgtcgggtggacatatcaacccagcgatcaccctggccctgttggttggaaatcagatttcacttctcagggcgtttttctacgtggccgcccaactcgtcggcgccatcgccggagccggcatcctttacggagtggcaccgctgaatgctcggggaaatcttgcggtgaacgccctcaacaataacactactcaggggcaggccatggtcgtggaattgatcctcacttttcagttggccttgtgcatctttgcatcgacggattcgcggcggacctcgcccgtgggatccccggccctctctattggactgagcgttactttggggcacctggtgggcatctatttcaccggatgtagcatgaaccctgcgcgctccttcggaccggccgtcgtaatgaatcgcttctcaccggcccattgggttttctgggtggggccaatcgtgggcgccgtgttggccgcgatcctgtacttttacctgctgttcccgaacagcctttcgctgtccgagagagtggctatcattaagggaacctacgaaccggatgaggattgggaagaacaaagggaagaacggaagaaaaccatggagctgactacccgc

SEQ ID NO: 119677 - DNA, 795 bp, Artificial Sequence
  derived and/or modified sequence
atgaagaaagaggtgtgctcagtggcgttcctaaaagctgtgtttgccgagtttctggcaactctgatttttgttttttttgggcttggaagcgcgctgaaatggccttctgccctgcctacgatactacaaatcgccctcgcgttcggccttgctataggaacactggcacaagctctgggcccagtaagtggtggacacatcaaccccgccataaccctcgccctgcttgtcggcaatcaaatttctcttctcagggcctttttttatgtcgcggcccaactggtaggggcgatcgctggggctggcatattatacggtgtggcacctcttaatgccagagggaatctagctgtcaacgcgctgaacaacaataccacccagggccaggcaatggtggttgagctaatccttacctttcagctggccctgtgtatcttcgcttctacagattcccggcggacaagccctgtcggatccccggcgttgtcgattggccttagtgtgaccttaggccacctggttggcatttatttcaccggctgctcaatgaatccggcccggtcgttcgggccagccgttgtcatgaatagattctctccagcacactgggtcttctgggtgggcccaatagtcggggcggtcctcgccgctatcttgtacttttatcttttgtttcctaacagtctgagtctcagcgagagagttgcaattataaaaggcacgtatgaacctgacgaggactgggaggaacaaagagaggaaaggaagaaaaccatggaactcacaacaagg

SEQ ID NO: 119678 - DNA, 795 bp, Artificial Sequence
  derived and/or modified sequence
atgaagaaagaagtgtgttcagtggcatttctgaaggcagtgttcgccgaattcctggcaactttgatttttgtattcttcggactcggttcggccctcaagtggccaagcgcgttgccgactatcctgcagatcgcgctcgcgttcggactcgcgatcggtacgctggctcaggcactgggaccggtgtcggggggacacatcaatcctgccattactctcgctctgctggtgggaaatcaaatcagcctgctgcgcgccttcttctacgtcgctgcccagctcgtcggagccatcgccggtgccggaattctgtacggagtggcgccgctcaatgcccggggaaatctcgccgttaacgctttgaataacaataccacccaaggacaggcgatggtggtcgagctgatcctcacgtttcaactggcactctgcattttcgcatccactgactcacgcagaaccagcccagtgggcagcccggcgctgtcaatcggactgtccgtgactctcggccacctggttgggatctacttcactggatgctccatgaacccagcgcggtcattcggcccggctgtcgtgatgaatcggttctccccagcacattgggtgttctgggtcgggccgatcgtgggtgctgtcctggccgcaattttgtacttctacctcctgtttcccaacagcctctcgctgagcgagcgggtggccatcatcaaaggaacttacgagccggacgaagattgggaagaacagcgcgaggagcggaagaaaactatggaactgactacccgc

SEQ ID NO: 119679 - DNA, 795 bp, Artificial Sequence
  derived and/or modified sequence
atgaaaaaggaagtgtgctccgtcgccttcttgaaggcagtgtttgcagagtttttggccacccttatctttgtcttttttggacttgggtcagctcttaagtggccgagcgcacttccgactattctccaaattgccctcgcattcggccttgctattggtacgttggcacaggcactgggacccgtgtcgggaggtcacataaatccagctattaccctggcacttcttgtggggaatcaaatttcgttgcttcgagccttcttttacgtcgcagctcagttggtgggggcaatcgcgggtgcggggattctgtacggagttgcgccactcaacgcacggggaaacctggcagtgaatgctctgaacaacaataccacccaaggacaagctatggtggtggaactgattttgacttttcagctcgcactgtgtatctttgcgtccaccgatagcaggagaacttcacctgtgggatcgcccgcactgtcgattgggttgtcggtgactcttggacacctggtgggtatctatttcaccggctgtagcatgaaccctgctcgctcattcggtcccgccgtggttatgaacagattttcacccgcccattgggtattctgggtgggaccgattgtgggagccgtgctggccgcaatcctttacttctacctccttttcccaaattccttgtcactgtccgaacgagtggcgatcataaaggggacttacgagccagatgaagattgggaagagcagagagaagaaagaaaaaagacgatggagcttactacccgg

SEQ ID NO: 119680 - RNA, 941 nt, Artificial Sequence
  derived and/or modified sequence
gggaaauaagagagaaaagaagaguaagaagaaauauaagagccaccaugaagaaagaggucugcuccguggcguuuuugaaggcaguguuugccgaguuucuggcgacauugauuuucguguucuucggccugggaucggcuuugaaauggcccucggcgcugcccacgauccuucaaaucgcgcuugcguuugggcucgcgaucgggacacucgcgcaggcacuuggcccugugucgggugggcauaucaacccagcgaucacuuuggcccuuuuggucggaaaucagaucagccugcuucgggcauucuuuuacgucgcagcccagcucgucggugcgauugcgggagcggggaucuuguaugguguggcaccguugaacgcaagagggaaccuggccgugaaugcccucaauaacaauacaacgcaaggucaggccaugguaguagaguugauccucacuuuccagcuugcacucugcauuuuugcgagcacggauagcaggcgcacgagccccgucggaucgccugcguugucaauuggacucucagucacucuggggcaccuggugggaaucuacuucacgggguguuccaugaauccggccagaucguucggaccggcgguagugaugaaccgcuuuuccccugcccacuggguauucugggugggucccauugugggggcuguccuugcugccaucuuguauuucuaccugcucuuuccgaacucacucucguugucggagcgcguagccauuaucaagggaacguaugaacccgacgaggacugggaagagcagagggaagagcggaagaaaaccauggaacucacaacccggugauaagcugccuucugcggggcuugccuucuggccaugcccuucuucucucccuugcaccuguaccucuuggucuuugaauaaagccugaguaggaag

SEQ ID NO: 119681 - RNA, 798 nt, Artificial Sequence
  derived and/or modified sequence
augaaaaaagaaguaugcagcguggcuuuucuaaaggcaguuuucgcugaauuucucgccacacucauuuuugucuucuucggacucgggucugcacugaaauggccuagcgcccuccccaccaucuugcagauagcccucgccuucggauuggccauagggacccuugcccaggccuuaggccccgucucaggcggccauaucaaucccgcuaucacgcuggcacuucuugucgggaaccagauaucccucuuacgugccuuuuuuuacguugccgcucagcugguaggugccaucgccggcgccggaauacuguacggcguugcaccgcugaaugcuagagggaaucuugcaguuaacgccuuaaauaauaauaccacucagggacaggcuaugguggucgaguuaauacugaccuuccagcuugcccuguguauuuucgccagcaccgauucuaggcgcacauccccagugggguccccagcucugucuauaggacuaucuguaacgcucggucaccucgucgggaucuacuucacagguugcagcaugaacccagccagaucauucggaccagcaguagugaugaaucgauuuuccccagcucacuggguguuuugggugggcccaauugugggagcuguuuuagccgccauccucuauuucuaccuucuuuuuccaaacuccuuaagucugucugagcgaguggccaucaucaaaggaacauaugagccagacgaggauugggaggagcagagggaggaacgcaagaaaacaauggagcugacgaccagguag

SEQ ID NO: 119682 - RNA, 798 nt, Artificial Sequence
  derived and/or modified sequence
augaaaaaagaaguaugcagcguggcuuuucuaaaggcaguuuucgcugaauuucucgccacacucauuuuugucuucuucggacucgggucugcacugaaauggccuagcgcccuccccaccaucuugcagauagcccucgccuucggauuggccauagggacccuugcccaggccuuaggccccgucucaggcggccauaucaaucccgcuaucacgcuggcacuucuugucgggaaccagauaucccucuuacgugccuuuuuuuacguugccgcucagcugguaggugccaucgccggcgcagggauccuguacggcguagcuccucugaaugcucgagggaaccuugccguaaacgcucuuaacaauaacaccacucagggacaggccaugguagucgaacucauucuuacuuuccaacucgcacugugcauuuucgccagcacugacagccgcagaaccucccccgucgggucccccgcccucucuaucggauuaucaguuacccugggucaccuugucgguaucuacuuuaccggguguucaaugaaucccgcacggucauucggcccggccgucgugaugaauagauuuucuccggcacauuggguguuuuggguaggaccuaucgugggugcgguuuuggcagccauccuguacuuuuaccugcuguuuccuaacucauugucucugucagaaaggguggcuauuauaaaggggacauacgaaccugacgaagacugggaagaacaacgggaagagaggaaaaaaacuauggaacugacuaccagauag

SEQ ID NO: 119683 - protein, 282 aa, Artificial Sequence
  derived and/or modified sequence
MDAVEPGGRGWASMLACRLWKAISRALFAEFLATGLYVFFGVGSVMRWPTALPSVLQIAITFNLVTAMAVQVTWKASGAHANPAVTLAFLVGSHISLPRAVAYVAAQLVGATVGAALLYGVMPGDIRETLGINVVRNSVSTGQAVAVELLLTLQLVLCVFASTDSRQTSGSPATMIGISVALGHLIGIHFTGCSMNPARSFGPAIIIGKFTVHWVFWVGPLMGALLASLIYNFVLFPDTKTLAQRLAILTGTVEVGTGAGAGAEPLKKESQPGSGAVEMESV

SEQ ID NO: 119684 - DNA, 849 bp, Artificial Sequence
  derived and/or modified sequence
atggacgcagtggagcctgggggccggggttgggcctctatgttagcctgcagactctggaaggcaatctcaagagccctgttcgccgagttccttgccacgggattatacgtatttttcggggtcggttccgtcatgcgttggccaactgctctgccttccgtcctgcagattgccatcacttttaatttagtcacagccatggctgtccaagtgacctggaaagcctctggcgcccacgctaacccagctgtcactctggcctttctagtcggctctcatatttcccttccccgtgccgtcgcttatgtcgctgcccaactcgtgggagccacagtgggagctgctctgttatacggcgtcatgccaggtgatataagagagactctaggcattaatgttgtgcggaattcagtgagcaccggacaggccgtggccgtcgagctccttctcaccctccagcttgtattgtgtgtcttcgcctccactgatagtagacaaaccagtgggagccctgccacaatgattggaatctcggtcgcccttggacacctcatcgggatacattttaccggatgttcaatgaacccagctcgctcattcggcccggctatcatcatcgggaaatttactgtacactgggtgttctgggtgggtccacttatgggagcactcttggcatccttaatttacaatttcgtgttgttccccgatactaagacactggctcaaagactggcaattttgacgggtaccgtggaggttggaaccggggccggcgctggggctgaacccttaaaaaaggagagtcagcccgggtctggcgccgttgagatggagagcgtgtag

SEQ ID NO: 119685 - DNA, 849 bp, Artificial Sequence
  derived and/or modified sequence
atggatgctgtggagcccggcggccggggctgggcctccatgctggcctgccgcctgtggaaggccatcagccgggccctgtttgctgagttcctggccaccggcctgtatgtgttcttcggcgtgggctctgtgatgcgctggcccacagccctgcccagcgtgctgcagatcgccatcaccttcaacctggtgacagccatggctgtgcaggtgacctggaaggccagcggggcccacgccaacccagctgtgaccctggccttcctggtgggcagccacatcagcctgcccagggctgtggcctacgtggccgcccagctggtgggcgccaccgtgggcgccgccctgctgtatggagtgatgcctggggacatccgggagaccctgggcatcaacgtggtgaggaacagcgtgtccacaggccaggccgtggccgtggagctgctgctgaccctgcagctggtgctgtgtgtgtttgccagcacagacagccggcagaccagcggcagccctgccaccatgattggcatctctgtggccctgggccacctgattggcatccacttcaccggctgcagcatgaacccagcccggagctttggacctgccatcatcatcggcaagttcaccgtgcactgggtgttctgggtgggccccctgatgggcgccctgctggccagcctcatctacaactttgtgctcttcccagacaccaagaccctggcccagaggctggccatcctgaccggcaccgtggaggtgggcactggagctggagctggagctgagcccctgaagaaggagagccagcccggcagcggggctgtggagatggagagcgtgtag

SEQ ID NO: 119686 - DNA, 849 bp, Artificial Sequence
  derived and/or modified sequence
atggacgccgtggagcccggcggccggggctgggccagcatgctggcctgccggttatggaaagcgatctcaagagccttgtttgcagagttcctggctacagggctgtacgtgttcttcggtgttggctctgttatgaggtggccaaccgctctccccagcgtcctgcaaatcgctataacttttaatctggtgacggctatggctgtgcaagtgacttggaaggcatccggcgcccacgctaacccagcagtgactttagcatttctagttgggtcccatatcagcctgccccgcgccgtcgcttatgtggccgcgcaacttgtaggcgccacagtgggcgccgctttgttgtacggtgttatgcctggtgacatacgcgagaccttggggatcaatgttgtccgtaacagtgttagtaccggacaggctgtcgctgtggagctcctgctgaccctccagttggtgttgtgcgtcttcgctagcacggactccagacagaccagcggctccccagccacaatgattggcatttctgtggccctgggtcacctaattggcatccactttactgggtgctctatgaatcctgcccggtcttttggacctgccatcatcatcggcaagttcacagtccattgggtcttctgggtggggccactgatgggggctcttctcgcctcgctgatctacaattttgtactgttccctgatacgaaaactttggcccagaggctggctatccttaccggaaccgtggaggtcggcacaggcgcaggggctggcgcagaacctctgaagaaagagagccagccaggatccggggcggtcgagatggagagcgtctag

SEQ ID NO: 119687 - DNA, 849 bp, Artificial Sequence
  derived and/or modified sequence
atggatgctgtggagcccggagggaggggttgggcgtctatgctggcttgccgcttatggaaagcgatctcgcgcgcactgtttgccgagtttttggctacaggactctatgttttcttcggggtgggcagcgtaatgcggtggcctactgcattaccatcagtcttgcagattgccatcaccttcaacttggtgaccgcaatggccgtccaggtcacctggaaggcctctggagcccatgcgaatcccgcagtgaccctggcattcctggtgggcagccatatatcactgcctcgtgccgttgcttatgtagccgcacagctcgtaggcgctacggtgggggctgccttgttatacggtgttatgcctggggacattcgcgagacacttggaataaatgtggtacgcaatagcgtctcaactggccaggccgttgctgtagagcttctgctgacattgcagctcgtgctttgcgtgtttgcctccaccgatagccgccaaacctcaggctcacctgctaccatgatcggtatttcagtggcattgggccatctgattgggattcactttaccggctgtagtatgaatcccgctaggtccttcgggcctgccatcataatcggaaagttcactgtccattgggtattctgggtggggcctctgatgggagctctcttggccagcctcatctacaattttgtgttgtttccagataccaagactctggctcagcgattggctatcctgaccggcacagttgaggtggggacaggagccggtgccggagcagaacccctgaaaaaggaatcacaaccaggatccggggcagttgaaatggagagcgtttag

SEQ ID NO: 119688 - DNA, 1398 bp, Artificial Sequence
  derived and/or modified sequence
tcatcgtaggaggttccagctcagtgcccagagacagcccccacatcccaccccatcaggtcagctcaggctggagcaggcatatgagcaacacccctcattccacccccatacacatgcataagcccatccgcctgcgccctgccagtctgaccagcacagtcctggggacaggagcgtggtggaggagctgcaggtgggggccagagaagcctccacagagagcaaaagccagggtcagccagagacaggacaccagaagagacaggagatcagagaccagaggaacagagaagaggccccagagcaaggcaaggaacggccaaggcaccaggacatggatgcagtggagccagggggacgtggctgggccagcatgttggcgtgcaggctttggaaagccatcagcagggcgctgtttgcagagttcctggccacggggctgtatgtgttctttggcgtgggctcagtcatgcgctggcccacagcacttccctccgtgctacagattgccatcaccttcaacctggtcaccgccatggctgtgcaggtcacctggaaggccagcggggcccacgccaaccccgccgtgacgctggccttcctcgtaggctcccacatctctctgccccgtgctgtggcctatgtggctgcccagctggtgggggccacggtgggggctgctctgctttatggggtcatgccgggagacatccgagagacccttgggatcaacgtggtccggaacagtgtctcaactggccaggcggtggcagtggagctgcttctgaccctgcagctggtgctctgtgtcttcgcttccaccgacagccgtcagacatcaggctccccggccaccatgattgggatctctgtggcactgggccacctcattgggatccacttcactggctgctccatgaatccagcccgctccttcggccctgccatcatcattgggaagttcacagtccactgggtcttctgggtggggcccctgatgggagccctcctggcctcactgatctacaacttcgtcctgttccccgacaccaagaccctggcgcagcggctggctatcctcacaggcaccgtagaggtggggacaggggcaggggcaggggcggagcccctgaagaaggaatcccagccgggttcgggagccgtggagatggagagtgtgtgaaacagcctacgcctggccgcgcccttgggcttcctgccttgcaggacctgcctggaggttctccctgggggtggcgggagggggaggcttgaccttttgtcctgaccaggtgggctggaggggacaagccctatccctggcattacgtttctaggtagaatctgggagtgaatttgtcccattccctctctgtagggcttccccacctctcg

SEQ ID NO: 119689 - DNA, 849 bp, Artificial Sequence
  derived and/or modified sequence
atggacgccgtggagcccggcggcagaggctgggccagcatgctggcctgcagactgtggaaggccatcagcagagccctgttcgccgagttcctggccaccggcctgtacgtgttcttcggcgtgggcagcgtgatgagatggcccaccgccctgcccagcgtgctgcagatcgccatcaccttcaacctggtgaccgccatggccgtgcaggtgacctggaaggccagcggcgcccacgccaaccccgccgtgaccctggccttcctggtgggcagccacatcagcctgcccagagccgtggcctacgtggccgcccagctggtgggcgccaccgtgggcgccgccctgctgtacggcgtgatgcccggcgacatcagagagaccctgggcatcaacgtggtgagaaacagcgtgagcaccggccaggccgtggccgtggagctgctgctgaccctgcagctggtgctgtgcgtgttcgccagcaccgacagcagacagaccagcggcagccccgccaccatgatcggcatcagcgtggccctgggccacctgatcggcatccacttcaccggctgcagcatgaaccccgccagaagcttcggccccgccatcatcatcggcaagttcaccgtgcactgggtgttctgggtgggccccctgatgggcgccctgctggccagcctgatctacaacttcgtgctgttccccgacaccaagaccctggcccagagactggccatcctgaccggcaccgtggaggtgggcaccggcgccggcgccggcgccgagcccctgaagaaggagagccagcccggcagcggcgccgtggagatggagagcgtgtag

SEQ ID NO: 119690 - protein, 188 aa, Artificial Sequence [sequence omitted]

SEQ ID NO: 119691 - protein, 186 aa, Artificial Sequence
  derived and/or modified sequence
MEPPRGPPANGAEPSRAVGTVKVYLPNKQRTVVTVRDGMSVYDSLDKALKVRGLNQDCCVVYRLIKGRKTVTAWDTAIAPLDGEELIVEVLEDVPLTMHNFVRKTFFSLAFCDFCLKFLFHGFRCQTCGYKFHQHCSSKVPTVCVDMSTNRQQFYHSVQDLSGGSRQHEAPSNRPLNELLTPQGPR

SEQ ID NO: 119692 - protein, 606 aa, Artificial Sequence [sequence omitted]

SEQ ID NO: 119693 - DNA, 1821 bp, Artificial Sequence
  derived and/or modified sequence
atggagccccccagaggcccccccgccaacggcgccgagcccagcagagccgtgggcaccgtgaaggtgtacctgcccaacaagcagagaaccgtggtgaccgtgagagacggcatgagcgtgtacgacagcctggacaaggccctgaaggtgagaggcctgaaccaggactgctgcgtggtgtacagactgatcaagggcagaaagaccgtgaccgcctgggacaccgccatcgcccccctggacggcgaggagctgatcgtggaggtgctggaggacgtgcccctgaccatgcacaacttcgtgagaaagaccttcttcagcctggccttctgcgacttctgcctgaagttcctgttccacggcttcagatgccagacctgcggctacaagttccaccagcactgcagcagcaaggtgcccaccgtgtgcgtggacatgagcaccaacagacagcagttctaccacagcgtgcaggacctgagcggcggcagcagacagcacgaggcccccagcaacagacccctgaacgagctgctgaccccccagggccccagccccagaacccagcactgcgaccccgagcacttccccttccccgcccccgccaacgcccccctgcagagaatcagaagcaccagcacccccaacgtgcacatggtgagcaccaccgcccccatggacagcaacctgatccagctgaccggccagagcttcagcaccgacgccgccggcagcagaggcggcagcgacggcacccccagaggcagccccagccccgccagcgtgagcagcggcagaaagagcccccacagcaagagccccgccgagcagagagagagaaagagcctggccgacgacaagaagaaggtgaagaacctgggctacagagacagcggctactactgggaggtgccccccagcgaggtgcagctgctgaagagaatcggcaccggcagcttcggcaccgtgttcagaggcagatggcacggcgacgtggccgtgaaggtgctgaaggtgagccagcccaccgccgagcaggcccaggccttcaagaacgagatgcaggtgctgagaaagaccagacacgtgaacatcctgctgttcatgggcttcatgaccagacccggcttcgccatcatcacccagtggtgcgagggcagcagcctgtaccaccacctgcacgtggccgacaccagattcgacatggtgcagctgatcgacgtggccagacagaccgcccagggcatggactacctgcacgccaagaacatcatccacagagacctgaagagcaacaacatcttcctgcacgagggcctgaccgtgaagatcggcgacttcggcctggccaccgtgaagaccagatggagcggcgcccagcccctggagcagcccagcggcagcgtgctgtggatggccgccgaggtgatcagaatgcaggaccccaacccctacagcttccagagcgacgtgtacgcctacggcgtggtgctgtacgagctgatgaccggcagcctgccctacagccacatcggctgcagagaccagatcatcttcatggtgggcagaggctacctgagccccgacctgagcaagatcagcagcaactgccccaaggccatgagaagactgctgagcgactgcctgaagttccagagagaggagagacccctgttcccccagatcctggccaccatcgagctgctgcagagaagcctgcccaagatcgagagaagcgccagcgagcccagcctgcacagaacccaggccgacgagctgcccgcctgcctgctgagcgccgccagactggtgccctag

SEQ ID NO: 119694 - DNA, 1821 bp, Artificial Sequence
  derived and/or modified sequence
atggaacctccgcgcgggccacctgcgaacggcgctgagcccagccgcgcagtcgggaccgttaaagtgtatctgcctaacaaacaacggacagtggtgacagtacgtgatgggatgagcgtctacgacagtttggacaaggccctgaaagtgcggggcctgaatcaggactgttgcgtggtatacaggcttattaagggaagaaagacagtaactgcctgggatactgccatcgcaccactggacggcgaggagctcatcgtggaggttctggaggatgtacctcttactatgcacaacttcgtgagaaaaaccttcttctcactcgcgttctgcgacttctgccttaagttcttattccacggttttagatgccaaacgtgcggatataaatttcaccagcactgcagctctaaggtccctacagtgtgtgtggatatgtccacaaaccgacagcagttctatcactccgtgcaggatctgtcaggcggctctagacagcacgaggcaccttctaataggcccctaaatgagttgcttacaccacaggggccatcaccaaggacccagcactgtgaccccgagcatttccctttcccagcccccgctaatgcacccctgcagaggatccgcagtacaagtacgcccaacgtccatatggtctcaacaaccgcccccatggactccaacttgattcagctaacagggcagagtttctctactgacgcggcaggcagtcgcggcggcagtgacggaactccccggggcagccccagccctgcctccgtgagctcgggccggaaatccccgcactctaagtcacccgctgagcagagagaaaggaaatcactcgcagatgataagaagaaagtgaagaatctggggtacagggactccggatattactgggaggtccccccatctgaagtacagcttctgaagaggatcgggaccggctccttcggaacggtgttcaggggaaggtggcatggagatgtcgctgtgaaagtcttgaaggtgagtcagcccactgccgagcaggcccaagcctttaagaacgaaatgcaggtactacgaaagacgcggcacgtcaacatcctgctgtttatgggcttcatgacacgaccgggttttgccataatcacccagtggtgtgagggtagcagcttgtaccatcacctgcacgtggcagacactcggttcgacatggtgcagctgattgatgtggccaggcagactgcgcagggtatggactacctgcacgccaaaaatataatccatcgcgatctgaagagtaacaacatcttcctgcatgagggcctgacagtaaaaatcggtgacttcggtctcgccacggtgaaaacacggtggtctggcgcacagcctttggaacagccctctgggtccgtcctgtggatggccgccgaggttatcagaatgcaggacccaaacccttactcgttccagtccgatgtttatgcctacggtgtggtactgtatgaactaatgactggcagcttgccatactcacacattggttgtcgcgatcagattatttttatggtgggcagaggatacttaagccctgacctgtctaagatctcttctaactgcccaaaagcgatgcgaagactgctcagtgattgtcttaagtttcagcgggaggagagacccctgtttccccagattctagctaccatcgagctgctccagagatccctgccaaaaattgagcgcagcgcatctgagcccagcctccatagaactcaggccgatgaattgcctgcctgtctgctatctgccgcaaggctggtcccgtag

SEQ ID NO: 119695 - DNA, 2458 bp, Artificial Sequence
  derived and/or modified sequence
tgacccaataagggtggaaggctgagtcccgcagagccaataacgagagtccgagaggcgacggaggcggactctgtgaggaaacaagaagagaggcccaagatggagacggcggcggctgtagcggcgtgacaggagccccatggcacctgcccagccccacctcagcccatcttgacaaaatctaaggctccatggagccaccacggggcccccctgccaatggggccgagccatcccgggcagtgggcaccgtcaaagtatacctgcccaacaagcaacgcacggtggtgactgtccgggatggcatgagtgtctacgactctctagacaaggccctgaaggtgcggggtctaaatcaggactgctgtgtggtctaccgactcatcaagggacgaaagacggtcactgcctgggacacagccattgctcccctggatggcgaggagctcattgtcgaggtccttgaagatgtcccgctgaccatgcacaattttgtacggaagaccttcttcagcctggcgttctgtgacttctgccttaagtttctgttccatggcttccgttgccaaacctgtggctacaagttccaccagcattgttcctccaaggtccccacagtctgtgttgacatgagtaccaaccgccaacagttctaccacagtgtccaggatttgtccggaggctccagacagcatgaggctccctcgaaccgccccctgaatgagttgctaaccccccagggtcccagcccccgcacccagcactgtgacccggagcacttccccttccctgccccagccaatgcccccctacagcgcatccgctccacgtccactcccaacgtccatatggtcagcaccacggcccccatggactccaacctcatccagctcactggccagagtttcagcactgatgctgccggtagtagaggaggtagtgatggaaccccccgggggagccccagcccagccagcgtgtcctcggggaggaagtccccacattccaagtcaccagcagagcagcgcgagcggaagtccttggccgatgacaagaagaaagtgaagaacctggggtaccgggactcaggctattactgggaggtaccacccagtgaggtgcagctgctgaagaggatcgggacgggctcgtttggcaccgtgtttcgagggcggtggcatggcgatgtggccgtgaaggtgctcaaggtgtcccagcccacagctgagcaggcccaggctttcaagaatgagatgcaggtgctcaggaagacgcgacatgtcaacatcttgctgtttatgggcttcatgacccggccgggatttgccatcatcacacagtggtgtgagggctccagcctctaccatcacctgcatgtggccgacacacgcttcgacatggtccagctcatcgacgtggcccggcagactgcccagggcatggactacctccatgccaagaacatcatccaccgagatctcaagtctaacaacatcttcctacatgaggggctcacggtgaagatcggtgactttggcttggccacagtgaagactcgatggagcggggcccagcccttggagcagccctcaggatctgtgctgtggatggcagctgaggtgatccgtatgcaggacccgaacccctacagcttccagtcagacgtctatgcctacggggttgtgctctacgagcttatgactggctcactgccttacagccacattggctgccgtgaccagattatctttatggtgggccgtggctatctgtccccggacctcagcaaaatctccagcaactgccccaaggccatgcggcgcctgctgtctgactgcctcaagttccagcgggaggagcggcccctcttcccccagatcctggccacaattgagctgctgcaacggtcactccccaagattgagcggagtgcctcggaaccctccttgcaccgcacccaggccgatgagttgcctgcctgcctactcagcgcagcccgccttgtgccttaggccccgcccaagccaccagggagccaatctcagccctccacgccaaggagccttgcccaccagccaatcaatgttcgtctctgccctgatgctgcctcaggatcccccattccccaccctgggagatgagggggtccccatgtgcttttccagttcttctggaattgggggacccccgccaaagactgagccccctgtctcctccatcatttggtttcctcttggctttggggatacttctaaattttgggagctcctccatctccaatggctgggatttgtggcagggattccactcagaacctctctggaatttgtgcctgatgtgccttccactggattttggggttcccagcaccccatgtggattttggggggtcccttttgtgtctcccccgccattcaaggactcctctctttcttcaccaagaagcacagaattc

SEQ ID NO: 119696 - DNA, 1821 bp, Artificial Sequence
  derived and/or modified sequence
atggagcccccccggggccccccagccaacggggctgagcccagcagagctgtgggcaccgtgaaggtgtacctgcccaacaagcagaggacagtggtgacagtgagagatggcatgtctgtgtatgacagcctggacaaggccctgaaggtgcggggcctgaaccaggactgctgcgtggtgtaccgcctcatcaagggcaggaagacagtgacagcctgggacacagccatcgcccccctggatggagaggagctgattgtggaggtgctggaggatgtgcccctgaccatgcacaactttgtgaggaagaccttcttcagcctggccttctgtgacttctgcctgaagttcctgttccacggcttccgctgccagacctgtggctacaagttccaccagcactgcagcagcaaggtgcccaccgtgtgtgtggacatgagcaccaaccggcagcagttctaccacagcgtgcaggacctgagcggcggcagccggcagcacgaggcccccagcaaccggcccctgaatgagctgctgaccccccagggccccagccccaggacccagcactgtgaccctgagcacttccccttccctgccccagccaatgcccccctgcagaggatccgcagcaccagcaccccaaatgtgcacatggtgtccaccacagcccccatggacagcaacctgatccagctgaccggccagagcttcagcacagatgctgctggcagccggggcggcagtgatggcaccccccggggcagccccagccctgcctctgtgagcagcggcaggaagagcccccacagcaagagccctgctgagcagcgggagaggaagagcctggctgatgacaagaagaaggtgaagaacctgggctacagagattctggctactactgggaggtgccccccagcgaggtgcagctgctgaagagaattggcaccggcagctttggaacagtgttccggggccgctggcatggagatgtggccgtgaaggtgctgaaggtgtcccagcccacagctgagcaggcccaggccttcaagaatgagatgcaggtgctgaggaagaccaggcatgtgaacatcctgctcttcatgggcttcatgacccggcccggctttgccatcatcacccagtggtgtgagggcagcagcctgtaccaccacctgcacgtggccgacaccaggtttgacatggtgcagctgattgatgtggcccggcagacagcccagggcatggactacctgcacgccaagaacatcatccaccgggacctgaagagcaacaacatcttcctgcacgagggcctgactgtgaagattggagactttggcctggccaccgtgaagacccgctggagcggggcccagcccctggagcagcccagcggctctgtgctgtggatggctgctgaggtgatccgcatgcaggaccccaacccctacagcttccagagtgatgtgtatgcctatggagtggtgctgtatgagctgatgacaggcagcctgccctacagccacatcggctgccgggaccagatcatcttcatggtgggccggggctacctgagcccagacctgagcaagatcagcagcaactgccccaaggccatgaggcggctgctgagtgactgcctgaagttccagcgggaggagcggcccctcttcccccagatcctggccaccatcgagctgctgcagaggagcctgcccaagattgaaagaagtgccagcgagcccagcctgcacaggacccaggctgatgagctgcctgcctgcctgctgtctgctgcccggctggtgccctag

SEQ ID NO: 119697 - DNA, 1821 bp, Artificial Sequence
  derived and/or modified sequence
atggagcccccccggggcccccccgccaacggcgccgagcccagccgcgccgtgggaacagttaaggtctatctccctaataaacagagaaccgtggttaccgtccgggatggaatgagtgtatacgacagcctcgataaggcccttaaagtccggggacttaaccaggattgttgcgtggtgtatagactcatcaaaggcaggaagacagtgaccgcctgggatacagccatcgctcccctggacggagaggaattaatcgtggaggtattggaagacgtacctttgactatgcataactttgtacgcaagacttttttttctctcgccttctgcgacttttgcctgaagtttctgttccatggtttcaggtgtcagacatgtggttacaaatttcatcagcattgtagcagtaaggtgcccacagtgtgcgtcgatatgagtaccaatcgccagcagttctatcattccgtgcaggacttgtccggtggctccagacagcatgaggctccgagtaaccggcctttgaacgagttgctgactccccagggaccttcacctcggacacaacattgtgatccagagcactttccgttccctgcacctgctaatgcccctcttcaacgaatccggtctacttctaccccaaatgtccatatggtatccacaaccgcccctatggactctaacctgatccaactgaccgggcagtccttttcaacagatgcggcagggtcacgcggtgggtccgacgggacacctcgcggctcaccgagtcctgcgtccgtgagtagcgggcgcaaatctccacacagtaaaagtcctgcggagcaaagggagaggaagtcactggcggatgataaaaaaaaggtaaaaaacctcggatatcgtgatagcggctactactgggaagtgccacctagtgaggtacagctgctgaaaaggatcggcaccggctcctttgggacagtatttcgggggaggtggcatggggacgtcgctgtgaaagtgctcaaagtgagccagcccacagctgaacaggcacaagccttcaagaacgagatgcaggttttgcgcaaaacaagacacgtgaacatactgctgtttatgggtttcatgactcgacctgggttcgccatcataacacagtggtgcgaggggagtagcttgtaccaccacctgcacgttgccgacactcgcttcgacatggtacaactcattgacgtcgcccggcagaccgcacagggaatggactacctccacgcgaaaaacattatccaccgagacctaaagagcaataatatttttcttcatgagggcctgacagtgaagattggcgactttggactggcaaccgtcaagaccagatggtccggcgcccaaccgttggagcagcccagcggcagcgtgctctggatggccgcggaggtgattcggatgcaagaccctaatccttacagctttcagagtgatgtctacgcatatggtgtagtcctctacgagttaatgaccggctctctgccgtattctcacatcggttgccgcgaccagattattttcatggttggccggggatacctcagccctgacctgtcaaaaatctctagcaactgccccaaggctatgcgcaggctcctctctgattgtctcaagttccaaagggaagagcggccactctttccacagatactggccactatagaacttctccaacggtccctgccaaagattgaaaggagtgccagcgagccttctctgcacaggactcaggcagatgagctgccagcctgtttgctgtccgctgcccgcttggtgccctag

SEQ ID NO: 119698 - DNA, 1821 bp, Artificial Sequence
  derived and/or modified sequence
atggagcccccacgaggacctcctgcgaacggggctgagcctagccgcgcagtaggcaccgtgaaggtctacctccctaataaacaacgtactgtcgtgacagttagggatggaatgtcagtctacgactcccttgataaggcactcaaggtgagaggactcaatcaggattgttgcgtcgtgtatcggttgatcaagggcaggaaaactgtcactgcttgggatactgctatagccccattggatggagaggaattgatagtggaggtgttggaagatgtgcccctaacaatgcataattttgtcaggaagactttctttagtcttgcattctgcgatttctgcctgaagttcctgtttcacggctttagatgtcagacttgtggatacaaattccatcagcattgttcttcgaaggtgccaacagtttgcgttgatatgagcacgaacagacagcaattttatcactctgttcaggatctcagcggtggcagccgtcaacacgaggccccaagcaacagaccgttgaatgaactgttgactccccaagggcctagcccccgaacccagcattgcgacccagaacactttccctttccggctcctgccaacgctccgcttcagcggattcggtctacatctacgcctaacgtgcacatggtttccacaactgcccctatggattctaacctgattcagctgacagggcagtctttcagtaccgatgcagcaggctcacgaggcggttctgatgggacccctcgtggctctccaagcccagcttctgtgtcctcagggaggaaatctcctcatagcaaatctcccgctgaacagcgggagaggaagtctttggctgacgacaagaagaaggtaaaaaaccttggctaccgcgactcaggttattactgggaagtcccccctagcgaggtgcagttgctgaaacgtattggaaccggtagctttggaaccgttttcaggggacgctggcatggcgatgttgccgtgaaggtgttgaaagttagtcagcccaccgccgagcaagcacaggctttcaagaacgaaatgcaggtgcttagaaagacccggcacgtgaacatactcctcttcatggggtttatgactcggcctggcttcgcaattatcacccagtggtgcgaaggcagctccctctaccaccatctgcatgtggccgacaccaggtttgacatggtccagctcatcgacgttgcaaggcagacggctcagggcatggattatctccacgcaaagaacatcatccatagggatctcaaaagtaacaatattttcttgcacgaagggctaacagtgaaaatcggagactttggtctggccacagttaagactcggtggagtggggcacagccccttgagcagccaagcggaagtgtgctttggatggcagccgaagttatacggatgcaagacccaaacccttatagctttcaatccgacgtgtacgcttacggagtcgtcctctacgaattgatgaccggatcattgccatactcacatatcgggtgccgagaccagattatcttcatggtggggagagggtacctctcaccagatttatcgaagatttcctctaattgtcccaaggccatgcgcagactgctgagcgactgtctgaaatttcagcgggaggagagaccccttttcccacagattctggcgactatagagctcctgcaacgcagtttacctaagatcgagcggtccgctagcgagccttcactgcataggacgcaggctgacgagctgccagcctgcctgttgtctgctgccaggctggtgccttag

SEQ ID NO: 119699 - protein, 511 aa, Artificial Sequence
  derived and/or modified sequence
MVLLAAAVCTKAGKAIVSRQFVEMTRTRIEGLLAAFPKLMNTGKQHTFVETESVRYVYQPMEKLYMVLITTKNSNILEDLETLRLFSRVIPEYCRALEENEISEHCFDLIFAFDEIVALGYRENVNLAQIRTFTEMDSHEEKVFRAVRETQEREAKAEMRRKAKELQQARRDAERQGKKAPGFGGFGSSAVSGGSTAAMITETIIETDKPKVAPAPARPSGPSKALKLGAKGKEVDNFVDKLKSEGETIMSSSMGKRTSEATKMHAPPINMESVHMKIEEKITLTCGRDGGLQNMELHGMIMLRISDDKYGRIRLHVENEDKKGVQLQTHPNVDKKLFTAESLIGLKNPEKSFPVNSDVGVLKWRLQTTEESFIPLTINCWPSESGNGCDVNIEYELQEDNLELNDVVITIPLPSGVGAPVIGEIDGEYRHDSRRNTLEWCLPVIDAKNKSGSLEFSIAGQPNDFFPVQVSFVSKKNYCNIQVTKVTQVDGNSPVRFSTETTFLVDKYEIL

SEQ ID NO: 119700 - protein, 552 aa, Artificial Sequence
  derived and/or modified sequence
MAECNLVAILISSIDNPLDKNLDNGGNSCLDFRPLNSFSQPQVLLAAAVCTKAGKAIVSRQFVEMTRTRIEGLLAAFPKLMNTGKQHTFVETESVRYVYQPMEKLYMVLITTKNSNILEDLETLRLFSRVIPEYCRALEENEISEHCFDLIFAFDEIVALGYRENVNLAQIRTFTEMDSHEEKVFRAVRETQEREAKAEMRRKAKELQQARRDAERQGKKAPGFGGFGSSAVSGGSTAAMITETIIETDKPKVAPAPARPSGPSKALKLGAKGKEVDNFVDKLKSEGETIMSSSMGKRTSEATKMHAPPINMESVHMKIEEKITLTCGRDGGLQNMELHGMIMLRISDDKYGRIRLHVENEDKKGVQLQTHPNVDKKLFTAESLIGLKNPEKSFPVNSDVGVLKWRLQTTEESFIPLTINCWPSESGNGCDVNIEYELQEDNLELNDVVITIPLPSGVGAPVIGEIDGEYRHDSRRNTLEWCLPVIDAKNKSGSLEFSIAGQPNDFFPVQVSFVSKKNYCNIQVTKVTQVDGNSPVRFSTETTFLVDKYEIL

SEQ ID NO: 119701 - protein, 423 aa, Artificial Sequence
  derived and/or modified sequence
MIPEYCRALEENEISEHCFDLIFAFDEIVALGYRENVNLAQIRTFTEMDSHEEKVFRAVRETQEREAKAEMRRKAKELQQARRDAERQGKKAPGFGGFGSSAVSGGSTAAMITETIIETDKPKVAPAPARPSGPSKALKLGAKGKEVDNFVDKLKSEGETIMSSSMGKRTSEATKMHAPPINMESVHMKIEEKITLTCGRDGGLQNMELHGMIMLRISDDKYGRIRLHVENEDKKGVQLQTHPNVDKKLFTAESLIGLKNPEKSFPVNSDVGVLKWRLQTTEESFIPLTINCWPSESGNGCDVNIEYELQEDNLELNDVVITIPLPSGVGAPVIGEIDGEYRHDSRRNTLEWCLPVIDAKNKSGSLEFSIAGQPNDFFPVQVSFVSKKNYCNIQVTKVTQVDGNSPVRFSTETTFLVDKYEIL

SEQ ID NO: 119702 - DNA, 1536 bp, Artificial Sequence
  derived and/or modified sequence
atggtgcttctggctgccgctgtttgcacaaaagcagggaaggctatcgttagtagacagtttgttgaaatgacacggacacgtattgaaggactgctggctgccttccccaaattgatgaataccgggaagcaacacacctttgtggagaccgaaagtgtacggtacgtttatcagcctatggaaaaactgtatatggtgctaattactaccaaaaactctaatattttggaagatctggaaaccttacggctgttcagtagagtcataccagagtactgtcgtgccctcgaagagaatgagattagcgaacactgtttcgatctgatatttgccttcgacgaaattgtggctttgggatatcgggagaatgtgaacctggcccagattagaacttttacagaaatggacagtcatgaggaaaaggtcttccgcgccgtgcgagaaactcaggaacgcgaggccaaggccgagatgaggcgcaaagcaaaagagctgcagcaggcgagaagggacgcagagcgtcagggtaaaaaagcaccagggtttggcggatttggctcatccgcggtctctggggggtccacagctgctatgattactgagaccataattgagacagataagcccaaggtggcacccgcacctgcacgaccttctgggcctagtaaagccctgaagctaggggcgaaaggtaaggaggtggacaatttcgtagataaactcaaatctgagggagagaccatcatgagtagcagtatgggcaaacggacatctgaagccacgaagatgcacgctccacctattaatatggagtccgtccacatgaagattgaagaaaaaatcacactcacttgtggacgcgacggcggactccagaacatggagctgcacggcatgatcatgctgcgaatttccgacgataaatacggacggatcaggctccatgtggaaaatgaggataagaaaggcgttcagttacaaacccaccctaacgttgacaagaagctcttcactgcggagagcctgattggcttaaaaaaccctgagaagagcttccccgtgaactccgacgtgggtgttctcaagtggcggctgcaaaccactgaagaatcatttatccccctgactatcaattgctggccctcagaaagtgggaatggatgcgatgtgaacattgagtatgaactccaggaagacaacctggaacttaatgatgtagttattacaatccccctgccatcaggagtgggggccccagtaatcggggaaattgatggcgaatatcgtcatgactcacgccgtaacaccctggagtggtgtctgcctgtcatcgacgccaaaaacaagtcagggagcctcgagtttagtatagcaggacagccgaacgacttctttccggtgcaggtttcattcgtgagcaaaaaaaactattgtaatattcaggttaccaaagtgacccaggtcgacggaaactcgcccgttagatttagtaccgagaccactttccttgtcgataaatatgaaatactgtag

SEQ ID NO: 119703 - DNA, 1659 bp, Artificial Sequence
  derived and/or modified sequence
atggccgagtgcaatctggtcgcaatcttgattagtagcattgacaaccctcttgacaagaatttggataacgggggcaatagctgtctggactttcggcctctaaattctttctcccaaccacaggtgctgctggctgctgcagtatgcaccaaggccgggaaggccatcgtatccagacagttcgtggagatgacccggacccgaatagagggactgctagccgcattccctaaactaatgaataccgggaaacaacacacattcgtggaaacagagtctgtgaggtatgtgtaccagccgatggagaaattgtacatggttctcatcactactaagaacagtaacattctagaggatctggaaacactgcgccttttctcacgggtcatacctgaatactgcagggctctggaggaaaatgagattagcgaacactgcttcgacctaatctttgcatttgatgaaatcgtagcactgggctacagagaaaacgtgaatctggcacagattcggacatttacggaaatggactctcacgaggaaaaggtttttagggctgttcgagagacacaggaacgggaggccaaggccgaaatgcggcgtaaagccaaggagctgcagcaagcacgacgggacgctgaaagacagggcaaaaaggcccccggatttggtggcttcggctcgagcgcggtttcaggtggttccactgctgctatgattaccgagaccattatcgaaacagataaacctaaggttgcgcctgcccctgccaggccatccggtccctctaaagctctgaagctcggtgccaaggggaaggaggtcgataactttgttgataaacttaagtcggagggcgaaacaatcatgtcttcaagcatggggaaacggaccagcgaggctactaaaatgcatgcaccaccaattaatatggagtctgtgcatatgaagattgaggagaagatcaccctgacctgtggaagggatggcggcctgcagaacatggagctgcatgggatgattatgctacggataagcgacgataagtatgggcgcatccgactgcacgtggaaaatgaagataagaaaggggtgcagctgcagacccatcctaatgtagataaaaagctgttcaccgctgaaagtctgattgggttgaaaaacccagaaaaatcctttccagttaattctgacgttggcgtgctaaagtggcgcctccaaacgacagaggaatctttcatccccctgaccattaactgctggccttccgaatctggcaacggctgcgatgttaatatcgaatacgagctacaggaggacaatctggagttaaatgacgtagtcatcacaatccccctcccttctggcgtaggcgctccagtgattggggagatcgacggagagtacaggcatgacagtcgaaggaacacattggagtggtgtctgccggttatagacgccaagaataagtcgggcagtctggaattttctatcgccgggcagcctaacgactttttccctgtgcaggtgtctttcgtcagcaagaaaaattattgtaatatccaggtcaccaaggtgacccaggtggacggcaattctcccgtgcgcttcagtaccgaaacaacatttctagtggataaatatgagatcttatag

SEQ ID NO: 119704 - DNA, 1536 bp, Artificial Sequence
  derived and/or modified sequence
atggtgctgctggccgctgctgtgtgcaccaaggccggcaaggccatcgtgtcccggcagtttgtggagatgaccaggaccagaattgagggcctgctggccgccttccccaagctgatgaacacaggcaagcagcacacctttgtggagacagaatctgtgcgctacgtgtaccagcccatggagaagctgtacatggtgctgatcaccaccaagaacagcaacatcctggaggacctggagaccctgcggctcttcagcagggtcatccctgagtactgccgggccctggaggagaatgagatcagcgagcactgctttgacctgatctttgcctttgatgagatcgtggccctgggctacagagaaaatgtgaacctggcccagatccgcaccttcacagagatggacagccatgaggagaaggtgttccgggctgtgcgggagacccaggagcgggaggccaaggccgagatgaggaggaaggccaaggagctgcagcaggccaggagagatgctgagcggcagggcaagaaggcccctggctttggaggcttcggcagcagcgctgtgtctgggggcagcacagctgccatgatcacagagaccatcattgaaacagacaagcccaaggtggccccagccccagcccggcccagcggccccagcaaggccctgaagctgggcgccaagggcaaggaggtggacaactttgtggacaagctgaagtctgagggggagaccatcatgagcagctccatgggcaagaggaccagcgaggccaccaagatgcacgccccacccatcaacatggagagcgtgcacatgaagattgaggagaagatcaccctgacctgtggcagagatggcggcctgcagaacatggagctgcacggcatgatcatgctgcgcatcagtgatgacaagtatggccgcatccggctgcacgtggagaatgaagacaagaagggcgtgcagctgcagacccaccccaacgtggacaagaagctgttcaccgctgagagcctcatcggcctgaagaaccctgagaagagcttccctgtgaacagtgatgtgggcgtgctgaagtggaggctgcagaccacagaggagagcttcatccccctgaccatcaactgctggcccagcgagagcggaaatggctgtgatgtgaacattgaatatgagctgcaggaggacaacctggagctgaatgatgtggtgatcaccatccccctgcccagcggcgtgggcgcccctgtgattggagaaattgatggagagtacagacatgacagcagaagaaacaccctggagtggtgcctgcctgtgattgatgccaagaacaagagcggcagcctggagttcagcattgctggccagcccaatgacttcttccctgtgcaggtgtcctttgtgtccaagaagaactactgcaacatccaggtgaccaaggtgacccaggtggatggcaacagccctgtgcgcttcagcacagagaccaccttcctggtggacaagtatgagatcctgtag

SEQ ID NO: 119705 - DNA, 1659 bp, Artificial Sequence
  derived and/or modified sequence
atggccgagtgcaacctggtggccatcctgatcagcagcattgacaaccccctggacaagaacctggacaatggaggcaacagctgcctggacttccggcccctgaacagcttcagccagccccaggtgctgctggccgctgctgtgtgcaccaaggccggcaaggccatcgtgtcccggcagtttgtggagatgaccaggacccgcatcgagggcctgctggccgccttccccaagctgatgaacacaggcaagcagcacacctttgtggagacagagagcgtgcgctacgtgtaccagcccatggagaagctgtacatggtgctgatcaccaccaagaacagcaacatcctggaggacctggagaccctgcggctcttcagcagggtcatccctgagtactgccgggccctggaggagaatgagatcagcgagcactgctttgacctgatctttgcctttgatgaaattgtggccctgggctaccgggagaatgtgaacctggcccagatccgcaccttcacagagatggacagccatgaggagaaggtgttccgggctgtgcgggagacccaggagcgggaggccaaggccgagatgaggaggaaggccaaggagctgcagcaggccaggagagatgctgagcggcagggcaagaaggcccctggctttggaggcttcggcagcagcgctgtgtctgggggcagcacagctgccatgatcacagagaccatcatcgagacagacaagcccaaggtggccccagccccagcccggcccagcggccccagcaaggccctgaagctgggcgccaagggcaaggaggtggacaactttgtggacaagctgaagtctgagggggagaccatcatgagcagctccatgggcaagaggaccagcgaggccaccaagatgcacgccccacccatcaacatggagagcgtgcacatgaagattgaggagaagatcaccctgacctgtggcagagatggcggcctgcagaacatggagctgcacggcatgatcatgctgcgcatcagtgatgacaagtatggccgcatccggctgcacgtggagaatgaagacaagaagggcgtgcagctgcagacccaccccaacgtggacaagaagctgttcaccgctgagagcctgattggcctgaagaaccctgagaagagcttccctgtgaacagtgatgtgggcgtgctgaagtggaggctgcagaccacagaggagagcttcatccccctgaccatcaactgctggcccagcgagagcggaaatggctgtgatgtgaacatcgagtatgagctgcaggaggacaacctggagctgaatgatgtggtgatcaccatccccctgcccagcggcgtgggcgcccctgtgattggagaaattgatggagagtacagacatgacagcagaagaaacaccctggagtggtgcctgcctgtgattgatgccaagaacaagagcggcagcctggagttcagcattgctggccagcccaatgacttcttccctgtgcaggtgtcctttgtgtccaagaagaactactgcaacatccaggtgaccaaggtgacccaggtggatggcaacagccctgtgcgcttcagcacagagaccaccttcctggtggacaagtatgagatcctgtag

SEQ ID NO: 119706 - DNA, 1536 bp, Artificial Sequence
  derived and/or modified sequence
atggtgctgctggccgccgccgtgtgcaccaaggccggcaaggccatcgtgagccgacagtttgtcgagatgacgcgcacgcgaatagaaggcctcttggccgcgtttccaaaacttatgaataccggaaagcaacacactttcgtcgagaccgagagcgtcaggtacgtgtaccaaccaatggagaaattatacatggttctgatcactaccaaaaacagcaacattctggaggatctcgaaaccttgcgactatttagtcgggtgatcccagagtactgcagggctctggaggagaatgaaattagtgagcactgctttgacctaattttcgctttcgacgaaattgtggccctggggtatagagagaatgtcaatctagcccaaatccggacattcaccgaaatggatagccacgaggaaaaagtgtttagagccgtccgcgagacccaggagcgagaagccaaagcagagatgcggagaaaagccaaggagttgcagcaagcacgaagagacgccgaacgacagggcaaaaaagcacccgggtttggtggatttggctcatctgccgtgtccggggggtcaacggcggcgatgattacagagaccatcatcgagacagataaacccaaggtggcccccgccccagcaagacctagtgggccttctaaagccctgaaactgggcgccaagggtaaggaggtcgacaactttgtggacaagctaaagagcgaaggggaaaccattatgagctcgagcatgggcaagaggacttcagaggccaccaagatgcacgcccctcccatcaacatggagagcgtacatatgaagatcgaagagaaaatcactctgacttgcggccgtgatggtgggctccaaaacatggagctccatggcatgatcatgctgaggatttctgacgacaagtatggacggattagattacatgtcgagaacgaggacaaaaaaggcgtgcagctgcagacacaccctaatgtcgacaagaaattattcacagccgagtctctcatcgggctgaagaaccccgaaaagtccttcccagttaacagtgacgtgggcgtgcttaagtggcggttacagactacagaagagtcattcattcctctcactatcaattgctggccctctgaaagtggtaatggctgtgatgttaacattgagtacgagctgcaggaagacaatctcgagttgaacgatgtggtgattactatacccttgcctagtggagtaggtgccccggtgattggggagattgatggcgaataccgacacgatagtcgaagaaacactcttgagtggtgcttgccagtcatcgacgccaagaataaatctggcagcctcgagttttcgatagccgggcagcctaacgatttttttcctgtccaggtaagctttgtgagcaagaagaactattgcaacatccaggtcactaaggtcacccaagtcgatggaaacagtccagtcaggttcagcaccgaaactaccttcctggtggataagtacgagatcctgtag

SEQ ID NO: 119707 - DNA, 1659 bp, Artificial Sequence
  derived and/or modified sequence
atggccgagtgcaacctggtggccatcctgatcagcagcatcgacaaccctctcgataaaaacctggacaacgggggaaatagttgcctggactttcggccgctcaacagcttcagccagccacaggtgctgctcgctgcagccgtgtgtacaaaggctggcaaggcaatcgtgtccagacagttcgttgaaatgaccagaactagaatcgagggactccttgcagcctttcctaaactcatgaacactggcaaacagcacaccttcgtggaaaccgaatctgtgcgatatgtctaccaacctatggaaaaactgtatatggtgttgataaccactaagaattccaacattctcgaagaccttgagacactccgactcttctcccgcgtgataccagaatattgccgagccctcgaggagaacgaaataagcgaacattgcttcgacttgattttcgctttcgatgaaatagttgcgctgggatatagagagaatgtgaatttagcccagatccgaacatttaccgaaatggactctcacgaggagaaggtgttcagggcagtacgcgagacccaagaaagggaggcgaaggccgagatgcgtcgtaaggccaaagaactccagcaggctagacgcgacgctgagcggcagggaaagaaggcccctggatttggaggtttcggaagtagcgctgtttctggtggctctaccgcggcaatgattacagagacgatcatcgaaaccgataagccaaaggtagctccagctcccgccaggccctcaggccctagcaaagcactcaaacttggggccaaaggaaaagaagtcgacaattttgtggacaaactgaagagcgaaggagagacaataatgtcctccagcatggggaagcgcacaagtgaggctaccaagatgcatgcccctcctatcaatatggagagcgttcatatgaagatagaagaaaagatcacccttacttgcggcagagatggaggactgcaaaacatggagctgcacggaatgatcatgcttagaatctctgatgataagtacggccgaattcgactccatgtggagaatgaagacaagaagggggtccagctccagacgcatcctaacgtggacaagaaactgtttactgccgaaagccttatcggcctaaaaaacccggagaagtccttcccagttaattccgacgtgggcgtgctgaagtggcgactgcaaacaacagaagagtctttcatccccttgactataaattgttggccttcagaaagcggcaacggttgcgatgtgaacatcgagtacgaactgcaggaggacaaccttgaactaaatgatgtggtcatcacaattccgctgccctcgggcgtgggggcccccgtgattggggagattgatggcgagtatcggcacgacagccgccgtaacacactggaatggtgccttcccgtgatcgacgccaagaataaatctggttccctcgaattctccatagcaggacagcctaacgacttcttccccgtgcaggttagctttgtttcgaaaaagaactactgtaatatccaggtgacgaaagtcactcaggtggacggcaactctccggttagattctctactgaaacaaccttccttgttgacaaatatgagattctttag

SEQ ID NO: 119708 - DNA, 1536 bp, Artificial Sequence
  derived and/or modified sequence
atggtgttgctggccgctgcagtatgtaccaaggccggtaaggctattgtttcgcgacagtttgtggaaatgacaaggacccgtatcgagggattattagccgcattccccaagttgatgaatactggcaaacagcacacgtttgtcgaaacagagtccgttaggtacgtgtatcagcccatggagaagctgtacatggtcctgattaccaccaagaacagtaacattctggaggaccttgaaaccctgagactgttttctcgagttataccagaatactgcagagctctggaagaaaatgaaatatcggagcattgcttcgacctgatcttcgcgttcgacgagattgtggccctcggctaccgcgagaacgtgaacctagcccagattcgcactttcaccgagatggatagtcacgaagagaaagtgttcagggccgtgcgggagacccaggaacgggaagccaaggccgagatgagacgtaaggccaaggagctgcaacaggctcgtcgggatgcagagcggcagggcaagaaggctcccggtttcggaggcttcggctcttccgctgtctctggtggcagtacagctgctatgatcaccgaaactataatcgagaccgacaagcccaaggttgctccagcccctgccaggccgtctggcccttcaaaagctctgaagctgggcgcaaaaggaaaggaagtggataactttgtggataagctaaagagcgagggggaaaccatcatgtcttctagtatgggaaagcggactagtgaggccactaagatgcatgcacctcctatcaatatggaatccgtgcatatgaagattgaggaaaaaattacactcacctgcggcagggacggcggactgcagaacatggaactgcatggcatgatcatgctcaggatctccgacgacaagtacgggcgtatcaggttacacgtggaaaatgaggacaagaaaggggtacagctgcagacccatccaaatgtggacaagaaactcttcacagcggaatctctaattggccttaagaaccccgaaaaaagctttcccgtgaatagtgatgtgggggtcttaaagtggcggttgcagaccaccgaggaatcttttattcccttgacaatcaattgctggccaagcgaaagtgggaacggctgtgatgtgaacatcgaatatgaacttcaggaggataatcttgagcttaacgatgtggtgatcacgatcccgttgcctagcggtgtgggcgcacctgtcattggagaaatcgatggcgaatatagacacgattcccgaagaaacactctggagtggtgcctgcccgtaattgacgccaaaaataaaagcggtagccttgagttttccattgcgggacagcccaacgacttttttcctgtgcaggtctcatttgttagcaagaagaactactgtaatattcaggtcactaaagttacccaggtcgacggaaacagtcccgtgcgattctccaccgagactacgttcctggttgacaaatacgagatactgtag

SEQ ID NO: 119709 - DNA, 1659 bp, Artificial Sequence
  derived and/or modified sequence
atggccgaatgcaacctggtagctatcctcatttctagcattgataaccctctggacaagaatctggataatgggggtaactcctgcttagactttcgacctctgaactcctttagtcagccccaagtgctgctagctgccgcagtgtgtacaaaggctggaaaggccatcgtatctcgccagttcgtggagatgacccggacaagaatcgaagggctcctggcagcctttccgaagctcatgaacaccgggaaacagcatactttcgtcgagacagagagcgttcgatatgtgtaccaacctatggagaagctctatatggtgctgattacaaccaagaactctaatatattggaggatctggagactttaagattatttagtcgtgtaataccggagtattgtcgtgcgctggaggagaacgagatctctgagcattgtttcgatctcatctttgccttcgatgaaatcgtggctctggggtatcgggagaacgtaaatttggcccagatccggacctttacagagatggactctcatgaagaaaaggttttcagagcagtgagagagacccaggaaagggaggcaaaggcggagatgcggaggaaggctaaggagttgcaacaagcccgtagggatgcggagcgtcagggaaagaaggcgccaggcttcggtggattcggatcctccgcagtttctggcggatctactgccgcaatgatcactgagaccatcatagagacagacaaaccaaaggtggctcctgcccctgcccgaccttctggcccaagcaaagccttaaagctaggggcaaaaggaaaggaggttgataattttgttgataagctgaagagtgaaggggaaaccataatgtccagctctatgggtaagcgcacatccgaggctaccaagatgcacgcccctccaataaacatggaatctgtccacatgaagatcgaggaaaaaattactctgacgtgtggcagggatggcggtctacagaatatggagcttcacggcatgattatgctgcggatctccgacgataagtacgggagaatccgactccacgtagaaaatgaagataagaagggagtccaacttcagacacaccccaacgtagacaaaaagcttttcaccgccgagtcgctaattggccttaaaaaccctgagaagtctttccctgtcaattctgatgtgggcgtcctgaagtggcgcctgcagacaacagaggaaagcttcataccccttacgatcaactgctggccctcagagtccgggaacggctgcgatgtcaatatcgaatacgaactccaggaagataatctagagcttaacgacgtggtgattaccatcccgctccccagtggcgtcggagcaccggttatcggtgaaatagacggcgagtacaggcacgattctagaaggaatactctggagtggtgcctgccagtgatcgatgcgaaaaacaaaagcggatctctggaattctctattgccggacagcctaacgacttcttccctgtgcaagtctcattcgtctccaaaaaaaactattgcaacattcaggttactaaagtaactcaggtagacggcaactcacctgtacgcttctccaccgaaaccacgtttctcgtcgataagtatgagatcctttag

SEQ ID NO: 119710 - DNA, 3845 bp, Artificial Sequence
  derived and/or modified sequence
agcaggtccagagctgctggtgctcccgttccccagaccctacccctatccccagtggagccggagtgcgggcgcgccccaccaccgccctcaccatggtgctgttggcagcagcggtctgcacaaaagcaggaaaggctattgtttctcgacagtttgtggaaatgacccgaactcggattgagggcttattagcagcttttccaaagctcatgaacactggaaaacaacatacgtttgttgaaacagagagtgtaagatatgtctaccagcctatggagaaactgtatatggtactgatcactaccaaaaacagcaacattttagaagatttggagaccctaaggctcttctcaagagtgatccctgaatattgccgagccttagaagagaatgaaatatctgagcactgttttgatttgatttttgcttttgatgaaattgtcgcactgggataccgggagaatgttaacttggcacagatcagaaccttcacagaaatggattctcatgaggagaaggtgttcagagccgtcagagagactcaagaacgtgaagctaaggctgagatgcgtcgtaaagcaaaggaattacaacaggcccgaagagatgcagagagacagggcaaaaaagcaccaggatttggcggatttggcagctctgcagtatctggaggcagcacagctgccatgatcacagagaccatcattgaaactgataaaccaaaagtggcacctgcaccagccaggccttcaggccccagcaaggctttaaaacttggagccaaaggaaaggaagtagataactttgtggacaaattaaaatctgaaggtgaaaccatcatgtcctctagtatgggcaagcgtacttctgaagcaaccaaaatgcatgctccacccattaatatggaaagtgtacatatgaagattgaagaaaagataacattaacctgtggacgagacggaggattacagaatatggagttgcatggcatgatcatgcttaggatctcagatgacaagtatggccgaattcgtcttcatgtggaaaatgaagataagaaaggggtgcagctacagacccatccaaatgtggataaaaaacttttcactgcagagtctctaattggcctgaagaatccagagaagtcatttccagtcaacagtgacgtaggggtgctaaagtggagactacaaaccacagaggaatcttttattccactgacaattaattgctggccctcggagagtggaaatggctgtgatgtcaacatagaatatgagctacaagaagataatttagaactgaatgatgtggttatcaccatcccactcccgtctggtgtcggcgcgcctgttatcggtgagatcgatggggagtatcgacatgacagtcgacgaaataccctggagtggtgcctgcctgtgattgatgccaaaaataagagtggcagcctggagtttagcattgctgggcagcccaatgacttcttccctgttcaagtttcctttgtctccaagaaaaattactgtaacatacaggttaccaaagtgacccaggtagatggaaacagccccgtcaggttttccacagagaccactttcctagtggataagtatgaaattctgtaataccaagaagagggagctgaaaaggaaaattttcagattaataaagaagacgccaatgatggctgaagagtttttcccagatttacaagccactggagaccccttttttctgatacaatgcacgattctctgcgcgcaaggaccctcgactcacccccatgtttcagtgtcacagagacattctttgataaggaaatggcacaaacataaagggaaaggctgctaattttctttggcagattgtattggccagcaggaaagcaagctctccagagaatgcccccagttaaatacctcctctacctttacctaagttgctcctttatttttattttattattattattattattattattattttttgagatggagtctcactttgtaacccaggctggaatgcaatggcatgatctcagctcactgcaacctccgcctcctgggttcaagcaagtctcctgcctcagcctccgagtagctgggactacaggtgcacgccaccacgcctggctaattttttgtattttagtagagacggggtttcaccgtgttgcccaggctggtcgcgaactcctgagctcaggcaatccgcccacctcagcctcccaaagtgttgggattacaggcatgagccaccatgcccagctgctcctttattttaatccctaaatataatccctaaatatagttatatttcatacttagtttgtttttaaaaagttttctctgtagaaaattttaatcattcataccctttacctttaggtttttctttctatacattcagtcaggcactgggatcatctgtttacaggcattatatttatttggcactcctggaacaagtatatctaacccattcttgatttttggactattcaggtgaactatttgaggggtatggggtctagaagttaaaagatacgcatgtcttctgttcttttcccgtatcaattcattccttcatctctttgccaagttgttttcctttcagggcctgtccttccagtttagaacagtaccatgaatcccacttgtgtcaatattaaagatagctgagaagcacctttcaaatggcacagtccctcttcaagatgtctaaaagaatggttatgtctgtccagttagggatttcacatccacatgtaatcatgtctgctgctgttgctacccaaattttcatttctccacattttgggtacttaagctaaaacgtaatggccacagtctgtaatccattcacattcctcagtttcaccacctccctcttccagactgcactctctgtcatcagtcccctcctttctaacagaaatggggttatgattttgaaggctgtgggttcagggagtctttgccaatcctgttggccctaaactatcaaggaggctccatttcaccatttgattttttgcatttcaggaggcaactgattgtttcgatatgtacatattactcacgtataccccatttccttccagtcagcccaacattttccaccagtctgtccccatctctgaaatccttccttctctttccccctaagtcttttgagtgtcatcatgtactggtggtttctcggttccatctcatccatttccttttcaatggagactacagcgtcagccagctcagccttggcttttaactcaatattccagtccataggggtggttaaaagttgctgcaaggctgcaggcactggcagtgggaagaggcagacgactagatgacttctgcacttttagctggttgaaaagtaccactcccactctgaacatctggccgtccctgcaaagagtgtactgtgcttgaagcagagcactcacacataaatggctgtgtgtggaattgcttgccaaagaagtttctagcctttccctttcccctaactgcatcagggaagaattcttatctctagcttggtttccacatgaggtttttctgagaagggcttgggacaagaagtctgtcatgttagttaagcaggcaagaaatcctactaatccagttttgtttgaaagttgtttgtccgtatgattttttaaaagtcaagtttaatttcaaaaaaccttttttttctgagattacttttggggtaatatttaaaatgagagacattttgtaaccctgtaaaatacatagggaatataacattccagtgtatacaaagaaggcaaattctttaatcaaataaagcgcattataaaatga

SEQ ID NO: 119711 - DNA, 4038 bp, Artificial Sequence
  derived and/or modified sequence
gaagcggcagcggttcctgtcaagggggcagcaggtccagagctgctggtgctcccgttccccagaccctacccctatccccagtggagccggagtgcgggcgcgccccaccaccgccctcaccatgataacttgatttaaaacatcgtccagtgtacctgagagatggcagaatgtaatttggtggcaatcctaataagttctattgacaaccctttagataagaacttggataatggggggaattcatgcttggactttaggccactgaacagcttttctcagcctcaggtgctgttggcagcagcggtctgcacaaaagcaggaaaggctattgtttctcgacagtttgtggaaatgacccgaactcggattgagggcttattagcagcttttccaaagctcatgaacactggaaaacaacatacgtttgttgaaacagagagtgtaagatatgtctaccagcctatggagaaactgtatatggtactgatcactaccaaaaacagcaacattttagaagatttggagaccctaaggctcttctcaagagtgatccctgaatattgccgagccttagaagagaatgaaatatctgagcactgttttgatttgatttttgcttttgatgaaattgtcgcactgggataccgggagaatgttaacttggcacagatcagaaccttcacagaaatggattctcatgaggagaaggtgttcagagccgtcagagagactcaagaacgtgaagctaaggctgagatgcgtcgtaaagcaaaggaattacaacaggcccgaagagatgcagagagacagggcaaaaaagcaccaggatttggcggatttggcagctctgcagtatctggaggcagcacagctgccatgatcacagagaccatcattgaaactgataaaccaaaagtggcacctgcaccagccaggccttcaggccccagcaaggctttaaaacttggagccaaaggaaaggaagtagataactttgtggacaaattaaaatctgaaggtgaaaccatcatgtcctctagtatgggcaagcgtacttctgaagcaaccaaaatgcatgctccacccattaatatggaaagtgtacatatgaagattgaagaaaagataacattaacctgtggacgagacggaggattacagaatatggagttgcatggcatgatcatgcttaggatctcagatgacaagtatggccgaattcgtcttcatgtggaaaatgaagataagaaaggggtgcagctacagacccatccaaatgtggataaaaaacttttcactgcagagtctctaattggcctgaagaatccagagaagtcatttccagtcaacagtgacgtaggggtgctaaagtggagactacaaaccacagaggaatcttttattccactgacaattaattgctggccctcggagagtggaaatggctgtgatgtcaacatagaatatgagctacaagaagataatttagaactgaatgatgtggttatcaccatcccactcccgtctggtgtcggcgcgcctgttatcggtgagatcgatggggagtatcgacatgacagtcgacgaaataccctggagtggtgcctgcctgtgattgatgccaaaaataagagtggcagcctggagtttagcattgctgggcagcccaatgacttcttccctgttcaagtttcctttgtctccaagaaaaattactgtaacatacaggttaccaaagtgacccaggtagatggaaacagccccgtcaggttttccacagagaccactttcctagtggataagtatgaaattctgtaataccaagaagagggagctgaaaaggaaaattttcagattaataaagaagacgccaatgatggctgaagagtttttcccagatttacaagccactggagaccccttttttctgatacaatgcacgattctctgcgcgcaaggaccctcgactcacccccatgtttcagtgtcacagagacattctttgataaggaaatggcacaaacataaagggaaaggctgctaattttctttggcagattgtattggccagcaggaaagcaagctctccagagaatgcccccagttaaatacctcctctacctttacctaagttgctcctttatttttattttattattattattattattattattattttttgagatggagtctcactttgtaacccaggctggaatgcaatggcatgatctcagctcactgcaacctccgcctcctgggttcaagcaagtctcctgcctcagcctccgagtagctgggactacaggtgcacgccaccacgcctggctaattttttgtattttagtagagacggggtttcaccgtgttgcccaggctggtcgcgaactcctgagctcaggcaatccgcccacctcagcctcccaaagtgttgggattacaggcatgagccaccatgcccagctgctcctttattttaatccctaaatataatccctaaatatagttatatttcatacttagtttgtttttaaaaagttttctctgtagaaaattttaatcattcataccctttacctttaggtttttctttctatacattcagtcaggcactgggatcatctgtttacaggcattatatttatttggcactcctggaacaagtatatctaacccattcttgatttttggactattcaggtgaactatttgaggggtatggggtctagaagttaaaagatacgcatgtcttctgttcttttcccgtatcaattcattccttcatctctttgccaagttgttttcctttcagggcctgtccttccagtttagaacagtaccatgaatcccacttgtgtcaatattaaagatagctgagaagcacctttcaaatggcacagtccctcttcaagatgtctaaaagaatggttatgtctgtccagttagggatttcacatccacatgtaatcatgtctgctgctgttgctacccaaattttcatttctccacattttgggtacttaagctaaaacgtaatggccacagtctgtaatccattcacattcctcagtttcaccacctccctcttccagactgcactctctgtcatcagtcccctcctttctaacagaaatggggttatgattttgaaggctgtgggttcagggagtctttgccaatcctgttggccctaaactatcaaggaggctccatttcaccatttgattttttgcatttcaggaggcaactgattgtttcgatatgtacatattactcacgtataccccatttccttccagtcagcccaacattttccaccagtctgtccccatctctgaaatccttccttctctttccccctaagtcttttgagtgtcatcatgtactggtggtttctcggttccatctcatccatttccttttcaatggagactacagcgtcagccagctcagccttggcttttaactcaatattccagtccataggggtggttaaaagttgctgcaaggctgcaggcactggcagtgggaagaggcagacgactagatgacttctgcacttttagctggttgaaaagtaccactcccactctgaacatctggccgtccctgcaaagagtgtactgtgcttgaagcagagcactcacacataaatggctgtgtgtggaattgcttgccaaagaagtttctagcctttccctttcccctaactgcatcagggaagaattcttatctctagcttggtttccacatgaggtttttctgagaagggcttgggacaagaagtctgtcatgttagttaagcaggcaagaaatcctactaatccagttttgtttgaaagttgtttgtccgtatgattttttaaaagtcaagtttaatttcaaaaaaccttttttttctgagattacttttggggtaatatttaaaatgagagacattttgtaaccctgtaaaatacatagggaatataacattccagtgtatacaaagaaggcaaattctttaatcaaataaagcgcattataaaatga

SEQ ID NO: 119712 - DNA, 1536 bp, Artificial Sequence
  derived and/or modified sequence
atggtgctgctggccgccgccgtgtgcaccaaggccggcaaggccatcgtgagcagacagttcgtggagatgaccagaaccagaatcgagggcctgctggccgccttccccaagctgatgaacaccggcaagcagcacaccttcgtggagaccgagagcgtgagatacgtgtaccagcccatggagaagctgtacatggtgctgatcaccaccaagaacagcaacatcctggaggacctggagaccctgagactgttcagcagagtgatccccgagtactgcagagccctggaggagaacgagatcagcgagcactgcttcgacctgatcttcgccttcgacgagatcgtggccctgggctacagagagaacgtgaacctggcccagatcagaaccttcaccgagatggacagccacgaggagaaggtgttcagagccgtgagagagacccaggagagagaggccaaggccgagatgagaagaaaggccaaggagctgcagcaggccagaagagacgccgagagacagggcaagaaggcccccggcttcggcggcttcggcagcagcgccgtgagcggcggcagcaccgccgccatgatcaccgagaccatcatcgagaccgacaagcccaaggtggcccccgcccccgccagacccagcggccccagcaaggccctgaagctgggcgccaagggcaaggaggtggacaacttcgtggacaagctgaagagcgagggcgagaccatcatgagcagcagcatgggcaagagaaccagcgaggccaccaagatgcacgccccccccatcaacatggagagcgtgcacatgaagatcgaggagaagatcaccctgacctgcggcagagacggcggcctgcagaacatggagctgcacggcatgatcatgctgagaatcagcgacgacaagtacggcagaatcagactgcacgtggagaacgaggacaagaagggcgtgcagctgcagacccaccccaacgtggacaagaagctgttcaccgccgagagcctgatcggcctgaagaaccccgagaagagcttccccgtgaacagcgacgtgggcgtgctgaagtggagactgcagaccaccgaggagagcttcatccccctgaccatcaactgctggcccagcgagagcggcaacggctgcgacgtgaacatcgagtacgagctgcaggaggacaacctggagctgaacgacgtggtgatcaccatccccctgcccagcggcgtgggcgcccccgtgatcggcgagatcgacggcgagtacagacacgacagcagaagaaacaccctggagtggtgcctgcccgtgatcgacgccaagaacaagagcggcagcctggagttcagcatcgccggccagcccaacgacttcttccccgtgcaggtgagcttcgtgagcaagaagaactactgcaacatccaggtgaccaaggtgacccaggtggacggcaacagccccgtgagattcagcaccgagaccaccttcctggtggacaagtacgagatcctgtag

SEQ ID NO: 119713 - DNA, 1659 bp, Artificial Sequence
  derived and/or modified sequence
atggccgagtgcaacctggtggccatcctgatcagcagcatcgacaaccccctggacaagaacctggacaacggcggcaacagctgcctggacttcagacccctgaacagcttcagccagccccaggtgctgctggccgccgccgtgtgcaccaaggccggcaaggccatcgtgagcagacagttcgtggagatgaccagaaccagaatcgagggcctgctggccgccttccccaagctgatgaacaccggcaagcagcacaccttcgtggagaccgagagcgtgagatacgtgtaccagcccatggagaagctgtacatggtgctgatcaccaccaagaacagcaacatcctggaggacctggagaccctgagactgttcagcagagtgatccccgagtactgcagagccctggaggagaacgagatcagcgagcactgcttcgacctgatcttcgccttcgacgagatcgtggccctgggctacagagagaacgtgaacctggcccagatcagaaccttcaccgagatggacagccacgaggagaaggtgttcagagccgtgagagagacccaggagagagaggccaaggccgagatgagaagaaaggccaaggagctgcagcaggccagaagagacgccgagagacagggcaagaaggcccccggcttcggcggcttcggcagcagcgccgtgagcggcggcagcaccgccgccatgatcaccgagaccatcatcgagaccgacaagcccaaggtggcccccgcccccgccagacccagcggccccagcaaggccctgaagctgggcgccaagggcaaggaggtggacaacttcgtggacaagctgaagagcgagggcgagaccatcatgagcagcagcatgggcaagagaaccagcgaggccaccaagatgcacgccccccccatcaacatggagagcgtgcacatgaagatcgaggagaagatcaccctgacctgcggcagagacggcggcctgcagaacatggagctgcacggcatgatcatgctgagaatcagcgacgacaagtacggcagaatcagactgcacgtggagaacgaggacaagaagggcgtgcagctgcagacccaccccaacgtggacaagaagctgttcaccgccgagagcctgatcggcctgaagaaccccgagaagagcttccccgtgaacagcgacgtgggcgtgctgaagtggagactgcagaccaccgaggagagcttcatccccctgaccatcaactgctggcccagcgagagcggcaacggctgcgacgtgaacatcgagtacgagctgcaggaggacaacctggagctgaacgacgtggtgatcaccatccccctgcccagcggcgtgggcgcccccgtgatcggcgagatcgacggcgagtacagacacgacagcagaagaaacaccctggagtggtgcctgcccgtgatcgacgccaagaacaagagcggcagcctggagttcagcatcgccggccagcccaacgacttcttccccgtgcaggtgagcttcgtgagcaagaagaactactgcaacatccaggtgaccaaggtgacccaggtggacggcaacagccccgtgagattcagcaccgagaccaccttcctggtggacaagtacgagatcctgtag

SEQ ID NO: 119714 - protein, 574 aa, Artificial Sequence
  derived and/or modified sequence
MATLVVNKLGAGVDSGRQGSRGTAVVKVLECGVCEDVFSLQGDKVPRLLLCGHTVCHDCLTRLPLHGRAIRCPFDRQVTDLGDSGVWGLKKNFALLELLERLQNGPIGQYGAAEESIGISGESIIRCDEDEAHLASVYCTVCATHLCSECSQVTHSTKTLAKHRRVPLADKPHEKTMCSQHQVHAIEFVCLEEGCQTSPLMCCVCKEYGKHQGHKHSVLEPEANQIRASILDMAHCIRTFTEEISDYSRKLVGIVQHIEGGEQIVEDGIGMAHTEHVPGTAENARSCIRAYFYDLHETLCRQEEMALSVVDAHVREKLIWLRQQQEDMTILLSEVSAACLHCEKTLQQDDCRVVLAKQEITRLLETLQKQQQQFTEVADHIQLDASIPVTFTKDNRVHIGPKMEIRVVTLGLDGAGKTTILFKLKQDEFMQPIPTIGFNVETVEYKNLKFTIWDVGGKHKLRPLWKHYYLNTQAVVFVVDSSHRDRISEAHSELAKLLTEKELRDALLLIFANKQDVAGALSVEEITELLSLHKLCCGRSWYIQGCDARSGMGLYEGLDWLSRQLVAAGVLDVA

SEQ ID NO: 119715 - DNA, 108 bp, Artificial Sequence
  derived and/or modified sequence
atggccaccctggtggtgaacaagctgggcgccggcgtggacagcggcagacagggcagcagaggcaccgccgtggtgaaggtgctggagtgcggcgtgtgcgagtag

SEQ ID NO: 119716 - DNA, 108 bp, Artificial Sequence
  derived and/or modified sequence
atggctactctggtggtgaacaagctgggcgctggggtggattcagggagacaaggcagcagagggactgctgtggtgaaggttctagaatgcggagtgtgtgaatag

SEQ ID NO: 119717 - DNA, 108 bp, Artificial Sequence
  derived and/or modified sequence
atggccaccctggtggtgaacaagctgggcgccggcgtggacagcggccggcagggcagccggggcacagctgtggtgaaggtgctggagtgtggggtgtgtgagtag

SEQ ID NO: 119718 - DNA, 4186 bp, Artificial Sequence
  derived and/or modified sequence
agatgcccgtaccccctcaccgccctcagttcacgccctggctggtttggattcgagaggaaaaatcattaaaggatctggagttttcaccccaaaactttaatcgttttgtcccttctttttttttcttgtctttcctccagcagctgcagactacataatgaaaaataacaaaagtgcccatgcgcgaggctgtgcaactaaccacccgacgattgcggggaggaggagtaagagtcggctaagcggcgcccagtgtcctactgcgcctgtgcgccggtggcgtgcgcagaggcctctgggtaggtggctcaaccccgcctctcagttgaggactctgaaggctgtttctgtggcgcttcccctgcgaggatggctaccctggttgtaaacaagctcggagcgggagtagacagtggccggcagggcagccgggggacagctgtagtgaaggtgctagagtgtggagtttgtgaagatgtcttttctttgcaaggagacaaagttccccgtcttttgctttgtggccataccgtctgtcatgactgtctcactcgcctacctcttcatggaagagcaatccgttgcccatttgatcgacaagtaacagacctaggtgattcaggtgtctggggattgaaaaaaaattttgctttattggagcttttggaacgactgcagaatgggcctattggtcagtatggagctgcagaagaatccattgggatatctggagagagcatcattcgttgtgatgaagatgaagctcaccttgcctctgtatattgcactgtgtgtgcaactcatttgtgctctgagtgttctcaagttactcattctacaaagacattagcaaagcacaggcgagttcctctagctgataaacctcatgagaaaactatgtgctctcagcaccaggtgcatgccattgagtttgtttgcttggaagaaggttgtcaaactagcccactcatgtgctgtgtctgcaaagaatatggaaaacaccagggtcacaagcattcagtattggaaccagaagctaatcagatccgagcatcaattttagatatggctcactgcatacggaccttcacagaggaaatctcagattattccagaaaattagttggaattgtgcagcacattgaaggaggagaacaaatcgtggaagatggaattggaatggctcacacagaacatgtaccagggactgcagagaatgcccggtcatgtattcgagcttatttttatgatctacatgaaactctgtgtcgtcaagaagaaatggctctaagtgttgttgatgctcatgttcgtgaaaaattgatttggctcaggcagcaacaagaagatatgactattttgttgtcagaggtttctgcagcctgcctccactgtgaaaagactttgcagcaggatgattgtagagttgtcttggcaaaacaggaaattacaaggttactggaaacattgcagaaacagcagcagcagtttacagaagttgcagatcacattcagttggatgccagcatccctgtcacttttacaaaggataatcgagttcacattggaccaaaaatggaaattcgggtcgttacgttaggattggatggtgctggaaaaactactatcttgtttaagttaaaacaggatgaattcatgcagcccattccaacaattggttttaacgtggaaactgtagaatataaaaatctaaaattcactatttgggatgtaggtggaaaacacaaattaagaccattgtggaaacattattacctcaatactcaagctgttgtgtttgttgtagatagcagtcatagagacagaattagtgaagcacacagcgaacttgcaaagttgttaacggaaaaagaactccgagatgctctgctcctgatttttgctaacaaacaggatgttgctggagcactgtcagtagaagaaatcactgaactactcagtctccataaattatgctgtggccgtagctggtatattcagggctgtgatgctcgaagtggtatgggactgtatgaagggttggactggctctcacggcaacttgtagctgctggagtattggatgttgcttgattttaaaggcagcagttgtttgaagttttgtggttaaaagtaactttgcacatagtatgttttaagaaattatacatctcaaaagatggtaatttaggatgcatatatatatatatatatataaaggaatcttggattgggaattcagtactttgctttaaaaaaattttgtggcagaattaaatttctaattgagcagattagattgaattaaatagaaacttattgaatatacattcttttaaaaagtatatttgttatttaagtttttcagataatatgtgaccaatatactgggaaagaggtagtcacagagaaagggtaagtgaaggtttattctttcagtgaaaaaagaatagccaattgagtgcctaatgagacctctgtgtgaagcaagtgaagtatagctgcttcttttaacctgccttttcactgaatgttggcagcatttagtagtagaaatgacagttgcttaatgaaatagaatccaaactacatatttggataataggattactttatgtttatgttcagagttaacagaacacctttaatgctaagaactataaggtacagaaaattaatactttatatagtgttttattaactttctcctacagcattttgtataaaacacaatgagggagtgaaatgttacccaattaggcttgtcaggttagtaataaactgaacagtaataaaactgtggaagtaattggatctgaatttatgaaagacccatttccaggactgaacctaggtcagagctctaaattggtccttctatttttcaacaaatttaaagtaatatttctttctaatataatattgcatcctttgtgggaatgactataggtaaaatgtagtaagtaacgcagaaccagggttggctttatttaaaagctagtgacctaaatagaaagcgaacttcaagagaagttgtaagtacagtggcaaatgcttattacttacttcaaactgtttcccaaaataagtgcatttattttgacaataaaacttaaggctgttcatgagaaggccttgaaaagttactctagaggaaaaatgtctaaagaaaaaaaaaattcaaaaagtttacattaattattcagtgttgtgagtaaataaaaatgtgtgctctttactgtttttcatttttaaagaatattattatggaagcacgatttatttaaataggtacattgagacttttttttttttaatgttctgatacattaggatgaagttaaatcttaaatcttattagttgaattgttgtaaggacagtgatgtctggtaacaagatgtgactttttggtagcactgttgtggttcattcttttcaaatctatttttgtttaaaaacaatacaagttttagaaaacaaagcattaaaaaaaaagcctatcagtattatgggcaatatgtaaataaataaatgtaatatttcatcctttatttttcaggtaaaaggtcatgctgttacaggtgtagtttgtgtgcataaataatacttccgaattaaattatttaatatttgactgatttcaataactgtgaaaaataaaaaaggtgttgtattgcttgtgagaacttgaactgtttactagttaattgaagaaaaagtgtaacactaaggtgaacttgcttcccttttcactaattttgctaaactttgtaatgcacattcttagcatataactgaacacagttgaaaaattgtgcctgattataatgtatgtataatggtaggtgtttgtgtgtgattcatttttaaagaaatatttttctcaagctcctattactatttgtggttgtattatttcactaatcattagttaagactgtgctagtcttccctgggaaactaagaagagagcttttttatatacagtatattagaattttcctagtagctgaatttctgtattaggtctaaatattactgtatgttatataaagcaggtatgtcaagtgtatagccgtagtctataattcaggaatgctttataaccatcagaagccattatttgcactacatatatgataagtatagacagcaataaaatgttaagatcatttttaagaa

SEQ ID NO: 119719 - DNA, 108 bp, Artificial Sequence
  derived and/or modified sequence
atggccaccctggtggtgaacaagctgggcgccggcgtggacagcggtagacagggctcccgaggtacggcggtcgtgaaagtgctagagtgcggagtctgcgaatag

SEQ ID NO: 119720 - DNA, 108 bp, Artificial Sequence
  derived and/or modified sequence
atggccaccttggtcgtaaacaagctcggcgctggggtggactcaggacgacagggtagcagggggactgctgtggtcaaggtgctggaatgcggcgtgtgcgaatag

SEQ ID NO: 119721 - DNA, 1725 bp, Artificial Sequence
  derived and/or modified sequence
atggccaccctggtggtgaacaagctgggcgccggcgtggacagcggcagacagggcagcagaggcaccgccgtggtgaaggtgctggagtgcggcgtgtgcgaggacgtgttcagcctgcagggcgacaaggtgcccagactgctgctgtgcggccacaccgtgtgccacgactgcctgaccagactgcccctgcacggcagagccatcagatgccccttcgacagacaggtgaccgacctgggcgacagcggcgtgtggggcctgaagaagaacttcgccctgctggagctgctggagagactgcagaacggccccatcggccagtacggcgccgccgaggagagcatcggcatcagcggcgagagcatcatcagatgcgacgaggacgaggcccacctggccagcgtgtactgcaccgtgtgcgccacccacctgtgcagcgagtgcagccaggtgacccacagcaccaagaccctggccaagcacagaagagtgcccctggccgacaagccccacgagaagaccatgtgcagccagcaccaggtgcacgccatcgagttcgtgtgcctggaggagggctgccagaccagccccctgatgtgctgcgtgtgcaaggagtacggcaagcaccagggccacaagcacagcgtgctggagcccgaggccaaccagatcagagccagcatcctggacatggcccactgcatcagaaccttcaccgaggagatcagcgactacagcagaaagctggtgggcatcgtgcagcacatcgagggcggcgagcagatcgtggaggacggcatcggcatggcccacaccgagcacgtgcccggcaccgccgagaacgccagaagctgcatcagagcctacttctacgacctgcacgagaccctgtgcagacaggaggagatggccctgagcgtggtggacgcccacgtgagagagaagctgatctggctgagacagcagcaggaggacatgaccatcctgctgagcgaggtgagcgccgcctgcctgcactgcgagaagaccctgcagcaggacgactgcagagtggtgctggccaagcaggagatcaccagactgctggagaccctgcagaagcagcagcagcagttcaccgaggtggccgaccacatccagctggacgccagcatccccgtgaccttcaccaaggacaacagagtgcacatcggccccaagatggagatcagagtggtgaccctgggcctggacggcgccggcaagaccaccatcctgttcaagctgaagcaggacgagttcatgcagcccatccccaccatcggcttcaacgtggagaccgtggagtacaagaacctgaagttcaccatctgggacgtgggcggcaagcacaagctgagacccctgtggaagcactactacctgaacacccaggccgtggtgttcgtggtggacagcagccacagagacagaatcagcgaggcccacagcgagctggccaagctgctgaccgagaaggagctgagagacgccctgctgctgatcttcgccaacaagcaggacgtggccggcgccctgagcgtggaggagatcaccgagctgctgagcctgcacaagctgtgctgcggcagaagctggtacatccagggctgcgacgccagaagcggcatgggcctgtacgagggcctggactggctgagcagacagctggtggccgccggcgtgctggacgtggcctag

SEQ ID NO: 119722 - DNA, 1725 bp, Artificial Sequence
  derived and/or modified sequence
atggcgaccctagtcgtgaataagttgggggcaggcgtggactcagggagacaggggagcaggggaacagccgtggtaaaggttctagaatgtggagtctgcgaggatgtgttctccctgcagggggataaggtgccaagattgctgctttgtggccataccgtgtgccacgattgccttacccgccttcctttacatggtcgagctattagatgtcccttcgaccgtcaggtcaccgatctgggagatagtggggtttggggattaaaaaagaactttgctctgcttgaacttttagagcgacttcagaacgggccaatcgggcaatacggcgccgcagaggagtccatcgggatcagcggcgagtccatcattcgatgcgacgaggatgaagcccatctggcctccgtgtactgcactgtttgtgcaacccatctgtgtagcgagtgctctcaggtgactcactctacgaaaacactggcaaagcatcgacgcgtgccccttgctgacaaaccccacgaaaagacaatgtgtagccagcatcaagtgcacgccatcgaatttgtctgtctagaagagggatgccagacctcaccactcatgtgttgcgtgtgcaaggaatatggaaagcaccagggccataagcactccgtgcttgagcccgaggcaaatcagatacgcgccagtattctagacatggcacattgcatcagaacgtttacagaggagatcagtgattatagcagaaagctggtcggcattgtgcagcatattgagggcggcgaacagatcgttgaagacggcattggtatggcccatacagagcatgtccccggtaccgcagagaacgctcggtcctgcataagagcatacttctatgatctgcacgagaccttgtgtcgccaggaggaaatggccttatcagtcgtcgacgcacacgttagggagaaactcatttggctcagacagcagcaggaagacatgacaattctgttaagcgaggtgtcagctgcctgcctccactgtgagaaaaccctgcagcaagacgactgccgcgtggtgttagccaaacaggagatcactcgattgcttgagacattacaaaaacagcagcaacagtttaccgaagtcgcggatcatattcagctcgacgcttctattcctgtgacttttaccaaagacaatcgggtgcacatcggtcctaagatggaaatcagagtcgtgaccctcggcctggatggcgctggtaaaactaccatcttgttcaagttgaaacaagatgagtttatgcaaccaattcccaccattggttttaatgtggagacagtcgagtacaaaaacctgaaattcacgatctgggacgttggagggaaacacaagctcagacctttgtggaaacattactacctcaacactcaagcagttgtgttcgttgtggattccagccaccgagatcgcatcagtgaggcacatagtgagctggctaaactgctcacggagaaagaactgagggacgctctgctgctgatcttcgccaacaaacaggatgttgctggcgctctgtccgtggaggaaatcacagagttgttatctctccacaagctctgttgcggacgtagctggtatattcaggggtgtgacgctagatctggtatgggactgtacgagggtctagactggctctcaagacagctcgtggcagctggtgtcctggacgtggcctag

SEQ ID NO: 119723 - DNA, 1725 bp, Artificial Sequence
  derived and/or modified sequence
atggccaccctggtggtgaacaagctgggcgccggcgtggacagcggccggcagggcagccggggcacagctgtggtgaaggtgctggagtgtggggtgtgtgaagatgtgttcagcctgcagggcgacaaggtgccccggctgctgctgtgtggccacacagtgtgccacgactgcctgacccggctgcccctgcacggccgggccatccgctgcccctttgaccggcaggtgacagacctgggggacagcggcgtgtggggcctgaagaagaactttgccctgctggagctgctggagcggctgcagaatggccccatcggccagtacggggctgctgaggagagcatcggcatcagcggggagagcatcatccgctgtgatgaagatgaggcccacctggcctctgtgtactgcaccgtgtgtgccacccacctgtgcagtgaatgttcccaggtgacccacagcaccaagaccctggccaagcaccggcgggtgcccctggccgacaagccccatgagaagaccatgtgcagccagcaccaggtgcacgccatcgagtttgtgtgcctggaggagggctgccagaccagccccctgatgtgctgcgtgtgcaaggagtatggcaagcaccagggccacaagcacagcgtgctggagcctgaggccaaccagatccgggccagcatcctggacatggcccactgcatccgcaccttcacagaggagatcagtgactacagcaggaagctggtgggcatcgtgcagcacatcgagggcggggagcagatcgtggaggatggcatcggcatggcccacacagagcacgtgcccggcacagcagaaaatgcccggagctgcatccgggcctacttctatgacctgcacgagaccctgtgccggcaggaggagatggccctgtctgtggtggatgcccacgtgcgggagaagctgatctggctgcggcagcagcaggaggacatgaccatcctgctgtctgaggtgtctgctgcctgcctgcactgtgagaagaccctgcagcaggatgactgccgggtggtgctggccaagcaggagatcacccggctgctggagaccctgcagaagcagcagcagcagttcacagaggtggccgaccacatccagctggatgccagcatccctgtgaccttcaccaaggacaacagagtgcacatcggccccaagatggagatccgggtggtgaccctgggcctggatggagctgggaagaccaccatcctcttcaagctgaagcaggatgagttcatgcagcccatccccaccatcggcttcaacgtggagaccgtggagtacaagaacctgaagttcaccatctgggatgtgggcggcaagcacaagctgcggcccctgtggaagcactactacctgaacacccaggccgtggtgtttgtggtggacagcagccaccgggaccgcatcagcgaggcccacagcgagctggccaagctgctgacagagaaggagctgagagatgccctgctgctgatctttgccaacaagcaggatgtggccggggccctgtctgtggaggagatcacagagctgctgagcctgcacaagctgtgctgcggccgctcctggtacatccagggctgtgatgcccggagcggcatgggcctgtatgagggcctggactggctgagccggcagctggtggccgccggcgtgctggatgtggcctag

SEQ ID NO: 119724 - DNA, 1725 bp, Artificial Sequence
  derived and/or modified sequence
atggccaccctggtggtgaacaagctgggcgccggcgtggacagcgggcgtcagggcagccgtggcaccgctgttgtgaaggtcctggagtgtggtgtgtgcgaggacgtgttttcccttcagggggataaagtgccaagactgctcctatgcggtcatacagtgtgtcatgactgtctgaccagacttcccttgcacggacgagcaatcagatgccccttcgatcgacaggtgacggatctgggagatagtggtgtatgggggcttaaaaagaatttcgctctgctggagctgttggagcgactccagaatggtcccattggccagtacggcgcggccgaggaatccatcgggattagtggcgagagcattatccgctgcgatgaggatgaggcacacttggcttcagtctactgcaccgtctgcgctacccacctgtgttcggaatgctcacaagttacacacagcaccaaaaccttagctaagcaccgtcgggtgccccttgctgacaagccacacgagaagacaatgtgtagccagcaccaggtgcatgctattgaattcgtctgcctcgaagagggatgccagaccagcccactgatgtgttgtgtctgtaaagaatacggcaagcaccaggggcacaagcacagtgttctggagcccgaagctaaccagatccgcgcgtcgatcctcgacatggctcactgcatcagaacgtttactgaggagattagcgactatagtcgcaagttagtgggcatcgtccagcacatagaaggtggggagcagatcgtcgaggacgggatcgggatggcccatacagaacatgtgcccgggactgcagaaaatgcccgctcatgcattcgtgcctatttctatgacctgcatgagactctgtgccggcaagaggagatggcactgagtgtggtggacgcccacgtcagggagaagctgatctggctgaggcaacagcaagaagatatgaccatcttacttagcgaagtgtccgccgcctgtctgcactgtgagaagacactacaacaggatgactgtcgggtggtgctcgctaaacaagagatcacccgccttttggagactttacagaaacagcagcagcagttcactgaagtagctgaccatattcagcttgacgcctcaatccctgtgaccttcaccaaggataatagagtgcacatcggccccaaaatggaaatcagagttgtcacacttggcctggacggggcaggcaagacaacaatactgtttaaactaaagcaggacgaattcatgcagcctattcctaccattggctttaacgtggaaaccgttgagtataaaaatctcaaattcacaatatgggatgtgggtgggaagcataagctccgccccctctggaaacactactacctgaatacccaggccgtagtgttcgtcgtggacagctcccacagagatcgcatctctgaagcacattccgaactcgccaaactgttgacagagaaggagttacgagacgccctgctcctgatattcgccaataaacaggatgttgctggcgccctcagcgtggaagagatcaccgagctcctgtccctgcataagctgtgctgcgggcgaagctggtatatccaagggtgtgacgcccggtcgggaatggggctgtatgaagggctggactggctgagcagacaacttgttgcggccggcgtattggacgtcgcctag

SEQ ID NO: 119725 - DNA, 1725 bp, Artificial Sequence
  derived and/or modified sequence
atggccacccttgtagtgaataaattgggagcaggtgtggacagtgggaggcaggggtcaagggggactgccgtagtaaaagtgttagagtgcggggtctgtgaagatgtgttcagcctccagggagataaggtgccaagactcttgctgtgcggccatacagtgtgtcatgactgcctgacaaggctccccctgcatgggagagccatacgctgtccctttgacagacaggtcacagacctaggagattccggcgtgtgggggttgaagaagaactttgccttgctggaactgctggagaggttgcagaacggaccgattggtcagtatggggcagctgaggaatccatcggtattagtggcgagtccattattcggtgcgatgaagatgaagcacacctggcatcagtctactgcaccgtgtgtgccacccacctctgtagtgaatgttcccaggtgacccactcaaccaaaacattggcaaaacacagacgcgtcccacttgctgacaaaccccacgaaaagacaatgtgttcccagcatcaggtccacgccatcgaatttgtgtgcctggaagaaggctgccagacgtctccgctgatgtgctgtgtctgtaaggaatatggtaaacaccagggccataagcactcagtgctggagcctgaggctaaccagatacgggcttcaatcctggacatggcccattgcattagaacatttacagaggaaatcagcgactacagtcgcaagctggtgggtatcgttcagcatatcgaggggggtgaacagattgtcgaagatggaatcggtatggcacatactgaacacgtgccaggaaccgcagagaatgctaggagttgtatcagggcttacttctatgacctgcacgagactctgtgccggcaggaagagatggcgctgagtgtagtggacgctcacgtgagggaaaagctgatttggcttcgccagcaacaggaagatatgaccattctgctcagcgaggtgtccgctgcctgtctgcactgcgagaaaactctacagcaggatgactgcagggtagtattagcaaaacaagagattactaggctcctcgagaccttgcagaaacaacagcagcagtttaccgaagtggcagatcacatccagctagatgcctccattcccgtcacctttacaaaggataatagggtacatatcggtcccaaaatggagatccgagtggtcaccctcggccttgacggggcagggaagaccacaatcctctttaagctgaagcaggacgagttcatgcaacccattccaaccatcggctttaatgtggagaccgtggagtataaaaacctcaaattcacaatatgggatgtcggtgggaaacacaagctgaggcctctctggaagcattattacctgaacacacaagccgtcgtgttcgtagtggattcatctcacagggatagaatcagcgaggctcattccgaattagccaaactcctgactgagaaagaactgcgggatgccctgctcctcatcttcgccaacaagcaggatgtggctggcgcactgtcagtagaagaaatcaccgagctcctctccctccacaaactgtgctgcggcagatcatggtatatccagggttgtgatgctagaagcggaatgggcctctatgaaggactggattggttaagccgccaattagtagcggctggagtgctagatgttgcctag

SEQ ID NO: 119726 - protein, 252 aa, Artificial Sequence
  derived and/or modified sequence
MRAPLLPPAPVVLSLLILGSGHYAAGLDLNDTYSGKREPFSGDHSADGFEVTSRSEMSSGSEISPVSEMPSSSEPSSGADYDYSEEYDNEPQIPGYIVDDSVRVEQVVKPPQNKTESENTSDKPKRKKKGGKNGKNRRNRKKKNPCNAEFQNFCIHGECKYIEHLEAVTCKCQQEYFGERCGEKSMKTHSMIDSSLSKIALAAIAAFMSAVILTAVAVITVQLRRQYVRKYEGEAEERKKLRQENGNVHAIA

SEQ ID NO: 119727 - DNA, 759 bp, Artificial Sequence
  derived and/or modified sequence
atgcgagccccattgcttccccctgcccctgtcgtgctgtcacttctgattctcgggagtggccactacgcagctggcttggacctcaatgatacctatagcggaaagagagagcctttctcgggagaccactctgccgatgggttcgaggtgactagccgttcagagatgtcatctggctctgagatttcccctgtgtccgaaatgccctcatcctccgaacccagtagcggagctgattacgattacagtgaagagtatgataacgagcctcagatccccggttacattgtggacgatagtgtcagggttgaacaggttgtaaagcctcctcagaacaagactgagtccgagaacaccagcgacaagcccaagagaaagaaaaagggtgggaagaatgggaagaatagaagaaaccgcaagaaaaagaacccatgtaacgcagagttccagaatttctgtatccatggcgagtgcaaatatattgagcacctggaggcagtcacttgcaaatgtcagcaggagtacttcggcgagcgctgtggcgaaaagtccatgaaaacccatagcatgattgactcctcgctcagtaagatagccctcgcagctatcgccgctttcatgagcgctgttattctgactgctgtcgcggtgataaccgtgcagctccggagacagtacgtcaggaagtatgaaggcgaggccgaggagagaaagaagctccgccaggagaacggaaatgtccatgcaattgcttag

SEQ ID NO: 119728 - DNA, 759 bp, Artificial Sequence
  derived and/or modified sequence
atgcgggccccgctcttacctcccgccccggtcgtcctgagcctactgatcctgggttccggtcactacgccgccggccttgatcttaatgacacctacagcggaaagcgggagccctttagcggcgaccactccgccgatggcttcgaagtcacatcaagatccgaaatgagttccggatctgaaatctcccccgtgagtgagatgccctcttccagtgaaccatcgagcggggcggattacgactatagcgaagaatacgataatgaaccgcagatccctgggtacatagtagacgactcagtgcgtgttgaacaggtagtaaagccaccccagaacaaaactgaatccgagaacacatcagataaacccaagcggaaaaaaaagggcggaaagaacggcaaaaataggaggaatcggaaaaagaaaaacccctgcaacgccgagtttcagaacttctgtatccatggagaatgcaagtatattgaacatcttgaagcagtgacctgtaaatgccagcaagagtattttggggagcgctgtggagaaaaatcaatgaaaactcacagcatgatcgacagcagtctctcaaagatcgctctagccgcgattgcagcttttatgtctgctgtaatcttaactgccgtcgccgtaattacagtccagctacggaggcagtatgtccgtaaatacgaaggggaagctgaggaaagaaagaagctgagacaagagaatggaaatgttcacgcaatcgcctag

SEQ ID NO: 119729 - DNA, 759 bp, Artificial Sequence
  derived and/or modified sequence
atgcgcgctcctcttcttccacccgccccagtggttctttccctgttaatcctgggttccggccattacgccgcaggactcgacctcaatgacacttattccggtaaaagagaaccttttagcggcgaccattctgcagatggttttgaagtcacgtctaggtccgaaatgagttccggctcagagatctcgcctgtgtcagaaatgccaagctcctccgagccttcatccggcgccgactacgattacagcgaagagtatgataacgagccacagattcccggctatattgttgatgattcggtccgggtggagcaggtggtcaagcctccacagaacaagacagagtccgagaatacaagcgacaaaccaaagcgtaagaaaaagggagggaagaatggaaagaataggagaaatagaaagaagaagaacccgtgtaacgccgagtttcagaatttttgtattcacggtgagtgtaagtacatagagcacctcgaagccgttacatgcaagtgtcaacaggagtatttcggagaaagatgtggagaaaagtctatgaaaacccactctatgatagatagttcactgagtaaaatcgcgctggcagcaatcgctgcgtttatgtcggccgtgatcctgaccgccgtggcagtaattactgtgcaactgagacgccagtacgtgagaaaatacgaaggagaagccgaggaaagaaaaaaactgcgccaggagaacgggaatgtgcacgccattgcttag

SEQ ID NO: 119730 - DNA, 759 bp, Artificial Sequence
  derived and/or modified sequence
atgagagcccccctgctgccccccgcccccgtggtgctgagcctgctgatcctgggcagcggccactacgccgccggcctggacctgaacgacacctacagcggcaagagagagcccttcagcggcgaccacagcgccgacggcttcgaggtgaccagcagaagcgagatgagcagcggcagcgagatcagccccgtgagcgagatgcccagcagcagcgagcccagcagcggcgccgactacgactacagcgaggagtacgacaacgagccccagatccccggctacatcgtggacgacagcgtgagagtggagcaggtggtgaagcccccccagaacaagaccgagagcgagaacaccagcgacaagcccaagagaaagaagaagggcggcaagaacggcaagaacagaagaaacagaaagaagaagaacccctgcaacgccgagttccagaacttctgcatccacggcgagtgcaagtacatcgagcacctggaggccgtgacctgcaagtgccagcaggagtacttcggcgagagatgcggcgagaagagcatgaagacccacagcatgatcgacagcagcctgagcaagatcgccctggccgccatcgccgccttcatgagcgccgtgatcctgaccgccgtggccgtgatcaccgtgcagctgagaagacagtacgtgagaaagtacgagggcgaggccgaggagagaaagaagctgagacaggagaacggcaacgtgcacgccatcgcctag

SEQ ID NO: 119731 - DNA, 759 bp, Artificial Sequence
  derived and/or modified sequence
atgcgtgccccactccttccacctgccccggtggttttaagtctgctgatactgggcagtgggcactatgccgccggtcttgatctgaatgacacatactctggaaaaagagagcctttttctggtgaccacagtgcagacgggtttgaggtgactagtcgaagtgagatgtctagtggaagtgagatctcccccgtgtcggagatgccctccagctccgagccatcttctggtgccgattatgactattccgaggagtacgacaacgaaccacaaatccctgggtacatcgtcgacgacagcgtacgcgttgaacaggttgtcaagccccctcagaataaaactgaatccgagaatacgagtgataaaccaaagcggaagaaaaaggggggaaaaaatggcaagaaccggaggaataggaagaagaaaaacccctgcaatgcagagttccagaacttttgtatccatggcgagtgcaaatacatcgagcacttggaagctgtgacatgtaaatgccaacaggagtacttcggggagcgctgcggggaaaaatcaatgaaaacgcactcgatgatcgatagcagcctgtctaagatcgcactagcagccatagcagcctttatgagcgctgttatcctcactgcggtcgctgtgataaccgttcaacttcggaggcagtacgtaagaaagtacgagggtgaagcagaggagagaaaaaaattgcggcaggagaatggtaacgtgcatgctattgcctag

SEQ ID NO: 119732 - DNA, 759 bp, Artificial Sequence
  derived and/or modified sequence
atgagggcccccctgctgcccccagcccctgtggtgctgagcctgctgatcctgggcagcggccactacgccgccggcctggacctgaatgacacctacagcggcaagcgggagcccttcagcggggaccacagcgcagatggctttgaggtgaccagccgctctgagatgagcagcggcagcgagatcagccctgtgtctgagatgcccagcagcagcgagcccagcagtggagctgactatgactacagcgaggagtatgacaatgagccccagatccctggctacatcgtggatgattctgtgcgggtggagcaggtggtgaagccaccccagaacaagacagaaagtgagaacaccagtgacaagcccaagaggaagaagaagggcggcaagaatggcaagaacagaagaaacaggaagaagaagaacccctgcaatgctgagttccagaacttctgcatccacggggagtgcaagtacatcgagcacctggaggccgtgacctgcaagtgccagcaggagtactttggagagcgctgtggggagaagtccatgaagacccacagcatgattgacagcagcctgagcaagatcgccctggccgccatcgccgccttcatgtctgctgtgatcctgacagctgtggccgtcatcaccgtgcagctgcggcggcagtatgtgaggaaatatgaaggagaggccgaggagaggaagaagctgcggcaggagaatggaaatgtgcacgccatcgcctag

SEQ ID NO: 119733 - DNA, 1239 bp, Artificial Sequence
  derived and/or modified sequence
agacgttcgcacacctgggtgccagcgccccagaggtcccgggacagcccgaggcgccgcgcccgccgccccgagctccccaagccttcgagagcggcgcacactcccggtctccactcgctcttccaacacccgctcgttttggcggcagctcgtgtcccagagaccgagttgccccagagaccgagacgccgccgctgcgaaggaccaatgagagccccgctgctaccgccggcgccagtggtgctgtcgctcttgatactcggctcaggccattatgctgctggattggacctcaatgacacctactctgggaagcgtgaaccattttctggggaccacagtgctgatggatttgaggttacctcaagaagtgagatgtcttcagggagtgagatttcccctgtgagtgaaatgccttctagtagtgaaccgtcctcgggagccgactatgactactcagaagagtatgataacgaaccacaaatacctggctatattgtcgatgattcagtcagagttgaacaggtagttaagcccccccaaaacaagacggaaagtgaaaatacttcagataaacccaaaagaaagaaaaagggaggcaaaaatggaaaaaatagaagaaacagaaagaagaaaaatccatgtaatgcagaatttcaaaatttctgcattcacggagaatgcaaatatatagagcacctggaagcagtaacatgcaaatgtcagcaagaatatttcggtgaacggtgtggggaaaagtccatgaaaactcacagcatgattgacagtagtttatcaaaaattgcattagcagccatagctgcctttatgtctgctgtgatcctcacagctgttgctgttattacagtccagcttagaagacaatacgtcaggaaatatgaaggagaagctgaggaacgaaagaaacttcgacaagagaatggaaatgtacatgctatagcataactgaagataaaattacaggatatcacattggagtcactgccaagtcatagccataaatgatgagtcggtcctctttccagtggatcataagacaatggaccctttttgttatgatggttttaaactttcaattgtcactttttatgctatttctgtatataaaggtgcacgaaggtaaaaagtattttttcaagttgtaaataatttatttaatatttaatggaagtgtatttattttacagctcattaaacttttttaaccaaacagat

SEQ ID NO: 119734 - DNA, 759 bp, Artificial Sequence
  derived and/or modified sequence
atgcgggcccccctgctgccccccgcccccgtggtgctgagcctgctgattctgggatctggccactacgccgccggcttggatcttaacgacacctactcaggcaagcgcgaacccttcagcggtgaccactcagcagacggttttgaggtgacctcacgctctgagatgagctctggcagcgagatttccccagtaagcgaaatgccttctagctcggagcccagctcaggcgcagattatgattactctgaggagtacgataatgagccccaaatccctggatatatcgtcgatgactccgtgcgggtggagcaagttgtgaagccgcctcagaacaaaaccgaaagcgagaatacatccgacaaacccaagcgcaagaagaagggtggaaagaacggaaaaaataggaggaacagaaagaagaagaacccttgtaacgcagagttccaaaacttctgtatccacggagagtgtaaatatattgagcacctggaagccgtgacgtgcaagtgccagcaggaatacttcggagagcgttgcggcgaaaaatcaatgaaaacccatagcatgatagactcttccttaagcaaaattgcactggccgctatcgctgccttcatgtccgctgtgattctgactgccgttgctgtaatcactgtacagctgcgccgtcaatacgtgcgtaagtatgaaggggaggccgaggagagaaagaaactacggcaggaaaacggcaacgtgcatgccattgcatag

SEQ ID NO: 119735 - DNA, 759 bp, Artificial Sequence
  derived and/or modified sequence
atgcgcgcccccctgcttcccccagctccagttgtccttagcttgctcattctgggaagtggacactacgccgccgggctcgacctgaacgacacctatagcggaaaacgagagcccttttcaggcgatcactccgcagatggcttcgaggtgacaagccgcagcgaaatgtcaagcgggtcggaaatctcccctgttagcgagatgccgagctcatctgaaccctcgtcaggcgctgactatgactattccgaggaatatgacaatgaaccccagatccccggatacattgttgacgattcagttcgggttgaacaggtcgtgaagccgcctcagaataaaactgagagcgaaaatacatcagataaacctaagcggaaaaagaaggggggcaaaaacggcaagaatcggaggaatcgaaagaagaagaacccatgtaatgccgagtttcagaatttctgcatccacggagagtgcaagtatattgagcatctcgaggccgtcacttgtaagtgccaacaggaatatttcggagaaaggtgtggcgagaaaagcatgaagacccatagcatgatcgactcttccctgtctaagatcgccctggctgccatcgctgccttcatgtcagccgtgatcctaacggcagttgccgtcattacagtccagctgagacgccagtatgtcagaaaatatgaaggcgaggcagaagaaagaaaaaagctccgccaggaaaacggcaacgtccatgcaatagcttag

SEQ ID NO: 119736 - DNA, 759 bp, Artificial Sequence
  derived and/or modified sequence
atgagagcgcctcttttgccaccagcacctgttgtgttgagcctcctcatcctcggatctggacattatgctgcagggcttgatctcaacgacacatactcggggaagcgtgagccgtttagcggggatcactctgctgacggcttcgaggtgacctcgcggagcgaaatgtcaagcgggtccgaaatatctccggtcagtgagatgcctagctcgagcgaacctagtagcggcgccgattacgactattctgaggagtatgacaacgagcctcagatccccggatacatcgttgacgatagtgtacgagtggagcaggtcgtgaagcccccccagaacaagacagaaagcgagaatacctctgacaaaccaaagaggaaaaagaaaggtggtaaaaatgggaagaacaggaggaatcgcaaaaaaaagaatccctgtaatgcagagtttcagaatttctgcatccacggcgagtgtaagtatatagaacacctagaagctgtcacatgtaagtgccaacaagaatacttcggcgagcgatgcggagaaaaaagcatgaagacacactcaatgatcgattccagcttgagtaaaattgctctcgcagctatagccgcattcatgtccgccgtaatccttacagcagttgccgtgattaccgtgcagctgcgaaggcagtacgtcagaaagtacgagggagaggcggaagagcggaaaaagctcaggcaggaaaacgggaatgtgcatgccattgcctag

SEQ ID NO: 119737 - DNA, 759 bp, Artificial Sequence
  derived and/or modified sequence
atgcgggcccccctgctgccccccgcccccgtggtgctgagcctgctcatcttgggatcagggcactatgcggcggggttggacctgaacgacacttatagcggtaagcgggaacctttttccggcgatcattctgccgatggctttgaagtgacatctcggtctgaaatgagctccggtagtgagatttcccctgtctccgagatgccaagttcttctgaaccatccagtggagcagattacgattactccgaagagtacgacaacgagcctcaaattcccgggtacattgtggacgactcagtcagagttgagcaggttgtaaagccaccacagaacaagacagagagtgagaatacctccgacaaaccaaaaaggaaaaagaaaggtggcaagaacggaaaaaaccgacggaacagaaagaaaaaaaatccatgcaacgctgagttccaaaacttttgtatccatggcgagtgtaaatacatcgaacatttggaggcagtgacttgtaagtgtcagcaggagtacttcggcgaacgctgtggcgaaaaaagcatgaagacacattccatgatcgattctagcctgtctaaaatcgccttggccgctatcgcagccttcatgtcggcggttatcctgactgcagtcgccgtcataacggtgcagctccgccgacaatacgtccgcaaatatgagggagaggccgaagaacggaagaaactccgtcaggaaaatggcaatgtgcatgctatagcttag

SEQ ID NO: 119738 - DNA, 759 bp, Artificial Sequence
  derived and/or modified sequence
atgcgggcccccctgctgccccccgcccccgtggtgctgagcctgctgatattagggtctggacactacgctgccggcctggacctcaacgatacttacagtggaaagagggagcctttttccggggatcatagcgctgatgggtttgaagtgaccagtcgatccgaaatgtcaagcggctctgagatctcccctgtttccgagatgcccagttctagcgagccaagctccggggcggactacgactacagcgaggagtacgataatgagcctcaaattccaggatacatcgtcgacgactccgtaagggtcgaacaggttgttaagccaccccagaataagactgaaagtgagaacacgtctgataagcccaagcgcaagaagaaaggaggaaagaacggtaagaaccgtcggaatcgtaagaagaagaacccctgtaacgctgaattccagaacttttgtatacacggtgaatgtaagtatattgagcaccttgaagcggtgacttgcaaatgccaacaagagtactttggcgaacgatgcggtgagaaatccatgaaaacccattccatgatcgactcatctctttccaagatcgcccttgcggcaatcgcagcctttatgtccgccgtaatcctgacagcggtagccgtaataacggtgcagctgcgaaggcagtacgtccggaaatacgaaggagaggccgaagagagaaagaagttaagacaagaaaacggaaatgtgcatgctatcgcttag

SEQ ID NO: 119739 - DNA, 969 bp, Artificial Sequence
  derived and/or modified sequence
agacgttcgcacacctgggtgccagcgccccagaggtcccgggacagcccgaggcgccgcgcccgccgccccgagctccccaagccttcgagagcggcgcacactcccggtctccactcgctcttccaacacccgctcgttttggcggcagctcgtgtcccagagaccgagttgccccagagaccgagacgccgccgctgcgaaggaccaatgagagccccgctgctaccgccggcgccggtggtgctgtcgctcttgatactcggctcaggccattatgctgctggattggacctcaatgacacctactctgggaagcgtgaaccattttctggggaccacagtgctgatggatttgaggttacctcaagaagtgagatgtcttcagggagtgagatttcccctgtgagtgaaatgccttctagtagtgaaccgtcctcgggagccgactatgactactcagaagagtatgataacgaaccacaaatacctggctatattgtcgatgattcagtcagagttgaacaggtagttaagcccccccaaaacaagacggaaagtgaaaatacttcagataaacccaaaagaaagaaaaagggaggcaaaaatggaaaaaatagaagaaacagaaagaagaaaaatccatgtaatgcagaatttcaaaatttctgcattcacggagaatgcaaatatatagagcacctggaagcagtaacatgcaaatgtcagcaagaatatttcggtgaacggtgtggggaaaagtccatgaaaactcacagcatgattgacagtagtttatcaaaaattgcattagcagccatagctgcctttatgtctgctgtgatcctcacagctgttgctgttattacagtccagcttagaagacaatacgtcaggaaatatgaaggagaagctgaggaacgaaagaaacttcgacaagagaatggaaatgtacatgctatagcataa

SEQ ID NO: 119740 - DNA, 1240 bp, Artificial Sequence
  derived and/or modified sequence
acagacgttcgcacacctgggtgccagcgccccagaggtcccgggacagcccgaggcgccgcgcccgccgccccgagctccccaagccttcgagagcggcgcacactcccggtctccactcgctcttccaacacccgctcgttttggcggcagctcgtgtcccagagaccgagttgccccagagaccgagacgccgccgctgcgaaggaccaatgagagccccgctgctaccgccggcgccggtggtgctgtcgctcttgatactcggctcaggccattatgctgctggattggacctcaatgacacctactctgggaagcgtgaaccattttctggggaccacagtgctgatggatttgaggttacctcaagaagtgagatgtcttcagggagtgagatttcccctgtgagtgaaatgccttctagtagtgaaccgtcctcgggagccgactatgactactcagaagagtatgataacgaaccacaaatacctggctatattgtcgatgattcagtcagagttgaacaggtagttaagcccccccaaaacaagacggaaagtgaaaatacttcagataaacccaaaagaaagaaaaagggaggcaaaaatggaaaaaatagaagaaacagaaagaagaaaaatccatgtaatgcagaatttcaaaatttctgcattcacggagaatgcaaatatatagagcacctggaagcagtaacatgcaaatgtcagcaagaatatttcggtgaacggtgtggggaaaagtccatgaaaactcacagcatgattgacagtagtttatcaaaaattgcattagcagccatagctgcctttatgtctgctgtgatcctcacagctgttgctgttattacagtccagcttagaagacaatacgtcaggaaatatgaaggagaagctgaggaacgaaagaaacttcgacaagagaatggaaatgtacatgctatagcataactgaagataaaattacaggatatcacattggagtcactgccaagtcatagccataaatgatgagtcggtcctctttccagtggatcataagacaatggaccctttttgttatgatggttttaaactttcaattgtcactttttatgctatttctgtatataaaggtgcacgaaggtaaaaagtattttttcaagttgtaaataatttatttaatatttaatggaagtgtatttattttacagctcattaaacttttttaaccaaacaga

SEQ ID NO: 119741 - DNA, 759 bp, Artificial Sequence
  derived and/or modified sequence
atgcgggcaccgctgctgcctcctgcccctgtagttttgtcgctgctgattctgggaagtgggcactacgctgccggtctggacctgaacgatacctactcagggaagagagaacccttctctggagatcatagcgctgacggattcgaagtcaccagccgcagtgagatgtccagcgggtctgagatttctcctgtctcagagatgccctcaagttcagagccgtcctccggagctgactatgattactccgaggaatacgataacgagccacagattccaggctatatcgtcgatgatagtgttcgggtggagcaggtggtcaagccccctcagaataagactgaaagcgagaatacctcggataaacccaaacgcaagaaaaagggcggaaagaacggcaaaaatagacggaatagaaagaaaaagaatccttgcaacgccgagttccagaacttttgtatccacggcgagtgcaaatatattgagcacctggaagcggtcacctgtaaatgccaacaggagtatttcggagaaagatgcggcgagaaatccatgaagacccatagcatgatcgacagctccctgtccaaaatcgctttagcagcaatcgccgcattcatgagcgctgtcatcctgacggctgtggctgtgatcaccgtgcagctgaggagacagtacgttcgcaagtacgagggggaggcagaagaaagaaagaaacttagacaggagaatggaaatgtccacgcaatcgcttag

SEQ ID NO: 119742 - DNA, 759 bp, Artificial Sequence
  derived and/or modified sequence
atgcgcgcaccccttctcccccctgccccagtggtattgagtctcctgattctgggatctggccactacgccgctggccttgatttgaacgacacatactccggaaagagagagcctttcagcggggatcacagcgccgacggatttgaggttacctcccggtccgagatgtcttccgggagcgagatctctccggtatcagagatgcccagctcctccgagccatcttctggtgctgactatgattactccgaagaatatgacaatgagccacagatcccaggatacatcgtagacgattcggtcagagtagagcaggtagtcaaacctccacaaaataagactgagtctgaaaatacctctgataaaccgaaacgtaagaaaaaaggcggaaagaacggaaaaaatcgccgtaatcgcaaaaaaaaaaacccatgcaatgccgagtttcagaatttttgcattcatggggaatgcaaatacatcgagcatttggaggcagtgacgtgcaagtgtcagcaggaatacttcggtgagagatgcggagagaagtctatgaaaactcacagcatgatcgacagcagtcttagcaagatcgcattggcagccatagcagcatttatgagcgccgtcatcctaaccgccgtcgccgtgataaccgtgcaactgcggcgacagtatgtgaggaagtacgaaggggaggccgaagagcgcaagaagctgcggcaagagaacggaaacgtgcacgctattgcatag

SEQ ID NO: 119743 - RNA, 759 nt, Artificial Sequence
  derived and/or modified sequence
augcgggccccgcucuuaccucccgccccggucguccugagccuacugauccuggguuccggucacuacgccgccggccuugaucuuaaugacaccuacagcggaaagcgggagcccuuuagcggcgaccacuccgccgauggcuucgaagucacaucaagauccgaaaugaguuccggaucugaaaucucccccgugagugagaugcccucuuccagugaaccaucgagcggggcggauuacgacuauagcgaagaauacgauaaugaaccgcagaucccuggguacauaguagacgacucagugcguguugaacagguaguaaagccaccccagaacaaaacugaauccgagaacacaucagauaaacccaagcggaaaaaaaagggcggaaagaacggcaaaaauaggaggaaucggaaaaagaaaaaccccugcaacgccgaguuucagaacuucuguauccauggagaaugcaaguauauugaacaucuugaagcagugaccuguaaaugccagcaagaguauuuuggggagcgcuguggagaaaaaucaaugaaaacucacagcaugaucgacagcagucucucaaagaucgcucuagccgcgauugcagcuuuuaugucugcuguaaucuuaacugccgucgccguaauuacaguccagcuacggaggcaguauguccguaaauacgaaggggaagcugaggaaagaaagaagcugagacaagagaauggaaauguucacgcaaucgccuag

SEQ ID NO: 119744 - RNA, 759 nt, Artificial Sequence
  derived and/or modified sequence
augcgcgcuccucuucuuccacccgccccagugguucuuucccuguuaauccuggguuccggccauuacgccgcaggacucgaccucaaugacacuuauuccgguaaaagagaaccuuuuagcggcgaccauucugcagaugguuuugaagucacgucuagguccgaaaugaguuccggcucagagaucucgccugugucagaaaugccaagcuccuccgagccuucauccggcgccgacuacgauuacagcgaagaguaugauaacgagccacagauucccggcuauauuguugaugauucgguccggguggagcagguggucaagccuccacagaacaagacagaguccgagaauacaagcgacaaaccaaagcguaagaaaaagggagggaagaauggaaagaauaggagaaauagaaagaagaagaacccguguaacgccgaguuucagaauuuuuguauucacggugaguguaaguacauagagcaccucgaagccguuacaugcaagugucaacaggaguauuucggagaaagauguggagaaaagucuaugaaaacccacucuaugauagauaguucacugaguaaaaucgcgcuggcagcaaucgcugcguuuaugucggccgugauccugaccgccguggcaguaauuacugugcaacugagacgccaguacgugagaaaauacgaaggagaagccgaggaaagaaaaaaacugcgccaggagaacgggaaugugcacgccauugcuuag

SEQ ID NO: 119745 - protein, 181 aa, Artificial Sequence
  derived and/or modified sequence
MGNIFGNLLKSLIGKKEMRILMVGLDAAGKTTILYKLKLGEIVTTIPTIGFNVETVEYKNISFTVWDVGGQDKIRPLWRHYFQNTQGLIFVVDSNDRERVNEAREELMRMLAEDELRDAVLLVFANKQDLPNAMNAAEITDKLGLHSLRHRNWYIQATCATSGDGLYEGLDWLANQLKNKK

SEQ ID NO: 119746 - protein, 144 aa, Artificial Sequence
  derived and/or modified sequence
MGNIFGNLLKSLIGKKEMRILMVGLDAAGKTTILYKLKLGEIVTTIPTIGLIFVVDSNDRERVNEAREELMRMLAEDELRDAVLLVFANKQDLPNAMNAAEITDKLGLHSLRHRNWYIQATCATSGDGLYEGLDWLANQLKNKK

SEQ ID NO: 119747 - protein, 50 aa, Artificial Sequence
  derived and/or modified sequence
MGNIFGNLLKSLIGKKEMRILMVGLDAAGKTTILYKLKLGEIVTTIPTIG

SEQ ID NO: 119748 - protein, 102 aa, Artificial Sequence
  derived and/or modified sequence
MGNIFGNLLKSLIGKKEMRILMVGLDAAGKTTILYKLKLGEIVTTIPTIGFNVETVEYKNISFTVWDVGGQDKIRPLWRHYFQNTQGLIFVVDSNDRERVNE

SEQ ID NO: 119749 - DNA, 546 bp, Artificial Sequence
  derived and/or modified sequence
atggggaacatctttggcaacctgctgaaatccctaattgggaaaaaggagatgaggattcttatggttggtctcgatgccgccgggaagacaactatactttataagctgaagttaggagagattgtcacaactatcccgacaataggcttcaacgtagaaacagtagagtacaaaaacatctcattcacagtatgggacgtgggcggtcaagacaaaattcggccattatggcgacattattttcaaaacactcagggccttatcttcgtcgtggacagtaacgaccgggagagggttaatgaagcccgtgaggaactcatgcgtatgcttgcagaggatgaactcagagacgctgttctgttggtgtttgctaataagcaggacctccccaacgcgatgaatgccgcagaaattactgacaagctcgggctgcacagcctgcgacatagaaactggtacatacaagccacatgtgccacaagcggagacgggctgtatgaaggtctcgactggttggctaatcagttgaagaacaaaaagtag

SEQ ID NO: 119750 - DNA, 435 bp, Artificial Sequence
  derived and/or modified sequence
atggggaatatctttgggaacctcctgaagagcttaattggtaagaaggaaatgcggatacttatggtgggcctcgatgctgccggcaaaaccacaatcctgtacaagctgaagctgggcgagatcgtaaccacaattccaacaattgggctgattttcgtggtggactctaacgaccgggagcgggtgaatgaagccagggaggagctcatgcgcatgctggccgaagatgagttgcgcgacgcggtcctgctcgtattcgcgaataaacaggatctcccaaatgcaatgaatgctgcagaaataacggacaaactaggcctgcacagcctgcgtcacaggaactggtacatccaggccacttgcgcaaccagtggtgatggcctttatgagggactggattggttggccaaccagctgaagaataaaaagtag

SEQ ID NO: 119751 - DNA, 546 bp, Artificial Sequence
  derived and/or modified sequence
atgggaaacatctttggaaacctgttaaagagccttatcggcaaaaaggagatgagaatcctgatggtcggcttagacgccgctgggaagactaccatactatacaaactcaagttgggggaaatagtgacaaccatcccgacgatcggatttaatgtcgagacagtggagtataaaaacataagctttactgtatgggacgtgggcggacaagacaagataagaccgttgtggagacactatttccagaacacccagggcctgatttttgtcgtcgattcaaacgatcgcgaacgtgtgaatgaagcacgggaagagctaatgcgcatgcttgcagaggacgagctcagagacgctgtattgctggtgtttgcaaacaaacaggaccttcccaacgcaatgaacgccgctgaaatcaccgataagttgggactccactctctccgtcatcggaactggtacatacaggcaacctgcgccacaagcggcgatgggttgtatgagggacttgattggctggccaatcagctgaagaacaaaaagtag

SEQ ID NO: 119752 - DNA, 4105 bp, Artificial Sequence
  derived and/or modified sequence
accgcgcagctatcgcgcgatcggggaggtgggaagtatcccgggctgggggtgggggtacgccgcacagctccagtcgccgtcgcggcttccggtgctaggtggagggaaggaaggagggagccggggagtgggccagggcagcagccgggctgaagtcggcttggggagccagagggagcggagcggaacctgcggggcagaggcggcggccgcagcggcgcagctgatagcaggaacaggatcaagtcttccataccagggaccaggccaaaaccagactgccactgcccctacttgggccccactgtccccagaaagcagctgctgtgatcatgggcaatatctttggaaaccttctcaagagcctgattgggaagaaggagatgcgcatcctgatggtgggcctggatgccgcaggaaagaccaccatcctatacaagctgaaactcggggagatcgtcaccaccatccctaccattgggttcaatgtggagacagtggagtataagaacatcagctttacagtgtgggatgtgggtggccaggacaagattcgacccctctggagacactacttccagaacacccaagggttgatatttgtggtcgacagcaatgatcgggagcgagtaaatgaggcccgggaagagctgatgagaatgctggcggaggacgagctccgggatgctgtactccttgtctttgcaaacaaacaggatctgcctaatgctatgaacgctgctgagatcacagacaagctgggcctgcattcccttcgtcaccgtaactggtacattcaggccacctgtgccaccagcggggacgggctgtacgaaggcctggactggctggccaatcagctcaaaaacaagaagtgaaagccagacagccctaacaaagcaccccacccacccctgacatacctactgtcaccctgccccagtcctaccccttcctctccatgcaagtgtggccagggccctgggtatcatgtccacatgcccagcaagagccttgcctcccctgcctcccctcctttttcctgtccacctatatgaccaatccctaattgctgtcctgatgatgagtcattccaatttactggatttaaaacaaaaagttgttacggtttcatggggtggcccctctctctctcaccctctgggtttcgggaggtcgagtggggtattctctttgtttggcagtggttgctgtcctcttggcatctgagtcctttccctgtccccacaagcccttctactccctgtttgcctttcctttgccaccctctccctgttttacatggaaattgcacgggcctctctgtgtttgcgtgcatgtgtgcgcctgtatatacatgtatagagagatatatttgtgggggccggggggagcggggagggggtggagtgaagctcagggcttgcagccaggacactgcccactggagcctgtcatctgccccttccgtgttggtgagattaagggaagaaggtgggagggcattagtcaagccggactgccccagtctttgactggttaccctcctctctgcaggtaggtttttctggatgataggacagatgatggattcttcaccaccattttccttgtactcttctctccacccttcttagggctggaggatggcatttatctctagatgactgttcccaaggagatgccactctgctctgccttactgttgggaaggagagaggaacccactcactcttatcagcttagagtgttcaactgatccttccccaccatcttcagatctgttcctctggagcttgactggggggtggggatggcaagtccatggtgtgtgttagggacccagggcattgggggaagggaggcgaaggcctgaggttttccatcttcattctcttttgttattaggagaaggtgaggcatgggccaatcccattcctgccttccagtgccccaccacccttctgatcttaggggttggatgggtcatctgtccttggtcagaattttctcaccctagtactcctactggcctgaccagggctgactgggtattctaatgaggagctgggaagtggggtgacatagctgaccttagtatcaacccccctcttctccaactcttgttttctagtccaggatatgctaaaggacgaagattttctattgtttccaggccctcagaccatccttgctgtcccttcaccctccatgcccctgccatcctcactcacttctcataaatggatctgggggttagagtggaggaaataaaatcctgaagtggttgtcagtgcttgtgggatgcagtggtcttcaggattctccccgcattattatgtagttgttcagaagctgttgctactgcgtctctctgtctgcagggggcacttgttcctgaggtcctcgcctgggtcctgacttctgtagtttctgtgaagacgtggctgtcctgtgggctcctgtgtgtgctggctgcgccctgagctccgagacagctgcccataacctgctaaggtcagggcccagggccccccacagcatggctgagggaccccttcccagtagggctgtcccaagccccactccatggggccaggtttcctggccacttttgttgatagcagatggatcaatattagtaaccccatccaagattgaactgtgaaagagaggttccaggggtatctccctcagtgccagttacttagtgatgtgttacccaggatgcagcaggtgtgtgcaggtatcttgctctctaggcctgtgtgtgtgtgtgagtgtgtgtgtatatgggtgtgggtgtgtttgtgtgtggtggttgtggggggggtgttggaggttctatttcatttaaaaatgtattcatttccctggccccacagatgcttccctccatactttttatttgctctgtttcctcagatttattttgtcttgccccattgcctctccttccttgaactctttccttttcaatctcaactcattcactgctgttgctcatttgcccttttccatgtattttttcctacttaggattttccactctatctttgtggttcatgaggactttgcctcttctcctgcctcattccctgactttctctagttagatgtcagtcctaaataggttttcctcacttcaggcctcacccctcaccttgtttttttgggggctccagggaccaatctggggctggaaatgttaggaggttgccttggtgctgccccagatctgtccagcagggggcagtaagtgatcttggtagtatccctggctgctaagcccttggcaggggtggtcctttctacattcccattcacttaacagctcttttgggattgggtgtttcattccatttctgcccactccctctcctctcctctctggtaggtttaattttatgctttccctgattccagctttctgcttcctgaggactcccgctccccccaccccaaagtttgtctgtggtgttatagtggtaactgcagttcctcctctggaatgtagactgtatatgtttaataactcaccttctctatccttgctcaaaatgtgggataacgcgatgactgtgaccctggttggaaattaaacttgttttatgcagctttggagccgaccttcatctttgctgtgcagcagccgtgggacagtagtttcatggtgaggggagtcctgtttctggtccctctctccatagtgctccttctttcagcaaaggggtaaaaggcacacttgattgatagagagtaaggttatggaggaacttagtgccactccacactggttatttcttcccatcataccccgcggcgggggagcccaaatgaattgggcatcagagtgtgagggcttcgtgactttcctcctctagttctaaagggtttaaacctgaaatcagctgtatttctcacctgttggtagactgtatggacttcactggctgaagggccctgaacttggagggccccatgtgcctctactctcagatctcctcagccttgcacatgaggtgcttctagtttgaacagagaccccctcactagtctagttctggactttggcagtgaataaacatgaaggataaacgtc

SEQ ID NO: 119753 - DNA, 1089 bp, Artificial Sequence
  derived and/or modified sequence
agtcgccgtcgcggcttccggtgctaggtggagggaaggaaggagggagccggggagtgggccagggcagcagccgggctgaagtcggcttggggagccagagggagcggagcggaacctgcggggcagaggcggcggccgcagcggcgcagctgatagcaggaacaggatcaagtcttccataccagggaccaggccaaaaccagactgccactgcccctacttgggccccactgtccccagaaagcagctgctgtgatcatgggcaatatctttggaaaccttctcaagagcctgattgggaagaaggagatgcgcatcctgatggtgggcctggatgccgcaggaaagaccaccatcctatacaagctgaaactcggggagatcgtcaccaccatccctaccattgggttgatatttgtggtcgacagcaatgatcgggagcgagtaaatgaggcccgggaagagctgatgagaatgctggcggaggacgagctccgggatgctgtactccttgtctttgcaaacaaacaggatctgcctaatgctatgaacgctgctgagatcacagacaagctgggcctgcattcccttcgtcaccgtaactggtacattcaggccacctgtgccaccagcggggacgggctgtacgaaggcctggactggctggccaatcagctcaaaaacaagaagtgaaagccagacagccctaacaaagcaccccacccacccctgacatacctactgtcaccctgccccagtcctaccccttcctctccatgcaagtgtggccagggccctgggtatcatgtccacatgcccagcaagagccttgcctcccctgcctcccctcctttttcctgtccacctatatgaccaatccctaattgctgtcctgatgatgagtcattccaatttactggatttaaaacaaaaagttgttacggtttcatggggtggcccctctctctctcaccctctgggtttcgggaggtcgagtggggtattctctttgtttggcagtggttgctgtcctcttggcatctgagtcctttccctgtccccacaagcccttctactccctgtttg

SEQ ID NO: 119754 - DNA, 807 bp, Artificial Sequence
  derived and/or modified sequence
gggaaggaaggagggagccggggagtgggccagggcagcagccgggctgaagtcggcttggggagccagagggagcggagcggaacctgcggggcagaggcggcggccgcagcggcgcagctgatagcaggaacagaagtctcagggatcaagtcttccataccagggaccaggccaaaaccagactgccactgcccctacttgggccccactgtccccagaaagcagctgctgtgatcatgggcaatatctttggaaaccttctcaagagcctgattgggaagaaggagatgcgcatcctgatggtgggcctggatgccgcaggaaagaccaccatcctatacaagctgaaactcggggagatcgtcaccaccatccctaccattgggttcaatgtggagacagtggagtataagaacatcagctttacagtgtgggatgtgggtggccaggacaagattcgacccctctggagacactacttccagaacacccaagggttgatatttgtggtcgacagcaatgatcgggagcgagtaaatgaggcccgggaagagctgatgagaatgctggcggaggacgagctccgggatgctgtactccttgtctttgcaaacaaacaggatctgcctaatgctatgaacgctgctgagatcacagacaagctgggcctgcattcccttcgtcaccgtaactggtacattcaggccacctgtgccaccagcggggacgggctgtacgaaggcctggactggctggccaatcagctcaaaaacaagaagtgaaagccagacagccctaacaaag

SEQ ID NO: 119755 - DNA, 546 bp, Artificial Sequence
  derived and/or modified sequence
atgggcaacatctttggaaacctgctgaagagcctgattggcaagaaggagatgaggatcctgatggtgggcctggatgctgctgggaagaccaccatcctgtacaagctgaagctgggggagatcgtgaccaccatccccaccatcggcttcaacgtggagaccgtggagtacaagaacatctccttcaccgtgtgggatgtgggcggccaggacaagatccggcccctgtggaggcactacttccagaacacccagggcctcatctttgtggtggacagcaatgaccgggagcgggtgaatgaggcccgggaggagctgatgaggatgctggctgaagatgagctgagagatgctgtgctgctggtgtttgccaacaagcaggacctgcccaatgccatgaatgctgctgagatcacagacaagctgggcctgcacagcctgcggcacaggaactggtacatccaggccacctgtgccaccagcggagatggcctgtatgagggcctggactggctggccaaccagctgaagaacaagaagtag

SEQ ID NO: 119756 - DNA, 435 bp, Artificial Sequence
  derived and/or modified sequence
atgggcaacatctttggaaacctgctgaagagcctgattggcaagaaggagatgaggatcctgatggtgggcctggatgctgctgggaagaccaccatcctgtacaagctgaagctgggggagatcgtgaccaccatccccaccatcggcctcatctttgtggtggacagcaatgaccgggagcgggtgaatgaggcccgggaggagctgatgaggatgctggccgaggatgagctgagagatgctgtgctgctggtgtttgccaacaagcaggacctgcccaatgccatgaatgctgctgagatcacagacaagctgggcctgcacagcctgcggcacaggaactggtacatccaggccacctgtgccaccagcggagatggcctgtatgagggcctggactggctggccaaccagctgaagaacaagaagtag

SEQ ID NO: 119757 - DNA, 546 bp, Artificial Sequence
  derived and/or modified sequence
atgggcaacatcttcggcaacctgctgaagagcctgatcggcaagaaagaaatgcgcattctaatggtgggcctggatgctgctgggaaaacaacaatcctgtacaaactgaaactcggagaaattgtgaccaccatccctacaattggctttaatgttgaaaccgtcgagtataagaacatctctttcacagtttgggatgtgggaggtcaggataaaattcgccccctgtggagacattacttccagaacacacaagggctcatttttgttgtggatagcaacgaccgggagcgagtcaatgaggcgcgcgaagagctcatgcgcatgttggcagaggacgagcttagagacgctgtgcttctcgtattcgccaacaagcaggatctccccaatgcgatgaatgcggccgaaatcaccgacaaactcggcctgcactcactcagacacagaaattggtacatccaggcgacatgtgcgacatcgggtgacgggctctatgagggattggactggttggccaaccagcttaaaaataaaaaatag

SEQ ID NO: 119758 - DNA, 435 bp, Artificial Sequence
  derived and/or modified sequence
atgggcaacatcttcggcaacctgctgaagagcctgatcggcaagaaagagatgagaatcctgatggtggggttggatgccgccggaaagacaaccatactgtataagctgaaactgggggaaatcgtcactaccataccaacgatagggctgatctttgtagtcgattctaatgatagggagcgggttaacgaggctagggaggagctgatgcgcatgctcgcagaagacgagctgcgcgatgccgtgcttctcgtgtttgccaataaacaggatctaccgaacgctatgaacgcggccgagatcactgataagctgggcctccactctctgcgacatcgaaattggtatattcaggctacttgcgccacttccggcgatggtctctacgaagggctggattggctcgcaaatcaattaaaaaacaaaaagtag

SEQ ID NO: 119759 - DNA, 546 bp, Artificial Sequence
  derived and/or modified sequence
atgggcaacatcttcggcaacctgctgaagagcctgatcggcaagaaagaaatgcgcatcctcatggtgggtctggatgcagctggaaagaccacaatcctctacaagttgaagctaggggaaatcgttacaaccatccccacaatcggatttaacgttgaaacagtggagtataagaacatcagttttacagtgtgggacgttggcggtcaggacaagataaggcctctttggaggcattattttcaaaatacacaagggctcatcttcgtcgtggactccaatgatcgggagagagtcaacgaagccagggaggagctcatgcgaatgttggctgaggacgagctgcgagatgctgtgctcctcgtgttcgccaacaaacaggatttacctaacgcgatgaacgctgctgagatcaccgataagttggggcttcactcactgcggcatcggaactggtacatacaggctacatgcgcaactagtggggacgggctgtatgaaggtctggactggctggcaaaccagctgaagaacaagaagtag

SEQ ID NO: 119760 - DNA, 546 bp, Artificial Sequence
  derived and/or modified sequence
atgggtaacattttcggaaacctgttaaagtctttgatcggtaagaaggaaatgcgaatcctgatggttggcttagacgctgcaggcaaaactaccatcctttataagctcaaactgggagagatcgtaacaacaatcccaactatcggcttcaatgtggaaactgtagaatacaaaaatatatcattcaccgtttgggacgttggcggtcaggataaaatccgcccattatggcgccattattttcaaaatacacagggtctgatttttgtcgtggattccaatgatcgtgagcgcgtgaacgaggctcgagaagaactgatgcgaatgctcgcagaggacgagctgcgtgatgcagttctcctcgtcttcgcaaacaaacaagacttgccgaacgccatgaatgcagccgagattactgacaagctcggccttcactcccttcgacaccgtaattggtacatccaagctacatgcgccacttccggcgacggcttatacgaagggctagactggctggccaatcaactgaaaaataaaaagtag

SEQ ID NO: 119761 - DNA, 435 bp, Artificial Sequence
  derived and/or modified sequence
atgggtaatatattcggaaaccttcttaagtctctgatcggtaagaaggagatgagaattcttatggtgggtctcgatgcagctggcaagaccaccatattgtacaaacttaagctcggagagatcgtaaccacgattccaacaatcggcttaatatttgtagtagactcaaacgaccgagagcgagtgaacgaggcacgggaggagttgatgcgtatgcttgcagaggacgaactcagggatgctgtgttgctggtgtttgctaataagcaggatctgccgaacgcgatgaatgccgctgagattactgataagctcgggcttcactctctgagacatcggaactggtatatccaagcgacttgcgccacctcaggcgatggtctgtatgaaggcctggactggctggccaaccagttgaaaaataaaaagtag

SEQ ID NO: 119762 - DNA, 546 bp, Artificial Sequence
  derived and/or modified sequence
atgggtaacatttttggaaatctgctgaagagcttaatcgggaagaaggagatgcgcatcctgatggtggggctggatgccgctggtaaaaccacaatactgtacaaattgaaattaggagaaatcgtcaccactatccctaccatcggattcaatgtggagacagtagagtacaagaacattagcttcaccgtgtgggatgtggggggacaggacaaaatcagaccgctctggcgccactactttcaaaacactcaaggcctgattttcgtggttgattcaaatgacagagagagagtaaatgaggcaagagaggaactgatgaggatgctggcggaggacgagctgagagatgccgtgttgctggtcttcgccaataaacaggacctccccaacgcgatgaatgctgcggaaattactgacaagttagggctgcacagcctcaggcatcgcaactggtacattcaggctacctgtgcgacttccggagacggcctctatgagggtctggactggttggctaatcaactgaagaacaagaaatag

SEQ ID NO: 119763 - DNA, 546 bp, Artificial Sequence
  derived and/or modified sequence
atgggcaacatcttcggcaacctgctgaagagcctgatcggcaagaaggagatgagaatcctgatggtgggcctggacgccgccggcaagaccaccatcctgtacaagctgaagctgggcgagatcgtgaccaccatccccaccatcggcttcaacgtggagaccgtggagtacaagaacatcagcttcaccgtgtgggacgtgggcggccaggacaagatcagacccctgtggagacactacttccagaacacccagggcctgatcttcgtggtggacagcaacgacagagagagagtgaacgaggccagagaggagctgatgagaatgctggccgaggacgagctgagagacgccgtgctgctggtgttcgccaacaagcaggacctgcccaacgccatgaacgccgccgagatcaccgacaagctgggcctgcacagcctgagacacagaaactggtacatccaggccacctgcgccaccagcggcgacggcctgtacgagggcctggactggctggccaaccagctgaagaacaagaagtag

SEQ ID NO: 119764 - DNA, 435 bp, Artificial Sequence
  derived and/or modified sequence
atgggcaacatcttcggcaacctgctgaagagcctgatcggcaagaaggagatgagaatcctgatggtgggcctggacgccgccggcaagaccaccatcctgtacaagctgaagctgggcgagatcgtgaccaccatccccaccatcggcctgatcttcgtggtggacagcaacgacagagagagagtgaacgaggccagagaggagctgatgagaatgctggccgaggacgagctgagagacgccgtgctgctggtgttcgccaacaagcaggacctgcccaacgccatgaacgccgccgagatcaccgacaagctgggcctgcacagcctgagacacagaaactggtacatccaggccacctgcgccaccagcggcgacggcctgtacgagggcctggactggctggccaaccagctgaagaacaagaagtag

SEQ ID NO: 119765 - protein, 180 aa, Artificial Sequence
  derived and/or modified sequence
MGLTISSLFSRLFGKKQMRILMVGLDAAGKTTILYKLKLGEIVTTIPTIGFNVETVEYKNICFTVWDVGGQDRIRPLWKHYFQNTQGLIFVVDSNDRERIQEVADELQKMLLVDELRDAVLLLFANKQDLPNAMAISEMTDKLGLQSLRNRTWYVQATCATQGTGLYEGLDWLSNELSKR

SEQ ID NO: 119766 - protein, 127 aa, Artificial Sequence
  derived and/or modified sequence
MGLTISSLFSRLFGKKQMRILMVGLDAAGKTTILYKLKLGEIVTTIPTIGFNVETVEYKNICFTVWDVGGQDRIRPLWKHYFQNTQGLIFVVDSNDRERIQEVADELQKMLLVDELRDAVLLLFANK

SEQ ID NO: 119767 - protein, 22 aa, Artificial Sequence
  derived and/or modified sequence
MGLTISSLFSRLFGKKQMRILM

SEQ ID NO: 119768 - DNA, 543 bp, Artificial Sequence
  derived and/or modified sequence
atgggcctcactatttcttctcttttcagcaggctcttcggcaagaagcagatgagaatcctgatggtcggtctggatgctgccggtaagactactatactatacaagctcaagctgggggagatagtgactactattcccacgattggcttcaatgtcgaaaccgttgaatataagaacatttgtttcaccgtgtgggacgtcggtggccaggatcgtattagaccactttggaaacactacttccagaacacccagggcctgatattcgtcgtggatagcaacgatagagaacggattcaggaggtggcggatgaactgcaaaaaatgttgctggtcgacgagctgcgggacgccgtgcttctgctgttcgcaaacaagcaggatctcccgaacgccatggcgatcagcgagatgactgacaagctgggcctgcaatcactgaggaacagaacatggtatgtgcaggccacctgtgcaacacagggtactgggctatacgagggcctggattggttatccaatgagctcagcaaacgctag

SEQ ID NO: 119769 - DNA, 384 bp, Artificial Sequence
  derived and/or modified sequence
atgggcctgaccatctcatctctgttctcacgcctgtttggtaaaaagcagatgcgaattctgatggtcgggttagacgctgcaggcaaaacgacgattctgtataaattgaaactaggggagattgtaaccacaataccaactattgggttcaatgttgaaactgtggagtataaaaacatatgcttcacagtctgggacgtgggcggacaagatcggatacggcctctgtggaagcattactttcagaacactcagggcctgattttcgtggtggattcaaatgacagggagcgcattcaggaggtcgccgatgagctgcaaaaaatgctgctggtcgacgagttgcgtgatgcagtcctgttgcttttcgcaaacaagtag

SEQ ID NO: 119770 - DNA, 69 bp, Artificial Sequence
  derived and/or modified sequence
atgggactaactatcagttcgctctttagcagactctttggaaagaagcagatgagaatccttatgtag

SEQ ID NO: 119771 - DNA, 1660 bp, Artificial Sequence
  derived and/or modified sequence
gccgcggccgccgcgtgacgtggcacagccagagcctaaaggctagagccggagctgccgcgccagtcgcctagcaggtcctctaccggcttattcctgtgccggatcttcatcggcacaggggccactgagacgtttctgcctccctctttcttcctccgctctttctcttccctctcgtttagtttgcctgggagcttgaaaggagaaagcacggggtcgccccaaaccccttctgcttctgcccatcacaagtgccactaccgccatgggcctcactatctcctccctcttctcccgactatttggcaagaagcagatgcgcattttgatggttggattggatgctgctggcaagacaaccattctgtataaactgaagttaggggagatagtcaccaccattcctaccattggttttaatgtggaaacagtagaatataagaacatttgtttcacagtatgggatgttggtggtcaagatagaattaggcctctctggaagcattacttccagaatacccagggtcttatttttgtggtagatagcaacgatcgtgaaagaattcaggaagtagcagatgagctgcagaaaatgcttctggtagatgaattgagagatgcagtgctgctactttttgcaaacaaacaggatttgccaaatgctatggccatcagtgaaatgacagataaactagggcttcagtctcttcgtaacagaacatggtatgttcaagccacttgtgcaacacaaggaactggtctgtatgaaggacttgactggctgtcaaatgagctttcaaaacgttaaatgaaattggatatctaaccaaggacatgtttgataaaattggtctaggcttgttacaacaaaattagtttgtatcttggttattaaacagtatctgggactggtttgggcagaatattaaacttattttgttgccaattattgtttaccgagtataatgttgctatttagcaatgtgcttggttttaaagaaattctccttgggaaaaaagtatcctcttttaattttacttcccataagcgtaaatgcctggacatagctcttgtgcaacctttaaataaattgttttgagtgttttttgagccccagacaaataatgttttaaagttatccccttgctactttactgatacctttatcattcctgagacagtttgctaatttaaaaatgtagcattccatttgtatttatttctctcccttgccaaaaagattttctaatactgcttgtaccagccagagaaagatccaaaacactactcagctctcttgcactgaggaaatttttccccctacattgactcctggcctacatcagccaaacttaaccttggtggggtttggatttgatagccaattagttctgtgctggttgcaaagaattgatatttagatggtttttaatactcagcagattgtcttcctttatattgtgtcttttttatgttgcatgttgcttttgttatcagcctgattttttgctcagtatatgatagttctgctgatgttttgtttattgggcagacatatcttcattaagagtttttggaaaactcatcaaattcgatgaatacattttcttcataacccatttggaattattcctaataaaatgataaaatacgtaa

SEQ ID NO: 119772 - DNA, 641 bp, Artificial Sequence
  derived and/or modified sequence
gcgcaagcgcagtggctcgggcgcaccggaagcgcagggggatggggcggcggtgacgcgattctgtccgcgttggaggggccgggccgctgctggagtcgccgcggccgccgcgtgacgtggcacagccagagcctaaaggctagagccggagctgccgcgccagtcgcctagcagtttgcctgggagcttgaaaggagaaagcacggggtcgccccaaaccccttctgcttctgcccatcacaagtgccactaccgccatgggcctcactatctcctccctcttctcccgactatttggcaagaagcagatgcgcattttgatggttggattggatgctgctggcaagacaaccattctgtataaactgaagttaggggagatagtcaccaccattcctaccattggttttaatgtggaaacagtagaatataagaacatttgtttcacagtatgggatgttggtggtcaagatagaattaggcctctctggaagcattacttccagaatacccagggtcttatttttgtggtagatagcaacgatcgtgaaagaattcaggaagtagcagatgagctgcagaaaatgcttctggtagatgaattgagagatgcagtgctgctactttttgcaaacaaa

SEQ ID NO: 119773 - DNA, 732 bp, Artificial Sequence
  derived and/or modified sequence
ctgtgaattttaaaaggtgtagcaggccgggcgcggtgagtcaccgcgccaggcccgatcataaacacttttaaagtgaagaggctttccgcttcctcaacataaggagtaaatctttaatgctgcttctaggaaaaaaagtacaagaaaagcaagacttcctccttgccttctctttaaaaagcaacagccgatgaacacgtgttggagcgctctcgccttgacagaattagagatcttcagaatcacttggcgtggtggtcgaagcgtctagccctagctcattagggtgccacagtttctcggcccacaagtcagcttttaaccacttttctccgcaaaagaccggaccggtcttcatgcgtcaactaaagcaagcgtctggtcccgtgtgtgaaacgtgtaagttcatggcatcagggaatacccatcgcgcgtaccgtaatagaagagggcgaggttcctcacctaacccataatgctcagctcgcctttccggaagcaaggactatcaccccgacaataccttcatccgggcggaagcgtctcaccctgagtctgatttggcagtgacgaagcgagtttgcctgggagcttgaaaggagaaagcacggggtcgccccaaaccccttctgcttctgcccatcacaagtgccactaccgccatgggcctcactatctcctccctcttctcccgactatttggcaagaagcagatgcgcattttgatgg

SEQ ID NO: 119774 - DNA, 543 bp, Artificial Sequence
  derived and/or modified sequence
atgggcctgaccatcagcagcctcttcagccggctgtttgggaagaagcagatgaggatcctgatggtgggcctggatgctgctgggaagaccaccatcctgtacaagctgaagctgggggagatcgtgaccaccatccccaccatcggcttcaacgtggagaccgtggagtacaagaacatctgcttcaccgtgtgggatgtgggcggccaggaccgcatccggcccctgtggaagcactacttccagaacacccagggcctcatctttgtggtggacagcaatgaccgggagcgcatccaggaggtggctgatgagctgcagaagatgctgctggtggatgagctgagagatgctgtgctgctgctgtttgccaacaagcaggacctgcccaatgccatggccatcagcgagatgacagacaagctgggcctgcagagcctgaggaacagaacctggtacgtgcaggccacctgtgccacccagggcaccggcctgtatgagggcctggactggctgagcaatgagctgagcaagaggtag

SEQ ID NO: 119775 - DNA, 384 bp, Artificial Sequence
  derived and/or modified sequence
atgggcctgaccatcagcagcctcttcagccggctgtttgggaagaagcagatgaggatcctgatggtgggcctggatgctgctgggaagaccaccatcctgtacaagctgaagctgggggagatcgtgaccaccatccccaccatcggcttcaacgtggagaccgtggagtacaagaacatctgcttcaccgtgtgggatgtgggcggccaggaccgcatccggcccctgtggaagcactacttccagaacacccagggcctcatctttgtggtggacagcaatgaccgggagcgcatccaggaggtggctgatgagctgcagaagatgctgctggtggatgagctgagagatgctgtgctgctgctgtttgccaacaagtag

SEQ ID NO: 119776 - DNA, 69 bp, Artificial Sequence
  derived and/or modified sequence
atgggcctgaccatcagcagcctcttcagccggctgtttgggaagaagcagatgaggatcctgatgtag

SEQ ID NO: 119777 - DNA, 543 bp, Artificial Sequence
  derived and/or modified sequence
atgggcctgaccatcagcagcctgttcagccggctgttcggcaagaagcagatgagaattctcatggtgggcctcgacgcagccggcaagacaaccatcctgtataaactcaaattaggggaaattgttactactataccaactatcggatttaacgtcgaaacagtggagtacaaaaatatttgctttaccgtctgggatgtcggaggccaggataggatcagacccttatggaagcactacttccagaatacacagggactgatcttcgttgtggattccaatgaccgagaacggattcaggaagtggctgatgaactgcagaaaatgttgttagtcgatgagctcagggacgcagtcttgctcctctttgccaataaacaggacctgcctaatgcgatggcgatttccgaaatgactgataaactgggcctgcaatccttacgcaatagaacatggtatgttcaggcaacttgcgcaacccagggcaccggcttatacgaaggactggactggctctcaaacgaactgagcaaaagatag

SEQ ID NO: 119778 - DNA, 384 bp, Artificial Sequence
  derived and/or modified sequence
atgggcctgaccatcagcagcctgttcagccggctgttcggcaagaagcagatgagaatcctgatggtgggtctggatgcggctggtaaaacaacaatactctacaagctgaagctcggggagattgtgactacgatccccacaatcgggttcaatgtggagacagtggaatacaagaatatttgttttactgtttgggatgtgggtggccaggaccgaatcaggcccctgtggaagcactatttccagaacacacagggtttgatatttgtggttgattcaaacgaccgggagcgtatacaagaagtggcggacgaactgcagaaaatgctgctggtggacgagctgagggacgccgtcctgctcttgtttgctaataagtag

SEQ ID NO: 119779 - DNA, 69 bp, Artificial Sequence
  derived and/or modified sequence
atgggcctgaccatcagcagcctgttcagccggctgttcggcaagaaacaaatgcgcattttgatgtag

SEQ ID NO: 119780 - DNA, 543 bp, Artificial Sequence
  derived and/or modified sequence
atggggttgactatatcttctttattttccagactattcggaaagaaacagatgaggatactcatggttggtcttgacgcagcgggaaaaaccaccatcctgtacaagctcaagctgggcgaaattgtgaccactatccccacaatcggcttcaacgtggagacagttgagtacaagaatatctgcttcacagtttgggatgtggggggacaggacagaatccggcctctgtggaagcactattttcaaaacacccaagggttgatattcgtggttgattctaacgacagagaacgcattcaggaggtggccgacgaactccaaaagatgctgctcgtggacgagctccgcgacgccgtcctcctgttgtttgctaataagcaggacctgcctaacgccatggcgatctccgagatgacagataaactcggcctacagtccctgagaaatagaacttggtacgttcaagcaacatgtgccactcagggcactggattatacgagggcttggactggctatctaatgaattgtccaaaagatag

SEQ ID NO: 119781 - DNA, 384 bp, Artificial Sequence
  derived and/or modified sequence
atgggacttacgatctcgagtttgttctcaaggttattcggcaaaaagcagatgaggatactcatggtcgggctggatgcagccggtaagaccaccatactttataaacttaagctgggcgaaattgtgaccaccattcccaccatcggctttaatgtcgaaactgtggaatacaagaacatctgttttacagtgtgggatgtgggtgggcaagaccgcatcagacccctttggaaacactactttcaaaacactcaggggctgatcttcgtggtggacagcaatgatcgtgaacggatacaggaggtagcagacgagctacagaagatgttgctagtagatgagcttagagatgccgtcctgctgcttttcgctaataagtag

SEQ ID NO: 119782 - DNA, 69 bp, Artificial Sequence
  derived and/or modified sequence
atgggactgactatctcttccctgttctccagattatttggcaaaaaacaaatgcgcattctgatgtag

SEQ ID NO: 119783 - DNA, 543 bp, Artificial Sequence
  derived and/or modified sequence
atgggcctgaccatcagcagcctgttcagcagactgttcggcaagaagcagatgagaatcctgatggtgggcctggacgccgccggcaagaccaccatcctgtacaagctgaagctgggcgagatcgtgaccaccatccccaccatcggcttcaacgtggagaccgtggagtacaagaacatctgcttcaccgtgtgggacgtgggcggccaggacagaatcagacccctgtggaagcactacttccagaacacccagggcctgatcttcgtggtggacagcaacgacagagagagaatccaggaggtggccgacgagctgcagaagatgctgctggtggacgagctgagagacgccgtgctgctgctgttcgccaacaagcaggacctgcccaacgccatggccatcagcgagatgaccgacaagctgggcctgcagagcctgagaaacagaacctggtacgtgcaggccacctgcgccacccagggcaccggcctgtacgagggcctggactggctgagcaacgagctgagcaagagatag

SEQ ID NO: 119784 - DNA, 384 bp, Artificial Sequence
  derived and/or modified sequence
atgggcctgaccatcagcagcctgttcagcagactgttcggcaagaagcagatgagaatcctgatggtgggcctggacgccgccggcaagaccaccatcctgtacaagctgaagctgggcgagatcgtgaccaccatccccaccatcggcttcaacgtggagaccgtggagtacaagaacatctgcttcaccgtgtgggacgtgggcggccaggacagaatcagacccctgtggaagcactacttccagaacacccagggcctgatcttcgtggtggacagcaacgacagagagagaatccaggaggtggccgacgagctgcagaagatgctgctggtggacgagctgagagacgccgtgctgctgctgttcgccaacaagtag

SEQ ID NO: 119785 - DNA, 69 bp, Artificial Sequence
  derived and/or modified sequence
atgggcctgaccatcagcagcctgttcagcagactgttcggcaagaagcagatgagaatcctgatgtag

SEQ ID NO: 119786 - protein, 201 aa, Artificial Sequence
  derived and/or modified sequence
MGNHLTEMAPTASSFLPHFQALHVVVIGLDSAGKTSLLYRLKFKEFVQSVPTKGFNTEKIRVPLGGSRGITFQVWDVGGQEKLRPLWRSYTRRTDGLVFVVDAAEAERLEEAKVELHRISRASDNQGVPVLVLANKQDQPGALSAAEVEKRLAVRELAAATLTHVQGCSAVDGLGLQQGLERLYEMILKRKKAARGGKKRR

SEQ ID NO: 119787 - DNA, 606 bp, Artificial Sequence
  derived and/or modified sequence
atggggaaccatctgactgagatggctcccacagcaagctcatttctccctcacttccaggctcttcacgtggtggtcattggattggactcggccggcaagacctccctgctatataggctcaagtttaaagaattcgtgcaaagtgtgccaaccaaaggcttcaataccgagaagattagggtgcctctgggtggctctcgcgggataacttttcaagtgtgggacgtgggcggacaggagaaactgcggccgctgtggaggtcgtacactcgcaggaccgacggccttgtgttcgtcgtggatgcagcagaagctgaaaggctggaagaagccaaggtggaactgcaccgcattagccgggcaagcgataatcagggggttccagtgctggtgcttgcgaacaagcaggaccagccaggggccctgagcgctgccgaggtcgaaaagcggttagccgtacgtgagctcgcagctgccaccctgacacatgtacagggatgttccgccgtggatggcctcggcttacagcaaggtctcgagaggctatatgaaatgattcttaagaggaagaaagccgccaggggcggcaagaaaagacgctag

SEQ ID NO: 119788 - DNA, 1584 bp, Artificial Sequence
  derived and/or modified sequence
ggctctgcagaggcagcggttggaggcgcggtgggtgtctgcgggggtctcgcggggcggctgcggtgtttcaccgggaaaggctcgaggagagcgcggctcacgagagataacccagctgtgctccctggaaccttcaatttcaaggcctccctgcctctactaggcgccttagctcactatggggaaccacttgactgagatggcgcccactgcctcctccttcttgccccacttccaagccctgcatgtcgtggtcattgggctggactctgctggaaagacctccctcctttaccgcctcaagttcaaggagtttgtccagagtgtccccaccaaaggcttcaacaccgagaagatccgggtgcccctcgggggatcgcgtggcatcaccttccaagtgtgggacgtcggggggcaggagaagctgcgaccactgtggcgctcttatacccgccggacagacggtctagtgtttgtggtggacgctgcggaggctgagcggctggaggaagccaaggtggagttgcaccgaatcagccgggcctcggacaaccagggcgtgccagtgctggtgctggccaacaagcaggaccagcccggggcactgagcgctgctgaggtggagaagaggctggcagtccgagagctagcagccgccactctcactcatgtgcaaggctgcagcgctgtggacggtctgggcctgcagcagggccttgagcgcctctatgagatgatcctcaagaggaagaaggcagctcggggtggcaagaagagacggtgacccaagccccccctccctttcctcccacctagtaggggtctgcacacttggacagcagggtgggaccagcctgtgacctctcagtcagactggggtgcaggacctgtccacctcaatgaaggagagaggagcatggggtgtcccgttttggtgccacactggggtggggatgggagatgggatgtctttgcatatctctctcatcctctctggagaagtgggcgctgcaggactgtggagacgtaaatgtaaactgtgactctacctcgaccctgtttcttatttttcttctctggctaaaaatttttaattggatgtgtttgggggcggggggatggaagtgacttggagaatgtgtttgggatgaaataactatctccccttcctctgtcccccaactggggagtctccccaggctgcttttctaggaataccagtcacatagtttttatttttgtgtctgtgaaagtgccaagaacccctccccacatttgtagatccatgaccctttttataagctgtgtgtgtcctctgtattattgttattaactattttttagcatttgcctgtaagttattaaagactgataactgtagctcttaccttggtctggggcattttcctctccttatcttgccccagagacaattcaagatttctatatggggttgtggcgcagggggagggagatttatcttgaagctgaatttgcaaagcaagcacttataaaaattagattgtgtgttacgggatggcttgtgaaaattataggggggagtggaaaacccctcaagct

SEQ ID NO: 119789 - DNA, 606 bp, Artificial Sequence
  derived and/or modified sequence
atgggcaaccacctgacagagatggcccccacagccagcagcttcctgccccacttccaggccctgcacgtggtggtgattggcctggacagcgctgggaagaccagcctgctgtaccgcctgaagttcaaggagtttgtgcagagcgtgcccaccaagggcttcaacacagagaagatccgggtgcccctgggcggcagccggggcatcaccttccaggtgtgggatgtgggcggccaggagaagctgcggcccctgtggaggagctacaccaggagaacagatggcctggtgtttgtggtggatgctgctgaggccgagcggctggaggaggccaaggtggagctgcaccgcatcagccgggccagtgacaaccagggcgtgcctgtgctggtgctggccaacaagcaggaccagcccggggccctgtctgctgctgaggtggagaagaggctggccgtgcgggagctggccgccgccaccctgacccacgtgcagggctgcagcgctgtggatggcctgggcctgcagcagggcctggagcggctgtatgagatgatcctgaagaggaagaaggccgcccggggcggcaagaagagaagatag

SEQ ID NO: 119790 - DNA, 606 bp, Artificial Sequence
  derived and/or modified sequence
atgggcaaccacctgaccgagatggcccccaccgccagcagcttcttgccccactttcaggcgctccacgtcgtggtgattggactagattccgccggaaagacgtctttgttatacagactgaaatttaaagaattcgtgcagagcgtgccaaccaaggggttcaatactgagaagatacgcgtcccgctgggtgggtctagagggatcaccttccaggtgtgggatgtgggcgggcaggagaaattaaggccactatggcggtcttacacccgtcgaacggacggcctggtatttgtcgtggacgcagcggaggccgagcgcttggaagaagcaaaggtggagttgcacaggatcagcagggccagcgacaaccaaggagtgcctgtgctggtccttgccaataagcaagaccagccaggcgcactgtccgcagccgaggtggagaagagactggcggtccgagagctcgcagcagcaaccctgacacacgtgcagggatgttccgcagtggacggcttagggctccagcaggggctggaaaggctgtacgagatgattctgaagagaaagaaggcagcgagaggggggaagaaacgcaggtag

SEQ ID NO: 119791 - DNA, 606 bp, Artificial Sequence
  derived and/or modified sequence
atgggcaatcatctgacagaaatggcaccgactgctagctcttttctgccgcattttcaggctctgcatgtggttgtcattggactggatagcgccggtaagacttcactgttataccgcctgaagttcaaggagtttgtgcagtccgtgccaactaaaggcttcaataccgagaagatccgggtcccactcggcggtagcagaggtattactttccaggtgtgggatgtagggggtcaggagaaactgcggccactctggcgtagctacacacggagaaccgacgggctggtattcgtggtggacgcggctgaggctgagcggctggaggaggccaaagtagagctgcaccggatatctcgcgcttcagacaatcagggagtgcctgtgcttgtgctggctaataagcaggaccagccgggagcactgtccgcagctgaagtcgagaaacgcctggctgtcagagagcttgcggcagccaccctgacgcacgtgcaaggttgcagtgccgtggatggcctgggccttcagcagggactggaacggctctacgaaatgatcctaaaaaggaagaaagcagctcgcggaggtaagaagcgccgatag

SEQ ID NO: 119792 - DNA, 606 bp, Artificial Sequence
  derived and/or modified sequence
atgggcaaccacctgaccgagatggcccccaccgccagcagcttcctgccccacttccaggccctgcacgtggtggtgatcggcctggacagcgccggcaagaccagcctgctgtacagactgaagttcaaggagttcgtgcagagcgtgcccaccaagggcttcaacaccgagaagatcagagtgcccctgggcggcagcagaggcatcaccttccaggtgtgggacgtgggcggccaggagaagctgagacccctgtggagaagctacaccagaagaaccgacggcctggtgttcgtggtggacgccgccgaggccgagagactggaggaggccaaggtggagctgcacagaatcagcagagccagcgacaaccagggcgtgcccgtgctggtgctggccaacaagcaggaccagcccggcgccctgagcgccgccgaggtggagaagagactggccgtgagagagctggccgccgccaccctgacccacgtgcagggctgcagcgccgtggacggcctgggcctgcagcagggcctggagagactgtacgagatgatcctgaagagaaagaaggccgccagaggcggcaagaagagaagatag

SEQ ID NO: 119793 - protein, 175 aa, Artificial Sequence
  derived and/or modified sequence
MGKVLSKIFGNKEMRILMLGLDAAGKTTILYKLKLGQSVTTIPTVGFNVETVTYKNVKFNVWDVGGQDKIRPLWRHYYTGTQGLIFVVDCADRDRIDEARQELHRIINDREMRDAIILIFANKQDLPDAMKPHEIQEKLGLTRIRDRNWYVQPSCATSGDGLYEGLTWLTSNYKS

SEQ ID NO: 119794 - DNA, 528 bp, Artificial Sequence
  derived and/or modified sequence
atggggaaggtcctgtccaagatcttcggcaacaaggagatgagaatcctaatgctcggcctggatgcagccggtaagactacaatcttatataagttgaaactgggccaatctgtcacaacgatccctactgtcggatttaacgtcgagaccgtcacctataaaaatgtgaagtttaatgtatgggatgttggggggcaggataagattcgccccttgtggagacactactataccggtacacagggactgatatttgtggtggactgcgcagatcgtgaccgtattgacgaagccagacaggaacttcaccgaattatcaacgatagggagatgagagatgctattatcctgatattcgccaataaacaggacctccccgacgccatgaaacctcatgaaattcaggaaaagttgggtctcacccgcatcagggacaggaattggtatgtacagccaagctgtgctactagcggcgatggtctctatgaaggtctgacctggctgacgtctaactacaaaagttag

SEQ ID NO: 119795 - DNA, 528 bp, Artificial Sequence
  derived and/or modified sequence
atgggcaaggtgctgagcaagatctttggaaacaaggagatgaggatcctgatgctgggcctggatgctgctgggaagaccaccatcctgtacaagctgaagctgggccagagcgtgaccaccatccccaccgtgggcttcaacgtggagaccgtgacctacaagaatgtgaagttcaacgtgtgggatgtgggcggccaggacaagatccggcccctgtggaggcactactacacaggcacccagggcctcatctttgtggtggactgtgccgaccgggacagaattgatgaggcccggcaggagctgcaccgcatcatcaatgaccgggagatgagagatgccatcatcctgatctttgccaacaagcaggacctgcctgatgccatgaagccccatgagatccaggagaagctgggcctgacccgcatccgggacaggaactggtacgtgcagcccagctgtgccaccagcggagatggcctgtatgagggcctgacctggctgaccagcaactacaagagctag

SEQ ID NO: 119796 - DNA, 528 bp, Artificial Sequence
  derived and/or modified sequence
atgggcaaggtgctgagcaagatcttcggcaacaaggagatgcggatcttgatgctgggcttagacgcagcaggcaaaacaactatcctgtataagctgaagctgggacaaagtgtcaccacaataccgacggtcggctttaatgtagagactgtaacttacaagaatgtaaaatttaatgtgtgggacgtgggaggccaggacaagattcgccctctctggcgacattactataccggcacccagggactgatcttcgttgtggattgtgctgatcgggacagaattgatgaagctaggcaggaactccatcgcataattaacgacagagagatgcgagacgccataatcctgatattcgctaataaacaggacctcccagacgcaatgaaacctcacgaaatccaggagaaactaggcttaactcggatccgcgatagaaactggtatgttcaaccttcctgtgcaacaagcggagatgggctgtacgagggtttgacatggctgacaagtaactataaaagctag

SEQ ID NO: 119797 - DNA, 1583 bp, Artificial Sequence
  derived and/or modified sequence
cggcggcagaactgggaggaggagttggaggccggagggagcccgcgctcggggcggcggctggaggcagcgcaccgagttcccgcgaggatccatgacctgacggggccccggagccgcgctgcctctcgggtgtcctgggtcggtggggagcccagtgctcgcaggccggcgggcgggccggagggctgcagtctccctcgcggtgagaggaaggcggaggagcgggaaccgcggcggcgctcgcgcggcgcctgcggggggaagggcagttccgggccgggccgcgcctcagcagggcggcggctcccagcgcagtctcagggcccgggtggcggcggcgactggagaaatcaagttgtgcggtcggtgatgcccgagtgagcggggggcctgggcctctgcccttaggaggcaactcccacgcaggccgcaaaggcgctctcgcggccgagaggcttcgtttcggtttcgcggcggcggcggcgttgttggctgaggggacccgggacacctgaatgcccccggccccggctcctccgacgcgatggggaaggtgctatccaaaatcttcgggaacaaggaaatgcggatcctcatgttgggcctggacgcggccggcaagacaacaatcctgtacaagttgaagctgggccagtcggtgaccaccattcccactgtgggtttcaacgtggagacggtgacttacaaaaatgtcaagttcaacgtatgggatgtgggcggccaggacaagatccggccgctctggcggcattactacactgggacccaaggtctcatcttcgtagtggactgcgccgaccgcgaccgcatcgatgaggctcgccaggagctgcaccgcattatcaatgaccgggagatgagggacgccataatcctcatcttcgccaacaagcaggacctgcccgatgccatgaaaccccacgagatccaggagaaactgggcctgacccggattcgggacaggaactggtatgtgcagccctcctgtgccacctcaggggacggactctatgaggggctcacatggttaacctctaactacaaatcttaatgagcattctccacccatcccctggaaggagagaaatcaaaaacccattcataggattatcgccaccatcacctctttcaattgccactttctcttcttttgaatttgaactctggagttactgttctacagtttggcggggacggggcttgggggttttctcttttgtttgtttccctttctttttccttttttttttttttttttttttgttggctttgcgttaggatgctctgatctgacatttgacatgaacacaaagttgctagatgctcttgttgacttccagcagatgggatgggggaaacacagcagttcttggtaaagtcctttgtaataatagtttgatttttttatttcgagagaatctttcattttcctatgtatgcttttttccttttttgcccagtttccttatcacttgctgtagatggcttattttgcattcatgcagactatgttgcaagtctgtttcatctagtaaactgaaaattattgcttaatcaaa

SEQ ID NO: 119798 - DNA, 528 bp, Artificial Sequence
  derived and/or modified sequence
atgggcaaagtgctgagcaaaatttttggtaataaggagatgcggatcctgatgttaggtctggacgccgctggcaagacaacgattttatacaaactcaaactcggccagagtgtgaccacaatccctacagtaggatttaacgtcgagaccgttacctataagaatgtgaaattcaacgtgtgggacgttggaggccaggataagatacgaccgctttggaggcactactatactggaacacaggggctcattttcgtcgtcgattgcgccgatcgtgacagaatagatgaggcgagacaggagctgcatagaattataaacgacagggaaatgagggacgcgattatcctcatcttcgccaacaagcaggacttgcctgacgcaatgaagccacacgagatacaggagaagctgggattaacccgaatccgagacaggaattggtacgtacagccatcatgcgccaccagcggtgatggtttgtatgagggactgacctggctgacctcaaactacaaatcctag

SEQ ID NO: 119799 - DNA, 528 bp, Artificial Sequence
  derived and/or modified sequence
atgggcaaggtgctgagcaagatcttcggcaacaaggagatgagaatcctgatgctgggcctggacgccgccggcaagaccaccatcctgtacaagctgaagctgggccagagcgtgaccaccatccccaccgtgggcttcaacgtggagaccgtgacctacaagaacgtgaagttcaacgtgtgggacgtgggcggccaggacaagatcagacccctgtggagacactactacaccggcacccagggcctgatcttcgtggtggactgcgccgacagagacagaatcgacgaggccagacaggagctgcacagaatcatcaacgacagagagatgagagacgccatcatcctgatcttcgccaacaagcaggacctgcccgacgccatgaagccccacgagatccaggagaagctgggcctgaccagaatcagagacagaaactggtacgtgcagcccagctgcgccaccagcggcgacggcctgtacgagggcctgacctggctgaccagcaactacaagagctag

SEQ ID NO: 119800 - protein, 946 aa, Artificial Sequence
  derived and/or modified sequence
MAAHGKLRRERGLQAEYETQVKEMRWQLSEQLRCLELQGELRRELLQELAEFMRRRAEVELEYSRGLEKLAERFSSRGGRLGSSREHQSFRKEPSLLSPLHCWAVLLQHTRQQSRESAALSEVLAGPLAQRLSHIAEDVGRLVKKSRDLEQQLQDELLEVVSELQTAKKTYQAYHMESVNAEAKLREAERQEEKRAGRSVPTTTAGATEAGPLRKSSLKKGGRLVEKRQAKFMEHKLKCTKARNEYLLSLASVNAAVSNYYLHDVLDLMDCCDTGFHLALGQVLRSYTAAESRTQASQVQGLGSLEEAVEALDPPGDKAKVLEVHATVFCPPLRFDYHPHDGDEVAEICVEMELRDEILPRAQNIQSRLDRQTIETEEVNKTLKATLQALLEVVASDDGDVLDSFQTSPSTESLKSTSSDPGSRQAGRRRGQQQETETFYLTKLQEYLSGRSILAKLQAKHEKLQEALQRGDKEEQEVSWTQYTQRKFQKSRQPRPSSQYNQRLFGGDMEKFIQSSGQPVPLVVESCIRFINLNGLQHEGIFRVSGAQLRVSEIRDAFERGEDPLVEGCTAHDLDSVAGVLKLYFRSLEPPLFPPDLFGELLASSELEATAERVEHVSRLLWRLPAPVLVVLRYLFTFLNHLAQYSDENMMDPYNLAVCFGPTLLPVPAGQDPVALQGRVNQLVQTLIVQPDRVFPPLTSLPGPVYEKCMAPPSASCLGDAQLESLGADNEPELEAEMPAQEDDLEGVVEAVACFAYTGRTAQELSFRRGDVLRLHERASSDWWRGEHNGMRGLIPHKYITLPAGTEKQVVGAGLQTAGESGSSPEGLLASELVHRPEPCTSPEAMGPSGHRRRCLVPASPEQHVEVDKAVAQNMDSVFKELLGKTSVRQGLGPASTTSPSPGPRSPKAPPSSRLGRNKGFSRGPGAPASPSASHPQGLDTTPKPH

SEQ ID NO: 119801 - protein, 925 aa, Artificial Sequence
  derived and/or modified sequence
MAAHGKLRRERGLQAEYETQVKEMRWQLSEQLRCLELQGELRRELLQELAEFMRRRAEVELEYSRGLEKLAERFSSRGGRLGSSREHQSFRKEPSLLSPLHCWAVLLQHTRQQSRESAALSEVLAGPLAQRLSHIAEDVGRLVKKAKKTYQAYHMESVNAEAKLREAERQEEKRAGRSVPTTTAGATEAGPLRKSSLKKGGRLVEKRQAKFMEHKLKCTKARNEYLLSLASVNAAVSNYYLHDVLDLMDCCDTGFHLALGQVLRSYTAAESRTQASQVQGLGSLEEAVEALDPPGDKAKVLEVHATVFCPPLRFDYHPHDGDEVAEICVEMELRDEILPRAQNIQSRLDRQTIETEEVNKTLKATLQALLEVVASDDGDVLDSFQTSPSTESLKSTSSDPGSRQAGRRRGQQQETETFYLTKLQEYLSGRSILAKLQAKHEKLQEALQRGDKEEQEVSWTQYTQRKFQKSRQPRPSSQYNQRLFGGDMEKFIQSSGQPVPLVVESCIRFINLNGLQHEGIFRVSGAQLRVSEIRDAFERGEDPLVEGCTAHDLDSVAGVLKLYFRSLEPPLFPPDLFGELLASSELEATAERVEHVSRLLWRLPAPVLVVLRYLFTFLNHLAQYSDENMMDPYNLAVCFGPTLLPVPAGQDPVALQGRVNQLVQTLIVQPDRVFPPLTSLPGPVYEKCMAPPSASCLGDAQLESLGADNEPELEAEMPAQEDDLEGVVEAVACFAYTGRTAQELSFRRGDVLRLHERASSDWWRGEHNGMRGLIPHKYITLPAGTEKQVVGAGLQTAGESGSSPEGLLASELVHRPEPCTSPEAMGPSGHRRRCLVPASPEQHVEVDKAVAQNMDSVFKELLGKTSVRQGLGPASTTSPSPGPRSPKAPPSSRLGRNKGFSRGPGAPASPSASHPQGLDTTPKPH

SEQ ID NO: 119802 - protein, 768 aa, Artificial Sequence
  derived and/or modified sequence
MAAHGKLRRERGLQAEYETQVKEMRWQLSEQLRCLELQGELRRELLQELAEFMRRRAEVELEYSRGLEKLAERFSSRGGRLGSSREHQSFRKEPSLLSPLHCWAVLLQHTRQQSRESAALSEVLAGPLAQRLSHIAEDVGRLVKKSRDLEQQLQDELLEVVSELQTVAEICVEMELRDEILPRAQNIQSRLDRQTIETEEVNKTLKATLQALLEVVASDDGDVLDSFQTSPSTESLKSTSSDPGSRQAGRRRGQQQETETFYLTKLQEYLSGRSILAKLQAKHEKLQEALQRGDKEEQEVSWTQYTQRKFQKSRQPRPSSQYNQRLFGGDMEKFIQSSGQPVPLVVESCIRFINLNGLQHEGIFRVSGAQLRVSEIRDAFERGEDPLVEGCTAHDLDSVAGVLKLYFRSLEPPLFPPDLFGELLASSELEATAERVEHVSRLLWRLPAPVLVVLRYLFTFLNHLAQYSDENMMDPYNLAVCFGPTLLPVPAGQDPVALQGRVNQLVQTLIVQPDRVFPPLTSLPGPVYEKCMAPPSASCLGDAQLESLGADNEPELEAEMPAQEDDLEGVVEAVACFAYTGRTAQELSFRRGDVLRLHERASSDWWRGEHNGMRGLIPHKYITLPAGTEKQVVGAGLQTAGESGSSPEGLLASELVHRPEPCTSPEAMGPSGHRRRCLVPASPEQHVEVDKAVAQNMDSVFKELLGKTSVRQGLGPASTTSPSPGPRSPKAPPSSRLGRNKGFSRGPGAPASPSASHPQGLDTTPKPH

SEQ ID NO: 119803 - protein, 923 aa, Artificial Sequence [sequence omitted]

SEQ ID NO: 119804 - DNA, 2841 bp, Artificial Sequence
  derived and/or modified sequence
atggccgcccacggcaagctgagaagagagagaggcctgcaggccgagtacgagacccaggtgaaggagatgagatggcagctgagcgagcagctgagatgcctggagctgcagggcgagctgagaagagagctgctgcaggagctggccgagttcatgagaagaagagccgaggtggagctggagtacagcagaggcctggagaagctggccgagagattcagcagcagaggcggcagactgggcagcagcagagagcaccagagcttcagaaaggagcccagcctgctgagccccctgcactgctgggccgtgctgctgcagcacaccagacagcagagcagagagagcgccgccctgagcgaggtgctggccggccccctggcccagagactgagccacatcgccgaggacgtgggcagactggtgaagaagagcagagacctggagcagcagctgcaggacgagctgctggaggtggtgagcgagctgcagaccgccaagaagacctaccaggcctaccacatggagagcgtgaacgccgaggccaagctgagagaggccgagagacaggaggagaagagagccggcagaagcgtgcccaccaccaccgccggcgccaccgaggccggccccctgagaaagagcagcctgaagaagggcggcagactggtggagaagagacaggccaagttcatggagcacaagctgaagtgcaccaaggccagaaacgagtacctgctgagcctggccagcgtgaacgccgccgtgagcaactactacctgcacgacgtgctggacctgatggactgctgcgacaccggcttccacctggccctgggccaggtgctgagaagctacaccgccgccgagagcagaacccaggccagccaggtgcagggcctgggcagcctggaggaggccgtggaggccctggacccccccggcgacaaggccaaggtgctggaggtgcacgccaccgtgttctgcccccccctgagattcgactaccacccccacgacggcgacgaggtggccgagatctgcgtggagatggagctgagagacgagatcctgcccagagcccagaacatccagagcagactggacagacagaccatcgagaccgaggaggtgaacaagaccctgaaggccaccctgcaggccctgctggaggtggtggccagcgacgacggcgacgtgctggacagcttccagaccagccccagcaccgagagcctgaagagcaccagcagcgaccccggcagcagacaggccggcagaagaagaggccagcagcaggagaccgagaccttctacctgaccaagctgcaggagtacctgagcggcagaagcatcctggccaagctgcaggccaagcacgagaagctgcaggaggccctgcagagaggcgacaaggaggagcaggaggtgagctggacccagtacacccagagaaagttccagaagagcagacagcccagacccagcagccagtacaaccagagactgttcggcggcgacatggagaagttcatccagagcagcggccagcccgtgcccctggtggtggagagctgcatcagattcatcaacctgaacggcctgcagcacgagggcatcttcagagtgagcggcgcccagctgagagtgagcgagatcagagacgccttcgagagaggcgaggaccccctggtggagggctgcaccgcccacgacctggacagcgtggccggcgtgctgaagctgtacttcagaagcctggagccccccctgttcccccccgacctgttcggcgagctgctggccagcagcgagctggaggccaccgccgagagagtggagcacgtgagcagactgctgtggagactgcccgcccccgtgctggtggtgctgagatacctgttcaccttcctgaaccacctggcccagtacagcgacgagaacatgatggacccctacaacctggccgtgtgcttcggccccaccctgctgcccgtgcccgccggccaggaccccgtggccctgcagggcagagtgaaccagctggtgcagaccctgatcgtgcagcccgacagagtgttcccccccctgaccagcctgcccggccccgtgtacgagaagtgcatggccccccccagcgccagctgcctgggcgacgcccagctggagagcctgggcgccgacaacgagcccgagctggaggccgagatgcccgcccaggaggacgacctggagggcgtggtggaggccgtggcctgcttcgcctacaccggcagaaccgcccaggagctgagcttcagaagaggcgacgtgctgagactgcacgagagagccagcagcgactggtggagaggcgagcacaacggcatgagaggcctgatcccccacaagtacatcaccctgcccgccggcaccgagaagcaggtggtgggcgccggcctgcagaccgccggcgagagcggcagcagccccgagggcctgctggccagcgagctggtgcacagacccgagccctgcaccagccccgaggccatgggccccagcggccacagaagaagatgcctggtgcccgccagccccgagcagcacgtggaggtggacaaggccgtggcccagaacatggacagcgtgttcaaggagctgctgggcaagaccagcgtgagacagggcctgggccccgccagcaccaccagccccagccccggccccagaagccccaaggccccccccagcagcagactgggcagaaacaagggcttcagcagaggccccggcgcccccgccagccccagcgccagccacccccagggcctggacaccacccccaagccccactag

SEQ ID NO: 119805 - DNA, 2778 bp, Artificial Sequence
  derived and/or modified sequence
atggccgcccacggcaagctgagaagagagagaggcctgcaggccgagtacgagacccaggtgaaggagatgagatggcagctgagcgagcagctgagatgcctggagctgcagggcgagctgagaagagagctgctgcaggagctggccgagttcatgagaagaagagccgaggtggagctggagtacagcagaggcctggagaagctggccgagagattcagcagcagaggcggcagactgggcagcagcagagagcaccagagcttcagaaaggagcccagcctgctgagccccctgcactgctgggccgtgctgctgcagcacaccagacagcagagcagagagagcgccgccctgagcgaggtgctggccggccccctggcccagagactgagccacatcgccgaggacgtgggcagactggtgaagaaggccaagaagacctaccaggcctaccacatggagagcgtgaacgccgaggccaagctgagagaggccgagagacaggaggagaagagagccggcagaagcgtgcccaccaccaccgccggcgccaccgaggccggccccctgagaaagagcagcctgaagaagggcggcagactggtggagaagagacaggccaagttcatggagcacaagctgaagtgcaccaaggccagaaacgagtacctgctgagcctggccagcgtgaacgccgccgtgagcaactactacctgcacgacgtgctggacctgatggactgctgcgacaccggcttccacctggccctgggccaggtgctgagaagctacaccgccgccgagagcagaacccaggccagccaggtgcagggcctgggcagcctggaggaggccgtggaggccctggacccccccggcgacaaggccaaggtgctggaggtgcacgccaccgtgttctgcccccccctgagattcgactaccacccccacgacggcgacgaggtggccgagatctgcgtggagatggagctgagagacgagatcctgcccagagcccagaacatccagagcagactggacagacagaccatcgagaccgaggaggtgaacaagaccctgaaggccaccctgcaggccctgctggaggtggtggccagcgacgacggcgacgtgctggacagcttccagaccagccccagcaccgagagcctgaagagcaccagcagcgaccccggcagcagacaggccggcagaagaagaggccagcagcaggagaccgagaccttctacctgaccaagctgcaggagtacctgagcggcagaagcatcctggccaagctgcaggccaagcacgagaagctgcaggaggccctgcagagaggcgacaaggaggagcaggaggtgagctggacccagtacacccagagaaagttccagaagagcagacagcccagacccagcagccagtacaaccagagactgttcggcggcgacatggagaagttcatccagagcagcggccagcccgtgcccctggtggtggagagctgcatcagattcatcaacctgaacggcctgcagcacgagggcatcttcagagtgagcggcgcccagctgagagtgagcgagatcagagacgccttcgagagaggcgaggaccccctggtggagggctgcaccgcccacgacctggacagcgtggccggcgtgctgaagctgtacttcagaagcctggagccccccctgttcccccccgacctgttcggcgagctgctggccagcagcgagctggaggccaccgccgagagagtggagcacgtgagcagactgctgtggagactgcccgcccccgtgctggtggtgctgagatacctgttcaccttcctgaaccacctggcccagtacagcgacgagaacatgatggacccctacaacctggccgtgtgcttcggccccaccctgctgcccgtgcccgccggccaggaccccgtggccctgcagggcagagtgaaccagctggtgcagaccctgatcgtgcagcccgacagagtgttcccccccctgaccagcctgcccggccccgtgtacgagaagtgcatggccccccccagcgccagctgcctgggcgacgcccagctggagagcctgggcgccgacaacgagcccgagctggaggccgagatgcccgcccaggaggacgacctggagggcgtggtggaggccgtggcctgcttcgcctacaccggcagaaccgcccaggagctgagcttcagaagaggcgacgtgctgagactgcacgagagagccagcagcgactggtggagaggcgagcacaacggcatgagaggcctgatcccccacaagtacatcaccctgcccgccggcaccgagaagcaggtggtgggcgccggcctgcagaccgccggcgagagcggcagcagccccgagggcctgctggccagcgagctggtgcacagacccgagccctgcaccagccccgaggccatgggccccagcggccacagaagaagatgcctggtgcccgccagccccgagcagcacgtggaggtggacaaggccgtggcccagaacatggacagcgtgttcaaggagctgctgggcaagaccagcgtgagacagggcctgggccccgccagcaccaccagccccagccccggccccagaagccccaaggccccccccagcagcagactgggcagaaacaagggcttcagcagaggccccggcgcccccgccagccccagcgccagccacccccagggcctggacaccacccccaagccccactag

SEQ ID NO: 119806 - DNA, 2772 bp, Artificial Sequence
  derived and/or modified sequence
atgagatggcagctgagcgagcagctgagatgcctggagctgcagggcgagctgagaagagagctgctgcaggagctggccgagttcatgagaagaagagccgaggtggagctggagtacagcagaggcctggagaagctggccgagagattcagcagcagaggcggcagactgggcagcagcagagagcaccagagcttcagaaaggagcccagcctgctgagccccctgcactgctgggccgtgctgctgcagcacaccagacagcagagcagagagagcgccgccctgagcgaggtgctggccggccccctggcccagagactgagccacatcgccgaggacgtgggcagactggtgaagaagagcagagacctggagcagcagctgcaggacgagctgctggaggtggtgagcgagctgcagaccgccaagaagacctaccaggcctaccacatggagagcgtgaacgccgaggccaagctgagagaggccgagagacaggaggagaagagagccggcagaagcgtgcccaccaccaccgccggcgccaccgaggccggccccctgagaaagagcagcctgaagaagggcggcagactggtggagaagagacaggccaagttcatggagcacaagctgaagtgcaccaaggccagaaacgagtacctgctgagcctggccagcgtgaacgccgccgtgagcaactactacctgcacgacgtgctggacctgatggactgctgcgacaccggcttccacctggccctgggccaggtgctgagaagctacaccgccgccgagagcagaacccaggccagccaggtgcagggcctgggcagcctggaggaggccgtggaggccctggacccccccggcgacaaggccaaggtgctggaggtgcacgccaccgtgttctgcccccccctgagattcgactaccacccccacgacggcgacgaggtggccgagatctgcgtggagatggagctgagagacgagatcctgcccagagcccagaacatccagagcagactggacagacagaccatcgagaccgaggaggtgaacaagaccctgaaggccaccctgcaggccctgctggaggtggtggccagcgacgacggcgacgtgctggacagcttccagaccagccccagcaccgagagcctgaagagcaccagcagcgaccccggcagcagacaggccggcagaagaagaggccagcagcaggagaccgagaccttctacctgaccaagctgcaggagtacctgagcggcagaagcatcctggccaagctgcaggccaagcacgagaagctgcaggaggccctgcagagaggcgacaaggaggagcaggaggtgagctggacccagtacacccagagaaagttccagaagagcagacagcccagacccagcagccagtacaaccagagactgttcggcggcgacatggagaagttcatccagagcagcggccagcccgtgcccctggtggtggagagctgcatcagattcatcaacctgaacggcctgcagcacgagggcatcttcagagtgagcggcgcccagctgagagtgagcgagatcagagacgccttcgagagaggcgaggaccccctggtggagggctgcaccgcccacgacctggacagcgtggccggcgtgctgaagctgtacttcagaagcctggagccccccctgttcccccccgacctgttcggcgagctgctggccagcagcgagctggaggccaccgccgagagagtggagcacgtgagcagactgctgtggagactgcccgcccccgtgctggtggtgctgagatacctgttcaccttcctgaaccacctggcccagtacagcgacgagaacatgatggacccctacaacctggccgtgtgcttcggccccaccctgctgcccgtgcccgccggccaggaccccgtggccctgcagggcagagtgaaccagctggtgcagaccctgatcgtgcagcccgacagagtgttcccccccctgaccagcctgcccggccccgtgtacgagaagtgcatggccccccccagcgccagctgcctgggcgacgcccagctggagagcctgggcgccgacaacgagcccgagctggaggccgagatgcccgcccaggaggacgacctggagggcgtggtggaggccgtggcctgcttcgcctacaccggcagaaccgcccaggagctgagcttcagaagaggcgacgtgctgagactgcacgagagagccagcagcgactggtggagaggcgagcacaacggcatgagaggcctgatcccccacaagtacatcaccctgcccgccggcaccgagaagcaggtggtgggcgccggcctgcagaccgccggcgagagcggcagcagccccgagggcctgctggccagcgagctggtgcacagacccgagccctgcaccagccccgaggccatgggccccagcggccacagaagaagatgcctggtgcccgccagccccgagcagcacgtggaggtggacaaggccgtggcccagaacatggacagcgtgttcaaggagctgctgggcaagaccagcgtgagacagggcctgggccccgccagcaccaccagccccagccccggccccagaagccccaaggccccccccagcagcagactgggcagaaacaagggcttcagcagaggccccggcgcccccgccagccccagcgccagccacccccagggcctggacaccacccccaagccccactag

SEQ ID NO: 119807 - DNA, 2841 bp, Artificial Sequence
  derived and/or modified sequence
atggccgcacacggcaaacttcggagggagagagggcttcaggccgaatacgaaacgcaagtcaaagagatgagatggcaattgtctgaacagctgagatgcttggagctgcagggggaactgcgacgggaactactccaggagcttgccgagttcatgagaaggcgggccgaggtggagctcgaatactcaaggggcctggaaaaactcgctgagcggttttcaagcagaggaggccgtctagggtccagccgggaacaccaatcattccggaaggagccatccctgctttcgccactccattgctgggccgtcttactacagcacacaaggcagcagtctagggagtctgccgctttgtcggaggtgcttgccggaccactcgcacaaagactcagccatattgccgaggacgttggcaggctggtgaagaaatccagagacctggagcagcaactacaggatgagctcctagaagtagtctcggagctgcaaaccgctaaaaagacttaccaggcgtatcatatggagtctgttaacgctgaagctaagctgagagaggctgagcgccaagaggagaagagagcaggacgttctgtacctacaaccacagcaggcgcaaccgaagccggccccttaagaaaaagcagtctcaagaaaggcggtagactcgtggagaaacggcaagctaagttcatggagcataaactcaaatgtacgaaggcacgcaatgaatacctcctgtctcttgccagtgtgaatgctgctgttagcaattactatctgcacgatgtactcgacctgatggactgttgcgatactgggtttcacttagctttaggtcaagttctaagaagctacaccgctgctgagtcgcggactcaggcatcccaggtgcaggggctgggctccctggaagaggccgtggaagctctggacccaccgggagacaaggccaaggttttggaagttcacgccactgtcttttgcccacccctgagatttgattatcatccacatgacggcgacgaagtggctgaaatctgcgtcgaaatggaactgcgagacgagatccttcctagggctcagaatatccagtctcgcctggaccggcaaactatagagacagaggaagtcaacaaaacactgaaggcaactctgcaggcactcctcgaggtagtagccagtgacgatggagatgtcctcgattcttttcagaccagcccatcaacggagtcccttaaatctaccagctcagatcctggctctcgtcaagccgggaggcggcgaggacagcagcaggaaactgagacattttatctcactaaattgcaggagtatctcagcggaaggtctatcctcgccaaacttcaggccaaacatgagaaactccaagaagcactccagcggggcgataaggaggagcaagaagtatcctggacccagtacacgcagcggaaatttcagaaatctagacaacccaggcctagtagccagtacaatcagaggctgttcggaggcgacatggagaagtttatacagagtagcggacagccagtccccctggtggtagaatcttgtatcaggttcatcaatttaaacggcctccaacacgaggggatttttcgggtctcgggagcacagcttcgagtgagcgaaatccgagatgcctttgaaagaggtgaggatcccctggtggagggctgtactgcacatgatctcgattctgtggccggcgtcctaaaattgtatttccgttccctggaaccacctctgttccctccggacctgtttggcgaactgcttgccagcagcgagctagaggccaccgctgaacgggtggagcacgtatcacggctgctgtggcgcctcccagcccccgtgttagtggttttgcggtacctgtttacgttcctgaaccatctggcccagtatagcgacgaaaacatgatggatccatacaatttggccgtctgcttcggccctactctgctgcccgtcccggccggtcaggaccccgtggctttgcagggcagagtcaaccagttggttcagacacttatcgtgcaaccggatcgggtctttccccctttgacctcactcccaggtcccgtctacgagaagtgtatggccccaccatcagcctcatgccttggggatgcccagctggagtctctgggggctgacaatgaacccgaattagaagcagaaatgccagcacaggaggacgaccttgaaggtgtggtcgaggcggtggcttgcttcgcgtacacagggcgcacggctcaggagctctcatttcgtcggggggacgttctgagactgcacgagcgggcttcatctgactggtggcgaggagagcacaacggaatgaggggtctgattccacacaaatatattactcttcctgctggcaccgagaaacaggtcgttggggccggcctgcagaccgcgggagagtctggttccagccccgagggacttctcgcttctgagctggtgcatcgacccgagccctgcacgtcgcctgaagccatggggccaagtgggcacaggcgtaggtgtctcgtaccagcgtcccctgagcaacatgtggaagtcgacaaggccgtagcccagaatatggattccgtgtttaaagaactattgggcaaaacatccgtgcgacaaggactgggacctgcctctactacatctccaagcccaggcccaaggagtcctaaggcgccaccctcttcgcgactgggcagaaataagggcttttccagaggtccaggcgcaccagccagtccgagcgcgagtcatcctcagggcctcgacacaactcccaaaccccattag

SEQ ID NO: 119808 - DNA, 2778 bp, Artificial Sequence
  derived and/or modified sequence
atggcggcacacggaaagctgaggcgggagagaggcctgcaggctgagtatgaaacgcaggttaaggagatgcgatggcagcttagcgagcagttacgttgtctggagcttcaaggagaactcaggagggagctcctacaggagttagctgaattcatgaggcggcgggctgaggtagaactggagtatagcaggggtctggaaaaactggccgagcgcttctcctctcgtggtgggaggctggggagctcacgagaacaccaaagcttcagaaaggaacccagcttgctttccccccttcattgctgggccgtactcctacagcatacaagacagcagtctagagagagtgccgcactaagtgaagtccttgccggccctctcgctcaacgcctctcacacatcgccgaagacgtcggacggcttgtcaagaaagcgaagaaaacttatcaggcgtaccatatggagagcgtgaacgctgaagctaagctccgcgaagccgagagacaggaagagaagcgggctggacgctctgttcccaccactactgcgggagcaaccgaagccggaccacttaggaaatcctctcttaagaaaggcggcagactcgtggaaaagcgccaggccaaatttatggaacataaactgaaatgtacaaaggccagaaatgagtacctgctatctctggcctctgttaatgcagccgtttcaaattattacctccatgacgttcttgacctgatggattgctgtgacaccggcttccaccttgccttaggccaagttctgaggagttacaccgcagccgaaagcagaacccaagcgtcgcaggtccagggcctgggttctctcgaggaagctgttgaggccctggacccccccggagataaggccaaagtcctggaggtgcatgcaactgtgttttgtccccctttgcgctttgactaccaccctcacgacggcgacgaagtggcggagatatgtgtggaaatggagctgagagacgagatcctaccccgagcccagaacatccagtctcgtttagatagacagactatagagacagaagaggtgaataagaccctgaaagcaacactccaggcgctcctggaggttgttgccagtgatgatggtgacgtgttggactcttttcaaacttcaccatctacagagtccctgaagtctacatccagtgaccctgggtcgaggcaggcaggccggcgaagaggacaacagcaagagaccgagacattctatttgaccaaactgcaagaatatttaagtggcagatccatccttgcaaaattacaagccaaacatgagaagctgcaagaggccttgcagaggggggacaaggaggaacaggaagtgtcttggacacagtatacgcagcgtaagttccagaagtccagacagccacgcccctcgtctcagtataatcagagacttttcgggggcgacatggagaagttcatacagtctagcgggcagcccgtacccctggtggttgagtcctgtattaggttcataaacctgaatggcctgcagcacgagggaatcttccgggtctcgggtgcgcagctgagagtgagtgagattcgcgacgcctttgagcgaggagaggaccctctggtagaaggatgcactgcacatgacctcgacagcgtagcgggcgtgctgaaactctatttccgttctttggaaccacctctgtttccaccagacctgtttggcgaactgctcgcttccagcgagttagaggcaaccgccgagcgcgtcgagcacgtcagtcgccttttatggagacttcctgctccagtactcgtcgtgcttagatatctgttcacatttctaaaccacctcgcacaatatagcgacgaaaacatgatggacccatataaccttgccgtttgcttcggcccaacccttctccctgtacctgccggtcaggaccccgttgccctgcagggaagggtcaaccaactcgtgcaaaccctgatcgtccagccggaccgggtttttccgcctctgacgtctttaccaggccccgtgtacgagaaatgcatggcccctcctagtgctagctgcctcggcgacgcgcagttagagtcactcggcgccgataatgaaccagagcttgaagccgagatgccagctcaggaggatgacttagagggcgtggtggaagccgtagcttgcttcgcttatacaggccgtaccgcccaggaactttctttcaggcggggcgacgtgctgcgactccacgaacgggccagcagcgactggtggcggggcgagcacaatggaatgcgaggcttaattccacataagtacatcactctcccagccgggactgaaaaacaggtcgttggagccggcttgcagaccgccggcgaatctggctcctccccagagggtctgctggcctccgagctcgttcacagaccagagccctgtacatctccagaagccatgggcccttctggccatcgcagacggtgtctggtgccagccagcccagagcagcatgtcgaagtggacaaagccgttgctcagaacatggactctgtctttaaagaactacttggcaagacttctgttaggcagggattgggaccagcatcaaccacctcacccagtccagggccccgctcccccaaagcaccccccagttccaggctgggcaggaacaaaggtttctcaagaggacccggcgcccctgcttcaccaagtgcctctcatccccagggccttgataccacgccaaaaccccattag

SEQ ID NO: 119809 - DNA, 2772 bp, Artificial Sequence
  derived and/or modified sequence
atgcgctggcaactctctgagcaattgcgatgtctagaattgcagggggagctgcgcagggaactcttgcaggagttggctgaatttatgcggagacgggcagaggtggaactcgagtattctcgagggcttgagaaactagccgaacgcttttcctctaggggcggcagattgggctcatcccgggagcatcagagctttagaaaggagccctctttgctaagtcctctccactgctgggctgtactgcttcagcacactcgacaacaatctagggagagcgccgccctctccgaggtgctggcaggtccactcgctcagagattgtctcatatcgctgaagatgtgggtcgcctagtgaagaagtcccgggatcttgagcaacagctgcaagacgagctattggaagtggtgagtgagctgcagacagccaagaaaacttatcaggcataccacatggagtcggtgaacgctgaagccaaactgcgcgaagccgagcgacaggaagagaagcgggctggacgctccgtacctacaactacagccggcgctacggaagcaggtcccctcaggaaatcgtccctgaagaaaggcgggagactggtggaaaaacgacaggctaaattcatggaacataagctgaagtgcacgaaggccagaaatgagtatctcttgtccttggcctcagtgaacgctgctgtctccaattactacttgcatgacgtgcttgacctgatggattgctgcgacacagggttccacctagccctggggcaggtcctgaggtcgtatacagccgcagaatctaggacccaggcaagtcaagtgcaaggactggggagtctcgaggaggccgtcgaggctctggacccccctggggacaaagccaaagtgctggaggtacatgctacagtcttctgcccccccctacgttttgattaccatccccatgacggcgatgaggttgcagaaatttgtgtggagatggagctgcgggacgaaatcttgcccagggcgcagaacatccaatctcgactggatagacagactattgagactgaagaggtgaataagactttaaaggccactctgcaagctctgctggaggttgtagcatcagacgacggcgatgtccttgattctttccagacttccccaagtacggagtcactgaagtcaacctcgtcagacccaggcagccggcaggctggccgccgcagaggccagcagcaggagaccgagacgttctatttaaccaagctccaggagtacctgtccggaagatcaatacttgccaaactgcaagctaaacacgaaaaactccaagaggctcttcaaagaggcgacaaggaggagcaggaggtgtcatggacccaatacacgcaacgtaagtttcagaaatcccggcagccacggccgtcatctcagtacaaccaacgtttattcgggggagatatggaaaagttcatccagtcctcaggccagccagtaccactggtggtcgagtcctgtatcagatttataaacctcaatggcctgcagcacgaaggcatctttagagtgagtggggcacaactccgagtgtcagagatccgggacgcattcgaacggggggaagacccccttgtggaggggtgcacagcacacgaccttgacagcgtcgccggcgtgctgaagctgtactttagatctcttgaacccccactatttccccccgacctgtttggagagctcctggcctcctccgaactggaggcaactgctgagcgcgtcgaacacgtgtctcggctcctgtggcggctccctgctccggtgctcgtggtactccgctacctattcaccttcctgaatcatttagcccagtattccgacgagaacatgatggatccctacaatctagctgtgtgttttggccccactttgctccctgtaccagccggccaggacccagtcgctctgcaaggcagagtgaatcaactggtgcagacacttatagtccagcccgaccgagtcttccctcctctgacaagcctacctgggccggtgtacgaaaaatgcatggccccgccctccgcctcttgcctgggagatgcccagctggagagtctcggcgcagataacgagcccgagctcgaagccgagatgccagcacaggaggacgatctggagggcgtggtcgaggccgtggcttgtttcgcctacaccggacgcactgcccaggagctctcgttccgcaggggcgatgtgctgcgacttcacgaaagagccagttcagactggtggcgcggcgagcacaatggtatgaggggactgatcccgcacaagtatatcacactgcctgcaggcaccgagaaacaggttgtcggggctggattacaaactgccggggagtccggttcatcgcctgagggcctactggcttcggagctggttcacagacctgagccatgtactagccccgaggccatgggcccctctggacatagaaggagatgtctcgttcctgcctccccagagcagcacgtggaagtggataaagctgttgcacaaaatatggactctgtctttaaggagctgctgggtaaaactagtgtgcgacaaggattgggccccgcgagcaccacctctccaagccccgggcctcgaagccctaaagctcccccctcatcccggctcggtaggaacaaaggttttagcagggggcccggggcgcctgcgagtcctagtgcctcccatccgcaaggactggacacgacgccgaaaccccattag

SEQ ID NO: 119810 - DNA, 2841 bp, Artificial Sequence
  derived and/or modified sequence
atggccgcccacggcaagctgcggcgggagcggggcctgcaggccgagtatgagacccaggtgaaggagatgcgctggcagctgtctgagcagctgcgctgcctggagctgcagggcgagctgcggcgggagctgctgcaggagctggccgagttcatgagaagaagagctgaggtggagctggagtacagccggggcctggagaagctggccgagcgcttcagcagccggggcggccgcctgggcagcagccgggagcaccagagcttcaggaaggagcccagcctgctgagccccctgcactgctgggccgtgctgctgcagcacacccggcagcagagccgggagagcgctgccctgtctgaggtgctggccggccccctggcccagaggctgagccacatcgcagaagatgtgggccgcctggtgaagaagagccgggacctggagcagcagctgcaggatgagctgctggaggtggtgtctgagctgcagacagccaagaagacctaccaggcctaccacatggagagcgtgaatgctgaggccaagctgcgggaggccgagcggcaggaggagaagagagctggccgctctgtgcccaccaccacagctggggccacagaggccggccccctgaggaagagcagcctgaagaagggcggccgcctggtggagaagaggcaggccaagttcatggagcacaagctgaagtgcaccaaggccagaaatgagtacctgctgagcctggcctctgtgaatgctgctgtgagcaactactacctgcatgatgtgctggacctgatggactgctgtgacaccggcttccacctggccctgggccaggtgctgcggagctacacagctgctgagagcaggacccaggccagccaggtgcagggcctgggcagcctggaggaggccgtggaggccctggaccccccaggggacaaggccaaggtgctggaggtgcacgccaccgtcttctgcccccccctgcgctttgactaccacccccatgatggagatgaggtggccgagatctgtgtggagatggagctgagagatgagatcctgccccgggcccagaacatccagagccggctggaccggcagaccatcgagacagaggaggtgaacaagaccctgaaggccaccctgcaggccctgctggaggtggtggccagtgatgatggagatgtgctggacagcttccagaccagccccagcacagagagcctgaagagcaccagcagtgaccccggcagccggcaggccggcagaagaagaggccagcagcaggagacagagaccttctacctgaccaagctgcaggagtacctgagcggccgcagcatcctggccaagctgcaggccaagcatgagaagctgcaggaggccctgcagagaggagacaaggaggagcaggaggtgtcctggacccagtacacccagaggaagttccagaagagccggcagccccggcccagcagccagtacaaccagaggctgtttggaggagacatggagaagttcatccagagcagcggccagcctgtgcccctggtggtggagagctgcatccgcttcatcaacctgaatggcctgcagcacgagggcatcttccgggtgtctggggcccagctgcgggtgtctgagatcagagatgcctttgagcggggggaggaccccctggtggagggctgcacagcccatgacctggacagcgtggccggcgtgctgaagctgtacttccgcagcctggagcccccactcttccccccagacctgtttggagagctgctggccagcagcgagctggaggccacagctgagcgggtggagcacgtgtcccggctgctgtggaggctgcctgcccctgtgctggtggtgctgcgctacctgttcaccttcctgaaccacctggcccagtacagtgatgagaacatgatggacccctacaacctggccgtgtgcttcggccccaccctgctgcctgtgcctgctggccaggaccctgtggccctgcagggccgggtgaaccagctggtgcagaccctcatcgtgcagcctgacagagtcttcccccccctgaccagcctgcccggccctgtgtatgagaagtgcatggccccacccagcgccagctgcctgggagatgcccagctggagagcctgggcgctgacaatgaacctgagctggaggccgagatgcctgcccaggaggatgacctggagggcgtggtggaggccgtggcctgctttgcctacacaggccgcacagcccaggagctgtccttcagaagaggagatgtgctgcggctgcacgagcgggccagcagtgactggtggagaggagagcacaacggcatgaggggcctcatcccccacaagtacatcaccctgcctgctggaacagagaagcaggtggtgggcgccggcctgcagacagctggggagagcggcagcagccctgagggcctgctggccagcgagctggtgcacaggcctgagccctgcaccagccctgaggccatgggccccagcggccacagaagacgctgcctggtgcctgccagccctgagcagcacgtggaggtggacaaggctgtggcccagaacatggattctgtgttcaaggagctgctgggcaagacctctgtgcggcagggcctgggccctgccagcaccaccagccccagccctggccccaggagccccaaggccccacccagcagccggctgggcagaaataaaggcttcagccggggccctggggccccagccagccccagcgccagccacccccagggcctggacaccacccccaagccccactag

SEQ ID NO: 119811 - DNA, 2778 bp, Artificial Sequence
  derived and/or modified sequence
atggccgcccacggcaagctgcggcgggagcggggcctgcaggccgagtatgagacccaggtgaaggagatgcgctggcagctgtctgagcagctgcgctgcctggagctgcagggcgagctgcggcgggagctgctgcaggagctggccgagttcatgagaagaagagctgaggtggagctggagtacagccggggcctggagaagctggccgagcgcttcagcagccggggcggccgcctgggcagcagccgggagcaccagagcttcaggaaggagcccagcctgctgagccccctgcactgctgggccgtgctgctgcagcacacccggcagcagagccgggagagcgctgccctgtctgaggtgctggccggccccctggcccagaggctgagccacatcgcagaagatgtgggccgcctggtgaagaaggccaagaagacctaccaggcctaccacatggagagcgtgaatgctgaggccaagctgcgggaggccgagcggcaggaggagaagagagctggccgctctgtgcccaccaccacagctggggccacagaagctggccccctgaggaagagcagcctgaagaagggcggccgcctggtggagaagaggcaggccaagttcatggagcacaagctgaagtgcaccaaggccagaaatgagtacctgctgagcctggcctctgtgaatgctgctgtgagcaactactacctgcatgatgtgctggacctgatggactgctgtgacaccggcttccacctggccctgggccaggtgctgcggagctacacagctgctgagagcaggacccaggccagccaggtgcagggcctgggcagcctggaggaggccgtggaggccctggaccccccaggggacaaggccaaggtgctggaggtgcacgccaccgtcttctgcccccccctgcgctttgactaccacccccatgatggagatgaggtggccgagatctgtgtggagatggagctgagagatgagatcctgccccgggcccagaacatccagagccggctggaccggcagaccattgaaacagaggaggtgaacaagaccctgaaggccaccctgcaggccctgctggaggtggtggccagtgatgatggagatgtgctggacagcttccagaccagccccagcacagagagcctgaagagcaccagcagtgaccccggcagccggcaggccggcagaagaagaggccagcagcaggagacagagaccttctacctgaccaagctgcaggagtacctgagcggccgcagcatcctggccaagctgcaggccaagcatgagaagctgcaggaggccctgcagagaggagacaaggaggagcaggaggtgtcctggacccagtacacccagaggaagttccagaagagccggcagccccggcccagcagccagtacaaccagaggctgtttggaggagacatggagaagttcatccagagcagcggccagcctgtgcccctggtggtggagagctgcatccgcttcatcaacctgaatggcctgcagcacgagggcatcttccgggtgtctggggcccagctgcgggtgtctgagatcagagatgcctttgaaagaggagaggaccccctggtggagggctgcacagcccatgacctggacagcgtggccggcgtgctgaagctgtacttccgcagcctggagcccccactcttccccccagacctgtttggagagctgctggccagcagcgagctggaggccacagctgagcgggtggagcacgtgtcccggctgctgtggaggctgcctgcccctgtgctggtggtgctgcgctacctgttcaccttcctgaaccacctggcccagtacagtgatgagaacatgatggacccctacaacctggccgtgtgcttcggccccaccctgctgcctgtgcctgctggccaggaccctgtggccctgcagggccgggtgaaccagctggtgcagaccctgattgtgcagcctgacagagtcttcccccccctgaccagcctgcccggccctgtgtatgagaagtgcatggcccctccttctgccagctgcctgggagatgcccagctggagagcctgggcgctgacaatgaacctgagctggaggccgagatgcctgcccaggaggatgacctggagggcgtggtggaggccgtggcctgctttgcctacacaggccgcacagcccaggagctgtccttcagaagaggagatgtgctgcggctgcacgagcgggccagcagtgactggtggagaggagagcacaacggcatgaggggcctcatcccccacaagtacatcaccctgcctgctggaacagagaagcaggtggtgggcgccggcctgcagacagctggggagagcggcagcagccctgagggcctgctggccagcgagctggtgcacaggcctgagccctgcaccagccctgaggccatgggccccagcggccacagaagacgctgcctggtgcctgccagccctgagcagcacgtggaggtggacaaggctgtggcccagaacatggacagcgtcttcaaggagctgctgggcaagacctctgtgcggcagggcctgggccctgccagcaccaccagccccagccctggccccaggagccccaaggccccacccagcagccggctgggcaggaacaagggcttcagccggggccctggggccccagccagccccagcgccagccacccccagggcctggacaccacccccaagccccactag

SEQ ID NO: 119812 - DNA, 2772 bp, Artificial Sequence
  derived and/or modified sequence
atgcgctggcagctgtctgagcagctgcgctgcctggagctgcagggcgagctgcggcgggagctgctgcaggagctggccgagttcatgagaagaagagctgaggtggagctggagtacagccggggcctggagaagctggccgagcgcttcagcagcagaggaggccgcctgggcagcagccgggagcaccagagcttcaggaaggagcccagcctgctgagccccctgcactgctgggccgtgctgctgcagcacacccggcagcagagccgggagagcgctgccctgtctgaggtgctggccggccccctggcccagaggctgagccacatcgccgaggatgtgggccgcctggtgaagaagagccgggacctggagcagcagctgcaggatgagctgctggaggtggtgtctgagctgcagacagccaagaagacctaccaggcctaccacatggagagcgtgaatgctgaggccaagctgcgggaggccgagcggcaggaggagaagagagctggccgctctgtgcccaccaccacagctggggccacagaagctggccccctgaggaagagcagcctgaagaagggcggccgcctggtggagaagaggcaggccaagttcatggagcacaagctgaagtgcaccaaggccagaaatgagtacctgctgagcctggcctctgtgaatgctgctgtgagcaactactacctgcatgatgtgctggacctgatggactgctgtgacaccggcttccacctggccctgggccaggtgctgcggagctacacagctgctgagagcaggacccaggccagccaggtgcagggcctgggcagcctggaggaggccgtggaggccctggaccccccaggggacaaggccaaggtgctggaggtgcacgccaccgtcttctgcccccccctgcgctttgactaccacccccatgatggagatgaggtggccgagatctgtgtggagatggagctgagagatgagatcctgccccgggcccagaacatccagagccggctggaccggcagaccattgaaacagaggaggtgaacaagaccctgaaggccaccctgcaggccctgctggaggtggtggccagtgatgatggagatgtgctggacagcttccagaccagccccagcacagagagcctgaagagcaccagcagtgaccccggcagccggcaggccggcagaagaagaggccagcagcaggagacagagaccttctacctgaccaagctgcaggagtacctgagcggccgcagcatcctggccaagctgcaggccaagcatgagaagctgcaggaggccctgcagagaggagacaaggaggagcaggaggtgtcctggacccagtacacccagaggaagttccagaagagccggcagccccggcccagcagccagtacaaccagaggctgtttggaggagacatggagaagttcatccagagcagcggccagcctgtgcccctggtggtggagagctgcatccgcttcatcaacctgaatggcctgcagcacgagggcatcttccgggtgtctggggcccagctgcgggtgtctgagatcagagatgcctttgaaagaggagaggaccccctggtggagggctgcacagcccatgacctggacagcgtggccggcgtgctgaagctgtacttccgcagcctggagcccccactcttccccccagacctgtttggagagctgctggccagcagcgagctggaggccacagctgagcgggtggagcacgtgtcccggctgctgtggaggctgcctgcccctgtgctggtggtgctgcgctacctgttcaccttcctgaaccacctggcccagtacagtgatgagaacatgatggacccctacaacctggccgtgtgcttcggccccaccctgctgcctgtgcctgctggccaggaccctgtggccctgcagggccgggtgaaccagctggtgcagaccctgattgtgcagcctgacagagtcttcccccccctgaccagcctgcccggccctgtgtatgagaagtgcatggcccctccttctgccagctgcctgggagatgcccagctggagagcctgggcgctgacaatgaacctgagctggaggccgagatgcctgcccaggaggatgacctggagggcgtggtggaggccgtggcctgctttgcctacacaggccgcacagcccaggagctgtccttcagaagaggagatgtgctgcggctgcacgagcgggccagcagtgactggtggagaggagagcacaacggcatgaggggcctcatcccccacaagtacatcaccctgcctgctggaacagagaagcaggtggtgggcgccggcctgcagacagctggggagagcggcagcagccctgagggcctgctggccagcgagctggtgcacaggcctgagccctgcaccagccctgaggccatgggccccagcggccacagaagacgctgcctggtgcctgccagccctgagcagcacgtggaggtggacaaggctgtggcccagaacatggacagcgtcttcaaggagctgctgggcaagacctctgtgcggcagggcctgggccctgccagcaccaccagccccagccctggccccaggagccccaaggccccacccagcagccggctgggcaggaacaagggcttcagccggggccctggggccccagccagccccagcgccagccacccccagggcctggacaccacccccaagccccactag

SEQ ID NO: 119813 - DNA, 2841 bp, Artificial Sequence
  derived and/or modified sequence
atggccgcccacggcaagctgcggcgggagcggggcctgcaggccgagtacgaaacgcaagtgaaggagatgaggtggcaactgagcgagcagttacggtgcctggaactacagggcgagctcaggagagagctcctccaagaactcgccgagtttatgcggcggagagccgaggtcgaactggaatatagccgggggctcgaaaagcttgccgagaggttctcatcccgcggtgggaggctgggatcaagccgggagcaccagagctttcggaaggaaccttctctgctgagccctctccactgctgggccgtcctgctccaacatacccggcagcagagtcgggaaagcgctgcattaagcgaggtcctggccggccccctggcccagcgcttatcacacatcgctgaagatgttggacggcttgtaaagaaaagccgcgatcttgagcagcagctccaggatgagctgcttgaggtggtttcagaactgcagacagccaagaaaacataccaggcctaccacatggaaagtgtgaacgctgaagccaaattgcgcgaggccgagcgccaggaagagaaacgtgcgggtcgctccgtgccgaccactaccgccggggctaccgaggccgggcccctaagaaagagttcactgaagaaagggggccggttggtcgaaaaacgacaggccaagttcatggaacataagctgaagtgtactaaggctcgtaatgagtatctgttgtccctcgcctcagtgaatgcagcagtgagtaattactatcttcatgatgtcttggacctgatggactgctgtgacaccggtttccatctggctctaggccaggtcttgaggtcgtatacggcagcagagagtaggacacaggcatctcaggtgcaggggctgggaagtctggaggaggccgttgaggctctggacccacctggcgacaaagccaaagtccttgaggtgcatgctacggtgttctgcccccctctgcgattcgattatcaccctcatgacggggacgaggtcgctgagatttgcgtcgagatggagctgcgggatgagatcctgccgcgggctcagaatattcaatctagacttgatcgtcagacaattgagacggaggaggttaataagactttgaaggcaacgctgcaggcactcttggaggtggtagcctccgatgacggggacgtgctggatagcttccagactagcccaagcacagaatcgctaaagtcgacttcttctgaccccgggtcacgccaagccggccgacggaggggacagcagcaggagaccgagaccttctacttgaccaagctgcaggaatacctatctggcaggagcatcctggcaaaactgcaggctaagcacgagaagctgcaggaggccctgcagcgaggagataaagaggagcaggaagtctcgtggacacagtatacacaaagaaagttccagaagtctagacaacctaggccatcctcccagtataaccaaaggctcttcgggggggacatggaaaagtttatccagtcatctggacagcccgtgcccctggtggttgaatcctgtattcgcttcatcaatctgaacgggttacagcacgagggcatctttcgagtttcgggtgcgcaattgagggtgtcggaaatccgggatgcattcgagcgaggcgaagaccccctggtcgaaggctgcactgcacacgacctggattctgttgcaggggtcctgaaattgtatttccgtagtctggaaccacctttgtttcccccagacctgtttggagagctcctggctagctctgagttagaagcaacggccgaaagggtcgagcacgtctctcgtctgttatggcgcctgccggctcctgtgctagtagttcttcggtacctctttacgtttctgaaccatcttgctcaatactccgacgagaacatgatggatccgtacaatctcgccgtgtgctttggacccacgctgctcccagtgcccgcaggccaggatccagtggccttgcaaggtcgcgtgaaccagctggtgcagacgctcatcgtgcagcctgaccgggtcttccctcctctgacatccctgccgggtccggtgtacgagaagtgcatggccccgccatcagcctcatgtctgggcgatgctcagctagaatctctgggagccgataatgaacctgagttagaggcagaaatgcccgcgcaagaggacgacttggaaggagtggtagaagccgtggcttgctttgcatacacgggtagaacagcacaggagctctccttcaggcgaggagatgtgctgcgcctgcatgaaagagcctcctccgactggtggaggggggaacacaatggaatgagaggactcatcccacataagtatattacgcttcccgcagggactgaaaaacaggtggtgggagccggccttcagacagccggggagtccgggtcctcaccagaaggcctactggctagcgagcttgtacatcgtcccgaaccatgcacctccccagaggctatggggcccagcgggcacagacggcgctgtctggttcccgcaagcccagagcagcatgtggaagtggacaaagccgtagcccagaatatggatagtgtgttcaaggagctgctgggcaagacttctgtgagacagggattgggacccgcatccacaacctcaccttcgcccggtcccaggtcaccaaaggcccccccctccagtcggttgggaagaaacaaggggttctctcgggggcctggggcacctgcctctccttccgccagtcaccctcagggacttgacaccacgccaaagccacattag

SEQ ID NO: 119814 - DNA, 2778 bp, Artificial Sequence
  derived and/or modified sequence
atggccgcccacggcaagctgcggcgggagcggggcctgcaggccgagtatgagacacaggtgaaagagatgcgttggcagttgtcagagcagctgcgctgcttggaattgcaaggcgagcttaggagggaactgctacaagaactcgccgagttcatgaggcgccgcgccgaggtggaactcgaatatagtcgtgggttggagaaactggccgaacggttctcctcacgtggcggaaggctgggatccagcagagaacaccagtcgttccggaaggagcctagtctgctgtcaccacttcactgttgggccgttttgctccaacatactagacagcagtccagagaatctgctgctttgtctgaggtattagccggtcctctagcacaaaggctgtcccacatcgcggaggatgtgggtagactcgttaaaaaggcgaagaaaacttatcaggcctatcacatggagagtgtaaacgccgaggccaaactacgagaggccgaaaggcaagaggaaaagcgagctgggaggtcagtacctacaacaacagctggggcgactgaagccggcccacttagaaagtcttccctaaagaagggtgggcgcttggtcgagaagcgccaggcaaagtttatggagcacaagctgaaatgcaccaaggccagaaatgaatatctgttgtctctggccagtgtgaatgcagctgtgtccaactactacttgcacgatgtgttggaccttatggactgttgcgacacggggttccacctcgccctgggccaggtactgcgctcgtatacagccgctgaatcccgcacacaggcctcacaggtgcaggggctaggcagcttggaagaggccgtggaagcattagacccacccggcgataaggccaaggtccttgaagttcacgcaactgtgttttgcccacctctgcgattcgactaccatcctcatgatggtgacgaggtagccgagatttgcgtcgagatggagctgagagatgagattcttccacgggcacagaacattcagtcccgcttggaccgccagacaattgaaacagaggaagtcaataagacactcaaggctaccttacaggccctgttggaggtcgtagcttctgacgacggcgatgtccttgattctttccaaacctctccgagtactgaatctcttaagtcaacttcctctgacccgggatctaggcaagccggcaggcgtagggggcagcagcaagaaaccgagacattctatcttaccaaacttcaagagtacctttctggccgatcaattttagctaaactgcaggctaagcacgaaaaacttcaggaggccctccaacggggtgataaagaagagcaagaagtttcctggactcagtatacccaacgcaaatttcaaaagtcaaggcagccccggcctagctcccagtataaccagagacttttcggcggagatatggagaagtttatccaaagcagtggccagcccgtgcccttagtcgtggagagctgtatcaggttcattaatctgaacgggctgcaacatgagggaattttccgcgtgtccggtgctcagctgcgagtgtcagaaatacgggacgcctttgaacgaggagaagatccacttgtagaaggctgcaccgcgcatgatctcgatagcgtcgctggcgtcctaaagctgtactttaggagcctggaaccgccgctgttccctcctgaccttttcggcgagctcctggcctcttcagagctcgaggctacagcggaaagagtggaacatgtgtcaaggttgctgtggagactgccagctccagtgcttgtagtcctccgctacctgttcacttttttgaaccatctagctcagtactcagacgaaaatatgatggatccttacaacctcgccgtttgcttcggtcccaccttgctcccagttccagccgggcaggatccagtggcactccagggacgcgtgaaccagcttgttcaaaccctaatcgttcaacccgatcgggtgtttccacctctgacttctcttccaggcccagtgtacgaaaagtgtatggcccctccttctgcctcatgcctgggcgacgcccagttagaatccctaggagcagacaatgagcccgagctggaagccgagatgcccgcgcaggaagatgaccttgagggtgtggtcgaggccgtggcatgtttcgcctatacaggaagaaccgcgcaggagctgagttttcgccgcggtgatgtgctgcgtttgcatgaacgggcttcgtcagattggtggcggggagagcacaacgggatgcgggggctgatcccccacaagtatattactctcccagcgggtaccgaaaaacaggttgttggtgcaggccttcagacagcaggggaatctggatcctcacctgagggcctgctggccagtgagctagtccaccgacccgaaccttgcacttctccggaagcaatgggcccatcaggccatcgccggcgttgccttgtgcccgccagcccagagcaacacgttgaggtcgacaaggctgttgcacagaatatggactcggtgttcaaggagttgctgggtaagacctcggtgagacaggggctgggcccagctagtacaacaagtcccagccctggtcctcgcagccccaaagccccccccagttcgagattagggaggaataagggattctcccggggacccggagcccccgcttcacccagcgcatctcaccctcagggacttgacaccacccccaagccacactag

SEQ ID NO: 119815 - DNA, 2772 bp, Artificial Sequence
  derived and/or modified sequence
atgcggtggcagctgagcgagcagctgcggtgcctggagctgcagggggaactgcggagagagctgttacaggagctagctgaatttatgcgcagacgtgccgaggtggagctggaatatagccggggcctggaaaagcttgcagagcggtttagctctcggggcggtaggctcggcagttccagagaacatcagagctttcgcaaggagcccagtcttctgtcccccctgcattgttgggccgtgctcctgcagcacacacggcaacagtctagagaatcagccgcactcagcgaggtactcgcgggaccactagctcagagattaagccatatcgctgaagatgtgggacggctggtcaagaaaagcagagatctcgagcagcaactgcaggacgaactgttggaagtggtttcagagctccaaactgctaagaaaacctaccaagcttaccacatggagagcgttaatgctgaggccaagcttagagaagccgagcgacaagaggagaagcgagccgggcggtctgtgcccaccacaactgccggggcgacagaagctggacctttgcgaaaatccagcctgaagaaaggcggcaggttagtggagaaacgccaggctaaattcatggaacacaaactcaaatgcaccaaggcccgtaatgagtacctgctcagcttggcttccgtgaacgctgcggtttcgaactattacctgcacgacgtcctggacctcatggattgctgtgacacaggcttccacctggctctcggccaggtccttcgcagttacacagctgccgagagtagaactcaggcctcccaggtgcaaggactgggaagtttggaggaagcagtcgaggccctcgacccccctggtgataaggcaaaggtacttgaggtccatgccacagttttttgccctccactgaggttcgattaccatccccatgatggagacgaggtggctgaaatctgcgtcgaaatggagctgcgtgacgagatactcccccgcgcccagaacattcagtctaggctagaccggcagactatagagactgaagaagttaataaaaccctgaaggcaaccttgcaggccctactcgaagtggtggcttccgacgatggagatgtgctcgacagtttccagacaagcccttccaccgagagccttaaatccacttcctccgatcctggctctcggcaagccggccgcaggcggggacagcagcaagagacagaaaccttctacctgaccaagctgcaggaatatctctcaggtaggagtattctggctaaactccaggccaagcacgagaagctgcaagaggctctgcagcgcggcgataaggaagagcaggaagtgtcatggacacagtatactcagcggaagtttcagaaaagtcgtcaacctcgcccctcttcccagtacaatcagcgcctgttcggtggagatatggaaaaatttattcagtctagtggtcaacccgtcccactggtggtcgagagctgtatcaggttcatcaacctgaacggactccagcatgaaggaattttccgcgtgagcggcgctcagctcagagtctccgaaatcagagatgccttcgaacgtggggaggacccgctcgttgaagggtgcaccgcccatgacctggattccgtggccggcgtccttaaactctacttccggagcctcgagccgcctttatttccaccagatctgttcggggaactgctagctagcagtgaattggaagcgacagcggagcgggtggaacacgtctcccggttgctgtggaggctcccagctcctgtcctcgttgtactgcgatacctgttcacctttctgaatcacttagcccagtatagtgacgagaacatgatggatccatacaatctcgcagtttgtttcgggccaaccctccttcccgtgcccgcaggacaggatccagtagctctgcaaggaagagtgaatcagctggttcagacacttatagtgcagcccgatagggtgtttcctcccctgacgagccttccagggcctgtgtatgagaagtgcatggcccccccctcagccagctgcctcggggacgcccagcttgagagtttgggagcagataatgagcctgagctcgaggcggagatgcctgcacaggaagacgacctcgaaggtgtcgtggaagccgtcgcctgctttgcttataccgggcggaccgcacaagagttgtccttccggaggggcgacgtacttaggctccacgagagagcttcctctgattggtggagaggcgagcataacggtatgcgcggtcttataccgcataaatacatcacgttgccagccggtacggaaaaacaagttgtgggggctgggctgcagacagccggggaatcgggctcctctcctgaaggcctcctagcttccgagcttgttcacagaccagagccctgtaccagccccgaggccatgggaccctccggccataggagacgctgtctcgtgccggcttctccggagcagcacgtcgaggttgacaaggcggttgctcagaacatggacagtgtcttcaaggaactgctgggcaaaacaagtgtgcgtcaggggttggggcctgcatctaccacctccccttccccaggccctcggagtcccaaagcaccccccagtagcagacttgggagaaacaaaggcttctcaagggggccgggcgcaccagcatcacccagcgctagtcatccacagggtctggacaccacacccaagccacattag

SEQ ID NO: 119816 - DNA, 2841 bp, Artificial Sequence
  derived and/or modified sequence
atggcagcacacgggaagctacgccgagaaagggggctccaggctgagtacgagacacaggtcaaggaaatgagatggcagctgtcggaacagctccgctgcctggaactacagggcgagctgcggagagagctacttcaggagctcgctgaatttatgaggcggcgagcggaggtggaactggagtattctcggggactggaaaagctcgccgagcgttttagttctagagggggacgcctaggcagttcacgggagcaccaatcttttagaaaagagccaagcctgctttcgcctctccactgttgggcagttttattacaacatacccggcagcagagtagggaaagtgcggctttatccgaagttttggctgggccactcgctcagcgcttatcgcatatcgctgaagacgtcggtagactggtgaaaaaatcacgtgatctagagcagcagttgcaggatgaattattggaggtcgtgtctgagctccaaacagcgaaaaagacctatcaggcatatcatatggaatccgtcaatgccgaagccaaactgcgggaggcagagcgacaggaggagaagagggctggcaggtctgttccaacaactaccgcgggagctacggaggccggacctctccggaagtcatcactaaaaaagggcggtagactcgtggagaagagacaggcgaaatttatggagcataagctcaagtgcaccaaggcgcgaaacgaatacctgctgagcctggccagtgttaatgctgctgttagcaattattatctgcacgatgtgctcgatctgatggattgttgcgacacaggcttccacttagctcttggacaggtcctacgcagctatacagctgcagagagccggacgcaggcttctcaggtgcaaggtctgggctcactggaagaagctgtcgaagctctggacccacccggagataaagccaaggtcctggaagttcacgctacagtgttctgtcccccactccggttcgattaccatcctcacgatggcgatgaggtagctgagatttgcgtagaaatggagctgcgcgatgagattctacccagagctcaaaatattcaaagtaggcttgaccgtcagactattgagactgaggaggtgaataaaaccttaaaagcgactctccaggccctgctcgaagttgtcgcctccgacgacggggatgtcctcgactccttccagaccagtccctcaactgagagcctcaagtcaacctcttctgaccctggctctcgtcaagccggacgacgtagaggccagcagcaggagaccgaaaccttctatctaaccaagctgcaagagtacctctcgggtaggtcgatactggcaaaacttcaagccaagcacgagaagctgcaggaagccttacagcgcggagataaggaggaacaagaggtgtcgtggacccagtacactcaaagaaagttccaaaaatctcgccaacctcgaccgtcatcacagtacaaccagaggctgttcggcggagacatggaaaagttcatccagagctctggccagcccgtccctctggtagtggagtcgtgcattcgctttattaacctcaatgggctgcagcacgaaggaatattccgggtgtccggagcacagctgcgtgtgagcgaaattagagatgctttcgaacgcggagaagatccattagttgaaggctgcaccgcccacgacctagactccgttgccggagttctgaagctttactttcggagtcttgaaccccctctcttccctcctgatctgttcggggaactgctggcctcctccgagctggaggcgacagctgaaagggttgaacacgtttcgcggttgctttggaggctcccggcacctgtcctcgtcgtgctgcgttatttattcacatttttgaaccacctggctcagtactcagatgaaaatatgatggacccttacaatcttgctgtgtgttttggtcctacactattgccagtacccgcaggccaagatccagttgccctacaaggcagagtgaaccagctcgtgcagaccctcattgttcagcctgaccgcgtattcccccctctcacttctttacccggacccgtctacgagaaatgcatggcccctccatccgccagctgccttggggacgctcaactcgaatctctgggagcggataatgaacccgaacttgaagccgaaatgccggcacaagaggatgacttggagggagttgtcgaagctgtggcatgctttgcttatactgggagaacggcgcaggagctcagtttccggcgtggagacgtcctgcgattgcatgagcgagccagcagcgactggtggcgcggtgagcataacggaatgagggggcttattccccacaagtacattacgctgccagccggtacggagaagcaagtcgttggcgcaggccttcagacagccggagagtccggttcctctccggaaggactgttggccagcgaacttgtgcacagaccggagccctgtacctccccagaggcaatgggcccttcaggacatcgcagacgctgcctggtccctgctagtccagagcagcacgtcgaggtggataaggctgttgcccagaatatggatagtgtgttcaaagaactgctgggtaagacgagcgtgcgacaaggcctcggcccagcatctacaacttcacccagccctggacctcgctcgcccaaggctccaccatcgtctagattaggaaggaacaagggtttctcacgcggtccaggtgccccagcgtcgccttcagcatcccatccccagggtctggatactacccctaaaccgcactag

SEQ ID NO: 119817 - DNA, 2778 bp, Artificial Sequence
  derived and/or modified sequence
atggccgctcatggcaaactgagacgcgaacggggactgcaagccgagtacgagacacaagtgaaagagatgaggtggcagctgtcagaacagctcaggtgtcttgaactacagggggaattgagaagagagctgctgcaagagctcgccgaattcatgagacggagggcagaggtggaacttgagtatagtagaggcctggaaaagttggccgagcgattcagctctcgtggtggacgtctgggctccagccgtgaacatcagtcctttcgcaaggagcccagcctactgagccccctccattgctgggcggttcttctccagcacactcgccagcagtctcgtgaatccgccgcactgtctgaagtcctggccggacctctggcccagaggctgagtcatatcgccgaagacgtcggtcgcctggttaagaaagctaaaaaaacttatcaggcctatcacatggagagcgtgaatgccgaggccaaacttagagaagccgagcgtcaagaggagaagagagcaggcagaagcgtgcctaccaccaccgcgggagctaccgaagctgggccactccgcaagtctagcctgaagaagggaggacggctagtggagaaacgccaggctaaattcatggagcataagttaaagtgcaccaaggcgcgaaatgagtatctgttgtcattggcttccgtgaacgccgcagtctctaattattatttgcatgatgtactggaccttatggactgttgtgacacgggctttcacttagcgcttggacaagtgctgcgcagttatacagcagcagagagtcggacccaggcgagtcaagtgcagggactcgggtcactggaggaagccgtagaagcccttgacccacctggcgacaaagcgaaagtgctggaggttcacgccacggtgttctgcccgccactcaggttcgactatcaccctcatgatggcgatgaggtggctgaaatctgtgtcgagatggaattaagagacgaaatcttaccacgcgctcagaacatccagtccaggctggatcggcagactattgagacagaagaggtgaataaaaccttaaaggctaccctgcaggctctgctggaggtggttgccagcgatgacggggacgtgcttgatagctttcagacttccccttccactgagagtcttaagtccacctcctctgaccccggttcaagacaagcaggtagaaggagaggccagcaacaggagacagagaccttttatctcaccaagctgcaggaatatctgtctggtcggtcgatcctggctaaactacaagcaaagcatgagaaactacaggaagccttgcaacggggagataaggaagagcaggaggtttcctggacccaatatacgcagcggaagtttcaaaaatctcggcaacctcgcccttcatctcagtacaatcaacgcctcttcggcggtgacatggaaaaattcattcaatcttctgggcagcctgttcccctagtggttgagagttgtatccgattcattaacctgaatggcctgcagcacgagggtatcttccgcgtgtcaggggctcagctgcgtgtctcagaaatcagagatgcatttgagagaggagaagaccctctcgtcgaaggttgtaccgcacacgatctcgattccgtggcaggggtcttgaagttatatttcagatccctggagccaccactgtttcctccagacctgttcggggaactcctggcttcttcagaactcgaggccacagccgagagggtggaacacgtttctcggcttctgtggaggctgccggctccagtgttagtggtgctgcgatatctctttacttttcttaaccacctggcccagtattccgatgaaaacatgatggacccgtacaatctggccgtgtgcttcggtcctactctcctccccgtaccagccggtcaggacccagtggctctccagggacgggtgaaccagctggtgcagacccttattgtgcagcctgatagggttttccctcctttgacatctctcccaggaccagtgtacgaaaagtgcatggcgcctcctagcgccagctgtctcggagacgcacagctagaaagcctcggggctgataacgagcccgaattagaggcagagatgccagcccaggaggacgatctggaaggcgtagtggaggctgttgcatgttttgcatacactgggagaactgcccaggagcttagctttcgccgtggagacgtccttagacttcatgaaagggctagcagtgattggtggaggggtgagcataacggcatgagaggtctcattccccacaaatacattacactccctgccggaactgaaaagcaagtcgtcggcgctggcctgcagaccgctggtgagtccggcagctccccggagggtttgcttgcatctgaactggtgcaccggccagagccatgtacgagccccgaagccatgggcccatccggccataggcgacggtgtctagtgcctgcttcccccgagcagcatgtcgaagtggacaaagccgttgctcaaaatatggactctgttttcaaagagcttctggggaagacctcggtaaggcagggattagggcctgcttctacgacctcaccatctccgggacctagaagcccaaaagcgcctccctcctctaggcttggacggaacaaagggttttccagagggccaggagctcctgccagcccctcggcgtcccatcctcaggggctcgacaccactcctaaaccacattag

SEQ ID NO: 119818 - DNA, 2772 bp, Artificial Sequence
  derived and/or modified sequence
atgcggtggcaactgtcagagcagctccgctgtcttgagcttcagggagaactgcggagagagttgctgcaggagctagccgagttcatgagaagaagggccgaggtggagctggaatatagtaggggtctggagaagctggcagagcggtttagtagtcgtgggggacgattaggatcgtctcgcgaacaccagtcctttcgcaaagagccatcacttttgtcacctttgcattgttgggctgtattgctacagcatacaaggcagcagagtcgagaatcagcggctctgtcggaggtgctcgcgggacccctcgcgcagagactgagccacattgcagaagacgtgggacgcctcgtgaagaaatctcgcgacctcgagcagcagctgcaggacgagctcctggaggtggtgtccgagctgcaaacagccaaaaagacctaccaggcgtaccacatggaatcagttaatgcggaggctaaactacgggaagcagaacgccaggaagagaaaagggccggtcggtccgtgccaacaacgaccgcaggcgcaaccgaggctgggcctttgcggaaatcatcgctcaaaaaagggggacgccttgttgaaaagagacaagcgaagtttatggaacacaaattgaaatgtaccaaggctcgaaatgaatatttgctcagtctggcttccgtgaacgctgcagtatcaaattactacctacatgacgtactcgaccttatggattgctgcgatactggtttccacttggctttaggccaggtcctgcgaagctacaccgcagccgaatcccgcacacaagcatctcaggtccaagggcttgggtctttggaagaggctgtcgaagctttggatccccctggagacaaggcgaaagtgctcgaagtacacgccacagtgttttgccctcctctgaggtttgactaccacccccatgacggcgatgaggttgccgaaatatgcgtcgagatggagttgagagacgagattcttcctcgggcacaaaatattcaaagtagattagaccggcagacaatcgaaacagaggaggtgaataaaacgctgaaggccaccctgcaagccctgcttgaagttgtagcctccgacgatggagatgtgctggatagtttccagacctccccatccactgagtctctgaagtcaacatctagcgaccccggatcccgccaggcagggcgtagacggggacagcaacaggagactgaaaccttctacctgactaagctgcaggagtacttgtccggcaggtcaatcctggccaaacttcaggcaaagcatgagaagcttcaggaagcactgcagaggggcgataaagaggagcaggaggtttcatggacacagtacacgcagagaaagttccaaaagtctagacaaccacgcccttccagccagtataaccagagactgttcggaggcgatatggaaaaattcattcaaagctctgggcagcctgtcccactggtggtcgaatcttgcatccggtttattaacctcaatggcctgcagcatgaagggattttccgggtgagcggtgctcagcttcgggtatctgagattagggacgcattcgaacggggtgaagacccactggtcgagggatgtactgcacacgacctggattccgtcgcaggggtactcaaattatatttccggtcgctcgaacctccgctgtttccccctgacctctttggtgagctcctggccagttccgagcttgaggccaccgctgagagggtggagcatgtatccagactactctggcggctgccagccccagttctggtggtactgaggtatctgtttacttttctgaatcacttggcccagtactccgatgaaaatatgatggatccatacaacctcgccgtatgctttggcccaactcttttacccgtcccagctggtcaggatcccgtcgcactgcaggggagagtcaaccaactggttcaaaccctcattgtacagccagatcgagtgtttcctcccctcactagtttgcctgggcctgtgtacgagaaatgtatggcccctccaagtgctagttgcctgggtgacgcgcagctagagtccctgggtgcagataacgagcctgagctggaggctgaaatgcccgctcaggaagacgacctggaaggagtggtagaggctgtggcttgctttgcctacacagggcgtacggcgcaggaacttagcttccggcgaggggacgttcttcggttgcatgaaagagcaagttctgactggtggcgtggcgagcacaacggcatgcggggacttattcctcacaagtatattactcttcccgctggaaccgaaaaacaggtagtcggcgctggactacagacggccggagagtccgggagcagtccggaagggctcctcgcaagtgaattggtgcacagacccgagccatgcaccagccctgaggctatgggaccatcaggacatcggcgacggtgtctcgtgccagccagtcccgaacagcatgtcgaagtcgacaaggcagtggcacagaatatggacagtgtcttcaaggaactgctgggcaaaacttccgttcggcagggcctgggcccagcctccaccaccagcccgagcccaggccctaggtcacccaaagccccaccgagctctaggttgggccgtaacaaggggttttcaaggggccctggagcccctgcatcgccctcggccagccacccacaaggcttggacaccacacctaagccccactag

SEQ ID NO: 119819 - DNA, 3235 bp, Artificial Sequence
  derived and/or modified sequence
cgtgggagcagtggggttcgacggcgcggccgcgaggccgccatggccgctcacgggaagctgcggcgggagcgggggctgcaggctgagtatgagacgcaagtcaaagagatgcgctggcagctgagcgagcagctgcgctgcctggagctgcagggcgagctgcggcgggagttgctgcaggagctggcagagttcatgcggcgccgcgctgaggtggagctggaatactcccggggcctggaaaagctggccgagcgcttctccagccgtggaggccgcctggggagcagccgggagcaccaaagcttccggaaggagccgtccctcctgtcgcccttgcactgctgggcggtgctgctgcagcacacgcggcagcagagccgggagagcgcggccctgagtgaggtgctggccgggcccctggcccagcgcctgagtcacattgcagaggacgtggggcgcctggtcaagaagagcagggatctggagcagcagctgcaggatgagctcctggaggtggtctcagagctccagacggccaagaagacgtaccaggcatatcacatggagagcgtgaatgccgaggccaagctccgggaggccgagcggcaggaggagaagcgggcaggccggagtgtccccaccaccaccgctggtgccactgaggcagggcccctccgcaagagctccctcaagaagggagggaggctggtggagaagcggcaggccaagttcatggagcacaaactcaagtgcacaaaggcgcgcaacgagtacctgcttagcctggctagtgtcaacgctgctgtcagtaactactacctgcatgacgtcttggacctcatggactgctgtgacacagggttccacctggccctggggcaggtgctccggagctacacggccgctgagagccgcacccaagcctcccaagtgcagggcctgggcagcctggaagaagctgtggaggccctggatcctccaggggacaaagccaaggttctcgaggtgcatgctaccgtcttctgtcccccgctgcgctttgactaccacccccatgatggggatgaggtggctgagatctgcgttgaaatggagctgcgggacgagattctgcccagagcccagaacatccagagccgcctggaccgacagaccattgagacagaggaggtgaacaagactctgaaggcgacactgcaggccctgctggaggtggtggcctcggatgacggggatgtgcttgattccttccagaccagcccctccaccgagtccctcaagtccaccagctcagacccaggcagccggcaggcgggccggaggcgcggccagcagcaggagaccgaaaccttctacctcacgaagctccaggagtatctgagtggacggagcatcctcgccaagctgcaggccaagcacgagaagctgcaggaggcccttcagcgaggtgacaaggaggagcaggaggtgtcttggacccagtacacacagagaaaattccagaagagccgccagccccgccccagctcccagtataaccagagactctttgggggagacatggagaagtttatccagagctcaggccagcctgtgcccctggtggtggagagctgcattcgcttcatcaacctcaatggcctgcagcatgaaggcatcttccgggtatcgggtgcccagctccgggtctcagagatccgtgatgccttcgagagaggggaggacccactggtggagggctgcactgcccatgacctggactcggtggccggggtgctgaagctctacttccggagcctggagcccccactcttccccccagacctgttcggcgagctgctggcttcttcggagctggaggccacagcggagagggtggagcacgtgagccgcctgctgtggcggctgcccgcgccggtgctggtggttctgcgctacctcttcaccttcctcaaccacctggcccagtacagcgatgagaacatgatggacccctacaacctggccgtgtgcttcgggcccacgctgctaccggtgcccgctgggcaggacccggtggcgctgcagggccgggtgaaccagctggtgcagacgctcatagtgcagcccgatcgggtcttcccgcccctgacctcgctgcctggccccgtctacgagaagtgcatggcaccgccttccgccagctgcctgggggacgcccagctggagagcctgggggcggacaatgagccggagctggaagccgagatgcccgcacaggaggatgacctggagggggtcgtggaggctgtggcctgctttgcctacacgggccgcacagcccaggagctgagcttccggcggggggacgtactgcggctgcacgagagggcctcgagcgactggtggcggggggagcacaacggcatgcggggcctcatcccccacaagtatatcacgctgcccgccgggacggagaagcaggtggtgggcgcagggctgcagactgcaggggagtctgggagcagtcccgagggcctcctggcatcggagctggtccaccggccagagccatgcacctcacctgaggccatgggaccctctggacacagacgacgctgcttggtcccagcctccccagagcaacacgtggaggtggataaggctgtggcacagaacatggactctgtgtttaaggagctcttgggaaagacctctgtccgccagggccttgggccagcatctaccacctctcccagtcctgggccccgaagcccaaaggccccgcccagcagccgcctgggcaggaacaaaggcttctcccggggccctggggccccagcctcaccctcagcttcccacccccagggcctagacacgacccccaagccacactgaggtgccgctgctggagatgcgtgcccccggcggctacccgctggaccggccactctccccagcccccttgcttctctccagccctgtccagcaagtgcagggtgcctgcacttcaccctgtgcagagaggtgggatggggccgtgcacacagggatgcccgctccacatcctgcctgcccctcagccctggcccaggccccttttggaggcagctgaggaaggatgctggggaaagccctcttctgcagctttgtggaaggctgatcagtggctgctgggtggcgggtacccttgctcagatgcctggcagggctgggtggcgattcataaagacctcgtgttgattccccg

SEQ ID NO: 119820 - DNA, 3095 bp, Artificial Sequence
  derived and/or modified sequence
cgtgggagcagtggggttcgacggcgcggccgcgaggccgccatggccgctcacgggaagctgcggcgggagcgggggctgcaggctgagtatgagacgcaagtcaaagagatgcgctggcagctgagcgagcagctgcgctgcctggagctgcagggcgagctgcggcgggagttgctgcaggagctggcagagttcatgcggcgccgcgctgaggtggagctggaatactcccggggcctggaaaagctggccgagcgcttctccagccgtggaggccgcctggggagcagccgggagcaccaaagcttccggaaggagccgtccctcctgtcgcccttgcactgctgggcggtgctgctgcagcacacgcggcagcagagccgggagagcgcggccctgagtgaggtgctggccgggcccctggcccagcgcctgagtcacattgcagaggacgtggggcgcctggtcaagaaggccaagaagacgtaccaggcatatcacatggagagcgtgaatgccgaggccaagctccgggaggccgagcggcaggaggagaagcgggcaggccggagtgtccccaccaccaccgctggtgccactgaggcagggcccctccgcaagagctccctcaagaagggagggaggctggtggagaagcggcaggccaagttcatggagcacaaactcaagtgcacaaaggcgcgcaacgagtacctgcttagcctggctagtgtcaacgctgctgtcagtaactactacctgcatgacgtcttggacctcatggactgctgtgacacagggttccacctggccctggggcaggtgctccggagctacacggccgctgagagccgcacccaagcctcccaagtgcagggcctgggcagcctggaagaagctgtggaggccctggatcctccaggggacaaagccaaggttctcgaggtgcatgctaccgtcttctgtcccccgctgcgctttgactaccacccccatgatggggatgaggtggctgagatctgcgttgaaatggagctgcgggacgagattctgcccagagcccagaacatccagagccgcctggaccgacagaccattgagacagaggaggtgaacaagactctgaaggcgacactgcaggccctgctggaggtggtggcctcggatgacggggatgtgcttgattccttccagaccagcccctccaccgagtccctcaagtccaccagctcagacccaggcagccggcaggcgggccggaggcgcggccagcagcaggagaccgaaaccttctacctcacgaagctccaggagtatctgagtggacggagcatcctcgccaagctgcaggccaagcacgagaagctgcaggaggcccttcagcgaggtgacaaggaggagcaggaggtgtcttggacccagtacacacagagaaaattccagaagagccgccagccccgccccagctcccagtataaccagagactctttgggggagacatggagaagtttatccagagctcaggccagcctgtgcccctggtggtggagagctgcattcgcttcatcaacctcaatggcctgcagcatgaaggcatcttccgggtatcgggtgcccagctccgggtctcagagatccgtgatgccttcgagagaggggaggacccactggtggagggctgcactgcccatgacctggactcggtggccggggtgctgaagctctacttccggagcctggagcccccactcttccccccagacctgttcggcgagctgctggcttcttcggagctggaggccacagcggagagggtggagcacgtgagccgcctgctgtggcggctgcccgcgccggtgctggtggttctgcgctacctcttcaccttcctcaaccacctggcccagtacagcgatgagaacatgatggacccctacaacctggccgtgtgcttcgggcccacgctgctaccggtgcccgctgggcaggacccggtggcgctgcagggccgggtgaaccagctggtgcagacgctcatagtgcagcccgatcgggtcttcccgcccctgacctcgctgcctggccccgtctacgagaagtgcatggcaccgccttccgccagctgcctgggggacgcccagctggagagcctgggggcggacaatgagccggagctggaagccgagatgcccgcacaggaggatgacctggagggggtcgtggaggctgtggcctgctttgcctacacgggccgcacagcccaggagctgagcttccggcggggggacgtactgcggctgcacgagagggcctcgagcgactggtggcggggggagcacaacggcatgcggggcctcatcccccacaagtatatcacgctgcccgccgggacggagaagcaggtggtgggcgcagggctgcagactgcaggggagtctgggagcagtcccgagggcctcctggcatcggagctggtccaccggccagagccatgcacctcacctgaggccatgggaccctctggacacagacgacgctgcttggtcccagcctccccagagcaacacgtggaggtggataaggctgtggcacagaacatggactctgtgtttaaggagctcttgggaaagacctctgtccgccagggccttgggccagcatctaccacctctcccagtcctgggccccgaagcccaaaggccccgcccagcagccgcctgggcaggaacaaaggcttctcccggggccctggggccccagcctcaccctcagcttcccacccccagggcctagacacgacccccaagccacactgaggtgccgctgctggagatgcgtgcccccggcggctacccgctggaccggccactctccccagcccccttgcttctctccagccctgtccagcaagtgcagggtgcctgcacttcaccctgtgcagagaggtgggatggggccgtgcacacagggatgcccgctccacatcctgcctgcccctcagccctggcccaggccccttttggaggcagctgaggaaggatgctggggaaagccctcttctgcagctttgtggaaggctgatcagtggctg

SEQ ID NO: 119821 - DNA, 2987 bp, Artificial Sequence
  derived and/or modified sequence
attcagaggctttccaggaacgagggagagacaggaagccaaactgaaagagatgcgctggcagctgagcgagcagctgcgctgcctggagctgcagggcgagctgcggcgggagttgctgcaggagctggcagagttcatgcggcgccgcgctgaggtggagctggaatactcccggggcctggaaaagctggccgagcgcttctccagccgtggaggccgcctggggagcagccgggagcaccaaagcttccggaaggagccgtccctcctgtcgcccttgcactgctgggcggtgctgctgcagcacacgcggcagcagagccgggagagcgcggccctgagtgaggtgctggccgggcccctggcccagcgcctgagtcacattgcagaggacgtggggcgcctggtcaagaagagcagggatctggagcagcagctgcaggatgagctcctggaggtggtctcagagctccagacggccaagaagacgtaccaggcatatcacatggagagcgtgaatgccgaggccaagctccgggaggccgagcggcaggaggagaagcgggcaggccggagtgtccccaccaccaccgctggtgccactgaggcagggcccctccgcaagagctccctcaagaagggagggaggctggtggagaagcggcaggccaagttcatggagcacaaactcaagtgcacaaaggcgcgcaacgagtacctgcttagcctggctagtgtcaacgctgctgtcagtaactactacctgcatgacgtcttggacctcatggactgctgtgacacagggttccacctggccctggggcaggtgctccggagctacacggccgctgagagccgcacccaagcctcccaagtgcagggcctgggcagcctggaagaagctgtggaggccctggatcctccaggggacaaagccaaggttctcgaggtgcatgctaccgtcttctgtcccccgctgcgctttgactaccacccccatgatggggatgaggtggctgagatctgcgttgaaatggagctgcgggacgagattctgcccagagcccagaacatccagagccgcctggaccgacagaccattgagacagaggaggtgaacaagactctgaaggcgacactgcaggccctgctggaggtggtggcctcggatgacggggatgtgcttgattccttccagaccagcccctccaccgagtccctcaagtccaccagctcagacccaggcagccggcaggcgggccggaggcgcggccagcagcaggagaccgaaaccttctacctcacgaagctccaggagtatctgagtggacggagcatcctcgccaagctgcaggccaagcacgagaagctgcaggaggcccttcagcgaggtgacaaggaggagcaggaggtgtcttggacccagtacacacagagaaaattccagaagagccgccagccccgccccagctcccagtataaccagagactctttgggggagacatggagaagtttatccagagctcaggccagcctgtgcccctggtggtggagagctgcattcgcttcatcaacctcaatggcctgcagcatgaaggcatcttccgggtatcgggtgcccagctccgggtctcagagatccgtgatgccttcgagagaggggaggacccactggtggagggctgcactgcccatgacctggactcggtggccggggtgctgaagctctacttccggagcctggagcccccactcttccccccagacctgttcggcgagctgctggcttcttcggagctggaggccacagcggagagggtggagcacgtgagccgcctgctgtggcggctgcccgcgccggtgctggtggttctgcgctacctcttcaccttcctcaaccacctggcccagtacagcgatgagaacatgatggacccctacaacctggccgtgtgcttcgggcccacgctgctaccggtgcccgctgggcaggacccggtggcgctgcagggccgggtgaaccagctggtgcagacgctcatagtgcagcccgatcgggtcttcccgcccctgacctcgctgcctggccccgtctacgagaagtgcatggcaccgccttccgccagctgcctgggggacgcccagctggagagcctgggggcggacaatgagccggagctggaagccgagatgcccgcacaggaggatgacctggagggggtcgtggaggctgtggcctgctttgcctacacgggccgcacagcccaggagctgagcttccggcggggggacgtactgcggctgcacgagagggcctcgagcgactggtggcggggggagcacaacggcatgcggggcctcatcccccacaagtatatcacgctgcccgccgggacggagaagcaggtggtgggcgcagggctgcagactgcaggggagtctgggagcagtcccgagggcctcctggcatcggagctggtccaccggccagagccatgcacctcacctgaggccatgggaccctctggacacagacgacgctgcttggtcccagcctccccagagcaacacgtggaggtggataaggctgtggcacagaacatggactctgtgtttaaggagctcttgggaaagacctctgtccgccagggccttgggccagcatctaccacctctcccagtcctgggccccgaagcccaaaggccccgcccagcagccgcctgggcaggaacaaaggcttctcccggggccctggggccccagcctcaccctcagcttcccacccccagggcctagacacgacccccaagccacactgaggtgccgctgctggagatgcgtgcccccggcggctacccgctggaccggccactctccccagcccccttgcttctctccagccctgtccagcaagtgcagggtgcctgcacttcaccctgtgcagagaggtgggatggggccgtgcacacagggatgcccgct

SEQ ID NO: 119822 - protein, 184 aa, Artificial Sequence
  derived and/or modified sequence
MGLLTILKKMKQKERELRLLMLGLDNAGKTTILKKFNGEDIDTISPTLGFNIKTLEHRGFKLNIWDVGGQKSLRSYWRNYFESTDGLIWVVDSADRQRMQDCQRELQSLLVEERLAGATLLIFANKQDLPGALSSNAIREVLELDSIRSHHWCIQGCSAVTGENLLPGIDWLLDDISSRIFTAD

SEQ ID NO: 119823 - DNA, 555 bp, Artificial Sequence
  derived and/or modified sequence
atgggcctgctcaccatccttaaaaagatgaaacagaaggagcgggagctacggctgctaatgttggggctcgacaatgctggcaagacgaccattcttaagaagttcaatggagaagatatagacacaatttcaccgactctgggcttcaacatcaaaactctcgaacaccgcggctttaagctcaatatctgggatgtgggaggacaaaaatccttgcgttcctactggcgcaactactttgaaagtacggacggtttaatttgggtggtagactccgccgacagacagagaatgcaagattgccagagggagctccagtctttattggttgaggagcgcctcgctggtgccaccttgctgatcttcgcaaataagcaggacctgcccggcgccctgagttcaaacgccatcagagaggtcctcgaactcgactctatccgatcacatcactggtgtatccaggggtgttcggccgtgaccggagaaaatctgctcccaggaatagattggctgttggatgacatctccagccgaatttttacggcagattag

SEQ ID NO: 119824 - DNA, 555 bp, Artificial Sequence
  derived and/or modified sequence
atgggcttacttactattctcaagaagatgaagcagaaagagcgtgagctgcggttgctgatgttgggcctcgacaacgcggggaagactacaattctgaagaagtttaacggagaggatatcgacaccatctcccccacactgggctttaacattaagactctcgagcaccgtgggttcaaactcaacatctgggacgtggggggtcagaaatcgcttcgctcatactggcgcaattacttcgaaagtactgacggattgatttgggtcgtggactctgctgatcggcagcggatgcaggattgtcagcgggaactgcagtctctgctcgtggaagagaggctggccggcgccactttattgatcttcgccaataaacaggatctccctggcgcactgtccagcaacgctatccgagaagtactcgagctggactctatccgaagtcaccactggtgcatacaggggtgctcagccgtgacaggagaaaacctgctcccaggtatcgattggctgctggatgacatatcctcccggattttcacagccgattag

SEQ ID NO: 119825 - DNA, 979 bp, Artificial Sequence
  derived and/or modified sequence
gactatgccgtcggcgagcgtgatagccaacaggaaccgggagcggggtcccgggactgggaagaaacggcggccgggagggggctccggggaccatggggctcctgaccattctgaagaagatgaagcagaaagagcgggagctgcgactgctcatgcttggcctggacaatgctggaaagacaaccatcctgaagaagttcaatggggaggacatcgacaccatctccccaacgctgggcttcaacatcaagaccctggagcaccgaggattcaagctgaacatctgggatgtgggtggccagaagtccctgcggtcctactggcggaactactttgagagcaccgatggcctcatctgggtagtggacagcgcagaccgccagcgcatgcaggactgccagcgggagctccagagcctgctggtggaggagcgcctggccggagcaaccctcctcatctttgctaataagcaggacctgcctggagcactgtcctctaacgccatccgcgaggtcctggagctggactccatccgcagccaccactggtgcatccagggctgcagcgccgtcaccggggagaacctgctgccgggcatcgactggctcctggatgacatttccagccgcattttcacagctgactgaaccactccagatgccccccacctagcagtccaggtccctcaaccttcaccaaacactacccatggggggttgggagtcagccggccaaactaacactccccctcctccaccccagcctgctgctgctactgctgcccgctgctgctctgtggccacccggctcccatggcgggagggctgtgccctggctgtctctctggctcctgacctggcctttggctaccataccaagaagagagggctgggcggggaggagctgctactgctgctaccgaggctgtgggcctcatccttcactcagttgtgaaataaaccgctccttgccccga

SEQ ID NO: 119826 - DNA, 830 bp, Artificial Sequence
  derived and/or modified sequence
cggcggccgggagggggctccggggaccatggggctcctgaccattctgaagaagatgaagcagaaagagcgggagctgcgactgctcatgcttggcctggacaatgctggaaagacaaccatcctgaagaagttcaatggggaggacatcgacaccatctccccaacgctgggcttcaacatcaagaccctggagcaccgaggattcaagctgaacatctgggatgtgggtggccagaagtccctgcggtcctactggcggaactactttgagagcaccgatggcctcatctgggtagtggacagcgcagaccgccagcgcatgcaggactgccagcgggagctccagagcctgctggtggaggagcgcctggccggagcaaccctcctcatctttgctaataagcaggacctgcctggagcactgtcctctaacgccatccgcgaggtcctggagctggactccatccgcagccaccactggtgcatccagggctgcagcgccgtcaccggggagaacctgctgccgggcatcgactggctcctggatgacatttccagccgcattttcacagctgactgaaccactccagatgccccccacctagcagtccagcctgctgctgctactgctgcccgctgctgctctgtggccacccggctcccatggcgggagggctgtgccctggctgtctctctggctcctgacctggcctttggctaccataccaagaagagagggctgggcggggaggagctgctactgctgctaccgaggctgtgggcctcatccttcactcagttgtgaaataaaccgctccttgccccga

SEQ ID NO: 119827 - DNA, 555 bp, Artificial Sequence
  derived and/or modified sequence
atgggcctgctgaccatcctgaagaagatgaagcagaaggagcgggagctgcggctgctgatgctgggcctggacaatgccggcaagaccaccatcctgaagaagttcaatggagaagatattgacaccatcagccccaccctgggcttcaacatcaagaccctggagcaccggggcttcaagctgaacatctgggatgtgggcggccagaagagcctgcggagctactggaggaactactttgagagcacagatggcctcatctgggtggtggacagcgctgaccggcagaggatgcaggactgccagcgggagctgcagagcctgctggtggaggagcggctggccggggccaccctgctgatctttgccaacaagcaggacctgcccggggccctgagcagcaatgccatccgggaggtgctggagctggacagcatccgcagccaccactggtgcatccagggctgcagcgctgtgactggagagaacctgctgcccggcatcgactggctgctggatgacatcagcagccgcatcttcaccgctgactag

SEQ ID NO: 119828 - DNA, 555 bp, Artificial Sequence
  derived and/or modified sequence
atgggcctgctgaccatcctgaagaagatgaagcagaaggagcgggaattgaggctcctcatgctcggcctggataacgccggcaagactacaatcctgaagaagttcaatggagaggacatcgataccatatctcctacgctggggttcaatattaagaccctggaacacaggggattcaagttaaacatctgggatgtgggggggcaaaagtccctgcggagctactggcggaattacttcgagtctaccgacggtctgatttgggtggtggattccgctgaccgccagcgcatgcaggattgccagagagaactgcaaagcttgctggtggaggaacgcctggcaggtgccaccctgctgattttcgctaacaaacaggatctgccaggggccctgtcatcaaacgccatacgcgaagtcctggagctggattccatcaggtcccatcattggtgcatccagggctgttcggccgtgactggtgagaaccttcttcccggcatcgattggctgctcgatgatatcagctcgcggatttttacagccgactag

SEQ ID NO: 119829 - DNA, 555 bp, Artificial Sequence
  derived and/or modified sequence
atgggcctgctgaccatcctgaagaagatgaagcagaaggagcgggaactaagactgttaatgttaggattggataacgcaggtaaaacaacaatattgaaaaagtttaacggagaagacattgataccataagtccaactctcggctttaacattaaaacccttgagcaccgtgggttcaagctgaatatctgggatgtagggggacagaagtccctgaggtcttactggaggaattattttgagagcacagacgggcttatttgggtcgtcgactcagccgatcgccagaggatgcaggattgtcagagagaattacagagcttattggttgaagagcgcttggccggagcgaccctgctgatttttgcaaataaacaggatcttcctggcgctctgagttccaatgccatcagggaagtgctggagctggatagcattcggagccaccactggtgcatccagggctgctctgccgtgactggagagaacctgctcccaggcatagactggttactggatgacatatcttcccgtatcttcacagctgattag

SEQ ID NO: 119830 - DNA, 555 bp, Artificial Sequence
  derived and/or modified sequence
atggggcttctcactattctcaaaaagatgaagcagaaggaacgggagcttcgcctgctgatgttgggtctggacaatgccggaaagaccaccatcctaaaaaagttcaatggggaggacattgatacaattagtcctacgctgggcttcaacattaagaccctggaacaccgtggtttcaagctgaacatctgggatgtggggggtcagaagagccttcggtcctattggagaaattatttcgaaagtaccgatggccttatctgggtggtggattctgcagatagacaacgaatgcaggactgccagcgggagttacagagcctgctcgtagaagagcgacttgctggcgctaccctcttgatctttgctaacaaacaggatcttccgggagcattatcttccaacgcaattagggaagtgttggaattagatagtattcgtagccaccattggtgcatccaagggtgctctgccgtcactggggagaacctcctgccaggcattgattggctgcttgacgacattagtagcagaatattcactgctgactag

SEQ ID NO: 119831 - DNA, 555 bp, Artificial Sequence
  derived and/or modified sequence
atgggactgctgacgatccttaagaaaatgaagcagaaggagcgtgaattacgtctactgatgttaggcctggacaatgcgggaaaaaccaccattttgaagaaatttaatggggaggatatcgataccatttcaccaacactcgggttcaatatcaaaactcttgagcatagaggctttaagctgaatatatgggacgtgggaggacagaaatcattgcgtagttactggcgaaactactttgagagtaccgacggccttatatgggtggtggacagtgccgaccgccagagaatgcaagattgccagcgagaactgcagagcctgctggtagaagaacgccttgctggcgctacgcttcttatttttgccaataagcaggacttgcctggagcactttcctccaatgctatccgggaggtactggagttggactccatccggtcccaccactggtgcatccagggctgttccgccgttaccggggagaatctactacccggtatcgattggctgctcgacgatatctcaagcaggatatttacggctgattag

SEQ ID NO: 119832 - DNA, 555 bp, Artificial Sequence
  derived and/or modified sequence
atgggcctgctgaccatcctgaagaagatgaagcagaaggagagagagctgagactgctgatgctgggcctggacaacgccggcaagaccaccatcctgaagaagttcaacggcgaggacatcgacaccatcagccccaccctgggcttcaacatcaagaccctggagcacagaggcttcaagctgaacatctgggacgtgggcggccagaagagcctgagaagctactggagaaactacttcgagagcaccgacggcctgatctgggtggtggacagcgccgacagacagagaatgcaggactgccagagagagctgcagagcctgctggtggaggagagactggccggcgccaccctgctgatcttcgccaacaagcaggacctgcccggcgccctgagcagcaacgccatcagagaggtgctggagctggacagcatcagaagccaccactggtgcatccagggctgcagcgccgtgaccggcgagaacctgctgcccggcatcgactggctgctggacgacatcagcagcagaatcttcaccgccgactag

SEQ ID NO: 119833 - protein, 593 aa, Artificial Sequence
  derived and/or modified sequence
MRSAARRGRAAPAARDSLPVLLFLCLLLKTCEPKTANAFKPNILLIMADDLGTGDLGCYGNNTLRTPNIDQLAEEGVRLTQHLAAAPLCTPSRAAFLTGRHSFRSGMDASNGYRALQWNAGSGGLPENETTFARILQQHGYATGLIGKWHQGVNCASRGDHCHHPLNHGFDYFYGMPFTLTNDCDPGRPPEVDAALRAQLWGYTQFLALGILTLAAGQTCGFFSVSARAVTGMAGVGCLFFISWYSSFGFVRRWNCILMRNHDVTEQPMVLEKTASLMLKEAVSYIERHKHGPFLLFLSLLHVHIPLVTTSAFLGKSQHGLYGDNVEEMDWLIGKVLNAIEDNGLKNSTFTYFTSDHGGHLEARDGHSQLGGWNGIYKGGKGMGGWEGGIRVPGIFHWPGVLPAGRVIGEPTSLMDVFPTVVQLVGGEVPQDRVIDGHSLVPLLQGAEARSAHEFLFHYCGQHLHAARWHQKDSGSVWKVHYTTPQFHPEGAGACYGRGVCPCSGEGVTHHRPPLLFDLSRDPSEARPLTPDSEPLYHAVIARVGAAVSEHRQTLSPVPQQFSMSNILWKPWLQPCCGHFPFCSCHEDGDGTP

SEQ ID NO: 119834 - DNA, 1782 bp, Artificial Sequence
  derived and/or modified sequence
atgcggagcgcggctagaaggggacgcgcagcccccgccgccagggattcactgcctgtactgttgtttctgtgccttctgctaaagacctgtgaacccaagaccgccaatgctttcaaacccaatattcttctgatcatggctgatgacctgggcaccggagatctgggttgctatggcaacaatactctgcggacaccaaacattgaccagcttgccgaggagggagtgcgtctaacccagcatctggcagctgccccgctttgcactcccagccgagctgcgttcctcactggtagacactctttcagaagcggcatggacgcctccaatggttatcgtgcacttcagtggaatgctggttctggcggtttacccgaaaacgaaactacctttgctcgcatactccagcagcatggatatgccactggactgatcggcaagtggcatcagggcgtaaattgtgctagtcgaggcgaccactgccaccaccctttaaaccacggtttcgactacttttatggaatgccattcacactcacaaacgactgcgatccggggagacctccagaggtggacgcagcccttcgtgcacagctctgggggtatacacagttcctagctcttggcattctcaccctggccgctggccaaacctgtggatttttcagtgtttctgcgagagccgtcacaggaatggcaggcgttgggtgtctttttttcatttcctggtatagcagcttcggtttcgtcagacgctggaattgcatccttatgaggaaccacgacgtcacagaacagcccatggtgctcgagaagaccgcctctctgatgctcaaagaggcagtgtcttatatcgaacgtcataaacacggtcccttcctcctgtttctgtcactgctgcacgtgcacattcccctcgtgaccacatctgccttcctaggaaagagtcaacacgggttatatggcgacaatgtggaagagatggattggcttatagggaaggtgctcaatgccatcgaggataacggccttaagaattccacatttacttacttcacgagcgaccatggcggacacctggaggccagggatggacactcgcaactggggggctggaacggaatctacaaggggggtaaggggatgggcggttgggagggagggatcagggttcccggtatctttcactggcctggcgttctgccagccgggcgggtgatcggcgaacctacaagcctgatggatgtatttccaaccgtcgtgcagttggtcggtggggaggtaccgcaggacagagtgattgacggacactcccttgtccctttgctacaaggagcggaggctcgttctgcacacgaatttttatttcactactgcgggcaacacctacatgctgctcgctggcaccaaaaggactccggcagcgtgtggaaagtccactataccactccacagttccatcctgaaggtgctggcgcctgctacggaaggggggtgtgtccctgcagcggagagggtgtgacacatcataggccccctctccttttcgacctgtcccgcgatccttccgaagcacggcccctgacccctgatagtgaacctctgtaccatgccgtcatcgcacgtgtcggggccgctgtgtccgaacataggcagacgctgagtccagtcccccaacagtttagtatgtccaatattctgtggaaaccctggctgcaaccatgctgcggacactttcccttctgctcttgccacgaggatggcgacggtacaccgtag

SEQ ID NO: 119835 - DNA, 1782 bp, Artificial Sequence
  derived and/or modified sequence
atgaggtctgctgcccggcggggccgggccgccccagctgcccgggacagcctgcctgtgctgctcttcctgtgcctgctgctgaagacctgtgagcccaagacagccaatgccttcaagcccaacatcctgctgatcatggctgatgacctgggcactggagacctgggctgctacggcaacaacaccctgcggacccccaacatcgaccagctggccgaggagggcgtgcggctgacccagcacctggccgccgcccccctgtgcacccccagccgggccgccttcctgaccggccgccacagcttccgcagcggcatggatgccagcaatggctaccgggccctgcagtggaatgccggcagcggcggcctgcctgaaaatgagaccacctttgcccgcatcctgcagcagcacggctacgccaccggcctcatcggcaagtggcaccagggcgtgaactgtgccagcagaggagaccactgccaccaccccctgaaccacggctttgactacttctacggcatgcccttcaccctgaccaatgactgtgaccccggccggcccccagaggtggatgctgccctgcgggcccagctgtggggctacacccagttcctggccctgggcatcctgaccctggccgccggccagacctgtggcttcttctctgtgtctgcccgggctgtgacaggcatggccggcgtgggctgcctcttcttcatctcctggtacagcagctttggatttgtgcggcgctggaactgcatcctgatgaggaaccatgatgtgacagagcagcccatggtgctggagaagacagccagcctgatgctgaaggaggccgtgtcctacatcgagcggcacaagcacggccccttcctgctcttcctgagcctgctgcacgtgcacatccccctggtgaccaccagcgccttcctgggcaagagccagcacggcctgtatggagacaacgtggaggagatggactggctgattggcaaggtgctgaatgccattgaagataatggcctgaagaacagcaccttcacctacttcaccagtgaccatggaggccacctggaggccagagatggccacagccagctgggcggctggaatggcatctacaagggcggcaagggcatgggcggctgggagggcggcatccgggtgcccggcatcttccactggccaggagtgctgcctgctggccgggtcatcggggagcccaccagcctgatggatgtgttccccaccgtggtgcagctggtgggcggggaggtgccccaggacagagtgattgatggccacagcctggtgcccctgctgcagggcgctgaggcccggagcgcccacgagttcctgttccactactgcggccagcacctgcacgccgcccgctggcaccagaaggacagcggctctgtgtggaaggtgcactacaccaccccccagttccaccctgagggcgctggggcctgctacggccggggcgtgtgcccctgcagcggggagggcgtgacccaccacaggcctcccctgctgtttgacctgagccgggaccccagcgaggcccggcccctgaccccagattctgagcccctgtaccacgctgtgattgcccgggtgggcgctgctgtgtctgagcaccggcagaccctgagccctgtgccccagcagttctccatgagcaacatcctgtggaagccctggctgcagccctgctgcggccacttccccttctgcagctgccatgaagatggagatggcaccccctag

SEQ ID NO: 119836 - DNA, 1782 bp, Artificial Sequence
  derived and/or modified sequence
atgcggagcgccgcccggcggggccgggccgcccccgccgcccgggattccctccctgtcctgctgttcttgtgtctcttgctgaagacatgcgagcctaagactgccaacgctttcaaacctaatatcctcctgatcatggctgatgacctgggcacgggagatctgggctgctacggaaacaacaccttgagaacgcccaatattgaccagctagccgaagaaggagtccgcttgactcagcacctcgcggctgcccctttatgtaccccaagcagagcagcattcctcaccggcaggcatagctttcggtccggaatggatgcatccaacggataccgggccctacagtggaacgctggatctggaggattacccgaaaatgaaaccacattcgcccgcattctgcaacagcatggatatgcgacgggacttattggcaagtggcaccaaggagtgaactgtgcctctcggggagatcattgtcaccacccacttaaccacggctttgattacttttatggcatgccctttaccctcacaaatgactgcgacccaggtagaccacctgaagtggatgctgcactgcgggcacagctgtggggctatacacagtttctcgccctaggtatcctgaccctcgctgcaggtcagacatgtgggttcttcagtgtctccgccagagctgtcacagggatggccggggtaggctgcctctttttcattagctggtattctagctttggctttgtccgacgctggaactgcatcttaatgaggaaccacgatgtcaccgaacagcctatggtcttggagaagacagcttcgcttatgttgaaagaagccgtgtcctatatagaacggcacaagcatggacctttcctgctttttctttctttgcttcatgtacatatacccctggtgaccaccagcgcttttctgggcaagagccagcacggcctgtatggggataacgttgaagaaatggactggctcatcgggaaagtcctgaatgcgatcgaagacaatggactcaagaatagcacctttacatacttcacttctgaccacggtggccaccttgaggccagggacggccatagccagcttggtggctggaatgggatttacaaaggtgggaagggtatgggtggatgggaaggtggcatccgagtgccaggcatttttcattggcccggcgtcctgcctgccggccgtgtcattggcgagcccacttcccttatggatgtgttcccaaccgtggtacagttagtgggcggcgaggttccgcaggacagggtcatcgacggccactcattggttcctcttctccagggtgcggaagccaggtcagcccacgagtttttatttcattactgcggacagcacctgcatgcggcgaggtggcaccagaaagacagtggctcagtgtggaaagtccattataccacgccacagttccatccagaaggcgcgggagcttgctatggccgcggggtttgcccatgctcaggggagggagtgacccaccacaggccaccgttattgtttgacctgagccgcgacccaagtgaagctcgtccactcacacctgactcggagccactctatcatgcagtgatcgctcgcgtgggcgcggcagttagcgaacataggcagacactgtctcctgtgccgcagcagttttccatgtcgaatatcttatggaaaccatggctgcagccatgttgcgggcacttcccattctgctcctgccacgaggacggggatgggaccccatag

SEQ ID NO: 119837 - DNA, 1782 bp, Artificial Sequence
  derived and/or modified sequence
atgcgatccgcggcacggagaggccgtgctgcccctgccgctcgcgactctctccctgttctgttgtttctgtgcttgttgctaaagacctgtgagcccaagacagccaatgctttcaagcctaacattctgctgatcatggccgacgatttaggcaccggagatttagggtgctacggaaataatactctacgaacaccaaatatcgaccagcttgctgaggagggggtcagacttacacaacatttggccgctgcgccactgtgcacaccaagccgagccgcatttctgactggacggcatagctttcgatctggcatggacgctagtaatggctatcgcgctctgcagtggaatgcaggatccggcggactgcccgagaatgaaacaacgtttgcccgtatcctccagcagcacggttacgcgacggggctcattggtaaatggcaccagggcgtaaattgcgcgtcgaggggtgaccactgccatcatccactcaaccacgggtttgactacttttatggcatgcctttcacgcttacaaatgactgcgatcctggccgaccacccgaggttgacgctgcactgagagcccaactctggggctatacccagttcctcgccctggggatcctgaccttagcagccggacaaacatgtgggttcttctctgtctctgctcgcgctgtgactggcatggcgggtgtgggatgcctcttctttatctcttggtatagctcctttggatttgtgaggagatggaattgcatcctgatgcgcaatcatgacgtgacagagcagccaatggtgctcgaaaagacagcctccctgatgctgaaggaggcggtatcctatattgagaggcataagcatggtccttttctcctgtttctgagcctgcttcacgtacacataccccttgttactacttctgcattcctgggaaagtcccaacacggactgtatggcgataatgtggaggagatggattggctgatcggtaaagtgctgaatgcgatcgaggacaacggcctaaaaaatagtacgttcacatactttacctcggatcatgggggacacctggaggccagagatggccactcacaactgggaggctggaatggaatctataagggtgggaaaggaatgggcggttgggaaggcggtattcgtgtcccaggaatatttcactggcctggtgtgctgcccgcaggcagagtaattggcgagccaacatcattgatggacgttttcccaactgtggtccaactcgtcggtggtgaagtgccgcaagaccgggtaattgatggccactcccttgtgcctttactgcagggagcagaggcacggagtgcacacgaatttctgttccattactgcggacaacacctgcacgcagccagatggcaccagaaagactctggctcagtgtggaaagtccactacacaactcctcagttccacccagagggtgccggagcctgctacgggaggggcgtttgcccatgtagtggcgaaggtgttacccatcaccgaccccctcttctctttgatctatcgcgagatccttctgaggctcgtccgctgactcctgattccgaacccctctatcatgcggttattgcgagggtaggggcagcagtgtcagagcaccggcagactctgagccctgtgccccagcagtttagcatgtccaacatactctggaagccctggctacagccatgctgcggccacttccccttctgcagctgccatgaggatggcgacggcaccccttag

SEQ ID NO: 119838 - DNA, 5159 bp, Artificial Sequence
  derived and/or modified sequence
ggaagccttggcactagcggcgcccgggcgcggagtgcgcagggcaaggtcctgcgctctgggccagcgctcggccatgcgatccgccgcgcggaggggacgcgccgcgcccgccgccagggactctttgccggtgctactgtttttatgcttgcttctgaagacgtgtgaacctaaaactgcaaatgcctttaaaccaaatatcctactgatcatggcggatgatctaggcactggggatctcggttgctacgggaacaatacactgagaacgccgaatattgaccagcttgcagaggaaggtgtgaggctcactcagcacctggcggccgccccgctctgcaccccaagccgagctgcattcctcacagggagacattccttcagatcaggcatggacgccagcaatggataccgggcccttcagtggaacgcaggctcaggtggactccctgagaacgaaaccacttttgcaagaatcttgcagcagcatggctatgcaaccggcctcataggaaaatggcaccagggtgtgaattgtgcatcccgcggggatcactgccaccaccccctgaaccacggatttgactatttctacggcatgcccttcacgctcacaaacgactgtgacccaggcaggccccccgaagtggacgccgccctgagggcgcagctctggggttacacccagttcctggcgctggggattctcaccctggctgccggccagacctgcggtttcttctctgtctccgcgagagcagtcaccggcatggccggcgtgggctgcctgtttttcatctcttggtactcctccttcgggtttgtgcgacgctggaactgtatcctgatgagaaaccatgacgtcacggagcaacccatggttctggagaaaacagcgagtcttatgctaaaggaagctgtttcctatattgaaagacacaagcatgggccatttctcctcttcctttctttgctgcatgtgcacattccccttgtgaccacgagtgcattcctggggaaaagtcagcatggcttatatggtgataatgtggaggagatggactggctcataggtaaggttcttaatgccatcgaagacaatggtttaaagaactcaacattcacgtatttcacctctgaccatggaggacatttagaggcaagagatggacacagccagttagggggatggaacggaatttacaaaggtgggaagggcatgggaggatgggaaggtgggatccgcgtgcccgggatcttccactggccgggggtgctcccggccggccgagtgattggagagcccacgagcctgatggacgtgttccctactgtggtccagctggtgggtggcgaggtgccccaggacagggtgattgatggccacagcctggtacccttgctgcagggagctgaggcacgctcggcacatgagttcctgtttcattactgtgggcagcatcttcacgcagcacgctggcaccagaaggacagtggaagcgtctggaaggttcattacacgaccccgcagttccaccccgagggagcgggggcctgctacggccgaggcgtctgcccatgctccggggagggcgtgacccatcacagaccccctttgctctttgacctctccagggacccctccgaggcacggcccctgacccccgactccgagcccctgtaccacgccgtgatagcaagggtaggtgccgcggtgtcggagcatcggcagaccctgagtcctgtgccccagcagttttccatgagcaacatcctgtggaagccgtggctgcagccgtgctgcggacatttcccgttctgttcatgccacgaggatggggatggcaccccctgaatgccaggactgtgagagaggatccaggagagcctgactgcgttgcaaacaaaattctccaagcttggttctatcttcagcttccctttttgcaaggaacatgccctggactgagagtgggtccccactttctttctttctttctttcttttttgagacagagtgtcgctctgtccctcaggctggaatgcaatggcacgatctctgctcactgcaacctccgcctcccgggttcaagcgattttcctgcctcagcctcctgagtacccaggattacaggcaccaggcacctgccaccatgcctagctaatttttgtagttttagtagagacagggtttcaccatgttgcccaggctggtctcgcactcctgacctcaagtcatccacctgcctcagcctcccaaagtgctgggattacaggcacgagccactgcgcccatgtagggtttccctttcctgatttgtgaaataagactgtcccagtaggcacccactgatgcctcctcttcctcttctaaatctcagggttcgtcattgtgccaatgcccgatgttttcacccctccgtcttaaagcattgttgcaatttcatcacctagatgacataacagccttacaaaaggacagggaggagtgtctgttcctactctcacatagcggaggaaagttagagcctctcagtctctgtttatgaggactcattaatctcaaataattgatgcatttttcatacattagggtctctgtccatgtgtcttcctgatattgttatagaaatggcttcaggctgctggtaacagatgctgcggaaaaagaatgccttaaacaaagccaggcacggtgactcacacctgtaatcccagcactttgggaggctaaggtgggaggatcacttgagcctaggagttagacacctacccagcctgagcaacacagtgagacctcatctctacaaaaaacaaataattagctagatgtcgtggcgcacagctgtagtctcagctacttaggaggctgaggcgggaggattatttgagcctgggaggtcaaaactgcaatgagctaagattgcactactgcactccgggctgggagacagagtaagaccctgccttaaaaaaaaaaaaaaaaaaatgccttaaagaaaataataagagaagggtgtgttctcttccaagtaatgagccgatcaaggggaagcaacccaaggctagcaggctcttttcaattcccagctctgccactcttagcatggcagagagttggcctcattatgccagtatggctgccacagtgtcagacatcacattccaggcagtggaaaggagaaagaaccaaagggcatccctttctcttgaagcagtccctgtgaggggggattatctggaagccccaacccaatttctgcttccaaccattatccatagaaacaactggaagttgagaagtgcagtcttttaggtgggcacctggctgccctgtatgaaaccagaattaggttggtcagcaggaaaacaagaaaacacttactgtgttgactgaggtttttgacgcatcgctttattgtcaaattaaacaactctatctcattctgcactgaaacacgtactaccattgcctataattggaaaatgatcctcagaggcacagaagatgccctgatggaaagtttgccccttgggcaaagagacagccatgggaaccttcagacatagagagagaaggtggcttttctccctacattcctcaaatagctaagatttggccagtgtgttttctaagtcaattctagtgtgtttcatcctcacctcttccctctgtggctttgatgatggaagtgtagtcctaacctactgcacagctgggaccccctgcccctagatcccaatactggggatgggaggaccttgcactattcccctcagtccatctatcgaggtctttgcaggaagcatactgggaattgaaacgagagcctaaatgacatctaagaaaggcagtgttcaataccaggtattaggtgaggatgggattctaaggacatcagtgggaggcagggagccaccttcagacctcagcatggaagcttccaagatccagaggaagaggcaacagcactgagagtcataggtagaagaatcatcacagccctgctaaccaggcagctgatgcccctctcccctggctccctgtgtccaaatcctacaggggcatctgttggctgaactcaacctgaagccaaagagaagatgagtggagagaggcaacatttatagagctcaggtttctagggctggagagggatctggagggacacacaggagacacctggcataaccaaaaaatgattaaaaaaaaaaaaaaaaagaaacatctatggagcatgggacacggggagtggaggcagctaaaagccatctcatctttcaccgtattcaacaagcccattataacaagtctttcacgctcaaccattcaaacaatcccaacaatcccagcctaagaatttcctggcatttgatgaaaatggctgtgggttttgctatctttaagctccctgggaagcaggatataagcccagggctggcaggctctttctagctacctgctcttgcacatagagtttgcctcatggttgcaagaaggctgccatagctccagatggcacatagacattccaggcagcaggaaaaaggaaggagcacttaaccgaaggaggtcagggagttggttagtctccacctgaagaagagagccatgaaccagcttcagttgactaacgggctcctgtgagtgcatctttggacttttctggaggttgaaatctagatgtggtatgtgtcttaaagcagccaccaactcctcccattaccttccaagtgagcccaactacacgatggagcctcttccctgcccttggatctgggctgagcctctgacttgcgttgaccaacagaatgcagtgaaagtgatgccgatactaccctccctgccctagacttgggatacctggcagctatattcttccattcctcaggacttgcaaaaacgggtctcagcatgccttcccagagccatgaggtgtttctttgcccattcattgatctgagaagtgagtgtaaggagtttaaatcaacctctgttctgtgctagttaaggtaataaagttgctgcagtccagggggtaggtacctgtggacggctctgcgaataggacagttgcatttcttgggaatcaagtgcatccctaggctggcagtgcagcagaaatactgaataaaatgtgacaaatctccctgga

SEQ ID NO: 119839 - DNA, 1782 bp, Artificial Sequence
  derived and/or modified sequence
atgagaagcgccgccagaagaggcagagccgcccccgccgccagagacagcctgcccgtgctgctgttcctgtgcctgctgctgaagacctgcgagcccaagaccgccaacgccttcaagcccaacatcctgctgatcatggccgacgacctgggcaccggcgacctgggctgctacggcaacaacaccctgagaacccccaacatcgaccagctggccgaggagggcgtgagactgacccagcacctggccgccgcccccctgtgcacccccagcagagccgccttcctgaccggcagacacagcttcagaagcggcatggacgccagcaacggctacagagccctgcagtggaacgccggcagcggcggcctgcccgagaacgagaccaccttcgccagaatcctgcagcagcacggctacgccaccggcctgatcggcaagtggcaccagggcgtgaactgcgccagcagaggcgaccactgccaccaccccctgaaccacggcttcgactacttctacggcatgcccttcaccctgaccaacgactgcgaccccggcagaccccccgaggtggacgccgccctgagagcccagctgtggggctacacccagttcctggccctgggcatcctgaccctggccgccggccagacctgcggcttcttcagcgtgagcgccagagccgtgaccggcatggccggcgtgggctgcctgttcttcatcagctggtacagcagcttcggcttcgtgagaagatggaactgcatcctgatgagaaaccacgacgtgaccgagcagcccatggtgctggagaagaccgccagcctgatgctgaaggaggccgtgagctacatcgagagacacaagcacggccccttcctgctgttcctgagcctgctgcacgtgcacatccccctggtgaccaccagcgccttcctgggcaagagccagcacggcctgtacggcgacaacgtggaggagatggactggctgatcggcaaggtgctgaacgccatcgaggacaacggcctgaagaacagcaccttcacctacttcaccagcgaccacggcggccacctggaggccagagacggccacagccagctgggcggctggaacggcatctacaagggcggcaagggcatgggcggctgggagggcggcatcagagtgcccggcatcttccactggcccggcgtgctgcccgccggcagagtgatcggcgagcccaccagcctgatggacgtgttccccaccgtggtgcagctggtgggcggcgaggtgccccaggacagagtgatcgacggccacagcctggtgcccctgctgcagggcgccgaggccagaagcgcccacgagttcctgttccactactgcggccagcacctgcacgccgccagatggcaccagaaggacagcggcagcgtgtggaaggtgcactacaccaccccccagttccaccccgagggcgccggcgcctgctacggcagaggcgtgtgcccctgcagcggcgagggcgtgacccaccacagaccccccctgctgttcgacctgagcagagaccccagcgaggccagacccctgacccccgacagcgagcccctgtaccacgccgtgatcgccagagtgggcgccgccgtgagcgagcacagacagaccctgagccccgtgccccagcagttcagcatgagcaacatcctgtggaagccctggctgcagccctgctgcggccacttccccttctgcagctgccacgaggacggcgacggcaccccctag

SEQ ID NO: 119840 - protein, 351 aa, Artificial Sequence
  derived and/or modified sequence
MTEMSFLSSEVLVGDLMSPFDQSGLGAEESLGLLDDYLEVAKHFKPHGFSSDKAKAGSSEWLAVDGLVSPSNNSKEDAFSGTDWMLEKMDLKEFDLDALLGIDDLETMPDDLLTTLDDTCDLFAPLVQETNKQPPQTVNPIGHLPESLTKPDQVAPFTFLQPLPLSPGVLSSTPDHSFSLELGSEVDITEGDRKPDYTAYVAMIPQCIKEEDTPSDNDSGICMSPESYLGSPQHSPSTRGSPNRSLPSPGVLCGSARPKPYDPPGEKMVAAKVKGEKLDKKLKKMEQNKTAATRYRQKKRAEQEALTGECKELEKKNEALKERADSLAKEIQYLKDLIEEVRKARGKKRVP

SEQ ID NO: 119841 - DNA, 2022 bp, Artificial Sequence
  derived and/or modified sequence
tttctactttgcccgcccacagatgtagttttctctgcgcgtgtgcgttttccctcctccccgccctcagggtccacggccaccatggcgtattaggggcagcagtgcctgcggcagcattggcctttgcagcggcggcagcagcaccaggctctgcagcggcaacccccagcggcttaagccatggcgtgagtaccggggcgggtcgtccagctgtgctcctggggccggcgcgggttttggattggtggggtgcggcctggggccagggcggtgccgccaagggggaagcgatttaacgagcgcccgggacgcgtggtctttgcttgggtgtccccgagacgctcgcgtgcctgggatcgggaaagcgtagtcgggtgcccggactgcttccccaggagccctacagccctcggaccccgagccccgcaagggtcccaggggtcttggctgttgccccacgaaacgtggcaggaaccaagatggcggcggcagggcggcggcgcgggcgtgagtcaagggcgggcggtgggcggggcgcggccgccctggccgtatttggacgtggggacggagcgctttcctcttggcggccggtggaagaatcccctggtctccgtgagcgtccattttgtggaacctgagttgcaagcagggaggggcaaatacaactgccctgttcccgattctctagatggccgatctagagaagtcccgcctcataagtggaaggatgaaattctcagaacagctaacctctaatgggagttggcttctgattctcattcaggcttctcacggcattcagcagcagcgttgctgtaaccgacaaagacaccttcgaattaagcacattcctcgattccagcaaagcaccgcaacatgaccgaaatgagcttcctgagcagcgaggtgttggtgggggacttgatgtcccccttcgaccagtcgggtttgggggctgaagaaagcctaggtctcttagatgattacctggaggtggccaagcacttcaaacctcatgggttctccagcgacaaggctaaggcgggctcctccgaatggctggctgtggatgggttggtcagtccctccaacaacagcaaggaggatgccttctccgggacagattggatgttggagaaaatggatttgaaggagttcgacttggatgccctgttgggtatagatgacctggaaaccatgccagatgaccttctgaccacgttggatgacacttgtgatctctttgcccccctagtccaggagactaataagcagcccccccagacggtgaacccaattggccatctcccagaaagtttaacaaaacccgaccaggttgcccccttcaccttcttacaacctcttcccctttccccaggggtcctgtcctccactccagatcattcctttagtttagagctgggcagtgaagtggatatcactgaaggagataggaagccagactacactgcttacgttgccatgatccctcagtgcataaaggaggaagacaccccttcagataatgatagtggcatctgtatgagcccagagtcctatctggggtctcctcagcacagcccctctaccaggggctctccaaataggagcctcccatctccaggtgttctctgtgggtctgcccgtcccaaaccttacgatcctcctggagagaagatggtagcagcaaaagtaaagggtgagaaactggataagaagctgaaaaaaatggagcaaaacaagacagcagccactaggtaccgccagaagaagagggcggagcaggaggctcttactggtgagtgcaaagagctggaaaagaagaacgaggctctaaaagagagggcggattccctggccaaggagatccagtacctgaaagatttgatagaagaggtccgcaaggcaagggggaagaaaagggtcccctagttgaggatagtcaggagcgtcaatgtgcttgtacatagagtgctgtagctgtgtgttccaataaattattttgtagggaaagta

SEQ ID NO: 119842 - DNA, 1056 bp, Artificial Sequence
  derived and/or modified sequence
atgaccgaaatgtcctttctcagtagcgaagtgctcgtcggggacctaatgtctccatttgatcagtcagggctaggggccgaggaatcactaggtcttcttgatgactacctggaagtggccaagcattttaagcctcatggcttttcctctgacaaagccaaagctggttcctcagagtggctggcagtggatggccttgtgagcccctcaaataatagtaaggaggacgcctttagtggaaccgattggatgctggagaaaatggacttaaaggaatttgatttggacgccctgctcggtatcgatgacctggagactatgccggatgatcttctgaccacccttgatgatacatgtgacctttttgcacccttggtacaggagacaaataagcaaccaccgcagacagttaaccctatcggccaccttcccgagtctctcacaaaaccagatcaggtcgctccatttacctttctacagccgctccccctgagcccaggagtactgtcttctacaccggatcactccttctcattagaactcgggtcagaggtggatattacagaaggggatagaaagcccgattacactgcatacgtggccatgatcccacagtgcattaaagaggaagacaccccctctgataacgattctggtatatgtatgtcccccgagagctacctgggcagcccgcagcactccccaagtacacgaggcagccccaatcgcagcttgccgtcacccggcgtcctttgtggatctgcaagaccaaagccatatgacccccctggagagaaaatggttgcagctaaagtgaaaggggaaaagctggataagaaactcaaaaagatggagcagaataaaacagccgccacgcggtatcgccaaaaaaaacgcgccgaacaagaagccctgaccggcgagtgcaaggaactggagaagaaaaatgaggcgttaaaggagcgtgccgattctctggccaaagaaatccagtacctgaaagatcttatcgaagaggtgagaaaggcacgagggaaaaagagggtcccttag

SEQ ID NO: 119843 - DNA, 1056 bp, Artificial Sequence
  derived and/or modified sequence
atgaccgagatgagcttcttgtcaagcgaggtgttggtcggcgatctaatgtccccatttgaccagtcagggctgggggctgaagagtcactcggcctcctggacgactatctcgaagtggccaagcacttcaagccacacggtttcagctcggacaaggccaaggctgggtctagcgagtggctggccgtggatggcctcgtttcccctagcaataacagcaaagaggatgcgttcagcggaacagattggatgttggagaagatggatcttaaggaattcgatctggatgcactgctgggaattgacgatctggagacaatgcctgatgacctactcacaactctggacgacacatgcgatcttttcgcacctctcgtccaggagactaataaacaacccccacagactgttaatcctatcggtcatttgccggaaagcctgaccaagcccgaccaggtagcgccgtttaccttcctgcagccgctacccctctccccgggggtgctgtcttcaacccctgatcacagcttctccctcgaactgggctctgaggtggacatcactgaaggggacaggaagcccgactataccgcctatgtggctatgatcccccaatgcatcaaagaagaggacactccttccgacaacgactccggtatctgtatgtcccctgaatcttacctgggctctcctcagcacagtccttctacccgtggttctcctaacagatctctgccatcccccggcgtgctgtgtgggtctgcaagaccgaagccttatgatccgccaggtgagaagatggtggctgccaaagttaagggcgaaaaactggacaaaaaattaaaaaagatggagcagaataaaacggccgcgacacgctaccgccagaagaaaagggctgaacaggaggctctgactggtgaatgtaaggagttagaaaagaagaatgaggctttaaaggagagggctgactccttggctaaggagatccagtacttgaaagatctgatcgaagaagtgcgcaaagcacgggggaaaaaaagagtgccttag

SEQ ID NO: 119844 - DNA, 1056 bp, Artificial Sequence
  derived and/or modified sequence
atgacagagatgtctttcttatcttctgaggtgctagtgggcgatcttatgagcccatttgaccaaagtggactgggcgcagaagaaagtttaggattgttggacgactacctggaggttgctaagcacttcaaaccacacgggttcagctcagacaaggcaaaagccggctcctcagaatggcttgcagtcgacggtttagtgagtccgagcaacaactcgaaggaagacgccttttcaggcaccgattggatgttggaaaagatggaccttaaggaattcgacctcgacgcccttcttggtattgacgacttagaaactatgcccgatgatcttctcaccacgctggacgacacttgtgatctctttgcccccctggttcaggagactaataagcagcccccccagactgtaaatcccatcgggcacctgcctgagtctttgaccaaacccgaccaggttgcccccttcacattccttcagccactccccctgagcccgggggttctgagctccacaccggaccactcttttagcctcgagctggggtccgaggtagatatcaccgagggcgatcgcaagcctgactacaccgcttacgtggctatgatccctcagtgtattaaggaagaggacactccttctgataatgacagcggtatatgtatgtctcctgaaagttatctcggcagtccgcaacactcccctagcacgcgcggaagccctaatcgatctctgcctagtcctggggtcttatgtggatcggcccgccccaaaccatacgaccccccaggcgagaaaatggttgccgcgaaagtgaagggcgagaaactggataagaagctgaaaaagatggagcagaacaaaactgcggcaacccgttacaggcagaagaagcgggccgagcaggaggccttaaccggcgaatgtaaggagctcgaaaaaaaaaacgaagcactgaaagaacgggcagactcacttgccaaagagatccagtatctaaaagatcttattgaagaggtcagaaaagcacgaggaaagaaacgggtaccatag

SEQ ID NO: 119845 - DNA, 1056 bp, Artificial Sequence
  derived and/or modified sequence
atgacagagatgtccttcctgagcagcgaggtgctggtgggggacctgatgagcccctttgaccagagcggcctgggcgctgaggagagcctgggcctgctggatgactacctggaggtggccaagcacttcaagccccacggcttcagcagtgacaaggccaaggccggcagcagcgagtggctggccgtggatggcctggtgagccccagcaacaacagcaaggaggatgccttcagcggcacagactggatgctggagaagatggacctgaaggagtttgacctggatgccctgctgggcattgatgacctggagaccatgccagatgacctgctgaccaccctggatgacacctgtgacctgtttgcccccctggtgcaggagaccaacaagcagcccccccagacagtgaaccccatcggccacctgcctgagagcctgaccaagccagaccaggtggcccccttcaccttcctgcagcccctgcccctgagccctggggtgctgagcagcaccccagaccacagcttcagcctggagctgggcagcgaggtggacatcacagaaggagacaggaagccagactacacagcctacgtggccatgatcccccagtgcatcaaggaggaggacacccccagcgacaatgattctggcatctgcatgagccctgagagctacctgggcagcccccagcacagccccagcacccggggcagccccaacagaagcctgcccagccctggggtgctgtgtggcagcgcccggcccaagccctatgaccccccaggagagaagatggtggccgccaaggtgaagggggagaagctggacaagaagctgaagaagatggagcagaacaagacagctgccacccgctaccggcagaagaagagagctgagcaggaggccctgactggagagtgcaaggagctggagaagaagaatgaggccctgaaggagagagctgacagcctggccaaggagatccagtacctgaaggacctgattgaggaggtgaggaaggcccggggcaagaagagggtgccctag

SEQ ID NO: 119846 - DNA, 1056 bp, Artificial Sequence
  derived and/or modified sequence
atgaccgagatgagcttcctgagcagcgaggtgctggtgggcgacttaatgtcgccgttcgaccagagcggcctgggggccgaggaatctttgggactgctagacgattacctcgaagtggccaaacactttaagccccacggcttcagctctgataaggcaaaggctggtagcagcgagtggctggccgtagacggattggtgtcgccaagcaacaattccaaagaggacgcttttagcggaacagactggatgctcgagaaaatggatctcaaagaatttgatctcgatgccttgctgggaattgatgatctggaaactatgcccgacgaccttttgactaccttggacgatacctgcgacctgttcgcacctcttgtgcaggagactaataagcaacccccccaaaccgtcaatcccattggacacctcccagagtccttaacgaagcccgaccaagttgcccccttcactttcctgcagccactcccgttatccccaggagtactttcgagcacccccgaccattctttctcgctggagctgggatcagaagtggacattaccgagggggatagaaaacctgattacacagcctacgtcgccatgatcccacagtgtatcaaggaagaggatacgccttctgacaatgacagcggcatatgcatgagtcccgaatcttatctgggcagcccccagcattctccttctacccgcggcagccctaaccgctccctgccttctccaggggtgctgtgcggaagcgctcggcccaagccttatgatcccccaggggagaagatggttgcagctaaagtaaagggcgagaagcttgataaaaaattgaaaaagatggagcaaaacaagactgccgcaacccgctaccgccagaagaaacgcgccgagcaggaggccctgactggcgagtgcaaggaactagagaagaagaacgaggccctgaaagaacgcgccgacagtctcgccaaagaaatccaatacctgaaggacctgatcgaagaagtgcgcaaggcaagggggaagaaacgggttccatag

SEQ ID NO: 119847 - DNA, 1056 bp, Artificial Sequence
  derived and/or modified sequence
atgaccgagatgagcttcctgagcagcgaggtgctggtgggcgacctgatgtccccattcgatcagtctgggttgggcgcagaggaatccctgggcctactggacgactatctggaggtcgcaaaacattttaaacctcatggcttctctagcgacaaggccaaggctgggtcatccgagtggttggcggtcgacggactggtatcccccagtaacaactcaaaggaagacgcattctctggcactgattggatgctcgaaaaaatggatttaaaagagtttgatctagacgcgctgttggggatcgatgacctagagacaatgcctgatgatttgctgaccactttggacgacacctgcgacctattcgcaccccttgtgcaagagacgaataaacagccgccacaaaccgtgaatcccattggtcatcttcccgagtcattgacaaagccagaccaggtggctccattcacttttctccagcctttgcccctctcacccggagtgctcagctctactcctgatcactcctttagcctggagctcggatctgaggtggatatcacagaaggggataggaagcctgattataccgcctacgtggccatgatccctcaatgcatcaaggaggaggatactcctagtgacaacgattccggaatttgtatgtccccggagtcatacttgggcagccctcagcattcgccgtcaacacgaggatcccccaacaggagtctcccatctccaggtgtgttgtgcggaagcgcgcggcccaaaccatacgaccctccaggtgagaaaatggtagccgcgaaagtcaagggggagaaactggataagaaactaaagaagatggagcagaataaaaccgccgccacccgataccgacagaagaagagggctgagcaggaggctttgacaggcgaatgtaaggagctggagaaaaagaacgaagctctgaaagagcgggccgatagcttagccaaggagattcagtacctcaaggacctgatcgaagaggtgcgaaaagctcggggaaaaaaaagagtgccgtag

SEQ ID NO: 119848 - DNA, 1056 bp, Artificial Sequence
  derived and/or modified sequence
atgaccgagatgagcttcctgagcagcgaggtgctggtgggcgacctgatgagtcctttcgatcagagcggcctcggtgccgaggaaagcctcgggcttttagatgattacttagaagtagccaagcacttcaagccccacggatttagcagtgataaggccaaggccggaagctcggaatggctggccgtcgatggtttggtgtccccatctaataactccaaggaggacgctttttccggaaccgactggatgctggagaaaatggacctaaaggagttcgatctggacgcgcttctcgggattgatgacctcgaaactatgccggatgacttactgacaactctcgatgatacctgcgacctttttgccccgcttgtgcaggaaaccaacaaacagccacctcagactgtgaatcccatcggacacttgccagagtctctcactaagccggatcaggtggctccattcacattcttacaaccacttcctctttccccaggagttttgtcttcaactcctgaccatagcttttcactggagctcgggtctgaggtggatatcaccgaaggcgaccgtaagcctgattacactgcatatgtggccatgatcccccagtgcatcaaagaggaagatacacctagcgataatgactctgggatatgcatgagtcccgagtcttacctgggcagcccccagcacagccctagtacgcgaggcagccctaacaggtccctaccaagtccaggtgtgctttgcggttccgcgcggcccaagccttatgatcctcccggcgagaaaatggtcgcagctaaggttaagggggagaaactggataaaaagctgaagaagatggagcagaacaagacggcagcgacacgttatagacagaagaagcgagcagaacaggaggcactgaccggcgagtgcaaagagctggagaagaagaatgaagctttgaaagagagagccgacagtctcgcaaaggagatacagtatttgaaggatttaattgaggaggttagaaaggcccgcgggaagaagagggtcccttag

SEQ ID NO: 119849 - DNA, 1056 bp, Artificial Sequence
  derived and/or modified sequence
atgaccgagatgagctttcttagttctgaagtcctggttggcgaccttatgagcccttttgatcagtccgggttgggtgcggaggagtccctcgggttgcttgacgactacttggaggtggccaagcatttcaaaccacatggcttttccagtgataaagcgaaggcaggaagcagcgaatggcttgccgtggacgggctggtgagtccttccaataactcaaaagaggacgccttcagcgggaccgattggatgttggagaagatggaccttaaggaattcgacctcgacgccctgctcgggatcgatgacctggaaacaatgccagatgacctcttaacaacgctcgacgatacctgcgatttattcgcacccctcgtacaggaaaccaacaaacagcctcctcaaactgtgaatcctatcggccacttaccggagtcactgactaaaccagaccaagtcgcaccttttacatttctccagccattgcctctgtcccccggagtgctgagcagcacacccgaccacagtttttccttggagcttggtagcgaggtcgacattacagaaggtgatcgcaaacctgactacaccgcatatgtggccatgatcccccaatgcataaaagaggaagacacccctagtgataacgattcaggtatttgtatgagtccagaaagctatctcggatctccacagcattccccttctacaaggggaagtcccaatagatcactgccctctcccggagtgctgtgtggaagcgcgaggcccaaaccttacgacccacctggcgagaaaatggtcgccgctaaggtgaagggagaaaagctggacaagaagctgaagaaaatggagcaaaataagaccgccgcaaccagataccgtcagaagaagcgggctgagcaagaagccctcaccggcgaatgcaaagagctcgagaaaaagaacgaagccctcaaagagcgcgctgactccctggcaaaggaaatacagtacctcaaggacctcatagaagaagtgagaaaggctaggggaaagaagagggtgccttag

SEQ ID NO: 119850 - DNA, 1056 bp, Artificial Sequence
  derived and/or modified sequence
atgacagagatgagtttcttatcctctgaggtgctggtgggagatttaatgagcccattcgatcagagcggcctcggggctgaagagagcctgggtcttttggacgattatttagaagtcgccaaacatttcaaaccacacgggttttcctccgataaagccaaggccggaagctctgaatggctggccgtggacggcttagtgagcccatccaacaatagcaaagaagatgccttttctggaactgactggatgctcgaaaaaatggacctaaaggaatttgatctcgacgctctgctgggcatcgatgacctcgaaaccatgcctgacgacctgctgaccaccctggatgacacctgcgacctcttcgccccactggtgcaggaaacaaataagcagccaccccagactgtcaatcctattggtcatctgccagaatccctaaccaagcctgatcaggtagcgccatttacattcctgcagccactacctttatccccaggagttctctcttccacccccgatcatagcttctctctggagctggggtctgaggttgacattactgagggagaccggaaacctgattatacagcttacgtcgcaatgatcccccaatgcattaaggaggaagatactccctccgataatgactcgggaatctgcatgtcccccgaatcctacttgggaagcccccagcattctccttccacgcgcggaagtcctaacaggtccctccctagccccggtgtactgtgcggatctgctcggcctaagccatatgatcctcccggagaaaagatggtcgcagccaaagttaagggtgagaagttggataagaagctgaaaaagatggagcaaaataaaaccgccgctacaagataccgccaaaagaagcgcgctgagcaggaggcactcactggcgaatgtaaggagctggagaagaaaaacgaggccctgaaggagagagctgactctctcgctaaagagattcagtacctgaaggatttgatcgaggaagttagaaaggccaggggaaagaaacgagttccttag

SEQ ID NO: 119851 - DNA, 1056 bp, Artificial Sequence
  derived and/or modified sequence
atgaccgaaatgagctttctttccagtgaggtgctggtgggggacctgatgtccccttttgaccaaagcggccttggcgctgaagaatccctggggctgttggacgactatcttgaagtcgcaaagcactttaagccacatggatttagctctgataaggctaaggccggttcatctgagtggctggccgtggatggcttggtctccccgagtaacaactcaaaggaggacgccttctccgggacagactggatgttggagaagatggacctgaaagagtttgacctagatgctctgctgggcatcgacgatctcgagacaatgcctgatgacctactgactactttggacgatacatgcgacttgtttgctccattagtgcaggagacaaataagcagcctccgcaaactgtgaatcccatcgggcatctgcctgaaagtcttaccaagcccgaccaggtcgccccatttacttttttgcaacctttgcctctgtctcccggagtcctttcatctacccccgatcattctttcagtttggaattgggatcagaggttgatataaccgagggcgaccggaaacctgattataccgcttatgtcgccatgattccacagtgcatcaaggaggaagacaccccaagcgataacgactctgggatatgcatgtcccctgaatcctacctcggatccccccaacatagcccaagcactcgcggatcccccaatcggtctttgcccagtccaggcgtcctctgcggatcagcaaggcctaagccatacgatccgcctggcgagaagatggttgccgcaaaggtgaagggcgaaaagcttgataaaaaactgaagaaaatggagcagaacaaaacagcagccaccaggtaccggcaaaagaagcgtgccgagcaggaggcactcacaggggaatgtaaagaactcgaaaagaagaacgaggccctcaaggaacgcgcagacagccttgcgaaagagattcaatacctgaaggacctgatcgaggaagtccgcaaagctcgcggtaagaaacgggtgccatag

SEQ ID NO: 119852 - DNA, 2019 bp, Artificial Sequence
  derived and/or modified sequence
tttctactttgcccgcccacagatgtagttttctctgcgcgtgtgcgttttccctcctccccgccctcagggtccacggccaccatggcgtattaggggcagcagtgcctgcggcagcattggcctttgcagcggcggcagcagcaccaggctctgcagcggcaacccccagcggcttaagccatggcgtgagtaccggggcgggtcgtccagctgtgctcctggggccggcgcgggttttggattggtggggtgcggcctggggccagggcggtgccgccaagggggaagcgatttaacgagcgcccgggacgcgtggtctttgcttgggtgtccccgagacgctcgcgtgcctgggatcgggaaagcgtagtcgggtgcccggactgcttccccaggagccctacagccctcggaccccgagccccgcaagggtcccaggggtcttggctgttgccccacgaaacgtggcaggaaccaagatggcggcggcagggcggcggcgcgggcgtgagtcaagggcgggcggtgggcggggcgcggccgccctggccgtatttggacgtggggacggagcgctttcctcttggcggccggtggaagaatcccctggtctccgtgagcgtccattttgtggaacctgagttgcaagcagggaggggcaaatacaactgccctgttcccgattctctagatggccgatctagagaagtcccgcctcataagtggaaggatgaaattctcagaacagctaacctctaatgggagttggcttctgattctcattcaggcttctcacggcattcagcagcagcgttgctgtaaccgacaaagacaccttcgaattaagcacattcctcgattccagcaaagcaccgcaacatgaccgaaatgagcttcctgagcagcgaggtgttggtgggggacttgatgtcccccttcgaccagtcgggtttgggggctgaagaaagcctaggtctcttagatgattacctggaggtggccaagcacttcaaacctcatgggttctccagcgacaaggctaaggcgggctcctccgaatggctggctgtggatgggttggtcagtccctccaacaacagcaaggaggatgccttctccgggacagattggatgttggagaaaatggatttgaaggagttcgacttggatgccctgttgggtatagatgacctggaaaccatgccagatgaccttctgaccacgttggatgacacttgtgatctctttgcccccctagtccaggagactaataagcagcccccccagacggtgaacccaattggccatctcccagaaagtttaacaaaacccgaccaggttgcccccttcaccttcttacaacctcttcccctttccccaggggtcctgtcctccactccagatcattcctttagtttagagctgggcagtgaagtggatatcactgaaggagataggaagccagactacactgcttacgttgccatgatccctcagtgcataaaggaggaagacaccccttcagataatgatagtggcatctgtatgagcccagagtcctatctggggtctcctcagcacagcccctctaccaggggctctccaaataggagcctcccatctccaggtgttctctgtgggtctgcccgtcccaaaccttacgatcctcctggagagaagatggtagcagcaaaagtaaagggtgagaaactggataagaagctgaaaaaaatggagcaaaacaagacagcagccactaggtaccgccagaagaagagggcggagcaggaggctcttactggtgagtgcaaagagctggaaaagaagaacgaggctctaaaagagagggcggattccctggccaaggagatccagtacctgaaagatttgatagaagaggtccgcaaggcaagggggaagaaaagggtcccctagttgaggatagtcaggagcgtcaatgtgcttgtacatagagtgctgtagctgtgtgttccaataaattattttgtagggaaa

SEQ ID NO: 119853 - DNA, 1420 bp, Artificial Sequence
  derived and/or modified sequence
tttctactttgcccgcccacagatgtagttttctctgcgcgtgtgcgttttccctcctccccgccctcagggtccacggccaccatggcgtattaggggcagcagtgcctgcggcagcattggcctttgcagcggcggcagcagcaccaggctctgcagcggcaacccccagcggcttaagccatggcgcttctcacggcattcagcagcagcgttgctgtaaccgacaaagacaccttcgaattaagcacattcctcgattccagcaaagcaccgcaacatgaccgaaatgagcttcctgagcagcgaggtgttggtgggggacttgatgtcccccttcgaccagtcgggtttgggggctgaagaaagcctaggtctcttagatgattacctggaggtggccaagcacttcaaacctcatgggttctccagcgacaaggctaaggcgggctcctccgaatggctggctgtggatgggttggtcagtccctccaacaacagcaaggaggatgccttctccgggacagattggatgttggagaaaatggatttgaaggagttcgacttggatgccctgttgggtatagatgacctggaaaccatgccagatgaccttctgaccacgttggatgacacttgtgatctctttgcccccctagtccaggagactaataagcagcccccccagacggtgaacccaattggccatctcccagaaagtttaacaaaacccgaccaggttgcccccttcaccttcttacaacctcttcccctttccccaggggtcctgtcctccactccagatcattcctttagtttagagctgggcagtgaagtggatatcactgaaggagataggaagccagactacactgcttacgttgccatgatccctcagtgcataaaggaggaagacaccccttcagataatgatagtggcatctgtatgagcccagagtcctatctggggtctcctcagcacagcccctctaccaggggctctccaaataggagcctcccatctccaggtgttctctgtgggtctgcccgtcccaaaccttacgatcctcctggagagaagatggtagcagcaaaagtaaagggtgagaaactggataagaagctgaaaaaaatggagcaaaacaagacagcagccactaggtaccgccagaagaagagggcggagcaggaggctcttactggtgagtgcaaagagctggaaaagaagaacgaggctctaaaagagagggcggattccctggccaaggagatccagtacctgaaagatttgatagaagaggtccgcaaggcaagggggaagaaaagggtcccctagttgaggatagtcaggagcgtcaatgtgcttgtacatagagtgctgtagctgtgtgttccaataaattattttgtagggaaagta

SEQ ID NO: 119854 - DNA, 1910 bp, Artificial Sequence
  derived and/or modified sequence
aggtggacaggcccggcgcgccctctcgaggccccttcaacctcccgggggcagcagcgccgtgtcggctatgaatggggcctctggaaaactcaggcttggaacagcacctcgcgcgataacctggcgtcctcggccttcacaataaaaactcttcgccggaaaacgacctttccccgcccactgcgctgacaccggaagcgaggcgtgtctgggagatcactccgcgctccggcggcgaaggaaagaacggactctgatcatagaagcctagtaaagtagtacacctctctcctttcgtgaggccataagaacaaactccttttctcgtcacagctacgccctgggcataaacggttggggcgtcaaagggagggagggaagggagcgggcgggaggagacggtcacgtggtcgcggcggaaggatgcgtctgtgctgcgtccccatagagacgaagtctataaagggccggcgggcggccacggcagccatttctactttgcccgcccacagatgtagttttctctgcgcgtgtgcgttttccctcctccccgccctcagggtccacggccaccatggcgtattaggggcagcagtgcctgcggcagcattggcctttgcagcggcggcagcagcaccaggctctgcagcggcaacccccagcggcttaagccatggcgcttctcacggcattcagcagcagcgttgctgtaaccgacaaagacaccttcgaattaagcacattcctcgattccagcaaagcaccgcaacatgaccgaaatgagcttcctgagcagcgaggtgttggtgggggacttgatgtcccccttcgaccagtcgggtttgggggctgaagaaagcctaggtctcttagatgattacctggaggtggccaagcacttcaaacctcatgggttctccagcgacaaggctaaggcgggctcctccgaatggctggctgtggatgggttggtcagtccctccaacaacagcaaggaggatgccttctccgggacagattggatgttggagaaaatggatttgaaggagttcgacttggatgccctgttgggtatagatgacctggaaaccatgccagatgaccttctgaccacgttggatgacacttgtgatctctttgcccccctagtccaggagactaataagcagcccccccagacggtgaacccaattggccatctcccagaaagtttaacaaaacccgaccaggttgcccccttcaccttcttacaacctcttcccctttccccaggggtcctgtcctccactccagatcattcctttagtttagagctgggcagtgaagtggatatcactgaaggagataggaagccagactacactgcttacgttgccatgatccctcagtgcataaaggaggaagacaccccttcagataatgatagtggcatctgtatgagcccagagtcctatctggggtctcctcagcacagcccctctaccaggggctctccaaataggagcctcccatctccaggtgttctctgtgggtctgcccgtcccaaaccttacgatcctcctggagagaagatggtagcagcaaaagtaaagggtgagaaactggataagaagctgaaaaaaatggagcaaaacaagacagcagccactaggtaccgccagaagaagagggcggagcaggaggctcttactggtgagtgcaaagagctggaaaagaagaacgaggctctaaaagagagggcggattccctggccaaggagatccagtacctgaaagatttgatagaagaggtccgcaaggcaagggggaagaaaagggtcccctagttgaggatagtcaggagcgtcaatgtgcttgtacatagagtgctgtagctgtgtgttccaataaattattttgtagggaaa

SEQ ID NO: 119855 - DNA, 1056 bp, Artificial Sequence
  derived and/or modified sequence
atgaccgagatgagcttcctgagcagcgaggtgctggtgggcgacctgatgagccccttcgaccagagcggcctgggcgccgaggagagcctgggcctgctggacgactacctggaggtggccaagcacttcaagccccacggcttcagcagcgacaaggccaaggccggcagcagcgagtggctggccgtggacggcctggtgagccccagcaacaacagcaaggaggacgccttcagcggcaccgactggatgctggagaagatggacctgaaggagttcgacctggacgccctgctgggcatcgacgacctggagaccatgcccgacgacctgctgaccaccctggacgacacctgcgacctgttcgcccccctggtgcaggagaccaacaagcagcccccccagaccgtgaaccccatcggccacctgcccgagagcctgaccaagcccgaccaggtggcccccttcaccttcctgcagcccctgcccctgagccccggcgtgctgagcagcacccccgaccacagcttcagcctggagctgggcagcgaggtggacatcaccgagggcgacagaaagcccgactacaccgcctacgtggccatgatcccccagtgcatcaaggaggaggacacccccagcgacaacgacagcggcatctgcatgagccccgagagctacctgggcagcccccagcacagccccagcaccagaggcagccccaacagaagcctgcccagccccggcgtgctgtgcggcagcgccagacccaagccctacgacccccccggcgagaagatggtggccgccaaggtgaagggcgagaagctggacaagaagctgaagaagatggagcagaacaagaccgccgccaccagatacagacagaagaagagagccgagcaggaggccctgaccggcgagtgcaaggagctggagaagaagaacgaggccctgaaggagagagccgacagcctggccaaggagatccagtacctgaaggacctgatcgaggaggtgagaaaggccagaggcaagaagagagtgccctag

SEQ ID NO: 119856 - protein, 1039 aa, Artificial Sequence
  derived and/or modified sequence
MHQKTPEIYSVELSGTKDIVKTDKGDGKEKYRGLKNNCLELKKKNHKEEFQKELHLDDHKLSNRELEEKYGTDIIMGLSSTRAAELLARDGPNSLTPPKQTPEIVKFLKQMVGGFSILLWVGAFLCWIAYGIQYSSDKSASLNNVYLGCVLGLVVILTGIFAYYQEAKSTNIMSSFNKMIPQQALVIRDSEKKTIPSEQLVVGDIVEVKGGDQIPADIRVLSSQGCRVDNSSLTGESEPQPRSSEFTHENPLETKNICFYSTTCLEGTVTGMVINTGDRTIIGHIASLASGVGNEKTPIAIEIEHFVHIVAGVAVSIGILFFIIAVSLKYQVLDSIIFLIGIIVANVPEGLLATVTVTLSLTAKRMAKKNCLVKNLEAVETLGSTSIICSDKTGTLTQNRMTVAHLWFDNQIFVADTSEDHSNQVFDQSSRTWASLSKIITLCNRAEFKPGQENVPIMKKAVIGDASETALLKFSEVILGDVMEIRKRNRKVAEIPFNSTNKFQLSIHEMDDPHGKRFLMVMKGAPERILEKCSTIMINGEEHPLDKSTAKTFHTAYMELGGLGERVLGFCHLYLPADEFPETYSFDIDAMNFPTSNLCFVGLLSMIDPPRSTVPDAVTKCRSAGIKVIMVTGDHPITAKAIAKSVGIISANSETVEDIAHRLNIAVEQVNKRDAKAAVVTGMELKDMSSEQLDEILANYQEIVFARTSPQQKLIIVEGCQRQDAVVAVTGDGVNDSPALKKADIGIAMGIAGSDAAKNAADMVLLDDNFASIVTGVEEGRLIFDNLKKTIAYSLTKNIAELCPFLIYIIVGLPLPIGTITILFIDLGTDIIPSIALAYEKAESDIMNRKPRHKNKDRLVNQPLAVYSYLHIGLMQALGAFLVYFTVYAQEGFLPRTLINLRVEWEKDYVNDLKDSYGQEWTRYQREYLEWTGYTAFFVGILVQQIADLIIRKTRRNSIFQQGLFRNKVIWVGITSQIIIGLILSYGLGSVTALSFTMLRAQYWFVAVPHAILIWVYDEVRKLFIRLYPGSWWDKNMYY

SEQ ID NO: 119857 - DNA, 3120 bp, Artificial Sequence
  derived and/or modified sequence
atgcatcagaagacgcctgagatttacagcgtggagctgagtgggaccaaggatatagtcaaaaccgataaaggcgatggcaaggaaaagtatcggggtctgaaaaataactgccttgaattaaagaaaaaaaatcacaaagaagagtttcagaaggagcttcatctcgacgaccacaagttatccaacagggagctagaggaaaagtatggaaccgacattatcatgggactctctagcaccagggccgcagagctgctcgcccgggacgggcccaatagcctgaccccgcccaagcagactccagagatcgtgaagttcctgaaacagatggtgggcgggttcagtattctgctctgggtgggggccttcctgtgctggatagcttacgggattcagtactcctccgataagagcgcttccctgaacaatgtttatttggggtgcgttctaggactggttgttatcctgacgggtatctttgcgtattaccaggaggcaaaaagcacaaacattatgtcctcatttaacaagatgattcctcaacaagctttggtgatccgcgacagcgaaaagaagactattccttccgagcagctggttgtcggggacatcgttgaagtaaaagggggcgaccagatcccagctgacatcagggtcctttccagtcagggctgccgtgtagacaacagctccctcaccggtgagagtgagcctcagccaagatcaagtgagtttacacatgaaaacccgttggagaccaagaatatttgcttttacagcacaacatgccttgagggaacagtgacaggtatggtgatcaatacaggcgacaggacgatcatcggccacatagcatctctagcttctggcgtggggaatgagaagacccccatcgccatcgaaatcgaacacttcgtgcacatcgtggccggtgtggccgttagtatcggtatcctgttcttcatcattgccgtgtcccttaaatatcaggtcctggatagcataattttcctgattgggattattgttgcaaatgtgccagaggggctcctggctactgtcactgtgaccctctcgctgaccgcgaaacgcatggcaaagaaaaactgcctggtcaaaaatctggaggcagtagagacgttaggaagcacctcgattatttgcagcgataaaaccgggacactgactcagaataggatgactgtcgcacacctgtggttcgataaccagatctttgtggctgatacatccgaggaccattccaaccaggtgttcgaccagagctcccggacgtgggcctcactttctaagatcatcactctgtgcaatcgggccgagtttaaaccggggcaggaaaatgtgcctattatgaagaaagcagtgataggagatgctagcgaaacagctctgctgaagtttagtgaggtgattctgggagacgtcatggaaatcagaaaaaggaacagaaaggtggctgagattcccttcaacagcacaaacaagttccaattgtcaattcatgaaatggacgatccacacggcaagcggtttctcatggtgatgaagggtgctcctgagagaattctcgaaaagtgctccaccatcatgatcaacggagaggagcaccctctcgacaagtctaccgcgaaaacttttcacactgcttacatggagcttggtgggcttggggagcgcgtgcttggcttttgccacttgtacctgcctgcagacgagttccccgaaacatattcatttgatattgacgctatgaactttcccacaagtaatctgtgttttgtcggtcttctctccatgattgatcctccgagatccaccgtgcccgacgctgtaaccaaatgcaggtccgcaggcatcaaggtcattatggtcacaggagaccacccgatcacagcaaaagccatcgccaagagcgtcggcattatatccgctaatagtgagaccgtggaggatatcgcccacaggctgaatattgcggtcgaacaggtcaataaacgagacgccaaggccgccgtggtcacagggatggagctaaaagatatgtcaagtgaacagctcgacgagattctggccaattatcaggaaatcgtgttcgcacgcacttcccctcaacagaaactgattatcgtggaagggtgccagcggcaggacgcggtggtggcagttactggagatggcgttaatgattccccggccctaaaaaaagcagacatcgggattgccatgggcatcgccggttcggacgccgcgaagaatgcagctgacatggtgctgctggacgacaatttcgcaagcatcgtcacaggggtcgaagaaggacgtctgatttttgacaacctcaaaaagactatagcctactcacttacaaagaatattgctgaactgtgccccttcctgatctacatcatcgtcgggctcccactgccaattggaaccatcacgatcttgttcattgacttaggcaccgacattatcccttccattgcgctggcctacgaaaaagccgagtctgacattatgaaccgcaagcctcgtcacaaaaataaggataggcttgttaaccagccgctggccgtatattcctacttacatataggcctcatgcaggcccttggagcctttctcgtttacttcacagtgtacgcccaggagggatttctgccgcgaactttgatcaacctacgagtggaatgggagaaggattacgtgaatgacctcaaagattcctacggtcaggagtggacaagatatcagagagagtacctggaatggacagggtatactgccttcttcgtggggattctggtccaacaaatagcagatctcataattcggaagacaaggcggaacagtatatttcagcaggggcttttcaggaacaaggtgatctgggtcgggatcaccagccagatcatcatcggcctgatacttagctacggtctgggttcagtgacagcgttaagctttaccatgctgagggcccagtactggttcgtcgcagttccccatgctatactcatctgggtatatgatgaagttagaaaactttttattcggttgtacccaggctcatggtgggacaaaaacatgtactactag

SEQ ID NO: 119858 - DNA, 3120 bp, Artificial Sequence
  derived and/or modified sequence
atgcaccagaagaccccagagatctacagcgtggagctgagcggcaccaaggacatcgtgaagacagacaagggagatggcaaggagaagtaccggggcctgaagaacaactgcctggagctgaagaagaagaaccacaaggaggagttccagaaggagctgcacctggatgaccacaagctgagcaaccgggagctggaggagaagtatggaacagacatcatcatgggcctgagcagcaccagggctgctgagctgctggccagagatggccccaacagcctgaccccacccaagcagaccccagagatcgtgaagttcctgaagcagatggtgggcggcttcagcatcctgctgtgggtgggcgccttcctgtgctggatcgcctacggcatccagtacagcagtgacaagagcgccagcctgaacaacgtgtacctgggctgtgtgctgggcctggtggtgatcctgaccggcatctttgcctactaccaggaggccaagagcaccaacatcatgagcagcttcaacaagatgatcccccagcaggccctggtgatccgggacagcgagaagaagaccatccccagcgagcagctggtggtgggggacatcgtggaggtgaagggcggggaccagatcccagctgacatccgggtgctgagcagccagggctgccgggtggacaacagcagcctgaccggggagagcgagccccagcccaggagcagcgagttcacccatgagaaccccctggagaccaagaacatctgcttctacagcaccacctgcctggagggcaccgtgacaggcatggtgatcaacacaggagacaggaccatcatcggccacatcgccagcctggccagcggcgtgggcaatgagaagacccccatcgccattgaaattgagcactttgtgcacatcgtggccggcgtggccgtgtccatcggcatcctcttcttcatcatcgctgtgtccctgaagtaccaggtgctggacagcatcatcttcctgattggcatcatcgtggccaacgtgcctgagggcctgctggccaccgtgacagtgaccctgagcctgacagccaagaggatggccaagaagaactgcctggtgaagaacctggaggccgtggagaccctgggcagcaccagcatcatctgcagcgacaagacaggcaccctgacccagaacaggatgacagtggcccacctgtggtttgacaaccagatctttgtggccgacaccagcgaggaccacagcaaccaggtgtttgaccagagcagcaggacctgggccagcctgagcaagatcatcaccctgtgcaacagagctgagttcaagccaggccaggagaatgtgcccatcatgaagaaggctgtgattggagatgccagcgagacagccctgctgaagttcagcgaggtgatcctgggagatgtgatggagatcaggaagaggaacaggaaggtggccgagatccccttcaacagcaccaacaagttccagctgagcatccacgagatggatgacccccacggcaagcgcttcctgatggtgatgaagggggcccctgagcgcatcctggagaagtgcagcaccatcatgatcaatggagaggagcaccccctggacaagagcacagccaagaccttccacacagcctacatggagctgggcggcctgggggagcgggtgctgggcttctgccacctgtacctgcctgcagatgagttccctgagacctacagctttgatattgatgccatgaacttccccaccagcaacctgtgctttgtgggcctgctgtccatgattgatcctcccaggagcacagtgcctgatgctgtgaccaagtgccgctctgctggcatcaaggtgatcatggtgactggagaccaccccatcacagccaaggccatcgccaagtctgtgggcatcatcagcgccaacagcgagaccgtggaggacatcgcccaccggctgaacattgctgtggagcaggtgaacaagagagatgccaaggctgctgtggtgacaggcatggagctgaaggacatgagcagcgagcagctggatgagatcctggccaactaccaggagatcgtgtttgcccggaccagcccccagcagaagctgatcatcgtggagggctgccagaggcaggatgctgtggtggccgtgactggagatggagtgaatgacagccctgccctgaagaaggctgacattggaattgccatgggcattgctggcagtgatgctgccaagaatgctgctgacatggtgctgctggatgacaactttgccagcatcgtgactggagtggaggagggccgcctcatctttgacaacctgaagaagaccatcgcctacagcctgaccaagaacattgctgagctgtgccccttcctgatctacatcatcgtgggcctgcccctgcccatcggcaccatcaccatcctcttcatcgacctgggcacagacatcatccccagcatcgccctggcctatgagaaggccgagagtgacatcatgaacaggaagcccaggcacaagaacaaggaccggctggtgaaccagcccctggccgtgtacagctacctgcacatcggcctgatgcaggccctgggcgccttcctggtgtacttcaccgtgtatgcccaggagggcttcctgcccaggaccctcatcaacctgcgggtggagtgggagaaggactatgtgaatgacctgaaggacagctatggccaggagtggacccgctaccagcgggagtacctggagtggacaggctacacagccttctttgtgggcatcctggtgcagcagattgctgacctgatcatcaggaagaccaggaggaacagcatcttccagcagggcctcttcaggaacaaggtgatctgggtgggcatcaccagccagatcatcatcggcctcatcctgtcctatggcctgggctctgtgacagccctgtccttcaccatgctgcgggcccagtactggtttgtggccgtgccccacgccatcctgatctgggtgtatgatgaggtgaggaagctgttcatccggctgtacccaggctcctggtgggacaagaacatgtactactag

SEQ ID NO: 119859 - DNA, 3120 bp, Artificial Sequence
  derived and/or modified sequence
atgcaccagaagacccccgagatctacagcgtggagctgagcggcaccaaggacatcgttaagactgacaagggggacgggaaggagaagtacagaggactcaaaaataactgccttgagttaaaaaaaaaaaaccacaaagaggagtttcaaaaggagctgcacctcgatgaccataagctgagtaatcgggagctggaggagaaatacggcactgacataattatggggctcagtagcactcgggcagccgagctacttgcccgggacggccctaacagtcttaccccgccaaagcagacccctgagatcgtgaaatttcttaagcagatggtcggcgggtttagtatcctgctatgggtcggcgcatttctgtgctggatcgcttacggaatccagtatagctcagacaaatccgcctcgcttaataatgtttacctgggatgtgttctcggactcgtcgtgatcctgacaggcatattcgcctactatcaggaagcgaaatcaactaacattatgtcttcattcaacaaaatgatccctcaacaggcactggtgatacgggactctgaaaagaagactatacctagtgagcagctggtggtgggggatattgtcgaagtgaaggggggcgaccaaatcccggccgatatcagagtgttgtccagccaaggctgcagggtggataactcctccctgacaggtgagtcggagccccagccccgttcttccgaattcacccacgaaaacccacttgaaaccaagaacatttgtttctattccacaacatgcttggaggggaccgtaaccggtatggttatcaacaccggagacagaaccattatcgggcacatagcttcgctcgcttctggcgttggtaatgaaaagacccctattgcgattgagatcgagcattttgtgcacatagtagcaggcgtagccgtgagcatcggaatcctcttcttcatcatcgcagtgtctttgaagtaccaggtcttagacagcatcatctttttaatcgggatcatcgtggcaaatgtgcctgaaggccttctcgccaccgtcaccgttacactgtccctaaccgcaaagaggatggccaagaaaaattgtttggtgaagaatctcgaggctgttgaaacgttaggttcgacaagtatcatctgtagtgacaaaaccggcaccctcacgcaaaataggatgacagttgcccacttgtggtttgacaaccagatcttcgtcgcggataccagtgaggaccacagcaatcaggtcttcgatcagagtagccggacctgggccagcctgagtaagatcattacgctctgcaatagagccgaatttaagcccgggcaggagaacgtgccaatcatgaaaaaggccgtgatcggagatgcgtcagagacagcgctgctgaagtttagtgaagtcattctcggcgatgtgatggagataaggaagcggaatcgcaaggtcgctgagattcccttcaatagcacgaataagttccagttaagtattcacgagatggatgatccacacggcaaacggttcctcatggtgatgaaaggagcccctgagagaatcctcgagaagtgtagtaccataatgataaacggggaggaacacccactggacaagtccacagcaaaaaccttccataccgcctacatggagcttggaggactaggcgagagggtgctgggattttgtcacctatatctgcctgcagatgagttcccggagacttattcctttgacatagacgcaatgaacttcccaacaagtaatctgtgctttgtgggcctattgagcatgattgaccccccaagaagtaccgtgccagacgccgtgactaagtgtagaagcgcgggcattaaagtcataatggtaactggcgatcacccaattacagccaaagccatcgccaagagtgtaggcataattagcgctaatagtgaaactgtcgaggatatagctcatcggcttaatatcgctgttgagcaggtgaacaagcgcgatgcgaaggccgcagtggtcactggcatggaattgaaggacatgtcatctgagcagctggatgagattctagccaactaccaggaaatagtgttcgcgcgcacttctcctcagcaaaagctcatcatcgtcgaaggatgccagaggcaagatgccgtcgtcgcggtaaccggcgatggtgtgaacgattctcccgccctgaaaaaggctgacatcgggattgctatgggtatcgctggctctgacgccgctaaaaacgcagctgatatggtcctgttggatgacaacttcgcctcgatcgttaccggcgtcgaggaaggtcgcctgatttttgacaatctcaaaaaaacaattgcttactccttgactaaaaacatcgcggagttatgcccattcctcatatatataatcgtgggcctaccactgcccatcggcacaatcacaatattgttcatagacctcggaactgacattattccgagtatagcgctagcgtacgagaaagcagagtccgacatcatgaatagaaagccgcggcataagaacaaggaccgcctggtgaatcaaccacttgctgtttacagctatttgcacattgggttaatgcaggctttaggggcttttctggtttattttaccgtctacgcacaggaggggttccttcccaggactctgattaacctgcgggtggagtgggagaaagactacgttaacgaccttaaagattcttatggccaggaatggacacgatatcaacgcgaatacctcgaatggacggggtatacagcattttttgtaggtattcttgttcagcagattgctgatctcatcatacgcaagactcgaaggaactctatttttcagcagggcctcttccgaaataaagtgatctgggtcgggatcacgtcgcagattattatagggctcattctctcctatggcctcggaagtgtcacagccctatcttttacaatgctgagggcgcagtactggttcgtagctgtgccacacgccatcctgatttgggtatacgatgaggtgaggaagctgttcataaggctgtatcccgggtcgtggtgggacaagaatatgtactattag

SEQ ID NO: 119860 - DNA, 3120 bp, Artificial Sequence
  derived and/or modified sequence
atgcatcagaaaacccctgagatctactctgtcgagttgagcggcactaaagacatcgttaagacagacaaaggggacggcaaggaaaaatacaggggactaaagaacaactgcctggagctgaagaaaaagaaccataaggaagagtttcaaaaagaactgcacttagacgatcacaaactgtctaatcgggagctggaagagaagtatgggactgatatcatcatggggctctcgagcaccagagctgcagaactgctggccagagacggacccaacagcctgaccccacccaagcaaactcccgagatagtgaagttcctcaagcaaatggtaggtggtttctccatcttattatgggtaggcgcattcctctgctggattgcatacggcatacaatattctagtgataagtctgccagtctcaataatgtctacctaggctgtgttttaggccttgtggtgatcctgaccggtattttcgcttattaccaggaggccaagtctacaaatattatgagctcattcaataagatgatcccccagcaggctctagtaattagagacagcgagaagaagactatcccatctgagcagctggtggtgggggatattgtggaggtgaaaggtggtgatcagataccggcagacatccgggtccttagctcacaaggatgccgggttgacaacagcagcctaacgggtgaatccgaaccgcaacccaggtcatctgaatttactcatgagaatccactggagacaaaaaacatatgcttttactccacgacatgtctagaaggcaccgtcactggtatggtgatcaataccggagaccgcacaattatcggccatattgcttccctggctagtggcgtggggaatgaaaagacccccatcgcaatagaaattgagcattttgtgcacattgtggccggagtagctgttagcattggaatactgttctttattatcgctgtgtccctgaagtaccaagtgctggatagtatcatctttctgatcggaatcattgtggccaacgtccccgagggactgctggctacagttacagtcactcttagcctgaccgctaaaagaatggcgaagaagaactgcttggtgaaaaaccttgaggctgtagagactctgggatccacctctatcatttgcagcgataagaccggtacactcacacagaatagaatgaccgttgcccatctgtggttcgacaatcagattttcgtagcagatacgagtgaagaccattctaaccaggtctttgatcagagcagcagaacatgggcaagcctatccaaaattatcacactctgcaaccgcgcagagtttaaacccggacaagaaaacgtcccgatcatgaagaaggcagtgattggggatgctagcgaaacagcactgctgaagttttccgaggtcatactgggggacgtgatggagatacggaaaaggaaccgaaaagtagcagagatacctttcaattcgacaaataagtttcaactgtctattcatgaaatggacgatcctcacgggaaaaggttccttatggtcatgaagggggcaccagaacggatcctggaaaaatgttccacaatcatgataaacggggaggaacatcctctggataagagcaccgcaaagacttttcacacagcctacatggaactgggcggactgggtgagagagtcctagggttctgccacttgtacttgcctgctgatgagttccctgagacatatagcttcgacattgacgctatgaatttcccaacctctaatttgtgttttgtcggcttgctgtccatgatcgatcctcccaggtctaccgtgccagacgcagtgactaaatgtaggagcgctggcatcaaggttattatggtgaccggcgaccaccctatcaccgccaaggcaattgctaaatcggttggaataatatctgccaactccgaaacagtcgaggatatcgcccacagactgaacatcgccgttgagcaggtgaacaagagagacgccaaggcggctgtcgttacaggtatggagctgaaagacatgtcctcggagcagctcgatgaaattctggccaattaccaggaaatcgtgttcgcacgaacgtcacctcagcagaagctgatcatcgtcgaagggtgtcagaggcaggacgccgttgtggccgtgacaggtgatggggtcaatgacagcccagcgctcaagaaggccgatatcggcattgccatgggaatcgccggttccgacgctgctaaaaacgcggcagatatggtgctgctcgatgacaacttcgctagcattgtgacgggggttgaggagggcagactgatctttgataatctgaaaaagactatcgcctactccctgacaaaaaatatcgccgagctctgtccatttctgatttacattattgtgggtttacccctcccaattggcacaattaccatccttttcatcgacctcggcaccgacatcataccgagcatagcacttgcttacgagaaggcagaatctgatattatgaatcgcaagcccagacacaagaataaagatcgcctcgtgaaccaaccacttgcggtgtattcatacctacacataggtctgatgcaagcgttgggcgcattcctggtatatttcaccgtgtatgcccaggagggcttccttcccagaactctcataaatctacgggtcgagtgggagaaggactacgtaaacgatcttaaggacagctatgggcaggagtggacaagataccaacgcgaatatttggagtggactggatatacggccttctttgtgggcatcctcgtgcagcagattgccgacctgatcatcaggaagacgaggcgcaacagcattttccagcaggggctgttccgcaataaagttatctgggtcggtatcacttcacaaatcatcattggcttaattctgtcctatggtctggggagtgtaactgcactgtcctttaccatgctccgcgcacagtactggtttgtggccgtaccccacgcgatcctgatttgggtttacgacgaagttcggaaactgttcatcaggctgtaccctgggtcctggtgggacaagaacatgtactactag

SEQ ID NO: 119861 - DNA, 3538 bp, Artificial Sequence
  derived and/or modified sequence
cggccgcggaggtgcgtgcagggcccgcgccgccgccggtatctccaccgccaacacctcagccactgccactgccacagccacacgaggccccccaccgtgcgctccgccgctgcggtcccggatccgcgctccacgcccgcagcccgcggcgccaccagcccagcatgcaccagaaaaccccagaaatttactccgtggagctcagcggaactaaggacatcgtgaaaacagacaagggggatggcaaggagaagtataggggtctgaagaacaactgcctggaactcaaaaagaaaaatcacaaagaggagtttcagaaagaactccatctggatgaccacaaactcagcaatagggaattggaagagaaatatggcacagacatcattatgggtctctccagcaccagagctgccgagctcctggcccgggatgggcccaactccctcacccctcccaagcagacgcctgagatcgtcaagttcctcaagcagatggtgggggggttctctatcctcctgtgggtgggcgcctttctctgttggattgcatatgggattcagtactccagcgacaagtctgcatccctgaacaacgtgtacttgggctgtgtgcttggtctggtggtcattttaacggggatctttgcttattaccaagaggcaaaaagcaccaacatcatgtccagcttcaataagatgatccctcagcaagctctcgtcatccgagattccgagaagaagaccatcccttcagagcagctggtggtgggggacattgtggaggtcaaaggaggagaccagatccctgcagacatcagggtgctgtcttctcaggggtgtcgggtggataactcatctctcacgggggagtctgagccccagccccgctcctctgagtttacccatgaaaaccccctggaaacaaagaacatctgcttctattccacaacgtgtctggaaggcactgtcaccggcatggttatcaacacgggtgaccgcaccatcattggccatattgcctcattggcctcaggagttggaaatgagaagacgcccattgccattgagatcgagcactttgttcacattgtggcaggagtggctgtctccatcggcatccttttcttcatcatcgctgtgtccctgaagtatcaagtcctggactccatcatcttcctcattggcatcattgtggccaatgtgcccgagggcctcctggccactgtcactgtgaccctgtcgctgacagcaaaacggatggccaagaagaactgcctggtgaagaacctggaggctgtggagaccctcggctccacctccatcatctgctcggacaagactgggacactgacccagaacaggatgacagtggcccatctgtggttcgacaatcagatctttgtggctgacaccagtgaggaccattcaaaccaagtctttgaccaaagctctaggacttgggcctccttatccaagataataacattgtgtaaccgagcagagttcaagccaggacaggaaaatgtccccatcatgaagaaagctgtgattggagatgcctcagaaactgctcttttaaaattctcagaggtcattttgggtgatgtgatggaaattagaaaaagaaaccgcaaagtagctgaaatcccttttaactctactaataaatttcagctctccatccacgagatggatgacccccacggcaagcgcttcctcatggtgatgaagggggcccctgagcgcatcctagagaaatgcagcaccatcatgatcaacggcgaggagcacccactggacaagagcactgccaagaccttccacacagcctacatggagctgggcgggttgggcgagcgtgtgctgggtttctgtcatctctacctgccagcagacgagtttccagaaacctactcatttgacatagacgctatgaactttccgacctccaacctctgttttgtgggactcttgtcaatgatcgatccccctcggtccaccgtgccagatgcagtcaccaaatgccggagtgcagggatcaaggttattatggttactggtgatcatcccatcacagccaaagctattgccaagagtgtggggatcatttcagccaacagtgaaacagtggaagacattgcacatcgcctcaacattgctgtggagcaagttaacaaacgggatgccaaggccgctgtggtgactggcatggagctgaaggacatgagctcagaacagctggatgagatcttagccaactaccaggagattgtctttgcccggacatccccccagcagaagctgatcattgtggagggctgtcagaggcaggatgctgttgttgctgtgaccggggatggagttaatgactctccggctctaaagaaggcagacattgggattgccatggggatagcaggttctgatgcagccaaaaatgcagccgacatggtcttgctggacgacaacttcgcatccatcgtcacaggggtggaggaaggtcgcctgatctttgacaacctcaagaagactattgcttattccctgaccaagaacattgccgagctgtgcccctttctgatctacatcattgtcgggctccccctgcccattggcaccatcaccattctgttcattgacttggggacagacattatcccctccattgccttggcgtacgagaaagctgaaagtgacatcatgaacaggaagcctcgccacaagaataaggacaggctggtgaaccagccgctcgctgtgtactcatacctgcacattggcctcatgcaagccctgggagctttccttgtgtatttcaccgtctatgcacaagagggctttctgccccgcactctcattaacctgcgggtagaatgggagaaggactacgtgaatgacttgaaagacagctatgggcaggaatggacaaggtaccagagggaatacctagaatggacgggctacacggctttctttgttggcatcctagtccagcaaatagcagatctgatcatcaggaaaacccggaggaattccatcttccagcagggtctcttcagaaataaagtcatctgggtggggatcacctcacagatcatcattggtctgatcctctcctatggcctcggaagtgtcacagccttgagtttcaccatgcttagggctcagtactggtttgtggctgtgccgcacgccatcctgatctgggtgtatgatgaggtgcggaagctcttcatcaggctctaccctggaagctggtgggataagaacatgtattattaagaccacctcccttcctatgtctctcagcagcacgttggggcacacttgttcatcttctgaccgtttgctgggctattcccctgcagtgcagacatcgtcaaaattcagacaagaggaaattttcatgcagaaagctgtatgcaggatgctcactgatgttttgcactttaaaactgaaattcaactctttatataggattttcttttctatctccatctcctcattaaaaaatacgtacatttcgaggtaa

SEQ ID NO: 119862 - DNA, 3120 bp, Artificial Sequence
  derived and/or modified sequence
atgcaccagaagacccccgagatctacagcgtggagctgagcggcaccaaggacatcgtgaagaccgacaagggcgacggcaaggagaagtacagaggcctgaagaacaactgcctggagctgaagaagaagaaccacaaggaggagttccagaaggagctgcacctggacgaccacaagctgagcaacagagagctggaggagaagtacggcaccgacatcatcatgggcctgagcagcaccagagccgccgagctgctggccagagacggccccaacagcctgaccccccccaagcagacccccgagatcgtgaagttcctgaagcagatggtgggcggcttcagcatcctgctgtgggtgggcgccttcctgtgctggatcgcctacggcatccagtacagcagcgacaagagcgccagcctgaacaacgtgtacctgggctgcgtgctgggcctggtggtgatcctgaccggcatcttcgcctactaccaggaggccaagagcaccaacatcatgagcagcttcaacaagatgatcccccagcaggccctggtgatcagagacagcgagaagaagaccatccccagcgagcagctggtggtgggcgacatcgtggaggtgaagggcggcgaccagatccccgccgacatcagagtgctgagcagccagggctgcagagtggacaacagcagcctgaccggcgagagcgagccccagcccagaagcagcgagttcacccacgagaaccccctggagaccaagaacatctgcttctacagcaccacctgcctggagggcaccgtgaccggcatggtgatcaacaccggcgacagaaccatcatcggccacatcgccagcctggccagcggcgtgggcaacgagaagacccccatcgccatcgagatcgagcacttcgtgcacatcgtggccggcgtggccgtgagcatcggcatcctgttcttcatcatcgccgtgagcctgaagtaccaggtgctggacagcatcatcttcctgatcggcatcatcgtggccaacgtgcccgagggcctgctggccaccgtgaccgtgaccctgagcctgaccgccaagagaatggccaagaagaactgcctggtgaagaacctggaggccgtggagaccctgggcagcaccagcatcatctgcagcgacaagaccggcaccctgacccagaacagaatgaccgtggcccacctgtggttcgacaaccagatcttcgtggccgacaccagcgaggaccacagcaaccaggtgttcgaccagagcagcagaacctgggccagcctgagcaagatcatcaccctgtgcaacagagccgagttcaagcccggccaggagaacgtgcccatcatgaagaaggccgtgatcggcgacgccagcgagaccgccctgctgaagttcagcgaggtgatcctgggcgacgtgatggagatcagaaagagaaacagaaaggtggccgagatccccttcaacagcaccaacaagttccagctgagcatccacgagatggacgacccccacggcaagagattcctgatggtgatgaagggcgcccccgagagaatcctggagaagtgcagcaccatcatgatcaacggcgaggagcaccccctggacaagagcaccgccaagaccttccacaccgcctacatggagctgggcggcctgggcgagagagtgctgggcttctgccacctgtacctgcccgccgacgagttccccgagacctacagcttcgacatcgacgccatgaacttccccaccagcaacctgtgcttcgtgggcctgctgagcatgatcgacccccccagaagcaccgtgcccgacgccgtgaccaagtgcagaagcgccggcatcaaggtgatcatggtgaccggcgaccaccccatcaccgccaaggccatcgccaagagcgtgggcatcatcagcgccaacagcgagaccgtggaggacatcgcccacagactgaacatcgccgtggagcaggtgaacaagagagacgccaaggccgccgtggtgaccggcatggagctgaaggacatgagcagcgagcagctggacgagatcctggccaactaccaggagatcgtgttcgccagaaccagcccccagcagaagctgatcatcgtggagggctgccagagacaggacgccgtggtggccgtgaccggcgacggcgtgaacgacagccccgccctgaagaaggccgacatcggcatcgccatgggcatcgccggcagcgacgccgccaagaacgccgccgacatggtgctgctggacgacaacttcgccagcatcgtgaccggcgtggaggagggcagactgatcttcgacaacctgaagaagaccatcgcctacagcctgaccaagaacatcgccgagctgtgccccttcctgatctacatcatcgtgggcctgcccctgcccatcggcaccatcaccatcctgttcatcgacctgggcaccgacatcatccccagcatcgccctggcctacgagaaggccgagagcgacatcatgaacagaaagcccagacacaagaacaaggacagactggtgaaccagcccctggccgtgtacagctacctgcacatcggcctgatgcaggccctgggcgccttcctggtgtacttcaccgtgtacgcccaggagggcttcctgcccagaaccctgatcaacctgagagtggagtgggagaaggactacgtgaacgacctgaaggacagctacggccaggagtggaccagataccagagagagtacctggagtggaccggctacaccgccttcttcgtgggcatcctggtgcagcagatcgccgacctgatcatcagaaagaccagaagaaacagcatcttccagcagggcctgttcagaaacaaggtgatctgggtgggcatcaccagccagatcatcatcggcctgatcctgagctacggcctgggcagcgtgaccgccctgagcttcaccatgctgagagcccagtactggttcgtggccgtgccccacgccatcctgatctgggtgtacgacgaggtgagaaagctgttcatcagactgtaccccggcagctggtgggacaagaacatgtactactag

SEQ ID NO: 119863 - protein, 295 aa, Artificial Sequence
  derived and/or modified sequence
MGKRKCSPASQSLFLFQFQKMELKFKILLFYVIFYGCLAGIFIGTIQVMLLTISEFKPTYQDRVAPPGLTQIPQIQKTEISFRPNDPKSYEAYVLNIVRFLEKYKDSAQRDDMIFEDCGDVPSEPKERGDFNHERGERKVCRFKLEWLGNCSGLNDETYGYKEGKPCIIIKLNRVLGFKPKPPKNESLETYPVMKYNPNVLPVQCTGKRDEDKDKVGNVEYFGLGNSPGFPLQYYPYYGKLLQPKYLQPLLAVQFTNLTMDTEIRIECKAYGENIGYSEKDRFQGRFDVKIEVKS

SEQ ID NO: 119864 - protein, 303 aa, Artificial Sequence
  derived and/or modified sequence
MARGKAKEEGSWKKFIWNSEKKEFLGRTGGSWFKILLFYVIFYGCLAGIFIGTIQVMLLTISEFKPTYQDRVAPPGLTQIPQIQKTEISFRPNDPKSYEAYVLNIVRFLEKYKDSAQRDDMIFEDCGDVPSEPKERGDFNHERGERKVCRFKLEWLGNCSGLNDETYGYKEGKPCIIIKLNRVLGFKPKPPKNESLETYPVMKYNPNVLPVQCTGKRDEDKDKVGNVEYFGLGNSPGFPLQYYPYYGKLLQPKYLQPLLAVQFTNLTMDTEIRIECKAYGENIGYSEKDRFQGRFDVKIEVKS

SEQ ID NO: 119865 - protein, 247 aa, Artificial Sequence
  derived and/or modified sequence
MLLTISEFKPTYQDRVAPPGLTQIPQIQKTEISFRPNDPKSYEAYVLNIVRFLEKYKDSAQRDDMIFEDCGDVPSEPKERGDFNHERGERKVCRFKLEWLGNCSGLNDETYGYKEGKPCIIIKLNRVLGFKPKPPKNESLETYPVMKYNPNVLPVQCTGKRDEDKDKVGNVEYFGLGNSPGFPLQYYPYYGKLLQPKYLQPLLAVQFTNLTMDTEIRIECKAYGENIGYSEKDRFQGRFDVKIEVKS

SEQ ID NO: 119866 - DNA, 888 bp, Artificial Sequence
  derived and/or modified sequence
atgggtaaacgtaaatgcagcccggcaagtcagtcactgtttctatttcagttccagaagatggaactgaagtttaagatcttactgttctatgtgatattctatggctgccttgctggtatttttatagggacgattcaggtcatgcttctcacaattagcgaattcaaacccacttatcaggaccgcgttgcaccacccggcctgacgcaaattccccagatacaaaagactgagattagttttcggcccaacgatcccaaatcctatgaggcctacgttttaaacatcgtcaggttcctcgagaaatacaaagacagcgcccaacgcgacgacatgattttcgaagattgcggggatgtacctagtgaacctaaagaacggggagacttcaaccacgaacgcggcgaaagaaaggtgtgtcgcttcaagctggaatggttagggaactgctctggcttgaacgatgaaacctacggttacaaggaagggaaaccttgcataatcatcaagctgaatagagtcctcggctttaaacctaaaccccccaagaatgagtctttggagacgtacccggttatgaagtacaatcccaacgtgctgcctgtacagtgcaccggcaagagggacgaagataaggataaagtggggaacgtggaatactttggattgggaaatagccctgggtttcctcttcaatactacccgtactatggtaagctgctacagccgaaatatctgcagccactgcttgccgtgcagttcaccaatttgaccatggacaccgaaattagaatcgagtgcaaggcctacggcgaaaatattggctattcggagaaagaccgcttccagggacggttcgacgtgaagattgaggtgaagagttag

SEQ ID NO: 119867 - DNA, 912 bp, Artificial Sequence
  derived and/or modified sequence
atggcccgagggaaggccaaggaggagggatcttggaaaaagttcatctggaattcagagaagaaggaattccttgggagaacgggaggctcctggtttaagatcctgctgttctatgttatcttttacgggtgccttgcaggcatctttatcggaaccattcaagttatgctcctcacgatctccgagtttaagcctacctaccaggatcgtgtggcaccccccggactgacacagattcctcagatccagaagacagaaattagttttaggcccaacgatccaaaatcttatgaggcctacgttctcaacattgttcgattcctggagaaatacaaggactcagctcaacgagacgacatgatttttgaagactgtggggatgtgccctctgagccaaaggaacgaggagacttcaaccatgagcgcggtgagaggaaagtatgtagattcaaactcgagtggctgggaaattgcagtggccttaacgacgagacttatggatataaggaggggaaaccttgcataatcatcaagctgaacagggtgcttgggttcaagccaaagccccctaagaatgaaagcctggagacctatccagtgatgaaatacaatcctaacgtcttacccgtgcagtgcactgggaaacgagatgaggataaagacaaggtaggcaatgtggagtactttggattgggtaattcccctgggttccccttgcagtactacccttactatggaaagctgttgcagccgaagtacctccagcccttgcttgccgtacaattcacaaatctcaccatggacaccgaaattcggattgagtgtaaagcttacggcgagaatattggatacagtgaaaaagatcgattccaaggacgatttgatgtcaagatcgaggttaagtcatag

SEQ ID NO: 119868 - DNA, 912 bp, Artificial Sequence
  derived and/or modified sequence
atggcccgcggcaaagctaaagaggagggaagttggaagaagtttatttggaacagtgagaaaaaagagttcctgggccggactggtgggagttggtttaagatcctgctgttttatgtcattttctacgggtgccttgctggtattttcataggaaccatccaagtgatgctgcttaccatcagcgagttcaaacctacataccaggaccgcgtggccccccccgggctgacccagataccacagatacagaaaaccgaaatcagttttcgcccaaacgaccccaagtcttatgaggcatatgtcttgaatatcgtgcgatttctagaaaagtataaggatagcgcccagcgagacgacatgatctttgaggattgtggcgacgttccatcagaaccaaaggagcgaggcgacttcaaccatgaacggggggaacgtaaggtctgccgctttaaactcgagtggctgggcaattgtagcgggttgaatgatgagacctatggttataaggaggggaagccttgcatcataatcaaactgaatcgggtgctgggatttaaacccaaaccgcctaaaaatgagagccttgagacctaccctgtgatgaagtacaatccaaacgtcctaccggtgcaatgtacgggcaagagggatgaagataaagataaagtagggaacgtggagtacttcggtctggggaactcccctggattcccccttcaatactatccctactacggcaaactgcttcagcctaagtacttgcaaccccttttagccgtgcaattcacaaatctgacaatggatacagaaatccggattgaatgcaaggcttatggtgagaacataggttattctgaaaaagacagattccaaggccgttttgatgttaagatcgaagtgaaatcctag

SEQ ID NO: 119869 - DNA, 744 bp, Artificial Sequence
  derived and/or modified sequence
atgctgctgactatctccgagtttaagcccacctatcaggatcgggtagcccctccgggtctaactcaaattcctcagattcaaaagaccgagatcagtttccgccccaatgacccaaaaagctacgaggcttacgtattgaacattgtgcggttcttggaaaaatataaggacagcgctcagcgcgatgatatgatttttgaggactgtggagatgtacccagcgaaccaaaagaaagaggcgatttcaatcacgagcgtggcgaaaggaaggtctgcagattcaagctggaatggctgggaaactgttccggcctgaacgacgaaacttacggttacaaagagggcaagccctgtatcataatcaagctcaatagggtgttgggattcaagccgaagccacccaaaaacgaatctctggagacctatcccgtgatgaagtacaatccaaacgtcctccccgtgcagtgtactggcaaacgtgatgaggacaaggacaaggtgggtaatgtggagtacttcggattggggaatagccctgggttccctctccagtattacccatactacggtaagttgctccagccaaagtacctgcaacccttattagccgtgcagtttactaacttgaccatggacaccgaaatcagaatagaatgcaaagcctatggagaaaatattgggtattctgagaaagaccgctttcagggaaggttcgacgtgaagattgaggttaaatcatag

SEQ ID NO: 119870 - DNA, 888 bp, Artificial Sequence
  derived and/or modified sequence
atgggcaagaggaagtgcagccctgccagccagagcctcttcctgttccagttccagaagatggagctgaagttcaagatcctgctcttctacgtgatcttctacggctgcctggccggcatcttcatcggcaccatccaggtgatgctgctgaccatcagcgagttcaagcccacctaccaggacagagtggcccctcctggcctgacccagatcccccagatccagaagacagagatctccttccggcccaatgaccccaagagctatgaggcctacgtgctgaacatcgtgcgcttcctggagaagtacaaggacagcgcccagagagatgacatgatctttgaggactgtggagatgtgcccagcgagcccaaggagcggggggacttcaaccacgagcggggggagaggaaggtgtgccgcttcaagctggagtggctgggcaactgcagcggcctgaatgatgagacctacggctacaaggagggcaagccctgcatcatcatcaagctgaacagagtgctgggcttcaagcccaagccacccaagaatgaaagcctggagacctaccctgtgatgaagtacaaccccaacgtgctgcctgtgcagtgcaccgggaagagagatgaggacaaggacaaggtgggcaatgtggagtacttcggcctgggcaacagccctggcttccccctgcagtactacccctactacggcaagctgctgcagcccaagtacctgcagcccctgctggccgtgcagttcaccaacctgaccatggacacagagatcagaattgagtgcaaggcctatggagaaaatattggctacagcgagaaggaccgcttccagggccgctttgatgtgaagattgaggtgaagagctag

SEQ ID NO: 119871 - DNA, 912 bp, Artificial Sequence
  derived and/or modified sequence
atggcccggggcaaggccaaggaggagggctcctggaagaagttcatctggaacagcgagaagaaggagttcctgggccgcactggaggctcctggttcaagatcctgctcttctacgtgatcttctacggctgcctggccggcatcttcatcggcaccatccaggtgatgctgctgaccatcagcgagttcaagcccacctaccaggacagagtggcccctcctggcctgacccagatcccccagatccagaagacagagatctccttccggcccaatgaccccaagagctatgaggcctacgtgctgaacatcgtgcgcttcctggagaagtacaaggacagcgcccagagagatgacatgatctttgaggactgtggagatgtgcccagcgagcccaaggagcggggggacttcaaccacgagcggggggagaggaaggtgtgccgcttcaagctggagtggctgggcaactgcagcggcctgaatgatgagacctacggctacaaggagggcaagccctgcatcatcatcaagctgaacagagtgctgggcttcaagcccaagccacccaagaatgaaagcctggagacctaccctgtgatgaagtacaaccccaacgtgctgcctgtgcagtgcaccgggaagagagatgaggacaaggacaaggtgggcaatgtggagtacttcggcctgggcaacagccctggcttccccctgcagtactacccctactacggcaagctgctgcagcccaagtacctgcagcccctgctggccgtgcagttcaccaacctgaccatggacacagagatcagaattgagtgcaaggcctatggagaaaatattggctacagcgagaaggaccgcttccagggccgctttgatgtgaagattgaggtgaagagctag

SEQ ID NO: 119872 - DNA, 744 bp, Artificial Sequence
  derived and/or modified sequence
atgctgctgaccatcagcgagttcaagcccacctaccaggacagagtggcccctcctggcctgacccagatcccccagatccagaagacagagatctccttccggcccaatgaccccaagagctatgaggcctacgtgctgaacatcgtgcgcttcctggagaagtacaaggacagcgcccagagagatgacatgatctttgaggactgtggagatgtgcccagcgagcccaaggagcggggggacttcaaccacgagcggggggagaggaaggtgtgccgcttcaagctggagtggctgggcaactgcagcggcctgaatgatgagacctacggctacaaggagggcaagccctgcatcatcatcaagctgaacagagtgctgggcttcaagcccaagccacccaagaatgaaagcctggagacctaccctgtgatgaagtacaaccccaacgtgctgcctgtgcagtgcaccgggaagagagatgaggacaaggacaaggtgggcaatgtggagtacttcggcctgggcaacagccctggcttccccctgcagtactacccctactacggcaagctgctgcagcccaagtacctgcagcccctgctggccgtgcagttcaccaacctgaccatggacacagagatcagaattgagtgcaaggcctatggagaaaatattggctacagcgagaaggaccgcttccagggccgctttgatgtgaagattgaggtgaagagctag

SEQ ID NO: 119873 - DNA, 888 bp, Artificial Sequence
  derived and/or modified sequence
atgggcaagcggaagtgcagccccgccagccagagcctgttcctgttccagttccagaagatggagctcaagtttaaaatactcctgttttacgtcattttctacggttgtctggccgggattttcatcgggactattcaggttatgctgctcaccatctccgagttcaagcccacttatcaagatcgtgttgcacctccagggctgacccagatcccacagatccagaagaccgaaattagcttccgacccaacgatccgaagagttacgaagcctatgtgttaaacattgtccgcttcttggagaagtacaaagactcagcccaacgcgatgacatgatcttcgaggattgcggggacgtaccatccgaacccaaggagcgcggagactttaatcacgagcgtggagaaagaaaagtgtgtcggtttaagctggagtggctgggcaattgctcaggcttgaacgacgaaacttacgggtacaaagagggcaagccctgtatcatcatcaagttgaaccgggtgctcggctttaagcccaagcctcctaagaatgaaagcctggaaacctatcctgtcatgaaatataatcccaacgtcttgcccgtccaatgtaccgggaaacgcgacgaagacaaggacaaggtaggtaacgtggaatacttcgggctgggtaattccccaggctttcccctgcagtactatccttattacggtaaactgctgcagcctaagtatttgcaaccgttgctcgccgtccagtttacaaacctcactatggacaccgaaattcggattgaatgcaaagcctatggcgagaatattggttattccgaaaaagatcgcttccagggccgattcgacgttaaaatagaagtgaaaagctag

SEQ ID NO: 119874 - DNA, 912 bp, Artificial Sequence
  derived and/or modified sequence
atggcccggggcaaggccaaggaggagggcagctggaagaagttcatctggaatagcgagaaaaaggagttcctcgggcgcacagggggcagttggtttaagatactcctgttctacgtgattttctacggttgccttgcaggcatctttatcgggacaatccaagtcatgttattaaccatcagcgaattcaaacctacgtaccaagacagagtcgcaccccccggcctgacccagattccgcaaatccagaaaactgaaattagtttccggcctaacgacccaaaaagctatgaagcatacgtgctcaacatcgtgcgctttcttgaaaagtataaagactcagcgcagagggatgatatgatatttgaggattgtggggatgtccctagtgagcctaaagagcgcggcgattttaatcacgaacgcggagaaagaaaggtatgtcgttttaaactggagtggctgggcaactgttcaggactgaacgacgagacatacggctacaaggagggaaaaccctgcattatcatcaaactaaaccgtgtccttggttttaaacccaagccaccgaagaacgaaagccttgaaacttacccagtcatgaaatataaccccaacgtgcttccagtccaatgtaccggcaagcgagatgaggacaaagataaagtagggaacgttgagtattttgggcttggcaacagcccaggctttccactgcagtactacccttactacggtaagctgctgcagccaaaatacttgcaaccattgctggcagtccagttcactaatcttactatggacaccgagatccggatcgagtgcaaagcttatggcgagaatatcgggtacagcgaaaaagaccgctttcaaggcagattcgacgtgaagattgaagttaagagctag

SEQ ID NO: 119875 - DNA, 912 bp, Artificial Sequence
  derived and/or modified sequence
atggcccggggcaaggccaaggaggagggcagctggaagaagttcatttggaactcagagaagaaggaattcctgggcagaaccgggggatcttggttcaagattcttctcttctatgtgattttctacggctgcctcgccggtatctttattggtactatccaagtcatgctcctcaccatttcggagttcaaacctacataccaggaccgggttgctccccccggactcacccagatacctcaaattcagaaaactgagatctccttccggcctaatgatcctaagagctatgaagcatatgtccttaatattgtgaggttcctggagaaatataaggacagcgcgcagcgagacgatatgatcttcgaggattgcggcgacgtacccagcgaacccaaggaacgaggcgactttaatcacgagagaggggagcggaaagtctgccggttcaaactcgaatggctcggaaattgttcaggcctcaacgacgagacatacggctataaggagggcaaaccatgtatcattataaagctgaacagggtgctcggatttaagcctaaacctccaaaaaacgaaagtttggagacataccctgtgatgaagtacaacccgaatgtccttccagtccaatgcacaggcaagcgggatgaggacaaagataaggttggcaacgttgaatactttggccttggaaattccccaggatttcctctacagtattacccttactacggcaaactgctgcaaccgaaatatctgcagccgttgctggccgttcagtttaccaacctaaccatggatactgaaatccgtatcgagtgcaaggcttacggggagaacatcggctactctgagaaagataggtttcaaggccgcttcgatgtcaagattgaggtcaagtcttag

SEQ ID NO: 119876 - DNA, 744 bp, Artificial Sequence
  derived and/or modified sequence
atgctgctgaccatcagcgagttcaagcccacctaccaggaccgggtcgccccacctggactcacacaaatcccccagatccagaagaccgagattagcttccgccccaacgaccctaagagctacgaagcctatgtactaaacatcgtccgttttctcgagaaatataaggattctgcgcagcgagacgatatgatttttgaggactgtggagacgtgccttccgagcccaaggaacggggtgatttcaaccacgagcgcggagagcgtaaggtatgtaggttcaagctggagtggctcggaaactgttctgggctgaatgatgagacctacggctacaaggaggggaaaccatgcattattatcaaactcaaccgggtcctgggctttaaaccgaaacctcccaagaacgaaagcctggagacctacccagtaatgaaatataatccgaacgtgctgccggttcaatgcacaggtaagagagacgaagataaggacaaggtcgggaatgtggaatatttcgggttaggaaacagccccgggtttccactgcagtactatccttactacggtaaacttctacagccgaaatacctgcaacccttgctggccgtccagttcactaacctgacgatggacaccgagattcgtattgagtgcaaagcatatggcgagaacatcggctattccgaaaaggatagattccaggggaggttcgacgtaaagatagaggtcaagagctag

SEQ ID NO: 119877 - DNA, 888 bp, Artificial Sequence
  derived and/or modified sequence
atggggaagaggaagtgttcaccagcatcacagtccctttttctcttccagtttcagaagatggagctgaaatttaagattctccttttctacgtcattttctatggctgcctggcaggtatttttattgggacgattcaagtcatgttactcactatttctgaattcaagcccacatatcaggaccgggttgcccctcctgggttgacccagatccctcaaatccagaaaaccgagatcagctttaggccaaatgacccaaagagctatgaggcttatgtgcttaatatcgtgcgtttcctggagaagtataaagactctgcacagcgggatgatatgatcttcgaagactgtggggatgtgccgtccgaacccaaggaacggggagattttaatcatgagagaggggaacgaaaggtgtgccggtttaagctcgagtggttgggcaactgctcaggcctcaatgatgagacatatggttataaggagggtaagccttgtattatcataaagctgaatagagtgctgggcttcaagcctaaaccacccaaaaacgagtccctggagacatatccggtgatgaagtataatcctaacgtacttcctgtccagtgcaccgggaagagggatgaagacaaagacaaggtcggtaacgttgagtatttcggcctgggaaattcaccaggcttcccgctgcagtactacccttattacggaaaacttcttcagccaaaatatctgcagcctctgctggcggttcaattcactaacctgacaatggacaccgagattagaatcgagtgcaaagcctatggagagaacataggctacagtgaaaaggatcggtttcagggtagatttgatgtgaaaatcgaagtgaagagttag

SEQ ID NO: 119878 - DNA, 912 bp, Artificial Sequence
  derived and/or modified sequence
atggctagagggaaggccaaggaggaagggtcatggaagaagtttatatggaactcggaaaagaaagaattcctgggccgaactggcggaagctggttcaaaattttgctgttctacgtgattttttacggttgcttggccggaatatttatcgggacaatccaggtcatgcttctgaccatctctgagttcaagcctacataccaggatagggtggcccctccaggacttacccagataccgcaaattcagaagacagagattagttttaggccaaatgaccctaagtcctacgaagcctacgtgctgaacatcgtcaggtttctggaaaagtacaaggactccgcacaaagagacgacatgattttcgaggactgcggagatgtgccatccgaacctaaagagcgcggagacttcaaccacgaacggggagaacgcaaggtgtgcagattcaaactggagtggctaggaaattgcagcggactgaacgatgagacgtatggttataaggagggcaagccatgcattataattaaactgaaccgggttctgggcttcaagccaaaaccacctaagaatgaatccctggaaacatatcccgtgatgaagtacaaccctaatgtgctccctgtccagtgcacaggaaaacgagacgaggataaggataaggtggggaatgttgagtatttcggactcgggaatagtcccggattcccgctgcagtattatccttactatggaaagttactccagcctaaatacttacaacctctgctggctgtgcaatttacaaaccttactatggatacggaaatacgaattgaatgcaaggcatatggcgagaatattggatactccgagaaagacagatttcagggtagattcgatgtgaagatcgaagtcaagagctag

SEQ ID NO: 119879 - DNA, 912 bp, Artificial Sequence
  derived and/or modified sequence
atggcacggggaaaagcgaaggaagaaggctcgtggaagaagttcatctggaactcagagaagaaggagttcttaggcaggaccggagggtcctggtttaagatcctgctcttctatgtgatcttttatggctgcttagccggaatttttattggcaccattcaggttatgctcctgacaatctctgaatttaaacccacctatcaggatagggtggccccaccagggttgacacagatccctcagatccagaagactgagatttcattccgacccaacgatcccaagtcatatgaggcctatgtactgaatattgtaaggttcctagaaaagtacaaagatagtgcgcaacgcgatgacatgatttttgaggactgtggagacgtgccttctgagccaaaggagcgtggtgactttaaccacgaaaggggcgagaggaaggtttgcaggttcaaactagagtggctaggaaattgtagcggtctcaatgacgaaacatatggctataaagagggcaagccatgcatcattatcaagctcaatagagttctggggtttaaaccaaaacccccaaaaaatgaatcattggagacttaccctgtcatgaagtataatcctaatgtccttccagtccaatgtactggcaagagagacgaggataaagacaaggtcggaaatgtggaatactttggacttggaaacagtcctggatttcctcttcagtactacccctactacgggaagctcctgcagcctaaatacttgcagccactgttggcggtccagttcacgaatctgacaatggacacggagatccgcatagagtgcaaggcatatggagaaaatattggatattcagaaaaagacagatttcagggccgtttcgatgtaaaaattgaagtgaagagttag

SEQ ID NO: 119880 - DNA, 744 bp, Artificial Sequence
  derived and/or modified sequence
atgcttctgacaatctcagagttcaagcccacctaccaggaccgcgtcgctccacctggtctgacgcagatacctcagattcagaaaaccgaaatttcgtttcggcctaacgacccaaagtcatatgaagcttatgtcttgaacatcgtgaggtttttggaaaagtacaaagactccgctcagagagatgatatgattttcgaggattgcggagacgtgccaagcgaacccaaagaacgtggcgattttaaccatgagcgcggtgagagaaaggtgtgtcgatttaagctggagtggttaggcaactgttctggtctcaacgacgaaacatacgggtataaagaagggaagccctgtatcattatcaagcttaatagggtccttgggttcaaaccgaaaccaccaaaaaatgagtcgctggaaacttaccccgtcatgaagtacaaccctaacgttttacccgtgcaatgcacagggaaaagggacgaagataaggacaaggtgggcaacgttgagtactttggattaggaaatagccccggtttccctctccaatactacccttattatggaaagttactgcagccaaagtatctccagcccctgttggccgtgcagttcaccaatttgacaatggacacagagatcaggatcgagtgcaaagcctatggtgaaaacatcgggtattccgagaaggacagatttcaaggtcgctttgacgttaagatcgaagtgaagagttag

SEQ ID NO: 119881 - DNA, 1382 bp, Artificial Sequence
  derived and/or modified sequence
tatttcagcctccatcctgttgtcttgttaactatgggaaaaagaaaatgcagcccagcaagtcagtcattattcttgttccagttccagaagatggaattaaaatttaagatccttctattctacgtaatattttatggctgcctggctggcatcttcatcggaaccatccaagtgatgctgctcaccatcagtgaatttaagcccacatatcaggaccgagtggccccgccaggattaacacagattcctcagatccagaagactgaaatttcctttcgtcctaatgatcccaagagctatgaggcatatgtactgaacatagttaggttcctggaaaagtacaaagattcagcccagagggatgacatgatttttgaagattgtggcgatgtgcccagtgaaccgaaagaacgaggagactttaatcatgaacgaggagagcgaaaggtctgcagattcaagcttgaatggctgggaaattgctctggattaaatgatgaaacttatggctacaaagagggcaaaccgtgcattattataaagctcaaccgagttctaggcttcaaacctaagcctcccaagaatgagtccttggagacttacccagtgatgaagtataacccaaatgtccttcccgttcagtgcactggcaagcgagatgaagataaggataaagttggaaatgtggagtattttggactgggcaactcccctggttttcctctgcagtattatccgtactatggcaaactcctgcagcccaaatacctgcagcccctgctggccgtacagttcaccaatcttaccatggacactgaaattcgcatagagtgtaaggcgtacggtgagaacattgggtacagtgagaaagaccgttttcagggacgttttgatgtaaaaattgaagttaagagctgatcacaagcacaaatctttcccactagccatttaataagttaaaaaaagatacaaaaacaaaaacctactagtcttgaacaaactgtcatacgtatgggacctacacttaatctatatgctttacactagctttctgcatttaataggttagaatgtaaattaaagtgtagcaatagcaacaaaatatttattctactgtaaatgacaaaagaaaaagaaaaattgagccttgggacgtgcccatttttactgtaaattatgattccgtaactgacttgtagtaagcagtgtttctggcccctaagtattgctgccttgtgtattttatttagtgtacagtactacaggtgcatactctggtcatttttcaagccatgttttattgtatctgttttctactttatgtgagcaaggtttgctgtccaaggtgtaaatattcaacgggaataaaactggcatgg

SEQ ID NO: 119882 - DNA, 2589 bp, Artificial Sequence
  derived and/or modified sequence
gccaattcctcggctcctggcgggagtgccggtggcgccccgcagtccgcttgtccgtccttccctctctgactctcctaccccgggcctgtctctgcagaggtcaggggaggcgggggcccagcacacgtccccagtggcagcgggagcggcagctacgggttcgcggagcccccgaccccccaagggctagaggagcgctcggcggaccaaagaaagcccgcgagcggctgcgcgcccaccaataggtgcggggctcggagccgcgcagcctgcgccgtccctccctccgcccccgccccgccgccgccgccgccgccgcctccccctcctcctgctcctgccttggctcctccgccgcgcgtctcgcactccgagagccgcagcggcagcggcgcgtcctgcctgcagagagccaggccggagaagccgagcggcgcagaggacgccagggcgcgcgccgcagccacccaccctccggaccgcggcagctgctgacccgccatcgccatggcccgcgggaaagccaaggaggagggcagctggaagaaattcatctggaactcagagaagaaggagtttctgggcaggaccggtggcagttggtttaagatccttctattctacgtaatattttatggctgcctggctggcatcttcatcggaaccatccaagtgatgctgctcaccatcagtgaatttaagcccacatatcaggaccgagtggccccgccaggattaacacagattcctcagatccagaagactgaaatttcctttcgtcctaatgatcccaagagctatgaggcatatgtactgaacatagttaggttcctggaaaagtacaaagattcagcccagagggatgacatgatttttgaagattgtggcgatgtgcccagtgaaccgaaagaacgaggagactttaatcatgaacgaggagagcgaaaggtctgcagattcaagcttgaatggctgggaaattgctctggattaaatgatgaaacttatggctacaaagagggcaaaccgtgcattattataaagctcaaccgagttctaggcttcaaacctaagcctcccaagaatgagtccttggagacttacccagtgatgaagtataacccaaatgtccttcccgttcagtgcactggcaagcgagatgaagataaggataaagttggaaatgtggagtattttggactgggcaactcccctggttttcctctgcagtattatccgtactatggcaaactcctgcagcccaaatacctgcagcccctgctggccgtacagttcaccaatcttaccatggacactgaaattcgcatagagtgtaaggcgtacggtgagaacattgggtacagtgagaaagaccgttttcagggacgttttgatgtaaaaattgaagttaagagctgatcacaagcacaaatctttcccactagccatttaataagttaaaaaaagatacaaaaacaaaaacctactagtcttgaacaaactgtcatacgtatgggacctacacttaatctatatgctttacactagctttctgcatttaataggttagaatgtaaattaaagtgtagcaatagcaacaaaatatttattctactgtaaatgacaaaagaaaaagaaaaattgagccttgggacgtgcccatttttactgtaaattatgattccgtaactgacttgtagtaagcagtgtttctggcccctaagtattgctgccttgtgtattttatttagtgtacagtactacaggtgcatactctggtcatttttcaagccatgttttattgtatctgttttctactttatgtgagcaaggtttgctgtccaaggtgtaaatattcaacgggaataaaactggcatggtaattttttttttttttttttttttgttttttggctctttcaaaggtaatggcccatcgatgagcatttttaacatactccatagtcttttcctgtggtgttaggtctttatttttatttttttcctgggggctggggtgggggtttgtcatgggggaactgccctttaaattttaagtgacactacagaaaaacacaaaaaggtgatgggttgtgttatgcttgtattgaatgctgtcttgacatctcttgccttgtcctccggtatgttctaaagctgtgtctgagatctggatctgcccatcactttggctagtgacagggctaattaatttgctttatacattttcttttactttccttttttcctttctggaggcatcacatgctggtgctgtgtctttatgaatgttttaaccattttcatggtggaagaattttatatttatgcagttgtacaattttatttttttctgcaagaaaaagtgtaatgtatgaaataaaccaaagtcacttgtttgaaaataaatctttattttgaactttataaaaagcaatgcagtaccccatagactggtgttaaatgttgtctacagtgcaaaatccatgttctaacatatgtaataattgccaggagtacagtgctcttgttgatcttgtattcagtcaggttaaaacaacggacaataaaagaatgaacacattc

SEQ ID NO: 119883 - DNA, 2608 bp, Artificial Sequence
  derived and/or modified sequence
gcccacaaggggcacagccgggcagtcaggaaccggggctgccggctgggctggcctgcaaagaagagggaagggccggaactgcaaccgcagtggcggggagtgcgagggggcggcagaggtcaggggaggcgggggcccagcacacgtccccagtggcagcgggagcggcagctacgggttcgcggagcccccgaccccccaagggctagaggagcgctcggcggaccaaagaaagcccgcgagcggctgcgcgcccaccaataggtgcggggctcggagccgcgcagcctgcgccgtccctccctccgcccccgccccgccgccgccgccgccgccgcctccccctcctcctgctcctgccttggctcctccgccgcgcgtctcgcactccgagagccgcagcggcagcggcgcgtcctgcctgcagagagccaggccggagaagccgagcggcgcagaggacgccagggcgcgcgccgcagccacccaccctccggaccgcggcagctgctgacccgccatcgccatggcccgcgggaaagccaaggaggagggcagctggaagaaattcatctggaactcagagaagaaggagtttctgggcaggaccggtggcagttggtttaagatccttctattctacgtaatattttatggctgcctggctggcatcttcatcggaaccatccaagtgatgctgctcaccatcagtgaatttaagcccacatatcaggaccgagtggccccgccaggattaacacagattcctcagatccagaagactgaaatttcctttcgtcctaatgatcccaagagctatgaggcatatgtactgaacatagttaggttcctggaaaagtacaaagattcagcccagagggatgacatgatttttgaagattgtggcgatgtgcccagtgaaccgaaagaacgaggagactttaatcatgaacgaggagagcgaaaggtctgcagattcaagcttgaatggctgggaaattgctctggattaaatgatgaaacttatggctacaaagagggcaaaccgtgcattattataaagctcaaccgagttctaggcttcaaacctaagcctcccaagaatgagtccttggagacttacccagtgatgaagtataacccaaatgtccttcccgttcagtgcactggcaagcgagatgaagataaggataaagttggaaatgtggagtattttggactgggcaactcccctggttttcctctgcagtattatccgtactatggcaaactcctgcagcccaaatacctgcagcccctgctggccgtacagttcaccaatcttaccatggacactgaaattcgcatagagtgtaaggcgtacggtgagaacattgggtacagtgagaaagaccgttttcagggacgttttgatgtaaaaattgaagttaagagctgatcacaagcacaaatctttcccactagccatttaataagttaaaaaaagatacaaaaacaaaaacctactagtcttgaacaaactgtcatacgtatgggacctacacttaatctatatgctttacactagctttctgcatttaataggttagaatgtaaattaaagtgtagcaatagcaacaaaatatttattctactgtaaatgacaaaagaaaaagaaaaattgagccttgggacgtgcccatttttactgtaaattatgattccgtaactgacttgtagtaagcagtgtttctggcccctaagtattgctgccttgtgtattttatttagtgtacagtactacaggtgcatactctggtcatttttcaagccatgttttattgtatctgttttctactttatgtgagcaaggtttgctgtccaaggtgtaaatattcaacgggaataaaactggcatggtaattttttttttttttttttttttgttttttggctctttcaaaggtaatggcccatcgatgagcatttttaacatactccatagtcttttcctgtggtgttaggtctttatttttatttttttcctgggggctggggtgggggtttgtcatgggggaactgccctttaaattttaagtgacactacagaaaaacacaaaaaggtgatgggttgtgttatgcttgtattgaatgctgtcttgacatctcttgccttgtcctccggtatgttctaaagctgtgtctgagatctggatctgcccatcactttggctagtgacagggctaattaatttgctttatacattttcttttactttccttttttcctttctggaggcatcacatgctggtgctgtgtctttatgaatgttttaaccattttcatggtggaagaattttatatttatgcagttgtacaattttatttttttctgcaagaaaaagtgtaatgtatgaaataaaccaaagtcacttgtttgaaaataaatctttattttgaactttataaaaagcaatgcagtaccccatagactggtgttaaatgttgtctacagtgcaaaatccatgttctaacatatgtaataattgccaggagtacagtgctcttgttgatcttgtattcagtcaggttaaaacaacggacaataaaagaatgaacacattc

SEQ ID NO: 119884 - DNA, 1738 bp, Artificial Sequence
  derived and/or modified sequence
agtcattcagggagtcctgaacagaggccgattggtgttcctgcttgggaggatctgtgggaatcggcaggagaatgagtcagggaaatagtgcttagctgacattttgaaatggaagaagctggaatatatgaatttttgtaaagaaaaaaaaatgcagcctttaagatccttctattctacgtaatattttatggctgcctggctggcatcttcatcggaaccatccaagtgatgctgctcaccatcagtgaatttaagcccacatatcaggaccgagtggccccgccaggattaacacagattcctcagatccagaagactgaaatttcctttcgtcctaatgatcccaagagctatgaggcatatgtactgaacatagttaggttcctggaaaagtacaaagattcagcccagagggatgacatgatttttgaagattgtggcgatgtgcccagtgaaccgaaagaacgaggagactttaatcatgaacgaggagagcgaaaggtctgcagattcaagcttgaatggctgggaaattgctctggattaaatgatgaaacttatggctacaaagagggcaaaccgtgcattattataaagctcaaccgagttctaggcttcaaacctaagcctcccaagaatgagtccttggagacttacccagtgatgaagtataacccaaatgtccttcccgttcagtgcactggcaagcgagatgaagataaggataaagttggaaatgtggagtattttggactgggcaactcccctggttttcctctgcagtattatccgtactatggcaaactcctgcagcccaaatacctgcagcccctgctggccgtacagttcaccaatcttaccatggacactgaaattcgcatagagtgtaaggcgtacggtgagaacattgggtacagtgagaaagaccgttttcagggacgttttgatgtaaaaattgaagttaagagctgatcacaagcacaaatctttcccactagccatttaataagttaaaaaaagatacaaaaacaaaaacctactagtcttgaacaaactgtcatacgtatgggacctacacttaatctatatgctttacactagctttctgcatttaataggttagaatgtaaattaaagtgtagcaatagcaacaaaatatttattctactgtaaatgacaaaagaaaaagaaaaattgagccttgggacgtgcccatttttactgtaaattatgattccgtaactgacttgtagtaagcagtgtttctggcccctaagtattgctgccttgtgtattttatttagtgtacagtactacaggtgcatactctggtcatttttcaagccatgttttattgtatctgttttctactttatgtgagcaaggtttgctgtccaaggtgtaaatattcaacgggaataaaactggcatggtaattttttttttttttttttttttgttttttggctctttcaaaggtaatggcccatcgatgagcatttttaacatactccatagtcttttcctgtggtgttaggtctttatttttatttttttcctgggggctggggtgggggtttgtcatgggggaactgccctttaaattttaagtgacactacagaaaaacacaaaaaggtgatgggttgtgttatgcttgtattgaatgctgtcttgacatctcttgccttgtcctccggtatgttctaaagctgtgtctgagatctggatctg

SEQ ID NO: 119885 - DNA, 888 bp, Artificial Sequence
  derived and/or modified sequence
atgggcaagagaaagtgcagccccgccagccagagcctgttcctgttccagttccagaagatggagctgaagttcaagatcctgctgttctacgtgatcttctacggctgcctggccggcatcttcatcggcaccatccaggtgatgctgctgaccatcagcgagttcaagcccacctaccaggacagagtggccccccccggcctgacccagatcccccagatccagaagaccgagatcagcttcagacccaacgaccccaagagctacgaggcctacgtgctgaacatcgtgagattcctggagaagtacaaggacagcgcccagagagacgacatgatcttcgaggactgcggcgacgtgcccagcgagcccaaggagagaggcgacttcaaccacgagagaggcgagagaaaggtgtgcagattcaagctggagtggctgggcaactgcagcggcctgaacgacgagacctacggctacaaggagggcaagccctgcatcatcatcaagctgaacagagtgctgggcttcaagcccaagccccccaagaacgagagcctggagacctaccccgtgatgaagtacaaccccaacgtgctgcccgtgcagtgcaccggcaagagagacgaggacaaggacaaggtgggcaacgtggagtacttcggcctgggcaacagccccggcttccccctgcagtactacccctactacggcaagctgctgcagcccaagtacctgcagcccctgctggccgtgcagttcaccaacctgaccatggacaccgagatcagaatcgagtgcaaggcctacggcgagaacatcggctacagcgagaaggacagattccagggcagattcgacgtgaagatcgaggtgaagagctag

SEQ ID NO: 119886 - DNA, 912 bp, Artificial Sequence
  derived and/or modified sequence
atggccagaggcaaggccaaggaggagggcagctggaagaagttcatctggaacagcgagaagaaggagttcctgggcagaaccggcggcagctggttcaagatcctgctgttctacgtgatcttctacggctgcctggccggcatcttcatcggcaccatccaggtgatgctgctgaccatcagcgagttcaagcccacctaccaggacagagtggccccccccggcctgacccagatcccccagatccagaagaccgagatcagcttcagacccaacgaccccaagagctacgaggcctacgtgctgaacatcgtgagattcctggagaagtacaaggacagcgcccagagagacgacatgatcttcgaggactgcggcgacgtgcccagcgagcccaaggagagaggcgacttcaaccacgagagaggcgagagaaaggtgtgcagattcaagctggagtggctgggcaactgcagcggcctgaacgacgagacctacggctacaaggagggcaagccctgcatcatcatcaagctgaacagagtgctgggcttcaagcccaagccccccaagaacgagagcctggagacctaccccgtgatgaagtacaaccccaacgtgctgcccgtgcagtgcaccggcaagagagacgaggacaaggacaaggtgggcaacgtggagtacttcggcctgggcaacagccccggcttccccctgcagtactacccctactacggcaagctgctgcagcccaagtacctgcagcccctgctggccgtgcagttcaccaacctgaccatggacaccgagatcagaatcgagtgcaaggcctacggcgagaacatcggctacagcgagaaggacagattccagggcagattcgacgtgaagatcgaggtgaagagctag

SEQ ID NO: 119887 - DNA, 744 bp, Artificial Sequence
  derived and/or modified sequence
atgctgctgaccatcagcgagttcaagcccacctaccaggacagagtggccccccccggcctgacccagatcccccagatccagaagaccgagatcagcttcagacccaacgaccccaagagctacgaggcctacgtgctgaacatcgtgagattcctggagaagtacaaggacagcgcccagagagacgacatgatcttcgaggactgcggcgacgtgcccagcgagcccaaggagagaggcgacttcaaccacgagagaggcgagagaaaggtgtgcagattcaagctggagtggctgggcaactgcagcggcctgaacgacgagacctacggctacaaggagggcaagccctgcatcatcatcaagctgaacagagtgctgggcttcaagcccaagccccccaagaacgagagcctggagacctaccccgtgatgaagtacaaccccaacgtgctgcccgtgcagtgcaccggcaagagagacgaggacaaggacaaggtgggcaacgtggagtacttcggcctgggcaacagccccggcttccccctgcagtactacccctactacggcaagctgctgcagcccaagtacctgcagcccctgctggccgtgcagttcaccaacctgaccatggacaccgagatcagaatcgagtgcaaggcctacggcgagaacatcggctacagcgagaaggacagattccagggcagattcgacgtgaagatcgaggtgaagagctag

SEQ ID NO: 119888 - protein, 290 aa, Artificial Sequence
  derived and/or modified sequence
MVIQKEKKSCGQVVEEWKEFVWNPRTHQFMGRTGTSWAFILLFYLVFYGFLTAMFTLTMWVMLQTVSDHTPKYQDRLATPGLMIRPKTENLDVIVNVSDTESWDQHVQKLNKFLEPYNDSIQAQKNDVCRPGRYYEQPDNGVLNYPKRACQFNRTQLGNCSGIGDSTHYGYSTGQPCVFIKMNRVINFYAGANQSMNVTCAGKRDEDAENLGNFVMFPANGNIDLMYFPYYGKKFHVNYTQPLVAVKFLNVTPNVEVNVECRINAANIATDDERDKFAGRVAFKLRINKT

SEQ ID NO: 119889 - DNA, 873 bp, Artificial Sequence
  derived and/or modified sequence
atggttattcagaaagaaaagaagagctgcggtcaagtcgttgaggagtggaaggagttcgtgtggaacccccgaactcatcaattcatgggaagaacgggcacgagttgggccttcattctactattctacctcgtgttttatgggttcctcaccgccatgttcacactgacaatgtgggtgatgctgcaaaccgtgtctgatcacaccccaaagtaccaggatcgcctggcaaccccaggcttgatgataaggcctaagaccgaaaatctcgatgtcatcgtcaatgtctccgacacagaaagctgggatcagcatgtgcagaagttgaacaaatttctggagccatacaacgattctatccaggcacagaagaacgatgtctgtcgcccgggccgctactatgaacagccagataatggggtattaaattaccccaaacgggcttgccagttcaacagaacacagcttggcaattgctcgggcattggagacagcacacactacggatattctacaggccagccctgcgtcttcatcaagatgaaccgtgtgattaatttctatgcgggcgcaaaccagtccatgaacgtgacttgcgcggggaagagagatgaggatgccgaaaacctggggaacttcgtcatgttccccgccaatgggaatatagacctcatgtattttccctattacgggaaaaaatttcacgtgaattatactcagccacttgtggcggtgaaatttttgaatgtaacccccaatgtggaagttaatgttgagtgccgaattaatgcagccaacattgccacagacgatgagagagacaagttcgccggccgcgtcgcgttcaagctgagaatcaataagacatag

SEQ ID NO: 119890 - DNA, 873 bp, Artificial Sequence
  derived and/or modified sequence
atggtgatccagaaggagaagaagagctgtggccaggtggtggaggagtggaaggagtttgtgtggaaccccaggacccaccagttcatgggccgcacaggcacctcctgggccttcatcctgctcttctacctggtgttctacggcttcctgacagccatgttcaccctgaccatgtgggtgatgctgcagacagtgtctgaccacacccccaagtaccaggaccggctggccaccccaggcctgatgatccggcccaagacagagaacctggatgtgattgtgaatgtgtctgacacagagagctgggaccagcacgtgcagaagctgaacaagttcctggagccctacaatgacagcatccaggcccagaagaatgatgtgtgcaggcctggccgctactatgagcagcctgacaacggggtgctgaactaccccaagagggcctgccagttcaacagaacccagctgggcaactgcagcggcattggagacagcacccactacggctacagcacaggccagccctgtgtgttcatcaagatgaacagagtcatcaacttctacgccggggccaaccagagcatgaatgtgacctgtgccggcaagagagatgaagatgctgagaacctgggcaactttgtgatgtttcctgccaacggcaacatcgacctgatgtacttcccctactacggcaagaagttccacgtgaactacacccagcccctggtggccgtgaagttcctgaatgtgacccccaacgtggaggtgaatgtggagtgccgcatcaatgctgccaacatcgccacagatgatgagcgggacaagtttgctggccgggtggccttcaagctgcgcatcaacaagacctag

SEQ ID NO: 119891 - DNA, 873 bp, Artificial Sequence
  derived and/or modified sequence
atggtgatccagaaggagaagaagagctgcggccaggtggtggaggaatggaaggaatttgtgtggaatccccgcacacatcaattcatgggtcggaccgggacaagctgggcgttcatcttgctcttttacttggtattttacggctttctgactgccatgttcacactgactatgtgggtgatgcttcagactgtgtcagatcacacccctaaataccaggatcgactggcaactcccggactcatgatccggccaaagaccgagaacctagatgtcattgtgaatgtgtccgacaccgaatcttgggaccaacacgtccagaagctgaataagttccttgagccgtataacgatagcatccaagctcagaagaacgatgtgtgtagacctggccggtattacgagcagcctgataatggcgtactgaattatcccaagcgagcttgccagttcaatcgaacacaattgggaaactgttccggaatcggtgatagcacccactatgggtactctaccgggcagccatgcgttttcattaagatgaacagagtcatcaatttctacgctggagcaaaccaaagcatgaatgttacatgcgccgggaagagagacgaagacgccgagaacctgggcaatttcgtcatgtttccagccaatggaaacatagacctcatgtattttccgtactacggtaaaaagtttcacgtaaattatacacagccccttgtggcagtgaagtttcttaatgtcacccctaacgttgaggtgaacgtggagtgtagaatcaacgcagcaaacattgccaccgatgatgagagggataagttcgccggcagggtcgctttcaaactgcggattaataaaacgtag

SEQ ID NO: 119892 - DNA, 873 bp, Artificial Sequence
  derived and/or modified sequence
atggtaatccagaaagagaaaaagagttgtggccaagtcgtggaagagtggaaagagttcgtttggaatccaagaacccaccaattcatgggtaggaccgggacttcttgggcattcatcctgctcttttatctagtcttttatggattcctgactgcaatgtttaccctaactatgtgggtgatgctccagacagtgtctgatcacacgcccaaataccaggacaggctcgcaacccctggtctgatgattcggccaaagacagaaaacctcgacgtaatcgtcaatgtatcggatacagagagctgggaccaacacgtgcagaaactgaataagtttctagaaccttacaatgacagtatacaagcccaaaaaaacgacgtctgcagaccaggcagatattatgaacaacctgacaacggcgtcctgaattaccccaagcgagcatgccagtttaaccgaacacagctgggtaattgttccggcattggcgactcaacacactacggctatagcaccggccaaccgtgtgtttttatcaaaatgaacagggttatcaacttctacgcaggcgctaatcagtctatgaacgtgacctgcgccggtaagcgggacgaggacgccgagaatctggggaattttgtgatgtttcccgcaaacgggaacatcgatctcatgtactttccatactatggcaagaagtttcatgtgaactatacgcagcccctggtcgcagtgaagtttctgaatgtgacaccgaatgttgaggtgaatgtcgagtgtaggataaatgctgccaatattgctaccgatgacgaaagggataagttcgccggaagagtcgccttcaagctgcgcattaacaaaacatag

SEQ ID NO: 119893 - DNA, 3330 bp, Artificial Sequence
  derived and/or modified sequence
ggagcggagcctccgcctggggggccccccatccctggctgtcccccagctgcgcgtccccgccccacccccgcggctgagccaccaccggtgcagtggtctccgcttggcggagcgagccttgagcttcgttccacagcttctttgcatcttggatttcggggcggccccctcccccacctctctctgcctttttgtaccccgctttttttctgcgttctgctcggtttttgtagccgtctgtttttgcaccccatttcgttttgtttctagacggtttggtggggggtgaagctgcattcataccccttcctcttgttattctcccctgctctgacagcaccccttttcatcgcagttggggggcctaggatcggtgcatcttccgccgcgctgccagcaccccgcagcgcgtggtcgtgcaccccggaatctgcagcagctgcatatctgaggggggtctcctttgcccgcgccgccttcgctccccgtgcttttgggtgtgtggagggcttcagcgcgcggcgcccccgcttctccgcaaccccccgccccgcgcccggactcgccccgcgccaccaagatggtcatccagaaagagaagaagagctgcgggcaggtggttgaggagtggaaggagttcgtgtggaacccgaggacgcaccagtttatgggccgcaccgggaccagctgggcctttatcctcctcttctacctcgttttttatgggttcctcaccgccatgttcaccctcaccatgtgggtgatgctgcagactgtctccgaccatacccccaagtaccaggaccgactggccacaccgggcttgatgattcgccccaagactgagaaccttgatgtcattgtcaatgtcagtgacactgaaagctgggaccagcatgttcagaagctcaacaagttcttggagccttacaacgactctatccaagcccaaaagaatgatgtctgccgccctggacgctattacgaacagccagataatggagtcctcaactaccccaaacgtgcctgccaattcaaccggacccagctgggcaactgctccggcattggggactccacccactatggttacagcactgggcagccctgtgtcttcatcaagatgaaccgggtcatcaacttctatgcaggagcaaaccagagcatgaatgttacctgtgctgggaagcgagatgaagatgctgagaatctcggcaacttcgtcatgttccccgccaacggcaacatcgacctcatgtacttcccctactatggcaaaaagttccacgtgaactacacacagcccctggtggctgtgaagttcctgaatgtgacccccaacgtggaggtgaatgtagaatgtcgcatcaacgccgccaacatcgccacagacgatgagcgagacaagttcgccggccgcgtggccttcaaactccgcatcaacaaaacctgaggccccttcctcccaccccatctctctcctgtggatgctcctggaatgtccctgaccctgcctgatccctccctcacccaccccaaaggtatttttgataacagagctatgacttgtctgagcctcacatccttttccttgacttctcaacccagcctgaagtccattgcggttccgtcactcgcctttcccaccaacttctcccaacctcagatcagtcagacagggagctgggctaagatggccacggaggagttaggagcctttctagttctggtttagctgtgagagctatccactctcctgcctgcatatcccctgagagttataggaagtgcccactgacccacccacccacctacaccccccgccacacacacacacaaacgtgcacacgcgtctcatttgacccctttgcttccagagatgaatgtggcactccctccttccattcctaagctctggccaccgtcccttgatctctcatactttctccctgtctacacagtcgccatcttggtgactttgaatttatctggctcctgggcaggtcttctcctcctctccatccctattccctcctctgaaatgcacccctttgtaattgaggacaaggtggttctgtggccttttccctctttgctggcacgttctgcttctcaccctctggtgactctgtgagctgggaaatgagggactggaagtgaggcctgtgttgacccttcctgaaaatcctctagcagcccccgacttcagcagtttctttctttgtttttttgagatggagtttcgctcttgttgcccaggctggagtgcaatggtgcaatctcagctcactgcaacttccgcatcccaggttcaagcgattctcccgcctcaggttcccgagtagctgggactacaggcatgtgccaccatgcccggctaatttctttctttctttttttttttttttgcattttttagtagagatgggggtttctccttgttggtcaggctggtctcgaactcccgacctcaggtgatccacctgcctcggcctcccaaagtgttgggattacaggcgtgagccaccgcgcccggccttcagtttcttcctaggccgttctgtcacccaaatagctgctacccagaggggcggggttgacctaggctgaatatccactttgtttttatggatggctcccttcccccattcgccttcccagaatatccttcaagttccacttcccagggagctctgggggaggggcggccattctggctccgtccccagtggccaccttggaaacatcggctggctttgggactattccacctccttcccctgagcccagatctgcccccaccatcctttctctggcttcttttagcaagttatcaactaatcactaactccttccttttcctctgcatgccagcctgaaaattccaaatctagcctctgaatgtcttggctccatctcttcagacccctttgcctttaaaaaaaaaacaaaaacaaaaacaaaaaaacccataatgcccacagaatgtcaaatgaggggcctcctgcctcctgctctgaatattctgtagctgtagaggcattttaaccctttgtcctccagcatcccttcacttcctcatcctctctaacctcctttttctttttttaatgctgcagcctccacactccacccacaggtggacccttccctttttctctagctggatctgtgtttcttcccttcgggcccccatgttttcctgcacccgccctaccatggtctctctctgcagttatttaatgcctgtgtcagatctactgtaaaaagaggattaagtaaaataaaatgagagcaattatatatataaatatatatcatacacag

SEQ ID NO: 119894 - DNA, 873 bp, Artificial Sequence
  derived and/or modified sequence
atggtgatccagaaggagaagaagagctgcggccaggtggtggaggagtggaaggagttcgtgtggaaccccagaacccaccagttcatgggcagaaccggcaccagctgggccttcatcctgctgttctacctggtgttctacggcttcctgaccgccatgttcaccctgaccatgtgggtgatgctgcagaccgtgagcgaccacacccccaagtaccaggacagactggccacccccggcctgatgatcagacccaagaccgagaacctggacgtgatcgtgaacgtgagcgacaccgagagctgggaccagcacgtgcagaagctgaacaagttcctggagccctacaacgacagcatccaggcccagaagaacgacgtgtgcagacccggcagatactacgagcagcccgacaacggcgtgctgaactaccccaagagagcctgccagttcaacagaacccagctgggcaactgcagcggcatcggcgacagcacccactacggctacagcaccggccagccctgcgtgttcatcaagatgaacagagtgatcaacttctacgccggcgccaaccagagcatgaacgtgacctgcgccggcaagagagacgaggacgccgagaacctgggcaacttcgtgatgttccccgccaacggcaacatcgacctgatgtacttcccctactacggcaagaagttccacgtgaactacacccagcccctggtggccgtgaagttcctgaacgtgacccccaacgtggaggtgaacgtggagtgcagaatcaacgccgccaacatcgccaccgacgacgagagagacaagttcgccggcagagtggccttcaagctgagaatcaacaagacctag

SEQ ID NO: 119895 - protein, 66 aa, Artificial Sequence
  derived and/or modified sequence
MTGLSMDGGGSPKGDVDPFYYDYETVRNGGLIFAGLAFIVGLLILLSRRFRCGGNKKRRQINEDEP

SEQ ID NO: 119896 - DNA, 571 bp, Artificial Sequence
  derived and/or modified sequence
agacactctccaaaaagcagagacagcaggaagaggggagtggaggcagcccattcacctggggaaatgactgggttgtcgatggacggtggcggcagccccaagggggacgtggacccgttctactatgactatgagaccgttcgcaatgggggcctgatcttcgctggactggccttcatcgtggggctcctcatcctcctcagcagaagattccgctgtgggggcaataagaagcgcaggcaaatcaatgaagatgagccgtaacagcagcctcggcggtgccacccactgcactggggccagctgggaagccaagcatggccctgcctctggcgcctccccttcttccctgggctttagacctttgtccccgtcactgccagcgcttgggctgaaggaagctccagactcaatgtgacccccaggtggcatcgccaactcctgcctcgtgccacctcatgcttataataaagccggcgtcagagaccgctgcttccctcacctgcctgcctgtctccctcctctgtcaccaccagcctctccaagctcaagtacaaatacagccggg

SEQ ID NO: 119897 - DNA, 201 bp, Artificial Sequence
  derived and/or modified sequence
atgacggggctgtctatggatggcggcgggtccccaaagggcgacgttgacccgttctattatgattatgagaccgttaggaacgggggactaatatttgccggcctggccttcatcgtgggcctgcttattctgctcagcaggaggtttcgttgtggcggtaacaaaaagaggaggcagattaatgaggacgagccttag

SEQ ID NO: 119898 - DNA, 201 bp, Artificial Sequence
  derived and/or modified sequence
atgacaggcctgtccatggatggcggcggcagccccaagggagatgtggaccccttctactatgactatgaaacagtgagaaatggaggcctcatctttgctggcctggccttcatcgtgggcctgctgatcctgctgagccgccgcttccgctgtggcggcaacaagaagaggcggcagatcaatgaagatgagccctag

SEQ ID NO: 119899 - DNA, 201 bp, Artificial Sequence
  derived and/or modified sequence
atgaccggcctgagcatggacggcggcggcagccccaagggcgacgtggacccattttactacgactatgagacggtgcgcaatgggggactcatcttcgctggcctggcctttattgtggggctgctgatactgctgagcaggaggtttcgctgtgggggaaataaaaagagaagacagattaacgaggacgagccttag

SEQ ID NO: 119900 - DNA, 201 bp, Artificial Sequence
  derived and/or modified sequence
atgaccgggctgtcgatggatggcggagggtcacctaagggggatgtggaccctttctattacgattatgaaacagtgcgtaacggtggactgatctttgctgggctcgcatttatcgtggggctcctgatcttgctcagtcgcagattcaggtgtggaggtaacaagaagcgtagacagattaacgaggatgagccgtag

SEQ ID NO: 119901 - DNA, 201 bp, Artificial Sequence
  derived and/or modified sequence
atgaccggcctgagcatggacggcggcggcagccccaagggcgacgtggaccccttctactacgactacgagaccgtgagaaacggcggcctgatcttcgccggcctggccttcatcgtgggcctgctgatcctgctgagcagaagattcagatgcggcggcaacaagaagagaagacagatcaacgaggacgagccctag

SEQ ID NO: 119902 - protein, 997 aa, Artificial Sequence
  derived and/or modified sequence
MENAHTKTVEEVLGHFGVNESTGLSLEQVKKLKERWGSNELPAEEGKTLLELVIEQFEDLLVRILLLAACISFVLAWFEEGEETITAFVEPFVILLILVANAIVGVWQERNAENAIEALKEYEPEMGKVYRQDRKSVQRIKAKDIVPGDIVEIAVGDKVPADIRLTSIKSTTLRVDQSILTGESVSVIKHTDPVPDPRAVNQDKKNMLFSGTNIAAGKAMGVVVATGVNTEIGKIRDEMVATEQERTPLQQKLDEFGEQLSKVISLICIAVWIINIGHFNDPVHGGSWIRGAIYYFKIAVALAVAAIPEGLPAVITTCLALGTRRMAKKNAIVRSLPSVETLGCTSVICSDKTGTLTTNQMSVCRMFILDRVEGDTCSLNEFTITGSTYAPIGEVHKDDKPVNCHQYDGLVELATICALCNDSALDYNEAKGVYEKVGEATETALTCLVEKMNVFDTELKGLSKIERANACNSVIKQLMKKEFTLEFSRDRKSMSVYCTPNKPSRTSMSKMFVKGAPEGVIDRCTHIRVGSTKVPMTSGVKQKIMSVIREWGSGSDTLRCLALATHDNPLRREEMHLEDSANFIKYETNLTFVGCVGMLDPPRIEVASSVKLCRQAGIRVIMITGDNKGTAVAICRRIGIFGQDEDVTSKAFTGREFDELNPSAQRDACLNARCFARVEPSHKSKIVEFLQSFDEITAMTGDGVNDAPALKKAEIGIAMGSGTAVAKTASEMVLADDNFSTIVAAVEEGRAIYNNMKQFIRYLISSNVGEVVCIFLTAALGFPEALIPVQLLWVNLVTDGLPATALGFNPPDLDIMNKPPRNPKEPLISGWLFFRYLAIGCYVGAATVGAAAWWFIAADGGPRVSFYQLSHFLQCKEDNPDFEGVDCAIFESPYPMTMALSVLVTIEMCNALNSLSENQSLLRMPPWENIWLVGSICLSMSLHFLILYVEPLPLIFQITPLNVTQWLMVLKISLPVILMDETLKFVARNYLEPAILE

SEQ ID NO: 119903 - DNA, 4359 bp, Artificial Sequence
  derived and/or modified sequence
ggcagcggccgataaatgctattagagcagccgccgcggagccgtccccgacgccacctccttttccttcgccgcagtttcctccgccgctgtcgggcgtgcggcgctgagggacccgggcgagcgcgccgcgcaccgccccgccggctcgcctccctcgccgcgttccgccctcagtggtctgccgggcgccccctcctccggcccgggcggggcctctgatcgcctcaagagagcggggagggggctcgggggccgcggcctgccctcccggcgggcggctgagggcgagggaggccctcccttctggcgaggggagggagggtgggtcaggagcccccaacccgccctgcggagctcggggccgcgcgaggggcggttgtctgggggagggggcgcggggtgattcagcgcccggcgaggcggaagcggccgcaagaggaggaggggagagcccgtccgcgcctgggctcccggggtggcacgagcccgcggccggagtgcgaggcggaggcgaggaggccgcggggacgggaggcgaggccggccgggcccccgaagccatggagaacgcgcacaccaagacggtggaggaggtgctgggccacttcggcgtcaacgagagtacggggctgagcctggaacaggtcaagaagcttaaggagagatggggctccaacgagttaccggctgaagaaggaaaaaccttgctggaacttgtgattgagcagtttgaagacttgctagttaggattttattactggcagcatgtatatcttttgttttggcttggtttgaagaaggtgaagaaacaattacagcctttgtagaaccttttgtaattttactcatattagtagccaatgcaattgtgggtgtatggcaggaaagaaatgctgaaaatgccatcgaagcccttaaggaatatgagcctgaaatgggcaaagtgtatcgacaggacagaaagagtgtgcagcggattaaagctaaagacatagttcctggtgatattgtagaaattgctgttggtgacaaagttcctgctgatataaggttaacttccatcaaatctaccacactaagagttgaccagtcaattctcacaggtgaatctgtctctgtcatcaagcacactgatcccgtccctgacccacgagctgtcaaccaagataaaaagaacatgctgttttctggtacaaacattgctgctgggaaagctatgggagtggtggtagcaactggagttaacaccgaaattggcaagatccgggatgaaatggtggcaacagaacaggagagaacaccccttcagcaaaaactagatgaatttggggaacagctttccaaagtcatctcccttatttgcattgcagtctggatcataaatattgggcacttcaatgacccggttcatggagggtcctggatcagaggtgctatttactactttaaaattgcagtggccctggctgtagcagccattcctgaaggtctgcctgcagtcatcaccacctgcctggctcttggaactcgcagaatggcaaagaaaaatgccattgttcgaagcctcccgtctgtggaaacccttggttgtacttctgttatctgctcagacaagactggtacacttacaacaaaccagatgtcagtctgcaggatgttcattctggacagagtggaaggtgatacttgttcccttaatgagtttaccataactggatcaacttatgcacctattggagaagtgcataaagatgataaaccagtgaattgtcaccagtatgatggtctggtagaattagcaacaatttgtgctctttgtaatgactctgctttggattacaatgaggcaaagggtgtgtatgaaaaagttggagaagctacagagactgctctcacttgcctagtagagaagatgaatgtatttgataccgaattgaagggtctttctaaaatagaacgtgcaaatgcctgcaactcagtcattaaacagctgatgaaaaaggaattcactctagagttttcacgtgacagaaagtcaatgtcggtttactgtacaccaaataaaccaagcaggacatcaatgagcaagatgtttgtgaagggtgctcctgaaggtgtcattgacaggtgcacccacattcgagttggaagtactaaggttcctatgacctctggagtcaaacagaagatcatgtctgtcattcgagagtggggtagtggcagcgacacactgcgatgcctggccctggccactcatgacaacccactgagaagagaagaaatgcaccttgaggactctgccaactttattaaatatgagaccaatctgaccttcgttggctgcgtgggcatgctggatcctccgagaatcgaggtggcctcctccgtgaagctgtgccggcaagcaggcatccgggtcatcatgatcactggggacaacaagggcactgctgtggccatctgtcgccgcatcggcatcttcgggcaggatgaggacgtgacgtcaaaagctttcacaggccgggagtttgatgaactcaacccctccgcccagcgagacgcctgcctgaacgcccgctgttttgctcgagttgaaccctcccacaagtctaaaatcgtagaatttcttcagtcttttgatgagattacagctatgactggcgatggcgtgaacgatgctcctgctctgaagaaagccgagattggcattgctatgggctctggcactgcggtggctaaaaccgcctctgagatggtcctggcggatgacaacttctccaccattgtggctgccgttgaggaggggcgggcaatctacaacaacatgaaacagttcatccgctacctcatctcgtccaacgtcggggaagttgtctgtattttcctgacagcagcccttggatttcccgaggctttgattcctgttcagctgctctgggtcaatctggtgacagatggcctgcctgccactgcactggggttcaaccctcctgatctggacatcatgaataaacctccccggaacccaaaggaaccattgatcagcgggtggctctttttccgttacttggctattggctgttacgtcggcgctgctaccgtgggtgctgctgcatggtggttcattgctgctgacggtggtccaagagtgtccttctaccagctgagtcatttcctacagtgtaaagaggacaacccggactttgaaggcgtggattgtgcaatctttgaatccccatacccgatgacaatggcgctctctgttctagtaactatagaaatgtgtaacgccctcaacagcttgtccgaaaaccagtccttgctgaggatgcccccctgggagaacatctggctcgtgggctccatctgcctgtccatgtcactccacttcctgatcctctatgtcgaacccttgccactcatcttccagatcacaccgctgaacgtgacccagtggctgatggtgctgaaaatctccttgcccgtgattctcatggatgagacgctcaagtttgtggcccgcaactacctggaacctgcaatactggagtaaccgcttcctaaaccattttgcagaaatgtaagggtgttcggttgcgtgcatgtgcgtttttagcaacacatctaccaaccctgtgcatgactgatgttggggaaaaagaaaagtaaaaaacttcccaactcactttgtgttatgtggaggaaatgtgtattaccaatggggttgttagcttttaaatcaaaatactgattacagatgtacaatttagcttaatcagaaagcctctccagagaagtttggtttctttgctgcaagaggaatgaggctctgtaaccttatctaagaacttggaagccgtcagccaagtcgccacatttctctgcaaaatgtcatagcttatataaatgtacagtattcaattgtaatgcatgccttcggttgtaagtagccagatccctctccagtgacattggaacatgctactttttaattggccctgtacagtttgcttatttataaattcattaaaaacactacaggtgttgaatggttaaaatgtaggcctccagttcattttcagttattttctgagtgtgcagacagctatttcgcactgtattaaatgtaacttatttaatgaaatcagaagcagtagacagatgttggtgcaatacaaatattgtgatgcatttatcttaataaaatgctaaatgtcaatttatcactgcgcatgtttgactttagactgtaaatagagatcagtttgtttctttctgtgctggtaacaatgagcgtcgcacagacatggtttcaggtaaataaatctattctatgataaaaaaaaaaaaaaaaa

SEQ ID NO: 119904 - DNA, 2994 bp, Artificial Sequence
  derived and/or modified sequence
atggaaaatgcacacaccaagaccgtcgaagaggtgcttggacattttggggtcaatgaatccactgggttgtccctggagcaggttaaaaaattaaaagagcgatggggtagtaatgaactgcctgcagaggaagggaagacacttctggaactcgtaatcgagcaatttgaagatctgctggtgcgcattctgttgctcgccgcctgtatctcctttgtgctggcgtggtttgaggagggcgaggagacaatcaccgcctttgttgagccttttgtaattctgctgattctggttgcaaacgccatcgtgggcgtgtggcaggagcgcaatgccgagaatgccattgaagccctgaaggagtacgaacctgaaatgggcaaggtgtacaggcaggaccgcaaaagtgtccagagaattaaagcgaaggatatagtgccgggtgacattgtagagatcgccgtgggagacaaggtgccagctgacatccgcctgacaagcatcaaatctaccacccttagagtcgatcagtccatactgaccggcgaatccgtcagtgtcattaaacatactgaccctgtccctgatccgcgggccgtgaaccaggataaaaagaatatgttgttttctgggacaaacattgcagcaggcaaggctatgggggtggttgttgcaaccggggtgaacaccgagattggtaagattcgggatgagatggtcgccaccgagcaggagcggacaccgctgcagcagaagctcgacgagtttggtgagcagctctctaaagttattagcctaatttgtatcgctgtatggatcattaatataggtcactttaacgatcccgtccatggcggtagttggatacggggtgcaatatactacttcaagatcgcagtcgcccttgctgtggcagcaattccggaaggcttgcctgcagtgatcactacttgtctggcactgggaacccgaagaatggctaagaagaacgcgatagtgaggagtttacctagcgtcgagactttggggtgtactagcgtgatctgtagtgataagacaggcaccctgacgaccaaccaaatgtctgtatgcagaatgtttatcctggatagagtcgaaggcgacacatgtagcctcaatgaatttaccatcaccggcagtacctacgctccaattggagaggtgcataaagatgacaagcccgtcaattgccaccaatacgatgggctggtagaactggccacaatctgcgcattatgtaatgattcggccctagactacaacgaggccaaaggtgtgtacgaaaaagttggagaagctaccgagacagctctgacctgcctggttgaaaagatgaatgttttcgataccgaattgaagggtctgtccaaaatagagcgcgcgaacgcttgcaactccgtaattaagcagctcatgaagaaagaattcacattagagttttctcgggaccgcaaaagtatgtctgtttactgtacgcccaataaacccagccgcacatctatgtcaaagatgttcgttaagggtgccccagaaggcgttattgaccggtgcacacacatcagggtgggatccaccaaggtgccaatgaccagcggggttaaacagaagattatgtcggtaataagggagtgggggagcggaagcgacaccctgcggtgcctggccctagccacccatgacaatccactccgcagggaggagatgcacctggaggactcagctaacttcataaaatacgagactaacctgacgtttgtaggctgcgtgggaatgctcgaccctccacggatcgaggtagcctcatcggtgaagctttgtagacaagccggtatcagggttattatgatcactggagataacaaaggcactgccgtagccatatgtcggcgcattggcatctttgggcaggacgaagatgtgacatcaaaagctttcaccggcagagagtttgacgaattgaacccttcagctcaacgtgatgcgtgcctaaatgccagatgtttcgcacgggtggagccttcccacaaaagcaagattgtagaattcctacagtcctttgacgagattaccgcaatgacaggagacggggtgaatgacgcgcctgccctaaagaaggctgagatagggatcgccatgggctcgggcactgcggtggcaaaaaccgcatctgaaatggtgctggccgacgataacttctctaccatagtagctgcagtagaggagggaagggcaatatataacaatatgaaacaatttatccggtacctgatttccagtaatgtgggcgaggtggtatgcatattccttactgctgccctcggcttccctgaggctctcatccccgtgcagttgctttgggtcaacctagtaacagacgggctgccagctaccgccctggggttcaatccaccggacctggatatcatgaataagccccctcggaatcctaaggagcctttgataagtggatggctgttctttcgttatctggcaatcggttgttacgtgggagctgccaccgtgggcgcagctgcatggtggtttatcgccgctgacggagggcctagagtctctttctaccaactgagccactttttacagtgcaaggaagacaacccagattttgaaggggtcgattgcgctatctttgagtctccgtaccccatgacaatggccctttccgtgctagtgaccatcgagatgtgtaatgccctaaactccctgtccgaaaaccagagcctgctgaggatgcctccctgggagaacatttggttagtgggcagtatatgcctttccatgagtctgcattttctgatcctttatgtggaacccctgccgctgattttccagatcaccccattaaacgtcacacaatggctgatggtgcttaaaatcagtctgccggtgattctgatggacgaaacattgaagttcgtcgcacgcaactacctggaacccgccatactggaatag

SEQ ID NO: 119905 - DNA, 2994 bp, Artificial Sequence
  derived and/or modified sequence
atggagaatgcccacaccaagacagtggaggaggtgctgggccactttggagtgaatgaaagcacaggcctgagcctggagcaggtgaagaagctgaaggagcgctggggcagcaatgagctgcctgctgaggagggcaagaccctgctggagctggtgattgagcagtttgaggacctgctggtgcgcatcctgctgctggccgcctgcatcagctttgtgctggcctggtttgaggagggggaggagaccatcacagcctttgtggagcccttcgtcatcctgctgatcctggtggccaatgccatcgtgggcgtgtggcaggagagaaatgcagaaaatgccatcgaggccctgaaggagtatgagcctgagatgggcaaggtgtaccggcaggacaggaagtctgtgcagaggatcaaggccaaggacatcgtgcctggggacatcgtggagattgctgtgggggacaaggtgcctgctgacatccggctgaccagcatcaagagcaccaccctgcgggtggaccagagcatcctgactggagagagcgtgtctgtcatcaagcacacagatcctgtgcctgaccccagggctgtgaaccaggacaagaagaacatgctgttcagcggcaccaacattgctgctgggaaggccatgggcgtggtggtggccaccggggtgaacacagagatcggcaagatcagagatgagatggtggccacagagcaggagaggacccccctgcagcagaagctggatgaatttggagagcagctgagcaaggtgatcagcctcatctgcatcgctgtgtggatcatcaacatcggccacttcaatgaccctgtgcacggcggctcctggatccggggggccatctactacttcaagattgctgtggccctggccgtggccgccatccctgagggcctgcctgctgtgatcaccacctgcctggccctgggcaccaggaggatggccaagaagaatgccatcgtgcgcagcctgcccagcgtggagaccctgggctgcaccagcgtcatctgcagcgacaagacaggcaccctgaccaccaaccagatgtctgtgtgcaggatgttcatcctggacagagtggagggggacacctgcagcctgaatgagttcaccatcaccggcagcacctacgcccccatcggggaggtgcacaaggatgacaagcctgtgaactgccaccagtatgatggcctggtggagctggccaccatctgtgccctgtgcaatgattctgccctggactacaatgaggccaagggcgtgtatgagaaggtgggggaggccacagaaacagccctgacctgcctggtggagaagatgaatgtgtttgacacagagctgaagggcctgagcaagattgagcgggccaatgcctgcaacagcgtcatcaagcagctgatgaagaaggagttcaccctggagttcagccgggacaggaagtccatgtctgtgtactgcacccccaacaagcccagcaggacctccatgagcaagatgtttgtgaagggggcccctgagggcgtgattgaccgctgcacccacatccgggtgggcagcaccaaggtgcccatgaccagcggcgtgaagcagaagatcatgtctgtcatccgggagtggggcagcggcagtgacaccctgcgctgcctggccctggccacccatgacaaccccctgcggcgggaggagatgcacctggaggacagcgccaacttcatcaagtatgagaccaacctgacctttgtgggctgtgtgggcatgctggaccccccacgcatcgaggtggccagctctgtgaagctgtgccggcaggccggcatccgggtcatcatgatcaccggggacaacaagggcacagctgtggccatctgccgccgcatcggcatcttcggccaggatgaagatgtgaccagcaaggccttcaccggccgggagtttgatgagctgaaccccagcgcccagagagatgcctgcctgaatgcccgctgctttgcccgggtggagcccagccacaagagcaagatcgtggagttcctgcagagctttgatgagatcacagccatgactggagatggagtgaatgatgccccagccctgaagaaggccgagattggaattgccatgggcagcggcacagctgtggccaagacagccagcgagatggtgctggctgatgacaacttcagcaccatcgtggccgctgtggaggagggccgggccatctacaacaacatgaagcagttcatccgctacctgatcagcagcaatgtgggggaggtggtgtgcatcttcctgacagctgccctgggcttccctgaggccctgatccctgtgcagctgctgtgggtgaacctggtgacagatggcctgcctgccacagccctgggcttcaaccccccagacctggacatcatgaacaagcccccaagaaaccccaaggagcccctcatcagcggctggctgttcttccgctacctggccatcggctgctacgtgggcgccgccaccgtgggcgctgctgcctggtggttcatcgccgcagatggcggcccccgggtgtccttctaccagctgagccacttcctgcagtgcaaggaggacaacccagactttgagggcgtggactgtgccatctttgagagcccctaccccatgaccatggccctgtctgtgctggtgaccatcgagatgtgcaatgccctgaacagcctgtctgagaaccagagcctgctgaggatgccaccctgggagaacatctggctggtgggcagcatctgcctgtccatgagcctgcacttcctgatcctgtatgtggagcccctgcccctcatcttccagatcacccccctgaatgtgacccagtggctgatggtgctgaagatcagcctgcctgtgatcctgatggatgagaccctgaagtttgtggccaggaactacctggagcccgccatcctggagtag

SEQ ID NO: 119906 - DNA, 2994 bp, Artificial Sequence
  derived and/or modified sequence
atggagaacgcccacaccaagaccgtggaggaggtgctgggccacttcggcgtaaacgagtcaaccggcctgagccttgaacaggtgaaaaaacttaaagaacgatggggatccaatgaattgcctgccgaggagggaaaaacacttctagagcttgttatcgagcagtttgaagacctgttggtccggattctcctgctggcggcctgcattagtttcgtgcttgcttggttcgaggaaggcgaagagaccattactgcctttgtggagccgtttgtcatccttctgattctagttgctaacgccatcgtgggggtctggcaagaaaggaatgctgagaatgccattgaagctctgaaggagtacgagcccgaaatgggtaaagtgtacaggcaggaccgaaagtctgtgcagcgcatcaaggctaaagacattgtgccaggtgacatagtcgagatcgcagtcggtgacaaggtaccagcggacatccgccttacgagtatcaaaagtacgaccttgagagtcgatcagtctatcctcacaggagagtcagtaagtgtcatcaagcatacagacccagtgcctgacccaagggcagtcaaccaggataaaaagaacatgctgttttcaggcaccaacattgcagcggggaaggccatgggggtagtcgtggccacaggagtgaacaccgagatcggcaaaatccgcgacgaaatggttgccacagaacaagaacgtacccctctgcagcagaaactggacgagtttggagagcagctttcaaaagtgattagccttatatgcattgctgtgtggattatcaatatcggacattttaatgacccagtgcatggagggtcttggatccgcggggcaatttactactttaagattgcagttgcgttagcagtcgcggcaatacctgaagggctcccggccgttatcacaacttgtctagccttgggcacccgcaggatggctaaaaagaacgccatcgttagatctctgccctcagtggaaaccctcggatgcacctcagtcatatgtagtgataaaactggtactctcactacgaaccagatgtcagtgtgccggatgtttattctggacagggtggaaggcgacacatgttctcttaacgagttcactatcactggctccacttacgccccaatcggggaggtgcataaagatgataaaccagttaattgccaccagtacgatggacttgtggaactagccaccatatgcgcgctttgcaatgatagtgctctcgattacaatgaagctaagggggtgtacgaaaaggtgggggaggctactgaaacagccctgacatgtctggtcgaaaagatgaacgtcttcgacacagaactaaagggcctgtcgaaaatcgagagagctaatgcatgtaattctgtaataaagcagttgatgaaaaaggaattcacactggagttttccagagacaggaagtcaatgtctgtgtactgcacccctaacaagccatccaggacctccatgagcaaaatgttcgttaaaggggcccctgagggcgtgatcgaccgctgcacccatatccgtgtgggctcgactaaggtccctatgacctcaggcgtgaaacagaagattatgagtgtgatcagagaatgggggtccggttctgacactctccgttgtctggccttggcaactcacgataatccccttcggagagaggaaatgcatctggaggatagcgccaattttatcaagtatgaaacgaatctgaccttcgtgggttgcgtgggtatgttggaccctccacggatcgaggtggcctcgagtgtgaagctttgtcgacaggccggaattcgtgtcatcatgataacgggagacaacaaagggacagccgtggctatctgccgtcgcatcggcatcttcgggcaggatgaagatgtgacctccaaggccttcaccggccgagaatttgatgaactcaacccctcagcccaaagggacgcctgcttaaacgccagatgttttgctagagtggagccttctcacaaaagcaagatagtcgaattcctccagtctttcgatgaaatcaccgcaatgacaggggatggtgtcaatgatgcacccgcgctgaaaaaagccgaaatcggaattgccatgggatccggcactgcagtggctaaaacggcgagtgaaatggtgctggctgacgacaacttcagcacgatcgttgctgccgtcgaggagggcagggcaatatataacaatatgaaacagttcatacggtacctgatctcaagcaacgtgggtgaggtggtgtgcatcttcctaaccgctgccctaggcttcccggaagccctgatccctgtgcaactgttatgggtcaaccttgtgactgacgggctccctgccaccgcactcggatttaatcctccagatttggatattatgaacaagcctcctcgaaatcccaaagaacctctgatcagtggctggctgttttttaggtatctcgcaattggatgctacgtgggcgccgccacagtgggcgccgctgcttggtggttcatcgctgctgacggcggccccagggtcagcttctatcagctgtctcattttctgcagtgcaaggaagacaaccccgactttgaaggtgtcgattgtgcaatttttgagtccccctaccctatgacaatggccctatccgtgcttgtgacaatagagatgtgcaatgcactgaattcactctcagagaaccagagtcttctccgaatgcctccctgggaaaatatttggctggtggggtcaatatgcctgtccatgtctcttcacttcctcatcctatacgtcgagccgttgccgcttatctttcagatcacaccactcaacgtaacccagtggttgatggtactgaagatctcgttgccagtaatcctcatggacgagaccttaaaatttgtggctaggaactacctcgagcccgccatcctcgagtag

SEQ ID NO: 119907 - DNA, 2994 bp, Artificial Sequence
  derived and/or modified sequence
atggaaaacgctcacactaagaccgtggaagaagtcttgggtcattttggggttaacgaatccactgggttatctttagaacaggttaagaagttgaaggagcgatggggcagcaacgaattgccagctgaggaggggaagactctgctggaactcgtgatcgaacaatttgaggaccttcttgtacggattttgttactggcagcctgcatatcttttgtactggcttggtttgaggagggcgaagagactattactgcttttgtcgagccatttgttattctattgattctcgtggccaacgcaatcgtcggagtgtggcaagaacgcaacgccgagaatgctattgaggcactcaaggagtatgagccagagatgggcaaagtgtatcggcaagatcgaaaatcagtgcagagaatcaaagccaaggacattgtgcctggcgacattgttgagatagcagtgggggataaggtgccagctgacatccggctgaccagcattaagtcaactactcttagagtggatcagtctatcctgaccggcgagagcgtgtctgtcattaaacatacggacccagtccctgatcctcgcgctgtcaaccaagacaagaaaaacatgcttttttctggcactaatatcgccgcaggaaaagcgatgggtgtggtcgttgcgactggggttaatactgaaataggtaaaatccgcgacgaaatggtcgccaccgaacaggagagaacccccctccaacagaaacttgatgaattcggagagcagttaagtaaagttatatctctaatttgtatagcagtgtggattatcaacattggccacttcaatgaccccgtgcacggtggctcctggatccgcggagccatatattactttaaaatcgctgttgccctggccgtagctgccattccagagggactccccgcagtgatcacaacttgtcttgctctgggcaccagacgcatggccaagaaaaatgcgattgtgcgatctcttccttccgtggagacacttggatgtacaagcgtgatctgctctgataagactggtacactcaccaccaatcaaatgagcgtttgcaggatgttcattctggatagggtggaaggcgacacctgctctttaaatgaatttactatcacgggcagcacttacgcccctatcggtgaggtgcacaaggatgacaagccagtgaattgccaccagtacgatggtttggttgaattggcaactatctgcgcattgtgtaacgacagcgcactcgattacaacgaggctaagggcgtgtacgaaaaagtcggggaagctaccgagacagcactaacctgtttggtcgagaaaatgaacgtgttcgacaccgaattgaagggactgtctaagatagaacgcgctaacgcatgtaattctgtgatcaaacagcttatgaagaaggagtttacacttgagtttagccgcgatcgcaagagcatgtctgtgtactgcaccccaaacaaaccgtccaggaccagcatgtcaaaaatgttcgtcaaaggggcacctgaaggcgtgattgaccggtgtactcatattcgggtcggtagcaccaaggtgcctatgacatccggggttaaacagaagatcatgagtgtaattcgggagtggggttcagggtccgacacactgcggtgcctggccctggcgactcacgacaaccctctgcggcgagaggagatgcatctcgaagattcagctaactttatcaagtacgaaacaaacttgaccttcgtcggttgcgtgggcatgctggaccctccgcgaatcgaagtggcttcatccgtcaagctgtgtagacaagctggaatccgcgtgataatgatcaccggtgataataaaggtacagcagttgccatttgtaggcggatcgggatcttcggtcaggacgaggatgttacttccaaagcttttacaggccgtgagttcgatgagctgaatccttccgcacagagagatgcgtgcctcaacgccagatgtttcgcaagagttgaaccatctcataaatccaagattgtggaattccttcaatcttttgacgaaattactgcgatgactggtgacggagttaacgacgcaccagctctgaagaaggctgagataggcatcgcaatggggagtggtactgctgtcgcgaagacagcatctgaaatggtccttgccgacgacaacttttccaccatcgtcgccgcagttgaagagggacgcgcaatttacaacaacatgaagcagtttattaggtacctgatatccagcaatgtgggcgaggtcgtctgtatctttctcactgccgctctgggctttcctgaagctctgatccctgtccaactcctctgggttaacctggtaaccgacggcttacctgcgacagcactggggttcaacccacccgatttggacatcatgaacaaaccacctcggaacccaaaagaaccactgatttctggctggctctttttccgctaccttgccatcggttgttacgttggcgctgctacagtgggcgcagcagcttggtggttcatcgcggctgatggcggaccgcgtgttagcttctaccagttgtcgcattttctgcaatgcaaagaggataatcccgattttgagggggtagattgcgcaatcttcgaatccccttatccaatgacaatggccctgtctgtgttggtcacaatcgagatgtgtaacgccctgaattccctatccgagaatcagtcgcttctcagaatgcccccttgggagaatatttggttggtcgggtctatttgtctctccatgtctctccactttcttatcctctacgttgaacctctcccgctgatcttccagatcaccccgcttaatgtgactcagtggctgatggttttgaaaatcagtctacccgtcatattaatggatgagacactgaaattcgtggcacgaaactatctggaaccagcaatcctcgagtag

SEQ ID NO: 119908 - DNA, 4453 bp, Artificial Sequence
  derived and/or modified sequence
gcgcgggaggagggagccgggaggagggggcggggccgcgccgcccgcgccgcgctgggcgctctcggccaatgagcggcgtccacatgccgcggcggcggcgaaaggggaggcagcggccgataaatgctattagagcagccgccgcggagccgtccccgacgccacctccttttccttcgccgcagtttcctccgccgctgtcgggcgtgcggcgctgagggacccgggcgagcgcgccgcgcaccgccccgccggctcgcctccctcgccgcgttccgccctcagtggtctgccgggcgccccctcctccggcccgggcggggcctctgatcgcctcaagagagcggggagggggctcgggggccgcggcctgccctcccggcgggcggctgagggcgagggaggccctcccttctggcgaggggagggagggtgggtcaggagcccccaacccgccctgcggagctcggggccgcgcgaggggcggttgtctgggggagggggcgcggggtgattcagcgcccggcgaggcggaagcggccgcaagaggaggaggggagagcccgtccgcgcctgggctcccggggtggcacgagcccgcggccggagtgcgaggcggaggcgaggaggccgcggggacgggaggcgaggccggccgggcccccgaagccatggagaacgcgcacaccaagacggtggaggaggtgctgggccacttcggcgtcaacgagagtacggggctgagcctggaacaggtcaagaagcttaaggagagatggggctccaacgagttaccggctgaagaaggaaaaaccttgctggaacttgtgattgagcagtttgaagacttgctagttaggattttattactggcagcatgtatatcttttgttttggcttggtttgaagaaggtgaagaaacaattacagcctttgtagaaccttttgtaattttactcatattagtagccaatgcaattgtgggtgtatggcaggaaagaaatgctgaaaatgccatcgaagcccttaaggaatatgagcctgaaatgggcaaagtgtatcgacaggacagaaagagtgtgcagcggattaaagctaaagacatagttcctggtgatattgtagaaattgctgttggtgacaaagttcctgctgatataaggttaacttccatcaaatctaccacactaagagttgaccagtcaattctcacaggtgaatctgtctctgtcatcaagcacactgatcccgtccctgacccacgagctgtcaaccaagataaaaagaacatgctgttttctggtacaaacattgctgctgggaaagctatgggagtggtggtagcaactggagttaacaccgaaattggcaagatccgggatgaaatggtggcaacagaacaggagagaacaccccttcagcaaaaactagatgaatttggggaacagctttccaaagtcatctcccttatttgcattgcagtctggatcataaatattgggcacttcaatgacccggttcatggagggtcctggatcagaggtgctatttactactttaaaattgcagtggccctggctgtagcagccattcctgaaggtctgcctgcagtcatcaccacctgcctggctcttggaactcgcagaatggcaaagaaaaatgccattgttcgaagcctcccgtctgtggaaacccttggttgtacttctgttatctgctcagacaagactggtacacttacaacaaaccagatgtcagtctgcaggatgttcattctggacagagtggaaggtgatacttgttcccttaatgagtttaccataactggatcaacttatgcacctattggagaagtgcataaagatgataaaccagtgaattgtcaccagtatgatggtctggtagaattagcaacaatttgtgctctttgtaatgactctgctttggattacaatgaggcaaagggtgtgtatgaaaaagttggagaagctacagagactgctctcacttgcctagtagagaagatgaatgtatttgataccgaattgaagggtctttctaaaatagaacgtgcaaatgcctgcaactcagtcattaaacagctgatgaaaaaggaattcactctagagttttcacgtgacagaaagtcaatgtcggtttactgtacaccaaataaaccaagcaggacatcaatgagcaagatgtttgtgaagggtgctcctgaaggtgtcattgacaggtgcacccacattcgagttggaagtactaaggttcctatgacctctggagtcaaacagaagatcatgtctgtcattcgagagtggggtagtggcagcgacacactgcgatgcctggccctggccactcatgacaacccactgagaagagaagaaatgcaccttgaggactctgccaactttattaaatatgagaccaatctgaccttcgttggctgcgtgggcatgctggatcctccgagaatcgaggtggcctcctccgtgaagctgtgccggcaagcaggcatccgggtcatcatgatcactggggacaacaagggcactgctgtggccatctgtcgccgcatcggcatcttcgggcaggatgaggacgtgacgtcaaaagctttcacaggccgggagtttgatgaactcaacccctccgcccagcgagacgcctgcctgaacgcccgctgttttgctcgagttgaaccctcccacaagtctaaaatcgtagaatttcttcagtcttttgatgagattacagctatgactggcgatggcgtgaacgatgctcctgctctgaagaaagccgagattggcattgctatgggctctggcactgcggtggctaaaaccgcctctgagatggtcctggcggatgacaacttctccaccattgtggctgccgttgaggaggggcgggcaatctacaacaacatgaaacagttcatccgctacctcatctcgtccaacgtcggggaagttgtctgtattttcctgacagcagcccttggatttcccgaggctttgattcctgttcagctgctctgggtcaatctggtgacagatggcctgcctgccactgcactggggttcaaccctcctgatctggacatcatgaataaacctccccggaacccaaaggaaccattgatcagcgggtggctctttttccgttacttggctattggctgttacgtcggcgctgctaccgtgggtgctgctgcatggtggttcattgctgctgacggtggtccaagagtgtccttctaccagctgagtcatttcctacagtgtaaagaggacaacccggactttgaaggcgtggattgtgcaatctttgaatccccatacccgatgacaatggcgctctctgttctagtaactatagaaatgtgtaacgccctcaacagcttgtccgaaaaccagtccttgctgaggatgcccccctgggagaacatctggctcgtgggctccatctgcctgtccatgtcactccacttcctgatcctctatgtcgaacccttgccactcatcttccagatcacaccgctgaacgtgacccagtggctgatggtgctgaaaatctccttgcccgtgattctcatggatgagacgctcaagtttgtggcccgcaactacctggaacctgcaatactggagtaaccgcttcctaaaccattttgcagaaatgtaagggtgttcggttgcgtgcatgtgcgtttttagcaacacatctaccaaccctgtgcatgactgatgttggggaaaaagaaaagtaaaaaacttcccaactcactttgtgttatgtggaggaaatgtgtattaccaatggggttgttagcttttaaatcaaaatactgattacagatgtacaatttagcttaatcagaaagcctctccagagaagtttggtttctttgctgcaagaggaatgaggctctgtaaccttatctaagaacttggaagccgtcagccaagtcgccacatttctctgcaaaatgtcatagcttatataaatgtacagtattcaattgtaatgcatgccttcggttgtaagtagccagatccctctccagtgacattggaacatgctactttttaattggccctgtacagtttgcttatttataaattcattaaaaacactacaggtgttgaatggttaaaatgtaggcctccagttcattttcagttattttctgagtgtgcagacagctatttcgcactgtattaaatgtaacttatttaatgaaatcagaagcagtagacagatgttggtgcaatacaaatattgtgatgcatttatcttaataaaatgctaaatgtcaatttatcactgcgcatgtttgactttagactgtaaatagagatcagtttgtttctttctgtgctggtaacaatgagcgtcgcacagacatggtttcaggtaaataaatctattctatgat

SEQ ID NO: 119909 - DNA, 2994 bp, Artificial Sequence
  derived and/or modified sequence
atggagaacgcccacaccaagaccgtggaggaggtgctgggccacttcggcgtgaacgagagcaccggcctgagcctggagcaggtgaagaagctgaaggagagatggggcagcaacgagctgcccgccgaggagggcaagaccctgctggagctggtgatcgagcagttcgaggacctgctggtgagaatcctgctgctggccgcctgcatcagcttcgtgctggcctggttcgaggagggcgaggagaccatcaccgccttcgtggagcccttcgtgatcctgctgatcctggtggccaacgccatcgtgggcgtgtggcaggagagaaacgccgagaacgccatcgaggccctgaaggagtacgagcccgagatgggcaaggtgtacagacaggacagaaagagcgtgcagagaatcaaggccaaggacatcgtgcccggcgacatcgtggagatcgccgtgggcgacaaggtgcccgccgacatcagactgaccagcatcaagagcaccaccctgagagtggaccagagcatcctgaccggcgagagcgtgagcgtgatcaagcacaccgaccccgtgcccgaccccagagccgtgaaccaggacaagaagaacatgctgttcagcggcaccaacatcgccgccggcaaggccatgggcgtggtggtggccaccggcgtgaacaccgagatcggcaagatcagagacgagatggtggccaccgagcaggagagaacccccctgcagcagaagctggacgagttcggcgagcagctgagcaaggtgatcagcctgatctgcatcgccgtgtggatcatcaacatcggccacttcaacgaccccgtgcacggcggcagctggatcagaggcgccatctactacttcaagatcgccgtggccctggccgtggccgccatccccgagggcctgcccgccgtgatcaccacctgcctggccctgggcaccagaagaatggccaagaagaacgccatcgtgagaagcctgcccagcgtggagaccctgggctgcaccagcgtgatctgcagcgacaagaccggcaccctgaccaccaaccagatgagcgtgtgcagaatgttcatcctggacagagtggagggcgacacctgcagcctgaacgagttcaccatcaccggcagcacctacgcccccatcggcgaggtgcacaaggacgacaagcccgtgaactgccaccagtacgacggcctggtggagctggccaccatctgcgccctgtgcaacgacagcgccctggactacaacgaggccaagggcgtgtacgagaaggtgggcgaggccaccgagaccgccctgacctgcctggtggagaagatgaacgtgttcgacaccgagctgaagggcctgagcaagatcgagagagccaacgcctgcaacagcgtgatcaagcagctgatgaagaaggagttcaccctggagttcagcagagacagaaagagcatgagcgtgtactgcacccccaacaagcccagcagaaccagcatgagcaagatgttcgtgaagggcgcccccgagggcgtgatcgacagatgcacccacatcagagtgggcagcaccaaggtgcccatgaccagcggcgtgaagcagaagatcatgagcgtgatcagagagtggggcagcggcagcgacaccctgagatgcctggccctggccacccacgacaaccccctgagaagagaggagatgcacctggaggacagcgccaacttcatcaagtacgagaccaacctgaccttcgtgggctgcgtgggcatgctggacccccccagaatcgaggtggccagcagcgtgaagctgtgcagacaggccggcatcagagtgatcatgatcaccggcgacaacaagggcaccgccgtggccatctgcagaagaatcggcatcttcggccaggacgaggacgtgaccagcaaggccttcaccggcagagagttcgacgagctgaaccccagcgcccagagagacgcctgcctgaacgccagatgcttcgccagagtggagcccagccacaagagcaagatcgtggagttcctgcagagcttcgacgagatcaccgccatgaccggcgacggcgtgaacgacgcccccgccctgaagaaggccgagatcggcatcgccatgggcagcggcaccgccgtggccaagaccgccagcgagatggtgctggccgacgacaacttcagcaccatcgtggccgccgtggaggagggcagagccatctacaacaacatgaagcagttcatcagatacctgatcagcagcaacgtgggcgaggtggtgtgcatcttcctgaccgccgccctgggcttccccgaggccctgatccccgtgcagctgctgtgggtgaacctggtgaccgacggcctgcccgccaccgccctgggcttcaacccccccgacctggacatcatgaacaagccccccagaaaccccaaggagcccctgatcagcggctggctgttcttcagatacctggccatcggctgctacgtgggcgccgccaccgtgggcgccgccgcctggtggttcatcgccgccgacggcggccccagagtgagcttctaccagctgagccacttcctgcagtgcaaggaggacaaccccgacttcgagggcgtggactgcgccatcttcgagagcccctaccccatgaccatggccctgagcgtgctggtgaccatcgagatgtgcaacgccctgaacagcctgagcgagaaccagagcctgctgagaatgcccccctgggagaacatctggctggtgggcagcatctgcctgagcatgagcctgcacttcctgatcctgtacgtggagcccctgcccctgatcttccagatcacccccctgaacgtgacccagtggctgatggtgctgaagatcagcctgcccgtgatcctgatggacgagaccctgaagttcgtggccagaaactacctggagcccgccatcctggagtag

SEQ ID NO: 119910 - protein, 1198 aa, Artificial Sequence
  derived and/or modified sequence
MGDMTNSDFYSKNQRNESSHGGEFGCTMEELRSLMELRGTEAVVKIKETYGDTEAICRRLKTSPVEGLPGTAPDLEKRKQIFGQNFIPPKKPKTFLQLVWEALQDVTLIILEIAAIISLGLSFYHPPGEGNEGCATAQGGAEDEGEAEAGWIEGAAILLSVICVVLVTAFNDWSKEKQFRGLQSRIEQEQKFTVVRAGQVVQIPVAEIVVGDIAQVKYGDLLPADGLFIQGNDLKIDESSLTGESDQVRKSVDKDPMLLSGTHVMEGSGRMLVTAVGVNSQTGIIFTLLGAGGEEEEKKDKKAKQQDGAAAMEMQPLKSAEGGDADDRKKASMHKKEKSVLQGKLTKLAVQIGKAGLVMSAITVIILVLYFTVDTFVVNKKPWLPECTPVYVQYFVKFFIIGVTVLVVAVPEGLPLAVTISLAYSVKKMMKDNNLVRHLDACETMGNATAICSDKTGTLTTNRMTVVQAYVGDVHYKEIPDPSSINTKTMELLINAIAINSAYTTKILPPEKEGALPRQVGNKTECGLLGFVLDLKQDYEPVRSQMPEEKLYKVYTFNSVRKSMSTVIKLPDESFRMYSKGASEIVLKKCCKILNGAGEPRVFRPRDRDEMVKKVIEPMACDGLRTICVAYRDFPSSPEPDWDNENDILNELTCICVVGIEDPVRPEVPEAIRKCQRAGITVRMVTGDNINTARAIAIKCGIIHPGEDFLCLEGKEFNRRIRNEKGEIEQERIDKIWPKLRVLARSSPTDKHTLVKGIIDSTHTEQRQVVAVTGDGTNDGPALKKADVGFAMGIAGTDVAKEASDIILTDDNFSSIVKAVMWGRNVYDSISKFLQFQLTVNVVAVIVAFTGACITQDSPLKAVQMLWVNLIMDTFASLALATEPPTETLLLRKPYGRNKPLISRTMMKNILGHAVYQLALIFTLLFVGEKMFQIDSGRNAPLHSPPSEHYTIIFNTFVMMQLFNEINARKIHGERNVFDGIFRNPIFCTIVLGTFAIQIVIVQFGGKPFSCSPLQLDQWMWCIFIGLGELVWGQVIATIPTSRLKFLKEAGRLTQKEEIPEEELNEDVEEIDHAERELRRGQILWFRGLNRIQTQIRVVKAFRSSLYEGLEKPESRTSIHNFMAHPEFRIEDSQPHIPLIDDTDLEEDAALKQNSSPPSSLNKNNSAIDSGINLTTDTSKSATSSSPGSPIHSLETSL

SEQ ID NO: 119911 - DNA, 3597 bp, Artificial Sequence
  derived and/or modified sequence
atgggggatatgaccaacagtgacttttactctaagaaccagcggaacgaatccagccacggtggcgagttcgggtgcactatggaagaactcaggtctctgatggagctacggggaacagaggctgtcgttaaaatcaaggaaacttacggtgacaccgaggcaatctgccggcgactcaagacgtccccagtggagggacttccgggaacagcaccggatctggaaaaaaggaaacagattttcggccagaatttcatcccacccaaaaaacccaagacatttttgcagctcgtctgggaggccctgcaggacgtgacacttattatactcgagatcgctgccatcatcagcctcggtctctccttctatcacccaccaggcgagggaaatgagggctgcgcaactgcccagggtggtgccgaagatgaaggggaagccgaagcaggctggatagagggcgcggccatcttgctgagtgtaatctgcgtggtgttagtgacggcttttaacgactggagcaaggagaaacagtttcgtgggcttcaatctaggatcgagcaagaacagaaattcaccgtggtacgagcgggacaagtggttcagatccctgtagcagagattgtagtgggagatattgcacaggtcaagtatggcgacctccttcctgctgatggcctcttcatccaggggaacgacctgaaaatcgatgagagcagcctaaccggtgagtctgatcaggtgcgcaagtcagtagacaaagacccaatgctcctcagtggcacccatgtgatggagggatcagggcgtatgttagttacggctgtgggtgtgaattctcagaccggcattatcttcactctcctgggagccggtggggaggaggaggaaaagaaggacaaaaaagcaaagcagcaggacggagctgcagcaatggaaatgcagcccctcaagtccgcagaggggggggacgccgacgatcggaagaaagccagcatgcataagaaagaaaagtccgtcttgcagggcaagcttacaaaattggccgtgcagatcggcaaagcaggcctggtcatgagcgcgataacggtgattattctggtgctttacttcactgtggatacatttgtggtcaataaaaagccttggttgcccgagtgcacacctgtgtatgtacagtatttcgttaagttctttatcatcggtgtcactgtactggttgtggccgtcccagaaggtctacctctagcagtgaccatttcactcgcttactccgttaaaaaaatgatgaaagacaacaacttggtccggcacctggatgcatgtgaaactatggggaacgccaccgcaatctgcagcgataagacaggaactcttaccacgaaccgcatgacagttgtgcaggcctacgtaggggatgtccactataaagaaatcccggatccatcatccatcaacaccaaaactatggagctcctgattaacgccatcgcgataaatagcgcatacacaaccaagatcctacccccagagaaagaaggggccctgcctcggcaggtgggcaataagaccgagtgtggactgctgggattcgtcctggacctgaagcaggattacgaacccgtgaggtcacagatgccagaggaaaagttgtataaggtgtatacattcaatagtgtacgtaaaagcatgagcaccgtgataaaacttcccgacgagagcttccggatgtattccaaaggagcgtccgaaatagtgctcaaaaagtgctgcaagattctgaatggtgccggggagccacgcgtcttcagacctcgcgaccgcgacgagatggtgaaaaaggtaatcgagcctatggcctgcgatggcttgcggaccatatgtgtggcctaccgtgatttccccagtagcccagagcccgattgggataacgagaacgatatcttgaacgaactcacgtgcatctgcgtggtgggcatcgaggacccagtgcggcctgaggttcctgaagctatcagaaagtgtcagagggcaggtataacagtgcgcatggtcacaggagataacatcaacaccgctcgagcaattgccattaagtgtgggattattcacccaggtgaagatttcctgtgtctggaaggcaaagaattcaataggcgaattcggaatgaaaagggtgaaatagaacaggaacgaatagataaaatttggccaaagttgcgagtactggctaggagctctccaaccgataagcataccctggtaaagggcattatcgattctacacatacagaacagcgccaggttgtcgccgtgaccggtgatgggaccaacgatggacccgccctgaagaaagcggatgtggggttcgctatgggcatagcagggaccgacgtggcaaaggaagctagtgatattattctgactgacgacaatttctcttctatcgttaaagccgtcatgtggggaagaaacgtttacgacagcatcagcaagtttctgcaattccagctgactgtgaacgtggttgcagtcatcgttgcctttacgggagcgtgcatcacccaggattccccactcaaagcagttcagatgctgtgggtgaacttaattatggatacctttgctagcttggccctggcgaccgagcctccaactgagaccttactcttgagaaaaccttatggacggaataagcctctgattagccgaacaatgatgaaaaacattttaggccacgccgtgtaccagctggccttaatcttcactctcctgtttgttggagaaaagatgttccagattgacagcggccggaatgcgcctctgcattcccccccttcagaacactatactatcatattcaatacattcgtcatgatgcaattattcaacgagattaatgcccgaaaaatccacggcgagagaaacgtattcgatggaatcttcagaaacccaatcttttgcacgattgtgctgggtacatttgccattcagattgtaattgtccagttcgggggcaagcccttttcatgtagtcctctgcagttggatcagtggatgtggtgcatatttataggattgggtgaactggtttggggccaagtcatcgccaccatccctaccagccggctcaagttccttaaggaagccgggcgactaacacagaaggaagagattcctgaggaggaactgaacgaagatgtggaggagattgaccacgcagaacgggaactgagacgcggccaaatattgtggtttcggggccttaaccggatccagacccagatccgagtggtgaaggcattccgatccagcctctacgaaggcctggagaaacccgaaagcaggacatctatccacaacttcatggcccatccggagttcagaatagaggatagccagccacacatcccccttatcgacgacacagatctggaggaagacgccgctctgaagcagaatagcagcccaccaagctcgcttaacaagaacaactctgccattgactctgggatcaacctaaccaccgacaccagcaagtctgccacctccagtagcccaggctcacccatccactctcttgagacctctctttag

SEQ ID NO: 119912 - DNA, 3597 bp, Artificial Sequence
  derived and/or modified sequence
atgggagacatgaccaacagcgacttttattccaagaaccagaggaacgagagctctcacggcggcgaattcggatgcacgatggaagaactgcggtcactgatggagttgaggggaacagaagctgtcgttaaaattaaagagacatatggagacaccgaagcgatttgcaggcgtcttaaaaccagccccgtcgagggccttcccggaaccgcgccagatctggagaagcggaaacagattttcgggcaaaatttcattccacccaagaaacccaagacgttcctgcagctggtgtgggaggctctccaggatgttacactcattatactggagatcgccgccattattagtctcggcctgtctttctaccacccacccggtgagggtaatgagggctgcgctaccgcgcaaggcggcgccgaggacgaaggcgaagccgaggctggttggatagagggtgccgctatattgttgtccgtgatctgtgtggtgctcgtgactgcctttaacgactggtctaaggagaagcagtttaggggcctgcagtctagaatcgagcaagagcaaaagttcacagtggtgcgggctgggcaggtggtgcagattccggtcgcagaaatcgtcgtcggggacattgcccaggtgaaatacggagatctgttacccgctgatggcttatttatccagggaaacgatctgaagatcgacgagtcttccttgacaggggagagcgatcaggttcgtaagtcagtcgataaggaccctatgctactgagcgggacgcatgtgatggaaggcagtggccgcatgctcgtgactgcagtgggggtgaatagccagactggaataatctttacgctactcggcgctggcggcgaagaagaggaaaagaaagacaaaaaagcaaagcagcaggacggggccgccgccatggagatgcaaccactgaaatcagctgaaggcggcgatgcggacgacaggaaaaaggcaagcatgcataagaaggaaaagtcagtactgcagggaaaactgactaagctggccgttcagattggtaaggccggcctggtcatgagcgccattaccgttatcattctagtgctctacttcaccgtcgatactttcgtggtgaacaagaagccttggttgcccgagtgtaccccagtgtatgtgcagtatttcgtcaaatttttcatcattggtgtgaccgtcttagtggtggccgtgcccgagggcctgccactggctgtgaccatctctcttgcttacagcgtcaagaaaatgatgaaagacaacaatctcgtccgtcacctggatgcttgtgagactatgggaaacgccacagccatttgcagcgacaagaccggcaccctgacaacaaacagaatgaccgttgtgcaagcatatgttggagacgtccattataaagagatcccagatcctagttccataaataccaaaacaatggagctcctgataaatgctatcgctattaacagcgcatacacaacaaaaatattgccacctgagaaagagggcgcgctcccgcggcaggtgggcaacaagaccgagtgcggccttctgggctttgtgttagacctgaagcaagattacgaacctgtgcggtctcagatgcccgaagaaaagttgtacaaagtgtatacgtttaactcggtgaggaaatcaatgtccacagtaattaagttgccggatgaaagcttcaggatgtattccaagggagcatcggaaatagtcctcaaaaaatgttgcaaaatcctcaacggcgccggagaaccaagggtgttcagaccacgagaccgtgacgaaatggtgaagaaagtgatcgagcctatggcctgcgatgggctccggaccatctgtgtggcttaccgagatttcccctcctcccctgaacctgactgggataacgagaatgatatcctgaatgaactgacctgtatttgcgtggtggggatcgaggatcccgttcgacccgaggtccctgaagctattcgtaaatgccagcgagccgggatcaccgtgaggatggttacaggcgacaatattaatacggcgcgcgccatcgccattaaatgtggcataatacaccccggcgaggacttcctgtgcctggaaggaaaggaatttaatagaaggattcgaaatgaaaaaggcgagattgaacaggagcgcatcgataagatatggcctaagctcagggttctcgcccgcagctccccaacagacaaacacacattagtgaagggtattattgacagcacccacactgagcaaaggcaggttgtcgcggtgacaggggacggcactaacgatgggcccgcactgaagaaggccgatgtgggtttcgcgatggggattgcgggcaccgacgtagctaaggaggccagcgacatcatcctgaccgacgacaacttttcaagcatcgtaaaggccgtcatgtgggggcgcaacgtctatgactctatttctaaatttctgcaatttcagcttaccgtcaatgtagttgccgttattgtggcttttactggggcctgcatcacccaagatagccccctgaaagctgtgcagatgctctgggtgaacctaataatggacacttttgcatccctcgccctggccacagagcctcctaccgagaccctcctgctccggaaaccttatggacgcaacaaaccattgatcagcaggacgatgatgaaaaacatcctggggcatgcagtttatcagctggccctcatatttacacttttgttcgtgggagagaagatgttccagattgatagtggacggaacgctcctctgcattcgcccccctccgaacactatactatcatttttaacaccttcgtgatgatgcagctcttcaatgagataaatgctcgcaagatacatggcgaaaggaatgtcttcgacggcatcttccgaaacccgatcttctgtactatagttctgggaaccttcgctattcagatcgttatcgtgcaatttggcgggaagcccttttcttgtagcccccttcagctggatcagtggatgtggtgcattttcatcggactgggcgagctcgtttggggccaggtaatagcaacaatcccaacctctagactgaagttccttaaggaggcaggccgactcactcagaaagaggaaatccccgaggaggagctcaatgaggacgttgaggagatcgaccacgccgagagggagttgcgcagagggcagatcctgtggtttaggggcctcaatcgtatccaaacccagatcagggtggttaaggccttcaggagtagtttgtacgagggcctggagaagccagagagcagaacgtctatccataatttcatggcccaccccgagtttaggatagaagattctcagccccatattccgctcatagatgacactgatctggaggaggacgctgctctaaagcaaaacagctccccgccatcctccctgaacaagaacaacagtgccattgattccgggatcaacctgaccaccgacacctcaaagtcagcgacttcctcaagcccaggttctcccatccactctcttgaaactagtctctag

SEQ ID NO: 119913 - DNA, 3597 bp, Artificial Sequence
  derived and/or modified sequence
atgggagacatgaccaacagcgacttctacagcaagaaccagagaaatgaaagcagccacggcggggagtttggctgcaccatggaggagctgcggagcctgatggagctgcggggcacagaggccgtggtgaagatcaaggagacctacggggacacagaggccatctgccggcggctgaagaccagccctgtggagggcctgcctggaacagccccagacctggagaagaggaagcagatcttcggccagaacttcatcccccccaagaagcccaagaccttcctgcagctggtgtgggaggccctgcaggatgtgaccctcatcatcctggagattgctgccatcatcagcctgggcctgtccttctaccaccccccaggagagggcaatgaaggctgtgccacagcccagggcggcgcagaagatgaaggagaggccgaggccggctggattgagggcgccgccatcctgctgagcgtcatctgtgtggtgctggtgacagccttcaatgactggagcaaggagaagcagttccggggcctgcagagccgcatcgagcaggagcagaagttcaccgtggtgcgggccggccaggtggtgcagatccctgtggccgagatcgtggtgggggacatcgcccaggtgaagtacggggacctgctgcctgcagatggcctcttcatccagggcaatgacctgaagattgatgagagcagcctgaccggggagagtgaccaggtgaggaagtctgtggacaaggaccccatgctgctgagcggcacccacgtgatggagggcagcggccgcatgctggtgacagctgtgggcgtgaacagccagacaggcatcatcttcaccctgctgggcgccggcggggaggaggaggagaagaaggacaagaaggccaagcagcaggatggagctgctgccatggagatgcagcccctgaagtctgctgagggcggagatgctgatgacaggaagaaggcctccatgcacaagaaggagaagtctgtgctgcagggcaagctgaccaagctggccgtgcagatcggcaaggccggcctggtgatgtctgccatcaccgtcatcatcctggtgctgtacttcaccgtggacacctttgtggtgaacaagaagccctggctgcctgagtgcacccctgtgtatgtgcagtactttgtgaagttcttcatcattggagtgacagtgctggtggtggccgtgcctgagggcctgcccctggccgtgaccatcagcctggcctacagcgtgaagaagatgatgaaggacaacaacctggtgcgccacctggatgcctgtgagaccatgggaaatgccacagccatctgcagcgacaagacaggcaccctgaccaccaacaggatgacagtggtgcaggcctacgtgggagatgtgcactacaaggagatcccagaccccagcagcatcaacaccaagaccatggagctgctgatcaatgccatcgccatcaacagcgcctacaccaccaagatcctgcccccagagaaggagggcgccctgccccggcaggtgggcaacaagacagaatgtggcctgctgggctttgtgctggacctgaagcaggactatgagcctgtgcgcagccagatgcctgaggagaagctgtacaaggtgtacaccttcaacagcgtgaggaagtccatgagcaccgtcatcaagctgcctgatgagagcttcaggatgtacagcaagggggccagcgagatcgtgctgaagaagtgctgcaagatcctgaatggagctggggagcccagggtcttccggccccgggacagagatgagatggtgaagaaggtgattgagcccatggcctgtgatggcctgcggaccatctgtgtggcctacagagacttccccagcagccctgagccagactgggacaatgaaaatgacatcctgaatgagctgacctgcatctgtgtggtgggcattgaagatcctgtgcggcctgaggtgcctgaggccatcaggaagtgccagagagctggcatcaccgtgaggatggtgactggagacaacatcaacacagcccgggccatcgccatcaagtgtggcatcatccaccctggagaggacttcctgtgcctggagggcaaggagttcaacagacgcatcagaaatgaaaaaggagaaattgagcaggagagaattgacaagatctggcccaagctgcgggtgctggcccggagcagccccacagacaagcacaccctggtgaagggcatcatcgacagcacccacacagagcagaggcaggtggtggccgtgactggagatggcaccaatgatggccctgccctgaagaaggcagatgtgggctttgccatgggcattgctggaacagatgtggccaaggaggccagtgacatcatcctgacagatgacaacttcagcagcatcgtgaaggctgtgatgtggggcagaaatgtgtatgacagcatcagcaagttcctgcagttccagctgactgtgaatgtggtggccgtcatcgtggccttcaccggggcctgcatcacccaggacagccccctgaaggctgtgcagatgctgtgggtgaacctgatcatggacacctttgccagcctggccctggccacagagcccccaacagagaccctgctgctgaggaagccctatggaagaaacaagcccctcatcagcaggaccatgatgaagaacatcctgggccatgctgtgtaccagctggccctgatcttcaccctgctgtttgtgggggagaagatgttccagattgacagcggcagaaatgcccccctgcacagccccccatctgagcactacaccatcatcttcaacacctttgtgatgatgcagctgttcaatgagatcaatgccaggaagatccacggggagagaaatgtgtttgatggcatcttcaggaaccccatcttctgcaccatcgtgctgggcacctttgccatccagatcgtgattgtgcagtttggaggcaagcccttcagctgcagccccctgcagctggaccagtggatgtggtgcatcttcatcggcctgggggagctggtgtggggccaggtgattgccaccatccccaccagccggctgaagttcctgaaggaggccggccgcctgacccagaaggaggagatccctgaggaggagctgaatgaagatgtggaggagattgaccacgccgagcgggagctgcggcggggccagatcctgtggttccggggcctgaaccgcatccagacccagatccgggtggtgaaggccttccgcagcagcctgtatgagggcctggagaagccagagagcaggaccagcatccacaacttcatggcccaccctgagttcagaattgaggacagccagccccacatccccctgattgatgacacagacctggaggaggatgctgccctgaagcagaacagcagcccccccagcagcctgaacaagaacaacagcgccatcgacagcggcatcaacctgaccacagacaccagcaagagcgccaccagcagcagccctggcagccccatccacagcctggagaccagcctgtag

SEQ ID NO: 119914 - DNA, 3597 bp, Artificial Sequence
  derived and/or modified sequence
atgggcgacatgaccaacagcgacttctacagcaagaaccagcggaatgaatctagtcacggcggcgagttcggttgtacgatggaggagcttcggtcacttatggaacttcgcggcaccgaagccgttgtcaagatcaaagagacctacggggacacagaggccatctgtcggcgattgaagaccagccccgtcgagggactgcctggcactgcccctgacctcgaaaagcggaagcagatctttggtcagaacttcatccctccaaaaaaacccaagacatttcttcagttggtctgggaggcactccaggacgtcaccctgataatcctggagattgctgcgattatctctctgggtctaagtttctatcacccacctggggaaggcaacgagggttgtgccaccgctcagggcggcgctgaggacgagggtgaggcggaggccggctggatcgaaggcgccgcaatactgctgagcgtgatttgtgtcgtactagttacagccttcaatgactggtcgaaggagaaacagtttcgggggctacagagtcgcatcgagcaggaacagaagttcacagtcgtgagagccggacaagtagtacagatccctgtcgctgaaatcgtggtgggagatatagcccaagtgaaatatggagatttgttgcctgccgacgggctgttcatccagggcaatgatctgaagatcgatgaatccagcttgacgggagagtcagaccaagtcagaaaatcagttgacaaagatccaatgctcctgtccggcactcacgtgatggaggggtcaggacggatgctcgtcaccgcggtgggtgtgaactcacagactgggattatttttacccttctgggtgcaggaggagaggaagaagaaaagaaggataagaaagcaaagcagcaagacggcgccgcagctatggagatgcagccactaaaatccgccgagggcggagatgccgatgataggaaaaaggccagcatgcataagaaggaaaaatccgtgctacaagggaagctcaccaaactcgctgtccagatcggcaaggctgggctggtcatgtcagccatcacggtcattatattagtgctgtattttacagtggataccttcgtggtaaataaaaagccttggctccccgaatgtactccggtctacgttcagtacttcgtaaagtttttcattatcggagtcacagtgctcgtggtggcggttcctgagggacttccactggcggtgaccatatccctagcatattctgtgaaaaaaatgatgaaggataacaacctcgtgcgccatctcgatgcttgcgagacgatgggcaacgcaacagccatctgctctgacaaaactggaacacttacaacaaatcggatgaccgtcgttcaggcctacgtaggcgatgtccactataaagagattcccgatccttcctctatcaacaccaagaccatggaactcctgattaatgccatagccatcaacagtgcgtacacgacgaaaatcttgccccccgaaaaggagggcgccctgccccgacaggtcgggaacaaaactgaatgtgggctgctaggatttgtcttagacttgaaacaggactacgagcccgttcggagccaaatgcccgaagagaagctgtacaaggtgtataccttcaactcagtacggaaaagcatgtctacggtgatcaagctgcccgatgaatcttttagaatgtactccaaaggcgcatctgagatagtgctgaagaagtgctgtaaaattctcaacggggctggcgagccacgtgtgtttaggccaagggaccgtgatgagatggtgaagaaagtcattgaaccaatggcctgcgacggactgcgcacgatctgcgtagcttaccgtgactttcccagctcccccgagccagattgggacaatgagaatgatattttgaacgagctaacctgtatatgcgtcgtcgggatagaagatccagttcgaccagaggttccggaagccatcagaaaatgccagagggccggcattaccgttcggatggtgaccggggacaacattaatacagcccgagccatcgctattaaatgcggaatcatccaccctggcgaggatttcttgtgcctcgagggaaaagagtttaatagacgcattcgtaacgagaaaggagagatagagcaggaacgtatcgacaagatctggccaaagttacgcgtcctggctcgtagtagccccactgacaaacatacactggtgaaaggaatcatcgatagcacacatacggagcagagacaggtggtggccgtgaccggtgacggtacgaatgatgggcctgcgctcaagaaggctgacgtgggctttgccatgggcattgcaggcaccgatgtagcaaaagaagcatccgacatcattctgacagatgataatttctcatcgattgtaaaggccgtaatgtggggccgaaacgtgtatgactctatttccaagttcctgcagtttcagctgaccgttaatgtcgtggcagtgattgttgctttcaccggggcgtgcatcacccaggatagccccttgaaagcggtgcagatgttatgggtgaatctcatcatggacacgttcgccagcctggccctagcaacggagccacccaccgagacactactgttaagaaagccttatggcagaaacaagcccttgatctccagaacaatgatgaagaatattcttggtcacgcagtttaccaattggctctgatcttcactctactctttgtcggagaaaagatgtttcagattgacagcggtagaaacgctcctctgcattcacccccttctgagcattatactattattttcaacacttttgtgatgatgcagctctttaacgagatcaacgctagaaagattcacggtgagcggaatgtatttgacgggatttttagaaacccaattttctgtactattgttttgggcacatttgcaattcagatcgtgattgtgcaatttggaggtaaacctttttcctgctcacctctccagcttgatcagtggatgtggtgtattttcatcggattgggggaactggtgtggggacaggtgatcgccacgattccaacctcacggctgaagttcctgaaggaggccgggagattaactcagaaggaagagattccagaggaggaactgaacgaagacgtggaggagattgatcatgccgagagagagctccgtcggggccaaatcctgtggttccgaggcctgaaccgtatccagacgcagatccgcgtggtgaaagcgtttaggtctagtctgtatgagggactggagaagcccgaatccagaaccagcatccacaacttcatggctcaccctgagttcaggatcgaagactcacagccccatattccgctgattgatgatactgatctcgaagaggatgccgctctcaagcagaattctagcccccctagttccctgaataaaaacaacagcgccatcgatagtgggatcaatctgacaacagacacgagtaaaagtgcgacatcgtcatcacccggcagccccattcattccttagagacatccctgtag

SEQ ID NO: 119915 - DNA, 3597 bp, Artificial Sequence
  derived and/or modified sequence
atgggcgacatgaccaacagcgacttctacagcaagaaccagcggaatgagtcgtcacatggtggggagttcggatgcaccatggaagagctgcggagcctaatggagctgaggggaacagaagccgtcgttaagataaaagagacctacggcgatacagaagccatatgtagaaggcttaaaacttctcccgtggagggcctgcccggaacagcccctgacttagagaagcgcaagcagatattcggtcaaaacttcatcccaccaaagaagcccaagacttttttgcagttagtgtgggaagccctccaggatgtgacattgattattctggagattgcagcgataatttccctgggcctgtctttttaccacccccctggagaaggcaatgaggggtgcgcaactgcccaaggaggggcggaagatgaaggggaagcggaggctgggtggatagagggcgccgccattctgctgagcgtgatctgtgtggtcctggtcacagctttcaatgactggtctaaggaaaagcagtttcggggcttacagtcccgtatcgaacaggagcagaaatttactgtggtgagagctgggcaggtggtgcaaatccccgtggccgaaattgtggtgggcgacatagcacaggtgaagtacggagacctgctgcccgctgacgggctttttatccagggcaatgacctgaagatagatgaatcctccctcacaggcgagagtgaccaggtccgcaaaagcgtggacaaggatccaatgcttctctctggtacacatgtgatggaaggctccggacggatgttagtgaccgcagtaggggtgaatagtcagactggcatcatcttcactctgctgggtgcaggcggcgaggaagaggaaaagaaggacaaaaaggccaaacaacaggatggggctgccgctatggaaatgcagcctctcaagtcggctgagggaggagacgcggatgaccggaaaaaagctagtatgcataagaaagagaaaagtgtgttgcaaggaaagctaaccaagctggccgtgcagatcggcaaagccggacttgtaatgtctgctattactgtgatcatcctcgtcctttactttacagttgacacttttgtcgttaacaagaagccatggctcccggaatgcaccccagtttacgttcagtacttcgtaaagttttttattattggcgtcacagtcctggtggtagcagtgcccgaggggctgccactggctgtgactatatccctcgcctacagcgttaaaaagatgatgaaggacaacaatctggtacgacacctggacgcatgtgaaaccatgggaaatgcaactgccatctgcagcgataagaccggcaccctcaccactaacagaatgaccgtagttcaggcatacgtcggggacgttcattacaaggagatccccgacccctcatcaataaacacaaaaactatggaattgctgattaacgcaatcgcaattaattccgcctacaccactaaaatactgccaccagagaaagagggtgccctgccacggcaggtgggtaataaaaccgagtgcggcctactggggtttgtcttagacctgaaacaggactacgaaccagttaggtcccaaatgcccgaggagaaactctacaaagtatatacttttaatagcgtgcgtaaaagcatgagcacagtgattaagttacctgacgaatcttttagaatgtattctaagggagctagtgagatagtgctgaaaaagtgctgcaaaatccttaacggggcaggggagccacgagtcttccgccctagggaccgcgatgaaatggtcaagaaggtcatagagcccatggcgtgtgacggactccgtacaatctgtgtcgcctatcgagacttccccagctcaccagagccggattgggataacgaaaatgacatcttgaacgagctgacctgtatctgtgtagtgggcatcgaagatccggtgcggccggaggtgcctgaagccataaggaagtgtcaacgggcaggaattaccgtccgcatggtgacaggggacaacatcaacactgctagggcgatcgcaatcaagtgtggcattattcatcccggtgaggattttttgtgtctggagggtaaagaatttaaccgaaggatccggaacgagaagggagagatcgagcaggaacgaatagacaagatttggccaaagctccgggtgttagctaggtcatccccaactgataagcacacactagtcaaggggatcatcgatagcactcataccgaacagcgccaagtagtcgccgtcactggggatggaaccaatgacggacccgcactgaaaaaagccgatgtgggcttcgctatgggcattgccggaaccgatgtggctaaagaggccagtgacataatcttaacggatgacaacttttcctccatcgtgaaggctgtgatgtggggaaggaatgtgtatgattcaatcagtaagtttctacagttccaactgacggtcaatgtagtggcagttatagttgcgtttactggagcttgtattactcaagactccccattaaaagctgtccaaatgctctgggtgaatttaatcatggatacttttgctagcctcgctctcgccacagagccccccacggaaaccctcttgttgcgcaaaccgtacgggaggaacaaacccctgataagcaggactatgatgaagaatatcctgggccacgcagtgtatcagctggctcttatatttactctgctgttcgtcggggagaaaatgttccagattgatagtggtagaaacgcccctcttcactcacctcccagcgaacattatacaattatcttcaacactttcgtcatgatgcagctcttcaacgaaatcaacgcgcggaagatccacggagagcgaaacgtgttcgacggaattttccgcaacccaatattctgcacaattgtgctggggactttcgccatccaaattgtcatcgtccagttcggtggaaagcccttttcctgcagtccgctgcagctggatcagtggatgtggtgtatttttatcggcttgggggagttggtctgggggcaggttattgccaccataccgacgtcacgcctaaaatttctcaaggaggcagggcgattaacacagaaggaggagatacccgaggaagaactgaatgaagacgtcgaagagatcgaccacgcagaaagggagttgcgaagaggacaaatcctgtggttccgaggcctgaatcgtattcagacacagattcgtgttgttaaggcatttcggtcctccctttatgaggggttagaaaaacctgagtctcgaacttccattcacaattttatggcacaccctgagttccgcatcgaggattcccaacctcacatccctctgatagacgacaccgatctggaggaggacgccgctttaaaacagaactcgtcacccccctcatctctgaataaaaacaactcggcgatcgattccggtatcaacttgacgaccgacacttccaaatcagcgacctctagtagtccagggtcccctatccacagcctggagactagtctgtag

SEQ ID NO: 119916 - DNA, 3597 bp, Artificial Sequence
  derived and/or modified sequence
atgggggacatgacgaattccgacttctattccaagaatcagagaaacgagagctcccacggaggcgagtttggttgcacaatggaggagttgcgcagcctgatggagctcaggggaaccgaagctgtggtaaagatcaaggaaacatatggtgatacggaggcaatctgccgaagactgaaaaccagcccagttgaggggctccctggaacagccccagacttggaaaagaggaagcagatctttgggcagaacttcatccccccaaagaaacctaaaacgttcctccagttggtgtgggaggcactgcaggatgtaacactgatcattctagagattgcggctatcatcagtcttggtctgtccttctaccaccccccaggggagggaaatgaaggatgtgctaccgcccaggggggagctgaagacgaaggagaagccgaggcaggatggatagagggtgctgccatcctgctctccgtgatctgcgtggtcctggtgactgctttcaatgattggagcaaagagaaacagtttcgagggctgcagagccggattgagcaagagcaaaagtttactgtcgtgagggctggtcaagttgtacagatccctgtggccgaaatagtggttggagacatcgcacaagtgaagtacggcgatctgctacccgctgatggcctgtttatccaagggaatgatctcaagattgacgagagtagcctcacgggggaaagtgatcaggtgcgtaaatctgtggacaaagatcccatgttattgagtggcacccacgtgatggaaggatccgggagaatgttggtgacagctgtcggagtgaactcacaaacaggtatcatattcactctcctgggagccggaggtgaggaggaagaaaagaaagacaagaaggctaaacagcaggatggagccgcagccatggaaatgcaacccttgaaaagcgcggaaggcggtgacgctgatgacaggaagaaggcctcaatgcacaagaaagaaaaaagcgtgctacagggaaaattaactaaactcgcggtgcaaataggaaaggctgggcttgttatgtcagccataaccgtaatcatcctagtactttattttactgtggatacttttgttgtgaataaaaagccttggctgccagaatgcacccctgtgtacgtacagtatttcgttaaattctttatcatcggcgttacagtgttggttgtggcagtccccgaggggctcccactggctgtgaccatttctctagcctattctgtaaagaaaatgatgaaagacaataatctcgtcaggcatttggacgcatgtgaaactatggggaatgctactgctatctgctcagataagacggggacactcaccactaatagaatgacggtggtgcaggcctacgttggggacgtgcactataaggaaattcccgatcccagcagtataaatacgaagacaatggagctgttgatcaatgctatagcaattaactccgcttataccaccaaaattcttcctccagagaaagaaggcgctcttccacgacaggtagggaacaagacggagtgcgggctgctggggttcgttctggacctgaaacaggactatgaacccgttcggtcccaaatgccagaagagaagctctataaagtgtataccttcaattcggttcggaaatccatgagcacagtgatcaaactgcctgatgagtccttcaggatgtatagcaaaggcgcttctgaaattgtgttgaagaagtgttgtaaaattcttaatggagcaggcgagcctcgtgtctttcgaccccgtgatcgtgacgaaatggttaagaaagtcatcgagccaatggcatgcgacggactgcggaccatctgcgttgcgtaccgggacttcccgtcatcacctgaaccagactgggataatgagaacgatattcttaatgaactcacatgtatttgtgtcgtcgggatcgaagatcctgtgcggcctgaagtgccagaagccatcaggaagtgccagcgcgctggcatcaccgtgaggatggttactggggataatatcaacaccgcaagagctatcgcaatcaaatgcggtatcatccatcccggtgaggactttctgtgtttggaaggcaaggaattcaaccgccgaatacgcaacgaaaagggggagattgaacaggaaaggatcgacaaaatctggcctaagcttcgggtcctcgctcggagctcaccgactgacaagcacacactggtaaaggggattatcgacagcactcacacggaacaaaggcaggttgtggccgtcactggagacggaacaaatgatggccctgctctcaagaaggcggatgttggattcgccatgggcatcgccggaactgatgtggctaaagaggcctctgatattatcctcactgacgacaattttagctctatcgtcaaggccgtgatgtggggacgaaatgtatacgatagcataagtaaattcctccaattccaactaacagtcaacgtcgtggccgtgatcgtggcctttaccggggcttgcatcactcaggactccccattaaaggccgttcaaatgctgtgggtgaaccttataatggacaccttcgcttctttagcccttgctactgagcccccaacagaaactctcttgctccgcaagccatacggtaggaacaaacctctcatcagccggacgatgatgaaaaatatcctcggccatgcggtctaccagcttgccttaatatttacgttgctgttcgtgggagagaaaatgtttcaaatcgatagcgggcgaaatgcccctctccatagccccccatccgagcactataccatcatttttaacacatttgttatgatgcagttattcaatgaaataaatgccagaaaaattcatggcgaacgcaacgtgtttgacgggatcttcagaaatcccattttttgtacaatcgtgttgggcacatttgccattcagatcgtgattgtgcaatttgggggaaaaccctttagttgtagccccctccagctagaccagtggatgtggtgcatcttcatcggcctcggagaacttgtctggggacaagtgatcgccactatcccgacctctaggctgaaattcttgaaagaagctggtaggctgacgcaaaaggaagaaatccctgaggaggagcttaatgaggatgtggaggagatagaccacgccgagcgggaactcagaaggggacagatcttgtggttccgaggcctgaatagaatccaaacacaaattcgcgtcgtgaaagcgttcagatcttcattatacgaagggctcgaaaagccagagagcagaacctccattcacaactttatggcacacccagagtttaggatcgaggactcccagccccacatcccgctgattgatgacacggatctcgaggaggacgccgcactcaagcagaattcttcgccgccttcctcgctgaacaaaaacaacagtgcgattgactcgggcattaatctaacaacggacacctcgaagtccgctacgagctcaagccctgggtcccccatccatagcctggagacatccctctag

SEQ ID NO: 119917 - DNA, 3597 bp, Artificial Sequence
  derived and/or modified sequence
atgggagatatgaccaactccgacttttacagtaaaaaccagaggaatgagagctcccatgggggtgaattcgggtgtaccatggaggagctgcgttctctgatggagctccggggtaccgaagccgttgtgaaaattaaggagacttacggcgataccgaagcaatatgtcgaagactgaaaacctcccctgtagaggggttgcctggaacagcaccagatcttgagaaacgaaaacaaatctttggacaaaacttcatcccacccaaaaaacccaagactttcctgcagcttgtgtgggaggccctacaagacgtcaccttgatcatcctagagatcgcggcaataatttccctgggcctcagcttttatcacccccctggtgaaggcaatgaagggtgtgccaccgctcaggggggagcagaggatgagggcgaggccgaggcaggttggattgagggggctgcaatcctgctgtctgttatctgcgtggtcctggttacagcctttaatgactggagcaaggagaaacagtttagagggcttcagagtagaattgagcaggagcagaagttcactgtggtgagagccggacaggtggtgcagatcccagtcgcagagatcgtcgttggagacattgcccaagtgaagtatggggacttactgcccgcagatggactcttcatacaagggaacgacctgaaaatcgatgaatctagtttgaccggggagtcagatcaggtgaggaagtctgtcgacaaagaccccatgctccttagcggaacgcacgtgatggaggggagcggtcgcatgcttgttacagccgtgggcgtgaatagtcagaccggcattattttcactttgctgggcgctggaggtgaggaggaagaaaaaaaggataagaaagccaaacagcaagacggcgcagcagcgatggagatgcagccactgaagagcgctgagggtggcgacgctgatgacagaaagaaagcctcaatgcacaaaaaggaaaaaagcgtattgcaggggaaactgaccaaactggctgtacaaatcggaaaggccggactggtcatgtctgcaatcaccgtgattattctggtcctctacttcaccgtggacacattcgtggtgaacaagaaaccttggctgcctgaatgtacccccgtctatgttcagtacttcgttaaattctttattatcggagtaacagtgctggtagtcgctgtccccgagggcctcccgttagcagttaccatttcactggcatattcagtgaagaaaatgatgaaggacaacaatctagttcgccatctggatgcctgtgagaccatgggaaatgccaccgctatttgttcggataagaccggtacgctcacgacaaataggatgaccgttgtccaggcgtatgtcggagatgtacactataaagagattcctgatcccagctccatcaacactaaaacaatggaactcttgattaacgcaatcgcaatcaacagcgcttatacaacaaagatcctgccccctgaaaaggagggcgctctccccagacaagtgggtaacaaaactgagtgtgggctcctgggctttgtgcttgatttgaagcaggattatgagcccgtccgatctcagatgccagaagagaagctttataaggtatatacgttcaactccgtcagaaagtctatgtcaactgtgattaagctccctgatgagtctttccggatgtattcaaaaggcgcatcagagatcgtcctgaaaaaatgctgcaaaatcctcaacggagctggtgagccaagggtgttcaggccccgagacagggacgagatggtgaaaaaagtgatcgaacccatggcatgtgacgggttgcggaccatttgcgttgcgtacagagattttcccagcagccccgagccggattgggacaacgagaacgacatactgaacgaactcacatgcatttgcgtggttggaattgaggatcccgtgcgcccagaggtcccagaagccattaggaaatgccaacgtgccggaataaccgtgcggatggtgacaggagacaatattaatacggccagagccattgcaatcaagtgcgggattattcacccgggtgaagacttcttatgtctggagggaaaggagttcaatagacggatccggaacgagaaaggcgagattgaacaagagaggatagataagatttggcctaagctgagggtcctggctaggtcatccccaaccgacaagcacacactagtgaaaggcattatagacagcacacataccgagcagaggcaagttgtggcggttacgggcgatgggacgaacgacgggccagccctcaagaaggcagacgtcgggttcgcgatgggcattgctgggacggatgtggccaaggaggcctctgacatcatcctgacagacgacaattttagctctatagtgaaagctgtaatgtggggaaggaacgtgtacgactccatttctaagttccttcaattccaactcactgtgaacgtagtggcggtgatagtcgcgtttacaggagcttgcataactcaggactcgcccctgaaagccgtgcaaatgctctgggtgaatttgattatggacacatttgccagtttggcgctggcgacggaaccacccactgagaccctgctgcttcggaagccgtatgggcgtaataaaccgctgatttcccggaccatgatgaagaacatcctgggtcacgcagtatatcaactcgccctgatattcaccctcttgttcgtgggcgagaagatgtttcaaatcgacagcggacgaaatgccccactccattcaccacctagcgagcactatacgatcattttcaatacattcgttatgatgcagttatttaatgaaataaacgccaggaaaatccacggtgagcggaatgtcttcgacggcattttcagaaatcctatcttctgcacgattgtcttggggacattcgcaatccagatcgttatcgtgcagtttggaggtaagccgttcagctgcagccctctgcagctggaccagtggatgtggtgcatctttattggccttggcgagctggtctggggacaggttatagccaccatccccacatctcgacttaaattcctgaaggaggcaggacggctcacacagaaggaggagattcccgaagaggaactgaatgaggatgtggaggagatcgatcatgccgagcgggaactgcggcgaggccaaatactgtggtttcgcggtttgaacaggatccagacgcaaattcgagtcgtgaaggcatttcgaagctcattatacgagggactggagaagccagagtcacgaacgtccatccataacttcatggcacaccctgaattcagaattgaggattctcaaccgcatattccactgatcgatgatactgatcttgaggaagatgccgctctgaagcagaattccagtcctccatctagtctgaacaagaacaatagtgccattgacagcgggataaatctgactaccgacacctcgaagtcagccaccagttctagcccaggatccccaatccacagtctcgagacaagcctgtag

SEQ ID NO: 119918 - DNA, 8900 bp, Artificial Sequence
  derived and/or modified sequence
ggcgagatgctctcctagaaccggcgccggcgcctccgccccccgccccccacccgctcgggcaggatggtacagtctgcagaggggcccgggcacgctggctgggctcagccgcggcaccagctgccgcaccgcgattacggggctgcccgccgggaaaccgtgcaggattggtggtgattttcatagccaagagccaccacccctgaccatgtagatgccagttccagggagcagcatgggccccactgaatggagactcctgggtctacagccctgagcccctccggcccctggacctcgtcccacaccggaggacacctcttggagctcaccaccactgtcaccagcccgcctcggccacccccaccccccgggacccggagtcggccgcctggtgccacagctgaccagtgagggtgtgctgaggacagccacaagcagccatcacccggcagcctcttgtccagcgctgacccttgggcccagcccgagcaaggaccgcagcaaacatgggtgacatgaccaacagcgacttttactccaaaaaccaaagaaatgagtcgagccatgggggcgagttcgggtgcacaatggaggagctccgctccctcatggagctgcggggcactgaggctgtggtcaagatcaaggagacttatggggacaccgaagccatctgccggcgcctcaaaacctcacctgttgaaggtttgccgggcaccgctccagacctggaaaagagaaagcaaatttttgggcaaaactttatacctccaaagaagccaaaaaccttcctgcagctcgtgtgggaggcgctgcaggacgtgacgctcatcatcctggagattgccgccatcatctccctggggctgtccttctaccacccgcccggcgagggcaacgaaggatgtgcgacggcccagggtggggcagaggatgaaggagaggcagaggcaggttggatcgagggggccgccattctcctctcagttatctgtgtggtcctggtcacggccttcaatgactggagcaaagagaaacagttccggggcctgcagagccgcatcgagcaggaacagaaatttaccgtggtccgggctggccaggtggtccagatccctgtggctgagatcgtggttggggacatagcccaggtcaaatatggtgacctcctccctgccgacggcctcttcatccagggcaatgacctcaagattgatgaaagctccctaactggagagtctgaccaggtgcgcaagtccgtggacaaggaccccatgctgctgtcaggaacccacgtgatggagggctcaggacggatgttggtgactgctgtgggtgtgaactctcagactggcatcatctttaccctcctgggggctggtggtgaagaggaagagaagaaagacaaaaaagccaaacaacaggacggggcagccgccatggagatgcagcccctcaagagtgccgagggcggcgacgctgacgacaggaagaaggccagcatgcacaagaaggagaagtccgtgctgcagggcaagctcaccaagctggctgtgcagatcgggaaggcgggcttggtgatgtcagccatcacggtgatcatcctggtgctctacttcactgtggacaccttcgtggtcaacaagaagccgtggctgcctgagtgcacgcccgtctacgtgcagtactttgtcaagttcttcatcattggcgtgacggtgctggtggtcgccgtgcccgaggggctccctctggccgtcaccatctcgttggcctattcggtgaagaaaatgatgaaggacaacaacctggtacgccacctggatgcctgtgagaccatgggcaatgccacagccatctgctcagacaagacaggcacgctgaccaccaatcgcatgacagtggtacaggcctatgtcggcgacgtccactataaagagatccccgaccccagctccatcaacaccaagaccatggagctgctgatcaatgccatcgccatcaacagcgcctacaccaccaagattctgcccccagagaaggagggcgccctgcctcggcaggtgggcaacaagacggagtgcggcctgctgggcttcgtgctggacctgaagcaggactacgagcccgtgcgcagccagatgccagaggagaagttgtacaaagtgtacaccttcaactccgtgcgcaagtccatgagcactgtcatcaagctgcccgacgagagcttccgcatgtacagcaagggggcttctgagatcgtgctcaagaagtgctgcaaaatcctcaatggggcgggagagcctcgtgtcttccggccccgcgaccgggacgagatggtaaagaaggtgattgagcccatggcttgcgatgggctccgcactatctgcgtggcctaccgcgacttccccagcagcccggagccggactgggacaatgagaatgacatcctcaacgaactcacctgcatctgcgtggtgggcatcgaggacccggtgcggccagaggtcccagaagccatccgcaagtgccagcgggcaggcatcacggtccgcatggtcactggcgacaatatcaacacggctcgggccatcgccatcaagtgtggcatcatccatcctggggaggactttctgtgcctcgagggcaaggagttcaacaggaggatccgcaacgagaagggggagattgagcaggagcgaattgacaagatctggccaaagctgcgggtgctggctcgctcctccccaacggacaagcataccctggttaaaggcatcatcgacagcacacacactgagcagcggcaggtggtggccgtgacgggggacgggaccaacgacgggcctgcactcaagaaggccgacgtgggcttcgccatgggcatcgcaggcactgacgtggccaaggaggcctcagacatcatcctgacagacgacaatttcagcagcatcgtcaaggcagtgatgtggggccgcaacgtctatgacagcatctccaaattcttgcagttccagctcaccgtcaacgtggtggccgtgattgtggccttcacaggcgcctgcatcacgcaggactcccctctgaaggccgtgcagatgctctgggtgaacctcatcatggacacgtttgcctcgctggcactggccactgagccgcccacggagaccctgctgctgaggaagccgtacggccgcaacaagccgctcatctccaggaccatgatgaagaacatcctgggccatgctgtctaccagcttgccctcatcttcaccctgctctttgttggcgagaagatgttccagatcgacagcgggaggaacgcgcccctgcattcgccaccctcagaacattacaccatcatcttcaacaccttcgtcatgatgcagctcttcaacgagatcaacgcccgcaagatccacggcgagcgcaatgtctttgacggcatcttccggaaccccatcttctgcaccatcgtgctgggcacctttgccatccagatagtgatcgtgcagtttggagggaagccattcagctgctctccactgcagctggaccagtggatgtggtgcatattcattgggttaggagagctcgtttggggccaggtcatcgccaccatcccgaccagcagactcaagttcctcaaggaggcaggcaggctcacacagaaggaggagatcccggaggaggagctcaacgaggacgtggaggagatcgaccacgcggagcgggagctgcggcggggccagatcctgtggttccgaggcctgaatcggatccagacacagatccgcgtcgtgaaggcgttccgtagctctctctatgaaggtttagaaaagcctgaatctcgaacctccatccataacttcatggctcatcctgaattccggatcgaagattcccagccccacatccccctcattgatgacaccgacctggaagaagatgccgcgctcaagcagaactcgagcccgccgtcatccctcaacaagaacaacagcgccatcgacagtgggatcaacctgacgaccgacacaagcaaatcagctacctcttcaagtccagggagccccatccacagcctggagacgtcgctttagctgaggaccctctcgcctgcccgcccgccctcatggaccccgctgccacccgctttccgggcacccatccatccaggcacccaactcacccaagcagcaacgagcaacaatcggaaaccaaatactggagagaaaaccaacgtttccacccacagaccctttctctggctgcgatgctgtttgaactctttttcacttcaaggcaaggggcgggatctccactgggggcttacgggagtgagcggttttcccaaaacaagcccttcctggctcccacccagacatggaccagccatgcacccgcccagccaccacgtcccccgcatgaatgtactgtacactttcaatcctccccttgtttggtttttgggggttggggaggggtttttgtttgtttgtttgttttcttaggcgggaactgcaaacagactcttttctgagactatttatccaatccactggtctgtgagtttttgaaatgcttgcacagcatggtctcagttgtatagattaatttaataactttttgaaattgcagagcttaactcgcctagtagatttgcaccaatggaaccgaagaacttcatagacactcacaaggttatatccatttctttgtatctatatcaacgtatacttttccgagactgtatacgtccatatagataggtagatatatatatatatatataaatatatatacatggatatataaagtttctttgccggcatgttgccttgtttccgcttaaattgctctattttaacttatttatgtcctaaaagaagaatgtaatttgtttacaaacctgtagataacgtctttggctatttgtatggtttaagaacactggtggctgagatgctataaaaacagctcggcccaacagacacttcccctgggttgcatcctggatgttttatgatagccatgctctgatttttgcctgctatttccgttcaataatgtcactaccgtgagaggctcaggcagaagccaaatgctaccgagttgccatcctgaggggtttaacaacatgctccgtagacgaagggagaggaggagagaaggcttcctgggtttgcaacactaacggccatccggcccaaggatgccaggatctgcaaagcactgctcgaagacttttctctcaatgaaactcgcttgagtttactaagagcatttcaaaaataggttctctttggcactgtctgtacagagattgaggtagtgttgaaatattataaatggtattgtgttgatttttttttttatttagtaacttacaggtttgtttccttattaatggcagcatctgagctgttggcatattggatgaggatcagtatggcttgctgcttttatttttatttttgaagaagaatagcctttttctctgcactatttagatccgaatgaaccttatgatgtgtatattgagatgtactcagtgtgattttaaaccaaattgtcttcctgtagtcacaatatatactgtagccttttaacagcaagtcttgctttcccaaacagaaagccattctgaaaccctacagtatcacaggtgagaaaaggtggttattttttccccaagacaacagcactagtaatcccacttaataagagcttatttaattggatgtcagcctcttaactgctaagcactttgtgggtctcagcgtttttcataaaagaacttttgtatttaatacaaagtttgctttgagacttttcagcatatgatcttttttccataaacttgtacagtgcaaaagacattttgaataccatgatcgatgatgtcccatgcttcgaggaaaaccaaacactttccgcctctcttgcaaaatccattcctcatgctgaccctcctcacgatggctgtgtcagcccagccccttcccttctccaggcccagagaactcttccacaaacaagatgagagccactcgggaaaagagccatagtcaactgggagggcctacatctggatggcggtggaaaaacttgagggtttggggttcaaagtcagcccatcccacctggcaaaatcctcctggaaggaggaccttcaagagcgcatcacctgaatgtcgtgaagaagtatctctgaatgtatccaggagaggaactgcataaccaaaggggtgaccagccctcagatgtgcttattggattccagtacaaacgccaccaaagccagcccactgctctcctacaaggaaggaaagatctgcacgtgtaaaacatggggcagccttggaacatggtgttttttggagtttcctttctcacagttttccatctccccacttctttgatcagtcatgtgtccgtgacctcgttccatgacatcaggatagctgtgtttgcacaccatgctccatgttcattcggagccaggaggggttctcagtggagcctggcttagggaacagggagcgatggaagaatgccaacattagcgttggtcttctcttgtcaggaatgaaggatgcttgcacacatgcaccccctcactctcacacttgcacacatacacacacacacacacgaaatggttggtttgtcaaaactcactgtagtacataaagcttgcactctgcgtcctatatctagcagcatggggtacgtttggcagttcactccattagggggtaaataatttatgaccattcatctgtttttatgaatttttttatctagacaataatgtaaataaagaactcaccatctctgttcatttaatactatgcaatggttatgctttcaatcgctggctcttctgactcgtgcagtgtggttctgaaatgtttgtggtttaaaaaaaaaagcaaaaaacaacatcaaacagaacatagtaaatatatctgtaatgtatacttttttctactttgggactgcatcatccacatagcttcttttctgtcctctagacaagggctccaggagtaagtggcagatttggttctgagagctaagctcaccaacttgtctccccctcaacagatgagggaagggcagggagcccgttcagtgactcctggcgctgcagaatcactcatctttggaggtgagcagagagagctctgaggagtttccttcttgcaactcaggcggagctttctttaactcaggagcagcctccattgctcccgccaacccctcaccatggccccttgtccccttgtcccaaccatagcatagagatgacaagagagaggcagtcctatttctgagactggaccaattaaaatgactgcactggctcaaaggactctgaacctgtcttgtcctgggtcctccagttgttggaagccactcttttccccaaccatgctgaaatgccacctttaccacacactgatgtcttacatagacttagatctatttctggaacttctcttctcttcgcttacttgggtgtctcatctggcaccagccatacaattttaactattgtcaatttctaatgtcttattatgtggtgggatgagtcccttcactcttcttttacaaaatttcctagttattctctcacatctattcttccacataaactttaaattgtgcccagtcctccaccccctgtcccattcccacccccaaattctgggctctgtcattccctgtgccatcatcttccccccattgtaattactgtccactcagggctgtgaaatagactatgttctgtaaagagggacaaaaagggcatcctgatcttgagagaagcctgctgttcctcccatcatttcacctgccccctaagcccaggagttgtcatgagaggtcaccaggcccccactcaatctcagcttgggaaccaaagtcacccaccttggttgtgttggggtggacccgccatctgtccctggtccagacgagaaagaggagtctctcctaggcctggagctgggaaagaatgtgtggcccagttgtctgcacttctaattctcatcatggagaaacctttattcctatctccctttcctgaactggttttttgttgtttttgtttcattttgttttggggggatagtttcttgctctttaatttggagtctccagtacctttgggatgcaggcagttcttgcctgggccttctcggaaccctcactcccctagcccactcttgcgctacctgcaggaggctgccaacctggtgcattctgacaagcctcccacccaaatctctctcctgccattgtgtccaaaatcccaccattagaggctcttgtagggaagagcgtttcttgaaggcttttaggccttccagagccaggagggaagtcagacaatagcaggaagtccccaggccttttcaaagttccaaaccaagctctcctgattttaatgtagagatcataccaacccaggtgggggaggagggtccccagccccaggcagcagccatcaccccctccactgaaaacaatattggaggctgctttgggactgcccttctcagccccctaagtctgttttgtaatgcctgtggtgctctccctcctggacctttcctctcgggggtcaccacactttgctaactcttgtgtgcacatattttataatagagtagcgagggaatggtgccgcctccagcttccgtaagctgcccgggctctggggggctctgggacaatcggggctgggaagtgactgtgctcttattgtacactctttatttctctgtatctttggcttgtgctctttgtaattaatgggatttgtctgccttttcaacactatactgagcaataacaataaatgcacacgtggaaatgca

SEQ ID NO: 119919 - DNA, 8964 bp, Artificial Sequence
  derived and/or modified sequence
gggcagccgcggcagaggagccgcagccgcagcggggccgggccgggccgggcgcgcaccagcggcagcggcggcggcagcggcggcggcagcatctcgctctcggagccggcgcaggtttccctgtacttagagcgtggactgtgaacccccaagcagacgagctgaacttcgtcacccagtccctagagccagcaagacatgggccccagtttccagaccctgacacctctcatttaaccagaagacgtggaggggagccaccacccctgaccatgtagatgccagttccagggagcagcatgggccccactgaatggagactcctgggtctacagccctgagcccctccggcccctggacctcgtcccacaccggaggacacctcttggagctcaccaccactgtcaccagcccgcctcggccacccccaccccccgggacccggagtcggccgcctggtgccacagctgaccagtgagggtgtgctgaggacagccacaagcagccatcacccggcagcctcttgtccagcgctgacccttgggcccagcccgagcaaggaccgcagcaaacatgggtgacatgaccaacagcgacttttactccaaaaaccaaagaaatgagtcgagccatgggggcgagttcgggtgcacaatggaggagctccgctccctcatggagctgcggggcactgaggctgtggtcaagatcaaggagacttatggggacaccgaagccatctgccggcgcctcaaaacctcacctgttgaaggtttgccgggcaccgctccagacctggaaaagagaaagcaaatttttgggcaaaactttatacctccaaagaagccaaaaaccttcctgcagctcgtgtgggaggcgctgcaggacgtgacgctcatcatcctggagattgccgccatcatctccctggggctgtccttctaccacccgcccggcgagggcaacgaaggatgtgcgacggcccagggtggggcagaggatgaaggagaggcagaggcaggttggatcgagggggccgccattctcctctcagttatctgtgtggtcctggtcacggccttcaatgactggagcaaagagaaacagttccggggcctgcagagccgcatcgagcaggaacagaaatttaccgtggtccgggctggccaggtggtccagatccctgtggctgagatcgtggttggggacatagcccaggtcaaatatggtgacctcctccctgccgacggcctcttcatccagggcaatgacctcaagattgatgaaagctccctaactggagagtctgaccaggtgcgcaagtccgtggacaaggaccccatgctgctgtcaggaacccacgtgatggagggctcaggacggatgttggtgactgctgtgggtgtgaactctcagactggcatcatctttaccctcctgggggctggtggtgaagaggaagagaagaaagacaaaaaagccaaacaacaggacggggcagccgccatggagatgcagcccctcaagagtgccgagggcggcgacgctgacgacaggaagaaggccagcatgcacaagaaggagaagtccgtgctgcagggcaagctcaccaagctggctgtgcagatcgggaaggcgggcttggtgatgtcagccatcacggtgatcatcctggtgctctacttcactgtggacaccttcgtggtcaacaagaagccgtggctgcctgagtgcacgcccgtctacgtgcagtactttgtcaagttcttcatcattggcgtgacggtgctggtggtcgccgtgcccgaggggctccctctggccgtcaccatctcgttggcctattcggtgaagaaaatgatgaaggacaacaacctggtacgccacctggatgcctgtgagaccatgggcaatgccacagccatctgctcagacaagacaggcacgctgaccaccaatcgcatgacagtggtacaggcctatgtcggcgacgtccactataaagagatccccgaccccagctccatcaacaccaagaccatggagctgctgatcaatgccatcgccatcaacagcgcctacaccaccaagattctgcccccagagaaggagggcgccctgcctcggcaggtgggcaacaagacggagtgcggcctgctgggcttcgtgctggacctgaagcaggactacgagcccgtgcgcagccagatgccagaggagaagttgtacaaagtgtacaccttcaactccgtgcgcaagtccatgagcactgtcatcaagctgcccgacgagagcttccgcatgtacagcaagggggcttctgagatcgtgctcaagaagtgctgcaaaatcctcaatggggcgggagagcctcgtgtcttccggccccgcgaccgggacgagatggtaaagaaggtgattgagcccatggcttgcgatgggctccgcactatctgcgtggcctaccgcgacttccccagcagcccggagccggactgggacaatgagaatgacatcctcaacgaactcacctgcatctgcgtggtgggcatcgaggacccggtgcggccagaggtcccagaagccatccgcaagtgccagcgggcaggcatcacggtccgcatggtcactggcgacaatatcaacacggctcgggccatcgccatcaagtgtggcatcatccatcctggggaggactttctgtgcctcgagggcaaggagttcaacaggaggatccgcaacgagaagggggagattgagcaggagcgaattgacaagatctggccaaagctgcgggtgctggctcgctcctccccaacggacaagcataccctggttaaaggcatcatcgacagcacacacactgagcagcggcaggtggtggccgtgacgggggacgggaccaacgacgggcctgcactcaagaaggccgacgtgggcttcgccatgggcatcgcaggcactgacgtggccaaggaggcctcagacatcatcctgacagacgacaatttcagcagcatcgtcaaggcagtgatgtggggccgcaacgtctatgacagcatctccaaattcttgcagttccagctcaccgtcaacgtggtggccgtgattgtggccttcacaggcgcctgcatcacgcaggactcccctctgaaggccgtgcagatgctctgggtgaacctcatcatggacacgtttgcctcgctggcactggccactgagccgcccacggagaccctgctgctgaggaagccgtacggccgcaacaagccgctcatctccaggaccatgatgaagaacatcctgggccatgctgtctaccagcttgccctcatcttcaccctgctctttgttggcgagaagatgttccagatcgacagcgggaggaacgcgcccctgcattcgccaccctcagaacattacaccatcatcttcaacaccttcgtcatgatgcagctcttcaacgagatcaacgcccgcaagatccacggcgagcgcaatgtctttgacggcatcttccggaaccccatcttctgcaccatcgtgctgggcacctttgccatccagatagtgatcgtgcagtttggagggaagccattcagctgctctccactgcagctggaccagtggatgtggtgcatattcattgggttaggagagctcgtttggggccaggtcatcgccaccatcccgaccagcagactcaagttcctcaaggaggcaggcaggctcacacagaaggaggagatcccggaggaggagctcaacgaggacgtggaggagatcgaccacgcggagcgggagctgcggcggggccagatcctgtggttccgaggcctgaatcggatccagacacagatccgcgtcgtgaaggcgttccgtagctctctctatgaaggtttagaaaagcctgaatctcgaacctccatccataacttcatggctcatcctgaattccggatcgaagattcccagccccacatccccctcattgatgacaccgacctggaagaagatgccgcgctcaagcagaactcgagcccgccgtcatccctcaacaagaacaacagcgccatcgacagtgggatcaacctgacgaccgacacaagcaaatcagctacctcttcaagtccagggagccccatccacagcctggagacgtcgctttagctgaggaccctctcgcctgcccgcccgccctcatggaccccgctgccacccgctttccgggcacccatccatccaggcacccaactcacccaagcagcaacgagcaacaatcggaaaccaaatactggagagaaaaccaacgtttccacccacagaccctttctctggctgcgatgctgtttgaactctttttcacttcaaggcaaggggcgggatctccactgggggcttacgggagtgagcggttttcccaaaacaagcccttcctggctcccacccagacatggaccagccatgcacccgcccagccaccacgtcccccgcatgaatgtactgtacactttcaatcctccccttgtttggtttttgggggttggggaggggtttttgtttgtttgtttgttttcttaggcgggaactgcaaacagactcttttctgagactatttatccaatccactggtctgtgagtttttgaaatgcttgcacagcatggtctcagttgtatagattaatttaataactttttgaaattgcagagcttaactcgcctagtagatttgcaccaatggaaccgaagaacttcatagacactcacaaggttatatccatttctttgtatctatatcaacgtatacttttccgagactgtatacgtccatatagataggtagatatatatatatatatataaatatatatacatggatatataaagtttctttgccggcatgttgccttgtttccgcttaaattgctctattttaacttatttatgtcctaaaagaagaatgtaatttgtttacaaacctgtagataacgtctttggctatttgtatggtttaagaacactggtggctgagatgctataaaaacagctcggcccaacagacacttcccctgggttgcatcctggatgttttatgatagccatgctctgatttttgcctgctatttccgttcaataatgtcactaccgtgagaggctcaggcagaagccaaatgctaccgagttgccatcctgaggggtttaacaacatgctccgtagacgaagggagaggaggagagaaggcttcctgggtttgcaacactaacggccatccggcccaaggatgccaggatctgcaaagcactgctcgaagacttttctctcaatgaaactcgcttgagtttactaagagcatttcaaaaataggttctctttggcactgtctgtacagagattgaggtagtgttgaaatattataaatggtattgtgttgatttttttttttatttagtaacttacaggtttgtttccttattaatggcagcatctgagctgttggcatattggatgaggatcagtatggcttgctgcttttatttttatttttgaagaagaatagcctttttctctgcactatttagatccgaatgaaccttatgatgtgtatattgagatgtactcagtgtgattttaaaccaaattgtcttcctgtagtcacaatatatactgtagccttttaacagcaagtcttgctttcccaaacagaaagccattctgaaaccctacagtatcacaggtgagaaaaggtggttattttttccccaagacaacagcactagtaatcccacttaataagagcttatttaattggatgtcagcctcttaactgctaagcactttgtgggtctcagcgtttttcataaaagaacttttgtatttaatacaaagtttgctttgagacttttcagcatatgatcttttttccataaacttgtacagtgcaaaagacattttgaataccatgatcgatgatgtcccatgcttcgaggaaaaccaaacactttccgcctctcttgcaaaatccattcctcatgctgaccctcctcacgatggctgtgtcagcccagccccttcccttctccaggcccagagaactcttccacaaacaagatgagagccactcgggaaaagagccatagtcaactgggagggcctacatctggatggcggtggaaaaacttgagggtttggggttcaaagtcagcccatcccacctggcaaaatcctcctggaaggaggaccttcaagagcgcatcacctgaatgtcgtgaagaagtatctctgaatgtatccaggagaggaactgcataaccaaaggggtgaccagccctcagatgtgcttattggattccagtacaaacgccaccaaagccagcccactgctctcctacaaggaaggaaagatctgcacgtgtaaaacatggggcagccttggaacatggtgttttttggagtttcctttctcacagttttccatctccccacttctttgatcagtcatgtgtccgtgacctcgttccatgacatcaggatagctgtgtttgcacaccatgctccatgttcattcggagccaggaggggttctcagtggagcctggcttagggaacagggagcgatggaagaatgccaacattagcgttggtcttctcttgtcaggaatgaaggatgcttgcacacatgcaccccctcactctcacacttgcacacatacacacacacacacacgaaatggttggtttgtcaaaactcactgtagtacataaagcttgcactctgcgtcctatatctagcagcatggggtacgtttggcagttcactccattagggggtaaataatttatgaccattcatctgtttttatgaatttttttatctagacaataatgtaaataaagaactcaccatctctgttcatttaatactatgcaatggttatgctttcaatcgctggctcttctgactcgtgcagtgtggttctgaaatgtttgtggtttaaaaaaaaaagcaaaaaacaacatcaaacagaacatagtaaatatatctgtaatgtatacttttttctactttgggactgcatcatccacatagcttcttttctgtcctctagacaagggctccaggagtaagtggcagatttggttctgagagctaagctcaccaacttgtctccccctcaacagatgagggaagggcagggagcccgttcagtgactcctggcgctgcagaatcactcatctttggaggtgagcagagagagctctgaggagtttccttcttgcaactcaggcggagctttctttaactcaggagcagcctccattgctcccgccaacccctcaccatggccccttgtccccttgtcccaaccatagcatagagatgacaagagagaggcagtcctatttctgagactggaccaattaaaatgactgcactggctcaaaggactctgaacctgtcttgtcctgggtcctccagttgttggaagccactcttttccccaaccatgctgaaatgccacctttaccacacactgatgtcttacatagacttagatctatttctggaacttctcttctcttcgcttacttgggtgtctcatctggcaccagccatacaattttaactattgtcaatttctaatgtcttattatgtggtgggatgagtcccttcactcttcttttacaaaatttcctagttattctctcacatctattcttccacataaactttaaattgtgcccagtcctccaccccctgtcccattcccacccccaaattctgggctctgtcattccctgtgccatcatcttccccccattgtaattactgtccactcagggctgtgaaatagactatgttctgtaaagagggacaaaaagggcatcctgatcttgagagaagcctgctgttcctcccatcatttcacctgccccctaagcccaggagttgtcatgagaggtcaccaggcccccactcaatctcagcttgggaaccaaagtcacccaccttggttgtgttggggtggacccgccatctgtccctggtccagacgagaaagaggagtctctcctaggcctggagctgggaaagaatgtgtggcccagttgtctgcacttctaattctcatcatggagaaacctttattcctatctccctttcctgaactggttttttgttgtttttgtttcattttgttttggggggatagtttcttgctctttaatttggagtctccagtacctttgggatgcaggcagttcttgcctgggccttctcggaaccctcactcccctagcccactcttgcgctacctgcaggaggctgccaacctggtgcattctgacaagcctcccacccaaatctctctcctgccattgtgtccaaaatcccaccattagaggctcttgtagggaagagcgtttcttgaaggcttttaggccttccagagccaggagggaagtcagacaatagcaggaagtccccaggccttttcaaagttccaaaccaagctctcctgattttaatgtagagatcataccaacccaggtgggggaggagggtccccagccccaggcagcagccatcaccccctccactgaaaacaatattggaggctgctttgggactgcccttctcagccccctaagtctgttttgtaatgcctgtggtgctctccctcctggacctttcctctcgggggtcaccacactttgctaactcttgtgtgcacatattttataatagagtagcgagggaatggtgccgcctccagcttccgtaagctgcccgggctctggggggctctgggacaatcggggctgggaagtgactgtgctcttattgtacactctttatttctctgtatctttggcttgtgctctttgtaattaatgggatttgtctgccttttcaacactatactgagcaataacaataaatgcacacgtggaaatgca

SEQ ID NO: 119920 - DNA, 3597 bp, Artificial Sequence
  derived and/or modified sequence
atgggcgacatgaccaacagcgacttctacagcaagaaccagagaaacgagagcagccacggcggcgagttcggctgcaccatggaggagctgagaagcctgatggagctgagaggcaccgaggccgtggtgaagatcaaggagacctacggcgacaccgaggccatctgcagaagactgaagaccagccccgtggagggcctgcccggcaccgcccccgacctggagaagagaaagcagatcttcggccagaacttcatcccccccaagaagcccaagaccttcctgcagctggtgtgggaggccctgcaggacgtgaccctgatcatcctggagatcgccgccatcatcagcctgggcctgagcttctaccacccccccggcgagggcaacgagggctgcgccaccgcccagggcggcgccgaggacgagggcgaggccgaggccggctggatcgagggcgccgccatcctgctgagcgtgatctgcgtggtgctggtgaccgccttcaacgactggagcaaggagaagcagttcagaggcctgcagagcagaatcgagcaggagcagaagttcaccgtggtgagagccggccaggtggtgcagatccccgtggccgagatcgtggtgggcgacatcgcccaggtgaagtacggcgacctgctgcccgccgacggcctgttcatccagggcaacgacctgaagatcgacgagagcagcctgaccggcgagagcgaccaggtgagaaagagcgtggacaaggaccccatgctgctgagcggcacccacgtgatggagggcagcggcagaatgctggtgaccgccgtgggcgtgaacagccagaccggcatcatcttcaccctgctgggcgccggcggcgaggaggaggagaagaaggacaagaaggccaagcagcaggacggcgccgccgccatggagatgcagcccctgaagagcgccgagggcggcgacgccgacgacagaaagaaggccagcatgcacaagaaggagaagagcgtgctgcagggcaagctgaccaagctggccgtgcagatcggcaaggccggcctggtgatgagcgccatcaccgtgatcatcctggtgctgtacttcaccgtggacaccttcgtggtgaacaagaagccctggctgcccgagtgcacccccgtgtacgtgcagtacttcgtgaagttcttcatcatcggcgtgaccgtgctggtggtggccgtgcccgagggcctgcccctggccgtgaccatcagcctggcctacagcgtgaagaagatgatgaaggacaacaacctggtgagacacctggacgcctgcgagaccatgggcaacgccaccgccatctgcagcgacaagaccggcaccctgaccaccaacagaatgaccgtggtgcaggcctacgtgggcgacgtgcactacaaggagatccccgaccccagcagcatcaacaccaagaccatggagctgctgatcaacgccatcgccatcaacagcgcctacaccaccaagatcctgccccccgagaaggagggcgccctgcccagacaggtgggcaacaagaccgagtgcggcctgctgggcttcgtgctggacctgaagcaggactacgagcccgtgagaagccagatgcccgaggagaagctgtacaaggtgtacaccttcaacagcgtgagaaagagcatgagcaccgtgatcaagctgcccgacgagagcttcagaatgtacagcaagggcgccagcgagatcgtgctgaagaagtgctgcaagatcctgaacggcgccggcgagcccagagtgttcagacccagagacagagacgagatggtgaagaaggtgatcgagcccatggcctgcgacggcctgagaaccatctgcgtggcctacagagacttccccagcagccccgagcccgactgggacaacgagaacgacatcctgaacgagctgacctgcatctgcgtggtgggcatcgaggaccccgtgagacccgaggtgcccgaggccatcagaaagtgccagagagccggcatcaccgtgagaatggtgaccggcgacaacatcaacaccgccagagccatcgccatcaagtgcggcatcatccaccccggcgaggacttcctgtgcctggagggcaaggagttcaacagaagaatcagaaacgagaagggcgagatcgagcaggagagaatcgacaagatctggcccaagctgagagtgctggccagaagcagccccaccgacaagcacaccctggtgaagggcatcatcgacagcacccacaccgagcagagacaggtggtggccgtgaccggcgacggcaccaacgacggccccgccctgaagaaggccgacgtgggcttcgccatgggcatcgccggcaccgacgtggccaaggaggccagcgacatcatcctgaccgacgacaacttcagcagcatcgtgaaggccgtgatgtggggcagaaacgtgtacgacagcatcagcaagttcctgcagttccagctgaccgtgaacgtggtggccgtgatcgtggccttcaccggcgcctgcatcacccaggacagccccctgaaggccgtgcagatgctgtgggtgaacctgatcatggacaccttcgccagcctggccctggccaccgagccccccaccgagaccctgctgctgagaaagccctacggcagaaacaagcccctgatcagcagaaccatgatgaagaacatcctgggccacgccgtgtaccagctggccctgatcttcaccctgctgttcgtgggcgagaagatgttccagatcgacagcggcagaaacgcccccctgcacagcccccccagcgagcactacaccatcatcttcaacaccttcgtgatgatgcagctgttcaacgagatcaacgccagaaagatccacggcgagagaaacgtgttcgacggcatcttcagaaaccccatcttctgcaccatcgtgctgggcaccttcgccatccagatcgtgatcgtgcagttcggcggcaagcccttcagctgcagccccctgcagctggaccagtggatgtggtgcatcttcatcggcctgggcgagctggtgtggggccaggtgatcgccaccatccccaccagcagactgaagttcctgaaggaggccggcagactgacccagaaggaggagatccccgaggaggagctgaacgaggacgtggaggagatcgaccacgccgagagagagctgagaagaggccagatcctgtggttcagaggcctgaacagaatccagacccagatcagagtggtgaaggccttcagaagcagcctgtacgagggcctggagaagcccgagagcagaaccagcatccacaacttcatggcccaccccgagttcagaatcgaggacagccagccccacatccccctgatcgacgacaccgacctggaggaggacgccgccctgaagcagaacagcagcccccccagcagcctgaacaagaacaacagcgccatcgacagcggcatcaacctgaccaccgacaccagcaagagcgccaccagcagcagccccggcagccccatccacagcctggagaccagcctgtag

SEQ ID NO: 119921 - protein, 1205 aa, Artificial Sequence
  derived and/or modified sequence
MTNPSDRVLPANSMAESREGDFGCTVMELRKLMELRSRDALTQINVHYGGVQNLCSRLKTSPVEGLSGNPADLEKRRQVFGHNVIPPKKPKTFLELVWEALQDVTLIILEIAAIISLVLSFYRPAGEENELCGQVATTPEDENEAQAGWIEGAAILFSVIIVVLVTAFNDWSKEKQFRGLQCRIEQEQKFSIIRNGQLIQLPVAEIVVGDIAQVKYGDLLPADGILIQGNDLKIDESSLTGESDHVKKSLDKDPMLLSGTHVMEGSGRMVVTAVGVNSQTGIILTLLGVNEDDEGEKKKKGKKQGVPENRNKAKTQDGVALEIQPLNSQEGIDNEEKDKKAVKVPKKEKSVLQGKLTRLAVQIGKAGLLMSALTVFILILYFVIDNFVINRRPWLPECTPIYIQYFVKFFIIGITVLVVAVPEGLPLAVTISLAYSVKKMMKDNNLVRHLDACETMGNATAICSDKTGTLTMNRMTVVQAYIGGIHYRQIPSPDVFLPKVLDLIVNGISINSAYTSKILPPEKEGGLPRQVGNKTECALLGFVTDLKQDYQAVRNEVPEEKLYKVYTFNSVRKSMSTVIRNPNGGFRMYSKGASEIILRKCNRILDRKGEAVPFKNKDRDDMVRTVIEPMACDGLRTICIAYRDFDDTEPSWDNENEILTELTCIAVVGIEDPVRPEVPDAIAKCKQAGITVRMVTGDNINTARAIATKCGILTPGDDFLCLEGKEFNRLIRNEKGEVEQEKLDKIWPKLRVLARSSPTDKHTLVKGIIDSTVGEHRQVVAVTGDGTNDGPALKKADVGFAMGIAGTDVAKEASDIILTDDNFTSIVKAVMWGRNVYDSISKFLQFQLTVNVVAVIVAFTGACITQDSPLKAVQMLWVNLIMDTFASLALATEPPTESLLKRRPYGRNKPLISRTMMKNILGHAFYQLIVIFILVFAGEKFFDIDSGRKAPLHSPPSQHYTIVFNTFVLMQLFNEINSRKIHGEKNVFSGIYRNIIFCSVVLGTFICQIFIVEFGGKPFSCTSLSLSQWLWCLFIGIGELLWGQFISAIPTRSLKFLKEAGHGTTKEEITKDAEGLDEIDHAEMELRRGQILWFRGLNRIQTQIKVVKAFHSSLHESIQKPYNQKSIHSFMTHPEFAIEEELPRTPLLDEEEEENPDKASKFGTRVLLLDGEVTPYANTNNNAVDCNQVQLPQSDSSLQSLETSV

SEQ ID NO: 119922 - DNA, 3618 bp, Artificial Sequence
  derived and/or modified sequence
atgacaaacccctcagaccgtgttctcccagccaattcaatggcggaatccagagaaggcgatttcggatgtaccgtgatggaactgcggaaactgatggaattaaggtcccgggacgctttgacccagattaatgtgcactatgggggcgtacagaacctctgtagcaggttgaagacatcacccgtcgaggggttgtcgggcaatcctgcagacctcgaaaagcgccggcaggtattcggccacaacgtcatccccccaaaaaaaccgaagaccttcctggaacttgtgtgggaagctctgcaggatgtcacgcttattattttggaaatcgccgccatcatttccttggtgctgagtttctataggccagcgggagaggaaaacgaactctgcggccaggtcgcaactaccccagaggatgagaacgaggcgcaggcaggttggatagagggggccgctatcctcttttcggtgattatagtggtccttgtcactgcctttaatgactggtcaaaggaaaaacagttccgggggttgcaatgtcgaatagagcaggaacagaaatttagcatcatccgcaacggtcaactcatccaactgcccgtggccgagattgtggtcggagacattgcccaggttaagtacggagacctgttgcctgctgacggcatcctgatacaagggaatgatctcaagatcgacgaaagctctctcactggcgagtcagatcatgtaaaaaagtctcttgacaaggaccctatgctcttgagtggtacccatgtcatggaaggtagcggacgtatggttgtgacagccgtcggcgttaactcccaaacaggcatcattctcacgcttctcggtgtaaacgaagacgacgagggtgaaaaaaagaaaaaaggcaagaagcagggtgtcccggagaacaggaataaggccaagacacaggatggcgtggcgctggagatccagccactgaacagccaggaggggatcgataacgaagagaaggacaagaaagctgtgaaggtgccaaaaaaagaaaaatccgtcctccaaggcaaactgactcgtctggccgtgcagattggcaaggccggactcctcatgagcgccctcactgtgtttattctgattctttactttgtcatcgacaactttgtcatcaacaggcgtccctggctcccagagtgcactccaatttacatccagtattttgtcaagttcttcataatcggaatcacagtgctggtggtggccgtccctgagggactacccttggccgtgacgatctccttggcttatagtgtgaagaagatgatgaaggataacaacctcgtgcggcatctggatgcctgcgaaaccatgggcaatgctaccgctatttgttcggataaaacagggaccctgactatgaaccgcatgactgtggtgcaagcctacatcggaggcattcattaccggcagatacctagcccagacgttttccttccaaaggtcttggacctgattgtgaacggcatcagcatcaatagcgcatacactagcaaaatcctcccaccagaaaaagaagggggtttgccacgccaggtgggaaataagacagagtgcgcccttttgggattcgtgacagatctgaagcaggactaccaagccgtgaggaatgaggtgcctgaggaaaagctgtataaagtttatacatttaattcagtgcgcaagagtatgtcgactgtgattcgaaatccaaacggggggttccgcatgtacagtaagggagctagcgaaataattctgcggaagtgcaataggattttagaccgtaagggtgaggccgttccatttaaaaataaggatagggacgacatggtcaggacagtcatcgagcctatggcttgcgacggtctgaggaccatttgtattgcttaccgcgatttcgacgacactgagccaagttgggacaatgagaacgagatcttgacggaattgacctgtatcgcagtggtgggaattgaagacccagtcaggcccgaggtccctgatgccatcgctaagtgtaaacaagcaggcatcaccgtgcgtatggtcaccggggacaacatcaacacggccagagccatagccactaaatgcgggattctaactcccggagacgattttctctgcctggagggaaaggagtttaacaggctgatcaggaatgaaaagggcgaggtagaacaggaaaagttggacaagatctggcccaagctgcgcgtcctagcgcgaagttcacctactgacaagcatacacttgtaaagggcatcatcgacagcaccgtgggggagcaccgccaagttgttgccgttactggagacggcaccaacgatgggccggctttaaagaaggccgatgtcggattcgctatggggatcgccgggactgatgttgcaaaagaggctagtgacatcatactgacagatgataacttcacctccattgtaaaagcagtcatgtggggacgcaatgtctacgattcaatctcaaagtttctccaattccagctgacggtgaatgtcgttgccgtaatcgttgcttttaccggggcatgcatcacccaggattccccacttaaagcagtacaaatgctgtgggttaacttgataatggacacattcgcaagtttagcattggccaccgagcctccgacggagagcctactcaagagaagaccctatggtagaaataagcctctgatctcacggaccatgatgaaaaatatactcggacacgcgttctaccagctgattgttatttttatacttgttttcgctggggagaagtttttcgacattgatagcggtcgcaaggctccacttcatagcccgccctcacagcactatacaattgtctttaatactttcgttctcatgcagctatttaacgagatcaatagccggaagatccacggggagaagaacgttttttctggaatttatcggaacatcatcttctgtagcgtagtgttgggcacattcatttgtcaaattttcatcgtcgagttcggggggaagcccttttcttgcacttcactgtcattgtcgcaatggctttggtgtctatttattggcataggagagctgctgtggggccaatttatcagtgcaatccccacacgcagtttaaagtttttgaaagaggcaggacatggcactacaaaggaagagatcaccaaggacgcagaaggcctggacgagatagatcacgccgagatggaattgcgaagaggccagatactttggtttcgtggccttaaccggatccaaacccagatcaaagtagtcaaagcctttcatagctccctccacgagtccattcagaagccttacaaccagaagtccattcactcctttatgacccacccagagttcgctatagaagaagaactgccccgcacaccgctgctggatgaggaggaagaggaaaacccagataaagccagcaagttcggtacccgggtcctgctgttggatggcgaggtgactccctacgcgaacacaaacaataatgccgtggactgtaatcaggtccagctacctcaatccgatagcagcctccagtccttagagaccagtgtctag

SEQ ID NO: 119923 - DNA, 354 bp, Artificial Sequence
  derived and/or modified sequence
tagggcggaaagccgttctcgtgcacctctctcagcctgagccagtggctttggtgtttgttcatcgggatcggtgaattgttgtggggacagtttatttccgccattcccactaggagtctgaaattccttaaggaagccgggcacgggacaaccaaagaggagatcaccaaggatgccgaggggttggacgagattgatcacgcggaaatggagctgagaagaggccagatactatggtttcggggtctgaacaggatacagactcagcatctcctacaggactctgacctgttgcccgacaaggaggaagccataatcagcagtagtttgttcccttcatgtaatttttag

SEQ ID NO: 119924 - DNA, 3618 bp, Artificial Sequence
  derived and/or modified sequence
atgaccaaccccagcgacagagtgctgcctgccaacagcatggccgagagccgggagggggactttggctgcaccgtgatggagctgaggaagctgatggagctgcggagcagagatgccctgacccagatcaacgtgcactacggcggcgtgcagaacctgtgcagccggctgaagaccagccctgtggagggcctgagcggcaacccagctgacctggagaagaggcggcaggtgtttggccacaacgtcatcccccccaagaagcccaagaccttcctggagctggtgtgggaggccctgcaggatgtgaccctcatcatcctggagattgctgccatcatcagcctggtgctgtccttctacagacctgctggggaggagaatgagctgtgtggccaggtggccaccaccccagaagatgaaaatgaggcccaggccggctggattgagggcgccgccatcctcttcagcgtcatcatcgtggtgctggtgacagccttcaatgactggagcaaggagaagcagttccggggcctgcagtgccgcatcgagcaggagcagaagttcagcatcatcagaaatggccagctgatccagctgcctgtggccgagatcgtggtgggggacatcgcccaggtgaagtacggggacctgctgcctgcagatggcatcctgatccagggcaatgacctgaagattgatgagagcagcctgaccggggagagtgaccacgtgaagaagagcctggacaaggaccccatgctgctgagcggcacccacgtgatggagggcagcggccgcatggtggtgacagctgtgggcgtgaacagccagacaggcatcatcctgaccctgctgggcgtgaatgaagatgatgaaggagagaagaagaagaagggcaagaagcagggcgtgcctgagaacagaaacaaggccaagacccaggatggagtggccctggagatccagcccctgaacagccaggagggcatcgacaatgaggagaaggacaagaaggctgtgaaggtgcccaagaaggagaagtctgtgctgcagggcaagctgacccggctggccgtgcagatcggcaaggccggcctgctgatgtctgccctgaccgtcttcatcctgatcctgtacttcgtcatcgacaactttgtgatcaacagaagaccctggctgcctgaatgtacccccatctacatccagtactttgtgaagttcttcatcatcggcatcaccgtgctggtggtggccgtgcctgagggcctgcccctggccgtgaccatcagcctggcctacagcgtgaagaagatgatgaaggacaacaacctggtgcgccacctggatgcctgtgagaccatgggaaatgccacagccatctgcagcgacaagacaggcaccctgaccatgaacaggatgacagtggtgcaggcctacatcggcggcatccactaccggcagatccccagcccagatgtgttcctgcccaaggtgctggacctgattgtgaatggcatcagcatcaacagcgcctacaccagcaagatcctgcccccagagaaggagggcggcctgccccggcaggtgggcaacaagacagaatgtgccctgctgggctttgtgacagacctgaagcaggactaccaggccgtgagaaatgaggtgcctgaggagaagctgtacaaggtgtacaccttcaacagcgtgaggaagtccatgagcaccgtcatccggaaccccaatggaggcttcaggatgtacagcaaaggagccagcgagatcatcctgaggaagtgcaaccgcatcctggacaggaagggggaggccgtgcccttcaagaacaaggacagagatgacatggtgaggacagtgattgagcccatggcctgtgatggcctgcggaccatctgcatcgcctacagagactttgatgacacagagcccagctgggacaatgaaaatgagatcctgacagagctgacctgcatcgctgtggtgggcattgaagatcctgtgcggcctgaggtgcctgatgccatcgccaagtgcaagcaggccggcatcaccgtgaggatggtgactggagacaacatcaacacagcccgggccatcgccaccaagtgtggcatcctgaccccaggagatgacttcctgtgcctggagggcaaggagttcaacagactcatcagaaatgaaaaaggagaggtggagcaggagaagctggacaagatctggcccaagctgcgggtgctggcccggagcagccccacagacaagcacaccctggtgaagggcatcatcgacagcacagtgggggagcaccggcaggtggtggccgtgactggagatggcaccaatgatggccctgccctgaagaaggcagatgtgggctttgccatgggcattgctggaacagatgtggccaaggaggccagtgacatcatcctgacagatgacaacttcaccagcatcgtgaaggctgtgatgtggggcagaaatgtgtatgacagcatcagcaagttcctgcagttccagctgactgtgaatgtggtggccgtcatcgtggccttcaccggggcctgcatcacccaggacagccccctgaaggctgtgcagatgctgtgggtgaacctgatcatggacacctttgccagcctggccctggccacagagcccccaacagagagcctgctgaagaggcggccctatggaagaaacaagcccctcatcagcaggaccatgatgaagaacatcctgggccacgccttctaccagctgattgtcatcttcatcctggtgtttgctggggagaagttctttgacatcgacagcggcaggaaggcccccctgcacagcccccccagccagcactacaccatcgtgttcaacacctttgtgctgatgcagctgttcaatgagatcaacagcaggaagatccacggggagaagaatgtgttttctggcatctacagaaacatcatcttctgcagcgtggtgctgggcaccttcatctgccagatcttcatcgtggagtttggaggcaagcccttcagctgcaccagcctgagcctgagccagtggctgtggtgcctcttcatcggcattggagagctgctgtggggccagttcatcagcgccatccccaccaggagcctgaagttcctgaaggaggccggccacggcaccaccaaggaggagatcaccaaggatgctgagggcctggatgaaattgaccacgccgagatggagctgcggcggggccagatcctgtggttccggggcctgaaccgcatccagacccagatcaaggtggtgaaggccttccacagcagcctgcacgagagcatccagaagccctacaaccagaagagcatccacagcttcatgacccaccctgagtttgccatcgaggaggagctgcccaggacccccctgctggatgaggaggaggaggagaacccagacaaggccagcaagtttggcaccagggtgctgctgctggatggagaggtgaccccctatgccaacaccaacaacaatgctgtggactgcaaccaggtgcagctgccccagagcgacagcagcctgcagagcctggagacctctgtgtag

SEQ ID NO: 119925 - DNA, 354 bp, Artificial Sequence
  derived and/or modified sequence
tgaggaggcaagcccttcagctgcaccagcctgagcctgagccagtggctgtggtgcctcttcatcggcatcggggagctgctgtggggccagttcatcagcgccatccccaccaggagcctgaagttcctgaaggaggccggccacggcaccaccaaggaggagatcaccaaggatgctgagggcctggatgaaattgaccatgctgagatggagctgcggcggggccagatcctgtggttccggggcctgaaccgcatccagacccagcacctgctgcaggacagcgacctgctgcctgacaaggaggaggccatcatcagcagcagcctcttccccagctgcaacttctag

SEQ ID NO: 119926 - DNA, 3618 bp, Artificial Sequence
  derived and/or modified sequence
atgaccaaccccagcgaccgggtgctgcccgccaacagcatggccgaaagcagagagggagatttcgggtgcaccgtgatggagctccgcaagctcatggagctccgtagccgtgacgccttaactcaaatcaatgtgcactatggaggcgttcagaatttgtgttcacgcctgaagacttcccctgtagaagggttgtcagggaaccccgctgacctggagaagagacggcaggtcttcggacacaatgtgataccacccaagaagcctaaaacatttctggagcttgtgtgggaagcacttcaagatgtgacactgatcattctagaaatagcggccatcatctctctggttctatcattctatcgcccagcaggcgaagaaaacgaactttgtgggcaagtggcgaccactcccgaggatgaaaatgaggctcaggcaggctggattgaaggggctgccatcctcttttcagttattatcgtagtgctcgttacggctttcaacgattggagcaaagaaaagcagtttagaggccttcagtgcagaattgagcaggagcaaaagttcagtattatccgaaatgggcagctaatccaactcccggttgctgaaattgttgtcggtgatatcgcccaggtgaagtatggagatttattaccagccgacggtatccttattcaaggcaacgaccttaagatcgacgaaagcagcctaacaggcgaatccgaccacgtgaagaagagtttagataaggatccaatgctcctgagcggcacacacgtgatggagggaagcgggagaatggtagttacggccgtcggtgtgaacagccagaccgggattatcctgaccctgctgggggtgaatgaagacgatgaaggtgagaagaagaagaagggaaaaaagcaaggagtgccagagaaccggaacaaggctaaaacacaggacggcgtcgctttggagatccaacccttgaacagtcaggaagggattgacaacgaggagaaggataagaaggccgttaaggtgcctaagaaggagaagtcagtgttgcaggggaagctgaccagactggccgttcagattggcaaagctgggctgctcatgtcagccttaaccgtttttattctcatactgtacttcgtgattgacaatttcgtcatcaatcgacgcccttggttgccagaatgtaccccaatctacattcagtactttgtcaaattcttcatcatcggaattactgtattggtcgtggccgttcccgagggcctccccttggcggtcacaatctccctggcatactctgtgaaaaagatgatgaaagacaataacctcgtcagacacctggatgcctgcgaaactatgggtaacgccacagcaatttgctctgataaaaccggcaccctcaccatgaataggatgaccgtggtgcaggcatatataggcgggatccattatcggcagatccccagtccagatgtgttcctcccgaaggtgctggacctaatcgtgaacggaatttctattaattctgcgtacacgtcaaagatccttccacctgagaaagagggaggcttgcctcgacaggtcggaaataagacagagtgtgcccttctgggttttgtgacagacctcaagcaggattaccaagcggtgcgcaatgaggtgcccgaggagaagctgtataaagtatacacttttaattctgtgcgcaagtctatgtcaactgtgatcagaaatccgaatggtggattcagaatgtattcaaagggcgcctccgagattattctgaggaagtgtaataggatcctagatcgcaagggagaggctgtgccgtttaaaaataaggatagggacgacatggtgagaaccgtgattgagcccatggcttgcgacggcctgaggaccatctgtattgcctacagggacttcgacgacaccgagccatcttgggacaatgaaaacgagattttgactgagctcacttgtattgcagtggtgggtatcgaggatccggtgagacccgaggtcccggacgcaatcgccaagtgtaagcaggccggcattacggtgcggatggttaccggcgacaatatcaataccgcacgcgcaattgctacgaagtgcgggatcctcacacccggggacgactttctatgcctggaaggtaaagaattcaatagactaatccggaatgaaaagggagaggtggagcaggaaaaactggacaagatttggcctaaactgagggtgctcgcgagaagctcccccaccgacaagcacacactggtaaaggggattatcgacagcacagtgggggaacacagacaagtagtggccgtcaccggtgatggcacaaatgacggacccgccctcaagaaagctgatgttgggttcgcaatgggcatcgcggggacagacgtcgctaaagaggcctccgacataatcctgaccgatgacaatttcaccagcatcgtgaaagctgtgatgtggggacgtaatgtctatgactctatcagcaaatttcttcagtttcaactaacggtcaatgttgtagctgtgattgtggccttcactggtgcctgcataactcaggactccccgctcaaagcagtgcagatgctctgggtgaaccttattatggatacattcgcgagcctggccctcgcaactgaaccacccacagagagcttgttgaaaaggcgaccctacggtcgcaacaagcccttgatttcaagaacaatgatgaagaacatactaggacatgctttctatcagttaattgtcatcttcatcctggtgttcgcgggcgagaagttctttgacatcgacagtgggagaaaggcccctctccactctcctccgagccagcactacacaatcgtgttcaacacattcgttttaatgcaactgtttaatgaaatcaactcccgaaagatacatggcgagaaaaacgtgttcagcgggatttaccggaacattatcttctgttccgtggtgctgggcacatttatttgtcagatcttcatcgtggagtttgggggcaagccattcagctgtacttctctctcccttagccagtggctttggtgccttttcattggcattggggaactcctatggggtcaattcatttctgctatacccactcggtctctcaaatttctgaaagaggccgggcacgggaccaccaaggaggagatcacgaaggatgccgagggacttgatgagatcgaccatgcagagatggagctacggagaggccaaatcctttggtttcggggtctgaatcgcattcagacacagatcaaagtggtaaaagccttccatagctcgcttcatgagagtatccaaaaaccctacaatcaaaaaagcattcattcgtttatgacacatcctgagttcgcgatcgaggaggagcttccgagaacacctcttctggatgaagaggaggaggagaacccagacaaagcaagcaagttcgggactagagtccttctcctcgacggagaagtaacaccctatgccaatacaaacaacaatgccgtagactgcaaccaggtccagctgccccagagcgattcaagcctccagagtctggagaccagcgtgtag

SEQ ID NO: 119927 - DNA, 354 bp, Artificial Sequence
  derived and/or modified sequence
tgaggcggcaagcccttcagctgcaccagcctgagcctgagccagtggctatggtgcctgttcattggcataggcgaattgctgtggggccagtttatctcagcgatccccactaggagcctcaaatttttaaaggaagccggtcatggcaccacaaaggaggaaattacaaaggacgcagagggcctcgacgagattgaccacgctgaaatggagctgaggcggggacaaatcctgtggtttagaggcctaaaccgcattcagacacagcacttgctacaggacagcgacctgctcccagataaggaagaggccattatctcctcaagtctcttcccttcctgcaacttctag

SEQ ID NO: 119928 - DNA, 3618 bp, Artificial Sequence
  derived and/or modified sequence
atgaccaatccctctgacagggtactgcccgcaaacagcatggccgaatcgcgggaaggcgactttggatgtactgtcatggagctcaggaaactcatggaactgcgctccagggacgccctcacccagattaacgtgcactacgggggagtccagaacctttgcagccgtctgaagaccagccccgtagaagggctatcagggaacccagcagatttagagaagcggaggcaagtttttgggcataacgtgatcccaccaaagaaaccaaagacgttcctggagttggtgtgggaggccctacaggacgtcacgctcataatcttagagattgccgctatcatcagcctcgtcctctccttctatagacccgctggggaggaaaatgagctctgcgggcaggtggctaccacaccagaagacgagaacgaggcccaagctggctggattgagggtgccgctatcttgttttccgttataattgtcgttttggtgaccgccttcaacgactggagcaaagagaagcagtttcggggactccagtgtaggattgagcaggagcaaaagttttcaattatccggaatgggcagttgattcagctgcccgtggctgaaatcgtcgttggcgatatcgcccaggtgaagtatggagatctgcttcccgctgatggaatcctgatccaggggaacgatcttaaaattgacgagagtagcctgaccggagagagcgatcatgttaaaaaatccctagataaggatcctatgctattgtcgggaacgcacgtgatggaggggagcggcagaatggtggtgacagcagtgggtgtcaactcccagaccgggatcatactcaccctgctaggagttaatgaggatgacgaaggtgaaaagaagaagaagggtaagaaacagggggtgcctgagaataggaacaaagccaaaacacaggatggagtcgctctggaaatccagccccttaatagccaggaggggattgataacgaggaaaaagacaagaaggcagtgaaagtcccaaagaaggaaaagtcagtcctacaagggaagctgacccgcctggccgtacagatcgggaaggccggacttttaatgtcagcactgactgtcttcattctgattctgtactttgttatagataacttcgtcatcaaccggagaccctggctgccagagtgcacgcccatctacatccagtatttcgtgaaatttttcattattggaattactgtcctggttgtggccgtgccagagggcctccctttggccgtgaccatctccctggcttattctgtaaagaagatgatgaaggacaacaacctggtgcggcacctggacgcttgtgaaactatgggcaatgcaactgcaatttgttctgataagacgggaaccttaactatgaaccgaatgacagtagtgcaagcctatataggcggaattcactaccgacagatccccagtcccgacgtctttctccccaaagtgcttgacctcattgtcaatggaatctcaatcaactcagcttatacatctaaaatcctgccacccgaaaaagaaggcggactgcctagacaggtaggtaataagactgaatgcgcgctcctgggttttgttacggatttaaaacaagactatcaggctgttcgcaacgaggtgcccgaggagaagctgtataaggtttacaccttcaacagtgtacgtaaaagtatgagcacagtgatccgcaaccccaatggcggatttcggatgtattccaaaggcgctagtgaaattatcctccgtaagtgtaatcgcattctggatcgtaagggagaagccgtcccttttaagaacaaagaccgcgacgacatggttagaacagtgattgaaccaatggcctgcgatgggctccgcaccatttgcattgcctatagagactttgacgacactgaaccatcctgggacaacgaaaacgagatcctaaccgagttgacatgcattgcggtggtgggtatagaagacccagtaaggccagaagtgcctgacgccattgccaagtgcaaacaagctggcattaccgtccgcatggttaccggggacaacataaataccgcacgggctatagccacgaagtgtggcattctcaccccaggggacgatttcctgtgccttgaaggcaaggagtttaatcgtttaatacgtaacgagaagggtgaggtggaacaggagaaacttgacaaaatttggcctaagctgcgcgtgctggccagatcttccccaacagacaaacatacacttgttaagggtatcattgatagtactgtgggcgagcatcggcaggtggtcgccgtgaccggtgacggtacaaatgacgggcctgctctgaagaaagctgacgtgggtttcgccatggggatcgcagggaccgatgttgccaaagaagccagcgatattattctgactgatgataatttcacttctatagtgaaggcagtgatgtggggacgaaacgtatatgattcaatttctaagtttctgcagtttcagcttactgtgaatgttgttgctgtcatagttgcgtttacaggagcttgtatcactcaggattccccactgaaagccgttcagatgttgtgggttaacttgattatggacacttttgcctcactcgcccttgccacagagccaccaaccgaaagtctgctgaaacgacggccatacggcagaaacaagcccctgatctctaggactatgatgaagaatattttgggccatgccttttatcagctgatagtaatcttcattctcgtgttcgcgggtgagaaattcttcgatatcgacagcggtagaaaggctcccctacatagcccaccgtcacagcactacactatcgtttttaacacgtttgtcctgatgcagttattcaacgaaatcaattctagaaagatccacggtgaaaagaacgttttctctggcatttatcgcaacataatattttgcagcgtcgttttgggaacctttatctgtcagatctttattgtggagttcggcggaaaacctttttcgtgcacctccttaagcctgagtcagtggttgtggtgtctattcatcggcatcggggaactactttggggtcagtttatcagcgcgatccctactagatccttaaagtttctcaaagaggccggacatggaacgaccaaggaagagatcaccaaggatgccgaggggctggatgagattgaccatgctgaaatggaacttcggcgaggacagatcctttggtttagaggcctcaataggattcagacccagatcaaagttgttaaagcctttcactctagtttgcacgagtccattcagaaaccttacaaccagaaaagcatccactcttttatgacccaccctgagtttgcaatcgaggaggaactgccgagaactccgctcctggacgaagaggaggaggaaaaccctgacaaggcctccaagttcggtaccagggtactcctgctcgacggcgaggtgactccttatgcgaacaccaacaacaatgcagtggactgcaaccaggtgcagctcccacagagtgacagttctttgcagtcactcgagactagtgtgtag

SEQ ID NO: 119929 - DNA, 354 bp, Artificial Sequence
  derived and/or modified sequence
tgaggcggaaagcccttcagttgcacctcgttgtctttatcccaatggctgtggtgtttatttatcggaatcggcgaattgctgtggggccagttcatctcagccatacccacacgcagcttaaaatttctcaaggaggccggacacggcacaacgaaagaggagattacaaaagatgcagaaggattggacgagattgatcatgccgagatggagctcaggcgcggacagattctgtggttccgcggattgaaccggatccaaactcagcacttgctccaagacagcgacttgctccccgacaaagaagaagccatcatctctagcagcctgtttcctagctgcaacttctag

SEQ ID NO: 119930 - DNA, 8968 bp, Artificial Sequence
  derived and/or modified sequence
caccctcacccctcctccacccctactcagctttctattcaacaagtgagagcaagggcggggaagaaagccgacaggggagaggattgcttccctttcttttcccattcccccttaagacgaaccaggaagtaaccgcaagaatcgggccaccttaacagtagagtaatggtttggcctcgcgccaagtcccacctctgttccagctcctgctcctcccctctctcttcccgcactgcttggggagagctggtgagcaagagtctggcccgagttagctagagctgttgccatgacaagcattttcttaagaaagctctgctgttgagatcgtccaaagctgggggctgggagggggggcacgaacttcgtggggcaccatccctccgaagagagcaagatcagagacacccgcccagctctcctgcaccctttttctttcaggaacctgagaggtccttcccattggaggggcagggggaggagacccagcccactccccggccttagccagaaaggcaagagagcaaagccagcgtctctagcttggttgccacactggggagactggtgggtggtcaccccaccctaccctcatccatggaaacccggagggagagtcccgcctgaagaaacctggatctttgctagaaagagagagatccagttgtcatcggtatccaggaagctctcctcttcctcctcctgacgtctactactacagttgctggttgttgctaaggttgctgccatggtaacatgcacatcctgtttacaccttcatctgggcaagttggtctaagctaggaacctacctaccctggacaactactatcatcaccacctggggacaccaatcatcgtgacacggagtccaccttccactcagttcccccatcctcttcctcctctcgctgccagacttcatacggaagaaaggatctagacttcggacggctactcgggagcttattgcacaagatatattcaatctattccctcactgggcccccagagaagcaagaagtaggaagaagttgagacagggaggcaggagacactggtcagttgaagggaaacgctacatcttctctggttgaggggcttggtaacagcaggcaaaatgacgaacccatcagaccgtgtcttgcctgccaactcgatggccgagagccgtgaaggggactttggctgcacagtaatggaactgaggaagctcatggagctgcgttcaagggatgcactgacccagattaatgtccactatggaggtgtacagaatctctgcagtagactgaaaacctcccctgtggaaggtctgtctgggaaccctgcagatctggagaaacgtaggcaggtgtttggacacaacgtgatcccccccaaaaagcccaagactttcttagaattagtgtgggaagctcttcaagatgtcacgcttatcatcctggagattgcagccatcatctccctggtcctgtccttttatcgccctgctggtgaagaaaatgaactgtgtggtcaagtcgcaactaccccagaagatgaaaatgaggcacaagctggctggattgagggggcagccatccttttctcagtgatcatcgtggtgttagtgactgcctttaatgattggagcaaagagaagcaattccgggggctgcagtgccgcattgaacaggagcaaaagttctccatcatccgaaacggtcaactcatccagctccctgtggctgagattgtggttggtgatattgcccaagtcaaatacggtgatctgctgcctgcagatggaatcctgatccaagggaatgatctgaagattgatgagagctctctgacaggggaatctgaccatgtcaagaagtccctggacaaagaccccatgttgctctcagggacccatgtcatggaaggttctggccggatggtggtgacagctgttggtgtcaactctcagactggaatcatccttactctcttgggggtcaatgaggatgacgaaggggagaaaaagaagaaaggtaaaaaacaaggagtccctgaaaatcgcaacaaagcaaagacccaagacggagtggccctggaaatccagccactcaacagccaggagggaatcgacaatgaggaaaaggacaagaaggcagtcaaggtgcctaaaaaggagaagtcagtgctgcagggcaagctgactcgcctggctgttcagattgggaaagccggtctgctcatgtctgctctcacggttttcatcctgattctatactttgtgattgacaactttgtgataaatcgcagaccatggctccctgagtgtactcccatctacatccagtactttgtcaagttcttcatcatcggcatcactgtactggtggtggctgtgccagaggggctgcctctggctgtcaccatctcactggcctactctgtgaagaaaatgatgaaagacaataacctagtacggcacttggatgcttgtgagaccatgggcaacgccaccgccatctgctctgataagacaggcacgttgaccatgaaccgcatgactgtggtacaagcttatattgggggcatccattaccgtcaaatcccaagccctgatgtcttcctgcccaaagtcctggacctcattgtcaatggcatttctatcaacagtgcttatacctccaagattctgcctccagagaaggagggaggcctgcctcggcaggtgggcaacaagaccgagtgtgctctgctaggctttgtcacagatctgaagcaggattatcaggctgtgcgtaatgaagtgcccgaggagaagctctacaaggtgtacacctttaactcagtgcgcaagtcaatgagcaccgtcatcaggaatcccaacggtggcttccgtatgtacagcaagggcgcctctgagatcatcttgcgcaagtgtaatcgaatcctggaccggaaaggggaagcagtgccattcaagaataaagacagagatgatatggtacgcactgtcatcgagcccatggcctgtgatggactccggactatctgcatagcttaccgggacttcgatgacacagagccctcttgggacaatgagaatgagatcctcaccgaactgacctgtatcgcggtggtgggcattgaggaccctgtgcgcccagaggtgccagatgctattgccaaatgcaaacaagctggcattactgtcagaatggtgacaggtgacaacatcaacacagcccgggccattgccaccaaatgtggcattctgacacctggggatgacttcctgtgcttagaaggcaaagaattcaaccggctcatccgcaacgagaaaggcgaggtagagcaagaaaagctggacaagatctggcctaagcttcgggtcctggcgcgatcttctcccactgacaagcacaccctggtgaaaggcataattgacagcactgttggggaacaccggcaggtcgtggctgtcactggtgatggcacaaatgacgggcctgctctgaagaaagcggatgttggttttgccatgggcatcgcaggcacagatgtagcaaaggaggcttcagacatcatcctaacagatgacaacttcaccagcattgtgaaggcagtgatgtggggacgaaatgtctatgacagcatctccaagttcctgcagttccagctcactgtcaatgtggtggccgtgattgtagccttcactggagcctgtatcactcaggattccccattgaaagctgtgcagatgttgtgggttaatctgatcatggacacttttgcttcattggccctggccacagagccccctacggaatctctgttgaagcggcgcccctatggccgaaataagcctctgatctcacgcactatgatgaagaacatcttgggccatgcattctatcagctcattgtcatctttatccttgtctttgcgggtgagaaattctttgatattgatagtgggaggaaggcacctctacattcaccacccagccagcactataccattgtttttaacaccttcgtgctgatgcagctcttcaatgaaatcaactcccgaaagatccatggagagaagaacgtcttttcaggcatctaccgcaacattatcttctgctctgtagtcttgggcacattcatctgccagattttcatcgtggaatttgggggtaaacccttcagttgtacaagcctcagcctgtctcagtggctgtggtgtctcttcattgggattggagaacttctgtggggccagttcatctccgcaatacctacccgatccctgaagttcctgaaggaggctgggcatggcaccaccaaagaggagatcaccaaggatgccgagggactggatgagattgaccatgctgagatggagctgcgccgaggccagatcctctggttccggggcctgaaccgtatccagactcagatcaaagtggtcaaagcgttccatagttccctccacgaaagcattcagaaaccctacaaccaaaagtccatccacagcttcatgacccaccctgaattcgccatagaggaggagttgccacgaacaccactcctggatgaggaagaggaggaaaatcctgacaaggcttctaagtttgggactagggtgctcctgttggatggtgaggtcactccatatgccaatacaaacaacaatgcggtggattgcaaccaagtgcagctcccccagtcggacagctctctacagagcctagagacatcagtttgaattttctttctctgactctcatccctattttacctatttccattttcgtctatcccatctatgaggtgatgatgggacttttcattgtcacgtcagctgctgtgttaacagcagtgtgtgtgaagtgaacctctacctgaccatgaagaggcaagagcacagacttacaaggatttcaacttaagcttgacttggggtttgtagcgggacccagtcaaaccccattcaggtcatggtagaatctactccttggtagtcacttgtcatttttaaagaaatgatgacaatcctcttggcatcaccccaccccacattctccccgatgttcctctcctgaattctggattttgtcctacaagtctgtgccatttataagctaagttgagggttcagagggagacaaatatccccaagtgaaatatgttgcggtagagatggaatgtataaaatccgccagtagtgtgattgtttttcaatttttcccactttgaaaacttacacctaaaggcctgtaggcctctaactctttctgccctttcattcaaacctctccaaagttctttgtcttttgtcttcccttcctttccttttttttttttttttttatgatgattaagaaaatggaaaggatatggatgaattgtgtaaacttagatccttctcccttttggcccaaaagaacccttgatttagttccagaatccaaccagtttctttgttaaaagggtccttttgaagcaattaagtgctggtaagaatatttctctgttgttgccaggttaccttctgcttttaaattgccatcttgtaaagtgtatgtggttcttaagtgccagggagatcagccttgcccatgaaggttgcatatgtgtggtatacagtttttacctgaaagcctgagctttctcttattcctaaagtggtggcaaaagaatgaactgggtatgaccctgcccccttactgggcttggatattgaggaccagacgctgccaaatctaggacaagacagaccatcaaagcagacttttgtgggctcctctttggggtgaccactgctttcaaagccatctgccaaggctctccagggcaggacctgactggtggggaatgagtgttcagaagccttgggagaggccaaagagccattctagcatgatctgagaaaaccttcctgcagaggccagaaaccttgagcttaggtgcctggggaccagcttcgacattctctccagtttctgattctaatttttgccacgtgtcacaacttttccagtctctgagaaggtcccagcctttctcaaatattctgattttgaaaatatgtatccaaagtgggaggcccctgtgacattttgccaacttaaacgagaaaaagaccccccgcacccggcacactcccccttcctccagccccgcttcagccacatgctccagctgctgcccagtaaagccctgtgcctttttttcccctgaatactgcccaaagcatccccttcccatctgcctctcaggagttggggactttgctaggagattttttaagtgttccttactgggacaacgtggagccacgtttgcaggagctccatttgtatccctgctggtgttgacttctgtgtaggggccagttcatgtccctgactctcacctcccattagataaatgaagcccacccccctttctagagtgatgagagtcaagaagaggggatgtatgaacggccaaattcccatgtgagaggaagatgacctgatccacctagccttttcttctggatctgtcctccctcacccctttcacctgagctgtccacagtaggaaacataaagaaacaatgtcccctacatatccccatgactacataatccatcatcgtaggaaataggaaagcaaatttgattttggttttgtaaaacgtacatgcttcaataattcttttttgtgtcttaaatactcataggggaaaaaaacagctcacccaaggtgttaggtttcacatatatattcatcaactattttagaagatttaattctatcaaatcttgtattacctcagatcattttaaatagcaagccaataacgagctttgaaggctattttaccattcctgttcacaaaaggttctcatggtgcctgacaggttacccttgagggcttgtgtctactttttaaaagtcaatggttttttttcttgtgttctagtttccataataggagagaaaatatagaaatatatgcaaaaattatagttttctttagatcagaaactgatatttttgggtcagccatatgtattttgtttaaaggatttaaaataaagtgccgtcatgtagccctgtggaagggagcacataaccagctgtttggcatgacaggtgacttagtatatttgtaattggttttaaaaccaatacaccatactttctttctgcaaacagccatctttatacttagggaagaaaaattgttgggttctagacttttttaatataaattttgttgatatggaattaggtaagtttaagtgtctatgtgcatatgttttttatataagttttttctattcagtttcactgatccaactggcagtgggtaaatatggcataagttaataacacttttccccaaaatggtgctttggatttgaaaagggtctgatggggagaaggagaacgtatcatcctagcttcctctcttaataaacctagaaaaacgggtagtaaactgtggatagtcaggaaaacacccagcaagggacacagctgtcaggaaatgaatcttccccccaacccccaccatgcagatggatagacagaatctttcctgactagtcattaggatcaggggcctctgttggatttgtgtttcttgaagaatagctggcagagtggtataaaagacacgaatatctcctggtctataaggatactctgatttggggtttgcatttttcatggtttttatttcctgttccccctggagttttccattagtgagtttttgtgcaaggatcttatttgtgatgccttccctcccctagaaagattttgtgcaatatattaaatggggacagaattctaaatggataaaacaatggctggttctagccctgagtgacagtcttaaggctagatccttcccatagtatcatctgtcctctggaatgactctcctgtccctaaaggggttaagagagagatcacctagaaatccctctggacacttgtgggttctttagggtttgagtttcttcttccccttgagcttcagagaggagagttggcatggttaaatctgaatggttacctcactgctgaaaacccagaggggcgtggcacactcgcttgtgtggaaaagcctctaaatgcatcccttcctttctttcctgcttcctttgccttacaattgaagcagcccgtggtaccatcacagtatgcagagacttcctcacctttcatatctagggaccacccccgatgcattggtgagggtgggcacttataaatgcctgctattgttaagccattccagcctcttcctctgaatagaccagacgccctttcacttagttcagtgccagtccttttgccttcccaaccctgctgttaggcctgctgttccctttgctcttgattaggagagatggaaggagatgagctcccataactgaattggcctttggttcatgttttctccccatatgtatatatgccatatgtgaatatgccatatatatgtgccaacaaatctatctacgttgttcttttcaaattagcacgcagataggaattttgagtttcttcttcttttagtaactagtataacaagcactggtatttttgtacaaaaaagaaaaacaaaagattgactattgtggtctgcatgacataaacaaacaaatggtgatatcaaagcaacgtataccccagtccagtgtgtgttgccataatttgcaattcagcttaacagtgcacccaatctatatttgcattttgatattatttaagctctatgtacaaggttttgcatgtatttatatggttcttagggaaaaaaaatgctataaactgcaaatctgaaattcaaatgtgttgttccactgagaccagaagaagaagaggagttttaaaagggataatttgttggagccaataaagctttttgctgatgaacagaaaccaatactgctgtgcactgagaataaaaactcatgcccacttgtaa

SEQ ID NO: 119931 - DNA, 429 bp, Artificial Sequence
  derived and/or modified sequence
ttgggggtaaacccttcagttgtacaagcctcagcctgtctcagtggctgtggtgtctcttcattgggattggagaacttctgtggggccagttcatctccgcaatacctacccgatccctgaagttcctgaaggaggctgggcatggcaccaccaaagaggagatcaccaaggatgccgagggactggatgagattgaccatgctgagatggagctgcgccgaggccagatcctctggttccggggcctgaaccgtatccagactcagcatcttttgcaggattcagacttgcttcctgacaaggaggaagcaataatttcttcaagcctcttcccttcttgcaatttctgaaatgggatagaagccacccctgctgctcttatgtcccctgtctatagccccacaataacttttattttttccactt

SEQ ID NO: 119932 - DNA, 3618 bp, Artificial Sequence
  derived and/or modified sequence
atgaccaaccccagcgacagagtgctgcccgccaacagcatggccgagagcagagagggcgacttcggctgcaccgtgatggagctgagaaagctgatggagctgagaagcagagacgccctgacccagatcaacgtgcactacggcggcgtgcagaacctgtgcagcagactgaagaccagccccgtggagggcctgagcggcaaccccgccgacctggagaagagaagacaggtgttcggccacaacgtgatcccccccaagaagcccaagaccttcctggagctggtgtgggaggccctgcaggacgtgaccctgatcatcctggagatcgccgccatcatcagcctggtgctgagcttctacagacccgccggcgaggagaacgagctgtgcggccaggtggccaccacccccgaggacgagaacgaggcccaggccggctggatcgagggcgccgccatcctgttcagcgtgatcatcgtggtgctggtgaccgccttcaacgactggagcaaggagaagcagttcagaggcctgcagtgcagaatcgagcaggagcagaagttcagcatcatcagaaacggccagctgatccagctgcccgtggccgagatcgtggtgggcgacatcgcccaggtgaagtacggcgacctgctgcccgccgacggcatcctgatccagggcaacgacctgaagatcgacgagagcagcctgaccggcgagagcgaccacgtgaagaagagcctggacaaggaccccatgctgctgagcggcacccacgtgatggagggcagcggcagaatggtggtgaccgccgtgggcgtgaacagccagaccggcatcatcctgaccctgctgggcgtgaacgaggacgacgagggcgagaagaagaagaagggcaagaagcagggcgtgcccgagaacagaaacaaggccaagacccaggacggcgtggccctggagatccagcccctgaacagccaggagggcatcgacaacgaggagaaggacaagaaggccgtgaaggtgcccaagaaggagaagagcgtgctgcagggcaagctgaccagactggccgtgcagatcggcaaggccggcctgctgatgagcgccctgaccgtgttcatcctgatcctgtacttcgtgatcgacaacttcgtgatcaacagaagaccctggctgcccgagtgcacccccatctacatccagtacttcgtgaagttcttcatcatcggcatcaccgtgctggtggtggccgtgcccgagggcctgcccctggccgtgaccatcagcctggcctacagcgtgaagaagatgatgaaggacaacaacctggtgagacacctggacgcctgcgagaccatgggcaacgccaccgccatctgcagcgacaagaccggcaccctgaccatgaacagaatgaccgtggtgcaggcctacatcggcggcatccactacagacagatccccagccccgacgtgttcctgcccaaggtgctggacctgatcgtgaacggcatcagcatcaacagcgcctacaccagcaagatcctgccccccgagaaggagggcggcctgcccagacaggtgggcaacaagaccgagtgcgccctgctgggcttcgtgaccgacctgaagcaggactaccaggccgtgagaaacgaggtgcccgaggagaagctgtacaaggtgtacaccttcaacagcgtgagaaagagcatgagcaccgtgatcagaaaccccaacggcggcttcagaatgtacagcaagggcgccagcgagatcatcctgagaaagtgcaacagaatcctggacagaaagggcgaggccgtgcccttcaagaacaaggacagagacgacatggtgagaaccgtgatcgagcccatggcctgcgacggcctgagaaccatctgcatcgcctacagagacttcgacgacaccgagcccagctgggacaacgagaacgagatcctgaccgagctgacctgcatcgccgtggtgggcatcgaggaccccgtgagacccgaggtgcccgacgccatcgccaagtgcaagcaggccggcatcaccgtgagaatggtgaccggcgacaacatcaacaccgccagagccatcgccaccaagtgcggcatcctgacccccggcgacgacttcctgtgcctggagggcaaggagttcaacagactgatcagaaacgagaagggcgaggtggagcaggagaagctggacaagatctggcccaagctgagagtgctggccagaagcagccccaccgacaagcacaccctggtgaagggcatcatcgacagcaccgtgggcgagcacagacaggtggtggccgtgaccggcgacggcaccaacgacggccccgccctgaagaaggccgacgtgggcttcgccatgggcatcgccggcaccgacgtggccaaggaggccagcgacatcatcctgaccgacgacaacttcaccagcatcgtgaaggccgtgatgtggggcagaaacgtgtacgacagcatcagcaagttcctgcagttccagctgaccgtgaacgtggtggccgtgatcgtggccttcaccggcgcctgcatcacccaggacagccccctgaaggccgtgcagatgctgtgggtgaacctgatcatggacaccttcgccagcctggccctggccaccgagccccccaccgagagcctgctgaagagaagaccctacggcagaaacaagcccctgatcagcagaaccatgatgaagaacatcctgggccacgccttctaccagctgatcgtgatcttcatcctggtgttcgccggcgagaagttcttcgacatcgacagcggcagaaaggcccccctgcacagcccccccagccagcactacaccatcgtgttcaacaccttcgtgctgatgcagctgttcaacgagatcaacagcagaaagatccacggcgagaagaacgtgttcagcggcatctacagaaacatcatcttctgcagcgtggtgctgggcaccttcatctgccagatcttcatcgtggagttcggcggcaagcccttcagctgcaccagcctgagcctgagccagtggctgtggtgcctgttcatcggcatcggcgagctgctgtggggccagttcatcagcgccatccccaccagaagcctgaagttcctgaaggaggccggccacggcaccaccaaggaggagatcaccaaggacgccgagggcctggacgagatcgaccacgccgagatggagctgagaagaggccagatcctgtggttcagaggcctgaacagaatccagacccagatcaaggtggtgaaggccttccacagcagcctgcacgagagcatccagaagccctacaaccagaagagcatccacagcttcatgacccaccccgagttcgccatcgaggaggagctgcccagaacccccctgctggacgaggaggaggaggagaaccccgacaaggccagcaagttcggcaccagagtgctgctgctggacggcgaggtgaccccctacgccaacaccaacaacaacgccgtggactgcaaccaggtgcagctgccccagagcgacagcagcctgcagagcctggagaccagcgtgtag

SEQ ID NO: 119933 - DNA, 354 bp, Artificial Sequence
  derived and/or modified sequence
tgaggcggcaagcccttcagctgcaccagcctgagcctgagccagtggctgtggtgcctgttcatcggcatcggcgagctgctgtggggccagttcatcagcgccatccccaccagaagcctgaagttcctgaaggaggccggccacggcaccaccaaggaggagatcaccaaggacgccgagggcctggacgagatcgaccacgccgagatggagctgagaagaggccagatcctgtggttcagaggcctgaacagaatccagacccagcacctgctgcaggacagcgacctgctgcccgacaaggaggaggccatcatcagcagcagcctgttccccagctgcaacttctag

SEQ ID NO: 119934 - protein, 529 aa, Artificial Sequence
  derived and/or modified sequence
MLGFVGRVAAAPASGALRRLTPSASLPPAQLLLRAAPTAVHPVRDYAAQTSPSPKAGAATGRIVAVIGAVVDVQFDEGLPPILNALEVQGRETRLVLEVAQHLGESTVRTIAMDGTEGLVRGQKVLDSGAPIKIPVGPETLGRIMNVIGEPIDERGPIKTKQFAPIHAEAPEFMEMSVEQEILVTGIKVVDLLAPYAKGGKIGLFGGAGVGKTVLIMELINNVAKAHGGYSVFAGVGERTREGNDLYHEMIESGVINLKDATSKVALVYGQMNEPPGARARVALTGLTVAEYFRDQEGQDVLLFIDNIFRFTQAGSEVSALLGRIPSAVGYQPTLATDMGTMQERITTTKKGSITSVQAIYVPADDLTDPAPATTFAHLDATTVLSRAIAELGIYPAVDPLDSTSRIMDPNIVGSEHYDVARGVQKILQDYKSLQDIIAILGMDELSEEDKLTVSRARKIQRFLSQPFQVAEVFTGHMGKLVPLKETIKGFQQILAGEYDHLPEQAFYMVGPIEEAVAKADKLAEEHSS

SEQ ID NO: 119935 - DNA, 1590 bp, Artificial Sequence
  derived and/or modified sequence
atgctcggattcgtgggtcgcgtcgctgcagcgcctgcgtccggcgctttgcggcggttgactcctagcgcaagtcttcccccggcacaactactactacgggccgctcccaccgctgtgcacccagtgcgcgactatgccgcccagacaagcccatcaccaaaagctggagccgctaccggacgcatagtggccgtaatcggcgcagtcgtcgatgtgcagttcgacgaggggctgcctccaattttaaatgcgctcgaggtccagggccgcgagaccagattggtgctggaagttgcccagcacctaggcgagagcactgtgcgaacaatcgcaatggatggtaccgaggggctagttaggggacaaaaagtcctggatagcggtgcgccgataaaaattccagtgggtccggagacactaggccgaattatgaacgtgatcggggaaccaattgatgagcggggccccattaagaccaaacagttcgccccaatccacgcagaggcgcctgaattcatggagatgtccgtcgagcaggagatcctcgtcacaggtataaaagttgttgatcttctagctccctacgcgaaggggggaaagatcggtctatttggcggggccggggtcggcaagacagtacttatcatggaactcatcaacaacgttgccaaggctcatgggggttacagcgtattcgccggggtaggcgagcgcactcgggagggaaacgatctgtaccatgaaatgatcgaatctggggtgatcaatctgaaggacgctacctccaaagttgccctcgtgtacggccagatgaacgagccccctggagctagagcccgcgtggccctgactggtttgacggtggccgagtatttccgagatcaggagggacaggacgttttgctcttcatagataatatctttcgatttacacaagctggatccgaggtttccgcactgctgggccggatcccgtcagctgtaggttatcagcccacactggcaactgacatgggtactatgcaggagaggatcaccaccactaagaagggaagcattacctcagtacaggcaatctatgttcccgccgatgatctgacggaccccgcccctgcaaccacgttcgcccatcttgatgcaaccaccgttctgtcccgagctattgcagaactgggcatctaccctgctgtggacccccttgacagtacgtctaggattatggacccaaacattgttggctcagaacactatgacgttgcccgaggtgtgcaaaaaattctgcaagattacaagtcattgcaggatataattgcaatactcgggatggatgagctcagcgaggaagacaaactcacggtgtcccgagcaagaaaaatccagcggtttctgtctcagcccttccaggtcgccgaagttttcaccggccacatgggaaagctcgtgccattgaaggaaactattaagggattccagcagattcttgcgggcgagtacgatcacctccccgaacaagcgttttacatggttggacccatcgaggaagctgttgcaaaagctgataaactggccgaagagcactcaagctag

SEQ ID NO: 119936 - DNA, 1590 bp, Artificial Sequence
  derived and/or modified sequence
atgctgggctttgtgggccgggtggccgccgccccagccagcggggccctgcggcggctgaccccatctgccagcctgcccccagcccagctgctgctgcgggccgcccccacagctgtgcaccctgtgcgggactatgctgcccagaccagccccagccccaaggccggggccgccaccggcagaattgtggccgtgattggagctgtggtggatgtgcagtttgatgagggcctgccccccatcctgaatgccctggaggtgcagggccgggagacccggctggtgctggaggtggcccagcacctgggggagagcacagtgaggaccatcgccatggatggaacagagggcctggtgcggggccagaaggtgctggacagcggggcccccatcaagatccctgtgggccctgagaccctgggccgcatcatgaatgtcatcggggagcccattgatgagcggggccccatcaagaccaagcagtttgcccccatccacgccgaggcccctgagttcatggagatgtctgtggagcaggagatcctggtgacaggcatcaaggtggtggacctgctggccccctatgccaagggcggcaagattggcctgtttggaggagctggggtgggcaagacagtgctgatcatggagctgatcaacaacgtggccaaggcccatggaggctacagcgtgtttgctggggtgggggagaggacccgggagggcaatgacctgtaccacgagatgattgaaagtggagtcatcaacctgaaggatgccaccagcaaggtggccctggtgtatggccagatgaatgaacctcctggggcccgggcccgggtggccctgaccggcctgactgtggccgagtacttccgggaccaggagggccaggatgtgctgctcttcatcgacaacatcttccgcttcacccaggccggcagcgaggtgtctgccctgctgggccgcatccccagcgctgtgggctaccagcccaccctggccacagacatgggcaccatgcaggagcgcatcaccaccaccaagaagggcagcatcacctctgtgcaggccatctacgtgcctgcagatgacctgacagatcctgccccagccaccacctttgcccacctggatgccaccaccgtgctgagccgggccatcgccgagctgggcatctacccagctgtggaccccctggacagcaccagccgcatcatggaccccaacatcgtgggcagcgagcactatgatgtggcccggggcgtgcagaagatcctgcaggactacaagagcctgcaggacatcatcgccatcctgggcatggatgagctgtctgaggaggacaagctgactgtgtcccgggccaggaagatccagcgcttcctgagccagcccttccaggtggccgaggtgttcaccggccacatgggcaagctggtgcccctgaaggagaccatcaagggcttccagcagatcctggccggggagtatgaccacctgcctgagcaggccttctacatggtgggccccatcgaggaggccgtggccaaggctgacaagctggccgaggagcacagcagctag

SEQ ID NO: 119937 - DNA, 1590 bp, Artificial Sequence
  derived and/or modified sequence
atgctgggcttcgtgggccgggtggccgccgcccccgccagcggcgcattgaggcgacttaccccatccgcctctctgccgcccgcccaattacttctacgggcggctccaaccgcagtgcaccctgttagggactatgccgcccagacgagcccttcccctaaagccggagcggccacgggcaggatcgtcgccgtgattggtgcagttgtagacgtccagttcgatgagggcttaccaccaattctgaacgccctcgaggtgcaggggcgcgaaacaagactggttctggaggttgcccagcatctgggcgagtccaccgtgcgcactattgccatggatgggacagaaggattggtcagggggcagaaggtgttagactctggcgcccccatcaagattccggtaggtccagagacactcggacggattatgaatgtgattggtgaaccaatcgacgaacgcggcccgattaagacaaagcagtttgcccctatacacgccgaagctccagaatttatggaaatgtctgtggagcaagaaattctcgttaccggcatcaaagtagtggatctgctggcaccgtatgctaaaggggggaagattggcctctttggtggggccggcgtcggaaaaacggtgctgatcatggagctgataaataatgtggccaaagctcacgggggctacagtgtgttcgccggcgttggcgaacggactcgcgagggtaacgatctatatcacgaaatgattgagtccggtgtgatcaatctgaaggatgcgacaagcaaagtggctctggtttacgggcagatgaatgaacccccaggcgcacgagccagagttgcattgacaggtttaactgttgccgagtattttcgtgatcaggaaggtcaggacgtgctcctgtttatagataacatcttccgttttacacaagcaggttctgaggtttcagcgctcctaggcagaatcccttcagctgtggggtatcagcccacgcttgctacagacatgggcacaatgcaggagcggatcaccacaactaaaaagggcagtatcacatccgttcaagcaatttacgttccggctgacgaccttacggatccagcccctgcgacgacctttgcccacctggatgcaaccaccgtcctgagtcgggccattgcagaattgggaatctaccccgccgtggatccgctggattccaccagccgtatcatggatcctaatattgtaggtagcgaacactacgacgtggcacgcggagtgcaaaagatcctgcaggactacaagagtctgcaggacattatcgccattcttggtatggatgagctgagcgaggaagacaaactcacagtcagtcgcgctagaaagatacagcggtttctttcccaaccttttcaggtggccgaggtgttcaccgggcatatggggaaactcgtccccctcaaagaaaccataaaagggtttcaacagatcctagccggcgaatatgatcaccttcctgagcaagctttctacatggtcggccctattgaggaggcagtggctaaggctgataaactagccgaggaacacagctcatag

SEQ ID NO: 119938 - DNA, 1590 bp, Artificial Sequence
  derived and/or modified sequence
atgctggggttcgtgggcagggtggcggcagcaccggcaagtggggcattgagaaggttgactccatctgcgagcctgcctccggcacaactgctgttgcgtgccgctccaaccgcagtgcatcctgtgcgggactatgccgctcagacctccccctccccaaaagcaggagcagctacagggcgaattgtggcggttatcggcgcagtggtcgatgtacagtttgacgaaggtcttccacccatccttaacgccctcgaggtccagggcagggaaacccggttggtactcgaagtggcgcagcacttgggtgagtcaactgtgaggactatcgctatggacgggacagagggactagtgcgtgggcagaaagtgttagatagcggcgctcccattaagatccccgttggacctgagacacttggtagaataatgaacgtgataggtgagcccattgacgaacgtggccctattaagactaagcagtttgcgcctatccacgcagaagcaccagaattcatggagatgagtgtcgagcaggagattctggtgaccggtattaaggtcgtggatctgctggcgccttatgccaagggtggtaagattggcctctttggcggagccggtgttggtaaaaccgttctgatcatggaactcatcaataatgttgcaaaggctcacggcggatactcagtgttcgcaggcgtgggtgagagaacccgggagggtaacgacctgtaccacgaaatgatcgaaagtggtgtgattaatctcaaagatgcaaccagcaaagtagccctagtctatgggcagatgaatgagcctccgggagctcgtgcccgtgtggcccttactggcctgacagtggctgaatatttccgggatcaggaggggcaagatgtactcctgtttattgacaacatattccgctttacccaggcaggatctgaagtaagcgcactcctcgggagaatcccctccgctgtgggctatcagcccacactggctacagacatgggcaccatgcaggagcgcatcacaacaaccaaaaaaggcagcataacttcagtacaggccatctatgtgccggcagatgacttgaccgaccctgcaccagcaaccacttttgcccacctagacgccaccactgtgctcagccgggcaatcgctgagcttggcatttaccctgcagtggacccactagacagtacctcgcgtattatggatcccaacatcgtgggcagtgagcactacgacgtggctcgcggagtccagaagattttacaggactacaagtccctgcaggacattattgcaattttgggtatggatgagttgtcagaagaagacaaactcactgtgtcccgggcaagaaagatccagaggttcttatcccaaccatttcaagtcgctgaggttttcacaggacatatgggcaaactcgttccactaaaggagacaataaaaggctttcagcagattcttgctggggagtatgaccacttgccagagcaggccttctacatggtgggacccattgaagaagccgtggctaaggctgacaaactggctgaggagcacagctcttag

SEQ ID NO: 119939 - DNA, 1789 bp, Artificial Sequence
  derived and/or modified sequence
gagcaggcggctgcggttgctgcagccttcagtctccacccggactacgccatgttggggtttgtgggtcgggtggccgctgctccggcctccggggccttgcggagactcaccccttcagcgtcgctgcccccagctcagctcttactgcgggccgctccgacggcggtccatcctgtcagggactatgcggcgcaaacatctccttcgccaaaagcaggcgccgccaccgggcgcatcgtggcggtcattggcgcagtggtggacgtccagtttgatgagggactaccaccaattctaaatgccctggaagtgcaaggcagggagaccagactggttttggaggtggcccagcatttgggtgagagcacagtaaggactattgctatggatggtacagaaggcttggttagaggccagaaagtactggattctggtgcaccaatcaaaattcctgttggtcctgagactttgggcagaatcatgaatgtcattggagaacctattgatgaaagaggtcccatcaaaaccaaacaatttgctcccattcatgctgaggctccagagttcatggaaatgagtgttgagcaggaaattctggtgactggtatcaaggttgtcgatctgctagctccctatgccaagggtggcaaaattgggctttttggtggtgctggagttggcaagactgtactgatcatggagttaatcaacaatgtcgccaaagcccatggtggttactctgtgtttgctggtgttggtgagaggacccgtgaaggcaatgatttataccatgaaatgattgaatctggtgttatcaacttaaaagatgccacctctaaggtagcgctggtatatggtcaaatgaatgaaccacctggtgctcgtgcccgggtagctctgactgggctgactgtggctgaatacttcagagaccaagaaggtcaagatgtactgctatttattgataacatctttcgcttcacccaggctggttcagaggtgtctgcattattgggccgaatcccttctgctgtgggctatcagcctaccctggccactgacatgggtactatgcaggaaagaattaccactaccaagaagggatctatcacctctgtacaggctatctatgtgcctgctgatgacttgactgaccctgcccctgctactacgtttgcccatttggatgctaccactgtactgtcgcgtgccattgctgagctgggcatctatccagctgtggatcctctagactccacctctcgtatcatggatcccaacattgttggcagtgagcattacgatgttgcccgtggggtgcaaaagatcctgcaggactacaaatccctccaggatatcattgccatcctgggtatggatgaactttctgaggaagacaagttgaccgtgtcccgtgcacggaaaatacagcgtttcttgtctcagccattccaggttgctgaggtcttcacaggtcatatggggaagctggtacccctgaaggagaccatcaaaggattccagcagattttggcaggtgaatatgaccatctcccagaacaggccttctatatggtgggacccattgaagaagctgtggcaaaagctgataagctggctgaagagcattcatcgtgaggggtctttgtcctctgtactgtctctctccttgcccctaacccaaaaagcttcatttttctgtgtaggctgcacaagagccttgattgaagatatattctttctgaacagtatttaaggtttccaataaaatgtacacccctcagaa

SEQ ID NO: 119940 - DNA, 1590 bp, Artificial Sequence
  derived and/or modified sequence
atgctgggcttcgtgggcagagtggccgccgcccccgccagcggcgccctgagaagactgacccccagcgccagcctgccccccgcccagctgctgctgagagccgcccccaccgccgtgcaccccgtgagagactacgccgcccagaccagccccagccccaaggccggcgccgccaccggcagaatcgtggccgtgatcggcgccgtggtggacgtgcagttcgacgagggcctgccccccatcctgaacgccctggaggtgcagggcagagagaccagactggtgctggaggtggcccagcacctgggcgagagcaccgtgagaaccatcgccatggacggcaccgagggcctggtgagaggccagaaggtgctggacagcggcgcccccatcaagatccccgtgggccccgagaccctgggcagaatcatgaacgtgatcggcgagcccatcgacgagagaggccccatcaagaccaagcagttcgcccccatccacgccgaggcccccgagttcatggagatgagcgtggagcaggagatcctggtgaccggcatcaaggtggtggacctgctggccccctacgccaagggcggcaagatcggcctgttcggcggcgccggcgtgggcaagaccgtgctgatcatggagctgatcaacaacgtggccaaggcccacggcggctacagcgtgttcgccggcgtgggcgagagaaccagagagggcaacgacctgtaccacgagatgatcgagagcggcgtgatcaacctgaaggacgccaccagcaaggtggccctggtgtacggccagatgaacgagccccccggcgccagagccagagtggccctgaccggcctgaccgtggccgagtacttcagagaccaggagggccaggacgtgctgctgttcatcgacaacatcttcagattcacccaggccggcagcgaggtgagcgccctgctgggcagaatccccagcgccgtgggctaccagcccaccctggccaccgacatgggcaccatgcaggagagaatcaccaccaccaagaagggcagcatcaccagcgtgcaggccatctacgtgcccgccgacgacctgaccgaccccgcccccgccaccaccttcgcccacctggacgccaccaccgtgctgagcagagccatcgccgagctgggcatctaccccgccgtggaccccctggacagcaccagcagaatcatggaccccaacatcgtgggcagcgagcactacgacgtggccagaggcgtgcagaagatcctgcaggactacaagagcctgcaggacatcatcgccatcctgggcatggacgagctgagcgaggaggacaagctgaccgtgagcagagccagaaagatccagagattcctgagccagcccttccaggtggccgaggtgttcaccggccacatgggcaagctggtgcccctgaaggagaccatcaagggcttccagcagatcctggccggcgagtacgaccacctgcccgagcaggccttctacatggtgggccccatcgaggaggccgtggccaaggccgacaagctggccgaggagcacagcagctag

SEQ ID NO: 119941 - protein, 513 aa, Artificial Sequence
  derived and/or modified sequence
MAMEIDSRPGGLPGSSCNLGAAREHMQAVTRNYITHPRVTYRTVCSVNGPLVVLDRVKFAQYAEIVHFTLPDGTQRSGQVLEVAGTKAIVQVFEGTSGIDARKTTCEFTGDILRTPVSEDMLGRVFNGSGKPIDKGPVVMAEDFLDINGQPINPHSRIYPEEMIQTGISPIDVMNSIARGQKIPIFSAAGLPHNEIAAQICRQAGLVKKSKAVLDYHDDNFAIVFAAMGVNMETARFFKSDFEQNGTMGNVCLFLNLANDPTIERIITPRLALTTAEFLAYQCEKHVLVILTDMSSYAEALREVSAAREEVPGRRGFPGYMYTDLATIYERAGRVEGRGGSITQIPILTMPNDDITHPIPDLTGFITEGQIYVDRQLHNRQIYPPINVLPSLSRLMKSAIGEGMTRKDHGDVSNQLYACYAIGKDVQAMKAVVGEEALTSEDLLYLEFLQKFEKNFINQGPYENRSVFESLDLGWKLLRIFPKEMLKRIPQAVIDEFYSREGALQDLAPDTAL

SEQ ID NO: 119942 - protein, 496 aa, Artificial Sequence
  derived and/or modified sequence
MAMEIDSRPGGLPGSSCNLGAAREHMQAVTRNYITHPRVTYRTVCSVNGPLVVLDRVKFAQYAEIVHFTLPDGTQRSGQVLEVAGTKAIVQVFEGTSGIDARKTTCEFTGDILRTPVSEDMLGRVFNGSGKPIDKGPVVMAEDFLDINGQPINPHSRIYPEEMIQTGISPIDVMNSIARGQKIPIFSAAGLPHNEIAAQICRQAGLVKKSKAVLDYHDDNFAIVFAAMGVNMETARFFKSDFEQNGTMGNVCLFLNLANDPTIERIITPRLALTTAEFLAYQCEKHVLVILTDMSSYAEALREVSAAREEVPGRRGFPGYMYTDLATIYERAGRVEDITHPIPDLTGFITEGQIYVDRQLHNRQIYPPINVLPSLSRLMKSAIGEGMTRKDHGDVSNQLYACYAIGKDVQAMKAVVGEEALTSEDLLYLEFLQKFEKNFINQGPYENRSVFESLDLGWKLLRIFPKEMLKRIPQAVIDEFYSREGALQDLAPDTAL

SEQ ID NO: 119943 - protein, 488 aa, Artificial Sequence
  derived and/or modified sequence
MQAVTRNYITHPRVTYRTVCSVNGPLVVLDRVKFAQYAEIVHFTLPDGTQRSGQVLEVAGTKAIVQVFEGTSGIDARKTTCEFTGDILRTPVSEDMLGRVFNGSGKPIDKGPVVMAEDFLDINGQPINPHSRIYPEEMIQTGISPIDVMNSIARGQKIPIFSAAGLPHNEIAAQICRQAGLVKKSKAVLDYHDDNFAIVFAAMGVNMETARFFKSDFEQNGTMGNVCLFLNLANDPTIERIITPRLALTTAEFLAYQCEKHVLVILTDMSSYAEALREVSAAREEVPGRRGFPGYMYTDLATIYERAGRVEGRGGSITQIPILTMPNDDITHPIPDLTGFITEGQIYVDRQLHNRQIYPPINVLPSLSRLMKSAIGEGMTRKDHGDVSNQLYACYAIGKDVQAMKAVVGEEALTSEDLLYLEFLQKFEKNFINQGPYENRSVFESLDLGWKLLRIFPKEMLKRIPQAVIDEFYSREGALQDLAPDTAL

SEQ ID NO: 119944 - DNA, 1491 bp, Artificial Sequence
  derived and/or modified sequence
atggccatggagatcgacagcagacccggcggcctgcccggcagcagctgcaacctgggcgccgccagagagcacatgcaggccgtgaccagaaactacatcacccaccccagagtgacctacagaaccgtgtgcagcgtgaacggccccctggtggtgctggacagagtgaagttcgcccagtacgccgagatcgtgcacttcaccctgcccgacggcacccagagaagcggccaggtgctggaggtggccggcaccaaggccatcgtgcaggtgttcgagggcaccagcggcatcgacgccagaaagaccacctgcgagttcaccggcgacatcctgagaacccccgtgagcgaggacatgctgggcagagtgttcaacggcagcggcaagcccatcgacaagggccccgtggtgatggccgaggacttcctggacatcaacggccagcccatcaacccccacagcagaatctaccccgaggagatgatccagaccggcatcagccccatcgacgtgatgaacagcatcgccagaggccagaagatccccatcttcagcgccgccggcctgccccacaacgagatcgccgcccagatctgcagacaggccggcctggtgaagaagagcaaggccgtgctggactaccacgacgacaacttcgccatcgtgttcgccgccatgggcgtgaacatggagaccgccagattcttcaagagcgacttcgagcagaacggcaccatgggcaacgtgtgcctgttcctgaacctggccaacgaccccaccatcgagagaatcatcacccccagactggccctgaccaccgccgagttcctggcctaccagtgcgagaagcacgtgctggtgatcctgaccgacatgagcagctacgccgaggccctgagagaggtgagcgccgccagagaggaggtgcccggcagaagaggcttccccggctacatgtacaccgacctggccaccatctacgagagagccggcagagtggaggacatcacccaccccatccccgacctgaccggcttcatcaccgagggccagatctacgtggacagacagctgcacaacagacagatctacccccccatcaacgtgctgcccagcctgagcagactgatgaagagcgccatcggcgagggcatgaccagaaaggaccacggcgacgtgagcaaccagctgtacgcctgctacgccatcggcaaggacgtgcaggccatgaaggccgtggtgggcgaggaggccctgaccagcgaggacctgctgtacctggagttcctgcagaagttcgagaagaacttcatcaaccagggcccctacgagaacagaagcgtgttcgagagcctggacctgggctggaagctgctgagaatcttccccaaggagatgctgaagagaatcccccaggccgtgatcgacgagttctacagcagagagggcgccctgcaggacctggcccccgacaccgccctgtag

SEQ ID NO: 119945 - DNA, 1467 bp, Artificial Sequence
  derived and/or modified sequence
atgcaggccgtgaccagaaactacatcacccaccccagagtgacctacagaaccgtgtgcagcgtgaacggccccctggtggtgctggacagagtgaagttcgcccagtacgccgagatcgtgcacttcaccctgcccgacggcacccagagaagcggccaggtgctggaggtggccggcaccaaggccatcgtgcaggtgttcgagggcaccagcggcatcgacgccagaaagaccacctgcgagttcaccggcgacatcctgagaacccccgtgagcgaggacatgctgggcagagtgttcaacggcagcggcaagcccatcgacaagggccccgtggtgatggccgaggacttcctggacatcaacggccagcccatcaacccccacagcagaatctaccccgaggagatgatccagaccggcatcagccccatcgacgtgatgaacagcatcgccagaggccagaagatccccatcttcagcgccgccggcctgccccacaacgagatcgccgcccagatctgcagacaggccggcctggtgaagaagagcaaggccgtgctggactaccacgacgacaacttcgccatcgtgttcgccgccatgggcgtgaacatggagaccgccagattcttcaagagcgacttcgagcagaacggcaccatgggcaacgtgtgcctgttcctgaacctggccaacgaccccaccatcgagagaatcatcacccccagactggccctgaccaccgccgagttcctggcctaccagtgcgagaagcacgtgctggtgatcctgaccgacatgagcagctacgccgaggccctgagagaggtgagcgccgccagagaggaggtgcccggcagaagaggcttccccggctacatgtacaccgacctggccaccatctacgagagagccggcagagtggagggcagaggcggcagcatcacccagatccccatcctgaccatgcccaacgacgacatcacccaccccatccccgacctgaccggcttcatcaccgagggccagatctacgtggacagacagctgcacaacagacagatctacccccccatcaacgtgctgcccagcctgagcagactgatgaagagcgccatcggcgagggcatgaccagaaaggaccacggcgacgtgagcaaccagctgtacgcctgctacgccatcggcaaggacgtgcaggccatgaaggccgtggtgggcgaggaggccctgaccagcgaggacctgctgtacctggagttcctgcagaagttcgagaagaacttcatcaaccagggcccctacgagaacagaagcgtgttcgagagcctggacctgggctggaagctgctgagaatcttccccaaggagatgctgaagagaatcccccaggccgtgatcgacgagttctacagcagagagggcgccctgcaggacctggcccccgacaccgccctgtag

SEQ ID NO: 119946 - DNA, 1491 bp, Artificial Sequence
  derived and/or modified sequence
atggccatggagatcgactctcgaccaggaggattgcctgggtcatcttgtaatctgggggcagctagagagcatatgcaggctgtgacccggaactacatcacccatccgcgggttacttacaggacggtttgctccgtgaacgggcccttggtggtcctggatcgagttaagtttgctcagtatgcggagattgtgcatttcactctgcccgacggcacacagagatctggacaggtcttagaagtcgctggtaccaaggccatcgtgcaggtgttcgaggggacctctggtatcgacgctcggaaaacgacctgcgagtttacaggagacatcctgcgaactccagtctccgaggacatgctgggcagggtgtttaacgggtccggcaaacccattgacaaagggcccgtggtgatggccgaggatttcttggatattaatggccaacccataaacccacatagtagaatatatcctgaggaaatgatccagacaggcatttccccaattgatgtgatgaacagcattgcccgcggccagaaaatacccattttctcagctgcgggtctcccccacaatgagattgccgcccagatttgtcggcaggcagggctggtgaagaaatcaaaggctgtcctcgactatcacgacgacaacttcgccattgtgtttgccgcgatgggagtcaacatggagacagcacggttttttaagtctgatttcgagcagaatggtactatggggaacgtttgcttgttcctcaacttggcgaatgatccaactatcgagcggataatcaccccacgtctggccctgaccaccgccgagtttctggcataccagtgcgagaagcacgtgttggtaattcttaccgatatgagctcttatgccgaggccctgcgcgaggtctcagcggcccgagaggaggtgccaggccgacgcggatttccaggatacatgtatactgacctagcaaccatctacgaaagggcaggcagagtggaagatattacacatcccattcccgacttgacagggttcatcactgaaggacagatttacgtcgacagacagttgcacaatagacagatctacccaccaataaatgtactgcccagtctgagcagactgatgaaatcagcaatcggcgagggcatgacccgcaaggaccacggtgatgtgagcaatcaactctatgcttgttacgccatcggaaaggatgtccaggcaatgaaggctgtagtgggtgaggaggccttaacatcagaagaccttttatatctggagtttctgcagaaattcgaaaaaaactttataaaccaggggccctacgaaaaccggtccgtattcgagtccctagatctgggatggaaattactgcgtatattccctaaagagatgttaaagcgaattccacaggcggtgatcgacgagttctactcacgcgagggcgccctgcaggacctagcccctgatacagccttatag

SEQ ID NO: 119947 - DNA, 1467 bp, Artificial Sequence
  derived and/or modified sequence
atgcaggccgtgacaagaaattacatcactcatccacgagtgacctaccgcactgtttgttcagtcaacgggcctctggtcgtcttggatagggttaagttcgcccagtacgcagagattgtccacttcacactgcctgatggaacacagagatctgggcaagtccttgaagtggccggcaccaaggccattgtacaggtttttgagggaacgtccggaattgacgccaggaagactacatgtgagttcactggtgacatactgcgcacccccgtctcggaggatatgctggggagagttttcaatggctcaggcaagcccatcgataagggcccggtggtcatggccgaggatttcctggacatcaatggtcagccaatcaaccctcatagtaggatctaccctgaagagatgatacagactggaattagtccaatcgacgtgatgaattctattgctaggggacaaaagattcccatcttcagcgcagcagggctgccccataatgagatcgcggcccagatttgtaggcaagccggcctggtcaagaaatccaaggccgtgctcgactaccatgacgacaattttgccatagtctttgctgcgatgggcgtcaacatggaaacagcacgcttcttcaaatccgatttcgagcagaacggtacaatggggaatgtttgcctgttccttaatttagccaacgatccaactattgaaaggattataaccccgcgtctggctctgacaactgctgagttcctggcctatcagtgcgagaagcatgtgttggtgatcctgaccgatatgtcaagttacgcagaggctctaagggaagtgtcagcagctagggaagaggtccccggtcggcggggttttccaggctatatgtatacagacctagcaaccatatatgagcgggccggtagagtggagggccgaggtggctccatcactcaaatccctatacttacaatgcctaatgacgacattacccatcctattcccgacttgacaggcttcatcacagaaggtcagatctatgtggacagacaactgcacaacaggcagatctaccctcctatcaacgttctaccatccctgtctagactgatgaagagcgccatcggagagggcatgaccaggaaagatcacggcgacgtcagcaaccaactgtacgcttgctacgccattggcaaggatgtccaggcgatgaaagcggtcgtgggtgaggaggcactgacatctgaagatctgctgtacctcgagtttctgcagaagtttgagaagaacttcatcaatcaggggccgtatgagaaccgctctgtatttgagagcctggacctcggctggaagctcctgcgaatctttcccaaagaaatgctgaagcggataccacaagctgtgattgacgagttttattctagggaaggagctctgcaggacttggccccagatactgccttgtag

SEQ ID NO: 119948 - DNA, 1491 bp, Artificial Sequence
  derived and/or modified sequence
atggccatggagattgacagcaggcctgggggcctgcccggcagcagctgcaacctgggcgccgcccgggagcacatgcaggccgtgaccaggaactacatcacccacccccgggtgacctacagaacagtgtgcagcgtgaatggccccctggtggtgctggacagagtgaagtttgcccagtatgcagaaattgtgcacttcaccctgcctgatggcacccagaggagcggccaggtgctggaggtggccggcaccaaggccatcgtgcaggtgtttgagggcaccagcggcattgatgccaggaagaccacctgtgagttcaccggggacatcctgcggacccctgtgtctgaggacatgctgggccgggtcttcaatggaagtggcaagcccatcgacaagggccctgtggtgatggccgaggacttcctggacatcaatggccagcccatcaacccccacagccgcatctacccagaggagatgatccagacaggcatcagccccattgatgtgatgaacagcatcgcccggggccagaagatccccatcttctctgctgctggcctgccccacaatgaaattgctgcccagatctgccggcaggccggcctggtgaagaagagcaaggctgtgctggactaccatgatgacaactttgccatcgtgtttgctgccatgggcgtgaacatggagacagcccgcttcttcaagagtgactttgagcagaatggcaccatgggaaatgtgtgcctcttcctgaacctggccaatgaccccaccatcgagcgcatcatcaccccccggctggccctgaccacagctgagttcctggcctaccagtgtgagaagcacgtgctggtgatcctgacagacatgagcagctatgcagaggccctgcgggaggtgtctgctgcccgggaggaggtgcccggccggcggggcttccctggctacatgtacacagacctggccaccatctatgagcgggccggccgggtggaggacatcacccaccccatcccagacctgaccggcttcatcacagagggccagatctacgtggaccggcagctgcacaaccggcagatctacccacccatcaacgtgctgcccagcctgagccggctgatgaagagcgccatcggggagggcatgaccaggaaggaccatggagatgtgagcaaccagctgtatgcctgctacgccatcggcaaggatgtgcaggccatgaaggctgtggtgggggaggaggccctgaccagcgaggacctgctgtacctggagttcctgcagaagtttgagaagaacttcatcaaccagggcccctatgagaacagatctgtgtttgagagcctggacctgggctggaagctgctgcgcatcttccccaaggagatgctgaagaggatcccccaggccgtgattgatgagttctacagccgggagggcgccctgcaggacctggccccagacacagccctgtag

SEQ ID NO: 119949 - DNA, 1467 bp, Artificial Sequence
  derived and/or modified sequence
atgcaggccgtgaccaggaactacatcacccacccccgggtgacctacagaacagtgtgcagcgtgaatggccccctggtggtgctggacagagtgaagtttgcccagtatgcagagatcgtgcacttcaccctgcctgatggcacccagaggagcggccaggtgctggaggtggccggcaccaaggccatcgtgcaggtgtttgagggcaccagcggcattgatgccaggaagaccacctgtgagttcaccggggacatcctgcggacccctgtgtctgaggacatgctgggccgggtcttcaacggcagcggcaagcccatcgacaagggccctgtggtgatggccgaggacttcctggacatcaatggccagcccatcaacccccacagccgcatctacccagaggagatgatccagacaggcatcagccccattgatgtgatgaacagcatcgcccggggccagaagatccccatcttctctgctgctggcctgccccacaatgaaattgctgcccagatctgccggcaggccggcctggtgaagaagagcaaggctgtgctggactaccatgatgacaactttgccatcgtgtttgctgccatgggcgtgaacatggagacagcccgcttcttcaagagtgactttgagcagaatggcaccatgggaaatgtgtgcctcttcctgaacctggccaatgaccccaccatcgagcgcatcatcaccccccggctggccctgaccacagctgagttcctggcctaccagtgtgagaagcacgtgctggtgatcctgacagacatgagcagctatgcagaggccctgcgggaggtgtctgctgcccgggaggaggtgcctggaagaagaggcttccctggctacatgtacacagacctggccaccatctatgaaagagctggccgggtggagggccggggcggcagcatcacccagatccccatcctgaccatgcccaatgatgacatcacccaccccatcccagacctgaccggcttcatcacagagggccagatctacgtggaccggcagctgcacaaccggcagatctacccacccatcaacgtgctgcccagcctgagccggctgatgaagagcgccatcggggagggcatgaccaggaaggaccatggagatgtgagcaaccagctgtatgcctgctacgccatcggcaaggatgtgcaggccatgaaggctgtggtgggggaggaggccctgaccagcgaggacctgctgtacctggagttcctgcagaagtttgagaagaacttcatcaaccagggcccctatgagaacagatctgtgtttgagagcctggacctgggctggaagctgctgcgcatcttccccaaggagatgctgaagaggatcccccaggccgtgattgatgagttctacagccgggagggcgccctgcaggacctggccccagacacagccctgtag

SEQ ID NO: 119950 - DNA, 1491 bp, Artificial Sequence
  derived and/or modified sequence
atggccatggagatcgacagccggcccggcggcctgcccggcagctcctgtaatctgggcgcagcaagagagcacatgcaagcagtgacacgaaactacataacacatcccagggttacataccgcactgtttgcagtgtcaatggtcctctggtcgtgctcgatcgcgtgaagtttgcccagtacgccgagatagtgcacttcacgctgcctgacggcactcagcggagcggtcaggttctggaagttgctggtaccaaggccatcgtgcaggtgtttgaaggcacctccggcatcgatgcccggaagacaacttgcgagttcactggggacatcctgcggacgccagtcagtgaggatatgctgggcagagtcttcaacggttcaggaaagccaatcgataagggaccagtcgttatggcagaagactttctggatattaacgggcaacctattaatccacacagcaggatatatcctgaggagatgatccagaccgggatctcccccatagacgttatgaactccattgctcgcggtcagaagattcccatctttagtgctgccgggctgccgcacaacgagattgctgcacagatctgccgccaagctggcctggtgaagaagtcgaaagcagtcctggattaccacgatgataatttcgccattgtgttcgcagccatgggagtgaatatggagacagcacggttttttaaatccgacttcgaacagaacgggaccatgggcaatgtgtgtttgttcctcaatcttgctaacgatccaacaattgagaggatcattacacctaggctggccttaaccactgcggagttcctcgcataccagtgcgagaagcatgttcttgtgatcttgacagacatgtcctcctatgcagaagcgctacgggaagtgtccgccgctcgtgaggaggttccaggtcggagggggtttccaggttatatgtataccgatcttgccacaatatacgagcgggctggccgggtggaagacatcactcatccaatacctgacctgaccgggttcatcacagagggccagatttacgtcgacagacagctacataatagacagatatatcctcccatcaacgtgctcccctccctgtcacgcctcatgaagtctgccatcggggaaggtatgacaagaaaagatcatggagacgtgtcaaatcagctgtatgcctgttacgccataggcaaagacgtccaggccatgaaagctgtggtcggtgaagaggcattgacgagcgaggatctgctctacctggaattcttacagaagtttgaaaaaaactttatcaaccaaggaccctacgagaacaggtctgtcttcgaatccctggacctcgggtggaaactcctgcgaatatttccaaaggaaatgctgaagagaataccacaggcagtcattgatgagttttacagcagggagggtgctctgcaggaccttgccccggatacagccctgtag

SEQ ID NO: 119951 - DNA, 1467 bp, Artificial Sequence
  derived and/or modified sequence
atgcaggccgtgacccggaactacatcacccacccccgggtgacctatagaacagtgtgctcagtgaatggcccactcgtggtgctcgatagggttaaattcgcccagtatgccgagattgttcactttacattaccagatggaactcagcgctcaggccaggtcttagaggtcgcaggcacaaaagctattgtccaggttttcgagggtacatcgggcatagacgcccgcaaaacgacctgtgagttcaccggggatatcctgcgaaccccagtcagcgaggatatgctggggcgtgttttcaacggttctggcaaaccgattgataagggacccgttgttatggctgaagattttctggacattaatggccagcccattaacccccacagcaggatctaccccgaggagatgatccagaccggcattagtccgatcgatgttatgaattccattgcacgaggccagaaaatcccgatatttagcgctgcaggcctgccccacaatgaaatagctgcccagatctgcagacaggctgggttagtgaaaaaaagtaaagccgtgctcgactatcatgatgataattttgcaatagtgttcgcggccatgggtgttaatatggagaccgctaggttttttaaatcggacttcgagcagaatggcaccatgggaaacgtctgtcttttcttaaacctggcgaacgatcctacgattgaacgcatcatcacaccgcggttggccctgacaaccgccgagttcttggcgtaccagtgcgaaaagcatgtgcttgtaattttaaccgacatgtcaagttatgccgaagctctgagggaagtgagcgctgctagagaggaggtgccaggcagacgaggatttccggggtacatgtataccgaccttgccacaatctatgaacgagcaggaagagtggagggccgcggaggctccattactcaaatccctattcttacgatgccaaacgatgacataacacaccctattcccgacctgacggggtttatcaccgagggccagatttacgttgaccgccagctgcacaacaggcagatctatccccccattaacgttctcccttccctgtcaaggttaatgaaaagcgcgattggggaaggcatgacccgaaaggaccatggtgacgtttccaatcagctgtatgcgtgttacgccatagggaaagacgtccaggccatgaaggcagtggtcggtgaggaggcattgacttcagaagacttgctttaccttgaatttctgcagaagttcgagaagaatttcatcaaccagggtccctatgagaaccgttcagtgttcgagtctctggacctgggatggaaactactgcgtatcttcccaaaggaaatgctcaaaaggatcccacaagccgttatcgacgagttctactccagagagggcgcgttgcaagatttagcacccgatacggcactttag

SEQ ID NO: 119952 - DNA, 1491 bp, Artificial Sequence
  derived and/or modified sequence
atggccatggagattgacagcagaccaggcggtctccccggttcgtcctgtaatctgggggctgctcgggaacacatgcaggccgtcactcgtaattatattactcatccacgggtgacttaccggactgtatgcagtgtgaacggcccactcgtcgtccttgacagggtcaaatttgcacagtatgcagagatcgtccacttcactctccctgacggcactcaacgatccggacaagtccttgaggtggcgggaactaaggcaattgtccaggtgttcgaaggcacttctggaatcgatgcaaggaaaaccacttgtgaattcacaggagacatcttgcgaactccagtgtccgaggatatgctggggcgagtgttcaatggatcgggaaagccaattgataaaggacctgtggtgatggccgaggacttcctcgatataaacggtcagcccataaacccccacagtcgcatttatccagaagagatgatccaaacagggattagtcctatcgatgtgatgaactcgattgccagggggcagaagattcccatcttcagtgccgctggcctgccgcacaacgaaattgcagctcagatttgccgtcaggcagggctcgtcaagaagtcgaaggcggtgttggattaccatgatgacaattttgcaatcgtctttgcagcaatgggggtcaacatggagacagcacggttctttaagagtgacttcgagcagaacggaaccatgggaaatgtgtgtctgttccttaatcttgcaaatgatcctaccatcgaaagaataattactccacgcctggcgctgacaaccgcggaatttctggcatatcagtgtgagaagcatgtgttagtaatcctcaccgacatgtcgagctatgccgaggctttaagggaggtgtccgcggctagagaagaggtgccaggcaggagaggctttcctggctatatgtataccgatcttgccaccatttacgagagagcgggaagggtagaggatattactcacccaattcctgaccttacagggtttatcacggagggtcagatttatgtagacaggcagctgcacaaccgccagatctacccccctattaacgtgttgccatctttgtccagactgatgaagtctgcaatcggtgaagggatgacacggaaggatcatggtgacgtgtctaatcaactgtacgcgtgctacgccatcggcaaggacgtacaggccatgaaagccgtggttggcgaggaagccctcaccagtgaggacctgctctacctagagtttctgcaaaagttcgaaaaaaattttatcaaccagggaccttacgaaaaccgcagtgtctttgagagtctggaccttggctggaagctgctgcgaatttttcccaaggaaatgctcaaaagaatccctcaggcagtcattgacgagttctattctcgggagggggctcttcaagacctggccccagatacggctctgtag

SEQ ID NO: 119953 - DNA, 1467 bp, Artificial Sequence
  derived and/or modified sequence
atgcaagccgttaccagaaactatattacacacccacgagtgacatatcggactgtatgttcagttaatggcccacttgtagttctggatagagtgaagtttgcccagtacgcggagatcgtgcactttacccttcccgacgggacacaacgcagcggacaggtgttggaggtcgccggaaccaaggccattgtgcaggtgttcgagggtactagcgggatcgatgcaaggaaaacaacgtgcgaattcacaggggacatcctgcgcacgccagtgagcgaggacatgctgggacgggtgtttaatgggtcaggtaagcccatcgacaaaggcccagtcgtgatggctgaggattttttagatattaacggtcagccgatcaacccccactctcgaatttaccccgaagagatgattcagacgggtatcagtccaatcgacgtgatgaactccattgctcggggacagaaaattccaattttttccgctgccggactacctcacaatgagatcgctgcacagatttgcaggcaagccggactggtgaagaaatccaaggctgtgctggattaccacgatgacaacttcgcgatcgtttttgccgcaatgggcgtgaacatggaaacagcacggttctttaagagcgactttgaacaaaatggtaccatggggaatgtgtgcctgttcttaaatctggccaatgatccgaccattgaaaggattatcacccctcggttggccctgacgacagctgaatttctcgcctaccaatgtgagaaacatgtcctcgtgatcctcacggacatgagctcatatgcggaagccttgagggaagtctccgctgctcgcgaagaagtcccgggtagacggggattcccaggctatatgtataccgatctagctacgatatacgaaagagccggacgcgttgagggcaggggaggaagcattacccagattcccatcctgacaatgccaaacgacgatattactcacccgatccccgacctgactggattcattactgaggggcagatctatgtggaccgacagctgcacaataggcagatctacccaccaattaacgtcctgccaagtctgtcacggttgatgaagtccgctattggcgagggaatgacccgaaaggaccacggggatgtttccaatcagttgtacgcatgttatgcaatcgggaaggacgtgcaagccatgaaagctgtggtgggtgaggaggctttgacgtctgaagatctgctatacctggaattccttcagaagtttgagaaaaattttatcaaccagggcccatatgagaaccgctcagtctttgaatctctggatctggggtggaagctgctgagaatctttccgaaagagatgctaaagcggatcccacaggccgttattgacgagttctattcgcgggaaggcgctttacaggacttggcgcctgacacagcgctgtag

SEQ ID NO: 119954 - DNA, 1891 bp, Artificial Sequence
  derived and/or modified sequence
agctggacctgaagtctcagagctgccaccagcagcaggctcagacactgggctcccagctggggactgctccatggccatggagatagacagcaggcctggggggctccccggcagtagctgcaacctaggtgcagcccgagaacacatgcaggcggtcacccgaaactacatcacccacccccgtgtcacctacaggactgtgtgcagcgtgaacgggcccctggtggtgctggaccgggtcaagtttgcccagtatgcggagatcgtccacttcaccctcccagatgggactcagaggagcgggcaggtgcttgaggtggctggcaccaaggcgattgttcaggtgtttgaagggacatcagggatcgatgccaggaagaccacttgcgaatttacaggggacatcctacgaactccggtgtcagaggacatgctgggtcgggttttcaatggctccggcaagcccattgacaaggggccagtggtcatggcggaggactttctggatatcaatggccagcccatcaacccgcactcccgcatctaccccgaggagatgattcagacgggcatttctcctattgacgtcatgaacagcattgcccgcggccagaagatccccatcttctcagcagccgggctcccccacaatgagattgccgctcagatctgccgccaggcggggctggtgaagaagtccaaggctgtgctggattaccatgacgacaacttcgccatcgtctttgcagccatgggggtgaacatggagacagccagattcttcaagtctgactttgagcagaatggaaccatggggaacgtctgcctcttcctgaacttggccaatgaccccacgatcgagcggatcatcaccccgcgcctggcgctgaccactgctgaattccttgcctaccagtgtgagaagcatgtgctggtcatactgacggacatgagttcctatgcagaggccttgcgggaggtctctgctgctagagaggaggtgcctgggcgccgagggtttcctggatatatgtacacagacctggccaccatctacgagcgggcgggccgcgtggagggtcggggaggatccatcacacagatccccatcctcaccatgcccaacgacgatatcacccaccctatcccagacttgacgggcttcatcacagagggacagatctacgtggacagacagcttcacaacagacagatctacccccccatcaacgtgctcccttccctgtcgcggctgatgaagtcagccattggggaaggcatgacaagaaaggaccatggagatgtctccaaccagctgtacgcctgctatgccatcgggaaggacgtgcaggccatgaaggcagtagttggggaggaggcgctcacctctgaggacctgctctacctggaattcctgcagaagtttgagaagaacttcatcaatcagggcccctacgagaaccgctcggtgttcgagtcgctggacctgggctggaagctgctgcgcatcttccccaaggagatgctgaagcgcattccgcaggccgtgatcgacgagttctattcccgcgagggggcgctgcaggacctcgcgcctgacactgcgctctagccccgcgcgccgtggcaccccaacaccggcagggaacctaccctcggctcccgggtctcccctccctcgccaccccaaccagcggcttctgcgccgccctccgccctccgctggctccgaggtggtgggggcgccgcacgctccatccctttccctcgctcgattccttttcccgcgctccatgcctccccctcgactcccggtgctgcggaagaactgaaggttgcgatgccttactctgacgggagcatctgtatttttatgttaaaagcccac

SEQ ID NO: 119955 - DNA, 1805 bp, Artificial Sequence
  derived and/or modified sequence
ctcagacactgggctcccagctggggactgctccatggccatggagatagacagcaggcctggggggctccccggcagtagctgcaacctaggtgcagcccgagaacacatgcaggcggtcacccgaaactacatcacccacccccgtgtcacctacaggactgtgtgcagcgtgaacgggcccctggtggtgctggaccgggtcaagtttgcccagtatgcggagatcgtccacttcaccctcccagatgggactcagaggagcgggcaggtgcttgaggtggctggcaccaaggcgattgttcaggtgtttgaagggacatcagggatcgatgccaggaagaccacttgcgaatttacaggggacatcctacgaactccggtgtcagaggacatgctgggtcgggttttcaatggctccggcaagcccattgacaaggggccagtggtcatggcggaggactttctggatatcaatggccagcccatcaacccgcactcccgcatctaccccgaggagatgattcagacgggcatttctcctattgacgtcatgaacagcattgcccgcggccagaagatccccatcttctcagcagccgggctcccccacaatgagattgccgctcagatctgccgccaggcggggctggtgaagaagtccaaggctgtgctggattaccatgacgacaacttcgccatcgtctttgcagccatgggggtgaacatggagacagccagattcttcaagtctgactttgagcagaatggaaccatggggaacgtctgcctcttcctgaacttggccaatgaccccacgatcgagcggatcatcaccccgcgcctggcgctgaccactgctgaattccttgcctaccagtgtgagaagcatgtgctggtcatactgacggacatgagttcctatgcagaggccttgcgggaggtctctgctgctagagaggaggtgcctgggcgccgagggtttcctggatatatgtacacagacctggccaccatctacgagcgggcgggccgcgtggaggatatcacccaccctatcccagacttgacgggcttcatcacagagggacagatctacgtggacagacagcttcacaacagacagatctacccccccatcaacgtgctcccttccctgtcgcggctgatgaagtcagccattggggaaggcatgacaagaaaggaccatggagatgtctccaaccagctgtacgcctgctatgccatcgggaaggacgtgcaggccatgaaggcagtagttggggaggaggcgctcacctctgaggacctgctctacctggaattcctgcagaagtttgagaagaacttcatcaatcagggcccctacgagaaccgctcggtgttcgagtcgctggacctgggctggaagctgctgcgcatcttccccaaggagatgctgaagcgcattccgcaggccgtgatcgacgagttctattcccgcgagggggcgctgcaggacctcgcgcctgacactgcgctctagccccgcgcgccgtggcaccccaacaccggcagggaacctaccctcggctcccgggtctcccctccctcgccaccccaaccagcggcttctgcgccgccctccgccctccgctggctccgaggtggtgggggcgccgcacgctccatccctttccctcgctcgattccttttcccgcgctccatgcctccccctcgactcccggtgctgcggaagaactgaaggttgcgatgccttactctgacgggagcatctgtatttttatgttaaaagcccacaaaa

SEQ ID NO: 119956 - DNA, 1847 bp, Artificial Sequence
  derived and/or modified sequence
agagctgccaccagcagcaggctcagacactgggctcccaggcagtagctgcaacctaggtgcagcccgagaacacatgcaggcggtcacccgaaactacatcacccacccccgtgtcacctacaggactgtgtgcagcgtgaacgggcccctggtggtgctggaccgggtcaagtttgcccagtatgcggagatcgtccacttcaccctcccagatgggactcagaggagcgggcaggtgcttgaggtggctggcaccaaggcgattgttcaggtgtttgaagggacatcagggatcgatgccaggaagaccacttgcgaatttacaggggacatcctacgaactccggtgtcagaggacatgctgggtcgggttttcaatggctccggcaagcccattgacaaggggccagtggtcatggcggaggactttctggatatcaatggccagcccatcaacccgcactcccgcatctaccccgaggagatgattcagacgggcatttctcctattgacgtcatgaacagcattgcccgcggccagaagatccccatcttctcagcagccgggctcccccacaatgagattgccgctcagatctgccgccaggcggggctggtgaagaagtccaaggctgtgctggattaccatgacgacaacttcgccatcgtctttgcagccatgggggtgaacatggagacagccagattcttcaagtctgactttgagcagaatggaaccatggggaacgtctgcctcttcctgaacttggccaatgaccccacgatcgagcggatcatcaccccgcgcctggcgctgaccactgctgaattccttgcctaccagtgtgagaagcatgtgctggtcatactgacggacatgagttcctatgcagaggccttgcgggaggtctctgctgctagagaggaggtgcctgggcgccgagggtttcctggatatatgtacacagacctggccaccatctacgagcgggcgggccgcgtggagggtcggggaggatccatcacacagatccccatcctcaccatgcccaacgacgatatcacccaccctatcccagacttgacgggcttcatcacagagggacagatctacgtggacagacagcttcacaacagacagatctacccccccatcaacgtgctcccttccctgtcgcggctgatgaagtcagccattggggaaggcatgacaagaaaggaccatggagatgtctccaaccagctgtacgcctgctatgccatcgggaaggacgtgcaggccatgaaggcagtagttggggaggaggcgctcacctctgaggacctgctctacctggaattcctgcagaagtttgagaagaacttcatcaatcagggcccctacgagaaccgctcggtgttcgagtcgctggacctgggctggaagctgctgcgcatcttccccaaggagatgctgaagcgcattccgcaggccgtgatcgacgagttctattcccgcgagggggcgctgcaggacctcgcgcctgacactgcgctctagccccgcgcgccgtggcaccccaacaccggcagggaacctaccctcggctcccgggtctcccctccctcgccaccccaaccagcggcttctgcgccgccctccgccctccgctggctccgaggtggtgggggcgccgcacgctccatccctttccctcgctcgattccttttcccgcgctccatgcctccccctcgactcccggtgctgcggaagaactgaaggttgcgatgccttactctgacgggagcatctgtatttttatgttaaaagcccacaaaataaaaataaaaagtaactgagatg

SEQ ID NO: 119957 - DNA, 1542 bp, Artificial Sequence
  derived and/or modified sequence
atggccatggagatcgacagcagacccggcggcctgcccggcagcagctgcaacctgggcgccgccagagagcacatgcaggccgtgaccagaaactacatcacccaccccagagtgacctacagaaccgtgtgcagcgtgaacggccccctggtggtgctggacagagtgaagttcgcccagtacgccgagatcgtgcacttcaccctgcccgacggcacccagagaagcggccaggtgctggaggtggccggcaccaaggccatcgtgcaggtgttcgagggcaccagcggcatcgacgccagaaagaccacctgcgagttcaccggcgacatcctgagaacccccgtgagcgaggacatgctgggcagagtgttcaacggcagcggcaagcccatcgacaagggccccgtggtgatggccgaggacttcctggacatcaacggccagcccatcaacccccacagcagaatctaccccgaggagatgatccagaccggcatcagccccatcgacgtgatgaacagcatcgccagaggccagaagatccccatcttcagcgccgccggcctgccccacaacgagatcgccgcccagatctgcagacaggccggcctggtgaagaagagcaaggccgtgctggactaccacgacgacaacttcgccatcgtgttcgccgccatgggcgtgaacatggagaccgccagattcttcaagagcgacttcgagcagaacggcaccatgggcaacgtgtgcctgttcctgaacctggccaacgaccccaccatcgagagaatcatcacccccagactggccctgaccaccgccgagttcctggcctaccagtgcgagaagcacgtgctggtgatcctgaccgacatgagcagctacgccgaggccctgagagaggtgagcgccgccagagaggaggtgcccggcagaagaggcttccccggctacatgtacaccgacctggccaccatctacgagagagccggcagagtggagggcagaggcggcagcatcacccagatccccatcctgaccatgcccaacgacgacatcacccaccccatccccgacctgaccggcttcatcaccgagggccagatctacgtggacagacagctgcacaacagacagatctacccccccatcaacgtgctgcccagcctgagcagactgatgaagagcgccatcggcgagggcatgaccagaaaggaccacggcgacgtgagcaaccagctgtacgcctgctacgccatcggcaaggacgtgcaggccatgaaggccgtggtgggcgaggaggccctgaccagcgaggacctgctgtacctggagttcctgcagaagttcgagaagaacttcatcaaccagggcccctacgagaacagaagcgtgttcgagagcctggacctgggctggaagctgctgagaatcttccccaaggagatgctgaagagaatcccccaggccgtgatcgacgagttctacagcagagagggcgccctgcaggacctggcccccgacaccgccctgtag

SEQ ID NO: 119958 - DNA, 1542 bp, Artificial Sequence
  derived and/or modified sequence
atggcgatggagatagacagcagaccaggtgggttacccggatcaagctgtaatctcggagctgcccgtgagcacatgcaagcagtaaccaggaattacatcacccacccaagggtcacataccggacagtctgtagtgtgaacggccccctcgtggtgttggacagagttaaatttgctcagtacgccgaaatcgtgcacttcactctgcccgatggcacccagcgcagcggtcaggtgcttgaagttgccggcactaaggccatagtgcaagtgtttgagggaacgagtggtatcgacgccaggaaaacaacgtgtgaatttaccggagatattttgagaacacccgtgtcagaggacatgctgggaagggtgtttaatggatccggaaagcctatagacaagggacctgtggtgatggccgaagactttcttgacatcaacggacagccaatcaacccacactcccggatttaccctgaagagatgatacagaccggaatctcacctatcgatgtgatgaattctatcgcaagaggccagaaaattcctatttttagcgccgccggcctgccccacaatgagattgccgcacagatctgtagacaggccggcctggtgaaaaagtcaaaggcggtactggattatcacgacgacaattttgctatcgtattcgcagcaatgggagtgaacatggaaacagctagattttttaagtccgactttgagcagaatggcacgatgggcaatgtgtgtctgttcctcaatcttgcaaatgatcccaccattgaacggatcatcaccccaaggctggctttgacgacggcggagttcctcgcatatcagtgcgagaaacacgtgctcgtaatcttaactgacatgagctcttacgcagaagctctgagggaggtgtctgctgcaagagaggaggtgcctgggaggcgcggttttccgggctatatgtatacagatctggccacaatctacgaacgcgcaggtagggtggagggcaggggaggctctattactcagatacccattctgaccatgcccaacgacgacataacgcaccccatcccagatctgacagggttcatcaccgagggtcagatctacgtggatcggcagttgcacaaccggcagatctatcctcccatcaatgtgctgccgtcgttgagtagactgatgaagtcggccattggtgagggaatgacacgaaaggatcacggcgacgtctcgaaccaactgtatgcatgctacgctatcggcaaggacgtgcaggctatgaaggctgtggtgggcgaagaggcccttacaagcgaagatttgctgtacctggaattcctccaaaaatttgagaaaaactttataaaccaaggaccgtacgagaatagaagtgtgtttgaatctcttgatcttgggtggaagctgctacggatatttccaaaggaaatgctcaagcgcatccctcaggccgtgatcgatgagttctatagcagggagggagcactccaggacctggctccagatacagctctatag

SEQ ID NO: 119959 - DNA, 1542 bp, Artificial Sequence
  derived and/or modified sequence
atggccatggagattgacagcaggcctgggggcctgcccggcagcagctgcaacctgggcgccgcccgggagcacatgcaggccgtgaccaggaactacatcacccacccccgggtgacctacagaacagtgtgcagcgtgaatggccccctggtggtgctggacagagtgaagtttgcccagtatgcagaaattgtgcacttcaccctgcctgatggcacccagaggagcggccaggtgctggaggtggccggcaccaaggccatcgtgcaggtgtttgagggcaccagcggcattgatgccaggaagaccacctgtgagttcaccggggacatcctgcggacccctgtgtctgaggacatgctgggccgggtcttcaatggaagtggcaagcccatcgacaagggccctgtggtgatggccgaggacttcctggacatcaatggccagcccatcaacccccacagccgcatctacccagaggagatgatccagacaggcatcagccccattgatgtgatgaacagcatcgcccggggccagaagatccccatcttctctgctgctggcctgccccacaatgaaattgctgcccagatctgccggcaggccggcctggtgaagaagagcaaggctgtgctggactaccatgatgacaactttgccatcgtgtttgctgccatgggcgtgaacatggagacagcccgcttcttcaagagtgactttgagcagaatggcaccatgggaaatgtgtgcctcttcctgaacctggccaatgaccccaccatcgagcgcatcatcaccccccggctggccctgaccacagctgagttcctggcctaccagtgtgagaagcacgtgctggtgatcctgacagacatgagcagctatgcagaggccctgcgggaggtgtctgctgcccgggaggaggtgcccggccggcggggcttccctggctacatgtacacagacctggccaccatctatgagcgggccggccgggtggagggccggggcggcagcatcacccagatccccatcctgaccatgcccaatgatgacatcacccaccccatcccagacctgaccggcttcatcacagagggccagatctacgtggaccggcagctgcacaaccggcagatctacccacccatcaacgtgctgcccagcctgagccggctgatgaagagcgccatcggggagggcatgaccaggaaggaccatggagatgtgagcaaccagctgtatgcctgctacgccatcggcaaggatgtgcaggccatgaaggctgtggtgggggaggaggccctgaccagcgaggacctgctgtacctggagttcctgcagaagtttgagaagaacttcatcaaccagggcccctatgaaaatagatctgtgtttgagagcctggacctgggctggaagctgctgcgcatcttccccaaggagatgctgaagaggatcccccaggccgtgattgatgagttctacagccgggagggcgccctgcaggacctggccccagacacagccctgtag

SEQ ID NO: 119960 - DNA, 1542 bp, Artificial Sequence
  derived and/or modified sequence
atggccatggagatcgacagccggcccggcggcctgcccggcagcagctgcaatctcggtgcagcacgggagcatatgcaggctgttactcggaattatattacacatccccgagtgacctatcgcacagtgtgctccgtcaatgggcccctcgtagtgctggatcgcgttaaattcgctcagtacgcggagatcgtccatttcaccctccccgacggcacgcaacggtcaggacaggtcctggaagtggccggcactaaagctatagtgcaagtattcgagggaacctccggcatcgatgctcgcaagacaacttgcgaatttaccggagatatcctaagaacacccgtgagcgaggacatgctcggccgggtatttaacggctctggtaaacccattgataagggccccgtcgtgatggctgaggatttcctggatataaatggacagccaataaacccccattctcgcatatatccagaggagatgattcagaccggcatatcaccgattgatgtaatgaacagcatcgctaggggacagaaaatccccatattcagcgcggccgggctgcctcataacgagattgccgctcagatatgccggcaggcagggctagtgaaaaagtcaaaggctgttctggattaccacgatgataattttgctatcgtgttcgccgccatgggcgtgaacatggaaacagcaagattttttaagtctgacttcgagcagaatgggactatgggcaacgtgtgtctgtttcttaacctggctaacgaccctacaattgaacggattataacacccaggttggccctcacgaccgcagaatttctcgcctaccagtgcgaaaagcatgtactggttatattgacagacatgagcagttatgccgaggctctccgagaggtctccgctgcccgcgaagaggtgcccggacgtcgcggttttcctggctatatgtatacggatctcgccacgatctacgaaagagccggcagagtagagggtcgcggagggtctatcactcagatccctatccttacaatgccgaacgatgacattacacatccaatcccggacttgacgggtttcatcactgaaggtcagatttatgtggaccgccagctgcataatcggcagatttaccctccaataaatgtgcttccaagtctatccagattgatgaaaagtgcgataggagagggaatgacccgcaaagaccacggcgacgttagcaaccagctgtatgcctgttacgctatcggcaaggacgtgcaggccatgaaagccgtcgttggggaagaggcattaacgagcgaagatctgctgtatctggaattcctccagaaatttgaaaagaattttatcaaccagggtccctatgagaatcgtagcgtcttcgaatctctggacttgggctggaaactcctgagaatcttcccaaaggagatgctgaagaggatcccacaggctgtcatcgatgagttttactctcgggaaggcgctctgcaggaccttgccccagacacagcgctctag

SEQ ID NO: 119961 - DNA, 1542 bp, Artificial Sequence
  derived and/or modified sequence
atggcgatggaaattgactccagacccggtggtttacctggtagttcatgcaacctcggcgctgctagagagcatatgcaggccgtcacgcgcaactatataactcatccgagagtcacctatcggaccgtttgttcagtcaacggcccactggtggtgctcgatcgggttaaattcgcccagtacgccgagatcgtccacttcacgctgcccgatggcactcagagatctggacaggtgctcgaggttgcgggaaccaaagccattgtccaagtcttcgagggcacatccggcatcgatgcccgtaagactacatgtgaattcaccggtgacattcttcgcacacccgtgagcgaggacatgctcgggagagttttcaatggcagtggaaaaccaattgacaaagggccagtggttatggctgaagactttctggatatcaacggacagcccatcaatccccatagcaggatctacccggaggaaatgatccagaccggaataagtccgattgatgtgatgaatagtatcgccaggggtcaaaagattccgatcttctcagccgctggcctgcctcataatgaaatcgcagcccagatatgcaggcaggcaggcttggtgaagaagtcaaaggcagtgctggattatcacgacgacaacttcgcaatcgtcttcgccgcaatgggggtgaacatggaaaccgcacgattttttaaatcagattttgaacagaatggaaccatgggaaatgtgtgtcttttcctcaacctggccaatgaccctaccattgagcgtatcattactccccgactggcattgaccactgctgaattcctggcataccagtgtgagaagcacgttttggtgattttgaccgacatgtcatcctatgccgaggctctgcgggaagtatcggcagccagagaagaggtgccgggacgcaggggctttccgggatacatgtatacagatttggccacgatatatgagcgcgctggccgagtagaaggtagaggcggatcgatcactcagatacccatcctgaccatgcctaatgacgatataacacaccctattcccgatctgacagggttcataacagagggtcaaatctacgtcgaccgacagttacataatcgccagatctacccaccaataaacgttcttccatccttatctcgactgatgaagtctgccatcggcgaagggatgacgagaaaagatcacggagacgtctcaaatcagttatacgcatgctacgccatcggaaaagatgtgcaggcgatgaaagccgtggtgggagaagaagcactcacaagtgaggacctgctgtatctggaatttttgcagaaattcgaaaaaaattttatcaaccaaggaccatatgaaaatagaagcgtgttcgaatcactggacctggggtggaagctcctccggattttcccgaaggagatgctgaaacgaatcccccaggccgttatcgacgagttttatagtcgggaaggagctcttcaggatctcgcccctgataccgccctttag

SEQ ID NO: 119962 - protein, 511 aa, Artificial Sequence
  derived and/or modified sequence
MALRAMRGIVNGAAPELPVPTGGPAVGAREQALAVSRNYLSQPRLTYKTVSGVNGPLVILDHVKFPRYAEIVHLTLPDGTKRSGQVLEVSGSKAVVQVFEGTSGIDAKKTSCEFTGDILRTPVSEDMLGRVFNGSGKPIDRGPVVLAEDFLDIMGQPINPQCRIYPEEMIQTGISAIDGMNSIARGQKIPIFSAAGLPHNEIAAQICRQAGLVKKSKDVVDYSEENFAIVFAAMGVNMETARFFKSDFEENGSMDNVCLFLNLANDPTIERIITPRLALTTAEFLAYQCEKHVLVILTDMSSYAEALREVSAAREEVPGRRGFPGYMYTDLATIYERAGRVEGRNGSITQIPILTMPNDDITHPIPDLTGYITEGQIYVDRQLHNRQIYPPINVLPSLSRLMKSAIGEGMTRKDHADVSNQLYACYAIGKDVQAMKAVVGEEALTSDDLLYLEFLQKFERNFIAQGPYENRTVFETLDIGWQLLRIFPKEMLKRIPQSTLSEFYPRDSAKH

SEQ ID NO: 119963 - protein, 385 aa, Artificial Sequence
  derived and/or modified sequence
MLGRVFNGSGKPIDRGPVVLAEDFLDIMGQPINPQCRIYPEEMIQTGISAIDGMNSIARGQKIPIFSAAGLPHNEIAAQICRQAGLVKKSKDVVDYSEENFAIVFAAMGVNMETARFFKSDFEENGSMDNVCLFLNLANDPTIERIITPRLALTTAEFLAYQCEKHVLVILTDMSSYAEALREVSAAREEVPGRRGFPGYMYTDLATIYERAGRVEGRNGSITQIPILTMPNDDITHPIPDLTGYITEGQIYVDRQLHNRQIYPPINVLPSLSRLMKSAIGEGMTRKDHADVSNQLYACYAIGKDVQAMKAVVGEEALTSDDLLYLEFLQKFERNFIAQGPYENRTVFETLDIGWQLLRIFPKEMLKRIPQSTLSEFYPRDSAKH

SEQ ID NO: 119964 - DNA, 1536 bp, Artificial Sequence
  derived and/or modified sequence
atggccctgagagccatgagaggcatcgtgaacggcgccgcccccgagctgcccgtgcccaccggcggccccgccgtgggcgccagagagcaggccctggccgtgagcagaaactacctgagccagcccagactgacctacaagaccgtgagcggcgtgaacggccccctggtgatcctggaccacgtgaagttccccagatacgccgagatcgtgcacctgaccctgcccgacggcaccaagagaagcggccaggtgctggaggtgagcggcagcaaggccgtggtgcaggtgttcgagggcaccagcggcatcgacgccaagaagaccagctgcgagttcaccggcgacatcctgagaacccccgtgagcgaggacatgctgggcagagtgttcaacggcagcggcaagcccatcgacagaggccccgtggtgctggccgaggacttcctggacatcatgggccagcccatcaacccccagtgcagaatctaccccgaggagatgatccagaccggcatcagcgccatcgacggcatgaacagcatcgccagaggccagaagatccccatcttcagcgccgccggcctgccccacaacgagatcgccgcccagatctgcagacaggccggcctggtgaagaagagcaaggacgtggtggactacagcgaggagaacttcgccatcgtgttcgccgccatgggcgtgaacatggagaccgccagattcttcaagagcgacttcgaggagaacggcagcatggacaacgtgtgcctgttcctgaacctggccaacgaccccaccatcgagagaatcatcacccccagactggccctgaccaccgccgagttcctggcctaccagtgcgagaagcacgtgctggtgatcctgaccgacatgagcagctacgccgaggccctgagagaggtgagcgccgccagagaggaggtgcccggcagaagaggcttccccggctacatgtacaccgacctggccaccatctacgagagagccggcagagtggagggcagaaacggcagcatcacccagatccccatcctgaccatgcccaacgacgacatcacccaccccatccccgacctgaccggctacatcaccgagggccagatctacgtggacagacagctgcacaacagacagatctacccccccatcaacgtgctgcccagcctgagcagactgatgaagagcgccatcggcgagggcatgaccagaaaggaccacgccgacgtgagcaaccagctgtacgcctgctacgccatcggcaaggacgtgcaggccatgaaggccgtggtgggcgaggaggccctgaccagcgacgacctgctgtacctggagttcctgcagaagttcgagagaaacttcatcgcccagggcccctacgagaacagaaccgtgttcgagaccctggacatcggctggcagctgctgagaatcttccccaaggagatgctgaagagaatcccccagagcaccctgagcgagttctaccccagagacagcgccaagcactag

SEQ ID NO: 119965 - DNA, 1158 bp, Artificial Sequence
  derived and/or modified sequence
atgctgggcagagtgttcaacggcagcggcaagcccatcgacagaggccccgtggtgctggccgaggacttcctggacatcatgggccagcccatcaacccccagtgcagaatctaccccgaggagatgatccagaccggcatcagcgccatcgacggcatgaacagcatcgccagaggccagaagatccccatcttcagcgccgccggcctgccccacaacgagatcgccgcccagatctgcagacaggccggcctggtgaagaagagcaaggacgtggtggactacagcgaggagaacttcgccatcgtgttcgccgccatgggcgtgaacatggagaccgccagattcttcaagagcgacttcgaggagaacggcagcatggacaacgtgtgcctgttcctgaacctggccaacgaccccaccatcgagagaatcatcacccccagactggccctgaccaccgccgagttcctggcctaccagtgcgagaagcacgtgctggtgatcctgaccgacatgagcagctacgccgaggccctgagagaggtgagcgccgccagagaggaggtgcccggcagaagaggcttccccggctacatgtacaccgacctggccaccatctacgagagagccggcagagtggagggcagaaacggcagcatcacccagatccccatcctgaccatgcccaacgacgacatcacccaccccatccccgacctgaccggctacatcaccgagggccagatctacgtggacagacagctgcacaacagacagatctacccccccatcaacgtgctgcccagcctgagcagactgatgaagagcgccatcggcgagggcatgaccagaaaggaccacgccgacgtgagcaaccagctgtacgcctgctacgccatcggcaaggacgtgcaggccatgaaggccgtggtgggcgaggaggccctgaccagcgacgacctgctgtacctggagttcctgcagaagttcgagagaaacttcatcgcccagggcccctacgagaacagaaccgtgttcgagaccctggacatcggctggcagctgctgagaatcttccccaaggagatgctgaagagaatcccccagagcaccctgagcgagttctaccccagagacagcgccaagcactag

SEQ ID NO: 119966 - DNA, 1536 bp, Artificial Sequence
  derived and/or modified sequence
atggcactgcgggccatgcgcgggattgtgaacggtgcagctcccgaactgcctgtaccaaccggagggcccgccgttggagcacgtgagcaggcactggcggtcagccgcaattatctctcgcagccgcgccttacttataagacagtgagcggggtgaatggtccacttgtcattctggaccacgtaaaatttccaaggtatgccgagattgttcacctaaccttgccagacggcaccaagcggtcgggccaggtccttgaggtctcaggtagcaaggccgtggtgcaggtttttgaaggcacatccggcattgatgccaaaaaaaccagctgcgagttcacaggcgacattcttcggacgcccgtctccgaagacatgttgggaagggtgttcaacggtagcggcaagcccatcgaccgtgggcctgttgttctcgccgaggactttctggatataatggggcaaccaatcaatccccagtgccgcatctacccagaagagatgatccagacggggatctccgccattgatggaatgaatagcatcgcgcgtggccagaaaatccccattttctcagccgctgggctcccacacaatgaaattgccgctcagatctgccgtcaggcaggattggtgaaaaagagtaaggacgtagtggattattcggaagagaacttcgctattgttttcgccgccatgggcgtgaacatggagactgccaggttcttcaagtcagatttcgaggagaacgggagcatggataacgtgtgcttgttcctcaacctcgcaaacgaccctaccatcgagagaatcatcacaccacggctagcactgaccaccgccgaattcctcgcgtaccaatgtgagaaacatgttttagttattctgaccgacatgagctcatacgccgaagcactgcgcgaagttagcgccgctcgggaggaagtaccagggaggagagggttcccagggtacatgtacacagacctagcaaccatctacgaaagagctgggcgtgtggagggtcgaaacggttcgattactcagattccaattttgaccatgccaaacgacgacataacacacccaatccccgacctaaccggctatatcaccgagggccaaatttatgtggaccgccagttacataaccgtcagatatacccacctatcaatgttctacctagtttaagccggttgatgaaatccgcaattggggaaggcatgactagaaaagaccacgctgatgtgtcgaaccagctctatgcctgttacgcaatcggaaaggatgtgcaggccatgaaagccgttgtgggggaagaagccctaacctctgacgacctcttatacctggaattcctacagaagtttgaacgtaattttattgcccaaggcccttatgaaaaccggaccgtatttgagactctggacataggctggcagttgcttaggatttttccaaaagagatgttgaagcgcattccccagagcacgctgtctgagttttaccctcgtgattccgcgaaacactag

SEQ ID NO: 119967 - DNA, 1158 bp, Artificial Sequence
  derived and/or modified sequence
atgctgggacgcgtgttcaacggaagcgggaagccgattgatcgcggcccagttgtgctggcagaggactttttggatatcatgggtcagcccataaatccacagtgccgcatttacccggaggagatgatccaaacaggcataagtgccatagatggcatgaactcaattgccaggggccagaagatccccatattttcagccgccggactgccccataatgagatcgccgcccagatttgccgtcaggccgggctcgttaagaagtctaaggatgtcgtggactactccgaagaaaactttgccatcgtgttcgccgccatgggcgttaatatggaaactgcaaggttctttaaatctgacttcgaggaaaatggatccatggacaatgtgtgtctttttcttaatttagctaatgatcccacaatcgaaagaatcatcaccccaagactcgcccttaccacagccgagttcctcgcataccagtgcgagaaacatgtgctggttatactgacagacatgtcatcctacgcagaggcccttcgcgaggtgagcgccgcacgcgaggaggtcccaggtcgacgtggttttcccgggtacatgtacaccgacctggcaactatttacgagagagcaggaagagtggaaggccgaaatggcagtattacacagatcccgatccttacaatgcccaacgacgacatcactcaccccataccagacctgacgggttacattacagagggacaaatatacgttgaccggcagttacataaccgacaaatctaccctccaattaacgttttgccttctttatcccgcttgatgaagtccgcaatcggagaggggatgacacggaaagatcatgccgacgtttctaatcaactgtatgcctgttatgctatagggaaagacgttcaagccatgaaggcagttgttggcgaggaagcactgaccagtgatgatctgctttacctggagttcctccagaaatttgaacgcaactttattgcccagggaccatatgaaaataggactgtgttcgagaccttggacatcgggtggcagctgctgcgtatcttccccaaagagatgcttaagcggattccccagagcaccctttctgaattctaccccagggactcagccaaacactag

SEQ ID NO: 119968 - DNA, 1536 bp, Artificial Sequence
  derived and/or modified sequence
atggccctgcgggccatgaggggcatcgtgaatggagctgcccctgagctgcctgtgcccactggaggccctgctgtgggcgcccgggagcaggccctggccgtgtccaggaactacctgagccagccccggctgacctacaagacagtgtctggagtgaatggccccctggtgatcctggaccacgtgaagttccccaggtatgcagaaattgtgcacctgaccctgcctgatggcaccaagaggagcggccaggtgctggaggtgtctggcagcaaggctgtggtgcaggtgtttgagggcaccagcggcattgatgccaagaagaccagctgtgagttcaccggggacatcctgcggacccctgtgtctgaggacatgctgggccgggtcttcaatggaagtggcaagcccatcgaccggggccctgtggtgctggccgaggacttcctggacatcatgggccagcccatcaacccccagtgccgcatctacccagaggagatgatccagacaggcatcagcgccattgatggcatgaacagcatcgcccggggccagaagatccccatcttctctgctgctggcctgccccacaatgaaattgctgcccagatctgccggcaggccggcctggtgaagaagagcaaggatgtggtggactacagtgaagaaaattttgccatcgtgtttgctgccatgggcgtgaacatggagacagcccgcttcttcaagagtgactttgaggagaatggctccatggacaacgtgtgcctcttcctgaacctggccaatgaccccaccatcgagcgcatcatcaccccccggctggccctgaccacagctgagttcctggcctaccagtgtgagaagcacgtgctggtgatcctgacagacatgagcagctatgcagaggccctgcgggaggtgtctgctgcccgggaggaggtgcccggccggcggggcttccctggctacatgtacacagacctggccaccatctatgagcgggccggccgggtggagggcagaaatggcagcatcacccagatccccatcctgaccatgcccaatgatgacatcacccaccccatcccagacctgaccggctacatcacagagggccagatctacgtggaccggcagctgcacaaccggcagatctacccacccatcaacgtgctgcccagcctgagccggctgatgaagagcgccatcggggagggcatgaccaggaaggaccacgcagatgtgagcaaccagctgtatgcctgctacgccatcggcaaggatgtgcaggccatgaaggctgtggtgggggaggaggccctgaccagtgatgacctgctgtacctggagttcctgcagaagtttgagaggaacttcatcgcccagggcccctatgaaaatagaacagtgtttgagaccctggacatcggctggcagctgctgcgcatcttccccaaggagatgctgaagaggatcccccagagcaccctgtctgagttctacccccgggacagcgccaagcactag

SEQ ID NO: 119969 - DNA, 1158 bp, Artificial Sequence
  derived and/or modified sequence
atgctgggccgggtcttcaatggaagtggcaagcccatcgaccggggccctgtggtgctggccgaggacttcctggacatcatgggccagcccatcaacccccagtgccgcatctacccagaggagatgatccagacaggcatcagcgccattgatggcatgaacagcatcgcccggggccagaagatccccatcttctctgctgctggcctgccccacaatgaaattgctgcccagatctgccggcaggccggcctggtgaagaagagcaaggatgtggtggactacagtgaagaaaattttgccatcgtgtttgctgccatgggcgtgaacatggagacagcccgcttcttcaagagtgactttgaggagaatggctccatggacaacgtgtgcctcttcctgaacctggccaatgaccccaccatcgagcgcatcatcaccccccggctggccctgaccacagctgagttcctggcctaccagtgtgagaagcacgtgctggtgatcctgacagacatgagcagctatgcagaggccctgcgggaggtgtctgctgcccgggaggaggtgcccggccggcggggcttccctggctacatgtacacagacctggccaccatctatgagcgggccggccgggtggagggcagaaatggcagcatcacccagatccccatcctgaccatgcccaatgatgacatcacccaccccatcccagacctgaccggctacatcacagagggccagatctacgtggaccggcagctgcacaaccggcagatctacccacccatcaacgtgctgcccagcctgagccggctgatgaagagcgccatcggggagggcatgaccaggaaggaccacgcagatgtgagcaaccagctgtatgcctgctacgccatcggcaaggatgtgcaggccatgaaggctgtggtgggggaggaggccctgaccagtgatgacctgctgtacctggagttcctgcagaagtttgagaggaacttcatcgcccagggcccctatgaaaatagaacagtgtttgagaccctggacatcggctggcagctgctgcgcatcttccccaaggagatgctgaagaggatcccccagagcaccctgtctgagttctacccccgggacagcgccaagcactag

SEQ ID NO: 119970 - DNA, 1536 bp, Artificial Sequence
  derived and/or modified sequence
atggccctgcgggccatgcggggcatcgtgaacggcgccgcccccgaactgcctgtgccaacaggaggaccagctgtgggagcccgcgagcaagctttggctgtgtctcggaattacctaagccagccacgattgacatacaaaaccgtgagtggggtcaatggaccactcgtcatcctggatcacgtgaagttccctcgatacgcagagattgtacacctcacattgcccgacggcaccaaaaggagtggtcaagtcctggaggtctcagggtccaaggcagtagtgcaagtgttcgaaggcaccagcggtatcgatgctaaaaaaacttcctgtgaattcactggggatatcctgagaactccggtgtcagaggatatgctgggcagagttttcaatgggtctggtaaacccattgaccggggccccgtagtcctcgccgaggacttcctagatattatgggacagcctatcaatccccagtgtcgaatctacccagaagaaatgattcagaccggaattagcgcgattgatggcatgaacagtatagcccgtggacagaaaattccaatcttcagtgccgccggtctgccacacaacgagattgccgcccaaatttgtcggcaggctggcctggtgaagaagtccaaagatgtcgttgattatagtgaggaaaacttcgccatcgtatttgccgcaatgggcgtaaacatggagactgcccgcttcttcaagtctgactttgaggagaacggcagcatggacaacgtatgcttgttcttgaacctggccaacgatcccaccatcgaaaggatcatcaccccacgacttgctttaactacggctgagttcctggcctatcagtgcgagaaacacgtcttagtcatcctcacggacatgtcgtcatatgccgaagcactccgagaagtttcggcggcaagggaggaagtgcctggtcgtagaggcttcccaggctatatgtatactgaccttgccaccatatacgaacgcgccggtcgggtcgagggtaggaatggtagcatcacgcagataccgatattaacaatgcccaacgacgacattacccatcctattccagatttaaccggatacatcacggaggggcagatatacgttgaccgccagctgcataatcggcagatctaccctcccattaacgtgttaccctcactctccaggttgatgaaatccgctatcggtgaaggtatgacacgcaaggatcatgcagacgtgagcaaccaattgtacgcctgctacgctattgggaaggacgtgcaagctatgaaggcagtcgtgggggaagaggccttaacaagtgacgatctcctgtacctggagtttcttcagaaattcgaacgtaatttcatcgcacaggggccatatgagaatcgaacagtttttgagaccctggacataggatggcagctgcttaggatttttccaaaagagatgcttaagcgcattcctcagtccactctgtccgagttctatccgcgggactcagctaagcactag

SEQ ID NO: 119971 - DNA, 1158 bp, Artificial Sequence
  derived and/or modified sequence
atgctgggccgggtgttcaacggcagcggcaagcccatcgaccggggccctgtcgttctggccgaagacttcttagatattatggggcagcctattaatccgcagtgccgcatctatccggaggagatgatccagacaggaatctctgccattgacgggatgaacagtattgccagaggacagaaaataccgatttttagcgcggccgggctcccgcacaacgagatcgccgctcaaatctgtaggcaggcgggccttgtgaagaagtctaaggacgttgtggactattctgaggaaaactttgcgattgtcttcgccgccatgggggtgaacatggagaccgcccgttttttcaagtctgattttgaggagaatggtagtatggacaatgtgtgtctatttctgaatcttgccaacgaccccaccattgaaaggatcatcactcccagactcgcactgacgactgccgaattcctcgcataccaatgcgagaagcacgtactggtgatcctcaccgatatgtcctcttatgctgaggcgctaagagaggtttccgccgccagggaagaggtccccggtcgtagaggttttccgggctacatgtatactgacctggcgaccatctatgaaagagcagggagggttgagggccggaacggcagcattacgcagatcccgatcctgacaatgccaaacgatgatatcacgcatcccattccagatctcaccggatatatcacagagggccagatctacgtagaccgacagctacacaataggcagatctatcctccaataaacgttctgccttctctctctcggctcatgaagtccgccattggggaaggtatgacacggaaggaccacgccgatgtttccaatcagttgtacgcttgttacgctatcggaaaagacgttcaggctatgaaggcagtagtcggagaagaagctctgacgtctgatgacttgctgtacctcgagtttctgcagaaattcgagagaaacttcatcgcacagggtccgtatgagaaccggacagtgtttgagacccttgacatcggctggcagctgttgagaatctttcccaaggagatgctcaagagaattccacaaagcactctgagtgaattctacccccgggactccgcaaagcattag

SEQ ID NO: 119972 - DNA, 1536 bp, Artificial Sequence
  derived and/or modified sequence
atggccctgagggcaatgcgtgggatagtgaatggcgcagcccctgagttgcccgtgccaacaggcggtccagcggttggcgctagagagcaggcactggctgtctctcgcaactatctaagccagccacgccttacctataagacagttagtggtgttaatggacctctcgtgattctcgatcatgttaagtttcctagatatgcagagatcgtgcacctgacgttacccgatggtactaagcgtagcgggcaggtactggaggtctccggatcaaaagcagtcgtgcaggtgtttgaggggacaagcgggatagatgcaaagaagacttcctgcgaattcactggcgatattctgcggaccccagtcagcgaagacatgctgggtcgtgtgttcaacgggtctggcaaaccaatagacagagggccagtggtgctggcagaggactttttggacatcatgggccagcccatcaaccctcagtgtcggatttatcccgaagaaatgatccagaccggtatcagtgctatcgatggaatgaacagcatcgcacgaggtcagaaaataccgatattctctgcagccggactacctcacaatgaaatcgctgcccagatttgtcgccaggccggactggtgaagaagagtaaggacgtggtggactattcagaagagaacttcgctatcgtgttcgccgctatgggagtgaacatggaaacggcaagattcttcaaatctgatttcgaggagaacgggtccatggacaatgtatgcctctttctgaatctggccaacgatcctacaatcgagcggattatcacacctcgcttggccctgacaactgctgaattcctggcataccagtgtgagaaacatgtcctggtgatcctcaccgatatgtccagctacgcagaggccttgcgggaagtctctgcagctagggaagaggtacctggacggagaggattccctggctatatgtacacagatctcgccactatctatgaacgagctggaagagtggagggcagaaacggctcgatcacacagatccctattttgacgatgccaaacgacgacattacacacccaatccccgacctcacaggatacataactgaagggcagatttacgtggaccggcaattgcacaataggcagatctacccgccaatcaacgtcttgccctctttgagccggctcatgaaatctgctattggagaggggatgacaaggaaggaccatgctgacgtatccaatcaactctacgcctgttatgcaataggaaaggacgtgcaggccatgaaggcggtcgttggtgaggaagcactcacttcagacgacttgctgtatcttgaatttttgcagaagttcgaaaggaactttatagcacaggggccttacgagaaccggaccgtgtttgagacattggacattggatggcagttactcaggattttcccgaaggagatgctgaagaggattccccagagcactctgtcggagttctatccgagggattccgctaaacactag

SEQ ID NO: 119973 - DNA, 1158 bp, Artificial Sequence
  derived and/or modified sequence
atgttaggtcgagtgtttaatgggtcgggcaaacccattgaccgcggaccagtggtcctcgcagaggattttctggatatcatgggccaacctataaacccccaatgtagaatctatccagaggagatgatccagaccggcattagtgctatcgatgggatgaatagcatcgcgagaggtcagaagatccccattttctccgccgcaggactcccccataacgagattgctgcgcaaatctgccgacaggctggcctggtcaagaagtctaaggacgtcgttgattatagcgaggaaaactttgcaattgtgtttgccgcaatgggcgtaaacatggagacggcacgtttttttaagtctgactttgaagagaatgggagcatggacaatgtgtgcctgttcctgaatctcgccaacgaccccactattgagaggattattacccctcggctggccctgactactgccgaattcctcgcctatcagtgtgagaagcatgtgctcgtgatactcactgacatgagctcttatgccgaggcccttcgcgaagtcagcgctgcccgtgaagaagtccccggaaggcgcggatttccaggctacatgtatacggatctggccacgatttatgagcgggctggaagagtcgaaggcagaaacggctctattacacagatcccgatcttaaccatgcccaatgacgacattacccaccctatccccgacctcacaggctatattacagaaggccaaatatatgtggatagacagttacacaaccggcagatctacccacccattaatgttctgcccagtctcagccgcctgatgaaatctgcaatcggtgaggggatgactaggaaggatcacgcagatgtgagcaatcagctttatgcctgctatgcaattgggaaggacgtccaggccatgaaagccgttgtgggtgaggaagctctaacttcagacgacctgctgtatcttgagtttcttcaaaagttcgaacggaattttattgcccaggggccttacgagaacagaacagtcttcgaaacgcttgatatcgggtggcaactactgcgtatttttcccaaagagatgttaaagaggataccgcagtccactttaagtgagttttatccgagggactcagccaagcattag

SEQ ID NO: 119974 - DNA, 2875 bp, Artificial Sequence
  derived and/or modified sequence
gcggcgtcgctgctgggccagtcgggacagaggagacaagatggcgctgcgggcgatgcgggggattgtcaacggggccgcacccgagctacccgtgcccaccggtgggccggcggtgggagctcgggagcaggcgctggcagtcagtcggaactacctctcccagcctcgcctcacatacaagacagtatctggagtcaatggtccactagtgatcttagatcatgttaagtttcccaggtatgctgaaattgtccatttgaccttaccggatggcacaaagagaagtgggcaagttctggaagttagtggttccaaggcagtagttcaggtatttgaagggacttcaggtatagatgctaagaaaacgtcctgtgagtttactggggatattctccgaacaccggtgtctgaggatatgcttggtcgggtattcaatggatcgggaaaacccattgacagaggtcctgttgtactggccgaagacttccttgatatcatgggtcagccaatcaaccctcaatgtcgaatctacccagaggaaatgattcagactggcatttcggccatcgatgggatgaacagtattgctagggggcagaaaattcctatcttctctgctgctgggctaccacacaatgagattgcagctcagatctgtcgccaggctggtttggtaaagaaatccaaagatgtagtagactacagtgaggaaaattttgcaattgtatttgctgctatgggtgtaaacatggaaactgcccggttcttcaaatctgactttgaagaaaatggctcaatggacaatgtctgcctctttttgaacttggctaatgacccaaccattgagcgaattatcactcctcgcctggctctaaccacagctgaatttctggcgtaccaatgtgagaaacatgtattggttattctaacagacatgagttcttatgctgaagcacttcgagaggtttcagcagccagggaagaggtacctggtcgacgaggttttccaggttacatgtatacagatttagccacgatatatgaacgcgctgggcgagtggaagggagaaacggctcgattactcaaatccctattctaaccatgcctaatgatgatatcactcaccccatcccagacttgactggctacattacagaggggcagatctatgtggacagacagctgcacaacagacagatttatccacctatcaatgtgctgccctcactatcacggttaatgaagtctgctattggagaagggatgaccaggaaggatcatgccgatgtatctaaccagctatatgcgtgctatgctattggaaaggatgtgcaagccatgaaagctgtcgttggagaagaagcccttacctcagatgatcttctctacttggaatttctgcagaagtttgagaggaacttcattgctcagggtccttacgaaaatcgcactgtctttgagactttggacattggctggcagctactccgaatcttccccaaagaaatgctgaagagaatccctcagagcaccctcagcgaattttaccctcgagactctgcaaagcattagctgctgcttctgcattgctccgcgctcttgtgaaatactggttctgttttctttattccttttgcactctcggttcccacctttgtgttggagtttaccatgttaccctgtaattaaaaacaaagaataggtaacatattgtgccagtgttgcaacgttttaaactgctaacagaccttaaaatatccccctacctgggtcctcagtgctatgtttaaagtgctgcagggatggagtggcgttttcttattgctgtatgtattgtacatagtggagtagttagttacctgataacagtcttgttatttgggtctcttagaccttacctctcaactccctcaagagtaccagtctctgaagttataatgctttggtctctacattaggggcaagatccagtctgagagaagtctcctttgagaagggccaagaggctctttcctgagtgtttgctttcggtttgttggtatgcctgtattgctgggctgtgctgctgctcgaagcagatggttttgactgtctttttgctctttcctatataatgaatagatgagtgaaaggagttttctttttctctttagtacttacgtattgggattcctgtgtcttacagctctccctctccaaataatacacagaatcctgcaactttttgcacagctggtatctgtctggtagcagtgagaccccttgtcttggtgatccttactgggtttccaagcagaggagtcacatgattacaattgccagtagagttgttgtttggggtacaagatgagaagaaagaaaaacctacagcctttctacattctgacatgctaacagtggtttaagtttctaaagtgtttaccagatgctgaaggcaaggggagggagcagaagcacttatgtttacggatattttaaactctgttagagagcagcctttgaaaatccccaatttggttctgctttttgacctctctctaccttttcagggtaatctttgtggcacaaacgatagcatttccaagctttagagttttctgaattcctgcgccttcctgacgtgagccctgagcgatcttctatgcagttctgccatgcgtcctgttggtctctctgtgttctttgttacttgggtgcaatagcaacttccctaccccgtgcattccatctttcatgttgtgtaaagttcttcacttttttctctgagggctgggggttgggggagtcagcatgattatattttaatgtagaaaatgtgacatctggatataaaatgaaaataaatgttaaattaaatggaccttaactaaa

SEQ ID NO: 119975 - DNA, 1808 bp, Artificial Sequence
  derived and/or modified sequence
gggccagtcgggacagaggagacaagatggcgctgcgggcgatgcgggggattgtcaacgggagcaggcgctggcagtcagtcggaactacctctcccagcctcgcctcacatacaagacagtatctggagtcaatggtccactagtgatcttagatcatgttaagtttcccaggtatgctgaaattgtccatttgaccttaccggatggcacaaagagaagtgggcaagttctggaagttagtggttccaaggcagtagttcaggtatttgaagggacttcaggtatagatgctaagaaaacgtcctgtgagtttactggggatattctccgaacaccggtgtctgaggatatgcttggtcgggtattcaatggatcgggaaaacccattgacagaggtcctgttgtactggccgaagacttccttgatatcatgggtcagccaatcaaccctcaatgtcgaatctacccagaggaaatgattcagactggcatttcggccatcgatgggatgaacagtattgctagggggcagaaaattcctatcttctctgctgctgggctaccacacaatgagattgcagctcagatctgtcgccaggctggtttggtaaagaaatccaaagatgtagtagactacagtgaggaaaattttgcaattgtatttgctgctatgggtgtaaacatggaaactgcccggttcttcaaatctgactttgaagaaaatggctcaatggacaatgtctgcctctttttgaacttggctaatgacccaaccattgagcgaattatcactcctcgcctggctctaaccacagctgaatttctggcgtaccaatgtgagaaacatgtattggttattctaacagacatgagttcttatgctgaagcacttcgagaggtttcagcagccagggaagaggtacctggtcgacgaggttttccaggttacatgtatacagatttagccacgatatatgaacgcgctgggcgagtggaagggagaaacggctcgattactcaaatccctattctaaccatgcctaatgatgatatcactcaccccatcccagacttgactggctacattacagaggggcagatctatgtggacagacagctgcacaacagacagatttatccacctatcaatgtgctgccctcactatcacggttaatgaagtctgctattggagaagggatgaccaggaaggatcatgccgatgtatctaaccagctatatgcgtgctatgctattggaaaggatgtgcaagccatgaaagctgtcgttggagaagaagcccttacctcagatgatcttctctacttggaatttctgcagaagtttgagaggaacttcattgctcagggtccttacgaaaatcgcactgtctttgagactttggacattggctggcagctactccgaatcttccccaaagaaatgctgaagagaatccctcagagcaccctcagcgaattttaccctcgagactctgcaaagcattagctgctgcttctgcattgctccgcgctcttgtgaaatactggttctgttttctttattccttttgcactctcggttcccacctttgtgttggagtttaccatgttaccctgtaattaaaaacaaagaataggtaacatattgtgccagtgttgcaacgttttaaactgctaacagaccttaaaatatccccctacctgggtcctcagtgctatgtttaaagtgctgcagggatggagtggcgttttcttattgctgtatgtattgtacatagtggagtagttagttacctgataacagt

SEQ ID NO: 119976 - protein, 382 aa, Artificial Sequence
  derived and/or modified sequence
MTEFWLISAPGEKTCQQTWEKLHAATSKNNNLAVTSKFNIPDLKVGTLDVLVGLSDELAKLDAFVEGVVKKVAQYMADVLEDSKDKVQENLLANGVDLVTYITRFQWDMAKYPIKQSLKNISEIIAKGVTQIDNDLKSRASAYNNLKGNLQNLERKNAGSLLTRSLAEIVKKDDFVLDSEYLVTLLVVVPKLNHNDWIKQYETLAEMVVPRSSNVLSEDQDSYLCNVTLFRKAVDDFRHKARENKFIVRDFQYNEEEMKADKEEMNRLSTDKKKQFGPLVRWLKVNFSEAFIAWIHVKALRVFVESVLRYGLPVNFQAMLLQPNKKTLKKLREVLHELYKHLDSSAAAIIDAPMDIPGLNLSQQEYYPYVYYKIDCNLLEFK

SEQ ID NO: 119977 - DNA, 1149 bp, Artificial Sequence
  derived and/or modified sequence
atgaccgaattctggcttatttctgccccaggggagaagacctgccagcagacctgggagaaactgcatgctgcaacttccaagaacaataatctggcagtcacctctaaattcaacatccctgatctgaaggtcggcactcttgatgtactggttggtctgagcgacgaattggccaaattggacgcatttgttgaaggagtagtgaagaaggtcgctcagtacatggccgatgtactggaagactccaaagataaagtccaagagaatttgctagccaacggcgtggatctagtcacatatataacgagattccagtgggatatggcaaagtatcccattaagcagagcttgaaaaatatctcagagattattgccaaaggcgtgacacagattgacaacgatcttaagtcgcgtgcgtccgcatataataatctcaagggcaatctccagaacttagagcgaaagaacgccgggagcttgcttacgaggtccctggcggaaattgttaagaaagacgatttcgtgcttgactcagaatacctggtgaccctgctggtggtcgtgcctaaactcaatcacaacgattggattaaacaatatgagacccttgctgaaatggtggtgccacggtcctctaatgtgctgtcggaggatcaagactcttatctgtgtaacgtgacactgtttaggaaggcagtggatgattttcgacataaggccagagaaaacaaatttattgtgagagattttcagtacaacgaagaggagatgaaagcagataaggaagagatgaacaggctgtcgacggacaagaagaagcaatttggccccctcgtgaggtggctcaaagtgaacttttctgaggcattcattgcatggatacatgtcaaagccctcagagtttttgtggaaagcgttttgcgctacggcttacctgtaaatttccaggcgatgctgctgcagcctaataaaaagacgctgaagaagctacgtgaagtgctccatgagttgtataagcacctggacagttcggctgcagcgattattgacgcacctatggatattcccggtctgaatctgtcccaacaggagtattacccttacgtgtactataagatagattgcaaccttttggagttcaagtag

SEQ ID NO: 119978 - DNA, 1149 bp, Artificial Sequence
  derived and/or modified sequence
atgaccgagttctggcttattagtgcaccaggggagaagacttgccaacaaacctgggagaaattacacgctgcaacatcaaaaaataacaacctggcagtgaccagtaaattcaatatccctgacctgaaagtgggcacactggatgtcctggttgggctgagcgatgaactcgccaagttggacgctttcgttgagggcgtcgttaagaaggttgcgcagtatatggcggacgtactcgaggactcaaaggacaaagtgcaagaaaatctgttggcgaacggcgttgacctggtcacttatatcacccgctttcaatgggatatggctaaatacccaatcaagcaatccttgaaaaacatctctgagatcattgcaaagggtgtgactcagattgataacgatctcaagtcacgcgcctctgcgtacaacaatctcaagggtaacctgcagaatctggagaggaagaacgcaggaagcttgctaacacggagcctggccgagattgtcaagaaagatgacttcgtactcgatagcgagtacctggtcactctgctggtcgtggtgccaaagctgaaccacaatgactggattaaacagtatgaaaccttagccgaaatggtggttcccaggagcagcaatgttctgtctgaggaccaggacagctatctctgtaatgtaacactctttcggaaggctgtcgacgactttcgtcataaggccagagaaaataagttcatcgtcagagactttcaatacaacgaggaggaaatgaaggctgataaggaagagatgaataggctgtcaaccgataagaaaaagcaatttggccctctggtgagatggctcaaagtcaatttctcagaggctttcatagcgtggatccacgtcaaagcgctgagagtgttcgtggagtccgtgctccggtacggtctgcctgtcaactttcaggcaatgctcctacagccaaataagaagacccttaaaaaactccgggaagtgttacatgagctttacaaacacctggattcatctgctgcagccataatcgacgcccccatggatatacctggactgaatctgagccagcaggagtactacccctacgtgtactacaaaattgattgtaatctcttagagttcaagtag

SEQ ID NO: 119979 - DNA, 1149 bp, Artificial Sequence
  derived and/or modified sequence
atgacagagttctggctgatcagcgcccctggagagaagacctgccagcagacctgggagaagctgcacgccgccaccagcaagaacaacaacctggccgtgaccagcaagttcaacatcccagacctgaaggtgggcaccctggatgtgctggtgggcctgagtgatgagctggccaagctggatgcctttgtggagggcgtggtgaagaaggtggcccagtacatggctgatgtgctggaggacagcaaggacaaggtgcaggagaacctgctggccaacggggtggacctggtgacctacatcacccgcttccagtgggacatggccaagtaccccatcaagcagagcctgaagaacatcagcgagatcatcgccaagggcgtgacccagattgacaatgacctgaagagccgggccagcgcctacaacaacctgaagggcaacctgcagaacctggagaggaagaatgccggcagcctgctgaccaggagcctggccgagatcgtgaagaaggatgactttgtgctggacagcgagtacctggtgaccctgctggtggtggtgcccaagctgaaccacaatgactggatcaagcagtatgagaccctggccgagatggtggtgcccaggagcagcaatgtgctgtctgaggaccaggacagctacctgtgcaatgtgaccctcttcaggaaggctgtggatgacttccgccacaaggcccgggagaacaagttcatcgtgcgggacttccagtacaatgaggaggagatgaaggctgacaaggaggagatgaaccggctgagcacagacaagaagaagcagtttggccccctggtgcgctggctgaaggtgaacttcagcgaggccttcatcgcctggatccacgtgaaggccctgcgggtgtttgtggagagcgtgctgcgctatggcctgcctgtgaacttccaggccatgctgctgcagcccaacaagaagaccctgaagaagctgcgggaggtgctgcacgagctgtacaagcacctggacagcagcgctgctgccatcattgatgcccccatggacatccctggcctgaacctgagccagcaggagtactacccctacgtgtactacaagattgactgcaacctgctggagttcaagtag

SEQ ID NO: 119980 - DNA, 1149 bp, Artificial Sequence
  derived and/or modified sequence
atgaccgagttctggctgatcagcgcccccggcgagaagacctgccaacaaacatgggagaagctccatgcagctacatccaaaaataacaacctggccgtgacctctaagttcaatattcccgacctcaaagtcggtacactcgacgtgttagtgggtctgtcggatgagctggccaagctggacgcgtttgtcgagggagtggtcaagaaggtggcccaatatatggcagatgtactggaggatagtaaggataaggtgcaagaaaatcttctggcgaacggagtggatctggtgacttatatcacacggttccaatgggacatggccaagtacccaatcaaacagagcctgaaaaatatttcagaaataatagccaagggtgtcacccagatcgacaatgatctcaagagtagagccagcgcctacaataatctaaagggaaatttacagaatctcgaacgcaaaaatgctggatcactcttgacaaggtctcttgcggaaatcgtaaagaaggacgattttgtgctggacagcgagtacctggtgacactactggttgtggttccgaagctcaatcataacgactggatcaagcagtatgagacactcgcggagatggtggtcccccggtcaagtaatgtcctgtcagaggatcaggattcttacctgtgtaatgtcacccttttccgcaaggccgtggatgattttaggcacaaggcccgcgaaaataaattcattgtgcgcgacttccagtacaacgaagaagagatgaaggccgacaaagaggagatgaatcgcctctccacagataagaaaaagcaatttgggccgctggtgaggtggctgaaagtgaacttcagtgaggctttcatagcgtggatccatgtgaaagccctccgagtgttcgtcgaatccgttcttcgctatggtctgccagttaattttcaggccatgctcttgcagccaaacaaaaaaaccttgaaaaaactgagagaagttctacatgaattgtacaaacacttggatagtagtgctgctgctatcattgacgctccgatggatatccccggtttaaatctcagtcaacaggagtattacccatacgtttactacaagatcgactgcaacctgctagagtttaagtag

SEQ ID NO: 119981 - DNA, 1149 bp, Artificial Sequence
  derived and/or modified sequence
atgaccgagttctggctgatcagcgcccccggcgagaagacctgccaacagacctgggaaaaactgcacgcagccaccagcaaaaacaacaacctggccgttacctcaaaattcaacatacccgacctgaaggtgggcacccttgatgtcctcgtcggactgtctgatgagctggcgaagctagatgctttcgtcgagggagtggtgaagaaggttgcccagtacatggcagacgtactcgaagattccaaagacaaagttcaagaaaaccttctggctaatggggtcgacttggtaacttacataactcggttccagtgggatatggcaaagtaccctataaagcagagcctgaaaaatatttccgaaattattgccaaaggcgttacgcagatcgacaatgatctgaaaagccgcgccagcgcctacaacaatctcaagggaaatctgcagaaccttgagcgaaaaaacgcaggttctctgctgacaaggtcccttgctgaaattgtgaaaaaggatgacttcgttctggacagcgagtacctggtgacactgttagtggtggtgcctaagctcaatcacaatgattggattaagcagtacgagacactggcagagatggtggtccccagatccagtaacgtcctctccgaggatcaggactcttacctttgcaatgtgaccttattccgtaaagccgtcgacgatttcaggcataaagccagagagaataaattcattgtacgagatttccagtataacgaagaggagatgaaggcagataaagaagaaatgaaccggttgtcaaccgacaagaagaagcagttcgggccactcgtcagatggctcaaggtcaactttagcgaagcttttatagcttggatacacgtgaaagctctgcgcgtgttcgtggagagcgtcctgagatacggcttacctgtcaattttcaggctatgctgctccaaccaaacaagaaaactctgaagaagctgcgggaggtgctccatgaactatacaagcacttagatagttcggcggctgccattatcgatgcaccgatggatattccaggactcaacctgtctcagcaggagtattacccatacgtctactataagattgattgcaacctcctggagttcaaatag

SEQ ID NO: 119982 - DNA, 1149 bp, Artificial Sequence
  derived and/or modified sequence
atgaccgaattttggcttattagcgcccctggcgagaagacttgtcagcagacctgggaaaagctgcatgctgccacatccaaaaataacaaccttgccgtgacctctaagttcaatatccccgatctgaaagttggcaccttagacgtcttagtgggcctgtctgatgagctggcaaaactcgatgccttcgttgagggggtggtgaagaaagtggcccagtacatggcagacgttcttgaagactcaaaggacaaggtgcaggagaacctgttagctaatggagttgacctggtgacctacatcactcggttccagtgggacatggcaaaatacccgataaagcagtcactcaaaaatattagcgaaatcattgcaaaaggagtcacacaaatagacaacgatctgaagagcagagccagcgcctacaacaatctaaagggcaatctgcagaatctagagcgcaagaacgcaggcagcttgctcacccgctctctcgccgagatcgtgaaaaaagatgacttcgtactagacagtgagtacctcgtgaccttactggtggtcgtgcccaagctcaaccataatgattggattaaacagtacgagacactggccgagatggtggtgccgagatcatcgaatgttttgagcgaggatcaggacagttacctctgcaacgttacactatttcgaaaggcggtggacgatttcagacataaggcaagggagaataagttcatagtgcgggatttccagtacaatgaggaggagatgaaagctgataaggaggaaatgaaccgactcagcacagataaaaagaagcagttcggaccactggttagatggctgaaggtgaatttttcagaagcgtttattgcctggattcacgttaaggccttgagggtattcgtcgaatcagtgctgcgctacggacttcccgttaacttccaggctatgctactgcagccaaacaaaaaaacactgaagaaactgagggaggtgttgcatgagttgtataagcatctcgattccagtgcagccgcaatcatagacgcccctatggacatacctgggttgaacttgagtcagcaggagtactacccctatgtctattacaagatcgactgtaatctcctcgagtttaagtag

SEQ ID NO: 119983 - DNA, 1149 bp, Artificial Sequence
  derived and/or modified sequence
atgacagagttctggttgatttcagcaccaggagagaagacttgccagcagacttgggaaaagctgcatgccgctacaagtaaaaacaataatctggccgtcactagcaaatttaacattccagacctgaaggttggtaccctggatgtcctggtaggactgtctgacgaactggccaaattagatgcattcgttgagggtgtcgtgaagaaggtcgcccagtacatggccgacgtattagaggatagcaaagacaaagtgcaggaaaacttgctagccaacggcgtcgacctggtcacttatatcacacggttccagtgggacatggccaaataccccatcaagcaatcgctgaaaaatatcagtgaaattatcgctaagggcgttacccagattgacaatgatttgaaaagcagggcctctgcctacaacaacctcaagggcaacttgcaaaacctggaacggaagaatgccggatcactactgactcggtcacttgcggagattgtgaaaaaggacgactttgttctcgattcagaatacttagtgacactcctagtagtggttcctaagttaaatcataatgactggatcaaacagtacgaaacccttgctgaaatggtggttcccagatcaagcaacgttctctccgaggaccaggattcatacctgtgcaacgtgactctatttcggaaggccgttgatgatttccgacataaggcgcgtgaaaacaagttcatagtgcgggatttccagtacaacgaggaggagatgaaagcggataaggaggagatgaatcggttgagtacggacaaaaagaagcagtttggccctctcgttagatggctgaaggtgaacttttcagaagcctttatcgcttggattcatgttaaagctctgagagtgtttgttgaatctgtgctacggtacggactccctgtgaatttccaggccatgctgttgcaaccgaataagaagactcttaagaagctgagagaggttttgcatgagctctacaaacatctggattcttcggcagcggctatcattgatgctccaatggacatcccgggactgaatctgtcacagcaggagtattacccatatgtgtactacaagatcgactgcaacctactagaatttaagtag

SEQ ID NO: 119984 - DNA, 5612 bp, Artificial Sequence
  derived and/or modified sequence
gctgggctggcacgtgacttgttctgtgttcgcttgggtagaggaagccgtgaggccggagcttaggtcgggaagggatggatcgctgagccgatagcgtccgctaggctgtctgcctcgaatctctcttgatttttgaggaaatacctagtaacaaacatgactgagttctggcttatatctgctcctggggagaaaacctgtcagcaaacatgggagaaattgcatgcggcaacttcaaagaacaataatcttgctgtcacttccaagttcaatattcctgacttaaaggttggcacgttggatgtcttggttggcttgtcagatgaactggctaaactggatgcatttgtagaaggagtggttaagaaagtagctcaatacatggctgatgtattggaagatagcaaagacaaagttcaagagaatctgttggctaatggagtggacttggttacttatataacaaggttccagtgggacatggccaaatatccaatcaagcagtccctgaaaaatatttctgaaataattgccaagggagtaactcagattgataatgacctgaaatctcgagcatctgcatacaataacctgaaaggaaatcttcagaatttggaacgaaagaatgcaggaagtttgctaactagaagtctagcagaaattgtgaagaaggatgactttgttcttgattcagagtatctcgtcacattactggtagtagttcccaagttaaaccacaacgactggattaagcagtatgaaacactagccgaaatggtagttccaaggtctagcaatgttctttcagaggaccaagacagttacctgtgtaatgtcaccttgtttaggaaggcagttgatgacttcagacacaaagccagagaaaacaaattcattgttcgtgacttccagtataatgaagaggagatgaaagcagataaagaagaaatgaacaggctttctactgataagaaaaaacaatttggaccacttgtacggtggctgaaagtgaattttagtgaagcatttattgcatggattcacgtgaaagcattacgggttttcgttgagtctgttttaaggtatggcttgccagtgaacttccaagcaatgctacttcagcccaataagaaaactttgaagaaactgagagaagtattacatgaattgtataaacatctagacagcagtgcagcagctattattgatgctcctatggatattccaggtttaaacctgagtcaacaagaatactacccctatgtgtactacaagattgattgcaacttgctggaattcaagtgaaaatgggctcctcccccgacaatcctgtccttgtgtttgtgtgtgctaacagaaataagttgcagtatggtcgtacttttaactctagtatcctttgcttgcttcttacgccctttcctaggtgaattctcccacagtggtctgtatctcaacattttctttttaaaggaaaaaatatatatatatagtttctttttattgatcaggtctgtaaatgtgtactaaaaaaatcagagtttatttataaacaaaatagtttatttaaagagaaggtctcttccttattgatatcatggtatgcattaattccatttgttactattgtgcacaaaagccctgttcacaggggaatggtgtaaacatttatactgttttgttcactgtatttagtagacataactgttgaatagttactgaatcatgatgtaaagaatatgtgaccatcttcaggtatgggatttctgaacgtttcaaatttcaatcaatgagcactgtcaacacccacaggagagaataaaattacctgtgcaaaggtgtattgtggtgtgtgtaacttaagattacagttctgtttgagagttaaatgatgtcatagctcacttgctatgctgcttccaggattttgttatatgctgaggtgtaaccatttgtgttgtctgactttcgtatgatttaattgagccaaatttgggtcagaacacaaatttgaagatgacttttcagtatatgatgggtatttacatttgaacactagaattttaggtctctcaaataattaagaatagagccagttttgaataaagtctagcagaactatgcagctttagtcatttgttttgtctaagtctgtattttatgtgttgtcttcttaagatctataattttggcatttatgtcatttgtgacatagtctgaaaatagagacattgttggcctttaaaatctcagaaatgaatgacttaatttagtgtcctgaaagagcttttaaaagaggattttgtggcaatgtttctcttactacgtactcacaggtttgcaaatgggaaaaaagtttacatttcagtttaggggcatatctaagctatgctattccctttagaaaattagcctccaaaatcttttgtttcaaaatattatattatttcataaataatttcaagcaaatacagacatccacaatgtagaacatgagagaccccctccctcaatttccacctcccaagggaagtttatgtatttttctaggcccttttctatgtctttacatctctgtctcacacacacacacgtatacacacacacagtttatttttaataaaataggattataccacacacatcctgtcacttgcttttttgcttaagagtatatctaagagaatcctttgtgtcagtgaagctggagctacctcattcttttaactggctgcgtggcgttccattgagtgtctgtcatcatgtgtttagccgagtggatggatagtctgcttgtttttagtttttgctcttaacaaacactgctgcagtcagcatccttgcacagatttctttgtatacttgtattagtatttctgtaagatctgagaagtggaatttgtagggtcataggttatgtacacttaagtttttgacactcactgccaagtcatctgtcagaattctaaactaaagacatgtttggagtgtggatttatcttcagtttttctttggacaagaggaagctgtgaaagattttgctatcagaaaattttggttctttgtcttttgcacatgttctttgagtcttagtatctgtaacgtggcgctactctctctatcatgggggggcatgttttgacattaaattgacttttaagaaaaacatgtcactaacctgaagctcagccacacagtgacttttaaggttttatttagactttactgttgttctcatgagagtaggtacagactgcataaggtttagaatcccagcatatgtctgaaacgacgggactttcactgtgatttccaccagagaaattatagcagagtggctgagcatgtgctctgaggccaggccccagctctgctgctgacgagctgtgtggtcctgggcagagtggtctccgagttccagtccctcctctgtaaaatgggcatgattagagtgcccaccgcattagggatgttggggtgagtcagtgtgaccccacgtgcacagaaagtgctgcgagtggtgcatggtgagaggttgatgcaggtacttagcccttggggaacacaggtagttccttttcactgtgtttaatttgggaaaatccagatccacatcattgtagagtctgagggttagaaggaagtcattgtgtctaacataacaacagagcagtttgtgtcactgagctccagtctgtgctggattattgatattgttggtggcggtcaccattcctggaaagggactgtcccaagccacttaccttcccgaggagtctgctggttctccttgaggatagtgcttagataacagactcattaaacatttactgagtgtctgtcagggatcattcacatccacatcatcctcccggcccctccccgtgttgttcatggagggagtactggcggtccccattttcatgtatggagacttcaggtgaaagaagttaagtgaattctttgttgagtcacaaatcttgagccagtcagaatttgaacctaagatttttgactgctggttgtcacacttcccgccccacactcaactgttgtgtgaatgagccagacacattgcttaacctgagtccgagatggacaatggtataggaaagatattcggtatggagaatcagatgttaacttgtgttgctatttttgttttgttttgttttgttttgtttttgagacaaggtcttgctctgtcacccaggctagagtgcagtggcatgatcagggcttactgcagcctcaccctcgatttcctgggctcaagcaatcctcccacctcagcccccaagtagctgggcctacaggtgcgtgctaccacgcctggccaattttttaaattttagcacagatgaggtctcactatgttgcccgggctggtctcgaactcctgagctcaagggatcctcccgcctcagcctcccaaagtgctggtgttacaggcataagccaccacgcctggcctgtgttgctattatatttggcaggaacccagagtccagaacatttcatctatgatgggttagataatgtgtctagttgtttgcatgccaatttcagtagcctcagttattcaacctaggagatttttctacctctttactaccctgctgaagttgctcttcagcagaaaatctttgtggaacacattccacactttgaaatcttcgtggaacaaaagatatttgtggaaccaatctttgtggaacatattccagctttttgaatgagtgcatatccagtagtacctttaaagtaacactttgtacataacaaatactcagcaaatgtgaaactttatttgctcttacttcaaaattagtccaaaatgttggaaataaaatataagacattgatctagatatgaggtttttctccttcattctcagctgtcgaagaaatcaaagtagcatatgcacaaggttaaaaaccacatatacaaatactatagaacagcttataatgaaaaccttgcctgcctttataaaaaatgtgattatcttcttctgttaatgtcaataaaagatggtttgtcctagaaggtctataaatggtattatgttctggaggaaacctagcaaaaactttgctagtttagtacttgtctctaaattgatgttcacccatttcaatattgcacttattaatggtctttatttttctagcatagataacaattgattctttagattcatatatggaggtaattcttgctttctaaagaaaggaatatggcacattggaaccattttattcaccagtggatttacccttagagtatttttagatctgagctgatgacttgtgagagaaaaagggaacagagtaaagccatggaagccatgaacagtaagagactgccgcctggcatggtttcttcttctgcagaagatgaaactgaggagaaacaagacaacatccttcataccaggaatggtcaagataatgcaagaagaaaaaagctttcaaacaaatcagaaggcagtcaacaaacagaaagggggacattccttccctggcagttactcaaaactgaaattgcttattgtgtacaccggggcttgtacttggggaatttaataaaaatgctcattaccaa

SEQ ID NO: 119985 - DNA, 2130 bp, Artificial Sequence
  derived and/or modified sequence
agaggaagccgtgaggccggagcttaggtcgggaagggatggatcgctgagccgatagcgtccgctaggctgtctgcctcggtacctgttactgctgctacttcctcgtttgacaccttcctggaatctctcttgatttttgaggaaatacctagtaacaaacatgactgagttctggcttatatctgctcctggggagaaaacctgtcagcaaacatgggagaaattgcatgcggcaacttcaaagaacaataatcttgctgtcacttccaagttcaatattcctgacttaaaggttggcacgttggatgtcttggttggcttgtcagatgaactggctaaactggatgcatttgtagaaggagtggttaagaaagtagctcaatacatggctgatgtattggaagatagcaaagacaaagttcaagagaatctgttggctaatggagtggacttggttacttatataacaaggttccagtgggacatggccaaatatccaatcaagcagtccctgaaaaatatttctgaaataattgccaagggagtaactcagattgataatgacctgaaatctcgagcatctgcatacaataacctgaaaggaaatcttcagaatttggaacgaaagaatgcaggaagtttgctaactagaagtctagcagaaattgtgaagaaggatgactttgttcttgattcagagtatctcgtcacattactggtagtagttcccaagttaaaccacaacgactggattaagcagtatgaaacactagccgaaatggtagttccaaggtctagcaatgttctttcagaggaccaagacagttacctgtgtaatgtcaccttgtttaggaaggcagttgatgacttcagacacaaagccagagaaaacaaattcattgttcgtgacttccagtataatgaagaggagatgaaagcagataaagaagaaatgaacaggctttctactgataagaaaaaacaatttggaccacttgtacggtggctgaaagtgaattttagtgaagcatttattgcatggattcacgtgaaagcattacgggttttcgttgagtctgttttaaggtatggcttgccagtgaacttccaagcaatgctacttcagcccaataagaaaactttgaagaaactgagagaagtattacatgaattgtataaacatctagacagcagtgcagcagctattattgatgctcctatggatattccaggtttaaacctgagtcaacaagaatactacccctatgtgtactacaagattgattgcaacttgctggaattcaagtgaaaatgggctcctcccccgacaatcctgtccttgtgtttgtgtgtgctaacagaaataagttgcagtatggtcgtacttttaactctagtatcctttgcttgcttcttacgccctttcctaggtgaattctcccacagtggtctgtatctcaacattttctttttaaaggaaaaaatatatatatatagtttctttttattgatcaggtctgtaaatgtgtactaaaaaaatcagagtttatttataaacaaaatagtttatttaaagagaaggtctcttccttattgatatcatggtatgcattaattccatttgttactattgtgcacaaaagccctgttcacaggggaatggtgtaaacatttatactgttttgttcactgtatttagtagacataactgttgaatagttactgaatcatgatgtaaagaatatgtgaccatcttcaggtatgggatttctgaacgtttcaaatttcaatcaatgagcactgtcaacacccacaggagagaataaaattacctgtgcaaaggtgtattgtggtgtgtgtaacttaagattacagttctgtttgagagttaaatgatgtcatagctcacttgctatgctgcttccaggattttgttatatgctgaggtgtaaccatttgtgttgtctgactttcgtatgatttaattgagccaaatttgggtcagaacacaaatttgaagatgacttttcagtatatgatgggtatttacatttgaacactagaattttaggtctctcaaataattaagaatagagccagttttgaataaagtctagcagaactatg

SEQ ID NO: 119986 - DNA, 1149 bp, Artificial Sequence
  derived and/or modified sequence
atgaccgagttctggctgatcagcgcccccggcgagaagacctgccagcagacctgggagaagctgcacgccgccaccagcaagaacaacaacctggccgtgaccagcaagttcaacatccccgacctgaaggtgggcaccctggacgtgctggtgggcctgagcgacgagctggccaagctggacgccttcgtggagggcgtggtgaagaaggtggcccagtacatggccgacgtgctggaggacagcaaggacaaggtgcaggagaacctgctggccaacggcgtggacctggtgacctacatcaccagattccagtgggacatggccaagtaccccatcaagcagagcctgaagaacatcagcgagatcatcgccaagggcgtgacccagatcgacaacgacctgaagagcagagccagcgcctacaacaacctgaagggcaacctgcagaacctggagagaaagaacgccggcagcctgctgaccagaagcctggccgagatcgtgaagaaggacgacttcgtgctggacagcgagtacctggtgaccctgctggtggtggtgcccaagctgaaccacaacgactggatcaagcagtacgagaccctggccgagatggtggtgcccagaagcagcaacgtgctgagcgaggaccaggacagctacctgtgcaacgtgaccctgttcagaaaggccgtggacgacttcagacacaaggccagagagaacaagttcatcgtgagagacttccagtacaacgaggaggagatgaaggccgacaaggaggagatgaacagactgagcaccgacaagaagaagcagttcggccccctggtgagatggctgaaggtgaacttcagcgaggccttcatcgcctggatccacgtgaaggccctgagagtgttcgtggagagcgtgctgagatacggcctgcccgtgaacttccaggccatgctgctgcagcccaacaagaagaccctgaagaagctgagagaggtgctgcacgagctgtacaagcacctggacagcagcgccgccgccatcatcgacgcccccatggacatccccggcctgaacctgagccagcaggagtactacccctacgtgtactacaagatcgactgcaacctgctggagttcaagtag

SEQ ID NO: 119987 - protein, 226 aa, Artificial Sequence
  derived and/or modified sequence
MALSDADVQKQIKHMMAFIEQEANEKAEEIDAKAEEEFNIEKGRLVQTQRLKIMEYYEKKEKQIEQQKKIQMSNLMNQARLKVLRARDDLITDLLNEAKQRLSKVVKDTTRYQVLLDGLVLQGLYQLLEPRMIVRCRKQDFPLVKAAVQKAIPMYKIATKNDVDVQIDQESYLPEDIAGGVEIYNGDRKIKVSNTLESRLDLIAQQMMPEVRGALFGANANRKFLD

SEQ ID NO: 119988 - DNA, 681 bp, Artificial Sequence
  derived and/or modified sequence
atggcactgtcagacgccgatgtgcagaagcagattaaacatatgatggccttcatcgagcaggaagccaatgagaaggcagaagaaatcgacgccaaagccgaagaagaatttaatatcgagaaggggagactggttcagacccaaaggctgaagattatggagtactatgagaagaaggagaaacagatcgaacagcagaagaaaatccagatgtcaaacctgatgaatcaagctcgattgaaagtactcagggctagagatgatctgatcaccgacctactgaatgaagctaaacagcgtctcagcaaagtggtgaaggacaccactcggtaccaggttctgctggacggcctggtgctacagggtctctaccagctgctggaacccaggatgatcgtaaggtgtaggaagcaagactttcccctggtgaaggcagcagtccagaaggccattcccatgtacaaaattgcaaccaagaatgacgtcgatgtgcagattgaccaagaatcctacctgcccgaagacattgccgggggagttgagatctacaatggggatagaaagatcaaagtgtctaacactttagaaagcagactggatctaatcgcccagcagatgatgccggaagtcaggggtgccctcttcggtgcaaacgccaaccgtaagttcctggattag

SEQ ID NO: 119989 - DNA, 681 bp, Artificial Sequence
  derived and/or modified sequence
atggccctgagtgatgctgatgtgcagaagcagatcaagcacatgatggccttcatcgagcaggaggccaatgagaaggccgaggagattgatgccaaggccgaggaggagttcaacatcgagaagggccgcctggtgcagacccagaggctgaagatcatggagtactatgagaagaaggagaagcagatcgagcagcagaagaagatccagatgagcaacctgatgaaccaggcccggctgaaggtgctgcgggccagagatgacctgatcacagacctgctgaatgaggccaagcagaggctgagcaaggtggtgaaggacaccacccgctaccaggtgctgctggatggcctggtgctgcagggcctgtaccagctgctggagcccaggatgattgtgcgctgcaggaagcaggacttccccctggtgaaggctgctgtgcagaaggccatccccatgtacaagatcgccaccaagaatgatgtggatgtgcagattgaccaggagagctacctgcctgaagatattgctgggggcgtggagatctacaatggagacaggaagatcaaggtgagcaacaccctggagagccggctggacctgattgcccagcagatgatgcctgaggtgcggggggccctgtttggagccaatgccaacaggaagttcctggactag

SEQ ID NO: 119990 - DNA, 681 bp, Artificial Sequence
  derived and/or modified sequence
atggccctgagcgacgccgacgtgcagaagcagatcaagcacatgatggcctttattgagcaggaagccaacgagaaggctgaagagattgatgctaaagccgaagaggaatttaatatcgaaaaggggcgccttgttcaaacccagcggctgaagataatggagtactacgagaaaaaggagaaacaaattgagcagcagaaaaagatccagatgagcaatctaatgaatcaagcccgactaaaggttctccgggcacgggatgatctgattaccgacctcttgaacgaggctaagcaaagactgagcaaagttgtgaaggatactaccaggtatcaggtgttgcttgacggcctggtactgcagggcttgtatcaattacttgaaccgcgcatgatagtgcgttgcaggaaacaggattttccgttagtcaaggccgcagtgcagaaggcgatcccgatgtataaaatcgccaccaaaaatgacgttgacgtacaaatcgaccaggagtcgtatctgccggaggatattgcagggggcgttgagatctataacggcgatagaaagattaaggtgtcgaacacgttagaaagtaggctcgatctcatcgcgcagcagatgatgcccgaagtgagaggggcattgtttggtgctaacgccaaccgcaagtttttggattag

SEQ ID NO: 119991 - DNA, 681 bp, Artificial Sequence
  derived and/or modified sequence
atggctctaagcgacgctgatgtgcagaagcagataaagcatatgatggctttcatcgaacaggaggcaaacgagaaagcagaagaaattgatgcgaaagccgaggaggagttcaacattgagaaaggcaggcttgttcagactcagcgtctaaagataatggagtattacgagaagaaggaaaagcagattgagcagcagaagaaaatccagatgagtaatctaatgaaccaggcgagactgaaggtgctgcgcgcacgcgacgacctcatcactgatctcttgaacgaggctaaacagcgactctcaaaagtagtcaaagataccacacggtaccaggtgctcctagacggcctggtcctgcagggcctctaccagctgttagagccccgaatgattgttcggtgtcggaagcaggactttcccctcgtaaaggcggcagtacaaaaggccatccccatgtacaagattgccactaagaatgatgtggacgttcaaatcgatcaggaatcctacctgcccgaagacattgctggtggtgtagaaatttacaatggcgatcgtaagatcaaggtgtctaatactcttgagtccaggctggacctcatagcacagcagatgatgccagaggtgcgcggagcactgttcggggcaaacgcaaaccgcaagttccttgattag

SEQ ID NO: 119992 - DNA, 1402 bp, Artificial Sequence
  derived and/or modified sequence
tcccattggctgagaagggtcatgaggatgaactgtgcagtcacctggcaggaaccggaacccgcggttataaagtaaaggaacccgagatctgcgcaggggttccctttgccgatttctctcacctcacctttcaaacctaaactcgagcctactgttcaccggcctagcattgctctcgccatggctctcagcgatgctgacgtgcaaaagcagataaagcatatgatggctttcattgaacaagaagccaatgagaaagcagaagaaatagatgcaaaggcagaagaagagttcaacatagagaaaggtcggcttgtgcaaacccaaagactaaagattatggaatattatgagaagaaagagaaacagattgagcagcagaagaaaattcagatgtccaatttgatgaatcaagcgagactcaaagtcctcagagcaagagatgaccttatcacagacctactaaatgaagcaaaacagagactcagcaaggtggtaaaagatacaaccaggtaccaagtgctgctggatggactggttctccagggtttgtaccagttgctggagccccgaatgattgttcgttgcaggaaacaagatttccctctggtaaaggctgcagtgcagaaggcaattcctatgtacaaaattgccaccaaaaacgatgttgatgtccaaattgaccaggagtcctacctgcctgaagacatagctggtggagttgagatctataatggagatcgtaaaataaaggtttccaacaccctggaaagccggctggatctcatagcccagcagatgatgccagaagtccggggagccttgtttggtgcaaatgccaacaggaagtttttggactaagccttcaggaggtggagctcgtcgtcagctctcctgctgtgatgtggaagcttctgatatttgaagaaacacgaatgtctctgtagcttcctcttcactgccccagtattgctctgtatttatcagcgatgcccctctgtcactcatgccttgcctaattgttcacaatggtggaaagcttcatgtaatatgatcaggacccacctccagttcttctgaaagtgtgacagtgtccagccggttctgcagcactaggggagggggcagatggtggttgcatgggcttcctgggtctccactctccgtctggcctaaaggtgatgtatttggtgtttggccctgcagtccccactcttgaggcttaaggcgcatgtggcacaccactccttccagcagtagtcgctttactgttacctgtttaggcctagaagttttccctcatctgtaaatgtgatttaaaatctaagccatgaatatgctttatttattaaaagagttatgcggatttaatgtgatttctagtgtaaggcactacaaa

SEQ ID NO: 119993 - DNA, 681 bp, Artificial Sequence
  derived and/or modified sequence
atggccctgagcgacgccgacgtgcagaagcagatcaagcacatgatggccttcatcgagcaggaggccaacgagaaggccgaggagatcgacgccaaggccgaggaggagttcaacatcgagaagggcagactggtgcagacccagagactgaagatcatggagtactacgagaagaaggagaagcagatcgagcagcagaagaagatccagatgagcaacctgatgaaccaggccagactgaaggtgctgagagccagagacgacctgatcaccgacctgctgaacgaggccaagcagagactgagcaaggtggtgaaggacaccaccagataccaggtgctgctggacggcctggtgctgcagggcctgtaccagctgctggagcccagaatgatcgtgagatgcagaaagcaggacttccccctggtgaaggccgccgtgcagaaggccatccccatgtacaagatcgccaccaagaacgacgtggacgtgcagatcgaccaggagagctacctgcccgaggacatcgccggcggcgtggagatctacaacggcgacagaaagatcaaggtgagcaacaccctggagagcagactggacctgatcgcccagcagatgatgcccgaggtgagaggcgccctgttcggcgccaacgccaacagaaagttcctggactag

SEQ ID NO: 119994 - protein, 213 aa, Artificial Sequence
  derived and/or modified sequence
MAAPAVSGLSRQVRCFSTSVVRPFAKLVRPPVQVYGIEGRYATALYSAASKQNKLEQVEKELLRVAQILKEPKVAASVLNPYVKRSIKVKSLNDITAKERFSPLTTNLINLLAENGRLSNTQGVVSAFSTMMSVHRGEVPCTVTSASPLEEATLSELKTVLKSFLSQGQVLKLEAKTDPSILGGMIVRIGEKYVDMSVKTKIQKLGRAMREIV

SEQ ID NO: 119995 - DNA, 642 bp, Artificial Sequence
  derived and/or modified sequence
atggcggcccccgccgtaagtggcctgtcaaggcaggtgagatgcttcagcacatctgtcgtacgccccttcgctaaactggtgcgccccccggtgcaagtgtacgggattgaaggacggtatgcgacagcactgtactctgctgcgtccaaacagaataaacttgagcaggtggagaaagagttactcagagtggctcagatcctgaaggaacccaaagtcgctgcttccgtactcaacccctacgttaaaagatccatcaaggtcaaaagtctgaatgacattacagccaaagaacgattcagtccgctcacgaccaatctgatcaatctgttggcagaaaatggcaggttgagcaacacacagggcgtcgtctccgctttctctacgatgatgtccgtgcacaggggggaagtgccctgcaccgtgaccagtgcgagccctctggaggaagccaccctgagcgaactgaagacagtcttaaagtcgtttctcagccagggtcaggtgctaaaactagaggctaaaaccgacccaagcattctgggcggtatgatcgtgcggatcggcgaaaagtacgtggacatgagcgtcaagacaaagattcagaagctgggtcgggccatgcgtgagattgtgtag

SEQ ID NO: 119996 - DNA, 642 bp, Artificial Sequence
  derived and/or modified sequence
atggccgccccagctgtgtctggcctgagccggcaggtgcgctgcttcagcacctctgtggtgcggccctttgccaagctggtgcggccccctgtgcaggtgtatggaattgagggccgctatgccacagccctgtacagcgctgccagcaagcagaacaagctggagcaggtggagaaggagctgctgcgggtggcccagatcctgaaggagcccaaggtggccgcctctgtgctgaacccctacgtgaagaggagcatcaaggtgaagagcctgaatgacatcacagccaaggagcgcttcagccccctgaccaccaacctgatcaacctgctggccgagaatggccgcctgagcaacacccagggcgtggtgtctgccttcagcaccatgatgtctgtgcacagaggagaggtgccctgcaccgtgaccagcgccagccccctggaggaggccaccctgtctgagctgaagacagtgctgaagagcttcctgagccagggccaggtgctgaagctggaggccaagacagaccccagcatcctgggcggcatgattgtgagaattggagagaagtatgtggacatgtctgtgaagaccaagatccagaagctgggccgggccatgagggagatcgtgtag

SEQ ID NO: 119997 - DNA, 642 bp, Artificial Sequence
  derived and/or modified sequence
atggccgcccccgccgtgagcggcctgagccggcaggtgcggtgcttctctacatccgtcgtccggccatttgctaagctcgtgagaccacccgtccaggtttacggcatcgagggaaggtacgccactgccttgtatagtgcagccagcaagcagaacaagcttgagcaggttgaaaaagagctcttgcgcgttgcccagatcttaaaagagccaaaagtcgccgcgtcagtgctgaacccctacgtgaaacggagcattaaagtaaaatcactcaatgacatcaccgcaaaagagcggttctctccactgactacaaacctgattaatctgttggccgagaatggacgcctgagcaacacccagggggtcgtcagcgctttctcaaccatgatgagtgtgcaccggggagaggtgccatgtacagttacctccgcgagcccattagaggaggctactctcagtgagcttaagaccgtgctgaagagcttcttatcccaggggcaagtgctgaagctggaagctaagacggatccaagtatcctgggtggcatgattgttcgtattggcgaaaagtacgtggatatgtctgtaaagactaagattcagaaactcggcagggctatgagggagatcgtttag

SEQ ID NO: 119998 - DNA, 642 bp, Artificial Sequence
  derived and/or modified sequence
atggcggcaccggcagtctccggcctctcaaggcaagtgcgctgtttttctacctcggtggtgcgcccttttgcaaaactcgtccgaccacccgtgcaggtatatggaatcgaaggtcgctatgcgactgcactgtactccgcagcttctaaacagaataagctggagcaggttgaaaaggaactgctgcgtgtcgcccagatcctgaaggagcctaaggtcgcagccagtgtgttaaatccttacgtgaaacgtagcataaaagtgaagtcactcaacgacattacagccaaggaacgattttctcccctcacgacaaatcttataaatctgctggcagagaacgggagactgagcaacactcagggagtggtgtccgctttctcaaccatgatgtcagtacataggggtgaagtcccctgcaccgtcacctccgcttcgccccttgaggaagcgacgctctccgagctgaagactgtgttaaaaagcttcctcagccagggacaggtgcttaagctggaagcgaaaacagacccctccattttgggcggaatgatcgtccgcattggggaaaagtatgttgacatgtctgtgaagacaaagatccagaagctggggcgtgctatgcgcgaaatcgtgtag

SEQ ID NO: 119999 - DNA, 932 bp, Artificial Sequence
  derived and/or modified sequence
cagatgcagtcgaagccctgtggctccaccccgagggtccagcccttaccactgctaagaactacaactcccagcccgagggaggtctctgcgcctgcggcctgacgccctacgcctacacttcccagagaacctagcggttacgccaacgcgcgcgtgcgcccttgcgcgtttctctcttcccactcgggtttgacctacagccgcccgggagaagatggctgccccagcagtgtccgggctctcccggcaggtgcgatgcttcagtacctctgtggtcagaccatttgccaagcttgtgaggcctcctgttcaggtatacggtattgaaggtcgctatgccacagctctttattctgctgcatcaaaacagaataagctggagcaagtagaaaaggagttgttgagagtagcacaaatcctgaaggaacccaaagtggctgcttctgttttgaatccctatgtgaagcgttccattaaagtgaaaagcctaaatgacatcacagcaaaagagaggttctctcccctcactaccaatctgatcaatttgcttgctgaaaatggtcgattaagcaatacccaaggagtcgtttctgccttttctaccatgatgagtgtccatcgcggagaggtaccttgcacagtgacctctgcatctcctttagaagaagccacactctctgaattaaaaactgtcctcaagagcttcctaagtcaaggccaagtattgaaattggaggctaagactgatccgtcaatcttgggtggaatgattgtgcgcattggcgagaaatatgttgacatgtctgtcaagaccaagattcagaagctgggcagggctatgcgggagattgtctaaaagtgttggttttctgccatcagtgaaaattcttaaacttggagcaacaataaaaagcttccagaacagatca

SEQ ID NO: 120000 - DNA, 642 bp, Artificial Sequence
  derived and/or modified sequence
atggccgcccccgccgtgagcggcctgagcagacaggtgagatgcttcagcaccagcgtggtgagacccttcgccaagctggtgagaccccccgtgcaggtgtacggcatcgagggcagatacgccaccgccctgtacagcgccgccagcaagcagaacaagctggagcaggtggagaaggagctgctgagagtggcccagatcctgaaggagcccaaggtggccgccagcgtgctgaacccctacgtgaagagaagcatcaaggtgaagagcctgaacgacatcaccgccaaggagagattcagccccctgaccaccaacctgatcaacctgctggccgagaacggcagactgagcaacacccagggcgtggtgagcgccttcagcaccatgatgagcgtgcacagaggcgaggtgccctgcaccgtgaccagcgccagccccctggaggaggccaccctgagcgagctgaagaccgtgctgaagagcttcctgagccagggccaggtgctgaagctggaggccaagaccgaccccagcatcctgggcggcatgatcgtgagaatcggcgagaagtacgtggacatgagcgtgaagaccaagatccagaagctgggcagagccatgagagagatcgtgtag

SEQ ID NO: 120001 - protein, 339 aa, Artificial Sequence
  derived and/or modified sequence
MAAAVAAAPGALGSLHAGGARLVAACSAWLCPGLRLPGSLAGRRAGPAIWAQGWVPAAGGPAPKRGYSSEMKTEDELRVRHLEEENRGIVVLGINRAYGKNSLSKNLIKMLSKAVDALKSDKKVRTIIIRSEVPGIFCAGADLKERAKMSSSEVGPFVSKIRAVINDIANLPVPTIAAIDGLALGGGLELALACDIRVAASSAKMGLVETKLAIIPGGGGTQRLPRAIGMSLAKELIFSARVLDGKEAKAVGLISHVLEQNQEGDAAYRKALDLAREFLPQGPVAMRVAKLAINQGMEVDLVTGLAIEEACYAQTIPTKDRLEGLLAFKEKRPPRYKGE

SEQ ID NO: 120002 - DNA, 1577 bp, Artificial Sequence
  derived and/or modified sequence
aggtccacgccgtaaacagacaacatggcggccgcggtggcggcggcacctggggccttgggatccctgcatgctggcggcgcccgcctggtggccgcttgcagtgcgtggctctgcccggggttgaggctgcccggctcgttggcaggccggcgagcgggcccggcgatctgggcccagggctgggtacctgcggccgggggtcccgccccgaaaaggggctacagctctgagatgaagacggaggacgagctgcgggtgcggcacctggaggaggagaaccgaggaattgtggtgcttggaataaacagagcttatggcaaaaattcactcagtaaaaatcttataaaaatgctatcaaaagctgtggatgctttgaaatctgataagaaagtacggaccataataatcaggagtgaagtcccagggatattctgtgctggtgctgaccttaaggaaagagccaaaatgagttccagtgaagttggtccttttgtctccaaaataagagcagtgattaacgatattgctaatcttccagtaccaacaattgcagcaatagatggactcgctttaggtggtggtcttgaactggctttagcctgtgatatacgagtagcagcttcctctgcaaaaatgggcctggttgaaacaaaattggcgattattcctggtggaggggggacacagcgattgccacgcgccattggaatgtccctggccaaggagctcatattctctgcgcgagtcctcgatggcaaagaagccaaagcagtgggcttaatcagccacgttctggaacagaaccaggagggagacgcggcctacaggaaggccttggacctggcgagagagtttttacctcagggacctgttgcaatgagagtggcaaaattagcaattaatcaagggatggaggtcgatttagtaacagggttagccatagaagaagcttgttatgctcagaccattccaacaaaagacagacttgaaggtcttcttgcttttaaagagaaaaggccccctcgctataaaggagaataaaaggaacagaaattcttaagatgccaatgtaataaatgtacttcctggaagtgtctttcggatccactatatgcctcagcacatggaaccttaatgaccaaagtgaagagcagattattcatacggtgtaataagcatctggaatggacccatccgtgtacttcattcaaatgtgtaaatgtcatattcattcagatttataaagctagtagtgtatagtcagaaacagaatcaaagttagatatacatttttaaatatttactgcatatgaggctttctgttaattttttaatgtgaataatttatatattgcacattctagggaataatattgattgtatgtctactgtgctgcattaagaaaataaaatttctatataccaaaaatgtgaagttataccaaataaagtttctaagtgattaatgcatacgaacagctacatatacatatatctaaacctgaaaaatgaattgatattctgagtgaaaactacctaatataaataaaattagtgaaaagaaaacatgggaa

SEQ ID NO: 120003 - DNA, 1020 bp, Artificial Sequence
  derived and/or modified sequence
atggccgccgctgttgctgctgccccgggcgccttagggtcgctccatgctggaggagctagactcgttgcagcatgcagcgcatggctgtgccctggcctccgcctacctggatcgctggccggtcgaagagccgggccagcaatctgggcacagggatgggtccccgccgccggcggccctgccccaaagagagggtattcttccgagatgaagacagaagacgagctccgagtcagacacttggaggaagaaaacaggggcatagtggtgctgggcatcaatcgggcgtacggcaaaaactcccttagcaaaaatctgataaagatgctgagtaaggctgtagacgcattgaaatcagataaaaaggtccgtaccatcattattagaagtgaagttccggggatcttctgtgctggcgccgatctgaaggaaagggccaagatgagttcaagtgaggtgggcccttttgtgtctaagattcgcgctgttatcaacgatattgcaaacctcccggtccctacaatagcagccatcgacggcctggcgcttggaggcggactcgagttggctttggcctgtgatatcagagtggcagcctcgagcgcaaagatggggctggtagagaccaaactggctatcattcctggtgggggaggtacacagagactgccccgcgccattggaatgagcctggctaaagagttaatcttttcggctcgtgttcttgacggtaaggaagcaaaagcagtcggattgatttctcacgtgctcgaacagaaccaggagggagacgccgcctataggaaggctctggatctggctagagaatttttacctcagggccccgtcgctatgcgtgtagctaagctggctatcaaccaaggaatggaagttgacctggtgaccgggctagcaattgaagaggcttgctatgcccagacgattcccacaaaggacaggctcgagggcctgctggcctttaaggaaaagcgccctccacgctataaaggcgaatag

SEQ ID NO: 120004 - DNA, 1020 bp, Artificial Sequence
  derived and/or modified sequence
atggctgctgctgtggccgccgcccctggggccctgggcagcctgcatgctggaggagcccggctggtggccgcctgcagcgcctggctgtgccccggcctgcggctgcccggcagcctggccggcagaagagctggccctgccatctgggcccagggctgggtgcctgctgctgggggccctgcccccaagaggggctacagcagcgagatgaagacagaagatgagctgcgggtgcgccacctggaggaggagaacagaggaattgtggtgctgggcatcaacagagcctacggcaagaacagcctgagcaagaacctgatcaagatgctgagcaaggctgtggatgccctgaagagtgacaagaaggtgaggaccatcatcatccgctctgaggtgcccggcatcttctgtgccggggctgacctgaaggagcgggccaagatgagcagcagcgaggtgggcccctttgtgtccaagatccgggctgtgatcaatgacatcgccaacctgcctgtgcccaccatcgccgccattgatggcctggccctgggcggcggcctggagctggccctggcctgtgacatccgggtggccgccagcagcgccaagatgggcctggtggagaccaagctggccatcatccctgggggcggcggcacccagaggctgccccgggccatcggcatgagcctggccaaggagctgatcttcagcgcccgggtgctggatggcaaggaggccaaggctgtgggcctcatcagccacgtgctggagcagaaccaggagggagatgctgcctacaggaaggccctggacctggcccgggagttcctgccccagggccctgtggccatgagggtggccaagctggccatcaaccagggcatggaggtggacctggtgacaggcctggccatcgaggaggcctgctacgcccagaccatccccaccaaggaccggctggagggcctgctggccttcaaggagaagaggcctccccgctacaagggggagtag

SEQ ID NO: 120005 - DNA, 1020 bp, Artificial Sequence
  derived and/or modified sequence
atggccgccgccgtggccgccgcccccggcgccctgggcagcctgcacgcaggtggagcccggctcgtggccgcctgtagcgcctggctatgccctggcctcagactcccaggatctctggccggacgacgagctggacctgcgatctgggcccaagggtgggtgcccgctgctgggggcccagctccaaagcgtggatatagctctgagatgaagacagaggatgaactgcgggtgcggcacctggaagaagaaaaccggggcatcgtcgttctgggcatcaaccgggcctatggaaagaactcgctctccaagaatcttattaagatgctgtcaaaggcagttgatgctctaaagagcgacaagaaagtgaggacgatcatcatacggtctgaggtgccagggattttctgcgctggggccgacctaaaggagcgcgcaaagatgagcagtagcgaggtcggcccatttgtgagcaagattcgcgctgttattaatgacattgccaatctgccagtgccgacaattgcagctattgacggactggctttggggggcggactggagttggccttagcttgtgacatcagggtggccgcttcttcagccaaaatgggactggttgagactaaattagccatcatccccggggggggaggaacacagcgcctcccgcgggccatagggatgagtctcgctaaggagctgattttcagcgctcgcgttcttgacggcaaggaggctaaggctgtggggctcattagccacgtactggaacagaaccaggaaggcgatgctgcttaccgaaaagcactggatttggcaagagagttcttgccccaaggccctgtggcaatgagggttgccaagctcgccataaaccagggcatggaggtcgacttagtgaccggattggctattgaggaggcatgttacgcccagacaattccgaccaaggaccgcttggaaggcctattggctttcaaagaaaaacggcccccccgttataagggggagtag

SEQ ID NO: 120006 - DNA, 1020 bp, Artificial Sequence
  derived and/or modified sequence
atggctgccgcagttgctgcggcaccaggcgcacttggatctcttcatgcagggggagccagattggttgccgcttgcagcgcctggttgtgtcctggccttcgattgcctggctctttagctggaagaagagccggaccagccatatgggctcagggctgggtgcccgcagcaggaggcccagcgcctaaacgaggttactcttcggagatgaagacagaagacgagctgagagttcgccaccttgaagaggagaacaggggaatagtggtcctgggcattaacagggcctatggaaagaacagtctctctaagaacctgattaagatgctctcaaaggcagttgacgccctcaaaagcgacaagaaggttagaaccattataattagaagcgaggtgcccggtatattctgcgccggagcagacttgaaggagcgggctaagatgagcagctctgaagtgggcccttttgtgtccaaaatcagagcagttatcaacgatattgcaaacctgcccgtgcccacaattgcagccattgatggtctggccctaggaggcggactggagctagctcttgcctgcgacatccgagtggctgcctcctctgcgaagatgggtctcgttgaaacgaaacttgcgattattccaggaggtggtggtacacagcgattgccgagagcgatcgggatgagtctcgcaaaagaactgatcttctctgcccgtgttctagatggcaaggaggccaaagccgtgggactgatatcccacgtcctggaacaaaatcaggagggtgatgctgcatataggaaagctctcgatttagctagagagtttttgccacaaggccctgttgccatgagagtggctaagcttgccattaatcaggggatggaagtggacctggtgacaggattggccattgaggaagcctgttatgcccagaccatccccacgaaagaccggctggagggcctgctagcttttaaagaaaagcgccctcctcgttataagggtgagtag

SEQ ID NO: 120007 - DNA, 1020 bp, Artificial Sequence
  derived and/or modified sequence
atggccgccgccgtggccgccgcccccggcgccctgggcagcctgcacgccggcggcgccagactggtggccgcctgcagcgcctggctgtgccccggcctgagactgcccggcagcctggccggcagaagagccggccccgccatctgggcccagggctgggtgcccgccgccggcggccccgcccccaagagaggctacagcagcgagatgaagaccgaggacgagctgagagtgagacacctggaggaggagaacagaggcatcgtggtgctgggcatcaacagagcctacggcaagaacagcctgagcaagaacctgatcaagatgctgagcaaggccgtggacgccctgaagagcgacaagaaggtgagaaccatcatcatcagaagcgaggtgcccggcatcttctgcgccggcgccgacctgaaggagagagccaagatgagcagcagcgaggtgggccccttcgtgagcaagatcagagccgtgatcaacgacatcgccaacctgcccgtgcccaccatcgccgccatcgacggcctggccctgggcggcggcctggagctggccctggcctgcgacatcagagtggccgccagcagcgccaagatgggcctggtggagaccaagctggccatcatccccggcggcggcggcacccagagactgcccagagccatcggcatgagcctggccaaggagctgatcttcagcgccagagtgctggacggcaaggaggccaaggccgtgggcctgatcagccacgtgctggagcagaaccaggagggcgacgccgcctacagaaaggccctggacctggccagagagttcctgccccagggccccgtggccatgagagtggccaagctggccatcaaccagggcatggaggtggacctggtgaccggcctggccatcgaggaggcctgctacgcccagaccatccccaccaaggacagactggagggcctgctggccttcaaggagaagagaccccccagatacaagggcgagtag

SEQ ID NO: 120008 - protein, 885 aa, Artificial Sequence
  derived and/or modified sequence
MAWRCPRMGRVPLAWCLALCGWACMAPRGTQAEESPFVGNPGNITGARGLTGTLRCQLQVQGEPPEVHWLRDGQILELADSTQTQVPLGEDEQDDWIVVSQLRITSLQLSDTGQYQCLVFLGHQTFVSQPGYVGLEGLPYFLEEPEDRTVAANTPFNLSCQAQGPPEPVDLLWLQDAVPLATAPGHGPQRSLHVPGLNKTSSFSCEAHNAKGVTTSRTATITVLPQQPRNLHLVSRQPTELEVAWTPGLSGIYPLTHCTLQAVLSNDGMGIQAGEPDPPEEPLTSQASVPPHQLRLGSLHPHTPYHIRVACTSSQGPSSWTHWLPVETPEGVPLGPPENISATRNGSQAFVHWQEPRAPLQGTLLGYRLAYQGQDTPEVLMDIGLRQEVTLELQGDGSVSNLTVCVAAYTAAGDGPWSLPVPLEAWRPVKEPSTPAFSWPWWYVLLGAVVAAACVLILALFLVHRRKKETRYGEVFEPTVERGELVVRYRVRKSYSRRTTEATLNSLGISEELKEKLRDVMVDRHKVALGKTLGEGEFGAVMEGQLNQDDSILKVAVKTMKIAICTRSELEDFLSEAVCMKEFDHPNVMRLIGVCFQGSERESFPAPVVILPFMKHGDLHSFLLYSRLGDQPVYLPTQMLVKFMADIASGMEYLSTKRFIHRDLAARNCMLNENMSVCVADFGLSKKIYNGDYYRQGRIAKMPVKWIAIESLADRVYTSKSDVWSFGVTMWEIATRGQTPYPGVENSEIYDYLRQGNRLKQPADCLDGLYALMSRCWELNPQDRPSFTELREDLENTLKALPPAQEPDEILYVNMDEGGGYPEPPGAAGGADPPTQPDPKDSCSCLTAAEVHPAGRYVLCPSTTPSPAQPADRGSPAAPGQEDGA

SEQ ID NO: 120009 - DNA, 2658 bp, Artificial Sequence
  derived and/or modified sequence
atggcgtggagatgtccccgaatggggagggtccctctcgcttggtgcctggcgctgtgtggatgggcttgcatggcccctcgtggtactcaagccgaggagagcccatttgtcggaaatccaggtaatattaccggagcgcgaggcctcacaggtacacttagatgccagttacaagtgcagggggaaccacctgaggtgcactggctgagggacgggcagattctggaattagccgactccacgcagacgcaggtgccactgggcgaagacgagcaggacgactggatagtagtgagccagctcaggatcactagtctgcagctgagtgatactgggcagtatcagtgccttgtctttctgggacatcagacttttgtctctcagcctggctatgtagggcttgaaggcctcccatatttcctggaggaaccagaagaccggacagtagcggcaaatactcctttcaacctgagctgccaagcgcaggggccccctgaacctgtcgatcttctgtggctccaggatgcagtgcctcttgctacagcccctggacatggtcctcagaggagtcttcatgtccccgggctcaacaaaacgagttcctttagctgcgaggcacacaatgccaaaggtgtgactacgtcccgaacagctacaatcacggtcctcccgcaacagcctcggaatctgcatctcgtctctagacagcccactgaacttgaggtcgcgtggacacccgggttgtccggcatctatccactcacgcactgcactctgcaggctgtgttgtctaacgatggcatgggcattcaggcaggagaaccagaccccccagaagagcccctgacaagccaagcatccgttccacctcaccagttgaggttgggctctcttcacccccacacaccgtatcatatccgcgttgcctgcacgtcgtctcaaggcccctcaagttggacacactggcttcctgtggaaactcccgagggcgtgcccctcggtccaccagaaaatatctccgcaactcggaacggatctcaagcttttgtgcattggcaggaaccgcgcgccccactgcagggcactctgctgggatatcggctcgcttatcaggggcaggataccccagaagttctgatggacattggccttaggcaggaagtgaccctcgaacttcagggagatggtagcgtaagtaacctcactgtatgtgtagcagcgtatacagcagcgggtgacggcccgtggtctctgccggttccattagaagcttggaggcctgtcaaagaaccatccacccccgccttttcttggccctggtggtacgtcctgcttggggctgtcgtggcagctgcgtgtgtgttgatactagccctctttctggttcacaggcgcaagaaggagacaagatacggcgaggttttcgaacctaccgtcgagcggggagagctggtcgttcgatatcgagtgcgaaagagctactcaagacgtactacagaggcgaccttaaatagtttgggaatttcagaagaactgaaggagaaactgcgggatgtcatggtggatcgacacaaagtggccctggggaaaactctgggagagggggaatttggcgccgtgatggaaggacagttaaaccaggatgacagcatactgaaagtggccgtaaaaactatgaagattgcaatctgtacacggtcagagctcgaggactttctgtcagaggccgtgtgtatgaaggagttcgatcaccccaacgttatgcgtctcatcggagtgtgctttcaaggctctgagcgagagtctttcccggcccctgttgttatactgcctttcatgaaacacggcgatcttcatagtttcctgctgtacagcagactgggtgaccaacctgtctacctgccaactcagatgcttgttaaattcatggccgacattgcttctggcatggaatatttaagtacaaagagattcattcaccgcgacctggcagctcgcaattgcatgttaaacgagaatatgtccgtgtgcgtcgcagatttcggactgtctaaaaagatctataacggcgactattataggcaaggcagaatcgccaaaatgcccgttaagtggattgcgatagagagtctggccgacagagtatatacgagtaagtccgacgtatggtctttcggggtgacaatgtgggaaattgctacccgcgggcaaaccccctatccgggcgtggaaaattccgagatctacgactatctacggcaggggaacaggctgaagcaaccggccgactgtctggacggcctttatgctctgatgagccgttgctgggaactgaaccctcaggacagacccagcttcaccgagctcagagaggacttagagaataccctgaaggcactgccccccgctcaggaacccgatgagatactatacgtcaatatggacgagggagggggctatccagaacctcccggagctgcaggtggtgcggacccccccacccagcccgatccaaaggactcttgcagttgcctgactgccgccgaagttcaccccgcaggccgctacgtcctttgcccctccactacaccctccccagcacaaccagcagacagaggcagcccagctgcccccgggcaggaggatggagcttag

SEQ ID NO: 120010 - DNA, 2658 bp, Artificial Sequence
  derived and/or modified sequence
atggcctggcgctgccccaggatgggccgggtgcccctggcctggtgcctggccctgtgtggctgggcctgcatggccccccggggcacccaggccgaggagagcccctttgtgggcaaccctggcaacatcactggagcccggggcctgaccggcaccctgcgctgccagctgcaggtgcagggcgagcccccagaggtgcactggctgagagatggccagatcctggagctggccgacagcacccagacccaggtgcccctgggggaggatgagcaggatgactggatcgtggtgtcccagctgcgcatcaccagcctgcagctgagtgacaccggccagtaccagtgcctggtgttcctgggccaccagacctttgtgtcccagcccggctacgtgggcctggagggcctgccctacttcctggaggagcctgaggacagaacagtggccgccaacacccccttcaacctgagctgccaggcccagggccccccagagcctgtggacctgctgtggctgcaggatgctgtgcccctggccacagcccctggccacggcccccagaggagcctgcacgtgcccggcctgaacaagaccagcagcttcagctgtgaggcccacaatgccaagggcgtgaccaccagcaggacagccaccatcaccgtgctgccccagcagcccaggaacctgcacctggtgtcccggcagcccacagagctggaggtggcctggaccccaggcctgagcggcatctaccccctgacccactgcaccctgcaggccgtgctgagcaatgatggcatgggcatccaggccggggagccagaccccccagaggagcccctgaccagccaggcctctgtgcccccccaccagctgcggctgggcagcctgcacccccacaccccctaccacatccgggtggcctgcaccagcagccagggccccagctcctggacccactggctgcctgtggagaccccagagggcgtgcccctgggccccccagagaacatcagcgccaccagaaatggcagccaggcctttgtgcactggcaggagccccgggcccccctgcagggcaccctgctgggctaccgcctggcctaccagggccaggacaccccagaggtgctgatggacatcggcctgcggcaggaggtgaccctggagctgcagggagatggctctgtgagcaacctgactgtgtgtgtggccgcctacacagctgctggagatggcccctggagcctgcctgtgcccctggaggcctggaggcctgtgaaggagcccagcaccccagccttctcctggccctggtggtacgtgctgctgggcgctgtggtggccgccgcctgtgtgctgatcctggccctcttcctggtgcacaggaggaagaaggagacccgctacggggaggtgtttgagcccaccgtggagcggggggagctggtggtgcgctacagagtgaggaagagctacagcaggaggaccacagaggccaccctgaacagcctgggcatcagcgaggagctgaaggagaagctgagagatgtgatggtggacagacacaaggtggccctgggcaagaccctgggggagggggagtttggagctgtgatggagggccagctgaaccaggatgacagcatcctgaaggtggccgtgaagaccatgaagatcgccatctgcaccaggtctgagctggaggacttcctgtctgaggccgtgtgcatgaaggagtttgaccaccccaacgtgatgaggctcatcggcgtgtgcttccagggcagcgagcgggagagcttccctgcccctgtggtgatcctgcccttcatgaagcacggggacctgcacagcttcctgctgtacagccggctgggggaccagcctgtgtacctgcccacccagatgctggtgaagttcatggctgacatcgccagcggcatggagtacctgagcaccaagcgcttcatccaccgggacctggccgccaggaactgcatgctgaatgaaaacatgtctgtgtgtgtggccgactttggcctgagcaagaagatctacaacggggactactaccggcagggcagaattgccaagatgcctgtgaagtggatcgccatcgagagcctggccgacagagtgtacaccagcaagagtgatgtgtggagctttggagtgaccatgtgggagatcgccacccggggccagaccccctacccaggagtggagaacagcgagatctatgactacctgcggcagggcaaccggctgaagcagcctgctgactgcctggatggcctgtatgccctgatgagccgctgctgggagctgaacccccaggaccggcccagcttcacagagctgcgggaggacctggagaacaccctgaaggccctgcccccagcccaggagccagatgagatcctgtatgtgaacatggatgagggcggcggctacccagagcccccaggagctgctgggggcgctgacccccccacccagcctgaccccaaggacagctgcagctgcctgacagctgctgaggtgcaccctgctggccgctacgtgctgtgccccagcaccacccccagccctgcccagcctgctgaccggggcagccctgctgcccctggccaggaggatggagcctag

SEQ ID NO: 120011 - DNA, 2658 bp, Artificial Sequence
  derived and/or modified sequence
atggcctggcggtgcccccggatgggccgggtgcccctggcctggtgtctagccctctgtggatgggcctgtatggcccctagggggacccaggccgaagagtctcctttcgtcggaaaccccggcaatataactggggctcgggggctgacaggtactctgaggtgccaacttcaagtgcagggagagcctcctgaggtccactggctcagggacggccagatcctggagctagcagacagcacacagactcaagtgccactcggtgaagatgagcaagacgattggattgtggtctcccaattgaggatcaccagccttcaactgagcgatacaggtcaatatcaatgtctggtgttcctgggacaccaaacattcgtttcccagcccggatacgttggacttgaagggcttccttattttttggaggagccggaggacagaactgtcgcagctaacaccccattcaacttgtcctgtcaggcccaagggcctcctgaaccagttgatttactgtggctccaggacgctgtgccactcgctactgcccctggtcacggtcctcagaggtccctccatgtccccggccttaacaagactagctccttttcttgcgaagcacataatgctaagggtgttacaacatcgcgcaccgcaaccattacagttttgccacagcaaccccgaaatttacacttggtgtcccggcaaccaacagagttggaagtggcctggacacctggactttctggtatataccccctcacacactgtacgttgcaagcggtgttgagcaatgatggaatggggattcaggcgggtgagcctgatcctcccgaagagcctttgacatcacaggcctccgttccaccgcatcaactaagattgggctctcttcatccacacacgccttaccacatccgcgtagcttgtactagcagccaaggtcctagtagctggactcactggctcccagtggagacgcctgagggtgtgcctctgggtccacctgagaatatttcagccacccgaaacggctctcaggccttcgtccactggcaggagccacgcgcccccctgcagggcacacttctcgggtacaggctcgcttatcaaggccaggacacacccgaagtgctgatggatataggcctgaggcaggaggttactctggagctgcagggcgatgggtctgtcagcaacctcaccgtgtgtgtggcggcctacacggctgccggagatgggccatggagtctgcctgtaccactggaggcgtggcgccccgtgaaggaaccttctactcccgcattcagctggccctggtggtacgtcttactcggggccgttgttgccgccgcttgcgtgctgattctcgccctttttctggtccacagacgcaagaaagaaactagatacggagaagtcttcgagccaacagtggaacgtggggaacttgtggtgcgatatcgtgttcgtaaatcctacagtcgccggacaaccgaagccacactcaacagcctcggcatttccgaggaactaaaggagaaactgcgcgacgtgatggtcgacaggcataaagttgccctgggcaagacactgggtgaaggcgaattcggtgccgttatggaaggccagctgaatcaggacgatagcattctgaaagtagcagtgaagacgatgaaaattgctatatgcactcgttctgagttggaggattttctgtccgaggcagtgtgcatgaaagagttcgaccatccaaacgttatgagattgatcggagtctgttttcagggctccgagcgtgagtctttccccgccccagtggtcattttgcctttcatgaagcatggagatcttcactccttcctgctctactcaagattgggggaccagcctgtctaccttcccacccagatgctggtcaaattcatggccgacatcgcatcaggaatggaatacctgtctacgaaaagattcatccacagggatctagctgccaggaactgtatgttgaatgagaacatgagcgtctgcgtcgctgactttggattgagcaaaaaaatatataatggagactactacaggcaagggcgcatcgccaagatgcccgtgaaatggatcgctattgagagcctcgctgaccgtgtctacacgtctaagtcagatgtgtggtcttttggcgtcacgatgtgggaaatcgctaccaggggtcagactccttatcctggagttgagaattcagaaatctatgattatttacgccaaggaaatcgcttaaagcaacctgccgactgtctagatggcctgtacgcactgatgagccggtgttgggaactgaacccccaggataggcctagctttacggagcttagagaagatctcgagaacaccttaaaggccctgccccccgcacaggagcctgatgagatcctatatgtcaatatggatgaaggggggggctatcctgagccaccaggagccgcagggggcgcagatcctccaacccagccagatcctaaggattcctgctcttgcctcacggcggccgaagtgcatccagccggaaggtatgtgctatgtcctagcacaacacccagtccagcgcagccagcagaccgcggatccccagccgcccctggtcaggaagatggcgcctag

SEQ ID NO: 120012 - DNA, 2658 bp, Artificial Sequence
  derived and/or modified sequence
atggcgtggaggtgcccgcgtatgggtagggtcccgctagcatggtgtttagccctgtgtggttgggcatgtatggctccaagaggcacacaggctgaggagtcgcccttcgtgggtaaccccggaaacatcacgggcgctaggggcttgactggcaccctgcgctgccagcttcaggtgcaaggggagcctccagaagttcattggcttcgggacggacagatacttgagctcgcggactctacgcagacacaagtgccactgggtgaagatgaacaggacgattggatcgttgtgtctcagctgcggatcaccagtcttcaactcagtgatacaggccagtatcagtgtctggtgtttctgggccatcaaacatttgtgagccagccaggttatgtcggactagaaggcctgccctactttctggaagaaccagaggatcgcactgtcgcggcaaacactcctttcaatctcagctgtcaggctcaaggtcccccagagccggtcgatttgttgtggctgcaagatgcagtgcccctcgccacggcgcctggacacggaccccaacggagcttgcacgtgccgggacttaacaagacatcctcattttcctgtgaagcccacaacgccaagggagttactacgagccgtaccgccacaatcacagtccttccgcagcagcccaggaacctgcatctggtctcccgccagcctaccgagctcgaggtcgcttggactcctgggctgagtggtatatatccacttacccattgcactcttcaggccgtgctctctaacgatggtatgggaattcaggccggagaacctgatccacccgaagaacctctgacaagccaagctagcgttcctccacaccaactgcgtttggggtcgctccatcctcataccccgtaccacatacgggtggcttgtacctccagtcaaggcccttcaagctggacacactggctcccagtcgaaacaccagaaggtgttcctcttggtccccctgagaatatttccgcgactcgaaacggctcacaggcctttgttcactggcaagaaccgcgtgcgcctttacagggcacgctgctgggctacagactggcctatcagggacaggacacaccagaagttctgatggacatcggtcttcggcaggaagtgacactcgagctgcagggcgacggctcggtgtctaatcttacggtgtgcgtggcagcatacaccgcagccggagacggcccttggtctctccccgtgccgttggaggcttggcgtccagtcaaggaaccctcaacccccgctttctcctggccctggtggtacgttctgctgggcgctgtggtcgcagcggcttgtgtgctcatccttgccttgtttctggtacaccggcgaaagaaagagactagatatggggaagttttcgaacccacggtcgagcgcggtgaactagtagtgaggtaccgcgtccggaagagttattctcgaaggacgacagaggctacacttaactcactgggcatatctgaggaactcaaagagaaactccgggatgtcatggtggatcggcacaaggttgccttaggcaagactcttggggagggagaattcggtgcggtcatggagggtcagcttaatcaggacgacagcattcttaaggtggccgttaagacaatgaagatcgcaatctgtacccggtctgaactggaagacttcctgtccgaggcagtctgcatgaaagaattcgaccaccccaatgtcatgcgattgatcggtgtgtgctttcagggtagcgaacgcgagtccttccccgctccagtggtgattcttccattcatgaagcatggcgatctgcacagctttctgctgtattcccgtctcggcgaccagcccgtgtacctgcctactcagatgctggtgaagttcatggccgatattgccagcggtatggagtacctgagcacgaaacgcttcattcaccgagatctggctgccaggaactgtatgctgaatgagaatatgagtgtgtgcgtcgcagactttgggctgagcaaaaagatctacaacggcgattattaccggcaagggagaattgctaagatgccagtcaaatggattgccattgagtctctcgcagatcgggtgtatacatccaagtctgatgtctggagcttcggggtgacaatgtgggagatagctacaaggggacagaccccctaccccggagtcgaaaactccgaaatatatgactacctgaggcagggcaataggctgaaacagccggcagattgtcttgacggattatatgctctgatgtctcgatgttgggaactgaacccccaggatcggcctagctttaccgagctgagagaggacctcgaaaacacattgaaggcgcttcctcctgcccaagaacccgacgagattctgtacgtgaatatggacgagggtggcggatatcctgagccgccaggggctgccggtggagcagatcctcctacccaacctgaccctaaagacagctgtagttgtttaaccgccgcagaagtccatcccgctggccgttacgtgttgtgcccaagtacaactccttctcccgctcagcccgctgaccgcggaagcccagccgctccagggcaggaggacggtgcctag

SEQ ID NO: 120013 - DNA, 4709 bp, Artificial Sequence
  derived and/or modified sequence
gggaaggaggcaggggtgctgagaaggcggctgctgggcagagccggtggcaagggcctcccctgccgctgtgccaggcaggcagtgccaaatccggggagcctggagctggggggagggccggggacagcccggccctgccccctcccccgctgggagcccaacaacttctgaggaaagtttggcacccatggcgtggcggtgccccaggatgggcagggtcccgctggcctggtgcttggcgctgtgcggctgggcgtgcatggcccccaggggcacgcaggctgaagaaagtcccttcgtgggcaacccagggaatatcacaggtgcccggggactcacgggcacccttcggtgtcagctccaggttcagggagagccccccgaggtacattggcttcgggatggacagatcctggagctcgcggacagcacccagacccaggtgcccctgggtgaggatgaacaggatgactggatagtggtcagccagctcagaatcacctccctgcagctttccgacacgggacagtaccagtgtttggtgtttctgggacatcagaccttcgtgtcccagcctggctatgttgggctggagggcttgccttacttcctggaggagcccgaagacaggactgtggccgccaacacccccttcaacctgagctgccaagctcagggacccccagagcccgtggacctactctggctccaggatgctgtccccctggccacggctccaggtcacggcccccagcgcagcctgcatgttccagggctgaacaagacatcctctttctcctgcgaagcccataacgccaagggggtcaccacatcccgcacagccaccatcacagtgctcccccagcagccccgtaacctccacctggtctcccgccaacccacggagctggaggtggcttggactccaggcctgagcggcatctaccccctgacccactgcaccctgcaggctgtgctgtcaaacgatgggatgggcatccaggcgggagaaccagaccccccagaggagcccctcacctcgcaagcatccgtgcccccccatcagcttcggctaggcagcctccatcctcacaccccttatcacatccgcgtggcatgcaccagcagccagggcccctcatcctggacccactggcttcctgtggagacgccggagggagtgcccctgggcccccctgagaacattagtgctacgcggaatgggagccaggccttcgtgcattggcaagagccccgggcgcccctgcagggtaccctgttagggtaccggctggcgtatcaaggccaggacaccccagaggtgctaatggacatagggctaaggcaagaggtgaccctggagctgcagggggacgggtctgtgtccaatctgacagtgtgtgtggcagcctacactgctgctggggatggaccctggagcctcccagtacccctggaggcctggcgcccagtgaaggaaccttcaactcctgccttctcgtggccctggtggtatgtactgctaggagcagtcgtggccgctgcctgtgtcctcatcttggctctcttccttgtccaccggcgaaagaaggagacccgttatggagaagtgtttgaaccaacagtggaaagaggtgaactggtagtcaggtaccgcgtgcgcaagtcctacagtcgtcggaccactgaagctaccttgaacagcctgggcatcagtgaagagctgaaggagaagctgcgggatgtgatggtggaccggcacaaggtggccctggggaagactctgggagagggagagtttggagctgtgatggaaggccagctcaaccaggacgactccatcctcaaggtggctgtgaagacgatgaagattgccatctgcacgaggtcagagctggaggatttcctgagtgaagcggtctgcatgaaggaatttgaccatcccaacgtcatgaggctcatcggtgtctgtttccagggttctgaacgagagagcttcccagcacctgtggtcatcttacctttcatgaaacatggagacctacacagcttcctcctctattcccggctcggggaccagccagtgtacctgcccactcagatgctagtgaagttcatggcagacatcgccagtggcatggagtatctgagtaccaagagattcatacaccgggacctggcggccaggaactgcatgctgaatgagaacatgtccgtgtgtgtggcggacttcgggctctccaagaagatctacaatggggactactaccgccagggacgtatcgccaagatgccagtcaagtggattgccattgagagtctagctgaccgtgtctacaccagcaagagcgatgtgtggtccttcggggtgacaatgtgggagattgccacaagaggccaaaccccatatccgggcgtggagaacagcgagatttatgactatctgcgccagggaaatcgcctgaagcagcctgcggactgtctggatggactgtatgccttgatgtcgcggtgctgggagctaaatccccaggaccggccaagttttacagagctgcgggaagatttggagaacacactgaaggccttgcctcctgcccaggagcctgacgaaatcctctatgtcaacatggatgagggtggaggttatcctgaaccccctggagctgcaggaggagctgaccccccaacccagccagaccctaaggattcctgtagctgcctcactgcggctgaggtccatcctgctggacgctatgtcctctgcccttccacaacccctagccccgctcagcctgctgataggggctccccagcagccccagggcaggaggatggtgcctgagacaaccctccacctggtactccctctcaggatccaagctaagcactgccactggggaaaactccaccttcccactttcccaccccacgccttatccccacttgcagccctgtcttcctacctatcccacctccatcccagacaggtccctccccttctctgtgcagtagcatcaccttgaaagcagtagcatcaccatctgtaaaaggaaggggttggattgcaatatctgaagccctcccaggtgttaacattccaagactctagagtccaaggtttaaagagtctagattcaaaggttctaggtttcaaagatgctgtgagtctttggttctaaggacctgaaattccaaagtctctaattctattaaagtgctaaggttctaaggcctactttttttttttttttttttttttttttttttgcgatagagtctcactgtgtcacccaggctggagtgcagtggtgcaatctcgcctcactgcaaccttcacctaccgagttcaagtgattttcctgccttggcctcccaagtagctgggattacaggtgtgtgccaccacacccggctaatttttatatttttagtagagacagggtttcaccatgttggccaggctggtctaaaactcctgacctcaagtgatctgcccacctcagcctcccaaagtgctgagattacaggcatgagccactgcactcaaccttaagacctactgttctaaagctctgacattatgtggttttagattttctggttctaacatttttgataaagcctcaaggttttaggttctaaagttctaagattctgattttaggagctaaggctctatgagtctagatgtttattcttctagagttcagagtccttaaaatgtaagattatagattctaaagattctatagttctagacatggaggttctaaggcctaggattctaaaatgtgatgttctaaggctctgagagtctagattctctggctgtaaggctctagatcataaggcttcaaaatgttatcttctcaagttctaagattctaatgatgatcaattatagtttctgaggctttatgataatagattctcttgtataagatcctagatcctaagggtcgaaagctctagaatctgcaattcaaaagttccaagagtctaaagatggagtttctaaggtccggtgttctaagatgtgatattctaagacttactctaagatcttagattctctgtgtctaagattctagatcagatgctccaagattctagatgattaaataagattctaacggtctgttctgtttcaaggcactctagattccattggtccaagattccggatcctaagcatctaagttataagactctcacactcagttgtgactaactagacaccaaagttctaataatttctaatgttggacacctttaggttctttgctgcattctgcctctctaggaccatggttaagagtccaagaatccacatttctaaaatcttatagttctaggcactgtagttctaagactcaaatgttctaagtttctaagattctaaaggtccacaggtctagactattaggtgcaatttcaaggttctaaccctatactgtagtattctttggggtgcccctctccttcttagctatcattgcttcctcctccccaactgtgggggtgtgcccccttcaagcctgtgcaatgcattagggatgcctcctttcccgcaggggatggacgatctcccacctttcgggccatgttgcccccgtgagccaatccctcaccttctgagtacagagtgtggactctggtgcctccagaggggctcaggtcacataaaactttgtatatcaacg

SEQ ID NO: 120014 - DNA, 2658 bp, Artificial Sequence
  derived and/or modified sequence
atggcctggagatgccccagaatgggcagagtgcccctggcctggtgcctggccctgtgcggctgggcctgcatggcccccagaggcacccaggccgaggagagccccttcgtgggcaaccccggcaacatcaccggcgccagaggcctgaccggcaccctgagatgccagctgcaggtgcagggcgagccccccgaggtgcactggctgagagacggccagatcctggagctggccgacagcacccagacccaggtgcccctgggcgaggacgagcaggacgactggatcgtggtgagccagctgagaatcaccagcctgcagctgagcgacaccggccagtaccagtgcctggtgttcctgggccaccagaccttcgtgagccagcccggctacgtgggcctggagggcctgccctacttcctggaggagcccgaggacagaaccgtggccgccaacacccccttcaacctgagctgccaggcccagggcccccccgagcccgtggacctgctgtggctgcaggacgccgtgcccctggccaccgcccccggccacggcccccagagaagcctgcacgtgcccggcctgaacaagaccagcagcttcagctgcgaggcccacaacgccaagggcgtgaccaccagcagaaccgccaccatcaccgtgctgccccagcagcccagaaacctgcacctggtgagcagacagcccaccgagctggaggtggcctggacccccggcctgagcggcatctaccccctgacccactgcaccctgcaggccgtgctgagcaacgacggcatgggcatccaggccggcgagcccgacccccccgaggagcccctgaccagccaggccagcgtgcccccccaccagctgagactgggcagcctgcacccccacaccccctaccacatcagagtggcctgcaccagcagccagggccccagcagctggacccactggctgcccgtggagacccccgagggcgtgcccctgggcccccccgagaacatcagcgccaccagaaacggcagccaggccttcgtgcactggcaggagcccagagcccccctgcagggcaccctgctgggctacagactggcctaccagggccaggacacccccgaggtgctgatggacatcggcctgagacaggaggtgaccctggagctgcagggcgacggcagcgtgagcaacctgaccgtgtgcgtggccgcctacaccgccgccggcgacggcccctggagcctgcccgtgcccctggaggcctggagacccgtgaaggagcccagcacccccgccttcagctggccctggtggtacgtgctgctgggcgccgtggtggccgccgcctgcgtgctgatcctggccctgttcctggtgcacagaagaaagaaggagaccagatacggcgaggtgttcgagcccaccgtggagagaggcgagctggtggtgagatacagagtgagaaagagctacagcagaagaaccaccgaggccaccctgaacagcctgggcatcagcgaggagctgaaggagaagctgagagacgtgatggtggacagacacaaggtggccctgggcaagaccctgggcgagggcgagttcggcgccgtgatggagggccagctgaaccaggacgacagcatcctgaaggtggccgtgaagaccatgaagatcgccatctgcaccagaagcgagctggaggacttcctgagcgaggccgtgtgcatgaaggagttcgaccaccccaacgtgatgagactgatcggcgtgtgcttccagggcagcgagagagagagcttccccgcccccgtggtgatcctgcccttcatgaagcacggcgacctgcacagcttcctgctgtacagcagactgggcgaccagcccgtgtacctgcccacccagatgctggtgaagttcatggccgacatcgccagcggcatggagtacctgagcaccaagagattcatccacagagacctggccgccagaaactgcatgctgaacgagaacatgagcgtgtgcgtggccgacttcggcctgagcaagaagatctacaacggcgactactacagacagggcagaatcgccaagatgcccgtgaagtggatcgccatcgagagcctggccgacagagtgtacaccagcaagagcgacgtgtggagcttcggcgtgaccatgtgggagatcgccaccagaggccagaccccctaccccggcgtggagaacagcgagatctacgactacctgagacagggcaacagactgaagcagcccgccgactgcctggacggcctgtacgccctgatgagcagatgctgggagctgaacccccaggacagacccagcttcaccgagctgagagaggacctggagaacaccctgaaggccctgccccccgcccaggagcccgacgagatcctgtacgtgaacatggacgagggcggcggctaccccgagccccccggcgccgccggcggcgccgacccccccacccagcccgaccccaaggacagctgcagctgcctgaccgccgccgaggtgcaccccgccggcagatacgtgctgtgccccagcaccacccccagccccgcccagcccgccgacagaggcagccccgccgcccccggccaggaggacggcgcctag

SEQ ID NO: 120015 - protein, 25 aa, Artificial Sequence
  derived and/or modified sequence
NQGRHFCGGALIHARFVMTAASCFQ

SEQ ID NO: 120016 - protein, 25 aa, Artificial Sequence
  derived and/or modified sequence
NQGRHFCGGALIHARFVMTAARCFQ

SEQ ID NO: 120017 - protein, 25 aa, Artificial Sequence
  derived and/or modified sequence
NQGRHFCGGALIHARFVMTAAKCFQ

SEQ ID NO: 120018 - protein, 20 aa, Artificial Sequence
  derived and/or modified sequence
RHFCGGALIHARFVMTAAHC

SEQ ID NO: 120019 - protein, 20 aa, Artificial Sequence
  derived and/or modified sequence
RHFCGGALIHARFVMTAARC

SEQ ID NO: 120020 - protein, 20 aa, Artificial Sequence
  derived and/or modified sequence
RHFCGGALIHARFVMTAAKC

SEQ ID NO: 120021 - protein, 25 aa, Artificial Sequence
  derived and/or modified sequence
NQGRHFSGGALIHARFVMTAAHCFQ

SEQ ID NO: 120022 - protein, 25 aa, Artificial Sequence
  derived and/or modified sequence
NQGRHFSGGALIHARFVMTAARCFQ

SEQ ID NO: 120023 - protein, 25 aa, Artificial Sequence
  derived and/or modified sequence
NQGRHFSGGALIHARFVMTAAKCFQ

SEQ ID NO: 120024 - protein, 25 aa, Artificial Sequence
  derived and/or modified sequence
NQGRHFCGGALIHARFVMTAAHSFQ

SEQ ID NO: 120025 - protein, 25 aa, Artificial Sequence
  derived and/or modified sequence
NQGRHFCGGALIHARFVMTAARSFQ

SEQ ID NO: 120026 - protein, 20 aa, Artificial Sequence
  derived and/or modified sequence
RHFCGGALIHARFVMTAASC

SEQ ID NO: 120027 - protein, 25 aa, Artificial Sequence
  derived and/or modified sequence
NQGRHFCGGALIHARFVMTAAKSFQ

SEQ ID NO: 120028 - protein, 20 aa, Artificial Sequence
  derived and/or modified sequence
RHFSGGALIHARFVMTAAHC

SEQ ID NO: 120029 - protein, 20 aa, Artificial Sequence
  derived and/or modified sequence
RHFSGGALIHARFVMTAARC

SEQ ID NO: 120030 - protein, 20 aa, Artificial Sequence
  derived and/or modified sequence
RHFSGGALIHARFVMTAAKC

SEQ ID NO: 120031 - protein, 20 aa, Artificial Sequence
  derived and/or modified sequence
RHFCGGALIHARFVMTAAHS

SEQ ID NO: 120032 - protein, 20 aa, Artificial Sequence
  derived and/or modified sequence
RHFCGGALIHARFVMTAARS

SEQ ID NO: 120033 - protein, 20 aa, Artificial Sequence
  derived and/or modified sequence
RHFCGGALIHARFVMTAAKS

SEQ ID NO: 120034 - protein, 25 aa, Artificial Sequence
  derived and/or modified sequence
NQGRHFCAGALIHARFVMTAASCFQ

SEQ ID NO: 120035 - protein, 25 aa, Artificial Sequence
  derived and/or modified sequence
NQGRHFCGAALIHARFVMTAASCFQ

SEQ ID NO: 120036 - protein, 25 aa, Artificial Sequence
  derived and/or modified sequence
NQGRHFCAAALIHARFVMTAASCFQ

SEQ ID NO: 120037 - protein, 25 aa, Artificial Sequence
  derived and/or modified sequence
NQGRHFSGGALIHARFVMTAASCFQ

SEQ ID NO: 120038 - protein, 25 aa, Artificial Sequence
  derived and/or modified sequence
NQGRHFSAGALIHARFVMTAASCFQ

SEQ ID NO: 120039 - protein, 25 aa, Artificial Sequence
  derived and/or modified sequence
NQGRHFSGAALIHARFVMTAASCFQ

SEQ ID NO: 120040 - protein, 25 aa, Artificial Sequence
  derived and/or modified sequence
NQGRHFSAAALIHARFVMTAASCFQ

SEQ ID NO: 120041 - protein, 25 aa, Artificial Sequence
  derived and/or modified sequence
NQGRHFCAGALIHARFVMTAASSFQ

SEQ ID NO: 120042 - protein, 25 aa, Artificial Sequence
  derived and/or modified sequence
NQGRHFCGAALIHARFVMTAASSFQ

SEQ ID NO: 120043 - protein, 25 aa, Artificial Sequence
  derived and/or modified sequence
NQGRHFCAAALIHARFVMTAASSFQ

SEQ ID NO: 120044 - protein, 25 aa, Artificial Sequence
  derived and/or modified sequence
NQGRHFCGGALIHARFVMTAATCFQ

SEQ ID NO: 120045 - protein, 25 aa, Artificial Sequence
  derived and/or modified sequence
NQGRHFCGGALIHARFLMTAASCFQ

SEQ ID NO: 120046 - protein, 25 aa, Artificial Sequence
  derived and/or modified sequence
NQGRHFCGGALIHARFIMTAASCFQ

SEQ ID NO: 120047 - protein, 25 aa, Artificial Sequence
  derived and/or modified sequence
NQGRHFCGGALIHARFAMTAASCFQ

SEQ ID NO: 120048 - protein, 20 aa, Artificial Sequence
  derived and/or modified sequence
RHFSGGALIHARFVMTAASC

SEQ ID NO: 120049 - protein, 25 aa, Artificial Sequence
  derived and/or modified sequence
NQGRHYCGGALIHARFVMTAASCFQ

SEQ ID NO: 120050 - protein, 25 aa, Artificial Sequence
  derived and/or modified sequence
NQGRHFCGGALIHARYVMTAASCFQ

SEQ ID NO: 120051 - protein, 25 aa, Artificial Sequence
  derived and/or modified sequence
NQGRHFCGGALIHARFVMTAASCYQ

SEQ ID NO: 120052 - protein, 20 aa, Artificial Sequence
  derived and/or modified sequence
RHFSAGALIHARFVMTAASC

SEQ ID NO: 120053 - protein, 20 aa, Artificial Sequence
  derived and/or modified sequence
EAQTRCQVAGWGSQSRSGGR

SEQ ID NO: 120054 - protein, 20 aa, Artificial Sequence
  derived and/or modified sequence
RHFSGAALIHARFVMTAASC

SEQ ID NO: 120055 - protein, 20 aa, Artificial Sequence
  derived and/or modified sequence
RHFSAAALIHARFVMTAASC

SEQ ID NO: 120056 - protein, 20 aa, Artificial Sequence
  derived and/or modified sequence
RHFSGGALIHARFLMTAASC

SEQ ID NO: 120057 - protein, 20 aa, Artificial Sequence
  derived and/or modified sequence
RHFSGGALIHARFIMTAASC

SEQ ID NO: 120058 - protein, 20 aa, Artificial Sequence
  derived and/or modified sequence
RHFSGGALIHARFAMTAASC

SEQ ID NO: 120059 - protein, 20 aa, Artificial Sequence
  derived and/or modified sequence
RHYSGGALIHARFVMTAASC

SEQ ID NO: 120060 - protein, 25 aa, Artificial Sequence
  derived and/or modified sequence
NQGRHFCGGALIHARFVMTAASSFQ

SEQ ID NO: 120061 - protein, 20 aa, Artificial Sequence
  derived and/or modified sequence
RHFSGGALIHARYVMTAASC

SEQ ID NO: 120062 - protein, 20 aa, Artificial Sequence
  derived and/or modified sequence
RHFCAGALIHARFVMTAASS

SEQ ID NO: 120063 - protein, 20 aa, Artificial Sequence
  derived and/or modified sequence
RHFCGAALIHARFVMTAASS

SEQ ID NO: 120064 - protein, 20 aa, Artificial Sequence
  derived and/or modified sequence
RHFCAAALIHARFVMTAASS

SEQ ID NO: 120065 - protein, 20 aa, Artificial Sequence
  derived and/or modified sequence
RHFCGGALIHARFLMTAASS

SEQ ID NO: 120066 - protein, 20 aa, Artificial Sequence
  derived and/or modified sequence
RHFCGGALIHARFIMTAASS

SEQ ID NO: 120067 - protein, 20 aa, Artificial Sequence
  derived and/or modified sequence
RHFCGGALIHARFAMTAASS

SEQ ID NO: 120068 - protein, 20 aa, Artificial Sequence
  derived and/or modified sequence
RHYCGGALIHARFVMTAASS

SEQ ID NO: 120069 - protein, 20 aa, Artificial Sequence
  derived and/or modified sequence
RHFCGGALIHARYVMTAASS

SEQ ID NO: 120070 - protein, 20 aa, Artificial Sequence
  derived and/or modified sequence
RHFCGGALIHARFVMTAASS

SEQ ID NO: 120071 - protein, 25 aa, Artificial Sequence
  derived and/or modified sequence
NQGRHFSGGALIHARFVMTAASSFQ

SEQ ID NO: 120072 - protein, 25 aa, Artificial Sequence
  derived and/or modified sequence
NQGRHFCGGALIHARFVMTAAHCFQ

SEQ ID NO: 120073 - protein, 20 aa, Artificial Sequence
  derived and/or modified sequence
RHFSGGALIHARFVMTAASS

SEQ ID NO: 120074 - protein, 219 aa, Artificial Sequence
  derived and/or modified sequence
IVGGRRAQPQEFPFLASIQKQGRPFCAGALVHPRFVLTAASCFRGKNSGSASVVLGAYDLRQQEQSRQTFSIRSISQNGYDPRQNLNDVLLLQLDREARLTPSVALVPLPPQNATVEAGTNCQVAGWGTQRLRRLFSRFPRVLNVTVTSNPCLPRDMCIGVFSRRGRISQGDRGTPLVCNGLAQGVASFLRRRFRRSSGFFTRVALFRNWIDSVLNNPP

SEQ ID NO: 120075 - protein, 222 aa, Artificial Sequence
  derived and/or modified sequence
IVGGRKARPRQFPFLASIQNQGRHFCGGALIHARFVMTAASCFQSQNPGVSTVVLGAYDLRRRERQSRQTFSISSMSENGYDPQQNLNDLMLLQLDREANLTSSVTILPLPLQNATVEAGTRCQVAGWGSQRSGGRLSRFPRFVNVTVTPEDQCRPNNVCTGVLTRRGGICNGDGGTPLVCEGLAHGVASFSLGPCGRGPDFFTRVALFRDWIDGVLNNPGP

SEQ ID NO: 120076 - protein, 251 aa, Artificial Sequence
  derived and/or modified sequence
MTRLTVLALLAGLLASSRAGSSPLLDIVGGRKARPRQFPFLASIQNQGRHFCGGALIHARFVMTAASCFQSQNPGVSTVVLGAYDLRRRERQSRQTFSISSMSENGYDPQQNLNDLMLLQLDREANLTSSVTILPLPLQNATVEAGTRCQVAGWGSQRSGGRLSRFPRFVNVTVTPEDQCRPNNVCTGVLTRRGGICNGDGGTPLVCEGLAHGVASFSLGPCGRGPDFFTRVALFRDWIDGVLNNPGPGPA

SEQ ID NO: 120077 - protein, 226 aa, Artificial Sequence
  derived and/or modified sequence
AEGKWGLAHGRAEAHVWPGQGGWRLGPPQGRWTGSSPLLDIVGGRKARPRQFPFLASIQNQGRHFCGGALIHARFVMTAASCFQSQNPGVSTVVLGAYDLRRRERQSRQTFSISSMSENGYDPQQNLNDLMLLQLDREANLTSSVTILPLPLQNATVEAGTRCQVAGWGSQRSGGRLSRFPRFVNVTVTPEDQCRPNNVCTGVLTRRGGICNVSAPCGGRRGPERY

SEQ ID NO: 120078 - DNA, 681 bp, Artificial Sequence
  derived and/or modified sequence
gccgaaggcaaatggggcctggctcatggaagggctgaggcgcacgtctggcctggccagggcggatggcgtctcggaccaccacaggggcgatggacagggtcctcacccttgttggacatcgtggggggaagaaaagcacgacctagacagttcccttttctggctagtatacagaaccagggtagacacttctgtggaggggccctaatccacgcaagatttgttatgacagcagccagctgcttccagtcccagaatccaggtgtgtctacggtcgtgttaggagcctatgacttgagaaggagggagaggcagagccgtcagactttttctatctcatcgatgagtgagaacgggtatgacccacaacagaacttgaacgatctgatgctcctgcagttggatcgtgaagcaaacctgacatcctccgtgactattctaccactccctctacaaaatgccacagttgaagccggaaccagatgccaggtggccgggtgggggtcacaaaggtcagggggcaggctgtctcgctttcctcgcttcgttaacgttacagtcactccagaagaccagtgccggcccaataacgtgtgcactggggttttgacacggagaggcggaatctgcaacgttagcgccccttgcggcggaaggcggggccccgaaagatattag

SEQ ID NO: 120079 - DNA, 756 bp, Artificial Sequence
  derived and/or modified sequence
atgacaaggctgaccgttctggccctcctggccggactgctcgcatctagccgggctggtagctcccccctcctggacatagttggtggacgcaaagctagaccacgccaatttccattcttggcctccatccagaaccaggggaggcacttttgtggtggagccctcattcacgcccgattcgtcatgacggcagcatcatgttttcagagccagaatcccggggttagcactgtggtgctgggggcttacgacctccgacgcagggaaagacagagtagacagacgttcagcattagctctatgtctgagaacgggtacgacccccaacagaacttaaatgacttgatgctacttcagctcgatcgggaggccaacctgacgtcttctgtgaccattctgcctcttccactccaaaatgcgactgtcgaggccgggactcgctgtcaggtcgctggatggggctcccagcggtccggaggcagactgtctcggtttccccggtttgttaacgtgaccgtcacaccggaagatcagtgcagacctaataacgtttgcactggggtgctgacacgacgagggggtatctgcaatggcgacggggggactccattggtttgtgagggactggcacatggtgtagcaagcttctccctcgggccttgcgggcgcggcccagatttctttacccgagtagcattgtttcgggattggattgatggtgtgctgaacaatcccgggccaggccctgcctag

SEQ ID NO: 120080 - DNA, 681 bp, Artificial Sequence
  derived and/or modified sequence
gctgagggcaagtggggcctggcccacggccgggcagaggcccacgtgtggccaggccagggcggctggaggctgggccccccccagggccgctggacaggcagcagccccctgctggacatcgtgggcggcaggaaggcccggccccggcagttccccttcctggccagcatccagaaccagggccgccacttctgtggcggggccctgatccacgccaggtttgtgatgacagctgccagctgcttccagagccagaaccctggggtgtccacagtggtgctgggcgcctatgacctgcggcggcgggagcggcagagccggcagaccttcagcatcagctccatgtctgaaaatggctatgacccccagcagaacctgaatgacctgatgctgctgcagctggaccgggaggccaacctgaccagctctgtgaccatcctgcccctgcccctgcagaatgccaccgtggaggccggcacccgctgccaggtggccggctggggcagccagaggtctgggggccgcctgagccgcttccccaggtttgtgaatgtgacagtgaccccagaggaccagtgccggcccaacaacgtgtgcacaggagtgctgacccggcggggcggcatctgcaatgtgtctgccccctgtggcggccggcggggccctgagcgctactag

SEQ ID NO: 120081 - DNA, 756 bp, Artificial Sequence
  derived and/or modified sequence
atgacccggctgactgtgctggccctgctggccggcctgctggccagcagcagagctggcagcagccccctgctggacatcgtgggcggcaggaaggcccggccccggcagttccccttcctggccagcatccagaaccagggccgccacttctgtggcggggccctgatccacgccaggtttgtgatgacagctgccagctgcttccagagccagaaccctggggtgtccacagtggtgctgggcgcctatgacctgcggcggcgggagcggcagagccggcagaccttcagcatcagctccatgtctgaaaatggctatgacccccagcagaacctgaatgacctgatgctgctgcagctggaccgggaggccaacctgaccagctctgtgaccatcctgcccctgcccctgcagaatgccaccgtggaggccggcacccgctgccaggtggccggctggggcagccagaggtctgggggccgcctgagccgcttccccaggtttgtgaatgtgacagtgaccccagaggaccagtgccggcccaacaacgtgtgcacaggagtgctgacccggcggggcggcatctgcaatggagatggcggcacccccctggtgtgtgagggcctggcccacggcgtggccagcttcagcctgggcccctgtggccggggccctgacttcttcaccagggtggccctcttccgggactggattgatggagtgctgaacaaccctggccctggccctgcctag

SEQ ID NO: 120082 - DNA, 681 bp, Artificial Sequence
  derived and/or modified sequence
gccgagggcaagtggggcctggcccacggccgggccgaggcccacgtctggcctggacaggggggctggcggctaggccctccccagggcaggtggacaggctcatctcccctactcgacatcgtaggcggccgcaaggccagacctcgacagtttcctttcctcgcatccatccagaaccaagggcggcacttctgcggaggagcgctgatacatgctcggtttgttatgacagccgcttcatgttttcagagccagaaccctggtgtcagcacagtggttctcggggcctatgacctccgcagacgggagcggcaatctcgacagacattctctattagctctatgtctgagaatggctacgaccctcaacagaacctcaacgacctgatgctcctacaactggaccgcgaagctaatctaacgtccagcgttaccatccttccgctcccgctgcagaacgccactgtggaagccggcacccgctgccaagtcgcaggctggggaagccaaagatccggaggcaggctgagccggttccctcgttttgtgaatgtgacagtgacaccagaggaccaatgccgccctaacaacgtgtgtaccggcgttctgacgagaaggggaggtatttgcaacgtttctgccccctgtggggggagacgcggtccggagaggtattag

SEQ ID NO: 120083 - DNA, 756 bp, Artificial Sequence
  derived and/or modified sequence
atgacccggctgaccgtgctggccctgctggccggcctgctggccagctccagggcaggaagctcacctctgctagatatcgtcggaggcagaaaggcccggcccagacagtttccgttcttagctagcatccagaatcagggtagacatttctgtggcggagccctaattcacgcacgcttcgtgatgactgccgcctcttgctttcaatctcagaatcctggcgtgagcacggtcgtactgggtgcatatgatctcaggcggagggagcgacaaagcaggcagacatttagcatttcctctatgtctgagaatggctacgacccgcaacagaacctaaatgacctcatgctccttcaactcgacagggaagcgaacctgacttcctctgttacgatcctgcctctccctctgcagaacgccaccgtggaggccggcacacgatgccaggttgccggatgggggtctcaaaggagtgggggccggttaagccgattccccaggttcgttaacgtgaccgtgacaccagaggatcagtgtcgtccaaataacgtgtgtaccggggtccttactcgtcggggaggtatctgcaatggcgacgggggtactcccctggtgtgcgaagggctcgctcatggggtcgcctcctttagcctgggtccctgcggacgcgggccagactttttcacacgagtggcgttattccgtgattggatagacggagtgctcaataatcccggacccggacctgcctag

SEQ ID NO: 120084 - DNA, 681 bp, Artificial Sequence
  derived and/or modified sequence
gcagaggggaagtggggcctggctcacggcagggcagaagctcacgtgtggcccggacagggcggatggcggttgggccctccccaagggaggtggaccggctccagccctctgcttgacattgtgggaggaagaaaagctaggccgagacagtttccctttctcgccagcattcagaaccaagggagacatttctgcggtggcgcactcatccacgctcgcttcgtaatgactgctgcatcttgctttcaaagtcagaatccaggggtgtccaccgtggtgctgggtgcctacgacctgagacgtagggagagacagagcagacagacgttttcaatatcttccatgtccgaaaacgggtacgacccacagcagaatctcaatgacctcatgctcctccagctggatcgagaggcaaatctgacaagttcagtcaccatacttcccctacccctgcaaaacgccaccgtcgaagctggcacgaggtgccaggtggctgggtggggctctcaacgttctggtggaaggctgtctcgtttcccaaggttcgtcaacgtgaccgtgacccctgaggaccagtgccgccctaataacgtgtgcacgggcgtgctgacgcggaggggtggcatttgtaacgtgtcagctccatgtgggggaaggcgcggtcccgaacgctactag

SEQ ID NO: 120085 - DNA, 756 bp, Artificial Sequence
  derived and/or modified sequence
atgacaagacttacagtattggcactgttggccggtctgttagcaagctcaagggctgggagtagtcccttgctggacatagtaggtggcaggaaggctcgccctcgccagttcccatttctagcttctattcagaaccagggaaggcatttttgtggtggagctctgattcatgctcggtttgtaatgaccgccgctagttgcttccagagccagaatcccggagtgtccactgtagtcctcggcgcatatgatctgcggagacgcgaacggcagtctcgacagacgttcagcatcagcagcatgtcggagaatggatacgacccacagcaaaatctgaatgacctgatgctgctgcagctggatcgagaggctaatctgactagcagtgtgaccattctgcctctcccactgcagaatgcaacagtggaggctggcacaagatgccaagtggccggatggggatcccagcgctccggcggtagacttagtcgcttcccgagattcgtcaacgtaacagttacccccgaagatcagtgccgtcctaataatgtgtgcacaggtgtgttaactagaagaggaggcatctgtaatggcgacggtggcactcctttggtgtgcgaaggcctagcacacggcgtagcgagtttttctctgggaccctgtgggcgaggcccagacttcttcacccgggtagctttatttagagattggatagacggtgtcctgaacaaccctggtcctggccctgcttag

SEQ ID NO: 120086 - DNA, 912 bp, Artificial Sequence
  derived and/or modified sequence
acagacctgccccgccatgacccggctgacagtcctggccctgctggctggtctgctggcgtcctcgagggccggctccagcccccttttggacatcgttggcggccggaaggcgaggccccgccagttcccgttcctggcctccattcagaatcaaggcaggcacttctgcgggggtgccctgatccatgcccgcttcgtgatgaccgcggccagctgcttccaaagccagaaccccggggttagcaccgtggtgctgggtgcctatgacctgaggcggcgggagaggcagtcccgccagacgttttccatcagcagcatgagcgagaatggctacgacccccagcagaacctgaacgacctgatgctgcttcagctggaccgtgaggccaacctcaccagcagcgtgacgatactgccactgcctctgcagaacgccacggtggaagccggcaccagatgccaggtggccggctgggggagccagcgcagtggggggcgtctctcccgttttcccaggtttgtcaacgtgactgtgacccccgaggaccagtgtcgccccaacaacgtgtgcaccggtgtgctcacccgccgcggtggcatctgcaatggggacgggggcacccccctcgtctgcgagggcctggcccacggcgtggcctccttttccctggggccctgtggccgaggccctgacttcttcacccgagtggcgctcttccgagactggatcgatggtgttctcaacaacccgggaccggggccagcctaggggggcctgtgacctcccatggagcccagccccgccctccacacctccggcgctccgcacccacctcccacggccccgcccctgcccccgctccggccagaggggccctggctgtaataaagaagccgatctctcctctg

SEQ ID NO: 120087 - DNA, 1713 bp, Artificial Sequence
  derived and/or modified sequence
ggcagaggggaaatggggcctggcccacgggagagctgaggcccacgtttggccaggacagggtggatggaggctggggcctccgcagggaagatggacaggctccagcccccttttggacatcgttggcggccggaaggcgaggccccgccagttcccgttcctggcctccattcagaatcaaggcaggcacttctgcgggggtgccctgatccatgcccgcttcgtgatgaccgcggccagctgcttccaaagccagaaccccggggttagcaccgtggtgctgggtgcctatgacctgaggcggcgggagaggcagtcccgccagacgttttccatcagcagcatgagcgagaatggctacgacccccagcagaacctgaacgacctgatgctgcttcagctggaccgtgaggccaacctcaccagcagcgtgacgatactgccactgcctctgcagaacgccacggtggaagccggcaccagatgccaggtggccggctgggggagccagcgcagtggggggcgtctctcccgttttcccaggtttgtcaacgtgactgtgacccccgaggaccagtgtcgccccaacaacgtgtgcaccggtgtgctcacccgccgcggtggcatctgcaatgtgagtgctccctgtggcgggaggaggggtcctgagaggtactgagctctccgtggcaggagaaagcaagtgcaggctgagggcggcacagcaggggggccccaggattgagcattttcacggtaggagaaacagtatctttttttttttttttgagacagagtctcgctctgtcgcccaggctggagtgtagtggcgtgatctcggcggctcactgcaacctccgcctcctgggttcaagcgattctcctgcctcagcctcctaagtagctgggattacaggcatgcgccaccacgcccggctaattttgtatttttagtagagacagggtttctccatgtgggtcaggctggtctcgaactcctgacctcatgatcgacccaccttggcctcccaaagtgttaggataacaggcatgagccaccgtgcctggctgagaaacagtagctatcaaacgccggctgtgagccacgtctgtgctgggggttggggacccagcaggcatggtagagccggtcactgagggactcaggcgtgtgattgccaggggaggggcacctggcccagcctggaggtgccaggaagctccagaaagcaactgatcccaaagtccactagcagttaaccagggcagagaaagagaagagccatgcaaaggccctggggctggatcaggacttgtaggttccaggggcagcaagaggcctctgcagttctggggtggcgtgggagccaggccctgggacgccctgacacagctgctgcctgcccagggggacgggggcacccccctcgtctgcgagggcctggcccacggcgtggcctccttttccctggggccctgtggccgaggccctgacttcttcacccgagtggcgctcttccgagactggatcgatggtgttctcaacaacccgggaccggggccagcctaggggggcctgtgacctcccatggagcccagccccgccctccacacctccggcgctccgcacccacctcccacggccccgcccctgcccccgctccggccagaggggccctggctgtaataaagaagccgatctctcctctg

SEQ ID NO: 120088 - DNA, 681 bp, Artificial Sequence
  derived and/or modified sequence
gccgagggcaagtggggcctggcccacggcagagccgaggcccacgtgtggcccggccagggcggctggagactgggccccccccagggcagatggaccggcagcagccccctgctggacatcgtgggcggcagaaaggccagacccagacagttccccttcctggccagcatccagaaccagggcagacacttctgcggcggcgccctgatccacgccagattcgtgatgaccgccgccagctgcttccagagccagaaccccggcgtgagcaccgtggtgctgggcgcctacgacctgagaagaagagagagacagagcagacagaccttcagcatcagcagcatgagcgagaacggctacgacccccagcagaacctgaacgacctgatgctgctgcagctggacagagaggccaacctgaccagcagcgtgaccatcctgcccctgcccctgcagaacgccaccgtggaggccggcaccagatgccaggtggccggctggggcagccagagaagcggcggcagactgagcagattccccagattcgtgaacgtgaccgtgacccccgaggaccagtgcagacccaacaacgtgtgcaccggcgtgctgaccagaagaggcggcatctgcaacgtgagcgccccctgcggcggcagaagaggccccgagagatactag

SEQ ID NO: 120089 - DNA, 756 bp, Artificial Sequence
  derived and/or modified sequence
atgaccagactgaccgtgctggccctgctggccggcctgctggccagcagcagagccggcagcagccccctgctggacatcgtgggcggcagaaaggccagacccagacagttccccttcctggccagcatccagaaccagggcagacacttctgcggcggcgccctgatccacgccagattcgtgatgaccgccgccagctgcttccagagccagaaccccggcgtgagcaccgtggtgctgggcgcctacgacctgagaagaagagagagacagagcagacagaccttcagcatcagcagcatgagcgagaacggctacgacccccagcagaacctgaacgacctgatgctgctgcagctggacagagaggccaacctgaccagcagcgtgaccatcctgcccctgcccctgcagaacgccaccgtggaggccggcaccagatgccaggtggccggctggggcagccagagaagcggcggcagactgagcagattccccagattcgtgaacgtgaccgtgacccccgaggaccagtgcagacccaacaacgtgtgcaccggcgtgctgaccagaagaggcggcatctgcaacggcgacggcggcacccccctggtgtgcgagggcctggcccacggcgtggccagcttcagcctgggcccctgcggcagaggccccgacttcttcaccagagtggccctgttcagagactggatcgacggcgtgctgaacaaccccggccccggccccgcctag

SEQ ID NO: 120090 - protein, 418 aa, Artificial Sequence
  derived and/or modified sequence
MIQLTATPVSALVDEPVHIRATGLIPFQMVSFQASLEDENGDMFYSQAHYRANEFGEVDLNHASSLGGDYMGVHPMGLFWSLKPEKLLTRLLKRDVMNRPFQVQVKLYDLELIVNNKVASAPKASLTLERWYVAPGVTRIKVREGRLRGALFLPPGEGLFPGVIDLFGGLGGLLEFRASLLASRGFASLALAYHNYEDLPRKPEVTDLEYFEEAANFLLRHPKVFGSGVGVVSVCQGVQIGLSMAIYLKQVTATVLINGTNFPFGIPQVYHGQIHQPLPHSAQLISTNALGLLELYRTFETTQVGASQYLFPIEEAQGQFLFIVGEGDKTINSKAHAEQAIGQLKRHGKNNWTLLSYPGAGHLIEPPYSPLCCASTTHDLRLHWGGEVIPHAAAQEHAWKEIQRFLRKHLIPDVTSQL

SEQ ID NO: 120091 - DNA, 1257 bp, Artificial Sequence
  derived and/or modified sequence
atgatccagctgactgctactcctgtgtcagccctggtggatgagccagtgcacattagagcaaccgggcttataccttttcagatggtctcattccaggctagtctggaggatgagaacggagacatgttctatagccaagctcactaccgcgcgaatgaatttggcgaggtcgatctgaatcatgcatcctcactggggggggactatatgggagtgcaccctatgggcctgttctggagcctgaagcctgagaaattgctgactcgtctgctgaagagggacgtgatgaaccgccctttccaggtgcaagtgaagctttatgatctggaattgatcgtgaataataaagtggccagtgccccaaaagccagcctcacgcttgagcgttggtacgttgcccctggagtcacacgaatcaaggtacgagagggcaggctccgcggagcacttttcctgccacctggcgagggacttttccctggagtaatcgacctttttggggggttggggggccttttagagtttcgggcctccctgctggccagccgagggtttgccagcctagctctcgcctaccacaactatgaggatctgccacggaagcccgaggtgactgacctcgagtattttgaggaggcagccaattttcttctgcggcacccaaaagttttcggatccggcgtcggtgtagtcagcgtgtgtcagggggtgcagattgggctgtctatggctatctaccttaaacaggtgactgctaccgtgctcatcaacggcacaaacttccccttcggcatcccgcaggtgtaccacggacagatccatcagcctctgccccatagcgcacaactgatcagcactaatgcccttgggctattggaactgtacagaacctttgagacaacccaagtgggtgccagccagtaccttttcccgatcgaggaggcacagggtcaattcctgttcatcgttggggaaggagataaaacaatcaacagtaaggcacatgctgagcaggccatcggccagctgaagcggcatggaaaaaacaactggaccctgctctcctatcccggggccggtcacctgattgagcctccctactctcctttgtgctgcgcctctacaacgcatgatctgcggctacattggggaggcgaggtgatcccccatgccgcggcccaggaacatgcgtggaaggaaatccagcgctttcttcgcaagcacctgattcctgatgtaacctcgcaactttag

SEQ ID NO: 120092 - DNA, 1257 bp, Artificial Sequence
  derived and/or modified sequence
atgattcagctgactgctactcccgtctccgcactcgtagatgaaccagtgcatattagagcaacaggccttatccccttccagatggtgtcctttcaggcaagcctggaggatgagaacggagacatgttctacagccaagcccactatagggctaatgagttcggggaggtggatctgaaccacgcatcaagcctgggtggagattatatgggagtgcaccctatgggtctgttttggtcccttaaacctgaaaagctactgacgcgcctgctgaagagagacgtgatgaacagaccctttcaagtccaggtgaagctctacgatttggagcttattgttaataacaaggtggcttccgcacctaaagcatcattaactctcgagcggtggtacgtagccccaggggtgacaaggattaaggtccgagagggacgactgcgcggggctctttttctgccccctggagagggacttttccccggagttattgatctgtttggagggctggggggcctgctcgaatttagggccagtctgttagcctcacgtggcttcgccagcctggcactggcttatcacaactatgaggatttacctagaaagcctgaggttactgacctcgaatactttgaggaagccgccaacttcttacttagacaccctaaggtgttcggcagcggggtgggggtcgtgtccgtttgtcagggcgtccaaataggtttgagtatggccatctatttgaagcaggtgacagcaactgtgcttatcaatggtacaaattttcctttcgggatcccccaggtgtaccatggacagattcatcaacctctgccacactcagcacagttgattagcaccaacgctctggggctgctggagctttaccgcacctttgagaccacacaggttggcgcatcccagtacctcttccccatagaggaagctcaaggacagtttctgtttatcgtgggcgagggagataagactattaacagcaaggctcacgcagagcaagccatcgggcagctcaaaaggcacggcaagaacaattggacgctgctctcctatccaggtgctggacacttaattgaaccaccatactccccactttgttgtgcctcgaccacacacgatcttcgcttgcattggggcggtgaagttattccccatgctgctgcccaggagcatgcttggaaagagatccaaaggtttcttaggaaacacctaatccctgacgtgacttcacaactctag

SEQ ID NO: 120093 - DNA, 1257 bp, Artificial Sequence
  derived and/or modified sequence
atgatccagctgacagccacccctgtgtctgccctggtggatgagcctgtgcacatccgggccaccggcctcatccccttccagatggtgtccttccaggccagcctggaggatgaaaatggagacatgttctacagccaggcccactaccgggccaatgaatttggagaggtggacctgaaccacgccagcagcctgggcggggactacatgggcgtgcaccccatgggcctcttctggagcctgaagccagagaagctgctgacccggctgctgaagagagatgtgatgaaccggcccttccaggtgcaggtgaagctgtatgacctggagctgattgtgaacaacaaggtggccagcgcccccaaggccagcctgaccctggagcgctggtacgtggcccctggggtgacccgcatcaaggtgcgggagggccgcctgcggggggccctcttcctgcccccaggagagggcctcttccctggggtcatcgacctgtttggaggcctgggcggcctgctggagttccgggccagcctgctggccagccggggctttgccagcctggccctggcctaccacaactatgaggacctgcccaggaagccagaggtgacagacctggagtactttgaggaggccgccaacttcctgctgcggcaccccaaggtgtttggaagtggagtgggcgtggtgtctgtgtgccagggcgtgcagatcggcctgtccatggccatctacctgaagcaggtgacagccaccgtgctgatcaatggcaccaacttccccttcggcatcccccaggtgtaccacggccagatccaccagcccctgccccacagcgcccagctgatcagcaccaatgccctgggcctgctggagctgtaccgcacctttgagaccacccaggtgggcgccagccagtacctgttccccatcgaggaggcccagggccagttcctgttcatcgtgggggagggggacaagaccatcaacagcaaggcccatgctgagcaggccatcggccagctgaagagacatggcaagaacaactggaccctgctgagctacccaggggccggccacctgattgagcccccctacagccccctgtgctgtgccagcaccacccatgacctgcggctgcactggggcggggaggtgatcccccacgccgccgcccaggagcacgcctggaaggagatccagcgcttcctgaggaagcacctgatcccagatgtgaccagccagctgtag

SEQ ID NO: 120094 - DNA, 1257 bp, Artificial Sequence
  derived and/or modified sequence
atgatccagctgaccgccacccccgtgagcgccctggtggacgagcccgtgcacattcgcgccactgggctcattccatttcaaatggtttcctttcaggcaagcctggaggacgagaacggggacatgttttattctcaagctcattacagagctaacgagttcggagaggttgacttaaatcacgcttccagtctaggcggcgattacatgggggtccacccgatgggcctcttttggtcattgaagcctgaaaaattgttgacacgtctgttaaagcgcgacgtgatgaaccgccccttccaggtgcaagttaaactgtatgacctggaactgatcgtgaataacaaggtcgccagcgctcctaaggccagcctcaccctggagcggtggtacgtcgctcctggtgtgacccggattaaggtgcgggagggtcgtctccgaggagcactgttcttgccacctggggagggattgtttcccggcgtgatcgatttgtttggcggactggggggcctgcttgaatttcgagcaagcctccttgcttctcgtggctttgcttctctcgctctcgcgtatcacaactatgaggaccttcccagaaaaccagaggttacggacctggagtatttcgaggaagccgcaaacttcctgctgcgacatccaaaagttttcggctcaggtgtgggcgtggtgtcggtgtgccagggagtgcagatcggcctgtcgatggctatttatctgaagcaggttactgcaacagttctgatcaacggaacaaactttccatttgggatcccacaggtgtaccatgggcagattcaccaacccctacctcattctgcacagctgataagcactaacgctttaggacttcttgagctgtaccgcacattcgagactacacaggtgggtgccagccagtatctctttccaatcgaagaggcccagggtcaattcttgtttatcgtcggtgagggcgataaaaccatcaacagcaaggcccacgctgaacaggccatcggacagttgaagcggcatggtaagaataattggaccctcttgagttaccccggggctggtcacctaattgaacctccgtatagccccctttgttgtgcttccaccacacatgatctgaggttgcactggggcggggaagtgatcccccatgctgcggcccaggagcatgcatggaaagagattcagagattccttaggaaacacttgattcccgacgtcacatctcagctgtag

SEQ ID NO: 120095 - DNA, 1257 bp, Artificial Sequence
  derived and/or modified sequence
atgatccagctgaccgccacccccgtgagcgccctggtggacgagcccgttcacattcgggccacggggctgatccctttccagatggtctctttccaagccagcctcgaagatgaaaacggtgacatgttctatagccaggcacactacagagctaatgagttcggtgaagtggatcttaatcacgcaagtagccttggcggagactatatgggcgtgcacccaatgggactgttttggtcactgaaaccagagaagctgctcaccagactgctcaaaagagatgtcatgaatcggccctttcaagtgcaggttaagttatacgacctcgaacttattgtaaataataaggtcgcttcagctccaaaagccagtttaacattggagcgttggtatgttgcgcctggcgttactagaatcaaagttcgagagggcaggttacgcggagcattgttcttgcctccaggagagggtctttttcccggtgtcatcgacctttttggtggcttgggcggactccttgagtttagagccagcctgctggcttcccgagggttcgccagtttggccctggcctatcataactacgaggatctgcctaggaaaccggaagtgactgatctggaatacttcgaagaagcagccaacttcttgctgcgccatcccaaagtcttcggaagtggcgtgggggttgtgagtgtgtgtcagggcgtccagatcgggctgtcaatggcaatttatctgaagcaggtgaccgcaacagtgctgattaatggcaccaacttccccttcgggattccacaggtataccacgggcaaatccaccaacccctgcctcatagcgcccagttgatatccacaaacgcactcggattgttggaactgtaccgtacatttgagactacacaagtgggtgcgagtcagtacctgtttccaatcgaagaagcccagggacaatttctctttatcgttggagaaggcgataaaactattaattccaaggcccacgccgagcaggccattgggcagctgaaacgccacggaaagaataactggacccttctgtcctatcctggtgccggtcacctaattgaaccaccttacagccccctgtgttgcgcctctactacccacgatctccggttgcattggggcggcgaggtgatcccgcatgccgctgcacaggagcatgcctggaaggaaatccagaggttcctgcgaaaacacctgatacctgacgtaaccagccaactctag

SEQ ID NO: 120096 - DNA, 1257 bp, Artificial Sequence
  derived and/or modified sequence
atgatacagctcacagctaccccggtcagcgctttagttgacgagccagtgcacataagagctacaggcctcataccttttcagatggttagcttccaagcttcactcgaagatgaaaatggtgatatgttttacagtcaggcacattatagggccaacgaattcggcgaggtggacctgaaccatgctagcagtctcggcggtgattacatgggagtgcaccctatgggcctgttctggagtctgaagcccgagaaactgctgactcgccttctgaagcgagacgtaatgaacaggcctttccaagtgcaggtgaagctatatgatttagaattaattgtgaacaataaggtggcgtcggccccaaaagcctctctcacactggagaggtggtatgtcgcaccgggtgtgacccgcatcaaggtgcgtgagggccgacttaggggagctctgttcctgccacccggagagggcctgttccctggagtgattgatctgtttgggggactcggaggcctgctcgaattcagggcgtcactgcttgcctcgcgagggttcgcatccctggcgctagcctaccacaattacgaagacctgccaaggaagcccgaggttaccgacctggagtacttcgaagaggccgcaaacttcctcctgcgccatcctaaagtattcggatcaggagtgggggtggtgtcagtgtgccagggcgtccagatcgggctatcaatggccatctatctgaaacaggtaacggcaacggtcctgataaatggcaccaattttcctttcgggattccccaggtgtatcacggccaaattcatcagccattacctcattctgctcagctgatatcgaccaacgccctcggcctgctcgaactgtatagaacctttgagacaacacaggttggagcgagtcaatatctgttccctatcgaagaggcacagggacaattcctgtttatcgtgggggaaggggataaaaccatcaacagtaaagcacacgctgaacaagccattggccaactcaagcgacacggcaaaaacaactggaccctgctgagttatccaggcgctggtcatctcatagagcccccttattctccattgtgttgcgctagcacaactcacgatctgcggttgcattggggcggtgaggtgataccacatgccgcagcccaagaacatgcttggaaagagattcagcggttcctgcgtaagcacctcatccccgacgtcacctcccaattatag

SEQ ID NO: 120097 - DNA, 1257 bp, Artificial Sequence
  derived and/or modified sequence
atgattcagctcacagctacaccagttagcgctttggtcgatgagcccgtacacatccgcgcaactggcttgattccgtttcagatggtgtctttccaggcatcactggaggatgagaatggcgatatgttctactcccaggctcactacagagccaacgagtttggcgaagtggacctcaaccatgcctcatcccttgggggagattacatgggcgtccaccctatggggctgttttggtccttaaagccggagaagctgctgacgcgactgttgaagcgtgacgtgatgaacaggccctttcaggtgcaggttaaattatacgacctggagctgattgtcaacaataaagtggccagcgctccaaaagcaagtcttacgctcgagcgctggtacgtagctcccggtgtgacaagaatcaaggtgagggaaggaaggctacgcggtgctctgtttttgccaccaggtgagggattgtttcctggggtcatagacttattcggcggactgggaggacttctagaattcagggcatcccttctggcgagtcgaggcttcgcctccctcgcactggcctatcacaattacgaggacctaccccgaaagcctgaggtaactgacctggaatacttcgaggaagccgcaaacttcctgttgaggcacccgaaggtttttggctcgggagttggtgtagtctccgtgtgtcagggggtgcagattggcctgtcgatggctatttacctgaagcaagtgactgccaccgtcctgatcaacggtacaaactttccattcggcatcccacaggtttatcatggacaaattcatcagcccttgccacattccgcacagctcatctctaccaacgccctggggttactcgaactgtaccggaccttcgagaccacacaagtcggagctagtcagtatctatttcctatagaggaggcgcagggccagtttctttttatagtaggggagggggacaagaccatcaactctaaagcacatgctgaacaggcgatagggcaactgaaaaggcacggcaaaaacaactggaccctcctgtcctatcctggcgcagggcacctcatagaacctccttatagccctctctgctgcgctagtacaacccatgatcttcgactgcactggggaggtgaggtgattccgcacgccgcagcacaagagcatgcctggaaagaaatccaaaggtttctacgcaagcatctaataccggacgtgacttcccagctgtag

SEQ ID NO: 120098 - DNA, 3377 bp, Artificial Sequence
  derived and/or modified sequence
gtcattttccctctactgctggaaaagaaggctcaagaggaagaatccaggttttgaggttttgctgaagatattcctgaagaatcatcccaggtgccacactaaaaaaatgatccagttgacagctacccctgtgagtgcacttgttgatgagccagtgcatatccgagctacaggcctgattccctttcagatggtgagttttcaggcatcactggaagatgaaaacggagacatgttttattctcaagcccactatagggccaatgaattcggtgaggtggacctgaatcatgcttcttcacttggaggggattatatgggagtccaccccatgggtctcttctggtctctgaaacctgaaaagctattaacaagactgttgaaaagagatgtgatgaataggcctttccaggtccaagtaaaactttatgacttagagttaatagtgaacaataaagttgccagtgctccaaaggccagcctgactttggagaggtggtatgtggcacctggtgtcacacgaattaaggttcgagaaggccgccttcgaggagctctctttctccctccaggagagggtctcttcccaggggtaattgatttgtttggtggtttgggtgggctgcttgaatttcgggccagcctcctagccagtcgtggcttcgcctccttggccttggcttaccataactatgaagacctgccccgcaaaccagaagtaacagatttggaatattttgaggaggctgccaactttctcctgagacatccaaaggtctttggctcaggcgttggggtagtctctgtatgtcaaggagtacagattggactatctatggctatttacctaaagcaagtcacagccacggtacttattaatgggaccaactttccttttggcattccacaggtatatcatggtcagatccatcagccccttccccattctgcacaattaatatccaccaatgccttggggttactagagctctatcgcacttttgagacaactcaagttggggccagtcaatatttgtttcctattgaagaggcccaggggcaattcctcttcattgtaggagaaggtgataagactatcaacagcaaagcacacgctgaacaagccataggacagctgaagagacatgggaagaacaactggaccctgctatcttaccctggggcaggccacctgatagaacctccctattctcctctgtgctgtgcctcaacgacccacgatttgaggttacactggggaggagaggtgatcccacacgcagctgcacaggaacatgcttggaaggagatccagagatttctcaggaagcacctcattccagatgtgaccagtcaactctaagaagactagatattcctagaaaataaagaagcaaatctctttaccgggaccttctctcaattttcatggcggaatgtctcccccagctgccacacacacattttgtattaattttaatgattaaaaagagcatagggtaaaaacctgatatttcacttatactgcataacaagctaaccaaactggacatggtgaataaatcataaaacaaatcattttacttattatttacatgacttttctttccatcaggtcttctaaataggactgaggtatagtacactggcaaaaataagaaaaggcaaacaagaatagcaccaaagtaacagatataaaaccaaataccatgtcagaaaacactatatagtaagaatttatcagattagagcagcaggagaaaattaatactaaattataatcattttagtgatatttttcaacttcaccacagtaactttgcaacatcatttttcatttgtggggtagtaaaattcatgtcaaaaaggaaagaaggaatggaggaggtcagttagttcattgcaataaattacctcttcagttcttaaaaacatgcccattggcacataactgagacataataactaagactggaagagccttggtttaagttatgaagcaaattaaaatggaaaatacaagaaaatagaaccaattaggttgaaaatgccccttactgaaaatctgtattaaaaataaaattaataaaagtaaaaaataaaaatagaaacacaactctactagtacaggctagcctggggagtttgataaactgagtgattgggtcaactatcactgtacttccataatgaatttcttcagtcatgttagagtagcacatgaatgtgagctctataaggacaggtactatatttccgtaagacccaatagttactgtacatcccataaataaaaaatactttagtttgctaaccaactgaatatatgaggactgcatgtaattcaaccacatggttgtttgctgtacagtcctttgcaaatattaaaaaattttttttgctataaggctttgatcatatagtcctcatagcaacataactaccatctagcatgtaccacattttgcaagactttaagttcaacattccaaactgccaatttgtattatgtccaaatgcagtatccttgaggaatatagtgggtcagttaaatatctagagacatacaaacatctgctaattcatctcattgagatggatcattctgatctccatcatccacccacttttcatcagcttctcctacttcattctcctcatagtctttatcatgagggattctgtatcctgtctctcatctacacttgctggccttcctggttgtgatttattggaacagtctacacaaaaaccatagggtcaagatccatgtcttactccaacactggctgctaacatgatcttacataccatacatttgcatttttatccttcttgtgcaccaagaaatgttttcttacatgttttctccaagtgtaaaaagtcacagctaaatgatctcactcctgtatgaataagcaagtgcttttttagtgtttgtttgcatttggctgcatagctacaatgatggcattttaacttattcatgattagagatgatgatatggtttggatatttgttgtgcccaaatttcatgctgaaatgtaatccctagtgttggaggtgaggcctggtgggagttgtttgggtcatgggggtggaccctcatggcttggtactgtcctcatgagagtatgatagtgagtgagttctcaagagatatgactgtttaaaagtgtgtggcacctcctccccatcctcacactctttcttgcctcctctctcgccatgtgagatgcctcctcgctgttcacctgctgccatgattgtaaacttcctgaggcctccccagaagccaagtagatgcaagcattatgcttctgtaaagcctgcaggaccatgatccaattaaatctcttttctttataaatta

SEQ ID NO: 120099 - DNA, 2252 bp, Artificial Sequence
  derived and/or modified sequence
ttcttttttgaggttttgaggttttgctgaagatattcctgaagaatcatcccaggtgccacactaaaaaaatgatccagttgacagctacccctgtgagtgcacttgttgatgagccagtgcatatccgagctacaggcctgattccctttcagatggtgagttttcaggcatcactggaagatgaaaacggagacatgttttattctcaagcccactatagggccaatgaattcggtgaggtggacctgaatcatgcttcttcacttggaggggattatatgggagtccaccccatgggtctcttctggtctctgaaacctgaaaagctattaacaagactgttgaaaagagatgtgatgaataggcctttccaggtccaagtaaaactttatgacttagagttaatagtgaacaataaagttgccagtgctccaaaggccagcctgactttggagaggtggtatgtggcacctggtgtcacacgaattaaggttcgagaaggccgccttcgaggagctctctttctccctccaggagagggtctcttcccaggggtaattgatttgtttggtggtttgggtgggctgcttgaatttcgggccagcctcctagccagtcgtggcttcgcctccttggccttggcttaccataactatgaagacctgccccgcaaaccagaagtaacagatttggaatattttgaggaggctgccaactttctcctgagacatccaaaggtctttggctcaggcgttggggtagtctctgtatgtcaaggagtacagattggactatctatggctatttacctaaagcaagtcacagccacggtacttattaatgggaccaactttccttttggcattccacaggtatatcatggtcagatccatcagccccttccccattctgcacaattaatatccaccaatgccttggggttactagagctctatcgcacttttgagacaactcaagttggggccagtcaatatttgtttcctattgaagaggcccaggggcaattcctcttcattgtaggagaaggtgataagactatcaacagcaaagcacacgctgaacaagccataggacagctgaagagacatgggaagaacaactggaccctgctatcttaccctggggcaggccacctgatagaacctccctattctcctctgtgctgtgcctcaacgacccacgatttgaggttacactggggaggagaggtgatcccacacgcagctgcacaggaacatgcttggaaggagatccagagatttctcaggaagcacctcattccagatgtgaccagtcaactctaagaagactagatattcctagaaaataaagaagcaaatctctttaccgggaccttctctcaattttcatggcggaatgtctcccccagctgccacacacacattttgtattaattttaatgattaaaaagagcatagggtaaaaacctgatatttcacttatactgcataacaagctaaccaaactggacatggtgaataaatcataaaacaaatcattttacttattatttacatgacttttctttccatcaggtcttctaaataggactgaggtatagtacactggcaaaaataagaaaaggcaaacaagaatagcaccaaagtaacagatataaaaccaaataccatgtcagaaaacactatatagtaagaatttatcagattagagcagcaggagaaaattaatactaaattataatcattttagtgatatttttcaacttcaccacagtaactttgcaacatcatttttcatttgtggggtagtaaaattcatgtcaaaaaggaaagaaggaatggaggaggtcagttagttcattgcaataaattacctcttcagttcttaaaaacatgcccattggcacataactgagacataataactaagactggaagagccttggtttaagttatgaagcaaattaaaatggaaaatacaagaaaatagaaccaattaggttgaaaatgccccttactgaaaatctgtattaaaaataaaattaataaaagtaaaaaataaaaatagaaacacaactctactagtacaggctagcctggggagtttgataaactgagtgattgggtcaactatcactgtacttccataatgaatttcttcagtcatgttagagtagcacatgaatgtgagctctataaggacaggtactatatttccgtaagacccaatagttactgtacatccca

SEQ ID NO: 120100 - DNA, 1257 bp, Artificial Sequence
  derived and/or modified sequence
atgatccagctgaccgccacccccgtgagcgccctggtggacgagcccgtgcacatcagagccaccggcctgatccccttccagatggtgagcttccaggccagcctggaggacgagaacggcgacatgttctacagccaggcccactacagagccaacgagttcggcgaggtggacctgaaccacgccagcagcctgggcggcgactacatgggcgtgcaccccatgggcctgttctggagcctgaagcccgagaagctgctgaccagactgctgaagagagacgtgatgaacagacccttccaggtgcaggtgaagctgtacgacctggagctgatcgtgaacaacaaggtggccagcgcccccaaggccagcctgaccctggagagatggtacgtggcccccggcgtgaccagaatcaaggtgagagagggcagactgagaggcgccctgttcctgccccccggcgagggcctgttccccggcgtgatcgacctgttcggcggcctgggcggcctgctggagttcagagccagcctgctggccagcagaggcttcgccagcctggccctggcctaccacaactacgaggacctgcccagaaagcccgaggtgaccgacctggagtacttcgaggaggccgccaacttcctgctgagacaccccaaggtgttcggcagcggcgtgggcgtggtgagcgtgtgccagggcgtgcagatcggcctgagcatggccatctacctgaagcaggtgaccgccaccgtgctgatcaacggcaccaacttccccttcggcatcccccaggtgtaccacggccagatccaccagcccctgccccacagcgcccagctgatcagcaccaacgccctgggcctgctggagctgtacagaaccttcgagaccacccaggtgggcgccagccagtacctgttccccatcgaggaggcccagggccagttcctgttcatcgtgggcgagggcgacaagaccatcaacagcaaggcccacgccgagcaggccatcggccagctgaagagacacggcaagaacaactggaccctgctgagctaccccggcgccggccacctgatcgagcccccctacagccccctgtgctgcgccagcaccacccacgacctgagactgcactggggcggcgaggtgatcccccacgccgccgcccaggagcacgcctggaaggagatccagagattcctgagaaagcacctgatccccgacgtgaccagccagctgtag

SEQ ID NO: 120101 - DNA, 2187 bp, Artificial Sequence
  derived and/or modified sequence
atgctattgccgcaaggtaaagaggccgtagaaggaaagaaatgccaggggaggcagagacgtgcaggcttatcagaggtctggtcgaggaagctcaggaacgagagcctgggtacctggtctacgcagggctgcaagaccgtgctaacagacgcgagtcatacaaagtgtttgtgtgaccgcttaagcacttttgccatattggcccagcagccaagagagataatcatggagagtagtggaaccccctctgtgactctcatcgtagggtctggtctgagctgcctggctctgattactctggcagtggtgtatgccgctctgtggcggtacattcgctccgagagaagcataattctgataaatttttgcctaagcattatttcgtccaatatcttaatcctggttggacaaacgcagacccataataagtcaatttgtacaacaacaaccgcgttcctgcacttttttttcctggcctctttctgctgggtcctgacagaggcctggcagtcttacatggccgtcacgggcaagatccgcactagactgatacgcaaacgtttcctctgcctcggctggggattaccagcactggtggtcgcgacgagtgttgggttcacccgcacaaaggggtatggtaccgaccattactgctggctgtccctggagggaggtttgctatatgctttcgtgggccctgcagcagccgtggtgttagttaacatggtcataggtattctagtgtttaacaagctggtgtccagggatggaatacttgacaaaaagttaaagcatagagccggtcagatgtccgagccacattccgggctgacgctgaaatgtgcgaaatgtggcgtggtgagtaccaccgccctttctgccacaaccgcctcaaatgccatggcaagtctctggtccagctgtgttgtgctcccactgttagccctaacgtggatgagcgcagtgttggcaatgactgacaagaggagtatcttattccagattttgttcgcagtctttgattctttacaggggtttgtcattgtgatggtccactgtattttacgacgtgaggtccaggatgctttccgctgtaggctgcggaattgccaggacccgattaatgccgactcatcaagctccttcccaaatggacatgcacaaatcatgacggatttcgagaaggacgtagacattgcctgccggtctgtattgcacaaagacataggcccgtgtagagctgcaacaataaccggcaccctctcgagaatttccttgaatgatgacgaggaggagaaagggactaaccctgagggcctttcctattcgacactgcccggcaacgtgatttctaaggtcattatccagcagccaacggggctgcacatgcccatgagcatgaatgagctctcaaacccatgcttgaagaaggaaaactcggagctgagacggaccgtgtacctgtgcacagatgataatctgcgcggggctgatatggatattgttcacccacaagagagaatgatggagagtgattatatcgttatgcccagatcatctgtgaataaccagccgagcatgaaggaggagagcaagatgaacatcggaatggagaccctgccacatgagcggctgctgcactataaggtgaaccctgagtttaacatgaacccccccgttatggaccagttcaacatgaacctcgaacagcatctggctccacaggaacacatgcaaaatttaccctttgagccacggacagctgtgaaaaatttcatggcctctgagcttgatgacaatgcagggctaagtcgtagcgaaaccggttcgaccatctccatgtcttctctagaacggagaaagtctagatatagtgatctcgattttgaaaaggtaatgcatacaaggaagcggcatatggaactgttccaggagcttaaccaaaagttccaaactctggatagatttcgggatatacctaacaccagcagcatggaaaatcccgcgcctaacaagaatccctgggatacttttaaaaacccgtcagagtacccacactatactaccatcaacgtactggataccgaagcaaaggatgcactggaacttcggcccgctgaatgggaaaagtgcttgaatttacccctggacgtccaggagggcgattttcaaactgaggtctag

SEQ ID NO: 120102 - DNA, 1461 bp, Artificial Sequence
  derived and/or modified sequence
atggttatcggaattctggtctttaacaagcttgtgagtagagacggaattctggataagaagctgaaacaccgagccggtcagatgtctgagccacattccggcctgacactgaaatgcgctaaatgtggagtcgtaagcacaaccgccctgtccgcaactacggcctctaatgctatggcctccctctggagtagctgtgtggttcttcccctcctcgccctgacttggatgtctgctgttctcgccatgaccgataagagatccattctgtttcagatcctctttgccgtgttcgatagcctacagggcttcgtcatcgtgatggtgcattgtattctccggagggaggtgcaggatgcctttaggtgcaggctcaggaactgccaagatccgatcaacgctgatagttcatctagcttccccaatggacacgcccaaattatgacagacttcgagaaagacgtcgacattgcctgtaggtctgtgctccacaaagacattgggccatgcagggcagctacaataactggtaccctttcgcgaatttctctgaacgacgatgaggaagagaaaggtacaaaccccgagggactctcctactcaaccctgccggggaacgttatctccaaggtgatcatccaacagcctactgggctccacatgcccatgtccatgaatgagctctccaatccatgcctcaaaaaagaaaactccgaactccgccgcacagtctacttatgcacagatgataacctaaggggggcggacatggacatcgtgcacccccaggagcgtatgatggagagcgattacatcgtgatgccgcggagcagcgtgaacaatcagcccagcatgaaagaggagtctaaaatgaacattggaatggagacactgcctcacgagcggctacttcactacaaagtcaatcccgagtttaatatgaatccaccggtcatggaccagttcaacatgaatctggagcaacatttggccccccaagaacatatgcagaacctgccttttgaaccccgcacagctgtgaagaactttatggctagcgaacttgacgataacgccggcctctcccgcagtgaaaccggctccaccatcagtatgagctctttagagcgaagaaagagccggtacagcgacctggactttgagaaggtcatgcacacccggaagagacacatggaactgtttcaggaattgaatcagaaattccagactctggatcgattccgagacatccccaatacttcctccatggagaacccagctccaaacaaaaacccatgggacacattcaagaacccttccgaataccctcattacacgacaatcaacgtgttggataccgaggcaaaggacgccctggagctcagaccagccgagtgggaaaagtgccttaatctccccctggacgtacaagagggcgattttcagactgaggtctag

SEQ ID NO: 120103 - DNA, 2187 bp, Artificial Sequence
  derived and/or modified sequence
atgctgctgccccagggcaaggaggccgtggagggcaagaagtgccagggccggcagaggcgggccggcctgtctgaggtgtggagcaggaagctgagaaatgaaagcctgggcacctggagcacccagggctgcaagacagtgctgacagatgccagccacaccaagtgcctgtgtgaccggctgagcacctttgccatcctggcccagcagccccgggagatcatcatggagagcagcggcacccccagcgtgaccctcatcgtgggcagcggcctgagctgcctggccctgatcaccctggccgtggtgtatgctgccctgtggagatacatccgctctgagaggagcatcatcctgatcaacttctgcctgagcatcatcagcagcaacatcctgatcctggtgggccagacccagacccacaacaagagcatctgcaccaccaccacagccttcctgcacttcttcttcctggccagcttctgctgggtgctgacagaggcctggcagagctacatggctgtgacaggcaagatccgcaccaggctcatcaggaagcgcttcctgtgcctgggctggggcctgcctgccctggtggtggccacctctgtgggcttcaccaggaccaagggctatggaacagaccactactgctggctgagcctggagggcggcctgctgtatgcctttgtgggccctgctgctgctgtggtgctggtgaacatggtgattggcatcctggtgttcaacaagctggtgtccagagatggcatcctggacaagaagctgaagcaccgggccggccagatgtctgagccccacagcggcctgaccctgaagtgtgccaagtgtggggtggtgtccaccacagccctgagcgccaccacagccagcaatgccatggccagcctgtggagcagctgtgtggtgctgcccctgctggccctgacctggatgtctgctgtgctggccatgacagacaagaggagcatcctcttccagatcctgtttgctgtgtttgacagcctgcagggctttgtgattgtgatggtgcactgcatcctgcggcgggaggtgcaggatgccttccgctgccgcctgaggaactgccaggaccccatcaatgctgacagcagcagcagcttccccaatggacatgcccagatcatgacagactttgagaaggatgtggacatcgcctgccgctctgtgctgcacaaggacatcggcccctgcagagctgccaccatcaccggcaccctgagccgcatcagcctgaatgatgatgaggaggagaagggcaccaaccctgagggcctgagctacagcaccctgcctggaaatgtcatcagcaaggtgatcatccagcagcccaccggcctgcacatgcccatgtccatgaatgagctgagcaacccctgcctgaagaaggaaaattctgagctgcggaggacagtgtacctgtgcacagatgacaacctgcggggagctgacatggacatcgtgcacccccaggagaggatgatggagagtgactacatcgtgatgcccaggagctctgtgaacaaccagcccagcatgaaggaggagagcaagatgaacatcggcatggagaccctgccccatgagcggctgctgcactacaaggtgaaccctgagttcaacatgaacccccctgtgatggaccagttcaacatgaacctggagcagcacctggccccccaggagcacatgcagaacctgccctttgagcccaggacagctgtgaagaacttcatggccagcgagctggatgacaatgccggcctgagccgctcagaaacaggcagcaccatctccatgagcagcctggagaggaggaagagccgctacagcgacctggactttgagaaggtgatgcacaccaggaagaggcacatggagctgttccaggagctgaaccagaagttccagaccctggaccgcttccgggacatccccaacaccagctccatggagaacccagcccccaacaagaacccctgggacaccttcaagaaccccagcgagtacccccactacaccaccatcaacgtgctggacacagaggccaaggatgccctggagctgcggcctgctgagtgggagaagtgcctgaacctgcccctggatgtgcaggagggggacttccagacagaggtgtag

SEQ ID NO: 120104 - DNA, 1461 bp, Artificial Sequence
  derived and/or modified sequence
atggtgattggcatcctggtgttcaacaagctggtgtccagagatggcatcctggacaagaagctgaagcaccgggccggccagatgtctgagccccacagcggcctgaccctgaagtgtgccaagtgtggggtggtgtccaccacagccctgagcgccaccacagccagcaatgccatggccagcctgtggagcagctgtgtggtgctgcccctgctggccctgacctggatgtctgctgtgctggccatgacagacaagaggagcatcctcttccagatcctgtttgctgtgtttgacagcctgcagggctttgtgattgtgatggtgcactgcatcctgcggcgggaggtgcaggatgccttccgctgccgcctgaggaactgccaggaccccatcaatgctgacagcagcagcagcttccccaatggacatgcccagatcatgacagactttgagaaggatgtggacatcgcctgccgctctgtgctgcacaaggacatcggcccctgcagagctgccaccatcaccggcaccctgagccgcatcagcctgaatgatgatgaggaggagaagggcaccaaccctgagggcctgagctacagcaccctgcctggaaatgtcatcagcaaggtgatcatccagcagcccaccggcctgcacatgcccatgtccatgaatgagctgagcaacccctgcctgaagaaggaaaattctgagctgcggaggacagtgtacctgtgcacagatgacaacctgcggggagctgacatggacatcgtgcacccccaggagaggatgatggagagtgactacatcgtgatgcccaggagctctgtgaacaaccagcccagcatgaaggaggagagcaagatgaacatcggcatggagaccctgccccatgagcggctgctgcactacaaggtgaaccctgagttcaacatgaacccccctgtgatggaccagttcaacatgaacctggagcagcacctggccccccaggagcacatgcagaacctgccctttgagcccaggacagctgtgaagaacttcatggccagcgagctggatgacaatgccggcctgagccgctcagaaacaggcagcaccatctccatgagcagcctggagaggaggaagagccgctacagcgacctggactttgagaaggtgatgcacaccaggaagaggcacatggagctgttccaggagctgaaccagaagttccagaccctggaccgcttccgggacatccccaacaccagctccatggagaacccagcccccaacaagaacccctgggacaccttcaagaaccccagcgagtacccccactacaccaccatcaacgtgctggacacagaggccaaggatgccctggagctgcggcctgctgagtgggagaagtgcctgaacctgcccctggatgtgcaggagggggacttccagacagaggtgtag

SEQ ID NO: 120105 - DNA, 2187 bp, Artificial Sequence
  derived and/or modified sequence
atgctgctgccccagggcaaggaggccgtggagggcaagaagtgccaggggaggcaacggcgcgcaggcctgtcagaagtatggagtcggaagctgagaaacgagagtctcggcacttggtctacccaaggatgcaagaccgtgctgacagacgcctctcacaccaagtgcttatgcgaccggctctctacattcgcaattctcgcacagcagcccagggagattatcatggaatcatccgggaccccatccgtcacattgatcgtggggagcggcctgtcatgtttggctctgataacactcgccgtggtctacgctgctctttggcgttacattaggtcagaacgatcaatcattttgattaatttctgtttatcaatcattagctctaacatccttattctagtgggccagacccaaacacacaataagagtatctgcaccactacaaccgctttcctgcacttctttttccttgcctctttctgctgggtgctcactgaggcgtggcagagttacatggcagtgacagggaagatacggactcggctgatcagaaaacgcttcttgtgtctgggttggggtttgcctgcactggtggtggctacgagcgtcggcttcactcgaactaagggctacggcaccgaccattattgttggttgagcctagagggcggactcctttacgcttttgtaggtcccgccgccgccgtggtgctcgtgaacatggtgatcggcatccttgtttttaacaaattggttagtcgtgacgggatccttgataaaaaattaaagcacagagccgggcagatgtctgaaccacacagcggattgaccttgaaatgcgccaagtgcggggtggtctccaccactgctttgagtgcaaccaccgcaagcaacgccatggcctccttgtggtcttcttgcgtggtactgcctcttcttgccctgacttggatgtcagccgtgcttgccatgaccgacaaacgaagtattttattccagatcttatttgcggtgtttgacagcctgcagggtttcgtcatcgtaatggtccattgcatcctgaggcgggaagtgcaagacgcatttcggtgtcgactgcggaactgtcaggaccccatcaacgcagatagctcgtcatcattcccgaacggacacgcccagattatgacagacttcgagaaagatgtcgatatcgcgtgcaggagtgtgctgcataaggatatcggaccctgtcgggccgctaccattaccgggaccctgagccgtatctccctgaatgatgatgaggaagaaaagggcaccaatcctgaggggctcagctatagtacattgccgggaaacgtcatttccaaggtgattattcagcagcccacggggctacatatgccaatgtcgatgaacgagctgtcaaatccatgcctcaagaaagagaattccgagctgagaaggacagtctatctctgcaccgatgacaacctccgcggagcggacatggacattgtccacccccaggagagaatgatggaatcggattacatcgttatgccgcgctcctccgttaataatcagccatctatgaaggaggaaagcaaaatgaatattgggatggaaactctacctcatgaacgtctgcttcactataaagtgaaccccgaattcaatatgaatcctcctgtcatggaccaatttaacatgaatttagagcaacacctggctccccaggaacacatgcagaacctgcccttcgagccgagaactgccgtgaaaaacttcatggcaagcgagcttgatgacaacgccggactctcaagatcagaaacagggtcaaccatcagcatgtccagtttagagcggcggaagagtcgctactcagatctggactttgaaaaggtaatgcacactaggaagagacatatggagctgttccaggagctgaatcagaaatttcaaactctggaccggttccgggacatcccgaacacatcctcaatggaaaacccagctcctaacaagaatccttgggatacattcaaaaatccttctgagtacccgcactacacaaccatcaacgttctcgacacagaagcaaaagatgcactcgagctcaggccagcagagtgggagaaatgtctgaacttgccccttgacgtgcaggaaggagattttcagaccgaagtttag

SEQ ID NO: 120106 - DNA, 1461 bp, Artificial Sequence
  derived and/or modified sequence
atggtgatcggcatcctggtgttcaacaagctggtgagccgggacggcattttagacaagaaacttaagcatagagccgggcagatgagcgaaccacactcaggattaaccttgaagtgtgcgaagtgcggcgtggtgagtactacggccctgagcgcaacaaccgcctcgaatgcaatggccagcctgtggtcatcttgtgtcgttctgccgctgctagctctgacttggatgagcgccgtcttggccatgaccgataagcgatctatactgtttcagatcttgtttgcggtctttgactccctgcaaggcttcgtcatcgtgatggtgcattgtatcctaaggagagaagttcaagacgcatttcggtgtcgcctgaggaactgccaagatcccattaacgcggactcttccagttcattccctaacggacatgcacaaattatgaccgatttcgaaaaggacgtggatattgcgtgtcgtagcgtcctgcacaaggatattggtccctgcagggccgctactattaccggcaccttgagccgtatctcactgaatgacgatgaggaagaaaaaggcacaaacccagaagggctatcgtattccacactgcctggtaacgtcataagtaaagtgattatccagcagccaacaggcctccatatgcccatgagcatgaatgaattgagcaatccctgcttaaaaaaggaaaatagtgagctacggagaaccgtgtatctttgcacagatgataacctgcgcggcgcagatatggacatcgtgcaccctcaggagcgcatgatggaatccgattacattgtcatgccccggtctagcgttaacaaccagccgtccatgaaggaggagagcaagatgaatatagggatggaaacccttccacacgagagactcctgcattataaagtgaaccccgagttcaatatgaaccccccagtaatggaccaattcaacatgaatctcgagcagcaccttgccccacaagagcacatgcagaatcttcctttcgaaccccgcaccgccgtgaaaaactttatggccagtgaacttgatgataacgctggcttgagccggtccgaaaccggtagcacgatttcaatgagcagcctcgagcgtagaaaatctaggtattctgatctggatttcgaaaaggtgatgcacacccggaaaaggcacatggaactctttcaggagctcaaccagaagttccagaccctcgacagattcagggacattcccaatactagtagcatggagaatccagctcccaataagaatccttgggataccttcaagaatccctcagagtacccacattatacaacgataaatgtgctcgacacagaggcaaaggacgctttagaactgcgaccagctgagtgggaaaaatgcctgaacctgccactagacgtccaggagggtgactttcagacagaggtttag

SEQ ID NO: 120107 - DNA, 2187 bp, Artificial Sequence
  derived and/or modified sequence
atgctgctccctcaggggaaagaggctgtagaaggcaaaaagtgccagggcaggcagcgcagagcgggactgtctgaggtatggagtaggaaactgagaaatgagtccctgggcacctggtcaacacagggctgcaagacggtgctgactgatgccagccatacgaagtgtctgtgtgatagactgtccaccttcgctatcctcgctcagcaacctagagaaataataatggagtcctctggcactccaagcgtcacattgatcgttggcagtggtttatcatgcctagccttgatcaccctggccgtggtttacgccgcactatggcggtacatccggtccgaacggtcaatcatcttaatcaatttctgtctgtccattatttcctctaacatcttaattcttgttggccaaacccagactcacaataaaagcatctgcacaaccactacagccttcctccattttttctttctggcaagtttctgctgggtgctgaccgaagcctggcagagctacatggccgtcacagggaagatccgaacgagactgattcgcaagcggtttctgtgtcttggatgggggcttccggctctggtcgtggccacatctgttggctttaccagaacgaaagggtacggcaccgaccactactgctggctgtcactggagggaggtctgctttacgcattcgttggacctgccgcagcagtggtcctcgttaacatggtcatcgggatcctcgttttcaacaagctcgtgagtagagacggtatcctggacaaaaagctgaaacaccgggctggccagatgagtgagccgcacagcgggttaaccctcaaatgcgcaaaatgtggagtggtgagtacgactgcactcagtgcaactaccgcttcaaacgcgatggcatccctttggtcctcttgtgtggtcctgcctctgcttgctctgacttggatgagcgctgttttggctatgactgacaaaaggtctatcctctttcagatcctctttgccgtcttcgatagcctgcaaggattcgtgatcgtgatggttcattgcattctgagaagggaagtacaggacgccttcaggtgtagactgaggaactgccaggacccaattaacgccgacagctccagtagctttccaaatgggcatgcacaaatcatgacagattttgaaaaggacgtcgatatagcgtgtcgcagcgtcttacataaagacataggcccatgccgcgctgccactattaccggtacactcagtcgtattagcttgaatgatgacgaggaagagaaaggcacaaatcccgagggcctgagttacagtacactccctgggaacgtcatcagcaaggtgattatacaacagcctacaggtctgcacatgcctatgagcatgaacgagctgagtaacccatgtctaaaaaaagaaaactctgagctacgcagaacagtgtatctatgtacggacgacaacctgaggggcgctgatatggatattgtccaccctcaagagcgtatgatggagagtgattatattgtgatgccacgcagtagcgtgaacaaccagccttccatgaaagaggaatcaaagatgaatatcgggatggagacactacctcacgaaaggctacttcactataaggtgaaccccgagttcaacatgaacccacctgtgatggaccagttcaacatgaacctagaacagcatctcgcaccccaggagcatatgcagaacttgccgttcgagcccaggacagccgtgaagaacttcatggctagcgagctggatgataacgctggtctctcacgctcagaaaccggctcaacaatcagtatgagctctctagagcgtcgcaagagtaggtattcagatctggattttgaaaaagtgatgcacactcgtaagcgccacatggagctcttccaggagctgaatcagaagtttcagactctggaccggtttcgagatatcccgaatactagctcaatggaaaatcctgcccctaataaaaatccatgggatacctttaaaaatccctccgagtacccccattataccaccataaacgtgcttgacaccgaggctaaagatgcccttgagttacggccagccgagtgggaaaagtgcctaaatctcccactggatgtacaggagggcgactttcagaccgaggtttag

SEQ ID NO: 120108 - DNA, 1461 bp, Artificial Sequence
  derived and/or modified sequence
atggtgattggcatcctcgtattcaataagcttgtctcaagagacgggatactggacaagaaattaaaacacagagctggccagatgagtgagccgcattcaggattgactctcaagtgtgccaagtgtggggtagtgagcaccactgcactgagtgcgaccacagccagcaatgcaatggcctccctttggtcctcatgtgttgtgctgcccctgttggcgttgacatggatgtccgcagtacttgcaatgacagataaaaggagcatacttttccagatcttatttgcggttttcgactctctgcaaggattcgtgattgtgatggtgcactgtattcttcgtcgggaggtgcaggatgcattcagatgccgattgcgtaattgtcaggatcctatcaacgccgactccagtagctcctttcccaacgggcatgcacagatcatgactgacttcgaaaaggatgtggatatcgcgtgccgctccgtgctgcataaagatattggaccttgccgagctgccaccatcaccggtacgctgtctcgaatatcactgaatgacgacgaggaggaaaagggaacaaaccctgaagggctgtcctacagtacccttcctggaaatgtcatctccaaggtaataatacagcagcctaccgggctgcacatgccgatgtcaatgaatgaactatctaacccatgtctaaagaaggaaaactccgagctgaggaggacggtgtatctgtgtaccgatgataacctcaggggggcagacatggatatcgtccatccacaagagaggatgatggagtctgattacattgtcatgccgaggtcatcagtgaacaatcagcccagtatgaaagaggaaagtaaaatgaacattgggatggaaactcttccccatgagcggttgctgcactataaggttaaccccgagttcaacatgaatccaccagtgatggatcaatttaacatgaatctggagcagcaccttgccccacaagaacatatgcagaatctcccgtttgagcccaggacggcagtcaagaattttatggcctcagaacttgatgacaatgctgggctgtcgaggtctgagacgggatccacgatttcaatgtcaagcctagagagacgtaagagccggtactcagatcttgatttcgagaaggttatgcataccaggaagcggcacatggagttgttccaggaactgaaccagaagttccagacactagatcgcttccgcgatatccctaacaccagttctatggagaatccggcaccgaataagaacccatgggacaccttcaagaatcccagcgaatatcctcattatactaccattaacgtactcgacacagaagctaaggacgccctggagctgcgtcctgctgaatgggagaagtgtcttaatttgcctctagatgttcaggagggcgatttccagactgaggtgtag

SEQ ID NO: 120109 - DNA, 2927 bp, Artificial Sequence
  derived and/or modified sequence
atatgctttagcattttaaatggctacaccaaagagaaaattgaaccaggctctcttccctactcctactggactttggggtggggttattcctctgaatgttctagcggacttggggttagcttaatgcttctgccccagggcaaagaagcagttgagggaaagaaatgtcaaggacgtcagaggcgagctggactgagtgaagtgtggagtaggaagcttaggaacgagtctttgggaacgtggtccacccagggatgtaaaactgtgcttaccgatgcatcccatacgaaatgcttatgtgatcgtctctctaccttcgccattttggctcagcaacctagagaaataatcatggaatcctctggcacaccttcagttaccctaatagtaggcagtggtctttcttgcttggccttgattaccctagcagttgtctatgcagcattatggaggtacatacgctctgagagatccataatactaattaacttctgcctgtctatcatctcatccaatatcctcatactggttggacagactcagacacataataagagtatctgcacaaccaccactgcatttttgcactttttcttcctggcttcattctgttgggttttgactgaggcgtggcaatcatatatggctgtaactggaaaaattaggacacggcttataagaaaacgctttttgtgccttggatggggtttaccagcattagtagtggccacatcagtaggcttcaccagaacaaaaggatatggcactgatcactactgctggctctctcttgaaggaggactactctatgcttttgtgggacctgcagccgctgttgtcctggtcaacatggtgattggcattttggtatttaataaacttgtttccagagatggaatcctagataaaaagctcaaacacagagccggtcagatgagtgagcctcatagcggtttgacgctcaaatgtgccaagtgtggagtagtttcaacaacagctttgtcagccaccaccgccagtaacgccatggcgtctctttggagctcctgtgtggtgttgccccttctggctttgacgtggatgtctgcggttctggccatgacagataaacgctccatattgtttcaaatactttttgctgtgtttgattcattgcaaggctttgttatagtcatggtccactgcattcttcggagagaggttcaggatgcatttagatgccgattgagaaactgtcaggatcccatcaatgcagattcttcgagttcgtttcctaatgggcatgctcaaatcatgacagactttgaaaaggatgtagacattgcctgtcgatcagttcttcataaggatattggtccttgccgagcagccacaataacaggaacactttctaggatttctctaaatgatgatgaagaagaaaagggaacaaaccctgaagggctaagctattcaacattgcctggaaatgtcatttccaaagtcatcatccagcaacccacaggtttgcacatgcccatgagtatgaatgagcttagcaatccatgtttgaaaaaagaaaatagtgaattgcggagaactgtgtacttatgtacggatgataatttgagaggggctgacatggacatagtccatcctcaagaaagaatgatggaaagtgactatattgtgatgcccagaagttctgtaaataaccagccttcaatgaaagaagaaagcaaaatgaatattggcatggaaaccttgccgcatgaaaggctattgcactacaaagtaaaccctgaattcaatatgaatccccctgtaatggaccagttcaatatgaacttagagcaacatctcgcaccccaggaacatatgcagaatttgccctttgaacctcgcacagctgtgaagaatttcatggcctctgagttggatgataatgcaggactatcaagaagtgaaactggatcaacgatatcaatgagttctttagagagaagaaaatcacgatattcagaccttgactttgagaaggtcatgcatacaaggaagaggcatatggaactatttcaagaactaaatcagaaatttcaaactttggacagatttcgggatataccaaatacaagcagtatggaaaaccccgcaccaaacaagaatccatgggacactttcaaaaaccccagtgaatacccgcattacaccacaatcaatgtcttagacacagaggcaaaggatgctttggaactgaggccagcagagtgggagaagtgtctgaatttgcctctggatgtgcaagagggtgactttcaaacagaagtttaaaaaaatcaaaatggactaaggtagagacaaaactttattgcactgacacttaagacttgggaagcctgacatttctatctggacagtgtgactatcttatgtcaggaccttcatgtgccaaacgtcagtggtgttttcatatggtaacttctcactagtcaggctagtggagagatgaccaggtgtacagttctgaccatcctgtgttgtaagtacccgtggaatggatttgtaaggtaatctttatagataaacctcaagcaacgattcatgttgtaaccgcttcatatggtttagttttcaaaaaacttcaccatgaagcacaatgtatatatttatgcagtttttaaagtttataacagtctgtttggccattactacactttttactttataatataaaagcaaagtttttgtcattaaatgaatgtttgttgagctacattcttcattgctttaaatgcaataaagtaataatctcacttttatatgaataatatatttcacatctttattattgcagttttctctagaaagctctgagaagctttctctgctgcagctgtgtataaaatatttaaaatgttgtatggtgtaaataaacttttgtctac

SEQ ID NO: 120110 - DNA, 1882 bp, Artificial Sequence
  derived and/or modified sequence
gtacatagatgaataagtattctcttgattaagtggtatcttgtcaggaaactatgaagagtgactcttcctaagtccatacttaataggtcaacatggtgattggcattttggtatttaataaacttgtttccagagatggaatcctagataaaaagctcaaacacagagccggtcagatgagtgagcctcatagcggtttgacgctcaaatgtgccaagtgtggagtagtttcaacaacagctttgtcagccaccaccgccagtaacgccatggcgtctctttggagctcctgtgtggtgttgccccttctggctttgacgtggatgtctgcggttctggccatgacagataaacgctccatattgtttcaaatactttttgctgtgtttgattcattgcaaggctttgttatagtcatggtccactgcattcttcggagagaggttcaggatgcatttagatgccgattgagaaactgtcaggatcccatcaatgcagattcttcgagttcgtttcctaatgggcatgctcaaatcatgacagactttgaaaaggatgtagacattgcctgtcgatcagttcttcataaggatattggtccttgccgagcagccacaataacaggaacactttctaggatttctctaaatgatgatgaagaagaaaagggaacaaaccctgaagggctaagctattcaacattgcctggaaatgtcatttccaaagtcatcatccagcaacccacaggtttgcacatgcccatgagtatgaatgagcttagcaatccatgtttgaaaaaagaaaatagtgaattgcggagaactgtgtacttatgtacggatgataatttgagaggggctgacatggacatagtccatcctcaagaaagaatgatggaaagtgactatattgtgatgcccagaagttctgtaaataaccagccttcaatgaaagaagaaagcaaaatgaatattggcatggaaaccttgccgcatgaaaggctattgcactacaaagtaaaccctgaattcaatatgaatccccctgtaatggaccagttcaatatgaacttagagcaacatctcgcaccccaggaacatatgcagaatttgccctttgaacctcgcacagctgtgaagaatttcatggcctctgagttggatgataatgcaggactatcaagaagtgaaactggatcaacgatatcaatgagttctttagagagaagaaaatcacgatattcagaccttgactttgagaaggtcatgcatacaaggaagaggcatatggaactatttcaagaactaaatcagaaatttcaaactttggacagatttcgggatataccaaatacaagcagtatggaaaaccccgcaccaaacaagaatccatgggacactttcaaaaaccccagtgaatacccgcattacaccacaatcaatgtcttagacacagaggcaaaggatgctttggaactgaggccagcagagtgggagaagtgtctgaatttgcctctggatgtgcaagagggtgactttcaaacagaagtttaaaaaaatcaaaatggactaaggtagagacaaaactttattgcactgacacttaagacttgggaagcctgacatttctatctggacagtgtgactatcttatgtcaggaccttcatgtgccaaacgtcagtggtgttttcatatggtaacttctcactagtcaggctagtggagagatgaccaggtgtacagttctgaccatcctgtgttgtaagtacccgtggaatggatttgtaaggtaatctttatagataaacctcaagcaacgattcatgttgtaaccgcttcatatggtttagttttcaaaaaacttcaccatgaagcacaa

SEQ ID NO: 120111 - DNA, 2187 bp, Artificial Sequence
  derived and/or modified sequence
atgctgctgccccagggcaaggaggccgtggagggcaagaagtgccagggcagacagagaagagccggcctgagcgaggtgtggagcagaaagctgagaaacgagagcctgggcacctggagcacccagggctgcaagaccgtgctgaccgacgccagccacaccaagtgcctgtgcgacagactgagcaccttcgccatcctggcccagcagcccagagagatcatcatggagagcagcggcacccccagcgtgaccctgatcgtgggcagcggcctgagctgcctggccctgatcaccctggccgtggtgtacgccgccctgtggagatacatcagaagcgagagaagcatcatcctgatcaacttctgcctgagcatcatcagcagcaacatcctgatcctggtgggccagacccagacccacaacaagagcatctgcaccaccaccaccgccttcctgcacttcttcttcctggccagcttctgctgggtgctgaccgaggcctggcagagctacatggccgtgaccggcaagatcagaaccagactgatcagaaagagattcctgtgcctgggctggggcctgcccgccctggtggtggccaccagcgtgggcttcaccagaaccaagggctacggcaccgaccactactgctggctgagcctggagggcggcctgctgtacgccttcgtgggccccgccgccgccgtggtgctggtgaacatggtgatcggcatcctggtgttcaacaagctggtgagcagagacggcatcctggacaagaagctgaagcacagagccggccagatgagcgagccccacagcggcctgaccctgaagtgcgccaagtgcggcgtggtgagcaccaccgccctgagcgccaccaccgccagcaacgccatggccagcctgtggagcagctgcgtggtgctgcccctgctggccctgacctggatgagcgccgtgctggccatgaccgacaagagaagcatcctgttccagatcctgttcgccgtgttcgacagcctgcagggcttcgtgatcgtgatggtgcactgcatcctgagaagagaggtgcaggacgccttcagatgcagactgagaaactgccaggaccccatcaacgccgacagcagcagcagcttccccaacggccacgcccagatcatgaccgacttcgagaaggacgtggacatcgcctgcagaagcgtgctgcacaaggacatcggcccctgcagagccgccaccatcaccggcaccctgagcagaatcagcctgaacgacgacgaggaggagaagggcaccaaccccgagggcctgagctacagcaccctgcccggcaacgtgatcagcaaggtgatcatccagcagcccaccggcctgcacatgcccatgagcatgaacgagctgagcaacccctgcctgaagaaggagaacagcgagctgagaagaaccgtgtacctgtgcaccgacgacaacctgagaggcgccgacatggacatcgtgcacccccaggagagaatgatggagagcgactacatcgtgatgcccagaagcagcgtgaacaaccagcccagcatgaaggaggagagcaagatgaacatcggcatggagaccctgccccacgagagactgctgcactacaaggtgaaccccgagttcaacatgaacccccccgtgatggaccagttcaacatgaacctggagcagcacctggccccccaggagcacatgcagaacctgcccttcgagcccagaaccgccgtgaagaacttcatggccagcgagctggacgacaacgccggcctgagcagaagcgagaccggcagcaccatcagcatgagcagcctggagagaagaaagagcagatacagcgacctggacttcgagaaggtgatgcacaccagaaagagacacatggagctgttccaggagctgaaccagaagttccagaccctggacagattcagagacatccccaacaccagcagcatggagaaccccgcccccaacaagaacccctgggacaccttcaagaaccccagcgagtacccccactacaccaccatcaacgtgctggacaccgaggccaaggacgccctggagctgagacccgccgagtgggagaagtgcctgaacctgcccctggacgtgcaggagggcgacttccagaccgaggtgtag

SEQ ID NO: 120112 - DNA, 1461 bp, Artificial Sequence
  derived and/or modified sequence
atggtgatcggcatcctggtgttcaacaagctggtgagcagagacggcatcctggacaagaagctgaagcacagagccggccagatgagcgagccccacagcggcctgaccctgaagtgcgccaagtgcggcgtggtgagcaccaccgccctgagcgccaccaccgccagcaacgccatggccagcctgtggagcagctgcgtggtgctgcccctgctggccctgacctggatgagcgccgtgctggccatgaccgacaagagaagcatcctgttccagatcctgttcgccgtgttcgacagcctgcagggcttcgtgatcgtgatggtgcactgcatcctgagaagagaggtgcaggacgccttcagatgcagactgagaaactgccaggaccccatcaacgccgacagcagcagcagcttccccaacggccacgcccagatcatgaccgacttcgagaaggacgtggacatcgcctgcagaagcgtgctgcacaaggacatcggcccctgcagagccgccaccatcaccggcaccctgagcagaatcagcctgaacgacgacgaggaggagaagggcaccaaccccgagggcctgagctacagcaccctgcccggcaacgtgatcagcaaggtgatcatccagcagcccaccggcctgcacatgcccatgagcatgaacgagctgagcaacccctgcctgaagaaggagaacagcgagctgagaagaaccgtgtacctgtgcaccgacgacaacctgagaggcgccgacatggacatcgtgcacccccaggagagaatgatggagagcgactacatcgtgatgcccagaagcagcgtgaacaaccagcccagcatgaaggaggagagcaagatgaacatcggcatggagaccctgccccacgagagactgctgcactacaaggtgaaccccgagttcaacatgaacccccccgtgatggaccagttcaacatgaacctggagcagcacctggccccccaggagcacatgcagaacctgcccttcgagcccagaaccgccgtgaagaacttcatggccagcgagctggacgacaacgccggcctgagcagaagcgagaccggcagcaccatcagcatgagcagcctggagagaagaaagagcagatacagcgacctggacttcgagaaggtgatgcacaccagaaagagacacatggagctgttccaggagctgaaccagaagttccagaccctggacagattcagagacatccccaacaccagcagcatggagaaccccgcccccaacaagaacccctgggacaccttcaagaaccccagcgagtacccccactacaccaccatcaacgtgctggacaccgaggccaaggacgccctggagctgagacccgccgagtgggagaagtgcctgaacctgcccctggacgtgcaggagggcgacttccagaccgaggtgtag

SEQ ID NO: 120113 - protein, 202 aa, Artificial Sequence
  derived and/or modified sequence
MSGRSVRAETRSRAKDDIKKVMAAIEKVRKWEKKWVTVGDTSLRIFKWVPVTDSKEKEKSKSNSSAAREPNGFPSDASANSSLLLEFQDENSNQSSVSDVYQLKVDSSTNSSPSPQQSESLSPAHTSDFRTDDSQPPTLGQEILEEPSLPSSEVADEPPTLTKEEPVPLETQVVEEEEDSGAPPLKRFCVDQPTVPQTASES

SEQ ID NO: 120114 - DNA, 609 bp, Artificial Sequence
  derived and/or modified sequence
atgagcggcagaagcgtgagagccgagaccagaagcagagccaaggacgacatcaagaaggtgatggccgccatcgagaaggtgagaaagtgggagaagaagtgggtgaccgtgggcgacaccagcctgagaatcttcaagtgggtgcccgtgaccgacagcaaggagaaggagaagagcaagagcaacagcagcgccgccagagagcccaacggcttccccagcgacgccagcgccaacagcagcctgctgctggagttccaggacgagaacagcaaccagagcagcgtgagcgacgtgtaccagctgaaggtggacagcagcaccaacagcagccccagcccccagcagagcgagagcctgagccccgcccacaccagcgacttcagaaccgacgacagccagccccccaccctgggccaggagatcctggaggagcccagcctgcccagcagcgaggtggccgacgagccccccaccctgaccaaggaggagcccgtgcccctggagacccaggtggtggaggaggaggaggacagcggcgccccccccctgaagagattctgcgtggaccagcccaccgtgccccagaccgccagcgagagctag

SEQ ID NO: 120115 - DNA, 609 bp, Artificial Sequence
  derived and/or modified sequence
atgagcggacgttctgtacgggccgagacacgttcaagggccaaggacgacattaagaaagtgatggcggcaattgaaaaagtcagaaaatgggaaaagaagtgggttactgtgggcgatacaagcctcagaattttcaaatgggtgccagttaccgatagtaaagagaaggagaagtccaaatccaattccagcgctgcccgagaacccaatgggttccccagtgatgcctccgctaattcaagcttgctgctggaattccaggatgaaaacagtaaccaatcatcagtatccgacgtataccaactcaaagtagactctagcactaactcgtccccgtcaccgcaacagagcgaatctctgagcccagcccacacaagtgattttagaacagatgacagtcaaccgcccactcttgggcaggaaattctggaggagccctctctgcccagtagcgaagtagccgacgagccccccaccctgacaaaagaggaacctgtgccgctcgagacccaagtagtcgaggaggaggaggactccggggcaccgcccctcaagcgcttttgcgttgaccagccaactgtgccacagacagcctctgagagttag

SEQ ID NO: 120116 - DNA, 609 bp, Artificial Sequence
  derived and/or modified sequence
atgagcggccgctctgtgcgggcagagaccaggagccgggccaaggatgacatcaagaaggtgatggccgccatcgagaaggtgaggaagtgggagaagaagtgggtgacagtgggggacaccagcctgcgcatcttcaagtgggtgcctgtgacagacagcaaggagaaggagaagagcaagagcaacagcagcgctgcccgggagcccaacggcttccccagtgatgccagcgccaacagcagcctgctgctggagttccaggatgagaacagcaaccagagctctgtgtctgatgtgtaccagctgaaggtggacagcagcaccaacagcagccccagcccccagcagagcgagagcctgagccctgcccacaccagtgacttcagaacagatgacagccagccccccaccctgggccaggagatcctggaggagcccagcctgcccagcagcgaggtggctgatgagccccccaccctgaccaaggaggagcctgtgcccctggagacccaggtggtggaggaggaggaggacagcggggccccacccctgaagcgcttctgtgtggaccagcccaccgtgccccagacagccagcgagagctag

SEQ ID NO: 120117 - DNA, 609 bp, Artificial Sequence
  derived and/or modified sequence
atgagcggccggagcgtgcgggccgagacccggagccgggccaaggatgatatcaaaaaagtcatggccgcgattgaaaaggttcggaaatgggagaaaaaatgggtcacagttggggatacgagcctccggatctttaaatgggtgcctgtcacagatagtaaagagaaggaaaagagcaagagtaattccagcgctgctagagagcccaatggtttcccgagcgacgcaagcgccaactctagcttactcctagaattccaagacgagaattccaatcaatctagcgtgtctgatgtttaccagctaaaggtggactcaagtaccaatagcagtccaagtccgcagcagtctgagtctctctcgccagcgcacacctctgatttcaggaccgatgattctcagcctcccacactaggtcaagagatcctcgaagagccttcgctacctagtagcgaagtcgccgacgagcctccgacactgaccaaggaagagcccgtgccacttgagactcaggtggtggaggaagaggaagacagcggcgctccacccctcaagcgtttttgcgttgaccaaccaacagtaccccagacagcctcagagtcctag

SEQ ID NO: 120118 - DNA, 609 bp, Artificial Sequence
  derived and/or modified sequence
atgagtggtaggtccgtgcgggctgagacccggagcagggccaaggacgatattaaaaaggtgatggcagccatcgagaaagtgcggaaatgggaaaaaaaatgggtcactgtgggcgatactagcttaaggattttcaagtgggtccctgtgacagactcgaaggagaaggagaaaagcaaaagcaactcatctgcagctcgtgagcctaatggctttccctcagacgcaagtgctaattctagcttacttctggaatttcaggacgaaaacagcaaccaatcttccgtttccgatgtctatcagctcaaggtagactccagcacgaactcctccccctccccccaacagagcgagtcactatctcccgctcacacctcggactttaggacggacgactctcagccaccaacactcggccaagaaatcctcgaggagccatcactgccttcgagtgaggttgcggacgaaccaccaacattgaccaaagaggagcctgtccccctggaaacgcaagtggtggaagaagaggaggacagcggtgctccccctcttaagaggttctgtgtggatcagccgacagtgcctcaaaccgcgtctgaaagttag

SEQ ID NO: 120119 - DNA, 1975 bp, Artificial Sequence
  derived and/or modified sequence
ggaggacagagatggcgcaggagtgcggttccacagggtcaggttcctaacacgctggccagagcagggagccgacctccaaactctcagggaagagaaccaggttgcccaccggcggcacctcgcacctcgccctgaccacaagcacgtgcgcccaacccgcctcgcaccccggcccgggtagggggctcaggggactcccggggcactcaggagggacgccccgggcggggcgcgcaggcgcgctgaggccgtgagccccaaggggcgggcgggtgcgcgcgctttctcgcgcacgcgcgcacggagggggcgacggccgctgtgacgctgcggcggcggcgggcgggcggcggcgcgtgaggcgcgcgatccccggtgtcttgggagcagtgccccggcccccgccgctcccgccgccgccatgtcgggccggtcggtccgggcggagacccgcagccgggccaaggacgacatcaagaaggtgatggcggccatcgagaaagtgcggaaatgggagaagaagtgggtgactgtgggtgacacgtccctgaggatatttaagtgggttcctgtgacagacagcaaggagaaagaaaagtcaaaatcgaacagttcagcagcccgagaacctaatggctttccttctgatgcctcagccaattcctctctccttcttgaattccaggacgaaaacagcaaccagagttccgtgtctgacgtctatcagcttaaggtggacagcagcaccaactcaagccccagcccccagcagagtgagtccctgagcccagcacacacctccgacttccgcacggatgactcccagcccccaacgctgggccaggagatcctggaggagccctccctgccctcctcggaagttgctgatgaacctcctaccctcaccaaggaagaaccagttccactagagacacaggtcgttgaggaagaggaagactcaggtgccccgcccctgaagcgcttctgtgtggaccaacccacagtgccgcagacggcgtcagaaagctagcaccatcccggccctccgcctcctggccctgcctctatttattgcattctggttctggccgcgccgcgttgctggggtaagggcaagcactggggtcaagagcctgcacacatgagccttccgggctggaaggctggcgtaggacttggggctgtagcatcatcttcctgaccctggcacctgtgtctacttgctcccgagaagaggagcgctcatgtcttttttgcaccccaagttggctggagcatcggccaccccaagattcatctgtgacctccaggcagcagtctctgctccagaatctctggacggagctgctggcagcttctgcgagaagagagagatgtggaaggcaccttctagaagagagcgtgcctcaggttacttgaacttgaacggagactgtagactcccggactttcccctaggactgggggccctgtaggctgctgttggaggactgggtagagacattggagggaagggaagggcttttctccacacaagggcagagagtccgtctagatttcttgctgtcctgccagctctgcccatgcctgaggtggtcctacctctcacgggcaccctagctgctgacagccctttgtggccgccgtccccatcccctgccctcagcacacacatctgcacacacgcagctttgttctcacctctacctgtcattccagcatccctgcctcttgtcacaaactgccccagcaagaatttgaggttctgacaacagtacccatcccccacagtaccccttcagctcagtttctagaaagctcccttttctttgaaatctgcatgttgaattgaactttgtgattttattttttgtttcaaaaaagtttaagaaaatggaaatgggcaacagtgagtgaagacatattttagcactgaatagaatatttttaaaattaaactatttgaaatatg

SEQ ID NO: 120120 - protein, 348 aa, Artificial Sequence
  derived and/or modified sequence
MRKMSEEEFYLFKNISSVGPWDGPQYHIAPVWAFYLQAAFMGTVFLIGFPLNAMVLVATLRYKKLRQPLNYILVNVSFGGFLLCIFSVFPVFVASCNGYFVFGRHVCALEGFLGTVAGLVTGWSLAFLAFERYIVICKPFGNFRFSSKHALTVVLATWTIGIGVSIPPFFGWSRFIPEGLQCSCGPDWYTVGTKYRSESYTWFLFIFCFIVPLSLICFSYTQLLRALKAVAAQQQESATTQKAEREVSRMVVVMVGSFCVCYVPYAAFAMYMVNNRNHGLDLRLVTIPSFFSKSACIYNPIIYCFMNKQFQACIMKMVCGKAMTDESDTCSSQKTEVSTVSSTQVGPN

SEQ ID NO: 120121 - DNA, 1047 bp, Artificial Sequence
  derived and/or modified sequence
atgagaaagatgagcgaggaagaattctatctgttcaaaaacatatcctctgtgggtccttgggacggcccgcaataccacatcgctcctgtttgggccttctatctccaggccgccttcatggggacggttttcctgatcggattcccactgaatgccatggttctggtggcaacacttcggtataagaagcttcggcaacccttaaattacattcttgtgaatgtctcattcggcggctttcttctgtgtatattctctgtcttccctgtattcgtggcctcttgtaatggctacttcgtgtttggcagacatgtctgcgctctggagggttttttagggactgtagctgggctggttaccggttggtccctggctttcctggccttcgagagatatatcgtgatctgcaaaccctttggcaatttccggttctcctctaaacatgccctaacagtcgttttggctacgtggacaatcggcatcggggtgtccatacctcccttttttggttggagccggtttatccccgagggcctacagtgtagctgtggaccggattggtataccgtcggtacaaagtacaggagcgagtcctatacctggtttttgtttattttttgttttatcgtcccactgagcttgatctgcttttcatacactcaactgctccgtgcactcaaggcagtggccgcccaacagcaggaaagcgcgacaacgcaaaaggcggagcgcgaggtttcacgcatggtggtggtgatggttggcagcttctgtgtttgctacgttccctacgctgcctttgctatgtacatggtgaacaatagaaaccatgggctggacctgcgactggtgacaatcccgtcctttttcagcaagagcgcctgtatttacaatccaattatctactgtttcatgaacaagcagttccaggcatgtattatgaaaatggtctgcggcaaagccatgacggacgagagcgatacctgcagctctcagaaaaccgaggttagcactgtttcaagtacccaagtggggcccaattag

SEQ ID NO: 120122 - DNA, 1047 bp, Artificial Sequence
  derived and/or modified sequence
atgaggaagatgtctgaggaggagttctacctgttcaagaacatcagctctgtgggcccctgggatggcccccagtaccacatcgcccctgtgtgggccttctacctgcaggccgccttcatgggcaccgtcttcctgattggcttccccctgaatgccatggtgctggtggccaccctgcgctacaagaagctgcggcagcccctgaactacatcctggtgaatgtgtcctttggaggcttcctgctgtgcatcttctctgtgtttcctgtgtttgtggccagctgcaatggctactttgtgtttggaagacatgtgtgtgccctggagggcttcctgggcaccgtggccggcctggtgacaggctggagcctggccttcctggcctttgagcgctacatcgtcatctgcaagcccttcggcaacttccgcttcagcagcaagcacgccctgactgtggtgctggccacctggaccatcggcatcggcgtgtccatcccccccttcttcggctggagccgcttcatccctgagggcctgcagtgcagctgtggccctgactggtacacagtgggcaccaagtacagaagtgagagctacacctggttcctgttcatcttctgcttcatcgtgcccctgagcctcatctgcttctcctacacccagctgctgcgggccctgaaggctgtggccgcccagcagcaggagagcgccaccacccagaaggccgagcgggaggtgtccaggatggtggtggtgatggtgggcagcttctgtgtgtgctacgtgccctatgctgcctttgccatgtacatggtgaacaacagaaaccacggcctggacctgcggctggtgaccatccccagcttcttcagcaagagcgcctgcatctacaaccccatcatctactgcttcatgaacaagcagttccaggcctgcatcatgaagatggtgtgtgggaaggccatgacagatgaaagtgacacctgcagcagccagaagacagaggtgtccacagtgagcagcacccaggtgggccccaactag

SEQ ID NO: 120123 - DNA, 1047 bp, Artificial Sequence
  derived and/or modified sequence
atgcggaagatgagcgaggaggagttctacctgttcaagaacatctcttctgttgggccgtgggacggaccccaatatcatatcgcccctgtctgggccttctacctgcaagccgcttttatgggtaccgtcttcctgattgggtttcctctcaatgccatggtcttggttgccactttacggtataagaaactgaggcagcctctgaattacatactggttaacgtttcatttggaggattcttactgtgcatattttccgtctttccggtgttcgtggcatcgtgcaatggatatttcgtgttcggccggcatgtgtgcgccctcgaagggtttctaggcacagttgcgggtttggtaactggctggtcccttgcctttttggcgttcgagagatacatagtgatatgcaaaccttttggtaactttcgcttttcttctaaacacgcgctgacagtggttctggcgacgtggacaatcggcatcggcgtgagcattcctccgtttttcggctggagcaggtttatcccagagggacttcagtgcagttgcggccctgactggtacaccgttggaaccaaataccggtctgaatcatatacctggttcctgttcattttttgcttcattgtgcctttgtcactaatctgcttctcatacactcaacttttacgagccctgaaggccgtcgctgcccagcaacaggagagcgctacaacacaaaaagcggagcgagaggtctcccgaatggtggtggtgatggtcggttcgttttgcgtgtgttatgtcccttacgcagccttcgccatgtacatggtgaataaccgtaatcacgggctagacttgagattggtgactattcccagctttttctcaaagagtgcttgcatctataaccctatcatttactgctttatgaacaaacagttccaggcatgcataatgaagatggtgtgcggcaaggctatgaccgatgagtctgacacgtgttcgtcgcagaagaccgaggtgagcaccgtgtcctctacacaagtgggacctaattag

SEQ ID NO: 120124 - DNA, 1096 bp, Artificial Sequence
  derived and/or modified sequence
atgagaaaaatgtcggaggaagagttttatctgttcaaaaatatctcttcagtggggccgtgggatgggcctcagtaccacattgcccctgtctgggccttctacctccaggcagctttcatgggcactgtcttccttatagggttcccactcaatgccatggtgctggtggccacactgcgctacaaaaagttgcggcagcccctcaactacattctggtcaacgtgtccttcggaggcttcctcctctgcatcttctctgtcttccctgtcttcgtcgccagctgtaacggatacttcgtcttcggtcgccatgtttgtgctttggagggcttcctgggcactgtagcaggtctggttacaggatggtcactggccttcctggcctttgagcgctacattgtcatctgtaagcccttcggcaacttccgcttcagctccaagcatgcactgacggtggtcctggctacctggaccattggtattggcgtctccatcccacccttctttggctggagccggttcatccctgagggcctgcagtgttcctgtggccctgactggtacaccgtgggcaccaaataccgcagcgagtcctatacgtggttcctcttcatcttctgcttcattgtgcctctctccctcatctgcttctcctacactcagctgctgagggccctgaaagctgttgcagctcagcagcaggagtcagctacgacccagaaggctgaacgggaggtgagccgcatggtggttgtgatggtaggatccttctgtgtctgctacgtgccctacgcggccttcgccatgtacatggtcaacaaccgtaaccatgggctggacttacggcttgtcaccattccttcattcttctccaagagtgcttgcatctacaatcccatcatctactgcttcatgaataagcagttccaagcttgcatcatgaagatggtgtgtgggaaggccatgacagatgaatccgacacatgcagctcccagaaaacagaagtttctactgtctcgtctacccaagttggccccaactgaggacccaatattggcctgtttgcaacagctagaattaaattttactttt

SEQ ID NO: 120125 - DNA, 1047 bp, Artificial Sequence
  derived and/or modified sequence
atgcggaagatgagtgaagaggaattttatttgttcaaaaacatcagttccgtgggcccttgggatgggccacagtaccacatagcacccgtctgggcgttttacctacaggctgcatttatgggaacagtgtttctgatcggcttccctctgaatgctatggttctggttgcaacacttaggtacaaaaagctgcgccagccccttaactatatactggttaacgtgtccttcgggggttttttgctctgtattttttccgtttttcctgtctttgtggcatcctgcaatggctacttcgtgttcggacgccacgtgtgcgccctggaaggtttcctggggaccgtagccggactagtgacgggctggagtttagccttcctggctttcgagcggtacattgtgatctgtaagccatttggcaactttaggttctccagtaagcacgccctgaccgtggtgttggcaacgtggacaatcggcatcggcgtcagcatccctcccttcttcggttggagtcggtttattcctgaggggcttcaatgcagttgcggtcccgactggtataccgtgggtaccaagtatcgatctgagagttacacttggttcctcttcatcttctgcttcattgtcccactgagcctgatttgttttagctacactcagctgttgcgggctctcaaggctgtcgccgcacagcagcaggaatcagccaccacacagaaggcagagcgtgaggtgagtcgcatggtagtggtgatggtcggtagcttctgtgtgtgttatgtgccttacgccgctttcgccatgtacatggtcaataaccgcaatcacggtttggacctgaggctggtgactattccatccttcttcagtaaatctgcctgcatctacaaccctattatctactgttttatgaataaacaattccaggcctgcatcatgaagatggtttgtgggaaggcaatgaccgatgagagcgacacctgttcgtctcagaaaaccgaagtctctactgtatctagtactcaagtggggccaaactag

SEQ ID NO: 120126 - DNA, 1047 bp, Artificial Sequence
  derived and/or modified sequence
atgagaaagatgagcgaggaggagttctacctgttcaagaacatcagcagcgtgggcccctgggacggcccccagtaccacatcgcccccgtgtgggccttctacctgcaggccgccttcatgggcaccgtgttcctgatcggcttccccctgaacgccatggtgctggtggccaccctgagatacaagaagctgagacagcccctgaactacatcctggtgaacgtgagcttcggcggcttcctgctgtgcatcttcagcgtgttccccgtgttcgtggccagctgcaacggctacttcgtgttcggcagacacgtgtgcgccctggagggcttcctgggcaccgtggccggcctggtgaccggctggagcctggccttcctggccttcgagagatacatcgtgatctgcaagcccttcggcaacttcagattcagcagcaagcacgccctgaccgtggtgctggccacctggaccatcggcatcggcgtgagcatcccccccttcttcggctggagcagattcatccccgagggcctgcagtgcagctgcggccccgactggtacaccgtgggcaccaagtacagaagcgagagctacacctggttcctgttcatcttctgcttcatcgtgcccctgagcctgatctgcttcagctacacccagctgctgagagccctgaaggccgtggccgcccagcagcaggagagcgccaccacccagaaggccgagagagaggtgagcagaatggtggtggtgatggtgggcagcttctgcgtgtgctacgtgccctacgccgccttcgccatgtacatggtgaacaacagaaaccacggcctggacctgagactggtgaccatccccagcttcttcagcaagagcgcctgcatctacaaccccatcatctactgcttcatgaacaagcagttccaggcctgcatcatgaagatggtgtgcggcaaggccatgaccgacgagagcgacacctgcagcagccagaagaccgaggtgagcaccgtgagcagcacccaggtgggccccaactag

SEQ ID NO: 120127 - protein, 589 aa, Artificial Sequence
  derived and/or modified sequence
MGSNLSPQLCLMPFILGLLSGGVTTTPWSLAQPQGSCSLEGVEIKGGSFRLLQEGQALEYVCPSGFYPYPVQTRTCRSTGSWSTLKTQDQKTVRKAECRAIHCPRPHDFENGEYWPRSPYYNVSDEISFHCYDGYTLRGSANRTCQVNGRWSGQTAICDNGAGYCSNPGIPIGTRKVGSQYRLEDSVTYHCSRGLTLRGSQRRTCQEGGSWSGTEPSCQDSFMYDTPQEVAEAFLSSLTETIEGVDAEDGHGPGEQQKRKIVLDPSGSMNIYLVLDGSDSIGASNFTGAKKCLVNLIEKVASYGVKPRYGLVTYATYPKIWVKVSEADSSNADWVTKQLNEINYEDHKLKSGTNTKKALQAVYSMMSWPDDVPPEGWNRTRHVIILMTDGLHNMGGDPITVIDEIRDLLYIGKDRKNPREDYLDVYVFGVGPLVNQVNINALASKKDNEQHVFKVKDMENLEDVFYQMIDESQSLSLCGMVWEHRKGTDYHKQPWQAKISVIRPSKGHESCMGAVVSEYFVLTAAHCFTVDDKEHSIKVSVGGEKRDLEIEVVLFHPNYNINGKKEAGIPEFYDYDVALIKLKNKLKYG

SEQ ID NO: 120128 - protein, 764 aa, Artificial Sequence [sequence omitted]

SEQ ID NO: 120129 - protein, 764 aa, Artificial Sequence
  derived and/or modified sequence
MGSNLSPQLCLMPFILGLLSGGVTTTPWSLARPQGSCSLEGVEIKGGSFRLLQEGQALEYVCPSGFYPYPVQTRTCRSTGSWSTLKTQDQKTVRKAECRAIHCPRPHDFENGEYWPRSPYYNVSDEISFHCYDGYTLRGSANRTCQVNGRWSGQTAICDNGAGYCSNPGIPIGTRKVGSQYRLEDSVTYHCSRGLTLRGSQRRTCQEGGSWSGTEPSCQDSFMYDTPQEVAEAFLSSLTETIEGVDAEDGHGPGEQQKRKIVLDPSGSMNIYLVLDGSDSIGASNFTGAKKCLVNLIEKVASYGVKPRYGLVTYATYPKIWVKVSEADSSNADWVTKQLNEINYEDHKLKSGTNTKKALQAVYSMMSWPDDVPPEGWNRTRHVIILMTDGLHNMGGDPITVIDEIRDLLYIGKDRKNPREDYLDVYVFGVGPLVNQVNINALASKKDNEQHVFKVKDMENLEDVFYQMIDESQSLSLCGMVWEHRKGTDYHKQPWQAKISVIRPSKGHESCMGAVVSEYFVLTAAHCFTVDDKEHSIKVSVGGEKRDLEIEVVLFHPNYNINGKKEAGIPEFYDYDVALIKLKNKLKYGQTIRPICLPCTEGTTRALRLPPTTTCQQQKEELLPAQDIKALFVSEEEKKLTRKEVYIKNGDKKGSCERDAQYAPGYDKVKDISEVVTPRFLCTGGVSPYADPNTCRGDSGGPLIVHKRSRFIQVGVISWGVVDVCKNQKRQKQVPAHARDFHINLFQVLPWLKEKLQDEDLGFL

SEQ ID NO: 120130 - protein, 144 aa, Artificial Sequence
  derived and/or modified sequence
MGSNLSPQLCLMPFILGLLSGGVTTTPWSLARPQGSCSLEGVEIKGGSFRLLQEGQALEYVCPSGFYPYPVQTRTCRSTGSWSTLKTQDQKTVRKAECRAIHCPRPHDFENGEYWPRSPYYNVSDEISFHCYDGYTLRGSANRT

SEQ ID NO: 120131 - protein, 1266 aa, Artificial Sequence
  derived and/or modified sequence
MGPLMVLFCLLFLYPGLADSAPSCPQNVNISGGTFTLSHGWAPGSLLTYSCPQGLYPSPASRLCKSSGQWQTPGATRSLSKAVCKPGHCPNPGISLGAVRTGFRFGHGDKVRYRCSSNLVLTGSSERECQGNGVWSGTEPICRQPYSYDFPEDVAPALGTSFSHMLGATNPTQKTKDHENGTGTNTYAALNSVYLMMNNQMRLLGMETMAWQEIRHAIILLTDGKSNMGGSPKTAVDHIREILNINQKRNDYLDIYAIGVGKLDVDWRELNELGSKKDGERHAFILQDTKALHQVFEHMLDVSKLTDTICGVGNMSANASDQERTPWHVTIKPKSQETCRGALISDQWVLTAAHCFRDGNDHSLWRVNVGDPKSQWGKEFLIEKAVISPGFDVFAKKNQGILEFYGDDIALLKLAQKVKMSTHARPICLPCTMEANLALRRPQGSTCRDHENELLNKQSVPAHFVALNGSKLNINLKMGVEWTSCAEVVSQEKTMFPNLTDVREVVTDQFLCSGTQEDESPCKGVTTTPWSLARPQGSCSLEGVEIKGGSFRLLQEGQALEYVCPSGFYPYPVQTRTCRSTGSWSTLKTQDQKTVRKAECRAIHCPRPHDFENGEYWPRSPYYNVSDEISFHCYDGYTLRGSANRTCQVNGRWSGQTAICDNGAGYCSNPGIPIGTRKVGSQYRLEDSVTYHCSRGLTLRGSQRRTCQEGGSWSGTEPSCQDSFMYDTPQEVAEAFLSSLTETIEGVDAEDGHGPGEQQKRKIVLDPSGSMNIYLVLDGSDSIGASNFTGAKKCLVNLIEKVASYGVKPRYGLVTYATYPKIWVKVSEADSSNADWVTKQLNEINYEDHKLKSGTNTKKALQAVYSMMSWPDDVPPEGWNRTRHVIILMTDGLHNMGGDPITVIDEIRDLLYIGKDRKNPREDYLDVYVFGVGPLVNQVNINALASKKDNEQHVFKVKDMENLEDVFYQMIDESQSLSLCGMVWEHRKGTDYHKQPWQAKISVIRPSKGHESCMGAVVSEYFVLTAAHCFTVDDKEHSIKVSVGGEKRDLEIEVVLFHPNYNINGKKEAGIPEFYDYDVALIKLKNKLKYGQTIRPICLPCTEGTTRALRLPPTTTCQQQKEELLPAQDIKALFVSEEEKKLTRKEVYIKNGDKKGSCERDAQYAPGYDKVKDISEVVTPRFLCTGGVSPYADPNTCRGDSGGPLIVHKRSRFIQVGVISWGVVDVCKNQKRQKQVPAHARDFHINLFQVLPWLKEKLQDEDLGFL

SEQ ID NO: 120132 - protein, 1266 aa, Artificial Sequence
  derived and/or modified sequence
MGPLMVLFCLLFLYPGLADSAPSCPQNVNISGGTFTLSHGWAPGSLLTYSCPQGLYPSPASRLCKSSGQWQTPGATRSLSKAVCKPGHCPNPGISLGAVRTGFRFGHGDKVRYRCSSNLVLTGSSERECQGNGVWSGTEPICRQPYSYDFPEDVAPALGTSFSHMLGATNPTQKTKDHENGTGTNTYAALNSVYLMMNNQMRLLGMETMAWQEIRHAIILLTDGKSNMGGSPKTAVDHIREILNINQKRNDYLDIYAIGVGKLDVDWRELNELGSKKDGERHAFILQDTKALHQVFEHMLDVSKLTDTICGVGNMSANASDQERTPWHVTIKPKSQETCRGALISDQWVLTAAHCFRDGNDHSLWRVNVGDPKSQWGKEFLIEKAVISPGFDVFAKKNQGILEFYGDDIALLKLAQKVKMSTHARPICLPCTMEANLALRRPQGSTCRDHENELLNKQSVPAHFVALNGSKLNINLKMGVEWTSCAEVVSQEKTMFPNLTDVREVVTDQFLCSGTQEDESPCKGVTTTPWSLARPQGSCSLEGVEIKGGSFRLLQEGQALEYVCPSGFYPYPVQTRTCRSTGSWSTLKTQDQKTVRKAECRAIHCPRPHDFENGEYWPRSPYYNVSDEISFHCYDGYTLRGSANRTCQVNGRWSGQTAICDNGAGYCSNPGIPIGTRKVGSQYRLEDSVTYHCSRGLTLRGSQRRTCQEGGSWSGTEPSCQDSFMYDTPQEVAEAFLSSLTETIEGVDAEDGHGPGEQQKRKIVLDPSGSMNIYLVLDGSDSIGASNFTGAKKCLVNLIEKVASYGVKPRYGLVTYATYPKIWVKVSEADSSNADWVTKQLNEINYEDHKLKSGTNTKKALQAVYSMMSWPDDVPPEGWNRTRHVIILMTDGLHNMGGDPITVIDEIRDLLYIGKDRKNPREDYLDVYVFGVGPLVNQVNINALASKKDNEQHVFKVKDMENLEDVFYQMIDESQSLSLCGMVWEHRKGTDYHKQPWQAKISVIRPSKGHESCMGAVVSEYFVLTAAHCFTVDDKEHSIKVSVGGEKRDLEIEVVLFHPNYNINGKEEAGIPEFYDYDVALIKLKNKLKYGQTIRPICLPCTEGTTRALRLPPTTTCQQQKEELLPAQDIKALFVSEEEKKLTRKEVYIKNGDKKGSCERDAQYAPGYDKVKDISEVVTPRFLCTGGVSPYADPNTCRGDSGGPLIVHKRSRFIQVGVISWGVVDVCKNQKRQKQVPAHARDFHINLFQVLPWLKEKLQDEDLGFL

SEQ ID NO: 120133 - DNA, 1770 bp, Artificial Sequence
  derived and/or modified sequence
atggggagcaatttgagtcctcaactgtgtctgatgccttttattctagggctgttgagcggcggggtgaccacaactccatggagtcttgcccagcctcaaggaagctgtagtctcgagggcgtggaaatcaaaggtgggagttttcggttgctgcaggagggacaggccctggaatatgtgtgccccagcgggttctacccataccctgtccagactcgcacatgtcgctcaacgggatcctggagtaccctcaagacacaggatcagaagacagttcgaaaggccgagtgtcgcgctatccattgccctcgacctcacgattttgagaacggagaatactggcccagatcaccatattacaatgtatctgatgagataagttttcattgttacgacggttacaccctgagaggcagcgcaaacagaacatgtcaggtgaacggccggtggtccggccagaccgccatctgcgacaatggagctggctactgttcgaacccaggcataccaatcgggaccagaaaggtgggttcccaatatagattagaggattctgtcacttaccattgctcgcgagggttgacactgcgcggtagccagagaaggacctgtcaggaaggggggtcttggagtggtaccgaaccctcctgccaggatagctttatgtacgatacccctcaggaggtggccgaggcattcctcagttccctaactgagactattgaaggcgtcgatgccgaagacgggcacggacctggcgaacaacagaaacgaaagattgtgctggacccctccggtagcatgaatatctacctagttttagacggctccgacagcatcggagcgtccaattttacaggcgccaaaaaatgcctcgtgaacctgatcgagaaggtggccagctatggggtgaaacccaggtacgggttggtgacgtacgctacttacccgaagatctgggtgaaggttagcgaggccgacagctcaaatgccgattgggtgacgaaacagctcaacgagattaactatgaggaccacaagctcaagagtggtaccaacacaaagaaagcgttacaggccgtgtactctatgatgtcatggcccgacgacgtcccacctgagggctggaacagaacccgccatgttattattctaatgaccgacggactgcataatatgggaggggaccctattacagtgatcgatgagattcgggacctattgtatataggaaaggaccggaaaaatccaagggaggattacttggacgtctatgtttttggcgtagggccgctagtgaatcaagtaaatatcaatgcactggcaagtaagaaggataatgagcagcacgtgtttaaagttaaagacatggaaaacctggaggatgtcttctaccaaatgattgatgagtcccaaagtctgtcattatgcggcatggtttgggagcatcggaagggtaccgactatcacaaacaaccatggcaggctaagatctccgtgatcaggcccagcaagggccatgagtcttgtatgggtgcggtggtctccgagtactttgtgctgacggctgcccattgctttacagtggacgacaaggagcattcaataaaagtcagcgtcggtggggaaaagcgtgacctcgagatcgaagtggtgctgtttcatccaaactacaacatcaacggaaaaaaagaagctggcataccagagttctacgactatgatgtggctctgattaagctgaaaaataagcttaaatacggttag

SEQ ID NO: 120134 - DNA, 1770 bp, Artificial Sequence
  derived and/or modified sequence
atgggtagtaatctgagtccacaactgtgtttgatgccctttattctgggcctgcttagcgggggcgttacaacgacgccgtggtctctagcccagccacagggcagctgttcccttgagggtgtagagatcaagggcgggagcttccgcttactacaagagggacaggctttagagtacgtttgtcctagtggattttacccataccccgtgcaaacaagaacatgccgctctacgggatcctggagcaccctgaagacccaggaccaaaagaccgtacgcaaagctgagtgtcgagcaatccactgtccaagaccccacgattttgaaaacggggaatactggccaagaagtccttattataatgtgtccgacgagatctcattccattgctatgacggctacacattgagaggctcagccaaccggacttgccaagttaatggtaggtggagcggccagactgctatttgtgataatggggctggatactgctccaatcctggcattcctatcggcacccgtaaggtgggaagtcagtatcgcctggaggattctgttacataccattgtagtcgagggctgaccctgcgaggaagtcagcggcggacatgccaagagggaggttcttggtcaggcacagagccctcttgccaggattccttcatgtatgatactccccaggaagttgccgaagctttcctgtcaagtctcacagagacaatagagggcgtagacgccgaggatggtcatggccccggcgagcaacagaagcgcaaaatcgttctggatccatctggctctatgaacatttacctggtgctggacggatccgattcaatcggggcttcaaatttcaccggcgctaagaagtgtttggtaaacctgatcgaaaaagtggcttcgtatggagtcaagcctcgctatgggctggtaacttatgccacatatccaaagatttgggtaaaagttagcgaggcggactcttcgaatgctgattgggtaaccaaacagctgaacgaaatcaactacgaagatcacaaactgaaaagtggaaccaacaccaaaaaggccctacaggccgtgtactctatgatgagttggccggatgacgtgccccccgaggggtggaataggacacgccacgtcatcattttgatgacagatggactccacaatatggggggagaccctatcaccgtgattgatgagatccgggatctgctgtacatagggaaggaccggaagaaccctcgagaagactacctggatgtgtacgtcttcggcgtcgggcccctggttaatcaagtgaatattaatgcactagcctccaagaaggacaacgagcagcacgtgttcaaggtgaaggacatggagaacctggaggacgtattttatcagatgattgatgagagccagtccctcagtctgtgcggtatggtctgggagcaccgtaaaggcaccgactaccacaaacaaccatggcaggcaaaaatatctgtcattcgtccttctaaaggacacgaatcttgtatgggggccgtagtatcagagtacttcgtgctgacggcagcccactgcttcactgtggatgataaggagcactcgataaaggtctcggtaggcggcgagaagagagacctcgagattgaagtggtgttattccatccaaactacaacattaacggcaagaaggaggctgggattcctgagttctatgactacgacgtcgctctgattaaactcaaaaacaagttgaagtacggctag

SEQ ID NO: 120135 - DNA, 2295 bp, Artificial Sequence
  derived and/or modified sequence
atggggtccaacttatctccacaactgtgcctgatgccgtttatcctgggactattgtcgggaggtgtaacaaccacaccatggagtttggctcgccctcagggctcctgctccctcgagggtgtggaaatcaaggggggcagtttcaggctacttcaggaaggccaggcccttgagtacgtctgcccttccggattctacccataccctgtgcaaaccaggacttgcagaagtacaggctcttggtctacactcaagacacaggatcagaagacagtcaggaaggcagagtgtagagcgatccactgccccagacctcacgattttgagaacggagaatattggcccagaagcccctactataatgtgagcgatgaaatctcatttcattgctacgacggttataccctgagaggaagtgctaataggacatgtcaggtgaatggtaggtggagtggtcagacagctatctgtgacaatggcgcaggatactgttccaaccctggaattcctataggtaccaggaaagttggttcgcagtaccggctcgaagattcagtcacatatcattgttccagagggctgaccctccggggctcccaaaggaggacctgtcaggaaggtgggtcttggagtggtacagagcccagctgtcaagattcctttatgtacgacactcctcaggaggtagccgaagcctttctgtcgtctctcaccgaaaccattgagggggtcgacgccgaggacggccacgggccaggagaacagcagaagcgtaagatcgtgctcgatccctctggatcaatgaatatatatcttgtgcttgacgggagcgacagcattggcgcatcaaatttcactggcgcaaagaagtgtttagtcaatctaattgagaaagtggcttcgtacggcgtcaaaccaagatatggcctcgttacttatgctacctatccgaaaatatgggtgaaagtctctgaggctgactcatctaatgctgactgggtcactaaacaactgaacgaaatcaactacgaagatcacaagcttaagagtggcacaaatacgaagaaggcccttcaggcagtatacagcatgatgagctggccagatgatgttccaccagagggctggaatcgaactcggcatgtcattattctgatgaccgatggcctccataacatggggggggatcctataacagtcatcgatgagatcagagacttactttacatcggcaaagaccggaaaaacccccgcgaagactaccttgacgtgtatgtgtttggcgtgggcccgcttgttaaccaggtcaacattaatgccctggcttctaaaaaagacaacgaacaacatgtttttaaggttaaggacatggaaaatcttgaggacgtgttctatcagatgatcgacgagtcccaaagcctatctctgtgtggcatggtctgggagcaccggaaagggactgactaccacaagcagccatggcaggccaaaatctcagtgatccgcccttcaaaaggtcacgagtcatgtatgggagccgtggtgtctgaatacttcgtgttaactgctgcacattgttttaccgtggacgataaggaacacagcatcaaggtctccgtgggcggggaaaagagagatctggagatagaggtggtgctctttcatcccaactacaatattaatgggaaagaggaggccggaatccctgagttttatgactacgacgttgccctgattaagctcaaaaataagttaaagtacggacagactatcaggccaatctgcctgccatgcaccgaaggcacaacgagagctctcagactgccacctacgacaacgtgtcaacagcagaaagaggagctgctgcccgcacaagacataaaagccctgtttgtgtcggaggaggagaaaaagcttaccaggaaggaagtctacatcaagaatggagacaaaaaaggctcctgcgagcgggatgcccagtatgctcctggatacgacaaggttaaggatatatccgaagtggtgaccccccgcttcctgtgcacaggtggcgttagtccatacgccgatccgaatacatgccggggcgactcaggagggccccttattgttcacaaacggtcccggtttatccaagtcggcgtgatttcgtggggggtggtcgatgtttgtaagaatcagaagcgacaaaagcaagttccagcccacgcccgtgactttcacatcaacctcttccaagtcctcccttggttgaaagaaaagctgcaggacgaagatctgggctttctttag

SEQ ID NO: 120136 - DNA, 2295 bp, Artificial Sequence
  derived and/or modified sequence
atgggtagcaatctgtccccgcaactttgcctgatgccgtttatcctaggattgctttctggtggagtgacaaccaccccctggtcactcgctcgaccacaaggatcatgttcacttgagggcgtcgaaatcaagggcgggagcttccgtctgctacaggagggccaggctctcgaatatgtctgtccgagcggcttttacccttaccctgttcagacccggacatgtagatcaactggatcctggtctacactgaaaactcaggaccaaaagaccgtgcgaaaggctgagtgtagggccattcactgcccgcgaccacacgacttcgaaaacggagagtattggccgcggtccccttattataatgtgtctgacgagatcagctttcattgctatgatggctatactctgcgcggctctgccaataggacttgtcaggtgaacggaaggtggtctgggcagacggccatctgcgataacggcgctggatactgttccaaccctggcattccaatcggcacccgaaaggtgggaagccagtatagacttgaggacagtgtgacataccattgctcccggggactgaccttgaggggctcgcagaggagaacttgccaggagggtggatcatggtcgggcactgagccgtcatgccaagactcgtttatgtatgacaccccccaggaagtggcggaagcttttctgagttcccttactgagacaatcgaaggggttgacgccgaggatgggcatgggcccggggagcagcaaaagcgaaaaattgtcctagatccttcagggtccatgaacatctacctggtgctcgatggtagcgactccatcggcgcgagcaacttcacaggcgccaaaaagtgtctggtgaacctgatcgaaaaagttgcttcttatggggttaagccaaggtatgggctggtgacatatgctacctatccaaaaatctgggtaaaggtcagcgaggcagacagtagtaatgctgactgggtgaccaaacaactgaatgaaattaattacgaagatcataagttaaagagtggcaccaacaccaagaaggcgctgcaggctgtgtactccatgatgtcctggccagacgacgtgccacccgagggatggaaccgaacaaggcacgtgatcatacttatgaccgacggcttgcataatatgggcggcgatcctatcactgttatcgacgagatcagagatttgctgtatatcggcaaggatcgaaagaaccctcgcgaggactacctcgatgtgtacgtgtttggagttggcccgctagtcaaccaagtcaatatcaatgctttggccagcaaaaaagataacgagcagcacgtgttcaaggtcaaggatatggagaatctagaagatgtattttaccaaatgatcgatgaaagccagagcctttccttatgcgggatggtctgggaacacaggaaaggtaccgactaccacaagcagccttggcaggccaaaatcagtgttataaggccctccaaggggcacgagagctgtatgggtgccgttgtcagtgaatatttcgtgctcacggcagcccactgttttaccgtggatgacaaggaacatagtattaaagtgtcggtcgggggcgagaaacgggacctcgagatcgaagtggtattgtttcatcccaattacaatatcaacggcaaaaaagaagccggcatcccagaattctatgactatgacgtagccctcataaagctgaagaataaactcaagtacggacagactatacgtccaatttgcctgccttgtaccgaaggtactactagagctctgaggctgccacccacaacaacttgtcagcagcagaaagaagagctcttgcccgctcaggatatcaaagccctttttgtgtctgaggaggaaaagaagctgactcgcaaagaagtgtacattaagaatggggacaagaagggatcatgcgagagagatgcccagtacgcaccaggatacgataaagtcaaggacattagtgaagtggtgacccctcgattcctctgcacagggggcgtttccccatacgcagatcctaacacctgtagaggcgacagcggagggccattgatcgtgcataaacgctctcgttttatccaggtcggggtcatatcgtggggggttgtcgatgtgtgtaaaaatcaaaagcgtcaaaaacaagtccctgcccatgctcgggatttccacatcaacctcttccaagtcctaccttggttgaaggagaagctccaggatgaagatctggggttcctgtag

SEQ ID NO: 120137 - DNA, 2295 bp, Artificial Sequence
  derived and/or modified sequence
atggggtcaaatctttcaccccagttgtgtctgatgccattcattcttggattactgagcgggggcgtcacaaccaccccatggagtctggcgcgcccccaaggatcttgtagtctcgaaggcgttgagatcaaaggggggagctttagactcctgcaggagggtcaagcgctggaatacgtttgccctagcgggttctacccttacccggtgcagacaaggacttgcaggtccactgggtcctggtccacactgaagacacaggatcagaagactgtgagaaaggcagaatgtcgggccatccactgcccccgtccccatgactttgagaatggcgaatactggccacgaagcccatattataatgtatctgatgagatcagcttccactgttacgacggctatacactgaggggcagtgccaaccggacatgtcaggtgaacggacggtggagtggccaaacggcgatatgcgacaacggggccgggtactgtagcaaccctggcatccccattggcactagaaaagtaggcagtcagtataggttagaggactccgtgacataccattgctccaggggcctcactttgagaggctcccaacgacggacttgccaggagggcggatcttggagcggaactgagcccagctgtcaggactccttcatgtacgatacaccacaggaggtagcggaagccttcctgtcatccctgacagagactattgaaggagtggacgcagaggacggccacggcccaggtgagcagcagaagaggaagatcgttttggatcctagcggctctatgaacatatacctcgtactcgacggctctgatagcattggagcatccaattttacaggggccaagaaatgcctggttaatttaatcgaaaaggtggcctcctatggagtcaaacccaggtacggactggtgacatacgctacataccccaagatctgggtgaaagtatctgaggcagattcttctaacgctgactgggttaccaaacaattgaatgagatcaactacgaagatcacaagctgaagtcaggaactaatacaaaaaaggctctacaggccgtatattccatgatgtcttggcctgatgacgtcccacccgaaggatggaatcggactaggcacgtcatcatcctcatgaccgatggtttgcacaacatggggggcgaccctattacggtgatagacgagatccgggatctactttacattggtaaggatagaaagaaccctagagaggactatctcgatgtgtatgtcttcggagtggggcctttggtgaaccaggtgaatatcaacgctctggctagcaaaaaggacaacgaacagcacgtgtttaaggtgaaggatatggaaaatctggaagacgtgttttatcagatgatagacgagtctcagtctctcagcttatgcggtatggtttgggaacacagaaaaggaacagactaccataaacagccatggcaagccaagattagtgtgatacgcccgtctaagggccacgagtcctgtatgggggctgtggtctctgagtatttcgtactgacagctgctcactgtttcactgtggatgacaaagaacattctatcaaggtctctgtgggaggcgagaaacgtgacttagaaatcgaagtcgtactgttccacccaaattacaatattaacggcaagaaagaggccggaatcccagagttctacgactacgacgtggctctgatcaagctgaaaaacaaattgaaatatggccagactatacgaccaatttgcctgccttgcacagagggcacaactcgggcattgaggctgcctcccaccacaacctgccaacagcaaaaagaggaactccttccagcccaggacatcaaggccctctttgttagcgaagaggagaaaaaactaactaggaaagaggtatacatcaagaatggcgataagaaagggagctgcgaacgggacgcacagtatgctccagggtatgacaaggtgaaagacatctctgaagttgtgacccctagattcttatgtacagggggagtgtccccctatgctgaccctaatacatgccgtggagattccggcggccccctgatcgtgcacaaacggtcccggttcatccaggtcggtgtcatctcctggggggtagtcgatgtgtgtaagaatcagaagcgacagaaacaggtccctgcccacgctagggactttcacataaacctgttccaagtgctgccctggttgaaggagaagctgcaggacgaagatcttggttttctttag

SEQ ID NO: 120138 - DNA, 2295 bp, Artificial Sequence
  derived and/or modified sequence
atgggctcaaatctgtcacctcagctttgtctgatgccatttattctcggactgctttctggaggcgtaacaaccacaccatggtcgcttgcaaggcctcagggtagttgctccttggagggtgtggagattaagggtgggagtttccgccttctgcaagaggggcaggcactcgagtatgtatgtccctccggtttttatccttacccagtgcagaccagaacttgcagatcaacaggcagttggagcacattaaaaacccaggatcagaagaccgtaaggaaggcagaatgcagagcaattcattgtcccaggccccacgatttcgaaaacggagagtactggcctaggagtccttattataacgtttctgatgaaatctcatttcattgctatgacggatataccctcagagggtctgcgaaccgaacctgtcaggttaatggaaggtggtcaggtcagactgctatctgtgacaacggcgcagggtactgtagcaatccaggaatccctattggcactcggaaagtcggaagccagtaccggttggaagacagtgtgacttaccattgctctagagggttgacgctgcgggggagccaacggcgaacctgtcaggagggcggaagctggagcgggaccgagccttcatgccaggatagcttcatgtacgacaccccacaggaggtggctgaagcgttcctgagttcactgacagaaaccatagagggcgtggacgccgaagacggtcacggccctggtgaacagcagaaaaggaagattgtgcttgatccaagcgggtctatgaacatttacctggtgcttgacgggtccgatagtattggagctagcaactttacaggcgccaaaaagtgtctcgtgaatctaatcgagaaagtcgcttcttacggtgtcaaaccgcgctacggcctggtgacctatgcaacatatcccaaaatctgggtgaaggtgagtgaagccgattctagtaacgccgattgggtgactaagcagctgaatgaaatcaactacgaggaccacaagttgaaatccggcaccaacacgaagaaagcactccaagccgtttactctatgatgagttggcctgacgacgtgccccctgagggctggaatcgcacaagacatgtcataatactcatgactgatggactgcacaatatgggcggagacccgattacagtgattgatgagattcgggacctgctgtacatcggtaaagaccgcaaaaacccacgcgaagactatttggacgtctacgtgttcggcgtgggtcctcttgtgaatcaggtcaacatcaatgctctggccagtaagaaagacaacgaacaacatgtgttcaaggttaaggatatggagaacctagaggatgtgttctaccagatgatagatgaatctcaaagcctgtctctttgtggcatggtttgggagcacagaaaaggcaccgactatcacaaacagccttggcaagccaagatatcagtcatccggccctccaagggtcacgagtcctgcatgggcgcagtcgtatctgaatatttcgtgttgactgccgcccattgtttcacagtggacgacaaggagcactccatcaaagtatccgttgggggcgaaaagagagaccttgagatcgaggttgttcttttccaccccaactacaatatcaatggcaaagaggaagcgggaattcccgagttttacgattacgatgtcgctttgattaagttgaaaaacaagcttaagtatgggcagaccattcggccaatctgtcttccctgcaccgaaggaacaacccgggcgctccggctccctccaacaaccacttgtcaacagcagaaagaagaacttctgcctgctcaggacatcaaggctttatttgtgtctgaagaggagaagaagctgactcgaaaggaagtttacataaagaacggggataagaagggctcctgtgagcgtgacgcacagtatgctccagggtacgataaagtgaaggacatctcagaggtcgtcaccccgaggttcctgtgcaccggtggggtctcaccttacgcggaccccaacacgtgtcgtggcgacagcgggggacccttaatcgtgcacaagcgcagtagatttatccaagtcggcgtgatctcttggggtgtcgtcgatgtgtgcaagaaccagaagcgccagaagcaggtcccggcccacgcacgggattttcatataaacctgtttcaggtattgccctggctgaaggagaagttgcaggacgaggacttgggctttctgtag

SEQ ID NO: 120139 - DNA, 2295 bp, Artificial Sequence
  derived and/or modified sequence
atgggctccaacttgagtcctcagctctgcctcatgccctttatcctgggcctgctgagcgggggagttactacgactccatggtctttggctcggccacaaggctcctgctctctggaaggggttgagattaaaggcggcagtttccgactgctgcaggaaggacaggcactcgagtacgtttgtccttcaggtttctatccataccccgttcagaccaggacctgccgcagcactggcagctggtccactctgaagactcaggaccagaagaccgttagaaaagctgagtgcagagctatacactgtcctaggccacacgactttgagaacggagaatactggcccagatctccttactacaatgtgagcgatgaaatcagttttcactgttacgacggttacaccctgcgggggagtgccaatcggacatgtcaagttaacggccgttggtccggacagaccgcgatttgtgacaatggggccggttactgcagtaatcctggaattccaatcggaacccgtaaggtaggctcccagtaccgcctggaggacagcgtcacgtaccactgctcaagaggactgaccctgcgcggctcgcaacgcagaacgtgccaggagggcggaagttggtcaggcacagaacccagctgccaggattccttcatgtacgatacccctcaggaggtggctgaggctttcctgagtagcctcacagagacaattgagggcgtggacgcagaagatgggcacggacccggagagcagcagaaaaggaaaattgtcctggatccgtcaggcagcatgaacatatacttagtgttggacggatccgacagcattggagcttccaattttacaggcgccaaaaaatgtctcgtaaacctcattgagaaggtggcttcatatggggtgaagcctcgctacggacttgtcacctatgccacgtatcccaagatttgggtcaaggtcagcgaggccgactccagcaacgctgattgggtgacgaaacagttgaacgagattaattatgaagatcacaagctcaagagtggaacgaacactaagaaagctcttcaggcggtgtacagcatgatgtcctggcctgacgatgtgccaccggagggctggaataggacgaggcacgtaatcatcctgatgacagatggactgcacaatatggggggggatccaatcaccgttatcgatgagatccgagatctgctatatatcggaaaagataggaagaatccccgtgaagactatctcgatgtgtacgttttcggtgtgggaccactggttaatcaggtgaacataaacgcactggccagcaaaaaagacaatgagcaacacgtcttcaaagttaaggacatggaaaatctggaggacgtcttctaccagatgatcgacgaatcacaaagcctgagcctgtgtgggatggtatgggagcaccggaagggcactgattaccataaacagccatggcaggcgaaaatttcagtcatccggccgtccaaaggccatgaaagctgtatgggcgcagttgtttcagagtactttgtgttgactgccgcccattgttttacagttgacgataaagaacattccatcaaggtctccgtgggaggcgaaaagcgagatcttgagatcgaggtggttctcttccacccaaactacaatatcaatgggaaaaaggaagccggaatccccgagttctatgactatgatgtggccctgattaagcttaagaataagctaaagtacggccagactatccgacctatctgtttgccctgcacagaggggactacacgcgccctccggctaccccctacgactacatgtcagcaacaaaaagaggagctgctgcccgctcaggacatcaaggccctctttgtgtcagaagaggaaaaaaagctgacccgcaaggaagtgtacataaagaatggcgacaagaaaggaagctgcgagagggacgcacagtacgcccctggatacgacaaggttaaagacatttccgaggtcgtgacgccccggtttctctgtactggcggcgtgtccccctatgccgatccgaacacctgtagaggcgatagtggggggcccctgatcgtacacaaacggagcaggtttatacaagttggggtgatttcttggggcgtggtagatgtgtgtaaaaaccagaagagacagaagcaggtgcccgctcacgctagggactttcatataaacctctttcaggtccttccttggcttaaggaaaagctacaggacgaagatctaggtttcctctag

SEQ ID NO: 120140 - DNA, 2295 bp, Artificial Sequence
  derived and/or modified sequence
atggggtcaaaccttagcccccagctatgtcttatgccttttattttaggcctcctttctggcggtgtgaccacaaccccgtggtcactagccagacctcaaggttcctgctcgctcgaaggcgtcgagatcaaaggggggagcttccggctgttgcaagagggtcaggcattagaatacgtgtgtccctccggcttttatccatatccagttcagacacggacctgccgcagcactgggtcctggagtaccctaaagacgcaggaccaaaaaacagtgaggaaggccgagtgccgagccatccactgccccagacctcatgattttgagaatggagaatattggcctcgcagcccatattataacgtgagtgacgagatctccttccattgttacgacggctatacactacggggctcagcgaaccgtacatgtcaggtgaacggcaggtggagcggtcagactgccatttgcgataatggggccggctactgcagcaacccaggtatccccatcggaacaaggaaggtaggatcccagtacaggttggaggactcagtgacctaccactgttcccgaggcctgaccctgcgggggtcacagcggcggacctgtcaggaaggtggctcttggtcaggaaccgaaccatcatgccaagattcgttcatgtacgatactccccaggaggtcgccgaagcctttctgtcaagcctgaccgagaccattgaaggagttgatgctgaggatggtcacgggcccggggaacagcagaaaagaaaaatcgttcttgatcctagcgggagtatgaacatctacttggtcttggacgggagtgatagcataggcgcctctaattttaccggagccaaaaagtgcttagttaaccttatcgagaaagtggcatcttatggggttaaaccacggtatggcctggttacatacgcaacgtatcctaagatttgggttaaagtgtctgaggccgatagctccaatgccgactgggtgacgaagcaacttaatgaaattaactacgaagatcacaagctgaaatctggaaccaacaccaagaaggccctgcaggcagtatattccatgatgtcatggcccgatgatgttccacctgagggatggaatcgcactcgacatgttattattctaatgaccgatggcctgcataacatgggtggagatccgattacggttatcgacgaaatccgggacctgttgtacatcgggaaagatcggaaaaatcctagggaagactatttggacgtttacgtgtttggggttggccctttggttaatcaggtgaacattaacgccctggccagcaaaaaagataacgagcagcatgtcttcaaagtgaaggatatggagaatctggaggacgtcttctatcaaatgatcgacgaatcccaatctctgtcattatgtgggatggtgtgggagcaccgtaagggaacagactaccacaagcagccatggcaggcaaagatctccgtgatccgccctagcaagggccatgagagctgcatgggcgctgtcgtatccgagtattttgttctgactgcagcgcattgctttactgtagatgataaagaacatagcatcaaggtgtccgtcggtggggaaaagagggatttggagatcgaagtggttttatttcatcccaactataacatcaacggcaaaaaggaagcagggattccagagttctacgattatgatgttgctcttattaagttgaaaaacaagcttaagtatgggcagaccatccggcccatctgcctgccatgcacagaggggacaacacgagctctgaggctgccgcccacaaccacatgtcaacagcagaaggaggagctgctgcctgcccaggatatcaaggctctgttcgtctctgaggaggagaaaaaattgacgaggaaggaagtctatatcaagaacggggacaagaaaggtagctgtgagcgggatgcccaatatgcaccaggatatgataaagtaaaggacatttccgaagtcgttacacctcggttcctatgcacagggggcgtctctccttacgctgacccaaatacatgtcgcggagacagcggtggaccccttatcgttcacaagcgcagcagattcatccaggtgggagtgattagttggggtgtcgtggatgtgtgtaagaaccaaaaaaggcagaagcaggttcccgcccacgcaagagattttcacatcaatctgtttcaagtgttgccatggttaaaagaaaaactccaggatgaggatcttggctttctgtag

SEQ ID NO: 120141 - DNA, 2295 bp, Artificial Sequence
  derived and/or modified sequence
atgggttctaacttaagcccccagctgtgtctcatgccattcatcctgggcttgctgtccggcggagtgacaacaactccttggtctttagctagaccgcagggctcgtgctctctggagggcgtggagatcaagggagggtcctttagacttttacaagaaggacaggcacttgagtatgtatgtccttccggcttttatccctaccctgtacaaacaaggacgtgtcggagcactggcagttggtccactctcaagactcaggatcagaagacagttcgcaaagctgaatgtcgggccatacattgcccaaggcctcatgactttgaaaacggcgaatactggccacgatccccctattataacgttagcgacgagattagctttcattgttacgacggctatacactgcgggggtctgccaataggacttgtcaagtgaatggaaggtggtccggccaaaccgcgatctgtgataatggagcaggatactgctctaacccaggaatcccgataggaactaggaaagtcggctcccagtacagactggaagacagcgtaacttatcactgttcaagaggtctaactctcaggggaagtcaaaggcgaacttgtcaggagggcggcagctggagcggcactgagccaagctgccaggacagcttcatgtacgatacgccacaagaggtggccgaggcattcctgagcagcctcacggaaacaattgagggggttgatgctgaagacggacacggaccaggcgaacagcagaagaggaaaatcgtcctggatccctccggatcaatgaacatatatctggtactcgacgggagcgactccataggagcaagcaactttacaggagccaaaaaatgcctcgtcaatctcatcgagaaggtcgccagctatggcgtgaaacccagatatggacttgtgacttacgccacatatccaaaaatctgggttaaggtatccgaggccgacagctctaatgccgactgggtaaccaagcagcttaacgagatcaattacgaggaccacaaacttaaatccggcacaaataccaagaaagctctccaggccgtgtactcaatgatgtcatggccggacgatgtgcctccagaagggtggaacagaaccagacatgtgattatccttatgactgacggccttcacaatatgggcggagatcccattacagtgatagacgaaatccgcgatctgctgtatataggaaaagacagaaagaacccccgtgaggactatttggacgtgtacgtgttcggagtcggtcctttggtcaatcaagtcaacatcaacgccctggcgtcaaagaaggacaacgagcagcatgtgtttaaagtgaaagacatggagaacctggaggatgtcttttaccagatgattgatgaatcacagtccttatccctttgcggaatggtttgggaacacagaaagggaaccgactatcacaagcagccgtggcaggcgaaaatttctgtgataagaccctcaaagggccatgaaagttgcatgggtgccgtggttagtgaatatttcgtgctcactgctgcacactgcttcaccgtagacgacaaggagcactctatcaaggtgagtgtgggtggcgagaaaagagacctggaaatcgaggtcgttcttttccatcctaactacaatatcaatggaaagaaggaggccggcatccctgagttctatgattacgacgtggctcttatcaagctcaaaaataaactcaagtatggccagaccatcagaccaatttgccttccttgcacggaggggactaccagagccctgcgcctgccacctacaactacttgccaacagcaaaaggaggaattgctaccggcacaggatatcaaggcattgtttgtgagcgaagaagagaaaaagttaacccgtaaagaggtgtacatcaaaaatggcgacaaaaaaggctcgtgcgagcgagacgctcagtatgctccgggctatgacaaggttaaggatataagcgaagtcgtcaccccccgcttcttgtgtaccggaggcgtatctccctatgccgatcccaatacctgtagaggtgacagcggtggacctcttatcgttcataaaaggagcagatttattcaggtgggcgtcatttcttggggcgtggtggacgtatgtaagaaccagaaacgtcagaaacaggttcctgcccacgccagagactttcatatcaatctctttcaggtcctcccctggctgaaggaaaaacttcaggatgaggacctgggctttctgtag

SEQ ID NO: 120142 - DNA, 2295 bp, Artificial Sequence
  derived and/or modified sequence
atgggatccaatctgagcccccaactgtgcttgatgccgtttatccttggactgctgtccggcggcgtgacgacaaccccctggtcactggccagaccacagggaagttgcagcctggagggcgtggaaatcaaaggaggttcgtttagacttctgcaagagggccaggcattggagtatgtgtgccctagcggcttttatccctacccagtacagaccagaacctgtcgctctacgggatcttggagtaccctgaaaacacaggatcagaaaaccgtgagaaaagccgagtgtcgggccatccactgtcctcggccccacgacttcgagaacggggaatattggccaaggagcccttactacaatgttagtgacgagatatcattccattgttatgacgggtatactctgcgcggatctgccaaccgaacctgtcaggtcaacggacgctggtccgggcagaccgccatttgcgacaacggcgctggctactgctctaatcccggaataccgatcgggacaagaaaggtgggcagtcagtaccggttggaagactctgtgacatatcactgctctaggggcctcactctgcgtgggtcccagcggcggacatgtcaggagggagggtcttggtcaggaaccgaacccagctgtcaagactccttcatgtacgacacgccccaggaggtcgcggaggccttcctgtcatctcttacggagacaattgagggggtcgacgctgaggatggtcacggacctggagagcagcagaagcgcaaaatcgttctcgatccctccggaagcatgaacatttacctggtattggatggaagcgactcaattggggccagtaactttaccggcgccaagaagtgcctcgtcaacttaatagagaaggttgcgtcatatggtgttaagccaaggtacggcttggtgacgtacgcaacatatccaaaaatttgggtgaaagtgtccgaggctgattcgtccaacgcagactgggtgaccaagcagctcaatgaaataaactatgaggatcacaaattgaagtcaggcaccaacactaagaaggcccttcaagccgtatactcaatgatgagctggccggacgacgtcccacccgagggctggaatcgcacccgtcatgtgatcatcctgatgaccgatgggcttcataatatgggaggcgatcccataactgtcattgacgaaatccgggatctgctttatatcggcaaggataggaagaaccccagagaggactatctcgacgtatacgttttcggggtcggccctctcgttaatcaggtgaacataaacgctttagcctcaaaaaaggacaacgagcagcacgtgtttaaggttaaggacatggaaaacctggaagatgtattctatcagatgatcgacgaaagtcagagcttgtcactttgtggtatggtttgggagcaccgtaagggaactgattaccataagcaaccttggcaagccaaaatctcggtgattcgccccagtaagggacatgagtcctgcatgggggccgtggttagcgagtattttgttctgacagccgcccactgtttcaccgtagacgataaagagcacagcatcaaggtgagtgtcgggggcgaaaaaagagatcttgagatagaggtggtgctattccaccccaattacaacatcaatgggaaaaaagaggcagggatccccgagttttacgattatgacgttgcgcttataaaattgaaaaacaaactcaagtatggccagaccatccgaccaatctgtctgccttgtactgagggcaccacacgcgcgctgcggctccccccaaccactacatgccagcagcagaaagaggaattgctccctgcacaggatataaaggctctgttcgtgtccgaagaggagaaaaagctaacgagaaaggaggtgtatatcaaaaacggggacaaaaagggttcttgcgagagagatgcgcaatacgctccaggatacgataaggtgaaagacatttccgaggtggtgactcctcggttcctctgcacaggcggggtctcaccatacgctgatccaaatacttgtcgaggggactctgggggccccctgatcgtacataagcgaagtagattcatccaggtgggcgtgatctcctggggggtggttgatgtctgcaaaaatcagaagcgacagaaacaggtccccgcacatgcccgagattttcacatcaatctgttccaggttctgccctggctgaaggagaagctgcaggacgaggaccttggattcttatag

SEQ ID NO: 120143 - DNA, 2295 bp, Artificial Sequence
  derived and/or modified sequence
atgggctctaatctctctcctcagctgtgcttaatgccctttattctcggcctgctgtccggaggagtcacaacaacaccgtggtctctggcacggccgcagggaagttgttccttggagggggtggagataaaagggggctctttcagactgctgcaggaggggcaggcattagagtacgtctgtccttccgggttttatccctacccggtccagacacggacttgcaggtctaccggtagttggagcacccttaagacacaggatcagaagaccgtacggaaagctgagtgtagagccattcattgcccgcgtccacatgactttgaaaacggcgagtactggcctagaagcccttactacaacgtgagcgatgagatttctttccactgctacgacggatacacactccgtggatctgccaacaggacatgccaggttaacgggcgctggtccggtcagacggctatttgtgacaacggcgcaggttattgcagcaacccagggattccgatcgggacacgaaaggtgggatcccagtatagattggaggattccgtcacataccattgctcacgcggcctcaccctcaggggctcgcagcggaggacatgccaagagggggggagctggtctgggaccgaaccttcctgccaggatagctttatgtatgacactcctcaagaagtcgctgaggcgtttctgtctagtttgaccgagacaattgaaggcgttgacgccgaagatgggcacggccccggagaacaacagaagagaaaaatagtgctggatcccagcggatctatgaacatctatttagtcctggacgggtccgacagcattggtgccagcaacttcaccggggccaaaaagtgcctcgtgaacttgatagaaaaggttgcatcctatggggtgaagcctcgttacgggctcgttacatacgccacttacccaaagatctgggtcaaggtatcagaagccgattcctccaacgcagattgggtgactaagcagctgaacgaaatcaattatgaagatcacaagttgaagtcaggcaccaacaccaagaaagccctacaggccgtatatagtatgatgagctggcccgacgacgtccctccagagggttggaatcgcaccaggcacgtgatcattcttatgacagatggtttgcacaatatggggggtgatcccattactgttatcgatgagatccgcgacctcctttatatcggcaaagatcggaagaatccccgagaggattaccttgacgtctatgtcttcggcgtggggccgctcgtgaatcaagtgaacataaatgccttggccagtaaaaaagacaacgagcaacatgtgtttaaagtgaaggacatggaaaacctcgaggatgtcttttatcagatgatcgacgagtcccaatccctgtcactttgcggaatggtgtgggaacacaggaagggtaccgactatcacaaacagccctggcaagccaagatcagtgtcatacggccaagcaaagggcacgagtcgtgcatgggcgcggtggtctcggaatattttgtcctgaccgccgcgcactgcttcacagtagacgataaagagcattccattaaagtctcagtcggtggcgaaaagagagatttggagatagaggttgtcctgttccaccccaactacaacatcaacggaaagaaagaggctgggatcccagagttctatgattacgacgtcgcattgatcaaactgaagaacaagctcaagtatggccagacaatcagacctatctgcctgccgtgcaccgagggcacaaccagggcccttaggctgccgccgaccaccacctgccagcagcagaaggaagagctgcttcccgcacaggacataaaggctctatttgtgagtgaagaggaaaagaagctcacacgaaaagaagtatacatcaagaacggcgacaagaaagggtcctgcgagcgggacgcgcagtatgcccccggttatgataaggttaaagacatttcagaagtggtgaccccccgttttttgtgtaccgggggtgtctccccttacgcagatcccaatacatgccggggggactcaggcggcccattgatcgtacacaaacgctctcgatttatccaggtgggggtcatatcctggggcgtggtcgacgtctgtaagaaccagaagcgccagaagcaagtgcccgcccacgctagggattttcacatcaatctgtttcaggttctcccctggctgaaggaaaaactccaagatgaggatctcgggtttctgtag

SEQ ID NO: 120144 - DNA, 2295 bp, Artificial Sequence
  derived and/or modified sequence
atggggtctaatctcagtccccagctgtgcctgatgccgttcatccttggccttttatccggaggtgtcacaactactccatggtcactcgctcgcccgcaggggtcgtgttcattggagggtgtggaaatcaagggtggatcttttcgcctgttacaggaagggcaagccctggaatatgtttgcccgagcggattttatccctacccagtacagacacgcacttgtcgctcaacaggaagctggtcaacattaaaaacacaagaccaaaaaaccgtgagaaaggcagagtgcagagccatccactgccctagacctcatgacttcgagaatggggaatactggccccggtccccgtactacaatgtgtctgacgagattagcttccactgctatgacggttacacgcttcggggttctgccaaccgcacgtgccaggtcaacggccggtggagcggacagacagcgatctgcgataacggggcgggctattgttctaatccagggattccgatcgggacgcggaaggtgggcagtcaatacagattggaggatagtgttacataccactgctcacgggggttgaccctgagggggagccagcgtaggacctgtcaggagggaggttcatggtccggaacggagccttcgtgccaagatagcttcatgtatgacactcctcaagaagtggccgaggcatttctctcatcactgacagaaacaatcgagggggtcgatgccgaagatggccatggaccaggagagcaacagaagaggaagatcgtgctcgacccaagtggaagcatgaacatatatctggtgctcgatggctccgacagcattggggcctctaacttcacaggggcgaagaagtgtctggttaaccttatcgagaaggtggcaagctatggtgttaagcccaggtatggacttgtgacatatgccacctaccccaaaatctgggtcaaggtttcggaggccgatagttcaaatgccgactgggtcacaaaacagctgaacgaaatcaattatgaagatcacaagctgaagtctggtacaaacacaaaaaaggctctgcaggcagtttattcaatgatgagctggcctgacgacgtgccgccagagggatggaataggacacgccacgtgattatcttgatgacagatgggctgcataacatgggcggcgacccaatcaccgtcatagacgaaattcgggacttactgtatataggtaaagacaggaagaatccacgcgaggattacctcgatgtgtacgtattcggggtgggcccactggtgaatcaggtgaacatcaacgcgctggcctccaaaaaggacaacgagcagcacgtgttcaaggtcaaagacatggaaaacttagaggatgttttctaccagatgattgacgagagtcagtccttgtcattatgtggaatggtctgggagcatagaaaagggacggactaccataagcagccttggcaagccaaaatatccgtcatccggccatcaaagggccatgaaagctgcatgggtgcagtggtctcagagtacttcgtgttgacagctgctcactgctttactgtggatgacaaagagcattctattaaggtatccgtgggtggcgagaaaagagaccttgaaatagaggtcgtgttgtttcaccccaattacaatatcaacgggaagaaagaggctgggatacccgaattctacgattacgatgtggccttgattaaactcaagaacaagctgaagtacggccaaaccatacggcctatttgcttgccatgcacagagggtaccacccgagccctccggctgcctcccacaactacgtgtcagcagcaaaaggaagagctcttaccggcacaagacatcaaggccttgttcgtcagcgaagaggagaagaagttaacacggaaggaagtgtatataaaaaatggtgataagaagggttcctgtgagagggacgctcagtatgcacccgggtatgataaagtcaaagacatatccgaggtcgtaacccccagatttctctgtactggaggagtaagtccatatgcggatcctaatacatgccggggagatagcggcgggcccctcattgtacacaaacgctcccgtttcatccaggtgggcgtgattagttggggggttgtggatgtgtgtaagaatcagaaacgccagaagcaggttcccgcccacgcacgagatttccatatcaaccttttccaagtcttgccatggttgaaagagaaactgcaggatgaggatttaggcttcctctag

SEQ ID NO: 120145 - DNA, 2295 bp, Artificial Sequence
  derived and/or modified sequence
atgggctcgaatcttagtcctcaactgtgcctaatgccattcatcctgggtctgctgtcaggcggggtgaccacaaccccttggtcactggcgagacctcagggtagctgcagcttggagggcgtagaaattaaaggcgggtcctttcgcctgctgcaggagggccaagcactggagtatgtatgcccgtcaggcttctatccatacccagtgcagaccaggacctgtcggagtaccggctcctggagcacgcttaaaacccaggaccagaagacggtccggaaggcagaatgcagggctatccactgtcccagaccacacgacttcgagaacggtgagtactggcctcgttctccatattataatgtgtccgacgagatttctttccactgttacgatggttacacccttaggggatctgcaaatagaacctgtcaagtgaacggcagatggtccggccaaacagcaatctgtgataacggtgccgggtattgttccaatcccggcatccctattggcaccagaaaggtggggtcccagtacaggctcgaggattccgtaacctaccactgttctagaggacttaccttgcgcggcagccagaggcgaacttgccaggaaggcgggtcatggagcggaacagaaccatcttgtcaggactcatttatgtacgacactccccaggaggtcgctgaggcgttcctaagttcattgacagaaaccatcgaaggagtggatgctgaggatggtcacggccctggcgagcagcaaaagagaaaaatcgtgttagacccgtctggctcaatgaacatctatctggttctggacggatctgactcgatcggagcctccaattttacaggggcgaagaagtgcctggtcaacctgatcgagaaggtggcttcttatggcgtgaagcccagatacgggcttgtgacttacgctacataccctaaaatttgggtaaaagtgtctgaggccgacagtagcaacgctgactgggtgacaaaacagctgaacgagattaattacgaggaccacaaactcaaatccggaaccaataccaagaaagctctccaggctgtctattccatgatgtcgtggccggatgacgttccacctgaaggatggaaccggactcgccatgtgattatcctgatgactgacggtctgcacaacatggggggcgacccgattaccgtgatagacgagattcgtgacttgctatacatagggaaagaccggaagaaccctagagaagattacttggacgtctacgtcttcggcgtagggcccctcgttaaccaggttaatatcaatgcgctggcgtccaagaaggacaacgaacagcacgtttttaaagtcaaggatatggagaatttagaagatgtcttctaccagatgatcgacgagtcccaaagtctgagcctgtgtggcatggtgtgggagcatagaaaaggcacagattatcacaagcagccatggcaagcaaagatatcagttatacgacccagcaaagggcatgagagctgcatgggcgccgtagtgtctgaatattttgtgctaactgccgcacactgcttcacagtggacgacaaagagcactctatcaaggtcagtgtaggaggagaaaagcgggatcttgagattgaggtcgtgctttttcacccaaattataacataaacggtaagaaggaagcagggatcccagagttctatgattacgatgtggcactgatcaaactgaagaacaaacttaagtacgggcagacaattcggcctatttgtctaccctgtacagaaggaaccacccgtgcactgaggctccctcctacgactacatgtcaacagcagaaagaggaactgctgccagcccaggacattaaggcactctttgttagtgaagaagaaaagaagttgacccgtaaagaggtttatattaaaaacggcgataagaaggggtcctgtgagcgggacgcccaatatgcacccggctatgataaagttaaagacatctcagaagtcgtgacacctaggtttctgtgtactggcggtgtgagtccctacgccgatcccaacacttgccggggtgactcgggcggccccctgattgttcacaaaaggagtcgatttatccaggtgggagttatatcttggggagtggtggacgtttgtaaaaaccagaaacggcagaagcaggttcctgcccacgctcgggatttccacattaacttgtttcaggtgctcccctggttgaaggaaaagcttcaggatgaggacctcggatttttatag

SEQ ID NO: 120146 - DNA, 435 bp, Artificial Sequence
  derived and/or modified sequence
atggggtcaaatctgagtccccagctatgcttgatgccgttcattctcgggctgttgtctggaggagttactacgacaccatggtccctcgcaaggccgcagggaagctgttcactagaaggtgtggaaatcaagggcggtagtttccgtctgcttcaagaaggccaggcattggagtacgtgtgcccatcaggtttctatccatacccagtccagaccagaacttgccgatctaccggcagttggagtacacttaaaacccaggaccagaaaacggttaggaaagcagagtgtcgtgcaattcactgtccccgcccacatgatttcgagaacggggaatactggcctcgctctccttactacaacgttagcgatgaaatcagttttcactgctatgacgggtacactttacgcggcagcgccaataggacatag

SEQ ID NO: 120147 - DNA, 3801 bp, Artificial Sequence
  derived and/or modified sequence
atgggaccactgatggtgctattctgcttactatttctctatcctgggcttgcagacagcgctccaagctgtcctcagaacgtcaacatttccggcgggacgtttacactcagccacggctgggctcccggaagcctgttgacttactcttgtccacagggactgtatccttcccctgcgtcaaggttgtgcaagtcaagcggtcaatggcagactccgggggcaaccagatcactctctaaagctgtttgtaagcctggtcactgcccaaaccccggcatcagcctgggcgcagtgaggaccggattccgatttggccatggtgataaggtacgctataggtgtagctctaacctggtcctcactggcagcagcgagcgtgagtgccagggaaacggcgtatggtccggtactgagcccatctgcaggcaaccatattcctatgatttccccgaggacgtggcaccagcgctgggaacctctttttcccacatgctcggagctacgaaccctacacagaaaacaaaggatcatgagaacggtacgggaactaacacttacgctgctctgaattctgtgtaccttatgatgaataatcagatgagactcttgggcatggagacaatggcttggcaggagatccggcacgccattattctcttaacagacggcaagtcgaacatggggggcagccccaagactgctgtagatcacatccgtgagatcctgaatatcaaccaaaaaaggaatgactacctggatatttacgctattggcgtcggaaagctagacgtggactggagagaacttaacgaactggggtcgaagaaagatggtgaaagacatgcatttattctccaagacaccaaggctttgcaccaggttttcgaacatatgcttgacgtaagcaagttgacggataccatctgcggggtgggaaatatgtccgctaatgctagtgatcaagagcgcacaccctggcatgtgactatcaagccaaaatcgcaagaaacttgccgaggcgcgttaatctctgaccagtgggtgctgaccgctgcccattgctttagagatggtaatgaccactcattgtggagggttaacgtgggcgaccccaagagtcagtggggaaaagagttcctgatcgaaaaggccgtgatttctccaggttttgacgtcttcgcaaagaaaaatcagggcattctcgaattctacggagatgacatcgctcttttgaagcttgctcaaaaggttaagatgtccactcacgctcggccaatctgtcttccatgtacgatggaggcaaatctggccctgcgaaggcctcagggaagcacctgccgagatcacgagaatgagctgctgaataagcaatctgtacccgcccacttcgtcgcactcaatggtagcaagctgaatatcaatctcaaaatgggtgttgagtggacctcctgtgctgaggtggttagtcaggagaagacaatgttccctaacctgacagacgttagagaagtagttacagatcagtttctttgctccgggacacaggaggatgagtccccttgcaaaggcgtgacaaccactccgtggtcgctggctcgtccccagggttcctgcagtctcgagggtgtggagataaagggcggctcgttccgcttgctgcaggaaggccaagccttagagtatgtgtgtcctagcgggttctatccataccccgttcaaactagaacctgcagaagtaccggatcctggagtacactcaagacccaggatcagaaaacagttcggaaagccgaatgtcgggctatccactgcccccgacctcacgactttgaaaacggagagtactggccccgctcaccttattacaacgtctctgatgaaatttcttttcactgttatgatggatatacgctacgaggcagtgcaaatcgaacatgtcaggtcaacgggagatggagtggccagacagcaatctgcgacaatggtgccggctactgttcaaatcccggaatcccaattggaacccgcaaagtgggatcacagtataggctcgaagactcagtcacgtatcactgtagcagaggcttgaccctgagaggctcccaaaggcgcacttgtcaggaaggaggctcatggtcaggaacggagccatcatgtcaagattcctttatgtacgatacgccgcaggaagtcgccgaggcttttttatcaagcctgactgagacgatcgagggagtggatgctgaggatgggcacggaccaggcgagcaacaaaagaggaaaatagtgcttgacccgtcagggtccatgaatatttacctggtgctggacggcagtgacagcattggcgccagtaatttcaccggcgcgaagaagtgtcttgttaacttaatcgaaaaagtagcatcctacggcgttaaacctcgttacggtttagtaacttatgccacctatccgaagatatgggttaaagttagcgaagccgacagcagcaacgcagactgggtcaccaaacagctgaacgagattaactatgaagatcataagcttaaaagcggtacgaacactaaaaaagctctacaggcagtgtattccatgatgtcctggccagacgacgtgcccccagaagggtggaaccggacccgccacgtgatcatccttatgacagatggattgcacaacatgggtggcgaccccatcaccgtgatcgacgaaatccgggacttgttatacattggtaaagaccgaaaaaacccccgggaggactacctggacgtttatgtgtttggggtcggacctctggttaaccaggttaatatcaacgccctcgcaagcaaaaaagacaacgagcagcatgtcttcaaggtaaaggatatggaaaacctggaggatgttttttaccagatgattgacgagtcccagtcgctgtctctttgcggaatggtgtgggagcatcgaaaggggacggattatcacaaacaaccgtggcaggcaaagatttctgtaattcggccgtcaaaaggccacgaatcttgtatgggggctgtcgtttcagagtactttgtcttgactgccgctcattgcttcacagtcgatgacaaagaacacagtattaaggtgagcgttggcggtgagaagagggacctcgaaattgaagtggtcctgtttcaccccaactataacattaatggcaaaaaggaagctggcattcctgagttctatgattacgatgtggctctgattaaactcaagaataagcttaagtatggccaaaccataaggcccatttgcctgccatgcacagaaggtactacacgcgccttgagactcccaccaaccaccacttgccagcagcagaaagaggaactgctcccagcccaggacatcaaggctctgttcgtctctgaggaagagaagaagttaacacgtaaagaggtttacataaaaaatggggacaaaaaaggctcctgcgaacgggacgcacaatatgcccccggatacgacaaggtgaaagatatcagcgaagtagtgacaccaagatttctatgtacgggcggtgtgtccccatacgctgatcctaacacgtgcagaggcgactccggtgggcccttaatcgttcacaaacgcagtaggtttattcaggtgggcgttatcagctggggcgtggtggacgtgtgtaagaaccaaaagagacagaaacaggtacctgcgcatgcaagggatttccatatcaatctgttccaggtgcttccgtggcttaaagagaagttgcaggacgaggatctgggctttttgtag

SEQ ID NO: 120148 - DNA, 3801 bp, Artificial Sequence
  derived and/or modified sequence
atgggaccactgatggtacttttttgcctgctgttcttgtaccccggcctcgcagattctgcccccagttgtcctcagaatgttaacatttctggaggtaccttcacactgtcccatggttgggcacctggtagcctgctcacctactcttgtcctcagggcttgtacccgtccccggcgtcccgtctctgcaagtcctcagggcaatggcaaacacccggagctacccgctccctcagtaaggccgtatgcaagcctggacactgtcccaacccgggtatatcattaggggccgttagaaccggattccggtttggtcacggggataaggtcagatacagatgcagttcaaacctcgtgttaacgggctcttctgagcgagagtgtcagggcaacggcgtttggtctggcacagagccaatctgtagacagccttattcttatgatttccctgaggacgtggcccccgcactggggacctcattctcccacatgctaggggccaccaaccccactcagaaaacaaaagaccacgaaaatggcaccggtacaaatacatatgctgctttaaattcagtttacttaatgatgaacaaccaaatgcgcctgcttgggatggaaacaatggcctggcaagagatccgacacgccatcatcctgctcacggatggcaagtcaaatatgggcggttctccaaagactgctgtggaccacattcgcgagatcctcaatatcaaccagaaaaggaatgactatcttgatatttacgccatcggcgtcggtaagttggacgttgactggagggagctcaatgaactcggatctaagaaggacggagaacggcacgctttcattctgcaggataccaaagctctgcaccaggtgtttgagcacatgcttgatgtgtcaaagctgaccgacactatatgtggggtggggaatatgagtgctaacgcctccgaccaagaacgcacaccttggcacgtgacgatcaagccgaaatcccaggaaacttgtagaggcgcactgatcagtgatcagtgggttttgaccgcagcacactgctttagagacggcaacgaccattctttgtggcgggttaatgtgggcgaccctaaaagccagtggggcaaggagttcttaatcgaaaaggcggtgatatcccctgggtttgacgtgtttgcaaaaaaaaatcagggcattctcgaattttatggagacgatatcgcgctgctgaagctcgcccaaaaggtcaagatgtccacccacgcgcggccaatatgtttaccatgtacgatggaggctaatctggccctgcggcgtcctcaggggagcacgtgcagagaccatgaaaacgagttgctgaacaagcagagtgtcccagcccactttgtggcattaaacgggagcaaactgaacattaaccttaagatgggtgtggagtggacgagctgcgccgaagtcgtatcccaagaaaagacgatgtttccaaatttgacagatgtgagggaggtggtaaccgatcagtttctgtgtagcggcacccaggaggacgaatccccctgtaagggggtgacaacaaccccttggagcctcgccaggccacagggctcttgtagtttggagggggtcgaaattaaggggggttcttttcggctcctgcaagagggccaggcgctcgaatacgtttgcccatcaggtttctacccgtaccccgtgcagacccgtacctgcagaagtacagggagctggagcactctcaagacacaggaccaaaagaccgtccggaaagccgaatgcagggcaatccactgcccacggccacacgactttgaaaacggcgaatattggccccgcagcccttactataacgtttccgacgagatctcctttcactgctacgatgggtataccctgaggggcagcgccaaccggacctgtcaggtgaatggtcggtggtctggtcagacggctatatgcgataacggcgccgggtattgcagtaacccaggcattcccatcggcactcggaaagttggttcccagtaccgtctggaggattccgtgacttaccattgcagtaggggcctgacacttcgtggatcccagcgacggacgtgccaagaaggaggatcatggtcaggaaccgagccctcttgtcaggattccttcatgtacgacacaccccaggaggtagcggaagcgttcttatccagtttaaccgaaacaattgagggagtggatgctgaagacggacacggccccggagaacaacagaaaagaaaaatcgtgctggacccctccggcagcatgaatatctacttggttttggacggttctgactccattggcgctagcaacttcaccggggcaaagaagtgtctagttaatctgattgagaaggtcgcaagttatggcgttaagccaagatacggcctcgtgacatacgccacgtatcccaagatttgggtgaaagttagcgaagctgattcatctaatgcagattgggtgaccaagcaacttaacgagatcaactacgaggaccacaaactgaaatcaggaaccaatactaagaaagcacttcaggccgtttattcaatgatgtcttggccggatgatgttccaccggaagggtggaaccgcacaaggcatgtgatcattctgatgacagacggactgcacaacatgggaggagatccaatcactgtcatcgatgaaatcagagatctcctgtacataggcaaagaccgcaaaaaccccagggaagactatttggatgtatacgtgttcggggtaggaccgctggtgaatcaagtgaatattaacgccctggcttcgaagaaggacaacgagcaacatgtgttcaaagtcaaagacatggagaatttagaggatgtgttttaccagatgattgatgagagccagagtcttagcttatgcggcatggtgtgggagcaccgcaagggaaccgattatcataagcagccctggcaggcaaaaatctccgtgattaggccaagtaagggccatgagtcctgcatgggcgctgtggtttccgaatactttgtccttaccgccgcccactgttttaccgtcgatgacaaagaacacagcatcaaagtatccgttggtggtgaaaaacgcgatctggagatagaagtggtgctattccaccccaattacaatattaatggaaaagaggaagctgggattcccgagttttacgactatgacgtagccttgattaaactcaagaacaaactcaagtatggacagaccatcagacctatatgtctgccctgcacggagggaactacaagggccttaaggctgccccctactactacatgtcagcagcagaaggaggaactccttccagcacaggatataaaggccctatttgtgagcgaggaggaaaagaaactaacaaggaaagaagtgtacataaaaaacggcgacaagaaaggatcctgtgagcgtgatgcacagtacgcgccaggttacgacaaggtgaaggacatctccgaggtggtcacgccaaggttcctgtgtaccggcggggtctccccttacgccgatccaaacacatgcaggggggattccgggggacccctcatcgttcataaacgcagccgcttcatccaggttggagtgatatcttggggcgtagtcgacgtgtgtaaaaatcagaagcggcagaaacaggttcctgcacacgcccgcgacttccacattaacctcttccaggtgctaccttggctgaaagagaaactccaggatgaggacctcggctttctgtag

SEQ ID NO: 120149 - DNA, 3801 bp, Artificial Sequence
  derived and/or modified sequence
atgggacctctcatggtgttgttttgtctgctgtttctttatcctggtctcgctgactccgcgccatcctgtccacagaatgtcaatattagcggaggaactttcacactgtctcatggatgggctccgggtagtttgctgacatacagttgtccacagggcttgtacccctcacccgcatcgaggctgtgcaagtcctccgggcagtggcagaccccgggggctacaaggtccctctccaaagccgtttgtaaacctgggcactgccccaaccccggaatcagtcttggcgcggtgcggacgggattcaggttcggacatggtgataaggtgcggtaccgttgttcctcaaaccttgtgttaactggatccagtgaacgtgagtgtcagggcaatggcgtgtggtctggtactgagccaatttgccggcaaccttactcatatgatttcccagaggacgtggctcctgctctcggcacctcattctcccacatgctaggcgcgacaaatccgacacagaagaccaaggaccacgagaacggaacaggtaccaatacatacgcagccctcaactctgtatatttaatgatgaacaatcagatgcgtcttctagggatggagacgatggcctggcaggagattcgacatgctatcatcctgctgacggacggaaagagcaacatgggcggttctcccaagacagcagtggaccacattcgcgaaattctcaatataaatcagaagcgcaatgattacctagatatatatgcgattggcgtcggaaaactggatgtagattggagggagctgaacgaactggggagcaagaaggatggggagagacacgcattcattctgcaggatactaaagctttgcatcaggtctttgagcatatgctggatgtgtccaaattgactgacactatatgcggagtaggcaacatgtcggccaacgcaagcgatcaagagcgaaccccctggcacgtgactatcaagccaaagagtcaggagacgtgccgcggggcattgatctcggatcagtgggtgctaacggccgcgcattgctttcgggatggtaacgatcattctctgtggagggtgaatgtcggcgacccaaagagtcagtgggggaaggaatttctcatcgagaaggccgtgatctctcctgggttcgacgtattcgcaaaaaagaaccaagggattcttgagttctatggagatgatatcgccctacttaagctagctcaaaaagtcaaaatgtccacccatgcccggcctatctgccttccttgtacaatggaggctaacctcgcactgcggcgcccccaggggtccacctgtagggaccacgagaacgagctcctcaacaagcagtccgtgcctgcacactttgttgctctgaatgggtcaaagctgaatatcaatctgaagatgggcgtagaatggacctcatgtgctgaggtcgtgagtcaagaaaagaccatgttccccaacttgaccgatgtgagagaagtcgttaccgatcaatttttatgcagtggcacacaggaggatgagagcccctgtaaaggagtgacaactaccccttggtccctggctaggccgcaggggtcctgttccctggagggagtggaaataaaaggaggctccttccggctcctgcaagagggccaggcactggaatacgtgtgtcccagcggcttctatccgtacccagtgcagactaggacttgcagatctactggctcctggtctaccttaaagactcaggaccagaagactgtgcgcaaagcggagtgccgagcaatacattgccctcgtcctcacgacttcgaaaacggcgaatactggccacggagcccctattacaatgtgagcgacgagatatcattccactgctacgacggctacaccctccgggggagcgctaatcgtacctgccaggtcaacggccggtggtctgggcagacagctatatgtgacaacggtgcagggtattgttccaatcccggaatccctataggaacaaggaaagtgggatctcagtatagattggaggattctgtgacctaccattgttccaggggactgactctgaggggttcacagcgcagaacttgccaggagggaggctcttggtctgggacggaaccttcgtgtcaagattcgtttatgtacgacaccccacaggaggtggctgaggctttcctctctagtcttacagaaaccatcgagggagtagacgccgaggatggccatggaccaggggaacagcagaagcggaaaatagtgctggacccttccggtagcatgaacatatatctcgtgcttgatggcagtgactctatcggcgcatcaaattttaccggagccaagaagtgcttggtgaatcttattgagaaagtggctagctacggagttaagcctcggtacgggctcgtgacctacgccacttaccccaaaatttgggtcaaagtatctgaagccgactctagcaatgcagattgggtcactaaacagctcaatgaaattaactatgaggaccacaagctgaagagcgggacaaatacgaagaaggccctgcaggctgtctactccatgatgtcatggccggacgatgtaccacctgagggctggaatagaacaagacatgtcatcatcctgatgacagacggtttgcataacatgggaggcgaccccataactgtaattgacgaaattcgtgacttgttatacatcggtaaggaccgcaaaaacccgcgcgaggactaccttgacgtttatgtctttggagtgggacccctcgtgaaccaggttaacattaacgccctcgcgtccaaaaaagacaatgagcaacatgtctttaaagtcaaagacatggaaaatcttgaagacgttttttaccagatgattgacgaatctcagagtctctccctgtgcggaatggtgtgggagcatagaaaaggaacggactaccacaaacagccctggcaggccaaaatatctgttataaggccatctaaaggtcacgaaagctgcatgggcgcagtggtatctgaatacttcgtgctaacagctgcccactgttttaccgttgacgataaagagcacagcataaaagtatctgtggggggcgaaaagcgcgacctggaaatcgaggttgttctctttcacccgaactacaacataaatggtaagaaagaagcagggattcctgaattctatgactatgacgtagcactgatcaagttgaagaacaagttgaagtacggccaaacaattcgaccaatttgccttccgtgcacggaagggacaacaagggctcttcggctgcccccaactactacttgtcagcagcagaaggaagagttgttgccagcccaggatatcaaggccctttttgtttcagaggaggagaagaaactgacccggaaagaggtttacattaaaaatggagacaaaaaaggtagttgtgagagggacgcccagtatgcccccggctacgacaaggtaaaagacatttcggaggtggttacaccccggttcctttgtaccgggggtgtgagcccatatgccgatccaaacacctgtcgcggcgactccgggggtccattgattgtgcataaaaggtctcgcttcatccaggtaggagtaatatcttggggtgtcgtggatgtgtgcaaaaaccagaaacgtcagaaacaggtgcctgcccacgctcgggatttccacattaatctgtttcaggtgttgccatggctgaaagagaaattacaggatgaggatctgggctttctctag

SEQ ID NO: 120150 - DNA, 3801 bp, Artificial Sequence
  derived and/or modified sequence
atggggcctttaatggttctcttctgcctgctttttctgtaccctggtctggctgactctgcaccctcctgccctcaaaatgtcaatattagtggaggaacattcaccctgagccacggttgggccccgggcagcctcctgacctattcctgcccccagggcctgtatccaagccccgccagtcgtctgtgcaagagctctgggcagtggcaaactccgggagccacccgatccctgtcaaaagccgtgtgcaagcccggtcattgcccaaatcccggtatcagcctgggcgccgtccgcacgggctttcgctttggccacggagacaaagttaggtaccgctgctcttccaatttggtgctgaccggaagcagcgagcgagagtgtcagggcaatggcgtgtggagcggtactgagcccatctgcagacagccttactcatacgactttcctgaagacgtcgccccagcacttggaacgtctttctctcatatgcttggggcgaccaatccaacgcaaaagaccaaggaccatgagaatggcacaggaacaaacacatatgctgcactaaacagcgtgtacttgatgatgaataaccagatgaggctactgggaatggagactatggcgtggcaagagattcggcacgccattatcttgcttaccgacggcaagtctaatatggggggctcccccaagacagccgtggatcacatcagggaaattctcaatatcaaccagaagagaaatgattacttagatatctacgcgatcggagtcgggaagcttgacgttgattggagagagctcaacgaattggggtcaaaaaaggacggggaaagacacgcgttcattttacaagatacaaaagcgctacaccaagtcttcgaacacatgttagacgtttctaagcttacggatactatttgtggagtgggaaacatgtctgctaatgcttctgaccaagagcgaactccatggcacgtgactatcaaacctaaatcccaagagacgtgcaggggagccctgatttcagaccagtgggtattaacagccgctcactgtttccgggatgggaatgaccacagcctttggcgcgtgaatgtgggagatccgaaatctcagtgggggaaggagttcttaatagaaaaggcggtgatcagtcccggcttcgatgtatttgcgaaaaaaaatcaaggaatcctcgagttctacggcgatgatatcgctctcctcaaactcgctcaaaaggtaaagatgagcacccacgcccgccccatatgtctgccttgtacaatggaagccaatctcgccctacggcgtccacagggtagcacttgccgagatcacgaaaatgaactgctgaacaagcagtctgtccccgcgcatttcgtcgccctgaacgggagcaaactaaacataaacctgaaaatgggagtcgagtggactagctgtgcggaagtggtaagccaggaaaagaccatgttcccaaacctaactgatgttagagaggtggtgacggaccagtttctgtgctctgggacacaagaggacgaaagcccttgtaagggcgtaaccaccaccccttggagcctggcccgcccacaggggtcctgtagcctggagggcgtagagatcaaaggcggaagtttccgcctgttgcaggagggacaggctctggagtacgtctgcccaagcggcttttatccctatccagttcagactcgcacatgcagaagcaccgggagctggtcaacccttaaaactcaggatcagaagaccgttcggaaggccgaatgtcgcgccatccactgcccacggcctcacgactttgaaaacggggagtactggccccgcagcccttattataacgtgagtgacgaaatttctttccactgctacgatgggtataccttgcgaggaagtgcaaaccgcacatgccaggtcaacggtaggtggagtggccagactgccatctgtgacaatggggcaggatattgtagtaaccctggcatccccattggaacgcggaaggtggggtctcagtaccggctggaggattcggtaacctatcactgctccaggggcttaaccctgagggggtctcagcgtagaacatgtcaagagggaggtagctggtcaggcactgagccatcatgccaggatagtttcatgtatgatactccacaggaggtggcagaagcttttttgagctctctgacagaaactatcgagggcgtggacgccgaggatggccatggccccggggaacagcagaaaagaaaaatcgtcctagatccgtcggggtccatgaatatttacctggttctcgatgggagcgattccataggcgcctcgaacttcactggcgctaagaagtgccttgtgaacctgattgagaaggtcgcttcctacggggtgaagcctaggtacggactggtaacctacgccacttatcccaagatctgggtcaaagtatccgaagcagactcctccaatgccgattgggttaccaaacagctcaacgagataaattatgaagaccataagctaaaatccgggactaatacgaaaaaggccttgcaggctgtgtactccatgatgtcatggccggacgatgtgcccccagagggctggaacagaacacgccacgtgatcattctgatgacagatggtctgcacaatatgggcggcgaccctatcactgttatcgatgaaatcagagaccttttgtatatcggcaaggatagaaaaaacccgagggaggactacctcgacgtttacgtgttcggcgtgggtcccctggtgaaccaagtgaacatcaacgcccttgctagcaagaaagacaacgaacagcacgtttttaaagtgaaagacatggagaatctggaggatgttttctaccagatgatcgacgagagccagagtctgtccctgtgtgggatggtctgggaacacaggaagggaacagactatcataagcaaccctggcaggctaagatcagcgtgattcgtccaagtaagggtcacgaatcgtgcatgggagcagtcgtcagcgaatacttcgtactaaccgcagcccactgcttcacggttgacgacaaagagcacagcatcaaagtgagcgtcggcggggagaaacgcgacttagagatcgaggtcgtgcttttccacccaaactacaacatcaacggaaaaaaggaggcagggattcccgagttctacgactacgatgtcgctctgattaagcttaaaaacaaactgaaatacgggcaaacaatcagacccatctgcctaccttgtaccgaaggtacaacaagggccctccgcctgccaccaaccaccacctgtcaacagcagaaagaggagttgctcccagcccaggatatcaaagcgttattcgtctcagaagaggagaagaaacttacccgtaaggaggtctatataaaaaacggggacaaaaaaggcagttgcgagagggatgcccagtacgcaccagggtatgataaggtaaaggatatttctgaggttgttacaccacgattcctctgcaccggtggggtgtccccctatgccgaccccaatacttgcagaggcgactctgggggacctctaatagtgcataagagaagtagattcattcaggtgggggtcatcagctggggggtcgtggatgtgtgtaagaaccagaagcggcagaaacaggtgccggcacacgcgagagactttcacatcaatcttttccaggtcctgccatggctgaaagaaaagttacaggatgaggacctggggttcttatag

SEQ ID NO: 120151 - DNA, 3801 bp, Artificial Sequence
  derived and/or modified sequence
atgggacccctgatggtcctcttttgtttgctgtttctctatccaggcctcgccgattcagccccaagttgcccccagaacgtcaacatttctggtggcaccttcacccttagccacggctgggcacctggttctctgctaacctactcttgccctcaggggttatacccctcgccggcctctagactctgtaagtcaagcgggcaatggcagacgcctggcgccacaaggtccctatcaaaggcggtttgcaaacccgggcattgccccaaccctggaattagccttggtgccgtgcggaccggctttcgatttggacatggcgataaagtgcgctacagatgttcctcaaatctcgtgctgactggctcaagcgagagagagtgccagggcaacggggtctggtctggaaccgagcccatctgcagacagccctatagctacgactttccggaggatgtcgcccccgccctgggtacctcattctctcacatgttaggagccactaatccaactcagaagacaaaggaccatgagaatggcactggaactaacacatacgccgcccttaactctgtttatctgatgatgaacaatcagatgcggctgctggggatggagacaatggcttggcaggaaatcagacacgctattattcttctgaccgatggtaaaagcaacatgggtgggagtcccaagaccgcagtagatcacatccgcgagatcctgaatatcaatcagaaacggaacgactacctagatatatatgccattggggttgggaagctggatgtggattggagagaactcaacgagctcggaagcaaaaaggacggggagaggcatgccttcatccttcaggacaccaaagctctgcaccaggtgtttgaacacatgctcgacgtctccaaactcactgataccatctgcggcgtgggaaacatgagtgccaacgccagcgaccaggagcggaccccctggcacgttaccataaagccaaagagtcaagagacctgtaggggcgccctgatctccgatcagtgggtgctaactgctgctcattgcttccgggatggcaatgaccatagcctttggagggttaacgtcggcgaccctaagagtcaatggggtaaggagtttctcatcgagaaagccgtcatttctccagggttcgacgtgttcgctaagaagaaccagggcattctggaattttacggggacgacattgccctcctgaaactggcacaaaaagttaagatgtctacccacgcaagaccaatttgccttccctgcacaatggaggccaatctggctctccggcgcccgcaaggaagcacctgcagagaccacgagaatgagctgctgaataaacaatcagtgcctgcgcattttgttgccttgaatggtagcaagctcaacatcaacctgaagatgggtgtggagtggacatcatgtgccgaggtcgtttctcaggagaaaacaatgttccccaacttaaccgatgtacgggaggtcgtgaccgaccagttcctttgctcggggactcaagaggacgagtcaccttgtaaaggggtcactaccaccccatggtccctggctaggccacagggctcctgttccctggaaggcgtggagattaagggcggcagctttagactcctgcaggagggccaagcccttgagtatgtatgcccatctggcttttacccatatccagtgcaaaccagaacatgtagatccacagggagttggtctactctgaaaacgcaagaccaaaagactgttagaaaagctgaatgccgcgctatacactgcccccgcccccatgatttcgaaaatggggagtattggcctcgatcgccctattataatgtcagcgatgaaatcagcttccactgttacgatggttacaccttgagaggctcagcgaatcgcacctgtcaggtgaacgggcggtggagtggacagaccgctatctgcgacaacggggccggctactgtagcaatcccggaattcctatcgggacccggaaggtgggcagtcaataccggctggaagattctgttacttatcactgttccagaggtctgaccttaagaggtagccagagacgcacctgtcaggaggggggcagctggtctggaacggagccctcgtgtcaggactcctttatgtatgataccccccaggaggtggctgaagcttttctgagtagccttacagaaacaattgaaggcgtggacgccgaagatgggcacggccctggggaacagcagaagaggaagattgtcttggatccctccgggagcatgaacatctacctggtactcgacgggagcgactccattggcgcgagtaacttcaccggtgctaagaagtgtctcgttaacctcattgagaaggttgcatcctatggcgtaaaacccaggtatggactggtgacttatgccacgtatccaaagatctgggtcaaggttagtgaagctgatagctctaatgccgactgggtgacaaaacaacttaacgagataaactatgaggaccacaagttgaagtctggtaccaataccaagaaggccttacaagctgtatacagcatgatgtcttggccagacgacgttccaccagagggatggaacagaacaagacatgtgatcatattgatgactgacggattacacaatatgggcggggatcccattaccgtcattgatgaaatccgggatctcctctacatcgggaaagacaggaagaacccacgagaggattacttggatgtatacgtattcggagtcggccccctggtgaaccaggtgaatattaacgccctggcgtccaaaaaggataatgagcagcacgtcttcaaggttaaagacatggaaaatctcgaagacgtcttttaccagatgattgacgagtcccagagcctgtccctgtgcggcatggtttgggaacacaggaagggcacagattaccacaagcaaccatggcaggcaaagatctctgttatcagaccatcaaagggacacgagtcctgtatgggagcagtagtgagcgagtattttgttctgactgccgcccactgctttacggtggacgacaaggagcatagtattaaagtcagtgttggaggagagaaaagggatctggagatagaggtcgtgctgttccaccctaactataatatcaacggcaagaaagaggcgggcattccagaattttacgactacgacgtggccctcatcaagctgaaaaacaagttgaagtacggccagaccattcggcctatctgcctgccatgtactgagggaactacccgggccttgagactccctccgactactacttgtcaacagcagaaggaggaactcctgccagcgcaggacatcaaggccttgtttgtgtccgaggaagaaaagaagcttactaggaaggaagtctacatcaagaatggcgacaagaagggcagctgcgaacgggacgcccagtacgccccaggctatgataaggtgaaggacatttctgaggtcgtaacccccagattcctttgcaccggtggagtgtctccatatgctgatccgaatacttgtcggggcgatagcggaggtcccttgatcgtacacaaaaggagcaggtttatccaggtgggagtcatttcctggggagttgtcgacgtgtgcaaaaaccaaaagaggcagaaacaggtcccagcccatgctcgggattttcatatcaacctgtttcaagtattaccctggctcaaggagaaattacaggatgaagacctgggttttctctag

SEQ ID NO: 120152 - DNA, 3801 bp, Artificial Sequence
  derived and/or modified sequence
atgggacctctaatggtcctcttctgtctgctgtttctctatcccggcctcgcagattctgccccctcctgtcctcagaacgttaatattagtgggggcacttttacactgtcccacggctgggccccaggctcactcctgacttatagttgtcctcaaggactgtatccttcccccgcctctaggttgtgcaaatcaagtggtcagtggcagactccaggggccactagaagcctgtcgaaagcagtctgtaaaccaggacattgccccaaccctgggatctcgctgggagcggtccgcacaggattccgattcggacatggagacaaggtccggtataggtgtagcagcaatctggtgttaacaggatcgtctgagagggaatgtcaaggaaatggtgtctggagtggcacggagccgatttgccgacaaccttactcgtatgatttcccagaggacgtggcgccagccctgggcacatccttctcacacatgctaggcgctacgaatccaacccagaaaaccaaagaccacgaaaatggcacaggtaccaatacgtatgcggctttgaattccgtgtatttaatgatgaacaaccagatgaggttgttaggcatggagaccatggcatggcaggagatccgccatgctataatcctgcttacagatggcaagtcgaatatgggcggctctccaaagaccgccgtggatcatatcagagaaattctgaacataaatcagaagcgaaacgactacctcgatatatacgcaataggcgtggggaaactcgatgtggactggcgcgagctgaacgaattgggctcaaagaaggacggcgagcgccacgcctttatactgcaagacacaaaagctctgcaccaggtgtttgaacacatgcttgatgtttccaagctgacagatactatctgcggggtgggcaacatgtctgccaacgcgagcgaccaggagaggaccccgtggcatgtgacgataaaacctaaatcacaggaaacctgccggggagcactcatctcagatcagtgggtgctaactgctgcacactgcttcagggacggaaacgaccattcattatggcgcgtcaacgtcggggatcccaagagccagtgggggaaggagttcctgattgagaaagctgtaatctctcccggtttcgacgtcttcgctaaaaagaatcaggggatactcgagttttacggcgacgatatagctttgttgaagctagcccaaaaggtcaagatgtctacacacgccaggccaatttgtctgccttgtactatggaagccaacctggcgcttcgcagaccacagggctctacatgccgggatcacgaaaatgagctacttaacaagcagagcgtaccggcgcattttgtggctctgaatggatctaaactgaacataaacctgaagatgggggttgaatggacaagttgcgcagaggtggtgtcccaggaaaaaactatgtttcccaacttaaccgatgtgagagaggtggtgaccgaccagttcctgtgtagtggcacgcaggaagacgagtccccttgcaagggggtaaccacaacaccttggtcactcgccaggccacagggcagttgctcactcgagggagtggagattaaggggggaagtttccgacttctgcaggagggacaggccctggaatacgtttgccccagtggtttctatccgtaccctgtgcagactcggacatgtcggtcaactggcagctggagcacactcaaaacgcaagatcaaaagaccgttcgcaaggcagaatgcagggctattcattgccccagacctcacgatttcgagaacggcgagtattggcccaggtctccatactacaacgtgtccgacgagatttcattccactgttacgatggctacacccttaggggatctgccaacaggacttgccaggtcaatggaagatggtctggccagacagccatttgtgacaacggcgccggctactgcagcaatcccggaatacccatagggacgaggaaggttgggagtcagtacagattggaagacagcgtgacttaccactgttcaagaggtctgactcttaggggcagccagcgccgtacatgtcaagagggaggatcatggtcaggaacagagccctcatgtcaggactcattcatgtatgatacgccccaagaagtggctgaagccttcctgtcctcactgactgagacgattgagggcgtggacgctgaagacgggcatggccctggagagcagcaaaagcggaagatcgtgctggaccccagtggcagtatgaatatctatctagtactcgacgggagcgacagtatcggggcatcaaatttcactggtgccaagaagtgcttggtgaacctgatagagaaagtggctagctacggagtgaagcctaggtatggattggttacatacgcaacctaccccaagatctgggttaaggtgtctgaggccgactcctcaaacgccgactgggttaccaaacagctgaatgagataaactatgaggaccacaagctcaagtctggcacaaatactaaaaaggctctgcaggcagtgtacagcatgatgtcctggcccgatgacgtccccccagaggggtggaaccggacccgccatgtgatcatcctgatgactgacggcctgcataatatgggcggggatcctatcaccgtcatcgatgagatacgcgatcttctttatatcggaaaggacagaaaaaatcccagggaggattatctggatgtctacgtgtttggagtgggccctctggtcaatcaagtgaacatcaatgccctagccagcaagaaggataacgagcagcacgttttcaaggtaaaagacatggagaatctcgaggacgtgttttaccagatgattgatgaaagccaatcactgtcactctgtggaatggtctgggagcaccggaagggcaccgactatcacaaacagccctggcaagctaaaatctcagtgatccgcccttccaaaggacacgagagctgcatgggcgctgttgtgagcgagtatttcgtgctgacagctgcacactgtttcacagtcgatgataaggaacattccattaaagtatccgtgggaggggagaagcgcgatctcgaaattgaagtcgtgttattccacccaaactataacatcaacggcaaaaaggaagccggcatcccagagttttatgattacgacgttgcactgataaaactgaaaaacaaactcaaatatggacagaccatccggcccatctgcctcccctgcacggagggcactactcgagcacttcgcctaccacccaccactacttgccaacagcaaaaagaggagctcctgcctgctcaggatattaaggccctcttcgtgtcggaggaggaaaaaaagctgacccgtaaagaggtctatataaaaaatggggataaaaagggttcctgcgaacgcgacgctcagtatgctccagggtacgacaaggtcaaggatatctctgaagtagtgacacctaggtttttgtgtaccgggggcgtatccccgtatgccgaccccaatacctgccgaggagacagcggcggccccctcatagtgcataagagatctcggtttatccaagtaggtgtgatttcttggggggtggtcgacgtatgcaagaaccagaaaaggcagaagcaggttcctgctcatgcaagagactttcacatcaatttgtttcaagtgctcccctggctgaaagaaaaactgcaagacgaggacctcgggttcctttag

SEQ ID NO: 120153 - DNA, 1770 bp, Artificial Sequence
  derived and/or modified sequence
atgggcagcaacctgagcccccagctgtgcctgatgcccttcatcctgggcctgctgagcggcggcgtgaccaccaccccctggagcctggcccagccccagggcagctgcagcctggagggcgtggagatcaagggcggcagcttccggctgctgcaggagggccaggccctggagtatgtgtgccccagcggcttctacccctaccctgtgcagaccaggacctgccgcagcacaggctcctggagcaccctgaagacccaggaccagaagacagtgaggaaggcagaatgtcgggccatccactgcccccggccccatgactttgaaaatggagagtactggcccaggagcccctactacaacgtgtctgatgagatctccttccactgctatgatggctacaccctgcggggcagcgccaacagaacctgccaggtgaatggccgctggagcggccagacagccatctgtgacaacggggccggctactgcagcaaccctggcatccccatcggcaccaggaaggtgggcagccagtaccgcctggaggacagcgtgacctaccactgcagccggggcctgaccctgcggggcagccagaggaggacctgccaggagggcggctcctggagcggcacagagcccagctgccaggacagcttcatgtatgacaccccccaggaggtggccgaggccttcctgagcagcctgacagagaccatcgagggcgtggatgctgaagatggccacggccctggagagcagcagaagaggaagatcgtgctggaccccagcggctccatgaacatctacctggtgctggatggcagtgacagcattggagccagcaacttcaccggggccaagaagtgcctggtgaacctgattgagaaggtggccagctatggagtgaagcccaggtatggcctggtgacctacgccacctaccccaagatctgggtgaaggtgtctgaggccgacagcagcaatgctgactgggtgaccaagcagctgaatgagatcaactatgaggaccacaagctgaagagcggcaccaacaccaagaaggccctgcaggccgtgtacagcatgatgtcctggccagatgatgtgcccccagagggctggaacagaaccaggcatgtgatcatcctgatgacagatggcctgcacaacatgggcggggaccccatcaccgtgattgatgagatccgggacctgctgtacatcggcaaggacaggaagaacccccgggaggactacctggatgtgtatgtgtttggagtgggccccctggtgaaccaggtgaacatcaatgccctggccagcaagaaggacaatgagcagcacgtgttcaaggtgaaggacatggagaacctggaggatgtgttctaccagatgattgatgagagccagagcctgagcctgtgtggcatggtgtgggagcacaggaagggcacagactaccacaagcagccctggcaggccaagatcagcgtcatccggcccagcaagggccacgagagctgcatgggcgctgtggtgtctgagtactttgtgctgacagctgcccactgcttcaccgtggatgacaaggagcacagcatcaaggtgtctgtgggcggggagaagagggacctggagattgaggtggtgctcttccaccccaactacaacatcaacgggaagaaggaggccggcatccctgagttctatgactatgatgtggccctgatcaagctgaagaacaagctgaagtatggatag

SEQ ID NO: 120154 - DNA, 2295 bp, Artificial Sequence
  derived and/or modified sequence
atgggcagcaacctgagcccccagctgtgcctgatgcccttcatcctgggcctgctgagcggcggcgtgaccaccaccccctggagcctggcccggccccagggcagctgcagcctggagggcgtggagatcaagggcggcagcttccggctgctgcaggagggccaggccctggagtatgtgtgccccagcggcttctacccctaccctgtgcagaccaggacctgccgcagcacaggctcctggagcaccctgaagacccaggaccagaagacagtgaggaaggcagaatgtcgggccatccactgcccccggccccatgactttgaaaatggagagtactggcccaggagcccctactacaacgtgtctgatgagatctccttccactgctatgatggctacaccctgcggggcagcgccaacagaacctgccaggtgaatggccgctggagcggccagacagccatctgtgacaacggggccggctactgcagcaaccctggcatccccatcggcaccaggaaggtgggcagccagtaccgcctggaggacagcgtgacctaccactgcagccggggcctgaccctgcggggcagccagaggaggacctgccaggagggcggctcctggagcggcacagagcccagctgccaggacagcttcatgtatgacaccccccaggaggtggccgaggccttcctgagcagcctgacagagaccatcgagggcgtggatgctgaagatggccacggccctggagagcagcagaagaggaagatcgtgctggaccccagcggctccatgaacatctacctggtgctggatggcagtgacagcattggagccagcaacttcaccggggccaagaagtgcctggtgaacctgattgagaaggtggccagctatggagtgaagcccaggtatggcctggtgacctacgccacctaccccaagatctgggtgaaggtgtctgaggccgacagcagcaatgctgactgggtgaccaagcagctgaatgagatcaactatgaggaccacaagctgaagagcggcaccaacaccaagaaggccctgcaggccgtgtacagcatgatgtcctggccagatgatgtgcccccagagggctggaacagaaccaggcatgtgatcatcctgatgacagatggcctgcacaacatgggcggggaccccatcaccgtgattgatgagatccgggacctgctgtacatcggcaaggacaggaagaacccccgggaggactacctggatgtgtatgtgtttggagtgggccccctggtgaaccaggtgaacatcaatgccctggccagcaagaaggacaatgagcagcacgtgttcaaggtgaaggacatggagaacctggaggatgtgttctaccagatgattgatgagagccagagcctgagcctgtgtggcatggtgtgggagcacaggaagggcacagactaccacaagcagccctggcaggccaagatcagcgtcatccggcccagcaagggccacgagagctgcatgggcgctgtggtgtctgagtactttgtgctgacagctgcccactgcttcaccgtggatgacaaggagcacagcatcaaggtgtctgtgggcggggagaagagggacctggagattgaggtggtgctcttccaccccaactacaacatcaacgggaaggaggaggccggcatccctgagttctatgactatgatgtggccctgatcaagctgaagaacaagctgaagtatggccagaccatccggcccatctgcctgccctgcacagagggcaccacccgggccctgcggctgccccccaccaccacctgccagcagcagaaggaggagctgctgcctgcccaggacatcaaggccctgtttgtgtctgaggaggagaagaagctgaccaggaaggaggtgtacatcaagaatggagacaagaagggcagctgtgaaagagatgcccagtatgcccctggctatgacaaggtgaaggacatcagcgaggtggtgaccccccgcttcctgtgcacaggaggagtgagcccctatgctgaccccaacacctgccgcggggacagcggcggccccctcatcgtgcacaagaggagccgcttcatccaggtgggcgtcatctcctggggcgtggtggatgtgtgcaagaaccagaagaggcagaagcaggtgcctgcccacgcccgggacttccacatcaacctcttccaggtgctgccctggctgaaggagaagctgcaggatgaggacctgggcttcctgtag

SEQ ID NO: 120155 - DNA, 2295 bp, Artificial Sequence
  derived and/or modified sequence
atgggcagcaacctgagcccccagctgtgcctgatgcccttcatcctgggcctgctgagcggcggcgtgaccaccaccccctggagcctggcccggccccagggcagctgcagcctggagggcgtggagatcaagggcggcagcttccggctgctgcaggagggccaggccctggagtatgtgtgccccagcggcttctacccctaccctgtgcagaccaggacctgccgcagcacaggctcctggagcaccctgaagacccaggaccagaagacagtgaggaaggcagaatgtcgggccatccactgcccccggccccatgactttgaaaatggagagtactggcccaggagcccctactacaacgtgtctgatgagatctccttccactgctatgatggctacaccctgcggggcagcgccaacagaacctgccaggtgaatggccgctggagcggccagacagccatctgtgacaacggggccggctactgcagcaaccctggcatccccatcggcaccaggaaggtgggcagccagtaccgcctggaggacagcgtgacctaccactgcagccggggcctgaccctgcggggcagccagaggaggacctgccaggagggcggctcctggagcggcacagagcccagctgccaggacagcttcatgtatgacaccccccaggaggtggccgaggccttcctgagcagcctgacagagaccatcgagggcgtggatgctgaagatggccacggccctggagagcagcagaagaggaagatcgtgctggaccccagcggctccatgaacatctacctggtgctggatggcagtgacagcattggagccagcaacttcaccggggccaagaagtgcctggtgaacctgattgagaaggtggccagctatggagtgaagcccaggtatggcctggtgacctacgccacctaccccaagatctgggtgaaggtgtctgaggccgacagcagcaatgctgactgggtgaccaagcagctgaatgagatcaactatgaggaccacaagctgaagagcggcaccaacaccaagaaggccctgcaggccgtgtacagcatgatgtcctggccagatgatgtgcccccagagggctggaacagaaccaggcatgtgatcatcctgatgacagatggcctgcacaacatgggcggggaccccatcaccgtgattgatgagatccgggacctgctgtacatcggcaaggacaggaagaacccccgggaggactacctggatgtgtatgtgtttggagtgggccccctggtgaaccaggtgaacatcaatgccctggccagcaagaaggacaatgagcagcacgtgttcaaggtgaaggacatggagaacctggaggatgtgttctaccagatgattgatgagagccagagcctgagcctgtgtggcatggtgtgggagcacaggaagggcacagactaccacaagcagccctggcaggccaagatcagcgtcatccggcccagcaagggccacgagagctgcatgggcgctgtggtgtctgagtactttgtgctgacagctgcccactgcttcaccgtggatgacaaggagcacagcatcaaggtgtctgtgggcggggagaagagggacctggagattgaggtggtgctcttccaccccaactacaacatcaacgggaagaaggaggccggcatccctgagttctatgactatgatgtggccctgatcaagctgaagaacaagctgaagtatggccagaccatccggcccatctgcctgccctgcacagagggcaccacccgggccctgcggctgccccccaccaccacctgccagcagcagaaggaggagctgctgcctgcccaggacatcaaggccctgtttgtgtctgaggaggagaagaagctgaccaggaaggaggtgtacatcaagaatggagacaagaagggcagctgtgaaagagatgcccagtatgcccctggctatgacaaggtgaaggacatcagcgaggtggtgaccccccgcttcctgtgcacaggaggagtgagcccctatgctgaccccaacacctgccgcggggacagcggcggccccctcatcgtgcacaagaggagccgcttcatccaggtgggcgtcatctcctggggcgtggtggatgtgtgcaagaaccagaagaggcagaagcaggtgcctgcccacgcccgggacttccacatcaacctcttccaggtgctgccctggctgaaggagaagctgcaggatgaggacctgggcttcctgtag

SEQ ID NO: 120156 - DNA, 435 bp, Artificial Sequence
  derived and/or modified sequence
atgggcagcaacctgagcccccagctgtgcctgatgcccttcatcctgggcctgctgagcggcggcgtgaccaccaccccctggagcctggcccggccccagggcagctgcagcctggagggcgtggagatcaagggcggcagcttccggctgctgcaggagggccaggccctggagtatgtgtgccccagcggcttctacccctaccctgtgcagaccaggacctgccgcagcacaggctcctggagcaccctgaagacccaggaccagaagacagtgaggaaggcagaatgtcgggccatccactgcccccggccccatgactttgaaaatggagagtactggcccaggagcccctactacaacgtgtctgatgagatctccttccactgctatgatggctacaccctgcggggcagcgccaacagaacatag

SEQ ID NO: 120157 - DNA, 3801 bp, Artificial Sequence
  derived and/or modified sequence
atgggccccctgatggtgctcttctgcctgctcttcctgtacccaggcctggccgacagcgcccccagctgcccccagaatgtgaacatcagcggcggcaccttcaccctgagccacggctgggcccctggcagcctgctgacctacagctgcccccagggcctgtaccccagccctgccagccggctgtgcaagagcagcggccagtggcagacccctggggccaccaggagcctgagcaaggctgtgtgcaagccaggccactgccccaaccctggcatcagcctgggcgctgtgaggacaggcttccgctttggacatggagacaaggtgcgctaccgctgcagcagcaacctggtgctgaccggcagcagcgagcgggagtgccagggcaatggagtgtggagcggcacagagcccatctgccggcagccctacagctatgacttcccagaagatgtggccccagccctgggcaccagcttcagccacatgctgggcgccaccaaccccacccagaagaccaaggaccatgaaaatggcaccggcaccaacacctacgccgccctgaacagcgtgtacctgatgatgaacaaccagatgaggctgctgggcatggagaccatggcctggcaggagatcagacatgccatcatcctgctgacagatggcaagagcaacatgggcggcagccccaagacagctgtggaccacatccgggagatcctgaacatcaaccagaagagaaatgactacctggacatctatgccatcggcgtgggcaagctggatgtggactggagggagctgaatgagctgggcagcaagaaggatggagagagacatgccttcatcctgcaggacaccaaggccctgcaccaggtgtttgagcacatgctggatgtgtccaagctgacagacaccatctgtggggtgggcaacatgtctgccaatgccagtgaccaggagaggaccccctggcacgtgaccatcaagcccaagagccaggagacctgccgcggggccctgatcagtgaccagtgggtgctgacagctgcccactgcttcagagatggaaatgaccacagcctgtggagggtgaatgtgggggaccccaagagccagtggggcaaggagttcctgattgagaaggctgtgatcagccctggctttgatgtgtttgccaagaagaaccagggcatcctggagttctatggagatgacatcgccctgctgaagctggcccagaaggtgaagatgagcacccacgcccggcccatctgcctgccctgcaccatggaggccaacctggccctgcggcggccccagggcagcacctgccgggaccatgaaaatgagctgctgaacaagcagagcgtgcctgcccactttgtggccctgaatggcagcaagctgaacatcaacctgaagatgggcgtggagtggaccagctgtgccgaggtggtgtcccaggagaagaccatgttccccaacctgacagatgtgcgggaggtggtgacagaccagttcctgtgcagcggcacccaggaggatgagagcccctgcaagggcgtgaccaccaccccctggagcctggcccggccccagggcagctgcagcctggagggcgtggagatcaagggcggcagcttccggctgctgcaggagggccaggccctggagtatgtgtgccccagcggcttctacccctaccctgtgcagaccaggacctgccgcagcacaggctcctggagcaccctgaagacccaggaccagaagacagtgaggaaggcagaatgtcgggccatccactgcccccggccccatgactttgaaaatggagagtactggcccaggagcccctactacaacgtgtctgatgagatctccttccactgctatgatggctacaccctgcggggcagcgccaacagaacctgccaggtgaatggccgctggagcggccagacagccatctgtgacaacggggccggctactgcagcaaccctggcatccccatcggcaccaggaaggtgggcagccagtaccgcctggaggacagcgtgacctaccactgcagccggggcctgaccctgcggggcagccagaggaggacctgccaggagggcggctcctggagcggcacagagcccagctgccaggacagcttcatgtatgacaccccccaggaggtggccgaggccttcctgagcagcctgacagagaccatcgagggcgtggatgctgaagatggccacggccctggagagcagcagaagaggaagatcgtgctggaccccagcggctccatgaacatctacctggtgctggatggcagtgacagcattggagccagcaacttcaccggggccaagaagtgcctggtgaacctgattgagaaggtggccagctatggagtgaagcccaggtatggcctggtgacctacgccacctaccccaagatctgggtgaaggtgtctgaggccgacagcagcaatgctgactgggtgaccaagcagctgaatgagatcaactatgaggaccacaagctgaagagcggcaccaacaccaagaaggccctgcaggccgtgtacagcatgatgtcctggccagatgatgtgcccccagagggctggaacagaaccaggcatgtgatcatcctgatgacagatggcctgcacaacatgggcggggaccccatcaccgtgattgatgagatccgggacctgctgtacatcggcaaggacaggaagaacccccgggaggactacctggatgtgtatgtgtttggagtgggccccctggtgaaccaggtgaacatcaatgccctggccagcaagaaggacaatgagcagcacgtgttcaaggtgaaggacatggagaacctggaggatgtgttctaccagatgattgatgagagccagagcctgagcctgtgtggcatggtgtgggagcacaggaagggcacagactaccacaagcagccctggcaggccaagatcagcgtcatccggcccagcaagggccacgagagctgcatgggcgctgtggtgtctgagtactttgtgctgacagctgcccactgcttcaccgtggatgacaaggagcacagcatcaaggtgtctgtgggcggggagaagagggacctggagattgaggtggtgctcttccaccccaactacaacatcaacgggaagaaggaggccggcatccctgagttctatgactatgatgtggccctgatcaagctgaagaacaagctgaagtatggccagaccatccggcccatctgcctgccctgcacagagggcaccacccgggccctgcggctgccccccaccaccacctgccagcagcagaaggaggagctgctgcctgcccaggacatcaaggccctgtttgtgtctgaggaggagaagaagctgaccaggaaggaggtgtacatcaagaatggagacaagaagggcagctgtgaaagagatgcccagtatgcccctggctatgacaaggtgaaggacatcagcgaggtggtgaccccccgcttcctgtgcacaggaggagtgagcccctatgctgaccccaacacctgccgcggggacagcggcggccccctcatcgtgcacaagaggagccgcttcatccaggtgggcgtcatctcctggggcgtggtggatgtgtgcaagaaccagaagaggcagaagcaggtgcctgcccacgcccgggacttccacatcaacctcttccaggtgctgccctggctgaaggagaagctgcaggatgaggacctgggcttcctgtag

SEQ ID NO: 120158 - DNA, 3801 bp, Artificial Sequence
  derived and/or modified sequence
atgggccccctgatggtgctcttctgcctgctcttcctgtacccaggcctggccgacagcgcccccagctgcccccagaatgtgaacatcagcggcggcaccttcaccctgagccacggctgggcccctggcagcctgctgacctacagctgcccccagggcctgtaccccagccctgccagccggctgtgcaagagcagcggccagtggcagacccctggggccaccaggagcctgagcaaggctgtgtgcaagccaggccactgccccaaccctggcatcagcctgggcgctgtgaggacaggcttccgctttggacatggagacaaggtgcgctaccgctgcagcagcaacctggtgctgaccggcagcagcgagcgggagtgccagggcaatggagtgtggagcggcacagagcccatctgccggcagccctacagctatgacttcccagaagatgtggccccagccctgggcaccagcttcagccacatgctgggcgccaccaaccccacccagaagaccaaggaccatgaaaatggcaccggcaccaacacctacgccgccctgaacagcgtgtacctgatgatgaacaaccagatgaggctgctgggcatggagaccatggcctggcaggagatcagacatgccatcatcctgctgacagatggcaagagcaacatgggcggcagccccaagacagctgtggaccacatccgggagatcctgaacatcaaccagaagagaaatgactacctggacatctatgccatcggcgtgggcaagctggatgtggactggagggagctgaatgagctgggcagcaagaaggatggagagagacatgccttcatcctgcaggacaccaaggccctgcaccaggtgtttgagcacatgctggatgtgtccaagctgacagacaccatctgtggggtgggcaacatgtctgccaatgccagtgaccaggagaggaccccctggcacgtgaccatcaagcccaagagccaggagacctgccgcggggccctgatcagtgaccagtgggtgctgacagctgcccactgcttcagagatggaaatgaccacagcctgtggagggtgaatgtgggggaccccaagagccagtggggcaaggagttcctgattgagaaggctgtgatcagccctggctttgatgtgtttgccaagaagaaccagggcatcctggagttctatggagatgacatcgccctgctgaagctggcccagaaggtgaagatgagcacccacgcccggcccatctgcctgccctgcaccatggaggccaacctggccctgcggcggccccagggcagcacctgccgggaccatgaaaatgagctgctgaacaagcagagcgtgcctgcccactttgtggccctgaatggcagcaagctgaacatcaacctgaagatgggcgtggagtggaccagctgtgccgaggtggtgtcccaggagaagaccatgttccccaacctgacagatgtgcgggaggtggtgacagaccagttcctgtgcagcggcacccaggaggatgagagcccctgcaagggcgtgaccaccaccccctggagcctggcccggccccagggcagctgcagcctggagggcgtggagatcaagggcggcagcttccggctgctgcaggagggccaggccctggagtatgtgtgccccagcggcttctacccctaccctgtgcagaccaggacctgccgcagcacaggctcctggagcaccctgaagacccaggaccagaagacagtgaggaaggcagaatgtcgggccatccactgcccccggccccatgactttgaaaatggagagtactggcccaggagcccctactacaacgtgtctgatgagatctccttccactgctatgatggctacaccctgcggggcagcgccaacagaacctgccaggtgaatggccgctggagcggccagacagccatctgtgacaacggggccggctactgcagcaaccctggcatccccatcggcaccaggaaggtgggcagccagtaccgcctggaggacagcgtgacctaccactgcagccggggcctgaccctgcggggcagccagaggaggacctgccaggagggcggctcctggagcggcacagagcccagctgccaggacagcttcatgtatgacaccccccaggaggtggccgaggccttcctgagcagcctgacagagaccatcgagggcgtggatgctgaagatggccacggccctggagagcagcagaagaggaagatcgtgctggaccccagcggctccatgaacatctacctggtgctggatggcagtgacagcattggagccagcaacttcaccggggccaagaagtgcctggtgaacctgattgagaaggtggccagctatggagtgaagcccaggtatggcctggtgacctacgccacctaccccaagatctgggtgaaggtgtctgaggccgacagcagcaatgctgactgggtgaccaagcagctgaatgagatcaactatgaggaccacaagctgaagagcggcaccaacaccaagaaggccctgcaggccgtgtacagcatgatgtcctggccagatgatgtgcccccagagggctggaacagaaccaggcatgtgatcatcctgatgacagatggcctgcacaacatgggcggggaccccatcaccgtgattgatgagatccgggacctgctgtacatcggcaaggacaggaagaacccccgggaggactacctggatgtgtatgtgtttggagtgggccccctggtgaaccaggtgaacatcaatgccctggccagcaagaaggacaatgagcagcacgtgttcaaggtgaaggacatggagaacctggaggatgtgttctaccagatgattgatgagagccagagcctgagcctgtgtggcatggtgtgggagcacaggaagggcacagactaccacaagcagccctggcaggccaagatcagcgtcatccggcccagcaagggccacgagagctgcatgggcgctgtggtgtctgagtactttgtgctgacagctgcccactgcttcaccgtggatgacaaggagcacagcatcaaggtgtctgtgggcggggagaagagggacctggagattgaggtggtgctcttccaccccaactacaacatcaacgggaaggaggaggccggcatccctgagttctatgactatgatgtggccctgatcaagctgaagaacaagctgaagtatggccagaccatccggcccatctgcctgccctgcacagagggcaccacccgggccctgcggctgccccccaccaccacctgccagcagcagaaggaggagctgctgcctgcccaggacatcaaggccctgtttgtgtctgaggaggagaagaagctgaccaggaaggaggtgtacatcaagaatggagacaagaagggcagctgtgaaagagatgcccagtatgcccctggctatgacaaggtgaaggacatcagcgaggtggtgaccccccgcttcctgtgcacaggaggagtgagcccctatgctgaccccaacacctgccgcggggacagcggcggccccctcatcgtgcacaagaggagccgcttcatccaggtgggcgtcatctcctggggcgtggtggatgtgtgcaagaaccagaagaggcagaagcaggtgcctgcccacgcccgggacttccacatcaacctcttccaggtgctgccctggctgaaggagaagctgcaggatgaggacctgggcttcctgtag

SEQ ID NO: 120159 - DNA, 1770 bp, Artificial Sequence
  derived and/or modified sequence
atgggcagcaacctgagcccccagctgtgcctgatgcccttcatccttggccttctgtcgggaggtgtcaccacaaccccatggtcgctggctcagccacaggggtcatgtagcctcgaaggggtggaaatcaaggggggctcctttcgcttgctacaggagggacaagctctcgagtatgtttgcccgtccggcttctacccttatccagtgcaaacccggacatgtaggagcacaggctcgtggtctacactaaagactcaggatcaaaagacagtgagaaaggccgaatgtagggcaattcactgtcctcgtcctcatgatttcgagaatggagagtactggcctcgctccccctactacaacgtcagcgatgaaatttctttccattgctacgacggctatacccttcggggctccgctaacagaacctgccaagtcaacggtaggtggagtggacagacagctatctgtgacaacggcgcgggttactgcagtaaccccggtatccctattggtacaagaaaagtgggttcgcagtaccgcttggaggactcggtgacctatcactgctcacgaggtctgaccctgcggggtagccagaggagaacctgccaagagggaggatcttggagtggcacagaaccatcctgccaggattctttcatgtatgatacgcctcaggaagttgctgaagcattcctaagcagcttgacagaaactatcgagggtgttgatgctgaggatggtcatggccctggcgagcagcagaaaagaaagattgttttagatcccagcggctccatgaatatctacctcgtgctggatggatcagacagcatcggggcctctaactttaccggtgccaagaaatgtctggttaatctgatcgagaaagttgccagctacggcgtgaagccaaggtacggcctagtgacttatgcaacctatcctaagatttgggtgaaggtctccgaggcggattccagtaacgccgattgggtaacgaagcagttaaatgaaataaattacgaagaccataagcttaagtctgggacaaatacaaagaaagccttgcaagctgtgtacagtatgatgtcctggcctgacgacgtcccacccgaggggtggaatcgtactcgccatgttatcatactcatgactgacgggctccacaacatggggggcgaccctatcacagtgatcgacgaaatcagggacctgctttatattgggaaggaccgcaaaaatcccagagaggactaccttgacgtgtatgtgttcggtgtgggaccgttggttaatcaggtgaatatcaacgccctggctagtaagaaagataatgaacaacacgtgttcaaagtgaaggacatggagaacttggaagatgtcttttaccaaatgattgatgaatcccaatccctctccctgtgtggcatggtttgggagcatcgcaagggcaccgactaccacaagcagccttggcaggctaagatctctgtgatcagaccttccaaaggccacgaatcgtgtatgggcgctgtggtaagcgaatactttgtgctgaccgccgcccattgttttacagtggacgataaggagcactccatcaaggtgtccgttggcggggaaaagcgcgatctggagattgaggtcgtcctctttcatcccaactataatataaacggcaagaaggaagccgggatcccagaattctatgactatgacgtggctttgataaaactgaaaaacaagctgaagtatggctag

SEQ ID NO: 120160 - DNA, 1770 bp, Artificial Sequence
  derived and/or modified sequence
atgggcagcaacctgagcccccagctgtgcctgatgcccttcatcctaggtctcctgtctggcggggtaaccaccaccccctggtccctggcgcaacctcaaggttcctgctccctggaaggagtggagattaagggcgggtccttcaggctgctgcaggagggtcaagcgcttgaatacgtctgtccctctgggttctatccatatccagttcagacccgcacatgcagatccaccggctcttggtcaaccctgaagacacaggaccagaagaccgtccgcaaggccgaatgcagagccatccactgtcctaggccgcacgactttgaaaatggtgagtactggcctcgctctccttactacaacgtgagcgacgaaattagcttccattgctatgatggttacacgctaagaggctccgccaatcgaacttgccaggtgaatggtaggtggtcaggtcagaccgccatatgcgataatggggctggctattgcagcaatcccggcatcccaatagggactagaaaagtgggatcgcagtatagactggaagattccgtcacgtaccattgcagccggggcctgaccctgcggggctctcagcgcaggacttgccaagagggaggatcctggagcggcactgagcctagctgtcaggactcttttatgtatgataccccccaggaagtcgctgaggcttttttatctagcctgacggaaaccatcgagggcgtggacgcagaagacggacacggtcccggcgaacagcagaagagaaagatcgtcttggacccatcaggcagtatgaacatctacctcgtgcttgacggttcagatagcattggtgcctctaactttactggggctaagaaatgcctggtcaatctcatcgaaaaggtggcctcttacggtgtgaaaccccggtacggcctggtgacatatgctacataccctaagatctgggtaaaggtcagtgaggcggactcatcaaatgctgactgggtgactaagcaactcaacgagattaactacgaggatcataagttgaagagcgggacaaatacaaaaaaagctttacaagcagtgtacagcatgatgagttggccagatgatgtcccaccagagggatggaacaggacccggcacgtgatcatcctgatgaccgatggcttgcacaacatgggtggagatcctatcacggttatcgacgaaattcgcgatttgctctatatcgggaaagaccgtaagaatcctagggaggattacctcgacgtgtacgtctttggcgttgggccccttgtcaaccaagtgaacatcaacgccctagcgtccaagaaagataatgagcaacatgtctttaaggtgaaggacatggaaaatctggaagacgtgttctatcagatgatcgatgagtcccagtccctgtcactttgtggtatggtttgggaacataggaagggtactgattatcacaaacaaccatggcaggccaagatatcagtgatcaggcccagtaagggacacgaatcttgtatgggagcagtggtcagtgagtacttcgttctgaccgccgcccattgcttcaccgtggatgacaaagagcactcaataaaggtgtcagtgggtggagaaaaacgagatctggagatcgaagtggtgctgtttcacccaaattataacatcaatggcaaaaaagaggcaggtatcccagaattctacgattatgatgtggcacttataaagctgaaaaacaaactgaaatacggatag

SEQ ID NO: 120161 - DNA, 2295 bp, Artificial Sequence
  derived and/or modified sequence
atgggcagcaacctgagcccccagctgtgcctgatgcccttcatcctaggtctgctgtcggggggagtcacaacaaccccatggagtctcgctcgaccccagggctcatgctctcttgagggagtggagatcaagggagggagcttccgtctgcttcaggagggccaggcattggaatacgtgtgccccagtggtttttatccctaccctgtgcagacaaggacttgtaggagcactggatcctggagtaccctaaaaactcaggaccagaagaccgttagaaaagctgaatgtcgtgcaatccattgcccccgaccccacgatttcgagaatggggagtactggccccgttccccctactacaacgtctctgacgaaattagctttcactgttatgatggctatacactgcgaggcagtgccaatagaacttgccaagtgaatggacgatggagtggccaaaccgcaatatgcgataatggtgccggttactgctctaatccaggcattccaattgggacccgaaaagtgggttcccaataccgactcgaggacagcgtgacttaccactgcagcagaggactcacgcttcggggctctcaaagacgcacatgtcaggagggcggctcatggtcagggaccgaaccatcctgccaagacagctttatgtacgacacacctcaggaggtggccgaagcctttctgagctccctaacagagaccattgagggggtggatgctgaagacggacacggccccggggagcagcagaagagaaaaattgttttagacccaagtggatcaatgaacatctatctggtgctggacggcagtgactccatcggagcaagcaatttcaccggggctaagaaatgcctggtgaacctgatcgagaaggttgcatcctacggagtaaagcctagatatggactggtcacatatgcgacctaccccaagatctgggtgaaagtatcagaagccgattcttctaatgccgactgggtaacaaagcagctgaacgaaatcaactacgaggatcacaagctaaagagtggcactaatacgaaaaaggctctccaggccgtttactctatgatgagctggccagatgacgtgccacctgagggctggaaccgaacacgtcatgtgataatcctaatgaccgacgggctgcataatatgggtggggaccctataaccgtgatcgacgagattagagacctgctgtacatcggtaaagatagaaaaaatccccgcgaagattacctcgatgtctacgtgtttggggtaggtcctctggttaatcaggtcaacattaatgccttggccagcaagaaggataatgaacagcacgtcttcaaggtaaaagacatggagaacctggaagatgtgttttaccagatgatagatgagtcacagtcactcagcctgtgtgggatggtgtgggaacaccgcaagggaacggactatcacaagcagccctggcaggcaaaaatttcggtcatccgccctagcaaaggtcatgaaagctgtatgggggctgtcgtctctgagtattttgtgctcacggcagcgcactgctttacagtcgacgacaaggaacactccattaaggtctcagtggggggagaaaagagggatttagagatcgaagttgtgctcttccaccccaactacaacatcaatggcaaggaggaggcagggatcccagaattctacgattacgatgttgcgctgatcaagctgaagaacaagctgaagtacggccagaccatcagaccaatctgtctgccctgtactgagggcactactcgcgcccttagacttccccccaccacaacctgccagcagcagaaggaggagctcctgccggctcaggatattaaggctctgtttgttagcgaggaagaaaagaaactgactcggaaggaggtgtatataaaaaacggggataaaaaaggcagttgtgaacgcgacgcgcagtatgctcctggttatgacaaagtgaaagatatatccgaagtggtgacaccaagatttctctgtactggaggggtgtctccctatgccgacccaaatacatgtaggggggattcgggaggaccactaattgttcacaagaggagcaggttcatacaggtgggggtaatcagttggggtgttgtagacgtatgtaagaatcagaaacgacagaagcaggtgcccgcccatgcaagggactttcacattaacctttttcaggtgctgccatggctcaaagagaaattgcaggacgaagatcttggctttctatag

SEQ ID NO: 120162 - DNA, 2295 bp, Artificial Sequence
  derived and/or modified sequence
atgggcagcaacctgagcccccagctgtgcctgatgcccttcatcctgggtttactttcaggaggagtgacgactaccccatggtcacttgctcggccacagggtagctgctctttagagggtgtggaaatcaaaggggggtcctttagactgttgcaagaaggtcaggctctcgagtatgtttgccccagcggtttttatccatatcctgtacaaacacgcacctgcaggtcaacaggctcatggagcacccttaaaacccaagaccagaaaaccgtgaggaaggccgaatgtagagccatccattgtcctagaccccacgatttcgaaaacggcgaatattggcctcggagtccctattataatgttagcgatgagatctcctttcattgctacgacgggtatacccttcggggcagcgcaaatcggacatgccaagtgaatggaagatggagcggccagaccgctatctgtgacaacggcgcaggctactgtagtaacccaggtattcctataggtacgaggaaggtgggcagccagtaccgcctggaggattctgttacgtatcattgcagtagagggcttactctaagggggagtcagaggcggacgtgccaggagggggggtcatggtccgggactgaaccatcgtgccaggattcattcatgtacgatacacctcaggaggttgcggaagccttcctctcttctcttacagagactattgagggcgttgacgctgaagatgggcatgggcctggcgaacagcagaagcggaaaatcgttttggatccctcagggtccatgaacatttatctggtgctggacggttctgatagcatcggggccagtaattttacgggggctaagaagtgcctggtgaatctgattgaaaaagtggcctcctatggggttaagcccaggtatgggctggtgacctacgcgacatacccaaaaatctgggtgaaggtgtctgaagctgattcctcaaacgctgattgggtcactaagcagttgaatgaaattaattacgaggatcataagcttaaatccgggaccaacaccaaaaaagctctgcaggccgtgtactcaatgatgtcatggcctgacgatgtgcccccggagggctggaacaggacaaggcacgtcattatacttatgacagacgggctgcataacatgggaggagacccgatcaccgtgattgacgagatacgagatctcctctatataggtaaggatcggaaaaaccccagagaagactatctggacgtgtatgttttcggagtcggccctctggttaatcaggttaacattaacgctctcgcgtctaaaaaagacaacgagcagcatgtgttcaaggtgaaggacatggagaacctggaagatgttttctatcagatgattgatgaatcacaatctctgtctctgtgcgggatggtatgggaacaccgaaagggaaccgattaccataagcagccctggcaggccaaaatcagcgtaattagacccagcaagggccatgagagctgcatgggagctgtggtgagcgaatacttcgtccttactgcggcccactgtttcaccgttgatgataaggagcacagcattaaggtgtcagtgggcggcgagaagcgcgatctcgaaattgaggtggtactgttccacccaaactataacattaatggtaagaaggaggctggaatccccgaattttacgactatgacgtggctttaatcaaactaaagaacaagttgaagtatgggcagacaatcagacccatttgtcttccttgtaccgaaggaaccacaagggccctcaggctccccccaaccaccacttgtcagcaacaaaaagaagaactcctgcccgcacaggacatcaaggctttatttgttagtgaagaggagaaaaaactgacacggaaggaagtctacataaagaatggcgataagaagggcagttgcgagcgtgatgcccaatatgcccctggctacgataaggttaaagacatctccgaggttgtgactcccagattcctatgcactggaggcgtgtctccttacgccgacccaaatacgtgcagaggtgactccggcggccccctcatcgtgcacaaaaggtcccgcttcatacaggtgggagtgatcagttggggcgtggtggatgtttgtaaaaaccagaaaaggcaaaaacaagtccctgcccacgccagagatttccacatcaacctctttcaggttctcccctggctgaaggaaaagctgcaggacgaggatttgggatttctttag

SEQ ID NO: 120163 - DNA, 2295 bp, Artificial Sequence
  derived and/or modified sequence
atgggcagcaacctgagcccccagctgtgcctgatgcccttcatccttggactgctgtccggtggtgtaacaaccaccccttggtcgcttgcccgcccgcagggttcctgcagccttgagggtgttgaaatcaaaggcgggtcatttagattactgcaggaaggccaggccctggagtacgtgtgtcctagcggcttttatccttaccctgtccagactaggacttgtcgctcaaccggatcatggtcgaccctgaaaactcaggatcaaaagacggtacggaaagctgaatgccgagctatacactgcccccgcccccatgacttcgagaacggcgagtattggccgcgcagcccatactacaacgtgagtgacgagatctcttttcactgttacgacgggtatactctgcgcggttcagcaaatcgcacgtgccaggtgaacggacggtggtcaggccagaccgccatctgcgataacggcgctggctattgctctaatcccggaatccccatcggcacccggaaggtgggtagccagtacaggctggaggattcagtgacttaccactgctcccgtgggctaacactacgaggtagtcagcggaggacctgtcaggagggcggtagttggagcggcaccgaaccaagctgtcaagactctttcatgtatgacacgccacaggaggtagcagaagccttcttgtcatccctcacagagaccattgagggcgtcgacgccgaagacgggcacggccccggcgaacaacaaaagcggaagatagtgctggatccctctggctccatgaatatttacctggtgctcgatggctcagacagcattggcgcatcgaatttcaccggtgctaaaaagtgcctcgtcaacctgatcgagaaggtggcctcttacggcgtaaagcccagatacggacttgtcacctatgccacgtacccaaaaatctgggtcaaggtgtccgaagcagacagttccaacgccgactgggtgaccaaacaactcaacgaaattaattatgaagatcacaaactaaagtcaggcacaaataccaagaaagccctgcaggccgtgtacagcatgatgagctggcccgatgacgttccaccagaggggtggaaccggaccaggcatgtgatcattctgatgaccgacggactccacaatatgggcggcgaccccattaccgtgatcgacgaaatccgcgacctgctttatataggcaaggaccgaaagaatccgcgcgaggactacctcgatgtctatgttttcggggtggggccccttgtcaatcaagtaaatattaacgcactggcatctaagaaagataacgaacagcatgtgttcaaagtgaaggatatggaaaatctggaggacgtcttctatcaaatgatcgatgaaagtcaatcgctgtccctttgtggcatggtgtgggaacatcggaagggcactgattaccacaagcaaccatggcaggcaaagatcagcgtaattcgaccatccaagggccacgaaagctgcatgggggcagttgtatccgagtactttgtcctaactgcagcacactgttttacagtggatgataaagaacactcaatcaaagtgagcgttgggggcgagaaacgggacctagaaatcgaggtggtgctcttccatccaaactacaacattaatggcaaaaaggaggccgggatccccgagttctacgactatgatgtggcactgatcaaactcaaaaataagctgaaatacgggcagacaataaggcccatttgtctcccctgtacggagggcaccacccgcgccctgaggctgccccccacaaccacctgccagcaacagaaggaagaactgctgccagcccaggatattaaagcactcttcgtttcagaggaagagaaaaaattgactaggaaggaggtctacataaagaacggcgataaaaagggctcgtgtgaacgagatgcccaatacgcccctggatatgataaggttaaggacatctctgaggtggtgacgcccagatttctttgtacgggaggggtatctccatacgctgaccccaatacatgcaggggagattcggggggccccttaattgtgcataagaggagccgatttattcaggtcggcgtgatatcgtggggagtggttgacgtttgtaagaatcagaagagacagaagcaggtgcccgcccatgctcgcgactttcatataaatctctttcaggtgttgccatggctaaaggagaaacttcaggatgaggatctggggttcctttag

SEQ ID NO: 120164 - DNA, 2295 bp, Artificial Sequence
  derived and/or modified sequence
atgggcagcaacctgagcccccagctgtgcctgatgcccttcatcctagggctgttgtcaggtggggtgacgactacgccctggtctctcgccagaccgcagggcagttgttccctggaaggggtggaaattaaaggtggatccttccgacttcttcaggagggccaagccctggaatacgtgtgcccatctggcttttatccttacccggtgcagacaaggacctgcaggagtactggatcatggagtacactgaagacgcaagaccagaagaccgtcagaaaggccgaatgtagagccattcactgccccaggccccatgattttgaaaacggcgaatactggcccaggagcccctactacaatgttagtgatgaaatctctttccattgttatgacgggtacaccctgcgaggctctgcaaaccgcacctgtcaagtcaacggtcgttggtcaggacagaccgccatctgtgataatggcgccggctactgctctaatcccggaatccccatagggacaagaaaggtaggctcacagtacaggcttgaagactccgttacctaccactgcagccgaggcttaactctgcgtggcagtcagcgccgaacgtgccaggaaggtgggagctggtctggtactgaaccttcatgtcaggacagtttcatgtacgatacaccccaggaggtcgcggaagctttcttgtcatcattgacagaaactattgagggcgtagacgcagaggatggccatggccccggagaacagcagaaacgcaaaatcgttcttgaccctagcggctccatgaacatttatctggtgttagatggttctgattccattggagccagcaatttcactggtgctaagaagtgtctggttaacctaattgagaaggtggcctcgtatggagttaaaccaagatacggactggttacatacgctacatacccaaaaatctgggtaaaggtctccgaggccgactctagtaatgctgactgggtgactaagcagctcaacgaaattaattatgaggaccacaagctgaagtccggcactaacacaaaaaaggctcttcaggccgtttacagcatgatgagctggccagacgatgtgcccccagagggctggaacaggacacgacatgttattattttgatgaccgatggactgcacaacatgggcggagatccgatcactgtgattgatgagattcgcgatcttctatatatcggtaaggatcgaaaaaatcctcgcgaggattatctcgacgtctacgtgtttggagtcggcccgcttgtaaaccaggtcaacattaacgccctggccagcaaaaaagacaatgagcagcacgttttcaaagtgaaggatatggagaacttagaagacgtgttctatcagatgatcgacgagagccaaagtcttagtctttgcgggatggtgtgggaacaccgtaaggggacagattatcataaacagccgtggcaagccaaaatttctgtgattagaccttcaaagggtcacgagtcgtgtatgggcgcagttgtgtctgagtatttcgtcctcactgccgcacattgttttacggtggatgataaggagcattcaataaaggtgtctgtggggggagagaaaagggatcttgagatagaagtcgtactttttcaccctaactacaacataaacggaaaagaagaggcgggaatccctgagttttacgattatgatgtggccctgataaaattgaagaacaaactcaagtacggccaaaccattcgccctatttgtctaccatgcacggaaggtaccacccgtgctctacgactgccaccaacaaccacctgccagcagcagaaagaggagctgctgcctgctcaggacatcaaggccttatttgtctcggaagaagagaaaaaacttacccgtaaagaggtgtacatcaagaatggcgacaaaaaaggctcatgcgagagggacgcccagtatgctcctggttatgataaggtgaaggacataagtgaagtcgtaaccccccgcttcctgtgcaccggtggtgtgtcaccatatgcggatcctaacacttgcaggggcgacagtggtggcccccttatagtccacaagagatcacggttcatacaggttggcgttataagttggggggtagtggacgtctgcaaaaatcagaagcggcagaaacaggtgcctgcccatgcgcgcgactttcatattaacctgtttcaggtgctgccatggcttaaagagaagctacaagatgaggatctgggatttctgtag

SEQ ID NO: 120165 - DNA, 2295 bp, Artificial Sequence
  derived and/or modified sequence
atgggcagcaacctgagcccccagctgtgcctgatgcccttcatcttggggctcttgagcggcggtgtcacaacaaccccttggagcctagccagaccccaagggagctgctcactcgagggcgtggaaatcaagggcggttcttttcggcttctgcaggagggtcaggcactggaatacgtctgtccatcaggcttctatccttacccggtacagacgcgaacttgccgttccaccggctcgtggtctacccttaaaacacaggatcagaagaccgtacgaaaagcagaatgtcgcgctatacattgcccccgaccacatgactttgagaatggtgagtactggccgcgcagcccttactacaatgtcagtgatgagatctccttccattgctacgacggctacacgctccgaggcagtgccaaccgaacctgccaggtgaatgggaggtggagtggacagactgcaatctgtgacaacggggccggttactgtagtaatccaggtattccaatcggtacaaggaaggttggctctcagtataggctggaggactctgtcacataccactgttcacgtggactgaccctgcgcggcagccagaggcgtacctgccaggagggcggttcatggtccggcacagaaccgtcttgccaagacagcttcatgtatgacacgcctcaggaagttgcagaggcattcctctcatcactcacagaaacaatcgaaggcgtggatgctgaggatggacatggccctggcgagcagcagaagaggaagatagtgttagacccatctggcagtatgaacatctaccttgtcctggacggaagcgactccatcggcgcctccaattttacaggggcaaagaagtgcttggttaatctaatcgagaaggtcgccagctacggggtgaagccacgctatggactggtgacttacgccacctacccaaaaatttgggttaaagtgtccgaagcggactcaagcaacgccgactgggtcactaagcaattgaacgagatcaactacgaagatcacaagttgaagtcgggaaccaatactaaaaaagctttgcaagctgtatattcgatgatgtcctggccagacgatgtgccccccgaaggttggaacaggacaagacacgtgatcatcctcatgaccgacggtttgcataatatgggaggtgatccaatcaccgtcattgatgaaatcagagatctattgtacattggcaaggataggaaaaacccccgagaggattatttagacgtgtatgtgtttggtgtcggtccgttggttaatcaggtgaacatcaatgccctggcatccaaaaaggacaacgaacagcacgtgtttaaagtgaaggacatggaaaacctcgaagacgtgttttatcagatgattgacgaaagtcaaagtcttagtctgtgtggcatggtctgggagcataggaaggggacggactaccataaacaaccttggcaggctaaaataagtgttatccggccaagcaagggccacgagtcatgtatgggagcagtcgtcagcgagtacttcgttctgacagcagctcactgcttcacagtggacgataaagagcacagtattaaggtttcagtcggcggagaaaagcgggatctggagattgaagtggttctgtttcacccaaactacaatatcaatgggaagaaagaggctggtatccctgagttctacgattacgacgtggcattgattaagctcaaaaacaaactcaagtatggtcagacgataaggcccatatgtttaccgtgcaccgaaggaacaacccgagctctgcggctcccccctactaccacgtgtcagcagcagaaggaggaactgttgccagcacaggatattaaggccctttttgttagcgaggaagaaaaaaagctgacccgcaaagaggtgtacatcaaaaacggggacaagaaagggagctgcgaacgagacgcccaatatgcacccggatacgacaaagttaaggacattagtgaagtggtgactcctcgcttcctctgtacaggcggtgttagtccctacgcggatcctaacacatgcagaggagattcgggcgggccactgattgtacacaagcggtccagattcatacaggtgggagttatcagttggggcgtcgtcgacgtttgcaagaatcagaagcggcagaagcaggtccccgcgcacgcacgagacttccatattaacctgttccaggttctgccgtggctgaaggagaaactgcaggatgaggacctaggatttctgtag

SEQ ID NO: 120166 - DNA, 2295 bp, Artificial Sequence
  derived and/or modified sequence
atgggcagcaacctgagcccccagctgtgcctgatgcccttcatcttgggactgctgtccggaggcgtgactaccactccctggtctctcgcccgcccacagggaagctgctcgctcgaaggggtagagatcaagggagggagttttcgacttctgcaagaaggccaagctctcgaatatgtttgccccagtggcttctacccctaccccgttcagacccggacctgccgctcaacagggtcatggagtaccctgaaaactcaagaccagaaaaccgtgaggaaggccgagtgtcgagctatccattgtccaaggccgcacgactttgagaatggcgaatattggcctcgatccccgtactataatgtgagtgacgaaattagcttccactgttacgatggctacacgctgcgtggctcagcaaacagaacttgccaggtgaatggcagatggtctggccagaccgccatttgtgacaatggagctggctactgtagtaatcccggaattcccattggtaccaggaaggtgggcagccagtacaggctcgaggattctgtcacttaccattgcagccgcggtctgacccttcggggctcacagcggcggacctgtcaagaaggaggtagttggagcggtaccgaacccagttgccaggattctttcatgtacgacacacctcaggaggtggcagaagctttcctgagcagcctcacggagacaattgagggggttgatgcagaggacggtcacgggccaggagaacagcagaagcggaaaatagtcctcgatccgtctggcagcatgaatatctacctggtgctcgacggcagcgattcaattggagcttctaacttcaccggtgccaaaaagtgtttggtcaaccttatcgagaaagtcgcatcgtacggtgtgaagccaaggtatgggctagtgacatatgccacttacccaaagatatgggttaaggtgtctgaggccgacagcagcaatgctgattgggtcacaaagcagcttaacgagatcaattatgaagatcacaagctgaaaagcggcaccaacactaaaaaggctctacaggccgtgtattccatgatgagttggcccgacgatgtgcctccagaggggtggaataggaccaggcatgtgataatcttgatgacggatggccttcataacatgggcggcgacccgataactgtaattgacgaaattcgggatttgctgtatatcgggaaggatcgaaagaacccacgcgaggactatcttgatgtgtatgtatttggagtgggccctctcgtaaatcaggtgaacatcaacgctctcgcgagcaagaaggacaatgagcagcacgttttcaaggtgaaggatatggagaatttagaagatgtgttttaccagatgattgacgaaagccagtcactatccctttgcggcatggtctgggaacataggaaaggaaccgattaccacaaacagccctggcaggcaaagatttcagtgattagaccctctaaaggccacgaatcttgcatgggtgccgttgtttcagaatattttgttttgacagccgcccattgttttacagtggatgacaaggaacattcgatcaaagtgagtgtggggggtgaaaaaagggatttagagatcgaggttgtgctttttcaccctaattacaatattaatggtaagaaggaggcaggtatccccgagttttatgattacgacgtggccctcatcaagctgaaaaacaagttgaagtatggccagaccatcagacccatttgtctaccatgcaccgagggtaccacacgggcgctgaggctccctcctactacaacctgtcagcagcagaaggaagagttactccccgcccaggatattaaagccctgttcgtgtctgaagaagaaaaaaagctcactcgcaaggaggtgtatattaagaacggcgataagaaagggtcctgcgagagggatgcccaatatgcccccggctacgacaaagtcaaggatatctccgaagtagtaacgcctagatttctgtgcacaggtggtgtaagcccgtacgcagatcctaacacatgtagaggagatagcgggggcccactgattgtacacaagaggtcaagattcatccaggtaggggtgattagctggggagtggtggacgtgtgcaagaatcagaaacgccagaagcaagtgcccgcccacgcgagggacttccacatcaacctgtttcaggttctgccgtggcttaaggaaaagctgcaggacgaagacctgggctttctgtag

SEQ ID NO: 120167 - DNA, 2295 bp, Artificial Sequence
  derived and/or modified sequence
atgggcagcaacctgagcccccagctgtgcctgatgcccttcatcctgggactgctttccggaggcgtgaccactactccatggtccctggctagacctcaggggtcctgctcattagagggtgtagaaatcaagggcgggtccttccgcctgctgcaggagggccaggcactggagtatgtatgccctagcgggttctatccctacccagtgcagacccggacgtgccggtccactggatcttggtccaccctgaaaactcaggaccagaagactgtgcgaaaagccgaatgccgcgctatacactgtcctcggccgcatgatttcgaaaatggggaatattggccgcgcagtccctactacaacgtgtcagacgagatcagcttccactgctacgatggttacacactgcgcggctccgccaaccgtacctgtcaggtaaacggaagatggtccggacagactgctatatgtgataacggtgccgggtactgttctaaccccgggatacccattggtactcggaaggtgggatcccagtatcgcttggaagatagcgtgacctatcattgttcccgcggtttgaccctccgcggctcgcagcgcaggacttgtcaggaaggaggatcatggagcggcacagaaccttcttgtcaggactcctttatgtatgacaccccccaagaggttgctgaggcgttcctatctagtctgaccgagacaattgagggagttgacgcagaggacggccatgggcctggcgaacagcagaagcgcaaaatagtacttgatcccagcgggtcaatgaacatttatctggtgctagacgggtcagactcgataggtgcatctaatttcaccggggcgaagaagtgtttagttaatctgatcgaaaaagtagcatcgtacggtgtaaagccaagatacggccttgtaacctacgcgacgtatcccaaaatatgggtgaaggtttcagaagccgacagtagtaatgctgattgggtcacaaagcagctgaatgagatcaactacgaagaccataaactcaagagcggcaccaacactaagaaggccctccaggctgtttacagtatgatgagttggccagatgacgtgccccctgagggctggaaccggacacgccatgtgattatattgatgacggatggtttacataacatgggcggggatcctattacagttattgacgagattcgtgatttattatatatcggaaaagaccggaagaacccacgagaggattatttggacgtgtacgtcttcggtgtgggtcccctcgtcaatcaggttaacataaacgctctggcgagcaaaaaggataacgagcagcacgtgttcaaggtgaaagacatggagaatcttgaggacgtgttttatcagatgattgatgaaagtcagtccctgagcctctgtggcatggtgtgggaacatcggaaaggcactgactatcacaaacaaccctggcaggctaagatatccgttataagaccgagtaaggggcacgagagctgcatgggagcagttgtctcagagtacttcgtgctgacagccgcccactgttttactgtggacgataaggagcacagcatcaaagtgtctgtggggggagagaaaagggacctggaaattgaggtggtactcttccatcccaattacaacatcaatggcaaaaaagaagcagggatccctgaattctacgactatgacgttgccctcattaaactgaagaacaagctcaaatacgggcagaccattcggcccatatgccttccctgtactgagggcacaaccagagcgcttcggctgcccccaaccacaacctgccagcagcaaaaagaagagctgctccctgctcaggacattaaagctctgttcgtctctgaagaggagaagaagctgaccaggaaagaagtgtacattaagaacggcgataagaaggggtcctgcgagagagacgcccagtacgcgcccgggtacgacaaagtcaaagacatctccgaagtagttactcctcgttttctgtgcaccggtggagtctcgccatatgccgatcccaacacatgtcgtggagatagcggaggacctttgattgttcacaagcggtcccggttcattcaggtaggagtaatttcatggggtgtcgtagacgtgtgtaagaaccagaaacggcagaagcaggtgcccgcccatgcgcgcgatttccatatcaacctgttccaggtcctgccctggctcaaagaaaagttacaagacgaagatcttggctttctgtag

SEQ ID NO: 120168 - DNA, 2295 bp, Artificial Sequence
  derived and/or modified sequence
atgggcagcaacctgagcccccagctgtgcctgatgcccttcatcctgggcctgctgtccgggggggtcaccacaactccatggtcactggcaaggccccagggctcctgctcacttgagggggtggagatcaaggggggcagctttaggcttctccaggagggccaagccttggagtacgtctgcccttctggcttctacccctaccctgtgcagacacggacatgccgcagcactggctcctggtctaccctgaagacccaggatcagaaaaccgtgcgcaaggcagagtgccgggcgattcactgtcccaggccacacgactttgagaacggcgaatactggccccgcagcccatactataatgtgagcgatgaaatttcgttccattgctacgacggctacacactgcgggggtctgcgaacagaacttgccaggtgaatggccgctggagtggacaaacggcaatatgcgacaatggtgcggggtattgctcaaaccccggaattcccattgggaccagaaaggtaggctctcagtaccgcttggaggattcagtgacttatcattgttcgcgtgggctgactctgcggggctcccagcgtcggacctgtcaagaaggcggttcgtggtccggaactgaaccatcttgtcaggacagttttatgtacgacaccccgcaggaggtagctgaagccttcttatcaagtttaacagagaccattgagggggtcgatgctgaggacggacacggccctggcgaacaacaaaagaggaagatcgtgttggatccttctggttccatgaatatctacctagtgctggatggatcggactcaattggagcctctaatttcacgggcgccaagaagtgcctagttaatctcatagaaaaggtcgcttcttatggggttaagccacgttatggtctcgtgacctacgcaacctacccaaagatttgggttaaggtgtctgaggcagattcttcaaatgccgattgggtcactaagcaactcaatgagataaactacgaagaccataaattaaaatcaggcactaatacaaaaaaggcacttcaagcagtgtattccatgatgagttggccagacgacgttccaccagagggctggaatagaaccaggcatgtaataattcttatgactgatggcctgcacaatatggggggtgacccaatcaccgtaatcgatgaaatcagggatctgctgtacatcggcaaggacagaaaaaatccaagagaggactatttggacgtttatgtgtttggagtgggacctctcgtgaaccaagtgaacattaatgccttagctagtaaaaaggacaacgagcaacacgtcttcaaggtgaaggatatggaaaacctcgaggatgttttctatcagatgattgatgaaagtcagtccctcagcctgtgcgggatggtctgggaacacagaaaggggaccgattaccataaacagccatggcaggctaagatcagcgttatcaggccttccaaagggcatgagtcatgcatgggtgcagtggtctccgagtatttcgtcttgacagcggcccactgctttactgtcgacgacaaggagcattcaattaaagtgtccgttgggggagaaaagagggaccttgagatcgaggtcgttttatttcatcccaattataatatcaatggtaagaaagaggcgggtattcccgagttttacgactacgatgttgccctgattaagctgaagaacaagctgaagtatggccagacaatcaggcctatttgcctaccatgtaccgagggaacaactcgtgcactgcgactcccacctacaaccacatgtcagcagcagaaagaggagctgctgcccgcgcaggacataaaagccctgtttgtatcagaagaagagaagaaattaacacggaaagaagtctacattaagaacggagataaaaaagggtcatgcgaacgggatgcccagtacgcaccaggttatgacaaggtgaaagacatctcggaagttgtgaccccgagatttctttgtaccggcggggtgagtccatacgcagacccaaacacctgtagaggggattctggcgggcctcttatcgtccacaagcgttcccgatttatccaggtcggtgtgatctcttggggtgtggtcgacgtatgcaaaaatcagaagaggcagaagcaggttcctgcacacgcccgcgatttccatataaatctcttccaggtgctaccatggctgaaggagaaactccaggatgaggatctggggttcctctag

SEQ ID NO: 120169 - DNA, 2295 bp, Artificial Sequence
  derived and/or modified sequence
atgggcagcaacctgagcccccagctgtgcctgatgcccttcatcctgggccttctgtctggaggcgtgacaaccacaccttggtccttagcaaggccacagggaagttgcagccttgaaggtgtcgaaattaaaggaggcagttttcgcttgctccaggagggacaggctctggagtacgtttgcccctccgggttttacccttatccggtgcagacccgtacatgtcgttctaccggctcctggtctactctgaagacccaggaccagaaaacggtgcggaaggcggaatgcagagcaatccactgtccccggccacacgattttgagaatggtgagtattggcctaggtctccctactacaacgtgagtgacgagatatctttccactgctacgacggctacaccctgagaggatctgccaaccggacctgtcaggtcaatggtcggtggagtggacagactgccatttgcgacaatggagccggttattgctcaaacccaggcatccccattggaacccgcaaagttggtagccagtatcgccttgaggattccgtgacataccactgcagcaggggactgacgctgagggggtctcagaggcgcacctgtcaagagggcggcagctggtcaggcacggaaccttcttgtcaggactccttcatgtatgataccccacaagaagttgcggaggccttcctgagcagtttaacagagaccatcgagggtgttgatgctgaggacggccacggccctggagagcagcagaaaaggaagattgtcctggatccgtcggggagtatgaatatctatcttgtgctcgatgggtccgatagtattggcgcatcaaactttactggtgctaagaaatgtctggtcaacctgatcgaaaaagtagcttcctatggcgtaaagcctcggtatggcctggtgacctacgcaacctatccaaaaatctgggtaaaagtgagcgaggctgattccagtaatgcggactgggtgacaaagcagctgaatgagataaactacgaagaccacaagctgaaatcaggtacaaacacaaagaaagcccttcaggccgtgtactcaatgatgtcatggcctgacgacgttcctccggagggctggaaccgcaccaggcatgtgattatcttgatgaccgacggactccataatatgggcggcgatcctattaccgttatcgatgaaatcagagacctgctgtacatcggcaaagatcgcaaaaatcccagagaagattatctggacgtatacgtattcggagtgggcccactcgtaaatcaagtcaacataaatgcccttgctagcaaaaaagacaacgagcagcacgtgtttaaggtcaaggatatggaaaaccttgaagacgtgttttatcaaatgatcgatgagagccagtcattgagtctgtgtgggatggtgtgggaacaccggaagggcacagattaccacaaacagccgtggcaggcaaagatatcggtgatacgtcctagcaaaggccacgaatcttgtatgggcgccgtcgtcagcgagtattttgtcttgaccgcagcccactgcttcactgtggatgacaaagaacactctatcaaagtaagcgtgggtggagaaaaaagggatctggagatcgaggtcgtgctctttcaccctaactataatattaatggaaaaaaagaagctgggattcccgagttctatgattatgatgtagctctgattaagttaaaaaataagctgaaatacggccagacgatacgacccatttgtctgccttgcacagagggaaccacacgggctctccggctgccaccgacgaccacatgccagcagcagaaagaagaactgctgcccgcccaggacatcaaagccctgtttgtatccgaggaagagaagaagctgaccaggaaagaagtgtacatcaagaacggggacaagaagggatcatgtgaacgggacgcgcaatacgcgccgggctacgataaggtgaaagatatctcagaagtagtgacgcctaggtttctttgcacaggcggcgtctcaccatacgctgacccaaacacgtgcagaggagactccgggggccccctgatagtccacaagcgcagcagattcattcaagtgggggtcattagctggggcgtggtggacgtgtgtaaaaaccaaaaacgccagaagcaggtgcctgcccatgcgagggatttccacattaatctgttccaggtactcccttggctgaaggagaagctccaggatgaggacctgggcttcctctag

SEQ ID NO: 120170 - DNA, 2295 bp, Artificial Sequence
  derived and/or modified sequence
atgggcagcaacctgagcccccagctgtgcctgatgcccttcatcctcggactgctgtccggaggagtgaccaccaccccttggtccctggcccggcctcagggctcctgtagccttgaaggcgtagaaatcaagggcgggtctttccgacttctgcaggaggggcaggcgctggaatacgtctgtccatccggattctatccgtatcccgtgcaaaccaggacatgcaggtcaaccggatcatggtctacccttaagactcaggatcagaaaaccgtgcgcaaggccgaatgcagggccattcattgtccgcgacctcacgacttcgagaacggtgaatactggccgcgctctccttactacaatgtgtccgatgagattagttttcactgctatgacggttacaccctgcgcgggtccgccaatcgcacctgtcaggtgaatggaaggtggtcagggcagaccgcgatctgtgataatggcgctggatattgtagcaaccctggaatccctattggaactcgtaaggttggatcccagtacaggctagaggattctgtgacgtaccattgtagccgaggactaaccctccggggctcgcagagacggacctgtcaagaaggcggaagctggtcaggcactgaaccctcttgccaggactcttttatgtatgacactccacaggaggtggctgaggctttcctttccagtttgactgagacaatagaaggcgtggatgcggaggacggacacggccccggtgagcagcaaaagagaaaaatagtgttggacccctcggggagcatgaacatatatcttgtgcttgatggtagcgacagtatcggtgccagtaatttcactggagcaaaaaaatgcctcgtcaatttaatcgagaaggttgctagctatggagtcaagcctcgctacgggctggtgacatacgcgacttatccgaaaatatgggtcaaggtcagtgaagccgattcaagcaatgccgactgggtgaccaagcagctaaatgaaatcaattacgaggatcataaactcaaaagtgggacaaacactaagaaggccctgcaggctgtgtactccatgatgtcttggcccgacgatgtgccaccggagggatggaataggacgcgccacgtcatcatcctcatgaccgacggcctgcataacatggggggcgatccaatcactgtgatagatgagattagagatctgctgtacattggcaaagataggaaaaatccgagggaagattacctggacgtatatgttttcggggtgggcccattggtcaaccaggtcaacataaatgcactcgcgtccaaaaaggacaacgagcaacacgtgttcaaggtgaaagacatggagaatctcgaagacgttttctatcaaatgatagatgaatcgcaaagcctttccctgtgtgggatggtgtgggagcatcgtaagggcactgattaccacaaacaaccctggcaggctaaaatctccgttatccgtcctagtaaagggcatgaatcctgtatgggagcagtggtctcagaatattttgtgctcaccgctgctcactgctttactgtggacgacaaggaacattcgataaaggtgtccgtggggggtgaaaaaagagacctagagattgaagtagtgttatttcaccccaattacaatattaacggaaaaaaggaagctggtattcctgagttctacgattacgatgtggcgctcattaaactgaagaacaaactcaagtatgggcagactattcggccaatctgtctgccctgcaccgaaggcaccacaagagccctaaggctcccgcccactaccacttgccagcaacagaaagaggaattgctgccagcccaggatataaaggccttgttcgtgtctgaagaggagaaaaagctcacccgcaaggaggtctacattaagaacggggacaagaaagggtcgtgcgaaagagacgcccagtacgcaccagggtatgataaagtgaaggatatctcagaggtggtgactccgcgatttttatgcactggaggcgtgtccccctatgctgatcccaacacatgccgaggagatagcggcggcccactgattgtccacaagcggagcagatttattcaggtgggagtgatttcctggggtgtggtcgacgtgtgtaagaaccagaaaagacagaagcaggtgccagcacacgcacgagactttcacataaatctctttcaggtattaccctggctgaaagagaaactccaggacgaagatctgggcttcctttag

SEQ ID NO: 120171 - DNA, 2295 bp, Artificial Sequence
  derived and/or modified sequence
atgggcagcaacctgagcccccagctgtgcctgatgcccttcatcctgggattattgtctggcggagtgaccacgacgccatggtctctcgcaaggccgcaaggctcctgttcgctggaaggtgtcgagattaaaggtggcagtttccggctactgcaggagggtcaagccctggagtacgtatgcccatctgggttctacccttatcctgtgcagactaggacttgccggagcaccggttcttggtctacactaaaaacccaagatcagaagactgtgcgcaaagcagaatgcagggccatccactgtccccggccccacgattttgagaacggtgaatactggcctagaagcccttactataatgtgagcgatgagatctccttccactgttatgacgggtatacacttaggggatctgcgaaccgcacatgtcaggtcaatggcaggtggtctggccagacagctatatgcgataatggtgcgggatactgcagcaatcctggaatcccgattggaacgagaaaagtcggcagtcagtaccgactcgaggattcagtgacgtaccattgttcacgaggtctgactctgagaggtagccagaggaggacctgtcaggaaggcgggagctggagcggtactgaaccttcctgtcaggattcttttatgtacgacacaccccaggaagtagccgaggcattcctgagcagcctgactgaaactatagaaggagtggacgctgaggacggtcacggtcccggcgaacagcagaagaggaaaatcgtactggatccctctggaagcatgaatatctacctggtgcttgatggctccgattccatcggtgcatccaattttactggagctaagaaatgcctggttaacctcattgagaaggtggcttcctatggggtgaagccccgctatggtctggtcacttacgccacctatccaaagatttgggtgaaagtttccgaagccgacagctccaatgccgactgggttacaaaacagctgaacgaaatcaattatgaagaccacaagctcaagtccgggacaaacacaaagaaggccctccaagcagtgtacagtatgatgtcatggccagatgatgttcctcccgaaggctggaatagaactcgccacgtgataatattgatgactgacggtctccataatatgggcggagaccctattacagtgattgatgagatccgtgacctgctgtacattggcaaagacagaaagaaccccagggaggattacctggatgtgtacgtcttcggcgttggaccacttgtcaatcaggtgaatataaatgccctcgcctctaaaaaagataacgaacagcatgtgttcaaagtaaaggatatggagaacctggaggacgtgttttatcagatgattgatgagagtcaatcattgtctttgtgtggtatggtgtgggagcacaggaaggggacggactaccacaagcaaccgtggcaggcaaaaatatccgtgattagaccttcaaagggacacgagtcttgtatgggcgctgttgtctccgagtacttcgtcctcactgccgctcactgctttaccgttgatgacaaagagcactccattaaggtgtctgtcggaggagaaaagagggatctggagatagaggtcgttctcttccatcccaactataacattaacggcaagaaagaagccgggatccccgaattttacgattatgatgtggccctgattaaacttaagaacaaactgaaatacggccagacaatccgccccatatgcttgccatgcacagaggggactacacgcgctctgcgcctgccacctactacgacctgccagcagcagaaagaagaattgctgcccgcacaagacatcaaagccctatttgtgagtgaggaagagaaaaagctgactaggaaggaagtatatattaagaacggcgataaaaagggctcctgtgaaagggatgctcagtatgcccccggttatgataaggtaaaggacatcagcgaggtggtcacaccaaggtttctctgcacggggggagtaagtccctatgcggatcccaatacgtgccggggcgactccggaggaccattaatcgtgcataaaaggtctcggttcatccaggtgggggtcatctcttggggcgtggtggacgtctgcaaaaaccagaaaagacagaaacaggtgcccgcccacgcacgcgacttccacattaacttgtttcaggtgctaccgtggctcaaagaaaaacttcaggatgaagacctgggttttctctag

SEQ ID NO: 120172 - DNA, 435 bp, Artificial Sequence
  derived and/or modified sequence
atgggcagcaacctgagcccccagctgtgcctgatgcccttcatcctggggctgctatctggaggagttaccaccactccatggtccttggctcgccctcagggatcctgtagcctggaaggcgttgagatcaagggcgggagctttaggttgctccaggagggacaggcactcgagtacgtgtgtccctcagggttttacccttaccctgtccagacacggacttgcaggagtaccgggtcctggtcaaccttgaagacccaagaccagaaaacagtccgaaaggctgagtgtcgcgcaatccattgtccccgccctcatgactttgagaacggcgaatattggccccggagtccctattataacgtttctgatgaaatcagttttcactgctatgacgggtacacgctccgcggatctgccaaccgtacctag

SEQ ID NO: 120173 - DNA, 3801 bp, Artificial Sequence
  derived and/or modified sequence
atgggccccctgatggtgctgttctgcctgctgttcctgtaccccggtctagccgattcagccccatcttgcccacagaacgttaacatcagcggcggtacttttactttgagccatggctgggcccccggctctctgctgacatattcatgccctcagggactgtacccttcgccagcatccagactctgtaagagcagcggccagtggcagacccctggcgccacgcggagcctcagcaaagctgtatgtaaacccgggcactgcccaaacccagggataagcctgggtgccgtcagaactggatttaggtttggacacggagataaagtgcggtaccgctgctccagtaacctggtcctgacaggctcttcagagcgggaatgccaggggaatggggtctggtccgggactgagccgatctgccgccaaccctactcatacgatttcccagaggacgttgcgcccgctctcggaacttccttttcacacatgctaggcgctacaaatcccacgcagaagacaaaggaccatgagaacggaacaggcaccaacacctacgccgccctgaattctgtgtaccttatgatgaataatcagatgcgtctgctcgggatggagacaatggcctggcaagagataaggcatgcaataatcttgctaaccgatggaaagagtaacatgggaggatctcccaaaaccgcagtggaccacattagggagatcctgaatattaatcagaagcgcaacgactacctggatatttacgccatcggcgttggtaagctggatgttgattggcgagagctcaacgagcttggatcaaaaaaagacggagaacgtcatgccttcatcttgcaggatacaaaggctctgcatcaggtgtttgagcacatgcttgacgtgagtaagcttactgataccatctgcggcgtggggaacatgtccgccaatgcatcagaccaggagcgtaccccctggcatgtgaccatcaaaccaaaaagccaggagacctgtagaggagctcttattagtgaccagtgggtcctcaccgcagcccattgtttcagggatggaaacgatcattcattgtggcgcgtgaatgtcggcgatcccaaatcgcaatggggaaaagaattcctcattgagaaggcagtgatttccccgggattcgacgttttcgctaaaaaaaaccagggcattctcgagttctacggagatgacatagcactgctgaaactggcacagaaggttaagatgagcactcatgcacgcccaatatgtctgccctgcacaatggaagccaatctggctcttcggagaccccaaggaagcacctgccgcgaccacgaaaacgagctgttgaacaagcagagcgtgcccgctcattttgtagctttgaatgggtctaaactaaatatcaacctcaagatgggagtggagtggacctcctgtgccgaggtggtgagtcaagaaaaaacaatgttcccaaacttgaccgacgttcgggaggtggtaactgaccagttcctgtgcagcggaacgcaggaagacgagagcccctgcaaaggagtcactactaccccctggtcattggcacgccctcagggctcctgcagcctggaaggtgttgaaatcaaaggcggtagctttcgcctgctccaagaagggcaggcactggagtatgtgtgcccttcagggttttacccatatcctgtgcagacgcgaacatgtaggagtactggcagttggagtacgcttaagacgcaagaccagaagacggtgcgcaaagccgagtgtagagccatccattgccccagacctcacgactttgagaatggagaatactggcccaggtcaccctattataatgtctctgacgagatatcctttcactgctacgatggctatacgcttagggggagtgccaatcgaacatgccaggttaatggcaggtggtcagggcagaccgcgatttgtgataacggtgccggctactgtagcaatcctggaatccctattgggacccgtaaagttggtagtcagtatcgactggaggattctgttacctatcattgttctagggggctgacacttaggggcagccagcgacgcacatgccaagagggaggcagttggagtggcacggagccaagctgtcaggactcttttatgtatgatacaccacaggaggttgctgaggcttttctgtcgtccctcacggaaacaattgagggcgtcgatgccgaggacgggcacggacccggagagcaacagaagagaaaaattgtactggatccttcaggtagtatgaacatctacctcgtcctggatggaagtgactctataggcgcctccaacttcacaggtgcgaagaagtgtctggttaatctaatcgagaaggttgcttcatacggcgtgaagccgcggtacggtcttgtgacctacgccacatacccaaaaatttgggttaaggtttcagaagccgacagttctaacgccgactgggtcaccaaacagctcaatgaaattaattacgaagatcataagctgaaatctggcaccaacacaaaaaaagctctgcaggccgtttactccatgatgtcctggcctgacgacgttccccctgaaggctggaaccgtacgagacacgtgataatcctaatgactgacggtctgcacaatatggggggagaccctatcacggtgatcgatgagattcgggatcttctatatatcggcaaggaccgcaagaacccgagggaagattatcttgatgtttatgtgttcggagtgggcccactggttaaccaggttaacattaacgcgcttgcttccaaaaaggacaatgagcagcacgtgttcaaagtaaaggatatggaaaacctggaagacgtgttctatcaaatgatcgatgaaagtcaaagcctttccctctgtggcatggtgtgggaacatagaaagggcacggactaccacaagcaaccttggcaagccaagatctcagtgatcaggccatccaaaggtcacgagagctgtatgggcgcagtcgtaagcgagtacttcgtgctcaccgccgctcactgttttacagttgatgacaaggagcatagtatcaaggtgtccgttggaggagaaaaacgtgatctcgaaatagaggtggtcctgtttcacccaaactacaacataaacggaaagaaggaggccggaatacccgagttttatgattatgatgttgcactgatcaagctgaagaataaactgaagtacggacagacaatcaggccaatctgtcttccatgcaccgagggcactaccagagctttaagactcccccctaccacaacctgtcagcagcagaaagaagagctcttgccagcccaggatatcaaagcgctgtttgtgtccgaggaggagaaaaagctcacccgaaaagaggtctatatcaagaatggtgacaaaaagggttcctgcgagcgcgatgctcagtacgcccctggctacgacaaggtgaaggacattagtgaggtggtgactcctcgattcctgtgtaccggcggcgtctccccctacgccgacccaaacacctgtagaggggacagtggaggacctctgattgtgcacaaacgttcacggttcatacaagtaggagtgatcagctggggtgtcgtagatgtgtgcaaaaatcaaaagcggcagaagcaggttccagcccacgctcgggattttcacatcaatctgtttcaggtgctgccttggctgaaagaaaaacttcaggatgaagacctgggctttctgtag

SEQ ID NO: 120174 - DNA, 3801 bp, Artificial Sequence
  derived and/or modified sequence
atgggccccctgatggtgctgttctgcctgctgttcctgtaccccggcctggcagattctgccccaagctgccctcaaaacgtgaatatttctggaggtacgttcaccttatctcatggttgggcgccaggctcccttctcacctattcatgcccgcagggtctttacccctcgcctgcctccaggctttgcaaaagctcaggccagtggcagacccctggcgctacccggtctctgtccaaggccgtgtgtaaacctggccactgccccaaccccggaattagcctaggggctgtgaggactggatttagatttggccatggcgacaaagtgcgctatagatgctccagcaacctagtgcttacggggtcctccgagcgagagtgtcagggcaatggggtttggtccgggactgaaccgatttgtagacagccctatagttacgatttccccgaggatgtggcccccgctttgggcacctcctttagccatatgctaggggcaactaatcccactcagaaaacaaaagaccatgaaaacgggacgggcaccaacacatatgccgctttgaactctgtgtacctgatgatgaataatcagatgcgcctgctcggaatggagacaatggcctggcaggagatacggcatgcaatcattctgctcaccgatggaaagagcaatatgggcggaagccctaaaactgctgtggatcacattcgagagattctgaacatcaaccagaaacgtaatgactacctggacatctacgccataggggttggtaaactggacgtggactggcgcgaactaaacgagctgggttccaagaaggatggggagaggcatgcttttattctgcaggataccaaggccttacatcaggttttcgagcacatgctagacgtgtcgaaactgaccgataccatttgcggtgttggcaacatgtctgccaacgcttccgatcaggaacgaacaccatggcacgtgaccattaaacccaagtcccaggagacgtgtcgaggcgccctgatcagtgaccagtgggtgttgaccgccgctcattgtttcagagacggcaacgaccattccctatggagagtgaatgtgggagatcccaaaagccagtgggggaaagaattcctgatagaaaaggcagtgatttcgccgggatttgacgtttttgcaaagaaaaatcaaggaatccttgaattctacggggatgatattgctctgctcaaacttgcccaaaaggttaaaatgagcacacacgccagaccaatttgccttccttgcactatggaagctaacctagctctaaggcggccgcagggttctacatgtagggaccacgagaacgagctgttgaacaagcagagcgttccagctcacttcgttgctttgaacggttctaaactgaatataaatttgaaaatgggagtggagtggacctcctgcgcggaggtggtctcccaagaaaaaaccatgtttccaaatctgaccgacgtgcgcgaggtggtgaccgatcagttcctttgttccggcactcaggaagatgaaagcccctgtaagggcgtgactacaaccccctggtctctggcccggccacagggcagctgctctttggaaggagtcgagattaagggcgggtcttttcgcttgcttcaggagggacaggctctggaatacgtttgccctagcggattttatccctacccggtccagacccggacatgccgatccaccggttcatggagtaccctgaagactcaagatcaaaagacagtaagaaaagctgagtgtcgggcaatccattgtccccgcccacatgattttgagaatggggagtattggccacggagtccttactacaacgtgtccgacgagattagtttccattgctacgacggttataccctccgcggctctgcaaatcggacgtgtcaagttaacggacggtggtccggtcaaacagccatctgcgataacggagcgggctactgctccaacccagggatcccaattgggacccgcaaagtcggtagtcagtatcggttagaggactctgtcacctatcactgtagccggggactgacactgaggggttcgcagaggcggacatgccaggagggaggctcatggtcaggtactgagcctagctgccaagactcattcatgtacgatactccgcaggaggtggctgaggcctttctatccagcctgactgaaacaatagagggtgtagacgcagaagatgggcatggacctggagagcagcagaagcgtaagatcgttcttgacccgtcagggtctatgaatatttatctggtcctggacggatcagactcaatcggcgcttccaatttcacgggcgccaaaaaatgcctggttaacttgatagaaaaagtagcttcttacggggttaagccccggtatgggctcgtgacttatgccacgtaccctaaaatctgggtcaaggtgtcagaagctgattcctcaaacgcagattgggtgacaaaacaattgaacgaaatcaactacgaagatcataaattaaagtccggtaccaatacaaaaaaagctctgcaagccgtctatagtatgatgagctggcctgatgacgtgcctccggaaggttggaaccggacgcggcacgtcataattcttatgaccgatggcctgcacaacatggggggtgatcctataactgtgattgacgagattagagacctgctgtatatcggtaaagatcgaaaaaaccctcgggaggattacctggacgtctatgtctttggagtcggcccactagtcaatcaggtgaatattaatgcattggcgtcgaagaaggacaatgaacagcatgtgtttaaggtcaaagacatggagaacttggaggacgttttttaccagatgattgacgagtctcaaagcctgagtctgtgcggtatggtatgggaacatagaaaaggaactgattatcataagcagccctggcaggccaagatatctgttataaggccaagcaagggccatgaatcctgtatgggcgcagttgtctcggagtacttcgtgctcaccgctgcacactgctttaccgtcgacgacaaggaacattccattaaggttagtgttggcggcgagaagcgtgatttggaaatcgaagtcgtcctctttcacccaaattacaacatcaatggcaaggaggaagcagggatcccagaattttatgattacgatgtcgcactcattaagttgaagaacaagctgaaatacggccagaccatccgaccaatttgcctcccgtgtaccgaaggcacaaccagggccttgcgactgcccccaaccacaacttgtcagcaacagaaagaagaattgctccccgctcaggatattaaggctttgttcgtttctgaggaagagaaaaagctgacccgcaaggaggtatacataaaaaatggcgacaagaaagggtcatgtgagcgcgatgcccagtatgcacctggctatgacaaggtgaaagacatttccgaggtcgttaccccccgatttttgtgcactgggggagtttcaccttacgccgatccaaacacatgccggggggactcagggggcccactaatagtgcataagcgctccaggttcatacaagtaggggtgatctcttggggagtggtggacgtctgtaagaatcaaaaacgccagaaacaagtgcccgcacatgcacgggacttccatatcaacctgttccaagtgctaccatggttgaaagagaagctgcaagacgaggatctagggttcctgtag

SEQ ID NO: 120175 - DNA, 3801 bp, Artificial Sequence
  derived and/or modified sequence
atgggccccctgatggtgctgttctgcctgctgttcctgtaccccggactggcggactctgcaccctcctgccctcagaacgtgaacatatccggcgggaccttcaccctgtcgcatggctgggcacctgggtccctgctgacctatagctgccctcagggtctgtatcctagcccagccagccgcctgtgcaaatcctcaggacagtggcaaacccccggtgccaccagatcactcagcaaggccgtgtgcaaacccggccattgccccaacccgggaatcagtctaggagcagtacgcacaggcttccgcttcggccatggagataaagtccgctacagatgctccagcaacctggtgctcaccgggtcaagtgagcgcgagtgtcaggggaatggtgtctggtccggcacagagcccatttgccgacagccgtattcttatgacttcccagaggacgtggccccagcactgggaacatcattctctcatatgctgggggccactaaccccacccaaaaaacaaaagaccatgagaacggcacaggaaccaacacttacgccgcgcttaacagcgtgtacctcatgatgaacaatcagatgcgtcttctgggcatggaaacgatggcatggcaggaaatacgccacgccataattctgctcacagatggtaaatcaaacatgggaggctccccaaaaaccgcagtcgaccatataagggaaatccttaatattaaccagaaacggaatgactatcttgatatttacgctataggcgttgggaagctcgatgttgactggcgtgagttaaatgaattaggctctaagaaagatggcgagcgtcatgcttttattttacaagatacgaaggcacttcaccaggtgtttgaacacatgctggatgtgagcaagctgacggatactatttgcggagtgggcaatatgtcggcaaacgctagcgaccaggagcggacaccttggcatgtcacaatcaaaccgaaatcccaagagacctgcaggggagctttaatcagcgatcagtgggtcctgacagccgcccattgctttcgtgatgggaacgaccactcactgtggagagtcaacgttggggaccctaagtctcagtggggaaaggaatttctgattgagaaagcggtgatttctccagggtttgatgtctttgcaaagaagaatcagggaatcctggagttctacggggatgacattgcgttactgaagctggcccagaaagtgaagatgtccacacatgctcgacccatatgtttgccttgcactatggaggcgaatctcgctcttcgccgtcctcagggttctacttgtagggaccacgagaatgaactcttaaacaaacagagcgttcctgcacacttcgtagctctgaatggctccaagttgaacataaatttaaagatgggagttgagtggacctcctgcgctgaagtggtgtctcaggaaaagaccatgtttcccaacctgacggatgtgcgcgaggtggtgaccgatcagttcctctgctcaggaacccaggaggatgagagcccttgcaaaggagtgacgactactccatggtctttagcccggccacaaggcagctgcagcctggagggtgtcgagattaaaggcggctccttcaggttgttacaggaaggacaggctctggaatacgtctgtccatccggtttttatccataccctgtccagacgaggacctgccgatcaactggtagttggtccactcttaagacacaggaccagaagacggtacgcaaagctgaatgtcgggcgattcattgcccaagacctcacgacttcgagaatggggaatactggccgcgaagcccatattataatgtatccgacgagatcagctttcactgttacgacggctacaccttaagagggagtgcaaacaggacatgccaagtgaacgggaggtggagcggccaaacagcaatttgcgataacggcgccggctattgttcaaatcccgggatccctatcggaacgagaaaggtgggttctcagtatcggttggaagactccgtcacctatcattgttcgcgcggcctgacgctgagaggatcgcaacgaagaacatgccaggaaggtgggagctggtcaggaactgagcctagttgccaggactcgtttatgtacgatacccctcaggaggtggccgaagcttttttaagctctcttacagaaacaatagagggggtcgatgccgaagacggccacggccctggcgagcaacagaagaggaaaattgtgctggatcccagcggcagcatgaatatctacctcgtccttgacgggtccgactcgataggcgccagcaactttaccggcgcaaaaaaatgcctggttaacctgattgagaaagtcgcttcctacggcgttaagccacggtatggactggtgacgtacgctacatacccaaagatctgggttaaggtatcggaagctgattctagcaatgccgattgggttaccaagcagttaaatgaaataaactatgaagaccataagctgaagtctggtactaatacgaaaaaggccctgcaagctgtttactctatgatgtcctggcctgacgacgtgcctcctgaaggctggaacaggactcgacatgtgatcatcctgatgactgacggactccataatatgggaggggaccccataactgtaatcgacgagatccgggatctactttacattggcaaggaccggaaaaaccctagagaagactacttagatgtgtatgtgttcggtgtcgggccgttagtgaatcaggtgaacataaacgcactcgcaagtaagaaggataacgagcagcacgtttttaaggtgaaagacatggagaaccttgaggacgtgttttatcaaatgattgacgagtctcagtctttatctctctgcggaatggtttgggaacaccgcaaggggaccgattaccacaagcaaccttggcaggccaagataagcgtgattagaccgtccaaaggccatgagagttgtatgggagctgtggtgagcgagtattttgtgctgacagcggcccattgttttaccgtggatgataaagaacactccattaaggtgagcgtgggcggggagaaacgtgatctcgaaattgaggttgtactcttccaccccaattataatattaatgggaaaaaagaggctggaatacctgaattttacgattacgacgtcgccctcatcaaacttaagaacaagctgaagtacgggcaaactatcaggcctatttgtctgccatgcaccgaggggacgaccagggccctaaggttgccacctacgaccacctgtcagcagcagaaagaggagctgttaccggcacaggatatcaaggctctctttgtgagtgaggaagagaagaaattaaccaggaaggaagtgtatatcaaaaacggggataaaaaagggtcctgtgagagggatgcacagtacgccccaggatatgataaagtcaaggatatttctgaagttgtgacccccagatttctgtgcacgggaggagtctcaccctatgcggaccccaacacgtgccgtggtgacagtggaggtccacttatcgtccataagaggagtcgcttcatacaagttggggtgattagctggggcgtggtcgatgtttgtaaaaatcaaaagagacagaagcaggtgcctgctcacgcacgggatttccatatcaatctgttccaagtcctcccatggctgaaagagaagctgcaggacgaagatcttggattcctgtag

SEQ ID NO: 120176 - DNA, 3801 bp, Artificial Sequence
  derived and/or modified sequence
atgggccccctgatggtgctgttctgcctgctgttcctgtaccccgggctggcggattcagccccctcttgtccccagaacgtgaatatcagtggaggaacatttacactgtcccatggttgggccccaggcagcttgctgacctattcttgtcctcaaggtctgtatcctagcccggcgagtcgattatgtaagtctagcggccaatggcagacccccggagctacacggagcctctcgaaggccgtctgcaagccgggccactgtcccaatcctggaatcagtcttggggccgtaaggaccggcttccgcttcgggcacggcgacaaagtgcgataccggtgcagcagcaacctggtccttaccggcagttctgaaagggagtgtcagggcaatggagtgtggagtgggacagagcctatttgccggcaaccctatagttatgatttccctgaagacgttgccccggcactgggcaccagcttcagccacatgttaggcgccactaacccaactcaaaaaaccaaggaccatgaaaacgggacaggaaccaacacctacgcagccctcaactcagtttacctgatgatgaacaaccaaatgcggttgctgggtatggagaccatggcttggcaggaaatacgacacgcgatcattctgctgactgacggtaagtcgaacatggggggctcgcctaagaccgcggtggatcatatccgcgaaatcctgaatatcaaccaaaagcggaatgactacttggatatatacgctattggggtgggcaaacttgatgtcgattggagagaactcaacgaactcggttcaaaaaaagatggagagaggcacgctttcatcttacaagacacaaaggcgctgcatcaggtattcgagcatatgctggatgtgtcaaaactgacagataccatctgcggcgtcggaaacatgagcgctaatgctagtgatcaggaaaggactccatggcatgtgaccattaaacccaaatctcaggagacatgtcggggagctttgatatccgatcagtgggtgctcactgccgctcactgttttcgggatggcaacgatcattccttatggcgggtgaacgtcggggaccctaaatcgcagtggggcaaagaatttctgatcgagaaggccgttatatcccctggattcgatgtatttgcgaagaagaatcaaggcatccttgagttttatggggatgatatcgccctactgaagctggctcagaaagtgaagatgtcaacccatgcacgcccaatttgcctcccctgcaccatggaggcgaatctcgcactgcgacgtcctcaggggagcacctgccgagatcacgaaaacgagttgctcaacaagcagagtgtgccagcacactttgtggccttgaatggcagtaagctgaatatcaacctgaagatgggcgtggagtggacatcatgcgctgaggtggtgagccaggagaaaacgatgtttcccaatctgacagacgtgagggaggttgttaccgaccagttcctgtgtagcggaacccaggaggatgagtcaccatgtaaaggcgtgaccacaaccccatggagcctagcccggccccaggggtcatgctcattggaaggagtcgaaatcaagggcggttccttccggctgttgcaggaggggcaggccttagaatacgtgtgtccctcaggcttttacccgtatcccgttcagactaggacctgtcgaagcactgggtcctggtcaaccctcaagacccaggaccaaaagacagtccgcaaggccgagtgtcgtgctatccactgtccgagacctcatgacttcgagaacggagaatattggccacggtctccttattataacgtgtcagacgaaattagctttcactgttatgacggctatactctccggggatcagccaacagaacatgccaggtgaatggacggtggagtggccagactgccatctgcgataacggcgcaggctactgttcaaacccaggcatccctattggtactcgaaaggttgggtcccagtatcggttggaggactcagtcacttaccactgcagtcgtggattgaccctcaggggatcacagaggcgcacatgtcaagaaggtggctcctggtccggcacagagccttcctgccaggactccttcatgtacgacaccccacaggaagtggccgaggccttcctgtcctctcttaccgagactatagagggggtggatgccgaagacgggcatggccccggcgaacagcagaaaagaaagatagtactggatccctctggttccatgaacatctacctggtgctggacggatcagactccatcggtgcaagtaatttcacaggcgcaaaaaaatgtcttgtcaatctgattgaaaaggttgccagctatggggtaaagccccgctacgggctggtaacatatgctacttatcccaaaatttgggtaaaggtctccgaggccgatagttccaacgccgattgggtgactaaacagctcaatgagatcaattacgaggatcataaactcaaaagcgggaccaacaccaagaaagcgctccaagctgtgtacagcatgatgtcctggcctgacgacgtccctcctgaaggctggaatcggactcgccacgttatcatcctaatgactgatggactgcacaatatgggcggagaccctattactgtcatcgatgaaatcagggatttactgtatattggcaaggaccggaagaatccaagggaagactacctcgatgtgtacgtcttcggggtcggtccgctggtaaaccaggtaaatattaacgcattggctagcaagaaggacaacgagcagcatgtctttaaagtgaaagatatggaaaacttagaagatgtgttctaccagatgatcgatgagtcccaatcgttaagtctctgcggcatggtgtgggagcaccggaagggtactgattaccacaaacagccatggcaggccaagatctcagtgatcaggcccagcaaaggtcacgagtcatgcatgggcgccgtggtaagtgagtacttcgtgttaacagccgctcactgcttcaccgtggatgataaagagcactcaatcaaagtaagcgtgggtggcgagaagagggacctggaaatcgaggttgtgctatttcatccaaattataatattaacggcaagaaggaggctggaattccggaattctatgattatgacgttgctctaatcaagctcaagaacaagctgaaatatggccaaactattcgacccatttgcttaccttgcacggaggggaccacacgcgccctgcgccttcccccgacgacaacctgtcaacagcagaaagaggagctgttgccagcacaggatattaaagccctgttcgtgtccgaagaagagaagaagctgacgcgaaaggaggtctacatcaagaacggtgacaagaaaggaagctgtgagcgcgacgcacagtacgctcctggctacgacaaggtgaaggacatctccgaagtggtgactccccgattcctgtgtacaggcggggtctccccctatgctgaccctaacacttgccgcggcgacagcgggggtccacttatcgtccataagcgaagtagatttatccaggtgggagtcatctcatggggcgtggtagacgtctgtaaaaatcaaaagagacagaagcaggtgcctgcccatgcacgcgatttccacatcaatctctttcaggtactgccatggcttaaggagaagctgcaggatgaagatctaggctttctgtag

SEQ ID NO: 120177 - DNA, 3801 bp, Artificial Sequence
  derived and/or modified sequence
atgggccccctgatggtgctgttctgcctgctgttcctgtaccccgggctagccgactccgccccgtcatgcccacaaaacgttaacatttccggaggaacgttcactctgtcacatggatgggctcctggatcgctgctgacgtatagttgtcctcaggggttgtacccatctcccgccagcagactctgtaagtcttcggggcaatggcaaaccccaggcgcaaccagatctctgtcaaaagcagtatgtaagcctggccattgtcctaacccaggcatctcactgggcgcagtacgcactgggttccggttcggacatggtgataaggtgcggtatcggtgttctagtaatctggttctgactgggagcagcgagcgggaatgtcagggcaatggcgtgtggagtggaacagagcccatatgccgccagccgtactcctatgatttccccgaagatgtcgcgcctgcactagggacatcattctcacatatgctcggggctaccaatccgacacaaaagactaaggaccatgagaacggtaccggcaccaatacttacgcagccctaaattcagtctatctgatgatgaacaaccagatgcgcctgctcgggatggagaccatggcctggcaggagatccgccacgctataatcctcctgacagatgggaagtccaacatgggcgggagccctaagacggctgttgaccatattcgtgagattctcaacattaatcaaaaacggaatgactacctagacatttatgccattggggtcggcaaactcgacgttgactggagggaattaaacgagttaggatccaagaaggatggagaaagacatgcttttattctacaagacactaaagccctgcatcaggtgtttgagcacatgctggacgtgtccaaactcactgacacaatatgcggcgtggggaatatgagcgccaatgcctcagaccaagagcgtacaccatggcatgtcaccattaagccaaaatcccaggagacctgccggggggcattaatcagcgaccagtgggtcttgactgcagctcattgtttccgggacggaaacgatcatagcctttggcgcgtgaatgtaggagatccgaagtcgcaatggggcaaggagtttcttatcgagaaagccgtgatctcacctggtttcgatgtgttcgccaagaagaaccagggaatattagagttttacggagatgacatcgcactgctgaaattggcccagaaagtaaaaatgagtacccacgcacgcccgatttgcctgccttgtaccatggaggcgaacctggccctgagaaggccccaaggaagcacctgtagagatcatgaaaacgaactactcaataagcagtccgtcccggcccatttcgtagccctgaatggatccaaattgaacataaaccttaagatgggtgtcgaatggactagctgcgctgaggtggtgtctcaagaaaaaacaatgttccccaacctgactgacgtgcgcgaagtggtcacagatcagttcctctgcagcgggacccaagaagatgaatccccttgcaaaggcgttacaaccaccccctggagcctggctaggccacagggcagctgtagtttggagggtgtggagataaagggcggaagttttagactgctacaagaggggcaagctcttgaatatgtctgtccttctgggttctatccctatccggtacagacccggacatgcaggagtactggctcatggagtacccttaagacccaggaccagaagaccgtacggaaggccgagtgccgggcgatccattgtcctcgcccccacgattttgaaaatggggagtactggccaagatccccatactacaacgtgtccgacgagatatctttccactgttacgatggttacactctccgcggctccgcaaataggacctgtcaggtaaacggtaggtggtctggccaaacggccatctgtgataatggagctggatactgtagcaacccaggtatcccgatcggcactagaaaggtgggctcacagtaccggctagaagactcagtaacatatcactgctccagaggtctcaccctaaggggctctcagagaagaacctgtcaagaaggaggctcatggtccggcacagagccttcttgccaggattcctttatgtacgacactccccaggaagttgcggaggccttcctgtcaagcctcacagagaccatagagggtgtcgatgcagaagatggtcacggacccggcgaacaacagaagcggaaaattgttctggacccatccgggtccatgaacatctatttggtattagatgggtccgacagcataggcgcaagtaactttaccggcgcaaagaaatgcttggtgaatctgattgagaaagtggcgtcttacggtgtcaaacccagatacggattggtgacatacgccacataccctaagatttgggtaaaagtatctgaggccgattcctcaaacgccgattgggtgaccaagcagctaaacgagatcaattacgaggaccacaagctgaaaagcggcaccaacacgaagaaggctctgcaggccgtctattctatgatgagctggcctgatgacgtcccaccggaagggtggaaccgaaccagacacgtgattatattgatgaccgatggactgcataatatggggggtgatccaattacggttattgatgagatcagagacttactgtatattggcaaggatcgcaagaatcctagagaggattatctggatgtgtacgtgttcggggtggggcctctcgtgaaccaggtaaatattaatgcccttgcctccaaaaaggataatgaacaacatgtgttcaaagtgaaggatatggaaaaccttgaagatgtcttctaccaaatgattgatgagtcgcagtcactctcactctgtggaatggtttgggagcacagaaagggcaccgactaccataaacaaccttggcaagctaaaatttccgtcatacgtccctcgaagggccacgagagttgcatgggtgcagtggtgtcagaatatttcgtcctgaccgcagcccactgtttcaccgttgacgataaggagcatagtatcaaggtctctgtgggcggcgagaaacgcgatctagagattgaggtggtgctcttccatcccaattacaacattaacgggaagaaagaggccggcataccagagttctacgactacgacgtggcactgatcaaactcaaaaataaactgaagtacggccagacgatacggcctatttgcctcccatgtactgaaggcacaacacgcgctcttcgcctcccccctactacaacctgtcaacagcagaaggaagagttgctccccgctcaggacattaaggcactgttcgtgtctgaggaagagaagaaactgaccaggaaggaagtgtatattaagaacggggacaaaaaaggctcgtgtgagcgggacgcccagtacgcccctgggtacgacaaggtaaaggatatatcagaagttgtgacgccaaggttcctgtgcacagggggggtgagtccatacgcagatcccaacacatgccgaggagatagtggcggacctttaatagtgcacaaacggtctcgatttatccaggttggtgtgatctcatggggggtagtagacgtgtgcaagaaccagaagcggcagaaacaggttccagcacacgctcgagacttccacattaacttattccaagttcttccctggctcaaagaaaagttgcaggatgaggacttgggttttctgtag

SEQ ID NO: 120178 - DNA, 3801 bp, Artificial Sequence
  derived and/or modified sequence
atgggccccctgatggtgctgttctgcctgctgttcctgtaccccggtttagccgactctgcaccatcctgtccccagaacgtgaatatatctggtgggaccttcactctgtcacatgggtgggctcccggctccctgctcacttattcgtgcccccagggcctttacccatcacccgccagtcggctgtgtaaaagctctgggcagtggcaaacgccaggggcgacccggtcattgtcgaaggcagtctgtaagcccggccactgcccaaaccccggtatctctctaggtgccgtacgaactggtttcagattcgggcacggggataaagtgagatataggtgctcgagtaacctcgtcttaactggatcctcagaacgcgaatgtcagggaaacggggtgtggagcgggaccgaacccatctgccgacagccctacagctacgatttccccgaggacgtcgctccggcacttgggacttcatttagtcatatgttaggcgctacaaatcctacccagaaaacaaaggaccatgaaaacggtacaggcaccaatacatacgcagctcttaattccgtgtacctaatgatgaataaccagatgcggctgctggggatggaaacaatggcatggcaggaaattcggcacgccattattctgcttaccgatgggaagagcaacatgggaggctcgccaaaaactgccgtggaccacatccgggaaatccttaatattaatcagaagcggaatgactacctggacatctacgcgatcggagtgggcaaactggacgtggactggcgggagctaaatgagctagggtctaagaaggatggagaacgacatgcattcatactgcaagataccaaagcattgcaccaggtcttcgagcacatgttggatgtttccaagctcacagataccatttgcggcgttggtaatatgagcgctaatgcgagcgaccaagagagaactccctggcatgtgactatcaagccaaagagtcaggagacctgtcggggagcactaatcagtgaccaatgggtccttaccgctgctcactgttttcgtgacggtaatgaccactcactgtggcgagtgaatgtgggtgaccctaagtcccagtggggcaaagagtttctcatcgagaaggctgtcatcagccccggctttgacgttttcgctaaaaaaaaccaggggatcttggaattttatggcgatgacattgccctgctgaagctggcccagaaagtgaagatgtccacgcacgctcgcccaatttgcctcccttgtaccatggaggccaacttagcattgcggaggccacagggatctacttgcagagatcacgagaacgaactgctaaataaacagagtgttccggctcactttgtggccctgaacggatctaaactgaatataaatctgaagatgggagtggaatggactagctgtgcggaagtggtgagccaggagaaaactatgttccccaaccttacagatgtgagagaggtggtaactgaccagtttctgtgtagtggaacacaggaggacgagtcaccatgcaagggagtcacaacgaccccgtggagcctcgcccgaccacagggcagctgctctctcgaaggcgttgaaatcaaaggcggctcctttcgcctgcttcaagaaggacaagcactcgagtacgtttgtccatcaggcttttatccttacccagttcagacccgcacttgtcggtcaacaggatcatggtcaacactcaaaacacaggatcaaaaaaccgtgaggaaggcagagtgccgggctattcattgcccccgccctcacgacttcgaaaacggcgagtactggcctaggtcgccatactacaacgtctccgatgagatttcctttcactgctatgatgggtacaccctacgaggatcagccaatcggacatgccaggttaatggccgctggtcaggccagacggccatctgtgataacggggctggatattgtagtaatcctggcataccaattggcactcggaaagtagggagccagtatcgtctcgaggactcggttacatatcattgtagtcgcggcctcactcttagaggcagtcagaggagaacctgtcaggagggaggttcttggagtggtacggagcccagttgtcaggattctttcatgtacgacacacctcaggaagtagccgaggctttcctgtccagcttgaccgagacgatagagggagttgatgctgaggacggacatggaccaggcgagcagcagaaaagaaaaattgtcctggacccatccggcagcatgaatatctatctcgtgcttgatggatcagactctataggcgccagtaatttcaccggcgccaagaagtgtctagtgaacctgattgagaaagttgcctcatacggagtgaaacctcgttacggacttgtgacatacgctacttatcccaaaatctgggtaaaggtcagcgaggccgacagcagtaatgccgactgggtgaccaagcagctcaacgagatcaattatgaggatcataagcttaagagtggcactaataccaaaaaggcacttcaggcggtctactctatgatgtcatggccagacgatgtccctcccgaaggatggaaccgtactcggcacgtgatcatcttgatgacggatggcctacacaatatggggggcgacccaattaccgtgattgatgagattagagacttgttgtacataggcaaggacaggaaaaacccccgcgaagactatcttgacgtgtacgtgtttggagtcggaccccttgttaaccaggtgaacatcaatgcactcgccagtaaaaaggataatgagcagcacgtatttaaagtgaaggatatggaaaatcttgaagacgtgttttaccagatgatcgatgagtcccagtccttatcactctgcggcatggtgtgggaacacagaaaaggcactgactaccacaagcagccctggcaagccaagatctccgtgattaggccctcaaaaggacacgaaagttgtatgggcgctgtagtgtccgagtatttcgttctgacagcggcccattgctttactgttgatgataaagagcacagcatcaaggtgtccgtgggaggggaaaaaagggacctggagatcgaggtcgtgttattccacccgaactacaacattaatggaaagaaggaggcgggaatccctgaattctacgattacgatgtggctttaatcaaactgaaaaataaactgaaatatggtcagactatcagacccatttgcctcccctgcaccgaaggaactaccagggccctgagacttcctccaaccactacttgccagcagcagaaagaagagctgctgcctgcccaagacattaaggctctcttcgtcagcgaggaggaaaagaaactgacccgaaaggaggtatatatcaagaatggcgacaaaaaaggaagctgcgagagggacgcacaatatgcacctggctacgacaaggttaaggacatctcagaggtcgtaacacctcgcttcttgtgtaccggaggggtttccccttacgccgatcctaatacctgtagaggggatagcggtggcccccttatcgtgcataaaagatctcgcttcatccaagttggggtaatatcttggggtgttgttgacgtgtgcaagaatcagaaacggcagaaacaggtgcctgctcatgctcgggattttcacattaatttgttccaagttcttccctggttgaaggagaagctacaggacgaagaccttggtttcctttag

SEQ ID NO: 120179 - DNA, 1770 bp, Artificial Sequence
  derived and/or modified sequence
atgggatcgaatctgtctccgcaactgtgcctcatgcccttcatactgggactactttccggcggagtgactaccacaccgtggtctctcgctcaacctcaaggttcgtgttccctggagggcgtagaaattaagggaggttcttttcgcctgctccaagagggacaggcgctggagtatgtgtgtcccagtggattttatccttaccccgtgcagactcgcacatgtaggagcactggaagttggtcgacactgaagacacaggaccaaaagacagtccgaaaggccgagtgccgggctatacattgcccacgcccacacgacttcgaaaatggcgagtactggcctcgaagtccctattataatgtcagcgatgagatatctttccattgttacgacggctacactctgaggggctccgccaaccgaacctgtcaggtaaatgggagatggagcggacaaactgctatctgtgataatggcgctggctactgttccaatcctggcataccgattggaaccagaaaggttggttctcagtatcggctggaagacagtgtgacttatcactgtagccgcggactcactctgcgcggaagccagcggcgtacctgtcaggaaggcggaagttggagtgggaccgaaccctcctgtcaagactcttttatgtacgataccccacaagaagtcgccgaggccttcttgtctagcctgaccgagactattgaaggcgtagatgcggaggacggacacggccctggcgaacagcagaagagaaagatagtgctagacccgagtggaagcatgaacatctatctcgtgctggacggctctgacagtatcggagcatctaacttcaccggggcaaaaaagtgtctagtgaatctcatagagaaggtggcatcgtacggcgtcaagcccaggtatgggcttgtcacctacgccacttacccgaaaatatgggtaaaggtatcggaggccgacagttcgaatgcagattgggtaaccaagcagttgaatgaaattaattacgaggatcataaactcaaatccggtactaacaccaagaaggcccttcaggcagtgtatagcatgatgtcttggccggacgatgtgcccccagaagggtggaatcgaacgagacacgtgatcatcctgatgaccgatggactgcacaacatgggcggagaccccatcacggttattgatgagattcgcgacttgctctatatcgggaaggatcgtaagaaccccagggaggattatctggatgtctacgtgttcggggtcggcccactggtcaaccaggtgaatattaatgctttggcatcaaagaaagataacgaacagcacgtctttaaggtgaaggatatggaaaacctggaggacgtgttctaccaaatgatcgatgagtctcagagccttagcttatgtggcatggtctgggagcaccgaaagggcacagactatcacaagcagccatggcaggcaaaaatttcagtcattcgcccaagcaaagggcacgagtcatgtatgggcgctgtggtaagtgaatatttcgtgctgacagccgcacattgctttaccgtggacgataaggaacactcgatcaaggtgtctgttggcggtgagaagcgggatctggaaatcgaggtggtgctgtttcaccccaactacaacatcaatggtaaaaaagaagctggaatcccagaattctacgactacgatgtggctcttatcaaactcaagaataaactgaaatatggttag

SEQ ID NO: 120180 - DNA, 1770 bp, Artificial Sequence
  derived and/or modified sequence
atgggatctaacctcagcccccaactttgcctgatgccctttatcctgggcctgttgagcggcggagtaaccacgactccctggtcgcttgcccaaccacaagggagctgctctctcgagggtgtcgaaattaaaggaggctccttccgacttttacaggaaggtcaagcactagagtacgtgtgtccttctggattttacccataccccgtgcagaccagaacatgcagaagtacgggcagctggtctaccctcaaaacacaagatcagaaaaccgtgcggaaggccgaatgccgggcaatccattgccctcgtccacacgacttcgagaacggcgagtattggcctagatcaccttactacaacgtgtccgacgagatcagctttcactgttatgatgggtataccttacggggatcagctaacagaacctgtcaggtcaatggcagatggtctgggcaaacagccatctgcgataatggagcgggttattgttccaacccgggaattcccatcggaacccggaaggtcgggtcacagtacaggctggaagattctgtcacctaccactgcagtaggggcctgaccctccggggatcccaaaggaggacctgccaggaaggagggagctggagtggaaccgaaccgagctgtcaggattcatttatgtacgacaccccccaggaggtagctgaggctttcttaagctctctgacagaaaccatagaaggcgtagatgccgaagatggacacggcccaggagaacagcagaaacggaaaatcgtgttggacccctctggaagcatgaatatttacctcgtattggatggatccgatagcatcggggcatctaattttacgggggctaagaaatgcctggttaacctgatcgagaaagtcgcgtcatatggggtaaagccccgttatggtctggtcacctatgccacatatccgaagatctgggtcaaggtcagcgaggcggactcatccaacgctgactgggtaacgaagcagctgaatgagataaattatgaggatcacaagcttaagtccggcactaataccaagaaggctcttcaagcggtatactccatgatgtcctggcccgacgatgtacctcccgagggttggaacagaacccgtcatgtcatcatccttatgactgatggtttgcacaacatgggcggagacccaatcacagtcatcgatgaaattcgcgaccttttgtatataggcaaggatcgcaaaaatcctcgtgaggattacctggatgtatacgtgtttggagtcggtcctctggttaatcaggtgaatattaatgccctcgcatctaagaaagataacgagcagcacgtttttaaggtgaaagatatggagaacttagaggatgtgttttatcagatgatcgacgagagtcagagcttaagcctctgcggcatggtgtgggagcatcgcaagggaacagattaccacaagcagccatggcaggcaaagatctctgtgatccgtccttctaagggtcatgaatcttgcatgggtgccgtcgtaagcgaatactttgtgcttaccgcagcacattgttttaccgtggacgacaaggagcacagtattaaggtatcagttgggggtgagaaacgcgatctggagatcgaggtggtgctgtttcatcccaactacaacattaacggcaagaaagaagctggtatccccgagttttatgattacgacgttgctctgatcaaactgaagaataagctgaagtatggatag

SEQ ID NO: 120181 - DNA, 2295 bp, Artificial Sequence
  derived and/or modified sequence
atgggtagcaatttatcaccacagttgtgcctgatgcccttcatcctgggcctgctgtcaggcggagttacgacgactccctggtccttggctagaccccaggggtcgtgcagtctggaaggagttgaaatcaagggtggctcatttcggcttttgcaggagggacaggcccttgagtacgtttgtcctagtgggttttatccgtatccagtgcagactcgtacatgtcgctctacaggatcgtggtcaaccctgaagactcaagatcaaaaaacagttcgaaaggccgagtgtagggccatccattgccccagaccgcatgatttcgaaaacggggagtactggcctaggagtccctactataatgttagtgatgagatctccttccattgctacgacggctacacactgcgtggcagcgcgaatcgaacatgccaagtcaacgggagatggagcggccagacagcgatatgtgacaatggagcaggctactgtagcaatcctggaatccctattggtactcgaaaggtgggcagccagtatcggctcgaagattctgtgacatatcattgctcccgcggacttactctccggggttcccagaggaggacctgtcaggaaggaggctcttggtcaggaacggagccatcgtgccaggacagctttatgtatgatacgcctcaggaggtggctgaagctttcctatcttctctgaccgagacaattgagggggttgatgccgaagacggacacgggcctggagagcaacagaaacggaagatagtgctcgacccaagtgggagcatgaacatttatcttgtccttgacggcagcgatagcatcggggctagtaatttcacgggggcaaagaaatgcctcgtgaatctcattgagaaggtggcatcctacggtgtaaagccgaggtatgggctcgtcacctatgccacatatccaaagatctgggtgaaagtatccgaggccgatagctccaacgccgactgggtcaccaaacaactcaacgagatcaactatgaagatcacaagctaaagtccggcacaaacactaaaaaggctctccaggctgtgtatagcatgatgtcttggcccgatgacgtccctcctgaaggatggaatagaacccggcatgtgatcatcttaatgacagacggacttcacaacatgggtggcgaccccattacagtgattgatgaaattcgtgatctgctgtatataggcaaggatagaaagaaccctagagaggattacctggatgtatacgtgttcggggtggggcctctcgtgaatcaggtaaatattaacgctctggcgtctaagaaggacaacgaacaacacgtgttcaaggtaaaggatatggagaatctggaagatgtattctaccagatgattgatgagagtcaaagcctttccctgtgcggtatggtctgggagcaccgcaaaggcacagattatcacaaacagccttggcaggccaagatatccgtgatccgcccttctaaaggccatgaatcttgtatgggagctgtggtttccgagtactttgtgctgacggctgcacactgttttaccgtggatgataaagagcattcgatcaaggtgtccgtgggaggtgagaagagggatttggagattgaggtcgtacttttccaccctaattataatattaacggaaaagaagaggctgggatacctgagttttatgactatgacgttgccctcattaaactcaagaataagcttaagtatgggcagaccatccgcccaatatgtttgccatgcactgaaggtaccacgcgtgccttgcgattaccgcctaccactacctgccagcaacagaaagaagagttgctgcccgctcaggacatcaaggctcttttcgtgagcgaagaggaaaaaaaactgacccgcaaggaggtgtatatcaaaaacggcgacaagaaagggtcatgcgagagagacgctcagtacgctcccggatatgacaaagtaaaagacatttcagaggtcgtaacgcctcggttcctttgcacaggaggtgtctcaccatatgccgatccaaatacctgcagaggtgactctggcggaccactcatagttcacaagcgctctaggttcatccaagtaggcgtgatttcctggggcgtggtggacgtctgtaagaaccaaaaacggcaaaagcaagtgccagctcacgccagggacttccacatcaatttattccaggtactaccctggctgaaagaaaagttacaggatgaggatctgggcttcctttag

SEQ ID NO: 120182 - DNA, 2295 bp, Artificial Sequence
  derived and/or modified sequence
atgggaagcaacctctcaccccaactgtgtttgatgcccttcatactgggcctactttctggcggtgtcaccactaccccatggtccctggcaagaccccagggaagctgtagtctggaaggcgtcgaaatcaaggggggaagtttccgtctgctgcaggagggacaagcgcttgagtacgtgtgccccagtggtttttacccctaccccgtccagaccagaacatgccgctctaccgggtcttggtctaccctgaagactcaagaccagaaaacagtgagaaaggctgaatgccgtgcaatccactgccccaggcctcatgattttgaaaatggcgagtactggccgaggtctccctattataatgtgagcgacgagatatcttttcactgctacgacggatacaccttgcgaggatccgcaaaccgcacctgtcaagtaaatggcaggtggtccggtcagacagctatatgtgacaatggtgctgggtactgttccaaccccggtatcccaattggaacaagaaaggtggggtcacaataccggctagaagacagtgtgacataccactgctcccgcggactgactctgcggggttcccaacggagaacctgtcaagagggcggtagctggagtggaacagaaccgtcctgtcaggattcattcatgtacgacacgcctcaagaggtggctgaggccttcctgagcagcctgacagaaacaatcgaaggtgtggacgctgaagatggacatggtcctggagagcagcagaagagaaaaattgttctggacccctcaggttcaatgaacatttatctggtgctcgatggctctgattcgattggcgcatccaactttacgggagctaaaaagtgcctggttaacttaatcgagaaagtcgcctcatatggcgtcaaaccacgctatggcctggtgacatacgccacttacccaaaaatttgggtgaaggtgagcgaggccgattcttcaaatgccgactgggtaacaaagcagcttaatgagatcaactatgaggaccataagctgaagagcggcacgaacaccaagaaggcactgcaggcggtatattccatgatgtcatggcctgatgacgtgccgccagagggctggaataggactcgccacgtaataatcttgatgaccgatgggctgcacaatatgggaggagaccccatcacggttatcgacgaaataagggatttactttatatcgggaaagataggaaaaatccgagagaagattacctcgacgtgtatgtgttcggagtaggccctctagtaaatcaggttaacatcaatgcattggctagtaaaaaagacaacgagcagcatgtctttaaggtaaaggacatggagaatctggaagacgttttctaccagatgatagacgagagccaatccctcagcctgtgcggcatggtatgggagcacaggaaaggaaccgactatcacaaacagccctggcaagcaaagatatcggtgattcgcccttcgaagggtcacgagagctgtatgggggctgtggtatctgagtactttgtgctaacggccgcacactgtttcacggtggacgacaaagagcacagcatcaaagtgtcagttggcggagagaagagagacctggaaatcgaagtggtgctgttccatccaaactataacataaatgggaaaaaggaagctggcattccggagttctatgactatgatgttgcactgatcaaactgaagaataaacttaagtacggacagacgatcagacccatatgcttgccctgtaccgaggggaccacacgagctctgaggctacctcccactactacatgccaacagcagaaggaggagcttttgcctgcccaggatattaaggcattgttcgtctccgaagaggagaagaagcttaccagaaaagaggtgtatattaaaaacggggacaagaaaggttcttgcgagagagatgcacagtatgcccctgggtacgacaaggtgaaagatatcagtgaagtggttacgcctaggtttctttgcacaggcggagtgtccccctacgcagaccccaatacttgtagaggagacagcgggggtcccctgatcgtccacaaacggagccgttttatccaggtcggcgtgatcagttggggagtggtagacgtctgtaagaaccagaaaagacaaaagcaagtcccagcccacgcccgagacttccacattaacttgttccaggtgttgccttggctgaaggaaaaactacaggatgaggatctgggatttctgtag

SEQ ID NO: 120183 - DNA, 2295 bp, Artificial Sequence
  derived and/or modified sequence
atgggatccaatctctcccctcagctctgcctcatgccttttattttgggcctcctgtccggaggtgtaaccactaccccgtggagcctcgcaaggccccagggttcctgctctctggaaggggtcgaaatcaaaggcggaagctttagactgttacaggagggtcaagctttagagtacgtatgcccgagtgggttttatccataccctgtgcaaacacgcacttgccgctccacgggttcatggtccactttgaagactcaggatcaaaaaaccgtccgaaaggccgaatgccgcgctatccactgcccacggcctcacgatttcgagaacggagaatattggccaagatctccgtattacaacgtgtctgacgaaatttcttttcactgttatgatggatatactctgcggggatcggcgaaccggacatgccaggtcaacgggagatggagtggccagactgcgatttgtgacaacggcgctgggtactgcagcaaccccggtattcccattggaacccgcaaggtaggctctcagtatcgtctggaagatagcgtgacttatcactgctctcgcggtttgacacttcgcggtagccagagacgaacctgccaggaaggaggcagctggtcaggtactgagcccagctgtcaagacagttttatgtacgacactccccaggaagtcgccgaggcatttctgtctagcctcacggagactatcgaaggtgtggatgctgaggacggtcacggccctggagaacaacagaagcgaaagatcgtactcgacccaagcggaagcatgaacatttatcttgtgttagatggctctgactccataggagcgagcaatttcactggagcgaaaaagtgtctcgtgaatctcatcgaaaaagtggcgtcttacggcgtcaagcccaggtacgggttagtgacatacgctacctatccaaaaatttgggtgaaggtcagtgaggcagattcaagcaacgcagactgggtcacgaaacagcttaatgaaatcaattatgaggatcataagctgaagtctggcactaatactaagaaagctctgcaagcagtgtatagcatgatgtcttggcctgacgacgtaccacccgaggggtggaaccggaccaggcacgtcatcatactcatgacagatggcctccacaacatggggggtgaccccattactgtcatcgatgagatcagggatctgttgtacatcgggaaagatagaaaaaaccctcgagaagattacctggatgtgtatgtgttcggggtcggccctctggtgaaccaggtgaacattaatgctctcgcctcaaagaaggacaatgaacagcacgtatttaaagtgaaggatatggaaaatctagaagacgtgttttatcaaatgatcgacgagtctcagagtctctccctttgtgggatggtgtgggagcatcgtaagggtactgattaccacaaacagccctggcaggcaaaaatctctgtgattagaccctctaagggccacgagtcctgtatgggcgcagtggtaagcgaatatttcgtcctgacagccgcacattgcttcaccgtggatgataaagagcattcaataaaagtgtcggtcggcggtgagaagcgcgatctggaaattgaagtagtcttgtttcaccccaactacaacattaacgggaagaaagaggctggtatccctgagttctatgattatgatgttgcccttatcaaactgaaaaataagctcaagtacggccaaacaattcgtcctatatgtcttccctgcaccgagggaacaactcgggctctgcgcctgcccccaacaactacatgccagcaacaaaaggaagaactcctgcccgcacaagacatcaaagcactcttcgttagtgaggaagaaaaaaaactgactaggaaagaggtgtacattaagaatggtgataagaagggctcctgtgagcgcgacgcccagtatgcgcctggttatgataaggtgaaggatatttcagaggtggtgacacccaggttcctgtgtaccggaggtgtttctccttacgcagatcctaacacgtgtcgcggagattcagggggacccctaatcgtccacaaaaggtctcgatttatccaagtcggagtcatatcctggggggtggtcgatgtttgtaagaaccagaaacgtcagaagcaagtgccagcccatgctcgcgactttcacataaatctcttccaggtcctaccatggcttaaggagaaactgcaagatgaggatcttggattcctgtag

SEQ ID NO: 120184 - DNA, 2295 bp, Artificial Sequence
  derived and/or modified sequence
atgggatccaatctatccccccagctctgtttgatgccctttatcctgggtctcctgtccggcggtgttaccaccacaccttggagtcttgcacggccacagggaagttgctccctggaaggggtggagattaaaggtgggagtttccggctcttgcaggaaggtcaggccctcgaatatgtgtgcccgagcggattctatccttatcctgtgcagactagaacttgtcgaagcactggtagctggtcaaccctgaagacccaggatcagaagaccgttaggaaagctgaatgccgcgcaatccattgtcccaggccccatgacttcgaaaatggcgagtactggcctcgttcaccttactataatgttagtgacgagatttcttttcactgttatgatggttacacccttaggggaagcgcaaaccgcacttgccaggtaaacggcaggtggtccggccagaccgcgatttgcgacaacggcgctgggtactgttctaatccaggcattcccatcgggacacgcaaggtaggaagccagtatcgcctggaagatagcgtcacttaccattgcagccgcggtctgaccctcagagggtctcagcgcaggacctgtcaagaggggggatcatggtcgggcactgagccctcttgtcaggacagttttatgtacgatacaccccaggaagtcgctgaggcttttcttagctctttaactgagaccatcgagggagtcgacgcagaggatggacatggccctggcgagcagcagaagcgaaaaatcgtcctggaccccagcggcagtatgaacatctatctggttttggacggctccgactccatcggggctagtaatttcactggcgcaaaaaagtgtttagtcaatctgatcgagaaggtggctagctacggtgttaagccccgatatgggctggttacctatgcgacctaccccaagatttgggtgaaggttagtgaagccgattcttccaacgccgattgggtgacgaagcagctgaatgaaataaattatgaggatcataaactgaagtccggcacaaacacaaagaaagcactccaggcagtgtactcgatgatgagctggcccgacgacgtcccaccggaggggtggaacagaacgaggcacgtgattatcctgatgacagacggccttcacaacatggggggtgacccgattaccgtgatcgacgaaattagagatctcctctatatcggaaaggaccggaaaaatccacgtgaagactatcttgatgtttatgttttcggcgtgggtcccctggtgaatcaagtaaacatcaatgcgctggcgagtaaaaaggacaacgagcagcacgtgtttaaggtgaaggacatggagaacctggaggacgtcttttaccagatgatagacgaatcccaatcactgtcactgtgtggaatggtctgggaacacaggaagggtactgactaccataagcagccatggcaggccaagatctctgtgattcgcccatctaagggccatgagtcctgcatgggagccgtggtctcagagtatttcgtgctcaccgcggcacattgtttcaccgttgatgataaagagcacagcatcaaggtgtctgtgggtggcgaaaagagagacttggagatcgaggtcgtgttatttcaccctaattacaacataaacgggaaagaagaggctggcatccctgagttctacgattacgatgtggccctcatcaaactgaaaaataagttgaaatacggccagacaattcggccaatatgccttccatgcacagagggcactaccagggctctgcggttgccccctaccacaacatgtcagcaacagaaggaggagctgctgccagcacaggacatcaaagccttgttcgtctcagaagaggagaagaagttaacccgcaaggaagtatacattaaaaatggtgacaaaaaaggatcatgtgaaagagacgctcagtacgctcccggatatgataaagtgaaggatatatctgaggtcgtgacacccaggtttctgtgcaccggaggtgtctcaccctatgccgaccctaacacctgtcggggagacagtggcggaccactcatcgttcacaagcggtctcgcttcattcaggtgggcgtcatcagttggggggtggttgatgtatgcaaaaatcaaaagcgtcagaagcaggtcccagcacacgctcgagatttccacatcaatctgttccaggtactgccctggcttaaggaaaaactgcaggatgaggatctgggatttctttag

SEQ ID NO: 120185 - DNA, 2295 bp, Artificial Sequence
  derived and/or modified sequence
atgggctccaatctgagcccacagttatgcctgatgcccttcattctgggcctcctttcaggaggcgtgactaccactccatggtcgctggcacggcctcaagggtcttgctcgctggaaggggtcgagatcaagggaggctcatttagactcctacaggaaggacaggctctggagtatgtctgtccatccggtttttatccgtaccccgttcaaacccgaacctgcagatccacaggttcctggagcacactaaaaacccaggaccagaagactgtccgcaaggctgagtgtcgggctatccactgccctaggcctcatgatttcgagaatggtgaatattggccacgatccccatactataatgtgtctgatgaaatttcgttccactgctatgacggctacacactgcgcggttcggccaaccggacttgtcaagtgaatggccgatggtccggacaaactgcgatctgtgacaatggggctggctactgctcaaacccaggaatccccataggcacccgcaaagtgggctcccagtaccgcttggaggatagtgtgacttatcattgctcgaggggcttaacactccggggttctcagagaaggacctgtcaagaaggcggatcatggtcaggaaccgaaccttcctgtcaagactcattcatgtatgacactcctcaggaggtagcggaggcgtttctctcctctctaactgagaccattgagggcgtcgacgctgaggatgggcatggccctggtgagcagcagaagcggaagatcgttctagacccaagtggctctatgaatatttatctggtgctggatgggtccgactcaattggagcgagtaatttcacaggggcaaaaaaatgcttggtcaacttgattgagaaagtagcttcttacggtgtgaagccgcgatacgggcttgtaacttacgcaacttatcctaagatctgggttaaggtttctgaagccgactcctccaacgcagactgggttaccaaacagcttaatgagattaattacgaagaccacaaactcaaatctgggaccaataccaagaaagccctacaggctgtgtacagtatgatgagctggcctgacgacgtccctcccgaagggtggaaccgtacccgccatgtgatcatcctgatgaccgacgggcttcacaacatgggtggggatcctatcactgttattgatgagattcgggaccttctgtatatcgggaaagacagaaagaaccccagggaagactatctggacgtgtacgtatttggggtgggcccacttgttaatcaagtgaatattaatgccttggccagcaagaaagataacgaacagcacgttttcaaggttaaggatatggaaaacttagaagatgtgttttatcaaatgatcgatgaaagccagtctttatcactgtgtgggatggtgtgggagcatcgcaaaggcactgattatcataagcagccttggcaggcaaagatctctgttatccgcccatcaaaagggcatgagagttgcatgggggctgtggtatcagagtatttcgttctgactgccgctcattgctttacggttgacgataaggaacattctatcaaggttagtgttggcggagaaaaacgggacctcgagatagaggttgtccttttccaccctaactataacatcaacggcaagaaagaagcaggaatccccgagttttacgattacgacgttgcgcttataaaattaaagaataaactgaagtacgggcaaactatccgcccaatttgccttccgtgcaccgagggcaccaccagagctctccgactgccgccaacgactacctgtcagcagcagaaagaggagctactcccagcgcaggatatcaaggccctcttcgtgtcggaagaggagaagaaactaacgcggaaagaggtgtacataaagaatggtgataagaaagggtcctgtgagagagatgcgcaatatgctccaggctatgacaaggtcaaagacattagcgaggtcgtgaccccgagattcctgtgcactgggggtgtctccccgtatgctgatcctaatacctgcaggggggattctggcggtccgctgatcgtgcataagcgaagtcgttttatccaggtcggcgtgatctcctggggggtggttgacgtctgtaagaaccagaagcgccaaaagcaagtgcctgctcacgctcgcgatttccatattaacttgtttcaggtgctcccatggctgaaagagaagctgcaggatgaggatctcggcttcctttag

SEQ ID NO: 120186 - DNA, 2295 bp, Artificial Sequence
  derived and/or modified sequence
atgggtagcaacctcagtccccagctatgccttatgccatttatactgggactgctttctggaggggtcaccactactccctggagccttgcacgccctcagggcagctgtagcctcgaaggtgtggaaatcaaaggaggctcttttcggctactgcaggagggacaggcactcgaatatgtttgcccgtcgggattctatccttatccggtgcaaacccgtacgtgccggagcacaggctcctggagtacactcaagacgcaggaccagaagaccgttcgcaaggccgaatgccgcgctatccattgccctaggcctcacgattttgagaacggagagtattggccgcgtagcccatactacaatgtctccgacgaaatcagcttccattgctacgatgggtacactttaaggggcagcgcgaacaggacttgtcaggtcaacggtaggtggtcaggacaaacagctatctgcgataacggtgctgggtactgcagcaatccaggcattccaatcggaacgcgaaaagtggggtcccagtacagattagaggatagcgtcacttaccactgtagcagggggctgaccttgcgtggttcccagcgtagaacttgccaggaggggggtagttggtcaggaaccgagccatcgtgccaggacagcttcatgtatgatacccctcaggaggtcgctgaagcttttcttagctcactgaccgaaaccatagaaggggtggacgcagaagacggtcacggccctggcgagcaacagaagcgtaaaattgtgcttgaccctagcggctccatgaacatttaccttgtacttgatggttcggactcaattggtgcatccaacttcactggcgcaaagaagtgtctagtgaaccttattgagaaagtggcgagttacggggtcaagcccaggtacggcttggtgacgtacgcaacctatcccaagatttgggtgaaagtttcagaggcggacagttccaatgcggactgggtgaccaagcagctcaacgaaattaattatgaggaccacaaactcaaaagtggcacaaacacaaagaaagctcttcaggccgtttactcaatgatgtcctggcccgacgatgttcctcccgagggttggaatcggactaggcacgtgatcatcttgatgaccgacggccttcataacatgggaggtgatcccatcacagtgattgatgagattcgggaccttctctatattggcaaggatagaaagaaccccagggaggactaccttgacgtgtatgtctttggagtaggacccctggttaaccaggtgaacattaatgctctggcctccaaaaaggacaacgagcaacacgtcttcaaggtgaaggacatggaaaatctggaggacgtgttctatcagatgattgatgaatctcagtccctgtccctgtgtggtatggtttgggagcatcgaaaaggcacggattaccataagcagccctggcaggcaaaaatctcggtaattcggccttctaaaggccatgagtcttgcatgggtgccgtcgtcagcgagtacttcgttctcacggccgctcattgctttacagtagatgataaggagcacagcatcaaggtctcagtcggtggcgaaaagagagatctggagattgaggtggttctattccatccgaactataacatcaacggtaagaaagaagcgggaattcccgaattttatgactacgatgtggcactgatcaaattaaagaacaaactcaaatacggccaaacaatacggcctatctgtttgccttgtaccgaaggcacaaccagagctctaagactgcctcctacaactacttgtcagcagcagaaagaggagctactgcctgcacaggacattaaagcactgttcgtgtccgaggaggaaaagaaactgacaaggaaagaggtatatatcaagaatggggataagaaagggtcctgcgaacgagacgcacagtacgcaccaggttacgataaagtaaaagacatctcggaggttgtaacacctagattcctgtgtacggggggagtcagtccgtatgcagatcctaacacctgcagaggggacagtggcggacctcttattgtgcataagcgcagtcgctttattcaggttggcgtgatcagctggggagtggtggacgtatgcaagaatcaaaaaagacaaaagcaggtacccgctcacgctcgagacttccacatcaatttgttccaggttcttccttggttaaaagaaaaactccaggatgaggatcttggattcttgtag

SEQ ID NO: 120187 - DNA, 2295 bp, Artificial Sequence
  derived and/or modified sequence
atgggatctaacctcagcccacagttatgtctgatgcccttcattctgggcctgctcagtgggggagtgaccacaaccccctggtccctggccagaccccagggctcttgttccctcgagggggttgaaattaagggtggctccttccggctcctacaggaaggacaggccctggaatatgtctgtccaagcggtttttacccgtacccagtgcagacccgcacatgcagaagcacaggaagctggtccacactgaagactcaggaccagaaaaccgtaaggaaggccgagtgccgcgcaatccattgcccccgaccccatgatttcgagaacggcgagtactggcctaggtccccctattacaatgtcagtgacgaaatttcattccactgttatgacgggtacaccctcaggggatccgccaaccggacctgtcaggttaatggcagatggagtggacagaccgcaatttgtgacaacggcgcagggtactgttccaatccaggaattccaatagggactcgcaaggtaggctcccagtatcgacttgaggatagtgtaacataccactgcagtcgcggactgaccttacgcggaagccaaagacgcacttgccaggaagggggatcatggagcgggactgagccaagctgtcaggactcattcatgtacgacacgccacaggaggtggcggaggcctttttaagctctttaacagagactatcgagggtgtcgacgccgaggacggacacgggccaggcgagcagcagaagaggaagatcgtcctcgatccctccggcagcatgaatatctacttggtcctggatggctcggatagcataggggcaagtaatttcaccggcgcaaaaaagtgcctggtgaacctgatcgagaaggttgcgtcgtatggggtgaagccccgttacggccttgtaacgtacgctacctaccctaagatttgggtcaaagtttcagaagcagattcctcgaatgctgattgggttacaaagcagttgaacgaaataaactatgaagaccataaactgaaaagtggaacaaacactaagaaggctctccaggctgtttactctatgatgtcctggcctgatgacgtgccccctgagggttggaatcggacgaggcatgtgatcattctgatgacagacggactgcataacatggggggtgacccaatcacagtcatcgacgaaattcgcgacctgctatacatcggcaaagaccgcaagaatccccgtgaggactatttggacgtctatgtgtttggcgtgggccctctggtgaaccaggtaaatatcaacgcgcttgcttccaagaaagataacgagcagcatgtgttcaaggttaaggacatggagaatctcgaggacgtcttttatcagatgattgacgaatctcagtcactctccctgtgcggcatggtgtgggagcacaggaagggtacagattatcacaagcagccatggcaggccaagatctcggtgattcgcccatcgaaagggcatgagtcctgcatgggcgctgtggtctccgaatactttgtgcttaccgccgcacactgctttactgtggacgataaggagcatagcatcaaagtttccgtgggcggagagaaacgagaccttgaaattgaagtggtcctgtttcaccccaactataatattaacggaaagaaggaggccggtattcctgaattttacgactacgatgtagcactgataaagttgaagaacaaactcaaatacgggcagacaataagacccatatgtctcccttgtactgaaggcaccacacgggctctgaggctgccccctactactacgtgccagcagcagaaagaagagttgctaccagctcaagatattaaggcactgtttgtctctgaggaggagaagaagctcactaggaaagaggtgtatattaagaacggggacaagaaaggcagctgtgagagggacgctcaatacgcccctggctatgataaagtaaaggacatctccgaggtggtcacccccaggttcttgtgcaccggcggagtctccccatacgctgaccccaatacttgtcggggtgatagcgggggtcccttaatcgttcacaaacgttctagattcatccaggtgggcgtcatctcctggggcgtggtggatgtctgcaagaaccaaaaacgccagaaacaggtacctgcgcacgcaagggactttcatatcaatctcttccaggtactcccttggctgaaagaaaagctgcaggatgaggacctgggtttcttgtag

SEQ ID NO: 120188 - DNA, 2295 bp, Artificial Sequence
  derived and/or modified sequence
atgggatctaatctgtcccctcagctgtgcttaatgcctttcatcctgggcctgctgtccggaggagtgacgactacaccatggagtcttgccagaccacagggatcctgcagcctagagggagttgagataaaggggggatcttttagacttttacaagaaggccaggctcttgagtatgtatgccctagcgggttctacccataccctgtgcagacgaggacatgcaggtccacaggaagctggtctacactgaaaacccaggaccagaagacagtgcgcaaagccgagtgccgagccatccactgcccgaggccccacgactttgagaatggtgagtactggccacgttccccatattacaacgtgagcgacgaaatctcttttcactgttatgatggctacaccctgaggggcagtgccaataggacatgccaggtgaacggtagatggtcaggccagactgcaatttgtgacaatggagccggttactgctctaaccctggcatcccaattgggacaaggaaagtgggctcccagtatcggttggaagattccgtgacatatcactgttccagggggctgactctccgtgggagccagcgtagaacatgtcaggaaggcggatcatggtccggtaccgagccgagctgccaagactcttttatgtacgacaccccacaggaagtggccgaagcatttctgagttctctcactgagactatcgagggcgtcgacgcggaggatggccatggccctggagaacagcaaaagagaaaaatcgtgttagatccatctgggagcatgaacatttaccttgtcctggacgggagtgattctatcggtgcttccaacttcaccggagccaagaagtgcctcgtgaatttgatcgaaaaagttgcctcttacggagtgaaaccgaggtatgggctggtgacatacgccacctacccaaaaatttgggtaaaggttagtgaggccgattccagtaacgctgattgggtgactaagcagctcaatgaaatcaactatgaagatcataaactcaagagcggtactaacaccaagaaagccctgcaggccgtgtactctatgatgtcctggcccgacgacgtcccacccgaaggttggaatcgcacgaggcacgtgatcatcctgatgactgacgggcttcataatatggggggagaccccatcacagtaattgatgagattagagatctgctttatatcggcaaggaccggaagaacccacgtgaagattacttggacgtgtatgtttttggtgttggtcccctggtaaaccaggtgaacattaacgcattggccagcaaaaaggacaacgaacaacatgtctttaaagtgaaagacatggagaacctcgaggatgtgttctaccagatgattgacgaaagtcagagcttatctctgtgtggcatggtgtgggaacatagaaaggggacagattaccataagcagccgtggcaggcaaagatctccgtgatccgtccttccaaaggccatgaatcatgcatgggcgctgtggtctctgaatacttcgtattgacggctgcacactgcttcaccgtggatgacaaggagcatagcataaaggtgagtgtgggcggtgaaaaaagagacctggaaatcgaggtggtgctgtttcaccctaactacaacattaatgggaaaaaggaagctggaattcccgaattctacgactatgatgtagccctgattaagttgaagaacaagctgaagtacggacagactatccgccctatatgccttccttgtacagaggggacaacgagagccctgcgtctcccgcctaccaccacgtgtcagcagcagaaggaagaacttctccccgcacaggatattaaagcgctcttcgtgagcgaggaggagaagaaactaacccggaaagaggtatacattaagaatggagataaaaagggctcatgtgagagggatgcacagtatgcccctgggtacgacaaagttaaggacatctctgaagttgtgaccccccgattcctctgtactggaggagtgtccccttacgctgaccctaatacatgtagaggtgacagcggcggtcctctgatcgtccataaacgcagcaggtttattcaggtcggtgtgatatcttggggcgtggtggatgtatgcaaaaaccaaaagagacagaagcaggtccccgctcacgccagagattttcacatcaatctgtttcaggtcctgccttggttgaaagagaagctgcaggatgaggatctgggattcttgtag

SEQ ID NO: 120189 - DNA, 2295 bp, Artificial Sequence
  derived and/or modified sequence
atggggtctaacctctcccctcaattgtgcttgatgcctttcatcttggggctgctctcaggtggcgtgactaccacaccatggtctctggcaagaccacagggcagttgtagtctggagggcgtggaaattaagggaggtagctttaggttactgcaggagggacaagcccttgagtacgtgtgtccatcggggttttatccataccctgtccagacaagaacttgtcgtagcactggctcttggtctacgctgaagacccaggaccagaagaccgtgcggaaagccgaatgcagggccatccattgtccaagaccacatgactttgagaatggggaatactggccacgttccccctattacaacgtgtcagacgagattagctttcactgttacgacgggtacaccctgaggggatccgctaacaggacctgtcaagtgaacggcagatggtcaggccagaccgctatttgcgacaatggggctgggtactgttccaaccctggaattcctatcggcacccgcaaagtgggatcacagtatagattagaggacagtgttacttatcactgttcccgcggactgacattaaggggtagccagcgtcggacatgtcaggaggggggatcatggagcggcacggaaccttcgtgccaggactcattcatgtacgatacaccccaggaggtcgcggaggcctttctgagttctctaaccgagacgatcgaaggcgtcgatgccgaagatggacatggcccaggtgaacaacagaagcggaaaatcgtgctcgatccctcagggtccatgaacatttaccttgtgcttgatggaagtgactccatcggagcctcgaacttcacaggagccaagaaatgtctcgtgaacttgatcgaaaaggttgcctcttacggcgtgaaacccaggtacggtctggtcacttatgccacttatccaaaaatctgggtgaaggtcagtgaagcagacagtagcaatgctgattgggtgactaagcagctgaacgaaatcaactatgaggaccataagctaaaatccggcacaaacactaagaaagctttgcaggccgtctactctatgatgtcctggcccgatgacgtacctcctgagggttggaatcgaaccagacacgttatcatcctcatgaccgatggtctccataatatgggaggggaccctatcaccgtaatcgacgagattcgggatctgttatacattggcaaagacaggaagaatccacgagaagactacctcgatgtatacgtgttcggtgtcggcccactggtgaatcaggttaacattaatgctcttgcttctaaaaaggacaacgagcagcatgtcttcaaggtgaaggacatggagaatctagaagatgtgttctaccagatgatcgatgaatctcagtctctgtctctctgcggcatggtctgggagcaccgaaagggcacagattaccataaacaaccctggcaggctaagatttcggtcatccgtccttccaagggccacgaaagctgtatgggggctgtggtctctgagtattttgttcttacggccgctcactgcttcactgtcgacgataaagagcacagcattaaggtcagtgtcgggggagagaaacgcgacctcgaaatcgaagtcgtgctgtttcatccgaactataacatcaatggcaaaaaagaagcgggaattccagagttttacgattacgacgtggcattgatcaaattaaagaacaagctgaaatacggtcagactattagacccatttgtctgccttgcacagagggaacgactagagccctgagactgccaccaaccactacttgtcaacaacagaaagaggagctcctccctgctcaggatatcaaggctctcttcgtcagcgaagaagagaaaaagctaactcgtaaggaggtgtacatcaagaacggagacaaaaagggaagctgtgagcgtgacgctcagtacgccccaggctacgataaagtcaaagatatctccgaagtggtcactcccaggttcctttgtactggaggcgtgagtccatacgcagacccgaatacctgtcggggtgactccggtggcccactgatcgtccacaagcggagtcgattcattcaggtcggcgtgatcagctggggtgttgtggacgtgtgtaagaatcagaagcggcagaaacaagtaccagcacatgcacgcgattttcacatcaatctattccaggtcctcccctggctgaaagaaaaactccaggacgaggacctgggctttttatag

SEQ ID NO: 120190 - DNA, 2295 bp, Artificial Sequence
  derived and/or modified sequence
atgggttcaaatctgagtccccagctgtgcttaatgccattcatcctaggtcttctctctgggggagtcactactactccatggtcactggcacgtccccagggatcttgctcactcgaaggggtcgaaataaagggcggttcctttcggctgctgcaagagggtcaggccctggaatacgtctgtccatccggattttatccatatcccgtgcagaccaggacatgcaggtcaacagggagttggagcaccctgaaaacccaggaccagaagaccgtgagaaaggctgaatgtcgggctatacactgcccaaggccacatgatttcgagaatggtgaatactggcccaggtcaccttactataacgtgtccgatgaaatttcctttcactgttacgatggctacaccctgaggggctctgcaaaccggacatgccaggttaacggaagatggtcagggcaaacagccatatgcgacaacggagcagggtattgcagcaatccgggtatcccaatcgggacacgcaaggtgggaagccaataccgcctggaagactccgttacataccactgcagtcggggactgaccctgagagggagccaaaggaggacgtgccaggagggcggaagttggtcaggcactgaaccttcatgccaggattcatttatgtatgatactccgcaagaagtggcagaagccttcctctcgtcccttactgaaaccatagagggggtggacgctgaggacggccacggccctggcgagcaacagaagcggaagattgtgctagacccctccggaagcatgaacatttatttggttttagatggaagcgacagcatcggcgctagtaacttcactggcgctaagaagtgtctggtgaacctgatcgagaaagtcgcaagctacggcgtgaaacctagatatgggctggtgacctatgctacttatccaaaaatctgggtgaaggtcagtgaagcggactcatcgaatgctgactgggtaactaaacagctgaatgagatcaattacgaagatcataaactaaaaagcgggacgaatacaaagaaagctttgcaagccgtttacagcatgatgtcttggcctgacgatgttcctccagagggctggaataggacacggcatgttattatcctgatgacggacggccttcataatatgggaggagaccctattacagtgatcgatgagatcagggacctgctctatataggtaaggacagaaagaatccacgcgaggactacttggacgtgtacgttttcggtgtcggccctctggtgaaccaggtgaatattaatgcgttggccagcaagaaagacaacgaacagcacgttttcaaggtcaaggatatggaaaacctcgaggatgtgttctatcaaatgattgacgagtcacaatcactttctttgtgtggcatggtctgggagcacagaaaagggaccgactaccataagcagccctggcaggctaaaatatctgtgatacggccttccaaggggcatgaaagctgtatgggagccgtcgtgtctgagtacttcgtcctgaccgctgcacattgtttcaccgttgacgataaagagcattctattaaagtttcagtaggaggggagaaaagggatctcgagattgaagtggtgctgttccatccaaactacaacattaacggcaaaaaagaggccggaataccagagttttatgattacgatgttgcgctaatcaagctgaagaacaaactcaaatatggtcagactattagaccaatttgccttccttgtaccgaaggaactaccagggcgctgagactaccaccgaccacaacctgtcagcagcagaaggaagagctactacctgcccaagatatcaaagcactgttcgtgtcagaggaagaaaaaaagctgacgcgaaaagaggtgtacatcaagaatggggataagaagggctcatgtgaacgggatgctcagtatgctccaggctatgacaaggtcaaggacattagcgaggtagtgacaccaaggttcctgtgcaccggaggcgtatccccctatgcagacccaaatacatgcaggggcgacagtggaggccctctaatcgtgcacaagcgatcaagatttatacaggtaggcgtaatctcttggggagtggtcgatgtttgtaaaaaccagaagcgtcaaaaacaggttcccgctcacgcccgtgactttcatattaacctgttccaggttttaccctggttgaaagagaagttgcaagacgaggatttaggttttttatag

SEQ ID NO: 120191 - DNA, 2295 bp, Artificial Sequence
  derived and/or modified sequence
atgggctctaacctctccccacaactgtgcctgatgcccttcattctcgggctgttgagtggcggagtcaccactactccgtggtcccttgcaaggccccagggtagctgctctctggagggtgttgaaatcaagggcggatcctttcggctcctccaggagggtcaggcactagaatatgtgtgtcccagtggattctacccgtacccggtgcaaacacggacatgtcgctctaccgggtcttggtctacccttaagacacaggaccagaaaaccgtcaggaaagcagaatgcagggcaattcattgccccaggcctcacgacttcgaaaatggagagtactggcctcggtccccttactataatgtctccgatgagatctctttccattgttacgacggctacacactgcggggaagcgcaaacaggacatgccaggtgaacggacgctggtccggccagactgctatttgcgataatggggctggctactgttctaaccccggtatacccattggaactcgaaaggtggggtctcagtatagactcgaggactccgtcacatatcactgtagccgagggctgaccctacggggttcacagcggaggacctgtcaggagggcggatcctggagcggcacagaaccatcttgtcaggattcttttatgtatgacacgcctcaggaagtcgcagaggctttcctttcaagcctgacggaaactattgagggggtggatgccgaagacggtcacgggcctggagagcagcaaaagaggaagatcgttctggatcctagcggatcgatgaatatctatctggtgctagacggttccgactctatcggggcatccaatttcacaggcgctaagaagtgtctggtgaacttaattgagaaggtggcatcttacggcgtgaagcctcgttatggtctggtcacttacgctacctatcctaaaatttgggtgaaagtcagtgaggccgattcaagcaatgcagactgggttaccaagcagctaaacgaaatcaattacgaggaccacaagctgaaatctggcaccaacactaagaaggccttgcaggctgtgtacagcatgatgtcctggcccgatgatgtgccacccgagggttggaatcgcacccggcacgttatcatccttatgaccgatggacttcataacatgggaggcgatccaatcaccgtgatcgatgaaatacgggacctgttgtacattggcaaggataggaagaacccacgagaggactatttggacgtgtacgtattcggtgtggggccactcgtaaaccaagttaacattaatgcactggccagcaagaaggataatgagcagcatgtctttaaagtgaaggacatggagaaccttgaggacgtgttctaccagatgatagacgagtcacaaagtctgagcctgtgcggaatggtgtgggagcatagaaaggggactgactatcataagcagccatggcaggcgaaaatcagtgtcatacgcccttcaaaaggccatgaaagttgtatgggggcagttgtcagcgagtacttcgtgctcaccgcagcgcattgttttactgtggacgacaaggagcacagtattaaggtgtcggtgggaggagaaaagagagatctggaaattgaagtggtattgttccacccaaactataacattaacgggaagaaagaagccggaattcccgaattctacgactacgatgtcgccttgatcaaactgaagaataaattgaagtacggccagacaataaggcccatatgtttgccctgtactgaaggcacaactagggcactgaggcttccacccacaacaacgtgccagcagcaaaaggaagagctgttgcccgctcaggatatcaaggccctctttgtgtccgaagaagagaaaaagctgaccagaaaggaggtgtacatcaagaatggcgataagaagggttcctgtgaacgtgacgcccaatacgccccagggtacgacaaagtgaaggacatttctgaggtcgttacaccccgatttctttgcaccggcggagtttcaccatacgcagaccccaatacctgtaggggcgattctgggggtccactcatagtccataaaagaagccgcttcatacaagtcggggtcatatcttggggggtcgtggacgtttgcaagaatcagaagcggcagaagcaagtgcccgcacacgcgagagactttcacatcaatctcttccaggtgctgccgtggctgaaggaaaagctccaggacgaagatttgggctttttgtag

SEQ ID NO: 120192 - DNA, 435 bp, Artificial Sequence
  derived and/or modified sequence
atggggtcaaacttgtcaccacagctgtgtctgatgcccttcatattggggctgctctccggaggcgtcacaacgacgccctggtccctggcgagaccacagggctcttgttccctcgagggtgttgagattaagggaggcagtttcaggttgcttcaagagggacaggccctggagtatgtgtgcccatccggcttttacccctacccggtgcagacacgtacctgccggtctaccggcagctggtccacgctcaaaactcaggatcagaagacggttagaaaggccgaatgcagagccatacactgtccaaggccacacgacttcgaaaacggagagtactggccacgttctccctattacaatgtgtccgacgagatctccttccactgctatgatggctacacactcagaggcagcgctaatcgtacctag

SEQ ID NO: 120193 - DNA, 3801 bp, Artificial Sequence
  derived and/or modified sequence
atgggaccattgatggtgctgttttgcttgctgttcctttaccccggtctcgcagattccgcaccctcttgccctcaaaatgtcaatatttcaggcggtaccttcacgctcagtcacggctgggcacccggaagtcttctgacttattcgtgtccccagggcctgtacccctccccagccagcaggctctgcaagtcgtccggtcaatggcagactccaggtgccaccaggagcctgtctaaagctgtctgtaagccaggtcattgccccaaccctgggatttctctcggagccgtccggacaggcttcaggtttggtcatggcgacaaagtccgatataggtgctcctccaacctggtgctgacgggctcatccgagcgggagtgccagggcaacggagtgtggagcggaacagagccaatctgcaggcagccatactcgtacgatttccccgaggacgtcgcaccagccttaggcaccagctttagccatatgctgggtgccaccaacccaacgcagaaaaccaaagatcatgaaaatgggaccggaactaatacctatgccgcactcaattccgtgtacctgatgatgaacaatcagatgcggctactgggcatggagacaatggcctggcaggagattcggcacgccataatcttgcttactgacggcaaatctaatatgggaggttctcctaagacggctgtagatcacatccgagagatactgaacatcaaccagaaacggaatgattatctcgacatctacgccatcggggtgggtaaactcgatgtggactggcgtgaattaaatgagctaggatcgaagaaagacggcgagcggcatgctttcatcctgcaggacacaaaggcccttcaccaggtgtttgaacacatgctggacgtgagcaaactaactgataccatatgcggagtaggcaacatgtcagcaaacgcaagtgaccaggaaagaactccatggcatgtcactattaagcccaagtcccaggaaacgtgtagaggggcactcatatctgatcagtgggtgcttacggctgcccactgttttagggatggcaatgaccactccctttggcgcgtgaacgtcggcgatcccaaaagccagtggggcaaggagtttttgatcgagaaggcagtcatctctcccggttttgatgtctttgccaagaagaaccagggcatccttgaattctatggtgatgatattgcccttctcaaactagcgcaaaaagttaagatgagtactcatgctaggcccatctgtttaccatgtacgatggaggccaatctcgccctccggcgtcctcagggatccacctgcagggatcacgaaaacgagcttctcaataagcagagcgtgccggctcactttgtagccttgaatgggagtaagcttaacatcaatctgaagatgggagtcgagtggacttcttgtgccgaggttgtctctcaggaaaaaacaatgtttccaaatttgaccgacgtgagggaagtggtgacggaccagttcctctgcagcgggactcaggaggacgagagcccttgtaaaggggtaaccacaacaccgtggagtcttgctaggccccagggatcatgtagtctcgaaggggtagaaatcaagggagggagttttcgactcctccaggagggacaggcgcttgaatacgtctgtccgagtggcttctacccctacccagtccaaacaagaacctgccgctctactgggtcctggtccactttgaagacccaggaccagaagaccgtccgtaaggctgagtgccgggctatccactgccctcgaccccacgacttcgagaacggtgagtattggcccaggtccccatactacaacgtgtccgatgagattagcttccactgttatgatggatacacgctgagaggatctgctaaccgcacctgccaagtgaatggtagatggagcggccagactgccatatgtgacaacggtgcaggctactgcagtaacccaggcattccaatcggcactagaaaagtgggcagccaatatcgcctcgaggacagcgttacctaccactgttcacggggtttgacattaaggggcagccagaggcgcacatgtcaggaaggaggatcgtggagcggaacagagccctcatgtcaggactcatttatgtatgacactccgcaagaagtagctgaagcgttcttgtcttcactcactgaaactattgaaggcgtggatgccgaggatggacacgggccaggagagcaacagaaaaggaagatcgtgttggacccctccggaagtatgaatatctacttagtactcgacggttccgactccatcggagcctctaacttcaccggcgcaaagaagtgtctcgtaaatctgatcgagaaggtcgcctcctatggagtgaagccgagatacggattggtcacatacgcaacttacccaaagatttgggtgaaagtgtctgaggcagactcctctaacgcagattgggtcaccaaacaacttaacgaaataaactacgaagaccacaagttaaagagcggaacaaacacgaagaaggcccttcaggcagtgtattctatgatgagctggcctgacgatgtgccacctgagggatggaatcggacaagacatgtgattatcctgatgactgacgggctgcacaatatgggaggcgatccaattaccgtaatcgatgagatcagggatttattgtacatcggcaaagatagaaagaatccaagggaggattatctggacgtatacgtgttcggggtgggccctctcgtcaaccaggtaaatattaatgctctggcctctaaaaaagacaatgaacagcatgtgttcaaggtcaaggatatggaaaacttggaagatgtgttctatcaaatgatagacgagtcccagtccctgtctctgtgcggcatggtttgggaacatcgcaagggtactgactaccacaagcaaccttggcaagccaaaattagcgtcattcgacctagcaagggacacgagagctgtatgggagccgtcgtgagcgagtacttcgtgctaacagcggcacattgtttcacagtggatgataaagagcacagcataaaggttagcgttggaggcgaaaaacgtgaccttgagatcgaagtcgtcctctttcatcctaattacaacataaacggcaaaaaggaggcaggtatccccgaattctatgactacgatgttgctctgattaagctgaagaataagttgaaatatgggcagaccattcgccctatatgtcttccatgcactgagggcaccactagggcactgcgactgccccctaccaccacttgccaacagcagaaggaagaattactcccagctcaggacattaaagccctctttgtatctgaggaagagaaaaaactgacacgtaaggaggtctacatcaagaacggcgacaagaagggctcttgtgaacgggatgcacagtacgcacctggatatgacaaagtcaaggacatcagcgaagtggtcacccctagatttctgtgtaccggtggagtgtcaccatatgcagatcccaatacttgtagaggggactcaggcggacctttaatcgtccacaaacgcagtcggttcatccaagtgggcgtcatttcttggggcgtcgtggatgtgtgcaagaatcagaagagacaaaaacaagtccctgcccatgccagagacttccatatcaatctatttcaggtgttgccttggcttaaggaaaagttacaggacgaggacctggggtttctctag

SEQ ID NO: 120194 - DNA, 3801 bp, Artificial Sequence
  derived and/or modified sequence
atgggcccactgatggtcctcttctgcttgctgttcctctatcctggcctggccgacagcgcacctagctgccctcagaatgtaaatatctctgggggtaccttcacgctctcccacggctgggcccctgggtccctgcttacttactcttgccctcagggtctgtacccatctcccgctagcagactgtgcaagtccagcggacagtggcagacccctggcgcaacccgaagcctgtcaaaagctgtgtgtaaacccggtcattgtcctaaccccggtatctctctgggcgctgtgaggacaggcttcaggttcggacacggtgacaaggttcgctacagatgttccagtaatttggtgctcactggctcgagtgaaagagaatgccaagggaatggtgtgtggtcagggacggaacccatctgtcgccaaccttacagctacgatttcccagaggacgtcgcaccggcactcgggacatctttctcccacatgcttggcgcaacaaatcctacacagaagactaaggaccacgagaatggcaccgggaccaacacttatgccgcactgaattccgtttatcttatgatgaataaccagatgagacttctgggcatggaaaccatggcgtggcaggagatacgtcacgccattattctgctgactgacgggaaatctaacatggggggttcacctaagacagccgtggaccacataagagaaatccttaacatcaatcagaaaagaaacgactacctggatatctacgccatcggagtcggaaaactcgacgttgactggcgagagctgaacgaactcggcagtaagaaggatggggaaagacacgcgttcatactccaagacactaaggccctacaccaagtttttgagcatatgctggacgtctccaagctgaccgacactatttgtggagtgggtaacatgagcgcgaacgcctctgaccaggagcgaacaccctggcatgtgactataaaacctaaaagtcaagaaacatgcagaggggctctcatttcggatcagtgggttttaacagccgctcactgcttccgcgatgggaatgatcactccttatggagggtgaacgtgggtgatcccaaatctcaatggggaaaggagttcctcatcgagaaagcggtaatcagccctggattcgatgtgttcgccaagaagaatcagggcattctggagttttacggggacgatatcgcgctcctgaagctcgctcagaaagttaaaatgtcaactcatgccaggccgatctgcctcccttgtactatggaggccaatctggctctgcgtaggcctcaggggagcacttgccgggaccatgagaatgaactcctgaacaagcagtctgtgcccgcacatttcgtcgccctcaatgggagcaaactgaacattaacttgaagatgggagtcgagtggaccagctgtgctgaggtcgtatctcaggagaaaaccatgttcccaaacctcacagacgttagggaggtagtgaccgaccagttcctgtgcagcggtactcaagaggacgagagcccttgcaaaggcgtcaccacgacaccttggtctctggcccgaccccagggatcgtgtagtctggagggcgtcgaaattaaggggggaagcttcagacttctccaagaaggtcaagcactggagtatgtctgcccgagcggcttttacccttaccccgtgcagacaagaacttgccgtagcaccggctcgtggtccaccctcaagacacaggatcagaagaccgtccggaaagccgaatgcagagccatccattgtccaaggcctcacgacttcgaaaatggcgaatactggccaagaagcccttattacaatgtatcagatgaaataagcttccattgctatgatgggtacaccctacgcggttccgccaatcggacatgccaagttaatgggaggtggagtggccagacagccatttgtgacaatggtgcgggatactgctctaacccgggtatccccatcgggactcgtaaagtgggctcccaatatcgactcgaagatagtgtgacttatcactgttctagaggcttgacattgagaggctcgcagcggcgtacttgtcaagagggagggtcatggtccggcactgagcctagttgtcaggattcttttatgtatgatacgcctcaggaggtggctgaggcattccttagctccctgacagagactatcgagggtgtcgatgctgaagatggacacggccctggcgagcagcagaagcggaaaattgttctcgacccaagcgggagcatgaacatctacctcgttctggatgggtctgatagcatcggtgccagtaacttcactggcgctaaaaagtgtcttgtgaacctaatagagaaagtggcttcctacggcgttaagcctcggtacgggctggtcacctacgctacttatccaaaaatttgggtgaaggtgagtgaggcggattcttcaaacgcagactgggtaacaaaacagcttaatgaaattaattacgaagatcataagttaaaatctgggaccaacaccaagaaagcgctccaggctgtgtactccatgatgtcttggccagatgacgtgccccctgagggatggaaccgcacaaggcacgtgattatcttgatgacggatggtcttcacaacatgggtggagatccaattacggtgatcgatgagataagggatctgctctacattggtaaggacaggaaaaatccacgggaggattacctggacgtgtacgtttttggtgtgggtcctctggtcaatcaggtgaacatcaatgccctcgcttctaagaaggacaatgaacagcatgttttcaaggtgaaagacatggaaaatctggaagacgttttctaccagatgattgacgagtcccagtccctaagtctgtgcggaatggtttgggaacacaggaaagggacggactaccataagcagccctggcaggctaagatctctgtgattaggcccagcaaaggccatgaaagctgcatgggagcagttgtctcagagtactttgtcctgaccgcggctcactgttttacagttgatgataaagaacactccattaaggtgagcgtcgggggtgagaagagggatctggagatcgaggtggtgttattccaccctaactacaatattaacggaaaggaagaggctggcatccccgagttctacgattatgatgtggcactgataaagctcaagaataagcttaaatatgggcagacaatccggccaatctgtttgccctgcaccgaaggcacgacacgtgcccttcggctcccgcctaccaccacatgccagcaacaaaaggaagaacttctgccagcccaggacatcaaggcactgttcgtgagcgaggaggagaagaagcttactaggaaagaggtgtacattaagaatggtgataagaagggtagttgtgagcgtgacgcccagtatgcgccaggctacgataaggtaaaggacatttcggaggttgtgacgcctcggttcttgtgtactggaggggttagtccatacgcggatccaaacacatgtcggggagattctggaggcccattaattgtccataagaggagcagattcatccaggtgggtgtcatctcatggggggtcgtcgacgtgtgtaagaaccaaaagcgccagaaacaggtcccagcccacgccagggattttcacattaacctcttccaggtgctgccctggcttaaggagaagctgcaagacgaagatctgggatttctgtag

SEQ ID NO: 120195 - DNA, 3801 bp, Artificial Sequence
  derived and/or modified sequence
atggggcctctgatggtcttgttctgtcttctcttcctttacccgggattggccgactccgcccctagttgtccacagaacgtgaatatcagcggcggtacatttactctgagtcatgggtgggctccgggtagtttactgacttatagttgccctcaaggcttatatccatccccggctagcaggctctgcaagtccagtggccagtggcagacgcctggggctactagatccttgtcaaaggccgtgtgcaagcccggacattgcccaaatcccggtatctctctgggcgctgtgcggactggcttcaggtttggccatggagataaagtgcgctacagatgttccagcaacctggtgctgacaggatctagcgagcgtgagtgccagggcaatggagtgtggtccggcacagaacccatttgcagacagccttattcatacgatttccctgaagacgtggcaccagctctcgggacaagtttttctcatatgcttggcgctactaaccccacacagaaaactaaggatcatgagaatggcactggtactaatacctacgcagccttaaactcggtctatttgatgatgaataatcagatgcgcctgttgggaatggaaacaatggcgtggcaggaaatcagacacgctataatccttctgacagacggcaaatccaacatggggggaagccccaagactgccgtagatcacatccgcgagatcctgaatatcaatcagaagcggaacgactatttggatatctacgcaatcggtgtcggcaagctcgacgttgattggcgggaactgaatgagctcgggtcaaagaaggacggcgaacggcatgccttcatattgcaggacacaaaggccttgcaccaagtgtttgagcacatgttagatgtatccaagttgactgacacgatctgtggggtgggcaacatgtccgccaatgcgagcgatcaggagcggaccccctggcatgtgactatcaaaccgaaaagccaggaaacttgccgtggcgcactgatctctgatcaatgggtgctgaccgctgctcactgctttcgggatggtaatgaccactccctgtggagagtcaatgtgggcgacccaaagtctcaatgggggaaggagtttctcattgaaaaagctgtgatttcaccaggctttgatgtgtttgccaaaaaaaaccaggggatcctggagttctacggcgacgacatcgccctactcaaactggcgcagaaagtaaagatgagtacacacgcacgcccaatttgtctgccctgcaccatggaggccaacctggccctccgtcgccctcagggcagtacttgccgcgaccatgagaatgagttattgaacaagcaaagtgtacctgctcactttgttgccttgaatggatccaaactgaatataaatttgaaaatgggtgtagagtggacatcttgtgcagaggtcgtcagccaggagaagaccatgtttcctaatctgaccgacgtgagagaagtggttactgaccagttcctctgctccgggacccaagaagacgaaagcccttgcaaaggggtcactaccacaccatggagtctggccagaccacagggttcttgcagtctcgaaggtgttgaaattaagggaggatcattcagactgttgcaggaaggccaggctctggaatacgtgtgcccttctgggttttatccttacccagtgcagactcggacctgtaggagcaccggatcttggtccactttaaagacccaggatcagaagaccgtccgtaaggccgaatgccgagccatacactgtcctaggcctcacgattttgagaatggcgagtattggccaagaagcccgtattacaatgtttccgacgagatctccttccattgctatgatgggtataccctaaggggatccgccaaccgcacctgtcaagtgaatggtaggtggtctggtcagaccgccatatgtgacaatggcgctgggtactgcagtaacccgggaattccaattggaactagaaaggttggcagtcagtacaggctggaagatagcgtgacttatcattgcagtagagggctgaccctgcgaggctcacagagaagaacctgtcaagaagggggttcgtggagcggaactgaaccttcttgccaggactcattcatgtatgacacacctcaggaggttgctgaggcatttttatcgagcctgaccgagacaattgagggtgtggacgcagaggacggacacggtcccggtgaacagcagaaaaggaagatcgtgctggacccctccggcagcatgaacatttacctggtactcgatgggagcgactcaattggagcctccaacttcacgggcgcaaagaagtgcctggtgaatctcattgagaaagtggcatcttacggcgtgaagcctagatacgggctggtgacatatgcgacataccctaagatatgggtgaaagtctctgaagctgattcgtccaacgccgactgggtgacaaaacagctcaatgaaatcaattatgaagaccacaagctcaagagcggcaccaacacaaagaaggccctccaggctgtgtacagcatgatgtcttggccggacgatgtcccacccgagggttggaataggacccgccacgttatcattctaatgactgacggtctgcataatatgggaggagaccctatcacagtcattgatgaaataagagatctcctctacattggaaaagataggaaaaatcctcgcgaagattacctcgatgtctatgtctttggcgttgggccattagtcaaccaggtcaatataaacgcccttgcatccaagaaagacaatgaacaacacgtgttcaaggttaaagacatggaaaaccttgaagacgtattttatcagatgattgatgagtcacaaagtctaagtctttgtggcatggtttgggagcataggaaagggacagactatcataagcagccctggcaggccaaaatttccgtgatccgcccttctaagggtcatgagagctgcatgggggcagtggtgtcggagtactttgtgctgaccgctgcacactgctttaccgttgacgacaaggagcatagcatcaaggtgtccgtgggtggggaaaaacgggacctcgagatagaggtcgtgcttttccatcccaattacaacatcaacgggaagaaggaggctggtattcccgagttttatgactatgatgtagccctgattaagttaaagaacaaactgaagtatggtcaaaccatccgccctatttgccttccatgcactgaagggactacacgggctttgcgacttcccccaactaccacatgccagcagcaaaaggaggagctcttgccagcacaagacataaaggcgctgttcgtgtcagaagaagagaagaaactgactcgaaaagaggtgtacatcaagaatggcgacaaaaagggctcctgcgagagagacgcccagtatgccccaggttacgacaaggttaaggatatatctgaggtcgtgacccctaggttcctctgcacaggaggcgtgtcgccctacgctgaccccaacacgtgtcgcggagattccggtggcccattgatcgtgcacaaaagatctcgattcattcaggttggagtgatctcctggggggtcgtcgatgtgtgcaaaaaccaaaagcgccagaagcaggtcccggctcacgcacgcgacttccatatcaatctgtttcaggttctgccttggctgaaggagaaactgcaagacgaggaccttggattcctgtag

SEQ ID NO: 120196 - DNA, 3801 bp, Artificial Sequence
  derived and/or modified sequence
atggggcctctgatggtgcttttttgcctactgtttttgtaccccggtctggccgacagcgccccttcctgccctcagaacgtgaatatcagtggtgggacgttcacactgtcccatggatgggcccctggctcactgctgacttacagctgtccacagggtctgtatccctcacccgctagtcgcctgtgcaaaagttctggccagtggcaaactcccggagccacaagaagcctgagcaaagccgtgtgcaagccaggccattgtcccaatcccggtataagcctgggggctgttagaactggttttaggtttggacacggtgacaaagtgaggtatcgctgttcctccaatctggtgctgacgggctcatcagaaagagagtgtcaaggcaatggggtctggtcaggaacagagcccatctgtcgccaaccttattcttacgactttcccgaggatgtcgctcccgctctcggcacttcatttagccatatgttaggagcaacaaatcccacacagaaaacaaaggaccacgaaaacggtacaggaaccaacacctacgccgctcttaactcagtttatctgatgatgaataatcaaatgagacttttgggtatggaaacgatggcctggcaggagatacggcacgctataattcttttgactgatgggaaatccaacatgggcggttcccccaagacagctgtggaccacatacgagagatcctcaatattaatcaaaaacgcaacgactatctggatatctacgccatcggagtgggaaagctcgacgtcgattggagagaactgaatgaactgggctcgaagaaggatggagagaggcatgcattcattctccaagacaccaaagcacttcaccaggtgtttgaacacatgctggacgtttcaaagctcactgacaccatatgcggagtgggcaacatgagcgctaatgcatcagaccaggagcgcacaccctggcacgtgaccatcaagcccaaaagtcaggagacttgcagaggagctctgatttcagatcagtgggtcttgacagcggctcattgttttcgggatggcaacgaccatagtttatggagggtcaatgtgggcgaccctaaatcccagtggggaaaggaatttctgattgagaaagctgtcattagtccaggcttcgacgtcttcgccaagaaaaaccagggaattttagagttctacggagatgatattgcactgctgaagcttgctcagaaggtaaagatgagtactcatgccagacctatatgcttgccctgcacgatggaggcgaaccttgctctgcgacgaccgcagggcagcacttgcagagaccacgaaaatgagctcctcaacaagcagtcagttcccgcacacttcgttgcattgaatggctccaagctgaatatcaacctgaagatgggggtggaatggaccagctgcgctgaggtggttagccaggagaaaacaatgtttcctaacctgaccgatgtgcgagaagtagtaactgaccagttcctctgctctgggacacaagaagatgagtcaccctgtaagggggtcacaaccacaccctggtccctcgccaggccacagggatcgtgttccctagaaggtgttgaaattaaggggggaagttttcggctgcttcaagagggccaggctctggaatacgtctgtccttctggattttatccctaccccgtgcagacccgaacctgcagatccacaggttcctggtctaccctgaagacgcaggatcaaaaaactgtccgaaaagccgaatgtcgagccatacattgcccaaggccacatgatttcgagaacggagaatattggccgcgatctccctactacaacgtaagcgacgagataagcttccactgctatgatgggtatacactgagaggctccgcgaacaggacatgccaggtgaacgggagatggagcggacaaacagctatctgtgacaacggtgctggatactgttccaatcccggaattccaattggcacgagaaaagtgggtagccagtatcgactcgaagacagcgtgacataccattgcagtagaggattgacactgcgcggatcacagcggaggacctgccaggagggcggatcttggtcagggaccgaacctagctgtcaagatagtttcatgtacgatacgccccaggaggtcgctgaagccttcctgtcatcccttactgaaaccattgagggtgtcgatgcagaagacggccacgggccaggcgagcagcagaaaagaaaaattgtattggatccatctggcagcatgaacatctacctagtactcgatgggagcgatagtattggtgcttctaactttactggagctaagaagtgtctggtgaatctgatagagaaagtggccagctacggggtgaaaccacggtatggtctggtgacatacgctacctatccgaagatctgggtgaaagtctcagaagccgattcatcaaacgcagattgggttacgaagcagctgaacgagataaactatgaggaccacaagcttaagagcgggaccaacactaaaaaggcactgcaggcggtatatagtatgatgtcttggccggacgacgttccacccgagggttggaatcggacaagacatgtaattattctcatgactgacggactgcacaacatgggcggagatccgatcacggtgatcgatgagattcgggatttgctgtatattgggaaagataggaagaacccaagggaagattacctggacgtgtatgtgtttggggtcggtcctctggtgaatcaggtgaacattaatgcgctcgccagtaaaaaagataatgaacagcatgtgtttaaagttaaggatatggagaatctggaggacgtcttttaccagatgatcgacgagtcacaatctctcagcttgtgcggaatggtttgggagcatcggaagggtactgattatcataaacagccctggcaagccaagatctctgtcattcggccttccaagggtcacgaaagctgtatgggagcagttgtcagcgaatactttgtattgactgctgcccactgtttcaccgtggatgacaaagaacactctattaaggttagcgtgggaggagagaagcgagacctcgaaatagaagtggtactttttcatccgaattataatataaacgggaaaaaagaagctggtatccccgagttctacgattacgacgtggccctcataaaactgaagaataagttgaagtacggccagaccatccggcctatatgtctcccttgtacagagggtaccactcgggctttaagactacccccaacaacgacatgtcagcagcagaaggaagaattgttgcccgctcaggacattaaggcccttttcgtttcagaggaggaaaaaaagctgacacggaaagaggtctacataaaaaatggggacaagaaggggagttgcgaacgggatgcacagtacgctcccggatatgacaaggtcaaagatatttctgaggtggtgacccccaggtttctttgcacagggggagtttcaccttatgcagatcctaacacttgcagaggagactctggcggaccgctgattgtgcataagcggagtcgtttcatccaggtgggggtcatctcttggggcgtggtcgatgtgtgcaagaaccagaagcgccagaagcaggtgccagcgcatgcccgagactttcacattaacctcttccaagtcctgccctggctcaaggaaaaactgcaagacgaggatctgggtttcttgtag

SEQ ID NO: 120197 - DNA, 3801 bp, Artificial Sequence
  derived and/or modified sequence
atgggccctcttatggtgcttttctgtctgctgtttttgtatcccggactagccgactctgccccaagttgcccccagaacgtgaatatctctggagggacatttaccctctcacatggctgggctcccggatccttgctgacttacagctgtccgcaaggactatatccaagtcctgcctcgcgcctttgcaaatctagtggacaatggcaaacacctggcgctacaaggtccctgtccaaggccgtctgcaaacccggacattgtcctaatcccggaatttccctgggtgcagttaggaccggatttaggtttggacacggggataaggttcgatacagatgctcctctaaccttgtgctaacgggcagttcagagcgcgagtgccagggaaatggcgtatggtccggaacagagcctatctgtcgtcagccttattcttacgactttccagaggatgtcgctccagccttaggaacttccttttcccacatgcttggagctaccaatccaactcaaaaaactaaggaccacgagaacggaacgggtaccaacacatacgccgctctgaattctgtgtaccttatgatgaataaccagatgcggctactgggcatggagacaatggcttggcaggaaatccgccacgcaatcatcctgctcacagacggtaagagcaatatgggcggtagcccgaagacagctgtggaccacattagggagatcctgaacatcaatcagaagcgaaacgattacctcgacatttacgccatcggggtgggaaaactggacgtcgactggcgagagttgaatgagttgggctctaaaaaggatggcgagcgacacgccttcatcctgcaagacactaaagcactccatcaggtcttcgaacatatgctcgacgtatctaaactcaccgatacaatctgtggggtgggcaatatgtcagccaatgcatcggaccaagagcgcaccccttggcacgtgacgatcaaaccaaagtcccaagagacatgccgcggtgcactaatctccgaccagtgggtcctgaccgctgcccactgttttcgagacggcaacgaccacagtctctggagggtaaatgtgggggatcccaagtctcagtggggaaaggagtttctgatcgaaaaggcagtgatttctcctggattcgacgtttttgccaaaaaaaatcagggcatactcgagttctatggtgatgacattgcgttgctgaaacttgctcagaaggtaaagatgtcaacccacgccaggccaatatgtcttccttgtaccatggaggcaaaccttgctttacgcaggccacaaggtagtacctgcagagaccatgaaaacgaactgctcaacaaacagtcagtccctgcgcatttcgtcgccctgaacggatcgaagttaaacattaatttgaaaatgggcgtggagtggaccagttgcgcagaagtagtgagccaggagaagactatgttcccaaacctgactgacgtgagggaagtggttacagaccagttcctgtgctccgggacccaggaagacgaaagtccctgtaaaggcgttaccaccaccccctggagcctagcaaggccacagggcagttgctcattagagggagtggagattaagggcggatcctttcgccttctgcaagaaggccaagcactggagtacgtctgtccctccgggttctatccatacccagttcagacccgcacttgccggtctaccggtagctggagtactttaaaaacacaggatcagaagactgtcagaaaagcggagtgtcgcgcaatccactgcccacgccctcacgactttgagaacggagagtactggccacggtcaccgtattataacgtgagcgatgagatcagttttcattgttatgacggctatacgctgagaggatctgccaaccgtacatgccaggtcaacggacgatggtctggacaaacagcaatctgcgataacggcgctgggtattgttctaaccccggaattcctattggcactaggaaggtaggtagtcagtatcgcctcgaggacagtgtcacctaccactgtagcagaggattgactctaaggggttctcaacggagaacctgccaggaagggggatcgtggtcaggaaccgagccgtcttgccaggactccttcatgtacgataccccgcaggaagtggctgaagcgtttctctccagtctcaccgaaactatcgagggagtggatgccgaggacggacacggccctggagagcagcaaaagcgcaagattgtgctggatccttcgggcagcatgaatatttacctggtgttagatggtagcgatagcattggcgcttcaaatttcactggcgctaagaagtgtctggtcaacctgatcgagaaggttgcctcctacggcgtcaagcccaggtacggacttgtgacatatgccacgtatccaaaaatttgggtcaaggtctcagaggctgatagtagtaacgctgattgggtgacaaagcagctgaatgaaattaattacgaggatcacaaactgaaaagtggtacaaacaccaaaaaagctctgcaggctgtctactcaatgatgtcatggcccgacgacgttcctcccgagggctggaataggacacgacatgtcataatactgatgaccgatgggctgcataacatgggaggcgacccaattactgtcatagatgaaatccgcgacctactctacatcggtaaggacaggaaaaacccaagggaagattatctcgacgtgtatgtctttggtgtgggcccactggtgaatcaagtcaatatcaatgctctggcatccaagaaagataacgagcagcatgtctttaaagtaaaggatatggagaatcttgaggacgtgttctaccaaatgatcgatgagtctcagtcactctctctatgtggtatggtgtgggagcatagaaaggggacagactaccacaagcagccctggcaagccaaaatttccgtgatccggccttccaagggacatgaaagctgcatgggcgctgtggtatccgaatattttgttttaacagccgcacactgttttacggtggatgataaagaacactcaatcaaagtttcggttggaggtgagaaacgggacctggaaattgaggtcgttttatttcaccccaattataacattaacggcaaaaaagaggcaggaatccctgaattttacgactatgacgtcgcattgatcaagttaaagaataaactgaaatatggacagacaatccggccaatttgcctgccttgtaccgagggaactactagggcgttaagactgccacccactactacgtgtcaacagcagaaagaagagctccttccagctcaggacattaaagccctgttcgtgagcgaagaggagaagaagcttactaggaaagaggtctatatcaaaaacggtgacaaaaaaggatcctgtgaacgtgatgcgcagtatgcgccaggctacgacaaggtgaaggacatctccgaagttgttacacctcgattcctatgcaccggaggcgtgagtccatacgccgacccaaacacatgcaggggagattcaggcggaccactcattgtgcataaacgctccagatttatacaggttggtgtgatctcttggggcgttgtggatgtgtgcaaaaatcagaagaggcagaagcaagtgccagcccacgcaagggacttccacattaacctgtttcaagtgctcccctggctcaaggagaaattgcaagatgaggacctgggctttctgtag

SEQ ID NO: 120198 - DNA, 3801 bp, Artificial Sequence
  derived and/or modified sequence
atgggaccacttatggtacttttctgcctgttattcttatatcccggattggcagatagcgctccctcatgccctcagaacgtgaatatctcgggaggcactttcactctatctcacggatgggccccagggtccctgctgacctacagctgtccacagggtctgtacccatcccccgcttcgcgcctctgcaaatcgtcgggtcaatggcagacaccgggagctactcggagcctttcaaaagcagtttgtaagcccggacactgccccaatccagggatcagtttgggtgcggtccgtactgggttccgattcggccacggtgacaaggtgcggtaccgctgttcctccaacctggtactaacaggttcctctgaacgagaatgtcagggcaacggagtctggtccggcaccgagcccatatgtcgccaaccctactcctacgatttcccggaagatgtggcccctgcattaggtacatcttttagtcatatgctgggagccaccaacccaacccaaaaaaccaaggaccatgaaaacgggaccggcactaacacatacgccgcactgaacagcgtgtatcttatgatgaacaaccagatgcgcctgctgggaatggagacgatggcctggcaggaaattcgccacgccattatcctgctcactgacggcaagagtaacatgggagggagccccaagaccgccgtcgatcacatacgggagatccttaatatcaaccagaagcgtaatgactatcttgacatttatgcaatcggagtgggaaagctggatgtcgattggagggaactgaacgagctgggttcaaaaaaagacggtgagcggcacgcatttatcctacaggacacaaaggccctccaccaggtgttcgagcatatgctggatgtgagcaaactgacagacaccatatgcggcgtgggcaatatgtctgcgaacgcctccgaccaagaacggaccccgtggcacgtcacgataaaacctaagagtcaggagacctgtaggggcgcactcatttctgaccagtgggtcctgaccgcagcccactgctttagggatggaaatgatcacagtttatggcgtgttaatgtgggagatccaaagagccaatggggtaaagagtttctcattgaaaaggcagtgatcagcccaggcttcgacgttttcgccaaaaaaaaccaggggattttagagttttatggagatgacattgcattgctgaagcttgctcagaaagtcaaaatgtcgactcatgcgcgtcccatctgcctgccttgcacaatggaggctaatctggctcttcgcagacctcagggttccacttgccgggaccacgaaaacgagttattaaacaagcagagtgtccccgctcattttgtggcactcaacgggtccaagctgaacatcaatctgaagatgggtgtagaatggacttcctgcgccgaagtggtgtcacaggaaaaaacaatgtttccaaacctgaccgacgtgcgagaagtagtgaccgaccaattcctgtgctcgggcacccaagaggatgagagcccgtgtaagggcgtgacgacaactccgtggtctctggcgaggccccagggctcctgttcgcttgagggcgtcgaaataaagggaggcagcttcaggctattgcaggaaggacaggccctggaatatgtatgtccatcaggattttacccatatccagtgcaaacaaggacttgtcgcagtactgggtcctggagtaccttgaagacacaagaccagaagaccgtacggaaggcggagtgcagggccatccactgcccaagaccacacgatttcgagaacggggagtattggccgcgatctccatactataatgtatccgacgagatctctttccactgttatgacggctataccctgagggggtccgccaacaggacttgccaggtgaacggaagatggagtgggcaaacagcgatatgcgacaatggggcaggctactgcagtaatccgggtattcctattggcacccgaaaggttggatctcagtatagacttgaggactcagtcacctatcattgttcaagagggctgacattgcgcggttcacagcggagaacctgccaggaagggggatcgtggagtggcaccgagcctagctgtcaagactcctttatgtatgacacaccccaggaggtcgccgaggcttttctgagttctctgactgagacaattgagggcgttgacgccgaagacgggcacggtcccggagagcagcaaaagagaaaaattgtgcttgatcccagcggtagcatgaacatctacctggtgctggatggatccgatagcattggggcatccaatttcactggcgctaagaaatgcttagttaatttgatcgagaaggtggcttcttatggcgtgaagcctagatacggcttggtgacctatgccacataccctaaaatctgggtgaaggtttcagaggccgatagttccaatgctgactgggttacaaaacagctgaatgagattaattacgaagatcataaactgaagtccggtaccaacaccaaaaaagcactgcaggctgtgtattctatgatgagctggccagacgacgttccacccgaaggctggaatcgaactcggcacgttattatattaatgacagacggcctgcacaatatgggtggagatcccatcacagttattgatgagatcagagatttactttatatcggaaaagatagaaagaacccgcgagaggattacttggatgtttacgtcttcggcgtaggaccattggtaaatcaagtgaatatcaatgctctggcgagtaaaaaagataatgagcagcacgtcttcaaagttaaggatatggagaacctggaagatgtcttctaccagatgatagacgagtcccagagcctatcattgtgtggaatggtgtgggaacaccggaagggaacagattaccataagcagccctggcaggctaaaatcagcgtgataaggccctccaaagggcatgagagttgtatgggggctgtggtgtccgaatacttcgtgctcaccgcggctcattgtttcacagtggacgacaaagagcactccatcaaagttagcgtgggtggcgaaaaacgtgatttggaaatagaggttgtgctctttcatccgaattacaacataaacgggaagaaggaggccggaattcccgagttctatgattatgacgttgcccttattaagctgaagaataagctgaaatacggtcaaacaatacggcctatttgtctgccctgtaccgaaggcactacaagagcactgcggcttccaccgaccacaacatgtcagcagcagaaggaggaactcctgcccgctcaggacatcaaagccctgtttgtttctgaagaggaaaaaaagctgacacggaaagaagtgtacattaagaacggtgacaaaaagggctcatgcgaacgcgacgcacagtacgcccctggctatgataaagttaaggatatttccgaagtcgtgaccccacgattcttgtgcaccggaggagtgagcccctatgccgatcccaacacgtgtcgtggagacagcggagggccactaattgtgcataagcgaagtcggtttattcaggtcggcgttatctcttggggcgtcgtggacgtttgcaagaaccaaaaacggcaaaaacaagttccagcccatgccagggacttccacatcaacctgtttcaggtgctaccatggctcaaagagaagctccaggatgaggaccttggattcctgtag

SEQ ID NO: 120199 - DNA, 1921 bp, Artificial Sequence
  derived and/or modified sequence
aataaaaatcaatggtttccacatctctcagtgcctctatctggaggccaggtctggagtttcagcttggacactgagccaagcagacaagcaaagcaagccaggacacaccatcctgccccaggcccagcttctctcctgccttccaacgccatggggagcaatctcagcccccaactctgcctgatgccctttatcttgggcctcttgtctggaggtgtgaccaccactccatggtctttggcccagccccagggatcctgctctctggagggggtagagatcaaaggcggctccttccgacttctccaagagggccaggcactggagtacgtgtgtccttctggcttctacccgtaccctgtgcagacacgtacctgcagatctacggggtcctggagcaccctgaagactcaagaccaaaagactgtcaggaaggcagagtgcagagcaatccactgtccaagaccacacgacttcgagaacggggaatactggccccggtctccctactacaatgtgagtgatgagatctctttccactgctatgacggttacactctccggggctctgccaatcgcacctgccaagtgaatggccggtggagtgggcagacagcgatctgtgacaacggagcggggtactgctccaacccgggcatccccattggcacaaggaaggtgggcagccagtaccgccttgaagacagcgtcacctaccactgcagccgggggcttaccctgcgtggctcccagcggcgaacgtgtcaggaaggtggctcttggagcgggacggagccttcctgccaagactccttcatgtacgacacccctcaagaggtggccgaagctttcctgtcttccctgacagagaccatagaaggagtcgatgctgaggatgggcacggcccaggggaacaacagaagcggaagatcgtcctggacccttcaggctccatgaacatctacctggtgctagatggatcagacagcattggggccagcaacttcacaggagccaaaaagtgtctagtcaacttaattgagaaggtggcaagttatggtgtgaagccaagatatggtctagtgacatatgccacataccccaaaatttgggtcaaagtgtctgaagcagacagcagtaatgcagactgggtcacgaagcagctcaatgaaatcaattatgaagaccacaagttgaagtcagggactaacaccaagaaggccctccaggcagtgtacagcatgatgagctggccagatgacgtccctcctgaaggctggaaccgcacccgccatgtcatcatcctcatgactgatggattgcacaacatgggcggggacccaattactgtcattgatgagatccgggacttgctatacattggcaaggatcgcaaaaacccaagggaggattatctggatgtctatgtgtttggggtcgggcctttggtgaaccaagtgaacatcaatgctttggcttccaagaaagacaatgagcaacatgtgttcaaagtcaaggatatggaaaacctggaagatgttttctaccaaatgatcgatgaaagccagtctctgagtctctgtggcatggtttgggaacacaggaagggtaccgattaccacaagcaaccatggcaggccaagatctcagtcattcgcccttcaaagggacacgagagctgtatgggggctgtggtgtctgagtactttgtgctgacagcagcacattgtttcactgtggatgacaaggaacactcaatcaaggtcagcgtaggaggggagaagcgggacctggagatagaagtagtcctatttcaccccaactacaacattaatgggaaaaaagaagcaggaattcctgaattttatgactatgacgttgccctgatcaagctcaagaataagctgaaatatggcc

SEQ ID NO: 120200 - DNA, 1996 bp, Artificial Sequence
  derived and/or modified sequence
gcttggatgttccgggaaagtgatgtgggtaggacaggcggggcgagccgcaggtgccagaacacagattgtataaaaggctgggggctggtggggagcaggggaagggaatgtgaccaggtctaggtctggagtttcagcttggacactgagccaagcagacaagcaaagcaagccaggacacaccatcctgccccaggcccagcttctctcctgccttccaacgccatggggagcaatctcagcccccaactctgcctgatgccctttatcttgggcctcttgtctggaggtgtgaccaccactccatggtctttggcccagccccagggatcctgctctctggagggggtagagatcaaaggcggctccttccgacttctccaagagggccaggcactggagtacgtgtgtccttctggcttctacccgtaccctgtgcagacacgtacctgcagatctacggggtcctggagcaccctgaagactcaagaccaaaagactgtcaggaaggcagagtgcagagcaatccactgtccaagaccacacgacttcgagaacggggaatactggccccggtctccctactacaatgtgagtgatgagatctctttccactgctatgacggttacactctccggggctctgccaatcgcacctgccaagtgaatggccggtggagtgggcagacagcgatctgtgacaacggagcggggtactgctccaacccgggcatccccattggcacaaggaaggtgggcagccagtaccgccttgaagacagcgtcacctaccactgcagccgggggcttaccctgcgtggctcccagcggcgaacgtgtcaggaaggtggctcttggagcgggacggagccttcctgccaagactccttcatgtacgacacccctcaagaggtggccgaagctttcctgtcttccctgacagagaccatagaaggagtcgatgctgaggatgggcacggcccaggggaacaacagaagcggaagatcgtcctggacccttcaggctccatgaacatctacctggtgctagatggatcagacagcattggggccagcaacttcacaggagccaaaaagtgtctagtcaacttaattgagaaggtggcaagttatggtgtgaagccaagatatggtctagtgacatatgccacataccccaaaatttgggtcaaagtgtctgaagcagacagcagtaatgcagactgggtcacgaagcagctcaatgaaatcaattatgaagaccacaagttgaagtcagggactaacaccaagaaggccctccaggcagtgtacagcatgatgagctggccagatgacgtccctcctgaaggctggaaccgcacccgccatgtcatcatcctcatgactgatggattgcacaacatgggcggggacccaattactgtcattgatgagatccgggacttgctatacattggcaaggatcgcaaaaacccaagggaggattatctggatgtctatgtgtttggggtcgggcctttggtgaaccaagtgaacatcaatgctttggcttccaagaaagacaatgagcaacatgtgttcaaagtcaaggatatggaaaacctggaagatgttttctaccaaatgatcgatgaaagccagtctctgagtctctgtggcatggtttgggaacacaggaagggtaccgattaccacaagcaaccatggcaggccaagatctcagtcattcgcccttcaaagggacacgagagctgtatgggggctgtggtgtctgagtactttgtgctgacagcagcacattgtttcactgtggatgacaaggaacactcaatcaaggtcagcgtaggaggggagaagcgggacctggagatagaagtagtcctatttcaccccaactacaacattaatgggaaaaaagaagcaggaattcctgaattttatgactatgacgttgccctgatcaagctcaagaataagctgaaatatggcc

SEQ ID NO: 120201 - DNA, 2502 bp, Artificial Sequence
  derived and/or modified sequence
aataaaaatcaatggtttccacatctctcagtgcctctatctggaggccaggtctggagtttcagcttggacactgagccaagcagacaagcaaagcaagccaggacacaccatcctgccccaggcccagcttctctcctgccttccaacgccatggggagcaatctcagcccccaactctgcctgatgccctttatcttgggcctcttgtctggaggtgtgaccaccactccatggtctttggcccggccccagggatcctgctctctggagggggtagagatcaaaggcggctccttccgacttctccaagagggccaggcactggagtacgtgtgtccttctggcttctacccgtaccctgtgcagacacgtacctgcagatctacggggtcctggagcaccctgaagactcaagaccaaaagactgtcaggaaggcagagtgcagagcaatccactgtccaagaccacacgacttcgagaacggggaatactggccccggtctccctactacaatgtgagtgatgagatctctttccactgctatgacggttacactctccggggctctgccaatcgcacctgccaagtgaatggccggtggagtgggcagacagcgatctgtgacaacggagcggggtactgctccaacccgggcatccccattggcacaaggaaggtgggcagccagtaccgccttgaagacagcgtcacctaccactgcagccgggggcttaccctgcgtggctcccagcggcgaacgtgtcaggaaggtggctcttggagcgggacggagccttcctgccaagactccttcatgtacgacacccctcaagaggtggccgaagctttcctgtcttccctgacagagaccatagaaggagtcgatgctgaggatgggcacggcccaggggaacaacagaagcggaagatcgtcctggacccttcaggctccatgaacatctacctggtgctagatggatcagacagcattggggccagcaacttcacaggagccaaaaagtgtctagtcaacttaattgagaaggtggcaagttatggtgtgaagccaagatatggtctagtgacatatgccacataccccaaaatttgggtcaaagtgtctgaagcagacagcagtaatgcagactgggtcacgaagcagctcaatgaaatcaattatgaagaccacaagttgaagtcagggactaacaccaagaaggccctccaggcagtgtacagcatgatgagctggccagatgacgtccctcctgaaggctggaaccgcacccgccatgtcatcatcctcatgactgatggattgcacaacatgggcggggacccaattactgtcattgatgagatccgggacttgctatacattggcaaggatcgcaaaaacccaagggaggattatctggatgtctatgtgtttggggtcgggcctttggtgaaccaagtgaacatcaatgctttggcttccaagaaagacaatgagcaacatgtgttcaaagtcaaggatatggaaaacctggaagatgttttctaccaaatgatcgatgaaagccagtctctgagtctctgtggcatggtttgggaacacaggaagggtaccgattaccacaagcaaccatggcaggccaagatctcagtcattcgcccttcaaagggacacgagagctgtatgggggctgtggtgtctgagtactttgtgctgacagcagcacattgtttcactgtggatgacaaggaacactcaatcaaggtcagcgtaggaggggagaagcgggacctggagatagaagtagtcctatttcaccccaactacaacattaatgggaaagaagaagcaggaattcctgaattttatgactatgacgttgccctgatcaagctcaagaataagctgaaatatggccagactatcaggcccatttgtctcccctgcaccgagggaacaactcgagctttgaggcttcctccaactaccacttgccagcaacaaaaggaagagctgctccctgcacaggatatcaaagctctgtttgtgtctgaggaggagaaaaagctgactcggaaggaggtctacatcaagaatggggataagaaaggcagctgtgagagagatgctcaatatgccccaggctatgacaaagtcaaggacatctcagaggtggtcacccctcggttcctttgtactggaggagtgagtccctatgctgaccccaatacttgcagaggtgattctggcggccccttgatagttcacaagagaagtcgtttcattcaagttggtgtaatcagctggggagtagtggatgtctgcaaaaaccagaagcggcaaaagcaggtacctgctcacgcccgagactttcacatcaacctctttcaagtgctgccctggctgaaggagaaactccaagatgaggatttgggttttctataaggggtttcctgctggacaggggcgtgggattgaattaaaacagctgcgacaaca

SEQ ID NO: 120202 - DNA, 2502 bp, Artificial Sequence
  derived and/or modified sequence
aataaaaatcaatggtttccacatctctcagtgcctctatctggaggccaggtctggagtttcagcttggacactgagccaagcagacaagcaaagcaagccaggacacaccatcctgccccaggcccagcttctctcctgccttccaacgccatggggagcaatctcagcccccaactctgcctgatgccctttatcttgggcctcttgtctggaggtgtgaccaccactccatggtctttggcccggccccagggatcctgctctctggagggggtagagatcaaaggcggctccttccgacttctccaagagggccaggcactggagtacgtgtgtccttctggcttctacccgtaccctgtgcagacacgtacctgcagatctacggggtcctggagcaccctgaagactcaagaccaaaagactgtcaggaaggcagagtgcagagcaatccactgtccaagaccacacgacttcgagaacggggaatactggccccggtctccctactacaatgtgagtgatgagatctctttccactgctatgacggttacactctccggggctctgccaatcgcacctgccaagtgaatggccggtggagtgggcagacagcgatctgtgacaacggagcggggtactgctccaacccgggcatccccattggcacaaggaaggtgggcagccagtaccgccttgaagacagcgtcacctaccactgcagccgggggcttaccctgcgtggctcccagcggcgaacgtgtcaggaaggtggctcttggagcgggacggagccttcctgccaagactccttcatgtacgacacccctcaagaggtggccgaagctttcctgtcttccctgacagagaccatagaaggagtcgatgctgaggatgggcacggcccaggggaacaacagaagcggaagatcgtcctggacccttcaggctccatgaacatctacctggtgctagatggatcagacagcattggggccagcaacttcacaggagccaaaaagtgtctagtcaacttaattgagaaggtggcaagttatggtgtgaagccaagatatggtctagtgacatatgccacataccccaaaatttgggtcaaagtgtctgaagcagacagcagtaatgcagactgggtcacgaagcagctcaatgaaatcaattatgaagaccacaagttgaagtcagggactaacaccaagaaggccctccaggcagtgtacagcatgatgagctggccagatgacgtccctcctgaaggctggaaccgcacccgccatgtcatcatcctcatgactgatggattgcacaacatgggcggggacccaattactgtcattgatgagatccgggacttgctatacattggcaaggatcgcaaaaacccaagggaggattatctggatgtctatgtgtttggggtcgggcctttggtgaaccaagtgaacatcaatgctttggcttccaagaaagacaatgagcaacatgtgttcaaagtcaaggatatggaaaacctggaagatgttttctaccaaatgatcgatgaaagccagtctctgagtctctgtggcatggtttgggaacacaggaagggtaccgattaccacaagcaaccatggcaggccaagatctcagtcattcgcccttcaaagggacacgagagctgtatgggggctgtggtgtctgagtactttgtgctgacagcagcacattgtttcactgtggatgacaaggaacactcaatcaaggtcagcgtaggaggggagaagcgggacctggagatagaagtagtcctatttcaccccaactacaacattaatgggaaaaaagaagcaggaattcctgaattttatgactatgacgttgccctgatcaagctcaagaataagctgaaatatggccagactatcaggcccatttgtctcccctgcaccgagggaacaactcgagctttgaggcttcctccaactaccacttgccagcaacaaaaggaagagctgctccctgcacaggatatcaaagctctgtttgtgtctgaggaggagaaaaagctgactcggaaggaggtctacatcaagaatggggataagaaaggcagctgtgagagagatgctcaatatgccccaggctatgacaaagtcaaggacatctcagaggtggtcacccctcggttcctttgtactggaggagtgagtccctatgctgaccccaatacttgcagaggtgattctggcggccccttgatagttcacaagagaagtcgtttcattcaagttggtgtaatcagctggggagtagtggatgtctgcaaaaaccagaagcggcaaaagcaggtacctgctcacgcccgagactttcacatcaacctctttcaagtgctgccctggctgaaggagaaactccaagatgaggatttgggttttctataaggggtttcctgctggacaggggcgtgggattgaattaaaacagctgcgacaaca

SEQ ID NO: 120203 - DNA, 2577 bp, Artificial Sequence
  derived and/or modified sequence
gcttggatgttccgggaaagtgatgtgggtaggacaggcggggcgagccgcaggtgccagaacacagattgtataaaaggctgggggctggtggggagcaggggaagggaatgtgaccaggtctaggtctggagtttcagcttggacactgagccaagcagacaagcaaagcaagccaggacacaccatcctgccccaggcccagcttctctcctgccttccaacgccatggggagcaatctcagcccccaactctgcctgatgccctttatcttgggcctcttgtctggaggtgtgaccaccactccatggtctttggcccggccccagggatcctgctctctggagggggtagagatcaaaggcggctccttccgacttctccaagagggccaggcactggagtacgtgtgtccttctggcttctacccgtaccctgtgcagacacgtacctgcagatctacggggtcctggagcaccctgaagactcaagaccaaaagactgtcaggaaggcagagtgcagagcaatccactgtccaagaccacacgacttcgagaacggggaatactggccccggtctccctactacaatgtgagtgatgagatctctttccactgctatgacggttacactctccggggctctgccaatcgcacctgccaagtgaatggccggtggagtgggcagacagcgatctgtgacaacggagcggggtactgctccaacccgggcatccccattggcacaaggaaggtgggcagccagtaccgccttgaagacagcgtcacctaccactgcagccgggggcttaccctgcgtggctcccagcggcgaacgtgtcaggaaggtggctcttggagcgggacggagccttcctgccaagactccttcatgtacgacacccctcaagaggtggccgaagctttcctgtcttccctgacagagaccatagaaggagtcgatgctgaggatgggcacggcccaggggaacaacagaagcggaagatcgtcctggacccttcaggctccatgaacatctacctggtgctagatggatcagacagcattggggccagcaacttcacaggagccaaaaagtgtctagtcaacttaattgagaaggtggcaagttatggtgtgaagccaagatatggtctagtgacatatgccacataccccaaaatttgggtcaaagtgtctgaagcagacagcagtaatgcagactgggtcacgaagcagctcaatgaaatcaattatgaagaccacaagttgaagtcagggactaacaccaagaaggccctccaggcagtgtacagcatgatgagctggccagatgacgtccctcctgaaggctggaaccgcacccgccatgtcatcatcctcatgactgatggattgcacaacatgggcggggacccaattactgtcattgatgagatccgggacttgctatacattggcaaggatcgcaaaaacccaagggaggattatctggatgtctatgtgtttggggtcgggcctttggtgaaccaagtgaacatcaatgctttggcttccaagaaagacaatgagcaacatgtgttcaaagtcaaggatatggaaaacctggaagatgttttctaccaaatgatcgatgaaagccagtctctgagtctctgtggcatggtttgggaacacaggaagggtaccgattaccacaagcaaccatggcaggccaagatctcagtcattcgcccttcaaagggacacgagagctgtatgggggctgtggtgtctgagtactttgtgctgacagcagcacattgtttcactgtggatgacaaggaacactcaatcaaggtcagcgtaggaggggagaagcgggacctggagatagaagtagtcctatttcaccccaactacaacattaatgggaaaaaagaagcaggaattcctgaattttatgactatgacgttgccctgatcaagctcaagaataagctgaaatatggccagactatcaggcccatttgtctcccctgcaccgagggaacaactcgagctttgaggcttcctccaactaccacttgccagcaacaaaaggaagagctgctccctgcacaggatatcaaagctctgtttgtgtctgaggaggagaaaaagctgactcggaaggaggtctacatcaagaatggggataagaaaggcagctgtgagagagatgctcaatatgccccaggctatgacaaagtcaaggacatctcagaggtggtcacccctcggttcctttgtactggaggagtgagtccctatgctgaccccaatacttgcagaggtgattctggcggccccttgatagttcacaagagaagtcgtttcattcaagttggtgtaatcagctggggagtagtggatgtctgcaaaaaccagaagcggcaaaagcaggtacctgctcacgcccgagactttcacatcaacctctttcaagtgctgccctggctgaaggagaaactccaagatgaggatttgggttttctataaggggtttcctgctggacaggggcgtgggattgaattaaaacagctgcgacaaca

SEQ ID NO: 120204 - DNA, 2577 bp, Artificial Sequence
  derived and/or modified sequence
gcttggatgttccgggaaagtgatgtgggtaggacaggcggggcgagccgcaggtgccagaacacagattgtataaaaggctgggggctggtggggagcaggggaagggaatgtgaccaggtctaggtctggagtttcagcttggacactgagccaagcagacaagcaaagcaagccaggacacaccatcctgccccaggcccagcttctctcctgccttccaacgccatggggagcaatctcagcccccaactctgcctgatgccctttatcttgggcctcttgtctggaggtgtgaccaccactccatggtctttggcccggccccagggatcctgctctctggagggggtagagatcaaaggcggctccttccgacttctccaagagggccaggcactggagtacgtgtgtccttctggcttctacccgtaccctgtgcagacacgtacctgcagatctacggggtcctggagcaccctgaagactcaagaccaaaagactgtcaggaaggcagagtgcagagcaatccactgtccaagaccacacgacttcgagaacggggaatactggccccggtctccctactacaatgtgagtgatgagatctctttccactgctatgacggttacactctccggggctctgccaatcgcacctgccaagtgaatggccggtggagtgggcagacagcgatctgtgacaacggagcggggtactgctccaacccgggcatccccattggcacaaggaaggtgggcagccagtaccgccttgaagacagcgtcacctaccactgcagccgggggcttaccctgcgtggctcccagcggcgaacgtgtcaggaaggtggctcttggagcgggacggagccttcctgccaagactccttcatgtacgacacccctcaagaggtggccgaagctttcctgtcttccctgacagagaccatagaaggagtcgatgctgaggatgggcacggcccaggggaacaacagaagcggaagatcgtcctggacccttcaggctccatgaacatctacctggtgctagatggatcagacagcattggggccagcaacttcacaggagccaaaaagtgtctagtcaacttaattgagaaggtggcaagttatggtgtgaagccaagatatggtctagtgacatatgccacataccccaaaatttgggtcaaagtgtctgaagcagacagcagtaatgcagactgggtcacgaagcagctcaatgaaatcaattatgaagaccacaagttgaagtcagggactaacaccaagaaggccctccaggcagtgtacagcatgatgagctggccagatgacgtccctcctgaaggctggaaccgcacccgccatgtcatcatcctcatgactgatggattgcacaacatgggcggggacccaattactgtcattgatgagatccgggacttgctatacattggcaaggatcgcaaaaacccaagggaggattatctggatgtctatgtgtttggggtcgggcctttggtgaaccaagtgaacatcaatgctttggcttccaagaaagacaatgagcaacatgtgttcaaagtcaaggatatggaaaacctggaagatgttttctaccaaatgatcgatgaaagccagtctctgagtctctgtggcatggtttgggaacacaggaagggtaccgattaccacaagcaaccatggcaggccaagatctcagtcattcgcccttcaaagggacacgagagctgtatgggggctgtggtgtctgagtactttgtgctgacagcagcacattgtttcactgtggatgacaaggaacactcaatcaaggtcagcgtaggaggggagaagcgggacctggagatagaagtagtcctatttcaccccaactacaacattaatgggaaagaagaagcaggaattcctgaattttatgactatgacgttgccctgatcaagctcaagaataagctgaaatatggccagactatcaggcccatttgtctcccctgcaccgagggaacaactcgagctttgaggcttcctccaactaccacttgccagcaacaaaaggaagagctgctccctgcacaggatatcaaagctctgtttgtgtctgaggaggagaaaaagctgactcggaaggaggtctacatcaagaatggggataagaaaggcagctgtgagagagatgctcaatatgccccaggctatgacaaagtcaaggacatctcagaggtggtcacccctcggttcctttgtactggaggagtgagtccctatgctgaccccaatacttgcagaggtgattctggcggccccttgatagttcacaagagaagtcgtttcattcaagttggtgtaatcagctggggagtagtggatgtctgcaaaaaccagaagcggcaaaagcaggtacctgctcacgcccgagactttcacatcaacctctttcaagtgctgccctggctgaaggagaaactccaagatgaggatttgggttttctataaggggtttcctgctggacaggggcgtgggattgaattaaaacagctgcgacaaca

SEQ ID NO: 120205 - DNA, 2862 bp, Artificial Sequence
  derived and/or modified sequence
ggccttgggggagggggaggccagaatgactccaagagctacaggaaggcaggtcagagaccccactggacaaacagtggctggactctgcaccataacacacaatcaacaggggagtgagctggatccttatttctggtccctaagtgggtggtttgggcttactggggaggagctaaggccggagaggaggtactgaaggggagagtcctggacctttggcagcaaagggtgggacttctgcagtttctgtttccttgactggcagctcagcggggccctcccgcttggatgttccgggaaagtgatgtgggtaggacaggcggggcgagccgcaggtgccagaacacagattgtataaaaggctgggggctggtggggagcaggggaagggaatgtgaccaggtctaggtctggagtttcagcttggacactgagccaagcagacaagcaaagcaagccaggacacaccatcctgccccaggcccagcttctctcctgccttccaacgccatggggagcaatctcagcccccaactctgcctgatgccctttatcttgggcctcttgtctggaggtgtgaccaccactccatggtctttggcccggccccagggatcctgctctctggagggggtagagatcaaaggcggctccttccgacttctccaagagggccaggcactggagtacgtgtgtccttctggcttctacccgtaccctgtgcagacacgtacctgcagatctacggggtcctggagcaccctgaagactcaagaccaaaagactgtcaggaaggcagagtgcagagcaatccactgtccaagaccacacgacttcgagaacggggaatactggccccggtctccctactacaatgtgagtgatgagatctctttccactgctatgacggttacactctccggggctctgccaatcgcacctgccaagtgaatggccgatggagtgggcagacagcgatctgtgacaacggagcggggtactgctccaacccgggcatccccattggcacaaggaaggtgggcagccagtaccgccttgaagacagcgtcacctaccactgcagccgggggcttaccctgcgtggctcccagcggcgaacgtgtcaggaaggtggctcttggagcgggacggagccttcctgccaagactccttcatgtacgacacccctcaagaggtggccgaagctttcctgtcttccctgacagagaccatagaaggagtcgatgctgaggatgggcacggcccaggggaacaacagaagcggaagatcgtcctggacccttcaggctccatgaacatctacctggtgctagatggatcagacagcattggggccagcaacttcacaggagccaaaaagtgtctagtcaacttaattgagaaggtggcaagttatggtgtgaagccaagatatggtctagtgacatatgccacataccccaaaatttgggtcaaagtgtctgaagcagacagcagtaatgcagactgggtcacgaagcagctcaatgaaatcaattatgaagaccacaagttgaagtcagggactaacaccaagaaggccctccaggcagtgtacagcatgatgagctggccagatgacgtccctcctgaaggctggaaccgcacccgccatgtcatcatcctcatgactgatggattgcacaacatgggcggggacccaattactgtcattgatgagatccgggacttgctatacattggcaaggatcgcaaaaacccaagggaggattatctggatgtctatgtgtttggggtcgggcctttggtgaaccaagtgaacatcaatgctttggcttccaagaaagacaatgagcaacatgtgttcaaagtcaaggatatggaaaacctggaagatgttttctaccaaatgatcgatgaaagccagtctctgagtctctgtggcatggtttgggaacacaggaagggtaccgattaccacaagcaaccatggcaggccaagatctcagtcattcgcccttcaaagggacacgagagctgtatgggggctgtggtgtctgagtactttgtgctgacagcagcacattgtttcactgtggatgacaaggaacactcaatcaaggtcagcgtaggaggggagaagcgggacctggagatagaagtagtcctatttcaccccaactacaacattaatgggaaaaaagaagcaggaattcctgaattttatgactatgacgttgccctgatcaagctcaagaataagctgaaatatggccagactatcaggcccatttgtctcccctgcaccgagggaacaactcgagctttgaggcttcctccaactaccacttgccagcaacaaaaggaagagctgctccctgcacaggatatcaaagctctgtttgtgtctgaggaggagaaaaagctgactcggaaggaggtctacatcaagaatggggataagaaaggcagctgtgagagagatgctcaatatgccccaggctatgacaaagtcaaggacatctcagaggtggtcacccctcggttcctttgtactggaggagtgagtccctatgctgaccccaatacttgcagaggtgattctggcggccccttgatagttcacaagagaagtcgtttcattcaagttggtgtaatcagctggggagtagtggatgtctgcaaaaaccagaagcggcaaaagcaggtacctgctcacgcccgagactttcacatcaacctctttcaagtgctgccctggctgaaggagaaactccaagatgaggatttgggttttctataaggggtttcctgctggacaggggcgtgggattgaattaaaacagctgcgacaaca

SEQ ID NO: 120206 - DNA, 586 bp, Artificial Sequence
  derived and/or modified sequence
aataaaaatcaatggtttccacatctctcagtgcctctatctggaggccaggtctggagtttcagcttggacactgagccaagcagacaagcaaagcaagccaggacacaccatcctgccccaggcccagcttctctcctgccttccaacgccatggggagcaatctcagcccccaactctgcctgatgccctttatcttgggcctcttgtctggaggtgtgaccaccactccatggtctttggcccggccccagggatcctgctctctggagggggtagagatcaaaggcggctccttccgacttctccaagagggccaggcactggagtacgtgtgtccttctggcttctacccgtaccctgtgcagacacgtacctgcagatctacggggtcctggagcaccctgaagactcaagaccaaaagactgtcaggaaggcagagtgcagagcaatccactgtccaagaccacacgacttcgagaacggggaatactggccccggtctccctactacaatgtgagtgatgagatctctttccactgctatgacggttacactctccggggctctgccaatcgcacct

SEQ ID NO: 120207 - DNA, 3874 bp, Artificial Sequence
  derived and/or modified sequence
atgaccttttccctcccgcggctctctacctctcgccgcccctagggaggacaccatgggcccactgatggttcttttttgcctgctgttcctgtacccaggtctggcagactcggctccctcctgccctcagaacgtgaatatctcgggtggcaccttcaccctcagccatggctgggctcctgggagccttctcacctactcctgcccccagggcctgtacccatccccagcatcacggctgtgcaagagcagcggacagtggcagaccccaggagccacccggtctctgtctaaggcggtctgcaaacctggccactgccccaacccaggcatttcactgggcgcagtgcggacaggcttccgctttggtcatggggacaaggtccgctatcgctgctcctcgaatcttgtgctcacggggtcttcggagcgggagtgccagggcaacggggtctggagtggaacggagcccatctgccgccaaccctactcttatgacttccctgaggacgtggcccctgccctgggcacttccttctcccacatgcttggggccaccaatcccacccagaagacaaaggatcatgaaaatggaactgggactaacacctatgcggccttaaacagtgtctatctcatgatgaacaaccaaatgcgactcctcggcatggaaacgatggcctggcaggaaatccgacatgccatcatccttctgacagatggaaagtccaatatgggtggctctcccaagacagctgttgaccatatcagagagatcctgaacatcaaccagaagaggaatgactatctggacatctatgccatcggggtgggcaagctggatgtggactggagagaactgaatgagctagggtccaagaaggatggtgagaggcatgccttcattctgcaggacacaaaggctctgcaccaggtctttgaacatatgctggatgtctccaagctcacagacaccatctgcggggtggggaacatgtcagcaaacgcctctgaccaggagaggacaccctggcatgtcactattaagcccaagagccaagagacctgccggggggccctcatctccgaccaatgggtcctgacagcagctcattgcttccgcgatggcaacgaccactccctgtggagggtcaatgtgggagaccccaaatcccagtggggcaaagaattccttattgagaaggcggtgatctccccagggtttgatgtctttgccaaaaagaaccagggaatcctggagttctatggtgatgacatagctctgctgaagctggcccagaaagtaaagatgtccacccatgccaggcccatctgccttccctgcacgatggaggccaatctggctctgcggagacctcaaggcagcacctgtagggaccatgagaatgaactgctgaacaaacagagtgttcctgctcattttgtcgccttgaatgggagcaaactgaacattaaccttaagatgggagtggagtggacaagctgtgccgaggttgtctcccaagaaaaaaccatgttccccaacttgacagatgtcagggaggtggtgacagaccagttcctatgcagtgggacccaggaggatgagagtccctgcaagggtgtgaccaccactccatggtctttggcccggccccagggatcctgctctctggagggggtagagatcaaaggcggctccttccgacttctccaagagggccaggcactggagtacgtgtgtccttctggcttctacccgtaccctgtgcagacacgtacctgcagatctacggggtcctggagcaccctgaagactcaagaccaaaagactgtcaggaaggcagagtgcagagcaatccactgtccaagaccacacgacttcgagaacggggaatactggccccggtctccctactacaatgtgagtgatgagatctctttccactgctatgacggttacactctccggggctctgccaatcgcacctgccaagtgaatggccggtggagtgggcagacagcgatctgtgacaacggagcggggtactgctccaacccgggcatccccattggcacaaggaaggtgggcagccagtaccgccttgaagacagcgtcacctaccactgcagccgggggcttaccctgcgtggctcccagcggcgaacgtgtcaggaaggtggctcttggagcgggacggagccttcctgccaagactccttcatgtacgacacccctcaagaggtggccgaagctttcctgtcttccctgacagagaccatagaaggagtcgatgctgaggatgggcacggcccaggggaacaacagaagcggaagatcgtcctggacccttcaggctccatgaacatctacctggtgctagatggatcagacagcattggggccagcaacttcacaggagccaaaaagtgtctagtcaacttaattgagaaggtggcaagttatggtgtgaagccaagatatggtctagtgacatatgccacataccccaaaatttgggtcaaagtgtctgaagcagacagcagtaatgcagactgggtcacgaagcagctcaatgaaatcaattatgaagaccacaagttgaagtcagggactaacaccaagaaggccctccaggcagtgtacagcatgatgagctggccagatgacgtccctcctgaaggctggaaccgcacccgccatgtcatcatcctcatgactgatggattgcacaacatgggcggggacccaattactgtcattgatgagatccgggacttgctatacattggcaaggatcgcaaaaacccaagggaggattatctggatgtctatgtgtttggggtcgggcctttggtgaaccaagtgaacatcaatgctttggcttccaagaaagacaatgagcaacatgtgttcaaagtcaaggatatggaaaacctggaagatgttttctaccaaatgatcgatgaaagccagtctctgagtctctgtggcatggtttgggaacacaggaagggtaccgattaccacaagcaaccatggcaggccaagatctcagtcattcgcccttcaaagggacacgagagctgtatgggggctgtggtgtctgagtactttgtgctgacagcagcacattgtttcactgtggatgacaaggaacactcaatcaaggtcagcgtaggaggggagaagcgggacctggagatagaagtagtcctatttcaccccaactacaacattaatgggaaaaaagaagcaggaattcctgaattttatgactatgacgttgccctgatcaagctcaagaataagctgaaatatggccagactatcaggcccatttgtctcccctgcaccgagggaacaactcgagctttgaggcttcctccaactaccacttgccagcaacaaaaggaagagctgctccctgcacaggatatcaaagctctgtttgtgtctgaggaggagaaaaagctgactcggaaggaggtctacatcaagaatggggataagaaaggcagctgtgagagagatgctcaatatgccccaggctatgacaaagtcaaggacatctcagaggtggtcacccctcggttcctttgtactggaggagtgagtccctatgctgaccccaatacttgcagaggtgattctggcggccccttgatagttcacaagagaagtcgtttcattcaagttggtgtaatcagctggggagtagtggatgtctgcaaaaaccagaagcggcaaaagcaggtacctgctcacgcccgagactttcacatcaacctctttcaagtgctgccctggctgaaggagaaactccaagatgaggatttgggttttctataaggggtttcctgctggaca

SEQ ID NO: 120208 - DNA, 3874 bp, Artificial Sequence
  derived and/or modified sequence
atgaccttttccctcccgcggctctctacctctcgccgcccctagggaggacaccatgggcccactgatggttcttttttgcctgctgttcctgtacccaggtctggcagactcggctccctcctgccctcagaacgtgaatatctcgggtggcaccttcaccctcagccatggctgggctcctgggagccttctcacctactcctgcccccagggcctgtacccatccccagcatcacggctgtgcaagagcagcggacagtggcagaccccaggagccacccggtctctgtctaaggcggtctgcaaacctggccactgccccaacccaggcatttcactgggcgcagtgcggacaggcttccgctttggtcatggggacaaggtccgctatcgctgctcctcgaatcttgtgctcacggggtcttcggagcgggagtgccagggcaacggggtctggagtggaacggagcccatctgccgccaaccctactcttatgacttccctgaggacgtggcccctgccctgggcacttccttctcccacatgcttggggccaccaatcccacccagaagacaaaggatcatgaaaatggaactgggactaacacctatgcggccttaaacagtgtctatctcatgatgaacaaccaaatgcgactcctcggcatggaaacgatggcctggcaggaaatccgacatgccatcatccttctgacagatggaaagtccaatatgggtggctctcccaagacagctgttgaccatatcagagagatcctgaacatcaaccagaagaggaatgactatctggacatctatgccatcggggtgggcaagctggatgtggactggagagaactgaatgagctagggtccaagaaggatggtgagaggcatgccttcattctgcaggacacaaaggctctgcaccaggtctttgaacatatgctggatgtctccaagctcacagacaccatctgcggggtggggaacatgtcagcaaacgcctctgaccaggagaggacaccctggcatgtcactattaagcccaagagccaagagacctgccggggggccctcatctccgaccaatgggtcctgacagcagctcattgcttccgcgatggcaacgaccactccctgtggagggtcaatgtgggagaccccaaatcccagtggggcaaagaattccttattgagaaggcggtgatctccccagggtttgatgtctttgccaaaaagaaccagggaatcctggagttctatggtgatgacatagctctgctgaagctggcccagaaagtaaagatgtccacccatgccaggcccatctgccttccctgcacgatggaggccaatctggctctgcggagacctcaaggcagcacctgtagggaccatgagaatgaactgctgaacaaacagagtgttcctgctcattttgtcgccttgaatgggagcaaactgaacattaaccttaagatgggagtggagtggacaagctgtgccgaggttgtctcccaagaaaaaaccatgttccccaacttgacagatgtcagggaggtggtgacagaccagttcctatgcagtgggacccaggaggatgagagtccctgcaagggtgtgaccaccactccatggtctttggcccggccccagggatcctgctctctggagggggtagagatcaaaggcggctccttccgacttctccaagagggccaggcactggagtacgtgtgtccttctggcttctacccgtaccctgtgcagacacgtacctgcagatctacggggtcctggagcaccctgaagactcaagaccaaaagactgtcaggaaggcagagtgcagagcaatccactgtccaagaccacacgacttcgagaacggggaatactggccccggtctccctactacaatgtgagtgatgagatctctttccactgctatgacggttacactctccggggctctgccaatcgcacctgccaagtgaatggccggtggagtgggcagacagcgatctgtgacaacggagcggggtactgctccaacccgggcatccccattggcacaaggaaggtgggcagccagtaccgccttgaagacagcgtcacctaccactgcagccgggggcttaccctgcgtggctcccagcggcgaacgtgtcaggaaggtggctcttggagcgggacggagccttcctgccaagactccttcatgtacgacacccctcaagaggtggccgaagctttcctgtcttccctgacagagaccatagaaggagtcgatgctgaggatgggcacggcccaggggaacaacagaagcggaagatcgtcctggacccttcaggctccatgaacatctacctggtgctagatggatcagacagcattggggccagcaacttcacaggagccaaaaagtgtctagtcaacttaattgagaaggtggcaagttatggtgtgaagccaagatatggtctagtgacatatgccacataccccaaaatttgggtcaaagtgtctgaagcagacagcagtaatgcagactgggtcacgaagcagctcaatgaaatcaattatgaagaccacaagttgaagtcagggactaacaccaagaaggccctccaggcagtgtacagcatgatgagctggccagatgacgtccctcctgaaggctggaaccgcacccgccatgtcatcatcctcatgactgatggattgcacaacatgggcggggacccaattactgtcattgatgagatccgggacttgctatacattggcaaggatcgcaaaaacccaagggaggattatctggatgtctatgtgtttggggtcgggcctttggtgaaccaagtgaacatcaatgctttggcttccaagaaagacaatgagcaacatgtgttcaaagtcaaggatatggaaaacctggaagatgttttctaccaaatgatcgatgaaagccagtctctgagtctctgtggcatggtttgggaacacaggaagggtaccgattaccacaagcaaccatggcaggccaagatctcagtcattcgcccttcaaagggacacgagagctgtatgggggctgtggtgtctgagtactttgtgctgacagcagcacattgtttcactgtggatgacaaggaacactcaatcaaggtcagcgtaggaggggagaagcgggacctggagatagaagtagtcctatttcaccccaactacaacattaatgggaaagaagaagcaggaattcctgaattttatgactatgacgttgccctgatcaagctcaagaataagctgaaatatggccagactatcaggcccatttgtctcccctgcaccgagggaacaactcgagctttgaggcttcctccaactaccacttgccagcaacaaaaggaagagctgctccctgcacaggatatcaaagctctgtttgtgtctgaggaggagaaaaagctgactcggaaggaggtctacatcaagaatggggataagaaaggcagctgtgagagagatgctcaatatgccccaggctatgacaaagtcaaggacatctcagaggtggtcacccctcggttcctttgtactggaggagtgagtccctatgctgaccccaatacttgcagaggtgattctggcggccccttgatagttcacaagagaagtcgtttcattcaagttggtgtaatcagctggggagtagtggatgtctgcaaaaaccagaagcggcaaaagcaggtacctgctcacgcccgagactttcacatcaacctctttcaagtgctgccctggctgaaggagaaactccaagatgaggatttgggttttctataaggggtttcctgctggaca

SEQ ID NO: 120209 - DNA, 3874 bp, Artificial Sequence
  derived and/or modified sequence
atgaccttttccctcccgcggctctctacctctcgccgcccctagggaggacaccatgggcccactgatggttcttttttgcctgctgttcctgtacccaggtctggcagactcggctccctcctgccctcagaacgtgaatatctcgggtggcaccttcaccctcagccatggctgggctcctgggagccttctcacctactcctgcccccagggcctgtacccatccccagcatcacggctgtgcaagagcagcggacagtggcagaccccaggagccacccggtctctgtctaaggcggtctgcaaacctggccactgccccaacccaggcatttcactgggcgcagtgcggacaggcttccgctttggtcatggggacaaggtccgctatcgctgctcctcgaatcttgtgctcacggggtcttcggagcgggagtgccagggcaacggggtctggagtggaacggagcccatctgccgccaaccctactcttatgacttccctgaggacgtggcccctgccctgggcacttccttctcccacatgcttggggccaccaatcccacccagaagacaaaggatcatgaaaatggaactgggactaacacctatgcggccttaaacagtgtctatctcatgatgaacaaccaaatgcgactcctcggcatggaaacgatggcctggcaggaaatccgacatgccatcatccttctgacagatggaaagtccaatatgggtggctctcccaagacagctgttgaccatatcagagagatcctgaacatcaaccagaagaggaatgactatctggacatctatgccatcggggtgggcaagctggatgtggactggagagaactgaatgagctagggtccaagaaggatggtgagaggcatgccttcattctgcaggacacaaaggctctgcaccaggtctttgaacatatgctggatgtctccaagctcacagacaccatctgcggggtggggaacatgtcagcaaacgcctctgaccaggagaggacaccctggcatgtcactattaagcccaagagccaagagacctgccggggggccctcatctccgaccaatgggtcctgacagcagctcattgcttccgcgatggcaacgaccactccctgtggagggtcaatgtgggagaccccaaatcccagtggggcaaagaattccttattgagaaggcggtgatctccccagggtttgatgtctttgccaaaaagaaccagggaatcctggagttctatggtgatgacatagctctgctgaagctggcccagaaagtaaagatgtccacccatgccaggcccatctgccttccctgcacgatggaggccaatctggctctgcggagacctcaaggcagcacctgtagggaccatgagaatgaactgctgaacaaacagagtgttcctgctcattttgtcgccttgaatgggagcaaactgaacattaaccttaagatgggagtggagtggacaagctgtgccgaggttgtctcccaagaaaaaaccatgttccccaacttgacagatgtcagggaggtggtgacagaccagttcctatgcagtgggacccaggaggatgagagtccctgcaagggtgtgaccaccactccatggtctttggcccggccccagggatcctgctctctggagggggtagagatcaaaggcggctccttccgacttctccaagagggccaggcactggagtacgtgtgtccttctggcttctacccgtaccctgtgcagacacgtacctgcagatctacggggtcctggagcaccctgaagactcaagaccaaaagactgtcaggaaggcagagtgcagagcaatccactgtccaagaccacacgacttcgagaacggggaatactggccccggtctccctactacaatgtgagtgatgagatctctttccactgctatgacggttacactctccggggctctgccaatcgcacctgccaagtgaatggccgatggagtgggcagacagcgatctgtgacaacggagcggggtactgctccaacccgggcatccccattggcacaaggaaggtgggcagccagtaccgccttgaagacagcgtcacctaccactgcagccgggggcttaccctgcgtggctcccagcggcgaacgtgtcaggaaggtggctcttggagcgggacggagccttcctgccaagactccttcatgtacgacacccctcaagaggtggccgaagctttcctgtcttccctgacagagaccatagaaggagtcgatgctgaggatgggcacggcccaggggaacaacagaagcggaagatcgtcctggacccttcaggctccatgaacatctacctggtgctagatggatcagacagcattggggccagcaacttcacaggagccaaaaagtgtctagtcaacttaattgagaaggtggcaagttatggtgtgaagccaagatatggtctagtgacatatgccacataccccaaaatttgggtcaaagtgtctgaagcagacagcagtaatgcagactgggtcacgaagcagctcaatgaaatcaattatgaagaccacaagttgaagtcagggactaacaccaagaaggccctccaggcagtgtacagcatgatgagctggccagatgacgtccctcctgaaggctggaaccgcacccgccatgtcatcatcctcatgactgatggattgcacaacatgggcggggacccaattactgtcattgatgagatccgggacttgctatacattggcaaggatcgcaaaaacccaagggaggattatctggatgtctatgtgtttggggtcgggcctttggtgaaccaagtgaacatcaatgctttggcttccaagaaagacaatgagcaacatgtgttcaaagtcaaggatatggaaaacctggaagatgttttctaccaaatgatcgatgaaagccagtctctgagtctctgtggcatggtttgggaacacaggaagggtaccgattaccacaagcaaccatggcaggccaagatctcagtcattcgcccttcaaagggacacgagagctgtatgggggctgtggtgtctgagtactttgtgctgacagcagcacattgtttcactgtggatgacaaggaacactcaatcaaggtcagcgtaggaggggagaagcgggacctggagatagaagtagtcctatttcaccccaactacaacattaatgggaaaaaagaagcaggaattcctgaattttatgactatgacgttgccctgatcaagctcaagaataagctgaaatatggccagactatcaggcccatttgtctcccctgcaccgagggaacaactcgagctttgaggcttcctccaactaccacttgccagcaacaaaaggaagagctgctccctgcacaggatatcaaagctctgtttgtgtctgaggaggagaaaaagctgactcggaaggaggtctacatcaagaatggggataagaaaggcagctgtgagagagatgctcaatatgccccaggctatgacaaagtcaaggacatctcagaggtggtcacccctcggttcctttgtactggaggagtgagtccctatgctgaccccaatacttgcagaggtgattctggcggccccttgatagttcacaagagaagtcgtttcattcaagttggtgtaatcagctggggagtagtggatgtctgcaaaaaccagaagcggcaaaagcaggtacctgctcacgcccgagactttcacatcaacctctttcaagtgctgccctggctgaaggagaaactccaagatgaggatttgggttttctataaggggtttcctgctggaca

SEQ ID NO: 120210 - DNA, 1770 bp, Artificial Sequence
  derived and/or modified sequence
atgggcagcaacctgagcccccagctgtgcctgatgcccttcatcctgggcctgctgagcggcggcgtgaccaccaccccctggagcctggcccagccccagggcagctgcagcctggagggcgtggagatcaagggcggcagcttcagactgctgcaggagggccaggccctggagtacgtgtgccccagcggcttctacccctaccccgtgcagaccagaacctgcagaagcaccggcagctggagcaccctgaagacccaggaccagaagaccgtgagaaaggccgagtgcagagccatccactgccccagaccccacgacttcgagaacggcgagtactggcccagaagcccctactacaacgtgagcgacgagatcagcttccactgctacgacggctacaccctgagaggcagcgccaacagaacctgccaggtgaacggcagatggagcggccagaccgccatctgcgacaacggcgccggctactgcagcaaccccggcatccccatcggcaccagaaaggtgggcagccagtacagactggaggacagcgtgacctaccactgcagcagaggcctgaccctgagaggcagccagagaagaacctgccaggagggcggcagctggagcggcaccgagcccagctgccaggacagcttcatgtacgacaccccccaggaggtggccgaggccttcctgagcagcctgaccgagaccatcgagggcgtggacgccgaggacggccacggccccggcgagcagcagaagagaaagatcgtgctggaccccagcggcagcatgaacatctacctggtgctggacggcagcgacagcatcggcgccagcaacttcaccggcgccaagaagtgcctggtgaacctgatcgagaaggtggccagctacggcgtgaagcccagatacggcctggtgacctacgccacctaccccaagatctgggtgaaggtgagcgaggccgacagcagcaacgccgactgggtgaccaagcagctgaacgagatcaactacgaggaccacaagctgaagagcggcaccaacaccaagaaggccctgcaggccgtgtacagcatgatgagctggcccgacgacgtgccccccgagggctggaacagaaccagacacgtgatcatcctgatgaccgacggcctgcacaacatgggcggcgaccccatcaccgtgatcgacgagatcagagacctgctgtacatcggcaaggacagaaagaaccccagagaggactacctggacgtgtacgtgttcggcgtgggccccctggtgaaccaggtgaacatcaacgccctggccagcaagaaggacaacgagcagcacgtgttcaaggtgaaggacatggagaacctggaggacgtgttctaccagatgatcgacgagagccagagcctgagcctgtgcggcatggtgtgggagcacagaaagggcaccgactaccacaagcagccctggcaggccaagatcagcgtgatcagacccagcaagggccacgagagctgcatgggcgccgtggtgagcgagtacttcgtgctgaccgccgcccactgcttcaccgtggacgacaaggagcacagcatcaaggtgagcgtgggcggcgagaagagagacctggagatcgaggtggtgctgttccaccccaactacaacatcaacggcaagaaggaggccggcatccccgagttctacgactacgacgtggccctgatcaagctgaagaacaagctgaagtacggctag

SEQ ID NO: 120211 - DNA, 2295 bp, Artificial Sequence
  derived and/or modified sequence
atgggcagcaacctgagcccccagctgtgcctgatgcccttcatcctgggcctgctgagcggcggcgtgaccaccaccccctggagcctggccagaccccagggcagctgcagcctggagggcgtggagatcaagggcggcagcttcagactgctgcaggagggccaggccctggagtacgtgtgccccagcggcttctacccctaccccgtgcagaccagaacctgcagaagcaccggcagctggagcaccctgaagacccaggaccagaagaccgtgagaaaggccgagtgcagagccatccactgccccagaccccacgacttcgagaacggcgagtactggcccagaagcccctactacaacgtgagcgacgagatcagcttccactgctacgacggctacaccctgagaggcagcgccaacagaacctgccaggtgaacggcagatggagcggccagaccgccatctgcgacaacggcgccggctactgcagcaaccccggcatccccatcggcaccagaaaggtgggcagccagtacagactggaggacagcgtgacctaccactgcagcagaggcctgaccctgagaggcagccagagaagaacctgccaggagggcggcagctggagcggcaccgagcccagctgccaggacagcttcatgtacgacaccccccaggaggtggccgaggccttcctgagcagcctgaccgagaccatcgagggcgtggacgccgaggacggccacggccccggcgagcagcagaagagaaagatcgtgctggaccccagcggcagcatgaacatctacctggtgctggacggcagcgacagcatcggcgccagcaacttcaccggcgccaagaagtgcctggtgaacctgatcgagaaggtggccagctacggcgtgaagcccagatacggcctggtgacctacgccacctaccccaagatctgggtgaaggtgagcgaggccgacagcagcaacgccgactgggtgaccaagcagctgaacgagatcaactacgaggaccacaagctgaagagcggcaccaacaccaagaaggccctgcaggccgtgtacagcatgatgagctggcccgacgacgtgccccccgagggctggaacagaaccagacacgtgatcatcctgatgaccgacggcctgcacaacatgggcggcgaccccatcaccgtgatcgacgagatcagagacctgctgtacatcggcaaggacagaaagaaccccagagaggactacctggacgtgtacgtgttcggcgtgggccccctggtgaaccaggtgaacatcaacgccctggccagcaagaaggacaacgagcagcacgtgttcaaggtgaaggacatggagaacctggaggacgtgttctaccagatgatcgacgagagccagagcctgagcctgtgcggcatggtgtgggagcacagaaagggcaccgactaccacaagcagccctggcaggccaagatcagcgtgatcagacccagcaagggccacgagagctgcatgggcgccgtggtgagcgagtacttcgtgctgaccgccgcccactgcttcaccgtggacgacaaggagcacagcatcaaggtgagcgtgggcggcgagaagagagacctggagatcgaggtggtgctgttccaccccaactacaacatcaacggcaaggaggaggccggcatccccgagttctacgactacgacgtggccctgatcaagctgaagaacaagctgaagtacggccagaccatcagacccatctgcctgccctgcaccgagggcaccaccagagccctgagactgccccccaccaccacctgccagcagcagaaggaggagctgctgcccgcccaggacatcaaggccctgttcgtgagcgaggaggagaagaagctgaccagaaaggaggtgtacatcaagaacggcgacaagaagggcagctgcgagagagacgcccagtacgcccccggctacgacaaggtgaaggacatcagcgaggtggtgacccccagattcctgtgcaccggcggcgtgagcccctacgccgaccccaacacctgcagaggcgacagcggcggccccctgatcgtgcacaagagaagcagattcatccaggtgggcgtgatcagctggggcgtggtggacgtgtgcaagaaccagaagagacagaagcaggtgcccgcccacgccagagacttccacatcaacctgttccaggtgctgccctggctgaaggagaagctgcaggacgaggacctgggcttcctgtag

SEQ ID NO: 120212 - DNA, 2295 bp, Artificial Sequence
  derived and/or modified sequence
atgggcagcaacctgagcccccagctgtgcctgatgcccttcatcctgggcctgctgagcggcggcgtgaccaccaccccctggagcctggccagaccccagggcagctgcagcctggagggcgtggagatcaagggcggcagcttcagactgctgcaggagggccaggccctggagtacgtgtgccccagcggcttctacccctaccccgtgcagaccagaacctgcagaagcaccggcagctggagcaccctgaagacccaggaccagaagaccgtgagaaaggccgagtgcagagccatccactgccccagaccccacgacttcgagaacggcgagtactggcccagaagcccctactacaacgtgagcgacgagatcagcttccactgctacgacggctacaccctgagaggcagcgccaacagaacctgccaggtgaacggcagatggagcggccagaccgccatctgcgacaacggcgccggctactgcagcaaccccggcatccccatcggcaccagaaaggtgggcagccagtacagactggaggacagcgtgacctaccactgcagcagaggcctgaccctgagaggcagccagagaagaacctgccaggagggcggcagctggagcggcaccgagcccagctgccaggacagcttcatgtacgacaccccccaggaggtggccgaggccttcctgagcagcctgaccgagaccatcgagggcgtggacgccgaggacggccacggccccggcgagcagcagaagagaaagatcgtgctggaccccagcggcagcatgaacatctacctggtgctggacggcagcgacagcatcggcgccagcaacttcaccggcgccaagaagtgcctggtgaacctgatcgagaaggtggccagctacggcgtgaagcccagatacggcctggtgacctacgccacctaccccaagatctgggtgaaggtgagcgaggccgacagcagcaacgccgactgggtgaccaagcagctgaacgagatcaactacgaggaccacaagctgaagagcggcaccaacaccaagaaggccctgcaggccgtgtacagcatgatgagctggcccgacgacgtgccccccgagggctggaacagaaccagacacgtgatcatcctgatgaccgacggcctgcacaacatgggcggcgaccccatcaccgtgatcgacgagatcagagacctgctgtacatcggcaaggacagaaagaaccccagagaggactacctggacgtgtacgtgttcggcgtgggccccctggtgaaccaggtgaacatcaacgccctggccagcaagaaggacaacgagcagcacgtgttcaaggtgaaggacatggagaacctggaggacgtgttctaccagatgatcgacgagagccagagcctgagcctgtgcggcatggtgtgggagcacagaaagggcaccgactaccacaagcagccctggcaggccaagatcagcgtgatcagacccagcaagggccacgagagctgcatgggcgccgtggtgagcgagtacttcgtgctgaccgccgcccactgcttcaccgtggacgacaaggagcacagcatcaaggtgagcgtgggcggcgagaagagagacctggagatcgaggtggtgctgttccaccccaactacaacatcaacggcaagaaggaggccggcatccccgagttctacgactacgacgtggccctgatcaagctgaagaacaagctgaagtacggccagaccatcagacccatctgcctgccctgcaccgagggcaccaccagagccctgagactgccccccaccaccacctgccagcagcagaaggaggagctgctgcccgcccaggacatcaaggccctgttcgtgagcgaggaggagaagaagctgaccagaaaggaggtgtacatcaagaacggcgacaagaagggcagctgcgagagagacgcccagtacgcccccggctacgacaaggtgaaggacatcagcgaggtggtgacccccagattcctgtgcaccggcggcgtgagcccctacgccgaccccaacacctgcagaggcgacagcggcggccccctgatcgtgcacaagagaagcagattcatccaggtgggcgtgatcagctggggcgtggtggacgtgtgcaagaaccagaagagacagaagcaggtgcccgcccacgccagagacttccacatcaacctgttccaggtgctgccctggctgaaggagaagctgcaggacgaggacctgggcttcctgtag

SEQ ID NO: 120213 - DNA, 435 bp, Artificial Sequence
  derived and/or modified sequence
atgggcagcaacctgagcccccagctgtgcctgatgcccttcatcctgggcctgctgagcggcggcgtgaccaccaccccctggagcctggccagaccccagggcagctgcagcctggagggcgtggagatcaagggcggcagcttcagactgctgcaggagggccaggccctggagtacgtgtgccccagcggcttctacccctaccccgtgcagaccagaacctgcagaagcaccggcagctggagcaccctgaagacccaggaccagaagaccgtgagaaaggccgagtgcagagccatccactgccccagaccccacgacttcgagaacggcgagtactggcccagaagcccctactacaacgtgagcgacgagatcagcttccactgctacgacggctacaccctgagaggcagcgccaacagaacctag

SEQ ID NO: 120214 - DNA, 3801 bp, Artificial Sequence
  derived and/or modified sequence
atgggccccctgatggtgctgttctgcctgctgttcctgtaccccggcctggccgacagcgcccccagctgcccccagaacgtgaacatcagcggcggcaccttcaccctgagccacggctgggcccccggcagcctgctgacctacagctgcccccagggcctgtaccccagccccgccagcagactgtgcaagagcagcggccagtggcagacccccggcgccaccagaagcctgagcaaggccgtgtgcaagcccggccactgccccaaccccggcatcagcctgggcgccgtgagaaccggcttcagattcggccacggcgacaaggtgagatacagatgcagcagcaacctggtgctgaccggcagcagcgagagagagtgccagggcaacggcgtgtggagcggcaccgagcccatctgcagacagccctacagctacgacttccccgaggacgtggcccccgccctgggcaccagcttcagccacatgctgggcgccaccaaccccacccagaagaccaaggaccacgagaacggcaccggcaccaacacctacgccgccctgaacagcgtgtacctgatgatgaacaaccagatgagactgctgggcatggagaccatggcctggcaggagatcagacacgccatcatcctgctgaccgacggcaagagcaacatgggcggcagccccaagaccgccgtggaccacatcagagagatcctgaacatcaaccagaagagaaacgactacctggacatctacgccatcggcgtgggcaagctggacgtggactggagagagctgaacgagctgggcagcaagaaggacggcgagagacacgccttcatcctgcaggacaccaaggccctgcaccaggtgttcgagcacatgctggacgtgagcaagctgaccgacaccatctgcggcgtgggcaacatgagcgccaacgccagcgaccaggagagaaccccctggcacgtgaccatcaagcccaagagccaggagacctgcagaggcgccctgatcagcgaccagtgggtgctgaccgccgcccactgcttcagagacggcaacgaccacagcctgtggagagtgaacgtgggcgaccccaagagccagtggggcaaggagttcctgatcgagaaggccgtgatcagccccggcttcgacgtgttcgccaagaagaaccagggcatcctggagttctacggcgacgacatcgccctgctgaagctggcccagaaggtgaagatgagcacccacgccagacccatctgcctgccctgcaccatggaggccaacctggccctgagaagaccccagggcagcacctgcagagaccacgagaacgagctgctgaacaagcagagcgtgcccgcccacttcgtggccctgaacggcagcaagctgaacatcaacctgaagatgggcgtggagtggaccagctgcgccgaggtggtgagccaggagaagaccatgttccccaacctgaccgacgtgagagaggtggtgaccgaccagttcctgtgcagcggcacccaggaggacgagagcccctgcaagggcgtgaccaccaccccctggagcctggccagaccccagggcagctgcagcctggagggcgtggagatcaagggcggcagcttcagactgctgcaggagggccaggccctggagtacgtgtgccccagcggcttctacccctaccccgtgcagaccagaacctgcagaagcaccggcagctggagcaccctgaagacccaggaccagaagaccgtgagaaaggccgagtgcagagccatccactgccccagaccccacgacttcgagaacggcgagtactggcccagaagcccctactacaacgtgagcgacgagatcagcttccactgctacgacggctacaccctgagaggcagcgccaacagaacctgccaggtgaacggcagatggagcggccagaccgccatctgcgacaacggcgccggctactgcagcaaccccggcatccccatcggcaccagaaaggtgggcagccagtacagactggaggacagcgtgacctaccactgcagcagaggcctgaccctgagaggcagccagagaagaacctgccaggagggcggcagctggagcggcaccgagcccagctgccaggacagcttcatgtacgacaccccccaggaggtggccgaggccttcctgagcagcctgaccgagaccatcgagggcgtggacgccgaggacggccacggccccggcgagcagcagaagagaaagatcgtgctggaccccagcggcagcatgaacatctacctggtgctggacggcagcgacagcatcggcgccagcaacttcaccggcgccaagaagtgcctggtgaacctgatcgagaaggtggccagctacggcgtgaagcccagatacggcctggtgacctacgccacctaccccaagatctgggtgaaggtgagcgaggccgacagcagcaacgccgactgggtgaccaagcagctgaacgagatcaactacgaggaccacaagctgaagagcggcaccaacaccaagaaggccctgcaggccgtgtacagcatgatgagctggcccgacgacgtgccccccgagggctggaacagaaccagacacgtgatcatcctgatgaccgacggcctgcacaacatgggcggcgaccccatcaccgtgatcgacgagatcagagacctgctgtacatcggcaaggacagaaagaaccccagagaggactacctggacgtgtacgtgttcggcgtgggccccctggtgaaccaggtgaacatcaacgccctggccagcaagaaggacaacgagcagcacgtgttcaaggtgaaggacatggagaacctggaggacgtgttctaccagatgatcgacgagagccagagcctgagcctgtgcggcatggtgtgggagcacagaaagggcaccgactaccacaagcagccctggcaggccaagatcagcgtgatcagacccagcaagggccacgagagctgcatgggcgccgtggtgagcgagtacttcgtgctgaccgccgcccactgcttcaccgtggacgacaaggagcacagcatcaaggtgagcgtgggcggcgagaagagagacctggagatcgaggtggtgctgttccaccccaactacaacatcaacggcaagaaggaggccggcatccccgagttctacgactacgacgtggccctgatcaagctgaagaacaagctgaagtacggccagaccatcagacccatctgcctgccctgcaccgagggcaccaccagagccctgagactgccccccaccaccacctgccagcagcagaaggaggagctgctgcccgcccaggacatcaaggccctgttcgtgagcgaggaggagaagaagctgaccagaaaggaggtgtacatcaagaacggcgacaagaagggcagctgcgagagagacgcccagtacgcccccggctacgacaaggtgaaggacatcagcgaggtggtgacccccagattcctgtgcaccggcggcgtgagcccctacgccgaccccaacacctgcagaggcgacagcggcggccccctgatcgtgcacaagagaagcagattcatccaggtgggcgtgatcagctggggcgtggtggacgtgtgcaagaaccagaagagacagaagcaggtgcccgcccacgccagagacttccacatcaacctgttccaggtgctgccctggctgaaggagaagctgcaggacgaggacctgggcttcctgtag

SEQ ID NO: 120215 - DNA, 3801 bp, Artificial Sequence
  derived and/or modified sequence
atgggccccctgatggtgctgttctgcctgctgttcctgtaccccggcctggccgacagcgcccccagctgcccccagaacgtgaacatcagcggcggcaccttcaccctgagccacggctgggcccccggcagcctgctgacctacagctgcccccagggcctgtaccccagccccgccagcagactgtgcaagagcagcggccagtggcagacccccggcgccaccagaagcctgagcaaggccgtgtgcaagcccggccactgccccaaccccggcatcagcctgggcgccgtgagaaccggcttcagattcggccacggcgacaaggtgagatacagatgcagcagcaacctggtgctgaccggcagcagcgagagagagtgccagggcaacggcgtgtggagcggcaccgagcccatctgcagacagccctacagctacgacttccccgaggacgtggcccccgccctgggcaccagcttcagccacatgctgggcgccaccaaccccacccagaagaccaaggaccacgagaacggcaccggcaccaacacctacgccgccctgaacagcgtgtacctgatgatgaacaaccagatgagactgctgggcatggagaccatggcctggcaggagatcagacacgccatcatcctgctgaccgacggcaagagcaacatgggcggcagccccaagaccgccgtggaccacatcagagagatcctgaacatcaaccagaagagaaacgactacctggacatctacgccatcggcgtgggcaagctggacgtggactggagagagctgaacgagctgggcagcaagaaggacggcgagagacacgccttcatcctgcaggacaccaaggccctgcaccaggtgttcgagcacatgctggacgtgagcaagctgaccgacaccatctgcggcgtgggcaacatgagcgccaacgccagcgaccaggagagaaccccctggcacgtgaccatcaagcccaagagccaggagacctgcagaggcgccctgatcagcgaccagtgggtgctgaccgccgcccactgcttcagagacggcaacgaccacagcctgtggagagtgaacgtgggcgaccccaagagccagtggggcaaggagttcctgatcgagaaggccgtgatcagccccggcttcgacgtgttcgccaagaagaaccagggcatcctggagttctacggcgacgacatcgccctgctgaagctggcccagaaggtgaagatgagcacccacgccagacccatctgcctgccctgcaccatggaggccaacctggccctgagaagaccccagggcagcacctgcagagaccacgagaacgagctgctgaacaagcagagcgtgcccgcccacttcgtggccctgaacggcagcaagctgaacatcaacctgaagatgggcgtggagtggaccagctgcgccgaggtggtgagccaggagaagaccatgttccccaacctgaccgacgtgagagaggtggtgaccgaccagttcctgtgcagcggcacccaggaggacgagagcccctgcaagggcgtgaccaccaccccctggagcctggccagaccccagggcagctgcagcctggagggcgtggagatcaagggcggcagcttcagactgctgcaggagggccaggccctggagtacgtgtgccccagcggcttctacccctaccccgtgcagaccagaacctgcagaagcaccggcagctggagcaccctgaagacccaggaccagaagaccgtgagaaaggccgagtgcagagccatccactgccccagaccccacgacttcgagaacggcgagtactggcccagaagcccctactacaacgtgagcgacgagatcagcttccactgctacgacggctacaccctgagaggcagcgccaacagaacctgccaggtgaacggcagatggagcggccagaccgccatctgcgacaacggcgccggctactgcagcaaccccggcatccccatcggcaccagaaaggtgggcagccagtacagactggaggacagcgtgacctaccactgcagcagaggcctgaccctgagaggcagccagagaagaacctgccaggagggcggcagctggagcggcaccgagcccagctgccaggacagcttcatgtacgacaccccccaggaggtggccgaggccttcctgagcagcctgaccgagaccatcgagggcgtggacgccgaggacggccacggccccggcgagcagcagaagagaaagatcgtgctggaccccagcggcagcatgaacatctacctggtgctggacggcagcgacagcatcggcgccagcaacttcaccggcgccaagaagtgcctggtgaacctgatcgagaaggtggccagctacggcgtgaagcccagatacggcctggtgacctacgccacctaccccaagatctgggtgaaggtgagcgaggccgacagcagcaacgccgactgggtgaccaagcagctgaacgagatcaactacgaggaccacaagctgaagagcggcaccaacaccaagaaggccctgcaggccgtgtacagcatgatgagctggcccgacgacgtgccccccgagggctggaacagaaccagacacgtgatcatcctgatgaccgacggcctgcacaacatgggcggcgaccccatcaccgtgatcgacgagatcagagacctgctgtacatcggcaaggacagaaagaaccccagagaggactacctggacgtgtacgtgttcggcgtgggccccctggtgaaccaggtgaacatcaacgccctggccagcaagaaggacaacgagcagcacgtgttcaaggtgaaggacatggagaacctggaggacgtgttctaccagatgatcgacgagagccagagcctgagcctgtgcggcatggtgtgggagcacagaaagggcaccgactaccacaagcagccctggcaggccaagatcagcgtgatcagacccagcaagggccacgagagctgcatgggcgccgtggtgagcgagtacttcgtgctgaccgccgcccactgcttcaccgtggacgacaaggagcacagcatcaaggtgagcgtgggcggcgagaagagagacctggagatcgaggtggtgctgttccaccccaactacaacatcaacggcaaggaggaggccggcatccccgagttctacgactacgacgtggccctgatcaagctgaagaacaagctgaagtacggccagaccatcagacccatctgcctgccctgcaccgagggcaccaccagagccctgagactgccccccaccaccacctgccagcagcagaaggaggagctgctgcccgcccaggacatcaaggccctgttcgtgagcgaggaggagaagaagctgaccagaaaggaggtgtacatcaagaacggcgacaagaagggcagctgcgagagagacgcccagtacgcccccggctacgacaaggtgaaggacatcagcgaggtggtgacccccagattcctgtgcaccggcggcgtgagcccctacgccgaccccaacacctgcagaggcgacagcggcggccccctgatcgtgcacaagagaagcagattcatccaggtgggcgtgatcagctggggcgtggtggacgtgtgcaagaaccagaagagacagaagcaggtgcccgcccacgccagagacttccacatcaacctgttccaggtgctgccctggctgaaggagaagctgcaggacgaggacctgggcttcctgtag

SEQ ID NO: 120216 - protein, 368 aa, Artificial Sequence
  derived and/or modified sequence
MWPLWRLVSLLALSQALPFEQRGFWDFTLDDGPFMMNDEEASGADTSGVLDPDSVTPTYSAMCPFGCHCHLRVVQCSDLGLKSVPKEISPDTTLLDLQNNDISELRKDDFKGLQHLYALVLVNNKISKIHEKAFSPLRKLQKLYISKNHLVEIPPNLPSSLVELRIHDNRIRKVPKGVFSGLRNMNCIEMGGNPLENSGFEPGAFDGLKLNYLRISEAKLTGIPKDLPETLNELHLDHNKIQAIELEDLLRYSKLYRLGLGHNQIRMIENGSLSFLPTLRELHLDNNKLARVPSGLPDLKLLQVVYLHSNNITKVGVNDFCPMGFGVKRAYYNGISLFNNPVPYWEVQPATFRCVTDRLAIQFGNYKK

SEQ ID NO: 120217 - protein, 307 aa, Artificial Sequence
  derived and/or modified sequence
MCPFGCHCHLRVVQCSDLGLKSVPKEISPDTTLLDLQNNDISELRKDDFKGLQHLYALVLVNNKISKIHEKAFSPLRKLQKLYISKNHLVEIPPNLPSSLVELRIHDNRIRKVPKGVFSGLRNMNCIEMGGNPLENSGFEPGAFDGLKLNYLRISEAKLTGIPKDLPETLNELHLDHNKIQAIELEDLLRYSKLYRLGLGHNQIRMIENGSLSFLPTLRELHLDNNKLARVPSGLPDLKLLQVVYLHSNNITKVGVNDFCPMGFGVKRAYYNGISLFNNPVPYWEVQPATFRCVTDRLAIQFGNYKK

SEQ ID NO: 120218 - protein, 238 aa, Artificial Sequence
  derived and/or modified sequence
MWPLWRLVSLLALSQALPFEQRGFWDFTLDDGPFMMNDEEASGADTSGVLDPDSVTPTYSAMCPFGCHCHLRVVQCSDLGLKSVPKEISPDTTLLDLQNNDISELRKDDFKGLQHLYVRSWEEPAGLQQRAGVRALVLVNNKISKIHEKAFSPLRKLQKLYISKNHLVEIPPNLPSSLVELRIHDNRIRKVPKGVFSGLRNMNCIEMGGNPLENSGFEPGAFDGLKLNYLRISEAKLT

SEQ ID NO: 120219 - DNA, 1107 bp, Artificial Sequence
  derived and/or modified sequence
atgtggcctctctggcgtctggttagtttgcttgccctgtcccaggcgctgccatttgaacaaagaggattctgggatttcacgctggatgatggcccctttatgatgaacgatgaggaagctagtggagctgataccagcggggtgctggatccagatagtgttacgcccacatacagcgctatgtgcccatttggatgccactgccatctgagggtggtgcagtgctctgatctgggtctgaagtctgtcccaaaggaaatttccccagacaccaccctgctcgatctgcaaaataatgacattagcgaactcagaaaggatgattttaaaggcctccagcacctgtacgctctggttctagtgaacaacaaaatatctaagatccacgaaaaggccttttcacccctccgcaagttgcagaagttgtacattagtaagaaccatttagttgagataccgcctaatctcccatcctctctggtggagctgaggatccatgataacaggattcgcaaggtcccaaagggagtcttttccggactgcggaatatgaattgcatcgagatgggagggaatcccctcgagaattcaggctttgaaccaggcgctttcgacggactcaaacttaactacctgaggatttcagaggccaaactcactggaatcccaaaggacctgccagagactctgaacgagctgcacctggatcacaataaaatccaggctatcgagctggaggatctcttgcggtattccaagctgtacagactgggcttggggcacaatcagatacgcatgatcgagaacggctcgctgagcttcctcccaaccctgcgcgagctgcaccttgataacaacaaacttgcaagagtgcccagtggccttcctgatttgaaactactccaggtagtatacctacactctaacaatatcaccaaggttggagtgaacgacttctgtcctatgggttttggggtcaaacgcgcttattacaatggcatatcgctgtttaataaccctgtgccatattgggaggtgcaacccgcaactttccgctgcgtgacggaccgcttggccatccagtttggaaactataagaaatag

SEQ ID NO: 120220 - DNA, 924 bp, Artificial Sequence
  derived and/or modified sequence
atgtgtccctttggatgccattgccatctacgggtggtccagtgtagcgatctcggattgaagtctgttccgaaggagatctcaccagatacaacactgttggacctgcagaacaacgatattagtgaactgcgaaaggatgactttaagggtcttcagcatctgtacgcccttgttctggtaaataataaaattagcaagatacacgaaaaagcattctccccactccgcaaactccagaagttatacatcagcaaaaaccatctcgtggagattcctccaaatcttcctagctccctggtggaattaaggatccatgacaacaggattcggaaagtgcccaagggggtattttccgggctgagaaacatgaattgcattgaaatgggcggaaatccactggaaaatagcggctttgagccgggggctttcgatggcctgaaactcaactacctgcggataagtgaggcaaagttaacagggattcctaaggatctccccgaaaccctcaatgagctccatctggatcataataaaatccaggccatagagctagaagacttgctgagatactcaaagctttaccggctgggactgggccataaccaaatccgaatgatagagaatgggagccttagcttcctccctacattacgagagctccacctagacaataacaaattggctagggtacctagtgggcttcccgatttgaagcttctccaggttgtctatctgcacagcaataatatcaccaaagtcggcgtgaacgacttttgtcccatggggtttggtgtcaaaagggcctattacaacgggatttcgctgtttaataatccagttccatattgggaggttcagcccgcaaccttcagatgcgtgaccgatcggctggcaatccaatttggtaattacaaaaagtag

SEQ ID NO: 120221 - DNA, 924 bp, Artificial Sequence
  derived and/or modified sequence
atgtgtccctttggctgccactgccacctacgagttgtgcagtgttccgacctgggactgaaatcagtgccaaaggagataagtcctgacacaaccctgctcgatctccagaacaacgatatctcagaactgagaaaggatgactttaaaggcctccagcatctctacgcactagttctggtgaataacaaaatcagtaagattcatgaaaaggctttttcgccattaagaaaactgcagaaactctacatttctaaaaaccacctcgtggagatccccccaaacctgcccagtagcctggttgagctgagaatacatgacaatcgcattaggaaagttcccaaaggcgtgttttctggactaaggaatatgaattgcatagaaatgggagggaacccgctcgagaactctggcttcgagccaggagccttcgatggactaaagctgaattacctgaggatcagcgaggctaagctcaccggcattcccaaggacctcccagaaacactaaacgagctccaccttgaccacaacaagatccaggctatcgaattggaagaccttctgagatattccaagctctacaggctaggactcgggcacaatcagatccggatgattgagaacgggtcactgtcgttcttgccgacactaagagaattgcacctggacaacaacaagctggcccgtgtgccaagtggtctcccggatctcaaactgctgcaggtcgtctatctgcacagcaacaacatcactaaggtcggtgtgaacgacttctgtccaatggggtttggagtgaagcgggcttactataatggcatcagcctgtttaacaatccagtgccatattgggaggtccaacccgccacattcaggtgcgtcaccgaccgtcttgcaatccagttcggcaactataagaagtag

SEQ ID NO: 120222 - DNA, 717 bp, Artificial Sequence
  derived and/or modified sequence
atgtggccgctgtggagactggtgtctctgctcgcactgtcccaggctctgccctttgagcagaggggattctgggattttactttggacgacggcccctttatgatgaacgacgaagaggcctccggagccgacacctctggggtcttggatccggacagtgtgaccccaacttacagcgccatgtgcccctttggctgtcattgccacctaagagtcgttcagtgcagtgatctcggtctcaagtccgtaccgaaggaaatcagtcccgacactaccttgttggatctgcaaaacaacgacattagcgagctgcgcaaagatgattttaagggacttcagcatctgtacgtgaggagctgggaagagcctgcagggctgcagcagagggctggggttcgggctctcgtactggtgaataacaagattagtaagatccatgagaaggcctttagccccctgcggaagctgcagaaactttacatatccaagaaccacctcgtcgaaatccctccaaatctcccctccagtcttgtggagctgcgcattcatgacaacaggattcgcaaggtgcctaagggggtattttctggcctgaggaatatgaattgcatcgagatgggtggcaaccccctggaaaattcgggatttgaacccggcgcgtttgacgggttgaaactcaactaccttagaatatcagaagctaagctgacctag

SEQ ID NO: 120223 - DNA, 1107 bp, Artificial Sequence
  derived and/or modified sequence
atgtggcccctgtggaggctggtgtccctgctggccctgagccaggccctgccctttgagcagaggggcttctgggacttcaccctggatgatggccccttcatgatgaatgatgaggaggccagcggggctgacaccagcggcgtgctggaccctgacagcgtgacccccacctacagcgccatgtgccccttcggctgccactgccacctgcgggtggtgcagtgcagcgacctgggcctgaagtctgtgcccaaggagatcagcccagacaccaccctgctggacctgcagaacaatgacatcagcgagctgaggaaggatgacttcaagggcctgcagcacctgtatgccctggtgctggtgaacaacaagatcagcaagatccacgagaaggccttcagccccctgaggaagctgcagaagctgtacatcagcaagaaccacctggtggagatcccccccaacctgcccagcagcctggtggagctgcgcatccatgacaaccgcatcaggaaggtgcccaagggcgtcttcagcggcctgaggaacatgaactgcatcgagatgggcggcaaccccctggagaacagcggctttgagcccggggcctttgatggcctgaagctgaactacctgcgcatcagcgaggccaagctgaccggcatccccaaggacctgcctgagaccctgaatgagctgcacctggaccacaacaagatccaggccatcgagctggaggacctgctgcgctacagcaagctgtaccgcctgggcctgggccacaaccagatccgcatgattgaaaatggcagcctgtccttcctgcccaccctgcgggagctgcacctggacaacaacaagctggcccgggtgcccagcggcctgcctgacctgaagctgctgcaggtggtgtacctgcacagcaacaacatcaccaaggtgggcgtgaatgacttctgccccatgggctttggagtgaagagggcctactacaacggcatcagcctcttcaacaaccctgtgccctactgggaggtgcagcctgccaccttccgctgtgtgacagaccggctggccatccagtttggaaactacaagaagtag

SEQ ID NO: 120224 - DNA, 924 bp, Artificial Sequence
  derived and/or modified sequence
atgtgccccttcggctgccactgccacctgcgggtggtgcagtgcagcgacctgggcctgaagtctgtgcccaaggagatcagcccagacaccaccctgctggacctgcagaacaatgacatcagcgagctgaggaaggatgacttcaagggcctgcagcacctgtatgccctggtgctggtgaacaacaagatcagcaagatccacgagaaggccttcagccccctgaggaagctgcagaagctgtacatcagcaagaaccacctggtggagatcccccccaacctgcccagcagcctggtggagctgcgcatccatgacaaccgcatcaggaaggtgcccaagggcgtcttcagcggcctgaggaacatgaactgcatcgagatgggcggcaaccccctggagaacagcggctttgagcccggggcctttgatggcctgaagctgaactacctgcgcatcagcgaggccaagctgaccggcatccccaaggacctgcctgagaccctgaatgagctgcacctggaccacaacaagatccaggccatcgagctggaggacctgctgcgctacagcaagctgtaccgcctgggcctgggccacaaccagatccgcatgattgaaaatggcagcctgtccttcctgcccaccctgcgggagctgcacctggacaacaacaagctggcccgggtgcccagcggcctgcctgacctgaagctgctgcaggtggtgtacctgcacagcaacaacatcaccaaggtgggcgtgaatgacttctgccccatgggcttcggcgtgaagagggcctactacaacggcatcagcctcttcaacaaccctgtgccctactgggaggtgcagcctgccaccttccgctgtgtgacagaccggctggccatccagtttggaaactacaagaagtag

SEQ ID NO: 120225 - DNA, 717 bp, Artificial Sequence
  derived and/or modified sequence
atgtggcccctgtggaggctggtgtccctgctggccctgagccaggccctgccctttgagcagaggggcttctgggacttcaccctggatgatggccccttcatgatgaatgatgaggaggccagcggggctgacaccagcggcgtgctggaccctgacagcgtgacccccacctacagcgccatgtgccccttcggctgccactgccacctgcgggtggtgcagtgcagcgacctgggcctgaagtctgtgcccaaggagatcagcccagacaccaccctgctggacctgcagaacaatgacatcagcgagctgaggaaggatgacttcaagggcctgcagcacctgtatgtgcgctcctgggaggagcctgctggcctgcagcagagagctggggtgcgggccctggtgctggtgaacaacaagatcagcaagatccacgagaaggccttcagccccctgaggaagctgcagaagctgtacatcagcaagaaccacctggtggagatcccccccaacctgcccagcagcctggtggagctgcgcatccatgacaaccgcatcaggaaggtgcccaagggcgtcttcagcggcctgaggaacatgaactgcatcgagatgggcggcaaccccctggagaacagcggctttgagcccggggcctttgatggcctgaagctgaactacctgcgcatcagcgaggccaagctgacctag

SEQ ID NO: 120226 - DNA, 1107 bp, Artificial Sequence
  derived and/or modified sequence
atgtggcccctgtggcggctggtgagcctgctggccctgagccaggccttacccttcgagcagcgtgggttttgggattttacactggatgacggccctttcatgatgaacgatgaagaggcgagcggagctgatacctccggagttctggatcccgacagcgtgacccctacgtactccgccatgtgtccattcggctgtcactgccaccttcgagtggtgcaatgtagtgacctgggcctgaaatctgtgcccaaggagatttcccctgacacaactctgttagacttgcagaataacgacatttcagagctcaggaaagacgacttcaaggggttgcagcatctgtacgctttagtgctggtcaacaataaaatctcaaagattcatgaaaaagccttctctcctcttagaaagttgcagaaactgtatatatctaaaaaccatctggtagaaattccccccaaccttccgtctagtttggtcgagctgcgcattcatgacaaccggattcgcaaggttccgaagggcgtcttctccgggctccgcaacatgaactgcattgagatgggcggcaaccccttggagaacagcggctttgagcccggtgcctttgatggtctgaagctcaactatctccgaattagcgaagccaagctgacaggcatacctaaagacttacctgaaacattaaacgaactccatctggatcacaataaaatccaagccattgagctggaagatctgctccgctactctaagctgtatcgcctggggcttggccacaaccaaattcggatgatcgagaacgggtctctctcattcctgcctactctgcgcgaacttcacctggataacaacaaactcgcgcgcgtgccctccgggcttcccgacctgaagttgcttcaagtggtgtacctacactcaaataatatcactaaggtcggtgttaacgatttctgtcctatgggatttggcgtgaagcgggcatattataatggtatttcgctgttcaataaccccgttccttactgggaagtccagccagctaccttccggtgcgtgacggatagactagccattcaattcggcaactacaagaagtag

SEQ ID NO: 120227 - DNA, 924 bp, Artificial Sequence
  derived and/or modified sequence
atgtgccccttcggctgccactgccacctgcgggtggtgcagtgctctgatcttgggctgaaatctgtccctaaggaaatcagccctgacacgacccttctcgacctccagaataacgacatcagtgagctgaggaaggacgacttcaagggacttcagcacctatatgctctggtgctcgtgaacaacaagatttcgaagatccacgagaaggctttttctcctcttaggaagctccagaagctgtacatctctaaaaaccatctcgtcgaaatcccgccaaatctgccttccagcctggtggagctgcggattcacgataaccgcatccgcaaggtcccaaaaggggtattttctggccttcgcaacatgaattgcatagagatgggcgggaatccgctcgaaaatagtggctttgaaccaggggctttcgacggactcaagttaaactacttgagaattagcgaggctaagctaaccggaatcccgaaggaccttccagagaccttgaacgagttgcacctggaccacaacaagatacaggccatcgaattggaggacctgctgagatattccaagctgtaccggctagggctgggccacaaccagatcagaatgatagaaaacggtagtctgtcatttctccctactttaagggaactccacctcgataataacaagttggctagagttccatcgggactaccagacctgaaactattgcaggtagtgtacctgcactccaacaacattacaaaggtgggggtgaatgatttctgcccaatgggattcggagtcaaacgggcctattacaatggcatctccctgtttaacaaccccgtcccatactgggaagtccaacccgctacatttaggtgtgtaacagaccgcttggccatacaatttggcaactacaagaaatag

SEQ ID NO: 120228 - DNA, 924 bp, Artificial Sequence
  derived and/or modified sequence
atgtgccccttcggctgccactgccacctgcgggtggtgcagtgcagcgatctaggactgaagagcgttccaaaggagatctcacctgatacaaccctcctcgatctgcagaataatgatatcagtgagctgcgcaaagacgacttcaagggcctgcagcatctctatgcactcgtgctggtgaataataagatcagtaagatacacgaaaaagctttttcgccactgaggaaactgcaaaaactctacatctctaaaaatcacctggttgaaatcccgcctaatttaccctcctccttggttgagctaaggatacatgacaaccggatacgcaaagtgcccaagggcgtgttttcaggcttaaggaacatgaattgtattgagatgggaggaaacccacttgaaaactctggatttgagccaggcgctttcgacggtctaaagcttaattacctccggatcagcgaggccaagcttactgggattcccaaagacttgcccgaaaccttaaatgagttgcatctggaccacaataagattcaggcaatcgaactggaggacctgctacgatactctaagctgtaccgtctgggactgggacacaaccagattaggatgatcgaaaacgggagtctctccttccttcccaccctgcgggagctgcacctcgacaataacaaactcgcccgagtgccatcaggcttgcctgacctgaagttactgcaggtggtgtacctgcacagcaataacattaccaaggtcggggttaatgacttctgccctatgggcttcggcgtgaaacgggcatactataacgggatctctctcttcaataaccctgtgccctactgggaagtgcagccagccactttccgctgcgttaccgataggctcgcgattcaatttggcaactacaagaagtag

SEQ ID NO: 120229 - DNA, 717 bp, Artificial Sequence
  derived and/or modified sequence
atgtggcccctgtggcggctggtgagcctgctggccctgagccaggctctgccatttgagcagaggggattttgggattttacgctggacgatggccccttcatgatgaatgacgaagaagcctcgggcgcagatacatcgggtgtcctggacccagattcagttactcctacatattctgctatgtgtcccttcggctgccactgccacttgagagtggtgcagtgtagcgatctagggctcaagtcagtgccaaaggagatttcccctgacactactctactggacctacagaataacgatatatcagaacttagaaaggacgatttcaaaggtctccagcatctatacgttcggagctgggaggaacctgccggattgcagcagagggctggcgtgcgggctttggtgctcgtcaataataagatctccaagatccacgaaaaggcatttagcccactgcgcaaattacagaagctttacattagcaagaatcatctggtggaaattcctcctaatctgccctcctctctggtggagttgagaattcatgataaccggattcgcaaggtgcccaaaggggtcttttcaggcctgaggaacatgaactgcattgaaatgggcggtaacccattggaaaatagcgggtttgagccaggcgcatttgacggactcaaactcaattacctgagaataagcgaggctaagttaacctag

SEQ ID NO: 120230 - DNA, 1107 bp, Artificial Sequence
  derived and/or modified sequence
atgtggccgctctggcggttagtgagtctgctggccctgtcccaggcgctgccatttgagcagcggggattctgggatttcactttggatgacggccctttcatgatgaacgacgaggaagcctccggggctgacacatccggtgtcttggacccagactccgtaacccccacctactccgcgatgtgccccttcgggtgccattgccatctgcgagttgtccagtgcagtgatctgggcctcaaatctgtcccaaaggaaataagccccgatacaaccctgctggatctgcagaacaacgatatctcagaactgagaaaggatgatttcaaaggcttgcagcacctgtacgcccttgtcctcgtcaataacaagatttcaaagatccatgagaaggcgttctcgcctctgcgaaagcttcagaagctgtatatcagtaaaaaccacttagtggaaatccctcctaacctgccctccagcctcgtcgaactaaggatccacgacaatcgaatccgcaaggtcccaaaaggcgtcttctcgggattaagaaacatgaattgcatagaaatgggcggaaaccctctggagaactcaggatttgagccaggagcttttgatggactcaagctcaactacctgaggatctccgaagccaaactgaccggcattccaaaagacctgccagaaaccctgaatgagctccatctcgatcacaataaaatccaagccatcgaacttgaggatctgttgcggtattcgaagctctaccggctgggtcttgggcacaatcagatacgaatgatcgagaacggctcgctgtctttcctgccaaccctgagggaattgcatctggataataacaaactggcacgcgttccgtccggactgcctgacctgaaactcttacaggtcgtgtacctgcacagtaacaacatcacgaaggttggagtcaacgacttttgtccgatgggatttggcgttaaaagagcatactataacgggattagcttgtttaacaatcccgtgccttattgggaggtgcagccggctactttcaggtgcgtgaccgatagactcgcgattcagttcggtaattataagaagtag

SEQ ID NO: 120231 - DNA, 924 bp, Artificial Sequence
  derived and/or modified sequence
atgtgtccttttggatgccattgccacctaagggtggtgcagtgtagcgacctgggcctgaagtctgtgcccaaggagattagcccagacacaactctgttggacctccagaataacgatatcagcgagcttaggaaggacgattttaagggactgcagcatctctacgcactggtgctcgtcaataataaaattagcaagatccacgagaaagccttcagtcctctccgtaaactgcagaagctgtatatcagtaagaaccacttggtcgagattcccccaaatctgccatcttcgctcgtggagctgagaatacatgacaacaggatacggaaggtaccaaagggtgtgttttcgggtctaaggaacatgaattgtattgagatgggcggtaaccccttggaaaactccggtttcgaaccaggggcttttgacggacttaaacttaactacctacgtattagcgaggcgaaactgaccgggataccaaaggaccttccagagacactgaacgaactgcacctggaccataacaaaatccaagctattgagctggaggacctgttaaggtactcgaagctctacaggcttgggttgggtcacaaccagatacggatgatcgagaatggttccctgagtttcctgcctactttgagagagctgcacctggataacaataaactggctagggttcctagcgggctgccggacctgaaactgctgcaagtggtctacctgcactccaataatataacaaaagttggagtgaatgatttctgccctatggggtttggcgttaagagagcctattacaatggtatttccctgtttaacaatcccgtcccatattgggaagtgcaaccagcaaccttcaggtgtgtaaccgaccgattagcaattcagttcggcaattataagaagtag

SEQ ID NO: 120232 - DNA, 924 bp, Artificial Sequence
  derived and/or modified sequence
atgtgccctttcgggtgccattgtcacctgcgggtcgtgcagtgcagtgatctcggcttaaaatctgtgcctaaagagatcagccctgatacaacccttctggatttgcaaaataatgacatttcagagcttaggaaggacgactttaaaggcctgcagcacctgtacgcgctcgttctggtgaacaacaagataagcaagattcatgagaaggccttctcaccattgaggaaattacagaagctgtacatctctaagaatcatttggtggaaatacccccaaacctgccctcctccctggtagagttacgcattcatgataaccggatcaggaaagtccctaaaggagtattctccggtctccggaatatgaactgcatagagatgggaggaaatccactggaaaactccggtttcgaacccggagcgtttgatggcctgaaacttaattatttacgaatctctgaagctaagttgactggcattccaaaagatctcccagaaaccctgaacgagctgcacctggatcataacaagatccaggcaatcgagctggaagatctgctccgatactctaaactgtacaggctgggcctggggcataaccaaattcggatgatcgaaaacggttcccttagtttcctcccgactttgcgagaactgcacttagacaataacaaattggcccgagtgccatccggccttccagatctcaagctactacaggtggtttacctgcactctaacaatatcacaaaagttggcgtgaatgacttctgtcctatgggctttggggttaaacgagcctactataatggcatctctttgtttaacaatccagtgccttactgggaggtccaaccagcaaccttccggtgcgtcaccgaccgactagctatccagttcggcaactataaaaagtag

SEQ ID NO: 120233 - DNA, 717 bp, Artificial Sequence
  derived and/or modified sequence
atgtggccactgtggcgcctcgtcagcctgctggcactgtctcaagccttaccattcgaacaaaggggtttctgggattttactctggacgacggccctttcatgatgaatgacgaggaagcttctggggctgatacttccggggtcctggatcccgacagtgtgactcctacatatagcgcgatgtgccccttcggttgtcactgtcacctgcgcgtggtccagtgttccgatcttgggctgaagagtgtgcccaaggaaattagtcctgatacaacacttcttgacctccagaacaacgacatttccgaactgaggaaggatgacttcaaggggctgcaacacctgtacgttcgtagctgggaagagcccgctggcttgcagcagagagcaggcgttagggcactcgtcctcgttaacaacaaaatttcaaagattcacgaaaaagccttctcacctttgcgtaagctgcagaaactctacatttccaagaaccatcttgtggagatcccaccaaatctccccagctctctggtcgagcttagaatccacgataacaggatacggaaagtcccaaagggcgtgtttagcggcttgagaaatatgaactgcattgagatgggtggtaaccccctggagaactcaggatttgagccaggagcttttgatggcctgaaattaaattacctgaggatctccgaagccaaactgacatag

SEQ ID NO: 120234 - DNA, 2402 bp, Artificial Sequence
  derived and/or modified sequence
cctgcccagcctttagcctcccgcccgccgcctctgtctccctctctccacaaactgcccaggagtgagtagctgctttcggtccgccggacacaccggacagatagacgtgcggacggcccaccaccccagcccgccaactagtcagcctgcgcctggcgcctcccctctccaggtccatccgccatgtggcccctgtggcgcctcgtgtctctgctggccctgagccaggccctgccctttgagcagagaggcttctgggacttcaccctggacgatgggccattcatgatgaacgatgaggaagcttcgggcgctgacacctcgggcgtcctggacccggactctgtcacacccacctacagcgccatgtgtcctttcggctgccactgccacctgcgggtggttcagtgctccgacctgggtctgaagtctgtgcccaaagagatctcccctgacaccacgctgctggacctgcagaacaacgacatctccgagctccgcaaggatgacttcaagggtctccagcacctctacgccctcgtcctggtgaacaacaagatctccaagatccatgagaaggccttcagcccactgcggaagctgcagaagctctacatctccaagaaccacctggtggagatcccgcccaacctacccagctccctggtggagctccgcatccacgacaaccgcatccgcaaggtgcccaagggagtgttcagcgggctccggaacatgaactgcatcgagatgggcgggaacccactggagaacagtggctttgaacctggagccttcgatggcctgaagctcaactacctgcgcatctcagaggccaagctgactggcatccccaaagacctccctgagaccctgaatgaactccacctagaccacaacaaaatccaggccatcgaactggaggacctgcttcgctactccaagctgtacaggctgggcctaggccacaaccagatcaggatgatcgagaacgggagcctgagcttcctgcccaccctccgggagctccacttggacaacaacaagttggccagggtgccctcagggctcccagacctcaagctcctccaggtggtctatctgcactccaacaacatcaccaaagtgggtgtcaacgacttctgtcccatgggcttcggggtgaagcgggcctactacaacggcatcagcctcttcaacaaccccgtgccctactgggaggtgcagccggccactttccgctgcgtcactgaccgcctggccatccagtttggcaactacaaaaagtagaggcagctgcagccaccgcggggcctcagtgggggtctctggggaacacagccagacatcctgatggggaggcagagccaggaagctaagccagggcccagctgcgtccaacccagccccccacctcgggtccctgaccccagctcgatgccccatcaccgcctctccctggctcccaagggtgcaggtgggcgcaaggcccggcccccatcacatgttcccttggcctcagagctgcccctgctctcccaccacagccacccagaggcaccccatgaagcttttttctcgttcactcccaaacccaagtgtccaaggctccagtcctaggagaacagtccctgggtcagcagccaggaggcggtccataagaatggggacagtgggctctgccagggctgccgcacctgtccagacacacatgttctgttcctcctcctcatgcatttccagcctttcaaccctccccgactctgcggctcccctcagcccccttgcaagttcatggcctgtccctcccagacccctgctccactggcccttcgaccagtcctcccttctgttctctctttccccgtccttcctctctctctctctctctctctctctctctttctgtgtgtgtgtgtgtgtgtgtgtgtgtgtgtgtgtgtgtgtgtgtcttgtgcttcctcagacctttctcgcttctgagcttggtggcctgttccctccatctctccgaacctggcttcgcctgtccctttcactccacaccctctggccttctgccttgagctgggactgctttctgtctgtccggcctgcacccagcccctgcccacaaaaccccagggacagcagtctccccagcctgccctgctcaggccttgcccccaaacctgtactgtcccggaggaggttgggaggtggaggcccagcatcccgcgcagatgacaccatcaaccgccagagtcccagacaccggttttcctagaagcccctcacccccactggcccactggtggctaggtctccccttatccttctggtccagcgcaaggaggggctgcttctgaggtcggtggctgtctttccattaaagaaacaccgtgcaacgtggctccgtg

SEQ ID NO: 120235 - DNA, 2253 bp, Artificial Sequence
  derived and/or modified sequence
actgctcctcctcctcctcctccttctgcccccgggtgtccactggcactgggagagggtcctacagcggcagcaggcatcggaggccctgccctgccctggaggaagggaaacaccatccaggtccatccgccatgtggcccctgtggcgcctcgtgtctctgctggccctgagccaggccctcgggcgtcctggacccggactctgtcacacccacctacagcgccatgtgtcctttcggctgccactgccacctgcgggtggttcagtgctccgacctgggtctgaagtctgtgcccaaagagatctcccctgacaccacgctgctggacctgcagaacaacgacatctccgagctccgcaaggatgacttcaagggtctccagcacctctacgccctcgtcctggtgaacaacaagatctccaagatccatgagaaggccttcagcccactgcggaagctgcagaagctctacatctccaagaaccacctggtggagatcccgcccaacctacccagctccctggtggagctccgcatccacgacaaccgcatccgcaaggtgcccaagggagtgttcagcgggctccggaacatgaactgcatcgagatgggcgggaacccactggagaacagtggctttgaacctggagccttcgatggcctgaagctcaactacctgcgcatctcagaggccaagctgactggcatccccaaagacctccctgagaccctgaatgaactccacctagaccacaacaaaatccaggccatcgaactggaggacctgcttcgctactccaagctgtacaggctgggcctaggccacaaccagatcaggatgatcgagaacgggagcctgagcttcctgcccaccctccgggagctccacttggacaacaacaagttggccagggtgccctcagggctcccagacctcaagctcctccaggtggtctatctgcactccaacaacatcaccaaagtgggtgtcaacgacttctgtcccatgggcttcggggtgaagcgggcctactacaacggcatcagcctcttcaacaaccccgtgccctactgggaggtgcagccggccactttccgctgcgtcactgaccgcctggccatccagtttggcaactacaaaaagtagaggcagctgcagccaccgcggggcctcagtgggggtctctggggaacacagccagacatcctgatggggaggcagagccaggaagctaagccagggcccagctgcgtccaacccagccccccacctcgggtccctgaccccagctcgatgccccatcaccgcctctccctggctcccaagggtgcaggtgggcgcaaggcccggcccccatcacatgttcccttggcctcagagctgcccctgctctcccaccacagccacccagaggcaccccatgaagcttttttctcgttcactcccaaacccaagtgtccaaggctccagtcctaggagaacagtccctgggtcagcagccaggaggcggtccataagaatggggacagtgggctctgccagggctgccgcacctgtccagacacacatgttctgttcctcctcctcatgcatttccagcctttcaaccctccccgactctgcggctcccctcagcccccttgcaagttcatggcctgtccctcccagacccctgctccactggcccttcgaccagtcctcccttctgttctctctttccccgtccttcctctctctctctctctctctctctctctctttctgtgtgtgtgtgtgtgtgtgtgtgtgtgtgtgtgtgtgtgtgtgtcttgtgcttcctcagacctttctcgcttctgagcttggtggcctgttccctccatctctccgaacctggcttcgcctgtccctttcactccacaccctctggccttctgccttgagctgggactgctttctgtctgtccggcctgcacccagcccctgcccacaaaaccccagggacagcagtctccccagcctgccctgctcaggccttgcccccaaacctgtactgtcccggaggaggttgggaggtggaggcccagcatcccgcgcagatgacaccatcaaccgccagagtcccagacaccggttttcctagaagcccctcacccccactggcccactggtggctaggtctccccttatccttctggtccagcgcaaggaggggctgcttctgaggtcggtggctgtctttccattaaagaaacaccgtgcaacgtg

SEQ ID NO: 120236 - DNA, 2247 bp, Artificial Sequence
  derived and/or modified sequence
actgctcctcctcctcctcctccttctgcccccgggtgtccactggcactgggagagggtcctacagcggcagcaggcatcggaggccctgccctgccctggaggaagggaaacaccatccaggtccatccgccatgtggcccctgtggcgcctcgtgtctctgctggccctgagccaggccctcgggcgtcctggacccggactctgtcacacccacctacagcgccatgtgtcctttcggctgccactgccacctgcgggtggttcagtgctccgacctgggtctgaagtctgtgcccaaagagatctcccctgacaccacgctgctggacctgcagaacaacgacatctccgagctccgcaaggatgacttcaagggtctccagcacctctacgccctcgtcctggtgaacaacaagatctccaagatccatgagaaggccttcagcccactgcggaagctgcagaagctctacatctccaagaaccacctggtggagatcccgcccaacctacccagctccctggtggagctccgcatccacgacaaccgcatccgcaaggtgcccaagggagtgttcagcgggctccggaacatgaactgcatcgagatgggcgggaacccactggagaacagtggctttgaacctggagccttcgatggcctgaagctcaactacctgcgcatctcagaggccaagctgactggcatccccaaagacctccctgagaccctgaatgaactccacctagaccacaacaaaatccaggccatcgaactggaggacctgcttcgctactccaagctgtacaggctgggcctaggccacaaccagatcaggatgatcgagaacgggagcctgagcttcctgcccaccctccgggagctccacttggacaacaacaagttggccagggtgccctcagggctcccagacctcaagctcctccaggtggtctatctgcactccaacaacatcaccaaagtgggtgtcaacgacttctgtcccatgggcttcggggtgaagcgggcctactacaacggcatcagcctcttcaacaaccccgtgccctactgggaggtgcagccggccactttccgctgcgtcactgaccgcctggccatccagtttggcaactacaaaaagtagaggcagctgcagccaccgcggggcctcagtgggggtctctggggaacacagccagacatcctgatggggaggcagagccaggaagctaagccagggcccagctgcgtccaacccagccccccacctcgggtccctgaccccagctcgatgccccatcaccgcctctccctggctcccaagggtgcaggtgggcgcaaggcccggcccccatcacatgttcccttggcctcagagctgcccctgctctcccaccacagccacccagaggcaccccatgaagcttttttctcgttcactcccaaacccaagtgtccaaggctccagtcctaggagaacagtccctgggtcagcagccaggaggcggtccataagaatggggacagtgggctctgccagggctgccgcacctgtccagacacacatgttctgttcctcctcctcatgcatttccagcctttcaaccctccccgactctgcggctcccctcagcccccttgcaagttcatggcctgtccctcccagacccctgctccactggcccttcgaccagtcctcccttctgttctctctttccccgtccttcctctctctctctctctctctctctctctctttctgtgtgtgtgtgtgtgtgtgtgtgtgtgtgtgtgtgtgtgtgtgtcttgtgcttcctcagacctttctcgcttctgagcttggtggcctgttccctccatctctccgaacctggcttcgcctgtccctttcactccacaccctctggccttctgccttgagctgggactgctttctgtctgtccggcctgcacccagcccctgcccacaaaaccccagggacagcagtctccccagcctgccctgctcaggccttgcccccaaacctgtactgtcccggaggaggttgggaggtggaggcccagcatcccgcgcagatgacaccatcaaccgccagagtcccagacaccggttttcctagaagcccctcacccccactggcccactggtggctaggtctccccttatccttctggtccagcgcaaggaggggctgcttctgaggtcggtggctgtctttccattaaagaaacaccgtgc

SEQ ID NO: 120237 - DNA, 846 bp, Artificial Sequence
  derived and/or modified sequence
ctgcccaggagtgagtagctgctttcggtccgccggacacaccggacagatagacgtgcggacggcccaccaccccagcccgccaactagtcagcctgcgcctggcgcctcccctctccaggtccatccgccatgtggcccctgtggcgcctcgtgtctctgctggccctgagccaggccctgccctttgagcagagaggcttctgggacttcaccctggacgatgggccattcatgatgaacgatgaggaagcttcgggcgctgacacctcgggcgtcctggacccggactctgtcacacccacctacagcgccatgtgtcctttcggctgccactgccacctgcgggtggttcagtgctccgacctgggtctgaagtctgtgcccaaagagatctcccctgacaccacgctgctggacctgcagaacaacgacatctccgagctccgcaaggatgacttcaagggtctccagcacctctacgtaaggagctgggaggaaccagcaggcctacagcagagggcaggggtccgggccctcgtcctggtgaacaacaagatctccaagatccatgagaaggccttcagcccactgcggaagctgcagaagctctacatctccaagaaccacctggtggagatcccgcccaacctacccagctccctggtggagctccgcatccacgacaaccgcatccgcaaggtgcccaagggagtgttcagcgggctccggaacatgaactgcatcgagatgggcgggaacccactggagaacagtggctttgaacctggagccttcgatggcctgaagctcaactacctgcgcatctcagaggccaagctgact

SEQ ID NO: 120238 - DNA, 1107 bp, Artificial Sequence
  derived and/or modified sequence
atgtggcccctgtggagactggtgagcctgctggccctgagccaggccctgcccttcgagcagagaggcttctgggacttcaccctggacgacggccccttcatgatgaacgacgaggaggccagcggcgccgacaccagcggcgtgctggaccccgacagcgtgacccccacctacagcgccatgtgccccttcggctgccactgccacctgagagtggtgcagtgcagcgacctgggcctgaagagcgtgcccaaggagatcagccccgacaccaccctgctggacctgcagaacaacgacatcagcgagctgagaaaggacgacttcaagggcctgcagcacctgtacgccctggtgctggtgaacaacaagatcagcaagatccacgagaaggccttcagccccctgagaaagctgcagaagctgtacatcagcaagaaccacctggtggagatcccccccaacctgcccagcagcctggtggagctgagaatccacgacaacagaatcagaaaggtgcccaagggcgtgttcagcggcctgagaaacatgaactgcatcgagatgggcggcaaccccctggagaacagcggcttcgagcccggcgccttcgacggcctgaagctgaactacctgagaatcagcgaggccaagctgaccggcatccccaaggacctgcccgagaccctgaacgagctgcacctggaccacaacaagatccaggccatcgagctggaggacctgctgagatacagcaagctgtacagactgggcctgggccacaaccagatcagaatgatcgagaacggcagcctgagcttcctgcccaccctgagagagctgcacctggacaacaacaagctggccagagtgcccagcggcctgcccgacctgaagctgctgcaggtggtgtacctgcacagcaacaacatcaccaaggtgggcgtgaacgacttctgccccatgggcttcggcgtgaagagagcctactacaacggcatcagcctgttcaacaaccccgtgccctactgggaggtgcagcccgccaccttcagatgcgtgaccgacagactggccatccagttcggcaactacaagaagtag

SEQ ID NO: 120239 - DNA, 924 bp, Artificial Sequence
  derived and/or modified sequence
atgtgccccttcggctgccactgccacctgagagtggtgcagtgcagcgacctgggcctgaagagcgtgcccaaggagatcagccccgacaccaccctgctggacctgcagaacaacgacatcagcgagctgagaaaggacgacttcaagggcctgcagcacctgtacgccctggtgctggtgaacaacaagatcagcaagatccacgagaaggccttcagccccctgagaaagctgcagaagctgtacatcagcaagaaccacctggtggagatcccccccaacctgcccagcagcctggtggagctgagaatccacgacaacagaatcagaaaggtgcccaagggcgtgttcagcggcctgagaaacatgaactgcatcgagatgggcggcaaccccctggagaacagcggcttcgagcccggcgccttcgacggcctgaagctgaactacctgagaatcagcgaggccaagctgaccggcatccccaaggacctgcccgagaccctgaacgagctgcacctggaccacaacaagatccaggccatcgagctggaggacctgctgagatacagcaagctgtacagactgggcctgggccacaaccagatcagaatgatcgagaacggcagcctgagcttcctgcccaccctgagagagctgcacctggacaacaacaagctggccagagtgcccagcggcctgcccgacctgaagctgctgcaggtggtgtacctgcacagcaacaacatcaccaaggtgggcgtgaacgacttctgccccatgggcttcggcgtgaagagagcctactacaacggcatcagcctgttcaacaaccccgtgccctactgggaggtgcagcccgccaccttcagatgcgtgaccgacagactggccatccagttcggcaactacaagaagtag

SEQ ID NO: 120240 - DNA, 717 bp, Artificial Sequence
  derived and/or modified sequence
atgtggcccctgtggagactggtgagcctgctggccctgagccaggccctgcccttcgagcagagaggcttctgggacttcaccctggacgacggccccttcatgatgaacgacgaggaggccagcggcgccgacaccagcggcgtgctggaccccgacagcgtgacccccacctacagcgccatgtgccccttcggctgccactgccacctgagagtggtgcagtgcagcgacctgggcctgaagagcgtgcccaaggagatcagccccgacaccaccctgctggacctgcagaacaacgacatcagcgagctgagaaaggacgacttcaagggcctgcagcacctgtacgtgagaagctgggaggagcccgccggcctgcagcagagagccggcgtgagagccctggtgctggtgaacaacaagatcagcaagatccacgagaaggccttcagccccctgagaaagctgcagaagctgtacatcagcaagaaccacctggtggagatcccccccaacctgcccagcagcctggtggagctgagaatccacgacaacagaatcagaaaggtgcccaagggcgtgttcagcggcctgagaaacatgaactgcatcgagatgggcggcaaccccctggagaacagcggcttcgagcccggcgccttcgacggcctgaagctgaactacctgagaatcagcgaggccaagctgacctag

SEQ ID NO: 120241 - protein, 526 aa, Artificial Sequence
  derived and/or modified sequence
MGHLSAPLHRVRVPWQGLLLTASLLTFWNPPTTAQLTTESMPFNVAEGKEVLLLVHNLPQQLFGYSWYKGERVDGNRQIVGYAIGTQQATPGPANSGRETIYPNASLLIQNVTQNDTGFYTLQVIKSDLVNEEATGQFHVYPELPKPSISSNNSNPVEDKDAVAFTCEPETQDTTYLWWINNQSLPVSPRLQLSNGNRTLTLLSVTRNDTGPYECEIQNPVSANRSDPVTLNVTYGPDTPTISPSDTYYRPGANLSLSCYAASNPPAQYSWLINGTFQQSTQELFIPNITVNNSGSYTCHANNSVTGCNRTTVKTIIVTELSPVVAKPQIKASKTTVTGDKDSVNLTCSTNDTGISIRWFFKNQSLPSSERMKLSQGNTTLSINPVKREDAGTYWCEVFNPISKNQSDPIMLNVNYNALPQENGLSPGAIAGIVIGVVALVALIAVALACFLHFGKTGRASDQRDLTEHKPSVSNHTQDHSNDPPNKMNEVTYSTLNFEAQQPTQPTSASPSLTATEIIYSEVKKQ

SEQ ID NO: 120242 - protein, 252 aa, Artificial Sequence
  derived and/or modified sequence
MGHLSAPLHRVRVPWQGLLLTASLLTFWNPPTTAQLTTESMPFNVAEGKEVLLLVHNLPQQLFGYSWYKGERVDGNRQIVGYAIGTQQATPGPANSGRETIYPNASLLIQNVTQNDTGFYTLQVIKSDLVNEEATGQFHVYHNALPQENGLSPGAIAGIVIGVVALVALIAVALACFLHFGKTGRASDQRDLTEHKPSVSNHTQDHSNDPPNKMNEVTYSTLNFEAQQPTQPTSASPSLTATEIIYSEVKKQ

SEQ ID NO: 120243 - protein, 417 aa, Artificial Sequence
  derived and/or modified sequence
MGHLSAPLHRVRVPWQGLLLTASLLTFWNPPTTAQLTTESMPFNVAEGKEVLLLVHNLPQQLFGYSWYKGERVDGNRQIVGYAIGTQQATPGPANSGRETIYPNASLLIQNVTQNDTGFYTLQVIKSDLVNEEATGQFHVYPELPKPSISSNNSNPVEDKDAVAFTCEPETQDTTYLWWINNQSLPVSPRLQLSNGNRTLTLLSVTRNDTGPYECEIQNPVSANRSDPVTLNVTYGPDTPTISPSDTYYRPGANLSLSCYAASNPPAQYSWLINGTFQQSTQELFIPNITVNNSGSYTCHANNSVTGCNRTTVKTIIVTELSPVVAKPQIKASKTTVTGDKDSVNLTCSTNDTGISIRWFFKNQSLPSSERMKLSQGNTTLSINPVKREDAGTYWCEVFNPISKNQSDPIMLNVNCK

SEQ ID NO: 120244 - protein, 478 aa, Artificial Sequence
  derived and/or modified sequence
MPFNVAEGKEVLLLVHNLPQQLFGYSWYKGERVDGNRQIVGYAIGTQQATPGPANSGRETIYPNASLLIQNVTQNDTGFYTLQVIKSDLVNEEATGQFHVYPELPKPSISSNNSNPVEDKDAVAFTCEPETQDTTYLWWINNQSLPVSPRLQLSNGNRTLTLLSVTRNDTGPYECEIQNPVSANRSDPVTLNVTYGPDTPTISPSDTYYRPGANLSLSCYAASNPPAQYSWLINGTFQQSTQELFIPNITVNNSGSYTCHANNSVTGCNRTTVKTIIVTELSPVVAKPQIKASKTTVTGDKDSVNLTCSTNDTGISIRWFFKNQSLPSSERMKLSQGNTTLSINPVKREDAGTYWCEVFNPISKNQSDPIMLNEMAFHHVAKAGLKLLSSSNPPASTSQSAKITERQNLTMLPRLDSNSWAQAILPSVSQSAEITDNALPQENGLSPGAIAGIVIGVVALVALIAVALACFLHFGKTG

SEQ ID NO: 120245 - protein, 485 aa, Artificial Sequence
  derived and/or modified sequence
RGDRAAVLEAFLEPKLSSTGEDRASRRHHGAPLSPTSQSACTLGLLLTASLLTFWNPPTTAQLTTESMPFNVAEGKEVLLLVHNLPQQLFGYSWYKGERVDGNRQIVGYAIGTQQATPGPANSGRETIYPNASLLIQNVTQNDTGFYTLQVIKSDLVNEEATGQFHVYPELPKPSISSNNSNPVEDKDAVAFTCEPETQDTTYLWWINNQSLPVSPRLQLSNGNRTLTLLSVTRNDTGPYECEIQNPVSANRSDPVTLNVTYGPDTPTISPSDTYYRPGANLSLSCYAASNPPAQYSWLINGTFQQSTQELFIPNITVNNSGSYTCHANNSVTGCNRTTVKTIIVTELSPVVAKPQIKASKTTVTGDKDSVNLTCSTNDTGISIRWFFKNQSLPSSERMKLSQGNTTLSINPVKREDAGTYWCEVFNPISKNQSDPIMLNVNYNALPQENGLSPGAIAGIVIGVVALVALIAVALACFLHFGKTG

SEQ ID NO: 120246 - DNA, 1581 bp, Artificial Sequence
  derived and/or modified sequence
atgggccatctctctgcgcctttgcatcgcgtcagagtcccttggcagggactgctcctcacagcttccctcctgaccttctggaatcccccaacgaccgcccagcttactaccgaatccatgcccttcaatgtggcagagggaaaagaggtccttcttctggttcacaatctgccacagcagttgtttggatatagctggtataaaggagagagggtggatggcaatcgtcagatagtcggctacgcgatcggtacacaacaggctacaccgggcccagctaatagcggcagggagaccatctatccgaatgccagcctgctaattcaaaacgtgacccagaacgatacaggtttttacaccctccaagtgatcaaatccgacctggtcaatgaggaagccactggccaatttcatgtttaccctgaacttccgaagcccagtatatccagcaataactctaatcctgtggaggacaaagatgctgtggctttcacttgtgagccagagacacaagatactacctacctgtggtggatcaataatcaatcgctgccggtctcaccgcggttgcaactgagcaacgggaacaggactctgaccctcttatcagtaactagaaacgataccggaccatatgagtgcgagattcagaatcccgtgtctgccaatagaagcgatcctgtaacgctgaacgtgacctacgggcccgacactcctacgatatccccttccgatacatactataggcctggagcaaatttgagcttatcatgttatgcggcttcaaatccacctgcccaatacagttggctgattaacgggacgtttcagcagagcacccaggagttattcattccgaacatcacagttaacaactcagggagctacacgtgtcacgctaataacagtgtgaccgggtgtaacagaacgacagtgaagaccatcatcgttacagagttaagcccagtggtagctaaacctcagattaaagcatccaaaacaaccgttactggcgataaggattccgtgaatctcacctgttccaccaatgacactgggataagcattagatggtttttcaaaaaccagtccctgccgtcgtctgagcggatgaagctctctcagggcaacacaacactgtccattaaccctgtgaagcgggaggacgcaggtacctactggtgcgaagtctttaatccaatctcaaagaatcagagcgaccccataatgttgaatgtgaattacaatgctctccctcaggagaacggtctcagcccaggggctattgccggtatagtgatcggcgtggtagccctggtggccctgattgccgtagcactggcatgttttctccatttcgggaagacaggcagggcttcagatcaacgagatctgactgagcacaagccctctgtatccaatcacacacaggatcattccaatgatccccctaataagatgaacgaagttacctactcaaccctgaacttcgaggcgcagcagccaacccagccaactagcgccagtccctcattgaccgccacggaaatcatttatagtgaggtgaagaagcagtag

SEQ ID NO: 120247 - DNA, 1581 bp, Artificial Sequence
  derived and/or modified sequence
atgggccacctgagcgcccccctgcaccgggtgcgggtgccctggcagggcctgctgctgacagccagcctgctgaccttctggaacccccccaccacagcccagctgaccacagagagcatgcccttcaacgtggccgagggcaaggaggtgctgctgctggtgcacaacctgccccagcagctgtttggctacagctggtacaagggggagcgggtggatggcaaccggcagatcgtgggctacgccatcggcacccagcaggccaccccaggccctgccaacagcggccgggagaccatctacccaaatgccagcctgctgatccagaatgtgacccagaatgacaccggcttctacaccctgcaggtgatcaagagtgacctggtgaatgaggaggccaccggccagttccacgtgtacccagagctgcccaagcccagcatcagcagcaacaacagcaaccctgtggaggacaaggatgctgtggccttcacctgtgagcctgagacccaggacaccacctacctgtggtggatcaacaaccagagcctgcctgtgagcccccggctgcagctgagcaatggaaacagaaccctgaccctgctgtctgtgaccagaaatgacaccggcccctatgaatgtgagatccagaaccctgtgtctgccaacagaagtgaccctgtgaccctgaatgtgacctacggccctgacacccccaccatcagccccagcgacacctactacagacctggggccaacctgagcctgagctgctatgctgccagcaaccccccagcccagtacagctggctgatcaatggcaccttccagcagagcacccaggagctgttcatccccaacatcaccgtgaacaacagcggcagctacacctgccacgccaacaacagcgtgacaggctgcaacagaaccaccgtgaagaccatcatcgtgacagagctgagccctgtggtggccaagccccagatcaaggccagcaagaccaccgtgactggagacaaggacagcgtgaacctgacctgcagcaccaatgacaccggcatcagcatccgctggttcttcaagaaccagagcctgcccagcagcgagaggatgaagctgagccagggcaacaccaccctgagcatcaaccctgtgaagagagaagatgctggcacctactggtgtgaggtgttcaaccccatcagcaagaaccagagcgaccccatcatgctgaatgtgaactacaatgccctgccccaggagaatggcctgagccctggggccatcgccggcatcgtgattggagtggtggccctggtggccctgattgctgtggccctggcctgcttcctgcactttgggaagacaggccgggccagtgaccagagggacctgacagagcacaagcccagcgtgagcaaccacacccaggaccacagcaatgacccccccaacaagatgaatgaggtgacctacagcaccctgaactttgaggcccagcagcccacccagcccaccagcgccagccccagcctgacagccacagagatcatctacagcgaggtgaagaagcagtag

SEQ ID NO: 120248 - DNA, 1581 bp, Artificial Sequence
  derived and/or modified sequence
atgggccacctgagcgcccccctgcaccgggtgcgggtgccctggcagggactgctccttacggcgagcctgttgacattctggaatccacccactactgctcagcttaccaccgagagtatgcccttcaatgtcgccgagggcaaggaggtcctgcttctggtgcacaacctgcctcagcagctcttcggatactcttggtataaaggcgagcgcgtggatggaaataggcaaattgttggctacgcgattggaacccagcaggccacccccggccctgccaactctggccgcgaaaccatctatccaaacgccagcctcctgatccagaatgtaacacaaaacgatactgggttttataccctccaggtgatcaaatccgacttggtcaacgaggaggcaaccgggcagttccacgtgtatccagaactacctaaaccttcaataagctccaataactcaaaccccgtcgaggataaagatgccgttgccttcacatgtgagcctgagacccaggatactacttatctgtggtggatcaacaaccagtccctgcctgtgtccccccggctgcagctgagcaacggcaatcggactctgactctgctgtcagtgacccggaatgatacaggcccctacgagtgtgagattcagaatccggtgagcgctaaccgctccgaccctgtgacgctaaatgtgacatatggcccagatactccgaccatctcaccaagtgatacctactatcgtccgggcgcaaatctcagtttgagttgctacgccgcatcgaacccccctgcacagtattcttggctgattaatggtacattccagcagagtacacaagagctgttcattcctaatattactgtcaacaactcaggatcatacacatgccatgcaaacaatagcgtcacaggatgcaaccgtacgaccgttaaaacaattatcgtaactgagctcagccccgtggtagctaagccccagattaaggcctctaaaaccaccgtcaccggagataaggattctgtgaatctgacatgcagtaccaacgacaccggtatctccataaggtggttctttaaaaatcagagtcttccgagttcagagaggatgaaactgagtcagggtaacaccaccctgagtataaatccggtcaagcgggaggatgctggaacctactggtgtgaagtatttaaccccatcagcaagaaccagtcggacccaatcatgctgaacgtaaactataatgctctgccacaggagaatggactctctcccggcgctattgcaggtattgtgattggagttgtcgctctggtggctcttatagctgtagccctcgcatgcttcctgcacttcgggaagactgggcgggcatctgaccaacgggacctaacagaacacaaaccttctgtgtcaaatcatactcaggatcactcaaatgacccacccaacaagatgaacgaagtcacttactctacactgaacttcgaggcccagcagcccacgcagcctacaagcgcttctccatcattgactgccactgagatcatctactccgaggtgaagaaacagtag

SEQ ID NO: 120249 - DNA, 1581 bp, Artificial Sequence
  derived and/or modified sequence
atggggcacctctccgcccctctccaccgcgtgagagtgccctggcagggactactcctgactgctagtctactgaccttttggaatcccccaaccacggcccagctcaccactgagtcaatgccattcaatgtggctgaagggaaggaggtcctattactggtccacaacttaccccagcaactgtttggatactcctggtacaaaggagagcgcgtggacggcaatcgacaaatagtggggtacgccataggtacccagcaagccacgccagggcctgccaactctggacgcgagacaatctaccccaacgcttctctgcttatccagaatgtcacccagaacgacactggattttatacactgcaagtaattaagagcgacctggtgaatgaagaggctacaggccagttccacgtgtatcccgagcttcccaagccctcaatctccagcaacaactctaatccggtcgaggacaaggacgccgtggcgtttacatgtgaacccgagacccaggatacgacttatctgtggtggattaacaatcagtctttgcccgtatccccaagactgcagctgagcaatggcaaccgtacactgacactgttgagcgtgacgcggaacgacacaggtccgtatgaatgcgaaatccagaatcccgtttctgcgaataggtctgaccccgtgaccttaaacgttacatacggcccagatacacctactatcagcccttccgatacatattatagacccggtgccaatctgagcctatcatgctacgctgcttctaatccccctgcccagtacagttggctgatcaatggcactttccaacagtccacacaggaattgtttatcccaaacataaccgtgaacaactccggatcttacacatgccacgccaacaatagcgtgaccggctgcaacaggaccaccgttaaaactattatcgttaccgaattgagccccgtggtggcaaagccacagattaaagcgagtaaaacaacagtgaccggggacaaggatagcgttaatttaacctgttccacgaatgatacaggaatttccatccgatggttttttaagaatcagtcgctaccctcctcggaacggatgaagctttcccaagggaacactactctgtctattaaccccgtaaagcgggaggacgctggaacttattggtgcgaagtcttcaaccctatatctaaaaaccaatctgacccgattatgctgaatgttaattacaacgccctgcctcaagagaacggactgtcaccaggcgcaatcgcgggaattgtgataggtgttgtagccctagtcgctcttatcgctgtggcactcgcttgcttcctgcactttggcaagacaggaagagcgagcgaccagagagatctcactgaacataagccttctgtctccaaccacacccaggaccactcaaatgacccacccaacaaaatgaacgaagtaacctacagtacattaaattttgaagctcagcagccgacacagccaacaagcgcatcccctagtctgacagctactgaaattatttactctgaggttaagaagcaatag

SEQ ID NO: 120250 - DNA, 1581 bp, Artificial Sequence
  derived and/or modified sequence
atgggacacctttccgcgcctctccatcgagttcgggtgccttggcagggactactgcttacagcttcactcctaacattctggaacccacccacaaccgctcaactcactacagaatcaatgccatttaacgtcgcggaaggcaaggaagttctgctgctggtacataatctgccccaacagttattcggctacagctggtacaagggcgaaagagttgatgggaaccggcaaattgtaggctacgcaatcggaacacagcaagccacccctggtcctgcaaattccggtcgggaaacgatctatcccaacgcgagtttgctgatccaaaacgtcactcagaatgataccggattctacactctgcaagtcatcaaatccgacctggtcaacgaggaagctactgggcaatttcatgtgtatcccgaactccctaagccctcaatctcaagcaacaacagcaatcccgtggaagacaaggacgctgtagccttcacatgtgaacctgaaacccaggacacgacatatctatggtggattaataaccaatcactgcccgtgagtccacgcctgcaactaagcaatggcaatcgtactcttactctgctctcagtgacacggaatgacacgggaccctatgaatgcgaaattcagaacccagtctccgcaaatcgatctgacccggtaacactgaacgtcacatatggcccggatacccctaccatttccccttctgatacttattaccggccaggggctaacctctctctgtcttgttacgccgccagtaacccccccgcacagtacagttggcttattaacgggaccttccaacagagcacacaggagttattcatacccaatattactgtgaacaattcaggatcttacacctgccacgccaacaattctgttacaggttgcaataggaccacagtcaaaacgatcatcgtgacggaattgagtccagtagtggccaaacctcagatcaaagcgagcaaaacaacggtaaccggtgacaaggactccgtcaacctcacttgctccacaaatgatactgggattagcatcaggtggttttttaagaaccagtcgttaccaagttctgagaggatgaaattaagccagggcaacaccactctgagcatcaatcctgtcaagagggaggatgccggcacttattggtgcgaggtcttcaatcccatcagtaagaaccagtccgatccaatcatgttaaacgtgaactacaacgctcttccacaggaaaatgggctgtctcctggtgctattgctggcattgttattggggtggtcgcactggtggcactcattgctgtagctctggcttgcttcctgcacttcggtaagaccggcagggcatccgatcagagggatctgaccgaacataagccttctgtatctaatcacactcaggaccactcaaatgaccctcctaacaaaatgaacgaagttacatactctaccctgaattttgaagcccaacagcccacgcagcctacatctgcttctcccagcctaacggccaccgagatcatttatagcgaggtgaagaaacaatag

SEQ ID NO: 120251 - DNA, 1581 bp, Artificial Sequence
  derived and/or modified sequence
atgggacacctttccgcgcctctccatcgagttcgggtgccttggcagggactactgcttacagcttcactcctaacattctggaacccacccacaaccgctcaactcactacagaatcaatgccatttaacgtcgcggaaggcaaggaagttctgctgctggtacataatctgccccaacagttattcggctacagctggtacaagggcgaaagagttgatgggaaccggcaaattgtaggctacgcaatcggaacacagcaagccacccctggtcctgcaaattccggtcgggaaacgatctaccctaatgccagtctcctcatccagaacgtcacacagaacgacacaggattctataccttgcaggttatcaaatcagacttagtcaatgaagaggcaacaggtcagtttcacgtctatccagagctccccaagcccagcatttcgtcaaataactccaaccctgtggaagacaaagacgcggttgcattcacctgtgaacccgaaacccaggataccacttatctttggtggataaacaatcagagcctacctgtgagcccaagactacaattaagcaatggtaatcggacacttacactgcttagcgtcacccgaaacgacacagggccttacgaatgtgagattcaaaacccagtgagcgccaatagaagtgaccctgtaacccttaacgtcacgtacggtccggatacgcctactataagccccagcgatacctactaccgccccggagccaacctttctctgtcttgctacgctgcttccaatccaccggcccagtactcctggctcatcaacggaacttttcagcaaagcacacaagaactgtttatccctaatatcactgtcaacaattctggatcctacacatgtcacgctaacaatagtgtaacgggctgcaataggaccaccgtaaagaccataattgtgaccgaactgtcgccagtagtggcaaaaccccagataaaggctagtaaaaccaccgtgaccggagacaaagattccgttaacctcacctgctccacaaatgacacagggatttcaatcagatggttcttcaagaaccagagcctcccctcgtccgaacggatgaagctgtcccaaggaaacacaaccctgtctatcaatccagtgaaacgcgaggatgccggcacatactggtgcgaggtgtttaatcctatttctaagaaccagagcgacccaataatgctgaacgtaaattacaacgcactcccacaagagaatgggctgtcacccggggccatcgcaggcatcgtcattggtgttgtcgctctcgttgccctaatagcagtcgcactggcctgcttcttgcatttcggcaagaccggacgcgcctctgatcagcgcgacctcaccgaacacaaaccatccgtctctaaccacacccaggaccattctaacgatccaccaaacaaaatgaatgaagtgacatacagcaccctaaattttgaagcacagcaaccgacacagcctacatctgcctccccctccctgaccgccaccgaaatcatctacagcgaagtaaagaaacagtag

SEQ ID NO: 120252 - DNA, 3519 bp, Artificial Sequence
  derived and/or modified sequence
aaagctctgggccccagggaggaggctcagcacagagagtggaaaacagcagaggtgacagagcagccgtgctcgaagcgttcctggagcccaagctctcctccacaggtgaagacagggccagcaggagacaccatggggcacctctcagccccacttcacagagtgcgtgtaccctggcaggggcttctgctcacagcctcacttctaaccttctggaacccgcccaccactgcccagctcactactgaatccatgccattcaatgttgcagaggggaaggaggttcttctccttgtccacaatctgccccagcaactttttggctacagctggtacaaaggggaaagagtggatggcaaccgtcaaattgtaggatatgcaataggaactcaacaagctaccccagggcccgcaaacagcggtcgagagacaatataccccaatgcatccctgctgatccagaacgtcacccagaatgacacaggattctacaccctacaagtcataaagtcagatcttgtgaatgaagaagcaactggacagttccatgtatacccggagctgcccaagccctccatctccagcaacaactccaaccctgtggaggacaaggatgctgtggccttcacctgtgaacctgagactcaggacacaacctacctgtggtggataaacaatcagagcctcccggtcagtcccaggctgcagctgtccaatggcaacaggaccctcactctactcagtgtcacaaggaatgacacaggaccctatgagtgtgaaatacagaacccagtgagtgcgaaccgcagtgacccagtcaccttgaatgtcacctatggcccggacacccccaccatttccccttcagacacctattaccgtccaggggcaaacctcagcctctcctgctatgcagcctctaacccacctgcacagtactcctggcttatcaatggaacattccagcaaagcacacaagagctctttatccctaacatcactgtgaataatagtggatcctatacctgccacgccaataactcagtcactggctgcaacaggaccacagtcaagacgatcatagtcactgagctaagtccagtagtagcaaagccccaaatcaaagccagcaagaccacagtcacaggagataaggactctgtgaacctgacctgctccacaaatgacactggaatctccatccgttggttcttcaaaaaccagagtctcccgtcctcggagaggatgaagctgtcccagggcaacaccaccctcagcataaaccctgtcaagagggaggatgctgggacgtattggtgtgaggtcttcaacccaatcagtaagaaccaaagcgaccccatcatgctgaacgtaaactataatgctctaccacaagaaaatggcctctcacctggggccattgctggcattgtgattggagtagtggccctggttgctctgatagcagtagccctggcatgttttctgcatttcgggaagaccggcagggcaagcgaccagcgtgatctcacagagcacaaaccctcagtctccaaccacactcaggaccactccaatgacccacctaacaagatgaatgaagttacttattctaccctgaactttgaagcccagcaacccacacaaccaacttcagcctccccatccctaacagccacagaaataatttattcagaagtaaaaaagcagtaatgaaacctgtcctgctcactgcagtgctgatgtatttcaagtctctcaccctcatcactaggagattcctttcccctgtaggggtagaggggtggggacagaaacaactttctcctactcttccttcctaataggcatctccaggctgcctggtcactgcccctctctcagtgtcaatagatgaaagtacattgggagtctgtaggaaacccaaccttcttgtcattgaaatttggcaaagctgactttgggaaagagggaccagaacttcccctcccttccccttttcccaacctggacttgttttaaacttgcctgttcagagcactcattccttcccacccccagtcctgtcctatcactctaattcggatttgccatagccttgaggttatgtccttttccattaagtacatgtgccaggaaacaagagagagagaaagtaaaggcagtaatgccttctcctatttctccaaagccttgtgtgaactcaccaaacacaagaaaatcaaatatataaccaatagtgaaatgccacacctttgtccactgtcagggttgtctacctgtaggatcagggtctaagcaccttggtgcttagctagaataccacctaatccttctggcaagcctgtcttcagagaacccactagaagcaactaggaaaatcacttgccaaaatccaaggcaattcctgatggaaaatgcaaaagcacatatatgttttaatatctttatgggctctgttcaaggcagtgctgagagggaggggttatagcttcaggagggaaccagcttctgataaacacaatctgctaggaacttgggaaaggaatcagagagctgcccttcagcgattatttaaattattgttaaagaatacacaatttggggtattgggatttttctccttttctctgagacattccaccattttaatttttgtaactgcttatttatgtgaaaagggttatttttacttagcttagctatgtcagccaatccgattgccttaggtgaaagaaaccaccgaaatccctcaggtcccttggtcaggagcctctcaagattttttttgtcagaggctccaaatagaaaataagaaaaggttttcttcattcatggctagagctagatttaactcagtttctaggcacctcagaccaatcatcaactaccattctattccatgtttgcacctgtgcattttctgtttgcccccattcactttgtcaggaaaccttggcctctgctaaggtgtatttggtccttgagaagtgggagcaccctacagggacactatcactcatgctggtggcattgtttacagctagaaagctgcactggtgctaatgccccttggggaaatggggctgtgaggaggaggattataacttaggcctagcctcttttaacagcctctgaaatttatcttttcttctatggggtctataaatgtatcttataataaaaaggaaggacaggaggaagacaggcaaatgtacttctcacccagtcttctacacagatggaatctctttggggctaagagaaaggttttattctatattgcttacctgatctcatgttaggcctaagaggctttctccaggaggattagcttggagttctctatactcaggtacctctttcagggttttctaaccctgacacggactgtgcatactttccctcatccatgctgtgctgtgttatttaatttttcctggctaagatcatgtctgaattatgtatgaaaattattctatgtttttataataaaaataatatatcagacatcga

SEQ ID NO: 120253 - DNA, 3465 bp, Artificial Sequence
  derived and/or modified sequence
agaggtgacagagcagccgtgctcgaagcgttcctggagcccaagctctcctccacaggtgaagacagggccagcaggagacaccatggggcacctctcagccccacttcacagagtgcgtgtaccctggggcttctgctcacagcctcacttctaaccttctggaacccgcccaccactgcccagctcactactgaatccatgccattcaatgttgcagaggggaaggaggttcttctccttgtccacaatctgccccagcaactttttggctacagctggtacaaaggggaaagagtggatggcaaccgtcaaattgtaggatatgcaataggaactcaacaagctaccccagggcccgcaaacagcggtcgagagacaatataccccaatgcatccctgctgatccagaacgtcacccagaatgacacaggattctacaccctacaagtcataaagtcagatcttgtgaatgaagaagcaactggacagttccatgtatacccggagctgcccaagccctccatctccagcaacaactccaaccctgtggaggacaaggatgctgtggccttcacctgtgaacctgagactcaggacacaacctacctgtggtggataaacaatcagagcctcccggtcagtcccaggctgcagctgtccaatggcaacaggaccctcactctactcagtgtcacaaggaatgacacaggaccctatgagtgtgaaatacagaacccagtgagtgcgaaccgcagtgacccagtcaccttgaatgtcacctatggcccggacacccccaccatttccccttcagacacctattaccgtccaggggcaaacctcagcctctcctgctatgcagcctctaacccacctgcacagtactcctggcttatcaatggaacattccagcaaagcacacaagagctctttatccctaacatcactgtgaataatagtggatcctatacctgccacgccaataactcagtcactggctgcaacaggaccacagtcaagacgatcatagtcactgagctaagtccagtagtagcaaagccccaaatcaaagccagcaagaccacagtcacaggagataaggactctgtgaacctgacctgctccacaaatgacactggaatctccatccgttggttcttcaaaaaccagagtctcccgtcctcggagaggatgaagctgtcccagggcaacaccaccctcagcataaaccctgtcaagagggaggatgctgggacgtattggtgtgaggtcttcaacccaatcagtaagaaccaaagcgaccccatcatgctgaacgtaaactataatgctctaccacaagaaaatggcctctcacctggggccattgctggcattgtgattggagtagtggccctggttgctctgatagcagtagccctggcatgttttctgcatttcgggaagaccggcagggcaagcgaccagcgtgatctcacagagcacaaaccctcagtctccaaccacactcaggaccactccaatgacccacctaacaagatgaatgaagttacttattctaccctgaactttgaagcccagcaacccacacaaccaacttcagcctccccatccctaacagccacagaaataatttattcagaagtaaaaaagcagtaatgaaacctgtcctgctcactgcagtgctgatgtatttcaagtctctcaccctcatcactaggagattcctttcccctgtaggggtagaggggtggggacagaaacaactttctcctactcttccttcctaataggcatctccaggctgcctggtcactgcccctctctcagtgtcaatagatgaaagtacattgggagtctgtaggaaacccaaccttcttgtcattgaaatttggcaaagctgactttgggaaagagggaccagaacttcccctcccttccccttttcccaacctggacttgttttaaacttgcctgttcagagcactcattccttcccacccccagtcctgtcctatcactctaattcggatttgccatagccttgaggttatgtccttttccattaagtacatgtgccaggaaacaagagagagagaaagtaaaggcagtaatgccttctcctatttctccaaagccttgtgtgaactcaccaaacacaagaaaatcaaatatataaccaatagtgaaatgccacacctttgtccactgtcagggttgtctacctgtaggatcagggtctaagcaccttggtgcttagctagaataccacctaatccttctggcaagcctgtcttcagagaacccactagaagcaactaggaaaatcacttgccaaaatccaaggcaattcctgatggaaaatgcaaaagcacatatatgttttaatatctttatgggctctgttcaaggcagtgctgagagggaggggttatagcttcaggagggaaccagcttctgataaacacaatctgctaggaacttgggaaaggaatcagagagctgcccttcagcgattatttaaattattgttaaagaatacacaatttggggtattgggatttttctccttttctctgagacattccaccattttaatttttgtaactgcttatttatgtgaaaagggttatttttacttagcttagctatgtcagccaatccgattgccttaggtgaaagaaaccaccgaaatccctcaggtcccttggtcaggagcctctcaagattttttttgtcagaggctccaaatagaaaataagaaaaggttttcttcattcatggctagagctagatttaactcagtttctaggcacctcagaccaatcatcaactaccattctattccatgtttgcacctgtgcattttctgtttgcccccattcactttgtcaggaaaccttggcctctgctaaggtgtatttggtccttgagaagtgggagcaccctacagggacactatcactcatgctggtggcattgtttacagctagaaagctgcactggtgctaatgccccttggggaaatggggctgtgaggaggaggattataacttaggcctagcctcttttaacagcctctgaaatttatcttttcttctatggggtctataaatgtatcttataataaaaaggaaggacaggaggaagacaggcaaatgtacttctcacccagtcttctacacagatggaatctctttggggctaagagaaaggttttattctatattgcttacctgatctcatgttaggcctaagaggctttctccaggaggattagcttggagttctctatactcaggtacctctttcagggttttctaaccctgacacggactgtgcatactttccctcatccatgctgtgctgtgttatttaatttttcctggctaagatcatgtctgaattatgtatgaaaattattctatgtttttataataaaaataatatatcagacatcga

SEQ ID NO: 120254 - DNA, 1581 bp, Artificial Sequence
  derived and/or modified sequence
atgggccacctgagcgcccccctgcacagagtgagagtgccctggcagggcctgctgctgaccgccagcctgctgaccttctggaacccccccaccaccgcccagctgaccaccgagagcatgcccttcaacgtggccgagggcaaggaggtgctgctgctggtgcacaacctgccccagcagctgttcggctacagctggtacaagggcgagagagtggacggcaacagacagatcgtgggctacgccatcggcacccagcaggccacccccggccccgccaacagcggcagagagaccatctaccccaacgccagcctgctgatccagaacgtgacccagaacgacaccggcttctacaccctgcaggtgatcaagagcgacctggtgaacgaggaggccaccggccagttccacgtgtaccccgagctgcccaagcccagcatcagcagcaacaacagcaaccccgtggaggacaaggacgccgtggccttcacctgcgagcccgagacccaggacaccacctacctgtggtggatcaacaaccagagcctgcccgtgagccccagactgcagctgagcaacggcaacagaaccctgaccctgctgagcgtgaccagaaacgacaccggcccctacgagtgcgagatccagaaccccgtgagcgccaacagaagcgaccccgtgaccctgaacgtgacctacggccccgacacccccaccatcagccccagcgacacctactacagacccggcgccaacctgagcctgagctgctacgccgccagcaacccccccgcccagtacagctggctgatcaacggcaccttccagcagagcacccaggagctgttcatccccaacatcaccgtgaacaacagcggcagctacacctgccacgccaacaacagcgtgaccggctgcaacagaaccaccgtgaagaccatcatcgtgaccgagctgagccccgtggtggccaagccccagatcaaggccagcaagaccaccgtgaccggcgacaaggacagcgtgaacctgacctgcagcaccaacgacaccggcatcagcatcagatggttcttcaagaaccagagcctgcccagcagcgagagaatgaagctgagccagggcaacaccaccctgagcatcaaccccgtgaagagagaggacgccggcacctactggtgcgaggtgttcaaccccatcagcaagaaccagagcgaccccatcatgctgaacgtgaactacaacgccctgccccaggagaacggcctgagccccggcgccatcgccggcatcgtgatcggcgtggtggccctggtggccctgatcgccgtggccctggcctgcttcctgcacttcggcaagaccggcagagccagcgaccagagagacctgaccgagcacaagcccagcgtgagcaaccacacccaggaccacagcaacgacccccccaacaagatgaacgaggtgacctacagcaccctgaacttcgaggcccagcagcccacccagcccaccagcgccagccccagcctgaccgccaccgagatcatctacagcgaggtgaagaagcagtag

SEQ ID NO: 120255 - protein, 406 aa, Artificial Sequence
  derived and/or modified sequence
MPPVGGKKAKKGILERLNAGEIVIGDGGFVFALEKRGYVKAGPWTPEAAVEHPEAVRQLHREFLRAGSNVMQTFTFYASEDKLENRGNYVLEKISGQEVNEAACDIARQVADEGDALVAGGVSQTPSYLSCKSETEVKKVFLQQLEVFMKKNVDFLIAEYFEHVEEAVWAVETLIASGKPVAATMCIGPEGDLHGVPPGECAVRLVKAGASIIGVNCHFDPTISLKTVKLMKEGLEAARLKAHLMSQPLAYHTPDCNKQGFIDLPEFPFGLEPRVATRWDIQKYAREAYNLGVRYIGGCCGFEPYHIRAIAEELAPERGFLPPASEKHGSWGSGLDMHTKPWVRARARKEYWENLRIASGRPYNPSMSKPDGWGVTKGTAELMQQKEATTEQQLKELFEKQKFKSQ

SEQ ID NO: 120256 - protein, 203 aa, Artificial Sequence
  derived and/or modified sequence
MPPVGGKKAKKGILERLNAGEIVIGDGGFVFALEKRGYVKAGPWTPEAAVEHPEAGASIIGVNCHFDPTISLKTVKLMKEGLEAARLKAHLMSQPLAYHTPDCNKQGFIDLPEFPFGLEPELPPDGIFKNTPERPTTWGSGTLAGAVDLSPTTSGQLQRSWPQKGAFCHQLQKNMAAGEVVWTCTPNPGLEQGPGRNTGRIFG

SEQ ID NO: 120257 - DNA, 1221 bp, Artificial Sequence
  derived and/or modified sequence
atgcctccagtcggagggaaaaaggcgaaaaagggtatactggaaaggttgaacgccggtgagattgtgattggagatgggggtttcgtttttgccttggaaaagcgcgggtacgtgaaagctgggccatggacgccagaagctgccgttgagcacccggaggccgtgcgccaactgcatcgggaatttctcagagctggctcaaatgtgatgcagacctttacattctatgcctccgaggacaagctggaaaatcgggggaattacgtactagagaaaatctccggacaggaagtgaacgaagccgcttgtgatatcgcccggcaggttgccgacgaaggggatgcacttgttgctgggggcgtgtctcagacccccagctatctgagctgtaaatccgaaacagaagtcaagaaagtgttcttacaacagttggaggtgtttatgaagaaaaacgtggacttcctcattgcggagtatttcgaacacgttgaagaggcagtctgggcagtcgagaccctgatcgccagtggtaaacccgtggcagctaccatgtgcatcggcccagagggagacctgcacggagtgcctccaggggagtgtgccgtgaggttagtaaaggcaggtgcaagcattataggggtgaactgtcactttgatcctaccatttccttgaagactgtgaagctcatgaaggagggtctcgaggcggccagattgaaggcccatcttatgagccagcctctggcatatcatacgcctgactgcaacaaacagggcttcattgacctgcccgagttccccttcgggctggagccaagagtagctacccgctgggatatccagaaatacgccagggaagcttacaacctgggcgttcgatatatcggcgggtgctgtggattcgagccatatcacattagggccatcgcagaggagcttgcccccgaacgagggttcttgccccctgcaagcgagaaacacggatcctggggtagtgggctagacatgcacactaaaccctgggtgcgcgctagggcaagaaaggagtattgggagaatttgaggatcgcgtccggccggccctacaacccaagcatgtccaagcctgacgggtggggagtcactaagggaactgctgaactgatgcagcaaaaggaagcgaccaccgagcagcagctaaaggagctcttcgagaagcagaaattcaaaagtcagtag

SEQ ID NO: 120258 - DNA, 612 bp, Artificial Sequence
  derived and/or modified sequence
atgccccctgtgggtgggaagaaagcaaagaagggcattttggagcggctgaacgcgggggaaattgtgatcggcgacgggggtttcgtgttcgccctcgagaaaagaggctatgtcaaggccgggccctggacacctgaggctgccgtggaacatcctgaggccggagcgtccattatcggcgtcaactgtcattttgaccccactatctcgctcaaaacagtgaaattgatgaaggaagggttggaggccgctagacttaaggcccatctgatgagtcagccactggcttatcatactccggactgcaataaacaaggatttattgatctacccgagttcccatttgggctggaacctgagctcccccctgatggcatcttcaaaaacacccccgagcgcccaaccacttggggctctgggacattggcgggggcggtagacctttcacccaccaccagcggccagctgcaacgctcctggccccagaaaggagccttctgtcaccagctgcagaaaaatatggccgctggagaggtggtgtggacttgcacacccaatccgggattggagcaggggcccggaaggaacactgggcgtatcttcggatag

SEQ ID NO: 120259 - DNA, 1221 bp, Artificial Sequence
  derived and/or modified sequence
atgcctcctgtgggcggcaagaaggccaagaagggcatcctggagcggctgaatgctggggagatcgtgattggagatggcggctttgtgtttgccctggagaagaggggctacgtgaaggccggcccctggaccccagaggccgctgtggagcaccctgaggccgtgcggcagctgcaccgggagttcctgcgggccggcagcaatgtgatgcagaccttcaccttctacgccagcgaggacaagctggagaacagaggcaactacgtgctggagaagatcagcggccaggaggtgaatgaggccgcctgtgacatcgcccggcaggtggctgatgaaggagatgccctggtggccggcggcgtgtcccagacccccagctacctgagctgcaagtcagaaacagaggtgaagaaggtgttcctgcagcagctggaggtgttcatgaagaagaatgtggacttcctgattgctgagtactttgaacatgtggaggaggccgtgtgggccgtggagaccctgattgccagcggcaagcctgtggccgccaccatgtgcatcggccctgagggggacctgcacggcgtgcccccaggagaatgtgctgtgcggctggtgaaggccggggccagcatcattggagtgaactgccactttgaccccaccatcagcctgaagacagtgaagctgatgaaggagggcctggaggccgcccggctgaaggcccacctgatgagccagcccctggcctaccacaccccagactgcaacaagcagggcttcatcgacctgcctgagttccccttcggcctggagccccgggtggccacccgctgggacatccagaagtatgcccgggaggcctacaacctgggcgtgcgctacatcggcggctgctgcggctttgagccctaccacatccgggccatcgccgaggagctggcccctgagcggggcttcctgcccccagccagcgagaagcacggctcctggggcagcggcctggacatgcacaccaagccctgggtgcgggcccgggccaggaaggagtactgggagaacctgagaattgccagcggccggccctacaaccccagcatgagcaagccagatggctggggcgtgaccaagggcacagctgagctgatgcagcagaaggaggccaccacagagcagcagctgaaggagctgtttgagaagcagaagttcaagagccagtag

SEQ ID NO: 120260 - DNA, 612 bp, Artificial Sequence
  derived and/or modified sequence
atgcctcctgtgggcggcaagaaggccaagaagggcatcctggagcggctgaatgctggggagatcgtgattggagatggcggctttgtgtttgccctggagaagaggggctacgtgaaggccggcccctggaccccagaggccgctgtggagcaccctgaggccggggccagcatcatcggcgtgaactgccactttgaccccaccatcagcctgaagacagtgaagctgatgaaggagggcctggaggccgcccggctgaaggcccacctgatgagccagcccctggcctaccacaccccagactgcaacaagcagggcttcatcgacctgcctgagttccccttcggcctggagcctgagctgcccccagatggcatcttcaagaacaccccagagcggcccaccacctggggcagcggcaccctggccggggctgtggacctgagccccaccaccagcggccagctgcagaggtcctggccccagaagggggccttctgccaccagctgcagaagaacatggctgctggggaggtggtgtggacctgcacccccaaccctggcctggagcagggccctggcaggaacacaggccgcatcttcggctag

SEQ ID NO: 120261 - DNA, 1221 bp, Artificial Sequence
  derived and/or modified sequence
atgccccccgtgggcggcaagaaggccaagaagggcatcctggagagactgaacgcaggagaaatcgttatcggggacggcggctttgtttttgctttggagaaacgcgggtacgtcaaggccggcccatggacacccgaagccgccgtcgagcatccggaagccgtgaggcaactccatcgtgagtttttgcgagccgggagtaatgttatgcagacttttaccttttacgcgtctgaagacaaattggaaaaccgcgggaactacgtcttggagaaaatcagcggccaggaagtaaatgaggctgcatgcgacattgctcgacaagttgcagatgaaggtgatgcccttgtggcaggaggggtgtctcagaccccctcttacctttcctgcaaaagcgaaacagaagtgaagaaggtctttctgcagcagctggaggtattcatgaagaagaatgtagactttctgatcgccgaatacttcgaacatgtcgaggaagcagtttgggctgtggaaaccctgatcgcttcaggaaaaccagtggcagcaacgatgtgcatcgggcccgagggggacctgcacggcgtccctcccggagaatgcgccgtgcggcttgtgaaggcaggcgccagtataatcggcgtcaattgccatttcgacccgacaatctctctgaagacagtcaaactgatgaaggagggattggaagcagccaggcttaaagcgcacctgatgagccagccactcgcctatcacacccccgactgcaacaagcaaggattcatcgacctgcccgagttcccttttgggctggagccccgcgtggctacccgatgggacatccagaagtatgcccgggaggcctataatctgggggtccgatatattggaggctgctgcggattcgagccttaccacatacgcgcaattgcagaagagctcgcacccgaacgcggatttctgccgccggcatcagagaagcacggatcatggggtagtggcctggacatgcacaccaaaccctgggtgcgtgcaagggccaggaaggagtactgggaaaacctccgcatcgcctcaggccggccgtacaatcctagcatgtctaagcccgacgggtggggcgttactaagggtaccgctgagcttatgcagcagaaggaggcaacgactgagcagcagcttaaggagctttttgagaagcaaaaattcaagtcacaatag

SEQ ID NO: 120262 - DNA, 612 bp, Artificial Sequence
  derived and/or modified sequence
atgccccccgtgggcggcaagaaggccaagaagggcatcctggagcggttaaatgcaggtgagattgtaataggcgacggcggattcgtgtttgcattggagaagcgaggctacgtcaaggccgggccctggactcccgaggccgctgtggagcacccagaagccggcgccagtatcatcggagtgaattgtcattttgatcccaccatatccctgaaaacggttaagctgatgaaggaaggcttggaagctgcgcggttaaaagcccatttgatgtctcagccactggcctatcacacacccgactgtaacaaacagggcttcatcgatttgcccgaattcccattcggcttggaacccgagttgccacccgacggaatcttcaaaaacactcccgaaagaccgacaacatggggatcgggaactctcgcgggcgcggtagacctgtctcccaccacctccgggcaactgcagcgctcatggccacaaaaaggcgcattctgtcaccagctgcagaagaacatggccgccggggaagtggtgtggacatgcaccccaaacccagggcttgaacagggccctggaaggaacacagggaggatctttggatag

SEQ ID NO: 120263 - DNA, 1221 bp, Artificial Sequence
  derived and/or modified sequence
atgccgccagtcgggggaaagaaagctaaaaaaggaatactggaacggcttaacgctggggaaattgtgattggggacggaggcttcgtgtttgccctggagaagagaggatacgtcaaggccggaccatggactcccgaagctgccgttgagcacccggaagcggtgaggcaactgcatcgtgagttcctccgcgctggttccaatgttatgcaaaccttcaccttctacgctagcgaggataaattggagaacagaggtaactacgtcctcgagaagattagcggacaggaagttaatgaggcagcctgtgatatcgcccgacaggtcgctgacgagggagacgccctggttgccggtggtgtcagtcagactccttcgtacttatcttgtaaatccgaaacagaggtaaagaaagtttttctgcagcagttggaggtttttatgaaaaagaacgtagactttctgatagcagagtatttcgaacacgttgaggaggctgtttgggcggttgagacgctgattgcctcaggcaagcccgtcgcagcaacgatgtgtatcggtcccgaaggagatctgcatggcgtaccccctggtgagtgcgccgtgagacttgtaaaggccggagccagcatcatcggggtaaattgccactttgacccaacgatttccctgaaaacggttaagcttatgaaagagggactcgaagctgcacgcctgaaagcgcatctaatgtcccaacctctggcctatcacacccctgactgcaataagcaaggatttatcgatctccccgagtttccttttgggctggaaccgagagtggcgacaaggtgggatattcagaaatatgctcgggaagcatataacctcggcgtccggtatattggagggtgctgtggctttgagccataccacatcagagcgatagcagaggagctagcccctgaaaggggatttctgcctcccgctagtgaaaagcacgggtcctggggctccgggctggacatgcacaccaagccatgggtgagagctagagcgcgaaaagagtattgggaaaacctgcggattgcttcaggcagaccctataacccatccatgtcaaaacctgacggttggggtgtcacaaaaggaaccgccgaactgatgcagcaaaaagaggcgacaaccgagcaacagctgaaagagctgttcgaaaagcaaaagttcaaatctcagtag

SEQ ID NO: 120264 - DNA, 612 bp, Artificial Sequence
  derived and/or modified sequence
atgccaccggtcggcggtaaaaaagcaaaaaagggtatcctcgagagactcaatgctggggagatagttataggagacggtggcttcgtttttgcactcgaaaaacgtggatacgtgaaagccggaccctggaccccagaagcggcagtggagcaccccgaggccggagcatctatcatcggcgttaactgccatttcgaccccacaatctcacttaaaaccgtcaagctcatgaaggaggggctagaagccgctagactcaaggcccacctaatgtcacagccccttgcttaccacacccctgattgcaacaagcaggggttcattgacctgcccgaattcccttttgggctagaacctgagttaccgccagacgggatttttaaaaatactccagagcgccctaccacttggggatctgggaccctagcgggtgccgtagatctctcgccaaccacctcgggtcagctgcagcggagctggccccagaagggcgctttttgtcatcagctgcagaagaatatggcggcaggtgaagtggtctggacttgtacacctaaccccggattggagcaaggtcctggcaggaacacaggccgaattttcggatag

SEQ ID NO: 120265 - DNA, 2497 bp, Artificial Sequence
  derived and/or modified sequence
gtataaagaggcaggctgcggactcggagcagctcggggctgcgcagcgggaaggctcgcctagtcggtccgcatccgtgtcgaccacctgtctggacaccacgaagatgccacccgttgggggcaaaaaggccaagaagggcatcctagaacgtttaaatgctggagagattgtgattggagatggagggtttgtctttgcactggagaagaggggctacgtaaaggcaggaccctggactcctgaagctgctgtggagcacccagaagcagttcgccagcttcatcgagagttcctcagagctggctcaaacgtcatgcagaccttcaccttctatgcgagtgaagacaagctggagaacaggggcaactatgtcttagagaagatatctgggcaggaagtcaatgaagctgcttgcgacatcgcccgacaagtggctgatgaaggagatgctttggtagcaggaggagtgagtcagacaccttcataccttagctgcaagagtgaaactgaagtcaaaaaagtatttctgcaacagttagaggtctttatgaagaagaacgtggacttcttgattgcagagtattttgaacacgttgaagaagctgtgtgggcagttgaaaccttgatagcatccggtaaacctgtggcagcaaccatgtgcattggcccagaaggagatttgcatggcgtgccccccggcgagtgtgcagtgcgcctggtgaaagcaggagcatccatcattggtgtgaactgccactttgaccccaccattagtttaaaaacagtgaagctcatgaaggagggcttggaggctgcccgactgaaagctcacctgatgagccagcccttggcttaccacactcctgactgcaacaagcagggattcatcgatctcccagaattcccatttggactggaacccagagttgccaccagatgggatattcaaaaatacgccagagaggcctacaacctgggggtcaggtacattggcgggtgctgtggatttgagccctaccacatcagggcaattgcagaggagctggccccagaaaggggctttttgccaccagcttcagaaaaacatggcagctggggaagtggtttggacatgcacaccaaaccctgggttagagcaagggccaggaaggaatactgggagaatcttcggatagcctcaggccggccatacaacccttcaatgtcaaagccagatggctggggagtgaccaaaggaacagccgagctgatgcagcagaaagaagccacaactgagcagcagctgaaagagctctttgaaaaacaaaaattcaaatcacagtagcctcgatagaagctatttttgatgaatttctaggtgtttgggtcacagttcctacaaatacggaaaagggggttaaaaagcagtgctttcatgaatgccatcctacacatattattgctattacctgaacaaaatagaattacaaatagcacttgataattttaaagtatgttttagaaattttcttaggagcaaaataagtacaaagtaaatcttgaacaggttcactaagcacccaccctgtgaaaagtattatggaaatcactgctgcacaggaaaagtaattcagatgttaatgccacttgaagaagttggtaggctagcaaagaggatgagacatgaactgtcataaaggactcagcaaccagccagggacagataaagcgctatggaaaggggcttccaagttcttttgaacatgacccttagtaacaaacacaatttatataatgacccagcaaaacacatcacatcttactgtcgaaattaaatgtgtgatccatcctagtattttctgttccattccttttcattctatttcatttataaaacatgctagttgagacttttcaaatggatttttatgacccactactgggtttggatccacagtttgaaaaatattgctacaagacacttaaggagaccatcctgtttaagtttattcttataagtaggtcagtcatatgagacctgatcaataaatatccaatacccagagtcctgctctcagagttcttctgtttcgtgacccacttttctaccagtaaaagacatagaccaatggggaggaggggaggagagatggatatttcagccctctccatcctagtcaacactggatccacctagtgcctctgggccataaggctgagcagagtgagcttgtattagttggtagcttttaaaaaatataataagaaaaaagtagagattctccaaactctagcctggtttcctagattgagaactatgatatttttctctgataatttaatatctactctcctacaaaagctcaagcctgaagatacaagactattagaagaaacatgactaccctcagtgtattagaaaagaggtcatgcagctttctaaacattattgaattgtttgagctgttttgaaattgtaattcttttcagctattaaaaagaagagcaatgaga

SEQ ID NO: 120266 - DNA, 1206 bp, Artificial Sequence
  derived and/or modified sequence
agctcggggctgcgcagcgggaaggctcgcctagtcggtccgcatccgtgtcgaccacctgtctggacaccacgaagatgccacccgttgggggcaaaaaggccaagaagggcatcctagaacgtttaaatgctggagagattgtgattggagatggagggtttgtctttgcactggagaagaggggctacgtaaaggcaggaccctggactcctgaagctgctgtggagcacccagaagcaggagcatccatcattggtgtgaactgccactttgaccccaccattagtttaaaaacagtgaagctcatgaaggagggcttggaggctgcccgactgaaagctcacctgatgagccagcccttggcttaccacactcctgactgcaacaagcagggattcatcgatctcccagaattcccatttggactggaaccagagttgccaccagatgggatattcaaaaatacgccagagaggcctacaacctgggggtcaggtacattggcgggtgctgtggatttgagccctaccacatcagggcaattgcagaggagctggccccagaaaggggctttttgccaccagcttcagaaaaacatggcagctggggaagtggtttggacatgcacaccaaaccctgggttagagcaagggccaggaaggaatactgggagaatcttcggatagcctcaggccggccatacaacccttcaatgtcaaagccagatggctggggagtgaccaaaggaacagccgagctgatgcagcagaaagaagccacaactgagcagcagctgaaagagctctttgaaaaacaaaaattcaaatcacagtagcctcgatagaagctatttttgatgaatttctaggtgtttgggtcacagttcctacaaatacggaaaagggggttaaaaagcagtgctttcatgaatgccatcctacacatattattgctattacctgaacaaaatagaattacaaatagcacttgataattttaaagtatgttttagaaattttcttaggagcaaaataagtacaaagtaaatcttgaacaggttcactaagcacccaccctgtgaaaagtattatggaaatcactgctgcacaggaaaagtaattcagatgttaatgccacttgaagaagttggtaggctagcaaagaggatgagacatgaactgtcataaaggactcagcaaccag

SEQ ID NO: 120267 - DNA, 1221 bp, Artificial Sequence
  derived and/or modified sequence
atgccccccgtgggcggcaagaaggccaagaagggcatcctggagagactgaacgccggcgagatcgtgatcggcgacggcggcttcgtgttcgccctggagaagagaggctacgtgaaggccggcccctggacccccgaggccgccgtggagcaccccgaggccgtgagacagctgcacagagagttcctgagagccggcagcaacgtgatgcagaccttcaccttctacgccagcgaggacaagctggagaacagaggcaactacgtgctggagaagatcagcggccaggaggtgaacgaggccgcctgcgacatcgccagacaggtggccgacgagggcgacgccctggtggccggcggcgtgagccagacccccagctacctgagctgcaagagcgagaccgaggtgaagaaggtgttcctgcagcagctggaggtgttcatgaagaagaacgtggacttcctgatcgccgagtacttcgagcacgtggaggaggccgtgtgggccgtggagaccctgatcgccagcggcaagcccgtggccgccaccatgtgcatcggccccgagggcgacctgcacggcgtgccccccggcgagtgcgccgtgagactggtgaaggccggcgccagcatcatcggcgtgaactgccacttcgaccccaccatcagcctgaagaccgtgaagctgatgaaggagggcctggaggccgccagactgaaggcccacctgatgagccagcccctggcctaccacacccccgactgcaacaagcagggcttcatcgacctgcccgagttccccttcggcctggagcccagagtggccaccagatgggacatccagaagtacgccagagaggcctacaacctgggcgtgagatacatcggcggctgctgcggcttcgagccctaccacatcagagccatcgccgaggagctggcccccgagagaggcttcctgccccccgccagcgagaagcacggcagctggggcagcggcctggacatgcacaccaagccctgggtgagagccagagccagaaaggagtactgggagaacctgagaatcgccagcggcagaccctacaaccccagcatgagcaagcccgacggctggggcgtgaccaagggcaccgccgagctgatgcagcagaaggaggccaccaccgagcagcagctgaaggagctgttcgagaagcagaagttcaagagccagtag

SEQ ID NO: 120268 - DNA, 612 bp, Artificial Sequence
  derived and/or modified sequence
atgccccccgtgggcggcaagaaggccaagaagggcatcctggagagactgaacgccggcgagatcgtgatcggcgacggcggcttcgtgttcgccctggagaagagaggctacgtgaaggccggcccctggacccccgaggccgccgtggagcaccccgaggccggcgccagcatcatcggcgtgaactgccacttcgaccccaccatcagcctgaagaccgtgaagctgatgaaggagggcctggaggccgccagactgaaggcccacctgatgagccagcccctggcctaccacacccccgactgcaacaagcagggcttcatcgacctgcccgagttccccttcggcctggagcccgagctgccccccgacggcatcttcaagaacacccccgagagacccaccacctggggcagcggcaccctggccggcgccgtggacctgagccccaccaccagcggccagctgcagagaagctggccccagaagggcgccttctgccaccagctgcagaagaacatggccgccggcgaggtggtgtggacctgcacccccaaccccggcctggagcagggccccggcagaaacaccggcagaatcttcggctag

SEQ ID NO: 120269 - protein, 975 aa, Artificial Sequence
  derived and/or modified sequence
MAAEEVLQTVDHYKTEIERLTKELTETTHEKIQAAEYGLVVLEEKLTLKQQYDELEAEYDSLKQELEQLKEAFGQSFSIHRKVAEDGETREETLLQESASKEAYYLGKILEMQNELKQSRAVVTNVQAENERLTAVVQDLKENNEMVELQRIRMKDEIREYKFREARLLQDYTELEEENITLQKLVSTLKQNQVEYEGLKHEIKRFEEETVLLNSQLEDAIRLKEIAEHQLEEALETLKNEREQKNNLRKELSQYISLNDNHISISVDGLKFAEDGSEPNNDDKMNGHIHGPLVKLNGDYRTPTLRKGESLNPVSDLFSELNISEIQKLKQQLMQVEREKAILLANLQESQTQLEHTKGALTEQHERVHRLTEHVNAMRGLQSSKELKAELDGEKGRDSGEEAHDYEVDINGLEILECKYRVAVTEVIDLKAEIKALKEKYNKSVENYTDEKAKYESKIQMYDEQVTSLEKTTKESGEKMAHMEKELQKMTSIANENHSTLNTAQDELVTFSEELAQLYHHVCLCNNETPNRVMLDYYRQSRVTRSGSLKGPDDPRGLLSPRLARRGVSSPVETRTSSEPVAKESTEASKEPSPTKTPTISPVITAPPSSPVLDTSDIRKEPMNIYNLNAIIRDQIKHLQKAVDRSLQLSRQRAAARELAPMIDKDKEALMEEILKLKSLLSTKREQIATLRAVLKANKQTAEVALANLKNKYENEKAMVTETMTKLRNELKALKEDAATFSSLRAMFATRCDEYVTQLDEMQRQLAAAEDEKKTLNTLLRMAIQQKLALTQRLEDLEFDHEQSRRSKGKLGKSKIGSPKVSGEASVTVPTIDTYLLHSQGPQTPNIRVSSGTQRKRQFSPSLCDQSRPRTSGASYLQNLLRVPPDPTSTESFLLKGPPSMSEFIQGHRLSKEKRLTVAPPDCQQPAASVPPQCSQLAGRQDCPTVSPDTALPEEQPHSSSQCAPLHCLSKPPHP

SEQ ID NO: 120270 - DNA, 2928 bp, Artificial Sequence
  derived and/or modified sequence
atggcggccgaggaggtgttgcaaacggtcgaccactacaagacagagatcgaaagactcacaaaagagctgaccgagactacccacgaaaagatccaagcagcagaatacggactcgtggtgttagaagagaaactgaccctaaagcaacaatatgacgaattggaagccgagtacgacagtctgaaacaggagctggagcaactcaaggaggcctttgggcaatcttttagcattcaccgcaaggtcgctgaggacggcgaaacaagggaagaaaccctgctacaagagtcagccagcaaggaagcttactacctcggaaaaattcttgagatgcagaacgaactgaaacagtcacgagccgttgtaaccaatgtccaggccgaaaacgagaggctgaccgctgtggttcaggatcttaaagagaacaatgaaatggtcgagctacagcgaatccgtatgaaggacgagatccgcgaatataagtttagggaggcacgtctgctgcaggactatacagaattagaggaagaaaacattaccctgcagaaactggtgtctacgcttaagcagaatcaggtggagtacgagggtctaaaacacgaaatcaaacgcttcgaagaggagaccgtgctgttaaattcacaactcgaggacgccattcggctgaaagaaattgcagagcatcagttggaggaagcgctcgaaactttgaaaaacgaacgcgagcaaaaaaataacttgaggaaggagctatcacagtatatctccctcaacgacaaccacatctcaatctcggttgatgggctgaagtttgctgaagacggttcagagccaaacaatgatgataagatgaacgggcatatccatgggccactagtgaaactcaacggggactatcgtacacccacgttgcgaaagggcgagagcctaaaccccgtatctgaccttttctccgaactcaacatctccgaaattcaaaaattaaagcagcagctgatgcaggttgagagggaaaaggccattctcctggccaatctgcaggagagtcaaacacaactggaacacacgaagggcgctctgactgagcagcacgagcgagttcaccggttgactgaacatgttaatgctatgcgtggcttgcagtcctctaaggagctgaaagcagagctggacggcgagaaaggacgcgacagtggcgaagaggcccacgactatgaagtcgacatcaacggcctggagatccttgaatgcaaatacagggtcgctgtgacagaggttatcgaccttaaagctgagatcaaagctcttaaggaaaagtataacaagtcggttgaaaattataccgacgagaaagcgaagtacgaatccaagattcagatgtacgatgaacaggttacatccctggagaagaccactaaggaaagcggggagaagatggcccacatggagaaagagcttcagaagatgacatctatagcaaatgagaaccatagcaccctaaataccgcgcaggatgaattggttacgttttctgaagagctcgcccagctctaccatcatgtctgtctgtgtaataacgagacacctaaccgcgtgatgctggattactataggcagagtagagtgactaggagcgggagcttgaaaggacctgacgatcctagggggcttctgagcccccggctagcaagaagaggcgtctcatcgcccgtcgagacacgcacatcctctgaacccgtcgcaaaggagagtaccgaagcctctaaggagccctcgcctacaaaaactcctactatctccccagtgatcaccgccccgccttcttctcctgttctggatacctcagacattaggaaggagccgatgaatatttacaacctgaacgcaattattagagaccaaataaagcatctccaaaaggcggtcgatagatctctgcaactctctagacagcgcgcagccgcccgagaactagctcccatgatcgacaaggacaaggaggcacttatggaggagattctgaaactcaaaagcctgttatccacaaaacgagagcagatcgccaccctccgtgcggtgttaaaagccaataaacagacagccgaagtggcactggcaaacctgaagaataaatatgagaatgaaaaggccatggtgactgaaaccatgacaaagcttagaaatgagttgaaggcccttaaagaggacgctgcgacattcagcagtctccgggccatgttcgccacccgctgtgatgagtacgtcacccagctcgatgagatgcagcgccagctcgcagcggccgaggacgagaaaaaaacactcaacaccctcctgcgaatggctattcaacagaaactggctttgacccaacgtctcgaggacctggaatttgaccacgaacagtccagacgatccaagggtaaactaggaaagagtaagatcggatctcctaaggtgtcgggggaggcctccgtaacagtccccactatagatacatatctgctccatagccagggtccgcagaccccgaatatccgtgtcagctccggcacccaaagaaaacgccagttctctccatccctctgtgatcagagcaggcccaggacaagcggagcttcctaccttcagaacctgctgcgcgtccctcctgacccaactagtaccgaatcgtttctgctgaaaggacctccctcgatgtcagagttcatccagggccatcggttatccaaggagaagaggcttaccgtggccccacccgattgccaacagcctgctgctagtgtgccaccccagtgtagccaattggctggccgccaggactgtccaaccgtgagtccagatacagcactgcccgaagagcagccgcactcttcatcgcagtgcgcacctttgcactgcctttccaaacctccacatccatag

SEQ ID NO: 120271 - DNA, 2928 bp, Artificial Sequence
  derived and/or modified sequence
atggctgctgaggaggtgctgcagacagtggaccactacaagacagaaattgagcggctgaccaaggagctgacagagaccacccatgagaagatccaggccgcagaatatggcctggtggtgctggaggagaagctgaccctgaagcagcagtatgatgagctggaggccgagtatgacagcctgaagcaggagctggagcagctgaaggaggccttcggccagagcttcagcatccacaggaaggtggctgaagatggagagacccgggaggagaccctgctgcaggagagcgccagcaaggaggcctactacctgggcaagatcctggagatgcagaatgagctgaagcagagcagagctgtggtgaccaacgtgcaggctgaaaatgaaaggctgacagctgtggtgcaggacctgaaggagaacaatgagatggtggagctgcagaggatccgcatgaaggatgagatccgggagtacaagttccgggaggcccggctgctgcaggactacacagagctggaggaggagaacatcaccctgcagaagctggtgtccaccctgaagcagaaccaggtggagtatgagggcctgaagcatgagatcaagagatttgaggaggagaccgtgctgctgaacagccagctggaggatgccatccggctgaaggagattgctgagcaccagctggaggaggccctggagaccctgaagaatgaaagagagcagaagaacaacctgaggaaggagctgagccagtacatcagcctgaatgacaaccacatcagcatctctgtggatggcctgaagtttgctgaagatggcagcgagcccaacaatgatgacaagatgaatggccacatccacggccccctggtgaagctgaatggagactaccgcacccccaccctgaggaaaggagagagcctgaaccctgtgtctgacctcttcagcgagctgaacatcagcgagatccagaagctgaagcagcagctgatgcaggtggagcgggagaaggccatcctgctggccaacctgcaggagagccagacccagctggagcacaccaagggggccctgacagagcagcacgagcgggtgcaccggctgacagagcacgtgaatgccatgaggggcctgcagagcagcaaggagctgaaggccgagctggatggagagaagggccgggacagcggggaggaggcccatgactatgaggtggacatcaatggcctggagatcctggagtgcaagtacagagtggccgtgacagaggtgattgacctgaaggccgagatcaaggccctgaaggagaagtacaacaagtctgtggagaactacacagatgagaaggccaagtatgagagcaagatccagatgtatgatgagcaggtgaccagcctggagaagaccaccaaggagagcggggagaagatggcccacatggagaaggagctgcagaagatgaccagcatcgccaatgaaaaccacagcaccctgaacacagcccaggatgagctggtgaccttcagcgaggagctggcccagctgtaccaccacgtgtgcctgtgcaacaatgagacccccaacagagtgatgctggactactaccggcagagccgggtgaccaggagcggcagcctgaagggcccagatgacccccggggcctgctgagcccccggctggccaggagaggagtgagcagccctgtggagaccaggaccagcagcgagcctgtggccaaggagagcacagaggccagcaaggagcccagccccaccaagacccccaccatcagccctgtgatcacagccccacccagcagccctgtgctggacaccagtgacatcaggaaggagcccatgaacatctacaacctgaatgccatcatccgggaccagatcaagcacctgcagaaggctgtggacaggagcctgcagctgagccggcagagagctgctgcccgggagctggcccccatgattgacaaggacaaggaggccctgatggaggagatcctgaagctgaagagcctgctgagcaccaagcgggagcagatcgccaccctgcgggctgtgctgaaggccaacaagcagacagctgaggtggccctggccaacctgaagaacaagtatgaaaatgagaaggccatggtgacagagaccatgaccaagctgagaaatgagctgaaggccctgaaggaggatgctgccaccttcagcagcctgcgggccatgtttgccacccgctgtgatgaatatgtgacccagctggatgagatgcagaggcagctggccgctgctgaagatgagaagaagaccctgaacaccctgctgaggatggccatccagcagaagctggccctgacccagaggctggaggacctggagtttgaccacgagcagagcagaagaagcaagggcaagctgggcaagagcaagattggcagccccaaggtgtctggagaggcctctgtgacagtgcccaccatcgacacctacctgctgcacagccagggcccccagacccccaacatccgggtgagcagcggcacccagaggaagaggcagttcagccccagcctgtgtgaccagagccggcccaggaccagcggggccagctacctgcagaacctgctgcgggtgcccccagaccccaccagcacagagagcttcctgctgaagggcccccccagcatgtctgagttcatccagggccaccggctgagcaaggagaagaggctgactgtggcccccccagactgccagcagcctgctgcctctgtgcccccccagtgcagccagctggccggccggcaggactgccccaccgtgtccccagacacagccctgcctgaggagcagccccacagcagcagccagtgtgcccccctgcactgcctgagcaagccaccccacccctag

SEQ ID NO: 120272 - DNA, 2928 bp, Artificial Sequence
  derived and/or modified sequence
atggccgccgaggaggtgctgcagaccgtggaccactacaagaccgagatagagagactcacgaaagagttgacggagacaacccacgagaagattcaagccgctgaatacgggctcgtggtgctagaggaaaagctcacgcttaagcagcaatacgatgaactggaggccgagtacgactctctgaaacaggagctggagcagttgaaggaagccttcggccagtcatttagcattcatcgcaaggtggccgaggatggagagacccgcgaagagaccctcctccaggaatcggcaagcaaagaggcatactatttgggtaagatcctcgagatgcagaacgaactgaaacagtcccgggctgttgtgactaacgtccaggcagaaaatgaaagactaacggccgtggtccaggacttgaaagagaacaacgaaatggtggagttgcagagaatcagaatgaaagatgagatccgggagtacaagttccgggaagcccgactcctgcaggattacacagagctggaggaagaaaatattactctgcaaaaactcgttagtaccctcaaacagaatcaagttgaatatgaaggactgaaacatgagattaaaagattcgaagaagaaacagtgctcttaaactctcagcttgaggatgccatacggctgaaggagattgcggagcaccagttggaggaggctctagagactcttaagaacgaacgcgaacagaaaaataacctgcgtaaagagttgagccaatacatctcccttaatgacaatcacatcagcatctctgtcgacggtctaaaattcgccgaagatgggagtgaacctaacaacgatgataaaatgaacgggcacatccatggtccgctggttaaactgaacggagactaccgtacaccgaccctgcggaagggggaaagcctgaaccctgtgtcggacctgttctcagagctgaacattagtgagattcagaagctgaaacaacaactcatgcaggtggagagagagaaagctatcttgcttgctaaccttcaagaatcacagacacagctggagcacacgaagggagcactgacagaacaacacgaacgggtgcaccggttaactgagcatgttaacgctatgcggggcctccagagttctaaggaattgaaggcagagctcgatggtgagaaaggccgcgacagtggcgaggaagcccatgactacgaggtggatatcaacggtctcgagatcctcgagtgtaagtaccgtgtagctgtgactgaggtgattgatctaaaagcagaaattaaggctctgaaggagaagtacaataagtccgtggagaactatacagacgaaaaagccaaatatgagtcgaaaattcagatgtacgacgaacaggtcaccagtcttgagaagacaaccaaggagagtggagagaagatggcacacatggagaaagagctgcagaaaatgactagcatcgccaacgaaaaccactcaacattgaacactgcccaggatgaactggtcacattctcagaggaactggctcagctgtatcaccacgtttgtctgtgcaacaatgagacgccaaatagagtcatgctggattactacagacagagcagagtcaccagatcgggctccctcaaagggcctgatgatcccagaggactgctcagccccaggcttgcaagacgcggcgtgagttcgccagtggagacccgcacatcttccgagcccgtggcaaaggaatcaacagaagcgtccaaggaaccttctccaactaagacccccaccatctccccagtgattacagccccacccagttccccagtactcgatacatccgacattcggaaggagccaatgaacatctacaatttaaacgctatcatcagggatcagatcaaacacctgcagaaagccgtggatcggtctctccagcttagcagacagcgcgctgctgcaagagagctcgcacctatgattgacaaagacaaagaagctctaatggaggagattttaaagctgaagtcactcctatcaacgaagcgcgagcaaattgcaacactcagggctgtcctgaaggcgaacaaacagactgcggaggtggccttggccaacctgaaaaataagtatgagaacgaaaaagctatggtgacggaaaccatgactaagttgcgaaatgaactgaaagctctcaaggaggacgcagccaccttctccagtctgcgtgccatgttcgcgaccaggtgcgacgaatacgtgacacagttagatgagatgcaacgtcagctcgctgcagctgaagatgaaaagaaaaccctcaatacccttctcaggatggctatccagcagaaactcgccttgacacaacgcctcgaagacctggagtttgatcatgagcaaagcagaaggagcaagggaaagttgggcaagtccaagattggctccccaaaggtttccggcgaagcatccgtgacggttcccacgattgatacctacctcctgcactctcaaggcccccagacccccaacattcgtgtgagttctgggacacagcgcaaaaggcaattctcaccttcactttgcgaccagtctagaccaaggacttctggcgcctcgtacctccaaaatctgctcagagtgccacccgatcccacaagcactgaatcttttctgttaaaaggccctccatcaatgtcagagtttatccaggggcataggctaagtaaagagaaacgcctgactgtggcaccgccagattgccagcaacccgctgcaagcgtgccgccacagtgctcgcaactagccggacgtcaagactgtccaaccgttagcccagacaccgccctgccggaagagcagcctcattcatcttcccagtgcgcaccactccattgcctgagcaaaccaccgcacccttag

SEQ ID NO: 120273 - DNA, 2928 bp, Artificial Sequence
  derived and/or modified sequence
atggccgcagaggaagttttacagactgtggaccactacaagaccgagatcgaaaggctcaccaaagaactgaccgagacaacgcatgagaagatccaggccgctgaatacggtttggttgtactagaagaaaagcttaccttaaaacagcagtacgacgagctggaagctgaatacgattcattaaagcaagagttggaacaactgaaagaggcttttggccagagctttagcatccaccgcaaagtcgccgaggacggcgaaacacgggaggagaccctacttcaagagagcgcaagtaaggaggcatactatttaggcaaaatattggagatgcagaacgaattgaaacagtcacgtgctgtggtgaccaatgtacaggctgagaacgaaagactgactgcagtggttcaggacttgaaggagaacaatgagatggtggagctgcaaaggatccggatgaaagatgaaatccgcgagtataagtttcgcgaagctcggctgcttcaggattatacagaactcgaggaagagaatatcactttgcagaagctggtttccacccttaagcagaaccaagtggagtatgaggggctgaaacatgagattaagcggttcgaggaagaaactgtattattaaattcccagctagaggacgctatccggttgaaggaaattgccgagcaccagctggaggaagcgctggagactctgaaaaatgagagggagcagaaaaataatttgcgcaaggagctgagtcaatacatttctctgaacgataaccatatttcaatcagcgtagacgggcttaaatttgctgaagacggctccgagccgaataacgacgataagatgaatggccacattcacggccctctagtgaaactcaacggagactacagaacgcctaccctgcgtaaaggagaaagtcttaacccagttagtgatctattctcagaactcaacatttctgagatccagaaactcaaacagcagctgatgcaggtagagagggagaaagccattttgctagccaatttgcaggaatctcagactcaactagagcatactaagggtgcactcaccgagcagcacgaaagagtgcaccggttgactgagcatgtgaatgctatgcgcggactccaaagctctaaagaactcaaagccgagcttgatggagaaaagggccgagactcaggagaagaggcacacgactatgaagtcgacatcaatgggctggagattcttgaatgcaaataccgcgtcgccgtcactgaggttatcgacctaaaagccgagatcaaagccttgaaggagaagtacaacaagtcagtagagaattacacagatgagaaggctaaatacgagtcaaagattcaaatgtatgatgaacaggtcacaagcctcgaaaagacaacgaaggagtcaggggaaaaaatggcccacatggagaaagagcttcaaaagatgacctcaatcgcgaatgaaaaccattccactctgaatacagcccaggacgagttagtgacattttctgaggagctggcccaactctatcaccacgtgtgtctgtgcaataacgagacacccaatcgcgtgatgttagattactacagacagtcccgtgtgacacgctctgggtctctgaagggtccagacgacccccgtgggcttctatctcccagactggcccgtcgaggagtgagcagccctgtcgagacccggaccagttcagaacccgtagccaaagagtccaccgaggcctctaaggaaccatctcctactaaaacgccaaccatcagtcctgttatcactgcgccacctagctcacctgtcctggataccagcgacatccgtaaagagccaatgaatatctacaatctgaacgctatcataagagatcagattaagcacctgcagaaggccgtggaccgcagtctgcaactgtcgcgacagagggcagcggcaagagagctggcaccgatgatagacaaggacaaggaagccctgatggaagaaattcttaaactcaagtccttgttaagtacaaagcgggaacagatcgccaccctgcgtgccgtgctcaaagcaaacaaacagacagccgaggtagctctggctaatttgaagaacaagtacgaaaacgaaaaggcaatggtgaccgaaactatgacgaaactccggaacgagcttaaggccctaaaagaagatgccgcaaccttctctagtcttcgggctatgtttgcaacccggtgcgacgagtatgtgacacagcttgatgagatgcagcggcagttagcggctgcagaggatgaaaagaaaactctgaatacactgttacgaatggccattcaacagaaattggccctgacccagcggctagaggacttagagtttgaccacgagcagtctaggcgaagtaagggtaagctgggcaaatccaagatcggctctccaaaggtttccggagaggcaagtgtgactgttcctactatagatacctacctgctgcatagccagggaccccaaacccctaacatccgcgtaagtagtggcacccagaggaagcggcagttctcaccgtccctgtgtgaccagagcagaccgcgaacaagtggagcttcctacttgcagaatctcctccgagtccccccagaccctacgtctaccgagtctttcctcctaaaaggccctccctctatgtccgagtttattcagggccaccggctgtccaaggaaaagcggctgactgtggcaccgcctgattgccagcaaccagccgcttctgtgccgccacaatgttcgcaactcgcgggaagacaggattgcccgacagtaagtcccgacacagcccttccagaagaacaaccacacagcagcagtcagtgtgctcctctgcactgtctctctaagccccctcacccctag

SEQ ID NO: 120274 - DNA, 3281 bp, Artificial Sequence
  derived and/or modified sequence
ccgtttccacccatcccttcccatttccttctccctttccccgccagcttcgcatccatctcccccaccccgtaaccccctcctgcctccatccaccggggctatggccgcagaagaggtattgcagacggtggaccattataagactgagatagagaggctaaccaaggagctcacggagaccacccacgagaagatccaggctgccgagtacgggctggtggtgctggaggagaagctgaccctcaaacagcagtatgatgaactggaggctgagtacgacagcctcaaacaggagctggagcagctcaaagaggcatttgggcagtccttctccatccaccggaaggttgctgaagatggagagactcgggaggaaacgcttctgcaggagtcagcatcgaaggaggcttactatctggggaagatcttggagatgcagaacgagctgaaacagagccgggctgtggtcactaatgtacaggcagaaaacgagaggctcaccgcagtcgtgcaggatctgaaggagaacaatgagatggtggagctacagagaatacggatgaaggatgaaatccgagaatataagttccgggaggcacggctccttcaggactatactgaattggaagaagaaaatatcacattgcagaaactagtgtccacgttgaagcagaaccaggttgaatacgaaggcttaaagcatgagattaagcgatttgaggaggagacggtactgctgaacagccagctggaagatgccatccgattgaaagagattgctgagcaccaactggaagaagccctcgagactttaaaaaatgaaagagagcaaaagaacaacctgcggaaggagctctcccagtatatcagcctcaatgataaccatatcagcatctcagtagatggactcaaatttgccgaggatgggagtgaaccaaacaatgatgacaaaatgaacggtcatatccatgggcctcttgtgaaactgaatggagactatcggactcccaccttaaggaaaggagagtctctgaaccctgtctctgacttattcagtgagctgaacatttcagaaatacagaagttgaagcagcagcttatgcaggtagagcgggaaaaggccattcttttggccaacctacaggagtcacagacacagctggaacacaccaagggggcactgacggagcagcatgagcgggtgcaccggctcacagagcacgtcaatgccatgaggggcctgcaaagcagcaaggagctcaaggctgagctggacggggagaagggccgggactcaggggaggaggcccatgactatgaggtggacatcaatggtttagagatccttgaatgcaaatacagggtggcagtaactgaggtgattgatctgaaagctgaaattaaggccttaaaggagaaatataataaatctgtagaaaactacactgatgagaaggccaagtatgagagtaaaatccagatgtatgatgagcaggtgacaagccttgagaagaccaccaaggagagtggtgagaagatggcccacatggagaaggagttgcaaaagatgaccagcatagccaacgaaaatcacagtacccttaatacggcccaggatgagttagtgacattcagtgaggagttagctcagctttaccaccatgtgtgtctatgtaataatgaaactcccaacagggtcatgctggattactataggcagagcagagtcacccgcagtggcagcctgaaagggcccgatgatcccagaggacttttgtccccacgattagccaggcggggtgtgtcatccccggtagaaacaaggacctcatctgaaccagttgcaaaagaaagcacagaggccagcaaagaaccaagtccaactaagacccccacaatctctcctgttattactgccccaccgtcatctccagtattggatacaagtgacatccgcaaagagccaatgaatatctacaaccttaatgccataatccgggaccaaatcaagcatctgcagaaagctgtggaccggtccttgcaactgtctcgtcaaagagcagcggctcgggagctagcccccatgattgataaagacaaggaagccttaatggaagagatcctcaagctaaagtccctgctgagcaccaaacgggagcagatcgccacattgagggcggtgttgaaagccaacaagcagacagctgaggtggcgctagctaatctcaagaacaaatatgaaaatgaaaaagcaatggtgactgaaaccatgacgaagcttagaaatgaactgaaggctttgaaagaagatgctgcaaccttctcatccctgagagcaatgtttgcaacaagatgtgatgaatatgtcacccagttggatgagatgcagagacagttagcagctgcagaggatgagaagaagactctgaacactttgttacgaatggctatccagcaaaaactcgccctgacccagaggctggaggacttagagtttgaccatgagcagtcccgacgcagcaaaggcaaacttggaaagagcaagatcggcagccctaaagtaagtggggaggcatcagtcaccgtgcccaccatagacacttacctcctgcatagtcagggcccacagacacccaacattcgggtcagcagtggcactcagaggaaaagacaattttcaccttccctttgtgatcagagccgtcccaggacttcaggggcttcctacctacagaatttattaagagttccccctgatcccacctccacagaatcatttcttctgaagggccccccttccatgagtgaattcatccaagggcaccggctcagcaaggaaaaaaggttaaccgtggctccaccagattgtcagcagcctgctgcctccgtaccgccacagtgctcacaactagccgggaggcaagactgcccaactgtcagtcctgacacagctctccctgaggagcagccacattccagctcccagtgcgcccctctccactgtctctccaagcctcctcacccctagtcttcatctcctgtggacgaacatctggggtggaagttttgtagccacacacaggatactgcccaagatccagcgggtgttttcttctcggttgttagatgtacaattggattaatgtccatcgttttggaagacgagagaaagttgagaagaacacgaagcacagaccctgatgtgataaaacattttgtggtttctctgagtcacagataaacttctgccatcaaatggctacagttcatttaaattt

SEQ ID NO: 120275 - DNA, 2928 bp, Artificial Sequence
  derived and/or modified sequence
atggccgccgaggaggtgctgcagaccgtggaccactacaagaccgagatcgagagactgaccaaggagctgaccgagaccacccacgagaagatccaggccgccgagtacggcctggtggtgctggaggagaagctgaccctgaagcagcagtacgacgagctggaggccgagtacgacagcctgaagcaggagctggagcagctgaaggaggccttcggccagagcttcagcatccacagaaaggtggccgaggacggcgagaccagagaggagaccctgctgcaggagagcgccagcaaggaggcctactacctgggcaagatcctggagatgcagaacgagctgaagcagagcagagccgtggtgaccaacgtgcaggccgagaacgagagactgaccgccgtggtgcaggacctgaaggagaacaacgagatggtggagctgcagagaatcagaatgaaggacgagatcagagagtacaagttcagagaggccagactgctgcaggactacaccgagctggaggaggagaacatcaccctgcagaagctggtgagcaccctgaagcagaaccaggtggagtacgagggcctgaagcacgagatcaagagattcgaggaggagaccgtgctgctgaacagccagctggaggacgccatcagactgaaggagatcgccgagcaccagctggaggaggccctggagaccctgaagaacgagagagagcagaagaacaacctgagaaaggagctgagccagtacatcagcctgaacgacaaccacatcagcatcagcgtggacggcctgaagttcgccgaggacggcagcgagcccaacaacgacgacaagatgaacggccacatccacggccccctggtgaagctgaacggcgactacagaacccccaccctgagaaagggcgagagcctgaaccccgtgagcgacctgttcagcgagctgaacatcagcgagatccagaagctgaagcagcagctgatgcaggtggagagagagaaggccatcctgctggccaacctgcaggagagccagacccagctggagcacaccaagggcgccctgaccgagcagcacgagagagtgcacagactgaccgagcacgtgaacgccatgagaggcctgcagagcagcaaggagctgaaggccgagctggacggcgagaagggcagagacagcggcgaggaggcccacgactacgaggtggacatcaacggcctggagatcctggagtgcaagtacagagtggccgtgaccgaggtgatcgacctgaaggccgagatcaaggccctgaaggagaagtacaacaagagcgtggagaactacaccgacgagaaggccaagtacgagagcaagatccagatgtacgacgagcaggtgaccagcctggagaagaccaccaaggagagcggcgagaagatggcccacatggagaaggagctgcagaagatgaccagcatcgccaacgagaaccacagcaccctgaacaccgcccaggacgagctggtgaccttcagcgaggagctggcccagctgtaccaccacgtgtgcctgtgcaacaacgagacccccaacagagtgatgctggactactacagacagagcagagtgaccagaagcggcagcctgaagggccccgacgaccccagaggcctgctgagccccagactggccagaagaggcgtgagcagccccgtggagaccagaaccagcagcgagcccgtggccaaggagagcaccgaggccagcaaggagcccagccccaccaagacccccaccatcagccccgtgatcaccgccccccccagcagccccgtgctggacaccagcgacatcagaaaggagcccatgaacatctacaacctgaacgccatcatcagagaccagatcaagcacctgcagaaggccgtggacagaagcctgcagctgagcagacagagagccgccgccagagagctggcccccatgatcgacaaggacaaggaggccctgatggaggagatcctgaagctgaagagcctgctgagcaccaagagagagcagatcgccaccctgagagccgtgctgaaggccaacaagcagaccgccgaggtggccctggccaacctgaagaacaagtacgagaacgagaaggccatggtgaccgagaccatgaccaagctgagaaacgagctgaaggccctgaaggaggacgccgccaccttcagcagcctgagagccatgttcgccaccagatgcgacgagtacgtgacccagctggacgagatgcagagacagctggccgccgccgaggacgagaagaagaccctgaacaccctgctgagaatggccatccagcagaagctggccctgacccagagactggaggacctggagttcgaccacgagcagagcagaagaagcaagggcaagctgggcaagagcaagatcggcagccccaaggtgagcggcgaggccagcgtgaccgtgcccaccatcgacacctacctgctgcacagccagggcccccagacccccaacatcagagtgagcagcggcacccagagaaagagacagttcagccccagcctgtgcgaccagagcagacccagaaccagcggcgccagctacctgcagaacctgctgagagtgccccccgaccccaccagcaccgagagcttcctgctgaagggcccccccagcatgagcgagttcatccagggccacagactgagcaaggagaagagactgaccgtggccccccccgactgccagcagcccgccgccagcgtgcccccccagtgcagccagctggccggcagacaggactgccccaccgtgagccccgacaccgccctgcccgaggagcagccccacagcagcagccagtgcgcccccctgcactgcctgagcaagcccccccacccctag

SEQ ID NO: 120276 - protein, 505 aa, Artificial Sequence
  derived and/or modified sequence
MGLVSSKKPDKEKPIKEKDKGQWSPLKVSAQDKDAPPLPPLVVFNHLTPPPPDEHLDEDKHFVVALYDYTAMNDRDLQMLKGEKLQVLKGTGDWWLARSLVTGREGYVPSNFVARVESLEMERWFFRSQGRKEAERQLLAPINKAGSFLIRESETNKGAFSLSVKDVTTQGELIKHYKIRCLDEGGYYISPRITFPSLQALVQHYSKKGDGLCQRLTLPCVRPAPQNPWAQDEWEIPRQSLRLVRKLGSGQFGEVWMGYYKNNMKVAIKTLKEGTMSPEAFLGEANVMKALQHERLVRLYAVVTKEPIYIVTEYMARGCLLDFLKTDEGSRLSLPRLIDMSAQIAEGMAYIERMNSIHRDLRAANILVSEALCCKIADFGLARIIDSEYTAQEGAKFPIKWTAPEAIHFGVFTIKADVWSFGVLLMEVVTYGRVPYPGMSNPEVIRNLERGYRMPRPDTCPPELYRGVIAECWRSRPEERPTFEFLQSVLEDFYTATERQYELQP

SEQ ID NO: 120277 - protein, 590 aa, Artificial Sequence
  derived and/or modified sequence
MGLVSSKKPDKEKPIKEKDKGQWSPLKVSAQDKDAPPLPPLVVFNHLTPPPPDEHLDEDKHFVVALYDYTAMNDRDLQMLKGEKLQVLKGTGDWWLARSLVTGREGYVPSNFVARVESLEMERWFFRSQGRKEAERQLLAPINKAGSFLIRESETNKGAFSLSVKDVTTQGELIKHYKIRCLDEGGYYISPRITFPSLQALVQHYSKKGDGLCQRLTLPCVRPAPQNPWAQDEWEIPRQSLRLVRKLGSGQFGEVWMGYYKNNMKVAIKTLKEGTMSPEAFLGEANVMKALQHERLVRLYAVVTKEPIYIVTEYMARGCLLDFLKTDEGSRLSLPRLIDMSAQIAEGMAYIERMNSIHRDLRAANILVSEALCCKIADFGLARIIDSEYTAQEGAKFPIKWTAPEAIHFGVFTIKADVWSFGVLLMEVVTYGRVPYPGMSNPEVIRNLERGYRMPRPDTCPPELYRGVIAECWRSRPEERPTFDCTPGRVTRPLCAASFVEGCNSDLARSSGVLSPSKVFRTGKRLSSSKAPVLGTPRAGRVPASAPCVDPALPRYRSQTGSRGRQQGQPQPRLRSSTAGLFCNKVTSVR

SEQ ID NO: 120278 - DNA, 1518 bp, Artificial Sequence
  derived and/or modified sequence
atgggcctggtctcttccaagaaacccgacaaggagaaacctattaaagagaaggataagggtcaatggtcccccctgaaagtttccgcccaggacaaggatgcccctcccttaccccctctcgtggtatttaaccacctgacgcccccacctcccgacgagcacctggatgaggacaagcactttgtagttgctctttacgactacacagccatgaatgatcgcgacctacagatgttgaagggagagaaactgcaggtgctaaagggcacaggggattggtggctcgctcggtctctggtgacgggaagggaaggatacgtgccatccaacttcgtggcaagagtcgagagcctggagatggaaaggtggttcttccggtcccaggggagaaaagaggcggagcgacagctgctggcccctatcaataaggctgggtcattcctgatccgcgagtccgaaactaacaagggagcattttccctcagcgtaaaggatgtgacaactcagggggaactgattaagcactataagattcggtgcctcgacgagggaggatattatattagcccgagaataacattcccatccctgcaggccctggtgcagcattactctaaaaagggagacggactgtgccagcgtttgactctgccctgtgtgcgccccgccccacaaaatccatgggcccaggacgagtgggaaatcccaagacagtctctgagattggtaaggaagctcggctctggccagttcggggaggtttggatgggctattataaaaataatatgaaggtggccatcaaaactctcaaggagggcactatgagtccagaagcattcctgggcgaagctaacgttatgaaggccctgcagcatgagcggctcgtacggctatacgcagtggtaaccaaagagccaatatatattgtgacagaatacatggctcgaggttgcctgttggatttcttgaagaccgatgagggcagcaggttgtccctgcccaggttgatcgacatgagtgcccaaattgcagagggaatggcgtatatcgagcgcatgaattcaatacatcgagacctgagggcggccaacatcctagtctctgaggcattatgctgcaagattgccgacttcggactcgctcggatcatcgattcggagtatactgcccaggagggcgccaagttccccataaaatggactgcccccgaagccatccatttcggagtcttcacaattaaagctgacgtttggagtttcggggtcctgctcatggaagtggtgacttacggaagagttccttaccccggcatgtcaaacccagaggtaatcaggaacttggaaaggggctatcgcatgccaagaccagatacctgcccgcccgagttgtacagaggggtaattgccgaatgttggcgttccagaccagaggagcgacccaccttcgagttcctccaatccgtcttggaggatttttacactgccaccgaacgacagtacgaactgcaaccttag

SEQ ID NO: 120279 - DNA, 1773 bp, Artificial Sequence
  derived and/or modified sequence
atgggcctggttagttccaagaagccagacaaggagaaaccaataaaagaaaaggataaaggacaatggtcgcctttgaaggtgtcggcccaggacaaagacgctcctcccttacccccgctagttgtatttaatcacctaacccctcctcctcccgatgaacatcttgacgaagacaagcattttgtcgttgcgttgtacgactatactgcaatgaacgatagagatttgcagatgctcaagggcgagaagctacaggtcctgaaagggaccggggattggtggctggctagatcactcgtcacagggcgagaaggctacgtgccatccaatttcgtggcgagagttgagagtctcgagatggaacgctggttctttagatctcagggtagaaaggaagctgaacggcaactgttagctcccatcaacaaggccggttcatttctcatccgggaatccgaaactaacaagggcgcgttctctctgagcgtgaaggacgttaccactcagggcgagcttatcaaacattataaaatcagatgtctcgacgagggaggctactatatttcaccccgcattacctttccaagtctgcaggccctggtgcagcattactctaagaagggggacggtctgtgccagaggttaactctcccttgtgtgcgccccgcacctcagaacccatgggcccaggatgagtgggagatcccaagacaatctcttcgcttggtgcgaaagctcggctcaggtcaattcggcgaagtctggatggggtattacaagaataacatgaaggtggctattaaaacactgaaagaggggacaatgtccccagaagcttttctcggggaggccaacgtgatgaaagctctgcaacatgagcgactggttagactctacgccgtggtgactaaagagccaatctacatcgtcaccgagtacatggcccggggctgtcttctggattttctgaagactgacgagggcagtcgtctctccctgcccagactgatcgacatgtccgcacagattgctgagggcatggcttatatagaaaggatgaactcaatccaccgggacctcagagctgcaaacatattggtgtccgaagctttatgttgcaagatcgcagacttcggccttgcccggataattgactccgagtataccgcacaggaaggggctaagtttcccattaaatggacggctcctgaagcaattcattttggcgtgtttaccatcaaggctgacgtgtggtcattcggcgtgcttctgatggaggtggttacatacgggagggtcccgtatcccgggatgagcaatcccgaggtcatccgcaacctcgaacggggataccgaatgcccagacccgacacatgtcctcctgagctttatagaggagtcattgccgagtgttggaggtcacggcctgaggagcgccccacctttgattgcacacccggaagagtcactcgccctttgtgcgcagctagcttcgttgagggatgtaatagcgaccttgcccggtcctctggggtcctatccccatccaaggttttccggactggcaaacgcctgagctcatctaaggcccctgtgttgggcaccccaagagccgggagagtgcccgcatctgccccgtgtgtggatccagccttgccgaggtaccggtcgcaaacggggtccaggggcaggcagcaggggcagccgcaacctcggctgaggtcatccaccgctggcctgttctgtaacaaagtgaccagcgttaggtag

SEQ ID NO: 120280 - DNA, 1518 bp, Artificial Sequence
  derived and/or modified sequence
atgggcctggtgagcagcaagaagccagacaaggagaagcccatcaaggagaaggacaagggccagtggagccccctgaaggtgtctgcccaggacaaggatgccccacccctgccccccctggtggtgttcaaccacctgaccccacctcctccagatgagcacctggatgaggacaagcactttgtggtggccctgtatgactacacagccatgaatgaccgggacctgcagatgctgaagggggagaagctgcaggtgctgaagggcactggagactggtggctggcccggagcctggtgacaggccgggagggctacgtgcccagcaactttgtggcccgggtggagagcctggagatggagcgctggttcttccgcagccagggcaggaaggaggccgagcggcagctgctggcccccatcaacaaggccggcagcttcctgatccgggagagcgagaccaacaagggggccttcagcctgtctgtgaaggatgtgaccacccagggcgagctgatcaagcactacaagatccgctgcctggatgaaggaggctactacatcagcccccgcatcaccttccccagcctgcaggccctggtgcagcactacagcaagaagggagatggcctgtgccagaggctgaccctgccctgtgtgcggcctgccccccagaacccctgggcccaggatgagtgggagatcccccggcagagcctgcggctggtgaggaagctgggcagcggccagtttggagaggtgtggatgggctactacaagaacaacatgaaggtggccatcaagaccctgaaggagggcaccatgagccctgaggccttcctgggggaggccaacgtgatgaaggccctgcagcacgagcggctggtgcggctgtatgctgtggtgaccaaggagcccatctacatcgtgacagagtacatggcccggggctgcctgctggacttcctgaagacagatgagggcagccggctgagcctgccccggctgattgacatgtctgcccagattgctgagggcatggcctacattgaaagaatgaacagcatccaccgggacctgcgggccgccaacatcctggtgtctgaggccctgtgctgcaagattgctgactttggcctggcccgcatcattgattctgagtacacagcccaggagggcgccaagttccccatcaagtggacagcccctgaggccatccactttggagtcttcaccatcaaggcagatgtgtggagctttggagtgctgctgatggaggtggtgacctacggccgggtgccctacccaggcatgagcaaccctgaggtgatccggaacctggagcggggctacaggatgcccaggccagacacctgccccccagagctgtacagaggagtgattgctgagtgctggaggagcaggcctgaggagcggcccacctttgagttcctgcagagcgtgctggaggacttctacacagccacagagcggcagtatgagctgcagccctag

SEQ ID NO: 120281 - DNA, 1773 bp, Artificial Sequence
  derived and/or modified sequence
atgggcctggtgagcagcaagaagccagacaaggagaagcccatcaaggagaaggacaagggccagtggagccccctgaaggtgtctgcccaggacaaggatgccccacccctgccccccctggtggtgttcaaccacctgaccccacctcctccagatgagcacctggatgaggacaagcactttgtggtggccctgtatgactacacagccatgaatgaccgggacctgcagatgctgaagggggagaagctgcaggtgctgaagggcactggagactggtggctggcccggagcctggtgacaggccgggagggctacgtgcccagcaactttgtggcccgggtggagagcctggagatggagcgctggttcttccgcagccagggcaggaaggaggccgagcggcagctgctggcccccatcaacaaggccggcagcttcctgatccgggagagcgagaccaacaagggggccttcagcctgtctgtgaaggatgtgaccacccagggcgagctgatcaagcactacaagatccgctgcctggatgaaggaggctactacatcagcccccgcatcaccttccccagcctgcaggccctggtgcagcactacagcaagaagggagatggcctgtgccagaggctgaccctgccctgtgtgcggcctgccccccagaacccctgggcccaggatgagtgggagatcccccggcagagcctgcggctggtgaggaagctgggcagcggccagtttggagaggtgtggatgggctactacaagaacaacatgaaggtggccatcaagaccctgaaggagggcaccatgagccctgaggccttcctgggggaggccaacgtgatgaaggccctgcagcacgagcggctggtgcggctgtatgctgtggtgaccaaggagcccatctacatcgtgacagagtacatggcccggggctgcctgctggacttcctgaagacagatgagggcagccggctgagcctgccccggctgattgacatgtctgcccagattgctgagggcatggcctacattgaaagaatgaacagcatccaccgggacctgcgggccgccaacatcctggtgtctgaggccctgtgctgcaagattgctgactttggcctggcccgcatcattgattctgagtacacagcccaggagggcgccaagttccccatcaagtggacagcccctgaggccatccactttggagtcttcaccatcaaggcagatgtgtggagctttggagtgctgctgatggaggtggtgacctacggccgggtgccctacccaggcatgagcaaccctgaggtgatccggaacctggagcggggctacaggatgcccaggccagacacctgccccccagagctgtacagaggagtgattgctgagtgctggaggagcaggcctgaggagcggcccacctttgactgcaccccaggccgggtgacccggcccctgtgtgccgccagctttgtggagggctgcaacagcgacctggcccggagcagtggagtgctgagccccagcaaggtgttcagaacaggcaagaggctgagcagcagcaaggcccctgtgctgggcacccccagggctggccgggtgcctgccagcgccccctgtgtggaccctgccctgccccgctaccgcagccagacaggcagccggggccggcagcagggccagccccagccccggctgcggagcagcacagctggcctcttctgcaacaaggtgacctctgtgaggtag

SEQ ID NO: 120282 - DNA, 1518 bp, Artificial Sequence
  derived and/or modified sequence
atgggcctggtgagcagcaagaagcccgacaaggagaagcccatcaaggagaaggacaaagggcagtggtccccccttaaggtgagcgcccaagataaggacgctcctcctcttcctccactcgtggtgtttaatcacctaacccctcctcccccagatgagcatctggacgaagataaacattttgtcgtggctctctatgattacacggctatgaacgatcgggacctgcagatgctaaagggcgagaaactccaggtactcaagggtactggagattggtggctggcacgaagtctggtcacaggacgggaaggttatgtgcccagtaatttcgtggcgcgcgtagagtctctggagatggaacgctggttcttcagatcgcagggcaggaaagaagccgagaggcagttacttgcgcctattaacaaggccggttcatttcttatcagagaatccgaaacaaataaaggcgctttcagcctgagcgtgaaggacgtgacaacccaaggcgagttgattaagcactacaagatacgctgcctggacgagggcgggtattacatttccccccggattactttcccaagcctgcaggcccttgtgcagcactactccaaaaagggcgacggcctgtgtcagcgcctgacactgccttgcgtgaggcctgcaccccaaaatccgtgggcccaggatgagtgggaaatacccaggcagtctctgcgcttagttaggaagctcggtagtggccagtttggggaggtgtggatggggtattacaagaataacatgaaagtggcaattaaaacgctgaaagagggcactatgtccccagaggcatttctaggagaagctaatgtcatgaaagctctccagcatgaaagacttgtgcggctctatgccgtcgtcacaaaagaacccatatacattgtgacagagtatatggctagaggttgcctgctggactttctaaagacagatgaaggaagtcggctaagtctacccagactgatcgatatgtcggcccaaatcgcagaagggatggcttatatcgaacggatgaattctatccaccgagaccttagagcagcaaacatattggtgagtgaggctctttgctgtaaaatcgctgactttgggttagctaggattatcgactctgaatataccgctcaggagggggccaagtttcctattaaatggacggcccccgaggccattcactttggggtattcaccattaaagcagatgtgtggtctttcggcgttctgctcatggaagtcgtgacctatggaagagttccttacccaggaatgtcaaaccccgaagtcatacgtaacttggaacgaggttataggatgccaagaccagacacctgccccccggaactgtacagaggcgtgatcgccgagtgttggagaagcaggcctgaagaaagaccaaccttcgagtttctccaatctgtgttggaagacttttacaccgcaacagagaggcagtatgagctgcagccctag

SEQ ID NO: 120283 - DNA, 1773 bp, Artificial Sequence
  derived and/or modified sequence
atgggcctggtgagcagcaagaagcccgacaaggagaagcccatcaaagaaaaagacaaggggcagtggtctcccctgaaggtcagtgcccaggacaaggatgctcctccattgccccctctggtcgtgtttaatcaccttactcctccgccacccgacgagcacctcgacgaggataagcacttcgttgtggccctatacgattacaccgccatgaatgaccgcgatttacagatgcttaaaggagaaaaactgcaggttctcaaagggaccggggattggtggctggctagaagcttggtaactgggcgggagggatatgtcccttcaaacttcgtggcccgagtggaaagtcttgagatggaacgatggttcttccggtcccagggccggaaggaagctgagaggcagctgttggcccctattaataaggcggggtcttttctaatcagggaatctgagaccaataagggcgcatttagtctctccgtcaaagatgtgactactcaaggcgagttgattaagcactataagatccgatgtctggatgagggcgggtactacattagccccagaattacattcccatctttacaggcgctggtgcagcactactccaagaagggcgacggcttatgtcaacgtttaacccttccatgcgtgaggccggcaccccagaatccgtgggcccaggatgagtgggaaatcccacgtcaaagcctgcgcttggtccgaaagctgggctccgggcagtttggtgaagtttggatgggatactataaaaataacatgaaggtggccatcaaaacgctgaaggagggcaccatgagccctgaggcgtttcttggggaggcaaatgtcatgaaggctctccagcacgaacgacttgtgcggctgtatgccgtggttaccaaggaaccaatctacatagtcacagagtacatggctcgggggtgtttgctggacttccttaaaacggatgaaggatccaggctgtccctcccacggcttattgacatgtcagcacagattgccgaagggatggcgtatattgagagaatgaattctattcatcgagacctacgagccgcaaacattctcgtgtcagaggccctctgctgcaaaatcgctgacttcggtcttgcaaggattattgattcggaatacacggcacaggagggcgccaagtttccaatcaagtggactgccccagaggccatccatttcggtgtgttcacaattaaggctgacgtgtggtccttcggggtgctgctgatggaggttgtaacctacggccgcgtaccatacccggggatgtcaaatcctgaagttattcgtaatctggaaagaggttatcgcatgccccgaccggatacatgcccacccgagctctaccggggcgtgattgctgagtgttggagatcacggcctgaggagagacccacgttcgactgcacacctggcagagttacccgacctctgtgcgcggcctcgttcgtggagggctgcaattcggatcttgccaggtcatcgggcgtgttatccccaagcaaagtgtttcgcactggaaaaaggctctcgtcaagtaaggctcctgtgctgggcaccccaagggccggcagagttcctgctagcgcaccatgcgtagaccccgctctgcccaggtaccggagtcagaccggctctcgcgggcggcaacagggacaaccccagccaagactcagaagcagcacggctggcctcttttgtaataaagtcactagcgtccgttag

SEQ ID NO: 120284 - DNA, 1518 bp, Artificial Sequence
  derived and/or modified sequence
atgggactggtatcctctaagaagcccgacaaagaaaaaccgattaaggaaaaagacaagggacagtggagtccactaaaagtttctgcgcaggacaaggatgctccacctttgcccccattggtcgtattcaatcatctgacccccccacctccagacgagcacctggatgaggacaagcacttcgtggtggctttgtacgactacactgcaatgaatgatagagacctgcagatgctgaagggcgaaaagcttcaagtgcttaagggcactggcgattggtggttggctcgttcactggtgaccggaagggaaggatacgttccaagcaactttgttgcgagagtggaatcactggaaatggaaaggtggttttttaggagtcagggccgtaaggaggcggaaagacagctcctagccccaatcaacaaggccggaagctttcttattcgcgagtcagagaccaataagggcgcattttccctcagtgttaaggacgtgactacacagggagaactgattaagcactacaagattcgatgcctagacgaaggaggatactatatcagtccccgaattaccttcccttccctgcaagccctcgtgcagcactatagcaagaaaggggatggcctgtgccagcggctgaccttgccatgcgtcagacctgcccctcagaacccatgggcccaggatgaatgggaaattcctagacagagcctgcgcctagttcgtaagctcggcagcggtcagttcggcgaggtctggatggggtactataaaaacaacatgaaggtggccataaagacgttgaaggagggcactatgagtccagaggcttttctgggagaggctaacgtcatgaaggcactgcagcacgaaaggcttgtgcgcctttacgctgttgtgaccaaggaaccaatctacatcgtgacagaatatatggcacgcggatgcctgctcgattttcttaaaactgatgagggcagcaggctgtccttgcctcggctcattgacatgtccgctcagatagcggagggcatggcctatattgaaaggatgaattctatccatagggatctgcgggcagccaatattctggtgtcggaagcgctgtgctgcaagatcgcagacttcgggctcgccagaattatcgattctgagtataccgcccaagaaggggcaaaatttcccatcaagtggaccgcacctgaggcgattcacttcggagtgtttactataaaggccgatgtttggtccttcggcgtcctcttgatggaggtggtgacatacggtcgggtcccatacccagggatgtcaaaccccgaggtgattagaaacctggagagagggtatcgcatgccacgaccagacacgtgtcctcccgagctctatcggggtgtgattgctgaatgctggagatcccgcccagaggagcggcctacgttcgagttcctccaaagcgttctcgaagacttctacacagcaacggagcggcagtatgagctacaaccatag

SEQ ID NO: 120285 - DNA, 1773 bp, Artificial Sequence
  derived and/or modified sequence
atgggactggttagcagcaaaaagcctgataaggagaaacccatcaaggagaaggataagggacagtggtctccactaaaagtcagtgctcaggacaaggacgccccaccgttgcccccactcgtggtttttaaccatctgacaccaccccctccagatgaacacctagacgaagacaaacactttgtcgtagccctctacgactatactgccatgaatgaccgggacctgcagatgttgaagggggagaagctgcaggttctaaaaggcacaggggattggtggttggctcgatccctggttactggtagagaagggtacgtgccgtccaatttcgtggcgagagtggagtcacttgaaatggagagatggttttttagaagccagggtaggaaagaggctgaaaggcagctgttagctcctataaataaggccggttctttcctgattagggagagtgagacaaataagggtgcattcagtctatccgtcaaggatgtaactacacaaggtgagctgatcaagcattacaagatcagatgcctagacgaggggggatattacatttcacccaggattacattcccgtctctgcaggctctggttcagcattatagcaagaaaggagacgggttgtgtcagagattaacactcccttgcgtccgcccagctccccagaacccctgggcccaagacgagtgggaaattccaaggcagtctctgcgcctcgtcaggaaactggggagcggacagtttggggaagtctggatgggatactataagaataatatgaaagtggccatcaagaccctgaaggagggtaccatgagccctgaagcttttctgggtgaggccaacgtaatgaaagctttgcagcacgagcgcctggtgcggctgtatgcagtggttacaaaagagccaatctatattgtcacggaatacatggcgcgaggttgcctgctggatttcctcaaaacggatgaaggcagtcgcctaagcttgcccaggctaatcgacatgtcagcccaaatcgctgaagggatggcttacattgaaagaatgaatagcatccacagagatctgcgagccgcaaatatccttgtgtccgaggcgctgtgctgtaaaattgcagactttggactggcgcgtatcattgattctgagtacacagcccaggagggggcaaagttccctatcaaatggaccgcccctgaggccatccacttcggggtgtttactataaaagccgatgtctggtcatttggggtgctcctgatggaagttgttacttatggcagagttccctaccccggtatgtccaatcctgaggtgataaggaatctggagcgcggataccgaatgcctagacccgacacctgcccccctgagctctatcgaggcgttatcgctgaatgctggagaagtcgacccgaagagagacccacctttgactgcacacccggaagagtgacccgacctctctgcgcagcttcatttgttgagggctgcaactccgatttagcccgatcctctggagtgttatctccatcaaaagtgttccgaaccggcaagcggctctctagcagcaaggcccctgtgctcggcacacctcgggcagggagagtccctgcgagtgcgccttgtgttgaccccgctctccccagatacaggtcacagactggaagccgcggacgacaacagggacagccacaacccagactgcggagttcaacagccggactcttttgtaataaggtaaccagcgtgcgatag

SEQ ID NO: 120286 - DNA, 2606 bp, Artificial Sequence
  derived and/or modified sequence
ctgccctggtgcacacagatggcacatggcagagcccaagccctctccatgagatctgcagcgtttgtccacacggcagggcaaattaccttgtagagtcagcatggaggtttgctaactctgccggacttggtgcagaaaaaataccagccgtgctgttaaaccaaaaccccaggagaaaactttctggtgacagaagggcattgtgacccacgttgcccagggccagggacagggcagctgctcatggtccttcctcacgagttttcctggagcagagggatacccccaaacccagggagcccacaggagcttcagaagggctcggctggagggcggggcccctgttgcacttgctcactggggactggggaggctctgatcgcagaccgggggtgctgccacctctgtctgctgccggcagaaagccacaagccatgaaaactgattgagatgagaagaattcatctgggactggcttttgctttaggatggtgttggaagttgctcgttgtcgctaggagcctgctccactgtaagggtgtcaggatctgaagagctatggtgaaacaccactgaagcattgccaaggatggggctggtaagtagcaaaaagccggacaaggaaaagccgatcaaagagaaggacaagggccaatggagccccctgaaggtcagcgcccaagacaaggacgccccgccactgccgcccctggttgtcttcaaccaccttactcctccaccgcccgatgaacacctggatgaagacaagcatttcgtggtggctctgtatgactacaccgctatgaatgatcgggacctgcagatgctgaagggggagaagctacaggtcctgaagggaactggagactggtggctggccaggtcactcgtcacaggaagagaaggctatgtgcccagtaactttgtggcccgagtggagagcctggaaatggaaaggtggttctttagatcacagggtcggaaggaggctgagaggcagcttcttgctccaatcaacaaggccggctcctttcttatcagagagagtgaaaccaacaaaggtgccttctccctgtctgtgaaggatgtcaccacccagggggagctgatcaagcactataagatccgctgcctggatgaagggggctactacatctccccccggatcaccttcccctcgctccaggccctggtgcagcactattctaagaagggggatggtctatgccagaggctgaccctgccctgtgtgcgcccggccccgcagaatccctgggcccaggatgaatgggagatcccccggcagtctctcaggctggtcaggaaactcgggtctggacaattcggcgaagtctggatgggttactacaaaaacaacatgaaggtggccattaagacgctgaaggagggaaccatgtctccagaagcctttctgggtgaggccaacgtgatgaaggctctgcagcacgagcggctggtccgactctacgcagtggtcaccaaggagcccatctacattgtcaccgagtacatggccagaggatgcctgctggatttcctgaagacagatgaagggagcagattgtcactcccaaggctgattgacatgtcggcgcagattgctgaagggatggcatacattgagcgcatgaattccatccaccgcgacctgcgggcggccaacatcctggtgtctgaggccttgtgctgcaaaattgctgattttggcttggctcgaatcatcgacagtgaatacacggcccaagagggggccaagttccccatcaagtggacagccccggaagccatccacttcggggtcttcaccatcaaagcagacgtgtggtcgtttggagtcctcctgatggaagttgtcacttatgggcgggtgccatacccagggatgagcaaccccgaggtcatccgcaacctggagcgcggctaccgcatgccgcgccccgacacctgcccgcccgagctgtaccgcggcgtcatcgccgagtgctggcgcagccggcccgaggagcggcccaccttcgagttcctgcagtcggtgctggaggacttctacacggccaccgagcggcagtacgagctgcagccctagccggccgcgcccgcctgcgccccgtgcccacctctgcgcggacgaccccgacttccgtgccatcccagacgggccgcgaaggcggggtgtcgcctgtgcccttttctcagacccggaatccagtgggcagaggcagcttcgcagggggtccccggacggactccttcaccgactgcacccccgggcgagttacgcggcctctctgtgccgcttcatttgtagagggctgtaacagtgacctcgcacggtcatccggagtactaagccccagtaaggtgttcaggactggtaagcgactgtcatcaagtaaggcccccgtgctgggcaccccccgtgctggccgcgtccccgcctctgcgccctgcgtggaccccgccctgccccgctacagaagccagactgggtcccgcggacgccagcaggggcagccccagcctaggctgcgctccagcactgcggggcttttctgcaataaagtcacgagcgttcgagctgt

SEQ ID NO: 120287 - DNA, 2351 bp, Artificial Sequence
  derived and/or modified sequence
cacacagatggcacatggcagagcccaagccctctccatgagatctgcagcgtttgtccacacggcagggcaaattaccttgtagagtcagcatggaggtttgctaactctgccggacttggtgcagaaaaaataccagccgtgctgttaaaccaaaaccccaggagaaaactttctggtgacagaagggcattgtgacccacgttgcccagggccagggacagggcagctgctcatggtccttcctcacgagttttcctggagcagagggatacccccaaacccagggagcccacaggagcttcagaagggctcggctggagggcggggcccctgttgcacttgctcactggggactggggaggctctgatcgcagaccgggggtgctgccacctctgtctgctgccggcagaaagccacaagccatgaaaactgattgagatgagaagaattcatctgggactggcttttgctttaggatggtgttggaagttgctcgttgtcgctaggagcctgctccactgtaagggtgtcaggatctgaagagctatggtgaaacaccactgaagcattgccaaggatggggctggtaagtagcaaaaagccggacaaggaaaagccgatcaaagagaaggacaagggccaatggagccccctgaaggtcagcgcccaagacaaggacgccccgccactgccgcccctggttgtcttcaaccaccttactcctccaccgcccgatgaacacctggatgaagacaagcatttcgtggtggctctgtatgactacaccgctatgaatgatcgggacctgcagatgctgaagggggagaagctacaggtcctgaagggaactggagactggtggctggccaggtcactcgtcacaggaagagaaggctatgtgcccagtaactttgtggcccgagtggagagcctggaaatggaaaggtggttctttagatcacagggtcggaaggaggctgagaggcagcttcttgctccaatcaacaaggccggctcctttcttatcagagagagtgaaaccaacaaaggtgccttctccctgtctgtgaaggatgtcaccacccagggggagctgatcaagcactataagatccgctgcctggatgaagggggctactacatctccccccggatcaccttcccctcgctccaggccctggtgcagcactattctaagaagggggatggtctatgccagaggctgaccctgccctgtgtgcgcccggccccgcagaatccctgggcccaggatgaatgggagatcccccggcagtctctcaggctggtcaggaaactcgggtctggacaattcggcgaagtctggatgggttactacaaaaacaacatgaaggtggccattaagacgctgaaggagggaaccatgtctccagaagcctttctgggtgaggccaacgtgatgaaggctctgcagcacgagcggctggtccgactctacgcagtggtcaccaaggagcccatctacattgtcaccgagtacatggccagaggatgcctgctggatttcctgaagacagatgaagggagcagattgtcactcccaaggctgattgacatgtcggcgcagattgctgaagggatggcatacattgagcgcatgaattccatccaccgcgacctgcgggcggccaacatcctggtgtctgaggccttgtgctgcaaaattgctgattttggcttggctcgaatcatcgacagtgaatacacggcccaagagggggccaagttccccatcaagtggacagccccggaagccatccacttcggggtcttcaccatcaaagcagacgtgtggtcgtttggagtcctcctgatggaagttgtcacttatgggcgggtgccatacccagggatgagcaaccccgaggtcatccgcaacctggagcgcggctaccgcatgccgcgccccgacacctgcccgcccgagctgtaccgcggcgtcatcgccgagtgctggcgcagccggcccgaggagcggcccaccttcgactgcacccccgggcgagttacgcggcctctctgtgccgcttcatttgtagagggctgtaacagtgacctcgcacggtcatccggagtactaagccccagtaaggtgttcaggactggtaagcgactgtcatcaagtaaggcccccgtgctgggcaccccccgtgctggccgcgtccccgcctctgcgccctgcgtggaccccgccctgccccgctacagaagccagactgggtcccgcggacgccagcaggggcagccccagcctaggctgcgctccagcactgcggggcttttctgcaataaagtcacgagcgttcga

SEQ ID NO: 120288 - DNA, 1518 bp, Artificial Sequence
  derived and/or modified sequence
atgggcctggtgagcagcaagaagcccgacaaggagaagcccatcaaggagaaggacaagggccagtggagccccctgaaggtgagcgcccaggacaaggacgccccccccctgccccccctggtggtgttcaaccacctgaccccccccccccccgacgagcacctggacgaggacaagcacttcgtggtggccctgtacgactacaccgccatgaacgacagagacctgcagatgctgaagggcgagaagctgcaggtgctgaagggcaccggcgactggtggctggccagaagcctggtgaccggcagagagggctacgtgcccagcaacttcgtggccagagtggagagcctggagatggagagatggttcttcagaagccagggcagaaaggaggccgagagacagctgctggcccccatcaacaaggccggcagcttcctgatcagagagagcgagaccaacaagggcgccttcagcctgagcgtgaaggacgtgaccacccagggcgagctgatcaagcactacaagatcagatgcctggacgagggcggctactacatcagccccagaatcaccttccccagcctgcaggccctggtgcagcactacagcaagaagggcgacggcctgtgccagagactgaccctgccctgcgtgagacccgccccccagaacccctgggcccaggacgagtgggagatccccagacagagcctgagactggtgagaaagctgggcagcggccagttcggcgaggtgtggatgggctactacaagaacaacatgaaggtggccatcaagaccctgaaggagggcaccatgagccccgaggccttcctgggcgaggccaacgtgatgaaggccctgcagcacgagagactggtgagactgtacgccgtggtgaccaaggagcccatctacatcgtgaccgagtacatggccagaggctgcctgctggacttcctgaagaccgacgagggcagcagactgagcctgcccagactgatcgacatgagcgcccagatcgccgagggcatggcctacatcgagagaatgaacagcatccacagagacctgagagccgccaacatcctggtgagcgaggccctgtgctgcaagatcgccgacttcggcctggccagaatcatcgacagcgagtacaccgcccaggagggcgccaagttccccatcaagtggaccgcccccgaggccatccacttcggcgtgttcaccatcaaggccgacgtgtggagcttcggcgtgctgctgatggaggtggtgacctacggcagagtgccctaccccggcatgagcaaccccgaggtgatcagaaacctggagagaggctacagaatgcccagacccgacacctgcccccccgagctgtacagaggcgtgatcgccgagtgctggagaagcagacccgaggagagacccaccttcgagttcctgcagagcgtgctggaggacttctacaccgccaccgagagacagtacgagctgcagccctag

SEQ ID NO: 120289 - DNA, 1773 bp, Artificial Sequence
  derived and/or modified sequence
atgggcctggtgagcagcaagaagcccgacaaggagaagcccatcaaggagaaggacaagggccagtggagccccctgaaggtgagcgcccaggacaaggacgccccccccctgccccccctggtggtgttcaaccacctgaccccccccccccccgacgagcacctggacgaggacaagcacttcgtggtggccctgtacgactacaccgccatgaacgacagagacctgcagatgctgaagggcgagaagctgcaggtgctgaagggcaccggcgactggtggctggccagaagcctggtgaccggcagagagggctacgtgcccagcaacttcgtggccagagtggagagcctggagatggagagatggttcttcagaagccagggcagaaaggaggccgagagacagctgctggcccccatcaacaaggccggcagcttcctgatcagagagagcgagaccaacaagggcgccttcagcctgagcgtgaaggacgtgaccacccagggcgagctgatcaagcactacaagatcagatgcctggacgagggcggctactacatcagccccagaatcaccttccccagcctgcaggccctggtgcagcactacagcaagaagggcgacggcctgtgccagagactgaccctgccctgcgtgagacccgccccccagaacccctgggcccaggacgagtgggagatccccagacagagcctgagactggtgagaaagctgggcagcggccagttcggcgaggtgtggatgggctactacaagaacaacatgaaggtggccatcaagaccctgaaggagggcaccatgagccccgaggccttcctgggcgaggccaacgtgatgaaggccctgcagcacgagagactggtgagactgtacgccgtggtgaccaaggagcccatctacatcgtgaccgagtacatggccagaggctgcctgctggacttcctgaagaccgacgagggcagcagactgagcctgcccagactgatcgacatgagcgcccagatcgccgagggcatggcctacatcgagagaatgaacagcatccacagagacctgagagccgccaacatcctggtgagcgaggccctgtgctgcaagatcgccgacttcggcctggccagaatcatcgacagcgagtacaccgcccaggagggcgccaagttccccatcaagtggaccgcccccgaggccatccacttcggcgtgttcaccatcaaggccgacgtgtggagcttcggcgtgctgctgatggaggtggtgacctacggcagagtgccctaccccggcatgagcaaccccgaggtgatcagaaacctggagagaggctacagaatgcccagacccgacacctgcccccccgagctgtacagaggcgtgatcgccgagtgctggagaagcagacccgaggagagacccaccttcgactgcacccccggcagagtgaccagacccctgtgcgccgccagcttcgtggagggctgcaacagcgacctggccagaagcagcggcgtgctgagccccagcaaggtgttcagaaccggcaagagactgagcagcagcaaggcccccgtgctgggcacccccagagccggcagagtgcccgccagcgccccctgcgtggaccccgccctgcccagatacagaagccagaccggcagcagaggcagacagcagggccagccccagcccagactgagaagcagcaccgccggcctgttctgcaacaaggtgaccagcgtgagatag

SEQ ID NO: 120290 - protein, 372 aa, Artificial Sequence
  derived and/or modified sequence
MNYPLTLEMDLENLEDLFWELDRLDNYNDTSLVENHLCPATEGPLMASFKAVFVPVAYSLIFLLGVIGNVLVLVILERHRQTRSSTETFLFHLAVADLLLVFILPFAVAEGSVGWVLGTFLCKTVIALHKVNFYCSSLLLACIAVDRYLAIVHAVHAYRHRRLLSIHITCGTIWLVGFLLALPEILFAKVSQGHHNNSLPRCTFSQENQAETHAWFTSRFLYHVAGFLLPMLVMGWCYVGVVHRLRQAQRRPQRQKAVRVAILVTSIFFLCWSPYHIVIFLDTLARLKAVDNTCKLNGSLPVAITMCEFLGLAHCCLNPMLYTFAGVKFRSDLSRLLTKLGCTGPASLCQLFPSWRRSSLSESENATSLTTF

SEQ ID NO: 120291 - DNA, 1119 bp, Artificial Sequence
  derived and/or modified sequence
atgaactacccactgactcttgagatggacctcgaaaacttagaggacttgttctgggaactcgaccgccttgacaattataacgacaccagtttggtggagaatcacttgtgtcctgccaccgagggtcctctgatggcaagtttcaaggctgtcttcgtccctgttgcctattccttgatcttccttctcggagtcatcggaaatgtactggtcctcgttatcctggagagacaccggcagacgagatcaagtactgagacgttcctcttccacctggcagtggctgacttgctactggtgttcattctgcccttcgccgtagccgaagggtccgtcggctgggtgctgggcacatttctctgtaagactgtgatcgccctccataaagtgaacttctattgctcttcgctgctgctcgcctgcatcgcggtggaccgctaccttgcaatcgtgcatgccgtgcatgcatatcgccatcgaagattactgagcattcatatcacttgcggcacgatttggctggtgggctttttgctggccctgccagaaatcctgttcgctaaggtctcacagggacaccacaataatagccttccccggtgcacattttcacaagaaaaccaggcggagacacacgcttggttcacaagtcgatttttatatcatgtcgcaggctttctcctccctatgctcgtgatgggctggtgctatgtaggtgtggtccatcgtctgcggcaggctcaacgacggccacaacgacagaaggcagttagggtggcgatactcgtcacttctattttttttctatgctggtccccatatcacatagtgatttttctggacaccctggcccgacttaaagctgtggataacacctgtaagcttaacggctccttacccgtggcaattaccatgtgtgagttcttgggactggcccattgctgtctcaaccctatgctgtacacctttgctggggtgaagtttcgatcagaccttagtcggctcctcactaaattaggttgcaccggccccgcttctctgtgtcagcttttcccctcatggcggaggtcttctttatcagagtcagagaacgcaaccagtctaacaactttctag

SEQ ID NO: 120292 - DNA, 1119 bp, Artificial Sequence
  derived and/or modified sequence
atgaactaccccctgaccctggagatggacctggagaacctggaggacctcttctgggagctggaccggctggacaactacaatgacaccagcctggtggagaaccacctgtgcccagccacagagggccccctgatggccagcttcaaggctgtgtttgtgcctgtggcctacagcctcatcttcctgctgggcgtgattggaaatgtgctggtgctggtgatcctggagcggcaccggcagaccaggagcagcacagagaccttcctgttccacctggccgtggccgacctgctgctggtgttcatcctgccctttgctgtggccgagggctctgtgggctgggtgctgggcaccttcctgtgcaagacagtcatcgccctgcacaaggtgaacttctactgcagcagcctgctgctggcctgcatcgctgtggaccgctacctggccatcgtgcatgctgtgcacgcctaccgccaccggcggctgctgagcatccacatcacctgtggcaccatctggctggtgggcttcctgctggccctgcctgagatcctgtttgccaaggtgtcccagggccaccacaacaacagcctgccccgctgcaccttcagccaggagaaccaggccgagacccacgcctggttcaccagccgcttcctgtaccacgtggccggcttcctgctgcccatgctggtgatgggctggtgctacgtgggcgtggtgcaccggctgcggcaggcccagaggcggccccagaggcagaaggctgtgcgggtggccatcctggtgaccagcatcttcttcctgtgctggagcccctaccacatcgtcatcttcctggacaccctggcccggctgaaggctgtggacaacacctgcaagctgaatggcagcctgcctgtggccatcaccatgtgtgagttcctgggcctggcccactgctgcctgaaccccatgctgtacacctttgctggggtgaagttcagaagtgacctgagccggctgctgaccaagctgggctgcaccggccctgccagcctgtgccagctgttccccagctggaggaggagcagcctgtctgagagtgaaaatgccaccagcctgaccaccttctag

SEQ ID NO: 120293 - DNA, 1119 bp, Artificial Sequence
  derived and/or modified sequence
atgaactaccccctgaccctggagatggacctggagaacctggaggatctgttctgggagttagacaggctggataactataatgacaccagtctggtcgagaaccacctctgtcccgccactgagggccccttgatggctagctttaaggcggtcttcgttcctgtcgcctattctcttatcttcctgctgggggtgattggaaacgtgctggtgctggttatcctggagaggcatcggcaaaccaggtcctccacggagaccttcttgtttcatctggccgtggctgacctactcttggtgttcatcctccctttcgccgtcgctgaaggaagcgtcggatgggtgctaggtacctttctatgtaaaaccgtgatcgctttgcacaaagtaaatttctattgttccagcttactcttagcttgcattgctgtcgataggtacctagcgattgttcatgctgtgcatgcctatagacacaggcgcctccttagtatccatatcacatgtggtacaatatggctcgtcggttttttactggccctgccggagatcctgtttgccaaagtgtcgcagggtcatcacaataattccctgccaagatgtacctttagtcaggaaaaccaggcagagacgcacgcgtggttcaccagccgctttttgtaccatgtggccggatttcttctccccatgttggtgatggggtggtgctacgtcggcgtggttcaccgcctcaggcaagcccagcggcgaccgcagagacagaaggccgtgcgggttgccattcttgtcactagtatcttttttctctgttggtccccttaccatatcgtgatcttccttgacacactcgctcgtctgaaagccgtcgacaacacgtgtaaacttaatgggtctctgcctgtagcaattacaatgtgtgagttcctgggtctggcccactgctgtttgaaccccatgctgtacacttttgctggggtgaaattccgctcggatttaagtaggctgctcactaaactcggctgcactggccccgcctctctatgccagttgttccctagctggcgaaggtcgagcctgagtgagtccgaaaacgcaacttccctcactacgttttag

SEQ ID NO: 120294 - DNA, 1119 bp, Artificial Sequence
  derived and/or modified sequence
atgaattatccccttacgcttgagatggacctcgagaatctagaggatctgttttgggagctcgatcgcttggataactacaacgatacatcactggtggaaaaccacctgtgccctgccacggagggacccctcatggctagcttcaaagctgtttttgtaccggtggcctactctctgatattcctgctgggcgtcatcggcaacgtactcgtgttagtgatactcgagcgacatcgtcaaacgcgaagcagcacagagacgttcctgtttcacctggcggttgccgacctgctgctggtgtttattctcccctttgcagttgccgaaggctctgtgggttgggtcctgggcacctttttatgtaagaccgtaatcgctctgcacaaagtgaacttttattgtagtagcttgttgctcgcctgcatagcggtagatcgatacttggccatagtacacgctgttcacgcctaccgacatcggcgactgctgagcatccatattacctgcggcacgatttggctggtgggcttccttctggctctgcccgaaatcctcttcgccaaggtctctcagggccatcacaataatagtctgccacggtgcactttttcacaggaaaaccaggccgagacccacgcgtggttcacctcaagatttttataccacgtggcgggattcttacttccaatgctcgtgatggggtggtgctacgttggagtcgtccaccggctccgtcaggcacagaggcgaccacaaagacagaaggcagtgcgggtggcaattctggtgacatcgatctttttcctgtgctggtctccttaccacatcgtcatcttcttggatactctcgctcggctcaaggccgtcgacaacacctgcaaattgaatggtagtcttcccgttgcaattacgatgtgcgagtttctgggtttagctcattgctgcctcaatcccatgctttatacatttgctggcgtgaaattcaggagcgatctgagcaggctgttaactaagttgggttgcaccgggccagcatctttgtgtcagttatttccctcgtggagaagaagtagtctgagcgaatctgagaacgctactagcctgaccaccttctag

SEQ ID NO: 120295 - DNA, 4431 bp, Artificial Sequence
  derived and/or modified sequence
aaaaaaaaaaagtgatgagttgtgaggcaggtcgcggccctactgcctcaggagacgatgcgcagctcatttgcttaaatttgcagctgacggctgccacctctctagaggcacctggcggggagcctctcaacataagacagtgaccagtctggtgactcacagccggcacagccatgaactacccgctaacgctggaaatggacctcgagaacctggaggacctgttctgggaactggacagattggacaactataacgacacctccctggtggaaaatcatctctgccctgccacagaggggcccctcatggcctccttcaaggccgtgttcgtgcccgtggcctacagcctcatcttcctcctgggcgtgatcggcaacgtcctggtgctggtgatcctggagcggcaccggcagacacgcagttccacggagaccttcctgttccacctggccgtggccgacctcctgctggtcttcatcttgccctttgccgtggccgagggctctgtgggctgggtcctggggaccttcctctgcaaaactgtgattgccctgcacaaagtcaacttctactgcagcagcctgctcctggcctgcatcgccgtggaccgctacctggccattgtccacgccgtccatgcctaccgccaccgccgcctcctctccatccacatcacctgtgggaccatctggctggtgggcttcctccttgccttgccagagattctcttcgccaaagtcagccaaggccatcacaacaactccctgccacgttgcaccttctcccaagagaaccaagcagaaacgcatgcctggttcacctcccgattcctctaccatgtggcgggattcctgctgcccatgctggtgatgggctggtgctacgtgggggtagtgcacaggttgcgccaggcccagcggcgccctcagcggcagaaggcagtcagggtggccatcctggtgacaagcatcttcttcctctgctggtcaccctaccacatcgtcatcttcctggacaccctggcgaggctgaaggccgtggacaatacctgcaagctgaatggctctctccccgtggccatcaccatgtgtgagttcctgggcctggcccactgctgcctcaaccccatgctctacactttcgccggcgtgaagttccgcagtgacctgtcgcggctcctgacgaagctgggctgtaccggccctgcctccctgtgccagctcttccctagctggcgcaggagcagtctctctgagtcagagaatgccacctctctcaccacgttctaggtcccagtgtccccttttattgctgcttttccttggggcaggcagtgatgctggatgctccttccaacaggagctgggatcctaagggctcaccgtggctaagagtgtcctaggagtatcctcatttggggtagctagaggaaccaacccccatttctagaacatccctgccagctcttctgccggccctggggctaggctggagcccagggagcggaaagcagctcaaaggcacagtgaaggctgtccttacccatctgcacccccctgggctgagagaacctcacgcacctcccatcctaatcatccaatgctcaagaaacaacttctacttctgcccttgccaacggagagcgcctgcccctcccagaacacactccatcagcttaggggctgctgacctccacagcttcccctctctcctcctgcccacctgtcaaacaaagccagaagctgagcaccaggggatgagtggaggttaaggctgaggaaaggccagctggcagcagagtgtggccttcggacaactcagtccctaaaaacacagacattctgccaggcccccaagcctgcagtcatcttgaccaagcaggaagctcagactggttgagttcaggtagctgcccctggctctgaccgaaacagcgctgggtccaccccatgtcaccggatcctgggtggtctgcaggcagggctgactctaggtgcccttggaggccagccagtgacctgaggaagcgtgaaggccgagaagcaagaaagaaacccgacagagggaagaaaagagctttcttcccgaaccccaaggagggagatggatcaatcaaacccggcggtcccctccgccaggcgagatggggtggggtggagaactcctagggtggctgggtccaggggatgggaggttgtgggcattgatggggaaggaggctggcttgtcccctcctcactcccttcccataagctatagacccgaggaaactcagagtcggaacggagaaaggtggactggaaggggcccgtgggagtcatctcaaccatcccctccgtggcatcaccttaggcagggaagtgtaagaaacacactgaggcagggaagtccccaggccccaggaagccgtgccctgcccccgtgaggatgtcactcagatggaaccgcaggaagctgctccgtgcttgtttgctcacctggggtgtgggaggcccgtccggcagttctgggtgctccctaccacctccccagcctttgatcaggtggggagtcagggacccctgcccttgtcccactcaagccaagcagccaagctccttgggaggccccactggggaaataacagctgtggctcacgtgagagtgtcttcacggcaggacaacgaggaagccctaagacgtcccttttttctctgagtatctcctcgcaagctgggtaatcgatgggggagtctgaagcagatgcaaagaggcaagaggctggattttgaattttctttttaataaaaaggcacctataaaacaggtcaatacagtacaggcagcacagagacccccggaacaagcctaaaaattgtttcaaaataaaaaccaagaagatgtcttcacatattgtatttatatatttatatttatatatatatttatataatggtacaaaatggctgggggtgtggccatggatggagggaagagtaggctggcctgtggcgtgggtgggaggagaggggacggagagggcactcggcccgctgcaatctgacccctctctcctcagggcaggaaacacagagtcagacagtttgggggggtcttgggccaggggtggagggctcaagggcacagggcccaggctgaggcagggcgggcaaagcgcctggcaggatgaagggcaagtggccccccaaacacagaggccctggccatggaccctgggaggtgaccggggtgagtcaggggcctgttgtcagccccagaggaagcgctggacctggccgatggtgggccgagaggacagcaccaggctgggagaagtggggcgagttccctttgtattacagctgccagtgcaagaccaggccctccaggccaggaaggctagggacgggtcctggtagaagacaccctgtctagaatggcccttggtcctggaggtggggcgcaaaaggcctcagccagggaactgccctgccacctcccgaggcaggaaaggaagtgagaaaaggagaagtttttttactcctggggccaaagtagggggacaaacacccagtcgtatatggcttcagctctgaccaaaggcggatagggagctctcctgggtaggagcagggagccaagggggaggcagtggctgtgcctgggtgggcacagacagatctggtacatggccctgagccctgggcagagggacaaccttgccggtgagtgggcaggcagagaggaggcggcaggatgctgtttccccgattccatcctcagggagtggagactggaggggaggtgcactgactcagatgaactgttctcccccttctttgataagaagtaggtggcagcagcctctggaaaagtcagggccctggaggttacctggcccagggctactacagccacaggccccagtggcaccatgccaccccttccatggctccactcaagggggccacacagccaccgcctcttcctcctttccttcatcccaaactgggacaaaagacttcaagttctggctaagatgtagcagcagcggatgcccgggcatccaaagtggaaagccagggccccgtgtcaccggtgtgggcaaacacacatgcacgtgcacacatgttctccctgaatcactcagcagcagacaggctgccgccctgggggtctcagccctgctagggctcaccaggtggaagcctaggtggtctgacctcagtttaggagtgggtcatttacgtcatcttaccatttggggacgagacaggaatggtatcccttagggacccagagacactgcaaacagtgggtggccatgtagggctgcatgtccctgggtccaggggaatggagggagcaataacttgaagaaggggggaagggtttcttttatccttttttttttgtgtgacttctatcaaaacacagaaatacagc

SEQ ID NO: 120296 - DNA, 1119 bp, Artificial Sequence
  derived and/or modified sequence
atgaactaccccctgaccctggagatggacctggagaacctggaggacctgttctgggagctggacagactggacaactacaacgacaccagcctggtggagaaccacctgtgccccgccaccgagggccccctgatggccagcttcaaggccgtgttcgtgcccgtggcctacagcctgatcttcctgctgggcgtgatcggcaacgtgctggtgctggtgatcctggagagacacagacagaccagaagcagcaccgagaccttcctgttccacctggccgtggccgacctgctgctggtgttcatcctgcccttcgccgtggccgagggcagcgtgggctgggtgctgggcaccttcctgtgcaagaccgtgatcgccctgcacaaggtgaacttctactgcagcagcctgctgctggcctgcatcgccgtggacagatacctggccatcgtgcacgccgtgcacgcctacagacacagaagactgctgagcatccacatcacctgcggcaccatctggctggtgggcttcctgctggccctgcccgagatcctgttcgccaaggtgagccagggccaccacaacaacagcctgcccagatgcaccttcagccaggagaaccaggccgagacccacgcctggttcaccagcagattcctgtaccacgtggccggcttcctgctgcccatgctggtgatgggctggtgctacgtgggcgtggtgcacagactgagacaggcccagagaagaccccagagacagaaggccgtgagagtggccatcctggtgaccagcatcttcttcctgtgctggagcccctaccacatcgtgatcttcctggacaccctggccagactgaaggccgtggacaacacctgcaagctgaacggcagcctgcccgtggccatcaccatgtgcgagttcctgggcctggcccactgctgcctgaaccccatgctgtacaccttcgccggcgtgaagttcagaagcgacctgagcagactgctgaccaagctgggctgcaccggccccgccagcctgtgccagctgttccccagctggagaagaagcagcctgagcgagagcgagaacgccaccagcctgaccaccttctag

SEQ ID NO: 120297 - protein, 994 aa, Artificial Sequence
  derived and/or modified sequence
MRRRPPSRGGRGAARARETRRQPRHRSGRRMAEAISCTLNCSCQSFKPGKINHRQCDQCKHGWVAHALSKLRIPPMYPTSQVEIVQSNVVFDISSLMLYGTQAIPVRLKILLDRLFSVLKQDEVLQILHALDWTLQDYIRGYVLQDASGKVLDHWSIMTSEEEVATLQQFLRFGETKSIVELMAIQEKEEQSIIIPPSTANVDIRAFIESCSHRSSSLPTPVDKGNPSSIHPFENLISNMTFMLPFQFFNPLPPALIGSLPEQYMLEQGHDQSQDPKQEVHGPFPDSSFLTSSSTPFQVEKDQCLNCPDAITKKEDSTHLSDSSSYNIVTKFERTQLSPEAKVKPERNSLGTKKGRVFCTACEKTFYDKGTLKIHYNAVHLKIKHKCTIEGCNMVFSSLRSRNRHSANPNPRLHMPMNRNNRDKDLRNSLNLASSENYKCPGFTVTSPDCRPPPSYPGSGEDSKGQPAFPNIGQNGVLFPNLKTVQPVLPFYRSPATPAEVANTPGILPSLPLLSSSIPEQLISNEMPFDALPKKKSRKSSMPIKIEKEAVEIANEKRHNLSSDEDMPLQVVSEDEQEACSPQSHRVSEEQHVQSGGLGKPFPEGERPCHRESVIESSGAISQTPEQATHNSERETEQTPALIMVPREVEDGGHEHYFTPGMEPQVPFSDYMELQQRLLAGGLFSALSNRGMAFPCLEDSKELEHVGQHALARQIEENRFQCDICKKTFKNACSVKIHHKNMHVKEMHTCTVEGCNATFPSRRSRDRHSSNLNLHQKALSQEALESSEDHFRAAYLLKDVAKEAYQDVAFTQQASQTSVIFKGTSRMGSLVYPITQVHSASLESYNSGPLSEGTILDLSTTSSMKSESSSHSSWDSDGVSEEGTVLMEDSDGNCEGSSLVPGEDEYPICVLMEKADQSLASLPSGLPITCHLCQKTYSNKGTFRAHYKTVHLRQLHKCKVPGCNTMFSSVRSRNRHSQNPNLHKSLASSPSHLQ

SEQ ID NO: 120298 - DNA, 4627 bp, Artificial Sequence
  derived and/or modified sequence
gcggcgggggcggccatcgtgctgcgcagcctgggcgcttggggagccgcccacttcgccgggtcgcgccccgacggccggagcgtggatgcggcggcgcccgccgagccggggcggacgcggggcggcccgggcccgggagacgcgccggcagccccggcaccgcagcggtcgcaggatggccgaggctatcagctgtactctgaactgtagttgccaaagtttcaaacccgggaaaataaaccaccgtcagtgtgaccaatgcaagcatggatgggtggcccacgctctaagtaagctaaggatcccccccatgtatccaacaagccaggtggagattgtccagtccaatgtagtgtttgatattagcagcctcatgctctatgggacccaggccatccccgttcgcctaaaaatcctactggaccggctcttcagtgtgttgaagcaagatgaggttctccagatcctccatgccttggactggacacttcaggattatatccgtggatacgtactgcaggatgcatcaggaaaggtgttggatcactggagcatcatgaccagtgaggaagaagtggccaccttgcagcagttccttcgttttggagagaccaaatctatagttgaactcatggcaattcaagagaaagaagagcaatccatcatcataccaccttccacagcaaatgtagatatcagggctttcatcgagagctgcagtcacaggagttctagcctccccactcctgtggacaaaggaaaccccagcagtatacacccctttgagaacctcataagcaacatgactttcatgctgcctttccagttcttcaaccctctgcctcctgcactgatagggtcattgcccgaacaatatatgttggagcagggtcatgaccaaagtcaggaccccaaacaggaagtccatgggcccttccctgacagcagcttcttaacttccagttccacaccatttcaggttgaaaaagatcagtgtttaaactgtccggatgctattactaaaaaagaagacagcacccatttaagtgactccagctcatacaacattgtcactaagtttgaaaggacacagttatcccctgaggccaaagtgaagcctgagaggaatagccttggtacaaagaagggccgggtgttctgcactgcatgtgagaagaccttctatgacaaaggcaccctcaaaatccactacaatgccgtccacttgaagatcaagcataagtgcaccatcgaagggtgtaacatggtgttcagctccctaaggagccggaatcgccatagcgccaaccccaaccctcggctgcacatgccaatgaacagaaataaccgggacaaagacctcaggaacagcctgaacctggccagctctgagaactacaagtgcccaggtttcacagtgacgtccccagactgtaggcctcctcccagctaccctggttcaggagaggattccaaaggccaaccagccttcccaaacattgggcaaaatggtgtgctttttcccaacctaaagacagtccagccagtccttcctttctaccgcagtccagccacgcctgccgaggtagcaaacacgcctgggatactcccttccctcccgctgttgtcctcttcaatcccagaacagctcatttcaaacgaaatgccatttgatgcccttcccaagaagaaatccaggaagtccagtatgcctatcaaaatagagaaagaagctgtggaaatagctaatgagaaaagacacaacctcagctcagatgaagacatgcccctacaggtggtcagtgaagatgagcaggaggcctgcagtcctcagtcacacagagtatctgaggagcagcatgtacagtcaggaggcttagggaagcctttccctgaaggggagaggccctgccatcgtgaatcagtaattgagtccagtggagccatcagccaaacccctgagcaggccacacacaattcagagagggagactgagcagacaccagcattgatcatggtgccaagggaggtcgaggatggtggccatgaacactacttcacacctgggatggaaccccaagttcctttttctgactacatggaactgcagcagcgcctgctggctgggggactcttcagtgctttgtccaacaggggaatggcttttccttgtcttgaagattctaaagaactggagcacgtgggtcagcatgcattagcaaggcagatagaagaaaatcgcttccagtgtgacatctgcaagaagacctttaaaaatgcttgtagtgtgaaaattcatcacaagaatatgcatgtcaaagaaatgcacacatgcacagtggagggctgtaatgctacctttccctcccgcaggagcagagacagacacagctcaaacctaaacctccaccaaaaagcattgagccaggaagcattggagagtagtgaagatcatttccgtgcagcttaccttctgaaagatgtggctaaggaagcctatcaggatgtggcttttacacagcaagcctcccagacatctgtcatcttcaaaggaacaagtcgaatgggcagtctggtttacccaataacgcaagtccacagtgccagcctggagagctacaactctggccccttgagcgagggcaccatcctggatttgagcactacctcgagcatgaagtcagagagtagcagccattcttcctgggactctgacggggtgagtgaggaaggcactgtgcttatggaggacagtgatgggaactgtgaagggtcgagccttgtccctggggaagatgagtaccccatctgtgtcctgatggagaaggctgaccagagccttgctagcctgccttctgggttgcccataacctgtcatctctgccaaaagacatacagtaacaaagggacctttagggcccactacaaaactgtgcacctccggcagctccacaaatgcaaagtaccaggctgcaacaccatgttttcgtctgttcgcagtcgaaacagacacagccagaatcccaacctgcacaaaagcctggcctcatctccaagtcacctccagtaacaagatggcaaaccaagtatgctcagataagcttttttcataattcaggaataaagtagtccatagaaatgtttctgtttcatatcatttggggcgagtcaggcaaaagtatttgatttgactttatagttttccacagcacaatgagcaaaagacaaacctcgtgggaagatgacactggggcagcccttcctattatttttcttagcccaagaggtctttcactgatacaaggaaaacttgcagaaatgtgatttttcccagatttgtttacatgttccctgggacagatccaggtctgcagatcgacaccagtgggcccaggacctgggggtggctttaaatgaggcttgcagtgttaaaggtcttggataagaagggtcctggggaagaagactctgtggacaagataccagtccccaaaacagcattttcagttccttcttcaattagtttgaaatccagacctgagtttggaagactgattttttgagaccatccctgtgtttggagtggataattgtccctcccctcagccctgcaccagaggtctcatatgttaccccagggagttctcagaggattgggttggcctctaacatgttccttgttaattcttgttctgtaacatgcattcaagaagctaggggaaaaatatctcatgcacttaaataatggtcttcaatttaatttaaaaatattttgacaatatttaatttgtgcttatgtggtgtttggtgtgagtgcagatattgcactgtgtcacctctggatctctgctcagaagcagaacaagtgatgacctaaatgtcaaaatcactgctcgttttcatttggtgaacttcaaactctgttctttttggtcacctgtggaatgaatgcaagcatgattttggcaggaacatttgtacatattctgccgtagataatgtggttctgatggttgttgtgtattttcagtatcactggatccctcagtcttcaccgttttataaacgtataagattaggatgaacttttgaatttacttggtaggaaaaaaagtaggacattattgccatattgtatgtcttaatatttaacttattcggaaatatattccacactgttacatacattttccatggtagaaaggaagttcagtcagtcctgtggaatgaaaccatctcctaaaattcagcatttgcagcattctaaaagcctgtgtaggtacaaggacattgattttgtattcagaattcaagttaactatcttttaaattcgtggttgatgtaagtaataaaaaacattcttaaagttgagggttataagagagattatttctgtggtctaaaggttaaaaagccaacaacctgttaccaattatttcagctttttttgttttaataagtgtgacaacttaaaacttgtttctatttaaagtgaaatgtatctttcaactgtttagttacccagctgtttaatattccagtcttcccaaagtgaaaagatttgtatacaaatgttttctatgatttaataaaaatatatggcacaccaaaaaaaaaaaaaaa

SEQ ID NO: 120299 - DNA, 2985 bp, Artificial Sequence
  derived and/or modified sequence
atgagacgcagacctccctccaggggcggacggggcgctgctagagctagagagacacgccgacagcccaggcatcgtagcggcagacgcatggctgaggctatctcctgcactcttaattgttcttgccaaagcttcaagcctggtaaaatcaaccatcggcaatgcgatcagtgcaaacacggatgggtggcgcatgccctcagcaagctcaggatcccaccaatgtacccaactagtcaggtggagatcgttcagtctaacgtcgtctttgacataagcagcctaatgctgtacggaacacaggccattcccgtgcggcttaaaattctgctggatcggctgttcagcgtgcttaaacaggacgaggtgctccagattctgcatgcacttgactggaccctgcaggactacatccgtggctatgtgctgcaggatgcatctggcaaggtgctggatcattggtctataatgacttcagaggaagaagttgccacgctgcagcagtttctcagattcggggaaacgaagtccattgtggaactgatggccatccaggagaaagaagaacagtcaattattataccaccctcaaccgccaacgtggacattcgagcttttatcgaaagctgttcacataggagtagctcactgccaacccctgtggacaagggaaacccaagcagcattcacccttttgagaatcttattagtaatatgacgtttatgctgccgtttcaatttttcaaccctctcccaccagccctcatcggctccctcccagaacaatacatgcttgaacagggacacgaccagagtcaggaccccaaacaggaagtccatggccctttcccagacagttcgtttctgacgagcagcagcaccccattccaggtagaaaaggaccagtgcctgaattgccctgacgcgatcaccaaaaaagaggattccacgcacctgagcgacagctccagctataacatcgttacaaagttcgagaggacacaacttagcccagaggccaaagtgaagccagaaaggaattctctgggcactaagaagggcagggtgttctgcactgcctgtgaaaaaacgttttatgataagggtacccttaagatccattataacgcagtgcaccttaagatcaagcataagtgtaccattgaaggatgcaacatggtcttctcaagcctccggagccggaaccggcatagcgctaaccctaacccacgcttgcatatgcccatgaatagaaacaatagggacaaggatttgagaaattccctcaacctggcaagtagtgaaaactacaaatgtcccggctttacggttacgagcccagattgccgccctccaccgtcttatccagggtccggtgaggacagcaagggacagcctgcctttccaaatatcggccaaaacggcgtgctgtttcctaatctcaagacagtgcaacccgttctgcctttttatagaagtcctgccactcccgccgaagtggcaaacacccctggcattctcccaagtctgcctctgctcagttctagcatccctgagcagttgatttccaatgagatgccatttgacgcactcccaaagaaaaaatcccggaagagctcgatgcctattaaaattgagaaggaggctgtggagatagccaatgagaaacgtcataacctgtcctctgacgaagatatgcctctccaagtagtgtctgaggatgaacaggaggcctgttcaccccagagccatagggtgtccgaggaacagcatgtgcagagcggtggtttggggaaaccttttcccgaaggggagcggccttgccatagggagtcagtgatcgaatcgagtggggccatttctcagacgcccgagcaggcaactcacaattctgagagagaaaccgaacaaactccagccctcataatggtgcctcgagaggtcgaggatggaggtcacgagcattacttcacaccgggtatggaaccacaggtccccttctcggattatatggagctccagcagaggctccttgctggtggacttttttccgccctgtcaaatagaggtatggcttttccatgcctcgaagacagtaaggagctggaacatgtgggacagcatgcgctggcacgacagatcgaggagaaccggttccaatgcgatatttgcaaaaaaactttcaaaaacgcatgcagcgtgaagattcaccataaaaacatgcacgtcaaggaaatgcatacctgcactgtagaaggctgcaacgcgacgttccccagtaggagaagccgcgaccgacactcctcaaatctcaacttacaccaaaaagcactgagtcaagaggctctggagagctctgaggaccacttccgcgccgcatacttgctcaaagacgtggccaaggaagcttaccaggatgtggcgttcactcagcaggcctcccagacctctgtgattttcaagggaacctctaggatgggtagtctcgtgtatcctatcacgcaagttcatagcgcatccctggaatcgtataattcagggccgctgtctgagggcactatcctggatctgtccacgacttcctcgatgaagtccgaatcttcgagccactccagctgggattctgacggggttagcgaggagggcactgtactgatggaagattcagacggtaactgcgagggatcctcactggtgccaggggaggatgagtaccccatctgcgtactgatggaaaaagccgaccagtctctcgcctctctgcccagtggcctccccatcacttgtcacctctgtcagaagacatactccaacaaggggacttttcgcgcacactacaagaccgtgcatcttaggcaattacacaagtgtaaggtcccgggctgtaacaccatgttcagtagcgtccgcagccgtaaccgtcactcacagaatccaaacctgcataaatcacttgcaagtagcccatctcacctgcaatag

SEQ ID NO: 120300 - DNA, 2985 bp, Artificial Sequence
  derived and/or modified sequence
atgagaagaagaccacccagcagaggaggaagaggagctgcccgggcccgggagacccggcggcagcccaggcacaggtctggaagaaggatggccgaggccatcagctgcaccctgaactgcagctgccagagcttcaagccaggcaagatcaaccaccggcagtgtgaccagtgcaagcacggctgggtggcccacgccctgagcaagctgcgcatcccccccatgtaccccaccagccaggtggagatcgtgcagagcaatgtggtgtttgacatcagcagcctgatgctgtatggcacccaggccatccctgtgcggctgaagatcctgctggacaggctcttctctgtgctgaagcaggatgaggtgctgcagatcctgcacgccctggactggaccctgcaggactacatccggggctacgtgctgcaggatgccagcggcaaggtgctggaccactggagcatcatgaccagcgaggaggaggtggccaccctgcagcagttcctgcgctttggagagaccaagagcatcgtggagctgatggccatccaggagaaggaggagcagagcatcatcatcccccccagcacagccaacgtggacatccgggccttcatcgagagctgcagccacaggagcagcagcctgcccacccctgtggacaagggcaaccccagcagcatccacccctttgagaacctgatcagcaacatgaccttcatgctgcccttccagttcttcaaccccctgcccccagccctgattggcagcctgcctgagcagtacatgctggagcagggccatgaccagagccaggaccccaagcaggaggtgcacggccccttcccagacagcagcttcctgaccagcagcagcacccccttccaggtggagaaggaccagtgcctgaactgcccagatgccatcaccaagaaggaggacagcacccacctgagtgacagcagcagctacaacatcgtgaccaagtttgagaggacccagctgagccctgaggccaaggtgaagccagagaggaacagcctgggcaccaagaagggccgggtcttctgcacagcctgtgagaagaccttctatgacaagggcaccctgaagatccactacaatgctgtgcacctgaagatcaagcacaagtgcaccatcgagggctgcaacatggtgttcagcagcctgcggagcaggaacagacacagcgccaaccccaacccccggctgcacatgcccatgaacagaaacaacagagacaaggacctgaggaacagcctgaacctggccagcagcgagaactacaagtgccccggcttcaccgtgaccagcccagactgccggcccccacccagctacccaggcagcggggaggacagcaagggccagcctgccttccccaacatcggccagaatggagtgctcttccccaacctgaagacagtgcagcctgtgctgcccttctaccgcagccctgccaccccagctgaggtggccaacaccccaggcatcctgcccagcctgcccctgctgagcagcagcatccctgagcagctgatcagcaatgagatgccctttgatgccctgcccaagaagaagagcaggaagagctccatgcccatcaagattgagaaggaggccgtggagatcgccaatgagaagaggcacaacctgagcagtgatgaggacatgcccctgcaggtggtgtctgaagatgagcaggaggcctgcagcccccagagccaccgggtgtctgaggagcagcacgtgcagagcggcggcctgggcaagcccttccctgagggggagcggccctgccaccgggagagcgtgattgagagcagcggggccatcagccagaccccagagcaggccacccacaacagcgagcgggagacagagcagaccccagccctgatcatggtgccccgggaggtggaggatggcggccacgagcactacttcaccccaggcatggagccccaggtgcccttcagtgactacatggagctgcagcagaggctgctggccggcggcctcttcagcgccctgagcaacagaggcatggccttcccctgcctggaggacagcaaggagctggagcacgtgggccagcacgccctggcccggcagattgaagaaaatcgcttccagtgtgacatctgcaagaagaccttcaagaatgcctgcagcgtgaagatccaccacaagaacatgcacgtgaaggagatgcacacctgcaccgtggagggctgcaatgccaccttccccagccgccgcagccgggacagacacagcagcaacctgaacctgcaccagaaggccctgagccaggaggccctggagagcagcgaggaccacttccgggccgcctacctgctgaaggatgtggccaaggaggcctaccaggatgtggccttcacccagcaggccagccagaccagcgtcatcttcaagggcaccagcaggatgggcagcctggtgtaccccatcacccaggtgcacagcgccagcctggagagctacaacagcggccccctgtctgagggcaccatcctggacctgagcaccaccagctccatgaagtctgagagcagcagccacagctcctgggacagtgatggagtgtctgaggagggcaccgtgctgatggaggacagtgatggcaactgtgagggcagcagcctggtgcctggagaagatgagtaccccatctgtgtgctgatggagaaggctgaccagagcctggccagcctgcccagcggcctgcccatcacctgccacctgtgccagaagacctacagcaacaagggcaccttccgggcccactacaagacagtgcacctgcggcagctgcacaagtgcaaggtgcccggctgcaacaccatgttcagctctgtgcgcagcaggaacagacacagccagaaccccaacctgcacaagagcctggccagcagccccagccacctgcagtag

SEQ ID NO: 120301 - DNA, 2985 bp, Artificial Sequence
  derived and/or modified sequence
atgcggcggcggccccccagccggggcggccggggcgccgcccgggctagggagactcgaaggcaaccccggcacaggagcggtcggaggatggctgaggcaatttcttgtacccttaactgctcttgtcagagctttaaaccagggaaaatcaatcataggcagtgtgaccagtgcaagcatgggtgggtggcccatgcactgagcaagctcaggatcccgccgatgtacccaacatcccaggtggaaatcgtgcagagcaatgtcgtgttcgacatctcttctctgatgctgtacggcacccaggcaatcccagttcggctgaagatactgctcgacaggttattctcagttcttaagcaagatgaagtgctccagatattgcacgctctcgactggaccctgcaagactacattcggggttatgttctccaagacgccagtggaaaggtcctcgatcattggtctatcatgacctcggaagaggaagttgcaacactgcaacagtttctgaggtttggggaaacaaaaagcatagtggagctgatggctattcaggagaaggaggagcaatcaattatcatccctccgagtactgcaaacgtggacattagggcatttatcgagagttgttcacacaggtcatcctctcttccgaccccagtagacaagggcaatccaagctctattcatccgtttgagaatttgatcagtaacatgacttttatgctcccatttcaatttttcaaccccctgcctccagctcttatcgggagtctgccagaacaatacatgctggagcagggccacgatcagagccaggatcctaagcaggaagtgcacggtccttttcccgacagtagcttcctgacctcttccagcaccccatttcaggtggaaaaagatcaatgcctgaattgcccagacgcgatcacaaagaaagaggattcaacacacctgtccgacagcagcagctataacattgtgacaaagtttgaacgcacacagctgtcccccgaagcgaaggttaaacccgaaagaaactctctaggaaccaaaaagggaagagttttttgcaccgcttgcgaaaaaacattctatgacaagggtacgttgaaaattcactacaacgctgtccacctgaagattaaacataagtgcaccatcgaggggtgcaatatggtattttcaagcctgcgttccagaaacaggcactctgcgaacccgaacccccgattacatatgcccatgaaccgcaacaatcgggacaaggatctacggaattctctgaatctggcctccagtgaaaactacaaatgtcccggatttactgtgaccagtccagactgcagacctcccccatcgtaccctggcagcggagaagacagcaaaggccagcctgcatttcctaatattgggcagaatggggtgctttttcccaacctgaaaacagtccaacctgtcctgccattttaccgttcaccagccacacccgcagaagtggcgaacacccctggtatcttgccctcgttacctttattgtccagcagcatcccggagcagttgatctcgaacgagatgccattcgacgccctgccaaaaaagaagagtcgaaagtcatccatgcccattaagatcgagaaggaggcagtagaaattgccaacgaaaagcgccataacctgtctagtgatgaggatatgccactgcaggtggtgtctgaagatgagcaagaagcctgctctcctcagagccacagggtttcggaagaacaacatgttcagtcaggcggcttgggcaagccctttccagaaggagagagaccttgtcatagggaatcagttattgagtcatctggcgccatcagccagacccctgagcaggcgacccataatagcgagcgagaaacagaacagactccagcccttattatggttcccagggaagtcgaagatggaggtcacgaacactacttcactccaggtatggaaccccaggtcccattcagcgattacatggagctacaacagcgactgttagccggaggattatttagcgccttgagcaaccgcggcatggcattcccttgcctagaagactcaaaagaactggaacatgtggggcagcatgcacttgctcggcagatagaggaaaaccgcttccaatgcgatatttgtaagaagactttcaagaacgcctgctccgtgaagattcaccacaaaaacatgcatgttaaagaaatgcatacatgtaccgtggaagggtgcaacgctacgtttccaagccgcagatccagggatcgacatagtagcaaccttaatctgcaccagaaggctctgtcacaggaggctcttgagagtagcgaggaccattttagggctgcctatctgctaaaggatgtggctaaagaggcataccaagacgtcgcctttacgcagcaggctagccagacatcagtgatcttcaaggggactagccgcatgggtagcctggtctatcccattacccaggtgcattctgcaagtctggaaagttacaacagcggccctctaagcgaggggacgatcctggatttatctacaacaagtagtatgaaatccgaatcgagcagccacagttcttgggattcagacggagtgtcagaagagggaacggttctcatggaggactctgatggtaactgtgaaggctctagtctcgtgcccggggaagacgagtatcctatctgcgtgttgatggaaaaggcagaccaatccctagcatcgttgccctccgggctgcctatcacctgccacctgtgtcagaagacatatagtaacaagggcacttttcgcgcgcactataagaccgtccacttgcggcagcttcataaatgcaaggtccctggctgtaatacgatgttttcaagcgtcagatctcgaaaccgccactctcagaacccaaatcttcacaaatcattggcctcaagcccgagccatttgcagtag

SEQ ID NO: 120302 - DNA, 2985 bp, Artificial Sequence
  derived and/or modified sequence
atgcgccgtagaccgccttctcgcggtggcaggggagcggctcgagcccgagagacaagaaggcaacctcgacatcggagcggtagaagaatggctgaggctatatcatgtaccttaaactgtagttgtcaaagcttcaaaccgggaaaaattaatcatcgccagtgcgatcagtgtaagcatggctgggtggctcacgccctgtctaagctccgcattccacctatgtatccgaccagccaagtcgaaatcgtgcagtcaaacgtggtgttcgacataagctctctgatgctgtacggtactcaggccatccccgttcggcttaagattttgttggacagattattttcagtcctgaaacaggatgaggtgttgcaaatcctgcacgctctagactggaccctgcaggactatattcgtggctacgtcctgcaggatgccagtggcaaggtgctcgaccactggagcatcatgacctcagaggaggaagtggccacattgcagcagttcctacgcttcggagagacaaagtctattgttgaactcatggccatccaggagaaggaggagcagtcaattatcatcccaccgtctacagccaacgtggatataagggctttcattgaaagttgttcacaccgatccagctcattacccacccctgtggacaaaggcaacccaagctccatccaccccttcgagaacctgataagtaatatgaccttcatgctcccgtttcagttttttaaccccctaccaccagctctcataggctcattgccagagcaatatatgctggagcaagggcatgatcagagccaggacccaaaacaggaggtgcatggcccatttcccgattcctcgtttctgactagttcctctaccccttttcaggtggagaaggaccagtgcctgaactgcccagacgccataacaaagaaggaggattctacacacctgagcgattcttcctcatacaatattgttactaaatttgaacgcactcaactgtccccggaggcaaaagtgaaaccagaaagaaacagcctaggaaccaaaaagggcagggtgttctgtacagcttgcgaaaagacattttatgataagggtacactgaaaatccactacaatgcagtccaccttaaaattaagcacaagtgtaccatcgaagggtgtaacatggtctttagttcactgcgttctcgcaaccgccactctgctaaccctaatcccaggctacacatgcccatgaatcgaaataatcgagacaaggacctgagaaactccctgaatttagcctcatcagagaactacaagtgcccgggttttaccgtgacatcgcccgattgccgccctccaccgtcctatcctggtagcggggaggatagtaaaggacagccggcatttcccaatatcggccagaacggcgtactatttccgaatctgaaaactgttcagccggtgttacctttctatcgctccccagctacgccagctgaagtggccaacaccccaggtattttgccttctcttccactgctgtcctcttctattcctgagcagctgatcagtaatgagatgccatttgatgcactgcctaaaaaaaaaagccgcaaaagcagtatgccaattaagattgagaaggaggctgttgaaatcgccaacgaaaaaaggcataacctgtcctctgacgaggacatgcccctgcaggtcgtctccgaagacgaacaggaggcgtgttcaccccagagtcatcgagtctccgaggaacaacatgtgcagtccggcggacttgggaaacccttccctgagggcgagaggccgtgccaccgcgagtcagtaatagagtcatcaggcgctatatcccagacccccgagcaagccacacacaattcagagcgggaaaccgagcagactcctgccctgatcatggtcccacgcgaggtcgaagatggcggacatgagcattactttacccccggaatggaacctcaagttccattttctgattatatggagcttcagcagagactgcttgccggagggctcttctccgcactgagtaaccgcggaatggcatttccatgtttggaggatagcaaggaactggagcacgtcggacagcacgctcttgcaaggcaaatagaagaaaacaggttccagtgtgacatatgtaagaagacgtttaaaaacgcatgcagcgttaagattcaccataaaaatatgcacgtaaaagagatgcacacctgtaccgtggagggctgtaatgccaccttcccttctcggagatccagagatagacactccagcaatttgaatctgcaccagaaggcactctcacaggaagctctcgaatcctccgaagatcacttcagggccgcatatttactgaaggacgtggcaaaggaggcttatcaagatgtggcttttactcagcaggcatcccagacgagcgtgattttcaaggggacatctaggatgggatccctggtctatcccatcacacaggtgcatagcgcatcactggagtcctataacagcggccctcttagtgagggcacaattttagacctctccacaactagcagcatgaaaagcgaatccagctcacacagttcctgggactcagacggtgtaagcgaggagggaacggttctgatggaggattctgacgggaactgcgaaggtagttctctagtgcccggagaagatgagtaccctatctgtgtcctcatggaaaaggccgaccaatctttggcttccctgccgtccggactccctattacttgccatttatgccaaaagacatattcaaataagggtacgttccgggctcactacaagacggttcacctgcgccagctgcacaaatgcaaagtccccggatgcaataccatgttctccagcgtcagatcaaggaacagacattcccagaatccgaacctgcataagagcctcgcaagttctccctcgcatctgcagtag

SEQ ID NO: 120303 - DNA, 4610 bp, Artificial Sequence
  derived and/or modified sequence
ggcgggggcggccatcgtgctgcgcagcctgggcgcttggggagccgcccacttcgccgggtcgcgccccgacggccggagcgtggatgcggcggcgcccgccgagccggggcggacgcggggcggcccgggcccgggagacgcgccggcagccccggcaccgcagcggtcgcaggatggccgaggctatcagctgtactctgaactgtagttgccaaagtttcaaacccgggaaaataaaccaccgtcagtgtgaccaatgcaagcatggatgggtggcccacgctctaagtaagctaaggatcccccccatgtatccaacaagccaggtggagattgtccagtccaatgtagtgtttgatattagcagcctcatgctctatgggacccaggccatccccgttcgcctaaaaatcctactggaccggctcttcagtgtgttgaagcaagatgaggttctccagatcctccatgccttggactggacacttcaggattatatccgtggatacgtactgcaggatgcatcaggaaaggtgttggatcactggagcatcatgaccagtgaggaagaagtggccaccttgcagcagttccttcgttttggagagaccaaatctatagttgaactcatggcaattcaagagaaagaagagcaatccatcatcataccaccttccacagcaaatgtagatatcagggctttcatcgagagctgcagtcacaggagttctagcctccccactcctgtggacaaaggaaaccccagcagtatacacccctttgagaacctcataagcaacatgactttcatgctgcctttccagttcttcaaccctctgcctcctgcactgatagggtcattgcccgaacaatatatgttggagcagggtcatgaccaaagtcaggaccccaaacaggaagtccatgggcccttccctgacagcagcttcttaacttccagttccacaccatttcaggttgaaaaagatcagtgtttaaactgtccggatgctattactaaaaaagaagacagcacccatttaagtgactccagctcatacaacattgtcactaagtttgaaaggacacagttatcccctgaggccaaagtgaagcctgagaggaatagccttggtacaaagaagggccgggtgttctgcactgcatgtgagaagaccttctatgacaaaggcaccctcaaaatccactacaatgccgtccacttgaagatcaagcataagtgcaccatcgaagggtgtaacatggtgttcagctccctaaggagccggaatcgccatagcgccaaccccaaccctcggctgcacatgccaatgaacagaaataaccgggacaaagacctcaggaacagcctgaacctggccagctctgagaactacaagtgcccaggtttcacagtgacgtccccagactgtaggcctcctcccagctaccctggttcaggagaggattccaaaggccaaccagccttcccaaacattgggcaaaatggtgtgctttttcccaacctaaagacagtccagccagtccttcctttctaccgcagtccagccacgcctgccgaggtagcaaacacgcctgggatactcccttccctcccgctgttgtcctcttcaatcccagaacagctcatttcaaacgaaatgccatttgatgcccttcccaagaagaaatccaggaagtccagtatgcctatcaaaatagagaaagaagctgtggaaatagctaatgagaaaagacacaacctcagctcagatgaagacatgcccctacaggtggtcagtgaagatgagcaggaggcctgcagtcctcagtcacacagagtatctgaggagcagcatgtacagtcaggaggcttagggaagcctttccctgaaggggagaggccctgccatcgtgaatcagtaattgagtccagtggagccatcagccaaacccctgagcaggccacacacaattcagagagggagactgagcagacaccagcattgatcatggtgccaagggaggtcgaggatggtggccatgaacactacttcacacctgggatggaaccccaagttcctttttctgactacatggaactgcagcagcgcctgctggctgggggactcttcagtgctttgtccaacaggggaatggcttttccttgtcttgaagattctaaagaactggagcacgtgggtcagcatgcattagcaaggcagatagaagaaaatcgcttccagtgtgacatctgcaagaagacctttaaaaatgcttgtagtgtgaaaattcatcacaagaatatgcatgtcaaagaaatgcacacatgcacagtggagggctgtaatgctacctttccctcccgcaggagcagagacagacacagctcaaacctaaacctccaccaaaaagcattgagccaggaagcattggagagtagtgaagatcatttccgtgcagcttaccttctgaaagatgtggctaaggaagcctatcaggatgtggcttttacacagcaagcctcccagacatctgtcatcttcaaaggaacaagtcgaatgggcagtctggtttacccaataacgcaagtccacagtgccagcctggagagctacaactctggccccttgagcgagggcaccatcctggatttgagcactacctcgagcatgaagtcagagagtagcagccattcttcctgggactctgacggggtgagtgaggaaggcactgtgcttatggaggacagtgatgggaactgtgaagggtcgagccttgtccctggggaagatgagtaccccatctgtgtcctgatggagaaggctgaccagagccttgctagcctgccttctgggttgcccataacctgtcatctctgccaaaagacatacagtaacaaagggacctttagggcccactacaaaactgtgcacctccggcagctccacaaatgcaaagtaccaggctgcaacaccatgttttcgtctgttcgcagtcgaaacagacacagccagaatcccaacctgcacaaaagcctggcctcatctccaagtcacctccagtaacaagatggcaaaccaagtatgctcagataagcttttttcataattcaggaataaagtagtccatagaaatgtttctgtttcatatcatttggggcgagtcaggcaaaagtatttgatttgactttatagttttccacagcacaatgagcaaaagacaaacctcgtgggaagatgacactggggcagcccttcctattatttttcttagcccaagaggtctttcactgatacaaggaaaacttgcagaaatgtgatttttcccagatttgtttacatgttccctgggacagatccaggtctgcagatcgacaccagtgggcccaggacctgggggtggctttaaatgaggcttgcagtgttaaaggtcttggataagaagggtcctggggaagaagactctgtggacaagataccagtccccaaaacagcattttcagttccttcttcaattagtttgaaatccagacctgagtttggaagactgattttttgagaccatccctgtgtttggagtggataattgtccctcccctcagccctgcaccagaggtctcatatgttaccccagggagttctcagaggattgggttggcctctaacatgttccttgttaattcttgttctgtaacatgcattcaagaagctaggggaaaaatatctcatgcacttaaataatggtcttcaatttaatttaaaaatattttgacaatatttaatttgtgcttatgtggtgtttggtgtgagtgcagatattgcactgtgtcacctctggatctctgctcagaagcagaacaagtgatgacctaaatgtcaaaatcactgctcgttttcatttggtgaacttcaaactctgttctttttggtcacctgtggaatgaatgcaagcatgattttggcaggaacatttgtacatattctgccgtagataatgtggttctgatggttgttgtgtattttcagtatcactggatccctcagtcttcaccgttttataaacgtataagattaggatgaacttttgaatttacttggtaggaaaaaaagtaggacattattgccatattgtatgtcttaatatttaacttattcggaaatatattccacactgttacatacattttccatggtagaaaggaagttcagtcagtcctgtggaatgaaaccatctcctaaaattcagcatttgcagcattctaaaagcctgtgtaggtacaaggacattgattttgtattcagaattcaagttaactatcttttaaattcgtggttgatgtaagtaataaaaaacattcttaaagttgagggttataagagagattatttctgtggtctaaaggttaaaaagccaacaacctgttaccaattatttcagctttttttgttttaataagtgtgacaacttaaaacttgtttctatttaaagtgaaatgtatctttcaactgtttagttacccagctgtttaatattccagtcttcccaaagtgaaaagatttgtatacaaatgttttctatgatttaataaaaatatatggcacacc

SEQ ID NO: 120304 - DNA, 2985 bp, Artificial Sequence
  derived and/or modified sequence
atgagaagaagaccccccagcagaggcggcagaggcgccgccagagccagagagaccagaagacagcccagacacagaagcggcagaagaatggccgaggccatcagctgcaccctgaactgcagctgccagagcttcaagcccggcaagatcaaccacagacagtgcgaccagtgcaagcacggctgggtggcccacgccctgagcaagctgagaatcccccccatgtaccccaccagccaggtggagatcgtgcagagcaacgtggtgttcgacatcagcagcctgatgctgtacggcacccaggccatccccgtgagactgaagatcctgctggacagactgttcagcgtgctgaagcaggacgaggtgctgcagatcctgcacgccctggactggaccctgcaggactacatcagaggctacgtgctgcaggacgccagcggcaaggtgctggaccactggagcatcatgaccagcgaggaggaggtggccaccctgcagcagttcctgagattcggcgagaccaagagcatcgtggagctgatggccatccaggagaaggaggagcagagcatcatcatcccccccagcaccgccaacgtggacatcagagccttcatcgagagctgcagccacagaagcagcagcctgcccacccccgtggacaagggcaaccccagcagcatccaccccttcgagaacctgatcagcaacatgaccttcatgctgcccttccagttcttcaaccccctgccccccgccctgatcggcagcctgcccgagcagtacatgctggagcagggccacgaccagagccaggaccccaagcaggaggtgcacggccccttccccgacagcagcttcctgaccagcagcagcacccccttccaggtggagaaggaccagtgcctgaactgccccgacgccatcaccaagaaggaggacagcacccacctgagcgacagcagcagctacaacatcgtgaccaagttcgagagaacccagctgagccccgaggccaaggtgaagcccgagagaaacagcctgggcaccaagaagggcagagtgttctgcaccgcctgcgagaagaccttctacgacaagggcaccctgaagatccactacaacgccgtgcacctgaagatcaagcacaagtgcaccatcgagggctgcaacatggtgttcagcagcctgagaagcagaaacagacacagcgccaaccccaaccccagactgcacatgcccatgaacagaaacaacagagacaaggacctgagaaacagcctgaacctggccagcagcgagaactacaagtgccccggcttcaccgtgaccagccccgactgcagacccccccccagctaccccggcagcggcgaggacagcaagggccagcccgccttccccaacatcggccagaacggcgtgctgttccccaacctgaagaccgtgcagcccgtgctgcccttctacagaagccccgccacccccgccgaggtggccaacacccccggcatcctgcccagcctgcccctgctgagcagcagcatccccgagcagctgatcagcaacgagatgcccttcgacgccctgcccaagaagaagagcagaaagagcagcatgcccatcaagatcgagaaggaggccgtggagatcgccaacgagaagagacacaacctgagcagcgacgaggacatgcccctgcaggtggtgagcgaggacgagcaggaggcctgcagcccccagagccacagagtgagcgaggagcagcacgtgcagagcggcggcctgggcaagcccttccccgagggcgagagaccctgccacagagagagcgtgatcgagagcagcggcgccatcagccagacccccgagcaggccacccacaacagcgagagagagaccgagcagacccccgccctgatcatggtgcccagagaggtggaggacggcggccacgagcactacttcacccccggcatggagccccaggtgcccttcagcgactacatggagctgcagcagagactgctggccggcggcctgttcagcgccctgagcaacagaggcatggccttcccctgcctggaggacagcaaggagctggagcacgtgggccagcacgccctggccagacagatcgaggagaacagattccagtgcgacatctgcaagaagaccttcaagaacgcctgcagcgtgaagatccaccacaagaacatgcacgtgaaggagatgcacacctgcaccgtggagggctgcaacgccaccttccccagcagaagaagcagagacagacacagcagcaacctgaacctgcaccagaaggccctgagccaggaggccctggagagcagcgaggaccacttcagagccgcctacctgctgaaggacgtggccaaggaggcctaccaggacgtggccttcacccagcaggccagccagaccagcgtgatcttcaagggcaccagcagaatgggcagcctggtgtaccccatcacccaggtgcacagcgccagcctggagagctacaacagcggccccctgagcgagggcaccatcctggacctgagcaccaccagcagcatgaagagcgagagcagcagccacagcagctgggacagcgacggcgtgagcgaggagggcaccgtgctgatggaggacagcgacggcaactgcgagggcagcagcctggtgcccggcgaggacgagtaccccatctgcgtgctgatggagaaggccgaccagagcctggccagcctgcccagcggcctgcccatcacctgccacctgtgccagaagacctacagcaacaagggcaccttcagagcccactacaagaccgtgcacctgagacagctgcacaagtgcaaggtgcccggctgcaacaccatgttcagcagcgtgagaagcagaaacagacacagccagaaccccaacctgcacaagagcctggccagcagccccagccacctgcagtag

SEQ ID NO: 120305 - protein, 513 aa, Artificial Sequence
  derived and/or modified sequence
MPGLGRRAQWLCWWWGLLCSCCGPPPLRPPLPAAAAAAAGGQLLGDGGSPGRTEQPPPSPQSSSGFLYRRLKTQEKREMQKEILSVLGLPHRPRPLHGLQQPQPPALRQQEEQQQQQQLPRGEPPPGRLKSAPLFMLDLYNALSADNDEDGASEGERQQSWPHEAASSSQRRQPPPGAAHPLNRKSLLAPGSGSGGASPLTSAQDSAFLNDADMVMSFVNLVEYDKEFSPRQRHHKEFKFNLSQIPEGEVVTAAEFRIYKDCVMGSFKNQTFLISIYQVLQEHQHRDSDLFLLDTRVVWASEEGWLEFDITATSNLWVVTPQHNMGLQLSVVTRDGVHVHPRAAGLVGRDGPYDKQPFMVAFFKVSEVHVRTTRSASSRRRQQSRNRSTQSQDVARVSSASDYNSSELKTACRKHELYVSFQDLGWQDWIIAPKGYAANYCDGECSFPLNAHMNATNHAIVQTLVHLMNPEYVPKPCCAPTKLNAISVLYFDDNSNVILKKYRNMVVRACGCH

SEQ ID NO: 120306 - protein, 435 aa, Artificial Sequence
  derived and/or modified sequence
MQKEILSVLGLPHRPRPLHGLQQPQPPALRQQEEQQQQQQLPRGEPPPGRLKSAPLFMLDLYNALSADNDEDGASEGERQQSWPHEAASSSQRRQPPPGAAHPLNRKSLLAPGSGSGGASPLTSAQDSAFLNDADMVMSFVNLVEYDKEFSPRQRHHKEFKFNLSQIPEGEVVTAAEFRIYKDCVMGSFKNQTFLISIYQVLQEHQHRDSDLFLLDTRVVWASEEGWLEFDITATSNLWVVTPQHNMGLQLSVVTRDGVHVHPRAAGLVGRDGPYDKQPFMVAFFKVSEVHVRTTRSASSRRRQQSRNRSTQSQDVARVSSASDYNSSELKTACRKHELYVSFQDLGWQDWIIAPKGYAANYCDGECSFPLNAHMNATNHAIVQTLVHLMNPEYVPKPCCAPTKLNAISVLYFDDNSNVILKKYRNMVVRACGCH

SEQ ID NO: 120307 - protein, 476 aa, Artificial Sequence
  derived and/or modified sequence
AAGGQLLGDGGSPGRTEQPPPSPQSSSGFLYRRLKTQEKREMQKEILSVLGLPHRPRPLHGLQQPQPPALRQQEEQQQQQQLPRGEPPPGRLKSAPLFMLDLYNALSADNDEDGASEGERQQSWPHEAASSSQRRQPPPGAAHPLNRKSLLAPGSGSGGASPLTSAQDSAFLNDADMVMSFVNLVEYDKEFSPRQRHHKEFKFNLSQIPEGEVVTAAEFRIYKDCVMGSFKNQTFLISIYQVLQEHQHRDSDLFLLDTRVVWASEEGWLEFDITATSNLWVVTPQHNMGLQLSVVTRDGVHVHPRAAGLVGRDGPYDKQPFMVAFFKVSEVHVRTTRSASSRRRQQSRNRSTQSQDVARVSSASDYNSSELKTACRKHELYVSFQDLGWQDWIIAPKGYAANYCDGECSFPLNAHMNATNHAIVQTLVHLMNPEYVPKPCCAPTKLNAISVLYFDDNSNVILKKYRNMVVRACGCH

SEQ ID NO: 120308 - DNA, 1542 bp, Artificial Sequence
  derived and/or modified sequence
atgccagggctgggacggcgcgcccagtggctgtgctggtggtgggggctcctctgctcctgctgcggaccacccccccttcgtccacctttacctgccgccgccgccgccgccgctggagggcagttacttggtgacggcggcagccccggcaggaccgagcagccccccccatctccacagtcttctagcggtttcctctatcgccgactgaaaacccaggagaagcgcgaaatgcagaaagaaatcctctccgtgcttgggttgccccaccgaccacgccccctccacgggctgcagcaaccccagcctccagcactccggcagcaagaggagcagcaacagcagcagcagctgccgaggggcgagcccccaccagggaggctgaagagtgcaccactgttcatgctggatctatacaatgctctgagcgctgataacgacgaggacggggcctcagagggggagcgccagcagagctggccacatgaagctgcctctagctcgcagcgtaggcagccccctcctggcgccgcccatcccctcaacagaaagtccttgctcgctccaggatcaggttccggcggagcttctccactgacaagcgcccaggattccgccttcctgaacgacgcagacatggtgatgtcatttgtgaatttggtggaatatgacaaggaattcagtccgcggcagaggcatcataaggagtttaaattcaaccttagccagatcccagagggtgaggtggttactgctgcggagtttagaatttacaaggattgcgtgatgggttccttcaaaaaccagactttcttaatctctatctatcaagtcctgcaggagcatcaacatagagactcggatctattcttgcttgacaccagggttgtctgggccagcgaagaaggatggctggagttcgacatcaccgctacctctaacctgtgggtggtcactccccagcataacatgggcttgcagctgtctgtagtcactagagacggggtccacgttcacccaagagcagccggccttgtgggccgagatgggccgtacgataaacagcccttcatggtggccttcttcaaggtctcagaggtgcacgtcaggactacaagatcggcatcatctcggaggcgccaacagagtcggaatcgtagcacccagtcacaggatgttgcaagggtgagtagtgcaagcgactacaacagctccgaactcaaaacagcatgcaggaaacacgagttatatgttagttttcaggacctaggctggcaggattggatcattgcccccaagggttatgccgcaaactactgtgatggggaatgttccttccctctgaatgctcacatgaatgctacaaatcatgccatagtgcagacattggtccacctcatgaatccagagtacgttccaaaaccctgctgcgcacccacaaagttaaacgccatctcagtgctctactttgacgacaattcaaacgtgattctcaagaagtacaggaatatggtggtgcgtgcttgcgggtgccactag

SEQ ID NO: 120309 - DNA, 1308 bp, Artificial Sequence
  derived and/or modified sequence
atgcaaaaagagatcctcagcgtgttaggcctcccgcataggccacgaccgctgcatggtctgcagcaaccacagcccccggccctacgccagcaggaggagcagcagcagcagcagcaactcccgagaggcgaaccccccccaggcaggctcaagtccgctccactcttcatgttggatctgtacaatgccctatctgctgacaatgacgaggatggcgccagcgagggcgagaggcagcaatcgtggccccacgaggctgcctcatcttcccagcgaaggcagcccccacccggagccgctcaccctctgaacaggaaatctttgctggcgcccgggtctggatctgggggggcctccccattaaccagcgcgcaggacagcgcgttcttgaatgacgctgatatggtcatgagtttcgtcaacctagtggagtacgacaaagagttttctcctaggcagcgccaccacaaagagttcaaatttaatctctctcagatcccagaaggggaagtggtgaccgcagctgagtttcggatctataaagattgtgtcatgggctccttcaaaaatcaaacgttcttgataagcatctatcaagtcctgcaagagcatcagcatcgtgattctgatctctttctgttagacacccgggtcgtctgggcctcagaggagggctggttggaattcgacatcacagcgacatccaacctctgggtggtcaccccccagcacaatatgggacttcagctttctgtggttacaagagatggggtgcatgtccacccacgggctgccggcctggtaggtagggacggcccctacgataaacaaccctttatggttgctttcttcaaggtatctgaggtacatgtgcgaacgacgcgttctgcttccagcagacgaagacagcagagcagaaatcgaagtactcagtcacaagacgtagcacgggtgagctcggcctcggattataacagttcagagctgaaaaccgcctgtcggaagcacgagctttacgtttcattccaggatctgggctggcaggactggatcattgctccgaaggggtatgctgccaactattgcgatggagagtgttcatttccactcaatgcacacatgaacgcaaccaaccacgccatcgtacagaccctcgttcacctgatgaatccagaatacgtgcccaaaccatgttgcgcccccaccaaactgaacgccattagtgtcctgtatttcgacgataacagtaacgtgattctgaagaagtaccggaatatggtggttagagcctgtggttgccactag

SEQ ID NO: 120310 - DNA, 1431 bp, Artificial Sequence
  derived and/or modified sequence
gccgccgggggccagctgctgggtgatggtgggtctcccggaaggacagagcagcctcccccgtccccccagtcaagtagtggttttctgtatagacggcttaaaacacaagagaagagagagatgcagaaagaaattttgtcagtgctgggattgccacaccgcccacgccccctccacggattgcagcagccccagccaccggcactgcgccagcaagaagagcaacagcaacagcagcagctcccacgaggcgagccaccccctgggagactgaagtccgccccgctattcatgctcgacctgtacaatgcactgtctgccgataacgacgaagatggtgcctcagagggggagagacaacagtcgtggccccatgaagctgccagctcaagccagcgccggcaacctcctccaggcgcagctcatcccctgaatcgcaagtctctgctggcaccagggtccgggtcgggcggggctagcccgctgacttccgcccaagacagcgccttccttaatgatgccgacatggtcatgtcattcgtgaacctggtcgaatatgacaaggaattcagtcctaggcagaggcaccacaaagagttcaaatttaatctatcacaaatccctgaaggggaggtggtgacagccgccgagttccgtatttataaggattgcgtgatgggtagcttcaagaaccagacatttttgattagtatataccaggtcctgcaagagcatcagcatagggactccgacctctttcttctcgataccagggtggtgtgggcctcagaggaaggatggctagagttcgacataaccgccacaagtaatttgtgggtcgtcacaccacagcataacatgggccttcaactgtctgtagttactcgagacggcgtgcatgtccatccccgtgccgctggtctcgtgggccgcgacggcccttatgataagcagcccttcatggttgctttttttaaggtctcagaggtgcacgtccggactactcgctctgcttccagtcggcgcaggcaacaatctaggaatcgctctacacagtcgcaggacgtggcacgagttagctctgcctccgactataatagttcagagctcaaaacagcatgcagaaagcacgagctgtatgtgagtttccaggacttgggatggcaggactggatcattgcccccaagggctatgccgccaattattgtgatggcgaatgttcctttccgttaaatgctcacatgaatgcaacaaaccacgcgatcgttcagaccctggtacatcttatgaaccccgagtacgtgcctaagccatgctgcgcacctacaaaactgaatgcgatttcagtactttatttcgatgataattctaatgtgatattgaagaagtaccggaacatggttgttagggcttgtgggtgtcattag

SEQ ID NO: 120311 - DNA, 1542 bp, Artificial Sequence
  derived and/or modified sequence
atgcctggcctgggccggcgggcccagtggctgtgctggtggtggggcctgctgtgcagctgctgcggccccccacccctgcggccccccctgcctgctgctgctgctgctgctgctgggggccagctgctgggagatggcggcagccctggccgcacagagcagcccccacccagcccccagagcagcagcggcttcctgtacagaaggctgaagacccaggagaagcgggagatgcagaaggagatcctgtctgtgctgggcctgccccaccggccccggcccctgcacggcctgcagcagccccagcccccagccctgcggcagcaggaggagcagcagcagcagcagcagctgcccagaggagagcccccacctggccgcctgaagagcgcccccctcttcatgctggacctgtacaatgccctgtctgctgacaatgatgaagatggagccagcgagggggagcggcagcagagctggccccatgaagctgccagcagcagccagaggcggcagcccccacctggggccgcccaccccctgaacaggaagagcctgctggcccctggcagcggcagcggcggggccagccccctgaccagcgcccaggacagcgccttcctgaatgatgctgacatggtgatgagctttgtgaacctggtggagtatgacaaggagttcagcccccggcagaggcaccacaaggagttcaagttcaacctgagccagatccctgagggggaggtggtgacagctgctgagttccgcatctacaaggactgtgtgatgggcagcttcaagaaccagaccttcctgatcagcatctaccaggtgctgcaggagcaccagcaccgggacagcgacctcttcctgctggacaccagggtggtgtgggccagcgaggagggctggctggagtttgacatcacagccaccagcaacctgtgggtggtgaccccccagcacaacatgggcctgcagctgtctgtggtgaccagagatggagtgcacgtgcaccccagggctgctggcctggtgggcagagatggcccctatgacaagcagcccttcatggtggccttcttcaaggtgtctgaggtgcacgtgaggaccaccaggtctgccagcagcagaagacggcagcagagcaggaacagaagcacccagagccaggatgtggcccgggtgtcctctgccagtgactacaacagcagcgagctgaagacagcctgcaggaagcatgagctgtatgtgtccttccaggacctgggctggcaggactggatcatcgcccccaagggctatgctgccaactactgtgatggagagtgcagcttccccctgaatgcccacatgaatgccaccaaccacgccatcgtgcagaccctggtgcacctgatgaacccagaatatgtgcccaagccctgctgtgcccccaccaagctgaatgccatctctgtgctgtactttgatgacaacagcaatgtcatcctgaagaagtacagaaacatggtggtgcgggcctgtggctgccactag

SEQ ID NO: 120312 - DNA, 1308 bp, Artificial Sequence
  derived and/or modified sequence
atgcagaaggagatcctgtctgtgctgggcctgccccaccggccccggcccctgcacggcctgcagcagccccagcccccagccctgcggcagcaggaggagcagcagcagcagcagcagctgcccagaggagagcccccacctggccgcctgaagagcgcccccctcttcatgctggacctgtacaatgccctgtctgctgacaatgatgaagatggagccagcgagggggagcggcagcagagctggccccatgaagctgccagcagcagccagaggcggcagcccccacctggggccgcccaccccctgaacaggaagagcctgctggcccctggcagcggcagcggcggggccagccccctgaccagcgcccaggacagcgccttcctgaatgatgctgacatggtgatgagctttgtgaacctggtggagtatgacaaggagttcagcccccggcagaggcaccacaaggagttcaagttcaacctgagccagatccctgagggggaggtggtgacagctgctgagttccgcatctacaaggactgtgtgatgggcagcttcaagaaccagaccttcctgatcagcatctaccaggtgctgcaggagcaccagcaccgggacagcgacctcttcctgctggacaccagggtggtgtgggccagcgaggagggctggctggagtttgacatcacagccaccagcaacctgtgggtggtgaccccccagcacaacatgggcctgcagctgtctgtggtgaccagagatggagtgcacgtgcaccccagggctgctggcctggtgggcagagatggcccctatgacaagcagcccttcatggtggccttcttcaaggtgtctgaggtgcacgtgaggaccaccaggtctgccagcagcagaagacggcagcagagcaggaacagaagcacccagagccaggatgtggcccgggtgtcctctgccagtgactacaacagcagcgagctgaagacagcctgcaggaagcatgagctgtatgtgtccttccaggacctgggctggcaggactggatcatcgcccccaagggctatgctgccaactactgtgatggagagtgcagcttccccctgaatgcccacatgaatgccaccaaccacgccatcgtgcagaccctggtgcacctgatgaacccagaatatgtgcccaagccctgctgtgcccccaccaagctgaatgccatctctgtgctgtactttgatgacaacagcaatgtcatcctgaagaagtacagaaacatggtggtgcgggcctgtggctgccactag

SEQ ID NO: 120313 - DNA, 1431 bp, Artificial Sequence
  derived and/or modified sequence
gctgctgggggccagctgctgggagatggcggcagccctggccgcacagagcagcccccacccagcccccagagcagcagcggcttcctgtaccgccgcctgaagacccaggagaagcgggagatgcagaaggagatcctgtctgtgctgggcctgccccaccggccccggcccctgcacggcctgcagcagccccagcccccagccctgcggcagcaggaggagcagcagcagcagcagcagctgcccagaggagagcccccacctggccgcctgaagagcgcccccctcttcatgctggacctgtacaatgccctgtctgctgacaatgatgaagatggagccagcgagggggagcggcagcagagctggccccatgaggccgccagcagcagccagaggcggcagcccccacctggagctgcccaccccctgaacaggaagagcctgctggcccctggcagcggcagcggcggggccagccccctgaccagcgcccaggacagcgccttcctgaatgatgctgacatggtgatgagctttgtgaacctggtggagtatgacaaggagttcagcccccggcagaggcaccacaaggagttcaagttcaacctgagccagatccctgagggggaggtggtgacagctgctgagttccgcatctacaaggactgtgtgatgggcagcttcaagaaccagaccttcctgatcagcatctaccaggtgctgcaggagcaccagcaccgggacagcgacctcttcctgctggacaccagggtggtgtgggccagcgaggagggctggctggagtttgacatcacagccaccagcaacctgtgggtggtgaccccccagcacaacatgggcctgcagctgtctgtggtgaccagagatggagtgcacgtgcaccccagggctgctggcctggtgggcagagatggcccctatgacaagcagcccttcatggtggccttcttcaaggtgtctgaggtgcacgtgaggaccaccaggtctgccagcagcagaagacggcagcagagcaggaacagaagcacccagagccaggatgtggcccgggtgagcagcgccagtgactacaacagcagcgagctgaagacagcctgcaggaagcatgagctgtatgtgtccttccaggacctgggctggcaggactggatcatcgcccccaagggctacgccgccaactactgtgatggagaatgttccttccccctgaatgcccacatgaatgccaccaaccacgccatcgtgcagaccctggtgcacctgatgaacccagaatatgtgcccaagccctgctgtgcccccaccaagctgaatgccatctctgtgctgtactttgatgacaacagcaatgtcatcctgaagaagtacagaaacatggtggtgcgggcctgtggctgccactag

SEQ ID NO: 120314 - DNA, 1542 bp, Artificial Sequence
  derived and/or modified sequence
atgcccggcctgggccggcgggcccagtggctgtgctggtggtggggacttctctgcagttgttgcggcccccccccgctgagaccacccttgcctgcagcagccgccgccgccgcggggggacaattactgggagacggtggttctccaggtcgaaccgaacagccccccccgtcgccccaatcaagttccgggttcctgtacagaagacttaagacccaggagaagagggagatgcagaaagagatcctgtctgtgctagggcttccccaccggccccgccccctacatggtcttcaacagccacagcccccggccttgcgccagcaggaggaacagcagcagcagcagcagctcccaaggggagaaccccccccaggacgacttaaatctgcacccctgtttatgctcgacctttataacgccctgagcgcagacaacgatgaggacggcgcttccgagggtgagcgacagcagagctggccccacgaggccgctagctcttcccagagaagacagcccccgcctggggctgcccacccactcaataggaagtctctgctcgcgccaggcagcggatcgggcggtgcttccccattgacctctgcccaggacagcgccttcttaaacgacgctgatatggtgatgtctttcgtcaacctggtggagtatgataaagaattctctcctcgtcagaggcatcacaaagagtttaagttcaatctgtcacagatccccgaaggagaagtggttacagccgctgagttccgtatatacaaagactgtgtgatgggcagtttcaagaaccagaccttcctgatttcaatctaccaagttctgcaggagcaccagcacagagactccgatcttttccttctcgacacccgagtggtgtgggcttctgaggaaggttggctcgagttcgatattacagcaacgagcaacctgtgggtggtgactcctcagcataacatggggctccagctttcggtggtgacacgggatggagttcatgtccaccctagagccgccggactcgtcggaagggacggaccctatgacaagcagcccttcatggttgcattttttaaggtctctgaagtgcatgtgcgcaccacgagaagcgcctcctctcggagacgccaacaatcaagaaataggtcaactcagagccaggacgtggctcgagtgagctccgcctcagattataatagctctgagctcaaaacagcctgtaggaaacatgagctgtacgtttctttccaggacctgggctggcaggactggataatcgccccgaaagggtatgctgctaattattgcgatggtgaatgtagcttcccgctgaatgcccacatgaatgcaacaaatcacgcaattgtccaaaccttagtgcaccttatgaatccagaatatgtcccaaaaccctgctgcgcacctaccaagctgaacgcgatctctgtcctgtattttgacgacaatagcaacgttatactgaaaaaatatcgcaatatggtggttcgagcctgtggatgccactag

SEQ ID NO: 120315 - DNA, 1308 bp, Artificial Sequence
  derived and/or modified sequence
atgcagaaggagatcctgagcgtgctgggcctgccccaccggccccgaccactccacggcctgcagcagcctcaaccacctgcgttgcgacagcaagaagagcaacagcagcagcagcaactgcctaggggggaaccccctccgggtcggctaaagagtgcccccctgttcatgctcgatttgtataatgcactttccgctgacaacgacgaggacggggcatctgagggggaacgacagcagagctggccgcacgaggcagcaagtagttctcagaggcgtcaacctccccctggcgcggcccaccctctaaacaggaaaagtctcctggcccctggctctggttcaggtggcgcctcccctctcacatccgcacaggattccgccttcctgaacgatgcggacatggtgatgtcttttgtgaatctcgtggagtatgacaaggaattttcccctagacagcgccaccacaaggagtttaaatttaacctcagccagatccctgagggcgaggtggtgacagctgcggaattcaggatctacaaggattgtgtgatgggatccttcaaaaaccaaactttcctcatctcgatctatcaggtattgcaggaacatcagcatcgtgactccgacttatttttgctggacaccagagtggtttgggcaagcgaggaggggtggctggagttcgacatcactgctacctctaacctttgggtggtcaccccacaacataacatgggcttacagctgagcgtggtgaccagggacggcgtgcatgtgcatccgcgggccgcgggcttagtggggagggatggcccctatgacaaacagccctttatggtagcatttttcaaagtatcagaggttcacgtgcgcacgacgcgcagcgcttcctccaggaggcgccagcaatctcggaaccggtcaactcaatcacaggatgtggcccgagtgtcctccgcatcagactacaacagcagtgaactaaaaactgcctgcaggaaacatgaattatacgtgagctttcaggacctgggatggcaggactggattatcgcaccaaaggggtacgcggccaactactgtgacggagagtgttcctttcctctgaatgcccacatgaatgctacaaaccatgctatcgtccagaccttagtgcaccttatgaatcccgagtacgttcccaagccgtgttgtgcacctaccaaactgaatgctattagtgtcttgtacttcgacgataactctaacgttatcctgaagaagtatcgcaacatggtggtgcgcgcttgcgggtgccattag

SEQ ID NO: 120316 - DNA, 1431 bp, Artificial Sequence
  derived and/or modified sequence
gccgccggcggccagctgctgggcgacggcggcagccccggccggactgaacagccccctcccagtccacagtcatcctctggctttctatatcgccggctcaagacccaggagaagcgggaaatgcaaaaagaaatcttatccgtactcggactaccgcatcgcccccggcctttgcacggtctgcagcagccgcaacccccggctctacgccagcaggaggagcaacagcagcagcaacagctgccaagaggggaacccccacctggtcggctcaagagtgcccccctgttcatgctcgatctctataatgcactttccgcagacaacgacgaagacggcgcaagcgaaggcgagcgccagcaatcgtggcctcatgaggccgccagctcttcacagcgccgccagccccctcctggcgctgctcacccccttaatcggaaatcattgttagcgcccggatcaggctcgggcggtgcgagcccactcacctccgcccaggactcagcttttcttaacgacgcagatatggtcatgagtttcgtgaatctggttgagtacgacaaagagttcagcccaagacagcgacaccataaggaattcaaattcaacctttcccagatcccggagggggaggtcgtgactgcggccgagtttcgaatttacaaagattgcgtgatgggatcatttaagaaccagacttttttgatctctatctaccaggtattgcaggagcatcaacaccgggactccgacttgttcttgctggatacaagagttgtatgggctagcgaagagggctggctggagttcgacataaccgcaacatcaaatctctgggtcgtgaccccacaacataacatgggcctgcaattgtccgtcgtgacaagggatggcgtccacgtgcatcctagagctgctgggcttgttgggcgggacggaccatatgacaaacaacctttcatggtagctttcttcaaagtcagtgaagttcacgtgaggactacaagatcggcctcctccagacgcaggcaacaatccagaaatcgctccactcagtctcaggacgtggctagagtttccagcgccagcgattacaacagtagcgagctgaagacagcttgccgaaagcacgaactgtacgttagttttcaggacctgggatggcaggattggatcatagcaccaaagggctacgctgcaaattactgtgatggagagtgctcttttcctctgaatgcccacatgaacgctaccaatcacgctatcgtgcagacattagtccaccttatgaatccagagtacgttccaaagccttgctgcgccccaaccaaactgaacgccattagtgtcctttatttcgatgataacagcaacgtcatcttaaaaaaatatcggaatatggtcgtcagagcttgcgggtgtcactag

SEQ ID NO: 120317 - DNA, 1542 bp, Artificial Sequence
  derived and/or modified sequence
atgccaggactgggtcggagagcccagtggttgtgctggtggtggggactgctgtgtagttgctgcgggccacctcccttacgccctccgctccccgcagccgcagccgcagcagccggtgggcagctgctgggcgacggcggtagccccggacgtacagagcagccccctccctctccgcagtcctcaagcgggttcctttatcgcaggctcaaaactcaagagaaaagagagatgcagaaggaaatcctctctgtgctgggtttacctcatagacctcgacctttgcacgggctgcagcaaccacaaccccctgcactgcgtcaacaggaagaacagcagcagcagcagcagctgcctcgtggggagccacccccagggagactgaaatcggcaccgctttttatgctagacctatacaacgcccttagcgccgacaatgacgaggacggagcttccgaaggcgagcgtcagcagtcgtggccacacgaggcggctagctctagccagagacgacaaccaccgcctggtgctgcgcatcccctgaaccgaaaatctttgctggcacctggaagtgggagtggaggggcttctccattaacgtctgctcaggattctgcttttctgaacgacgcggatatggttatgagctttgtgaacctggtcgagtacgacaaggaattttccccgagacagaggcaccataaggagtttaaattcaatctttcccagatcccggagggcgaagttgtgacagccgctgaattcaggatctataaggactgcgtgatgggcagcttcaaaaatcagacattccttatttcaatctatcaggttttgcaggagcaccagcatcgtgattccgatcttttccttctggacacaagagttgtttgggcatctgaagagggctggctcgagtttgatattactgcaacatccaatctctgggtggtgactccccagcataatatgggtcttcagttatctgtagtgacaagagatggcgtacatgtgcatcccagagccgctggcttggtgggtcgagatggcccttatgataaacagccctttatggttgccttctttaaggtgtcagaggtgcacgtaaggaccactcggagcgcctcctctcgcagacgtcagcagtcccgtaaccgtagcacccagtctcaggacgtggctcgggtctccagtgcttccgactacaactcttcagagctgaaaacagcttgtcgtaagcatgagctgtatgtttcattccaggatttgggttggcaagactggattatcgctcctaagggctatgccgctaactattgtgatggtgaatgtagtttccctttaaatgcccacatgaatgccaccaaccatgcgatcgtgcagacactggtgcacttaatgaatccagagtatgtgcccaaaccatgttgcgcccctaccaaattgaacgcaatctcagtgctgtactttgatgataactctaacgtgatcctcaagaaatatcggaacatggtagtccgggcttgcggctgtcattag

SEQ ID NO: 120318 - DNA, 1308 bp, Artificial Sequence
  derived and/or modified sequence
atgcagaaggagatcctgtcggtactgggtttacctcataggcctcgtcccttgcatggcctccaacagccccaaccacccgctttgcgccagcaggaggagcagcagcaacagcagcagctcccgaggggagagccccctcctggtcgtctgaaatccgcgcctctgttcatgctggatctctataatgcactcagcgctgataacgatgaggatggggcttctgaaggggagcgccagcagtcctggccccacgaggctgcatcctcatcacaaaggagacagccgcctcctggcgcagcccatcccctcaatagaaaatccctcctggcccctggaagtggctcagggggagcaagcccccttacaagcgcccaggattccgccttcctgaacgacgctgacatggtcatgtcattcgtgaacctcgtggagtatgataaggagttctcccccagacaaagacaccacaaggagttcaaattcaatctgagtcagatcccagagggggaggtggtgacagccgctgagtttagaatatataaagactgcgtgatgggcagcttcaagaatcagacatttctcattagcatataccaggtgctgcaggaacaccaacacagggatagtgatcttttcttgctcgatactagagttgtgtgggcctcagaggaaggctggcttgagttcgatataaccgccacctcaaacctgtgggtggtgactccccagcacaacatgggcctgcagctctccgtggtgacacgcgatggtgtccacgttcatcccagagccgctggcctggtcggacgtgatggcccttacgataaacagcctttcatggtggctttttttaaggtgagcgaggttcatgtgagaacaacccggtctgcttctagcagacgtaggcagcagagtagaaatcgtagcacccagagccaggatgtcgccagagtaagctctgcctccgactacaactcctctgaattgaaaaccgcatgtaggaaacacgagctgtacgtgagttttcaggatcttggttggcaggactggatcatcgcacccaaaggttatgcggctaactactgtgatggcgagtgcagtttcccactcaatgctcatatgaatgctactaatcatgccatcgtccagactcttgttcacctcatgaatccagagtacgtgccgaagccttgttgtgctcccaccaagcttaatgcaattagcgtcctctatttcgatgacaatagtaacgttatcctcaagaaataccgaaacatggtggtgagagcttgcggctgccactag

SEQ ID NO: 120319 - DNA, 1431 bp, Artificial Sequence
  derived and/or modified sequence
gccgcaggaggccaactgctgggagacggaggcagcccgggtcgcactgagcagcctcctccgtcacctcagagcagctctggattcctctatcgtcgccttaaaacacaggaaaaacgggaaatgcagaaagaaatcctaagcgtgctgggtctcccgcatcgcccacgccctctccacggactacagcagccacagccacctgcactgcgccagcaagaggaacagcagcagcaacagcagctccccaggggcgagccccctcccggacgtttgaaatccgccccattatttatgctggacctatataatgctctgtcggcagacaacgacgaagacggcgctagcgaaggcgagcgccagcagtcctggccccatgaagccgcatcgagctctcagagacgtcaacctcccccaggcgctgcgcacccactcaacagaaaatctctgttggctcccggatcagggagtggaggcgcttcgccgcttactagtgcccaggattccgcatttctgaacgacgctgacatggtcatgagtttcgtcaatctggtagaatatgataaagaatttagtcctaggcaaagacaccacaaagaatttaagtttaacctttcccagataccggaaggagaggtagtcacagctgccgaattccggatttacaaagattgtgtgatggggtcatttaagaatcagacttttctgataagcatatatcaggtccttcaagagcatcagcacagggactcggaccttttcctcttggacacacgggtggtgtgggcttctgaagaaggatggctggaatttgatattactgcaacgagtaatctgtgggttgtgaccccgcagcataacatgggtctacagctgtcggtggtgacccgggatggagtgcacgtgcacccaagggctgctggcttggtcggccgtgatggtccctacgacaagcagcctttcatggtcgcttttttcaaagtgtccgaagtgcacgtaaggacaaccagatctgcaagtagccgaagacggcagcagagccgaaacagatcaacacagtcccaagatgtggccagagtatcctccgcctctgattataacagcagcgaactgaagactgcttgtaggaaacacgagttatacgttagcttccaggatctcggatggcaggattggatcatcgcccctaagggctacgcagctaactactgtgatggcgagtgcagcttccctctgaacgcccatatgaacgcgaccaaccatgccattgtacagacactggtgcatctaatgaatcccgaatatgttcccaaaccatgttgtgcgcctactaagctgaatgcaatctctgtgttatactttgatgacaattcgaatgtcattctcaagaagtatcggaacatggttgtgagggcctgtgggtgccattag

SEQ ID NO: 120320 - DNA, 2780 bp, Artificial Sequence
  derived and/or modified sequence
cgaccatgagagataaggactgagggccaggaaggggaagcgagcccgccgagaggtggcggggactgctcacgccaagggccacagcggccgcgctccggcctcgctccgccgctccacgcctcgcgggatccgcgggggcagcccggccgggcggggatgccggggctggggcggagggcgcagtggctgtgctggtggtgggggctgctgtgcagctgctgcgggcccccgccgctgcggccgcccttgcccgctgccgcggccgccgccgccggggggcagctgctgggggacggcgggagccccggccgcacggagcagccgccgccgtcgccgcagtcctcctcgggcttcctgtaccggcggctcaagacgcaggagaagcgggagatgcagaaggagatcttgtcggtgctggggctcccgcaccggccccggcccctgcacggcctccaacagccgcagcccccggcgctccggcagcaggaggagcagcagcagcagcagcagctgcctcgcggagagccccctcccgggcgactgaagtccgcgcccctcttcatgctggatctgtacaacgccctgtccgccgacaacgacgaggacggggcgtcggagggggagaggcagcagtcctggccccacgaagcagccagctcgtcccagcgtcggcagccgcccccgggcgccgcgcacccgctcaaccgcaagagccttctggcccccggatctggcagcggcggcgcgtccccactgaccagcgcgcaggacagcgccttcctcaacgacgcggacatggtcatgagctttgtgaacctggtggagtacgacaaggagttctcccctcgtcagcgacaccacaaagagttcaagttcaacttatcccagattcctgagggtgaggtggtgacggctgcagaattccgcatctacaaggactgtgttatggggagttttaaaaaccaaacttttcttatcagcatttatcaagtcttacaggagcatcagcacagagactctgacctgtttttgttggacacccgtgtagtatgggcctcagaagaaggctggctggaatttgacatcacggccactagcaatctgtgggttgtgactccacagcataacatggggcttcagctgagcgtggtgacaagggatggagtccacgtccacccccgagccgcaggcctggtgggcagagacggcccttacgacaagcagcccttcatggtggctttcttcaaagtgagtgaggtgcacgtgcgcaccaccaggtcagcctccagccggcgccgacaacagagtcgtaatcgctctacccagtcccaggacgtggcgcgggtctccagtgcttcagattacaacagcagtgaattgaaaacagcctgcaggaagcatgagctgtatgtgagtttccaagacctgggatggcaggactggatcattgcacccaagggctatgctgccaattactgtgatggagaatgctccttcccactcaacgcacacatgaatgcaaccaaccacgcgattgtgcagaccttggttcaccttatgaaccccgagtatgtccccaaaccgtgctgtgcgccaactaagctaaatgccatctcggttctttactttgatgacaactccaatgtcattctgaaaaaatacaggaatatggttgtaagagcttgtggatgccactaactcgaaaccagatgctggggacacacattctgccttggattcctagattacatctgccttaaaaaaacacggaagcacagttggaggtgggacgatgagactttgaaactatctcatgccagtgccttattacccaggaagattttaaaggacctcattaataatttgctcacttggtaaatgacgtgagtagttgttggtctgtagcaagctgagtttggatgtctgtagcataaggtctggtaactgcagaaacataaccgtgaagctcttcctaccctcctcccccaaaaacccaccaaaattagttttagctgtagatcaagctatttggggtgtttgttagtaaatagggaaaataatctcaaaggagttaaatgtattcttggctaaaggatcagctggttcagtactgtctatcaaaggtagattttacagagaacagaaatcggggaagtggggggaacgcctctgttcagttcattcccagaagtccacaggacgcacagcccaggccacagccagggctccacggggcgcccttgtctcagtcattgctgttgtatgttcgtgctggagttttgttggtgtgaaaatacacttatttcagccaaaacataccatttctacacctcaatcctccatttgctgtactctttgctagtaccaaaagtagactgattacactgaggtgaggctacaaggggtgtgtaaccgtgtaacacgtgaaggcaatgctcacctcttctttaccagaacggttctttgaccagcacattaacttctggactgccggctctagtaccttttcagtaaagtggttctctgcctttttactatacagcataccacgccacagggttagaaccaacgaagaaaataaaatgagggtgcccagcttataagaatggtgttagggggatgagcatgctgtttatgaacggaaatcatgatttcccttgtagaaagtgaggctcagattaaattttagaatattttctaaatgtctttttcacaatcatgtactgggaaggcaatttcatactaaactgattaaataatacatttataatctacaa

SEQ ID NO: 120321 - DNA, 1844 bp, Artificial Sequence
  derived and/or modified sequence
agaaagcccacgttggccgctgcggggagcgcggcgtggagaggcgggagaccgaattccggcgccgccgccgcggccgctgctcggtgcactagcccccttccttcccatcctttctgcgagcgggtttgctgggcagccgggcgaccgccgaacggaaagcaagatcctcgccgcctccgcttgaggaggcgtgcggcgcgcggagattttgagtgggagcgacggtgcccgagagctcaggggcgcggagttcgtgagcgagaaggaagttaaacctcgcggaatagactggcatttcgggacgccttgtcgccgcagtcctcctcgggcttcctgtaccggcggctcaagacgcaggagaagcgggagatgcagaaggagatcttgtcggtgctggggctcccgcaccggccccggcccctgcacggcctccaacagccgcagcccccggcgctccggcagcaggaggagcagcagcagcagcagcagctgcctcgcggagagccccctcccgggcgactgaagtccgcgcccctcttcatgctggatctgtacaacgccctgtccgccgacaacgacgaggacggggcgtcggagggggagaggcagcagtcctggccccacgaagcagccagctcgtcccagcgtcggcagccgcccccgggcgccgcgcacccgctcaaccgcaagagccttctggcccccggatctggcagcggcggcgcgtccccactgaccagcgcgcaggacagcgccttcctcaacgacgcggacatggtcatgagctttgtgaacctggtggagtacgacaaggagttctcccctcgtcagcgacaccacaaagagttcaagttcaacttatcccagattcctgagggtgaggtggtgacggctgcagaattccgcatctacaaggactgtgttatggggagttttaaaaaccaaacttttcttatcagcatttatcaagtcttacaggagcatcagcacagagactctgacctgtttttgttggacacccgtgtagtatgggcctcagaagaaggctggctggaatttgacatcacggccactagcaatctgtgggttgtgactccacagcataacatggggcttcagctgagcgtggtgacaagggatggagtccacgtccacccccgagccgcaggcctggtgggcagagacggcccttacgacaagcagcccttcatggtggctttcttcaaagtgagtgaggtgcacgtgcgcaccaccaggtcagcctccagccggcgccgacaacagagtcgtaatcgctctacccagtcccaggacgtggcgcgggtctccagtgcttcagattacaacagcagtgaattgaaaacagcctgcaggaagcatgagctgtatgtgagtttccaagacctgggatggcaggactggatcattgcacccaagggctatgctgccaattactgtgatggagaatgctccttcccactcaacgcacacatgaatgcaaccaaccacgcgattgtgcagaccttggttcaccttatgaaccccgagtatgtccccaaaccgtgctgtgcgccaactaagctaaatgccatctcggttctttactttgatgacaactccaatgtcattctgaaaaaatacaggaatatggttgtaagagcttgtggatgccactaactcgaaaccagatgctggggacacacattctgccttggattcctagattacatctgccttaaaaaaacacggaagcacagttggaggtgggacgatgagactttgaaactatctcatgccagtgccttattacccaggaagattttaaaggacctcattaataa

SEQ ID NO: 120322 - DNA, 1543 bp, Artificial Sequence
  derived and/or modified sequence
ggactgctcacgccaagggccgccgccggggggcagctgctgggggacggcgggagccccggccgcacggagcagccgccgccgtcgccgcagtcctcctcgggcttcctgtaccggcggctcaagacgcaggagaagcgggagatgcagaaggagatcttgtcggtgctggggctcccgcaccggccccggcccctgcacggcctccaacagccgcagcccccggcgctccggcagcaggaggagcagcagcagcagcagcagctgcctcgcggagagccccctcccgggcgactgaagtccgcgcccctcttcatgctggatctgtacaacgccctgtccgccgacaacgacgaggacggggcgtcggagggggagaggcagcagtcctggccccacgaagcagccagctcgtcccagcgtcggcagccgcccccgggcgccgcgcacccgctcaaccgcaagagccttctggcccccggatctggcagcggcggcgcgtccccactgaccagcgcgcaggacagcgccttcctcaacgacgcggacatggtcatgagctttgtgaacctggtggagtacgacaaggagttctcccctcgtcagcgacaccacaaagagttcaagttcaacttatcccagattcctgagggtgaggtggtgacggctgcagaattccgcatctacaaggactgtgttatggggagttttaaaaaccaaacttttcttatcagcatttatcaagtcttacaggagcatcagcacagagactctgacctgtttttgttggacacccgtgtagtatgggcctcagaagaaggctggctggaatttgacatcacggccactagcaatctgtgggttgtgactccacagcataacatggggcttcagctgagcgtggtgacaagggatggagtccacgtccacccccgagccgcaggcctggtgggcagagacggcccttacgacaagcagcccttcatggtggctttcttcaaagtgagtgaggtgcacgtgcgcaccaccaggtcagcctccagccggcgccgacaacagagtcgtaatcgctctacccagtcccaggacgtggcgcgggtctccagtgcttcagattacaacagcagtgaattgaaaacagcctgcaggaagcatgagctgtatgtgagtttccaagacctgggatggcaggactggatcattgcacccaagggctatgctgccaattactgtgatggagaatgctccttcccactcaacgcacacatgaatgcaaccaaccacgcgattgtgcagaccttggttcaccttatgaaccccgagtatgtccccaaaccgtgctgtgcgccaactaagctaaatgccatctcggttctttactttgatgacaactccaatgtcattctgaaaaaatacaggaatatggttgtaagagcttgtggatgccactaactcgaaaccagatgctggggacacacattctgccttggattcctagattacatctgccttaaaaaaacacggaagcacagttggaggtggg

SEQ ID NO: 120323 - DNA, 1542 bp, Artificial Sequence
  derived and/or modified sequence
atgcccggcctgggcagaagagcccagtggctgtgctggtggtggggcctgctgtgcagctgctgcggccccccccccctgagaccccccctgcccgccgccgccgccgccgccgccggcggccagctgctgggcgacggcggcagccccggcagaaccgagcagcccccccccagcccccagagcagcagcggcttcctgtacagaagactgaagacccaggagaagagagagatgcagaaggagatcctgagcgtgctgggcctgccccacagacccagacccctgcacggcctgcagcagccccagccccccgccctgagacagcaggaggagcagcagcagcagcagcagctgcccagaggcgagcccccccccggcagactgaagagcgcccccctgttcatgctggacctgtacaacgccctgagcgccgacaacgacgaggacggcgccagcgagggcgagagacagcagagctggccccacgaggccgccagcagcagccagagaagacagcccccccccggcgccgcccaccccctgaacagaaagagcctgctggcccccggcagcggcagcggcggcgccagccccctgaccagcgcccaggacagcgccttcctgaacgacgccgacatggtgatgagcttcgtgaacctggtggagtacgacaaggagttcagccccagacagagacaccacaaggagttcaagttcaacctgagccagatccccgagggcgaggtggtgaccgccgccgagttcagaatctacaaggactgcgtgatgggcagcttcaagaaccagaccttcctgatcagcatctaccaggtgctgcaggagcaccagcacagagacagcgacctgttcctgctggacaccagagtggtgtgggccagcgaggagggctggctggagttcgacatcaccgccaccagcaacctgtgggtggtgaccccccagcacaacatgggcctgcagctgagcgtggtgaccagagacggcgtgcacgtgcaccccagagccgccggcctggtgggcagagacggcccctacgacaagcagcccttcatggtggccttcttcaaggtgagcgaggtgcacgtgagaaccaccagaagcgccagcagcagaagaagacagcagagcagaaacagaagcacccagagccaggacgtggccagagtgagcagcgccagcgactacaacagcagcgagctgaagaccgcctgcagaaagcacgagctgtacgtgagcttccaggacctgggctggcaggactggatcatcgcccccaagggctacgccgccaactactgcgacggcgagtgcagcttccccctgaacgcccacatgaacgccaccaaccacgccatcgtgcagaccctggtgcacctgatgaaccccgagtacgtgcccaagccctgctgcgcccccaccaagctgaacgccatcagcgtgctgtacttcgacgacaacagcaacgtgatcctgaagaagtacagaaacatggtggtgagagcctgcggctgccactag

SEQ ID NO: 120324 - DNA, 1308 bp, Artificial Sequence
  derived and/or modified sequence
atgcagaaggagatcctgagcgtgctgggcctgccccacagacccagacccctgcacggcctgcagcagccccagccccccgccctgagacagcaggaggagcagcagcagcagcagcagctgcccagaggcgagcccccccccggcagactgaagagcgcccccctgttcatgctggacctgtacaacgccctgagcgccgacaacgacgaggacggcgccagcgagggcgagagacagcagagctggccccacgaggccgccagcagcagccagagaagacagcccccccccggcgccgcccaccccctgaacagaaagagcctgctggcccccggcagcggcagcggcggcgccagccccctgaccagcgcccaggacagcgccttcctgaacgacgccgacatggtgatgagcttcgtgaacctggtggagtacgacaaggagttcagccccagacagagacaccacaaggagttcaagttcaacctgagccagatccccgagggcgaggtggtgaccgccgccgagttcagaatctacaaggactgcgtgatgggcagcttcaagaaccagaccttcctgatcagcatctaccaggtgctgcaggagcaccagcacagagacagcgacctgttcctgctggacaccagagtggtgtgggccagcgaggagggctggctggagttcgacatcaccgccaccagcaacctgtgggtggtgaccccccagcacaacatgggcctgcagctgagcgtggtgaccagagacggcgtgcacgtgcaccccagagccgccggcctggtgggcagagacggcccctacgacaagcagcccttcatggtggccttcttcaaggtgagcgaggtgcacgtgagaaccaccagaagcgccagcagcagaagaagacagcagagcagaaacagaagcacccagagccaggacgtggccagagtgagcagcgccagcgactacaacagcagcgagctgaagaccgcctgcagaaagcacgagctgtacgtgagcttccaggacctgggctggcaggactggatcatcgcccccaagggctacgccgccaactactgcgacggcgagtgcagcttccccctgaacgcccacatgaacgccaccaaccacgccatcgtgcagaccctggtgcacctgatgaaccccgagtacgtgcccaagccctgctgcgcccccaccaagctgaacgccatcagcgtgctgtacttcgacgacaacagcaacgtgatcctgaagaagtacagaaacatggtggtgagagcctgcggctgccactag

SEQ ID NO: 120325 - DNA, 1431 bp, Artificial Sequence
  derived and/or modified sequence
gccgccggcggccagctgctgggcgacggcggcagccccggcagaaccgagcagcccccccccagcccccagagcagcagcggcttcctgtacagaagactgaagacccaggagaagagagagatgcagaaggagatcctgagcgtgctgggcctgccccacagacccagacccctgcacggcctgcagcagccccagccccccgccctgagacagcaggaggagcagcagcagcagcagcagctgcccagaggcgagcccccccccggcagactgaagagcgcccccctgttcatgctggacctgtacaacgccctgagcgccgacaacgacgaggacggcgccagcgagggcgagagacagcagagctggccccacgaggccgccagcagcagccagagaagacagcccccccccggcgccgcccaccccctgaacagaaagagcctgctggcccccggcagcggcagcggcggcgccagccccctgaccagcgcccaggacagcgccttcctgaacgacgccgacatggtgatgagcttcgtgaacctggtggagtacgacaaggagttcagccccagacagagacaccacaaggagttcaagttcaacctgagccagatccccgagggcgaggtggtgaccgccgccgagttcagaatctacaaggactgcgtgatgggcagcttcaagaaccagaccttcctgatcagcatctaccaggtgctgcaggagcaccagcacagagacagcgacctgttcctgctggacaccagagtggtgtgggccagcgaggagggctggctggagttcgacatcaccgccaccagcaacctgtgggtggtgaccccccagcacaacatgggcctgcagctgagcgtggtgaccagagacggcgtgcacgtgcaccccagagccgccggcctggtgggcagagacggcccctacgacaagcagcccttcatggtggccttcttcaaggtgagcgaggtgcacgtgagaaccaccagaagcgccagcagcagaagaagacagcagagcagaaacagaagcacccagagccaggacgtggccagagtgagcagcgccagcgactacaacagcagcgagctgaagaccgcctgcagaaagcacgagctgtacgtgagcttccaggacctgggctggcaggactggatcatcgcccccaagggctacgccgccaactactgcgacggcgagtgcagcttccccctgaacgcccacatgaacgccaccaaccacgccatcgtgcagaccctggtgcacctgatgaaccccgagtacgtgcccaagccctgctgcgcccccaccaagctgaacgccatcagcgtgctgtacttcgacgacaacagcaacgtgatcctgaagaagtacagaaacatggtggtgagagcctgcggctgccactag

SEQ ID NO: 120326 - protein, 431 aa, Artificial Sequence
  derived and/or modified sequence
MHVRSLRAAAPHSFVALWAPLFLLRSALADFSLDNEVHSSFIHRRLRSQERREMQREILSILGLPHRPRPHLQGKHNSAPMFMLDLYNAMAVEEGGGPGGQGFSYPYKAVFSTQGPPLASLQDSHFLTDADMVMSFVNLVEHDKEFFHPRYHHREFRFDLSKIPEGEAVTAAEFRIYKDYIRERFDNETFRISVYQVLQEHLGRESDLFLLDSRTLWASEEGWLVFDITATSNHWVVNPRHNLGLQLSVETLDGQSINPKLAGLIGRHGPQNKQPFMVAFFKATEVHFRSIRSTGSKQRSQNRSKTPKNQEALRMANVAENSSSDQRQACKKHELYVSFRDLGWQDWIIAPEGYAAYYCEGECAFPLNSYMNATNHAIVQTLVHFINPETVPKPCCAPTQLNAISVLYFDDSSNVILKKYRNMVVRACGCH

SEQ ID NO: 120327 - protein, 365 aa, Artificial Sequence
  derived and/or modified sequence
MHVRSLRAAAPHSFVALWAPLFLLRSALADFSLDNEVHSSFIHRRLRSQERREMQREILSILGLPHRPRPHLQGKHNSAPMFMLDLYNAMAVEEGGGPGGQGFSYPYKAVFSTQGPPLASLQDSHFLTDADMVMSFVNLVEHDKEFFHPRYHHREFRFDLSKIPEGEAVTAAEFRIYKDYIRERFDNETFRISVYQVLQEHLGRESDLFLLDSRTLWASEEGWLVFDITATSNHWVVNPRHNLGLQLSVETLDENSSSDQRQACKKHELYVSFRDLGWQDWIIAPEGYAAYYCEGECAFPLNSYMNATNHAIVQTLVHFINPETVPKPCCAPTQLNAISVLYFDDSSNVILKKYRNMVVRACGCH

SEQ ID NO: 120328 - DNA, 1293 bp, Artificial Sequence
  derived and/or modified sequence
atgcacgtgcgcagcctgcgcgccgccgccccccacagcttcgtggccctgtgggcccccctgttcctgctgcgcagcgccctggccgacttcagcctggacaacgaggtgcacagcagcttcatccaccgccgcctgcgcagccaggagcgccgcgagatgcagcgcgagatcctgagcatcctgggcctgccccaccgcccccgcccccacctgcagggcaagcacaacagcgcccccatgttcatgctggacctgtacaacgccatggccgtggaggagggcggcggccccggcggccagggcttcagctacccctacaaggccgtgttcagcacccagggcccccccctggccagcctgcaggacagccacttcctgaccgacgccgacatggtgatgagcttcgtgaacctggtggagcacgacaaggagttcttccacccccgctaccaccaccgcgagttccgcttcgacctgagcaagatccccgagggcgaggccgtgaccgccgccgagttccgcatctacaaggactacatccgcgagcgcttcgacaacgagaccttccgcatcagcgtgtaccaggtgctgcaggagcacctgggccgcgagagcgacctgttcctgctggacagccgcaccctgtgggccagcgaggagggctggctggtgttcgacatcaccgccaccagcaaccactgggtggtgaacccccgccacaacctgggcctgcagctgagcgtggagaccctggacggccagagcatcaaccccaagctggccggcctgatcggccgccacggcccccagaacaagcagcccttcatggtggccttcttcaaggccaccgaggtgcacttccgcagcatccgcagcaccggcagcaagcagcgcagccagaaccgcagcaagacccccaagaaccaggaggccctgcgcatggccaacgtggccgagaacagcagcagcgaccagcgccaggcctgcaagaagcacgagctgtacgtgagcttccgcgacctgggctggcaggactggatcatcgcccccgagggctacgccgcctactactgcgagggcgagtgcgccttccccctgaacagctacatgaacgccaccaaccacgccatcgtgcagaccctggtgcacttcatcaaccccgagaccgtgcccaagccctgctgcgcccccacccagctgaacgccatcagcgtgctgtacttcgacgacagcagcaacgtgatcctgaagaagtaccgcaacatggtggtgcgcgcctgcggctgccac

SEQ ID NO: 120329 - DNA, 1095 bp, Artificial Sequence
  derived and/or modified sequence
atgcacgtgcgcagcctgcgcgccgccgccccccacagcttcgtggccctgtgggcccccctgttcctgctgcgcagcgccctggccgacttcagcctggacaacgaggtgcacagcagcttcatccaccgccgcctgcgcagccaggagcgccgcgagatgcagcgcgagatcctgagcatcctgggcctgccccaccgcccccgcccccacctgcagggcaagcacaacagcgcccccatgttcatgctggacctgtacaacgccatggccgtggaggagggcggcggccccggcggccagggcttcagctacccctacaaggccgtgttcagcacccagggcccccccctggccagcctgcaggacagccacttcctgaccgacgccgacatggtgatgagcttcgtgaacctggtggagcacgacaaggagttcttccacccccgctaccaccaccgcgagttccgcttcgacctgagcaagatccccgagggcgaggccgtgaccgccgccgagttccgcatctacaaggactacatccgcgagcgcttcgacaacgagaccttccgcatcagcgtgtaccaggtgctgcaggagcacctgggccgcgagagcgacctgttcctgctggacagccgcaccctgtgggccagcgaggagggctggctggtgttcgacatcaccgccaccagcaaccactgggtggtgaacccccgccacaacctgggcctgcagctgagcgtggagaccctggacgagaacagcagcagcgaccagcgccaggcctgcaagaagcacgagctgtacgtgagcttccgcgacctgggctggcaggactggatcatcgcccccgagggctacgccgcctactactgcgagggcgagtgcgccttccccctgaacagctacatgaacgccaccaaccacgccatcgtgcagaccctggtgcacttcatcaaccccgagaccgtgcccaagccctgctgcgcccccacccagctgaacgccatcagcgtgctgtacttcgacgacagcagcaacgtgatcctgaagaagtaccgcaacatggtggtgcgcgcctgcggctgccac

SEQ ID NO: 120330 - DNA, 1296 bp, Artificial Sequence
  derived and/or modified sequence
atgcacgtgagaagcctgagagccgccgccccccacagcttcgtggccctgtgggcccccctgttcctgctgagaagcgccctggccgacttcagcctggacaacgaggtgcacagcagcttcatccacagaagactgagaagccaggagagaagagagatgcagagagagatcctgagcatcctgggcctgccccacagacccagaccccacctgcagggcaagcacaacagcgcccccatgttcatgctggacctgtacaacgccatggccgtggaggagggcggcggccccggcggccagggcttcagctacccctacaaggccgtgttcagcacccagggcccccccctggccagcctgcaggacagccacttcctgaccgacgccgacatggtgatgagcttcgtgaacctggtggagcacgacaaggagttcttccaccccagataccaccacagagagttcagattcgacctgagcaagatccccgagggcgaggccgtgaccgccgccgagttcagaatctacaaggactacatcagagagagattcgacaacgagaccttcagaatcagcgtgtaccaggtgctgcaggagcacctgggcagagagagcgacctgttcctgctggacagcagaaccctgtgggccagcgaggagggctggctggtgttcgacatcaccgccaccagcaaccactgggtggtgaaccccagacacaacctgggcctgcagctgagcgtggagaccctggacggccagagcatcaaccccaagctggccggcctgatcggcagacacggcccccagaacaagcagcccttcatggtggccttcttcaaggccaccgaggtgcacttcagaagcatcagaagcaccggcagcaagcagagaagccagaacagaagcaagacccccaagaaccaggaggccctgagaatggccaacgtggccgagaacagcagcagcgaccagagacaggcctgcaagaagcacgagctgtacgtgagcttcagagacctgggctggcaggactggatcatcgcccccgagggctacgccgcctactactgcgagggcgagtgcgccttccccctgaacagctacatgaacgccaccaaccacgccatcgtgcagaccctggtgcacttcatcaaccccgagaccgtgcccaagccctgctgcgcccccacccagctgaacgccatcagcgtgctgtacttcgacgacagcagcaacgtgatcctgaagaagtacagaaacatggtggtgagagcctgcggctgccactag

SEQ ID NO: 120331 - DNA, 1098 bp, Artificial Sequence
  derived and/or modified sequence
atgcacgtgagaagcctgagagccgccgccccccacagcttcgtggccctgtgggcccccctgttcctgctgagaagcgccctggccgacttcagcctggacaacgaggtgcacagcagcttcatccacagaagactgagaagccaggagagaagagagatgcagagagagatcctgagcatcctgggcctgccccacagacccagaccccacctgcagggcaagcacaacagcgcccccatgttcatgctggacctgtacaacgccatggccgtggaggagggcggcggccccggcggccagggcttcagctacccctacaaggccgtgttcagcacccagggcccccccctggccagcctgcaggacagccacttcctgaccgacgccgacatggtgatgagcttcgtgaacctggtggagcacgacaaggagttcttccaccccagataccaccacagagagttcagattcgacctgagcaagatccccgagggcgaggccgtgaccgccgccgagttcagaatctacaaggactacatcagagagagattcgacaacgagaccttcagaatcagcgtgtaccaggtgctgcaggagcacctgggcagagagagcgacctgttcctgctggacagcagaaccctgtgggccagcgaggagggctggctggtgttcgacatcaccgccaccagcaaccactgggtggtgaaccccagacacaacctgggcctgcagctgagcgtggagaccctggacgagaacagcagcagcgaccagagacaggcctgcaagaagcacgagctgtacgtgagcttcagagacctgggctggcaggactggatcatcgcccccgagggctacgccgcctactactgcgagggcgagtgcgccttccccctgaacagctacatgaacgccaccaaccacgccatcgtgcagaccctggtgcacttcatcaaccccgagaccgtgcccaagccctgctgcgcccccacccagctgaacgccatcagcgtgctgtacttcgacgacagcagcaacgtgatcctgaagaagtacagaaacatggtggtgagagcctgcggctgccactag

SEQ ID NO: 120332 - DNA, 1442 bp, Artificial Sequence
  derived and/or modified sequence
gggaaataagagagaaaagaagagtaagaagaaatataagagccaccatgcatgtcagatcgctcagagcagccgctccccactccttcgtggcactctgggcgcctctgtttctcttgcggtcggcattggcagatttctcgttggacaatgaggtccattcatcgttcatccaccgcaggctgaggagccaggagcgccgagagatgcagcgcgaaatcctgtcgatccttggacttccccaccggcctcggccacacttgcaaggaaaacataacagcgcccctatgttcatgctggatctctataacgcgatggccgtagaggagggaggaggaccgggagggcaggggttttcctacccatataaggccgtcttttcgacacagggtccgcccttggcgtcattgcaagattcccatttccttacggacgcggatatggtaatgagctttgtcaacctggtcgaacacgacaaggagtttttccatccccgctaccaccaccgcgagttcagattcgacctgtcaaagattccggaaggggaggctgtgacggcagcggaatttcggatctacaaagactatatccgggagcggtttgacaatgagacattccgaatttccgtctatcaggtactccaagagcaccttggtagggaatcggaccttttcctgcttgactcgagaactttgtgggcgtcggaggaagggtggctggtgtttgacatcacggccactagcaatcactgggtagtcaaccccaggcataatcttggactgcagctctcagtagagacattggatggtcagtcaatcaaccctaagcttgctggccttatcggacgacatgggccgcaaaacaagcagccgtttatggtggcgttcttcaaagccacggaggtacattttagatcgattaggtcaaccggcagcaagcagagatcccagaacagatccaagacgccgaaaaatcaggaagcgctccggatggccaacgtggcggagaattcgtcctcggatcagcgacaggcgtgcaaaaagcatgaattgtatgtgtcctttcgcgatcttggttggcaggattggatcatcgcacccgaggggtatgcggcgtactactgtgaaggcgagtgcgcgttccccttgaattcatacatgaacgcgaccaaccacgccattgtgcaaactctcgtccacttcatcaatcccgaaaccgtccctaaaccctgttgtgcccctacacagctgaatgccatttcagtgctctacttcgacgactcaagcaatgtgattttgaaaaagtacagaaacatggtggtgagggcgtgcgggtgccactgataataggctgccttctgcggggcttgccttctggccatgcccttcttctctcccttgcacctgtacctcttggtctttgaataaagcctgagtaggaag

SEQ ID NO: 120333 - DNA, 1296 bp, Artificial Sequence
  derived and/or modified sequence
atgcacgtgaggtccctgagagcagcagcaccccacagcttcgtggcgctttgggcaccattgttcctcctccgttccgcacttgcggacttctccctggacaatgaggtgcattcttcgtttatacaccgacgcctccgttcccaggagcgccgggagatgcaaagagaaattcttagtattcttggcctgccacacagaccccggccacacctgcagggaaagcacaactctgccccgatgttcatgttagatctatataacgctatggctgtagaagagggcgggggtcctgggggacaagggttttcgtatccatacaaggcagtcttctccacccaaggaccaccactcgcctctctgcaggacagtcacttcctgacagacgccgacatggtcatgtcctttgttaacctggtggaacacgataaagaattcttccatccccggtaccatcaccgcgaatttcgttttgatctctcgaagattcctgaaggggaggcagtgactgcagcggagtttcgcatttacaaagactacattagggagcgctttgataacgaaacatttaggatcagcgtgtatcaagttctccaggagcacctaggccgagagtctgatctgttcctgctggattccagaacactctgggccagcgaggaggggtggttggtgtttgacataactgccacctccaaccactgggttgtgaacccaagacacaacctgggtcttcagctcagcgtcgaaaccctggacggacagagcataaatcctaaattagcagggctcattgggaggcatggacctcagaacaagcagcccttcatggttgccttctttaaagctactgaagttcacttcaggtccatcagatctaccggttctaagcaacgctcccagaaccgcagcaaaacccctaaaaatcaggaggcactaagaatggcaaacgttgccgaaaacagctctagcgatcagcgccaagcctgcaaaaagcacgaactttacgtgagctttagggacctcggctggcaggattggattatcgcaccagagggatacgctgcttactattgcgagggtgaatgcgcatttccactgaatagttacatgaatgctacgaatcacgctatcgtccagacactcgtacacttcataaaccccgagaccgtacctaagccatgttgtgccccaacacagctgaacgcaatttctgtgctatatttcgacgatagcagtaacgtcatcctaaagaaatatcggaatatggtggtgagggcctgtggctgccactag

SEQ ID NO: 120334 - DNA, 1098 bp, Artificial Sequence
  derived and/or modified sequence
atgcatgtgaggtctctgagggccgccgccccccactcatttgtcgccctgtgggccccgctgttcctgctccgatccgcccttgcagactttagcctggacaatgaggtgcacagcagttttatccatagaagactgcggtctcaggagcggagagagatgcaacgcgaaattttaagcattctggggctgccacacaggcctcgcccccacctacagggaaagcataatagcgcgcccatgttcatgctcgatctgtacaacgccatggccgtagaggaagggggcgggccagggggccagggattctcatatccctataaggccgtcttttctactcaggggccaccacttgcctcactccaagactcccacttcctaacagatgccgatatggtaatgtccttcgtgaacttggtggagcacgataaggagttcttccatccacgttatcatcatcgcgagttccggtttgacctgagcaagatacccgagggcgaggctgtgaccgcggctgagtttaggatctataaggactatatccgagagcggtttgataatgaaacattccggattagcgtttatcaagtgttacaggagcatttgggaagggaatctgacctattcttgttagatagcaggacgctctgggctagcgaagaaggctggcttgtgttcgacatcaccgccacgtcaaatcactgggtcgtgaacccaaggcataatttggggcttcagctgtccgtcgagactttggatgaaaatagctccagcgaccaacgtcaggcttgcaagaaacatgagctgtacgtgtcattccgtgatcttgggtggcaagactggattattgcacctgagggctatgccgcttactactgcgagggcgaatgtgctttcccgctaaatagttatatgaacgctactaaccacgccatcgttcagacacttgtgcactttatcaatcccgaaaccgtccctaaaccatgttgtgcccccacccagctgaatgctatatccgtgctttatttcgacgactcttccaacgtaatcctgaagaagtatcgcaacatggtcgtgcgagcctgcggttgtcattag

SEQ ID NO: 120335 - DNA, 4013 bp, Artificial Sequence
  derived and/or modified sequence
cgaggcggcctcttgtgcgatccagggcgcacaaggctgggagagcgccccggggcccctgctatccgcgccggaggttggaagagggtgggttgccgccgcccgagggcgagagcgccagaggagcgggaagaaggagcgctcgcccgcccgcctgcctcctcgctgcctccccggcgttggctctctggactcctaggcttgctggctgctcctcccacccgcgcccgcctcctcactcgccttttcgttcgccggggctgctttccaagccctgcggtgcgcccgggcgagtgcggggcgaggggcccggggccagcaccgagcagggggcgggggtccgggcagagcgcggccggccggggaggggccatgtctggcgcgggcgcagcggggcccgtctgcagcaagtgaccgagcggcgcggacggccgcctgccccctctgccacctggggcggtgcgggcccggagcccggagcccgggtagcgcgtagagccggcgcgatgcacgtgcgctcactgcgagctgcggcgccgcacagcttcgtggcgctctgggcacccctgttcctgctgcgctccgccctggccgacttcagcctggacaacgaggtgcactcgagcttcatccaccggcgcctccgcagccaggagcggcgggagatgcagcgcgagatcctctccattttgggcttgccccaccgcccgcgcccgcacctccagggcaagcacaactcggcacccatgttcatgctggacctgtacaacgccatggcggtggaggagggcggcgggcccggcggccagggcttctcctacccctacaaggccgtcttcagtacccagggcccccctctggccagcctgcaagatagccatttcctcaccgacgccgacatggtcatgagcttcgtcaacctcgtggaacatgacaaggaattcttccacccacgctaccaccatcgagagttccggtttgatctttccaagatcccagaaggggaagctgtcacggcagccgaattccggatctacaaggactacatccgggaacgcttcgacaatgagacgttccggatcagcgtttatcaggtgctccaggagcacttgggcagggaatcggatctcttcctgctcgacagccgtaccctctgggcctcggaggagggctggctggtgtttgacatcacagccaccagcaaccactgggtggtcaatccgcggcacaacctgggcctgcagctctcggtggagacgctggatgggcagagcatcaaccccaagttggcgggcctgattgggcggcacgggccccagaacaagcagcccttcatggtggctttcttcaaggccacggaggtccacttccgcagcatccggtccacggggagcaaacagcgcagccagaaccgctccaagacgcccaagaaccaggaagccctgcggatggccaacgtggcagagaacagcagcagcgaccagaggcaggcctgtaagaagcacgagctgtatgtcagcttccgagacctgggctggcaggactggatcatcgcgcctgaaggctacgccgcctactactgtgagggggagtgtgccttccctctgaactcctacatgaacgccaccaaccacgccatcgtgcagacgctggtccacttcatcaacccggaaacggtgcccaagccctgctgtgcgcccacgcagctcaatgccatctccgtcctctacttcgatgacagctccaacgtcatcctgaagaaatacagaaacatggtggtccgggcctgtggctgccactagctcctccgagaattcagaccctttggggccaagtttttctggatcctccattgctcgccttggccaggaaccagcagaccaactgccttttgtgagaccttcccctccctatccccaactttaaaggtgtgagagtattaggaaacatgagcagcatatggcttttgatcagtttttcagtggcagcatccaatgaacaagatcctacaagctgtgcaggcaaaacctagcaggaaaaaaaaacaacgcataaagaaaaatggccgggccaggtcattggctgggaagtctcagccatgcacggactcgtttccagaggtaattatgagcgcctaccagccaggccacccagccgtgggaggaagggggcgtggcaaggggtgggcacattggtgtctgtgcgaaaggaaaattgacccggaagttcctgtaataaatgtcacaataaaacgaatgaatgaaaatggttaggacgttacagatatattttcctaaacaatttatccccatttctcggtttatcctgatgcgtaaacagaagctgtgtcaagtggagggcggggaggtccctctccattccctacagttttcatcctgaggcttgcagaggcccagtgtttaccgaggtttgcccaaatccaagatctagtgggaggggaaagagcaaatgtctgctccgaggagggcggtgtgttgatctttggaggaaaaatatgttctgttgttcagctggatttgccgtggcagaaatgaaactaggtgtgtgaaatacccgcagacatttgggattggcttttcacctcgccccagtggtagtaaatccatgtgaaattgcagaggggacaaggacagcaagtaggatggaacttgcaactcaaccctgttgttaagaagcaccaatgggccgggcacagtagctcccacctgtaatcccagcactttgggaggctgaggtgggcggatcatttgaggtcaggagttcgagaccagcctggccaacatggtgaaaccccatctctactaaaaatacaaaaattagccgggcatggtggcacgcacctgtaatcccagctactctggaggctgaggcaggagaattgcttgaaccccagaggtggaggttgcagtgagccaagatcgtcccactgcactccagcttgggtgacaaaacaagactccatctcaaaagaaaaaaaaaacagcaccaatgaagcctagttctccacgggagtggggtgagcaggagcactgcacatcgccccagtggaccctctggtctttgtctgcagtggcattccaaggctgggccctggcaagggcacccgtggctgtctcttcatttgcagaccctgatcagaagtctctgcaaacaaatttgctccttgaattaagggggagatggcataataggaggtctgatgggtgcaggatgtgctggacttacattgcaaatagaagccttgttgagggtgacatcctaaccaagtgtcccgatttggaggtggcatttctgacgtggctcttggtgtaagcctgccttgccttggctggtgagtcccataaatagtatgcactcagcctccggccacaaacacaaggcctaggggagggctagactgtctgcaaacgttttctgcatctgtaaagaaaacaaggtgatcgaaaactgtggccatgtggaacccggtcttgtgggggactgtttctccatcttgactcagacagttcctggaaacaccggggctctgtttttattttctttgatgtttttcttctttagtagcttgggctgcagcctccactctctagtcactggggaggagtattttttgttatgtttggtttcatttgctggcagagctggggctttttgtgtgatccctcttggtgtgagttttctgacccaaccagcctctggttagcatcatttgtacatttaaacctgtaaatagttgttacaaagcaaagagattatttatttccatccaaagctcttttgaacacccccccccctttaatccctcgttcaggacgatgagcttgctttccttcaacctgtttgttttcttatttaagactatttattaatggttggaccaatgtactcacagctgttgcgtcgagcagtccttagtgaaaattctgtataaatagacaaaatgaaaagggtttgaccttgcaataaaaggagacgtttggttctggctcttt

SEQ ID NO: 120336 - DNA, 1746 bp, Artificial Sequence
  derived and/or modified sequence
cgggcgagtgcggggcgaggggcccggggccagcaccgagcagggggcgggggtccgggcagagcgcggccggccggggaggggccatgtctggcgcgggcgcagcggggcccgtctgcagcaagtgaccgagcggcgcggacggccgcctgccccctctgccacctggggcggtgcgggcccggagcccggagcccgggtagcgcgtagagccggcgcgatgcacgtgcgctcactgcgagctgcggcgccgcacagcttcgtggcgctctgggcacccctgttcctgctgcgctccgccctggccgacttcagcctggacaacgaggtgcactcgagcttcatccaccggcgcctccgcagccaggagcggcgggagatgcagcgcgagatcctctccattttgggcttgccccaccgcccgcgcccgcacctccagggcaagcacaactcggcacccatgttcatgctggacctgtacaacgccatggcggtggaggagggcggcgggcccggcggccagggcttctcctacccctacaaggccgtcttcagtacccagggcccccctctggccagcctgcaagatagccatttcctcaccgacgccgacatggtcatgagcttcgtcaacctcgtggaacatgacaaggaattcttccacccacgctaccaccatcgagagttccggtttgatctttccaagatcccagaaggggaagctgtcacggcagccgaattccggatctacaaggactacatccgggaacgcttcgacaatgagacgttccggatcagcgtttatcaggtgctccaggagcacttgggcagggaatcggatctcttcctgctcgacagccgtaccctctgggcctcggaggagggctggctggtgtttgacatcacagccaccagcaaccactgggtggtcaatccgcggcacaacctgggcctgcagctctcggtggagacgctggatgagaacagcagcagcgaccagaggcaggcctgtaagaagcacgagctgtatgtcagcttccgagacctgggctggcaggactggatcatcgcgcctgaaggctacgccgcctactactgtgagggggagtgtgccttccctctgaactcctacatgaacgccaccaaccacgccatcgtgcagacgctggtccacttcatcaacccggaaacggtgcccaagccctgctgtgcgcccacgcagctcaatgccatctccgtcctctacttcgatgacagctccaacgtcatcctgaagaaatacagaaacatggtggtccgggcctgtggctgccactagctcctccgagaattcagaccctttggggccaagtttttctggatcctccattgctcgccttggccaggaaccagcagaccaactgccttttgtgagaccttcccctccctatccccaactttaaaggtgtgagagtattaggaaacatgagcagcatatggcttttgatcagtttttcagtggcagcatccaatgaacaagatcctacaagctgtgcaggcaaaacctagcaggaaaaaaaaacaacgcataaagaaaaatggccgggccaggtcattggctgggaagtctcagccatgcacggactcgtttccagaggtaattatgagcgcctaccagccaggccacccagccgtgggaggaagggggcgtggcaaggggtgggcacattggtgtctgtgcgaaaggaaaattgacccggaagttcc

SEQ ID NO: 120337 - DNA, 1296 bp, Artificial Sequence
  derived and/or modified sequence
atgcacgtgcgcagcctgcgggctgctgccccccacagctttgtggccctgtgggcccccctcttcctgctgcggagcgccctggccgacttcagcctggacaatgaggtgcacagcagcttcatccaccggcggctgcggagccaggagcggcgggagatgcagcgggagatcctgagcatcctgggcctgccccaccggccccggccccacctgcagggcaagcacaacagcgcccccatgttcatgctggacctgtacaatgccatggctgtggaggagggcggcggccctgggggccagggcttctcctacccctacaaggctgtgttcagcacccagggcccccccctggccagcctgcaggacagccacttcctgacagatgctgacatggtgatgagctttgtgaacctggtggagcatgacaaggagttcttccacccccgctaccaccaccgggagttccgctttgacctgagcaagatccctgagggggaggccgtgacagctgctgagttccgcatctacaaggactacatccgggagagatttgacaatgagaccttccgcatctctgtgtaccaggtgctgcaggagcacctgggccgggagagtgacctcttcctgctggacagcaggaccctgtgggccagcgaggagggctggctggtgtttgacatcacagccaccagcaaccactgggtggtgaaccccaggcacaacctgggcctgcagctgtctgtggagaccctggatggccagagcatcaaccccaagctggccggcctgattggccgccacggcccccagaacaagcagcccttcatggtggccttcttcaaggccacagaggtgcacttccgcagcatccgcagcacaggcagcaagcagaggagccagaacagaagcaagacccccaagaaccaggaggccctgaggatggccaacgtggccgagaacagcagcagtgaccagaggcaggcctgcaagaagcatgagctgtatgtgtccttccgggacctgggctggcaggactggatcatcgcccctgagggctatgctgcctactactgtgagggggagtgtgccttccccctgaacagctacatgaatgccaccaaccacgccatcgtgcagaccctggtgcacttcatcaaccctgagaccgtgcccaagccctgctgtgcccccacccagctgaatgccatctctgtgctgtactttgatgacagcagcaatgtcatcctgaagaagtacagaaacatggtggtgcgggcctgtggctgccactag

SEQ ID NO: 120338 - DNA, 1098 bp, Artificial Sequence
  derived and/or modified sequence
atgcacgtgcgcagcctgcgggctgctgccccccacagctttgtggccctgtgggcccccctcttcctgctgcggagcgccctggccgacttcagcctggacaatgaggtgcacagcagcttcatccaccggcggctgcggagccaggagcggcgggagatgcagcgggagatcctgagcatcctgggcctgccccaccggccccggccccacctgcagggcaagcacaacagcgcccccatgttcatgctggacctgtacaatgccatggctgtggaggagggcggcggccctgggggccagggcttctcctacccctacaaggctgtgttcagcacccagggcccccccctggccagcctgcaggacagccacttcctgacagatgctgacatggtgatgagctttgtgaacctggtggagcatgacaaggagttcttccacccccgctaccaccaccgggagttccgctttgacctgagcaagatccctgagggggaggccgtgacagctgctgagttccgcatctacaaggactacatccgggagagatttgacaatgagaccttccgcatctctgtgtaccaggtgctgcaggagcacctgggccgggagagtgacctcttcctgctggacagcaggaccctgtgggccagcgaggagggctggctggtgtttgacatcacagccaccagcaaccactgggtggtgaaccccaggcacaacctgggcctgcagctgtctgtggagaccctggatgagaacagcagcagtgaccagaggcaggcctgcaagaagcatgagctgtatgtgtccttccgggacctgggctggcaggactggatcatcgcccctgagggctatgctgcctactactgtgagggggagtgtgccttccccctgaacagctacatgaatgccaccaaccacgccatcgtgcagaccctggtgcacttcatcaaccctgagaccgtgcccaagccctgctgtgcccccacccagctgaatgccatctctgtgctgtactttgatgacagcagcaatgtcatcctgaagaagtacagaaacatggtggtgcgggcctgtggctgccactag

SEQ ID NO: 120339 - DNA, 1296 bp, Artificial Sequence
  derived and/or modified sequence
atgcacgtgcggagcctgcgggccgccgccccccacagcttcgtggctctttgggcgcccctgttcttactgagaagtgctctcgctgacttctcactggataatgaggttcattcttctttcatacaccggcggctgcgatctcaggaaagacgagagatgcagagggagattctttccatcttaggcctgcctcacagaccgagacctcacttacagggtaaacacaattctgcgcccatgttcatgctggatctgtataatgccatggccgtcgaggaaggaggtggccctgggggacagggattttcctatccttataaggccgtattttcaactcaaggtccccctctggcctcattgcaggacagccatttcctcacagatgccgacatggtcatgtccttcgtgaatcttgtcgaacacgacaaagaatttttccatcccagataccaccacagggagtttaggtttgatctctccaagatacccgaaggagaggccgtcactgccgcggaattcaggatttataaagactacattcgggagaggtttgacaacgaaacatttcgtatatctgtataccaagtattacaggaacacctgggaagggagtcagacctgttcttgttggattcccggacgctgtgggcgtccgaggaaggatggctcgtgttcgacattaccgccacatcgaatcactgggtagtgaatcccagacacaacttaggcttacagttatccgtggagaccctcgacggccagagcattaatcctaaactcgctgggctgataggaagacatggccctcagaataaacagcctttcatggtcgcattctttaaagccacagaggtgcatttcaggagcatacgctctacagggagtaagcagagatctcaaaatcgcagtaagacccctaaaaatcaggaggctttacggatggccaacgttgctgaaaactcctcaagcgaccaacggcaagcatgtaaaaaacatgaactgtacgtatcattccgggacctgggctggcaggactggatcatcgcaccagagggctacgcggcttattattgcgaaggcgagtgtgctttcccactaaactcctacatgaacgctacaaatcatgccattgtgcagaccctcgtacacttcataaatccagaaacagtgcctaagccatgctgcgcacccacacagcttaacgccataagcgtcctatattttgacgactcaagcaatgtgatattgaagaagtatcgtaacatggtggtgcgcgcctgtggatgtcactag

SEQ ID NO: 120340 - DNA, 1098 bp, Artificial Sequence
  derived and/or modified sequence
atgcacgtgcggagcctgcgggccgccgccccccacagcttcgtggccctatgggcccccctcttcctgctccggagcgccctggcagatttcagtctggacaacgaggtacatagttcttttatacacaggagactgcgcagtcaggaaagacgagagatgcagagggaaatcctctccatcctgggattgccgcaccgtccaaggcctcacttgcaggggaagcacaatagcgctcctatgtttatgttggatctgtataatgctatggcagtagaagaaggagggggccccggcggtcagggtttttcatacccctataaggcggtcttttcaacgcaaggccctccattggcaagcctgcaggattctcacttccttacagacgctgacatggtgatgtcttttgttaacctagtggagcacgacaaggaatttttccatccacggtatcaccatcgagagtttaggtttgacctgtccaagattccagagggggaggccgttactgccgccgaattccgcatatacaaagattatattagagaacggtttgacaatgaaaccttcaggatttctgtttaccaggtattgcaagagcatcttggtagagagtcagacctgtttttactggattcaagaaccttatgggccagcgaggagggttggctcgtgtttgatataacagcaaccagcaaccactgggtcgttaatcctcgacataacctgggactgcagttatcagtcgagactttggacgagaattcatcctccgaccagagacaggcatgcaagaagcacgagctgtacgtgtcttttagagacctcggttggcaagattggatcattgcccctgaaggctacgcggcttattattgtgagggggagtgtgccttcccgttaaacagttacatgaacgcaacaaatcacgcaatcgtacagacattagtgcactttataaatccggagacagtccccaaaccatgctgtgcgccaacacagctgaatgccatttctgtgctgtatttcgatgattcgagcaacgtaattctgaaaaagtatcgcaatatggtggttcgcgcatgtggatgccactag

SEQ ID NO: 120341 - DNA, 1296 bp, Artificial Sequence
  derived and/or modified sequence
atgcatgttcgtagcctgagagccgcagcaccccactcctttgtggcactatgggcgcctctgtttctgctcaggagcgcactggccgacttctccctcgataatgaggtgcactcatccttcattcaccgccgactccggagccaagaacgccgtgagatgcagagagaaatcctgtccatcctcgggctgccacaccgacctaggccgcatctacagggaaaacacaacagcgccccaatgtttatgctggacctatataatgctatggctgtggaggagggcggaggtcccggaggccaggggttctcatacccatataaagctgtgttctccacacaagggccaccattagcttccttgcaagattcacacttccttactgatgctgacatggttatgtcatttgtcaatttggtggaacacgataaggagtttttccatccacggtatcatcatagagagttccggttcgacctgagcaagattccagagggagaagctgtcactgccgcagagttcagaatttataaagactatatcagagaacgcttcgacaatgaaacatttcgtatcagtgtctaccaggtgttacaggagcatctgggaagggagtccgacctgttcctactcgacagtagaacactctgggccagcgaagaaggttggctcgttttcgacatcaccgcaacttccaatcactgggtggtgaacccaagacacaatctaggtttacaactgagcgtggagacactggacggtcagagcatcaatcccaaattggccggactgattggacgacatggacctcagaataaacagccatttatggtcgccttttttaaggcaactgaggtccactttaggtccattcggtccaccggctctaaacagagatcgcaaaaccgcagcaaaacgcctaagaatcaggaggctcttcgtatggctaatgtggccgaaaattcatcttctgatcaacgtcaagcttgcaagaaacatgaactctatgtgtcttttagggacttgggttggcaggattggatcatagctcccgaaggatacgctgcctattactgcgagggcgaatgcgcttttccgctgaatagttacatgaacgctaccaaccatgctattgtacagaccttagtgcatttcatcaatccagaaacggtcccaaagccatgctgtgcgccaacccagctgaacgccatctccgtgctgtactttgacgacagcagtaacgttattcttaagaaataccgcaacatggttgtgcgagcatgtggctgccattag

SEQ ID NO: 120342 - DNA, 1098 bp, Artificial Sequence
  derived and/or modified sequence
atgcacgtgaggagccttagggcggctgcgcctcacagtttcgtagctttatgggctcctctgttcctgctgcgatcagcactcgccgacttctctttagataacgaagtgcactcttcctttattcacaggaggctccgctcccaagagcgtagagaaatgcagagagaaatactgtcgatcttgggacttcctcaccggcctcggccacacttgcaggggaagcacaattcagcaccaatgttcatgttagacctctacaacgcaatggcggtggaagagggaggcggtcctggagggcagggcttcagctatccctataaggccgttttttcaactcagggcccaccactggcatcacttcaggactctcacttcctcacggatgccgacatggtgatgagcttcgttaacctcgttgagcacgacaaggaattcttccatcctcgttaccaccatcgagaatttcggtttgacctgtcaaaaatccccgagggagaagccgttacggccgcagagtttagaatctataaggattacatcagagaaaggttcgataatgaaacattccggataagcgtttaccaagtgctccaggagcacctcggtagagaaagtgacttgtttcttttggattctcgcactctgtgggcgagcgaggagggatggttggtgttcgacattaccgccacaagcaatcactgggtagtcaaccctaggcacaacttagggcttcagctcagcgttgagaccttagatgagaatagcagttccgaccagcgacaggcctgtaagaagcacgaactttatgtaagctttagagatctcgggtggcaagattggattatcgccccagaagggtatgcggcttactactgcgagggagaatgcgcatttccattgaactcttacatgaatgctactaatcatgccattgtgcaaaccctggtgcacttcattaacccggagacggttcccaagccatgctgcgccccaactcagctcaatgccatttcagttctttacttcgacgacagcagtaatgtgatcctgaagaaatacagaaatatggttgtgagggcatgtggctgtcactag

SEQ ID NO: 120343 - DNA, 1296 bp, Artificial Sequence
  derived and/or modified sequence
atgcatgtgcgctctctgcgagccgctgcaccccacagctttgtggccctctgggcacctctattcctgctaagatcagcattggcggacttttccctggacaacgaggtccactcgtcatttattcatagacgcctgaggtcacaggagaggagagagatgcaacgagaaatcctcagcatcctaggccttcctcacagaccacggccccaccttcaaggtaagcataactcagcccccatgttcatgctcgatttgtacaacgctatggccgtggaagagggaggcgggccgggcggacaagggttctcctatccctacaaagccgtattctcgacacaaggcccaccccttgccagcctccaggattcccattttttaacagacgctgacatggtgatgagtttcgtgaatttagtcgagcacgacaaggagttttttcaccctcggtatcaccaccgcgagttccgttttgatctgagcaaaatacctgaaggtgaagccgtgactgctgctgaatttcggatatacaaggactacatacgagaaaggtttgataatgagacttttagaatcagcgtatatcaggtcttacaggaacatctgggtcgggaaagcgacctgttcttactagactctagaactctctgggcgtcagaagaagggtggctggttttcgacattaccgccacaagcaaccactgggtagtgaacccgcgtcataatctgggcctgcagctgtctgtggagactttagatggacaatctatcaaccccaagctcgccggcctgataggaaggcacggcccacagaacaagcagcccttcatggtggccttcttcaaagccactgaagtacacttccgttcaattcggtcaacaggctctaagcaaaggtcacaaaacagaagcaagactcccaagaaccaggaagccctgcgcatggctaatgtcgccgaaaatagtagttcagaccagcgccaagcctgtaaaaaacatgagctgtatgtgtcatttagggaccttggctggcaagattggataattgcacctgagggatatgctgcgtactattgtgagggcgaatgcgcatttcctcttaacagctatatgaacgcaaccaaccacgctatcgtccagacactggtccacttcattaatccagagactgtacccaagccctgttgcgctccgacccaactgaacgcaatcagtgttttatacttcgatgacagttccaatgttattctcaagaagtataggaacatggtcgtacgagcttgtggatgccattag

SEQ ID NO: 120344 - DNA, 1098 bp, Artificial Sequence
  derived and/or modified sequence
atgcacgtgcgatcgctgagagccgctgcccctcattcctttgtggctctgtgggcaccactcttcctgctgcgaagtgctttggctgacttcagtctggataacgaggtgcatagctctttcattcatagaagactgcggtcacaagagcgcagagagatgcagcgagaaattctctcaatattgggcctacctcatcgcccccggccacatctgcagggcaaacataacagcgcccccatgttcatgttggatctgtacaacgctatggctgtggaggaaggtggaggtcccggcggtcaggggttctcttacccatacaaagcagtgtttagtacacagggcccccctctcgcttcactgcaagactcccatttcttgacagatgcagacatggtcatgagtttcgtcaatctcgtagaacacgacaaggaattcttccatccaagataccaccaccgcgagttcagattcgatttaagcaaaattcccgagggcgaggcggttacagcagctgagtttaggatctataaggactatatccgagaaagattcgacaacgagacatttagaatttcagtttatcaggtgctgcaggagcatctaggcagggagagcgacctgtttttgttggattcacgcacactttgggcgtccgaggagggctggctggtatttgacattacggcaacctcaaatcactgggtagttaacccccgacataatctcggtctgcagctgagtgttgaaactctcgatgagaattcatcgtctgaccagagacaggcctgtaaaaagcatgaactttacgtgtccttcagagatctcggatggcaagactggatcatcgccccagaggggtatgccgcttattactgtgagggagaatgcgcatttcctttgaactcatatatgaacgcaacaaaccacgctattgtccagacattggtccacttcatcaatcctgagaccgtacctaaaccttgttgtgctcccacccaactgaacgctatatccgtgctgtacttcgatgattcaagtaacgttatattgaaaaagtatcgcaatatggttgtgagagcctgcgggtgtcactag

SEQ ID NO: 120345 - DNA, 1296 bp, Artificial Sequence
  derived and/or modified sequence
atgcacgtgcgttccctaagggctgccgctcctcatagctttgttgctctttgggcgcccctctttttactgcgctccgccctagccgattttagcctcgacaacgaagtgcattcttcctttatacatagaaggctgcgctctcaggagcgcagggagatgcaacgcgaaatcctttcaatcctcggactccctcacagaccccggcctcatctgcaaggaaaacacaactccgcaccgatgttcatgctcgatctgtacaacgctatggctgtcgaagaaggcggagggccaggcggccaagggttctcctatccctacaaagccgtattctcgacacaaggcccaccccttgccagcctccaggattcccattttttaacagacgctgacatggtgatgagtttcgtgaatttagtcgagcacgacaaggagttttttcaccctcggtatcaccaccgcgagttccgttttgatctgagcaaaatacctgaaggtgaagccgtgactgctgctgaatttcggatatacaaggactacatacgagaaaggtttgataatgagacttttagaatcagcgtatatcaggtcttacaggaacacctggggagggaaagcgacttgttcctgttagactcccgaacactgtgggcctccgaggagggatggctggtgtttgacattactgctacttcgaaccactgggtggtgaaccctcggcataacttgggcctgcagctatccgtagagactttagacggacagagcattaaccctaaactagcgggccttattgggaggcatggtcctcagaataagcaacctttcatggtcgcattcttcaaagccaccgaagtccactttagaagcattcggtccaccggatcaaagcagagaagccaaaacagaagcaagactcccaagaaccaggaagccctgcgcatggctaatgtcgccgaaaatagtagttcagaccagcgccaagcctgtaaaaaacatgagctgtatgtgtcatttagggaccttggctggcaagattggataattgcacctgagggatatgctgcgtactattgtgagggcgaatgcgcatttcctcttaacagctatatgaacgcaaccaaccacgctatcgtccagacactggtccacttcattaatccagagactgtacccaagccctgttgcgctccgacccaactgaacgcaatctcagttttatactttgacgactccagcaatgtgatcctgaagaaatatcgaaatatggttgtgcgggcttgtggatgtcactag

SEQ ID NO: 120346 - DNA, 1098 bp, Artificial Sequence
  derived and/or modified sequence
atgcacgtcaggtcccttcgcgccgccgcaccccattcttttgtcgctctttgggcgccccttttccttctcagaagcgctcttgccgatttcagtctagataatgaagtgcacagcagcttcatccatcgccgcctgcgctcacaggaaagaagagaaatgcagagggaaattctctcgatacttggtctgccccatcggccgagaccgcatcttcagggcaagcacaacagtgctccaatgttcatgctagatctgtacaatgccatggcagtggaggaaggtggaggccccgggggtcaaggatttagttatccatataaagccgttttcagtacacaaggccctcccctggctagcctccaggactcccactttctaaccgacgccgatatggtgatgtcattcgtgaacctggtagagcacgataaggaattttttcatccccgctaccatcatcgagaattccgctttgatttgagcaaaatacctgagggggaagcggtcacagccgctgagtttcggatatacaaagactatattcgcgagagatttgacaatgagacgtttagaatatccgtctaccaggtacttcaagaacatctaggcagggagagcgacctgtttttgttggattcacgcacactttgggcgtccgaggagggctggctggtatttgacattacggcaacctcaaatcactgggtagttaacccccgacataatctcggtctgcagctgagtgttgaaactctcgatgagaattcatcgtctgaccagagacaggcctgtaaaaagcatgaactttacgtgtccttcagagatctcggatggcaagactggatcatcgccccagaggggtatgccgcttattactgtgagggagaatgcgcatttcctctcaatagctacatgaatgcgactaaccacgccattgtacagacattggttcacttcataaaccctgaaactgtccccaaaccttgttgtgccccaactcaattaaacgcaatcagtgtgctctattttgatgattcctctaatgtgattcttaagaagtatcggaacatggttgtgagagcttgtggatgtcattag

SEQ ID NO: 120347 - DNA, 1293 bp, Artificial Sequence
  derived and/or modified sequence
atgcatgtgcggagcctgcgggcagcggccccacacagctttgtcgcattgtgggctcccctgtttctactgcggtcagcgcttgcagattttagcctagacaacgaagtccattcctcattcatccaccgcaggctgaggtcacaagagcgacgagaaatgcaaagagaaattctctccattctcggactgccccaccgcccccgcccacacttgcagggaaagcataacagtgctccaatgttcatgcttgacctgtacaacgcgatggccgtggaagaaggaggtggaccaggcggccagggttttagttatccgtacaaggccgtcttctctacgcagggacctccgctcgcaagcctccaggacagtcattttctgaccgatgcagacatggttatgtcattcgtaaatctggtggagcacgataaagaattcttccatccgagataccatcaccgggaattccgattcgacctctccaagattcccgaaggagaggccgtgactgccgcggagttccggatttataaggactatattcgcgaacgatttgacaacgaaacctttcgtatcagtgtgtatcaggtactccaggaacacctggggcgcgagtcagacttatttctattggatagcaggactctgtgggcaagcgaagagggctggttggtgttcgacattaccgcgaccagtaaccactgggtagtgaatcctagacacaacttgggccttcagctaagcgtcgaaacccttgacggacaaagtattaacccaaagctggcgggcctcattggcaggcacgggccacagaataagcagcctttcatggtggctttctttaaggctacagaggttcattttaggtctattcgcagtacgggttccaaacagagaagtcagaaccggtccaaaacacctaagaaccaggaggcactgcgaatggcaaacgtcgccgaaaactctagctctgatcagaggcaagcctgcaagaagcatgagctgtacgtaagttttagagacctgggttggcaggattggatcatagccccagaggggtacgctgcctattactgtgagggagagtgcgcattcccactgaattcttatatgaatgctacgaaccacgcgatagtgcagaccctcgtgcatttcatcaacccagagacggtgccaaagccttgttgcgccccaacccaactgaatgctataagtgtgctgtatttcgatgacagttcgaatgtcatattgaagaaataccggaacatggtggtaagagcctgcgggtgtcac

SEQ ID NO: 120348 - DNA, 1293 bp, Artificial Sequence
  derived and/or modified sequence
atgcatgtccgttcattaagagccgccgcacctcactcatttgtggcactgtgggcccccctctttctgctgcggtctgcacttgctgacttttccttagacaatgaggtccactccagctttatccaccgaagactccgatcccaagaacggcgcgagatgcagagggaaatactcagcattcttggactgcctcacagaccacggccgcacctccagggcaagcacaactccgcccccatgtttatgctggatctgtacaacgctatggccgtcgaggagggaggagggcccggtggtcagggattttcttatccttacaaagctgttttctccacccaagggccgccgctagcctcgctgcaggattctcactttttgaccgatgccgacatggttatgtcttttgtcaatttggtggagcacgacaaggaattttttcatccacgataccaccaccgtgagttccggttcgatttgtcaaagatccctgaaggcgaggctgtaacagccgccgagtttcggatatacaaggactacatccgagaaaggttcgataacgaaactttccgcatttctgtgtatcaggtgctgcaggagcacttggggcgcgagtccgacctgttcctgttagacagtcggactctgtgggcttctgaggaggggtggctggtgttcgacatcaccgccactagcaatcattgggttgtcaatccgcggcataacctcggattgcaactgagtgtggaaactctagacggacagagtattaaccccaagctagctgggctcatcgggagacacggcccacagaacaaacaaccttttatggtggcatttttcaaggccaccgaggtgcatttcaggtccattcgttccaccggcagtaaacagcgatcccaaaatcgcagcaaaaccccgaaaaatcaagaggcgctgcggatggccaatgttgctgaaaattcatctagcgaccaacgccaagcgtgtaagaaacacgagctgtacgtgagttttcgtgacctcggctggcaggattggattatcgcacctgagggctacgccgcctactactgcgaaggcgagtgtgctttcccgctaaactcgtatatgaacgccacaaaccacgcaattgtgcagactctggttcactttatcaaccccgagacagtgccaaagccttgctgtgctcccacgcagctgaatgctatttctgtcctttacttcgatgattcaagcaacgtcatccttaagaagtatagaaatatggtggtgcgggcgtgcggctgccac

SEQ ID NO: 120349 - DNA, 1293 bp, Artificial Sequence
  derived and/or modified sequence
atgcatgtgaggagcctgcgtgctgcggcccctcatagctttgtcgccctgtgggcccctctttttctgttgagatccgctttggctgacttctctctagacaacgaggtgcacagttctttcatccacagaagactaagatcacaggagcgaagggagatgcaaagggaaatcttgtctattctcggactgccacacagacccagaccccacctgcagggtaagcacaattccgcccccatgttcatgctcgatctctataatgctatggcagtggaagaaggaggtgggcctggcggacagggcttctcttacccttataaggcagtattttcgacccagggtccccccctcgcgagccttcaggactctcactttctgactgacgccgacatggtcatgtcttttgtgaatctagtggaacacgacaaagagttcttccatcccagatatcaccatagagaatttcgattcgatctctcaaagatcccggagggcgaagccgtcactgcggccgagtttagaatttacaaggattatattcgggagcgattcgataacgaaacatttcgtatctccgtttaccaggtccttcaggagcatttaggacgggagagcgaccttttcttgctggacagcagaaccctttgggcctctgaggaaggatggttggtgtttgacattacagcgacgtcgaaccactgggtggttaacccaagacacaacctgggcctccagctcagtgtcgagaccctggacggccagagcattaatccgaagctcgctggcctcatcgggaggcacgggccccaaaataagcagccttttatggtcgcgttcttcaaagctaccgaggtgcactttcgaagtatcaggtccacggggtccaagcaaagatctcagaacaggtccaagacaccaaaaaatcaggaggccttgcggatggcgaacgtggctgagaactcctcttccgatcagcgacaggcctgtaagaaacatgaactgtacgtgtcattccgagacctgggatggcaggactggatcattgcaccggagggatatgcagcgtattattgcgaaggagagtgcgccttccctttgaacagctatatgaacgccacaaaccacgctattgtgcagacactcgtccactttattaatcccgagaccgtacctaagccatgttgtgcgccaacgcaattaaacgccatctcagtgctctatttcgatgattcatcaaacgtgatcttgaagaagtacaggaatatggtggtgcgagcatgtggctgccat

SEQ ID NO: 120350 - DNA, 1293 bp, Artificial Sequence
  derived and/or modified sequence
atgcacgtccgttcactgcgcgctgcggccccgcattcttttgtggcactgtgggccccgctttttctgctgaggtccgccttggcagatttcagcctggataacgaagtgcacagctctttcattcaccgccgcctgcgatctcaggaacggcgtgagatgcagcgcgagatcctgagcatcctaggccttccacaccgcccgcgcccgcatttgcaaggtaaacataatagcgccccgatgtttatgctcgatttgtacaacgctatggctgtcgaggagggtggtgggccgggaggccaagggttttcctacccatataaggccgtgttctctacccagggaccgccactggcaagcttgcaggatagccacttcctcacggacgccgatatggtgatgtcttttgtaaatctggttgagcacgataaagagttcttccacccacgttaccaccaccgcgagtttcgatttgacctgtccaagatccctgagggggaggcagtgacggccgctgaatttaggatctataaggattacatccgcgaaaggtttgataacgaaacgttccgcatctccgtctatcaggtcctccaggaacacctgggcagagaaagcgacctttttctgctggacagccggacactgtgggctagcgaagagggctggctggtgttcgatattacggcaacgtccaatcattgggtggtcaacccgcgccacaacttggggctgcaactgtccgtggaaaccctggatggtcagtccattaacccaaaactggctggcctgatcgggaggcatgggcctcagaacaagcagccgttcatggtggcgtttttcaaagccaccgaggtgcactttcgctccatccgatcaactgggtcaaaacagcggtctcaaaaccgctctaagaccccaaaaaaccaagaggctctgcgcatggcaaacgttgccgagaactctagcagcgatcaacgccaggcatgcaagaagcatgagctgtatgtgagctttcgggatctcggctggcaggactggattatagctcccgagggttatgccgcatattattgcgaaggtgagtgcgcctttcccctgaattcctacatgaatgcaaccaatcacgcaatcgtgcagacacttgttcactttattaacccggaaacggtgccgaagccgtgttgtgcgccaactcagctgaacgctatttccgtgctgtacttcgatgattccagcaatgtgattttgaaaaagtaccggaatatggtggtgagagcctgtggttgtcac

SEQ ID NO: 120351 - DNA, 1293 bp, Artificial Sequence
  derived and/or modified sequence
atgcacgtgcggtctctcagagcggctgcaccccactccttcgtggctctctgggcaccccttttcctattaaggtcggcattggctgatttttcattggataatgaagttcactccagctttatccacaggcggctgcgtagtcaagaacggcgggaaatgcagcgagaaattttgtctatcctgggactgcctcacaggcctaggccacacctccaaggcaagcacaactcggcacctatgtttatgctagatctctataacgcaatggccgtagaagagggcggcgggcccggaggacaaggattctcgtacccttataaagccgtcttctccacccagggaccacccctcgcttctcttcaggactctcatttcctaactgatgccgacatggtcatgagcttcgtcaatctggtggaacatgacaaagagttcttccatcccagatatcatcaccgagagttccgcttcgacctgtccaagattcctgaaggcgaagctgtgacagccgcagaattcagaatctataaggattacatacgggagaggtttgacaacgagaccttccgaatcagcgtgtaccaagttcttcaggaacacctggggcgggagtcagacctttttctgctcgactcacgcaccctatgggcgtcggaggaaggctggctggtattcgacatcacagccacatctaatcattgggtggtcaaccccaggcacaatttaggtcttcagttgagcgttgaaactttggatggccagagcattaatcctaaactagcgggactaatcgggcgacatgggccacagaataagcagcccttcatggttgctttcttcaaagcaactgaggtccacttccggtctatccgctcaaccggaagtaaacaacgttcccagaacagatcaaagacgccaaaaaatcaggaggccctccggatggctaatgtggccgagaattccagttctgatcagagacaagcgtgcaaaaaacatgaactgtatgtgagctttagagacctgggttggcaggattggatcattgctcccgagggatatgccgcctactactgcgagggagaatgcgcctttccgttgaattcctatatgaatgccaccaatcacgctattgtccagaccctggtgcactttataaaccccgaaacagtgccaaagccgtgttgtgctcctacacagttgaatgcaatcagcgtcctgtacttcgatgacagttctaacgtgatattgaaaaaataccggaacatggtggtcagggcttgcgggtgtcat

SEQ ID NO: 120352 - DNA, 1293 bp, Artificial Sequence
  derived and/or modified sequence
atgcatgtccggtcactgagggctgccgccccgcattcttttgtggcgctttgggcgccactcttcctccttagaagtgccctggcggacttcagcctggataatgaggtgcactcttccttcatccacaggaggctgcggtcgcaagagcgcagagagatgcaacgggaaatcctctcaatccttgggctgccgcacagaccgcggccccatctgcaagggaagcataatagtgcccccatgttcatgctggacctgtacaacgcaatggccgtggaagaagggggaggcccgggaggacagggattctcgtatccgtacaaagcagtcttttccacccaagggccgcccctcgcctccctgcaggatagccatttcctgaccgacgccgatatggtgatgagcttcgtcaacctggtggagcatgacaaagaattcttccacccacgttaccaccaccgagaattcagattcgacctcagcaagatcccagaaggtgaggccgtgacggcagcagaatttcgaatctacaaggattacatcagagaacgcttcgacaatgaaaccttccgcatctctgtttaccaagtcctccaggaacatttgggccgagagtcggatctgtttttgctcgacagtcggacgctttgggcctcggaggaaggttggctggtgtttgacattactgctacctcgaaccactgggtagtgaacccacgccataacctcggactccagctctcggtggagacgctcgacggacaatccatcaatcctaagctggcaggattgatcggacggcacggtccgcagaacaagcagccgttcatggtcgcgttcttcaaggcgactgaggtccactttcgctcgattcgcagcactggctctaaacagcgctcccagaatcggagcaaaaccccgaagaaccaggaggctctgcgcatggccaacgtggcggaaaactcgtcctcggatcagagacaagcctgtaagaagcacgaactttacgtgtccttccgggacctgggttggcaggactggatcatagctccagaagggtacgcggcatactattgcgaaggagagtgcgcctttccgctgaactcgtacatgaacgcaaccaatcacgcgatcgtgcagactctggtccacttcataaacccagagactgtgcctaaaccttgttgcgctcctacccaactgaacgcgatttccgtgctgtactttgatgattcctcaaatgtcatccttaagaagtaccgcaacatggttgtccgggcctgcggatgccat

SEQ ID NO: 120353 - DNA, 1293 bp, Artificial Sequence
  derived and/or modified sequence
atgcacgtgcgctcacttcgggcagccgcacctcatagcttcgtggccttgtgggcacctctctttctgctgagaagcgcccttgctgatttttcgctggataatgaagtccatagcagctttatccacaggcgactgaggtcgcaggagcggcgtgagatgcaacgcgagattctcagcattcttggcctgcctcatagaccacgtccacacttgcaaggtaagcataactccgcccctatgtttatgttggatctttacaacgcaatggcggtcgaagagggtggtgggcctggcggacagggtttttcgtacccctacaaggccgtgttttcaactcagggaccgcctcttgcgagcctccaggactcgcactttctcaccgatgccgatatggtgatgtcttttgtcaatctcgtggaacacgataaagagtttttccatcctagataccatcacagagaattccggtttgatctttcaaagatcccagaaggtgaagccgtcactgcagcagaatttcgcatatacaaggactatattcgcgaaaggtttgataacgaaactttcagaatctccgtttatcaggtcctgcaagagcacctgggccgagagtcagatctttttcttcttgattccaggaccctgtgggcatccgaagaaggatggctcgtgtttgatattactgcaacgtccaaccattgggttgttaatcctcgacacaacctcggtttgcaacttagcgtcgaaactctggatggccaatccattaaccccaagctggccggactgattggccgccacgggcctcagaacaagcagccattcatggtggcttttttcaaggcaactgaagtgcatttccgttccatcagatcgaccggtagcaagcagagatcgcagaaccgcagtaaaacccctaagaatcaggaagcgcttcgaatggcaaacgtggcagaaaactcctcctcggatcaaagacaagcgtgcaagaagcatgaactttacgtctcgtttagagatctgggatggcaagattggatcattgcgccagagggatacgccgcatactactgtgagggagagtgcgccttcccgttgaacagctacatgaacgcgactaatcatgcaattgtgcagactctggtccactttatcaatccagaaacggtgcccaagccttgttgcgcaccgacccaacttaatgcaatttcggtgctctacttcgatgattctagcaacgtgatcctgaagaagtaccggaacatggtggtgagggcatgtggttgtcat

SEQ ID NO: 120354 - DNA, 1293 bp, Artificial Sequence
  derived and/or modified sequence
atgcacgtgcggtccctgcgcgccgccgccccgcattctttcgtcgccctttgggcccctctgttcctcctgagatcggcactcgctgacttttcgctggacaatgaggtccactcatcattcatccataggaggcttcgctcccaggagcggcgcgagatgcagagagagatcctgtcaatcctgggtctgccccatcgacctcgcccgcacctgcaagggaagcacaattccgcaccgatgtttatgctcgatctgtacaacgcgatggctgtggaggaggggggcggcccaggaggccaaggattcagctacccatacaaggcagtgttttcgacccagggcccgccgctcgcgtcactgcaggattcacattttctgactgacgcggacatggtcatgtccttcgtgaaccttgtggagcacgataaagagtttttccacccgagataccatcaccgcgagtttaggttcgacctgagcaagatcccggagggagaagcggtcaccgcggccgaattccgcatctacaaggactacattcgggagcgcttcgacaatgaaacctttagaatctccgtgtaccaggtgctccaggaacaccttggccgtgaatcagatctcttcctcctcgacagccgcaccttgtgggcttccgaagagggatggctggtgtttgacatcaccgcgacctctaaccattgggtggtgaatcccagacacaaccttgggctccaattgagtgtggaaaccctggatggacaaagcatcaaccctaagctggcgggtctgatcggacgccatggaccgcagaataagcagccattcatggtggccttcttcaaggctactgaggtgcatttccgctccatcagatcgacgggatccaagcagcgctcacagaatcgctcgaaaactccgaagaatcaggaggccctgagaatggcaaatgtcgcagagaactcttcctctgatcagcgccaggcctgcaagaagcatgaactgtacgtgtccttccgcgacctgggttggcaggactggatcatcgcccccgagggatacgcggcctactactgcgaaggcgaatgcgccttcccgctgaatagctacatgaatgcgaccaatcacgcaatcgtccagactctcgtgcatttcatcaacccggaaaccgtcccaaagccttgctgcgctccgactcaactcaacgcgatatcagttctctacttcgatgacagctcaaacgtgatcttgaagaagtaccggaacatggtggtcagagcctgcggctgccac

SEQ ID NO: 120355 - DNA, 1293 bp, Artificial Sequence
  derived and/or modified sequence
atgcacgtgcgaagcttgagggcagccgccccccatagtttcgtggctctctgggcccccctgttcctgctccgctctgccttagctgacttctcgctagataatgaagtgcattcttcattcatccacagacgcctccggagccaagagagacgcgaaatgcaaagggaaatcctgtcaatcttgggattgccacatcgaccgcggccacacctgcaagggaaacataatagcgcaccgatgtttatgctggacctgtataatgccatggccgtcgaggaaggggggggccctgggggccagggattcagttacccgtacaaagccgtcttcagcactcaggggcctccactcgcatctttacaggatagtcatttcctgacggatgccgacatggttatgagcttcgtgaacttggtggagcatgacaaagaattcttccaccctcggtaccaccatcgggagttccggtttgatctgtccaagatccctgagggcgaggccgtaacagccgctgaattccgtatatataaggactatatccgggaacggtttgataatgagactttcaggatttctgtttatcaggtcctccaggagcatctcgggagggaatcagacctgttcttgctagattcgcggaccctgtgggcgagtgaagaaggctggctggtgttcgacatcactgccacgagtaaccattgggttgtcaaccctaggcataacctggggctccaactgagcgtggagactctggacggtcagtccattaatcccaagctcgccggtctcattggccggcacgggccccaaaacaaacagcctttcatggtagctttctttaaggcaaccgaggtgcatttccgctccattcgctccaccggatcgaagcagcgtagccagaatagatcaaagacaccaaagaaccaggaggcccttcgaatggcaaatgtggcggaaaattcatcaagcgatcagagacaggcctgcaagaagcacgaattgtacgtcagcttccgtgatctggggtggcaagattggatcatcgccccagagggctacgctgcctactactgcgaaggggagtgtgctttccctctgaacagttatatgaatgcaacaaaccatgcaattgtgcaaacacttgtccacttcatcaatcctgagaccgtcccaaagccctgttgcgccccaacgcagttaaatgccatctcggtgttgtacttcgacgacagcagcaatgtaatactgaaaaaatatcgcaacatggtggtcagagcctgcggttgccac

SEQ ID NO: 120356 - DNA, 1293 bp, Artificial Sequence
  derived and/or modified sequence
atgcacgtgcgctcgctgcgggccgcggcgccgcactctttcgtggccctgtgggccccattgttccttctgcggtccgcacttgccgatttctccctggacaacgaggtgcattccagcttcatccatcgccggcttaggtcgcaggagaggcgagaaatgcagagggaaatcctgagcatcctgggactccctcacagaccacgcccgcacttgcagggcaagcacaactcagcaccgatgttcatgctcgatctgtacaatgccatggctgtggaggaaggaggaggacctgggggccaaggtttttcctacccatacaaggccgtgttctcaacccagggaccccctctggccagcctgcaggactcccacttcttgaccgatgccgatatggtgatgtccttcgtgaacctggtcgagcacgacaaggagttcttccacccgcggtaccaccatagggaatttcggttcgacctgtcgaagataccggagggagaagctgtaaccgcggcagagttccgcatttacaaggattacattcgggagagattcgacaatgaaactttccggatctcggtgtatcaagtgctgcaggagcacttgggcagggagtcggacctgttcctcctggattcacggacgctttgggcctctgaggaaggatggctggtctttgatatcaccgctaccagtaaccattgggtggtcaatccaagacacaacctcggcctccaactgtcggtggaaacccttgatgggcagtcgatcaaccccaaactggcgggtctgatcggccggcacggcccgcagaataaacagcctttcatggtggcattcttcaaggccaccgaagtccactttcgctcgatcagatcgactgggagcaagcagagaagccagaatcgcagcaaaacgccgaaaaaccaagaagctcttagaatggccaatgtcgcagaaaatagctcgtccgatcagcgccaggcctgtaagaagcatgaactgtacgtcagcttccgggacctcggctggcaggactggatcatcgcgccagagggatacgctgcttactactgcgaaggagaatgtgcgtttccactcaacagctacatgaatgctacgaaccacgccatcgtccaaaccttggtgcactttatcaatccggaaacggtgccaaaaccatgctgtgcccctactcaactgaatgcgatcagcgtgctttactttgacgattcttcgaacgtcatccttaagaagtaccgaaacatggtggtgcgggcgtgcggctgccac

SEQ ID NO: 120357 - DNA, 1293 bp, Artificial Sequence
  derived and/or modified sequence
atgcatgtccgatctctgagagcggcagcaccacattcctttgtcgcactctgggcacctctgtttcttctccgatccgccctggcagactttagtctggacaatgaggtgcactctagtttcattcatcgaaggctccgcagccaagagaggagagagatgcaaagagagattttgtcaatacttgggcttccccatagaccccgaccgcacttgcaaggaaagcataattcagctccgatgtttatgcttgatctttacaatgcaatggcagtggaagaaggaggagggccaggtggtcagggcttctcctacccctataaagcagtgttctcgactcaaggacctcctctcgcgtcactgcaggactcccatttcctcacggatgccgacatggtgatgtcatttgtgaaccttgttgagcatgacaaggagtttttccatccgaggtaccaccaccgagagtttcggttcgatctttccaagatccccgagggcgaagccgtcaccgcagcagaattccgtatttacaaggattacatccgcgaacggttcgataatgaaaccttcagaatctcagtctaccaggtgcttcaggaacacctcggcagagagtccgacctgtttctgctggactcgaggaccctgtgggcgagcgaagagggatggttggtttttgacataactgccacctccaatcactgggtcgtgaacccgagacataacctgggtttgcagctttccgtggagacgttggatggccaatcgataaaccctaagctggccggactgattggcagacatggtcctcaaaacaagcaaccctttatggtcgcatttttcaaggccaccgaagtgcatttccggtcgattagatccactgggtccaaacaaagatcccagaaccggagcaagaccccaaaaaaccaagaagcactgcgaatggcaaatgtggccgaaaattcgtcgtcagatcagagacaggcctgcaaaaagcacgagctctacgtgtcgttccgtgatctcggatggcaggattggattattgcccctgaggggtacgcagcttactactgtgaaggagaatgtgcattccctcttaattcgtacatgaatgccaccaaccatgccattgtgcagactctggtgcatttcataaacccagaaactgtccctaaaccttgctgcgctcctactcagttgaacgctatatccgtcctgtattttgatgacagcagcaatgtgattcttaagaagtacagaaacatggtggtgagggcatgtggctgccat

SEQ ID NO: 120358 - DNA, 1293 bp, Artificial Sequence
  derived and/or modified sequence
atgcacgtgagaagcctccgggcagcagccccccatagcttcgtcgcactctgggcacctcttttcctccttcggtcggctctggcagatttctcccttgacaacgaagtgcattcctcgtttatccatagacgcctcaggtcccaggaacgacgcgaaatgcagcgggaaattctgtccattcttggacttccacatcgtcctcggccacatttgcagggtaaacacaactcagcgccgatgtttatgcttgatctttacaacgcaatggccgtggaagaaggtggcggacctggaggacaagggttcagctacccgtacaaggccgtgttttcgactcagggtcctccattggcatcccttcaagactcccattttcttaccgacgccgatatggtcatgagcttcgtcaacctggttgagcatgataaagagttttttcatccaagataccaccaccgggagtttcgtttcgatctttccaagatccccgaaggtgaggccgtgaccgcagccgaattcagaatatacaaggattacatacgggaacgattcgataacgaaaccttccgcataagcgtctaccaagtcttgcaagaacatttggggcgagaatcagatcttttcctgctggactcccgcaccctttgggccagcgaagaaggttggcttgtgttcgacattacggcaacttcgaatcactgggtggtcaacccaagacacaatctgggactccaactgagcgtggaaactcttgatggacaatcgataaaccccaagctcgccggacttattggtcgacacggcccacaaaacaagcagccttttatggtcgctttctttaaggcgaccgaggtgcactttagatcgattagaagcactggatcaaagcagcgatcacaaaataggtcgaaaactcctaagaatcaggaagcacttcggatggcaaacgtggcggaaaactcctcatccgatcagagacaagcgtgtaagaaacacgaactgtatgtgagcttcagagatctcggatggcaggactggataattgctccagaaggttatgcagcttactactgtgaaggcgaatgtgcattccctcttaacagctacatgaacgcaaccaaccacgccattgtccaaacgctggtgcacttcattaatcccgaaactgtcccaaagccatgctgtgcacccacgcaacttaacgcgatctccgtcctgtactttgacgattcctcaaacgtgattctgaagaaatacagaaacatggtggtgcgcgcatgcgggtgtcac

SEQ ID NO: 120359 - DNA, 1293 bp, Artificial Sequence
  derived and/or modified sequence
atgcatgtacgttcacttagggctgcggcaccacattcttttgtagcattgtgggcaccactttttctacttcgatcagccctcgctgatttttcactggataacgaagtgcactcttcatttatacatagaagacttagatctcaagagcgtcgagaaatgcaacgtgaaatattgagcattcttggattgccacataggccgcgaccgcatttgcaaggcaaacacaattcggcaccaatgtttatgctggatctctataatgcaatggcggtagaggagggaggaggcccaggaggacaaggatttagttatccttataaagcagtcttttcgacgcagggaccaccactggcgagtctccaagattctcattttttaactgatgcagacatggtgatgtcatttgttaatttggtggaacacgataaagaattttttcatccacgatatcatcatcgagagtttagattcgatcttagcaagataccggagggagaagccgttacggctgccgaatttcgaatttataaggattatattcgtgagaggttcgataatgagacgtttcgaatatcagtttaccaagttctccaggagcacttgggaagagagagtgatcttttcctactagattcaagaacactatgggcatcagaagagggctggctggtgtttgatattactgcgacgtctaatcattgggtcgtgaatccgagacataatttaggactccaattaagtgtcgaaacactcgatggacaatccattaatccaaagctcgccggtctcattggacgtcacggaccacagaataaacagccattcatggtcgccttcttcaaagctacggaagttcacttccgatcaattcgttcgacaggatctaagcagcgaagtcaaaatagatccaaaactccgaagaatcaggaggcgttgcgcatggcaaacgtcgcagaaaactctagttcagaccagcgtcaagcatgcaagaaacatgaactgtacgttagctttcgggatttaggctggcaagattggatcattgccccggagggatatgcggcatattactgcgaaggagagtgcgcgtttcctctaaattcatacatgaacgccacaaatcatgcgatagttcaaaccctagtccatttcatcaatcctgagactgtcccaaaaccgtgttgcgctccgactcaactgaatgccatctcagtactttacttcgatgactctagtaatgttatattaaaaaaatatagaaacatggtagttcgtgcatgtggatgccac

SEQ ID NO: 120360 - DNA, 1293 bp, Artificial Sequence
  derived and/or modified sequence
atgcatgttcgatccctgagggctgcagcgccacattcgttcgtggcactctgggcaccgctctttctcctcagatcagcgctggcagacttttcgcttgataacgaggtgcattcatcctttattcatcgtcgcctgaggtcacaggagcgcagagagatgcagagggaaattctgtcaattctgggacttcctcaccgcccacgcccacatctccaagggaagcacaattcagcaccgatgttcatgctcgatctttacaatgcaatggcagtggaagagggaggtggtcccggaggtcagggcttctcctacccttacaaggccgtgttctcgacccaggggccacctcttgcctcgctgcaagattcgcattttctgactgatgcagacatggtcatgtcctttgtgaaccttgtggagcatgataaggaattctttcaccctagataccaccatcgggaatttaggtttgacctttcgaagatacctgagggagaggcggtgaccgcagcagaatttcggatttacaaggattacattagagaacgcttcgacaacgaaacctttagaatttcggtctaccaggtcctgcaagaacaccttggaagagagtcagatctgtttctgttggattcgagaactctttgggcatcggaagaaggctggcttgtctttgacatcacggcaacttccaatcattgggtcgtgaaccccagacacaatctgggattgcaactgtccgtggaaacccttgacgggcagtccattaacccaaagttggcaggactgattggccgccacggaccacagaataagcagccctttatggtggcattctttaaggcgaccgaagtgcattttcgatcaatcagatcgaccggcagcaaacagagatcgcagaatcgtagcaagactccaaagaatcaggaagcactgaggatggcaaacgtcgcagaaaattcctccagcgaccaacgccaggcctgtaagaagcatgaactgtacgtgagtttccgggatctgggttggcaggattggatcatagctccggagggctacgcggcgtactactgcgagggagaatgcgcgtttccacttaattcctacatgaatgcgactaaccacgccatcgtgcagactctggtgcacttcatcaatccagaaaccgtacctaagccatgttgtgctcctactcaactgaatgccatctcagtgctgtacttcgatgactcgtccaacgttattctgaaaaagtatagaaacatggtggtgcgggcatgtgggtgtcat

SEQ ID NO: 120361 - DNA, 1293 bp, Artificial Sequence
  derived and/or modified sequence
atgcacgtcagatctctgagagcggccgcgccgcatagctttgtcgctctttgggcgccgctcttcctgcttcgctctgccctggctgatttttctctcgacaacgaagtccactcatccttcatccaccgcagacttcggtcccaagagcgccgcgaaatgcaacgggaaatcctgtcgatcctcggactgccgcaccgacctcggccccacctccaaggtaagcacaactccgccccgatgttcatgctggacctgtacaacgcgatggcagtcgaggaagggggcggacctggcggtcagggcttttcatacccgtacaaagctgtgtttagcacccagggaccgccactggcctcgctgcaggattcccacttcctcactgatgctgacatggtgatgtcattcgtcaatctcgtggaacacgacaaggaattctttcaccctcgttaccatcatagagaattccgcttcgaccttagcaagatacccgagggagaagccgtcactgccgctgaatttcggatctacaaggattacattagggagcgcttcgacaacgaaacgttcagaatctcggtgtaccaggtgcttcaggagcatctgggacgcgagtccgatctgttcctgcttgactcccgcacgctgtgggcgtcggaggaaggatggctggtgttcgacatcaccgccacgtcgaatcactgggtggtgaacccacggcataacctgggactgcagctgtcggtggaaaccctggacgggcagtctatcaatccaaagctcgcgggactgatcggcagacatggccctcaaaacaaacaaccattcatggtggctttcttcaaggccaccgaagtgcattttcggtctatccggagcactgggtccaagcagaggtcgcagaacaggtcaaagacccctaaaaaccaggaagcgctcagaatggccaacgtggcagagaatagctcgtcggatcagcggcaggcttgcaaaaagcacgagctttacgtttcctttcgcgaccttggatggcaagactggatcattgcaccggaaggctacgcggcatattactgtgaaggggagtgcgccttccctttgaacagctatatgaatgccaccaaccacgctatcgtgcagactttggtgcactttatcaacccagagactgttccgaagccctgctgtgcccctactcaattgaacgcaattagcgtgctctacttcgatgatagctctaatgtcattctcaaaaagtaccggaacatggtggtgcgagcctgcggctgccat

SEQ ID NO: 120362 - DNA, 1293 bp, Artificial Sequence
  derived and/or modified sequence
atgcacgtgcgttccctccgtgctgccgccccccattctttcgtcgctctgtgggctcctcttttcttgctgaggtccgccttggctgacttcagtctcgacaacgaagtccattccagtttcatacatcgccgtctgagatctcaggaacgccgtgaaatgcaacgtgaaattctgtctatcctgggcctgccccatcgtccacgccctcacctccagggaaaacacaacagcgctcccatgttcatgcttgacctttacaatgctatggccgttgaggagggaggaggacccggaggtcagggtttctcctatccatacaaggccgtgttcagcacacagggtccacccctcgctagcctgcaagactcacactttctgactgatgctgatatggtcatgtccttcgtcaacttggtcgaacacgacaaggaattcttccacccaaggtatcatcatagggagtttcgtttcgatttgtccaagatacctgagggagaagccgtcaccgctgccgagttccgcatatataaagactacattagagaacgtttcgacaacgagacattcaggatcagtgtgtatcaggtcctgcaggaacatctgggcagagaaagcgacctgtttctcctcgatagcagaactttgtgggccagcgaagaaggatggctcgtgttcgacatcaccgctacatcaaaccactgggtagtcaaccctcgtcacaacctcggtctgcagctttctgtcgagacactcgacggacagtctatcaaccctaaattggctggactcattggtcgccacggtccacagaacaagcagccattcatggtggctttcttcaaggccacagaggtacattttcgttcaatccgcagtactggttctaaacaacgcagccagaatcgcagcaaaacacctaaaaatcaggaggctctgaggatggccaacgttgccgaaaactcctcttctgaccagaggcaagcttgtaagaaacacgagctctatgttagtttcagagatctgggatggcaggattggatcatcgctcccgagggttatgctgcttactactgcgagggtgagtgcgccttccctctgaatagttacatgaacgctactaatcatgcaatcgttcagaccctggtccatttcataaatcccgaaaccgttcccaagccctgctgtgcccctacacagctcaatgctattagtgtgctctactttgacgacagctccaacgtcattcttaagaaataccgcaatatggtagtgcgtgcatgcggctgtcat

SEQ ID NO: 120363 - DNA, 1293 bp, Artificial Sequence
  derived and/or modified sequence
atgcatgtccgctcgctgcgcgccgcagcgcctcacagctttgtcgccctctgggcacctctttttctgctgaggagcgccctggcagatttttccctcgacaacgaggtgcattcttccttcattcacagaaggctcagatcgcaagaacgaagagagatgcaacgagaaatcctctcgatcctgggactccctcacagacctagaccgcatctgcagggaaagcataacagcgcacctatgttcatgctcgatctctacaacgcaatggcagtggaggaaggaggtgggccaggaggccaaggattttcctacccttacaaggcagtgttcagcacccaaggcccccctctcgcatcgcttcaagatagccacttccttactgatgcagacatggtgatgtcctttgtgaatcttgtggaacacgataaggagtttttccatccacgataccatcatcgggagttcagatttgatctttcaaaaatccctgaaggagaagccgtgaccgctgctgaattccgtatatacaaggattacatccgcgagcgctttgacaatgagacttttcgcattagcgtctaccaagtgctgcaagaacatctgggtagagagtcggaccttttcctgctggattccaggaccttgtgggcaagcgaggaagggtggcttgtgttcgatatcactgcaacttccaaccattgggtcgtcaacccccggcataatcttggcttgcagctttccgtggagacgctcgacggacagagcattaacccgaagttggcgggactgatcggacgacacggaccacagaacaagcagcctttcatggtggcatttttcaaggcaacggaagtccactttaggtccattcgttcaaccggatccaaacaacgctcccagaatagatcgaaaactccgaagaaccaagaggctcttagaatggcaaacgtggcagagaactcctcgtccgatcaacgacaggcttgtaagaaacatgaactgtacgtcagcttccgggaccttggatggcaggattggattatcgcgcccgaaggatacgcggcatactattgtgaaggagagtgtgcctttcctcttaattcatacatgaacgccactaaccacgcaatagtccagactctcgtgcatttcataaaccctgaaactgtcccaaagccttgctgtgcaccaacccaactgaacgcaatctccgtgctttactttgacgactcctccaacgtcatcctgaagaagtaccgaaatatggtcgtgagagcctgtggttgtcac

SEQ ID NO: 120364 - DNA, 1293 bp, Artificial Sequence
  derived and/or modified sequence
atgcatgtgaggagcttgcgggcagcagcgccccactcattcgtggcactgtgggcgcctttgtttttgctccggtcagccctggccgatttctccctcgacaatgaggttcactcctcatttatacatagacgtttacggagtcaggagagacgcgaaatgcagcgcgagatactgtccatccttggactcccacacaggccgcgtccccacctccaagggaagcataactccgctcctatgtttatgctcgatctgtacaacgccatggcagtggaggaaggagggggtcccggagggcagggattctcttatccctataaagctgtgtttagtactcaggggccgcccctcgcgagtctccaagactcccattttttgacagacgctgatatggtaatgagtttcgtgaatctggtcgagcacgacaaggaattcttccacccgcggtatcatcaccgcgagttccgctttgacctgagcaaaatcccggaaggcgaggccgttacagccgctgagttccgtatctataaagactatattagggagcgatttgacaacgaaaccttccgtatttctgtgtatcaggtcctgcaagagcacctgggtagagagtcggacttgttcttactggattcaagaacgctctgggcgtccgaggagggctggctagtattcgatatcacggctactagtaaccattgggttgtgaatccgcggcataacctgggcctgcagctgtctgtggagacattggatggtcagagcatcaatccaaagctagcggggttgatcgggaggcacggaccccagaataaacagccttttatggtagccttttttaaggcgactgaggtccactttcggtctatcaggagcacaggtagcaagcagaggagccagaatagatcaaagacccctaaaaaccaagaagcacttcggatggcgaatgtcgccgaaaattcttccagtgatcaacggcaagcatgcaaaaaacacgagctttacgtcagcttcagagacttggggtggcaggactggatcatcgcccctgaagggtatgctgcctactactgtgagggtgaatgtgctttccctctcaatagctatatgaatgctaccaaccacgctattgtgcaaactctggtgcatttcatcaacccagaaaccgtccctaagccgtgctgcgcccctacccagcttaacgccatctccgttctgtacttcgacgactccagtaacgtaattcttaagaagtacagaaacatggtagtccgagcctgtggttgtcac

SEQ ID NO: 120365 - DNA, 1293 bp, Artificial Sequence
  derived and/or modified sequence
atgcatgtaaggagtcttcgagcggctgctccccactcctttgtcgccctgtgggccccactcttcctactgcggagcgccttggctgatttctcattggacaacgaagtgcactcctcattcatccataggaggcttcgaagtcaagagcgccgagagatgcagagagagatcctgtctatcctggggctgcctcatcggccaaggccgcatctgcagggcaaacataactcagcccccatgtttatgctggatctgtataacgctatggctgtggaagagggaggcggcccaggggggcaagggttttcttacccatacaaagcagtgtttagcactcagggccccccgcttgcctctctacaggattctcattttctaacagatgccgatatggtcatgagctttgtgaacctggtcgagcacgacaaggaattcttccaccctagataccaccaccgcgagttccggttcgatctttctaagattccagaaggggaggccgtaaccgcggcggaattcaggatttataaggactatatacgggaacggttcgacaatgaaacatttaggatcagcgtttaccaagtgctccaagagcatctcggacgggagtccgacctgttcctcctggactctcggactctctgggcctccgaagaaggctggctggtttttgacattaccgctaccagtaatcactgggttgtgaatccgcggcacaatctgggactgcaactgagtgttgaaaccctggatgggcaatcaattaacccaaagctggcgggcctgataggccgccacggacctcagaacaagcagcccttcatggtggcgttcttcaaagcaacagaggtccatttccgctcgatcagaagcaccggtagtaaacaacggagtcaaaatcggtctaaaacccctaaaaatcaggaggccttacgcatggccaatgtggctgagaactcttcgtccgatcagcggcaggcatgtaagaaacacgagctgtacgtttcattccgggatctagggtggcaggattggattatcgctccggagggatatgcggcttattattgcgaaggagaatgcgccttccctctaaattcctacatgaacgctaccaaccacgcaattgtccagaccctggtgcacttcatcaatccagaaacggtgccgaagccttgctgtgctccaacacagctaaacgccatcagcgtgctctatttcgatgatagctctaatgtgattctgaaaaaataccggaacatggtggtccgagcttgcggttgtcac

SEQ ID NO: 120366 - DNA, 1293 bp, Artificial Sequence
  derived and/or modified sequence
atgcacgtgcggtccttgcgcgccgctgctcctcattctttcgtggctttgtgggcacctttatttctcctgcggtcggccttggccgacttcagcctagataatgaggtacattcctcctttatacaccgcagactgagatcacaggagcgccgggaaatgcagagggaaattcttagtatactgggactgccacatcggcctcgcccccacttgcagggaaagcacaacagcgcccctatgtttatgctggatctttataacgccatggcggtcgaagaaggcgggggcccggggggccaggggttttcttacccttacaaggcagtattctcgacccagggtccccccctcgcctctctccaggacagccacttcttgacggatgctgatatggtaatgagctttgttaatctcgtggagcatgataaggagttctttcaccctaggtatcatcatagggagttccgcttcgacttatccaaaattcctgagggagaagccgtaactgccgccgagtttaggatttataaggattatatcagagaacgatttgataacgagacgttccggatctctgtttaccaagtactgcaggaacatttggggagagagtctgatctatttctgctggactccagaacgctgtgggccagcgaagaagggtggttggtattcgatattactgcgacaagcaaccactgggttgtcaaccctaggcacaatctcggtctgcaactttccgtggaaacactggacgggcaaagtatcaatcctaaactagcaggccttattggtcgtcatgggccgcagaacaagcagccattcatggtggcatttttcaaggccacagaggtgcactttagaagtattagaagtacagggagcaagcaaagatctcagaacaggagcaagacaccaaaaaaccaagaggccctgcgaatggctaatgtcgcagaaaactcctcctccgatcaacggcaagcctgtaagaaacacgaactgtatgtttcattcagagaccttggatggcaagattggatcatcgcacctgagggttacgcggcatattactgtgaaggcgagtgtgcttttcctctaaactcatatatgaacgccactaatcacgctattgtccagacacttgtccacttcattaatcccgagactgtgcctaaaccttgctgcgcaccaacccagctgaatgcaattagcgtgctgtattttgacgactccagcaatgttattctgaagaagtatcggaacatggttgtgcgggcatgcggttgccac

SEQ ID NO: 120367 - DNA, 1293 bp, Artificial Sequence
  derived and/or modified sequence
atgcatgtacggagcctgcgggctgccgccccacactccttcgttgccctctgggcgcccttgttcctgttgaggagtgccttggccgacttttccctggataacgaggtacactcttcattcatccaccggcgccttcggagtcaggaaaggcgggagatgcagagagaaatcctgagcatactcggcctcccgcacaggcccagaccacaccttcagggcaagcataattctgccccaatgttcatgttggacctgtacaacgctatggctgtagaagaaggtgggggacccggtgggcaaggattcagttacccttataaagccgtattctctactcaggggcctcccctggcaagcttgcaggacagccatttccttaccgacgcagatatggtgatgagtttcgttaatctggtcgagcacgataaggaatttttccaccccagatatcatcatcgcgagtttagattcgatctgtctaagatcccagagggagaggctgtgacagcagcggaattcagaatttacaaggactatattcgggagcgatttgacaacgaaacgtttaggatctctgtgtatcaagttctgcaagaacatttgggacgcgagtccgatctgttcctgctggactctcgcacactgtgggcttccgaagaggggtggctggtctttgatatcacagccactagcaaccactgggtggtgaatccacggcacaatctgggactgcagctctcagtcgaaactttggatggccaaagcatcaatcccaaactggctgggctgattgggcgacacggcccacaaaataagcaacctttcatggtggcttttttcaaagctaccgaggtacattttagaagcatcagatctactggcagtaagcagagatcccaaaacagaagtaaaacccctaagaatcaggaggcattgcggatggccaatgtggcggagaattcatcatccgaccagcggcaggcgtgcaaaaaacacgaattgtatgtgagtttcagggatcttgggtggcaggactggatcattgctccggagggatatgcagcatattattgcgagggggagtgtgcatttcctctgaatagctatatgaatgcaacaaatcatgccattgtacagaccctcgtccattttattaaccctgagacagtgcctaagccttgttgtgctcctacccagctgaacgccatatctgtgctctacttcgacgacagcagcaacgtgatactgaagaaataccgcaatatggtcgtgcgggcctgtggctgtcat

SEQ ID NO: 120368 - DNA, 1293 bp, Artificial Sequence
  derived and/or modified sequence
atgcacgtaagatctttgcgcgccgcagctccacactcttttgtcgcattgtgggccccactcttcctgctgcgctctgccctcgcagatttcagtctagataacgaggtgcactcctcctttatccaccgccgtctcagatcacaagaacggcgggaaatgcagcgcgaaatcctcagtattctgggtctccctcaccgcccgcgtccccacctgcagggtaaacacaattcagcccctatgtttatgctggacctttataatgccatggctgttgaggagggcggtggtccaggagggcaggggttctcctacccttacaaggcggtgttcagcacgcaggggccacccctggccagcctgcaggactcacactttcttaccgatgcagacatggtgatgagtttcgtaaacctggttgagcatgataaagagtttttccaccctcgttaccatcatcgcgagtttaggtttgatctgagcaagatccctgagggggaggctgttaccgccgcggaattccgaatctacaaagattatattcgggaacgatttgataacgaaacctttcggatttctgtctaccaggttctgcaggagcatctgggccgcgaatctgacctgtttctattggattcacgcaccctgtgggcatcagaagaagggtggctggtcttcgatatcactgccacctccaaccactgggtcgtgaatcccagacataatttgggcctgcagctatccgtggagactttggatggccaatcaatcaaccctaagctggcaggtttgatcggtcgccacggaccccaaaataaacagccatttatggtggctttcttcaaagcgacagaagttcactttcgcagcatccggtcgactgggagcaaacagcgctcacagaataggagcaagacccccaaaaaccaggaggctctgcgcatggccaacgttgcggaaaacagtagcagcgatcagaggcaggcatgcaaaaaacatgagctgtacgtgagcttccgcgatttgggatggcaggactggatcattgccccagaggggtatgctgcttactactgcgagggagagtgtgcctttcctttgaacagttacatgaacgctacgaaccacgctattgtacagaccttggttcacttcatcaatccagaaacggttcctaaaccttgttgtgctcccactcaattgaatgcaataagcgtcctatacttcgacgacagctctaacgtgatcttgaagaaatatcggaatatggtagtgcgcgcatgcggctgccat

SEQ ID NO: 120369 - DNA, 1293 bp, Artificial Sequence
  derived and/or modified sequence
atgcacgtgcgctctctgagggctgccgccccacactcattcgttgctctctgggctccgctctttttgctgcggtcagcactggccgatttttcactggacaacgaggtacactcatctttcatccatcgccgcttgcggtctcaggaacggcgcgaaatgcagcgagagatactgagcattctgggactgcctcaccgcccccggcctcatctgcaaggcaagcataacagcgcccccatgttcatgctggacttgtataatgcgatggctgtcgaagaaggcgggggccccgggggccagggtttttcttacccctataaggcggttttttccacacagggcccacctctggcttcactccaggactctcattttctgactgacgctgacatggtgatgagctttgtgaatctcgtggagcatgacaaggagttctttcacccccgctaccaccaccgggagttccgattcgatctttctaaaatccccgagggagaagcagtgaccgcggccgagttccgcatttataaagattatattagggagcgatttgataacgagacatttagaatctccgtataccaggtactccaagagcacctgggcagggagagcgatctgtttctcctggactccagaacactctgggccagcgaagaaggttggctggtgttcgatataaccgctacatcaaaccactgggtggttaatcccagacacaacctcgggcttcagctgtctgtggagacattggacggacagtccattaaccccaagctggcaggcctgatcgggagacacggcccacagaacaagcagccctttatggtggcttttttcaaagctactgaagtacacttcagatcaatcaggtccacgggaagcaaacagcgatcccagaatcggagcaagaccccgaaaaaccaggaggctcttaggatggccaatgtagccgagaattcttcatccgaccagcgacaggcttgtaagaagcacgagctgtatgtctcctttcgcgatctggggtggcaagattggatcatcgcccctgagggatatgccgcctactattgtgagggggagtgcgcattcccactgaactcctacatgaacgctacaaatcatgccatcgtccagacacttgtgcacttcataaaccctgagacagtgccaaaaccctgttgtgcccccacccagctgaacgcaatttcagtcttgtattttgatgatagttccaatgttatcctgaagaagtacagaaacatggtggttagggcctgtggatgccac

SEQ ID NO: 120370 - DNA, 1293 bp, Artificial Sequence
  derived and/or modified sequence
atgcatgttcgatccctgagagcagctgcgccacacagcttcgtcgctctctgggcgccactgttcttgttgcgctccgctctggcagacttctccttagataacgaggtgcattctagctttatccaccgccgactccgttcgcaggagcgacgcgagatgcagagggagattctatccatcttgggtttgccgcaccgcccgcgcccgcaccttcagggcaagcacaattccgcgccgatgttcatgctggatctttacaatgccatggcggtggaagaaggaggaggtccaggcggccagggattcagttatccctataaagctgttttttcgacccagggacccccactggcgagcctacaggattctcactttctgacggacgctgatatggtcatgagcttcgtcaacttggtcgagcatgataaggaatttttccacccgcggtaccaccatcgtgagtttcgcttcgatttgtcgaagattcctgaaggtgaagccgtgaccgccgccgagtttcgcatttacaaggactacattcgtgagcgtttcgataacgagacattcaggataagcgtgtaccaagtgttgcaggaacatttaggccgcgagagcgatttgttcctgctggacagtcgcaccctatgggcatctgaggagggctggctcgtgttcgatatcaccgcaacaagtaaccactgggttgttaatccgcgccataacctaggactgcaactctccgtcgaaacactagacggccagagcattaacccgaagcttgctggcttgataggacgtcacggacctcaaaataagcagcccttcatggttgctttcttcaaggcgacggaggttcatttccgtagtatccgcagtacgggcagcaagcagcgcagccagaaccgctcgaaaacgccaaagaatcaggaagctttgagaatggcgaatgtcgcggaaaatagtagttcagaccagcgccaagcgtgcaagaagcacgaactgtacgtctcattccgggatttgggttggcaggattggatcattgcaccagagggttatgctgcatactattgcgagggagagtgtgcattcccacttaattcctacatgaacgcaaccaatcacgccatcgtccagacgctggtgcacttcatcaatccagagaccgtgcccaagccgtgttgcgcccccactcaactgaacgctatatccgtgctttactttgatgacagctcgaacgttatccttaagaagtatcgaaatatggtggttagggcatgtggctgccac

SEQ ID NO: 120371 - DNA, 1293 bp, Artificial Sequence
  derived and/or modified sequence
atgcatgtgagatctctgcgggctgcagcccctcactcatttgtcgctctctgggcgccattattcctgctgcgtagcgctctggcggatttttcactggataacgaagttcatagttcttttatacacaggaggctgcggtcacaggagaggagggagatgcaaagggaaatattgagcatactcggcctgcctcacaggccgcgcccccatctacagggaaaacacaatagtgccccaatgtttatgttagacctctacaatgccatggccgttgaagaaggaggtggtcctggtgggcagggtttttcatatccctacaaggcagtgttctccactcagggcccccctctcgcttcactccaggactctcattttctgaccgacgcagatatggtcatgtccttcgttaacttggtggaacatgataaagagttctttcatccacgatatcatcaccgcgagttccgattcgacttatccaaaatccctgagggtgaagccgtaacagctgcggagtttagaatttataaagactacatccgagaacggttcgacaacgagaccttccgtatcagcgtctatcaagtgctccaggaacatcttgggcgagagtcagatctcttcctactcgactctcgcacactgtgggcaagtgaggaggggtggctggtttttgatataacagccacaagtaaccactgggtcgtgaacccgcgtcataaccttggactgcaactctctgtcgaaactctggacggtcagtcaatcaaccccaagctggcaggtctaatcggccggcacgggcctcaaaacaaacaaccctttatggtggcttttttcaaggccaccgaagtgcattttaggtccatcaggagcaccgggtccaagcaaaggtctcagaataggtccaaaacccccaaaaatcaagaggctctcaggatggccaacgtcgctgagaacagcagcagtgaccagcgccaggcttgtaagaagcacgagctctacgtctcttttagagacctgggctggcaggactggatcattgcccctgagggatacgccgcatactattgcgaaggtgagtgtgcgtttccactgaattcgtacatgaacgccacaaatcacgcaatcgtgcaaaccctcgtgcattttataaatcctgagactgtgccaaaaccctgttgcgctcctactcaactgaatgccatttctgtgctctattttgacgactcttctaatgtgattctcaaaaaatataggaatatggtcgtcagggcctgcggatgtcat

SEQ ID NO: 120372 - DNA, 1293 bp, Artificial Sequence
  derived and/or modified sequence
atgcatgtgcggtcgctgcgcgctgccgcaccacactccttcgtggcactctgggctccactcttcctccttcgcagcgccctggcggacttcagccttgacaatgaagtccactcctcctttattcatcggcgcctgagatcacaggaacgacgggaaatgcaacgcgagatcctgtcgatcctcggactgccgcacagacctaggccgcatctgcagggtaagcataacagcgcgccgatgttcatgctcgacctgtacaacgccatggctgtcgaagaggggggaggtccgggtggacaaggattctcgtacccttacaaggcagttttctcgactcagggccccccgctggcttcactccaagattcacacttcctgacggatgccgacatggtcatgtcgttcgttaaccttgtggaacatgataaggagtttttccacccgcgctaccaccaccgggagttcagatttgacctgtccaagattccggagggagaagccgtcactgctgcagaatttagaatctacaaagattacatcagggaaagattcgataatgaaactttcagaatctctgtgtaccaagtgctccaggaacatctcggaagagagagcgacctttttcttctcgactcacgcactctgtgggcgtctgaggaaggatggctggtgttcgacatcaccgcaactagcaatcattgggtggtgaatccgagacacaatcttggactccaactgtccgtcgagactttggatggacaaagcatcaacccgaagctggcaggactgatcggccggcacggccctcagaataaacagccgttcatggtggcgttctttaaggccactgaggtccacttccggagcatccgaagtaccggctcaaagcagcgctcacaaaatcgctccaaaacgcctaagaaccaggaggcacttcggatggccaacgtggccgagaacagcagctccgaccagcgacaggcgtgcaaaaagcatgaactgtacgtgagcttccgtgaccttggttggcaagattggatcatcgcccccgaggggtacgcggcgtactattgcgagggagagtgcgcgtttcctctcaactcatacatgaatgcaactaaccacgccatcgtccagactctggtgcacttcatcaaccctgagacggtgcccaagccgtgctgcgcaccaacgcagctgaacgcaatttccgtcctgtacttcgatgacagctccaacgtgatcctcaagaagtaccgcaatatggtggtccgcgcgtgcggctgccat

SEQ ID NO: 120373 - DNA, 1293 bp, Artificial Sequence
  derived and/or modified sequence
atgcacgtccgcagcctacgagccgccgcccctcactcttttgtcgctctgtgggcgccactgtttctgttgagatccgcactggccgatttctctctagacaacgaggtgcacagttcctttatccacagacgactaagatcccaagaacgacgggaaatgcagcgggaaatcctcagtattttgggtctcccacatcgaccaaggccgcacttgcaagggaagcataacagcgccccaatgtttatgctcgatctctataatgcaatggctgtggaggaaggcgggggtcccggcggccaaggtttctcatatccgtacaaggccgttttcagtacacagggccctcctttggcttccctgcaggattctcacttccttaccgacgccgacatggtgatgagctttgtcaatctcgtcgaacacgataaggagttcttccatcctaggtatcatcatagggaatttcgcttcgacctgtctaaaatcccggaaggagaggcagtgactgccgctgagtttcgcatatacaaggattatatacgggaacggttcgataatgaaacatttcgcataagtgtgtaccaggtgctgcaggagcacctgggacgcgagtctgatctgtttctgctagactcacggacactgtgggctagcgaggagggatggcttgtgttcgatattaccgccacttctaaccactgggtggtgaatccacggcataacctcggattgcagctatctgtggaaacactggacggccaaagtatcaacccaaagctcgcgggactcataggcaggcacggtccacaaaataaacagcctttcatggtggcctttttcaaagccacagaggtgcacttccgtagcattcgtagtaccggaagcaagcagaggtcccagaatcgcagtaaaacccccaaaaaccaggaggccttacgaatggcaaacgtcgctgagaattcatccagtgaccagcgtcaggcttgcaagaagcacgaactatacgtctcctttagagacttaggatggcaggactggataatcgcccctgaggggtatgccgcctattattgtgaaggggagtgcgcttttcccttgaactcatatatgaacgctaccaaccacgctattgtgcagaccctggtgcacttcatcaaccccgaaactgttccaaagccttgttgcgcccctacccagctaaacgcgatatccgttctgtactttgatgactcctccaacgtgattctgaaaaagtaccggaacatggttgtccgggcatgtgggtgccac

SEQ ID NO: 120374 - DNA, 1293 bp, Artificial Sequence
  derived and/or modified sequence
atgcatgtgagatctctgagagcagcggcgccgcactcgttcgtggctctctgggcgccactgtttctcctcaggtcggcgctggccgatttcagcctcgataacgaggtgcactcgtcgttcatccatagacggctgcggtcacaagaacggcgcgaaatgcagagggagatcttgtcaattctcggcctccctcatcggcctcgcccacatctgcaaggaaagcataactccgcaccgatgttcatgctcgatctgtacaacgcgatggcggtcgaggaagggggaggaccgggagggcaaggattttcctacccgtacaaagccgtcttctccactcaaggaccgccccttgcgagcctccaggactcccatttcctgaccgacgccgacatggtgatgtcctttgttaacctcgtggaacatgacaaggaattcttccacccacggtaccaccaccgcgagtttcgcttcgacctgtccaagatcccagaaggtgaggccgtgaccgccgccgaatttcggatttacaaggactacatccgggagaggttcgataacgaaaccttcagaatctccgtgtaccaggtgctgcaagagcatctggggcgggaatccgacttgttcctgctggattcacggaccctgtgggcctccgaagagggatggcttgtctttgacatcactgccacctcaaatcactgggtggtgaatccacgccacaatctgggattgcagttgtccgtggaaaccctcgacggacagtccatcaatcctaaactggccgggctcatcggaaggcacggacctcagaacaaacagccatttatggtggcgtttttcaaagcaaccgaagtccactttagaagcattcgctccaccggatcaaagcagcgtagccagaatagatcgaagactcccaagaatcaggaagctctgaggatggccaatgtcgccgaaaactcgagcagcgaccagcggcaagcatgcaagaaacatgaactttacgtgtccttccgcgacctgggttggcaggactggatcatcgcaccggagggatacgcggcatactactgcgagggcgaatgtgctttcccgttgaattcgtacatgaatgcaaccaatcacgctattgtgcaaactctggttcacttcatcaacccagaaactgtccctaaaccgtgctgcgctccaactcaactgaacgccatctcggtgctctacttcgacgactcctcgaatgtgatcttgaagaaataccgtaatatggtggtccgcgcatgcgggtgccat

SEQ ID NO: 120375 - DNA, 1293 bp, Artificial Sequence
  derived and/or modified sequence
atgcacgtgcggtccctcagagccgcagcgcctcattcgtttgtggctttgtgggcgccgttgttcctcctccggtcagctctggcggatttctcacttgacaacgaggtccactcgtcatttatccaccgcagactgcgctcacaagaaagacgcgaaatgcagcgggaaatcttgtccattttgggccttccgcatcggccccgcccacacctgcaagggaagcacaattccgcacccatgtttatgcttgatctctacaacgctatggcagtggaggaaggcggaggacccggagggcagggattttcgtacccgtacaaagccgtgttctctacgcaaggacctcctctcgcgagcttgcaggactcgcatttcctcactgatgctgatatggtgatgtcgttcgtcaacctggtggaacacgacaaggagttctttcatccccggtaccaccacagggaatttaggtttgatctgtcaaagattccggagggcgaagcagtgactgcggccgaattcagaatttacaaggactacatcagagaaaggttcgacaacgaaacgttccgcatcagcgtttaccaggtccttcaggaacatctgggaagggagagcgacttgtttctgctcgactcacggactctctgggcctccgaagagggttggctggtgttcgatatcactgcaacttcgaaccattgggtggtgaacccaagacacaacctgggcctgcagctctcggtggagactctggacggacagtcaatcaacccgaaactggcagggctgatcggacgacatggacctcagaataagcagccgtttatggtcgcatttttcaaggccactgaagtgcattttcgatccatccgctcgaccggctcgaaacagaggtcccaaaacaggtccaagactccgaagaatcaggaggcccttcgcatggccaacgtcgccgaaaactcgtcctcggaccagagacaggcatgcaaaaaacatgagctgtacgtctcctttcgggatcttggttggcaagactggatcattgcgcctgagggctacgcagcctactactgcgagggagagtgtgccttcccgctcaactcttacatgaacgcgacgaatcacgcgatcgtgcaaactctggtgcacttcattaatccggaaactgtgccgaaaccatgctgcgccccgacgcaactgaacgccattagcgttctctacttcgacgactccagcaacgtgatcctcaagaagtaccggaacatggtggtgagggcttgtggatgtcac

SEQ ID NO: 120376 - DNA, 1293 bp, Artificial Sequence
  derived and/or modified sequence
atgcatgtgcgttcgctgcgcgccgccgccccgcactccttcgtcgctctgtgggccccactctttctcctccgctcggctctggccgacttctcgctcgataacgaagtccactcctcctttatccaccggcgactcaggtcccaggagcggagagagatgcagcgggagattctgtcgatcctcggcctgccacaccggccccgaccgcacctgcagggaaagcacaactcggcccctatgttcatgctggacctgtacaacgctatggccgtcgaagaaggaggcggaccgggcgggcaaggcttttcgtacccttacaaggcggtgttctctactcaaggccctccattggcgtccctgcaggatagccacttcctcaccgacgcggacatggtcatgtcgttcgttaacctggtggagcacgacaaggagttcttccacccccggtaccaccatcgcgaattccggttcgacctgtcgaagatccccgagggcgaagcggtcactgccgcagaattcaggatctacaaagactacatccgcgagcgattcgacaacgagacttttcgcatctcagtgtaccaggtgctgcaagagcatctgggtagagaatcagacctctttttgttggacagccgaaccctttgggcctccgaagaagggtggttggtgttcgacattaccgcaacttccaaccactgggtggtcaatccgcgacataacctgggactgcagctgtccgtggaaactttggacggacagtccatcaacccgaagctcgccggacttatcggtcgccacggtccacagaataagcagcccttcatggtggcgttctttaaggccaccgaggtgcatttcagatccatccggtccaccggcagcaagcagcggtcacaaaacagatctaaaacgccgaaaaaccaggaagccctgaggatggcaaatgtggcggaaaatagctcgtcggatcagagacaagcctgcaagaagcacgagctgtacgtctccttccgggatctcggatggcaagactggatcatagccccggagggatacgcagcctactactgcgagggagagtgcgccttccctctgaactcgtacatgaatgccactaaccatgctattgtgcagaccttggtgcactttatcaatccagaaaccgtgcctaagccatgctgcgccccaactcagctgaacgctatctccgtcctgtacttcgacgactcctcaaacgtgatcctcaaaaagtatcggaacatggtggtgcgcgcttgcgggtgccac

SEQ ID NO: 120377 - DNA, 1293 bp, Artificial Sequence
  derived and/or modified sequence
atgcacgttcgcagcctccgcgctgccgctcctcatagtttcgttgctctctgggccccactgttcctgctgagatctgctctggccgattttagtctggataacgaggtgcacagctccttcattcataggagactgaggagccaggagagaagggaaatgcagagagaaatactgtcaattctgggcttgcctcacaggcctcgcccacacctgcagggcaaacacaatagcgcacctatgttcatgctggatctgtacaacgctatggctgtcgaagagggtggcggcccaggcggccagggattctcctatccatataaggcagtgttcagcacccagggcccccctctggcgtctctgcaagatagccacttcctgacagatgcggacatggtgatgtcatttgttaatctggtcgaacacgacaaggagttctttcatccacgctaccaccatagagaattccgcttcgatctgtctaagattcccgaaggagaagcagtaacagctgcggaattcaggatctacaaggactacatcagggaaaggtttgataatgagacttttaggatatcagtctatcaagtcctgcaggaacaccttggacgcgaatctgatctcttcctgctggacagcaggacactgtgggcaagtgaggagggctggctggtgttcgacataacagcgacctcaaaccattgggttgtgaatcccaggcacaatctcggcctgcagctcagcgtggagacgctcgacggacaatctataaaccctaagctggccggactgatcggacgccacggaccacagaacaagcaaccattcatggtggccttctttaaagctaccgaagtccatttcaggagtatcaggagcacaggtagcaaacaacgcagtcagaacaggtccaagactcctaagaaccaggaagcgttgaggatggctaatgtcgccgagaactcatcatcagaccaacgccaggcctgtaaaaagcacgagctttacgtgtcctttcgcgacctgggatggcaggactggattatcgcacccgaaggctatgctgcatactactgtgaaggtgagtgcgctttccctctgaattcctacatgaacgctactaaccacgccattgtgcagacactggtccacttcattaacccagagaccgtgcccaagccttgttgcgctccaacacaactcaacgccatctccgtcctctacttcgatgattccagcaacgtcatattgaagaaatacagaaacatggtcgtacgcgcttgtggctgccat

SEQ ID NO: 120378 - DNA, 1293 bp, Artificial Sequence
  derived and/or modified sequence
atgcatgtcaggagtctccgggccgccgccccccacagtttcgtagccttgtgggctccactgttcttgcttaggagcgccttggcagatttttccttggataatgaggttcattctagcttcatccatcggaggctgcgctcccaggagcggcgggagatgcaaagagagattttgtcaatcctgggactaccacaccggccaagaccacatctgcagggtaaacataattccgcgccaatgttcatgttggatctatacaacgcaatggcagtggaggagggcggagggcccggaggccagggcttcagctatccatacaaggcggtgttttctacacaggggcctccactggccagtcttcaagattcgcacttcctgacggacgccgatatggtgatgtcttttgtgaaccttgtggaacacgataaggagttttttcacccaagataccaccatagagagtttcggttcgacctgtcgaaaatacctgagggggaagcagtaacagctgctgaatttaggatatacaaggactatattcgtgagcgattcgacaacgagactttccgcatttcagtgtatcaagttctgcaggagcacctaggaagggagtctgacttgttcctgctcgatagccgaactctatgggcttccgaggaaggttggctagtgtttgatattactgccacatcgaatcattgggttgtgaatccccggcacaatttaggactgcagctgtcagtggaaaccctggatggccagtctattaatcctaagttggctggcttgataggcagacatggacctcagaacaaacagcctttcatggtggcttttttcaaggctaccgaggtacacttcagaagcatacgatcgactgggtccaagcaacggtcccagaatagatctaaaacgcctaaaaatcaagaggcactaagaatggccaatgtggccgagaactcctcatccgatcaacgccaggcttgcaagaaacatgagctgtacgttagctttcgagatcttggctggcaggactggataatcgctccagagggatacgccgcctattactgtgagggcgagtgtgctttcccattgaattcttatatgaacgctactaaccacgcgatcgtccaaacactggtccacttcataaatccagaaacggtccccaaaccatgttgcgcgcctacacagcttaatgctatctcagtgctgtacttcgacgacagctcaaatgtgatactgaagaagtaccgcaatatggtagttcgggcctgtggctgccac

SEQ ID NO: 120379 - DNA, 1293 bp, Artificial Sequence
  derived and/or modified sequence
atgcatgtaagatcattacgtgctgctgcaccacattcatttgttgctctttgggctcctttatttttacttagatcagctcttgcagatttctccttagataatgaagtacatagtagtttcattcatagaagattacgttcacaagaaagacgtgagatgcaacgtgaaattctttcaattttaggtcttccacatagaccaagaccacatttacaaggaaaacataattcagcacctatgtttatgttagatctttacaatgctatggctgttgaagaaggtggaggaccagggggacaaggttttagttatccatataaagcagtattctcaacacaaggaccaccactcgcatctttacaagattctcattttttaactgatgcagatatggtcatgtcatttgtaaatttagttgaacatgataaagaatttttccatccaagatatcatcatcgagaattcagatttgatttatcaaagattccagaaggagaagcagttacagctgcagaatttcgtatttataaggattacattcgtgagcgttttgataatgaaacttttaggatatctgtttatcaagttttacaagaacatcttggaagagaatctgatttatttcttcttgattcaaggactttatgggcttctgaagagggatggcttgttttcgatattactgcaacatcgaatcattgggttgtaaatccaagacataatcttggacttcaattgtcagttgaaacgcttgacggacaatcaattaatcctaaattagcaggattaattggtagacatggtccacaaaataaacaaccatttatggttgcattttttaaggctacagaagtacactttagatctattagatccactggaagtaaacaaagatcacaaaatagaagtaaaacacctaagaatcaagaagcattaagaatggcaaatgtagcagagaattctagttccgatcaaagacaagcatgtaaaaagcatgaactttatgtatcttttagagatttaggatggcaagattggattattgctccagaagggtatgcagcttattattgtgagggagaatgtgcatttccattaaattcatatatgaacgctactaatcatgcaattgttcaaacattagttcatttcattaatccagaaactgttcctaaaccatgttgtgcaccaacacaattaaatgcaatttcagttttgtattttgatgatagtagtaatgttatattaaaaaaatatagaaatatggttgttagagcttgtggatgtcat

SEQ ID NO: 120380 - DNA, 1293 bp, Artificial Sequence
  derived and/or modified sequence
atgcatgtgcggtcactgcgtgcagcagcgccacactcgttcgttgccctttgggccccactcttccttcttcggtccgcactggccgacttttctctggataatgaggttcactcatcctttattcataggcgcctgcggtcgcaagaacgtagggagatgcagcgcgaaattctttccatcttggggctgcctcaccgacctcggccccatcttcaaggaaagcacaactcggcccctatgttcatgctggatctttacaatgccatggccgttgaagagggaggcggccccggaggtcagggattttcctacccttacaaggctgtgttttccactcaaggaccaccattggcctcgttgcaggacagccacttcctcactgatgcagacatggtgatgtccttcgtgaatcttgtcgagcatgataaggagttttttcatccaaggtaccaccatagggaattccgctttgatctgtccaagatcccagaaggtgaagcggtgactgcggcagaattccggatttacaaggattacatccgggagcgatttgataacgagacttttcggatcagcgtgtaccaggtgcttcaagaacacctgggtagagagagcgacttgtttctgcttgactcacgtaccctctgggccagtgaggagggttggctggtttttgacataaccgccacttccaaccactgggtggtgaaccctagacacaaccttggactgcagctgtcagtcgagactcttgacggccagtcgatcaaccccaagttggcaggcctgataggtagacatggtcctcaaaacaagcagcctttcatggtggcgttctttaaggccactgaagtgcattttcggagcattcgttctactggctcgaaacaacggtcccagaatagatcgaaaacccctaagaaccaggaagcactccgcatggctaatgtcgcagaaaatagctcatccgaccaacggcaagcatgcaaaaaacatgaactttacgtttctttcagagatctcggatggcaagactggatcattgctcctgaaggatacgcggcatactactgtgagggtgaatgtgcatttccactgaacagctacatgaacgcaactaaccatgcaattgtgcaaaccttggtccatttcataaaccctgaaaccgtccctaagccttgctgcgctccgacccaattgaacgccatctcggtcctgtactttgatgatagctccaacgtgatcctgaagaagtacaggaatatggtggtgagagcatgtggatgtcat

SEQ ID NO: 120381 - DNA, 1293 bp, Artificial Sequence
  derived and/or modified sequence
atgcacgtgaggagccttagagcagcagcacctcactcttttgtggcgctttgggcgcccctgttccttctgcgctcggcactggcggatttttccctggacaacgaagttcacagctccttcatccacagacgcctgagatcacaagagcgcagagagatgcagagagagatcctctcgatactcggtctgccgcataggcctcgcccacatcttcaaggtaagcataacagcgctcccatgtttatgctggatctttacaatgcgatggccgtggaggagggcggaggcccgggtggacaaggattttcgtacccttacaaggccgttttcagcactcaaggacctcctctcgcctcattgcaagattcgcactttcttaccgatgctgatatggtgatgtctttcgtgaaccttgtggagcacgataaggaattctttcacccacgataccatcatcgggaatttcggttcgacctctccaagattccggagggggaggcagtgaccgccgcagaatttagaatttacaaggactacataagagaaaggtttgataacgagactttcagaatctcagtctaccaagtgcttcaagagcatctggggcgggagtcggacctgtttctgctggatagccgtaccctttgggcctcagaggagggttggctcgtgtttgacattaccgccacctcaaaccactgggtggtgaacccaagacataatctgggccttcaactgtcagtcgaaacgctcgacggacaatcgatcaatcccaagctggcaggcctcatcggaaggcacggacctcagaacaaacagccctttatggtggcattcttcaaggcaactgaagtccatttccggtccattcggtcaactggatcgaaacagagaagccaaaatcggtccaagacgccgaagaaccaggaagcactcagaatggcaaacgtggccgaaaactcgtcgtcggatcagagacaagcatgtaaaaagcatgaactgtacgtctcattccgcgacctggggtggcaagactggattattgctcccgaaggttacgcagcatactactgcgagggagaatgcgcgtttcccctcaactcctacatgaatgcaaccaaccatgccattgtgcagaccctggtccatttcatcaatccagaaaccgtgcctaagccttgttgcgcaccgacccagttgaatgccatctccgtgctgtactttgatgacagctcgaacgtgatactgaagaaatacaggaatatggtcgtgagagcatgtggatgccat

SEQ ID NO: 120382 - DNA, 1293 bp, Artificial Sequence
  derived and/or modified sequence
atgcacgttaggagcctgagagctgcggctccacactcttttgtggcattgtgggctcccctgtttctgctgaggtccgcgttggctgacttcagcctggacaatgaggtgcatagttcttttatccaccgccgcctgcggtcgcaagaaaggagagaaatgcagcgagagattctctctattttggggctcccacacagacccaggcctcacttacagggcaaacataacagtgcccccatgtttatgttagatctctacaacgctatggcggtggaggagggcggggggccgggcggccagggcttttcctacccgtacaaggccgtctttagtactcagggcccccccttggcaagccttcaagatagccactttctgactgacgccgacatggttatgagtttcgttaacctggttgaacacgataaggaattttttcacccacgatatcatcaccgagagttccggtttgatctgtctaagattcccgaaggggaagcagtgacagccgctgaatttcgcatctacaaggattatattagggaacgctttgacaacgagacattcaggatttccgtgtatcaggttttgcaggaacatctcggccgcgagagcgacttgttcctcctcgactccagaactttgtgggcttccgaagaggggtggctagtgtttgatatcaccgcaaccagtaaccattgggtcgtgaatccccgacacaacctgggactccaactttcagtcgagacgctcgatgggcagtcaattaacccaaaattggccggcctgatcgggcgccacggccctcaaaacaagcagccatttatggtcgccttctttaaagcaacagaggtacattttagatcaatccggtctacgggttcgaagcagaggtcgcagaaccgaagtaagacccccaagaatcaggaggcgctccggatggcgaatgtggcagagaatagcagcagtgatcaacgtcaggcatgcaaaaagcatgaactgtacgtctcttttcgggatcttgggtggcaggactggataatcgcgcctgaaggttatgccgcatactactgtgagggagaatgcgcatttccattaaattcttatatgaacgcaactaaccacgccattgtccagacactggtccatttcatcaacccagagacagtgccgaagccatgctgtgctcccacccagctcaatgctatttctgtgctttactttgacgattcctcgaacgtgattctgaaaaagtatcgaaacatggtggtgcgggcttgcggctgccac

SEQ ID NO: 120383 - DNA, 1293 bp, Artificial Sequence
  derived and/or modified sequence
atgcatgtacgctccctcagagcggcagccccacatagttttgtggccctatgggctccgctcttcctcctaaggagcgctctggcggatttcagtctcgataacgaagtacattcatccttcatccatcgcaggctgcggtcccaggagcgtagagaaatgcagcgggagattctctccattctcggcctgccccaccggcccaggcctcacctgcagggcaagcacaattctgccccgatgttcatgcttgatttgtacaatgcgatggcggtggaggaggggggtggcccaggcggacagggatttagctatccctacaaggccgtttttagcacccaggggccaccactggctagtctgcaggacagccactttctgactgacgccgatatggtgatgagctttgtaaatctggtagagcacgataaggagttttttcacccccgttaccaccaccgcgagttcagatttgaccttagcaaaatccctgaaggcgaggctgttaccgccgccgaatttcgcatctacaaagactacataagagagcggttcgataatgaaacctttcgcataagcgtatatcaagttctgcaggagcacctgggtcgagaaagcgacctgtttctgctggatagccgtaccctttgggcgagcgaggagggctggctcgtatttgatataactgccacaagtaaccactgggtggtcaatccaaggcacaacctgggccttcagcttagcgtggaaaccctcgatgggcagagcattaatcccaagctcgccggactgattggacgccatggacctcagaacaagcagccattcatggtagctttctttaaggcaaccgaggtacatttcagatctatccgctctactgggtcaaaacagcgttcccagaatcggagcaagacaccaaagaatcaagaggccttacggatggccaacgtagcggagaatagtagttccgaccagcggcaggcatgcaagaagcacgagctgtacgtgagtttccgggaccttggctggcaagattggatcatcgcaccggagggctacgctgcctactattgtgagggagagtgtgcttttccgcttaatagttacatgaacgcgacgaatcacgcaatagtccagaccctcgtgcacttcattaatcccgaaacagtacctaaaccatgctgcgcccccacccagttaaatgccatcagcgtgctctactttgacgattctagcaacgttatcctgaagaagtacagaaacatggtagtgcgggcctgtggctgccac

SEQ ID NO: 120384 - DNA, 1293 bp, Artificial Sequence
  derived and/or modified sequence
atgcatgtgcgatcccttcgcgcagcagcacctcattcctttgtggcactttgggccccactcttcctgctgaggagcgcacttgcagatttctccctcgataatgaagttcactcgtcatttatccatcgcaggctccgttcacaggaaaggcgggagatgcagcgggaaattctgtcaatcctcgggctgcctcatagaccccgtccgcatcttcaaggaaagcacaattccgcacctatgttcatgctggatctgtacaacgccatggcagtggaggaaggaggaggtccgggcggacagggtttttcgtatccatacaaagccgtgttcagcactcaaggtccacctctcgcatcgctccaagactcacattttcttaccgatgcagatatggtgatgtcgttcgtgaatctggtcgagcatgataaggagttttttcatcctcgttaccatcatagagaattccgatttgatctgagcaagatcccggaaggcgaagcagtgactgcagcagagtttagaatctacaaagactacattcgggaaagattcgataatgagacttttcggattagcgtctaccaagtgctccaagaacaccttggaagagagtccgatctgtttcttctcgattcgcgtaccctttgggcgtcggaagaaggatggctggtgtttgatattaccgcaacctcaaaccattgggtggtgaaccctcgccataatcttggactgcagcttagcgttgaaactctcgacggacaaagcatcaaccctaagctcgcaggcctgataggccgccatgggcctcagaacaagcaacctttcatggtggcattctttaaggccactgaggtccattttcgcagcattcggagcactggatcgaagcagagaagccaaaaccgctccaaaacccccaagaaccaagaggcgcttcgaatggctaacgtggctgagaattcgtcctccgaccagcgacaggcctgcaagaagcatgaactgtatgttagctttcgcgacttgggctggcaggactggatcattgcaccagaaggttatgcagcatactactgtgaaggtgaatgtgctttcccactgaattcctacatgaacgcaaccaaccatgcaatagtgcagaccttggttcatttcataaacccggaaactgtgcctaaaccttgctgcgcaccaacgcagctgaatgctatttccgtgctttactttgatgattcgtcaaacgtgatactgaagaagtacaggaatatggttgtgcgcgcctgtgggtgccat

SEQ ID NO: 120385 - DNA, 1293 bp, Artificial Sequence
  derived and/or modified sequence
atgcatgtccggagcctccgggcggccgccccccacagtttcgttgcgctgtgggctcccctcttcctcctgcgcagcgccctggctgatttctcactggacaacgaagtccactctagcttcatccaccgtcgcctgcgtagtcaggagcgccgtgagatgcagagggagattctgtctattctcggattgccccaccgccctaggccccatttgcaggggaaacataattcggcccctatgttcatgctggacctgtacaatgcgatggctgtggaagagggcgggggacccggtggccaaggcttctcttatccctacaaggctgtctttagtacccaggggccccctctggcgagtctccaggacagccactttttgactgatgccgacatggttatgtccttcgtcaacttggttgagcacgataaggagttcttccatccgcgctaccaccatcgcgagttccggttcgatctctctaagatccctgagggcgaggcagtcacggctgccgagttccgcatttacaaggactacatcagggagagattcgataacgagacgttccgaatttcggtctatcaggtcctccaggagcacctgggacgtgagagtgaccttttcctgctggactcccgcactctatgggcctcagaggagggctggctggtatttgatattactgccacctcaaaccactgggtcgtgaatccccggcacaacttgggcctgcagctgtccgtcgaaacgttggacggacagagcatcaatcccaaactcgctggcttgattggccggcacggtccccagaacaagcagcctttcatggtcgccttctttaaagccaccgaggtccacttccgttccatccgtagcaccggctccaagcagcgcagccagaatcgttccaaaaccccgaagaaccaggaggcactacgcatggccaacgtcgctgagaacagttcctccgatcagcggcaggcctgcaagaaacacgagctgtacgtttcatttcgcgatcttgggtggcaagattggattatcgccccagagggttatgctgcctattactgtgagggcgagtgtgcgttccccctcaactcctacatgaacgcaacgaaccatgcaattgttcaaacccttgtccactttattaaccccgagactgtcccaaagccatgctgcgcccctacgcagctgaacgccatctcggtcctgtacttcgatgactcctccaacgtgatcctgaagaagtatcgtaacatggtcgtgcgtgcttgtggatgccac

SEQ ID NO: 120386 - DNA, 1293 bp, Artificial Sequence
  derived and/or modified sequence
atgcatgtcagatccctaagggcggcagcacctcattcttttgtcgctttatgggccccactgttcctcctgaggtccgcgctcgcggatttctccttagacaacgaagttcatagcagctttattcacaggaggctacgcagtcaggaaaggagagaaatgcaaagagagatcctgtctatccttggcctccctcataggccacgtccccatttacagggtaagcataattccgccccaatgttcatgttagacctgtacaacgcaatggcggttgaggaaggcgggggccccggcggccagggtttctcgtatccttacaaagccgtgtttagtactcagggaccgccgctcgcatctctgcaggatagtcacttcctgactgatgccgatatggtgatgtcttttgtcaatctggtggagcacgataaggaatttttccaccctcgctaccaccatagggagttcagatttgatctttcaaaaattcctgaaggcgaagctgtcaccgctgccgaatttcgtatctataaggattacatacgcgaacgattcgacaacgagacttttcgcatttcggtctaccaagtcctacaagaacacttagggagggagtccgacctgttccttctcgactcccgcacgctgtgggctagtgaagagggatggttggttttcgacataaccgccacttccaaccactgggtggttaatccaagacataatcttgggctgcaactttcagttgagactcttgacggccagagcataaatccaaaactcgctgggcttattgggagacacggcccgcagaacaagcagcccttcatggtcgctttctttaaggccacagaggtccactttcggagcatccggtcaacaggttccaaacagaggagtcaaaatcggagtaaaactcccaagaaccaggaggctctcaggatggcgaacgtcgcagaaaacagctcctccgatcagcgacaggcctgcaagaaacacgaattgtatgtttcctttcgggatttggggtggcaggattggattatcgctccagagggatatgctgcctactactgcgaaggagagtgcgctttccccttaaactcctacatgaacgccaccaaccatgcaatagtgcagaccctggttcattttatcaatcctgagacagttcccaagccctgctgcgcgcctacccaactgaatgcaatctccgttttatactttgacgatagcagtaacgtgatcctgaagaagtatcgaaacatggtcgtgcgagcctgcgggtgtcac

SEQ ID NO: 120387 - DNA, 1293 bp, Artificial Sequence
  derived and/or modified sequence
atgcacgtccgatctctcagagcagcagcccctcattcgtttgtcgctctgtgggcgccactgtttttgcttagaagcgcgttagcagacttctccttagataacgaggtccactcttcgtttattcacagaaggctgcgctcgcaagaaagacgggaaatgcaaagagagattctgtctattttggggcttccgcataggccgcggccgcacttacagggcaaacacaacagcgcaccgatgtttatgttagacttgtacaacgctatggcggtggaagaaggcggaggccctggagggcaagggtttagctatccgtataaagcagtcttcagcacccagggacctccgcttgcgtcattacaagacagccacttcctgactgatgccgatatggtgatgtcttttgtcaatctggtggaacacgataaagaattctttcatccacggtaccatcaccgagagttccgttttgatcttagcaaaatccctgagggagaagccgtaacggcagcagaatttagaatttataaggactacatccgggaacgttttgacaatgagacttttaggatttcagtgtatcaggttttacaagagcacttagggagagaatcagatctctttctcctggattcgcgtacactttgggcttcagaagagggctggttggtgttcgatataaccgccacgtctaatcattgggttgtcaatcctcgccataatctgggattacagttgtctgttgaaacgcttgatggccaaagcattaatcctaagttggccggattgattgggcgacacggtccacaaaataagcagccgtttatggttgctttttttaaagcgacagaagttcattttcgaagcataagaagcacgggaagcaaacagcgaagtcagaacagatccaagacgccaaaaaaccaagaggcgttgcgtatggcgaacgttgcagaaaacagctcatctgatcagcgccaagcttgcaaaaagcatgaactctatgtgagctttagagaccttggctggcaggactggattattgcgccggaaggatatgcggcttattactgtgagggcgaatgcgcgtttcctctgaatagttatatgaacgcgacaaatcatgccatcgtgcagacattagtacactttataaatcccgaaacggtcccgaaaccttgctgcgctccaacgcaattaaacgccatatccgttctctatttcgatgattccagcaacgtcatcttaaaaaaataccgcaatatggtcgtgagagcgtgtgggtgccat

SEQ ID NO: 120388 - DNA, 1293 bp, Artificial Sequence
  derived and/or modified sequence
atgcacgtgcgtagcctgagagccgcagcgcctcactcatttgttgcgctttgggcccctctattcctattaagatccgcactggctgatttttctttggataacgaagtccattctagcttcatccataggcgcctccgcagtcaggaacggagggagatgcagagggagattttaagcattctcggtttgcctcaccgaccacgcccccatctccagggaaagcacaactccgcccctatgttcatgctggatctgtataacgcaatggcggtcgaagagggagggggaccagggggccagggcttttcatacccgtacaaagctgttttctccacccaaggcccgccccttgcttccctgcaggactcccattttttgaccgatgccgatatggtcatgtcctttgtgaatctagtggagcacgataaggaattctttcacccccggtaccatcaccgggaattccgattcgacctgagtaaaatccctgaaggagaggcggtgaccgcagccgaattcagaatatacaaggactacatccgagagcgattcgataatgaaaccttccgtatctccgtttatcaggtgctacaggaacaccttggaagagagtctgatctcttcttactggatagccgaacgctttgggccagcgaagaaggctggcttgtcttcgacataaccgctacaagcaatcattgggtggttaatcctcgccataacttggggctgcaacttagcgtggaaacccttgatggccagagcattaaccccaagctggctggccttattggacgacatgggccacagaataaacagccatttatggtcgctttttttaaagccaccgaggtgcacttccgctcgataagaagcacagggtcaaagcagcggtcacagaaccggtcgaagacccctaagaaccaggaagcgctacgcatggcaaatgtcgcggagaatagctcatctgatcaacggcaggcctgtaagaagcacgaactatacgtctcctttcgggatttgggatggcaggattggatcattgcaccagaaggctacgctgcatactactgtgaaggcgagtgtgctttcccgctgaattcatatatgaacgctaccaatcatgcgatagtacagaccctggtgcactttattaacccagagacggtcccaaaaccctgttgtgctcctacacagctgaacgcgattagtgtgttgtatttcgatgatagctctaacgtgatattgaagaagtataggaatatggttgttcgcgcctgcggctgccat

SEQ ID NO: 120389 - DNA, 1293 bp, Artificial Sequence
  derived and/or modified sequence
atgcacgtgcgttcgctgcgggcagcagcgccgcacagctttgtagccctgtgggctccactttttctgctgagaagcgctctggcagatttttcacttgacaacgaagtgcatagctcctttattcataggcgcctgcgaagtcaagagagaagggaaatgcagagagaaattctgagcatcctcggcttgcctcacagaccgcgacctcacctgcaggggaagcataattcagccccgatgtttatgcttgatctctacaatgcaatggcagtggaagaaggcggaggtcctggcggtcaaggtttttcgtacccctacaaggcggtgttttcgactcaaggaccaccgctcgcatctctgcaggattcacattttctgaccgatgcagacatggtgatgtcgtttgtgaatctggtggaacatgacaaggagtttttccatccacggtaccatcatcgagagtttcgctttgatctttcgaaaattccggagggtgaagcagtgactgctgccgaatttaggatatacaaggactatatccgggaaagattcgataacgaaaccttccgtatatcggtctaccaggtcttgcaggaacacttgggacgggaatccgatctgtttcttctcgattccagaaccctctgggcctccgaggaaggatggctggtgtttgacattacggcaacctcgaaccattgggtcgtaaatcccagacataatcttggtctgcaactttctgtggaaacccttgatgggcagtcaattaacccaaagctcgcaggcctcatcggtagacacggacctcagaataaacaacctttcatggtggcatttttcaaagcaaccgaggtgcactttcggtcgatacgcagcaccggttccaaacagcggagccaaaatcgatccaagactcctaaaaaccaagaagccttgaggatggcaaacgtggctgaaaattcgtcgtctgatcaaagacaggcatgtaagaagcatgaactttacgtgagctttcgggatctggggtggcaagactggattatcgcccccgagggttacgctgcctactactgtgaaggggaatgtgcgttccctctgaactcctacatgaatgccacgaaccatgcgatcgtgcagaccctggttcacttcattaacccagaaaccgttccaaagccctgctgcgctccgactcaactgaacgcaatctccgtcctgtattttgatgactcgtcgaacgtcatccttaagaagtaccggaacatggtggtgcgcgcatgtggatgccac

SEQ ID NO: 120390 - DNA, 1293 bp, Artificial Sequence
  derived and/or modified sequence
atgcatgtgaggagcctgagggctgccgctccacactccttcgtcgccctctgggctccactcttccttctcagaagcgctcttgcagatttttctctggacaacgaggtacattctagcttcatacataggaggctgagaagccaagaaagaagagagatgcagagggaaatcctgagcattctgggactgcctcacagaccaagaccccacctccagggcaaacacaatagtgctccgatgttcatgctggacttatacaatgcgatggccgtcgaagaagggggagggccaggcgggcagggatttagctatccttacaaagccgtcttttcaacccaggggccccccctggccagcttgcaggactcccatttcctgaccgatgcagacatggtgatgagttttgtgaatctagtggagcatgacaaggagttcttccaccccagatatcaccaccgggaatttagattcgacctgtctaaaatccctgaaggcgaagcagtcaccgcagcggaatttagaatatacaaggactatatacgggaacgtttcgacaatgagacctttcggatctccgtgtatcaggttctgcaggagcatctggggcgggagtccgacctgttccttctcgatagtcgaacgctctgggcttcagaggaaggatggctggttttcgacatcacagccactagtaaccattgggtggtcaatccgcggcataacctgggcttgcagctcagcgtcgagacattagacgggcagtcaatcaaccccaagctagcggggctcatcgggaggcacgggccacagaataaacagccctttatggtcgccttctttaaggctaccgaggtccatttccgatccattaggagtacaggtagcaagcagcgtagccagaatagaagtaagacccccaagaatcaagaggccctgaggatggcaaatgttgcggaaaacagcagttccgaccagaggcaagcttgtaagaaacacgaattatatgtaagttttcgggacttgggctggcaggactggataattgcccccgaaggctatgcagcctactactgcgaaggcgagtgcgcatttccattgaattcctacatgaatgccaccaatcatgccatcgtgcagactctggtgcactttataaatccagagacggttcccaaaccctgctgcgcacccacacagcttaatgccatcagtgtgctgtacttcgatgactcatctaacgtgatcttgaagaaatatcgaaacatggtggtgagagcctgtggatgtcat

SEQ ID NO: 120391 - DNA, 1293 bp, Artificial Sequence
  derived and/or modified sequence
atgcatgtacggtctctgcgggcagctgcaccgcatagcttcgttgccctctgggcaccactgtttctgctgcgctctgctcttgccgatttctctttggataacgaggttcacagcagttttatccaccgccggttaaggagccaggagcggcgcgaaatgcagagagaaatcctgtctatcctggggctgccccacaggccgcgcccccatctgcagggaaaacataactccgcaccaatgtttatgttggatttgtacaacgcaatggccgttgaagagggcggaggccctgggggccagggctttagctacccctataaagctgtcttttccacacaaggtccaccactggctagcctccaggatagtcactttcttacggacgctgatatggtgatgagcttcgtgaatctggtggagcacgataaggagttctttcaccctaggtaccaccaccgcgagttcagatttgacctgtccaagatccccgaaggagaagcagtgaccgccgctgaatttcgtatctacaaagattacattcgtgaaaggttcgacaacgagacttttcgcatctcagtgtaccaggtcctgcaagagcacctcgggcgggaaagtgatctgtttctgctcgatagcagaactctgtgggcgtcagaagaagggtggcttgtctttgatattaccgctaccagtaaccactgggtcgttaaccctaggcataatctggggttacagctgtccgttgagaccctagacgggcagtcaatcaacccgaaactagctggattgatcggacgccacggaccacaaaataaacagccctttatggtggctttcttcaaggccaccgaggtgcattttcgatcaataaggagcacaggaagtaaacaaagatctcaaaacaggagcaaaacacctaaaaaccaggaggccctgcgtatggccaacgtggctgagaacagtagcagcgatcagcgccaagcttgcaagaagcatgaattgtacgtctccttccgggacttgggctggcaggactggatcatagcaccggaaggctacgctgcctattactgcgaaggagagtgcgcctttcccctgaacagttacatgaatgctacaaaccatgctattgtccagaccttggtgcattttatcaacccagagaccgtgcccaaaccctgttgcgcacctacgcagcttaatgcaatcagcgtactgtactttgatgattcctccaacgtgatccttaaaaagtacagaaacatggtggtcagggcttgcggctgtcac

SEQ ID NO: 120392 - DNA, 1293 bp, Artificial Sequence
  derived and/or modified sequence
atgcatgtccggtcccttcgggctgccgccccacactcttttgtcgctctctgggcgcccctcttcctgttaaggtcagcgctggcagacttctctctggacaacgaggtgcatagtagttttatccacaggaggctgagatcacaagagcggcgggaaatgcagcgcgaaatcctctctattctaggtctgccacacagacccagaccccatcttcagggtaagcataatagcgcacccatgtttatgttagatctgtataacgcaatggcggtcgaggaggggggaggtccaggtggccagggtttcagctacccatataaagccgttttctccacgcaggggcctcccttggcctccttgcaggacagccacttcctcaccgacgctgatatggtgatgtcctttgtaaacctcgtggaacacgacaaggaattctttcacccaagataccaccatcgtgaattcagattcgacctctctaagattccagagggcgaagcggtgacagcagcagagtttcgcatctacaaagactacattcgtgagcggttcgacaacgagactttcagaatctccgtgtatcaagttttgcaggaacatctggggcgggaaagcgatctttttctgcttgattccagaaccctctgggcatcagaggaaggctggctggtcttcgatattacggccacatctaatcattgggtagtcaacccaagacataacctgggcctgcagttgagcgttgagacactggacggccagtccatcaatcctaagctggctggcctaattggaaggcatggcccccagaataaacagcccttcatggtggcgttctttaaggcaactgaagttcacttcagatccatacgctccaccgggtcgaagcagaggtcccagaaccggtccaaaactcctaaaaaccaggaggcgcttagaatggctaatgtggcggagaactcatcttcagatcagcgtcaggcttgcaagaagcatgaactgtatgtttccttccgagacctcggatggcaagactggataatcgcacctgaagggtatgccgcctactattgcgaaggagagtgtgcctttccactaaattcctatatgaacgcgacgaaccacgcgatcgtgcagaccttagtccactttatcaaccccgagacagtaccaaaaccatgttgtgcccccacccagctgaacgccatttccgtgctttatttcgatgattcttccaacgtaatcctgaaaaagtataggaacatggtcgttcgcgcctgtggctgtcac

SEQ ID NO: 120393 - DNA, 1293 bp, Artificial Sequence
  derived and/or modified sequence
atgcatgtacgctcgctcagggcggcagctccacattcttttgttgcattgtgggcacctctgtttctgctgcgctcggccctcgcggatttttcccttgataatgaagtgcatagcagcttcattcatagacgccttcggtcacaggaacggcgggaaatgcagcgcgagattttgtcgattctcggcctgccacacaggccacggccacatctgcaaggaaagcacaacagcgcaccgatgtttatgcttgacctgtacaacgcaatggccgtcgaagaaggcggtggaccaggtgggcaaggtttttcgtacccttacaaggcggtgttctctactcagggacctccactggccagcctgcaagatagtcacttcttgactgatgcagatatggtcatgtcctttgtgaacttggtggaacatgataaggaattcttccaccccaggtatcatcatcgtgaatttcggttcgacctctccaagattcctgaaggggaggcagtgacggcagcagagtttcgcatctacaaggactacataagggaaagatttgacaatgagacgttcaggatcagcgtctatcaggttctgcaagagcatcttggtcgcgagtccgatctcttccttcttgattcccgaaccctctgggcatcggaagaaggatggctcgtgtttgacattaccgccacctcgaaccactgggtggtgaaccccagacacaaccttggccttcagctctcagtcgaaactctcgacggacaaagcattaaccctaaactggcgggcctcattgggcggcatgggccgcagaacaagcaaccatttatggtcgcttttttcaaagcaactgaggtccattttcgatcaatcagaagcaccgggtctaagcaacgcagccaaaatcgatcgaaaactccgaagaaccaggaggctctgcggatggccaacgtcgcagaaaactcgtcgtcggaccagcggcaagcatgtaagaagcatgagttgtacgtgagctttagagatctgggttggcaagattggataatagcgccagaaggatacgccgcatactactgcgagggtgagtgtgcattcccgcttaattcctatatgaacgcaaccaaccatgccatagtgcaaaccctcgttcactttatcaatccggaaactgtcccgaaaccgtgctgcgcccctacgcagcttaatgccatttccgtcctttacttcgatgactcatcaaacgtgatccttaagaaataccgaaatatggtggtccgtgcttgtgggtgtcac

SEQ ID NO: 120394 - DNA, 1293 bp, Artificial Sequence
  derived and/or modified sequence
atgcacgtgaggtcactccgagcagcagcgccgcattcctttgtggcgttgtgggcacctctgtttctgttgcgcagcgccctggcagatttttcgcttgataacgaggtgcactcgtcctttattcatcgccgtcttagaagccaggaacgtagagagatgcaaagagaaattctttccattctcggccttccacacagacctaggccacaccttcaggggaagcacaactcagcacctatgttcatgctcgacctctacaacgcaatggccgtggaagaaggaggtggcccaggggggcaaggattttcatacccatacaaggcggttttctcaacccaaggacctccactcgcgagcctgcaggactcgcattttcttacggatgcagacatggtgatgtcgtttgtcaacctcgtggagcatgataaagaattcttccatcccagataccaccacagggaatttagatttgatctctcaaagatccctgagggtgaagcagtgactgcagcagaatttcgaatttacaaggattacattagggagaggtttgacaatgaaacttttcggatctcggtgtatcaagtgcttcaggaacacctgggcagagaatccgatctctttctgttggattccagaaccctttgggcctcggaagaaggctggctcgtgtttgatatcaccgcaaccagcaatcattgggtcgtgaacccgcggcataatcttggacttcagctgagcgttgaaaccctggatggtcagagcattaatcccaagctggctggtctgatcggaaggcatggtccgcagaataagcaaccatttatggtggcgttcttcaaagccactgaagtgcactttcgttcgattagatcgactggcagcaagcaacgtagccaaaatcgttcaaagacgccgaagaaccaggaagcacttcgtatggcgaacgtggctgagaactcgtcatctgaccaacgccaagcatgtaagaaacacgagttgtacgtctcgttccgggatctcgggtggcaagattggatcattgcaccggagggatacgccgcttactactgtgaaggagaatgtgcattccctctgaacagctacatgaatgcaaccaatcatgcaatcgtgcaaactctggtccactttatcaacccagaaactgtgcctaaaccttgctgcgcacctactcagcttaacgcgatctcagtcctctactttgacgattcctctaacgtcatcttgaagaagtataggaacatggtcgttcgggcatgcggctgtcac

SEQ ID NO: 120395 - DNA, 1293 bp, Artificial Sequence
  derived and/or modified sequence
atgcacgtccgtagcctacgggccgccgcccctcactctttcgtggctttgtgggccccattatttctgcttagaagtgctttggctgacttttcactggataatgaggtccacagctcattcatccatcgcaggttacgtagtcaagagcgtagagagatgcaaagagagattttgtctatcctaggactcccccatcggcccaggccacaccttcagggaaagcataatagcgctccgatgttcatgcttgatttatataacgctatggccgtcgaagaaggtggtgggcccggtgggcagggtttcagttacccgtacaaagctgtgttctctacgcaaggtcccccacttgcttctcttcaggattcacactttctgactgacgctgatatggtaatgagcttcgtgaacttggtggagcatgataaggagtttttccaccccagatatcaccatcgtgagttcaggttcgatttgagcaagattcctgagggagaagctgtgactgcggcagagtttagaatttataaggactacattagggagcgattcgataacgagacctttaggatatcggtttaccaagtcctacaagaacacctcggtagggagagcgatctctttttgttagattccagaactctttgggccagtgaggaaggttggcttgtttttgacattactgccacctctaaccactgggtggttaacccaagacacaatttggggcttcagttgtctgtcgaaactcttgatggacagtcaataaatccgaagcttgctggtcttattgggaggcatggaccccagaacaaacaacccttcatggtcgctttcttcaaagctacagaggtccattttagatcgatcagaagcacaggcagtaaacagcggtcgcagaatcgttctaagacgccaaaaaatcaagaagctcttaggatggcaaatgttgcagagaatagcagctcagaccagagacaagcttgtaagaagcacgaattgtatgtttcatttcgtgatttggggtggcaggattggataattgctccagagggttacgcagcttactactgcgaaggggaatgcgctttccctttaaactcatatatgaacgccacaaaccatgctattgtacaaactctggtacatttcatcaatcctgagacagtaccgaagccatgttgcgcgccaacacaacttaacgcaataagtgttctatatttcgatgatagctccaatgttatactgaaaaaatataggaatatggtagtaagggcctgcgggtgccat

SEQ ID NO: 120396 - DNA, 1293 bp, Artificial Sequence
  derived and/or modified sequence
atgcacgtgagatccctgcgcgccgccgcgccccattcgttcgtggccctctgggccccgctgttcctcctccggtcagcactcgcggatttctcgctggacaacgaggtgcattcttctttcatacacaggaggttgagatcccaggaaaggcgggaaatgcaacgcgaaattctgtccatccttggattgccacaccgccctagaccccatctccaaggaaagcacaactcagctcccatgttcatgcttgatttgtacaacgctatggccgttgaagagggaggaggaccgggaggccagggattttcctacccttacaaggccgtgttctccacccagggtcccccactggcgtcgctccaggactcccatttcctgacggatgcagacatggtgatgtcatttgtgaatctggtggagcacgacaaggagtttttccacccacgctatcatcatcgagaattccgcttcgacctgtcaaagatcccggaaggggaagccgtgactgcggcggagtttaggatctacaaggactacatcagggaaagattcgacaatgagactttccggatcagcgtgtaccaggtgctgcaagagcacctcggcagagaatcagatctgttcctgctggactcccgcaccctctgggcatcggaggagggatggctcgtgttcgacatcactgccacctcgaatcattgggtggtcaacccccgccataacctggggctccaactgtccgtggagactctggatgggcagtcgatcaatccgaagctcgctggactgatcggacgacacggtcctcagaacaagcaaccgttcatggtggctttcttcaaggcaaccgaggtgcactttcgctcgatccggtccaccgggtccaaacagcgctcccagaatagaagcaaaactccgaagaaccaagaagccctgcgcatggccaacgtggcagaaaacagcagcagcgaccagcgccaggcgtgtaaaaagcatgaactgtacgtcagctttcgcgacctgggctggcaggactggattatcgcacccgaaggatacgccgcctactactgcgaaggagaatgcgccttcccgctgaattcctacatgaacgcaactaatcacgccatcgtgcagaccctcgtccacttcatcaatccagaaactgtcccgaaaccgtgttgtgcccctactcaactcaacgccatctcagtgctctatttcgatgactcatcgaatgtcatcctcaagaagtaccggaatatggtggtgagggcgtgcggatgccac

SEQ ID NO: 120397 - DNA, 1293 bp, Artificial Sequence
  derived and/or modified sequence
atgcacgtgcggagcttgcgggctgcggcaccacactctttcgtcgcattatgggcccctctgttcttgctccgaagcgctcttgcagatttctccctcgacaatgaagtccacagttccttcatacaccgcagattgcggagccaggagcggagggaaatgcagagagagatcctcagtatactcggccttcctcataggcccagacctcatctccagggcaaacataattccgcgcctatgtttatgttggatctatacaacgccatggctgttgaggaaggcggagggcctggtggtcaagggttttcatatccgtacaaggccgttttctcaacgcaggggcctcctctggcatcattgcaggactctcacttcttgaccgatgccgacatggtgatgtccttcgtgaacctcgtggagcacgataaagaattcttccatccacgttatcaccatagagagttccgtttcgatctgtcaaagatccctgaaggcgaagccgtgacagctgccgagttccgcatatataaggattatatacgggagagatttgacaatgaaacattccgaatttccgtgtatcaggttcttcaggaacacctgggccgcgaaagtgatctttttctcttggattcacggactctgtgggcctctgaggagggctggctggtgttcgatatcaccgcgacctccaatcattgggtggtcaacccgcgccacaaccttggactgcagttatccgtagagacgcttgacgggcaatccataaaccctaagctggccgggctgattggccggcatggccctcaaaataagcagccttttatggtggctttctttaaagctacagaagttcacttccgctccataagatctactggctccaagcaaaggagccagaatcgatcaaaaacacccaagaaccaggaggccctgcggatggcgaatgtcgccgagaatagctcctctgatcaaaggcaagcctgcaagaaacatgaactgtatgtgagctttagagacctaggatggcaagactggataattgcacctgaggggtatgccgcttattactgcgagggagagtgcgcattcccacttaactcatacatgaacgcaacgaatcacgccatcgttcaaaccctagtccacttcatcaacccagaaaccgtgccgaaaccgtgttgtgcccctacccagctaaatgcgatcagtgtgctgtacttcgatgactcatctaacgttattctcaaaaagtacagaaacatggtggttcgcgcctgtggttgccac

SEQ ID NO: 120398 - DNA, 1293 bp, Artificial Sequence
  derived and/or modified sequence
atgcatgtgcgaagtttgagagccgctgctcctcacagtttcgtggccctgtgggctccactctttctgttgcgtagtgccctcgcagacttctccctggacaacgaggtgcattcttccttcatccacaggaggctgaggagtcaagaaagacgagagatgcagagagaaattttatccatcctcggcctacctcataggccccgaccgcaccttcaggggaagcacaatagcgcccctatgttcatgctcgatctttacaacgccatggcagtggaggaaggaggcggcccgggagggcagggattctcatatccatataaggccgttttctccacacaggggccacccctcgctagccttcaggacagtcactttctgaccgatgccgacatggtgatgtctttcgtgaatcttgtggaacatgacaaagagtttttccatccccgatatcatcaccgtgagttcaggtttgatttgagcaaaatcccagaaggggaggccgtcacagccgctgagtttaggatctataaagactacattagagagaggttcgataacgagacctttcgcatcagtgtgtaccaagtgttacaggagcatttgggtcgagaatccgacctgtttcttcttgacagccgcaccctctgggcctcagaggaaggctggctggtctttgacatcaccgccaccagtaaccactgggtggtgaatcctaggcacaacctgggcctccagttaagcgtggaaacactcgacggacagagtatcaatccaaagcttgccggactaatcgggagacatggtccccagaacaaacagccttttatggtggccttcttcaaggcaaccgaagtccacttcaggagtatccggagtacagggtctaaacagcgtagccagaacaggtccaagactcctaagaatcaggaggccctgcgaatggcaaacgtggcagagaattcctcatcagatcaacggcaggcttgtaaaaaacatgaactgtatgtaagcttccgtgatctggggtggcaagactggatcatagcccccgagggctacgccgcttattattgcgaaggtgaatgcgctttccccttgaattcctacatgaatgccacaaaccacgccatcgtgcagaccttagtgcactttatcaatcccgagacagtgcctaaaccttgctgcgcccctactcagctgaatgcgatttctgtactgtacttcgacgacagcagtaacgtgatactcaagaaatacaggaacatggtggttcgagcttgtgggtgccat

SEQ ID NO: 120399 - DNA, 1293 bp, Artificial Sequence
  derived and/or modified sequence
atgcacgtgagatcgctgagagcggctgcgccccattcgttcgtcgcgctctgggcccccctttttctcctccgctccgcgctcgctgacttctcacttgataatgaagtgcactccagcttcatccatcgccgcttgcggtcacaagaacggagagagatgcaacgcgagattttgtctatcctgggattgccgcacaggcctcggcctcatctgcagggcaaacataattcagcacctatgttcatgttggacctgtacaacgccatggctgtggaggagggcggcggaccggggggtcagggcttctcctacccgtacaaggctgtgttttcgactcagggacccccactcgccagccttcaagactcacatttcctgacggacgcagatatggtcatgtcattcgttaacctcgttgagcacgacaaggaattctttcacccgagataccaccaccgagaatttcgatttgatctgtcgaagattcccgaaggagaggccgtgaccgccgcagagtttagaatctacaaggattacatccgcgaacgctttgataacgaaacctttcgcatctccgtataccaggtgctccaagaacatctggggcgcgaatcggacctgttccttctggacagccggaccctgtgggccagcgaagaaggctggctcgtgttcgacatcacggccacttccaaccattgggtggtcaacccgcgccacaacctggggctccagttgagcgtagaaactctggacggacagagcatcaacccgaaactggccggcctgattggtagacatggtccgcagaataagcaaccattcatggtggccttcttcaaggctactgaagtccactttagatccatccggagtactggatcaaagcaacgcagtcaaaatagatcaaagacccctaaaaaccaggaggcacttcgcatggccaatgtggcggaaaactcaagctcggatcagcggcaggcgtgtaagaaacacgagctttacgtgtcattcagggacctcggttggcaggactggataatcgcgccagagggatacgcggcctactattgcgaaggggagtgtgccttcccactcaactcctatatgaacgccaccaatcatgcaatcgtgcagaccctggtccatttcatcaatccggagacggtgccaaaaccgtgctgcgctcccacccagctgaacgcaatctctgtgctgtacttcgatgactcctcaaacgtgattttgaagaagtaccggaatatggtcgtccgggcttgcggatgccat

SEQ ID NO: 120400 - DNA, 1293 bp, Artificial Sequence
  derived and/or modified sequence
atgcatgtgaggtcgctgcgcgccgccgcgccacacagcttcgtggccctctgggctcccctttttctgctgcggtcggcgttggccgatttcagcctcgacaacgaggtgcactcctcgttcatccatcggcgtctgcgtagccaagagcgcagagagatgcagcgggaaatcctgtcaatcttgggactgccacacagaccgcgccctcatctccagggaaagcacaactcagcgccgatgttcatgctcgatttgtataacgccatggctgtggaggaaggaggaggccccggaggacaagggtttagctacccgtacaaagcagtgttctcgacccaggggccacctctggcctcgctgcaggactcccatttcttgactgacgcagacatggttatgtcgttcgtgaaccttgtggaacacgataaggagttcttccacccaagataccatcaccgcgagttcagattcgacctgtccaaaattccagaaggggaagcggtgactgcggcagagtttcggatctacaaagattacatccgcgaacgcttcgacaatgagactttccggatctccgtctaccaggtccttcaggaacacctggggagagagtcagatttgttcctgctcgattcacggacgctctgggcctcggaagaaggatggctggttttcgatatcactgccacgtccaaccattgggtggtgaacccgagacacaatctgggattgcaattgagtgtcgagacgctggatggtcaatcgattaacccgaagctggcaggcctgatcggacgccatggtccgcagaataagcaaccgttcatggttgcttttttcaaggccaccgaagtacatttccgttcaattcggtcaaccgggagcaagcagcgcagccaaaatcggtctaagaccccgaagaatcaagaagctctgcgcatggctaacgtcgctgaaaatagctcttcggaccagcgccaggcttgcaagaaacacgagctgtatgtgtcatttcgcgaccttggatggcaggactggatcatcgccccagaaggatacgccgcgtactactgcgagggagagtgcgccttcccactgaatagctacatgaatgctaccaaccacgcaatcgtgcaaactctcgtccatttcatcaacccagaaaccgtacccaagccgtgttgtgcccctacccagcttaacgctatctccgtgctgtactttgacgactcgtcaaacgtcattctcaagaaatacagaaacatggtcgtgagagcctgcggatgccac

SEQ ID NO: 120401 - DNA, 1293 bp, Artificial Sequence
  derived and/or modified sequence
atgcatgtgcgctctctgcgggcagcggccccacattccttcgtggcgctttgggcacctctgtttctgctccgatctgctctggcagactttagtctcgacaacgaagtccactcttctttcattcaccgacggctgcgctcccaggaaaggcgggagatgcagagagaaatcctctctattctgggcttgcctcataggccgagacctcacctgcagggaaagcacaactccgcacctatgtttatgctggacttgtataacgcaatggccgtggaggaaggcggtgggccaggtggccagggttttagttatccgtacaaagccgttttcagcactcagggcccccctctggcttccctgcaggacagccactttctgactgacgctgacatggtcatgtcatttgtgaatctggtggaacacgataaggagttttttcatcctagataccatcatcgcgagtttaggttcgatctctcaaagatccccgaaggcgaggccgtcaccgcagctgagttccggatctataaagactacattcgggagcggttcgataacgaaacattccggattagtgtttatcaggtacttcaggagcacctcggccgagagagcgacctgttccttctggatagccgcaccttgtgggcaagcgaagagggttggctcgtgtttgatattaccgcaacttctaaccattgggtggtgaatccaagacacaatctgggtctgcaactgtcagttgagacgctggatggacagagtattaaccctaaactggccggtttgatcggcaggcatgggccccagaataagcagcctttcatggtggcgttctttaaggctacggaagtgcacttccgatcaattagaagcaccggtagtaaacagcgctcccagaatcgctcaaagacccccaaaaatcaggaggcactgcgcatggccaatgtggccgagaacagctcatctgatcagcggcaggcatgtaaaaagcacgaattgtatgtatctttccgagatctcgggtggcaggactggattatagcacccgaaggttacgcagcgtactactgcgaaggcgagtgtgcctttccactgaatagttacatgaacgccactaatcacgccatcgttcagactctggtccatttcataaatcctgaaaccgtgcccaaaccctgttgcgccccaacacaactcaacgctatttccgtgttgtactttgacgactcctctaatgtcatcctgaagaagtatcgaaacatggtcgtgcgggcctgtggatgccat

SEQ ID NO: 120402 - DNA, 1293 bp, Artificial Sequence
  derived and/or modified sequence
atgcacgttaggtccctgagagccgctgcgccacatagttttgttgcattgtgggcacctctgttcctccttaggtcggctttagcagatttctcccttgacaacgaagtccatagtagtttcatccatcgtcgtctacgctcccaggaacgtagggaaatgcagagggagattctttcaattttgggactaccgcatcggccacgcccgcatttgcagggcaaacacaactctgcgcctatgttcatgttggacctgtacaacgcaatggctgtggaggagggtggcggaccgggcggacagggcttttcatacccctacaaggcggttttctccacccaaggccctccattagcatcactgcaagactcccatttcttgaccgatgccgacatggtcatgtcgtttgtaaacctggtggagcatgataaagaattctttcacccacggtaccatcaccgtgagttccgcttcgacctctcaaagattcctgaaggagaggccgtgacagcagcagagtttcgtatttataaagactacatccgggagcgtttcgacaatgaaacgtttagaatctctgtttatcaggttcttcaggagcatctaggtcgggaaagcgatctctttctgttggactcgcgcactctgtgggctagtgaggaaggctggttggtcttcgatatcactgccacttcaaatcactgggtggtcaatccgcgccacaacctcggactccaattgtccgtggagacgctcgacggtcagtccatcaaccctaaactggcaggcttgataggccgccacggaccccagaataagcaaccattcatggttgctttctttaaggccacggaggtacactttcggtctatccgctccaccggatcgaagcagcggagccagaatcgttccaagacccccaagaaccaggaagcgttacgcatggccaatgtcgcagaaaactcatcgagtgatcaacgccaagcgtgtaaaaaacacgaactctacgtatcttttcgggatttgggttggcaggactggatcatcgcaccggagggatacgctgcatactactgtgagggggaatgcgcattccctctcaattcttacatgaatgccactaaccacgctatcgttcaaactttagtgcacttcataaacccggaaacagtccccaaaccgtgctgcgctcccacccagttaaatgctatttccgtcctgtattttgacgatagtagcaatgtcattttaaaaaaataccggaatatggttgtccgcgcatgtgggtgtcac

SEQ ID NO: 120403 - DNA, 1293 bp, Artificial Sequence
  derived and/or modified sequence
atgcatgtgcgctcattgcgcgccgccgcaccacactcatttgtcgctctgtgggccccacttttcttgctgagatctgctttggctgatttcagcttagacaacgaagttcatagcagctttattcaccgcagactgaggagtcaggagagacgcgagatgcagcgcgagattctgagcattctgggactgccacaccgcccaagaccccaccttcagggcaagcataactcagcaccaatgtttatgctggatctttataatgcaatggccgtcgaggaaggcggtggcccaggcggccagggattttcctatccctacaaggcggttttcagtacccagggacctcccttggcttctctgcaggacagccattttctgacagacgccgacatggtaatgtctttcgttaatctggttgagcacgataaagagttctttcacccacgctaccatcaccgcgagttcaggttcgacctgtcaaagatccctgagggtgaggctgtgaccgcggccgagttcagaatctacaaggattatatacgcgagaggtttgataacgagacgtttcgcatctctgtgtatcaggtcttacaggagcacctaggccgggagtctgatctctttctgcttgattcacgtacactctgggcttctgaagaggggtggctggtcttcgacattaccgcaacctctaaccattgggtggtcaaccctcggcacaacctggggttgcagctaagcgttgaaactctggatggacagagtatcaatccaaagttggcgggccttataggccgccacggccctcagaacaaacagcctttcatggtagcttttttcaaggctactgaggtgcactttaggtctattagaagcactggctctaaacagcgtagccagaatcggagcaagacccccaaaaatcaggaggctctgaggatggcaaacgtggccgaaaacagcagcagcgaccagagacaggcctgcaaaaaacacgagttatatgtgtcctttagagacctgggttggcaggactggataatcgcgccagagggctatgcggcctattattgtgaaggagagtgtgcatttcctctcaattcctacatgaacgccactaaccatgccatagtgcaaacactcgttcatttcattaaccccgagaccgtgccaaagccctgctgcgctccaacccagctaaatgctatttcggttttatattttgacgacagttccaatgtgatcctcaaaaaataccggaatatggtagttcgagcctgcggctgccac

SEQ ID NO: 120404 - DNA, 1293 bp, Artificial Sequence
  derived and/or modified sequence
atgcacgtaagaagtctcagagccgccgcaccacactcattcgtggccttatgggccccacttttccttctgcgctccgcactcgccgatttcagcttggacaatgaggtccacagctcgttcattcatcgacggctccgtagtcaggaacgccgcgaaatgcagcgcgaaattctctctatactgggccttccgcaccgtccccgacctcacctacagggcaaacacaacagcgctcccatgtttatgctcgacctatataatgccatggcagtcgaggagggaggcggccctggtggacagggtttctcttatccttacaaagcagttttttctacacagggaccacccctcgcatcactgcaggattcacactttctgactgacgcagacatggtcatgagtttcgtgaatttggtggagcacgacaaggagtttttccacccgcgttaccatcatcgcgagttcagattcgacctgtccaaaattccggagggagaggctgtcaccgccgcagaattccggatctataaagattatatccgagaaaggttcgataatgagaccttccgcatctctgtttaccaggtgctccaggagcacctcgggcgagagtctgacctctttctcttagatagcagaacactctgggcatcggaggaggggtggctggtgtttgatatcactgcgacaagtaaccattgggtcgtgaaccctaggcacaaccttgggcttcagctgtctgtggagaccctggatggacagagcatcaacccaaaacttgccggcctgattggtaggcacggtcctcaaaataagcaaccctttatggtagcattcttcaaggcgacggaagtgcattttcgatccatcaggagtacaggatctaaacagaggagtcagaaccggtcgaagacaccaaaaaaccaggaggctctgcgaatggcgaatgtagccgagaacagcagctccgaccagcgtcaggcatgcaaaaaacacgagctgtacgtaagcttcagggatcttggctggcaggattggattattgcaccagagggctacgctgcttattattgcgaaggcgaatgtgcattccctcttaatagctacatgaatgccacaaaccacgccatcgtgcaaacccttgtgcattttataaatcccgagaccgtgcctaaaccttgctgtgcccctacccagctgaatgcaatctctgtgctgtactttgacgattcatctaatgttattttaaaaaagtacagaaacatggtggtccgcgcttgcgggtgtcat

SEQ ID NO: 120405 - DNA, 1293 bp, Artificial Sequence
  derived and/or modified sequence
atgcatgtgagatcgttgagggctgcagcgcctcattccttcgtggcactctgggcgccactgttcctgttgcgtagcgcgcttgcagatttttcgctcgataatgaggtccattcctcattcatacacaggcgtctccgctcccaagagcgcagagagatgcaacgcgaaattcttagcatcctggggcttccacatcgccccagacctcatctccaggggaagcacaactcagcacctatgtttatgctcgacctctataacgcgatggcggtggaagaaggagggggacctggtggacaaggattttcgtacccttacaaggcggtcttttcaacgcaaggacctccacttgcgtcgcttcaggactcccactttctcactgatgccgacatggtgatgtcgttcgtgaatctcgtggagcatgataaggaattcttccatccccgctaccatcatagagagtttagattcgatcttagcaagatcccagagggagaagcggtgacggccgccgaatttaggatttacaaagactacatcagagaacggttcgataacgagacgtttagaatatccgtgtaccaagtgctgcaggaacatttgggtcgggaatcagatctttttctgctggattcgagaactctttgggcttccgaggaaggatggctggtgtttgatattaccgccacttccaaccactgggtggtgaacccacgtcataatcttggtctgcagctgtcggttgaaaccctggatgggcagtcaatcaatcccaaactggcgggacttataggccggcacggaccacaaaacaagcagccatttatggtggcattctttaaggccactgaagtgcattttaggagcattcgcagcaccggtagcaagcaaagaagccagaaccgatccaaaacccctaagaaccaagaagctctcagaatggccaatgtcgcagagaactcctcatcagatcagcgacaggcttgtaagaagcacgaactgtacgtgtccttccgggacctgggctggcaggactggattatcgccccagaaggctacgcagcgtactactgtgagggagaatgtgcatttccactcaacagctacatgaacgccaccaaccatgctattgtgcaaaccctcgtccacttcataaatccggaaaccgtgccaaagccctgttgtgcacctactcagctgaacgcgattagcgtcctgtactttgatgactcctctaacgtgatcttgaagaaataccgaaacatggtagtccgcgcatgtggatgtcat

SEQ ID NO: 120406 - DNA, 1293 bp, Artificial Sequence
  derived and/or modified sequence
atgcacgttcgctccctccgagccgctgcccctcactccttcgttgctctctgggctcccctttttctgttaaggtctgccctcgctgatttcagcctggataatgaagttcacagctccttcatccacaggcggcttcgatcacaagaacggagggaaatgcaacgagaaatcctctctatcctcggtttgccacacaggccccggccacacctgcagggaaagcacaacagtgcaccaatgtttatgctggacttgtataatgccatggctgtggaagagggaggtgggccaggaggacagggattcagttatccctataaggcagtgttctctacccagggacctcctctagcatccctgcaagactctcactttctgacagacgccgacatggtaatgtcttttgttaacttagtcgaacacgataaggaatttttccaccctcgttaccatcacagggagttcaggtttgatttgagcaagattcccgaaggagaggcagtcacggctgcagagtttcggatttataaggattacatacgcgagagattcgacaacgagacatttcggatcagtgtttaccaggtgctccaggagcatctaggccgagagtcagatttgttccttctggacagccggaccttgtgggcctctgaggaaggatggctcgtcttcgatatcacagcaacctccaaccattgggtggtgaacccccgccacaacttaggattgcagctcagcgtggagactctggacggtcagtccattaaccctaaactcgctgggctgattggccggcacggacctcagaataagcagccgtttatggtcgcgtttttcaaagcaactgaggtgcactttaggtctatccgttcaacaggcagtaagcagcggtcacagaatcgatccaagacacctaagaaccaggaggccctgagaatggccaacgtagcggaaaactcatcctcggaccagcgacaagcatgcaagaaacacgaactatatgtatcgtttagagacctgggatggcaggactggattattgctcccgagggctacgcagcctactattgtgaaggggaatgcgctttccctctcaattcctacatgaatgctactaaccatgcgatcgtgcagacactggtccatttcatcaatccagagaccgtccccaaaccttgttgcgcccctacacagttgaacgcaatctctgttctatactttgatgatagttcgaatgtaattctgaagaagtacaggaacatggtagtgcgggcctgcggctgtcac

SEQ ID NO: 120407 - DNA, 1293 bp, Artificial Sequence
  derived and/or modified sequence
atgcatgtccgttccttgcgtgccgcagcccctcatagtttcgtggctctgtgggctcctctattcctcctcaggtccgctcttgccgacttttctctggacaacgaagtgcacagctctttcatccaccgccgcctgaggtcacaggaacgaagggaaatgcagcgcgagattctttctatacttggattgccccatagacccaggccacatctgcaagggaaacacaactctgccccaatgtttatgctagacctgtacaatgctatggctgtagaagaaggaggaggccccggaggacagggctttagctatccctataaagccgtcttctctacacaggggccccccttggcttcactgcaggactcgcattttcttactgacgccgacatggttatgtccttcgtgaacctggtggagcacgataaagagtttttccaccccaggtaccatcaccgcgaatttagattcgatctgtctaaaatcccagagggagaagccgtaaccgctgccgaattccggatatacaaggattacattagagagcgttttgacaatgaaacatttaggattagtgtctaccaggttctccaggagcacctggggcgcgagagcgacttgttcctgctggactcccggacgctgtgggctagtgaggaaggatggctggttttcgacattaccgccacctctaaccattgggtggtgaatccccggcacaacttgggcctgcagctgagtgtggagaccctggatggtcagagcattaaccccaagctggctggcctcatcggccgccacggccctcaaaacaaacagcccttcatggtagctttttttaaagctaccgaagtgcatttccgaagcataaggagtacgggctctaagcagagaagtcaaaatcggtctaagacacctaagaaccaggaggcactgaggatggccaatgttgctgagaactcgagcagcgatcagcgccaggcatgtaagaaacacgagctgtacgtgagttttcgagatctaggttggcaggattggatcatcgctcccgaaggctatgcagcctattactgtgaaggcgagtgtgcatttccactcaattcatatatgaacgcaacgaaccatgctatcgtacaaacccttgtgcacttcattaacccagagaccgtacccaagccctgctgcgctccaacccagctgaacgccatctccgtcctatattttgatgactcttcaaacgttatcttgaaaaaatacagaaatatggttgtgcgggcctgcggctgccat

SEQ ID NO: 120408 - DNA, 1293 bp, Artificial Sequence
  derived and/or modified sequence
atgcacgtgcggtccctgcgcgctgccgccccgcactcgttcgtcgccctttgggcacctctctttctgttgcggtcggcgctggcagacttctcattggataacgaggtgcacagctcttttatccaccggcgcctgcggagccaggagcgacgggaaatgcagcgggaaatcctgagcatcctgggcctgcctcaccgtcctagaccccatctccaaggaaagcataattcagcacctatgttcatgttggatctctacaatgctatggcggttgaggaaggagggggtcctggcggtcaggggttctcgtacccctacaaggccgttttctccactcaggggccgccgctcgccagtctgcaggactcacacttcctcaccgacgccgacatggtgatgtccttcgtcaacctggtggagcatgacaaggagtttttccatccacgctaccatcatcgggaattccgctttgatctcagcaaaataccagagggagaagccgtcacggcggccgagttcaggatttacaaggactacattcgcgaacgcttcgataacgaaaccttcaggatcagcgtgtaccaggtgctgcaagaacaccttgggcgcgaaagtgacctgttcctgctcgactcccggaccctctgggcatcggaagaggggtggctggtgttcgacataactgcaacttctaatcactgggtcgtgaacccccggcacaatctgggactccagctgtcggtggagacgttggacggccagtcgattaatccaaaactggccggactcatcggacgccatggaccacagaataaacagccgttcatggtcgcgttctttaaagcgactgaagtgcactttaggagcatcagatcaactggtagcaagcagaggtcgcaaaataggtcgaaaaccccgaagaaccaggaggcccttcggatggcaaacgtggcggagaacagcagtagcgatcaacgacaggcctgcaagaagcatgaactgtacgtgtcgttccgggatcttggatggcaagattggatcattgccccggaaggatacgccgcctactactgcgagggagaatgcgcgttcccgttgaactcctatatgaacgcaactaaccacgccattgtccagaccctggtccacttcatcaacccggaaactgtgccgaagccgtgttgcgctccgacccagctgaacgcaatctcggtgctctactttgacgactcatccaacgtcatcctcaagaagtatagaaatatggtggtgcgcgcatgcggctgccat

SEQ ID NO: 120409 - DNA, 1293 bp, Artificial Sequence
  derived and/or modified sequence
atgcacgtcagatccctgagggctgccgctcctcacagcttcgtggcgctgtgggcacctctgtttctcctaagatctgccctggcagacttcagtctggacaatgaggtccacagttcttttatccatcgtcggctccgctcacaagagaggcgggagatgcagagggaaatcctatccatcttgggacttcctcatcggccaagaccacacctccagggcaagcacaacagtgctcctatgttcatgcttgatttgtacaacgctatggccgttgaggaaggcggaggccccggaggtcagggattctcatacccctataaggcagtgtttagcacgcagggcccaccgctcgcctcccttcaggactcccactttctcacagatgctgacatggtgatgagcttcgtaaatctagttgagcatgacaaagagttcttccacccacgctaccaccacagggaattcagatttgacctgtcaaagattcctgagggggaagcagtgactgctgcagagtttcgaatttataaggactatatcagagaacgttttgataatgaaacctttagaatctccgtgtaccaagtgctgcaggagcatctggggcgcgagtccgatctctttctcctcgatagtcggacgctatgggccagtgaggaaggatggcttgtatttgatatcactgcgacgagcaatcactgggtggttaacccgcgccacaatctaggcttacagctgagtgtagagaccctggacggacagagtattaatccgaagctcgcaggcctgataggaagacatggcccgcagaacaagcaacctttcatggtcgcgtttttcaaggccaccgaggtgcacttcagatctatccggtcgacaggatccaaacagaggtcacaaaacaggtccaaaaccccaaaaaaccaggaagccctgcgtatggccaacgttgcggaaaactcgtcctctgaccagcgccaggcttgcaagaaacacgagctgtacgtgagtttcagagacctcggatggcaggactggattattgcgccagagggatatgccgcatattattgcgaaggggagtgtgcttttcccctgaactcgtacatgaacgccacgaatcacgcgattgtccagacactcgttcatttcattaaccccgagaccgtgcccaagccttgctgcgcccctacgcagttaaatgctatttccgtgctgtattttgacgatagtagcaacgtgattctcaaaaagtacagaaacatggtggtccgcgcttgtggatgtcac

SEQ ID NO: 120410 - DNA, 1293 bp, Artificial Sequence
  derived and/or modified sequence
atgcacgtccgatctttgagggccgctgccccccactccttcgtggctctgtgggccccactgttcctgttgcgcagcgccctagcggacttcagtttggacaacgaagtccacagctccttcattcacaggcgacttcggagtcaagagcgtcgcgagatgcagcgggaaatcctgtcaatcctgggcttgccacacaggccacgacctcatctgcaaggcaaacataactctgccccaatgtttatgcttgatctgtacaacgcaatggccgtggaagaggggggtgggcctggcggccaggggtttagctatccctacaaggcagtcttctccacacaggggccacctctggcttcccttcaggacagccattttctgaccgatgctgatatggttatgagttttgtgaatctggtggagcacgacaaggagtttttccatccacggtaccatcacagggaatttcggtttgacctcagcaaaattcccgaaggtgaggccgtaacagcggctgagttccgcatttacaaggactacatcagagaacgatttgacaatgaaaccttcaggatttccgtgtatcaagtcctccaagaacacctcggacgagaatccgacctcttcctgctggattcaaggacactttgggctagcgaagagggctggcttgtgttcgacattactgccacgtccaaccattgggtggttaaccctcggcacaaccttgggcttcagctaagcgtggaaactctggatgggcagagcatcaatcccaagttggctggcctgatcggcaggcatggcccccagaataagcaaccttttatggtagcttttttcaaagccaccgaagtccactttcgttccattcgaagcaccggcagtaagcagagaagccagaatcgatctaagactcctaagaatcaggaggccctgagaatggccaatgtggctgagaactcgagcagcgatcaacgccaagcctgtaaaaaacacgagctatatgtcagctttcgagacctggggtggcaggattggatcattgcaccagagggttatgctgcttactactgcgaaggtgaatgtgcctttccactcaactcctacatgaatgcaaccaatcacgcgattgtccagacactcgtgcattttattaatcctgaaacggtgcccaagccctgctgcgcccccacacagcttaacgcgattagtgttttgtactttgacgacagtagcaatgtaatcctcaaaaagtatcggaacatggtggtgcgcgcctgtgggtgccac

SEQ ID NO: 120411 - DNA, 1293 bp, Artificial Sequence
  derived and/or modified sequence
atgcatgtgcgttctctccgggcagcggctcctcattcattcgtggcactgtgggcccccttgttcctgctgcggtccgctctggctgatttctcactggacaacgaggtgcactcgtcgttcattcatcggcgcctgaggagccaagagcgccgagagatgcagagggaaattctttctatcctgggccttccacaccgccccagacctcacctccaggggaagcataattcagccccgatgtttatgcttgacctctacaacgcgatggcggtggaggagggcgggggcccgggaggacaaggtttcagttacccatacaaggccgtcttttccacccaggggccaccgctcgcatccttgcaggattcacacttcctgactgacgccgatatggtgatgtccttcgtcaatctcgtcgaacatgataaagagttttttcaccccaggtaccaccacagggaatttcggttcgatctctcaaagattccggagggagaagccgtgacggcagccgaattccggatctacaaggattacatccgggagcggtttgacaatgaaactttccggatttcggtgtaccaggtccttcaagaacatctgggccgggaatccgacctgttcttgctcgacagccgcactctgtgggcatccgaggagggatggcttgtgttcgacatcaccgctacctcgaaccactgggtggtgaaccccaggcacaatctgggcctccaactctcggttgaaaccctggatggacagtcaatcaacccgaaactggctggactgatcggcagacacgggccgcagaacaaacagccgttcatggtggcatttttcaaggcaaccgaggtgcatttcagatccatcaggagcactggatccaagcaacgctcgcagaatcggtccaagactcctaaaaaccaggaggcgcttcgcatggctaacgtggcggaaaattcatcctcagatcagcggcaagcgtgcaagaagcacgagctctacgtctccttccgggatctcggatggcaggactggatcatcgcaccagaggggtacgccgcctactattgcgagggagagtgcgcatttcccctgaactcctacatgaatgcgactaaccatgccattgtccagaccttggtccacttcatcaatccggaaactgtccccaagccttgttgcgcgccgacccagctgaacgcaatctccgtgctctacttcgacgattcaagcaacgtcattctcaagaaatatcgcaatatggtggtgagggcatgcggctgccat

SEQ ID NO: 120412 - DNA, 1293 bp, Artificial Sequence
  derived and/or modified sequence
atgcatgtccggtctttgagggctgctgcccctcattcgtttgtcgcactctgggcccctcttttcctgctgcgctcagcacttgctgatttctccctggacaacgaagtgcattcgagctttattcatcgtagactcagatcgcaggagagaagagagatgcagagagaaatcctgtccattctgggactgccacatagacctagaccacaccttcaaggcaaacataattcagcaccgatgtttatgcttgacctttacaatgccatggccgtggaagaagggggaggtcctggggggcaaggattttcgtacccttacaaggctgtgttttcgactcagggccctcccctcgcatcacttcaggactcccatttccttaccgacgccgacatggtcatgtcctttgtgaacctggtggaacatgataaggaattctttcatccccggtaccatcatagagaatttcggttcgatttgtccaaaatacctgagggagaagctgtgaccgctgcagagttcaggatctacaaagattacatacgagagcgtttcgataacgaaacttttcgcattagcgtgtaccaggtgctgcaagaacatctgggaagagagtccgatctgtttctgctggacagcagaactctttgggcatcagaggagggctggcttgtctttgatattactgctacttcgaaccattgggtggtgaatccacgtcacaacctgggtttgcagctgagcgtggaaaccctggatggacagtccatcaacccaaagctcgcaggcctgatagggagacatggaccccagaacaagcagccatttatggtggcattctttaaagcaacggaagtgcactttcgatctattcggagcaccggcagcaagcagcgctcccaaaaccgctcaaagacgcccaagaaccaagaagcactcagaatggccaatgtcgcagagaactcgtcgagcgaccagcgtcaagcatgtaaaaagcacgagctctacgtgtcatttcgcgatctcggatggcaggattggataattgctcctgaaggatacgcagcttattactgtgaaggagaatgcgcctttccgttgaattcgtacatgaatgcaactaatcatgcaattgtgcagactcttgtgcactttatcaacccagagactgtccctaagccatgttgtgcgcctacccagctgaacgctatctccgtcctttactttgatgatagcagcaacgtcattcttaagaagtaccgtaacatggtcgtccgggcatgcggttgccac

SEQ ID NO: 120413 - DNA, 1293 bp, Artificial Sequence
  derived and/or modified sequence
atgcatgtgaggtcactgagggcggccgcgcctcatagctttgtggctctgtgggcacccctgtttttgctccgcagcgcgcttgctgacttttccctggataatgaggtgcacagctccttcattcacaggaggcttcggagccaggagcgccgcgagatgcaaagggaaatcttgtcaattctcggccttccccatcgcccaaggccacatttacagggaaagcataacagcgcccccatgttcatgctcgatctgtataacgccatggctgtcgaggaaggtgggggacccggtggacaaggcttcagttacccatacaaagccgtattcagcacccaggggcctccactggctagcctccaggacagccattttctgactgacgcagacatggtgatgtccttcgtgaaccttgtggagcacgacaaagagttctttcaccctcgatatcaccatagagagttccgcttcgacctgtctaagattccagagggagaagctgtgacagccgccgaattccgaatttacaaggattacattcgagaaaggttcgacaacgagacattccgcatctctgtgtatcaggtgttgcaggagcatctggggcgggagtcagacctctttctgctggattcccgtactctttgggccagtgaggagggatggttagtgttcgatataactgccacatctaatcactgggtggtcaacccccggcataatctgggtctacagctcagtgtggaaactctggacggacaaagtatcaaccctaagctggccggacttatcgggcgccatggcccccagaacaagcagcccttcatggtggcgtttttcaaggcgacagaagtgcatttccgaagcatccgatctaccggttccaaacaaaggagccagaatcggagtaaaaccccgaagaaccaagaagctttgcgaatggcgaacgtggccgagaacagcagttccgaccaaagacaggcctgcaaaaagcacgagctgtacgtgtcatttcgtgacctgggatggcaggattggatcatcgcaccagaaggatatgccgcctattactgtgagggagaatgcgcttttccactgaactcatatatgaacgccactaaccatgcgattgtgcagacactcgtacatttcatcaatcctgaaacagttcccaagccttgttgtgcacccacccaattaaacgccatctccgtcctgtacttcgacgacagctcaaacgtgattctgaagaagtataggaacatggtggtgagagcttgtggttgtcac

SEQ ID NO: 120414 - DNA, 1293 bp, Artificial Sequence
  derived and/or modified sequence
atgcacgttaggtccctcagggccgccgcgccacatagtttcgtggccctctgggcacccctcttcctgctgcggtcagcgctagctgatttttctctcgacaacgaagtccatagctcctttatccaccgacggctccgctcacaggaacgccgggagatgcagcgggagattcttagtatccttggcctgccacaccggcccagaccacacttgcagggtaagcataacagcgcacctatgttcatgcttgacctgtacaatgcgatggccgttgaggaaggagggggaccaggcggccaggggtttagctacccatacaaagccgttttctctacgcagggaccacccctggcttccttgcaagactcacattttctcaccgacgcagatatggtgatgagctttgtgaaccttgtcgaacatgataaagaattttttcaccccaggtaccatcaccgggagttccgcttcgacctgagcaagattcccgaaggagaggctgtcaccgccgcggagtttcgcatctacaaggactacattagggagaggttcgataacgaaacatttagaatctccgtctatcaggttctgcaggaacacttagggagggagagtgacctgttccttctcgatagtagaactctgtgggccagcgaggaaggctggttagtgttcgatattacagccacatccaatcattgggtcgttaacccacgccacaatctgggtctgcagctctctgtggaaaccctggacggccagagcatcaaccctaaactcgctggattgattgggagacacggaccacagaataaacagccttttatggtggccttttttaaagcaactgaagtccacttccgctcaatacggagtaccggatcaaagcagagaagtcagaaccggtctaaaacgcccaagaaccaggaggcactccgaatggctaatgttgctgagaatagcagtagtgaccaacgccaagcctgcaagaaacacgagctctacgtttccttccgggatctgggttggcaggattggatcattgcacctgagggatacgcggcctactactgcgagggggagtgcgcttttccccttaattcatatatgaacgcgaccaatcatgccattgtccagacactcgttcattttattaaccccgagacagtcccaaaaccctgctgcgctcccacccagctgaacgctatctctgtcttgtactttgatgacagctctaatgtgatactgaaaaagtatcgcaatatggtcgttagagcatgtggctgtcac

SEQ ID NO: 120415 - DNA, 1293 bp, Artificial Sequence
  derived and/or modified sequence
atgcacgtgaggtcactgagagcagcagctccccactcatttgtggcactttgggcgccattgtttctgttgcgtagcgcccttgcagatttcagccttgataacgaagtgcattcctcgtttatccatcgtcggctgagatcacaagaaagacgagaaatgcagcgggaaattctttcgattctcggtctgccgcaccgccctagacctcatcttcaaggtaagcataactcggcccctatgtttatgttggatctgtacaatgcgatggccgtcgaggaagggggtggtccgggagggcagggcttttcctacccgtataaggccgtcttttctacccaagggccaccactcgcgtcccttcaagattcgcactttcttacggatgcagacatggtcatgtcgttcgtgaacctcgtggaacatgacaaggagttttttcatcctcgctaccatcatcgcgagttccgatttgatctgtccaaaataccggagggagaagcggtgaccgcagcagagtttcggatctacaaagactacatacgtgaaagatttgacaacgaaaccttcagaatctccgtctaccaggtgctgcaagaacacctcggacgcgaatctgatctttttctcctcgattctcggactctgtgggcttccgaagaagggtggctcgtgttcgacatcacggcaacctcaaatcactgggtggtgaatccccggcacaatctgggactgcagctgtcggtcgaaacgctcgatgggcagtcaatcaatcctaagctggccggcctgataggtcgtcatggacctcaaaacaagcagccatttatggtggcattctttaaggcaactgaagtgcatttcagaagcattagatccaccggaagcaaacaacggtcgcaaaaccgatccaagactccgaaaaatcaggaggctcttcggatggccaacgtggcagaaaactcatcgtcagatcaacgccaggcgtgtaagaagcatgaactttacgtgtccttccgagatctgggttggcaagactggattatcgcaccggagggctatgcagcctactactgcgaaggagagtgtgcttttcctcttaatagctacatgaacgcaaccaatcacgctatagtccagactttggtgcatttcatcaaccccgaaacggtgccaaagccctgttgcgcacctactcaactcaatgccatttcagtcctgtactttgatgattcatccaacgtcattctgaagaagtacaggaacatggtggtcagagcttgtggctgccac

SEQ ID NO: 120416 - DNA, 1293 bp, Artificial Sequence
  derived and/or modified sequence
atgcacgtgcgctcactccgggccgccgccccgcacagcttcgtggcgttgtgggctccactgttcctgctgcgcagtgcgctggctgatttctccctggataacgaggtccactccagcttcattcacagacgcctccggagccaggaacgccgcgagatgcaacgcgagatcctgtccatccttggactgccacatcggccgcgcccgcatttgcaggggaaacacaatagcgctcccatgttcatgctggacctctacaacgcgatggccgtcgaggaaggaggaggacctggaggtcagggattttcctacccatacaaggccgtgttctcgacccagggtccgccactcgcgtccctgcaggattcacacttcctgaccgatgcggatatggtgatgtcttttgtcaacctggtggaacatgacaaggaattcttccacccacgctaccatcacagagaattccggttcgacctctccaagatcccagaaggcgaagccgtgactgccgctgaatttagaatctacaaggactatatccgagaaaggttcgacaacgagacgtttcgcatctcggtctaccaggtccttcaggagcacctggggcgcgagtccgacctcttcctgcttgactcacgtactctgtgggcatcggaggaaggatggctggtctttgacatcactgccaccagcaatcactgggtggtcaacccgcggcacaatcttggattgcaattgtcagtggaaaccctcgacggacaatccatcaaccctaagttggccggtctgatcgggagacatggcccgcagaataagcaaccttttatggtggcatttttcaaagcaactgaagttcacttccggtcgattagatcgactggcagcaagcaaaggtcacagaacagatccaagacccccaagaatcaggaagcactgcggatggccaacgtcgcagagaacagctcatcggaccagaggcaggcttgcaaaaaacatgaactctacgtgtcattccgggatctcggatggcaagattggatcatcgcgccggagggctacgctgcctactattgcgaaggcgagtgtgccttcccgctcaactcgtacatgaatgcgaccaaccacgcaatcgtgcaaactctcgtgcatttcatcaatcctgagacggtgccgaagccttgttgcgcccccacccagctgaacgcaatatcggtgctgtacttcgatgactcgagcaacgttattctgaagaaatacaggaatatggtggtgcgggcgtgcggctgccat

SEQ ID NO: 120417 - DNA, 1293 bp, Artificial Sequence
  derived and/or modified sequence
atgcatgtgcggagtctacgagctgcagcccctcactccttcgtggcattatgggcccccctgttcctgctcaggagtgctcttgcggatttctcgcttgataatgaggtgcattcctcttttatccacagacggctcaggagtcaggaaagacgggaaatgcagagagaaatcctctcaatactcgggcttccgcataggcctcggcctcatctccagggaaaacataattccgccccaatgttcatgttagatctttacaacgctatggccgtcgaagaagggggagggcctggaggacagggattctcctatccctataaagccgttttcagtactcaggggccccccctcgcctctctgcaggactcgcatttcctaactgatgctgatatggtgatgagtttcgtgaatctggttgaacacgataaagaattctttcatccaaggtaccatcaccgcgaattcaggttcgatttatcaaaaatccctgagggagaggcagttacagccgctgagttcaggatctacaaggattacataagggaaaggtttgacaatgaaacgtttcgcatttccgtgtatcaggttctccaggaacatcttggacgggagtcagatctctttttacttgacagtaggactctatgggcatctgaagaagggtggctagtcttcgatataacggcaacatctaatcactgggtagtgaatcctcggcacaacctggggctccagctctctgtagagacattagatgggcagtctataaatcctaaattagccggactgataggaaggcacgggcctcagaacaaacagcctttcatggtcgcatttttcaaagcaactgaagttcactttagatctatcagatcaacagggtccaaacagaggtcccagaaccggtccaagacacctaagaatcaggaggccctgcgcatggccaatgttgcagagaattcctctagtgatcagcgacaggcatgcaaaaaacacgaactctatgtttcctttcgcgacttagggtggcaagactggatcatcgcccctgaaggatacgccgcctattattgtgagggggaatgtgcctttcctctcaattcgtatatgaacgcgactaaccacgccatcgtgcagacactcgtgcactttattaacccagaaactgttcccaaaccctgctgcgcacccacacagctcaacgccatctcggtactctatttcgatgattcctccaacgtgatactgaaaaaatataggaacatggtcgtcagggcatgcgggtgtcac

SEQ ID NO: 120418 - DNA, 1293 bp, Artificial Sequence
  derived and/or modified sequence
atgcacgtgaggtctttgcgggccgccgctccacacagcttcgtggcactttgggcacctctgttcctgctccggtcggccctggcggacttttcattggacaatgaggtgcacagctcgttcatccacagacgcctcagaagccaggaacggagagaaatgcagcgggaaatcctctctatcctgggactcccgcatcggccgcgcccccatctccaggggaagcataacagcgccccgatgtttatgctcgacctgtacaatgccatggccgtggaagaagggggcggacccggcggccaagggttctcgtacccctacaaggccgtgttttcgactcagggaccgccgctcgcttccctgcaggacagtcatttcctcactgacgctgatatggtgatgagctttgtgaatctggtggaacacgataaggagttcttccacccccgctaccatcaccgagagttccgctttgacctctcaaagatcccggagggagaagctgtgaccgcagccgagtttcggatctacaaagattacatccgcgaacggtttgacaacgaaacctttcgcatcagcgtgtaccaagtcctgcaagaacatctgggaagagagtcagacctgttcctgctggacagccggaccctctgggcaagcgaagagggatggttggtgttcgacatcactgcgacctccaaccattgggtggtgaaccctcgccacaatctgggcttgcaactgtccgtggaaaccctggatggacagtcgattaatccaaaacttgccgggttgattggtcgccacggcccacagaacaagcaacctttcatggtggcatttttcaaggcgaccgaagtgcactttaggtccatccgctccactggctccaagcagcgaagccagaatcgctcaaaaactcctaagaaccaggaagcgctgcggatggcaaatgttgcagaaaattcctcgtcggaccaaaggcaggcctgcaagaaacacgaactgtacgtgagcttcagagatttggggtggcaagattggatcattgccccggaaggatacgcggcgtactactgcgaaggcgagtgcgcctttcccctcaactcttacatgaacgccacgaaccacgccatcgtgcagacgcttgtgcatttcatcaaccctgaaactgtcccgaaaccttgctgtgcaccgacccagctcaacgctatctccgtgctgtacttcgatgactcgtccaatgtgatcctcaagaaatacagaaacatggtggtgcgcgcatgtggctgccac

SEQ ID NO: 120419 - DNA, 1293 bp, Artificial Sequence
  derived and/or modified sequence
atgcacgtgcggtcgttgcgcgcagcagcccctcatagctttgtggcattgtgggctccattgttcctcctccgatccgcactcgctgacttctccctcgataacgaagtgcacagtagctttattcaccgccggctgcgctcacaggaacggagggagatgcagcgggagattctctccatcctgggactgccccaccgtccccgcccacatctgcagggcaagcacaactcggcccctatgttcatgcttgacctgtacaacgctatggcagtggaagaggggggtgggcctggcggacaaggattttcgtacccttacaaggctgtgtttagcacccagggtccaccacttgcgtcgcttcaggactcacatttcctcaccgacgctgatatggtgatgtcattcgtgaatctggtggagcatgataaggagttcttccaccccaggtaccaccacagagaattcagattcgatctgtcgaaaataccggagggcgaagccgtgactgccgcggaatttcgcatttacaaagattacatcagagaaaggttcgacaacgaaactttccgcatctcggtataccaggtgttgcaggaacatctgggcagagagtctgacctttttcttctggacagccggaccctgtgggcctccgaggagggatggctggtgttcgacatcaccgccacgtcgaatcactgggtggtgaatcctcgccataatctggggcttcaactgtcggtcgaaaccttggacggtcagtcaattaacccaaaactggccggactcattggtcgccatggacctcaaaacaagcagccctttatggtcgcgttctttaaggcaactgaggtgcattttagatccattcggagcaccggctccaaacagagaagccagaatcggtccaagactcccaagaatcaggaagcgctgcggatggccaatgtggccgagaattcgtcaagcgaccaacgccaggcctgcaaaaagcacgagctctacgtctccttcagagacttgggttggcaggactggatcatcgcaccagagggctacgctgcatactactgtgagggcgagtgcgcctttccgcttaactcatacatgaacgcgaccaatcatgccatcgtccagaccctggtgcactttatcaaccctgaaactgtgcctaaaccgtgctgcgccccgactcagctgaacgccatcagcgttctctacttcgacgattcctccaacgtgatcctcaagaaatatcgcaacatggtcgtcagagcctgcgggtgccac

SEQ ID NO: 120420 - DNA, 1293 bp, Artificial Sequence
  derived and/or modified sequence
atgcatgttcgctcgctccgcgccgctgccccgcattcattcgtggcgctctgggcccctctcttcctgctgcgcagcgcgcttgcggacttttccctggataatgaggtgcacagttccttcatccacagacgcctgcgtagccaagaacggcgggaaatgcagcgagagatcctctcaatcctggggctcccacaccggccgcgccctcacctgcaaggcaaacataatagcgctccgatgttcatgctggatctgtataacgccatggctgtggaagaaggaggcggaccgggcggccagggcttctcgtacccatacaaggctgtcttttcaacccaaggtccgccacttgcttcgttgcaagattcacacttcctcaccgacgcggacatggtgatgtctttcgtgaatctcgtggaacacgacaaagagttcttccaccctcggtaccatcatcgtgagttccgctttgacctgtcaaagatcccagaaggagaggcggtgactgcagcagagttcaggatctacaaagattacattcgcgaacggttcgataacgaaactttccgcatctcagtctaccaagtcctgcaggagcacctggggagggaatcggacctgttcctgctcgactccagaaccctctgggcttccgaagaaggatggctggttttcgacattaccgcgactagcaaccattgggtggtcaatcctcgacataatctggggctgcagttgtccgtcgagactttggacggacagtccatcaaccctaaactcgcggggttgatcggtagacacggaccccagaacaaacagccgttcatggtggctttctttaaggcaaccgaggtgcactttaggagcatccggtcgactggatcgaagcagcgtagccagaatcggtccaagaccccgaagaatcaggaggccctgcgtatggctaacgtggccgaaaacagcagctcggatcaacggcaggcatgcaaaaagcatgaattgtacgtgtcgttccgcgacctcggctggcaagactggataatcgcaccagaaggttacgccgcatactactgcgagggagagtgcgcctttccccttaactcctacatgaacgcaaccaatcacgcgattgtgcagacgctcgttcacttcatcaacccggaaaccgtgcccaagccctgttgtgctccgacgcagcttaacgccatttctgttctctattttgacgatagttccaacgttatcctgaagaagtacagaaacatggtggtcagggcctgcggttgccat

SEQ ID NO: 120421 - DNA, 1293 bp, Artificial Sequence
  derived and/or modified sequence
atgcatgtgaggtcgcttcgtgcagccgcacctcattcctttgtggcactttgggcccccctgttccttttgaggtcagcactcgccgatttcagcctggataacgaagtgcattccagcttcatccatagacgactgcggtcccaggaacggcgcgaaatgcagagggaaatcctctcgattctcgggctcccccatcgtcccaggccccaccttcaaggaaagcacaacagcgcgcctatgtttatgctggacttgtacaatgcaatggctgtcgaggaggggggaggacctggagggcaggggtttagctacccctacaaggcagtgttttcgacccagggaccgcctcttgcatcgcttcaagatagccacttcctgaccgacgcagatatggtgatgtcgtttgttaacctcgtcgagcatgataaggagtttttccatcctagataccatcatagggaatttagatttgatctgtccaagattcctgagggtgaggcagtgaccgcggccgaatttcgtatctacaaggattacattcgggaaagatttgataacgaaacttttcgcatctcggtgtaccaggtgcttcaggaacaccttggaagagagtcggatcttttcctgcttgactctcggaccctctgggcatccgaagaaggctggctggtctttgacatcactgccacttctaatcattgggtcgtgaatcctcgccataacctgggccttcagttgtccgtggagacgctggacggacagtccattaatcccaagttggcaggtcttattggacggcatggaccacagaacaaacaaccatttatggtcgcctttttcaaggcgaccgaggtgcactttcgtagcattagatccactggatccaagcagcggtcacaaaatcgctcgaaaacccctaagaaccaggaggcccttagaatggctaacgttgcagagaactcctcgtccgatcagcgccaagcctgtaagaaacatgagctttacgtgtcgttcagggatcttggatggcaagattggatcattgcaccggagggatacgcggcatactactgtgaaggggaatgtgcatttcctctgaattcttacatgaacgcaactaatcatgccattgtgcagaccctggtgcacttcataaacccagagactgtccctaaaccgtgctgcgcccctacccagcttaatgcaatctcggtcctgtactttgatgactcgtcgaatgtgatcctcaagaagtaccgaaacatggtggtgcgcgcatgcggttgtcac

SEQ ID NO: 120422 - DNA, 1293 bp, Artificial Sequence
  derived and/or modified sequence
atgcacgtccggtcgctccgcgccgccgccccgcactccttcgtggctctctgggccccgctgtttctgctgcgctcggccctcgctgacttctcgctggacaacgaggtgcacagctcgtttatccaccgccgcctccggagccaggagcgacgggagatgcagagagagatcctgtcgattctcggactgcctcacaggccgcggccccacttgcaggggaagcataattccgcaccaatgttcatgctggatctctacaatgccatggcagtggaagagggcgggggcccgggaggacaggggttttcctacccatacaaagccgtcttttccactcagggaccacccctggcttcgctgcaagattcgcacttcctgaccgacgcagacatggtgatgtcgttcgtgaatctcgtggaacatgataaggagtttttccacccacggtaccaccatcgcgagtttcggtttgatctttcaaaaatcccggaaggagaagccgtgaccgcagctgaattccgcatctacaaggactacatccgcgagcggttcgacaacgagacgttccggatctctgtgtaccaggtgctgcaggaacacctcggccgcgagtcggatctctttcttttggactcacgcactctgtgggcctcggaagaaggttggctggtgtttgatatcactgcgacttccaatcactgggtggtgaatccacggcacaatctcggactccagctgtccgtggaaaccctcgacggacaatcaattaacccaaagctggcaggtttgattggacggcacggcccacaaaacaagcaaccgttcatggtggcgttcttcaaggccacggaggtccacttccgatccatcaggagcaccgggtccaagcagcggagccagaatagatccaagacccctaagaaccaagaggcgctgcgcatggcgaacgtcgcagagaacagcagcagcgatcagagacaggcatgtaagaagcatgaactctacgtgagctttagagatctgggctggcaagattggatcatcgcgcccgaaggatacgcggcatactactgcgaaggggaatgtgcctttcccctcaattcgtacatgaatgcgacgaaccatgccatagtccaaaccctggtgcacttcatcaaccctgagacggtgccaaagccgtgttgtgccccgacccagctgaacgcaatctccgtcctgtatttcgacgattcctccaacgttatcctgaagaaataccggaatatggtggtccgcgcatgtggctgccat

SEQ ID NO: 120423 - DNA, 1293 bp, Artificial Sequence
  derived and/or modified sequence
atgcatgtgaggtcactgcgcgcagctgctcctcatagcttcgtagcactgtgggcccctctgtttctcttgcgatcggcgttggccgacttcagcctcgataatgaggtccacagttcctttattcaccggagactgaggagccaggagaggcgagaaatgcagagagagatcctgagcatccttggcctccctcataggccccggccgcatctgcagggaaaacacaactccgcacccatgtttatgctggatttgtacaacgctatggccgtggaagagggtgggggacctggagggcagggcttttcttatccctataaagccgttttttcaacccagggtcctccactggcctcactccaggactctcactttttgaccgacgcagatatggtcatgtcttttgtgaacttggtcgaacatgacaaggaattctttcacccccggtaccaccacagagagttcagattcgacttaagcaagatccccgaaggggaagctgtgacagccgcggaatttcgcatctataaggactacataagagaacgattcgataacgagacattccggataagtgtctaccaggttctgcaggaacatctggggcgcgagtcagacttgttcctgctggatagccggaccttatgggcttcagaggaggggtggctggtgttcgatataacggcgacctcgaatcactgggtggtcaacccccgacataacctgggactgcagttatccgtcgagaccctcgacggccagagcataaatccgaagctggccggacttattggcaggcacggtccccagaataagcagcctttcatggtggccttcttcaaggccacagaggtgcacttcaggtctattaggtccactggctccaagcagcggtctcaaaaccgttcaaagacccccaagaatcaggaagccctgaggatggccaatgtggctgaaaacagttctagcgatcagagacaggcatgcaaaaagcacgagctgtatgtttctttccgggacttgggatggcaagattggatcatcgctccagaagggtacgctgcgtactattgcgaaggcgaatgcgcgttcccactcaacagttacatgaacgcaactaatcacgccatcgtacagaccctggtccatttcattaatcctgaaaccgtcccaaagccgtgttgtgcgcctactcagctgaatgctatctcagtcctctattttgatgactcctctaacgtcatcttgaaaaaataccgcaatatggtcgtgagggcatgcgggtgccac

SEQ ID NO: 120424 - DNA, 1293 bp, Artificial Sequence
  derived and/or modified sequence
atgcacgtgcggtcgctccgggcggctgcccctcactcctttgtggccctctgggccccgctgttcttactgcggagcgctctagctgatttttcacttgataacgaagtgcatagcagtttcattcaccgtagactcagatctcaggagagacgagagatgcaacgggaaatcttatccatcttgggccttccccaccgaccaaggcctcacctgcaaggaaagcacaactctgcccccatgtttatgctggatctatataacgccatggctgtagaagagggaggcggcccgggtggccagggcttcagttatccgtacaaggctgtcttctccacgcagggtcctccccttgctagcttgcaggatagccacttcttgacagatgcagatatggtcatgtcatttgtaaacttggttgaacatgacaaagagttctttcatccccgatatcatcatcgggagtttagattcgaccttagcaagatccctgaaggtgaggctgttacagccgcggaatttagaatatacaaggattatattcgcgagaggttcgacaatgagacttttagaatttctgtgtaccaggtactccaggagcacctgggccgcgaaagtgatcttttcctgttagattcaagaacactgtgggcaagcgaagaggggtggttagtctttgatatcacagcgacttctaatcactgggtagtaaatccccgtcacaatctgggcctgcagctttccgtcgagactctcgatgggcagtcaattaatcccaaactcgccggactgataggacgccatgggccgcagaacaagcaacctttcatggtagcattctttaaggctacggaagttcacttccggagtattcgtagcaccggatcgaaacaacgtagccagaaccgatccaagactcctaagaaccaggaggcactcaggatggcaaatgtagctgagaattcatcgtccgatcagaggcaagcctgcaaaaagcacgaactctacgtctcattccgggatctgggatggcaagactggattatcgcccctgaaggctacgccgcatattattgcgagggagagtgcgcgttcccactgaactcatacatgaacgccacaaatcacgctatagtccagacactggtacatttcataaatcccgagaccgtccccaaaccgtgctgtgcaccaacacagttaaacgcaatctctgtgctttacttcgacgattctagtaacgtgatcctgaagaaataccgcaacatggtggtgagagcctgtgggtgtcat

SEQ ID NO: 120425 - DNA, 1293 bp, Artificial Sequence
  derived and/or modified sequence
atgcatgtacgttcgttacgagcggcggcgccgcattcgtttgtagcgctatgggcgccgttatttttattacgatcggcgctagcggatttttcgttagataatgaagttcattcgtcgtttatacatcgacgactacgatcgcaagaacgacgtgaaatgcaacgagaaatattatcgatattaggtttaccgcatcgaccgcgaccgcatttacaaggtaaacataattcggcgccgatgtttatgctagatttatataatgcgatggcggtagaagaaggtggtggtccgggtggtcaaggtttttcgtatccgtataaagcggtattttcgacgcaaggtccgccgctagcgtcgctacaagattcgcattttttaacggatgcggatatggtaatgtcgtttgttaatctagtagaacatgataaagaattttttcatccgcgttatcatcatcgagaatttcgatttgatttatcgaaaataccggaaggtgaagcggtaacggcggcggaatttcgtatatataaagattatatacgtgaacgatttgataatgaaacgtttcgaatatcggtatatcaagtattacaagaacatctaggtcgtgaatcggatttatttctattagattcgcgaacgctatgggcgtcggaagaaggttggctagtttttgatataacggcgacgtcgaatcattgggtagtaaatccgcgacataatttaggtttacaactatcggtagaaacgttagatggtcaatcgataaatccgaaattagcgggtttaataggtcgtcatggtccgcaaaataaacaaccgtttatggtagcgttttttaaagcgacggaagttcattttcgttcgatacgatcgacgggttcgaaacaacgatcgcaaaatcgttcgaaaacgccgaaaaatcaagaagcgctacgtatggcgaatgttgcggaaaattcgtcgtcggatcaacgacaagcgtgtaaaaaacatgaattatatgtatcgtttcgagatttaggttggcaagattggataatagcgccggaaggttatgcggcgtattattgtgaaggtgaatgtgcgtttccgctaaattcgtatatgaatgcgacgaatcatgcgatagtacaaacgttagttcattttataaatccggaaacggttccgaaaccgtgttgtgcgccgacgcaactaaatgcgatatcggttctatattttgatgattcgtcgaatgtaatattaaaaaaatatcgtaatatggttgttcgtgcgtgtggttgtcat

SEQ ID NO: 120426 - DNA, 1293 bp, Artificial Sequence
  derived and/or modified sequence
atgcatgtgcgctctttacgagccgccgctccccatagctttgtcgctctgtgggctcctctgtttctgctgagaagcgctctggctgacttcagtttagacaacgaggtccattcttccttcatccatcgaagactcaggagtcaggaacgtagggaaatgcagagagagattttgtcaatactcggcctgccccaccggccccgtcctcatctgcagggaaagcacaacagtgcccctatgtttatgctggacctgtataacgccatggccgtagaggagggcggaggccctggaggacaaggtttcagctacccttataaggctgtgtttagtacacagggaccaccactggccagtctccaagactctcatttcctgaccgatgcagacatggttatgagctttgttaatttagttgaacatgataaggaattcttccatcctaggtaccaccaccgggagttcaggtttgatctgtctaagatccctgagggcgaggctgttaccgctgctgagttcaggatctataaggactacattcgggagcgcttcgataatgagactttcaggattagtgtgtatcaggtcctgcaggagcatctgggccgtgagagcgacctatttctgctggactccaggaccctgtgggctagtgaggagggctggctcgtgttcgatataaccgctacatctaaccactgggtcgtgaatcccaggcataacctgggcctgcaactcagtgtggagacactggacggccagtccattaatcctaagctggcaggcctgatcgggaggcacggccctcagaacaaacagccatttatggtcgcttttttcaaggctacagaagtgcactttagatccatccgaagcacaggatccaagcagcgaagccagaatcgcagcaagacacccaagaaccaggaggcactgcgtatggccaacgtggccgaaaacagttccagcgatcagcgtcaggcatgtaaaaagcacgaactgtacgtgagtttccgggatctgggctggcaggattggatcattgctcccgaaggatacgccgcttactattgtgagggggagtgcgcttttccgctgaacagttatatgaatgcaaccaaccacgcaatagtccagaccctagtgcactttatcaacccagagacagtgcccaagccctgttgcgccccgacacagctgaacgctatcagcgtcttatacttcgatgattcatctaacgtgatactgaagaagtaccgaaacatggtcgtgagagcctgcggctgtcac

SEQ ID NO: 120427 - DNA, 1293 bp, Artificial Sequence
  derived and/or modified sequence
atgcatgtaaggtctctgcgcgccgcagcccctcattccttcgttgcactatgggcccccctatttctactaagaagtgcgttagctgacttctccctcgacaacgaagtgcattcatcattcatacatagacggctcagatctcaggaacgacgggaaatgcagcgggaaatactctcgatattggggttgccacatcgcccaagaccacacctccaggggaaacacaactccgctcctatgtttatgctcgatctctacaacgcaatggcagtagaagaaggaggaggaccaggaggacagggattctcttatccgtacaaagccgtgttttctacacaggggccacctcttgcgtctctgcaggatagtcatttcctcactgatgccgacatggtgatgtcattcgtaaacctcgttgaacatgataaagaattttttcatccccggtatcatcatagagaatttcggtttgacctgagtaaaatacccgaaggagaggctgtgacagccgccgaattccggatctataaagattatatccgcgaacgtttcgataacgaaacatttcggatatccgtttatcaggtacttcaggaacatctaggaagagaatccgatttattccttctggacagtagaacattatgggcttccgaggaaggatggttagttttcgatataacagcaacatcaaaccattgggtagtaaaccctagacacaacctcgggctacagctgtctgttgaaacacttgatgggcagagtatcaatcccaaattggccgggctgataggacggcatgggccccaaaataaacaaccctttatggttgcattcttcaaagccactgaagtgcatttccggagtatccgctcaactgggtccaaacagagaagtcagaatcggtccaaaacaccaaaaaatcaggaagcattacggatggccaatgtggctgagaattcctcctccgaccaaaggcaggcctgcaagaaacacgaactatatgtctctttcagggatctggggtggcaggattggataatagctcctgaaggatatgccgcttactattgtgaaggagagtgcgcttttcccctcaacagttatatgaacgcaacaaatcacgctattgtgcagacgttagtacactttataaatcctgaaactgtgccaaaaccatgttgtgcccctacacagttgaacgcgatttcagtcctttacttcgatgatagttcgaacgtgatcctcaaaaaatatcggaatatggtcgtgagggcttgcggatgtcat

SEQ ID NO: 120428 - DNA, 1293 bp, Artificial Sequence
  derived and/or modified sequence
atgcacgtgcgatccctgcgcgccgcagcacctcattctttcgtggcactttgggcacccctgtttcttctccgttccgctctggctgatttctcgctcgataacgaagtgcacagcagctttattcaccggaggctccggagtcaagagcgccgggaaatgcaacgggaaattctgtcgatcctcggactgcctcatcgcccaaggcctcatcttcaagggaaacacaatagcgcacctatgtttatgcttgatttgtacaatgcaatggcggtggaagaaggaggcgggcccgggggtcagggattttcctacccatacaaggcggtgttttcgactcagggaccacctctcgcatcactgcaggattcacattttcttaccgatgctgacatggtgatgagctttgtgaatctcgtggagcatgataaggagtttttccatcccaggtaccatcatcgggagttcagatttgacctgtccaagattcccgagggagaggcagtcactgcagcagagtttcgcatctacaaggattacatcagagaacggtttgataacgaaacctttcgaatctcagtctaccaagtcctccaagaacacttgggccgcgaaagcgatctcttcctgctggattccagaactctttgggcgtcagaagaagggtggcttgtgtttgatatcaccgcaacttcaaaccattgggtggtcaacccacgccacaacctgggtctgcaactttccgtggaaacgctggatggtcaatcgatcaacccaaaacttgcgggtctgattggtcgacatggaccacagaataagcagcccttcatggtggcatttttcaaggccaccgaggtgcattttcgttctattagatccactgggtcaaaacaaaggtcgcagaaccgctcaaaaactcctaagaaccaagaggcgctgaggatggcgaatgtcgccgaaaattcatcatccgatcaaagacaggcatgtaagaagcatgagctttacgtgtccttcagagatctgggatggcaagactggataatcgcacccgaaggatacgccgcttactactgtgagggggaatgtgcatttcctctgaacagctatatgaacgcaaccaatcatgccatcgtgcagacgctggtgcatttcatcaatccagaaactgtccccaagccatgctgtgcgccaacgcagcttaacgcaataagcgtcctttactttgacgattcaagcaacgtcatacttaagaagtaccgaaatatggtggtccgagcgtgtggatgtcat

SEQ ID NO: 120429 - DNA, 1293 bp, Artificial Sequence
  derived and/or modified sequence
atgcatgtgagatctctccgagcagcagcgccccacagcttcgtggcactttgggctccgctgttccttctcagatcggcactggcagacttttcgcttgacaacgaagttcattcatccttcatacatcggagacttagaagccaggaacggagggagatgcaacgggaaattctttcgattctgggtttgccgcatcgcccaagaccgcacctgcaaggtaagcataattcagcaccaatgtttatgctggatctctacaacgcgatggcggtggaggaaggcggagggcccggtggacaggggttcagctacccttacaaggccgtcttttcgacccagggaccacccctggcaagcctgcaggattcgcactttctgactgatgctgacatggtcatgtcattcgtgaatcttgtggaacatgataaagaattcttccaccctcggtatcaccatagggaatttaggtttgacctgtcgaagattcccgaaggcgaagccgtgaccgccgcagagtttcggatctacaaagactatatccgtgaacggtttgacaacgaaactttcagaatctcggtgtaccaagtgctgcaggagcaccttggacgggagtcagacctctttcttcttgattcaagaactttgtgggcatccgaggagggctggctggtgtttgatatcactgcgaccagcaatcattgggtggtgaatccgaggcataaccttggcctgcaactctcagtagaaactctggatggtcagtccattaatcccaaacttgcggggcttatcggacgacacggccctcaaaacaagcagccttttatggtggcattctttaaggcgaccgaagtccacttccgttcgatcagatccaccggtagcaagcaacgatcacagaacagaagcaagacccccaaaaaccaggaagccctccgaatggccaacgtggcggaaaattcatcatccgaccaaagacaagcatgcaagaaacatgaactttacgtgtcgttccgggatttgggttggcaagactggatcattgccccagaaggatacgcggcatactactgtgagggagaatgtgcgttcccgcttaactcatacatgaatgcaactaaccatgcaattgtgcagacgctggtccatttcattaacccagaaaccgtgcctaagccttgctgtgcaccaacccagttgaatgcaatctcagtgctctacttcgatgactcgtccaacgtgatccttaagaagtaccgtaacatggtggtgagggcatgtggatgtcac

SEQ ID NO: 120430 - DNA, 1293 bp, Artificial Sequence
  derived and/or modified sequence
atgcacgtgcgctctctccgcgccgccgctccacactcatttgtcgcgctgtgggccccgctgttcctgctgcgctcagctctggcagacttctcgcttgacaatgaagtgcacagcagcttcatccaccgcaggctgaggtcacaggagcggcgtgagatgcagcgcgaaatcctctccattctgggactgcctcaccgcccgcggccccacctccagggtaaacacaacagcgcccctatgttcatgttggacctctacaacgccatggctgtcgaagaaggcggcggtccgggtggccaaggattctcatatccatacaaagccgtgttctccacccagggacctcctctcgcatccctgcaagattcgcacttccttaccgatgcggacatggtgatgagcttcgttaatctggtcgagcacgacaaagaattcttccacccgcggtaccaccatcgggagttccggttcgacctgtcaaagatcccggagggggaagccgtgacggcggcggagtttcgcatctacaaggactacatccgcgaaagattcgacaatgaaacttttcgcatttccgtgtaccaggtcctgcaagaacacctgggccgcgaatcggatctcttcctgctcgatagcagaactctgtgggcatccgaggaaggttggctggtgttcgatatcaccgctacgtccaaccattgggtagtgaatcccaggcacaatcttgggctgcaactgtcggtggaaaccctcgatggccagtccatcaatccgaagttggcaggactgatcggaaggcatggtccgcagaataagcaaccgtttatggtcgcattcttcaaggcgaccgaggtccattttcggtccattcgatcaactgggagcaagcagcgctcccaaaaccgctctaagacgccgaaaaatcaagaggccctgcgcatggcaaatgtggccgagaactcttcatccgaccaaagacaagcctgcaaaaagcacgagctgtacgtgagcttccgcgacctcggatggcaagactggatcattgcaccggagggatacgccgcgtattactgtgaaggagaatgtgcgttccctctgaacagctacatgaatgcgactaaccacgccatcgtgcagactctggtgcactttatcaacccggaaaccgttcctaagccgtgctgcgcgccaacgcagctcaacgcaattagcgtgctctacttcgacgactcatccaacgtgatcctgaaaaagtaccgcaatatggtggtgcgcgcctgcgggtgccat

SEQ ID NO: 120431 - DNA, 1293 bp, Artificial Sequence
  derived and/or modified sequence
atgcatgtacgaagcctccgtgctgccgcgcctcactcattcgtggccttgtgggcgccactgtttttactgcggtcggcactcgccgacttcagcctggacaatgaggtgcattctagtttcatccataggcgcctcaggagccaagagcgacgggagatgcagagggaaattctcagcatcttggggctgcctcatagaccccgccctcatcttcagggcaagcataactcagccccaatgtttatgttggatttgtacaacgctatggccgtagaagaaggcggtggcccaggtggccagggattcagctatccctacaaggctgtattttctacacaggggccccccctcgcttcgctgcaggatagccacttcctgacggatgctgacatggtgatgtcctttgtcaacctggttgaacacgacaaggagttttttcatcctcgctaccatcaccgcgagttcagatttgacctgtcgaagattcccgagggggaggccgtgactgcagctgagtttagaatatataaggactatatcagagagcggttcgacaatgagacctttagaatcagcgtctaccaggttctgcaggaacacctcggccgggaaagcgatctgtttctacttgattcccggaccctctgggcctctgaagaagggtggctcgtttttgacatcaccgctactagtaaccactgggtggtgaaccctaggcacaacctgggactccaacttagcgtagagactctggacggacagtcaatcaacccaaaattggcgggactgataggcaggcatgggccccagaacaaacagccatttatggtcgccttttttaaagccaccgaagtacattttcgatctatccgctcaaccgggtccaagcaaaggtcgcagaataggtctaagacccctaagaaccaggaagcgctccgcatggctaacgtggccgagaactcgtctagcgaccagcgccaggcttgcaaaaagcacgagctctacgtatctttcagggacctcggatggcaggactggatcatcgcccccgaaggctacgccgcttactactgtgaaggtgagtgtgccttccccttaaattcttacatgaacgctaccaatcatgccatcgtccagaccctggtgcacttcattaatcccgagacagtgcctaagccttgctgcgcaccaactcaattgaacgccatctccgtgctctacttcgacgactccagtaacgtgattttaaagaagtatagaaacatggtggttagagcctgcggctgtcat

SEQ ID NO: 120432 - DNA, 1293 bp, Artificial Sequence
  derived and/or modified sequence
atgcacgtgaggtcccttcgcgcggctgctccacacagttttgtggcgctgtgggcacctctttttctgctcaggagtgcacttgccgatttcagcttggataacgaagtgcactccagtttcatccacagaagactgagaagccaagagaggagggagatgcagagggagatcctgtccatcctgggactccctcatcgcccgcgtccccatctgcagggtaagcataactctgctcccatgttcatgctagacctttacaacgccatggccgttgaggaaggaggggggccaggaggacagggcttctcatacccctacaaagcagtgtttagcacccaaggccccccccttgcttcgctgcaggatagccattttctgacagatgctgatatggtcatgtcatttgttaatctggtggagcacgataaagagttcttccaccctcgataccaccaccgagaatttaggtttgatctgagcaagatcccagaaggagaggcagtgacagccgccgaattcaggatctacaaagattatatcagagagcggttcgataatgagacctttaggatcagcgtgtaccaggtcctccaagaacatctggggagggagtcagatctgttcctgctggatagccggaccctctgggcgagcgaagagggatggctggtctttgatatcaccgcgacaagcaatcattgggtggtgaatcctcggcataacctcgggctgcaactgagtgtggaaacactggacggacaaagcatcaacccaaaactggcaggtctgattggccgccacggcccacaaaataagcaacccttcatggtggcatttttcaaagcgaccgaagtacacttcaggagcatccgcagcactggtagtaaacaacgaagccaaaaccggagcaaaacccctaaaaatcaggaagcactgaggatggcaaacgtggccgagaacagcagcagcgaccagcgccaggcctgcaagaaacacgagctgtacgtgtcatttcgtgacctgggatggcaggactggatcatcgcgccagagggatatgctgcatactactgcgaaggagaatgtgcctttcctttgaactcctatatgaacgcaactaaccatgccattgtgcagaccctagtgcatttcatcaaccctgaaacagtgccaaagccatgttgtgcacctacccaactcaacgccataagcgttctgtattttgatgacagttcaaacgttatacttaagaagtacaggaacatggttgttagggcatgcggctgccac

SEQ ID NO: 120433 - RNA, 1442 nt, Artificial Sequence
  derived and/or modified sequence
gggaaauaagagagaaaagaagaguaagaagaaauauaagagccaccaugcaugucagaucgcucagagcagccgcuccccacuccuucguggcacucugggcgccucuguuucucuugcggucggcauuggcagauuucucguuggacaaugagguccauucaucguucauccaccgcaggcugaggagccaggagcgccgagagaugcagcgcgaaauccugucgauccuuggacuuccccaccggccucggccacacuugcaaggaaaacauaacagcgccccuauguucaugcuggaucucuauaacgcgauggccguagaggagggaggaggaccgggagggcagggguuuuccuacccauauaaggccgucuuuucgacacaggguccgcccuuggcgucauugcaagauucccauuuccuuacggacgcggauaugguaaugagcuuugucaaccuggucgaacacgacaaggaguuuuuccauccccgcuaccaccaccgcgaguucagauucgaccugucaaagauuccggaaggggaggcugugacggcagcggaauuucggaucuacaaagacuauauccgggagcgguuugacaaugagacauuccgaauuuccgucuaucagguacuccaagagcaccuugguagggaaucggaccuuuuccugcuugacucgagaacuuugugggcgucggaggaaggguggcugguguuugacaucacggccacuagcaaucacuggguagucaaccccaggcauaaucuuggacugcagcucucaguagagacauuggauggucagucaaucaacccuaagcuugcuggccuuaucggacgacaugggccgcaaaacaagcagccguuuaugguggcguucuucaaagccacggagguacauuuuagaucgauuaggucaaccggcagcaagcagagaucccagaacagauccaagacgccgaaaaaucaggaagcgcuccggauggccaacguggcggagaauucguccucggaucagcgacaggcgugcaaaaagcaugaauuguauguguccuuucgcgaucuugguuggcaggauuggaucaucgcacccgagggguaugcggcguacuacugugaaggcgagugcgcguuccccuugaauucauacaugaacgcgaccaaccacgccauugugcaaacucucguccacuucaucaaucccgaaaccgucccuaaacccuguugugccccuacacagcugaaugccauuucagugcucuacuucgacgacucaagcaaugugauuuugaaaaaguacagaaacaugguggugagggcgugcgggugccacugauaauaggcugccuucugcggggcuugccuucuggccaugcccuucuucucucccuugcaccuguaccucuuggucuuugaauaaagccugaguaggaag

SEQ ID NO: 120434 - RNA, 1296 nt, Artificial Sequence
  derived and/or modified sequence
augcaugugcgcucucugcgagccgcugcaccccacagcuuuguggcccucugggcaccucuauuccugcuaagaucagcauuggcggacuuuucccuggacaacgagguccacucgucauuuauucauagacgccugaggucacaggagaggagagagaugcaacgagaaauccucagcauccuaggccuuccucacagaccacggccccaccuucaagguaagcauaacucagcccccauguucaugcucgauuuguacaacgcuauggccguggaagagggaggcgggccgggcggacaaggguucuccuaucccuacaaagccguauucucgacacaaggcccaccccuugccagccuccaggauucccauuuuuuaacagacgcugacauggugaugaguuucgugaauuuagucgagcacgacaaggaguuuuuucacccucgguaucaccaccgcgaguuccguuuugaucugagcaaaauaccugaaggugaagccgugacugcugcugaauuucggauauacaaggacuacauacgagaaagguuugauaaugagacuuuuagaaucagcguauaucaggucuuacaggaacaucugggucgggaaagcgaccuguucuuacuagacucuagaacucucugggcgucagaagaaggguggcugguuuucgacauuaccgccacaagcaaccacuggguagugaacccgcgucauaaucugggccugcagcugucuguggagacuuuagauggacaaucuaucaaccccaagcucgccggccugauaggaaggcacggcccacagaacaagcagcccuucaugguggccuucuucaaagccacugaaguacacuuccguucaauucggucaacaggcucuaagcaaaggucacaaaacagaagcaagacucccaagaaccaggaagcccugcgcauggcuaaugucgccgaaaauaguaguucagaccagcgccaagccuguaaaaaacaugagcuguaugugucauuuagggaccuuggcuggcaagauuggauaauugcaccugagggauaugcugcguacuauugugagggcgaaugcgcauuuccucuuaacagcuauaugaacgcaaccaaccacgcuaucguccagacacugguccacuucauuaauccagagacuguacccaagcccuguugcgcuccgacccaacugaacgcaaucaguguuuuauacuucgaugacaguuccaauguuauucucaagaaguauaggaacauggucguacgagcuuguggaugccauuag

SEQ ID NO: 120435 - RNA, 1098 nt, Artificial Sequence
  derived and/or modified sequence
augcacgugcgaucgcugagagccgcugccccucauuccuuuguggcucugugggcaccacucuuccugcugcgaagugcuuuggcugacuucagucuggauaacgaggugcauagcucuuucauucauagaagacugcggucacaagagcgcagagagaugcagcgagaaauucucucaauauugggccuaccucaucgcccccggccacaucugcagggcaaacauaacagcgcccccauguucauguuggaucuguacaacgcuauggcuguggaggaagguggaggucccggcggucagggguucucuuacccauacaaagcaguguuuaguacacagggccccccucucgcuucacugcaagacucccauuucuugacagaugcagacauggucaugaguuucgucaaucucguagaacacgacaaggaauucuuccauccaagauaccaccaccgcgaguucagauucgauuuaagcaaaauucccgagggcgaggcgguuacagcagcugaguuuaggaucuauaaggacuauauccgagaaagauucgacaacgagacauuuagaauuucaguuuaucaggugcugcaggagcaucuaggcagggagagcgaccuguuuuuguuggauucacgcacacuuugggcguccgaggagggcuggcugguauuugacauuacggcaaccucaaaucacuggguaguuaacccccgacauaaucucggucugcagcugaguguugaaacucucgaugagaauucaucgucugaccagagacaggccuguaaaaagcaugaacuuuacguguccuucagagaucucggauggcaagacuggaucaucgccccagagggguaugccgcuuauuacugugagggagaaugcgcauuuccuuugaacucauauaugaacgcaacaaaccacgcuauuguccagacauugguccacuucaucaauccugagaccguaccuaaaccuuguugugcucccacccaacugaacgcuauauccgugcuguacuucgaugauucaaguaacguuauauugaaaaaguaucgcaauaugguugugagagccugcgggugucacuag

SEQ ID NO: 120436 - RNA, 1296 nt, Artificial Sequence
  derived and/or modified sequence
augcacgugcguucccuaagggcugccgcuccucauagcuuuguugcucuuugggcgccccucuuuuuacugcgcuccgcccuagccgauuuuagccucgacaacgaagugcauucuuccuuuauacauagaaggcugcgcucucaggagcgcagggagaugcaacgcgaaauccuuucaauccucggacucccucacagaccccggccucaucugcaaggaaaacacaacuccgcaccgauguucaugcucgaucuguacaacgcuauggcugucgaagaaggcggagggccaggcggccaaggguucuccuaucccuacaaagccguauucucgacacaaggcccaccccuugccagccuccaggauucccauuuuuuaacagacgcugacauggugaugaguuucgugaauuuagucgagcacgacaaggaguuuuuucacccucgguaucaccaccgcgaguuccguuuugaucugagcaaaauaccugaaggugaagccgugacugcugcugaauuucggauauacaaggacuacauacgagaaagguuugauaaugagacuuuuagaaucagcguauaucaggucuuacaggaacaccuggggagggaaagcgacuuguuccuguuagacucccgaacacugugggccuccgaggagggauggcugguguuugacauuacugcuacuucgaaccacuggguggugaacccucggcauaacuugggccugcagcuauccguagagacuuuagacggacagagcauuaacccuaaacuagcgggccuuauugggaggcaugguccucagaauaagcaaccuuucauggucgcauucuucaaagccaccgaaguccacuuuagaagcauucgguccaccggaucaaagcagagaagccaaaacagaagcaagacucccaagaaccaggaagcccugcgcauggcuaaugucgccgaaaauaguaguucagaccagcgccaagccuguaaaaaacaugagcuguaugugucauuuagggaccuuggcuggcaagauuggauaauugcaccugagggauaugcugcguacuauugugagggcgaaugcgcauuuccucuuaacagcuauaugaacgcaaccaaccacgcuaucguccagacacugguccacuucauuaauccagagacuguacccaagcccuguugcgcuccgacccaacugaacgcaaucucaguuuuauacuuugacgacuccagcaaugugauccugaagaaauaucgaaauaugguugugcgggcuuguggaugucacuag

SEQ ID NO: 120437 - RNA, 1098 nt, Artificial Sequence
  derived and/or modified sequence
augcacgucaggucccuucgcgccgccgcaccccauucuuuugucgcucuuugggcgccccuuuuccuucucagaagcgcucuugccgauuucagucuagauaaugaagugcacagcagcuucauccaucgccgccugcgcucacaggaaagaagagaaaugcagagggaaauucucucgauacuuggucugccccaucggccgagaccgcaucuucagggcaagcacaacagugcuccaauguucaugcuagaucuguacaaugccauggcaguggaggaagguggaggccccgggggucaaggauuuaguuauccauauaaagccguuuucaguacacaaggcccuccccuggcuagccuccaggacucccacuuucuaaccgacgccgauauggugaugucauucgugaaccugguagagcacgauaaggaauuuuuucauccccgcuaccaucaucgagaauuccgcuuugauuugagcaaaauaccugagggggaagcggucacagccgcugaguuucggauauacaaagacuauauucgcgagagauuugacaaugagacguuuagaauauccgucuaccagguacuucaagaacaucuaggcagggagagcgaccuguuuuuguuggauucacgcacacuuugggcguccgaggagggcuggcugguauuugacauuacggcaaccucaaaucacuggguaguuaacccccgacauaaucucggucugcagcugaguguugaaacucucgaugagaauucaucgucugaccagagacaggccuguaaaaagcaugaacuuuacguguccuucagagaucucggauggcaagacuggaucaucgccccagagggguaugccgcuuauuacugugagggagaaugcgcauuuccucucaauagcuacaugaaugcgacuaaccacgccauuguacagacauugguucacuucauaaacccugaaacuguccccaaaccuuguugugccccaacucaauuaaacgcaaucagugugcucuauuuugaugauuccucuaaugugauucuuaagaaguaucggaacaugguugugagagcuuguggaugucauuag

SEQ ID NO: 120438 - protein, 675 aa, Artificial Sequence
  derived and/or modified sequence
MDTKSILEELLLKRSQQKKKMSPNNYKERLFVLTKTNLSYYEYDKMKRGSRKGSIEIKKIRCVEKVNLEEQTPVERQYPFQIVYKDGLLYVYASNEESRSQWLKALQKEIRGNPHLLVKYHSGFFVDGKFLCCQQSCKAAPGCTLWEAYANLHTAVNEEKHRVPTFPDRVLKIPRAVPVLKMDAPSSSTTLAQYDNESKKNYGSQPPSSSTSLAQYDSNSKKIYGSQPNFNMQYIPREDFPDWWQVRKLKSSSSSEDVASSNQKERNVNHTTSKISWEFPESSSSEEEENLDDYDWFAGNISRSQSEQLLRQKGKEGAFMVRNSSQVGMYTVSLFSKAVNDKKGTVKHYHVHTNAENKLYLAENYCFDSIPKLIHYHQHNSAGMITRLRHPVSTKANKVPDSVSLGNGIWELKREEITLLKELGSGQFGVVQLGKWKGQYDVAVKMIKEGSMSEDEFFQEAQTMMKLSHPKLVKFYGVCSKEYPIYIVTEYISNGCLLNYLRSHGKGLEPSQLLEMCYDVCEGMAFLESHQFIHRDLAARNCLVDRDLCVKVSDFGMTRYVLDDQYVSSVGTKFPVKWSAPEVFHYFKYSSKSDVWAFGILMWEVFSLGKQPYDLYDNSQVVLKVSQGHRLYRPHLASDTIYQIMYSCWHELPEKRPTFQQLLSSIEPLREKDKH

SEQ ID NO: 120439 - DNA, 2028 bp, Artificial Sequence
  derived and/or modified sequence
atggatactaaaagtattttggaagagctgctcctaaaacgttcccagcaaaagaagaagatgagtccaaataattacaaagaacggttatttgtgttgaccaagaccaacctgtcttactacgagtatgacaaaatgaagcgcgggtctcgaaaaggcagcatcgagatcaaaaagattcgctgcgtagagaaagtgaacttggaggagcagacacctgtcgagcggcagtaccccttccaaatcgtatacaaggacggccttttgtacgtatacgctagcaacgaggagagcaggagtcagtggctgaaggccttgcagaaagagatccgcggtaatccacatctcctggtgaaatatcattccggcttttttgtagacgggaaattcttgtgttgccagcagtcatgcaaagccgctcctgggtgtactttgtgggaggcttatgcaaacctccatacagcagtcaatgaagagaagcatagggtccctacctttcccgatagagttttgaaaattcctagggccgtccccgtgcttaagatggacgctccttcatcatccacaactctggcacagtacgacaatgagtcaaaaaaaaattacggaagtcagcctccttccagctccacatccttggcccagtatgattccaactccaagaaaatctatggctcccagcctaatttcaatatgcagtacatccccagagaagatttccctgactggtggcaagtccgcaaactgaagtcatcaagttcctccgaagatgtggcttcatcaaaccagaaggagagaaatgtcaatcataccactagtaaaatttcatgggaattccccgaatcatcttcctcggaggaagaggagaatttggatgactacgattggtttgcaggtaacatctcgagaagccagagcgagcaactgctccggcagaaaggtaaggaaggggccttcatggtgaggaatagttctcaggttggaatgtatactgtgagcttgttctccaaagcggtgaacgataagaaaggcacagtgaagcattaccacgtgcacaccaacgctgaaaacaagctatatctggcagagaattattgctttgactcaatccccaagctgatccactaccatcagcacaatagcgcggggatgatcactcgtctgcgtcaccctgtgagcacaaaggccaacaaggtgccggactctgtcagcctgggaaatggaatctgggaattgaaacgtgaagagatcaccctgttaaaagagttagggagtggccagttcggagtggtgcagctcggtaagtggaaaggccaatatgacgtggcggtgaagatgatcaaagagggctctatgtctgaagacgagttcttccaggaagctcaaaccatgatgaagctgagtcaccccaagctggtgaaattttatggggtgtgttccaaagagtatcctatctatatcgtgacagaatacataagtaacgggtgtttgctgaattacttacgcagtcatgggaaaggtctagagccatcacagctactcgaaatgtgttacgatgtgtgtgagggaatggcatttctggagagccaccagtttatccaccgggacctagccgcccgcaactgccttgtagatcgagacctctgcgttaaagtgtcagacttcgggatgacgcgatatgtcctggacgatcaatatgtgtcatcagtgggaaccaaattccccgtgaaatggtctgctcccgaggtattccattattttaaatactcttccaagtcagacgtttgggcatttgggatactgatgtgggaggtgttttctcttggcaaacagccctacgatctgtacgataattctcaagtggtactgaaggtgtctcaggggcaccgcctgtacaggccacatctcgcctccgataccatctaccagatcatgtactcatgttggcatgaactacccgaaaaacgaccaacatttcaacagttactgagttcgatagagcctctgcgtgaaaaagacaaacactag

SEQ ID NO: 120440 - DNA, 2028 bp, Artificial Sequence
  derived and/or modified sequence
atggatactaagtctattttggaggagctgctattaaaacggagccagcaaaagaagaagatgtctcccaataattataaagaaagactcttcgtcttgacaaagaccaacttgtcttattacgagtatgacaagatgaaaaggggtagtagaaaaggctccatcgagatcaagaagataagatgcgttgagaaagtgaacttagaggagcaaacccccgtcgaacgacagtacccctttcagattgtgtacaaggacggacttctttacgtatacgcgagtaatgaggagtcacgttcccagtggcttaaagcattgcagaaagaaatccgcgggaatcctcatttgttagtaaagtaccacagtggtttttttgtggacggcaagttcctgtgctgtcaacaatcctgtaaggccgccccaggatgtaccctctgggaggcctatgccaacctgcataccgcagtgaacgaggaaaagcatagggtgccgactttccccgatagggtcctaaaaattccgcgcgccgtgccagttctgaaaatggatgcacctagctcatcaacaactcttgcccagtacgacaacgaatcaaaaaaaaactatggaagccagcctccatctagctcaacttccctggcacagtatgactccaactcgaagaagatttatggttcacagcccaactttaatatgcaatatattccgcgagaagacttccctgattggtggcaggtgcgcaagctgaagtcctcaagtagttccgaagacgtggcttcctcgaatcagaaagagcggaacgttaatcacaccacatctaagatttcctgggagtttcctgagtcctcttcatcagaggaagaagaaaaccttgatgactatgattggttcgccggtaatatttctaggtcacagtcagaacagctgctccgacagaagggcaaggagggcgcgttcatggtaagaaacagttcccaagtgggaatgtatacggtgtctctattctcaaaggctgttaacgacaagaaagggactgtgaagcactatcacgtgcacaccaacgccgagaacaagctttacctggcagagaattattgttttgattccattcccaaactcatccactatcaccaacataactctgccgggatgatcaccagactccgccaccccgtgtccacaaaagccaacaaggtcccagattccgtatcactgggcaacggcatatgggaactcaagagagaagaaattaccttgcttaaggaactgggctcagggcaattcggcgtcgtccagctgggaaaatggaaggggcagtacgacgtggccgtgaaaatgataaaggaagggtctatgtcagaggatgaattttttcaggaagcccagacaatgatgaaattaagccaccctaagctcgtaaagttttatggggtgtgttcaaaggaatacccaatctacattgtgaccgaatatatttccaatggttgcctgctgaattatctgaggagccacggtaagggcctggagccatcccagcttctagaaatgtgctatgacgtgtgtgagggcatggccttcctcgaatcccaccagttcattcaccgggacctggccgctagaaattgtctggtcgaccgcgatctctgtgttaaagtgagtgatttcgggatgactcgctatgtgttggatgaccagtacgtttcatctgtggggaccaagtttccagtgaaatggagcgcgcctgaggtgttccattatttcaagtactcgtccaaatccgatgtctgggcattcggtattctgatgtgggaggtgttctcattgggcaaacagccctacgatctgtatgataacagccaggtggtcctcaaggtctctcagggacacagactgtaccgacctcatctcgctagtgatactatatatcagattatgtactcctgctggcacgaactccctgaaaagaggcccactttccagcagcttctttcctcaatcgagccactgagggagaaggacaaacactag

SEQ ID NO: 120441 - DNA, 2028 bp, Artificial Sequence
  derived and/or modified sequence
atggatactaagtccatcttggaagagttactgcttaaaaggagtcagcagaagaagaaaatgagccccaataattacaaggaacgcctgttcgtgctgaccaagaccaacttaagctattatgaatatgacaaaatgaaacggggtagcaggaagggcagtattgaaattaaaaagatccgttgcgtcgaaaaggtgaacctcgaagagcaaacccccgttgagcgccagtatcctttccagatagtgtacaaagacgggctcctctatgtttacgctagtaatgaggagagtcggtcccagtggctaaaggctttacagaaagagatcagagggaacccccatttgctggtcaagtaccattcggggttcttcgtagacgggaaatttctctgctgccagcaatcctgtaaagctgcccctggatgtactttatgggaggcatacgcaaaccttcataccgcagtgaacgaggaaaaacatcgcgtcccaacatttcctgatcgagtgctgaaaatacccagagctgtgcctgtccttaaaatggatgcaccttcttcatccactaccctggcccaatacgacaatgaaagtaagaagaactacggatctcagccacccagtagctcaacgagccttgcgcaatacgacagcaattctaaaaaaatctacggttcccagcccaattttaatatgcagtacattcccagggaggattttccggattggtggcaggtgcggaaactcaagtcctcttcaagctcagaagacgttgcatcaagtaaccaaaaggaaaggaatgtgaatcacacaacaagtaaaatttcttgggagttcccggagtctagttcttctgaggaagaggagaatctcgatgattatgactggtttgctgggaacatttctcggtctcaaagcgagcaattgctccgacaaaagggaaaagagggcgctttcatggtccggaacagcagtcaggtgggaatgtatacagtgtccctcttttctaaagccgttaacgacaagaagggaactgtgaaacactatcacgtccacacaaacgctgaaaacaaattgtatttggcagaaaattactgtttcgactcgatccctaaactgatacattaccatcagcacaatagcgccggcatgattactagattgagacaccccgtcagcacaaaagcaaacaaggtgcccgacagcgtgtcactcggaaacggcatttgggagctgaaaagggaggagatcacactgctgaaagagctgggaagtggacagtttggcgtggtccagctggggaaatggaagggacagtacgatgtggccgtcaagatgatcaaagaaggatccatgagcgaggatgaatttttccaggaggcacagactatgatgaagctgtcacatccgaagctggtcaagttctatggggtttgctccaaggaataccctatctacatagtgacagaatatatttctaatggatgcctcctaaactatctacgatcccacggcaagggacttgagccatcacagcttctggagatgtgctatgatgtatgtgagggaatggcatttctcgagagtcatcagtttattcatagagacctggcagctagaaattgccttgtggatagagacctctgcgtgaaagtgtcagactttgggatgacacgttatgtgctggatgaccagtacgtaagctcagttggtaccaagtttcccgtgaaatggtctgcgcctgaagttttccattacttcaaatatagctctaagagcgacgtgtgggctttcggaattttaatgtgggaggtgttctctcttggtaagcagccctatgacctatatgataatagccaggtagttctcaaagtctcacaggggcacagactttatcgcccccacctggccagcgatacaatctaccagattatgtacagctgttggcacgaactcccagagaagcggcccactttccaacagctgctctcttcgatcgaacccctgcgggagaaggacaaacactag

SEQ ID NO: 120442 - DNA, 2028 bp, Artificial Sequence
  derived and/or modified sequence
atggacaccaagagcatcctggaggagctgctgctgaagaggagccagcagaagaagaagatgagccccaacaactacaaggagcggctgtttgtgctgaccaagaccaacctgagctactatgaatatgacaagatgaagaggggcagcaggaagggcagcattgagatcaagaagatccgctgtgtggagaaggtgaacctggaggagcagacccctgtggagcggcagtaccccttccagatcgtgtacaaggatggcctgctgtatgtgtatgccagcaatgaggagagccgcagccagtggctgaaggccctgcagaaggagatccggggcaacccccacctgctggtgaagtaccacagcggcttctttgtggatggcaagttcctgtgctgccagcagagctgcaaggccgcccctggctgcaccctgtgggaggcctatgccaacctgcacacagctgtgaatgaggagaagcaccgggtgcccaccttcccagacagagtgctgaagatccccagggctgtgcctgtgctgaagatggatgcccccagcagcagcaccaccctggcccagtatgacaatgaaagcaagaagaactacggcagccagccccccagcagcagcaccagcctggcccagtatgacagcaacagcaagaagatctacggcagccagcccaacttcaacatgcagtacatcccccgggaggacttcccagactggtggcaggtgaggaagctgaagagcagcagcagcagtgaagatgtggccagcagcaaccagaaggagagaaatgtgaaccacaccaccagcaagatctcctgggagttccctgagagcagcagcagcgaggaggaggagaacctggatgattatgactggtttgctggcaacatcagccgcagccagagcgagcagctgctgcggcagaagggcaaggagggcgccttcatggtgaggaacagcagccaggtgggcatgtacacagtgtccctcttcagcaaggctgtgaatgacaagaagggcaccgtgaagcactaccacgtgcacaccaatgctgagaacaagctgtacctggccgagaactactgctttgacagcatccccaagctgatccactaccaccagcacaacagcgctggcatgatcacccggctgcggcaccctgtgtccaccaaggccaacaaggtgcctgacagcgtgtccctgggcaatggcatctgggagctgaagcgggaggagatcaccctgctgaaggagctgggcagcggccagtttggagtggtgcagctgggcaagtggaagggccagtatgatgtggccgtgaagatgatcaaggagggctccatgtctgaagatgagttcttccaggaggcccagaccatgatgaagctgagccaccccaagctggtgaagttctacggcgtgtgcagcaaggagtaccccatctacatcgtgacagagtacatcagcaatggctgcctgctgaactacctgcggagccacggcaagggcctggagcccagccagctgctggagatgtgctatgatgtgtgtgagggcatggccttcctggagagccaccagttcatccaccgggacctggccgccaggaactgcctggtggaccgggacctgtgtgtgaaggtgtctgactttggcatgacccgctacgtgctggatgaccagtatgtgtcctctgtgggcaccaagtttcctgtgaagtggagcgcccctgaggtgttccactacttcaagtacagcagcaagagtgatgtgtgggccttcggcatcctgatgtgggaggtgttcagcctgggcaagcagccctatgacctgtatgacaacagccaggtggtgctgaaggtgtcccagggccaccggctgtaccggccccacctggccagtgacaccatctaccagatcatgtacagctgctggcatgagctgcctgagaagaggcccaccttccagcagctgctgagcagcattgagcccctgcgggagaaggacaagcactag

SEQ ID NO: 120443 - DNA, 2028 bp, Artificial Sequence
  derived and/or modified sequence
atggacaccaagagcatcctggaggagctgctgctgaagcggagccaacaaaagaagaaaatgtcccccaataactataaagagcgactattcgtgttgacaaaaacgaatctgtcatattacgagtacgacaagatgaagaggggatcccggaagggtagcatcgagattaaaaagatccggtgcgtggagaaggttaatttggaggagcagacacctgttgagaggcagtacccctttcagattgtgtacaaggatgggctactttacgtctatgcttccaacgaagaatctagatctcagtggcttaaagccctgcagaaggagataagagggaacccacatctccttgttaagtaccattccggatttttcgtggacggcaaatttttatgctgccagcaaagttgtaaagctgctccaggatgtactctttgggaagcatacgcgaatcttcatacagccgtgaatgaagaaaaacaccgtgtccctacattccctgatagagtattgaaaatcccaagggcagtacccgtgcttaagatggatgctccgtcctccagtaccacgctagcacagtacgataatgagagcaagaagaactatggctcacaacctccctcatcatcaacctccttggcacagtatgactctaactcaaaaaaaatttacgggtctcagcccaatttcaatatgcagtatataccgagggaggattttccagattggtggcaagtgcgcaagctgaagagcagtagctcgtctgaagatgtggcttcctcaaatcagaaagagcggaacgtaaaccataccaccagcaaaattagctgggaattccccgaatcaagcagttcagaggaggaggaaaatttagacgattacgattggttcgccggcaatatttccagatcccagagcgagcagttgctaaggcaaaaaggaaaggagggtgcctttatggttaggaactccagccaagtcggtatgtacactgtttcactgttttccaaggccgtgaacgataaaaagggcacagtgaagcattaccatgtccacactaacgccgaaaataagttgtatctggcagaaaattactgcttcgatagtattcctaagctaatccactaccatcagcataactcagctggaatgattacacggctgagacatccagtgtctacgaaggccaacaaggtacctgactccgtctcactcggaaatggcatctgggaactgaaacgagaggagatcaccctgttaaaagaattgggctctggtcagttcggggttgtccaactggggaagtggaagggccagtacgacgtggctgtcaaaatgatcaaggagggaagcatgtcggaggatgaattcttccaggaggctcagacaatgatgaaattgtcccacccaaagttggtgaagttctatggggtctgcagtaaagagtacccaatttacatcgtgacagaatatattagtaatggatgcctgctcaactatttaaggtcacatggcaaaggcctggagccttcccaacttttggagatgtgctacgatgtgtgtgaggggatggcctttctggagtcacatcagtttattcatcgcgatctggcagctagaaattgtctagtcgatcgggatctgtgcgtaaaagtgtccgatttcgggatgacgcggtacgtcctcgacgatcagtatgttagcagcgtggggacgaaatttcccgtaaagtggagcgccccagaggtgtttcattactttaaatattcaagcaaatcggatgtgtgggcctttgggatcctaatgtgggaagtattcagcctaggaaagcagccctacgacctatacgataattctcaggtggtactcaaggtcagccaggggcaccggctttacaggccacacctggcaagcgacactatttaccagattatgtactcatgttggcatgaactgcccgagaagagaccaacctttcagcagctcctaagcagtatcgagcctctgagggaaaaggacaagcattag

SEQ ID NO: 120444 - DNA, 2028 bp, Artificial Sequence
  derived and/or modified sequence
atggacaccaagagcatcctggaggagctgctgctgaagcggagccagcagaagaaaaaaatgagcccaaacaactacaaggagcggctttttgtcctcactaaaactaacctgagctattatgaatatgacaagatgaagaggggaagtagaaagggttctatcgaaattaaaaaaattagatgcgtcgaaaaagtgaatctggaggaacagactccggtggagagacaatatccattccagatcgtatacaaagacggcctcttatatgtttatgcctcaaacgaagagtcccggagccagtggctgaaggcacttcaaaaagagatcaggggtaatccacatctgctggtgaaataccatagtggcttctttgttgacggaaaattcctctgctgccagcagtcttgcaaggctgccccagggtgcacactgtgggaagcttatgccaaccttcataccgctgtgaacgaggaaaagcaccgggtgcctacattcccagacagggtgctgaagattccacgcgccgtcccagtactgaagatggacgcaccttcatcgtccaccacactggcacaatacgacaatgaatccaaaaagaactacggttcacagcccccaagttccagcacctccctggctcagtatgattccaattctaaaaagatctatggttcccagcctaattttaacatgcagtatattccgcgggaggattttcctgattggtggcaagttagaaaactcaagtcttcttcctccagcgaagatgtggcgtccagtaatcaaaaggaaaggaatgtgaaccataccacttcaaagattagctgggagttcccagagagcagttccagtgaggaggaggagaacttggatgactacgattggttcgccgggaacatatcaaggtctcagtctgagcagcttttgaggcagaagggtaaagaaggagccttcatggtccggaatagttcccaggtcggaatgtacaccgtttctcttttcagcaaggcagtcaatgataagaagggtaccgttaagcactaccacgttcatactaacgccgagaataaactgtatttagcagagaattactgtttcgacagtattccgaagcttatccattatcatcagcacaattcagcaggcatgatcacacggctccgccaccccgtctccacgaaagccaacaaggtgccagatagtgtctctctgggtaacggaatatgggagctgaagagagaggaaatcactttattgaaagagcttggctctggccaatttggagtggtccagctggggaagtggaaagggcaatacgatgtcgccgttaagatgatcaaggaaggatctatgagcgaagacgagttcttccaagaggcacagactatgatgaagctgtctcacccaaaattggtgaagttttacggcgtgtgtagcaaggagtaccccatctatatcgttactgagtatatttctaacggctgcctgctgaactatctgcgaagtcatggcaaaggcctcgaaccatctcagctactcgaaatgtgttatgatgtctgcgaagggatggcatttctggagagtcatcagtttatacatcgagatctggcggcccgcaattgcctggtcgatcgggatctgtgtgtcaaggtgtcagatttcggcatgacccgctacgttctggacgatcagtacgtcagctccgtgggaactaagtttccggtgaaatggagtgcccctgaggtcttccactatttcaaatacagtagtaaaagcgacgtgtgggccttcggcattctgatgtgggaagtgttcagccttggcaagcaaccttacgacctgtatgacaactctcaggtcgtgctgaaagtgtcccaagggcatagactgtataggcctcatctcgctagtgatactatctaccaaattatgtatagctgttggcacgaattacctgagaaaaggcccaccttccagcaattactctcgtccatcgagcccctgcgggaaaaagataagcactag

SEQ ID NO: 120445 - DNA, 2028 bp, Artificial Sequence
  derived and/or modified sequence
atggacaccaagagcatcctggaggagctgctgctgaagcggagccagcagaagaagaaaatgtctcctaataactacaaggaacgtctcttcgtgctgaccaagacgaacctctcttactatgaatacgataaaatgaagagggggagtcggaagggatcgattgagatcaagaagatcaggtgcgttgagaaggtcaacttagaggagcagaccccagtggagagacagtatccttttcagatcgtttacaaagatggattgctgtatgtttatgcgtctaatgaggaaagtcgatctcaatggctcaaggcacttcaaaaggagataaggggcaacccccacctgttagttaaataccacagcgggttcttcgtggacggcaaattcttgtgctgccagcagtcatgtaaggcagcgccaggctgcaccctgtgggaggcatacgctaacctgcacactgccgtgaacgaggaaaagcaccgcgtgccgacttttccggacagagttctcaagatcccccgtgccgtaccggtattgaagatggacgcaccaagctcgagcacaaccttagcccagtacgataatgaatcaaagaagaactacggaagccagccccccagttcatcgacatcccttgcacagtatgactccaacagtaaaaaaatttatggctcccagcccaactttaacatgcaatatattccccgtgaggatttcccagactggtggcaagtaagaaagctcaagagcagctcatcctccgaggacgtggcgtcttctaatcagaaagaaaggaacgttaaccataccaccagcaaaattagctgggaattccctgagtcttccagctccgaagaggaagagaatctggacgactatgattggtttgctggcaacattagcaggtcccagtcagagcagttattaaggcaaaagggcaaggagggcgcattcatggtgcgcaacagctctcaagtggggatgtacaccgtctctttgttcagtaaagccgtgaacgacaaaaaaggcactgtcaagcattatcacgtccacactaatgctgaaaataaactctacctggccgaaaattactgttttgatagcattcctaagctcatacactaccaccagcataattcagccggtatgattacaagactgcggcatccagtatccacaaaggctaataaggtcccagactctgtgagccttggaaatgggatctgggaactgaagcgagaagagataactctgttaaaggagctgggctctgggcagtttggcgtggtgcagctcggtaagtggaagggacagtatgatgtggccgtgaagatgatcaaagagggttcaatgagcgaggacgagttctttcaggaggcccagactatgatgaagttatcccacccaaagctagttaaattctacggagtttgctccaaagaatacccaatctatatagttactgagtatattagcaatggctgcctcctgaattatctgagaagccatggcaaagggttagagcccagtcagctgttggagatgtgttatgatgtctgcgagggaatggcttttctcgagagccaccaattcattcatagagatctggcggcaaggaattgcctcgtcgacagggatctttgcgtgaaggtgagcgatttcgggatgacaaggtatgtcctggatgaccaatacgtgagttcagtggggacaaaattccccgtgaagtggagcgcccccgaagtctttcattattttaaatattcctctaagagcgacgtatgggcatttggaatcctcatgtgggaggtctttagtctgggaaaacagccatatgacctgtacgacaattcacaggtcgtactgaaagtgagtcaaggccacagactgtacagacctcaccttgcctctgatacaatctatcagatcatgtacagttgttggcacgagctgccagaaaagcgccccacgtttcagcagctgctgtccagtattgaacccctccgggagaaagacaaacactag

SEQ ID NO: 120446 - DNA, 2028 bp, Artificial Sequence
  derived and/or modified sequence
atggatacaaaaagcattctggaagagctgctgcttaagaggtcacagcagaaaaagaaaatgtcccctaataattacaaggaaaggctgtttgtgctgaccaagaccaatctttcttattatgaatacgataaaatgaagaggggatcccgaaaaggttccattgagataaaaaaaattcgctgcgtggagaaagttaatctggaagaacagacgccagtggaacggcagtatcccttccagattgtttacaaggatggtctgctgtacgtgtacgctagtaatgaagagtccaggagccagtggctgaaagccctgcaaaaagaaatccgaggtaaccctcaccttttagttaagtatcacagcggatttttcgtggacggcaagttcctctgttgtcaacagagttgtaaggctgcacctggttgtactctttgggaggcttatgccaatcttcacacagccgtgaatgaggaaaaacatagagtacctacctttccagatcgcgtgcttaagatcccaagggccgtgccagtgttgaaaatggacgccccttccagctccaccactctggcccagtacgacaacgagtctaagaaaaattacggttctcagccaccctcatcatcgacatctttggcccagtatgattctaatagtaaaaaaatttatgggagccagccaaacttcaatatgcagtatatccctagagaagactttcccgactggtggcaggtccggaagttgaagtcatccagttcgagcgaagacgtggcatcctcgaatcagaaggagcggaacgtcaatcacacgaccagcaagatttcttgggaatttcctgaatcctcatctagtgaggaggaggaaaatctggatgactacgattggtttgcaggtaatatcagtcggtcccaatccgagcagctgcttcgacagaaggggaaagaaggtgctttcatggtacggaatagttcccaggtgggaatgtacactgtgtcgctcttcagtaaagctgtgaatgacaaaaagggcacggtcaagcactaccacgtccacaccaatgccgagaacaagctttaccttgctgagaattactgctttgattctattcctaagttgatccattaccatcagcacaactctgcgggaatgatcacccgactgagacatcctgtcagtacaaaggctaataaagtgcctgattctgtttcactaggcaacggaatctgggagctaaaacgagaagaaatcaccctcctaaaagagctcggcagtgggcagtttggcgtcgtacagctggggaaatggaagggacagtacgacgtggctgtcaaaatgataaaggagggctccatgagcgaggatgagtttttccaggaggctcagaccatgatgaagctgagccaccctaaactcgtcaagttttatggcgtgtgctctaaggaatatccgatttacatcgtgaccgagtacatttcaaacgggtgtctgcttaattacttgaggagccacgggaaaggtctggagccttcccagctcctggaaatgtgttacgacgtgtgtgagggcatggcgttcctcgagagccaccagtttattcacagggaccttgctgctcggaactgcctcgtcgatagggatctctgcgtgaaagtgagcgatttcggcatgactcgatacgtgctcgacgaccagtacgtttcgtcagtagggactaagttccctgtcaagtggtccgctccagaggtcttccactactttaaatactccagcaagtccgatgtatgggctttcgggattttgatgtgggaggtcttcagcttgggcaagcagccctatgacctgtacgacaattcccaggtggtgctcaaagtgtcacaaggccacagactttaccgcccacacctcgcttccgacacgatctaccagatcatgtactcatgctggcatgagctgccggaaaagcggcctactttccagcagctcctctcctctatcgagcccctgcgcgagaaagacaagcactag

SEQ ID NO: 120447 - DNA, 2028 bp, Artificial Sequence
  derived and/or modified sequence
atggacacgaagtcaatcttggaggaacttctactgaagaggtctcagcagaagaagaagatgtctcccaataactacaaagaacgcctgtttgtcctcactaaaaccaacctgtcctactacgagtacgacaaaatgaaacggggaagccggaaaggcagcatcgagatcaaaaaaatccggtgtgtggagaaagttaatctcgaggagcagactcctgtggagagacagtacccctttcagattgtgtacaaggacggactgctctacgtgtatgcaagtaatgaggagtccagatctcaatggctgaaagctctgcagaaggagataagaggaaatccacacttactggtaaaataccattccgggtttttcgtggacggaaaatttctgtgttgtcagcagtcttgcaaagccgcacccggatgcacactgtgggaggcgtatgccaatttgcatacagcggtgaacgaagaaaaacacagagtgcctaccttcccagacagagtattaaaaatccccagagccgttccagtccttaaaatggatgccccttcttcatccactactctggctcagtatgataatgaaagtaagaagaattacgggagccagccgccttcaagctccacttctctggcgcagtacgactctaactcgaagaagatctacggcagccagcccaattttaacatgcaatacataccaagagaggacttccccgattggtggcaggttaggaagctgaagtccagcagcagttccgaagacgtggcatcttccaaccagaaggagaggaacgtgaatcatacaaccagtaaaatttcgtgggagttccctgagtcctccagctccgaggaggaagaaaacctggacgattatgactggtttgcgggaaatataagccgctcacagtctgaacaattgctgcgtcagaaaggaaaagaaggagcctttatggtcagaaactcttcccaagtgggaatgtatacagtatccctgttttccaaagcagtgaacgacaaaaaaggtactgtgaagcactatcatgtgcataccaacgcggagaacaaattatatctcgctgagaattattgctttgacagtatacccaagctcattcattaccaccagcacaattccgccggtatgatcactcgactgagacacccagtttctacaaaggctaacaaggtccccgattctgtgagtctcggaaatggcatttgggagcttaagcgcgaagaaattacactgctgaaagagctggggtctggacagttcggtgtggtgcagctgggcaagtggaaaggacagtacgacgtcgctgttaaaatgattaaggagggttccatgtcagaggacgaattcttccaagaagcgcaaaccatgatgaaactaagtcaccctaaattggtcaaattttatggagtctgtagtaaagagtaccccatttacattgtgaccgagtatataagtaatggatgcctcctgaactatctgagaagtcacggcaaggggctcgaaccatctcagctgttggaaatgtgctacgacgtttgcgaagggatggcgttccttgaaagtcatcagtttattcatcgcgacctggccgctcggaactgtctcgttgaccgcgatctctgtgttaaagtatctgattttgggatgaccaggtacgttctggatgaccagtacgtatcctctgtgggaacaaagtttcccgtcaaatggtctgcccctgaagtgtttcattattttaaatactcatcaaaaagcgatgtgtgggctttcgggatacttatgtgggaagtattttcccttggcaagcagccgtatgatctgtatgacaattcacaggtggtcttgaaagtctctcaggggcataggctgtatagaccccatctcgcgtctgataccatctaccaaattatgtacagctgctggcatgagctgcccgaaaagagaccgactttccagcaactccttagcagcatagagcccctgagagaaaaagataaacactag

SEQ ID NO: 120448 - DNA, 2028 bp, Artificial Sequence
  derived and/or modified sequence
atggacaccaaatctatcctggaagaattgcttcttaaaagatcccagcagaaaaagaagatgagtccaaataactacaaagagagattgttcgtgctcaccaagaccaatttaagttattatgaatacgacaagatgaagcgcggatccaggaaagggtctatcgagatcaaaaagatcaggtgcgtggaaaaagtcaatctggaagaacaaacgcctgtcgagaggcaatatcctttccagatcgtctacaaggacggccttctttacgtctacgctagcaatgaagagtcccggtctcagtggctgaaggctttgcagaaagagatcagagggaacccacatctcctcgtaaagtatcattccggatttttcgtggacggcaagtttctttgttgtcagcagagttgcaaggccgctccgggttgcaccctatgggaggcctacgccaacctccacacagctgtcaatgaggaaaagcatagagtcccgacctttccagaccgcgtgcttaagattcccagagcggtacctgttctgaaaatggatgcaccatcatccagcaccactcttgcccagtacgacaacgagtcgaagaaaaattatggatctcagcctccatcctcctccaccagcctggcacagtacgattcaaacagcaaaaagatctacggaagtcaacccaactttaacatgcagtacatcccaagggaggacttccctgattggtggcaagtgcgcaagctgaagtcatctagttcttcggaggatgtcgcctcaagcaaccaaaaggaaagaaatgtcaatcatacaacctctaaaatcagctgggaattcccagagagcagcagcagtgaggaggaggaaaatctcgatgattacgactggttcgccggaaatattagccgctcacagtctgaacagctgctgaggcaaaaaggaaaggagggcgcatttatggtgcggaatagctcccaggtggggatgtacacagtgtccttgtttagtaaggctgtcaatgacaagaagggcactgttaaacactatcacgtccatacaaatgccgagaacaaattgtatctggcagaaaattactgttttgattccatccctaagctcatacattaccaccagcataacagcgctggcatgattactaggctgcgccatccggtgtcaaccaaggctaataaagtgcctgactctgtttctttgggaaacggaatatgggaacttaagcgcgaggagatcacattgctaaaagagctggggtctggacagtttggcgtcgttcagttgggcaagtggaagggccaatatgatgtggctgttaaaatgataaaagagggtagtatgagcgaagatgagttctttcaggaagcccagactatgatgaaactgtctcatcccaagcttgtgaaattctacggagtgtgctcgaaagagtatccaatatacattgttacagaatatatcagcaacgggtgcctgctgaactacctaagatctcatggaaaagggttagagccttcccagcttctcgaaatgtgttatgacgtgtgcgagggtatggcttttctggaatcccaccagtttattcacagagacctggcagccagaaactgcttggtagacagggacctatgcgtcaaagtgagtgattttgggatgaccagatatgtgttggacgaccaatacgtgagtagcgtaggtactaagtttcccgtgaaatggtccgcccctgaggtattccactatttcaagtattcttctaaaagtgatgtttgggctttcggcattttaatgtgggaggtgttcagcctgggaaaacagccttatgacctctatgataattcccaagtggtgctcaaggtgtctcagggccacaggctgtaccggcctcatcttgcctccgacaccatataccagattatgtattcttgttggcacgagctaccagagaaacgtcctacgttccagcagctgctgtccagtattgaaccccttcgagaaaaagataagcactag

SEQ ID NO: 120449 - DNA, 2499 bp, Artificial Sequence
  derived and/or modified sequence
gtgatggtgcctcaaagcagtaactttttgcttagagcttgagagtcaaagttaaggacccacatgtatacttcggctctagcgagtctaaggatgataatatggatacaaaatctattctagaagaacttcttctcaaaagatcacagcaaaagaagaaaatgtcaccaaataattacaaagaacggctttttgttttgaccaaaacaaacctttcctactatgaatatgacaaaatgaaaaggggcagcagaaaaggatccattgaaattaagaaaatcagatgtgtggagaaagtaaatctcgaggagcagacgcctgtagagagacagtacccatttcagattgtctataaagatgggcttctctatgtctatgcatcaaatgaagagagccgaagtcagtggttgaaagcattacaaaaagagataaggggtaacccccacctgctggtcaagtaccatagtgggttcttcgtggacgggaagttcctgtgttgccagcagagctgtaaagcagccccaggatgtaccctctgggaagcatatgctaatctgcatactgcagtcaatgaagagaaacacagagttcccaccttcccagacagagtgctgaagatacctcgggcagttcctgttctcaaaatggatgcaccatcttcaagtaccactctagcccaatatgacaacgaatcaaagaaaaactatggctcccagccaccatcttcaagtaccagtctagcgcaatatgacagcaactcaaagaaaatctatggctcccagccaaacttcaacatgcagtatattccaagggaagacttccctgactggtggcaagtaagaaaactgaaaagtagcagcagcagtgaagatgttgcaagcagtaaccaaaaagaaagaaatgtgaatcacaccacctcaaagatttcatgggaattccctgagtcaagttcatctgaagaagaggaaaacctggatgattatgactggtttgctggtaacatctccagatcacaatctgaacagttactcagacaaaagggaaaagaaggagcatttatggttagaaattcgagccaagtgggaatgtacacagtgtccttatttagtaaggctgtgaatgataaaaaaggaactgtcaaacattaccacgtgcatacaaatgctgagaacaaattatacctggcagaaaactactgttttgattccattccaaagcttattcattatcatcaacacaattcagcaggcatgatcacacggctccgccaccctgtgtcaacaaaggccaacaaggtccccgactctgtgtccctgggaaatggaatctgggaactgaaaagagaagagattaccttgttgaaggagctgggaagtggccagtttggagtggtccagctgggcaagtggaaggggcagtatgatgttgctgttaagatgatcaaggagggctccatgtcagaagatgaattctttcaggaggcccagactatgatgaaactcagccatcccaagctggttaaattctatggagtgtgttcaaaggaataccccatatacatagtgactgaatatataagcaatggctgcttgctgaattacctgaggagtcacggaaaaggacttgaaccttcccagctcttagaaatgtgctacgatgtctgtgaaggcatggccttcttggagagtcaccaattcatacaccgggacttggctgctcgtaactgcttggtggacagagatctctgtgtgaaagtatctgactttggaatgacaaggtatgttcttgatgaccagtatgtcagttcagtcggaacaaagtttccagtcaagtggtcagctccagaggtgtttcattacttcaaatacagcagcaagtcagacgtatgggcatttgggatcctgatgtgggaggtgttcagcctggggaagcagccctatgacttgtatgacaactcccaggtggttctgaaggtctcccagggccacaggctttaccggccccacctggcatcggacaccatctaccagatcatgtacagctgctggcacgagcttccagaaaagcgtcccacatttcagcaactcctgtcttccattgaaccacttcgggaaaaagacaagcattgaagaagaaattaggagtgctgataagaatgaatatagatgctggccagcattttcattcattttaaggaaagtagcaaggcataatgtaatttagctagtttttaatagtgttctctgtattgtctattatttagaaatgaacaaggcaggaaacaaaagattcccttgaaatttagatcaaattagtaattttgtttatgctgctcctgatataacactttccagcctatagcagaagcacattttcagactgcaatatagagactgtgttcatgtgtaaagactgagcagaactgaaaaattacttattggatattcattcttttctttatattgtcattgtcacaacaattaaatatactaccaagta

SEQ ID NO: 120450 - DNA, 2531 bp, Artificial Sequence
  derived and/or modified sequence
aggaaaatgtgaaacaatttgcttctggaaacaggacagccggggccgtgttcctgcaacagcagaccaagcaccgcggcggacccaggcaagcacggaacaagctgagacggatgataatatggatacaaaatctattctagaagaacttcttctcaaaagatcacagcaaaagaagaaaatgtcaccaaataattacaaagaacggctttttgttttgaccaaaacaaacctttcctactatgaatatgacaaaatgaaaaggggcagcagaaaaggatccattgaaattaagaaaatcagatgtgtggagaaagtaaatctcgaggagcagacgcctgtagagagacagtacccatttcagattgtctataaagatgggcttctctatgtctatgcatcaaatgaagagagccgaagtcagtggttgaaagcattacaaaaagagataaggggtaacccccacctgctggtcaagtaccatagtgggttcttcgtggacgggaagttcctgtgttgccagcagagctgtaaagcagccccaggatgtaccctctgggaagcatatgctaatctgcatactgcagtcaatgaagagaaacacagagttcccaccttcccagacagagtgctgaagatacctcgggcagttcctgttctcaaaatggatgcaccatcttcaagtaccactctagcccaatatgacaacgaatcaaagaaaaactatggctcccagccaccatcttcaagtaccagtctagcgcaatatgacagcaactcaaagaaaatctatggctcccagccaaacttcaacatgcagtatattccaagggaagacttccctgactggtggcaagtaagaaaactgaaaagtagcagcagcagtgaagatgttgcaagcagtaaccaaaaagaaagaaatgtgaatcacaccacctcaaagatttcatgggaattccctgagtcaagttcatctgaagaagaggaaaacctggatgattatgactggtttgctggtaacatctccagatcacaatctgaacagttactcagacaaaagggaaaagaaggagcatttatggttagaaattcgagccaagtgggaatgtacacagtgtccttatttagtaaggctgtgaatgataaaaaaggaactgtcaaacattaccacgtgcatacaaatgctgagaacaaattatacctggcagaaaactactgttttgattccattccaaagcttattcattatcatcaacacaattcagcaggcatgatcacacggctccgccaccctgtgtcaacaaaggccaacaaggtccccgactctgtgtccctgggaaatggaatctgggaactgaaaagagaagagattaccttgttgaaggagctgggaagtggccagtttggagtggtccagctgggcaagtggaaggggcagtatgatgttgctgttaagatgatcaaggagggctccatgtcagaagatgaattctttcaggaggcccagactatgatgaaactcagccatcccaagctggttaaattctatggagtgtgttcaaaggaataccccatatacatagtgactgaatatataagcaatggctgcttgctgaattacctgaggagtcacggaaaaggacttgaaccttcccagctcttagaaatgtgctacgatgtctgtgaaggcatggccttcttggagagtcaccaattcatacaccgggacttggctgctcgtaactgcttggtggacagagatctctgtgtgaaagtatctgactttggaatgacaaggtatgttcttgatgaccagtatgtcagttcagtcggaacaaagtttccagtcaagtggtcagctccagaggtgtttcattacttcaaatacagcagcaagtcagacgtatgggcatttgggatcctgatgtgggaggtgttcagcctggggaagcagccctatgacttgtatgacaactcccaggtggttctgaaggtctcccagggccacaggctttaccggccccacctggcatcggacaccatctaccagatcatgtacagctgctggcacgagcttccagaaaagcgtcccacatttcagcaactcctgtcttccattgaaccacttcgggaaaaagacaagcattgaagaagaaattaggagtgctgataagaatgaatatagatgctggccagcattttcattcattttaaggaaagtagcaaggcataatgtaatttagctagtttttaatagtgttctctgtattgtctattatttagaaatgaacaaggcaggaaacaaaagattcccttgaaatttagatcaaattagtaattttgtttatgctgctcctgatataacactttccagcctatagcagaagcacattttcagactgcaatatagagactgtgttcatgtgtaaagactgagcagaactgaaaaattacttattggatattcattcttttctttatattgtcattgtcacaacaattaaatatactaccaagtacagaaatgtgga

SEQ ID NO: 120451 - DNA, 2598 bp, Artificial Sequence
  derived and/or modified sequence
atgaacatacatcacaatgtgaacagtggtcatctccagatagtagaatttcagatatgtttctttccatttttctgacagtttgaattttctgtaataattaattgacttttatacaatggaaacaacttttttgttttggaaaaaagaaagatgctgccgctaatcagtggatgaaagatgataatatggatacaaaatctattctagaagaacttcttctcaaaagatcacagcaaaagaagaaaatgtcaccaaataattacaaagaacggctttttgttttgaccaaaacaaacctttcctactatgaatatgacaaaatgaaaaggggcagcagaaaaggatccattgaaattaagaaaatcagatgtgtggagaaagtaaatctcgaggagcagacgcctgtagagagacagtacccatttcagattgtctataaagatgggcttctctatgtctatgcatcaaatgaagagagccgaagtcagtggttgaaagcattacaaaaagagataaggggtaacccccacctgctggtcaagtaccatagtgggttcttcgtggacgggaagttcctgtgttgccagcagagctgtaaagcagccccaggatgtaccctctgggaagcatatgctaatctgcatactgcagtcaatgaagagaaacacagagttcccaccttcccagacagagtgctgaagatacctcgggcagttcctgttctcaaaatggatgcaccatcttcaagtaccactctagcccaatatgacaacgaatcaaagaaaaactatggctcccagccaccatcttcaagtaccagtctagcgcaatatgacagcaactcaaagaaaatctatggctcccagccaaacttcaacatgcagtatattccaagggaagacttccctgactggtggcaagtaagaaaactgaaaagtagcagcagcagtgaagatgttgcaagcagtaaccaaaaagaaagaaatgtgaatcacaccacctcaaagatttcatgggaattccctgagtcaagttcatctgaagaagaggaaaacctggatgattatgactggtttgctggtaacatctccagatcacaatctgaacagttactcagacaaaagggaaaagaaggagcatttatggttagaaattcgagccaagtgggaatgtacacagtgtccttatttagtaaggctgtgaatgataaaaaaggaactgtcaaacattaccacgtgcatacaaatgctgagaacaaattatacctggcagaaaactactgttttgattccattccaaagcttattcattatcatcaacacaattcagcaggcatgatcacacggctccgccaccctgtgtcaacaaaggccaacaaggtccccgactctgtgtccctgggaaatggaatctgggaactgaaaagagaagagattaccttgttgaaggagctgggaagtggccagtttggagtggtccagctgggcaagtggaaggggcagtatgatgttgctgttaagatgatcaaggagggctccatgtcagaagatgaattctttcaggaggcccagactatgatgaaactcagccatcccaagctggttaaattctatggagtgtgttcaaaggaataccccatatacatagtgactgaatatataagcaatggctgcttgctgaattacctgaggagtcacggaaaaggacttgaaccttcccagctcttagaaatgtgctacgatgtctgtgaaggcatggccttcttggagagtcaccaattcatacaccgggacttggctgctcgtaactgcttggtggacagagatctctgtgtgaaagtatctgactttggaatgacaaggtatgttcttgatgaccagtatgtcagttcagtcggaacaaagtttccagtcaagtggtcagctccagaggtgtttcattacttcaaatacagcagcaagtcagacgtatgggcatttgggatcctgatgtgggaggtgttcagcctggggaagcagccctatgacttgtatgacaactcccaggtggttctgaaggtctcccagggccacaggctttaccggccccacctggcatcggacaccatctaccagatcatgtacagctgctggcacgagcttccagaaaagcgtcccacatttcagcaactcctgtcttccattgaaccacttcgggaaaaagacaagcattgaagaagaaattaggagtgctgataagaatgaatatagatgctggccagcattttcattcattttaaggaaagtagcaaggcataatgtaatttagctagtttttaatagtgttctctgtattgtctattatttagaaatgaacaaggcaggaaacaaaagattcccttgaaatttagatcaaattagtaattttgtttatgctgctcctgatataacactttccagcctatagcagaagcacattttcagactgcaatatagagactgtgttcatgtgtaaagactgagcagaactgaaaaattacttattggatattcattcttttctttatattgtcattgtcacaacaattaaatatactaccaagtacagaaatgtgga

SEQ ID NO: 120452 - DNA, 2028 bp, Artificial Sequence
  derived and/or modified sequence
atggacaccaagagcatcctggaggagctgctgctgaagagaagccagcagaagaagaagatgagccccaacaactacaaggagagactgttcgtgctgaccaagaccaacctgagctactacgagtacgacaagatgaagagaggcagcagaaagggcagcatcgagatcaagaagatcagatgcgtggagaaggtgaacctggaggagcagacccccgtggagagacagtaccccttccagatcgtgtacaaggacggcctgctgtacgtgtacgccagcaacgaggagagcagaagccagtggctgaaggccctgcagaaggagatcagaggcaacccccacctgctggtgaagtaccacagcggcttcttcgtggacggcaagttcctgtgctgccagcagagctgcaaggccgcccccggctgcaccctgtgggaggcctacgccaacctgcacaccgccgtgaacgaggagaagcacagagtgcccaccttccccgacagagtgctgaagatccccagagccgtgcccgtgctgaagatggacgcccccagcagcagcaccaccctggcccagtacgacaacgagagcaagaagaactacggcagccagccccccagcagcagcaccagcctggcccagtacgacagcaacagcaagaagatctacggcagccagcccaacttcaacatgcagtacatccccagagaggacttccccgactggtggcaggtgagaaagctgaagagcagcagcagcagcgaggacgtggccagcagcaaccagaaggagagaaacgtgaaccacaccaccagcaagatcagctgggagttccccgagagcagcagcagcgaggaggaggagaacctggacgactacgactggttcgccggcaacatcagcagaagccagagcgagcagctgctgagacagaagggcaaggagggcgccttcatggtgagaaacagcagccaggtgggcatgtacaccgtgagcctgttcagcaaggccgtgaacgacaagaagggcaccgtgaagcactaccacgtgcacaccaacgccgagaacaagctgtacctggccgagaactactgcttcgacagcatccccaagctgatccactaccaccagcacaacagcgccggcatgatcaccagactgagacaccccgtgagcaccaaggccaacaaggtgcccgacagcgtgagcctgggcaacggcatctgggagctgaagagagaggagatcaccctgctgaaggagctgggcagcggccagttcggcgtggtgcagctgggcaagtggaagggccagtacgacgtggccgtgaagatgatcaaggagggcagcatgagcgaggacgagttcttccaggaggcccagaccatgatgaagctgagccaccccaagctggtgaagttctacggcgtgtgcagcaaggagtaccccatctacatcgtgaccgagtacatcagcaacggctgcctgctgaactacctgagaagccacggcaagggcctggagcccagccagctgctggagatgtgctacgacgtgtgcgagggcatggccttcctggagagccaccagttcatccacagagacctggccgccagaaactgcctggtggacagagacctgtgcgtgaaggtgagcgacttcggcatgaccagatacgtgctggacgaccagtacgtgagcagcgtgggcaccaagttccccgtgaagtggagcgcccccgaggtgttccactacttcaagtacagcagcaagagcgacgtgtgggccttcggcatcctgatgtgggaggtgttcagcctgggcaagcagccctacgacctgtacgacaacagccaggtggtgctgaaggtgagccagggccacagactgtacagaccccacctggccagcgacaccatctaccagatcatgtacagctgctggcacgagctgcccgagaagagacccaccttccagcagctgctgagcagcatcgagcccctgagagagaaggacaagcactag

SEQ ID NO: 120453 - protein, 2649 aa, Artificial Sequence
  derived and/or modified sequence
MHSSSYSYRSSDSVFSNTTSTRTSLDSNENLLLVHCGPTLINSCISFGSESFDGHRLEMLQQIANRVQRDSVICEDKLILAGNALQSDSKRLESGVQFQNEAEIAGYILECENLLRQHVIDVQILIDGKYYQADQLVQRVAKLRDEIMALRNECSSVYSKGRILTTEQTKLMISGITQSLNSGFAQTLHPSLTSGLTQSLTPSLTSSSMTSGLSSGMTSRLTPSVTPAYTPGFPSGLVPNFSSGVEPNSLQTLKLMQIRKPLLKSSLLDQNLTEEEINMKFVQDLLNWVDEMQVQLDRTEWGSDLPSVESHLENHKNVHRAIEEFESSLKEAKISEIQMTAPLKLTYAEKLHRLESQYAKLLNTSRNQERHLDTLHNFVSRATNELIWLNEKEEEEVAYDWSERNTNIARKKDYHAELMRELDQKEENIKSVQEIAEQLLLENHPARLTIEAYRAAMQTQWSWILQLCQCVEQHIKENTAYFEFFNDAKEATDYLRNLKDAIQRKYSCDRSSSIHKLEDLVQESMEEKEELLQYKSTIANLMGKAKTIIQLKPRNSDCPLKTSIPIKAICDYRQIEITIYKDDECVLANNSHRAKWKVISPTGNEAMVPSVCFTVPPPNKEAVDLANRIEQQYQNVLTLWHESHINMKSVVSWHYLINEIDRIRASNVASIKTMLPGEHQQVLSNLQSRFEDFLEDSQESQVFSGSDITQLEKEVNVCKQYYQELLKSAEREEQEESVYNLYISEVRNIRLRLENCEDRLIRQIRTPLERDDLHESVFRITEQEKLKKELERLKDDLGTITNKCEEFFSQAAASSSVPTLRSELNVVLQNMNQVYSMSSTYIDKLKTVNLVLKNTQAAEALVKLYETKLCEEEAVIADKNNIENLISTLKQWRSEVDEKRQVFHALEDELQKAKAISDEMFKTYKERDLDFDWHKEKADQLVERWQNVHVQIDNRLRDLEGIGKSLKYYRDTYHPLDDWIQQVETTQRKIQENQPENSKTLATQLNQQKMLVSEIEMKQSKMDECQKYAEQYSATVKDYELQTMTYRAMVDSQQKSPVKRRRMQSSADLIIQEFMDLRTRYTALVTLMTQYIKFAGDSLKRLEEEEIKRCKETSEHGAYSDLLQRQKATVLENSKLTGKISELERMVAELKKQKSRVEEELPKVREAAENELRKQQRNVEDISLQKIRAESEAKQYRRELETIVREKEAAERELERVRQLTIEAEAKRAAVEENLLNFRNQLEENTFTRRTLEDHLKRKDLSLNDLEQQKNKLMEELRRKRDNEEELLKLIKQMEKDLAFQKQVAEKQLKEKQKIELEARRKITEIQYTCRENALPVCPITQATSCRAVTGLQQEHDKQKAEELKQQVDELTAANRKAEQDMRELTYELNALQLEKTSSEEKARLLKDKLDETNNTLRCLKLELERKDQAEKGYSQQLRELGRQLNQTTGKAEEAMQEASDLKKIKRNYQLELESLNHEKGKLQREVDRITRAHAVAEKNIQHLNSQIHSFRDEKELERLQICQRKSDHLKEQFEKSHEQLLQNIKAEKENNDKIQRLNEELEKSNECAEMLKQKVEELTRQNNETKLMMQRIQAESENIVLEKQTIQQRCEALKIQADGFKDQLRSTNEHLHKQTKTEQDFQRKIKCLEEDLAKSQNLVSEFKQKCDQQNIIIQNTKKEVRNLNAELNASKEEKRRGEQKVQLQQAQVQELNNRLKKVQDELHLKTIEEQMTHRKMVLFQEESGKFKQSAEEFRKKMEKLMESKVITENDISGIRLDFVSLQQENSRAQENAKLCETNIKELERQLQQYREQMQQGQHMEANHYQKCQKLEDELIAQKREVENLKQKMDQQIKEHEHQLVLLQCEIQKKSTAKDCTFKPDFEMTVKECQHSGELSSRNTGHLHPTPRSPLLRWTQEPQPLEEKWQHRVVEQIPKEVQFQPPGAPLEKEKSQQCYSEYFSQTSTELQITFDETNPITRLSEIEKIRDQALNNSRPPVRYQDNACEMELVKVLTPLEIAKNKQYDMHTEVTTLKQEKNPVPSAEEWMLEGCRASGGLKKGDFLKKGLEPETFQNFDGDHACSVRDDEFKFQGLRHTVTARQLVEAKLLDMRTIEQLRLGLKTVEEVQKTLNKFLTKATSIAGLYLESTKEKISFASAAERIIIDKMVALAFLEAQAATGFIIDPISGQTYSVEDAVLKGVVDPEFRIRLLEAEKAAVGYSYSSKTLSVFQAMENRMLDRQKGKHILEAQIASGGVIDPVRGIRVPPEIALQQGLLNNAILQFLHEPSSNTRVFPNPNNKQALYYSELLRMCVFDVESQCFLFPFGERNISNLNVKKTHRISVVDTKTGSELTVYEAFQRNLIEKSIYLELSGQQYQWKEAMFFESYGHSSHMLTDTKTGLHFNINEAIEQGTIDKALVKKYQEGLITLTELADSLLSRLVPKKDLHSPVAGYWLTASGERISVLKASRRNLVDRITALRCLEAQVSTGGIIDPLTGKKYRVAEALHRGLVDEGFAQQLRQCELVITGIGHPITNKMMSVVEAVNANIINKEMGIRCLEFQYLTGGLIEPQVHSRLSIEEALQVGIIDVLIATKLKDQKSYVRNIICPQTKRKLTYKEALEKADFDFHTGLKLLEVSEPLMTGISSLYYSS

SEQ ID NO: 120454 - DNA, 7950 bp, Artificial Sequence
  derived and/or modified sequence
atgcattcttctagctacagttataggtcgtccgacagtgtgttttccaacacgaccagtacacggactagcctggactccaacgagaacttgttactcgtccattgtggccccaccctgattaattcatgcatcagctttgggtccgaatcattcgatggccatcgcttggagatgctccaacaaatcgcaaatcgcgtgcagcgcgactcggttatttgtgaggataagctcattcttgctggtaacgctttacaatctgattcaaaaagactggagtccggtgttcagttccagaacgaagcggagatcgctggttatatcttggagtgtgagaacctgctcagacagcacgtcatcgatgtccaaatactgatcgacggaaaatactatcaggccgatcagttggtgcagcgcgtggccaaactgcgcgacgaaattatggcgctccgaaacgagtgctcgtccgtttatagcaagggccgcatcctcactaccgaacagacaaaattaatgatttccggtatcacacagagcctgaacagcggttttgcccagactcttcacccatcgcttacctctggactgactcagtcactgaccccgtccctcacgtcctcatctatgacctcaggcctctcgtcaggtatgacatcaagactgaccccctcagtcacccccgcatatacacccggcttcccttccggacttgtgcctaatttctcttcaggtgtggagccaaacagtctgcagacactcaagctgatgcaaattcggaaacctctgctcaagtctagtctgctggaccagaacctcactgaggaagaaatcaatatgaagttcgtccaggacctcctgaactgggttgatgaaatgcaggtgcagttggacagaaccgagtgggggagcgacctcccctctgtagagagccacttggaaaatcataaaaatgtccaccgggccatcgaggaattcgaaagcagcctgaaggaagccaagatatctgaaattcagatgacagcaccccttaaactcacgtacgccgagaagctccaccggcttgaatcccagtatgccaaactactaaatacttcgaggaaccaggaacgccatctggacaccctgcataactttgtatcccgtgccacaaacgagctgatctggctgaacgagaaggaagaggaggaagtggcctatgactggagcgagaggaataccaatattgcacgaaaaaaggactaccacgccgagctgatgcgagaattggaccaaaaagaagaaaatatcaagtcagtacaggagattgccgagcagctattactggagaatcacccagccagacttactattgaggcatatcgggccgccatgcaaactcaatggtcatggattctccagctgtgtcaatgcgttgaacagcacataaaggagaacacggcctactttgaattcttcaatgacgcaaaggaagccacggactatcttcgtaatctgaaagatgctattcagcgaaagtattcatgtgaccgaagctcgagtattcacaagctagaggatcttgttcaggaatcgatggaagagaaagaggaattgctccaatataagagcacaatagccaacttgatggggaaggctaaaaccatcatccagctgaagccaaggaactcagattgccccttaaaaacttctattccaattaaagccatttgcgactatcggcaaatcgagataactatctacaaagatgacgaatgtgtgctggccaacaactcgcaccgggcaaaatggaaagtgatcagtccaaccggcaacgaagcaatggtcccttccgtctgcttcacagtgccaccacccaacaaggaggccgtggatctagctaatcgcatcgaacagcaatatcaaaacgtccttacgctctggcatgaatcccacataaacatgaagtccgtggtgtcttggcactatctgattaatgaaattgatcgcattagggcaagtaacgttgcaagtatcaagacaatgttgcccggtgaacatcagcaggtgctttccaatctgcagtctagattcgaagacttcctggaggattcccaggagtctcaggtctttagtgggtcagacataactcagcttgagaaggaggtcaatgtatgtaaacagtactaccaggaactcctgaagagcgctgaacgagaggaacaagaggaatccgtctacaacctctacatttccgaagtacgcaatattcggctgaggctggaaaactgcgaagaccgcctgatccgccagatacgtacgcccctggagagggacgacctgcacgagtcagtattcagaatcactgagcaggaaaagcttaaaaaagaactcgaaaggctgaaagacgaccttggtaccataaccaataagtgcgaggagttcttttctcaggctgccgcctccagttccgtgccaaccctgcggagcgagttaaatgtggttttacagaacatgaaccaggtgtactccatgtcctcaacatacatcgataaattgaagaccgttaacctggtgctcaagaacacacaggccgcagaggccttggtaaaactgtacgagactaaattgtgcgaagaggaggccgtgatcgccgataagaacaacattgaaaatctcatcagcactttgaagcagtggcggagtgaggtcgacgaaaaacgccaggtgttccatgccctggaagatgaactccagaaagccaaggccatctcagatgagatgtttaagacctacaaggaaagggatctcgatttcgactggcataaagagaaggcagaccagctggtagaacggtggcaaaatgttcacgtacaaatagacaatagattgagggatctagaggggattggaaagtcgctgaaatactatcgcgacacctatcaccctcttgacgattggattcaacaagtcgagacaacgcaacgcaagatccaagagaaccagccggagaattccaaaaccctggccactcagctcaatcagcagaaaatgctcgtcagcgagattgagatgaagcaatccaaaatggatgagtgtcagaagtacgctgagcagtactctgcaactgttaaagattacgagttacagaccatgacctatcgcgccatggtggactctcagcagaaaagcccagtgaaaaggaggaggatgcagagttccgctgatctgattattcaggaatttatggacctgaggactcgatataccgctctcgtgactttaatgacgcagtacataaagttcgcaggggactctctgaaacggctcgaggaagaggagatcaaaagatgtaaggaaaccagcgaacacggcgcctatagcgatttactgcagaggcaaaaagcgacggtgctcgaaaactccaagctgacagggaagatcagcgaactagaacggatggtcgcagagctgaaaaagcagaagagtagggtcgaggaggaacttcccaaggtccgggaggccgccgagaacgaattgcgcaagcagcagcggaatgttgaggacatttctctccaaaagatcagggccgagtcagaggctaaacagtaccgccgtgaactggagacaatcgtgcgagagaaggaagctgccgaaagggagttggagagagtgagacaattgaccattgaggccgaggcaaaacgagctgccgtcgaagaaaatttgctcaactttagaaaccagttggaagagaatacttttactaggagaaccctggaagatcatttaaagaggaaagatctgtctttgaacgacctggaacagcaaaagaacaagttaatggaagaactgaggcggaagcgagacaatgaagaggagttgctaaaactgattaagcagatggagaaggacctggcatttcaaaaacaagtcgccgaaaagcagctcaaagagaagcagaagatcgagctcgaggcccgacggaaaataacagagattcagtacacgtgccgagagaacgcgctgcctgtgtgccccataacccaggcgacatcttgccgggctgtgactggcttacaacaggaacacgacaagcagaaggccgaagaattaaagcaacaggtggacgaattaaccgcggcaaacagaaaagcagaacaggacatgcgtgagctcacctatgagctcaatgccctccagttggagaagacttcctctgaagagaaggcccgattgctgaaagacaagctcgacgagactaacaatacacttcgttgtcttaaactcgaacttgaacgaaaggaccaggcggagaaggggtatagccagcagctgagagagttggggcgtcagttgaatcaaactacaggtaaggcggaagaagcaatgcaggaggcttctgacctcaagaagattaaacggaactatcagctggagctcgagagccttaatcatgaaaaaggaaagttgcagagggaagtggatcgtatcacgagggctcatgccgtcgccgaaaaaaatatacaacacttgaacagccagatccacagcttccgtgacgagaaagagttagagaggctgcagatttgccagaggaaaagcgatcacctgaaggagcagttcgaaaagagccatgagcagctgctgcagaatattaaggctgaaaaggaaaataatgataagatccagcggcttaacgaggaactggaaaaaagtaatgagtgtgccgaaatgctgaaacagaaagtggaagagctaacacggcaaaacaatgaaaccaagttaatgatgcagaggattcaggctgagtccgagaacatagtgctggagaagcagactattcagcagcgttgtgaagccctgaagatccaggcggacgggtttaaagaccagctcagatcgaccaatgagcacctgcataaacagacaaagactgagcaagattttcagcggaaaataaagtgcctggaagaggatctggccaagagccagaacctagtctcagagttcaagcaaaagtgtgatcagcagaatataattattcagaataccaaaaaagaggttcgcaatctcaatgcggagctgaacgctagtaaagaggagaagcgcaggggtgagcaaaaagtgcagctgcagcaggctcaggtgcaggaactcaacaacagactcaagaaggtacaggacgaactgcacctcaagactattgaagagcagatgacacacagaaagatggtgctcttccaggaggaatccggcaagtttaaacagtccgctgaagagttccgtaagaaaatggaaaaacttatggaatctaaggtgatcacagagaatgatataagcgggattaggctcgatttcgtgtctttgcagcaggaaaacagccgggcccaggagaatgctaagctctgtgagaccaacatcaaggaattggaaagacagctgcagcaatatagggaacagatgcagcagggccagcacatggaggcgaatcactaccagaagtgtcaaaaactggaggatgagttgatcgcacagaaacgggaggtggagaatctgaaacaaaaaatggaccagcagattaaagaacacgaacaccagttggttctgttacaatgcgaaatccaaaagaagagcacggccaaagattgtacattcaaacccgatttcgaaatgactgttaaagagtgccagcattccggggaactcagctctcgcaataccggacatctgcatccgaccccacgcagccctctgctgcgatggacacaggaaccccaaccactcgaggaaaaatggcagcatcgggtggtcgaacagattccaaaagaagttcagtttcagccccccggcgcccctctggaaaaagagaaatctcagcaatgctatagtgaatacttctctcagacgtcaactgaactgcaaatcacgttcgatgagaccaacccaattacacggctgtctgaaatcgaaaaaattcgggatcaggccttgaataactctagaccaccagtacgctatcaggataacgcctgcgaaatggaactggtgaaggttttaactccgctggagattgcaaagaataagcagtacgacatgcacaccgaagtcaccacgctgaaacaggagaaaaatccagtgccaagcgctgaagaatggatgcttgagggctgccgggccagcggcgggcttaagaaaggagactttttgaaaaaaggcctcgaacctgaaacttttcagaactttgacggagatcacgcgtgtagcgtgcgcgatgacgagttcaagttccaaggactcaggcatactgtgacggctcgacagctagtggaggccaaactgcttgacatgcgaacaattgagcagctgaggttggggcttaaaacagtcgaagaagtgcagaaaaccctgaataagttcctaaccaaggccacgtccattgctggcctataccttgagtccaccaaagaaaagataagtttcgcctccgccgcagagcggattattatagacaaaatggtggcgttggccttcctggaggcgcaagccgcaacaggctttatcattgacccaatttcgggacaaacatactcagtggaggatgctgtgctgaagggggttgtcgacccggaattcagaatccgtcttctcgaggccgagaaggccgcggttggctacagctacagttccaagacccttagcgttttccaagcaatggagaatcggatgctggataggcaaaagggcaaacatattcttgaggcacaaatcgcctccggaggtgtcatcgaccccgtgagagggatcagagttccaccggagatagcgctgcagcaggggctgctgaataatgccatcctgcaatttctgcatgaaccttccagtaataccagagtgtttccaaaccccaataacaaacaggccctatattactccgaactgctgcgtatgtgcgtctttgacgtcgagtcccagtgcttcctgtttccattcggcgaaagaaacatcagtaacctcaacgtgaaaaagacacaccgaatttctgtcgtcgatacaaaaacagggagcgagctcaccgtctacgaggcatttcagaggaatctgattgagaagtccatctacctggagctgtctggacagcagtatcagtggaaagaggccatgtttttcgaatcctatgggcactcttcccatatgctgacagatacgaagactgggttgcacttcaacattaacgaagcaatcgagcaaggcactatcgacaaggcactggtcaagaagtatcaggagggactgattaccctaacagaactcgccgatagcttactttctagactggttccaaaaaaggatctgcattcaccagtggcaggatattggctcacagcgagcggcgaaaggatctctgtgctgaaggcctcacgtagaaacttggtggatagaattacagccttgagatgtctggaagctcaggtgagcacgggaggtattatcgacccactgaccgggaaaaagtaccgcgtcgctgaagctctgcatcggggcctggtggatgaagggttcgcacagcagctcaggcagtgtgaacttgttatcaccggcattggccaccctatcacgaataagatgatgtccgttgtggaggctgtgaacgctaacattattaacaaggagatgggaatccgctgtttggagttccagtatttaactggagggctgattgagccccaagtgcattctcgcctgtctatcgaggaagcactgcaggtgggcatcattgatgtgttgattgctactaaactgaaagaccagaagtcctacgtacggaacatcatttgcccacagacaaaacggaaactcacctataaagaggccttggagaaagcagactttgatttccacacaggtttgaagctcctagaagtcagcgagcctctgatgacaggaatttccagtctgtattacagcagttag

SEQ ID NO: 120455 - DNA, 7950 bp, Artificial Sequence
  derived and/or modified sequence
atgcacagcagcagctacagctaccgcagcagtgacagcgtcttcagcaacaccaccagcaccaggaccagcctggacagcaatgaaaacctgctgctggtgcactgcggccccaccctcatcaacagctgcatcagctttggaagtgagagctttgatggccaccggctggagatgctgcagcagatcgccaacagagtgcagagggacagcgtcatctgtgaggacaagctgatcctggccggaaatgccctgcagagcgacagcaagaggctggagagcggcgtgcagttccagaatgaggccgagattgctggctacatcctggagtgtgagaacctgctgcggcagcacgtgattgatgtgcagatcctgattgatggcaagtactaccaggccgaccagctggtgcagagggtggccaagctgagagatgagatcatggccctgagaaatgaatgttcttctgtgtacagcaagggccgcatcctgaccacagagcagaccaagctgatgatcagcggcatcacccagagcctgaacagcggctttgcccagaccctgcaccccagcctgaccagcggcctgacccagagcctgacccccagcctgaccagcagctccatgaccagcggcctgagcagcggcatgaccagccggctgacccccagcgtgaccccagcctacaccccaggcttccccagcggcctggtgcccaacttcagcagtggagtggagcccaacagcctgcagaccctgaagctgatgcagatcaggaagcccctgctgaagagcagcctgctggaccagaacctgacagaggaggagatcaacatgaagtttgtgcaggacctgctgaactgggtggatgagatgcaggtgcagctggacagaacagagtggggcagtgacctgcccagcgtggagagccacctggagaaccacaagaatgtgcaccgggccatcgaggagtttgagagcagcctgaaggaggccaagatcagcgagatccagatgacagcccccctgaagctgacctacgccgagaagctgcaccggctggagagccagtatgccaagctgctgaacaccagcaggaaccaggagcggcacctggacaccctgcacaactttgtgtcccgggccaccaatgagctgatctggctgaatgagaaggaggaggaggaggtggcctatgactggagcgagaggaacaccaacatcgccaggaagaaggactaccacgccgagctgatgagggagctggaccagaaggaggagaacatcaagtctgtgcaggagattgctgagcagctgctgctggagaaccacccagcccggctgaccatcgaggcctacagagctgccatgcagacccagtggagctggatcctgcagctgtgccagtgtgtggagcagcacatcaaggaaaatacagcctactttgagttcttcaatgatgccaaggaggccacagactacctgaggaacctgaaggatgccatccagaggaagtacagctgtgacaggagcagcagcatccacaagctggaggacctggtgcaggagagcatggaggagaaggaggagctgctgcagtacaagagcaccatcgccaacctgatgggcaaggccaagaccatcatccagctgaagcccaggaacagcgactgccccctgaagaccagcatccccatcaaggccatctgtgactaccggcagatcgagatcaccatctacaaggatgatgaatgtgtgctggccaacaacagccaccgggccaagtggaaggtgatcagccccactggaaatgaggccatggtgcccagcgtgtgcttcaccgtgcccccacccaacaaggaggccgtggacctggccaacagaattgagcagcagtaccagaatgtgctgaccctgtggcatgagagccacatcaacatgaagtctgtggtgtcctggcactacctgatcaatgaaattgaccgcatccgggccagcaatgtggccagcatcaagaccatgctgcccggggagcaccagcaggtgctgagcaacctgcagagcagatttgaggacttcctggaggacagccaggagagccaggtgttcagcggcagtgacatcacccagctggagaaggaggtgaatgtgtgcaagcagtactaccaggagctgctgaagtctgctgagcgggaggagcaggaggagagcgtgtacaacctgtacatcagcgaggtgaggaacatccggctgcggctggagaactgtgaagatagactcatccggcagatccgcacccccctggagagagatgacctgcacgagagcgtcttccgcatcacagagcaggagaagctgaagaaggagctggagcggctgaaggatgacctgggcaccatcaccaacaagtgtgaggagttcttcagccaggccgccgccagcagctctgtgcccaccctgcggtctgagctgaatgtggtgctgcagaacatgaaccaggtgtacagcatgagcagcacctacatcgacaagctgaagacagtgaacctggtgctgaagaacacccaggccgctgaggccctggtgaagctgtatgagaccaagctgtgtgaggaggaggccgtgattgctgacaagaacaacattgaaaatctcatcagcaccctgaagcagtggaggtctgaggtggatgagaagaggcaggtgttccacgccctggaggatgagctgcagaaggccaaggccatcagtgatgagatgttcaagacctacaaggagcgggacctggactttgactggcacaaggagaaggctgaccagctggtggagcgctggcagaatgtgcacgtgcagattgacaaccggctgcgggacctggagggcatcggcaagagcctgaagtactacagagacacctaccaccccctggatgactggatccagcaggtggagaccacccagaggaagatccaggagaaccagcctgagaacagcaagaccctggccacccagctgaaccagcagaagatgctggtgtctgaaattgagatgaagcagagcaagatggatgagtgccagaagtatgcagagcagtacagcgccaccgtgaaggactatgagctgcagaccatgacctaccgggccatggtggacagccagcagaagagccctgtgaagagaagaaggatgcagagcagcgctgacctgatcatccaggagttcatggacctgcggacccgctacacagccctggtgaccctgatgacccagtacatcaagtttgctggggacagcctgaagaggctggaggaggaggagatcaagcgctgcaaggagaccagcgagcacggggcctacagcgacctgctgcagaggcagaaggccaccgtgctggagaacagcaagctgaccgggaagatcagcgagctggagaggatggtggccgagctgaagaagcagaagagccgggtggaggaggagctgcccaaggtgcgggaggccgcagaaaatgagctgaggaagcagcagagaaatgtggaggacatcagcctgcagaagatccgggcagagagcgaggccaagcagtacagaagagagctggagaccatcgtgcgggagaaggaggccgctgagcgggagctggagcgggtgcggcagctgaccatcgaggccgaggccaagagagctgctgtggaggagaacctgctgaacttcaggaaccagctggaggagaacaccttcaccaggaggaccctggaggaccacctgaagaggaaggacctgagcctgaatgacctggagcagcagaagaacaagctgatggaggagctgcggaggaagagggacaatgaggaggagctgctgaagctgatcaagcagatggagaaggacctggccttccagaagcaggtggccgagaagcagctgaaggagaagcagaagattgagctggaggcccggaggaagatcacagagatccagtacacctgccgggagaatgccctgcctgtgtgccccatcacccaggccaccagctgcagagctgtgacaggcctgcagcaggagcatgacaagcagaaggccgaggagctgaagcagcaggtggatgagctgacagctgccaacaggaaggccgagcaggacatgagggagctgacctatgagctgaatgccctgcagctggagaagaccagcagcgaggagaaggcccggctgctgaaggacaagctggatgagaccaacaacaccctgcgctgcctgaagctggagctggagaggaaggaccaggccgagaagggctacagccagcagctgcgggagctgggccggcagctgaaccagaccaccgggaaggccgaggaggccatgcaggaggccagtgacctgaagaagatcaagaggaactaccagctggagctggagagcctgaaccacgagaagggcaagctgcagcgggaggtggaccgcatcacccgggcccatgctgtggccgagaagaacatccagcacctgaacagccagatccacagcttcagagatgagaaggagctggagcggctgcagatctgccagaggaagagtgaccacctgaaggagcagtttgagaagagccatgagcagctgctgcagaacatcaaggccgagaaggagaacaatgacaagatccagaggctgaatgaggagctggagaagagcaatgaatgtgccgagatgctgaagcagaaggtggaggagctgacccggcagaacaatgagaccaagctgatgatgcagaggatccaggccgagagcgagaacatcgtgctggagaagcagaccatccagcagagatgtgaggccctgaagatccaggctgatggcttcaaggaccagctgcggagcaccaatgagcacctgcacaagcagaccaagacagagcaggacttccagaggaagatcaagtgcctggaggaggacctggccaagagccagaacctggtgtctgagttcaagcagaagtgtgaccagcagaacatcatcatccagaacaccaagaaggaggtgaggaacctgaatgctgagctgaatgccagcaaggaggagaagagaagaggagagcagaaggtgcagctgcagcaggcccaggtgcaggagctgaacaaccggctgaagaaggtgcaggatgagctgcacctgaagaccatcgaggagcagatgacccacaggaagatggtgctcttccaggaggagagcggcaagttcaagcagagcgctgaggagttcaggaagaagatggagaagctgatggagagcaaggtgatcacagaaaatgacatcagcggcatccggctggactttgtgtccctgcagcaggagaacagccgggcccaggagaatgccaagctgtgtgagaccaacatcaaggagctggagcggcagctgcagcagtaccgggagcagatgcagcagggccagcacatggaggccaaccactaccagaagtgccagaagctggaggatgagctgattgcccagaagcgggaggtggagaacctgaagcagaagatggaccagcagatcaaggagcacgagcaccagctggtgctgctgcagtgtgagatccagaagaagagcacagccaaggactgcaccttcaagccagactttgagatgacagtgaaggagtgccagcacagcggggagctgagcagcaggaacacaggccacctgcaccccacccccaggagccccctgctgcgctggacccaggagccccagcccctggaggagaagtggcagcaccgggtggtggagcagatccccaaggaggtgcagttccagcccccaggggcccccctggagaaggagaagagccagcagtgctacagcgagtacttcagccagaccagcacagagctgcagatcacctttgatgagaccaaccccatcacccggctgtctgaaattgagaagatccgggaccaggccctgaacaacagcaggcctcctgtgcgctaccaggacaatgcctgtgagatggagctggtgaaggtgctgacccccctggagatcgccaagaacaagcagtatgacatgcacacagaggtgaccaccctgaagcaggagaagaaccctgtgcccagcgctgaggagtggatgctggagggctgccgggccagcggcggcctgaagaagggggacttcctgaagaagggcctggagcctgagaccttccagaactttgatggagaccacgcctgcagcgtgagagatgatgagttcaagttccagggcctgcggcacacagtgacagcccggcagctggtggaggccaagctgctggacatgaggaccatcgagcagctgcggctgggcctgaagacagtggaggaggtgcagaagaccctgaacaagttcctgaccaaggccaccagcattgctggcctgtacctggagagcaccaaggagaagatcagctttgccagcgctgctgagcgcatcatcatcgacaagatggtggccctggccttcctggaggcccaggccgccaccggcttcatcatcgaccccatcagcggccagacctacagcgtggaggatgctgtgctgaagggcgtggtggaccctgagttccgcatccggctgctggaggccgagaaggctgctgtgggctacagctacagcagcaagaccctgagcgtcttccaggccatggagaacaggatgctggaccggcagaagggcaagcacatcctggaggcccagatcgccagcggaggagtgattgatcctgtgcggggcatccgggtgcccccagaaattgccctgcagcagggcctgctgaacaatgccatcctgcagttcctgcacgagcccagcagcaacaccagggtcttccccaaccccaacaacaagcaggccctgtactacagcgagctgctgaggatgtgtgtgtttgatgtggagagccagtgcttcctgttcccctttggagagaggaacatcagcaacctgaatgtgaagaagacccaccgcatctctgtggtggacaccaagacaggcagcgagctgactgtgtatgaggccttccagaggaacctgattgagaagagcatctacctggagctgagcggccagcagtaccagtggaaggaggccatgttctttgagagctatggccacagcagccacatgctgacagacaccaagacaggcctgcacttcaacatcaatgaggccatcgagcagggcaccatcgacaaggccctggtgaagaagtaccaggagggcctcatcaccctgacagagctggccgacagcctgctgagccggctggtgcccaagaaggacctgcacagccctgtggccggctactggctgacagccagcggggagcgcatctctgtgctgaaggccagcagaagaaacctggtggaccgcatcacagccctgcgctgcctggaggcccaggtgtccactggaggcatcatcgaccccctgaccgggaagaagtacagagtggccgaggccctgcaccggggcctggtggatgagggctttgcccagcagctgcggcagtgtgagctggtgatcactggaattggccaccccatcaccaacaagatgatgtctgtggtggaggccgtgaatgccaacatcatcaacaaggagatgggcatccgctgcctggagttccagtacctgaccggcggcctcatcgagccccaggtgcacagccggctgagcattgaggaggccctgcaggtgggcatcattgatgtgctgattgccaccaagctgaaggaccagaagagctatgtgaggaacatcatctgcccccagaccaagaggaagctgacctacaaggaggccctggagaaggctgactttgacttccacacaggcctgaagctgctggaggtgtctgagcccctgatgacaggcatcagcagcctgtactacagcagctag

SEQ ID NO: 120456 - DNA, 7950 bp, Artificial Sequence
  derived and/or modified sequence
atgcacagcagcagctacagctaccggagcagcgacagcgtgttctcgaacactacttcgacacgaacatccttggatagcaacgaaaacctgctcctcgtgcactgcgggcccacgcttatcaattcctgcatatcatttggatcagaaagctttgatggtcataggctggagatgctgcagcaaattgcaaacagagtgcaacgggacagcgttatctgtgaagacaagttgatcctggccggtaacgccttgcagtctgattctaagagactggagtccggtgttcagttccagaacgaggccgagatcgcgggctacatcctggaatgcgagaatctcttgagacaacacgttatcgacgttcagatcctgatcgacggcaagtattaccaggcagatcagctcgttcagagagtcgcaaagctccgcgatgaaattatggctcttagaaacgagtgtagtagcgtttatagcaagggacgaatactcacgacagagcaaactaaactcatgatttcaggcataacgcagtcgctcaatagtggtttcgcccagaccctccacccgagccttacatctgggctcacacagtccctgacccctagtctgacatccagctcaatgacttccggactgtcgtcagggatgacgagtcgactaaccccgtccgtcacccccgcatacactccaggatttcccagcggattggtgcctaatttttcaagtggggttgagcccaattcactgcaaacgctgaagttaatgcagatccgcaaacccctgttaaagtcctcccttctggatcagaacttgaccgaagaagagatcaacatgaagttcgttcaggacctccttaactgggtagatgagatgcaggtccagttagacaggaccgaatggggatccgacctcccatccgtggagtcccaccttgaaaaccacaaaaatgtacatcgcgccatcgaagagttcgaatcgagcctgaaggaagctaagattagcgaaatccaaatgactgcacctctaaaactgacctatgcagaaaaactccaccgtctggagtctcagtacgccaaacttttgaacacttcacgcaaccaggagaggcacctcgatactctccataatttcgtgtcgcgggcaacaaacgaattgatatggctcaacgagaaggaagaggaggaggtggcttacgactggagcgagcgtaacacaaatatagcgaggaaaaaggactaccacgctgagctgatgcgggagctggatcagaaggaagagaacatcaaatcagtgcaggaaattgcagaacaactgcttctggagaaccatccagcgaggcttaccatcgaggcttatcgagccgccatgcagacacagtggtcgtggatcctacagctgtgccagtgtgtggaacaacatataaaggagaatacggcatacttcgagttcttcaacgacgcaaaagaggctaccgattacctgcgcaacctaaaagatgcaatccagcggaaatatagctgcgatagatcttccagcattcataagttggaggatctggtccaagagtcgatggaggagaaagaagaactgcttcagtacaaatccacaatcgcaaatcttatgggaaaagccaaaaccattattcagttgaagccgagaaactctgattgtccgcttaaaacctccatccccattaaagcaatctgcgactaccgtcagatcgaaatcaccatctacaaggatgacgagtgtgtcttggccaataattcacacagagccaagtggaaagtgataagccctaccggcaatgaagcaatggttcctagtgtttgctttacagtgcctccccctaacaaggaggccgttgacctggctaaccgcattgagcaacagtatcaaaatgtccttaccctttggcatgagtcacacattaatatgaaatcggtggtcagctggcattacctgattaacgagattgacaggatccgagcctccaacgttgcatccataaaaaccatgttgccaggagagcaccagcaggtactctcaaatctgcaaagtcggttcgaagattttctcgaggactctcaggagagccaggtgttttccggcagcgacattacgcagctggaaaaggaagtgaacgtgtgcaaacagtattatcaggaactgctgaagtcagccgagcgagaagagcaggaggaaagtgtctataatctctatatttcggaagtgcgcaacataagactgcgtttagagaactgtgaagatcggttgattcggcagatcagaaccccactggagcgggacgacttgcatgagtccgtgtttcgcataacagagcaggagaagctgaagaaggagttagaacgcttaaaggatgatcttgggactataacaaacaaatgcgaagaatttttctcacaggcagctgcctcttcaagcgttcccacgctgagatcagaactcaacgtggtattgcagaatatgaaccaggtgtatagcatgagttccacttacatagacaaactgaagaccgtgaatctggttctcaagaacacacaggctgccgaggccctggtgaagctgtacgagaccaagctgtgcgaagaggaggcagttatcgccgacaagaataatatcgagaacttgatttcaacgctcaagcagtggagaagtgaagttgatgagaaaagacaggttttccacgccttggaagacgagttgcaaaaagcaaaagccattagcgatgaaatgtttaaaacctataaggaaagagatctagactttgactggcataaagagaaggccgatcagcttgttgaacgctggcagaatgtgcacgtccagatcgataaccggttacgagatctggaaggtattgggaaatcattgaagtactacagagacacctaccatcctctcgatgactggattcagcaggtcgagaccacgcaaagaaagatccaggaaaatcagccagagaacagcaaaaccctcgcaacgcagctgaaccagcagaagatgcttgtgtccgagattgaaatgaaacagtccaagatggatgagtgtcagaaatatgccgagcagtattctgccacagtgaaagactacgagttgcagaccatgacctacagagccatggtagactcacaacagaagtctccagtcaaaaggaggaggatgcagagctcagccgatttgataatccaggaattcatggatctgagaactaggtatacagctttggtgacactgatgacacagtacatcaagttcgcaggtgactcactgaagcgcctggaagaagaagagatcaaacggtgcaaggaaacatcagagcacggcgcttatagtgatctgctgcagagacagaaagccaccgtgctagagaatagcaagctgaccggtaagataagcgagcttgagcgaatggtggccgagcttaaaaaacagaagagtagagtcgaagaagaactgccaaaggtgcgggaagccgctgagaacgagctgcggaagcagcagaggaacgtggaggatatctctttgcaaaaaatacgagccgagtctgaagccaagcagtataggagagagcttgagacgattgtcagggaaaaggaggccgcggagcgggagctggaaagggttcgtcagcttactattgaggcagaagccaagcgcgccgcagttgaggagaacctgcttaacttccggaaccagctcgaagagaacacatttacacgccggactctggaggatcacctgaagcggaaggacctctctcttaatgacctggagcaacagaagaacaaacttatggaggagctacgtcggaagcgtgataacgaggaggagctactgaaactgattaaacagatggagaaggacctcgcattccagaagcaagtggccgaaaagcagctgaaggaaaagcaaaagatcgaactggaagctcggaggaagatcaccgaaattcagtatacgtgtcgcgaaaatgccttgcctgtttgcccgatcacacaggcgaccagctgtagggcagtcaccggcctgcagcaggaacacgacaagcagaaggcagaggaactgaaacagcaggtggacgaactcactgccgccaacaggaaagcagagcaggacatgcgggagttgacctacgagctgaacgcccttcaacttgaaaaaacatcaagtgaagagaaagccaggctcctgaaggataaactggacgaaacgaataacaccctgaggtgtttgaaactggagctcgagaggaaggaccaggcggaaaagggatattcccaacaactcagagagctgggtagacaactgaatcagacaacaggcaaggctgaggaggccatgcaggaagcctcagacttaaaaaagattaaaaggaactaccaactggagttggagagcctgaaccacgagaaaggtaagcttcagcgggaggtggatcgcataacaagggctcatgccgtcgctgagaagaatatccaacatctgaattcgcagattcacagtttcagggacgaaaaagagctcgaaagactgcagatctgtcagcgtaagtccgatcacctgaaggagcaattcgagaaatcccatgagcaattgctgcagaacatcaaggccgaaaaagagaacaacgacaaaatccaaagattaaatgaagagcttgagaaaagtaacgaatgcgccgaaatgctcaaacagaaagtggaggagctcacacgccagaacaatgaaactaagcttatgatgcagagaattcaggcggagtccgaaaacatcgtactcgaaaaacagacaatccagcagcggtgcgaagccctcaagattcaggctgacggctttaaggaccaactgcgaagtactaatgagcacctgcacaaacaaacaaagacagaacaggacttccagcgtaaaatcaaatgtctggaagaggatctggctaagtcccagaacctggtttccgaattcaaacaaaaatgcgatcaacaaaatataattattcagaatacgaagaaagaggtccggaacttgaacgccgagctgaacgcttctaaggaagagaaaagacggggcgagcagaaagttcagctgcagcaggcccaggttcaagagcttaataacagactgaagaaagtccaggacgagcttcacctgaaaacaattgaggagcagatgacacacagaaagatggtgttgttccaggaggagtctggaaaattcaaacaatcagctgaggagttccgcaagaaaatggagaaacttatggagtctaaggtgattactgagaatgatattagcggcattagactggattttgtgagcctccagcaggaaaacagcagagcgcaagagaatgccaagctgtgcgagacaaatattaaagaacttgaacggcagctgcagcagtatcgggagcagatgcaacagggacagcatatggaagctaaccactatcaaaagtgtcaaaagctggaagacgaactgatcgctcagaagagggaagtggagaacctgaagcagaaaatggaccagcagatcaaggagcatgagcaccagctcgtactcttgcagtgtgaaatccagaagaagagcacagctaaagactgtacattcaagcctgacttcgagatgactgtcaaggagtgtcaacattcaggagaattgtctagcaggaatacaggccacctgcatcccacacctcgaagccccctgctgaggtggacgcaggagccccagccacttgaggagaaatggcaacatcgggtcgtggagcagatccctaaagaagtgcagttccaaccgcccggcgccccattagagaaggaaaagagtcagcaatgctattcggaatacttttcacagacgtccaccgaactgcagattacttttgatgaaacaaatccaattacaaggcttagcgagatcgagaagattcgggaccaagcacttaacaacagcagacctcctgtccggtaccaggacaacgcctgtgagatggaactcgtgaaagtcctcacacctctggagattgctaagaataagcagtatgatatgcataccgaagtgaccaccctgaagcaagagaaaaatccggtgccttccgccgaagagtggatgctggagggctgtcgcgctagtggcgggttgaagaaaggcgatttcctcaaaaaaggcctggagcccgagacttttcagaactttgacggggaccatgcctgcagtgtgagggacgacgaattcaaatttcaaggtttaagacacaccgtcacggcccggcagctagtggaagcaaaacttctcgatatgcgaaccatcgagcagttgaggttgggcttaaaaacagtggaagaggttcaaaaaacactaaataagttcctgacgaaggctactagcattgcagggctgtatctggaaagtacgaaagagaagatctcttttgcttcagccgcagaaaggattattattgacaagatggtagctctcgcattcttggaagcccaggccgccacagggttcatcatagaccccatttccggccaaacttatagcgtggaggacgctgtgctgaagggagtggtggaccccgaatttcggatccggcttttagaggcagaaaaagccgctgtgggatatagctactcctccaagaccttaagtgtttttcaggcaatggaaaaccgaatgttggataggcagaaaggaaaacacatcctggaagcgcagatcgcatcagggggggtgattgaccctgtgagaggcatccgagtgccccccgagatcgctcttcaacagggcctgctcaacaacgcaatcctgcaatttctgcacgagcctagctcgaataccagagtgtttcccaatccaaataataaacaggccctctactattctgagcttctgcgcatgtgcgtttttgatgtcgagagccagtgctttcttttccctttcggagagcggaacatttctaatctcaatgttaaaaagacgcaccgaatcagtgtggtggacactaaaacagggtctgaactcacggtctacgaagccttccagcgtaatcttatcgagaaatccatatatctcgagctgtccggccagcagtaccagtggaaggaagcaatgttcttcgaaagctacgggcatagctcccacatgttaaccgatactaagacagggctgcattttaatattaatgaggcaatcgagcagggcaccatcgataaagctctcgtgaagaagtaccaggagggtctgattaccttgactgagctggctgattctctactgtctagactggtccccaagaaggacctgcactcaccagtggctggctattggttaaccgcaagtggagagagaattagcgtcctgaaagcctcccgaaggaatctggtcgacaggatcactgctctgagatgcctcgaagcccaggttagcactggaggcatcatcgaccccctgaccggcaagaagtacagagtcgctgaggcactgcacagagggctggtggatgagggctttgcccagcagttaaggcagtgtgagctagtgattacagggattggacacccgatcaccaataagatgatgagtgtggttgaggcagtaaatgccaacattataaacaaggagatgggtatcaggtgtctggaattccagtatctgacagggggcctcatcgaacctcaggttcattcccggctgtctatagaggaagccctgcaagttggcatcattgatgtgcttattgcaacgaagctaaaggatcagaagtcttacgtgagaaacattatttgtcctcaaaccaagagaaaactcacctacaaagaagctttagagaaagcggattttgacttccatacaggcctgaaactgctggaagtctctgagcccctgatgactggaatctccagcctgtattactcatcctag

SEQ ID NO: 120457 - DNA, 7949 bp, Artificial Sequence
  derived and/or modified sequence
atgcattcctctagttactcgtatagaagctccgactccgtgtttagcaataccaccagcactcggaccagtcttgattctaacgaaaacctgcttctggttcactgcggacctaccctaatcaacagctgtatctcatttggcagcgaatcttttgatggccacaggctggagatgcttcagcagatagctaaccgggtgcagcgggatagtgtgatctgcgaagacaagttgatcctcgctggaaacgccttacagtcagatagtaaaaggctggaatctggcgtgcagttccagaacgaggcagagattgcgggatatatcctggaatgcgagaatttactgagacagcatgtcattgatgtgcagatactcattgatggcaaatattatcaggccgaccaactggtccagcgagtggccaagctgcgagatgagattatggctctgaggaatgagtgttcttctgtctacagcaagggccgaattctgaccaccgagcaaaccaagctcatgattagcggtatcacccagtccctgaactcagggttcgcccagactctgcatccatccctaactagcggattgacccaatcattgaccccatccttgacaagcagtagcatgacctcgggcctgtcctcgggaatgacgtcccgtctgaccccgtctgtcacacctgcttacacaccaggattcccatccggtctcgtacctaatttcagctccggcgtggagcccaactcgctgcagacactgaagctcatgcagatacgtaagccactgttaaagtctagcttgttagaccagaacttgactgaggaagaaattaacatgaaatttgtccaggatctattaaactgggtcgacgagatgcaggttcaattggaccgaaccgagtgggggagcgatctgccctccgtggaaagtcacctggagaaccataaaaatgtccatcgcgcaatcgaggaatttgagtcatcactgaaggaagccaagatttccgaaattcaaatgacagctcccctcaaattaacgtacgccgagaagttacatcggctggaaagccagtatgctaaattacttaacacctccaggaatcaagaaaggcacctggacacactgcataacttcgtctcacgggcaactaatgagctgatatggttaaatgaaaaggaagaggaagaggtagcttacgactggagtgagagaaacaccaacattgctcgtaagaaggactaccacgcggaactcatgagggagcttgaccagaaggaggagaacatcaagtctgtgcaggaaatcgcggaacagctgctcttagagaatcaccctgctcggctgaccattgaagcatacagggctgccatgcagacccagtggtcatggatacttcagttgtgccagtgcgtggaacaacatatcaaagaaaacacagcctactttgagttcttcaatgatgccaaggaggctacggactacttgcgaaatctgaaagatgccatccagaggaagtacagctgcgataggagttcaagcatccacaagctggaagacttggtgcaggagagcatggaagagaaagaggaattgttgcagtataaatctacaattgccaacctcatgggcaaagcaaagactattatacagttaaaaccccgaaactctgactgccccctaaaaactagtattcccatcaaggccatctgtgactataggcagattgaaatcactatttacaaggacgacgaatgcgttttagcgaataattcacaccgagccaagtggaaggtaatcagtcctaccggcaacgaagccatggttccttctgtttgcttcaccgtgccacccccaaacaaggaagcggtggacctcgcaaacagaattgaacagcagtatcagaacgtcttgacgctttggcacgaatcccacatcaatatgaagtccgtagtcagttggcactatcttatcaatgaaatcgacaggataagggcctcgaatgtggcctccattaaaaccatgctcccaggagagcaccaacaagtgttgtctaatctgcagtcgcggtttgaggattttctcgaagactcccaggagtctcaagtgttttccgggagcgatatcacccagctggagaaggaggtgaatgtttgcaagcaatactatcaggagctgctgaaaagtgccgagcgggaagaacaggaagagtccgtctacaatctgtatatcagtgaagttcggaacattcgcctgagactggaaaactgtgaggacagactaattcgccagatccggactccactggagcgcgatgatttgcacgagtcagtgttcaggataacggagcaggaaaaactgaagaaggaactggagcgactgaaggatgatctcggcacgattacaaataagtgcgaggaattcttctcccaggccgcagcaagcagttccgtgccgaccctaagaagcgagctgaatgtggtgttgcagaatatgaaccaggtctacagcatgtcatcaacttacatagacaagctaaaaacagttaacctcgtgctcaagaatactcaggcggctgaagcgctcgttaagttgtacgagacaaagctctgtgaggaggaagccgttatcgctgataaaaacaatatcgagaatctgatcagtactttgaagcagtggcggtcagaggtggacgaaaaacgtcaggtcttccacgccttggaggacgagcttcagaaggccaaggccatcagtgacgaaatgtttaaaacctacaaagagcgagacctggatttcgattggcataaagagaaggctgatcaactcgtggagaggtggcagaacgttcatgttcagatcgacaatcggcttagagatctcgagggaattggcaagagcctgaagtattatagagacacatatcatcccctggatgactggattcagcaggtggagactactcaacgcaaaatccaagaaaatcaacccgagaattcaaagacacttgccacacagctcaaccagcagaaaatgctcgtcagcgagatcgagatgaagcaaagcaagatggacgagtgtcagaaatatgccgaacagtacagtgccacagttaaggattacgagcttcagactatgacctacagagctatggtcgacagccagcaaaaaagtccagtgaagagacggcgaatgcaatcgtccgcggatttgattatccaggagtttatggacctccggaccagatatactgccctcgtgactctaatgacacagtacatcaagtttgcgggagattcgttaaaacgtcttgaggaggaagaaatcaaaagatgtaaggagaccagcgagcacggtgcctatagcgacctcctccagcgccagaaggctactgtactggagaactccaaacttactggtaaaatcagtgaactcgagcggatggtggccgaacttaaaaaacagaagtcccgggtggaagaagagttgcctaaggtgagagaagcggcagagaatgagcttcgaaagcagcagaggaacgtggaggacatctcgctgcagaagataagggcagagtccgaagccaagcagtacaggcgggagttagagaccatcgtgcgggaaaaggaggctgccgagcgggagcttgagagggtgaggcaactgactattgaagctgaagctaagcgcgctgctgtcgaggaaaacttacttaatttcagaaaccaattggaggagaacactttcacccggcgtactttagaagatcatttaaaacggaaagacttatcattgaatgacttagagcagcagaaaaataaattgatggaagaactgcgcaggaagagagacaacgaagaagaactcctgaagctcattaaacagatggaaaaagaccttgctttccaaaagcaagtggcagagaagcagctgaaggaaaaacagaagattgagctcgaggcgagaaggaaaataactgaaattcagtatacctgcagagaaaatgctttacctgtgtgccccattacacaggctacgagctgcagggctgtaacaggccttcaacaggagcacgataaacagaaggccgaggagctgaagcaacaagtggacgagttgaccgcagcaaatagaaaggccgaacaggatatgcgcgagctgacctatgagttaaacgcactacagctggagaaaaccagttcggaagagaaggccagactgcttaaggataaactggatgagactaataacactctgcggtgcttaaagctggaactagagcgcaaagaccaggcggagaaaggttattcacaacagctgcgcgagcttggtcgccaacttaatcagacaacgggaaaagcagaagaggcgatgcaagaagcaagcgacctaaagaagatcaaaaggaattaccaactggaactggagtcactcaaccatgaaaagggcaaactgcagagggaagtagataggataaccagagcacatgcggtcgcagaaaaaaacatccagcatctgaacagtcagatccactccttcagggacgagaaggaattggagcgacttcagatatgtcagcgaaaaagcgaccatttgaaagaacaattcgaaaaatctcacgagcagctactgcagaatatcaaggctgagaaagagaacaacgataagatccagaggcttaatgaggagcttgaaaaaagtaacgagtgcgccgaaatgttgaaacagaaagtggaggaactaacacgccagaataacgagacaaaactgatgatgcagcgcattcaggcggagagtgagaatatcgttctggagaaacagacaatccagcaacgttgtgaagctctcaagatacaggctgacgggtttaaggatcagctgaggtctaccaatgaacatctgcacaaacaaactaaaactgagcaggattttcagcgtaagattaagtgcctggaagaagacttagctaaaagtcaaaatttggttagcgaattcaaacagaagtgcgatcaacagaacatcattattcagaacacgaaaaaggaggtgagaaatctgaacgcggaactgaacgcttccaaggaagaaaaacgacgaggcgagcagaaggtgcagcttcagcaagcacaggtgcaggagctgaataaccggctgaagaaagtgcaggacgagctgcatctaaaaactatagaggagcagatgacgcatagaaaaatggtgctgttccaggaagagagcggtaaattcaagcagtcggctgaagagtttcgcaagaaaatggagaaactcatggagtctaaagtaataaccgagaatgatatctcggggattcgcctggattttgtgagcttacaacaggagaattcgcgcgctcaagagaacgccaagctatgcgaaaccaacattaaggagctggaacgccaactgcagcaataccgcgaacagatgcaacaggggcagcacatggaggctaaccattatcagaagtgccaaaagttggaagacgagctcatagcacagaaacgcgaggttgagaacttgaaacagaagatggaccaacagattaaagaacacgagcaccaactggtcctactgcaatgtgaaatccagaagaaaagcaccgccaaagactgtacttttaagcccgattttgagatgaccgtgaaagagtgtcagcacagcggggagctctctagccgaaatactggccaccttcacccaacccccaggtctcctctcttacgctggacccaggagcctcagccactcgaagaaaagtggcaacatagagtggttgaacagattccaaaagaggtgcagttccagccgccaggcgctccactggagaaggagaaatcgcaacagtgctacagtgaatactttagtcaaacatcgacggagctgcagatcaccttcgatgagacaaatcctattaccagactgtccgagatagagaagatccgggatcaggcattgaataactctaggcccccagtgcgctatcaggataacgcttgtgaaatggagctggtaaaagtattgaccccgctggagatagccaagaacaagcagtatgatatgcatactgaggtcacaaccctaaagcaagaaaaaaaccccgtgccaagcgcagaggagtggatgttagaaggctgcagagcctctggcggactcaaaaagggcgactttctaaaaaaaggactagagcccgaaacctttcaaaattttgacggagaccacgcttgcagcgtgagggacgacgagtttaagttccagggtctccggcatactgtgactgcgcgacaacttgttgaagcgaagttgctggatatgcgcactattgagcagctgcgattggggctgaagacagtcgaggaggtccaaaagacgctgaataagttcctcaccaaagcaacaagcattgcgggtctatacctggagagcacgaaagaaaaaatttccttcgcaagtgccgctgagaggatcataatcgataaaatggtagctcttgctttcttggaagctcaggctgccacaggattcatcatcgatccaatctctggacagacatatagcgtggaagacgccgttttaaagggtgtggttgaccccgaattcagaattcggctcttggaggctgagaaagccgctgtcgggtattcatactcatctaagaccctatcagtctttcaagctatggagaaccggatgctggacaggcagaaaggtaaacacatcttagaggcccagatcgcctcaggaggggtgatagatccagtgcgaggcattagagtgccccctgagatcgccttgcagcaaggtctgttgaataatgctatcctccaattcctgcatgaaccaagctctaatactagggtatttcccaaccctaataacaaacaagcattgtactattcagaactcctccgaatgtgtgtcttcgacgtggagagccaatgttttctatttcctttcggcgaacgtaatatctccaacctcaatgttaagaagacccaccgtatttcggtcgtggataccaagaccggatcagagctcactgtgtatgaggcctttcagcgcaaccttattgagaaatctatttacctcgaactgtctgggcaacagtatcagtggaaggaagccatgttctttgagtcttatggccatagcagccacatgctgacggacacaaaaacgggtttgcactttaacataaacgaagcaatcgaacagggaacgatcgacaaggcactggtgaagaagtatcaggaaggccttatcacgctgaccgaattggccgacagcctgctgtctaggctcgttcccaagaaggatctgcattccccagtggcgggatattggttgacagcttcaggtgagaggatcagcgttctgaaggcctccagacgcaaccttgttgacagaatcacagcgcttcggtgcctggaggcccaggtgtccacgggcggtattattgatcctcttactggcaagaaataccgagtagctgaggcactgcataggggactagttgatgagggcttcgcacaacagctgaggcagtgcgagcttgtaattaccggtattggccacccgatcactaataagatgatgagcgtagttgaggcagttaatgcaaacatcatcaacaaagaaatggggatcagatgtctggagttccagtatttaaccggtggtcttatcgagcctcaggtgcattcaaggctgtccatagaggaggcacttcaggtgggtatcattgatgtcctgatcgcaactaagctcaaagaccaaaagtcatatgtacggaatattatttgtccccagaccaagcggaaactgacgtacaaagaggctctggagaaagctgacttcgatttccacacgggcctcaagttattggaggtaagcgaaccactgatgaccggcataagttcactctattactcctctta

SEQ ID NO: 120458 - DNA, 7950 bp, Artificial Sequence
  derived and/or modified sequence
atgcacagcagcagctacagctacagaagcagcgacagcgtgttcagcaacaccaccagcaccagaaccagcctggacagcaacgagaacctgctgctggtgcactgcggccccaccctgatcaacagctgcatcagcttcggcagcgagagcttcgacggccacagactggagatgctgcagcagatcgccaacagagtgcagagagacagcgtgatctgcgaggacaagctgatcctggccggcaacgccctgcagagcgacagcaagagactggagagcggcgtgcagttccagaacgaggccgagatcgccggctacatcctggagtgcgagaacctgctgagacagcacgtgatcgacgtgcagatcctgatcgacggcaagtactaccaggccgaccagctggtgcagagagtggccaagctgagagacgagatcatggccctgagaaacgagtgcagcagcgtgtacagcaagggcagaatcctgaccaccgagcagaccaagctgatgatcagcggcatcacccagagcctgaacagcggcttcgcccagaccctgcaccccagcctgaccagcggcctgacccagagcctgacccccagcctgaccagcagcagcatgaccagcggcctgagcagcggcatgaccagcagactgacccccagcgtgacccccgcctacacccccggcttccccagcggcctggtgcccaacttcagcagcggcgtggagcccaacagcctgcagaccctgaagctgatgcagatcagaaagcccctgctgaagagcagcctgctggaccagaacctgaccgaggaggagatcaacatgaagttcgtgcaggacctgctgaactgggtggacgagatgcaggtgcagctggacagaaccgagtggggcagcgacctgcccagcgtggagagccacctggagaaccacaagaacgtgcacagagccatcgaggagttcgagagcagcctgaaggaggccaagatcagcgagatccagatgaccgcccccctgaagctgacctacgccgagaagctgcacagactggagagccagtacgccaagctgctgaacaccagcagaaaccaggagagacacctggacaccctgcacaacttcgtgagcagagccaccaacgagctgatctggctgaacgagaaggaggaggaggaggtggcctacgactggagcgagagaaacaccaacatcgccagaaagaaggactaccacgccgagctgatgagagagctggaccagaaggaggagaacatcaagagcgtgcaggagatcgccgagcagctgctgctggagaaccaccccgccagactgaccatcgaggcctacagagccgccatgcagacccagtggagctggatcctgcagctgtgccagtgcgtggagcagcacatcaaggagaacaccgcctacttcgagttcttcaacgacgccaaggaggccaccgactacctgagaaacctgaaggacgccatccagagaaagtacagctgcgacagaagcagcagcatccacaagctggaggacctggtgcaggagagcatggaggagaaggaggagctgctgcagtacaagagcaccatcgccaacctgatgggcaaggccaagaccatcatccagctgaagcccagaaacagcgactgccccctgaagaccagcatccccatcaaggccatctgcgactacagacagatcgagatcaccatctacaaggacgacgagtgcgtgctggccaacaacagccacagagccaagtggaaggtgatcagccccaccggcaacgaggccatggtgcccagcgtgtgcttcaccgtgcccccccccaacaaggaggccgtggacctggccaacagaatcgagcagcagtaccagaacgtgctgaccctgtggcacgagagccacatcaacatgaagagcgtggtgagctggcactacctgatcaacgagatcgacagaatcagagccagcaacgtggccagcatcaagaccatgctgcccggcgagcaccagcaggtgctgagcaacctgcagagcagattcgaggacttcctggaggacagccaggagagccaggtgttcagcggcagcgacatcacccagctggagaaggaggtgaacgtgtgcaagcagtactaccaggagctgctgaagagcgccgagagagaggagcaggaggagagcgtgtacaacctgtacatcagcgaggtgagaaacatcagactgagactggagaactgcgaggacagactgatcagacagatcagaacccccctggagagagacgacctgcacgagagcgtgttcagaatcaccgagcaggagaagctgaagaaggagctggagagactgaaggacgacctgggcaccatcaccaacaagtgcgaggagttcttcagccaggccgccgccagcagcagcgtgcccaccctgagaagcgagctgaacgtggtgctgcagaacatgaaccaggtgtacagcatgagcagcacctacatcgacaagctgaagaccgtgaacctggtgctgaagaacacccaggccgccgaggccctggtgaagctgtacgagaccaagctgtgcgaggaggaggccgtgatcgccgacaagaacaacatcgagaacctgatcagcaccctgaagcagtggagaagcgaggtggacgagaagagacaggtgttccacgccctggaggacgagctgcagaaggccaaggccatcagcgacgagatgttcaagacctacaaggagagagacctggacttcgactggcacaaggagaaggccgaccagctggtggagagatggcagaacgtgcacgtgcagatcgacaacagactgagagacctggagggcatcggcaagagcctgaagtactacagagacacctaccaccccctggacgactggatccagcaggtggagaccacccagagaaagatccaggagaaccagcccgagaacagcaagaccctggccacccagctgaaccagcagaagatgctggtgagcgagatcgagatgaagcagagcaagatggacgagtgccagaagtacgccgagcagtacagcgccaccgtgaaggactacgagctgcagaccatgacctacagagccatggtggacagccagcagaagagccccgtgaagagaagaagaatgcagagcagcgccgacctgatcatccaggagttcatggacctgagaaccagatacaccgccctggtgaccctgatgacccagtacatcaagttcgccggcgacagcctgaagagactggaggaggaggagatcaagagatgcaaggagaccagcgagcacggcgcctacagcgacctgctgcagagacagaaggccaccgtgctggagaacagcaagctgaccggcaagatcagcgagctggagagaatggtggccgagctgaagaagcagaagagcagagtggaggaggagctgcccaaggtgagagaggccgccgagaacgagctgagaaagcagcagagaaacgtggaggacatcagcctgcagaagatcagagccgagagcgaggccaagcagtacagaagagagctggagaccatcgtgagagagaaggaggccgccgagagagagctggagagagtgagacagctgaccatcgaggccgaggccaagagagccgccgtggaggagaacctgctgaacttcagaaaccagctggaggagaacaccttcaccagaagaaccctggaggaccacctgaagagaaaggacctgagcctgaacgacctggagcagcagaagaacaagctgatggaggagctgagaagaaagagagacaacgaggaggagctgctgaagctgatcaagcagatggagaaggacctggccttccagaagcaggtggccgagaagcagctgaaggagaagcagaagatcgagctggaggccagaagaaagatcaccgagatccagtacacctgcagagagaacgccctgcccgtgtgccccatcacccaggccaccagctgcagagccgtgaccggcctgcagcaggagcacgacaagcagaaggccgaggagctgaagcagcaggtggacgagctgaccgccgccaacagaaaggccgagcaggacatgagagagctgacctacgagctgaacgccctgcagctggagaagaccagcagcgaggagaaggccagactgctgaaggacaagctggacgagaccaacaacaccctgagatgcctgaagctggagctggagagaaaggaccaggccgagaagggctacagccagcagctgagagagctgggcagacagctgaaccagaccaccggcaaggccgaggaggccatgcaggaggccagcgacctgaagaagatcaagagaaactaccagctggagctggagagcctgaaccacgagaagggcaagctgcagagagaggtggacagaatcaccagagcccacgccgtggccgagaagaacatccagcacctgaacagccagatccacagcttcagagacgagaaggagctggagagactgcagatctgccagagaaagagcgaccacctgaaggagcagttcgagaagagccacgagcagctgctgcagaacatcaaggccgagaaggagaacaacgacaagatccagagactgaacgaggagctggagaagagcaacgagtgcgccgagatgctgaagcagaaggtggaggagctgaccagacagaacaacgagaccaagctgatgatgcagagaatccaggccgagagcgagaacatcgtgctggagaagcagaccatccagcagagatgcgaggccctgaagatccaggccgacggcttcaaggaccagctgagaagcaccaacgagcacctgcacaagcagaccaagaccgagcaggacttccagagaaagatcaagtgcctggaggaggacctggccaagagccagaacctggtgagcgagttcaagcagaagtgcgaccagcagaacatcatcatccagaacaccaagaaggaggtgagaaacctgaacgccgagctgaacgccagcaaggaggagaagagaagaggcgagcagaaggtgcagctgcagcaggcccaggtgcaggagctgaacaacagactgaagaaggtgcaggacgagctgcacctgaagaccatcgaggagcagatgacccacagaaagatggtgctgttccaggaggagagcggcaagttcaagcagagcgccgaggagttcagaaagaagatggagaagctgatggagagcaaggtgatcaccgagaacgacatcagcggcatcagactggacttcgtgagcctgcagcaggagaacagcagagcccaggagaacgccaagctgtgcgagaccaacatcaaggagctggagagacagctgcagcagtacagagagcagatgcagcagggccagcacatggaggccaaccactaccagaagtgccagaagctggaggacgagctgatcgcccagaagagagaggtggagaacctgaagcagaagatggaccagcagatcaaggagcacgagcaccagctggtgctgctgcagtgcgagatccagaagaagagcaccgccaaggactgcaccttcaagcccgacttcgagatgaccgtgaaggagtgccagcacagcggcgagctgagcagcagaaacaccggccacctgcaccccacccccagaagccccctgctgagatggacccaggagccccagcccctggaggagaagtggcagcacagagtggtggagcagatccccaaggaggtgcagttccagccccccggcgcccccctggagaaggagaagagccagcagtgctacagcgagtacttcagccagaccagcaccgagctgcagatcaccttcgacgagaccaaccccatcaccagactgagcgagatcgagaagatcagagaccaggccctgaacaacagcagaccccccgtgagataccaggacaacgcctgcgagatggagctggtgaaggtgctgacccccctggagatcgccaagaacaagcagtacgacatgcacaccgaggtgaccaccctgaagcaggagaagaaccccgtgcccagcgccgaggagtggatgctggagggctgcagagccagcggcggcctgaagaagggcgacttcctgaagaagggcctggagcccgagaccttccagaacttcgacggcgaccacgcctgcagcgtgagagacgacgagttcaagttccagggcctgagacacaccgtgaccgccagacagctggtggaggccaagctgctggacatgagaaccatcgagcagctgagactgggcctgaagaccgtggaggaggtgcagaagaccctgaacaagttcctgaccaaggccaccagcatcgccggcctgtacctggagagcaccaaggagaagatcagcttcgccagcgccgccgagagaatcatcatcgacaagatggtggccctggccttcctggaggcccaggccgccaccggcttcatcatcgaccccatcagcggccagacctacagcgtggaggacgccgtgctgaagggcgtggtggaccccgagttcagaatcagactgctggaggccgagaaggccgccgtgggctacagctacagcagcaagaccctgagcgtgttccaggccatggagaacagaatgctggacagacagaagggcaagcacatcctggaggcccagatcgccagcggcggcgtgatcgaccccgtgagaggcatcagagtgccccccgagatcgccctgcagcagggcctgctgaacaacgccatcctgcagttcctgcacgagcccagcagcaacaccagagtgttccccaaccccaacaacaagcaggccctgtactacagcgagctgctgagaatgtgcgtgttcgacgtggagagccagtgcttcctgttccccttcggcgagagaaacatcagcaacctgaacgtgaagaagacccacagaatcagcgtggtggacaccaagaccggcagcgagctgaccgtgtacgaggccttccagagaaacctgatcgagaagagcatctacctggagctgagcggccagcagtaccagtggaaggaggccatgttcttcgagagctacggccacagcagccacatgctgaccgacaccaagaccggcctgcacttcaacatcaacgaggccatcgagcagggcaccatcgacaaggccctggtgaagaagtaccaggagggcctgatcaccctgaccgagctggccgacagcctgctgagcagactggtgcccaagaaggacctgcacagccccgtggccggctactggctgaccgccagcggcgagagaatcagcgtgctgaaggccagcagaagaaacctggtggacagaatcaccgccctgagatgcctggaggcccaggtgagcaccggcggcatcatcgaccccctgaccggcaagaagtacagagtggccgaggccctgcacagaggcctggtggacgagggcttcgcccagcagctgagacagtgcgagctggtgatcaccggcatcggccaccccatcaccaacaagatgatgagcgtggtggaggccgtgaacgccaacatcatcaacaaggagatgggcatcagatgcctggagttccagtacctgaccggcggcctgatcgagccccaggtgcacagcagactgagcatcgaggaggccctgcaggtgggcatcatcgacgtgctgatcgccaccaagctgaaggaccagaagagctacgtgagaaacatcatctgcccccagaccaagagaaagctgacctacaaggaggccctggagaaggccgacttcgacttccacaccggcctgaagctgctggaggtgagcgagcccctgatgaccggcatcagcagcctgtactacagcagctag

SEQ ID NO: 120459 - DNA, 8999 bp, Artificial Sequence
  derived and/or modified sequence
aatattcagctgccacttttcaccgttagaagtagagctttttccagacctcctaccttttagtctactttgaaaggtgaaagaaagaacatcgtttcaggaataaaaatgcacagtagtagttatagttaccgtagcagtgattctgtgtttagtaacactaccagcactcgaaccagtcttgattcaaatgaaaatcttctcttggttcattgtggtccaacactgatcaactcttgcattagcttcggcagtgaatcctttgatggacacaggttagaaatgttgcaacagattgccaacagagttcagagggacagtgtcatctgtgaagacaaactgattcttgctggaaatgctcttcagtctgattctaaaagattagaatcaggagtgcagtttcagaatgaagcagaaattgctgggtatatacttgaatgtgagaaccttttacgccagcatgtaattgatgtacagattcttattgatggaaaatactaccaggcagatcaattggtacagagggttgcaaaactgcgtgacgaaattatggccttaaggaacgaatgttcttctgtgtacagcaaaggacgcatactgacaacagaacagacaaagctcatgatatcaggaatcactcaaagtttaaactcaggatttgcacagaccttacaccctagtctgacctcagggctgacccagagtttaacaccttccctaacctcttctagtatgacttctggcctgtcatcagggatgacttcccgcctgactccatctgtcactccagcttatacacctggtttcccatcaggattagttccaaatttcagttcaggagtagagccaaattcattgcaaactttgaagttgatgcagatccgaaaaccccttctaaagtcttctttgctggatcaaaatttaacagaagaagaaatcaatatgaaatttgttcaggatcttttgaattgggttgatgagatgcaggtacaactggaccgcactgagtggggctcagatttgccaagtgttgaaagccatttagaaaatcataaaaatgttcatagagctattgaagaatttgaatctagtctcaaagaagctaaaatcagtgagattcaaatgacagcacctcttaaactgacttatgcagaaaagttgcacagattagagagtcagtatgcaaaactcttgaatacatccaggaatcaagaacggcaccttgatacactccataattttgtaagtcgtgcgactaatgaacttatttggttgaatgaaaaagaagaggaggaagttgcttatgactggagtgagagaaacaccaacatagctaggaaaaaagattatcatgctgaattaatgagagaacttgatcaaaaggaagaaaatattaaatcagttcaggagatagcagagcagctacttctagaaaatcatccagcccggttaactattgaggcctacagagcggcaatgcagacgcagtggagctggatcttacagctctgccagtgtgtggagcagcacataaaggagaacacagcgtatttcgagtttttcaatgatgccaaagaagctactgattacttaaggaatctaaaagatgccattcagcggaagtacagctgtgatagatcaagcagcattcacaagctagaagaccttgttcaggaatcaatggaagagaaagaagaacttctgcagtacaaaagcactatagcaaacctaatgggaaaagcaaaaacaataattcaactgaagccaaggaattctgactgtccactcaaaacttctattccgatcaaagctatctgtgactacagacaaattgagataaccatttacaaagacgatgaatgtgttttggcgaataactctcatcgtgctaaatggaaggtcattagtcctactgggaatgaggctatggtcccatctgtgtgcttcaccgttcctccaccaaacaaagaagcggtggaccttgccaacagaattgagcaacagtatcagaatgtcctgactctttggcatgagtctcacataaacatgaagagtgtagtatcctggcattatctcatcaatgaaattgatagaattcgagctagcaatgtggcttcaataaagacaatgctacctggtgaacatcagcaagttctaagtaatctacaatctcgttttgaagattttctggaagatagccaggaatcccaagtcttttcaggctcagatataacacaactggaaaaggaggttaatgtatgtaagcagtattatcaagaacttcttaaatctgcagaaagagaggagcaagaggaatcagtttataatctctacatctctgaagttcgaaacattagacttcggttagagaactgtgaagatcggctgattagacagattcgaactcccctggaaagagatgatttgcatgaaagtgtgttcagaatcacagaacaggagaaactaaagaaagagctggaacgacttaaagatgatttgggaacaatcacaaataagtgtgaggagtttttcagtcaagcagcagcctcttcatcagtccctaccctacgatcagagcttaatgtggtccttcagaacatgaaccaagtctattctatgtcttccacttacatagataagttgaaaactgttaacttggtgttaaaaaacactcaagctgcagaagccctcgtaaaactctatgaaactaaactgtgtgaagaagaagcagttatagctgacaagaataatattgagaatctaataagtactttaaagcaatggagatctgaagtagatgaaaagagacaggtattccatgccttagaggatgagttgcagaaagctaaagccatcagtgatgaaatgtttaaaacgtataaagaacgggaccttgattttgactggcacaaagaaaaagcagatcaattagttgaaaggtggcaaaatgttcatgtgcagattgacaacaggttacgggacttagagggcattggcaaatcactgaagtactacagagacacttaccatcctttagatgattggatccagcaggttgaaactactcagagaaagattcaggaaaatcagcctgaaaatagtaaaaccctagccacacagttgaatcaacagaagatgctggtgtccgaaatagaaatgaaacagagcaaaatggacgagtgtcaaaaatatgcagaacagtactcagctacagtgaaggactatgaattacaaacaatgacctaccgggccatggtagattcacaacaaaaatctccagtgaaacgccgaagaatgcagagttcagcagatctcattattcaagagttcatggacctaaggactcgatatactgccctggtcactctcatgacacaatatattaaatttgctggtgattcattgaagaggctggaagaggaggagattaaaaggtgtaaggagacttctgaacatggggcatattcagatctgcttcagcgtcagaaggcaacagtgcttgagaatagcaaacttacaggaaagataagtgagttggaaagaatggtagctgaactaaagaaacaaaagtcccgagtagaggaagaacttccgaaggtcagggaggctgcagaaaatgaattgagaaagcagcagagaaatgtagaagatatctctctgcagaagataagggctgaaagtgaagccaagcagtaccgcagggaacttgaaaccattgtgagagagaaggaagccgctgaaagagaactggagcgggtgaggcagctcaccatagaggccgaggctaaaagagctgccgtggaagagaacctcctgaattttcgcaatcagttggaggaaaacacctttaccagacgaacactggaagatcatcttaaaagaaaagatttaagtctcaatgatttggagcaacaaaaaaataaattaatggaagaattaagaagaaagagagacaatgaggaagaactcttgaagctgataaagcagatggaaaaagaccttgcatttcagaaacaggtagcagagaaacagttgaaagaaaagcagaaaattgaattggaagcaagaagaaaaataactgaaattcagtatacatgtagagaaaatgcattgccagtgtgtccgatcacacaggctacatcatgcagggcagtaacgggtctccagcaagaacatgacaagcagaaagcagaagaactcaaacagcaggtagatgaactaacagctgccaatagaaaggctgaacaagacatgagagagctgacatatgaacttaatgccctccagcttgaaaaaacgtcatctgaggaaaaggctcgtttgctaaaagataaactagatgaaacaaataatacactcagatgccttaagttggagctggaaaggaaggatcaggcggagaaagggtattctcaacaactcagagagcttggtaggcaattgaatcaaaccacaggtaaagctgaagaagccatgcaagaagctagtgatctcaagaaaataaagcgcaattatcagttagaattagaatctcttaatcatgaaaaagggaaactacaaagagaagtagacagaatcacaagggcacatgctgtagctgagaagaatattcagcatttaaattcacaaattcattcttttcgagatgagaaagaattagaaagactacaaatctgccagagaaaatcagatcatctaaaagaacaatttgagaaaagccatgagcagttgcttcaaaatatcaaagctgaaaaagaaaataatgataaaatccaaaggctcaatgaagaattggagaaaagtaatgagtgtgcagagatgctaaaacaaaaagtagaggagcttactaggcagaataatgaaaccaaattaatgatgcagagaattcaggcagaatcagagaatatagttttagagaaacaaactatccagcaaagatgtgaagcactgaaaattcaggcagatggttttaaagatcagctacgcagcacaaatgaacacttgcataaacagacaaaaacagagcaggattttcaaagaaaaattaaatgcctagaagaagacctggcgaaaagtcaaaatttggtaagtgaatttaagcaaaagtgtgaccaacagaacattatcatccagaataccaagaaagaagttagaaatctgaatgcggaactgaatgcttccaaagaagagaagcgacgcggggagcagaaagttcagctacaacaagctcaggtgcaagagttaaataacaggttgaaaaaagtacaagacgaattacacttaaagaccatagaggagcagatgacccacagaaagatggttctgtttcaggaagaatctggtaaattcaaacaatcagcagaggagtttcggaagaagatggaaaaattaatggagtccaaagtcatcactgaaaatgatatttcaggcattaggcttgactttgtgtctcttcaacaagaaaactctagagcccaagaaaatgctaagctttgtgaaacaaacattaaagaacttgaaagacagcttcaacagtatcgtgaacaaatgcagcaagggcagcacatggaagcaaatcattaccaaaaatgtcagaaacttgaggatgagctgatagcccagaagcgtgaggttgaaaacctgaagcaaaaaatggaccaacagatcaaagagcatgaacatcaattagttttgctccagtgtgaaattcaaaaaaagagcacagccaaagactgtaccttcaaaccagattttgagatgacagtgaaggagtgccagcactctggagagctgtcctctagaaacactggacaccttcacccaacacccagatcccctctgttgagatggactcaagaaccacagccattggaagagaagtggcagcatcgggttgttgaacagatacccaaagaagtccaattccagccaccaggggctccactcgagaaagagaaaagccagcagtgttactctgagtacttttctcagacaagcaccgagttacagataacttttgatgagacaaaccccattacaagactgtctgaaattgagaagataagagaccaagccctgaacaattctagaccacctgttaggtatcaagataacgcatgtgaaatggaactggtgaaggttttgacacccttagagatagctaagaacaagcagtatgatatgcatacagaagtcacaacattaaaacaagaaaagaacccagttcccagtgctgaagaatggatgcttgaagggtgcagagcatctggtggactcaagaaaggggatttccttaagaagggcttagaaccagagaccttccagaactttgatggtgatcatgcatgttcagtcagggatgatgaatttaaattccaagggcttaggcacactgtgactgccaggcagttggtggaagctaagcttctggacatgagaacaattgagcagctgcgactcggtcttaagactgttgaagaagttcagaaaactcttaacaagtttctgacgaaagccacctcaattgcagggctttacctagaatctacaaaagaaaagatttcatttgcctcagcggccgagagaatcataatagacaaaatggtggctttggcatttttagaagctcaggctgcaacaggttttataattgatcccatttcaggtcagacatattctgttgaagatgcagttcttaaaggagttgttgaccccgaattcagaattaggcttcttgaggcagagaaggcagctgtgggatattcttattcttctaagacattgtcagtgtttcaagctatggaaaatagaatgcttgacagacaaaaaggtaaacatatcttggaagcccagattgccagtgggggtgtcattgaccctgtgagaggcattcgtgttcctccagaaattgctctgcagcaggggttgttgaataatgccatcttacagtttttacatgagccatccagcaacacaagagttttccctaatcccaataacaagcaagctctgtattactcagaattactgcgaatgtgtgtatttgatgtagagtcccaatgctttctgtttccatttggggagaggaacatttccaatctcaatgtcaagaaaacacatagaatttctgtagtagatactaaaacaggatcagaattgaccgtgtatgaggctttccagagaaacctgattgagaaaagtatatatcttgaactttcagggcagcaatatcagtggaaggaagctatgttttttgaatcctatgggcattcttctcatatgctgactgatactaaaacaggattacacttcaatattaatgaggctatagagcagggaacaattgacaaagccttggtcaaaaagtatcaggaaggcctcatcacacttacagaacttgctgattctttgctgagccggttagtccccaagaaagatttgcacagtcctgttgcagggtattggctgactgctagtggggaaaggatctctgtactaaaagcctcccgtagaaatttggttgatcggattactgccctccgatgccttgaagcccaagtcagtacagggggcataattgatcctcttactggcaaaaagtaccgggtggccgaagctttgcatagaggcctggttgatgaggggtttgcccagcagctgcgacagtgtgaattagtaatcacagggattggccatcccatcactaacaaaatgatgtcagtggtggaagctgtgaatgcaaatattataaataaggaaatgggaatccgatgtttggaatttcagtacttgacaggagggttgatagagccacaggttcactctcggttatcaatagaagaggctctccaagtaggtattatagatgtcctcattgccacaaaactcaaagatcaaaagtcatatgtcagaaatataatatgccctcagacaaaaagaaagttgacatataaagaagccttagaaaaagctgattttgatttccacacaggacttaaactgttagaagtatctgagcccctgatgacaggaatttctagcctctactattcttcctaatgggacatgtttaaataactgtgcaaggggtgatgcaggctggttcatgccactttttcagagtatgatgatatcggctacatatgcagtctgtgaattatgtaacatactctatttcttgagggctgcaaattgctaagtgctcaaaatagagtaagttttaaattgaaaattacataagatttaatgcccttcaaatggtttcatttagccttgagaatggttttttgaaacttggccacactaaaatgtttttttttttacgtagaatgtgggataaacttgatgaactccaagttcacagtgtcatttcttcagaactccccttcattgaatagtgatcatttattaaatgataaattgcactcgctgaaagagcacgtcatgaagcaccatggaatcaaagagaaagatataaattcgttcccacagccttcaagctgcagtgttttagattgcttcaaaaaatgaaaaagttttgcctttttctgtatatagtgaccttctttgcatattaaaatgtttaccacaatgtcccatttctagttaagtcttcgcacttgaaagctaacattatgaatattatgtgttggaggaggggaaggattttcttcattctgtgtattttccttacatgtacagtagacgttctctattctatcagccttctatggtacctttttgtcaggacaattaggattgtaatgctaatgcaaaggcagcaattcaaagatcttctagtgcctcatgaataaagttgagatttaaaatttgtaacattgatggaacagctgggaggttagaccaatcattaaggaatgtatgccatagctttctttgctaccataaacattttggaggtgcatctgctatgtgacatggtaaatatggttaagtgaatgaataaaatgttttagtaacctgtgtgtgatgaaaaaaaa

SEQ ID NO: 120460 - protein, 456 aa, Artificial Sequence
  derived and/or modified sequence
TNPGIVARITQKGLDYACQQGVLTLQKELEKITIPNFSGNFKIKYLGKGQYSFFSMVIQGFNLPNSQIRPLPDKGLDLSIRDASIKIRGKWKARKNFIKLGGNFDLSVEGISILAGLNLGYDPASGHSTVTCSSCSSGINTVRIHISGSSLGWLIQLFRKRIESLLQKSMTRKICEVVTSTVSSKLQPYFQTLPVTTKLDKVAGVDYSLVAPPRATANNLDWLLKGEFFSLAHRSPPPFAPPALAFPSDHDRMVYLGISEYFFNTAGFVYQKAGALNLTLRDDMIPKESKFRLTTKFFGILIPQVAKMFPDMQMQLFIWASLPPKLTMKPSGLDLIFVLDTQAFAILPNSSLDPLFLLEMNLNLSVVVGAKSDRLIGELRLDKLLLELKHSDIGPFSVESLQSVINYVMPTIVLPVINKKLQKGFPLPLPAYIELFNLTLQPYQDFLLFGADVHYS

SEQ ID NO: 120461 - protein, 445 aa, Artificial Sequence
  derived and/or modified sequence
QKGLDYACQQGVAVLQKELEKIRIPDVSGKFKLRPFGKGHYNFHSLVVRSFQLPNPQIRLQPNVGLRVSISNANVRIGGRWKARKGFIKVRGKFDLSVEGVSISADLKLGSVPASGRATVTCSSCSSNINRARLRSQASWGGWLKLFHKRIESSLRNTMNSKICQVLTSSVSSKLQPYVETLPLKERLDSVAGIDYSLVAPPRATADSLDMQLKGEFYNVARPSPPPFMPPPMAIPSLHDRMIYLAISDYLFNTAALVYQQAGAFGLTLRDDMIPKESKSRLTTKFLGKALPQVAKMFPNMNVQLTLSVSSPPHLTTRPTGIALTAAVDLQAFAILPNSSLASLFLLGLKLNTSAKIGTKADKLVGELTLGRLILELKHSNIGSFPVQLLQALMDYVLSAVVLPKVNEKLQRGLPLPMPRKVQLYDLVLQPHQDFLLLGANVQHG

SEQ ID NO: 120462 - protein, 456 aa, Artificial Sequence
  derived and/or modified sequence
VNPGVVVRISQKGLDYASQQGTAALQKELKRIKIPDYSDSFKIKHLGKGHYSFYSMDIREFQLPSSQISMVPNVGLKFSISNANIKISGKWKAQKRFLKMSGNFDLSIEGMSISADLKLGSNPTSGKPTITCSSCSSHINSVHVHISKSKVGWLIQLFHKKIESALRNKMNSQVCEKVTNSVSSELQPYFQTLPVMTKIDSVAGINYGLVAPPATTAETLDVQMKGEFYSENHHNPPPFAPPVMEFPAAHDRMVYLGLSDYFFNTAGLVYQEAGVLKMTLRDDMIPKESKFRLTTKFFGTFLPEVAKKFPNMKIQIHVSASTPPHLSVQPTGLTFYPAVDVQAFAVLPNSSLASLFLIGMHTTGSMEVSAESNRLVGELKLDRLLLELKHSNIGPFPVELLQDIMNYIVPILVLPRVNEKLQKGFPLPTPARVQLYNVVLQPHQNFLLFGADVVYK

SEQ ID NO: 120463 - protein, 456 aa, Artificial Sequence
  derived and/or modified sequence
TDPGFVAMISQKGLDFACQQGVVELQKELQAISVPDFSGVFKIKHLGKGSYEFYSMAVDGFHIPNPKIEMLPSDGLRVFIKDASIKINGKWMSRKNFLKAGGNFELSIQGVSISTDLILGSDSSGHITTICSNCDSHIDSVHIKISGSMLGWLIRLFHRKIETSLKNIIYKKICKIVRDSVSSKLQPYLKTLSVITRVDDVTSVDYSLLAPLTTTNQFLEGQLKGEFFWRGHRDPLPIHPPVMRFVPNGAYMVCMGISDYFFNTEVLAYQQSGTLKMTLGGQLLSNNGRFQLNTDFLRTFLPKVAKMFPSMGVQLLISAPVPVHLSIQPSGLSFNPKLETQAFVVLPNASLVPLFVLGMKTNASLEVDAEENRLVGEMKLGSRWLLELKESKFGPFKVEYLEDVINYLVSTLVLPKINERLRRGFPLPLPAGIRFSHFTFYPYQNFLLLEADLHLI

SEQ ID NO: 120464 - protein, 487 aa, Artificial Sequence
  derived and/or modified sequence
MRENMARGPCNAPRWASLMVLVAIGTAVTAAVNPGVVVRISQKGLDYASQQGTAALQKELKRIKIPDYSDSFKIKHLGKGHYSFYSMDIREFQLPSSQISMVPNVGLKFSISNANIKISGKWKAQKRFLKMSGNFDLSIEGMSISADLKLGSNPTSGKPTITCSSCSSHINSVHVHISKSKVGWLIQLFHKKIESALRNKMNSQVCEKVTNSVSSELQPYFQTLPVMTKIDSVAGINYGLVAPPATTAETLDVQMKGEFYSENHHNPPPFAPPVMEFPAAHDRMVYLGLSDYFFNTAGLVYQEAGVLKMTLRDDMIPKESKFRLTTKFFGTFLPEVAKKFPNMKIQIHVSASTPPHLSVQPTGLTFYPAVDVQAFAVLPNSSLASLFLIGMHTTGSMEVSAESNRLVGELKLDRLLLELKHSNIGPFPVELLQDIMNYIVPILVLPRVNEKLQKGFPLPTPARVQLYNVVLQPHQNFLLFGADVVYK

SEQ ID NO: 120465 - DNA, 1464 bp, Artificial Sequence
  derived and/or modified sequence
atgagagagaacatggccagaggcccctgcaacgcccccagatgggccagcctgatggtgctggtggccatcggcaccgccgtgaccgccgccgtgaaccccggcgtggtggtgagaatcagccagaagggcctggactacgccagccagcagggcaccgccgccctgcagaaggagctgaagagaatcaagatccccgactacagcgacagcttcaagatcaagcacctgggcaagggccactacagcttctacagcatggacatcagagagttccagctgcccagcagccagatcagcatggtgcccaacgtgggcctgaagttcagcatcagcaacgccaacatcaagatcagcggcaagtggaaggcccagaagagattcctgaagatgagcggcaacttcgacctgagcatcgagggcatgagcatcagcgccgacctgaagctgggcagcaaccccaccagcggcaagcccaccatcacctgcagcagctgcagcagccacatcaacagcgtgcacgtgcacatcagcaagagcaaggtgggctggctgatccagctgttccacaagaagatcgagagcgccctgagaaacaagatgaacagccaggtgtgcgagaaggtgaccaacagcgtgagcagcgagctgcagccctacttccagaccctgcccgtgatgaccaagatcgacagcgtggccggcatcaactacggcctggtggccccccccgccaccaccgccgagaccctggacgtgcagatgaagggcgagttctacagcgagaaccaccacaaccccccccccttcgccccccccgtgatggagttccccgccgcccacgacagaatggtgtacctgggcctgagcgactacttcttcaacaccgccggcctggtgtaccaggaggccggcgtgctgaagatgaccctgagagacgacatgatccccaaggagagcaagttcagactgaccaccaagttcttcggcaccttcctgcccgaggtggccaagaagttccccaacatgaagatccagatccacgtgagcgccagcacccccccccacctgagcgtgcagcccaccggcctgaccttctaccccgccgtggacgtgcaggccttcgccgtgctgcccaacagcagcctggccagcctgttcctgatcggcatgcacaccaccggcagcatggaggtgagcgccgagagcaacagactggtgggcgagctgaagctggacagactgctgctggagctgaagcacagcaacatcggccccttccccgtggagctgctgcaggacatcatgaactacatcgtgcccatcctggtgctgcccagagtgaacgagaagctgcagaagggcttccccctgcccacccccgccagagtgcagctgtacaacgtggtgctgcagccccaccagaacttcctgctgttcggcgccgacgtggtgtacaagtag

SEQ ID NO: 120466 - DNA, 1464 bp, Artificial Sequence
  derived and/or modified sequence
atgcgagaaaacatggcccgcggcccctgcaatgcccctcgatgggcatctctcatggtcctggtcgcgatcgggaccgccgttacagcagcagtaaacccaggtgtggtggttagaatttcccagaaggggctggattacgctagccagcagggcaccgctgctctgcaaaaagaattgaagaggattaagatccccgattacagcgactcctttaagattaaacatttggggaagggccattattccttctatagtatggacataagggaatttcagttacctagcagccagatctcaatggtccccaacgtcggcttgaaattctccatctccaacgcgaacataaagataagtgggaaatggaaagcacagaagaggttcttaaagatgtctgggaacttcgatctctcaatcgagggtatgagcattagcgccgatcttaaattgggcagcaatcccacttcgggcaagccgacgataacatgtagctcctgttcctcccacatcaactcggttcacgtccacataagcaaatcgaaagttggctggctcattcaactttttcacaagaaaattgaatccgctctgcggaacaagatgaactcccaggtgtgcgagaaggtgactaactctgtgtctagtgaattacagccgtacttccagacactccccgtgatgactaaaattgattctgtcgctggaatcaattacggactggtggctccgcccgccacaactgcagaaacacttgatgtgcagatgaagggtgaattttattctgaaaatcaccacaaccccccgccctttgccccccctgtgatggaattcccggcggcccacgacagaatggtgtatctggggctgagcgattattttttcaataccgcgggcttggtgtatcaggaggccggagtattaaagatgaccctaagagacgatatgatccctaaggagagtaagtttcgcctgacaaccaagttcttcggtacatttttgcccgaggtggcgaagaagttccccaacatgaaaatacagattcacgtttccgccagcacacctccgcacctgagcgtgcagccgacaggtttaacgttctatccagcagttgacgttcaggcatttgcagttttgcccaatagtagcctggcaagtctgttcctgattggaatgcacaccactgggagtatggaggtgagcgcagagtcgaaccgcttggtcggcgaactcaagctagaccgcctgttgctggagctcaagcatagtaatattggacccttccctgttgaactgcttcaggatattatgaactacatcgtccctatcctcgtcctccctcgcgtgaacgagaaactccaaaagggctttcccctgcccactccagctagagtgcagctctacaacgtggtgttgcagcctcatcaaaatttccttctgttcggtgccgacgtagtctataaatag

SEQ ID NO: 120467 - DNA, 1874 bp, Artificial Sequence
  derived and/or modified sequence
acattctactgacttgcatttccccagccgactcttttatagctccctggttcaacctcaaggccttgaggttttggcagctctggaggatgagagagaacatggccaggggcccttgcaacgcgccgagatgggcgtccctgatggtgctggtcgccataggcaccgccgtgacagcggccgtcaaccctggcgtcgtggtcaggatctcccagaagggcctggactacgccagccagcaggggacggccgctctgcagaaggagctgaagaggatcaagattcctgactactcagacagctttaagatcaagcatcttgggaaggggcattatagcttctacagcatggacatccgtgaattccagcttcccagttcccagataagcatggtgcccaatgtgggccttaagttctccatcagcaacgccaatatcaagatcagcgggaaatggaaggcacaaaagagattcttaaaaatgagcggcaattttgacctgagcatagaaggcatgtccatttcggctgatctgaagctgggcagtaaccccacgtcaggcaagcccaccatcacctgctccagctgcagcagccacatcaacagtgtccacgtgcacatctcaaagagcaaagtggggtggctgatccaactcttccacaaaaaaattgagtctgcgcttcgaaacaagatgaacagccaggtctgcgagaaagtgaccaattctgtatcctccgagctgcaaccttatttccagactctgccagtaatgaccaaaatagattctgtggctggaatcaactatggtctggtggcacctccagcaaccacggctgagaccctggatgtacagatgaagggggagttttacagtgagaaccaccacaatccacctccctttgctccaccagtgatggagtttcccgctgcccatgaccgcatggtatacctgggcctctcagactacttcttcaacacagccgggcttgtataccaagaggctggggtcttgaagatgacccttagagatgacatgattccaaaggagtccaaatttcgactgacaaccaagttctttggaaccttcctacctgaggtggccaagaagtttcccaacatgaagatacagatccatgtctcagcctccaccccgccacacctgtctgtgcagcccaccggccttaccttctaccctgccgtggatgtccaggcctttgccgtcctccccaactcctccctggcttccctcttcctgattggcatgcacacaactggttccatggaggtcagcgccgagtccaacaggcttgttggagagctcaagctggataggctgctcctggaactgaagcactcaaatattggccccttcccggttgaattgctgcaggatatcatgaactacattgtacccattcttgtgctgcccagggttaacgagaaactacagaaaggcttccctctcccgacgccggccagagtccagctctacaacgtagtgcttcagcctcaccagaacttcctgctgttcggtgcagacgttgtctataaatgaaggcaccaggggtgccgggggctgtcagccacacctgttcctgatgggctgtggggcaccggctgcctttccccagggaatcctctccagatcttaaccaagagccccttgcaaacttcttcgactcagattcagaaatgatctaaacacgaggaaacattattcattggaaaagtgcatggtgtgtattttagggattatgagcttctttcaagggctaaggctgcagagatatttcctccaggaatcgtgtttcaattgtaaccaagaaatttccatttgtgcttcatgaaaaaaaacttctggtttttttcatgtgga

SEQ ID NO: 120468 - DNA, 1464 bp, Artificial Sequence
  derived and/or modified sequence
atgagggagaacatggcccggggcccctgcaatgccccccgctgggccagcctgatggtgctggtggccatcggcacagctgtgacagctgctgtgaaccctggggtggtggtgcgcatcagccagaagggcctggactatgccagccagcagggcacagctgccctgcagaaggagctgaagaggatcaagatcccagactacagcgacagcttcaagatcaagcacctgggcaagggccactacagcttctacagcatggacatccgggagttccagctgcccagcagccagatctccatggtgcccaacgtgggcctgaagttcagcatcagcaatgccaacatcaagatcagcggcaagtggaaggcccagaagcgcttcctgaagatgagcggcaactttgacctgagcattgagggcatgagcatctctgctgacctgaagctgggcagcaaccccaccagcggcaagcccaccatcacctgcagcagctgcagcagccacatcaacagcgtgcacgtgcacatcagcaagagcaaggtgggctggctgatccagctgttccacaagaagattgaaagtgccctgaggaacaagatgaacagccaggtgtgtgagaaggtgaccaacagcgtgtcctctgagctgcagccctacttccagaccctgcctgtgatgaccaagattgacagcgtggccggcatcaactacggcctggtggcccccccagccaccacagctgagaccctggatgtgcagatgaagggggagttctacagcgagaaccaccacaaccccccaccatttgcccctcctgtgatggagttccctgctgcccatgacaggatggtgtacctgggcctgagtgactacttcttcaacacagctggcctggtgtaccaggaggccggcgtgctgaagatgaccctgagagatgacatgatccccaaggagagcaagttccggctgaccaccaagttcttcggcaccttcctgcctgaggtggccaagaagttccccaacatgaagatccagatccacgtgtctgccagcaccccaccccacctgtctgtgcagcccaccggcctgaccttctacccagctgtggatgtgcaggcctttgctgtgctgcccaacagcagcctggccagcctcttcctgattggcatgcacaccaccggctccatggaggtgtctgctgagagcaaccggctggtgggggagctgaagctggaccggctgctgctggagctgaagcacagcaacatcggccccttccctgtggagctgctgcaggacatcatgaactacatcgtgcccatcctggtgctgccccgggtgaatgagaagctgcagaagggcttccccctgcccaccccagcccgggtgcagctgtacaacgtggtgctgcagccccaccagaacttcctgctgtttggagcagatgtggtgtacaagtag

SEQ ID NO: 120469 - DNA, 1464 bp, Artificial Sequence
  derived and/or modified sequence
atgcgggagaacatggcccggggcccctgcaacgccccccggtgggccagtctgatggtgttagtagctattggcacagccgtgaccgccgccgtgaacccgggcgtggtggttcgtatctcacagaaaggcctggattacgcgagccaacaggggaccgctgccctccagaaggaactgaaaagaatcaaaatcccagattactccgattcttttaaaatcaagcacttgggaaaagggcactactccttctacagtatggacatacgtgagttccagctcccttcatctcagattagcatggtgcccaacgttggactgaagtttagcattagtaatgcgaatatcaaaatctctggaaagtggaaggcacaaaaacgatttcttaaaatgagcggtaatttcgacctgagcattgagggcatgtcaatttctgcagacctgaagttggggagtaaccccacctccggcaagcctacaattacctgtagcagttgttccagccatataaattctgtgcatgtacatatcagcaaaagtaaagttggatggctcatacagctgtttcacaagaagatcgaaagcgctttgcgtaataagatgaactcccaggtttgtgaaaaagtgacaaattctgtatcgagtgaattgcaaccctacttccaaactctgcctgtaatgactaaaattgactcagttgccggcataaattatggcctcgtcgcaccacccgcaactactgccgaaacactggacgtgcaaatgaagggcgaattttatagcgagaatcatcacaatccaccaccatttgctcctccagtaatggagtttcccgccgcccatgaccgcatggtgtacctcgggcttagtgattactttttcaacactgctgggctcgtgtaccaagaagccggagtcctgaaaatgaccctgcgcgacgacatgatccccaaagaatccaagttccggctcaccaccaaattcttcggcacattcctccccgaggtggctaaaaagtttcccaacatgaagattcaaattcatgtcagcgctagcactccacctcacctgtccgtccaaccgacaggtctcacattttaccccgccgttgacgttcaggctttcgccgttctccccaacagttctctcgcttccttgttcctcattgggatgcataccacaggctcgatggaggtgtctgccgagagcaatcgtcttgtaggcgaacttaaattagatagactgctcctggaactgaagcacagcaacattgggccattccctgttgaacttctgcaggacatcatgaattatattgtcccaatcctcgttctgcctcgggtgaatgaaaaacttcagaagggattccccttgcctacccctgcccgggtccaactttataatgtcgttctccagccacaccagaattttctcctttttggagccgacgtggtttacaaatag

SEQ ID NO: 120470 - DNA, 1464 bp, Artificial Sequence
  derived and/or modified sequence
atgcgcgagaatatggccagggggccatgtaatgctcctaggtgggcctcactcatggtcctcgtggctattggcaccgcggttacggcggctgtgaaccctggtgttgtggtacgcatttcacagaaaggtctggattatgcctcccagcaggggactgctgccctccaaaaagaattaaaaagaatcaagataccggattactcagatagttttaagatcaaacacctcggcaaaggccactacagcttttactccatggatattagggaatttcagctgccctcaagccagatatcaatggtacctaatgttggactgaagtttagtatttctaacgccaacattaagatttcgggcaagtggaaagcccaaaagcggttccttaaaatgtccggaaatttcgacttatcaatcgagggcatgagtatcagcgctgaccttaaattaggctcgaatccaacctcagggaagcccaccattacctgcagcagttgttcatctcatattaattctgtccacgtgcatatctcaaaatctaaggtcggctggctcattcaactgtttcataagaagatcgaatctgccttgcgtaacaaaatgaattcacaggtgtgtgaaaaggtcacaaactccgtctcaagcgaactgcaaccttacttccagacgctgcccgtcatgaccaaaattgactccgtggccggtatcaactacggcctggtggcccctcccgcaacaaccgctgaaactctagatgtccagatgaaaggagaattctactctgaaaatcaccataatccccctcctttcgctccaccagttatggagttcccagccgctcatgatcgcatggtgtacctaggcctcagtgattatttttttaacaccgctgggctcgtgtatcaggaggcaggcgtgttaaaaatgacccttagagatgacatgatcccaaaagagtctaaatttagactcacaactaagttttttggaacattcttacctgaagtggctaaaaagttcccaaatatgaagatccagatccatgtgagcgcgtccacaccaccccacctgtccgtgcagcccacaggactgacattttacccagctgtcgacgtgcaagcattcgccgttctccctaactcaagcctggcttcactgttcctaatcggaatgcacacgacagggtccatggaagtgtcagccgagtcaaatcgactggtcggtgagttaaaattggacagactgctgttggagctcaagcactctaacatcggccctttcccggtggagctcctgcaggacatcatgaactacattgtccccatccttgtgctgcctcgggtcaatgagaaactccagaaaggattcccgctaccgactccggctagagttcaactctacaacgtcgtcctccaaccccaccagaacttcctcctctttggcgctgacgtcgtgtacaaatag

SEQ ID NO: 120471 - protein, 399 aa, Artificial Sequence
  derived and/or modified sequence
MAQRQPHSPNQTLISITNDTESSSSVVSNDNTNKGWSGDNSPGIEALCAIYITYAVIISVGILGNAILIKVFFKTKSMQTVPNIFITSLAFGDLLLLLTCVPVDATHYLAEGWLFGRIGCKVLSFIRLTSVGVSVFTLTILSADRYKAVVKPLERQPSNAILKTCVKAGCVWIVSMIFALPEAIFSNVYTFRDPNKNMTFESCTSYPVSKKLLQEIHSLLCFLVFYIIPLSIISVYYSLIARTLYKSTLNIPTEEQSHARKQIESRKRIARTVLVLVALFALCWLPNHLLYLYHSFTSQTYVDPSAMHFIFTIFSRVLAFSNSCVNPFALYWLSKSFQKHFKAQLFCCKAERPEPPVADTSLTTLAVMGTVPGTGSIQMSEISVTSFTGCSVKQAEDRF

SEQ ID NO: 120472 - DNA, 1200 bp, Artificial Sequence
  derived and/or modified sequence
atggcccaaagacagcctcactccccaaaccagacgctgatctctatcactaacgacacggaatcgtcatcctctgtggtgagtaacgataataccaataagggctggagtggggacaactcacctgggatcgaagcgttgtgcgcaatttacattacgtatgccgtgatcatatctgttggtatccttggaaatgccatcctgatcaaggtgttttttaaaacaaagtccatgcagaccgtcccaaatatcttcatcacgtctctggcattcggggatctcctattattacttacttgtgtcccagtggatgccacgcactacctcgccgaggggtggctgtttggcaggattggctgtaaggttctgtccttcataagattgacatctgttggcgttagcgttttcactctgaccattctctctgccgataggtacaaagctgtggtgaagcctctggaaaggcaaccctcaaatgccattctcaaaacctgcgtcaaagcagggtgtgtgtggatagtgtccatgatcttcgcattgccagaagccattttctcaaacgtttatactttccgggatccaaataaaaatatgacatttgaatcctgcacgtcctaccccgtgtctaagaagctgctccaggaaatacactctctgctgtgctttcttgtattttatataattcccttgtccattatctcagtctattactcactgatcgctcggactctgtataaatcaacactgaacatccctaccgaggagcagagtcacgcacgaaagcagatcgagtctcggaaacgcattgcccgcacagttcttgttctcgtggcactatttgcactctgctggctgcccaaccaccttttatatctctatcatagtttcacctcacagacatacgtggatccgtcagccatgcatttcatttttacaatcttcagccgcgtcctagcgttcagtaattcttgcgttaatccttttgctctctactggctatctaagtcttttcagaaacactttaaggcacagctattctgttgtaaggctgagagaccagaaccacccgtggctgatacaagcctaactactctggcggttatgggcaccgtgccaggaactggttcaattcagatgtctgaaatttccgttacgtccttcaccggttgtagtgttaaacaggctgaagatcgcttttag

SEQ ID NO: 120473 - DNA, 1200 bp, Artificial Sequence
  derived and/or modified sequence
atggcccagaggcagccccacagccccaaccagaccctcatcagcatcaccaatgacacagagagcagcagctctgtggtgtccaatgacaacaccaacaagggctggagcggggacaacagccctggcatcgaggccctgtgtgccatctacatcacctatgctgtgatcatctctgtgggcatcctgggcaatgccatcctgatcaaggtgttcttcaagaccaagtccatgcagacagtgcccaacatcttcatcaccagcctggcctttggagacctgctgctgctgctgacctgtgtgcctgtggatgccacccactacctggccgagggctggctgtttggccgcatcggctgcaaggtgctgtccttcatccggctgacctctgtgggcgtgtctgtgttcaccctgaccatcctgtctgctgaccgctacaaggctgtggtgaagcccctggagcggcagcccagcaatgccatcctgaagacctgtgtgaaggccggctgtgtgtggatcgtgtccatgatctttgccctgcctgaggccatcttcagcaatgtgtacaccttccgggaccccaacaagaacatgacctttgagagctgcaccagctaccctgtgtccaagaagctgctgcaggagatccacagcctgctgtgcttcctggtgttctacatcatccccctgagcatcatctctgtgtactacagcctcatcgcccggaccctgtacaagagcaccctgaacatccccacagaggagcagagccacgccaggaagcagatcgagagcaggaagagaattgccaggacagtgctggtgctggtggccctgtttgccctgtgctggctgcccaaccacctgctgtacctgtaccacagcttcaccagccagacctacgtggaccccagcgccatgcacttcatcttcaccatcttcagccgggtgctggccttcagcaacagctgtgtgaacccctttgccctgtactggctgagcaagagcttccagaagcacttcaaggcccagctgttctgctgcaaggccgagaggcctgagccccctgtggccgacaccagcctgaccaccctggccgtgatgggcaccgtgcccggcaccggcagcatccagatgtctgagatctctgtgaccagcttcaccggctgcagcgtgaagcaggccgaggaccgcttctag

SEQ ID NO: 120474 - DNA, 1200 bp, Artificial Sequence
  derived and/or modified sequence
atggcccagcggcagccccacagccccaaccagaccctgatcagcattactaacgacacagagtcctccagctctgtggtgtcgaacgacaacactaataaagggtggtccggtgacaactcgccgggtattgaggcgctctgcgcgatttatattacttacgcagtgatcatttccgtggggatcctaggaaacgctatcttgatcaaggtgttcttcaagactaagtctatgcagaccgtccctaacatcttcataacctcattagccttcggagatttgctattacttctgacctgcgtacctgtggacgccactcactacctcgccgagggatggcttttcggaagaattggatgcaaagtcctaagttttatccgcctaaccagcgtgggcgtcagcgtctttacacttacgatcttaagcgccgaccggtataaagctgtcgtgaagcctcttgaacggcagccatctaacgcgatccttaaaacttgcgtgaaagccggctgtgtttggattgtaagcatgatctttgccctgcccgaggctatcttttccaacgtctatacctttcgcgatccaaacaaaaacatgacctttgaatcttgcacttcttatccagtatcaaagaagctactgcaggaaatccatagcctactgtgctttctcgttttctacattatccctctgagtatcatttcagtgtactattctctgatagcaaggactttatataaaagcactctaaatatcccaaccgaagaacagagtcacgcccggaaacagatcgagtcaaggaagcgcatcgcacgaaccgtgctagtccttgtggccctcttcgctttatgctggctcccgaatcacctcctatatttataccatagtttcacaagtcagacatacgttgacccctccgctatgcatttcattttcaccatcttctcaagggtgctggctttttcaaactcatgtgttaacccatttgccctgtattggttgtctaaatctttccaaaagcacttcaaggcccaacttttctgttgcaaggcagaaaggccagagccgcctgtggccgatacatcgttgacgaccctggcagtcatggggaccgtgccgggaactggcagtatccagatgtcagaaatatcagttacctccttcaccgggtgctctgtgaagcaggccgaagatagattctag

SEQ ID NO: 120475 - DNA, 1200 bp, Artificial Sequence
  derived and/or modified sequence
atggctcagagacagcctcatagcccaaaccaaaccctgatcagcataaccaacgacaccgaatccagctcttcagttgtcagtaatgacaatactaacaaggggtggagcggagacaatagtcctggtattgaagccttatgcgctatctacatcacatatgctgtgatcatctctgtgggaatcctgggaaacgccatcctgatcaaagtcttcttcaagactaagtctatgcagactgtgcccaatatttttatcaccagcctggccttcggggacctactgctgttgctgacttgtgtgcctgtggacgctactcactatttggccgaggggtggctgttcggtaggattggatgcaaggtactgtcctttattagattgaccagtgtgggcgtctccgtgttcaccctgaccatcttgtcggccgacagatataaggctgtggtgaaaccactcgaacggcagccatctaacgctatccttaaaacttgtgttaaggcgggatgtgtttggatagtttcaatgatatttgcccttccagaggccatattcagcaacgtgtacacatttagggaccccaacaaaaacatgaccttcgagagctgcacatcataccccgtgagtaagaagcttctccaggagatccacagcctgctgtgcttcctggtgttctatatcatcccgctgtcaatcattagcgtgtactacagtctgatagcaagaacactgtacaagtcaacactaaacatacccacagaggaacaaagccacgcccgaaagcagattgagtcaaggaaaagaatcgctcggactgtattagttctagtggccctgttcgccttatgctggcttccaaatcacctgctttatctgtaccacagctttacaagtcaaacatatgtagatcccagtgcaatgcacttcattttcacaatattctctagggtcttagcattttctaattcctgcgtaaatccttttgctctgtactggctgtccaagtcctttcagaagcactttaaggctcagctgttctgctgcaaagcagagcggcctgaaccacccgttgccgatacttctctcacaaccttagctgtgatgggaacagttcctggaaccggctccattcaaatgagcgagatttccgtcacctcttttactggctgtagtgtcaaacaggccgaggaccgtttctag

SEQ ID NO: 120476 - DNA, 2833 bp, Artificial Sequence
  derived and/or modified sequence
ctccacctcctactcttcagtgccagatgggtaagcatttagccaagcatgctgggagacacacagaactgaagcaaaggagtatctggatgtcttggattttcttcccattctgttctgttctgttctcctaataccatctcgttactagacgtaggcattggacgtgacaatcaactgcatttgaactgagaagaagaaatattaaagacacagtcttcagaagaaatggctcaaaggcagcctcactcacctaatcagactttaatttcaatcacaaatgacacagaatcatcaagctctgtggtttctaacgataacacaaataaaggatggagcggggacaactctccaggaatagaagcattgtgtgccatctatattacttatgctgtgatcatttcagtgggcatccttggaaatgctattctcatcaaagtctttttcaagaccaaatccatgcaaacagttccaaatattttcatcaccagcctggcttttggagatcttttacttctgctaacttgtgtgccagtggatgcaactcactaccttgcagaaggatggctgttcggaagaattggttgtaaggtgctctctttcatccggctcacttctgttggtgtgtcagtgttcacattaacaattctcagcgctgacagatacaaggcagttgtgaagccacttgagcgacagccctccaatgccatcctgaagacttgtgtaaaagctggctgcgtctggatcgtgtctatgatatttgctctacctgaggctatattttcaaatgtatacacttttcgagatcccaataaaaatatgacatttgaatcatgtacctcttatcctgtctctaagaagctcttgcaagaaatacattctctgctgtgcttcttagtgttctacattattccactctctattatctctgtctactattccttgattgctaggaccctttacaaaagcaccctgaacatacctactgaggaacaaagccatgcccgtaagcagattgaatcccgaaagagaattgccagaacggtattggtgttggtggctctgtttgccctctgctggttgccaaatcacctcctgtacctctaccattcattcacttctcaaacctatgtagacccctctgccatgcatttcattttcaccattttctctcgggttttggctttcagcaattcttgcgtaaacccctttgctctctactggctgagcaaaagcttccagaagcattttaaagctcagttgttctgttgcaaggcggagcggcctgagcctcctgttgctgacacctctcttaccaccctggctgtgatgggaacggtcccgggcactgggagcatacagatgtctgaaattagtgtgacctcgttcactgggtgtagtgtgaagcaggcagaggacagattctagcttttcaaggaaaaatgctgcttctcctcccagcgtgtgtatccgactctaagctgtgtgcaggtgtatggtgtccagatttttgttgtttgaaaagtgtgttgaaatcttaggagtgaaggatccctataagtaagtaaaatacaaaccattactttcttcaaagtacaaatagtaatgtcatcgggctttctaaataaaatgaagccccactaagtgcagaaagacaagtttatatatgccagtgaatcgtaagggaagtcaaatgggaaggaaggtgtaataaacaagatgaaacttaaaaatctcatttgttgtttaatcacatctgtgatgcttctaactcctcatatactgtgatttgcataaaattgtgtttgtgtttactgtgtggtgtaaatctagagatactttgtatgtgaaaaggggatcacaaaagagagaaagcatctcttaggctattttcttaaaaataaaccttcacagaatggctgtccttttccattaatctgtattccattgtagctgaatctgtgcagttgaaatgaaaatgttttggagtcagcgaatataaagcactgagtaaggatctggggcacagtgcttgccttactgggtcaacacttacaactgccatggattaataactgggctaagttatcattcacaaatattgttaggaacttgccttattcataggcagaataagtggtcatgtttatggtgtcatttgaggacctctgttgaaaaatctgcaaacctgccacagtgtctgaaattcttcctttacagaaattcgtttctttctggtaagcagtgccctctttctaaaaacatgcagaagtaccatatgaaatccctaacccctgggtgtgcaattgtgatcagatcatcttcctgcttgactttattaaacccaatgggtgcctaagtcctgtaagtgtatggcctaattaatctctgcccatggaaatcagatggaaagttctgattttctatcctgtgctcctacctgctaacatcattcacttgttaataattattgttttaaaaaaaaaaactcttgtcaatagacgtgtcagatttagacctgtggtttcagaaaaatttttggagcaaatttaaacatgtttggcactataggtaaatttgtatttaaaaaaaaaaacaatgtttgagtgtgcttttggtaatgctgagctttctttaaatggcttgtggagtcgtgaacttttgctaatgatgtggctccaaaaggtaatacatattaacattagactttaactttctgtaaaattggtttacttaaagttgggcggggggtgtgatactgtattagtattgttttaaagtggacactgtaacacgtgtggaaaaacaaataaatatgaaataaagttttaaa

SEQ ID NO: 120477 - DNA, 1200 bp, Artificial Sequence
  derived and/or modified sequence
atggcccagagacagccccacagccccaaccagaccctgatcagcatcaccaacgacaccgagagcagcagcagcgtggtgagcaacgacaacaccaacaagggctggagcggcgacaacagccccggcatcgaggccctgtgcgccatctacatcacctacgccgtgatcatcagcgtgggcatcctgggcaacgccatcctgatcaaggtgttcttcaagaccaagagcatgcagaccgtgcccaacatcttcatcaccagcctggccttcggcgacctgctgctgctgctgacctgcgtgcccgtggacgccacccactacctggccgagggctggctgttcggcagaatcggctgcaaggtgctgagcttcatcagactgaccagcgtgggcgtgagcgtgttcaccctgaccatcctgagcgccgacagatacaaggccgtggtgaagcccctggagagacagcccagcaacgccatcctgaagacctgcgtgaaggccggctgcgtgtggatcgtgagcatgatcttcgccctgcccgaggccatcttcagcaacgtgtacaccttcagagaccccaacaagaacatgaccttcgagagctgcaccagctaccccgtgagcaagaagctgctgcaggagatccacagcctgctgtgcttcctggtgttctacatcatccccctgagcatcatcagcgtgtactacagcctgatcgccagaaccctgtacaagagcaccctgaacatccccaccgaggagcagagccacgccagaaagcagatcgagagcagaaagagaatcgccagaaccgtgctggtgctggtggccctgttcgccctgtgctggctgcccaaccacctgctgtacctgtaccacagcttcaccagccagacctacgtggaccccagcgccatgcacttcatcttcaccatcttcagcagagtgctggccttcagcaacagctgcgtgaaccccttcgccctgtactggctgagcaagagcttccagaagcacttcaaggcccagctgttctgctgcaaggccgagagacccgagccccccgtggccgacaccagcctgaccaccctggccgtgatgggcaccgtgcccggcaccggcagcatccagatgagcgagatcagcgtgaccagcttcaccggctgcagcgtgaagcaggccgaggacagattctag

SEQ ID NO: 120478 - protein, 385 aa, Artificial Sequence
  derived and/or modified sequence
MAAALFVLLGFALLGTHGASGAAGFVQAPLSQQRWVGGSVELHCEAVGSPVPEIQWWFEGQGPNDTCSQLWDGARLDRVHIHATYHQHAASTISIDTLVEEDTGTYECRASNDPDRNHLTRAPRVKWVRAQAVVLVLEPGTVFTTVEDLGSKILLTCSLNDSATEVTGHRWLKGGVVLKEDALPGQKTEFKVDSDDQWGEYSCVFLPEPMGTANIQLHGPPRVKAVKSSEHINEGETAMLVCKSESVPPVTDWAWYKITDSEDKALMNGSESRFFVSSSQGRSELHIENLNMEADPGQYRCNGTSSKGSDQAIITLRVRSHLAALWPFLGIVAEVLVLVTIIFIYEKRRKPEDVLDDDDAGSAPLKSSGQHQNDKGKNVRQRNSS

SEQ ID NO: 120479 - DNA, 1158 bp, Artificial Sequence
  derived and/or modified sequence
atggccgccgctctctttgttctgttggggtttgccctgctgggaacccatggggcttctggagccgcgggcttcgtccaagcccctctcagccaacagcgatgggtcggggggtccgtagagctgcattgcgaagcagttgggtctcccgttcccgagatacaatggtggttcgagggacagggacccaacgacacatgcagccaactgtgggacggcgcgcggttggatcgtgtacacatccatgccacgtatcaccagcatgctgcctcaactatctcgatagataccctggtggaggaggatacggggacatacgagtgcagggcaagcaatgatccagataggaatcatctcaccagagcgccccgagtaaagtgggtacgggcccaggccgttgtcctggtcctggagccagggacagtttttaccacagtggaagacctgggctccaaaatcctgctgacttgcagcttgaacgatagcgccacagaagtgactgggcaccgctggctaaaaggcggcgtggtccttaaggaggatgccctgcccggccagaaaaccgaatttaaggtggacagcgacgaccaatggggagaatattcatgtgtgttcctacctgaaccgatgggcacggccaacatccagcttcatggtcctccgagagttaaggctgttaaatcatctgagcacattaacgagggcgagacagccatgcttgtctgtaaaagcgagtctgtccctccagtaactgattgggcatggtacaagattaccgatagtgaagacaaagccttgatgaacggatctgagtcacggttctttgtcagtagctcccaggggaggtccgaattgcacatagaaaatctcaacatggaagctgatcctggacagtatcgatgcaatggaacttccagcaaaggttctgatcaggccattattaccctgagggtgcgcagtcacctggctgccttgtggccatttttgggaatcgtggccgaggttctggtgctggtgacaatcatatttatttacgaaaaaaggcggaagccagaagatgtcctcgacgatgatgatgccggcagcgcccctctcaaaagctcagggcagcatcagaacgacaaggggaagaatgttcgacagaggaacagttcatag

SEQ ID NO: 120480 - DNA, 1158 bp, Artificial Sequence
  derived and/or modified sequence
atggctgctgccctgtttgtgctgctgggctttgccctgctgggcacccatggagccagcggggctgctggctttgtgcaggcccccctgagccagcagcgctgggtgggcggctctgtggagctgcactgtgaggccgtgggcagccctgtgcctgagatccagtggtggtttgagggccagggccccaatgacacctgcagccagctgtgggatggagcccggctggacagagtgcacatccacgccacctaccaccagcacgccgccagcaccatcagcattgacaccctggtggaggaggacaccggcacctatgaatgtcgggccagcaatgaccctgacaggaaccacctgacccgggccccccgggtgaagtgggtgcgggcccaggccgtggtgctggtgctggagcccggcaccgtcttcaccaccgtggaggacctgggcagcaagatcctgctgacctgcagcctgaatgacagcgccacagaggtgacaggccaccgctggctgaagggcggcgtggtgctgaaggaggatgccctgcccggccagaagacagagttcaaggtggacagtgatgaccagtggggcgagtacagctgtgtgttcctgcctgagcccatgggcacagccaacatccagctgcacggccccccccgggtgaaggctgtgaagagcagcgagcacatcaatgaaggagaaacagccatgctggtgtgcaagtctgagagcgtgccccctgtgacagactgggcctggtacaagatcacagattctgaggacaaggccctgatgaatggcagcgagagccgcttctttgtgagcagcagccagggccgctctgagctgcacatcgagaacctgaacatggaggccgaccccggccagtaccgctgcaatggcaccagcagcaaaggaagtgaccaggccatcatcaccctgcgggtgcgcagccacctggccgccctgtggcccttcctgggcatcgtggccgaggtgctggtgctggtgaccatcatcttcatctatgagaagaggaggaagccagaagatgtgctggatgatgatgatgctggcagcgcccccctgaagagcagcggccagcaccagaatgacaagggcaagaatgtgcggcagaggaacagcagctag

SEQ ID NO: 120481 - DNA, 1158 bp, Artificial Sequence
  derived and/or modified sequence
atggccgccgccctgttcgtgctgctgggcttcgccctgctgggcacccacggcgctagcggggctgcaggattcgttcaggcgcctctctcccaacaaagatgggtggggggatcagtggagctgcattgtgaagccgtgggcagtcccgtgccagagatccagtggtggtttgaggggcaaggcccaaatgatacatgttcacaactttgggacggagcgagactggaccgtgttcacatccacgcgacctaccatcagcacgctgcgtccactattagcatcgacactttggtggaagaggacacaggcacttacgaatgccgtgcctccaacgaccccgaccgcaaccatctgacgcgtgctccgcgtgttaagtgggtgcgagcccaagctgtggtcctcgttctcgagcccggaactgtgtttactactgtcgaggatctggggtctaagatactgttaacctgcagtttaaacgattccgccaccgaagttaccgggcacaggtggctgaaggggggcgtcgtacttaaggaggacgcattgccagggcagaagactgaattcaaggtggatagcgatgaccaatggggggaatactcttgtgtttttctgccagaacccatgggaacagcaaatattcagcttcacggacctccccgggtgaaggccgtcaaatcatccgaacatattaacgagggcgagaccgccatgctggtatgtaagagcgaatctgtccccccagtgaccgactgggcctggtacaagatcacggatagcgaagacaaagccttaatgaacggttctgagagccgcttcttcgtatcttcatcccagggccgatcggagcttcacatagagaatcttaatatggaggctgaccccggtcagtatcgttgtaacggtacctcttcgaagggaagcgatcaggcaatcataacccttagggtcagatcccacctggccgccttgtggcccttcctgggtatcgtggcagaggtgttagtcctggtgacaatcattttcatctatgaaaagcgacggaagccggaagatgtcctcgacgacgatgacgccgggtcggcaccactgaaaagtagcggtcagcaccagaatgacaaaggcaaaaacgttagacagagaaacagtagttag

SEQ ID NO: 120482 - DNA, 1158 bp, Artificial Sequence
  derived and/or modified sequence
atggccgcagccttgttcgttctgttgggctttgccctcctcggcacccatggagcgtccggcgctgcaggctttgtacaagcccctctaagtcagcagcgctgggtgggaggatccgtcgaattgcattgtgaagctgtgggttcacctgtgccagagatacagtggtggtttgagggccaggggcctaacgacacatgctcacagctatgggacggcgctcgactggatcgcgtccacatccatgccacctatcaccagcacgccgcttccaccatcagcattgacaccctggtggaggaagacacagggacctatgagtgcagggcctccaatgatcccgatagaaatcatcttacccgcgctcccagagtcaaatgggtgcgagcccaggccgttgtgctggtattagaaccagggacggtgttcaccacagtggaggacctcggatccaagatcctcctgacgtgctctctgaatgattccgctacagaggtaactggtcaccggtggttgaagggcggtgttgtactgaaggaggacgctctgcctggccagaaaaccgagttcaaggtcgactctgacgaccaatggggagagtacagctgtgtctttttaccggagcccatggggactgcgaatatccaactacacgggccaccgagggtcaaagcagttaagtcctccgagcacatcaacgagggggagaccgctatgctggtttgcaagtctgagagcgtacctcctgtgacagactgggcatggtacaaaattacagattcagaggacaaagcactgatgaatggcagcgagagccggttctttgtgagctccagccagggcaggagcgagttacacatcgagaacctcaacatggaagccgatcccggacaataccgttgtaacggcaccagctcaaagggatctgatcaggccatcatcactctgcgtgtccggtcccacttggcagctctatggccttttctgggaatagtggcagaagtccttgttctcgttacaattatattcatctacgaaaagcggcgaaaaccagaggatgttcttgatgatgacgatgcgggtagcgccccactgaaaagttccgggcagcatcagaatgataaaggtaaaaatgtcaggcaacggaactctagctag

SEQ ID NO: 120483 - DNA, 2004 bp, Artificial Sequence
  derived and/or modified sequence
gtgcgcgcgcccggtccgcgcctccgccgctttttatagcggccgcgggcggcggcggcagcggttggaggttgtaggaccggcgaggaataggaatcatggcggctgcgctgttcgtgctgctgggattcgcgctgctgggcacccacggagcctccggggctgccggcttcgtccaggcgccgctgtcccagcagaggtgggtggggggcagtgtggagctgcactgcgaggccgtgggcagcccggtgcccgagatccagtggtggtttgaagggcagggtcccaacgacacctgctcccagctctgggacggcgcccggctggaccgcgtccacatccacgccacctaccaccagcacgcggccagcaccatctccatcgacacgctcgtggaggaggacacgggcacttacgagtgccgggccagcaacgacccggatcgcaaccacctgacccgggcgcccagggtcaagtgggtccgcgcccaggcagtcgtgctagtcctggaacccggcacagtcttcactaccgtagaagaccttggctccaagatactcctcacctgctccttgaatgacagcgccacagaggtcacagggcaccgctggctgaaggggggcgtggtgctgaaggaggacgcgctgcccggccagaaaacggagttcaaggtggactccgacgaccagtggggagagtactcctgcgtcttcctccccgagcccatgggcacggccaacatccagctccacgggcctcccagagtgaaggctgtgaagtcgtcagaacacatcaacgagggggagacggccatgctggtctgcaagtcagagtccgtgccacctgtcactgactgggcctggtacaagatcactgactctgaggacaaggccctcatgaacggctccgagagcaggttcttcgtgagttcctcgcagggccggtcagagctacacattgagaacctgaacatggaggccgaccccggccagtaccggtgcaacggcaccagctccaagggctccgaccaggccatcatcacgctccgcgtgcgcagccacctggccgccctctggcccttcctgggcatcgtggctgaggtgctggtgctggtcaccatcatcttcatctacgagaagcgccggaagcccgaggacgtcctggatgatgacgacgccggctctgcacccctgaagagcagcgggcagcaccagaatgacaaaggcaagaacgtccgccagaggaactcttcctgaggcaggtggcccgaggacgctccctgctccacgtctgcgccgccgccggagtccactcccagtgcttgcaagattccaagttctcacctcttaaagaaaacccaccccgtagattcccatcatacacttccttcttttttaaaaaagttgggttttctccattcaggattctgttccttaggtttttttccttctgaagtgtttcacgagagcccgggagctgctgccctgcggccccgtctgtggctttcagcctctgggtctgagtcatggccgggtgggcggcacagccttctccactggccggagtcagtgccaggtccttgccctttgtggaaagtcacaggtcacacgaggggccccgtgtcctgcctgtctgaagccaatgctgtctggttgcgccatttttgtgcttttatgtttaattttatgagggccacgggtctgtgttcgactcagcctcagggacgactctgacctcttggccacagaggactcacttgcccacaccgagggcgaccccgtcacagcctcaagtcactcccaagccccctccttgtctgtgcatccgggggcagctctggagggggtttgctggggaactggcgccatcgccgggactccagaaccgcagaagcctccccagctcacccctggaggacggccggctctctatagcaccagggctcacgtgggaacccccctcccacccaccgccacaataaagatcgcccccacctccaccctc

SEQ ID NO: 120484 - DNA, 1158 bp, Artificial Sequence
  derived and/or modified sequence
atggccgccgccctgttcgtgctgctgggcttcgccctgctgggcacccacggcgccagcggcgccgccggcttcgtgcaggcccccctgagccagcagagatgggtgggcggcagcgtggagctgcactgcgaggccgtgggcagccccgtgcccgagatccagtggtggttcgagggccagggccccaacgacacctgcagccagctgtgggacggcgccagactggacagagtgcacatccacgccacctaccaccagcacgccgccagcaccatcagcatcgacaccctggtggaggaggacaccggcacctacgagtgcagagccagcaacgaccccgacagaaaccacctgaccagagcccccagagtgaagtgggtgagagcccaggccgtggtgctggtgctggagcccggcaccgtgttcaccaccgtggaggacctgggcagcaagatcctgctgacctgcagcctgaacgacagcgccaccgaggtgaccggccacagatggctgaagggcggcgtggtgctgaaggaggacgccctgcccggccagaagaccgagttcaaggtggacagcgacgaccagtggggcgagtacagctgcgtgttcctgcccgagcccatgggcaccgccaacatccagctgcacggcccccccagagtgaaggccgtgaagagcagcgagcacatcaacgagggcgagaccgccatgctggtgtgcaagagcgagagcgtgccccccgtgaccgactgggcctggtacaagatcaccgacagcgaggacaaggccctgatgaacggcagcgagagcagattcttcgtgagcagcagccagggcagaagcgagctgcacatcgagaacctgaacatggaggccgaccccggccagtacagatgcaacggcaccagcagcaagggcagcgaccaggccatcatcaccctgagagtgagaagccacctggccgccctgtggcccttcctgggcatcgtggccgaggtgctggtgctggtgaccatcatcttcatctacgagaagagaagaaagcccgaggacgtgctggacgacgacgacgccggcagcgcccccctgaagagcagcggccagcaccagaacgacaagggcaagaacgtgagacagagaaacagcagctag

SEQ ID NO: 120485 - protein, 178 aa, Artificial Sequence
  derived and/or modified sequence
MDRAARCSGASSLPLLLALALGLVILHCVVADGNSTRSPETNGLLCGDPEENCAATTTQSKRKGHFSRCPKQYKHYCIKGRCRFVVAEQTPSCVCDEGYIGARCERVDLFYLRGDRGQILVICLIAVMVVFIILVIGVCTCCHPLRKRRKRKKKEEEMETLGKDITPINEDIEETNIA

SEQ ID NO: 120486 - DNA, 2816 bp, Artificial Sequence
  derived and/or modified sequence
ctggtccgagggcagcccgaatatgtccctgggtgtgggtatgggtgtggggcaatttgggtgggagcagcgtggaggctcccaggaccaagtcctgcgcctctttggcggggtgtgtgcaggaggaggggggataaataggaggctccctcctcccggcgacattcacggagccggccggcctcccgccctgggtgtttccctgccttgtagccagggtgccagcctgggaagtagtttcgtttccttctgcctccgggattagtttccaggcaccctctcaggcgcccgaggcccgggaagggggcgaagaaggagggagacttgtctaggggctgcccggcccggcagagcggggttgatggaccgggccgcccggtgcagcggcgccagctccctgccactgctcctggcccttgccctgggtctagtgatccttcactgtgtggtggcagatgggaattccaccagaagtcctgaaactaatggcctcctctgtggagaccctgaggaaaactgtgcagctaccaccacacaatcaaagcggaaaggccacttctctaggtgccccaagcaatacaagcattactgcatcaaagggagatgccgcttcgtggtggccgagcagacgccctcctgtgtctgtgatgaaggctacattggagcaaggtgtgagagagttgacttgttttacctaagaggagacagaggacagattctggtgatttgtttgatagcagttatggtagtttttattattttggtcatcggtgtctgcacatgctgtcaccctcttcggaaacgtcgtaaaagaaagaagaaagaagaagaaatggaaactctgggtaaagatataactcctatcaatgaagatattgaagagacaaatattgcttaaaaggctatgaagttacctccaggttggtggcaagctgcaaagtgccttgctcatttgaaaatggacagaatgtgtctcaggaaaacagctagtagacatgaattttaaataatgtatttactttttatttgcaactttagtttgtgttattattttttaataagaacattaattatatgtatattgtctagtaattgggaaaaaagcaactggttaggtagcaacaacagaagggaaatttcaataacctttcacttaagtattgtcaccaggattactagtcaaacaaaaaagaaaagtagaaaggaggttaggtcttaggaattgaattaataataaagctaccatttatcaagcatttaccatgtgctaataagtttgaaatatattatttcctttattcctttcagcaatccatgagatagctattataatcctcatttcctacatatggaaacagggccaaagaagtcaagtcaaataatctaatccagatttagagagttggagattggtagagacagactagaaatcaagatttatctaaatcaaaatctatgctcttaaccatcatttttgttagtctgaatcggtgcaacctaactcaataatataacccaaggttttatactgaactgtgttttggtatgattgtgagatgtcaagaccgtcttcccacaggcacacagaatgagaaatcctggcctatattgctgttaccatcatgctttctatagaattggcttttattatgtttctttgctcctttataaattctcaatgatgtgactacatttttacattattaaagcaaatagattggccccataactagggaaatgaatagagatggaaaagtaaatgcttggcattccttaagccctgggtaagtgtttatgctcaataaaatataaataatattactgaaagaggctgtttatatgggagtaatggtcagtgacaacactggagagaccaggtagggaccggttgtgaccatatcctcatttatgttcttgatgacagcatatatgattgctctcaggtaaattttgatgcagtaaattcatgaccataacatctattacttgggaccatcttgccaagtgctcctttactccatgaaatatttaataaacactgctttaaacctggaaaagcacaatctacatttagtgaatatttcatagaatatttaactttttacattgattacgtggttcacttacaaaaatcgatggaagatgccccccaacttgtgcctgtcggccaagcagcttcttttttagaatctttgcaaattttactttgcaatgtagattccatagtgaagtggagaattcagacaaatgctgaaatcgcatattaccttctagcatccatggtgttttgagtgaagctggggctgtacttacatatgatacataaatagctcccctattagtaaaagctaagccaaacaactgataattttcaaaatctattttttctcctgatttaatggtcatacttgaaacacaattatatccaactgatccatgttgtatatgccttattttcaaaagtctcatttaagctcattcatgccctttctcttatgtagtcttcttcgatacgaaaggagcttggaataaatatccattagagcttttaaaaacacaaaacaatgctttaatgtttcttttttcctggactgagtttggctgaccaacaaaatctctcaagccattttgttttgatcctaaaatatcaatggtggctctcgaaatttggtagatctgatatcaagaaagaatttcaaagatttttatatcttttcaaaatgtattttatagttgctttgcatacactaaataactttgtttatgtaaactgtcaatattatcatgtaataaaataaatttatttttaaaacaaa

SEQ ID NO: 120487 - DNA, 537 bp, Artificial Sequence
  derived and/or modified sequence
atggaccgcgctgcccgttgctccggcgctagctctctcccactgttgctggccctggcattagggctggtgatccttcactgcgtggttgctgatggcaacagtacacgatcccctgaaaccaacggtctcctctgtggcgacccagaagagaactgcgcagccaccactacccagtccaaaaggaaggggcacttttcccggtgccccaagcagtataaacactactgcattaagggacggtgccgcttcgttgtggcagagcagaccccatcctgcgtgtgcgatgaggggtacatcggcgcacggtgcgagcgggtggacctgttctacctgcggggagatcggggacagattttggtgatttgtctcattgctgtaatggtcgtgtttattattctggtgataggagtctgcacttgttgtcaccccttgagaaagcgcagaaaacggaagaagaaggaggaggagatggagactctcgggaaggacatcacaccaataaacgaggacattgaagagacaaacattgcttag

SEQ ID NO: 120488 - DNA, 537 bp, Artificial Sequence
  derived and/or modified sequence
atggatcgggccgccaggtgcagtggcgcgtcttctctgcccttactccttgctctcgcattgggactggtgattctccattgtgtcgtcgcagacggaaatagtacccgttctccagagacaaacggactcttatgtggtgaccctgaagaaaactgtgccgccacaactacacagtctaaaaggaagggccattttagtcgctgtcccaaacagtataagcactattgcataaaaggccgttgcagatttgtagtggcagaacagacgccttcttgcgtgtgcgatgaggggtacattggagccaggtgtgaacgcgttgatttattttaccttcggggagaccggggacaaattctggtcatctgtctgatcgcagtcatggtggtctttataattcttgttattggcgtgtgcacatgctgccacccccttcgtaagagacggaagagaaaaaagaaagaagaagagatggagaccttagggaaggacatcacacctatcaacgaagacattgaagagaccaacattgcctag

SEQ ID NO: 120489 - DNA, 537 bp, Artificial Sequence
  derived and/or modified sequence
atggatcgggccgccaggtgcagtggcgcgtcttctctgcccttactccttgctctcgcattgggactggtgattctccattgtgtcgtcgcagacggaaatagtacccgttctccagagacaaacggactcttatgtggtgaccctgaagaaaactgtgccgccacaactacacagtctaaaaggaagggccattttagtcgctgtcccaaacagtataagcactattgcataaaaggccgttgcagatttgtagtggcagaacagacgccttcttgcgtgtgcgatgaggggtacattggagcccggtgtgagagagtggacctcttttacttgcgaggtgatcgtggacaaattctggtgatttgtctcatcgctgtaatggtggtttttataatactcgtaatcggagtttgtacctgttgtcatcctttacgaaagcgccgcaaaagaaaaaagaaagaggaggaaatggaaactttagggaaagacattactccaattaatgaggacatcgaagaaacaaacattgcttag

SEQ ID NO: 120490 - DNA, 537 bp, Artificial Sequence
  derived and/or modified sequence
atggacagagccgccagatgcagcggcgccagcagcctgcccctgctgctggccctggccctgggcctggtgatcctgcactgcgtggtggccgacggcaacagcaccagaagccccgagaccaacggcctgctgtgcggcgaccccgaggagaactgcgccgccaccaccacccagagcaagagaaagggccacttcagcagatgccccaagcagtacaagcactactgcatcaagggcagatgcagattcgtggtggccgagcagacccccagctgcgtgtgcgacgagggctacatcggcgccagatgcgagagagtggacctgttctacctgagaggcgacagaggccagatcctggtgatctgcctgatcgccgtgatggtggtgttcatcatcctggtgatcggcgtgtgcacctgctgccaccccctgagaaagagaagaaagagaaagaagaaggaggaggagatggagaccctgggcaaggacatcacccccatcaacgaggacatcgaggagaccaacatcgcctag

SEQ ID NO: 120491 - DNA, 537 bp, Artificial Sequence
  derived and/or modified sequence
atggaccgcgccgctcgctgttcgggggcgtcttcgcttcccttacttttggccttagctctcggactggtcatacttcactgtgtggtggccgacggaaattccacaagaagcccggaaaccaacggccttctttgcggtgacccagaggaaaattgcgcggccaccaccacacaatcaaaacgaaaaggccacttttcccgatgccctaagcagtataagcactattgtattaaaggtcggtgccgcttcgtcgtggccgagcagacaccttcttgtgtttgcgatgaggggtacatcggcgctcggtgtgaaagggtggacttgttctatctgcgcggcgacagaggacagattttggtgatctgcctcatagccgtaatggtggtgttcatcattcttgtaattggcgtctgtacatgttgtcaccctctgcgcaagcgccggaagaggaaaaagaaagaggaagagatggagacgttgggaaaggacattacaccaatcaacgaggacatcgaggaaacaaacatcgcttag

SEQ ID NO: 120492 - DNA, 537 bp, Artificial Sequence
  derived and/or modified sequence
atggaccgggccgcccgctgcagcggggccagcagcctgcccctgctgctggccctggccctgggcctggtgatcctgcactgtgtggtggctgatggcaacagcaccaggagccctgagaccaacggcctgctgtgtggggaccctgaggagaactgtgccgccaccaccacccagagcaagaggaagggccacttcagccgctgccccaagcagtacaagcactactgcatcaagggccgctgccgctttgtggtggccgagcagacccccagctgtgtgtgtgatgagggctacatcggggcccgctgtgagcgggtggacctcttctacctgcggggggaccggggccagatcctggtgatctgcctgattgctgtgatggtggtgttcatcatcctggtgattggagtgtgcacctgctgccaccccctgaggaagaggaggaagaggaagaagaaggaggaggagatggagaccctgggcaaggacatcacccccatcaatgaagacatcgaggagaccaacatcgcctag

SEQ ID NO: 120493 - DNA, 537 bp, Artificial Sequence
  derived and/or modified sequence
atggaccgggccgcccggtgcagcggcgccagcagcctgcccctgctgttggccctagctctgggactggtgattctccactgtgtggtcgcagatggtaactccacccggtcaccggaaacgaacggacttctgtgtggagatccagaggaaaactgtgccgccactactactcaaagcaagagaaaaggacatttttctaggtgtccaaaacagtacaagcactattgtattaagggccgttgccgctttgtggtggcagaacagacccccagctgtgtatgcgacgaaggatatataggcgcaagatgtgagagggtagacctattttaccttcgtggcgatagaggccagattttagtgatctgtctgattgcagtcatggtggtttttatcatcctggtgatcggggtttgtacatgttgccatcctctgcgaaagcgtcgcaaacgaaagaaaaaagaggaggaaatggagacactcggaaaggacataacccccatcaacgaggacattgaagaaacaaacatcgcatag

SEQ ID NO: 120494 - RNA, 537 nt, Artificial Sequence
  derived and/or modified sequence
auggaucgggccgccaggugcaguggcgcgucuucucugcccuuacuccuugcucucgcauugggacuggugauucuccauugugucgucgcagacggaaauaguacccguucuccagagacaaacggacucuuauguggugacccugaagaaaacugugccgccacaacuacacagucuaaaaggaagggccauuuuagucgcugucccaaacaguauaagcacuauugcauaaaaggccguugcagauuuguaguggcagaacagacgccuucuugcgugugcgaugagggguacauuggagccaggugugaacgcguugauuuauuuuaccuucggggagaccggggacaaauucuggucaucugucugaucgcagucaugguggucuuuauaauucuuguuauuggcgugugcacaugcugccacccccuucguaagagacggaagagaaaaaagaaagaagaagagauggagaccuuagggaaggacaucacaccuaucaacgaagacauugaagagaccaacauugccuag

SEQ ID NO: 120495 - RNA, 537 nt, Artificial Sequence
  derived and/or modified sequence
auggaucgggccgccaggugcaguggcgcgucuucucugcccuuacuccuugcucucgcauugggacuggugauucuccauugugucgucgcagacggaaauaguacccguucuccagagacaaacggacucuuauguggugacccugaagaaaacugugccgccacaacuacacagucuaaaaggaagggccauuuuagucgcugucccaaacaguauaagcacuauugcauaaaaggccguugcagauuuguaguggcagaacagacgccuucuugcgugugcgaugagggguacauuggagcccggugugagagaguggaccucuuuuacuugcgaggugaucguggacaaauucuggugauuugucucaucgcuguaauggugguuuuuauaauacucguaaucggaguuuguaccuguugucauccuuuacgaaagcgccgcaaaagaaaaaagaaagaggaggaaauggaaacuuuagggaaagacauuacuccaauuaaugaggacaucgaagaaacaaacauugcuuag

SEQ ID NO: 120496 - protein, 457 aa, Artificial Sequence
  derived and/or modified sequence
MATRVLSMSARLGPVPQPPAPQDEPVFAQLKPVLGAANPARDAALFPGEELKHAHHRPQAQPAPAQAPQPAQPPATGPRLPPEDLVQTRCEMEKYLTPQLPPVPIIPEHKKYRRDSASVVDQFFTDTEGLPYSINMNVFLPDITHLRTGLYKSQRPCVTHIKTEPVAIFSHQSETTAPPPAPTQALPEFTSIFSSHQTAAPEVNNIFIKQELPTPDLHLSVPTQQGHLYQLLNTPDLDMPSSTNQTAAMDTLNVSMSAAMAGLNTHTSAVPQTAVKQFQGMPPCTYTMPSQFLPQQATYFPPSPPSSEPGSPDRQAEMLQNLTPPPSYAATIASKLAIHNPNLPTTLPVNSQNIQPVRYNRRSNPDLEKRRIHYCDYPGCTKVYTKSSHLKAHLRTHTGEKPYKCTWEGCDWRFARSDELTRHYRKHTGAKPFQCGVCNRSFSRSDHLALHMKRHQN

SEQ ID NO: 120497 - protein, 366 aa, Artificial Sequence
  derived and/or modified sequence
MEKYLTPQLPPVPIIPEHKKYRRDSASVVDQFFTDTEGLPYSINMNVFLPDITHLRTGLYKSQRPCVTHIKTEPVAIFSHQSETTAPPPAPTQALPEFTSIFSSHQTAAPEVNNIFIKQELPTPDLHLSVPTQQGHLYQLLNTPDLDMPSSTNQTAAMDTLNVSMSAAMAGLNTHTSAVPQTAVKQFQGMPPCTYTMPSQFLPQQATYFPPSPPSSEPGSPDRQAEMLQNLTPPPSYAATIASKLAIHNPNLPTTLPVNSQNIQPVRYNRRSNPDLEKRRIHYCDYPGCTKVYTKSSHLKAHLRTHTGEKPYKCTWEGCDWRFARSDELTRHYRKHTGAKPFQCGVCNRSFSRSDHLALHMKRHQN

SEQ ID NO: 120498 - protein, 437 aa, Artificial Sequence
  derived and/or modified sequence
MATRVLSMSARLGPVPQPPAPQDEPVFAQLKPVLGAANPARDAALFPGEELKHAHHRPRLPPEDLVQTRCEMEKYLTPQLPPVPIIPEHKKYRRDSASVVDQFFTDTEGLPYSINMNVFLPDITHLRTGLYKSQRPCVTHIKTEPVAIFSHQSETTAPPPAPTQALPEFTSIFSSHQTAAPEVNNIFIKQELPTPDLHLSVPTQQGHLYQLLNTPDLDMPSSTNQTAAMDTLNVSMSAAMAGLNTHTSAVPQTAVKQFQGMPPCTYTMPSQFLPQQATYFPPSPPSSEPGSPDRQAEMLQNLTPPPSYAATIASKLAIHNPNLPTTLPVNSQNIQPVRYNRRSNPDLEKRRIHYCDYPGCTKVYTKSSHLKAHLRTHTGEKPYKCTWEGCDWRFARSDELTRHYRKHTGAKPFQCGVCNRSFSRSDHLALHMKRHQN

SEQ ID NO: 120499 - DNA, 3350 bp, Artificial Sequence
  derived and/or modified sequence
tagtcgcggggcaggtacgtgcgctcgcggttctctcgcggaggtcggcggtggcgggagcgggctccggagagcctgagagcacggtggggcggggcgggagaaagtggccgcccggaggacgttggcgtttacgtgtggaagagcggaagagttttgcttttcgtgcgcgccttcgaaaactgcctgccgctgtctgaggagtccacccgaaacctcccctcctccgccggcagccccgcgctgagctcgccgacccaagccagcgtgggcgaggtgggaagtgcgcccgacccgcgcctggagctgcgcccccgagtgcccatggctacaagggtgctgagcatgagcgcccgcctgggacccgtgccccagccgccggcgccgcaggacgagccggtgttcgcgcagctcaagccggtgctgggcgccgcgaatccggcccgcgacgcggcgctcttccccggcgaggagctgaagcacgcgcaccaccgcccgcaggcgcagcccgcgcccgcgcaggccccgcagccggcccagccgcccgccaccggcccgcggctgcctccagaggacctggtccagacaagatgtgaaatggagaagtatctgacacctcagcttcctccagttcctataattccagagcataaaaagtatagacgagacagtgcctcagtcgtagaccagttcttcactgacactgaagggttaccttacagtatcaacatgaacgtcttcctccctgacatcactcacctgagaactggcctctacaaatcccagagaccgtgcgtaacacacatcaagacagaacctgttgccattttcagccaccagagtgaaacgactgcccctcctccggccccgacccaggccctccctgagttcaccagtatattcagctcacaccagaccgcagctccagaggtgaacaatattttcatcaaacaagaacttcctacaccagatcttcatctttctgtccctacccagcagggccacctgtaccagctactgaatacaccggatctagatatgcccagttctacaaatcagacagcagcaatggacactcttaatgtttctatgtcagctgccatggcaggccttaacacacacacctctgctgttccgcagactgcagtgaaacaattccagggcatgcccccttgcacatacacaatgccaagtcagtttcttccacaacaggccacttactttcccccgtcaccaccaagctcagagcctggaagtccagatagacaagcagagatgctccagaatttaaccccacctccatcctatgctgctacaattgcttctaaactggcaattcacaatccaaatttacccaccaccctgccagttaactcacaaaacatccaacctgtcagatacaatagaaggagtaaccccgatttggagaaacgacgcatccactactgcgattaccctggttgcacaaaagtttataccaagtcttctcatttaaaagctcacctgaggactcacactggtgaaaagccatacaagtgtacctgggaaggctgcgactggaggttcgcgcgatcggatgagctgacccgccactaccggaagcacacaggcgccaagcccttccagtgcggggtgtgcaaccgcagcttctcgcgctctgaccacctggccctgcatatgaagaggcaccagaactgagcactgcccgtgtgacccgttccaggtcccctgggctccctcaaatgacagacctaactattcctgtgtaaaaacaacaaaaacaaacaaaagcaagaaaaccacaactaaaactggaaatgtatattttgtatatttgagaaaacagggaatacattgtattaataccaaagtgtttggtcattttaagaatctggaatgcttgctgtaatgtatatggctttactcaagcagatctcatctcatgacaggcagccacgtctcaacatgggtaaggggtgggggtggaggggagtgtgtgcagcgtttttacctaggcaccatcatttaatgtgacagtgttcagtaaacaaatcagttggcaggcaccagaagaagaatggattgtatgtcaagattttacttggcattgagtagtttttttcaatagtaggtaattccttagagatacagtatacctggcaattcacaaatagccattgaacaaatgtgtgggtttttaaaaattatatacatatatgagttgcctatatttgctattcaaaattttgtaaatatgcaaatcagctttataggtttattacaagttttttaggattcttttggggaagagtcataattcttttgaaaataaccatgaatacacttacagttaggatttgtggtaaggtacctctcaacattaccaaaatcatttctttagagggaaggaataatcattcaaatgaactttaaaaaagcaaatttcatgcactgattaaaataggattattttaaatacaaaaggcattttatatgaattataaactgaagagcttaaagatagttacaaaatacaaaagttcaacctcttacaataagctaaacgcaatgtcatttttaaaaagaaggacttagggtgtcgttttcacatatgacaatgttgcatttatgatgcagtttcaagtaccaaaacgttgaattgatgatgcagttttcatatatcgagatgttcgctcgtgcagtactgttggttaaatgacaatttatgtggattttgcatgtaatacacagtgagacacagtaattttatctaaattacagtgcagtttagttaatctattaatactgactcagtgtctgcctttaaatataaatgatatgttgaaaacttaaggaagcaaatgctacatatatgcaatataaaatagtaatgtgatgctgatgctgttaaccaaagggcagaataaataagcaaaatgccaaaaggggtcttaattgaaatgaaaatttaattttgtttttaaaatattgtttatctttatttattttgtggtaatatagtaagtttttttagaagacaattttcataacttgataaattatagttttgtttgttagaaaagttgctcttaaaagatgtaaatagatgacaaacgatgtaaataattttgtaagaggcttcaaaatgtttatacgtggaaacacacctacatgaaaagcagaaatcggttgctgttttgcttctttttccctcttatttttgtattgtggtcatttcctatgcaaataatggagcaaacagctgtatagttgtagaattttttgagagaatgagatgtttatatattaacgacaattttttttttggaaaataaaaagtgcctaaaaga

SEQ ID NO: 120500 - DNA, 3562 bp, Artificial Sequence
  derived and/or modified sequence
gcggccgccctgcgcgcgaagctcgtggcccgagaggggtgcggtcgggccgacggaggcggggccctggctgcctctctccctgctcataggctggccgctcaggcctggccggcctcggggcctcgggattcgcggcggcgctgccaatcaggcgatcgggccccgcccccccggagttgggtgaaatagaggcgggcgtcaagtgtcagtagtcgcggggcaggtacgtgcgctcgcggttctctcgcggaggtcggcggtggcgggagcgggctccggagagcctgagagcacggtggggcggggcgggagaaagtggccgcccggaggacgttggcgtttacgtgtggaagagcggaagagttttgcttttcgtgcgcgccttcgaaaactgcctgccgctgtctgaggagtccacccgaaacctcccctcctccgccggcagccccgcgctgagctcgccgacccaagccagcgtgggcgaggtgggaagtgcgcccgacccgcgcctggagctgcgcccccgagtgcccatggctacaagggtgctgagcatgagcgcccgcctgggacccgtgccccagccgccggcgccgcaggacgagccggtgttcgcgcagctcaagccggtgctgggcgccgcgaatccggcccgcgacgcggcgctcttccccggcgaggagctgaagcacgcgcaccaccgcccgcaggcgcagcccgcgcccgcgcaggccccgcagccggcccagccgcccgccaccggcccgcggctgcctccagaggacctggtccagacaagatgtgaaatggagaagtatctgacacctcagcttcctccagttcctataattccagagcataaaaagtatagacgagacagtgcctcagtcgtagaccagttcttcactgacactgaagggttaccttacagtatcaacatgaacgtcttcctccctgacatcactcacctgagaactggcctctacaaatcccagagaccgtgcgtaacacacatcaagacagaacctgttgccattttcagccaccagagtgaaacgactgcccctcctccggccccgacccaggccctccctgagttcaccagtatattcagctcacaccagaccgcagctccagaggtgaacaatattttcatcaaacaagaacttcctacaccagatcttcatctttctgtccctacccagcagggccacctgtaccagctactgaatacaccggatctagatatgcccagttctacaaatcagacagcagcaatggacactcttaatgtttctatgtcagctgccatggcaggccttaacacacacacctctgctgttccgcagactgcagtgaaacaattccagggcatgcccccttgcacatacacaatgccaagtcagtttcttccacaacaggccacttactttcccccgtcaccaccaagctcagagcctggaagtccagatagacaagcagagatgctccagaatttaaccccacctccatcctatgctgctacaattgcttctaaactggcaattcacaatccaaatttacccaccaccctgccagttaactcacaaaacatccaacctgtcagatacaatagaaggagtaaccccgatttggagaaacgacgcatccactactgcgattaccctggttgcacaaaagtttataccaagtcttctcatttaaaagctcacctgaggactcacactggtgaaaagccatacaagtgtacctgggaaggctgcgactggaggttcgcgcgatcggatgagctgacccgccactaccggaagcacacaggcgccaagcccttccagtgcggggtgtgcaaccgcagcttctcgcgctctgaccacctggccctgcatatgaagaggcaccagaactgagcactgcccgtgtgacccgttccaggtcccctgggctccctcaaatgacagacctaactattcctgtgtaaaaacaacaaaaacaaacaaaagcaagaaaaccacaactaaaactggaaatgtatattttgtatatttgagaaaacagggaatacattgtattaataccaaagtgtttggtcattttaagaatctggaatgcttgctgtaatgtatatggctttactcaagcagatctcatctcatgacaggcagccacgtctcaacatgggtaaggggtgggggtggaggggagtgtgtgcagcgtttttacctaggcaccatcatttaatgtgacagtgttcagtaaacaaatcagttggcaggcaccagaagaagaatggattgtatgtcaagattttacttggcattgagtagtttttttcaatagtaggtaattccttagagatacagtatacctggcaattcacaaatagccattgaacaaatgtgtgggtttttaaaaattatatacatatatgagttgcctatatttgctattcaaaattttgtaaatatgcaaatcagctttataggtttattacaagttttttaggattcttttggggaagagtcataattcttttgaaaataaccatgaatacacttacagttaggatttgtggtaaggtacctctcaacattaccaaaatcatttctttagagggaaggaataatcattcaaatgaactttaaaaaagcaaatttcatgcactgattaaaataggattattttaaatacaaaaggcattttatatgaattataaactgaagagcttaaagatagttacaaaatacaaaagttcaacctcttacaataagctaaacgcaatgtcatttttaaaaagaaggacttagggtgtcgttttcacatatgacaatgttgcatttatgatgcagtttcaagtaccaaaacgttgaattgatgatgcagttttcatatatcgagatgttcgctcgtgcagtactgttggttaaatgacaatttatgtggattttgcatgtaatacacagtgagacacagtaattttatctaaattacagtgcagtttagttaatctattaatactgactcagtgtctgcctttaaatataaatgatatgttgaaaacttaaggaagcaaatgctacatatatgcaatataaaatagtaatgtgatgctgatgctgttaaccaaagggcagaataaataagcaaaatgccaaaaggggtcttaattgaaatgaaaatttaattttgtttttaaaatattgtttatctttatttattttgtggtaatatagtaagtttttttagaagacaattttcataacttgataaattatagttttgtttgttagaaaagttgctcttaaaagatgtaaatagatgacaaacgatgtaaataattttgtaagaggcttcaaaatgtttatacgtggaaacacacctacatgaaaagcagaaatcggttgctgttttgcttctttttccctcttatttttgtattgtggtcatttcctatgcaaataatggagcaaacagctgtatagttgtagaattttttgagagaatgagatgtttatatattaacgacaattttttttttggaaaataaaaagtgcctaaaaga

SEQ ID NO: 120501 - DNA, 1401 bp, Artificial Sequence
  derived and/or modified sequence
actttagctcagacctttcttttaaccttgcctatcatgtttcgagtcagaatttaaatactgtgcagtttaagctacaatacgcttggcctataacttggttccaggcatttatatttatgtcacttttgtctacttattatactaacaaggtggaaaaagcaatcccagtctctccaaaagacaagatgtgaaatggagaagtatctgacacctcagcttcctccagttcctataattccagagcataaaaagtatagacgagacagtgcctcagtcgtagaccagttcttcactgacactgaagggttaccttacagtatcaacatgaacgtcttcctccctgacatcactcacctgagaactggcctctacaaatcccagagaccgtgcgtaacacacatcaagacagaacctgttgccattttcagccaccagagtgaaacgactgcccctcctccggccccgacccaggccctccctgagttcaccagtatattcagctcacaccagaccgcagctccagaggtgaacaatattttcatcaaacaagaacttcctacaccagatcttcatctttctgtccctacccagcagggccacctgtaccagctactgaatacaccggatctagatatgcccagttctacaaatcagacagcagcaatggacactcttaatgtttctatgtcagctgccatggcaggccttaacacacacacctctgctgttccgcagactgcagtgaaacaattccagggcatgcccccttgcacatacacaatgccaagtcagtttcttccacaacaggccacttactttcccccgtcaccaccaagctcagagcctggaagtccagatagacaagcagagatgctccagaatttaaccccacctccatcctatgctgctacaattgcttctaaactggcaattcacaatccaaatttacccaccaccctgccagttaactcacaaaacatccaacctgtcagatacaatagaaggagtaaccccgatttggagaaacgacgcatccactactgcgattaccctggttgcacaaaagtttataccaagtcttctcatttaaaagctcacctgaggactcacactggtgaaaagccatacaagtgtacctgggaaggctgcgactggaggttcgcgcgatcggatgagctgacccgccactaccggaagcacacaggcgccaagcccttccagtgcggggtgtgcaaccgcagcttctcgcgctctgaccacctggccctgcatatgaagaggcaccagaactgagcactgcccgtgtgacccgttccaggtcccctgggctccctcaaatgacagacctaactattcctgtgtaaaaacaacaaaaacaaacaaaagcaagaaaaccac

SEQ ID NO: 120502 - DNA, 2057 bp, Artificial Sequence
  derived and/or modified sequence
agtagtcgcggggcaggtacgtgcgctcgcggttctctcgcggaggtcggcggtggcgggagcgggctccggagagcctgagagcacggtggggcggggcgggagaaagtggccgcccggaggacgttggcgtttacgtgtggaagagcggaagagttttgcttttcgtgcgcgccttcgaaaactgcctgccgctgtctgaggagtccacccgaaacctcccctcctccgccggcagccccgcgctgagctcgccgacccaagccagcgtgggcgaggtgggaagtgcgcccgacccgcgcctggagctgcgcccccgagtgcccatggctacaagggtgctgagcatgagcgcccgcctgggacccgtgccccagccgccggcgccgcaggacgagccggtgttcgcgcagctcaagccggtgctgggcgccgcgaatccggcccgcgacgcggcgctcttccccggcgaggagctgaagcacgcgcaccaccgcccgcggctgcctccagaggacctggtccagacaagatgtgaaatggagaagtatctgacacctcagcttcctccagttcctataattccagagcataaaaagtatagacgagacagtgcctcagtcgtagaccagttcttcactgacactgaagggttaccttacagtatcaacatgaacgtcttcctccctgacatcactcacctgagaactggcctctacaaatcccagagaccgtgcgtaacacacatcaagacagaacctgttgccattttcagccaccagagtgaaacgactgcccctcctccggccccgacccaggccctccctgagttcaccagtatattcagctcacaccagaccgcagctccagaggtgaacaatattttcatcaaacaagaacttcctacaccagatcttcatctttctgtccctacccagcagggccacctgtaccagctactgaatacaccggatctagatatgcccagttctacaaatcagacagcagcaatggacactcttaatgtttctatgtcagctgccatggcaggccttaacacacacacctctgctgttccgcagactgcagtgaaacaattccagggcatgcccccttgcacatacacaatgccaagtcagtttcttccacaacaggccacttactttcccccgtcaccaccaagctcagagcctggaagtccagatagacaagcagagatgctccagaatttaaccccacctccatcctatgctgctacaattgcttctaaactggcaattcacaatccaaatttacccaccaccctgccagttaactcacaaaacatccaacctgtcagatacaatagaaggagtaaccccgatttggagaaacgacgcatccactactgcgattaccctggttgcacaaaagtttataccaagtcttctcatttaaaagctcacctgaggactcacactggtgaaaagccatacaagtgtacctgggaaggctgcgactggaggttcgcgcgatcggatgagctgacccgccactaccggaagcacacaggcgccaagcccttccagtgcggggtgtgcaaccgcagcttctcgcgctctgaccacctggccctgcatatgaagaggcaccagaactgagcactgcccgtgtgacccgttccaggtcccctgggctccctcaaatgacagacctaactattcctgtgtaaaaacaacaaaaacaaacaaaagcaagaaaaccacaactaaaactggaaatgtatattttgtatatttgagaaaacagggaatacattgtattaataccaaagtgtttggtcattttaagaatctggaatgcttgctgtaatgtatatggctttactcaagcagatctcatctcatgacaggcagccacgtctcaacatgggtaaggggtgggggtggaggggagtgtgtgcagcgtttttacctaggcaccatcatttaatgtgacagtgttcagtaaacaaatcagttggcaggcaccagaagaagaatggattgtatgtcaagattttacttggcattgagtag

SEQ ID NO: 120503 - DNA, 1374 bp, Artificial Sequence
  derived and/or modified sequence
atggccacgcgggtactgagcatgagcgcgagattggggcccgtccctcagcccccagccccccaggatgagcccgtgttcgcccagctgaaacctgtgctaggagccgcaaaccctgcaagagatgctgctctcttccctggagaagaactgaagcacgcccaccatagaccccaggctcagcccgctccagcccaggcacctcagcctgcccagccacccgcaacaggcccgaggctgcctccagaagacctggtccagacccgctgcgaaatggaaaaataccttactccccagctgccaccagtgcctatcatccccgagcacaaaaaataccgccgggacagtgcatccgtggtcgatcaattctttacagacactgaaggtctgccctactcaattaacatgaacgtctttctgcctgacatcactcacctgcgaactgggctgtacaaatcgcagagaccttgcgtgactcatatcaaaactgagcccgtagcaattttcagtcatcagtcagaaactaccgcaccgccaccagcacccacgcaagctctgccagagtttacttctatcttcagctcccaccagactgctgccccagaagtcaacaacatcttcattaaacaggaactccccacaccggatctgcacctttctgtacccacgcagcagggccacttgtaccagctgctcaataccccagatttagatatgccctcgtcgactaaccagacagctgccatggacacgctgaatgtgtcaatgtctgccgcaatggcaggactaaacacgcacactagtgcagtgccacagactgccgtaaaacagtttcagggaatgcctccatgcacttacactatgccaagccagttcctgccacagcaagctacttactttccccctagtcccccctctagcgaaccggggagccccgatcgccaagcagaaatgctgcagaatcttacacctccgcccagttacgcggcaactatcgccagtaagcttgcaatccataatccaaatctgccaaccactctacctgttaatagccagaacatccaaccagtgaggtataatcggagatccaatccagacctcgagaaaaggcgaatccactactgcgactatcctggctgtaccaaggtatataccaaatccagccatctcaaagcccatcttagaacacataccggagagaagccatacaagtgcacgtgggaaggctgtgattggagatttgcaagatccgacgagctcactcgtcattatcgaaaacacacaggagctaagccctttcagtgtggagtttgcaatcgctccttttctcgatctgaccatctagccctccatatgaaaagacaccagaattag

SEQ ID NO: 120504 - DNA, 1314 bp, Artificial Sequence
  derived and/or modified sequence
atggctacccgcgtcctgtccatgtcagccagactgggcccggtaccacaaccgccagccccacaagatgagcctgtgtttgctcagttgaaacctgtgctcggagcagctaacccagcgagggatgccgcgttgttcccaggcgaggagctcaaacatgcacatcaccggcccaggctgcccccagaggacctcgtgcagactcggtgcgagatggagaaatacctgaccccacagttgccccctgtgccaatcattcccgaacacaagaagtacaggcgcgattctgcttctgtggtagaccaattctttaccgatacagagggactgccttatagtatcaacatgaacgtcttcttgcccgacattacccacttacgcaccgggttgtacaagagccagcggccttgcgtcacacatattaagaccgaacctgtggctattttttcacatcagtcagagacaactgctccaccacctgcacctacccaggccctcccggagtttaccagcattttttcttcacatcagacggctgcaccagaagttaacaatatctttattaaacaggaactgcccacacccgatctgcatctatcggtccccactcagcagggtcacctataccaattgttaaatactcccgatcttgacatgccatcatcgacaaatcagaccgcagcgatggacacactgaatgtctccatgagcgctgcaatggcagggctgaacacacacacatcagccgtaccacagacggctgttaagcaattccagggcatgccaccctgcacttacactatgccgagtcagtttctccctcagcaggcaacatactttcccccttctcctcctagttcagagccgggctcccccgatagacaggccgagatgctgcagaatttaacgcctccgcctagctacgccgcgacaattgcaagcaagctggctatacataatcctaacctgccaactaccttgccagtgaattcccagaatatccagcccgtcagatacaataggcgatctaatccagacctagagaagaggagaattcactactgcgactaccccgggtgcacaaaggtgtataccaagagttcccacctcaaagcacacctgcggactcacacaggagagaagccgtataaatgcacatgggaaggctgtgactggagatttgcgagatccgacgaactgacgagacattacagaaagcacactggagcgaaaccattccagtgtggcgtctgcaatcgatcattctctaggagcgaccacctggccctgcatatgaaaagacaccagaactag

SEQ ID NO: 120505 - DNA, 1374 bp, Artificial Sequence
  derived and/or modified sequence
atggccaccagggtgctgtccatgtctgcccggctgggccctgtgccccagcccccagccccccaggatgagcctgtgtttgcccagctgaagcctgtgctgggcgccgccaacccagccagagatgctgccctcttccctggagaggagctgaagcacgcccaccaccggccccaggcccagcctgccccagcccaggccccccagcctgcccagcccccagccaccggcccccggctgcccccagaggacctggtgcagacccgctgtgagatggagaagtacctgaccccccagctgccccctgtgcccatcatccctgagcacaagaagtacagaagagacagcgcctctgtggtggaccagttcttcacagacacagagggcctgccctacagcatcaacatgaatgtgttcctgcctgacatcacccacctgaggacaggcctgtacaagagccagaggccctgtgtgacccacatcaagacagagcctgtggccatcttcagccaccagagcgagaccacagcccctcctccagcccccacccaggccctgcctgagttcaccagcatcttcagcagccaccagacagctgcccctgaggtgaacaacatcttcatcaagcaggagctgcccaccccagacctgcacctgtctgtgcccacccagcagggccacctgtaccagctgctgaacaccccagacctggacatgcccagcagcaccaaccagacagctgccatggacaccctgaatgtgtccatgtctgctgccatggccggcctgaacacccacaccagcgctgtgccccagacagctgtgaagcagttccagggcatgccaccctgcacctacaccatgcccagccagttcctgccccagcaggccacctacttcccccccagcccccccagcagcgagcccggcagcccagaccggcaggccgagatgctgcagaacctgaccccacctccttcctatgctgccaccatcgccagcaagctggccatccacaaccccaacctgcccaccaccctgcctgtgaacagccagaacatccagcctgtgcgctacaacagaagaagcaacccagacctggagaagaggcgcatccactactgtgactacccaggctgcaccaaggtgtacaccaagagcagccacctgaaggcccacctgcggacccacactggagagaagccctacaagtgcacctgggagggctgtgactggaggtttgcccggagtgatgagctgaccaggcactacaggaagcacactggagccaagcccttccagtgtggggtgtgcaacagaagcttcagcagaagtgaccacctggccctgcacatgaagaggcaccagaactag

SEQ ID NO: 120506 - DNA, 1314 bp, Artificial Sequence
  derived and/or modified sequence
atggccaccagggtgctgtccatgtctgcccggctgggccctgtgccccagcccccagccccccaggatgagcctgtgtttgcccagctgaagcctgtgctgggcgccgccaacccagccagagatgctgccctcttccctggagaggagctgaagcacgcccaccaccggccccggctgcccccagaggacctggtgcagacccgctgtgagatggagaagtacctgaccccccagctgccccctgtgcccatcatccctgagcacaagaagtacagaagagacagcgcctctgtggtggaccagttcttcacagacacagagggcctgccctacagcatcaacatgaatgtgttcctgcctgacatcacccacctgaggacaggcctgtacaagagccagaggccctgtgtgacccacatcaagacagagcctgtggccatcttcagccaccagagcgagaccacagcccctcctccagcccccacccaggccctgcctgagttcaccagcatcttcagcagccaccagacagctgcccctgaggtgaacaacatcttcatcaagcaggagctgcccaccccagacctgcacctgtctgtgcccacccagcagggccacctgtaccagctgctgaacaccccagacctggacatgcccagcagcaccaaccagacagctgccatggacaccctgaatgtgtccatgtctgctgccatggccggcctgaacacccacaccagcgctgtgccccagacagctgtgaagcagttccagggcatgccaccctgcacctacaccatgcccagccagttcctgccccagcaggccacctacttcccccccagcccccccagcagcgagcccggcagcccagaccggcaggccgagatgctgcagaacctgaccccacctccttcctatgctgccaccatcgccagcaagctggccatccacaaccccaacctgcccaccaccctgcctgtgaacagccagaacatccagcctgtgcgctacaacagaagaagcaacccagacctggagaagaggcgcatccactactgtgactacccaggctgcaccaaggtgtacaccaagagcagccacctgaaggcccacctgcggacccacactggagagaagccctacaagtgcacctgggagggctgtgactggaggtttgcccggagtgatgagctgaccaggcactacaggaagcacactggagccaagcccttccagtgtggggtgtgcaacagaagcttcagcagaagtgaccacctggccctgcacatgaagaggcaccagaactag

SEQ ID NO: 120507 - DNA, 1374 bp, Artificial Sequence
  derived and/or modified sequence
atggccacccgggtgctgagcatgagcgcccggctgggccccgtgccacagccacctgctccacaggatgagcctgtgttcgcacaattaaagccagtgctaggcgccgccaacccagctagggacgctgcactgttccccggcgaggaattgaaacatgcccaccaccgacctcaggcacaacctgcgccagcccaagccccacagccagcccagcctccagctactgggccaagactgccacctgaagatttagtgcaaactcgctgtgagatggagaagtacctgacaccccagctacctcccgtgccaatcatcccagaacataagaagtatcgcagagacagcgcatcggtggtggatcagttctttactgacacggaaggcctgccctatagtatcaatatgaacgtgttccttcctgatattacacacctcagaaccggtctctacaagtctcagcgtccatgtgtgacacacatcaaaaccgagcccgtcgcgatttttagccatcagtcagagacaactgcacccccaccggcgccaacacaagcactgcctgagtttactagcatttttagcagtcatcagaccgctgcaccggaggtaaataacatttttatcaaacaggagttacctaccccagatcttcatctaagcgtacccacccagcagggccatctctaccagctgttgaacactcctgacctagatatgcctagctccacaaatcaaaccgcagccatggataccctgaacgtgtctatgtcagctgctatggccggattaaacacccatactagtgccgttccccaaaccgctgtgaaacagttccagggtatgccgccgtgcacgtacactatgccctcgcagttcttgcctcagcaggccacctatttccccccttcacccccaagctctgaaccaggctcacccgaccgtcaagccgaaatgcttcagaatctgacaccccctccgagttacgccgccaccattgcgtcaaaactggctatccacaatccaaacttaccgacaactcttcccgtgaacagccagaacatacagcccgttagatacaataggaggtcaaatccggatttggagaagcggcgcattcattattgtgactatcctggctgtacaaaggtctatactaagtcaagccacctgaaggcccacttgcggacccacactggagaaaagccttacaagtgcacctgggaaggttgtgattggagatttgcacgaagcgacgagctaactagacactaccgtaaacatactggggccaaacctttccagtgcggcgtgtgcaaccgatcattctcccggtccgaccacctggcgctgcatatgaaacggcatcaaaattag

SEQ ID NO: 120508 - DNA, 1314 bp, Artificial Sequence
  derived and/or modified sequence
atggccacccgggtgctgagcatgagcgcccggctgggccccgtgccgcaaccgcccgctcctcaagacgaacccgtcttcgcgcagctaaaacccgtcctgggggctgccaaccctgctcgcgacgcagccctctttccaggcgaagagctgaagcacgcacaccaccggccaagacttcccccggaggacttagttcagacccgctgcgagatggagaagtacctgactccccagctgccccctgttccaataattcccgagcataagaagtaccgacgggattctgcatctgtcgtggatcagttctttacagacaccgagggattaccatattccattaatatgaacgtattccttcctgacattacccatctgagaacaggactttataagtcccaaagaccctgcgtgacccacatcaaaaccgagccagtcgcaatcttcagtcaccagtcagagacgacggcccccccgcctgcccctactcaagcactacctgaatttactagtattttctcctcacatcagacagcggcacccgaggtcaataatatcttcataaagcaggaattgccgacgccggatctgcacctcagtgttccaacacagcagggtcatctctaccagctgctgaatacacccgacttggatatgccaagctccacaaaccagacagcagcaatggatactctcaacgtgagtatgtcagcggctatggccggattgaacacccacaccagcgccgttcctcagactgcagttaagcagttccaggggatgcctccgtgtacttatacgatgccttcccagttcctcccacagcaggcgacctactttcctccatctccgccctcctctgagcccgggtcccctgatcggcaagccgagatgctccagaatcttacacccccaccgtcatatgctgctacaatagccagtaagctagctatccacaaccctaatttgcctaccactctgccagtcaattcacagaatatccagccggtgaggtacaacaggagatctaacccggacctggagaaacgacggattcactactgcgactacccaggatgcactaaggtgtatacaaaatcttcgcacctgaaagcacacctccggacacacacaggggagaagccttataagtgtacctgggagggctgtgattggcgtttcgcccgcagcgatgagctgaccaggcattatagaaaacataccggcgctaaacctttccagtgcggtgtatgtaatcggtcgttttcacgcagcgatcatctggctttgcatatgaagcggcatcagaactag

SEQ ID NO: 120509 - DNA, 1374 bp, Artificial Sequence
  derived and/or modified sequence
atggccacaagggtactaagtatgagcgcgagactgggcccagtgcctcaacctcccgctccgcaggacgagccagtttttgcacaattgaagccagtactaggcgctgctaacccggcacgagatgcagctttatttcccggtgaggagttgaagcacgcccatcatagaccacaggcccagccggctcctgcccaagctcctcagccggcacagcctcctgccaccggacccagattgccaccggaggatttggtacagacccgttgcgaaatggagaagtatttgactcctcagctcccaccagtacctatcattccagagcacaagaagtaccggagggattccgcaagcgtggtcgaccagttttttaccgacacagaggggctaccttacagtatcaatatgaacgtgttcttgccagatattactcacctaagaaccggcttgtacaagtctcagaggccctgtgtgacacacattaagacagagccagtggccatcttttcacaccagtctgaaactacagcacctcccccagctcccactcaggctttgcctgagttcacaagtatcttctcatctcatcagaccgccgctcccgaggtcaataacattttcatcaaacaggagttacctacgccggatcttcacctgtccgtcccaactcagcaaggacacctgtatcagcttctgaacacgcctgacctggacatgccatctagcactaatcagactgccgctatggatacgctcaatgtgtccatgagtgccgcaatggccggactgaatacccatacttctgctgtacctcagaccgctgtgaaacaattccaaggcatgcctccctgcacatatactatgcccagccaatttctcccccagcaagctacctactttccaccatcgcccccttcatcggagccgggatctccagatcggcaagccgagatgctgcagaacttaactcccccaccctcatatgccgcaaccatcgccagcaaactcgcaatacacaatccaaatcttcctacgacgttgccagtgaattcccagaacattcagcccgttaggtacaataggaggagtaatccagacctggaaaaacggaggattcactattgtgactaccccggatgtaccaaggtttataccaagtcctcccacttaaaggcccaccttaggacacacactggtgaaaagccgtacaagtgcacttgggagggttgcgattggaggtttgccagatccgacgaactgaccagacactatcgcaaacacaccggagccaaaccttttcaatgtggcgtttgtaataggtctttttccagaagcgatcatctggcgctgcatatgaagcgacaccaaaattag

SEQ ID NO: 120510 - DNA, 1314 bp, Artificial Sequence
  derived and/or modified sequence
atggccacaagagttctttcaatgagcgctagactgggacccgtaccacagccacccgcaccccaggatgagccggttttcgctcagctcaaaccagttctgggcgctgctaatcccgctagggacgccgcactattccccggtgaggaactgaaacatgctcatcacaggcccaggcttccgcctgaagacttggtgcagactcgctgcgaaatggaaaaatatttgactccccaactccctcctgttcccattattcccgaacataagaaataccgtcgcgactcagccagcgtggtggatcaattcttcacagacactgaaggactcccttattccataaatatgaatgtatttctgcccgacatcacccaccttcggacaggcctctataaaagccaacggccatgtgtgacccacataaaaaccgaaccagttgctattttctctcatcagtccgagacaaccgccccaccacctgcccctactcaagctttgcctgagtttactagcatatttagttctcaccagaccgccgcacccgaggtgaacaatatattcataaaacaggagctaccaacaccagatcttcacctcagcgtgccgacccagcaagggcatctctaccagctccttaacacccctgacctggacatgccttcgtcaaccaatcagacagcagcaatggatactctcaatgtgtccatgtccgccgctatggccggtctcaatacacatacctccgctgttcctcagaccgctgtgaagcaatttcagggtatgcctccttgtacatacaccatgcccagccagttcctcccccagcaggcaacatattttccaccaagtccaccatccagtgaacccggaagccctgataggcaagcggaaatgctccaaaatctcacacccccacccagctatgcagcaaccattgccagcaaactagcgattcataacccaaacctcccgaccacattaccagtcaattctcagaatatacagcctgttcggtacaataggcgaagtaacccagacctggagaaacgtagaatccactactgtgactaccctgggtgcaccaaggtttatactaagagttcacatttgaaagcacatctcagaacacacactggagaaaagccttataagtgcacttgggaggggtgcgactggaggttcgctcgaagcgacgagctgacaaggcactacaggaaacacacaggagctaaaccattccagtgcggggtgtgtaatcgaagcttcagcagatccgatcacctcgccctccatatgaagaggcaccaaaattag

SEQ ID NO: 120511 - DNA, 1374 bp, Artificial Sequence
  derived and/or modified sequence
atggccaccagagtgctgagcatgagcgccagactgggccccgtgccccagccccccgccccccaggacgagcccgtgttcgcccagctgaagcccgtgctgggcgccgccaaccccgccagagacgccgccctgttccccggcgaggagctgaagcacgcccaccacagaccccaggcccagcccgcccccgcccaggccccccagcccgcccagccccccgccaccggccccagactgccccccgaggacctggtgcagaccagatgcgagatggagaagtacctgaccccccagctgccccccgtgcccatcatccccgagcacaagaagtacagaagagacagcgccagcgtggtggaccagttcttcaccgacaccgagggcctgccctacagcatcaacatgaacgtgttcctgcccgacatcacccacctgagaaccggcctgtacaagagccagagaccctgcgtgacccacatcaagaccgagcccgtggccatcttcagccaccagagcgagaccaccgcccccccccccgcccccacccaggccctgcccgagttcaccagcatcttcagcagccaccagaccgccgcccccgaggtgaacaacatcttcatcaagcaggagctgcccacccccgacctgcacctgagcgtgcccacccagcagggccacctgtaccagctgctgaacacccccgacctggacatgcccagcagcaccaaccagaccgccgccatggacaccctgaacgtgagcatgagcgccgccatggccggcctgaacacccacaccagcgccgtgccccagaccgccgtgaagcagttccagggcatgcccccctgcacctacaccatgcccagccagttcctgccccagcaggccacctacttcccccccagcccccccagcagcgagcccggcagccccgacagacaggccgagatgctgcagaacctgacccccccccccagctacgccgccaccatcgccagcaagctggccatccacaaccccaacctgcccaccaccctgcccgtgaacagccagaacatccagcccgtgagatacaacagaagaagcaaccccgacctggagaagagaagaatccactactgcgactaccccggctgcaccaaggtgtacaccaagagcagccacctgaaggcccacctgagaacccacaccggcgagaagccctacaagtgcacctgggagggctgcgactggagattcgccagaagcgacgagctgaccagacactacagaaagcacaccggcgccaagcccttccagtgcggcgtgtgcaacagaagcttcagcagaagcgaccacctggccctgcacatgaagagacaccagaactag

SEQ ID NO: 120512 - DNA, 1314 bp, Artificial Sequence
  derived and/or modified sequence
atggccaccagagtgctgagcatgagcgccagactgggccccgtgccccagccccccgccccccaggacgagcccgtgttcgcccagctgaagcccgtgctgggcgccgccaaccccgccagagacgccgccctgttccccggcgaggagctgaagcacgcccaccacagacccagactgccccccgaggacctggtgcagaccagatgcgagatggagaagtacctgaccccccagctgccccccgtgcccatcatccccgagcacaagaagtacagaagagacagcgccagcgtggtggaccagttcttcaccgacaccgagggcctgccctacagcatcaacatgaacgtgttcctgcccgacatcacccacctgagaaccggcctgtacaagagccagagaccctgcgtgacccacatcaagaccgagcccgtggccatcttcagccaccagagcgagaccaccgcccccccccccgcccccacccaggccctgcccgagttcaccagcatcttcagcagccaccagaccgccgcccccgaggtgaacaacatcttcatcaagcaggagctgcccacccccgacctgcacctgagcgtgcccacccagcagggccacctgtaccagctgctgaacacccccgacctggacatgcccagcagcaccaaccagaccgccgccatggacaccctgaacgtgagcatgagcgccgccatggccggcctgaacacccacaccagcgccgtgccccagaccgccgtgaagcagttccagggcatgcccccctgcacctacaccatgcccagccagttcctgccccagcaggccacctacttcccccccagcccccccagcagcgagcccggcagccccgacagacaggccgagatgctgcagaacctgacccccccccccagctacgccgccaccatcgccagcaagctggccatccacaaccccaacctgcccaccaccctgcccgtgaacagccagaacatccagcccgtgagatacaacagaagaagcaaccccgacctggagaagagaagaatccactactgcgactaccccggctgcaccaaggtgtacaccaagagcagccacctgaaggcccacctgagaacccacaccggcgagaagccctacaagtgcacctgggagggctgcgactggagattcgccagaagcgacgagctgaccagacactacagaaagcacaccggcgccaagcccttccagtgcggcgtgtgcaacagaagcttcagcagaagcgaccacctggccctgcacatgaagagacaccagaactag

SEQ ID NO: 120513 - protein, 171 aa, Artificial Sequence
  derived and/or modified sequence
MHPFYTRAATMIGEIAAAVSFISKFLRTKGLTSERQLQTFSQSLQELLAEHYKHHWFPEKPCKGSGYRCIRINHKMDPLIGQAAQRIGLSSQELFRLLPSELTLWVDPYEVSYRIGEDGSICVLYEASPAGGSTQNSTNVQMVDSRISCKEELLLGRTSPSKNYNMMTVSG

SEQ ID NO: 120514 - DNA, 516 bp, Artificial Sequence
  derived and/or modified sequence
atgcacccattttatacaagggccgcaacaatgatcggcgaaatagccgctgcagtgtcattcatcagcaaattcctcaggacaaagggacttaccagcgaacggcagctgcagacgttttctcagtcgcttcaggagctcctagcagaacattataagcaccattggtttcccgaaaaaccttgtaagggctccggctataggtgtatccgtattaatcacaaaatggatcctctgataggacaagcagcccagaggatcggactctctagccaggagctatttcgtctgttgccgtctgagctgactctgtgggtcgacccgtacgaggtctcttacagaattggcgaggatggctcaatctgcgtactctatgaagcttctcccgccgggggtagcacccagaacagcactaatgtccagatggtcgatagccggattagctgtaaggaggagctgctactgggccggacaagcccgtctaaaaactacaacatgatgacagtatccggatag

SEQ ID NO: 120515 - DNA, 516 bp, Artificial Sequence
  derived and/or modified sequence
atgcaccccttctacacccgggccgccaccatgattggagaaattgctgctgctgtgtccttcatcagcaagttcctgcggaccaagggcctgaccagcgagcggcagctgcagaccttcagccagagcctgcaggagctgctggccgagcactacaagcaccactggttccctgagaagccctgcaagggcagcggctaccgctgcatccgcatcaaccacaagatggaccccctcatcggccaggccgcccagagaattggcctgagcagccaggagctgttccggctgctgcccagcgagctgaccctgtgggtggacccctatgaggtgtcctacagaattggagaagatggcagcatctgtgtgctgtatgaggccagccctgctgggggcagcacccagaacagcaccaacgtgcagatggtggacagccgcatcagctgcaaggaggagctgctgctgggccgcaccagccccagcaagaactacaacatgatgacagtgtctggatag

SEQ ID NO: 120516 - DNA, 516 bp, Artificial Sequence
  derived and/or modified sequence
atgcaccccttctacacccgggccgccaccatgatcggcgagatcgccgccgctgtttcctttattagcaagttcctgaggaccaaggggctcactagtgagcgccaactccagacatttagtcagagcctgcaggaattactggccgagcattataaacatcactggttccccgaaaaaccttgtaaaggctccggttatcggtgcatccggatcaaccacaaaatggatccccttattggacaggctgcccagcgcatcgggctcagctctcaggagctgtttaggctgctgccaagcgagttaactctgtgggttgacccctacgaggtgtcatacagaataggggaggatggctcaatatgcgttctgtacgaagcatctccagctggaggaagtacgcaaaattccactaacgtgcagatggttgacagtcgcatctcttgtaaagaggagttgctcctcggccgcacatccccatccaaaaattacaatatgatgaccgtatccggctag

SEQ ID NO: 120517 - DNA, 516 bp, Artificial Sequence
  derived and/or modified sequence
atgcatccattctacactcgagccgcaacaatgattggcgagattgctgccgctgtctcgttcatttccaagttcctgcgcactaagggactgacttctgagcgtcagctgcagactttttcccagtcgctgcaggagttactggcagagcattacaaacaccattggtttcccgaaaaaccctgtaagggatccggctaccggtgcatcaggattaaccataagatggacccactcatcggacaggccgctcagcggatcggactaagttcacaggaactttttcggctgctcccaagcgagctaacgctatgggtggatccctatgaagtgagttacagaattggagaagacggatccatttgtgtcctctacgaggcaagccccgctggcggatcgacacagaacagcaccaatgttcaaatggtcgactctcgcatctcttgtaaagaagagcttctgcttggcagaacctccccctcaaaaaattataacatgatgactgtttccggctag

SEQ ID NO: 120518 - DNA, 2448 bp, Artificial Sequence
  derived and/or modified sequence
acttccttttcgtggcactataaagggtgctgcacggcgcttgcatctcttcgcctctcggagctggaaatgcagctattgagatcttcgaatgctgcggagctggaggcggaggcagctggggaggtccgagcgatgtgaccaggccgccatcgctcgtctcttcctctctcctgccgcctcctgtctcgaaaataacttttttagtctaaagaaagaaagacaaaagtagtcgtccgcccctcacgccctctcttcctctcagccttccgcccggtgaggaagcccggggtggctgctccgccgtcggggccgcgccgccgagccccagccgccccgggccgcccccgcacgccgcccccatgcatcccttctacacccgggccgccaccatgataggcgagatcgccgccgccgtgtccttcatctccaagtttctccgcaccaaggggctcacgagcgagcgacagctgcagaccttcagccagagcctgcaggagctgctggcagaacattataaacatcactggttcccagaaaagccatgcaagggatcgggttaccgttgtattcgcatcaaccataaaatggatcctctgattggacaggcagcacagcggattggactgagcagtcaggagctgttcaggcttctcccaagtgaactcacactctgggttgacccctatgaagtgtcctacagaattggagaggatggctccatctgtgtgctgtatgaagcctcaccagcaggaggtagcactcaaaacagcaccaacgtgcaaatggtagacagccgaatcagctgtaaggaggaacttctcttgggcagaacgagcccttccaaaaactacaatatgatgactgtatcaggttaagatatagtctgtggatggatcatctgatgatgatggataaatttgatttttgctttgggtgggctcctcttggggatggattatggaatttaaaccatgtcacagctgtgaagatctggcacaagatagaatggtaaaaaaaaaaaaaattttaagtgacagtgccatagtttggacagtacctttcaatgattaattttaatagcctgtgagtccaagtaaatgatcactttatttgctagggagggaagtcctagggtggtttcagtttctcccagacatacctaaatttttacatcaatccttttaaagaaaatctgtatttcaaagaatctttctctgcagtaaatctcgcaggggaatttgcactattacacttgaaagttgttattgttaaccttttcggcagcttttaataggaaagttaaacgttttaaacatggtagtactggaaattttacaagacttttacctagcacttaaatatgtataaatgtacataaagacaaactagtaagcatgacctggggaaatggtcagaccttgtattgtgtttttggccttgaaagtagcaagtgaccagaatctgccatggcaacaggctttaaaaaagacccttaaaaagacactgtctcaactgtggtgttagcaccagccagctctctgtacatttgctagcttgtagttttctaagactgagtaaacttcttatttttagaaagtggaggtctggtttgtaactttccttgtacttaattgggtaaaagtcttttccacaaaccaccatctattttgtgaactttgttagtcatcttttatttggtaaattatgaactggtgtaaatttgtacagttcatgtatattgattgtggcaaagttgtacagatttctatattttggatgagaaatttttcttctctctataataaatcgtttcttatcttggcattttaatcaatctcttgtcatgattatagaggtttagctaaaagtattttttcttagaagacaggttctataaactgaatctctgttgcacactggtcatgctggaaaaacatttgatgaggaatgaagatgctctgtatatacatgtttaggttttacaggaaacacaggagtagcatgttttaaaaatttctaaagtcaaaacatggacacattcacaggctaatgatctcatgaaataaggataagagaccacggtagcatctaccaaaaatgtgatactcaaaggattacatttcattgcttccctgttgaagtgaagatataaatgttccattctgacccacctttgaaaaacaattactttgccccatggattctttgttcaattagaaatttccccggggcaggtgacccatagtcttaaagaacaggctaaacaccacagagagattggttgctttttgcttttcatcacctgcaagatgtacataaaaatcacataagctggaattcaacaaaaggtatgtttatgaacttttattctcaaaagttgaaatgctgactttctcgattcctcattttcagacttttatttcagataaatactaaaaacctaag

SEQ ID NO: 120519 - DNA, 516 bp, Artificial Sequence
  derived and/or modified sequence
atgcaccccttctacaccagagccgccaccatgatcggcgagatcgccgccgccgtgagcttcatcagcaagttcctgagaaccaagggcctgaccagcgagagacagctgcagaccttcagccagagcctgcaggagctgctggccgagcactacaagcaccactggttccccgagaagccctgcaagggcagcggctacagatgcatcagaatcaaccacaagatggaccccctgatcggccaggccgcccagagaatcggcctgagcagccaggagctgttcagactgctgcccagcgagctgaccctgtgggtggacccctacgaggtgagctacagaatcggcgaggacggcagcatctgcgtgctgtacgaggccagccccgccggcggcagcacccagaacagcaccaacgtgcagatggtggacagcagaatcagctgcaaggaggagctgctgctgggcagaaccagccccagcaagaactacaacatgatgaccgtgagcggctag

SEQ ID NO: 120520 - DNA, 1581 bp, Artificial Sequence
  derived and/or modified sequence
atggcggtgtttccttcctcgggccttccacgatgcctgctgacactgattctcctgcagctgcccaaactcgattcagcaccattcgatgtgatcggaccccccgagcccatcctagctgtggtgggcgaggatgcagagctcccatgcaggctttcgccaaacgcatctgcggagcatctggagctcaggtggttccgaaagaaggtgtccccagccgtcttggtacaccgcgatggaagggaacaggaggccgagcagatgccagaatacaggggcagggccactctggtgcaagatggcatcgctaaggggcgtgtggccttgaggatccgtggcgtcagagtctctgacgatggtgagtatacttgtttcttccgcgaggatggttcctatgaggaggccctcgtgcatctcaaagtggccgctctggggtccgatccacatatatccatgcaggtgcaggagaacggcgaaatttgtctcgagtgcacaagtgtcgggtggtatcccgagcctcaagtgcaatggcgcacaagcaagggcgagaagtttccctccacatctgagtctagaaatcccgacgaagagggcttatttaccgttgctgcatccgttattattagagacacctcagctaaaaacgtttcgtgttatatccagaacctcctgctggggcaggaaaagaaagtggagatttccattcctgcctcctctctgccccggctgacgccgtggattgtggcggtggctgttattctgatggtgcttggtctactgaccattgggtccatcttttttacctggcggctgtataatgagagacccagagagcgccgcaacgaatttagcagtaaggaacgactgctggaagagctgaagtggaagaaagccaccctacacgcagttgacgtcactctcgatcccgacactgcccaccctcacctcttcttatacgaagattctaaatctgtcaggctggaagatagtcgacagaagttgcccgagaagaccgagcggtttgactcttggccctgcgtgctcgggcgggaaacattcacatcgggccgccattattgggaggtggaggtgggggataggactgattgggccatcggtgtgtgtagagagaacgtgatgaagaaaggttttgacccaatgacccccgaaaatggattttgggctgtggagctgtatggcaatggctattgggctttgacacctctccgcacccccctcccactggcaggccccccccgaagagtcgggatatttttggactacgaatcaggtgatatcagtttttataatatgaacgacgggtctgacatttatacattcagtaatgtcacattttctggacctttgaggcctttcttttgtctttggagtagcggcaaaaaaccgctgacgatatgccctatagccgatggtcccgagcgcgtgacggtgatcgctaacgcacaagatctgagcaaagaaatccccctgtccccaatgggtgaggatagcgccccaagagacgcggataccctccactcaaagttgatcccaacccagccttcgcagggcgccccatag

SEQ ID NO: 120521 - DNA, 1485 bp, Artificial Sequence
  derived and/or modified sequence
atggctgtgttccccagctccggtctcccccggtgcctgctcacattaattctgctgcaactgcctaagctggatagcgcaccatttgacgtcatcggtccacccgaacctatcctagctgtggtcggcgaggacgctgagctgccctgccggttgtccccaaatgcaagcgccgagcacctagaacttaggtggttccgaaagaaagtgagccccgctgtccttgtgcaccgggatgggagggaacaggaagcagagcagatgcctgaatacaggggtcgcgccaccctagtgcaagacggcatagctaaaggccgagtggcactcaggattagaggggtcagggtgagtgatgatggagagtacacctgcttcttccgggaagacggttcctatgaagaagcattggtccacttgaaggtggcggcactgggcagtgatccacatatctcgatgcaggtccaggagaacggggaaatttgcctcgaatgcacctctgtgggatggtacccggagcctcaagtgcagtggcgaacctcaaaaggtgagaagttcccaagtacatctgaatccagaaatcctgatgaggaaggcctcttcaccgtggcagcgtcagtcataattagggacaccagcgccaagaacgtgtcttgttacattcagaacctgttgcttgggcaggaaaaaaaagtggagattagtatccccgcatcctccctgccacggctgacaccctggatcgtagccgtggctgtgatcctgatggtactgggtctgctgacgattggcagcatttttttcacctggaggctgtacaatgagagacctagagaacgccgcaatgaattctcttctaaggagcgactattagaggagttaaagtggaagaaggctaccctgcacgctgtagacgtaactctagatcccgacaccgcacatcctcacttatttctgtacgaagattccaagtctgtgcgactagaggattcgcggcaaaagttacctgaaaagacagagagatttgattcatggccctgtgttctgggcagggaaacattcacatctggcagacattattgggaggtagaggtcggagacagaacagactgggctatcggcgtgtgtcgtgaaaatgttatgaaaaagggctttgaccccatgactccagagaatggtttctgggccgtggagctgtacggaaatggatactgggccctaacacccctccggaccccgctgcccctcgctggcccaccccgaagagtgggcatcttccttgactatgaaagcggcgatatatccttttacaacatgaatgacggctcagatatatacacctttagcaacgtcaccgtgatcgcaaacgcacaggacctttcaaaggagatcccactatcacccatgggcgaagactcggcaccgagggatgctgataccctccactcaaagctgattcccactcagcctagccagggcgccccatag

SEQ ID NO: 120522 - DNA, 1581 bp, Artificial Sequence
  derived and/or modified sequence
atggctgtgttccccagcagcggcctgccccgctgcctgctgaccctcatcctgctgcagctgcccaagctggacagcgccccctttgatgtgattggccccccagagcccatcctggccgtggtgggggaggatgctgagctgccctgccgcctgagccccaatgccagcgctgagcacctggagctgcgctggttcaggaagaaggtgtccccagctgtgctggtgcacagagatggccgggagcaggaggccgagcagatgcctgagtaccggggccgggccaccctggtgcaggacggcatcgccaagggccgggtggccctgcgcatccggggcgtgcgggtgtctgatgatggagagtacacctgcttcttccgggaggatggcagctatgaggaggccctggtgcacctgaaggtggccgccctgggcagtgacccccacatctccatgcaggtgcaggagaatggagagatctgcctggagtgcacctctgtgggctggtacccagagccccaggtgcagtggaggaccagcaaaggagagaagttccccagcaccagcgagagcaggaacccagatgaggagggcctcttcaccgtggccgccagcgtcatcatccgggacaccagcgccaagaatgtgtcctgctacatccagaacctgctgctgggccaggagaagaaggtggagatcagcatcccagccagcagcctgccccggctgaccccctggatcgtggccgtggccgtcatcctgatggtgctgggcctgctgaccatcggcagcatcttcttcacctggaggctgtacaatgaaagaccccgggagaggagaaatgagttcagcagcaaggagcggctgctggaggagctgaagtggaagaaggccaccctgcatgctgtggatgtgaccctggaccctgacacagcccacccccacctgttcctgtatgaggacagcaagtctgtgcggctggaggacagccggcagaagctgcctgagaagacagaaagatttgacagctggccctgtgtgctgggccgggagaccttcaccagcggccgccactactgggaggtggaggtgggggacagaacagactgggccatcggcgtgtgcagagaaaatgtgatgaagaagggctttgaccccatgaccccagaaaatggcttctgggccgtggagctgtatggaaatggctactgggccctgacccccctgcggacccccctgcccctggccggccccccccggcgggtgggcatcttcctggactatgagagcggggacatctccttctacaacatgaatgatggcagtgacatctacaccttcagcaatgtgaccttcagcggccccctgcggcccttcttctgcctgtggagcagcggcaagaagcccctgaccatctgccccatcgcagatggccctgagcgggtgacagtgattgccaatgcccaggacctgagcaaggagatccccctgagccccatgggagaggacagcgcccccagagatgctgacaccctgcacagcaagctgatccccacccagcccagccagggcgccccctag

SEQ ID NO: 120523 - DNA, 1485 bp, Artificial Sequence
  derived and/or modified sequence
atggctgtgttccccagcagcggcctgccccgctgcctgctgaccctcatcctgctgcagctgcccaagctggacagcgccccctttgatgtgattggccccccagagcccatcctggccgtggtgggggaggatgctgagctgccctgccgcctgagccccaatgccagcgctgagcacctggagctgcgctggttcaggaagaaggtgtccccagctgtgctggtgcacagagatggccgggagcaggaggccgagcagatgcctgagtaccggggccgggccaccctggtgcaggacggcatcgccaagggccgggtggccctgcgcatccggggcgtgcgggtgtctgatgatggagagtacacctgcttcttccgggaggatggcagctatgaggaggccctggtgcacctgaaggtggccgccctgggcagtgacccccacatctccatgcaggtgcaggagaatggagagatctgcctggagtgcacctctgtgggctggtacccagagccccaggtgcagtggaggaccagcaaaggagagaagttccccagcaccagcgagagcaggaacccagatgaggagggcctcttcaccgtggccgccagcgtcatcatccgggacaccagcgccaagaatgtgtcctgctacatccagaacctgctgctgggccaggagaagaaggtggagatcagcatcccagccagcagcctgccccggctgaccccctggatcgtggccgtggccgtcatcctgatggtgctgggcctgctgaccatcggcagcatcttcttcacctggaggctgtacaatgaaagaccccgggagaggagaaatgagttcagcagcaaggagcggctgctggaggagctgaagtggaagaaggccaccctgcatgctgtggatgtgaccctggaccctgacacagcccacccccacctgttcctgtatgaggacagcaagtctgtgcggctggaggacagccggcagaagctgcctgagaagacagaaagatttgacagctggccctgtgtgctgggccgggagaccttcaccagcggccgccactactgggaggtggaggtgggggacagaacagactgggccatcggcgtgtgcagagaaaatgtgatgaagaagggctttgaccccatgaccccagaaaatggcttctgggccgtggagctgtatggaaatggctactgggccctgacccccctgcggacccccctgcccctggccggccccccccggcgggtgggcatcttcctggactatgagagcggggacatctccttctacaacatgaatgatggcagtgacatctacaccttcagcaatgtgacagtgattgccaatgcccaggacctgagcaaggagatccccctgagccccatgggagaggacagcgcccccagagatgctgacaccctgcacagcaagctgatccccacccagcccagccagggcgccccctag

SEQ ID NO: 120524 - DNA, 1581 bp, Artificial Sequence
  derived and/or modified sequence
atggccgtgttccccagcagcggcctgccccggtgcctgctgacccttattctcctgcagctgcctaagttagacagtgctcccttcgatgttatcggtcctcccgagccaatccttgccgtcgtcggagaggacgcagagctgccctgtcggctatcccccaatgccagtgcggaacatctcgagctgagatggttccgcaagaaagttagtcctgcagtactggtgcatagagatggcagggagcaagaagctgaacaaatgcctgaatacagagggcgggctacattagttcaggacgggattgcgaagggacgagtagcgctgcggataagaggggtcagagtatccgacgatggtgagtatacatgtttcttccgggaagacgggtcctacgaggaggccctggtgcatctcaaagtggcagccttaggatctgatccccacattagtatgcaggtgcaggaaaacggcgagatatgtcttgaatgtacttctgtagggtggtatcctgaaccccaagttcagtggcggacgagcaagggggaaaaattcccttctacatcggaatcccggaaccctgacgaagagggcctctttaccgtggccgcttcggtgatcatccgcgatacaagcgccaagaacgtttcatgctacattcagaacctgctgcttggacaggaaaaaaaggtcgagatctctattccggcttcatcactaccgaggttgactccctggatagtagcagtcgccgttatccttatggtcttagggctattgaccatcggctccattttcttcacatggaggctgtataatgaaaggccacgggaacgaagaaatgagttttcttctaaggagcggctcctcgaggagttgaagtggaaaaaggccactcttcatgctgtggacgtcaccctcgacccagacactgctcatccacatctgttcctgtacgaagacagtaaaagcgtgaggctcgaggactccaggcagaagctgccggaaaagactgaaaggttcgactcttggccttgtgtgctaggtcgcgagacctttacctctggtaggcactattgggaggtggaggttggggaccgaaccgactgggctatcggagtgtgtcgggaaaatgttatgaaaaagggcttcgatcccatgactcctgagaatggcttttgggcagtggagttgtatggcaacggttactgggcccttaccccactacgcactcctcttcctctggcaggacctccccgtagagtcggcatcttcctggattacgagagcggggatatttctttttacaatatgaatgacgggtccgatatttataccttttccaacgtgaccttctctgggcccctcaggccattcttctgcctgtggagttctggaaaaaaacccctcactatctgccccatcgcagatggccccgaacgcgtgactgtaatcgccaacgctcaggacctctcaaaagaaatcccactctcacctatgggggaagattccgccccgagagacgccgatacccttcactccaagctcataccaacccaaccatcgcaaggagctccatag

SEQ ID NO: 120525 - DNA, 1485 bp, Artificial Sequence
  derived and/or modified sequence
atggccgtgttccccagcagcggcctgccccggtgcctgctgaccctcatcctgctacaacttcctaagctagattctgcacccttcgatgttatcggacctcctgagcccatacttgctgtggtaggggaagacgccgagttaccctgtcgcctgtccccaaacgcctccgcggagcacctggaacttaggtggtttcgaaaaaaggtgagcccagctgtgctcgttcatcgggacggtagggaacaggaagctgaacagatgcctgaatatcgcgggcgggctactctcgttcaggacggaatagcaaaaggaagagtggcacttaggattagaggggtcagggtgagtgacgacggtgagtacacctgttttttccgggaggacggatcttacgaggaagctttggtccatttgaaggtcgccgccctgggctccgacccccatatttccatgcaggttcaggaaaatggcgaaatctgtttagaatgcacctctgtcggatggtaccctgaaccacaggtgcagtggaggacgtcaaaaggagagaaattcccgtctacttccgagtcacgtaacccagatgaggagggattgttcacggtggccgcaagcgtcatcattcgagatacctctgcgaagaacgtatcatgctatattcagaacttgctgctgggacaagaaaaaaaggtagagatcagtattccagccagttcactccctagattgacaccatggattgtggcagtggcagtgatcctgatggttctgggcctgctgacgatcggttcgatcttttttacttggaggctctataatgagcgcccccgtgaacggagaaacgaatttagcagcaaggaaagactgctggaggaactgaaatggaagaaagccacgctgcacgctgtcgacgtgacactggaccctgacactgcccatcctcatctgtttctttacgaggactctaagtcagttaggctcgaagacagccggcagaaattgcccgaaaaaactgagcggttcgacagttggccttgtgttctgggcagagagacctttactagtggccgtcattattgggaggttgaagtgggagacagaaccgactgggccattggcgtctgccgggaaaacgtgatgaagaaagggttcgatcctatgacccccgagaacggattttgggcagtagagctgtatgggaatgggtattgggcactcactccactcaggacaccactgcctctggccgggccaccccgacgcgtgggcatttttctcgactatgagtctggagacataagcttttacaacatgaatgatgggtcagacatttatacattttctaatgtcacagtcatcgcaaatgcccaagacctttcaaaggaaatccctctctccccaatgggcgaggatagcgctcccagagatgccgacacccttcactctaagctaattcccactcaaccttcacagggcgccccctag

SEQ ID NO: 120526 - DNA, 1581 bp, Artificial Sequence
  derived and/or modified sequence
atggccgtgtttcccagctcagggctaccaaggtgcctgttgaccctgatcctgctacaacttccaaagctcgactccgcacctttcgacgtgatcggccctcctgaacctattctggccgtggtgggcgaagacgcagagctcccatgtagattgtccccaaacgcttcagccgagcacttagaactccgctggtttcgaaaaaaggtttccccagcagttcttgtgcaccgggatggtcgtgagcaagaagctgagcagatgcctgaataccggggacgtgctactctagtgcaagacggaatagcaaaggggagggtggcacttaggataagaggggtcagggtcagcgacgatggagagtatacctgctttttccgcgaagatggcagctacgaagaggccttagtccatcttaaggtggccgctttaggttctgatccgcacattagcatgcaggttcaggagaacggcgaaatttgcctagaatgcacaagcgtgggttggtatcctgaacctcaggtgcagtggcgcacctcaaaaggagagaaattcccatcaacgtccgagtcccgcaatccagacgaagagggcttgtttactgtagcagcctcagtgatcatcagagacacatcagccaagaatgtgagttgctatatccagaacctcctgctcggacaagagaagaaagtggaaatcagtattcccgcatcgagcctcccaagactaacgccttggatagtggcggttgctgttatattaatggttctgggcctcctgactatcggatccatcttctttacttggaggctttataatgaacggcctcgggagcgccgtaacgaattttcttctaaagagcgcttgctcgaggagcttaaatggaaaaaggccaccctacacgccgttgacgtgaccctcgacccggacacagcccacccgcatctatttctttacgaagattcaaaaagtgttaggcttgaagattccagacaaaagctgcccgaaaagacagagcggttcgacagctggccttgtgttctgggccgtgagactttcacatcaggccgtcactattgggaggttgaggtcggcgataggacggactgggctatcggggtttgcagagagaacgtgatgaaaaaagggtttgacccaatgactcctgagaatgggttctgggctgtggaactttatgggaacggatactgggcattaaccccactccggacaccattgccgttggccggacccccacgcagagttggtatttttctggattatgagtctggcgatatcagtttttacaacatgaacgatggatccgacatctacactttctccaacgtgactttttccggccctcttcgaccttttttctgcctatggagttctggcaaaaagcccctcaccatatgcccaatcgccgacgggcctgagagagtgaccgttatcgcaaacgctcaggacctgtctaaagaaattcccctgagtccaatgggggaagatagtgcccctagggacgctgataccctacactctaaactcatccctacccagccttcccagggagccccttag

SEQ ID NO: 120527 - DNA, 1485 bp, Artificial Sequence
  derived and/or modified sequence
atggcagtgttccctagtagcgggttgcctaggtgcctgttaaccctgatcctactccagttgccgaagctggactcagctccgtttgacgtcattgggcctcctgagccaattctggctgtagtgggagaggatgccgaactgccctgccgtcttagcccaaacgcaagtgccgagcatttggagctaagatggtttcggaagaaggtgtcaccagctgttctggtgcaccgggacggtagagagcaggaagccgaacaaatgccagaataccggggaagggcaacattagtgcaggatggcatcgcaaagggccgagtagcgctccggatcaggggtgtcagggtttccgatgatggcgaatatacatgtttctttagggaggatgggagttatgaggaagcgctggtgcatttgaaggttgcagccctggggtcagatcctcacatatccatgcaggtacaggagaatggggaaatctgcctcgaatgcacttctgtcggctggtaccctgaacctcaggtgcagtggcggacgtctaagggcgagaagttccccagcacaagcgagagcaggaacccagacgaagaggggctcttcactgtggcagcatctgtcatcatccgggatacttccgctaagaacgtgagttgttacattcagaatttgctgttagggcaagaaaagaaagtagagattagcattccagcttccagcctccccagactcaccccgtggattgtggcagtggccgtgattctgatggtgctgggtctgctgaccatcgggtcgattttctttacttggcgtctctataacgaacgccctcgagagcggcgtaacgagtttagtagtaaagaaaggttgctggaggaactaaaatggaaaaaggcaaccctccatgcagtcgatgttacccttgatcctgatactgctcacccacacttgtttctctatgaagattctaagtcagtaaggctggaagactctcggcagaaattgccggagaagaccgagagattcgattcatggccatgtgtactcggacgggagacattcacaagcggtaggcactactgggaggttgaggtcggagatcgcaccgattgggcaatcggcgtgtgtcgggagaatgtgatgaagaaggggttcgacccaatgacaccagagaatggattctgggccgtagagctatatggcaacggatattgggcgctgacacccctgaggacccccctacccttggctggacccccacgtcgagtggggattttccttgattacgagtcaggcgacatttcattttacaacatgaatgacggctccgacatatatacgtttagcaacgtgaccgtgatcgccaacgcgcaagacctgtccaaagaaattccgttatccccgatgggggaagacagtgccccacgggacgcggacaccctgcattccaagctgataccgacccagccgagccagggcgcaccctag

SEQ ID NO: 120528 - DNA, 1581 bp, Artificial Sequence
  derived and/or modified sequence
atggccgtgttccccagcagcggcctgcccagatgcctgctgaccctgatcctgctgcagctgcccaagctggacagcgcccccttcgacgtgatcggcccccccgagcccatcctggccgtggtgggcgaggacgccgagctgccctgcagactgagccccaacgccagcgccgagcacctggagctgagatggttcagaaagaaggtgagccccgccgtgctggtgcacagagacggcagagagcaggaggccgagcagatgcccgagtacagaggcagagccaccctggtgcaggacggcatcgccaagggcagagtggccctgagaatcagaggcgtgagagtgagcgacgacggcgagtacacctgcttcttcagagaggacggcagctacgaggaggccctggtgcacctgaaggtggccgccctgggcagcgacccccacatcagcatgcaggtgcaggagaacggcgagatctgcctggagtgcaccagcgtgggctggtaccccgagccccaggtgcagtggagaaccagcaagggcgagaagttccccagcaccagcgagagcagaaaccccgacgaggagggcctgttcaccgtggccgccagcgtgatcatcagagacaccagcgccaagaacgtgagctgctacatccagaacctgctgctgggccaggagaagaaggtggagatcagcatccccgccagcagcctgcccagactgaccccctggatcgtggccgtggccgtgatcctgatggtgctgggcctgctgaccatcggcagcatcttcttcacctggagactgtacaacgagagacccagagagagaagaaacgagttcagcagcaaggagagactgctggaggagctgaagtggaagaaggccaccctgcacgccgtggacgtgaccctggaccccgacaccgcccacccccacctgttcctgtacgaggacagcaagagcgtgagactggaggacagcagacagaagctgcccgagaagaccgagagattcgacagctggccctgcgtgctgggcagagagaccttcaccagcggcagacactactgggaggtggaggtgggcgacagaaccgactgggccatcggcgtgtgcagagagaacgtgatgaagaagggcttcgaccccatgacccccgagaacggcttctgggccgtggagctgtacggcaacggctactgggccctgacccccctgagaacccccctgcccctggccggcccccccagaagagtgggcatcttcctggactacgagagcggcgacatcagcttctacaacatgaacgacggcagcgacatctacaccttcagcaacgtgaccttcagcggccccctgagacccttcttctgcctgtggagcagcggcaagaagcccctgaccatctgccccatcgccgacggccccgagagagtgaccgtgatcgccaacgcccaggacctgagcaaggagatccccctgagccccatgggcgaggacagcgcccccagagacgccgacaccctgcacagcaagctgatccccacccagcccagccagggcgccccctag

SEQ ID NO: 120529 - DNA, 1485 bp, Artificial Sequence
  derived and/or modified sequence
atggccgtgttccccagcagcggcctgcccagatgcctgctgaccctgatcctgctgcagctgcccaagctggacagcgcccccttcgacgtgatcggcccccccgagcccatcctggccgtggtgggcgaggacgccgagctgccctgcagactgagccccaacgccagcgccgagcacctggagctgagatggttcagaaagaaggtgagccccgccgtgctggtgcacagagacggcagagagcaggaggccgagcagatgcccgagtacagaggcagagccaccctggtgcaggacggcatcgccaagggcagagtggccctgagaatcagaggcgtgagagtgagcgacgacggcgagtacacctgcttcttcagagaggacggcagctacgaggaggccctggtgcacctgaaggtggccgccctgggcagcgacccccacatcagcatgcaggtgcaggagaacggcgagatctgcctggagtgcaccagcgtgggctggtaccccgagccccaggtgcagtggagaaccagcaagggcgagaagttccccagcaccagcgagagcagaaaccccgacgaggagggcctgttcaccgtggccgccagcgtgatcatcagagacaccagcgccaagaacgtgagctgctacatccagaacctgctgctgggccaggagaagaaggtggagatcagcatccccgccagcagcctgcccagactgaccccctggatcgtggccgtggccgtgatcctgatggtgctgggcctgctgaccatcggcagcatcttcttcacctggagactgtacaacgagagacccagagagagaagaaacgagttcagcagcaaggagagactgctggaggagctgaagtggaagaaggccaccctgcacgccgtggacgtgaccctggaccccgacaccgcccacccccacctgttcctgtacgaggacagcaagagcgtgagactggaggacagcagacagaagctgcccgagaagaccgagagattcgacagctggccctgcgtgctgggcagagagaccttcaccagcggcagacactactgggaggtggaggtgggcgacagaaccgactgggccatcggcgtgtgcagagagaacgtgatgaagaagggcttcgaccccatgacccccgagaacggcttctgggccgtggagctgtacggcaacggctactgggccctgacccccctgagaacccccctgcccctggccggcccccccagaagagtgggcatcttcctggactacgagagcggcgacatcagcttctacaacatgaacgacggcagcgacatctacaccttcagcaacgtgaccgtgatcgccaacgcccaggacctgagcaaggagatccccctgagccccatgggcgaggacagcgcccccagagacgccgacaccctgcacagcaagctgatccccacccagcccagccagggcgccccctag

SEQ ID NO: 120530 - protein, 668 aa, Artificial Sequence
  derived and/or modified sequence
MSVRFRVGREENAQWWLLYLLVPALFCRAGGSIPIPQKLFGEVTSPLFPKPYPNNFETTTVITVPTGYRVKLVFQQFDLEPSEGCFYDYVKISADKKSLGRFCGQLGSPLGNPPGKKEFMSQGNKMLLTFHTDFSNEENGTIMFYKGFLAYYQAVDLDECASRSKSGEEDPQPQCQHLCHNYVGGYFCSCRPGYELQEDRHSCQAECSSELYTEASGYISSLEYPRSYPPDLRCNYSIRVERGLTLHLKFLEPFDIDDHQQVHCPYDQLQIYANGKNIGEFCGKQRPPDLDTSSNAVDLLFFTDESGDSRGWKLRYTTEIIKCPQPKTLDEFTIIQNLQPQYQFRDYFIATCKQGYQLIEGIQVVAGVVDVSAGRVSWSTSSQTCCTRVYTCTAQGIWKNEQKGEKIPRCLPVCGKPVNPVEQRQRIIGGQKAKMGNFPWQVFTNIHGRGGGALLGDRWILTAAHTLYPKEHEAQSNASLDVFLGHTNVEELMKLGNHPIRRVSVHPDYRQDESYNFEGDIALLELENSVTLGPNLLPICLPDNDTFYDLGLMGYVSGFGVMEEKIAHDLRFVRLPVANPQACENWLRGKNRMDVFSQNMFCAGHPSLKQDACQGDSGGVFAVRDPNTDRWVATGIVSWGIGCSRGYGFYTKVLNYVDWIKKEMEEED

SEQ ID NO: 120531 - protein, 376 aa, Artificial Sequence
  derived and/or modified sequence
MWLLYLLVPALFCRAGGSIPIPQKLFGEVTSPLFPKPYPNNFETTTVITVPTGYRVKLVFQQFDLEPSEGCFYDYVKISADKKSLGRFCGQLGSPLGNPPGKKEFMSQGNKMLLTFHTDFSNEENGTIMFYKGFLAYYQAVDLDECASRSKSGEEDPQPQCQHLCHNYVGGYFCSCRPGYELQEDRHSCQAECSSELYTEASGYISSLEYPRSYPPDLRCNYSIRVERGLTLHLKFLEPFDIDDHQQVHCPYDQLQIYANGKNIGEFCGKQRPPDLDTSSNAVDLLFFTDESGDSRGWKLRYTTEIIKCPQPKTLDEFTIIQNLQPQYQFRDYFIATCKQGYQLIEGCTPAQHRAFGRMNRRERRFLGACQCVGSP

SEQ ID NO: 120532 - protein, 653 aa, Artificial Sequence
  derived and/or modified sequence
WLLYLLVPALFCRAGGSIPIPQKLFGEVTSPLFPKPYPNNFETTTVITVPTGYRVKLVFQQFDLEPSEGCFYDYVKISADKKSLGRFCGQLGSPLGNPPGKKEFMSQGNKMLLTFHTDFSNEENGTIMFYKGFLAYYQAVDLDECASRSKSGEEDPQPQCQHLCHNYVGGYFCSCRPGYELQEDRHSCQAECSSELYTEASGYISSLEYPRSYPPDLRCNYSIRVERGLTLHLKFLEPFDIDDHQQVHCPYDQLQIYANGKNIGEFCGKQRPPDLDTSSNAVDLLFFTDESGDSRGWKLRYTTEIIKCPQPKTLDEFTIIQNLQPQYQFRDYFIATCKQGYQLIEGIQVVAGVVDVSAGRVSWSTSSQTCCTRVYTCTAQGIWKNEQKGEKIPRCLPVCGKPVNPVEQRQRIIGGQKAKMGNFPWQVFTNIHGRGGGALLGDRWILTAAHTLYPKEHEAQSNASLDVFLGHTNVEELMKLGNHPIRRVSVHPDYRQDESYNFEGDIALLELENSVTLGPNLLPICLPDNDTFYDLGLMGYVSGFGVMEEKIAHDLRFVRLPVANPQACENWLRGKNRMDVFSQNMFCAGHPSLKQDACQGDSGGVFAVRDPNTDRWVATGIVSWGIGCSRGYGFYTKVLNYVDWIKKEMEEED

SEQ ID NO: 120533 - DNA, 2007 bp, Artificial Sequence
  derived and/or modified sequence
atgtccgtcaggtttcgtgtcggtagggaggaaaacgcccaatggtggctactgtacctgttagtgcccgctctcttttgcagggccggtgggtcaatccctataccacaaaagctcttcggtgaggtgacaagcccgctgttcccgaaaccgtatcccaacaactttgagacaactacagttattaccgtcccaaccggctatcgggttaaactagtgtttcagcagtttgacctggagcccagtgagggatgcttctatgattatgtgaaaattagtgccgataaaaagtcgctgggccggttctgtggacagttgggcagtcctctgggaaacccccctggcaaaaaggagttcatgtcccaaggtaataaaatgctgctgactttccacaccgacttttcaaatgaagagaacgggaccattatgttttacaaaggattcttggcctattaccaggccgtggatttagatgaatgcgcttctcggagtaaatcaggggaagaggacccccagcctcagtgtcagcacctgtgccacaattacgtaggaggctacttttgctcctgtaggccaggttacgaactgcaggaggatcgacacagttgtcaagctgaatgcagcagtgaattgtataccgaggcatcaggttacatctcgagcctcgaatacccgcgctcctatccaccggatctccggtgtaactactctataagggtggaacgcggcttgacactgcatctaaagtttttggagccgtttgacatcgacgaccatcagcaggttcactgtccatatgaccagcttcagatttatgctaacgggaagaacattggtgagttctgcggcaagcagcgtcctccggatctggatacatcgtcgaacgccgtggatctcctgttttttaccgatgaatcaggagattcacgcggttggaaactgaggtatacaactgaaataattaagtgtccacagcctaaaactttagacgaattcacaatcatccagaatctgcaaccccagtaccagttccgggattactttattgcaacatgcaaacagggataccagctcattgaagggatccaggtggtggccggagttgtggacgtgagtgcaggtcgggtgagttggagcacctcctctcagacatgctgtacaagagtgtacacatgcactgctcagggcatctggaagaacgagcagaaaggagagaagatcccgaggtgtctgcccgtgtgcgggaaaccagtcaatcctgtggagcaacgacagaggatcattggcggacagaaggcaaagatgggtaacttcccttggcaggtgtttactaatattcacggaaggggcggtggagccctgctgggcgatcgttggattctcactgcagcacatacactctaccccaaagagcacgaagcgcagagtaatgcttccctcgatgtgttcctgggccacaccaacgttgaggagttaatgaagctaggaaaccaccctatccgtcgggtttccgtgcacccagactacagacaggacgaatcctataatttcgagggggatattgcactgctggagcttgaaaatagcgtgactctcgggcccaatctgttgcccatttgcctaccagacaatgatactttctatgatctgggtctgatgggttacgtctctggttttggggtgatggaggaaaaaatcgcacatgacctgaggttcgttcgacttccagtggcaaatccccaagcctgcgaaaattggctgagaggcaagaaccgtatggatgtattttcccaaaacatgttctgtgccgggcatccgtccctgaagcaagatgcttgccagggcgatagcggaggcgtgttcgcagtgcgcgacccaaatactgatcgctgggtagctacaggaattgtcagttgggggattggttgcagcagaggctacggtttctacaccaaagttctgaactatgttgattggataaagaaggaaatggaggaagaggattag

SEQ ID NO: 120534 - DNA, 1131 bp, Artificial Sequence
  derived and/or modified sequence
atgtggctactgtacctcctcgttcctgcgctgttttgcagggcagggggttccatcccgataccccaaaagttgtttggtgaagtgacatctccgctgttcccaaagccctacccgaataacttcgagaccacaaccgtgattaccgtgcctacgggttatagggtcaaactcgttttccaacagttcgacctggagccatcggagggctgtttttatgattatgtcaaaatctccgctgacaaaaaatcgctgggcaggttttgtggccaactcggttcaccattgggaaatccgcccggtaagaaagagtttatgtcccagggcaataaaatgctcctcaccttccatacagacttctctaacgaagaaaatggaactataatgttttacaagggcttcctcgcatattatcaggccgtggacttggatgaatgcgcgtcacggtcaaagtccggcgaagaggatccacagccacagtgccagcacctctgccacaactacgttggcggctacttctgtagctgccgtccaggctacgagctgcaggaggatcgtcactcttgtcaggcggagtgctccagcgagctctacaccgaggccagcggttacatctcctctctggagtacccgcggagctaccctccggatctgcggtgtaattactccataagggtggagcggggtctcaccctccatctgaagtttttggaaccttttgatattgatgaccaccaacaagttcactgcccctacgatcagctgcaaatatatgccaatggcaagaacattggggaattctgcggcaagcagcgaccacctgatctggatacatcgagcaatgcagtcgatttactattctttacagacgagtccggcgactctcgtgggtggaagctgagatataccaccgagattatcaagtgcccacagccaaagactcttgacgaattcactattattcagaacttgcagccccagtaccagttccgtgattattttatcgctacatgtaagcagggatatcagctgatagaggggtgtacaccagctcaacatcgagcctttggacggatgaaccgacgggagcgacgtttcttgggagcctgtcaatgcgtagggtccccctag

SEQ ID NO: 120535 - DNA, 1962 bp, Artificial Sequence
  derived and/or modified sequence
tggttactgtatctgctcgtccccgctttattctgcagggcgggtgggtctatccctattccccagaagctcttcggtgaggtgacatccccattgtttccaaaaccttaccctaataactttgagaccaccacagtgattacggtgcccaccggctacagggttaaactggtgttccagcagtttgatctagagccatcagagggatgcttttatgactatgtgaagatcagcgctgacaaaaaatctctaggccgcttctgcggtcagctgggttcccccttgggaaatccaccaggaaaaaaagagtttatgtcccagggaaataagatgcttctgacctttcacaccgactttagcaacgaagagaatggaactatcatgttctataagggcttcctggcttattaccaggccgtcgatctcgacgagtgtgcttccaggtcaaagtctggcgaagaggacccccaaccacaatgccaacatctctgccataactatgttggcggatatttctgctcctgccgaccgggctatgagctgcaggaggataggcactcttgtcaagcggaatgttccagtgagctgtatactgaggcgagtggatatatcagcagccttgaatatccacgtagctacccccctgacctcagatgcaattattccattagggtggagcgaggccttactctgcatctaaaatttttggagcctttcgatatcgacgaccatcagcaggtacattgtccgtacgatcaattgcaaatctacgccaatggaaagaacatcggcgagttttgtgggaagcagagaccccccgatttggacaccagtagcaacgctgtggacctgttattttttactgatgaatccggtgattctcgcgggtggaaactgcgatataccacagagataattaagtgccctcaacctaaaacacttgacgagtttactatcattcagaacctgcagccacaataccagtttcgggattacttcatcgccacctgcaagcagggttaccaactcatagaggggatccaagtagttgcgggtgttgtggatgtgtctgccggccgagtgtcctggtcgaccagctctcagacctgctgtacccgtgtgtacacatgcacagcccagggaatctggaaaaacgaacagaagggcgaaaagattcctcgatgcctcccagtttgtgggaagcctgtgaatcccgtcgagcagcgtcagcgtatcattggggggcagaaggcgaaaatggggaactttccctggcaggtttttacaaacatacacggaaggggtggaggtgctctcctgggcgacagatggatcctcacagcagcccatacgttgtatccaaaggaacacgaagcccaatccaacgctagcctggacgtcttcctcggccacactaacgtagaggaactgatgaagctcggcaaccaccccatacgtagggtttccgttcaccctgactaccgacaagatgaaagctacaattttgagggcgacattgccctcctggaactggaaaatagtgtgaccctgggcccaaatttattgccaatatgcttacccgataatgacacgttttacgacctgggacttatggggtacgtttccggctttggagtgatggaagaaaaaatcgctcacgacctgagatttgtccgtttgccggtagcgaatccacaagcctgcgaaaactggcttcggggaaagaacagaatggacgtcttcagtcagaatatgttttgtgccggtcacccatcccttaagcaggacgcctgtcagggggattctggaggcgtgtttgctgttagggatcctaatactgacagatgggtggctaccggcattgtgtcttggggcataggatgttctcgtggatacggcttttatacgaaggttctgaattacgttgattggattaagaaagagatggaagaagaggactag

SEQ ID NO: 120536 - DNA, 2007 bp, Artificial Sequence
  derived and/or modified sequence
atgtctgtgcgcttccgggtgggccgggaggagaatgcccagtggtggctgctgtacctgctggtgcctgccctcttctgcagagctgggggcagcatccccatcccccagaagctgtttggagaggtgaccagccccctcttccccaagccctaccccaacaactttgagaccaccaccgtcatcaccgtgcccaccggctacagagtgaagctggtgttccagcagtttgacctggagcccagcgagggctgcttctatgactatgtgaagatctctgctgacaagaagagcctgggccgcttctgtggccagctgggcagccccctgggcaaccccccaggcaagaaggagttcatgagccagggcaacaagatgctgctgaccttccacacagacttcagcaatgaggagaatggcaccatcatgttctacaagggcttcctggcctactaccaggccgtggacctggatgaatgtgccagccgcagcaagagcggggaggaggacccccagccccagtgccagcacctgtgccacaactacgtgggcggctacttctgcagctgccggcccggctatgagctgcaggaggacagacacagctgccaggccgagtgcagcagcgagctgtacacagaggccagcggctacatcagcagcctggagtaccccaggagctaccccccagacctgcgctgcaactacagcatccgggtggagcggggcctgaccctgcacctgaagttcctggagccctttgatattgatgaccaccagcaggtgcactgcccctatgaccagctgcagatctatgccaacgggaagaacatcggggagttctgtgggaagcagaggcccccagacctggacaccagcagcaatgctgtggacctgctcttcttcacagatgagagcggggacagccggggctggaagctgcgctacaccacagagatcatcaagtgcccccagcccaagaccctggatgagttcaccatcatccagaacctgcagccccagtaccagttccgggactacttcatcgccacctgcaagcagggctaccagctgattgagggcatccaggtggtggccggcgtggtggatgtgtctgctggccgggtgtcctggagcaccagcagccagacctgctgcaccagggtgtacacctgcacagcccagggcatctggaagaatgagcagaagggggagaagatcccccgctgcctgcctgtgtgtgggaagcctgtgaaccctgtggagcagaggcagaggatcatcggcggccagaaggccaagatgggcaacttcccctggcaggtgttcaccaacatccacggccggggcggcggggccctgctgggggaccgctggatcctgacagctgcccacaccctgtaccccaaggagcacgaggcccagagcaatgccagcctggatgtgttcctgggccacaccaacgtggaggagctgatgaagctgggcaaccaccccatcagaagagtgtctgtgcacccagactaccggcaggatgagagctacaactttgaaggagacatcgccctgctggagctggagaacagcgtgaccctgggccccaacctgctgcccatctgcctgcctgacaatgacaccttctatgacctgggcctgatgggctacgtgtctggctttggagtgatggaggagaagatcgcccatgacctgcgctttgtgcggctgcctgtggccaacccccaggcctgtgagaactggctgcggggcaagaacaggatggatgtgttcagccagaacatgttctgtgccggccaccccagcctgaagcaggatgcctgccagggcgacagcggaggagtgtttgctgtgcgggaccccaacacagaccgctgggtggccaccggcatcgtgtcctggggcatcggctgcagccggggctacggcttctacaccaaggtgctgaactacgtggactggatcaagaaggagatggaggaggaggactag

SEQ ID NO: 120537 - DNA, 1131 bp, Artificial Sequence
  derived and/or modified sequence
atgtggctgctgtacctgctggtgcctgccctcttctgcagagctgggggcagcatccccatcccccagaagctgtttggagaggtgaccagccccctcttccccaagccctaccccaacaactttgagaccaccaccgtcatcaccgtgcccaccggctacagagtgaagctggtgttccagcagtttgacctggagcccagcgagggctgcttctatgactatgtgaagatctctgctgacaagaagagcctgggccgcttctgtggccagctgggcagccccctgggcaaccccccaggcaagaaggagttcatgagccagggcaacaagatgctgctgaccttccacacagacttcagcaatgaggagaatggcaccatcatgttctacaagggcttcctggcctactaccaggccgtggacctggatgaatgtgccagccgcagcaagagcggggaggaggacccccagccccagtgccagcacctgtgccacaactacgtgggcggctacttctgcagctgccggcccggctatgagctgcaggaggacagacacagctgccaggccgagtgcagcagcgagctgtacacagaggccagcggctacatcagcagcctggagtaccccaggagctaccccccagacctgcgctgcaactacagcatccgggtggagcggggcctgaccctgcacctgaagttcctggagccctttgatattgatgaccaccagcaggtgcactgcccctatgaccagctgcagatctatgccaacgggaagaacatcggggagttctgtgggaagcagaggcccccagacctggacaccagcagcaatgctgtggacctgctcttcttcacagatgagagcggggacagccggggctggaagctgcgctacaccacagagatcatcaagtgcccccagcccaagaccctggatgagttcaccatcatccagaacctgcagccccagtaccagttccgggactacttcatcgccacctgcaagcagggctaccagctgattgagggctgcaccccagcccagcaccgggccttcggccgcatgaacagaagagagcggcgcttcctgggcgcctgccagtgtgtgggcagcccctag

SEQ ID NO: 120538 - DNA, 1962 bp, Artificial Sequence
  derived and/or modified sequence
tggctgctgtacctgctggtgcctgccctcttctgccgggccggcggcagcatccccatcccccagaagctgtttggagaggtgaccagccccctcttccccaagccctaccccaacaactttgagaccaccaccgtcatcaccgtgcccaccggctacagagtgaagctggtgttccagcagtttgacctggagcccagcgagggctgcttctatgactatgtgaagatctctgctgacaagaagagcctgggccgcttctgtggccagctgggcagccccctgggcaaccccccaggcaagaaggagttcatgagccagggcaacaagatgctgctgaccttccacacagacttcagcaatgaagaaaatggcaccatcatgttctacaagggcttcctggcctactaccaggccgtggacctggatgaatgtgccagccgcagcaagtctggagaggaggacccccagccccagtgccagcacctgtgccacaactacgtgggcggctacttctgcagctgcaggcctggctatgagctgcaggaggacagacacagctgccaggctgaatgtagcagcgagctgtacacagaggccagcggctacatcagcagcctggagtaccccaggagctaccccccagacctgcgctgcaactacagcatccgggtggagcggggcctgaccctgcacctgaagttcctggagccctttgatattgatgaccaccagcaggtgcactgcccctatgaccagctgcagatctatgccaacgggaagaacattggagagttctgtgggaagcagaggcccccagacctggacaccagcagcaatgctgtggacctgctcttcttcacagatgaaagtggggacagccggggctggaagctgcgctacaccacagagatcatcaagtgcccccagcccaagaccctggatgagttcaccatcatccagaacctgcagccccagtaccagttccgggactacttcatcgccacctgcaagcagggctaccagctgattgagggcatccaggtggtggccggcgtggtggatgtgtctgctggccgggtgtcctggagcaccagcagccagacctgctgcaccagggtgtacacctgcacagcccagggcatctggaagaatgagcagaagggggagaagatcccccgctgcctgcctgtgtgtgggaagcctgtgaaccctgtggagcagaggcagaggatcattggaggccagaaggccaagatgggcaacttcccctggcaggtgttcaccaacatccacggccggggcggcggggccctgctgggggaccgctggatcctgacagctgcccacaccctgtaccccaaggagcacgaggcccagagcaatgccagcctggatgtgttcctgggccacaccaacgtggaggagctgatgaagctgggcaaccaccccatccggcgggtgtctgtgcacccagactaccggcaggatgagagctacaactttgaaggagacatcgccctgctggagctggagaacagcgtgaccctgggccccaacctgctgcccatctgcctgcctgacaatgacaccttctatgacctgggcctgatgggctacgtgtctggcttcggcgtgatggaggagaagatcgcccatgacctgcgctttgtgcggctgcctgtggccaacccccaggcctgtgagaactggctgcggggcaagaacaggatggatgtgttcagccagaacatgttctgtgccggccaccccagcctgaagcaggatgcctgccagggcgacagcggcggcgtgtttgctgtgcgggaccccaacacagaccgctgggtggccactggaattgtgtcctggggcatcggctgcagccggggctacggcttctacaccaaggtgctgaactacgtggactggatcaagaaggagatggaggaggaggactag

SEQ ID NO: 120539 - DNA, 2007 bp, Artificial Sequence
  derived and/or modified sequence
atgagcgtgcggttccgggtgggccgggaggagaacgcccagtggtggctcctgtatctcctggtgccggccctgttttgccgagcagggggatccattcctatacctcagaaactctttggtgaggtcacctctcccttgttcccgaaaccttacccaaataattttgagaccacaactgtgattacagttcccactggctatagagtgaaactggtcttccagcaatttgacctcgaacccagcgagggttgcttttacgactacgtaaagataagcgccgacaaaaagagtctgggaaggttttgcggccagctgggttcgcccctcggaaatccgccgggaaagaaggaattcatgtctcagggaaataaaatgttgttgacgttccacacagacttctctaatgaggagaacggaacaatcatgttctacaagggctttctggcctactaccaggccgttgatctggacgaatgtgccagtaggtctaaaagcggcgaggaggatccccaacctcagtgccagcacctgtgccataattatgtggggggatacttttgctcttgtcggcctggctacgagctccaggaagaccggcatagctgtcaggccgaatgctctagcgaactgtacactgaagctagcggctatatcagctctctggagtatcccaggagctatcctcctgacctgaggtgtaattactcaatacgggtggaaagaggactcacactgcacctgaaattcctggagccgtttgacattgacgaccatcagcaagtccattgtccgtatgatcagttgcagatttacgcaaacggcaaaaatatcggtgagttttgcggaaagcagagaccacccgacctggatacatcaagtaacgctgtggatctcctgtttttcactgacgaatccggggactcgcgcgggtggaaactgaggtacactacagagatcatcaaatgcccccagccgaaaaccctggatgagtttacaatcattcagaatctgcagcctcagtaccaattcagagactacttcattgccacctgtaaacaagggtatcagttgatagaaggtatacaggtggttgctggggtcgtggacgtgtcagcagggagagtgtcgtggtccacgtcaagtcagacctgctgtacccgggtctacacatgcactgctcagggcatctggaagaatgaacaaaagggagagaagatcccacgttgtctgccagtgtgcggtaaacccgtcaatcctgtagagcagcggcagcggatcataggggggcagaaagccaagatgggcaactttccgtggcaagtgttcacaaacatccacggaaggggaggcggggccctgctgggggatagatggattcttaccgccgcgcataccctatatcccaaggaacatgaggctcagagcaacgcctcattagacgtattcctgggccacaccaatgtggaagagctgatgaaattggggaatcaccccataagacgcgtttcggtacaccccgattatcgccaggacgagagctataattttgagggggacatcgccctacttgagttggaaaatagtgtgactctggggcctaacctattgccgatctgcctcccggataatgacacgttctacgatctcggcttgatgggctacgtctccggctttggtgttatggaggaaaagatagcccacgacttacggtttgtgcgcttgcccgtggccaacccacaggcctgtgagaattggttaagggggaagaaccggatggatgttttttcacagaacatgttctgcgccggccacccttccctgaagcaagacgcgtgccagggggattcaggcggtgtctttgcagtgcgggatcccaataccgacaggtgggtcgccactggcatagtctcttggggtattgggtgcagtcgcgggtatgggttttataccaaggtgctgaactatgtcgattggattaagaaggaaatggaggaggaggattag

SEQ ID NO: 120540 - DNA, 1131 bp, Artificial Sequence
  derived and/or modified sequence
atgtggctgctgtacctgctggtgcccgccctgttctgccgggccgggggaagtatccctattccccagaagctttttggtgaagtgaccagtcctctatttccgaaaccttaccccaacaacttcgagaccaccaccgtgatcaccgtccctactggctaccgcgtaaagctggtcttccagcaatttgatcttgaaccgtctgagggctgcttttacgactacgtgaagatatccgccgataagaaatcgctaggaaggttctgtggacagttgggatcaccacttggtaatccacctggaaagaaagagttcatgtcacaggggaacaaaatgctcctgactttccatacagacttctctaatgaggagaacgggacaatcatgttttacaaaggatttcttgcttactaccaggctgtcgatctcgacgaatgtgcctcaagatctaagagtggggaggaagacccccagccgcagtgccagcacctgtgccataattacgtggggggttacttttgctcttgtaggccaggatatgaactgcaggaggaccgccactcatgtcaagcagagtgtagcagcgagctttatactgaagcgtcaggctacatttcctccttggaatatccccggtcctatccaccagatctccggtgcaactattccattagggtcgagcgaggactaacattgcacctcaagttcctggaacccttcgatatcgacgatcaccaacaggtgcactgtccatacgatcagcttcaaatctacgcaaatggcaagaacatcggggaattctgcgggaagcagagaccaccagacttagacacttcttccaatgctgtggacctgctgttcttcacagatgagagtggagacagcagaggatggaagctcaggtacacgaccgagattattaaatgcccccagccaaaaacactcgacgagtttaccatcattcagaatctgcagccccagtatcagttcagagactactttatagcgacctgcaagcagggttaccagctgatcgagggttgtacacccgcccagcaccgtgcttttggccgcatgaataggcgagagcggcggtttctaggagcctgtcaatgcgttggttccccttag

SEQ ID NO: 120541 - DNA, 1962 bp, Artificial Sequence
  derived and/or modified sequence
tggctgctgtacctgctggtgcccgccctgttctgccgggccggcggaagcatcccaattccccaaaagctgttcggcgaagtaacctcccctctgttccccaagccttatcccaataatttcgagactactactgtgataactgtcccgaccggctatagagttaagttggttttccagcagtttgatctggagccctctgagggctgcttttacgactatgtgaagatttctgccgataagaagagcttaggcagattttgcggccaacttggcagtcctctcggaaacccacccggaaaaaaagagttcatgagccaggggaataagatgttgttgaccttccacacggacttctctaatgaagaaaacggaacgatcatgttttataagggatttctagcctattatcaagccgtggatctggatgagtgtgcttcacgcagtaaatccggcgaggaagaccctcagcctcagtgccagcatctctgtcacaactatgtcggcggttacttctgttcatgcagaccaggatatgaactgcaggaggatcgccattcctgtcaagcggaatgttctagtgagctgtacacggaagcatctggttacatctcctcattagaatatcctcgcagttacccacccgatcttagatgtaattatagcatcagagtcgaaagggggctgaccctgcacttaaaattcctcgaacccttcgacatcgatgatcatcagcaggtccactgtccctatgaccagctgcagatttacgcgaacggaaaaaatattggagagttttgtggtaaacagaggcctcctgatctcgacacgagctccaacgccgtggatctcctcttcttcacagacgaaagcggcgactcacggggctggaagcttagatatactactgagataattaagtgcccccaacccaaaacgctcgatgagtttaccattatccagaacttacagcctcagtaccagttcagggactactttatcgcaacgtgcaagcagggttatcagctcatcgagggcatacaagtggtggctggcgtggtggatgtgagcgctggacgcgtgagttggtcaacctcaagccagacgtgctgcacaagggtgtatacctgcacagctcagggcatctggaagaatgaacagaagggcgagaaaattccccgctgtctccctgtgtgcggtaagccagtgaatccggtggagcagaggcaacgcatcatcgggggtcagaaggccaagatgggaaatttcccatggcaggtatttacaaatatccacggacgcggtggaggagcactgttgggtgacaggtggattttgaccgcagcccatacactgtatcctaaagaacacgaggcccagtcaaacgcctcactagacgtattcttggggcacacaaacgttgaagaactgatgaagcttggtaatcacccaatccgacgggttagtgtacacccggattatcgccaagacgagtcctataattttgaaggcgacatagcactgctcgaacttgaaaattccgtgaccctagggccgaatctgctgcctatttgcctaccagacaatgacaccttttatgacctcggtttgatgggatatgtgtcaggtttcggagtcatggaagaaaagattgcacacgatctcaggtttgtgaggctgccagtagccaacccgcaggcctgtgagaactggctacgtggaaagaaccgcatggacgtgttcagccaaaacatgttctgcgccggccaccctagcctgaagcaagacgcatgtcagggggattccggcggagtatttgctgtgcgcgaccccaacacagataggtgggtggctaccgggattgtgagctgggggatcggctgtagtcgggggtacgggttctacacaaaggtcctcaactacgtagactggatcaagaaggaaatggaggaggaagactag

SEQ ID NO: 120542 - DNA, 2007 bp, Artificial Sequence
  derived and/or modified sequence
atgagcgtgcggttccgagtgggcagggaagagaatgcccagtggtggctgctgtacctcctggtacccgcactgttctgccgtgcaggaggatccatccccatccctcaaaaactattcggggaagtgacttccccactctttcctaagccttaccccaacaacttcgaaacgacaacagtgatcaccgtacccacgggctaccgggttaagttggtcttccagcaattcgacctggagcctagcgaaggctgcttttatgattacgtgaaaatatccgctgacaaaaagagcttaggccgtttctgtggtcagttgggttctccacttggcaatccacctggaaaaaaggaattcatgagccagggcaacaagatgctattgacctttcacacagattttagcaacgaagagaatggcactattatgttttataagggatttctggcgtattatcaggcagtggaccttgacgaatgcgctagccggtccaagtccggagaagaggatccccagccccaatgtcaacacctgtgccataactacgtgggaggctacttttgttcctgccggcctgggtacgaattgcaagaggaccgccacagttgtcaggctgagtgcagctctgagctgtataccgaagctagcggctatatttctagtctggaatatcctaggagttacccgccagatcttcggtgtaattattctattagggtcgaacggggactgacgcttcatctaaagtttctggaaccattcgatatcgatgatcaccagcaggtgcactgtccctacgatcaactacagatctatgccaacggaaagaatattggagagttctgcggcaagcagcgccctcccgatctggacacctcttccaatgccgtggatttgttgttcttcacagacgagtccggagactccagaggatggaaactgagatacaccaccgagatcatcaaatgtccccaaccgaaaactctggacgaattcactatcatccagaatttgcaaccccagtatcaatttcgagattatttcattgctacctgtaaacagggttatcagctcatcgaaggaatccaggtggtggcgggagttgtggatgtgagcgcgggacgagtgagctggagcacgagcagccagacctgttgcacaagagtttatacctgtaccgcccagggaatttggaagaacgaacagaaaggcgagaagatcccacggtgtcttccagtgtgtggtaagccggtgaatccggtcgagcagcggcagaggatcataggtggacagaaagccaagatgggtaatttcccatggcaggtgtttaccaatatccacgggagaggcggaggggctctgctcggcgaccgttggatcctcaccgctgctcacactctgtatcccaaagaacatgaggctcagagtaatgctagtctagacgtgttcctcggtcatactaatgttgaagagctgatgaagctgggcaatcacccgatcagacgagtttccgtccaccccgactaccggcaggatgagtcatataactttgagggcgacatcgccctactggaactggaaaattcagtgacgcttggaccgaatttgcttcccatatgtctgcctgacaatgataccttctacgatcttggactgatgggctacgtgtccggctttggggtaatggaagagaaaatcgcccatgatctacgtttcgtgcgcttgccagtcgctaacccacaggcctgtgaaaactggctccgcggtaagaatcggatggacgttttctctcaaaacatgttttgcgcgggacatcctagcctaaaacaggacgcctgtcaaggggactccggtggagtctttgctgtgcgtgacccgaatacagaccgatgggtggccaccggaatcgtttcctggggtattggatgttcacggggatacggtttttacaccaaagttctcaattatgtcgactggatcaagaaagagatggaggaggaagattag

SEQ ID NO: 120543 - DNA, 1131 bp, Artificial Sequence
  derived and/or modified sequence
atgtggctgctgtatctattggtacccgcactcttctgcagagcgggtggcagcattccaattccccagaaattgtttggtgaggtgaccagccccctcttccccaagccatatccaaacaacttcgagactacgaccgtcatcaccgtccctactgggtatcgggttaagctggtatttcagcaattcgacctcgaaccttctgaaggatgcttttacgattacgttaagatctccgctgacaaaaaaagtttaggcaggttttgcggacagctgggctcacccttgggaaatcctcccggaaagaaggaatttatgtcacagggcaacaagatgctgctgacgttccacacagacttttcaaatgaggagaacggaaccatcatgttctacaaagggtttctggcatactatcaggccgtggatctggacgagtgcgcctcccgatcaaagagcggggaggaggacccccagccacagtgtcagcacctgtgccacaactacgtgggtggttacttctgttcctgtagacctggttatgaacttcaggaggacaggcacagttgtcaggctgagtgtagctcagagctatatactgaggcaagtggatatatttccagtctcgagtatccccgaagctaccccccagacctgcgttgcaactactcgatacgcgtagaaaggggcctgacacttcatctcaagtttctggaacctttcgacatcgatgatcatcagcaggtgcattgcccgtatgaccagctgcaaatctatgcgaacgggaaaaatattggcgagttctgtggcaaacagcggccacccgacctggatacatcttctaatgctgtagatttgcttttttttacagacgagagcggagactctaggggctggaagctgcgatataccaccgagattattaaatgtccacagccaaagacactcgacgagtttactatcattcagaatctccagccacaataccaattccgagactacttcatcgccacatgcaagcaggggtatcaacttatagagggttgtacccccgcacagcacagagcgttcggcagaatgaatcgcagggagcggcgattcctgggggcatgtcagtgcgtggggagtccttag

SEQ ID NO: 120544 - DNA, 1962 bp, Artificial Sequence
  derived and/or modified sequence
tggttattgtatctgctcgtgcccgcattattttgtcgcgctggtggttctattccaattccccaaaagctctttggggaggtaacaagccctttattccccaagccatatcccaacaactttgagacaacaactgtaatcacagtgcctacaggctatcgagtcaagctggtctttcagcaattcgacctagaacctagtgagggttgtttctacgattatgtcaagatcagcgctgataagaagtccttgggacgcttctgcggtcagctgggttctccattggggaacccgcctgggaagaaagagttcatgtcccagggaaacaagatgctcctcacattccacaccgacttcagcaatgaagagaacgggacaatcatgttttataaggggtttctggcttactaccaagcagtcgatctggacgagtgtgccagcagatctaaatcaggagaggaggaccctcagccccaatgtcaacacctctgtcataattatgtcggcggttatttctgctcctgcaggcctggttacgagctccaggaagacaggcattcgtgccaggcagaatgtagctccgagctgtataccgaggcctccggatacatctctagcctggagtatcccaggtcttacccgcctgacctgcggtgtaactacagcatcagagtagagcggggacttacattgcacctaaaatttctggagccgtttgatatagacgaccaccagcaagtccactgcccctacgaccaactgcagatttacgcaaatggcaaaaacatcggagagttttgtggaaagcaaagacctccagatttggatacaagcagcaatgcagtcgacctccttttttttaccgatgagtccggcgacagccggggttggaaactcagatacaccacagagataattaaatgccctcagcctaagactctcgacgaattcactatcattcagaatctgcagcctcaatatcagtttagagattattttatcgctacctgcaaacaaggatatcagctcatcgaaggaatccaggttgttgccggagtggtcgacgtttccgcagggagggtatcatggtctacttctagccagacctgctgtacaagagtttacacatgcacagctcagggcatctggaagaatgagcagaagggcgaaaaaatcccccgatgtctgcccgtctgtgggaaacccgttaacccggtggaacagcggcagagaataatcggtggtcagaaagcaaaaatgggtaacttcccctggcaggtatttaccaacatccacgggcgtggaggtggcgcactgctaggtgatagatggattctgacagccgcacacaccctttatccaaaagagcatgaggcgcagtctaacgcaagtctggatgtgtttctcgggcataccaatgttgaggaattgatgaagctcgggaaccatccgatccgcagggtaagtgtgcacccagactatcgccaagacgaaagttacaacttcgagggagatatagcactacttgagctggaaaattctgtgactctggggccaaacttgctccccatttgcctgccagataacgacaccttctatgacctcggtttgatgggatatgtatccggcttcggggtgatggaggagaagatcgctcacgatttaaggttcgtgcgtttgcctgtagcaaatccgcaggcctgcgagaattggctgcgtgggaaaaacagaatggatgtattcagccagaatatgttttgcgcaggacacccatccctaaagcaggatgcttgtcagggggactcaggcggagttttcgcagtccgggatccgaatactgacagatgggtcgcaacagggatcgtctcttggggtatcggttgctctcgcggttatgggttttacaccaaagtgttgaattatgtggattggatcaagaaggaaatggaggaagaagactag

SEQ ID NO: 120545 - DNA, 2039 bp, Artificial Sequence
  derived and/or modified sequence
atcctccccacccacgcacccctgctgagaacatgtctgtgaggttcagggtgggcagagaggagaatgcccagtggtggctcttgtacctcctggtgccggccctgttctgcagggcaggaggctccattcccatccctcagaagttatttggggaggtgacttcccctctgttccccaagccttaccccaacaactttgaaacaaccactgtgatcacagtccccacgggatacagggtgaagctcgtcttccagcagtttgacctggagccttctgaaggctgcttctatgattatgtcaagatctctgctgataagaaaagcctggggaggttctgtgggcaactgggttctccactgggcaaccccccgggaaagaaggaatttatgtcccaagggaacaagatgctgctgaccttccacacagacttctccaacgaggagaatgggaccatcatgttctacaagggcttcctggcctactaccaagctgtggaccttgatgaatgtgcttcccggagcaaatcaggggaggaggatccccagccccagtgccagcacctgtgtcacaactacgttggaggctacttctgttcctgccgtccaggctatgagcttcaggaagacaggcattcctgccaggctgagtgcagcagcgagctgtacacggaggcatcaggctacatctccagcctggagtaccctcggtcctacccccctgacctgcgctgcaactacagcatccgggtggagcggggcctcaccctgcacctcaagttcctggagccttttgatattgatgaccaccagcaagtacactgcccctatgaccagctacagatctatgccaacgggaagaacattggcgagttctgtgggaagcaaaggccccccgacctcgacaccagcagcaatgctgtggatctgctgttcttcacagatgagtcgggggacagccggggctggaagctgcgctacaccaccgagatcatcaagtgcccccagcccaagaccctagacgagttcaccatcatccagaacctgcagcctcagtaccagttccgtgactacttcattgctacctgcaagcaaggctaccagctcatagagggaattcaggtggtggctggagtcgtagacgtttcagctggaagagtctcctggtccaccagctctcaaacttgctgcacacgggtgtacacctgcacagcacagggcatttggaagaatgaacagaagggagagaagattcctcggtgcttgccagtgtgtgggaagcccgtgaaccccgtggaacagaggcagcgcatcatcggagggcaaaaagccaagatgggcaacttcccctggcaggtgttcaccaacatccacgggcgcgggggcggggccctgctgggcgaccgctggatcctcacagctgcccacaccctgtatcccaaggaacacgaagcgcaaagcaacgcctctttggatgtgttcctgggccacacaaatgtggaagagctcatgaagctaggaaatcaccccatccgcagggtcagcgtccacccggactaccgtcaggatgagtcctacaattttgagggggacatcgccctgctggagctggaaaatagtgtcaccctgggtcccaacctcctccccatctgcctccctgacaacgataccttctacgacctgggcttgatgggctatgtcagtggcttcggggtcatggaggagaagattgctcatgacctcaggtttgtccgtctgcccgtagctaatccacaggcctgtgagaactggctccggggaaagaataggatggatgtgttctctcaaaacatgttctgtgctggacacccatctctaaagcaggacgcctgccagggggatagtgggggcgtttttgcagtaagggacccgaacactgatcgctgggtggccacgggcatcgtgtcctggggcatcgggtgcagcaggggctatggcttctacaccaaagtgctcaactacgtggactggatcaagaaagagatggaggaggaggactga

SEQ ID NO: 120546 - DNA, 2425 bp, Artificial Sequence
  derived and/or modified sequence
acaaacagggatttcaaaaccaaaactaaattaaagtggaaactcagatcttttgtttatgcaaatagttcattccctccaacattcctccgggaatggtcccccctccactccacagaaaaccctcccctccctgctgtgcatgacgcgggctccctctgcacacagtgcacgaagacgctgtcgggagagcccaggattcaacacgggccttgagaaatgtggctcttgtacctcctggtgccggccctgttctgcagggcaggaggctccattcccatccctcagaagttatttggggaggtgacttcccctctgttccccaagccttaccccaacaactttgaaacaaccactgtgatcacagtccccacgggatacagggtgaagctcgtcttccagcagtttgacctggagccttctgaaggctgcttctatgattatgtcaagatctctgctgataagaaaagcctggggaggttctgtgggcaactgggttctccactgggcaaccccccgggaaagaaggaatttatgtcccaagggaacaagatgctgctgaccttccacacagacttctccaacgaggagaatgggaccatcatgttctacaagggcttcctggcctactaccaagctgtggaccttgatgaatgtgcttcccggagcaaatcaggggaggaggatccccagccccagtgccagcacctgtgtcacaactacgttggaggctacttctgttcctgccgtccaggctatgagcttcaggaagacaggcattcctgccaggctgagtgcagcagcgagctgtacacggaggcatcaggctacatctccagcctggagtaccctcggtcctacccccctgacctgcgctgcaactacagcatccgggtggagcggggcctcaccctgcacctcaagttcctggagccttttgatattgatgaccaccagcaagtacactgcccctatgaccagctacagatctatgccaacgggaagaacattggcgagttctgtgggaagcaaaggccccccgacctcgacaccagcagcaatgctgtggatctgctgttcttcacagatgagtcgggggacagccggggctggaagctgcgctacaccaccgagatcatcaagtgcccccagcccaagaccctagacgagttcaccatcatccagaacctgcagcctcagtaccagttccgtgactacttcattgctacctgcaagcaaggctaccagctcatagaggggtgtacacctgcacagcacagggcatttggaagaatgaacagaagggagagaagattcctcggtgcttgccagtgtgtgggaagcccgtgaaccccgtggaacagaggcagcgcatcatcggagggcaaaaagccaagatgggcaacttcccctggcaggtgttcaccaacatccacgggcgcgggggcggggccctgctgggcgaccgctggatcctcacagctgcccacaccctgtatcccaaggaacacgaagcgcaaagcaacgcctctttggatgtgttcctgggccacacaaatgtggaagagctcatgaagctaggaaatcaccccatccgcagggtcagcgtccacccggactaccgtcaggatgagtcctacaattttgagggggacatcgccctgctggagctggaaaatagtgtcaccctgggtcccaacctcctccccatctgcctccctgacaacgataccttctacgacctgggcttgatgggctatgtcagtggcttcggggtcatggaggagaagattgctcatgacctcaggtttgtccgtctgcccgtagctaatccacaggcctgtgagaactggctccggggaaagaataggatggatgtgttctctcaaaacatgttctgtgctggacacccatctctaaagcaggacgcctgccagggggatagtgggggcgtttttgcagtaagggacccgaacactgatcgctgggtggccacgggcatcgtgtcctggggcatcgggtgcagcaggggctatggcttctacaccaaagtgctcaactacgtggactggatcaagaaagagatggaggaggaggactgagcccagaattcactaggttcgaatccagagagcagtgtggaaaaaaaaaaacaaaaaacaactgaccagttgttgataaccactaagagtctctattaaaattactgatgcagaaagaccgtgtgtgaaattctctttcctgtagtcccattgatgtactttacctgaaacaacccaaagggcccctttctttcttctgaggattgcagaggatatagttatcaatctctagttgtcactttcctcttccactttgataccattgggtcattgaatataactttttccaaataaagttttatgagaaatgccagtgtgcaaaa

SEQ ID NO: 120547 - DNA, 2112 bp, Artificial Sequence
  derived and/or modified sequence
ttccctccaacattcctccgggaatggtcccccctccactccacagaaaaccctcccctccctgctgtgcatgacgcgggctccctctgcacacagtgcacgaagacgctgtcgggagagcccaggattcaacacgggccttgagaaatgtggctcttgtacctcctggtgccggccctgttctgcagggcaggaggctccattcccatccctcagaagttatttggggaggtgacttcccctctgttccccaagccttaccccaacaactttgaaacaaccactgtgatcacagtccccacgggatacagggtgaagctcgtcttccagcagtttgacctggagccttctgaaggctgcttctatgattatgtcaagatctctgctgataagaaaagcctggggaggttctgtgggcaactgggttctccactgggcaaccccccgggaaagaaggaatttatgtcccaagggaacaagatgctgctgaccttccacacagacttctccaacgaggagaatgggaccatcatgttctacaagggcttcctggcctactaccaagctgtggaccttgatgaatgtgcttcccggagcaaatcaggggaggaggatccccagccccagtgccagcacctgtgtcacaactacgttggaggctacttctgttcctgccgtccaggctatgagcttcaggaagacaggcattcctgccaggctgagtgcagcagcgagctgtacacggaggcatcaggctacatctccagcctggagtaccctcggtcctacccccctgacctgcgctgcaactacagcatccgggtggagcggggcctcaccctgcacctcaagttcctggagccttttgatattgatgaccaccagcaagtacactgcccctatgaccagctacagatctatgccaacgggaagaacattggcgagttctgtgggaagcaaaggccccccgacctcgacaccagcagcaatgctgtggatctgctgttcttcacagatgagtcgggggacagccggggctggaagctgcgctacaccaccgagatcatcaagtgcccccagcccaagaccctagacgagttcaccatcatccagaacctgcagcctcagtaccagttccgtgactacttcattgctacctgcaagcaaggctaccagctcatagagggaattcaggtggtggctggagtcgtagacgtttcagctggaagagtctcctggtccaccagctctcaaacttgctgcacacgggtgtacacctgcacagcacagggcatttggaagaatgaacagaagggagagaagattcctcggtgcttgccagtgtgtgggaagcccgtgaaccccgtggaacagaggcagcgcatcatcggagggcaaaaagccaagatgggcaacttcccctggcaggtgttcaccaacatccacgggcgcgggggcggggccctgctgggcgaccgctggatcctcacagctgcccacaccctgtatcccaaggaacacgaagcgcaaagcaacgcctctttggatgtgttcctgggccacacaaatgtggaagagctcatgaagctaggaaatcaccccatccgcagggtcagcgtccacccggactaccgtcaggatgagtcctacaattttgagggggacatcgccctgctggagctggaaaatagtgtcaccctgggtcccaacctcctccccatctgcctccctgacaacgataccttctacgacctgggcttgatgggctatgtcagtggcttcggggtcatggaggagaagattgctcatgacctcaggtttgtccgtctgcccgtagctaatccacaggcctgtgagaactggctccggggaaagaataggatggatgtgttctctcaaaacatgttctgtgctggacacccatctctaaagcaggacgcctgccagggggatagtgggggcgtttttgcagtaagggacccgaacactgatcgctgggtggccacgggcatcgtgtcctggggcatcgggtgcagcaggggctatggcttctacaccaaagtgctcaactacgtggactggatcaagaaagagatggaggaggaggactga

SEQ ID NO: 120548 - DNA, 2007 bp, Artificial Sequence
  derived and/or modified sequence
atgagcgtgagattcagagtgggcagagaggagaacgcccagtggtggctgctgtacctgctggtgcccgccctgttctgcagagccggcggcagcatccccatcccccagaagctgttcggcgaggtgaccagccccctgttccccaagccctaccccaacaacttcgagaccaccaccgtgatcaccgtgcccaccggctacagagtgaagctggtgttccagcagttcgacctggagcccagcgagggctgcttctacgactacgtgaagatcagcgccgacaagaagagcctgggcagattctgcggccagctgggcagccccctgggcaacccccccggcaagaaggagttcatgagccagggcaacaagatgctgctgaccttccacaccgacttcagcaacgaggagaacggcaccatcatgttctacaagggcttcctggcctactaccaggccgtggacctggacgagtgcgccagcagaagcaagagcggcgaggaggacccccagccccagtgccagcacctgtgccacaactacgtgggcggctacttctgcagctgcagacccggctacgagctgcaggaggacagacacagctgccaggccgagtgcagcagcgagctgtacaccgaggccagcggctacatcagcagcctggagtaccccagaagctacccccccgacctgagatgcaactacagcatcagagtggagagaggcctgaccctgcacctgaagttcctggagcccttcgacatcgacgaccaccagcaggtgcactgcccctacgaccagctgcagatctacgccaacggcaagaacatcggcgagttctgcggcaagcagagaccccccgacctggacaccagcagcaacgccgtggacctgctgttcttcaccgacgagagcggcgacagcagaggctggaagctgagatacaccaccgagatcatcaagtgcccccagcccaagaccctggacgagttcaccatcatccagaacctgcagccccagtaccagttcagagactacttcatcgccacctgcaagcagggctaccagctgatcgagggcatccaggtggtggccggcgtggtggacgtgagcgccggcagagtgagctggagcaccagcagccagacctgctgcaccagagtgtacacctgcaccgcccagggcatctggaagaacgagcagaagggcgagaagatccccagatgcctgcccgtgtgcggcaagcccgtgaaccccgtggagcagagacagagaatcatcggcggccagaaggccaagatgggcaacttcccctggcaggtgttcaccaacatccacggcagaggcggcggcgccctgctgggcgacagatggatcctgaccgccgcccacaccctgtaccccaaggagcacgaggcccagagcaacgccagcctggacgtgttcctgggccacaccaacgtggaggagctgatgaagctgggcaaccaccccatcagaagagtgagcgtgcaccccgactacagacaggacgagagctacaacttcgagggcgacatcgccctgctggagctggagaacagcgtgaccctgggccccaacctgctgcccatctgcctgcccgacaacgacaccttctacgacctgggcctgatgggctacgtgagcggcttcggcgtgatggaggagaagatcgcccacgacctgagattcgtgagactgcccgtggccaacccccaggcctgcgagaactggctgagaggcaagaacagaatggacgtgttcagccagaacatgttctgcgccggccaccccagcctgaagcaggacgcctgccagggcgacagcggcggcgtgttcgccgtgagagaccccaacaccgacagatgggtggccaccggcatcgtgagctggggcatcggctgcagcagaggctacggcttctacaccaaggtgctgaactacgtggactggatcaagaaggagatggaggaggaggactag

SEQ ID NO: 120549 - DNA, 1131 bp, Artificial Sequence
  derived and/or modified sequence
atgtggctgctgtacctgctggtgcccgccctgttctgcagagccggcggcagcatccccatcccccagaagctgttcggcgaggtgaccagccccctgttccccaagccctaccccaacaacttcgagaccaccaccgtgatcaccgtgcccaccggctacagagtgaagctggtgttccagcagttcgacctggagcccagcgagggctgcttctacgactacgtgaagatcagcgccgacaagaagagcctgggcagattctgcggccagctgggcagccccctgggcaacccccccggcaagaaggagttcatgagccagggcaacaagatgctgctgaccttccacaccgacttcagcaacgaggagaacggcaccatcatgttctacaagggcttcctggcctactaccaggccgtggacctggacgagtgcgccagcagaagcaagagcggcgaggaggacccccagccccagtgccagcacctgtgccacaactacgtgggcggctacttctgcagctgcagacccggctacgagctgcaggaggacagacacagctgccaggccgagtgcagcagcgagctgtacaccgaggccagcggctacatcagcagcctggagtaccccagaagctacccccccgacctgagatgcaactacagcatcagagtggagagaggcctgaccctgcacctgaagttcctggagcccttcgacatcgacgaccaccagcaggtgcactgcccctacgaccagctgcagatctacgccaacggcaagaacatcggcgagttctgcggcaagcagagaccccccgacctggacaccagcagcaacgccgtggacctgctgttcttcaccgacgagagcggcgacagcagaggctggaagctgagatacaccaccgagatcatcaagtgcccccagcccaagaccctggacgagttcaccatcatccagaacctgcagccccagtaccagttcagagactacttcatcgccacctgcaagcagggctaccagctgatcgagggctgcacccccgcccagcacagagccttcggcagaatgaacagaagagagagaagattcctgggcgcctgccagtgcgtgggcagcccctag

SEQ ID NO: 120550 - DNA, 1962 bp, Artificial Sequence
  derived and/or modified sequence
tggctgctgtacctgctggtgcccgccctgttctgcagagccggcggcagcatccccatcccccagaagctgttcggcgaggtgaccagccccctgttccccaagccctaccccaacaacttcgagaccaccaccgtgatcaccgtgcccaccggctacagagtgaagctggtgttccagcagttcgacctggagcccagcgagggctgcttctacgactacgtgaagatcagcgccgacaagaagagcctgggcagattctgcggccagctgggcagccccctgggcaacccccccggcaagaaggagttcatgagccagggcaacaagatgctgctgaccttccacaccgacttcagcaacgaggagaacggcaccatcatgttctacaagggcttcctggcctactaccaggccgtggacctggacgagtgcgccagcagaagcaagagcggcgaggaggacccccagccccagtgccagcacctgtgccacaactacgtgggcggctacttctgcagctgcagacccggctacgagctgcaggaggacagacacagctgccaggccgagtgcagcagcgagctgtacaccgaggccagcggctacatcagcagcctggagtaccccagaagctacccccccgacctgagatgcaactacagcatcagagtggagagaggcctgaccctgcacctgaagttcctggagcccttcgacatcgacgaccaccagcaggtgcactgcccctacgaccagctgcagatctacgccaacggcaagaacatcggcgagttctgcggcaagcagagaccccccgacctggacaccagcagcaacgccgtggacctgctgttcttcaccgacgagagcggcgacagcagaggctggaagctgagatacaccaccgagatcatcaagtgcccccagcccaagaccctggacgagttcaccatcatccagaacctgcagccccagtaccagttcagagactacttcatcgccacctgcaagcagggctaccagctgatcgagggcatccaggtggtggccggcgtggtggacgtgagcgccggcagagtgagctggagcaccagcagccagacctgctgcaccagagtgtacacctgcaccgcccagggcatctggaagaacgagcagaagggcgagaagatccccagatgcctgcccgtgtgcggcaagcccgtgaaccccgtggagcagagacagagaatcatcggcggccagaaggccaagatgggcaacttcccctggcaggtgttcaccaacatccacggcagaggcggcggcgccctgctgggcgacagatggatcctgaccgccgcccacaccctgtaccccaaggagcacgaggcccagagcaacgccagcctggacgtgttcctgggccacaccaacgtggaggagctgatgaagctgggcaaccaccccatcagaagagtgagcgtgcaccccgactacagacaggacgagagctacaacttcgagggcgacatcgccctgctggagctggagaacagcgtgaccctgggccccaacctgctgcccatctgcctgcccgacaacgacaccttctacgacctgggcctgatgggctacgtgagcggcttcggcgtgatggaggagaagatcgcccacgacctgagattcgtgagactgcccgtggccaacccccaggcctgcgagaactggctgagaggcaagaacagaatggacgtgttcagccagaacatgttctgcgccggccaccccagcctgaagcaggacgcctgccagggcgacagcggcggcgtgttcgccgtgagagaccccaacaccgacagatgggtggccaccggcatcgtgagctggggcatcggctgcagcagaggctacggcttctacaccaaggtgctgaactacgtggactggatcaagaaggagatggaggaggaggactag

SEQ ID NO: 120551 - protein, 1676 aa, Artificial Sequence
  derived and/or modified sequence
MGLLGILCFLIFLGKTWGQEQTYVISAPKIFRVGASENIVIQVYGYTEAFDATISIKSYPDKKFSYSSGHVHLSSENKFQNSAILTIQPKQLPGGQNPVSYVYLEVVSKHFSKSKRMPITYDNGFLFIHTDKPVYTPDQSVKVRVYSLNDDLKPAKRETVLTFIDPEGSEVDMVEEIDHIGIISFPDFKIPSNPRYGMWTIKAKYKEDFSTTGTAYFEVKEYVLPHFSVSIEPEYNFIGYKNFKNFEITIKARYFYNKVVTEADVYITFGIREDLKDDQKEMMQTAMQNTMLINGIAQVTFDSETAVKELSYYSLEDLNNKYLYIAVTVIESTGGFSEEAEIPGIKYVLSPYKLNLVATPLFLKPGIPYPIKVQVKDSLDQLVGGVPVTLNAQTIDVNQETSDLDPSKSVTRVDDGVASFVLNLPSGVTVLEFNVKTDAPDLPEENQAREGYRAIAYSSLSQSYLYIDWTDNHKALLVGEHLNIIVTPKSPYIDKITHYNYLILSKGKIIHFGTREKFSDASYQSINIPVTQNMVPSSRLLVYYIVTGEQTAELVSDSVWLNIEEKCGNQLQVHLSPDADAYSPGQTVSLNMATGMDSWVALAAVDSAVYGVQRGAKKPLERVFQFLEKSDLGCGAGGGLNNANVFHLAGLTFLTNANADDSQENDEPCKEILRPRRTLQKKIEEIAAKYKHSVVKKCCYDGACVNNDETCEQRAARISLGPRCIKAFTECCVVASQLRANISHKDMQLGRLHMKTLLPVSKPEIRSYFPESWLWEVHLVPRRKQLQFALPDSLTTWEIQGVGISNTGICVADTVKAKVFKDVFLEMNIPYSVVRGEQIQLKGTVYNYRTSGMQFCVKMSAVEGICTSESPVIDHQGTKSSKCVRQKVEGSSSHLVTFTVLPLEIGLHNINFSLETWFGKEILVKTLRVVPEGVKRESYSGVTLDPRGIYGTISRRKEFPYRIPLDLVPKTEIKRILSVKGLLVGEILSAVLSQEGINILTHLPKGSAEAELMSVVPVFYVFHYLETGNHWNIFHSDPLIEKQKLKKKLKEGMLSIMSYRNADYSYSVWKGGSASTWLTAFALRVLGQVNKYVEQNQNSICNSLLWLVENYQLDNGSFKENSQYQPIKLQGTLPVEARENSLYLTAFTVIGIRKAFDICPLVKIDTALIKADNFLLENTLPAQSTFTLAISAYALSLGDKTHPQFRSIVSALKREALVKGNPPIYRFWKDNLQHKDSSVPNTGTARMVETTAYALLTSLNLKDINYVNPVIKWLSEEQRYGGGFYSTQDTINAIEGLTEYSLLVKQLRLSMDIDVSYKHKGALHNYKMTDKNFLGRPVEVLLNDDLIVSTGFGSGLATVHVTTVVHKTSTSEEVCSFYLKIDTQDIEASHYRGYGNSDYKRIVACASYKPSREESSSGSSHAVMDISLPTGISANEEDLKALVEGVDQLFTDYQIKDGHVILQLNSIPSSDFLCVRFRIFELFEVGFLSPATFTVYEYHRPDKQCTMFYSTSNIKIQKVCEGAACKCVEADCGQMQEELDLTISAETRKQTACKPEIAYAYKVSITSITVENVFVKYKATLLDIYKTGEAVAEKDSEITFIKKVTCTNAELVKGRQYLIMGKEALQIKYNFSFRYIYPLDSLTWIEYWPRDTTCSSCQAFLANLDEFAEDIFLNGC

SEQ ID NO: 120552 - DNA, 5031 bp, Artificial Sequence
  derived and/or modified sequence
atgggcttactggggatcctgtgtttccttattttcttagggaaaacatggggtcaggaacagacctacgtgatatctgctccgaagatctttcgcgtgggcgctagcgaaaacatagtcattcaggtatacgggtatactgaggcctttgatgccacaatatcaatcaaatcctaccccgacaaaaagttctcttattcctccgggcacgtgcacctgagcagcgaaaataagttccagaatagtgcaatcttaacaatccagccaaagcaactgccagggggtcagaaccccgtgtcatacgtttatctggaagtggtatcgaaacatttctccaagtccaagcggatgcctatcacctacgacaacggttttctgtttatccacacggataagcccgtctacacaccagaccagtctgtgaaggttcgcgtttactcactgaacgatgatctgaagcctgctaaaagggagaccgtcctgacgtttatcgatcctgaggggagtgaggtggatatggttgaggagatagatcacattgggattatcagctttccagactttaagatacccagtaatccccggtatggaatgtggactatcaaggcaaagtacaaagaagacttcagcacaactggcaccgcctactttgaggtcaaggagtacgtgctccctcactttagtgtcagcatcgagccagaatataatttcatcgggtacaagaattttaagaatttcgagatcactatcaaggctcggtacttctataataaagtggttacggaggccgacgtgtacattaccttcggcatacgagaagatttgaaggatgaccagaaggaaatgatgcagacagctatgcagaatacgatgctgattaacggtatcgcacaggtgacatttgatagcgagacagcagttaaggaactgagttactacagtttggaagacctgaacaacaagtacttgtacatcgcggtgacagttattgagtctaccgggggatttagcgaggaagcagagatccctgggataaaatacgtgctgtcaccgtacaagcttaatctggtggctacacctctgttcctcaaacctggaattccttaccctataaaggtacaggtgaaagatagcctcgatcagctggtgggaggcgtgccagtgactcttaatgctcagaccatcgatgtcaatcaggaaacaagcgaccttgatccttcgaagtctgtcacccgtgtcgatgatggcgtggccagcttcgtgctgaatttgccttctggcgttaccgtattggaattcaacgtgaaaactgacgctcctgatctgcctgaagaaaatcaggccagagaaggatacagagctattgcatacagtagtctgtctcagtcctacctgtacatcgattggaccgataaccacaaggccctgctcgtaggagaacatctgaacataatcgtgacacccaagtcgccatacattgacaaaattacacactataactacctcatactcagtaaaggcaagataattcacttcggcacaagggaaaagttttctgatgcttcttatcaatccatcaacattccggtcacacagaatatggtgcctagttcccggctcctcgtttattacattgttaccggggaacagactgccgaactggtctctgattcagtctggctcaatatcgaagagaaatgcgggaaccagctccaggtacatctgtcaccagacgctgacgcatacagccccggccagaccgtgtccctgaacatggctacaggcatggactcctgggtggccctggccgcagtggatagtgctgtgtatggcgtgcaacgtggcgctaaaaaaccactagagagggtgtttcagttcttagaaaagtccgaccttgggtgtggagcaggaggcggcttaaataatgccaatgtgtttcatctggcggggttgactttcctgacgaacgctaatgcagatgactcccaggaaaatgatgagccttgtaaggaaatcctgaggcctagaaggacattacagaaaaagatagaggaaatcgccgccaagtacaagcattccgtcgtcaagaagtgttgctacgacggggcctgcgtcaacaatgacgagacctgcgagcagagggccgcccggatatcactgggaccacggtgcatcaaggcatttaccgaatgctgtgtcgtcgcttcccagcttagggctaatattagccataaggacatgcagctgggaaggttgcatatgaagacgcttctacccgtcagcaagcccgaaatcagaagctatttcccggagtcatggttatgggaggtacacctagtgcctcgccggaaacagttacagttcgccttgcctgactccctgactacctgggaaattcaaggcgtgggaatctcgaatacaggcatttgcgtagcggataccgtcaaggccaaagtctttaaggacgtgttcctcgagatgaatatcccttactcagtggtacgtggcgaacagatacaattgaagggcaccgtgtacaattacagaacctctggaatgcagttttgtgttaagatgtctgccgttgaggggatctgcactagcgaaagcccagttattgatcaccaaggaacgaaaagttctaagtgtgtgcgccagaaggtggaggggagttcctcacatttggtgacttttacagtgctgccactcgaaatcggcctgcacaacattaatttttccctggaaacttggtttggcaaagagattctggttaagacactgagagttgtgccagagggcgttaagagggaatcctactctggcgtgacccttgatcccagaggcatttacgggacgatcagtaggagaaaggagttcccctatcgaatcccactcgacctggtgccgaagactgagatcaaacgcattctctcagtcaagggattactggtgggggagatcctaagtgcagtgttatcccaggagggcattaacatcttgacccatctgcctaagggaagcgcagaggcagaactgatgtctgtggttcccgtcttttatgtatttcactacctagagactggcaatcattggaacatctttcactcagatcctctgatcgaaaagcagaaattgaaaaagaaacttaaagaaggcatgctgagcatcatgagttaccgcaacgccgactattcttactccgtatggaaaggaggctcggccagtacttggctaacagccttcgccctccgggtcctaggacaggttaacaaatacgtcgaacagaaccagaattctatttgtaattccctactctggctggtggaaaactaccagctggacaacggtagtttcaaggagaactcacagtatcagccaataaagctccaaggcactctacctgtggaggctcgggagaacagcctgtacctaacagcctttacagtgattggaattagaaaagcgttcgacatttgtccccttgttaaaattgatactgctctcataaaagccgacaacttcctgctggagaacacactgcccgcacagtcaacattcactttggctatcagtgcctacgccctctcacttggggacaagacccacccccaattccgaagcatcgtgtcagcccttaagcgcgaagccttggtaaagggtaatcctccaatttaccggttctggaaagataaccttcagcacaaagattcatcagtgcccaatacagggactgcacgtatggtggaaacaactgcctacgcactgctcacgagtttaaacctgaaagacatcaactacgtgaaccctgtgatcaaatggctcagcgaggaacagagatacggtggcggtttttactccacacaagacacaattaatgcaatcgagggactgaccgaatactctctcctcgtgaagcagttaagattgtcgatggatatagacgtttcttataagcacaagggggccctccacaactataagatgactgacaagaacttcttaggcaggcccgtggaggtactcctcaacgacgatctcatcgtgagtaccggcttcggctccgggctggctacggtccacgtcacaacagtcgtccataagacttccacaagtgaagaggtttgtagcttctacctgaagatagatacacaggatatcgaggctagccactaccgcgggtacggcaactccgactacaaaagaattgtggcgtgcgcttcgtacaaaccatcccgagaagaatcctctagcggaagcagccacgccgtcatggatatcagccttcccacaggtatctcagccaatgaggaggatctgaaagccctggtggagggagtagaccagctgttcaccgattaccagatcaaggacggtcatgtgatcctgcaactgaactccataccaagcagtgactttctgtgtgtgagattccgcattttcgagctgttcgaggtggggttcctgtctcctgccacattcactgtgtacgagtatcaccgtcctgataagcaatgtaccatgttttatagtacctctaacattaagatccagaaagtgtgcgagggagctgcctgtaagtgcgtcgaggcggattgtggacaaatgcaagaagagctggatcttaccataagcgctgagacccggaagcagacggcttgcaagcccgaaatcgcatatgcttataaagtgtcgattactagcatcacagtggagaatgtatttgtcaagtacaaagcaactctcctcgatatatacaagacaggagaggcggttgcagagaaggatagtgagatcacgttcattaaaaaagtgacttgcacaaatgcagaactggtcaaaggacgacaatatcttatcatgggcaaggaggctctgcagattaaatataatttttctttccgctacatctatcctcttgattcgctgacgtggatcgagtactggcctagagacactacttgcagtagctgtcaggctttcctggccaacctcgacgagttcgccgaagacattttcctgaacggttgctag

SEQ ID NO: 120553 - DNA, 5031 bp, Artificial Sequence
  derived and/or modified sequence
atgggcctgctgggcatcctgtgcttcctgatcttcctgggcaagacctggggccaggagcagacctacgtgatcagcgcccccaagatcttccgggtgggcgcctctgaaaatattgtcatccaggtgtatggctacacagaggcctttgatgccaccatcagcatcaagagctacccagacaagaagttctcctacagcagcggccacgtgcacctgagcagcgagaacaagttccagaacagcgccatcctgaccatccagcccaagcagctgcccggcggccagaaccctgtgtcctatgtgtacctggaggtggtgtccaagcacttcagcaagagcaagaggatgcccatcacctatgacaatggcttcctgttcatccacacagacaagcctgtgtacaccccagaccagagcgtgaaggtgcgggtgtacagcctgaatgatgacctgaagccagccaagcgggagaccgtgctgaccttcatcgaccctgagggcagcgaggtggacatggtggaggagattgaccacatcggcatcatctccttcccagacttcaagatccccagcaaccccaggtatggcatgtggaccatcaaggccaagtacaaggaggacttcagcaccaccggcacagcctactttgaggtgaaggagtatgtgctgccccacttctctgtgtccattgagcctgagtacaacttcatcggctacaagaacttcaagaactttgagatcaccatcaaggcccgctacttctacaacaaggtggtgacagaagcagatgtgtacatcaccttcggcatccgggaggacctgaaggatgaccagaaggagatgatgcagacagccatgcagaacaccatgctgatcaatggcatcgcccaggtgacctttgattctgaaacagctgtgaaggagctgagctactacagcctggaggacctgaacaacaagtacctgtacatcgctgtgaccgtcatcgagagcactggaggcttcagcgaggaggccgagatccctggcatcaagtatgtgctgagcccctacaagctgaacctggtggccacccccctcttcctgaagccaggcatcccctaccccatcaaggtgcaggtgaaggacagcctggaccagctggtgggcggcgtgcctgtgaccctgaatgcccagaccattgatgtgaaccaggagaccagtgacctggaccccagcaagtctgtgaccagggtggatgatggagtggccagctttgtgctgaacctgcccagcggcgtgacagtgctggagttcaacgtgaagacagatgccccagacctgcctgaggagaaccaggcccgggagggctaccgggccatcgcctacagcagcctgagccagagctacctgtacatcgactggacagacaaccacaaggccctgctggtgggggagcacctgaacatcatcgtgacccccaagagcccctacatcgacaagatcacccactacaactacctgatcctgagcaagggcaagatcatccacttcggcacccgggagaagttcagtgatgccagctaccagagcatcaacatccctgtgacccagaacatggtgcccagcagccggctgctggtgtactacatcgtgactggagagcagacagctgagctggtgtctgacagcgtgtggctgaacatcgaggagaagtgtggcaaccagctgcaggtgcacctgagcccagatgctgatgcctacagccctggccagacagtgtccctgaacatggccaccggcatggacagctgggtggccctggccgctgtggacagcgctgtgtatggagtgcagagaggagccaagaagcccctggagagggtcttccagttcctggagaagagtgacctgggctgtggggccggcggcggcctgaacaatgccaacgtgttccacctggccggcctgaccttcctgaccaatgccaatgctgatgacagccaggagaatgatgagccctgcaaggagatcctgcggcccaggaggaccctgcagaagaagattgaggagattgctgccaagtacaagcacagcgtggtgaagaagtgctgctatgatggagcctgtgtgaacaatgatgagacctgtgagcagagagctgcccgcatcagcctgggcccccgctgcatcaaggccttcacagagtgctgcgtggtggccagccagctgcgggccaacatcagccacaaggacatgcagctgggccgcctgcacatgaagaccctgctgcctgtgtccaagccagagatccgcagctacttccctgagagctggctgtgggaggtgcacctggtgcccaggaggaagcagctgcagtttgccctgcctgacagcctgaccacctgggagatccagggcgtgggcatcagcaacacaggcatctgtgtggccgacacagtgaaggccaaggtgttcaaggatgtgttcctggagatgaacatcccctacagcgtggtgcggggggagcagatccagctgaagggcaccgtgtacaactaccgcaccagcggcatgcagttctgtgtgaagatgtctgctgtggagggcatctgcaccagcgagagccctgtgattgaccaccagggcaccaagagcagcaaatgtgtgcggcagaaggtggagggcagcagcagccacctggtgaccttcaccgtgctgcccctggagatcggcctgcacaacatcaacttcagcctggagacctggtttgggaaggagatcctggtgaagaccctgcgggtggtgcctgagggcgtgaagcgggagagctacagcggcgtgaccctggacccccggggcatctacggcaccatcagcaggaggaaggagttcccctaccgcatccccctggacctggtgcccaagacagagatcaagaggatcctgtctgtgaagggcctgctggtgggggagatcctgtctgctgtgctgagccaggagggcatcaacatcctgacccacctgcccaagggcagcgctgaggccgagctgatgtctgtggtgcctgtgttctacgtgttccactacctggagactggaaaccactggaacatcttccacagcgaccccctcatcgagaagcagaagctgaagaagaagctgaaggagggcatgctgagcatcatgagctacagaaatgctgactacagctacagcgtgtggaagggcggcagcgccagcacctggctgacagcctttgccctgcgggtgctgggccaggtgaacaagtatgtggagcagaaccagaacagcatctgcaacagcctgctgtggctggtggagaactaccagctggacaatggcagcttcaaggagaacagccagtaccagcccatcaagctgcagggcaccctgcctgtggaggcccgggagaacagcctgtacctgacagccttcaccgtcatcggcatcaggaaggcctttgacatctgccccctggtgaagattgacacagccctgatcaaggctgacaacttcctgctggagaacaccctgcctgcccagagcaccttcaccctggccatcagcgcctatgccctgagcctgggggacaagacccacccccagttccgcagcatcgtgtctgccctgaagcgggaggccctggtgaagggcaacccccccatctaccgcttctggaaggacaacctgcagcacaaggacagctctgtgcccaacacaggaacagccaggatggtggagaccacagcctatgccctgctgaccagcctgaacctgaaggacatcaactacgtgaaccctgtgatcaagtggctgtctgaggagcagagatatggaggcggcttctacagcacccaggacaccatcaatgccatcgagggcctgacagagtacagcctgctggtgaagcagctgcggctgtccatggacattgatgtgtcctacaagcacaagggggccctgcacaactacaagatgacagacaagaacttcctgggccggcctgtggaggtgctgctgaatgatgacctgattgtgtccacaggcttcggcagcggcctggccaccgtgcacgtgaccaccgtggtgcacaagaccagcaccagcgaggaggtgtgcagcttctacctgaagattgacacccaggacatcgaggccagccactaccggggctacggcaacagcgactacaagagaattgtggcctgtgccagctacaagcccagccgggaggagagcagcagcggcagcagccatgctgtgatggacatcagcctgcccaccggcatcagcgccaatgaggaggacctgaaggccctggtggagggcgtggaccagctgttcacagactaccagatcaaggatggccacgtgatcctgcagctgaacagcatccccagcagtgacttcctgtgtgtgcgcttccgcatctttgagctgtttgaggtgggcttcctgagccctgccaccttcaccgtgtatgagtaccacaggccagacaagcagtgcaccatgttctacagcaccagcaacatcaagatccagaaggtgtgtgagggcgccgcctgcaagtgtgtggaggccgactgtggccagatgcaggaggagctggacctgaccatctctgctgagaccaggaagcagacagcctgcaagccagaaattgcctatgcctacaaggtgtccatcaccagcatcaccgtggagaatgtgtttgtgaagtacaaggccaccctgctggacatctacaagacaggagaggccgtggccgagaaggacagcgagatcaccttcatcaagaaggtgacctgcaccaatgctgagctggtgaagggccggcagtacctgatcatgggcaaggaggccctgcagatcaagtacaacttctccttccgctacatctaccccctggacagcctgacctggattgagtactggccccgggacaccacctgcagcagctgccaggccttcctggccaacctggatgaatttgctgaggacatcttcctgaatggctgctag

SEQ ID NO: 120554 - DNA, 5031 bp, Artificial Sequence
  derived and/or modified sequence
atgggcctgctgggcatcctgtgcttcctgatcttcctgggcaagacatggggacaggaacaaacatatgtgatcagcgcaccaaagatcttccgggtaggcgctagtgagaatattgttatacaggtatatggctacactgaggcgttcgacgcaactataagtataaaaagttatcccgacaaaaagttctcctactcatccggacacgtgcatttgagtagcgaaaacaagttccagaattcagcaattctgacaatccagcccaagcaactgcccggaggacagaatccagtgagttacgtctacctggaagtcgttagcaagcatttctctaagtcaaagaggatgccgatcacctacgacaatggcttcttgttcatccacacagacaagcccgtgtatacgcctgatcagagcgttaaagtgcgggtttattccctcaacgatgacttgaagcccgccaagagggaaaccgtgctgacattcatcgaccccgaaggtagcgaggtggatatggtggaagaaatcgatcatatcggcatcatctcattccccgatttcaagattcccagcaatcctcgatatgggatgtggaccatcaaggctaaatacaaggaggactttagcacgactggaacagcttatttcgaggtgaaagagtatgtgctgccccatttttccgtgagcattgaacccgagtacaacttcatcgggtataagaactttaagaattttgaaattacgattaaggcaagatatttttacaacaaagtagttactgaagctgacgtgtatatcaccttcgggataagggaggacctaaaggatgaccagaaagaaatgatgcagacagcaatgcaaaacactatgctgataaatgggatcgcccaggtgacctttgatagcgagaccgctgtcaaggagctcagctattactccctggaggacttgaataacaagtacctttatatcgctgtcactgtaatcgaaagcaccggcgggttctctgaggaagcggagattcccgggataaaatacgttctgtccccttataagctgaatcttgtcgcgaccccactattcctgaagcccgggatcccgtatccaattaaggtgcaggtcaaagactcacttgaccagttagtcggcggagtgccagtgacccttaatgcccagactatagatgtaaaccaggaaacgtcagacctagatcctagcaagagcgtgaccagagtcgacgacggtgtagcttccttcgttctcaacttaccttcgggggttacagtacttgaattcaacgtgaaaaccgacgctcccgatctacccgaggagaaccaagcccgggaagggtatagggctatagcctattcaagcttgtctcagagctacttgtacatcgactggaccgacaaccacaaagctctcctggtgggcgagcacctcaacataattgtgactcctaaaagtccttacatcgacaagatcacccactataattacctgatcctgtccaagggtaaaatcattcactttggcaccagggagaaattcagtgatgcctcataccagagtattaacatacctgtaactcagaatatggtgcctagttctcgcctgcttgtgtactatattgtcaccggcgagcaaactgctgagctggtgagtgactcagtttggctgaatatagaagagaagtgcggcaatcagttacaggtccacctgagcccggatgccgacgcgtatagtcccggccaaaccgtcagtctcaatatggccaccggtatggattcctgggtggccctggccgccgtggactcggctgtgtatggtgtgcagcgaggtgctaaaaagcctctcgagagagtcttccagttcctagagaaatccgatctcggctgtggagcggggggaggcctaaacaatgcgaacgtgttccacctcgccggcctcacatttcttactaatgccaatgcggatgatagtcaggaaaacgacgaaccttgtaaggagatactgcgcccccggagaacattgcagaaaaaaatcgaggagattgccgccaaatacaagcattctgtggtgaagaagtgctgctatgacggagcttgcgtcaacaacgacgagacttgcgagcagcgcgcagcgagaatctccttgggtcctcgctgcatcaaggccttcacagagtgttgtgtagtggctagccagctccgtgctaacatctcacacaaagacatgcagctgggcaggttacatatgaagactttactgcctgtgtctaaaccagagatacgtagttatttccctgaaagctggctgtgggaggtccacctcgttcctaggcgcaagcagcttcaattcgccctgccggattctctgaccacatgggagatccaaggggtgggaatttccaataccggtatctgtgtggccgacactgtcaaggccaaagtgttcaaagacgtgtttctggaaatgaatattccatactccgtagtgaggggtgaacagatacaactgaaggggactgtgtacaactaccgtacttcaggcatgcagttctgcgttaagatgtcggcggtggagggaatttgtacctccgagagtcccgtgatcgaccaccaaggcactaaatcttccaaatgcgtccgccaaaaagttgagggatccagcagccatcttgtcactttcaccgtgttgcctctggagattggtctgcacaacattaatttctccctggagacctggtttggtaaagaaatactcgtgaaaaccttgagggtcgttcccgaaggagtgaaacgtgagagttactccggagtcacgctagacccccgaggtatctacggcaccatttctcgacggaaagaattcccctaccgcatcccgctggacctggttccgaaaacggagataaaaaggatcctttccgtgaagggactgcttgtgggcgagatactgagtgctgtcttatcccaggaaggcataaacatcctgacccatctcccaaagggatccgccgaggctgagctcatgtcggtggtgcccgtgttctacgtgttccattacctcgaaactggtaatcactggaatatcttccactccgatccactgattgagaaacagaaattgaagaaaaagttaaaggaagggatgctctccattatgagctatcgcaacgctgactatagctactctgtatggaagggcgggagtgcctctacatggttgacagcttttgcccttagggtgctgggccaggtcaacaagtatgttgaacagaaccaaaattccatttgtaactctttgctgtggctcgtggagaactatcaactagacaacggcagcttcaaagagaacagccagtaccaacccatcaagctgcagggaacgcttccagtcgaagcccgggagaatagcctatacttgactgcgttcaccgttatcggaattaggaaagcctttgacatttgtcctctcgtgaagattgacacagccctcattaaggccgacaacttcctgctggaaaatacactgccagcccagtctactttcactttggctatctctgcctatgcgctgtccctgggcgataagactcatccccaattccggtccattgtgagcgccctgaagagggaagcactggtcaagggaaatcccccaatttatcggttctggaaggacaatctacaacacaaagactcctccgtgcccaataccggtactgctcggatggttgaaacaaccgcttatgctttgctgacgagtctgaacctgaaagatatcaattacgtgaaccctgttataaaatggctctcagaggaacagcgttacggcgggggtttctactctactcaggataccatcaatgccatcgagggcttgacggaatacagcctgctcgtcaaacagctgaggcttagtatggatatcgacgtgtcctataagcacaaaggcgcgctgcataattacaaaatgaccgacaaaaactttctgggccgtcctgtggaggtgcttttgaatgacgacctgatagtttccacggggtttggatccggactggctaccgtgcatgtgactactgtcgttcataagacctctacaagtgaagaggtttgtagtttctacctgaagattgacacccaggacattgaagcatctcactaccgaggctatggcaattccgattacaagaggattgttgcatgtgccagctacaaaccctcccgcgaggagagttcgagcgggtcgagccatgccgtgatggatatctcactgcctacgggaatctccgccaacgaagaggacctaaaggcacttgtggagggggtcgatcagctattcacagattatcaaattaaagacgggcacgtaatcctccaactaaactccatcccatcatctgactttctgtgcgtcaggtttaggattttcgaactgtttgaagttggattcctgagtccagccactttcacagtgtatgaatatcacaggcctgataagcagtgtacaatgttctacagtacctctaacataaagatacaaaaggtgtgtgagggggctgcctgcaaatgcgtcgaggcagactgtggacaaatgcaggaagagctggacttgactatctcagccgaaacccgaaaacagaccgcctgcaaacccgaaatcgcgtacgcatacaaggtgagtatcacaagtataacggtggaaaacgttttcgtcaagtacaaggcaaccctgcttgacatttacaagactggggaggcagtggcagagaaggactccgaaatcacattcatcaagaaggttacatgcactaacgcagaattggtcaaaggccgacagtatctgataatggggaaggaggccctccagatcaagtacaacttctcttttaggtatatatatcctctggattcgttgacttggatagaatactggccaagagatacaacatgctcttcatgtcaagcatttcttgctaacctggatgaatttgcggaggatatattccttaacggatgttag

SEQ ID NO: 120555 - DNA, 5031 bp, Artificial Sequence
  derived and/or modified sequence
atggggttactggggattttatgtttcctcatatttctggggaaaacttggggccaggagcagacctatgttatctcagctccaaagattttcagagttggagcaagtgagaatattgtgatccaggtctatggttacacggaagcttttgacgctactatttccatcaagagctatccggacaagaaattctcttactcatcaggccatgtacacctttcctctgagaacaaattccagaactctgctattcttaccattcaacctaagcagctccccggtggacagaaccccgtttcgtatgtgtatctcgaagttgtgagcaaacacttcagcaagtcaaaaagaatgcccattacttacgataatggatttctgtttattcacacagataaacctgtctacactcctgatcagagcgtgaaagtgagagtctactccctgaacgatgacctcaagcccgctaagagagagaccgtcctgacctttatcgacccagagggcagcgaggtggacatggtcgaagaaatcgaccatattggcataatctcgttcccggatttcaagataccctctaatcccaggtatggaatgtggacaattaaggccaaatacaaggaggatttttccaccactggaactgcatactttgaagtcaaagagtacgtactcccacacttcagcgtctccattgagcctgagtacaatttcataggttacaagaactttaaaaatttcgagatcaccataaaggcgcgatacttctacaacaaggtagttactgaagcagacgtgtacattacattcggcattcgggaagacctgaaagatgatcagaaagagatgatgcaaaccgccatgcagaacaccatgctgataaatggaattgcccaggtgacttttgactccgaaaccgctgtcaaagaactctcttattattcactggaggacctgaataataagtatctctatatcgccgtgacagtgatcgagtcaactggtggtttctcggaagaggcagagattccagggatcaaatatgttctgagcccctataagctgaacttagtggcaactcccctgttcctgaagcctggcatcccttatcctattaaggtccaagtgaaggattccctggaccagctggtggggggagtcccagttactcttaatgcacagactatagatgtgaaccaagagacctcggacctcgacccaagcaagagtgttaccagggtggatgatggtgtggcatcatttgtacttaatctaccatccggcgtgacagtccttgagttcaatgtgaaaaccgacgccccagacctgccagaggagaaccaggccagagaaggttatcgggctatcgcttactcctcactgtcacagagctacttgtatatcgactggactgataaccataaagccctcctcgtaggcgagcacctaaatatcatcgtcacacctaagagtccctatatagataaaataacacattacaattatctcattctctccaaaggcaagatcatccacttcggcacaagagagaaattttctgacgcctcatatcagagcataaatatccccgtgacgcagaacatggttccttcgtcccgactgctcgtgtattatatcgtgacaggagaacagaccgctgagctggtaagcgactccgtttggctgaacatcgaggaaaagtgtggcaatcagttgcaggttcacttgagtccggatgcagacgcatactctcccggacaaactgttagcctcaacatggccacgggaatggactcatgggtcgccctggctgcggtagattctgccgtgtatggagtacaaagaggtgccaagaagccccttgaaagggtgtttcaatttctggaaaagtctgacttaggatgcggggcaggcggtggtttgaacaacgccaacgtctttcacctggcaggacttacatttctgaccaatgctaacgccgacgacagtcaagaaaacgacgagccctgtaaggagattctcagaccaagaagaaccctacagaagaaaattgaggaaatagcggctaaatataagcattcggtggtcaaaaaatgttgctacgatggcgcttgtgttaataatgacgagacctgcgaacagcgtgccgcaaggatctcactggggcctcggtgtattaaagcattcacagaatgctgtgtagttgccagtcagcttcgagccaacatctcacacaaggacatgcagctcggtaggctgcacatgaaaaccctactgccagtgagtaagccggagattcgctcctactttccagagagctggctatgggaagttcaccttgtgccacgcagaaagcaactgcagttcgcactgcctgattcactcaccacttgggaaatccagggagtgggcataagcaataccgggatctgcgtggctgataccgttaaggcgaaggtgtttaaagatgtgttcctggagatgaatatcccctacagcgtggtacgcggtgagcaaatacagctcaaagggacagtttacaattacagaacaagcggaatgcagttctgcgtcaagatgtccgcggttgaaggcatttgtacttcggagagccccgtgattgatcatcagggaaccaagtcgtcgaaatgcgtccgccagaaggtggaaggttcctcttcccacctcgtaacgttcaccgtacttcccctggaaattggtctgcataacatcaacttcagtctggaaacttggttcggaaaggagattttagtgaaaaccttacgggtcgtgccagaaggggttaaacgggaatcatactctggagttacactcgatccacgagggatttacggcactatcagtaggaggaaagaatttccttaccgaatccctcttgacttggtgcccaaaacggagataaaacggattctgtcagtaaaggggttgctcgtgggggagattttgtcggctgttctctcgcaggaggggatcaatattctcactcaccttccaaagggcagcgccgaggcagaactcatgtcggtggtgccggtattttacgtctttcactacctggaaaccggtaaccactggaacatctttcattctgaccctctcatcgagaagcagaagctgaaaaaaaagcttaaagagggcatgctgtcgataatgtcctatcggaatgccgattacagctacagcgtgtggaagggaggcagcgctagtacctggctcaccgctttcgccttacgggtgctgggccaggtcaacaaatatgttgaacagaaccagaactctatctgcaatagtttattgtggctcgtggaaaattaccaattggacaatggctcgtttaaggaaaattcccagtatcaaccaattaaacttcaaggtacccttccagtggaagcacgggaaaattccttgtacctgacagcattcaccgttattgggatacgcaaagcatttgacatatgcccattagtaaagattgataccgccctgattaaggctgataacttcctacttgaaaacaccctgcctgcccaatccaccttcacactcgcaattagcgcctacgctctctctctgggcgacaaaactcacccacagtttcgcagcatcgtgtccgctttgaaacgcgaagcacttgtgaaaggcaacccaccaatctatcgcttctggaaagacaacctgcaacataaagattcgagtgtgcccaataccggtactgccaggatggttgaaacgactgcatacgcccttttgactagtctcaatttaaaggatataaattacgtcaatcccgtcattaagtggcttagcgaggagcagcgctatggcggtgggttctacagcactcaggacactatcaatgctatcgagggactcactgaatactccttgctcgtcaaacagctcagactgtccatggacatcgatgtatcctacaagcacaaaggagctcttcataattataagatgaccgataaaaatttcctggggagaccggtcgaagtgctgcttaacgatgatttaattgtgagtaccgggttcggcagtggcttagccacagtccacgttaccacagtagtgcacaaaacgtccacttctgaagaggtatgttctttttatcttaaaattgatacccaggacatcgaagcctcccactatcgaggctacggaaacagcgattacaaaagaattgtagcctgtgcctcatacaagccatcacgggaagaatcgagtagcggatcatcgcacgccgtgatggatatcagtctaccaacaggcatcagcgcgaacgaagaagacctcaaggctctagtcgagggcgtcgatcagctgttcaccgactaccagattaaagacgggcatgttatcctgcagcttaatagtatcccctccagtgatttcttgtgcgtgaggttccgcatctttgagttgttcgaggtgggtttcctctctcccgcaactttcaccgtttatgagtatcatcgccctgacaagcagtgcaccatgttctattctaccagcaacataaaaattcaaaaggtgtgcgagggcgcagcctgtaagtgcgtcgaagctgactgtggccagatgcaggaagaattggacctgacaatctccgctgagaccaggaagcaaaccgcttgcaagccggagatcgcgtacgcctataaagtgagcattacctcaattactgttgaaaacgtgtttgtcaaatataaagccaccttactagacatttacaagactggtgaagcggttgccgaaaaggacagcgagatcacctttattaaaaaggtgacttgcactaatgctgaactggtgaagggcaggcagtatctgatcatgggaaaggaggccctacagattaagtataatttctctttccggtacatttatcctttagattcactgacctggatcgagtactggccacgcgacaccacttgtagcagttgtcaggccttcctggcgaatttggatgagttcgcggaagatatctttctgaatggctgttag

SEQ ID NO: 120556 - DNA, 5031 bp, Artificial Sequence
  derived and/or modified sequence
atgggcctgctgggcatcctgtgcttcctgatcttcctgggcaagacctggggccaggagcagacctacgtgatcagcgcccccaagatcttcagagtgggcgccagcgagaacatcgtgatccaggtgtacggctacaccgaggccttcgacgccaccatcagcatcaagagctaccccgacaagaagttcagctacagcagcggccacgtgcacctgagcagcgagaacaagttccagaacagcgccatcctgaccatccagcccaagcagctgcccggcggccagaaccccgtgagctacgtgtacctggaggtggtgagcaagcacttcagcaagagcaagagaatgcccatcacctacgacaacggcttcctgttcatccacaccgacaagcccgtgtacacccccgaccagagcgtgaaggtgagagtgtacagcctgaacgacgacctgaagcccgccaagagagagaccgtgctgaccttcatcgaccccgagggcagcgaggtggacatggtggaggagatcgaccacatcggcatcatcagcttccccgacttcaagatccccagcaaccccagatacggcatgtggaccatcaaggccaagtacaaggaggacttcagcaccaccggcaccgcctacttcgaggtgaaggagtacgtgctgccccacttcagcgtgagcatcgagcccgagtacaacttcatcggctacaagaacttcaagaacttcgagatcaccatcaaggccagatacttctacaacaaggtggtgaccgaggccgacgtgtacatcaccttcggcatcagagaggacctgaaggacgaccagaaggagatgatgcagaccgccatgcagaacaccatgctgatcaacggcatcgcccaggtgaccttcgacagcgagaccgccgtgaaggagctgagctactacagcctggaggacctgaacaacaagtacctgtacatcgccgtgaccgtgatcgagagcaccggcggcttcagcgaggaggccgagatccccggcatcaagtacgtgctgagcccctacaagctgaacctggtggccacccccctgttcctgaagcccggcatcccctaccccatcaaggtgcaggtgaaggacagcctggaccagctggtgggcggcgtgcccgtgaccctgaacgcccagaccatcgacgtgaaccaggagaccagcgacctggaccccagcaagagcgtgaccagagtggacgacggcgtggccagcttcgtgctgaacctgcccagcggcgtgaccgtgctggagttcaacgtgaagaccgacgcccccgacctgcccgaggagaaccaggccagagagggctacagagccatcgcctacagcagcctgagccagagctacctgtacatcgactggaccgacaaccacaaggccctgctggtgggcgagcacctgaacatcatcgtgacccccaagagcccctacatcgacaagatcacccactacaactacctgatcctgagcaagggcaagatcatccacttcggcaccagagagaagttcagcgacgccagctaccagagcatcaacatccccgtgacccagaacatggtgcccagcagcagactgctggtgtactacatcgtgaccggcgagcagaccgccgagctggtgagcgacagcgtgtggctgaacatcgaggagaagtgcggcaaccagctgcaggtgcacctgagccccgacgccgacgcctacagccccggccagaccgtgagcctgaacatggccaccggcatggacagctgggtggccctggccgccgtggacagcgccgtgtacggcgtgcagagaggcgccaagaagcccctggagagagtgttccagttcctggagaagagcgacctgggctgcggcgccggcggcggcctgaacaacgccaacgtgttccacctggccggcctgaccttcctgaccaacgccaacgccgacgacagccaggagaacgacgagccctgcaaggagatcctgagacccagaagaaccctgcagaagaagatcgaggagatcgccgccaagtacaagcacagcgtggtgaagaagtgctgctacgacggcgcctgcgtgaacaacgacgagacctgcgagcagagagccgccagaatcagcctgggccccagatgcatcaaggccttcaccgagtgctgcgtggtggccagccagctgagagccaacatcagccacaaggacatgcagctgggcagactgcacatgaagaccctgctgcccgtgagcaagcccgagatcagaagctacttccccgagagctggctgtgggaggtgcacctggtgcccagaagaaagcagctgcagttcgccctgcccgacagcctgaccacctgggagatccagggcgtgggcatcagcaacaccggcatctgcgtggccgacaccgtgaaggccaaggtgttcaaggacgtgttcctggagatgaacatcccctacagcgtggtgagaggcgagcagatccagctgaagggcaccgtgtacaactacagaaccagcggcatgcagttctgcgtgaagatgagcgccgtggagggcatctgcaccagcgagagccccgtgatcgaccaccagggcaccaagagcagcaagtgcgtgagacagaaggtggagggcagcagcagccacctggtgaccttcaccgtgctgcccctggagatcggcctgcacaacatcaacttcagcctggagacctggttcggcaaggagatcctggtgaagaccctgagagtggtgcccgagggcgtgaagagagagagctacagcggcgtgaccctggaccccagaggcatctacggcaccatcagcagaagaaaggagttcccctacagaatccccctggacctggtgcccaagaccgagatcaagagaatcctgagcgtgaagggcctgctggtgggcgagatcctgagcgccgtgctgagccaggagggcatcaacatcctgacccacctgcccaagggcagcgccgaggccgagctgatgagcgtggtgcccgtgttctacgtgttccactacctggagaccggcaaccactggaacatcttccacagcgaccccctgatcgagaagcagaagctgaagaagaagctgaaggagggcatgctgagcatcatgagctacagaaacgccgactacagctacagcgtgtggaagggcggcagcgccagcacctggctgaccgccttcgccctgagagtgctgggccaggtgaacaagtacgtggagcagaaccagaacagcatctgcaacagcctgctgtggctggtggagaactaccagctggacaacggcagcttcaaggagaacagccagtaccagcccatcaagctgcagggcaccctgcccgtggaggccagagagaacagcctgtacctgaccgccttcaccgtgatcggcatcagaaaggccttcgacatctgccccctggtgaagatcgacaccgccctgatcaaggccgacaacttcctgctggagaacaccctgcccgcccagagcaccttcaccctggccatcagcgcctacgccctgagcctgggcgacaagacccacccccagttcagaagcatcgtgagcgccctgaagagagaggccctggtgaagggcaacccccccatctacagattctggaaggacaacctgcagcacaaggacagcagcgtgcccaacaccggcaccgccagaatggtggagaccaccgcctacgccctgctgaccagcctgaacctgaaggacatcaactacgtgaaccccgtgatcaagtggctgagcgaggagcagagatacggcggcggcttctacagcacccaggacaccatcaacgccatcgagggcctgaccgagtacagcctgctggtgaagcagctgagactgagcatggacatcgacgtgagctacaagcacaagggcgccctgcacaactacaagatgaccgacaagaacttcctgggcagacccgtggaggtgctgctgaacgacgacctgatcgtgagcaccggcttcggcagcggcctggccaccgtgcacgtgaccaccgtggtgcacaagaccagcaccagcgaggaggtgtgcagcttctacctgaagatcgacacccaggacatcgaggccagccactacagaggctacggcaacagcgactacaagagaatcgtggcctgcgccagctacaagcccagcagagaggagagcagcagcggcagcagccacgccgtgatggacatcagcctgcccaccggcatcagcgccaacgaggaggacctgaaggccctggtggagggcgtggaccagctgttcaccgactaccagatcaaggacggccacgtgatcctgcagctgaacagcatccccagcagcgacttcctgtgcgtgagattcagaatcttcgagctgttcgaggtgggcttcctgagccccgccaccttcaccgtgtacgagtaccacagacccgacaagcagtgcaccatgttctacagcaccagcaacatcaagatccagaaggtgtgcgagggcgccgcctgcaagtgcgtggaggccgactgcggccagatgcaggaggagctggacctgaccatcagcgccgagaccagaaagcagaccgcctgcaagcccgagatcgcctacgcctacaaggtgagcatcaccagcatcaccgtggagaacgtgttcgtgaagtacaaggccaccctgctggacatctacaagaccggcgaggccgtggccgagaaggacagcgagatcaccttcatcaagaaggtgacctgcaccaacgccgagctggtgaagggcagacagtacctgatcatgggcaaggaggccctgcagatcaagtacaacttcagcttcagatacatctaccccctggacagcctgacctggatcgagtactggcccagagacaccacctgcagcagctgccaggccttcctggccaacctggacgagttcgccgaggacatcttcctgaacggctgctag

SEQ ID NO: 120557 - DNA, 5462 bp, Artificial Sequence
  derived and/or modified sequence
tatatccgtggtttcctgctacctccaaccatgggccttttgggaatactttgttttttaatcttcctggggaaaacctggggacaggagcaaacatatgtcatttcagcaccaaaaatattccgtgttggagcatctgaaaatattgtgattcaagtttatggatacactgaagcatttgatgcaacaatctctattaaaagttatcctgataaaaaatttagttactcctcaggccatgttcatttatcctcagagaataaattccaaaactctgcaatcttaacaatacaaccaaaacaattgcctggaggacaaaacccagtttcttatgtgtatttggaagttgtatcaaagcatttttcaaaatcaaaaagaatgccaataacctatgacaatggatttctcttcattcatacagacaaacctgtttatactccagaccagtcagtaaaagttagagtttattcgttgaatgacgacttgaagccagccaaaagagaaactgtcttaactttcatagatcctgaaggatcagaagttgacatggtagaagaaattgatcatattggaattatctcttttcctgacttcaagattccgtctaatcctagatatggtatgtggacgatcaaggctaaatataaagaggacttttcaacaactggaaccgcatattttgaagttaaagaatatgtcttgccacatttttctgtctcaatcgagccagaatataatttcattggttacaagaactttaagaattttgaaattactataaaagcaagatatttttataataaagtagtcactgaggctgacgtttatatcacatttggaataagagaagacttaaaagatgatcaaaaagaaatgatgcaaacagcaatgcaaaacacaatgttgataaatggaattgctcaagtcacatttgattctgaaacagcagtcaaagaactgtcatactacagtttagaagatttaaacaacaagtacctttatattgctgtaacagtcatagagtctacaggtggattttctgaagaggcagaaatacctggcatcaaatatgtcctctctccctacaaactgaatttggttgctactcctcttttcctgaagcctgggattccatatcccatcaaggtgcaggttaaagattcgcttgaccagttggtaggaggagtcccagtaacactgaatgcacaaacaattgatgtaaaccaagagacatctgacttggatccaagcaaaagtgtaacacgtgttgatgatggagtagcttcctttgtgcttaatctcccatctggagtgacggtgctggagtttaatgtcaaaactgatgctccagatcttccagaagaaaatcaggccagggaaggttaccgagcaatagcatactcatctctcagccaaagttacctttatattgattggactgataaccataaggctttgctagtgggagaacatctgaatattattgttacccccaaaagcccatatattgacaaaataactcactataattacttgattttatccaagggcaaaattatccactttggcacgagggagaaattttcagatgcatcttatcaaagtataaacattccagtaacacagaacatggttccttcatcccgacttctggtctattacatcgtcacaggagaacagacagcagaattagtgtctgattcagtctggttaaatattgaagaaaaatgtggcaaccagctccaggttcatctgtctcctgatgcagatgcatattctccaggccaaactgtgtctcttaatatggcaactggaatggattcctgggtggcattagcagcagtggacagtgctgtgtatggagtccaaagaggagccaaaaagcccttggaaagagtatttcaattcttagagaagagtgatctgggctgtggggcaggtggtggcctcaacaatgccaatgtgttccacctagctggacttaccttcctcactaatgcaaatgcagatgactcccaagaaaatgatgaaccttgtaaagaaattctcaggccaagaagaacgctgcaaaagaagatagaagaaatagctgctaaatataaacattcagtagtgaagaaatgttgttacgatggagcctgcgttaataatgatgaaacctgtgagcagcgagctgcacggattagtttagggccaagatgcatcaaagctttcactgaatgttgtgtcgtcgcaagccagctccgtgctaatatctctcataaagacatgcaattgggaaggctacacatgaagaccctgttaccagtaagcaagccagaaattcggagttattttccagaaagctggttgtgggaagttcatcttgttcccagaagaaaacagttgcagtttgccctacctgattctctaaccacctgggaaattcaaggcgttggcatttcaaacactggtatatgtgttgctgatactgtcaaggcaaaggtgttcaaagatgtcttcctggaaatgaatataccatattctgttgtacgaggagaacagatccaattgaaaggaactgtttacaactataggacttctgggatgcagttctgtgttaaaatgtctgctgtggagggaatctgcacttcggaaagcccagtcattgatcatcagggcacaaagtcctccaaatgtgtgcgccagaaagtagagggctcctccagtcacttggtgacattcactgtgcttcctctggaaattggccttcacaacatcaatttttcactggagacttggtttggaaaagaaatcttagtaaaaacattacgagtggtgccagaaggtgtcaaaagggaaagctattctggtgttactttggatcctaggggtatttatggtaccattagcagacgaaaggagttcccatacaggatacccttagatttggtccccaaaacagaaatcaaaaggattttgagtgtaaaaggactgcttgtaggtgagatcttgtctgcagttctaagtcaggaaggcatcaatatcctaacccacctccccaaagggagtgcagaggcggagctgatgagcgttgtcccagtattctatgtttttcactacctggaaacaggaaatcattggaacatttttcattctgacccattaattgaaaagcagaaactgaagaaaaaattaaaagaagggatgttgagcattatgtcctacagaaatgctgactactcttacagtgtgtggaagggtggaagtgctagcacttggttaacagcttttgctttaagagtacttggacaagtaaataaatacgtagagcagaaccaaaattcaatttgtaattctttattgtggctagttgagaattatcaattagataatggatctttcaaggaaaattcacagtatcaaccaataaaattacagggtaccttgcctgttgaagcccgagagaacagcttatatcttacagcctttactgtgattggaattagaaaggctttcgatatatgccccctggtgaaaatcgacacagctctaattaaagctgacaactttctgcttgaaaatacactgccagcccagagcacctttacattggccatttctgcgtatgctctttccctgggagataaaactcacccacagtttcgttcaattgtttcagctttgaagagagaagctttggttaaaggtaatccacccatttatcgtttttggaaagacaatcttcagcataaagacagctctgtacctaacactggtacggcacgtatggtagaaacaactgcctatgctttactcaccagtctgaacttgaaagatataaattatgttaacccagtcatcaaatggctatcagaagagcagaggtatggaggtggcttttattcaacccaggacacaatcaatgccattgagggcctgacggaatattcactcctggttaaacaactccgcttgagtatggacatcgatgtttcttacaagcataaaggtgccttacataattataaaatgacagacaagaatttccttgggaggccagtagaggtgcttctcaatgatgacctcattgtcagtacaggatttggcagtggcttggctacagtacatgtaacaactgtagttcacaaaaccagtacctctgaggaagtttgcagcttttatttgaaaatcgatactcaggatattgaagcatcccactacagaggctacggaaactctgattacaaacgcatagtagcatgtgccagctacaagcccagcagggaagaatcatcatctggatcctctcatgcggtgatggacatctccttgcctactggaatcagtgcaaatgaagaagacttaaaagcccttgtggaaggggtggatcaactattcactgattaccaaatcaaagatggacatgttattctgcaactgaattcgattccctccagtgatttcctttgtgtacgattccggatatttgaactctttgaagttgggtttctcagtcctgccactttcacagtgtacgaataccacagaccagataaacagtgtaccatgttttatagcacttccaatatcaaaattcagaaagtctgtgaaggagccgcgtgcaagtgtgtagaagctgattgtgggcaaatgcaggaagaattggatctgacaatctctgcagagacaagaaaacaaacagcatgtaaaccagagattgcatatgcttataaagttagcatcacatccatcactgtagaaaatgtttttgtcaagtacaaggcaacccttctggatatctacaaaactggggaagctgttgctgagaaagactctgagattaccttcattaaaaaggtaacctgtactaacgctgagctggtaaaaggaagacagtacttaattatgggtaaagaagccctccagataaaatacaatttcagtttcaggtacatctaccctttagattccttgacctggattgaatactggcctagagacacaacatgttcatcgtgtcaagcatttttagctaatttagatgaatttgccgaagatatctttttaaatggatgctaaaattcctgaagttcagctgcatacagtttgcacttatggactcctgttgttgaagttcgtttttttgttttcttctttttttaaacattcatagctggtcttatttgtaaagctcactttacttagaattagtggcacttgcttttattagagaatgatttcaaatgctgtaactttctgaaataacatggccttggagggcatgaagacagatactcctccaaggttattggacaccggaaacaataaattggaacacctcctcaaacctaccactcaggaatgtttgctggggccgaaagaacagtccattgaaagggagtattacaaaaacatggcctttgcttgaaagaaaataccaaggaacaggaaactgatcattaaagcctgagtttgctttc

SEQ ID NO: 120558 - protein, 350 aa, Artificial Sequence
  derived and/or modified sequence
MDSFNYTTPDYGHYDDKDTLDLNTPVDKTSNTLRVPDILALVIFAVVFLVGVLGNALVVWVTAFEAKRTINAIWFLNLAVADFLSCLALPILFTSIVQHHHWPFGGAACSILPSLILLNMYASILLLATISADRFLLVFKPIWCQNFRGAGLAWIACAVAWGLALLLTIPSFLYRVVREEYFPPKVLCGVDYSHDKRRERAVAIVRLVLGFLWPLLTLTICYTFILLRTWSRRATRSTKTLKVVVAVVASFFIFWLPYQVTGIMMSFLEPSSPTFLLLKKLDSLCVSFAYINCCINPIIYVVAGQGFQGRLRKSLPSLLRNVLTEESVVRESKSFTRSTVDTMAQKTQAV

SEQ ID NO: 120559 - DNA, 2342 bp, Artificial Sequence
  derived and/or modified sequence
cttgggcaggagggaccttcgatcctcggggagcccaggagaccagaacatggactccttcaattataccacccctgattatgggcactatgatgacaaggataccctggacctcaacacccctgtggataaaacttctaacacgctgcgtgttccagacatcctggccttggtcatctttgcagtcgtcttcctggtgggagtgctgggcaatgccctggtggtctgggtgacggcattcgaggccaagcggaccatcaatgccatctggttcctcaacttggcggtagccgacttcctctcctgcctggcgctgcccatcttgttcacgtccattgtacagcatcaccactggccctttggcggggccgcctgcagcatcctgccctccctcatcctgctcaacatgtacgccagcatcctgctcctggccaccatcagcgccgaccgctttctgctggtgtttaaacccatctggtgccagaacttccgaggggctggcttggcctggatcgcctgtgccgtggcttggggtttagccctgctgctgaccataccctccttcctgtaccgggtggtccgggaggagtactttccaccaaaggtgttgtgtggcgtggactacagccacgacaaacggcgggagcgagccgtggccatcgtccggctggtcctgggcttcctgtggcctctactcacgctcacgatttgttacactttcatcctgctccggacgtggagccgcagggccacgcggtccaccaagacactcaaggtggtggtggcagtggtggccagtttctttatcttctggttgccctaccaggtgacggggataatgatgtccttcctggagccatcgtcacccaccttcctgctgctgaagaagctggactccctgtgtgtctcctttgcctacatcaactgctgcatcaaccccatcatctacgtggtggccggccagggcttccagggccgactgcggaaatccctccccagcctcctccggaacgtgttgactgaagagtccgtggttagggagagcaagtcattcacgcgctccacagtggacactatggcccagaagacccaggcagtgtaggcgacagcctcatgggccactgtggcccgatgtccccttccttcccggccattctccctcttgttttcacttcacttttcgtgggatggtgttaccttagctaactaactctcctccatgttgcctgtctttcccagacttgtccctccttttccagcgggactcttctcatccttcctcatttgcaaggtgaacacttccttctagggagcaccctcccaccccccaccccccccacacacaccatctttccatcccaggcttttgaaaaacaaacagaaacccgtgtatctgggatatttccatatggcaataggtgtgaacagggaactcagaatacagacaagtagaaagattctcgcttaaaaaaaatgtatttattttatggcaagttggaaaatatgtaactggaatctcaaaagttctttgggacaaaacagaagtccatggagttatctaagctcttgtaagtgagttaatttaaaaaagaaaattaggctgagagcagtggctcacgcctgtaatcccagaactttgggaggctaaggtgggtggatcacctgaggtcaagagttccagaccaggctggccagcatggtgaaaccccgtctgtactaaaaatacaaaaaattaactgggcatggtagtgggtgcctgtaatcccagctacttgggaggctgaggtgggagaattgctcgaacttggaggtggaggttgtggtgagccatgatcgcaccactgcactctagcctgggtgaccgagggaggctctgtctcaaaagcaaagcaaaaacaaaaacaaaaacacctaaaaaacctgcagttttgtttgtactttgtttttaaattatgctttctattttgagatcattgcaaactcaacacaattgtaagtaatgatacagagggatcttgtgtacccttcacccagcctcccccaatggcaacatcttgcaaaactacaatgtagtctcataaccaggatattgacattgatacagtgaagatacaggacattctcatcaccacagggatccccaggatgcccacttccctccacccccacaccccagccgtgtccctaacccctggcaaccaggaatccactctccatttctataatgttgtcatttcaagaatgttattcaatggaatcatatagtatgtaacctgttttgagcttaaaaaaaaagtatacatgactttaatgaggaaaataaaaatgaatattgaaatgtt

SEQ ID NO: 120560 - DNA, 1053 bp, Artificial Sequence
  derived and/or modified sequence
atggacagcttcaactacaccacccccgactacggccactacgacgacaaggacaccctggacctgaacacccccgtggacaagaccagcaacaccctgagagtgcccgacatcctggccctggtgatcttcgccgtggtgttcctggtgggcgtgctgggcaacgccctggtggtgtgggtgaccgccttcgaggccaagagaaccatcaacgccatctggttcctgaacctggccgtggccgacttcctgagctgcctggccctgcccatcctgttcaccagcatcgtgcagcaccaccactggcccttcggcggcgccgcctgcagcatcctgcccagcctgatcctgctgaacatgtacgccagcatcctgctgctggccaccatcagcgccgacagattcctgctggtgttcaagcccatctggtgccagaacttcagaggcgccggcctggcctggatcgcctgcgccgtggcctggggcctggccctgctgctgaccatccccagcttcctgtacagagtggtgagagaggagtacttcccccccaaggtgctgtgcggcgtggactacagccacgacaagagaagagagagagccgtggccatcgtgagactggtgctgggcttcctgtggcccctgctgaccctgaccatctgctacaccttcatcctgctgagaacctggagcagaagagccaccagaagcaccaagaccctgaaggtggtggtggccgtggtggccagcttcttcatcttctggctgccctaccaggtgaccggcatcatgatgagcttcctggagcccagcagccccaccttcctgctgctgaagaagctggacagcctgtgcgtgagcttcgcctacatcaactgctgcatcaaccccatcatctacgtggtggccggccagggcttccagggcagactgagaaagagcctgcccagcctgctgagaaacgtgctgaccgaggagagcgtggtgagagagagcaagagcttcaccagaagcaccgtggacaccatggcccagaagacccaggccgtgtag

SEQ ID NO: 120561 - DNA, 1053 bp, Artificial Sequence
  derived and/or modified sequence
atggattccttcaactatacgactcccgattacggacattatgacgataaagacactctggacctgaacacaccggtggataagacatctaacaccttgcgcgtacctgatatactggcccttgtaattttcgccgttgtcttcttagtaggcgtcctgggaaatgctctcgtcgtatgggtcactgcgtttgaagctaagcggactatcaatgctatttggtttctgaacttggccgtggccgacttcctgtcatgcttggctcttcctattctgttcaccagtatcgtccagcatcaccattggccctttgggggcgctgcgtgctcgatcctaccgtctctgattttactgaatatgtacgcctccattctgctgctggccactatcagcgcagatcggttcctcctggtgtttaaacctatatggtgtcagaactttcgaggagctggcctagcttggatcgcttgcgcagtcgcctggggcttggcactgctgctgaccatccccagctttctgtaccgggtcgtgcgcgaagaatatttcccacccaaggtgctttgcggagtagactattcgcacgataagaggcgcgagcgagccgtggctatcgtccgactggtcctgggcttcctctggcctttactcaccctgacaatatgctatacctttatacttctgaggacatggagccgacgagcgaccaggtccaccaaaacactgaaagtggtcgtcgcggtcgtggcttcattcttcatcttctggctgccttatcaggtgaccggtattatgatgagctttctggagccctctagccccacctttctcttgctcaagaaacttgattcattgtgcgtgtcttttgcctacataaactgctgcatcaaccccataatctatgttgtagccggtcagggattccagggtcggctgaggaaatctctgcctagcctgctgcgaaacgtactaaccgaggagtctgtggtgagggaaagcaaatcttttacaaggtctacagttgacaccatggcccagaaaacacaggcagtgtag

SEQ ID NO: 120562 - DNA, 1053 bp, Artificial Sequence
  derived and/or modified sequence
atggacagcttcaactacaccaccccagactatggccactatgatgacaaggacaccctggacctgaacacccctgtggacaagaccagcaacaccctgcgggtgcctgacatcctggccctggtgatctttgctgtggtgttcctggtgggcgtgctgggcaatgccctggtggtgtgggtgacagcctttgaggccaagaggaccatcaatgccatctggttcctgaacctggccgtggccgacttcctgagctgcctggccctgcccatcctcttcaccagcatcgtgcagcaccaccactggccctttggaggagctgcctgcagcatcctgcccagcctcatcctgctgaacatgtatgccagcatcctgctgctggccaccatctctgctgaccgcttcctgctggtgttcaagcccatctggtgccagaacttccggggggccggcctggcctggatcgcctgtgctgtggcctggggcctggccctgctgctgaccatccccagcttcctgtacagagtggtgcgggaggagtacttcccccccaaggtgctgtgtggggtggactacagccatgacaagagaagagaaagagctgtggccatcgtgcggctggtgctgggcttcctgtggcccctgctgaccctgaccatctgctacaccttcatcctgctgcggacctggagccggcgggccaccaggagcaccaagaccctgaaggtggtggtggccgtggtggccagcttcttcatcttctggctgccctaccaggtgacaggcatcatgatgtccttcctggagcccagcagccccaccttcctgctgctgaagaagctggacagcctgtgtgtgtcctttgcctacatcaactgctgcatcaaccccatcatctacgtggtggccggccagggcttccagggccgcctgaggaagagcctgcccagcctgctgagaaatgtgctgacagaggagagcgtggtgcgggagagcaagagcttcaccaggagcacagtggacaccatggcccagaagacccaggccgtgtag

SEQ ID NO: 120563 - DNA, 1053 bp, Artificial Sequence
  derived and/or modified sequence
atggacagcttcaactacaccacccccgactacggccactacgacgataaagacaccctcgacttgaacacgcctgtcgataaaacttctaataccctccgggtcccagacatactggccttagtcatctttgcagtggtgtttctggtgggtgtactcggcaacgcgctggtggtgtgggtcacagcctttgaggcaaagaggacgattaacgccatttggtttctcaatctcgccgtggcagactttctttcgtgtctggcgctacctatcttgttcacttcaatcgtgcagcaccaccactggccattcggaggcgccgcttgcagcatattaccaagcctgattctactcaatatgtacgcctctatcctgctgcttgccacaatctccgctgatcggttcttattggtctttaaaccgatttggtgtcagaacttcagaggcgctggactcgcgtggattgcatgtgcagttgcgtggggactggctctgctgcttaccattccctcatttctctacagggtggtgcgggaggagtacttccccccgaaggtcctgtgtggtgtcgactatagccacgacaagagacgcgagagagccgtggcaatcgtgagactcgttctcggcttcttatggcctctccttacattgacaatctgctacacttttatcctgttgaggacctggagccgacgtgcaacccggagtacgaagactttgaaagtggtagtggcagtagtggcctccttctttattttttggctgccctaccaggtaacaggtatcatgatgtcattcctggaaccaagctcccctacctttctgctgttgaaaaagttggactcgttatgcgtgagttttgcttatataaactgttgcatcaacccgattatttatgtggtagctggtcagggcttccagggccgactccggaagagccttccttcactgctgagaaacgtgctgactgaggagagcgtagtcagggagtccaagagtttcacccgtagtaccgtggatacgatggcacagaagactcaggcagtttag

SEQ ID NO: 120564 - DNA, 1053 bp, Artificial Sequence
  derived and/or modified sequence
atggactcgttcaattacactacacctgattatggccactacgacgacaaggatactttagacttgaatactcccgtagacaagacatctaataccctgcgggtccccgacatcttagccctcgtaattttcgccgtggtatttctcgtgggggtgctcggcaatgccctggttgtgtgggtgaccgcattcgaggcaaaaaggacaatcaacgccatttggttcctcaacttggccgttgccgatttcctatcctgcctcgccctgccgattctgttcacttcgatcgtgcagcaccatcattggccatttggaggcgcagcctgttccatcctgccctccctgatcctgttaaatatgtacgcctccatcctactgctcgccacaatttcggctgaccggtttttactcgtctttaagcccatttggtgtcagaacttccgaggcgctgggcttgcgtggattgcctgtgcagtggcctggggcctggcccttctcctcacaatccctagtttcctgtaccgcgttgtacgggaggaatacttccctccaaaggtgctgtgcggcgttgattattctcatgataagcgtcgtgagagagccgtggccatcgtgcgcctcgtgctgggttttctctggcctttgttgacactgacaatatgctacacctttatactcttgagaacatggagcagacgcgcaacgcgcagtactaagactctgaaagtcgtggttgctgttgtggcttcgttcttcatattctggctgccttatcaggttaccggcatcatgatgagcttcctggaaccatcgagccctacatttctgctgctcaagaaattggactccctgtgtgtgtcattcgcctacataaattgttgtatcaacccaattatttacgtcgtggctggacagggatttcagggacggctccgaaagtccctaccaagcctgctgcgaaatgtcctgacagaggaaagcgtcgtgcgagagtccaagtcatttacccgatccacagttgatacaatggcccagaaaacacaggctgtttag

SEQ ID NO: 120565 - protein, 559 aa, Artificial Sequence
  derived and/or modified sequence
MSACRSFAVAICILEISILTAQYTTSYDPELTESSGSASHIDCRMSPWSEWSQCDPCLRQMFRSRSIEVFGQFNGKRCTDAVGDRRQCVPTEPCEDAEDDCGNDFQCSTGRCIKMRLRCNGDNDCGDFSDEDDCESEPRPPCRDRVVEESELARTAGYGINILGMDPLSTPFDNEFYNGLCNRDRDGNTLTYYRRPWNVASLIYETKGEKNFRTEHYEEQIEAFKSIIQEKTSNFNAAISLKFTPTETNKAEQCCEETASSISLHGKGSFRFSYSKNETYQLFLSYSSKKEKMFLHVKGEIHLGRFVMRNRDVVLTTTFVDDIKALPTTYEKGEYFAFLETYGTHYSSSGSLGGLYELIYVLDKASMKRKGVELKDIKRCLGYHLDVSLAFSEISVGAEFNKDDCVKRGEGRAVNITSENLIDDVVSLIRGGTRKYAFELKEKLLRGTVIDVTDFVNWASSINDAPVLISQKLSPIYNLVPVKMKNAHLKKQNLERAIEDYINEFSVRKCHTCQNGGTVILMDGKCLCACPFKFEGIACEISKQKISEGLPALEFPNEK

SEQ ID NO: 120566 - DNA, 1680 bp, Artificial Sequence
  derived and/or modified sequence
atgagcgcttgtcgttcgtttgccgtcgccatctgcatactggagatttcgatattaactgcgcagtatactacaagctacgatcccgaactgacagagagctcaggaagcgcatcccacatcgactgcaggatgtctccctggtcagagtggtcccagtgcgatccatgcctgcgccagatgttccggtcgagatctatcgaagtgtttgggcagtttaacggtaaaaggtgtaccgacgcggtgggagaccgaaggcagtgcgttcccactgagccctgcgaagacgctgaagacgattgcgggaatgacttccagtgctctacgggtcggtgtattaagatgagactccgatgtaacggggataatgattgcggcgatttttcagatgaggacgattgcgagtccgaaccacggccaccctgcagggatagggtcgtggaggagtcagagctagctcggaccgcaggctacggcattaatattctgggcatggaccccctgagcactcctttcgataatgaattttacaatggactttgtaaccgtgaccgggatggcaacactcttacctactacaggcgaccttggaacgtggcatctctgatctacgaaaccaaaggagaaaaaaactttcgtactgaacattatgaggagcagattgaagccttcaagagtattattcaggaaaagacctccaattttaacgctgccatatccctgaaatttacccctacggaaaccaataaagctgagcagtgctgtgaagaaacggccagcagtatttctcttcatgggaagggcagttttaggttcagctactcaaaaaatgagacatatcagctctttctctcctacagctccaaaaaagaaaagatgtttctccatgtaaaaggtgagatccacctcgggcgatttgtcatgaggaatcgcgacgttgtgttgacgacaacctttgtcgatgacataaaggccttaccaaccacctacgagaaaggagaatacttcgcgtttcttgagacttacggaactcactattcttcatccggaagtttgggtgggttatacgaactgatctatgtactggacaaggccagcatgaaacgcaagggagtcgaattgaaagatattaaacggtgcttggggtaccacctggacgtgagcttggcatttagcgagatctctgtgggagctgagttcaacaaggacgactgtgtgaagcgaggcgaggggcgcgccgtcaatatcacttctgaaaatttgatcgacgatgtggtgtctctcatccgcggaggtactagaaagtatgcctttgaattaaaggagaagctactgcggggcaccgtgatcgatgtcaccgactttgttaattgggccagctccatcaatgatgcccctgtgctgatttcacagaaactatcgcccatatacaacttagtacctgtcaagatgaagaatgcccacctgaagaaacagaatctggaacgcgccatcgaggattatatcaatgagtttagtgtgcgtaagtgccatacctgccagaatggcggcacagtgatactgatggacgggaaatgtctttgtgcctgtccgttcaagtttgaggggatcgcatgtgagatatcaaagcagaaaatcagcgagggcttgcccgcccttgagttccctaacgaaaagtag

SEQ ID NO: 120567 - DNA, 1680 bp, Artificial Sequence
  derived and/or modified sequence
atgtctgcctgccgcagctttgctgtggccatctgcatcctggagatcagcatcctgacagcccagtacaccaccagctatgaccctgagctgacagagagcagcggcagcgccagccacatcgactgcaggatgagcccctggagcgagtggagccagtgtgacccctgcctgcggcagatgttccgcagccgcagcattgaggtgtttggccagttcaacgggaagcgctgcacagatgctgtgggggaccggcggcagtgtgtgcccacagagccctgtgaagatgctgaagatgactgtggaaatgacttccagtgcagcacaggccgctgcatcaagatgaggctgcgctgcaatggagacaatgactgtggggacttcagtgatgaagatgactgtgagagcgagccccggcccccctgccgggacagagtggtggaggagagcgagctggccaggacagctggctacggcatcaacatcctgggcatggaccccctgagcaccccatttgacaatgagttctacaacggcctgtgcaacagagacagagatggcaacaccctgacctactaccgccggccctggaatgtggccagcctcatctatgagaccaagggggagaagaacttcagaacagagcactatgaggagcagatcgaggccttcaagagcatcatccaggagaagaccagcaacttcaatgctgccatcagcctgaagttcacccccacagagaccaacaaggccgagcagtgctgtgaggagacagccagcagcatcagcctgcacggcaagggcagcttccgcttctcctacagcaagaatgagacctaccagctgttcctgagctacagcagcaagaaggagaagatgttcctgcacgtgaagggggagatccacctgggccgctttgtgatgaggaacagagatgtggtgctgaccaccacctttgtggatgacatcaaggccctgcccaccacctatgagaagggggagtactttgccttcctggagacctacggcacccactacagcagcagcggcagcctgggcggcctgtatgagctgatctacgtgctggacaaggcctccatgaagaggaagggcgtggagctgaaggacatcaagcgctgcctgggctaccacctggatgtgtccctggccttcagcgagatctctgtgggcgctgagttcaacaaggatgactgtgtgaagagaggagagggccgggctgtgaacatcaccagcgagaacctgattgatgatgtggtgtccctcatccggggcggcaccaggaaatatgcctttgagctgaaggagaagctgctgcggggcaccgtgattgatgtgacagactttgtgaactgggccagcagcatcaatgatgcccctgtgctgatcagccagaagctgagccccatctacaacctggtgcctgtgaagatgaagaatgcccacctgaagaagcagaacctggagcgggccatcgaggactacatcaatgagttctctgtgaggaagtgccacacctgccagaatggaggcaccgtcatcctgatggatggcaagtgcctgtgtgcctgccccttcaagtttgagggcatcgcctgtgagatcagcaagcagaagatcagcgagggcctgcctgccctggagttccccaatgagaagtag

SEQ ID NO: 120568 - DNA, 1680 bp, Artificial Sequence
  derived and/or modified sequence
atgagcgcctgccggagcttcgccgtggccatctgcatcctggagatttcaattctgacagcacagtataccaccagttacgacccggaattgacagagtcatcaggcagtgcttctcatatcgattgtagaatgagcccgtggagcgaatggtcccagtgcgatccatgtttgagacagatgttcagatctcgatctatcgaggtcttcggacagttcaatgggaagcggtgtaccgatgccgtgggagatcggaggcagtgcgtacccaccgagccttgtgaggacgccgaagacgactgtgggaatgacttccagtgcagtacaggtcgttgcatcaagatgcggctgaggtgtaacggtgataacgattgcggagatttctctgatgaggacgattgtgaaagcgagccgcggcccccatgccgcgatagggtggtggaggagtctgaactagcacgcacagccggttacggcatcaatattcttggcatggacccactttctactccattcgataatgaattctacaacgggctttgcaaccgcgaccgtgatggaaacaccttaacttactaccgccggccgtggaatgtggctagtcttatctacgagaccaagggggagaaaaactttcggaccgagcactacgaggagcaaatcgaggctttcaagagtatcattcaggagaagacctccaattttaatgctgccatatccctcaagttcacccctaccgaaaccaataaggccgaacagtgttgtgaagaaacggcctctagcatctccctgcatggcaaaggctcatttcgattctcctatagtaaaaacgagacctaccagctcttcctgagctacagtagcaagaaagagaagatgtttctccacgtaaaaggcgaaatccatttaggtcgtttcgtgatgaggaaccgggacgttgtactcacaaccacttttgtggacgatatcaaagccctgcctacaacgtacgagaaaggagagtatttcgctttcctcgagacatatggcactcactactcatcttcaggatccctggggggattatatgaattaatctatgttttggataaagcgtcaatgaagcgcaaaggggttgaacttaaggatatcaagcgctgcctgggctaccatctcgacgtttcattggcctttagcgaaatatcagtgggcgccgaatttaacaaagacgattgcgtcaagagaggggaaggccgcgctgtcaatattaccagcgaaaatctaatcgatgacgtcgtttctctgatacgtggaggcacacgcaaatacgcattcgagctgaaagagaagctgctaaggggaacagtcatcgacgttaccgacttcgtgaattgggccagctctataaatgatgcaccagtcctgatttctcagaaactttcaccaatctacaatctagttccagtgaaaatgaaaaacgcccacctaaagaaacagaacctggaacgcgccatagaagactatataaacgaatttagcgtgcgaaagtgtcatacgtgccaaaacggaggcactgtgatactaatggacgggaaatgtttgtgtgcatgcccctttaagttcgaaggcattgcgtgtgaaatctctaagcaaaagatctcagaggggttgcctgctctggaattccctaacgaaaaatag

SEQ ID NO: 120569 - DNA, 1680 bp, Artificial Sequence
  derived and/or modified sequence
atgagcgcctgtagaagcttcgctgtcgcgatttgtatactcgagattagcattctgactgcccagtacacaacgtcttacgaccctgaactgaccgaatcttcaggatccgcctctcacatcgactgcaggatgagcccatggagcgagtggtctcagtgtgatccatgcctccgccaaatgttccggtctaggtcaatcgaggtcttcggccagtttaacggaaagagatgcacagatgccgtcggagatcggcgacaatgcgtccctactgagccttgcgaggacgccgaggacgactgcggaaatgacttccagtgtagcacgggacgctgcattaagatgagactgcgctgtaacggggacaacgactgcggggatttctctgatgaagatgattgtgaaagcgagcccagacccccttgtcgagatagagtcgtcgaggagagtgaactggcgagaacagccggttatggcataaacatccttgggatggacccacttagtactccctttgataacgagttttacaatgggctttgtaatcgagacagagatggcaacactcttacttactacagaaggccttggaatgtcgcgagcctcatttacgagactaagggcgagaagaattttagaaccgagcactatgaggagcagattgaggctttcaagtcaatcatacaggagaaaacgtccaactttaatgctgctatctctttaaagttcactccaaccgagactaacaaggccgaacagtgttgcgaggagactgcgtcctccattagtcttcacgggaaaggaagtttcaggttcagttatagcaagaacgaaacttatcagctgttcctgagttactcatcaaagaaggagaaaatgtttctgcatgtgaagggcgagatccacctggggaggtttgtgatgcgcaatcgagatgtggtgcttacaaccaccttcgtggacgatatcaaagctctgcccactacctatgaaaaaggggagtactttgcatttctggagacctatggaacccattactcttcatccggatcactcggtggcctgtacgaactgatctatgttttggacaaggcctccatgaaacggaaaggagttgagctgaaagatataaaacgctgcctgggataccacttagacgtcagtctagccttctccgagattagcgttggtgctgaattcaacaaagatgactgtgtgaagcggggagagggacgagccgtaaacataacctccgagaacctgatagacgacgtggtgtcactgattagaggaggcacgagaaagtatgccttcgaactgaaggagaagttacttagaggcactgtcatcgacgttaccgattttgttaactgggcttcgagtattaatgatgcgccagtcctgatctctcagaaattgtcaccgatctacaatttagtacctgtgaagatgaaaaatgctcacctgaaaaaacagaatctggagcgtgccatcgaagactacatcaacgagttcagcgtgcgcaaatgtcatacatgccaaaatggcggtaccgtcattctcatggatgggaaatgcctgtgcgcatgcccctttaagtttgaggggatagcatgcgagattagtaaacagaagattagtgaaggccttcccgctcttgaatttcctaacgagaaatag

SEQ ID NO: 120570 - DNA, 2713 bp, Artificial Sequence
  derived and/or modified sequence
aaacaatgcttgttccctgtcctctggccctttgcaaataaatgccttaccagacctgccctgccaccccactcgcagccacccagcaagagcagcatgtcagcctgccggagctttgcagttgcaatctgcattttagaaataagcatcctcacagcacagtacacgaccagttatgacccagagctaacagaaagcagtggctctgcatcacacatagactgcagaatgagcccctggagtgaatggtcacaatgcgatccttgtctcagacaaatgtttcgttcaagaagcattgaggtctttggacaatttaatgggaaaagatgcaccgacgctgtgggagacagacgacagtgtgtgcccacagagccctgtgaggatgctgaggatgactgcggaaatgactttcaatgcagtacaggcagatgcataaagatgcgacttcggtgtaatggtgacaatgactgcggagacttttcagatgaggatgattgtgaaagtgagccccgtcccccctgcagagacagagtggtagaagagtctgagctggcacgaacagcaggctatgggatcaacattttagggatggatcccctaagcacaccttttgacaatgagttctacaatggactctgtaaccgggatcgggatggaaacactctgacatactaccgaagaccttggaacgtggcttctttgatctatgaaaccaaaggcgagaaaaatttcagaaccgaacattacgaagaacaaattgaagcatttaaaagtatcatccaagagaagacatcaaattttaatgcagctatatctctaaaatttacacccactgaaacaaataaagctgaacaatgttgtgaggaaacagcctcctcaatttctttacatggcaagggtagttttcggttttcatattccaaaaatgaaacttaccaactatttttgtcatattcttcaaagaaggaaaaaatgtttctgcatgtgaaaggagaaattcatctgggaagatttgtaatgagaaatcgcgatgttgtgctcacaacaacttttgtggatgatataaaagctttgccaactacctatgaaaagggagaatattttgcctttttggaaacctatggaactcactacagtagctctgggtctctaggaggactctatgaactaatatatgttttggataaagcttccatgaagcggaaaggtgttgaactaaaagacataaagagatgccttgggtatcatctggatgtatctctggctttctctgaaatctctgttggagctgaatttaataaagatgattgtgtaaagaggggagagggtagagctgtaaacatcaccagtgaaaacctcatagatgatgttgtttcactcataagaggtggaaccagaaaatatgcatttgaactgaaagaaaagcttctccgaggaaccgtgattgatgtgactgactttgtcaactgggcctcttccataaatgatgctcctgttctcattagtcaaaaactgtctcctatatataatctggttccagtgaaaatgaaaaatgcacacctaaagaaacaaaacttggaaagagccattgaagactatatcaatgaatttagtgtaagaaaatgccacacatgccaaaatggaggtacagtgattctaatggatggaaagtgtttgtgtgcctgcccattcaaatttgagggaattgcctgtgaaatcagtaaacaaaaaatttctgaaggattgccagccctagagttccccaatgaaaaatagagctgttggcttctctgagctccagtggaagaagaaaacactagtaccttcagatcctacccctgaagataatcttagctgccaagtaaatagcaacatgcttcatgaaaatcctaccaacctctgaagtctcttctctcttaggtctataatttttttttaaatttttcttccttaaactcctgtgatgtttccattttttgttccctaatgagaagtcaacagtgaaatacgccagaactgctttatcccacggaaaatgccaatctcttctaaaaaaaaacaaaattaaattaaaaacagaatgttggtttaaaaaacttcaaagtaattttcaaacggctttgtatggttaacatattctgccaggtccatgaccacacgtctgtaccatgcaatttaactcttatttacattgttatgtttagtttggttatttgcttaggtgtgcatacattcattcagcaaatgctgagcaccagccacgtgcacagcagttgcttttactagtcttagctctacgatttaaatccatgtgtccaagggggaaaacatattatatttgtaaccaaaaactactagtttaccagaggactgaagggagataaagaggagttggttaatgggtacaaaaatccagttagatgaaaggaataatatagatagtgttcagtagcagaatagaatgaacataaactattagtttaaattatgtgaaattccttctatttgatcatattttacaagaaaaaacatcaattttatatagtccaacttaatacctagccttatgagttgtataaggtaaggttacctacctgagaagctgattaacattggttgtacaatcttattcattagagaacatggtgcttagggtctgagaccttttgaaaggtctgagaactctttaaaaaaaggaaagaaagaaagaaaa

SEQ ID NO: 120571 - DNA, 1680 bp, Artificial Sequence
  derived and/or modified sequence
atgagcgcctgcagaagcttcgccgtggccatctgcatcctggagatcagcatcctgaccgcccagtacaccaccagctacgaccccgagctgaccgagagcagcggcagcgccagccacatcgactgcagaatgagcccctggagcgagtggagccagtgcgacccctgcctgagacagatgttcagaagcagaagcatcgaggtgttcggccagttcaacggcaagagatgcaccgacgccgtgggcgacagaagacagtgcgtgcccaccgagccctgcgaggacgccgaggacgactgcggcaacgacttccagtgcagcaccggcagatgcatcaagatgagactgagatgcaacggcgacaacgactgcggcgacttcagcgacgaggacgactgcgagagcgagcccagacccccctgcagagacagagtggtggaggagagcgagctggccagaaccgccggctacggcatcaacatcctgggcatggaccccctgagcacccccttcgacaacgagttctacaacggcctgtgcaacagagacagagacggcaacaccctgacctactacagaagaccctggaacgtggccagcctgatctacgagaccaagggcgagaagaacttcagaaccgagcactacgaggagcagatcgaggccttcaagagcatcatccaggagaagaccagcaacttcaacgccgccatcagcctgaagttcacccccaccgagaccaacaaggccgagcagtgctgcgaggagaccgccagcagcatcagcctgcacggcaagggcagcttcagattcagctacagcaagaacgagacctaccagctgttcctgagctacagcagcaagaaggagaagatgttcctgcacgtgaagggcgagatccacctgggcagattcgtgatgagaaacagagacgtggtgctgaccaccaccttcgtggacgacatcaaggccctgcccaccacctacgagaagggcgagtacttcgccttcctggagacctacggcacccactacagcagcagcggcagcctgggcggcctgtacgagctgatctacgtgctggacaaggccagcatgaagagaaagggcgtggagctgaaggacatcaagagatgcctgggctaccacctggacgtgagcctggccttcagcgagatcagcgtgggcgccgagttcaacaaggacgactgcgtgaagagaggcgagggcagagccgtgaacatcaccagcgagaacctgatcgacgacgtggtgagcctgatcagaggcggcaccagaaagtacgccttcgagctgaaggagaagctgctgagaggcaccgtgatcgacgtgaccgacttcgtgaactgggccagcagcatcaacgacgcccccgtgctgatcagccagaagctgagccccatctacaacctggtgcccgtgaagatgaagaacgcccacctgaagaagcagaacctggagagagccatcgaggactacatcaacgagttcagcgtgagaaagtgccacacctgccagaacggcggcaccgtgatcctgatggacggcaagtgcctgtgcgcctgccccttcaagttcgagggcatcgcctgcgagatcagcaagcagaagatcagcgagggcctgcccgccctggagttccccaacgagaagtag

SEQ ID NO: 120572 - protein, 305 aa, Artificial Sequence
  derived and/or modified sequence
MLGRNTWKTSAFSFLVEQMWAPLWSRSMRPGRWCSQRSCAWQTSNNTLHPLWTVPVSVPGGTRQSPINIQWRDSVYDPQLKPLRVSYEAASCLYIWNTGYLFQVEFDDATEASGISGGPLENHYRLKQFHFHWGAVNEGGSEHTVDGHAYPAELHLVHWNSVKYQNYKEAVVGENGLAVIGVFLKLGAHHQTLQRLVDILPEIKHKDARAAMRPFDPSTLLPTCWDYWTYAGSLTTPPLTESVTWIIQKEPVEVAPSQLSAFRTLLFSALGEEEKMMVNNYRPLQPLMNRKVWASFQATNEGTRS

SEQ ID NO: 120573 - DNA, 918 bp, Artificial Sequence
  derived and/or modified sequence
atgctgggcagaaacacctggaagaccagcgccttcagcttcctggtggagcagatgtgggcccccctgtggagcagaagcatgagacccggcagatggtgcagccagagaagctgcgcctggcagaccagcaacaacaccctgcaccccctgtggaccgtgcccgtgagcgtgcccggcggcaccagacagagccccatcaacatccagtggagagacagcgtgtacgacccccagctgaagcccctgagagtgagctacgaggccgccagctgcctgtacatctggaacaccggctacctgttccaggtggagttcgacgacgccaccgaggccagcggcatcagcggcggccccctggagaaccactacagactgaagcagttccacttccactggggcgccgtgaacgagggcggcagcgagcacaccgtggacggccacgcctaccccgccgagctgcacctggtgcactggaacagcgtgaagtaccagaactacaaggaggccgtggtgggcgagaacggcctggccgtgatcggcgtgttcctgaagctgggcgcccaccaccagaccctgcagagactggtggacatcctgcccgagatcaagcacaaggacgccagagccgccatgagacccttcgaccccagcaccctgctgcccacctgctgggactactggacctacgccggcagcctgaccaccccccccctgaccgagagcgtgacctggatcatccagaaggagcccgtggaggtggcccccagccagctgagcgccttcagaaccctgctgttcagcgccctgggcgaggaggagaagatgatggtgaacaactacagacccctgcagcccctgatgaacagaaaggtgtgggccagcttccaggccaccaacgagggcaccagaagctag

SEQ ID NO: 120574 - DNA, 918 bp, Artificial Sequence
  derived and/or modified sequence
atgctaggccggaatacatggaaaacatccgccttttcgttccttgtagaacaaatgtgggcaccgttatggtcaaggtccatgcggcccgggcgatggtgttcacaacgaagttgtgcttggcagactagtaacaacacactccatcctttgtggacggttccggtgtcagtccccggggggaccagacagtctccaataaatatccagtggagagattcagtctatgacccacagctgaaaccattacgtgtctcctacgaggctgcatcatgtctttacatatggaataccggatatctgtttcaggtagagtttgatgatgccaccgaagccagcggcatctctgggggtccgctcgaaaatcactataggcttaagcagttccatttccattggggtgctgtgaatgaaggcggctctgagcataccgtggacggacatgcatatccagctgagttacacctcgtccactggaacagcgtgaaataccaaaactacaaagaagcagtggttggggagaacggtttggcggtaattggtgtatttttgaagctcggggcccatcaccagacactgcagcggctggtggatattctcccagagataaagcacaaagacgccagagccgccatgcgacctttcgaccctagtacacttctcccaacttgttgggattattggacatacgcaggaagtctgaccaccccccccctgaccgaatccgtcacttggataatccaaaaggaacccgttgaagtagcaccctcccagctgagtgcatttagaacgcttctgttttccgctctcggagaggaggaaaaaatgatggtgaacaactaccgccccctccagcctctcatgaaccgcaaggtgtgggcatcattccaggccaccaacgaagggacaaggtcatag

SEQ ID NO: 120575 - DNA, 918 bp, Artificial Sequence
  derived and/or modified sequence
atgctgggcaggaacacctggaagaccagcgccttctccttcctggtggagcagatgtgggcccccctgtggagccgctccatgaggcctggccgctggtgcagccagaggagctgtgcctggcagaccagcaacaacaccctgcaccccctgtggacagtgcctgtgtctgtgcctgggggcacccggcagagccccatcaacatccagtggagggacagcgtgtatgacccccagctgaagcccctgcgggtgtcctatgaagctgccagctgcctgtacatctggaacacaggctacctgttccaggtggagtttgatgatgccacagaggccagcggcatcagcggcggccccctggagaaccactaccgcctgaagcagttccacttccactggggcgctgtgaatgaaggaggcagcgagcacacagtggatggccacgcctacccagctgagctgcacctggtgcactggaacagcgtgaagtaccagaactacaaggaggccgtggtgggggagaatggcctggccgtcatcggggtcttcctgaagctgggcgcccaccaccagaccctgcagaggctggtggacatcctgcctgagatcaagcacaaggatgcccgggccgccatgaggccctttgaccccagcaccctgctgcccacctgctgggactactggacctacgccggcagcctgaccaccccacccctgacagagagcgtgacctggatcatccagaaggagcctgtggaggtggcccccagccagctgagcgccttccgcaccctgctcttcagcgccctgggggaggaggagaagatgatggtgaacaactaccggcccctgcagcccctgatgaacaggaaggtgtgggccagcttccaggccaccaatgaaggcaccaggagctag

SEQ ID NO: 120576 - DNA, 918 bp, Artificial Sequence
  derived and/or modified sequence
atgctgggccggaacacctggaagaccagcgccttcagcttcctggtcgagcagatgtgggctcccctctggtccaggagtatgcggcctggcagatggtgttctcagaggtcctgcgcctggcagacatccaataatacccttcacccactgtggacagtccctgtgagtgtgcctggcggcactcggcagtcacctattaacatccagtggcgcgatagcgtctatgatccccagttaaaacctctgagagtcagctatgaggccgccagttgcctgtacatctggaataccggctacctcttccaggtggaatttgacgacgccactgaagctagtggaatttctggaggcccactggagaatcattatcgcctgaagcagtttcacttccactggggcgccgtaaatgaagggggaagtgaacacacagtggatgggcacgcctaccccgcagaactccatctcgtgcattggaactcagtgaaatatcaaaactacaaggaagcagttgtaggcgagaatggcctcgccgtgataggtgtatttttgaaactgggagctcatcatcagacactacagcggctagtggatatactgcctgaaataaagcacaaagatgcgagagctgcgatgaggccctttgatccttctactcttctgcccacgtgttgggattactggacatacgccggctccttaaccacgccgcccctcaccgagtccgtcacttggattattcagaaagagcccgtggaggtagcaccatcacaactctcagctttccgaaccctgctgttctcagctctgggcgaagaggaaaagatgatggtgaacaactatagacctctgcagcccctgatgaatcgcaaggtttgggcatccttccaggccactaacgagggaacacggagttag

SEQ ID NO: 120577 - DNA, 918 bp, Artificial Sequence
  derived and/or modified sequence
atgctggggagaaacacgtggaaaacctccgcattcagttttcttgtcgaacaaatgtgggcgccactgtggagtcgaagtatgaggccagggagatggtgcagccagaggagctgtgcctggcagacatctaacaacactctgcaccctctgtggaccgtcccagtttctgtgccagggggaactagacagagccccattaatatacagtggcgtgactccgtctacgatccacagttgaagcccctcagggtgtcttatgaggccgcatcctgcctgtatatatggaacacaggatacctctttcaagttgagttcgatgatgctaccgaggccagtggtatctcgggagggccactcgagaaccactataggctgaagcagttccactttcattggggagcggtgaatgaagggggatcagagcacactgtcgatggacatgcttatcccgcagagctgcacttggtgcactggaatagtgtaaaataccagaactataaggaggctgtcgtcggtgagaatggcctggcggtgattggggtgtttctgaagcttggagctcatcaccagacattgcagagacttgtggatattctccccgagatcaagcataaggatgcgagagccgcaatgcggccatttgaccccagcaccctgctgcccacgtgttgggattactggacgtatgccggttcactgactactccaccccttacagagagtgtaacatggatcattcaaaaggaacctgtggaagtcgccccttctcagttatccgcattccggacacttctcttttctgctctgggggaagaagagaaaatgatggtaaacaactacaggccgctgcagcctctgatgaaccggaaggtttgggccagttttcaggcaaccaatgagggtactcgcagctag

SEQ ID NO: 120578 - DNA, 1094 bp, Artificial Sequence
  derived and/or modified sequence
aaagtgagaacagacagcagggaacatcaccctcttcagactggagtcagtgggaacagacccaagatgttggggaggaacacttggaagacctcagctttctccttcttggttgagcagatgtgggcccctctctggagtcgttcgatgaggccagggcgatggtgttctcagcgttcctgtgcatggcaaaccagcaataacactttgcacccactctggacggtcccggtctccgtgccagggggcacccggcagtctcctattaacatccagtggagggacagcgtctatgacccccagctgaagccactcagggtctcctatgaagcggcatcctgcctgtacatctggaacactggctacctcttccaggtggaatttgacgatgccaccgaggcatcaggaattagtggtgggcccttggaaaaccactacagactgaagcaatttcacttccactggggagcagtgaacgaggggggctcagagcacacagtggacggccacgcgtaccccgcagagctgcatttagttcactggaattctgtgaaataccaaaattacaaggaagctgtcgtgggagagaatggtttggctgtgataggcgtgtttttaaagctcggggcccatcatcagacgctgcagaggctggtggacatcttgccggaaataaaacataaggacgcgcgggcggccatgcgccccttcgacccctccactctgctgcccacctgctgggattactggacctacgcgggctcgctcaccaccccgccgctgaccgagtcggtcacctggatcatccagaaggagcccgttgaagtggccccaagccagctctctgcatttcgtactctcctgttttctgcacttggtgaagaggagaagatgatggtgaacaactatcgcccacttcaacccttgatgaaccggaaggtctgggcgtccttccaggccactaatgagggcacaaggtcctagagacattaggtccacatgaatagcagaactgactttgaaggaaggaagcgttgtttcccaagtttcacaatgtgattgtacatgacttctgaaattaaaaagagagcatg

SEQ ID NO: 120579 - protein, 271 aa, Artificial Sequence
  derived and/or modified sequence
MAGPQQQPPYLHLAELTASQFLEIWKHFDADGNGYIEGKELENFFQELEKARKGSGMMSKSDNFGEKMKEFMQKYDKNSDGKIEMAELAQILPTEENFLLCFRQHVGSSAEFMEAWRKYDTDRSGYIEANELKGFLSDLLKKANRPYDEPKLQEYTQTILRMFDLNGDGKLGLSEMSRLLPVQENFLLKFQGMKLTSEEFNAIFTFYDKDRSGYIDEHELDALLKDLYEKNKKEMNIQQLTNYRKSVMSLAEAGKLYRKDLEIVLCSEPPM

SEQ ID NO: 120580 - DNA, 816 bp, Artificial Sequence
  derived and/or modified sequence
atggctggcccccagcagcagccaccatatttacacctggcagagttgacggcttcccagttcctggaaatatggaagcactttgacgcagacggtaatgggtatatagaagggaaagaattagagaacttttttcaagagctggaaaaggcccgcaaaggctcggggatgatgagtaaatctgacaactttggagagaagatgaaggaattcatgcagaaatacgacaaaaattccgatgggaagatcgagatggccgaactggcgcagattctgcctaccgaggaaaactttcttctgtgctttaggcaacacgttgggagctccgcagagttcatggaggcctggagaaaatatgatactgatcgtagcggttacattgaagccaacgagcttaagggctttctgagcgaccttctcaagaaagctaatcgtccatacgacgagcccaagttacaagagtacacgcagactatcttgagaatgtttgatttgaatggcgatgggaagttgggactgtcagagatgagtagattgctgcctgtgcaggagaactttctgttaaaattccaagggatgaaattgaccagtgaggaattcaacgccatctttaccttctatgataaggataggtcgggatacatagacgaacacgagctggacgctctattaaaggacctgtatgagaagaacaaaaaggaaatgaacatccagcagctgacaaattatagaaagtctgtcatgtctctcgctgaggctggtaaactctataggaaagaccttgagattgttttgtgctcagagccccccatgtag

SEQ ID NO: 120581 - DNA, 816 bp, Artificial Sequence
  derived and/or modified sequence
atggccggcccccagcagcagcccccctacctgcacctggccgagctgacagccagccagttcctggagatctggaagcactttgatgctgatggaaatggctacatcgagggcaaggagctggagaacttcttccaggagctggagaaggccaggaaaggaagtggcatgatgagcaagagtgacaactttggagagaagatgaaggagttcatgcagaagtatgacaagaacagtgatggcaagattgagatggccgagctggcccagatcctgcccacagaggagaacttcctgctgtgcttccggcagcacgtgggcagcagcgctgagttcatggaggcctggaggaaatatgacacagacaggagcggctacatcgaggccaatgagctgaagggcttcctgagtgacctgctgaagaaggccaaccggccctatgatgagcccaagctgcaggagtacacccagaccatcctgaggatgtttgacctgaatggagatggcaagctgggcctgtctgagatgagccggctgctgcctgtgcaggagaacttcctgctgaagttccagggcatgaagctgaccagcgaggagttcaatgccatcttcaccttctatgacaaggacaggagcggctacattgatgagcacgagctggatgccctgctgaaggacctgtatgagaagaacaagaaggagatgaacatccagcagctgaccaactacaggaagtctgtgatgagcctggccgaggccggcaagctgtacaggaaggacctggagatcgtgctgtgcagcgagccccccatgtag

SEQ ID NO: 120582 - DNA, 816 bp, Artificial Sequence
  derived and/or modified sequence
atggccggcccccagcagcagcccccctacctgcacctggccgagctcaccgctagccagtttcttgagatctggaaacattttgacgccgacggaaatggctatatcgaggggaaggagctggagaatttttttcaggaactggaaaaggcacgcaagggatccgggatgatgtccaaatcagacaattttggtgaaaagatgaaggaattcatgcagaaatacgataaaaattctgatggaaagatcgaaatggcggagctagcccagattctgccaaccgaggagaactttttgctgtgctttaggcaacacgttggttcttcggctgagtttatggaggcctggcgtaagtacgatacagataggtcagggtacattgaggctaatgaactgaagggcttcctaagcgaccttttgaaaaaggctaacaggccttacgatgagcccaaactgcaggaatacacacagactatcctgcggatgttcgaccttaacggcgacggtaagctgggactgagcgagatgtcacggctgctgcctgttcaggaaaactttctcctcaagttccaagggatgaaactcacatccgaggagttcaacgcaatctttaccttttatgacaaagacaggtccgggtatattgatgaacacgagcttgacgcccttctgaaagatctatacgaaaagaacaagaaggagatgaacattcaacaactgacgaattatcgcaaaagtgtcatgtccctcgctgaagcaggtaagctatacaggaaagacctcgaaattgttttatgctcagagcctcctatgtag

SEQ ID NO: 120583 - DNA, 816 bp, Artificial Sequence
  derived and/or modified sequence
atggcgggaccccagcagcagcctccatatctgcacctggccgagctgacagcatcgcagttcctagagatctggaagcacttcgacgccgatgggaatggctacatcgagggcaaggagctcgagaactttttccaggagctggagaaagccagaaagggttccggcatgatgtccaagagcgataattttggggaaaagatgaaagaatttatgcaaaagtatgacaagaacagtgacggcaaaattgagatggcagagttagcccaaattctgccaaccgaggagaatttccttttgtgctttcggcagcacgtgggctcttctgcagaatttatggaggcctggcgaaaatatgacaccgatcgatccggttatatcgaagcgaatgagctcaagggctttttgagtgacttgctcaagaaggctaaccgaccgtacgatgagcccaagttgcaggagtatacccagaccattttgcgcatgtttgacctcaatggagatggcaagctgggcctctccgaaatgagtaggctgctccccgtacaggaaaatttccttctgaagttccaggggatgaagctaacgtctgaggagttcaacgcaatctttaccttctacgataaagatcgaagcggctatattgacgaacatgagctcgacgcactgttaaaagatctatacgagaagaataaaaaagaaatgaacatccaacagcttactaactacaggaaaagcgtgatgtcgctcgcagaagctggtaagctttacagaaaagacttagagattgtgctgtgcagcgagccccctatgtag

SEQ ID NO: 120584 - DNA, 1466 bp, Artificial Sequence
  derived and/or modified sequence
caaccccagcgcgagtgccagagcccagccggcgcggagcgggagcggtgcaggctgaggtctccgagcggctcgccatggctggcccgcagcagcagcccccttacctgcacctggccgagctgacggcgtcccagttcctggaaatatggaagcactttgacgcagacggaaatgggtatattgaaggtaaagagctagaaaactttttccaagagctggagaaggcaaggaaaggctctggcatgatgtcaaagagtgacaactttggagaaaagatgaaggagttcatgcagaagtatgataaaaactcagatgggaaaatcgagatggcagagctggcgcagatcctgccaaccgaagagaacttccttctgtgcttcaggcagcacgtgggctccagcgccgagtttatggaggcttggcggaagtacgacacagacaggagtggctacatcgaagccaatgagctcaagggattcctgtcagacctgctgaagaaggcgaaccggccgtacgatgagcccaagctccaggaatacacccaaaccatactacggatgtttgacttgaacggggatggcaaattgggcctctcagagatgtcccgactcctgcctgtccaggaaaacttcctgcttaaatttcagggcatgaagctgacctcagaggagtttaacgcgatcttcacattttacgacaaggatagaagcggctacattgacgagcatgagctggatgcccttttgaaggatctgtacgagaaaaacaaaaaggaaatgaatattcaacagctcaccaactacagaaagagcgtcatgtccttggcagaggcagggaagctctaccgcaaggacctggagattgtgctctgcagcgagccccccatgtaaagtggggacgggggctgcttctccacctcccccaaaccctgcttctgctgccctgatgcgtctacccagactcagagaccgtgagcgccccgcccccacccctacagcctgcacacacctgcctgcagagcaggaaatgagagatagaggatgggcagctggggggctgtcctgagccccctgcacccacccctgcccaggcagtctttgctcagtggatcacacacatggaaggtgatgggggcatgggtggagggtccctaattctcttcgctgtgatgcatgagctccctcgctgtatgatttaggcttctatgtccaacagagtggactcttccctctcgctcccctctgccggtcccccatgccaccacccaccccaaacttccaggttccatccaccaccttgccaatggtgtagctgtcctctcagaactcctgtgtgtggaaggcacccgccctttccttgccttctttactcggcgtgctccttttctctttgggtttcttgtttaccaaagaagagtttacagacaataaaatggaaaggtcctgctgtggaaacttacccaa

SEQ ID NO: 120585 - DNA, 816 bp, Artificial Sequence
  derived and/or modified sequence
atggccggcccccagcagcagcccccctacctgcacctggccgagctgaccgccagccagttcctggagatctggaagcacttcgacgccgacggcaacggctacatcgagggcaaggagctggagaacttcttccaggagctggagaaggccagaaagggcagcggcatgatgagcaagagcgacaacttcggcgagaagatgaaggagttcatgcagaagtacgacaagaacagcgacggcaagatcgagatggccgagctggcccagatcctgcccaccgaggagaacttcctgctgtgcttcagacagcacgtgggcagcagcgccgagttcatggaggcctggagaaagtacgacaccgacagaagcggctacatcgaggccaacgagctgaagggcttcctgagcgacctgctgaagaaggccaacagaccctacgacgagcccaagctgcaggagtacacccagaccatcctgagaatgttcgacctgaacggcgacggcaagctgggcctgagcgagatgagcagactgctgcccgtgcaggagaacttcctgctgaagttccagggcatgaagctgaccagcgaggagttcaacgccatcttcaccttctacgacaaggacagaagcggctacatcgacgagcacgagctggacgccctgctgaaggacctgtacgagaagaacaagaaggagatgaacatccagcagctgaccaactacagaaagagcgtgatgagcctggccgaggccggcaagctgtacagaaaggacctggagatcgtgctgtgcagcgagccccccatgtag

SEQ ID NO: 120586 - protein, 141 aa, Artificial Sequence
  derived and/or modified sequence
MGFQKFSPFLALSILVLLQAGSLHAAPFRSALESSPADPATLSEDEARLLLAALVQDYVQMKASELEQEQEREGSSLDSPRSKRCGNLSTCMLGTYTQDFNKFHTFPQTAIGVGAPGKKRDMSSDLERDHRPHVSMPQNAN

SEQ ID NO: 120587 - protein, 141 aa, Artificial Sequence
  derived and/or modified sequence
MGFQKFSPFLALSILVLLQAGSLHAAPFRSALESSPADPATLSEDEARLLLAALVQNYVQMKASELEQEQEREGSSLDSPRSKRCGNLSTCMLGTYTQDFNKFHTFPQTAIGVGAPGKKRDMSSDLERDHRPHVSMPQNAN

SEQ ID NO: 120588 - protein, 141 aa, Artificial Sequence
  derived and/or modified sequence
MGFQKFSPFLALSILVLLQAGSLHAAPFRSALESSPADPATLSEDEARLLLAALVQNYVQMKASELEQEQEREGSSLDSPRSKRCGNLSTCMLGTYTQDFNKFHTFPQTAIGVGAPGKKRDMSSDLERDHRPHNHCPEESL

SEQ ID NO: 120589 - DNA, 426 bp, Artificial Sequence
  derived and/or modified sequence
atgggcttccagaagttcagccccttcctggccctgagcatcctggtgctgctgcaggccggcagcctgcacgccgcccccttcagaagcgccctggagagcagccccgccgaccccgccaccctgagcgaggacgaggccagactgctgctggccgccctggtgcaggactacgtgcagatgaaggccagcgagctggagcaggagcaggagagagagggcagcagcctggacagccccagaagcaagagatgcggcaacctgagcacctgcatgctgggcacctacacccaggacttcaacaagttccacaccttcccccagaccgccatcggcgtgggcgcccccggcaagaagagagacatgagcagcgacctggagagagaccacagaccccacgtgagcatgccccagaacgccaactag

SEQ ID NO: 120590 - DNA, 426 bp, Artificial Sequence
  derived and/or modified sequence
atgggctttcagaagtttagtcccttcctcgcactgagtatattggtcctattgcaggcagggtccttacacgcagcacccttcagatcagccctggaatcttcgcccgccgacccagcaacactaagcgaggatgaagcccggttacttctagcagctcttgtccaagactatgtacagatgaaggcatccgagctggagcaagagcaggagagggaaggaagcagcctcgactccccccgatctaagaggtgtggtaatcttagcacatgcatgcttggcacctacacccaggacttcaacaaattccatacatttccacagactgccattggcgtgggagctcctggaaagaagcgtgatatgtccagcgaccttgagagggaccatcggccacatgtgagtatgccccagaatgccaattag

SEQ ID NO: 120591 - DNA, 426 bp, Artificial Sequence
  derived and/or modified sequence
atgggcttccagaagttcagccccttcctggccctgagcatcctggtgctgctgcaggccggcagcctgcatgctgcccccttccgcagcgccctggagagcagccctgctgaccctgccaccctgtctgaagatgaggcccggctgctgctggccgccctggtgcaggactatgtgcagatgaaggccagcgagctggagcaggagcaggagcgggagggcagcagcctggacagccccaggagcaagagatgtggcaacctgagcacctgcatgctgggcacctacacccaggacttcaacaagttccacaccttcccccagacagccatcggcgtgggcgcccctgggaagaagagggacatgagcagtgacctggagcgggaccaccggccccacgtgtccatgccccagaatgccaactag

SEQ ID NO: 120592 - DNA, 426 bp, Artificial Sequence
  derived and/or modified sequence
atgggcttccagaagttcagccccttcctggccctgagcatcctggtcctcttgcaggccggatcacttcatgccgccccgttcaggtccgctctcgaaagtagccccgcggatcctgccactctgtcggaagatgaggcgcggttgttactggcagctctggtccaggattatgtccaaatgaaggcaagcgaactggagcaggaacaagagcgcgaagggtctagtctcgactctcctcggtcgaagcgttgcggcaacttatccacttgtatgttgggaacatatacacaggacttcaataagtttcatacctttccccagacggcaattggcgttggagcccctgggaagaagagggacatgtcatcagacctggaaagagaccaccgcccgcacgtcagcatgccacagaatgctaactag

SEQ ID NO: 120593 - DNA, 426 bp, Artificial Sequence
  derived and/or modified sequence
atgggttttcagaaattttcccctttcttggctctgagcattttagtgttgctgcaggctggatccttgcatgctgctccttttagaagcgcactggaatccagccctgccgacccagctactctaagcgaggatgaggctcgactgttgctggcagccctcgtccaggattatgtgcagatgaaagccagcgaactggagcaggaacaagaacgagaagggtccagccttgatagtccaaggtcaaaaaggtgcggaaatctttctacttgtatgttaggaacgtatacacaggatttcaacaagtttcacacattcccgcagactgcgataggtgttggggcacctggaaagaagcgagatatgagctccgatctggagcgcgaccaccgccctcatgtcagtatgccacagaacgccaactag

SEQ ID NO: 120594 - DNA, 783 bp, Artificial Sequence
  derived and/or modified sequence
cgcctctgatccaagccacctcccgccaggtgagccccgagatcctggctcagagaggtgtcatgggcttccaaaagttctcccccttcctggctctcagcatcttggtcctgttgcaggcaggcagcctccatgcagcaccattcaggtctgccctggagagcagcccagcagacccggccacgctcagtgaggacgaagcgcgcctcctgctggctgcactggtgcaggactatgtgcagatgaaggccagtgagctggagcaggagcaagagagagagggctccagcctggacagccccagatctaagcggtgcggtaatctgagtacttgcatgctgggcacatacacgcaggacttcaacaagtttcacacgttcccccaaactgcaattggggttggagcacctggaaagaaaagggatatgtccagcgacttggagagagaccatcgccctcatgttagcatgccccagaatgccaactaaactcctccctttccttcctaatttcccttcttgcatccttcctataacttgatgcatgtggtttggttcctctctggtggctctttgggctggtattggtggctttccttgtggcagaggatgtctcaaacttcagatgggaggaaagagagcaggactcacaggttggaagagaatcacctgggaaaataccagaaaatgagggccgctttgagtcccccagagatgtcatcagagctcctctgtcctgcttctgaatgtgctgatcatttgaggaataaaattatttttcccc

SEQ ID NO: 120595 - DNA, 426 bp, Artificial Sequence
  derived and/or modified sequence
atgggttttcagaaattcagcccgtttctggccctgtctatacttgtgctgctgcaggctggcagcctgcatgccgctccctttcgatccgcccttgaatcgagcccagcagatcctgctacattgtcagaagatgaggcgcgccttctgctggccgctctggtccagaactacgttcagatgaaagcctccgagctagagcaagagcaggagagggaaggaagctcgctggacagcccacgttcaaaaaggtgtgggaacctgtccacctgcatgctaggcacatacacccaggacttcaacaaatttcacacatttccgcagacagctattggtgtgggcgcgcccggcaaaaaacgcgacatgtctagcgacctggagagggatcataggcctcacgtgagcatgcctcagaacgccaactag

SEQ ID NO: 120596 - DNA, 426 bp, Artificial Sequence
  derived and/or modified sequence
atgggctttcaaaaatttagtccattcctggcactttcgatcctagttctgttgcaggccggctccctccacgctgccccattccgcagcgccttggagtccagccccgcagaccctgcaactctgtcagaggatgaggcccgtctgttactggctgccctggttcagaattacgttcagatgaaagccagtgaactagaacaagagcaggagcgagaagggtcctcactggatagccctagatccaagcgctgcggcaacctgtcaacatgcatgctaggaacctacacccaggactttaacaaatttcatacttttccacaaaccgcgatcggcgttggcgcacccgggaaaaaaagagacatgtcttccgacttggagcgcgatcacagacctcacaatcattgtcccgaagagtcactatag

SEQ ID NO: 120597 - DNA, 426 bp, Artificial Sequence
  derived and/or modified sequence
atgggcttccaaaaattttcaccttttctggctttgagcattctggtcctgcttcaggcaggaagcctgcacgccgccccatttaggtcagcactcgaatcgagcccagccgatcccgccactttatccgaagatgaggcaaggctgttgctggctgcacttgtacagaactatgtgcagatgaaggcgagtgaactggagcaggaacaggagcgagagggctcctcacttgactcccctcgtagcaagcggtgcgggaatttaagtacctgcatgcttggtacttacacacaggactttaacaagttccacaccttcccgcagacggctatcggagtgggggctccaggtaagaagagagatatgtcttccgaccttgaacgagaccatcgtccccacgtcagtatgccccaaaatgcaaactag

SEQ ID NO: 120598 - DNA, 426 bp, Artificial Sequence
  derived and/or modified sequence
atgggcttccagaagttcagccccttcctggccctgagcatcctggtgctgctgcaggccggcagcctgcatgctgcccccttccgcagcgccctggagagcagccctgctgaccctgccaccctgtctgaagatgaggcccggctgctgctggccgccctggtgcagaactacgtgcagatgaaggccagcgagctggagcaggagcaggagcgggagggcagcagcctggacagccccaggagcaagagatgtggcaacctgagcacctgcatgctgggcacctacacccaggacttcaacaagttccacaccttcccccagacagccatcggcgtgggcgcccctgggaagaagagggacatgagcagtgacctggagcgggaccaccggccccacgtgtccatgccccagaatgccaactag

SEQ ID NO: 120599 - DNA, 426 bp, Artificial Sequence
  derived and/or modified sequence
atgggcttccagaagttcagccccttcctggccctgagcatcctggtgctgctgcaggccggcagcctgcatgctgcccccttccgcagcgccctggagagcagccctgctgaccctgccaccctgtctgaagatgaggcccggctgctgctggccgccctggtgcagaactacgtgcagatgaaggccagcgagctggagcaggagcaggagcgggagggcagcagcctggacagccccaggagcaagagatgtggcaacctgagcacctgcatgctgggcacctacacccaggacttcaacaagttccacaccttcccccagacagccatcggcgtgggcgcccctgggaagaagagggacatgagcagtgacctggagcgggaccaccggccccacaaccactgcccagaggagagcctgtag

SEQ ID NO: 120600 - DNA, 426 bp, Artificial Sequence
  derived and/or modified sequence
atgggcttccagaagttcagccccttcctggccctgagcatcctggttctgctgcaagctgggtctcttcatgcggcgccattcagatcggccttagagagtagtcccgccgatcctgccaccctctcagaggatgaagcaagattgcttcttgcagcactggtacagaattatgtccaaatgaaggctagtgaactggaacaagaacaggagcgggagggatcttctctggactctcctcggtcaaaacggtgcgggaacctctccacgtgtatgcttggaacatatactcaggactttaacaaattccatacattcccccagaccgccatcggagtcggggctcctggaaaaaaaagagacatgagcagcgacttggaaagggaccacagacctcacgtgtccatgcctcagaatgcaaactag

SEQ ID NO: 120601 - DNA, 426 bp, Artificial Sequence
  derived and/or modified sequence
atgggcttccagaagttcagccccttcctggccctgagcatcctggtactgctacaagctgggtcactccacgccgctcctttccgttcagcactcgaaagttccccagcggatcccgcgactctgtctgaagacgaggccagattgctgctggctgcccttgtgcagaactatgtacagatgaaggccagcgaattggaacaggagcaagagcgagaaggcagttccttagatagtccgaggagtaaacgttgtggcaatttgagtacatgtatgcttgggacatacacgcaagattttaacaagttccacacctttccccagactgcaattggcgttggagcacctggaaagaaacgggacatgtcttccgatctggagcgcgatcacagacctcataatcactgccccgaggagagtctgtag

SEQ ID NO: 120602 - DNA, 426 bp, Artificial Sequence
  derived and/or modified sequence
atgggcttccagaagttcagccccttcctggccctgagcatcctggttctcctccaagccggctcacttcacgcagcaccgttcagaagtgccctggagagctctcctgcagatcctgccacattgagcgaggatgaagcccgattattgctcgccgctctggtgcagaactatgtacagatgaaagcatcagagttggagcaggaacaagagcgtgagggctcttcacttgactctcctcgcagcaagcgctgcggaaatctctcaacttgtatgttggggacttacacacaggactttaacaaattccacacttttcctcagacagccatcggggtgggggcacccggcaaaaagagagatatgagcagcgacctggagagggatcataggcctcatgtcagcatgcctcagaacgcgaattag

SEQ ID NO: 120603 - DNA, 426 bp, Artificial Sequence
  derived and/or modified sequence
atgggctttcagaagttttcccccttcctggccctgtcaatcctggtcctcttgcaagccggaagcctgcacgccgctccctttcggtccgcacttgagagctctccggctgaccctgctaccctcagcgaagatgaagctcgcctcctgcttgctgccctggtacagaactacgtccagatgaaggcctccgaattggagcaggaacaggaaagggagggctcttcactggacagccccagatcaaaaaggtgcgggaatttatccacctgcatgttgggaacttatactcaggatttcaacaaatttcacacattcccccagaccgccataggggttggtgcaccaggcaaaaagagagatatgtcaagtgatctggagagggatcaccgtccacatgtgtccatgcctcaaaatgccaattag

SEQ ID NO: 120604 - DNA, 426 bp, Artificial Sequence
  derived and/or modified sequence
atgggtttccaaaaattttctccatttctggccctcagcattctggtcctgttgcaagcaggtagccttcacgctgccccattcagatcggcacttgaatctagccccgcagaccccgctacactaagtgaagatgaagctcggctgcttctagctgccctggtgcagaattacgtgcagatgaaggcaagtgaactggagcaggagcaagaacgcgagggttcctccctagacagtcctaggtccaagcgatgtggcaacctgtctacctgcatgttaggaacctatactcaagactttaataaattccatacttttcctcagaccgccatcggcgttggggcaccgggaaagaagagggacatgtcatcagacctggaacgggatcataggccgcacaaccactgcccggaagagagcctgtag

SEQ ID NO: 120605 - DNA, 426 bp, Artificial Sequence
  derived and/or modified sequence
atgggctttcagaaattctcacctttcctcgccctctccatcctggttctactgcaagctgggagtctgcacgccgctcctttcagaagtgccctggagagtagcccagccgaccctgctactctcagcgaggacgaggctagattgctcctggcagcattagtacagaattacgttcagatgaaagcttcagagcttgagcaggagcaggagcgggaaggaagctcacttgattctccacggtccaagcggtgcggcaacctgtccacgtgtatgctgggcacctatactcaggattttaacaagttccacaccttcccgcagacagcaatcggtgtgggtgctcccggtaagaaacgggacatgtcatctgacctcgaaagggatcacaggccccacgtgtccatgccacaaaatgctaattag

SEQ ID NO: 120606 - DNA, 843 bp, Artificial Sequence
  derived and/or modified sequence
ggcatcagagacactgcccagcccaagtgtcgccgccgcttccacagggctctggctggacgccgccgccgccgctgccaccgcctctgatccaagccacctcccgccagagaggtgtcatgggcttccaaaagttctcccccttcctggctctcagcatcttggtcctgttgcaggcaggcagcctccatgcagcaccattcaggtctgccctggagagcagcccagcagacccggccacgctcagtgaggacgaagcgcgcctcctgctggctgcactggtgcagaactatgtgcagatgaaggccagtgagctggagcaggagcaagagagagagggctccagcctggacagccccagatctaagcggtgcggtaatctgagtacttgcatgctgggcacatacacgcaggacttcaacaagtttcacacgttcccccaaactgcaattggggttggagcacctggaaagaaaagggatatgtccagcgacttggagagagaccatcgccctcatgttagcatgccccagaatgccaactaaactcctccctttccttcctaatttcccttcttgcatccttcctataacttgatgcatgtggtttggttcctctctggtggctctttgggctggtattggtggctttccttgtggcagaggatgtctcaaacttcagatgggaggaaagagagcaggactcacaggttggaagagaatcacctgggaaaataccagaaaatgagggccgctttgagtcccccagagatgtcatcagagctcctctgtcctgcttctgaatgtgctgatcatttgaggaataaaattatttttccccaaa

SEQ ID NO: 120607 - DNA, 477 bp, Artificial Sequence
  derived and/or modified sequence
ccgccgctgccaccgcctctgatccaagccacctcccgccagagaggtgtcatgggcttccaaaagttctcccccttcctggctctcagcatcttggtcctgttgcaggcaggcagcctccatgcagcaccattcaggtctgccctggagagcagcccagcagacccggccacgctcagtgaggacgaagcgcgcctcctgctggctgcactggtgcagaactatgtgcagatgaaggccagtgagctggagcaggagcaagagagagagggctccagcctggacagccccagatctaagcggtgcggtaatctgagtacttgcatgctgggcacatacacgcaggacttcaacaagtttcacacgttcccccaaactgcaattggggttggagcacctggaaagaaaagggatatgtccagcgacttggagagagaccatcgccctcataatcattgcccagaagagagcctgtga

SEQ ID NO: 120608 - DNA, 581 bp, Artificial Sequence
  derived and/or modified sequence
cgcctctgatccaagccacctcccgccaggtgagccccgagatcctggctcagagaggtgtcatgggcttccaaaagttctcccccttcctggctctcagcatcttggtcctgttgcaggcaggcagcctccatgcagcaccattcaggtctgccctggagagcagcccagcagacccggccacgctcagtgaggacgaagcgcgcctcctgctggctgcactggtgcagaactatgtgcagatgaaggccagtgagctggagcaggagcaagagagagagggctccagcctggacagccccagatctaagcggtgcggtaatctgagtacttgcatgctgggcacatacacgcaggacttcaacaagtttcacacgttcccccaaactgcaattggggttggagcacctggaaagaaaagggatatgtccagcgacttggagagagaccatcgccctcatgttagcatgccccagaatgccaactaaactcctccctttccttcctaatttcccttcttgcatccttcctataacttgatgcatgtggtttggttcctctctggtggctctttgggctgg

SEQ ID NO: 120609 - DNA, 426 bp, Artificial Sequence
  derived and/or modified sequence
atgggcttccagaagttcagccccttcctggccctgagcatcctggtgctgctgcaggccggcagcctgcacgccgcccccttcagaagcgccctggagagcagccccgccgaccccgccaccctgagcgaggacgaggccagactgctgctggccgccctggtgcagaactacgtgcagatgaaggccagcgagctggagcaggagcaggagagagagggcagcagcctggacagccccagaagcaagagatgcggcaacctgagcacctgcatgctgggcacctacacccaggacttcaacaagttccacaccttcccccagaccgccatcggcgtgggcgcccccggcaagaagagagacatgagcagcgacctggagagagaccacagaccccacgtgagcatgccccagaacgccaactag

SEQ ID NO: 120610 - DNA, 426 bp, Artificial Sequence
  derived and/or modified sequence
atgggcttccagaagttcagccccttcctggccctgagcatcctggtgctgctgcaggccggcagcctgcacgccgcccccttcagaagcgccctggagagcagccccgccgaccccgccaccctgagcgaggacgaggccagactgctgctggccgccctggtgcagaactacgtgcagatgaaggccagcgagctggagcaggagcaggagagagagggcagcagcctggacagccccagaagcaagagatgcggcaacctgagcacctgcatgctgggcacctacacccaggacttcaacaagttccacaccttcccccagaccgccatcggcgtgggcgcccccggcaagaagagagacatgagcagcgacctggagagagaccacagaccccacaaccactgccccgaggagagcctgtag

SEQ ID NO: 120611 - DNA, 450 bp, Artificial Sequence
  derived and/or modified sequence
atggcagaccagctcaccgaggagcagattgctgagttcaaggaagccttcagtctgttcgataaggacggcgacggaacgatcactaccaaggagttggggaccgttatgcgcagtctggggcagaaccctactgaggccgagcttcaagacatgattaatgaagtcgacgccgacgggaatggaacgatcgactttccagagtttctgaccatgatggctcgcaaaatgaaagatacagacagtgaggaagagattcgcgaggcatttagggtcttcgataaggatggcaacggctacattagcgctgctgaattgagacatgtcatgaccaacctgggcgagaagctcactgatgaggaggtggacgagatgatcagggaggctgacatcgacggcgacggccaggtgaattatgaggagtttgtccagatgatgactgcaaagtag

SEQ ID NO: 120612 - DNA, 450 bp, Artificial Sequence
  derived and/or modified sequence
atggccgaccagctgaccgaggagcaaatagccgaatttaaagaggccttcagtctgtttgataaggacggtgatggtacaataaccactaaagaactcggaacagtgatgcggtccctggggcagaatcccaccgaagctgaattacaggacatgattaacgaggtggatgcagacggcaacggtacaatagacttccccgaatttctgacaatgatggcccggaagatgaaagatactgactccgaggaggaaattcgggaggccttccgggtattcgataaagacggaaatggttatatcagtgccgctgaactcaggcacgttatgactaatttgggcgagaagctcacggacgaagaggtggacgagatgattcgcgaggccgatatcgatggcgacggacaggtaaactacgaggagttcgtgcagatgatgactgcgaaatag

SEQ ID NO: 120613 - DNA, 450 bp, Artificial Sequence
  derived and/or modified sequence
atggccgaccaactaaccgaggagcagatcgctgagtttaaagaagcattcagtctgtttgataaggatggggatggcaccatcacaaccaaagaactcggaacggtgatgaggagtttaggccagaatccaacagaagctgagttgcaagacatgattaatgaggttgatgccgatggaaatggaacgattgattttcctgagttccttaccatgatggctcggaaaatgaaggatactgactccgaggaagaaatccgtgaggctttccgggtctttgacaaggacggcaacggatatattagcgccgctgagttacgtcacgtgatgacaaatctgggagagaagttaaccgatgaggaagtggatgaaatgattcgagaggcagatatcgacggcgatggtcaagttaactacgaggaattcgtccagatgatgaccgccaaatag

SEQ ID NO: 120614 - DNA, 450 bp, Artificial Sequence
  derived and/or modified sequence
atggccgaccagctgacagaggagcagatagccgaatttaaggaggctttcagcctatttgacaaagacggcgatggtacaatcaccaccaaggaattgggaactgtaatgcgcagcctgggacagaaccctacagaggccgagctgcaagatatgattaacgaagtagacgcggatgggaatggtaccatagacttccccgaatttctgacaatgatggcccggaagatgaaggatacagactctgaggaggagattagggaggcctttagggtctttgacaaggatggcaatgggtatatctctgccgccgagctgcgccatgtcatgaccaaccttggggagaagctaactgatgaggaggttgatgagatgatcagagaggctgacatcgatggagacggacaggtcaattacgaagagtttgtgcagatgatgacagctaagtag

SEQ ID NO: 120615 - DNA, 450 bp, Artificial Sequence
  derived and/or modified sequence
atggctgaccagctgacagaggagcagattgctgagttcaaggaggccttcagcctgtttgacaaggatggagatggcaccatcaccaccaaggagctgggcaccgtgatgaggagcctgggccagaaccccacagaagctgagctgcaggacatgatcaatgaggtggatgctgatggaaatggcaccatcgacttccctgagttcctgaccatgatggccaggaagatgaaggacacagacagcgaggaggagatccgggaggccttccgggtgtttgacaaggatggaaatggctacatctctgctgctgagctgcggcacgtgatgaccaacctgggggagaagctgacagatgaggaggtggatgagatgatccgggaggccgacattgatggagatggccaggtgaactatgaggagtttgtgcagatgatgacagccaagtag

SEQ ID NO: 120616 - DNA, 450 bp, Artificial Sequence
  derived and/or modified sequence
atggccgaccagctgaccgaggagcagatcgccgagttcaaggaggctttcagcctgtttgataaagacggcgatggtactataactaccaaagaattggggacggtaatgaggtctctgggacaaaatccaacggaagctgaacttcaggacatgattaacgaagtggacgcagacggcaacggcacaattgattttccagaattccttacaatgatggcccgaaagatgaaggacaccgacagcgaggaagaaatccgagaagctttcagggtgttcgataaggatggcaacggctatattagtgcggccgaactcagacacgtgatgactaatctgggcgaaaagctgacggacgaggaggtggatgagatgatcagggaagctgacatcgacggagacggacaagtaaactacgaagaattcgtgcagatgatgaccgcaaagtag

SEQ ID NO: 120617 - DNA, 450 bp, Artificial Sequence
  derived and/or modified sequence
atggccgaccagctgaccgaggagcagatcgccgagttcaaggaggccttcagtctttttgataaggacggtgacggaactatcaccactaaggagttgggcacagtcatgagaagcctgggacagaacccgactgaagccgaactgcaggacatgataaatgaggtggacgcagatggaaacggaacaattgacttccccgaatttctgacaatgatggctcgcaagatgaaggacaccgattccgaagaagaaattagggaggctttccgagtatttgacaaagacggaaatggctatatctcggcagccgagcttcgacacgtgatgactaacctcggcgagaaactcaccgacgaggaggtggatgagatgatccgtgaggctgacattgacggcgacggccaggtgaactacgaggagttcgtacagatgatgactgccaagtag

SEQ ID NO: 120618 - DNA, 450 bp, Artificial Sequence
  derived and/or modified sequence
atggccgaccagctgaccgaggagcagatcgccgagttcaaggaggcattttccctgttcgataaagacggtgatgggacaatcactacgaaagagctgggtaccgtcatgcgatcgctgggccagaatcctacagaggcagaactccaggacatgattaatgaggtagacgccgatggcaacgggacaatcgatttccccgagtttctgacgatgatggccaggaaaatgaaagatacggatagcgaggaggagatccgggaagcgttccgggttttcgacaaggacgggaatggatatattagcgctgccgagctgaggcacgttatgactaacctgggggaaaagctcactgatgaagaggtggacgagatgatcagggaagccgacatcgatggagatggccaggtgaactatgaagagtttgtccagatgatgactgctaagtag

SEQ ID NO: 120619 - DNA, 450 bp, Artificial Sequence
  derived and/or modified sequence
atggccgaccagctgaccgaggagcagatcgccgagttcaaggaggcatttagcctcttcgacaaagacggagacgggacaatcacaaccaaagaactgggaacagtcatgcgttcacttgggcagaatccgacagaggccgagcttcaggacatgatcaacgaggtagatgccgatggcaatggcaccatagacttcccagagttcctgaccatgatggctcgcaagatgaaggacaccgattcagaagaggagataagagaggctttccgagtgttcgataaggatggcaatggctatattagcgctgccgaactgcgccacgtgatgaccaatctgggagagaaacttaccgacgaggaagttgacgaaatgatacgcgaggccgacatcgacggagatggccaagttaattacgaagaatttgtgcagatgatgacagcaaagtag

SEQ ID NO: 120620 - DNA, 450 bp, Artificial Sequence
  derived and/or modified sequence
atggctgaccaactgaccgaagagcagatcgccgagtttaaagaagccttttctctatttgacaaggacggggatgggacgattaccactaaagagctggggacagtgatgcggtcactgggtcagaatccaacggaggccgaactgcaagacatgattaacgaagtggatgccgacgggaacggaactattgactttcctgagtttctgacgatgatggcgaggaagatgaaggacaccgacagtgaggaagaaatccgggaggcctttcgggtgttcgacaaagacgggaatggttacatctctgccgctgagctgcgacacgtcatgaccaatcttggggagaaactcacggatgaagaggtcgacgagatgattagagaagctgacattgacggcgacgggcaggtgaattacgaagagtttgtacaaatgatgaccgcaaagtag

SEQ ID NO: 120621 - DNA, 450 bp, Artificial Sequence
  derived and/or modified sequence
atggctgaccagctgacagaagagcagatcgccgagtttaaagaggctttctctcttttcgataaagatggggatggaactattacaacgaaggagctcggcaccgttatgcggagcctgggccaaaatcccaccgaagctgagcttcaggatatgataaacgaagtggacgctgatggcaatggcacaatcgacttcccagaatttctaacgatgatggctcgaaagatgaaggatactgactcagaggaggaaatacgagaagcatttcgggttttcgacaaggatggcaacggctacatcagcgccgcagagctgagacacgtgatgactaacctgggagaaaagctcaccgacgaagaggtagatgaaatgatcagagaggccgatattgacggagatggacaggtcaactacgaggaatttgtgcagatgatgacagcgaaatag

SEQ ID NO: 120622 - DNA, 450 bp, Artificial Sequence
  derived and/or modified sequence
atggctgaccagcttactgaggaacagattgcggaatttaaagaggctttcagtctgtttgacaaagatggagatggcacaatcaccacaaaagagctaggaaccgtgatgcgctcccttggtcagaatccaaccgaagccgagctacaggatatgataaatgaggtggatgctgacgggaatggtaccatagacttccctgagtttttaacaatgatggccagaaagatgaaggacactgacagcgaggaggaaattcgagaggcatttagggtattcgacaaggatggaaatggttatataagcgccgctgagttgcggcatgtgatgacaaatcttggcgagaaactcactgacgaagaggtggacgaaatgatacgtgaagccgacatagatggtgacggccaagttaattacgaggagtttgtgcagatgatgaccgcgaaatag

SEQ ID NO: 120623 - DNA, 450 bp, Artificial Sequence
  derived and/or modified sequence
atggcagaccagctgacagaggagcagatcgcggaattcaaagaagcctttagtctttttgataaggacggcgacggaaccattacaaccaaggaattgggcaccgtcatgcgaagccttggccaaaaccccaccgaagctgaactgcaggatatgatcaacgaggtggatgccgacggtaacggcactatcgactttccagagtttttgacgatgatggcccgaaaaatgaaagacaccgacagcgaggaggaaatcagagaagccttcagagtgtttgataaggacggaaacggctacatttccgccgcagagctgcgccatgtgatgacaaatctgggagaaaaactgacagacgaggaggtagatgaaatgatccgcgaagcggatatcgatggcgacggccaagttaattacgaagaatttgtgcagatgatgactgccaaatag

SEQ ID NO: 120624 - DNA, 4242 bp, Artificial Sequence
  derived and/or modified sequence
gatacggcgcaccatatatatatcgcggggcgcagactcgcgctccggcagtggtgctgggagtgtcgtggacgccgtgccgttactcgtagtcaggcggcggcgcaggcggcggcggcggcatagcgcacagcgcgccttagcagcagcagcagcagcagcggcatcggaggtacccccgccgtcgcagcccccgcgctggtgcagccaccctcgctccctctgctcttcctcccttcgctcgcaccatggctgatcagctgaccgaagaacagattgctgaattcaaggaagccttctccctatttgataaagatggcgatggcaccatcacaacaaaggaacttggaactgtcatgaggtcactgggtcagaacccaacagaagctgaattgcaggatatgatcaatgaagtggatgctgatggtaatggcaccattgacttccccgaatttttgactatgatggctagaaaaatgaaagatacagatagtgaagaagaaatccgtgaggcattccgagtctttgacaaggatggcaatggttatatcagtgcagcagaactacgtcacgtcatgacaaacttaggagaaaaactaacagatgaagaagtagatgaaatgatcagagaagcagatattgatggagacggacaagtcaactatgaagaattcgtacagatgatgactgcaaaatgaagacctactttcaactcctttttcccccctctagaagaatcaaattgaatcttttacttacctcttgcaaaaaaaagaaaaaagaaaaaagttcatttattcattctgtttctatatagcaaaactgaatgtcaaaagtaccttctgtccacacacacaaaatctgcatgtattggttggtggtcctgtcccctaaagatcaagctacacatcagttttacaatataaatacttgtactaccttaatgataaggactccttaaagttccatttgctaatgattaatacactgtttgggctggccagtttttcatgcatgcagcttgacgattgagcacagtcaggcctttgtattaaaaatgaaaaatgaaaaaacaaattcaaaacctattcaaatgggttctagttcaatttgtttagtataaattgtcatagctggtttactgaaaacaaacacatttaaaattggtttacctcaggatgacgtgcagaaaaatgggtgaaggataaaccgttgagacgtggccccactggtaggatggtcctcttgtacttcgtgtgctccgacccatggtgacgatgacacaccctggtggcatgcccgtgtatgttggtttagcgttgtctgcattgttctagagtgaaacaggtgtcaggctgtcactgttcacacaaatttttaataagaaacatttaccaagggagcatctttggactctctgtttttaaaaccttctgaaccatgacttggagccggcagagtaggctgtggctgtggacttcagcacaaccatcaacattgctgttcaaagaaattacagtttacgtccattccaagttgtaaatgctagtctttttttttttttttccaataaaaagaccattaacttaaagtggtgttaaatgctttgtaaagctgagatctaaatggggacaaggcaggtggaggggaggccagtgtacatgtaaatgcccacagcccagcattgggtttccctcccaaggccccagcaccaacctctgagcccaagaccttgcctgaaaacaagcagataccgattgcttcatcctatttatggacatgtaggtctagttgcattttcactggggggaggggggaaggtgaattatggtaacttttaatgatctattcaggcagtagagctcttaaggaaaaaaaaaaacccactttctctcaagcatgtatttaggggttgttctcaattgtgctgctgattacctgtcttatgtaactacttgagaccatctgcaagagacatgatttagtgtgtctgtaattcaatcttcgctgtgtgtggtagaagcagtagtcacttttgtaagccagtctcttcatgcctaaaagacactaccagtcacctttgattcgcgacttttaatttatgattatacttagcctcctcctcctttttttttttttcccaagttgacttgactttgcttttttccccccaagtagaactaatgctagcttccagcttgaaagtaaaactccagtgtggagtgaattttgtgtctaattataaacctgtaaccaaaactcagacatctggtactggtctttgcattgagattggtccctgtaaaaccccctttaaaagcatattgcatttagtacagagctcttttttgaaatgaaggctggagatgtgcatttttcacggtgttaactggttgtatcttattagcaaggagattggggttttgagtgtttgcgtgggtggtttcaatttgccagggaacagtggcaggctgctagcaaggcagtgagaagctcttggcagccaaatgggtgcattcagggctgatttatagagacccttggcttctccttctcctactccctgtctttctggcattttgtagcttgttagattttctgccagaggggtgggtcagagcagtggaggggagacatcgcccatgtgcttctgctactggtccttgggctgggtggttggtagaggagatgttgacactatgagctaagggttggcttttgtaattacctgaatctgaaaggaatgcctaaggttaccttggggtttctcttctggtgagatagggttcctggtttgagtaagttaatgtcctggatatttcttgtggcagggggtggtcaaagagcctgattgctgacccagtctcaggcctgtggtcgatgacctctcggtagtttcaaagggggctggagggggatatttgacttgttttttcgaaatgtagccttctaaccctcaagtctttagaagctgggtggactcttagtggtcctgcagcgtatcctaaaagactacctttgaaacaggattcttgtatggccaggatcctgtctgggaaccagaaaccctacaccctccccctccagggaatgctgagttccagttttgagcagaggtgaggcagaatccactgtagccttccgccctggtatttggggggatgaccagcccaggcgttgggtgttagtctgcatgagtttgtgagaggaaatagctgggtgtcctggcagtgcccttgaagttggttaggaccttcctgtaaactcttgcccctacttctaactactctataaatatatacatatatttatatataaagtgattagttgaactggcatcctgctttagcctgagacttgccataagaaactgctgagtacttggcaaaccctttcatagttttgttctccatctgtttggggtaggtgttgagcgaggcaaatggatctcgatatttcagatgggcttttgatgcactgttgccaaggaaggctttttctgattttttgacaaatgaatttttgcacactttcattggtgtctttcggcaacttacacacattgaaaatgagctattgtacatatttttatattctctttataaatgcatgtctgattgtacttgtaacaatattgtaatgaacggctgtgcagtaggcccagcgctgctgtgtctcgtcagaggaatagcttaccacgaacccctcagcatactgggaatctcttcctgaacaacgaatgtaaatttggtcaagtctactcttccgttcattcaattattttaagcatttgaattatttattgtatatcctaaatatatttctcctttggcagtgactagatttccactaatgtgtcttaatctatccctccagctggcagttactgtttttttaatcccctgaagttgtcctgtaggagacagaaattctttgctgtctgtatcccttggagtaagaaggtagtggcatgggtggagtgtgtgttctttctccaaatctattatgatgtttattaaacacttctgtagcaaagatggtggtagttcttttgttactgaagttgcccttcaccatggctatttgaaaaggagatgtacttggacgtttctgtaaatcttgagataaactgtttggagatttaaccacctctctgatgggggaccaactctatggaaattgtaaatacgttttatttataaacctggcactgtattcaataaacatttctgcagcctttca

SEQ ID NO: 120625 - DNA, 2163 bp, Artificial Sequence
  derived and/or modified sequence
gcgcggcggagctggaactgctgcagctgctgccgccgccggaggaaccttgatccccgtgctccggacaccccgggcctcgccatggctgaccagctgactgaggagcagattgcagagttcaaggaggccttctccctctttgacaaggatggagatggcactatcaccaccaaggagttggggacagtgatgagatccctgggacagaaccccactgaagcagagctgcaggatatgatcaatgaggtggatgcagatgggaacgggaccattgacttcccggagttcctgaccatgatggccagaaagatgaaggacacagacagtgaggaggagatccgagaggcgttccgtgtctttgacaaggatgggaatggctacatcagcgccgcagagctgcgtcacgtaatgacgaacctgggggagaagctgaccgatgaggaggtggatgagatgatcagggaggctgacatcgatggagatggccaggtcaattatgaagagtttgtacagatgatgactgcaaagtgaaggccccccgggcagctggcgatgcccgttctcttgatctctctcttctcgcgcgcgcactctctcttcaacactcccctgcgtaccccggttctagcaaacaccaattgattgactgagaatctgataaagcaacaaaagatttgtcccaagctgcatgattgctctttctccttcttccctgagtctctctccatgcccctcatctcttccttttgccctcgcctcttccatccatgtcttccaaggcctgatgcattcataagttgaagccctccccagatccccttggggagcctctgccctcctccagcccggatggctctcctccattttggtttgtttcctcttgtttgtcatcttattttgggtgctggggtggctgccagccctgtcccgggacctgctgggagggacaagaggccctcccccaggcagaagagcatgccctttgccgttgcatgcaaccagccctgtgattccacgtgcagatcccagcagcctgttggggcaggggtgccaagagaggcattccagaaggactgagggggcgttgaggaattgtggcgttgactggatgtggcccaggagggggtcgagggggccaactcacagaaggggactgacagtgggcaacactcacatcccactggctgctgttctgaaaccatctgattggctttctgaggtttggctgggtggggactgctcatttggccactctgcaaattggacttgcccgcgttcctgaagcgctctcgagctgttctgtaaatacctggtgctaacatcccatgccgctccctcctcacgatgcacccaccgccctgagggcccgtcctaggaatggatgtggggatggtcgctttgtaatgtgctggttctctttttttttctttcccctctatggcccttaagactttcattttgttcagaaccatgctgggctagctaaagggtggggagagggaagatgggccccaccacgctctcaagagaacgcacctgcaataaaacagtcttgtcggccagctgcccaggggacggcagctacagcagcctctgcgtcctggtccgccagcacctcccgcttctccgtggtgacttggcgccgcttcctcacatctgtgctccgtgccctcttccctgcctcttccctcgcccacctgcctgcccccatactcccccagcggagagcatgatccgtgcccttgcttctgactttcgcctctgggacaagtaagtcaatgtgggcagttcagtcgtctgggttttttccccttttctgttcatttcatctggctccccccaccacctccccaccccaccccccaccccctgcttcccctcactgcccaggtcgatcaagtggcttttcctgggacctgcccagctttgagaatctcttctcatccaccctctggcacccagcctctgagggaaggagggatggggcatagtgggagacccagccaagagctgagggtaagggcaggtaggcgtgaggctgtggacattttcggaatgttttggttttgttttttttaaaccgggcaatattgtgttcagttcaagctgtgaagaaaaatatatatcaatgttttccaataaaatacagtgactacctga

SEQ ID NO: 120626 - DNA, 655 bp, Artificial Sequence
  derived and/or modified sequence
ggagattagaagatactcttgaaggcttccgggacggagaaggatcagggtcgtggaggtggtgaaaagggatggctgaccagctgactgaggagcagattgcagagttcaaggaggccttctccctctttgacaaggatggagatggcactatcaccaccaaggagttggggacagtgatgagatccctgggacagaaccccactgaagcagagctgcaggatatgatcaatgaggtggatgcagatgggaacgggaccattgacttcccggagttcctgaccatgatggccagaaagatgaaggacacagacagtgaggaggagatccgagaggcgttccgtgtctttgacaaggatgggaatggctacatcagcgccgcagagctgcgtcacgtaatgacgaacctgggggagaagctgaccgatgaggaggtggatgagatgatcagggaggctgacatcgatggagatggccaggtcaattatgaagagtttgtacagatgatgactgcaaagtgaaggccccccgggcagctggcgatgcccgttctcttgatctctctcttctcgcgcgcgcactctctcttcaacactcccctgcgtaccccggttctagcaaacaccaattgattgactgagaatctgataaagca

SEQ ID NO: 120627 - DNA, 450 bp, Artificial Sequence
  derived and/or modified sequence
atggccgaccagctgaccgaggagcagatcgccgagttcaaggaggccttcagcctgttcgacaaggacggcgacggcaccatcaccaccaaggagctgggcaccgtgatgagaagcctgggccagaaccccaccgaggccgagctgcaggacatgatcaacgaggtggacgccgacggcaacggcaccatcgacttccccgagttcctgaccatgatggccagaaagatgaaggacaccgacagcgaggaggagatcagagaggccttcagagtgttcgacaaggacggcaacggctacatcagcgccgccgagctgagacacgtgatgaccaacctgggcgagaagctgaccgacgaggaggtggacgagatgatcagagaggccgacatcgacggcgacggccaggtgaactacgaggagttcgtgcagatgatgaccgccaagtag

SEQ ID NO: 120628 - protein, 473 aa, Artificial Sequence
  derived and/or modified sequence
MLKVTVPSCSASSCSSVTASAAPGTASLVPDYWIDGSNRDALSDFFEVESELGRGATSIVYRCKQKGTQKPYALKVLKKTVDKKIVRTEIGVLLRLSHPNIIKLKEIFETPTEISLVLELVTGGELFDRIVEKGYYSERDAADAVKQILEAVAYLHENGIVHRDLKPENLLYATPAPDAPLKIADFGLSKIVEHQVLMKTVCGTPGYCAPEILRGCAYGPEVDMWSVGIITYILLCGFEPFYDERGDQFMFRRILNCEYYFISPWWDEVSLNAKDLVRKLIVLDPKKRLTTFQALQHPWVTGKAANFVHMDTAQKKLQEFNARRKLKAAVKAVVASSRLGSASSSHGSIQESHKASRDPSPIQDGNEDMKAIPEGEKIQGDGAQAAVKGAQAELMKVQALEKVKGADINAEEAPKMVPKAVEDGIKVADLELEEGLAEEKLKTVEEAAAPREGQGSSAVGFEVPQQDVILPEY

SEQ ID NO: 120629 - protein, 142 aa, Artificial Sequence
  derived and/or modified sequence
MLKVTVPSCSASSCSSVTASAAPGTASLVPDYWIDGSNRDALSDFFEVESELGRGATSIVYRCKQKGTQKPYALKVLKKTVDKKIVRTEIGVLLRLSHPNIIKLKEIFETPTEISLVLELVTGGELFDRIVEKGYYSERDAA

SEQ ID NO: 120630 - DNA, 1422 bp, Artificial Sequence
  derived and/or modified sequence
atgctcaaggtcacagtaccctcctgttccgcatcctcatgtagttcggtgaccgccagtgcggcaccaggcacagccagcttagttccggattactggattgacggctccaaccgggacgcgctctctgacttttttgaagtggagtctgaactgggacggggagccacctccatcgtgtaccgctgcaagcagaaggggacgcagaaaccctacgccctaaaggtcttaaagaagaccgtcgacaaaaagatcgtgcgcactgagatcggcgttttactgaggctctcacacccgaacatcattaaactaaaggagattttcgaaactccgacagagattagccttgtactcgagttggtcacaggtggcgagctctttgacaggatcgtcgagaaaggctattactctgagagggatgccgcagatgcagttaaacagatcctcgaggccgtcgcatacctgcatgaaaatggcattgtccaccgggacctgaaacctgaaaaccttctttatgccaccccggcccccgatgcacccttaaagattgccgatttcggtctgagcaagatcgtggaacaccaagtgctgatgaagactgtctgcggcacgcctggttactgcgcccccgaaatactcagaggatgtgcttatggcccagaagtggacatgtggagcgtgggaattatcacatacattctcctgtgcggcttcgagcctttctacgatgagcgaggcgatcagtttatgtttaggaggattttgaattgcgagtactacttcatctctccttggtgggacgaagtgagcttaaacgcaaaagatctggtgcgcaagcttatcgtcttggatcctaaaaaaaggttgaccacgtttcaggcattgcagcatccctgggtgacagggaaggcggccaacttcgtccacatggatacagcccaaaagaagctgcaggaatttaacgctagacggaaactaaaggctgcagtgaaggccgttgttgccagctctaggcttggctctgcaagcagcagccacggctctattcaggagtctcacaaagctagtagagatccgtcgccgattcaggacggcaacgaagacatgaaagcaatccccgagggtgaaaaaattcagggcgacggggcgcaggccgcagtgaaaggagcacaggcagagctgatgaaagtgcaggctctggaaaaagttaagggcgcagatatcaacgcagaagaggcccctaagatggtgccgaaggccgtcgaagatgggattaaggttgccgatcttgaactagaggaagggctagctgaggaaaaactcaagacagtcgaagaggcagccgcaccccgtgagggccaggggtcttccgctgtcggctttgaagtcccccagcaggatgtaatcctgcctgaatactag

SEQ ID NO: 120631 - DNA, 429 bp, Artificial Sequence
  derived and/or modified sequence
atgttgaaggtaactgtgccaagttgctcggcttcctcatgtagttctgtcacagcatcggccgcccctggtacagcaagcctcgttcccgattattggattgatggatctaacagggacgcacttagcgatttctttgaggtggagagcgaactgggccgtggcgcaacatccattgtctatcgttgcaagcagaaaggcacacagaagccctatgcattaaaagtactcaaaaagaccgtcgacaaaaaaatcgtcagaacagagattggcgtcttgctccgcctgagccacccaaatatcatcaagctgaaggagatctttgagacacccactgagatatcactggtcctggagctcgtgacaggtggggagctgttcgaccgcattgtagaaaaaggttactattctgagcgcgacgccgcgtag

SEQ ID NO: 120632 - DNA, 1422 bp, Artificial Sequence
  derived and/or modified sequence
atgctcaaagtcaccgtcccctcctgcagtgcatctagctgtagctccgtgacggcctccgccgctccagggaccgcctccctcgttccggactattggattgacggatccaatcgggatgctctgtcagacttcttcgaggtagagagcgaactgggtaggggcgcaaccagcattgtgtacaggtgcaaacagaagggtacgcagaagccttatgctctcaaggtgctgaaaaagaccgttgacaaaaagattgtccgcactgagataggagtgttgctgcggctgagtcaccccaatataattaagcttaaagagatctttgaaacacccacggagatctctctagtactggagttggtcaccggaggggagctgttcgaccgcatcgttgagaaaggctactacagtgaaagggacgccgccgacgctgtcaaacaaatcctggaggctgtcgcttatctgcatgaaaatggcattgtgcatagagacctgaaaccagagaatttactttatgccactcctgcccccgatgcccctctcaagatcgctgacttcggacttagcaagatcgtggagcaccaggttctaatgaagaccgtgtgcggaacacccggttattgcgccccagagatcctgcggggctgcgcttacgggcccgaggtggacatgtggtctgttgggatcataacctacatactcctgtgtggattcgagcccttttacgatgagaggggagaccagttcatgtttcggcgcatcctcaattgcgagtactatttcatttccccctggtgggatgaggtgtctctgaacgctaaggacctggttagaaagttaatcgtcctcgacccaaaaaagagactgaccactttccaagcactgcaacatccgtgggtgactgggaaggccgccaatttcgtgcacatggacacagcccagaagaaactacaggaatttaatgcgaggcgcaaactgaaggctgccgtgaaggccgtggtggctagttcaaggctcggaagcgccagctcgtcccacggcagtattcaagaatcacacaaggcttcgagagatccatcccctatccaggacggcaatgaggacatgaaggctatcccggaaggcgaaaagatccagggcgatggtgcccaggccgctgtgaagggagctcaggcagagcttatgaaagtccaagccctggagaaggtgaagggggccgacatcaacgccgaggaggcacctaagatggtacccaaggccgtcgaggatggaatcaaggtggccgacttagaactcgaagaggggttggctgaggaaaaattgaaaaccgtagaggaagcggccgctccacgcgaaggacagggctccagcgctgtgggcttcgaagttccccagcaagatgtgatactgccagagtactag

SEQ ID NO: 120633 - DNA, 1422 bp, Artificial Sequence
  derived and/or modified sequence
atgctgaaggtgacagtgcccagctgcagcgccagcagctgcagctctgtgacagccagcgctgcccctggaacagccagcctggtgcctgactactggattgatggcagcaacagagatgccctgagtgacttctttgaggtggagagcgagctgggccgcggggccaccagcatcgtgtaccgctgcaagcagaagggcacccagaagccctatgccctgaaggtgctgaagaagacagtggacaagaagatcgtgaggacagaaattggagtgctgctgcggctgagccaccccaacatcatcaagctgaaggagatctttgagacccccacagagatcagcctggtgctggagctggtgactggaggagagctgtttgaccgcatcgtggagaagggctactacagcgagagagatgctgctgatgctgtgaagcagatcctggaggccgtggcctacctgcatgaaaatggcatcgtgcaccgggacctgaagccagagaacctgctgtatgccaccccagccccagatgcccccctgaagattgctgactttggcctgagcaagatcgtggagcaccaggtgctgatgaagacagtgtgtggcaccccaggctactgtgcccctgagatcctgcggggctgtgcctacggccctgaggtggacatgtggagcgtgggcatcatcacctacatcctgctgtgtggctttgagcccttctatgatgagcggggggaccagttcatgttccgccgcatcctgaactgtgagtactacttcatcagcccctggtgggatgaggtgtccctgaatgccaaggacctggtgaggaagctgattgtgctggaccccaagaagaggctgaccaccttccaggccctgcagcacccctgggtgacaggcaaggccgccaactttgtgcacatggacacagcccagaagaagctgcaggagttcaatgcccggaggaagctgaaggctgctgtgaaggctgtggtggccagcagccggctgggcagcgccagcagcagccacggcagcatccaggagagccacaaggccagccgggaccccagccccatccaggatggaaatgaagacatgaaggccatccctgagggggagaagatccagggagatggagcccaggccgctgtgaagggggcccaggccgagctgatgaaggtgcaggccctggagaaggtgaagggagctgacatcaatgctgaggaggcccccaagatggtgcccaaggctgtggaggatggcatcaaggtggccgacctggagctggaggagggcctggccgaggagaagctgaagacagtggaggaggccgccgccccccgggagggccagggcagcagcgctgtgggctttgaggtgccccagcaggatgtgatcctgcctgagtactag

SEQ ID NO: 120634 - DNA, 429 bp, Artificial Sequence
  derived and/or modified sequence
atgctgaaggtgacagtgcccagctgcagcgccagcagctgcagctctgtgacagccagcgctgcccctggaacagccagcctggtgcctgactactggattgatggcagcaacagagatgccctgagtgacttctttgaggtggagagcgagctgggccgcggggccaccagcatcgtgtaccgctgcaagcagaagggcacccagaagccctatgccctgaaggtgctgaagaagacagtggacaagaagatcgtgaggacagaaattggagtgctgctgcggctgagccaccccaacatcatcaagctgaaggagatctttgagacccccacagagatcagcctggtgctggagctggtgactggaggagagctgtttgaccgcatcgtggagaagggctactacagcgagagagatgctgcctag

SEQ ID NO: 120635 - DNA, 1422 bp, Artificial Sequence
  derived and/or modified sequence
atgctgaaggtgaccgtgcccagctgcagcgccagcagctgcagctccgtcaccgcaagtgctgcacccggtaccgcctctctggtcccagactactggatagacgggtccaaccgagacgccttgtcagattttttcgaggtcgagtctgagctcggccgtggcgcaacctcgatcgtctaccgatgcaagcagaaagggacccaaaaaccatacgccttgaaagtcctcaagaaaactgtggataagaagattgtgcgcaccgagataggagtattgctccgcttaagccatcctaacattatcaaactgaaagaaattttcgagacacccaccgagatctcgctggtcctagagctggtaacaggtggggagctgttcgatcgcatcgtggagaagggctattactcagaaagggatgcagccgatgcagtcaagcaaatcttggaggccgtggcatacctgcacgaaaatggcatcgtacatcgagatctgaagccagagaatttgctctatgcaactcccgctcccgacgcccctcttaagatcgccgatttcggcctcagtaaaattgtcgagcatcaggtacttatgaagactgtctgtggtaccccgggctactgcgcccccgagattcttaggggatgtgcctatgggcctgaagtggacatgtggagtgtgggcataatcacctatatcttgctctgtggcttcgaacctttctatgacgagagaggtgatcagttcatgtttcgcagaatccttaattgtgaatattatttcatttctccctggtgggacgaggtatcccttaacgctaaagatttagttcgtaagctgatcgtgctggaccccaaaaagcgactcacaacctttcaagcgctacaacatccatgggtgacaggcaaggcagcgaattttgtacacatggacaccgctcagaaaaagttgcaggagtttaacgccaggagaaagcttaaggctgccgtgaaagcagtggttgcttcctctcgcctcggctcagcttcatcttcccatgggtcaatacaggaatctcataaggcctcacgcgacccgtctccaattcaagacggcaacgaggatatgaaagccattcctgaaggagagaaaattcagggagacggcgctcaggccgctgtaaaaggggcacaggcggaactgatgaaggtccaagcactggaaaaagtgaagggcgcagacataaatgccgaagaggcacccaaaatggttcccaaggccgtggaggacggaattaaggtcgccgatttagagctggaggaagggcttgctgaggagaaactcaaaactgtggaggaagctgcagccccacgcgagggacaaggctcgagtgctgtgggatttgaagttcctcagcaggatgtaatcttgcccgagtactag

SEQ ID NO: 120636 - DNA, 429 bp, Artificial Sequence
  derived and/or modified sequence
atgctgaaggtgaccgtgcccagctgcagcgccagcagctgcagcagcgtaaccgccagcgcagcccccgggacagcgtctctcgtgcctgattactggatcgatggcagcaatcgggacgctctgtccgatttcttcgaagtggagtcagagctcggacggggagctacaagcatagtgtaccgctgtaaacagaaggggacccaaaagccgtacgccctgaaagtgttgaagaaaactgtcgacaaaaaaatcgtgcgaaccgagattggggtcttacttcgtctttctcaccctaacataatcaaacttaaggagatttttgagacacctactgagatttccctcgtgctcgagttggtgacaggtggtgagctatttgaccgcattgtcgagaaaggctattacagtgagagagatgccgcctag

SEQ ID NO: 120637 - DNA, 1422 bp, Artificial Sequence
  derived and/or modified sequence
atgctgaaggtgaccgtgcccagctgcagcgccagcagctgcagctccgtgactgccagcgccgcacccggcaccgcctctctggtacctgattactggatagatggctccaaccgggacgctcttagtgatttcttcgaggtcgagagcgagctgggacgcggtgccacatcaatcgtctatcgttgtaaacagaagggcacgcaaaagccctacgctttaaaagttctgaagaagaccgtggataagaaaatcgttcgtacagaaatcggagtgcttctgcgattgtcacacccaaatattatcaagctgaaggagatctttgaaaccccaaccgagatcagcctggtacttgagcttgtgaccgggggggaactttttgatagaatagttgagaaggggtactactctgagagagacgcagctgacgctgtgaaacagatcctggaagccgttgcgtacctgcatgaaaatggcattgtccaccgtgatttaaagcccgaaaacctgttgtatgccacccccgcccctgatgcgccactaaaaattgcagacttcggtctgtcaaaaatcgtagagcatcaggtccttatgaagaccgtgtgtggtactccaggctactgtgcccccgagatcctcaggggatgcgcatacggtccagaagtcgacatgtggagtgtgggcattatcacgtacattctgctgtgcggttttgaacctttttatgatgagcgtggggaccaattcatgtttaggcgaatacttaactgtgaatattactttatcagtccttggtgggacgaggtttcactcaacgcaaaggacctggtacggaaactgatcgtcctggaccctaagaagcgactgacaacatttcaggccctccaacacccgtgggtcaccgggaaagccgccaatttcgtgcacatggataccgcacagaaaaaactccaagaatttaatgcccggaggaaactgaaggccgcagtaaaagccgttgtcgcctcatctcggctgggctcggcttcttcaagccacggcagcatccaggagtcacacaaagcttcccgggaccctagcccgattcaagacggaaacgaagacatgaaggctatacccgaaggtgaaaaaatccaaggtgacggcgcccaggccgctgtcaagggagcccaggccgagctgatgaaagttcaggcgttagaaaaagtgaagggggcagatatcaacgccgaggaggcaccgaagatggtccctaaagcggtcgaggacgggatcaaggttgctgacctcgagctcgaggaagggctggccgaggagaaactaaaaactgtggaggaagcagcagcgcctcgcgaagggcagggcagctcggccgtcggatttgaagtgccacagcaggacgtgatcctgcctgagtattag

SEQ ID NO: 120638 - DNA, 1422 bp, Artificial Sequence
  derived and/or modified sequence
atgttgaaggtcaccgtgcccagctgcagcgcatcttcttgctcttcagttacggcaagcgcagcccctgggactgcttccctggtaccggattactggattgatggctccaatcgagacgctttgtcagacttttttgaggttgagagcgaactggggaggggggctacatctatcgtgtaccggtgtaagcagaaagggacccagaaaccctatgctttgaaggtgctgaaaaaaactgtcgataagaaaattgtccgaactgaaatcggcgttctgcttcggctctcccaccccaacatcatcaaactgaaggaaattttcgaaaccccaactgagatctcacttgtgctggagcttgtaaccggaggggagctgtttgaccggatcgtggagaaggggtactactctgaacgcgatgctgccgacgctgtgaagcagatactagaggccgtagcgtacctccatgaaaacggcatcgtgcacagggatttgaaaccagaaaacttgctttacgcaactcccgcacccgatgccccactgaaaattgccgattttggactgagcaaaatagtggagcaccaggttctgatgaagacggtttgcggaactcctggatattgtgcccctgagatcttaagaggttgtgcttacggacctgaggttgatatgtggtccgttggtattattacttacattctcctgtgtggattcgaacccttctacgacgagagaggggaccagtttatgttccgtaggatcctgaattgtgaatattactttattagcccttggtgggatgaggttagtttgaacgctaaagatttggtgaggaaactgatcgtgttagatccaaagaagcggctgaccacctttcaggctcttcaacatccttgggtcactgggaaggccgctaacttcgtgcacatggacacggctcaaaaaaagcttcaggagttcaatgcaagaagaaagcttaaagccgcagtaaaggcggtggtggcaagttctcggctcggttcggctagttctagccacggcagcatccaggagagccacaaggccagccgggaccctagccccatacaggacggcaacgaggacatgaaggccattccagagggagagaagattcagggagacggagcccaggctgcagtcaaaggggctcaggctgagctcatgaaagtgcaggccttagaaaaagtcaagggtgctgatatcaacgcagaggaggcccctaaaatggtgccgaaagccgttgaggacggaataaaagtcgcagatctggagctggaagaaggactggcggaggagaaattgaagaccgtcgaagaagctgctgcaccgcgagagggacagggttcctctgcagtgggtttcgaagtgcctcaacaggacgtgatcttgccagagtattag

SEQ ID NO: 120639 - DNA, 429 bp, Artificial Sequence
  derived and/or modified sequence
atgttgaaggtgactgtcccttcttgttctgcaagttcatgctcttctgtcacagcctccgccgcaccaggtactgcatccctggttccggattattggatcgacggctcaaacagagatgccctaagcgatttttttgaggtcgagtctgaactcggacgcggagccacttccatagtgtacaggtgtaaacagaaaggcacacagaaaccatatgccctgaaagttctgaagaagaccgttgacaagaaaatcgtccgaacagagataggagtcctgctgcgactgagccatcccaatatcattaagttgaaggaaatctttgaaacccctactgagatctccttagttcttgagttggtgaccgggggtgagctgttcgatagaatcgttgaaaaaggatactactcggagcgagatgccgcttag

SEQ ID NO: 120640 - DNA, 1422 bp, Artificial Sequence
  derived and/or modified sequence
atgctgaaggtgacagtgccatcatgctcagcctcctcgtgcagttccgtgacagccagcgcagccccaggcaccgcttctcttgttcccgactactggatcgatggtagcaacagggatgccctgtctgacttcttcgaggtggaatcagagcttggccgaggggctaccagcatcgtataccggtgcaagcaaaagggcacccaaaagccatacgcactgaaagtcttaaagaagactgtcgacaagaaaatagtgcggaccgagattggagttttgttaaggttgtcccaccccaatattatcaagttgaaagagatcttcgaaaccccaacagagatctcactggtgctcgagcttgtgacgggcggagagctgtttgatcgtattgtggaaaaggggtactactctgagcgggatgctgccgacgccgttaagcagatccttgaagccgtagcgtaccttcacgagaatggcatcgtgcaccgagacctgaaacctgaaaatttgctctatgccacccctgcacccgatgccccacttaaaatcgctgactttggactctccaagatcgtggagcatcaggtgctaatgaaaaccgtttgtgggacacccggatattgcgcccctgaaatcttacgtggctgtgcctacggacctgaggtggacatgtggagcgtgggtataattacatatatcctcctgtgcgggtttgaacctttttatgacgaacgtggggaccagttcatgttcaggaggattctgaattgcgagtattatttcatcagtccttggtgggacgaagttagtttgaacgctaaggacctggtgagaaaactgatagtgctggacccgaaaaagcggttgactacattccaggctcttcagcacccctgggtgacaggcaaggccgcaaactttgtacatatggatactgctcagaagaagctccaagaatttaatgcacggaggaagctcaaggccgctgtgaaggctgttgttgcctcgagtcggttggggagtgcttctagcagtcacggaagcatacaggaatcccacaaggcctcaagggaccctagtccgattcaggatgggaatgaagacatgaaagctatcccggagggggaaaagatacagggcgatggtgcacaggccgctgtcaaaggcgcacaggctgagctgatgaaggttcaggctctggagaaagtaaagggagccgatattaatgcagaagaggctccaaagatggtcccgaaagcggtcgaagacggaattaaagtggcagacctggaacttgaagaaggacttgcagaagagaagctcaagaccgtagaggaggccgctgcaccacgggagggacagggtagttctgcggtagggttcgaggtaccccagcaggatgttattcttcctgagtactag

SEQ ID NO: 120641 - DNA, 12240 bp, Artificial Sequence
  derived and/or modified sequence
aagctccagcatccggagccgccctagccggcaccgcggcagccacagcctgggagagagaaaggaaagagggagggcggcgggaaaggctcggcgcgggaggagggcgggtgaggagggaaggagcgagggggagggagcctctctcctcagcggtgcagctagtctccctccagcgggcggcgactccgggttccccctcgcgccctctcgcagaggctcgcccccttccccgcccaccgtccctgcgagcgcgggcggcggcggtgggcgtgtgcgcgcgtgaaggacgccgcctctctctcgctcctgcgttcgcaggcggcggctggcggccggcttctcgctcgggcagcggcggcggcggcggcggcggcttccggagtcccgctgcgaagatgctcaaagtcacggtgccctcctgctccgcctcgtcctgctcttcggtcaccgccagtgcggccccggggaccgcgagcctcgtcccggattactggatcgacggctccaacagggatgcgctgagcgatttcttcgaggtggagtcggagctgggacggggtgctacatccattgtgtacagatgcaaacagaaggggacccagaagccttatgctctcaaagtgttaaagaaaacagtggacaaaaaaatcgtaagaactgagataggagttcttcttcgcctctcacatccaaacattataaaacttaaagagatatttgaaacccctacagaaatcagtctggtcctagaactcgtcacaggaggagaactgtttgataggattgtggaaaagggatattacagtgagcgagatgctgcagatgccgttaaacaaatcctggaggcagttgcttatctacatgaaaatgggattgtccatcgtgatctcaaaccagagaatcttctttatgcaactccagccccagatgcaccactcaaaatcgctgattttggactctctaaaattgtggaacatcaagtgctcatgaagacagtatgtggaaccccagggtactgcgcacctgaaattcttagaggttgtgcctatggacctgaggtggacatgtggtctgtaggaataatcacctacatcttactttgtggatttgaaccattctatgatgaaagaggcgatcagttcatgttcaggagaattctgaattgtgaatattactttatctccccctggtgggatgaagtatctctaaatgccaaggacttggtcagaaaattaattgttttggatccaaagaaacggctgactacatttcaagctctccagcatccgtgggtcacaggtaaagcagccaattttgtacacatggataccgctcaaaagaagctccaagaattcaatgcccggcgtaagcttaaggcagcggtgaaggctgtggtggcctcttcgcgcctgggaagtgccagcagcagccatggcagcatccaggagagccacaaggctagccgagacccttctccaatccaagatggcaacgaggacatgaaagctattccagaaggagagaaaattcaaggcgatggggcccaagccgcagttaagggggcacaggctgagctgatgaaggtgcaagccttagagaaagttaaaggtgcagatataaatgctgaagaggcccccaaaatggtgcccaaggcagtggaggatgggataaaggtggctgacctggaactagaggagggcctagcagaggagaagctgaagactgtggaggaggcagcagctcccagagaagggcaaggaagctctgctgtgggttttgaagttccacagcaagatgtgatcctgccagagtactaaacagcttccttcagatctggaagccaaacaccggcattttatgtactttgtccttcagcaagaaaggtgtggaagcatgatatgtactatagtgattctgtttttgaggtgcaaaaaacatacatatataccagttggtaattctaacttcaatgcatgtgactgctttatgaaaataatagtgtcttctatggcatgtaatggatacctaataccgatgagttaaatcttgcaagttaacacaacgtaacacttaaaagcatacattttcagcaaccagtggcacatatttgaagtgaatagtagcaaattgtttttgctttgaaaatctagccatcctacatcctttggatttcttcacaaggcagtaattcctttgaactactgcttagctaatactaggtagtgctaaaagacatgttcccataacttttacaacattttactttttatcattgatgtgttcaaactgtttacaaggagatgcttatagatgatagttgtacatatgtgcaaaaaaaaatccacttgcaatggtaagaaattgaagtatccttaaaggccatgaagccatatgtccctaaagcctgtgtggagaatgctttattttattcttatttatatacactatattaataataaccaaaatgttctaagattctgccattttacaaccctggaggaagtaatttacaaactcacgctgagttccattctttccttcacctgctctccaataagatgactttctgatagacaaagcttagggtgtaataaacagggaagaaaagaaggtaagactgtacttaaactgatgaagataagattgattccttttcattttccagataaaattgtatttactcatgaatttatacaactttacagataagaacattttaatggataaactctataattaccaagttgcaaatatttagaaaattctatttcacaggttagtgccaaaatgtcttcatagagtaggaataatattccattttaagattattcattattgactttaatagagtaagaaaacattattgtttatcaaagctctttttttatccaattgatggttatctacacatatcacttataaactaaagttatttatgaaaagctagtatgtctttttctcgtatttggaatgaaagtacccacattttacaatgtagtgttgagaatgtggctgccaataaatttagcacaatgcaatttatttaccttaaaaaacaaacaaaaacaaaaataaagaaaaatactgatttcaaatcagactcttaaaaagctggaacattagacctgatattttattatgatttttcccagaataagtttaatttctctttgactttcatagaaacactttccccttatagaaattgcactatctccaatttatttctagtttgagttgaaatgaatattttatcagattaattatgtgtcacatttttggtgggttttctcaattttaaaaaagaattcattttaaaaaataattattttcagagaccaaataaagacaataaaaatgactatcacataaaaatccttgttaaaaaagagatcttaaattatgttggctctccctcaaaactattaaattagaaaacgaaactaaagctccagtttgtagaggctgttggacctcagtagacattcttcttttcaatcacaaatctctctctactactgttctcatgggaagaaaacaaggtaggacttcttatctttcatagtttaagaatctgacaggtcactgatatggagcccctgaagaagcacatcatctgggctcagaagattattttttgttttgttttatttgtactatctagtagagagcacttttcttattccctctttccttccttcctcatttaattattccctctcagaattcccatgttgtccattataaggggctcgctatttttaacctttaagaatgtcttctttgttaagcattaagatttccatttaagaggatcaatttcctgttgtactttttaccatgagactgaaacacacacacacacacacacacacacacacacacacacacacgtgttggaagagcaaagagagggaagggggtctttttagaaagtggcacttggcgcttagctgaaagatcagaacacatcattcctccctgcccacccccatattgttccaagggcagttgttacattatttcaacactagagtagggcggactgcattgtttggccctgagaactatagaaacaacgttgcaaataccatgcccaatgtgtattttagaatttactcatttaaatgagtgcatattaccattcctccatgtgagtactcgagttgataattccctctatctttttaaacccataaactacatttttaaaaaaatcaatgggagttttaaattttgactcatgttaaagataagattctgataatgactatatagtgactaatttcattgtttcagtaggaaacaaatcaaactttcaaaaatgttggtcatttcagtcaaattattcaaagatttcatatacatacatcctaagttaggataattatgttaacatttttgaaagaacagccaatgtttatattgcttgttaaaatggaatgtattgtctatctcaaagattacttagctaaataatagtagacaaatggagatttaatttcacaaaatacttcataacatcactcctaattggcaatatagtcacaaagcaaaagaattcaaatttcagcaaacaataaattacattttacattttagagctaacacttatcacattacattatgggtttttattttgagataagttcagctacatagcataaactaggtttttttttataaccatgaaggacagtcttgaattatttcccccattaacaaagtctaattggaatccagtattttttctcaaactgtaatttcacttgtcccaggacacataaataggtaaaaattagaataatatcgtggtagaagttaattgtccagaacaagtgcattatataaatataatgcaagcacatgtcatttaagattttctattagtcacattttaagaaaaatagatgaaagtatagtatttttaatccaattcatccaaattattctatcgatatatagtcaatattaaaatttaatgtgatattttgaattctttatttttatactgttttcaaaatcaagagtgtatgttaggcctttgggacatcaagtgctcaatagtcacatgtggctagtggctaccatattagacagcactagtctagagtactttttattttaagcaaagtgacacttgaagttctatgcttagatttaagtggcctcagttttcacattgaggagctggtgggaggccacaaagaaagtgtttcagaaatgttacacactgagtaaaagcttattgaccactcctgcccattcatttacttcagaggagaaatgattcctaacatgacttcaaagaacgggcattactaaattatctactgaccaatccctctgattcctgatgggccctggagtcttgactacagcctagagtctcctgagtactgccatgatgccaatagcattcttgcttaccaaaatctactctcagccaactatgtgtcttcattcaggaagaactgcacatagaatctgattttgaggcctggattaagcttcatgccatccttgtatcacaggcaatatgtctttctggaaatctaatgaaccataccaaatctgcatgatgaagattgtgtaatgatggtgatatcatgccagttatcctcaaagtgggaatatgaccattagctggcattttttaagatttccttagaagggtttaatcaacactgccattacacatggatttaacaaaagacttttgaaaattttttacatactgattttagaataatcctcaaggttctatagtcatttttagtggaagacttaaaaagaaaggaacaatttttactgtgacttcaatttcatagtattttaaacatattttgtaattcagaatgtttagcaatccctatgtcctgtttcacatgcatggtaactgatggtgggttgcctacaggctgaagatttggagagagccattttgtttcataaatcagtttttattgcacagaagcagctggttgtatttcaagttggaaaaagaaaagtaaatgccagaaaaggcaaaggataaacttagtaagccatttattttgttttagaattgtttttgcaaagcaaatttttttaaaaaaaggtcaacaaagtgaatcagcactagcattttcttgatggttgactcaatgtataattaacaaatatacatagcagagtcaattaatcatagtgccattatgtcacttatttgtcattgcaaagtattcagtcatgttgtctagatttactttagatggtgcaaaatttccagatagtaacctatgtaaaaggatttgtaatttccttgtaattcctgcctattagtccatattctgatttccttatgttcatcactgatatgttcctgatcagggtcattgctagtagttgagcatttactggttgaacattgtttaatggttagatgttatgtgtgtctgcatttaaaaaaattgtgtacatgttatttcactattggtattacaatattcataaccacatgataaacagaaatgtacccaataatttcctataaaatttttcaaagtccttttattcccctgacacactcagggtgaatttttgtctccttggcaaataagaaaaaaaaggagagagaccactggagagatatcagcaaaccacccacagtaaccaagttcagtatttcctctttctatattttgaccaatatattaagagcaaattttgtcattattactccttgtggctattacctgagatcagataatataatctcagctcataaagcttggccatgtctatacttatcttggagagcaataacaaacttgattaatttgtttggttatttaaaattccaactttcataaatgctctgtgatgtactcaagacgattgggttgtgtgatactaacttccttcaagaactcagtctgttccctgttgtctggttcagaggtccaccagggcaaaatagaagccttgccgagaaagtgaactgtcttactccttcaaaggaatcagatgttgctctagagaagactccaggcatctacctggttgagctcaaatgaggcaagtgggagaaaacctcttctcatcctctgattgaaagtgatacaatttgaatattggtatattgtcattggtcagtaatggaaaaatgagattccaccagtgggttactcttttcttgtcttggtttgctatgccttatcccagatcagtgttttgttccatccctatggtcatctctaaagccctgacaggagcatcccagactggagaaatgcagcgtatctgtggcccagaattttgtttgatactctaaacagcaatgcaaagactgcaaaatcacactattctaaacagttgttttcagctcattttgaagattgacctggaaaacatatagatacagaatatatacatttaatcgttgcttgtgattcattgtgtcaaaataacatttaattttcactctgattaatctttattttccatttaaaagattatttcaggctacttaaatacaagaccttgcattctaatttttgaaagcggttgttttccctgagctctctctcaactttgacagtttgtgaatgataaaaagttactaggtttgtcctttccttgatagatgtagagcagttcatctgttttgtaaaggtacagttaagcataactataggctgggcgtgatagttcatgcctgtaatcccaacactttgggaggccgaggttggcagatcacctgaggtcaggagtttgagaccagcctggccaacgtggtgaaacccctaatacaaaaattagctgggcatggtggcacgctcctgtaatctcagctactcaggaggctgaggcaggagaatctcttgaacccgggaggcagaggttgcagtgagccaagatcatgccactgcactccagcctggacaacaagagcgaaactccgtcaaaaaaaaatatatatatatgaccataaattgaaaactatcatctcatactgcctccttttaacctgacctattttatatacctacaatacagttaatatgcagcagcgtagagaacaaatagcatattcataatttgtaattttgtttttctttttacggcacccttaagtctcagtaatattttaaaagtcctctataagccaaaagaacgttgtaacatatccatttattaaggagttaggcctaaacatagtaatagtagtccattccatgtccaacagatgttgctgtgtttctttcaacatttttcaatgtcttgtgagtttagtgagtgggtacagctgagttggggtttaggtgatttcttatgcccaatgaactaaaggtatcagtaaaagattattagtaaacaaattagttatttatgctcttacttgaatgtcagtcattcattttatctctcgtctttgagatacacacattaaaacttatgtgcatatttttttaaagagtaatttccacataattccccaagaactgaactcaaatctccaaaaatttttcagaactcaagcaaccaatgattcacagagcaaatctaccaaagccccatttttattggaacacaggcatgctcatttatgtacatattgtttgtggctgcttttatgttgtcaaggcagagttgagtactttcaacagagaccatatggactgcaaagcctaaaatgtgtatctggacccttacagtaaaacaatgaccctgggttttcatggcaccccaatgcctttttggtgacttgcaggaatacagattcctatattccagtttgtttttttttttttctccttagcttaaggttcgtattcccatttgcttctgagaaagttaggaaaattttgttttatgttgcagatgctctcacaacaataattgtgctggagatagatacaacttagtgaaattttcctacagaactaaaaacgcaaaattgcatcactcctgaagaaaagaaatttagagtatgaattgagttggttgagagtagaattaaaaagatttctagcactttgagcatgttttagaaatttgatccttacatttaaaattatgtaaatgacatctttcactggcatttgctcacatttaagtcaatctacagctgttacttactaagctaagaaataagaagatccctatggttctgaatctctcataatattctgaagtaatttatatcaattgaattttcattaatcattttaggaaatattatgttttattttgtggcattatatgacaatgactttctcaacaatagctcagggaatacgcaaacagccagctcttttatgtaagaaagccattttctaatccccacgctttcctgagtgttacgtattttatttctttgaaaagagagggccttgagtaaatgctttcgtttgctttccttacatatttagaaatccaagaagggcccttgtcttagtctatttctgtcacagagaaattgttcattccaaaatatccaccttaagggaagctagtgaccgagatatggagaaaaacataggcattcatgacctttgtgtttccgtttgactttcaacatctgtaaccaaaaggtcacaaatgaaatatttagtagaaagtgcaatatcaatttattaggagtacctaaaattataactctaaataatatacagcaatattattgctctattattacagcaatcaataatataatatagccactaggatacactcgctgtagaactcagaacaaaagatatcaatcttctgccagtccgcatcattatgtgtagcagagactttactggaatgagtgaggggaaagataacaaaatgtagattaggattccacattctcccctgcccatcttcttgattgctcagtttgaagacgatcattgatggacaaatactttagaaatgaatgaagtcaatagctaatgtttctcccagaaactaaacaacatagtttaggggatattaggcctacattctaatcacattgtaaggaagtgattttctaattttgaagcttcccaggagcagccccctccaggaacaattttccctgtgaactttcactgagaaactattatatgccatggaggagtcaaagatgaattaaatccaatgctatcctccaggagtgagctttgtagttggagagaaaagccaaccttatagatacaacctgtacatatataacctatgctgcatttaggcagatgataagccctaggaatggaaagagggaaaagctcccttttgccaggaatgatgaaggaaagctttatggaaacacaggctgtatgtgaaagatgggtgaatctttgcaggtagggaagaagtagggggcatgtctggctgagaaccggcctgatcatagagtggaaaaatgaaaggcagaggtgaaggaagaatactaaatgtgaaaggctgaaatacacagggaagtgttgccagtgtgcaacagaatctcatctcgtgcaaaattgaattagacttccttactccttccttactctgggtaggtccatgtgcagcctttcctcagagcatctagcctgacatacttggctcatctgctgtgcttctaagccaaataaaaatcatcaaacacatcgaagatatttttgggagtcaccaggttaaagcaaagcctcagtcactgaaagcaaaaactgaattggccaggtctccactgacaaaacagagtaaatgatagtatgacagataatttcaagttttccaagactccaatttctgaaaaatgtctcatgactccaaaaaatcacgtacttcctaaaatgttgccagtggaggaccgaatcaaggttattgctgacctcattttttcaaccttttcagttatttgacctgaataggcaatcccccaggatttctgattgaattctacctgaaagtttagattttaaaagacaacctgtaggaagctaagtctcaggcaacaaaatttaaaaccatcagaacttgtttctccaaacatcaacctgctcctgtcaagtcctttttcatctctcccttttgtccctttacatactgttttgtaagttccttttgatatcatttattgcaggcagtatttttacatccatcttcaagaaacttgggagacatttagacatttagtatgtgtacttttagttgtcttgcctctttatttcagataatgcctgtgattagtgaatggcggcattattcctgaagacaaatgaaggaagatagggagcaagattgactgtcatttgaatgatggaagagaagtagaattactgtgaggttacaaaaatcgtaagttagcagacattgagaaaggaaaacttcctacttgggcttttcaggcttatgtgacattatctggatgtgttttctagtctttcctaaaggagaaatttttattcctgggttgctgaaagctttctggactaaaaggatataagcagctcaatagcagcatagaggattagattaatggaacagcactgcatacaggaaagctacatctccaatagtttaggctgcaagtcagtagccaaacacaagagcatgtaagatttggaggacaaagtataaatattttaagtttacacaaccaagattataggctaccttcccaacttctaatttgaagagcactgaaaatggagctgtgaacacttcatttttaaaacctgacaatatggtgctattgactacttaatacaaagatatattacaatatttttaggtaaatgtattaagtctggcctgggcataaatgtacatacagaaaatgtttgtagagaattcatcaaaatcatgcccatttgctgttgtagagctacagtattcttcaatggtggtgactgaccagtgagtttctacttcttacagatgggacacaacagtcatgggctgtctcagctgcccaaagcctgaggcagaccacatgagagctgtggcttcttcttggattcaggttggataacccaattcagtaattaaatatgtaaattttggggggggttggggggtgttttctaggaacttgaagagtacgtgacattataaaaaatgggtgttggaagactaattgtagaaatttgacctgagggccaatgttacttggtgtaagttcactcagacagacatgtcagaacatgcccaaagaagcctatatcttgctgctgggaaatgtaaagcagttggcatgtagaatacgataataaatcatttaagaaaccaccaaaa

SEQ ID NO: 120642 - DNA, 557 bp, Artificial Sequence
  derived and/or modified sequence
agtgccaccagcagcgacgacagcatttattccaactgaagacttcactcaaaggcggcggctggcggccggcttctcgctcgggcagcggcggcggcggcggcggcggcttccggagtcccgctgcgaagatgctcaaagtcacggtgccctcctgctccgcctcgtcctgctcttcggtcaccgccagtgcggccccggggaccgcgagcctcgtcccggattactggatcgacggctccaacagggatgcgctgagcgatttcttcgaggtggagtcggagctgggacggggtgctacatccattgtgtacagatgcaaacagaaggggacccagaagccttatgctctcaaagtgttaaagaaaacagtggacaaaaaaatcgtaagaactgagataggagttcttcttcgcctctcacatccaaacattataaaacttaaagagatatttgaaacccctacagaaatcagtctggtcctagaactcgtcacaggaggagaactgtttgataggattgtggaaaagggatattacagtgagcgagatgctgca

SEQ ID NO: 120643 - DNA, 1640 bp, Artificial Sequence
  derived and/or modified sequence
cccggacccaggtgctgccagggcggcggctggcggccggcttctcgctcgggcagcggcggcggcggcggcggcggcttccggagtcccgctgcgaagatgctcaaagtcacggtgccctcctgctccgcctcgtcctgctcttcggtcaccgccagtgcggccccggggaccgcgagcctcgtcccggattactggatcgacggctccaacagggatgcgctgagcgatttcttcgaggtggagtcggagctgggacggggtgctacatccattgtgtacagatgcaaacagaaggggacccagaagccttatgctctcaaagtgttaaagaaaacagtggacaaaaaaatcgtaagaactgagataggagttcttcttcgcctctcacatccaaacattataaaacttaaagagatatttgaaacccctacagaaatcagtctggtcctagaactcgtcacaggaggagaactgtttgataggattgtggaaaagggatattacagtgagcgagatgctgcagatgccgttaaacaaatcctggaggcagttgcttatctacatgaaaatgggattgtccatcgtgatctcaaaccagagaatcttctttatgcaactccagccccagatgcaccactcaaaatcgctgattttggactctctaaaattgtggaacatcaagtgctcatgaagacagtatgtggaaccccagggtactgcgcacctgaaattcttagaggttgtgcctatggacctgaggtggacatgtggtctgtaggaataatcacctacatcttactttgtggatttgaaccattctatgatgaaagaggcgatcagttcatgttcaggagaattctgaattgtgaatattactttatctccccctggtgggatgaagtatctctaaatgccaaggacttggtcagaaaattaattgttttggatccaaagaaacggctgactacatttcaagctctccagcatccgtgggtcacaggtaaagcagccaattttgtacacatggataccgctcaaaagaagctccaagaattcaatgcccggcgtaagcttaaggcagcggtgaaggctgtggtggcctcttcgcgcctgggaagtgccagcagcagccatggcagcatccaggagagccacaaggctagccgagacccttctccaatccaagatggcaacgaggacatgaaagctattccagaaggagagaaaattcaaggcgatggggcccaagccgcagttaagggggcacaggctgagctgatgaaggtgcaagccttagagaaagttaaaggtgcagatataaatgctgaagaggcccccaaaatggtgcccaaggcagtggaggatgggataaaggtggctgacctggaactagaggagggcctagcagaggagaagctgaagactgtggaggaggcagcagctcccagagaagggcaaggaagctctgctgtgggttttgaagttccacagcaagatgtgatcctgccagagtactaaacagcttccttcagatctggaagccaaacaccggcattttatgtactttgtccttcagcaagaaaggtgtggaagcatgatatgtactatagtgattctgtttttgaggtgcaaaaaac

SEQ ID NO: 120644 - DNA, 1422 bp, Artificial Sequence
  derived and/or modified sequence
atgctgaaggtgaccgtgcccagctgcagcgccagcagctgcagcagcgtgaccgccagcgccgcccccggcaccgccagcctggtgcccgactactggatcgacggcagcaacagagacgccctgagcgacttcttcgaggtggagagcgagctgggcagaggcgccaccagcatcgtgtacagatgcaagcagaagggcacccagaagccctacgccctgaaggtgctgaagaagaccgtggacaagaagatcgtgagaaccgagatcggcgtgctgctgagactgagccaccccaacatcatcaagctgaaggagatcttcgagacccccaccgagatcagcctggtgctggagctggtgaccggcggcgagctgttcgacagaatcgtggagaagggctactacagcgagagagacgccgccgacgccgtgaagcagatcctggaggccgtggcctacctgcacgagaacggcatcgtgcacagagacctgaagcccgagaacctgctgtacgccacccccgcccccgacgcccccctgaagatcgccgacttcggcctgagcaagatcgtggagcaccaggtgctgatgaagaccgtgtgcggcacccccggctactgcgcccccgagatcctgagaggctgcgcctacggccccgaggtggacatgtggagcgtgggcatcatcacctacatcctgctgtgcggcttcgagcccttctacgacgagagaggcgaccagttcatgttcagaagaatcctgaactgcgagtactacttcatcagcccctggtgggacgaggtgagcctgaacgccaaggacctggtgagaaagctgatcgtgctggaccccaagaagagactgaccaccttccaggccctgcagcacccctgggtgaccggcaaggccgccaacttcgtgcacatggacaccgcccagaagaagctgcaggagttcaacgccagaagaaagctgaaggccgccgtgaaggccgtggtggccagcagcagactgggcagcgccagcagcagccacggcagcatccaggagagccacaaggccagcagagaccccagccccatccaggacggcaacgaggacatgaaggccatccccgagggcgagaagatccagggcgacggcgcccaggccgccgtgaagggcgcccaggccgagctgatgaaggtgcaggccctggagaaggtgaagggcgccgacatcaacgccgaggaggcccccaagatggtgcccaaggccgtggaggacggcatcaaggtggccgacctggagctggaggagggcctggccgaggagaagctgaagaccgtggaggaggccgccgcccccagagagggccagggcagcagcgccgtgggcttcgaggtgccccagcaggacgtgatcctgcccgagtactag

SEQ ID NO: 120645 - DNA, 429 bp, Artificial Sequence
  derived and/or modified sequence
atgctgaaggtgaccgtgcccagctgcagcgccagcagctgcagcagcgtgaccgccagcgccgcccccggcaccgccagcctggtgcccgactactggatcgacggcagcaacagagacgccctgagcgacttcttcgaggtggagagcgagctgggcagaggcgccaccagcatcgtgtacagatgcaagcagaagggcacccagaagccctacgccctgaaggtgctgaagaagaccgtggacaagaagatcgtgagaaccgagatcggcgtgctgctgagactgagccaccccaacatcatcaagctgaaggagatcttcgagacccccaccgagatcagcctggtgctggagctggtgaccggcggcgagctgttcgacagaatcgtggagaagggctactacagcgagagagacgccgcctag

SEQ ID NO: 120646 - protein, 296 aa, Artificial Sequence
  derived and/or modified sequence
MESMAVATDGGERPGVPAGSGLSASQRRAELRRRKLLMNSEQRINRIMGFHRPGSGAEEESQTKSKQQDSDKLNSLSVPSVSKRVVLGDSVSTGTTDQQGGVAEVKGTQLGDKLDSFIKPPECSSDVNLELRQRNRGDLTADSVQRGSRHGLEQYLSRFEEAMKLRKQLISEKPSQEDGNTTEEFDSFRIFRLVGCALLALGVRAFVCKYLSIFAPFLTLQLAYMGLYKYFPKSEKKIKTTVLTAALLLSGIPAEVINRSMDTYSKMGEVFTDLCVYFFTFIFCHELLDYWGSEVP

SEQ ID NO: 120647 - DNA, 891 bp, Artificial Sequence
  derived and/or modified sequence
atggaatctatggctgtggccacagacggcggtgagcggccgggggtccccgctggctctggcctgtccgctagccaaagacgagctgagctgaggcgcaggaagttgctcatgaattccgaacagagaataaatcggattatgggctttcaccgccctgggtcgggggcggaagaagaatctcagacaaagagcaagcagcaagattccgacaagctgaattctctgtcggtaccaagtgtgagcaagcgggtcgtcctaggcgacagcgtctccactggcacaacagaccagcagggaggcgtggccgaggtgaaaggcactcaattgggcgacaaactagattcctttattaaaccgcccgagtgctccagtgacgtgaacctcgaattgcggcagcgcaatcggggggatttgactgccgattccgtacagagaggcagtcgccacggactggagcaatacctaagtaggttcgaagaggctatgaaactcaggaagcagctgatctcagagaagccctctcaggaagatgggaatactacagaagaatttgattctttccggatcttccggttggtgggttgtgctctccttgcactaggggttagggccttcgtttgtaagtaccttagtatattcgctccgtttctgaccctccagctggcttatatggggctgtataagtattttccaaagtctgagaaaaagatcaagacaactgtccttacagccgcactcttactgagtggcatccccgccgaagttatcaatcggtcgatggacacctactccaagatgggcgaggtcttcactgacctttgtgtctacttcttcacctttatattctgtcacgagctgcttgattattggggttccgaagtgccttag

SEQ ID NO: 120648 - DNA, 891 bp, Artificial Sequence
  derived and/or modified sequence
atggagagcatggctgtggccacagatggaggagagaggcctggggtgcctgctggcagcggcctgagcgccagccagaggagagctgagctgcggcggaggaagctgctgatgaacagcgagcagaggatcaaccgcatcatgggcttccacaggcctggcagcggggctgaggaggagagccagaccaagagcaagcagcaggacagcgacaagctgaacagcctgtctgtgcccagcgtgtccaagagggtggtgctgggggacagcgtgtccacaggcaccacagaccagcagggcggcgtggccgaggtgaagggcacccagctgggggacaagctggacagcttcatcaagcccccagagtgcagcagtgatgtgaacctggagctgcggcagaggaacagaggagacctgacagctgacagcgtgcagaggggcagccgccacggcctggagcagtacctgagcagatttgaggaggccatgaagctgaggaagcagctgatcagcgagaagcccagccaggaggatggcaacaccacagaggagtttgacagcttccgcatcttccggctggtgggctgtgccctgctggccctgggcgtgcgggcctttgtgtgcaagtacctgagcatctttgcccccttcctgaccctgcagctggcctacatgggcctgtacaagtacttccccaagtctgagaagaagatcaagaccaccgtgctgacagctgccctgctgctgagcggcatcccagctgaggtgatcaacagatccatggacacctacagcaagatgggagaggtgttcacagacctgtgtgtgtacttcttcaccttcatcttctgccacgagctgctggactactggggcagcgaggtgccctag

SEQ ID NO: 120649 - DNA, 891 bp, Artificial Sequence
  derived and/or modified sequence
atggagagcatggccgtggccaccgacggcggcgagcggcccggcgtgcctgccgggagcggactgagtgcctctcagcggcgcgcggagttaagaagaaggaagcttctgatgaattcggaacagcgaataaacaggatcatgggattccacagacccggttctggggccgaagaagagagtcagacaaaatcaaaacagcaagacagcgacaaattgaattcattatctgtgccatcagtgagcaagcgagtggtgctgggggattcagtttcaacgggcactacagatcagcaggggggtgtcgctgaggtgaagggcacacagctgggagataagctggattcattcattaagcctcccgaatgtagtagtgatgtgaatctggagctacgccagcgtaataggggcgatctgacagcggatagtgtacaaaggggttccaggcatgggctggaacagtatctcagtcgcttcgaggaagcgatgaagctgcgaaaacagctgatttccgagaagccaagccaggaggacggcaacacgaccgaggagtttgattccttcaggatctttcgtctggtagggtgtgccctgctggcccttggagttagagcctttgtgtgcaagtacctctccattttcgcccctttccttacgttgcagctggcgtacatggggctgtacaagtatttcccaaaatccgagaagaagattaagacgacagtccttaccgcagccctcttgctgagtggcatccctgccgaggtgatcaatcgaagcatggacacttattccaaaatgggcgaggtgttcaccgatctgtgcgtgtacttttttacatttattttctgccatgagcttcttgactactgggggagcgaggtcccttag

SEQ ID NO: 120650 - DNA, 891 bp, Artificial Sequence
  derived and/or modified sequence
atggagagtatggccgtggctacagatggaggtgaacgtccaggcgtgcccgctgggtctggcctgtcagcatcccaacgcagggctgagttacgtcggcgtaagcttctgatgaactccgaacagcgtataaatcgtattatgggatttcacaggccagggtcaggagcggaagaggaatcacagactaaaagtaagcagcaggattctgataaactgaatagcctctctgtgccttccgtgagcaagcgagtggtattgggcgacagcgtttctaccggcaccaccgatcagcagggcggtgttgctgaggtgaaaggtactcagttgggcgacaaacttgactcctttataaaaccgcctgaatgtagctccgatgtgaaccttgaacttagacagagaaaccgcggagacctgaccgccgactccgtacaacggggtagcaggcatggcttggaacagtatctatctaggtttgaggaggccatgaaactccgaaaacagcttattagcgagaagccatctcaggaggacggcaacactactgaggaattcgattcctttagaattttcagattagtgggctgtgctctgcttgcgttgggtgtgcgagcatttgtttgcaaatatctctccatcttcgcgccttttctgactctccagctcgcttatatgggactctataagtacttccccaagagcgaaaaaaaaatcaagaccaccgtcctgaccgctgccctgctgctctcgggcattcccgctgaagtgatcaatcgatcaatggacacctactccaagatgggggaggtcttcacggacctgtgtgtttactttttcaccttcatcttttgtcacgagctgctcgactactgggggagcgaagttccctag

SEQ ID NO: 120651 - DNA, 2218 bp, Artificial Sequence
  derived and/or modified sequence
gggggcgggtctatagtgggaaggggacgcgcgccctgcggcccggcctctagtcatcgccctcgcagcggcggccaacatcaccgccactgccacccctcccagactgtggacgggaggatggagtcgatggccgtcgctaccgacggcggggagaggccgggggtcccagcgggctcaggtctgtcggcttcccagcgtcgggcggagctgcgtcggagaaagctgctcatgaactcggaacagcgcatcaaccggatcatgggctttcacaggcccgggagcggcgcggaagaagaaagtcaaacaaaatcaaagcagcaggacagtgataaactgaactccctcagcgttccttccgtttcaaagcgagtagtgctgggtgattcagtcagtacaggaacaactgaccagcagggtggtgtggccgaggtaaaggggacccaactgggagacaaattggactcgttcattaaaccacctgagtgcagtagtgatgtcaaccttgagctccggcagcggaacagaggggacctgacagcggactcggtccagaggggttcccgccatggcctagagcagtacctttccagattcgaagaagcaatgaagctaaggaaacagctgattagtgaaaaacccagtcaagaggatggaaatacaacagaagaatttgactcttttcgaatatttagattggtgggatgtgctcttcttgctcttggagtcagagcttttgtttgcaaatacttgtccatatttgctccatttcttactttacaacttgcgtacatgggattatacaaatattttcccaagagtgaaaagaagataaagacaacagtactaacagctgcacttctattgtcgggaattcctgccgaagtgataaatcgatcaatggatacctatagcaaaatgggcgaagtcttcacagatctctgtgtctactttttcacttttatcttttgtcatgaactgcttgattattggggctctgaagtaccatgaagcctgtagaactgagaaggagaagcttacaaaaaaaaaaaaatcctcttctatattgcagtgtctctaaaggaggcaaattggtttacaccttcatgtaattcttttactttaggggttgtaaagctactttattagatatagaatggcagattctctgatttaaaagggctgagtttgtattattactgatatgaagaatagagtaccaatgtcattaattgatttttcttgttaatcagaattcctattctgtacctttcctctaacttctcagatttgtaattcttcttttgggagctgagctagtgcttttaggagaacagataaatgtggtctcagccagccctagagactgcttcttgtgtttgtgtcattctgtcctgagaaatgaagtcatctgaaaaataaaatgaaagaaactgaattgtctaatgttaactctgcacattgtaacttttcttgttgagttagtatcttaatttttactccagcacaagtatttaatcaaagaaaagattcatacatgtgaaattggaaggtatttataaaatttttattgctgtataccaaactcagaattggaactttttacatttgagtttcactttttagaagtatgttttaagcaagcaaaaacaaaatgggatgtgaagaattgaggcatgcaacccaatagcataaatgtcctttttccccccaaatatggtctagatgagttattataaacattgtttttatttttttgagacagagtttcgctcttgttgcccaggctagagtgcaatggcgccatctcggctcaccgcaacctccaccttcctggttcaagggattctcctgcctcagcctcccaagtagctgggattacaggcatgcaccaccacgcccagctaatttttatattctttagtaaagacagggtttctccatgttggtcaggctggtctcgaacttctgacctcaggtgatctgcccacctcggcctcccaaagtgctgggattacaggcgtgagccactgcacctggccttataaatatccttttaactaactcagtaactgccatattttgttgggttgtcttcttaaaagaatataagactaaagtgttaatgtcacttggtgttacatttccttacagatttttgtatagtctaatttggttaatccttgtgacattaaaaacacatacactttttaaaaaa

SEQ ID NO: 120652 - DNA, 891 bp, Artificial Sequence
  derived and/or modified sequence
atggagagcatggccgtggccaccgacggcggcgagagacccggcgtgcccgccggcagcggcctgagcgccagccagagaagagccgagctgagaagaagaaagctgctgatgaacagcgagcagagaatcaacagaatcatgggcttccacagacccggcagcggcgccgaggaggagagccagaccaagagcaagcagcaggacagcgacaagctgaacagcctgagcgtgcccagcgtgagcaagagagtggtgctgggcgacagcgtgagcaccggcaccaccgaccagcagggcggcgtggccgaggtgaagggcacccagctgggcgacaagctggacagcttcatcaagccccccgagtgcagcagcgacgtgaacctggagctgagacagagaaacagaggcgacctgaccgccgacagcgtgcagagaggcagcagacacggcctggagcagtacctgagcagattcgaggaggccatgaagctgagaaagcagctgatcagcgagaagcccagccaggaggacggcaacaccaccgaggagttcgacagcttcagaatcttcagactggtgggctgcgccctgctggccctgggcgtgagagccttcgtgtgcaagtacctgagcatcttcgcccccttcctgaccctgcagctggcctacatgggcctgtacaagtacttccccaagagcgagaagaagatcaagaccaccgtgctgaccgccgccctgctgctgagcggcatccccgccgaggtgatcaacagaagcatggacacctacagcaagatgggcgaggtgttcaccgacctgtgcgtgtacttcttcaccttcatcttctgccacgagctgctggactactggggcagcgaggtgccctag

SEQ ID NO: 120653 - protein, 700 aa, Artificial Sequence
  derived and/or modified sequence
MAGIAAKLAKDREAAEGLGSHDRAIKYLNQDYEALRNECLEAGTLFQDPSFPAIPSALGFKELGPYSSKTRGIEWKRPTEICADPQFIIGGATRTDICQGALGDCWLLAAIASLTLNEEILARVVPLNQSFQENYAGIFHFQFWQYGEWVEVVVDDRLPTKDGELLFVHSAEGSEFWSALLEKAYAKINGCYEALSGGATTEGFEDFTGGIAEWYELKKPPPNLFKIIQKALQKGSLLGCSIDITSAADSEAITFQKLVKGHAYSVTGAEEVESNGSLQKLIRIRNPWGEVEWTGRWNDNCPSWNTIDPEERERLTRRHEDGEFWMSFSDFLRHYSRLEICNLTPDTLTSDTYKKWKLTKMDGNWRRGSTAGGCRNYPNTFWMNPQYLIKLEEEDEDEEDGESGCTFLVGLIQKHRRRQRKMGEDMHTIGFGIYEVPEELSGQTNIHLSKNFFLTNRARERSDTFINLREVLNRFKLPPGEYILVPSTFEPNKDGDFCIRVFSEKKADYQAVDDEIEANLEEFDISEDDIDDGFRRLFAQLAGEDAEISAFELQTILRRVLAKRQDIKSDGFSIETCKIMVDMLDSDGSGKLGLKEFYILWTKIQKYQKIYREIDVDRSGTMNSYEMRKALEEAGFKMPCQLHQVIVARFADDQLIIDFDNFVRCLVRLETLFKIFKQLDPENTGTIELDLISWLCFSVL

SEQ ID NO: 120654 - protein, 729 aa, Artificial Sequence
  derived and/or modified sequence
APGPGRAPAERSAESPRPFSAQYGRRDRSMAGIAAKLAKDREAAEGLGSHDRAIKYLNQDYEALRNECLEAGTLFQDPSFPAIPSALGFKELGPYSSKTRGIEWKRPTEICADPQFIIGGATRTDICQGALGDCWLLAAIASLTLNEEILARVVPLNQSFQENYAGIFHFQFWQYGEWVEVVVDDRLPTKDGELLFVHSAEGSEFWSALLEKAYAKINGCYEALSGGATTEGFEDFTGGIAEWYELKKPPPNLFKIIQKALQKGSLLGCSIDITSAADSEAITFQKLVKGHAYSVTGAEEVESNGSLQKLIRIRNPWGEVEWTGRWNDNCPSWNTIDPEERERLTRRHEDGEFWMSFSDFLRHYSRLEICNLTPDTLTSDTYKKWKLTKMDGNWRRGSTAGGCRNYPNTFWMNPQYLIKLEEEDEDEEDGESGCTFLVGLIQKHRRRQRKMGEDMHTIGFGIYEVHPQLSGQTNIHLSKNFFLTNRARERSDTFINLREVLNRFKLPPGEYILVPSTFEPNKDGDFCIRVFSEKKADYQAVDDEIEANLEEFDISEDDIDDGFRRLFAQLAGEDAEISAFELQTILRRVLAKRQDIKSDGFSIETCKIMVDMLDSDGSGKLGLKEFYILWTKIQKYQKIYREIDVDRSGTMNSYEMRKALEEAGFKMPCQLHQVIVARFADDQLIIDFDNFVRCLVRLETLFKIFKQLDPENTGTIELDLISWLCFSVL

SEQ ID NO: 120655 - protein, 622 aa, Artificial Sequence
  derived and/or modified sequence
MEICADPQFIIGGATRTDICQGALGDCWLLAAIASLTLNEEILARVVPLNQSFQENYAGIFHFQFWQYGEWVEVVVDDRLPTKDGELLFVHSAEGSEFWSALLEKAYAKINGCYEALSGGATTEGFEDFTGGIAEWYELKKPPPNLFKIIQKALQKGSLLGCSIDITSAADSEAITFQKLVKGHAYSVTGAEEVESNGSLQKLIRIRNPWGEVEWTGRWNDNCPSWNTIDPEERERLTRRHEDGEFWMSFSDFLRHYSRLEICNLTPDTLTSDTYKKWKLTKMDGNWRRGSTAGGCRNYPNTFWMNPQYLIKLEEEDEDEEDGESGCTFLVGLIQKHRRRQRKMGEDMHTIGFGIYEVPEELSGQTNIHLSKNFFLTNRARERSDTFINLREVLNRFKLPPGEYILVPSTFEPNKDGDFCIRVFSEKKADYQAVDDEIEANLEEFDISEDDIDDGFRRLFAQLAGEDAEISAFELQTILRRVLAKRQDIKSDGFSIETCKIMVDMLDSDGSGKLGLKEFYILWTKIQKYQKIYREIDVDRSGTMNSYEMRKALEEAGFKMPCQLHQVIVARFADDQLIIDFDNFVRCLVRLETLFKIFKQLDPENTGTIELDLISWLCFSVL

SEQ ID NO: 120656 - DNA, 2103 bp, Artificial Sequence
  derived and/or modified sequence
atggctggcattgcagccaaactggctaaagatcgggaagccgccgaaggcctggggtctcacgacagagccattaaatacctgaaccaagactacgaggcattgagaaatgaatgtctcgaagccggaactcttttccaggacccatcttttcccgccattccctctgcattgggattcaaggagctggggccgtactcttcaaaaactagaggtatcgagtggaaacgccccactgagatttgtgctgacccccagtttatcatcggaggtgccacaaggactgatatatgtcagggcgccttaggggattgttggctgctcgcagccattgccagcctgaccctcaatgaagagatccttgcacgagtggtgcctctcaatcagagttttcaggaaaattacgcaggcatttttcactttcaattctggcagtatggagagtgggttgaagtggttgttgatgatcgactgccgactaaagatggcgagcttctgttcgtacattctgccgaaggatccgaattttggagtgccctgctggagaaggcttatgcaaagattaatggttgctatgaagccctcagtggcggtgcgacgactgaaggatttgaagatttcaccggaggcatcgccgagtggtacgagctgaaaaaaccacccccaaacttgttcaagatcatacaaaaggctctccagaaaggcagcctgttaggctgttccatagatattacttcagcagctgattcagaagccattacatttcagaagctggtcaagggccatgcctatagcgtaaccggtgcagaggaggtggagagtaacggctccctacagaagcttatcaggatccggaatccatggggtgaggttgaatggactggcagatggaatgataactgccccagctggaataccatcgatccagaggaacgcgagcgcctaacccggaggcacgaggatggggagttctggatgagcttcagcgacttcttacgccactattctcggctagagatctgcaatcttacacctgataccctcacgtctgacacatacaagaagtggaaactcaccaagatggacggtaattggcgacgtgggagcaccgcagggggctgcagaaactatcccaacacgttttggatgaaccctcagtatctcattaaattagaggaagaggacgaagatgaagaggacggggagagtggatgtacctttctggtcggcttgatccaaaagcacagaagacgccaacgcaagatgggggaggatatgcacacaatcgggtttgggatctatgaagtccctgaggagttgtcaggacagaccaatatccatttatctaaaaacttctttcttaccaaccgagccagggagcggtccgatacttttatcaacctccgggaggtgctcaacaggttcaagctgcctcctggcgagtacatcctggtcccttccacattcgagccaaataaggacggtgacttttgcatcagagtgttctctgaaaaaaaggcagactatcaggcagtcgacgatgagattgaggccaacctggaagaatttgacatatccgaagatgatatcgacgacgggtttagaagactgtttgcccagctggctggcgaagatgccgagataagcgcctttgaactacagactatactgcggcgggtactggccaaaaggcaagacatcaagtccgacgggttttctatagagacctgcaaaatcatggtggacatgctcgattccgatggatcgggcaaactcggcctgaaagagttctatatcctgtggacaaagatccagaagtaccagaagatctacagagaaattgatgtagaccgcagcggaaccatgaactcttatgaaatgcgcaaagcattggaggaggccgggttcaaaatgccttgtcagttacatcaggtgattgtggctcgttttgctgatgaccaactaattatcgattttgacaatttcgtcaggtgcctagtgagactggagaccctgtttaagattttcaaacagctcgacccggaaaacacaggaactattgaactcgaccttatctcttggttgtgcttcagcgtcttgtag

SEQ ID NO: 120657 - DNA, 2190 bp, Artificial Sequence
  derived and/or modified sequence
gccccaggcccaggcagagccccagccgagcgcagtgcagaatccccaaggcccttctcagctcagtatggcagaagggacagatccatggcgggaattgcggccaagctggctaaagatcgcgaagccgcagagggcctggggtctcacgatagggccatcaagtacctgaaccaggattacgaagcattgagaaacgagtgcctagaggcaggaacactgttccaagacccctctttcccagctatcccatcggctctgggctttaaagaacttggcccttacagttctaagactcgcggcatcgaatggaagaggccaaccgagatttgtgccgatcctcagtttatcatcggcggagccacaagaacagatatttgtcaaggcgctctgggggattgttggttattggccgctattgcttcgcttaccttaaatgaagaaattctggctcgtgtggtaccactgaaccaaagctttcaagaaaattatgcaggcattttccactttcaattctggcagtatggagaatgggtggaggttgttgtggatgatcgtctcccaacaaaggacggagaactcttatttgttcattctgctgagggcagcgagttttggtcagccctgcttgaaaaggcgtatgcgaagataaacgggtgttacgaggccctgtccggtggcgctactacggagggttttgaggacttcaccggtgggatcgccgagtggtatgaattgaagaagcctccccccaacctattcaagattatccaaaaggctctgcagaagggttctttgctcggatgtagtatagacattacaagcgccgccgacagcgaggccattacattccagaagctcgtaaaagggcatgcgtactccgtgaccggggccgaggaagtggagtctaacggttcccttcagaagctgatccggattcggaacccatggggagaagtggaatggacagggagatggaacgacaattgcccgtcttggaatacaatcgacccggaagagcgagagaggctcactcgtcgacacgaggatggcgaattttggatgtcctttagtgatttcctgcggcactatagtagactcgagatctgcaatctgaccccagacaccttgacaagtgacacttataagaaatggaagctcacgaaaatggatgggaattggcggcgcggaagtacagctggcgggtgccgtaattaccctaacaccttctggatgaatccgcaatatctgatcaaactggaggaagaggatgaagacgaggaagacggcgagtctggctgtacatttttggttggactcattcagaaacaccgcagaaggcagcggaagatgggcgaggacatgcacacaatcggctttggcatctacgaagttcatccacagctttcagggcagacaaatatccacttgtcaaagaacttcttcctgaccaacagggcgcgtgagagaagtgatacctttattaacctgagggaagtgcttaaccgcttcaaactgcctcctggagagtacattcttgtaccaagcacattcgagcctaacaaggatggcgatttctgcatcagggttttcagcgagaaaaaggccgactatcaagctgtggacgacgagatcgaggccaatctcgaagaatttgacatcagcgaagatgacattgatgacggttttcgccgattgttcgctcagcttgccggtgaggacgccgaaatttcagccttcgaacttcaaacaatcctgagacgagtgctagctaagaggcaggacatcaaatcagacggttttagcatcgagacctgcaagatcatggtagacatgctggactctgatggctcggggaagctcggacttaaagagttttatatactttggactaagattcaaaaataccagaaaatataccgcgaaattgatgtggatcgtagcgggaccatgaactcttatgaaatgaggaaagccctggaagaggcaggattcaaaatgccatgtcaacttcaccaggttatagtggcaaggtttgcagatgatcaactaatcatcgatttcgacaatttcgtgaggtgtctggtgcggttagaaacattgttcaagatattcaagcaactggacccagagaatactggaacgatcgagctggatctaatttcctggctatgctttagcgttctgtag

SEQ ID NO: 120658 - DNA, 2103 bp, Artificial Sequence
  derived and/or modified sequence
atggccggcattgctgccaagctggccaaggaccgggaggccgctgagggcctgggcagccatgaccgggccatcaagtacctgaaccaggactatgaggccctgagaaatgaatgtctggaggccggcaccctcttccaggaccccagcttccctgccatccccagcgccctgggcttcaaggagctgggcccctacagcagcaagacccggggcatcgagtggaagaggcccacagagatctgtgccgacccccagttcatcattggaggagccaccaggacagacatctgccagggcgccctgggggactgctggctgctggccgccatcgccagcctgaccctgaatgaggagatcctggcccgggtggtgcccctgaaccagagcttccaggagaactatgccggcatcttccacttccagttctggcagtacggggagtgggtggaggtggtggtggatgaccggctgcccaccaaggatggagagctgctgtttgtgcacagcgctgagggcagcgagttctggagcgccctgctggagaaggcctatgccaagatcaatggctgctatgaggccctgagcggcggggccaccacagagggctttgaggacttcaccggcggcattgctgagtggtatgagctgaagaagcccccacccaacctcttcaagatcatccagaaggccctgcagaagggcagcctgctgggctgcagcattgacatcaccagcgctgctgacagcgaggccatcaccttccagaagctggtgaagggccacgcctacagcgtgactggagctgaggaggtggagagcaatggcagcctgcagaagctgatccgcatccggaacccctggggcgaggtggagtggacaggccgctggaatgacaactgccccagctggaacaccattgatcctgaggagcgggagcggctgaccaggagacatgaagatggagagttctggatgtccttcagtgacttcctgcggcactacagccggctggagatctgcaacctgaccccagacaccctgaccagtgacacctacaagaagtggaagctgaccaagatggatggcaactggaggcggggcagcacagctgggggctgcaggaactaccccaacaccttctggatgaacccccagtacctgatcaagctggaggaggaggatgaagatgaagaagatggagagagcggctgcaccttcctggtgggcctcatccagaagcacagaagacggcagaggaagatgggagaggacatgcacaccatcggcttcggcatctatgaggtgcctgaggagctgagcggccagaccaacatccacctgagcaagaacttcttcctgaccaacagagcccgggagaggagtgacaccttcatcaacctgcgggaggtgctgaaccgcttcaagctgcccccaggagagtacatcctggtgcccagcacctttgagcccaacaaggatggagacttctgcatccgggtcttcagcgagaagaaggctgactaccaggccgtggatgatgaaattgaggccaacctggaggagtttgacatcagtgaagatgacattgatgatggcttcagaagactctttgcccagctggccggggaggatgctgagatcagcgcctttgagctgcagaccatcctgcggcgggtgctggccaagaggcaggacatcaagagtgatggcttcagcattgagacctgcaagatcatggtggacatgctggacagtgatggcagcggcaagctgggcctgaaggagttctacatcctgtggaccaagatccagaagtaccagaagatctaccgggagattgatgtggacagaagtggcaccatgaacagctatgagatgaggaaggccctggaggaggccggcttcaagatgccctgccagctgcaccaggtgattgtggccaggtttgctgatgaccagctgatcatcgactttgacaactttgtgcgctgcctggtgcggctggagaccctcttcaagatcttcaagcagctggaccctgagaacacaggcaccatcgagctggacctgatctcctggctgtgcttctctgtgctgtag

SEQ ID NO: 120659 - DNA, 2190 bp, Artificial Sequence
  derived and/or modified sequence
gcccctggccctggccgggccccagctgagaggtctgctgagagcccccggcccttcagcgcccagtatggaagaagagaccgctccatggccggcattgctgccaagctggccaaggaccgggaggccgctgagggcctgggcagccatgaccgggccatcaagtacctgaaccaggactatgaggccctgagaaatgaatgtctggaggccggcaccctcttccaggaccccagcttccctgccatccccagcgccctgggcttcaaggagctgggcccctacagcagcaagacccggggcatcgagtggaagaggcccacagagatctgtgccgacccccagttcatcatcggcggggccaccaggacagacatctgccagggcgccctgggggactgctggctgctggccgccatcgccagcctgaccctgaatgaggagatcctggcccgggtggtgcccctgaaccagagcttccaggagaactatgccggcatcttccacttccagttctggcagtatggagagtgggtggaggtggtggtggatgaccggctgcccaccaaggatggagagctgctgtttgtgcacagcgctgagggcagcgagttctggagcgccctgctggagaaggcctatgccaagatcaatggctgctatgaggccctgtctggaggagccaccacagagggctttgaggacttcaccggcggcattgctgagtggtatgagctgaagaagcccccacccaacctcttcaagatcatccagaaggccctgcagaagggcagcctgctgggctgcagcattgacatcaccagcgctgctgacagcgaggccatcaccttccagaagctggtgaagggccacgcctacagcgtgactggagctgaggaggtggagagcaatggcagcctgcagaagctgatccgcatccggaacccctggggcgaggtggagtggacaggccgctggaatgacaactgccccagctggaacaccatcgaccctgaggagcgggagcggctgaccaggagacatgaagatggagagttctggatgtccttcagtgacttcctgcggcactacagccggctggagatctgcaacctgaccccagacaccctgaccagtgacacctacaagaagtggaagctgaccaagatggatggcaactggaggcggggcagcacagctgggggctgcaggaactaccccaacaccttctggatgaacccccagtacctgatcaagctggaggaggaggatgaagatgaggaggatggagagagcggctgcaccttcctggtgggcctcatccagaagcacagaagacggcagaggaagatgggagaggacatgcacaccatcggcttcggcatctatgaggtgcacccccagctgagcggccagaccaacatccacctgagcaagaacttcttcctgaccaacagagcccgggagaggagtgacaccttcatcaacctgcgggaggtgctgaaccgcttcaagctgcccccaggagagtacatcctggtgcccagcacctttgagcccaacaaggatggagacttctgcatccgggtcttcagcgagaagaaggctgactaccaggccgtggatgatgaaattgaggccaacctggaggagtttgacatcagtgaagatgacattgatgatggcttccggcggctgtttgcccagctggccggagaagatgctgagatcagcgcctttgagctgcagaccatcctgcggcgggtgctggccaagaggcaggacatcaagagtgatggcttcagcattgagacctgcaagatcatggtggacatgctggacagtgatggcagcggcaagctgggcctgaaggagttctacatcctgtggaccaagatccagaagtaccagaagatctaccgggagattgatgtggacaggagcggcaccatgaacagctatgagatgaggaaggccctggaggaggccggcttcaagatgccctgccagctgcaccaggtgattgtggccaggtttgctgatgaccagctgatcatcgactttgacaactttgtgcgctgcctggtgcggctggagaccctcttcaagatcttcaagcagctggaccctgaaaatacaggcaccatcgagctggacctgatctcctggctgtgcttctctgtgctgtag

SEQ ID NO: 120660 - DNA, 2103 bp, Artificial Sequence
  derived and/or modified sequence
atggccggcatcgccgccaagctggccaaggaccgggaggccgccgagggcctaggatcacatgacagagcaattaaatacttgaaccaggattacgaggccctacggaacgaatgcctggaggccggcacattattccaggacccatccttccctgcaattcccagcgcattgggattcaaagaactgggtccatactcatccaaaacccgaggcatcgagtggaaacggcctactgagatctgtgctgaccctcagtttattatcggcggagcaacacgtacagatatttgccagggagcactgggcgactgttggctgttagccgctattgcttctctgactctcaatgaggaaatcctggcccgcgtagtgcctcttaaccagtcattccaagagaactacgccggaatcttccacttccagttctggcaatatggagagtgggtggaggtggtcgttgatgatcgactaccgaccaaagacggagagctgcttttcgtgcactccgcggagggatccgaattctggagcgcacttttggagaaagcttacgccaagatcaatggctgttacgaggccttatcagggggggccactactgagggctttgaagactttaccgggggcatagcagaatggtacgagttgaaaaaaccccctccaaacctcttcaaaatcatacagaaggctttgcagaagggatctctacttggttgcagcatagatataacgagcgccgccgacagcgaagcgataacattccagaaattagtcaaggggcatgcgtatagtgtcactggggcagaagaagtggaatcgaacggctccctgcagaaactgatccgaatcagaaatccgtggggcgaagtagaatggaccggcagatggaatgataactgtccctcttggaatacaatcgatcctgaggagagagaacgcctaacacgtcggcatgaagacggggagttctggatgtcattcagcgacttcttgaggcattactctaggctggaaatttgcaatttgactcccgacaccctgacaagcgacacttataaaaagtggaagctcaccaaaatggatggcaattggcggcgcggaagcaccgctggcgggtgtaggaactatcctaatacattctggatgaatcctcagtacttgatcaagcttgaagaagaggatgaggatgaggaggatggggagagcgggtgtacctttttggtgggattgatccagaagcacagacgacggcagcggaaaatgggagaagatatgcacacaatcgggttcggcatctacgaggtaccagaggaactgagcggtcagactaatatacacttaagtaaaaacttcttcctgacgaacagggcacgcgaacgctctgatacattcattaatctgcgcgaagttcttaaccgatttaaactccctcctggggaatacattcttgtccccagtacgttcgaaccaaacaaggacggggacttctgtattcgcgttttttctgaaaagaaggccgactatcaggcggtggacgatgaaatcgaagctaatctggaagagtttgacattagcgaggacgatatcgacgatgggttccggaggctcttcgcgcagctggccggcgaagatgccgagatttccgcttttgagctgcaaactatcttgcgcagggtacttgccaaaagacaggacatcaagtctgatggatttagtattgaaacctgcaaaataatggtcgatatgctggatagcgacggaagcggcaaattgggtctcaaggagttttatatcctgtggacgaagatccagaaatatcagaagatctatcgcgaaatcgacgtggaccgatccgggaccatgaattcttatgaaatgcgaaaggccctcgaagaggcgggttttaagatgccatgccagttgcaccaagtgattgtagctcgctttgccgatgatcagctgattatcgatttcgataatttcgttcggtgcttagtgcggctagaaaccctctttaagatttttaagcagctcgaccccgaaaatacgggcaccattgaacttgacttgatttcatggctttgttttagtgtgctttag

SEQ ID NO: 120661 - DNA, 2190 bp, Artificial Sequence
  derived and/or modified sequence
gcccccggccccggccgggcccccgccgagcggagcgccgagagcccccgaccattttccgctcagtacggcagacgggaccgctccatggcaggtatcgccgcaaagttagcaaaagatcgggaagccgcagagggtctgggcagccacgacagggccatcaaatacttaaaccaagattatgaagctttgcgcaacgaatgcctcgaggccggtacactgttccaagatccaagctttccggccatccctagcgcccttggcttcaaagagttaggcccttactcctcaaaaacacgcgggatcgagtggaaacggcccaccgaaatctgtgctgatccccagtttataatagggggagctacgcgcaccgatatctgtcagggggccctgggggattgctggctgctggcagccatagctagtctgactttgaacgaggagattttggcacgagtcgtgcccctcaatcagtctttccaagaaaattatgccgggatcttccactttcagttctggcagtatggggaatgggtagaagtagtcgttgatgaccggctgcctacaaaagacggagaactgctgttcgttcatagcgcagaaggatcagaattttggtctgctctcctggagaaggcctacgcgaagatcaatggctgctatgaggccctgtccggcggagcgaccactgaagggtttgaagactttactggagggatcgcagagtggtacgaacttaaaaaaccgccacccaacctatttaagatcatccaaaaggccttacagaaaggctcactgctaggctgtagtattgacataacgtccgctgcagattctgaagcaataactttccaaaaattagtgaagggacatgcctatagcgttacaggagctgaggaggttgagtccaatgggtccctgcaaaagctaatcagaataagaaacccttggggggaggtggagtggactggtcgctggaacgacaattgtccttcatggaacacaatcgatcctgaagagcgcgagcggctgacccgtaggcacgaggatggtgagttctggatgtcattcagtgattttctgcgccattattcccgcctagaaatctgcaaccttacgcctgacacattgactagcgacacgtataaaaagtggaaactgaccaagatggatggaaactggcgcagaggatctacagccgggggatgtagaaactatcccaacaccttctggatgaacccccagtatcttatcaaactggaggaagaggacgaagacgaagaagacggtgaaagcggatgtaccttcctagttgggctaatccagaagcatcgacggcgccagcgaaagatgggagaagatatgcacactatcggattcggaatatatgaagttcacccccagctgtcaggccaaactaacatacacctgagcaaaaatttttttcttaccaaccgtgctcgtgagaggagtgataccttcattaacctgagagaagttctgaacagattcaagctgccccccggtgaatatatcctggtgcctagcaccttcgaacccaacaaagacggggacttttgtattagggtcttttccgagaaaaaagccgattatcaggctgtcgacgatgaaattgaggctaacttggaagaatttgatatcagcgaagacgacatagacgatggttttcgaaggctgttcgcccagcttgccggcgaggatgcagaaatcagcgcattcgagcttcagactatcctgcggagggtactggcgaagagacaagatatcaagagtgacggtttctctattgagacttgcaaaataatggtcgacatgctggatagcgatggcagcggaaaactgggtttgaaggaattctatatcctttggacaaaaattcagaaataccagaagatctatcgcgagatcgacgtggatagatcagggacaatgaacagctatgagatgagaaaagccctcgaggaggccggatttaagatgccatgccagctacaccaagtgatagttgccaggttcgctgacgaccaacttattatcgacttcgataactttgtccgatgtctggttaggctggagacattgtttaagatatttaagcagttagaccccgaaaacaccggtacaatcgagttggacctgatctcatggttatgtttttccgtgctttag

SEQ ID NO: 120662 - DNA, 2103 bp, Artificial Sequence
  derived and/or modified sequence
atggcaggcattgctgcaaaacttgccaaagatcgcgaggccgctgaaggccttggatcacacgatagggccatcaagtacttgaaccaggattacgaagcccttcggaatgagtgcttggaggctggcacgctgttccaagatccctcttttcccgctatccctagtgcgctagggtttaaagagcttgggccatattcatccaagacaagaggcatcgagtggaaacgccctacagagatctgcgcagatccacagttcattatcggcggagcaacgaggaccgatatatgccagggagcccttggcgattgctggctgctcgccgcaatagcttctctcacgctaaatgaggagatcctggccagagtcgttccactgaaccaatcgtttcaggagaattacgcgggtattttccactttcagttctggcagtacggggagtgggtggaggtcgtcgtggatgaccggctgcctacgaaggacggcgagctgctattcgtccattctgccgagggaagcgagttttggagcgccctattggagaaagcctacgcaaagatcaacgggtgctatgaggctctgagcggcggtgccacaacagagggcttcgaagactttactggtgggattgctgagtggtatgaactgaagaaaccccctccaaatctgtttaagatcattcaaaaggcactgcagaaaggatccctcctcgggtgttcaatcgatataacctccgctgccgatagtgaagccatcacctttcagaaactggtaaagggtcacgcctactctgtcacgggcgcagaggaggtagagtcaaatggctctctgcagaagctgattagaatccgtaacccctggggggaggtggagtggactggtaggtggaacgacaattgtcctagctggaacaccatcgatcccgaggaaagagaacggctcactagaaggcacgaggatggggaattctggatgtcctttagtgactttctgcgtcactacagcagactggagatctgcaacctcaccccggatacgcttacttccgatacatataaaaagtggaagttgacaaagatggacggcaattggcgcagagggagcacagccggtggctgcaggaactatccgaatactttttggatgaatccccagtatctgatcaaactggaggaggaggatgaagacgaggaggacggtgaatctggatgcacatttctggtgggcctgatccagaaacaccggagaagacagaggaagatgggtgaagatatgcacactatcggtttcggaatatacgaagtgccggaagaattaagtggccagaccaacatccacctgagtaagaattttttcctcactaacagggcccgagagcggtccgacacttttatcaatctcagagaggtgctgaataggttcaaacttcctccaggtgaatacatattagtgccttcaacatttgagccaaacaaggacggagatttttgcatcagggtgttttctgagaaaaaggcagattaccaggcagtcgacgatgagatagaggccaacttagaggagtttgacatctccgaggacgacatcgacgacggtttcaggcgtttgttcgcccaactcgcaggagaagacgccgagatcagtgctttcgagctccaaacaatcttgagacgggttttggcaaaaagacaggacatcaagtcagatgggttctccattgagacgtgcaagatcatggtggacatgctggacagcgatggctctggcaagctgggccttaaagagttctacatcctgtggacaaagatccagaagtatcagaagatttatcgagagattgacgtggacaggtcagggacaatgaattcctacgagatgcggaaggctctggaggaggcaggcttcaaaatgccatgccagctccatcaggtaatcgtggctcgattcgcagatgaccagctaatcatcgattttgataatttcgttcgctgcctggtccggctggaaacactgtttaaaatatttaagcagttggatccggaaaacacgggaaccatcgaactggacctcataagctggttgtgttttagtgttctctag

SEQ ID NO: 120663 - DNA, 2190 bp, Artificial Sequence
  derived and/or modified sequence
gctcctggtcccggtcgagccccagcagagcgctccgctgaatctccccgtcctttttcagcgcagtatggaagacgcgatcgcagcatggcgggaatcgctgcgaaactggcaaaagaccgggaagcagccgaggggctgggctcccacgatcgggcaatcaaatacctaaaccaggattatgaggccctccggaatgaatgccttgaggccggaactctgtttcaggatcctagtttccctgctatcccttcagcacttggcttcaaggaacttggcccttatagctctaagactagaggcatagagtggaaacgaccgaccgaaatctgtgccgatccacagtttatcattggcggagccacacggaccgatatctgtcagggagccctcggcgattgttggctgctggcagctatcgcttctttaaccctcaacgaggaaattttagcgagagtggtgcctctgaatcagtcttttcaggaaaactacgctggaatctttcatttccagttctggcaatatggcgagtgggtcgaagtcgtcgtcgacgataggctacctactaaagatggtgaacttctgtttgtgcactctgcagaaggctctgagttctggtccgctctcctggagaaggcttatgccaaaatcaacggctgctatgaggccttgagcggcggtgccacaaccgagggcttcgaggacttcacagggggaattgcagagtggtatgagctgaaaaaaccacccccaaacctgttcaaaattatccagaaagctctgcagaaaggctccctgttgggatgctctatcgacatcacatccgccgcagacagtgaagctattactttccagaagctggtgaagggtcacgcatacagcgtaacaggggctgaggaggtggagtccaacggatctctccagaagcttatccgaattaggaacccatggggggaagtggagtggactggcaggtggaacgataattgcccgtcctggaacactatagatcctgaggaaagagagagattgaccaggcgccacgaggacggcgagttttggatgtcattcagcgacttcctaagacactacagtcgactggagatttgtaatttgacgcccgacaccctgacatcagacacctacaaaaaatggaagctcaccaagatggacggtaattggcggagagggagcaccgcagggggttgtagaaactatcccaatactttttggatgaatcctcagtatctgattaaattagaagaagaggatgaggacgaggaggacggcgagtcaggctgcacctttctggtgggcctgatccagaagcacagacgcaggcaaaggaagatgggcgaagacatgcacaccatcggatttggtatttacgaggtacatcctcagttgtccggtcagaccaatatacacttgtcaaagaactttttcctgaccaacagggctcgcgagcgcagtgacacctttattaatttaagggaagttctcaatcgatttaaacttcccccaggggagtatatcctggtgcctagtactttcgagcccaataaagacggcgacttctgcatcagggtcttctctgagaagaaggccgattaccaggcggttgatgacgaaatcgaagctaacttggaagagttcgacatctctgaggatgatattgacgatggattcaggagattgtttgcccagctggccggagaggacgcagaaatctcagccttcgaactccagaccattctgaggcgcgtcctggccaagcgtcaggatataaagagtgacggattctccatcgagacatgcaagattatggtggatatgcttgactctgatggctctgggaaacttggcctgaaggagttttacatactgtggacaaagattcagaagtaccagaagatctaccgggaaattgacgtggacaggtctggaactatgaattcctatgagatgaggaaagcactagaggaggccggttttaaaatgccctgtcaactgcaccaggtgatagtggcacggttcgctgacgaccagcttataattgactttgataactttgtccgatgcctcgttcggctggagaccctgtttaagatatttaagcaactagaccctgagaataccggcaccatagaactggacctgatcagttggctttgtttcagcgtgctgtag

SEQ ID NO: 120664 - DNA, 3573 bp, Artificial Sequence
  derived and/or modified sequence
cctccccggcgccgggccgcgccatcccgggagctgtccgcagatggcagcaccggccccgggtcgcggcgttcccggcgctcggcaggccgcaggatggcctggtcccgggccgggagcccagcaggccgggagcggctgaggccacaccccgcgggccgggccgcttccctccggtgaatcatcgctcgcagcggcggcgcccgcagtggccgcagcagcgcgccgggccctggccgcgccccagccgagcgcagcgcggagtcgccccgacctttctctgcgcagtacggccgccgggaccgcagcatggcgggcatcgcggccaagctggcgaaggaccgggaggcggccgaggggctgggctcccacgacagggccatcaagtacctcaaccaggactacgaggcgctgcggaacgagtgcctggaggccgggacgctcttccaggacccgtccttcccggccatcccctcggccctgggcttcaaggagttggggccctactccagcaaaacccggggcatcgagtggaagcgccccacggagatctgcgctgacccccagtttatcattggaggagccacccgcacagacatctgccaaggagccctgggtgactgctggctgctggcagccattgcctccctcaccttgaatgaagaaatcctggctcgagtcgtccccctaaaccagagcttccaggaaaactatgcagggatctttcacttccagttctggcaatacggcgagtgggtggaggtggtggtggatgacaggctgcccaccaaggacggggagctgctctttgtgcattcagccgaagggagcgagttctggagcgccctgctggagaaggcatacgccaagatcaacggatgctatgaagcgctatcagggggtgccaccactgagggcttcgaagacttcaccggaggcattgctgagtggtatgagttgaagaagccccctcccaacctgttcaagatcatccagaaagctctgcaaaaaggctctctccttggctgctccatcgacatcaccagcgccgcggactcggaggccatcacgtttcagaagctggtgaaggggcacgcgtactcggtcaccggagccgaggaggttgaaagtaacggaagcctacagaaactgatccgcatccgaaatccctggggagaagtggagtggacagggcggtggaatgacaactgcccaagctggaacactatagacccagaggagagggaaaggctgaccagacggcatgaagatggagaattctggatgtctttcagtgacttcctgaggcactattcccgcctggagatctgtaacctgaccccagacactctcaccagcgatacctacaagaagtggaaactcaccaaaatggatgggaactggaggcggggctccaccgcgggaggttgcaggaactacccgaacacattctggatgaaccctcagtacctgatcaagctggaggaggaggatgaggacgaggaggatggggagagcggctgcaccttcctggtggggctcattcagaagcaccgacggcggcagaggaagatgggcgaggacatgcacaccatcggctttggcatctatgaggttccagaggagttaagtgggcagaccaacatccacctcagcaaaaacttcttcctgacgaatcgcgccagggagcgctcagacaccttcatcaacctccgggaggtgctcaaccgcttcaagctgccgccaggagagtacattctcgtgccttccaccttcgaacccaacaaggatggggatttctgcatccgggtcttttctgaaaagaaagctgactaccaagctgtcgatgatgaaatcgaggccaatcttgaagagttcgacatcagcgaggatgacattgatgatggattcaggagactgtttgcccagttggcaggagaggatgcggagatctctgcctttgagctgcagaccatcctgagaagggttctagcaaagcgccaagatatcaagtcagatggcttcagcatcgagacatgcaaaattatggttgacatgctagattcggacgggagtggcaagctggggctgaaggagttctacattctctggacgaagattcaaaaataccaaaaaatttaccgagaaatcgacgttgacaggtctggtaccatgaattcctatgaaatgcggaaggcattagaagaagcaggtttcaagatgccctgtcaactccaccaagtcatcgttgctcggtttgcagatgaccagctcatcatcgattttgataattttgttcggtgtttggttcggctggaaacgctattcaagatatttaagcagctggatcccgagaatactggaacaatagagctcgaccttatctcttggctctgtttctcagtactttgaagttataactaatctgcctgaagacttctcatgatggaaaatcagccaaggactaagcttccatagaaatacactttgtatctggacctcaaaattatgggaacatttacttaaacggatgatcatagctgaaaataatgatactgtcaatttgagatagcagaagtttcacacatcaaagtaaaagatttgcatatcattatactaaatgcaaatgagtcgcttaacccttgacaaggtcaaagaaagctttaaatctgtaaatagtatacactttttacttttacacactttcctgttcatagcaatattaaatcaggaaaaaaaaatgcagggaggtatttaacagctgagcaaaaacattgagtcgctctcaaaggacacgaggcccttggcagggaatatttaaagcaacttcaagtttaaaatgcagctgttgattctaccaaacaacagtccaagattaccatttcccatgagccaactgggaaacatggtatatcatgaagtaatcttgtcaaggcatctggagagtccaggagagaagactcacctctgtcgcttgggttaaacaagagacaggttttgtagaatattgattggtaatagtaaatcgttctccttacaatcaagttcttgaccctattcggccttatacatctggtcttacaaagaccaaagggatcctgcgcttgatcaactgaaccagtatgccaaaaccaggcatccaatttgtaaaccaattatgataaaggacaaaataagctgtttgccacctcaaaactttatgaacttcaccaccactagtgtctgtccatggagttagaggggacatcacttagaagttcttatagaaaggacacaagtttgtttcctggctttaccttgggaaaatgctagcaacattatagaaattttgccttgttgccttatcttcttccaaatgtactgttaaataaaaataaagggttaccccatgcaatcacaccatgccatgttttccttcctggagggcagccccacaggacggtttatgagcacacaattatagcttgtttctactttaacaaggtatgctgcctctgtaaattcatgtattcaaaggaaaagacaccttgcctataattaaaatgtggaactataaaattttttaaaatccaa

SEQ ID NO: 120665 - DNA, 3178 bp, Artificial Sequence
  derived and/or modified sequence
gcgcgccgggccctggccgcgccccagccgagcgcagcgcggagtcgccccgacctttctctgcgcagtacggccgccgggaccgcagcatggcgggcatcgcggccaagctggcgaaggaccgggaggcggccgaggggctgggctcccacgacagggccatcaagtacctcaaccaggactacgaggcgctgcggaacgagtgcctggaggccgggacgctcttccaggacccgtccttcccggccatcccctcggccctgggcttcaaggagttggggccctactccagcaaaacccggggcatcgagtggaagcgccccacggagatctgcgctgacccccagtttatcattggaggagccacccgcacagacatctgccaaggagccctgggtgactgctggctgctggcagccattgcctccctcaccttgaatgaagaaatcctggctcgagtcgtccccctaaaccagagcttccaggaaaactatgcagggatctttcacttccagttctggcaatacggcgagtgggtggaggtggtggtggatgacaggctgcccaccaaggacggggagctgctctttgtgcattcagccgaagggagcgagttctggagcgccctgctggagaaggcatacgccaagatcaacggatgctatgaagcgctatcagggggtgccaccactgagggcttcgaagacttcaccggaggcattgctgagtggtatgagttgaagaagccccctcccaacctgttcaagatcatccagaaagctctgcaaaaaggctctctccttggctgctccatcgacatcaccagcgccgcggactcggaggccatcacgtttcagaagctggtgaaggggcacgcgtactcggtcaccggagccgaggaggttgaaagtaacggaagcctacagaaactgatccgcatccgaaatccctggggagaagtggagtggacagggcggtggaatgacaactgcccaagctggaacactatagacccagaggagagggaaaggctgaccagacggcatgaagatggagaattctggatgtctttcagtgacttcctgaggcactattcccgcctggagatctgtaacctgaccccagacactctcaccagcgatacctacaagaagtggaaactcaccaaaatggatgggaactggaggcggggctccaccgcgggaggttgcaggaactacccgaacacattctggatgaaccctcagtacctgatcaagctggaggaggaggatgaggacgaggaggatggggagagcggctgcaccttcctggtggggctcattcagaagcaccgacggcggcagaggaagatgggcgaggacatgcacaccatcggctttggcatctatgaggtgcatcctcagttaagtgggcagaccaacatccacctcagcaaaaacttcttcctgacgaatcgcgccagggagcgctcagacaccttcatcaacctccgggaggtgctcaaccgcttcaagctgccgccaggagagtacattctcgtgccttccaccttcgaacccaacaaggatggggatttctgcatccgggtcttttctgaaaagaaagctgactaccaagctgtcgatgatgaaatcgaggccaatcttgaagagttcgacatcagcgaggatgacattgatgatggattcaggagactgtttgcccagttggcaggagaggatgcggagatctctgcctttgagctgcagaccatcctgagaagggttctagcaaagcgccaagatatcaagtcagatggcttcagcatcgagacatgcaaaattatggttgacatgctagattcggacgggagtggcaagctggggctgaaggagttctacattctctggacgaagattcaaaaataccaaaaaatttaccgagaaatcgacgttgacaggtctggtaccatgaattcctatgaaatgcggaaggcattagaagaagcaggtttcaagatgccctgtcaactccaccaagtcatcgttgctcggtttgcagatgaccagctcatcatcgattttgataattttgttcggtgtttggttcggctggaaacgctattcaagatatttaagcagctggatcccgagaatactggaacaatagagctcgaccttatctcttggctctgtttctcagtactttgaagttataactaatctgcctgaagacttctcatgatggaaaatcagccaaggactaagcttccatagaaatacactttgtatctggacctcaaaattatgggaacatttacttaaacggatgatcatagctgaaaataatgatactgtcaatttgagatagcagaagtttcacacatcaaagtaaaagatttgcatatcattatactaaatgcaaatgagtcgcttaacccttgacaaggtcaaagaaagctttaaatctgtaaatagtatacactttttacttttacacactttcctgttcatagcaatattaaatcaggaaaaaaaaatgcagggaggtatttaacagctgagcaaaaacattgagtcgctctcaaaggacacgaggcccttggcagggaatatttaaagcaacttcaagtttaaaatgcagctgttgattctaccaaacaacagtccaagattaccatttcccatgagccaactgggaaacatggtatatcatgaagtaatcttgtcaaggcatctggagagtccaggagagaagactcacctctgtcgcttgggttaaacaagagacaggttttgtagaatattgattggtaatagtaaatcgttctccttacaatcaagttcttgaccctattcggccttatacatctggtcttacaaagaccaaagggatcctgcgcttgatcaactgaaccagtatgccaaaaccaggcatccaatttgtaaaccaattatgataaaggacaaaataagctgtttgccacctcaaaactttatgaacttcaccaccactagtgtctgtccatggagttagaggggacatcacttagaagttcttatagaaaggacacaagtttgtttcctggctttaccttgggaaaatgctagcaacattatagaaattttgccttgttgccttatcttcttccaaatgtactgttaaataaaaataaagggttaccccatgcaatcac

SEQ ID NO: 120666 - DNA, 2103 bp, Artificial Sequence
  derived and/or modified sequence
atggccggcatcgccgccaagctggccaaggacagagaggccgccgagggcctgggcagccacgacagagccatcaagtacctgaaccaggactacgaggccctgagaaacgagtgcctggaggccggcaccctgttccaggaccccagcttccccgccatccccagcgccctgggcttcaaggagctgggcccctacagcagcaagaccagaggcatcgagtggaagagacccaccgagatctgcgccgacccccagttcatcatcggcggcgccaccagaaccgacatctgccagggcgccctgggcgactgctggctgctggccgccatcgccagcctgaccctgaacgaggagatcctggccagagtggtgcccctgaaccagagcttccaggagaactacgccggcatcttccacttccagttctggcagtacggcgagtgggtggaggtggtggtggacgacagactgcccaccaaggacggcgagctgctgttcgtgcacagcgccgagggcagcgagttctggagcgccctgctggagaaggcctacgccaagatcaacggctgctacgaggccctgagcggcggcgccaccaccgagggcttcgaggacttcaccggcggcatcgccgagtggtacgagctgaagaagcccccccccaacctgttcaagatcatccagaaggccctgcagaagggcagcctgctgggctgcagcatcgacatcaccagcgccgccgacagcgaggccatcaccttccagaagctggtgaagggccacgcctacagcgtgaccggcgccgaggaggtggagagcaacggcagcctgcagaagctgatcagaatcagaaacccctggggcgaggtggagtggaccggcagatggaacgacaactgccccagctggaacaccatcgaccccgaggagagagagagactgaccagaagacacgaggacggcgagttctggatgagcttcagcgacttcctgagacactacagcagactggagatctgcaacctgacccccgacaccctgaccagcgacacctacaagaagtggaagctgaccaagatggacggcaactggagaagaggcagcaccgccggcggctgcagaaactaccccaacaccttctggatgaacccccagtacctgatcaagctggaggaggaggacgaggacgaggaggacggcgagagcggctgcaccttcctggtgggcctgatccagaagcacagaagaagacagagaaagatgggcgaggacatgcacaccatcggcttcggcatctacgaggtgcccgaggagctgagcggccagaccaacatccacctgagcaagaacttcttcctgaccaacagagccagagagagaagcgacaccttcatcaacctgagagaggtgctgaacagattcaagctgccccccggcgagtacatcctggtgcccagcaccttcgagcccaacaaggacggcgacttctgcatcagagtgttcagcgagaagaaggccgactaccaggccgtggacgacgagatcgaggccaacctggaggagttcgacatcagcgaggacgacatcgacgacggcttcagaagactgttcgcccagctggccggcgaggacgccgagatcagcgccttcgagctgcagaccatcctgagaagagtgctggccaagagacaggacatcaagagcgacggcttcagcatcgagacctgcaagatcatggtggacatgctggacagcgacggcagcggcaagctgggcctgaaggagttctacatcctgtggaccaagatccagaagtaccagaagatctacagagagatcgacgtggacagaagcggcaccatgaacagctacgagatgagaaaggccctggaggaggccggcttcaagatgccctgccagctgcaccaggtgatcgtggccagattcgccgacgaccagctgatcatcgacttcgacaacttcgtgagatgcctggtgagactggagaccctgttcaagatcttcaagcagctggaccccgagaacaccggcaccatcgagctggacctgatcagctggctgtgcttcagcgtgctgtag

SEQ ID NO: 120667 - DNA, 2190 bp, Artificial Sequence
  derived and/or modified sequence
gcccccggccccggcagagcccccgccgagagaagcgccgagagccccagacccttcagcgcccagtacggcagaagagacagaagcatggccggcatcgccgccaagctggccaaggacagagaggccgccgagggcctgggcagccacgacagagccatcaagtacctgaaccaggactacgaggccctgagaaacgagtgcctggaggccggcaccctgttccaggaccccagcttccccgccatccccagcgccctgggcttcaaggagctgggcccctacagcagcaagaccagaggcatcgagtggaagagacccaccgagatctgcgccgacccccagttcatcatcggcggcgccaccagaaccgacatctgccagggcgccctgggcgactgctggctgctggccgccatcgccagcctgaccctgaacgaggagatcctggccagagtggtgcccctgaaccagagcttccaggagaactacgccggcatcttccacttccagttctggcagtacggcgagtgggtggaggtggtggtggacgacagactgcccaccaaggacggcgagctgctgttcgtgcacagcgccgagggcagcgagttctggagcgccctgctggagaaggcctacgccaagatcaacggctgctacgaggccctgagcggcggcgccaccaccgagggcttcgaggacttcaccggcggcatcgccgagtggtacgagctgaagaagcccccccccaacctgttcaagatcatccagaaggccctgcagaagggcagcctgctgggctgcagcatcgacatcaccagcgccgccgacagcgaggccatcaccttccagaagctggtgaagggccacgcctacagcgtgaccggcgccgaggaggtggagagcaacggcagcctgcagaagctgatcagaatcagaaacccctggggcgaggtggagtggaccggcagatggaacgacaactgccccagctggaacaccatcgaccccgaggagagagagagactgaccagaagacacgaggacggcgagttctggatgagcttcagcgacttcctgagacactacagcagactggagatctgcaacctgacccccgacaccctgaccagcgacacctacaagaagtggaagctgaccaagatggacggcaactggagaagaggcagcaccgccggcggctgcagaaactaccccaacaccttctggatgaacccccagtacctgatcaagctggaggaggaggacgaggacgaggaggacggcgagagcggctgcaccttcctggtgggcctgatccagaagcacagaagaagacagagaaagatgggcgaggacatgcacaccatcggcttcggcatctacgaggtgcacccccagctgagcggccagaccaacatccacctgagcaagaacttcttcctgaccaacagagccagagagagaagcgacaccttcatcaacctgagagaggtgctgaacagattcaagctgccccccggcgagtacatcctggtgcccagcaccttcgagcccaacaaggacggcgacttctgcatcagagtgttcagcgagaagaaggccgactaccaggccgtggacgacgagatcgaggccaacctggaggagttcgacatcagcgaggacgacatcgacgacggcttcagaagactgttcgcccagctggccggcgaggacgccgagatcagcgccttcgagctgcagaccatcctgagaagagtgctggccaagagacaggacatcaagagcgacggcttcagcatcgagacctgcaagatcatggtggacatgctggacagcgacggcagcggcaagctgggcctgaaggagttctacatcctgtggaccaagatccagaagtaccagaagatctacagagagatcgacgtggacagaagcggcaccatgaacagctacgagatgagaaaggccctggaggaggccggcttcaagatgccctgccagctgcaccaggtgatcgtggccagattcgccgacgaccagctgatcatcgacttcgacaacttcgtgagatgcctggtgagactggagaccctgttcaagatcttcaagcagctggaccccgagaacaccggcaccatcgagctggacctgatcagctggctgtgcttcagcgtgctgtag

SEQ ID NO: 120668 - protein, 748 aa, Artificial Sequence
  derived and/or modified sequence
MADSSGQQGKGRRVQPQWSPPAGTQPCRLHLYNSLTRNKEVFIPQDGKKVTWYCCGPTVYDASHMGHARSYISFDILRRVLKDYFKFDVFYCMNITDIDDKIIKRARQNHLFEQYREKRPEAAQLLEDVQAALKPFSVKLNETTDPDKKQMLERIQHAVQLATEPLEKAVQSRLTGEEVNSCVEVLLEEAKDLLSDWLDSTLGCDVTDNSIFSKLPKFWEGDFHRDMEALNVLPPDVLTRVSEYVPEIVNFVQKIVDNGYGYVSNGSVYFDTAKFASSEKHSYGKLVPEAVGDQKALQEGEGDLSISADRLSEKRSPNDFALWKASKPGEPSWPCPWGKGRPGWHIECSAMAGTLLGASMDIHGGGFDLRFPHHDNELAQSEAYFENDCWVRYFLHTGHLTIAGCKMSKSLKNFITIKDALKKHSARQLRLAFLMHSWKDTLDYSSNTMESALQYEKFLNEFFLNVKDILRAPVDITGQFEKWGEEEAELNKNFYDKKTAIHKALCDNVDTRTVMEEMRALVSQCNLYMAARKAVRKRPNQALLENIALYLTHMLKIFGAVEEDSSLGFPVGGPGTSLSLEATVMPYLQVLSEFREGVRKIAREQKVPEILQLSDALRDNILPELGVRFEDHEGLPTVVKLVDRNTLLKEREEKRRVEEEKRKKKEEAARRKQEQEAAKLAKMKIPPSEMFLSETDKYSKFDENGLPTHDMEGKELSKGQAKKLKKLFEAQEKLYKEYLQMAQNGSFQ

SEQ ID NO: 120669 - DNA, 2247 bp, Artificial Sequence
  derived and/or modified sequence
atggcagacagctccgggcaacaagggaaagggcgccgagtccagccacagtggagtcctcccgctggtacccagccatgccgcctccacctctacaactctcttaccaggaataaagaggtatttattccccaagatggcaagaaggtgacatggtattgctgcggacccactgtgtacgatgcaagccatatggggcacgctcgcagttatatcagtttcgatatcctgcgcagggtgctcaaggactattttaaatttgacgtcttctactgtatgaacattacagacatcgatgataagatcatcaaacgtgcccgacaaaaccatctgttcgaacaatatcgagagaagagaccggaagccgcccagctgctagaggatgttcaggcagcactgaaacccttctctgtcaagctcaatgaaacgactgacccagataaaaaacagatgcttgagcgaattcagcatgcagtacagttggctaccgaacccttagagaaagctgttcagagtcgcttaactggtgaggaggttaactcctgcgtggaggtgctcttggaagaggccaaagacttactgagcgattggctggactctacgctcggctgcgacgttactgataattccatattcagtaaactacccaaattttgggagggggatttccatagggacatggaggccctgaacgttcttccgccagatgtgctgactcgcgtgtctgaatacgtgcccgagattgttaactttgtacaaaagattgtagacaacggatacggatacgtgagtaacggctccgtctacttcgataccgccaaattcgcaagtagtgaaaaacattcctatggcaaactggtccccgaagcggtgggtgaccagaaggcactgcaagaaggagagggggacttatcaatcagtgctgatcgcctctcagaaaaacgctccccgaatgattttgcgttatggaaggcctccaagcctggcgaaccctcctggccttgtccatgggggaagggcagacccggatggcacatcgagtgcagcgcgatggcaggtacgctgttgggggcatctatggatattcacggcgggggcttcgacttgagatttccacaccatgacaatgaactagcacagtcagaggcctatttcgaaaatgactgttgggttagatactttctgcacaccggtcacttgacaatcgcagggtgcaagatgtccaaaagcctgaaaaatttcatcaccataaaggacgccctgaagaagcactctgctcggcagctgagactggctttcctcatgcactcctggaaggatactctcgattattcctcaaatacgatggagtctgcacttcagtatgagaaattcctcaacgaattcttcctcaacgtgaaggacatccttcgggctcccgtggacatcacaggccagtttgagaaatggggagaggaggaggctgaactcaacaagaatttttacgacaagaagaccgcaatacacaaggctctctgcgataacgtggacacacgcactgtaatggaggagatgcgggctttagtaagtcaatgtaacctttatatggccgcgagaaaggccgtacgaaaacgtcccaaccaagccttactggaaaacatcgctttatatctgactcatatgctaaagatattcggtgccgtggaggaagactcctcccttggatttccagtgggaggcccaggaaccagcctgagtctcgaagcaacagtgatgccatatctgcaggtgctgagtgaatttagagaaggagttagaaagatcgcccgtgaacaaaaggtgcccgaaattctacagctgtctgacgcactccgagataacattttaccagagctcggcgtgcgctttgaggaccatgagggtctccctaccgtcgtcaagctcgtcgacaggaacacactgctgaaagagagagaggagaaaagacgggtggaggaagaaaaaaggaaaaaaaaagaggaggccgctcgtaggaaacaagaacaggaggccgccaaactggccaagatgaaaatccctccctctgaaatgtttctttcagagacagacaaatattcaaaatttgacgagaatggcctgcctactcacgatatggaaggcaaagaactgagcaagggccaggcgaaaaagctgaagaagctgttcgaagcacaggaaaaactctacaaggagtacctccagatggctcagaatggcagctttcaatag

SEQ ID NO: 120670 - DNA, 2247 bp, Artificial Sequence
  derived and/or modified sequence
atggctgacagcagcggccagcagggcaagggccggcgggtgcagccccagtggagccccccagctggcacccagccctgccgcctgcacctgtacaacagcctgaccaggaacaaggaggtgttcatcccccaggacggcaagaaggtgacctggtactgctgcggccccaccgtgtatgatgccagccacatgggccacgcccggagctacatcagctttgacatcctgcggcgggtgctgaaggactacttcaagtttgatgtgttctactgcatgaacatcacagacattgatgacaagatcatcaagagggcccggcagaaccacctgtttgagcagtaccgggagaagaggcctgaggccgcccagctgctggaggatgtgcaggccgccctgaagcccttctctgtgaagctgaatgagaccacagatcctgacaagaagcagatgctggagcgcatccagcacgctgtgcagctggccacagagcccctggagaaggctgtgcagagccggctgactggagaggaggtgaacagctgtgtggaggtgctgctggaggaggccaaggacctgctgagtgactggctggacagcaccctgggctgtgatgtgacagacaacagcatcttcagcaagctgcccaagttctgggagggggacttccaccgggacatggaggccctgaatgtgctgcccccagatgtgctgaccagggtgtctgaatatgtgcctgagatcgtgaactttgtgcagaagatcgtggacaatggctacggctacgtgtccaatggatctgtgtactttgacacagccaagtttgccagcagcgagaagcacagctatggcaagctggtgcctgaggccgtgggggaccagaaggccctgcaggagggggagggggacctgagcatctctgctgaccggctgtctgagaagaggagccccaatgactttgccctgtggaaggccagcaagccaggagagcccagctggccctgcccctggggcaagggccggcccggctggcacattgaatgttctgccatggccggcaccctgctgggcgcctccatggacatccatggaggcggctttgacctgcgcttcccccaccacgacaatgagctggcccagagcgaggcctactttgaaaatgactgctgggtgcgctacttcctgcacacaggccacctgaccatcgccggctgcaagatgagcaagagcctgaagaacttcatcaccatcaaggatgccctgaagaagcacagcgcccggcagctgcggctggccttcctgatgcacagctggaaggacaccctggactacagcagcaacaccatggagagcgccctgcagtatgagaagttcctgaatgagttcttcctgaatgtgaaggacatcctgcgggcccctgtggacatcaccggccagtttgagaagtggggcgaggaggaggccgagctgaacaagaacttctatgacaagaagacagccatccacaaggccctgtgtgacaacgtggacaccaggacagtgatggaggagatgagggccctggtgtcccagtgcaacctgtacatggccgccaggaaggctgtgaggaagaggcccaaccaggccctgctggagaacatcgccctgtacctgacccacatgctgaagatctttggagctgtggaggaggacagcagcctgggcttccctgtgggcggccctggcaccagcctgagcctggaggccaccgtgatgccctacctgcaggtgctgtctgagttccgggagggcgtgaggaagatcgcccgggagcagaaggtgcctgagatcctgcagctgagtgatgccctgcgggacaacatcctgcctgagctgggcgtgcgctttgaggaccacgagggcctgcccaccgtggtgaagctggtggacaggaacaccctgctgaaggagcgggaggagaagagaagagtggaggaggagaagaggaagaagaaggaggaggccgcccggaggaagcaggagcaggaggccgccaagctggccaagatgaagatcccccccagcgagatgttcctgtctgaaacagacaagtacagcaagtttgatgaaaatggcctgcccacccatgacatggagggcaaggagctgagcaagggccaggccaagaagctgaagaagctgtttgaggcccaggagaagctgtacaaggagtacctgcagatggcccagaatggcagcttccagtag

SEQ ID NO: 120671 - DNA, 2247 bp, Artificial Sequence
  derived and/or modified sequence
atggccgacagcagcggccagcagggcaagggccggcgggtgcagccccaatggtcccctccagccggcactcagccctgcaggctccacctctacaactcgctgactagaaataaggaggtgtttatccctcaggatggcaagaaagtgacctggtattgctgcgggccaactgtatatgacgcgagccacatggggcatgcccggagctacatttcctttgatattttgaggagagtgctcaaggactacttcaagtttgatgtgttttactgcatgaatattacagacatcgacgataaaatcataaaaagggccagacagaatcatctctttgaacagtacagggaaaagcggcccgaggccgcacaactgttggaagacgtacaggccgctctgaagcccttcagcgtgaagctaaacgaaacgactgacccagataagaagcagatgctggaacggatccagcacgccgtgcagctggctacagagcccctggaaaaggctgtccagtcccgccttaccggggaggaggtgaacagttgcgtagaagtactactcgaggaagcaaaagatctgctctccgattggttagactcaactttgggctgtgatgtcactgataatagcattttttctaaactgcccaaattttgggagggggacttccatagggatatggaggcgctaaacgttctgcctcccgacgtgctcacaagagtcagcgagtatgtgccagaaatcgtgaacttcgtccagaaaatcgtcgacaacgggtatgggtatgtcagtaacggctcagtgtacttcgacactgctaagttcgcgagcagtgagaagcactcttatggcaaactggtccctgaagccgtcggcgaccagaaggcgttgcaggagggcgagggcgatctgtcgataagcgcagatcgcctgagtgaaaagaggtcaccaaacgattttgctctgtggaaagcctctaaacccggtgagcccagctggccatgtccttgggggaaaggtcggccaggctggcatattgagtgtagtgccatggcagggaccttactcggtgccagtatggacatccacggtggtggcttcgatcttaggttccctcatcacgacaatgagttggcgcaaagcgaggcctacttcgaaaacgattgttgggttagatattttctccacaccggccatctaacaatagctggctgtaagatgtccaagagtctgaaaaacttcattaccattaaggacgctcttaagaaacatagtgctagacagctgcgactggcctttctgatgcattcctggaaggacacacttgactattccagcaacacaatggagtcagctttgcagtacgagaagttcctgaatgaattttttctgaatgtcaaggacatcctgcgagcccccgtcgacattacaggacagttcgaaaaatggggtgaggaagaggctgaattaaacaagaacttttatgacaagaaaacagctatccacaaagctctgtgtgacaacgtagacacaagaactgtcatggaggagatgagggccctcgtgagccaatgtaatttgtacatggcggctaggaaggctgtgcgcaagaggcccaaccaggctctgctggagaacattgccctctatctaacccatatgctcaagattttcggcgctgtggaggaggactcgagtctgggttttcctgtgggggggccagggaccagcctctccctcgaggctactgtgatgccgtatctgcaggttttatccgagttccgtgagggggtgagaaagattgcccgagaacagaaggtacctgaaatcttgcagctaagcgatgcactgcgcgacaatatactgcccgagctcggcgtaagattcgaggatcacgaggggctaccaactgtggtcaaacttgtcgaccgcaacacactgcttaaggaaagggaggagaagcgacgagtcgaagaggaaaaaagaaagaaaaaggaagaggccgctcggaggaagcaggagcaggaggcggctaagttagccaagatgaaaatcccgccctccgaaatgtttttaagtgagaccgacaaatacagcaaatttgatgagaacggcctgccgacacatgatatggaggggaaagaactctctaagggccaggcaaagaagttaaaaaagctcttcgaggcacaggaaaagctttacaaggaatacctgcagatggctcagaatggaagtttccagtag

SEQ ID NO: 120672 - DNA, 2247 bp, Artificial Sequence
  derived and/or modified sequence
atggccgactcctcagggcagcaggggaaaggtcgaagagtccagccccagtggtctcctcccgctgggacacagccctgtcgcctccacctctacaacagcctgacacgcaacaaagaagtgtttatccctcaggatggcaagaaggtgacgtggtattgctgtggcccaacagtctacgacgcctcccacatgggacacgcgaggagttacatctccttcgatattcttcggagagtgctgaaagattactttaagtttgatgtattctactgtatgaatattacagatatcgatgataaaatcattaagcgggctagacagaatcatttatttgaacaatacagggagaagcggcctgaagccgcacagctgctggaggacgttcaggccgctctcaaaccattctcggtcaagcttaacgagaccacagaccctgataagaaacaaatgctcgagagaatacaacatgccgtgcagctggctactgagcccctcgagaaggcagtccagagccgcctcacaggcgaggaagtgaattcgtgtgttgaggttcttttggaagaagctaaagacctcctctccgattggcttgactccacactaggctgtgatgtcactgataattctattttctccaaactgccgaagttttgggaaggagacttccatagagacatggaagcgttgaacgtgctgccaccagacgtccttactagggtgtctgaatacgtgccggaaattgttaattttgttcagaaaatcgtggacaatggctacggctacgtgagcaacggctccgtctatttcgatactgcaaagttcgcaagctccgaaaaacattcttacggtaagttggttccggaagccgtcggagatcaaaaagctctgcaggaaggcgaaggtgacttatcaatctcagcagaccgattgtccgagaagcgttcccccaacgacttcgccctctggaaggcatccaaacccggagagccctcatggccttgcccatggggaaagggtcggcctgggtggcacatcgagtgctcagctatggctgggacacttctcggtgcctctatggacatccatggagggggattcgacttaaggttcccacaccacgacaatgaactggcccagtcggaagcttatttcgagaatgactgttgggttcggtattttttgcatacaggacacttaactatcgccggatgcaagatgagtaagtccttgaaaaattttatcactattaaggacgccttgaagaagcactcagccagacagctgagactggctttcctcatgcattcgtggaaagacacactcgactactcaagcaacacaatggaaagcgcgctgcagtatgagaagtttctgaacgagtttttcttgaatgtgaaagatatccttcgcgcaccagtggacataacgggccaattcgagaagtggggagaggaagaggctgaactaaacaagaacttctacgataaaaagacagctattcataaagccctgtgcgacaacgtcgacactcggaccgtcatggaggaaatgcgtgccctagtatcacaatgcaatttatacatggccgcaagaaaggccgtgcgcaaacgccctaaccaggccttgttggagaacatcgccctttacctgacgcatatgcttaagatctttggggctgtggaagaggactcgtccctcgggtttccagtggggggaccaggaaccagtctgtctctcgaggccaccgtgatgccatacttgcaggtgctctccgaattccgggagggtgtcagaaaaattgcgagggaacaaaaggtgcccgagatcctccaacttagtgacgccctgcgggataacattctcccagagctcggagtgcgcttcgaagaccacgagggactgcccaccgtcgtcaagcttgttgatcgaaacaccttgttgaaagaacgggaagaaaaaaggagagtcgaggaagagaagcggaaaaagaaggaggaggcagctcgtcgcaagcaagaacaggaggctgccaagttggctaagatgaagatcccaccttcagagatgtttctgagcgagacagataagtacagtaaattcgatgaaaatggtctgcccacccacgacatggaaggaaaggagctctccaagggccaggctaaaaaactcaagaaactgtttgaggcacaggagaagctgtacaaagagtatctacaaatggcccagaacggctcctttcagtag

SEQ ID NO: 120673 - DNA, 2685 bp, Artificial Sequence
  derived and/or modified sequence
gactactcccagcacggccactgaacgcttggccgcgcgatgctccggagcgcgggtcgccattgggttgaactacagctcccagcatgctccgggccggcgacatccggagcccctggtagttgcctagcgaccgggcgtgtcccggaagacgggcccggcgtggggcgcgacttccggggcggcggttgcatcagattctaggaagtgtctgtagccgcagctgcgggtccgggattcccagccatggcagattcctccgggcagcagggcaaaggccggcgtgtgcagccccagtggtcccctcctgctgggacccagccatgcagactccacctttacaacagcctcaccaggaacaaggaagtgttcatacctcaagatgggaaaaaggtgacgtggtattgctgtgggccaaccgtctatgacgcatctcacatggggcacgccaggtcctacatctcttttgatatcttgagaagagtgttgaaggattacttcaaatttgatgtcttttattgcatgaacattacggatattgatgacaagatcatcaagagggcccggcagaaccacctgttcgagcagtatcgggagaagaggcctgaagcggcacagctcttggaggatgttcaggccgccctgaagccattttcagtaaaattaaatgagaccacggatcccgataaaaagcagatgctcgaacggattcagcacgcagtgcagcttgccacagagccacttgagaaagctgtgcagtccagactcacgggagaggaagtcaacagctgtgtggaggtgttgctggaagaagccaaggatttgctctctgactggctggattctacacttggctgtgatgtcactgacaattccatcttctccaagctgcccaagttctgggagggggacttccacagagacatggaagctctgaatgttctccctccagatgtcttaacccgggttagtgagtatgtgccagaaattgtgaactttgtccagaagattgtggacaacggttacggctatgtctccaatgggtctgtctactttgatacagcgaagtttgcttctagcgagaagcactcctatgggaagctggtgcctgaggccgttggagatcagaaagcccttcaagaaggggaaggtgacctgagcatctctgcagaccgcctgagtgagaagcgctctcccaacgactttgccttatggaaggcctctaagcccggagaaccgtcctggccgtgcccttggggaaagggtcgtccgggctggcatatcgagtgctcggccatggcaggcaccctcctaggggcttcgatggacattcacggaggtgggttcgacctccggttcccccaccatgacaatgagctggcacagtcggaggcctactttgaaaacgactgctgggtcaggtacttcctgcacacaggccacctgaccattgcaggctgcaaaatgtcaaagtcactaaaaaacttcatcaccattaaagatgccttgaaaaagcactcagcacggcagttgcggctggccttcctcatgcactcgtggaaggacaccctggactactccagcaacaccatggagtcagcgcttcaatatgagaagttcttgaatgagtttttcttaaatgtgaaagatatccttcgcgctcctgttgacatcactggtcagtttgagaagtggggagaagaagaagcagaactgaataagaacttttatgacaagaagacagcaattcacaaagccctctgtgacaatgttgacacccgcaccgtcatggaagagatgcgggccttggtcagtcagtgcaacctctatatggcagcccggaaagccgtgaggaagaggcccaaccaggctctgctggagaacatcgccctgtacctcacccatatgctgaagatctttggggccgtagaagaggacagctccctgggattcccggtcggagggcctggaaccagcctcagtctcgaggccacagtcatgccctaccttcaggtgttatcagaattccgagaaggagtgcggaagattgcccgagagcaaaaagtccctgagattctgcagctcagcgatgccctgcgggacaacatcctgcccgagcttggggtgcggtttgaagaccacgaaggactgcccacagtggtgaaactggtagacagaaacaccttattaaaagagagagaagaaaagagacgggttgaagaggagaagaggaagaagaaagaggaggcggcccggaggaaacaggaacaagaagcagcaaagctggccaagatgaagattccccccagtgagatgttcttgtcagaaaccgacaaatactccaagtttgatgaaaatggtctgcccacacatgacatggagggcaaagagctcagcaaagggcaagccaagaagctgaagaagctcttcgaggctcaggagaagctctacaaggaatatctgcagatggcccagaatggaagcttccagtgagggggcacaggactgactttttaaaccattgtggactagtggctgctgtctgcctcagtgacaatgtcccagcgctcctatcatgtttacagtcacccttgggtcctaaattaagagttgtgttcatgtaggttcgtgtcgtcgttggctctgagacattgataataaatttttctcaacagtgagaccctc

SEQ ID NO: 120674 - DNA, 2247 bp, Artificial Sequence
  derived and/or modified sequence
atggccgacagcagcggccagcagggcaagggcagaagagtgcagccccagtggagcccccccgccggcacccagccctgcagactgcacctgtacaacagcctgaccagaaacaaggaggtgttcatcccccaggacggcaagaaggtgacctggtactgctgcggccccaccgtgtacgacgccagccacatgggccacgccagaagctacatcagcttcgacatcctgagaagagtgctgaaggactacttcaagttcgacgtgttctactgcatgaacatcaccgacatcgacgacaagatcatcaagagagccagacagaaccacctgttcgagcagtacagagagaagagacccgaggccgcccagctgctggaggacgtgcaggccgccctgaagcccttcagcgtgaagctgaacgagaccaccgaccccgacaagaagcagatgctggagagaatccagcacgccgtgcagctggccaccgagcccctggagaaggccgtgcagagcagactgaccggcgaggaggtgaacagctgcgtggaggtgctgctggaggaggccaaggacctgctgagcgactggctggacagcaccctgggctgcgacgtgaccgacaacagcatcttcagcaagctgcccaagttctgggagggcgacttccacagagacatggaggccctgaacgtgctgccccccgacgtgctgaccagagtgagcgagtacgtgcccgagatcgtgaacttcgtgcagaagatcgtggacaacggctacggctacgtgagcaacggcagcgtgtacttcgacaccgccaagttcgccagcagcgagaagcacagctacggcaagctggtgcccgaggccgtgggcgaccagaaggccctgcaggagggcgagggcgacctgagcatcagcgccgacagactgagcgagaagagaagccccaacgacttcgccctgtggaaggccagcaagcccggcgagcccagctggccctgcccctggggcaagggcagacccggctggcacatcgagtgcagcgccatggccggcaccctgctgggcgccagcatggacatccacggcggcggcttcgacctgagattcccccaccacgacaacgagctggcccagagcgaggcctacttcgagaacgactgctgggtgagatacttcctgcacaccggccacctgaccatcgccggctgcaagatgagcaagagcctgaagaacttcatcaccatcaaggacgccctgaagaagcacagcgccagacagctgagactggccttcctgatgcacagctggaaggacaccctggactacagcagcaacaccatggagagcgccctgcagtacgagaagttcctgaacgagttcttcctgaacgtgaaggacatcctgagagcccccgtggacatcaccggccagttcgagaagtggggcgaggaggaggccgagctgaacaagaacttctacgacaagaagaccgccatccacaaggccctgtgcgacaacgtggacaccagaaccgtgatggaggagatgagagccctggtgagccagtgcaacctgtacatggccgccagaaaggccgtgagaaagagacccaaccaggccctgctggagaacatcgccctgtacctgacccacatgctgaagatcttcggcgccgtggaggaggacagcagcctgggcttccccgtgggcggccccggcaccagcctgagcctggaggccaccgtgatgccctacctgcaggtgctgagcgagttcagagagggcgtgagaaagatcgccagagagcagaaggtgcccgagatcctgcagctgagcgacgccctgagagacaacatcctgcccgagctgggcgtgagattcgaggaccacgagggcctgcccaccgtggtgaagctggtggacagaaacaccctgctgaaggagagagaggagaagagaagagtggaggaggagaagagaaagaagaaggaggaggccgccagaagaaagcaggagcaggaggccgccaagctggccaagatgaagatcccccccagcgagatgttcctgagcgagaccgacaagtacagcaagttcgacgagaacggcctgcccacccacgacatggagggcaaggagctgagcaagggccaggccaagaagctgaagaagctgttcgaggcccaggagaagctgtacaaggagtacctgcagatggcccagaacggcagcttccagtag

SEQ ID NO: 120675 - protein, 527 aa, Artificial Sequence
  derived and/or modified sequence
MADSRDPASDQMQHWKEQRAAQKADVLTTGAGNPVGDKLNVITVGPRGPLLVQDVVFTDEMAHFDRERIPERVVHAKGAGAFGYFEVTHDITKYSKAKVFEHIGKKTPIAVRFSTVAGESGSADTVRDPRGFAVKFYTEDGNWDLVGNNTPIFFIRDPILFPSFIHSQKRNPQTHLKDPDMVWDFWSLRPESLHQVSFLFSDRGIPDGHRHMNGYGSHTFKLVNANGEAVYCKFHYKTDQGIKNLSVEDAARLSQEDPDYGIRDLFNAIATGKYPSWTFYIQVMTFNQAETFPFNPFDLTKVWPHKDYPLIPVGKLVLNRNPVNYFAEVEQIAFDPSNMPPGIEASPDKMLQGRLFAYPDTHRHRLGPNYLHIPVNCPYRARVANYQRDGPMCMQDNQGGAPNYYPNSFGAPEQQPSALEHSIQYSGEVRRFNTANDDNVTQVRAFYVNVLNEEQRKRLCENIAGHLKDAQIFIQKKAVKNFTEVHPDYGSHIQALLDKYNAEKPKNAIHTFVQSGSHLAAREKANL

SEQ ID NO: 120676 - DNA, 1584 bp, Artificial Sequence
  derived and/or modified sequence
atggccgactctagggatcccgcgagcgaccagatgcagcattggaaagaacaacgtgctgcgcagaaggcggacgttctgactaccggggccgggaaccccgttggtgacaagcttaacgtgataacagtcggtccgagaggacccctgttggttcaggatgtcgtctttaccgatgaaatggcacatttcgacagagaaaggattccggagagagtggtgcacgcaaaaggcgccggggcattcggatattttgaggtgactcacgacattacaaagtactctaaggcaaaagtgttcgaacatataggaaagaagacacctattgccgtcaggtttagtactgtggccggagaaagcggttcagcggacaccgttagagacccccgcggatttgccgtcaagttctataccgaggatgggaattgggacttagtggggaataacacacctatcttctttatacgtgaccctatcctctttccctcttttatacatagccagaaacggaacccccagactcacctgaaggacccagatatggtgtgggacttctggtctctgaggccagaaagccttcaccaagtgtcctttctcttttctgataggggaatccccgatggacatcgccacatgaatggctacggtagccatactttcaagctcgtaaacgccaacggcgaagctgtttactgcaagttccactataagaccgaccagggaattaaaaatctgtcggtcgaggatgctgcgcggctgtcccaggaggatccagactatgggattagagatctgtttaatgctatagccacagggaagtacccttcatggactttttatattcaagtgatgacatttaatcaggctgaaacatttccctttaatccattcgatctcaccaaggtgtggccccataaagattacccactcatcccagtaggcaaattagttttaaacagaaatcctgttaattacttcgccgaagtagaacagattgctttcgacccaagcaacatgccccccggcattgaagcttctcctgacaagatgttgcagggccgcctgtttgcttatcccgacacccatcgacaccgtctagggccaaattatctgcacataccagtgaactgcccatatcgagctagggttgccaattaccagcgcgatggacctatgtgcatgcaggataatcagggcggagccccaaactattaccctaactcattcggagcacccgagcagcagccttccgcccttgagcactctatccagtactctggtgaggtgcgtaggttcaataccgcgaatgacgataacgtgactcaggtccgtgcgttctacgtgaatgtgcttaacgaggagcagaggaaaagactttgcgaaaatattgcaggccatttaaaagacgcccagatcttcattcagaagaaggcagtgaaaaactttacagaggttcatcccgattatggctctcacattcaggcgttacttgacaaatataacgccgagaaaccgaagaacgcaattcacaccttcgttcagtcaggaagccacctggcagcccgtgagaaagctaacctttag

SEQ ID NO: 120677 - DNA, 1584 bp, Artificial Sequence
  derived and/or modified sequence
atggctgacagccgggaccctgccagtgaccagatgcagcactggaaggagcagagagctgcccagaaggcagatgtgctgaccactggagctggcaaccctgtgggggacaagctgaatgtcatcaccgtgggcccccggggccccctgctggtgcaggatgtggtgttcacagatgagatggcccactttgaccgggagcgcatccctgagcgggtggtgcacgccaagggagctggggccttcggctactttgaggtgacccatgacatcaccaagtacagcaaggccaaggtgtttgagcacatcggcaagaagacccccatcgctgtgcgcttcagcacagtggccggggagagcggcagcgctgacacagtgcgggacccccggggctttgctgtgaagttctacacagaagatggcaactgggacctggtgggcaacaacacccccatcttcttcatccgggaccccatcctcttccccagcttcatccacagccagaagaggaacccccagacccacctgaaggaccctgacatggtgtgggacttctggagcctgcggcctgagagcctgcaccaggtgtccttcctgttcagtgaccggggcatcccagatggccaccgccacatgaatggctacggcagccacaccttcaagctggtgaatgccaacggggaggccgtgtactgcaagttccactacaagacagaccagggcatcaagaacctgtctgtggaggatgctgcccggctgagccaggaggaccctgactatggcatccgggacctcttcaatgccatcgccaccgggaagtaccccagctggaccttctacatccaggtgatgaccttcaaccaggccgagaccttccccttcaacccctttgacctgaccaaggtgtggccccacaaggactaccccctcatccctgtgggcaagctggtgctgaacagaaatcctgtgaactactttgctgaggtggagcagatcgcctttgaccccagcaacatgcctcctggcatcgaggccagcccagacaagatgctgcagggccgcctgtttgcctacccagacacccaccgccaccggctgggccccaactacctgcacatccctgtgaactgcccctaccgggcccgggtggccaactaccagagagatggccccatgtgcatgcaggacaaccagggcggggcccccaactactaccccaacagctttggagcccctgagcagcagcccagcgccctggagcacagcatccagtacagcggggaggtgcggcgcttcaacacagccaatgatgacaacgtgacccaggtgcgggccttctacgtgaatgtgctgaatgaggagcagaggaagaggctgtgtgaaaatattgctggccacctgaaggatgcccagatcttcatccagaagaaggctgtgaagaacttcacagaggtgcacccagactatggcagccacatccaggccctgctggacaagtacaatgctgagaagcccaagaatgccatccacacctttgtgcagagcggcagccacctggccgcccgggagaaggccaacctgtag

SEQ ID NO: 120678 - DNA, 1584 bp, Artificial Sequence
  derived and/or modified sequence
atggccgacagccgggaccccgccagcgaccagatgcagcactggaaggagcaaagagcagcccagaaagccgacgttttaaccacaggcgccggcaacccggtgggtgacaagctcaacgttatcacagtaggcccccggggacctctgttggtgcaagacgtcgtctttacagacgaaatggcccacttcgatcgggagagaatcccagagcgggtcgtgcacgccaaaggcgcaggtgcatttggttactttgaagtcacgcacgacattaccaaatacagtaaggctaaggttttcgaacacattgggaagaaaacgccaattgcggtccggttctctacagttgctggcgagagcgggtcagcagataccgtgcgggacccacgagggtttgccgtgaagttctacacggaggatgggaattgggacctcgtcggaaacaatacaccgatcttctttatcagagacccaatcctgttcccttctttcattcattctcagaaacgcaacccccagacccacctcaaagaccccgacatggtctgggacttctggtctctccgacctgaaagcctccaccaggtctcattcctatttagtgatcgcgggattccggacggtcatcgtcacatgaacggctacggatcacacaccttcaaactcgttaacgccaatggcgaggccgtttattgcaagtttcattataaaacggatcagggcataaagaatctgtccgtagaggacgcagcaagactgtcacaggaagatcccgactacggtatcagagatctttttaatgctatagcaacaggcaagtatccatcgtggacattctatattcaggttatgacattcaatcaggccgaaacctttccttttaaccccttcgatttgactaaggtatggccccataaagattaccctttgattccagtcggaaaattagtactaaacagaaatcccgtgaactatttcgctgaggtggagcagattgcctttgatccctcgaacatgcctcccgggatcgaagcatcccctgacaagatgcttcaagggcggctgttcgcctacccggatacccatcgccatcgactgggaccaaattatctccatatccccgtgaattgtccctacagagctagagtggcaaactatcagcgtgatggcccgatgtgtatgcaagacaaccagggaggagcaccgaactattatcctaatagctttggggccccagagcagcagccctctgcactagagcacagcatacagtactctggcgaggtccgacgattcaatactgccaacgatgataacgtcacacaggtgagggcattctatgtcaacgtgttgaacgaggaacagcgtaagcggctctgcgaaaacattgccgggcatctgaaggacgcccagatctttattcagaagaaagcggttaaaaactttaccgaagtgcatcccgattatggcagtcacattcaagcactgttggacaaatacaatgcagagaaacccaagaacgctatccatacctttgtacaatctggaagccatctagcagcaagagagaaggccaacctgtag

SEQ ID NO: 120679 - DNA, 1584 bp, Artificial Sequence
  derived and/or modified sequence
atggctgactcgcgggacccagccagtgaccaaatgcagcactggaaggaacaaagagcggctcagaaagccgatgtgcttacaaccggggctggcaaccccgttggcgacaaactgaacgtgatcactgtgggacccagaggcccactccttgttcaagatgttgtcttcaccgatgagatggcccactttgatagggagcggatccccgaacgagtagtccacgccaagggtgccggtgcgttcgggtatttcgaagtcacccacgatattaccaagtatagtaaagccaaggtctttgaacacataggcaaaaaaactcccatagctgtaagatttagtaccgtcgccggagagagcggctctgccgatacagtgagggatcctcgtggtttcgcagtcaagttttacacggaagatggcaactgggatctggtgggcaataacacccctatattcttcattcgggacccaattctctttccatcattcatccacagccaaaagaggaatccacagactcatctgaaagaccctgatatggtctgggacttttggagtctgcgcccagaaagtctgcatcaggtctctttcttgttctcggataggggcatcccagacgggcaccggcacatgaatggatacggatctcatacgtttaaactagtgaatgccaatggagaggcggtgtactgcaagtttcactacaagacagatcaggggatcaagaacttatccgttgaagacgcggctcggctgtcccaagaggacccagattatgggatccgggatctcttcaacgccatcgccacagggaaataccccagctggacattttatatccaagtaatgacgttcaatcaggctgaaacatttccatttaacccattcgacttaacaaaggtatggccacacaaggactacccgctaataccagtgggcaagttggtcctcaaccgaaaccccgtgaactattttgccgaagtggagcagattgcgttcgacccgagcaatatgcccccaggaattgaggccagccctgacaaaatgttacaagggagactcttcgcttatccggatactcataggcatcggttaggcccaaattacctacatattcccgtaaattgtccctatagggcgagggtcgccaattaccaacgggacggacctatgtgcatgcaggataaccaggggggagcgcctaactactacccgaattcttttggggcacccgagcagcagccctccgccttggagcactctatccagtacagcggcgaggtgcgcaggtttaatactgctaatgatgacaacgtgacgcaggtgcgagcgttctatgtcaacgtgctgaacgaagaacaacggaaaagactgtgtgagaatatcgcgggtcaccttaaggacgcccaaattttcatccagaagaaggcggtaaaaaacttcacggaagtgcatcccgactatggtagtcacatccaggccctgctcgataagtacaacgccgaaaagccgaaaaacgccattcacacattcgttcaatccggttcacatcttgctgcacgagagaaggcgaacctgtag

SEQ ID NO: 120680 - DNA, 2302 bp, Artificial Sequence
  derived and/or modified sequence
actcggggcaacaggcagatttgcctgctgagggtggagacccacgagccgaggcctcctgcagtgttctgcacagcaaaccgcacgctatggctgacagccgggatcccgccagcgaccagatgcagcactggaaggagcagcgggccgcgcagaaagctgatgtcctgaccactggagctggtaacccagtaggagacaaacttaatgttattacagtagggccccgtgggccccttcttgttcaggatgtggttttcactgatgaaatggctcattttgaccgagagagaattcctgagagagttgtgcatgctaaaggagcaggggcctttggctactttgaggtcacacatgacattaccaaatactccaaggcaaaggtatttgagcatattggaaagaagactcccatcgcagttcggttctccactgttgctggagaatcgggttcagctgacacagttcgggaccctcgtgggtttgcagtgaaattttacacagaagatggtaactgggatctcgttggaaataacacccccattttcttcatcagggatcccatattgtttccatcttttatccacagccaaaagagaaatcctcagacacatctgaaggatccggacatggtctgggacttctggagcctacgtcctgagtctctgcatcaggtttctttcttgttcagtgatcgggggattccagatggacatcgccacatgaatggatatggatcacatactttcaagctggttaatgcaaatggggaggcagtttattgcaaattccattataagactgaccagggcatcaaaaacctttctgttgaagatgcggcgagactttcccaggaagatcctgactatggcatccgggatctttttaacgccattgccacaggaaagtacccctcctggactttttacatccaggtcatgacatttaatcaggcagaaacttttccatttaatccattcgatctcaccaaggtttggcctcacaaggactaccctctcatcccagttggtaaactggtcttaaaccggaatccagttaattactttgctgaggttgaacagatagccttcgacccaagcaacatgccacctggcattgaggccagtcctgacaaaatgcttcagggccgcctttttgcctatcctgacactcaccgccatcgcctgggacccaattatcttcatatacctgtgaactgtccctaccgtgctcgagtggccaactaccagcgtgacggcccgatgtgcatgcaggacaatcagggtggtgctccaaattactaccccaacagctttggtgctccggaacaacagccttctgccctggagcacagcatccaatattctggagaagtgcggagattcaacactgccaatgatgataacgttactcaggtgcgggcattctatgtgaacgtgctgaatgaggaacagaggaaacgtctgtgtgagaacattgccggccacctgaaggatgcacaaattttcatccagaagaaagcggtcaagaacttcactgaggtccaccctgactacgggagccacatccaggctcttctggacaagtacaatgctgagaagcctaagaatgcgattcacacctttgtgcagtccggatctcacttggcggcaagggagaaggcaaatctgtgaggccggggccctgcacctgtgcagcgaagcttagcgttcatccgtgtaacccgctcatcactggatgaagattctcctgtgctagatgtgcaaatgcaagctagtggcttcaaaatagagaatcccactttctatagcagattgtgtaacaattttaatgctatttccccaggggaaaatgaaggttaggatttaacagtcatttaaaaaaaaaatttgttttgacggatgattggattattcatttaaaatgattagaaggcaagtttctagctagaaatatgattttatttgacaaaatttgttgaaattatgtatgtttacatatcacctcatggcctattatattaaaatatggctataaatatataaaaagaaaagataaagatgatctactcagaaatttttatttttctaaggttctcataggaaaagtacatttaatacagcagtgtcatcagaagataacttgagcaccgtcatggcttaatgtttattcctgataataattgatcaaattcatttttttcactggagttacattaatgttaattcagcactgatttcacaacagatcaatttgtaattgcttacatttttacaataaataatctgtacgtaagaacaga

SEQ ID NO: 120681 - DNA, 1584 bp, Artificial Sequence
  derived and/or modified sequence
atggccgacagcagagaccccgccagcgaccagatgcagcactggaaggagcagagagccgcccagaaggccgacgtgctgaccaccggcgccggcaaccccgtgggcgacaagctgaacgtgatcaccgtgggccccagaggccccctgctggtgcaggacgtggtgttcaccgacgagatggcccacttcgacagagagagaatccccgagagagtggtgcacgccaagggcgccggcgccttcggctacttcgaggtgacccacgacatcaccaagtacagcaaggccaaggtgttcgagcacatcggcaagaagacccccatcgccgtgagattcagcaccgtggccggcgagagcggcagcgccgacaccgtgagagaccccagaggcttcgccgtgaagttctacaccgaggacggcaactgggacctggtgggcaacaacacccccatcttcttcatcagagaccccatcctgttccccagcttcatccacagccagaagagaaacccccagacccacctgaaggaccccgacatggtgtgggacttctggagcctgagacccgagagcctgcaccaggtgagcttcctgttcagcgacagaggcatccccgacggccacagacacatgaacggctacggcagccacaccttcaagctggtgaacgccaacggcgaggccgtgtactgcaagttccactacaagaccgaccagggcatcaagaacctgagcgtggaggacgccgccagactgagccaggaggaccccgactacggcatcagagacctgttcaacgccatcgccaccggcaagtaccccagctggaccttctacatccaggtgatgaccttcaaccaggccgagaccttccccttcaaccccttcgacctgaccaaggtgtggccccacaaggactaccccctgatccccgtgggcaagctggtgctgaacagaaaccccgtgaactacttcgccgaggtggagcagatcgccttcgaccccagcaacatgccccccggcatcgaggccagccccgacaagatgctgcagggcagactgttcgcctaccccgacacccacagacacagactgggccccaactacctgcacatccccgtgaactgcccctacagagccagagtggccaactaccagagagacggccccatgtgcatgcaggacaaccagggcggcgcccccaactactaccccaacagcttcggcgcccccgagcagcagcccagcgccctggagcacagcatccagtacagcggcgaggtgagaagattcaacaccgccaacgacgacaacgtgacccaggtgagagccttctacgtgaacgtgctgaacgaggagcagagaaagagactgtgcgagaacatcgccggccacctgaaggacgcccagatcttcatccagaagaaggccgtgaagaacttcaccgaggtgcaccccgactacggcagccacatccaggccctgctggacaagtacaacgccgagaagcccaagaacgccatccacaccttcgtgcagagcggcagccacctggccgccagagagaaggccaacctgtag

SEQ ID NO: 120682 - protein, 147 aa, Artificial Sequence
  derived and/or modified sequence
MADELSEKQVYDAHTKEIDLVNRDPKHLNDDVVKIDFEDVIAEPEGTHSFDGIWKASFTTFTVTKYWFYRLLSALFGIPMALIWGIYFAILSFLHIWAVVPCIKSFLIEIQCISRVYSIYVHTVCDPLFEAVGKIFSNVRINLQKEI

SEQ ID NO: 120683 - protein, 178 aa, Artificial Sequence
  derived and/or modified sequence
MSGGKYVDSEGHLYTVPIREQGNIYKPNNKAMADELSEKQVYDAHTKEIDLVNRDPKHLNDDVVKIDFEDVIAEPEGTHSFDGIWKASFTTFTVTKYWFYRLLSALFGIPMALIWGIYFAILSFLHIWAVVPCIKSFLIEIQCISRVYSIYVHTVCDPLFEAVGKIFSNVRINLQKEI

SEQ ID NO: 120684 - DNA, 537 bp, Artificial Sequence
  derived and/or modified sequence
atgtctgggggaaagtatgtcgacagtgagggtcacctttataccgtgcccattcgagagcagggcaacatctacaaacccaacaacaaggcgatggctgacgagttgagcgagaaacaggtgtacgacgcccacacaaaggagatagaccttgtgaatagggatcccaagcatcttaatgatgatgtcgtaaagatcgactttgaagatgtcatcgccgaaccagaaggcacacattctttcgatgggatttggaaggcaagtttcaccacattcacagtcaccaaatattggttttacaggctgctgagtgccctgttcggcatccctatggccctgatctggggcatctattttgccattctgtcctttctgcatatctgggctgtagttccttgcattaagtctttcctcatcgaaattcagtgcatcagtcgcgtgtactcaatatatgtccatactgtatgtgatcctctcttcgaggctgtgggtaagattttcagcaacgtaaggattaatctgcagaaagagatatag

SEQ ID NO: 120685 - DNA, 537 bp, Artificial Sequence
  derived and/or modified sequence
atgtctgggggcaagtatgtggacagcgagggccacctgtacacagtgcccatccgggagcagggcaacatctacaagcccaacaacaaggccatggctgatgagctgtctgagaagcaggtgtatgatgcccacaccaaggagattgacctggtgaacagagaccccaagcacctgaatgatgatgtggtgaagattgactttgaagatgtgattgctgagcctgagggcacccacagctttgatggcatctggaaggccagcttcaccaccttcaccgtgaccaagtactggttctaccgcctgctgagcgccctgtttggcatccccatggccctgatctggggcatctactttgccatcctgtccttcctgcacatctgggccgtggtgccctgcatcaagagcttcctgattgagatccagtgcatcagccgggtgtacagcatctacgtgcacacagtgtgtgaccccctgtttgaggccgtgggcaagatcttcagcaatgtgcgcatcaacctgcagaaggagatctag

SEQ ID NO: 120686 - DNA, 537 bp, Artificial Sequence
  derived and/or modified sequence
atgagcggcggcaagtacgtggacagcgagggccacctgtacaccgtccctatccgggaacaagggaacatatataaacccaacaacaaggctatggccgatgaactaagcgagaaacaggtttatgatgcccacacaaaggagattgaccttgtaaatcgagatcccaaacacctcaatgacgatgtcgtaaagatagatttcgaggatgtgatcgctgagcctgaaggaacccattcttttgatgggatttggaaagccagcttcactacattcaccgtgactaagtactggttttatcggctgctgagcgcgttgtttggtatccctatggccttgatttgggggatttacttcgccatcctgtctttccttcacatttgggccgtcgtaccttgcattaaatctttcttaattgaaatacaatgcatttcaagggtctactcgatctacgtgcacaccgtgtgcgaccccctgttcgaagccgtgggaaaaattttcagtaacgtcaggattaatttgcaaaaagagatctag

SEQ ID NO: 120687 - DNA, 537 bp, Artificial Sequence
  derived and/or modified sequence
atgagcggcggaaaatacgtagactctgaaggccacctgtacacggttcctatcagggagcaggggaacatctacaagcctaataacaaagcaatggctgatgaactgtcagagaaacaggtgtatgatgcccacaccaaagaaatcgaccttgttaatagggacccaaaacacctgaatgacgatgtggtgaagattgactttgaggacgtcattgctgagcccgagggcacacactcttttgacggaatatggaaggcgtcatttacaacctttactgtgactaaatattggttttaccggctcctgtctgctttatttggtatccctatggcgctgatatggggcatttactttgcaatattgtcatttctccatatctgggccgtggtgccatgcattaagtcatttttgattgagatccagtgcatctccagggtgtatagcatatacgtgcataccgtttgcgacccactatttgaagcagtggggaagatcttcagcaatgtcagaatcaatctgcagaaggagatctag

SEQ ID NO: 120688 - DNA, 2628 bp, Artificial Sequence
  derived and/or modified sequence
agagtacagaggggtgtggtgtcctctgcgagatcctcttaaaaagctggctacgcgcaggcggtttctgtgcacggagccgtagctgtcggagcggttagttcgatttcgagctcgaggtttcccccgccgccaggctgacttctcatcgcttgtttttctttttgcatttttcctcccaccgccgttgccgccctccccgtcctggccgtccgccctccgccctctgcagggacatctctacaccgttcccatccgggaacagggcaacatctacaagcccaacaacaaggccatggcagacgagctgagcgagaagcaagtgtacgacgcgcacaccaaggagatcgacctggtcaaccgcgaccctaaacacctcaacgatgacgtggtcaagattgactttgaagatgtgattgcagaaccagaagggacacacagttttgacggcatttggaaggccagcttcaccaccttcactgtgacgaaatactggttttaccgcttgctgtctgccctctttggcatcccgatggcactcatctggggcatttacttcgccattctctctttcctgcacatctgggcagttgtaccatgcattaagagcttcctgattgagattcagtgcatcagccgtgtctattccatctacgtccacaccgtctgtgacccactctttgaagctgttgggaaaatattcagcaatgtccgcatcaacttgcagaaagaaatataaatgacatttcaaggatagaagtatacctgattttttttccttttaattttcctggtgccaatttcaagttccaagttgctaatacagcaacaatttatgaattgaattatcttggttgaaaataaaaagatcactttctcagttttcataagtattatgtctcttctgagctatttcatctatttttggcagtctgaatttttaaaacccatttaaatttttttccttacctttttatttgcatgtggatcaaccatcgctttattggctgagatatgaacatattgttgaaaggtaatttgagagaaatatgaagaactgaggaggaaaaaaaaaaaaaagaaaagaaccaacaacctcaactgcctactccaaaatgttggtcattttatgttaagggaagaattccagggtatggccatggagtgtacaagtatgtgggcagattttcagcaaactcttttcccactgtttaaggagttagtggattactgccattcacttcataatccagtaggatccagtgatccttacaagttagaaaacataatcttctgccttctcatgatccaactaatgccttactcttcttgaaattttaacctatgatattttctgtgcctgaatatttgttatgtagataacaagacctcagtgccttcctgtttttcacattttccttttcaaatagggtctaactcagcaactcgctttaggtcagcagcctccctgaagaccaaaattagaatatccatgacctagttttccatgcgtgtttctgactctgagctacagagtctggtgaagctcacttctgggcttcatctggcaacatctttatccgtagtgggtatggttgacactagcccaatgaaatgaattaaagtggaccaatagggctgagctctctgtgggctggcagtcctggaagccagctttccctgcctctcatcaactgaatgaggtcagcatgtctattcagcttcgtttattttcaagaataatcacgctttcctgaatccaaactaatccatcaccggggtggtttagtggctcaacattgtgttcccatttcagctgatcagtgggcctccaaggaggggctgtaaaatggaggccattgtgtgagcctatcagagttgctgcaaacctgacccctgctcagtaaagcacttgcaaccgtctgttatgctgtgacacatggcccctccccctgccaggagctttggacctaatccaagcatccctttgcccagaaagaagatgggggaggaggcagtaataaaaagattgaagtattttgctggaataagttcaaattcttctgaactcaaactgaggaatttcacctgtaaacctgagtcgtacagaaagctgcctggtatatccaaaagctttttattcctcctgctcatattgtgattctgcctttggggacttttcttaaaccttcagttatgatttttttttcatacacttattggaactctgcttgatttttgcctcttccagtcttcctgacactttaattaccaacctgttacctactttgactttttgcatttaaaacagacactggcatggatatagttttacttttaaactgtgtacataactgaaaatgtgctatactgcatactttttaaatgtaaagatatttttatctttatatgaagaaaatcacttaggaaatggctttgtgattcaatctgtaaactgtgtattccaagacatgtctgttctacatagatgcttagtccctcatgcaaatcaattactggtccaaaagattgctgaaattttatatgcttactgatatattttacaattttttatcatgcatgtcctgtaaaggttacaagcctgcacaataaaaatgtttaacggtt

SEQ ID NO: 120689 - DNA, 2443 bp, Artificial Sequence
  derived and/or modified sequence
gctgcccttcagccacccgcccgcagcctgggagtgccctgaggggacatctctacaccgttcccatccgggaacagggcaacatctacaagcccaacaacaaggccatggcagacgagctgagcgagaagcaagtgtacgacgcgcacaccaaggagatcgacctggtcaaccgcgaccctaaacacctcaacgatgacgtggtcaagattgactttgaagatgtgattgcagaaccagaagggacacacagttttgacggcatttggaaggccagcttcaccaccttcactgtgacgaaatactggttttaccgcttgctgtctgccctctttggcatcccgatggcactcatctggggcatttacttcgccattctctctttcctgcacatctgggcagttgtaccatgcattaagagcttcctgattgagattcagtgcatcagccgtgtctattccatctacgtccacaccgtctgtgacccactctttgaagctgttgggaaaatattcagcaatgtccgcatcaacttgcagaaagaaatataaatgacatttcaaggatagaagtatacctgattttttttccttttaattttcctggtgccaatttcaagttccaagttgctaatacagcaacaatttatgaattgaattatcttggttgaaaataaaaagatcactttctcagttttcataagtattatgtctcttctgagctatttcatctatttttggcagtctgaatttttaaaacccatttaaatttttttccttacctttttatttgcatgtggatcaaccatcgctttattggctgagatatgaacatattgttgaaaggtaatttgagagaaatatgaagaactgaggaggaaaaaaaaaaaaaagaaaagaaccaacaacctcaactgcctactccaaaatgttggtcattttatgttaagggaagaattccagggtatggccatggagtgtacaagtatgtgggcagattttcagcaaactcttttcccactgtttaaggagttagtggattactgccattcacttcataatccagtaggatccagtgatccttacaagttagaaaacataatcttctgccttctcatgatccaactaatgccttactcttcttgaaattttaacctatgatattttctgtgcctgaatatttgttatgtagataacaagacctcagtgccttcctgtttttcacattttccttttcaaatagggtctaactcagcaactcgctttaggtcagcagcctccctgaagaccaaaattagaatatccatgacctagttttccatgcgtgtttctgactctgagctacagagtctggtgaagctcacttctgggcttcatctggcaacatctttatccgtagtgggtatggttgacactagcccaatgaaatgaattaaagtggaccaatagggctgagctctctgtgggctggcagtcctggaagccagctttccctgcctctcatcaactgaatgaggtcagcatgtctattcagcttcgtttattttcaagaataatcacgctttcctgaatccaaactaatccatcaccggggtggtttagtggctcaacattgtgttcccatttcagctgatcagtgggcctccaaggaggggctgtaaaatggaggccattgtgtgagcctatcagagttgctgcaaacctgacccctgctcagtaaagcacttgcaaccgtctgttatgctgtgacacatggcccctccccctgccaggagctttggacctaatccaagcatccctttgcccagaaagaagatgggggaggaggcagtaataaaaagattgaagtattttgctggaataagttcaaattcttctgaactcaaactgaggaatttcacctgtaaacctgagtcgtacagaaagctgcctggtatatccaaaagctttttattcctcctgctcatattgtgattctgcctttggggacttttcttaaaccttcagttatgatttttttttcatacacttattggaactctgcttgatttttgcctcttccagtcttcctgacactttaattaccaacctgttacctactttgactttttgcatttaaaacagacactggcatggatatagttttacttttaaactgtgtacataactgaaaatgtgctatactgcatactttttaaatgtaaagatatttttatctttatatgaagaaaatcacttaggaaatggctttgtgattcaatctgtaaactgtgtattccaagacatgtctgttctacatagatgcttagtccctcatgcaaatcaattactggtccaaaagattgctgaaattttatatgcttactgatatattttacaattttttatcatgcatgtcctgtaaaggttacaagcctgcacaataaaaatgtttaacggttaaa

SEQ ID NO: 120690 - DNA, 2704 bp, Artificial Sequence
  derived and/or modified sequence
gggagaaacgttctcactcgctctctgctcgctgcgggcgctccccgccctctgctgccagaaccttggggatgtgcctagacccggcgcagcacacgtccgggccaaccgcgagcagaacaaacctttggcgggcggccaggaggctccctcccagccaccgcccccctccagcgcctttttttccccccatacaatacaagatcttccttcctcagttcccttaaagcacagcccagggaaacctcctcacagttttcatccagccacgggccagcatgtctgggggcaaatacgtagactcggagggacatctctacaccgttcccatccgggaacagggcaacatctacaagcccaacaacaaggccatggcagacgagctgagcgagaagcaagtgtacgacgcgcacaccaaggagatcgacctggtcaaccgcgaccctaaacacctcaacgatgacgtggtcaagattgactttgaagatgtgattgcagaaccagaagggacacacagttttgacggcatttggaaggccagcttcaccaccttcactgtgacgaaatactggttttaccgcttgctgtctgccctctttggcatcccgatggcactcatctggggcatttacttcgccattctctctttcctgcacatctgggcagttgtaccatgcattaagagcttcctgattgagattcagtgcatcagccgtgtctattccatctacgtccacaccgtctgtgacccactctttgaagctgttgggaaaatattcagcaatgtccgcatcaacttgcagaaagaaatataaatgacatttcaaggatagaagtatacctgattttttttccttttaattttcctggtgccaatttcaagttccaagttgctaatacagcaacaatttatgaattgaattatcttggttgaaaataaaaagatcactttctcagttttcataagtattatgtctcttctgagctatttcatctatttttggcagtctgaatttttaaaacccatttaaatttttttccttacctttttatttgcatgtggatcaaccatcgctttattggctgagatatgaacatattgttgaaaggtaatttgagagaaatatgaagaactgaggaggaaaaaaaaaaaaaagaaaagaaccaacaacctcaactgcctactccaaaatgttggtcattttatgttaagggaagaattccagggtatggccatggagtgtacaagtatgtgggcagattttcagcaaactcttttcccactgtttaaggagttagtggattactgccattcacttcataatccagtaggatccagtgatccttacaagttagaaaacataatcttctgccttctcatgatccaactaatgccttactcttcttgaaattttaacctatgatattttctgtgcctgaatatttgttatgtagataacaagacctcagtgccttcctgtttttcacattttccttttcaaatagggtctaactcagcaactcgctttaggtcagcagcctccctgaagaccaaaattagaatatccatgacctagttttccatgcgtgtttctgactctgagctacagagtctggtgaagctcacttctgggcttcatctggcaacatctttatccgtagtgggtatggttgacactagcccaatgaaatgaattaaagtggaccaatagggctgagctctctgtgggctggcagtcctggaagccagctttccctgcctctcatcaactgaatgaggtcagcatgtctattcagcttcgtttattttcaagaataatcacgctttcctgaatccaaactaatccatcaccggggtggtttagtggctcaacattgtgttcccatttcagctgatcagtgggcctccaaggaggggctgtaaaatggaggccattgtgtgagcctatcagagttgctgcaaacctgacccctgctcagtaaagcacttgcaaccgtctgttatgctgtgacacatggcccctccccctgccaggagctttggacctaatccaagcatccctttgcccagaaagaagatgggggaggaggcagtaataaaaagattgaagtattttgctggaataagttcaaattcttctgaactcaaactgaggaatttcacctgtaaacctgagtcgtacagaaagctgcctggtatatccaaaagctttttattcctcctgctcatattgtgattctgcctttggggacttttcttaaaccttcagttatgatttttttttcatacacttattggaactctgcttgatttttgcctcttccagtcttcctgacactttaattaccaacctgttacctactttgactttttgcatttaaaacagacactggcatggatatagttttacttttaaactgtgtacataactgaaaatgtgctatactgcatactttttaaatgtaaagatatttttatctttatatgaagaaaatcacttaggaaatggctttgtgattcaatctgtaaactgtgtattccaagacatgtctgttctacatagatgcttagtccctcatgcaaatcaattactggtccaaaagattgctgaaattttatatgcttactgatatattttacaattttttatcatgcatgtcctgtaaaggttacaagcctgcacaataaaaatgtttaacggtt

SEQ ID NO: 120691 - DNA, 537 bp, Artificial Sequence
  derived and/or modified sequence
atgagcggcggcaagtacgtggacagcgagggccacctgtacaccgtgcccatcagagagcagggcaacatctacaagcccaacaacaaggccatggccgacgagctgagcgagaagcaggtgtacgacgcccacaccaaggagatcgacctggtgaacagagaccccaagcacctgaacgacgacgtggtgaagatcgacttcgaggacgtgatcgccgagcccgagggcacccacagcttcgacggcatctggaaggccagcttcaccaccttcaccgtgaccaagtactggttctacagactgctgagcgccctgttcggcatccccatggccctgatctggggcatctacttcgccatcctgagcttcctgcacatctgggccgtggtgccctgcatcaagagcttcctgatcgagatccagtgcatcagcagagtgtacagcatctacgtgcacaccgtgtgcgaccccctgttcgaggccgtgggcaagatcttcagcaacgtgagaatcaacctgcagaaggagatctag

SEQ ID NO: 120692 - protein, 480 aa, Artificial Sequence
  derived and/or modified sequence
MASDSIFESFPSYPQCFMRECILGMNPSRDVHDASTSRRFTPPSTALSPGKMSEALPLGAPDAGAALAGKLRSGDRSMVEVLADHPGELVRTDSPNFLCSVLPTHWRCNKTLPIAFKVVALGDVPDGTLVTVMAGNDENYSAELRNATAAMKNQVARFNDLRFVGRSGRGKSFTLTITVFTNPPQVATYHRAIKITVDGPREPRRHRQKLDDQTKPGSLSFSERLSELEQLRRTAMRVSPHHPAPTPNPRASLNHSTAFNPQPQSQMQDTRQIQPSPPWSYDQSYQYLGSIASPSVHPATPISPGRASGMTTLSAELSSRLSTAPDLTAFSDPRQFPALPSISDPRMHYPGAFTYSPTPVTSGIGIGMSAMGSATRYHTYLPPPYPGSSQAQGGPFQASSPSYHLYYGASAGSYQFSMVGGERSPPRILPPCTNASTGSALLNPSLPNQSDVVEAEGSHSNSPTNMAPSARLEEAVWRPY

SEQ ID NO: 120693 - protein, 475 aa, Artificial Sequence
  derived and/or modified sequence
MNPSRDVHDASTSRRFTPPSTALSPGKMSEALPLGAPDAGAALAGKLRSGDRSMVEVLADHPGELVRTDSPNFLCSVLPTHWRCNKTLPIAFKVVALGDVPDGTLVTVMAGNDENYSAELRNATAAMKNQVARFNDLRFVGRSGRGKSFTLTITVFTNPPQVATYHRAIKITVDGPREPRRHRQKLDDQTKPGSLSFSERLSELEQLRRTAMRVSPHHPAPTPNPRASLNHSTAFNPQPQSQMQDTRQIQPSPPWSYDQSYQYLGSIASPSVHPATPISPGRASGMTTLSAELSSRLSTAPDLTAFSDPRQFPALPSISDPRMHYPGAFTYSPTPVTSGIGIGMSAMGSATRYHTYLPPPYPGSSQAQGGPFQASSPSYHLYYGASAGSYQFSMVGGERSPPRILPPCTNASTGSALLNPSLPNQSDVVEAEGSHSNSPTNMARASCSRQARRDPGPWARPPSWGRGRPTARISL

SEQ ID NO: 120694 - protein, 32 aa, Artificial Sequence
  derived and/or modified sequence
MASDSIFESFPSYPQCFMRECILGMNPSRDVH

SEQ ID NO: 120695 - protein, 137 aa, Artificial Sequence
  derived and/or modified sequence
MQDTRQIQPSPPWSYDQSYQYLGSIASPSVHPATPISPGRASGMTTLSAELSSRLSTAPDLTAFSDPRQFPALPSISDPRMHYPGAFTYSPTPVTSGIGIGMSAMGSATRYHTYLPPPYPGSSQAQGGPFQASSPSY

SEQ ID NO: 120696 - DNA, 5967 bp, Artificial Sequence
  derived and/or modified sequence
ctttgggcctcataaacaaccacagaaccacaagttgggtagcctggcagtgtcagaagtctgaacccagcatagtggtcagcaggcaggacgaatcacactgaatgcaaaccacagggtttcgcagcgtggtaaaagaaatcattgagtcccccgccttcagaagagggtgcattttcaggaggaagcgatggcttcagacagcatatttgagtcatttccttcgtacccacagtgcttcatgagagaatgcatacttggaatgaatccttctagagacgtccacgatgccagcacgagccgccgcttcacgccgccttccaccgcgctgagcccaggcaagatgagcgaggcgttgccgctgggcgccccggacgccggcgctgccctggccggcaagctgaggagcggcgaccgcagcatggtggaggtgctggccgaccacccgggcgagctggtgcgcaccgacagccccaacttcctctgctccgtgctgcctacgcactggcgctgcaacaagaccctgcccatcgctttcaaggtggtggccctaggggatgttccagatggcactctggtcactgtgatggctggcaatgatgaaaactactcggctgagctgagaaatgctaccgcagccatgaagaaccaggttgcaagatttaatgacctcaggtttgtcggtcgaagtggaagagggaaaagcttcactctgaccatcactgtcttcacaaacccaccgcaagtcgccacctaccacagagccatcaaaatcacagtggatgggccccgagaacctcgaagacatcggcagaaactagatgatcagaccaagcccgggagcttgtccttttccgagcggctcagtgaactggagcagctgcggcgcacagccatgagggtcagcccacaccacccagcccccacgcccaaccctcgtgcctccctgaaccactccactgcctttaaccctcagcctcagagtcagatgcaggatacaaggcagatccaaccatccccaccgtggtcctacgatcagtcctaccaatacctgggatccattgcctctccttctgtgcacccagcaacgcccatttcacctggacgtgccagcggcatgacaaccctctctgcagaactttccagtcgactctcaacggcacccgacctgacagcgttcagcgacccgcgccagttccccgcgctgccctccatctccgacccccgcatgcactatccaggcgccttcacctactccccgacgccggtcacctcgggcatcggcatcggcatgtcggccatgggctcggccacgcgctaccacacctacctgccgccgccctaccccggctcgtcgcaagcgcagggaggcccgttccaagccagctcgccctcctaccacctgtactacggcgcctcggccggctcctaccagttctccatggtgggcggcgagcgctcgccgccgcgcatcctgccgccctgcaccaacgcctccaccggctccgcgctgctcaaccccagcctcccgaaccagagcgacgtggtggaggccgagggcagccacagcaactcccccaccaacatggcgccctccgcgcgcctggaggaggccgtgtggaggccctactgaggcgccaggcctggcccggctgggccccgcgggccgccgccttcgcctccgggcgcgcgggcctcctgttcgcgacaagcccgccgggatcccgggccctgggcccggccaccgtcctggggccgagggcgcccgacggccaggatctcgctgtaggtcaggcccgcgcagcctcctgcgcccagaagcccacgccgccgccgtctgctggcgccccggccctcgcggaggtgtccgaggcgacgcacctcgagggtgtccgccggccccagcacccaggggacgcgctggaaagcaaacaggaagattcccggagggaaactgtgaatgcttctgatttagcaatgctgtgaataaaaagaaagattttatacccttgacttaactttttaaccaagttgtttattccaaagagtgtggaattttggttggggtggggggagaggagggatgcaactcgccctgtttggcatctaattcttatttttaatttttccgcaccttatcaattgcaaaatgcgtatttgcatttgggtggtttttatttttatatacgtttatataaatatatataaattgagcttgcttctttcttgctttgaccatggaaagaaatatgattcccttttctttaagttttatttaacttttcttttggacttttgggtagttgtttttttttgttttgttttgtttttttgagaaacagctacagctttgggtcatttttaactactgtattcccacaaggaatccccagatatttatgtatcttgatgttcagacatttatgtgttgataattttttaattatttaaatgtacttatattaagaaaaatatcaagtactacattttcttttgttcttgatagtagccaaagttaaatgtatcacattgaagaaggctagaaaaaaagaatgagtaatgtgatcgcttggttatccagaagtattgtttacattaaactccctttcatgttaatcaaacaagtgagtagctcacgcagcaacgtttttaataggatttttagacactgagggtcactccaaggatcagaagtatggaattttctgccaggctcaacaagggtctcatatctaacttcctccttaaaacagagaaggtcaatctagttccagagggttgaggcaggtgccaataattacatctttggagaggatttgatttctgcccagggatttgctcaccccaaggtcatctgataatttcacagatgctgtgtaacagaacacagccaaagtaaactgtgtaggggagccacatttacataggaaccaaatcaatgaatttaggggttacgattatagcaatttaagggcccaccagaagcaggcctcgaggagtcaatttgcctctgtgtgcctcagtggagacaagtgggaaaacatggtcccacctgtgcgagaccccctgtcctgtgctgctcactcaacaacatctttgtgttgctttcaccaggctgagaccctaccctatggggtatatgggcttttacctgtgcaccagtgtgacaggaaagattcatgtcactactgtccgtggctacaattcaaaggtatccaatgtcgctgtaaattttatggcactatttttattggaggatttggtcagaatgcagttgttgtacaactcataaatactaactgctgattttgacacatgtgtgctccaaatgatctggtggttatttaacgtacctcttaaaattcgttgaaacgatttcaggtcaactctgaagagtatttgaaagcaggacttcagaacagtgtttgatttttattttataaatttaagcattcaaattaggcaaatctttggctgcaggcagcaaaaacagctggacttatttaaaacaacttgtttttgagttttcttatatatatattgattatttgttttacacacatgcagtagcactttggtaagagttaaagagtaaagcagcttatgttgtcaggtcgttcttatctagagaagagctatagcagatctcggacaaactcagaatatattcactttcatttttgacaggattccctccacaactcagtttcatatattattccgtattacatttttgcagctaaattaccataaaatgtcagcaaatgtaaaaatttaatttctgaaaagcaccattagcccatttcccccaaattaaacgtaaatgttttttttcagcacatgttaccatgtctgacctgcaaaaatgctggagaaaaatgaaggaaaaaattatgtttttcagtttaattctgttaactgaagatattccaactcaaaaccagcctcatgctctgattagataatcttttacattgaacctttactctcaaagccatgtgtggagggggcttgtcactattgtaggctcactggattggtcatttagagtttcacagactcttaccagcatatatagtatttaattgtttcaaaaaaaatcaaactgtagttgttttggcgataggtctcacgcaacacatttttgtatgtgtgtgtgtgtgcgtgtgtgtgtgtgtgtgtgaaaaattgcattcattgacttcaggtagattaaggtatctttttattcattgccctcaggaaagttaaggtatcaatgagacccttaagccaatcatgtaataactgcatgtgtctggtccaggagaagtattgaataagccatttctactgcttactcatgtccctatttatgatttcaacatggatacatatttcagttctttctttttctcactatctgaaaatacatttccctccctctcttccccccaatatctccctttttttctctcttcctctatcttccaaaccccactttctccctcctccttttcctgtgttctcttaagcagatagcacatacccccacccagtaccaaatttcagaacacaagaaggtccagttcttcccccttcacataaaggaacatggtttgtcagcctttctcctgtttatgggtttcttccagcagaacagagacattgccaaccatattggatctgcttgctgtccaaaccagcaaactttcctgggcaaatcacaatcagtgagtaaatagacagcctttctgctgccttgggtttctgtgcagataaacagaaatgctctgattagaaaggaaatgaatggttccactcaaatgtcctgcaatttaggattgcagatttctgccttgaaatacctgtttctttgggacattccgtcctgatgatttttatttttgttggtttttatttttggggggaatgacatgtttgggtcttttatacatgaaaatttgtttgacaataatctcacaaaacatattttacatctgaacaaaatgcctttttgtttaccgtagcgtatacatttgttttgggatttttgtgtgtttgttgggaattttgtttttagccaggtcagtattgatgaggctgatcatttggctctttttttccttccagaagagttgcatcaacaaagttaattgtatttatgtatgtaaatagattttaagcttcattataaaatattgttaatgcctataactttttttcaatttttttgtgtgtgtttctaaggactttttcttaggtttgctaaatactgtagggaaaaaaatgcttctttctactttgtttattttagactttaaaatgagctacttcttattcacttttgtaaacagctaatagcatggttccaattttttttaagttcactttttttgttctaggggaaatgaatgtgcaaaaaaagaaaaagaactgttggttatttgtgttattctggatgtataaaaatcaatggaaaaaaataaactttcaaattgaaatgacggtataacacatctactgaaaaagcaacgggaaatgtggtcctatttaagccagcccccacctagggtctatttgtgtggcagttattgggtttggtcacaaaacatcctgaaaattcgtgcgtgggcttctttctccctggtacaaacgtatggaatgcttcttaaaggggaactgtcaagctggtgtcttcagccagatgacatgagagaatatcccagaaccctctctccaaggtgtttctagatagcacaggagagcaggcactgcactgtccacagtccacggtacacagtcgggtgggccgcctcccctctcctgggagcattcgtcgtgcccagcctgagcagggcagctggactgctgctgttcaggagccaccagagccttcctctctttgtaccacagtttcttctgtaaatccagtgttacaatcagtgtgaatggcaaataaacagtttgacaagtacatacaccata

SEQ ID NO: 120697 - DNA, 1443 bp, Artificial Sequence
  derived and/or modified sequence
atggccagcgacagcatcttcgagagcttccccagctacccccagtgcttcatgagagagtgcatcctgggcatgaaccccagcagagacgtgcacgacgccagcaccagcagaagattcaccccccccagcaccgccctgagccccggcaagatgagcgaggccctgcccctgggcgcccccgacgccggcgccgccctggccggcaagctgagaagcggcgacagaagcatggtggaggtgctggccgaccaccccggcgagctggtgagaaccgacagccccaacttcctgtgcagcgtgctgcccacccactggagatgcaacaagaccctgcccatcgccttcaaggtggtggccctgggcgacgtgcccgacggcaccctggtgaccgtgatggccggcaacgacgagaactacagcgccgagctgagaaacgccaccgccgccatgaagaaccaggtggccagattcaacgacctgagattcgtgggcagaagcggcagaggcaagagcttcaccctgaccatcaccgtgttcaccaaccccccccaggtggccacctaccacagagccatcaagatcaccgtggacggccccagagagcccagaagacacagacagaagctggacgaccagaccaagcccggcagcctgagcttcagcgagagactgagcgagctggagcagctgagaagaaccgccatgagagtgagcccccaccaccccgcccccacccccaaccccagagccagcctgaaccacagcaccgccttcaacccccagccccagagccagatgcaggacaccagacagatccagcccagccccccctggagctacgaccagagctaccagtacctgggcagcatcgccagccccagcgtgcaccccgccacccccatcagccccggcagagccagcggcatgaccaccctgagcgccgagctgagcagcagactgagcaccgcccccgacctgaccgccttcagcgaccccagacagttccccgccctgcccagcatcagcgaccccagaatgcactaccccggcgccttcacctacagccccacccccgtgaccagcggcatcggcatcggcatgagcgccatgggcagcgccaccagataccacacctacctgccccccccctaccccggcagcagccaggcccagggcggccccttccaggccagcagccccagctaccacctgtactacggcgccagcgccggcagctaccagttcagcatggtgggcggcgagagaagcccccccagaatcctgcccccctgcaccaacgccagcaccggcagcgccctgctgaaccccagcctgcccaaccagagcgacgtggtggaggccgagggcagccacagcaacagccccaccaacatggcccccagcgccagactggaggaggccgtgtggagaccctactag

SEQ ID NO: 120698 - DNA, 1428 bp, Artificial Sequence
  derived and/or modified sequence
atgaaccccagcagagacgtgcacgacgccagcaccagcagaagattcaccccccccagcaccgccctgagccccggcaagatgagcgaggccctgcccctgggcgcccccgacgccggcgccgccctggccggcaagctgagaagcggcgacagaagcatggtggaggtgctggccgaccaccccggcgagctggtgagaaccgacagccccaacttcctgtgcagcgtgctgcccacccactggagatgcaacaagaccctgcccatcgccttcaaggtggtggccctgggcgacgtgcccgacggcaccctggtgaccgtgatggccggcaacgacgagaactacagcgccgagctgagaaacgccaccgccgccatgaagaaccaggtggccagattcaacgacctgagattcgtgggcagaagcggcagaggcaagagcttcaccctgaccatcaccgtgttcaccaaccccccccaggtggccacctaccacagagccatcaagatcaccgtggacggccccagagagcccagaagacacagacagaagctggacgaccagaccaagcccggcagcctgagcttcagcgagagactgagcgagctggagcagctgagaagaaccgccatgagagtgagcccccaccaccccgcccccacccccaaccccagagccagcctgaaccacagcaccgccttcaacccccagccccagagccagatgcaggacaccagacagatccagcccagccccccctggagctacgaccagagctaccagtacctgggcagcatcgccagccccagcgtgcaccccgccacccccatcagccccggcagagccagcggcatgaccaccctgagcgccgagctgagcagcagactgagcaccgcccccgacctgaccgccttcagcgaccccagacagttccccgccctgcccagcatcagcgaccccagaatgcactaccccggcgccttcacctacagccccacccccgtgaccagcggcatcggcatcggcatgagcgccatgggcagcgccaccagataccacacctacctgccccccccctaccccggcagcagccaggcccagggcggccccttccaggccagcagccccagctaccacctgtactacggcgccagcgccggcagctaccagttcagcatggtgggcggcgagagaagcccccccagaatcctgcccccctgcaccaacgccagcaccggcagcgccctgctgaaccccagcctgcccaaccagagcgacgtggtggaggccgagggcagccacagcaacagccccaccaacatggccagagccagctgcagcagacaggccagaagagaccccggcccctgggccagaccccccagctggggcagaggcagacccaccgccagaatcagcctgtag

SEQ ID NO: 120699 - DNA, 1443 bp, Artificial Sequence
  derived and/or modified sequence
atggccagcgacagtatttttgaatcattccctagttaccctcagtgtttcatgcgcgaatgcatcttaggtatgaatccaagtagagacgtccacgacgcaagtacctcccggcgctttacacccccatctaccgccctgtctcccggcaagatgtctgaggctttaccgcttggcgccccggatgctggcgctgctctggccggcaaactccgtagcggagataggtccatggtagaggtgctcgccgatcatcctggagagctggtgcggaccgactctccaaactttctatgcagcgtgctgcctacacactggaggtgcaacaagaccctgcctatcgcgttcaaggttgtagcactcggagacgtgccagatgggacgctagtgaccgtgatggcaggtaacgatgaaaattattccgccgaactccggaacgccaccgccgccatgaaaaaccaggtggcaagattcaacgatctgaggttcgtcggcaggagtggaaggggaaaaagcttcacgctaactattaccgtgtttaccaatcccccacaggttgccacctatcacagagccatcaaaatcacagtagatggcccaagagagccccggcggcatcgacagaagctggacgatcagacaaagcccggctcactgtcattttcggaaaggctgagtgagctggaacagctgcggcgcactgccatgagagtatcccctcatcatcctgctcccactccaaatcctcgcgcatccctgaatcacagcaccgccttcaaccctcagccacagtctcagatgcaggatacaaggcagattcagcccagtcccccatggagttacgatcagtcttatcagtatttgggctctattgcctccccaagcgtgcaccccgccactcccatctcgcctggccgtgcttccggcatgaccaccctcagcgccgagttgtctagcaggttgtccaccgctcctgacctcacagcatttagcgaccctaggcagtttcccgctctgccaagcatcagcgatcctagaatgcattaccctggagcattcacgtatagtccaacaccagtcactagcggaatagggatcggcatgagcgcgatgggatccgctacacgctaccatacctacctgcccccgccttaccctgggagttctcaagctcagggcgggcccttccaggcctccagtccgtcttaccatctgtactatggcgcaagtgctgggtcctatcagttttcgatggttggcggagagagatcaccgccacgaatcctccccccttgtaccaacgcatctacaggatccgccctgctcaaccccagtcttccaaatcagtcagatgtcgttgaagccgagggtagtcacagcaatagcccgacaaacatggctcccagtgccagactggaagaagcagtgtggaggccttactag

SEQ ID NO: 120700 - DNA, 1428 bp, Artificial Sequence
  derived and/or modified sequence
atgaatccctcaagggatgtgcatgatgctagtacgtcccgcaggttcacgcctccttccaccgccctgtcccctggtaagatgtctgaggccctgcccctaggggctcccgacgccggggctgctttagctggaaagctgcgctccggggaccgatccatggtggaggttctagctgaccaccctggggagcttgtgcggacagacagccctaatttcctgtgcagtgtgctaccaacacactggaggtgtaacaagacccttcccatcgcgttcaaggtggtagctttgggggatgtgcccgacggaacactggttaccgtcatggcagggaatgacgaaaactactctgctgagctgcgcaacgcaacagccgcaatgaaaaatcaggtcgcccggttcaacgatctcaggtttgtgggccggagcgggcggggcaagtcattcacacttacaattacggtatttaccaatcccccgcaggtggcgacataccacagggcaattaagatcactgtcgacggtccccgggaacctcgacgacatcgccaaaaacttgacgatcaaaccaagccgggaagtctttcatttagcgaacgactgtctgagctggaacagctgcggcgcaccgcgatgagggttagtccacatcaccctgcacctacacccaatcccagagccagcctgaatcacagcaccgccttcaacccgcagcctcaaagccagatgcaggataccaggcagattcagccatcccctccatggtcctatgatcaaagttaccagtatctgggctcgatcgcctccccatctgtgcacccagcgacccccatctctcctggacgggcctcaggcatgaccaccctttctgctgaactgtcctcaaggttaagcactgccccagatttgaccgcattttctgaccctcgacaatttccagcattgcctagtataagcgaccctcgcatgcactatccaggcgcctttacttatagccctactcccgtgacatccgggatcggtatcggaatgagtgcaatgggatctgccacacgctatcatacatatctaccaccaccttatcctggttcttcccaggcccagggaggcccatttcaggctagcagtccgtcttatcacctgtactacggggccagtgccggcagctatcagttctctatggtcggaggggagagaagcccgccccgcattcttccaccttgcactaatgcctccacaggttccgccttgttaaacccgtctctacccaatcagtctgacgttgttgaagccgaggggagtcactctaattcgccaaccaacatggcgcgggccagttgtagccgccaggcacgcagggatccagggccctgggcacggcccccttcgtgggggcgaggcagaccaacagccagaataagcctttag

SEQ ID NO: 120701 - DNA, 1443 bp, Artificial Sequence
  derived and/or modified sequence
atggcatctgattccatatttgagagcttcccaagctacccacaatgctttatgagagaatgtatcctcgggatgaacccatcaagagacgtgcacgacgccagcacttcgcgccggtttacaccgcctagtacagctctgtctcctggaaagatgtccgaggctctgccactgggagcacccgacgcaggcgccgctcttgcagggaagctccggagcggggatcgcagcatggtggaagtgttggcagaccatcccggcgaactcgtccgcaccgattcccccaattttctgtgctccgtgctccccacgcattggagatgtaacaagaccctccctattgcatttaaggtcgttgctctcggagacgtcccagatggcactttggtcactgtaatggccggaaacgatgaaaactatagcgctgagctgcgcaacgccacagcagcgatgaagaaccaagtggcccgctttaatgatctgcggttcgttggacgcagcgggcgaggtaagagcttcacgctgacaattactgtttttaccaatccaccgcaggtggccacctatcaccgcgccattaagattaccgtggacgggccacgagagcctcgtcggcatcggcagaagctcgatgaccaaacaaaaccaggaagcctcagtttttcggaacgtctgtcagagctggaacaacttaggcggactgccatgagggtgtcccctcatcaccctgcccccacccctaacccgcgggcctctttgaatcatagtacagccttcaacccacagccccagagccagatgcaggacactaggcagatccagccctctccgccatggagttacgatcaatcttaccagtatttgggcagcatcgccagtccatccgttcatcctgccacgcctatttctcctgggagagcctctggtatgactactctctccgctgagctgtcttccaggcttagcacagccccggatctcaccgctttttccgatcccagacagttcccggccctgcctagtattagtgacccccgaatgcactaccccggcgcctttacgtattctcctacgccagtgacctccggcattggaatcggtatgagcgcgatgggctcagcgaccagataccatacttacctgcctccaccctaccctggatccagccaggcccaaggagggccatttcaggctagcagcccctcatatcatttatattacggcgccagcgccggctcctatcagttctccatggtgggcggtgagaggagtccccctcggatcttacctccttgtacaaacgctagcaccggaagcgccttgctgaacccctcgctccctaaccagtctgatgtagtcgaagcagagggctctcacagtaatagcccaacaaacatggccccttccgcaaggctcgaggaggccgtttggagaccctattag

SEQ ID NO: 120702 - DNA, 1443 bp, Artificial Sequence
  derived and/or modified sequence
atggccagtgacagcatctttgagagcttccccagctacccccagtgcttcatgagggagtgcatcctgggcatgaaccccagcagagatgtgcatgatgccagcaccagccgccgcttcaccccacccagcacagccctgagccctgggaagatgtctgaggccctgcccctgggcgccccagatgctggagctgccctggccggcaagctgcggagcggggaccgctccatggtggaggtgctggccgaccaccctggagagctggtgaggacagacagccccaacttcctgtgcagcgtgctgcccacccactggcgctgcaacaagaccctgcccatcgccttcaaggtggtggccctgggagatgtgcctgatggcaccctggtgacagtgatggctggaaatgatgagaactacagcgctgagctgagaaatgccacagctgccatgaagaaccaggtggcccgcttcaatgacctgcgctttgtgggccgcagcggccggggcaagagcttcaccctgaccatcaccgtcttcaccaaccccccccaggtggccacctaccaccgggccatcaagatcaccgtggatggcccccgggagccccggcggcaccggcagaagctggatgaccagaccaagccaggcagcctgtccttcagcgagcggctgtctgagctggagcagctgcggaggacagccatgagggtgagcccccaccacccagcccccacccccaacccccgggccagcctgaaccacagcacagccttcaacccccagccccagagccagatgcaggacacccggcagatccagcccagccccccctggagctatgaccagagctaccagtacctgggcagcatcgccagccccagcgtgcacccagccacccccatcagccctggccgggccagcggcatgaccaccctgtctgctgagctgagcagccggctgagcacagccccagacctgacagccttcagtgacccccggcagtttcctgccctgcccagcatcagtgaccccaggatgcactacccaggggccttcacctacagccccacccctgtgaccagcggcatcggcatcggcatgtctgccatgggcagcgccacccgctaccacacctacctgcccccaccctacccaggcagcagccaggcccagggcggccccttccaggccagcagccccagctaccacctgtactatggagccagcgctggcagctaccagttctccatggtgggcggggagaggagccccccacgcatcctgcccccctgcaccaatgccagcactggaagtgccctgctgaaccccagcctgcccaaccagagtgatgtggtggaggccgagggcagccacagcaacagccccaccaacatggcccccagcgcccggctggaggaggccgtgtggaggccctactag

SEQ ID NO: 120703 - DNA, 1428 bp, Artificial Sequence
  derived and/or modified sequence
atgaaccccagcagagatgtgcatgatgccagcaccagccgccgcttcaccccacccagcacagccctgagccctgggaagatgtctgaggccctgcccctgggcgccccagatgctggagctgccctggccggcaagctgcggagcggggaccgctccatggtggaggtgctggccgaccaccctggagagctggtgaggacagacagccccaacttcctgtgcagcgtgctgcccacccactggcgctgcaacaagaccctgcccatcgccttcaaggtggtggccctgggagatgtgcctgatggcaccctggtgacagtgatggctggaaatgatgagaactacagcgctgagctgagaaatgccacagctgccatgaagaaccaggtggcccgcttcaatgacctgcgctttgtgggccgcagcggccggggcaagagcttcaccctgaccatcaccgtcttcaccaaccccccccaggtggccacctaccaccgggccatcaagatcaccgtggatggcccccgggagccccggcggcaccggcagaagctggatgaccagaccaagccaggcagcctgtccttcagcgagcggctgtctgagctggagcagctgcggaggacagccatgagggtgagcccccaccacccagcccccacccccaacccccgggccagcctgaaccacagcacagccttcaacccccagccccagagccagatgcaggacacccggcagatccagcccagccccccctggagctatgaccagagctaccagtacctgggcagcatcgccagccccagcgtgcacccagccacccccatcagccctggccgggccagcggcatgaccaccctgtctgctgagctgagcagccggctgagcacagccccagacctgacagccttcagtgacccccggcagtttcctgccctgcccagcatcagtgaccccaggatgcactacccaggggccttcacctacagccccacccctgtgaccagcggcatcggcatcggcatgtctgccatgggcagcgccacccgctaccacacctacctgcccccaccctacccaggcagcagccaggcccagggcggccccttccaggccagcagccccagctaccacctgtactatggagccagcgctggcagctaccagttctccatggtgggcggggagaggagccccccacgcatcctgcccccctgcaccaatgccagcactggaagtgccctgctgaaccccagcctgcccaaccagagtgatgtggtggaggccgagggcagccacagcaacagccccaccaacatggcccgggccagctgcagccggcaggcccggcgggaccccggcccctgggcccggcccccatcctggggccggggccggcccacagcccgcatcagcctgtag

SEQ ID NO: 120704 - DNA, 1443 bp, Artificial Sequence
  derived and/or modified sequence
atggccagcgacagcatcttcgagagcttccccagctacccccagtgctttatgcgcgagtgcatcctggggatgaacccatcgcgtgatgtgcacgacgccagcacctctagacggttcaccccaccttctactgcattgagcccaggtaaaatgtcagaggctttgccgttaggcgcccctgacgcaggcgctgccttggcggggaagttgcggagtggcgaccggtccatggttgaggtgctcgcagatcatcccggagaactggtgagaacagacagccccaatttcctgtgctccgttctgcctacacattggcgttgtaacaagacccttcctattgcctttaaggtagtggccctcggagacgtgccagatggcactttggtaacagtgatggcagggaatgatgagaactattccgccgagctgcgtaatgccacggccgcgatgaaaaaccaggttgcaagattcaacgacctccgcttcgtgggccgttccgggcgggggaagtcgttcaccctgacaatcacagtcttcactaaccccccccaggtggcaacttatcaccgcgcaataaagatcacagtggatggacccagggaacccagacggcaccgtcaaaaactcgatgaccagacgaagcccggcagcctgtcatttagcgaaagattgagcgagttggagcagcttcgccgcactgctatgcgcgtgtccccacatcaccccgcccctactccaaaccctcgagcctcactcaatcattccaccgcgtttaatccacagccccagagtcagatgcaggatacacgacagattcagccttcacctccctggagctatgaccagtcttatcagtatctcggtagtattgcatctccatcagtgcatccagcaacaccaatcagtcccgggagggcatcaggcatgacgacgctgtcagcggaacttagttcccggctgagcacagcccccgatctgacagctttctcagatccccgccaattccccgccctgccaagcatttcagacccgagaatgcattatcccggagccttcacatactccccaaccccagtaacatcaggaatcggaattggcatgtccgcaatgggtagtgctacccggtatcacacttaccttccgcctccttacccaggcagcagtcaggcccaaggggggccatttcaggcaagcagcccatcttaccatctgtactacggggcgagtgcgggcagctatcagttctccatggtagggggtgaacgcagccctccgcgaatcctgcctccatgcaccaacgctagcaccgggagcgccctgctaaacccgtcattaccaaaccagtccgacgtcgtcgaagccgagggctcccacagtaactcccctactaatatggcaccctctgctcgtttagaggaggctgtctggaggccatattag

SEQ ID NO: 120705 - DNA, 1428 bp, Artificial Sequence
  derived and/or modified sequence
atgaaccccagccgggacgtgcacgacgccagcaccagccggcggttcacaccacctagcacagcattgagcccaggcaagatgtctgaggctcttcccttaggggctccagacgccggagcagccctggctggaaaactcaggtctggcgatcgttctatggtggaggtcctcgctgatcatccaggagaactcgtccgaacagactctcccaattttctatgttcggtgctccctacccactggagatgcaacaagaccctgccaatcgcctttaaggtcgtagcactaggtgacgtccctgacggtacgctggtgactgttatggccggcaacgatgaaaattatagcgcagagctacgcaacgccacagccgctatgaagaatcaggttgcaaggtttaatgacctccgcttcgtgggccgctcgggtagaggaaagagttttactcttaccatcactgtttttaccaaccccccacaggtcgctacgtaccaccgcgctataaaaatcacagtcgatggaccacgggaacctcggagacatcggcagaaattagatgaccagacaaagcctggaagcctatctttcagcgagaggttgtccgagttggagcagctgcggcgaacagctatgagagttagcccacatcatcctgcccccacaccgaaccccagagccagcttaaatcattctacagcctttaatccgcagcctcaatcccagatgcaagatacccggcaaatacagcctagccccccttggtcctatgatcagtcttaccagtatttgggctctatcgcttctcccagcgttcaccccgctacacctatctcacctgggcgagcgagtggtatgaccaccctgtcagccgaactctcttcaagactgtctacagctcccgacttgactgcgttcagcgatccccgccaatttcccgccctcccgtcaatctcagatccaagaatgcattatccgggtgctttcacctactcccctacccccgtcacgagcggaattggaattggtatgtccgccatgggcagcgccacaaggtaccacacttatttaccccctccgtatcctggctccagccaggcacagggtgggcccttccaagcctccagtccatcgtaccacttgtactatggggcttcggctggaagctaccagttcagtatggtagggggagagagatcccccccgcggattttaccaccttgcacaaatgcctcaaccggctcagcattactaaatccaagccttcccaatcagtccgatgtggtggaagctgagggcagccactccaacagccccacgaatatggcacgcgcctcatgctcaaggcaggctaggcgtgatcccggaccttgggctaggccaccttcatggggccggggaagaccaacagctcggatatccctttag

SEQ ID NO: 120706 - DNA, 1443 bp, Artificial Sequence
  derived and/or modified sequence
atggccagcgacagcatcttcgagagcttccccagctacccccagtgcttcatgagggagtgcatcctgggaatgaaccccagtcgggacgttcatgacgctagcacctccaggagatttaccccccctagtaccgcactatctcctggaaaaatgagcgaggcacttcctcttggtgcacctgatgccggtgccgcattggctggcaagctacggtcaggcgatcgatcaatggtagaggtgctagcagaccaccctggggagctcgtccggaccgacagccccaattttctttgttctgtgctgcctacacattggcggtgtaataagactctgccgattgcctttaaggttgtggccctgggggatgtgccggacggcacactcgttactgtcatggctgggaacgatgagaattattcagccgagctgcgcaatgccaccgccgccatgaaaaaccaagtagcacgattcaatgacctgcgcttcgtcggaaggtccggccggggcaaaagttttacactgacaattactgtgtttaccaatccaccccaggtggcgacgtaccatcgcgccatcaaaattaccgtcgatggaccccgagagccccggaggcataggcaaaagctggatgatcagaccaaaccagggtccctttccttcagcgaaagacttagtgagctggaacagcttcgccggactgctatgagggtgtctccacatcatccagcacctacacccaatcccagagccagcttgaaccactccacagcttttaacccccagccccagagtcaaatgcaagacacccgacagattcagccgagtccaccttggtcctacgatcaatcctatcagtacttgggttcaatcgcctcaccatccgtgcaccccgccaccccaatatccccaggccgggccagcggaatgactacactgagcgccgagctttcgtctcgtctgagcactgctccggatctaaccgcgttcagcgaccctcggcagtttcctgctctaccaagcatttcggacccaaggatgcactacccaggtgcattcacatactctccaactccggtgacctcgggtattggcattggcatgtccgcgatgggatcggccacacggtaccatacctatctccccccaccatatcctgggagtagtcaggcccagggcggccccttccaggcctcgtcacccagttatcacctttactacggcgcctcagccggctcttatcagttcagcatggtagggggcgaacggtcgccacctcgtatcctgcccccctgtaccaatgctagcaccggtagcgctctgttgaatccttctctgcctaaccagtcggacgttgtggaggcggagggctcacatagtaatagtcccaccaacatggcgcccagcgccaggctggaagaagcagtgtggagaccttactag

SEQ ID NO: 120707 - DNA, 1443 bp, Artificial Sequence
  derived and/or modified sequence
atggctagcgactcaatatttgagagtttcccctcataccctcagtgctttatgcgcgagtgcatcctgggaatgaatccctctcgcgacgtgcatgacgcatccaccagtcgtcggttcacccctccatctactgcactgagtcccggaaaaatgagcgaggccctgcccttaggagctcccgatgccggtgctgcgctcgcagggaaattacgatcaggagatcgttctatggtggaagtgcttgccgatcatcccggtgagcttgtgcgcactgacagccccaattttctgtgttccgtcctgccaactcattggcgctgcaataagacacttcccatagcatttaaagtcgttgctctgggggacgtgcccgacggaacactggtgactgtcatggcaggcaacgacgagaactactccgccgagctgaggaacgctacggcggctatgaaaaatcaggtggctaggtttaacgatttgcggttcgtgggcaggtctggcaggggcaaaagctttacactgacgattaccgtcttcacaaaccccccacaagtggccacgtaccatcgggctattaagattacagtggatggcccaagagagccgaggcggcatcgccagaaactggacgatcaaaccaagccaggttccctgtcgttcagcgagcggcttagtgagttggagcagctgcgcagaacagccatgagagtgtcccctcaccacccggcaccaacccctaaccctcgagcctcactgaatcatagcacagcatttaacccccagccccaatctcagatgcaggatacccgccagattcagcctagtccaccgtggtcttacgatcagagctatcagtacttggggtctattgcctccccgagcgtacatcctgctactcctatctccccgggacgagcttctggaatgacaaccctgtccgctgaactttcaagcaggctttcaacagcgcctgatctaacggccttctctgatccacgacagttccctgctctgcccagcataagcgacccacgcatgcactaccccggagcctttacttactccccaactcccgtgacatcaggaataggcatcgggatgagcgctatgggcagtgcaaccagataccacacgtatctgcctcctccctaccccggatcttctcaagctcaggggggaccattccaggcatcttccccatcataccacctgtattacggcgcttccgcgggaagctatcagttctctatggtgggcggagaaaggtctccacctagaatcttgccaccctgtaccaatgcttcgaccggttctgctttgttaaacccttcactcccgaaccagtctgacgtcgtggaggcagaggggtcccactctaattctcccactaacatggcccctagcgcgcgactcgaggaagctgtgtggcgcccatattag

SEQ ID NO: 120708 - DNA, 1428 bp, Artificial Sequence
  derived and/or modified sequence
atgaatcctagtcgggatgtccatgacgcatcgacatcgcgcagattcacccccccaagcaccgcgctatctcccggaaagatgagcgaagcactccctctgggggctcctgatgcgggagcagctctggcgggaaagctgagaagtggggatcggagcatggtcgaggtgctggcagatcaccccggagaattggtgcgcaccgactcccctaattttctgtgctctgtcttgccaacgcattggcgatgtaacaagacactgcctatcgcctttaaggtcgtggcactaggagacgttcctgatggcacattggttactgtgatggcgggaaatgatgaaaattattcagccgagctgaggaacgctaccgccgctatgaagaatcaggtggcaagattcaatgacctgaggtttgtcggaaggagtggaagaggcaaatccttcacactgaccataacagtgtttaccaatccacctcaggtagccacttatcaccgggctatcaagattacagttgacgggccacgggagcctcgcagacatcgacagaagctggacgatcagacaaaacccggatctctgtccttttcagagcgattgtccgagttggagcagttaaggcgtaccgccatgcgcgtcagtccccaccacccagcccctacacccaacccacgggctagcctaaaccattcaacagcttttaatccccagcctcagtcgcagatgcaagacactcgccagattcagccaagtccaccctggtcgtatgatcagtcatatcagtacctggggtccattgctagcccttcagtgcatcctgctacaccaatctctccaggacgtgccagcggaatgacaaccttgtccgctgagctgagttcgcgactcagtaccgcacccgacctgactgctttcagtgacccaaggcagtttccagcccttccgtccatctcggacccgcgtatgcattatcctggggctttcacgtatagccctacacccgtgacttccggtattgggatcgggatgtcagcgatgggcagcgcaaccagatatcacacgtatctgcccccaccttatccaggcagcagtcaggcccaaggtgggccattccaggccagctcgccatcataccatctctactatggagcctcggccggaagctatcagttctcaatggttggaggagaacggtctccacctcgtattttacccccttgcacaaacgcttctacaggcagcgcactgctgaacccttctctgcccaatcagtccgatgtggttgaggcggagggtagtcacagtaacagtccaacgaatatggccagggcgagttgctccaggcaagctagacgagatccaggaccctgggccaggccgccatcatggggtcggggaagaccaacagctagaatctcgctttag

SEQ ID NO: 120709 - DNA, 1443 bp, Artificial Sequence
  derived and/or modified sequence
atggccagcgattccatttttgagagtttcccaagctatccacagtgttttatgagagagtgtatcctcggcatgaaccctagccgtgatgtgcatgacgcaagtaccagccgccgatttacaccaccctccactgccctctccccaggcaagatgtctgaggccttgccactgggggcacccgacgccggagccgctctagcaggtaagctgcggtcaggggataggtcaatggtggaagttctcgccgaccaccccggagaattggtgcgtaccgatagccccaacttcctctgtagtgtgctacctactcattggcgctgcaataagacactgccgatagcttttaaggttgtggctttgggcgacgtgcctgatgggactctagtcactgtgatggctgggaatgatgaaaattactcagctgagctgcggaatgccacagccgcaatgaagaaccaggtggcccgtttcaacgatctccgattcgtgggacgatccggtaggggtaaatccttcacgctgacaatcacagtgtttaccaatccaccacaggtcgccacctatcacagggccattaagattacagtggacgggccacgagaaccgagacggcacagacagaaactggacgaccagactaagccaggctcattaagcttttccgaaaggctttcggaacttgagcagttaagacgcacagccatgcgagtcagccctcaccatcctgcccctacgcctaatcccagggcctccttgaaccactcgactgctttcaacccccagccacagtcgcagatgcaggacactcgccaaatccagccaagccccccatggtcttacgatcaatcttaccagtacctcggaagcattgctagccccagcgtccaccccgctaccccaatcagccctggcagggcctctggaatgacaacgctgtccgccgagctaagctcccggctttccacggctccagatctgacagcttttagcgaccctagacagttccccgctctgccttccatctctgatccaaggatgcactacccgggagcctttacctactccccaacccctgtcacttccgggattgggattggaatgagcgctatgggttctgcaacgcgatatcatacttacctgcctccgccttatccaggctccagtcaagcgcagggtggcccattccaagccagttccccttcctatcacctctattacggtgctagcgctggctcgtatcagttttctatggtgggcggtgagcggtcaccaccgagaattcttccaccatgcacaaatgctagtaccggctcagccttgctcaacccaagcctgcccaatcagagtgacgtggtcgaggccgaaggaagccatagtaacagcccaacgaacatggcacctagtgcgaggttggaagaagccgtatggcgcccatattag

SEQ ID NO: 120710 - DNA, 6222 bp, Artificial Sequence
  derived and/or modified sequence
ggaaaggggaacagttaaatttgtaatttgggttgtgtgaaaacttctttgggcctcataaacaaccacagaaccacaagttgggtagcctggcagtgtcagaagtctgaacccagcatagtggtcagcaggcaggacgaatcacactgaatgcaaaccacagggtttcgcagcgtggtgagcatcaccaacccacagccaaggcggcgctggctttttttttttttttaatctttaacaatttgaatatttgtttttacaaaggtgcattttttaatagggcttggggagtcccagaggtatccagcagaggggagaagaaagagagatgtagggctagaggggtgaggctgaaacagtgacctgtcttggttttcgctccgaaggtaaaagaaatcattgagtcccccgccttcagaagagggtgcattttcaggaggaagcgatggcttcagacagcatatttgagtcatttccttcgtacccacagtgcttcatgagagaatgcatacttggaatgaatccttctagagacgtccacgatgccagcacgagccgccgcttcacgccgccttccaccgcgctgagcccaggcaagatgagcgaggcgttgccgctgggcgccccggacgccggcgctgccctggccggcaagctgaggagcggcgaccgcagcatggtggaggtgctggccgaccacccgggcgagctggtgcgcaccgacagccccaacttcctctgctccgtgctgcctacgcactggcgctgcaacaagaccctgcccatcgctttcaaggtggtggccctaggggatgttccagatggcactctggtcactgtgatggctggcaatgatgaaaactactcggctgagctgagaaatgctaccgcagccatgaagaaccaggttgcaagatttaatgacctcaggtttgtcggtcgaagtggaagagggaaaagcttcactctgaccatcactgtcttcacaaacccaccgcaagtcgccacctaccacagagccatcaaaatcacagtggatgggccccgagaacctcgaagacatcggcagaaactagatgatcagaccaagcccgggagcttgtccttttccgagcggctcagtgaactggagcagctgcggcgcacagccatgagggtcagcccacaccacccagcccccacgcccaaccctcgtgcctccctgaaccactccactgcctttaaccctcagcctcagagtcagatgcaggatacaaggcagatccaaccatccccaccgtggtcctacgatcagtcctaccaatacctgggatccattgcctctccttctgtgcacccagcaacgcccatttcacctggacgtgccagcggcatgacaaccctctctgcagaactttccagtcgactctcaacggcacccgacctgacagcgttcagcgacccgcgccagttccccgcgctgccctccatctccgacccccgcatgcactatccaggcgccttcacctactccccgacgccggtcacctcgggcatcggcatcggcatgtcggccatgggctcggccacgcgctaccacacctacctgccgccgccctaccccggctcgtcgcaagcgcagggaggcccgttccaagccagctcgccctcctaccacctgtactacggcgcctcggccggctcctaccagttctccatggtgggcggcgagcgctcgccgccgcgcatcctgccgccctgcaccaacgcctccaccggctccgcgctgctcaaccccagcctcccgaaccagagcgacgtggtggaggccgagggcagccacagcaactcccccaccaacatggcgccctccgcgcgcctggaggaggccgtgtggaggccctactgaggcgccaggcctggcccggctgggccccgcgggccgccgccttcgcctccgggcgcgcgggcctcctgttcgcgacaagcccgccgggatcccgggccctgggcccggccaccgtcctggggccgagggcgcccgacggccaggatctcgctgtaggtcaggcccgcgcagcctcctgcgcccagaagcccacgccgccgccgtctgctggcgccccggccctcgcggaggtgtccgaggcgacgcacctcgagggtgtccgccggccccagcacccaggggacgcgctggaaagcaaacaggaagattcccggagggaaactgtgaatgcttctgatttagcaatgctgtgaataaaaagaaagattttatacccttgacttaactttttaaccaagttgtttattccaaagagtgtggaattttggttggggtggggggagaggagggatgcaactcgccctgtttggcatctaattcttatttttaatttttccgcaccttatcaattgcaaaatgcgtatttgcatttgggtggtttttatttttatatacgtttatataaatatatataaattgagcttgcttctttcttgctttgaccatggaaagaaatatgattcccttttctttaagttttatttaacttttcttttggacttttgggtagttgtttttttttgttttgttttgtttttttgagaaacagctacagctttgggtcatttttaactactgtattcccacaaggaatccccagatatttatgtatcttgatgttcagacatttatgtgttgataattttttaattatttaaatgtacttatattaagaaaaatatcaagtactacattttcttttgttcttgatagtagccaaagttaaatgtatcacattgaagaaggctagaaaaaaagaatgagtaatgtgatcgcttggttatccagaagtattgtttacattaaactccctttcatgttaatcaaacaagtgagtagctcacgcagcaacgtttttaataggatttttagacactgagggtcactccaaggatcagaagtatggaattttctgccaggctcaacaagggtctcatatctaacttcctccttaaaacagagaaggtcaatctagttccagagggttgaggcaggtgccaataattacatctttggagaggatttgatttctgcccagggatttgctcaccccaaggtcatctgataatttcacagatgctgtgtaacagaacacagccaaagtaaactgtgtaggggagccacatttacataggaaccaaatcaatgaatttaggggttacgattatagcaatttaagggcccaccagaagcaggcctcgaggagtcaatttgcctctgtgtgcctcagtggagacaagtgggaaaacatggtcccacctgtgcgagaccccctgtcctgtgctgctcactcaacaacatctttgtgttgctttcaccaggctgagaccctaccctatggggtatatgggcttttacctgtgcaccagtgtgacaggaaagattcatgtcactactgtccgtggctacaattcaaaggtatccaatgtcgctgtaaattttatggcactatttttattggaggatttggtcagaatgcagttgttgtacaactcataaatactaactgctgattttgacacatgtgtgctccaaatgatctggtggttatttaacgtacctcttaaaattcgttgaaacgatttcaggtcaactctgaagagtatttgaaagcaggacttcagaacagtgtttgatttttattttataaatttaagcattcaaattaggcaaatctttggctgcaggcagcaaaaacagctggacttatttaaaacaacttgtttttgagttttcttatatatatattgattatttgttttacacacatgcagtagcactttggtaagagttaaagagtaaagcagcttatgttgtcaggtcgttcttatctagagaagagctatagcagatctcggacaaactcagaatatattcactttcatttttgacaggattccctccacaactcagtttcatatattattccgtattacatttttgcagctaaattaccataaaatgtcagcaaatgtaaaaatttaatttctgaaaagcaccattagcccatttcccccaaattaaacgtaaatgttttttttcagcacatgttaccatgtctgacctgcaaaaatgctggagaaaaatgaaggaaaaaattatgtttttcagtttaattctgttaactgaagatattccaactcaaaaccagcctcatgctctgattagataatcttttacattgaacctttactctcaaagccatgtgtggagggggcttgtcactattgtaggctcactggattggtcatttagagtttcacagactcttaccagcatatatagtatttaattgtttcaaaaaaaatcaaactgtagttgttttggcgataggtctcacgcaacacatttttgtatgtgtgtgtgtgtgcgtgtgtgtgtgtgtgtgtgaaaaattgcattcattgacttcaggtagattaaggtatctttttattcattgccctcaggaaagttaaggtatcaatgagacccttaagccaatcatgtaataactgcatgtgtctggtccaggagaagtattgaataagccatttctactgcttactcatgtccctatttatgatttcaacatggatacatatttcagttctttctttttctcactatctgaaaatacatttccctccctctcttccccccaatatctccctttttttctctcttcctctatcttccaaaccccactttctccctcctccttttcctgtgttctcttaagcagatagcacatacccccacccagtaccaaatttcagaacacaagaaggtccagttcttcccccttcacataaaggaacatggtttgtcagcctttctcctgtttatgggtttcttccagcagaacagagacattgccaaccatattggatctgcttgctgtccaaaccagcaaactttcctgggcaaatcacaatcagtgagtaaatagacagcctttctgctgccttgggtttctgtgcagataaacagaaatgctctgattagaaaggaaatgaatggttccactcaaatgtcctgcaatttaggattgcagatttctgccttgaaatacctgtttctttgggacattccgtcctgatgatttttatttttgttggtttttatttttggggggaatgacatgtttgggtcttttatacatgaaaatttgtttgacaataatctcacaaaacatattttacatctgaacaaaatgcctttttgtttaccgtagcgtatacatttgttttgggatttttgtgtgtttgttgggaattttgtttttagccaggtcagtattgatgaggctgatcatttggctctttttttccttccagaagagttgcatcaacaaagttaattgtatttatgtatgtaaatagattttaagcttcattataaaatattgttaatgcctataactttttttcaatttttttgtgtgtgtttctaaggactttttcttaggtttgctaaatactgtagggaaaaaaatgcttctttctactttgtttattttagactttaaaatgagctacttcttattcacttttgtaaacagctaatagcatggttccaattttttttaagttcactttttttgttctaggggaaatgaatgtgcaaaaaaagaaaaagaactgttggttatttgtgttattctggatgtataaaaatcaatggaaaaaaataaactttcaaattgaaatgacggtataacacatctactgaaaaagcaacgggaaatgtggtcctatttaagccagcccccacctagggtctatttgtgtggcagttattgggtttggtcacaaaacatcctgaaaattcgtgcgtgggcttctttctccctggtacaaacgtatggaatgcttcttaaaggggaactgtcaagctggtgtcttcagccagatgacatgagagaatatcccagaaccctctctccaaggtgtttctagatagcacaggagagcaggcactgcactgtccacagtccacggtacacagtcgggtgggccgcctcccctctcctgggagcattcgtcgtgcccagcctgagcagggcagctggactgctgctgttcaggagccaccagagccttcctctctttgtaccacagtttcttctgtaaatccagtgttacaatcagtgtgaatggcaaataaacagtttgacaagtacatacaccata

SEQ ID NO: 120711 - DNA, 1690 bp, Artificial Sequence
  derived and/or modified sequence
ctttgggcctcataaacaaccacagaaccacaagttgggtagcctggcagtgtcagaagtctgaacccagcatagtggtcagcaggcaggacgaatcacactgaatgcaaaccacagggtttcgcagcgtggtaaaagaaatcattgagtcccccgccttcagaagagggtgcattttcaggaggaagcgatggcttcagacagcatatttgagtcatttccttcgtacccacagtgcttcatgagagaatgcatacttggaatgaatccttctagagacgtccacgatgccagcacgagccgccgcttcacgccgccttccaccgcgctgagcccaggcaagatgagcgaggcgttgccgctgggcgccccggacgccggcgctgccctggccggcaagctgaggagcggcgaccgcagcatggtggaggtgctggccgaccacccgggcgagctggtgcgcaccgacagccccaacttcctctgctccgtgctgcctacgcactggcgctgcaacaagaccctgcccatcgctttcaaggtggtggccctaggggatgttccagatggcactctggtcactgtgatggctggcaatgatgaaaactactcggctgagctgagaaatgctaccgcagccatgaagaaccaggttgcaagatttaatgacctcaggtttgtcggtcgaagtggaagagggaaaagcttcactctgaccatcactgtcttcacaaacccaccgcaagtcgccacctaccacagagccatcaaaatcacagtggatgggccccgagaacctcgaagacatcggcagaaactagatgatcagaccaagcccgggagcttgtccttttccgagcggctcagtgaactggagcagctgcggcgcacagccatgagggtcagcccacaccacccagcccccacgcccaaccctcgtgcctccctgaaccactccactgcctttaaccctcagcctcagagtcagatgcaggatacaaggcagatccaaccatccccaccgtggtcctacgatcagtcctaccaatacctgggatccattgcctctccttctgtgcacccagcaacgcccatttcacctggacgtgccagcggcatgacaaccctctctgcagaactttccagtcgactctcaacggcacccgacctgacagcgttcagcgacccgcgccagttccccgcgctgccctccatctccgacccccgcatgcactatccaggcgccttcacctactccccgacgccggtcacctcgggcatcggcatcggcatgtcggccatgggctcggccacgcgctaccacacctacctgccgccgccctaccccggctcgtcgcaagcgcagggaggcccgttccaagccagctcgccctcctaccacctgtactacggcgcctcggccggctcctaccagttctccatggtgggcggcgagcgctcgccgccgcgcatcctgccgccctgcaccaacgcctccaccggctccgcgctgctcaaccccagcctcccgaaccagagcgacgtggtggaggccgagggcagccacagcaactcccccaccaacatggcgcgggcctcctgttcgcgacaagcccgccgggatcccgggccctgggcccggccaccgtcctggggccgagggcgcccgacggccaggatctcgctgtag

SEQ ID NO: 120712 - DNA, 1901 bp, Artificial Sequence
  derived and/or modified sequence
gagcatcaccaacccacagccaaggcggcgctggctttttttttttttttaatctttaacaatttgaatatttgtttttacaaaggtaaaagaaatcattgagtcccccgccttcagaagagggtgcattttcaggaggaagcgatggcttcagacagcatatttgagtcatttccttcgtacccacagtgcttcatgagagaatgcatacttggaatgaatccttctagagacgtccacgatgccagcacgagccgccgcttcacgccgccttccaccgcgctgagcccaggcaagatgagcgaggcgttgccgctgggcgccccggacgccggcgctgccctggccggcaagctgaggagcggcgaccgcagcatggtggaggtgctggccgaccacccgggcgagctggtgcgcaccgacagccccaacttcctctgctccgtgctgcctacgcactggcgctgcaacaagaccctgcccatcgctttcaaggtggtggccctaggggatgttccagatggcactctggtcactgtgatggctggcaatgatgaaaactactcggctgagctgagaaatgctaccgcagccatgaagaaccaggttgcaagatttaatgacctcaggtttgtcggtcgaagtggaagagggaaaagcttcactctgaccatcactgtcttcacaaacccaccgcaagtcgccacctaccacagagccatcaaaatcacagtggatgggccccgagaacctcgaagacatcggcagaaactagatgatcagaccaagcccgggagcttgtccttttccgagcggctcagtgaactggagcagctgcggcgcacagccatgagggtcagcccacaccacccagcccccacgcccaaccctcgtgcctccctgaaccactccactgcctttaaccctcagcctcagagtcagatgcaggatacaaggcagatccaaccatccccaccgtggtcctacgatcagtcctaccaatacctgggatccattgcctctccttctgtgcacccagcaacgcccatttcacctggacgtgccagcggcatgacaaccctctctgcagaactttccagtcgactctcaacggcacccgacctgacagcgttcagcgacccgcgccagttccccgcgctgccctccatctccgacccccgcatgcactatccaggcgccttcacctactccccgacgccggtcacctcgggcatcggcatcggcatgtcggccatgggctcggccacgcgctaccacacctacctgccgccgccctaccccggctcgtcgcaagcgcagggaggcccgttccaagccagctcgccctcctaccacctgtactacggcgcctcggccggctcctaccagttctccatggtgggcggcgagcgctcgccgccgcgcatcctgccgccctgcaccaacgcctccaccggctccgcgctgctcaaccccagcctcccgaaccagagcgacgtggtggaggccgagggcagccacagcaactcccccaccaacatggcgccctccgcgcgcctggaggaggccgtgtggaggccctactgaggcgccaggcctggcccggctgggccccgcgggccgccgccttcgcctccgggcgcgcgggcctcctgttcgcgacaagcccgccgggatcccgggccctgggcccggccaccgtcctggggccgagggcgcccgacggccaggatctcgctgtaggtcaggcccgcgcagcctcctgcgcccagaagcccacgccgccgccgtctgctggcgccccggccctcgcggaggtgtccgaggcgacgcacctcgagggtgtccgccggccccagcacccaggggacgcgctggaaagcaaacaggaagattcccgg

SEQ ID NO: 120713 - protein, 182 aa, Artificial Sequence
  derived and/or modified sequence
MPRVVPDQRSKFENEEFFRKLSRECEIKYTGFRDRPHEERQARFQNACRDGRSEIAFVATGTNLSLQFFPASWQGEQRQTPSREYVDLEREAGKVYLKAPMILNGVCVIWKGWIDLQRLDGMGCLEFDEERAQQEDALAQQAFEEARRRTREFEDRDRSHREEMEVRVSQLLAVTGKKTTRP

SEQ ID NO: 120714 - DNA, 549 bp, Artificial Sequence
  derived and/or modified sequence
atgccacgggtcgtgccagaccaaaggagcaaattcgagaacgaagaattttttcggaaattgtcacgcgagtgtgagattaaatatacgggattcagagaccggccccatgaggagagacaagccagattccagaacgcatgtagggatggccgtagcgagatcgcattcgtggctaccggaacaaacctgagcttgcagttctttcctgctagttggcagggagagcagagacagaccccatcacgcgaatacgttgatctggagagagaagctggcaaggtctatcttaaagcacctatgatcctcaacggcgtctgtgttatatggaaaggctggattgatctgcaacggctcgatggtatggggtgcttggagtttgatgaagagcgggcacagcaggaggacgctctggcgcaacaagcctttgaagaagcacgaaggcggactcgggaattcgaagatagggacagaagccacagagaggagatggaagtcagagtctcacagttgctcgcggttaccggcaagaaaactactagaccttag

SEQ ID NO: 120715 - DNA, 549 bp, Artificial Sequence
  derived and/or modified sequence
atgccccgggtggtgcctgaccagaggagcaagtttgaaaatgaggagttcttcaggaagctgagccgggagtgtgagatcaagtacacaggcttccgggaccggccccatgaggagcggcaggcccgcttccagaatgcctgcagagatggccgctcagaaattgcctttgtggccaccggcaccaacctgagcctgcagttcttccctgcctcctggcagggcgagcagaggcagacccccagccgggagtatgtggacctggagcgggaggccggcaaggtgtacctgaaggcccccatgatcctgaatggagtgtgtgtgatctggaagggctggattgacctgcagaggctggatggcatgggctgcctggagtttgatgaggagcgggcccagcaggaggatgccctggcccagcaggcctttgaggaggcccggcggaggacccgggagtttgaggaccgggacaggagccaccgggaggagatggaggtgcgggtgtcccagctgctggccgtgacaggcaagaagaccacccggccctag

SEQ ID NO: 120716 - DNA, 549 bp, Artificial Sequence
  derived and/or modified sequence
atgccccgggtggtgcccgaccagcggagcaagttcgagaacgaggagttttttagaaaattgtctcgtgaatgtgaaattaaatatactggctttcgagatcgaccccacgaagagcgtcaggcccgattccaaaacgcctgcagagatggacggtcagagattgcgttcgtggccactgggaccaacctttctctgcagttcttccccgcctcctggcagggggaacaaagacaaacgccatcccgggagtacgtagacctggagagggaagccgggaaagtctacctcaaggctccgatgatactgaatggagtttgcgttatctggaaggggtggatagatctacagcgacttgacgggatgggatgtctcgagttcgacgaggaacgggcccaacaggaagatgcactagcgcagcaggcctttgaggaagcgcggaggcggacacgcgagttcgaggaccgtgatagaagccaccgggaagaaatggaggtgcgcgtgtcccagttattagcagtcaccggaaaaaagacaactaggccctag

SEQ ID NO: 120717 - DNA, 549 bp, Artificial Sequence
  derived and/or modified sequence
atgcctcgggtcgtgcctgaccagagaagcaagtttgagaacgaagagttcttcaggaaactttctcgtgaatgcgagatcaaatatactggtttccgcgatcgccctcatgaggagcgtcaggcccgttttcaaaatgcttgccgggatgggaggagtgaaattgcgttcgtggccaccggtacgaacctttcattgcagtttttccccgctagctggcaaggcgagcagcgccagacgccaagccgggaatacgtggatctcgagagggaggccggaaaggtttatcttaaggcgccaatgatcctgaatggcgtctgcgtgatctggaagggatggattgaccttcagagactggatggaatggggtgtttagagttcgacgaggaacgcgcacagcaggaggatgccctggcccagcaggcattcgaggaggcgagaaggaggaccagagaatttgaagaccgtgataggtcacaccgcgaggagatggaggtgagggtctcacaattactggccgtgacaggcaagaaaaccaccagaccctag

SEQ ID NO: 120718 - DNA, 3136 bp, Artificial Sequence
  derived and/or modified sequence
gcggtgagcgctggggctgcgcgggcggcaggcaacggctgaggcggcggcggcggcggcggcggcgtgggttgggctcgagcgggcggcggcgcctcagactccccggaacgggagcccacgcgggcgggcgcctgaaacaaagggaagcgggcgtccgggcgccgcgggtgggcggtcagtcggtcagcgcggagccagccagcgggtgcccgcgcaagccccgagcgcggccggccggcgcggcctcagggcgggaagatgccgcgcgtcgtgcccgaccagagaagcaagttcgagaacgaggagttttttaggaagctgagccgcgagtgtgagattaagtacacgggcttcagggaccggccccacgaggaacgccaggcacgcttccagaacgcctgccgcgacggccgctcggaaatcgcttttgtggccacaggaaccaatctgtctctccagttttttccggccagctggcagggagaacagcgacaaacacctagccgagagtatgtcgacttagaaagagaagcaggcaaggtatatttgaaggctcccatgattctgaatggagtctgtgttatctggaaaggctggattgatctccaaagactggatggtatgggctgtctggagtttgatgaggagcgagcccagcaggaggatgcattagcacaacaggcctttgaagaggctcggagaaggacacgcgaatttgaagatagagacaggtctcatcgggaggaaatggaggtgagagtttcacagctgctggcagtaactggcaagaagacaacaagaccctagtcctggttccaatttaggtggtggtgatgacctcaaacttcgttaattaatagcacagcagatgtgtgctgcccatctttacatacacattgcttctagttggcagaaataattgattaaaagaccagaaactgtgataactggaggtactacggtctatttctcaaccttaggcagtaatagacatcacaaactgccatggttttgcactatgattataatacctgcatttctaattttttaagcatgtagccagtaataatttgaagttttttttctatgcaagcttaccttgttggcattattttagggagttgaaactatcaactgtaaagctccttttcttccactttaatttaaaagttcatgtcatttaaaaacaagtcaagaaattaaaattgtatcagagggttttctctaatcattttttctatttttttttttgtacttctagatgttttggttatacagcttcattttagatgagcattcttattttttgttttgtttgccccatttccttttgtgtttttatagtctatagcattttaaaactgctgatgttgtttgcattatttacaggctaaaaacttagtagcatagagctgtctgccacagccttctgacaaagtttacagttattaaagttgcagtatccttttaaatgctagtaatcagcactctttcttttttttttttttaatagagacagggtctcgcagtgttgcccaggctggtctcgaactcctggcatcaagcgatcctcctgccttagcctcccagagtactgggattacaggctctttctttttaaacataaaagttttaaattggtattaactctgtactctgccctagattgttttagcttctgttctgtaatcatgagtttggttggagatattctccatagatgatcttctactgaaatgcctaaagaagtcacaggctggcttctgttttattcagggatttttttaaaaagtcaatcagaaaagggatactggagcttcttcatgtatgtaacagcatattaaactggagacagtgatgaatcagctacaaaggtaatattgtattaaaatcatgtttaagatagctgcttttatgtgtattttatattgcatgcttttgtaaaaacatgctgggtgatgaaagattagttttagagagaaaatgttcatctgtgcagaggatgcattttcttccattaattctggaaaaaacgttcacagttatatatatggtattttgcaaaaggactattaatagaaccttttgagatgaattaatgtaagaatattttttaaataggcttactgtcaaattgcaactttttttttagatacagagtggaaaacagtgctaagtcatttggcacctccttacaaatatttttcatggtcacatttattaaatgttactacatttctgaatttttgaaaaatgtattttatcattaaatggcattattttaaagggtgaaaaactgacacagtcaattcagaaaatggactgaagtctgaataaggtcattgcatttaaaaagcatataactgtacttgactgatgagggaggtgttactttcattgtatataggtcttatttcataaacagatatcctgtatcaaataaaagtatttgttatatatttgaagttatgcatggaaaggagtgtgtttaaattgttacaaacaataatgcgtcattaaaggccatgctgatcttgcataactataagtactatgaatgaatttggttggttttggtgttgtacagctcacatgtttacacactcagtgccctaatttcccctgagggaatcgctttttaagtgatccttacagtggtgttttatgttactttattacagagctccttggttttttacttctgcacttaaatttttttaaataacatgatgatggtacattttcctctattgtctagctaagggctttcggtccaccagtaaataagatcaaatgctcttaaatgttcctgttaccatcctaatgtaaatactggatttttctgtcatttagcaccatgctgcttctgtctgtcttaatgctggcattaagatcatgagccctttttctccagtagtacaggctttgaaaactacttctattaagttattgatgcaatttgatattttttcataatctatatttaaacaaaattacatcattgcatcatcttttctaaattcatctccattaaaacttgccttaagctaccagattgcttttgccaccattggccatactgtgtgtttgtttgtttaatttactttcacaataaacttctgtgtagtaaaaa

SEQ ID NO: 120719 - DNA, 549 bp, Artificial Sequence
  derived and/or modified sequence
atgcccagagtggtgcccgaccagagaagcaagttcgagaacgaggagttcttcagaaagctgagcagagagtgcgagatcaagtacaccggcttcagagacagaccccacgaggagagacaggccagattccagaacgcctgcagagacggcagaagcgagatcgccttcgtggccaccggcaccaacctgagcctgcagttcttccccgccagctggcagggcgagcagagacagacccccagcagagagtacgtggacctggagagagaggccggcaaggtgtacctgaaggcccccatgatcctgaacggcgtgtgcgtgatctggaagggctggatcgacctgcagagactggacggcatgggctgcctggagttcgacgaggagagagcccagcaggaggacgccctggcccagcaggccttcgaggaggccagaagaagaaccagagagttcgaggacagagacagaagccacagagaggagatggaggtgagagtgagccagctgctggccgtgaccggcaagaagaccaccagaccctag

SEQ ID NO: 120720 - protein, 405 aa, Artificial Sequence
  derived and/or modified sequence
MPLLLYTCLLWLPTSGLWTVQAMDPNAAYVNMSNHHRGLASANVDFAFSLYKHLVALSPKKNIFISPVSISMALAMLSLGTCGHTRAQLLQGLGFNLTERSETEIHQGFQHLHQLFAKSDTSLEMTMGNALFLDGSLELLESFSADIKHYYESEVLAMNFQDWATASRQINSYVKNKTQGKIVDLFSGLDSPAILVLVNYIFFKGTWTQPFDLASTREENFYVDETTVVKVPMMLQSSTISYLHDSELPCQLVQMNYVGNGTVFFILPDKGKMNTVIAALSRDTINRWSAGLTSSQVDLYIPKVTISGVYDLGDVLEEMGIADLFTNQANFSRITQDAQLKSSKVVHKAVLQLNEEGVDTAGSTGVTLNLTSKPIILRFNQPFIIMIFDHFTWSSLFLARVMNPV

SEQ ID NO: 120721 - protein, 136 aa, Artificial Sequence
  derived and/or modified sequence
MPLLLYTCLLWLPTSGLWTVQAMDPNAAYVNMSNHHRGLASANVDFAFSLYKHLVALSPKKNIFISPVSISMALAMLSLGTCGHTRAQLLQGLGFNLTERSETEIHQGFQHLHQLFAKSDTSLEMTMGNALFLDGS

SEQ ID NO: 120722 - DNA, 1218 bp, Artificial Sequence
  derived and/or modified sequence
atgcccctgttgttgtacacctgcctgctgtggctgccaacaagcggcttgtggaccgtccaagccatggatccgaacgccgcttacgtgaacatgtcgaatcatcaccgaggactggcgagcgcaaacgtggattttgcatttagcttgtataagcatctcgtagcactctccccaaaaaaaaacatattcatttctcccgtgtcaatttctatggctctagccatgctgagcctgggaacatgtgggcacacacgcgctcagttactgcagggtcttggcttcaacttgactgaaaggtccgagacagagatccatcaaggctttcagcacctgcaccagctatttgctaagtccgatacatccctcgaaatgacgatgggcaatgctctgttcctggacggcagcctggaattgctggagtctttctcggcagacataaaacactattacgaaagtgaggtactggctatgaactttcaagattgggcaactgcctcgaggcaaatcaattcctacgtgaagaacaagacgcagggaaagatcgttgatctgttttccgggctggactctccagcaatccttgtcctggtcaactacatcttcttcaagggaacatggacacaaccttttgatctggcctctacaagagaagagaacttttacgtagatgagacaacagtcgttaaagttcccatgatgctgcagagcagcactatctcttacctgcatgacagcgaattaccatgccagcttgtgcagatgaactacgttggaaacggcactgtgtttttcatccttccagacaaggggaaaatgaataccgtcatagccgctctgagccgtgatactatcaacaggtggtcagctggactgacaagttctcaggtagatctgtacattccaaaagtcaccatcagtggggtttacgacctgggcgacgtgcttgaggagatgggcatcgccgacctctttacaaaccaagctaacttttcgcggattactcaggatgcccaactgaagtctagcaaagttgtgcataaggccgttctgcaactgaatgaggagggtgtggacactgccggatccacaggcgtaacattgaatcttacatccaaacctatcatcctgcggtttaatcagcccttcatcataatgatttttgaccacttcacttggtcgtctcttttccttgcccgcgtgatgaatcccgtctag

SEQ ID NO: 120723 - DNA, 411 bp, Artificial Sequence
  derived and/or modified sequence
atgcctctgttgctttacacctgcctgttgtggttgcctacttctggcctgtggacagtgcaggctatggacccaaacgcagcctatgttaacatgtctaaccaccaccgcgggctagcctctgcaaacgtcgatttcgccttctcgttatacaaacatctggtggccctgtcccctaagaaaaatatttttatctccccagtcagcatttcgatggcgctcgccatgttatctttggggacatgtgggcatactcgcgcacagcttctgcagggattggggttcaacctgaccgaacggtctgagacagagatccaccaggggtttcagcacctacaccaactgttcgccaagtccgacaccagcctcgaaatgacaatggggaacgcattattccttgatggctcatag

SEQ ID NO: 120724 - DNA, 1218 bp, Artificial Sequence
  derived and/or modified sequence
atgcccctgctgctgtacacctgcctgctgtggctgcccaccagcggcctgtggacagtgcaggccatggaccccaatgctgcctacgtgaacatgagcaaccaccaccggggcctggccagcgccaacgtggactttgccttcagcctgtacaagcacctggtggccctgagccccaagaagaacatcttcatcagccctgtgtccatctccatggccctggccatgctgagcctgggcacctgtggccacacccgggcccagctgctgcagggcctgggcttcaacctgacagagaggagtgaaacagagatccaccagggcttccagcacctgcaccagctgtttgccaagagtgacaccagcctggagatgaccatgggaaatgccctcttcctggatggcagcctggagctgctggagagcttctctgctgacatcaagcactactatgaaagtgaggtgctggccatgaacttccaggactgggccacagccagccggcagatcaacagctatgtgaagaacaagacccagggcaagatcgtggacctcttcagcggcctggacagccctgccatcctggtgctggtgaactacatcttcttcaagggcacctggacccagccctttgacctggccagcacccgggaggagaacttctacgtggatgagaccaccgtggtgaaggtgcccatgatgctgcagagcagcaccatctcctacctgcatgacagcgagctgccctgccagctggtgcagatgaactacgtgggcaatggcaccgtcttcttcatcctgcctgacaagggcaagatgaacacagtgattgctgccctgagccgggacaccatcaaccgctggagcgctggcctgaccagcagccaggtggacctgtacatccccaaggtgaccatctctggagtgtatgacctgggagatgtgctggaggagatgggcattgctgacctcttcaccaaccaggccaacttcagccgcatcacccaggatgcccagctgaagagcagcaaggtggtgcacaaggctgtgctgcagctgaatgaggagggcgtggacacagctggcagcactggagtgaccctgaacctgaccagcaagcccatcatcctgcgcttcaaccagcccttcatcatcatgatctttgaccacttcacctggagcagcctcttcctggcccgggtgatgaaccctgtgtag

SEQ ID NO: 120725 - DNA, 411 bp, Artificial Sequence
  derived and/or modified sequence
atgcccctgctgctgtacacctgcctgctgtggctgcccaccagcggcctgtggacagtgcaggccatggaccccaatgctgcctacgtgaacatgagcaaccaccaccggggcctggccagcgccaacgtggactttgccttcagcctgtacaagcacctggtggccctgagccccaagaagaacatcttcatcagccctgtgtccatctccatggccctggccatgctgagcctgggcacctgtggccacacccgggcccagctgctgcagggcctgggcttcaacctgacagagaggagtgaaacagagatccaccagggcttccagcacctgcaccagctgtttgccaagagtgacaccagcctggagatgaccatgggaaatgccctcttcctggatggcagctag

SEQ ID NO: 120726 - DNA, 1218 bp, Artificial Sequence
  derived and/or modified sequence
atgcccctgctgctgtacacctgcctgctgtggctgcccaccagcggattatggaccgtgcaggctatggaccccaacgccgcttatgtgaacatgagcaaccatcacagagggttggcaagcgctaatgtggacttcgccttctctctgtacaaacatctagtagcactgtcccccaaaaagaacatctttattagcccagtgtcaatctctatggctctcgctatgctgagtttgggaacatgcggccatactagagctcaactcctgcagggtctaggattcaacctcactgaaagaagtgaaaccgaaattcatcagggattccaacacctgcaccaactgtttgctaaaagcgacacgagcttggaaatgaccatgggtaatgccctgttcctggatggaagtctggagctattggaaagcttttccgccgacattaaacactattacgagtcagaggtactggcaatgaactttcaggattgggcaaccgcatcaagacagatcaacagctatgttaaaaacaagactcagggaaagatcgttgacctgttctcgggcctggactcacccgctatactggtcctggtcaactatattttcttcaagggaacatggacccagccatttgatttggcgtccacccgcgaagagaacttttatgtcgatgaaaccaccgttgtaaaggtgccaatgatgctgcagagtagcacaattagctacttgcacgatagcgagcttccatgccagctggtccaaatgaactacgttggtaacggcactgttttttttattctgccagataagggtaagatgaatacagtgatagccgcgctttctcgcgacactattaatcgatggagtgctggactgacttcctcacaggtcgacttatacattccaaaggtcactatttctggggtctacgacctgggagacgtcttggaagagatggggattgccgacctgttcactaaccaggcgaacttctcccggataacccaggacgcccaactgaaatctagtaaggtagtacacaaagcagttctgcagctgaatgaagagggcgtcgacactgcgggctccacaggcgttacactaaacttgacatcaaagcctattatcctccggtttaaccaacccttcattatcatgatttttgaccactttacttggtcatccctcttcctcgccagggtgatgaatcccgtgtag

SEQ ID NO: 120727 - DNA, 411 bp, Artificial Sequence
  derived and/or modified sequence
atgcccctgctgctgtacacctgcctgctgtggctgcccaccagcggactttggaccgtgcaggcaatggaccccaatgcggcctatgttaacatgagcaatcaccaccgaggtctggcttctgctaatgtcgatttcgcattcagcctctacaaacacttagtcgcactcagcccgaaaaagaacatattcatctcaccggtgtccatctctatggccttggccatgctctccttgggaacctgcgggcacacaagagcacagctgctgcaagggttagggttcaatctcactgaacgcagcgagactgagatccatcagggattccagcacctacaccagctattcgcaaaatcggacacctccttggaaatgaccatgggcaatgcgctctttctggacggctcctag

SEQ ID NO: 120728 - DNA, 1218 bp, Artificial Sequence
  derived and/or modified sequence
atgcccctcctgctttacacgtgtttattatggttgccaacctctggcctttggaccgtgcaggcaatggacccaaacgctgcgtatgtgaacatgtccaatcaccatcgcggactcgcatctgccaacgttgacttcgccttctcattatacaaacacttggtcgcgctcagtcctaaaaagaacatctttatctctcctgtaagcattagtatggcactggcgatgctgagtctcggaacctgcgggcatacaagagcccagctcctacaagggctgggttttaatctgacagaacgctcagagactgaaattcaccaaggttttcaacaccttcatcaattgtttgctaagtccgataccagccttgagatgacaatggggaatgccctgtttctggatggttctttggaacttcttgaatctttctcagccgacatcaaacactactatgagtccgaggtgctggctatgaacttccaggattgggctacagcttcacgacagatcaatagttacgtcaaaaataagacacagggcaaaattgtggacctattctccggcctggacagtccagctattttagttctagtcaactatatcttctttaaggggacctggacccaaccctttgacctagctagcactcgcgaggagaatttctatgtggatgagaccactgtggtgaaggtgcccatgatgctccaatcatccacgatttcctacctccacgactctgaactgccctgccagctggtgcagatgaattatgtcgggaacggaacggtgttttttatcctgccggacaaggggaagatgaacacggtgattgccgctctgtccagggacaccatcaatagatggagcgccggattaacttcttcccaggtggacctgtatatacctaaggttacaattagcggggtgtacgacctgggggatgtcctggaagagatgggaatcgccgatctgtttaccaaccaagcaaatttcagtcgcatcacacaagacgcccagcttaagagcagtaaagtagttcataaagccgtgctccagctgaacgaagaaggtgtggacaccgccggatctacaggcgtcaccttaaatctgacaagtaagcctattatccttagattcaaccagcccttcatcattatgatttttgatcatttcacatggtcctccctgtttctggccagagtaatgaaccccgtgtag

SEQ ID NO: 120729 - DNA, 411 bp, Artificial Sequence
  derived and/or modified sequence
atgcccctgcttctgtatacctgtctgctgtggctgcctacatctgggctttggacagttcaagcaatggatccaaacgccgcatacgtcaatatgtccaaccaccatagaggcctggctagtgctaacgtggatttcgccttttccttgtacaagcatttggtggcactatcccctaaaaagaatatttttatctcaccggtgtctattagcatggcccttgcaatgctgagcctcggcacctgcgggcacaccagagctcaactactccaagggctggggttcaacctcacagagaggtctgagacagagatacatcagggcttccagcacctccatcaattgttcgcaaaaagcgacacttcactagaaatgacaatgggcaacgcactttttctagacggttcttag

SEQ ID NO: 120730 - DNA, 1534 bp, Artificial Sequence
  derived and/or modified sequence
attaaccacccaggaagctggcaaacaaaatttaacaggcagcatccaccgcaggcttactgtacacatgctagggtccaggacagcaggaccaagccagcagaaacagcctgagcccaccgcagactggcctggctatactggacaatgccactcctcctgtacacctgtcttctctggctgcccaccagcggcctctggaccgtccaggccatggatcctaacgctgcttatgtgaacatgagtaaccatcaccggggcctggcttcagccaacgttgactttgccttcagcctgtataagcacctagtggccttgagtcccaaaaagaacattttcatctcccctgtgagcatctccatggccttagctatgctgtccctgggcacctgtggccacacacgggcccagcttctccagggcctgggtttcaacctcactgagaggtctgagactgagatccaccagggtttccagcacctgcaccaactctttgcaaagtcagacaccagcttagaaatgaccatgggcaatgccttgtttcttgatggcagcctggagttgctggagtcattctcagcagacatcaagcactactatgagtcagaggtcttggctatgaatttccaggactgggcaacagccagcagacagatcaacagctatgtcaagaataagacacaggggaaaattgtcgacttgttttcagggctggatagcccagccatcctcgtcctggtcaactatatcttcttcaaaggcacatggacacagccctttgacctggcaagcaccagggaggagaacttctatgtggacgagacaactgtggtgaaggtgcccatgatgttgcagtcgagcaccatcagttaccttcatgactcggagctcccctgccagctggtgcagatgaactacgtgggcaatgggactgtcttcttcatccttccggacaaggggaagatgaacacagtcatcgctgcactgagccgggacacgattaacaggtggtccgcaggcctgaccagcagccaggtggacctgtacattccaaaggtcaccatctctggagtctatgacctcggagatgtgctggaggaaatgggcattgcagacttgttcaccaaccaggcaaatttctcacgcatcacccaggacgcccagctgaagtcatcaaaggtggtccataaagctgtgctgcaactcaatgaggagggtgtggacacagctggctccactggggtcaccctaaacctgacgtccaagcctatcatcttgcgtttcaaccagcccttcatcatcatgatcttcgaccacttcacctggagcagccttttcctggcgagggttatgaacccagtgtaagagaccacccacccagagcctcagcactgtctgactttgggaaccagggatcccacagaaatgttttggagagcgggaggtttcccccaatctcctccaagttcttctccctccaaccagagttgtgtctaactttaggcatcttttaataaatgtcattgcgactctg

SEQ ID NO: 120731 - DNA, 719 bp, Artificial Sequence
  derived and/or modified sequence
ccacccaggaagctggcaaacaaaatttaacaggcagcatccaccgcaggcttactgtacacatgctagggtccaggacagcaggaccaagccagcagaaacagcctgagcccaccgcagactatgaggaaactgaagtccagcgccctctgtgatgtgctccaggtcacacagccagtgtggaggaaggaactggggcttgaatggggtcttttgcctgcctcctcttgcactacgccccattgactcagagactgccacagcatctaacaagcttttctgatttggcagggcctggctatactggacaatgccactcctcctgtacacctgtcttctctggctgcccaccagcggcctctggaccgtccaggccatggatcctaacgctgcttatgtgaacatgagtaaccatcaccggggcctggcttcagccaacgttgactttgccttcagcctgtataagcacctagtggccttgagtcccaaaaagaacattttcatctcccctgtgagcatctccatggccttagctatgctgtccctgggcacctgtggccacacacgggcccagcttctccagggcctgggtttcaacctcactgagaggtctgagactgagatccaccagggtttccagcacctgcaccaactctttgcaaagtcagacaccagcttagaaatgaccatgggcaatgccttgtttcttgatggcagcc

SEQ ID NO: 120732 - DNA, 1218 bp, Artificial Sequence
  derived and/or modified sequence
atgcccctgctgctgtacacctgcctgctgtggctgcccaccagcggcctgtggaccgtgcaggccatggaccccaacgccgcctacgtgaacatgagcaaccaccacagaggcctggccagcgccaacgtggacttcgccttcagcctgtacaagcacctggtggccctgagccccaagaagaacatcttcatcagccccgtgagcatcagcatggccctggccatgctgagcctgggcacctgcggccacaccagagcccagctgctgcagggcctgggcttcaacctgaccgagagaagcgagaccgagatccaccagggcttccagcacctgcaccagctgttcgccaagagcgacaccagcctggagatgaccatgggcaacgccctgttcctggacggcagcctggagctgctggagagcttcagcgccgacatcaagcactactacgagagcgaggtgctggccatgaacttccaggactgggccaccgccagcagacagatcaacagctacgtgaagaacaagacccagggcaagatcgtggacctgttcagcggcctggacagccccgccatcctggtgctggtgaactacatcttcttcaagggcacctggacccagcccttcgacctggccagcaccagagaggagaacttctacgtggacgagaccaccgtggtgaaggtgcccatgatgctgcagagcagcaccatcagctacctgcacgacagcgagctgccctgccagctggtgcagatgaactacgtgggcaacggcaccgtgttcttcatcctgcccgacaagggcaagatgaacaccgtgatcgccgccctgagcagagacaccatcaacagatggagcgccggcctgaccagcagccaggtggacctgtacatccccaaggtgaccatcagcggcgtgtacgacctgggcgacgtgctggaggagatgggcatcgccgacctgttcaccaaccaggccaacttcagcagaatcacccaggacgcccagctgaagagcagcaaggtggtgcacaaggccgtgctgcagctgaacgaggagggcgtggacaccgccggcagcaccggcgtgaccctgaacctgaccagcaagcccatcatcctgagattcaaccagcccttcatcatcatgatcttcgaccacttcacctggagcagcctgttcctggccagagtgatgaaccccgtgtag

SEQ ID NO: 120733 - DNA, 411 bp, Artificial Sequence
  derived and/or modified sequence
atgcccctgctgctgtacacctgcctgctgtggctgcccaccagcggcctgtggaccgtgcaggccatggaccccaacgccgcctacgtgaacatgagcaaccaccacagaggcctggccagcgccaacgtggacttcgccttcagcctgtacaagcacctggtggccctgagccccaagaagaacatcttcatcagccccgtgagcatcagcatggccctggccatgctgagcctgggcacctgcggccacaccagagcccagctgctgcagggcctgggcttcaacctgaccgagagaagcgagaccgagatccaccagggcttccagcacctgcaccagctgttcgccaagagcgacaccagcctggagatgaccatgggcaacgccctgttcctggacggcagctag

SEQ ID NO: 120734 - protein, 277 aa, Artificial Sequence
  derived and/or modified sequence
MSSGIHVALVTGGNKGIGLAIVRDLCRLFSGDVVLTARDVTRGQAAVQQLQAEGLSPRFHQLDIDDLQSIRALRDFLRKEYGGLDVLVNNAGIAFKVADPTPFHIQAEVTMKTNFFGTRDVCTELLPLIKPQGRVVNVSSIMSVRALKSCSPELQQKFRSETITEEELVGLMNKFVEDTKKGVHQKEGWPSSAYGVTKIGVTVLSRIHARKLSEQRKGDKILLNACCPGWVRTDMAGPKATKSPEEGAETPVYLALLPPDAEGPHGQFVSEKRVEQW

SEQ ID NO: 120735 - DNA, 834 bp, Artificial Sequence
  derived and/or modified sequence
atgtcctccggtatccacgtggccctggtgacaggtggcaacaagggcattgggcttgccattgtcagagacctgtgtaggctgttctcaggagatgtggttttgaccgctcgtgacgtcacacgggggcaggcggctgtgcagcaattgcaggccgaaggcctcagccccaggttccaccagctggacatcgatgatctgcagtcaataagagctttaagagacttccttcgaaaggaatacggcgggctagacgtactggttaataatgccggcatcgcattcaaggtggccgatccaacccctttccatatacaggccgaggtgacaatgaaaacaaacttctttggaacccgggacgtttgtaccgagcttctgccgctgatcaaaccgcagggtcgtgttgtaaacgtgtcatccattatgagtgtgagagcattaaagtcttgttcaccagagctgcaacagaaattcagatcagaaactatcaccgaagaggagttggtgggcctgatgaacaagtttgtggaggataccaagaagggtgttcatcagaaggaagggtggccaagttctgcctacggcgtgactaaaattggcgtaaccgtgctctcccggatccacgccaggaagctctccgagcagaggaaaggtgacaagattctactgaacgcatgttgccctggatgggtgcgcacggatatggctgggccaaaggcgactaagtcaccggaggagggcgccgagacgcccgtctatctcgcactgcttccacccgatgcagaaggtccgcatggtcagttcgttagcgaaaagcgcgtagaacagtggtag

SEQ ID NO: 120736 - DNA, 834 bp, Artificial Sequence
  derived and/or modified sequence
atgagcagcggcatccacgtggccctggtgactggaggcaacaagggcatcggcctggccatcgtgcgggacctgtgccgcctcttctctggagatgtggtgctgacagccagagatgtgacccggggccaggccgctgtgcagcagctgcaggccgagggcctgagcccccgcttccaccagctggacattgatgacctgcagagcatccgggccctgcgggacttcctgaggaaggagtatggaggcctggatgtgctggtgaacaatgccggcatcgccttcaaggtggccgaccccacccccttccacatccaggccgaggtgaccatgaagaccaacttcttcggcaccagagatgtgtgcacagagctgctgcccctcatcaagccccagggccgggtggtgaatgtgagcagcatcatgtctgtgcgggccctgaagagctgcagccctgagctgcagcagaagttccgctctgagaccatcacagaggaggagctggtgggcctgatgaacaagtttgtggaggacaccaagaagggcgtgcaccagaaggagggctggcccagcagcgcctacggcgtgaccaagattggagtgacagtgctgagccgcatccacgccaggaagctgtctgagcagaggaaaggagacaagatcctgctgaatgcctgctgccccggctgggtgaggacagacatggccggccccaaggccaccaagagccctgaggagggcgctgagacccctgtgtacctggccctgctgcccccagatgctgagggcccccacggccagtttgtgtctgagaagagggtggagcagtggtag

SEQ ID NO: 120737 - DNA, 834 bp, Artificial Sequence
  derived and/or modified sequence
atgagcagcggcatccacgtggccctggtgaccggcggcaacaagggcattgggctggccattgtcagggatctgtgccgcctcttcagcggcgatgttgtcctgaccgctcgcgatgtgaccagaggccaagccgcggtacagcaacttcaggccgaggggctcagcccacgttttcaccagcttgacatcgacgatctgcagagtatccgtgcattgagagattttttgagaaaagaatacggaggcctagacgtgcttgtcaataacgctgggatcgcttttaaggtggccgacccaaccccatttcacattcaagcagaagtcactatgaagacaaatttctttggtactagagacgtgtgcacagagttgttgcccctgatcaagccccaaggccgggtggtaaacgtgtcctcgatcatgagcgtgagggcactgaaatcctgctcgccggaactccagcagaagttccgatcggaaaccattaccgaggaggagttagtcgggctgatgaacaaattcgtggaggatacaaaaaagggtgtgcatcaaaaggaaggttggccgagcagcgcttatggagtgactaaaatcggagttactgtgctgtctcggatccacgccaggaaactgtccgaacaacgcaagggtgacaaaatattgcttaatgcctgctgccctggctgggtacgcacagatatggcgggacccaaggccacgaaaagcccggaggaaggcgcggaaacacctgtatacctcgccttactgcctcccgacgccgagggtccacatggacaattcgtaagtgaaaaacgtgttgagcagtggtag

SEQ ID NO: 120738 - DNA, 834 bp, Artificial Sequence
  derived and/or modified sequence
atgtctagtggtatacacgtcgcattagtcacgggcggaaacaaaggcatcggccttgctatcgtccgcgatctgtgtagactgttttccggcgatgtggtgctgactgctagagacgtgacccgtggacaagctgccgtccagcagttacaggccgaggggctgtctcccaggttccatcagctggatattgatgacttgcagtccatacgcgctctgagggatttcctgcgcaaggaatatgggggtctggacgtgctcgttaacaacgcaggtatcgctttcaaagttgccgatcctacgcctttccatattcaagctgaagtgacaatgaagactaacttctttgggactagagatgtgtgtaccgagctactcccattaataaaaccccagggcagagttgtaaatgtcagttccattatgtcagttagggctctgaaaagctgcagccctgagctgcaacagaaattccgctctgagaccatcacagaggaagaactggtcggcttaatgaacaagttcgtggaagacaccaagaagggagtacatcagaaggaaggatggccatcctcggcctacggagtgacaaagattggtgtgactgtgttgtcccggatccacgccaggaagcttagtgaacaaagaaagggcgacaaaatcctccttaatgcttgctgtcctggctgggtccgaacggacatggcaggcccaaaagctacaaagagccccgaggagggagccgagacccccgtctatttagctctgctcccacccgacgccgaggggccacatggtcagtttgtgagtgagaaaagagtagaacagtggtag

SEQ ID NO: 120739 - DNA, 1293 bp, Artificial Sequence
  derived and/or modified sequence
agccccgccccgctagggcggggcctgcgcctgcgcgctcagcggccgggcgtgtaacccacgggtgcgcgcccacgaccgccagactcgagcagtctctggaacacgctgcggggctcccgggcctgagccaggtctgttctccacgcaggtgttccgcgcgccccgttcagccatgtcgtccggcatccatgtagcgctggtgactggaggcaacaagggcatcggcttggccatcgtgcgcgacctgtgccggctgttctcgggggacgtggtgctcacggcgcgggacgtgacgcggggccaggcggccgtacagcagctgcaggcggagggcctgagcccgcgcttccaccagctggacatcgacgatctgcagagcatccgcgccctgcgcgacttcctgcgcaaggagtacgggggcctggacgtgctggtcaacaacgcgggcatcgccttcaaggttgctgatcccacaccctttcatattcaagctgaagtgacgatgaaaacaaatttctttggtacccgagatgtgtgcacagaattactccctctaataaaaccccaagggagagtggtgaacgtatctagcatcatgagcgtcagagcccttaaaagctgcagcccagagctgcagcagaagttccgcagtgagaccatcactgaggaggagctggtggggctcatgaacaagtttgtggaggatacaaagaagggagtgcaccagaaggagggctggcccagcagcgcatacggggtgacgaagattggcgtcaccgttctgtccaggatccacgccaggaaactgagtgagcagaggaaaggggacaagatcctcctgaatgcctgctgcccagggtgggtgagaactgacatggcgggacccaaggccaccaagagcccagaagaaggtgcagagacccctgtgtacttggcccttttgcccccagatgctgagggtccccatggacaatttgtttcagagaagagagttgaacagtggtgagctgggctcacagctccatccatgggccccattttgtaccttgtcctgagttggtccaaagggcatttacaatgtcataaatatccttatataagaaaaaaaatgatctcttatcaattagcactcactaatgtactactaattgagcaacctacgcactcagttgactacgtaaatctgtcaggtcttttgtgatttcctctgatgcaggagaggaaaaattgtaattgatgaaaataatgaatgaaaatcaacagatgaataaatggttctttataagtgtc

SEQ ID NO: 120740 - DNA, 834 bp, Artificial Sequence
  derived and/or modified sequence
atgagcagcggcatccacgtggccctggtgaccggcggcaacaagggcatcggcctggccatcgtgagagacctgtgcagactgttcagcggcgacgtggtgctgaccgccagagacgtgaccagaggccaggccgccgtgcagcagctgcaggccgagggcctgagccccagattccaccagctggacatcgacgacctgcagagcatcagagccctgagagacttcctgagaaaggagtacggcggcctggacgtgctggtgaacaacgccggcatcgccttcaaggtggccgaccccacccccttccacatccaggccgaggtgaccatgaagaccaacttcttcggcaccagagacgtgtgcaccgagctgctgcccctgatcaagccccagggcagagtggtgaacgtgagcagcatcatgagcgtgagagccctgaagagctgcagccccgagctgcagcagaagttcagaagcgagaccatcaccgaggaggagctggtgggcctgatgaacaagttcgtggaggacaccaagaagggcgtgcaccagaaggagggctggcccagcagcgcctacggcgtgaccaagatcggcgtgaccgtgctgagcagaatccacgccagaaagctgagcgagcagagaaagggcgacaagatcctgctgaacgcctgctgccccggctgggtgagaaccgacatggccggccccaaggccaccaagagccccgaggagggcgccgagacccccgtgtacctggccctgctgccccccgacgccgagggcccccacggccagttcgtgagcgagaagagagtggagcagtggtag

SEQ ID NO: 120741 - protein, 289 aa, Artificial Sequence
  derived and/or modified sequence
MELLCHEVDPVRRAVRDRNLLRDDRVLQNLLTIEERYLPQCSYFKCVQKDIQPYMRRMVATWMLEVCEEQKCEEEVFPLAMNYLDRFLAGVPTPKSHLQLLGAVCMFLASKLKETSPLTAEKLCIYTDNSIKPQELLEWELVVLGKLKWNLAAVTPHDFIEHILRKLPQQREKLSLIRKHAQTFIALCATDFKFAMYPPSMIATGSVGAAICGLQQDEEVSSLTCDALTELLAKITNTDVDCLKACQEQIEAVLLNSLQQYRQDQRDGSKSEDELDQASTPTDVRDIDL

SEQ ID NO: 120742 - DNA, 870 bp, Artificial Sequence
  derived and/or modified sequence
atggagctgctgtgccacgaggtggaccccgtgagaagagccgtgagagacagaaacctgctgagagacgacagagtgctgcagaacctgctgaccatcgaggagagatacctgccccagtgcagctacttcaagtgcgtgcagaaggacatccagccctacatgagaagaatggtggccacctggatgctggaggtgtgcgaggagcagaagtgcgaggaggaggtgttccccctggccatgaactacctggacagattcctggccggcgtgcccacccccaagagccacctgcagctgctgggcgccgtgtgcatgttcctggccagcaagctgaaggagaccagccccctgaccgccgagaagctgtgcatctacaccgacaacagcatcaagccccaggagctgctggagtgggagctggtggtgctgggcaagctgaagtggaacctggccgccgtgaccccccacgacttcatcgagcacatcctgagaaagctgccccagcagagagagaagctgagcctgatcagaaagcacgcccagaccttcatcgccctgtgcgccaccgacttcaagttcgccatgtacccccccagcatgatcgccaccggcagcgtgggcgccgccatctgcggcctgcagcaggacgaggaggtgagcagcctgacctgcgacgccctgaccgagctgctggccaagatcaccaacaccgacgtggactgcctgaaggcctgccaggagcagatcgaggccgtgctgctgaacagcctgcagcagtacagacaggaccagagagacggcagcaagagcgaggacgagctggaccaggccagcacccccaccgacgtgagagacatcgacctgtag

SEQ ID NO: 120743 - DNA, 6480 bp, Artificial Sequence
  derived and/or modified sequence
agagcgagcaggggagagcgagaccagttttaaggggaggaccggtgcgagtgaggcagccccgaggctctgctcgcccaccacccaatcctcgcctcccttctgctccaccttctctctctgccctcacctctcccccgaaaaccccctatttagccaaaggaaggaggtcaggggaacgctctcccctccccttccaaaaaacaaaaacagaaaaacctttttccaggccggggaaagcaggagggagaggggccgccgggctggccatggagctgctgtgccacgaggtggacccggtccgcagggccgtgcgggaccgcaacctgctccgagacgaccgcgtcctgcagaacctgctcaccatcgaggagcgctaccttccgcagtgctcctacttcaagtgcgtgcagaaggacatccaaccctacatgcgcagaatggtggccacctggatgctggaggtctgtgaggaacagaagtgcgaagaagaggtcttccctctggccatgaattacctggaccgtttcttggctggggtcccgactccgaagtcccatctgcaactcctgggtgctgtctgcatgttcctggcctccaaactcaaagagaccagcccgctgaccgcggagaagctgtgcatttacaccgacaactccatcaagcctcaggagctgctggagtgggaactggtggtgctggggaagttgaagtggaacctggcagctgtcactcctcatgacttcattgagcacatcttgcgcaagctgccccagcagcgggagaagctgtctctgatccgcaagcatgctcagaccttcattgctctgtgtgccaccgactttaagtttgccatgtacccaccgtcgatgatcgcaactggaagtgtgggagcagccatctgtgggctccagcaggatgaggaagtgagctcgctcacttgtgatgccctgactgagctgctggctaagatcaccaacacagacgtggattgtctcaaagcttgccaggagcagattgaggcggtgctcctcaatagcctgcagcagtaccgtcaggaccaacgtgacggatccaagtcggaggatgaactggaccaagccagcacccctacagacgtgcgggatatcgacctgtgaggatgccagttgggccgaaagagagagacgcgtccataatctggtctcttcttctttctggttgtttttgttctttgtgttttagggtgaaacttaaaaaaaaaattctgcccccacctagatcatatttaaagatcttttagaagtgagagaaaaaggtcctacgaaaacggaataataaaaagcatttggtgcctatttgaagtacagcataagggaatcccttgtatatgcgaacagttattgtttgattatgtaaaagtaatagtaaaatgcttacaggaaaacctgcagagtagttagagaatatgtatgcctgcaatatgggaacaaattagaggagacttttttttttcatgttatgagctagcacatacacccccttgtagtataatttcaaggaactgtgtacgccatttatggcatgattagattgcaaagcaatgaactcaagaaggaattgaaataaggagggacatgatggggaaggagtacaaaacaatctctcaacatgattgaaccatttgggatggagaagcacctttgctctcagccacctgttactaagtcaggagtgtagttggatctctacattaatgtcctcttgctgtctacagtagctgctacctaaaaaaagatgttttattttgccagttggacacaggtgattggctcctgggtttcatgttctgtgacatcctgcttcttcttccaaatgcagttcattgcagacaccaccatattgctatctaatggggaaatgtagctatgggccataaccaaaactcacatgaaacggaggcagatggagaccaagggtgggatccagaatggagtcttttctgttattgtatttaaaagggtaatgtggccttggcatttcttcttagaaaaaaactaatttttggtgctgattggcatgtctggttcacagtttagcattgttataaaccattccattcgaaaagcactttgaaaaattgttcccgagcgatagatgggatggtttatgcaagtcatgctgaatactcctcccctcttctcttttgccccctcccttcctgcccccagtctgggttactcttcgcttctggtatctggcgttctttggtacacagttctggtgttcctaccaggactcaagagacaccccttcctgctgacattcccatcacaacattcctcagacaagcctgtaaactaaaatctgttaccattctgatggcacagaaggatcttaattcccatctctatacttctcctttggacatggaaagaaaagttattgctggtgcaaagatagatggctgaacatcagggtgtggcattttgttcccttttccgtttttttttttttattgttgttgttaattttattgcaaagttgtattcagcgtacttgaatttttcttcctctccacttcttagaggcattcagttagcaaagaggttggagcaacaacttttttttttttttttgcacaattgtaattgacaggtaatgaagctatttgttaaaatatttgcctttttaagtaaaaaagaaaaatcagaacagggctatttgaagaattattttatacacagattctgccttgtttcatagtatgagggttgaagacggaaaacaatctaagggtctctcatttttttaattttgttttgttcagtttggtttttttttttttttgcgctgctaagaagctaaagtcatccatccttattcacgttgacagtacctagctgtaatgtttcacagagtgtgctgctattttataaacatttttataatatattattttactgcttaaattccaagtcctgaagtagatggttgagatatgagttcttcgtactggaaaagcccttccgtagtttgttttcttctggtagcatattcatggttgtttttttttttcttttttggttttttggttttttttttttcctctgatcacattcttcaaagacggagtattctttacctcaggtttactggacaaaatcaataactacaaaaggcaatgattcacgcttttgttttcataatacctcacaaccgtacagtttctgcttgggagcccattcgcatgaggaatacagaagcagtgtgagcagggctgactccctctcaggtggaaggcagggcggtctcactcccagggacctttttggtcatggaggccatcgggctcccagttagaccctggtatcctcatcatgatggaaaaaatacattgaaccaagggatcctccctccccttcaaggcagacgttcagtacaaacatttatgcggtaggctcagatgtcgtaatttgcacttaggtaccaggtgtcaggaaacagactaaaaagaattccaccaggctgtttggagatcctcatcttggagctttttcaaaagcggggcttcatctgcaaagggccctttcatcttgaagtttttcccctccgtctttcccctcccctggcatggacaccttgtgtttaggatcatctctgcaggtttcctaggtctgaatctgcgagtagatgaacctgcagcaagcagcgtttatggtgcttccttctccctcctctgtctcaaactgcgcaggcaagcactatgcaagcccaggccctctgctgagcggtactaaacggtcgggttttcaatcacactgaattggcaggataagaaaaataggtcagataagtatgggatgatagttgaagggaggtgaagaggctgcttctctacagaggtgaaattccagatgagtcagtctcttgggaagtgtgtttagaagggttcaggactttgtgagttagcatgaccctaaaattctaggggatttctggtgggacaatgggtggtgaattctgaagttttggagagggaagtggagcagccagcaagtaagctagccagagttttctcaagagccagctttgctcagcacactctcctgggccccaaggagtcccacggaatggggaaagcgggaaccctggagttcttgggaatcttggagcctaaagagaaaccgaggtgcaaattcatttcatggtgactgacccttgagcttaaacagaagcagcaaatgaaagaaccggacaaataaggaagggcacaagcctacccgactctatttacagtctgtaactttccactcttcctgtagtcccgaggcccctgggtccttctagcttttctctttcccatccttggggccttgtgtgatgatgggtgtggggctgccgatgggaaagtcgggggttgttaggcttttctgcctgctcctgcttaaacacaagaaggaatcctggattttgccctctccttagctcttagtctctttggtaggagttttgttccagaggagctctcccccttggatttgaacttgctctttttgttgttgttgttctttctcttctttttcttacctcccactaaaggggttccaaattatcctggtctttttctaccttgttgtgtttctatctcgtctttacttccatctgtttgtttttttctccatcagtgggggccgagttgttcccccagcctgccaaattttgatccttcccctcttttggccaaatcctagggggaagaaatcctagtatgccaaaaatatatgctaagcataattaaactccatgcgggtccataacagccaagaagcctgcaggagaaagccaagggcagttccctccgcagaacaccccatgcgtgctgagaggcgagctccttgaagaaggggctgttcttccaggaggccttattttgaactgcctcaggaccccactggagagcacagcatgccttactactgggtcatccttggtctatgtgctctgtactggaggctctgttctgcctcttatcagccaggtcaggggcacacatggcttaagtgacaaagccagaggagaagacaaccctgacagcatcacgctgcatcccattgctagcaggattggcaactcttcagacggagctgcgcttccctgcagtctagcacctctagggcctctccagactgtgccctgggagctctgggactgaaaggttaagaacataaggcaggatcagatgactctctccaagagggcaggggaattttctctccatgggccacaggggacagggctgggagaagaaatagacttgcaccttatgtcatgtaaataattgattttctagttcaagaagataatattggtagtgtgggaattggaggtaggaaggggaggaagtctgagtaagccagttggcttctaagccaaaaggattcctctttgtttatctctgagacagtccaaccttgagaatagctttaaaagggaaattaatgctgagatgataaagtccccttaagccaacaaaccctctgtagctatagaatgagtgcaggtttctattggtgtggactcagagcaatttacaagagctgttcatgcagccatccatttgtgcaaaatagggtaagaagattcaagaggatatttattacttcctcataccacatggcttttgatgattctggattctaaacaacccagaatggtcatttcaggcacaacgatactacattcgtgtgtgtctgcttttaaacttggctgggctatcagaccctattctcggctcaggttttgagaagccatcagcaaatgtgtacgtgcatgctgtagctgcagcctgcatcccttcgcctgcagcctactttggggaaataaagtgccttactgactgtagccattacagtatccaatgtcttttgacaggtgcctgtccttgaaaaacaaagtttctatttttatttttaattggtttagttcttaactgctggccaactcttacatccccagcaaatcatcgggccattggattttttccattatgttcatcacccttatatcatgtacctcagatctctctctctctcctctctctcagttatgtagtttcttgtcttggacttttttttttcttttctttttctttttttttttgctttaaaacaagtgtgatgccatatcaagtccatgttattctctcacagtgtactctataagaggtgtgggtgtctgtttggtcaggatgttagaaagtgctgataagtagcatgatcagtgtatgcgaaaaggtttttaggaagtatggcaaaaatgttgtattggctatgatggtgacatgatatagtcagctgccttttaagaggtcttatctgttcagtgttaagtgatttaaaaaaataataacctgttttctgactagtttaaagatggatttgaaaatggttttgaatgcaattaggttatgctatttggacaataaactcaccttgacct

SEQ ID NO: 120744 - DNA, 870 bp, Artificial Sequence
  derived and/or modified sequence
atggaattactatgccacgaggtggaccccgtgagaagagccgtcagggataggaatctcctacgcgatgatcgggtgctgcagaacctgttaaccattgaggagaggtacttgccccagtgcagttacttcaagtgcgtacagaaggacattcagccatatatgcgacggatggtggcaacctggatgctcgaggtgtgtgaggagcagaaatgtgaagaggaggtgtttcctctcgccatgaattacctggaccgttttctggcaggtgtgcccaccccaaagtcccatctccagctgctaggcgctgtgtgtatgttcctggcctcaaaacttaaagagacaagccccttgaccgctgagaagctgtgtatctacaccgacaatagtatcaagccacaagagttattggagtgggagttagtggtgctgggcaaattaaagtggaatttagctgcagtgaccccacacgatttcatcgagcacattctcaggaagctcccccagcagagggaaaaattgtcattaattcggaaacatgcacagacttttatcgctctgtgcgccaccgactttaaatttgcaatgtatcccccctctatgatcgcaacagggtcagtgggcgctgcaatctgtgggctacagcaggatgaggaagtgtcctcactaacttgcgatgcactgaccgagctgctcgccaaaataactaatacagacgtggactgcttaaaggcatgccaggaacaaatagaggctgtgctgctgaacagtctgcaacagtacaggcaggatcaacgcgacgggtctaaaagcgaggatgagctggaccaggcttccacacccactgatgtgcgcgacatcgacctttag

SEQ ID NO: 120745 - DNA, 870 bp, Artificial Sequence
  derived and/or modified sequence
atggagctgctgtgccacgaggtggaccctgtgcggcgggctgtgcgggacaggaacctgctgagagatgacagagtgctgcagaacctgctgaccatcgaggagcgctacctgccccagtgcagctacttcaagtgtgtgcagaaggacatccagccctacatgaggaggatggtggccacctggatgctggaggtgtgtgaggagcagaagtgtgaggaggaggtgttccccctggccatgaactacctggaccgcttcctggccggcgtgcccacccccaagagccacctgcagctgctgggcgctgtgtgcatgttcctggccagcaagctgaaggagaccagccccctgacagctgagaagctgtgcatctacacagacaacagcatcaagccccaggagctgctggagtgggagctggtggtgctgggcaagctgaagtggaacctggccgctgtgacccctcatgacttcatcgagcacatcctgaggaagctgccccagcagcgggagaagctgagcctcatcaggaagcacgcccagaccttcatcgccctgtgtgccacagacttcaagtttgccatgtacccacccagcatgattgccaccggctctgtgggcgccgccatctgtggcctgcagcaggatgaggaggtgagcagcctgacctgtgatgccctgacagagctgctggccaagatcaccaacacagatgtggactgcctgaaggcctgccaggagcagatcgaggccgtgctgctgaacagcctgcagcagtaccggcaggaccagagagatggcagcaagtcagaagatgagctggaccaggccagcacccccacagatgtgcgggacatcgacctgtag

SEQ ID NO: 120746 - DNA, 870 bp, Artificial Sequence
  derived and/or modified sequence
atggagctgctgtgccacgaggtggaccccgtgcggcgggccgtgagagaccggaacctgcttcgagatgacagggttcttcagaacctgctgaccatagaggaacgctatttaccccagtgctcttatttcaagtgtgtccagaaggatattcagccatacatgcgcaggatggtggcaacctggatgctggaagtgtgtgaagagcagaagtgtgaagaggaagtgttccctcttgctatgaactacctggacaggttccttgccggcgtgcctacacccaaaagccacttgcaactcctgggcgccgtctgtatgttcctcgcatctaagttaaaagagacctctcctttgacagcagagaaattgtgtatttatactgataactccattaagccccaggagctgttagagtgggaactggtggtcctgggaaagctcaagtggaatctcgctgccgtgacgccccacgacttcattgagcacatcttgcgtaagcttccccagcaacgcgagaaattgtccctgatccggaagcatgctcaaactttcatcgctctgtgtgcgaccgactttaagttcgcaatgtatcctccatccatgatagctaccggttccgttggagcagccatctgcgggctacaacaagacgaggaagtgagctctttgacatgcgacgctctcacagaacttcttgccaagatcactaacacagatgtggattgtctgaaagcttgccaagaacagatcgaagccgtgcttcttaatagtctgcaacagtaccgacaggatcagcgcgatgggagcaaaagtgaggatgagttggatcaagcctctaccccaaccgacgtgcgagatatcgacctgtag

SEQ ID NO: 120747 - DNA, 870 bp, Artificial Sequence
  derived and/or modified sequence
atggaactgttgtgtcacgaggtggatcctgtgagaagagcagtccgcgatcgaaacctgcttagggacgaccgcgtcctgcagaatttgctgacgattgaggaacgatatcttccgcaatgcagctactttaagtgcgtgcagaaggatattcagccttacatgaggaggatggtggccacctggatgctcgaggtgtgcgaagaacagaaatgcgaagaagaggtgtttcctttagccatgaactacctagaccgttttttggctggggtcccaacccccaaatctcacctgcagttgctgggggcagtctgcatgtttctggcgtcgaagttgaaagaaacttcccccttgaccgccgagaaactgtgtatctacaccgacaactccattaagccgcaagagctgctggagtgggaattggtcgtgctgggcaagctgaagtggaatctcgccgcagtgaccccacatgattttatcgagcatatcttgcgaaaactgccacagcaaagggagaagctgtcgctcatccgaaagcacgcccagactttcatcgcattgtgcgcaaccgacttcaaattcgccatgtaccctccttccatgatcgcgaccgggagtgtgggggcagccatttgcggtctacagcaggacgaagaggtttcctctttgacctgcgatgctctgacggagctgctggccaagattaccaataccgatgtggactgcctgaaggcttgtcaagaacagatcgaagccgtgctgctgaactctctgcagcaatacaggcaagatcagcgcgacgggtcgaagtcagaggacgaactcgaccaggcgagcacacccaccgatgtgcgggatatcgacctgtag

SEQ ID NO: 120748 - protein, 292 aa, Artificial Sequence
  derived and/or modified sequence
MELLCCEGTRHAPRAGPDPRLLGDQRVLQSLLRLEERYVPRASYFQCVQREIKPHMRKMLAYWMLEVCEEQRCEEEVFPLAMNYLDRYLSCVPTRKAQLQLLGAVCMLLASKLRETTPLTIEKLCIYTDHAVSPRQLRDWEVLVLGKLKWDLAAVIAHDFLAFILHRLSLPRDRQALVKKHAQTFLALCATDYTFAMYPPSMIATGSIGAAVQGLGACSMSGDELTELLAGITGTEVDCLRACQEQIEAALRESLREASQTSSSPAPKAPRGSSSQGPSQTSTPTDVTAIHL

SEQ ID NO: 120749 - DNA, 879 bp, Artificial Sequence
  derived and/or modified sequence
atggagctgctgtgctgcgagggcaccagacacgcccccagagccggccccgaccccagactgctgggcgaccagagagtgctgcagagcctgctgagactggaggagagatacgtgcccagagccagctacttccagtgcgtgcagagagagatcaagccccacatgagaaagatgctggcctactggatgctggaggtgtgcgaggagcagagatgcgaggaggaggtgttccccctggccatgaactacctggacagatacctgagctgcgtgcccaccagaaaggcccagctgcagctgctgggcgccgtgtgcatgctgctggccagcaagctgagagagaccacccccctgaccatcgagaagctgtgcatctacaccgaccacgccgtgagccccagacagctgagagactgggaggtgctggtgctgggcaagctgaagtgggacctggccgccgtgatcgcccacgacttcctggccttcatcctgcacagactgagcctgcccagagacagacaggccctggtgaagaagcacgcccagaccttcctggccctgtgcgccaccgactacaccttcgccatgtacccccccagcatgatcgccaccggcagcatcggcgccgccgtgcagggcctgggcgcctgcagcatgagcggcgacgagctgaccgagctgctggccggcatcaccggcaccgaggtggactgcctgagagcctgccaggagcagatcgaggccgccctgagagagagcctgagagaggccagccagaccagcagcagccccgcccccaaggcccccagaggcagcagcagccagggccccagccagaccagcacccccaccgacgtgaccgccatccacctgtag

SEQ ID NO: 120750 - DNA, 2085 bp, Artificial Sequence
  derived and/or modified sequence
attccacggttgctacatcgtcgcgaggggcggggcgcctgtcagggaagcggcgcgcgcgcgcgggcggcgggcgggctggggatccgccgcgcagtgccagcgccagcgccagacccgcgccccgcgctctccggcccgtcgcctgccttgggactcgcgagcccgcactcccgccctgcctgttcgctgcccgagtatggagctgctgtgttgcgaaggcacccggcacgcgccccgggccgggccggacccgcggctgctgggggaccagcgtgtcctgcagagcctgctccgcctggaggagcgctacgtaccccgcgcctcctacttccagtgcgtgcagcgggagatcaagccgcacatgcggaagatgctggcttactggatgctggaggtatgtgaggagcagcgctgtgaggaggaagtcttccccctggccatgaactacctggatcgctacctgtcttgcgtccccacccgaaaggcgcagttgcagctcctgggtgcggtctgcatgctgctggcctccaagctgcgcgagaccacgcccctgaccatcgaaaaactgtgcatctacaccgaccacgctgtctctccccgccagttgcgggactgggaggtgctggtcctagggaagctcaagtgggacctggctgctgtgattgcacatgatttcctggccttcattctgcaccggctctctctgccccgtgaccgacaggccttggtcaaaaagcatgcccagacctttttggccctctgtgctacagattatacctttgccatgtacccgccatccatgatcgccacgggcagcattggggctgcagtgcaaggcctgggtgcctgctccatgtccggggatgagctcacagagctgctggcagggatcactggcactgaagtggactgcctgcgggcctgtcaggagcagatcgaagctgcactcagggagagcctcagggaagcctctcagaccagctccagcccagcgcccaaagccccccggggctccagcagccaagggcccagccagaccagcactcctacagatgtcacagccatacacctgtagccctggagaggccctctggagtggccactaagcagaggaggggccgctgccacccacctccctgcctccaggaaccacaccacatctaagcctgaaggggcgtctgttcccccttcacaaagcccaagggatctggtcctacccatccccgcagtgtgcactaaggggcccggccagccatgtctgcatttcggtggctagtcaagctcctcctccctgcatctgaccagcagcgcctttcccaactctagctgggggtgggccaggctgatgggacagaattggatacatacaccagcattccttttgaacgcccccccccacccctgggggctctcatgttttcaactgccaaaatgctctagtgccttctaaaggtgttgtcccttctagggttattgcatttggattggggtccctctaaaatttaatgcatgatagacacatatgagggggaatagtctagatggctcctctcagtactttggaggcccctatgtagtccgtgctgacagctgctcctagagggaggggcctaggcctcagccagagaagctataaattcctctttgctttgctttctgctcagcttctcctgtgtgattgacagctttgctgctgaaggctcattttaatttattaattgctttgagcacaactttaagaggacataatggggtcctggccatcccacaagtggtggtaaccctggtggttgctgttttcctcccttctgctactggcaaaaggatctttgtggccaaggagctgctatagcctggggtggggtcatgccctcctctcccattgtccctctgccccatcctccagcagggaaaatgcagcagggatgccctggaggtggctgagcccctgtctagagagggaggcaagccctgttgacacaggtctttcctaaggctgcaaggtttaggctggtggcccaggaccatcatcctactgtaataaagatgattgtgaaataaaactggctttggcttcttgga

SEQ ID NO: 120751 - DNA, 879 bp, Artificial Sequence
  derived and/or modified sequence
atggagctgctttgttgtgaaggcacccggcacgccccccgggcggggcccgacccccgactgctgggcgaccagcgtgtgctgcaaagtctccttcgtttagaagagagatacgtccctcgggcctcatatttccagtgtgttcagagggagatcaagcctcatatgagaaaaatgctagcctactggatgcttgaggtctgtgaagagcagagatgcgaagaagaggtgttcccactagcgatgaattacctcgaccggtacttaagttgcgtccccactcgcaaggcccaacttcaattgctcggagccgtctgtatgttacttgcctcaaagctccgggaaaccaccccactcactatcgagaagctgtgtatatacacggatcacgcggtgtcaccccgccaactccgcgactgggaggtccttgtccttggcaagttaaaatgggatttagccgccgtgattgctcatgattttctggcgtttattctccatagactgtctttaccgagggataggcaggccttagtcaagaagcacgcccagacctttctagccttgtgcgcaactgattacacattcgcgatgtacccaccttccatgatcgcaaccggctctatcggggcagcagttcagggcttgggcgcctgtagtatgtctggagacgaactgacagagctgctagctggcattacgggaacagaagtggattgtctccgggcatgtcaggaacagatagaggcggccctccgcgaaagcctccgtgaggcatcacagactagttcaagcccagcccccaaggcccccagggggagctctagccaagggcccagtcagactagcactcctaccgacgttaccgctatccacctgtag

SEQ ID NO: 120752 - DNA, 879 bp, Artificial Sequence
  derived and/or modified sequence
atggagctgctgtgctgtgagggcaccaggcatgcccccagggctggccctgacccccggctgctgggggaccagagggtgctgcagagcctgctgcggctggaggagcgctacgtgccccgggccagctacttccagtgtgtgcagcgggagatcaagccccacatgaggaagatgctggcctactggatgctggaggtgtgtgaggagcagagatgtgaggaggaggtgttccccctggccatgaactacctggaccgctacctgagctgtgtgcccaccaggaaggcccagctgcagctgctgggcgctgtgtgcatgctgctggccagcaagctgcgggagaccacccccctgaccatcgagaagctgtgcatctacacagaccatgctgtgagcccccggcagctgcgggactgggaggtgctggtgctgggcaagctgaagtgggacctggccgccgtcatcgcccatgacttcctggccttcatcctgcaccggctgagcctgccccgggaccggcaggccctggtgaagaagcacgcccagaccttcctggccctgtgtgccacagactacacctttgccatgtacccacccagcatgattgccaccggcagcatcggggctgctgtgcagggcctgggcgcctgcagcatgtctggagatgagctgacagagctgctggccggcatcactggaacagaggtggactgcctgcgggcctgccaggagcagattgaagctgccctgcgggagagcctgcgggaggccagccagaccagcagcagccctgcccccaaggccccccggggcagcagcagccagggccccagccagaccagcacccccacagatgtgacagccatccacctgtag

SEQ ID NO: 120753 - DNA, 879 bp, Artificial Sequence
  derived and/or modified sequence
atggagctgctgtgctgcgagggcacccggcacgccccccgggccggccccgaccctcgtctactcggtgaccagcgagttctccagtccctgctgaggctcgaggagaggtacgtccctagggcctcttattttcagtgtgtccaaagggaaataaaacctcatatgcgaaagatgctcgcatactggatgctggaggtctgcgaggagcagcgctgcgaagaggaagtcttcccactcgccatgaattacctggatagatatctgagctgcgtgcccacgagaaaggcccagcttcagttactgggagccgtttgtatgctgcttgcctccaagctgcgagaaacaacacctctgacaattgaaaagctgtgcatctatacggatcatgccgtctccccgaggcaactacgcgattgggaagtgctggttctcggaaaattaaagtgggacttagctgccgtaatcgcacacgatttcctggcatttatcttgcatcggttatctctaccaagggaccgacaggccctagtgaagaagcacgctcagacctttctggccctgtgtgccaccgactatacatttgccatgtacccaccctcaatgattgctaccggaagcatcggtgcagctgtccaagggctaggtgcttgctcaatgtctggagacgagctgactgagttactcgccggtatcactggaacagaagtggactgcctgagggcatgtcaggagcaaatcgaagcagcccttagagagtctctgcgggaggcatctcagacatcctccagtcccgctcccaaggcaccgagaggcagttctagtcagggaccatcacagacatccaccccaacggatgtcaccgccatccacctctag

SEQ ID NO: 120754 - DNA, 879 bp, Artificial Sequence
  derived and/or modified sequence
atggaactactgtgctgtgaaggtactaggcacgcccctagggccggacctgaccctagattgctgggagaccagcgcgtcctgcagagtctgctaagactagaggagcggtatgtccccagagcttcttacttccaatgcgtgcagagggaaattaagcctcacatgcggaagatgttagcctactggatgctagaggtatgcgaagaacagcgatgtgaggaagaagtattccctctcgccatgaactacctggaccgatacctgagctgcgttcctacgcgcaaggcccagctccagttgctgggcgcagtgtgcatgctgctggcctcaaagctgcgggagactacacctctgacaatcgagaagctttgtatatataccgatcacgccgtcagtcccagacagttaagggactgggaggtcctcgtgcttgggaaactgaaatgggatcttgccgctgttattgcccacgacttcctggcctttattctccatagactgtccctcccccgagacagacaagccttggtgaagaagcatgcacaaacattcttagcactttgcgcgacagattacacctttgctatgtaccccccatcaatgatcgccacgggtagtatcggagcagcggtgcagggattgggtgcctgctccatgtcaggagatgaacttaccgagttgttggccggaatcacagggaccgaggtagactgtctgcgggcttgccaagaacaaattgaggctgcactgagagagagccttcgcgaggcctcccagacctcatctagcccggcacccaaagcaccaaggggctcttcaagccagggaccgtctcagacatccactcccactgatgtgaccgcaatccatttgtag

SEQ ID NO: 120755 - protein, 701 aa, Artificial Sequence
  derived and/or modified sequence
RTSWPSELAAEKGNFEAAVKLGIAYLYNEGLSVSDEARAEVNGLKASRFFSLAERLNVGAAPFIWLFIRPPWSVSGSCCKAVVHESLRAECQLQRTHKASILHCLGRVLSLFEDEEKQQQAHDLFEEAAHQGCLTSSYLLWESDRRTDVSDPGRCLHSFRKLRDYAAKGCWEAQLSLAKACANANQLGLEVRASSEIVCQLFQASQAVSKQQVFSVQKGLNDTMRYILIDWLVEVATMKDFTSLCLHLTVECVDRYLRRRLVPRYRLQLLGIACMVICTRFISKEILTIREAVWLTDNTYKYEDLVRMMGEIVSALEGKIRVPTVVDYKEVLLTLVPVELRTQHLCSFLCELSLLHTSLSAYAPARLAAAALLLARLTHGQTQPWTTQLWDLTGFSYEDLIPCVLSLHKKCFHDDAPKDYRQVSLTAVKQRFEDKRYGEISQEEVLSYSQLCAALGVTQDSPDPPTFLSTGEIHAFLSSPSGRRTKRKRENSLQEDRGSFVTTPTAELSSQEETLLGSFLDWSLDCCSGYEGDQESEGEKEGDVTAPSGILDVTVVYLNPEQHCCQESSDEEACPEDKGPQDPQALALDTQIPATPGPKPLVRTSREPGKDVTTSGYSSVSTASPTSSVDGGLGALPQPTSVLSLDSDSHTQPCHHQARKSCLQCRPPSPPESSVPQQQVKRINLCIHSEEEDMNLGLVRL

SEQ ID NO: 120756 - protein, 786 aa, Artificial Sequence
  derived and/or modified sequence
MGSGGVVHCRCAKCFCYPTKRRIRRRPRNLTILSLPEDVLFHILKWLSVEDILAVRAVHSQLKDLVDNHASVWACASFQELWPSPGNLKLFERAAEKGNFEAAVKLGIAYLYNEGLSVSDEARAEVNGLKASRFFSLAERLNVGAAPFIWLFIRPPWSVSGSCCKAVVHESLRAECQLQRTHKASILHCLGRVLSLFEDEEKQQQAHDLFEEAAHQGCLTSSYLLWESDRRTDVSDPGRCLHSFRKLRDYAAKGCWEAQLSLAKACANANQLGLEVRASSEIVCQLFQASQAVSKQQVFSVQKGLNDTMRYILIDWLVEVATMKDFTSLCLHLTVECVDRYLRRRLVPRYRLQLLGIACMVICTRFISKEILTIREAVWLTDNTYKYEDLVRMMGEIVSALEGKIRVPTVVDYKEVLLTLVPVELRTQHLCSFLCELSLLHTSLSAYAPARLAAAALLLARLTHGQTQPWTTQLWDLTGFSYEDLIPCVLSLHKKCFHDDAPKDYRQVSLTAVKQRFEDKRYGEISQEEVLSYSQLCAALGVTQDSPDPPTFLSTGEIHAFLSSPSGRRTKRKRENSLQEDRGSFVTTPTAELSSQEETLLGSFLDWSLDCCSGYEGDQESEGEKEGDVTAPSGILDVTVVYLNPEQHCCQESSDEEACPEDKGPQDPQALALDTQIPATPGPKPLVRTSREPGKDVTTSGYSSVSTASPTSSVDGGLGALPQPTSVLSLDSDSHTQPCHHQARKSCLQCRPPSPPESSVPQQQVKRINLCIHSEEEDMNLGLVRL

SEQ ID NO: 120757 - DNA, 2106 bp, Artificial Sequence
  derived and/or modified sequence
agaaccagctggcccagcgagctggccgccgagaagggcaacttcgaggccgccgtgaagctgggcatcgcctacctgtacaacgagggcctgagcgtgagcgacgaggccagagccgaggtgaacggcctgaaggccagcagattcttcagcctggccgagagactgaacgtgggcgccgcccccttcatctggctgttcatcagacccccctggagcgtgagcggcagctgctgcaaggccgtggtgcacgagagcctgagagccgagtgccagctgcagagaacccacaaggccagcatcctgcactgcctgggcagagtgctgagcctgttcgaggacgaggagaagcagcagcaggcccacgacctgttcgaggaggccgcccaccagggctgcctgaccagcagctacctgctgtgggagagcgacagaagaaccgacgtgagcgaccccggcagatgcctgcacagcttcagaaagctgagagactacgccgccaagggctgctgggaggcccagctgagcctggccaaggcctgcgccaacgccaaccagctgggcctggaggtgagagccagcagcgagatcgtgtgccagctgttccaggccagccaggccgtgagcaagcagcaggtgttcagcgtgcagaagggcctgaacgacaccatgagatacatcctgatcgactggctggtggaggtggccaccatgaaggacttcaccagcctgtgcctgcacctgaccgtggagtgcgtggacagatacctgagaagaagactggtgcccagatacagactgcagctgctgggcatcgcctgcatggtgatctgcaccagattcatcagcaaggagatcctgaccatcagagaggccgtgtggctgaccgacaacacctacaagtacgaggacctggtgagaatgatgggcgagatcgtgagcgccctggagggcaagatcagagtgcccaccgtggtggactacaaggaggtgctgctgaccctggtgcccgtggagctgagaacccagcacctgtgcagcttcctgtgcgagctgagcctgctgcacaccagcctgagcgcctacgcccccgccagactggccgccgccgccctgctgctggccagactgacccacggccagacccagccctggaccacccagctgtgggacctgaccggcttcagctacgaggacctgatcccctgcgtgctgagcctgcacaagaagtgcttccacgacgacgcccccaaggactacagacaggtgagcctgaccgccgtgaagcagagattcgaggacaagagatacggcgagatcagccaggaggaggtgctgagctacagccagctgtgcgccgccctgggcgtgacccaggacagccccgacccccccaccttcctgagcaccggcgagatccacgccttcctgagcagccccagcggcagaagaaccaagagaaagagagagaacagcctgcaggaggacagaggcagcttcgtgaccacccccaccgccgagctgagcagccaggaggagaccctgctgggcagcttcctggactggagcctggactgctgcagcggctacgagggcgaccaggagagcgagggcgagaaggagggcgacgtgaccgcccccagcggcatcctggacgtgaccgtggtgtacctgaaccccgagcagcactgctgccaggagagcagcgacgaggaggcctgccccgaggacaagggcccccaggacccccaggccctggccctggacacccagatccccgccacccccggccccaagcccctggtgagaaccagcagagagcccggcaaggacgtgaccaccagcggctacagcagcgtgagcaccgccagccccaccagcagcgtggacggcggcctgggcgccctgccccagcccaccagcgtgctgagcctggacagcgacagccacacccagccctgccaccaccaggccagaaagagctgcctgcagtgcagaccccccagcccccccgagagcagcgtgccccagcagcaggtgaagagaatcaacctgtgcatccacagcgaggaggaggacatgaacctgggcctggtgagactgtag

SEQ ID NO: 120758 - DNA, 2361 bp, Artificial Sequence
  derived and/or modified sequence
atgggcagcggcggcgtggtgcactgcagatgcgccaagtgcttctgctaccccaccaagagaagaatcagaagaagacccagaaacctgaccatcctgagcctgcccgaggacgtgctgttccacatcctgaagtggctgagcgtggaggacatcctggccgtgagagccgtgcacagccagctgaaggacctggtggacaaccacgccagcgtgtgggcctgcgccagcttccaggagctgtggcccagccccggcaacctgaagctgttcgagagagccgccgagaagggcaacttcgaggccgccgtgaagctgggcatcgcctacctgtacaacgagggcctgagcgtgagcgacgaggccagagccgaggtgaacggcctgaaggccagcagattcttcagcctggccgagagactgaacgtgggcgccgcccccttcatctggctgttcatcagacccccctggagcgtgagcggcagctgctgcaaggccgtggtgcacgagagcctgagagccgagtgccagctgcagagaacccacaaggccagcatcctgcactgcctgggcagagtgctgagcctgttcgaggacgaggagaagcagcagcaggcccacgacctgttcgaggaggccgcccaccagggctgcctgaccagcagctacctgctgtgggagagcgacagaagaaccgacgtgagcgaccccggcagatgcctgcacagcttcagaaagctgagagactacgccgccaagggctgctgggaggcccagctgagcctggccaaggcctgcgccaacgccaaccagctgggcctggaggtgagagccagcagcgagatcgtgtgccagctgttccaggccagccaggccgtgagcaagcagcaggtgttcagcgtgcagaagggcctgaacgacaccatgagatacatcctgatcgactggctggtggaggtggccaccatgaaggacttcaccagcctgtgcctgcacctgaccgtggagtgcgtggacagatacctgagaagaagactggtgcccagatacagactgcagctgctgggcatcgcctgcatggtgatctgcaccagattcatcagcaaggagatcctgaccatcagagaggccgtgtggctgaccgacaacacctacaagtacgaggacctggtgagaatgatgggcgagatcgtgagcgccctggagggcaagatcagagtgcccaccgtggtggactacaaggaggtgctgctgaccctggtgcccgtggagctgagaacccagcacctgtgcagcttcctgtgcgagctgagcctgctgcacaccagcctgagcgcctacgcccccgccagactggccgccgccgccctgctgctggccagactgacccacggccagacccagccctggaccacccagctgtgggacctgaccggcttcagctacgaggacctgatcccctgcgtgctgagcctgcacaagaagtgcttccacgacgacgcccccaaggactacagacaggtgagcctgaccgccgtgaagcagagattcgaggacaagagatacggcgagatcagccaggaggaggtgctgagctacagccagctgtgcgccgccctgggcgtgacccaggacagccccgacccccccaccttcctgagcaccggcgagatccacgccttcctgagcagccccagcggcagaagaaccaagagaaagagagagaacagcctgcaggaggacagaggcagcttcgtgaccacccccaccgccgagctgagcagccaggaggagaccctgctgggcagcttcctggactggagcctggactgctgcagcggctacgagggcgaccaggagagcgagggcgagaaggagggcgacgtgaccgcccccagcggcatcctggacgtgaccgtggtgtacctgaaccccgagcagcactgctgccaggagagcagcgacgaggaggcctgccccgaggacaagggcccccaggacccccaggccctggccctggacacccagatccccgccacccccggccccaagcccctggtgagaaccagcagagagcccggcaaggacgtgaccaccagcggctacagcagcgtgagcaccgccagccccaccagcagcgtggacggcggcctgggcgccctgccccagcccaccagcgtgctgagcctggacagcgacagccacacccagccctgccaccaccaggccagaaagagctgcctgcagtgcagaccccccagcccccccgagagcagcgtgccccagcagcaggtgaagagaatcaacctgtgcatccacagcgaggaggaggacatgaacctgggcctggtgagactgtag

SEQ ID NO: 120759 - DNA, 4087 bp, Artificial Sequence
  derived and/or modified sequence
cgatggggagcggcggcgtggtccactgtaggtgtgccaagtgtttctgttatcctacaaagcgaagaataaggaggaggccccgaaacctgaccatcttgagtctccccgaagatgtgctctttcacatcctgaaatggctttctgtagaggacatcctggccgtccgagctggctgctgaaaaggggaatttcgaagctgctgtgaagctgggcatagcctacctctacaatgaaggcctgtctgtgtctgatgaggcccgcgcagaagtgaatggcctgaaggcctctcgcttcttcagtctcgctgagcggctgaatgtgggtgccgcacctttcatctggctcttcatccgccctccgtggtcggtgagcggaagctgctgcaaggccgtggttcacgagagcctcagggcagagtgccagctgcagaggactcacaaagcatccatattgcactgcttgggcagagtgctgagtctgttcgaggatgaggagaagcagcagcaggcccatgacctgtttgaggaggctgctcatcagggatgtctgaccagctcctacctcctctgggaaagcgacaggaggacagatgtgtcagatcctgggcgatgcctccacagcttccgaaaactcagggactacgctgccaaaggctgctgggaagcgcagctgtctttagccaaagcctgtgcaaatgcaaaccagcttggactggaggtgagagcttccagtgagatcgtctgccagctatttcaggcttcccaggctgtcagtaaacaacaagtcttctccgtgcagaagggactcaatgacacaatgaggtacattctgatcgactggctggtggaagttgccaccatgaaggacttcacaagcctgtgcctgcacctgaccgtggagtgtgtggaccggtacctgcggaggaggctggtgccgcggtacaggctccagctgctgggcatcgcctgcatggtcatctgcacccggtttatcagtaaagagatcctgaccatccgggaggccgtatggctcacggacaacacttacaagtacgaggacctggtgagaatgatgggcgagatcgtctccgccttggaagggaagattcgagtccccactgtggtggattacaaggaggtcctgctgacgctagtccctgtggagctgagaacccagcacctgtgcagcttcctctgcgagctctccctgctgcacaccagcctgtccgcctacgccccagcccgcctggctgccgcagccctgctcctggccagactgacgcacgggcagacacagccctggaccactcagctgtgggacctcaccggattctcctatgaagacctcattccctgcgtcttgagcctccataagaagtgcttccatgatgacgcccccaaggactacaggcaagtctctctgaccgccgtgaagcagcggtttgaggacaagcgctatggagaaatcagccaggaagaggtgctgagctacagccagttgtgtgctgcattaggagtgacacaagacagccccgaccccccgactttcctcagcacaggggagatccacgccttcctcagctctccctcggggcggagaaccaaacggaagcgggagaacagcctccaggaagacagaggcagcttcgttaccacccccactgcggagctgtccagccaggaggagacgctgctgggcagcttcctcgactggagcctggactgctgctctggctatgaaggcgaccaggagagtgagggcgagaaggagggcgacgtgacagctcccagcggcatcctcgatgtcaccgtggtctacctgaacccagaacagcattgctgccaggaatccagtgatgaggaggcttgtccagaggacaagggaccccaggacccacaggcactggcgctggacacccagatccctgcaacccctggacccaaacccctggtccgcaccagccgggagccagggaaggacgtcacgacctcagggtactcctccgtcagcaccgcaagtcccacaagctccgtggacggtggcttgggggccctgccccaacctacctcagtgctgtccctggacagtgactcgcacacacagccctgccaccatcaggccaggaagtcatgtttacagtgtcgtcccccaagtcccccggagagcagtgttccccagcaacaggtgaagcggataaacctatgcatacacagtgaggaggaggacatgaacctgggccttgtgaggctgtaagtgtgtcagcacatttgccgcagtggatgtgtactgagggggctggaggcgaagggtgggagcatagcataggaacgctgcatagaccatggaggcctttgcgcagagagcagagaggatgacttgcggccaccaagtttctgtctccgcgggagtcccgtgcaagccatcagaatgttgaaatgagggtgaagagctcagatccctctctttggaaagtttagcctggaagcagttggccacactgtgtggagggcacctctctgtcccttccgtgtctcactgtctctggaagcttcagcccatgtgtgtcctggtgttcccagccccaccagagccccgtgccgggagctgacagctttcacgcttaaggcacgtgtgacctgggtagtcagacaccacttgagcccctgcccacatctgctggtttggggcttcagtggggagctgacagctgtgagcacaccactgtcccctcatccacctcggcctgcatggggcacccacttccttctgggtggggcttccatggtaagggggcctgcgtccctgcacactgcgaggactgccttggccacaggcccactccctacgacacgtgactcgttttagagctctgtcccagaggcgttcgtatgtgacccacagatggcgtcaatgtgaacacctctctttgtgctgaatttctgggccattcttttcctgtcttatttctaaatttccttcttccaagatgaaaacaaaagaaaaacttaaaacagaaggtattaaaaaaacaagagattcccaccattatttaggttcacctgcaaaacaaaaatcttactccagcccctcaatgccatcctgacacactttatgcaaaaagaattttcccagataggctagccagaaaaaacttcaagtcctctgtaacatctgaggtgaccaagaggcagaagagcagagcagtcgggggccgtgtcctggctgatcccaactgcagctctgctgtgggggcccgtgggagggaggcagacccctgggctttcctgctggccacggagactctgctcctgcatggaaagggagcctgggagccagcagcccacgcctggggagcctgcctggggccatgtgaccatggcctctccctgggaacgggctgaccacaacacaccctgctgccatccacttctgtttactctgcaaatgtaagaaagaaccacttggccagaagtgtcccccagatgcttttttttttttttttttggagacagttttgctcttgtctccccggctggagtgcagtggcatgatctcaactctcaactcactgtaacctccgcctcccggatactcctgcctcagcctcctgggtagctgggattacaagcacccaaccacgcccagctaatttttgtattttcggtagagacgggatttcaccatgttggccaggctagtctcgaactcatgacctcaagtgatccgcccacttcggtctcccaaagtgctgggattacaggcatgagccacggcgcctggcccccaaatgctcttgaaccggaaacccagggatgggagatgctcactgagctgctgcttttatgtgtgctggtgctatgtgtgttcatgtccgcggcagctgtctttttgctactataagggaattctggccaccctgggtggggtgtggtcggggtgagaacccaagcgttggaactgtagacccgtcctgtcgactgtgtgcccctgggcatgtgtgagcctcagtttcctcatctgtaaggggggcaatgatacctacctcacaggggtgttgtgaggattaaatgtgaggaggatagtg

SEQ ID NO: 120760 - DNA, 4258 bp, Artificial Sequence
  derived and/or modified sequence
gctccggccggggcgcgggcgcgctctcaggcgggctccggcggcagcgacgcgagcgcggcgatggggagcggcggcgtggtccactgtaggtgtgccaagtgtttctgttatcctacaaagcgaagaataaggaggaggccccgaaacctgaccatcttgagtctccccgaagatgtgctctttcacatcctgaaatggctttctgtagaggacatcctggccgtccgagctgtacactcccagctgaaggacctggtggacaaccacgccagtgtgtgggcatgtgccagcttccaggagctgtggccgtctccagggaacctgaagctctttgaaagggctgctgaaaaggggaatttcgaagctgctgtgaagctgggcatagcctacctctacaatgaaggcctgtctgtgtctgatgaggcccgcgcagaagtgaatggcctgaaggcctctcgcttcttcagtctcgctgagcggctgaatgtgggtgccgcacctttcatctggctcttcatccgccctccgtggtcggtgagcggaagctgctgcaaggccgtggttcacgagagcctcagggcagagtgccagctgcagaggactcacaaagcatccatattgcactgcttgggcagagtgctgagtctgttcgaggatgaggagaagcagcagcaggcccatgacctgtttgaggaggctgctcatcagggatgtctgaccagctcctacctcctctgggaaagcgacaggaggacagatgtgtcagatcctgggcgatgcctccacagcttccgaaaactcagggactacgctgccaaaggctgctgggaagcgcagctgtctttagccaaagcctgtgcaaatgcaaaccagcttggactggaggtgagagcttccagtgagatcgtctgccagctatttcaggcttcccaggctgtcagtaaacaacaagtcttctccgtgcagaagggactcaatgacacaatgaggtacattctgatcgactggctggtggaagttgccaccatgaaggacttcacaagcctgtgcctgcacctgaccgtggagtgtgtggaccggtacctgcggaggaggctggtgccgcggtacaggctccagctgctgggcatcgcctgcatggtcatctgcacccggtttatcagtaaagagatcctgaccatccgggaggccgtatggctcacggacaacacttacaagtacgaggacctggtgagaatgatgggcgagatcgtctccgccttggaagggaagattcgagtccccactgtggtggattacaaggaggtcctgctgacgctagtccctgtggagctgagaacccagcacctgtgcagcttcctctgcgagctctccctgctgcacaccagcctgtccgcctacgccccagcccgcctggctgccgcagccctgctcctggccagactgacgcacgggcagacacagccctggaccactcagctgtgggacctcaccggattctcctatgaagacctcattccctgcgtcttgagcctccataagaagtgcttccatgatgacgcccccaaggactacaggcaagtctctctgaccgccgtgaagcagcggtttgaggacaagcgctatggagaaatcagccaggaagaggtgctgagctacagccagttgtgtgctgcattaggagtgacacaagacagccccgaccccccgactttcctcagcacaggggagatccacgccttcctcagctctccctcggggcggagaaccaaacggaagcgggagaacagcctccaggaagacagaggcagcttcgttaccacccccactgcggagctgtccagccaggaggagacgctgctgggcagcttcctcgactggagcctggactgctgctctggctatgaaggcgaccaggagagtgagggcgagaaggagggcgacgtgacagctcccagcggcatcctcgatgtcaccgtggtctacctgaacccagaacagcattgctgccaggaatccagtgatgaggaggcttgtccagaggacaagggaccccaggacccacaggcactggcgctggacacccagatccctgcaacccctggacccaaacccctggtccgcaccagccgggagccagggaaggacgtcacgacctcagggtactcctccgtcagcaccgcaagtcccacaagctccgtggacggtggcttgggggccctgccccaacctacctcagtgctgtccctggacagtgactcgcacacacagccctgccaccatcaggccaggaagtcatgtttacagtgtcgtcccccaagtcccccggagagcagtgttccccagcaacaggtgaagcggataaacctatgcatacacagtgaggaggaggacatgaacctgggccttgtgaggctgtaagtgtgtcagcacatttgccgcagtggatgtgtactgagggggctggaggcgaagggtgggagcatagcataggaacgctgcatagaccatggaggcctttgcgcagagagcagagaggatgacttgcggccaccaagtttctgtctccgcgggagtcccgtgcaagccatcagaatgttgaaatgagggtgaagagctcagatccctctctttggaaagtttagcctggaagcagttggccacactgtgtggagggcacctctctgtcccttccgtgtctcactgtctctggaagcttcagcccatgtgtgtcctggtgttcccagccccaccagagccccgtgccgggagctgacagctttcacgcttaaggcacgtgtgacctgggtagtcagacaccacttgagcccctgcccacatctgctggtttggggcttcagtggggagctgacagctgtgagcacaccactgtcccctcatccacctcggcctgcatggggcacccacttccttctgggtggggcttccatggtaagggggcctgcgtccctgcacactgcgaggactgccttggccacaggcccactccctacgacacgtgactcgttttagagctctgtcccagaggcgttcgtatgtgacccacagatggcgtcaatgtgaacacctctctttgtgctgaatttctgggccattcttttcctgtcttatttctaaatttccttcttccaagatgaaaacaaaagaaaaacttaaaacagaaggtattaaaaaaacaagagattcccaccattatttaggttcacctgcaaaacaaaaatcttactccagcccctcaatgccatcctgacacactttatgcaaaaagaattttcccagataggctagccagaaaaaacttcaagtcctctgtaacatctgaggtgaccaagaggcagaagagcagagcagtcgggggccgtgtcctggctgatcccaactgcagctctgctgtgggggcccgtgggagggaggcagacccctgggctttcctgctggccacggagactctgctcctgcatggaaagggagcctgggagccagcagcccacgcctggggagcctgcctggggccatgtgaccatggcctctccctgggaacgggctgaccacaacacaccctgctgccatccacttctgtttactctgcaaatgtaagaaagaaccacttggccagaagtgtcccccagatgcttttttttttttttttttggagacagttttgctcttgtctccccggctggagtgcagtggcatgatctcaactctcaactcactgtaacctccgcctcccggatactcctgcctcagcctcctgggtagctgggattacaagcacccaaccacgcccagctaatttttgtattttcggtagagacgggatttcaccatgttggccaggctagtctcgaactcatgacctcaagtgatccgcccacttcggtctcccaaagtgctgggattacaggcatgagccacggcgcctggcccccaaatgctcttgaaccggaaacccagggatgggagatgctcactgagctgctgcttttatgtgtgctggtgctatgtgtgttcatgtccgcggcagctgtctttttgctactataagggaattctggccaccctgggtggggtgtggtcggggtgagaacccaagcgttggaactgtagacccgtcctgtcgactgtgtgcccctgggcatgtgtgagcctcagtttcctcatctgtaaggggggcaatgatacctacctcacaggggtgttgtgaggattaaatgtgaggaggatagtggca

SEQ ID NO: 120761 - DNA, 2106 bp, Artificial Sequence
  derived and/or modified sequence
aggacctcctggccgtctgaactggccgcagaaaaaggcaacttcgaagctgccgttaagcttgggatcgcatatctgtacaacgaagggctctcggtgtccgacgaagcccgggccgaggtgaacggattgaaggcaagcagatttttctcgctggccgaacgactcaacgtgggggccgccccctttatctggctgtttatccgtcccccgtggagcgtgagcggatcctgttgcaaagccgtagtgcatgagtcgctgcgggccgaatgccagctacagagaacccacaaggcttccatcctccactgcctcggtagggttctctccttgttcgaggacgaggaaaaacagcaacaggcacacgatttattcgaagaggccgctcaccaggggtgtttgacttcgtcttacttgctttgggaatccgataggcggacggacgtgagcgaccccggaagatgcctgcacagtttccgcaagctgcgggactacgctgccaaagggtgctgggaggcccaactttcgttggcaaaagcctgcgccaacgccaatcagctgggcttggaagtgcgggccagctcagaaatcgtgtgccaactctttcaggcttcgcaggccgtgagcaagcagcaggtgtttagcgtgcagaaaggactgaacgacacaatgcgatatattttgatagattggctggtcgaagtggctaccatgaaggattttaccagcctgtgtttgcatctcaccgttgagtgcgtcgatcgctatctgaggcgtcgtctggtgccccgctaccgcctccagctccttggaatcgcctgtatggtaatctgtacacgttttatctctaaagagatcctgactatccgggaagctgtttggttaacggacaacacctataagtatgaggatttagtgcgcatgatgggagagatcgtgagcgccctggaaggcaaaatacgtgtaccaacagtggtggactataaagaggtactgctgactctcgtccctgtagaacttaggactcagcacctctgttcgttcctctgtgagttgtctttactccatactagcctatccgcgtatgctcccgcccgacttgctgccgccgccctgctgctcgcccgcctgactcacggacagacacagccttggaccactcaattgtgggacttgaccggcttctcctacgaggacctcattccgtgtgtgttgtcactgcacaagaagtgttttcatgacgacgctcctaaagattacagacaggtgagtctgaccgcagtgaaacaaaggtttgaggataagagatacggagaaatttctcaggaggaagttctgagctattcacagctttgcgcagctttgggcgttacgcaggactcacccgacccccctacctttttatctacgggggagatacatgcattcctgtcatccccctcagggaggcgaactaagcgcaaaagggagaattctctgcaggaagatcgggggtctttcgtgacaacacccactgctgagttatcttctcaggaggaaacactgctcggcagttttttagattggtccctcgactgttgctcaggatacgaaggagaccaggagtctgaaggcgagaaagaaggcgacgtcaccgccccatcgggcatcctcgacgtgacagtggtctacctgaatcctgaacaacactgttgtcaagagagctctgacgaagaggcctgccccgaggacaaggggccgcaggatccacaggcattggccttggatacgcaaattccagccacacccgggcccaagcccctggtgaggacctcaagggaacctggtaaggatgttacaaccagcggctatagttcagtgtctactgcatcaccgacttccagcgtggacggcggactcggcgctttgccacagcccacttcagttttatctttggactcagatagtcacactcagccttgtcatcaccaggcaagaaagtcatgcttacagtgtaggccaccatcgccaccggaatcttcagtgccccaacaacaggtaaaaagaataaacctctgcatccattctgaagaggaagatatgaacctggggcttgtgagactctag

SEQ ID NO: 120762 - DNA, 2361 bp, Artificial Sequence
  derived and/or modified sequence
atgggctccggtggggttgtgcactgccgctgcgcaaaatgcttttgctatccgacgaaaagacgcatccggcggcgcccacggaatttaactatcctgtcactccctgaggacgtgttattccatattctgaagtggctttccgtcgaggacatcctggcggtacgggcggtccactctcagctgaaagatctcgtagataatcatgcatccgtgtgggcctgcgcttcctttcaagagctgtggccatcgccaggaaacctcaagttgtttgagagggccgccgagaaaggcaattttgaagccgcggtaaaactggggatcgcctacctttacaacgaaggactatccgtaagcgacgaagctagggccgaggtgaatggcctcaaggcttcacgattttttagtctggctgagcgcctgaacgtgggggcagccccttttatctggctgtttattcggcctccctggagcgtatcaggatcctgctgcaaagccgtcgtgcatgaatccctgcgcgccgaatgtcagctgcagcgaacgcacaaggcttcaattttacattgcttgggacgggttttgagcttgttcgaggacgaggagaagcagcagcaggcacacgacctgtttgaggaggctgcccaccagggatgtctgaccagttcttatttgttgtgggaatctgacagacggacagatgtctctgaccccgggaggtgtctgcattcatttcggaagctcagagactacgctgctaagggttgctgggaggctcagctcagcctcgctaaagcctgcgccaacgccaaccagctcggtcttgaagtgcgagcctctagcgaaatcgtgtgtcagctttttcaagcctctcaggcggtgtcaaaacagcaggtgttttcagtgcagaaggggctcaacgacactatgagatacatactgattgactggctcgtcgaggtcgctactatgaaggattttactagtctttgtctgcacctgaccgtggaatgcgtggatcgctacctgagaagaaggctggttccccgctacagactgcagctgctgggcatcgcctgcatggtgatctgcacaagattcattagcaaggagatactgacaatcagggaagcagtgtggctcactgataatacatacaagtatgaagacctggtccggatgatgggcgaaatcgtctctgcactggaaggaaaaataagggttccgaccgtggtcgattacaaggaggttctcctgactctagttcctgttgagctgcgcacccagcatctttgctctttcctgtgcgagcttagcctgcttcacaccagcctcagtgcctatgcaccagcccgcctggccgccgcagctctgctcttagcgagactaacacacggccagacccagccatggacaactcagctttgggatctgacggggttcagctacgaagaccttattccatgcgttctgtccctgcacaagaagtgctttcacgacgatgcacccaaggactatagacaggtgtctctcactgccgtgaaacaacgctttgaagacaagaggtacggtgagatcagtcaggaggaggttctgagttattcgcagctgtgtgcagcactgggcgttacacaagactctcccgacccgccaaccttcctctctacaggggaaatccatgcattcttaagctcacccagcggcagaaggacgaaacgcaagcgggaaaattctctgcaggaggatagagggtccttcgtgacaactccaaccgccgagttgtctagccaggaggaaacccttttaggttcttttctcgactggtccctggattgctgcagtgggtacgagggggatcaggagtccgaaggcgagaaggagggcgatgtgaccgctccttctggaatcttagatgttaccgtggtttatctcaatccagaacaacattgttgtcaagaatcttctgacgaggaagcttgtcccgaagacaagggtccacaggatccccaggccctggccctagatacgcagatccccgccacgccaggcccgaaaccgctggtccgcacatcccgcgaaccgggtaaagacgtcacgacgtcaggatacagttcggtgtccaccgcaagtcccacttcctcagtggatggcggcttaggcgcactgcctcaacccactagcgtgctcagcctggactcagattcccacacccagccgtgtcaccaccaggctcggaagtcttgtctgcagtgtaggccacccagcccgcccgagtcaagtgtgccacagcagcaggtgaaacgaatcaacctttgtattcattccgaggaggaggacatgaacctcggcttagtgcgcctctag

SEQ ID NO: 120763 - DNA, 2106 bp, Artificial Sequence
  derived and/or modified sequence
aggacctcctggcccagcgagctggccgctgagaagggcaactttgaagctgctgtgaagctgggcatcgcctacctgtacaatgaaggcctgtctgtgtctgatgaggcccgggcagaggtgaatggcctgaaggccagccgcttcttcagcctggccgagcggctgaatgtgggcgccgcccccttcatctggctgttcatccggcccccctggagcgtgtctggcagctgctgcaaggctgtggtgcatgagagcctgcgggcagagtgccagctgcagaggacccacaaggccagcatcctgcactgcctgggccgggtgctgagcctgtttgaagatgaggagaagcagcagcaggcccatgacctgtttgaggaggccgcccaccagggctgcctgaccagcagctacctgctgtgggagagtgacagaagaacagatgtgtctgaccccggccgctgcctgcacagcttcaggaagctgcgggactatgctgccaagggctgctgggaggcccagctgagcctggccaaggcctgtgccaatgccaaccagctgggcctggaggtgcgggccagcagcgagatcgtgtgccagctgttccaggccagccaggccgtgtccaagcagcaggtgttttctgtgcagaagggcctgaatgacaccatgagatacatcctgattgactggctggtggaggtggccaccatgaaggacttcaccagcctgtgcctgcacctgactgtggagtgtgtggaccgctacctgcggcggcggctggtgccccgctaccgcctgcagctgctgggcatcgcctgcatggtgatctgcacccgcttcatcagcaaggagatcctgaccatccgggaggccgtgtggctgacagacaacacctacaagtatgaggacctggtgaggatgatgggagagatcgtgtctgccctggagggcaagatccgggtgcccaccgtggtggactacaaggaggtgctgctgaccctggtgcctgtggagctgcggacccagcacctgtgcagcttcctgtgtgagctgagcctgctgcacaccagcctgagcgcctatgccccagcccggctggccgccgccgccctgctgctggcccggctgacccacggccagacccagccctggaccacccagctgtgggacctgaccggcttctcctatgaggacctgatcccctgtgtgctgagcctgcacaagaagtgcttccatgatgatgcccccaaggactaccggcaggtgtccctgacagctgtgaagcagagatttgaggacaagagatatggagagatcagccaggaggaggtgctgagctacagccagctgtgtgccgccctgggcgtgacccaggacagcccagacccccccaccttcctgagcactggagagatccacgccttcctgagcagccccagcggccgccgcaccaagaggaagcgggagaacagcctgcaggaggaccggggcagctttgtgaccacccccacagctgagctgagcagccaggaggagaccctgctgggcagcttcctggactggagcctggactgctgcagcggctatgaaggagaccaggagagcgagggggagaaggagggagatgtgacagcccccagcggcatcctggatgtgacagtggtgtacctgaaccctgagcagcactgctgccaggagagcagtgatgaggaggcctgcccagaggacaagggcccccaggacccccaggccctggccctggacacccagatcccagccaccccaggccccaagcccctggtgaggaccagccgggagcccgggaaggatgtgaccaccagcggctacagctctgtgtccacagccagccccaccagctctgtggatggcggcctgggcgccctgccccagcccacctctgtgctgagcctggacagcgacagccacacccagccctgccaccaccaggccaggaagagctgcctgcagtgcaggcctcccagccccccagagagctctgtgccccagcagcaggtgaagaggatcaacctgtgcatccacagcgaggaggaggacatgaacctgggcctggtgcggctgtag

SEQ ID NO: 120764 - DNA, 2361 bp, Artificial Sequence
  derived and/or modified sequence
atgggcagcggaggagtggtgcactgccgctgtgccaagtgcttctgctaccccaccaagaggcgcatcagaagaagacccaggaacctgaccatcctgagcctgcctgaagatgtgctcttccacatcctgaagtggctgtctgtggaggacatcctggccgtgcgggctgtgcacagccagctgaaggacctggtggacaaccacgcctctgtgtgggcctgtgccagcttccaggagctgtggcccagccctggcaacctgaagctgtttgaaagagctgctgagaagggcaactttgaggccgctgtgaagctgggcatcgcctacctgtacaatgaaggcctgtctgtgtctgatgaggcccgggcagaggtgaatggcctgaaggccagccgcttcttcagcctggccgagcggctgaatgtgggcgccgcccccttcatctggctgttcatccggcccccctggagcgtgtctggcagctgctgcaaggctgtggtgcatgagagcctgcgggcagagtgccagctgcagaggacccacaaggccagcatcctgcactgcctgggccgggtgctgagcctgtttgaagatgaggagaagcagcagcaggcccatgacctgtttgaggaggccgcccaccagggctgcctgaccagcagctacctgctgtgggagagtgacagaagaacagatgtgtctgaccccggccgctgcctgcacagcttcaggaagctgcgggactatgctgccaagggctgctgggaggcccagctgagcctggccaaggcctgtgccaatgccaaccagctgggcctggaggtgcgggccagcagcgagatcgtgtgccagctgttccaggccagccaggccgtgtccaagcagcaggtgttttctgtgcagaagggcctgaatgacaccatgagatacatcctgattgactggctggtggaggtggccaccatgaaggacttcaccagcctgtgcctgcacctgactgtggagtgtgtggaccgctacctgcggcggcggctggtgccccgctaccgcctgcagctgctgggcatcgcctgcatggtgatctgcacccgcttcatcagcaaggagatcctgaccatccgggaggccgtgtggctgacagacaacacctacaagtatgaggacctggtgaggatgatgggagaaattgtgtctgccctggagggcaagatccgggtgcccaccgtggtggactacaaggaggtgctgctgaccctggtgcctgtggagctgcggacccagcacctgtgcagcttcctgtgtgagctgagcctgctgcacaccagcctgagcgcctatgccccagcccggctggccgctgctgccctgctgctggcccggctgacccacggccagacccagccctggaccacccagctgtgggacctgaccggcttctcctatgaagatctcatcccctgtgtgctgagcctgcacaagaagtgcttccatgatgatgcccccaaggactaccggcaggtgtccctgacagctgtgaagcagagatttgaggacaagcgctacggggagatcagccaggaggaggtgctgagctacagccagctgtgtgccgccctgggcgtgacccaggacagcccagacccccccaccttcctgagcactggagagatccacgccttcctgagcagccccagcggccgccgcaccaagaggaagcgggagaacagcctgcaggaggaccggggcagctttgtgaccacccccacagctgagctgagcagccaggaggagaccctgctgggcagcttcctggactggagcctggactgctgcagcggctatgaaggagaccaggagagcgagggggagaaggagggagatgtgacagcccccagcggcatcctggatgtgacagtggtgtacctgaaccctgagcagcactgctgccaggagagcagtgatgaggaggcctgcccagaagataaaggcccccaggacccccaggccctggccctggacacccagatcccagccaccccaggccccaagcccctggtgaggaccagccgggagcccgggaaggatgtgaccaccagcggctacagctctgtgtccacagccagccccaccagctctgtggatggcggcctgggcgccctgccccagcccacctctgtgctgagcctggacagcgacagccacacccagccctgccaccaccaggccaggaagagctgcctgcagtgccggccccccagccccccagagagctctgtgccccagcagcaggtgaagaggatcaacctgtgcatccacagcgaggaggaggacatgaacctgggcctggtgcggctgtag

SEQ ID NO: 120765 - DNA, 2106 bp, Artificial Sequence
  derived and/or modified sequence
cggaccagctggcccagcgagctggccgccgagaagggcaacttcgaagctgctgttaagcttgggattgcatatctgtacaacgaaggactttcagtcagcgatgaggcccgggctgaagtgaacggcctgaaagcaagcaggttcttcagtctggctgaacggttgaatgtgggtgcggccccatttatctggctgtttatccgtccaccatggtccgtgagtggttcatgctgcaaggccgttgtacacgagtctctgcgcgcagagtgtcaactccagaggacacataaagcttctatcctgcactgtctggggcgcgtgctgtctctgtttgaggatgaggagaagcaacagcaggcccacgacctattcgaagaagcagctcatcagggatgcctaacgtcctcgtatcttctatgggaatctgaccgcagaactgacgtgtcagatcccggacgatgcttacattcttttcgcaagctccgtgattatgctgccaagggctgctgggaggcgcagctttcactggccaaggcgtgcgctaatgccaaccagctcggcctagaagtgagagcttctagtgaaattgtttgccaattattccaagcaagtcaggccgtctcaaaacagcaggtgtttagcgtccaaaagggactcaatgacaccatgcgctacattctgattgattggctcgtggaggtcgctactatgaaggacttcacttcgctgtgtctacacctcaccgttgaatgcgtggacagatacttgcgcagaaggctggttcctcggtacagactgcaattactgggtatagcctgtatggttatctgcacccgatttatatctaaagagattttgactatacgggaggccgtgtggcttacagacaacacttacaagtacgaggatcttgtccggatgatgggagagattgtttctgcccttgaaggaaaaataagggtacccaccgtggtagactataaggaagtcttactgactctggtcccggtagaactaagaacccagcacctttgttcattcctatgcgagctctctcttttgcacacctcattgtccgcatacgcaccggctagactcgcggcggctgctctgctgttggccaggctgacccatgggcagactcagccatggacaacccagttatgggacctcacaggtttcagttatgaagacctgattccgtgcgtgctgagtcttcacaaaaagtgcttccatgacgatgcccctaaggactatagacaggtctccctcaccgcggtcaagcaacgcttcgaggataaacgctatggtgagatcagccaggaggaagtgctgtcctatagccaactctgtgctgccttaggcgtaacacaggacagtccagatccgccaaccttcctatctaccggggaaatccacgccttcctgtcgagtccctccggccgccggacaaagcgcaagcgggaaaatagcttgcaggaagacagaggatccttcgtgactaccccaaccgctgagctttccagtcaggaggagaccctgctcggttctttcctagactggtctctggactgttgttctggatacgagggcgaccaggaaagcgagggggagaaggagggggatgtgacggcaccctcaggtattcttgacgtcactgtcgtttatcttaacccagagcagcattgctgtcaggagtcttctgacgaggaggcttgtccagaagataaagggccgcaagatccacaggcattagccctcgacactcaaatccccgctaccccaggccctaagccacttgttcggacctctcgggagcctgggaaggatgttactacttccgggtactccagcgtatccactgcctcaccaacttccagcgtggatggaggtctgggtgctctcccacagccaaccagtgtcctttccttggactcagacagccatacccagccgtgccaccaccaggcccggaaatcttgcctgcaatgccggcctcccagcccgcccgaatcctcagttccccaacaacaggtgaaaagaatcaatctctgtatccactcagaggaggaggacatgaatctgggactagtgcgtctgtag

SEQ ID NO: 120766 - DNA, 2361 bp, Artificial Sequence
  derived and/or modified sequence
atgggcagcggcggcgtggtgcactgccggtgcgccaagtgcttctgttaccctacaaagcgcagaattcggaggagaccaaggaaccttacaatcttatctctccccgaggacgtgcttttccacatccttaagtggctctctgtggaggacattcttgccgtgagggccgtgcactcccaactgaaggatctggttgacaaccatgcatccgtctgggcctgcgcttcgttccaagaactgtggcccagccctggcaatctcaagctgttcgagcgcgcagcggagaagggtaacttcgaagcagcggtaaagcttgggatagcatatctgtataatgaggggctcagtgtgtccgatgaggcacgcgccgaggtcaatggtttgaaggcttcccggtttttttccctggccgagcggttgaacgtaggtgccgctccttttatttggctgttcatcagacccccctggagcgtctctggaagctgttgcaaagcagtggtgcatgaatctctacgggcagagtgtcaactgcagagaacccataaggcctctattctgcactgtctgggcagggtcttatcactcttcgaggacgaggaaaagcagcaacaagcgcacgatctttttgaggaggctgcccaccaaggatgtctgacctcaagctacttactgtgggaatctgacaggcgtaccgatgtaagcgaccctggcagatgtctccattcattccgcaaactgagggactacgcagctaaaggttgctgggaggcccagttatccctggcaaaggcatgtgcgaatgctaaccaactgggtctggaagtgagggcgagcagcgaaattgtgtgtcagcttttccaggctagtcaggccgtgtcgaagcagcaagtgttctcggtccaaaaaggcctcaacgacaccatgagatatattctgatagattggctggtggaagtggccaccatgaaggatttcacaagtctgtgtctacatctcaccgtggagtgtgtcgatcggtacctcagacggcgcctcgtgccccgctataggcttcagttgttgggcattgcctgtatggtcatctgtacccgatttatttcaaaggagatcctgactatcagagaagccgtgtggctgacagataatacatacaagtacgaggatttggtgcgcatgatgggcgaaatcgtgagtgctttggagggcaaaattcgcgtcccgacagtggttgattacaaagaggtccttctaacccttgtacctgtggagttgcgaacccagcacttgtgcagttttctttgtgagctgagcctgttgcatacatcattgagtgcttacgccccagcccggctagcggccgcagccctcctgctggcaaggttgactcacggccaaacacagccatggacaacccagctgtgggaccttacaggattttcctacgaagacctgatcccctgtgttctctccttgcacaaaaagtgtttccacgacgatgccccaaaggactatcgccaggtgtccctgactgctgtcaaacagcggttcgaagacaaacgctacggcgaaatctctcaggaggaagtgctgtcgtatagtcaactgtgtgccgctctgggagtgacccaagactccccggacccccccacattcctgtccaccggggagatccacgccttcctgtcaagcccctcaggtagacgtacaaaacgaaagagggaaaattccctgcaggaggatcgcggttctttcgtcacaacacccaccgcggagttgtcaagtcaggaggagaccctgcttggttcttttctggactggagcctggactgctgcagcgggtatgagggagatcaagagtcggagggagaaaaggagggggacgtgacggccccgtccgggatcctggacgtgaccgtagtgtatctgaaccccgagcaacactgttgtcaggaaagctctgatgaagaagcatgcccagaagacaagggccctcaggatccacaggcactcgctttggacacccaaatccctgccactcccggtcctaagcctttggtcagaacctcgcgcgagccaggaaaagatgtgaccacttccggctatagcagtgttagcactgcgagccctactagttctgtagatggagggttaggcgctctacctcaacctacctccgtgctcagcctggattcagattcgcatacacagccctgccaccaccaggcaaggaaatcctgcctccagtgtagaccccctagtccacctgaaagcagtgtgccccagcagcaagtcaagcgcattaacctttgcattcactcagaagaagaagatatgaatctcggtttggtccgactctag

SEQ ID NO: 120767 - DNA, 2106 bp, Artificial Sequence
  derived and/or modified sequence
aggacttcatggccatccgaactcgccgctgaaaagggtaatttcgaagctgcagttaaactgggcattgcatatctgtacaacgagggcctcagcgtctctgatgaggcacgggcagaggtgaatggtctgaaagcatcccgtttcttctccctggcggagcgacttaatgtgggcgctgctcctttcatctggctcttcatcagacccccatggtcagtttccggctcttgctgtaaagcagtggtacacgaaagtcttagggctgaatgtcaattgcagcggacccacaaggctagcatactgcattgcctcgggcgagtgctgtccctgtttgaggatgaagaaaaacagcagcaggcccacgacttgtttgaggaggcggctcatcagggatgtctgacttcatcctaccttttgtgggaaagtgatcggaggactgatgtgtctgaccccggacgatgtctgcatagcttccgcaagctgcgagactacgctgctaagggctgttgggaagcccaactgtccctcgccaaggcctgcgccaatgcgaatcaattgggcctcgaagtgcgtgcctctagtgaaattgtgtgtcagctctttcaggcttcacaggcagtttcgaaacagcaggttttttcagtgcagaagggcctgaacgatacaatgagatacattctcattgactggttggttgaagttgctaccatgaaagacttcactagcctgtgtctgcacctcaccgttgagtgcgtggataggtatcttcgacggaggcttgttcctaggtatcgccttcagctgctgggcattgcgtgtatggttatctgtacgaggttcatctccaaggaaatcctcactatcagagaagcagtgtggctcacagataacacttataagtatgaggatctggtcaggatgatgggagaaattgtctcagctttagaggggaaaataagggtccccacagttgtggattataaggaagtcttattaaccctcgtccccgtcgagctgcgtacacagcatctgtgttcttttctttgcgagttgtccctcctgcatacatcactgtcagcatacgcccctgcgagactagcagcagctgctctgctcttagcacggcttacccacggacagacccagccgtggaccacacagctgtgggatcttaccgggtttagttacgaggacctgatcccatgcgtcctcagcttgcacaaaaagtgcttccacgacgacgcacccaaagactataggcaggtgtcactgacagcagttaaacagaggtttgaggataagagatacggggagatttcccaagaagaagtcctgagctacagtcaactgtgtgccgctctgggagtgacacaggactcgcccgaccctccaactttcctgtctactggagaaatacacgcttttctaagcagtcctagcggcaggagaacaaagcgaaagagggagaacagcctacaagaagatcgtggaagttttgtcactaccccgacagcggagctgtcaagccaggaggaaaccctcctcgggagcttcctggactggagtctggactgctgtagcggatacgaaggcgaccaggagtctgaaggcgagaaggaaggagacgtgaccgcgccatccggaatcctggatgtcaccgtggtctatctcaaccctgagcaacattgctgtcaggaatccagcgacgaggaggcctgcccagaagacaagggtccccaagacccacaggcccttgcactggatacacagatccccgctacccctggtcctaagcctctcgtcagaacgtcccgtgagccgggtaaagacgtaacgactagtggctattccagcgtgagcactgccagtccgacatcttcagttgacggaggtctgggggcacttccgcagccgacaagtgttttgtctcttgactcagattcccatacccagccctgtcaccaccaggccaggaagagctgccttcagtgtcgccctccctccccaccagaaagcagtgtgcctcagcaacaggtgaaacggattaacctgtgtatccattctgaggaggaagatatgaacctggggctcgttcgcctgtag

SEQ ID NO: 120768 - DNA, 2361 bp, Artificial Sequence
  derived and/or modified sequence
atgggctcagggggtgtggttcactgccgctgtgctaagtgtttctgctatccgacaaagaggaggatccgtaggcgaccaagaaacttgaccatcctctcattgccggaagatgtgctcttccatatccttaagtggctgtccgtcgaggacattcttgccgtacgggctgttcactcacagctgaaggatctcgtagataatcacgcgtcagtctgggcctgcgcaagttttcaggagttgtggcccagtcccggaaatctaaaattgttcgagcgtgcggcagagaagggcaacttcgaagcggcagtcaagctggggattgcctatctttacaacgaagggctatctgtgtctgatgaggccagggctgaggtgaacggcctgaaggcttcccgattcttctccctggccgaacggctgaacgtcggtgccgctccatttatctggttgttcatcaggccaccttggtccgtctcgggatcatgctgtaaagcagtcgtgcatgaatctctacgggcagagtgccaactgcagaggacgcacaaggcctcaattttacattgccttgggagagtactgtcactgtttgaagacgaagaaaagcagcagcaggcccatgatttgttcgaagaagccgctcaccaggggtgtttaacgtccagttatttactatgggagtccgacagacgaactgatgtctcagaccccggaaggtgcctccacagtttccgtaagctccgtgattacgcagccaagggctgttgggaggcgcaattgtcattggctaaagcctgtgccaatgctaaccagctcgggttggaggttcgggctagcagtgaaattgtttgccagttattccaggcctcccaggcagtgagcaaacagcaggtgttctccgtgcagaaaggcctgaatgatactatgagatatatcttaattgactggctggtggaggtggcaaccatgaaggacttcaccagcctgtgcctgcacctgactgttgagtgcgttgatcggtatctccgaagacgcctggtgcccagatatcgactgcagctactgggcatagcttgtatggtgatctgtacacgctttatctccaaggagatccttaccataagggaggccgtgtggttgaccgataacacgtacaagtacgaagacctggtgcggatgatgggagagatcgtatccgctctggaaggcaagattcgggtgcccaccgtggtagactacaaagaggtgctactgacactcgtgcctgtagaacttcggacccaacatctgtgctccttcttatgtgaactgtctttgcttcacacatctctgtcagcttacgctcccgctagattagccgcagccgcattgctgctggcacggcttacacatggccaaacccagccttggacaactcagctctgggatttaaccgggttctcctacgaggacctgatcccctgtgtactgtccctacataaaaaatgcttccatgacgatgctcctaaggattacagacaggtcagcctgactgccgttaagcaaaggtttgaggataagagatatggcgagatttcacaagaagaagtcttatcctattcccagttgtgtgctgccttgggcgttacacaggatagccctgaccccccaactttcctgtctacaggcgaaattcacgcttttctgagcagcccctccgggaggcgaacaaaaaggaagagagagaactccttgcaggaggaccgtggaagctttgtgaccactccaaccgccgagctgtccagtcaggaagagactttgctgggttcttttctagactggtccttggactgttgctccggctatgagggggatcaggaatctgagggtgaaaaagaaggggacgtaacggctcccagcgggatcctagatgtgaccgttgtatatctaaacccagaacagcactgctgtcaggaatccagcgatgaagaagcttgtccggaggacaagggccctcaggaccctcaagccctggccttggatactcagattcctgcaaccccgggtccaaagcctctggtccggacctcacgggagccgggtaaagatgtgacaacatcaggatattcctccgtgtccaccgcctctcctacaagttcagttgacgggggattgggggctttgccccagcctacctctgtgctgtccctagattctgactcccacacgcagccatgccaccaccaggccaggaaatcatgtctccaatgcagaccaccatcaccaccggaaagcagcgtaccgcagcagcaggttaagcgtatcaacctttgcatccattcagaagaagaagatatgaatttaggcttggtgagactttag

SEQ ID NO: 120769 - protein, 531 aa, Artificial Sequence
  derived and/or modified sequence
MAAVKTLNPKAEVARAQAALAVNISAARGLQDVLRTNLGPKGTMKMLVSGAGDIKLTKDGNVLLHEMQIQHPTASLIAKVATAQDDITGDGTTSNVLIIGELLKQADLYISEGLHPRIITEGFEAAKEKALQFLEEVKVSREMDRETLIDVARTSLRTKVHAELADVLTEAVVDSILAIKKQDEPIDLFMIEIMEMKHKSETDTSLIRGLVLDHGARHPDMKKRVEDAYILTCNVSLEYEKTEVNSGFFYKSAEEREKLVKAERKFIEDRVKKIIELKRKVCGDSDKGFVVINQKGIDPFSLDALSKEGIVALRRAKRRNMERLTLACGGVALNSFDDLSPDCLGHAGLVYEYTLGEEKFTFIEKCNNPRSVTLLIKGPNKHTLTQIKDAVRDGLRAVKNAIDDGCVVPGAGAVEVAMAEALIKHKPSVKGRAQLGVQAFADALLIIPKVLAQNSGFDLQETLVKIQAEHSESGQLVGVDLNTGEPMVAAEVGVWDNYCVKKQLLHSCTVIATNILLVDEIMRAGMSSLKG

SEQ ID NO: 120770 - protein, 389 aa, Artificial Sequence
  derived and/or modified sequence
MDRETLIDVARTSLRTKVHAELADVLTEAVVDSILAIKKQDEPIDLFMIEIMEMKHKSETDTSLIRGLVLDHGARHPDMKKRVEDAYILTCNVSLEYEKTEVNSGFFYKSAEEREKLVKAERKFIEDRVKKIIELKRKVCGDSDKGFVVINQKGIDPFSLDALSKEGIVALRRAKRRNMERLTLACGGVALNSFDDLSPDCLGHAGLVYEYTLGEEKFTFIEKCNNPRSVTLLIKGPNKHTLTQIKDAVRDGLRAVKNAIDDGCVVPGAGAVEVAMAEALIKHKPSVKGRAQLGVQAFADALLIIPKVLAQNSGFDLQETLVKIQAEHSESGQLVGVDLNTGEPMVAAEVGVWDNYCVKKQLLHSCTVIATNILLVDEIMRAGMSSLKG

SEQ ID NO: 120771 - protein, 500 aa, Artificial Sequence [sequence omitted]

SEQ ID NO: 120772 - DNA, 1503 bp, Artificial Sequence
  derived and/or modified sequence
atggccgccgtgaagaccctgaaccccaagggcaccatgaagatgctggtgagcggcgccggcgacatcaagctgaccaaggacggcaacgtgctgctgcacgagatgcagatccagcaccccaccgccagcctgatcgccaaggtggccaccgcccaggacgacatcaccggcgacggcaccaccagcaacgtgctgatcatcggcgagctgctgaagcaggccgacctgtacatcagcgagggcctgcaccccagaatcatcaccgagggcttcgaggccgccaaggagaaggccctgcagttcctggaggaggtgaaggtgagcagagagatggacagagagaccctgatcgacgtggccagaaccagcctgagaaccaaggtgcacgccgagctggccgacgtgctgaccgaggccgtggtggacagcatcctggccatcaagaagcaggacgagcccatcgacctgttcatgatcgagatcatggagatgaagcacaagagcgagaccgacaccagcctgatcagaggcctggtgctggaccacggcgccagacaccccgacatgaagaagagagtggaggacgcctacatcctgacctgcaacgtgagcctggagtacgagaagaccgaggtgaacagcggcttcttctacaagagcgccgaggagagagagaagctggtgaaggccgagagaaagttcatcgaggacagagtgaagaagatcatcgagctgaagagaaaggtgtgcggcgacagcgacaagggcttcgtggtgatcaaccagaagggcatcgaccccttcagcctggacgccctgagcaaggagggcatcgtggccctgagaagagccaagagaagaaacatggagagactgaccctggcctgcggcggcgtggccctgaacagcttcgacgacctgagccccgactgcctgggccacgccggcctggtgtacgagtacaccctgggcgaggagaagttcaccttcatcgagaagtgcaacaaccccagaagcgtgaccctgctgatcaagggccccaacaagcacaccctgacccagatcaaggacgccgtgagagacggcctgagagccgtgaagaacgccatcgacgacggctgcgtggtgcccggcgccggcgccgtggaggtggccatggccgaggccctgatcaagcacaagcccagcgtgaagggcagagcccagctgggcgtgcaggccttcgccgacgccctgctgatcatccccaaggtgctggcccagaacagcggcttcgacctgcaggagaccctggtgaagatccaggccgagcacagcgagagcggccagctggtgggcgtggacctgaacaccggcgagcccatggtggccgccgaggtgggcgtgtgggacaactactgcgtgaagaagcagctgctgcacagctgcaccgtgatcgccaccaacatcctgctggtggacgagatcatgagagccggcatgagcagcctgaagggctag

SEQ ID NO: 120773 - DNA, 1596 bp, Artificial Sequence
  derived and/or modified sequence
atggccgcagttaagacactgaatccaaaagcggaagtcgcgagggcacaagccgcacttgcagtaaacatttccgccgcccgggggctgcaggacgtgctccggaccaaccttggccctaaggggactatgaagatgctggtgtctggagctggcgacattaaactgacgaaagatggaaacgtccttttacatgaaatgcagattcagcatcccaccgcctccttgatcgccaaagttgctacagctcaggatgacatcacaggagacggaactaccagcaacgtactcattataggtgagttactgaagcaagctgacctgtatattagcgaagggctccaccccagaattatcacggagggttttgaagccgcaaaggaaaaagctctgcagttcctggaggaagtgaaagtttcccgggagatggaccgtgaaacacttatcgatgtagcacggacgtcccttcggacaaaggtgcacgcagaacttgccgatgtactgacagaagccgttgttgattcaattttggcgattaaaaagcaggatgaacctattgacctgttcatgatcgagataatggaaatgaaacacaagtcagaaacggatacttctctgatcagaggtctagttcttgaccatggtgcacggcaccctgatatgaaaaagcgcgtggaggatgcctacatccttacctgtaatgtgagccttgagtacgaaaagactgaggtcaacagcggcttcttttataaatcagctgaggagcgtgaaaaacttgttaaggccgagcggaaattcatcgaagatcgcgttaagaagattatcgaactgaagcgaaaggtctgtggggatagtgataagggctttgttgtcataaatcagaaaggaatcgatccgttctcactggatgctttatccaaggaaggtatcgtggccctcagaagggccaagcgtagaaacatggaacggctcaccctggcatgtggcggggtcgcattaaatagcttcgacgatctttcaccagactgtctaggccacgccggactggtatatgagtacaccctcggagaagagaaatttacctttatcgaaaagtgcaataaccccaggagtgtgactctcctgatcaaaggtccaaacaagcacacactcacacagataaaggatgcagtgcgagatgggctgagggcggtgaaaaacgccatcgacgatggctgcgtcgtgccaggcgcaggggctgtcgaggtcgcaatggccgaggccctaatcaagcacaaaccctcggttaagggcagagcccagcttggagttcaggccttcgcagacgctctgctgataatcccgaaagtgttggcacagaactcgggcttcgatctccaggagacactcgtcaaaatacaggccgagcacagcgagtccggccagctggtgggtgtcgatttgaatacaggggagccaatggtcgccgctgaggtgggggtttgggacaactactgcgtcaaaaaacagctgcttcacagttgcactgttattgccaccaacatcttattagtggatgagataatgcgagccggaatgtccagtctcaagggatag

SEQ ID NO: 120774 - DNA, 1503 bp, Artificial Sequence
  derived and/or modified sequence
atggcagccgtgaagaccttgaatcccaaagggactatgaagatgttagtgtcaggagctggtgacatcaagctgacaaaagatgggaatgtgctgctgcacgagatgcaaattcagcaccctaccgcttctctgatcgctaaagtggctactgcgcaggacgacatcaccggggatgggacaacctctaatgttcttattattggggagttattgaagcaggccgatctctacattagcgaagggctccacccccgaataattaccgagggcttcgaggcagccaaggagaaggcacttcaatttctggaagaagtcaaagtcagccgggaaatggacagggaaaccctcattgatgtagccaggacgtccctgcggactaaagtccacgctgagctggccgacgttctcaccgaagctgtagtggactcgatcctggcaatcaagaagcaggacgagccaatcgacctgttcatgattgaaataatggagatgaaacacaaatcagaaaccgacacaagtctgatcagggggctcgtgctagaccacggcgcaagacaccccgatatgaaaaagagggttgaagacgcctacattctaacatgcaatgtcagtttggagtatgaaaaaacagaagtgaactcagggttcttttataagtctgccgaggagcgagagaagctggtgaaggctgaacgcaagttcatcgaggatagggtgaagaaaataatcgagctgaaaagaaaggtgtgcggcgactcagataagggatttgtcgtgataaatcagaagggcatagatcctttctcactcgatgctctgtctaaggagggaatagtggccctgaggcgtgcaaagcggcggaatatggagcggctgacattagcttgcggaggcgtggcgcttaactccttcgacgacctcagccccgactgcctcggacatgctgggcttgtgtacgaatataccttgggtgaagagaaatttaccttcatcgagaagtgtaataatccccgctcggtcaccctcctgattaaagggcctaataagcataccttaacacagattaaagacgcagtacgggatggcctgcgagccgtcaagaacgccattgacgacgggtgcgtagtcccaggcgcaggcgctgtggaagtggctatggcagaagccctgatcaaacacaagccctccgtgaaaggccgggcacaacttggcgtccaagcttttgccgatgctttactcataatccccaaagtgttagctcagaatagtgggtttgacctgcaggagacactcgtgaagattcaagccgagcatagcgagagcgggcagctagtgggagtggacctgaatacaggcgagcctatggtggccgccgaagtcggcgtttgggataattactgcgtgaaaaagcagcttcttcacagctgcacagtgatcgcaacgaacattctgctggtcgacgaaatcatgagggcaggtatgagttcattgaaagggtag

SEQ ID NO: 120775 - DNA, 1596 bp, Artificial Sequence
  derived and/or modified sequence
atggctgctgtgaagaccctgaaccccaaggccgaggtggcccgggcccaggccgccctggccgtgaacatctctgctgcccggggcctgcaggatgtgctgcggaccaacctgggccccaagggcaccatgaagatgctggtgtctggagctggggacatcaagctgaccaaggatggaaatgtgctgctgcacgagatgcagatccagcaccccacagccagcctgattgccaaggtggccacagcccaggatgacatcactggagatggcaccaccagcaatgtgctgatcattggagagctgctgaagcaggccgacctgtacatcagcgagggcctgcacccccgcatcatcacagagggctttgaagctgccaaggagaaggccctgcagttcctggaggaggtgaaggtgtcccgggagatggaccgggagaccctgattgatgtggcccggaccagcctgcggaccaaggtgcacgccgagctggctgatgtgctgacagaagctgtggtggacagcatcctggccatcaagaagcaggatgagcccatcgacctcttcatgattgagatcatggagatgaagcacaagtcagaaacagacaccagcctcatccggggcctggtgctggaccacggggcccggcacccagacatgaagaagagggtggaggatgcctacatcctgacctgcaatgtgtccctggagtatgagaagacagaggtgaacagcggcttcttctacaagtctgctgaggagcgggagaagctggtgaaggccgagaggaagttcatcgaggacagagtgaagaagatcatcgagctgaagaggaaggtgtgtggggacagcgacaagggctttgtggtgatcaaccagaagggcatcgaccccttcagcctggatgccctgagcaaggagggcatcgtggccctgcggcgggccaagagaagaaacatggagcggctgaccctggcctgtggcggcgtggccctgaacagctttgatgacctgagcccagactgcctgggccatgctggcctggtgtatgagtacaccctgggggaggagaagttcaccttcatcgagaagtgcaacaaccccaggtctgtgaccctgctgatcaagggccccaacaagcacaccctgacccagatcaaggatgctgtgagagatggcctgcgggctgtgaagaatgccattgatgatggctgtgtggtgcctggagctggagctgtggaggtggccatggccgaggccctgatcaagcacaagcccagcgtgaagggccgggcccagctgggcgtgcaggcctttgctgatgccctgctgatcatccccaaggtgctggcccagaacagcggctttgacctgcaggagaccctggtgaagatccaggccgagcacagcgagagcggccagctggtgggcgtggacctgaacacaggagagcccatggtggccgctgaggtgggcgtgtgggacaactactgtgtgaagaagcagctgctgcacagctgcaccgtgattgccaccaacatcctgctggtggatgagatcatgagagctggcatgagcagcctgaagggctag

SEQ ID NO: 120776 - DNA, 1503 bp, Artificial Sequence
  derived and/or modified sequence
atggctgctgtgaagaccctgaaccccaagggcaccatgaagatgctggtgtctggggccggggacatcaagctgaccaaggatggaaatgtgctgctgcacgagatgcagatccagcaccccacagccagcctcatcgccaaggtggccacagcccaggatgacatcactggagatggcaccaccagcaatgtgctgatcatcggggagctgctgaagcaggccgacctgtacatcagcgagggcctgcacccccgcatcatcacagagggctttgaggccgccaaggagaaggccctgcagttcctggaggaggtgaaggtgtcccgggagatggaccgggagaccctgattgatgtggcccggaccagcctgcggaccaaggtgcatgctgagctggctgatgtgctgacagaggccgtggtggacagcatcctggccatcaagaagcaggatgagcccatcgacctcttcatgattgagatcatggagatgaagcacaagtcagaaacagacaccagcctcatccggggcctggtgctggaccatggagcccggcacccagacatgaagaagagggtggaggatgcctacatcctgacctgcaatgtgtccctggagtatgagaagacagaggtgaacagcggcttcttctacaagtctgctgaggagcgggagaagctggtgaaggccgagaggaagttcattgaagatagagtgaagaagatcatcgagctgaagaggaaggtgtgtggggacagcgacaagggctttgtggtgatcaaccagaagggcatcgaccccttcagcctggatgccctgagcaaggagggcatcgtggccctgcggcgggccaagagaagaaacatggagcggctgaccctggcctgtggcggcgtggccctgaacagctttgatgacctgagcccagactgcctgggccacgccggcctggtgtatgagtacaccctgggggaggagaagttcaccttcatcgagaagtgcaacaaccccaggtctgtgaccctgctgatcaagggccccaacaagcacaccctgacccagatcaaggatgctgtgagagatggcctgcgggctgtgaagaatgccattgatgatggctgtgtggtgcctggggccggggctgtggaggtggccatggccgaggccctgatcaagcacaagcccagcgtgaagggccgggcccagctgggcgtgcaggcctttgctgatgccctgctgatcatccccaaggtgctggcccagaacagcggctttgacctgcaggagaccctggtgaagatccaggccgagcacagcgagagcggccagctggtgggcgtggacctgaacacaggagagcccatggtggccgctgaggtgggcgtgtgggacaactactgtgtgaagaagcagctgctgcacagctgcaccgtcatcgccaccaacatcctgctggtggatgagatcatgagagctggcatgagcagcctgaagggctag

SEQ ID NO: 120777 - DNA, 1596 bp, Artificial Sequence
  derived and/or modified sequence
atggccgccgtgaagaccctgaaccccaaggccgaggtggcccgggctcaggccgcgctcgccgtcaacataagcgccgcaaggggactgcaagatgtactgcggacaaatctgggccctaaaggaaccatgaagatgttagtgagtggcgcgggcgatataaaactgacaaaagatgggaatgtgctgctccatgagatgcagatccagcaccctacagcctccctgattgccaaagtcgctacagcccaggatgatattacgggcgatggaacgacatccaacgtgctcatcatcggggagctcctcaagcaggccgacctttatatttctgagggactgcaccccagaatcatcacggaaggatttgaagccgccaaagagaaggcgctgcaattcctggaagaagtgaaggtgtctagggagatggatagggaaacgttgattgatgtagcccgcacatcactccgcactaaggtgcatgccgagctggccgacgttctaactgaggccgtcgtggacagcatactggcaatcaagaaacaagatgagcccatcgacttgttcatgattgagatcatggaaatgaaacacaagtctgagaccgataccagcttgattcgcggccttgtcttagaccatggagctcgacacccagatatgaagaagcgcgttgaggatgcgtacatcctgacgtgcaacgtctctctggagtatgaaaaaacagaggtgaatagtggattcttttataagagcgctgaagagcgtgagaaactcgtcaaggctgagagaaagtttatcgaagaccgcgttaaaaagatcatagaattgaagcgaaaagtctgcggggacagtgacaaggggtttgtggttattaatcagaaggggattgacccattttctcttgatgctttgtctaaggagggaattgtggcgctcaggagggccaagaggagaaacatggaacgactaactctagcatgcggaggggtggctctaaacagtttcgacgacctatcaccagattgcctggggcatgcgggactggtgtacgagtacactcttggggaggagaaattcacctttatcgagaagtgcaataacccacgatctgtcactcttttgatcaaagggcccaataagcatacgctgactcagatcaaagatgccgtgagggacggactgcgggccgtcaaaaatgctattgacgatggctgtgtggtgccaggggcgggagctgtcgaagttgcgatggctgaggcgttaatcaagcacaaaccaagcgttaaaggcagggcacagctgggagtccaggcctttgccgacgcgttgctcattatccccaaagtgttagcccagaacagcggctttgatctccaggagacactcgtgaagatccaggccgaacacagtgaaagcgggcagctggtgggggttgatctgaatacgggcgaaccgatggtggccgcagaggtgggcgtttgggataattattgtgtcaagaaacagctattgcactcgtgcactgtgatagctacaaacattttgttggttgacgaaatcatgcgcgcaggcatgtcaagcctcaaaggctag

SEQ ID NO: 120778 - DNA, 1503 bp, Artificial Sequence
  derived and/or modified sequence
atggccgccgtgaagaccctgaaccccaagggcaccatgaagatgctggtcagtggggctggcgacattaaactcaccaaggacggaaacgtgttgctgcacgaaatgcagatccaacatcccaccgctagcttgattgcgaaggtggctaccgctcaggacgacataacaggagacggtactacctccaatgttctgattatcggggagctgctcaaacaggcagatctgtatatcagtgaaggcctacacccacggattattacagaggggtttgaggctgcaaaggaaaaagcgttgcagtttctggaggaggtcaaagtgagccgcgagatggaccgggagaccttgatcgatgtcgctaggacttcactgcggacgaaagtgcacgcagagttagccgacgtgcttactgaggccgtcgtcgattctatcttagcaatcaagaaacaggatgagccaattgatttatttatgattgagatcatggaaatgaaacacaagtctgaaacagatacatcactgatccggggcctggtcctggaccacggagccagacaccccgatatgaaaaagagagtggaagatgcttatattctgacctgcaatgtctccctggagtatgagaagactgaagtgaattcagggtttttctataaaagcgcggaggagagagaaaagctggtcaaggccgagcgcaagttcatcgaagacagggtgaagaaaatcatcgaactgaagagaaaggtttgcggcgattcggataaaggctttgtggtgattaaccaaaaaggaatcgatccattctccctggacgctctgagcaaggagggtatcgtggctctacgacgcgccaagagaaggaatatggagaggctcacgctagcctgtggtggcgtcgcgttaaattcatttgacgacctgagccctgactgtttgggccatgccggcctcgtctacgaatatacactcggagaggagaagtttactttcatcgagaaatgtaataacccacgctcagtcacccttctcatcaaagggccaaataagcatactctgacacagataaaggacgcggtgagggacgggctgcgcgccgtgaagaacgctatcgacgatggttgcgtcgtaccgggtgccggtgccgttgaagtcgcaatggcagaggcgctgatcaagcacaaaccctccgtgaaggggcgggctcagcttggggtccaggcttttgctgacgcactgcttatcattccaaaagtactggcccaaaactctggattcgacttgcaagagacattagtgaagattcaagccgaacattcagaaagtggccagctggtcggcgtcgatctgaacactggggagccaatggttgccgccgaagtaggggtttgggataattactgcgttaagaagcaactgcttcactcctgcaccgtcatcgccactaacattctcctcgtcgatgaaattatgcgggctggcatgagttcgctcaaggggtag

SEQ ID NO: 120779 - DNA, 1596 bp, Artificial Sequence
  derived and/or modified sequence
atggccgctgtaaaaacactgaatccgaaagcagaagtcgccagagctcaggctgccctagccgtcaacatcagcgccgctaggggactgcaggacgtgctgcggaccaatctggggccaaaagggactatgaagatgctggtgtccggcgcaggcgatattaagctcacgaaggacggcaatgtcctcttgcacgaaatgcaaattcagcacccaacggcgagcttgatagctaaggtggccacagcccaggacgatatcaccggggatgggacaacttccaacgtgctgatcataggcgaactgttaaagcaggctgacctgtacatctctgaggggttgcatccaagaatcatcacggaaggattcgaagctgccaaggagaaagcacttcaattcttagaggaggtaaaggtatcgcgcgagatggatcgcgaaactttgattgatgtagcccgaacctccttgcggacaaaggtgcatgctgaacttgcagacgtccttacagaagctgttgtcgacagcattctggccatcaaaaaacaggacgagccgatcgatctgtttatgatcgaaataatggagatgaaacataaatccgaaactgacacctcgttaataagaggcctggtgctcgaccacggggctcgccacccagacatgaagaagcgggtggaggatgcctacatccttacatgtaatgtgtctcttgagtacgaaaagactgaagtgaacagcgggttcttctacaagagcgctgaggagagggagaagctagtgaaagccgaaagaaagtttatcgaagatcgagtgaagaagataatcgaactgaaacgcaaagtgtgcggcgactcagataaaggatttgtggtgatcaatcagaagggcatcgacccctttagcctggatgctctatccaaggagggcatcgttgcgctgcgcagagccaagagaaggaacatggaacggctaacacttgcctgtggaggcgtggctctcaactcctttgacgacctgtcgcccgactgtcttggccatgcaggtctggtgtacgagtatacactaggcgaggagaagtttacatttatcgaaaaatgcaataatcctaggtccgttacgttgttgattaaggggcctaataaacacactttaacccagattaaagacgccgttcgggatggcctgagggctgtgaagaacgccattgacgacggatgtgtagttccgggagccggagccgtagaggttgcgatggcagaagcccttataaagcataagccctccgtcaaaggtcgggctcagttaggggttcaggccttcgccgacgcactgctgatcattcctaaggtcctagcacagaactctggttttgatcttcaggaaacgttggtcaaaattcaggccgaacattcggagtccggccagctcgtgggggtggacctcaatactggcgagcctatggttgccgctgaggttggcgtgtgggacaactattgtgtcaagaagcaactcctgcatagctgcactgtgattgccaccaacattctgctcgtggatgagatcatgcgggctggtatgagcagcctgaagggttag

SEQ ID NO: 120780 - DNA, 1503 bp, Artificial Sequence
  derived and/or modified sequence
atggccgcagtgaagaccctaaatcccaaagggacaatgaagatgctcgtcagcggggctggcgatattaagctcaccaaagatggtaatgtgctgctacacgagatgcagatccagcatcctaccgctagtctaatcgctaaagtcgctacagctcaggacgacatcaccggagacggaacaacctcaaacgtcctaattataggcgaattgttgaaacaagcagacctttacattagtgagggcctgcacccacgtataattactgaggggtttgaagcagcaaaagagaaagcgctccagtttctcgaggaggtgaaggtgagtcgggagatggatcgagaaacactgatcgacgtggcccgtacatccttaagaacaaaggtgcacgcagagttggccgatgtattaacagaagcggtcgtggattccatacttgcgatcaagaagcaagacgagccaattgacctgtttatgatcgaaatcatggagatgaagcataagagcgagacagacacatctctgattcgaggactcgttcttgaccacggggcacgccatccagacatgaagaaaagagtcgaggatgcctatatactcacctgcaatgtgagtttggagtacgagaagactgaggtcaattctggcttcttctataaatcagcagaagagcgggagaaactggttaaggcagaacgcaaatttattgaggatcgagtaaagaagattatagagttgaagcgcaaagtgtgtggggacagtgataaaggatttgtggtgataaaccagaagggcattgatcctttctctctggatgctctgtctaaagaggggatagtggcactccgcagagcaaaacgcaggaatatggagaggcttaccctcgcatgtggcggagtggcacttaacagctttgacgacctctctccagactgcctgggacatgctggtctcgtgtatgagtacacattgggagaagagaagtttaccttcatcgaaaaatgtaacaatccaagatcagtgacactgctgataaagggccctaataaacacacactaacacagattaaagacgctgtccgcgacggtctcagggcagtgaagaatgccattgacgacggctgtgttgttccaggagccggagctgtggaagtcgctatggcagaggctctcataaaacacaagccctccgtcaagggtcgggcacagctgggagtccaggccttcgccgatgctctgttaatcatccccaaagtgctagcccagaactctgggttcgatctgcaagagaccctggtgaagatccaagccgaacactcggaaagtggccagctagtcggagtcgacctgaacactggagaacccatggtagcggcagaagttggcgtttgggataactactgcgtgaagaaacagctgcttcactcatgtacagtgatcgcaacaaatatccttcttgtcgatgagatcatgcgagcagggatgtctagcctgaaggggtag

SEQ ID NO: 120781 - DNA, 1590 bp, Artificial Sequence
  derived and/or modified sequence
actcagcatcgtttccttttcctccgctggagcagctatggcggcggtgaagaccctgaaccccaacagcttccttaatagcaaaggtagcaacagcccaggatgatataactggtgatggtacgacttctaatgtcctaatcattggagagctgctgaaacaggcggatctctacatttctgaaggccttcatcctagaataatcactgaaggatttgaagctgcaaaggaaaaggcccttcagtttttggaagaagtcaaagtaagcagagagatggacagggaaacacttatagatgtggccagaacatctcttcgtactaaagttcatgctgaacttgcagatgtcttaacagaggctgtagtggactccattttggccattaaaaagcaagatgaacctattgatctcttcatgattgagatcatggagatgaaacataaatctgaaactgatacaagcttaatcagagggcttgttttggaccacggagcacggcatcctgatatgaagaaaagggtggaggatgcatacatcctcacttgtaacgtgtcattagagtatgagaaaacagaagtgaattctggctttttttacaagagtgcagaagagagagaaaaactcgtgaaagctgaaagaaaattcattgaagatagggttaaaaaaataatagaactgaaaaggaaagtctgtggcgattcagataaaggatttgttgttattaatcaaaagggaattgaccccttttccttagatgctctttcaaaagaaggcatagttgctctgcgcagagctaaaaggagaaatatggagaggctgactcttgcttgtggtggggtagccctgaattcttttgacgacctaagtcctgactgcttgggacatgcaggacttgtatatgagtatacattgggagaagagaagtttacctttattgagaaatgtaacaaccctcgttctgtcacattattgatcaaaggaccaaataagcacacactcactcagatcaaagatgcagtgagggacggcttgagggctgtcaaaaatgctattgatgatggctgtgtggttccaggtgctggtgccgtggaagtggcaatggcagaagccctgattaaacataagcccagtgtaaagggcagggcacagcttggagtccaagcatttgctgatgcattgctcattattcccaaggttcttgctcagaactctggttttgaccttcaggaaacattagttaaaattcaagcagaacattcagaatcaggtcagcttgtgggtgtggacctgaacacaggtgagccaatggtggcagcagaagtaggcgtatgggataactattgtgtaaagaaacagcttcttcactcctgcactgtgattgccaccaacattctcttggttgatgagatcatgcgagctggaatgtcttctctgaaaggttgaattgaagcttcctctgtatctgaatcttgaagactgcaaagtgatcctgaggattacagctgtggaatttttgtccaagcttcaaataattttgaaagaaattttcccatatgaaaaaaggagagaacactggcatctgttgaaa

SEQ ID NO: 120782 - DNA, 1894 bp, Artificial Sequence
  derived and/or modified sequence
ggatagttcctcccggccacgccgcgccggctctgggcactcagcatcgtttccttttcctccgctggagcagctatggcggcggtgaagaccctgaaccccaagggcaccatgaagatgctcgtttctggcgctggagacatcaaacttactaaagacggcaatgtgctgcttcacgaaatgcaaattcaacacccaacagcttccttaatagcaaaggtagcaacagcccaggatgatataactggtgatggtacgacttctaatgtcctaatcattggagagctgctgaaacaggcggatctctacatttctgaaggccttcatcctagaataatcactgaaggatttgaagctgcaaaggaaaaggcccttcagtttttggaagaagtcaaagtaagcagagagatggacagggaaacacttatagatgtggccagaacatctcttcgtactaaagttcatgctgaacttgcagatgtcttaacagaggctgtagtggactccattttggccattaaaaagcaagatgaacctattgatctcttcatgattgagatcatggagatgaaacataaatctgaaactgatacaagcttaatcagagggcttgttttggaccacggagcacggcatcctgatatgaagaaaagggtggaggatgcatacatcctcacttgtaacgtgtcattagagtatgagaaaacagaagtgaattctggctttttttacaagagtgcagaagagagagaaaaactcgtgaaagctgaaagaaaattcattgaagatagggttaaaaaaataatagaactgaaaaggaaagtctgtggcgattcagataaaggatttgttgttattaatcaaaagggaattgaccccttttccttagatgctctttcaaaagaaggcatagttgctctgcgcagagctaaaaggagaaatatggagaggctgactcttgcttgtggtggggtagccctgaattcttttgacgacctaagtcctgactgcttgggacatgcaggacttgtatatgagtatacattgggagaagagaagtttacctttattgagaaatgtaacaaccctcgttctgtcacattattgatcaaaggaccaaataagcacacactcactcagatcaaagatgcagtgagggacggcttgagggctgtcaaaaatgctattgatgatggctgtgtggttccaggtgctggtgccgtggaagtggcaatggcagaagccctgattaaacataagcccagtgtaaagggcagggcacagcttggagtccaagcatttgctgatgcattgctcattattcccaaggttcttgctcagaactctggttttgaccttcaggaaacattagttaaaattcaagcagaacattcagaatcaggtcagcttgtgggtgtggacctgaacacaggtgagccaatggtggcagcagaagtaggcgtatgggataactattgtgtaaagaaacagcttcttcactcctgcactgtgattgccaccaacattctcttggttgatgagatcatgcgagctggaatgtcttctctgaaaggttgaattgaagcttcctctgtatctgaatcttgaagactgcaaagtgatcctgaggattacagctgtggaatttttgtccaagcttcaaataattttgaaagaaattttcccatatgaaaaaaggagagaacactggcatctgttgaaatttggaagttctgaaattatagtatttttaaaaattgcactgaagtgtatacacataaagcaggtcttttatccagtgaacaggatgttttgctttagcagcagtgacataaaattccatgttagataagcatatgttacttaccttgttattaaatatttcttgaaaagc

SEQ ID NO: 120783 - DNA, 2719 bp, Artificial Sequence
  derived and/or modified sequence
caaggccgaggcgcgaagggtgggaccgcaggagccgtgcagccgcggaccaatgagcgggcgccggacgacctgtggcccaatggcggcggcgcgcgggcacgctgggggccggccagacgggccgacttttccagaagacccggatagttcctcccggccacgccgcgccggctctgggcactcagcatcgtttccttttcctccgctggagcagctatggcggcggtgaagaccctgaaccccaaggccgaggtggcccgagcgcaggcggcgctggcggtcaacatcagcgcagcgcggggtctgcaggacgtgctaaggaccaacctggggcccaagggcaccatgaagatgctcgtttctggcgctggagacatcaaacttactaaagacggcaatgtgctgcttcacgaaatgcaaattcaacacccaacagcttccttaatagcaaaggtagcaacagcccaggatgatataactggtgatggtacgacttctaatgtcctaatcattggagagctgctgaaacaggcggatctctacatttctgaaggccttcatcctagaataatcactgaaggatttgaagctgcaaaggaaaaggcccttcagtttttggaagaagtcaaagtaagcagagagatggacagggaaacacttatagatgtggccagaacatctcttcgtactaaagttcatgctgaacttgcagatgtcttaacagaggctgtagtggactccattttggccattaaaaagcaagatgaacctattgatctcttcatgattgagatcatggagatgaaacataaatctgaaactgatacaagcttaatcagagggcttgttttggaccacggagcacggcatcctgatatgaagaaaagggtggaggatgcatacatcctcacttgtaacgtgtcattagagtatgagaaaacagaagtgaattctggctttttttacaagagtgcagaagagagagaaaaactcgtgaaagctgaaagaaaattcattgaagatagggttaaaaaaataatagaactgaaaaggaaagtctgtggcgattcagataaaggatttgttgttattaatcaaaagggaattgaccccttttccttagatgctctttcaaaagaaggcatagttgctctgcgcagagctaaaaggagaaatatggagaggctgactcttgcttgtggtggggtagccctgaattcttttgacgacctaagtcctgactgcttgggacatgcaggacttgtatatgagtatacattgggagaagagaagtttacctttattgagaaatgtaacaaccctcgttctgtcacattattgatcaaaggaccaaataagcacacactcactcagatcaaagatgcagtgagggacggcttgagggctgtcaaaaatgctattgatgatggctgtgtggttccaggtgctggtgccgtggaagtggcaatggcagaagccctgattaaacataagcccagtgtaaagggcagggcacagcttggagtccaagcatttgctgatgcattgctcattattcccaaggttcttgctcagaactctggttttgaccttcaggaaacattagttaaaattcaagcagaacattcagaatcaggtcagcttgtgggtgtggacctgaacacaggtgagccaatggtggcagcagaagtaggcgtatgggataactattgtgtaaagaaacagcttcttcactcctgcactgtgattgccaccaacattctcttggttgatgagatcatgcgagctggaatgtcttctctgaaaggttgaattgaagcttcctctgtatctgaatcttgaagactgcaaagtgatcctgaggattacagctgtggaatttttgtccaagcttcaaataattttgaaagaaattttcccatatgaaaaaaggagagaacactggcatctgttgaaatttggaagttctgaaattatagtatttttaaaaattgcactgaagtgtatacacataaagcaggtcttttatccagtgaacaggatgttttgctttagcagcagtgacataaaattccatgttagataagcatatgttacttaccttgttattaaatatttcttgaaaagcaaattttaatggtttaattttatgtggacgtatgttaaattatccaactaccctattgttaagcatttggttttaaaatttttatgctaatataaatgctcaagtaatttaaaatattgaaagcatccctgttggtataaatttctgagtaaatgcattggatcagttggactttgaacgcctttgaaatggctttgctaaaatgctcccgccacaaagttgtaggaaatgggaagaggagtcaactagaggcaagggagttgagagagctgcaactgtaaagggcaagaacaggcagaggtaaaaagatgatggaaggtgtggtgactaagggccacggttattgggtgaaatttgagattgtaggccaactgtattttcaagcttctgaacttaggcaaaatattcatcgcaaagtctctagcgtcatatttttctcacccaaattacgtttccacgagattatttatatatagttggtctatctctgcagtccttgaaggtgaagttgtgtgttactaggctgtgttttgggatgtcagcagtggcctgaagtgagttgtgcaataaatgttaagttgaaacctc

SEQ ID NO: 120784 - DNA, 1596 bp, Artificial Sequence
  derived and/or modified sequence
atggccgccgtgaagaccctgaaccccaaggccgaggtggccagagcccaggccgccctggccgtgaacatcagcgccgccagaggcctgcaggacgtgctgagaaccaacctgggccccaagggcaccatgaagatgctggtgagcggcgccggcgacatcaagctgaccaaggacggcaacgtgctgctgcacgagatgcagatccagcaccccaccgccagcctgatcgccaaggtggccaccgcccaggacgacatcaccggcgacggcaccaccagcaacgtgctgatcatcggcgagctgctgaagcaggccgacctgtacatcagcgagggcctgcaccccagaatcatcaccgagggcttcgaggccgccaaggagaaggccctgcagttcctggaggaggtgaaggtgagcagagagatggacagagagaccctgatcgacgtggccagaaccagcctgagaaccaaggtgcacgccgagctggccgacgtgctgaccgaggccgtggtggacagcatcctggccatcaagaagcaggacgagcccatcgacctgttcatgatcgagatcatggagatgaagcacaagagcgagaccgacaccagcctgatcagaggcctggtgctggaccacggcgccagacaccccgacatgaagaagagagtggaggacgcctacatcctgacctgcaacgtgagcctggagtacgagaagaccgaggtgaacagcggcttcttctacaagagcgccgaggagagagagaagctggtgaaggccgagagaaagttcatcgaggacagagtgaagaagatcatcgagctgaagagaaaggtgtgcggcgacagcgacaagggcttcgtggtgatcaaccagaagggcatcgaccccttcagcctggacgccctgagcaaggagggcatcgtggccctgagaagagccaagagaagaaacatggagagactgaccctggcctgcggcggcgtggccctgaacagcttcgacgacctgagccccgactgcctgggccacgccggcctggtgtacgagtacaccctgggcgaggagaagttcaccttcatcgagaagtgcaacaaccccagaagcgtgaccctgctgatcaagggccccaacaagcacaccctgacccagatcaaggacgccgtgagagacggcctgagagccgtgaagaacgccatcgacgacggctgcgtggtgcccggcgccggcgccgtggaggtggccatggccgaggccctgatcaagcacaagcccagcgtgaagggcagagcccagctgggcgtgcaggccttcgccgacgccctgctgatcatccccaaggtgctggcccagaacagcggcttcgacctgcaggagaccctggtgaagatccaggccgagcacagcgagagcggccagctggtgggcgtggacctgaacaccggcgagcccatggtggccgccgaggtgggcgtgtgggacaactactgcgtgaagaagcagctgctgcacagctgcaccgtgatcgccaccaacatcctgctggtggacgagatcatgagagccggcatgagcagcctgaagggctag

SEQ ID NO: 120785 - protein, 327 aa, Artificial Sequence
  derived and/or modified sequence
MLFLLLPLLAVLPGDGNADGLKEPLSFHVTWIASFYNHSWKQNLVSGWLSDLQTHTWDSNSSTIVFLCPWSRGNFSNEEWKELETLFRIRTIRSFEGIRRYAHELQFEYPFEIQVTGGCELHSGKVSGSFLQLAYQGSDFVSFQNNSWLPYPVAGNMAKHFCKVLNQNQHENDITHNLLSDTCPRFILGLLDAGKAHLQRQVKPEAWLSHGPSPGPGHLQLVCHVSGFYPKPVWVMWMRGEQEQQGTQRGDILPSADGTWYLRATLEVAAGEAADLSCRVKHSSLEGQDIVLYWEHHSSVGFIILAVIVPLLLLIGLALWFRKRCFC

SEQ ID NO: 120786 - DNA, 984 bp, Artificial Sequence
  derived and/or modified sequence
atgctgttcttgctgctgcctcttctggccgtgctcccaggagacggcaatgcagacggactgaaagaaccactctccttccatgtgacctggatcgcatccttttataatcattcatggaagcagaacttggtgagcggctggttgagcgacctgcagacgcacacgtgggactcaaattcctctacaattgtctttctgtgcccttggtctcgaggaaacttttctaacgaggaatggaaggagctggaaacgttattccgaatacgcacaatccggtcctttgaggggattaggcggtacgcccacgaactgcagttcgagtacccttttgaaattcaagtcaccggtggctgcgagctccattccggcaaggtgagtggatcatttctccagctggcttatcaggggtctgactttgtgtccttccagaataatagctggctcccctatccagtggctggcaatatggccaaacatttctgtaaagttctaaatcagaaccagcacgaaaatgacatcacacacaacctgctgtccgacacgtgtcctcgttttatcttgggtctcctggatgcgggcaaagcccacctccagcgtcaggtgaaaccggaagcatggctttcacacggtccatcacctggccccgggcatctgcagttggtgtgtcacgtgagcggcttctacccaaaacctgtgtgggtgatgtggatgaggggagaacaggaacaacagggcacccaacgcggggatatattgccgagtgccgacggcacctggtacctacgagctacacttgaggtggccgccggcgaggccgctgacctatcctgcagggttaaacactcttcactggagggccaggatatagtcctttattgggagcaccattcttccgtaggcttcattatcctagctgttatagttcctctgctcctgctgattgggctggccctctggttccgtaaaagatgcttttgctag

SEQ ID NO: 120787 - DNA, 984 bp, Artificial Sequence
  derived and/or modified sequence
atgctgttcctgctgctgcccctgctggccgtgctgcctggagatggaaatgctgatggcctgaaggagcccctgtccttccacgtgacctggatcgccagcttctacaaccacagctggaagcagaacctggtgtctggctggctgagtgacctgcagacccacacctgggacagcaacagcagcaccatcgtgttcctgtgcccctggagccggggcaacttcagcaatgaggagtggaaggagctggagaccctcttccgcatccgcaccatccgcagctttgagggcatcagaagatatgcccacgagctgcagtttgagtacccctttgagatccaggtgactggaggctgtgagctgcacagcggcaaggtgtctggcagcttcctgcagctggcctaccagggcagtgactttgtgtccttccagaacaacagctggctgccctaccctgtggccggcaacatggccaagcacttctgcaaggtgctgaaccagaaccagcatgaaaatgacatcacccacaacctgctgagtgacacctgcccccgcttcatcctgggcctgctggatgctgggaaggcccacctgcagaggcaggtgaagccagaggcctggctgagccacggccccagccctggccctggccacctgcagctggtgtgccacgtgtctggcttctaccccaagcctgtgtgggtgatgtggatgagaggagagcaggagcagcagggcacccagagaggagacatcctgcccagcgcagatggcacctggtacctgcgggccaccctggaggtggccgccggggaggccgctgacctgagctgccgggtgaagcacagcagcctggagggccaggacatcgtgctgtactgggagcaccacagctctgtgggcttcatcatcctggccgtcatcgtgcccctgctgctgctgattggcctggccctgtggttcaggaagcgctgcttctgctag

SEQ ID NO: 120788 - DNA, 984 bp, Artificial Sequence
  derived and/or modified sequence
atgctgttcctgctgctgcccctgctggccgtgctgcccggcgacgggaacgccgacgggcttaaggaacccctgtcatttcacgttacctggattgcttctttctacaatcatagctggaagcagaacctcgtatcagggtggctgtctgacctgcagacacatacctgggactcaaattcttctacgattgtgtttttgtgtccttggagtagaggtaattttagtaacgaggagtggaaagaactcgagaccctgtttcgcattcggaccataagaagctttgaaggtatcagaagatatgcgcacgaactacagttcgagtacccattcgaaatccaggtgacaggtggctgtgagttacattccggaaaagtgtccggaagctttctgcagctggcataccagggctccgatttcgttagttttcaaaataattcttggctcccataccccgtcgccggcaacatggccaagcacttctgtaaggtgctgaaccagaatcagcatgagaatgatattacgcacaatctcctgagtgatacatgcccacggtttattctgggactcctcgacgccgggaaagcacatttgcagcgccaagtgaagccagaagcgtggttgtcgcacggtccgagcccagggcccggtcacctgcagctggtttgccacgtctcgggtttctatcccaaacccgtgtgggtcatgtggatgaggggcgaacaggaacaacagggcacccagaggggcgatatcctcccctccgcagatggcacgtggtatctgcgcgccaccctggaggtagcagcaggtgaggctgctgacctgtcatgccgagtcaaacactccagcctggaaggccaagacatcgtcctttactgggagcatcattcgagtgtgggtttcattattctcgctgtgattgtgcctctgctgttgctgatcggactggctctgtggttccgaaagaggtgtttttgctag

SEQ ID NO: 120789 - DNA, 984 bp, Artificial Sequence
  derived and/or modified sequence
atgctctttctgctgttgcctctgctcgctgtccttccaggagacggcaatgctgatggcctgaaggagcccctgtctttccacgtgacatggatcgccagtttttacaatcactcctggaaacagaaccttgtgtcaggatggctcagcgacttacagacccacacatgggattcaaattcgtccacaatagtcttcctctgtccatggagccgcggaaacttttcaaacgaggaatggaaagagttagagacgctcttcagaattcgcaccatacgctctttcgagggaattcgacggtatgctcatgagcttcagtttgagtatcccttcgagattcaggtgactggtgggtgcgaactccattctggcaaggtgtctgggagcttcctgcagttggcctatcagggtagtgattttgtctcattccagaataatagctggctgccctatccagtcgctggcaatatggctaagcacttttgcaaggtgctaaatcaaaatcagcatgaaaacgacataacccacaacttgctctctgatacttgtcccagattcatcttggggctgctggatgccggaaaggcccacctacaaagacaggttaaacccgaagcttggctgtcccacgggccatcgcccggaccgggacacctgcaactagtttgtcatgtcagcggattttatcccaagccagtatgggtgatgtggatgaggggcgaacaagaacagcaaggcacacagcgtggggacatcctcccctccgccgacggaacttggtacctccgggctaccctcgaggtcgcagctggagaggctgctgatctgtcatgtcgggttaagcacagcagcctggaagggcaagatatcgtcttatactgggaacaccactcttcagtaggattcataatactcgcggtgatcgttcccctactgctgcttattggcttggccttatggttccggaagcgctgcttttgttag

SEQ ID NO: 120790 - DNA, 2096 bp, Artificial Sequence
  derived and/or modified sequence
gggcagtcgtaggagactctgaaaaagcaaataaatcaatgttaaatcagaaatgtgaatgtagtaaggggctgaagagacaggggaagagaatacatgggaaaatattgaaaaggacagagtgatcaaaaagagcagggacatgggagcattgggcagcacactgggagccatttcactttatgctcttattgtatgattgagaaaaaaatgtccttagtggttaagtggcttttcaatgccacatcagacttgttccatagcagttgaattaggggaaggtgaataagttggaggttggtgacaaggagagaagctggaacagagaggagagtcagaaccagagggaaatgagagactgagtaggcatctcagggtttttgaaggagtggattttctttgttgcagtcaggggaggtttgtctgttggctgcagaaagaagtcagaatagagatatcgtggggtaggtttgtttggaacagaaatcaaagaccaatttttctgagagaaggaaataacatctgcaaatgatatgctgtttttgctacttccattgttagctgttctcccaggtgatggcaatgcagacgggctcaaggagcctctctccttccatgtcacctggatcgcatccttttacaaccattcctggaaacaaaatctggtctcaggttggctgagtgatttgcagactcatacctgggacagcaattccagcaccatcgttttcctgtgcccctggtccaggggaaacttcagcaatgaggagtggaaggaactggaaacattattccgtatacgcaccattcggtcatttgagggaattcgtagatacgcccatgaattgcagtttgaatatccttttgagatacaggtgacaggaggctgtgagctgcactctggaaaggtctcaggaagcttcttgcagttagcttatcaaggatcagactttgtgagcttccagaacaattcatggttgccatatccagtggctgggaatatggccaagcatttctgcaaagtgctcaatcagaatcagcatgaaaatgacataacacacaatcttctcagtgacacctgcccacgtttcatcttgggtcttcttgatgcaggaaaggcacatctccagcggcaagtgaagcccgaggcctggctgtcccatggccccagtcctggccctggccatctgcagcttgtgtgccatgtctcaggattctacccaaagcccgtgtgggtgatgtggatgcggggtgagcaggagcagcagggcactcagcgaggggacatcttgcccagtgctgatgggacatggtatctccgcgcaaccctggaggtggccgctggggaggcagctgacctgtcctgtcgggtgaagcacagcagtctagagggccaggacatcgtcctctactgggagcatcacagttccgtgggcttcatcatcttggcggtgatagtgcctttacttcttctgataggtcttgcgctttggttcaggaaacgctgtttctgttaagacacaccatgagcctcctcgtcacccttctccttttggggtgagagaccagcagcccaagggctccagacacacctgaacacatcgtgatgatgacgtcctctcaactctctttgtaaaaattttgttatttttgcttgtttctgattaatgattgtttgtcaatataagctcaatttaattttgcaggatttgttgttctgacctgggttctgggacttttaaattcaaattttatctccagatggaatggggtcctagcaacctccacatgttcaactattaatggatcatcaggcctgttttagatatcccttactccagagggccttccctgacttacaagtgggaagcagtctcttcctggtctgaactcccgccacattttagccgtactttgctaactgtgctcctcacttcctcttcttcattgcagttatttagatcccccctttccttctaatttttcagctccttcaatgcaaagtacatgtatttttaatatatgcatccctggtgaaggatcttgcctgcatgaaacatgttctcaataaaactctgtgttgaatttatgccaaa

SEQ ID NO: 120791 - DNA, 984 bp, Artificial Sequence
  derived and/or modified sequence
atgctgttcctgctgctgcccctgctggccgtgctgcccggcgacggcaacgccgacggcctgaaggagcccctgagcttccacgtgacctggatcgccagcttctacaaccacagctggaagcagaacctggtgagcggctggctgagcgacctgcagacccacacctgggacagcaacagcagcaccatcgtgttcctgtgcccctggagcagaggcaacttcagcaacgaggagtggaaggagctggagaccctgttcagaatcagaaccatcagaagcttcgagggcatcagaagatacgcccacgagctgcagttcgagtaccccttcgagatccaggtgaccggcggctgcgagctgcacagcggcaaggtgagcggcagcttcctgcagctggcctaccagggcagcgacttcgtgagcttccagaacaacagctggctgccctaccccgtggccggcaacatggccaagcacttctgcaaggtgctgaaccagaaccagcacgagaacgacatcacccacaacctgctgagcgacacctgccccagattcatcctgggcctgctggacgccggcaaggcccacctgcagagacaggtgaagcccgaggcctggctgagccacggccccagccccggccccggccacctgcagctggtgtgccacgtgagcggcttctaccccaagcccgtgtgggtgatgtggatgagaggcgagcaggagcagcagggcacccagagaggcgacatcctgcccagcgccgacggcacctggtacctgagagccaccctggaggtggccgccggcgaggccgccgacctgagctgcagagtgaagcacagcagcctggagggccaggacatcgtgctgtactgggagcaccacagcagcgtgggcttcatcatcctggccgtgatcgtgcccctgctgctgctgatcggcctggccctgtggttcagaaagagatgcttctgctag

SEQ ID NO: 120792 - protein, 333 aa, Artificial Sequence
  derived and/or modified sequence
MLLLPFQLLAVLFPGGNSEHAFQGPTSFHVIQTSSFTNSTWAQTQGSGWLDDLQIHGWDSDSGTAIFLKPWSKGNFSDKEVAELEEIFRVYIFGFAREVQDFAGDFQMKYPFEIQGIAGCELHSGGAIVSFLRGALGGLDFLSVKNASCVPSPEGGSRAQKFCALIIQYQGIMETVRILLYETCPRYLLGVLNAGKADLQRQVKPEAWLSSGPSPGPGRLQLVCHVSGFYPKPVWVMWMRGEQEQQGTQLGDILPNANWTWYLRATLDVADGEAAGLSCRVKHSSLEGQDIILYWRNPTSIGSIVLAIIVPSLLLLLCLALWYMRRRSYQNIP

SEQ ID NO: 120793 - DNA, 1002 bp, Artificial Sequence
  derived and/or modified sequence
atgttactcctgccattccagctgctcgctgttttattccccggcggcaattccgagcatgcattccagggccctactagcttccacgtgatccagacatcttcctttactaatagtacatgggcgcagactcagggttctggttggttggacgacctacagatacatggatgggatagtgatagtggaacggcgatattcctgaaaccctggtctaagggaaatttctctgataaggaggtagcggaactcgaagaaatcttccgggtttacatctttggcttcgcccgcgaggtgcaggacttcgctggggatttccaaatgaaataccccttcgaaattcagggcattgcaggctgcgagctccactctggcggggctattgtgagcttcctgaggggagcccttggtggcctcgattttttatctgtcaaaaacgcctcatgcgttccaagtcctgaaggaggaagtagagcacagaagttttgcgcattgataatccagtaccaaggaatcatggagacggttaggattctcctctatgaaacctgtcctaggtatctactcggtgtgttaaacgccggtaaggccgacctccaaaggcaggtaaagccagaggcttggcttagcagcggaccctctccagggcccgggcgcctgcagctggtctgtcatgtcagtggtttttaccccaagcctgtgtgggtgatgtggatgagaggggagcaggagcaacaggggactcagttgggggacatactccctaatgctaattggacgtggtacctaagggctactctcgacgtggcagatggggaagccgctggtcttagctgtagggtcaagcattcctctctggaagggcaggacatcatactgtattggaggaaccccacatcaattggatctatcgtcctagcgatcatcgtgcctagtctgcttctgctgctttgccttgccttgtggtacatgagaagaaggtcctatcagaatataccatag

SEQ ID NO: 120794 - DNA, 1002 bp, Artificial Sequence
  derived and/or modified sequence
atgctgctgctgcccttccagctgctggccgtgctcttccctgggggcaacagcgagcacgccttccagggccccaccagcttccacgtgatccagaccagcagcttcaccaacagcacctgggcccagacccagggcagcggctggctggatgacctgcagatccacggctgggacagcgacagcggcacagccatcttcctgaagccctggagcaaaggaaacttcagtgacaaggaggtggccgagctggaggagatcttccgggtgtacatctttggatttgcccgggaggtgcaggactttgctggggacttccagatgaagtacccctttgagatccagggcattgctggctgtgagctgcacagcggcggggccatcgtgtccttcctgcggggggccctgggcggcctggacttcctgtctgtgaagaatgccagctgtgtgcccagccctgagggcggcagccgggcccagaagttctgtgccctgatcatccagtaccagggcatcatggagaccgtgcgcatcctgctgtatgagacctgcccccgctacctgctgggcgtgctgaatgctgggaaggctgacctgcagaggcaggtgaagccagaggcctggctgagcagcggccccagccctggccctggccgcctgcagctggtgtgccacgtgtctggcttctaccccaagcctgtgtgggtgatgtggatgagaggagagcaggagcagcagggcacccagctgggggacatcctgcccaatgccaactggacctggtacctgcgggccaccctggatgtggctgatggagaggccgccggcctgagctgccgggtgaagcacagcagcctggagggccaggacatcatcctgtactggaggaaccccaccagcatcggcagcatcgtgctggccatcatcgtgcccagcctgctgctgctgctgtgcctggccctgtggtacatgagaagaagaagctaccagaacatcccctag

SEQ ID NO: 120795 - DNA, 1002 bp, Artificial Sequence
  derived and/or modified sequence
atgctgctgctgcccttccagctgctggccgtgctgttccccggcggcaacagtgagcacgcgtttcaaggacctacctcttttcatgttatccaaacctctagctttactaacagtacctgggcccagacacagggctccggctggttagatgatcttcagatccacggctgggactccgattcagggacagccatctttcttaagccttggtctaagggcaatttttcagataaagaggttgcagaactggaggaaatcttcagagtgtacattttcggcttcgcacgtgaagtgcaggacttcgctggggacttccaaatgaagtatccgtttgaaattcagggaatcgccggatgcgaattgcatagcggaggagccatcgtgtccttcctgagaggagccttaggcggactggattttttatcggtgaagaacgcatcgtgcgtcccctcaccggaaggcggtagccgggcccagaaattctgtgccctcattatacagtaccaaggaataatggagaccgtaagaatactactgtacgagacctgtccacgctacttgctcggggtgctcaacgccggaaaggccgacctgcagagacaggtgaagcccgaagcttggctgtcatccggcccatctcctgggcctggaagattacagctcgtttgtcacgtatccggattctacccaaagcccgtgtgggtgatgtggatgcgtggcgagcaggagcaacaggggacccagctcggagacattctccctaacgcgaactggacctggtatcttagagcaacccttgacgtggctgatggagaggcagccggcttatcttgtcgtgtgaaacattcttcattggagggtcaggatattatcctttactggcggaaccctacaagcattggatctatcgtgctggccattatcgtgccctctcttctcttgctgctttgtctagccctctggtatatgcgccggcggtcttaccagaacatcccttag

SEQ ID NO: 120796 - DNA, 1002 bp, Artificial Sequence
  derived and/or modified sequence
atgctcctcctaccattccaactgctagcagtcctgttccctggtggcaattccgagcacgcgttccagggaccaacctcttttcatgtgattcaaacatccagtttcactaactccacctgggcgcagactcaggggtccgggtggctcgacgacctgcagattcacgggtgggattccgactctgggaccgccatttttttaaaaccttggagtaagggaaatttctctgataaagaggtcgcggagcttgaagagattttcagagtctatatcttcgggttcgcaagggaggtgcaggacttcgccggtgattttcagatgaagtatcccttcgaaattcaggggattgcgggatgcgagctgcattcggggggtgccattgtctcttttctcagaggggcacttggcggactagactttttatcggttaaaaacgcttcttgtgtcccctcccctgagggagggagccgcgctcagaagttctgcgccctgatcatccaataccagggcatcatggagaccgttcgtatccttctgtacgagacatgtccccgatatttgctcggggtgctgaatgcaggcaaggccgatctgcaaaggcaggtcaaacccgaggcctggctcagctctggaccttcacccggtccgggaaggctgcagctagtttgtcatgtctctggtttttatccaaagccagtgtgggtgatgtggatgagaggtgaacaagaacagcagggcacccaattgggcgacatccttcccaacgcaaactggacctggtatctccgcgcaaccctggatgtggccgacggtgaggcggctggtctgagttgccgtgtgaagcacagctccctagaaggtcaggatatcattctttactggaggaaccctaccagtattggtagcatcgtgttggccatcatagttccgagtctgctcctcctgctgtgtctggccttatggtatatgagaaggcggtcctaccagaacattccttag

SEQ ID NO: 120797 - DNA, 1395 bp, Artificial Sequence
  derived and/or modified sequence
ggcagttggaagagagaagaagtcactacagggtactgaggaaaagctttgctgaaattggagatcaaataccagctctgccagtaagaagttgcatctcccagtgaaatgctgctgctgccatttcaactgttagctgttctctttcctggtggtaacagtgaacatgccttccaggggccgacctcctttcatgttatccagacctcgtcctttaccaatagtacctgggcacaaactcaaggctcaggctggttggatgatttgcagattcatggctgggatagcgactcaggcactgccatattcctgaagccttggtctaaaggtaactttagtgataaggaggttgctgagttagaggagatattccgagtctacatctttggattcgctcgagaagtacaagactttgccggtgatttccagatgaaatacccctttgagatccagggcatagcaggctgtgagctacattctggaggtgccatagtaagcttcctgaggggagctctaggaggattggatttcctgagtgtcaagaatgcttcatgtgtgccttccccagaaggtggcagcagggcacagaaattctgtgcactaatcatacaatatcaaggtatcatggaaactgtgagaattctcctctatgaaacctgcccccgatatctcttgggcgtcctcaatgcaggaaaagcagatctgcaaagacaagtgaagcctgaggcctggctgtccagtggccccagtcctggacctggccgtctgcagcttgtgtgccatgtctcaggattctacccaaagcccgtgtgggtgatgtggatgcggggtgagcaggagcagcagggcactcagctaggggacatcctgcccaatgctaactggacatggtatctccgagcaaccctggatgtggcagatggggaggcggctggcctgtcctgtcgggtgaagcacagcagtttagagggccaggacatcatcctctactggagaaaccccacctccattggctcaattgttttggcaataatagtgccttccttgctccttttgctatgccttgcattatggtatatgaggcgccggtcatatcagaatatcccatgagccatcatcatgtctcctctcccattcgcaataagtaccaagaagcccaagatatcagcccaaaagtcaatcttatcatatttcaaatgattttcaaatttgatgaaatcagagttttcatgtattttaaaataaattattatttaaacatcagcaaaaaagtacttaaaactgtaaatttattatgagactgtactaacagtgtgattcaccctgattttacacacattaaaatgttagaaaaaatgtgtctcaaaataaatgaaatataatacatatgactta

SEQ ID NO: 120798 - DNA, 1002 bp, Artificial Sequence
  derived and/or modified sequence
atgctgctgctgcccttccagctgctggccgtgctgttccccggcggcaacagcgagcacgccttccagggccccaccagcttccacgtgatccagaccagcagcttcaccaacagcacctgggcccagacccagggcagcggctggctggacgacctgcagatccacggctgggacagcgacagcggcaccgccatcttcctgaagccctggagcaagggcaacttcagcgacaaggaggtggccgagctggaggagatcttcagagtgtacatcttcggcttcgccagagaggtgcaggacttcgccggcgacttccagatgaagtaccccttcgagatccagggcatcgccggctgcgagctgcacagcggcggcgccatcgtgagcttcctgagaggcgccctgggcggcctggacttcctgagcgtgaagaacgccagctgcgtgcccagccccgagggcggcagcagagcccagaagttctgcgccctgatcatccagtaccagggcatcatggagaccgtgagaatcctgctgtacgagacctgccccagatacctgctgggcgtgctgaacgccggcaaggccgacctgcagagacaggtgaagcccgaggcctggctgagcagcggccccagccccggccccggcagactgcagctggtgtgccacgtgagcggcttctaccccaagcccgtgtgggtgatgtggatgagaggcgagcaggagcagcagggcacccagctgggcgacatcctgcccaacgccaactggacctggtacctgagagccaccctggacgtggccgacggcgaggccgccggcctgagctgcagagtgaagcacagcagcctggagggccaggacatcatcctgtactggagaaaccccaccagcatcggcagcatcgtgctggccatcatcgtgcccagcctgctgctgctgctgtgcctggccctgtggtacatgagaagaagaagctaccagaacatcccctag

SEQ ID NO: 120799 - protein, 333 aa, Artificial Sequence
  derived and/or modified sequence
MLFLQFLLLALLLPGGDNADASQEHVSFHVIQIFSFVNQSWARGQGSGWLDELQTHGWDSESGTIIFLHNWSKGNFSNEELSDLELLFRFYLFGLTREIQDHASQDYSKYPFEVQVKAGCELHSGKSPEGFFQVAFNGLDLLSFQNTTWVPSPGCGSLAQSVCHLLNHQYEGVTETVYNLIRSTCPRFLLGLLDAGKMYVHRQVRPEAWLSSRPSLGSGQLLLVCHASGFYPKPVWVTWMRNEQEQLGTKHGDILPNADGTWYLQVILEVASEEPAGLSCRVRHSSLGGQDIILYWGHHFSMNWIALVVIVPLVILIVLVLWFKKHCSYQDIL

SEQ ID NO: 120800 - protein, 136 aa, Artificial Sequence
  derived and/or modified sequence
MYVHRQVRPEAWLSSRPSLGSGQLLLVCHASGFYPKPVWVTWMRNEQEQLGTKHGDILPNADGTWYLQVILEVASEEPAGLSCRVRHSSLGGQDIILYWGHHFSMNWIALVVIVPLVILIVLVLWFKKHCSYQDIL

SEQ ID NO: 120801 - DNA, 1002 bp, Artificial Sequence
  derived and/or modified sequence
atgttgtttctgcaatttctgctcctggccctgctgctgcccggtggcgacaacgctgacgcttctcaggaacacgttagtttccatgtgattcaaatcttttcttttgtaaatcagagttgggcaaggggacagggaagtgggtggctcgatgagctgcagacacatggctgggactccgaatccggtaccatcatcttcctccacaattggtcaaagggtaattttagcaacgaagaactcagtgatctggagcttttattccggttctatttattcggactgactagggaaatccaggaccacgcttcccaggattatagcaagtatccatttgaggtgcaggtcaaagcgggatgcgaactacacagtgggaaatcacccgagggcttcttccaggtggccttcaacggcttggatctactcagtttccagaacaccacttgggttccgtcccccgggtgcggaagcttggctcagtctgtttgccacctgttaaaccaccagtatgagggcgtgaccgaaaccgtctataatttaatccgttctacatgtcctcggttccttctgggactgctggacgctgggaaaatgtatgtccacaggcaagtcaggccagaggcatggctttcaagccggccttcgcttgggtctggtcagctattattggtgtgtcacgccagtggattttatccaaaacccgtatgggtgacctggatgcggaatgagcaggaacaactcgggaccaaacacggcgacattttaccaaacgctgatggaacctggtacctgcaggtcatcctggaggtcgcgtctgaggagccggcgggcctgtcatgcagggtgcggcactcgagtctgggagggcaagacattattctatactggggccaccactttagtatgaactggattgcgctcgtcgttatcgtgccccttgttatcctgattgtcctcgttctctggtttaagaagcactgttcctatcaggacatactgtag

SEQ ID NO: 120802 - DNA, 411 bp, Artificial Sequence
  derived and/or modified sequence
atgtatgtgcatcggcaagtgaggccggaggcctggcttagctctaggcccagcctcggttcgggtcagttgttgctagtgtgccacgctagcggattttatcctaaacccgtctgggtcacatggatgcgtaacgagcaggagcaactgggcacgaagcacggagacatcctgccaaacgccgatggcacatggtacttgcaagtgatcctggaggttgccagcgaggaacccgcaggcctgagctgtagagtcagacacagttctctgggcggacaggacattattctctactgggggcatcacttctctatgaactggatcgcgctggtggtcattgttcctctcgtgatactaatcgtcttggttctatggttcaagaaacactgctcttatcaggatatcctgtag

SEQ ID NO: 120803 - DNA, 1002 bp, Artificial Sequence
  derived and/or modified sequence
atgctgttcctgcagttcctgctgctggccctgctgctgcccggcggggacaatgctgatgccagccaggagcacgtgtccttccacgtgatccagatcttctcctttgtgaaccagagctgggcccggggccagggcagcggctggctggatgagctgcagacccacggctgggacagcgagagcggcaccatcatcttcctgcacaactggagcaaaggaaacttcagcaatgaggagctgagtgacctggagctgctcttccgcttctacctgtttggcctgacccgggagatccaggaccacgccagccaggactacagcaagtacccctttgaggtgcaggtgaaggccggctgtgagctgcacagcggcaagagccctgagggcttcttccaggtggccttcaacggcctggacctgctgtccttccagaacaccacctgggtgcccagccctggctgcggcagcctggcccagagcgtgtgccacctgctgaaccaccagtatgagggcgtgacagagaccgtgtacaacctgatccgcagcacctgcccccgcttcctgctgggcctgctggatgctgggaagatgtatgtgcaccggcaggtgcggcctgaggcctggctgagcagccggcccagcctgggcagcggccagctgctgctggtgtgccacgccagcggcttctaccccaagcctgtgtgggtgacctggatgagaaatgagcaggagcagctgggcaccaagcatggagacatcctgcccaatgctgatggcacctggtacctgcaggtgatcctggaggtggccagcgaggagcccgccggcctgagctgccgggtgcgccacagcagcctgggcggccaggacatcatcctgtactggggccaccacttctccatgaactggatcgccctggtggtgattgtgcccctggtgatcctgattgtgctggtgctgtggttcaagaagcactgcagctaccaggacatcctgtag

SEQ ID NO: 120804 - DNA, 411 bp, Artificial Sequence
  derived and/or modified sequence
atgtatgtgcaccggcaggtgcggcctgaggcctggctgagcagccggcccagcctgggcagcggccagctgctgctggtgtgccacgccagcggcttctaccccaagcctgtgtgggtgacctggatgagaaatgagcaggagcagctgggcaccaagcacggggacatcctgcccaatgctgatggcacctggtacctgcaggtgatcctggaggtggccagcgaggagcctgctggcctgagctgccgggtgcgccacagcagcctgggcggccaggacatcatcctgtactggggccaccacttctccatgaactggatcgccctggtggtgattgtgcccctggtgatcctgattgtgctggtgctgtggttcaagaagcactgcagctaccaggacatcctgtag

SEQ ID NO: 120805 - DNA, 1002 bp, Artificial Sequence
  derived and/or modified sequence
atgctgttcctgcagttcctgctgctggccctgctgctgcccggcggagacaacgcggacgcctcccaggaacatgtgagcttccacgttattcaaatattcagttttgttaaccagtcctgggctcgcggccagggaagtgggtggttggatgagctgcagactcatggctgggatagtgagtccggaacaattattttcctccataactggagcaaaggcaacttctcaaacgaggagctgtcagacctggaattgctcttcagattctacctgtttggccttacgcgggagattcaggatcacgcatcccaggattacagcaagtatcctttcgaagtccaggtgaaagccggttgtgaactgcacagcggtaagtcaccggaggggttcttccaagtggctttcaacgggttggaccttttaagcttccagaacacaacatgggtacccagccccgggtgtggtagcttggctcaatcggtttgtcaccttctcaaccatcaatatgaaggggtgaccgaaaccgtgtacaatctgatcagatcaacctgtccccgcttcctgttggggttgctggatgcagggaagatgtatgtgcacaggcaagtgcgcccagaggcatggttgtcctccaggccgagcctaggatccggacagctgctgttggtttgccacgcctccggtttttaccccaagcctgtatgggtgacctggatgaggaacgagcaagagcagctcggaaccaagcacggagatattctcccgaatgccgacggcacctggtacctgcaggttatcctcgaagttgccagcgaggagcctgcggggctcagctgcagagtacggcattcatcactgggaggacaggacattatcctatactggggtcaccatttttccatgaattggatagcactggttgtcatcgtacccttagtgattctcatcgttttagtactctggttcaagaaacattgttcctaccaggatattctttag

SEQ ID NO: 120806 - DNA, 411 bp, Artificial Sequence
  derived and/or modified sequence
atgtacgtgcaccggcaggtgcggcccgaggcctggctgagcagcagacctagcctggggagtggccagctcctgctggtgtgccacgcttcaggcttttaccctaagccagtctgggtgacgtggatgagaaatgagcaggaacagctaggaacgaagcacggcgacatcctgccaaacgctgacggcacatggtacttacaggtgattctggaagtggcatccgaggaaccagctggcttaagttgcagagtgagacactcctctctaggaggccaggatatcatattgtattggggccaccatttttcaatgaactggattgcccttgtggtaattgtgccattagtgattctgatcgtgctggtcctgtggtttaaaaaacattgtagctatcaggacatattgtag

SEQ ID NO: 120807 - DNA, 1002 bp, Artificial Sequence
  derived and/or modified sequence
atgctcttcctgcagttcttactcctcgcattgcttctgccaggcggagataatgctgacgcttcccaggaacacgtgtcgttccacgtgattcagatcttctccttcgtgaaccagagctgggcccgtggccaagggtctggctggttggatgagctgcagacacacggctgggactctgaatcagggactataatcttcctgcacaattggtccaaggggaactttagtaatgaagagttaagcgatctggaactcctttttaggttctacctcttcggcctgacgagggaaatccaagaccatgcgagtcaggactactctaagtacccgtttgaagtccaggtgaaggcgggatgtgagctgcactcaggaaaatcgccagagggcttctttcaagtggccttcaatggactcgacctcttaagctttcagaataccacctgggtgccaagcccgggatgtgggtcgctggctcaaagcgtctgtcatctactcaatcatcagtacgagggagtcacagaaaccgtctataacttgattagatcaacgtgtccacgctttctgctcggactgctggacgcaggtaagatgtatgtccaccgacaagtgcgccctgaggcatggctctcatctagaccatccttggggagtggccagctgctcctggtttgccatgcatcagggttttaccccaaacccgtttgggtaacgtggatgcggaacgagcaggagcagcttggcactaagcacggggatatcctccctaatgctgacggaacttggtacctgcaggtgatcttggaggtggcttccgaggaaccagccggactttcttgccgggttcgccactctagtctgggaggccaggacatcattctgtactggggccaccacttctctatgaactggattgcactggtggtcattgtcccccttgtgatcctgatcgtccttgtgctgtggttcaaaaaacattgctcctatcaggacatcctttag

SEQ ID NO: 120808 - DNA, 411 bp, Artificial Sequence
  derived and/or modified sequence
atgtatgtgcacaggcaggtgagacctgaagcttggctttcgtccaggcctagtctgggcagcggccagttgctcctggtgtgccacgcctcgggattctatcctaaacccgtgtgggtgacgtggatgagaaacgaacaggaacaattggggaccaagcacggcgacatcctgcccaacgccgacggaacatggtacttacaggtgattctggaggtagcatctgaggaaccagctggcttatcctgtagagtccgccatagtagtcttggtgggcaggatatcatcttgtattggggacaccatttctccatgaattggatcgctttagtagtgatcgtgccactggtcattctgatcgtactggtgctctggttcaaaaagcactgtagctatcaggatattctctag

SEQ ID NO: 120809 - DNA, 1435 bp, Artificial Sequence
  derived and/or modified sequence
aggcagttgaggaagggaagtagatataatggagcttagtggcagagcagctggaatcctgagagaagagaataactttagttcagagcaggtggggaaatgagagattgagtaggaggaccaaggttgagggaagcagatcttcttagttgctgtcagcggctgatggggaagattgttggtagaaggaagtcagaatataggtacagagggataagtttgctaagaacagagatcagcaaacagcttttctgagagaaagaaacatctgcaaatgacatgctgtttctgcagtttctgctgctagctcttcttctcccaggtggtgacaatgcagacgcatcccaggaacacgtctccttccatgtcatccagatcttctcatttgtcaaccaatcctgggcacgaggtcagggctcaggatggctggacgagttgcagactcatggctgggacagtgaatcaggcacaataattttcctgcataactggtccaagggcaacttcagcaatgaagagttgtcagacctagagttgttatttcgtttctacctctttggattaactcgggagattcaagaccatgcaagtcaagattactcgaaatatccctttgaagtacaggtgaaagcgggctgtgagctgcattctggaaagagcccagaaggcttctttcaggtagctttcaacggattagatttactgagtttccagaatacaacatgggtgccatctccaggctgtggaagtttggcccaaagtgtctgtcatctactcaatcatcagtatgaaggcgtcacagaaacagtgtataatctcataagaagcacttgcccccgatttctcttgggtctcctggatgcagggaagatgtatgtacacaggcaagtgaggccagaagcctggctgtccagtcgccccagccttgggtctggccagctgttgctggtttgtcatgcctccggcttctacccaaagcctgtttgggtgacatggatgcggaatgaacaggagcaactgggcactaaacatggtgatattcttcctaatgctgatgggacatggtatcttcaggtgatcctggaggtggcatctgaggagcctgctggcctgtcttgtcgagtgagacacagcagtctaggaggccaggacatcatcctctactggggacaccacttttccatgaattggattgccttggtagtgatagtgcccttggtgattctaatagtccttgtgttatggtttaagaagcactgctcatatcaggacatcctgtgagactcttccccctgactcccccattgtgttaagaacccagcaacccaggagcctagtacaatatagtgatgccatcccgtcgactctccatttaaattgtttctctttctgcataataaacatttgttaataaaaaccaaattctaatttggaa

SEQ ID NO: 120810 - DNA, 1425 bp, Artificial Sequence
  derived and/or modified sequence
gttgctgtcagtggctgatggggaagattgtctgttggtagaaggaagtcagaatatagatgtagagggataagtttgctaagaacagagatcagcaaatggcttttctgagagaaggaaacaactgcaaatgacatgctgtttctgtagtttccgctgctagttcttctcctccccggtggtgacaatgcagcatcccaggaacacgtctccttccatgtcatccagatcttctcatttgtcaaccaatcctgggcacgaggtcagggctcaggatggctggacgagttgcagactcatggctgggacagtgaatcaggcacaataattttcctgcataactggtccaagggcaacttcagcaatgaagagttgtcagacctagagttgttatttcgtttctacctctttggattaactcgggagattcaagaccatgcaagtcaagattactcgaaatatccctttgaagtacaggtgaaagcgggctgtgagctgcattctggaaagagcccagaaggcttctttcaggtagctttcaacggattagatttactgagtttccagaatacaacatgggtgccatctccaggctgtggaagtttggcccaaagtgtctgtcatctactcaatcatcagtatgaaggcgtcacagaaacagtgtataatctcataagaagcacttgcccccgatttctcttgggtctcctggatgcagggaagatgtatgtacacaggcaagtgaggccagaagcctggctgtccagtcgccccagccttgggtctggccagctgttgctggtttgtcatgcctccggcttctacccaaagcctgtttgggtgacatggatgcggaatgaacaggagcaactgggcactaaacatggtgatattcttcctaatgctgatgggacatggtatcttcaggtgatcctggaggtggcatctgaggagcctgctggcctgtcttgtcgagtgagacacagcagtctaggaggccaggacatcatcctctactggggacaccacttttccatgaattggattgccttggtagtgatagtgcccttggtgattctaatagtccttgtgttatggtttaagaagcactgctcatatcaggacatcctgtgagactcttccccctgactcccccattgtgttaagaacccagcaacccaggagcctagtacaatatagtgatgccatcccgtcgactctccatttaaattgtttctctttctgcataataaacatttgttaataaaaaccaaattctaatttggaatgtttttcttggaatctccactttttatatagcactcaaccttcaaagcccatttctgatgtcatttcctccaacgatcttccttgacccatactgaacccagagagcccctcaactgttatgtgcatgcaacactt

SEQ ID NO: 120811 - DNA, 1002 bp, Artificial Sequence
  derived and/or modified sequence
atgctgttcctgcagttcctgctgctggccctgctgctgcccggcggcgacaacgccgacgccagccaggagcacgtgagcttccacgtgatccagatcttcagcttcgtgaaccagagctgggccagaggccagggcagcggctggctggacgagctgcagacccacggctgggacagcgagagcggcaccatcatcttcctgcacaactggagcaagggcaacttcagcaacgaggagctgagcgacctggagctgctgttcagattctacctgttcggcctgaccagagagatccaggaccacgccagccaggactacagcaagtaccccttcgaggtgcaggtgaaggccggctgcgagctgcacagcggcaagagccccgagggcttcttccaggtggccttcaacggcctggacctgctgagcttccagaacaccacctgggtgcccagccccggctgcggcagcctggcccagagcgtgtgccacctgctgaaccaccagtacgagggcgtgaccgagaccgtgtacaacctgatcagaagcacctgccccagattcctgctgggcctgctggacgccggcaagatgtacgtgcacagacaggtgagacccgaggcctggctgagcagcagacccagcctgggcagcggccagctgctgctggtgtgccacgccagcggcttctaccccaagcccgtgtgggtgacctggatgagaaacgagcaggagcagctgggcaccaagcacggcgacatcctgcccaacgccgacggcacctggtacctgcaggtgatcctggaggtggccagcgaggagcccgccggcctgagctgcagagtgagacacagcagcctgggcggccaggacatcatcctgtactggggccaccacttcagcatgaactggatcgccctggtggtgatcgtgcccctggtgatcctgatcgtgctggtgctgtggttcaagaagcactgcagctaccaggacatcctgtag

SEQ ID NO: 120812 - DNA, 411 bp, Artificial Sequence
  derived and/or modified sequence
atgtacgtgcacagacaggtgagacccgaggcctggctgagcagcagacccagcctgggcagcggccagctgctgctggtgtgccacgccagcggcttctaccccaagcccgtgtgggtgacctggatgagaaacgagcaggagcagctgggcaccaagcacggcgacatcctgcccaacgccgacggcacctggtacctgcaggtgatcctggaggtggccagcgaggagcccgccggcctgagctgcagagtgagacacagcagcctgggcggccaggacatcatcctgtactggggccaccacttcagcatgaactggatcgccctggtggtgatcgtgcccctggtgatcctgatcgtgctggtgctgtggttcaagaagcactgcagctaccaggacatcctgtag

SEQ ID NO: 120813 - protein, 335 aa, Artificial Sequence
  derived and/or modified sequence
MGCLLFLLLWALLQAWGSAEVPQRLFPLRCLQISSFANSSWTRTDGLAWLGELQTHSWSNDSDTVRSLKPWSQGTFSDQQWETLQHIFRVYRSSFTRDVKEFAKMLRLSYPLELQVSAGCEVHPGNASNNFFHVAFQGKDILSFQGTSWEPTQEAPLWVNLAIQVLNQDKWTRETVQWLLNGTCPQFVSGLLESGKSELKKQVKPKAWLSRGPSPGPGRLLLVCHVSGFYPKPVWVKWMRGEQEQQGTQPGDILPNADETWYLRATLDVVAGEAAGLSCRVKHSSLEGQDIVLYWGGSYTSMGLIALAVLACLLFLLIVGFTSRFKRQTSYQGVL

SEQ ID NO: 120814 - DNA, 1008 bp, Artificial Sequence
  derived and/or modified sequence
atggggtgcctgctgttcctgctgttatgggccttacttcaagcctggggcagtgcagaggttcctcagcgtctttttcccctgagatgtctgcagataagtagcttcgcgaactccagctggaccaggacggatgggctggcgtggctgggtgaactgcagacccactcttggagcaacgatagtgataccgttagatcattgaaaccctggtctcaagggaccttctctgaccagcagtgggagactctacagcatatttttcgcgtctaccgatcatcctttaccagagacgtcaaggagttcgcgaaaatgctccggctgtcttatccattggagctccaggtatccgctggctgcgaggttcatccgggtaatgcatccaataatttctttcatgttgccttccaaggcaaggacattctgagtttccaggggacatcctgggagcccacccaggaggccccactgtgggtcaacttggcaatccaagttctgaaccaggataaatggacgagggaaaccgtccagtggctcctgaacggaacgtgccctcaattcgttagcgggctacttgagagcgggaaatcagagctgaagaaacaggtgaagccaaaggcatggcttagtcgtggtccgagccctggacccggcagactccttttagtgtgccacgtgagtggtttctacccaaagcccgtctgggtaaagtggatgaggggcgagcaggaacagcaaggcacacagcccggtgacattttgcccaatgcagatgaaacatggtacttgcgcgccacgctggatgtggtggccggggaggcggccggcctttcatgccgggtcaaacacagctccttggaaggtcaggacattgtattatattggggcggttcttacacctcaatgggcttaattgccctggcggttctggcttgtctgctgtttctcttgatcgtcggtttcaccagtaggttcaaacggcaaaccagttatcagggtgtgctttag

SEQ ID NO: 120815 - DNA, 1008 bp, Artificial Sequence
  derived and/or modified sequence
atgggctgcctgctcttcctgctgctgtgggccctgctgcaggcctggggcagcgctgaggtgccccagaggctcttccccctgcgctgcctgcagatcagcagctttgccaacagctcctggaccaggacagatggcctggcctggctgggggagctgcagacccacagctggagcaatgacagcgacacagtgcgcagcctgaagccctggagccagggcaccttcagtgaccagcagtgggagaccctgcagcacatcttccgggtgtaccgcagcagcttcaccagagatgtgaaggagtttgccaagatgctgcggctgagctaccccctggagctgcaggtgtctgctggctgtgaggtgcaccctggaaatgccagcaacaacttcttccacgtggccttccagggcaaggacatcctgtccttccagggcacctcctgggagcccacccaggaggcccccctgtgggtgaacctggccatccaggtgctgaaccaggacaagtggacccgggagaccgtgcagtggctgctgaatggcacctgcccccagtttgtgtctggcctgctggagagcggcaagtctgagctgaagaagcaggtgaagcccaaggcctggctgagccggggccccagccctggccctggccgcctgctgctggtgtgccacgtgtctggcttctaccccaagcctgtgtgggtgaagtggatgagaggagagcaggagcagcagggcacccagcccggggacatcctgcccaatgctgatgagacctggtacctgcgggccaccctggatgtggtggccggggaggccgccggcctgagctgccgggtgaagcacagcagcctggagggccaggacatcgtgctgtactggggcggcagctacacctccatgggcctgattgccctggccgtgctggcctgcctgctcttcctgctgattgtgggcttcaccagccgcttcaagaggcagaccagctaccagggcgtgctgtag

SEQ ID NO: 120816 - DNA, 1008 bp, Artificial Sequence
  derived and/or modified sequence
atgggctgcctgctgttcctgctgctgtgggccctgctgcaggcctggggatcagccgaggttccgcaacgcctctttcccctgagatgtctgcagattagcagctttgctaactcatcctggactagaactgacggcctcgcatggcttggagagctccagactcacagctggagtaacgacagcgatactgttaggtccctaaaaccctggtctcagggcacattctctgatcagcagtgggagacccttcagcatattttcagagtgtacaggtcttccttcaccagagacgtaaaagagtttgctaagatgcttaggctgtcctatccactggagctgcaggtctccgcaggttgcgaggtccaccctggaaatgcaagtaataatttctttcacgttgcgtttcaggggaaggacatcctatctttccagggtacaagttgggagcctacccaagaggccccgctttgggtaaatctggccatccaggtgctcaatcaggacaaatggacaagggagaccgttcagtggctgttaaatggtacctgtccacagtttgtgagtggtctgctcgaaagtggcaaatcagaattgaaaaagcaggtgaagcccaaagcctggctaagcagaggaccaagcccgggtccagggcgcctgctactcgtgtgtcacgtttctggattctacccaaaacctgtgtgggtcaagtggatgcgcggggagcaagagcagcagggcacccagcccggcgatatcctgccaaatgccgacgaaacctggtatcttagagccaccctagacgtggtcgcaggcgaggccgctggcctgtcatgcagagtcaaacattctagtctggagggacaggatatcgtgctgtactggggcgggagctacaccagcatgggactgatcgccctcgccgtgctggcctgcctactcttcctgctcatcgtgggatttacttcacggttcaagcgccagacgtcctaccaaggagtgctgtag

SEQ ID NO: 120817 - DNA, 1008 bp, Artificial Sequence
  derived and/or modified sequence
atggggtgtttgctgtttttgttgctctgggccctcctccaggcgtggggttcggctgaggtaccccagaggttgttccccctcaggtgcttgcagatctcttccttcgcaaatagcagctggactaggacggatggactcgcttggcttggggagctccaaacacactcctggtcaaacgattccgatacagtcaggtcattaaagccatggtcccaggggaccttcagtgatcagcaatgggaaacccttcagcatatatttcgcgtgtatagaagtagctttactcgagacgtcaaggagttcgctaaaatgctcaggctatcataccctctcgaattgcaggtctctgctggatgcgaggtgcaccctggaaatgcctctaataacttttttcatgttgctttccagggcaaggatatcctctctttccaggggacctcatgggaaccgactcaagaggctccgttatgggtgaatctggccatccaggtgttgaatcaagataaatggacccgggagactgtgcaatggctgttaaacggcacctgcccccagttcgtgtctggattactggagtctgggaaatcagagttaaagaagcaggtcaagccgaaagcttggctctcccgaggcccttctccagggccagggagactgctgttggtttgccacgtgtccggcttttaccccaaacccgtgtgggtgaagtggatgcgtggggagcaggagcagcagggcacccagcctggcgacattctgcccaatgccgacgagacctggtatctgcgcgcaactttggatgtggtagccggagaagccgcaggtcttagctgccgggtcaagcacagcagcctggaaggccaggatattgtgctgtactgggggggttcctacacctccatgggcctgattgccctcgcagttctggcgtgcctcttgtttctgttaatcgtgggttttaccagcagattcaagagacaaacaagctatcagggagttctgtag

SEQ ID NO: 120818 - DNA, 2253 bp, Artificial Sequence
  derived and/or modified sequence
gttttctacccaagaatgctacttcaggagatcagtcaaaaggttagggtgatggtgacggtggaaatatagaaaaaggaatttattcaagaggtattcaaaaagaagtgaaatagagatgagttggagatagattggataaaaagagtgagggagagggaggtgtcaggctgcagcccaggttctgagttgccaaagaggagtcttttcctccaggaaattgagacacgccggttgtgaaacctactgaagtgagcggcggcgccaggattcctgggaccccgacctctttgcagctcgcacagctaagggcgagggcgcccttcggcagaagcagcaaaccgccggcaagcccagcgaggagggctgccggggtctgggcttgggaattggctggcacccagcggaaagggacgtgagctgagcggcgggggagaagagtgcgcaggtcagagggcggcgcgcagcggcgctccgcgaggtccccacgccgggcgatatggggtgcctgctgtttctgctgctctgggcgctcctccaggcttggggaagcgctgaagtcccgcaaaggcttttccccctccgctgcctccagatctcgtccttcgccaatagcagctggacgcgcaccgacggcttggcgtggctgggggagctgcagacgcacagctggagcaacgactcggacaccgtccgctctctgaagccttggtcccagggcacgttcagcgaccagcagtgggagacgctgcagcatatatttcgggtttatcgaagcagcttcaccagggacgtgaaggaattcgccaaaatgctacgcttatcctatcccttggagctccaggtgtccgctggctgtgaggtgcaccctgggaacgcctcaaataacttcttccatgtagcatttcaaggaaaagatatcctgagtttccaaggaacttcttgggagccaacccaagaggccccactttgggtaaacttggccattcaagtgctcaaccaggacaagtggacgagggaaacagtgcagtggctccttaatggcacctgcccccaatttgtcagtggcctccttgagtcagggaagtcggaactgaagaagcaagtgaagcccaaggcctggctgtcccgtggccccagtcctggccctggccgtctgctgctggtgtgccatgtctcaggattctacccaaagcctgtatgggtgaagtggatgcggggtgagcaggagcagcagggcactcagccaggggacatcctgcccaatgctgacgagacatggtatctccgagcaaccctggatgtggtggctggggaggcagctggcctgtcctgtcgggtgaagcacagcagtctagagggccaggacatcgtcctctactggggtgggagctacacctccatgggcttgattgccttggcagtcctggcgtgcttgctgttcctcctcattgtgggctttacctcccggtttaagaggcaaacttcctatcagggcgtcctgtgactcgccttgccacatctgtgtctctggaacccaggacctctggacctcaggttcctaagacttcagtcctggtctgctcaggaattgaagatgtaaggaattgaagataggagagataccttgaaaaagtagagaacagtcatgaggcagctttcatcacacccttttaacatttatctaaaagaatttaaattctttttcaaaaattacactacaagtttataagcccaaatggctctgtgaaatcagaagtgcaaaggtgtgcaaacttgtatctgaagacctaccagggacaagcaggtaagagctgatgtgagtgtgtgtgatgggatctgtaaggaactggaacacacatgtcctatccaaaggaatcagctgcagctgcttgttgtcaagtataaagtcaggacctggcttggctttaaccgtttttcaagaaaactggaaatctggattttcagcgaacatgcctgattttaaaaggttgactcaagtttttacaaaatactatgtgggacacctcaaatacatacctactgactgatgacaaacccaggagtttgtgtgtcttttataaaaagtttgccctggatgtcatattggcagttggaggacacagtttctattgtaaatttggatttacgactgaagaaggacattttctctttaaaagaaagttaggttataagaaacagaggcgtctcacatttttacttggtgtaattaataaacgaagataaatcata

SEQ ID NO: 120819 - DNA, 1008 bp, Artificial Sequence
  derived and/or modified sequence
atgggctgcctgctgttcctgctgctgtgggccctgctgcaggcctggggcagcgccgaggtgccccagagactgttccccctgagatgcctgcagatcagcagcttcgccaacagcagctggaccagaaccgacggcctggcctggctgggcgagctgcagacccacagctggagcaacgacagcgacaccgtgagaagcctgaagccctggagccagggcaccttcagcgaccagcagtgggagaccctgcagcacatcttcagagtgtacagaagcagcttcaccagagacgtgaaggagttcgccaagatgctgagactgagctaccccctggagctgcaggtgagcgccggctgcgaggtgcaccccggcaacgccagcaacaacttcttccacgtggccttccagggcaaggacatcctgagcttccagggcaccagctgggagcccacccaggaggcccccctgtgggtgaacctggccatccaggtgctgaaccaggacaagtggaccagagagaccgtgcagtggctgctgaacggcacctgcccccagttcgtgagcggcctgctggagagcggcaagagcgagctgaagaagcaggtgaagcccaaggcctggctgagcagaggccccagccccggccccggcagactgctgctggtgtgccacgtgagcggcttctaccccaagcccgtgtgggtgaagtggatgagaggcgagcaggagcagcagggcacccagcccggcgacatcctgcccaacgccgacgagacctggtacctgagagccaccctggacgtggtggccggcgaggccgccggcctgagctgcagagtgaagcacagcagcctggagggccaggacatcgtgctgtactggggcggcagctacaccagcatgggcctgatcgccctggccgtgctggcctgcctgctgttcctgctgatcgtgggcttcaccagcagattcaagagacagaccagctaccagggcgtgctgtag

SEQ ID NO: 120820 - protein, 235 aa, Artificial Sequence
  derived and/or modified sequence
MALPVTALLLPLALLLHAARPSQFRVSPLDRTWNLGETVELKCQVLLSNPTSGCSWLFQPRGAAASPTFLLYLSQNKPKAAEGLDTQRFSGKRLGDTFVLTLSDFRRENEGYYFCSALSNSIMYFSHFVPVFLPAKPTTTPAPRPPTPAPTIASQPLSLRPEACRPAAGGAVHTRGLDFACDIYIWAPLAGTCGVLLLSLVITLYCNHRNRRRVCKCPRPVVKSGDKPSLSARYV

SEQ ID NO: 120821 - protein, 198 aa, Artificial Sequence
  derived and/or modified sequence
MALPVTALLLPLALLLHAARPSQFRVSPLDRTWNLGETVELKCQVLLSNPTSGCSWLFQPRGAAASPTFLLYLSQNKPKAAEGLDTQRFSGKRLGDTFVLTLSDFRRENEGYYFCSALSNSIMYFSHFVPVFLPVHTRGLDFACDIYIWAPLAGTCGVLLLSLVITLYCNHRNRRRVCKCPRPVVKSGDKPSLSARYV

SEQ ID NO: 120822 - protein, 220 aa, Artificial Sequence
  derived and/or modified sequence
MALPVTALLLPLALLLHAARPSQFRVSPLDRTWNLGETVELKCQVLLSNPTSGCSWLFQPRGAAASPTFLLYLSQNKPKAAEGLDTLSDFRRENEGYYFCSALSNSIMYFSHFVPVFLPAKPTTTPAPRPPTPAPTIASQPLSLRPEACRPAAGGAVHTRGLDFACDIYIWAPLAGTCGVLLLSLVITLYCNHRNRRRVCKCPRPVVKSGDKPSLSARYV

SEQ ID NO: 120823 - protein, 276 aa, Artificial Sequence
  derived and/or modified sequence
MRNQAPGRPKGATFPPRRPTGSRAPPLAPELRAKQRPGERVMALPVTALLLPLALLLHAARPSQFRVSPLDRTWNLGETVELKCQVLLSNPTSGCSWLFQPRGAAASPTFLLYLSQNKPKAAEGLDTQRFSGKRLGDTFVLTLSDFRRENEGYYFCSALSNSIMYFSHFVPVFLPAKPTTTPAPRPPTPAPTIASQPLSLRPEACRPAAGGAVHTRGLDFACDIYIWAPLAGTCGVLLLSLVITLYCNHRNRRRVCKCPRPVVKSGDKPSLSARYV

SEQ ID NO: 120824 - DNA, 708 bp, Artificial Sequence
  derived and/or modified sequence
atggccctgcctgtcactgcactgctcctaccccttgcccttcttttacatgcagctagaccttcccagttccgcgtgtcccccttggaccgcacctggaatctcggagagacggtcgagctgaagtgccaggtgctcctgagtaacccaacgtcaggatgttcatggctttttcagccccgtggcgccgccgcctccccaaccttcctgctgtacctgagccagaataaacctaaggccgcagagggcctggacacacagagattcagcgggaagcgcttaggtgatacttttgtccttacactctctgatttcagacgcgagaatgagggatactacttctgtagcgcactgtccaacagcatcatgtacttctcgcatttcgttccagtgttcttgcctgctaaacccacaacaactcccgctcctcgccctccaactcccgccccaactatcgcatcacagcccctgagcctcagacccgaagcgtgtcgcccagctgccggcggcgctgtgcatacaagggggcttgactttgcttgcgacatttacatttgggctcctctggccggcacctgtggggtgctcctgcttagcctggtgattacactctattgtaatcataggaatcgccgtcgtgtatgcaaatgcccgagacctgtcgtgaaaagtggagacaagcctagcctgagcgccaggtatgtctag

SEQ ID NO: 120825 - DNA, 708 bp, Artificial Sequence
  derived and/or modified sequence
atggcgttgccagtcactgccctgttgctgccattggctctactgcttcacgcagcccgaccgtcacagttccgagtctccccccttgaccgtacatggaatctcggagagaccgttgagctgaagtgtcaggtgcttttaagcaatcccaccagtggttgtagttggctattccagcctaggggggccgctgcttccccgacgtttcttttatacctctctcaaaacaaacctaaagccgcagaagggttagatacacagagatttagtggaaagaggctgggtgataccttcgtcctgacactgagtgacttcaggcgtgagaatgaaggttattacttctgctctgctcttagcaattccattatgtactttagccacttcgtgccagtcttcctccccgcaaaacctacaaccaccccagcccctagacccccaacccccgcaccgaccatagccagccagcctctgtctttgagaccagaagcatgccgcccagccgctgggggggccgtgcacacaaggggactcgacttcgcttgtgatatctatatttgggcacccctggcagggacctgtggagtgctgctgctgtctctcgtgattaccctctactgcaaccataggaaccggaggcgagtgtgtaagtgtccacgccccgtagtgaagtcaggcgataagccctctcttagcgctcgctatgtctag

SEQ ID NO: 120826 - DNA, 597 bp, Artificial Sequence
  derived and/or modified sequence
atggccctccctgtaaccgcactgctactgcctcttgccctcctcctgcacgccgctaggccctcacaatttagagtttctccgttagacaggacctggaatctgggggagacagtggagctaaaatgccaggtgctcctgtctaacccaactagtggctgctcatggttattccagccacgaggtgcagctgcctcccccacctttctgctctatctgagtcaaaacaagccaaaggcggccgaaggtctggatacacagaggttttccggtaaacggttaggcgatacctttgttcttaccttgagcgacttcagaagagagaatgaaggatattacttctgctccgcattgtccaactcaatcatgtacttttcccattttgttccggtcttcctgcccgtgcacacacgcgggctggacttcgcctgcgacatctacatctgggctcctctagctgggacctgtggagtcctgcttttgtcccttgttattaccctttactgcaaccaccgcaatcggaggagggtttgcaaatgtccgcggccagtggtgaagtcaggagacaaacccagccttagcgcacggtacgtctag

SEQ ID NO: 120827 - DNA, 663 bp, Artificial Sequence
  derived and/or modified sequence
atggcactgcccgtgaccgctttgctgcttccattggcactacttttacatgccgcccgccccagtcagtttagagtgtcccctttagatagaacttggaatctcggtgaaactgtggagttaaagtgtcaggtgctactctccaaccctactagtggttgctcctggttgttccagccacgcggcgccgcagcctctcccacctttctcctgtacctgagccaaaacaaaccaaaagcggcagagggcctggacactctgagcgatttccgcagagaaaacgaaggatactacttttgttctgcacttagtaattcgatcatgtatttttcacactttgtccctgtgtttcttcccgcaaagccaaccacgactccagctccccgcccgccaacccctgccccaacaatagccagtcagcccttgtccctgcgaccagaggcctgcagacctgctgctggcggggcagtgcacacaaggggactggacttcgcttgtgatatttacatctgggcgccactcgcaggtacatgtggtgtcctgctgctttccctggtgataaccctgtactgcaatcatcggaacaggaggagagtgtgcaagtgccctagaccagtggtgaagtcaggagacaagccctccctgagcgcccgatacgtctag

SEQ ID NO: 120828 - DNA, 831 bp, Artificial Sequence
  derived and/or modified sequence
atgcgaaatcaggcccctggcagacctaagggagccacattcccccccaggcgcccaacaggcagtagggctcccccgctggctcctgagctgagggccaagcaacggcccggagagagggtcatggccctccctgtaactgccctgctgcttccactcgcacttcttctccacgccgcacgtccgagccagttcagagtctcgcctctggatcgcacatggaacctcggcgaaacggtggaactgaaatgccaggtgctgctcagtaaccctacgagcggttgctcttggctctttcaaccccggggtgctgcagcttcccccacatttttgctttatctttcccagaataaaccgaaggcagcggaagggttggacactcaacggtttagcggaaaacgcctcggggacacgttcgtgctcacactatccgattttcgcagggagaatgagggctactacttttgctcggccctgagtaacagtattatgtacttctctcacttcgttccagtttttctgcccgctaagcctactactactcccgcacctcgcccccctacaccggcacccacaatagccagtcagccactctcactgcgcccggaggcgtgccgccctgcagccggaggagctgttcatacccgggggctggatttcgcgtgcgacatatacatctgggcccccttggcagggacctgtggcgttcttctcttgtcactggtcatcaccctatactgcaatcaccgcaaccggcggcgggtttgtaagtgtccaaggcctgttgtcaagtctggcgacaaaccctcgctttccgcacgctatgtctag

SEQ ID NO: 120829 - DNA, 708 bp, Artificial Sequence
  derived and/or modified sequence
atggccctgcctgtgacagccctgctgctgcccctggccctgctgctgcacgccgcccggcccagccagttccgggtgagccccctggacaggacctggaacctgggggagaccgtggagctgaagtgccaggtgctgctgagcaaccccaccagcggctgctcctggctgttccagcccagaggagctgctgccagccccaccttcctgctgtacctgagccagaacaagcccaaggctgctgagggcctggacacccagcgcttcagcggcaagaggctgggggacacctttgtgctgaccctgagtgacttccggcgggagaatgaaggctactacttctgcagcgccctgagcaacagcatcatgtacttcagccactttgtgcctgtgttcctgcctgccaagcccaccaccaccccagcccccaggcctcccaccccagcccccaccatcgccagccagcccctgagcctgcggcctgaggcctgcaggcctgctgctgggggcgctgtgcacacccggggcctggactttgcctgtgacatctacatctgggcccccctggccggcacctgtggggtgctgctgctgagcctggtgatcaccctgtactgcaaccacaggaacagaagaagagtgtgcaagtgccccaggcctgtggtgaagagcggggacaagcccagcctgagcgcccgctacgtgtag

SEQ ID NO: 120830 - DNA, 597 bp, Artificial Sequence
  derived and/or modified sequence
atggccctgcctgtgacagccctgctgctgcccctggccctgctgctgcacgccgcccggcccagccagttccgggtgagccccctggacaggacctggaacctgggggagaccgtggagctgaagtgccaggtgctgctgagcaaccccaccagcggctgctcctggctgttccagcccagaggagctgctgccagccccaccttcctgctgtacctgagccagaacaagcccaaggctgctgagggcctggacacccagcgcttcagcggcaagaggctgggggacacctttgtgctgaccctgagtgacttccggcgggagaatgaaggctactacttctgcagcgccctgagcaacagcatcatgtacttcagccactttgtgcctgtgttcctgcctgtgcacacccggggcctggactttgcctgtgacatctacatctgggcccccctggccggcacctgtggggtgctgctgctgagcctggtgatcaccctgtactgcaaccacaggaacagaagaagagtgtgcaagtgccccaggcctgtggtgaagagcggggacaagcccagcctgagcgcccgctacgtgtag

SEQ ID NO: 120831 - DNA, 663 bp, Artificial Sequence
  derived and/or modified sequence
atggccctgcctgtgacagccctgctgctgcccctggccctgctgctgcacgccgcccggcccagccagttccgggtgagccccctggacaggacctggaacctgggggagaccgtggagctgaagtgccaggtgctgctgagcaaccccaccagcggctgctcctggctgttccagcccagaggagctgctgccagccccaccttcctgctgtacctgagccagaacaagcccaaggctgctgagggcctggacaccctgagtgacttcagaagagaaaatgaaggctactacttctgcagcgccctgagcaacagcatcatgtacttcagccactttgtgcctgtgttcctgcctgccaagcccaccaccaccccagccccccggccccccaccccagcccccaccatcgccagccagcccctgagcctgcggcctgaggcctgcaggcctgctgctggaggagctgtgcacacccggggcctggactttgcctgtgacatctacatctgggcccccctggccggcacctgtggggtgctgctgctgagcctggtgatcaccctgtactgcaaccacaggaacagaagaagagtgtgcaagtgccccaggcctgtggtgaagagcggggacaagcccagcctgagcgcccgctacgtgtag

SEQ ID NO: 120832 - DNA, 831 bp, Artificial Sequence
  derived and/or modified sequence
atgaggaaccaggcccctggccggcccaagggggccaccttccccccaagaagacccaccggcagccgggccccacccctggcccctgagctgcgggccaagcagaggcctggagagcgggtgatggccctgcctgtgacagccctgctgctgcccctggccctgctgctgcatgctgcccggcccagccagttccgggtgagccccctggacaggacctggaacctgggggagaccgtggagctgaagtgccaggtgctgctgagcaaccccaccagcggctgctcctggctgttccagcccagaggagctgctgccagccccaccttcctgctgtacctgagccagaacaagcccaaggctgctgagggcctggacacccagcgcttcagcggcaagaggctgggggacacctttgtgctgaccctgagtgacttcagaagagaaaatgaaggctactacttctgcagcgccctgagcaacagcatcatgtacttcagccactttgtgcctgtgttcctgcctgccaagcccaccaccaccccagccccccggccccccaccccagcccccaccatcgccagccagcccctgagcctgcggcctgaggcctgcaggcctgctgctggaggagctgtgcacacccggggcctggactttgcctgtgacatctacatctgggcccccctggccggcacctgtggggtgctgctgctgagcctggtgatcaccctgtactgcaaccacaggaacagaagaagagtgtgcaagtgccccaggcctgtggtgaagagcggggacaagcccagcctgagcgcccgctacgtgtag

SEQ ID NO: 120833 - DNA, 708 bp, Artificial Sequence
  derived and/or modified sequence
atggccctgcccgtgaccgccctgctgctgcccctggccctgctgctacacgcagcccggccatcccagttcagggtcagtcctctggatcgcacatggaacctaggcgagacagtggagttaaaatgccaagtattactgagcaacccgacttctggttgctcgtggttgttccagcctcggggcgccgcagcctccccgacttttttactgtacctcagccagaacaagccgaaagccgccgaagggcttgacacccagcgtttcagcggcaagcggctgggagatacctttgtcctaacgctctccgacttccgacgcgagaacgaaggatactacttctgctctgcactgagtaactccatcatgtacttttcccattttgtgccagtgttcctccctgctaaacccaccacaaccccagcccccagaccgccaaccccagccccaacgattgcatcacagcccctctcactacgcccagaggcttgtaggcctgcggccgggggggccgtccacacccgaggactcgatttcgcttgcgacatttacatttgggcccccttagctgggacatgtggagtgctgctactgtcgctggtgattactctctattgcaaccatcgcaatcggcgaagggtttgcaaatgtcccagacccgttgttaagtcgggtgataagccgtcacttagcgcacgttacgtgtag

SEQ ID NO: 120834 - DNA, 708 bp, Artificial Sequence
  derived and/or modified sequence
atggccctgcccgtgaccgccctgctgctgcccctggccctgctgctgcatgcagcacgcccttcgcagttccgcgtcagccccctggaccggacctggaatcttggggagactgttgagctgaagtgccaggtcctactatctaatcccactagtggctgtagctggctcttccaaccccgcggcgcagccgctagtcccaccttccttctgtacttgagtcagaataaaccaaaggcagctgagggccttgatacacaacggttcagtggcaaacggcttggagacaccttcgtactcacgctgtccgacttccgtagagaaaatgagggatactatttttgctctgccctgagcaactccatcatgtacttcagccatttcgtcccagtctttttgcctgcaaagccaaccactacaccggccccgcggcccccaacacccgctcctacaatagcatcgcagccactttcgttacgaccagaggcatgccgccctgccgctggcggagcggtccacactcgtggcctggactttgcttgcgacatctacatttgggcacccctcgccggaacgtgtggcgttctgctcctttctttagtaattactctgtactgtaaccacagaaaccggcgacgcgtgtgtaagtgcccacgcccggtcgtaaaatctggagataaacctagcctgagtgcccgttacgtatag

SEQ ID NO: 120835 - DNA, 597 bp, Artificial Sequence
  derived and/or modified sequence
atggccctgcccgtgaccgccctgctgctgcccctggccctgctgctgcatgccgctcgcccgtcacagttcagggtttcccccctggacagaacttggaacctgggagagacagtggaacttaaatgccaggtgctgctctctaatccaactagcggatgttcttggttatttcaacctagaggagcggcagccagtcccacctttctgctatacttatcacagaacaaaccaaaggcggctgaaggattggatacacagaggttcagcggcaagaggttaggtgacactttcgtgctcacattaagcgattttcggagggagaacgaaggctactacttctgctcggctttgtccaactctatcatgtattttagccatttcgtacctgtctttctgcccgtgcacacacgaggtctggattttgcatgcgacatctacatttgggccccattagcaggaacctgcggggtgctccttctttccctggttattaccttatattgcaaccatagaaatcggagacgcgtttgtaagtgccctcgcccggtggtgaagtctggagacaaacccagcctgtcagccaggtatgtctag

SEQ ID NO: 120836 - DNA, 663 bp, Artificial Sequence
  derived and/or modified sequence
atggccctgcccgtgaccgccctgctgctgcccctggccctgctgcttcacgcagctaggccatcacaatttagggtgtcccctctcgacaggacctggaatcttggcgagacagtcgagctgaaatgtcaggtgctacttagtaatcccacttcgggatgctcttggctcttccagccacgcggggcagcggcaagcccaacgttcttgctgtacctatctcagaacaaacctaaagctgccgaggggctggacacccttagcgactttaggagggaaaacgagggctattatttctgcagtgcgctatcaaattccatcatgtatttctcacactttgtgccagtgttccttcctgccaagcccacaaccacccccgccccaagaccgccaacaccagccccaacaattgccagtcagccactgagccttagacccgaagcttgtcgccctgccgcaggaggcgcggttcacactcgaggattggatttcgcgtgtgatatttacatctgggccccattggccggaacatgtggagtcctgcttttgtcattagttatcacactgtactgcaaccatcgtaatcgccggcgagtgtgcaagtgcccacgtcctgttgttaagagtggtgataaacctagcctaagtgctcgctacgtttag

SEQ ID NO: 120837 - DNA, 831 bp, Artificial Sequence
  derived and/or modified sequence
atgcggaaccaggcccccggccggcccaagggcgccaccttcccccccagacgacctacaggctccagagcaccccccctggctccagagttgagagctaagcagcgccctggggaacgcgtgatggcactaccagtcacagccttgctgctcccactcgcattactcctgcatgcggcacgcccgagtcaattccgtgtctctcccctcgatagaacttggaatctcggagagaccgttgaacttaaatgccaggtcctgctttcaaatccaacatctggttgttcctggttattccagcctagaggcgctgctgcaagtcccacattcttactctatctgagccagaataagcccaaagcagccgaggggctcgatactcagaggttttccggtaagcgcttgggtgacaccttcgttcttactctttccgatttcagaagagaaaatgagggatattatttctgcagcgccctttccaatagcattatgtacttctcccattttgtaccagtgttcctgcctgcgaagccaacaaccactcctgcccctcgtccacccaccccagcccctactatcgcttcacagccattgagcttgcggccagaggcctgtagacctgccgcaggcggtgccgtccacactcgcggattggatttcgcctgtgatatttatatttgggcaccactagccggcacgtgcggtgtgcttctgttatcattagtaattaccctctattgtaatcacaggaatcggaggcgagtttgcaaatgcccacgaccagtggtgaaatcaggcgataagccttccctgtctgcccgctatgtgtag

SEQ ID NO: 120838 - DNA, 708 bp, Artificial Sequence
  derived and/or modified sequence
atggccttgcccgtcaccgctctcctgctgcccctggccctgctccttcatgctgctcgaccttcccagttccgggtaagccctctcgataggacctggaatttgggtgagactgttgagttaaagtgccaggtgttgttgagcaaccccacctccggctgctcctggctgtttcagcccaggggggctgccgcatcacccactttcctgttgtatctgagccaaaataaacctaaggctgcggagggacttgatacccaaagattttcaggaaagagactgggggatacattcgtgctgaccctgtccgactttagacgggaaaatgagggctattacttctgtagtgccctgagcaattccatcatgtactttagccatttcgtgccggttttcttacccgctaaacctacgacgactcctgccccaagaccacctacccccgcacctacaatagctagccagcctctttccctaaggcctgaagcctgcagaccagccgctgggggagccgtccacacccggggactggacttcgcgtgcgacatttacatatgggcgccactagcgggtacttgcggggtcctattactgagccttgttattacgctatattgcaaccaccgcaatcgacggagggtttgtaagtgtccacgtccagtcgtgaaaagcggcgataaaccctctctaagcgcgagatacgtctag

SEQ ID NO: 120839 - DNA, 708 bp, Artificial Sequence
  derived and/or modified sequence
atggccctgccagtgacagcgctgctcctgccgctggctcttctgttacacgcggctaggccttcccaattccgggttagcccccttgatagaacttggaaccttggggaaactgtagaattgaagtgccaggtgttgctgagtaatcctacgtctggctgctcttggctttttcagccgagaggcgctgcagcttcccctactttcttgctgtacctctcacagaacaaacctaaagccgctgagggcctggatacccagagattctctggcaaacgtttaggagatacatttgtcctaactctatcagacttcagaagagaaaatgagggctattacttttgcagcgcactgtcaaacagcatcatgtacttttctcactttgtccccgtgtttctcccagcaaaaccaaccaccaccccagcacctaggccacccacccccgctccaaccatagccagccagcccctgtcactccgaccggaggcatgtcgtccggcagctggcggagccgtccacaccaggggtttagacttcgcatgtgatatttacatctgggcgccactggccggaacctgcggagtcctactgctgtcactagtgatcaccctgtattgcaaccatagaaatcgacgtagggtctgcaagtgtcccaggccagtggttaaatccggagacaagcctagtttgagcgctaggtatgtttag

SEQ ID NO: 120840 - DNA, 597 bp, Artificial Sequence
  derived and/or modified sequence
atggctcttcctgtgactgctttacttctcccactagccctgctgctgcatgctgcgaggccgagccagttcagagtaagccccctcgatcgtacttggaatctaggagagaccgtggaactgaaatgtcaggttttactttctaaccctacctcaggatgcagctggttgttccagcctcgcggagccgctgcatcacccacgttcctcctgtacctgagccagaacaagcccaaggccgctgagggcctcgacacccagagattcagcggcaaaagattaggcgacaccttcgttctgacattatccgactttcgcagggaaaacgaaggctactacttctgcagcgcactgtccaactcaataatgtactttagccacttcgttccggttttcttgccagtgcatacccggggattggattttgcctgcgatatatacatttgggcccctctcgcaggtacctgtggagtattgttgctgagtctcgtgatcaccctgtactgtaatcacagaaacaggcggcgagtgtgtaagtgccccagacccgtcgtgaaaagcggggataagcccagcctgtccgccaggtacgtatag

SEQ ID NO: 120841 - DNA, 663 bp, Artificial Sequence
  derived and/or modified sequence
atggccctccctgtgaccgcacttctgctccctcttgccctgctgcttcacgctgcgagacccagccagttccgggtgtctccactcgatcgaacatggaacctcggcgagaccgtggaattgaagtgccaagtgctgttgagcaacccaacgagtgggtgtagctggctctttcagccgcgaggcgcagctgcctcacccacctttctgctgtacctgtcccagaacaagcctaaggccgcagagggacttgatactctttcagatttccggagagaaaatgaaggctactacttctgttcagctctttctaactccattatgtacttttcccacttcgtgccagtctttttacccgctaagccaacgactacccctgctccacggccacccacccccgcaccgaccatagctagccagcccctgagtctcaggcctgaggcctgtcggcctgccgcagggggagcagtgcatactagaggactggatttcgcctgtgatatctatatttgggcacctttggcagggacctgtggcgtgctgttactctctctggtgattaccttatactgtaatcacaggaaccgtcgacgtgtttgtaaatgtccgcgaccagtcgtgaagtctggtgacaagccatccctttcagcgaggtacgtgtag

SEQ ID NO: 120842 - DNA, 831 bp, Artificial Sequence
  derived and/or modified sequence
atgagaaatcaagccccaggccgtcctaaaggcgcaacatttccaccgcgtcggcctaccggttctcgcgctcctcccctcgcacccgagctcagagctaagcagcgtccgggagagagggtaatggccctacctgtgactgctctccttctccctctggccctgctgctgcacgccgctcgcccttcgcaattcagagtgtcacctctcgatcgcacctggaacctgggagaaacagtggagcttaaatgtcaggtgctactgtccaaccccacgagtggatgctcctggctctttcagcccaggggagcagctgcctcaccgacttttctcctgtacctgagccagaacaagcctaaggccgcagagggcctggatacccagcggttcagcggaaagagactgggagacacctttgttctgacactctctgacttcagaagggagaacgaaggctactatttctgtagcgccttatcgaacagtattatgtatttctctcacttcgttccagtgtttttgcctgctaaacccactacaactccagctcccagaccccctacgcctgcacccactatcgcgagtcagccactcagcttgcgccctgaggcctgtaggcctgcagccggtggtgcagtccacacacgtggcctggattttgcctgtgatatttacatttgggcccctctagccggaacctgcggggtcttactgctaagccttgtgatcaccctgtattgtaatcaccgcaataggaggcgtgtgtgcaaatgtccccgtcctgttgtcaagagcggggacaaacctagccttagcgctcggtacgtgtag

SEQ ID NO: 120843 - DNA, 2873 bp, Artificial Sequence
  derived and/or modified sequence
gaatttccatccagcaatgcaggccatgggaggctgcagcagtgacgctgtcagatcccctttgtgagaataataatttttataacaacgtggctggaggactgatcaggagagagactggtgtgaattgaaggctgttgcaatggctccaagaagagatgaggctgtgtggtgagtttagccgctggatgaaaggccggaagaatgaggtcagcagcgcactgacaccgacacccaaagcttcggctgctgccgctctcatggaaatctcctgggggaagggagagggtccttcctcggtgaaaactggggctgctctagcgagttcctcagaagcgggcaggtcgctagttcctcttccttttcagccctcagtgcccattttgccaataaaaagtcccaaggtgacagtacaagagacgcctttagtgaaggcaaaggaagggacactcccctcctttgctgcctactctcgccctcacttcttgaaatctttggtctcccttcacccactctgtcactctcacaagacaaccatttccaaggactatttccaagcccttttcctcatccccaaacccgcagttttcagctgcccccagttgcctggccaggctgcctcgacggccctattcacgggccccagcctcctcgccgggctggaaggcgacaaccgcgaaaaggagggtgactctcctcggcgggggcttcgggtgacatcacatcctccaaatgcgaaatcaggctccgggccggccgaagggcgcaactttcccccctcggcgccccaccggctcccgcgcgcctcccctcgcgcccgagcttcgagccaagcagcgtcctggggagcgcgtcatggccttaccagtgaccgccttgctcctgccgctggccttgctgctccacgccgccaggccgagccagttccgggtgtcgccgctggatcggacctggaacctgggcgagacagtggagctgaagtgccaggtgctgctgtccaacccgacgtcgggctgctcgtggctcttccagccgcgcggcgccgccgccagtcccaccttcctcctatacctctcccaaaacaagcccaaggcggccgaggggctggacacccagcggttctcgggcaagaggttgggggacaccttcgtcctcaccctgagcgacttccgccgagagaacgagggctactatttctgctcggccctgagcaactccatcatgtacttcagccacttcgtgccggtcttcctgccagcgaagcccaccacgacgccagcgccgcgaccaccaacaccggcgcccaccatcgcgtcgcagcccctgtccctgcgcccagaggcgtgccggccagcggcggggggcgcagtgcacacgagggggctggacttcgcctgtgatatctacatctgggcgcccttggccgggacttgtggggtccttctcctgtcactggttatcaccctttactgcaaccacaggaaccgaagacgtgtttgcaaatgtccccggcctgtggtcaaatcgggagacaagcccagcctttcggcgagatacgtctaaccctgtgcaacagccactacattacttcaaactgagatccttccttttgagggagcaagtccttccctttcattttttccagtcttcctccctgtgtattcattctcatgattattattttagtgggggcggggtgggaaagattactttttctttatgtgtttgacgggaaacaaaactaggtaaaatctacagtacaccacaagggtcacaatactgttgtgcgcacatcgcggtagggcgtggaaaggggcaggccagagctacccgcagagttctcagaatcatgctgagagagctggaggcacccatgccatctcaacctcttccccgcccgttttacaaagggggaggctaaagcccagagacagcttgatcaaaggcacacagcaagtcagggttggagcagtagctggagggaccttgtctcccagctcagggctctttcctccacaccattcaggtctttctttccgaggcccctgtctcagggtgaggtgcttgagtctccaacggcaagggaacaagtacttcttgatacctgggatactgtgcccagagcctcgaggaggtaatgaattaaagaagagaactgcctttggcagagttctataatgtaaacaatatcagactttttttttttataatcaagcctaaaattgtatagacctaaaataaaatgaagtggtgagcttaaccctggaaaatgaatccctctatctctaaagaaaatctctgtgaaacccctatgtggaggcggaattgctctcccagcccttgcattgcagaggggcccatgaaagaggacaggctacccctttacaaatagaatttgagcatcagtgaggttaaactaaggccctcttgaatctctgaatttgagatacaaacatgttcctgggatcactgatgactttttatactttgtaaagacaattgttggagagcccctcacacagccctggcctctgctcaactagcagatacagggatgaggcagacctgactctcttaaggaggctgagagcccaaactgctgtcccaaacatgcacttccttgcttaaggtatggtacaagcaatgcctgcccattggagagaaaaaacttaagtagataaggaaataagaaccactcataattcttcaccttaggaataatctcctgttaatatggtgtacattcttcctgattattttctacacatacatgtaaaatatgtctttcttttttaaatagggttgtactatgctgttatgagtggctttaatgaataaacatttgtagcatcctctttaatgggtaaacagca

SEQ ID NO: 120844 - DNA, 3048 bp, Artificial Sequence
  derived and/or modified sequence
ctctgtaaaataaatgcgctgggccggatcttttctgagttctcttctcccctacgaattctagatccctcctctgtcctccctgcgccagggaccttcgggcgacccttccctgtacccccaccccaccctctctggaccccgtttctgcctcagtacggcgcgctgagctctgccccctgcccaggccctgaccccctcaggagccgcggtttcctggggtaacagtgggaaacgtgtcggccgtctccgctcaggcgcttgctgtgtacagaaaggctgattcaggcacaccggctctcgtcgccttggtggccctccccagccctcctccgcgcctgctccgggtggcgctccgctgggctcctcgtgcgcctgtccgcgaccgcacccacctcatcctggcacccccatcgtggcatcacgtgttccctcatctgtcctcatggctggcgtgcccctctgcggtgagacctgcagaacaggaattggtgccgggtcagcagccggcgatgaagccggacgaagcctgcaaaccccacccatacgccagcttcacatagctcctatccattgcacagcagcgtggggaagcaccgttctctaccctccaaacaaaagcatgaaccaggtgcagtggctcacgtctgtaatcccagcattttggaggccaaggtggatggatggattccttgagtccaggagttcaagaccagcctgggcaacatggtgaacccccatctctacaaaaatttagccagttttcagctgcccccagttgcctggccaggctgcctcgacggccctattcacgggccccagcctcctcgccgggctggaaggcgacaaccgcgaaaaggagggtgactctcctcggcgggggcttcgggtgacatcacatcctccaaatgcgaaatcaggctccgggccggccgaagggcgcaactttcccccctcggcgccccaccggctcccgcgcgcctcccctcgcgcccgagcttcgagccaagcagcgtcctggggagcgcgtcatggccttaccagtgaccgccttgctcctgccgctggccttgctgctccacgccgccaggccgagccagttccgggtgtcgccgctggatcggacctggaacctgggcgagacagtggagctgaagtgccaggtgctgctgtccaacccgacgtcgggctgctcgtggctcttccagccgcgcggcgccgccgccagtcccaccttcctcctatacctctcccaaaacaagcccaaggcggccgaggggctggacacccagcggttctcgggcaagaggttgggggacaccttcgtcctcaccctgagcgacttccgccgagagaacgagggctactatttctgctcggccctgagcaactccatcatgtacttcagccacttcgtgccggtcttcctgccagcgaagcccaccacgacgccagcgccgcgaccaccaacaccggcgcccaccatcgcgtcgcagcccctgtccctgcgcccagaggcgtgccggccagcggcggggggcgcagtgcacacgagggggctggacttcgcctgtgatatctacatctgggcgcccttggccgggacttgtggggtccttctcctgtcactggttatcaccctttactgcaaccacaggaaccgaagacgtgtttgcaaatgtccccggcctgtggtcaaatcgggagacaagcccagcctttcggcgagatacgtctaaccctgtgcaacagccactacattacttcaaactgagatccttccttttgagggagcaagtccttccctttcattttttccagtcttcctccctgtgtattcattctcatgattattattttagtgggggcggggtgggaaagattactttttctttatgtgtttgacgggaaacaaaactaggtaaaatctacagtacaccacaagggtcacaatactgttgtgcgcacatcgcggtagggcgtggaaaggggcaggccagagctacccgcagagttctcagaatcatgctgagagagctggaggcacccatgccatctcaacctcttccccgcccgttttacaaagggggaggctaaagcccagagacagcttgatcaaaggcacacagcaagtcagggttggagcagtagctggagggaccttgtctcccagctcagggctctttcctccacaccattcaggtctttctttccgaggcccctgtctcagggtgaggtgcttgagtctccaacggcaagggaacaagtacttcttgatacctgggatactgtgcccagagcctcgaggaggtaatgaattaaagaagagaactgcctttggcagagttctataatgtaaacaatatcagactttttttttttataatcaagcctaaaattgtatagacctaaaataaaatgaagtggtgagcttaaccctggaaaatgaatccctctatctctaaagaaaatctctgtgaaacccctatgtggaggcggaattgctctcccagcccttgcattgcagaggggcccatgaaagaggacaggctacccctttacaaatagaatttgagcatcagtgaggttaaactaaggccctcttgaatctctgaatttgagatacaaacatgttcctgggatcactgatgactttttatactttgtaaagacaattgttggagagcccctcacacagccctggcctctgctcaactagcagatacagggatgaggcagacctgactctcttaaggaggctgagagcccaaactgctgtcccaaacatgcacttccttgcttaaggtatggtacaagcaatgcctgcccattggagagaaaaaacttaagtagataaggaaataagaaccactcataattcttcaccttaggaataatctcctgttaatatggtgtacattcttcctgattattttctacacatacatgtaaaatatgtctttcttttttaaatagggttgtactatgctgttatgagtggctttaatgaataaacatttgtagcatcctctttaatgggtaaacagc

SEQ ID NO: 120845 - DNA, 597 bp, Artificial Sequence
  derived and/or modified sequence
atggccttaccagtgaccgccttgctcctgccgctggccttgctgctccacgccgccaggccgagccagttccgggtgtcgccgctggatcggacctggaacctgggcgagacagtggagctgaagtgccaggtgctgctgtccaacccgacgtcgggctgctcgtggctcttccagccgcgcggcgccgccgccagtcccaccttcctcctatacctctcccaaaacaagcccaaggcggccgaggggctggacacccagcggttctcgggcaagaggttgggggacaccttcgtcctcaccctgagcgacttccgccgagagaacgagggctactatttctgctcggccctgagcaactccatcatgtacttcagccacttcgtgccggtcttcctgccagtgcacacgagggggctggacttcgcctgtgatatctacatctgggcgcccttggccgggacttgtggggtccttctcctgtcactggttatcaccctttactgcaaccacaggaaccgaagacgtgtttgcaaatgtccccggcctgtggtcaaatcgggagacaagcccagcctttcggcgagatacgtctaa

SEQ ID NO: 120846 - DNA, 2091 bp, Artificial Sequence
  derived and/or modified sequence
gaaatcaggctccgggccggccgaagggcgcaactttcccccctcggcgccccaccggctcccgcgcgcctcccctcgcgcccgagcttcgagccaagcagcgtcctggggagcgcgtcatggccttaccagtgaccgccttgctcctgccgctggccttgctgctccacgccgccaggccgagccagttccgggtgtcgccgctggatcggacctggaacctgggcgagacagtggagctgaagtgccaggtgctgctgtccaacccgacgtcgggctgctcgtggctcttccagccgcgcggcgccgccgccagtcccaccttcctcctatacctctcccaaaacaagcccaaggcggccgaggggctggacaccctgagcgacttccgccgagagaacgagggctactatttctgctcggccctgagcaactccatcatgtacttcagccacttcgtgccggtcttcctgccagcgaagcccaccacgacgccagcgccgcgaccaccaacaccggcgcccaccatcgcgtcgcagcccctgtccctgcgcccagaggcgtgccggccagcggcggggggcgcagtgcacacgagggggctggacttcgcctgtgatatctacatctgggcgcccttggccgggacttgtggggtccttctcctgtcactggttatcaccctttactgcaaccacaggaaccgaagacgtgtttgcaaatgtccccggcctgtggtcaaatcgggagacaagcccagcctttcggcgagatacgtctaaccctgtgcaacagccactacattacttcaaactgagatccttccttttgagggagcaagtccttccctttcattttttccagtcttcctccctgtgtattcattctcatgattattattttagtgggggcggggtgggaaagattactttttctttatgtgtttgacgggaaacaaaactaggtaaaatctacagtacaccacaagggtcacaatactgttgtgcgcacatcgcggtagggcgtggaaaggggcaggccagagctacccgcagagttctcagaatcatgctgagagagctggaggcacccatgccatctcaacctcttccccgcccgttttacaaagggggaggctaaagcccagagacagcttgatcaaaggcacacagcaagtcagggttggagcagtagctggagggaccttgtctcccagctcagggctctttcctccacaccattcaggtctttctttccgaggcccctgtctcagggtgaggtgcttgagtctccaacggcaagggaacaagtacttcttgatacctgggatactgtgcccagagcctcgaggaggtaatgaattaaagaagagaactgcctttggcagagttctataatgtaaacaatatcagactttttttttttataatcaagcctaaaattgtatagacctaaaataaaatgaagtggtgagcttaaccctggaaaatgaatccctctatctctaaagaaaatctctgtgaaacccctatgtggaggcggaattgctctcccagcccttgcattgcagaggggcccatgaaagaggacaggctacccctttacaaatagaatttgagcatcagtgaggttaaactaaggccctcttgaatctctgaatttgagatacaaacatgttcctgggatcactgatgactttttatactttgtaaagacaattgttggagagcccctcacacagccctggcctctgctcaactagcagatacagggatgaggcagacctgactctcttaaggaggctgagagcccaaactgctgtcccaaacatgcacttccttgcttaaggtatggtacaagcaatgcctgcccattggagagaaaaaacttaagtagataaggaaataagaaccactcataattcttcaccttaggaataatctcctgttaatatggtgtacattcttcctgattattttctacacatacatgtaaaatatgtctttcttttttaaatagggttgtactatgctgttatgagtggctttaatgaataaacatttgtagcatcctctttaatgggtaaacagc

SEQ ID NO: 120847 - DNA, 1230 bp, Artificial Sequence
  derived and/or modified sequence
gaatttccatccagcaatgcaggccatgggaggctgcagcagtgacgctgtcagatcccctttgtgagaataataatttttataacaacgtggctggaggactgatcaggagagagactggtgtgaattgaaggctgttgcaatggctccaagaagagatgaggctgtgtgttttcagctgcccccagttgcctggccaggctgcctcgacggccctattcacgggccccagcctcctcgccgggctggaaggcgacaaccgcgaaaaggagggtgactctcctcggcgggggcttcgggtgacatcacatcctccaaatgcgaaatcaggctccgggccggccgaagggcgcaactttcccccctcggcgccccaccggctcccgcgcgcctcccctcgcgcccgagcttcgagccaagcagcgtcctggggagcgcgtcatggccttaccagtgaccgccttgctcctgccgctggccttgctgctccacgccgccaggccgagccagttccgggtgtcgccgctggatcggacctggaacctgggcgagacagtggagctgaagtgccaggtgctgctgtccaacccgacgtcgggctgctcgtggctcttccagccgcgcggcgccgccgccagtcccaccttcctcctatacctctcccaaaacaagcccaaggcggccgaggggctggacacccagcggttctcgggcaagaggttgggggacaccttcgtcctcaccctgagcgacttccgccgagagaacgagggctactatttctgctcggccctgagcaactccatcatgtacttcagccacttcgtgccggtcttcctgccagcgaagcccaccacgacgccagcgccgcgaccaccaacaccggcgcccaccatcgcgtcgcagcccctgtccctgcgcccagaggcgtgccggccagcggcggggggcgcagtgcacacgagggggctggacttcgcctgtgatatctacatctgggcgcccttggccgggacttgtggggtccttctcctgtcactggttatcaccctttactgcaaccacaggaaccgaagacgtgtttgcaaatgtccccggcctgtggtcaaatcgggagacaagcccagcctttcggcgagatacgtctaaccctgtgcaacagccactacattacttcaaactgagatccttccttttgagggagcaagtccttccctttcattttttcca

SEQ ID NO: 120848 - DNA, 708 bp, Artificial Sequence
  derived and/or modified sequence
atggccctgcccgtgaccgccctgctgctgcccctggccctgctgctgcacgccgccagacccagccagttcagagtgagccccctggacagaacctggaacctgggcgagaccgtggagctgaagtgccaggtgctgctgagcaaccccaccagcggctgcagctggctgttccagcccagaggcgccgccgccagccccaccttcctgctgtacctgagccagaacaagcccaaggccgccgagggcctggacacccagagattcagcggcaagagactgggcgacaccttcgtgctgaccctgagcgacttcagaagagagaacgagggctactacttctgcagcgccctgagcaacagcatcatgtacttcagccacttcgtgcccgtgttcctgcccgccaagcccaccaccacccccgcccccagaccccccacccccgcccccaccatcgccagccagcccctgagcctgagacccgaggcctgcagacccgccgccggcggcgccgtgcacaccagaggcctggacttcgcctgcgacatctacatctgggcccccctggccggcacctgcggcgtgctgctgctgagcctggtgatcaccctgtactgcaaccacagaaacagaagaagagtgtgcaagtgccccagacccgtggtgaagagcggcgacaagcccagcctgagcgccagatacgtgtag

SEQ ID NO: 120849 - DNA, 597 bp, Artificial Sequence
  derived and/or modified sequence
atggccctgcccgtgaccgccctgctgctgcccctggccctgctgctgcacgccgccagacccagccagttcagagtgagccccctggacagaacctggaacctgggcgagaccgtggagctgaagtgccaggtgctgctgagcaaccccaccagcggctgcagctggctgttccagcccagaggcgccgccgccagccccaccttcctgctgtacctgagccagaacaagcccaaggccgccgagggcctggacacccagagattcagcggcaagagactgggcgacaccttcgtgctgaccctgagcgacttcagaagagagaacgagggctactacttctgcagcgccctgagcaacagcatcatgtacttcagccacttcgtgcccgtgttcctgcccgtgcacaccagaggcctggacttcgcctgcgacatctacatctgggcccccctggccggcacctgcggcgtgctgctgctgagcctggtgatcaccctgtactgcaaccacagaaacagaagaagagtgtgcaagtgccccagacccgtggtgaagagcggcgacaagcccagcctgagcgccagatacgtgtag

SEQ ID NO: 120850 - DNA, 663 bp, Artificial Sequence
  derived and/or modified sequence
atggccctgcccgtgaccgccctgctgctgcccctggccctgctgctgcacgccgccagacccagccagttcagagtgagccccctggacagaacctggaacctgggcgagaccgtggagctgaagtgccaggtgctgctgagcaaccccaccagcggctgcagctggctgttccagcccagaggcgccgccgccagccccaccttcctgctgtacctgagccagaacaagcccaaggccgccgagggcctggacaccctgagcgacttcagaagagagaacgagggctactacttctgcagcgccctgagcaacagcatcatgtacttcagccacttcgtgcccgtgttcctgcccgccaagcccaccaccacccccgcccccagaccccccacccccgcccccaccatcgccagccagcccctgagcctgagacccgaggcctgcagacccgccgccggcggcgccgtgcacaccagaggcctggacttcgcctgcgacatctacatctgggcccccctggccggcacctgcggcgtgctgctgctgagcctggtgatcaccctgtactgcaaccacagaaacagaagaagagtgtgcaagtgccccagacccgtggtgaagagcggcgacaagcccagcctgagcgccagatacgtgtag

SEQ ID NO: 120851 - DNA, 831 bp, Artificial Sequence
  derived and/or modified sequence
atgagaaaccaggcccccggcagacccaagggcgccaccttcccccccagaagacccaccggcagcagagccccccccctggcccccgagctgagagccaagcagagacccggcgagagagtgatggccctgcccgtgaccgccctgctgctgcccctggccctgctgctgcacgccgccagacccagccagttcagagtgagccccctggacagaacctggaacctgggcgagaccgtggagctgaagtgccaggtgctgctgagcaaccccaccagcggctgcagctggctgttccagcccagaggcgccgccgccagccccaccttcctgctgtacctgagccagaacaagcccaaggccgccgagggcctggacacccagagattcagcggcaagagactgggcgacaccttcgtgctgaccctgagcgacttcagaagagagaacgagggctactacttctgcagcgccctgagcaacagcatcatgtacttcagccacttcgtgcccgtgttcctgcccgccaagcccaccaccacccccgcccccagaccccccacccccgcccccaccatcgccagccagcccctgagcctgagacccgaggcctgcagacccgccgccggcggcgccgtgcacaccagaggcctggacttcgcctgcgacatctacatctgggcccccctggccggcacctgcggcgtgctgctgctgagcctggtgatcaccctgtactgcaaccacagaaacagaagaagagtgtgcaagtgccccagacccgtggtgaagagcggcgacaagcccagcctgagcgccagatacgtgtag

SEQ ID NO: 120852 - protein, 228 aa, Artificial Sequence
  derived and/or modified sequence
MPVKGGTKCIKYLLFGFNFIFWLAGIAVLAIGLWLRFDSQTKSIFEQETNNNNSSFYTGVYILIGAGALMMLVGFLGCCGAVQESQCMLGLFFGFLLVIFAIEIAAAIWGYSHKDEVIKEVQEFYKDTYNKLKTKDEPQRETLKAIHYALNCCGLAGGVEQFISDICPKKDVLETFTVKSCPDAIKEVFDNKFHIIGAVGIGIAVVMIFGMIFSMILCCAIRRNREMV

SEQ ID NO: 120853 - protein, 159 aa, Artificial Sequence
  derived and/or modified sequence
MMLVGFLGCCGAVQESQCMLGLFFGFLLVIFAIEIAAAIWGYSHKDEVIKEVQEFYKDTYNKLKTKDEPQRETLKAIHYALNCCGLAGGVEQFISDICPKKDVLETFTVKSCPDAIKEVFDNKFHIIGAVGIGIAVVMIFGMIFSMILCCAIRRNREMV

SEQ ID NO: 120854 - protein, 228 aa, Artificial Sequence
  derived and/or modified sequence
MPVKGGTKCIKYLLFGFNFIFWLAGIAVLAIGLWLRFDSQTKSIFEQETNNNNSSFYTGVYILIGAGALMMLVGFLGCCGAVQESQCMLGLATKRTMFPPFLEDHVCFFSLNPQFFGFLLVIFAIEIAAAIWGYSHKDEVIKEVQEFYKDTYNKLKTKDEPQRETLKAIHYALNCCGLAGGVEQFISDICPKKDVLETFTVKSCPDAIKEVFDNKFHIIGAVGIGIAV

SEQ ID NO: 120855 - protein, 141 aa, Artificial Sequence
  derived and/or modified sequence
MLGLFFGFLLVIFAIEIAAAIWGYSHKDEVIKEVQEFYKDTYNKLKTKDEPQRETLKAIHYALNCCGLAGGVEQFISDICPKKDVLETFTVKSCPDAIKEVFDNKFHIIGAVGIGIAVVMIFGMIFSMILCCAIRRNREMV

SEQ ID NO: 120856 - DNA, 687 bp, Artificial Sequence
  derived and/or modified sequence
atgcccgtgaaaggaggtaccaaatgtatcaagtatctgctgttcggttttaatttcatcttctggcttgccgggatcgccgtgctggcaatcggactgtggctgagattcgatagtcagactaagtctatttttgaacaagagaccaataataacaactcaagtttctatacgggagtgtatattctgatcggtgcaggtgccctcatgatgctggtgggcttcctaggttgctgcggagccgtacaggaatctcagtgcatgctgggactcttctttggctttctcctggtcatcttcgccatcgaaatcgctgcagctatttggggctactctcacaaagacgaggtgatcaaagaggtgcaggagttctacaaggatacttacaataagttgaaaacaaaggatgagccccagcgggagaccctgaaggccattcattatgctttaaactgttgcggtctggcagggggcgtcgagcagttcatttccgacatctgccccaaaaaagacgtgctggagacttttacagtgaagagttgcccagatgccataaaggaagtctttgacaacaaattccatatcataggagctgtcggaatcggcatcgccgtggtaatgatctttggcatgatttttagcatgattttatgttgcgcaatcagaagaaatcgggagatggtttag

SEQ ID NO: 120857 - DNA, 687 bp, Artificial Sequence
  derived and/or modified sequence
atgcccgttaagggcggaactaagtgcattaagtacctgctcttcggcttcaactttattttttggttggccggtatagctgtgctggcaattggattgtggctgcgatttgactcacaaactaaatctatcttcgagcaggagacgaataacaataactcctctttttacacaggcgtctacattctcattggagcaggcgctctgatgatgctggtcgggtttctgggttgttgcggagccgtacaggaatctcagtgtatgttgggcttgtttttcggtttcctactggtaatttttgccatcgagattgcggctgccatttgggggtattcccataaagacgaggtgataaaagaggtacaggagttctataaggacacctacaacaagttaaagacaaaggatgaacctcaacgggagacgctgaaggctatccattacgccctgaattgctgcgggctcgctgggggcgtggaacagttcataagtgatatttgcccgaaaaaggacgtgctggaaactttcaccgtcaagagctgtccagatgctattaaggaggtgtttgacaacaagtttcacatcatcggagctgtcggaatcggtattgccgtggttatgatttttggaatgatttttagcatgattctttgttgcgctatacgacggaatagggaaatggtttag

SEQ ID NO: 120858 - DNA, 687 bp, Artificial Sequence
  derived and/or modified sequence
atgccggtaaaagggggcacaaaatgcatcaagtacctacttttcgggtttaacttcatattttggctggctggaatcgctgttcttgcaattgggttatggctgcgatttgatagccagacaaagtcaatctttgaacaggaaacaaataataataactccagtttttacaccggggtttatatcctaatcggcgccggggcactgatgatgctcgtcggctttctgggctgctgtggggctgtccaagaatcccaatgcatgctcggccttgccacaaagcggacaatgtttccaccctttctcgaagaccatgtgtgcttcttcagcctgaatccccagtttttcggtttcctcctggtcatttttgccattgagatcgcggcagcaatctgggggtatagccacaaagacgaggttattaaagaggtgcaagagttctataaggacacatacaacaagctcaagacaaaggatgagccccagagggagacattaaaagcaattcattacgctctgaactgttgcggcctcgcggggggcgtcgagcaattcattagcgacatctgccccaagaaggacgtacttgagacttttacggtcaagtcttgtccagatgccattaaggaggttttcgataacaagtttcacattatcggtgctgttggtatcgggattgctgtgtag

SEQ ID NO: 120859 - DNA, 687 bp, Artificial Sequence
  derived and/or modified sequence
atgcctgtgaagggcggcaccaagtgcatcaagtacctgctgtttggcttcaacttcatcttctggctggccggcattgctgtgctggccatcggcctgtggctgcgctttgacagccagaccaagagcatctttgagcaggagaccaacaacaacaacagcagcttctacacaggagtgtacatcctgattggagctggggccctgatgatgctggtgggcttcctgggctgctgcggggctgtgcaggagagccagtgcatgctgggcctcttcttcggcttcctgctggtgatctttgccatcgagattgctgctgccatctggggctacagccacaaggatgaagtcatcaaggaggtgcaggagttctacaaggacacctacaacaagctgaagaccaaggatgagccccagcgggagaccctgaaggccatccactacgccctgaactgctgcggcctggccggcggcgtggagcagttcatcagtgacatctgccccaagaaggatgtgctggagaccttcaccgtgaagagctgcccagatgccatcaaggaggtgtttgacaacaagttccacatcatcggggctgtgggcattggaattgctgtggtgatgatcttcggcatgatcttctccatgatcctgtgctgtgccatcagaagaaaccgggagatggtgtag

SEQ ID NO: 120860 - DNA, 687 bp, Artificial Sequence
  derived and/or modified sequence
atgcctgtgaagggcggcaccaagtgcatcaagtacctgctgtttggcttcaacttcatcttctggctggccggcattgctgtgctggccatcggcctgtggctgcgctttgacagccagaccaagagcatctttgagcaggagaccaacaacaacaacagcagcttctacacaggagtgtacatcctgattggagctggggccctgatgatgctggtgggcttcctgggctgctgcggggctgtgcaggagagccagtgcatgctgggcctggccaccaagaggaccatgtttcctcccttcctggaggaccacgtgtgcttcttcagcctgaacccccagttcttcggcttcctgctggtgatctttgccattgaaattgctgctgccatctggggctacagccacaaggatgaggtgatcaaggaggtgcaggagttctacaaggacacctacaacaagctgaagaccaaggatgagccccagcgggagaccctgaaggccatccactacgccctgaactgctgcggcctggccggcggcgtggagcagttcatcagtgacatctgccccaagaaggatgtgctggagaccttcaccgtgaagagctgcccagatgccatcaaggaggtgtttgacaacaagttccacatcattggagctgtgggcatcggcattgctgtgtag

SEQ ID NO: 120861 - DNA, 687 bp, Artificial Sequence
  derived and/or modified sequence
atgcccgtgaagggcggcaccaagtgcatcaagtacctgctgttcggcttcaactttattttttggctggccggaattgccgtgttggccatagggctgtggttacgtttcgattcacagacgaagtctatcttcgagcaggaaaccaacaacaacaactccagtttttacactggtgtatacattcttattggcgcaggtgcgctcatgatgctggtgggatttcttggatgttgtggcgcagtgcaggaatcccagtgcatgctcggcctgttcttcggcttcctgctggttattttcgcaatcgaaattgcggccgccatctggggctactctcataaggacgaggtgattaaggaggtgcaggaattttacaaggacacgtacaataagctgaagacaaaagacgagcctcagcgtgaaactttaaaagccatccattatgccttgaattgctgtggcctggcagggggagttgaacagtttatttccgacatttgtcctaaaaaggatgttttggagacctttacggtaaagagttgtcccgatgcaatcaaggaggtgttcgataataagttccacataattggagcggtcggaatcggaatcgcggtggtcatgatctttgggatgatctttagtatgattctgtgttgcgctattagacgtaacagggagatggtatag

SEQ ID NO: 120862 - DNA, 687 bp, Artificial Sequence
  derived and/or modified sequence
atgcccgtgaagggcggcaccaagtgcatcaagtacctgctgttcggcttcaactttatcttttggcttgctggcatcgcagtgttagccattggtctttggctgaggttcgatagtcagaccaagagcatttttgagcaggagaccaataataacaactcttcattttacaccggtgtctacatactcattggcgctggggccctgatgatgctagtggggttcctcggatgctgtggcgcagttcaggagtcccagtgtatgctcggactgttttttggcttccttttggtgattttcgccatcgagatcgctgcagctatctggggttattcccacaaagacgaggtcattaaagaggtccaggagttttataaagatacctacaacaagttgaaaactaaagacgagccccagcgcgaaactctgaaggccatacactatgccttgaattgttgcggactggcaggaggagtggagcagttcatctctgatatttgtccaaagaaggatgtactggagacctttacggtgaagtcttgcccggatgctatcaaggaggttttcgataataagttccatatcataggcgccgtgggtataggcatagctgttgtcatgatttttgggatgattttctccatgattctctgctgcgccatacggaggaaccgagaaatggtgtag

SEQ ID NO: 120863 - DNA, 687 bp, Artificial Sequence
  derived and/or modified sequence
atgcccgtgaagggcggcaccaagtgcatcaagtacctgctgttcgggttcaactttatcttctggctggctggcatcgcagtcttggcaatagggctctggctccgctttgatagtcagaccaagtccatttttgagcaggagacaaacaacaataactcaagcttttacaccggtgtgtacatcctgattggcgcaggggccttaatgatgttagtcgggtttctcggttgttgcggcgccgtgcaggagtcacagtgtatgcttggtctcgctactaagcgaactatgtttcctcccttcctggaggaccacgtatgtttctttagcttgaacccccaattctttggattcttgctagtgattttcgcgattgagatcgccgcagcgatttggggatacagtcacaaggacgaggtgatcaaggaagttcaggagttttataaggacacatacaacaagcttaaaacgaaggacgagccccagagggagaccctgaaggcaatacattacgctctgaactgttgcggcctggctgggggcgtcgaacagtttatctccgacatttgcccaaagaaagacgtcttagagacctttacggtgaagtcctgccccgacgcgatcaaggaggtgtttgacaacaaatttcatatcattggtgccgtgggaattgggattgctgtgtag

SEQ ID NO: 120864 - DNA, 687 bp, Artificial Sequence
  derived and/or modified sequence
atgcccgtgaagggcggaaccaaatgcattaagtacctgctcttcggatttaatttcattttttggttagccggtattgcggtcctggcaataggactctggttgagatttgattcccagacgaagtccatctttgagcaggaaaccaataataacaacagtagcttctacaccggtgtgtacattctcatcggagccggagccctgatgatgctggtgggcttcctgggttgctgcggcgcagtacaggaatcacaatgcatgctgggtctattcttcggttttctcctggtaatcttcgctatcgaaattgccgcagcaatttggggttacagccataaggacgaggtgataaaagaagtccaggagttttataaggacacttacaacaagctaaagacaaaagacgaaccacagagagaaacactgaaagccattcattatgccctgaattgctgcggacttgctgggggagtcgagcagtttatcagtgatatatgcccgaagaaggatgtactggaaacatttaccgtaaaaagctgtccagacgcaatcaaagaagtcttcgacaacaagttccatatcatcggcgcagtcggaattggaatcgcagttgtgatgatctttggcatgatcttctccatgatactttgctgtgcgattcgaagaaatagggaaatggtgtag

SEQ ID NO: 120865 - DNA, 687 bp, Artificial Sequence
  derived and/or modified sequence
atgcctgtgaagggtggtacaaagtgtatcaaatacttgctcttcggttttaacttcatcttttggttagctggcatcgcagtcttagccattggcctgtggcttcggttcgactctcaaactaagagtattttcgaacaagagactaacaataacaactctagtttttatactggtgtgtacatcctgattggagcgggagccctgatgatgctcgtggggttcctagggtgctgtggcgctgtgcaagagagccagtgcatgcttggcctcttcttcggatttttactcgttatcttcgccattgaaattgctgcagctatttggggctatagccataaggatgaggtgatcaaggaagtgcaggaattctacaaagacacatacaataaactgaaaaccaaagatgagccgcagagggagactttaaaggcaattcattatgccttaaattgctgcggcttagctggcggtgtggagcagtttatctcagatatctgcccgaagaaagatgttttagaaacgttcacggtcaagagttgtcccgacgccattaaagaagtgtttgacaacaagttccacatcatcggtgcagtgggcatcggaattgctgtagtgatgatctttggcatgattttcagcatgatcctttgctgcgcgattcgtcgtaaccgggagatggtgtag

SEQ ID NO: 120866 - DNA, 687 bp, Artificial Sequence
  derived and/or modified sequence
atgccagtgaaaggcggtaccaagtgcatcaagtacctgctatttggctttaacttcatcttttggcttgctggaattgccgtcctcgccattgggctgtggctgcggtttgattcacaaaccaagagcatcttcgagcaggagacgaataacaataacagttctttttacaccggcgtctatatactaataggggctggagctctgatgatgcttgtaggctttctgggatgctgcggcgctgtccaggaatcacagtgcatgctgggactcgcaaccaaacggacgatgttcccccctttcctagaggaccatgtgtgttttttctcactgaacccccagtttttcggattcctcctggtcattttcgcaattgaaatagccgctgctatctggggctattcacacaaagacgaggtaattaaggaagtgcaggaattctataaagacacttacaataagctcaagaccaaagatgagccccaaagggaaacgctgaaggccattcactatgccttaaactgttgtggactcgccggaggcgtagaacagttcatctcagacatatgtccgaaaaaggatgtactcgagaccttcacagtgaagtcttgcccagatgccattaaagaagtcttcgacaacaaattccatatcatcggagctgtggggatcggcatcgcagtttag

SEQ ID NO: 120867 - DNA, 687 bp, Artificial Sequence
  derived and/or modified sequence
atgcctgttaaaggaggtaccaaatgcattaaatatctactgttcggcttcaattttattttctggttagcaggaatagccgtcctcgcaatcgggctctggctcagatttgacagccaaactaaatccatttttgagcaggaaaccaacaacaacaattcgagtttttacaccggagtgtatattctgatcggagcaggagcattaatgatgttagtgggctttttggggtgttgtggagcagtccaggagtcgcagtgcatgctgggattattctttgggtttctcctggtaatatttgctatcgagattgctgccgcaatttggggatactcccacaaggatgaagtgataaaggaagtccaggaattctataaagatacctacaacaagctaaagaccaaagacgaacctcagagagagaccttaaaggcaattcattatgctctcaattgttgcggacttgccggaggagtggagcagtttatatcagatatctgcccaaagaaggacgtgttagaaactttcacagtgaaaagttgtcctgacgcaataaaggaagtcttcgacaataagtttcacatcattggtgcagttggaatcgggatagcggtggtgatgatattcggcatgatcttctcaatgattctatgctgcgcgatccgccgtaacagagagatggtttag

SEQ ID NO: 120868 - DNA, 687 bp, Artificial Sequence
  derived and/or modified sequence
atgcccgtaaaaggtgggaccaaatgcattaagtatcttttatttggattcaattttattttctggctcgccggtatcgccgtcctcgccattggcctgtggttacgatttgactcccagactaagagcatctttgaacaggaaacaaacaataacaatagcagtttctacaccggtgtgtacatcttaataggagcgggcgccttgatgatgctcgtgggttttcttggctgttgtggggccgtgcaggaaagccaatgcatgctcggcttattttttggctttttacttgtgatattcgcaattgaaatcgctgcagctatctgggggtactctcacaaggacgaggtgattaaggaggtgcaggaattttacaaagacacatacaacaagttgaagactaaggacgaacctcaacgcgaaactctcaaagctatccactacgccctcaattgttgtggcctcgcaggtggagtagaacaatttatctccgatatttgtcccaagaaagacgtactcgagacgttcactgttaaaagctgcccggacgcaattaaagaagtgtttgacaataaatttcacatcattggggcagttggtattggtattgctgttgtaatgatatttggcatgatcttttctatgatcttatgttgcgccatccgaaggaacagggaaatggtttag

SEQ ID NO: 120869 - DNA, 1169 bp, Artificial Sequence
  derived and/or modified sequence
cgcgccccccagtcccgcacccgttcggcccaggctaagttagccctcaccatgccggtcaaaggaggcaccaagtgcatcaaatacctgctgttcggatttaacttcatcttctggcttgccgggattgctgtccttgccattggactatggctccgattcgactctcagaccaagagcatcttcgagcaagaaactaataataataattccagcttctacacaggagtctatattctgatcggagccggcgccctcatgatgctggtgggcttcctgggctgctgcggggctgtgcaggagtcccagtgcatgctgggactgttcttcggcttcctcttggtgatattcgccattgaaatagctgcggccatctggggatattcccacaaggatgaggtgattaaggaagtccaggagttttacaaggacacctacaacaagctgaaaaccaaggatgagccccagcgggaaacgctgaaagccatccactatgcgttgaactgctgtggtttggctgggggcgtggaacagtttatctcagacatctgccccaagaaggacgtactcgaaaccttcaccgtgaagtcctgtcctgatgccatcaaagaggtcttcgacaataaattccacatcatcggcgcagtgggcatcggcattgccgtggtcatgatatttggcatgatcttcagtatgatcttgtgctgtgctatccgcaggaaccgcgagatggtctagagtcagcttacatccctgagcaggaaagtttacccatgaagattggtgggattttttgtttgtttgttttgttttgtttgttgtttgttgtttgtttttttgccactaattttagtattcattctgcattgctagataaaagctgaagttactttatgtttgtcttttaatgcttcattcaatattgacatttgtagttgagcggggggtttggtttgctttggtttatattttttcagttgtttgtttttgcttgttatattaagcagaaatcctgcaatgaaaggtactatatttgctagactctagacaagatattgtacataaaagaatttttttgtctttaaatagatacaaatgtctatcaactttaatcaagttgtaacttatattgaagacaatttgatacataataaaaaattatgacaatg

SEQ ID NO: 120870 - DNA, 1229 bp, Artificial Sequence
  derived and/or modified sequence
gtggggagccgggccctcttgagatgaggcgtgcgggagggtcctgagcactttagctcgcctaggatttgagctggggtgtgtgtctgctcccagctcaagtccctccgagtgccagagaggaaggcagggagaagcggagcacccctctttgggccaaggccaaggaggactgtgcttgccgggattgctgtccttgccattggactatggctccgattcgactctcagaccaagagcatcttcgagcaagaaactaataataataattccagcttctacacaggagtctatattctgatcggagccggcgccctcatgatgctggtgggcttcctgggctgctgcggggctgtgcaggagtcccagtgcatgctgggactgttcttcggcttcctcttggtgatattcgccattgaaatagctgcggccatctggggatattcccacaaggatgaggtgattaaggaagtccaggagttttacaaggacacctacaacaagctgaaaaccaaggatgagccccagcgggaaacgctgaaagccatccactatgcgttgaactgctgtggtttggctgggggcgtggaacagtttatctcagacatctgccccaagaaggacgtactcgaaaccttcaccgtgaagtcctgtcctgatgccatcaaagaggtcttcgacaataaattccacatcatcggcgcagtgggcatcggcattgccgtggtcatgatatttggcatgatcttcagtatgatcttgtgctgtgctatccgcaggaaccgcgagatggtctagagtcagcttacatccctgagcaggaaagtttacccatgaagattggtgggattttttgtttgtttgttttgttttgtttgttgtttgttgtttgtttttttgccactaattttagtattcattctgcattgctagataaaagctgaagttactttatgtttgtcttttaatgcttcattcaatattgacatttgtagttgagcggggggtttggtttgctttggtttatattttttcagttgtttgtttttgcttgttatattaagcagaaatcctgcaatgaaaggtactatatttgctagactctagacaagatattgtacataaaagaatttttttgtctttaaatagatacaaatgtctatcaactttaatcaagttgtaacttatattgaagacaatttgatacataataaaaaattatgacaatg

SEQ ID NO: 120871 - DNA, 1554 bp, Artificial Sequence
  derived and/or modified sequence
ctgcccagccctcagctgtgttattattcggtgataggtatttgctaattacttccaaaagcctcccatctgtcatcccacccagactgcgcgcttctaattcctcctaccccacatgctgtgcccaatgaaaagtatggtcagcgagcgaaggtttgcaaggagacagacgagggcgaaattaagccaggcggcttccctttaaatcctcgcaaagcagaagggcccctcactctggcagcaggccttggccaaggggcctttagccctgacgacccggggaagagtctcccaaagcagaacgcccggtccggcgcccagaccaaacgcgggggaaccggaagggcgaggcctccaccgccaggtcccgccagtcccagctgcgcgcgccccccagtcccgcacccgttcggcccaggctaagttagccctcaccatgccggtcaaaggaggcaccaagtgcatcaaatacctgctgttcggatttaacttcatcttctggcttgccgggattgctgtccttgccattggactatggctccgattcgactctcagaccaagagcatcttcgagcaagaaactaataataataattccagcttctacacaggagtctatattctgatcggagccggcgccctcatgatgctggtgggcttcctgggctgctgcggggctgtgcaggagtcccagtgcatgctgggactgttcttcggcttcctcttggtgatattcgccattgaaatagctgcggccatctggggatattcccacaaggatgaggtgattaaggaagtccaggagttttacaaggacacctacaacaagctgaaaaccaaggatgagccccagcgggaaacgctgaaagccatccactatgcgttgaactgctgtggtttggctgggggcgtggaacagtttatctcagacatctgccccaagaaggacgtactcgaaaccttcaccgtgaagtcctgtcctgatgccatcaaagaggtcttcgacaataaattccacatcatcggcgcagtgggcatcggcattgccgtggtcatgatatttggcatgatcttcagtatgatcttgtgctgtgctatccgcaggaaccgcgagatggtctagagtcagcttacatccctgagcaggaaagtttacccatgaagattggtgggattttttgtttgtttgttttgttttgtttgttgtttgttgtttgtttttttgccactaattttagtattcattctgcattgctagataaaagctgaagttactttatgtttgtcttttaatgcttcattcaatattgacatttgtagttgagcggggggtttggtttgctttggtttatattttttcagttgtttgtttttgcttgttatattaagcagaaatcctgcaatgaaaggtactatatttgctagactctagacaagatattgtacataaaagaatttttttgtctttaaatagatacaaatgtctatcaactttaatcaagttgtaacttatattgaagacaatttgatacataataaaaaattatgacaatg

SEQ ID NO: 120872 - DNA, 800 bp, Artificial Sequence
  derived and/or modified sequence
cggagaccagcctacagccgcctgcatctgtatccagcgccaggtcccgccagtcccagctgcgcgcgccccccagtcccgcacccgttcggcccaggctaagttagccctcaccatgccggtcaaaggaggcaccaagtgcatcaaatacctgctgttcggatttaacttcatcttctggcttgccgggattgctgtccttgccattggactatggctccgattcgactctcagaccaagagcatcttcgagcaagaaactaataataataattccagcttctacacaggagtctatattctgatcggagccggcgccctcatgatgctggtgggcttcctgggctgctgcggggctgtgcaggagtcccagtgcatgctgggactggcaactaaaaggactatgtttcccccttttctcgaggaccacgtttgctttttttccctgaatccacagttcttcggcttcctcttggtgatattcgccattgaaatagctgcggccatctggggatattcccacaaggatgaggtgattaaggaagtccaggagttttacaaggacacctacaacaagctgaaaaccaaggatgagccccagcgggaaacgctgaaagccatccactatgcgttgaactgctgtggtttggctgggggcgtggaacagtttatctcagacatctgccccaagaaggacgtactcgaaaccttcaccgtgaagtcctgtcctgatgccatcaaagaggtcttcgacaataaattccacatcatcggcgcagtgggcatcggcattgccgtgg

SEQ ID NO: 120873 - DNA, 687 bp, Artificial Sequence
  derived and/or modified sequence
atgcccgtgaagggcggcaccaagtgcatcaagtacctgctgttcggcttcaacttcatcttctggctggccggcatcgccgtgctggccatcggcctgtggctgagattcgacagccagaccaagagcatcttcgagcaggagaccaacaacaacaacagcagcttctacaccggcgtgtacatcctgatcggcgccggcgccctgatgatgctggtgggcttcctgggctgctgcggcgccgtgcaggagagccagtgcatgctgggcctgttcttcggcttcctgctggtgatcttcgccatcgagatcgccgccgccatctggggctacagccacaaggacgaggtgatcaaggaggtgcaggagttctacaaggacacctacaacaagctgaagaccaaggacgagccccagagagagaccctgaaggccatccactacgccctgaactgctgcggcctggccggcggcgtggagcagttcatcagcgacatctgccccaagaaggacgtgctggagaccttcaccgtgaagagctgccccgacgccatcaaggaggtgttcgacaacaagttccacatcatcggcgccgtgggcatcggcatcgccgtggtgatgatcttcggcatgatcttcagcatgatcctgtgctgcgccatcagaagaaacagagagatggtgtag

SEQ ID NO: 120874 - DNA, 687 bp, Artificial Sequence
  derived and/or modified sequence
atgcccgtgaagggcggcaccaagtgcatcaagtacctgctgttcggcttcaacttcatcttctggctggccggcatcgccgtgctggccatcggcctgtggctgagattcgacagccagaccaagagcatcttcgagcaggagaccaacaacaacaacagcagcttctacaccggcgtgtacatcctgatcggcgccggcgccctgatgatgctggtgggcttcctgggctgctgcggcgccgtgcaggagagccagtgcatgctgggcctggccaccaagagaaccatgttcccccccttcctggaggaccacgtgtgcttcttcagcctgaacccccagttcttcggcttcctgctggtgatcttcgccatcgagatcgccgccgccatctggggctacagccacaaggacgaggtgatcaaggaggtgcaggagttctacaaggacacctacaacaagctgaagaccaaggacgagccccagagagagaccctgaaggccatccactacgccctgaactgctgcggcctggccggcggcgtggagcagttcatcagcgacatctgccccaagaaggacgtgctggagaccttcaccgtgaagagctgccccgacgccatcaaggaggtgttcgacaacaagttccacatcatcggcgccgtgggcatcggcatcgccgtgtag

SEQ ID NO: 120875 - protein, 556 aa, Artificial Sequence [sequence omitted]

SEQ ID NO: 120876 - protein, 363 aa, Artificial Sequence
  derived and/or modified sequence
MEVRPEEPLVVKVEEGDNAVLQCLKGTSDGPTQQLTWSRESPLKPFLKLSLGLPGLGIHMRPLGKYYCHRGNLTMSFHLEITARPVLWHWLLRTGGWKVSAVTLAYLIFCLCSLVGILHLQRALVLRRKRKRMTDPTRRFFKVTPPPGSGPQNQYGNVLSLPTPTSGLGRAQRWAAGLGGTAPSYGNPSSDVQADGALGSRSPPGVGPEEEEGEGYEEPDSEEDSEFYENDSNLGQDQLSQDGSGYENPEDEPLGPEDEDSFSNAESYENEDEELTQPVARTMDFLSPHGSAWDPSREATSLGSQSYEDMRGILYAAPQLRSIRGQPGPNHEEDADSYENMDNPDGPDPAWGGGGRMGTWSTR

SEQ ID NO: 120877 - protein, 405 aa, Artificial Sequence [sequence omitted]

SEQ ID NO: 120878 - DNA, 1671 bp, Artificial Sequence
  derived and/or modified sequence
atgcctccaccacgccttttgttcttcctgctgtttctgacccccatggaggtgagacccgaagaaccactcgtggtgaaggtcgaagaaggggacaacgccgtcctgcagtgcctgaaggggactagtgacggccctactcagcagttaacttggtcccgtgaatcaccccttaagcccttcctgaagctgtcacttgggctgcccggactgggcatccacatgcggccgcttgccatatggcttttcatctttaatgtgagccagcaaatggggggtttctacctgtgccagccaggaccaccctccgaaaaagcatggcagccgggttggacagtgaatgtagagggcagcggagagctgtttcgttggaatgtgtccgacttaggcggactggggtgcggcctgaagaataggtcctctgagggtccttcttcccctagtggaaaattaatgagtccaaaattatacgtgtgggccaaggacaggcctgaaatctgggagggggagccaccctgtctgcccccccgggactctcttaatcagtccctgagtcaggacctgaccatggcaccgggatcaaccctgtggctgtcttgcggcgtgcctcccgacagtgtcagccgcggtcctctaagctggactcatgtgcacccaaagggcccaaagtccctgctgtcactagagctcaaggatgatcgccccgctcgagacatgtgggtgatggaaacgggactgctgctgcccagagctacagcacaggacgccggaaaatactattgccacaggggtaacctgacaatgagcttccacttggagatcaccgcacggccggtcctgtggcactggcttctgaggactgggggctggaaggtatccgccgtgactctcgcttacctcatcttctgcctgtgctccctggttggaattctacacctacagcgcgccctggtgctccggcgtaagcgcaagcggatgactgaccctactcgaagatttttcaaagtgacccccccccccgggtctggccctcaaaatcaatatggcaatgtgctgagcctgcccacaccaaccagtggcctcggccgggcgcaaagatgggctgcaggcttgggcggcaccgccccatcctacgggaacccgtcctcagatgtgcaggccgatggcgccctgggttctcgcagcccgcccggcgtgggccctgaagaagaagagggtgaggggtacgaggagcccgacagtgaagaggactccgaattttacgaaaacgattcaaatcttggacaggatcagctcagccaggatggaagtggatatgagaacccagaagatgaacctttaggaccagaggacgaggattcgttttcaaatgctgaatcttatgagaacgaggatgaagagctgactcagcccgtggcccgtacgatggattttctgagccctcatggctcagcttgggacccatctcgcgaggcgacctctttaggcagtcagtcgtacgaagatatgcgggggatcctgtacgcagcacctcaactgcggagcattcgaggacagccaggacccaaccatgaagaagatgctgactcatatgagaatatggataaccctgatgggcctgatcccgcatggggaggtggtgggcgcatgggtacctggtctaccagatag

SEQ ID NO: 120879 - DNA, 1092 bp, Artificial Sequence
  derived and/or modified sequence
atggaagtcagacccgaggaacctctagttgtaaaggtggaagagggggataacgccgtgctccagtgcctcaagggaacatctgatggacctacccagcagctgacatggtcccgggaatctcccctgaaacccttcctgaaactttcactcggcctgcccggactgggaatccatatgcgacccctgggcaagtattattgtcatagaggcaatttaaccatgtctttccatttagagattaccgcaagacctgttctctggcattggctactgcgaaccgggggctggaaagtgagcgcggttaccctagcctacctgatattctgtttgtgcagtctggtcggaatattacacctgcagcgtgcgctggtcttacgtaggaaacggaagcgaatgacagacccaacaagaagattttttaaagtaacccctccccctggaagtggtccccagaatcagtacggtaatgtactttcactcccaacgcctactagcggacttgggcgggctcagcgctgggccgccggtctcggcggaaccgccccatcttatggaaatccttcatcggatgtccaggctgatggtgccctcggatcccggagccctccaggagtgggtcctgaggaggaggagggcgagggctacgaggagcccgacagcgaagaagactctgagttctacgaaaatgacagcaatctgggccaggaccagttatcacaggatggcagcgggtacgaaaatcctgaggacgagcccctggggccggaggacgaagatagctttagcaacgccgagagttatgaaaacgaagacgaggagctgactcaacccgtggcccgcaccatggacttcttgagcccacacgggtccgcttgggacccaagccgcgaggccacctcattagggtcccagagctatgaagacatgcgggggattctatacgccgcaccccagctgagatccatcagggggcaacccggtccaaaccatgaggaagatgcggactcctacgagaatatggacaaccccgacggacccgacccagcctggggcggcggcggccgcatggggacttggagcactaggtag

SEQ ID NO: 120880 - DNA, 1218 bp, Artificial Sequence
  derived and/or modified sequence
atgagcccaaagctttacgtttgggctaaggatcgaccagagatatgggagggagagccgccatgcctcccaccaagggactccctgaatcagagcttaagtcaagacctgactatggcccctggatccaccctgtggctctcctgtggggtgccccctgactcagtttctagaggcccactgtcttggacccacgtacatcccaaggggccaaaatcactgctgtccctggagctgaaagatgataggcccgcccgggacatgtgggtcatggaaactgggcttcttctacccagggccaccgcccaggacgccgggaaatattattgccatcgaggcaatttgaccatgtctttccacttggaaatcacagccaggcccgttctgtggcattggctcctgagaaccggcgggtggaaggtgtcagccgtaactctggcatacctgattttctgcctttgctctctcgtaggaatcctccatttacagagggcactcgttctgaggcgcaagaggaaacgaatgaccgatcccaccagaagatttttcaaggtgacccccccccccgggtctggaccccaaaaccaatacggcaatgttttaagtttgcccacacctacctctgggctgggccgcgcccagagatgggcggctggcctaggaggaacggccccatcttatggcaacccaagttctgatgttcaagccgatggggctctgggttcccgcagccctccaggggtgggcccagaggaggaagaaggagagggctacgaggagcccgactctgaggaagactctgaattttatgaaaatgatagcaacctaggtcaggaccagctcagtcaggatggctctgggtacgagaatccagaagatgaaccgctgggtcccgaggatgaggacagcttctcgaatgctgagagctatgagaatgaagatgaggaacttacacagcccgtagcacgaaccatggatttcctaagccctcatggatcagcctgggatcctagtagagaggctacttcactggggtcccagtcatatgaggacatgcgtggtattttatatgcagctccacagcttcggagcattcggggccaacctggacccaatcacgaggaggacgctgacagctacgagaacatggataacccagatggtccggatccggcttggggaggaggtgggcgcatgggcacctggagtacccgttag

SEQ ID NO: 120881 - DNA, 1671 bp, Artificial Sequence
  derived and/or modified sequence
atgcccccaccccggctgctcttcttcctgctcttcctgacccccatggaggtgcggcctgaggagcccctggtggtgaaggtggaggagggggacaatgctgtgctgcagtgcctgaagggcaccagtgatggccccacccagcagctgacctggagccgggagagccccctgaagcccttcctgaagctgagcctgggcctgcccggcctgggcatccacatgaggcccctggccatctggctgttcatcttcaacgtgtcccagcagatgggcggcttctacctgtgccagcccggccccccatctgagaaggcctggcagcccggctggacagtgaatgtggagggcagcggggagctgttccgctggaatgtgtctgacctgggcggcctgggctgcggcctgaagaacagaagcagcgagggccccagcagccccagcggcaagctgatgagccccaagctgtatgtgtgggccaaggacaggcctgagatctgggagggggagcccccctgcctgcccccccgggacagcctgaaccagagcctgagccaggacctgaccatggcccctggcagcaccctgtggctgagctgtggggtgcccccagacagcgtgtcccggggccccctgtcctggacccacgtgcaccccaagggccccaagagcctgctgagcctggagctgaaggatgacaggcctgcccgggacatgtgggtgatggagaccggcctgctgctgccccgggccacagcccaggatgctgggaagtactactgccaccggggcaacctgaccatgtccttccacctggagatcacagcccggcctgtgctgtggcactggctgctgaggactggaggctggaaggtgtctgctgtgaccctggcctacctgatcttctgcctgtgcagcctggtgggcatcctgcacctgcagagggccctggtgctgcggaggaagaggaagaggatgacagaccccacccggcgcttcttcaaggtgaccccacctcctggcagcggcccccagaaccagtatggaaatgtgctgagcctgcccacccccaccagcggcctgggccgggcccagcgctgggccgccggcctgggcggcacagcccccagctatggcaaccccagcagtgatgtgcaggctgatggagccctgggcagccgcagccccccaggagtgggccctgaggaggaggagggggagggctatgaggagccagacagcgaggaggacagcgagttctatgaaaatgacagcaacctgggccaggaccagctgagccaggacggcagcggctatgagaacccagaagatgagcccctgggcccagaagatgaggacagcttcagcaatgctgagagctatgaaaatgaagatgaggagctgacccagcctgtggcccggaccatggacttcctgagcccccacggcagcgcctgggaccccagccgggaggccaccagcctgggcagccagagctatgaggacatgaggggcatcctgtatgctgccccccagctgcggagcatccggggccagcccggccccaaccacgaggaggatgctgacagctatgagaacatggacaacccagatggccctgaccctgcctggggcggcggcggccgcatgggcacctggagcaccaggtag

SEQ ID NO: 120882 - DNA, 1092 bp, Artificial Sequence
  derived and/or modified sequence
atggaggtgcggcctgaggagcccctggtggtgaaggtggaggagggggacaatgctgtgctgcagtgcctgaagggcaccagtgatggccccacccagcagctgacctggagccgggagagccccctgaagcccttcctgaagctgagcctgggcctgcccggcctgggcatccacatgaggcccctgggcaagtactactgccaccggggcaacctgaccatgtccttccacctggagatcacagcccggcctgtgctgtggcactggctgctgaggactggaggctggaaggtgtctgctgtgaccctggcctacctgatcttctgcctgtgcagcctggtgggcatcctgcacctgcagagggccctggtgctgcggaggaagaggaagaggatgacagaccccacccggcgcttcttcaaggtgaccccacctcctggcagcggcccccagaaccagtatggaaatgtgctgagcctgcccacccccaccagcggcctgggccgggcccagcgctgggccgccggcctgggcggcacagcccccagctatggcaaccccagcagtgatgtgcaggctgatggagccctgggcagccgcagccccccaggagtgggccctgaggaggaggagggggagggctatgaggagccagattctgaagaagattctgagttctatgaaaatgacagcaacctgggccaggaccagctgagccaggacggcagcggctatgaaaatccagaagatgagcccctgggcccagaagatgaagattccttcagcaatgctgagagctatgaaaatgaagatgaggagctgacccagcctgtggcccggaccatggacttcctgagcccccacggcagcgcctgggaccccagccgggaggccaccagcctgggcagccagagctatgaggacatgaggggcatcctgtatgctgccccccagctgcggagcatccggggccagcccggccccaaccatgaagaagatgctgacagctatgagaacatggacaacccagatggccctgaccctgcctggggcggcggcggccgcatgggcacctggagcaccaggtag

SEQ ID NO: 120883 - DNA, 1218 bp, Artificial Sequence
  derived and/or modified sequence
atgagccccaagctgtatgtgtgggccaaggacaggcctgagatctgggagggggagcccccctgcctgcccccccgggacagcctgaaccagagcctgagccaggacctgaccatggcccctggcagcaccctgtggctgagctgtggggtgcccccagattctgtgtcccggggccccctgtcctggacccacgtgcaccccaagggccccaagagcctgctgagcctggagctgaaggatgacaggcctgcccgggacatgtgggtgatggagaccggcctgctgctgccccgggccacagcccaggatgctgggaagtactactgccaccggggcaacctgaccatgtccttccacctggagatcacagcccggcctgtgctgtggcactggctgctgaggactggaggctggaaggtgtctgctgtgaccctggcctacctgatcttctgcctgtgcagcctggtgggcatcctgcacctgcagagggccctggtgctgcggaggaagaggaagaggatgacagaccccacccggcgcttcttcaaggtgaccccacctcctggcagcggcccccagaaccagtatggaaatgtgctgagcctgcccacccccaccagcggcctgggccgggcccagcgctgggccgccggcctgggcggcacagcccccagctatggcaaccccagcagtgatgtgcaggctgatggagccctgggcagccgcagccccccaggagtgggccctgaggaggaggagggggagggctatgaggagccagattctgaagaagattctgagttctatgaaaatgacagcaacctgggccaggaccagctgagccaggacggcagcggctatgaaaatccagaagatgagcccctgggcccagaagatgaagattccttcagcaatgctgagagctatgaaaatgaagatgaggagctgacccagcctgtggcccggaccatggacttcctgagcccccacggcagcgcctgggaccccagccgggaggccaccagcctgggcagccagagctatgaggacatgaggggcatcctgtatgctgccccccagctgcggagcatccggggccagcccggccccaaccatgaagaagatgctgacagctatgagaacatggacaacccagatggccctgaccctgcctggggcggcggcggccgcatgggcacctggagcaccaggtag

SEQ ID NO: 120884 - DNA, 1671 bp, Artificial Sequence
  derived and/or modified sequence
atgccccccccccggctgctgttcttcctgctgttcctgacccccatggaggtccgcccagaggaaccgctggtggtaaaagtcgaagaaggagataacgctgtcctccagtgcctgaagggaacatctgatggacctacccagcagctgacttggagtagagagagtccgctgaagccatttttaaagttatccctcggcctgcccgggctcgggatccacatgaggccactggccatttggctgtttatcttcaacgtcagccagcagatgggcggcttttacctgtgccagccagggcccccctccgaaaaggcatggcagcccggatggacagtgaacgttgaggggagcggagagctgtttcgctggaacgtctccgatctgggcgggctcggctgcggcctcaagaatcggagtagcgaggggccctcatcaccttccggcaagctgatgagtccaaaactttacgtgtgggctaaggatcggccagagatttgggaaggagaacccccctgcctccccccacgcgacagcttaaaccaaagtctctcacaggacctaaccatggccccagggtccactctgtggctctcctgcggggtccctccagactctgtatcccgaggtcccctcagctggactcacgttcatcctaaagggccaaagagcctccttagtctagaactgaaggacgatcgacccgcgagggacatgtgggttatggagaccggcctgttgctgccccgggccacagctcaggacgctggaaagtattattgccatagggggaacctgaccatgagtttccatctggagataaccgccagaccagtcttgtggcactggctcttaaggaccggggggtggaaggtttcagctgtgacactcgcctacctcatattctgcttgtgctctttggtgggcattctccaccttcaaagggccctagtgctgaggaggaagcggaaacgcatgacagacccaacccgacggttcttcaaggtgaccccccctccaggatctggacctcagaaccagtacggcaacgtgttatcattacccacaccaactagtggactgggaagggcccagcgctgggcagcgggactgggggggactgcaccatcttacgggaacccttcttccgacgtccaggctgatggggcacttgggagtcgatctccaccaggcgtgggcccagaggaagaggagggggaaggatacgaagagcctgatagcgaggaagacagcgagttctatgaaaatgactctaatctgggtcaggatcaactctctcaggacggctccgggtacgagaatcctgaagacgaacctttaggacccgaggacgaggactccttcagcaacgcagaaagttacgagaacgaagatgaggagctgacccagccggtggcaaggaccatggactttctgtctccacacggtagtgcctgggatcctagtcgggaggctactagcctgggaagtcagtcttacgaagatatgcgagggatcttgtatgctgccccgcaactccgctctataagaggtcagcccggccccaaccacgaggaggacgcagacagttacgagaatatggataatcccgacgggccagacccggcgtggggtgggggcggaaggatggggacgtggtcaactagatag

SEQ ID NO: 120885 - DNA, 1092 bp, Artificial Sequence
  derived and/or modified sequence
atggaggtgcggcccgaggagcccctggtggtgaaggtggaggagggggacaatgccgtcctacagtgccttaagggcactagcgacgggccaacgcagcagttgacttggagccgagagagtccattgaaaccatttctgaaactcagcctcgggctcccaggattgggcatacacatgcggccgctcggcaaatattactgccacagggggaacctcaccatgtcctttcacctggagattacagccaggccagtgctctggcactggctccttcggaccggaggctggaaagtgagcgctgttactctggcttacctgattttctgcctatgctcacttgttggcattctgcatctgcagagagcgctggtccttcgacggaaaaggaagaggatgacagaccctacccgccggttttttaaggtgacaccaccaccgggttccggaccccagaaccagtacggcaatgtgctgtcgctgcctactccaacctcaggattaggccgcgcgcagcgctgggcagctggcctgggagggacagcgcccagctacggtaacccatcaagcgatgtacaggcagatggagccctgggcagccggagcccccctggtgttggacccgaagaagaagagggtgaaggctacgaagaacctgattcagaagaggactccgaattttacgaaaacgactccaatctgggccaggaccagctctcacaggatggctcaggctatgagaaccccgaggatgagccgttgggtcccgaggacgaagattcattcagtaacgccgagagctacgaaaatgaagacgaagagttgacccagcccgtggctcggactatggacttcctgtcccctcacggctctgcatgggaccccagcagggaggctaccagcctgggatcacagtcttatgaggacatgcgcgggattctttacgccgccccacagttgaggagcatccgagggcagcctggtcccaaccatgaggaggatgctgacagctacgagaatatggacaaccccgatgggcctgatcccgcatggggaggggggggaaggatgggcacctggtcaacaaggtag

SEQ ID NO: 120886 - DNA, 1218 bp, Artificial Sequence
  derived and/or modified sequence
atgagccccaagctgtacgtgtgggccaaggaccggcccgagatctgggagggggaaccaccatgtcttccccctagagatagtctgaatcaatcattaagccaggatctgacaatggctcccggctctacactttggttatcatgtggcgtgcctcccgattctgtgtctcgtggacctctctcttggactcacgtacaccccaaaggaccaaaatctctactctctctcgagctgaaggacgatcgtccagcgagggatatgtgggttatggaaaccggactgctgctccccagggctactgcacaagacgctgggaagtattactgccatagaggaaacctcaccatgtccttccatttggaaataaccgcccgaccggtactctggcattggctgctaaggaccggtgggtggaaagtatcagctgtcacccttgcttatctgatcttttgcctctgttcgctcgtgggcatcctccatcttcagagggctctggtgctaaggcgcaaacgcaaaaggatgactgatccaaccaggaggttctttaaggtcactccaccacctgggtctggcccgcagaaccagtacgggaatgtgctcagcctccctacccccaccagtggactgggcagggcccagaggtgggctgccggattgggaggcacagctcctagctacggaaatccgtcttctgacgtgcaagctgacggtgcgctgggcagtagatccccccctggagttggacccgaagaggaggagggtgagggctatgaagagccggacagtgaagaagatagtgagttctacgaaaacgactccaacttgggccaggaccaactgagccaagacggatcagggtatgagaacccggaagatgagcctctgggacctgaggacgaggactctttctccaacgccgagtcttatgagaacgaggatgaggagttgacacagcctgtggcgcgcactatggatttcctgagccctcacggatctgcatgggacccttccagggaagccacaagcctgggcagccagtcctatgaggacatgcgcggcatcctctacgcagcaccccagctgcgcagtattcgggggcagcctggccccaatcatgaagaagacgcagactcttacgagaacatggataaccctgacggaccagacccagcttggggtggagggggaaggatgggcacgtggagtacacgctag

SEQ ID NO: 120887 - DNA, 1671 bp, Artificial Sequence
  derived and/or modified sequence
atgccccctccgagactcttgttcttcctgctgttcttgacccccatggaggtcaggccagaagagccgcttgtggtcaaggtcgaagagggagacaacgccgtgctgcaatgcttaaagggcacttcagatggacctacgcagcagctgacctggagtcgtgagtcccctttgaagccgtttttgaaactgtcactggggctgccaggacttgggatacatatgcggccactggccatctggctgtttatttttaatgtgagtcagcagatgggtgggttctacctgtgccagccagggcctccttcggaaaaagcatggcagccaggatggacagtcaatgtggagggctccggagagctcttccgatggaacgttagcgacttaggcggtttgggctgtggattgaagaacaggagttctgagggcccaagctctccctccgggaagctgatgtctcctaaattatacgtgtgggctaaggatcggcctgagatctgggaaggggagccaccctgcctcccgcctcgtgacagcctgaatcagtcactgagtcaggatctgacgatggctccaggttcgacgctgtggctgtcctgtggagtccctcctgactcagtgtctcggggacctctgtcatggacacatgtacaccccaaggggccaaaaagccttctatccctggaactaaaagatgatagaccagcccgagatatgtgggtgatggagacaggactgctgttgccccgagccaccgcccaggatgcaggaaaatactactgtcatcgcggaaacttaactatgagctttcatctcgagatcaccgccaggccagttctgtggcactggctgctgcggactggaggatggaaagtttctgcagtcacccttgcttatctgattttttgcctgtgctccttggtggggattcttcatctccagagggccctggtcctccgtagaaaaagaaaacggatgacagatcccaccagaaggttctttaaagtgactcccccacccggaagcggcccacagaaccagtatggaaacgtgttgtccctgcctaccccaacctctggactgggaagggctcaacgttgggcggcaggattagggggtaccgctccttcatatgggaatccttcctctgacgtgcaggcagacggcgctctagggagtcggagccccccaggtgtaggacctgaagaagaagagggggagggatacgaagagcctgatagtgaggaggactccgagttttatgagaacgattcaaatctcggacaggaccaactgtcacaggatggctcagggtacgagaatcctgaagatgagcccctggggcctgaagacgaggactcattctccaacgccgaatcttatgaaaacgaagatgaggaactgacccagccggtcgcccgaaccatggatttcctgtctcctcatgggtctgcatgggaccccagtcgcgaagccacgtctcttggaagccagtcctacgaggatatgcgaggcatcctttatgctgcaccccagcttcggtccatccggggacagccaggccctaaccatgaagaagacgcagatagttatgaaaacatggacaatcccgacggccctgaccccgcttggggcggaggcggaagaatgggtacatggagtactcggtag

SEQ ID NO: 120888 - DNA, 1092 bp, Artificial Sequence
  derived and/or modified sequence
atggaagttcgacctgaagagccactggtggtgaaggtggaagaaggcgacaacgccgtgttgcaatgcctaaagggcacaagcgatggccctacccagcagctgacatggtcacgcgagtccccactaaagccattccttaagctgtctttgggcctaccgggacttggcatacacatgcgcccactgggaaaatactattgccaccggggaaacctgacaatgtcatttcatctagagattaccgccagacccgttttgtggcactggttgctcagaacaggtggttggaaggtatctgccgttacattagcctacctgattttctgcctgtgctccttagttggcatcctacatttgcagagggccttagttctacgccgtaagagaaaaaggatgacagaccctacacgacgcttctttaaggtcaccccacccccaggcagcggaccacaaaaccagtatggcaatgtgctgtctctgcctactcctaccagcggtctgggacgcgcacaacgttgggccgcaggactggggggtaccgctccaagctatggcaacccgagttccgacgtgcaggcggatggagccctgggcagccgttcccccccaggagtgggccctgaggaagaagagggggagggttatgaggagccggattccgaggaggactcagagttctacgaaaacgactcgaatctcggccaggatcagctttcccaggatgggtcggggtacgagaatccggaggatgagccactgggaccggaggacgaggacagctttagcaacgccgaaagctatgaaaacgaagacgaagagctgacacaaccagtggcaaggactatggatttcctgtctccacacggaagcgcttgggaccccagccgcgaagctacatcccttggcagccagtcttacgaggacatgcgcggtattttatatgctgcgcctcagctcagaagcattcggggacagccgggaccaaaccacgaggaggacgcggacagttatgagaatatggataatccagatgggccagatcctgcatggggtggcggaggacgaatggggacatggtcaactcgatag

SEQ ID NO: 120889 - DNA, 1218 bp, Artificial Sequence
  derived and/or modified sequence
atgtctccgaagctgtatgtttgggccaaagatcggcctgaaatctgggaaggagaaccaccttgtctgcctcctcgtgattccctcaaccagagcctgtctcaggacctgaccatggccccaggctcaaccttatggctttcttgtggtgtgccaccagactctgtatctcggggacccttaagttggacccatgtacacccaaagggtccaaagagccttcttagcctggaacttaaggacgataggcccgctagagacatgtgggtcatggagaccggtctcctgttgccaagggcaacagctcaagatgccggaaagtactactgtcatcgcggaaacctgactatgtcgttccatctggagattacggctaggccggtactctggcattggctattgaggactggtggctggaaagtttccgcagtcactcttgcctacctaatcttctgcctctgcagtttggtggggatcctccatctccaacgagctttagtgctaaggcggaagagaaagaggatgaccgaccctacccgacgtttcttcaaagtcaccccacccccaggttcaggtccacaaaaccaatatggaaatgtcctttcactccctacccctacctccggtttgggccgagctcaacggtgggcagccggtctcgggggtaccgccccatcctatggaaacccgagttctgacgtacaagcggacggcgcactgggttcacgctcgccgcctggagtgggccctgaggaggaagagggcgagggctacgaagagcctgattcagaggaggactcagagttctacgagaacgactctaacttgggacaggatcaactctctcaagacggatcggggtacgaaaatccagaagacgagccattgggccctgaggacgaggatagtttcagtaatgccgaatcctacgagaacgaagatgaggagctcacccagcccgttgcaagaacaatggacttcctctcaccccacgggtcggcctgggatccatctcgggaagctactagtctgggttcacagagttacgaagacatgaggggaatactttatgcagcacctcagttgagatccatcagggggcagccaggcccaaatcacgaggaggatgcagatagttacgaaaacatggataacccagatggacctgaccctgcgtggggaggcggagggaggatggggacttggtctacaaggtag

SEQ ID NO: 120890 - DNA, 1932 bp, Artificial Sequence
  derived and/or modified sequence
gcatcccctgcgcgaagctgggtgccccggagagtctgaccaccatgccacctcctcgcctcctcttcttcctcctcttcctcacccccatggaagtcaggcccgaggaacctctagtggtgaaggtggaagagggagataacgctgtgctgcagtgcctcaaggggacctcagatggccccactcagcagctgacctggtctcgggagtccccgcttaaacccttcttaaaactcagcctggggctgccaggcctgggaatccacatgaggcccctggccatctggcttttcatcttcaacgtctctcaacagatggggggcttctacctgtgccagccggggcccccctctgagaaggcctggcagcctggctggacagtcaatgtggagggcagcggggagctgttccggtggaatgtttcggacctaggtggcctgggctgtggcctgaagaacaggtcctcagagggccccagctccccttccgggaagctcatgagccccaagctgtatgtgtgggccaaagaccgccctgagatctgggagggagagcctccgtgtctcccaccgagggacagcctgaaccagagcctcagccaggacctcaccatggcccctggctccacactctggctgtcctgtggggtaccccctgactctgtgtccaggggccccctctcctggacccatgtgcaccccaaggggcctaagtcattgctgagcctagagctgaaggacgatcgcccggccagagatatgtgggtaatggagacgggtctgttgttgccccgggccacagctcaagacgctggaaagtattattgtcaccgtggcaacctgaccatgtcattccacctggagatcactgctcggccagtactatggcactggctgctgaggactggtggctggaaggtctcagctgtgactttggcttatctgatcttctgcctgtgttcccttgtgggcattcttcatcttcaaagagccctggtcctgaggaggaaaagaaagcgaatgactgaccccaccaggagattcttcaaagtgacgcctcccccaggaagcgggccccagaaccagtacgggaacgtgctgtctctccccacacccacctcaggcctcggacgcgcccagcgttgggccgcaggcctggggggcactgccccgtcttatggaaacccgagcagcgacgtccaggcggatggagccttggggtcccggagcccgccgggagtgggcccagaagaagaggaaggggagggctatgaggaacctgacagtgaggaggactccgagttctatgagaacgactccaaccttgggcaggaccagctctcccaggatggcagcggctacgagaaccctgaggatgagcccctgggtcctgaggatgaagactccttctccaacgctgagtcttatgagaacgaggatgaagagctgacccagccggtcgccaggacaatggacttcctgagccctcatgggtcagcctgggaccccagccgggaagcaacctccctggggtcccagtcctatgaggatatgagaggaatcctgtatgcagccccccagctccgctccattcggggccagcctggacccaatcatgaggaagatgcagactcttatgagaacatggataatcccgatgggccagacccagcctggggaggagggggccgcatgggcacctggagcaccaggtgatcctcaggtggccagcctggatctcctcaagtccccaagattcacacctgactctgaaatctgaagacctcgagcagatgatgccaacctctggagcaatgttgcttaggatgtgtgcatgtgtgtaagtgtgtgtgtgtgtgtgtgtgtgtatacatgccagtgacacttccagtcccctttgtattccttaaataaactcaatgagctcttccaa

SEQ ID NO: 120891 - DNA, 1420 bp, Artificial Sequence
  derived and/or modified sequence
aggcccctgcctgccccagcatcccctgcgcgaagctgggtgccccggagagtctgaccaccatgccacctcctcgcctcctcttcttcctcctcttcctcacccccatggaagtcaggcccgaggaacctctagtggtgaaggtggaagagggagataacgctgtgctgcagtgcctcaaggggacctcagatggccccactcagcagctgacctggtctcgggagtccccgcttaaacccttcttaaaactcagcctggggctgccaggcctgggaatccacatgaggcccctgggaaagtattattgtcaccgtggcaacctgaccatgtcattccacctggagatcactgctcggccagtactatggcactggctgctgaggactggtggctggaaggtctcagctgtgactttggcttatctgatcttctgcctgtgttcccttgtgggcattcttcatcttcaaagagccctggtcctgaggaggaaaagaaagcgaatgactgaccccaccaggagattcttcaaagtgacgcctcccccaggaagcgggccccagaaccagtacgggaacgtgctgtctctccccacacccacctcaggcctcggacgcgcccagcgttgggccgcaggcctggggggcactgccccgtcttatggaaacccgagcagcgacgtccaggcggatggagccttggggtcccggagcccgccgggagtgggcccagaagaagaggaaggggagggctatgaggaacctgacagtgaggaggactccgagttctatgagaacgactccaaccttgggcaggaccagctctcccaggatggcagcggctacgagaaccctgaggatgagcccctgggtcctgaggatgaagactccttctccaacgctgagtcttatgagaacgaggatgaagagctgacccagccggtcgccaggacaatggacttcctgagccctcatgggtcagcctgggaccccagccgggaagcaacctccctggggtcccagtcctatgaggatatgagaggaatcctgtatgcagccccccagctccgctccattcggggccagcctggacccaatcatgaggaagatgcagactcttatgagaacatggataatcccgatgggccagacccagcctggggaggagggggccgcatgggcacctggagcaccaggtgatcctcaggtggccagcctggatctcctcaagtccccaagattcacacctgactctgaaatctgaagacctcgagcagatgatgccaacctctggagcaatgttgcttaggatgtgtgcatgtgtgtaagtgtgtgtgtgtgtgtgtgtgtgtatacatgccagtgacacttccagtcccctttgtattccttaaataaactcaatgagctcttccaatcct

SEQ ID NO: 120892 - DNA, 1732 bp, Artificial Sequence
  derived and/or modified sequence
ttcctcctcttcctcacccccatggaagtcaggcccgaggaacctctagtggtgaaggtggaagagggagataacgctgtgctgcagtgcctcaaggggacctcagatggccccactcagcagctgacctggtctcgggagtccccgcttaaacccttcttaaaactcagcctggctggacagtcaatgtggagggcagcggggagctgttccggtggaatgtttcggacctaggtggcctgggctgtggcctgaagaacaggtcctcagagggccccagctccccttccgggaagctcatgagccccaagctgtatgtgtgggccaaagaccgccctgagatctgggagggagagcctccgtgtctcccaccgagggacagcctgaaccagagcctcagccaggacctcaccatggcccctggctccacactctggctgtcctgtggggtaccccctgactctgtgtccaggggccccctctcctggacccatgtgcaccccaaggggcctaagtcattgctgagcctagagctgaaggacgatcgcccggccagagatatgtgggtaatggagacgggtctgttgttgccccgggccacagctcaagacgctggaaagtattattgtcaccgtggcaacctgaccatgtcattccacctggagatcactgctcggccagtactatggcactggctgctgaggactggtggctggaaggtctcagctgtgactttggcttatctgatcttctgcctgtgttcccttgtgggcattcttcatcttcaaagagccctggtcctgaggaggaaaagaaagcgaatgactgaccccaccaggagattcttcaaagtgacgcctcccccaggaagcgggccccagaaccagtacgggaacgtgctgtctctccccacacccacctcaggcctcggacgcgcccagcgttgggccgcaggcctggggggcactgccccgtcttatggaaacccgagcagcgacgtccaggcggatggagccttggggtcccggagcccgccgggagtgggcccagaagaagaggaaggggagggctatgaggaacctgacagtgaggaggactccgagttctatgagaacgactccaaccttgggcaggaccagctctcccaggatggcagcggctacgagaaccctgaggatgagcccctgggtcctgaggatgaagactccttctccaacgctgagtcttatgagaacgaggatgaagagctgacccagccggtcgccaggacaatggacttcctgagccctcatgggtcagcctgggaccccagccgggaagcaacctccctggggtcccagtcctatgaggatatgagaggaatcctgtatgcagccccccagctccgctccattcggggccagcctggacccaatcatgaggaagatgcagactcttatgagaacatggataatcccgatgggccagacccagcctggggaggagggggccgcatgggcacctggagcaccaggtgatcctcaggtggccagcctggatctcctcaagtccccaagattcacacctgactctgaaatctgaagacctcgagcagatgatgccaacctctggagcaatgttgcttaggatgtgtgcatgtgtgtaagtgtgtgtgtgtgtgtgtgtgtgtatacatgccagtgacacttccagtcccctttgtattccttaaataaactcaatgagctcttcc

SEQ ID NO: 120893 - DNA, 1671 bp, Artificial Sequence
  derived and/or modified sequence
atgcccccccccagactgctgttcttcctgctgttcctgacccccatggaggtgagacccgaggagcccctggtggtgaaggtggaggagggcgacaacgccgtgctgcagtgcctgaagggcaccagcgacggccccacccagcagctgacctggagcagagagagccccctgaagcccttcctgaagctgagcctgggcctgcccggcctgggcatccacatgagacccctggccatctggctgttcatcttcaacgtgagccagcagatgggcggcttctacctgtgccagcccggcccccccagcgagaaggcctggcagcccggctggaccgtgaacgtggagggcagcggcgagctgttcagatggaacgtgagcgacctgggcggcctgggctgcggcctgaagaacagaagcagcgagggccccagcagccccagcggcaagctgatgagccccaagctgtacgtgtgggccaaggacagacccgagatctgggagggcgagcccccctgcctgccccccagagacagcctgaaccagagcctgagccaggacctgaccatggcccccggcagcaccctgtggctgagctgcggcgtgccccccgacagcgtgagcagaggccccctgagctggacccacgtgcaccccaagggccccaagagcctgctgagcctggagctgaaggacgacagacccgccagagacatgtgggtgatggagaccggcctgctgctgcccagagccaccgcccaggacgccggcaagtactactgccacagaggcaacctgaccatgagcttccacctggagatcaccgccagacccgtgctgtggcactggctgctgagaaccggcggctggaaggtgagcgccgtgaccctggcctacctgatcttctgcctgtgcagcctggtgggcatcctgcacctgcagagagccctggtgctgagaagaaagagaaagagaatgaccgaccccaccagaagattcttcaaggtgacccccccccccggcagcggcccccagaaccagtacggcaacgtgctgagcctgcccacccccaccagcggcctgggcagagcccagagatgggccgccggcctgggcggcaccgcccccagctacggcaaccccagcagcgacgtgcaggccgacggcgccctgggcagcagaagcccccccggcgtgggccccgaggaggaggagggcgagggctacgaggagcccgacagcgaggaggacagcgagttctacgagaacgacagcaacctgggccaggaccagctgagccaggacggcagcggctacgagaaccccgaggacgagcccctgggccccgaggacgaggacagcttcagcaacgccgagagctacgagaacgaggacgaggagctgacccagcccgtggccagaaccatggacttcctgagcccccacggcagcgcctgggaccccagcagagaggccaccagcctgggcagccagagctacgaggacatgagaggcatcctgtacgccgccccccagctgagaagcatcagaggccagcccggccccaaccacgaggaggacgccgacagctacgagaacatggacaaccccgacggccccgaccccgcctggggcggcggcggcagaatgggcacctggagcaccagatag

SEQ ID NO: 120894 - DNA, 1092 bp, Artificial Sequence
  derived and/or modified sequence
atggaggtgagacccgaggagcccctggtggtgaaggtggaggagggcgacaacgccgtgctgcagtgcctgaagggcaccagcgacggccccacccagcagctgacctggagcagagagagccccctgaagcccttcctgaagctgagcctgggcctgcccggcctgggcatccacatgagacccctgggcaagtactactgccacagaggcaacctgaccatgagcttccacctggagatcaccgccagacccgtgctgtggcactggctgctgagaaccggcggctggaaggtgagcgccgtgaccctggcctacctgatcttctgcctgtgcagcctggtgggcatcctgcacctgcagagagccctggtgctgagaagaaagagaaagagaatgaccgaccccaccagaagattcttcaaggtgacccccccccccggcagcggcccccagaaccagtacggcaacgtgctgagcctgcccacccccaccagcggcctgggcagagcccagagatgggccgccggcctgggcggcaccgcccccagctacggcaaccccagcagcgacgtgcaggccgacggcgccctgggcagcagaagcccccccggcgtgggccccgaggaggaggagggcgagggctacgaggagcccgacagcgaggaggacagcgagttctacgagaacgacagcaacctgggccaggaccagctgagccaggacggcagcggctacgagaaccccgaggacgagcccctgggccccgaggacgaggacagcttcagcaacgccgagagctacgagaacgaggacgaggagctgacccagcccgtggccagaaccatggacttcctgagcccccacggcagcgcctgggaccccagcagagaggccaccagcctgggcagccagagctacgaggacatgagaggcatcctgtacgccgccccccagctgagaagcatcagaggccagcccggccccaaccacgaggaggacgccgacagctacgagaacatggacaaccccgacggccccgaccccgcctggggcggcggcggcagaatgggcacctggagcaccagatag

SEQ ID NO: 120895 - DNA, 1218 bp, Artificial Sequence
  derived and/or modified sequence
atgagccccaagctgtacgtgtgggccaaggacagacccgagatctgggagggcgagcccccctgcctgccccccagagacagcctgaaccagagcctgagccaggacctgaccatggcccccggcagcaccctgtggctgagctgcggcgtgccccccgacagcgtgagcagaggccccctgagctggacccacgtgcaccccaagggccccaagagcctgctgagcctggagctgaaggacgacagacccgccagagacatgtgggtgatggagaccggcctgctgctgcccagagccaccgcccaggacgccggcaagtactactgccacagaggcaacctgaccatgagcttccacctggagatcaccgccagacccgtgctgtggcactggctgctgagaaccggcggctggaaggtgagcgccgtgaccctggcctacctgatcttctgcctgtgcagcctggtgggcatcctgcacctgcagagagccctggtgctgagaagaaagagaaagagaatgaccgaccccaccagaagattcttcaaggtgacccccccccccggcagcggcccccagaaccagtacggcaacgtgctgagcctgcccacccccaccagcggcctgggcagagcccagagatgggccgccggcctgggcggcaccgcccccagctacggcaaccccagcagcgacgtgcaggccgacggcgccctgggcagcagaagcccccccggcgtgggccccgaggaggaggagggcgagggctacgaggagcccgacagcgaggaggacagcgagttctacgagaacgacagcaacctgggccaggaccagctgagccaggacggcagcggctacgagaaccccgaggacgagcccctgggccccgaggacgaggacagcttcagcaacgccgagagctacgagaacgaggacgaggagctgacccagcccgtggccagaaccatggacttcctgagcccccacggcagcgcctgggaccccagcagagaggccaccagcctgggcagccagagctacgaggacatgagaggcatcctgtacgccgccccccagctgagaagcatcagaggccagcccggccccaaccacgaggaggacgccgacagctacgagaacatggacaaccccgacggccccgaccccgcctggggcggcggcggcagaatgggcacctggagcaccagatag

SEQ ID NO: 120896 - protein, 847 aa, Artificial Sequence
  derived and/or modified sequence
MHLLGPWLLLLVLEYLAFSDSSKWVFEHPETLYAWEGACVWIPCTYRALDGDLESFILFHNPEYNKNTSKFDGTRLYESTKDGKVPSEQKRVQFLGDKNKNCTLSIHPVHLNDSGQLGLRMESKTEKWMERIHLNVSERPFPPHIQLPPEIQESQEVTLTCLLNFSCYGYPIQLQWLLEGVPMRQAAVTSTSLTIKSVFTRSELKFSPQWSHHGKIVTCQLQDADGKFLSNDTVQLNVKHTPKLEIKVTPSDAIVREGDSVTMTCEVSSSNPEYTTVSWLKDGTSLKKQNTFTLNLREVTKDQSGKYCCQVSNDVGPGRSEEVFLQVQYAPEPSTVQILHSPAVEGSQVEFLCMSLANPLPTNYTWYHNGKEMQGRTEEKVHIPKILPWHAGTYSCVAENILGTGQRGPGAELDVQYPPKKVTTVIQNPMPIREGDTVTLSCNYNSSNPSVTRYEWKPHGAWEEPSLGVLKIQNVGWDNTTIACAACNSWCSWASPVALNVQYAPRDVRVRKIKPLSEIHSGNSVSLQCDFSSSHPKEVQFFWEKNGRLLGKESQLNFDSISPEDAGSYSCWVNNSIGQTASKAWTLEVLYAPRRLRVSMSPGDQVMEGKSATLTCESDANPPVSHYTWFDWNNQSLPYHSQKLRLEPVKVQHSGAYWCQGTNSVGKGRSPLSTLTVYYSPETIGRRVAVGLGSCLAILILAICGLKLQRRWKRTQSQQGLQENSSGQSFFVRNKKVRRAPLSEGPHSLGCYNPMMEDGISYTTLRFPEMNIPRTGDAESSEMQRPPPDCDDTVTYSALHKRQVGDYENVIPDFPEDEGIHYSELIQFGVGERPQAQENVDYVILKH

SEQ ID NO: 120897 - protein, 662 aa, Artificial Sequence
  derived and/or modified sequence
MESKTEKWMERIHLNVSERPFPPHIQLPPEIQESQEVTLTCLLNFSCYGYPIQLQWLLEGVPMRQAAVTSTSLTIKSVFTRSELKFSPQWSHHGKIVTCQLQDADGKFLSNDTVQLNVKHTPKLEIKVTPSDAIVREGDSVTMTCEVSSSNPEYTTVSWLKDGTSLKKQNTFTLNLREVTKDQSGKYCCQVSNDVGPGRSEEVFLQVQYAPEPSTVQILHSPAVEGSQVEFLCMSLANPLPTNYTWYHNGKEMQGRTEEKVHIPKILPWHAGTYSCVAENILGTGQRGPGAELDVQYPPKKVTTVIQNPMPIREGDTVTLSCNYNSSNPSVTRYEWKPHGAWEEPSLGVLKIQNVGWDNTTIACAACNSWCSWASPVALNVQYAPRDVRVRKIKPLSEIHSGNSVSLQCDFSSSHPKEVQFFWEKNGRLLGKESQLNFDSISPEDAGSYSCWVNNSIGQTASKAWTLEVLYAPRRLRVSMSPGDQVMEGKSATLTCESDANPPVSHYTWFDWNNQSLPYHSQKLRLEPVKVQHSGAYWCQGTNSVGKGRSPLSTLTVYYSPETIGRRVAVGLGSCLAILILAICGLKLQRRDAESSEMQRPPPDCDDTVTYSALHKRQVGDYENVIPDFPEDEGIHYSELIQFGVGERPQAQENVDYVILKH

SEQ ID NO: 120898 - DNA, 2544 bp, Artificial Sequence
  derived and/or modified sequence
atgcatctgttgggcccctggctgctgcttctggtacttgagtacctggccttttccgacagctccaagtgggttttcgagcaccctgaaacattgtatgcgtgggagggcgcatgcgtgtggataccctgtacttacagagccttagatggcgatctggaaagctttatcctttttcacaacccggaatataacaagaatacctccaaatttgatggtacgagattgtatgagtctacaaaagacgggaaggttccttctgagcaaaaacgggtccaattcttaggtgataagaacaagaactgcacgctctccatccaccctgttcatctgaacgatagtgggcagctcggcttaaggatggagagcaagacagagaagtggatggagaggatccacctaaacgtgagcgagcgtccctttccccctcacatccagctgccccccgaaatacaagaaagccaagaagtcacgctcacatgtcttctcaattttagttgctatgggtaccctattcaactccagtggctgctggagggagtccctatgcggcaagccgctgtgacctcaacctccctcaccatcaagtccgtttttacacgttcagagctcaagttctcccctcagtggtctcaccacgggaagattgtcacatgccagctgcaggacgccgacggcaagttcctgtccaacgacacggtgcaattaaacgtgaagcacactccgaagcttgagattaaggtgaccccgtcggacgctatcgtccgagagggggattcagttacaatgacctgcgaggtttcatccagtaaccccgagtataccacggtgagttggttaaaggatggcacttctctgaagaaacagaatacttttactcttaacctgagagaagtaacaaaggatcagagcggaaagtattgctgccaggtgtcaaacgacgtaggacccggccgctccgaggaagtatttctccaggtccaatacgcccccgagccctccacagttcagattttgcacagcccagcagtagaggggagccaagtggaattcttgtgtatgagtctggctaaccccctgccgacgaattacacttggtaccacaatggaaaggagatgcagggcaggactgaggaaaaggtgcatattccaaaaattcttccatggcacgccggaacttattcctgtgtagctgagaacatcctgggcacaggtcagagaggcccaggcgcagaactagatgtgcagtacccaccaaaaaaagttacaaccgtcatccagaatcctatgccaattagggagggtgataccgtgacactctcatgtaactacaatagcagcaatcctagtgtcacccgatacgaatggaagccacacggggcatgggaggagccgagcctgggcgtgctgaagatccagaacgtggggtgggacaacacgactatcgcttgcgccgcgtgcaacagttggtgttcctgggcgagtccagtggcccttaacgtgcaatacgccccgcgagatgtcagggtaaggaagataaagccactttcggagatccactccggcaacagcgtcagtctccaatgtgatttttcttccagtcaccccaaagaggtgcagttcttctgggagaagaacggcagactgctcgggaaagagtcacagttgaattttgactccatttcgcccgaggatgctggctcctacagttgttgggtgaacaactcaattgggcagactgcctccaaggcctggaccctggaggtgctttacgctccccggagactgagggtgagcatgtccccgggtgaccaggtgatggaaggtaagagcgccaccctcacatgcgaatcagatgccaatcctcctgtaagccattatacgtggttcgattggaataatcagagtttgccttatcactcccagaaattgaggttagagcccgtgaaggtccagcattctggagcatactggtgccagggcaccaattccgtgggaaagggacggagccctctgtcaaccctcactgtgtattatagccctgaaaccataggaagaagggtagccgttgggctagggagctgcctagccatactcatccttgccatctgcggcctaaaattgcagagaagatggaagcggacacaatcccagcagggtctgcaggaaaacagttccggtcaatccttcttcgtccgcaataaaaaggttagacgcgcacctctgtccgagggtccccactccttgggatgttacaatcccatgatggaggatggaatctcatacaccacgctgcgattccccgaaatgaacatccccaggactggagatgcagaatcctccgaaatgcaacggcccccccccgattgcgacgacaccgtgacctacagcgctcttcacaagagacaggtaggcgactacgagaatgtgatcccagactttcctgaagacgagggcattcactactcagaactaatccagttcggggtcggagaaaggccccaagcccaagaaaacgtggactacgttattttgaaacactag

SEQ ID NO: 120899 - DNA, 1989 bp, Artificial Sequence
  derived and/or modified sequence
atggagtccaagaccgagaaatggatggaacgcatccatcttaatgttagtgaaaggccttttccccctcacatccaattaccgcccgaaatccaggagtctcaggaagtaacactgacatgcctgttgaacttcagttgctacggttatcccattcagctgcagtggttgctggagggggtgccaatgagacaggctgcagtcacaagtacctccctgacaataaagtcagtgtttactcgatctgaactcaagttttctccccagtggagccaccacgggaagattgtcacctgtcagcttcaggatgccgacggaaagttcctatcgaatgataccgtccagctcaatgtgaagcacactccaaaactggagatcaaagttacaccaagcgatgcaattgtgagagaaggggactcagtaactatgacttgcgaagtctcttccagcaatcctgagtacaccacagtgagttggctgaaggacgggacatcactcaagaagcagaataccttcactttgaatctgcgggaggtaactaaagatcagagcgggaaatactgctgtcaagtctccaacgacgtggggcccggacggagcgaagaggtgttcttacaagtgcaatacgcgccagagccatctactgtgcagatcctgcactccccagccgtagaggggtcacaagtggaatttctgtgcatgagtctagctaacccattacctaccaactacacctggtaccataacggcaaagaaatgcaggggcgtaccgaagagaaggtacatatcccaaaaatcttgccctggcacgctggaacatatagctgcgtggccgagaatatattgggaactggacagagaggtcctggggccgagcttgatgtccagtatccccctaagaaagtgaccactgtcattcaaaaccctatgcctattcgtgagggagacactgtgacactgagctgcaattataatagctcaaacccctccgtgactcggtatgagtggaaaccacatggagcttgggaagaaccttcccttggcgtcctcaaaatccagaacgtgggatgggataataccaccatcgcctgcgctgcttgcaactcctggtgtagctgggcctcaccggtggcgctcaatgtacagtatgctcccagagacgtgagagtgcgaaagatcaaacccctgtctgaaatacactcaggaaactccgtgagcttacaatgtgacttctcctcaagccatcccaaagaagtgcaatttttctgggagaagaatgggcgcctgcttggcaaggagagccagttaaacttcgattccatctctcccgaggacgcgggctcatatagctgttgggtcaataactctattggacagacagcctctaaggcatggacgttagaagtcctttacgccccccggcgcctgcgcgtttccatgagtcccggggatcaggttatggaaggaaagagcgcaacgttgacatgcgagtccgacgctaatcctccagtctcccactacacatggtttgactggaacaatcagtcattgccttatcatagtcagaagttacgacttgagcctgtgaaggttcaacactctggggcttactggtgccaggggacaaattcagtaggaaaaggcagatcgccgcttagtaccttaacagtttactattctcccgagacaattggcagaagagtggccgtaggtctgggatcttgtctggctatcttaatcctcgcaatctgcggcctcaaactccagagacgtgacgccgaatccagcgaaatgcagcggccaccacctgactgtgatgataccgtcacctacagcgctcttcacaagagacaggtgggagactacgaaaacgttatcccggacttccccgaggacgagggaatacactactctgagcttatccagttcggcgtcggagagcggccacaggctcaggagaacgttgattacgtaatccttaaacactag

SEQ ID NO: 120900 - DNA, 2544 bp, Artificial Sequence
  derived and/or modified sequence
atgcacctgctgggcccctggctgctgctgctggtgctggagtacctggccttcagtgacagcagcaagtgggtgtttgagcaccctgagaccctgtatgcctgggagggcgcctgtgtgtggatcccctgcacctaccgggccctggatggagacctggagagcttcatcctcttccacaaccctgagtacaacaagaacaccagcaagtttgatggcacccggctgtatgagagcaccaaggatggcaaggtgcccagcgagcagaagagggtgcagttcctgggggacaagaacaagaactgcaccctgagcatccaccctgtgcacctgaatgacagcggccagctgggcctgaggatggagagcaagacagagaagtggatggagcgcatccacctgaatgtgtctgagcggcccttccccccccacatccagctgcccccagagatccaggagagccaggaggtgaccctgacctgcctgctgaacttcagctgctacggctaccccatccagctgcagtggctgctggagggcgtgcccatgaggcaggccgctgtgaccagcaccagcctgaccatcaagtctgtgttcaccaggtctgagctgaagttcagcccccagtggagccaccacggcaagatcgtgacctgccagctgcaggatgctgatggcaagttcctgagcaatgacacagtgcagctgaatgtgaagcacacccccaagctggagatcaaggtgacccccagtgatgccatcgtgcgggagggggacagcgtgaccatgacctgtgaggtgagcagcagcaaccctgagtacaccaccgtgtcctggctgaaggatggcaccagcctgaagaagcagaacaccttcaccctgaacctgcgggaggtgaccaaggaccagagcggcaagtactgctgccaggtgtccaatgatgtgggccctggccgctctgaggaggtgttcctgcaggtgcagtatgcccctgagcccagcacagtgcagatcctgcacagccctgctgtggagggcagccaggtggagttcctgtgcatgagcctggccaaccccctgcccaccaactacacctggtaccacaacgggaaggagatgcagggccgcacagaggagaaggtgcacatccccaagatcctgccctggcatgctggcacctacagctgtgtggccgagaacatcctgggcaccggccagaggggccctggagctgagctggatgtgcagtacccacccaagaaggtgaccaccgtcatccagaaccccatgcccatccgggagggggacacagtgaccctgagctgcaactacaacagcagcaaccccagcgtgaccaggtatgagtggaagccccatggagcctgggaggagcccagcctgggcgtgctgaagatccagaatgtgggctgggacaacaccaccatcgcctgtgccgcctgcaacagctggtgctcctgggccagccctgtggccctgaatgtgcagtatgcccccagagatgtgcgggtgaggaagatcaagcccctgtctgagatccacagcggcaacagcgtgtccctgcagtgtgacttcagcagcagccaccccaaggaggtgcagttcttctgggagaagaatggccgcctgctgggcaaggagagccagctgaactttgacagcatcagcccagaagatgctggcagctacagctgctgggtgaacaacagcatcggccagacagccagcaaggcctggaccctggaggtgctgtatgccccccggcggctgcgggtgtccatgagccctggggaccaggtgatggagggcaagagcgccaccctgacctgtgagagtgatgccaacccccctgtgagccactacacctggtttgactggaacaaccagagcctgccctaccacagccagaagctgcggctggagcctgtgaaggtgcagcacagcggggcctactggtgccagggcaccaacagcgtgggcaagggccgcagccccctgagcaccctgactgtgtactacagccctgagaccatcggccggcgggtggccgtgggcctgggcagctgcctggccatcctgatcctggccatctgtggcctgaagctgcagaggcgctggaagaggacccagagccagcagggcctgcaggagaacagcagcggccagagcttctttgtgaggaacaagaaggtgcggcgggcccccctgtctgagggcccccacagcctgggctgctacaaccccatgatggaggatggcatctcctacaccaccctgcgcttccctgagatgaacatccccaggactggagatgctgagagcagcgagatgcagaggcctcctccagactgtgatgacacagtgacctacagcgccctgcacaagaggcaggtgggggactatgaaaatgtcatcccagacttcccagaagatgagggcatccactacagcgagctgatccagtttggagtgggggagcggccccaggcccaggagaatgtggactatgtgatcctgaagcactag

SEQ ID NO: 120901 - DNA, 1989 bp, Artificial Sequence
  derived and/or modified sequence
atggagagcaagacagagaagtggatggagcgcatccacctgaatgtgtctgagcggcccttccccccccacatccagctgcccccagagatccaggagagccaggaggtgaccctgacctgcctgctgaacttcagctgctacggctaccccatccagctgcagtggctgctggagggcgtgcccatgaggcaggccgctgtgaccagcaccagcctgaccatcaagtctgtgttcaccaggtctgagctgaagttcagcccccagtggagccaccacggcaagatcgtgacctgccagctgcaggatgctgatggcaagttcctgagcaatgacacagtgcagctgaatgtgaagcacacccccaagctggagatcaaggtgacccccagtgatgccatcgtgcgggagggggacagcgtgaccatgacctgtgaggtgagcagcagcaaccctgagtacaccaccgtgtcctggctgaaggatggcaccagcctgaagaagcagaacaccttcaccctgaacctgcgggaggtgaccaaggaccagagcggcaagtactgctgccaggtgtccaatgatgtgggccctggccgctctgaggaggtgttcctgcaggtgcagtatgcccctgagcccagcacagtgcagatcctgcacagccctgctgtggagggcagccaggtggagttcctgtgcatgagcctggccaaccccctgcccaccaactacacctggtaccacaacgggaaggagatgcagggccgcacagaggagaaggtgcacatccccaagatcctgccctggcatgctggcacctacagctgtgtggccgagaacatcctgggcaccggccagaggggccctggagctgagctggatgtgcagtacccacccaagaaggtgaccaccgtcatccagaaccccatgcccatccgggagggggacacagtgaccctgagctgcaactacaacagcagcaaccccagcgtgaccaggtatgagtggaagccccatggagcctgggaggagcccagcctgggcgtgctgaagatccagaatgtgggctgggacaacaccaccatcgcctgtgccgcctgcaacagctggtgctcctgggccagccctgtggccctgaatgtgcagtatgcccccagagatgtgcgggtgaggaagatcaagcccctgtctgagatccacagcggcaacagcgtgtccctgcagtgtgacttcagcagcagccaccccaaggaggtgcagttcttctgggagaagaatggccgcctgctgggcaaggagagccagctgaactttgacagcatcagcccagaagatgctggcagctacagctgctgggtgaacaacagcatcggccagacagccagcaaggcctggaccctggaggtgctgtatgccccccggcggctgcgggtgtccatgagccctggggaccaggtgatggagggcaagagcgccaccctgacctgtgagagtgatgccaacccccctgtgagccactacacctggtttgactggaacaaccagagcctgccctaccacagccagaagctgcggctggagcctgtgaaggtgcagcacagcggggcctactggtgccagggcaccaacagcgtgggcaagggccgcagccccctgagcaccctgactgtgtactacagccctgagaccatcggccggcgggtggccgtgggcctgggcagctgcctggccatcctgatcctggccatctgtggcctgaagctgcagaggagagatgctgagagcagcgagatgcagaggcctcctccagactgtgatgacacagtgacctacagcgccctgcacaagaggcaggtgggggactatgaaaatgtcatcccagacttcccagaagatgagggcatccactacagcgagctgatccagtttggagtgggggagcggccccaggcccaggagaatgtggactatgtgatcctgaagcactag

SEQ ID NO: 120902 - DNA, 2544 bp, Artificial Sequence
  derived and/or modified sequence
atgcacctgctgggcccctggctgctgctgctggtgctggagtacctggcgttcagcgatagctccaagtgggtcttcgaacatcctgagaccctctacgcttgggaaggagcctgtgtgtggatcccttgtacataccgcgccctcgatggcgacctggaatcgttcatcctttttcacaatcccgagtataacaaaaatacaagtaagttcgacggcaccaggctatacgagtctactaaagacggcaaggtcccctccgaacagaaacgcgtgcagttcctgggcgacaagaacaaaaattgtaccctgtccatacaccctgtccatcttaacgacagcggacagctcggccttcgcatggaaagcaagacagagaagtggatggagagaatccatctcaacgtctccgagcggccattccccccccacatccaactcccgcccgaaattcaggagagccaggaggtgactctcacctgtcttcttaacttcagctgttatgggtatcccatccagctgcagtggttgctggagggtgtgccgatgcgacaagctgcagtgacgagcaccagcctaaccataaaaagcgtttttacacggagcgagttaaaattctctcctcagtggtcccaccatggaaaaattgtgacatgtcagctgcaggacgcagacgggaagtttttgtccaatgataccgtgcagctgaacgtcaagcacacacctaaactggagatcaaagtgacaccctccgacgctatcgtgagggagggagattctgtcaccatgacctgcgaagtgtcaagctcaaaccctgagtacacaacagtgagctggctgaaagatggtacctctctcaaaaaacaaaatactttcaccttgaacctgcgcgaagttacgaaggatcagagcggcaaatactgttgtcaggtaagcaacgacgtcggccctgggcggtctgaggaagtttttctgcaggtgcaatacgctccagagccaagcactgtgcagatattgcactcccctgcagtcgagggctctcaggtggagttcttatgcatgagtctggctaaccccctgcccactaattacacctggtaccacaacggcaaggagatgcaggggcgcactgaggagaaagtccacattcctaagatcctgccttggcacgcagggacctattcttgcgtggccgagaatattcttggtactggacaacgcgggccaggtgctgaactggacgtgcagtacccgccgaagaaagttaccaccgtcatccagaatcccatgcctatcagagaaggcgatacggtcacccttagttgtaactataacagcagtaatccttcagtcaccagatacgaatggaagccgcacggagcctgggaggaaccgagcctgggagtacttaagattcaaaacgtgggatgggacaacacaacaattgcctgcgctgcctgcaactcctggtgttcctgggcctcacccgtggctctcaacgtgcagtacgccccccgcgacgtgcgggtcagaaagatcaaacctcttagtgagattcacagcggtaactccgtaagtctccagtgcgatttctccagctcccacccaaaagaagtgcaattcttctgggagaagaacggtcgactcctgggaaaggaatcccaactgaatttcgattcaatctccccagaggacgccgggagctactcctgctgggttaacaattctatcggacaaactgcaagcaaagcatggactctggaggtcctgtatgctcctcgacggctaagagtgtctatgagtcctggggatcaggtaatggagggcaaatctgccaccctgacttgtgagtcagacgccaaccctcctgtaagccactacacctggttcgattggaacaatcagagtctgccttaccacagtcagaagctgagactcgaacctgtgaaagttcagcactctggagcatattggtgccagggcacaaattccgtgggcaaaggccgctctccactctcaactctgaccgtctactacagccctgagacaataggtcgaagagtagctgttggtctggggagctgcctggcgattctgattcttgccatctgcggcctgaaactacagaggcgatggaagcgaacacaaagtcagcagggactacaagaaaatagctccgggcagtccttctttgtaagaaacaagaaagttcggcgagcccctctctcggaaggaccacacagcctggggtgttacaaccctatgatggaagatgggattagctacaccacactcagatttccagagatgaacatccctcgcaccggcgatgccgaatcaagtgagatgcaacgacctccaccagactgtgatgacaccgtgacgtacagtgcactccacaagagacaggttggagattatgagaacgtcattcctgactttccggaagacgaaggcattcactattcagagctgatccagtttggggtcggcgagcgtcctcaggcacaggagaacgtagactacgtgatactcaagcattag

SEQ ID NO: 120903 - DNA, 1989 bp, Artificial Sequence
  derived and/or modified sequence
atggagagcaagaccgagaagtggatggagcggatccacctgaacgttagtgagagaccatttccaccgcatatccagttgcctccagagatacaggagtcccaggaggtgacattgacctgtctcctgaacttctcctgttatggttatcctatccagctgcagtggctccttgagggggtccctatgaggcaggccgctgtaacctctaccagtctgacaatcaaaagcgtgtttacccgttccgagctgaagttctctcctcagtggagtcaccacggaaaaattgttacctgccagctccaagacgccgacggaaagtttttatccaatgacactgtccagcttaacgtcaaacatacacctaagctggagattaaagtaacacccagtgatgctattgtgagagaaggtgattcagtgaccatgacatgcgaggttagttcaagcaaccccgagtatacaaccgttagttggttgaaggacggtacctccctgaagaaacagaatacctttactctaaatctccgtgaggttacaaaggaccagtccggtaagtactgttgccaggtctcaaatgacgtgggccctgggagatctgaggaggtgtttttgcaggtgcagtatgcccccgagccatcaacggtccaaatcttgcactcacccgcggttgaaggaagccaggtcgaatttctctgcatgtccctggctaatccgctacccaccaactacacctggtaccacaacggaaaagagatgcagggtagaacggaggaaaaggtgcacatcccgaagatactgccttggcacgccggcacatactcctgtgtggctgagaacatcctgggtactgggcagaggggccctggggccgaacttgacgtccagtatccacctaaaaaagttacaacagtcatccaaaaccccatgccaattagggagggcgataccgtgaccctgagctgtaactacaattccagcaatccgtctgtgacccggtacgaatggaaaccgcacggcgcttgggaagaaccaagtctgggggtgctgaaaatccagaatgtgggatgggacaataccacaattgcatgtgccgcttgcaacagctggtgtagctgggcgtctcccgtggcgctgaacgtgcaatacgcaccgagagatgtgcgagttagaaaaatcaaacccctgtccgagatccatagtggcaactcggtgagtctccagtgtgatttctcttcaagccatccaaaggaggtgcagtttttctgggagaaaaatggaagactgctcggaaaggagtcccagctaaacttcgattctattagtccagaggacgcgggctcttactcgtgctgggtcaacaatagcataggccagaccgccagtaaagcctggaccctcgaagtgctatacgctccgcggcgcctccgggtatcaatgagcccaggagatcaggtgatggaaggcaagagtgccactctgacatgtgagtcggacgccaatccccccgtttcccactacacatggtttgattggaacaaccagtccctcccttaccatagccagaaactgcggctggagcccgtgaaggtgcagcactctggggcatattggtgccaaggcactaacagcgtgggcaaagggcggtctcccttatccactctcacagtgtactattccccggaaaccatagggcgccgggtggccgttgggcttggcagttgcctggccattttgattctggccatttgcggcctcaagctgcaacgaagagatgcggagtcttctgagatgcaaagaccaccccctgactgcgacgataccgtgacgtacagcgcactgcataaacgccaggtaggggattatgagaacgtaatcccggacttcccagaagacgagggcattcactactccgagctgatccagttcggcgtgggggagagaccccaggcccaggaaaacgtggattacgtgatactgaagcattag

SEQ ID NO: 120904 - DNA, 2544 bp, Artificial Sequence
  derived and/or modified sequence
atgcatctgctgggtccatggctactgctgctcgttctggaatatctcgcattctcagattctagtaaatgggtgtttgagcaccctgagactctgtacgcttgggagggtgcttgcgtctggattccatgcacttatcgcgcactggacggggatctcgagtcttttattctttttcataacccagagtacaacaaaaatacgagcaagtttgacggaacacggctgtatgagtcgacaaaagatggcaaggtgccctctgagcagaagagggtgcagttcctgggggataagaataagaactgtaccctgtctatccacccggtgcatctgaacgacagcggccaactgggactccgaatggaaagcaaaacagagaagtggatggagcgaatccatttaaacgtgtccgagcgccctttcccgcctcacatccagctaccgccagagatccaagagagccaagaagtgactctgacatgccttcttaatttctcctgctacggatacccgattcagttgcaatggctgttggagggagtgccgatgcgccaggccgcagtgactagcacctcactgactatcaagagcgtcttcactcggagtgagctgaaatttagcccacagtggtcccaccacggcaagatcgtaacatgccagcttcaggatgcggatggaaagttccttagcaatgacaccgtgcagcttaacgtgaagcacacccccaagctcgagattaaggtcaccccatccgacgccatagttagagagggagactcagtaacaatgacctgcgaggtatcatcaagcaaccccgagtacaccaccgtgagctggcttaaggatggcaccagcctaaaaaagcagaacacctttacactgaacttgcgagaggtaacaaaggatcaaagtggcaagtactgctgtcaagtgtctaacgatgtggggccaggcaggtctgaagaagtgttccttcaggtccagtatgcgccagagccctccacagttcagatactccactcgcccgctgttgagggaagccaggtagaatttctatgcatgtctctcgcaaacccactccccactaattatacatggtatcataacggaaaggagatgcagggtcgaaccgaggagaaggtccatattcccaaaattctgccgtggcacgcgggaacctattcgtgtgtggcagaaaacatccttggcaccggacagcgaggtcccggagccgagctggacgtccagtatccacctaaaaaagtaactacagtcattcagaatccgatgcctatccgagaaggtgatacagtgacactgtcttgtaactacaattctagtaatccaagcgtgacacggtatgaatggaaaccccatggggcttgggaggaaccatcactgggcgtgttgaagatacagaatgtaggatgggataatactaccatcgcctgcgcggcatgcaatagctggtgttcctgggcatctcccgtggcactgaatgtgcaatatgccccaagggatgtgagagtaagaaaaattaagccattatcagagatacactccgggaactcagtgagcctccagtgcgacttctcctcatctcatccaaaggaggtccagttcttctgggagaagaacggcagactcctaggaaaagaaagccagctgaacttcgatagtattagccccgaggatgcagggtcctactcttgctgggtgaacaatagcatcgggcaaaccgccagtaaagcgtggaccttggaggtcctctatgcgcctagaagactaagggtgagcatgagccctggcgatcaggtcatggagggcaagtcagccaccctgacttgcgaatcagacgctaacccccctgtcagccattacacctggttcgactggaataatcagtccctgccgtaccatagccagaaattgagacttgaaccagtgaaggtgcaacacagcggagcttattggtgccaggggaccaacagcgtaggcaaggggcgttccccattgagcacacttaccgtgtattactcacccgagacgatcggtcggagagtggccgtcggtctgggaagctgcctagccatcttgatcctcgccatctgtggtctcaaactgcaacgaaggtggaaaagaactcagtcccagcagggcctacaagaaaacagtagtggccagtctttcttcgtgcggaacaagaaggttcgacgtgctccgctctcagaggggccacatagtcttggttgttataaccccatgatggaagatgggatatcctataccactttgcgatttcctgaaatgaatattcctcgaacgggcgatgccgagtcctcggagatgcagcggcctcctcctgactgcgatgatacagttacctattcagcactccacaagcggcaggtgggagattatgaaaacgtgatcccagatttccccgaagatgaggggatccattactccgagctgattcaattcggtgttggcgaacgaccacaggcgcaggaaaacgtcgattatgtgattctcaagcactag

SEQ ID NO: 120905 - DNA, 1989 bp, Artificial Sequence
  derived and/or modified sequence
atggagagcaagaccgagaaatggatggagcgcattcatctaaacgtgtctgagcgcccattcccacctcacattcagctgcctcccgagatccaggaaagtcaggaggtgacacttacctgcttgctgaatttttcttgctatggctatccaatccagttgcaatggttgcttgaaggggtgccaatgaggcaggcggcagttactagtacaagcctgacaattaagtcagtcttcacaaggagcgagctcaagtttagtccccagtggagccatcacggtaaaatcgtgacgtgccaactgcaggacgcagacggaaagtttctcagtaatgacactgtgcagttgaacgttaaacatacccccaaattagaaatcaaagtgacacctagcgatgctatcgtgcgggaaggagactcagtcactatgacctgcgaggtcagctcttccaatccagaatacacaacagtgtcatggttgaaggatggaacctccctgaagaagcagaacaccttcaccctgaacctccgagaggtgacaaaagaccagtctggcaagtattgctgccaagtgtcgaacgacgtcggacctggtcgctcagaagaagtgttcctgcaggtacagtacgcccctgagccttcgacagttcagatcctccatagtcctgctgtggagggtagtcaggtcgagttcttgtgcatgtccttggctaaccctttgcccactaactacacatggtaccataatggcaaggagatgcagggcaggacagaggagaaagttcacataccaaagatcctgccatggcatgccggtacttattcttgtgtggcagaaaatatcttggggacaggccagcgtggtccgggagctgagcttgatgtgcagtatcccccaaagaaggtcaccaccgtcatacagaatcccatgcctatccgggaaggtgatacggtgacactgagctgcaactataattcatctaatccctccgtcacgcggtacgaatggaaacctcatggagcatgggaggagccatcgctaggcgtgctgaaaatacagaatgtgggctgggacaacacaactattgcctgcgcagcatgcaacagttggtgttcatgggcatcacctgtagccctgaatgtccagtatgcccctagggatgtgcgagtgcggaagattaaaccgctcagcgagatccattccgggaatagcgtgtcgctccagtgcgactttagctcaagccatcccaaagaggtccaatttttctgggagaaaaacggacggttgctcggaaaggagagtcagctaaattttgatagcatttcacctgaggacgccggatcctacagttgctgggtgaataattccattggacagacggcatccaaggcttggacactggaggttctgtatgctcctaggagactgagggtgtctatgtccccgggtgaccaggtgatggaaggcaagagtgcgactctaacttgtgaaagtgatgcgaatcctccggtgtcgcactatacctggtttgattggaacaatcaaagcttaccgtatcactctcagaagttgcgcctggaaccagtcaaagtacagcactctggggcttactggtgccagggcaccaacagcgtggggaagggcaggtctcccctcagcacactcacggtgtactactcccctgagaccatcggtagaagggttgccgtgggcttgggatcctgcctggccatcctgattctggcaatttgtgggcttaagttgcagcggagggacgcggaaagctccgaaatgcagcgtcctcctccagactgcgacgatacggtgacatactctgccctccacaaacgccaggtgggagactatgaaaatgtcatccccgattttcccgaggacgaaggtatacattattcggaacttattcaatttggagtaggagaaagaccacaggcacaggaaaatgtcgactacgtaatcttgaagcactag

SEQ ID NO: 120906 - DNA, 2544 bp, Artificial Sequence
  derived and/or modified sequence
atgcacctacttggcccttggttactactcctcgtgctcgagtacctcgcatttagtgattctagcaaatgggtattcgaacacccagaaacactatatgcctgggagggcgcctgtgtatggatcccgtgtacatatcgagctttagatggcgatctagagagttttattttattccacaatccagagtacaacaagaataccagcaaatttgacggcacccggctttacgagtcaacaaaggacggcaaggttcccagtgagcagaagcgcgtccagttcttgggagacaagaacaaaaactgcactctgtcaatccaccccgtccatctgaacgactcagggcagctaggacttcggatggagagtaaaaccgagaaatggatggagcgcatccaccttaatgtttcagaaaggccttttccccctcatattcagcttccccccgaaatacaggagtctcaggaggtcaccttgacctgcctgctcaactttagctgttacggctatccgatccagttacagtggctcctggaaggtgtccctatgagacaggccgccgtgacgtcgacttcacttacgataaaatccgtgttcacccgaagcgaactgaagttctccccacagtggtcacaccatggcaagatcgttacctgtcagcttcaggatgccgacggcaagtttttgtccaatgataccgttcagctgaacgtcaaacatacccctaagctcgagattaaagtaaccccttcagatgccatcgtgagggagggagatagtgtaactatgacatgcgaagtctcatcctccaaccccgaatacaccacggtctcttggcttaaagacggaacttcactcaagaagcagaatacctttaccctgaatctccgagaggttactaaggatcaatctggaaagtactgctgccaggtttccaatgacgtcggtcccggtagatccgaggaggtcttcttgcaggtgcagtacgcgcccgagccatctacagtccaaatccttcatagtccagccgtggaggggtctcaggtcgaatttttatgcatgtccttggccaacccactgcctaccaattacacctggtaccataacggaaaagagatgcagggccggacagaagagaaagtgcatataccaaaaattttgccctggcacgccgggacgtattcctgcgttgccgaaaacatcctggggactggtcagaggggcccgggggccgaactggatgtgcagtacccaccgaaaaaagtgactacagtcattcagaatccgatgccgatccgagaaggagacactgttaccttgtcttgcaactacaactcctcaaacccctccgtcacccggtacgagtggaagccgcatggcgcatgggaagagccctccctgggagttctgaagatccaaaatgtggggtgggataacactactatcgcctgcgccgcatgtaacagctggtgctcgtgggcctctcccgtggctctgaacgtgcagtatgccccccgggacgtgagagtgagaaagatcaagcccctttcagagattcactccggcaactccgtgtccttacagtgtgacttttcaagctctcatccgaaggaagtgcaattcttttgggagaagaatggacggttattgggaaaggaatcccaacttaattttgattctatatctcctgaggatgcaggcagttacagctgctgggtgaacaattcaatagggcaaacagcgagtaaggcctggactctggaagtactgtatgcaccaagacgactgcgagtgtcaatgtccccaggggatcaagtcatggagggaaagtcagccacgctaacgtgcgaatcagatgcaaacccgccagtttcccattatacctggtttgattggaacaatcagagcctgccttaccacagccagaaactgaggttggaaccggtgaaagtccagcattccggtgcctactggtgccagggcactaacagtgttggcaaaggacggtcccccctgagcaccctgaccgtatattacagccctgagactatcggccggcgcgtggccgtgggactgggctcctgcctggccattcttatcttggctatctgtggtctcaagcttcagaggaggtggaaacgcacgcagtctcaacagggtctgcaagaaaattccagtggacagtctttctttgtgagaaacaagaaggtacgcagggcgccactgtccgagggtccgcactcccttggctgctacaaccccatgatggaagacggtattagttatacgacattaagattccctgagatgaatattcctcgaacaggtgatgccgaaagcagcgaaatgcaaaggccaccgcctgattgcgatgacaccgttacgtactccgcactccacaagaggcaagttggagattatgagaatgtgattcctgatttccccgaggatgagggtattcactatagcgagctcatccagttcggcgtaggggagagaccacaagctcaggaaaacgttgactacgtcattctcaagcactag

SEQ ID NO: 120907 - DNA, 2544 bp, Artificial Sequence
  derived and/or modified sequence
atgcatctgctcgggccatggctgttactactggttctggagtatttagctttctctgattcttccaagtgggtcttcgagcacccagaaacgctgtacgcttgggagggcgcttgcgtgtggatcccatgcacttacagggcattagacggcgacctggagagcttcattctgtttcataatccggagtacaacaagaatacctctaagtttgatggaaccagattatatgagtctacaaaggatggaaaagtgcccagcgaacagaaacgggttcagttcctcggggataagaacaaaaattgtacattgtcgatccatcccgtgcaccttaacgattccggacaactcggtctacgcatggagagtaaaacagaaaagtggatggagcggatacatcttaacgtctccgaaagaccttttcccccccatatccaacttcctccggaaatccaggagagccaggaggtaacattgacatgtcttcttaatttttcctgttatggttaccccatccagcttcagtggttactcgaaggcgtgccaatgagacaagcagcagtgacttccacctctctgacaattaagtctgtctttacccgatccgaactgaagttttccccccaatggtctcatcacggcaaaatcgtcacttgccagctgcaagatgcagacggaaaatttctctccaatgatacagtacagttaaacgtcaaacatactccaaagcttgaaattaaggtgacacccagcgatgctatcgttcgagagggcgacagtgtgaccatgacatgcgaggtcagctcttccaacccagaatatacaacggtgtcttggctgaaggatgggacctccctcaagaaacagaatacttttacgctgaatttaagagaggtgaccaaagatcagtcggggaagtattgctgccaagtgtctaatgacgtcggacccggtcgctcagaagaggttttccttcaagtgcagtacgcgccagagccgagcacagtgcagattctacacagccctgctgttgaagggtctcaggtcgagtttttgtgtatgtccctcgctaatcctctcccaactaactacacatggtatcacaacggtaaagagatgcaaggacgcaccgaggaaaaagtccacatccctaagatcctgccctggcacgcgggtacatatagctgtgttgctgagaacattctaggcaccggacaacgcgggcctggagctgaactcgatgtacagtatcctccgaaaaaggtgacgacagtgatccagaatccaatgccaatacgtgagggagatacagtaaccttgtcatgtaactataatagctccaacccctccgttactcgatacgagtggaaacctcatggcgcttgggaggagccaagtttgggcgtgcttaaaatccagaacgtaggatgggataatactacgatcgcctgcgcagcctgtaattcttggtgcagctgggcatctcccgttgctctgaacgtgcagtacgcacctagagatgtgagggtcagaaaaattaagccactgtcagaaatccatagtgggaatagcgtctcgctgcaatgcgattttagttcctcccatcctaaagaagtgcagttcttctgggaaaaaaatggccgtctccttggtaaagaatctcagctaaacttcgattctatcagccccgaagacgccggatcctactcttgctgggtcaataactccattggccagactgcttctaaagcctggaccctggaagttttatacgccccccgtcgactccgagtgtctatgagtcccggcgatcaagtgatggaaggtaaatctgcaacccttacttgcgagtctgacgcaaacccaccggtgtcacactatacatggttcgattggaacaatcagagcttaccataccacagccagaaactgcgtctcgaacccgtaaaggtgcaacactccggtgcttactggtgtcaagggaccaattctgtaggcaaaggaagatcccccttgtccaccttaactgtctattactcaccagagaccattggccgacgtgtcgctgttggcctagggtcatgcctggctattctgatattggctatatgtggcctcaaactgcagcggcggtggaagcgaacccagagccagcagggcctccaggaaaattcctctggtcagtcattcttcgttaggaataagaaagtacggcgcgctcctctctcagaaggaccacattctttaggctgttacaaccctatgatggaagatggtatctcatacacaacactgaggtttccagagatgaacatcccccgaaccggagatgctgaatcctccgagatgcagcgaccacccccagattgtgatgacactgtaacctactctgccctgcataagagacaagttggcgattatgaaaatgtgataccagactttcccgaggacgaaggtattcactactctgagctcatccaattcggcgtgggcgaaagaccacaggcacaggaaaatgtagattacgtgatccttaaacattag

SEQ ID NO: 120908 - DNA, 3286 bp, Artificial Sequence
  derived and/or modified sequence
acttctccttttgctctcagatgctgccagggtccctgaagagggaagacacgcggaaacaggcttgcacccagacacgacaccatgcatctcctcggcccctggctcctgctcctggttctagaatacttggctttctctgactcaagtaaatgggtttttgagcaccctgaaaccctctacgcctgggagggggcctgcgtctggatcccctgcacctacagagccctagatggtgacctggaaagcttcatcctgttccacaatcctgagtataacaagaacacctcgaagtttgatgggacaagactctatgaaagcacaaaggatgggaaggttccttctgagcagaaaagggtgcaattcctgggagacaagaataagaactgcacactgagtatccacccggtgcacctcaatgacagtggtcagctggggctgaggatggagtccaagactgagaaatggatggaacgaatacacctcaatgtctctgaaaggccttttccacctcatatccagctccctccagaaattcaagagtcccaggaagtcactctgacctgcttgctgaatttctcctgctatgggtatccgatccaattgcagtggctcctagagggggttccaatgaggcaggctgctgtcacctcgacctccttgaccatcaagtctgtcttcacccggagcgagctcaagttctccccacagtggagtcaccatgggaagattgtgacctgccagcttcaggatgcagatgggaagttcctctccaatgacacggtgcagctgaacgtgaagcacaccccgaagttggagatcaaggtcactcccagtgatgccatagtgagggagggggactctgtgaccatgacctgcgaggtcagcagcagcaacccggagtacacgacggtatcctggctcaaggatgggacctcgctgaagaagcagaatacattcacgctaaacctgcgcgaagtgaccaaggaccagagtgggaagtactgctgtcaggtctccaatgacgtgggcccgggaaggtcggaagaagtgttcctgcaagtgcagtatgccccggaaccttccacggttcagatcctccactcaccggctgtggagggaagtcaagtcgagtttctttgcatgtcactggccaatcctcttccaacaaattacacgtggtaccacaatgggaaagaaatgcagggaaggacagaggagaaagtccacatcccaaagatcctcccctggcacgctgggacttattcctgtgtggcagaaaacattcttggtactggacagaggggcccgggagctgagctggatgtccagtatcctcccaagaaggtgaccacagtgattcaaaaccccatgccgattcgagaaggagacacagtgaccctttcctgtaactacaattccagtaaccccagtgttacccggtatgaatggaaaccccatggcgcctgggaggagccatcgcttggggtgctgaagatccaaaacgttggctgggacaacacaaccatcgcctgcgcagcttgtaatagttggtgctcgtgggcctcccctgtcgccctgaatgtccagtatgccccccgagacgtgagggtccggaaaatcaagcccctttccgagattcactctggaaactcggtcagcctccaatgtgacttctcaagcagccaccccaaagaagtccagttcttctgggagaaaaatggcaggcttctggggaaagaaagccagctgaattttgactccatctccccagaagatgctgggagttacagctgctgggtgaacaactccataggacagacagcgtccaaggcctggacacttgaagtgctgtatgcacccaggaggctgcgtgtgtccatgagcccgggggaccaagtgatggaggggaagagtgcaaccctgacctgtgagagcgacgccaaccctcccgtctcccactacacctggtttgactggaataaccaaagcctcccctaccacagccagaagctgagattggagccggtgaaggtccagcactcgggtgcctactggtgccaggggaccaacagtgtgggcaagggccgttcgcctctcagcaccctcaccgtctactatagcccggagaccatcggcaggcgagtggctgtgggactcgggtcctgcctcgccatcctcatcctggcaatctgtgggctcaagctccagcgacgttggaagaggacacagagccagcaggggcttcaggagaattccagcggccagagcttctttgtgaggaataaaaaggttagaagggcccccctctctgaaggcccccactccctgggatgctacaatccaatgatggaagatggcattagctacaccaccctgcgctttcccgagatgaacataccacgaactggagatgcagagtcctcagagatgcagagacctcccccggactgcgatgacacggtcacttattcagcattgcacaagcgccaagtgggcgactatgagaacgtcattccagattttccagaagatgaggggattcattactcagagctgatccagtttggggtcggggagcggcctcaggcacaagaaaatgtggactatgtgatcctcaaacattgacactggatgggctgcagcagaggcactgggggcagcgggggccagggaagtccccgagtttccccagacaccgccacatggcttcctcctgcgcgcatgtgcgcacacacacacacacacgcacacacacacacacacactcactgcggagaaccttgtgcctggctcagagccagtctttttggtgagggtaaccccaaacctccaaaactcctgcccctgttctcttccactctccttgctacccagaaatccatctaaatacctgccctgacatgcacacctccccctgcccccaccacggccactggccatctccacccccagctgcttgtgtccctcctgggatctgctcgtcatcatttttccttcccttctccatctctctggccctctacccctgatctgacatccccactcacgaatattatgcccagtttctgcctctgagggaaagcccagaaaaggacagaaacgaagtagaaaggggcccagtcctggcctggcttctcctttggaagtgaggcattgcacagggagacgtacgtatcagcggccccttgactctggggactccgggtttgagatggacacactggtgtggattaacctgccagggagacagagctcacaataaaaatggctcagatgccacttc

SEQ ID NO: 120909 - DNA, 3084 bp, Artificial Sequence
  derived and/or modified sequence
cttttgctctcagatgctgccagggtccctgaagagggaagacacgcggaaacaggcttgcacccagacacgacaccatgcatctcctcggcccctggctcctgctcctggttctagaatacttggctttctctgactcaagtaaatgggtttttgagcaccctgaaaccctctacgcctgggagggggcctgcgtctggatcccctgcacctacagagccctagatggtgacctggaaagcttcatcctgttccacaatcctgagtataacaagaacacctcgaagtttgatgggacaagactctatgaaagcacaaaggatgggaaggttccttctgagcagaaaagggtgcaattcctgggagacaagaataagaactgcacactgagtatccacccggtgcacctcaatgacagtggtcagctggggctgaggatggagtccaagactgagaaatggatggaacgaatacacctcaatgtctctgaaaggccttttccacctcatatccagctccctccagaaattcaagagtcccaggaagtcactctgacctgcttgctgaatttctcctgctatgggtatccgatccaattgcagtggctcctagagggggttccaatgaggcaggctgctgtcacctcgacctccttgaccatcaagtctgtcttcacccggagcgagctcaagttctccccacagtggagtcaccatgggaagattgtgacctgccagcttcaggatgcagatgggaagttcctctccaatgacacggtgcagctgaacgtgaagcacaccccgaagttggagatcaaggtcactcccagtgatgccatagtgagggagggggactctgtgaccatgacctgcgaggtcagcagcagcaacccggagtacacgacggtatcctggctcaaggatgggacctcgctgaagaagcagaatacattcacgctaaacctgcgcgaagtgaccaaggaccagagtgggaagtactgctgtcaggtctccaatgacgtgggcccgggaaggtcggaagaagtgttcctgcaagtgcagtatgccccggaaccttccacggttcagatcctccactcaccggctgtggagggaagtcaagtcgagtttctttgcatgtcactggccaatcctcttccaacaaattacacgtggtaccacaatgggaaagaaatgcagggaaggacagaggagaaagtccacatcccaaagatcctcccctggcacgctgggacttattcctgtgtggcagaaaacattcttggtactggacagaggggcccgggagctgagctggatgtccagtatcctcccaagaaggtgaccacagtgattcaaaaccccatgccgattcgagaaggagacacagtgaccctttcctgtaactacaattccagtaaccccagtgttacccggtatgaatggaaaccccatggcgcctgggaggagccatcgcttggggtgctgaagatccaaaacgttggctgggacaacacaaccatcgcctgcgcagcttgtaatagttggtgctcgtgggcctcccctgtcgccctgaatgtccagtatgccccccgagacgtgagggtccggaaaatcaagcccctttccgagattcactctggaaactcggtcagcctccaatgtgacttctcaagcagccaccccaaagaagtccagttcttctgggagaaaaatggcaggcttctggggaaagaaagccagctgaattttgactccatctccccagaagatgctgggagttacagctgctgggtgaacaactccataggacagacagcgtccaaggcctggacacttgaagtgctgtatgcacccaggaggctgcgtgtgtccatgagcccgggggaccaagtgatggaggggaagagtgcaaccctgacctgtgagagcgacgccaaccctcccgtctcccactacacctggtttgactggaataaccaaagcctcccctaccacagccagaagctgagattggagccggtgaaggtccagcactcgggtgcctactggtgccaggggaccaacagtgtgggcaagggccgttcgcctctcagcaccctcaccgtctactatagcccggagaccatcggcaggcgagtggctgtgggactcgggtcctgcctcgccatcctcatcctggcaatctgtgggctcaagctccagcgacgagatgcagagtcctcagagatgcagagacctcccccggactgcgatgacacggtcacttattcagcattgcacaagcgccaagtgggcgactatgagaacgtcattccagattttccagaagatgaggggattcattactcagagctgatccagtttggggtcggggagcggcctcaggcacaagaaaatgtggactatgtgatcctcaaacattgacactggatgggctgcagcagaggcactgggggcagcgggggccagggaagtccccgagtttccccagacaccgccacatggcttcctcctgcgcgcatgtgcgcacacacacacacacacgcacacacacacacacacactcactgcggagaaccttgtgcctggctcagagccagtctttttggtgagggtaaccccaaacctccaaaactcctgcccctgttctcttccactctccttgctacccagaaatccatctaaatacctgccctgacatgcacacctccccctgcccccaccacggccactggccatctccacccccagctgcttgtgtccctcctgggatctgctcgtcatcatttttccttcccttctccatctctctggccctctacccctgatctgacatccccactcacgaatattatgcccagtttctgcctctgagggaaagcccagaaaaggacagaaacgaagtagaaaggggcccagtcctggcctggcttctcctttggaagtgaggcattgcacagggagacgtacgtatcagcggccccttgactctggggactccgggtttgagatggacacactggtgtggattaacctgccagggagacagagctcacaataaaaatggctcagatgccacttc

SEQ ID NO: 120910 - DNA, 2544 bp, Artificial Sequence
  derived and/or modified sequence
atgcacctgctgggcccctggctgctgctgctggtgctggagtacctggccttcagcgacagcagcaagtgggtgttcgagcaccccgagaccctgtacgcctgggagggcgcctgcgtgtggatcccctgcacctacagagccctggacggcgacctggagagcttcatcctgttccacaaccccgagtacaacaagaacaccagcaagttcgacggcaccagactgtacgagagcaccaaggacggcaaggtgcccagcgagcagaagagagtgcagttcctgggcgacaagaacaagaactgcaccctgagcatccaccccgtgcacctgaacgacagcggccagctgggcctgagaatggagagcaagaccgagaagtggatggagagaatccacctgaacgtgagcgagagacccttccccccccacatccagctgccccccgagatccaggagagccaggaggtgaccctgacctgcctgctgaacttcagctgctacggctaccccatccagctgcagtggctgctggagggcgtgcccatgagacaggccgccgtgaccagcaccagcctgaccatcaagagcgtgttcaccagaagcgagctgaagttcagcccccagtggagccaccacggcaagatcgtgacctgccagctgcaggacgccgacggcaagttcctgagcaacgacaccgtgcagctgaacgtgaagcacacccccaagctggagatcaaggtgacccccagcgacgccatcgtgagagagggcgacagcgtgaccatgacctgcgaggtgagcagcagcaaccccgagtacaccaccgtgagctggctgaaggacggcaccagcctgaagaagcagaacaccttcaccctgaacctgagagaggtgaccaaggaccagagcggcaagtactgctgccaggtgagcaacgacgtgggccccggcagaagcgaggaggtgttcctgcaggtgcagtacgcccccgagcccagcaccgtgcagatcctgcacagccccgccgtggagggcagccaggtggagttcctgtgcatgagcctggccaaccccctgcccaccaactacacctggtaccacaacggcaaggagatgcagggcagaaccgaggagaaggtgcacatccccaagatcctgccctggcacgccggcacctacagctgcgtggccgagaacatcctgggcaccggccagagaggccccggcgccgagctggacgtgcagtacccccccaagaaggtgaccaccgtgatccagaaccccatgcccatcagagagggcgacaccgtgaccctgagctgcaactacaacagcagcaaccccagcgtgaccagatacgagtggaagccccacggcgcctgggaggagcccagcctgggcgtgctgaagatccagaacgtgggctgggacaacaccaccatcgcctgcgccgcctgcaacagctggtgcagctgggccagccccgtggccctgaacgtgcagtacgcccccagagacgtgagagtgagaaagatcaagcccctgagcgagatccacagcggcaacagcgtgagcctgcagtgcgacttcagcagcagccaccccaaggaggtgcagttcttctgggagaagaacggcagactgctgggcaaggagagccagctgaacttcgacagcatcagccccgaggacgccggcagctacagctgctgggtgaacaacagcatcggccagaccgccagcaaggcctggaccctggaggtgctgtacgcccccagaagactgagagtgagcatgagccccggcgaccaggtgatggagggcaagagcgccaccctgacctgcgagagcgacgccaacccccccgtgagccactacacctggttcgactggaacaaccagagcctgccctaccacagccagaagctgagactggagcccgtgaaggtgcagcacagcggcgcctactggtgccagggcaccaacagcgtgggcaagggcagaagccccctgagcaccctgaccgtgtactacagccccgagaccatcggcagaagagtggccgtgggcctgggcagctgcctggccatcctgatcctggccatctgcggcctgaagctgcagagaagatggaagagaacccagagccagcagggcctgcaggagaacagcagcggccagagcttcttcgtgagaaacaagaaggtgagaagagcccccctgagcgagggcccccacagcctgggctgctacaaccccatgatggaggacggcatcagctacaccaccctgagattccccgagatgaacatccccagaaccggcgacgccgagagcagcgagatgcagagacccccccccgactgcgacgacaccgtgacctacagcgccctgcacaagagacaggtgggcgactacgagaacgtgatccccgacttccccgaggacgagggcatccactacagcgagctgatccagttcggcgtgggcgagagaccccaggcccaggagaacgtggactacgtgatcctgaagcactag

SEQ ID NO: 120911 - DNA, 1989 bp, Artificial Sequence
  derived and/or modified sequence
atggagagcaagaccgagaagtggatggagagaatccacctgaacgtgagcgagagacccttccccccccacatccagctgccccccgagatccaggagagccaggaggtgaccctgacctgcctgctgaacttcagctgctacggctaccccatccagctgcagtggctgctggagggcgtgcccatgagacaggccgccgtgaccagcaccagcctgaccatcaagagcgtgttcaccagaagcgagctgaagttcagcccccagtggagccaccacggcaagatcgtgacctgccagctgcaggacgccgacggcaagttcctgagcaacgacaccgtgcagctgaacgtgaagcacacccccaagctggagatcaaggtgacccccagcgacgccatcgtgagagagggcgacagcgtgaccatgacctgcgaggtgagcagcagcaaccccgagtacaccaccgtgagctggctgaaggacggcaccagcctgaagaagcagaacaccttcaccctgaacctgagagaggtgaccaaggaccagagcggcaagtactgctgccaggtgagcaacgacgtgggccccggcagaagcgaggaggtgttcctgcaggtgcagtacgcccccgagcccagcaccgtgcagatcctgcacagccccgccgtggagggcagccaggtggagttcctgtgcatgagcctggccaaccccctgcccaccaactacacctggtaccacaacggcaaggagatgcagggcagaaccgaggagaaggtgcacatccccaagatcctgccctggcacgccggcacctacagctgcgtggccgagaacatcctgggcaccggccagagaggccccggcgccgagctggacgtgcagtacccccccaagaaggtgaccaccgtgatccagaaccccatgcccatcagagagggcgacaccgtgaccctgagctgcaactacaacagcagcaaccccagcgtgaccagatacgagtggaagccccacggcgcctgggaggagcccagcctgggcgtgctgaagatccagaacgtgggctgggacaacaccaccatcgcctgcgccgcctgcaacagctggtgcagctgggccagccccgtggccctgaacgtgcagtacgcccccagagacgtgagagtgagaaagatcaagcccctgagcgagatccacagcggcaacagcgtgagcctgcagtgcgacttcagcagcagccaccccaaggaggtgcagttcttctgggagaagaacggcagactgctgggcaaggagagccagctgaacttcgacagcatcagccccgaggacgccggcagctacagctgctgggtgaacaacagcatcggccagaccgccagcaaggcctggaccctggaggtgctgtacgcccccagaagactgagagtgagcatgagccccggcgaccaggtgatggagggcaagagcgccaccctgacctgcgagagcgacgccaacccccccgtgagccactacacctggttcgactggaacaaccagagcctgccctaccacagccagaagctgagactggagcccgtgaaggtgcagcacagcggcgcctactggtgccagggcaccaacagcgtgggcaagggcagaagccccctgagcaccctgaccgtgtactacagccccgagaccatcggcagaagagtggccgtgggcctgggcagctgcctggccatcctgatcctggccatctgcggcctgaagctgcagagaagagacgccgagagcagcgagatgcagagacccccccccgactgcgacgacaccgtgacctacagcgccctgcacaagagacaggtgggcgactacgagaacgtgatccccgacttccccgaggacgagggcatccactacagcgagctgatccagttcggcgtgggcgagagaccccaggcccaggagaacgtggactacgtgatcctgaagcactag

SEQ ID NO: 120912 - RNA, 2544 nt, Artificial Sequence
  derived and/or modified sequence
augcaccuacuuggcccuugguuacuacuccucgugcucgaguaccucgcauuuagugauucuagcaaauggguauucgaacacccagaaacacuauaugccugggagggcgccuguguauggaucccguguacauaucgagcuuuagauggcgaucuagagaguuuuauuuuauuccacaauccagaguacaacaagaauaccagcaaauuugacggcacccggcuuuacgagucaacaaaggacggcaagguucccagugagcagaagcgcguccaguucuugggagacaagaacaaaaacugcacucugucaauccaccccguccaucugaacgacucagggcagcuaggacuucggauggagaguaaaaccgagaaauggauggagcgcauccaccuuaauguuucagaaaggccuuuucccccucauauucagcuuccccccgaaauacaggagucucaggaggucaccuugaccugccugcucaacuuuagcuguuacggcuauccgauccaguuacaguggcuccuggaaggugucccuaugagacaggccgccgugacgucgacuucacuuacgauaaaauccguguucacccgaagcgaacugaaguucuccccacaguggucacaccauggcaagaucguuaccugucagcuucaggaugccgacggcaaguuuuuguccaaugauaccguucagcugaacgucaaacauaccccuaagcucgagauuaaaguaaccccuucagaugccaucgugagggagggagauaguguaacuaugacaugcgaagucucauccuccaaccccgaauacaccacggucucuuggcuuaaagacggaacuucacucaagaagcagaauaccuuuacccugaaucuccgagagguuacuaaggaucaaucuggaaaguacugcugccagguuuccaaugacgucggucccgguagauccgaggaggucuucuugcaggugcaguacgcgcccgagccaucuacaguccaaauccuucauaguccagccguggaggggucucaggucgaauuuuuaugcauguccuuggccaacccacugccuaccaauuacaccugguaccauaacggaaaagagaugcagggccggacagaagagaaagugcauauaccaaaaauuuugcccuggcacgccgggacguauuccugcguugccgaaaacauccuggggacuggucagaggggcccgggggccgaacuggaugugcaguacccaccgaaaaaagugacuacagucauucagaauccgaugccgauccgagaaggagacacuguuaccuugucuugcaacuacaacuccucaaaccccuccgucacccgguacgaguggaagccgcauggcgcaugggaagagcccucccugggaguucugaagauccaaaauguggggugggauaacacuacuaucgccugcgccgcauguaacagcuggugcucgugggccucucccguggcucugaacgugcaguaugccccccgggacgugagagugagaaagaucaagccccuuucagagauucacuccggcaacuccguguccuuacagugugacuuuucaagcucucauccgaaggaagugcaauucuuuugggagaagaauggacgguuauugggaaaggaaucccaacuuaauuuugauucuauaucuccugaggaugcaggcaguuacagcugcugggugaacaauucaauagggcaaacagcgaguaaggccuggacucuggaaguacuguaugcaccaagacgacugcgagugucaauguccccaggggaucaagucauggagggaaagucagccacgcuaacgugcgaaucagaugcaaacccgccaguuucccauuauaccugguuugauuggaacaaucagagccugccuuaccacagccagaaacugagguuggaaccggugaaaguccagcauuccggugccuacuggugccagggcacuaacaguguuggcaaaggacgguccccccugagcacccugaccguauauuacagcccugagacuaucggccggcgcguggccgugggacugggcuccugccuggccauucuuaucuuggcuaucuguggucucaagcuucagaggagguggaaacgcacgcagucucaacagggucugcaagaaaauuccaguggacagucuuucuuugugagaaacaagaagguacgcagggcgccacuguccgaggguccgcacucccuuggcugcuacaaccccaugauggaagacgguauuaguuauacgacauuaagauucccugagaugaauauuccucgaacaggugaugccgaaagcagcgaaaugcaaaggccaccgccugauugcgaugacaccguuacguacuccgcacuccacaagaggcaaguuggagauuaugagaaugugauuccugauuuccccgaggaugaggguauucacuauagcgagcucauccaguucggcguaggggagagaccacaagcucaggaaaacguugacuacgucauucucaagcacuag

SEQ ID NO: 120913 - RNA, 2544 nt, Artificial Sequence
  derived and/or modified sequence
augcaucugcucgggccauggcuguuacuacugguucuggaguauuuagcuuucucugauucuuccaagugggucuucgagcacccagaaacgcuguacgcuugggagggcgcuugcguguggaucccaugcacuuacagggcauuagacggcgaccuggagagcuucauucuguuucauaauccggaguacaacaagaauaccucuaaguuugauggaaccagauuauaugagucuacaaaggauggaaaagugcccagcgaacagaaacggguucaguuccucggggauaagaacaaaaauuguacauugucgauccaucccgugcaccuuaacgauuccggacaacucggucuacgcauggagaguaaaacagaaaaguggauggagcggauacaucuuaacgucuccgaaagaccuuuucccccccauauccaacuuccuccggaaauccaggagagccaggagguaacauugacaugucuucuuaauuuuuccuguuaugguuaccccauccagcuucagugguuacucgaaggcgugccaaugagacaagcagcagugacuuccaccucucugacaauuaagucugucuuuacccgauccgaacugaaguuuuccccccaauggucucaucacggcaaaaucgucacuugccagcugcaagaugcagacggaaaauuucucuccaaugauacaguacaguuaaacgucaaacauacuccaaagcuugaaauuaaggugacacccagcgaugcuaucguucgagagggcgacagugugaccaugacaugcgaggucagcucuuccaacccagaauauacaacggugucuuggcugaaggaugggaccucccucaagaaacagaauacuuuuacgcugaauuuaagagaggugaccaaagaucagucggggaaguauugcugccaagugucuaaugacgucggacccggucgcucagaagagguuuuccuucaagugcaguacgcgccagagccgagcacagugcagauucuacacagcccugcuguugaagggucucaggucgaguuuuuguguaugucccucgcuaauccucucccaacuaacuacacaugguaucacaacgguaaagagaugcaaggacgcaccgaggaaaaaguccacaucccuaagauccugcccuggcacgcggguacauauagcuguguugcugagaacauucuaggcaccggacaacgcgggccuggagcugaacucgauguacaguauccuccgaaaaaggugacgacagugauccagaauccaaugccaauacgugagggagauacaguaaccuugucauguaacuauaauagcuccaaccccuccguuacucgauacgaguggaaaccucauggcgcuugggaggagccaaguuugggcgugcuuaaaauccagaacguaggaugggauaauacuacgaucgccugcgcagccuguaauucuuggugcagcugggcaucucccguugcucugaacgugcaguacgcaccuagagaugugagggucagaaaaauuaagccacugucagaaauccauagugggaauagcgucucgcugcaaugcgauuuuaguuccucccauccuaaagaagugcaguucuucugggaaaaaaauggccgucuccuugguaaagaaucucagcuaaacuucgauucuaucagccccgaagacgccggauccuacucuugcugggucaauaacuccauuggccagacugcuucuaaagccuggacccuggaaguuuuauacgccccccgucgacuccgagugucuaugagucccggcgaucaagugauggaagguaaaucugcaacccuuacuugcgagucugacgcaaacccaccggugucacacuauacaugguucgauuggaacaaucagagcuuaccauaccacagccagaaacugcgucucgaacccguaaaggugcaacacuccggugcuuacuggugucaagggaccaauucuguaggcaaaggaagaucccccuuguccaccuuaacugucuauuacucaccagagaccauuggccgacgugucgcuguuggccuagggucaugccuggcuauucugauauuggcuauauguggccucaaacugcagcggcgguggaagcgaacccagagccagcagggccuccaggaaaauuccucuggucagucauucuucguuaggaauaagaaaguacggcgcgcuccucucucagaaggaccacauucuuuaggcuguuacaacccuaugauggaagaugguaucucauacacaacacugagguuuccagagaugaacaucccccgaaccggagaugcugaauccuccgagaugcagcgaccacccccagauugugaugacacuguaaccuacucugcccugcauaagagacaaguuggcgauuaugaaaaugugauaccagacuuucccgaggacgaagguauucacuacucugagcucauccaauucggcgugggcgaaagaccacaggcacaggaaaauguagauuacgugauccuuaaacauuag

SEQ ID NO: 120914 - protein, 328 aa, Artificial Sequence
  derived and/or modified sequence
MLVRRGARAGPRMPRGWTALCLLSLLPSGFMSLDNNGTATPELPTQGTFSNVSTNVSYQETTTPSTLGSTSLHPVSQHGNEATTNITETTVKFTSTSVITSVYGNTNSSVQSQTSVISTVFTTPANVSTPETTLKPSLSPGNVSDLSTTSTSLATSPTKPYTSSSPILSDIKAEIKCSGIREVKLTQGICLEQNKTSSCAEFKKDRGEGLARVLCGEEQADADAGAQVCSLLLAQSEVRPQCLLLVLANRTEISSKLQLMKKHQSDLKKLGILDFTEQDVASHQSYSQKTLIALVTSGALLAVLGITGYFLMNRRSWSPTGERLELEP

SEQ ID NO: 120915 - DNA, 987 bp, Artificial Sequence
  derived and/or modified sequence
atgctcgtgaggcggggcgctcgtgcgggccccaggatgccaaggggatggaccgctctttgcctgctgagtctgctgccatcaggattcatgtctctggacaacaatggcaccgccacaccggagctccccacccaaggtaccttcagtaatgtaagcacaaacgtcagttatcaggaaacaaccactccttcaaccttggggtccacatcgttgcaccccgtgagtcagcacggaaatgaggccacaactaatataactgagacaacggtgaagttcacctctacttccgtaatcactagcgtgtatggcaatacaaattcttcggtccagtcccagaccagcgtgatctccaccgtttttacgaccccagcaaatgtttcaactccggagactaccctgaagccttcactgtccccaggaaatgtgagtgacttatctacgacttccacgtctctcgccactagcccaaccaaaccttatacctctagctctcccattcttagcgacatcaaggcggagataaagtgctcaggaataagggaagttaagcttacgcaagggatatgcctcgaacagaataaaacctccagctgcgcagagttcaagaaggatagaggggagggactcgcacgtgtcctctgtggcgaggagcaggcggacgccgacgctggtgcgcaagtgtgctctctgctgctggcccaatcggaagtcaggccccagtgcttactcttggtattggccaataggactgaaatctcttccaagcttcagttaatgaagaaacaccagagcgacctcaagaaattgggaatcttagattttacggagcaagacgtcgcttcacatcaatcatatagtcagaagactctcatagccttagtgacgtccggcgccttgctcgcggttttgggtatcaccgggtattttcttatgaaccgcaggagttggtccccgaccggggagagactagagttggagccttag
